United States Patent Application Publication US 2005/0244851 A1 - sequence listing, part 83

SEQ ID NO: 3231915 - DNA, 25 bp, Homo sapien
tgcaccgctgttgcgctggctgaag

SEQ ID NO: 3231916 - DNA, 25 bp, Homo sapien
agttctgcatactggtcgtgtgcac

SEQ ID NO: 3231917 - DNA, 25 bp, Homo sapien
cgtgtgcaccgctgttgcgctggct

SEQ ID NO: 3231918 - DNA, 25 bp, Homo sapien
ctcctcctgtggagtctccatccag

SEQ ID NO: 3231919 - DNA, 25 bp, Homo sapien
agtctccatccaggaatccccttca

SEQ ID NO: 3231920 - DNA, 25 bp, Homo sapien
ctatatctcctcctgtggagtctcc

SEQ ID NO: 3231921 - DNA, 25 bp, Homo sapien
tccatccaggaatccccttcagtgg

SEQ ID NO: 3231922 - DNA, 25 bp, Homo sapien
ttaagctcaggaaaccccataatgt

SEQ ID NO: 3231923 - DNA, 25 bp, Homo sapien
aggccagtgactctctgtcctcaca

SEQ ID NO: 3231924 - DNA, 25 bp, Homo sapien
tcacaatccctccatgtacaaagct

SEQ ID NO: 3231925 - DNA, 25 bp, Homo sapien
taagcaatcctacagatgaccggaa

SEQ ID NO: 3231926 - DNA, 25 bp, Homo sapien
ctctctaaaatttgcaaagccttca

SEQ ID NO: 3231927 - DNA, 25 bp, Homo sapien
gagcaactatctacctgtgaagatc

SEQ ID NO: 3231928 - DNA, 25 bp, Homo sapien
gaactgttagtgcttgtagtggttg

SEQ ID NO: 3231929 - DNA, 25 bp, Homo sapien
agggtgagcaactatctacctgtga

SEQ ID NO: 3231930 - DNA, 25 bp, Homo sapien
tctgacactggagctctgctggtgg

SEQ ID NO: 3231931 - DNA, 25 bp, Homo sapien
cttctgacactggagctctgctggt

SEQ ID NO: 3231932 - DNA, 25 bp, Homo sapien
tggtgggttcccgtggttacagcca

SEQ ID NO: 3231933 - DNA, 25 bp, Homo sapien
cactggagctctgctggtgggttcc

SEQ ID NO: 3231934 - DNA, 25 bp, Homo sapien
gctgccccagtgcatgggatctggt

SEQ ID NO: 3231935 - DNA, 25 bp, Homo sapien
ctagctgccccagtgcatgggatct

SEQ ID NO: 3231936 - DNA, 25 bp, Homo sapien
tagctgccccagtgcatgggatctg

SEQ ID NO: 3231937 - DNA, 25 bp, Homo sapien
gccccagtgcatgggatctggtaaa

SEQ ID NO: 3231938 - DNA, 25 bp, Homo sapien
gatttccatttgagctgttctttcc

SEQ ID NO: 3231939 - DNA, 25 bp, Homo sapien
tccatttcggaattgcagaggtgtt

SEQ ID NO: 3231940 - DNA, 25 bp, Homo sapien
attagtccggacatctccaccaggc

SEQ ID NO: 3231941 - DNA, 25 bp, Homo sapien
caggctctgagtcttttcactatta

SEQ ID NO: 3231942 - DNA, 25 bp, Homo sapien
cagaattcattaagggctttcagtt

SEQ ID NO: 3231943 - DNA, 25 bp, Homo sapien
tcagttttgttctgccaatgaggat

SEQ ID NO: 3231944 - DNA, 25 bp, Homo sapien
atttctggcttgccaaaaggcatgc

SEQ ID NO: 3231945 - DNA, 25 bp, Homo sapien
taatttgacagtatgctgccacggt

SEQ ID NO: 3231946 - DNA, 25 bp, Homo sapien
ctggagagtatgcacaagattttgg

SEQ ID NO: 3231947 - DNA, 25 bp, Homo sapien
tggagagtatgcacaagattttggc

SEQ ID NO: 3231948 - DNA, 25 bp, Homo sapien
gagtatgcacaagattttggcttac

SEQ ID NO: 3231949 - DNA, 25 bp, Homo sapien
gagagtatgcacaagattttggctt

SEQ ID NO: 3231950 - DNA, 25 bp, Homo sapien
aagtctgaaatccacttctgcattt

SEQ ID NO: 3231951 - DNA, 25 bp, Homo sapien
tcagaagccaccttgatgaaacctt

SEQ ID NO: 3231952 - DNA, 25 bp, Homo sapien
agtctgaaatccacttctgcatttc

SEQ ID NO: 3231953 - DNA, 25 bp, Homo sapien
taaaatccactaggactgccttttg

SEQ ID NO: 3231954 - DNA, 25 bp, Homo sapien
aaactgctgctcagttggtatttcc

SEQ ID NO: 3231955 - DNA, 25 bp, Homo sapien
aattccaatgttcctaactgttgta

SEQ ID NO: 3231956 - DNA, 25 bp, Homo sapien
cctgaatgcaattccaatgttccta

SEQ ID NO: 3231957 - DNA, 25 bp, Homo sapien
atgcgccacctgtagtggccagatg

SEQ ID NO: 3231958 - DNA, 25 bp, Homo sapien
tgcgccacctgtagtggccagatga

SEQ ID NO: 3231959 - DNA, 25 bp, Homo sapien
catgcgccacctgtagtggccagat

SEQ ID NO: 3231960 - DNA, 25 bp, Homo sapien
tagtggccagatgaatgaacagcat

SEQ ID NO: 3231961 - DNA, 25 bp, Homo sapien
acattgtatgcatctaggacacaga

SEQ ID NO: 3231962 - DNA, 25 bp, Homo sapien
gccatatgctgtctttttaaggcaa

SEQ ID NO: 3231963 - DNA, 25 bp, Homo sapien
cagctgggctgtacatgaattgtga

SEQ ID NO: 3231964 - DNA, 25 bp, Homo sapien
tattgatgtgctaatacaaaggaag

SEQ ID NO: 3231965 - DNA, 25 bp, Homo sapien
ctgcttcacctaactcctctttacc

SEQ ID NO: 3231966 - DNA, 25 bp, Homo sapien
gcttcacctaactcctctttaccca

SEQ ID NO: 3231967 - DNA, 25 bp, Homo sapien
cttcacctaactcctctttacccat

SEQ ID NO: 3231968 - DNA, 25 bp, Homo sapien
tgcttcacctaactcctctttaccc

SEQ ID NO: 3231969 - DNA, 25 bp, Homo sapien
gatatggtctattctccgttacagg

SEQ ID NO: 3231970 - DNA, 25 bp, Homo sapien
ggaaacttgtactttatacaatgac

SEQ ID NO: 3231971 - DNA, 25 bp, Homo sapien
atggtctattctccgttacaggtaa

SEQ ID NO: 3231972 - DNA, 25 bp, Homo sapien
tgacaaatcctatactcctgatgtt

SEQ ID NO: 3231973 - DNA, 25 bp, Homo sapien
cagcagagcttgccgctgatcaagt

SEQ ID NO: 3231974 - DNA, 25 bp, Homo sapien
agcagagcttgccgctgatcaagta

SEQ ID NO: 3231975 - DNA, 25 bp, Homo sapien
acagcagagcttgccgctgatcaag

SEQ ID NO: 3231976 - DNA, 25 bp, Homo sapien
gcttcccttttcctgataactataa

SEQ ID NO: 3231977 - DNA, 25 bp, Homo sapien
tacagttatcatggcttcccttttc

SEQ ID NO: 3231978 - DNA, 25 bp, Homo sapien
caaataccttcaagataaccatatc

SEQ ID NO: 3231979 - DNA, 25 bp, Homo sapien
gagggatagagtattgtacagttat

SEQ ID NO: 3231980 - DNA, 25 bp, Homo sapien
tactcagatttatccaaggcctctt

SEQ ID NO: 3231981 - DNA, 25 bp, Homo sapien
gtggcctcgtactcagatttatcca

SEQ ID NO: 3231982 - DNA, 25 bp, Homo sapien
aggcctcttctcttcgcatatgtgg

SEQ ID NO: 3231983 - DNA, 25 bp, Homo sapien
aaggcctcttctcttcgcatatgtg

SEQ ID NO: 3231984 - DNA, 25 bp, Homo sapien
gggcttcagtatcaataagcctcat

SEQ ID NO: 3231985 - DNA, 25 bp, Homo sapien
gctaggaccatctattgcccggtgg

SEQ ID NO: 3231986 - DNA, 25 bp, Homo sapien
taggaccatctattgcccggtggat

SEQ ID NO: 3231987 - DNA, 25 bp, Homo sapien
ttaatttgggcttcagtatcaataa

SEQ ID NO: 3231988 - DNA, 25 bp, Homo sapien
tagacaacgtaagtggaagcctctt

SEQ ID NO: 3231989 - DNA, 25 bp, Homo sapien
catggtggattctattaacagactg

SEQ ID NO: 3231990 - DNA, 25 bp, Homo sapien
tcctttgctggtttaacctggcact

SEQ ID NO: 3231991 - DNA, 25 bp, Homo sapien
atattcagcatctacacaaagagac

SEQ ID NO: 3231992 - DNA, 25 bp, Homo sapien
tcacttaactattttctttgcacac

SEQ ID NO: 3231993 - DNA, 25 bp, Homo sapien
gagaatgtctggtgcttcactgatc

SEQ ID NO: 3231994 - DNA, 25 bp, Homo sapien
catacgaggagaagttccttgaagg

SEQ ID NO: 3231995 - DNA, 25 bp, Homo sapien
gatctatgcctatagttctgcaggc

SEQ ID NO: 3231996 - DNA, 25 bp, Homo sapien
gacggtagcccgtacatatccatga

SEQ ID NO: 3231997 - DNA, 25 bp, Homo sapien
cacgaccttcaacccccttgtctga

SEQ ID NO: 3231998 - DNA, 25 bp, Homo sapien
tgtcacgaccttcaacccccttgtc

SEQ ID NO: 3231999 - DNA, 25 bp, Homo sapien
actgtcttctgtcacgaccttcaac

SEQ ID NO: 3232000 - DNA, 25 bp, Homo sapien
ccactgtcttctgtcacgaccttca

SEQ ID NO: 3232001 - DNA, 25 bp, Homo sapien
tcactggatattgcgctgtgttttg

SEQ ID NO: 3232002 - DNA, 25 bp, Homo sapien
actggatattgcgctgtgttttgtt

SEQ ID NO: 3232003 - DNA, 25 bp, Homo sapien
ctggatattgcgctgtgttttgttc

SEQ ID NO: 3232004 - DNA, 25 bp, Homo sapien
cactggatattgcgctgtgttttgt

SEQ ID NO: 3232005 - DNA, 25 bp, Homo sapien
gtaagtagttgaataatgatcgttt

SEQ ID NO: 3232006 - DNA, 25 bp, Homo sapien
tgggtatgccatcacctggaggcat

SEQ ID NO: 3232007 - DNA, 25 bp, Homo sapien
taatgatcgttttcatcgaagtctc

SEQ ID NO: 3232008 - DNA, 25 bp, Homo sapien
acaaacacaatcactgaacagtaag

SEQ ID NO: 3232009 - DNA, 25 bp, Homo sapien
tcagtcaatgttagctaaaagaact

SEQ ID NO: 3232010 - DNA, 25 bp, Homo sapien
cagtcaatgttagctaaaagaactt

SEQ ID NO: 3232011 - DNA, 25 bp, Homo sapien
taactaccctgatgttgtagatgtt

SEQ ID NO: 3232012 - DNA, 25 bp, Homo sapien
tatcccctctccctcacaatcataa

SEQ ID NO: 3232013 - DNA, 25 bp, Homo sapien
cctcacaatcataactaccctgatg

SEQ ID NO: 3232014 - DNA, 25 bp, Homo sapien
tctccctcacaatcataactaccct

SEQ ID NO: 3232015 - DNA, 25 bp, Homo sapien
ggtagaaagttccatactgtgagtc

SEQ ID NO: 3232016 - DNA, 25 bp, Homo sapien
aggtagaaagttccatactgtgagt

SEQ ID NO: 3232017 - DNA, 25 bp, Homo sapien
aatatcttcggtggataatgacggg

SEQ ID NO: 3232018 - DNA, 25 bp, Homo sapien
agaaacacgaggaggctgcatggac

SEQ ID NO: 3232019 - DNA, 25 bp, Homo sapien
tgcatggacaaatatcttcggtgga

SEQ ID NO: 3232020 - DNA, 25 bp, Homo sapien
ggctgcatggacaaatatcttcggt

SEQ ID NO: 3232021 - DNA, 25 bp, Homo sapien
tgctgggtgatcaggcacaactggc

SEQ ID NO: 3232022 - DNA, 25 bp, Homo sapien
gaaaaggacattcgctcagcaagaa

SEQ ID NO: 3232023 - DNA, 25 bp, Homo sapien
cacaactggcagaggcattcaggcc

SEQ ID NO: 3232024 - DNA, 25 bp, Homo sapien
gaaatgcaaggctgcgaaaaggaca

SEQ ID NO: 3232025 - DNA, 25 bp, Homo sapien
gatcatcgttttcctatgtctcatt

SEQ ID NO: 3232026 - DNA, 25 bp, Homo sapien
cgttttcctatgtctcattactcgc

SEQ ID NO: 3232027 - DNA, 25 bp, Homo sapien
tttcctatgtctcattactcgccag

SEQ ID NO: 3232028 - DNA, 25 bp, Homo sapien
tatgtctcattactcgccagtgaaa

SEQ ID NO: 3232029 - DNA, 25 bp, Homo sapien
tatcgtacagcaattggaggtgaaa

SEQ ID NO: 3232030 - DNA, 25 bp, Homo sapien
ttatcgtacagcaattggaggtgaa

SEQ ID NO: 3232031 - DNA, 25 bp, Homo sapien
cctttttgcttttctaacatattga

SEQ ID NO: 3232032 - DNA, 25 bp, Homo sapien
ttttctccaaaattttgattgacaa

SEQ ID NO: 3232033 - DNA, 25 bp, Homo sapien
ttgattgacaaatcagaatgagaga

SEQ ID NO: 3232034 - DNA, 25 bp, Homo sapien
ttgcttttctaacatattgacctta

SEQ ID NO: 3232035 - DNA, 25 bp, Homo sapien
gggctttctgcgttggtgatgccta

SEQ ID NO: 3232036 - DNA, 25 bp, Homo sapien
accattcagaagatgccaaactatt

SEQ ID NO: 3232037 - DNA, 25 bp, Homo sapien
gaagatgccaaactattacagtggg

SEQ ID NO: 3232038 - DNA, 25 bp, Homo sapien
gctttctgcgttggtgatgcctaca

SEQ ID NO: 3232039 - DNA, 25 bp, Homo sapien
aatgtgactgggagtaacaaaatac

SEQ ID NO: 3232040 - DNA, 25 bp, Homo sapien
taatgtgactgggagtaacaaaata

SEQ ID NO: 3232041 - DNA, 25 bp, Homo sapien
ccatttagatccaacctggtggtcc

SEQ ID NO: 3232042 - DNA, 25 bp, Homo sapien
tagcaggcattaaggtagtaccatt

SEQ ID NO: 3232043 - DNA, 25 bp, Homo sapien
tacacagacatgcatagatgtctat

SEQ ID NO: 3232044 - DNA, 25 bp, Homo sapien
cctggtggtccacagaatacacaga

SEQ ID NO: 3232045 - DNA, 25 bp, Homo sapien
agttctaggagcatgtagcttttcc

SEQ ID NO: 3232046 - DNA, 25 bp, Homo sapien
gatgttggtttataagtctcacgga

SEQ ID NO: 3232047 - DNA, 25 bp, Homo sapien
tccgttgggttctcatgtcaatgtc

SEQ ID NO: 3232048 - DNA, 25 bp, Homo sapien
cacggatactgagaacacaattata

SEQ ID NO: 3232049 - DNA, 25 bp, Homo sapien
ctttgctagcatcccccagtgtcat

SEQ ID NO: 3232050 - DNA, 25 bp, Homo sapien
ctctggtatttgtagttgcctttcc

SEQ ID NO: 3232051 - DNA, 25 bp, Homo sapien
actctggtatttgtagttgcctttc

SEQ ID NO: 3232052 - DNA, 25 bp, Homo sapien
cctgcaatactgctttgctagcatc

SEQ ID NO: 3232053 - DNA, 25 bp, Homo sapien
tcatcacatctttgctccctcacag

SEQ ID NO: 3232054 - DNA, 25 bp, Homo sapien
gaggattagaaggataacttgaagc

SEQ ID NO: 3232055 - DNA, 25 bp, Homo sapien
gaaggataacttgaagcttcatttc

SEQ ID NO: 3232056 - DNA, 25 bp, Homo sapien
ccaggtaggaggattagaaggataa

SEQ ID NO: 3232057 - DNA, 25 bp, Homo sapien
ctagttcagctgtgtacagaaaaaa

SEQ ID NO: 3232058 - DNA, 25 bp, Homo sapien
tcagctgtgtacagaaaaaatgcac

SEQ ID NO: 3232059 - DNA, 25 bp, Homo sapien
gaaaaaatgcacatcatatctttct

SEQ ID NO: 3232060 - DNA, 25 bp, Homo sapien
agaaaaaatgcacatcatatctttc

SEQ ID NO: 3232061 - DNA, 25 bp, Homo sapien
ctgcaccacacgttctggtttcagg

SEQ ID NO: 3232062 - DNA, 25 bp, Homo sapien
gccaggtgagagacgcatgtactgc

SEQ ID NO: 3232063 - DNA, 25 bp, Homo sapien
tcagggatgaagtatgttctatgca

SEQ ID NO: 3232064 - DNA, 25 bp, Homo sapien
gcatgtactgcaccacacgttctgg

SEQ ID NO: 3232065 - DNA, 25 bp, Homo sapien
tgtataaagcgctattttgcacagc

SEQ ID NO: 3232066 - DNA, 25 bp, Homo sapien
catgtgtataaagcgctattttgca

SEQ ID NO: 3232067 - DNA, 25 bp, Homo sapien
ctagcttcatgtgtataaagcgcta

SEQ ID NO: 3232068 - DNA, 25 bp, Homo sapien
taaagcgctattttgcacagctcct

SEQ ID NO: 3232069 - DNA, 25 bp, Homo sapien
aggaaaagactcttcagaggcttgg

SEQ ID NO: 3232070 - DNA, 25 bp, Homo sapien
ccagccctgtgtggtatacctggtg

SEQ ID NO: 3232071 - DNA, 25 bp, Homo sapien
agactcttcagaggcttggccatcc

SEQ ID NO: 3232072 - DNA, 25 bp, Homo sapien
gccctgtgtggtatacctggtggat

SEQ ID NO: 3232073 - DNA, 25 bp, Homo sapien
caagtggcacttcaccattgccaaa

SEQ ID NO: 3232074 - DNA, 25 bp, Homo sapien
ggcccttcagaagacgccttcattg

SEQ ID NO: 3232075 - DNA, 25 bp, Homo sapien
tgccaaaagactatcaacagccctt

SEQ ID NO: 3232076 - DNA, 25 bp, Homo sapien
caggaacactattcccaagtggcac

SEQ ID NO: 3232077 - DNA, 25 bp, Homo sapien
tcattccacacaagccttttccaaa

SEQ ID NO: 3232078 - DNA, 25 bp, Homo sapien
ctcttctagcatccaaatagctcat

SEQ ID NO: 3232079 - DNA, 25 bp, Homo sapien
caaactgtgccatattcttggaatg

SEQ ID NO: 3232080 - DNA, 25 bp, Homo sapien
gccaagctatctctcttctagcatc

SEQ ID NO: 3232081 - DNA, 25 bp, Homo sapien
tccttctatagtagctgtcctgccg

SEQ ID NO: 3232082 - DNA, 25 bp, Homo sapien
ccagcaatgggttgaggacaaccct

SEQ ID NO: 3232083 - DNA, 25 bp, Homo sapien
cctgtgttcagaacttcagtgctca

SEQ ID NO: 3232084 - DNA, 25 bp, Homo sapien
cagtgctcatgaacacaacaccaaa

SEQ ID NO: 3232085 - DNA, 25 bp, Homo sapien
cacatgtctcttctaaaatgatggc

SEQ ID NO: 3232086 - DNA, 25 bp, Homo sapien
tctgcttcccagaacggtcatgagg

SEQ ID NO: 3232087 - DNA, 25 bp, Homo sapien
agtcaacagctattagaccctcaca

SEQ ID NO: 3232088 - DNA, 25 bp, Homo sapien
ctctgcttcccagaacggtcatgag

SEQ ID NO: 3232089 - DNA, 25 bp, Homo sapien
gtagtacccatcttagcattgacaa

SEQ ID NO: 3232090 - DNA, 25 bp, Homo sapien
cattgtagtacccatcttagcattg

SEQ ID NO: 3232091 - DNA, 25 bp, Homo sapien
catcttagcattgacaatgtctgta

SEQ ID NO: 3232092 - DNA, 25 bp, Homo sapien
tagcattgacaatgtctgtattttc

SEQ ID NO: 3232093 - DNA, 25 bp, Homo sapien
ggccgataccatgtggactctgaga

SEQ ID NO: 3232094 - DNA, 25 bp, Homo sapien
tgtggactctgagacgcacgtgctc

SEQ ID NO: 3232095 - DNA, 25 bp, Homo sapien
ccaggcattagacagggccgatacc

SEQ ID NO: 3232096 - DNA, 25 bp, Homo sapien
ttagacagggccgataccatgtgga

SEQ ID NO: 3232097 - DNA, 25 bp, Homo sapien
tagacatggcctatggcaactcact

SEQ ID NO: 3232098 - DNA, 25 bp, Homo sapien
gaaagcacttttgcctactggagta

SEQ ID NO: 3232099 - DNA, 25 bp, Homo sapien
caaatccctgagttcacaggcctgg

SEQ ID NO: 3232100 - DNA, 25 bp, Homo sapien
gcagacccctattgccattgcctgg

SEQ ID NO: 3232101 - DNA, 25 bp, Homo sapien
tagaagagccttcgggagaaaatcg

SEQ ID NO: 3232102 - DNA, 25 bp, Homo sapien
taagtcaaagccctagaagcaaaca

SEQ ID NO: 3232103 - DNA, 25 bp, Homo sapien
gatgaaagccgaaactcaaagtgat

SEQ ID NO: 3232104 - DNA, 25 bp, Homo sapien
taatgtgaattcatgcaaccctttg

SEQ ID NO: 3232105 - DNA, 25 bp, Homo sapien
tactccctgagaggcaaagtcggaa

SEQ ID NO: 3232106 - DNA, 25 bp, Homo sapien
tgatacggtcaaggggagtttccac

SEQ ID NO: 3232107 - DNA, 25 bp, Homo sapien
cacagatgctgatacggtcaagggg

SEQ ID NO: 3232108 - DNA, 25 bp, Homo sapien
ccctgagaggcaaagtcggaaaagg

SEQ ID NO: 3232109 - DNA, 25 bp, Homo sapien
ctcactgttaccctcataaaggagt

SEQ ID NO: 3232110 - DNA, 25 bp, Homo sapien
tcctgccttatgcaggtgactgtgt

SEQ ID NO: 3232111 - DNA, 25 bp, Homo sapien
cactgttaccctcataaaggagttg

SEQ ID NO: 3232112 - DNA, 25 bp, Homo sapien
tctctcctgccttatgcaggtgact

SEQ ID NO: 3232113 - DNA, 25 bp, Homo sapien
tggagtacctgatcccacaagggaa

SEQ ID NO: 3232114 - DNA, 25 bp, Homo sapien
ggcttgcgcatagaaggatatctga

SEQ ID NO: 3232115 - DNA, 25 bp, Homo sapien
aattcagagagcgagtcaggagcca

SEQ ID NO: 3232116 - DNA, 25 bp, Homo sapien
aattagggcagtgattggcagagcc

SEQ ID NO: 3232117 - DNA, 25 bp, Homo sapien
ttaagagtaggaaaccagagacgac

SEQ ID NO: 3232118 - DNA, 25 bp, Homo sapien
caccaagtcccatctatgtcattgg

SEQ ID NO: 3232119 - DNA, 25 bp, Homo sapien
gcataattccctacaagttttagta

SEQ ID NO: 3232120 - DNA, 25 bp, Homo sapien
gatttacaaacttgcttaccaccaa

SEQ ID NO: 3232121 - DNA, 25 bp, Homo sapien
cgactttgcctatatatttcgcagg

SEQ ID NO: 3232122 - DNA, 25 bp, Homo sapien
gctgagggggacatccatccacatt

SEQ ID NO: 3232123 - DNA, 25 bp, Homo sapien
gctgaaccgaatccgactttgccta

SEQ ID NO: 3232124 - DNA, 25 bp, Homo sapien
cacattctgcttgctgaaccgaatc

SEQ ID NO: 3232125 - DNA, 25 bp, Homo sapien
tttcagggctgataacatgtggaac

SEQ ID NO: 3232126 - DNA, 25 bp, Homo sapien
acaatggattgatttgaagtcgcag

SEQ ID NO: 3232127 - DNA, 25 bp, Homo sapien
attgatttgaagtcgcagctctttg

SEQ ID NO: 3232128 - DNA, 25 bp, Homo sapien
ttttcagggctgataacatgtggaa

SEQ ID NO: 3232129 - DNA, 25 bp, Homo sapien
tatacaatcaatgactgcagattca

SEQ ID NO: 3232130 - DNA, 25 bp, Homo sapien
ggtatacaatcaatgactgcagatt

SEQ ID NO: 3232131 - DNA, 25 bp, Homo sapien
tacaatcaatgactgcagattcacc

SEQ ID NO: 3232132 - DNA, 25 bp, Homo sapien
aaaggtatacaatcaatgactgcag

SEQ ID NO: 3232133 - DNA, 25 bp, Homo sapien
aattgaattcgtacaattaaggcct

SEQ ID NO: 3232134 - DNA, 25 bp, Homo sapien
tgaaattgaattcgtacaattaagg

SEQ ID NO: 3232135 - DNA, 25 bp, Homo sapien
tgaattcgtacaattaaggcctttc

SEQ ID NO: 3232136 - DNA, 25 bp, Homo sapien
tgttgaaattgaattcgtacaatta

SEQ ID NO: 3232137 - DNA, 25 bp, Homo sapien
gcaccgtgatcacagggaaggagcc

SEQ ID NO: 3232138 - DNA, 25 bp, Homo sapien
ggcaccgtgatcacagggaaggagc

SEQ ID NO: 3232139 - DNA, 25 bp, Homo sapien
ctgagggcaccgtgatcacagggaa

SEQ ID NO: 3232140 - DNA, 25 bp, Homo sapien
agggcaccgtgatcacagggaagga

SEQ ID NO: 3232141 - DNA, 25 bp, Homo sapien
actgagggcaccgtgatcacaggga

SEQ ID NO: 3232142 - DNA, 25 bp, Homo sapien
ctgagggcaccgtgatcacagggac

SEQ ID NO: 3232143 - DNA, 25 bp, Homo sapien
caccgtgatcacagggacggagcct

SEQ ID NO: 3232144 - DNA, 25 bp, Homo sapien
ctgagggcaccgtgatcacagggaa

SEQ ID NO: 3232145 - DNA, 25 bp, Homo sapien
cgtgatcacagggaaggagcctggg

SEQ ID NO: 3232146 - DNA, 25 bp, Homo sapien
tgatcacagggaaggagcctgggac

SEQ ID NO: 3232147 - DNA, 25 bp, Homo sapien
gtgatcacagggaaggagcctggga

SEQ ID NO: 3232148 - DNA, 25 bp, Homo sapien
gagggctttactattaccttagtca

SEQ ID NO: 3232149 - DNA, 25 bp, Homo sapien
ccttctgtctaataagtgaatttga

SEQ ID NO: 3232150 - DNA, 25 bp, Homo sapien
tggtgccttctgtctaataagtgaa

SEQ ID NO: 3232151 - DNA, 25 bp, Homo sapien
taccttagtcagtgaagggcctttc

SEQ ID NO: 3232152 - DNA, 25 bp, Homo sapien
caaggaactgtggtgtcctcaacca

SEQ ID NO: 3232153 - DNA, 25 bp, Homo sapien
cagccaccatgaagtgacctggatg

SEQ ID NO: 3232154 - DNA, 25 bp, Homo sapien
attactatacattcaggccctgcag

SEQ ID NO: 3232155 - DNA, 25 bp, Homo sapien
gagctgttttgagagggccacctac

SEQ ID NO: 3232156 - DNA, 25 bp, Homo sapien
ctaaacagccggatgtattaatcat

SEQ ID NO: 3232157 - DNA, 25 bp, Homo sapien
atgtagtatttggttcatcattccc

SEQ ID NO: 3232158 - DNA, 25 bp, Homo sapien
ttaatcacaaaaaagcccaatgtag

SEQ ID NO: 3232159 - DNA, 25 bp, Homo sapien
cctttaatcacaaaaaagcccaatg

SEQ ID NO: 3232160 - DNA, 25 bp, Homo sapien
tgtagtatttggttcatcattccca

SEQ ID NO: 3232161 - DNA, 25 bp, Homo sapien
gaacactttcctccatacagagcag

SEQ ID NO: 3232162 - DNA, 25 bp, Homo sapien
tcatgattggatgattaccctgcat

SEQ ID NO: 3232163 - DNA, 25 bp, Homo sapien
cctccatacagagcaggttttcatg

SEQ ID NO: 3232164 - DNA, 25 bp, Homo sapien
actggtccagaacactttcctccat

SEQ ID NO: 3232165 - DNA, 25 bp, Homo sapien
taccggctgaagcacgcatgcttcc

SEQ ID NO: 3232166 - DNA, 25 bp, Homo sapien
agccgctgagccgttttctaccggc

SEQ ID NO: 3232167 - DNA, 25 bp, Homo sapien
gttttctaccggctgaagcacgcat

SEQ ID NO: 3232168 - DNA, 25 bp, Homo sapien
gagccgttttctaccggctgaagca

SEQ ID NO: 3232169 - DNA, 25 bp, Homo sapien
taaccatttctccaacaactcttag

SEQ ID NO: 3232170 - DNA, 25 bp, Homo sapien
tttctccaacaactcttagaagcat

SEQ ID NO: 3232171 - DNA, 25 bp, Homo sapien
tttttgtctgcccaataaccatttc

SEQ ID NO: 3232172 - DNA, 25 bp, Homo sapien
cctacataagactctttttgtctgc

SEQ ID NO: 3232173 - DNA, 25 bp, Homo sapien
gaagcttcctgtatatgaggatgct

SEQ ID NO: 3232174 - DNA, 25 bp, Homo sapien
ttcctgtatatgaggatgctgctgc

SEQ ID NO: 3232175 - DNA, 25 bp, Homo sapien
tgctgggctagattgtccaggcaac

SEQ ID NO: 3232176 - DNA, 25 bp, Homo sapien
ctttcttcccatagagcgcacttgg

SEQ ID NO: 3232177 - DNA, 25 bp, Homo sapien
ggaaggagtggagcagatcgaacac

SEQ ID NO: 3232178 - DNA, 25 bp, Homo sapien
ttgaaaggctttgggaggagtggag

SEQ ID NO: 3232179 - DNA, 25 bp, Homo sapien
gttatgagggttgggaaggagtgga

SEQ ID NO: 3232180 - DNA, 25 bp, Homo sapien
gagtggaggttatgagggttgggaa

SEQ ID NO: 3232181 - DNA, 25 bp, Homo sapien
cttgggaaaggaggatggtgagagg

SEQ ID NO: 3232182 - DNA, 25 bp, Homo sapien
ggaaaggaggatggtgagaggatga

SEQ ID NO: 3232183 - DNA, 25 bp, Homo sapien
aaaggaggatggtgagaggatgaga

SEQ ID NO: 3232184 - DNA, 25 bp, Homo sapien
tgggaaaggaggatggtgagaggat

SEQ ID NO: 3232185 - DNA, 25 bp, Homo sapien
gaaatgagctataacttgtctctgg

SEQ ID NO: 3232186 - DNA, 25 bp, Homo sapien
gaagtttacactcgggttcactgag

SEQ ID NO: 3232187 - DNA, 25 bp, Homo sapien
ctgccatttttccaccaatacctgt

SEQ ID NO: 3232188 - DNA, 25 bp, Homo sapien
ctttagcaggaggtggaaatgagct

SEQ ID NO: 3232189 - DNA, 25 bp, Homo sapien
tctctattaccccctctctatccac

SEQ ID NO: 3232190 - DNA, 25 bp, Homo sapien
catctctattaccccctctctatcc

SEQ ID NO: 3232191 - DNA, 25 bp, Homo sapien
ctctattaccccctctctatccacc

SEQ ID NO: 3232192 - DNA, 25 bp, Homo sapien
ccatctctattaccccctctctatc

SEQ ID NO: 3232193 - DNA, 25 bp, Homo sapien
gccagatgacatcaagttacctgca

SEQ ID NO: 3232194 - DNA, 25 bp, Homo sapien
tggcagccgatagccagatgacatc

SEQ ID NO: 3232195 - DNA, 25 bp, Homo sapien
tcagattaagacatctggcagccga

SEQ ID NO: 3232196 - DNA, 25 bp, Homo sapien
tccttcagaaactccgtggcacact

SEQ ID NO: 3232197 - DNA, 25 bp, Homo sapien
ctcagtggcttccatgagaggcatc

SEQ ID NO: 3232198 - DNA, 25 bp, Homo sapien
aaatggctgtcagggcatgctctgg

SEQ ID NO: 3232199 - DNA, 25 bp, Homo sapien
gaaatggctgtcagggcatgctctg

SEQ ID NO: 3232200 - DNA, 25 bp, Homo sapien
tggcttccatgagaggcatctccat

SEQ ID NO: 3232201 - DNA, 25 bp, Homo sapien
ctgcggaaatggttcgcttgtctag

SEQ ID NO: 3232202 - DNA, 25 bp, Homo sapien
gaaatggttcgcttgtctagcagct

SEQ ID NO: 3232203 - DNA, 25 bp, Homo sapien
aatggttcgcttgtctagcagctct

SEQ ID NO: 3232204 - DNA, 25 bp, Homo sapien
ggaaagggaatctcgaagtctgagt

SEQ ID NO: 3232205 - DNA, 25 bp, Homo sapien
ctagttgttgacatggcttgatata

SEQ ID NO: 3232206 - DNA, 25 bp, Homo sapien
ttactgtgaagtatccattttctct

SEQ ID NO: 3232207 - DNA, 25 bp, Homo sapien
gttgacatggcttgatatattatac

SEQ ID NO: 3232208 - DNA, 25 bp, Homo sapien
tttactgtgaagtatccattttctc

SEQ ID NO: 3232209 - DNA, 25 bp, Homo sapien
tatggctgactctcggaaacttggt

SEQ ID NO: 3232210 - DNA, 25 bp, Homo sapien
gactctcggaaacttggtctttgag

SEQ ID NO: 3232211 - DNA, 25 bp, Homo sapien
tttgcttgtctatggctgactctcg

SEQ ID NO: 3232212 - DNA, 25 bp, Homo sapien
tcggaaacttggtctttgagcttgc

SEQ ID NO: 3232213 - DNA, 25 bp, Homo sapien
gttttacgtctggagttgcgtggca

SEQ ID NO: 3232214 - DNA, 25 bp, Homo sapien
tctggagttgcgtggcagacactca

SEQ ID NO: 3232215 - DNA, 25 bp, Homo sapien
tgtatttctcggttttacgtctgga

SEQ ID NO: 3232216 - DNA, 25 bp, Homo sapien
tttagctttgggctgactgtatttc

SEQ ID NO: 3232217 - DNA, 25 bp, Homo sapien
ttgcagggaatattatcattggctt

SEQ ID NO: 3232218 - DNA, 25 bp, Homo sapien
attatcattggcttttgatacaatt

SEQ ID NO: 3232219 - DNA, 25 bp, Homo sapien
ttatcattggcttttgatacaattt

SEQ ID NO: 3232220 - DNA, 25 bp, Homo sapien
tcagttattttggtgagcagctcca

SEQ ID NO: 3232221 - DNA, 25 bp, Homo sapien
tgtttatctgccacaagccactcag

SEQ ID NO: 3232222 - DNA, 25 bp, Homo sapien
ctcagttattttggtgagcagctcc

SEQ ID NO: 3232223 - DNA, 25 bp, Homo sapien
tgccacaagccactcagttattttg

SEQ ID NO: 3232224 - DNA, 25 bp, Homo sapien
agaaacatctgttgtaacccacttc

SEQ ID NO: 3232225 - DNA, 25 bp, Homo sapien
aacatctgttgtaacccacttctcc

SEQ ID NO: 3232226 - DNA, 25 bp, Homo sapien
ctgttgtaacccacttctccctttg

SEQ ID NO: 3232227 - DNA, 25 bp, Homo sapien
cctgcttgtttggggtagacttttg

SEQ ID NO: 3232228 - DNA, 25 bp, Homo sapien
tgaaaaaccctgatgacggtggagg

SEQ ID NO: 3232229 - DNA, 25 bp, Homo sapien
tgatgtcaaggtcgatgaaaaaccc

SEQ ID NO: 3232230 - DNA, 25 bp, Homo sapien
tgcttcgaacaacaatgtccgtagg

SEQ ID NO: 3232231 - DNA, 25 bp, Homo sapien
gtgcttaccaaaatgcccaggacat

SEQ ID NO: 3232232 - DNA, 25 bp, Homo sapien
acctcatggccactgtgccgggggc

SEQ ID NO: 3232233 - DNA, 25 bp, Homo sapien
ccgggggcccatgatctccagtgtc

SEQ ID NO: 3232234 - DNA, 25 bp, Homo sapien
ctcggtaggtaactgcaaagggttg

SEQ ID NO: 3232235 - DNA, 25 bp, Homo sapien
tgtgatgtgtggcccctgggtattc

SEQ ID NO: 3232236 - DNA, 25 bp, Homo sapien
ctggatgcagcccattctgttgatg

SEQ ID NO: 3232237 - DNA, 25 bp, Homo sapien
gcatcattgttctgagacatccagg

SEQ ID NO: 3232238 - DNA, 25 bp, Homo sapien
ggcatcattgttctgagacatccag

SEQ ID NO: 3232239 - DNA, 25 bp, Homo sapien
caaaaaatgctgcttcgtctggatg

SEQ ID NO: 3232240 - DNA, 25 bp, Homo sapien
cctgcgcttgtcactagctttgaag

SEQ ID NO: 3232241 - DNA, 25 bp, Homo sapien
aagggagacctggtcgcgacatgca

SEQ ID NO: 3232242 - DNA, 25 bp, Homo sapien
aagaggcagccctgcgcttgtcact

SEQ ID NO: 3232243 - DNA, 25 bp, Homo sapien
tgatccagccgtcactggaagctgg

SEQ ID NO: 3232244 - DNA, 25 bp, Homo sapien
cagggaaataaccagacaaattagc

SEQ ID NO: 3232245 - DNA, 25 bp, Homo sapien
cacagtcacatgttgggaaggaaaa

SEQ ID NO: 3232246 - DNA, 25 bp, Homo sapien
gagatgaatcatgtcgaccggagtg

SEQ ID NO: 3232247 - DNA, 25 bp, Homo sapien
ccggagtgataccttgtgctgtaca

SEQ ID NO: 3232248 - DNA, 25 bp, Homo sapien
ctttgtcccatgtggtatgacaatt

SEQ ID NO: 3232249 - DNA, 25 bp, Homo sapien
cccatgtggtatgacaatttgcccc

SEQ ID NO: 3232250 - DNA, 25 bp, Homo sapien
atgtcttgttgtaagggtccttcca

SEQ ID NO: 3232251 - DNA, 25 bp, Homo sapien
ccagccactcgaatgtcttgttgta

SEQ ID NO: 3232252 - DNA, 25 bp, Homo sapien
tgtttttacaggatgtccctcccca

SEQ ID NO: 3232253 - DNA, 25 bp, Homo sapien
tgctgtgaatatgacagttctcaac

SEQ ID NO: 3232254 - DNA, 25 bp, Homo sapien
gattgggcaattttgtctggtgaag

SEQ ID NO: 3232255 - DNA, 25 bp, Homo sapien
tttagattgggcaattttgtctggt

SEQ ID NO: 3232256 - DNA, 25 bp, Homo sapien
caaggaacagaatggcttatggaaa

SEQ ID NO: 3232257 - DNA, 25 bp, Homo sapien
cagaatggcttatggaaaggcagat

SEQ ID NO: 3232258 - DNA, 25 bp, Homo sapien
gaacgtactaattgcgacaacaaag

SEQ ID NO: 3232259 - DNA, 25 bp, Homo sapien
cgctcaattagcatcatagtgtgaa

SEQ ID NO: 3232260 - DNA, 25 bp, Homo sapien
tacctctcaccagagaagtgtcaca

SEQ ID NO: 3232261 - DNA, 25 bp, Homo sapien
gcaaaaacggtacaggttctggaca

SEQ ID NO: 3232262 - DNA, 25 bp, Homo sapien
taatgtggccgcttactgtgttgct

SEQ ID NO: 3232263 - DNA, 25 bp, Homo sapien
gcacacatgcgagggctggaaatac

SEQ ID NO: 3232264 - DNA, 25 bp, Homo sapien
caaaccgcgttcttagcacaagtca

SEQ ID NO: 3232265 - DNA, 25 bp, Homo sapien
gatttcaatctaaccgcagcatgta

SEQ ID NO: 3232266 - DNA, 25 bp, Homo sapien
ggaagaaattaattcatctgttagg

SEQ ID NO: 3232267 - DNA, 25 bp, Homo sapien
gctagcccggccttacataaaatta

SEQ ID NO: 3232268 - DNA, 25 bp, Homo sapien
ttgttaaaacaaggacgcttccagc

SEQ ID NO: 3232269 - DNA, 25 bp, Homo sapien
ggtaggtaatcatttccagcatagc

SEQ ID NO: 3232270 - DNA, 25 bp, Homo sapien
agtctttctgccctaagtagatatg

SEQ ID NO: 3232271 - DNA, 25 bp, Homo sapien
tctagcttcgagaacacaaatgtgt

SEQ ID NO: 3232272 - DNA, 25 bp, Homo sapien
gatagaggccatcagtgactaccgt

SEQ ID NO: 3232273 - DNA, 25 bp, Homo sapien
caagtgatgaataatgcgtcagcag

SEQ ID NO: 3232274 - DNA, 25 bp, Homo sapien
aaatttttcacgcagtggcttaagg

SEQ ID NO: 3232275 - DNA, 25 bp, Homo sapien
ctggtgtgtattgctttcctgctga

SEQ ID NO: 3232276 - DNA, 25 bp, Homo sapien
cagagcaagcattaaaggagaagag

SEQ ID NO: 3232277 - DNA, 25 bp, Homo sapien
cagcgaggtctgaatttggtgtatt

SEQ ID NO: 3232278 - DNA, 25 bp, Homo sapien
gagtgtgtggtttgcaaccttctgt

SEQ ID NO: 3232279 - DNA, 25 bp, Homo sapien
ggcagcggaggccactctgagagat

SEQ ID NO: 3232280 - DNA, 25 bp, Homo sapien
ggcaagtctccggatttcagctgtg

SEQ ID NO: 3232281 - DNA, 25 bp, Homo sapien
tgagagatgggcaatatggcttctg

SEQ ID NO: 3232282 - DNA, 25 bp, Homo sapien
atgtgaatgtggcaagtctccggat

SEQ ID NO: 3232283 - DNA, 25 bp, Homo sapien
tttgtcttcttcccagtttgagtcc

SEQ ID NO: 3232284 - DNA, 25 bp, Homo sapien
tcttcttcccagtttgagtccttac

SEQ ID NO: 3232285 - DNA, 25 bp, Homo sapien
gtcttcttcccagtttgagtcctta

SEQ ID NO: 3232286 - DNA, 25 bp, Homo sapien
tgtcttcttcccagtttgagtcctt

SEQ ID NO: 3232287 - DNA, 25 bp, Homo sapien
gaccctgtgccttcaatagatctga

SEQ ID NO: 3232288 - DNA, 25 bp, Homo sapien
ctgaagcctggacgccatacttctt

SEQ ID NO: 3232289 - DNA, 25 bp, Homo sapien
caggaccacccagatatgcttttct

SEQ ID NO: 3232290 - DNA, 25 bp, Homo sapien
tctggatctaatgcggcaggaccac

SEQ ID NO: 3232291 - DNA, 25 bp, Homo sapien
gactggcttagctacactccttctt

SEQ ID NO: 3232292 - DNA, 25 bp, Homo sapien
agcagggactggcttagctacactc

SEQ ID NO: 3232293 - DNA, 25 bp, Homo sapien
ggcaaatgctaactgctccccagca

SEQ ID NO: 3232294 - DNA, 25 bp, Homo sapien
taggaactgagcttccggtaggcaa

SEQ ID NO: 3232295 - DNA, 25 bp, Homo sapien
acagcacacctgatatcgagcagag

SEQ ID NO: 3232296 - DNA, 25 bp, Homo sapien
cagagcaaattggtgtctcgaggtc

SEQ ID NO: 3232297 - DNA, 25 bp, Homo sapien
ccatttccaatgagagtgctgtcca

SEQ ID NO: 3232298 - DNA, 25 bp, Homo sapien
tgaaaagtggtgtgagtgttcccca

SEQ ID NO: 3232299 - DNA, 25 bp, Homo sapien
tctaatatgcattctgggctgtttc

SEQ ID NO: 3232300 - DNA, 25 bp, Homo sapien
cctcctttaatgtgtaagttgcaga

SEQ ID NO: 3232301 - DNA, 25 bp, Homo sapien
cacttaattagtatcattctgcagc

SEQ ID NO: 3232302 - DNA, 25 bp, Homo sapien
gggctgtttctaatctaaatgtgtc

SEQ ID NO: 3232303 - DNA, 25 bp, Homo sapien
catgattaattcaggtaaaacatgc

SEQ ID NO: 3232304 - DNA, 25 bp, Homo sapien
gtcgtgaaattgttgagcgttcaac

SEQ ID NO: 3232305 - DNA, 25 bp, Homo sapien
tgtaagaaagtgcaggcatcagtgg

SEQ ID NO: 3232306 - DNA, 25 bp, Homo sapien
tacttttaatttatgccacatgatt

SEQ ID NO: 3232307 - DNA, 25 bp, Homo sapien
gaatgaaacaaggattcacctttaa

SEQ ID NO: 3232308 - DNA, 25 bp, Homo sapien
aattaaagtttgaccaggatccaga

SEQ ID NO: 3232309 - DNA, 25 bp, Homo sapien
taaattaaagtttgaccaggatcca

SEQ ID NO: 3232310 - DNA, 25 bp, Homo sapien
attaaagtttgaccaggatccagat

SEQ ID NO: 3232311 - DNA, 25 bp, Homo sapien
aaattaaagtttgaccaggatccag

SEQ ID NO: 3232312 - DNA, 25 bp, Homo sapien
agccttctcatactttgccattctc

SEQ ID NO: 3232313 - DNA, 25 bp, Homo sapien
ctcctttatctcagccttctcatac

SEQ ID NO: 3232314 - DNA, 25 bp, Homo sapien
catactttgccattctcttctttct

SEQ ID NO: 3232315 - DNA, 25 bp, Homo sapien
tcttctttctggaaataaccagcac

SEQ ID NO: 3232316 - DNA, 25 bp, Homo sapien
tctgagtccgtttgcgatttccctt

SEQ ID NO: 3232317 - DNA, 25 bp, Homo sapien
tatgcagtccaagttctgggtttta

SEQ ID NO: 3232318 - DNA, 25 bp, Homo sapien
tctgcatatataaaagacgcttgtg

SEQ ID NO: 3232319 - DNA, 25 bp, Homo sapien
tacaggcttcactagtacaaataca

SEQ ID NO: 3232320 - DNA, 25 bp, Homo sapien
cacactaaccaagggatgctctttg

SEQ ID NO: 3232321 - DNA, 25 bp, Homo sapien
tgctctttgatgattatatctccaa

SEQ ID NO: 3232322 - DNA, 25 bp, Homo sapien
aaacagaacggattaatggcccctg

SEQ ID NO: 3232323 - DNA, 25 bp, Homo sapien
tttatgcccttctcatgtaccacac

SEQ ID NO: 3232324 - DNA, 25 bp, Homo sapien
cccagtgagagtcatgtgcatactt

SEQ ID NO: 3232325 - DNA, 25 bp, Homo sapien
agcttggcaaaccacaatgaaaact

SEQ ID NO: 3232326 - DNA, 25 bp, Homo sapien
aacttctaagccttcaagacttgcc

SEQ ID NO: 3232327 - DNA, 25 bp, Homo sapien
acttgccagggattgagggtgcgtg

SEQ ID NO: 3232328 - DNA, 25 bp, Homo sapien
gcattcttaattagcactgacctgt

SEQ ID NO: 3232329 - DNA, 25 bp, Homo sapien
cattcttaattagcactgacctgtc

SEQ ID NO: 3232330 - DNA, 25 bp, Homo sapien
ctgtcaaactttcgatattctgttt

SEQ ID NO: 3232331 - DNA, 25 bp, Homo sapien
ctgcattcttaattagcactgacct

SEQ ID NO: 3232332 - DNA, 25 bp, Homo sapien
tctgtctcgtgcctagtgttgaggg

SEQ ID NO: 3232333 - DNA, 25 bp, Homo sapien
gagaccccagtggaagatcgtatgc

SEQ ID NO: 3232334 - DNA, 25 bp, Homo sapien
tgtctcgtgcctagtgttgagggat

SEQ ID NO: 3232335 - DNA, 25 bp, Homo sapien
tcgtatgcccaataacgggtgttgg

SEQ ID NO: 3232336 - DNA, 25 bp, Homo sapien
tttctggccacagcctccagaagag

SEQ ID NO: 3232337 - DNA, 25 bp, Homo sapien
tggccacagcctccagaagagctgg

SEQ ID NO: 3232338 - DNA, 25 bp, Homo sapien
cctcctttctggccacagcctccag

SEQ ID NO: 3232339 - DNA, 25 bp, Homo sapien
ccacagcctccagaagagctggagc

SEQ ID NO: 3232340 - DNA, 25 bp, Homo sapien
atttctgtatgcaggcaaatggtcc

SEQ ID NO: 3232341 - DNA, 25 bp, Homo sapien
aatttctgtatgcaggcaaatggtc

SEQ ID NO: 3232342 - DNA, 25 bp, Homo sapien
ccaatttctgtatgcaggcaaatgg

SEQ ID NO: 3232343 - DNA, 25 bp, Homo sapien
caatttctgtatgcaggcaaatggt

SEQ ID NO: 3232344 - DNA, 25 bp, Homo sapien
cagtcctacctagaaagctctgtaa

SEQ ID NO: 3232345 - DNA, 25 bp, Homo sapien
taattctggtgaccaaagatcccca

SEQ ID NO: 3232346 - DNA, 25 bp, Homo sapien
cacacgtttgaaggaatttctggac

SEQ ID NO: 3232347 - DNA, 25 bp, Homo sapien
cgaaggcccggctttgagtacacac

SEQ ID NO: 3232348 - DNA, 25 bp, Homo sapien
tataagacctggcagtaggccagca

SEQ ID NO: 3232349 - DNA, 25 bp, Homo sapien
gtgttggatttataagacctggcag

SEQ ID NO: 3232350 - DNA, 25 bp, Homo sapien
gatttataagacctggcagtaggcc

SEQ ID NO: 3232351 - DNA, 25 bp, Homo sapien
tggatttataagacctggcagtagg

SEQ ID NO: 3232352 - DNA, 25 bp, Homo sapien
ttcctctgcaaccttgtggtcatac

SEQ ID NO: 3232353 - DNA, 25 bp, Homo sapien
agtcatttcatgttcctctgccctg

SEQ ID NO: 3232354 - DNA, 25 bp, Homo sapien
ccttgtggtcataccatggcatatt

SEQ ID NO: 3232355 - DNA, 25 bp, Homo sapien
tcatgttcctctgccctgtaggtat

SEQ ID NO: 3232356 - DNA, 25 bp, Homo sapien
cataaatgcatccatttggactgac

SEQ ID NO: 3232357 - DNA, 25 bp, Homo sapien
ttcataaatgcatccatttggactg

SEQ ID NO: 3232358 - DNA, 25 bp, Homo sapien
ataaatgcatccatttggactgaca

SEQ ID NO: 3232359 - DNA, 25 bp, Homo sapien
tcataaatgcatccatttggactga

SEQ ID NO: 3232360 - DNA, 25 bp, Homo sapien
tcactcagcaacttggttcctcacg

SEQ ID NO: 3232361 - DNA, 25 bp, Homo sapien
ttaacaaactgaggtaggtcagttg

SEQ ID NO: 3232362 - DNA, 25 bp, Homo sapien
ctcacgggtagagtcatgcagctgt

SEQ ID NO: 3232363 - DNA, 25 bp, Homo sapien
aactgaggtaggtcagttgtgctgc

SEQ ID NO: 3232364 - DNA, 25 bp, Homo sapien
tggaaagaatgtgtggggggaccat

SEQ ID NO: 3232365 - DNA, 25 bp, Homo sapien
tacgcattcaacacccaggtccttc

SEQ ID NO: 3232366 - DNA, 25 bp, Homo sapien
atacgcattcaacacccaggtcctt

SEQ ID NO: 3232367 - DNA, 25 bp, Homo sapien
gcctgatccagccacttccagggag

SEQ ID NO: 3232368 - DNA, 25 bp, Homo sapien
tggttcatgggcctgatccagccac

SEQ ID NO: 3232369 - DNA, 25 bp, Homo sapien
gaaacctctggttcatgggcctgat

SEQ ID NO: 3232370 - DNA, 25 bp, Homo sapien
acagaaacctctggttcatgggcct

SEQ ID NO: 3232371 - DNA, 25 bp, Homo sapien
tggccagagtccgcttcttcctgag

SEQ ID NO: 3232372 - DNA, 25 bp, Homo sapien
ctggacttggccagagtccgcttct

SEQ ID NO: 3232373 - DNA, 25 bp, Homo sapien
tcttcctgagacttccatgtggagc

SEQ ID NO: 3232374 - DNA, 25 bp, Homo sapien
cagagtccgcttcttcctgagactt

SEQ ID NO: 3232375 - DNA, 25 bp, Homo sapien
atgacctcactaacaagatggccgc

SEQ ID NO: 3232376 - DNA, 25 bp, Homo sapien
ggctccatgaccctgggctgctatt

SEQ ID NO: 3232377 - DNA, 25 bp, Homo sapien
ccttttcagatggagcaccttggct

SEQ ID NO: 3232378 - DNA, 25 bp, Homo sapien
tctcactaaccgcaaaggagttttc

SEQ ID NO: 3232379 - DNA, 25 bp, Homo sapien
agagaggatagtgcgggtcttcttc

SEQ ID NO: 3232380 - DNA, 25 bp, Homo sapien
aagagaaagagaggatagtgcgggt

SEQ ID NO: 3232381 - DNA, 25 bp, Homo sapien
aaagagaggatagtgcgggtcttct

SEQ ID NO: 3232382 - DNA, 25 bp, Homo sapien
gagaaagagaggatagtgcgggtct

SEQ ID NO: 3232383 - DNA, 25 bp, Homo sapien
tccatctggaatagccgagagcctt

SEQ ID NO: 3232384 - DNA, 25 bp, Homo sapien
tcttggctgcagctgaattttccac

SEQ ID NO: 3232385 - DNA, 25 bp, Homo sapien
ggtcatggagtggtacaaccttctc

SEQ ID NO: 3232386 - DNA, 25 bp, Homo sapien
tataaggcccttgatgaggtcatgg

SEQ ID NO: 3232387 - DNA, 25 bp, Homo sapien
ctaaaggatggtgcccctagctgtc

SEQ ID NO: 3232388 - DNA, 25 bp, Homo sapien
cttcctcggtaaggagctccccaag

SEQ ID NO: 3232389 - DNA, 25 bp, Homo sapien
ggaaggctcccagtatgctaaagga

SEQ ID NO: 3232390 - DNA, 25 bp, Homo sapien
ccccaagacagggtaggcctggctc

SEQ ID NO: 3232391 - DNA, 25 bp, Homo sapien
gagttactcttgacaccagcctcca

SEQ ID NO: 3232392 - DNA, 25 bp, Homo sapien
gaagacattgtggtaaggcttgaat

SEQ ID NO: 3232393 - DNA, 25 bp, Homo sapien
acattgaaaagtttgcttctccact

SEQ ID NO: 3232394 - DNA, 25 bp, Homo sapien
gaaaggctgagttactcttgacacc

SEQ ID NO: 3232395 - DNA, 25 bp, Homo sapien
gagcagccacggccctgggatatca

SEQ ID NO: 3232396 - DNA, 25 bp, Homo sapien
agccacggccctgggatatcaaaga

SEQ ID NO: 3232397 - DNA, 25 bp, Homo sapien
caggtaccatcacaagtcgaaggat

SEQ ID NO: 3232398 - DNA, 25 bp, Homo sapien
gagtgggtgtgtgtctacggcagca

SEQ ID NO: 3232399 - DNA, 25 bp, Homo sapien
aggaaaatgtgtcttaagtaagagg

SEQ ID NO: 3232400 - DNA, 25 bp, Homo sapien
aatgtgtcttaagtaagagggtggg

SEQ ID NO: 3232401 - DNA, 25 bp, Homo sapien
aaatgtgtcttaagtaagagggtgg

SEQ ID NO: 3232402 - DNA, 25 bp, Homo sapien
aaaatgtgtcttaagtaagagggtg

SEQ ID NO: 3232403 - DNA, 25 bp, Homo sapien
agtggccccgaggaacgcacagcca

SEQ ID NO: 3232404 - DNA, 25 bp, Homo sapien
cgaggaacgcacagccatcccattt

SEQ ID NO: 3232405 - DNA, 25 bp, Homo sapien
tgggcactccagaacgggtacactt

SEQ ID NO: 3232406 - DNA, 25 bp, Homo sapien
tggccacactctggcgtgggcactc

SEQ ID NO: 3232407 - DNA, 25 bp, Homo sapien
gtggccaaatgcacaacatatgtgg

SEQ ID NO: 3232408 - DNA, 25 bp, Homo sapien
tgtacttcagtgggataaatatctt

SEQ ID NO: 3232409 - DNA, 25 bp, Homo sapien
tctctcttcagactcgctgccgttc

SEQ ID NO: 3232410 - DNA, 25 bp, Homo sapien
ttccctgagcgccttcgtgtttctt

SEQ ID NO: 3232411 - DNA, 25 bp, Homo sapien
ttcagactcgctgccgttcggtttc

SEQ ID NO: 3232412 - DNA, 25 bp, Homo sapien
ccctgagcgccttcgtgtttcttcg

SEQ ID NO: 3232413 - DNA, 25 bp, Homo sapien
gaaagcttcgtctgacacatctcat

SEQ ID NO: 3232414 - DNA, 25 bp, Homo sapien
cagccacggtttgggatcatccata

SEQ ID NO: 3232415 - DNA, 25 bp, Homo sapien
tcatcgggtagtacagatttcacca

SEQ ID NO: 3232416 - DNA, 25 bp, Homo sapien
tagaccatcgccttgcacgagtaac

SEQ ID NO: 3232417 - DNA, 25 bp, Homo sapien
tccggaagggacaagctgatgttga

SEQ ID NO: 3232418 - DNA, 25 bp, Homo sapien
ctggtgcccattacatgcaaggcta

SEQ ID NO: 3232419 - DNA, 25 bp, Homo sapien
gctattcttatcctctctgctccat

SEQ ID NO: 3232420 - DNA, 25 bp, Homo sapien
taggatttccggaagggacaagctg

SEQ ID NO: 3232421 - DNA, 25 bp, Homo sapien
ccttcttcttcgtttcaggctctgt

SEQ ID NO: 3232422 - DNA, 25 bp, Homo sapien
tcttcttcgtttcaggctctgtcct

SEQ ID NO: 3232423 - DNA, 25 bp, Homo sapien
ttcttcttcgtttcaggctctgtcc

SEQ ID NO: 3232424 - DNA, 25 bp, Homo sapien
ttcttcgtttcaggctctgtcctcc

SEQ ID NO: 3232425 - DNA, 25 bp, Homo sapien
tgttgcaggaagaacccgtgtcccc

SEQ ID NO: 3232426 - DNA, 25 bp, Homo sapien
tccacctgctgaaatcggtcatatg

SEQ ID NO: 3232427 - DNA, 25 bp, Homo sapien
cccgtcctgggcctgaatagcattt

SEQ ID NO: 3232428 - DNA, 25 bp, Homo sapien
ctccagaacaaaagaccatgcccgt

SEQ ID NO: 3232429 - DNA, 25 bp, Homo sapien
ggagcagccatcatggcatttgctt

SEQ ID NO: 3232430 - DNA, 25 bp, Homo sapien
gccatcatggcatttgcttccacag

SEQ ID NO: 3232431 - DNA, 25 bp, Homo sapien
catcatggcatttgcttccacagtc

SEQ ID NO: 3232432 - DNA, 25 bp, Homo sapien
cagccatcatggcatttgcttccac

SEQ ID NO: 3232433 - DNA, 25 bp, Homo sapien
gctacattctttgatttgctcctca

SEQ ID NO: 3232434 - DNA, 25 bp, Homo sapien
ccgggcttctgctacattctttgat

SEQ ID NO: 3232435 - DNA, 25 bp, Homo sapien
cgggcttctgctacattctttgatt

SEQ ID NO: 3232436 - DNA, 25 bp, Homo sapien
tctgctacattctttgatttgctcc

SEQ ID NO: 3232437 - DNA, 25 bp, Homo sapien
agatggcggcttcaggacaagaaag

SEQ ID NO: 3232438 - DNA, 25 bp, Homo sapien
tgttatgggccacgtgtttctcctg

SEQ ID NO: 3232439 - DNA, 25 bp, Homo sapien
gaagtgattgtgttatgggccacgt

SEQ ID NO: 3232440 - DNA, 25 bp, Homo sapien
tctcctcctagcagccaagatggcg

SEQ ID NO: 3232441 - DNA, 25 bp, Homo sapien
gcatttaagctagggcatatcccaa

SEQ ID NO: 3232442 - DNA, 25 bp, Homo sapien
tagtactccccagatacgagttggc

SEQ ID NO: 3232443 - DNA, 25 bp, Homo sapien
caaagtcagatgaccgcttgggcat

SEQ ID NO: 3232444 - DNA, 25 bp, Homo sapien
tgtaataccacatcctgcatttgag

SEQ ID NO: 3232445 - DNA, 25 bp, Homo sapien
gaataacagccacaaaccttacaaa

SEQ ID NO: 3232446 - DNA, 25 bp, Homo sapien
gatagtgtacgatgaaaacattact

SEQ ID NO: 3232447 - DNA, 25 bp, Homo sapien
caaaagaaactatagattttacagg

SEQ ID NO: 3232448 - DNA, 25 bp, Homo sapien
acaggtatatagctcgtgcagtatg

SEQ ID NO: 3232449 - DNA, 25 bp, Homo sapien
ctatggctacaaccgtaggattttt

SEQ ID NO: 3232450 - DNA, 25 bp, Homo sapien
ttttctgtagcaatgactgttggtt

SEQ ID NO: 3232451 - DNA, 25 bp, Homo sapien
gcaatgactgttggttcttggtgtg

SEQ ID NO: 3232452 - DNA, 25 bp, Homo sapien
ctgctctatggctacaaccgtagga

SEQ ID NO: 3232453 - DNA, 25 bp, Homo sapien
ggtgaccttgtcagaaacaagtctc

SEQ ID NO: 3232454 - DNA, 25 bp, Homo sapien
ctggagagaaccgtagttgggccac

SEQ ID NO: 3232455 - DNA, 25 bp, Homo sapien
gagagaaccgtagttgggccacagc

SEQ ID NO: 3232456 - DNA, 25 bp, Homo sapien
tgggtgaccttgtcagaaacaagtc

SEQ ID NO: 3232457 - DNA, 25 bp, Homo sapien
ttccaaacttgaggattcttatgtc

SEQ ID NO: 3232458 - DNA, 25 bp, Homo sapien
gattagcttcaggtgtcctaatgct

SEQ ID NO: 3232459 - DNA, 25 bp, Homo sapien
gaataccaggtgcagatctgattag

SEQ ID NO: 3232460 - DNA, 25 bp, Homo sapien
ctttctcatcctttgagtcgatttt

SEQ ID NO: 3232461 - DNA, 25 bp, Homo sapien
ttaaagcatttctgtgtgaagaaca

SEQ ID NO: 3232462 - DNA, 25 bp, Homo sapien
taaagcatttctgtgtgaagaacac

SEQ ID NO: 3232463 - DNA, 25 bp, Homo sapien
gactctggctgttgcgtctccatct

SEQ ID NO: 3232464 - DNA, 25 bp, Homo sapien
ccacgcggactctggctgttgcgtc

SEQ ID NO: 3232465 - DNA, 25 bp, Homo sapien
cagatctctgatgctccacgcggac

SEQ ID NO: 3232466 - DNA, 25 bp, Homo sapien
agatctctgatgctccacgcggact

SEQ ID NO: 3232467 - DNA, 25 bp, Homo sapien
tctcggatatctttacatgcactta

SEQ ID NO: 3232468 - DNA, 25 bp, Homo sapien
agtggccaactcctctagcacagag

SEQ ID NO: 3232469 - DNA, 25 bp, Homo sapien
tctgtgaaattaggagagcccactt

SEQ ID NO: 3232470 - DNA, 25 bp, Homo sapien
caccctttgtctcggatatctttac

SEQ ID NO: 3232471 - DNA, 25 bp, Homo sapien
cctaacatttgctttcgtgcagcag

SEQ ID NO: 3232472 - DNA, 25 bp, Homo sapien
aactgccatcggagtttgttctgct

SEQ ID NO: 3232473 - DNA, 25 bp, Homo sapien
catcagcatgtcagtagtcaggctg

SEQ ID NO: 3232474 - DNA, 25 bp, Homo sapien
caaactttgctggttgttagcccta

SEQ ID NO: 3232475 - DNA, 25 bp, Homo sapien
aaaatcaggctgacatggtcgctta

SEQ ID NO: 3232476 - DNA, 25 bp, Homo sapien
gagctgcaaaatgggccctaaaatc

SEQ ID NO: 3232477 - DNA, 25 bp, Homo sapien
tggtcgcttaacaagcctcagcatg

SEQ ID NO: 3232478 - DNA, 25 bp, Homo sapien
gctcagcgagtttgtggtgtcaccc

SEQ ID NO: 3232479 - DNA, 25 bp, Homo sapien
ttttttgttgcctgcagttcaatac

SEQ ID NO: 3232480 - DNA, 25 bp, Homo sapien
gtccctttcaccattatgtattggc

SEQ ID NO: 3232481 - DNA, 25 bp, Homo sapien
ctttcaccattatgtattggccctt

SEQ ID NO: 3232482 - DNA, 25 bp, Homo sapien
tatgtattggcccttttttgttgcc

SEQ ID NO: 3232483 - DNA, 25 bp, Homo sapien
tgaccatggttcagtctacgtagaa

SEQ ID NO: 3232484 - DNA, 25 bp, Homo sapien
gccatttgttcatctggtgaccatg

SEQ ID NO: 3232485 - DNA, 25 bp, Homo sapien
cattacacggttaggagtttgcaaa

SEQ ID NO: 3232486 - DNA, 25 bp, Homo sapien
agaatacacagatatcctggttagg

SEQ ID NO: 3232487 - DNA, 25 bp, Homo sapien
gccttgattggctgttaaactgcga

SEQ ID NO: 3232488 - DNA, 25 bp, Homo sapien
aagtgtctcacttggataactgaac

SEQ ID NO: 3232489 - DNA, 25 bp, Homo sapien
cacagtgaaatcgtgggatgaagct

SEQ ID NO: 3232490 - DNA, 25 bp, Homo sapien
gccataattttacaaccaagcaaga

SEQ ID NO: 3232491 - DNA, 25 bp, Homo sapien
gcagattcagagtgtaggcaccaga

SEQ ID NO: 3232492 - DNA, 25 bp, Homo sapien
agaaggcaatcccacaggtgtgcag

SEQ ID NO: 3232493 - DNA, 25 bp, Homo sapien
cagaaggaatctcatggtagatgac

SEQ ID NO: 3232494 - DNA, 25 bp, Homo sapien
ctgtcatttagaggaggtagcttgg

SEQ ID NO: 3232495 - DNA, 25 bp, Homo sapien
tccctcagccgtggaacctggtgag

SEQ ID NO: 3232496 - DNA, 25 bp, Homo sapien
tcaccgaagaaccaatgattgaaat

SEQ ID NO: 3232497 - DNA, 25 bp, Homo sapien
aatgatagtctgtttgcaaatcgtg

SEQ ID NO: 3232498 - DNA, 25 bp, Homo sapien
agctgtgggtcacccactcagtctc

SEQ ID NO: 3232499 - DNA, 25 bp, Homo sapien
cagaggagacggcaaccttggcagt

SEQ ID NO: 3232500 - DNA, 25 bp, Homo sapien
ctagaaaccagtttccaagcaggca

SEQ ID NO: 3232501 - DNA, 25 bp, Homo sapien
tcatcaggatactatggaagtttgg

SEQ ID NO: 3232502 - DNA, 25 bp, Homo sapien
tttctcctcgctcaaaaagggtcaa

SEQ ID NO: 3232503 - DNA, 25 bp, Homo sapien
caccactagtttggtaaagattcct

SEQ ID NO: 3232504 - DNA, 25 bp, Homo sapien
cactcagggtgattgtgtccaccac

SEQ ID NO: 3232505 - DNA, 25 bp, Homo sapien
tcatcttctggagcacggtccttcc

SEQ ID NO: 3232506 - DNA, 25 bp, Homo sapien
tgagtgaatgttgttggttatccac

SEQ ID NO: 3232507 - DNA, 25 bp, Homo sapien
ttgttctgtgtttctcaattatttt

SEQ ID NO: 3232508 - DNA, 25 bp, Homo sapien
tctgtgtttctcaattattttttgc

SEQ ID NO: 3232509 - DNA, 25 bp, Homo sapien
ttctcaattattttttgcttgctca

SEQ ID NO: 3232510 - DNA, 25 bp, Homo sapien
tctcaattattttttgcttgctcac

SEQ ID NO: 3232511 - DNA, 25 bp, Homo sapien
gctggaggctgctcgtatgccagtt

SEQ ID NO: 3232512 - DNA, 25 bp, Homo sapien
agcccagctcccttatgcggtaagc

SEQ ID NO: 3232513 - DNA, 25 bp, Homo sapien
agacacacacttgctgtgattctga

SEQ ID NO: 3232514 - DNA, 25 bp, Homo sapien
gccagttggcgcctatgagcccaga

SEQ ID NO: 3232515 - DNA, 25 bp, Homo sapien
tttgctgtcatctcctcaagctgtt

SEQ ID NO: 3232516 - DNA, 25 bp, Homo sapien
ttttgctgtcatctcctcaagctgt

SEQ ID NO: 3232517 - DNA, 25 bp, Homo sapien
ttgctgtcatctcctcaagctgttc

SEQ ID NO: 3232518 - DNA, 25 bp, Homo sapien
tgctgtcatctcctcaagctgttca

SEQ ID NO: 3232519 - DNA, 25 bp, Homo sapien
ctactgtctggctttactcttctgg

SEQ ID NO: 3232520 - DNA, 25 bp, Homo sapien
gtctggctttactcttctggagaag

SEQ ID NO: 3232521 - DNA, 25 bp, Homo sapien
tactgtctggctttactcttctgga

SEQ ID NO: 3232522 - DNA, 25 bp, Homo sapien
ggctttactcttctggagaagccaa

SEQ ID NO: 3232523 - DNA, 25 bp, Homo sapien
caaaacatgcatttcaagcagaagt

SEQ ID NO: 3232524 - DNA, 25 bp, Homo sapien
tgcatatctaatgttcttaacaaaa

SEQ ID NO: 3232525 - DNA, 25 bp, Homo sapien
catttcaagcagaagttttaagggt

SEQ ID NO: 3232526 - DNA, 25 bp, Homo sapien
ttttcacagcacttccttccggcag

SEQ ID NO: 3232527 - DNA, 25 bp, Homo sapien
gacaatttcataagggtattgacca

SEQ ID NO: 3232528 - DNA, 25 bp, Homo sapien
gaccacccacagagagtatgccttc

SEQ ID NO: 3232529 - DNA, 25 bp, Homo sapien
gctctctgtcctacttaatgttcca

SEQ ID NO: 3232530 - DNA, 25 bp, Homo sapien
agtaacaatccatcttactttcaag

SEQ ID NO: 3232531 - DNA, 25 bp, Homo sapien
tggctttattgtaactccaaagagg

SEQ ID NO: 3232532 - DNA, 25 bp, Homo sapien
tttcatcaacacgaatatctttctc

SEQ ID NO: 3232533 - DNA, 25 bp, Homo sapien
tgtaactccaaagaggtcagtctgt

SEQ ID NO: 3232534 - DNA, 25 bp, Homo sapien
tctcatagaacctggtaaacaagga

SEQ ID NO: 3232535 - DNA, 25 bp, Homo sapien
cagcagtaattggaaggcaggagcc

SEQ ID NO: 3232536 - DNA, 25 bp, Homo sapien
ttctaaagcacatggagagtcatca

SEQ ID NO: 3232537 - DNA, 25 bp, Homo sapien
tgggcagggattggattctacagac

SEQ ID NO: 3232538 - DNA, 25 bp, Homo sapien
cacctcttgatggagggtagccaga

SEQ ID NO: 3232539 - DNA, 25 bp, Homo sapien
cttaattggctgacatgaaggctgg

SEQ ID NO: 3232540 - DNA, 25 bp, Homo sapien
tgtgattccccataacacactggtt

SEQ ID NO: 3232541 - DNA, 25 bp, Homo sapien
tttaagggccaataattcagacagg

SEQ ID NO: 3232542 - DNA, 25 bp, Homo sapien
catgacttgatggtgcaaaataacc

SEQ ID NO: 3232543 - DNA, 25 bp, Homo sapien
ctaatgaagttcctccaaatttcat

SEQ ID NO: 3232544 - DNA, 25 bp, Homo sapien
agttattcccaatattcccttcatc

SEQ ID NO: 3232545 - DNA, 25 bp, Homo sapien
cccaatattcccttcatctaatgaa

SEQ ID NO: 3232546 - DNA, 25 bp, Homo sapien
ccttcatctaatgaagttcctccaa

SEQ ID NO: 3232547 - DNA, 25 bp, Homo sapien
aactaaacggcctttgtgggagcag

SEQ ID NO: 3232548 - DNA, 25 bp, Homo sapien
caggagtacccgaggcagatcctgc

SEQ ID NO: 3232549 - DNA, 25 bp, Homo sapien
agaggagccctgagctcgcacagga

SEQ ID NO: 3232550 - DNA, 25 bp, Homo sapien
cagttattgttgacaactaaacggc

SEQ ID NO: 3232551 - DNA, 25 bp, Homo sapien
cacacggtctaaagtgacaggccag

SEQ ID NO: 3232552 - DNA, 25 bp, Homo sapien
gataatattaagaccctcatcatgg

SEQ ID NO: 3232553 - DNA, 25 bp, Homo sapien
gcttaattgtaagtaaggcagttcc

SEQ ID NO: 3232554 - DNA, 25 bp, Homo sapien
tatctggaactacaaagcgcacgac

SEQ ID NO: 3232555 - DNA, 25 bp, Homo sapien
tcatttcttaatcttgtagtttcca

SEQ ID NO: 3232556 - DNA, 25 bp, Homo sapien
ctcatttcttaatcttgtagtttcc

SEQ ID NO: 3232557 - DNA, 25 bp, Homo sapien
tcatatgaggagatacctggatacc

SEQ ID NO: 3232558 - DNA, 25 bp, Homo sapien
tcacacaatgatggcaagagtcata

SEQ ID NO: 3232559 - DNA, 25 bp, Homo sapien
tgttcggaagttggaaaatgctgct

SEQ ID NO: 3232560 - DNA, 25 bp, Homo sapien
ccaagtacttgaagatgttcggaag

SEQ ID NO: 3232561 - DNA, 25 bp, Homo sapien
aatttctgcgttggatggatcaaga

SEQ ID NO: 3232562 - DNA, 25 bp, Homo sapien
cagtgctagaatttctgcgttggat

SEQ ID NO: 3232563 - DNA, 25 bp, Homo sapien
taggttcagtgctagaatttctgcg

SEQ ID NO: 3232564 - DNA, 25 bp, Homo sapien
ttttttcgcctaggttcagtgctag

SEQ ID NO: 3232565 - DNA, 25 bp, Homo sapien
ggcaaacagcgttcagatgacagat

SEQ ID NO: 3232566 - DNA, 25 bp, Homo sapien
caaacagcgttcagatgacagattt

SEQ ID NO: 3232567 - DNA, 25 bp, Homo sapien
ttctttatggatggcaaacagcgtt

SEQ ID NO: 3232568 - DNA, 25 bp, Homo sapien
tctttatggatggcaaacagcgttc

SEQ ID NO: 3232569 - DNA, 25 bp, Homo sapien
tcaagtaaaagtgtccccgaatgga

SEQ ID NO: 3232570 - DNA, 25 bp, Homo sapien
cccgaatggagagcgattctgtcct

SEQ ID NO: 3232571 - DNA, 25 bp, Homo sapien
gccattgaataggtcaaacgtcctg

SEQ ID NO: 3232572 - DNA, 25 bp, Homo sapien
caatgtgtgccaagggtcaagtaaa

SEQ ID NO: 3232573 - DNA, 25 bp, Homo sapien
ctaatggactgatggagcagctgct

SEQ ID NO: 3232574 - DNA, 25 bp, Homo sapien
cactatggggtggtctgtcgccaaa

SEQ ID NO: 3232575 - DNA, 25 bp, Homo sapien
gcattttgttcctggtcactaatgg

SEQ ID NO: 3232576 - DNA, 25 bp, Homo sapien
gctggaaagcagttcccactatggg

SEQ ID NO: 3232577 - DNA, 25 bp, Homo sapien
tttagcagttcttctcaaatgaatc

SEQ ID NO: 3232578 - DNA, 25 bp, Homo sapien
tagcagttcttctcaaatgaatcat

SEQ ID NO: 3232579 - DNA, 25 bp, Homo sapien
ttagcagttcttctcaaatgaatca

SEQ ID NO: 3232580 - DNA, 25 bp, Homo sapien
ctggtactggattggcaaaaccttc

SEQ ID NO: 3232581 - DNA, 25 bp, Homo sapien
tactggattggcaaaaccttcccca

SEQ ID NO: 3232582 - DNA, 25 bp, Homo sapien
tggtactggattggcaaaaccttcc

SEQ ID NO: 3232583 - DNA, 25 bp, Homo sapien
agtgatcacatttaaggtcttgggc

SEQ ID NO: 3232584 - DNA, 25 bp, Homo sapien
cagatggtgtggctgaatatggcct

SEQ ID NO: 3232585 - DNA, 25 bp, Homo sapien
aactaatccttgcttatggtccatg

SEQ ID NO: 3232586 - DNA, 25 bp, Homo sapien
cctataggctatagtttgtctatcc

SEQ ID NO: 3232587 - DNA, 25 bp, Homo sapien
actcaaggatgcccttgtagtacaa

SEQ ID NO: 3232588 - DNA, 25 bp, Homo sapien
tctgctgtcatgactcaaggatgcc

SEQ ID NO: 3232589 - DNA, 25 bp, Homo sapien
aaggatgcccttgtagtacaaaagc

SEQ ID NO: 3232590 - DNA, 25 bp, Homo sapien
tcaaggatgcccttgtagtacaaaa

SEQ ID NO: 3232591 - DNA, 25 bp, Homo sapien
aaagctttgatgtcagaagaaggag

SEQ ID NO: 3232592 - DNA, 25 bp, Homo sapien
taaacacagccttagcagtaaagct

SEQ ID NO: 3232593 - DNA, 25 bp, Homo sapien
tgtcactcagtagtcttataaccat

SEQ ID NO: 3232594 - DNA, 25 bp, Homo sapien
tctgaagttggatgaagggtattcc

SEQ ID NO: 3232595 - DNA, 25 bp, Homo sapien
ttcctcgcttcgtggacagattcat

SEQ ID NO: 3232596 - DNA, 25 bp, Homo sapien
tgtgactttcctcgcttcgtggaca

SEQ ID NO: 3232597 - DNA, 25 bp, Homo sapien
cctgtgactttcctcgcttcgtgga

SEQ ID NO: 3232598 - DNA, 25 bp, Homo sapien
gactttcctcgcttcgtggacagat

SEQ ID NO: 3232599 - DNA, 25 bp, Homo sapien
agcagcagataaacgttttctataa

SEQ ID NO: 3232600 - DNA, 25 bp, Homo sapien
gcagataaacgttttctataacttc

SEQ ID NO: 3232601 - DNA, 25 bp, Homo sapien
cagcagataaacgttttctataact

SEQ ID NO: 3232602 - DNA, 25 bp, Homo sapien
gcagcagataaacgttttctataac

SEQ ID NO: 3232603 - DNA, 25 bp, Homo sapien
agctccagaagggtggttccctcct

SEQ ID NO: 3232604 - DNA, 25 bp, Homo sapien
tcagctccagaagggtggttccctc

SEQ ID NO: 3232605 - DNA, 25 bp, Homo sapien
gatttcagctccagaagggtggttc

SEQ ID NO: 3232606 - DNA, 25 bp, Homo sapien
tttcagctccagaagggtggttccc

SEQ ID NO: 3232607 - DNA, 25 bp, Homo sapien
gaagacgtagctctggctttgtttg

SEQ ID NO: 3232608 - DNA, 25 bp, Homo sapien
aaacataagaagccaggcatttcta

SEQ ID NO: 3232609 - DNA, 25 bp, Homo sapien
ctgatgaagacgtagctctggcttt

SEQ ID NO: 3232610 - DNA, 25 bp, Homo sapien
gatgaagacgtagctctggctttgt

SEQ ID NO: 3232611 - DNA, 25 bp, Homo sapien
ccatcatcacatgggtcatggaatt

SEQ ID NO: 3232612 - DNA, 25 bp, Homo sapien
tcatcacatgggtcatggaattctt

SEQ ID NO: 3232613 - DNA, 25 bp, Homo sapien
aagccatcatcacatgggtcatgga

SEQ ID NO: 3232614 - DNA, 25 bp, Homo sapien
agccatcatcacatgggtcatggaa

SEQ ID NO: 3232615 - DNA, 25 bp, Homo sapien
cacaaaacttcttgtctgtgaacta

SEQ ID NO: 3232616 - DNA, 25 bp, Homo sapien
aaacttcttgtctgtgaactatcaa

SEQ ID NO: 3232617 - DNA, 25 bp, Homo sapien
tcacaaaacttcttgtctgtgaact

SEQ ID NO: 3232618 - DNA, 25 bp, Homo sapien
caaaacttcttgtctgtgaactatc

SEQ ID NO: 3232619 - DNA, 25 bp, Homo sapien
tcgtgccctccgcagcaataaaaac

SEQ ID NO: 3232620 - DNA, 25 bp, Homo sapien
tgttttgcaagcctctggccgctct

SEQ ID NO: 3232621 - DNA, 25 bp, Homo sapien
gaagaaatgcaagacatcgctgtct

SEQ ID NO: 3232622 - DNA, 25 bp, Homo sapien
gtgactttgcggtgtgaacgcagcc

SEQ ID NO: 3232623 - DNA, 25 bp, Homo sapien
agggcggggatggcgggcagctcac

SEQ ID NO: 3232624 - DNA, 25 bp, Homo sapien
agagagggcggggatggcgggcagc

SEQ ID NO: 3232625 - DNA, 25 bp, Homo sapien
tcaagagagggcggggatggcgggc

SEQ ID NO: 3232626 - DNA, 25 bp, Homo sapien
agagggcggggatggcgggcagctc

SEQ ID NO: 3232627 - DNA, 25 bp, Homo sapien
gagactggtgcgctctcagcctcgt

SEQ ID NO: 3232628 - DNA, 25 bp, Homo sapien
cacctgtacctgtactcggccgtta

SEQ ID NO: 3232629 - DNA, 25 bp, Homo sapien
ggccgtcgccaacctgtccttggaa

SEQ ID NO: 3232630 - DNA, 25 bp, Homo sapien
agagcagaggattccgccgacctcc

SEQ ID NO: 3232631 - DNA, 25 bp, Homo sapien
agttttgtagctccgaatgggcgac

SEQ ID NO: 3232632 - DNA, 25 bp, Homo sapien
tccagagttttgtagctccgaatgg

SEQ ID NO: 3232633 - DNA, 25 bp, Homo sapien
cagagttttgtagctccgaatgggc

SEQ ID NO: 3232634 - DNA, 25 bp, Homo sapien
tcccccggagcttccgaaactgctg

SEQ ID NO: 3232635 - DNA, 25 bp, Homo sapien
agcctctgaaaatgacccgcgcctt

SEQ ID NO: 3232636 - DNA, 25 bp, Homo sapien
tccgagaccgaaaagcgcaaatgac

SEQ ID NO: 3232637 - DNA, 25 bp, Homo sapien
gcccgtcctttgcagagcctctgaa

SEQ ID NO: 3232638 - DNA, 25 bp, Homo sapien
tccacagtgttctttcgtccgagac

SEQ ID NO: 3232639 - DNA, 25 bp, Homo sapien
cggattccgaggcagaagggtgtaa

SEQ ID NO: 3232640 - DNA, 25 bp, Homo sapien
cactgccgggaagacggattccgag

SEQ ID NO: 3232641 - DNA, 25 bp, Homo sapien
cagtgcaagacactgccgggaagac

SEQ ID NO: 3232642 - DNA, 25 bp, Homo sapien
agacactgccgggaagacggattcc

SEQ ID NO: 3232643 - DNA, 25 bp, Homo sapien
gaaaacactaatgaacttactgcgc

SEQ ID NO: 3232644 - DNA, 25 bp, Homo sapien
acttactgcgccatttgaaattcac

SEQ ID NO: 3232645 - DNA, 25 bp, Homo sapien
tgcccgccgccgattgaaaacacta

SEQ ID NO: 3232646 - DNA, 25 bp, Homo sapien
aattcacacgcaccaacaaaatggg

SEQ ID NO: 3232647 - DNA, 25 bp, Homo sapien
tcacgctgatgaatggctcttgccg

SEQ ID NO: 3232648 - DNA, 25 bp, Homo sapien
tcttgccggctttcggctctgatga

SEQ ID NO: 3232649 - DNA, 25 bp, Homo sapien
tctcgccgtgatttaggggtcatcc

SEQ ID NO: 3232650 - DNA, 25 bp, Homo sapien
ccgtgaataacacttcacgctgatg

SEQ ID NO: 3232651 - DNA, 25 bp, Homo sapien
gagtttcccgatcaagtttcagccg

SEQ ID NO: 3232652 - DNA, 25 bp, Homo sapien
ttctagtgaaaagaccacccagtgg

SEQ ID NO: 3232653 - DNA, 25 bp, Homo sapien
gaatccgcgcgctgagaagatgtcc

SEQ ID NO: 3232654 - DNA, 25 bp, Homo sapien
taatttttgaaacgcccagctcagg

SEQ ID NO: 3232655 - DNA, 25 bp, Homo sapien
tcacaacaatcggaaactataagcg

SEQ ID NO: 3232656 - DNA, 25 bp, Homo sapien
gatgtattcattcccaccacagaag

SEQ ID NO: 3232657 - DNA, 25 bp, Homo sapien
cagttgcgatctagtatgcatctca

SEQ ID NO: 3232658 - DNA, 25 bp, Homo sapien
caggagaggtcttttgctgttaaca

SEQ ID NO: 3232659 - DNA, 25 bp, Homo sapien
gaaaaagcaggagggtcgcctctta

SEQ ID NO: 3232660 - DNA, 25 bp, Homo sapien
aagtaggccacgctcctatgggtct

SEQ ID NO: 3232661 - DNA, 25 bp, Homo sapien
gtggcaatcaacttcaatagacaca

SEQ ID NO: 3232662 - DNA, 25 bp, Homo sapien
tgctgtcggtatctccttggcaggg

SEQ ID NO: 3232663 - DNA, 25 bp, Homo sapien
ttgtatcgaaaagcctctactctca

SEQ ID NO: 3232664 - DNA, 25 bp, Homo sapien
cattccaattgtatcgaaaagcctc

SEQ ID NO: 3232665 - DNA, 25 bp, Homo sapien
cacgacatgcaaaagcgtgttggct

SEQ ID NO: 3232666 - DNA, 25 bp, Homo sapien
acccacgtgcacacgacatgcaaaa

SEQ ID NO: 3232667 - DNA, 25 bp, Homo sapien
gtaacacctcgtgcaagacaaaggg

SEQ ID NO: 3232668 - DNA, 25 bp, Homo sapien
caagaagccgttattaagcaccacc

SEQ ID NO: 3232669 - DNA, 25 bp, Homo sapien
acagcggcttctgctccgtgcgggt

SEQ ID NO: 3232670 - DNA, 25 bp, Homo sapien
gcaatgcagatggtaacacctcgtg

SEQ ID NO: 3232671 - DNA, 25 bp, Homo sapien
gttgaatcgagaaatgcctctacag

SEQ ID NO: 3232672 - DNA, 25 bp, Homo sapien
taaggatatagcagttgaatcgaga

SEQ ID NO: 3232673 - DNA, 25 bp, Homo sapien
aatgcctctacagtactgtctttca

SEQ ID NO: 3232674 - DNA, 25 bp, Homo sapien
ttaaattgcctttaaggatatagca

SEQ ID NO: 3232675 - DNA, 25 bp, Homo sapien
tctgctgataccaagaaatccttgc

SEQ ID NO: 3232676 - DNA, 25 bp, Homo sapien
taaaggtcgctgaggagctgcaatc

SEQ ID NO: 3232677 - DNA, 25 bp, Homo sapien
tacagggtcgtgtggataacaggca

SEQ ID NO: 3232678 - DNA, 25 bp, Homo sapien
tacagtctgaagtgaccctactatg

SEQ ID NO: 3232679 - DNA, 25 bp, Homo sapien
tcaaggcctgccctagacatacagg

SEQ ID NO: 3232680 - DNA, 25 bp, Homo sapien
tgacacctgctcgtcaggaaatggt

SEQ ID NO: 3232681 - DNA, 25 bp, Homo sapien
cattgccgctgacttttcctgtcag

SEQ ID NO: 3232682 - DNA, 25 bp, Homo sapien
aaatggtcgcctgcacctatttcca

SEQ ID NO: 3232683 - DNA, 25 bp, Homo sapien
tttccattgccgctgacttttcctg

SEQ ID NO: 3232684 - DNA, 25 bp, Homo sapien
tgactacgttgaggcactgagcaga

SEQ ID NO: 3232685 - DNA, 25 bp, Homo sapien
tacatgagcctaaagataacaccgc

SEQ ID NO: 3232686 - DNA, 25 bp, Homo sapien
aaaagaccacgatgtgctgactacg

SEQ ID NO: 3232687 - DNA, 25 bp, Homo sapien
tgggaggcaacgactgagacaacct

SEQ ID NO: 3232688 - DNA, 25 bp, Homo sapien
tcaactattttagttaggagagcaa

SEQ ID NO: 3232689 - DNA, 25 bp, Homo sapien
gagagcaatagtcacaaagcagcag

SEQ ID NO: 3232690 - DNA, 25 bp, Homo sapien
tggaaaagggtgtgatagacacggg

SEQ ID NO: 3232691 - DNA, 25 bp, Homo sapien
tgttttaagccacggtcaatgtggg

SEQ ID NO: 3232692 - DNA, 25 bp, Homo sapien
tgcactttgcctgcgtgtacgaagg

SEQ ID NO: 3232693 - DNA, 25 bp, Homo sapien
tgttccggatgtaaagcacttctca

SEQ ID NO: 3232694 - DNA, 25 bp, Homo sapien
aatgagttaggtcgccagatgtggc

SEQ ID NO: 3232695 - DNA, 25 bp, Homo sapien
tgtaaatcagtcatagcaacgctcc

SEQ ID NO: 3232696 - DNA, 25 bp, Homo sapien
cattcatcaaggaatccctctccag

SEQ ID NO: 3232697 - DNA, 25 bp, Homo sapien
agagggagacattctcgtgaatcca

SEQ ID NO: 3232698 - DNA, 25 bp, Homo sapien
tagggcgaaggcattcatcaaggaa

SEQ ID NO: 3232699 - DNA, 25 bp, Homo sapien
caaatcataggggttaggtaagcgg

SEQ ID NO: 3232700 - DNA, 25 bp, Homo sapien
tctgtgatacacaccggtctacgga

SEQ ID NO: 3232701 - DNA, 25 bp, Homo sapien
catcggaagcctcagtaggtgctgc

SEQ ID NO: 3232702 - DNA, 25 bp, Homo sapien
gagacagttctaaaaaatcaggccc

SEQ ID NO: 3232703 - DNA, 25 bp, Homo sapien
gatttaggccctactgccagtcagg

SEQ ID NO: 3232704 - DNA, 25 bp, Homo sapien
catgctgcgtgatgccagaagagac

SEQ ID NO: 3232705 - DNA, 25 bp, Homo sapien
tggacctggaatcgcagcatgctgc

SEQ ID NO: 3232706 - DNA, 25 bp, Homo sapien
cagaagagactgtaggacgaagtga

SEQ ID NO: 3232707 - DNA, 25 bp, Homo sapien
aagggtgaggaagagatcggccgtc

SEQ ID NO: 3232708 - DNA, 25 bp, Homo sapien
tagcatcaagcaagcagcggacatg

SEQ ID NO: 3232709 - DNA, 25 bp, Homo sapien
cacatgctttgagatctgcagataa

SEQ ID NO: 3232710 - DNA, 25 bp, Homo sapien
gctgtattactaccaaccacaatga

SEQ ID NO: 3232711 - DNA, 25 bp, Homo sapien
caattaccagctaccacctgttgag

SEQ ID NO: 3232712 - DNA, 25 bp, Homo sapien
ttaacctcgggtgcatcccaggctc

SEQ ID NO: 3232713 - DNA, 25 bp, Homo sapien
gatgtacaagcatgccagctgttcc

SEQ ID NO: 3232714 - DNA, 25 bp, Homo sapien
ttgttggcagtcatcagctgcatgt

SEQ ID NO: 3232715 - DNA, 25 bp, Homo sapien
ccaggctcggaatgtcagggatgta

SEQ ID NO: 3232716 - DNA, 25 bp, Homo sapien
gagaagtgagagttacggccctgaa

SEQ ID NO: 3232717 - DNA, 25 bp, Homo sapien
ggaccaacacggtggccaagtgaga

SEQ ID NO: 3232718 - DNA, 25 bp, Homo sapien
tgaataaaagtgaaatccgagccct

SEQ ID NO: 3232719 - DNA, 25 bp, Homo sapien
tgaagacgccagttcccggaataga

SEQ ID NO: 3232720 - DNA, 25 bp, Homo sapien
ccttagttcagacttctcctccaag

SEQ ID NO: 3232721 - DNA, 25 bp, Homo sapien
ttatccttagttcagacttctcctc

SEQ ID NO: 3232722 - DNA, 25 bp, Homo sapien
gtttatccttagttcagacttctcc

SEQ ID NO: 3232723 - DNA, 25 bp, Homo sapien
ttagtttatccttagttcagacttc

SEQ ID NO: 3232724 - DNA, 25 bp, Homo sapien
ttttcttccattgctgatcagcttt

SEQ ID NO: 3232725 - DNA, 25 bp, Homo sapien
cttcctaaaacagttaatgatctca

SEQ ID NO: 3232726 - DNA, 25 bp, Homo sapien
cctaaaacagttaatgatctcatcc

SEQ ID NO: 3232727 - DNA, 25 bp, Homo sapien
ttgctgatcagctttcttcctaaaa

SEQ ID NO: 3232728 - DNA, 25 bp, Homo sapien
taaaatgagggtggtaatacccatc

SEQ ID NO: 3232729 - DNA, 25 bp, Homo sapien
ttctgcaagttagttaaagccacag

SEQ ID NO: 3232730 - DNA, 25 bp, Homo sapien
catccttgggcagtgttgatacata

SEQ ID NO: 3232731 - DNA, 25 bp, Homo sapien
tataccaagtcctctagatgctcac

SEQ ID NO: 3232732 - DNA, 25 bp, Homo sapien
ttaaatgtcgagtttctggagccat

SEQ ID NO: 3232733 - DNA, 25 bp, Homo sapien
taaatgtcgagtttctggagccatt

SEQ ID NO: 3232734 - DNA, 25 bp, Homo sapien
agtcagatctgcttaccttagccaa

SEQ ID NO: 3232735 - DNA, 25 bp, Homo sapien
tagccaacagccaggatatccagaa

SEQ ID NO: 3232736 - DNA, 25 bp, Homo sapien
ggaaagctaagtaacacagtcagat

SEQ ID NO: 3232737 - DNA, 25 bp, Homo sapien
ccctgaggtgttccataaattatct

SEQ ID NO: 3232738 - DNA, 25 bp, Homo sapien
taaagagtgcaacgcagatgaatcc

SEQ ID NO: 3232739 - DNA, 25 bp, Homo sapien
gaggaagacctaccattgcaggaac

SEQ ID NO: 3232740 - DNA, 25 bp, Homo sapien
tggtctctgagcaacatggttgccc

SEQ ID NO: 3232741 - DNA, 25 bp, Homo sapien
taaaaagcactgtccgtggcagggt

SEQ ID NO: 3232742 - DNA, 25 bp, Homo sapien
tatccaaacacgtcctcactccact

SEQ ID NO: 3232743 - DNA, 25 bp, Homo sapien
ttcaatatccaaacacgtcctcact

SEQ ID NO: 3232744 - DNA, 25 bp, Homo sapien
tccaaacacgtcctcactccacttt

SEQ ID NO: 3232745 - DNA, 25 bp, Homo sapien
ctttcaatatccaaacacgtcctca

SEQ ID NO: 3232746 - DNA, 25 bp, Homo sapien
gtgaacatacttgcctaacataagg

SEQ ID NO: 3232747 - DNA, 25 bp, Homo sapien
cattcccaagtaataggacctgacc

SEQ ID NO: 3232748 - DNA, 25 bp, Homo sapien
caggacattttgttcagacgtagac

SEQ ID NO: 3232749 - DNA, 25 bp, Homo sapien
tcctgtttacaggactgagctgagt

SEQ ID NO: 3232750 - DNA, 25 bp, Homo sapien
gtccgtgccagatccttgcagcggc

SEQ ID NO: 3232751 - DNA, 25 bp, Homo sapien
gccccgacctggtgtgcaatccctt

SEQ ID NO: 3232752 - DNA, 25 bp, Homo sapien
agccctcgggcttgtccagagcctc

SEQ ID NO: 3232753 - DNA, 25 bp, Homo sapien
gtcttcaagcgcagcctccagagct

SEQ ID NO: 3232754 - DNA, 25 bp, Homo sapien
tgctggacaataattaccacactac

SEQ ID NO: 3232755 - DNA, 25 bp, Homo sapien
aaattttaaaatgacgatgggccag

SEQ ID NO: 3232756 - DNA, 25 bp, Homo sapien
caataattaccacactaccaattaa

SEQ ID NO: 3232757 - DNA, 25 bp, Homo sapien
aattttaaaatgacgatgggccagg

SEQ ID NO: 3232758 - DNA, 25 bp, Homo sapien
cgatgacagccactttcgattgtca

SEQ ID NO: 3232759 - DNA, 25 bp, Homo sapien
gatgacagccactttcgattgtcat

SEQ ID NO: 3232760 - DNA, 25 bp, Homo sapien
tgctggtgacaacttaggctcaggg

SEQ ID NO: 3232761 - DNA, 25 bp, Homo sapien
tgtgtgcacatcagtcctgctggtg

SEQ ID NO: 3232762 - DNA, 25 bp, Homo sapien
acaacttaggctcagggttcaagtc

SEQ ID NO: 3232763 - DNA, 25 bp, Homo sapien
taggctcagggttcaagtctcattg

SEQ ID NO: 3232764 - DNA, 25 bp, Homo sapien
tctgcggaggaatttgtgtagcgcc

SEQ ID NO: 3232765 - DNA, 25 bp, Homo sapien
gcagccgcgaggaatcatgatcaaa

SEQ ID NO: 3232766 - DNA, 25 bp, Homo sapien
aggacttctgtgtgggtacccggca

SEQ ID NO: 3232767 - DNA, 25 bp, Homo sapien
actctgttgccgtaaagcagccgcg

SEQ ID NO: 3232768 - DNA, 25 bp, Homo sapien
ggttgtcaacaacagtctgcgctgg

SEQ ID NO: 3232769 - DNA, 25 bp, Homo sapien
gaacctccgtttcagggcttctaca

SEQ ID NO: 3232770 - DNA, 25 bp, Homo sapien
gcttctacaaatgctaccgccgggt

SEQ ID NO: 3232771 - DNA, 25 bp, Homo sapien
ttggaaggagtgaggaataacactc

SEQ ID NO: 3232772 - DNA, 25 bp, Homo sapien
cattaggtcacatagcatgcttgca

SEQ ID NO: 3232773 - DNA, 25 bp, Homo sapien
ttataggtaccctcacattaggtca

SEQ ID NO: 3232774 - DNA, 25 bp, Homo sapien
ttttttctgacttccaagcagtaga

SEQ ID NO: 3232775 - DNA, 25 bp, Homo sapien
ttccaaagaattttatagtgtctgt

SEQ ID NO: 3232776 - DNA, 25 bp, Homo sapien
gctcaatgaaggatgccaggatagg

SEQ ID NO: 3232777 - DNA, 25 bp, Homo sapien
tgtaccaatgaggaagatcccgcct

SEQ ID NO: 3232778 - DNA, 25 bp, Homo sapien
tatgcatgccatttcccattgggct

SEQ ID NO: 3232779 - DNA, 25 bp, Homo sapien
gatgaattgtactctagggcatggc

SEQ ID NO: 3232780 - DNA, 25 bp, Homo sapien
ttccagaggacgctgaaaatgacca

SEQ ID NO: 3232781 - DNA, 25 bp, Homo sapien
tccagaggacgctgaaaatgaccac

SEQ ID NO: 3232782 - DNA, 25 bp, Homo sapien
gttgttaatacccataaccacatat

SEQ ID NO: 3232783 - DNA, 25 bp, Homo sapien
tctattaatatgttgttaataccca

SEQ ID NO: 3232784 - DNA, 25 bp, Homo sapien
aatgccagtcctcttcgagttgctg

SEQ ID NO: 3232785 - DNA, 25 bp, Homo sapien
caaaatgccagtcctcttcgagttg

SEQ ID NO: 3232786 - DNA, 25 bp, Homo sapien
cacaaaatgccagtcctcttcgagt

SEQ ID NO: 3232787 - DNA, 25 bp, Homo sapien
aaaatgccagtcctcttcgagttgc

SEQ ID NO: 3232788 - DNA, 25 bp, Homo sapien
gagtaacctctgtgagggagcccca

SEQ ID NO: 3232789 - DNA, 25 bp, Homo sapien
tgagttggaccgacttgacaggcag

SEQ ID NO: 3232790 - DNA, 25 bp, Homo sapien
tcgtgctccgtatctgtcagggtga

SEQ ID NO: 3232791 - DNA, 25 bp, Homo sapien
tgaccctgcactgatagagtaacct

SEQ ID NO: 3232792 - DNA, 25 bp, Homo sapien
ccattctaagattttgcaacttctt

SEQ ID NO: 3232793 - DNA, 25 bp, Homo sapien
ctattctgcgtgctcactcatccat

SEQ ID NO: 3232794 - DNA, 25 bp, Homo sapien
gcaacttctttgagatatcttcaag

SEQ ID NO: 3232795 - DNA, 25 bp, Homo sapien
tccattctaagattttgcaacttct

SEQ ID NO: 3232796 - DNA, 25 bp, Homo sapien
cctttagtgatacaatagaacttcc

SEQ ID NO: 3232797 - DNA, 25 bp, Homo sapien
tttccttttggtgagttatttcatc

SEQ ID NO: 3232798 - DNA, 25 bp, Homo sapien
catgttaaaccagatgaaaacacat

SEQ ID NO: 3232799 - DNA, 25 bp, Homo sapien
cagtcaaggcaagctctcatgttaa

SEQ ID NO: 3232800 - DNA, 25 bp, Homo sapien
tggtgggacttcagtcacggctctt

SEQ ID NO: 3232801 - DNA, 25 bp, Homo sapien
agattatagcacttgcaaagctggg

SEQ ID NO: 3232802 - DNA, 25 bp, Homo sapien
aataggtatttggaactgaggtcag

SEQ ID NO: 3232803 - DNA, 25 bp, Homo sapien
tctgcacatctcttgacactgagtt

SEQ ID NO: 3232804 - DNA, 25 bp, Homo sapien
tttaagcctctggtccaacgctgct

SEQ ID NO: 3232805 - DNA, 25 bp, Homo sapien
tgttggcaacaatcggctctgggct

SEQ ID NO: 3232806 - DNA, 25 bp, Homo sapien
tttgctgttctgtctaaatctcgaa

SEQ ID NO: 3232807 - DNA, 25 bp, Homo sapien
tctgtctaaatctcgaatttctcca

SEQ ID NO: 3232808 - DNA, 25 bp, Homo sapien
tccttagttgagctttggagagaat

SEQ ID NO: 3232809 - DNA, 25 bp, Homo sapien
ttatgcaagtacctccatccctgga

SEQ ID NO: 3232810 - DNA, 25 bp, Homo sapien
gaataatctccagttgctggtgcca

SEQ ID NO: 3232811 - DNA, 25 bp, Homo sapien
ttcttgttgttctgccgctccgtcc

SEQ ID NO: 3232812 - DNA, 25 bp, Homo sapien
ctgtttggagacaaaatggtaacag

SEQ ID NO: 3232813 - DNA, 25 bp, Homo sapien
gctgtttggagacaaaatggtaaca

SEQ ID NO: 3232814 - DNA, 25 bp, Homo sapien
ttgctgctccaatgcttggtgacac

SEQ ID NO: 3232815 - DNA, 25 bp, Homo sapien
tctgccacgttgctgctccaatgct

SEQ ID NO: 3232816 - DNA, 25 bp, Homo sapien
cacgttgctgctccaatgcttggtg

SEQ ID NO: 3232817 - DNA, 25 bp, Homo sapien
tccaatgcttggtgacacccaacat

SEQ ID NO: 3232818 - DNA, 25 bp, Homo sapien
tatgaaagtccaaatccgatgctcg

SEQ ID NO: 3232819 - DNA, 25 bp, Homo sapien
cgatgctcgatcttcccgcttagaa

SEQ ID NO: 3232820 - DNA, 25 bp, Homo sapien
gcatactggccacggtacgcacctt

SEQ ID NO: 3232821 - DNA, 25 bp, Homo sapien
cgcttagaactacccaatgcctgtg

SEQ ID NO: 3232822 - DNA, 25 bp, Homo sapien
actgcagatcttcgtggcgagtgtt

SEQ ID NO: 3232823 - DNA, 25 bp, Homo sapien
ccaaacaatgagcagtagcaaaatt

SEQ ID NO: 3232824 - DNA, 25 bp, Homo sapien
tgaaactgcagatcttcgtggcgag

SEQ ID NO: 3232825 - DNA, 25 bp, Homo sapien
accagagtcctattgtgtccggaat

SEQ ID NO: 3232826 - DNA, 25 bp, Homo sapien
gagggatcagattagtggaaacaca

SEQ ID NO: 3232827 - DNA, 25 bp, Homo sapien
tgcaaaggaaggtctagaagccacc

SEQ ID NO: 3232828 - DNA, 25 bp, Homo sapien
acgggcaactatccttaccatcagg

SEQ ID NO: 3232829 - DNA, 25 bp, Homo sapien
taataacactgactagaagctggca

SEQ ID NO: 3232830 - DNA, 25 bp, Homo sapien
tgaaaaccgaaccaactgcttgacc

SEQ ID NO: 3232831 - DNA, 25 bp, Homo sapien
caatgaaaaccgaaccaactgcttg

SEQ ID NO: 3232832 - DNA, 25 bp, Homo sapien
aatgaaaaccgaaccaactgcttga

SEQ ID NO: 3232833 - DNA, 25 bp, Homo sapien
atgaaaaccgaaccaactgcttgac

SEQ ID NO: 3232834 - DNA, 25 bp, Homo sapien
cagaagaactgtcgactaaggaata

SEQ ID NO: 3232835 - DNA, 25 bp, Homo sapien
gcctctgggaggaatggttgataaa

SEQ ID NO: 3232836 - DNA, 25 bp, Homo sapien
gcttgtagtaagagtaagtcaggac

SEQ ID NO: 3232837 - DNA, 25 bp, Homo sapien
ggtcctatgtgcctttttcccatga

SEQ ID NO: 3232838 - DNA, 25 bp, Homo sapien
gcttctgtttctctacccagagtcc

SEQ ID NO: 3232839 - DNA, 25 bp, Homo sapien
tgtttctctacccagagtccagtag

SEQ ID NO: 3232840 - DNA, 25 bp, Homo sapien
ttctctacccagagtccagtagacc

SEQ ID NO: 3232841 - DNA, 25 bp, Homo sapien
tctgtttctctacccagagtccagt

SEQ ID NO: 3232842 - DNA, 25 bp, Homo sapien
tgactaaagttaacggaaggcatat

SEQ ID NO: 3232843 - DNA, 25 bp, Homo sapien
gtggcattgttctctcatctagtgc

SEQ ID NO: 3232844 - DNA, 25 bp, Homo sapien
gctgaacttacgtgaaagcaaagaa

SEQ ID NO: 3232845 - DNA, 25 bp, Homo sapien
gccttataagaagtccattagaata

SEQ ID NO: 3232846 - DNA, 25 bp, Homo sapien
ccaatttagttcgttttaggcagat

SEQ ID NO: 3232847 - DNA, 25 bp, Homo sapien
ttgccgctagcaaacacacttactt

SEQ ID NO: 3232848 - DNA, 25 bp, Homo sapien
gatggtgataccctatcttgccgct

SEQ ID NO: 3232849 - DNA, 25 bp, Homo sapien
tggtggcaaggttgatgcaaagtcc

SEQ ID NO: 3232850 - DNA, 25 bp, Homo sapien
ggagtccaacataatcacccaaatt

SEQ ID NO: 3232851 - DNA, 25 bp, Homo sapien
tgctccagagactataatggagtcc

SEQ ID NO: 3232852 - DNA, 25 bp, Homo sapien
taatgaacatattgctccagagact

SEQ ID NO: 3232853 - DNA, 25 bp, Homo sapien
ttatttaaaactgttgcttatcttc

SEQ ID NO: 3232854 - DNA, 25 bp, Homo sapien
aaattcagcagtattgcattttgtg

SEQ ID NO: 3232855 - DNA, 25 bp, Homo sapien
tcagccaaagcctcttaatataaaa

SEQ ID NO: 3232856 - DNA, 25 bp, Homo sapien
ggtccatactgtgtatgtgtctgaa

SEQ ID NO: 3232857 - DNA, 25 bp, Homo sapien
cttggcaagatttctgggtccatac

SEQ ID NO: 3232858 - DNA, 25 bp, Homo sapien
tggttaatacaactgcagctgttag

SEQ ID NO: 3232859 - DNA, 25 bp, Homo sapien
taggaacatagctattacagtgctg

SEQ ID NO: 3232860 - DNA, 25 bp, Homo sapien
tacagtgctgaactagtaagatctc

SEQ ID NO: 3232861 - DNA, 25 bp, Homo sapien
gaaaactaaagaccacagacgcagg

SEQ ID NO: 3232862 - DNA, 25 bp, Homo sapien
cagggttacgcactcggaactcggt

SEQ ID NO: 3232863 - DNA, 25 bp, Homo sapien
tgatgttctcccaggatatcctatt

SEQ ID NO: 3232864 - DNA, 25 bp, Homo sapien
tatgaccccgaagacagacaaagct

SEQ ID NO: 3232865 - DNA, 25 bp, Homo sapien
caaagctgcagtcgttgtgaatcct

SEQ ID NO: 3232866 - DNA, 25 bp, Homo sapien
acacagtaagtaatataggagaaga

SEQ ID NO: 3232867 - DNA, 25 bp, Homo sapien
ttgctaggggcaacttcagcagctt

SEQ ID NO: 3232868 - DNA, 25 bp, Homo sapien
gcaacttcagcagcttaagggaaat

SEQ ID NO: 3232869 - DNA, 25 bp, Homo sapien
catacacagtaagtaatataggaga

SEQ ID NO: 3232870 - DNA, 25 bp, Homo sapien
tgacttttgtcgctttttataccca

SEQ ID NO: 3232871 - DNA, 25 bp, Homo sapien
ctacctctttgtagatacttttctt

SEQ ID NO: 3232872 - DNA, 25 bp, Homo sapien
ttatacccaatgctacaagaatatg

SEQ ID NO: 3232873 - DNA, 25 bp, Homo sapien
gctacaagaatatgaatacagctct

SEQ ID NO: 3232874 - DNA, 25 bp, Homo sapien
catgtgtgcaagtggcccgagccac

SEQ ID NO: 3232875 - DNA, 25 bp, Homo sapien
ggctggacagccctgatccggaata

SEQ ID NO: 3232876 - DNA, 25 bp, Homo sapien
ctgaaggcatgtgtgcaagtggccc

SEQ ID NO: 3232877 - DNA, 25 bp, Homo sapien
gagccactctccatgatataccagg

SEQ ID NO: 3232878 - DNA, 25 bp, Homo sapien
ctttctcggcccctgcgtggaccgg

SEQ ID NO: 3232879 - DNA, 25 bp, Homo sapien
ttgacgagtcagtgtcgcgacccgg

SEQ ID NO: 3232880 - DNA, 25 bp, Homo sapien
tgtcgctcgtgaacgcagcagggac

SEQ ID NO: 3232881 - DNA, 25 bp, Homo sapien
agcagtcgcggacccccattaacgt

SEQ ID NO: 3232882 - DNA, 25 bp, Homo sapien
aagacgggggaactgcactgagaac

SEQ ID NO: 3232883 - DNA, 25 bp, Homo sapien
ctgttctccggcagcgctactttcc

SEQ ID NO: 3232884 - DNA, 25 bp, Homo sapien
ttcccgtgctcacaaaagcatctct

SEQ ID NO: 3232885 - DNA, 25 bp, Homo sapien
ggcggcttttgatcccgcctcagag

SEQ ID NO: 3232886 - DNA, 25 bp, Homo sapien
ctgcgcgcggcggccagacatgata

SEQ ID NO: 3232887 - DNA, 25 bp, Homo sapien
tgcgcgcggcggccagacatgatag

SEQ ID NO: 3232888 - DNA, 25 bp, Homo sapien
gcgcgcggcggccagacatgatagg

SEQ ID NO: 3232889 - DNA, 25 bp, Homo sapien
cctgggtctggagcgtatcgtgtta

SEQ ID NO: 3232890 - DNA, 25 bp, Homo sapien
ctgtggccgtgaggaaccgagccca

SEQ ID NO: 3232891 - DNA, 25 bp, Homo sapien
ccagcgctgccaagttgcctgggtc

SEQ ID NO: 3232892 - DNA, 25 bp, Homo sapien
gtatcgtgttacagcgcctggctcc

SEQ ID NO: 3232893 - DNA, 25 bp, Homo sapien
gatgcgaatgttgcctccgcaccga

SEQ ID NO: 3232894 - DNA, 25 bp, Homo sapien
tcgtaaaagtcaccgaatgcaggca

SEQ ID NO: 3232895 - DNA, 25 bp, Homo sapien
gaagagtcatcgagaaagttcagcc

SEQ ID NO: 3232896 - DNA, 25 bp, Homo sapien
tacgtatttcgcaggcaaaagactg

SEQ ID NO: 3232897 - DNA, 25 bp, Homo sapien
ccaactatctttgcacaggagtagc

SEQ ID NO: 3232898 - DNA, 25 bp, Homo sapien
ttacttcaacagatacagcacaagt

SEQ ID NO: 3232899 - DNA, 25 bp, Homo sapien
ttttccaaaccatctccaactatct

SEQ ID NO: 3232900 - DNA, 25 bp, Homo sapien
caacagatacagcacaagtttttcc

SEQ ID NO: 3232901 - DNA, 25 bp, Homo sapien
ttaacaattagcacacagaggtctt

SEQ ID NO: 3232902 - DNA, 25 bp, Homo sapien
tggcttgtacaactccagacgtgaa

SEQ ID NO: 3232903 - DNA, 25 bp, Homo sapien
gacagaatgactttgtgacacaggc

SEQ ID NO: 3232904 - DNA, 25 bp, Homo sapien
taaaatattcggctgagagggaggc

SEQ ID NO: 3232905 - DNA, 25 bp, Homo sapien
gagtgttttgaacgctgcagtcgca

SEQ ID NO: 3232906 - DNA, 25 bp, Homo sapien
tctgcctagagtgttttgaacgctg

SEQ ID NO: 3232907 - DNA, 25 bp, Homo sapien
gaacgctgcagtcgcattttaatac

SEQ ID NO: 3232908 - DNA, 25 bp, Homo sapien
tcgcattttaatacctgggagtccg

SEQ ID NO: 3232909 - DNA, 25 bp, Homo sapien
ctctcagttaatgtataatcaccac

SEQ ID NO: 3232910 - DNA, 25 bp, Homo sapien
taaacatactttatagcggatctca

SEQ ID NO: 3232911 - DNA, 25 bp, Homo sapien
cacagtataaaatgggataacacca

SEQ ID NO: 3232912 - DNA, 25 bp, Homo sapien
catcatcacattgtgtaaatcacag

SEQ ID NO: 3232913 - DNA, 25 bp, Homo sapien
aatgcagggctaccgagcagtttct

SEQ ID NO: 3232914 - DNA, 25 bp, Homo sapien
tattatgccccacactaggccactg

SEQ ID NO: 3232915 - DNA, 25 bp, Homo sapien
cagtagtgacgggtgcttagcaacg

SEQ ID NO: 3232916 - DNA, 25 bp, Homo sapien
tagcaacgctgttctggtggccctt

SEQ ID NO: 3232917 - DNA, 25 bp, Homo sapien
gaaccaatgccctgcctatacagag

SEQ ID NO: 3232918 - DNA, 25 bp, Homo sapien
caaaattatgggatgcagaacctgc

SEQ ID NO: 3232919 - DNA, 25 bp, Homo sapien
gactgcaggcctttagtatacatgg

SEQ ID NO: 3232920 - DNA, 25 bp, Homo sapien
caacacaggcttgaaccagctggga

SEQ ID NO: 3232921 - DNA, 25 bp, Homo sapien
tgacagtgtaatgcaatactattgc

SEQ ID NO: 3232922 - DNA, 25 bp, Homo sapien
gcaatactattgcaacctgccccat

SEQ ID NO: 3232923 - DNA, 25 bp, Homo sapien
gacagtgtaatgcaatactattgca

SEQ ID NO: 3232924 - DNA, 25 bp, Homo sapien
tgtaatgcaatactattgcaacctg

SEQ ID NO: 3232925 - DNA, 25 bp, Homo sapien
aaagagaaggatttatttctctctt

SEQ ID NO: 3232926 - DNA, 25 bp, Homo sapien
tcagtgaagcaactgaaagagaagg

SEQ ID NO: 3232927 - DNA, 25 bp, Homo sapien
tccaattactgttctgcatcccaat

SEQ ID NO: 3232928 - DNA, 25 bp, Homo sapien
aacattgggaatcagtgaagcaact

SEQ ID NO: 3232929 - DNA, 25 bp, Homo sapien
atggaaataagtagttacgcttaca

SEQ ID NO: 3232930 - DNA, 25 bp, Homo sapien
tggaaataagtagttacgcttacat

SEQ ID NO: 3232931 - DNA, 25 bp, Homo sapien
tatggaaataagtagttacgcttac

SEQ ID NO: 3232932 - DNA, 25 bp, Homo sapien
ctatggaaataagtagttacgctta

SEQ ID NO: 3232933 - DNA, 25 bp, Homo sapien
cacgttattctggtgtattctacaa

SEQ ID NO: 3232934 - DNA, 25 bp, Homo sapien
taaatcgtaaagcacactcagcagg

SEQ ID NO: 3232935 - DNA, 25 bp, Homo sapien
cagggacggcttcatttcctagcac

SEQ ID NO: 3232936 - DNA, 25 bp, Homo sapien
aaatccagaaaacattcagggtatg

SEQ ID NO: 3232937 - DNA, 25 bp, Homo sapien
ccgcctccagggttcgagcaactct

SEQ ID NO: 3232938 - DNA, 25 bp, Homo sapien
tccgcctccagggttcgagcaactc

SEQ ID NO: 3232939 - DNA, 25 bp, Homo sapien
cgcctccagggttcgagcaactctc

SEQ ID NO: 3232940 - DNA, 25 bp, Homo sapien
tctgggatcccatgcttcagacaca

SEQ ID NO: 3232941 - DNA, 25 bp, Homo sapien
tacttgggcccattatgccttagct

SEQ ID NO: 3232942 - DNA, 25 bp, Homo sapien
taaatttactgatctgtaagagctc

SEQ ID NO: 3232943 - DNA, 25 bp, Homo sapien
cgttgttagctatccatgtccctta

SEQ ID NO: 3232944 - DNA, 25 bp, Homo sapien
gacctatggaatatgggctcacagg

SEQ ID NO: 3232945 - DNA, 25 bp, Homo sapien
catgcaatttgtcttgacctatgga

SEQ ID NO: 3232946 - DNA, 25 bp, Homo sapien
caaatattctagttgggaaaggcag

SEQ ID NO: 3232947 - DNA, 25 bp, Homo sapien
gagtttctgccctctaccgtgaaaa

SEQ ID NO: 3232948 - DNA, 25 bp, Homo sapien
tttttactttccatcccctcattga

SEQ ID NO: 3232949 - DNA, 25 bp, Homo sapien
tcttagacacggcatttgttcagaa

SEQ ID NO: 3232950 - DNA, 25 bp, Homo sapien
catcccctcattgatttaattctat

SEQ ID NO: 3232951 - DNA, 25 bp, Homo sapien
cactgcgtctgacccattttttact

SEQ ID NO: 3232952 - DNA, 25 bp, Homo sapien
ttattactatgaggtcccaggcacc

SEQ ID NO: 3232953 - DNA, 25 bp, Homo sapien
gattcatacagaatgggcgcaccca

SEQ ID NO: 3232954 - DNA, 25 bp, Homo sapien
cagaggcagcactgtttggacatgt

SEQ ID NO: 3232955 - DNA, 25 bp, Homo sapien
ggcaccatgaacacagtagactcct

SEQ ID NO: 3232956 - DNA, 25 bp, Homo sapien
cagttcatctcaattcagcttggac

SEQ ID NO: 3232957 - DNA, 25 bp, Homo sapien
cagtttacttaatatgagagatcca

SEQ ID NO: 3232958 - DNA, 25 bp, Homo sapien
gcttggacactatgcaagtgcttga

SEQ ID NO: 3232959 - DNA, 25 bp, Homo sapien
ttttggcactaaagcttcaaaatgc

SEQ ID NO: 3232960 - DNA, 25 bp, Homo sapien
tctataaagctgcaacggcaaggga

SEQ ID NO: 3232961 - DNA, 25 bp, Homo sapien
tcttgactctaacgaatcagggaaa

SEQ ID NO: 3232962 - DNA, 25 bp, Homo sapien
tactaaagtcagtgtgagacttccc

SEQ ID NO: 3232963 - DNA, 25 bp, Homo sapien
tgcttcaagggctaatgagctgtca

SEQ ID NO: 3232964 - DNA, 25 bp, Homo sapien
aggatgactgcatccaagttacagg

SEQ ID NO: 3232965 - DNA, 25 bp, Homo sapien
aagtgacgaataacagaggtaatgg

SEQ ID NO: 3232966 - DNA, 25 bp, Homo sapien
catccaagttacaggaaagtgacga

SEQ ID NO: 3232967 - DNA, 25 bp, Homo sapien
actattgtcttctaatagactggac

SEQ ID NO: 3232968 - DNA, 25 bp, Homo sapien
cacaagaatattagggttggaaagg

SEQ ID NO: 3232969 - DNA, 25 bp, Homo sapien
caagaatattagggttggaaaggat

SEQ ID NO: 3232970 - DNA, 25 bp, Homo sapien
atctctggcctagaccgggcctggt

SEQ ID NO: 3232971 - DNA, 25 bp, Homo sapien
acacaagaatattagggttggaaag

SEQ ID NO: 3232972 - DNA, 25 bp, Homo sapien
aaaagtgaatactcctccttgacac

SEQ ID NO: 3232973 - DNA, 25 bp, Homo sapien
tgatttccacgatagcacaggctcc

SEQ ID NO: 3232974 - DNA, 25 bp, Homo sapien
cactcccagagcttggtttcgagac

SEQ ID NO: 3232975 - DNA, 25 bp, Homo sapien
tgaatgtctcggaagtatttaacaa

SEQ ID NO: 3232976 - DNA, 25 bp, Homo sapien
tggtcattgtgaatactggaagtga

SEQ ID NO: 3232977 - DNA, 25 bp, Homo sapien
gccaagatctgtagcacatccagag

SEQ ID NO: 3232978 - DNA, 25 bp, Homo sapien
agccaagatctgtagcacatccaga

SEQ ID NO: 3232979 - DNA, 25 bp, Homo sapien
ggtcattgtgaatactggaagtgac

SEQ ID NO: 3232980 - DNA, 25 bp, Homo sapien
cagtaaaaacctgcccacggagtct

SEQ ID NO: 3232981 - DNA, 25 bp, Homo sapien
gagcttccctggcagaacacatttc

SEQ ID NO: 3232982 - DNA, 25 bp, Homo sapien
cacggagtctcttacgagcttccct

SEQ ID NO: 3232983 - DNA, 25 bp, Homo sapien
tcactgccacaggaatggactgtcc

SEQ ID NO: 3232984 - DNA, 25 bp, Homo sapien
gaatggccaccacgtgtcagtcact

SEQ ID NO: 3232985 - DNA, 25 bp, Homo sapien
tactaaatggtaccctaatggccag

SEQ ID NO: 3232986 - DNA, 25 bp, Homo sapien
cagctgagccatgactagagaagcc

SEQ ID NO: 3232987 - DNA, 25 bp, Homo sapien
tacagagagagtatgcagctgagcc

SEQ ID NO: 3232988 - DNA, 25 bp, Homo sapien
ttttaagaatagattgcagacccct

SEQ ID NO: 3232989 - DNA, 25 bp, Homo sapien
gccatgaggcacaactctctttagt

SEQ ID NO: 3232990 - DNA, 25 bp, Homo sapien
agtttacctgctacaatgccatgag

SEQ ID NO: 3232991 - DNA, 25 bp, Homo sapien
ccttagtactcagatcataatcggg

SEQ ID NO: 3232992 - DNA, 25 bp, Homo sapien
cagtgccagttgacactggttgccc

SEQ ID NO: 3232993 - DNA, 25 bp, Homo sapien
cactggttgccccaacataattgca

SEQ ID NO: 3232994 - DNA, 25 bp, Homo sapien
ttctctggacagtgccagttgacac

SEQ ID NO: 3232995 - DNA, 25 bp, Homo sapien
gccccaacataattgcaagttacaa

SEQ ID NO: 3232996 - DNA, 25 bp, Homo sapien
atgttacatgaggaattttgactgt

SEQ ID NO: 3232997 - DNA, 25 bp, Homo sapien
acaggtgggctacctaaatagggca

SEQ ID NO: 3232998 - DNA, 25 bp, Homo sapien
cccctaattgttcaacggtcaactg

SEQ ID NO: 3232999 - DNA, 25 bp, Homo sapien
caatagtaggctattcatggttaag

SEQ ID NO: 3233000 - DNA, 25 bp, Homo sapien
ggataaagcaagtccctgactctaa

SEQ ID NO: 3233001 - DNA, 25 bp, Homo sapien
ttgttagcctgctcagcgtgaagat

SEQ ID NO: 3233002 - DNA, 25 bp, Homo sapien
tggcccctgctgtcaatttttctag

SEQ ID NO: 3233003 - DNA, 25 bp, Homo sapien
ctgtgcaggcgcacttacatgcaga

SEQ ID NO: 3233004 - DNA, 25 bp, Homo sapien
ttagccaaaaggctgagaagtggtg

SEQ ID NO: 3233005 - DNA, 25 bp, Homo sapien
taaaccggtaagaacagacactaca

SEQ ID NO: 3233006 - DNA, 25 bp, Homo sapien
tgatcttagccaaaaggctgagaag

SEQ ID NO: 3233007 - DNA, 25 bp, Homo sapien
aaccggtaagaacagacactacact

SEQ ID NO: 3233008 - DNA, 25 bp, Homo sapien
tagcctgttggcaaatcagcggcat

SEQ ID NO: 3233009 - DNA, 25 bp, Homo sapien
tcatctagagtagcctgttggcaaa

SEQ ID NO: 3233010 - DNA, 25 bp, Homo sapien
tccccttcatctagagtagcctgtt

SEQ ID NO: 3233011 - DNA, 25 bp, Homo sapien
tagagtagcctgttggcaaatcagc

SEQ ID NO: 3233012 - DNA, 25 bp, Homo sapien
tcttccttgtatcactaacatgagc

SEQ ID NO: 3233013 - DNA, 25 bp, Homo sapien
ctatgctattctatattcggaggga

SEQ ID NO: 3233014 - DNA, 25 bp, Homo sapien
attaaaccgtgcattcttcacgcag

SEQ ID NO: 3233015 - DNA, 25 bp, Homo sapien
tcaagattgtactgcatagttctgc

SEQ ID NO: 3233016 - DNA, 25 bp, Homo sapien
ccactgtatcttctcctgtaccttt

SEQ ID NO: 3233017 - DNA, 25 bp, Homo sapien
taacccagtgtaccagagtaacatt

SEQ ID NO: 3233018 - DNA, 25 bp, Homo sapien
cagtgtaccagagtaacattttgaa

SEQ ID NO: 3233019 - DNA, 25 bp, Homo sapien
tcaagataacccagtgtaccagagt

SEQ ID NO: 3233020 - DNA, 25 bp, Homo sapien
gataacccagtgtaccagagtaaca

SEQ ID NO: 3233021 - DNA, 25 bp, Homo sapien
aaagcaaacctgtatgaaggccaag

SEQ ID NO: 3233022 - DNA, 25 bp, Homo sapien
ttagcacccgtccaagtagcacata

SEQ ID NO: 3233023 - DNA, 25 bp, Homo sapien
cataattggtagcagaggttcttcc

SEQ ID NO: 3233024 - DNA, 25 bp, Homo sapien
caatggtgacaaagtaaatcagtcc

SEQ ID NO: 3233025 - DNA, 25 bp, Homo sapien
tacaaaggcctagttaagaccatgc

SEQ ID NO: 3233026 - DNA, 25 bp, Homo sapien
ggaagtctcctgattgtgtgtagca

SEQ ID NO: 3233027 - DNA, 25 bp, Homo sapien
gactaaggctagtgtgctggcaata

SEQ ID NO: 3233028 - DNA, 25 bp, Homo sapien
gaagtctgcccgaagagtattcctg

SEQ ID NO: 3233029 - DNA, 25 bp, Homo sapien
gatttgtcctgctccatcacccttt

SEQ ID NO: 3233030 - DNA, 25 bp, Homo sapien
gaattttactgttcctcgatccctg

SEQ ID NO: 3233031 - DNA, 25 bp, Homo sapien
tcatcttttgcctcgattacggcaa

SEQ ID NO: 3233032 - DNA, 25 bp, Homo sapien
tgcctcaaggctagaactgtccaaa

SEQ ID NO: 3233033 - DNA, 25 bp, Homo sapien
actgttcagaaattttaaccgacat

SEQ ID NO: 3233034 - DNA, 25 bp, Homo sapien
cttcaaatccttcagaaactgttca

SEQ ID NO: 3233035 - DNA, 25 bp, Homo sapien
caaatccttcagaaactgttcagaa

SEQ ID NO: 3233036 - DNA, 25 bp, Homo sapien
aaatccttcagaaactgttcagaaa

SEQ ID NO: 3233037 - DNA, 25 bp, Homo sapien
cactgagttgaaacaggtaagttca

SEQ ID NO: 3233038 - DNA, 25 bp, Homo sapien
tcagggttagcagtaaatgttctgc

SEQ ID NO: 3233039 - DNA, 25 bp, Homo sapien
tggcactgagttgaaacaggtaagt

SEQ ID NO: 3233040 - DNA, 25 bp, Homo sapien
taatttgcaatcaaagttgacccat

SEQ ID NO: 3233041 - DNA, 25 bp, Homo sapien
tcttaagggattattagagttatta

SEQ ID NO: 3233042 - DNA, 25 bp, Homo sapien
ttgatcatacacaccactgccatgt

SEQ ID NO: 3233043 - DNA, 25 bp, Homo sapien
tcctaatattcttaagggattatta

SEQ ID NO: 3233044 - DNA, 25 bp, Homo sapien
tactacaaagtacagtcccataggc

SEQ ID NO: 3233045 - DNA, 25 bp, Homo sapien
ctcagtgttggcagattactaatta

SEQ ID NO: 3233046 - DNA, 25 bp, Homo sapien
gacaagactctagatatcattcctt

SEQ ID NO: 3233047 - DNA, 25 bp, Homo sapien
tgattttcctccctcttatgctaag

SEQ ID NO: 3233048 - DNA, 25 bp, Homo sapien
tcttggccttatagtacatctcagt

SEQ ID NO: 3233049 - DNA, 25 bp, Homo sapien
gatagatgtctttagctcataattc

SEQ ID NO: 3233050 - DNA, 25 bp, Homo sapien
tgttgtcatagttcccatcagcaag

SEQ ID NO: 3233051 - DNA, 25 bp, Homo sapien
caaaaatctgattaagatagatgtc

SEQ ID NO: 3233052 - DNA, 25 bp, Homo sapien
ctttcgattaatattgcatgccaga

SEQ ID NO: 3233053 - DNA, 25 bp, Homo sapien
agttggaaaggtgtcactgcagcga

SEQ ID NO: 3233054 - DNA, 25 bp, Homo sapien
cattcgctttcagcaggtgtgcaca

SEQ ID NO: 3233055 - DNA, 25 bp, Homo sapien
ggctacacacgtccccagggaacaa

SEQ ID NO: 3233056 - DNA, 25 bp, Homo sapien
tatcttggtgtgagtatatgtctgc

SEQ ID NO: 3233057 - DNA, 25 bp, Homo sapien
agcgtacaagacaccacacgaggat

SEQ ID NO: 3233058 - DNA, 25 bp, Homo sapien
gcgtacaagacaccacacgaggatc

SEQ ID NO: 3233059 - DNA, 25 bp, Homo sapien
tacaagacaccacacgaggatccat

SEQ ID NO: 3233060 - DNA, 25 bp, Homo sapien
gtacaagacaccacacgaggatcca

SEQ ID NO: 3233061 - DNA, 25 bp, Homo sapien
gcaagggctgcagggtagactggcc

SEQ ID NO: 3233062 - DNA, 25 bp, Homo sapien
aagggctgcagggtagactggcctt

SEQ ID NO: 3233063 - DNA, 25 bp, Homo sapien
ctggccttgattgcttgcaggttgc

SEQ ID NO: 3233064 - DNA, 25 bp, Homo sapien
tgcttatgggaaggcggcaagggct

SEQ ID NO: 3233065 - DNA, 25 bp, Homo sapien
gtgatggatggatgatgctgtgcag

SEQ ID NO: 3233066 - DNA, 25 bp, Homo sapien
gatggatggatgatgctgtgcagag

SEQ ID NO: 3233067 - DNA, 25 bp, Homo sapien
tggatggatgatgctgtgcagagtg

SEQ ID NO: 3233068 - DNA, 25 bp, Homo sapien
ctgttgagagaagtgatggatggat

SEQ ID NO: 3233069 - DNA, 25 bp, Homo sapien
gctttccagtggtacattactgcca

SEQ ID NO: 3233070 - DNA, 25 bp, Homo sapien
tggtacattactgccaaggacccag

SEQ ID NO: 3233071 - DNA, 25 bp, Homo sapien
cctgcagctggacggactcgggtgt

SEQ ID NO: 3233072 - DNA, 25 bp, Homo sapien
gggtgtggtttgcagctcggcgggc

SEQ ID NO: 3233073 - DNA, 25 bp, Homo sapien
agtccgatggcctgtccagcaaagc

SEQ ID NO: 3233074 - DNA, 25 bp, Homo sapien
agcagggcgctcttttacatcaaca

SEQ ID NO: 3233075 - DNA, 25 bp, Homo sapien
tatttttatggtccgcagagcaccc

SEQ ID NO: 3233076 - DNA, 25 bp, Homo sapien
tgcagaagcgctaggacgccagaat

SEQ ID NO: 3233077 - DNA, 25 bp, Homo sapien
acacttggccagattagataatctt

SEQ ID NO: 3233078 - DNA, 25 bp, Homo sapien
cacatgctaccaaacctggttaagg

SEQ ID NO: 3233079 - DNA, 25 bp, Homo sapien
cacttggccagattagataatcttt

SEQ ID NO: 3233080 - DNA, 25 bp, Homo sapien
catgctaccaaacctggttaaggtt

SEQ ID NO: 3233081 - DNA, 25 bp, Homo sapien
tggcaactgattctcaatagacatc

SEQ ID NO: 3233082 - DNA, 25 bp, Homo sapien
tgaactgaaagactgcagaggctgc

SEQ ID NO: 3233083 - DNA, 25 bp, Homo sapien
agctctgtaagattcctgaactgaa

SEQ ID NO: 3233084 - DNA, 25 bp, Homo sapien
tccatcagccgaggatgctggccct

SEQ ID NO: 3233085 - DNA, 25 bp, Homo sapien
tatagggacccaattgaaaagcatc

SEQ ID NO: 3233086 - DNA, 25 bp, Homo sapien
ccctggaaaatgtgttatagcatta

SEQ ID NO: 3233087 - DNA, 25 bp, Homo sapien
gcttataggagtcactaggaaaaat

SEQ ID NO: 3233088 - DNA, 25 bp, Homo sapien
ccaagtggtttgagtcatttcctca

SEQ ID NO: 3233089 - DNA, 25 bp, Homo sapien
gctgttcacttttgattgattttgt

SEQ ID NO: 3233090 - DNA, 25 bp, Homo sapien
agctgttcacttttgattgattttg

SEQ ID NO: 3233091 - DNA, 25 bp, Homo sapien
ctgttcacttttgattgattttgtc

SEQ ID NO: 3233092 - DNA, 25 bp, Homo sapien
gtaatattctaaaatcacatctttg

SEQ ID NO: 3233093 - DNA, 25 bp, Homo sapien
cacatctttgtgattgtatattttg

SEQ ID NO: 3233094 - DNA, 25 bp, Homo sapien
catgccctgccgcaattattatttt

SEQ ID NO: 3233095 - DNA, 25 bp, Homo sapien
attgctcaaaacaaagatgtaatat

SEQ ID NO: 3233096 - DNA, 25 bp, Homo sapien
ccttaccttagtctttggtcccatg

SEQ ID NO: 3233097 - DNA, 25 bp, Homo sapien
ttaccttagtctttggtcccatgaa

SEQ ID NO: 3233098 - DNA, 25 bp, Homo sapien
cttaccttagtctttggtcccatga

SEQ ID NO: 3233099 - DNA, 25 bp, Homo sapien
taccttagtctttggtcccatgaaa

SEQ ID NO: 3233100 - DNA, 25 bp, Homo sapien
gaaacacgcaaaactcaggtagcga

SEQ ID NO: 3233101 - DNA, 25 bp, Homo sapien
ctgcgtgtagagaaacacgcaaaac

SEQ ID NO: 3233102 - DNA, 25 bp, Homo sapien
cgcaaaactcaggtagcgacaggtt

SEQ ID NO: 3233103 - DNA, 25 bp, Homo sapien
aggtagcgacaggtttgcaggccca

SEQ ID NO: 3233104 - DNA, 25 bp, Homo sapien
gtggtgaataaacagagccagatgc

SEQ ID NO: 3233105 - DNA, 25 bp, Homo sapien
taggtagtggccgagtaggtggtga

SEQ ID NO: 3233106 - DNA, 25 bp, Homo sapien
gatgccattgtgtatcctggggttg

SEQ ID NO: 3233107 - DNA, 25 bp, Homo sapien
tcctggggttgcagtactgaacagt

SEQ ID NO: 3233108 - DNA, 25 bp, Homo sapien
ccagctacagtactttgaagacttc

SEQ ID NO: 3233109 - DNA, 25 bp, Homo sapien
agacccctacggcacacagtgcagt

SEQ ID NO: 3233110 - DNA, 25 bp, Homo sapien
caggagtattgccaggagcaccgag

SEQ ID NO: 3233111 - DNA, 25 bp, Homo sapien
gaatttaaaagcacttcttgatagg

SEQ ID NO: 3233112 - DNA, 25 bp, Homo sapien
gctgccttcagctacaacggcaatt

SEQ ID NO: 3233113 - DNA, 25 bp, Homo sapien
tgctgccttcagctacaacggcaat

SEQ ID NO: 3233114 - DNA, 25 bp, Homo sapien
ctgccttcagctacaacggcaattg

SEQ ID NO: 3233115 - DNA, 25 bp, Homo sapien
tgctgtagctgccagttgaggccaa

SEQ ID NO: 3233116 - DNA, 25 bp, Homo sapien
gtctccagaaggtaatgacacagtg

SEQ ID NO: 3233117 - DNA, 25 bp, Homo sapien
tagctgccagttgaggccaaagaga

SEQ ID NO: 3233118 - DNA, 25 bp, Homo sapien
gacacagtgtttgttggcatggtat

SEQ ID NO: 3233119 - DNA, 25 bp, Homo sapien
tgatcataggaaacactaaggttgt

SEQ ID NO: 3233120 - DNA, 25 bp, Homo sapien
cctgaacctgggaatgatcatagga

SEQ ID NO: 3233121 - DNA, 25 bp, Homo sapien
tgaacctgggaatgatcataggaaa

SEQ ID NO: 3233122 - DNA, 25 bp, Homo sapien
taggaaacactaaggttgtctgtag

SEQ ID NO: 3233123 - DNA, 25 bp, Homo sapien
tattttcttgcgtaaatccacctaa

SEQ ID NO: 3233124 - DNA, 25 bp, Homo sapien
gctcttcggccaatatcaagttctc

SEQ ID NO: 3233125 - DNA, 25 bp, Homo sapien
tcaagttctccggaatctatggtgt

SEQ ID NO: 3233126 - DNA, 25 bp, Homo sapien
agcctttccggccatatactccaat

SEQ ID NO: 3233127 - DNA, 25 bp, Homo sapien
ttattgataagaaagcctagtctta

SEQ ID NO: 3233128 - DNA, 25 bp, Homo sapien
tttattgataagaaagcctagtctt

SEQ ID NO: 3233129 - DNA, 25 bp, Homo sapien
tattgataagaaagcctagtcttac

SEQ ID NO: 3233130 - DNA, 25 bp, Homo sapien
gaatccaagtactggataaagccgg

SEQ ID NO: 3233131 - DNA, 25 bp, Homo sapien
tgaaggctgacggatctcgcctgcc

SEQ ID NO: 3233132 - DNA, 25 bp, Homo sapien
taaagccggcctcatgaaggctgac

SEQ ID NO: 3233133 - DNA, 25 bp, Homo sapien
tgctctctggcaatcagcctgctgc

SEQ ID NO: 3233134 - DNA, 25 bp, Homo sapien
ctataacaatggtattaaaagacac

SEQ ID NO: 3233135 - DNA, 25 bp, Homo sapien
tccatggcaatttcggggacattcc

SEQ ID NO: 3233136 - DNA, 25 bp, Homo sapien
gaacaatccggacccagaaatcctg

SEQ ID NO: 3233137 - DNA, 25 bp, Homo sapien
tttcggggacattccaccacagact

SEQ ID NO: 3233138 - DNA, 25 bp, Homo sapien
gcaagttccagaaacgcattctcca

SEQ ID NO: 3233139 - DNA, 25 bp, Homo sapien
ggagtactgcccgttgccactacat

SEQ ID NO: 3233140 - DNA, 25 bp, Homo sapien
cacactgtgggtcaatacactgggt

SEQ ID NO: 3233141 - DNA, 25 bp, Homo sapien
gggtagtcggcacatcacactcggt

SEQ ID NO: 3233142 - DNA, 25 bp, Homo sapien
gagttgcaagcacaagagcccatga

SEQ ID NO: 3233143 - DNA, 25 bp, Homo sapien
gataacaacagacttctgtgaatat

SEQ ID NO: 3233144 - DNA, 25 bp, Homo sapien
caacagacttctgtgaatattgaca

SEQ ID NO: 3233145 - DNA, 25 bp, Homo sapien
tgaagataacaacagacttctgtga

SEQ ID NO: 3233146 - DNA, 25 bp, Homo sapien
taacaacagacttctgtgaatattg

SEQ ID NO: 3233147 - DNA, 25 bp, Homo sapien
caattttattaaatccagaagatat

SEQ ID NO: 3233148 - DNA, 25 bp, Homo sapien
agaacaattttattaaatccagaag

SEQ ID NO: 3233149 - DNA, 25 bp, Homo sapien
ttttattaaatccagaagatatcat

SEQ ID NO: 3233150 - DNA, 25 bp, Homo sapien
gaacaattttattaaatccagaaga

SEQ ID NO: 3233151 - DNA, 25 bp, Homo sapien
tttcacaattgctacctccccatcc

SEQ ID NO: 3233152 - DNA, 25 bp, Homo sapien
cacaccatgattagaacacccaggg

SEQ ID NO: 3233153 - DNA, 25 bp, Homo sapien
gtgacattccccgtggatacacaca

SEQ ID NO: 3233154 - DNA, 25 bp, Homo sapien
gaacacccagggtctatacagtcag

SEQ ID NO: 3233155 - DNA, 25 bp, Homo sapien
gccactttcttgaagatacgttccg

SEQ ID NO: 3233156 - DNA, 25 bp, Homo sapien
tccagttagggtcacacgtgcagga

SEQ ID NO: 3233157 - DNA, 25 bp, Homo sapien
cagtctgggccagtccagttagggt

SEQ ID NO: 3233158 - DNA, 25 bp, Homo sapien
gatacgttccgtggccggagcactg

SEQ ID NO: 3233159 - DNA, 25 bp, Homo sapien
agccttcttcacagcgacacgtccc

SEQ ID NO: 3233160 - DNA, 25 bp, Homo sapien
tctgattacaggctgggcccgtcca

SEQ ID NO: 3233161 - DNA, 25 bp, Homo sapien
atccttgcaggtcccgtgctcggca

SEQ ID NO: 3233162 - DNA, 25 bp, Homo sapien
ctctctgattacaggctgggcccgt

SEQ ID NO: 3233163 - DNA, 25 bp, Homo sapien
cagacacagacttgcagtaagccta

SEQ ID NO: 3233164 - DNA, 25 bp, Homo sapien
gggacagacacagacttgcagtaag

SEQ ID NO: 3233165 - DNA, 25 bp, Homo sapien
gacagacacagacttgcagtaagcc

SEQ ID NO: 3233166 - DNA, 25 bp, Homo sapien
agacacagacttgcagtaagcctac

SEQ ID NO: 3233167 - DNA, 25 bp, Homo sapien
caagtctaagctatgtgattctgga

SEQ ID NO: 3233168 - DNA, 25 bp, Homo sapien
tgcagagactcaagatatggacaag

SEQ ID NO: 3233169 - DNA, 25 bp, Homo sapien
tagctcatacttgtgacagctgttc

SEQ ID NO: 3233170 - DNA, 25 bp, Homo sapien
gtttgtttaagagcagcgagatttg

SEQ ID NO: 3233171 - DNA, 25 bp, Homo sapien
caatttctaaccttcggcatcccaa

SEQ ID NO: 3233172 - DNA, 25 bp, Homo sapien
tccaccccatcttgtttccgaaata

SEQ ID NO: 3233173 - DNA, 25 bp, Homo sapien
tcaatttctaaccttcggcatccca

SEQ ID NO: 3233174 - DNA, 25 bp, Homo sapien
ttccgaaatacctccccagctgtgt

SEQ ID NO: 3233175 - DNA, 25 bp, Homo sapien
tatgtccagactattcatgtgccag

SEQ ID NO: 3233176 - DNA, 25 bp, Homo sapien
gagaatttcccctagattttcagcg

SEQ ID NO: 3233177 - DNA, 25 bp, Homo sapien
tatgaatttcagtccaacgaccagc

SEQ ID NO: 3233178 - DNA, 25 bp, Homo sapien
tcaggtcagtttaggagaatctccc

SEQ ID NO: 3233179 - DNA, 25 bp, Homo sapien
tcagaacatgggtgatactcccgag

SEQ ID NO: 3233180 - DNA, 25 bp, Homo sapien
tgtggaacactgagcgaaagacgaa

SEQ ID NO: 3233181 - DNA, 25 bp, Homo sapien
gaatactgacaaccaaacagggcct

SEQ ID NO: 3233182 - DNA, 25 bp, Homo sapien
caccagaggttggtagaagagtcca

SEQ ID NO: 3233183 - DNA, 25 bp, Homo sapien
cattagtacctcattaaagttgtaa

SEQ ID NO: 3233184 - DNA, 25 bp, Homo sapien
tcattctcagattagtcaagtacca

SEQ ID NO: 3233185 - DNA, 25 bp, Homo sapien
aaaatgactcacattagtacctcat

SEQ ID NO: 3233186 - DNA, 25 bp, Homo sapien
ttaaagttgtaagtaggtatcattc

SEQ ID NO: 3233187 - DNA, 25 bp, Homo sapien
atatatgcaacgatccactaaatag

SEQ ID NO: 3233188 - DNA, 25 bp, Homo sapien
gaaatatatgcaacgatccactaaa

SEQ ID NO: 3233189 - DNA, 25 bp, Homo sapien
aaatatatgcaacgatccactaaat

SEQ ID NO: 3233190 - DNA, 25 bp, Homo sapien
agaaatatatgcaacgatccactaa

SEQ ID NO: 3233191 - DNA, 25 bp, Homo sapien
gctgttgcacagaccaggacaaccc

SEQ ID NO: 3233192 - DNA, 25 bp, Homo sapien
tccatccaggctggcacacacaatg

SEQ ID NO: 3233193 - DNA, 25 bp, Homo sapien
gctatctgtgcaaagagtctccatg

SEQ ID NO: 3233194 - DNA, 25 bp, Homo sapien
cacacaatgccagccattttggtcc

SEQ ID NO: 3233195 - DNA, 25 bp, Homo sapien
ttttgagaggattaatgctgccatg

SEQ ID NO: 3233196 - DNA, 25 bp, Homo sapien
gaggagccatctgtactgtggtttt

SEQ ID NO: 3233197 - DNA, 25 bp, Homo sapien
ggaaagtaacgaagagaggagccat

SEQ ID NO: 3233198 - DNA, 25 bp, Homo sapien
tttgagaggattaatgctgccatgt

SEQ ID NO: 3233199 - DNA, 25 bp, Homo sapien
taaattactcggcagtgtctctgca

SEQ ID NO: 3233200 - DNA, 25 bp, Homo sapien
tcctcagtgcaatcttctcttagaa

SEQ ID NO: 3233201 - DNA, 25 bp, Homo sapien
taggcaatagcaacattggagtagg

SEQ ID NO: 3233202 - DNA, 25 bp, Homo sapien
gaactatatgatcaaggagaaagag

SEQ ID NO: 3233203 - DNA, 25 bp, Homo sapien
cttgcaggttttcccttgcagtcat

SEQ ID NO: 3233204 - DNA, 25 bp, Homo sapien
ttgatggatttcgaatgggtacata

SEQ ID NO: 3233205 - DNA, 25 bp, Homo sapien
gaatgggtacatatgcttgggagaa

SEQ ID NO: 3233206 - DNA, 25 bp, Homo sapien
tatgcttgggagaataacaacacaa

SEQ ID NO: 3233207 - DNA, 25 bp, Homo sapien
gcttgttctgtgaggctgtgtgact

SEQ ID NO: 3233208 - DNA, 25 bp, Homo sapien
ttgctgccggtatagaagctgctgg

SEQ ID NO: 3233209 - DNA, 25 bp, Homo sapien
atccccaggcaagcggagcaagggc

SEQ ID NO: 3233210 - DNA, 25 bp, Homo sapien
gcaaaaactaacaggtcagacacag

SEQ ID NO: 3233211 - DNA, 25 bp, Homo sapien
ctgtagagagaaatgttccccagta

SEQ ID NO: 3233212 - DNA, 25 bp, Homo sapien
ggcagtccccgacaatagggctgat

SEQ ID NO: 3233213 - DNA, 25 bp, Homo sapien
ccaggtataacatgggtgctatcag

SEQ ID NO: 3233214 - DNA, 25 bp, Homo sapien
gcagcttgctgagaaggcgattgaa

SEQ ID NO: 3233215 - DNA, 25 bp, Homo sapien
tcgatcataaaaggatttggcagct

SEQ ID NO: 3233216 - DNA, 25 bp, Homo sapien
gaaaaacgagacatttactccaata

SEQ ID NO: 3233217 - DNA, 25 bp, Homo sapien
tagtatatccatattctgggtaatg

SEQ ID NO: 3233218 - DNA, 25 bp, Homo sapien
tactccaataagtggagttccatca

SEQ ID NO: 3233219 - DNA, 25 bp, Homo sapien
cgtcctggcgggtaatagtatatcc

SEQ ID NO: 3233220 - DNA, 25 bp, Homo sapien
caaagttagagaggccccaccattt

SEQ ID NO: 3233221 - DNA, 25 bp, Homo sapien
gatttggcctcacgaatccactcag

SEQ ID NO: 3233222 - DNA, 25 bp, Homo sapien
tcttcatgactagggtatccatcac

SEQ ID NO: 3233223 - DNA, 25 bp, Homo sapien
tgtttcgggaatgatgggactgtct

SEQ ID NO: 3233224 - DNA, 25 bp, Homo sapien
caacagcttcagatagaccatagac

SEQ ID NO: 3233225 - DNA, 25 bp, Homo sapien
gaggcaggaaaccacttttggaaga

SEQ ID NO: 3233226 - DNA, 25 bp, Homo sapien
tgagaactgacttataccctgcagc

SEQ ID NO: 3233227 - DNA, 25 bp, Homo sapien
ggaagagtcttcctactacagctac

SEQ ID NO: 3233228 - DNA, 25 bp, Homo sapien
tgttggacgcatccaattcatagcc

SEQ ID NO: 3233229 - DNA, 25 bp, Homo sapien
tccagcacgtgatgtttatctaatg

SEQ ID NO: 3233230 - DNA, 25 bp, Homo sapien
tgcagaatggcagtcctcttttccc

SEQ ID NO: 3233231 - DNA, 25 bp, Homo sapien
gagtcaggtccaaacacgactcata

SEQ ID NO: 3233232 - DNA, 25 bp, Homo sapien
tagaagaaataaagtgcattgtttt

SEQ ID NO: 3233233 - DNA, 25 bp, Homo sapien
agaagaaataaagtgcattgttttt

SEQ ID NO: 3233234 - DNA, 25 bp, Homo sapien
ctagaagaaataaagtgcattgttt

SEQ ID NO: 3233235 - DNA, 25 bp, Homo sapien
tatccgccgcacatagttgaaatcg

SEQ ID NO: 3233236 - DNA, 25 bp, Homo sapien
atttccagaagggaatatccgccgc

SEQ ID NO: 3233237 - DNA, 25 bp, Homo sapien
gaaatcgcctacgtacagactgcca

SEQ ID NO: 3233238 - DNA, 25 bp, Homo sapien
catgatgctactcacgactggaggc

SEQ ID NO: 3233239 - DNA, 25 bp, Homo sapien
aacgtacagatctcccgtgactgga

SEQ ID NO: 3233240 - DNA, 25 bp, Homo sapien
tcgtcaaacggaaggcattgctccc

SEQ ID NO: 3233241 - DNA, 25 bp, Homo sapien
tgcaaggtagtatctatgagctggg

SEQ ID NO: 3233242 - DNA, 25 bp, Homo sapien
gactttgggcgataaattctgcggg

SEQ ID NO: 3233243 - DNA, 25 bp, Homo sapien
catggttccatcaacaaagtagatt

SEQ ID NO: 3233244 - DNA, 25 bp, Homo sapien
tgaagtcaaatcgttagagcccaga

SEQ ID NO: 3233245 - DNA, 25 bp, Homo sapien
ggtcaactttcctaatcatggttcc

SEQ ID NO: 3233246 - DNA, 25 bp, Homo sapien
tggtgtcacaagttaaaggtctggc

SEQ ID NO: 3233247 - DNA, 25 bp, Homo sapien
tctgaaggtattccggccactaagg

SEQ ID NO: 3233248 - DNA, 25 bp, Homo sapien
tccgggaacctgacagtgcatgggc

SEQ ID NO: 3233249 - DNA, 25 bp, Homo sapien
gaactggcatgcgatttgggtcccg

SEQ ID NO: 3233250 - DNA, 25 bp, Homo sapien
caggagacaccactcgaactggcat

SEQ ID NO: 3233251 - DNA, 25 bp, Homo sapien
tcacagtattttataatcagagtag

SEQ ID NO: 3233252 - DNA, 25 bp, Homo sapien
agctcttaagattatattgttatta

SEQ ID NO: 3233253 - DNA, 25 bp, Homo sapien
tatagatgatattattatatcacag

SEQ ID NO: 3233254 - DNA, 25 bp, Homo sapien
ttataatcagagtagaattttcata

SEQ ID NO: 3233255 - DNA, 25 bp, Homo sapien
gactcccaagatgtgactgttcaga

SEQ ID NO: 3233256 - DNA, 25 bp, Homo sapien
tcttggaacaccctggctgaatgag

SEQ ID NO: 3233257 - DNA, 25 bp, Homo sapien
tacaaccgagtcaagtgaacaagca

SEQ ID NO: 3233258 - DNA, 25 bp, Homo sapien
cagaggtgtgctcctacagaaagaa

SEQ ID NO: 3233259 - DNA, 25 bp, Homo sapien
tctcaatagctctcgtgtccacatc

SEQ ID NO: 3233260 - DNA, 25 bp, Homo sapien
ttatagcttcggctctctcaatagc

SEQ ID NO: 3233261 - DNA, 25 bp, Homo sapien
tttattcacacttatagcttcggct

SEQ ID NO: 3233262 - DNA, 25 bp, Homo sapien
cacatctttggaattgtcctctaag

SEQ ID NO: 3233263 - DNA, 25 bp, Homo sapien
tttgcacaaggaaggctgctccggt

SEQ ID NO: 3233264 - DNA, 25 bp, Homo sapien
tagcggcccagcttaacagtttagc

SEQ ID NO: 3233265 - DNA, 25 bp, Homo sapien
gttaagctgggatcctagcggccca

SEQ ID NO: 3233266 - DNA, 25 bp, Homo sapien
tatatcacaggatcctcggcacagg

SEQ ID NO: 3233267 - DNA, 25 bp, Homo sapien
tgactgacatgatctgacaacctgc

SEQ ID NO: 3233268 - DNA, 25 bp, Homo sapien
ttatttaagaacaagcagcgcagag

SEQ ID NO: 3233269 - DNA, 25 bp, Homo sapien
ttccgtgcccggtgatgagctgatc

SEQ ID NO: 3233270 - DNA, 25 bp, Homo sapien
caaacgcccctagcaaaggaaggca

SEQ ID NO: 3233271 - DNA, 25 bp, Homo sapien
gattctttgaagtgtgaccaaaatc

SEQ ID NO: 3233272 - DNA, 25 bp, Homo sapien
agcacatgattctttgaagtgtgac

SEQ ID NO: 3233273 - DNA, 25 bp, Homo sapien
ttctttgaagtgtgaccaaaatcct

SEQ ID NO: 3233274 - DNA, 25 bp, Homo sapien
catgattctttgaagtgtgaccaaa

SEQ ID NO: 3233275 - DNA, 25 bp, Homo sapien
cacgagtaaacagaccagctctcca

SEQ ID NO: 3233276 - DNA, 25 bp, Homo sapien
gagaacacgagtaaacagaccagct

SEQ ID NO: 3233277 - DNA, 25 bp, Homo sapien
gaacacgagtaaacagaccagctct

SEQ ID NO: 3233278 - DNA, 25 bp, Homo sapien
cggtgagaacacgagtaaacagacc

SEQ ID NO: 3233279 - DNA, 25 bp, Homo sapien
aatacaagaggcattaacttggtgt

SEQ ID NO: 3233280 - DNA, 25 bp, Homo sapien
gcattaacttggtgttaaataggaa

SEQ ID NO: 3233281 - DNA, 25 bp, Homo sapien
gaggcattaacttggtgttaaatag

SEQ ID NO: 3233282 - DNA, 25 bp, Homo sapien
caagaggcattaacttggtgttaaa

SEQ ID NO: 3233283 - DNA, 25 bp, Homo sapien
cgtaacatttgtcagacgaccttca

SEQ ID NO: 3233284 - DNA, 25 bp, Homo sapien
cccatgcaggtttgtgaccactcca

SEQ ID NO: 3233285 - DNA, 25 bp, Homo sapien
tgtcagacgaccttcactgtcatag

SEQ ID NO: 3233286 - DNA, 25 bp, Homo sapien
ccactccagttggaaacgtaacatt

SEQ ID NO: 3233287 - DNA, 25 bp, Homo sapien
acagatttgaagtgatgctgacatc

SEQ ID NO: 3233288 - DNA, 25 bp, Homo sapien
tcttctcggctagatgactcaatgt

SEQ ID NO: 3233289 - DNA, 25 bp, Homo sapien
tgtccactgtgatagccttgtccat

SEQ ID NO: 3233290 - DNA, 25 bp, Homo sapien
catggtgtagaaagaatcgatcgag

SEQ ID NO: 3233291 - DNA, 25 bp, Homo sapien
aaagtgggtgttgccgcattctgtc

SEQ ID NO: 3233292 - DNA, 25 bp, Homo sapien
cttggaaagtgggtgttgccgcatt

SEQ ID NO: 3233293 - DNA, 25 bp, Homo sapien
gctggtggtacttgtttaaaatgat

SEQ ID NO: 3233294 - DNA, 25 bp, Homo sapien
tgttgccgcattctgtctgggtgct

SEQ ID NO: 3233295 - DNA, 25 bp, Homo sapien
taaagaacaagaagcacaaaacatg

SEQ ID NO: 3233296 - DNA, 25 bp, Homo sapien
aaagaacaagaagcacaaaacatga

SEQ ID NO: 3233297 - DNA, 25 bp, Homo sapien
ctaaagaacaagaagcacaaaacat

SEQ ID NO: 3233298 - DNA, 25 bp, Homo sapien
aagaacaagaagcacaaaacatgaa

SEQ ID NO: 3233299 - DNA, 25 bp, Homo sapien
cgtagataattctgagggagccgtc

SEQ ID NO: 3233300 - DNA, 25 bp, Homo sapien
tgagcttgcggccaaagacattgac

SEQ ID NO: 3233301 - DNA, 25 bp, Homo sapien
aagttttgaccgttctcgccaggca

SEQ ID NO: 3233302 - DNA, 25 bp, Homo sapien
gggagccgtcataaccaatctggta

SEQ ID NO: 3233303 - DNA, 25 bp, Homo sapien
gcgacaccgaaacacccagatgcaa

SEQ ID NO: 3233304 - DNA, 25 bp, Homo sapien
ctttggtttgtgagtgtggctaggc

SEQ ID NO: 3233305 - DNA, 25 bp, Homo sapien
ccagatgcaagtcagatgatgccat

SEQ ID NO: 3233306 - DNA, 25 bp, Homo sapien
tgagtgtggctaggcgacaccgaaa

SEQ ID NO: 3233307 - DNA, 25 bp, Homo sapien
gacattgacggccatcagcttgctg

SEQ ID NO: 3233308 - DNA, 25 bp, Homo sapien
taatctactttctcgctagtggtgc

SEQ ID NO: 3233309 - DNA, 25 bp, Homo sapien
ccagacgtgtcgtaggcgatcctca

SEQ ID NO: 3233310 - DNA, 25 bp, Homo sapien
cctcgctggatgctggcaatttgac

SEQ ID NO: 3233311 - DNA, 25 bp, Homo sapien
tgctctggatgattgctgaaaaatg

SEQ ID NO: 3233312 - DNA, 25 bp, Homo sapien
ctattgttgagcttagtttgcaggc

SEQ ID NO: 3233313 - DNA, 25 bp, Homo sapien
tttccccttagtgctctggatgatt

SEQ ID NO: 3233314 - DNA, 25 bp, Homo sapien
cctttccctattgttgagcttagtt

SEQ ID NO: 3233315 - DNA, 25 bp, Homo sapien
ttgaagctctgccaggaataacaca

SEQ ID NO: 3233316 - DNA, 25 bp, Homo sapien
gctgacagctttaactgtgctaatg

SEQ ID NO: 3233317 - DNA, 25 bp, Homo sapien
taatgcgtaactaggatctacatgc

SEQ ID NO: 3233318 - DNA, 25 bp, Homo sapien
tatgattatgttgaagctctgccag

SEQ ID NO: 3233319 - DNA, 25 bp, Homo sapien
tattcgaagatgtactgccgctggc

SEQ ID NO: 3233320 - DNA, 25 bp, Homo sapien
cactaaagcggaaaatctgcctgtc

SEQ ID NO: 3233321 - DNA, 25 bp, Homo sapien
ggcggtcccacatatcgtattcgaa

SEQ ID NO: 3233322 - DNA, 25 bp, Homo sapien
tacagatcaataggcagtggcgttt

SEQ ID NO: 3233323 - DNA, 25 bp, Homo sapien
tcataacggtagatcactgtccagc

SEQ ID NO: 3233324 - DNA, 25 bp, Homo sapien
gatttccccatatgcagtgtactga

SEQ ID NO: 3233325 - DNA, 25 bp, Homo sapien
tttgctagaaacacgccttcccagg

SEQ ID NO: 3233326 - DNA, 25 bp, Homo sapien
cattcagatcgtagttgtaccgcca

SEQ ID NO: 3233327 - DNA, 25 bp, Homo sapien
cacaagttcgtaagaaggttctgtt

SEQ ID NO: 3233328 - DNA, 25 bp, Homo sapien
aacagggaatccaggaatagcattg

SEQ ID NO: 3233329 - DNA, 25 bp, Homo sapien
ccactgctgactcttcacaagttcg

SEQ ID NO: 3233330 - DNA, 25 bp, Homo sapien
gaatccaggaatagcattgtgcaga

SEQ ID NO: 3233331 - DNA, 25 bp, Homo sapien
taagacacaagctacttatcacctt

SEQ ID NO: 3233332 - DNA, 25 bp, Homo sapien
caagggtagtttgattagatatggg

SEQ ID NO: 3233333 - DNA, 25 bp, Homo sapien
tcacaagggtagtttgattagatat

SEQ ID NO: 3233334 - DNA, 25 bp, Homo sapien
gctacttatcacctttccgtaggtc

SEQ ID NO: 3233335 - DNA, 25 bp, Homo sapien
gggccccgcttcgtatgctttgaaa

SEQ ID NO: 3233336 - DNA, 25 bp, Homo sapien
tcatccggatctgcatgctcgtagc

SEQ ID NO: 3233337 - DNA, 25 bp, Homo sapien
tgctcgtagctttctccacaggagg

SEQ ID NO: 3233338 - DNA, 25 bp, Homo sapien
ggctgagaagccaccaaacacagag

SEQ ID NO: 3233339 - DNA, 25 bp, Homo sapien
ggaaggccttggcctgccgcgccac

SEQ ID NO: 3233340 - DNA, 25 bp, Homo sapien
acaggaaggccttggcctgccgcgc

SEQ ID NO: 3233341 - DNA, 25 bp, Homo sapien
gacaggaaggccttggcctgccgcg

SEQ ID NO: 3233342 - DNA, 25 bp, Homo sapien
cttccccagcgacaggaaggccttg

SEQ ID NO: 3233343 - DNA, 25 bp, Homo sapien
gcgccgccggcccggcgccggctca

SEQ ID NO: 3233344 - DNA, 25 bp, Homo sapien
gcgcgccgccggcccggcgccggct

SEQ ID NO: 3233345 - DNA, 25 bp, Homo sapien
cgccgccggcccggcgccggctcac

SEQ ID NO: 3233346 - DNA, 25 bp, Homo sapien
ctgcgcgccgccggcccggcgccgg

SEQ ID NO: 3233347 - DNA, 25 bp, Homo sapien
tgttgagcacgttggtctgcacgcg

SEQ ID NO: 3233348 - DNA, 25 bp, Homo sapien
ttgccgatcagcgacttgaccgtgg

SEQ ID NO: 3233349 - DNA, 25 bp, Homo sapien
cgctctgccgcaggaactggatgtt

SEQ ID NO: 3233350 - DNA, 25 bp, Homo sapien
accttgatgcagtcctcgttggcga

SEQ ID NO: 3233351 - DNA, 25 bp, Homo sapien
taagcaaaggtcgacaattcgggac

SEQ ID NO: 3233352 - DNA, 25 bp, Homo sapien
gaaacagtaactttgccccacattg

SEQ ID NO: 3233353 - DNA, 25 bp, Homo sapien
gtcccactcgggttgtgccacagga

SEQ ID NO: 3233354 - DNA, 25 bp, Homo sapien
ggtgtgggtcgtaacagcagtctca

SEQ ID NO: 3233355 - DNA, 25 bp, Homo sapien
tcatactgtacagctataacagata

SEQ ID NO: 3233356 - DNA, 25 bp, Homo sapien
acagataacaaaaggtgcaatcctt

SEQ ID NO: 3233357 - DNA, 25 bp, Homo sapien
tataataattcatactgtacagcta

SEQ ID NO: 3233358 - DNA, 25 bp, Homo sapien
cagataacaaaaggtgcaatccttt

SEQ ID NO: 3233359 - DNA, 25 bp, Homo sapien
aatacaggcctgcagaagttccacg

SEQ ID NO: 3233360 - DNA, 25 bp, Homo sapien
gaagaccagtccacgtcaagaagag

SEQ ID NO: 3233361 - DNA, 25 bp, Homo sapien
gaattgcacggtcctatccatctag

SEQ ID NO: 3233362 - DNA, 25 bp, Homo sapien
tatcggtgcccgagtgaagaccagt

SEQ ID NO: 3233363 - DNA, 25 bp, Homo sapien
gcggtctggcagttagaaccccatg

SEQ ID NO: 3233364 - DNA, 25 bp, Homo sapien
aagacaaatttcacgggatgtggca

SEQ ID NO: 3233365 - DNA, 25 bp, Homo sapien
gaaccccatgcaactgttaggatat

SEQ ID NO: 3233366 - DNA, 25 bp, Homo sapien
tgcccttctgttgcggtctggcagt

SEQ ID NO: 3233367 - DNA, 25 bp, Homo sapien
tgatgtggatcagtgccttctggct

SEQ ID NO: 3233368 - DNA, 25 bp, Homo sapien
cccagacagaacatgatgtggatca

SEQ ID NO: 3233369 - DNA, 25 bp, Homo sapien
caagcgagcggctgtgagcactgcc

SEQ ID NO: 3233370 - DNA, 25 bp, Homo sapien
ctctgtacaacagcaagcgagcggc

SEQ ID NO: 3233371 - DNA, 25 bp, Homo sapien
tctgctggagatcaaatgataccca

SEQ ID NO: 3233372 - DNA, 25 bp, Homo sapien
cccactctgctggagatcaaatgat

SEQ ID NO: 3233373 - DNA, 25 bp, Homo sapien
ctgctggagatcaaatgatacccac

SEQ ID NO: 3233374 - DNA, 25 bp, Homo sapien
cactctgctggagatcaaatgatac

SEQ ID NO: 3233375 - DNA, 25 bp, Homo sapien
cacacaggtggaagaacgagatttc

SEQ ID NO: 3233376 - DNA, 25 bp, Homo sapien
gcggaccgcttgtaaatcctgacag

SEQ ID NO: 3233377 - DNA, 25 bp, Homo sapien
cagttgtgtgcagcgagctatgcca

SEQ ID NO: 3233378 - DNA, 25 bp, Homo sapien
aaattcattttgacccagcggaccg

SEQ ID NO: 3233379 - DNA, 25 bp, Homo sapien
gacagactggctctaggtccttttg

SEQ ID NO: 3233380 - DNA, 25 bp, Homo sapien
gatcctgagtcatcaacgtcgccct

SEQ ID NO: 3233381 - DNA, 25 bp, Homo sapien
ggagccctatggcattccttccaag

SEQ ID NO: 3233382 - DNA, 25 bp, Homo sapien
gctctaggtccttttgagatcctga

SEQ ID NO: 3233383 - DNA, 25 bp, Homo sapien
cggtgctgaagcagaagtctccgct

SEQ ID NO: 3233384 - DNA, 25 bp, Homo sapien
ctttaagtgtgaaactcggagggca

SEQ ID NO: 3233385 - DNA, 25 bp, Homo sapien
ctcttcggtttcacctcggtttctg

SEQ ID NO: 3233386 - DNA, 25 bp, Homo sapien
ccgggaactgcccttttggcgtgca

SEQ ID NO: 3233387 - DNA, 25 bp, Homo sapien
agttgtcacagcaggcgaggcgctc

SEQ ID NO: 3233388 - DNA, 25 bp, Homo sapien
tgccggtggagagcccctgcctctg

SEQ ID NO: 3233389 - DNA, 25 bp, Homo sapien
cgctgctgccggtggagagcccctg

SEQ ID NO: 3233390 - DNA, 25 bp, Homo sapien
tgcctctggcttcggcagaggccca

SEQ ID NO: 3233391 - DNA, 25 bp, Homo sapien
cacgggaagtggggaggggcggctg

SEQ ID NO: 3233392 - DNA, 25 bp, Homo sapien
aggggcggctggggaccaaggtctg

SEQ ID NO: 3233393 - DNA, 25 bp, Homo sapien
ggctggggaccaaggtctgggttca

SEQ ID NO: 3233394 - DNA, 25 bp, Homo sapien
atgcagcgtcttggcacgggaagtg

SEQ ID NO: 3233395 - DNA, 25 bp, Homo sapien
agggagccctgctcgccacttccct

SEQ ID NO: 3233396 - DNA, 25 bp, Homo sapien
tcaaacggcgagcagtgagctctgg

SEQ ID NO: 3233397 - DNA, 25 bp, Homo sapien
cagctactaggctctgtcctgcagg

SEQ ID NO: 3233398 - DNA, 25 bp, Homo sapien
atcatcttcaaacggcgagcagtga

SEQ ID NO: 3233399 - DNA, 25 bp, Homo sapien
ccttggggttcagtccagttctagc

SEQ ID NO: 3233400 - DNA, 25 bp, Homo sapien
caccctcactgccagggtcttgaac

SEQ ID NO: 3233401 - DNA, 25 bp, Homo sapien
caggcatggacccagggaccctgtg

SEQ ID NO: 3233402 - DNA, 25 bp, Homo sapien
gaacttgatgaccagcgaggcctga

SEQ ID NO: 3233403 - DNA, 25 bp, Homo sapien
acggcaccaaatttcttgcgcatct

SEQ ID NO: 3233404 - DNA, 25 bp, Homo sapien
accaaatttcttgcgcatctgtgtg

SEQ ID NO: 3233405 - DNA, 25 bp, Homo sapien
ctggcgccggagttttgggtacacg

SEQ ID NO: 3233406 - DNA, 25 bp, Homo sapien
gggtacacggataaaacatgtctcc

SEQ ID NO: 3233407 - DNA, 25 bp, Homo sapien
cctctccccggaaaagcagagaagg

SEQ ID NO: 3233408 - DNA, 25 bp, Homo sapien
gccctgtccctggaaaagcagagaa

SEQ ID NO: 3233409 - DNA, 25 bp, Homo sapien
ttggggtacttgccctgtccctgga

SEQ ID NO: 3233410 - DNA, 25 bp, Homo sapien
cctgtccctggaaaagcagagaagg

SEQ ID NO: 3233411 - DNA, 25 bp, Homo sapien
ggagtatgactaacagatgaggatg

SEQ ID NO: 3233412 - DNA, 25 bp, Homo sapien
ctaggagatatcacctgtgatgtct

SEQ ID NO: 3233413 - DNA, 25 bp, Homo sapien
ataggagtatgactaacagatgagg

SEQ ID NO: 3233414 - DNA, 25 bp, Homo sapien
cactaggagatatcacctgtgatgt

SEQ ID NO: 3233415 - DNA, 25 bp, Homo sapien
ctgggctgagggccaggaggaatca

SEQ ID NO: 3233416 - DNA, 25 bp, Homo sapien
tgggctgagggccaggaggaatcat

SEQ ID NO: 3233417 - DNA, 25 bp, Homo sapien
aggatgcccaagggcccgtgttcca

SEQ ID NO: 3233418 - DNA, 25 bp, Homo sapien
ctggaccagcactgcggagatggcc

SEQ ID NO: 3233419 - DNA, 25 bp, Homo sapien
tgctggtgccctgcacaggtgtgcc

SEQ ID NO: 3233420 - DNA, 25 bp, Homo sapien
tcagcggccctgcaccattgctggt

SEQ ID NO: 3233421 - DNA, 25 bp, Homo sapien
accaggcgcctcaaaggatcttcag

SEQ ID NO: 3233422 - DNA, 25 bp, Homo sapien
gattctggccctctgtgcggtcccc

SEQ ID NO: 3233423 - DNA, 25 bp, Homo sapien
cgtggaccaggcgcctcaaaggatc

SEQ ID NO: 3233424 - DNA, 25 bp, Homo sapien
cctctgtgcggtcccctctgcttcc

SEQ ID NO: 3233425 - DNA, 25 bp, Homo sapien
cagccccagctgggcggcagcgtct

SEQ ID NO: 3233426 - DNA, 25 bp, Homo sapien
ccagctgggcggcagcgtctccctg

SEQ ID NO: 3233427 - DNA, 25 bp, Homo sapien
ctggagccctgtctcagtgcccctc

SEQ ID NO: 3233428 - DNA, 25 bp, Homo sapien
ccccagctgggcggcagcgtctccc

SEQ ID NO: 3233429 - DNA, 25 bp, Homo sapien
cgagggagacccttagagaggtagg

SEQ ID NO: 3233430 - DNA, 25 bp, Homo sapien
aggtcccggcaaagcccacactggg

SEQ ID NO: 3233431 - DNA, 25 bp, Homo sapien
cccttagagaggtaggagatccaga

SEQ ID NO: 3233432 - DNA, 25 bp, Homo sapien
gaggctgaagacaggtcccggcaaa

SEQ ID NO: 3233433 - DNA, 25 bp, Homo sapien
ctgggcagggggccttttctgcgct

SEQ ID NO: 3233434 - DNA, 25 bp, Homo sapien
tggggccagcaggagcaacgtttct

SEQ ID NO: 3233435 - DNA, 25 bp, Homo sapien
cagcaggagcaacgtttctgggcag

SEQ ID NO: 3233436 - DNA, 25 bp, Homo sapien
gccagcaggagcaacgtttctgggc

SEQ ID NO: 3233437 - DNA, 25 bp, Homo sapien
cattctggataaaggacagctctgc

SEQ ID NO: 3233438 - DNA, 25 bp, Homo sapien
tcctgtaactggtgagtgtggaatg

SEQ ID NO: 3233439 - DNA, 25 bp, Homo sapien
gagaaggcccatcctgtaactggtg

SEQ ID NO: 3233440 - DNA, 25 bp, Homo sapien
ccacattctggataaaggacagctc

SEQ ID NO: 3233441 - DNA, 25 bp, Homo sapien
gtcttcggggccaaggggcacagag

SEQ ID NO: 3233442 - DNA, 25 bp, Homo sapien
tggtcttcggggccaaggggcacag

SEQ ID NO: 3233443 - DNA, 25 bp, Homo sapien
ggtcttcggggccaaggggcacaga

SEQ ID NO: 3233444 - DNA, 25 bp, Homo sapien
ctggtcttcggggccaaggggcaca

SEQ ID NO: 3233445 - DNA, 25 bp, Homo sapien
cagcagcctgcggtctgaacatcat

SEQ ID NO: 3233446 - DNA, 25 bp, Homo sapien
ctgctctgaaatccatgagtgcccg

SEQ ID NO: 3233447 - DNA, 25 bp, Homo sapien
tctgaaatccatgagtgcccgagcc

SEQ ID NO: 3233448 - DNA, 25 bp, Homo sapien
cgagcctgggcagaactgctctgaa

SEQ ID NO: 3233449 - DNA, 25 bp, Homo sapien
ttccaatgtgtgaccccaagaagac

SEQ ID NO: 3233450 - DNA, 25 bp, Homo sapien
gctgttccaatgtgtgaccccaaga

SEQ ID NO: 3233451 - DNA, 25 bp, Homo sapien
agggctgttccaatgtgtgacccca

SEQ ID NO: 3233452 - DNA, 25 bp, Homo sapien
tgttccaatgtgtgaccccaagaag

SEQ ID NO: 3233453 - DNA, 25 bp, Homo sapien
gtcctgggcaagagtgatgctgtct

SEQ ID NO: 3233454 - DNA, 25 bp, Homo sapien
ccctcacccctgagaggcagccagg

SEQ ID NO: 3233455 - DNA, 25 bp, Homo sapien
ccctgagaggcagccaggcgtcctg

SEQ ID NO: 3233456 - DNA, 25 bp, Homo sapien
cagccaggcgtcctgggcaagagtg

SEQ ID NO: 3233457 - DNA, 25 bp, Homo sapien
cacagaccccagaagtgcagagtgt

SEQ ID NO: 3233458 - DNA, 25 bp, Homo sapien
agaccccagaagtgcagagtgtgcc

SEQ ID NO: 3233459 - DNA, 25 bp, Homo sapien
gcaggactgggctcgcctccacaga

SEQ ID NO: 3233460 - DNA, 25 bp, Homo sapien
ggcctcggcctcgaggatctggaga

SEQ ID NO: 3233461 - DNA, 25 bp, Homo sapien
cagctggtggaaattgtgttggtcc

SEQ ID NO: 3233462 - DNA, 25 bp, Homo sapien
ttggtcctcgggagctactagaaca

SEQ ID NO: 3233463 - DNA, 25 bp, Homo sapien
ctcgggagctactagaacacctcag

SEQ ID NO: 3233464 - DNA, 25 bp, Homo sapien
gaaattgtgttggtcctcgggagct

SEQ ID NO: 3233465 - DNA, 25 bp, Homo sapien
aggagagtgagacagccggtgagaa

SEQ ID NO: 3233466 - DNA, 25 bp, Homo sapien
ggagagtgagacagccggtgagaat

SEQ ID NO: 3233467 - DNA, 25 bp, Homo sapien
aaaaggtggaaggagcaccaagata

SEQ ID NO: 3233468 - DNA, 25 bp, Homo sapien
aggaggttaagagctttgacagctc

SEQ ID NO: 3233469 - DNA, 25 bp, Homo sapien
aaaggtggaaggagcaccaagatag

SEQ ID NO: 3233470 - DNA, 25 bp, Homo sapien
caagataggggaggaggttaagagc

SEQ ID NO: 3233471 - DNA, 25 bp, Homo sapien
agtggagatagggaccccatctttg

SEQ ID NO: 3233472 - DNA, 25 bp, Homo sapien
gctgatgtgttgttcagacctggca

SEQ ID NO: 3233473 - DNA, 25 bp, Homo sapien
tgcgggccacgatggaacattgctg

SEQ ID NO: 3233474 - DNA, 25 bp, Homo sapien
ccatctttgcagaccgcggctgtga

SEQ ID NO: 3233475 - DNA, 25 bp, Homo sapien
ggggtgatgggaccagcccggagca

SEQ ID NO: 3233476 - DNA, 25 bp, Homo sapien
ctggggtgatgggaccagcccggag

SEQ ID NO: 3233477 - DNA, 25 bp, Homo sapien
tggggtgatgggaccagcccggagc

SEQ ID NO: 3233478 - DNA, 25 bp, Homo sapien
gggtgatgggaccagcccggagcac

SEQ ID NO: 3233479 - DNA, 25 bp, Homo sapien
cgatgactgggtacaagttgctgag

SEQ ID NO: 3233480 - DNA, 25 bp, Homo sapien
tccttgatctttagacagagcttgg

SEQ ID NO: 3233481 - DNA, 25 bp, Homo sapien
gacaccagcgaaggttctaaagcga

SEQ ID NO: 3233482 - DNA, 25 bp, Homo sapien
gctctttgtagagggagcttcttcc

SEQ ID NO: 3233483 - DNA, 25 bp, Homo sapien
tggaaataatgccaaggatggcatt

SEQ ID NO: 3233484 - DNA, 25 bp, Homo sapien
gcccaggatgcggatcctccaggtt

SEQ ID NO: 3233485 - DNA, 25 bp, Homo sapien
ccaggatgcggatcctccaggttgg

SEQ ID NO: 3233486 - DNA, 25 bp, Homo sapien
aggatgcggatcctccaggttggaa

SEQ ID NO: 3233487 - DNA, 25 bp, Homo sapien
taatgtggctctggtgatgaacacg

SEQ ID NO: 3233488 - DNA, 25 bp, Homo sapien
ctgatgtctttggtgatgtggacat

SEQ ID NO: 3233489 - DNA, 25 bp, Homo sapien
tcagtttgtaactgtcacttttgac

SEQ ID NO: 3233490 - DNA, 25 bp, Homo sapien
ctgtcacttttgactaatgtggctc

SEQ ID NO: 3233491 - DNA, 25 bp, Homo sapien
cttctaaatgaatcccgcaacacat

SEQ ID NO: 3233492 - DNA, 25 bp, Homo sapien
ttctaaatgaatcccgcaacacatg

SEQ ID NO: 3233493 - DNA, 25 bp, Homo sapien
ctaaatgaatcccgcaacacatgct

SEQ ID NO: 3233494 - DNA, 25 bp, Homo sapien
aatgaatcccgcaacacatgctctg

SEQ ID NO: 3233495 - DNA, 25 bp, Homo sapien
tgctcctaccctcgggaaggtaaca

SEQ ID NO: 3233496 - DNA, 25 bp, Homo sapien
tgggagaggcgccagaaggacacca

SEQ ID NO: 3233497 - DNA, 25 bp, Homo sapien
gggatggcaggaatctgctcctacc

SEQ ID NO: 3233498 - DNA, 25 bp, Homo sapien
agagaccctgtgtgctacgcgtggc

SEQ ID NO: 3233499 - DNA, 25 bp, Homo sapien
ctgtcaaggcttggaggtggagagt

SEQ ID NO: 3233500 - DNA, 25 bp, Homo sapien
gcttggaggtggagagtgcccctca

SEQ ID NO: 3233501 - DNA, 25 bp, Homo sapien
tgtcaaggcttggaggtggagagtg

SEQ ID NO: 3233502 - DNA, 25 bp, Homo sapien
tggaggtggagagtgcccctcaggt

SEQ ID NO: 3233503 - DNA, 25 bp, Homo sapien
actgttttagtgatgtttggccttg

SEQ ID NO: 3233504 - DNA, 25 bp, Homo sapien
tgttttagtgatgtttggccttggg

SEQ ID NO: 3233505 - DNA, 25 bp, Homo sapien
tttagtgatgtttggccttgggtgt

SEQ ID NO: 3233506 - DNA, 25 bp, Homo sapien
tcactgttttagtgatgtttggcct

SEQ ID NO: 3233507 - DNA, 25 bp, Homo sapien
cctcagtgggcagtagaactttttg

SEQ ID NO: 3233508 - DNA, 25 bp, Homo sapien
cagatgggtccggtttggtgtattc

SEQ ID NO: 3233509 - DNA, 25 bp, Homo sapien
ggctcagtgaagctgcaaacagatg

SEQ ID NO: 3233510 - DNA, 25 bp, Homo sapien
tcttggttggcgcacagagcaagcc

SEQ ID NO: 3233511 - DNA, 25 bp, Homo sapien
tacattagcatctgcgtattaggga

SEQ ID NO: 3233512 - DNA, 25 bp, Homo sapien
tagcatctgcgtattagggagagaa

SEQ ID NO: 3233513 - DNA, 25 bp, Homo sapien
gaaagtacattagcatctgcgtatt

SEQ ID NO: 3233514 - DNA, 25 bp, Homo sapien
catctgcgtattagggagagaagct

SEQ ID NO: 3233515 - DNA, 25 bp, Homo sapien
caaagactaagaatgctttctgaaa

SEQ ID NO: 3233516 - DNA, 25 bp, Homo sapien
ctgtcaaagactaagaatgctttct

SEQ ID NO: 3233517 - DNA, 25 bp, Homo sapien
aagactaagaatgctttctgaaaac

SEQ ID NO: 3233518 - DNA, 25 bp, Homo sapien
gtcaaagactaagaatgctttctga

SEQ ID NO: 3233519 - DNA, 25 bp, Homo sapien
gagctggcgctgctctgaaattgac

SEQ ID NO: 3233520 - DNA, 25 bp, Homo sapien
tctgaaattgacagagagagcgagt

SEQ ID NO: 3233521 - DNA, 25 bp, Homo sapien
gcgctgaaccgagaggacatggcat

SEQ ID NO: 3233522 - DNA, 25 bp, Homo sapien
tcaggcccggtgatgcggcggcgtg

SEQ ID NO: 3233523 - DNA, 25 bp, Homo sapien
aaatgtttgcaatttggtgctcact

SEQ ID NO: 3233524 - DNA, 25 bp, Homo sapien
ctcgaagcagaaaatgtttgcaatt

SEQ ID NO: 3233525 - DNA, 25 bp, Homo sapien
agaaaatgtttgcaatttggtgctc

SEQ ID NO: 3233526 - DNA, 25 bp, Homo sapien
gcagaaaatgtttgcaatttggtgc

SEQ ID NO: 3233527 - DNA, 25 bp, Homo sapien
tgcctcatcttcattatcgacaacg

SEQ ID NO: 3233528 - DNA, 25 bp, Homo sapien
gacaacgctctcaaaatgtcccaga

SEQ ID NO: 3233529 - DNA, 25 bp, Homo sapien
tcatcgtacagcctgcttcggagaa

SEQ ID NO: 3233530 - DNA, 25 bp, Homo sapien
atcgtacagcctgcttcggagaagc

SEQ ID NO: 3233531 - DNA, 25 bp, Homo sapien
tcggtataatgaacgtattgtaagc

SEQ ID NO: 3233532 - DNA, 25 bp, Homo sapien
ctcctgcatggaggaaaattgcttt

SEQ ID NO: 3233533 - DNA, 25 bp, Homo sapien
cgtattgtaagctgtgacttttaca

SEQ ID NO: 3233534 - DNA, 25 bp, Homo sapien
gaggacagccattctcatcggtata

SEQ ID NO: 3233535 - DNA, 25 bp, Homo sapien
tagttctttctaagcttagctgagg

SEQ ID NO: 3233536 - DNA, 25 bp, Homo sapien
gcagacagctggaaaggtgcgctct

SEQ ID NO: 3233537 - DNA, 25 bp, Homo sapien
ggtgcgctctgagttctgattaaac

SEQ ID NO: 3233538 - DNA, 25 bp, Homo sapien
gattaaactgtgtccccataccagg

SEQ ID NO: 3233539 - DNA, 25 bp, Homo sapien
acccacgtggagacagcttactgca

SEQ ID NO: 3233540 - DNA, 25 bp, Homo sapien
ccggaatccgagatagggtggcaca

SEQ ID NO: 3233541 - DNA, 25 bp, Homo sapien
aaattaattcctatcccgtgagtgg

SEQ ID NO: 3233542 - DNA, 25 bp, Homo sapien
aacgcagttcatgtacaaggcccct

SEQ ID NO: 3233543 - DNA, 25 bp, Homo sapien
agtcctgtggatctcagagcagaag

SEQ ID NO: 3233544 - DNA, 25 bp, Homo sapien
ttcctggctgccgagttagcgctgc

SEQ ID NO: 3233545 - DNA, 25 bp, Homo sapien
gccgtcaccgttcctgggaagctct

SEQ ID NO: 3233546 - DNA, 25 bp, Homo sapien
gggccgtttatcaccagtcctgtgg

SEQ ID NO: 3233547 - DNA, 25 bp, Homo sapien
cttgtcctcccatgccgtcagggtt

SEQ ID NO: 3233548 - DNA, 25 bp, Homo sapien
tctgggcagcgaagatgattctctg

SEQ ID NO: 3233549 - DNA, 25 bp, Homo sapien
gcatggctctggtcactctgggcag

SEQ ID NO: 3233550 - DNA, 25 bp, Homo sapien
gtttatgagacctgcaagtctcggg

SEQ ID NO: 3233551 - DNA, 25 bp, Homo sapien
aggcatgagctcgtcacaggccagg

SEQ ID NO: 3233552 - DNA, 25 bp, Homo sapien
gcaaattggaccttgagccctcgtg

SEQ ID NO: 3233553 - DNA, 25 bp, Homo sapien
cagtcatcgagtgctctttgtggcc

SEQ ID NO: 3233554 - DNA, 25 bp, Homo sapien
gatggccagtcgacacaagtaaatg

SEQ ID NO: 3233555 - DNA, 25 bp, Homo sapien
agaactgtccgtgctctgaacggct

SEQ ID NO: 3233556 - DNA, 25 bp, Homo sapien
catgagcagacgcttcttagctcga

SEQ ID NO: 3233557 - DNA, 25 bp, Homo sapien
gacccttgtcttgtcagtgaacaga

SEQ ID NO: 3233558 - DNA, 25 bp, Homo sapien
gcagaaggcgttgcaggtctgttct

SEQ ID NO: 3233559 - DNA, 25 bp, Homo sapien
tgtccaggtttagcaactctgataa

SEQ ID NO: 3233560 - DNA, 25 bp, Homo sapien
tgataactataggaccccagaagta

SEQ ID NO: 3233561 - DNA, 25 bp, Homo sapien
caactctgataactataggacccca

SEQ ID NO: 3233562 - DNA, 25 bp, Homo sapien
ggaccccagaagtaaaagcactcag

SEQ ID NO: 3233563 - DNA, 25 bp, Homo sapien
ctcagcggaagtttccatcaggcat

SEQ ID NO: 3233564 - DNA, 25 bp, Homo sapien
cccatccctcagcggaagtttccat

SEQ ID NO: 3233565 - DNA, 25 bp, Homo sapien
tccctcagcggaagtttccatcagg

SEQ ID NO: 3233566 - DNA, 25 bp, Homo sapien
catccctcagcggaagtttccatca

SEQ ID NO: 3233567 - DNA, 25 bp, Homo sapien
cactcgggccgctgctgatttccat

SEQ ID NO: 3233568 - DNA, 25 bp, Homo sapien
gtgttgctttagcttgcactcgggc

SEQ ID NO: 3233569 - DNA, 25 bp, Homo sapien
gaggcagaagcgctgtcacttgttg

SEQ ID NO: 3233570 - DNA, 25 bp, Homo sapien
gcattttcctactgtgtccctcact

SEQ ID NO: 3233571 - DNA, 25 bp, Homo sapien
tggtgacaaagtccccatttgcaga

SEQ ID NO: 3233572 - DNA, 25 bp, Homo sapien
ctctgatcaggaagacctggttcct

SEQ ID NO: 3233573 - DNA, 25 bp, Homo sapien
tcaggtggaatcatgtgtccctcca

SEQ ID NO: 3233574 - DNA, 25 bp, Homo sapien
cctccatggcgggagggctcagtta

SEQ ID NO: 3233575 - DNA, 25 bp, Homo sapien
ggtggaatcatgtgtccctccatgg

SEQ ID NO: 3233576 - DNA, 25 bp, Homo sapien
ctccatggcgggagggctcagttac

SEQ ID NO: 3233577 - DNA, 25 bp, Homo sapien
tggcggtccgtcatactcaagctgg

SEQ ID NO: 3233578 - DNA, 25 bp, Homo sapien
tctgcattgaactgtgtgacggcca

SEQ ID NO: 3233579 - DNA, 25 bp, Homo sapien
tcaagctggtgcaaaagatacccgt

SEQ ID NO: 3233580 - DNA, 25 bp, Homo sapien
taagcagtgacctggaagccaaggg

SEQ ID NO: 3233581 - DNA, 25 bp, Homo sapien
caaagctttgaattgcttactgtga

SEQ ID NO: 3233582 - DNA, 25 bp, Homo sapien
ttggagaactctggcctcggtactg

SEQ ID NO: 3233583 - DNA, 25 bp, Homo sapien
acttcaagttgtctatcaaacactg

SEQ ID NO: 3233584 - DNA, 25 bp, Homo sapien
tcggtactgccttgttgctctctgt

SEQ ID NO: 3233585 - DNA, 25 bp, Homo sapien
tggtagaacctagcagagagacagc

SEQ ID NO: 3233586 - DNA, 25 bp, Homo sapien
gcacagtgtccctagctcagtatga

SEQ ID NO: 3233587 - DNA, 25 bp, Homo sapien
gcaatgtcagggtgcaattaccacc

SEQ ID NO: 3233588 - DNA, 25 bp, Homo sapien
gcaacaggttctagaagccacacca

SEQ ID NO: 3233589 - DNA, 25 bp, Homo sapien
ggaggccgtgcttggtgtcatcagg

SEQ ID NO: 3233590 - DNA, 25 bp, Homo sapien
aatgcggaggccgtgcttggtgtca

SEQ ID NO: 3233591 - DNA, 25 bp, Homo sapien
gttactgtggataatggatgaatca

SEQ ID NO: 3233592 - DNA, 25 bp, Homo sapien
actgtggataatggatgaatcagct

SEQ ID NO: 3233593 - DNA, 25 bp, Homo sapien
cactcactggtgacacttgtggctc

SEQ ID NO: 3233594 - DNA, 25 bp, Homo sapien
tccctgtgcacagatggcactcact

SEQ ID NO: 3233595 - DNA, 25 bp, Homo sapien
aatagacacccctcgctttgagtcc

SEQ ID NO: 3233596 - DNA, 25 bp, Homo sapien
ctttgagtcctatcagctctggctg

SEQ ID NO: 3233597 - DNA, 25 bp, Homo sapien
ggctaatttttgcttagggcctcaa

SEQ ID NO: 3233598 - DNA, 25 bp, Homo sapien
ttatttccttaaaggctctatctcc

SEQ ID NO: 3233599 - DNA, 25 bp, Homo sapien
gggcctcaatcttatgacctaattt

SEQ ID NO: 3233600 - DNA, 25 bp, Homo sapien
tttccttaaaggctctatctccaaa

SEQ ID NO: 3233601 - DNA, 25 bp, Homo sapien
tgctgggtacttgcaactttgccca

SEQ ID NO: 3233602 - DNA, 25 bp, Homo sapien
tgggaattctccttgtgacacctct

SEQ ID NO: 3233603 - DNA, 25 bp, Homo sapien
cattatgaggtctgaaaagcaacct

SEQ ID NO: 3233604 - DNA, 25 bp, Homo sapien
tgttcctggttactagaagcttccc

SEQ ID NO: 3233605 - DNA, 25 bp, Homo sapien
tagccatctgcgcttattgggacag

SEQ ID NO: 3233606 - DNA, 25 bp, Homo sapien
tttgtggtcccagatgtctggacgt

SEQ ID NO: 3233607 - DNA, 25 bp, Homo sapien
cttttaccagaaggaacagagtcat

SEQ ID NO: 3233608 - DNA, 25 bp, Homo sapien
tgtctggacgtttcggataaactcc

SEQ ID NO: 3233609 - DNA, 25 bp, Homo sapien
cgttccgtgaagtctgcatcttcaa

SEQ ID NO: 3233610 - DNA, 25 bp, Homo sapien
tggtaactttccgtgataacgtgga

SEQ ID NO: 3233611 - DNA, 25 bp, Homo sapien
cgttggtaacgttccgtgaagtctg

SEQ ID NO: 3233612 - DNA, 25 bp, Homo sapien
ctttccgtgataacgtggaacgttg

SEQ ID NO: 3233613 - DNA, 25 bp, Homo sapien
gactcgtgttccagcactgatccaa

SEQ ID NO: 3233614 - DNA, 25 bp, Homo sapien
acgccggttccagcggctctagcag

SEQ ID NO: 3233615 - DNA, 25 bp, Homo sapien
agctggccaggcatgtgcttcagac

SEQ ID NO: 3233616 - DNA, 25 bp, Homo sapien
caggcatgtgcttcagacgataaaa

SEQ ID NO: 3233617 - DNA, 25 bp, Homo sapien
taaaaattgcccaaagacactgaag

SEQ ID NO: 3233618 - DNA, 25 bp, Homo sapien
cacacagcgcaaacttagtggtggc

SEQ ID NO: 3233619 - DNA, 25 bp, Homo sapien
ggtgtgcctcagcattcaaaagccg

SEQ ID NO: 3233620 - DNA, 25 bp, Homo sapien
gattgtctctccgttaaatacctgg

SEQ ID NO: 3233621 - DNA, 25 bp, Homo sapien
aaaggtcttgagtggctgatggtcc

SEQ ID NO: 3233622 - DNA, 25 bp, Homo sapien
tgttagcatctctccttagaaaggc

SEQ ID NO: 3233623 - DNA, 25 bp, Homo sapien
gccaaggtgtatcagggtgtcgaca

SEQ ID NO: 3233624 - DNA, 25 bp, Homo sapien
cttagaaaggcaaactcagggccca

SEQ ID NO: 3233625 - DNA, 25 bp, Homo sapien
gaaatctttcatgggactacttcag

SEQ ID NO: 3233626 - DNA, 25 bp, Homo sapien
cacacgggaagtgttctccaaagcc

SEQ ID NO: 3233627 - DNA, 25 bp, Homo sapien
tccaaagccgtatcttcccaaggga

SEQ ID NO: 3233628 - DNA, 25 bp, Homo sapien
ggcacaagtaagacacacacgggaa

SEQ ID NO: 3233629 - DNA, 25 bp, Homo sapien
gccaggcagacagtgatgagtgcca

SEQ ID NO: 3233630 - DNA, 25 bp, Homo sapien
acgccaggcagacagtgatgagtgc

SEQ ID NO: 3233631 - DNA, 25 bp, Homo sapien
gacgccaggcagacagtgatgagtg

SEQ ID NO: 3233632 - DNA, 25 bp, Homo sapien
ccaggcagacagtgatgagtgccat

SEQ ID NO: 3233633 - DNA, 25 bp, Homo sapien
agccggggactctaaggtgcctggg

SEQ ID NO: 3233634 - DNA, 25 bp, Homo sapien
agccaaagccggggactctaaggtg

SEQ ID NO: 3233635 - DNA, 25 bp, Homo sapien
aaagccggggactctaaggtgcctg

SEQ ID NO: 3233636 - DNA, 25 bp, Homo sapien
caaagccggggactctaaggtgcct

SEQ ID NO: 3233637 - DNA, 25 bp, Homo sapien
cagttgcttggtttgagcgttccgg

SEQ ID NO: 3233638 - DNA, 25 bp, Homo sapien
gagacagctgcttgcagttgcttgg

SEQ ID NO: 3233639 - DNA, 25 bp, Homo sapien
agacagctgcttgcagttgcttggt

SEQ ID NO: 3233640 - DNA, 25 bp, Homo sapien
gcccagccttagatgtggggcctct

SEQ ID NO: 3233641 - DNA, 25 bp, Homo sapien
gggcctctgtagcggcatatgagtt

SEQ ID NO: 3233642 - DNA, 25 bp, Homo sapien
gcctctgtagcggcatatgagttga

SEQ ID NO: 3233643 - DNA, 25 bp, Homo sapien
gatgtggggcctctgtagcggcata

SEQ ID NO: 3233644 - DNA, 25 bp, Homo sapien
tacataagctttccagggttcaact

SEQ ID NO: 3233645 - DNA, 25 bp, Homo sapien
tcaggaatgagcccctcaggctctc

SEQ ID NO: 3233646 - DNA, 25 bp, Homo sapien
tgaggtgggtttcgctgacctgttc

SEQ ID NO: 3233647 - DNA, 25 bp, Homo sapien
cagggactcccttcaggaatgagcc

SEQ ID NO: 3233648 - DNA, 25 bp, Homo sapien
gcagctctttgtaattctgtgtctg

SEQ ID NO: 3233649 - DNA, 25 bp, Homo sapien
cagctctttgtaattctgtgtctgc

SEQ ID NO: 3233650 - DNA, 25 bp, Homo sapien
tgcagctctttgtaattctgtgtct

SEQ ID NO: 3233651 - DNA, 25 bp, Homo sapien
tgcatacagggaatttaggaaaaca

SEQ ID NO: 3233652 - DNA, 25 bp, Homo sapien
tgatgacttgttcgggttgcatcca

SEQ ID NO: 3233653 - DNA, 25 bp, Homo sapien
tcatgcttatcaatcttttgtatat

SEQ ID NO: 3233654 - DNA, 25 bp, Homo sapien
ctccagatgatgacttgttcgggtt

SEQ ID NO: 3233655 - DNA, 25 bp, Homo sapien
tgatcctttcttagttggtagtgga

SEQ ID NO: 3233656 - DNA, 25 bp, Homo sapien
tgctgatcctttcttagttggtagt

SEQ ID NO: 3233657 - DNA, 25 bp, Homo sapien
cttagttggtagtggatacctgtcc

SEQ ID NO: 3233658 - DNA, 25 bp, Homo sapien
ctttcttagttggtagtggatacct

SEQ ID NO: 3233659 - DNA, 25 bp, Homo sapien
ctgtagtagagaacaaattgctacg

SEQ ID NO: 3233660 - DNA, 25 bp, Homo sapien
ttttgaggcttaccatatcaaagtg

SEQ ID NO: 3233661 - DNA, 25 bp, Homo sapien
gaacaaattgctacgctcaagtcat

SEQ ID NO: 3233662 - DNA, 25 bp, Homo sapien
ttcattttgaggcttaccatatcaa

SEQ ID NO: 3233663 - DNA, 25 bp, Homo sapien
tcagataaagccgaatagtgggccc

SEQ ID NO: 3233664 - DNA, 25 bp, Homo sapien
gagaaaagagacaaccctcttccca

SEQ ID NO: 3233665 - DNA, 25 bp, Homo sapien
gaaaaaatgggagcatcatgggaaa

SEQ ID NO: 3233666 - DNA, 25 bp, Homo sapien
tatgaagggttcaaagaaaaggaca

SEQ ID NO: 3233667 - DNA, 25 bp, Homo sapien
taaaattcaaaagtgagcaaagctt

SEQ ID NO: 3233668 - DNA, 25 bp, Homo sapien
ataaaattcaaaagtgagcaaagct

SEQ ID NO: 3233669 - DNA, 25 bp, Homo sapien
tccaacatttgcagggtaattcctc

SEQ ID NO: 3233670 - DNA, 25 bp, Homo sapien
ctcctccaacatttgcagggtaatt

SEQ ID NO: 3233671 - DNA, 25 bp, Homo sapien
ccaacatttgcagggtaattcctca

SEQ ID NO: 3233672 - DNA, 25 bp, Homo sapien
cctccaacatttgcagggtaattcc

SEQ ID NO: 3233673 - DNA, 25 bp, Homo sapien
gaatttcgttggttccagtaagcgc

SEQ ID NO: 3233674 - DNA, 25 bp, Homo sapien
gcttctcctggtcgtaaactctttg

SEQ ID NO: 3233675 - DNA, 25 bp, Homo sapien
tatgccccttagaattccctttagc

SEQ ID NO: 3233676 - DNA, 25 bp, Homo sapien
tgaaatatccttgcctgcagtcaaa

SEQ ID NO: 3233677 - DNA, 25 bp, Homo sapien
atgcagtccacttcaacatgacgat

SEQ ID NO: 3233678 - DNA, 25 bp, Homo sapien
gcagtccacttcaacatgacgattt

SEQ ID NO: 3233679 - DNA, 25 bp, Homo sapien
cagcttaaaagcttttgcaatgcag

SEQ ID NO: 3233680 - DNA, 25 bp, Homo sapien
taaaagcttttgcaatgcagtccac

SEQ ID NO: 3233681 - DNA, 25 bp, Homo sapien
ttcctgcgccatgcagttacgctgg

SEQ ID NO: 3233682 - DNA, 25 bp, Homo sapien
gcagttacgctggagagggatttaa

SEQ ID NO: 3233683 - DNA, 25 bp, Homo sapien
gcttttgtggcttcctgcgccatgc

SEQ ID NO: 3233684 - DNA, 25 bp, Homo sapien
gagagggatttaagaagtgaagata

SEQ ID NO: 3233685 - DNA, 25 bp, Homo sapien
actgcaggtaggagaccgacattgg

SEQ ID NO: 3233686 - DNA, 25 bp, Homo sapien
ccgacattgggcaaattttgtggtt

SEQ ID NO: 3233687 - DNA, 25 bp, Homo sapien
aggtaggagaccgacattgggcaaa

SEQ ID NO: 3233688 - DNA, 25 bp, Homo sapien
gagaccgacattgggcaaattttgt

SEQ ID NO: 3233689 - DNA, 25 bp, Homo sapien
atgagacgccctggtggggtcttaa

SEQ ID NO: 3233690 - DNA, 25 bp, Homo sapien
caggaggtgatcacacaagtcaagc

SEQ ID NO: 3233691 - DNA, 25 bp, Homo sapien
aagcttctctagttcccggtggaat

SEQ ID NO: 3233692 - DNA, 25 bp, Homo sapien
tagttcccggtggaatgagacgccc

SEQ ID NO: 3233693 - DNA, 25 bp, Homo sapien
ctttgcgcttggtgaagagaagccc

SEQ ID NO: 3233694 - DNA, 25 bp, Homo sapien
aaggaaggcacccacggcgaatttg

SEQ ID NO: 3233695 - DNA, 25 bp, Homo sapien
ttctggaaggtaggctttgcgcttg

SEQ ID NO: 3233696 - DNA, 25 bp, Homo sapien
ttgcccgctttgaccgcatttaggg

SEQ ID NO: 3233697 - DNA, 25 bp, Homo sapien
tctgggcgtgaagcggaaactttaa

SEQ ID NO: 3233698 - DNA, 25 bp, Homo sapien
ccttagagcagtctgggcgtgaagc

SEQ ID NO: 3233699 - DNA, 25 bp, Homo sapien
cagtctgggcgtgaagcggaaactt

SEQ ID NO: 3233700 - DNA, 25 bp, Homo sapien
gtcgtgtttgcccttagagcagtct

SEQ ID NO: 3233701 - DNA, 25 bp, Homo sapien
gaagtcgtttaatcctgcccgctaa

SEQ ID NO: 3233702 - DNA, 25 bp, Homo sapien
taaaatagcaacaccgaggaaggcc

SEQ ID NO: 3233703 - DNA, 25 bp, Homo sapien
tctgcggccaatctcgaaggtggag

SEQ ID NO: 3233704 - DNA, 25 bp, Homo sapien
taatgcgtaaggactttccaccgtg

SEQ ID NO: 3233705 - DNA, 25 bp, Homo sapien
gtctgcgtcggagccggcgagcgaa

SEQ ID NO: 3233706 - DNA, 25 bp, Homo sapien
gcggcggaaccacgcgcgggaggtg

SEQ ID NO: 3233707 - DNA, 25 bp, Homo sapien
ggtgcctcaggaaacgctgttcgcg

SEQ ID NO: 3233708 - DNA, 25 bp, Homo sapien
tgcggatcagtccaccatgtctgcg

SEQ ID NO: 3233709 - DNA, 25 bp, Homo sapien
agcggcgcctccataggtaccgggc

SEQ ID NO: 3233710 - DNA, 25 bp, Homo sapien
gcctccataggtaccgggcgcggga

SEQ ID NO: 3233711 - DNA, 25 bp, Homo sapien
ccggcgagcggcgcctccataggta

SEQ ID NO: 3233712 - DNA, 25 bp, Homo sapien
cgagcggcgcctccataggtaccgg

SEQ ID NO: 3233713 - DNA, 25 bp, Homo sapien
agaccttgccgtcgtagtccctggc

SEQ ID NO: 3233714 - DNA, 25 bp, Homo sapien
ggtcctcctggtgttgtggtcaatg

SEQ ID NO: 3233715 - DNA, 25 bp, Homo sapien
ttgtggtcaatgtagaagaccttgc

SEQ ID NO: 3233716 - DNA, 25 bp, Homo sapien
agctggtcctcctggtgttgtggtc

SEQ ID NO: 3233717 - DNA, 25 bp, Homo sapien
tcacaattttcatcaggccagcaac

SEQ ID NO: 3233718 - DNA, 25 bp, Homo sapien
cttggagcgtgaagtttatgacaac

SEQ ID NO: 3233719 - DNA, 25 bp, Homo sapien
caacaactagcacgtctggagacac

SEQ ID NO: 3233720 - DNA, 25 bp, Homo sapien
gcataagtcaaataactggcttgga

SEQ ID NO: 3233721 - DNA, 25 bp, Homo sapien
taggtccagctaattcaaagaacca

SEQ ID NO: 3233722 - DNA, 25 bp, Homo sapien
agtttgggaaactaagtaacatgct

SEQ ID NO: 3233723 - DNA, 25 bp, Homo sapien
ggaaactaagtaacatgctgcattt

SEQ ID NO: 3233724 - DNA, 25 bp, Homo sapien
cttaagagtaacagacctatttcca

SEQ ID NO: 3233725 - DNA, 25 bp, Homo sapien
tcatggtttcttcttgctaactgtg

SEQ ID NO: 3233726 - DNA, 25 bp, Homo sapien
tcttgctaactgtgtaaaggacaag

SEQ ID NO: 3233727 - DNA, 25 bp, Homo sapien
ttgctaactgtgtaaaggacaagtg

SEQ ID NO: 3233728 - DNA, 25 bp, Homo sapien
gctaactgtgtaaaggacaagtgct

SEQ ID NO: 3233729 - DNA, 25 bp, Homo sapien
caaagcaagaccagccattaattaa

SEQ ID NO: 3233730 - DNA, 25 bp, Homo sapien
ccctcctggccacaatgttactttt

SEQ ID NO: 3233731 - DNA, 25 bp, Homo sapien
cccaggaggtcagtcagccatgatg

SEQ ID NO: 3233732 - DNA, 25 bp, Homo sapien
ggatcaaaggcgtaagcaacccctc

SEQ ID NO: 3233733 - DNA, 25 bp, Homo sapien
actataattaactgtaggcctcatg

SEQ ID NO: 3233734 - DNA, 25 bp, Homo sapien
gctagcccctagttcatccttgata

SEQ ID NO: 3233735 - DNA, 25 bp, Homo sapien
tgaacctacatctctccacttgcta

SEQ ID NO: 3233736 - DNA, 25 bp, Homo sapien
tcttatataattaggacagttggcc

SEQ ID NO: 3233737 - DNA, 25 bp, Homo sapien
ggtaaattgaaattacaagatatta

SEQ ID NO: 3233738 - DNA, 25 bp, Homo sapien
aacccattccctagcaagcttgcta

SEQ ID NO: 3233739 - DNA, 25 bp, Homo sapien
caaatagctcgaaaataaatattgc

SEQ ID NO: 3233740 - DNA, 25 bp, Homo sapien
ccctagcaagcttgctatgtaatta

SEQ ID NO: 3233741 - DNA, 25 bp, Homo sapien
cagaccttcctaccatcgatatgag

SEQ ID NO: 3233742 - DNA, 25 bp, Homo sapien
cgatatgagatacccaactaaggag

SEQ ID NO: 3233743 - DNA, 25 bp, Homo sapien
gaggctggcctctactaatacatgc

SEQ ID NO: 3233744 - DNA, 25 bp, Homo sapien
taccaacacctaaagccgacgatga

SEQ ID NO: 3233745 - DNA, 25 bp, Homo sapien
cgtgctgacaacgttgtcattgtca

SEQ ID NO: 3233746 - DNA, 25 bp, Homo sapien
gttgtcattgtcacattccccagcc

SEQ ID NO: 3233747 - DNA, 25 bp, Homo sapien
gtcttttcgtgctgacaacgttgtc

SEQ ID NO: 3233748 - DNA, 25 bp, Homo sapien
gacaacgttgtcattgtcacattcc

SEQ ID NO: 3233749 - DNA, 25 bp, Homo sapien
gctgcaaggagctcaaatttgggaa

SEQ ID NO: 3233750 - DNA, 25 bp, Homo sapien
gcagcagggaacatactcatagaat

SEQ ID NO: 3233751 - DNA, 25 bp, Homo sapien
ggctgggtccattcctaattgctca

SEQ ID NO: 3233752 - DNA, 25 bp, Homo sapien
ttctaactcattcgggacaccctgg

SEQ ID NO: 3233753 - DNA, 25 bp, Homo sapien
aactggccactatgtctccgctgac

SEQ ID NO: 3233754 - DNA, 25 bp, Homo sapien
aggcctcctatcatttagtcttcag

SEQ ID NO: 3233755 - DNA, 25 bp, Homo sapien
ttgcctgccgatcctcaaagccaaa

SEQ ID NO: 3233756 - DNA, 25 bp, Homo sapien
caaagccaaatgtggagccagctga

SEQ ID NO: 3233757 - DNA, 25 bp, Homo sapien
acctgagttcgggaagtcgagtctg

SEQ ID NO: 3233758 - DNA, 25 bp, Homo sapien
cacctgagttcgggaagtcgagtct

SEQ ID NO: 3233759 - DNA, 25 bp, Homo sapien
ggtgcaagacctacagaactctgtg

SEQ ID NO: 3233760 - DNA, 25 bp, Homo sapien
tccatatatgacgtcatacaggctg

SEQ ID NO: 3233761 - DNA, 25 bp, Homo sapien
ggtgccttggtattaactacatgtc

SEQ ID NO: 3233762 - DNA, 25 bp, Homo sapien
ccatggtggtttgtcctgatgtgaa

SEQ ID NO: 3233763 - DNA, 25 bp, Homo sapien
aatgactgactccagaacttgagag

SEQ ID NO: 3233764 - DNA, 25 bp, Homo sapien
gctggaaagtttgtccaaggaagcc

SEQ ID NO: 3233765 - DNA, 25 bp, Homo sapien
caaggaagcccctgaaactgttgtc

SEQ ID NO: 3233766 - DNA, 25 bp, Homo sapien
accccacaggcatcctaatgactga

SEQ ID NO: 3233767 - DNA, 25 bp, Homo sapien
accctttgcaatacatgttcccaag

SEQ ID NO: 3233768 - DNA, 25 bp, Homo sapien
agcctgctctcctcgaaagtgcttt

SEQ ID NO: 3233769 - DNA, 25 bp, Homo sapien
cctgtgccaaccctttgcaatacat

SEQ ID NO: 3233770 - DNA, 25 bp, Homo sapien
aatacatgttcccaagcctgctctc

SEQ ID NO: 3233771 - DNA, 25 bp, Homo sapien
tgtagttctcgattatgcgccctga

SEQ ID NO: 3233772 - DNA, 25 bp, Homo sapien
agagctcagctagatcagactgagt

SEQ ID NO: 3233773 - DNA, 25 bp, Homo sapien
aagcctgctgcttctgaacggagag

SEQ ID NO: 3233774 - DNA, 25 bp, Homo sapien
gatcagactgagtccgagcttccat

SEQ ID NO: 3233775 - DNA, 25 bp, Homo sapien
gtaatgtgtgcataagttttgataa

SEQ ID NO: 3233776 - DNA, 25 bp, Homo sapien
taatgtgtgcataagttttgataaa

SEQ ID NO: 3233777 - DNA, 25 bp, Homo sapien
gatttaagtgacagacataacagaa

SEQ ID NO: 3233778 - DNA, 25 bp, Homo sapien
tcaataattcagcaggtttttaaag

SEQ ID NO: 3233779 - DNA, 25 bp, Homo sapien
gaaaatctttcaatactgcatcaaa

SEQ ID NO: 3233780 - DNA, 25 bp, Homo sapien
tcctgactatggaacaagatacaag

SEQ ID NO: 3233781 - DNA, 25 bp, Homo sapien
gccgcatagcccttcacactaaaaa

SEQ ID NO: 3233782 - DNA, 25 bp, Homo sapien
tggttgcaagctctgccgcatagcc

SEQ ID NO: 3233783 - DNA, 25 bp, Homo sapien
catttgtacatagggcagtagtggt

SEQ ID NO: 3233784 - DNA, 25 bp, Homo sapien
cagtagtggttgcaagctctgccgc

SEQ ID NO: 3233785 - DNA, 25 bp, Homo sapien
caattacatgatggtgagtacaagc

SEQ ID NO: 3233786 - DNA, 25 bp, Homo sapien
atgtcctacgacatgagatgccaca

SEQ ID NO: 3233787 - DNA, 25 bp, Homo sapien
tgtcaactcaaatacatgtcctacg

SEQ ID NO: 3233788 - DNA, 25 bp, Homo sapien
aaacctgagtttgtactaactgcac

SEQ ID NO: 3233789 - DNA, 25 bp, Homo sapien
aaatacagtgaacggaaatgttaat

SEQ ID NO: 3233790 - DNA, 25 bp, Homo sapien
tacagtgaacggaaatgttaattaa

SEQ ID NO: 3233791 - DNA, 25 bp, Homo sapien
atacagtgaacggaaatgttaatta

SEQ ID NO: 3233792 - DNA, 25 bp, Homo sapien
cagtgaacggaaatgttaattaact

SEQ ID NO: 3233793 - DNA, 25 bp, Homo sapien
gtcaccctctgtatcactgtttgat

SEQ ID NO: 3233794 - DNA, 25 bp, Homo sapien
cattaactccattatcaatgctgtc

SEQ ID NO: 3233795 - DNA, 25 bp, Homo sapien
caactagatagagctctggtgccag

SEQ ID NO: 3233796 - DNA, 25 bp, Homo sapien
caatgctgtctaaaaggcacatgca

SEQ ID NO: 3233797 - DNA, 25 bp, Homo sapien
tagacaccaatctgagggtcaaacc

SEQ ID NO: 3233798 - DNA, 25 bp, Homo sapien
atgtagtagacaccaatctgagggt

SEQ ID NO: 3233799 - DNA, 25 bp, Homo sapien
tgatgtgatcgatgtagtagacacc

SEQ ID NO: 3233800 - DNA, 25 bp, Homo sapien
tgttgatgtgatcgatgtagtagac

SEQ ID NO: 3233801 - DNA, 25 bp, Homo sapien
ctcgaccagaatgggacggggacct

SEQ ID NO: 3233802 - DNA, 25 bp, Homo sapien
gggcactcgaccagaatgggacggg

SEQ ID NO: 3233803 - DNA, 25 bp, Homo sapien
tctggatggggcactcgaccagaat

SEQ ID NO: 3233804 - DNA, 25 bp, Homo sapien
atggggcactcgaccagaatgggac

SEQ ID NO: 3233805 - DNA, 25 bp, Homo sapien
tctggaaggatacacgtcagaagat

SEQ ID NO: 3233806 - DNA, 25 bp, Homo sapien
tgagctcttaggctctagcgatctt

SEQ ID NO: 3233807 - DNA, 25 bp, Homo sapien
caaaagaattgatatcatggtgcaa

SEQ ID NO: 3233808 - DNA, 25 bp, Homo sapien
gacgaggtcttatatgttaccaaga

SEQ ID NO: 3233809 - DNA, 25 bp, Homo sapien
aatacttccacagcccactcagagt

SEQ ID NO: 3233810 - DNA, 25 bp, Homo sapien
cactcagagttccacaacccctttc

SEQ ID NO: 3233811 - DNA, 25 bp, Homo sapien
tcttaggggtgtagagagtgtacat

SEQ ID NO: 3233812 - DNA, 25 bp, Homo sapien
cctttcttaggggtgtagagagtgt

SEQ ID NO: 3233813 - DNA, 25 bp, Homo sapien
tcttggatcttctatctgcgtggtt

SEQ ID NO: 3233814 - DNA, 25 bp, Homo sapien
cttggatcttctatctgcgtggttt

SEQ ID NO: 3233815 - DNA, 25 bp, Homo sapien
tttcttggatcttctatctgcgtgg

SEQ ID NO: 3233816 - DNA, 25 bp, Homo sapien
ttcttggatcttctatctgcgtggt

SEQ ID NO: 3233817 - DNA, 25 bp, Homo sapien
atcgcacgtattcatccagggccag

SEQ ID NO: 3233818 - DNA, 25 bp, Homo sapien
ggcatcatttaatcgcacgtattca

SEQ ID NO: 3233819 - DNA, 25 bp, Homo sapien
tataggcatcatttaatcgcacgta

SEQ ID NO: 3233820 - DNA, 25 bp, Homo sapien
catttaatcgcacgtattcatccag

SEQ ID NO: 3233821 - DNA, 25 bp, Homo sapien
acttccaaagtctgaatagccacac

SEQ ID NO: 3233822 - DNA, 25 bp, Homo sapien
cttccaaagtctgaatagccacact

SEQ ID NO: 3233823 - DNA, 25 bp, Homo sapien
cttaatcttgtagtggagatctcag

SEQ ID NO: 3233824 - DNA, 25 bp, Homo sapien
tcatatttagtactggatgaagatc

SEQ ID NO: 3233825 - DNA, 25 bp, Homo sapien
aaaatatcgggatcatatttagtac

SEQ ID NO: 3233826 - DNA, 25 bp, Homo sapien
ccttaatcttgtagtggagatctca

SEQ ID NO: 3233827 - DNA, 25 bp, Homo sapien
tacagtttggtgttacaagttagca

SEQ ID NO: 3233828 - DNA, 25 bp, Homo sapien
tttgaaagaagacactactgtgcta

SEQ ID NO: 3233829 - DNA, 25 bp, Homo sapien
gcagtttaggttgcctgcagtcaac

SEQ ID NO: 3233830 - DNA, 25 bp, Homo sapien
caactgcggtccaaaaatagatgac

SEQ ID NO: 3233831 - DNA, 25 bp, Homo sapien
gctggctgatggaaacacaaactat

SEQ ID NO: 3233832 - DNA, 25 bp, Homo sapien
caaggttctatgtctctatgctggc

SEQ ID NO: 3233833 - DNA, 25 bp, Homo sapien
gaaatctctagactggcacttgcct

SEQ ID NO: 3233834 - DNA, 25 bp, Homo sapien
tgttagaagaagtccaatgcagcac

SEQ ID NO: 3233835 - DNA, 25 bp, Homo sapien
atttaagtatacaatcatgtggtat

SEQ ID NO: 3233836 - DNA, 25 bp, Homo sapien
aagtatacaatcatgtggtattaag

SEQ ID NO: 3233837 - DNA, 25 bp, Homo sapien
catgtggtattaagtgcaaccatta

SEQ ID NO: 3233838 - DNA, 25 bp, Homo sapien
cctttaacatctaatatgttacagc

SEQ ID NO: 3233839 - DNA, 25 bp, Homo sapien
caggataatttctctaccacccaga

SEQ ID NO: 3233840 - DNA, 25 bp, Homo sapien
ttaaagggcttgtgtgttacctcca

SEQ ID NO: 3233841 - DNA, 25 bp, Homo sapien
gaaaggcatgcatactaggaaaggt

SEQ ID NO: 3233842 - DNA, 25 bp, Homo sapien
aaaccctcttatgctttgacatcta

SEQ ID NO: 3233843 - DNA, 25 bp, Homo sapien
tgggctctctggtcaaattatcaca

SEQ ID NO: 3233844 - DNA, 25 bp, Homo sapien
ttatcacaaagctgaaatcagggtg

SEQ ID NO: 3233845 - DNA, 25 bp, Homo sapien
caggctgagttgtcatctggggctt

SEQ ID NO: 3233846 - DNA, 25 bp, Homo sapien
taatagctcactaggttctctgggc

SEQ ID NO: 3233847 - DNA, 25 bp, Homo sapien
gatattgcatccttatattgtttct

SEQ ID NO: 3233848 - DNA, 25 bp, Homo sapien
gtaaatttgttctagtaacatgtcc

SEQ ID NO: 3233849 - DNA, 25 bp, Homo sapien
tttgatattgcatccttatattgtt

SEQ ID NO: 3233850 - DNA, 25 bp, Homo sapien
tgttctagtaacatgtccagatgat

SEQ ID NO: 3233851 - DNA, 25 bp, Homo sapien
tgaggagtcaacataaagaggttcc

SEQ ID NO: 3233852 - DNA, 25 bp, Homo sapien
ctcatgcatatagagcatggtctgt

SEQ ID NO: 3233853 - DNA, 25 bp, Homo sapien
gaaaactttcagaatactaggatca

SEQ ID NO: 3233854 - DNA, 25 bp, Homo sapien
taattacaatgacctaaaacatgtc

SEQ ID NO: 3233855 - DNA, 25 bp, Homo sapien
taaaggttaccctgctatcacagtc

SEQ ID NO: 3233856 - DNA, 25 bp, Homo sapien
cacagtctatctagaacccaggaga

SEQ ID NO: 3233857 - DNA, 25 bp, Homo sapien
tagaattgtagcaaaatgacctaaa

SEQ ID NO: 3233858 - DNA, 25 bp, Homo sapien
tgtgacccttattctgccttagaaa

SEQ ID NO: 3233859 - DNA, 25 bp, Homo sapien
gtgagagctctctctttagcttttt

SEQ ID NO: 3233860 - DNA, 25 bp, Homo sapien
ctgtgagagctctctctttagcttt

SEQ ID NO: 3233861 - DNA, 25 bp, Homo sapien
agagctctctctttagctttttaac

SEQ ID NO: 3233862 - DNA, 25 bp, Homo sapien
gagagctctctctttagctttttaa

SEQ ID NO: 3233863 - DNA, 25 bp, Homo sapien
cttgttctttatagagcagttcctg

SEQ ID NO: 3233864 - DNA, 25 bp, Homo sapien
gccttgttctttatagagcagttcc

SEQ ID NO: 3233865 - DNA, 25 bp, Homo sapien
aagccttgttctttatagagcagtt

SEQ ID NO: 3233866 - DNA, 25 bp, Homo sapien
tgttctttatagagcagttcctgct

SEQ ID NO: 3233867 - DNA, 25 bp, Homo sapien
agcttagggctctgctaacggccca

SEQ ID NO: 3233868 - DNA, 25 bp, Homo sapien
taacggcccagccaacttcagtagc

SEQ ID NO: 3233869 - DNA, 25 bp, Homo sapien
cttcagtagcaaacgggaaaggtag

SEQ ID NO: 3233870 - DNA, 25 bp, Homo sapien
ggttagactctaggtcatccctggg

SEQ ID NO: 3233871 - DNA, 25 bp, Homo sapien
taaaataaaccgaagtatgagcatc

SEQ ID NO: 3233872 - DNA, 25 bp, Homo sapien
tggctatccactgctcaacagaatg

SEQ ID NO: 3233873 - DNA, 25 bp, Homo sapien
tctcttttgaccctaacttgtcata

SEQ ID NO: 3233874 - DNA, 25 bp, Homo sapien
gcaggactggttcaagactgctaat

SEQ ID NO: 3233875 - DNA, 25 bp, Homo sapien
tctgtttgaatgatcccactgctgg

SEQ ID NO: 3233876 - DNA, 25 bp, Homo sapien
tttgggctcaaacaaacgcatgtct

SEQ ID NO: 3233877 - DNA, 25 bp, Homo sapien
gctgtaatgtctgtgcaaaacctgg

SEQ ID NO: 3233878 - DNA, 25 bp, Homo sapien
gaacccaaaccttatcaagtgctga

SEQ ID NO: 3233879 - DNA, 25 bp, Homo sapien
ttggcttcactgagttcatacccgc

SEQ ID NO: 3233880 - DNA, 25 bp, Homo sapien
gattttagttctgttagaatggctt

SEQ ID NO: 3233881 - DNA, 25 bp, Homo sapien
cctgagctaattgcctttctgatag

SEQ ID NO: 3233882 - DNA, 25 bp, Homo sapien
ggcctccagacatttttttatcaat

SEQ ID NO: 3233883 - DNA, 25 bp, Homo sapien
gcttgtttgtgacccagcatcaagg

SEQ ID NO: 3233884 - DNA, 25 bp, Homo sapien
agcatcaagggtctgtctggagaga

SEQ ID NO: 3233885 - DNA, 25 bp, Homo sapien
ggactacatctcaaatctggctcag

SEQ ID NO: 3233886 - DNA, 25 bp, Homo sapien
gatccaaatgaaaccgctcctgcag

SEQ ID NO: 3233887 - DNA, 25 bp, Homo sapien
tgtaggcttagcctgaccttttcag

SEQ ID NO: 3233888 - DNA, 25 bp, Homo sapien
gcttcttcatactgtaggcttagcc

SEQ ID NO: 3233889 - DNA, 25 bp, Homo sapien
ttggcttcttcatactgtaggctta

SEQ ID NO: 3233890 - DNA, 25 bp, Homo sapien
gcctgaccttttcagctaaatttga

SEQ ID NO: 3233891 - DNA, 25 bp, Homo sapien
gggtgacgaactgaagctctttcaa

SEQ ID NO: 3233892 - DNA, 25 bp, Homo sapien
caggcctcactgtccaattttgaca

SEQ ID NO: 3233893 - DNA, 25 bp, Homo sapien
aattcatcttgggtacgtttctgtg

SEQ ID NO: 3233894 - DNA, 25 bp, Homo sapien
cagcttctaggcgttctaattcatc

SEQ ID NO: 3233895 - DNA, 25 bp, Homo sapien
accaggtggcgagcacagtcgctgc

SEQ ID NO: 3233896 - DNA, 25 bp, Homo sapien
aggtggcgagcacagtcgctgccat

SEQ ID NO: 3233897 - DNA, 25 bp, Homo sapien
caggtggcgagcacagtcgctgcca

SEQ ID NO: 3233898 - DNA, 25 bp, Homo sapien
ggcgagcacagtcgctgccatcagg

SEQ ID NO: 3233899 - DNA, 25 bp, Homo sapien
tgagaaagggtttcctctacttggc

SEQ ID NO: 3233900 - DNA, 25 bp, Homo sapien
tcccctttcaagctgccctttgtga

SEQ ID NO: 3233901 - DNA, 25 bp, Homo sapien
tttgtgaagtgtgggccttcacacc

SEQ ID NO: 3233902 - DNA, 25 bp, Homo sapien
gctggatgagaaagggtttcctcta

SEQ ID NO: 3233903 - DNA, 25 bp, Homo sapien
atgcagacatcagccctttctccct

SEQ ID NO: 3233904 - DNA, 25 bp, Homo sapien
cccagaatgcagacatcagcccttt

SEQ ID NO: 3233905 - DNA, 25 bp, Homo sapien
ccagtccctccgttcttgctggtgt

SEQ ID NO: 3233906 - DNA, 25 bp, Homo sapien
ccgttcttgctggtgttgagatgaa

SEQ ID NO: 3233907 - DNA, 25 bp, Homo sapien
caaatctgacttgttcaaagcctca

SEQ ID NO: 3233908 - DNA, 25 bp, Homo sapien
tatagtctatgtcgtgtgaaggtct

SEQ ID NO: 3233909 - DNA, 25 bp, Homo sapien
taaaatggtgactataattcccctg

SEQ ID NO: 3233910 - DNA, 25 bp, Homo sapien
cctggtaaggctgttaaagggatca

SEQ ID NO: 3233911 - DNA, 25 bp, Homo sapien
caagtttctgtagcagctcttttct

SEQ ID NO: 3233912 - DNA, 25 bp, Homo sapien
agttgtgaatgcaaataagtagtta

SEQ ID NO: 3233913 - DNA, 25 bp, Homo sapien
tagtagtttcttcaagtttctgtag

SEQ ID NO: 3233914 - DNA, 25 bp, Homo sapien
tgtgaatgcaaataagtagttaatt

SEQ ID NO: 3233915 - DNA, 25 bp, Homo sapien
ctgtaatagagttcggtggaactga

SEQ ID NO: 3233916 - DNA, 25 bp, Homo sapien
tgagggagttgagtgaccctctgct

SEQ ID NO: 3233917 - DNA, 25 bp, Homo sapien
tggaactgagggagttgagtgaccc

SEQ ID NO: 3233918 - DNA, 25 bp, Homo sapien
agagccccgactcgatgccagggaa

SEQ ID NO: 3233919 - DNA, 25 bp, Homo sapien
gtgatgggtccagaaggaatgtaac

SEQ ID NO: 3233920 - DNA, 25 bp, Homo sapien
cacctcgttttcatggatggtggtg

SEQ ID NO: 3233921 - DNA, 25 bp, Homo sapien
tccactctggccaggctggctaggg

SEQ ID NO: 3233922 - DNA, 25 bp, Homo sapien
gaatgtaaccgcttttctcttgcag

SEQ ID NO: 3233923 - DNA, 25 bp, Homo sapien
caaaatctgattttcgatgaggctg

SEQ ID NO: 3233924 - DNA, 25 bp, Homo sapien
tctttatcctctgaaagagactggg

SEQ ID NO: 3233925 - DNA, 25 bp, Homo sapien
ttcatataatggctccctagcacat

SEQ ID NO: 3233926 - DNA, 25 bp, Homo sapien
ggctccctagcacattcattaaggt

SEQ ID NO: 3233927 - DNA, 25 bp, Homo sapien
taataccatacactgcaacctgctg

SEQ ID NO: 3233928 - DNA, 25 bp, Homo sapien
caacaagggaaacatcttgtgctct

SEQ ID NO: 3233929 - DNA, 25 bp, Homo sapien
tgcaactgttaacctggccagaagg

SEQ ID NO: 3233930 - DNA, 25 bp, Homo sapien
tgcaggcctaagaactacaatctct

SEQ ID NO: 3233931 - DNA, 25 bp, Homo sapien
tgtttcacgaaagcttcatagaccc

SEQ ID NO: 3233932 - DNA, 25 bp, Homo sapien
gtttcacgaaagcttcatagacccc

SEQ ID NO: 3233933 - DNA, 25 bp, Homo sapien
tcctatctgaacctgggcggtctct

SEQ ID NO: 3233934 - DNA, 25 bp, Homo sapien
ctgagtcctatctgaacctgggcgg

SEQ ID NO: 3233935 - DNA, 25 bp, Homo sapien
tgaacctgggcggtctctacaatgg

SEQ ID NO: 3233936 - DNA, 25 bp, Homo sapien
ggtctctacaatggctacatcctct

SEQ ID NO: 3233937 - DNA, 25 bp, Homo sapien
tttcggagctgtgctataatcacca

SEQ ID NO: 3233938 - DNA, 25 bp, Homo sapien
taatcaccatgaaacttgaactttt

SEQ ID NO: 3233939 - DNA, 25 bp, Homo sapien
gcatgaaggtttcggagctgtgcta

SEQ ID NO: 3233940 - DNA, 25 bp, Homo sapien
agtatgaggtatcaagaaggcatga

SEQ ID NO: 3233941 - DNA, 25 bp, Homo sapien
gaaatggcgactctgaacacatcat

SEQ ID NO: 3233942 - DNA, 25 bp, Homo sapien
tgtttgggaaatggcgactctgaac

SEQ ID NO: 3233943 - DNA, 25 bp, Homo sapien
aacttttgtgcgaaacagacagctg

SEQ ID NO: 3233944 - DNA, 25 bp, Homo sapien
tctgtgggcggatgaacttttgtgc

SEQ ID NO: 3233945 - DNA, 25 bp, Homo sapien
gtttactgacagagcaaaggtctac

SEQ ID NO: 3233946 - DNA, 25 bp, Homo sapien
cattcttcccttcggtgtttactga

SEQ ID NO: 3233947 - DNA, 25 bp, Homo sapien
cccttcggtgtttactgacagagca

SEQ ID NO: 3233948 - DNA, 25 bp, Homo sapien
tcttcccttcggtgtttactgacag

SEQ ID NO: 3233949 - DNA, 25 bp, Homo sapien
tacacagcagtcacgcaaagcttgg

SEQ ID NO: 3233950 - DNA, 25 bp, Homo sapien
caatctttcatcaggttgtcatgag

SEQ ID NO: 3233951 - DNA, 25 bp, Homo sapien
caaagcttggcattggtactgggag

SEQ ID NO: 3233952 - DNA, 25 bp, Homo sapien
gatagctgtcacaaaggtaaagttc

SEQ ID NO: 3233953 - DNA, 25 bp, Homo sapien
tcttctgctgtagcatttaaatgtc

SEQ ID NO: 3233954 - DNA, 25 bp, Homo sapien
taactgtgaagtcttctgctgtagc

SEQ ID NO: 3233955 - DNA, 25 bp, Homo sapien
gaagtcttctgctgtagcatttaaa

SEQ ID NO: 3233956 - DNA, 25 bp, Homo sapien
aattagttaactgtgaagtcttctg

SEQ ID NO: 3233957 - DNA, 25 bp, Homo sapien
cacccggcctcatagtacttcttat

SEQ ID NO: 3233958 - DNA, 25 bp, Homo sapien
catattccaccaaatcacacataga

SEQ ID NO: 3233959 - DNA, 25 bp, Homo sapien
tgatactaaagcctttctgatagcc

SEQ ID NO: 3233960 - DNA, 25 bp, Homo sapien
tccactttggttcttgaataagaca

SEQ ID NO: 3233961 - DNA, 25 bp, Homo sapien
ctatagaatctactaacggctggtt

SEQ ID NO: 3233962 - DNA, 25 bp, Homo sapien
taacggctggtttggttgaaataca

SEQ ID NO: 3233963 - DNA, 25 bp, Homo sapien
tggaaggaagcaagttataccatag

SEQ ID NO: 3233964 - DNA, 25 bp, Homo sapien
taccatagagtgaaaacctcactgg

SEQ ID NO: 3233965 - DNA, 25 bp, Homo sapien
ctgatgttcttgcaagtaaggctga

SEQ ID NO: 3233966 - DNA, 25 bp, Homo sapien
cagctgatgttcttgcaagtaaggc

SEQ ID NO: 3233967 - DNA, 25 bp, Homo sapien
gctgatgttcttgcaagtaaggctg

SEQ ID NO: 3233968 - DNA, 25 bp, Homo sapien
tcagctgatgttcttgcaagtaagg

SEQ ID NO: 3233969 - DNA, 25 bp, Homo sapien
catctgggccccttggctcttcttg

SEQ ID NO: 3233970 - DNA, 25 bp, Homo sapien
tccatctgggccccttggctcttct

SEQ ID NO: 3233971 - DNA, 25 bp, Homo sapien
gtctccatctgggccccttggctct

SEQ ID NO: 3233972 - DNA, 25 bp, Homo sapien
atctgggccccttggctcttcttgt

SEQ ID NO: 3233973 - DNA, 25 bp, Homo sapien
aagccgtgtaaacacatcatctttg

SEQ ID NO: 3233974 - DNA, 25 bp, Homo sapien
tctttgagctcccaacagcaaagga

SEQ ID NO: 3233975 - DNA, 25 bp, Homo sapien
ggtttcactgtaagccgtgtaaaca

SEQ ID NO: 3233976 - DNA, 25 bp, Homo sapien
tgtaaacacatcatctttgagctcc

SEQ ID NO: 3233977 - DNA, 25 bp, Homo sapien
gacttttcctagcacagcttcctga

SEQ ID NO: 3233978 - DNA, 25 bp, Homo sapien
tttaactttgcccataatcttgcca

SEQ ID NO: 3233979 - DNA, 25 bp, Homo sapien
tactcgaaacaagaacaaagaatct

SEQ ID NO: 3233980 - DNA, 25 bp, Homo sapien
tacttccttaactctctaatgacca

SEQ ID NO: 3233981 - DNA, 25 bp, Homo sapien
tataaatgaacctggacaataactg

SEQ ID NO: 3233982 - DNA, 25 bp, Homo sapien
cacatgtattaacagtagttcaacc

SEQ ID NO: 3233983 - DNA, 25 bp, Homo sapien
cttactagagcctaaatggtacttc

SEQ ID NO: 3233984 - DNA, 25 bp, Homo sapien
aaatacctgctttgtcttactagag

SEQ ID NO: 3233985 - DNA, 25 bp, Homo sapien
acacttttggtaggcaggcatgctc

SEQ ID NO: 3233986 - DNA, 25 bp, Homo sapien
gaacacgcaacctgggcatgctaag

SEQ ID NO: 3233987 - DNA, 25 bp, Homo sapien
taggcaggcatgctccatgaacacg

SEQ ID NO: 3233988 - DNA, 25 bp, Homo sapien
gcatgctaagttgttatctgggaaa

SEQ ID NO: 3233989 - DNA, 25 bp, Homo sapien
tagtaggtggctgacttctgaggtc

SEQ ID NO: 3233990 - DNA, 25 bp, Homo sapien
gctactgtcctctggcaatttaact

SEQ ID NO: 3233991 - DNA, 25 bp, Homo sapien
tcaggcacactagtgcatgaactta

SEQ ID NO: 3233992 - DNA, 25 bp, Homo sapien
ggtctttggcacagttgctttcttt

SEQ ID NO: 3233993 - DNA, 25 bp, Homo sapien
gcttcatcagtgtttgtctctttgt

SEQ ID NO: 3233994 - DNA, 25 bp, Homo sapien
attgtcattagcggcttcatcagtg

SEQ ID NO: 3233995 - DNA, 25 bp, Homo sapien
catcagtgtttgtctctttgtcaac

SEQ ID NO: 3233996 - DNA, 25 bp, Homo sapien
attagcggcttcatcagtgtttgtc

SEQ ID NO: 3233997 - DNA, 25 bp, Homo sapien
cggatgctgtctagagctcaggctg

SEQ ID NO: 3233998 - DNA, 25 bp, Homo sapien
tgtgagcgcactatcacactgctcc

SEQ ID NO: 3233999 - DNA, 25 bp, Homo sapien
tgctcctcacaaacggatgctgtct

SEQ ID NO: 3234000 - DNA, 25 bp, Homo sapien
gctctcctggagaaaaggtctgtga

SEQ ID NO: 3234001 - DNA, 25 bp, Homo sapien
gcggcgttcggtggagtttctcaca

SEQ ID NO: 3234002 - DNA, 25 bp, Homo sapien
tcaaactgcggcgttcggtggagtt

SEQ ID NO: 3234003 - DNA, 25 bp, Homo sapien
tggagtttctcacaaacagtgattt

SEQ ID NO: 3234004 - DNA, 25 bp, Homo sapien
ccttttgaccctcaaactgcggcgt

SEQ ID NO: 3234005 - DNA, 25 bp, Homo sapien
tgtcctcatacacctctataccttg

SEQ ID NO: 3234006 - DNA, 25 bp, Homo sapien
tcttctattcagatgaaccttttcc

SEQ ID NO: 3234007 - DNA, 25 bp, Homo sapien
tctattcagatgaaccttttcctca

SEQ ID NO: 3234008 - DNA, 25 bp, Homo sapien
tacttttgtcctcatacacctctat

SEQ ID NO: 3234009 - DNA, 25 bp, Homo sapien
tccttcctggcgcatgatggatggt

SEQ ID NO: 3234010 - DNA, 25 bp, Homo sapien
gttatacaggcagtggttaccccac

SEQ ID NO: 3234011 - DNA, 25 bp, Homo sapien
gacgaacaccctggttatacaggca

SEQ ID NO: 3234012 - DNA, 25 bp, Homo sapien
gatagttagaaacggaatgacgaac

SEQ ID NO: 3234013 - DNA, 25 bp, Homo sapien
ccagcacgcctggtggaaggtcagt

SEQ ID NO: 3234014 - DNA, 25 bp, Homo sapien
agtctagagatgtccgcactgggca

SEQ ID NO: 3234015 - DNA, 25 bp, Homo sapien
gcagctcatcattgaggcggctctg

SEQ ID NO: 3234016 - DNA, 25 bp, Homo sapien
gagatgcctgaaggtccagttctaa

SEQ ID NO: 3234017 - DNA, 25 bp, Homo sapien
ccttctacatggcacgctttaaaaa

SEQ ID NO: 3234018 - DNA, 25 bp, Homo sapien
aaaaagatgtaagcccctccgagat

SEQ ID NO: 3234019 - DNA, 25 bp, Homo sapien
taagttgggtaccttctacatggca

SEQ ID NO: 3234020 - DNA, 25 bp, Homo sapien
cagaagtgtaagttgggtaccttct

SEQ ID NO: 3234021 - DNA, 25 bp, Homo sapien
gtaagggagaatgtcaataagcaaa

SEQ ID NO: 3234022 - DNA, 25 bp, Homo sapien
aaaggtaagggagaatgtcaataag

SEQ ID NO: 3234023 - DNA, 25 bp, Homo sapien
aaggtaagggagaatgtcaataagc

SEQ ID NO: 3234024 - DNA, 25 bp, Homo sapien
ggtaagggagaatgtcaataagcaa

SEQ ID NO: 3234025 - DNA, 25 bp, Homo sapien
tgctgctggcttcgattcattgctt

SEQ ID NO: 3234026 - DNA, 25 bp, Homo sapien
ttatggcaattggcaggctctttgc

SEQ ID NO: 3234027 - DNA, 25 bp, Homo sapien
gattcattgcttttctgggagccat

SEQ ID NO: 3234028 - DNA, 25 bp, Homo sapien
gcttttctgggagccatatttttta

SEQ ID NO: 3234029 - DNA, 25 bp, Homo sapien
tacttagaattatttatgtgattaa

SEQ ID NO: 3234030 - DNA, 25 bp, Homo sapien
ttgtttacatagatccatgttgcta

SEQ ID NO: 3234031 - DNA, 25 bp, Homo sapien
tatttatgtgattaagaataagaaa

SEQ ID NO: 3234032 - DNA, 25 bp, Homo sapien
atttcttgctaggcaggtccactga

SEQ ID NO: 3234033 - DNA, 25 bp, Homo sapien
gaattgttatcctggtcgggcacag

SEQ ID NO: 3234034 - DNA, 25 bp, Homo sapien
taaagtgggcttcctacatacaaaa

SEQ ID NO: 3234035 - DNA, 25 bp, Homo sapien
tggtgctgttagtcacatagatgtc

SEQ ID NO: 3234036 - DNA, 25 bp, Homo sapien
tatagctactcccactttcgtttga

SEQ ID NO: 3234037 - DNA, 25 bp, Homo sapien
atgctgacgtccttcccaagcggga

SEQ ID NO: 3234038 - DNA, 25 bp, Homo sapien
catgagcaggtgttgatgtgattca

SEQ ID NO: 3234039 - DNA, 25 bp, Homo sapien
tctatgttcacaagagatatagggc

SEQ ID NO: 3234040 - DNA, 25 bp, Homo sapien
tgagagggacagttttactccgttc

SEQ ID NO: 3234041 - DNA, 25 bp, Homo sapien
tctgcattcagaccttgcttctgct

SEQ ID NO: 3234042 - DNA, 25 bp, Homo sapien
ccggagccgacacacgtccttggag

SEQ ID NO: 3234043 - DNA, 25 bp, Homo sapien
ttggagacttgcctcatcaacttct

SEQ ID NO: 3234044 - DNA, 25 bp, Homo sapien
tcaacttctctgcattcagaccttg

SEQ ID NO: 3234045 - DNA, 25 bp, Homo sapien
atgacctggttacccgcctatccct

SEQ ID NO: 3234046 - DNA, 25 bp, Homo sapien
ctcagagcctgacaaggtgtaaggt

SEQ ID NO: 3234047 - DNA, 25 bp, Homo sapien
aacgaatgcacatgttcttagcctc

SEQ ID NO: 3234048 - DNA, 25 bp, Homo sapien
agccccccagaagagcagaacgaat

SEQ ID NO: 3234049 - DNA, 25 bp, Homo sapien
cactgacttctaaggtctgtgcctc

SEQ ID NO: 3234050 - DNA, 25 bp, Homo sapien
tggcaactccccatgcgccagagct

SEQ ID NO: 3234051 - DNA, 25 bp, Homo sapien
acttctaaggtctgtgcctctgtcc

SEQ ID NO: 3234052 - DNA, 25 bp, Homo sapien
cagagcttggcactgacttctaagg

SEQ ID NO: 3234053 - DNA, 25 bp, Homo sapien
aagtagtggtagtccctgaaagtca

SEQ ID NO: 3234054 - DNA, 25 bp, Homo sapien
caagtagtggtagtccctgaaagtc

SEQ ID NO: 3234055 - DNA, 25 bp, Homo sapien
cccaagtagtggtagtccctgaaag

SEQ ID NO: 3234056 - DNA, 25 bp, Homo sapien
ccaagtagtggtagtccctgaaagt

SEQ ID NO: 3234057 - DNA, 25 bp, Homo sapien
cgtatcttaagggaagctgggaatg

SEQ ID NO: 3234058 - DNA, 25 bp, Homo sapien
tcatcattctcgtcacttccctggt

SEQ ID NO: 3234059 - DNA, 25 bp, Homo sapien
gatataatatgcttcgtatcttaag

SEQ ID NO: 3234060 - DNA, 25 bp, Homo sapien
atgttcgtggattctttgcttcagg

SEQ ID NO: 3234061 - DNA, 25 bp, Homo sapien
gcagagcggttttcaggtgaggaga

SEQ ID NO: 3234062 - DNA, 25 bp, Homo sapien
gacaccacgacgcaaatgaaaggag

SEQ ID NO: 3234063 - DNA, 25 bp, Homo sapien
gagaaggaggaactatctgcaaggt

SEQ ID NO: 3234064 - DNA, 25 bp, Homo sapien
gacaacctgatgagcgacaccacga

SEQ ID NO: 3234065 - DNA, 25 bp, Homo sapien
ctgcaaggtagtaactgccctggtc

SEQ ID NO: 3234066 - DNA, 25 bp, Homo sapien
ggaaacttctcagtaacctcacaga

SEQ ID NO: 3234067 - DNA, 25 bp, Homo sapien
agaaaagcacacaataacaggaaaa

SEQ ID NO: 3234068 - DNA, 25 bp, Homo sapien
acaggaaaagtctttacatcgatac

SEQ ID NO: 3234069 - DNA, 25 bp, Homo sapien
tctcagtaacctcacagaaaagcac

SEQ ID NO: 3234070 - DNA, 25 bp, Homo sapien
tttggtctaggatgggtgtttccga

SEQ ID NO: 3234071 - DNA, 25 bp, Homo sapien
atgggtgtttccgaactaggtagca

SEQ ID NO: 3234072 - DNA, 25 bp, Homo sapien
cgaactaggtagcagaagactcaaa

SEQ ID NO: 3234073 - DNA, 25 bp, Homo sapien
ttccgaactaggtagcagaagactc

SEQ ID NO: 3234074 - DNA, 25 bp, Homo sapien
tagaagctcttttccttacgcagaa

SEQ ID NO: 3234075 - DNA, 25 bp, Homo sapien
agctctggatcacggaagtcaccta

SEQ ID NO: 3234076 - DNA, 25 bp, Homo sapien
tctctgcaagcacaggtagaagctc

SEQ ID NO: 3234077 - DNA, 25 bp, Homo sapien
ccattaaaacagtccccaagacctg

SEQ ID NO: 3234078 - DNA, 25 bp, Homo sapien
gatgggatgcttatctttgctctgg

SEQ ID NO: 3234079 - DNA, 25 bp, Homo sapien
gcagggatgggatgcttatctttgc

SEQ ID NO: 3234080 - DNA, 25 bp, Homo sapien
gggatgggatgcttatctttgctct

SEQ ID NO: 3234081 - DNA, 25 bp, Homo sapien
ggatgcttatctttgctctggtgaa

SEQ ID NO: 3234082 - DNA, 25 bp, Homo sapien
ggcaatgcgcacatactgggcaaca

SEQ ID NO: 3234083 - DNA, 25 bp, Homo sapien
gccggctcaacagtacacatgtggg

SEQ ID NO: 3234084 - DNA, 25 bp, Homo sapien
ggagaagcaaaaccaccggctgaac

SEQ ID NO: 3234085 - DNA, 25 bp, Homo sapien
aaaatgaagtccactggcaatgcgc

SEQ ID NO: 3234086 - DNA, 25 bp, Homo sapien
catttcgggcggactttggaacgct

SEQ ID NO: 3234087 - DNA, 25 bp, Homo sapien
gcggactttggaacgctgcactcca

SEQ ID NO: 3234088 - DNA, 25 bp, Homo sapien
gatggccgtggacgcagcatccatt

SEQ ID NO: 3234089 - DNA, 25 bp, Homo sapien
tccaaatggaaagcgctcctctcct

SEQ ID NO: 3234090 - DNA, 25 bp, Homo sapien
taagagcacttggtagtttatatct

SEQ ID NO: 3234091 - DNA, 25 bp, Homo sapien
tattcttaagagcacttggtagttt

SEQ ID NO: 3234092 - DNA, 25 bp, Homo sapien
tttttattcttaagagcacttggta

SEQ ID NO: 3234093 - DNA, 25 bp, Homo sapien
tcttaagagcacttggtagtttata

SEQ ID NO: 3234094 - DNA, 25 bp, Homo sapien
tgccctcagtgtcatgaatcccaag

SEQ ID NO: 3234095 - DNA, 25 bp, Homo sapien
ggttacaccaaatgagtgccgatgc

SEQ ID NO: 3234096 - DNA, 25 bp, Homo sapien
tcgtgtagccaagagtagtgctcct

SEQ ID NO: 3234097 - DNA, 25 bp, Homo sapien
taaaagccttgatgctggcagagct

SEQ ID NO: 3234098 - DNA, 25 bp, Homo sapien
ttgtgccaatcagggaaataaactg

SEQ ID NO: 3234099 - DNA, 25 bp, Homo sapien
cgacactgaaatagagtattaggca

SEQ ID NO: 3234100 - DNA, 25 bp, Homo sapien
cagtcctgagcttttgatatttaag

SEQ ID NO: 3234101 - DNA, 25 bp, Homo sapien
ggaaagtgcagaaaccagttaatct

SEQ ID NO: 3234102 - DNA, 25 bp, Homo sapien
aggcgcagcgaccacagagcacata

SEQ ID NO: 3234103 - DNA, 25 bp, Homo sapien
tgggtagataacctcctgggacggc

SEQ ID NO: 3234104 - DNA, 25 bp, Homo sapien
tagataacctcctgggacggctgcc

SEQ ID NO: 3234105 - DNA, 25 bp, Homo sapien
tgtgtgggtagataacctcctggga

SEQ ID NO: 3234106 - DNA, 25 bp, Homo sapien
ggatgattcaagtagactctgccac

SEQ ID NO: 3234107 - DNA, 25 bp, Homo sapien
cacacaaacgtgcttctgcatcctg

SEQ ID NO: 3234108 - DNA, 25 bp, Homo sapien
tctgccacacaaacgtgcttctgca

SEQ ID NO: 3234109 - DNA, 25 bp, Homo sapien
caggagggcgatcttgggttttgga

SEQ ID NO: 3234110 - DNA, 25 bp, Homo sapien
cactggatttggtaggatgtcccgc

SEQ ID NO: 3234111 - DNA, 25 bp, Homo sapien
tcaagaactggagacgagaaacacc

SEQ ID NO: 3234112 - DNA, 25 bp, Homo sapien
cttttcacagcaaccgaagggcagg

SEQ ID NO: 3234113 - DNA, 25 bp, Homo sapien
tgggttgcccacaagacggttcagg

SEQ ID NO: 3234114 - DNA, 25 bp, Homo sapien
tgctttcgtccttcctcaaccctgt

SEQ ID NO: 3234115 - DNA, 25 bp, Homo sapien
tccaaagcttttactggacctctct

SEQ ID NO: 3234116 - DNA, 25 bp, Homo sapien
ctcaaccctgtcttgcaggacccag

SEQ ID NO: 3234117 - DNA, 25 bp, Homo sapien
agaatccaaagcttttactggacct

SEQ ID NO: 3234118 - DNA, 25 bp, Homo sapien
ctccgggtagtaaagcctgatagcc

SEQ ID NO: 3234119 - DNA, 25 bp, Homo sapien
gcctgatagcccagttctcaaactc

SEQ ID NO: 3234120 - DNA, 25 bp, Homo sapien
cctccccgggatgtgcaatgtctgt

SEQ ID NO: 3234121 - DNA, 25 bp, Homo sapien
caagcctcagtgtgtgcgagaagag

SEQ ID NO: 3234122 - DNA, 25 bp, Homo sapien
acagggaggaactttctgctggtgg

SEQ ID NO: 3234123 - DNA, 25 bp, Homo sapien
tgggcaaaacgtgtcaggccacagg

SEQ ID NO: 3234124 - DNA, 25 bp, Homo sapien
gggaggaactttctgctggtggttc

SEQ ID NO: 3234125 - DNA, 25 bp, Homo sapien
tctgctggtggttccctaaagatcc

SEQ ID NO: 3234126 - DNA, 25 bp, Homo sapien
ggcagcagcaatgaggccttctgga

SEQ ID NO: 3234127 - DNA, 25 bp, Homo sapien
cacccctctggatctgtcctggtga

SEQ ID NO: 3234128 - DNA, 25 bp, Homo sapien
gtcctggtgatgtcctgctgggctg

SEQ ID NO: 3234129 - DNA, 25 bp, Homo sapien
cagcagcaatgaggccttctggagg

SEQ ID NO: 3234130 - DNA, 25 bp, Homo sapien
ggatgttcccttcactactgagagc

SEQ ID NO: 3234131 - DNA, 25 bp, Homo sapien
aaacggtttgtttcctgctgctgga

SEQ ID NO: 3234132 - DNA, 25 bp, Homo sapien
taagtattccgttacagtagcacag

SEQ ID NO: 3234133 - DNA, 25 bp, Homo sapien
gactgagacgcgttattctggccta

SEQ ID NO: 3234134 - DNA, 25 bp, Homo sapien
tctcacatatgtgtgtgagcaccca

SEQ ID NO: 3234135 - DNA, 25 bp, Homo sapien
acatatgtgtgtgagcacccaatca

SEQ ID NO: 3234136 - DNA, 25 bp, Homo sapien
catctcacatatgtgtgtgagcacc

SEQ ID NO: 3234137 - DNA, 25 bp, Homo sapien
ggtacatctcacatatgtgtgtgag

SEQ ID NO: 3234138 - DNA, 25 bp, Homo sapien
agcttcagccccgactgccggagga

SEQ ID NO: 3234139 - DNA, 25 bp, Homo sapien
acaaagccagcatgtgcttcccaca

SEQ ID NO: 3234140 - DNA, 25 bp, Homo sapien
gcagtttctaactttacagccacaa

SEQ ID NO: 3234141 - DNA, 25 bp, Homo sapien
tgccggaggatgcattcagggttct

SEQ ID NO: 3234142 - DNA, 25 bp, Homo sapien
ggttccatgagtctcagacacccac

SEQ ID NO: 3234143 - DNA, 25 bp, Homo sapien
gggttccatgagtctcagacaccca

SEQ ID NO: 3234144 - DNA, 25 bp, Homo sapien
ttccatgagtctcagacacccacct

SEQ ID NO: 3234145 - DNA, 25 bp, Homo sapien
ctagggttccatgagtctcagacac

SEQ ID NO: 3234146 - DNA, 25 bp, Homo sapien
aaggcactgtgatgcctgaggtgtt

SEQ ID NO: 3234147 - DNA, 25 bp, Homo sapien
gatcgtcagctcactagaaaatgaa

SEQ ID NO: 3234148 - DNA, 25 bp, Homo sapien
cagagtctcgacactgatcgtcagc

SEQ ID NO: 3234149 - DNA, 25 bp, Homo sapien
gaggccgggtcagagtctcgacact

SEQ ID NO: 3234150 - DNA, 25 bp, Homo sapien
tgtgctcctgctatatctacccagg

SEQ ID NO: 3234151 - DNA, 25 bp, Homo sapien
taatgtttgcatggagttcagtctc

SEQ ID NO: 3234152 - DNA, 25 bp, Homo sapien
cagattgggtacatccatggccctg

SEQ ID NO: 3234153 - DNA, 25 bp, Homo sapien
gaccagagtcctcctgttcatgaag

SEQ ID NO: 3234154 - DNA, 25 bp, Homo sapien
gaagcactcgctcatgtcggaggag

SEQ ID NO: 3234155 - DNA, 25 bp, Homo sapien
gaagcatccagttgcataaagacag

SEQ ID NO: 3234156 - DNA, 25 bp, Homo sapien
cagctgcctctgaaaatgggtttga

SEQ ID NO: 3234157 - DNA, 25 bp, Homo sapien
tgagaactcagcacaaacgccatgg

SEQ ID NO: 3234158 - DNA, 25 bp, Homo sapien
tgtggcaccctgacttttgacccct

SEQ ID NO: 3234159 - DNA, 25 bp, Homo sapien
cctgacttttgacccctggagaact

SEQ ID NO: 3234160 - DNA, 25 bp, Homo sapien
caccctgacttttgacccctggaga

SEQ ID NO: 3234161 - DNA, 25 bp, Homo sapien
tggcaccctgacttttgacccctgg

SEQ ID NO: 3234162 - DNA, 25 bp, Homo sapien
gtttcgtgctttcagagcccgtaag

SEQ ID NO: 3234163 - DNA, 25 bp, Homo sapien
gcaatctaactgagttctgtggatc

SEQ ID NO: 3234164 - DNA, 25 bp, Homo sapien
cccgtaagcaatctaactgagttct

SEQ ID NO: 3234165 - DNA, 25 bp, Homo sapien
cgtgctttcagagcccgtaagcaat

SEQ ID NO: 3234166 - DNA, 25 bp, Homo sapien
taccccagcctgattggatgtccgt

SEQ ID NO: 3234167 - DNA, 25 bp, Homo sapien
aatcgatcggtcattccctctgcaa

SEQ ID NO: 3234168 - DNA, 25 bp, Homo sapien
gaccccgacggccagcatgggttgt

SEQ ID NO: 3234169 - DNA, 25 bp, Homo sapien
cattaggaattcaatcgatcggtca

SEQ ID NO: 3234170 - DNA, 25 bp, Homo sapien
gaggcagcataaataccgtcttgaa

SEQ ID NO: 3234171 - DNA, 25 bp, Homo sapien
tgacctggaagcatcatgggcttag

SEQ ID NO: 3234172 - DNA, 25 bp, Homo sapien
tcaacaagcgcgactgacatgacct

SEQ ID NO: 3234173 - DNA, 25 bp, Homo sapien
catgcgtgtgcattgactggaggca

SEQ ID NO: 3234174 - DNA, 25 bp, Homo sapien
cgttccttgcagatggtccactggt

SEQ ID NO: 3234175 - DNA, 25 bp, Homo sapien
ttacactcttgtggagagggcaccc

SEQ ID NO: 3234176 - DNA, 25 bp, Homo sapien
tttccattttggtcgcgttgcagct

SEQ ID NO: 3234177 - DNA, 25 bp, Homo sapien
cagctgtgccaggtcttcagaaagc

SEQ ID NO: 3234178 - DNA, 25 bp, Homo sapien
gatacagccttatgttcccacaatg

SEQ ID NO: 3234179 - DNA, 25 bp, Homo sapien
gccttatgttcccacaatgatctct

SEQ ID NO: 3234180 - DNA, 25 bp, Homo sapien
gatctcttgttacaaattcctgctt

SEQ ID NO: 3234181 - DNA, 25 bp, Homo sapien
tttcgtgcatcttggtggcctgtgt

SEQ ID NO: 3234182 - DNA, 25 bp, Homo sapien
tggatgctcctaacgtcctccagcc

SEQ ID NO: 3234183 - DNA, 25 bp, Homo sapien
tcctgccatcttcgtgtgacttgct

SEQ ID NO: 3234184 - DNA, 25 bp, Homo sapien
aaactatgcatgattgggatctggg

SEQ ID NO: 3234185 - DNA, 25 bp, Homo sapien
ttctgatactgacacaaaactatgc

SEQ ID NO: 3234186 - DNA, 25 bp, Homo sapien
ctgcgtgggtgggaggaaacgtgac

SEQ ID NO: 3234187 - DNA, 25 bp, Homo sapien
tgcgtgggtgggaggaaacgtgacg

SEQ ID NO: 3234188 - DNA, 25 bp, Homo sapien
agtaaagaacagctatgcattcgtg

SEQ ID NO: 3234189 - DNA, 25 bp, Homo sapien
tatgcattcgtgagaagaggtccag

SEQ ID NO: 3234190 - DNA, 25 bp, Homo sapien
gtgggtagtactcagcaggagcagc

SEQ ID NO: 3234191 - DNA, 25 bp, Homo sapien
ttccacatgaatgcactttgtgcag

SEQ ID NO: 3234192 - DNA, 25 bp, Homo sapien
tcactgggccctatcactaaggcct

SEQ ID NO: 3234193 - DNA, 25 bp, Homo sapien
tctcccgtggaagtgtaagaattca

SEQ ID NO: 3234194 - DNA, 25 bp, Homo sapien
agggctgcggtaagcccttctgtgc

SEQ ID NO: 3234195 - DNA, 25 bp, Homo sapien
gctttgggaggatgattcccactgg

SEQ ID NO: 3234196 - DNA, 25 bp, Homo sapien
tgagttgatttgctccaggctcggg

SEQ ID NO: 3234197 - DNA, 25 bp, Homo sapien
cctgcccaggatgggtgtatctttg

SEQ ID NO: 3234198 - DNA, 25 bp, Homo sapien
tgtgtggttcttgcgcagacaaaga

SEQ ID NO: 3234199 - DNA, 25 bp, Homo sapien
ttccaataatgtgtagccaacgctg

SEQ ID NO: 3234200 - DNA, 25 bp, Homo sapien
actggtgctatcagcctcctacatc

SEQ ID NO: 3234201 - DNA, 25 bp, Homo sapien
ctcatctgggggtactatagggcag

SEQ ID NO: 3234202 - DNA, 25 bp, Homo sapien
aaagaggactttgctctcatctggg

SEQ ID NO: 3234203 - DNA, 25 bp, Homo sapien
tactatagggcagatttcagctcca

SEQ ID NO: 3234204 - DNA, 25 bp, Homo sapien
taagcaaattcaagacctggtctgt

SEQ ID NO: 3234205 - DNA, 25 bp, Homo sapien
ttccttattaagcaaattcaagacc

SEQ ID NO: 3234206 - DNA, 25 bp, Homo sapien
ctgttacccgatataaagatctttc

SEQ ID NO: 3234207 - DNA, 25 bp, Homo sapien
caagacctggtctgttacccgatat

SEQ ID NO: 3234208 - DNA, 25 bp, Homo sapien
gtgcccattacccagtccctgaaat

SEQ ID NO: 3234209 - DNA, 25 bp, Homo sapien
agtccctgaaatgcacctttacggc

SEQ ID NO: 3234210 - DNA, 25 bp, Homo sapien
tgtgcccattacccagtccctgaaa

SEQ ID NO: 3234211 - DNA, 25 bp, Homo sapien
agcatgtgtgctatcgtcatcttct

SEQ ID NO: 3234212 - DNA, 25 bp, Homo sapien
tgtctggtgagagtatcctcctggt

SEQ ID NO: 3234213 - DNA, 25 bp, Homo sapien
tcatcaagtcagagtatctccaatg

SEQ ID NO: 3234214 - DNA, 25 bp, Homo sapien
cagcctccgtgaagcctatttgctc

SEQ ID NO: 3234215 - DNA, 25 bp, Homo sapien
ccttcgaggattagggtcttcctgt

SEQ ID NO: 3234216 - DNA, 25 bp, Homo sapien
tgacttcccaatctgaaagctaaag

SEQ ID NO: 3234217 - DNA, 25 bp, Homo sapien
ttccaaataggaaatcgattttcat

SEQ ID NO: 3234218 - DNA, 25 bp, Homo sapien
aaagctaaagtgtagggccctgcct

SEQ ID NO: 3234219 - DNA, 25 bp, Homo sapien
aaagtgatttccatcgcactagaac

SEQ ID NO: 3234220 - DNA, 25 bp, Homo sapien
caaagtgatttccatcgcactagaa

SEQ ID NO: 3234221 - DNA, 25 bp, Homo sapien
tatagtccttcagaactggaacttt

SEQ ID NO: 3234222 - DNA, 25 bp, Homo sapien
gattctcgttttcatggagcgtcat

SEQ ID NO: 3234223 - DNA, 25 bp, Homo sapien
aatgtcgctgtttttgataggcagc

SEQ ID NO: 3234224 - DNA, 25 bp, Homo sapien
gtatatcgttcagtgtgggcatggc

SEQ ID NO: 3234225 - DNA, 25 bp, Homo sapien
ggaggtctcagaagggatgggccaa

SEQ ID NO: 3234226 - DNA, 25 bp, Homo sapien
atctggcaagatgaaatcatgcctt

SEQ ID NO: 3234227 - DNA, 25 bp, Homo sapien
tatcctcaaatatctggcaagatga

SEQ ID NO: 3234228 - DNA, 25 bp, Homo sapien
atatctggcaagatgaaatcatgcc

SEQ ID NO: 3234229 - DNA, 25 bp, Homo sapien
cctcaaatatctggcaagatgaaat

SEQ ID NO: 3234230 - DNA, 25 bp, Homo sapien
tgcagattcaggcttgctcgtccac

SEQ ID NO: 3234231 - DNA, 25 bp, Homo sapien
aggcttgctcgtccacattctgctt

SEQ ID NO: 3234232 - DNA, 25 bp, Homo sapien
tgctgcaagtgggttggaacgctgg

SEQ ID NO: 3234233 - DNA, 25 bp, Homo sapien
gaacgctggtgccttaccccacatg

SEQ ID NO: 3234234 - DNA, 25 bp, Homo sapien
tccaaggccacgcttcagtctggtt

SEQ ID NO: 3234235 - DNA, 25 bp, Homo sapien
cccgaaggcgtcagtggcttcctca

SEQ ID NO: 3234236 - DNA, 25 bp, Homo sapien
cttcccgaaggcgtcagtggcttcc

SEQ ID NO: 3234237 - DNA, 25 bp, Homo sapien
agccagatgccgctctccaaggcca

SEQ ID NO: 3234238 - DNA, 25 bp, Homo sapien
taactaagtgggactagaaggcagg

SEQ ID NO: 3234239 - DNA, 25 bp, Homo sapien
cccacatcttgtgaggtgctctcca

SEQ ID NO: 3234240 - DNA, 25 bp, Homo sapien
tgcgccagccaaagctgtaactaag

SEQ ID NO: 3234241 - DNA, 25 bp, Homo sapien
gaacaccaagatagagagaggctgg

SEQ ID NO: 3234242 - DNA, 25 bp, Homo sapien
tcatgaagcgtcagcgggaagtcct

SEQ ID NO: 3234243 - DNA, 25 bp, Homo sapien
caatgcagtgcgtttggatgtcaca

SEQ ID NO: 3234244 - DNA, 25 bp, Homo sapien
gaacaacgagaagtgagagtttcct

SEQ ID NO: 3234245 - DNA, 25 bp, Homo sapien
tgtaaacctttgacgcagggccagt

SEQ ID NO: 3234246 - DNA, 25 bp, Homo sapien
agaagggcactaaaggtgtcactca

SEQ ID NO: 3234247 - DNA, 25 bp, Homo sapien
gaagggcactaaaggtgtcactcat

SEQ ID NO: 3234248 - DNA, 25 bp, Homo sapien
ctttggtcccgtgctgagcttcctg

SEQ ID NO: 3234249 - DNA, 25 bp, Homo sapien
tgggccccctttggtcccgtgctga

SEQ ID NO: 3234250 - DNA, 25 bp, Homo sapien
cccctttggtcccgtgctgagcttc

SEQ ID NO: 3234251 - DNA, 25 bp, Homo sapien
ttcctggcatctcccccccagaggc

SEQ ID NO: 3234252 - DNA, 25 bp, Homo sapien
gatgcatggctgtctgggggagtgg

SEQ ID NO: 3234253 - DNA, 25 bp, Homo sapien
ggtgggcaccgaggcctgaagaaga

SEQ ID NO: 3234254 - DNA, 25 bp, Homo sapien
ctggatgcatggctgtctgggggag

SEQ ID NO: 3234255 - DNA, 25 bp, Homo sapien
acggtgggcaccgaggcctgaagaa

SEQ ID NO: 3234256 - DNA, 25 bp, Homo sapien
ctatggttttacagggtgattcact

SEQ ID NO: 3234257 - DNA, 25 bp, Homo sapien
tctcctttgccatcccaagtactgg

SEQ ID NO: 3234258 - DNA, 25 bp, Homo sapien
tgattcactgaggaattaatctgtg

SEQ ID NO: 3234259 - DNA, 25 bp, Homo sapien
ccacgttgtcgttcttgctgttgtc

SEQ ID NO: 3234260 - DNA, 25 bp, Homo sapien
ggcaggctggcagcggtggaacctg

SEQ ID NO: 3234261 - DNA, 25 bp, Homo sapien
cggtggaacctgactttgctgagag

SEQ ID NO: 3234262 - DNA, 25 bp, Homo sapien
gctggcagcggtggaacctgacttt

SEQ ID NO: 3234263 - DNA, 25 bp, Homo sapien
cagcggtggaacctgactttgctga

SEQ ID NO: 3234264 - DNA, 25 bp, Homo sapien
taggcttgtcatcggccctgcaggg

SEQ ID NO: 3234265 - DNA, 25 bp, Homo sapien
ccacgtggtaggcttgtcatcggcc

SEQ ID NO: 3234266 - DNA, 25 bp, Homo sapien
tgggccacgtggtaggcttgtcatc

SEQ ID NO: 3234267 - DNA, 25 bp, Homo sapien
cgtggtaggcttgtcatcggccctg

SEQ ID NO: 3234268 - DNA, 25 bp, Homo sapien
gacagcagctgcctcgcaaagactg

SEQ ID NO: 3234269 - DNA, 25 bp, Homo sapien
ggctgaaggacagctagcaaccagc

SEQ ID NO: 3234270 - DNA, 25 bp, Homo sapien
cctggaaaggttctgttttggctga

SEQ ID NO: 3234271 - DNA, 25 bp, Homo sapien
cagctgcctcgcaaagactgatgaa

SEQ ID NO: 3234272 - DNA, 25 bp, Homo sapien
tcatagccagcttgccgggattttg

SEQ ID NO: 3234273 - DNA, 25 bp, Homo sapien
cccatctggcgtagagggtcagcac

SEQ ID NO: 3234274 - DNA, 25 bp, Homo sapien
cattttgttcccagatgtttgcgga

SEQ ID NO: 3234275 - DNA, 25 bp, Homo sapien
gagtgaaacagattgtgtctctgcc

SEQ ID NO: 3234276 - DNA, 25 bp, Homo sapien
gggtggtattttgcactggtggaca

SEQ ID NO: 3234277 - DNA, 25 bp, Homo sapien
gtggtattttgcactggtggacaga

SEQ ID NO: 3234278 - DNA, 25 bp, Homo sapien
tggtattttgcactggtggacagac

SEQ ID NO: 3234279 - DNA, 25 bp, Homo sapien
ggtggtattttgcactggtggacag

SEQ ID NO: 3234280 - DNA, 25 bp, Homo sapien
cactgaggccaattgcagggagtcc

SEQ ID NO: 3234281 - DNA, 25 bp, Homo sapien
tgccgattggaggacacggatttcc

SEQ ID NO: 3234282 - DNA, 25 bp, Homo sapien
gatggaacaagagaacacgaagccc

SEQ ID NO: 3234283 - DNA, 25 bp, Homo sapien
gccgtgtttgtgtgcgatgtgaaaa

SEQ ID NO: 3234284 - DNA, 25 bp, Homo sapien
gatgtgacttttgctgacgtggccc

SEQ ID NO: 3234285 - DNA, 25 bp, Homo sapien
tctggccgtgcctcgttaacttgac

SEQ ID NO: 3234286 - DNA, 25 bp, Homo sapien
gctcggcagcagcacaagtaccatg

SEQ ID NO: 3234287 - DNA, 25 bp, Homo sapien
taacttgaccaagaagaggaccaac

SEQ ID NO: 3234288 - DNA, 25 bp, Homo sapien
tgaagccaggttttagtccctgtgg

SEQ ID NO: 3234289 - DNA, 25 bp, Homo sapien
gaactgcgcaagtcagggctcacta

SEQ ID NO: 3234290 - DNA, 25 bp, Homo sapien
tggattctggaactgcgcaagtcag

SEQ ID NO: 3234291 - DNA, 25 bp, Homo sapien
gtgcgaaagccccagacttgtggcg

SEQ ID NO: 3234292 - DNA, 25 bp, Homo sapien
tgcccggcaggtcagccgtctgctc

SEQ ID NO: 3234293 - DNA, 25 bp, Homo sapien
gggcttctggcgctgtgcccggcag

SEQ ID NO: 3234294 - DNA, 25 bp, Homo sapien
ggcaggtcagccgtctgctcagcca

SEQ ID NO: 3234295 - DNA, 25 bp, Homo sapien
cccggcaggtcagccgtctgctcag

SEQ ID NO: 3234296 - DNA, 25 bp, Homo sapien
cacctagaacatttgcgaaagaaga

SEQ ID NO: 3234297 - DNA, 25 bp, Homo sapien
tgtggcccgagtggttgtgcttttc

SEQ ID NO: 3234298 - DNA, 25 bp, Homo sapien
caagagctggacttaggagatcaca

SEQ ID NO: 3234299 - DNA, 25 bp, Homo sapien
cctaaatggttgaagcaggctgacc

SEQ ID NO: 3234300 - DNA, 25 bp, Homo sapien
tccatttctcctggtcgttctcaca

SEQ ID NO: 3234301 - DNA, 25 bp, Homo sapien
catttctcctggtcgttctcacagt

SEQ ID NO: 3234302 - DNA, 25 bp, Homo sapien
ccatttctcctggtcgttctcacag

SEQ ID NO: 3234303 - DNA, 25 bp, Homo sapien
atttctcctggtcgttctcacagtt

SEQ ID NO: 3234304 - DNA, 25 bp, Homo sapien
tcagacgagttttcactccacctac

SEQ ID NO: 3234305 - DNA, 25 bp, Homo sapien
gagttttcactccacctactagcaa

SEQ ID NO: 3234306 - DNA, 25 bp, Homo sapien
cagcactcagacgagttttcactcc

SEQ ID NO: 3234307 - DNA, 25 bp, Homo sapien
ctccacctactagcaaaggcacatt

SEQ ID NO: 3234308 - DNA, 25 bp, Homo sapien
gcaggcagaggcagttttaaaggtt

SEQ ID NO: 3234309 - DNA, 25 bp, Homo sapien
cagaggcagttttaaaggttagagc

SEQ ID NO: 3234310 - DNA, 25 bp, Homo sapien
agaagcaggcagaggcagttttaaa

SEQ ID NO: 3234311 - DNA, 25 bp, Homo sapien
ggcagaggcagttttaaaggttaga

SEQ ID NO: 3234312 - DNA, 25 bp, Homo sapien
ccataaaagccagggcattgcttct

SEQ ID NO: 3234313 - DNA, 25 bp, Homo sapien
tcttatctggatatgaggtagcctg

SEQ ID NO: 3234314 - DNA, 25 bp, Homo sapien
tcctccgaaacctgttattatgccc

SEQ ID NO: 3234315 - DNA, 25 bp, Homo sapien
tgggtcttcatttgtcctccgaaac

SEQ ID NO: 3234316 - DNA, 25 bp, Homo sapien
tctgtacgaatttgagtatccattc

SEQ ID NO: 3234317 - DNA, 25 bp, Homo sapien
tgagtatccattccagggagctgac

SEQ ID NO: 3234318 - DNA, 25 bp, Homo sapien
ttgagtatccattccagggagctga

SEQ ID NO: 3234319 - DNA, 25 bp, Homo sapien
ttacttccttctgtacgaatttgag

SEQ ID NO: 3234320 - DNA, 25 bp, Homo sapien
tccgtgttgccgtgaggcttgcagc

SEQ ID NO: 3234321 - DNA, 25 bp, Homo sapien
tgttcccgcagtttattaggtctct

SEQ ID NO: 3234322 - DNA, 25 bp, Homo sapien
ttgcagccttcgaagctggccctgg

SEQ ID NO: 3234323 - DNA, 25 bp, Homo sapien
ttaggtctctagttaatccaggcat

SEQ ID NO: 3234324 - DNA, 25 bp, Homo sapien
tgcgtccccgtgaggccacggaggg

SEQ ID NO: 3234325 - DNA, 25 bp, Homo sapien
tgggacgaccgagtctcggcggaac

SEQ ID NO: 3234326 - DNA, 25 bp, Homo sapien
actgcaagtcgagctggcctgggac

SEQ ID NO: 3234327 - DNA, 25 bp, Homo sapien
tctgtcctcgctttgtgacgccgcg

SEQ ID NO: 3234328 - DNA, 25 bp, Homo sapien
gcgccctcgcgttcttccggcgcga

SEQ ID NO: 3234329 - DNA, 25 bp, Homo sapien
gcgcgccctcgcgttcttccggcgc

SEQ ID NO: 3234330 - DNA, 25 bp, Homo sapien
cctcgcgttcttccggcgcgagccg

SEQ ID NO: 3234331 - DNA, 25 bp, Homo sapien
gccgcgcgccctcgcgttcttccgg

SEQ ID NO: 3234332 - DNA, 25 bp, Homo sapien
tgtcactgcggcctgcacccgcggc

SEQ ID NO: 3234333 - DNA, 25 bp, Homo sapien
ctccgcaggcctaaagaccaaacaa

SEQ ID NO: 3234334 - DNA, 25 bp, Homo sapien
ggccctccagataacgcccctccgc

SEQ ID NO: 3234335 - DNA, 25 bp, Homo sapien
aaagaccaaacaacagcgcccagag

SEQ ID NO: 3234336 - DNA, 25 bp, Homo sapien
gttgggcctgcaggccgcgaacaca

SEQ ID NO: 3234337 - DNA, 25 bp, Homo sapien
tgcgaagcaaaaaatcccggcggtg

SEQ ID NO: 3234338 - DNA, 25 bp, Homo sapien
ccagtgtttgtcagtctcgccgtcg

SEQ ID NO: 3234339 - DNA, 25 bp, Homo sapien
cgtggttcgcccaggccatggaaaa

SEQ ID NO: 3234340 - DNA, 25 bp, Homo sapien
ttcatccgtgctagcggaggcagcg

SEQ ID NO: 3234341 - DNA, 25 bp, Homo sapien
tggttagggacgctgcctcactcac

SEQ ID NO: 3234342 - DNA, 25 bp, Homo sapien
ctggttagggacgctgcctcactca

SEQ ID NO: 3234343 - DNA, 25 bp, Homo sapien
gaatcatgtcggctcctcgcaggga

SEQ ID NO: 3234344 - DNA, 25 bp, Homo sapien
ggcggattcccgcgcttcacaactt

SEQ ID NO: 3234345 - DNA, 25 bp, Homo sapien
accgggcacacagacgtccgggaat

SEQ ID NO: 3234346 - DNA, 25 bp, Homo sapien
caggtggcacacaaaacgaggcgtg

SEQ ID NO: 3234347 - DNA, 25 bp, Homo sapien
ttgttccctaacacaagcaacccta

SEQ ID NO: 3234348 - DNA, 25 bp, Homo sapien
caagagcgttgttccctaacacaag

SEQ ID NO: 3234349 - DNA, 25 bp, Homo sapien
gagcgttgttccctaacacaagcaa

SEQ ID NO: 3234350 - DNA, 25 bp, Homo sapien
tccccaagagcgttgttccctaaca

SEQ ID NO: 3234351 - DNA, 25 bp, Homo sapien
cctacttgtgcaaaaaacaggccac

SEQ ID NO: 3234352 - DNA, 25 bp, Homo sapien
gcatttcctggctgcaatcaagaaa

SEQ ID NO: 3234353 - DNA, 25 bp, Homo sapien
tcctcactaatcttaaatctcgcac

SEQ ID NO: 3234354 - DNA, 25 bp, Homo sapien
accaaccgccaagaactgtttcctg

SEQ ID NO: 3234355 - DNA, 25 bp, Homo sapien
tggcaaccagttcatctcttgttgt

SEQ ID NO: 3234356 - DNA, 25 bp, Homo sapien
tgttgtataggttggagcatctgtc

SEQ ID NO: 3234357 - DNA, 25 bp, Homo sapien
tgccttcagccatactaagtatttt

SEQ ID NO: 3234358 - DNA, 25 bp, Homo sapien
taggttggagcatctgtcactttga

SEQ ID NO: 3234359 - DNA, 25 bp, Homo sapien
attgctactcgatatccctcttttc

SEQ ID NO: 3234360 - DNA, 25 bp, Homo sapien
cattgctactcgatatccctctttt

SEQ ID NO: 3234361 - DNA, 25 bp, Homo sapien
aactcgttttttggatggctcttct

SEQ ID NO: 3234362 - DNA, 25 bp, Homo sapien
actcgttttttggatggctcttcta

SEQ ID NO: 3234363 - DNA, 25 bp, Homo sapien
ctcgttttttggatggctcttctac

SEQ ID NO: 3234364 - DNA, 25 bp, Homo sapien
tcgttttttggatggctcttctacc

SEQ ID NO: 3234365 - DNA, 25 bp, Homo sapien
gatgcacgttctgtcttggcagagg

SEQ ID NO: 3234366 - DNA, 25 bp, Homo sapien
ttggctggaaacagatcgatctcca

SEQ ID NO: 3234367 - DNA, 25 bp, Homo sapien
gatggccgaccctatacacgttgaa

SEQ ID NO: 3234368 - DNA, 25 bp, Homo sapien
gagctattctgactggagatgccag

SEQ ID NO: 3234369 - DNA, 25 bp, Homo sapien
gaagctgtctctgaactaggtttgg

SEQ ID NO: 3234370 - DNA, 25 bp, Homo sapien
tcttgggagtcagtaaggatgtgcc

SEQ ID NO: 3234371 - DNA, 25 bp, Homo sapien
aacaagggcacctcgatctctgagc

SEQ ID NO: 3234372 - DNA, 25 bp, Homo sapien
aaccgtgtttatctggagcttctgc

SEQ ID NO: 3234373 - DNA, 25 bp, Homo sapien
aaccagagatccactggtctgggag

SEQ ID NO: 3234374 - DNA, 25 bp, Homo sapien
actgggacacacttgctaaggaagt

SEQ ID NO: 3234375 - DNA, 25 bp, Homo sapien
gagaactactcttagaagccaactg

SEQ ID NO: 3234376 - DNA, 25 bp, Homo sapien
aactgtgaggtgctagtctgagaac

SEQ ID NO: 3234377 - DNA, 25 bp, Homo sapien
gattcacattgggactaaagccacc

SEQ ID NO: 3234378 - DNA, 25 bp, Homo sapien
gccagtgcccaaatacacagacttg

SEQ ID NO: 3234379 - DNA, 25 bp, Homo sapien
tagctgcatttaggagctctccatg

SEQ ID NO: 3234380 - DNA, 25 bp, Homo sapien
tacaggcctcgattcttcatcaagg

SEQ ID NO: 3234381 - DNA, 25 bp, Homo sapien
gaaaacatggtagacaacttaatac

SEQ ID NO: 3234382 - DNA, 25 bp, Homo sapien
actgctactgtgtgaagagaactag

SEQ ID NO: 3234383 - DNA, 25 bp, Homo sapien
ttttaggactctaccgaactacaca

SEQ ID NO: 3234384 - DNA, 25 bp, Homo sapien
tactaatatgctgctaatgcatacc

SEQ ID NO: 3234385 - DNA, 25 bp, Homo sapien
gactttcaaacattcaaatactgtg

SEQ ID NO: 3234386 - DNA, 25 bp, Homo sapien
gacacgttcaacattacgggcaaca

SEQ ID NO: 3234387 - DNA, 25 bp, Homo sapien
aatcaatctgttaatagtagtcaca

SEQ ID NO: 3234388 - DNA, 25 bp, Homo sapien
tcttcagcggtcaaagtcatggtga

SEQ ID NO: 3234389 - DNA, 25 bp, Homo sapien
tgtgtcccgcaatctataaaggcaa

SEQ ID NO: 3234390 - DNA, 25 bp, Homo sapien
aaggcaacccacttacagtatatgg

SEQ ID NO: 3234391 - DNA, 25 bp, Homo sapien
gctcaatgggcagtatctaaaaata

SEQ ID NO: 3234392 - DNA, 25 bp, Homo sapien
taatgacaagtcatgggaagcctat

SEQ ID NO: 3234393 - DNA, 25 bp, Homo sapien
aaaacattctcaataaccttcatag

SEQ ID NO: 3234394 - DNA, 25 bp, Homo sapien
accttcatagtaacttgaaacaagc

SEQ ID NO: 3234395 - DNA, 25 bp, Homo sapien
cattctcaataaccttcatagtaac

SEQ ID NO: 3234396 - DNA, 25 bp, Homo sapien
caataaccttcatagtaacttgaaa

SEQ ID NO: 3234397 - DNA, 25 bp, Homo sapien
tacctgtaggactgacctgattccc

SEQ ID NO: 3234398 - DNA, 25 bp, Homo sapien
cagtgacaggctccaagaatttagg

SEQ ID NO: 3234399 - DNA, 25 bp, Homo sapien
tgatgtctcaggaaatcgtctcccc

SEQ ID NO: 3234400 - DNA, 25 bp, Homo sapien
tatcctagccaatgacagcagtgac

SEQ ID NO: 3234401 - DNA, 25 bp, Homo sapien
taatcccttaaacccgatctgagtc

SEQ ID NO: 3234402 - DNA, 25 bp, Homo sapien
tctgctcatagtccaaggaggtagc

SEQ ID NO: 3234403 - DNA, 25 bp, Homo sapien
gtaaactggcagcttcgacccacat

SEQ ID NO: 3234404 - DNA, 25 bp, Homo sapien
ggctgtttacactaagcctcctagt

SEQ ID NO: 3234405 - DNA, 25 bp, Homo sapien
caagaacttattggaggtctcaacg

SEQ ID NO: 3234406 - DNA, 25 bp, Homo sapien
ggaacttgctaggagaaagaccttg

SEQ ID NO: 3234407 - DNA, 25 bp, Homo sapien
tcatgaccatcttcgtacagcgtgg

SEQ ID NO: 3234408 - DNA, 25 bp, Homo sapien
gagtttctgagggaaatctcctgac

SEQ ID NO: 3234409 - DNA, 25 bp, Homo sapien
tgatggcagcttggagaccagtaga

SEQ ID NO: 3234410 - DNA, 25 bp, Homo sapien
atccgttgtgggagggcaccagcat

SEQ ID NO: 3234411 - DNA, 25 bp, Homo sapien
tgcccatattggcagcattggcagc

SEQ ID NO: 3234412 - DNA, 25 bp, Homo sapien
tagaatgaaaaccacaggaaccagg

SEQ ID NO: 3234413 - DNA, 25 bp, Homo sapien
agactgtccgctgtatacctcaggg

SEQ ID NO: 3234414 - DNA, 25 bp, Homo sapien
aatgtgagactgtccgctgtatacc

SEQ ID NO: 3234415 - DNA, 25 bp, Homo sapien
tgtcattgttggctcataatgtggc

SEQ ID NO: 3234416 - DNA, 25 bp, Homo sapien
taatgtggcccatagggtctacgaa

SEQ ID NO: 3234417 - DNA, 25 bp, Homo sapien
tttgatccacttttatgctttcgac

SEQ ID NO: 3234418 - DNA, 25 bp, Homo sapien
tcaattctatgctgactttactgct

SEQ ID NO: 3234419 - DNA, 25 bp, Homo sapien
tgtgcttcttccgatctcgttttca

SEQ ID NO: 3234420 - DNA, 25 bp, Homo sapien
cgactctgctcctgtgtcgtcagca

SEQ ID NO: 3234421 - DNA, 25 bp, Homo sapien
catgtataccgtggtggtcccataa

SEQ ID NO: 3234422 - DNA, 25 bp, Homo sapien
gaactgccggtcatctaaaagtata

SEQ ID NO: 3234423 - DNA, 25 bp, Homo sapien
tactcctgctttgcggtgtctcacg

SEQ ID NO: 3234424 - DNA, 25 bp, Homo sapien
tagcacatacaatcatgcacagcac

SEQ ID NO: 3234425 - DNA, 25 bp, Homo sapien
caatgttttctgcatgcagatttta

SEQ ID NO: 3234426 - DNA, 25 bp, Homo sapien
tatctagtatacaaatcctcttggt

SEQ ID NO: 3234427 - DNA, 25 bp, Homo sapien
ggtatttttcttgggatcatgttaa

SEQ ID NO: 3234428 - DNA, 25 bp, Homo sapien
ccttcttgtcccttagtatttcaat

SEQ ID NO: 3234429 - DNA, 25 bp, Homo sapien
cgtgcagcttcttgaaacgctcgga

SEQ ID NO: 3234430 - DNA, 25 bp, Homo sapien
agcttcttgaaacgctcggaggagg

SEQ ID NO: 3234431 - DNA, 25 bp, Homo sapien
cagcttcttgaaacgctcggaggag

SEQ ID NO: 3234432 - DNA, 25 bp, Homo sapien
tgcagcttcttgaaacgctcggagg

SEQ ID NO: 3234433 - DNA, 25 bp, Homo sapien
gatcgacttattctcttcggtcccc

SEQ ID NO: 3234434 - DNA, 25 bp, Homo sapien
agacgtcatggtgttatggaaagac

SEQ ID NO: 3234435 - DNA, 25 bp, Homo sapien
cgtcatggtgttatggaaagacagg

SEQ ID NO: 3234436 - DNA, 25 bp, Homo sapien
tcaaaatccctgatcgacttattct

SEQ ID NO: 3234437 - DNA, 25 bp, Homo sapien
gtgcttctcacctcccgatggagtt

SEQ ID NO: 3234438 - DNA, 25 bp, Homo sapien
gaaaacagcagcttgttggttgtca

SEQ ID NO: 3234439 - DNA, 25 bp, Homo sapien
aaacagcagcttgttggttgtcact

SEQ ID NO: 3234440 - DNA, 25 bp, Homo sapien
ctccagtaagatgatgatggaaaac

SEQ ID NO: 3234441 - DNA, 25 bp, Homo sapien
gcttgttggttgtcacttttctgga

SEQ ID NO: 3234442 - DNA, 25 bp, Homo sapien
gttgcgaaagaatctgtagtaaacc

SEQ ID NO: 3234443 - DNA, 25 bp, Homo sapien
tcaatggttgcgaaagaatctgtag

SEQ ID NO: 3234444 - DNA, 25 bp, Homo sapien
aagaatctgtagtaaaccaggcctc

SEQ ID NO: 3234445 - DNA, 25 bp, Homo sapien
aatctgtagtaaaccaggcctccca

SEQ ID NO: 3234446 - DNA, 25 bp, Homo sapien
caaggtgaaagttctggtccacaaa

SEQ ID NO: 3234447 - DNA, 25 bp, Homo sapien
tcagcagcaatatgcttattccatc

SEQ ID NO: 3234448 - DNA, 25 bp, Homo sapien
atccctaacctcatgcattcacaag

SEQ ID NO: 3234449 - DNA, 25 bp, Homo sapien
cctcatgcattcacaaggtgaaagt

SEQ ID NO: 3234450 - DNA, 25 bp, Homo sapien
ccacccgtctcgacttcccaaaatg

SEQ ID NO: 3234451 - DNA, 25 bp, Homo sapien
gatccacccgtctcgacttcccaaa

SEQ ID NO: 3234452 - DNA, 25 bp, Homo sapien
cgtctcgacttcccaaaatgctaga

SEQ ID NO: 3234453 - DNA, 25 bp, Homo sapien
cccgtctcgacttcccaaaatgcta

SEQ ID NO: 3234454 - DNA, 25 bp, Homo sapien
ccagttacggatttcagctgtggga

SEQ ID NO: 3234455 - DNA, 25 bp, Homo sapien
taatggccagatagctcctgtcaga

SEQ ID NO: 3234456 - DNA, 25 bp, Homo sapien
acatgtgcagggcagactctaagca

SEQ ID NO: 3234457 - DNA, 25 bp, Homo sapien
tggttaagctgctcgtgtccaaagc

SEQ ID NO: 3234458 - DNA, 25 bp, Homo sapien
gtgttctttatgttagtgatgatga

SEQ ID NO: 3234459 - DNA, 25 bp, Homo sapien
ttgttgtatacacctggagcattgg

SEQ ID NO: 3234460 - DNA, 25 bp, Homo sapien
tctccaggggaaccatctttgacct

SEQ ID NO: 3234461 - DNA, 25 bp, Homo sapien
caacccctggattgcaatccttgga

SEQ ID NO: 3234462 - DNA, 25 bp, Homo sapien
catctagggttttggcttgggccac

SEQ ID NO: 3234463 - DNA, 25 bp, Homo sapien
gaaaatccaggaggtaacgcaggtg

SEQ ID NO: 3234464 - DNA, 25 bp, Homo sapien
aactttgagctctatccttcttagg

SEQ ID NO: 3234465 - DNA, 25 bp, Homo sapien
tagatcagggcgtctttaagagcta

SEQ ID NO: 3234466 - DNA, 25 bp, Homo sapien
ccagtaagaggcagttaattccctg

SEQ ID NO: 3234467 - DNA, 25 bp, Homo sapien
gttggttaaagctggtgtggaactc

SEQ ID NO: 3234468 - DNA, 25 bp, Homo sapien
tgtttaattcagtgaagcagagagc

SEQ ID NO: 3234469 - DNA, 25 bp, Homo sapien
taacaggatccagcaaatcccatgc

SEQ ID NO: 3234470 - DNA, 25 bp, Homo sapien
gtccgagtgcggctcctcgcgagcc

SEQ ID NO: 3234471 - DNA, 25 bp, Homo sapien
ttttccccatcaggcggtccgagtg

SEQ ID NO: 3234472 - DNA, 25 bp, Homo sapien
agtgcggctcctcgcgagcctgcaa

SEQ ID NO: 3234473 - DNA, 25 bp, Homo sapien
tcctcgcgagcctgcaaaggagcag

SEQ ID NO: 3234474 - DNA, 25 bp, Homo sapien
ccttcgtgccgtcctccccgctggg

SEQ ID NO: 3234475 - DNA, 25 bp, Homo sapien
tcgtgccgtcctccccgctgggagg

SEQ ID NO: 3234476 - DNA, 25 bp, Homo sapien
aggcggctcggtccttcgtgccgtc

SEQ ID NO: 3234477 - DNA, 25 bp, Homo sapien
gaggcggctcggtccttcgtgccgt

SEQ ID NO: 3234478 - DNA, 25 bp, Homo sapien
cagtctctgcgcctcgcgtctgaat

SEQ ID NO: 3234479 - DNA, 25 bp, Homo sapien
gggagccagtctctgcgcctcgcgt

SEQ ID NO: 3234480 - DNA, 25 bp, Homo sapien
gagccagtctctgcgcctcgcgtct

SEQ ID NO: 3234481 - DNA, 25 bp, Homo sapien
tctgcgcctcgcgtctgaatgggac

SEQ ID NO: 3234482 - DNA, 25 bp, Homo sapien
tccccagatgctacgagtgccgtct

SEQ ID NO: 3234483 - DNA, 25 bp, Homo sapien
gtgcctcacggagagcctcccgcta

SEQ ID NO: 3234484 - DNA, 25 bp, Homo sapien
gcagccgctcgagagggcacggccg

SEQ ID NO: 3234485 - DNA, 25 bp, Homo sapien
ggtcccgggcgctgacacttcctgt

SEQ ID NO: 3234486 - DNA, 25 bp, Homo sapien
caaggtagtcctgcacgtagcaggt

SEQ ID NO: 3234487 - DNA, 25 bp, Homo sapien
gacacgttcctctgcatgtcgtggg

SEQ ID NO: 3234488 - DNA, 25 bp, Homo sapien
tgttgtccagctctcgcagcacaga

SEQ ID NO: 3234489 - DNA, 25 bp, Homo sapien
gcggccgacgagtacagttgctgct

SEQ ID NO: 3234490 - DNA, 25 bp, Homo sapien
ggcgggccagcgcctgaacaaatgc

SEQ ID NO: 3234491 - DNA, 25 bp, Homo sapien
aaaatggctgattcccctcagcggc

SEQ ID NO: 3234492 - DNA, 25 bp, Homo sapien
cagagaagtactcgcccaccgcggg

SEQ ID NO: 3234493 - DNA, 25 bp, Homo sapien
tcggcagaccctcggtgcgctcggg

SEQ ID NO: 3234494 - DNA, 25 bp, Homo sapien
gctgcaaaccccgattcggactccg

SEQ ID NO: 3234495 - DNA, 25 bp, Homo sapien
ttcggactccgctggggccgaacca

SEQ ID NO: 3234496 - DNA, 25 bp, Homo sapien
ggttggaaacatcaccgcaaaacat

SEQ ID NO: 3234497 - DNA, 25 bp, Homo sapien
agccagctcgccaccgcccctctcg

SEQ ID NO: 3234498 - DNA, 25 bp, Homo sapien
caggatccgcgacggtccgagctgc

SEQ ID NO: 3234499 - DNA, 25 bp, Homo sapien
ccaggatccgcgacggtccgagctg

SEQ ID NO: 3234500 - DNA, 25 bp, Homo sapien
ccggaagtgacacatgtcccggaac

SEQ ID NO: 3234501 - DNA, 25 bp, Homo sapien
agtcaaccaacccacttcctcctga

SEQ ID NO: 3234502 - DNA, 25 bp, Homo sapien
caggcggttgcccagtcaaccaacc

SEQ ID NO: 3234503 - DNA, 25 bp, Homo sapien
ccaggcggttgcccagtcaaccaac

SEQ ID NO: 3234504 - DNA, 25 bp, Homo sapien
tgtaaggaaggtcgattctgtcccg

SEQ ID NO: 3234505 - DNA, 25 bp, Homo sapien
ggcaaagggtggtttcgcctccaca

SEQ ID NO: 3234506 - DNA, 25 bp, Homo sapien
tcctagtagcaccaccgatagtagg

SEQ ID NO: 3234507 - DNA, 25 bp, Homo sapien
tcaaggtctgttcctcgattcaagg

SEQ ID NO: 3234508 - DNA, 25 bp, Homo sapien
ccatctttgctttatctgaggctcg

SEQ ID NO: 3234509 - DNA, 25 bp, Homo sapien
tctttaggtggctgatcatcacagt

SEQ ID NO: 3234510 - DNA, 25 bp, Homo sapien
taagacacttggttgcataagcagt

SEQ ID NO: 3234511 - DNA, 25 bp, Homo sapien
tgcaaactcaacaggtgaagcttcc

SEQ ID NO: 3234512 - DNA, 25 bp, Homo sapien
taggtaagtgaaacacatgaaaagt

SEQ ID NO: 3234513 - DNA, 25 bp, Homo sapien
taagtgaaacacatgaaaagtgaaa

SEQ ID NO: 3234514 - DNA, 25 bp, Homo sapien
ttggtttataggtaagtgaaacaca

SEQ ID NO: 3234515 - DNA, 25 bp, Homo sapien
gtttataggtaagtgaaacacatga

SEQ ID NO: 3234516 - DNA, 25 bp, Homo sapien
ttttctcattatctcccctgcactt

SEQ ID NO: 3234517 - DNA, 25 bp, Homo sapien
ttctcattatctcccctgcactttg

SEQ ID NO: 3234518 - DNA, 25 bp, Homo sapien
tgttttctcattatctcccctgcac

SEQ ID NO: 3234519 - DNA, 25 bp, Homo sapien
tctcattatctcccctgcactttgg

SEQ ID NO: 3234520 - DNA, 25 bp, Homo sapien
tttctgaaagcaaacgaattatata

SEQ ID NO: 3234521 - DNA, 25 bp, Homo sapien
tagtcttatgcatttaccctaaaac

SEQ ID NO: 3234522 - DNA, 25 bp, Homo sapien
tgaaagcaaacgaattatataaaag

SEQ ID NO: 3234523 - DNA, 25 bp, Homo sapien
tattgcatagtcttatgcatttacc

SEQ ID NO: 3234524 - DNA, 25 bp, Homo sapien
tgaatgacctgacacccagacaagg

SEQ ID NO: 3234525 - DNA, 25 bp, Homo sapien
taagcaaaagacagcagcacgtact

SEQ ID NO: 3234526 - DNA, 25 bp, Homo sapien
tgacaaatgggctactgacagtgga

SEQ ID NO: 3234527 - DNA, 25 bp, Homo sapien
aataggactagggaaaaagcagctc

SEQ ID NO: 3234528 - DNA, 25 bp, Homo sapien
tcaagtctaatccaaactttggcat

SEQ ID NO: 3234529 - DNA, 25 bp, Homo sapien
caaactttggcatttctattaggaa

SEQ ID NO: 3234530 - DNA, 25 bp, Homo sapien
tcgttttcccgtcaagtctaatcca

SEQ ID NO: 3234531 - DNA, 25 bp, Homo sapien
catttctattaggaagtcgtttctt

SEQ ID NO: 3234532 - DNA, 25 bp, Homo sapien
aaatttgctccttccatttcaggag

SEQ ID NO: 3234533 - DNA, 25 bp, Homo sapien
aaaatttgctccttccatttcagga

SEQ ID NO: 3234534 - DNA, 25 bp, Homo sapien
aatttgctccttccatttcaggagg

SEQ ID NO: 3234535 - DNA, 25 bp, Homo sapien
gtaagtactcaagaaaagtctcaaa

SEQ ID NO: 3234536 - DNA, 25 bp, Homo sapien
gatcacatcatgcagaaagactcaa

SEQ ID NO: 3234537 - DNA, 25 bp, Homo sapien
tcactggccatactgcatagctagt

SEQ ID NO: 3234538 - DNA, 25 bp, Homo sapien
gactcaatttggtgtttacgtgtct

SEQ ID NO: 3234539 - DNA, 25 bp, Homo sapien
taatcccttgtatggcttcagcttt

SEQ ID NO: 3234540 - DNA, 25 bp, Homo sapien
aattctggatttgtatggataggcc

SEQ ID NO: 3234541 - DNA, 25 bp, Homo sapien
tcaatacccgtgatctctaataggt

SEQ ID NO: 3234542 - DNA, 25 bp, Homo sapien
gatctctaataggtctcgttctcca

SEQ ID NO: 3234543 - DNA, 25 bp, Homo sapien
tccatgggtctccacaaaccaagag

SEQ ID NO: 3234544 - DNA, 25 bp, Homo sapien
tcaagtatctgccaactttgagtct

SEQ ID NO: 3234545 - DNA, 25 bp, Homo sapien
atgggtctccacaaaccaagaggtt

SEQ ID NO: 3234546 - DNA, 25 bp, Homo sapien
caagtatctgccaactttgagtctc

SEQ ID NO: 3234547 - DNA, 25 bp, Homo sapien
ccatcagtgaattcagcacagcagc

SEQ ID NO: 3234548 - DNA, 25 bp, Homo sapien
cttgccagtgacagtattaggacca

SEQ ID NO: 3234549 - DNA, 25 bp, Homo sapien
tgatagctcatgctgtgcacaccat

SEQ ID NO: 3234550 - DNA, 25 bp, Homo sapien
ccttccggaggtgtgtagtctggct

SEQ ID NO: 3234551 - DNA, 25 bp, Homo sapien
gcagtctgatgtgcagctatctggt

SEQ ID NO: 3234552 - DNA, 25 bp, Homo sapien
tgaaacccggattcaagagagagct

SEQ ID NO: 3234553 - DNA, 25 bp, Homo sapien
ttgaattacagcttccacgtggaca

SEQ ID NO: 3234554 - DNA, 25 bp, Homo sapien
gctatctggtgagtgcttcttgaaa

SEQ ID NO: 3234555 - DNA, 25 bp, Homo sapien
catttctatagttggtgggtacacc

SEQ ID NO: 3234556 - DNA, 25 bp, Homo sapien
agtaacatatggctctaactgccca

SEQ ID NO: 3234557 - DNA, 25 bp, Homo sapien
tatttcttgatgagcatagattcag

SEQ ID NO: 3234558 - DNA, 25 bp, Homo sapien
cagagaaagggaagttatcatttga

SEQ ID NO: 3234559 - DNA, 25 bp, Homo sapien
ggattgcttgagcccgggaggcaga

SEQ ID NO: 3234560 - DNA, 25 bp, Homo sapien
ggttgcagtgagctgagatcatgcc

SEQ ID NO: 3234561 - DNA, 25 bp, Homo sapien
agctactcaggaagctaaggtggga

SEQ ID NO: 3234562 - DNA, 25 bp, Homo sapien
catggtggtgtgcacgtgtggtccc

SEQ ID NO: 3234563 - DNA, 25 bp, Homo sapien
cctgggctcaagcatccacctgcct

SEQ ID NO: 3234564 - DNA, 25 bp, Homo sapien
tggcatgatcacagcagcctctaac

SEQ ID NO: 3234565 - DNA, 25 bp, Homo sapien
tataggcgtgagccgctgtgtccag

SEQ ID NO: 3234566 - DNA, 25 bp, Homo sapien
taggcgtgagccgctgtgtccagcc

SEQ ID NO: 3234567 - DNA, 25 bp, Homo sapien
taaaatgtgccggtcatttccatct

SEQ ID NO: 3234568 - DNA, 25 bp, Homo sapien
cgaaatagtatagcagtttcttcac

SEQ ID NO: 3234569 - DNA, 25 bp, Homo sapien
ctgacgaagtttaggagagtcctaa

SEQ ID NO: 3234570 - DNA, 25 bp, Homo sapien
ctttctccaggtgttccattcgaaa

SEQ ID NO: 3234571 - DNA, 25 bp, Homo sapien
tcttatatacctgtatatctcctac

SEQ ID NO: 3234572 - DNA, 25 bp, Homo sapien
aagtaatttcccatgataggtctcc

SEQ ID NO: 3234573 - DNA, 25 bp, Homo sapien
gtaatttcccatgataggtctcctc

SEQ ID NO: 3234574 - DNA, 25 bp, Homo sapien
tttcccatgataggtctcctcttat

SEQ ID NO: 3234575 - DNA, 25 bp, Homo sapien
gcatgcactaaccattacagaggct

SEQ ID NO: 3234576 - DNA, 25 bp, Homo sapien
catcgttttctaagaggcatgcact

SEQ ID NO: 3234577 - DNA, 25 bp, Homo sapien
ttttctaagaggcatgcactaacca

SEQ ID NO: 3234578 - DNA, 25 bp, Homo sapien
cttgagcgacatcgttttctaagag

SEQ ID NO: 3234579 - DNA, 25 bp, Homo sapien
ctggaggtccaaccatctttcagga

SEQ ID NO: 3234580 - DNA, 25 bp, Homo sapien
gaggtccaaccatctttcaggaacc

SEQ ID NO: 3234581 - DNA, 25 bp, Homo sapien
caggaacctccattttctgggcaaa

SEQ ID NO: 3234582 - DNA, 25 bp, Homo sapien
caaccatctttcaggaacctccatt

SEQ ID NO: 3234583 - DNA, 25 bp, Homo sapien
gggctccttttgcatctacaccagt

SEQ ID NO: 3234584 - DNA, 25 bp, Homo sapien
tcctcctctgtttgggctccttttg

SEQ ID NO: 3234585 - DNA, 25 bp, Homo sapien
gctccttttgcatctacaccagtcc

SEQ ID NO: 3234586 - DNA, 25 bp, Homo sapien
tttgggctccttttgcatctacacc

SEQ ID NO: 3234587 - DNA, 25 bp, Homo sapien
tgcaatgcagaaggtggcagtgcat

SEQ ID NO: 3234588 - DNA, 25 bp, Homo sapien
ctgcaatgcagaaggtggcagtgca

SEQ ID NO: 3234589 - DNA, 25 bp, Homo sapien
tatcagcattctgtgtcagtgcatg

SEQ ID NO: 3234590 - DNA, 25 bp, Homo sapien
atcagcattctgtgtcagtgcatgg

SEQ ID NO: 3234591 - DNA, 25 bp, Homo sapien
gagttatcagcattctgtgtcagtg

SEQ ID NO: 3234592 - DNA, 25 bp, Homo sapien
gttatcagcattctgtgtcagtgca

SEQ ID NO: 3234593 - DNA, 25 bp, Homo sapien
tgaaaaccagacacatcacctttcc

SEQ ID NO: 3234594 - DNA, 25 bp, Homo sapien
caacgcacaaggatttgaaaaccag

SEQ ID NO: 3234595 - DNA, 25 bp, Homo sapien
tcatcaatgcttccaacgcacaagg

SEQ ID NO: 3234596 - DNA, 25 bp, Homo sapien
tgcttccaacgcacaaggatttgaa

SEQ ID NO: 3234597 - DNA, 25 bp, Homo sapien
tagaaacgatggcttcccctagaaa

SEQ ID NO: 3234598 - DNA, 25 bp, Homo sapien
agctgtgatgctgacgtccctgaga

SEQ ID NO: 3234599 - DNA, 25 bp, Homo sapien
tgtgtgaaaacgacccctgtacttg

SEQ ID NO: 3234600 - DNA, 25 bp, Homo sapien
taggaccggcctacatgggaagaga

SEQ ID NO: 3234601 - DNA, 25 bp, Homo sapien
tcttttgcttaattactgaaccgta

SEQ ID NO: 3234602 - DNA, 25 bp, Homo sapien
aatttttgaaagatgaactgcttcc

SEQ ID NO: 3234603 - DNA, 25 bp, Homo sapien
ttctcttgcatataccaggatggga

SEQ ID NO: 3234604 - DNA, 25 bp, Homo sapien
gatgtttgatcatgagtgctttgag

SEQ ID NO: 3234605 - DNA, 25 bp, Homo sapien
gccgccagccgggagaagacgaggg

SEQ ID NO: 3234606 - DNA, 25 bp, Homo sapien
acagccagttccaacaggcgagact

SEQ ID NO: 3234607 - DNA, 25 bp, Homo sapien
gggatgtcacagaacgccgtggccc

SEQ ID NO: 3234608 - DNA, 25 bp, Homo sapien
tccaacaggcgagacttccctgtac

SEQ ID NO: 3234609 - DNA, 25 bp, Homo sapien
gtagagaaataaccttgcagtccct

SEQ ID NO: 3234610 - DNA, 25 bp, Homo sapien
tcagggtgttaggacacaaggctgc

SEQ ID NO: 3234611 - DNA, 25 bp, Homo sapien
caatccaacgtaggagaaacaccgt

SEQ ID NO: 3234612 - DNA, 25 bp, Homo sapien
tgggattcagagatgttcaactaca

SEQ ID NO: 3234613 - DNA, 25 bp, Homo sapien
tttgggatactcatggtcacctggg

SEQ ID NO: 3234614 - DNA, 25 bp, Homo sapien
ttagagtaacaaaggccataggccg

SEQ ID NO: 3234615 - DNA, 25 bp, Homo sapien
taggccggcaacataattccacagg

SEQ ID NO: 3234616 - DNA, 25 bp, Homo sapien
aaattggtactcgatcagctctccg

SEQ ID NO: 3234617 - DNA, 25 bp, Homo sapien
cagggctggcaccagattcagatgc

SEQ ID NO: 3234618 - DNA, 25 bp, Homo sapien
tggtggcgcactcagactgcttttc

SEQ ID NO: 3234619 - DNA, 25 bp, Homo sapien
cagtctttaagatccctttaggaat

SEQ ID NO: 3234620 - DNA, 25 bp, Homo sapien
cagtccagttcatagaacacaacca

SEQ ID NO: 3234621 - DNA, 25 bp, Homo sapien
gaaccactgcaacttttgtgtttct

SEQ ID NO: 3234622 - DNA, 25 bp, Homo sapien
tcagaaccactgcaacttttgtgtt

SEQ ID NO: 3234623 - DNA, 25 bp, Homo sapien
ctgaatcagaaccactgcaactttt

SEQ ID NO: 3234624 - DNA, 25 bp, Homo sapien
tgtgtttcttccttgtaaactttgc

SEQ ID NO: 3234625 - DNA, 25 bp, Homo sapien
cttataatataacccacaaggtggt

SEQ ID NO: 3234626 - DNA, 25 bp, Homo sapien
tataacccacaaggtggtcagtgtg

SEQ ID NO: 3234627 - DNA, 25 bp, Homo sapien
ctgagagttcacatgcattgcataa

SEQ ID NO: 3234628 - DNA, 25 bp, Homo sapien
tgtgcggcagtacaaacaaagactt

SEQ ID NO: 3234629 - DNA, 25 bp, Homo sapien
agcacattcgcccctactattttat

SEQ ID NO: 3234630 - DNA, 25 bp, Homo sapien
tctaaaagcacattcgcccctacta

SEQ ID NO: 3234631 - DNA, 25 bp, Homo sapien
taaaagcacattcgcccctactatt

SEQ ID NO: 3234632 - DNA, 25 bp, Homo sapien
aaagcacattcgcccctactatttt

SEQ ID NO: 3234633 - DNA, 25 bp, Homo sapien
cagtgtagtaataagtctgtgcatg

SEQ ID NO: 3234634 - DNA, 25 bp, Homo sapien
agtgtagtaataagtctgtgcatgt

SEQ ID NO: 3234635 - DNA, 25 bp, Homo sapien
gtgtagtaataagtctgtgcatgtt

SEQ ID NO: 3234636 - DNA, 25 bp, Homo sapien
ataataatccgctccagaatgcttc

SEQ ID NO: 3234637 - DNA, 25 bp, Homo sapien
gaattattcccacaaataaaggcac

SEQ ID NO: 3234638 - DNA, 25 bp, Homo sapien
taaaggcacaattaagaaggctata

SEQ ID NO: 3234639 - DNA, 25 bp, Homo sapien
aagtattaagaacatgtaataatca

SEQ ID NO: 3234640 - DNA, 25 bp, Homo sapien
ttcagcgcattttgtgtatcttgtt

SEQ ID NO: 3234641 - DNA, 25 bp, Homo sapien
gcgcattttgtgtatcttgtttcaa

SEQ ID NO: 3234642 - DNA, 25 bp, Homo sapien
gtatcttgtttcaactcactgaaga

SEQ ID NO: 3234643 - DNA, 25 bp, Homo sapien
tatcttgtttcaactcactgaagaa

SEQ ID NO: 3234644 - DNA, 25 bp, Homo sapien
tgggctctcaattcgtgtacaagat

SEQ ID NO: 3234645 - DNA, 25 bp, Homo sapien
cttgtagtttataaatcctgccata

SEQ ID NO: 3234646 - DNA, 25 bp, Homo sapien
cagaatattagtttcatgggctctc

SEQ ID NO: 3234647 - DNA, 25 bp, Homo sapien
cctgccatagtcttaatttccagaa

SEQ ID NO: 3234648 - DNA, 25 bp, Homo sapien
tgagcaattgcatccaatggggtgt

SEQ ID NO: 3234649 - DNA, 25 bp, Homo sapien
tcgatgtgttttcggaactgagcaa

SEQ ID NO: 3234650 - DNA, 25 bp, Homo sapien
tccaatggggtgttgtgttgaaaac

SEQ ID NO: 3234651 - DNA, 25 bp, Homo sapien
tctttttcttacacaagtcgatgtg

SEQ ID NO: 3234652 - DNA, 25 bp, Homo sapien
tctgagtttgaatagctgttaaccc

SEQ ID NO: 3234653 - DNA, 25 bp, Homo sapien
gagggtttttgcaagctgtttccgc

SEQ ID NO: 3234654 - DNA, 25 bp, Homo sapien
aatagcttcatcaaataaatctcca

SEQ ID NO: 3234655 - DNA, 25 bp, Homo sapien
tcctgggcatagtatgctgcctgct

SEQ ID NO: 3234656 - DNA, 25 bp, Homo sapien
tgccaaaaattagttcttcaaagaa

SEQ ID NO: 3234657 - DNA, 25 bp, Homo sapien
taatagtttatggaactcatcgcaa

SEQ ID NO: 3234658 - DNA, 25 bp, Homo sapien
caaatcaactcttgcccaacctttg

SEQ ID NO: 3234659 - DNA, 25 bp, Homo sapien
taggtagtctcataaaaatcaatct

SEQ ID NO: 3234660 - DNA, 25 bp, Homo sapien
tgcccaacctttgactgaacaaaaa

SEQ ID NO: 3234661 - DNA, 25 bp, Homo sapien
cctgtttgtgtttctaagggatcag

SEQ ID NO: 3234662 - DNA, 25 bp, Homo sapien
taaaagtcaagaacgcctgtttgtg

SEQ ID NO: 3234663 - DNA, 25 bp, Homo sapien
tagtattccttgtcgccatgatctt

SEQ ID NO: 3234664 - DNA, 25 bp, Homo sapien
gatcaggattgggatacattacaga

SEQ ID NO: 3234665 - DNA, 25 bp, Homo sapien
tatgcatgtgcagccaatggaaaat

SEQ ID NO: 3234666 - DNA, 25 bp, Homo sapien
tcacaacagcaactttaattataag

SEQ ID NO: 3234667 - DNA, 25 bp, Homo sapien
tataagtcactctaagatgcagtga

SEQ ID NO: 3234668 - DNA, 25 bp, Homo sapien
ctattgttgccttttgaggttgaga

SEQ ID NO: 3234669 - DNA, 25 bp, Homo sapien
aatataaatcttcatatgaacgttg

SEQ ID NO: 3234670 - DNA, 25 bp, Homo sapien
tgtgtacactccttgaaacctttat

SEQ ID NO: 3234671 - DNA, 25 bp, Homo sapien
cgttgtatgtgtacactccttgaaa

SEQ ID NO: 3234672 - DNA, 25 bp, Homo sapien
tcatatgaacgttgtatgtgtacac

SEQ ID NO: 3234673 - DNA, 25 bp, Homo sapien
ctgcgtaagatgagacacaactcat

SEQ ID NO: 3234674 - DNA, 25 bp, Homo sapien
agctgaatggcaagaattcccacct

SEQ ID NO: 3234675 - DNA, 25 bp, Homo sapien
ctttttcaggatcagaaagatcaaa

SEQ ID NO: 3234676 - DNA, 25 bp, Homo sapien
tccttcagctgaatggcaagaattc

SEQ ID NO: 3234677 - DNA, 25 bp, Homo sapien
gaatggcaagaattcccaccttttc

SEQ ID NO: 3234678 - DNA, 25 bp, Homo sapien
ttcattcgcgggcacttatacttct

SEQ ID NO: 3234679 - DNA, 25 bp, Homo sapien
tatacttcttgaactgtgcaacagc

SEQ ID NO: 3234680 - DNA, 25 bp, Homo sapien
tgctcagaagagttatgattatctc

SEQ ID NO: 3234681 - DNA, 25 bp, Homo sapien
tgtgcaacagcattgctcagaagag

SEQ ID NO: 3234682 - DNA, 25 bp, Homo sapien
aagttgcatgcaatggtgacgtttg

SEQ ID NO: 3234683 - DNA, 25 bp, Homo sapien
agtcattcaaagttgcatgcaatgg

SEQ ID NO: 3234684 - DNA, 25 bp, Homo sapien
agatttatgtatgtaacttaaagtc

SEQ ID NO: 3234685 - DNA, 25 bp, Homo sapien
catgcaatggtgacgtttgtggata

SEQ ID NO: 3234686 - DNA, 25 bp, Homo sapien
tttgcgtaataatattcctctccca

SEQ ID NO: 3234687 - DNA, 25 bp, Homo sapien
cctttgcgtaataatattcctctcc

SEQ ID NO: 3234688 - DNA, 25 bp, Homo sapien
tggtataatcctttgcgtaataata

SEQ ID NO: 3234689 - DNA, 25 bp, Homo sapien
taatcctttgcgtaataatattcct

SEQ ID NO: 3234690 - DNA, 25 bp, Homo sapien
agatggttgaacaggtattctcata

SEQ ID NO: 3234691 - DNA, 25 bp, Homo sapien
tgaaaatacgaactccttcaacact

SEQ ID NO: 3234692 - DNA, 25 bp, Homo sapien
cttcacaagaaagggttcgaagagt

SEQ ID NO: 3234693 - DNA, 25 bp, Homo sapien
taaaacactgaaaaagattgtgcca

SEQ ID NO: 3234694 - DNA, 25 bp, Homo sapien
gaagacaaaatgtaatactgaaccg

SEQ ID NO: 3234695 - DNA, 25 bp, Homo sapien
tcaaagaagacaaaatgtaatactg

SEQ ID NO: 3234696 - DNA, 25 bp, Homo sapien
aagacaaaatgtaatactgaaccgg

SEQ ID NO: 3234697 - DNA, 25 bp, Homo sapien
aagaagacaaaatgtaatactgaac

SEQ ID NO: 3234698 - DNA, 25 bp, Homo sapien
tcagagctgtagttaatacagaagt

SEQ ID NO: 3234699 - DNA, 25 bp, Homo sapien
tctaccaaggagttctagggagtaa

SEQ ID NO: 3234700 - DNA, 25 bp, Homo sapien
cagaagtgagcagagtccaccatcc

SEQ ID NO: 3234701 - DNA, 25 bp, Homo sapien
tttaattgggccatgaggtaggagc

SEQ ID NO: 3234702 - DNA, 25 bp, Homo sapien
cttttctatccgagacttctggtca

SEQ ID NO: 3234703 - DNA, 25 bp, Homo sapien
tctatccgagacttctggtcatctt

SEQ ID NO: 3234704 - DNA, 25 bp, Homo sapien
aggttcttttctatccgagacttct

SEQ ID NO: 3234705 - DNA, 25 bp, Homo sapien
cgagacttctggtcatctttcagag

SEQ ID NO: 3234706 - DNA, 25 bp, Homo sapien
cagccagagaaattcggtctgccca

SEQ ID NO: 3234707 - DNA, 25 bp, Homo sapien
gctaagatatcacagtcgggttctg

SEQ ID NO: 3234708 - DNA, 25 bp, Homo sapien
gtcgggttctggatcaggactttca

SEQ ID NO: 3234709 - DNA, 25 bp, Homo sapien
caaagtcctgtactcctattgtgaa

SEQ ID NO: 3234710 - DNA, 25 bp, Homo sapien
gagcttggaaaacctaatgggatgt

SEQ ID NO: 3234711 - DNA, 25 bp, Homo sapien
tattaaagctgacacagagcttgga

SEQ ID NO: 3234712 - DNA, 25 bp, Homo sapien
aggaacatcaacatgaaaacttggg

SEQ ID NO: 3234713 - DNA, 25 bp, Homo sapien
ggatgtggacaatcagccttcagat

SEQ ID NO: 3234714 - DNA, 25 bp, Homo sapien
ccaggaactaggcacatctttcctt

SEQ ID NO: 3234715 - DNA, 25 bp, Homo sapien
gaactaggcacatctttccttgagt

SEQ ID NO: 3234716 - DNA, 25 bp, Homo sapien
ctaggcacatctttccttgagtcag

SEQ ID NO: 3234717 - DNA, 25 bp, Homo sapien
ggaactaggcacatctttccttgag

SEQ ID NO: 3234718 - DNA, 25 bp, Homo sapien
cctgtaaggcttcttgggaggaagc

SEQ ID NO: 3234719 - DNA, 25 bp, Homo sapien
ccagagcaagatccactgaagtaat

SEQ ID NO: 3234720 - DNA, 25 bp, Homo sapien
taaaaccacacatcttcccgtctca

SEQ ID NO: 3234721 - DNA, 25 bp, Homo sapien
cgagctgcctgtaaggcttcttggg

SEQ ID NO: 3234722 - DNA, 25 bp, Homo sapien
tcccagtgaacttcattgtcaggta

SEQ ID NO: 3234723 - DNA, 25 bp, Homo sapien
caggtagcttaggtcgccttttgaa

SEQ ID NO: 3234724 - DNA, 25 bp, Homo sapien
tcattgtcaggtagcttaggtcgcc

SEQ ID NO: 3234725 - DNA, 25 bp, Homo sapien
gcctgaattataatgctgtcccagt

SEQ ID NO: 3234726 - DNA, 25 bp, Homo sapien
atacatttcattagtcagtgcaggg

SEQ ID NO: 3234727 - DNA, 25 bp, Homo sapien
cggtgagcttcacatctctgatttg

SEQ ID NO: 3234728 - DNA, 25 bp, Homo sapien
tcttttcatgggactgaacagtcac

SEQ ID NO: 3234729 - DNA, 25 bp, Homo sapien
ctggttttaagccagcggtgagctt

SEQ ID NO: 3234730 - DNA, 25 bp, Homo sapien
tctccaacaggaatgtcagtgagta

SEQ ID NO: 3234731 - DNA, 25 bp, Homo sapien
tcccctggatgtaagtctccaacag

SEQ ID NO: 3234732 - DNA, 25 bp, Homo sapien
taaagccgggtaggattcatcacac

SEQ ID NO: 3234733 - DNA, 25 bp, Homo sapien
tctgttccatgaagagtcacgtgag

SEQ ID NO: 3234734 - DNA, 25 bp, Homo sapien
agaaacattctggaacccactgttc

SEQ ID NO: 3234735 - DNA, 25 bp, Homo sapien
cttgtgacacttgcaaacaatttct

SEQ ID NO: 3234736 - DNA, 25 bp, Homo sapien
ttcttcaacggttgtatttatcagg

SEQ ID NO: 3234737 - DNA, 25 bp, Homo sapien
tccacagcgaacatacaacattttt

SEQ ID NO: 3234738 - DNA, 25 bp, Homo sapien
aatataaaaaatctgctgagtatgg

SEQ ID NO: 3234739 - DNA, 25 bp, Homo sapien
gccagacagagctgaattctaatcc

SEQ ID NO: 3234740 - DNA, 25 bp, Homo sapien
gtaatgccagacagagctgaattct

SEQ ID NO: 3234741 - DNA, 25 bp, Homo sapien
gatcatactggttaaaagctcaggc

SEQ ID NO: 3234742 - DNA, 25 bp, Homo sapien
agctagggtcttccttttgtctaag

SEQ ID NO: 3234743 - DNA, 25 bp, Homo sapien
tgtctaagttcctactacacctcaa

SEQ ID NO: 3234744 - DNA, 25 bp, Homo sapien
tatctctggatctaatgaagtgggc

SEQ ID NO: 3234745 - DNA, 25 bp, Homo sapien
tcagacgttccacaaagctagggtc

SEQ ID NO: 3234746 - DNA, 25 bp, Homo sapien
gaaacaaatttaaccgcaacatcaa

SEQ ID NO: 3234747 - DNA, 25 bp, Homo sapien
ggaaagactgtttcaattgttacag

SEQ ID NO: 3234748 - DNA, 25 bp, Homo sapien
caaatttaaccgcaacatcaaatgg

SEQ ID NO: 3234749 - DNA, 25 bp, Homo sapien
tttaaccgcaacatcaaatggaaag

SEQ ID NO: 3234750 - DNA, 25 bp, Homo sapien
gatgtcagcataaaccctttccagg

SEQ ID NO: 3234751 - DNA, 25 bp, Homo sapien
ccagggtgaggcacttaagaggtcc

SEQ ID NO: 3234752 - DNA, 25 bp, Homo sapien
aaacaatagtgagggcccagggtga

SEQ ID NO: 3234753 - DNA, 25 bp, Homo sapien
tgagactcgagctggtccactgtgg

SEQ ID NO: 3234754 - DNA, 25 bp, Homo sapien
aaagaacaagagaaccaacgtcagg

SEQ ID NO: 3234755 - DNA, 25 bp, Homo sapien
tgtggcagctgaagacttgtagaga

SEQ ID NO: 3234756 - DNA, 25 bp, Homo sapien
gtcaggatactggaaatgaccaaca

SEQ ID NO: 3234757 - DNA, 25 bp, Homo sapien
gagaaccaacgtcaggatactggaa

SEQ ID NO: 3234758 - DNA, 25 bp, Homo sapien
catgacacgcaaaggttattctaaa

SEQ ID NO: 3234759 - DNA, 25 bp, Homo sapien
tgtaatctcacttacggaggccaag

SEQ ID NO: 3234760 - DNA, 25 bp, Homo sapien
ccaatgaggcatctgtatatctgca

SEQ ID NO: 3234761 - DNA, 25 bp, Homo sapien
tatatctgcaagaaagtcctatgga

SEQ ID NO: 3234762 - DNA, 25 bp, Homo sapien
agcactctctccagtctgtaagata

SEQ ID NO: 3234763 - DNA, 25 bp, Homo sapien
gcactctctccagtctgtaagataa

SEQ ID NO: 3234764 - DNA, 25 bp, Homo sapien
attcactagcactctctccagtctg

SEQ ID NO: 3234765 - DNA, 25 bp, Homo sapien
cactagcactctctccagtctgtaa

SEQ ID NO: 3234766 - DNA, 25 bp, Homo sapien
agagatgggcattgaagacaaaagc

SEQ ID NO: 3234767 - DNA, 25 bp, Homo sapien
ttccaagagatgggcattgaagaca

SEQ ID NO: 3234768 - DNA, 25 bp, Homo sapien
ccaagagatgggcattgaagacaaa

SEQ ID NO: 3234769 - DNA, 25 bp, Homo sapien
atgcccggttgctactccaccttca

SEQ ID NO: 3234770 - DNA, 25 bp, Homo sapien
ttagcagagacgaggttctgccatg

SEQ ID NO: 3234771 - DNA, 25 bp, Homo sapien
gattacaggcgcgtgaagccacgcc

SEQ ID NO: 3234772 - DNA, 25 bp, Homo sapien
tgggctgcaatggtgcaaccttggc

SEQ ID NO: 3234773 - DNA, 25 bp, Homo sapien
acaggcgcgtgaagccacgcccagc

SEQ ID NO: 3234774 - DNA, 25 bp, Homo sapien
tattctccacaatcacgtgcggcag

SEQ ID NO: 3234775 - DNA, 25 bp, Homo sapien
gagagggatattctccacaatcacg

SEQ ID NO: 3234776 - DNA, 25 bp, Homo sapien
cacgtgcggcagagtgatgacagtt

SEQ ID NO: 3234777 - DNA, 25 bp, Homo sapien
ttcacatggagagggatattctcca

SEQ ID NO: 3234778 - DNA, 25 bp, Homo sapien
caccagtcccatttacatgtatgct

SEQ ID NO: 3234779 - DNA, 25 bp, Homo sapien
agtcccatttacatgtatgctgttg

SEQ ID NO: 3234780 - DNA, 25 bp, Homo sapien
catttacatgtatgctgttgaagtg

SEQ ID NO: 3234781 - DNA, 25 bp, Homo sapien
catccttgcatagggccgtgctcat

SEQ ID NO: 3234782 - DNA, 25 bp, Homo sapien
tctgacacgcccaaatgacggcaga

SEQ ID NO: 3234783 - DNA, 25 bp, Homo sapien
tctacatcttgaactaagtcggtct

SEQ ID NO: 3234784 - DNA, 25 bp, Homo sapien
tacttgacaggtaacgactctctga

SEQ ID NO: 3234785 - DNA, 25 bp, Homo sapien
taagtcggtcttattctgtaggtga

SEQ ID NO: 3234786 - DNA, 25 bp, Homo sapien
aacataagcatcacaagatatgacc

SEQ ID NO: 3234787 - DNA, 25 bp, Homo sapien
tttgtgtcaacataagcatcacaag

SEQ ID NO: 3234788 - DNA, 25 bp, Homo sapien
tgtcaacataagcatcacaagatat

SEQ ID NO: 3234789 - DNA, 25 bp, Homo sapien
aagcatcacaagatatgacctgtac

SEQ ID NO: 3234790 - DNA, 25 bp, Homo sapien
ctaaaggtacagctctccgtttcct

SEQ ID NO: 3234791 - DNA, 25 bp, Homo sapien
gtacagctctccgtttcctggcaca

SEQ ID NO: 3234792 - DNA, 25 bp, Homo sapien
tcattcataaaaactaaaggtacag

SEQ ID NO: 3234793 - DNA, 25 bp, Homo sapien
cataaaaactaaaggtacagctctc

SEQ ID NO: 3234794 - DNA, 25 bp, Homo sapien
cagctgtacttaaggtgcttaaaaa

SEQ ID NO: 3234795 - DNA, 25 bp, Homo sapien
aggcagctgtacttaaggtgcttaa

SEQ ID NO: 3234796 - DNA, 25 bp, Homo sapien
caaaacaacagggaccacagtcagc

SEQ ID NO: 3234797 - DNA, 25 bp, Homo sapien
aaacaacagggaccacagtcagctt

SEQ ID NO: 3234798 - DNA, 25 bp, Homo sapien
aatctaagcaagttgatgttgagag

SEQ ID NO: 3234799 - DNA, 25 bp, Homo sapien
ttcctgctccgtgccagggaggata

SEQ ID NO: 3234800 - DNA, 25 bp, Homo sapien
caagttgatgttgagagatggcagc

SEQ ID NO: 3234801 - DNA, 25 bp, Homo sapien
atatagcatttcctgctccgtgcca

SEQ ID NO: 3234802 - DNA, 25 bp, Homo sapien
tgacaaaaatactggtaggtataaa

SEQ ID NO: 3234803 - DNA, 25 bp, Homo sapien
tggtaggtataaaacgcctgagcag

SEQ ID NO: 3234804 - DNA, 25 bp, Homo sapien
cttgacaaaaatactggtaggtata

SEQ ID NO: 3234805 - DNA, 25 bp, Homo sapien
aatactggtaggtataaaacgcctg

SEQ ID NO: 3234806 - DNA, 25 bp, Homo sapien
gggaaagggtaatcctcagccactg

SEQ ID NO: 3234807 - DNA, 25 bp, Homo sapien
tagtcacatttagcgattgagcact

SEQ ID NO: 3234808 - DNA, 25 bp, Homo sapien
tctggtatggcagtcgctagtcaca

SEQ ID NO: 3234809 - DNA, 25 bp, Homo sapien
agtttaatacaggtgcactaggacc

SEQ ID NO: 3234810 - DNA, 25 bp, Homo sapien
gagctgacaggtaagttccttttgg

SEQ ID NO: 3234811 - DNA, 25 bp, Homo sapien
ggactcaaggttgcccaatctcctg

SEQ ID NO: 3234812 - DNA, 25 bp, Homo sapien
aaaaagtgtctgcagtgaactccaa

SEQ ID NO: 3234813 - DNA, 25 bp, Homo sapien
aaggttgcccaatctcctgtttgag

SEQ ID NO: 3234814 - DNA, 25 bp, Homo sapien
aaatggtgatatggtgattctcctc

SEQ ID NO: 3234815 - DNA, 25 bp, Homo sapien
tctgcacttccacccgaagaatcct

SEQ ID NO: 3234816 - DNA, 25 bp, Homo sapien
taaatgagtgtaagcatcaaaataa

SEQ ID NO: 3234817 - DNA, 25 bp, Homo sapien
tgatatggtgattctcctcctttca

SEQ ID NO: 3234818 - DNA, 25 bp, Homo sapien
taccatgatcaaagctagagttcac

SEQ ID NO: 3234819 - DNA, 25 bp, Homo sapien
tagagttcacaatgaaacacctgca

SEQ ID NO: 3234820 - DNA, 25 bp, Homo sapien
cctctgaatagttggtataacatcc

SEQ ID NO: 3234821 - DNA, 25 bp, Homo sapien
tgtaacaacagccaagggccggtct

SEQ ID NO: 3234822 - DNA, 25 bp, Homo sapien
ggcagcaagctgaacctatttgaca

SEQ ID NO: 3234823 - DNA, 25 bp, Homo sapien
tggaagttttccgtatcagtcatac

SEQ ID NO: 3234824 - DNA, 25 bp, Homo sapien
aatgatttatttccggtctggccag

SEQ ID NO: 3234825 - DNA, 25 bp, Homo sapien
gattcggaactttatggcacaggca

SEQ ID NO: 3234826 - DNA, 25 bp, Homo sapien
aaactttcagtctaggaaattatgt

SEQ ID NO: 3234827 - DNA, 25 bp, Homo sapien
aatataaccagaaggcctgactcag

SEQ ID NO: 3234828 - DNA, 25 bp, Homo sapien
aattttccaggaaatcaggtcattt

SEQ ID NO: 3234829 - DNA, 25 bp, Homo sapien
aaatacaattttcaccctatgattt

SEQ ID NO: 3234830 - DNA, 25 bp, Homo sapien
ggaaaacttgaatataatggaacta

SEQ ID NO: 3234831 - DNA, 25 bp, Homo sapien
acttgaatataatggaactatgcat

SEQ ID NO: 3234832 - DNA, 25 bp, Homo sapien
aaacttgaatataatggaactatgc

SEQ ID NO: 3234833 - DNA, 25 bp, Homo sapien
ctttaaggaaaacttgaatataatg

SEQ ID NO: 3234834 - DNA, 25 bp, Homo sapien
gcagacataagtaaatcgagtggaa

SEQ ID NO: 3234835 - DNA, 25 bp, Homo sapien
tcccctctagtaaaacatgcttcag

SEQ ID NO: 3234836 - DNA, 25 bp, Homo sapien
cataagtaaatcgagtggaagggaa

SEQ ID NO: 3234837 - DNA, 25 bp, Homo sapien
taaggccttgtgatcgtcttctcct

SEQ ID NO: 3234838 - DNA, 25 bp, Homo sapien
tcttcaagctgatgagcattaccaa

SEQ ID NO: 3234839 - DNA, 25 bp, Homo sapien
tccaaaagctccgggagagaagccc

SEQ ID NO: 3234840 - DNA, 25 bp, Homo sapien
ttcctccaaaagctccgggagagaa

SEQ ID NO: 3234841 - DNA, 25 bp, Homo sapien
cctccaaaagctccgggagagaagc

SEQ ID NO: 3234842 - DNA, 25 bp, Homo sapien
gggcgttctgcattgtgcttccgaa

SEQ ID NO: 3234843 - DNA, 25 bp, Homo sapien
tctgcattgtgcttccgaaaagcca

SEQ ID NO: 3234844 - DNA, 25 bp, Homo sapien
agggcggctttgcaaaccctcaccg

SEQ ID NO: 3234845 - DNA, 25 bp, Homo sapien
ccctcaccgggcgttctgcattgtg

SEQ ID NO: 3234846 - DNA, 25 bp, Homo sapien
ctaatgggttcatggtcgtgctggc

SEQ ID NO: 3234847 - DNA, 25 bp, Homo sapien
gtgttacggctcctaagggcagcgc

SEQ ID NO: 3234848 - DNA, 25 bp, Homo sapien
ccagcaggttggtgagttcatggtc

SEQ ID NO: 3234849 - DNA, 25 bp, Homo sapien
tgttcattccttctaatgggttcat

SEQ ID NO: 3234850 - DNA, 25 bp, Homo sapien
tctacctttgtaccctgacagtcca

SEQ ID NO: 3234851 - DNA, 25 bp, Homo sapien
gggatcaccgcaatgtctcctctac

SEQ ID NO: 3234852 - DNA, 25 bp, Homo sapien
ggcaagtcactctagttctctccag

SEQ ID NO: 3234853 - DNA, 25 bp, Homo sapien
gccctgggatcaccgcaatgtctcc

SEQ ID NO: 3234854 - DNA, 25 bp, Homo sapien
gagccctccaaagacgtcatcttgt

SEQ ID NO: 3234855 - DNA, 25 bp, Homo sapien
cctccaaagacgtcatcttgtactg

SEQ ID NO: 3234856 - DNA, 25 bp, Homo sapien
caaagacgtcatcttgtactgtctc

SEQ ID NO: 3234857 - DNA, 25 bp, Homo sapien
gacgtcatcttgtactgtctccaga

SEQ ID NO: 3234858 - DNA, 25 bp, Homo sapien
gactgaagtttgtctcacaggacac

SEQ ID NO: 3234859 - DNA, 25 bp, Homo sapien
gaccggatcccaagcagtggtggca

SEQ ID NO: 3234860 - DNA, 25 bp, Homo sapien
tctccggagaggctgactaaactat

SEQ ID NO: 3234861 - DNA, 25 bp, Homo sapien
gagtaatcccaaaaagtatcagtga

SEQ ID NO: 3234862 - DNA, 25 bp, Homo sapien
ggggccacagaagcctcgaggctct

SEQ ID NO: 3234863 - DNA, 25 bp, Homo sapien
cagcaagccatgccacgcatctgac

SEQ ID NO: 3234864 - DNA, 25 bp, Homo sapien
gatgtcagctgtcgccagatttttc

SEQ ID NO: 3234865 - DNA, 25 bp, Homo sapien
aaacagcggtccgccttccatactt

SEQ ID NO: 3234866 - DNA, 25 bp, Homo sapien
ctcttttagatctccccttgatgtc

SEQ ID NO: 3234867 - DNA, 25 bp, Homo sapien
cttctcttttagatctccccttgat

SEQ ID NO: 3234868 - DNA, 25 bp, Homo sapien
gactcagagccaaacatcccgggag

SEQ ID NO: 3234869 - DNA, 25 bp, Homo sapien
cctttgcactctcggagtttctcat

SEQ ID NO: 3234870 - DNA, 25 bp, Homo sapien
aaggccaaggactgatctttaccac

SEQ ID NO: 3234871 - DNA, 25 bp, Homo sapien
tgatctttaccaccagactcagagc

SEQ ID NO: 3234872 - DNA, 25 bp, Homo sapien
aagagattctctagcttcagccttc

SEQ ID NO: 3234873 - DNA, 25 bp, Homo sapien
agattctctagcttcagccttctaa

SEQ ID NO: 3234874 - DNA, 25 bp, Homo sapien
ggctgagtgcaatagtgcaatcaca

SEQ ID NO: 3234875 - DNA, 25 bp, Homo sapien
atactgctcagcctcttcaattcta

SEQ ID NO: 3234876 - DNA, 25 bp, Homo sapien
tcttgacccgctcacacttcctcct

SEQ ID NO: 3234877 - DNA, 25 bp, Homo sapien
ctcttgacccgctcacacttcctcc

SEQ ID NO: 3234878 - DNA, 25 bp, Homo sapien
tgtcatccgagcagagtgcctctct

SEQ ID NO: 3234879 - DNA, 25 bp, Homo sapien
gagctgtgatacaccacaaatctgt

SEQ ID NO: 3234880 - DNA, 25 bp, Homo sapien
ctccaggactccctcgagctgtgat

SEQ ID NO: 3234881 - DNA, 25 bp, Homo sapien
acaaatctgtggcaaaacagtgtgg

SEQ ID NO: 3234882 - DNA, 25 bp, Homo sapien
gagctgaccttcagagtgtccaagg

SEQ ID NO: 3234883 - DNA, 25 bp, Homo sapien
taattatctgcaagaggtgaaacag

SEQ ID NO: 3234884 - DNA, 25 bp, Homo sapien
cactgcaggctagacatgattggga

SEQ ID NO: 3234885 - DNA, 25 bp, Homo sapien
tgtccaaggaataaacagccctggt

SEQ ID NO: 3234886 - DNA, 25 bp, Homo sapien
cctctgatacatggacttgggtctg

SEQ ID NO: 3234887 - DNA, 25 bp, Homo sapien
gatcagagaagcagaccagggctct

SEQ ID NO: 3234888 - DNA, 25 bp, Homo sapien
tccatgacacgctgaggtgcaggaa

SEQ ID NO: 3234889 - DNA, 25 bp, Homo sapien
tcttctcgggaatctggtgatcccc

SEQ ID NO: 3234890 - DNA, 25 bp, Homo sapien
tggtttacccttaggcagaacaagc

SEQ ID NO: 3234891 - DNA, 25 bp, Homo sapien
gctggtttacccttaggcagaacaa

SEQ ID NO: 3234892 - DNA, 25 bp, Homo sapien
ttacccttaggcagaacaagctcac

SEQ ID NO: 3234893 - DNA, 25 bp, Homo sapien
caagtggtagaggctggtttaccct

SEQ ID NO: 3234894 - DNA, 25 bp, Homo sapien
tacacggcaatttttcacagggctc

SEQ ID NO: 3234895 - DNA, 25 bp, Homo sapien
ccccacgagatttgaacatgaagcc

SEQ ID NO: 3234896 - DNA, 25 bp, Homo sapien
tcagtacagatccattacacggcaa

SEQ ID NO: 3234897 - DNA, 25 bp, Homo sapien
tgaagcctgtgagagctccttgtcg

SEQ ID NO: 3234898 - DNA, 25 bp, Homo sapien
ttcacataaatgacatcctccatga

SEQ ID NO: 3234899 - DNA, 25 bp, Homo sapien
gtctttcacataaatgacatcctcc

SEQ ID NO: 3234900 - DNA, 25 bp, Homo sapien
tgtctttcacgtctgtgtctttcac

SEQ ID NO: 3234901 - DNA, 25 bp, Homo sapien
gagcctgtgtctttcacgtctgtgt

SEQ ID NO: 3234902 - DNA, 25 bp, Homo sapien
aatttccacagaacttctatagcca

SEQ ID NO: 3234903 - DNA, 25 bp, Homo sapien
cagaatttccacagaacttctatag

SEQ ID NO: 3234904 - DNA, 25 bp, Homo sapien
tgtagtaggaagccagaatttccac

SEQ ID NO: 3234905 - DNA, 25 bp, Homo sapien
gtagtaggaagccagaatttccaca

SEQ ID NO: 3234906 - DNA, 25 bp, Homo sapien
gaaagacggccttgtaaacttgctc

SEQ ID NO: 3234907 - DNA, 25 bp, Homo sapien
tgcctgccattcttgctggggaaag

SEQ ID NO: 3234908 - DNA, 25 bp, Homo sapien
aaagacggccttgtaaacttgctct

SEQ ID NO: 3234909 - DNA, 25 bp, Homo sapien
ggagtgaggcgcgatctgcagaaac

SEQ ID NO: 3234910 - DNA, 25 bp, Homo sapien
tgaggcgcgatctgcagaaacttct

SEQ ID NO: 3234911 - DNA, 25 bp, Homo sapien
gccagggagtgaggcgcgatctgca

SEQ ID NO: 3234912 - DNA, 25 bp, Homo sapien
gagtgaggcgcgatctgcagaaact

SEQ ID NO: 3234913 - DNA, 25 bp, Homo sapien
tgaagtcggcgaagatctcgtagcc

SEQ ID NO: 3234914 - DNA, 25 bp, Homo sapien
tcggctttgaagtcggcgaagatct

SEQ ID NO: 3234915 - DNA, 25 bp, Homo sapien
gaagatctcgtagccgatgtggtgc

SEQ ID NO: 3234916 - DNA, 25 bp, Homo sapien
gttctcggctttgaagtcggcgaag

SEQ ID NO: 3234917 - DNA, 25 bp, Homo sapien
caccgcggccgtgaccttcttgttc

SEQ ID NO: 3234918 - DNA, 25 bp, Homo sapien
gccgtgaccttcttgttccagaagt

SEQ ID NO: 3234919 - DNA, 25 bp, Homo sapien
gccaccgcggccgtgaccttcttgt

SEQ ID NO: 3234920 - DNA, 25 bp, Homo sapien
tgaccttcttgttccagaagtgctg

SEQ ID NO: 3234921 - DNA, 25 bp, Homo sapien
tggatcagcaggacctgctcgtcga

SEQ ID NO: 3234922 - DNA, 25 bp, Homo sapien
ggatcagcaggacctgctcgtcgat

SEQ ID NO: 3234923 - DNA, 25 bp, Homo sapien
ctggatcagcaggacctgctcgtcg

SEQ ID NO: 3234924 - DNA, 25 bp, Homo sapien
ccaggcagcggatgtggaagcccga

SEQ ID NO: 3234925 - DNA, 25 bp, Homo sapien
caggcagcggatgtggaagcccgag

SEQ ID NO: 3234926 - DNA, 25 bp, Homo sapien
actctgcccctctttacgttttgct

SEQ ID NO: 3234927 - DNA, 25 bp, Homo sapien
tcagacacacaaaacgacttgagag

SEQ ID NO: 3234928 - DNA, 25 bp, Homo sapien
tttcctccggcctctttgtgtctct

SEQ ID NO: 3234929 - DNA, 25 bp, Homo sapien
gctctcttttgttgaggatcagatt

SEQ ID NO: 3234930 - DNA, 25 bp, Homo sapien
gccactagaatggagcctccaaaag

SEQ ID NO: 3234931 - DNA, 25 bp, Homo sapien
gcaattcaagctattcgtctaggaa

SEQ ID NO: 3234932 - DNA, 25 bp, Homo sapien
tctaggccaggcttaggtgctaaca

SEQ ID NO: 3234933 - DNA, 25 bp, Homo sapien
tacagggactgtatctgacttgttc

SEQ ID NO: 3234934 - DNA, 25 bp, Homo sapien
agctgctcccctcacacctcctctt

SEQ ID NO: 3234935 - DNA, 25 bp, Homo sapien
ttctccctcgccttttttcagctcc

SEQ ID NO: 3234936 - DNA, 25 bp, Homo sapien
tcctctatcttctccctcgcctttt

SEQ ID NO: 3234937 - DNA, 25 bp, Homo sapien
tcttcctctatcttctccctcgcct

SEQ ID NO: 3234938 - DNA, 25 bp, Homo sapien
ccagaagcgccgcagagttcactga

SEQ ID NO: 3234939 - DNA, 25 bp, Homo sapien
ctaaccgatgagatagagaactgga

SEQ ID NO: 3234940 - DNA, 25 bp, Homo sapien
ccgatgagatagagaactggatttc

SEQ ID NO: 3234941 - DNA, 25 bp, Homo sapien
gagttcactgagctgtatcctcctt

SEQ ID NO: 3234942 - DNA, 25 bp, Homo sapien
tattctcctccttgtgatttagtgg

SEQ ID NO: 3234943 - DNA, 25 bp, Homo sapien
tcctccaaaggcaacggcagtttgc

SEQ ID NO: 3234944 - DNA, 25 bp, Homo sapien
catggcccaaaagccagcaaagcaa

SEQ ID NO: 3234945 - DNA, 25 bp, Homo sapien
ggcgatgccgttcaagcctttttca

SEQ ID NO: 3234946 - DNA, 25 bp, Homo sapien
tatgaggacgtgctttgctggaact

SEQ ID NO: 3234947 - DNA, 25 bp, Homo sapien
ctactacgattagggcagagagcac

SEQ ID NO: 3234948 - DNA, 25 bp, Homo sapien
ggtgactcaccagagctactacgat

SEQ ID NO: 3234949 - DNA, 25 bp, Homo sapien
tctcgggcccagagctatgaggacg

SEQ ID NO: 3234950 - DNA, 25 bp, Homo sapien
tcacccattgaaggttgcctgccac

SEQ ID NO: 3234951 - DNA, 25 bp, Homo sapien
ccagggatgctaggagatgacacga

SEQ ID NO: 3234952 - DNA, 25 bp, Homo sapien
tgcaagcctgttttgcggtccaggg

SEQ ID NO: 3234953 - DNA, 25 bp, Homo sapien
gcacttgggcctgaaggaacgtcta

SEQ ID NO: 3234954 - DNA, 25 bp, Homo sapien
ctgatgaggacggtgaggggcaagg

SEQ ID NO: 3234955 - DNA, 25 bp, Homo sapien
actgtgcctcgaaggccagtgacgg

SEQ ID NO: 3234956 - DNA, 25 bp, Homo sapien
gaggctgcctgggtatcccctgaga

SEQ ID NO: 3234957 - DNA, 25 bp, Homo sapien
ttcacagggaagacgaactgtgcct

SEQ ID NO: 3234958 - DNA, 25 bp, Homo sapien
tcccctgagatagatgagcaagcca

SEQ ID NO: 3234959 - DNA, 25 bp, Homo sapien
agcccagaaatagtcacaatcagca

SEQ ID NO: 3234960 - DNA, 25 bp, Homo sapien
cataaaaatccattgacagcccaga

SEQ ID NO: 3234961 - DNA, 25 bp, Homo sapien
aggattcgccgattctaccccatca

SEQ ID NO: 3234962 - DNA, 25 bp, Homo sapien
tcagcataacttcagcaacaatgca

SEQ ID NO: 3234963 - DNA, 25 bp, Homo sapien
tgggggcggaaatgaagaaaggcaa

SEQ ID NO: 3234964 - DNA, 25 bp, Homo sapien
aaaggcaaaagagccaagcttcttt

SEQ ID NO: 3234965 - DNA, 25 bp, Homo sapien
ttgggggcggaaatgaagaaaggca

SEQ ID NO: 3234966 - DNA, 25 bp, Homo sapien
gaaaggcaaaagagccaagcttctt

SEQ ID NO: 3234967 - DNA, 25 bp, Homo sapien
tgcaatttggcaacgtttataacgt

SEQ ID NO: 3234968 - DNA, 25 bp, Homo sapien
cgtaagattccaagttcaaggcaaa

SEQ ID NO: 3234969 - DNA, 25 bp, Homo sapien
atctgtttcctgattggagctgcaa

SEQ ID NO: 3234970 - DNA, 25 bp, Homo sapien
ctggtactgcctaaccatctgtttc

SEQ ID NO: 3234971 - DNA, 25 bp, Homo sapien
tataaactagaagttgattaattgt

SEQ ID NO: 3234972 - DNA, 25 bp, Homo sapien
tgtaccacaaaattctaatacctag

SEQ ID NO: 3234973 - DNA, 25 bp, Homo sapien
tacctagcaaaatatttctagacca

SEQ ID NO: 3234974 - DNA, 25 bp, Homo sapien
tttttaagaattatacagcacagca

SEQ ID NO: 3234975 - DNA, 25 bp, Homo sapien
tgctaagtaaccacgaagggaatcc

SEQ ID NO: 3234976 - DNA, 25 bp, Homo sapien
tagacattctttgatgatgccagac

SEQ ID NO: 3234977 - DNA, 25 bp, Homo sapien
tgatgatgccagacctaagcgttct

SEQ ID NO: 3234978 - DNA, 25 bp, Homo sapien
tgacaggtcacaccataatcatggg

SEQ ID NO: 3234979 - DNA, 25 bp, Homo sapien
ttaacctctcacaacaaagattgcc

SEQ ID NO: 3234980 - DNA, 25 bp, Homo sapien
tgggagccattccaactccgcacct

SEQ ID NO: 3234981 - DNA, 25 bp, Homo sapien
cacaacaaagattgccaggttgcca

SEQ ID NO: 3234982 - DNA, 25 bp, Homo sapien
ctcctgcttgtgcagactgtaggaa

SEQ ID NO: 3234983 - DNA, 25 bp, Homo sapien
ctgcgtgttccatgccactgactca

SEQ ID NO: 3234984 - DNA, 25 bp, Homo sapien
tgcgtgttccatgccactgactcac

SEQ ID NO: 3234985 - DNA, 25 bp, Homo sapien
ccatccacaatgggtgccccaagtg

SEQ ID NO: 3234986 - DNA, 25 bp, Homo sapien
gagagccacttgtatataactaaac

SEQ ID NO: 3234987 - DNA, 25 bp, Homo sapien
aacaaggcacactctcctcaacagt

SEQ ID NO: 3234988 - DNA, 25 bp, Homo sapien
gatgagtgtgtaaccacgtggagga

SEQ ID NO: 3234989 - DNA, 25 bp, Homo sapien
gagaacgttaaagtcagtggcaccc

SEQ ID NO: 3234990 - DNA, 25 bp, Homo sapien
acttggctaggtcacggtacccaca

SEQ ID NO: 3234991 - DNA, 25 bp, Homo sapien
gtggcacccaaacttttcggatcag

SEQ ID NO: 3234992 - DNA, 25 bp, Homo sapien
tgacattaacacttagccagtagac

SEQ ID NO: 3234993 - DNA, 25 bp, Homo sapien
gcaaaattagggactcgcatggaga

SEQ ID NO: 3234994 - DNA, 25 bp, Homo sapien
cattaagtgtgtcaggaaagcatca

SEQ ID NO: 3234995 - DNA, 25 bp, Homo sapien
tacaaggatttctaggagaccgagg

SEQ ID NO: 3234996 - DNA, 25 bp, Homo sapien
ccttagagcgttggccaaaactcgc

SEQ ID NO: 3234997 - DNA, 25 bp, Homo sapien
ttctctgcctcagtctcccgagtag

SEQ ID NO: 3234998 - DNA, 25 bp, Homo sapien
ctctcagggtggagtacggtggcgc

SEQ ID NO: 3234999 - DNA, 25 bp, Homo sapien
ctcctgggttcaagcaattctctgc

SEQ ID NO: 3235000 - DNA, 25 bp, Homo sapien
gatcttggctcgctgcaacctctgc

SEQ ID NO: 3235001 - DNA, 25 bp, Homo sapien
tcttgccaatttccccacttggccc

SEQ ID NO: 3235002 - DNA, 25 bp, Homo sapien
ccaagctccaattttggtaactgcc

SEQ ID NO: 3235003 - DNA, 25 bp, Homo sapien
tggccctaaattgtccttctcccat

SEQ ID NO: 3235004 - DNA, 25 bp, Homo sapien
cttaagccttgtttccaagctccaa

SEQ ID NO: 3235005 - DNA, 25 bp, Homo sapien
ctatgtttgaaaaagcagttgacac

SEQ ID NO: 3235006 - DNA, 25 bp, Homo sapien
tgtttgaaaaagcagttgacaccca

SEQ ID NO: 3235007 - DNA, 25 bp, Homo sapien
gtttgaaaaagcagttgacacccat

SEQ ID NO: 3235008 - DNA, 25 bp, Homo sapien
tgaaaaagcagttgacacccatacc

SEQ ID NO: 3235009 - DNA, 25 bp, Homo sapien
cttatctggagcttcaacctcagtt

SEQ ID NO: 3235010 - DNA, 25 bp, Homo sapien
ttatctggagcttcaacctcagttc

SEQ ID NO: 3235011 - DNA, 25 bp, Homo sapien
cagacatttcgtcccttccctggtt

SEQ ID NO: 3235012 - DNA, 25 bp, Homo sapien
cctggttgctctggcagtgttaatt

SEQ ID NO: 3235013 - DNA, 25 bp, Homo sapien
ttccctggttgctctggcagtgtta

SEQ ID NO: 3235014 - DNA, 25 bp, Homo sapien
tcagacatttcgtcccttccctggt

SEQ ID NO: 3235015 - DNA, 25 bp, Homo sapien
caaatcctgacgactgctgctttta

SEQ ID NO: 3235016 - DNA, 25 bp, Homo sapien
tttgtaagaggtctgtaaaatgtac

SEQ ID NO: 3235017 - DNA, 25 bp, Homo sapien
tattctctcgatttcctttggtgcc

SEQ ID NO: 3235018 - DNA, 25 bp, Homo sapien
cagatggtaataatctgtggcttcc

SEQ ID NO: 3235019 - DNA, 25 bp, Homo sapien
tgggataaccagtactgcaggataa

SEQ ID NO: 3235020 - DNA, 25 bp, Homo sapien
cgagatgaccagtcctgtgggataa

SEQ ID NO: 3235021 - DNA, 25 bp, Homo sapien
gtcctgcgggataaccagttctgca

SEQ ID NO: 3235022 - DNA, 25 bp, Homo sapien
aaccagtcctgtgggatgatgagac

SEQ ID NO: 3235023 - DNA, 25 bp, Homo sapien
tttcctccaagttcagatacggttg

SEQ ID NO: 3235024 - DNA, 25 bp, Homo sapien
gaacattctgtttcgaattaaagtc

SEQ ID NO: 3235025 - DNA, 25 bp, Homo sapien
agtggttctgtgaacacctatcaaa

SEQ ID NO: 3235026 - DNA, 25 bp, Homo sapien
cgaattaaagtcaaccagacactct

SEQ ID NO: 3235027 - DNA, 25 bp, Homo sapien
tgctaaggctttattccctccaagg

SEQ ID NO: 3235028 - DNA, 25 bp, Homo sapien
gcgaagtccaaaatctctgctaagg

SEQ ID NO: 3235029 - DNA, 25 bp, Homo sapien
gaggtataaccttgagcgaagtcca

SEQ ID NO: 3235030 - DNA, 25 bp, Homo sapien
taaataagagcgtgcatgcagggcg

SEQ ID NO: 3235031 - DNA, 25 bp, Homo sapien
agctaagatgctggccgcaaaggga

SEQ ID NO: 3235032 - DNA, 25 bp, Homo sapien
gggtgaagactcaagatctgttgca

SEQ ID NO: 3235033 - DNA, 25 bp, Homo sapien
aagtgccagcacttcatgtggagca

SEQ ID NO: 3235034 - DNA, 25 bp, Homo sapien
aagagaccaccggcttcgtccagtc

SEQ ID NO: 3235035 - DNA, 25 bp, Homo sapien
ggtttcatgcttgccactgttgccc

SEQ ID NO: 3235036 - DNA, 25 bp, Homo sapien
tgccaaatccactcaggacgttgaa

SEQ ID NO: 3235037 - DNA, 25 bp, Homo sapien
gacttactcaccacagcgttgacag

SEQ ID NO: 3235038 - DNA, 25 bp, Homo sapien
tgcaaagtggaacaaagcaaagagc

SEQ ID NO: 3235039 - DNA, 25 bp, Homo sapien
tacgctgcattcaggtccacagctc

SEQ ID NO: 3235040 - DNA, 25 bp, Homo sapien
acagctctttagatggcacggctct

SEQ ID NO: 3235041 - DNA, 25 bp, Homo sapien
cctggaagacgcaatgcaagtggcc

SEQ ID NO: 3235042 - DNA, 25 bp, Homo sapien
tctggagtcccggtgtaagtcaccg

SEQ ID NO: 3235043 - DNA, 25 bp, Homo sapien
ccttcgtgggaacggggagatctgc

SEQ ID NO: 3235044 - DNA, 25 bp, Homo sapien
ggggagatctgcggtgcgctgcctg

SEQ ID NO: 3235045 - DNA, 25 bp, Homo sapien
atctgcggtgcgctgcctggcccac

SEQ ID NO: 3235046 - DNA, 25 bp, Homo sapien
cagccttcgtgggaacggggagatc

SEQ ID NO: 3235047 - DNA, 25 bp, Homo sapien
caggctgccttaagttagaacgcgg

SEQ ID NO: 3235048 - DNA, 25 bp, Homo sapien
tggcccgattcagcgcaggagtgct

SEQ ID NO: 3235049 - DNA, 25 bp, Homo sapien
gacccaaacaaatgaggcagccgag

SEQ ID NO: 3235050 - DNA, 25 bp, Homo sapien
tcttcatcacagaggctcgagcggg

SEQ ID NO: 3235051 - DNA, 25 bp, Homo sapien
gggcgcagcgcgctccttcatccgt

SEQ ID NO: 3235052 - DNA, 25 bp, Homo sapien
ggagggcgacctgccgccccgatcc

SEQ ID NO: 3235053 - DNA, 25 bp, Homo sapien
tcggggcctcagcgccggggcgcag

SEQ ID NO: 3235054 - DNA, 25 bp, Homo sapien
tggggagggcgacctgccgccccga

SEQ ID NO: 3235055 - DNA, 25 bp, Homo sapien
aaatccgagctaggccaggctcgcc

SEQ ID NO: 3235056 - DNA, 25 bp, Homo sapien
caaggttgtgctccgggtcttcttc

SEQ ID NO: 3235057 - DNA, 25 bp, Homo sapien
ggcccggtccgagaaatccgagcta

SEQ ID NO: 3235058 - DNA, 25 bp, Homo sapien
cttgtgcaggcggtagtccttctcg

SEQ ID NO: 3235059 - DNA, 25 bp, Homo sapien
cagaacgcgttcagtaagctccaac

SEQ ID NO: 3235060 - DNA, 25 bp, Homo sapien
ggatcctccacaaagctcgaggagg

SEQ ID NO: 3235061 - DNA, 25 bp, Homo sapien
tggaaatacccactcagataaccgg

SEQ ID NO: 3235062 - DNA, 25 bp, Homo sapien
cagagctgcgcatggaacctgttcc

SEQ ID NO: 3235063 - DNA, 25 bp, Homo sapien
tggcaccactagcaaggcacatggg

SEQ ID NO: 3235064 - DNA, 25 bp, Homo sapien
tgccacccctggcccgggaacgcca

SEQ ID NO: 3235065 - DNA, 25 bp, Homo sapien
ctagcaaggcacatggggcaccacc

SEQ ID NO: 3235066 - DNA, 25 bp, Homo sapien
ccactagcaaggcacatggggcacc

SEQ ID NO: 3235067 - DNA, 25 bp, Homo sapien
cataaacacgcagctgaactcgcag

SEQ ID NO: 3235068 - DNA, 25 bp, Homo sapien
aggaggaacatgcacttggttggca

SEQ ID NO: 3235069 - DNA, 25 bp, Homo sapien
tcgcagctcagaagcggagttttct

SEQ ID NO: 3235070 - DNA, 25 bp, Homo sapien
gaaagatgtcccttcgcttcacagc

SEQ ID NO: 3235071 - DNA, 25 bp, Homo sapien
gctgccaaaccgtctgctcgtagca

SEQ ID NO: 3235072 - DNA, 25 bp, Homo sapien
cctggctgccaaaccgtctgctcgt

SEQ ID NO: 3235073 - DNA, 25 bp, Homo sapien
agctcaggccgtcatcccggagccc

SEQ ID NO: 3235074 - DNA, 25 bp, Homo sapien
gccgtcatcccggagccccaggcct

SEQ ID NO: 3235075 - DNA, 25 bp, Homo sapien
tacaccgttggtgggtatgcaaaat

SEQ ID NO: 3235076 - DNA, 25 bp, Homo sapien
caaaacatggtacacgtgggcaatg

SEQ ID NO: 3235077 - DNA, 25 bp, Homo sapien
gaatacgattctgccttaacaagga

SEQ ID NO: 3235078 - DNA, 25 bp, Homo sapien
gaagaagattccaacacacgctaca

SEQ ID NO: 3235079 - DNA, 25 bp, Homo sapien
tcagaataacccgacagctcctcag

SEQ ID NO: 3235080 - DNA, 25 bp, Homo sapien
tcgaaacataaggtcctcctgggtc

SEQ ID NO: 3235081 - DNA, 25 bp, Homo sapien
cagctcctcagctcgaaacataagg

SEQ ID NO: 3235082 - DNA, 25 bp, Homo sapien
tctgtctgggactcattaagctcag

SEQ ID NO: 3235083 - DNA, 25 bp, Homo sapien
gtatcttgcccatgacctcttccaa

SEQ ID NO: 3235084 - DNA, 25 bp, Homo sapien
acgccagcacagctatcttgactct

SEQ ID NO: 3235085 - DNA, 25 bp, Homo sapien
tatcttgactctggtatcttgccca

SEQ ID NO: 3235086 - DNA, 25 bp, Homo sapien
cacagctatcttgactctggtatct

SEQ ID NO: 3235087 - DNA, 25 bp, Homo sapien
gtggagaaacagggtaagtctgttc

SEQ ID NO: 3235088 - DNA, 25 bp, Homo sapien
tggagaaacagggtaagtctgttct

SEQ ID NO: 3235089 - DNA, 25 bp, Homo sapien
agtggagaaacagggtaagtctgtt

SEQ ID NO: 3235090 - DNA, 25 bp, Homo sapien
ttcactgtattctccagctgaaaga

SEQ ID NO: 3235091 - DNA, 25 bp, Homo sapien
tgataaatccttgaacaccaaggct

SEQ ID NO: 3235092 - DNA, 25 bp, Homo sapien
tctctgataaatccttgaacaccaa

SEQ ID NO: 3235093 - DNA, 25 bp, Homo sapien
tgaaagatacgtttctcaagaatct

SEQ ID NO: 3235094 - DNA, 25 bp, Homo sapien
taattctctagagcgttagccccaa

SEQ ID NO: 3235095 - DNA, 25 bp, Homo sapien
gatcatacagctacatgggagctac

SEQ ID NO: 3235096 - DNA, 25 bp, Homo sapien
tagtcccaggcacaatgtcagttac

SEQ ID NO: 3235097 - DNA, 25 bp, Homo sapien
gagctacatttgatacagggctaga

SEQ ID NO: 3235098 - DNA, 25 bp, Homo sapien
gctgaagcaattacgctgagtagag

SEQ ID NO: 3235099 - DNA, 25 bp, Homo sapien
gctaggctaggctacacgaggctat

SEQ ID NO: 3235100 - DNA, 25 bp, Homo sapien
ccagcacagatgagagcgaaggttt

SEQ ID NO: 3235101 - DNA, 25 bp, Homo sapien
tccagatggaaacaacagcgtttgc

SEQ ID NO: 3235102 - DNA, 25 bp, Homo sapien
gatactgacgccaataaactcatga

SEQ ID NO: 3235103 - DNA, 25 bp, Homo sapien
taaaagatactgacgccaataaact

SEQ ID NO: 3235104 - DNA, 25 bp, Homo sapien
ctgacgccaataaactcatgatcca

SEQ ID NO: 3235105 - DNA, 25 bp, Homo sapien
aataaagtaaaagatactgacgcca

SEQ ID NO: 3235106 - DNA, 25 bp, Homo sapien
tcatctttaatcaattccaaatttt

SEQ ID NO: 3235107 - DNA, 25 bp, Homo sapien
cccagccagctcaggattttttaac

SEQ ID NO: 3235108 - DNA, 25 bp, Homo sapien
actccaaaagtactaggatttacag

SEQ ID NO: 3235109 - DNA, 25 bp, Homo sapien
taaagccagagatactgtattttca

SEQ ID NO: 3235110 - DNA, 25 bp, Homo sapien
tagcaggcactgtttcaaagcgctc

SEQ ID NO: 3235111 - DNA, 25 bp, Homo sapien
tgcttgctggcagcctgctgaactt

SEQ ID NO: 3235112 - DNA, 25 bp, Homo sapien
tattacccattgacatgcttgctgg

SEQ ID NO: 3235113 - DNA, 25 bp, Homo sapien
aaagcgctctcccaatattacccat

SEQ ID NO: 3235114 - DNA, 25 bp, Homo sapien
tacacctgttttatacttagctctg

SEQ ID NO: 3235115 - DNA, 25 bp, Homo sapien
acacctgttttatacttagctctgg

SEQ ID NO: 3235116 - DNA, 25 bp, Homo sapien
cacctgttttatacttagctctggt

SEQ ID NO: 3235117 - DNA, 25 bp, Homo sapien
tttacacctgttttatacttagctc

SEQ ID NO: 3235118 - DNA, 25 bp, Homo sapien
ttgtggtctcatgaaggttaaggtg

SEQ ID NO: 3235119 - DNA, 25 bp, Homo sapien
gccatctgcagcattgtggtctcat

SEQ ID NO: 3235120 - DNA, 25 bp, Homo sapien
agccatctgcagcattgtggtctca

SEQ ID NO: 3235121 - DNA, 25 bp, Homo sapien
tctcatgaaggttaaggtgaatgtg

SEQ ID NO: 3235122 - DNA, 25 bp, Homo sapien
caaactgtgcttcatctgcttggca

SEQ ID NO: 3235123 - DNA, 25 bp, Homo sapien
catggagatgcctctagctgagagc

SEQ ID NO: 3235124 - DNA, 25 bp, Homo sapien
cacccgaacatcctccttgtgtgta

SEQ ID NO: 3235125 - DNA, 25 bp, Homo sapien
tcctgtgtgattcccctgacactta

SEQ ID NO: 3235126 - DNA, 25 bp, Homo sapien
ccagaggtactaatgagctttgtca

SEQ ID NO: 3235127 - DNA, 25 bp, Homo sapien
tcagtgttaggtggatcaggagaca

SEQ ID NO: 3235128 - DNA, 25 bp, Homo sapien
gccaaactgattgacatgagtgctg

SEQ ID NO: 3235129 - DNA, 25 bp, Homo sapien
tatgggtgactcaaagttagcttcc

SEQ ID NO: 3235130 - DNA, 25 bp, Homo sapien
tacctgtagatagcatatcctttgg

SEQ ID NO: 3235131 - DNA, 25 bp, Homo sapien
agatagcatatcctttggtcattta

SEQ ID NO: 3235132 - DNA, 25 bp, Homo sapien
aaatgtattacctgtagatagcata

SEQ ID NO: 3235133 - DNA, 25 bp, Homo sapien
agtgtatatcactttacttttaaca

SEQ ID NO: 3235134 - DNA, 25 bp, Homo sapien
aatgtcaattagcaagtctgatggc

SEQ ID NO: 3235135 - DNA, 25 bp, Homo sapien
tctgctatttgagggaggaacactt

SEQ ID NO: 3235136 - DNA, 25 bp, Homo sapien
gaatgctccctgaggattttaaagg

SEQ ID NO: 3235137 - DNA, 25 bp, Homo sapien
gttgaatttatgtgcacagagctct

SEQ ID NO: 3235138 - DNA, 25 bp, Homo sapien
tattccaagcctaaatccactcggt

SEQ ID NO: 3235139 - DNA, 25 bp, Homo sapien
tggcttcacaaaacgagttgggaaa

SEQ ID NO: 3235140 - DNA, 25 bp, Homo sapien
tcaaatgctgccttatattccaagc

SEQ ID NO: 3235141 - DNA, 25 bp, Homo sapien
tgtgcccagccctacattgactgat

SEQ ID NO: 3235142 - DNA, 25 bp, Homo sapien
cgacgtggcatcctcctgctgagtc

SEQ ID NO: 3235143 - DNA, 25 bp, Homo sapien
acgacgtggcatcctcctgctgagt

SEQ ID NO: 3235144 - DNA, 25 bp, Homo sapien
gcaccagccagtgcggcttctgccg

SEQ ID NO: 3235145 - DNA, 25 bp, Homo sapien
ccagcaccagccagtgcggcttctg

SEQ ID NO: 3235146 - DNA, 25 bp, Homo sapien
agcaccagccagtgcggcttctgcc

SEQ ID NO: 3235147 - DNA, 25 bp, Homo sapien
cagcaccagccagtgcggcttctgc

SEQ ID NO: 3235148 - DNA, 25 bp, Homo sapien
taaagcctggtgcatgctagggagc

SEQ ID NO: 3235149 - DNA, 25 bp, Homo sapien
cagtaacagaaacggacgtcctaga

SEQ ID NO: 3235150 - DNA, 25 bp, Homo sapien
ccccaggtagcactgacgctaaagc

SEQ ID NO: 3235151 - DNA, 25 bp, Homo sapien
gctagggagctgcatccaagcacaa

SEQ ID NO: 3235152 - DNA, 25 bp, Homo sapien
aacatcctttaaacctgactcagca

SEQ ID NO: 3235153 - DNA, 25 bp, Homo sapien
tgctatgcagaaagaagagacctct

SEQ ID NO: 3235154 - DNA, 25 bp, Homo sapien
tcctcaacgttgctctgaagatgca

SEQ ID NO: 3235155 - DNA, 25 bp, Homo sapien
tgacagggtgagctatgagatggat

SEQ ID NO: 3235156 - DNA, 25 bp, Homo sapien
tgaaataccagtcctagatgataac

SEQ ID NO: 3235157 - DNA, 25 bp, Homo sapien
agtaagatctcccagatgtcctgaa

SEQ ID NO: 3235158 - DNA, 25 bp, Homo sapien
tgaccaacaagagcacctgaggaac

SEQ ID NO: 3235159 - DNA, 25 bp, Homo sapien
taaagttatgatgaaataccagtcc

SEQ ID NO: 3235160 - DNA, 25 bp, Homo sapien
tagaagccacaaatgtctggggcct

SEQ ID NO: 3235161 - DNA, 25 bp, Homo sapien
ccacaaatgtctggggcctatgggt

SEQ ID NO: 3235162 - DNA, 25 bp, Homo sapien
gaagccacaaatgtctggggcctat

SEQ ID NO: 3235163 - DNA, 25 bp, Homo sapien
agccacaaatgtctggggcctatgg

SEQ ID NO: 3235164 - DNA, 25 bp, Homo sapien
agatggccaagcagaggatctcccc

SEQ ID NO: 3235165 - DNA, 25 bp, Homo sapien
tgagactgactgatgggagacatac

SEQ ID NO: 3235166 - DNA, 25 bp, Homo sapien
gggagacatactgatgggtgataca

SEQ ID NO: 3235167 - DNA, 25 bp, Homo sapien
tctccccgagtggaataaactgaga

SEQ ID NO: 3235168 - DNA, 25 bp, Homo sapien
gtgacaggctttcttgccgagttca

SEQ ID NO: 3235169 - DNA, 25 bp, Homo sapien
tgacaggctttcttgccgagttcat

SEQ ID NO: 3235170 - DNA, 25 bp, Homo sapien
ggtgacaggctttcttgccgagttc

SEQ ID NO: 3235171 - DNA, 25 bp, Homo sapien
taggacttaacaaaaagagacaggc

SEQ ID NO: 3235172 - DNA, 25 bp, Homo sapien
gtggctacgcactcataggacagaa

SEQ ID NO: 3235173 - DNA, 25 bp, Homo sapien
gcaacactatctgtccccacttagg

SEQ ID NO: 3235174 - DNA, 25 bp, Homo sapien
tcactgcagtgttaatgggctggca

SEQ ID NO: 3235175 - DNA, 25 bp, Homo sapien
tcccttcagagttttagcattgtca

SEQ ID NO: 3235176 - DNA, 25 bp, Homo sapien
tagaatatggatgcccaaaacaaga

SEQ ID NO: 3235177 - DNA, 25 bp, Homo sapien
ggagctattgctgaacataacttta

SEQ ID NO: 3235178 - DNA, 25 bp, Homo sapien
tctgctgtagcttaactgatagtaa

SEQ ID NO: 3235179 - DNA, 25 bp, Homo sapien
taaggagacgaatgggagacagaac

SEQ ID NO: 3235180 - DNA, 25 bp, Homo sapien
tacctggacttatagggtctagctc

SEQ ID NO: 3235181 - DNA, 25 bp, Homo sapien
taacagcttaacaggtaccagacca

SEQ ID NO: 3235182 - DNA, 25 bp, Homo sapien
tcagtaagagccaacataaggagac

SEQ ID NO: 3235183 - DNA, 25 bp, Homo sapien
ctgacacggaatataccttctgaga

SEQ ID NO: 3235184 - DNA, 25 bp, Homo sapien
aagtgccttccactgaataacttca

SEQ ID NO: 3235185 - DNA, 25 bp, Homo sapien
ttcaggggacaccactgacacggaa

SEQ ID NO: 3235186 - DNA, 25 bp, Homo sapien
tgccttccactgaataacttcaggg

SEQ ID NO: 3235187 - DNA, 25 bp, Homo sapien
tgaaagcttctttgtatgattgata

SEQ ID NO: 3235188 - DNA, 25 bp, Homo sapien
gatgaaagcttctttgtatgattga

SEQ ID NO: 3235189 - DNA, 25 bp, Homo sapien
ttgtgcatgtttatgcctcgtctac

SEQ ID NO: 3235190 - DNA, 25 bp, Homo sapien
gtttttgtgcatgtttatgcctcgt

SEQ ID NO: 3235191 - DNA, 25 bp, Homo sapien
gcgtgtgccgcagaatttcttggct

SEQ ID NO: 3235192 - DNA, 25 bp, Homo sapien
agcgtgttcagcgtgtgccgcagaa

SEQ ID NO: 3235193 - DNA, 25 bp, Homo sapien
cagcgtgtgccgcagaatttcttgg

SEQ ID NO: 3235194 - DNA, 25 bp, Homo sapien
tgttcagcgtgtgccgcagaatttc

SEQ ID NO: 3235195 - DNA, 25 bp, Homo sapien
tgagaccgagactttccatgggact

SEQ ID NO: 3235196 - DNA, 25 bp, Homo sapien
ggatatccagatgtgaaccgtcgga

SEQ ID NO: 3235197 - DNA, 25 bp, Homo sapien
acttcccgagggatcgtagctggcg

SEQ ID NO: 3235198 - DNA, 25 bp, Homo sapien
agtttcttcatgagcgcggtgtgcc

SEQ ID NO: 3235199 - DNA, 25 bp, Homo sapien
cctgggcaccctggtaagaggatca

SEQ ID NO: 3235200 - DNA, 25 bp, Homo sapien
ttcaatgatgaagcagccctccctg

SEQ ID NO: 3235201 - DNA, 25 bp, Homo sapien
gcatgatgaagttatctcctttgtg

SEQ ID NO: 3235202 - DNA, 25 bp, Homo sapien
gtttgtgttgctgtgcatgatgaag

SEQ ID NO: 3235203 - DNA, 25 bp, Homo sapien
tcagttctccttttagccaattcac

SEQ ID NO: 3235204 - DNA, 25 bp, Homo sapien
acacatcccattctggtgtcatggg

SEQ ID NO: 3235205 - DNA, 25 bp, Homo sapien
ccttttagccaattcaccagacaca

SEQ ID NO: 3235206 - DNA, 25 bp, Homo sapien
cagacacatcccattctggtgtcat

SEQ ID NO: 3235207 - DNA, 25 bp, Homo sapien
ggtgcacttttgagtgggagcttcc

SEQ ID NO: 3235208 - DNA, 25 bp, Homo sapien
tgtggcttcggtgcacttttgagtg

SEQ ID NO: 3235209 - DNA, 25 bp, Homo sapien
cttcggtgcacttttgagtgggagc

SEQ ID NO: 3235210 - DNA, 25 bp, Homo sapien
gctgtggcttcggtgcacttttgag

SEQ ID NO: 3235211 - DNA, 25 bp, Homo sapien
ggagttatccatcgacctggatctc

SEQ ID NO: 3235212 - DNA, 25 bp, Homo sapien
catcgacctggatctctccttggct

SEQ ID NO: 3235213 - DNA, 25 bp, Homo sapien
ccagagggcctttggagttatccat

SEQ ID NO: 3235214 - DNA, 25 bp, Homo sapien
gggcctttggagttatccatcgacc

SEQ ID NO: 3235215 - DNA, 25 bp, Homo sapien
tctttcccagaggtgatggtgccgt

SEQ ID NO: 3235216 - DNA, 25 bp, Homo sapien
caaagtcagagtgtcatggtcctcc

SEQ ID NO: 3235217 - DNA, 25 bp, Homo sapien
tgtgagccctttggagactaacggt

SEQ ID NO: 3235218 - DNA, 25 bp, Homo sapien
gacaagagttgagttcgccatagga

SEQ ID NO: 3235219 - DNA, 25 bp, Homo sapien
ggtgatctctacaggtgcagaaaca

SEQ ID NO: 3235220 - DNA, 25 bp, Homo sapien
gatctctacaggtgcagaaacattt

SEQ ID NO: 3235221 - DNA, 25 bp, Homo sapien
tggtgatctctacaggtgcagaaac

SEQ ID NO: 3235222 - DNA, 25 bp, Homo sapien
tgatctctacaggtgcagaaacatt

SEQ ID NO: 3235223 - DNA, 25 bp, Homo sapien
ggttttagttagatcagactgatgc

SEQ ID NO: 3235224 - DNA, 25 bp, Homo sapien
gatcagactgatgcaagtttgaggg

SEQ ID NO: 3235225 - DNA, 25 bp, Homo sapien
ctcttagcatgggtggcaatatgaa

SEQ ID NO: 3235226 - DNA, 25 bp, Homo sapien
tatgaacgtagcagaaaaaatactg

SEQ ID NO: 3235227 - DNA, 25 bp, Homo sapien
aattaccaggtgtggtttcacacac

SEQ ID NO: 3235228 - DNA, 25 bp, Homo sapien
aaattaccaggtgtggtttcacaca

SEQ ID NO: 3235229 - DNA, 25 bp, Homo sapien
gctgctcggtgaattatttactgaa

SEQ ID NO: 3235230 - DNA, 25 bp, Homo sapien
ggcttagctgctcggtgaattattt

SEQ ID NO: 3235231 - DNA, 25 bp, Homo sapien
catccactgcatgaggcagagtcaa

SEQ ID NO: 3235232 - DNA, 25 bp, Homo sapien
aagaactgagtagctttcctgtgcc

SEQ ID NO: 3235233 - DNA, 25 bp, Homo sapien
caatgtggctacaagaaatgtatca

SEQ ID NO: 3235234 - DNA, 25 bp, Homo sapien
gatttcaaatgtatagggcaatggc

SEQ ID NO: 3235235 - DNA, 25 bp, Homo sapien
gctccgcgctcgctcggaagttgaa

SEQ ID NO: 3235236 - DNA, 25 bp, Homo sapien
caatgcttgatgtgttggaagccag

SEQ ID NO: 3235237 - DNA, 25 bp, Homo sapien
tcagcttcatttgtcgggggctccg

SEQ ID NO: 3235238 - DNA, 25 bp, Homo sapien
ctgacgacggttactttcaacaatg

SEQ ID NO: 3235239 - DNA, 25 bp, Homo sapien
cctagccctacttagcagcacagtt

SEQ ID NO: 3235240 - DNA, 25 bp, Homo sapien
cacaaaaactgtggttgagatgctt

SEQ ID NO: 3235241 - DNA, 25 bp, Homo sapien
ttgctgtatcgaatgagacagaaga

SEQ ID NO: 3235242 - DNA, 25 bp, Homo sapien
aaacatcagtcccagtgtcgtaaac

SEQ ID NO: 3235243 - DNA, 25 bp, Homo sapien
tggcaccgtttaaccacagactggg

SEQ ID NO: 3235244 - DNA, 25 bp, Homo sapien
cagttgctacagagccataaatgtg

SEQ ID NO: 3235245 - DNA, 25 bp, Homo sapien
gactgggagcaacacgcatctgtgg

SEQ ID NO: 3235246 - DNA, 25 bp, Homo sapien
tagactttcctatgtgtgctcagat

SEQ ID NO: 3235247 - DNA, 25 bp, Homo sapien
ggagttcagtttgacccaatgcaac

SEQ ID NO: 3235248 - DNA, 25 bp, Homo sapien
gacaaacaatgcgttgaggcatgcc

SEQ ID NO: 3235249 - DNA, 25 bp, Homo sapien
aacaattcacacacaaagggccggg

SEQ ID NO: 3235250 - DNA, 25 bp, Homo sapien
gcatgagactgaaagccaactggct

SEQ ID NO: 3235251 - DNA, 25 bp, Homo sapien
caaacagcggcgtaagagaaagcca

SEQ ID NO: 3235252 - DNA, 25 bp, Homo sapien
caaagctgcgccaacctaaaaaagg

SEQ ID NO: 3235253 - DNA, 25 bp, Homo sapien
gatacactttaacacacggctgcca

SEQ ID NO: 3235254 - DNA, 25 bp, Homo sapien
tcattcctaacaaaatcgagtgcgc

SEQ ID NO: 3235255 - DNA, 25 bp, Homo sapien
gaaagctggtgatttagcacgggaa

SEQ ID NO: 3235256 - DNA, 25 bp, Homo sapien
tactgattttctatggtgccaagca

SEQ ID NO: 3235257 - DNA, 25 bp, Homo sapien
tcctccaaagtagggctcgatatat

SEQ ID NO: 3235258 - DNA, 25 bp, Homo sapien
gacggaggagatccccatcaaagat

SEQ ID NO: 3235259 - DNA, 25 bp, Homo sapien
aagagccctggatgacgttgacaat

SEQ ID NO: 3235260 - DNA, 25 bp, Homo sapien
attgctcctgcttgggcccactgag

SEQ ID NO: 3235261 - DNA, 25 bp, Homo sapien
cacgtggctagttggttctgtgact

SEQ ID NO: 3235262 - DNA, 25 bp, Homo sapien
accagaagagccctggatgacgttg

SEQ ID NO: 3235263 - DNA, 25 bp, Homo sapien
ggatgacctttacagcaaccagaga

SEQ ID NO: 3235264 - DNA, 25 bp, Homo sapien
gaacacagtatcaccatagggaggg

SEQ ID NO: 3235265 - DNA, 25 bp, Homo sapien
tccaatgtggaaaccgtggcggtgt

SEQ ID NO: 3235266 - DNA, 25 bp, Homo sapien
tacttgcatgaaggtgaccctaggg

SEQ ID NO: 3235267 - DNA, 25 bp, Homo sapien
aactcacaatatactcccagtattc

SEQ ID NO: 3235268 - DNA, 25 bp, Homo sapien
tggtcctagagtaaaactcacaata

SEQ ID NO: 3235269 - DNA, 25 bp, Homo sapien
gcttttggtcctagagtaaaactca

SEQ ID NO: 3235270 - DNA, 25 bp, Homo sapien
tatactcccagtattcctgctcttc

SEQ ID NO: 3235271 - DNA, 25 bp, Homo sapien
ttccccacaaatggactgcccgttc

SEQ ID NO: 3235272 - DNA, 25 bp, Homo sapien
tgcccgttccgttccactgtgcaag

SEQ ID NO: 3235273 - DNA, 25 bp, Homo sapien
aatggactgcccgttccgttccact

SEQ ID NO: 3235274 - DNA, 25 bp, Homo sapien
cgttccgttccactgtgcaaggttt

SEQ ID NO: 3235275 - DNA, 25 bp, Homo sapien
actgaatacttgctgggtaaactat

SEQ ID NO: 3235276 - DNA, 25 bp, Homo sapien
caacgatcatgtcttttactttgtg

SEQ ID NO: 3235277 - DNA, 25 bp, Homo sapien
ctagaaggcaacgatcatgtctttt

SEQ ID NO: 3235278 - DNA, 25 bp, Homo sapien
gggtaaactatccactatatcaaca

SEQ ID NO: 3235279 - DNA, 25 bp, Homo sapien
tagggttagtcaataacgccgagcc

SEQ ID NO: 3235280 - DNA, 25 bp, Homo sapien
agtatgggcgcatcactgctcttcc

SEQ ID NO: 3235281 - DNA, 25 bp, Homo sapien
gcagtatcccgagcacgttgcagta

SEQ ID NO: 3235282 - DNA, 25 bp, Homo sapien
catggctctcgtttaaccctcacag

SEQ ID NO: 3235283 - DNA, 25 bp, Homo sapien
caccccatgggaactggatgtgagg

SEQ ID NO: 3235284 - DNA, 25 bp, Homo sapien
tcatgtgcattctagtcccgtgtct

SEQ ID NO: 3235285 - DNA, 25 bp, Homo sapien
gggcgactcagtgactcgctgtcca

SEQ ID NO: 3235286 - DNA, 25 bp, Homo sapien
acagaccacatcgtcacgggcgact

SEQ ID NO: 3235287 - DNA, 25 bp, Homo sapien
caaggaatgtcggagaaactggcac

SEQ ID NO: 3235288 - DNA, 25 bp, Homo sapien
tgctaagcagacaacaaggccatcc

SEQ ID NO: 3235289 - DNA, 25 bp, Homo sapien
tatgttgctatgtgcccctgatggg

SEQ ID NO: 3235290 - DNA, 25 bp, Homo sapien
gacgtgacaactccgtggaatcccg

SEQ ID NO: 3235291 - DNA, 25 bp, Homo sapien
gacttttgataccagagtggtcaca

SEQ ID NO: 3235292 - DNA, 25 bp, Homo sapien
cacaacagagatatcgtgaggttcc

SEQ ID NO: 3235293 - DNA, 25 bp, Homo sapien
gaccggtattactgggcacgtgcat

SEQ ID NO: 3235294 - DNA, 25 bp, Homo sapien
gatgtggacctcagaagtcgagact

SEQ ID NO: 3235295 - DNA, 25 bp, Homo sapien
taccaatagctataaggcctgcatc

SEQ ID NO: 3235296 - DNA, 25 bp, Homo sapien
tgagtgacaaagtatccccaagaac

SEQ ID NO: 3235297 - DNA, 25 bp, Homo sapien
taacaattggcacctttagagatcc

SEQ ID NO: 3235298 - DNA, 25 bp, Homo sapien
gagcaacctgctatcaactgagagc

SEQ ID NO: 3235299 - DNA, 25 bp, Homo sapien
gagctgagtcctgaacacccaagac

SEQ ID NO: 3235300 - DNA, 25 bp, Homo sapien
cagaagatcacctaaatttggacag

SEQ ID NO: 3235301 - DNA, 25 bp, Homo sapien
cagcatcgggaagtggaaataacct

SEQ ID NO: 3235302 - DNA, 25 bp, Homo sapien
gacaggctgcatgacatgaaatcca

SEQ ID NO: 3235303 - DNA, 25 bp, Homo sapien
tgaatcctgaacttaaatgcaccgg

SEQ ID NO: 3235304 - DNA, 25 bp, Homo sapien
cgttggccacttgcagtagtttgcc

SEQ ID NO: 3235305 - DNA, 25 bp, Homo sapien
aatgcaccggacacagatttctgta

SEQ ID NO: 3235306 - DNA, 25 bp, Homo sapien
aacatcttgtagagggctttcagac

SEQ ID NO: 3235307 - DNA, 25 bp, Homo sapien
agtgaaggagatagatgatctaata

SEQ ID NO: 3235308 - DNA, 25 bp, Homo sapien
gagatagatgatctaatacttatca

SEQ ID NO: 3235309 - DNA, 25 bp, Homo sapien
aaagtacagttatcaaaagtacaat

SEQ ID NO: 3235310 - DNA, 25 bp, Homo sapien
taaaagtacagttatcaaaagtaca

SEQ ID NO: 3235311 - DNA, 25 bp, Homo sapien
aaggattgcaaattcacatctcaag

SEQ ID NO: 3235312 - DNA, 25 bp, Homo sapien
tgtctgtgtcagcaagaaaaggatt

SEQ ID NO: 3235313 - DNA, 25 bp, Homo sapien
ggtttctaggcgtcgaccatttctg

SEQ ID NO: 3235314 - DNA, 25 bp, Homo sapien
agtaacttcggcaagatctgcatcg

SEQ ID NO: 3235315 - DNA, 25 bp, Homo sapien
ggtgtcatcctgatgatggccatta

SEQ ID NO: 3235316 - DNA, 25 bp, Homo sapien
tttcccacgcccgtggcaatagaca

SEQ ID NO: 3235317 - DNA, 25 bp, Homo sapien
atggtgtcatcctgatgatggccat

SEQ ID NO: 3235318 - DNA, 25 bp, Homo sapien
ccgtggcaatagacacttttttcct

SEQ ID NO: 3235319 - DNA, 25 bp, Homo sapien
gaggaattcctcatcagctgtagaa

SEQ ID NO: 3235320 - DNA, 25 bp, Homo sapien
catatatgtttggacacgtgaatac

SEQ ID NO: 3235321 - DNA, 25 bp, Homo sapien
gattgttcagcgatataaccagcta

SEQ ID NO: 3235322 - DNA, 25 bp, Homo sapien
aagaaagcgttcatgcaattgagga

SEQ ID NO: 3235323 - DNA, 25 bp, Homo sapien
tgcgggatgagtgcagtgtctctgc

SEQ ID NO: 3235324 - DNA, 25 bp, Homo sapien
aggcacaggtggggcagctgcggga

SEQ ID NO: 3235325 - DNA, 25 bp, Homo sapien
cacaggtggggcagctgcgggatga

SEQ ID NO: 3235326 - DNA, 25 bp, Homo sapien
ctgcgggatgagtgcagtgtctctg

SEQ ID NO: 3235327 - DNA, 25 bp, Homo sapien
ccacggtcactgtggcaggaatgcg

SEQ ID NO: 3235328 - DNA, 25 bp, Homo sapien
ggctagggctggatgccacactttg

SEQ ID NO: 3235329 - DNA, 25 bp, Homo sapien
ccatgcagggcgcaggaggaatttc

SEQ ID NO: 3235330 - DNA, 25 bp, Homo sapien
aggttgggtcacagacgctcctgaa

SEQ ID NO: 3235331 - DNA, 25 bp, Homo sapien
ggcccagtactcagaagcctcaact

SEQ ID NO: 3235332 - DNA, 25 bp, Homo sapien
caaggtggccagaaacgtgatgacg

SEQ ID NO: 3235333 - DNA, 25 bp, Homo sapien
agccttcatctatagtggctctcaa

SEQ ID NO: 3235334 - DNA, 25 bp, Homo sapien
cagaagcctcaactgcggcctagag

SEQ ID NO: 3235335 - DNA, 25 bp, Homo sapien
ccccattgcccacacttcttccttc

SEQ ID NO: 3235336 - DNA, 25 bp, Homo sapien
tgttacaccgggtttcccatggctg

SEQ ID NO: 3235337 - DNA, 25 bp, Homo sapien
ggtttcccatggctgtgtcctcgtc

SEQ ID NO: 3235338 - DNA, 25 bp, Homo sapien
tggatgctctttgttacaccgggtt

SEQ ID NO: 3235339 - DNA, 25 bp, Homo sapien
gacttgctgatagttctctcttatg

SEQ ID NO: 3235340 - DNA, 25 bp, Homo sapien
tcctgtccacgtttcttctgtatga

SEQ ID NO: 3235341 - DNA, 25 bp, Homo sapien
gcaagatgacttgctgatagttctc

SEQ ID NO: 3235342 - DNA, 25 bp, Homo sapien
ctgtatgagcgccttcagggcctgg

SEQ ID NO: 3235343 - DNA, 25 bp, Homo sapien
ctctggctggctcgctcctctccat

SEQ ID NO: 3235344 - DNA, 25 bp, Homo sapien
ctcacacgagttcccttccttttca

SEQ ID NO: 3235345 - DNA, 25 bp, Homo sapien
ccacttgtctcctcacacgagttcc

SEQ ID NO: 3235346 - DNA, 25 bp, Homo sapien
gtattttactcagccatattttata

SEQ ID NO: 3235347 - DNA, 25 bp, Homo sapien
tggatgcctctctcgcccttaaggc

SEQ ID NO: 3235348 - DNA, 25 bp, Homo sapien
tactggatgcctctctcgcccttaa

SEQ ID NO: 3235349 - DNA, 25 bp, Homo sapien
tctggattcttctggccaagctcca

SEQ ID NO: 3235350 - DNA, 25 bp, Homo sapien
ccttaaggccgacagcaacaccact

SEQ ID NO: 3235351 - DNA, 25 bp, Homo sapien
tttgaagatgcctaagaaaccagga

SEQ ID NO: 3235352 - DNA, 25 bp, Homo sapien
ctttgaagatgcctaagaaaccagg

SEQ ID NO: 3235353 - DNA, 25 bp, Homo sapien
ttcaagagcacgtgcatgggagaat

SEQ ID NO: 3235354 - DNA, 25 bp, Homo sapien
gatgaaggaactacccagggcacct

SEQ ID NO: 3235355 - DNA, 25 bp, Homo sapien
caagagcacgtgcatgggagaatgt

SEQ ID NO: 3235356 - DNA, 25 bp, Homo sapien
cttgatgaaggaactacccagggca

SEQ ID NO: 3235357 - DNA, 25 bp, Homo sapien
ggatactttgcttggtctgaaccga

SEQ ID NO: 3235358 - DNA, 25 bp, Homo sapien
gcgcgcgtgctgtgtttgactcttg

SEQ ID NO: 3235359 - DNA, 25 bp, Homo sapien
gtgtccacacgataaccaggcagag

SEQ ID NO: 3235360 - DNA, 25 bp, Homo sapien
tcatcagccctttcgacagcaagga

SEQ ID NO: 3235361 - DNA, 25 bp, Homo sapien
tcgctgaagtcgagaaagtggagcc

SEQ ID NO: 3235362 - DNA, 25 bp, Homo sapien
gcctccttgtagtgaagatcgctga

SEQ ID NO: 3235363 - DNA, 25 bp, Homo sapien
gattcagaaccagcgtggaacactg

SEQ ID NO: 3235364 - DNA, 25 bp, Homo sapien
aacactgtgaggacggttcaggcct

SEQ ID NO: 3235365 - DNA, 25 bp, Homo sapien
tgagacccaaggatagagatctccc

SEQ ID NO: 3235366 - DNA, 25 bp, Homo sapien
tccccaagacagtccgggaagcagc

SEQ ID NO: 3235367 - DNA, 25 bp, Homo sapien
gttgtgcgagtgacctgagacccaa

SEQ ID NO: 3235368 - DNA, 25 bp, Homo sapien
gggaagcagcgagagaccgaatcat

SEQ ID NO: 3235369 - DNA, 25 bp, Homo sapien
agggtgctgactaatctggacagca

SEQ ID NO: 3235370 - DNA, 25 bp, Homo sapien
caccagggtgctgactaatctggac

SEQ ID NO: 3235371 - DNA, 25 bp, Homo sapien
ccagggtgctgactaatctggacag

SEQ ID NO: 3235372 - DNA, 25 bp, Homo sapien
gtctctccataaaggggaggcacca

SEQ ID NO: 3235373 - DNA, 25 bp, Homo sapien
gttccttccccgaattgtgctccag

SEQ ID NO: 3235374 - DNA, 25 bp, Homo sapien
catcttctggggacctcacccgttc

SEQ ID NO: 3235375 - DNA, 25 bp, Homo sapien
tctgcggtttcgtgcccaaacccag

SEQ ID NO: 3235376 - DNA, 25 bp, Homo sapien
gtttcgtgcccaaacccagcatctt

SEQ ID NO: 3235377 - DNA, 25 bp, Homo sapien
ctttctgggctttctggctggccgg

SEQ ID NO: 3235378 - DNA, 25 bp, Homo sapien
tctgggctttctggctggccggggg

SEQ ID NO: 3235379 - DNA, 25 bp, Homo sapien
tcagatccagtgctgctttctgggc

SEQ ID NO: 3235380 - DNA, 25 bp, Homo sapien
atctctcagatccagtgctgctttc

SEQ ID NO: 3235381 - DNA, 25 bp, Homo sapien
gagaaggtggaagctgacaacgggc

SEQ ID NO: 3235382 - DNA, 25 bp, Homo sapien
agaaggtggaagctgacaacgggcc

SEQ ID NO: 3235383 - DNA, 25 bp, Homo sapien
agagaaggtggaagctgacaacggg

SEQ ID NO: 3235384 - DNA, 25 bp, Homo sapien
ttagtgatttgctgtgccgagcagt

SEQ ID NO: 3235385 - DNA, 25 bp, Homo sapien
gagcagtgcggtctgtctcctcatc

SEQ ID NO: 3235386 - DNA, 25 bp, Homo sapien
gagctgcagtgaaatggccccacat

SEQ ID NO: 3235387 - DNA, 25 bp, Homo sapien
ctctctgagaaggactaggggacat

SEQ ID NO: 3235388 - DNA, 25 bp, Homo sapien
ggtgtctgtgcgtgtgcagcagcca

SEQ ID NO: 3235389 - DNA, 25 bp, Homo sapien
gctttctgatctgtctcgcactgct

SEQ ID NO: 3235390 - DNA, 25 bp, Homo sapien
tctctgtgtggaagtgctcaccttc

SEQ ID NO: 3235391 - DNA, 25 bp, Homo sapien
cactgctgtgtaagccgcatttcct

SEQ ID NO: 3235392 - DNA, 25 bp, Homo sapien
ccaccagagaccctgcacaatccct

SEQ ID NO: 3235393 - DNA, 25 bp, Homo sapien
cacagggagtcgcaggagcattaag

SEQ ID NO: 3235394 - DNA, 25 bp, Homo sapien
aaaggctctttctcgctgagtccct

SEQ ID NO: 3235395 - DNA, 25 bp, Homo sapien
gaccctgcacaatccctccaaaaag

SEQ ID NO: 3235396 - DNA, 25 bp, Homo sapien
cagttacagggagtagattcgagct

SEQ ID NO: 3235397 - DNA, 25 bp, Homo sapien
tcaccaacactgcagttacagggag

SEQ ID NO: 3235398 - DNA, 25 bp, Homo sapien
cacagtcaccaacactgcagttaca

SEQ ID NO: 3235399 - DNA, 25 bp, Homo sapien
cactgcagttacagggagtagattc

SEQ ID NO: 3235400 - DNA, 25 bp, Homo sapien
ggaagttgtgagaacgtcttctccc

SEQ ID NO: 3235401 - DNA, 25 bp, Homo sapien
gaggctgcagcccttagagagtcca

SEQ ID NO: 3235402 - DNA, 25 bp, Homo sapien
ctatgctgtccttcagtggccccgt

SEQ ID NO: 3235403 - DNA, 25 bp, Homo sapien
tgacccgtgaggagcggtttacaag

SEQ ID NO: 3235404 - DNA, 25 bp, Homo sapien
ctgcaccgtgaggtttctaaaaatg

SEQ ID NO: 3235405 - DNA, 25 bp, Homo sapien
tccctgcaccgtgaggtttctaaaa

SEQ ID NO: 3235406 - DNA, 25 bp, Homo sapien
tttccctgcaccgtgaggtttctaa

SEQ ID NO: 3235407 - DNA, 25 bp, Homo sapien
tcattttccctgcaccgtgaggttt

SEQ ID NO: 3235408 - DNA, 25 bp, Homo sapien
tgatatcctatagaggagtccagcg

SEQ ID NO: 3235409 - DNA, 25 bp, Homo sapien
gagagccagtgcttgttaagagcga

SEQ ID NO: 3235410 - DNA, 25 bp, Homo sapien
gaagtgacatctgtagagagccagt

SEQ ID NO: 3235411 - DNA, 25 bp, Homo sapien
taagagcgagggtgagctcatcatc

SEQ ID NO: 3235412 - DNA, 25 bp, Homo sapien
gcagttctgccttcgctgcctgtaa

SEQ ID NO: 3235413 - DNA, 25 bp, Homo sapien
tatggcgttgtgagcctctctgacc

SEQ ID NO: 3235414 - DNA, 25 bp, Homo sapien
tctggtttgccctcggcatcgtagt

SEQ ID NO: 3235415 - DNA, 25 bp, Homo sapien
cctgtaatgaggtttcggtttcgct

SEQ ID NO: 3235416 - DNA, 25 bp, Homo sapien
gccaatctggttcacaaggcagctc

SEQ ID NO: 3235417 - DNA, 25 bp, Homo sapien
atgccaatctggttcacaaggcagc

SEQ ID NO: 3235418 - DNA, 25 bp, Homo sapien
tgccaatctggttcacaaggcagct

SEQ ID NO: 3235419 - DNA, 25 bp, Homo sapien
cgcacagggcactgagtgaacaccc

SEQ ID NO: 3235420 - DNA, 25 bp, Homo sapien
acagggcactgagtgaacacccacc

SEQ ID NO: 3235421 - DNA, 25 bp, Homo sapien
ggcactgagtgaacacccacctcat

SEQ ID NO: 3235422 - DNA, 25 bp, Homo sapien
agggcactgagtgaacacccacctc

SEQ ID NO: 3235423 - DNA, 25 bp, Homo sapien
gctgtatccacctgacctccaagag

SEQ ID NO: 3235424 - DNA, 25 bp, Homo sapien
tgtatccacctgacctccaagagca

SEQ ID NO: 3235425 - DNA, 25 bp, Homo sapien
agctgtatccacctgacctccaaga

SEQ ID NO: 3235426 - DNA, 25 bp, Homo sapien
ccagctgtatccacctgacctccaa

SEQ ID NO: 3235427 - DNA, 25 bp, Homo sapien
gccagatatggacacttcaccacag

SEQ ID NO: 3235428 - DNA, 25 bp, Homo sapien
tcctcccgagagtgcagaaggcaag

SEQ ID NO: 3235429 - DNA, 25 bp, Homo sapien
ccgaactgtgaagggtgcccatgct

SEQ ID NO: 3235430 - DNA, 25 bp, Homo sapien
ccatgtgccagacgtttgtgagtga

SEQ ID NO: 3235431 - DNA, 25 bp, Homo sapien
gggctcagaagggtgatcacagatt

SEQ ID NO: 3235432 - DNA, 25 bp, Homo sapien
gaagggtgatcacagatttcagctc

SEQ ID NO: 3235433 - DNA, 25 bp, Homo sapien
tcagctccgacccagtatgcacaga

SEQ ID NO: 3235434 - DNA, 25 bp, Homo sapien
gctccgacccagtatgcacagatgg

SEQ ID NO: 3235435 - DNA, 25 bp, Homo sapien
gggctgtgctgagctgggagcctga

SEQ ID NO: 3235436 - DNA, 25 bp, Homo sapien
ggctgtgctgagctgggagcctgac

SEQ ID NO: 3235437 - DNA, 25 bp, Homo sapien
cagggctgtgctgagctgggagcct

SEQ ID NO: 3235438 - DNA, 25 bp, Homo sapien
tcagggctgtgctgagctgggagcc

SEQ ID NO: 3235439 - DNA, 25 bp, Homo sapien
tggctatttacaggttggatctcac

SEQ ID NO: 3235440 - DNA, 25 bp, Homo sapien
agacacccagtggacatagcacact

SEQ ID NO: 3235441 - DNA, 25 bp, Homo sapien
atcagcacagaattcttatctgttc

SEQ ID NO: 3235442 - DNA, 25 bp, Homo sapien
tctgttctattttaacctgggcagg

SEQ ID NO: 3235443 - DNA, 25 bp, Homo sapien
tgcatgatcccttcacagaaacaat

SEQ ID NO: 3235444 - DNA, 25 bp, Homo sapien
ttgcatgatcccttcacagaaacaa

SEQ ID NO: 3235445 - DNA, 25 bp, Homo sapien
cttgcatgatcccttcacagaaaca

SEQ ID NO: 3235446 - DNA, 25 bp, Homo sapien
tcatcctttggctgttgaacgggtg

SEQ ID NO: 3235447 - DNA, 25 bp, Homo sapien
gcccctgagctcacgacaaggaaag

SEQ ID NO: 3235448 - DNA, 25 bp, Homo sapien
tgaacgggtggcttatggcccctga

SEQ ID NO: 3235449 - DNA, 25 bp, Homo sapien
tgtcaaagggcagcaagcctccagt

SEQ ID NO: 3235450 - DNA, 25 bp, Homo sapien
ggtactgcttttcccctgaagcgct

SEQ ID NO: 3235451 - DNA, 25 bp, Homo sapien
gacataaacagaaattcaacgtgat

SEQ ID NO: 3235452 - DNA, 25 bp, Homo sapien
ttcaacgtgatggtcagcgttgagc

SEQ ID NO: 3235453 - DNA, 25 bp, Homo sapien
gatgccacggtgttggtgggtactg

SEQ ID NO: 3235454 - DNA, 25 bp, Homo sapien
gaggaaccttgcacacataggtgag

SEQ ID NO: 3235455 - DNA, 25 bp, Homo sapien
taaccgtggttagcagtgtccttcc

SEQ ID NO: 3235456 - DNA, 25 bp, Homo sapien
tcaggtcagatcaatccgagatgtg

SEQ ID NO: 3235457 - DNA, 25 bp, Homo sapien
tggcttaggaaaactcatggcagag

SEQ ID NO: 3235458 - DNA, 25 bp, Homo sapien
cagcattggttataggccccactgt

SEQ ID NO: 3235459 - DNA, 25 bp, Homo sapien
tgcaggacagccatgcgccgctgca

SEQ ID NO: 3235460 - DNA, 25 bp, Homo sapien
cgccgctgcactctctttggctgag

SEQ ID NO: 3235461 - DNA, 25 bp, Homo sapien
taggccccactgtggacccaaagtg

SEQ ID NO: 3235462 - DNA, 25 bp, Homo sapien
ctccaagagtgaaggggcagagtcc

SEQ ID NO: 3235463 - DNA, 25 bp, Homo sapien
aagagtgaaggggcagagtccccac

SEQ ID NO: 3235464 - DNA, 25 bp, Homo sapien
ccaagagtgaaggggcagagtcccc

SEQ ID NO: 3235465 - DNA, 25 bp, Homo sapien
tccaagagtgaaggggcagagtccc

SEQ ID NO: 3235466 - DNA, 25 bp, Homo sapien
tactgtttgctctccaagccaccag

SEQ ID NO: 3235467 - DNA, 25 bp, Homo sapien
ccggtgatgctcagcttgggagact

SEQ ID NO: 3235468 - DNA, 25 bp, Homo sapien
taagctcagcatggctgtgacgggt

SEQ ID NO: 3235469 - DNA, 25 bp, Homo sapien
tgtgcacaacgccaggacaactctt

SEQ ID NO: 3235470 - DNA, 25 bp, Homo sapien
ggcagagaagaaactcgcggtgttt

SEQ ID NO: 3235471 - DNA, 25 bp, Homo sapien
ctcgcggtgttttttattggaagca

SEQ ID NO: 3235472 - DNA, 25 bp, Homo sapien
caccggaattactggacttaggatg

SEQ ID NO: 3235473 - DNA, 25 bp, Homo sapien
tttattggaagcaccggaattactg

SEQ ID NO: 3235474 - DNA, 25 bp, Homo sapien
agaactggtgaaacctgcacgcctg

SEQ ID NO: 3235475 - DNA, 25 bp, Homo sapien
gcacgcctgctttgaagatctcaag

SEQ ID NO: 3235476 - DNA, 25 bp, Homo sapien
tgaagatctcaagaacaatttgctt

SEQ ID NO: 3235477 - DNA, 25 bp, Homo sapien
tcaagaacaatttgctttgctcctg

SEQ ID NO: 3235478 - DNA, 25 bp, Homo sapien
gtttgttttacaagtggactcttgc

SEQ ID NO: 3235479 - DNA, 25 bp, Homo sapien
cttttctacctgcatgaagtactta

SEQ ID NO: 3235480 - DNA, 25 bp, Homo sapien
tcgccctctaactgcttcagcaggg

SEQ ID NO: 3235481 - DNA, 25 bp, Homo sapien
gatctttccagaccagagagcggaa

SEQ ID NO: 3235482 - DNA, 25 bp, Homo sapien
ggaggtctgggcctcgccctctaac

SEQ ID NO: 3235483 - DNA, 25 bp, Homo sapien
attgtcccgagtctggaggaggtct

SEQ ID NO: 3235484 - DNA, 25 bp, Homo sapien
taaaggttcggtaatgccaaagtca

SEQ ID NO: 3235485 - DNA, 25 bp, Homo sapien
aaaggttcggtaatgccaaagtcag

SEQ ID NO: 3235486 - DNA, 25 bp, Homo sapien
ttccaaaatcagagcatgctggccc

SEQ ID NO: 3235487 - DNA, 25 bp, Homo sapien
agattccaaaatcagagcatgctgg

SEQ ID NO: 3235488 - DNA, 25 bp, Homo sapien
aactcactatcaggacgatagctcc

SEQ ID NO: 3235489 - DNA, 25 bp, Homo sapien
ctccaagggggatggtagtaaagca

SEQ ID NO: 3235490 - DNA, 25 bp, Homo sapien
ctcactatcaggacgatagctccaa

SEQ ID NO: 3235491 - DNA, 25 bp, Homo sapien
actatcaggacgatagctccaaggg

SEQ ID NO: 3235492 - DNA, 25 bp, Homo sapien
acagcaaagcgggagcaggtgtctt

SEQ ID NO: 3235493 - DNA, 25 bp, Homo sapien
atcatggtggacagcaaagcgggag

SEQ ID NO: 3235494 - DNA, 25 bp, Homo sapien
gcaaagcgggagcaggtgtcttcca

SEQ ID NO: 3235495 - DNA, 25 bp, Homo sapien
gtggacagcaaagcgggagcaggtg

SEQ ID NO: 3235496 - DNA, 25 bp, Homo sapien
gagtcgtatgacctaagatgtcccc

SEQ ID NO: 3235497 - DNA, 25 bp, Homo sapien
gatgtcccctccaactactttggta

SEQ ID NO: 3235498 - DNA, 25 bp, Homo sapien
tctttgagaagagagtcgtatgacc

SEQ ID NO: 3235499 - DNA, 25 bp, Homo sapien
tataacaagagtctttgagaagaga

SEQ ID NO: 3235500 - DNA, 25 bp, Homo sapien
tgcagtcattcccatctgcaaatac

SEQ ID NO: 3235501 - DNA, 25 bp, Homo sapien
catctttctctgtcgtggacgtctt

SEQ ID NO: 3235502 - DNA, 25 bp, Homo sapien
gctgtgtccttctatgcattttgca

SEQ ID NO: 3235503 - DNA, 25 bp, Homo sapien
gacgtcttctcagtgtgttgaggtg

SEQ ID NO: 3235504 - DNA, 25 bp, Homo sapien
tgagccagtcttcacttcatgagaa

SEQ ID NO: 3235505 - DNA, 25 bp, Homo sapien
caattaatcaaacaatctgagccag

SEQ ID NO: 3235506 - DNA, 25 bp, Homo sapien
tggcagaaaatctcctacgatgtgg

SEQ ID NO: 3235507 - DNA, 25 bp, Homo sapien
aaacaactctgtacaggtaagggag

SEQ ID NO: 3235508 - DNA, 25 bp, Homo sapien
gactgccattacgtacagcgtgtgt

SEQ ID NO: 3235509 - DNA, 25 bp, Homo sapien
tgggtcaggagatgactgccattac

SEQ ID NO: 3235510 - DNA, 25 bp, Homo sapien
taggctgagacaataggttttatta

SEQ ID NO: 3235511 - DNA, 25 bp, Homo sapien
tgtgttactcacaattcaagagcag

SEQ ID NO: 3235512 - DNA, 25 bp, Homo sapien
aacatcagcaatcaggccagcagga

SEQ ID NO: 3235513 - DNA, 25 bp, Homo sapien
tgctttgccatctttgacatttgaa

SEQ ID NO: 3235514 - DNA, 25 bp, Homo sapien
gggtcaactgtcaacatcagcaatc

SEQ ID NO: 3235515 - DNA, 25 bp, Homo sapien
catggacaattcagaactgttggta

SEQ ID NO: 3235516 - DNA, 25 bp, Homo sapien
tctcgcacagggtggttccgtttct

SEQ ID NO: 3235517 - DNA, 25 bp, Homo sapien
tatttggtgccggaattaagcaacc

SEQ ID NO: 3235518 - DNA, 25 bp, Homo sapien
aagaagcgccctcagtgtgcaacgt

SEQ ID NO: 3235519 - DNA, 25 bp, Homo sapien
gatgcatgccttgatgccgtgatga

SEQ ID NO: 3235520 - DNA, 25 bp, Homo sapien
gggtcatcagtatatgaagttcttt

SEQ ID NO: 3235521 - DNA, 25 bp, Homo sapien
tatggctttgactcccaggcatagg

SEQ ID NO: 3235522 - DNA, 25 bp, Homo sapien
ggtgggttgaaataagagcctacga

SEQ ID NO: 3235523 - DNA, 25 bp, Homo sapien
gagcctacgagtagtcacagatttg

SEQ ID NO: 3235524 - DNA, 25 bp, Homo sapien
agtagcagcttcaaaggagcattgc

SEQ ID NO: 3235525 - DNA, 25 bp, Homo sapien
cacattcacagcacagttaaaggga

SEQ ID NO: 3235526 - DNA, 25 bp, Homo sapien
aataagcagaaccagaagtagcagc

SEQ ID NO: 3235527 - DNA, 25 bp, Homo sapien
gaaacagtagtgctccttagagact

SEQ ID NO: 3235528 - DNA, 25 bp, Homo sapien
gctcacatcaaagcccccacactga

SEQ ID NO: 3235529 - DNA, 25 bp, Homo sapien
aagcccccacactgaataaatacca

SEQ ID NO: 3235530 - DNA, 25 bp, Homo sapien
tcacatcaaagcccccacactgaat

SEQ ID NO: 3235531 - DNA, 25 bp, Homo sapien
caaagcccccacactgaataaatac

SEQ ID NO: 3235532 - DNA, 25 bp, Homo sapien
tggttccggggatcctgtgcaacac

SEQ ID NO: 3235533 - DNA, 25 bp, Homo sapien
gatggttccggggatcctgtgcaac

SEQ ID NO: 3235534 - DNA, 25 bp, Homo sapien
ctgatggttccggggatcctgtgca

SEQ ID NO: 3235535 - DNA, 25 bp, Homo sapien
gttccggggatcctgtgcaacacag

SEQ ID NO: 3235536 - DNA, 25 bp, Homo sapien
ggcatcactggtcctgctgtgcaga

SEQ ID NO: 3235537 - DNA, 25 bp, Homo sapien
gtgtctctgcttccgaaaatagtgc

SEQ ID NO: 3235538 - DNA, 25 bp, Homo sapien
tgctttttcgtgaggctgtctggcc

SEQ ID NO: 3235539 - DNA, 25 bp, Homo sapien
acacgaacaacaggtgcagaggcac

SEQ ID NO: 3235540 - DNA, 25 bp, Homo sapien
tcacccccttaggaatgtgtccaac

SEQ ID NO: 3235541 - DNA, 25 bp, Homo sapien
gagagcccggccgtgcgaagcttca

SEQ ID NO: 3235542 - DNA, 25 bp, Homo sapien
ccccttaggaatgtgtccaaccaca

SEQ ID NO: 3235543 - DNA, 25 bp, Homo sapien
ccggccgtgcgaagcttcaggtcag

SEQ ID NO: 3235544 - DNA, 25 bp, Homo sapien
gaatgccacgcggtacaaaggaaaa

SEQ ID NO: 3235545 - DNA, 25 bp, Homo sapien
tccttctaatctgctatgcttgaat

SEQ ID NO: 3235546 - DNA, 25 bp, Homo sapien
taatctgctatgcttgaatgccacg

SEQ ID NO: 3235547 - DNA, 25 bp, Homo sapien
ttattacatccttgtggcacatttt

SEQ ID NO: 3235548 - DNA, 25 bp, Homo sapien
cagcccattggtagacgtgtgtttc

SEQ ID NO: 3235549 - DNA, 25 bp, Homo sapien
aatatgtacataggcagcactagcg

SEQ ID NO: 3235550 - DNA, 25 bp, Homo sapien
gaggtgctgcattgcctgcggtcaa

SEQ ID NO: 3235551 - DNA, 25 bp, Homo sapien
caagttcaaggaccaacaagggcag

SEQ ID NO: 3235552 - DNA, 25 bp, Homo sapien
ccaggcccgcgtcaagagctgttaa

SEQ ID NO: 3235553 - DNA, 25 bp, Homo sapien
aagcctctgactctccgcggtggtt

SEQ ID NO: 3235554 - DNA, 25 bp, Homo sapien
gaaaacatcggatatcacccaggcc

SEQ ID NO: 3235555 - DNA, 25 bp, Homo sapien
tcaaagaggagagcaatccggtgcc

SEQ ID NO: 3235556 - DNA, 25 bp, Homo sapien
caaaccggatccttgactgcatcga

SEQ ID NO: 3235557 - DNA, 25 bp, Homo sapien
taaatgttgacagacgcactcagtg

SEQ ID NO: 3235558 - DNA, 25 bp, Homo sapien
tgaccaactcaaagctccatacggg

SEQ ID NO: 3235559 - DNA, 25 bp, Homo sapien
tcagaagtgtcacaaggtcgcggcc

SEQ ID NO: 3235560 - DNA, 25 bp, Homo sapien
cagacagttcaggccgccatggagg

SEQ ID NO: 3235561 - DNA, 25 bp, Homo sapien
tcaggccgccatggagggatagcat

SEQ ID NO: 3235562 - DNA, 25 bp, Homo sapien
atggagaattgcagcagtgtcagac

SEQ ID NO: 3235563 - DNA, 25 bp, Homo sapien
agatggagaattgcagcagtgtcag

SEQ ID NO: 3235564 - DNA, 25 bp, Homo sapien
gccatgtggtggtcccgtttgtctg

SEQ ID NO: 3235565 - DNA, 25 bp, Homo sapien
tgccatgtggtggtcccgtttgtct

SEQ ID NO: 3235566 - DNA, 25 bp, Homo sapien
ccatgtggtggtcccgtttgtctgg

SEQ ID NO: 3235567 - DNA, 25 bp, Homo sapien
gcgtcagatgaaaaagaggcactca

SEQ ID NO: 3235568 - DNA, 25 bp, Homo sapien
gacttgtccctaggcacatccagga

SEQ ID NO: 3235569 - DNA, 25 bp, Homo sapien
caggaatggactttgttggagcgtc

SEQ ID NO: 3235570 - DNA, 25 bp, Homo sapien
atcccctggatgcatgcggctagac

SEQ ID NO: 3235571 - DNA, 25 bp, Homo sapien
ccctgaacaggctgccgcgggagca

SEQ ID NO: 3235572 - DNA, 25 bp, Homo sapien
ccagcagacacgcagtaagtatagg

SEQ ID NO: 3235573 - DNA, 25 bp, Homo sapien
gaagtggattgaagggagggtggcc

SEQ ID NO: 3235574 - DNA, 25 bp, Homo sapien
tataggcctccgctgtgtggaatgt

SEQ ID NO: 3235575 - DNA, 25 bp, Homo sapien
catgaaggcccgtttgtagtgggaa

SEQ ID NO: 3235576 - DNA, 25 bp, Homo sapien
tctgagagctcagatgaggcgatca

SEQ ID NO: 3235577 - DNA, 25 bp, Homo sapien
tcacaaatgtttgcagtgtgagcaa

SEQ ID NO: 3235578 - DNA, 25 bp, Homo sapien
aaacaagacggaggcatgaaggccc

SEQ ID NO: 3235579 - DNA, 25 bp, Homo sapien
tggggcaatggcttgttgatttctc

SEQ ID NO: 3235580 - DNA, 25 bp, Homo sapien
cttctacagttgtggagatggtgac

SEQ ID NO: 3235581 - DNA, 25 bp, Homo sapien
ggctatagttgccggatggagacct

SEQ ID NO: 3235582 - DNA, 25 bp, Homo sapien
tggagacctgaatggcttctacagt

SEQ ID NO: 3235583 - DNA, 25 bp, Homo sapien
ggaagagagcagcgtgtcagcacgt

SEQ ID NO: 3235584 - DNA, 25 bp, Homo sapien
gggaagagagcagcgtgtcagcacg

SEQ ID NO: 3235585 - DNA, 25 bp, Homo sapien
ggggaagagagcagcgtgtcagcac

SEQ ID NO: 3235586 - DNA, 25 bp, Homo sapien
caactgtctcttggtgcatgttgtc

SEQ ID NO: 3235587 - DNA, 25 bp, Homo sapien
gtgcatgttgtcagcccggcgcatg

SEQ ID NO: 3235588 - DNA, 25 bp, Homo sapien
tcttggtgcatgttgtcagcccggc

SEQ ID NO: 3235589 - DNA, 25 bp, Homo sapien
cagcccggcgcatgctctgagttct

SEQ ID NO: 3235590 - DNA, 25 bp, Homo sapien
ccgccccccagaggcccagttccag

SEQ ID NO: 3235591 - DNA, 25 bp, Homo sapien
cgccccccagaggcccagttccagg

SEQ ID NO: 3235592 - DNA, 25 bp, Homo sapien
aatctgtgcatgattcttgctttgc

SEQ ID NO: 3235593 - DNA, 25 bp, Homo sapien
tgaaatctgtgcatgattcttgctt

SEQ ID NO: 3235594 - DNA, 25 bp, Homo sapien
tatgtgctcgagtccatatgctttg

SEQ ID NO: 3235595 - DNA, 25 bp, Homo sapien
aatgcagtatgtgctcgagtccata

SEQ ID NO: 3235596 - DNA, 25 bp, Homo sapien
cattcggaaactggtgagaggcagt

SEQ ID NO: 3235597 - DNA, 25 bp, Homo sapien
gagaggcagtaggtatcttccaaaa

SEQ ID NO: 3235598 - DNA, 25 bp, Homo sapien
aaactggtgagaggcagtaggtatc

SEQ ID NO: 3235599 - DNA, 25 bp, Homo sapien
tctggctaccattcggaaactggtg

SEQ ID NO: 3235600 - DNA, 25 bp, Homo sapien
gtgactgacttggtcctccaattgt

SEQ ID NO: 3235601 - DNA, 25 bp, Homo sapien
aattgttatttgctgtccagacaca

SEQ ID NO: 3235602 - DNA, 25 bp, Homo sapien
agtgactgacttggtcctccaattg

SEQ ID NO: 3235603 - DNA, 25 bp, Homo sapien
gactggatgtttgccggactcttca

SEQ ID NO: 3235604 - DNA, 25 bp, Homo sapien
cattgactggatgtttgccggactc

SEQ ID NO: 3235605 - DNA, 25 bp, Homo sapien
ggcattgactggatgtttgccggac

SEQ ID NO: 3235606 - DNA, 25 bp, Homo sapien
gatgtttgccggactcttcacttcc

SEQ ID NO: 3235607 - DNA, 25 bp, Homo sapien
gaggagctctgaggcgtgtgcattt

SEQ ID NO: 3235608 - DNA, 25 bp, Homo sapien
tctgaggcgtgtgcatttgtagtct

SEQ ID NO: 3235609 - DNA, 25 bp, Homo sapien
ctgcagcgttggagaggagctctga

SEQ ID NO: 3235610 - DNA, 25 bp, Homo sapien
gagctctgaggcgtgtgcatttgta

SEQ ID NO: 3235611 - DNA, 25 bp, Homo sapien
taagacttgaactgggatctctagg

SEQ ID NO: 3235612 - DNA, 25 bp, Homo sapien
tggcaaacacatgcgtgccatgaag

SEQ ID NO: 3235613 - DNA, 25 bp, Homo sapien
tgatgtgtcaaagtccggaatttca

SEQ ID NO: 3235614 - DNA, 25 bp, Homo sapien
ggatctgtagtcaaactggaagcaa

SEQ ID NO: 3235615 - DNA, 25 bp, Homo sapien
gaaacgcccgggtcagtctgtgtag

SEQ ID NO: 3235616 - DNA, 25 bp, Homo sapien
aagggtcgcgggtgtaactcatgcc

SEQ ID NO: 3235617 - DNA, 25 bp, Homo sapien
tagctcagaagagcgaggtggcttt

SEQ ID NO: 3235618 - DNA, 25 bp, Homo sapien
gctttcgctcgtttctgacccgcta

SEQ ID NO: 3235619 - DNA, 25 bp, Homo sapien
gagccgctgcttgttgctcccgccg

SEQ ID NO: 3235620 - DNA, 25 bp, Homo sapien
ccgctgcttgttgctcccgccgccg

SEQ ID NO: 3235621 - DNA, 25 bp, Homo sapien
tgcttgttgctcccgccgccgcgac

SEQ ID NO: 3235622 - DNA, 25 bp, Homo sapien
gctgcttgttgctcccgccgccgcg

SEQ ID NO: 3235623 - DNA, 25 bp, Homo sapien
gatgggcctccttttcgttctagct

SEQ ID NO: 3235624 - DNA, 25 bp, Homo sapien
caagtaatgctgtcgtttcggctga

SEQ ID NO: 3235625 - DNA, 25 bp, Homo sapien
cagccctgctaactggatggtcgca

SEQ ID NO: 3235626 - DNA, 25 bp, Homo sapien
tccttggaggtggtcggtgtcacaa

SEQ ID NO: 3235627 - DNA, 25 bp, Homo sapien
cgttgaaaactgaggccttaggctt

SEQ ID NO: 3235628 - DNA, 25 bp, Homo sapien
gccactgagacgtcttgaagtcaaa

SEQ ID NO: 3235629 - DNA, 25 bp, Homo sapien
tggaagtgctccagcataaagcctc

SEQ ID NO: 3235630 - DNA, 25 bp, Homo sapien
tcgccctgcggtgaagaaacttcgg

SEQ ID NO: 3235631 - DNA, 25 bp, Homo sapien
taagctatgatagcacaacctgagt

SEQ ID NO: 3235632 - DNA, 25 bp, Homo sapien
tgcacttgtcacacgggctgtactt

SEQ ID NO: 3235633 - DNA, 25 bp, Homo sapien
tatacttttaaagcaagggaccaca

SEQ ID NO: 3235634 - DNA, 25 bp, Homo sapien
tacaaacagctatggtctcccagga

SEQ ID NO: 3235635 - DNA, 25 bp, Homo sapien
tgctgacatgagtggactcccacgt

SEQ ID NO: 3235636 - DNA, 25 bp, Homo sapien
ctttcgtaaacacaaggcaggcagt

SEQ ID NO: 3235637 - DNA, 25 bp, Homo sapien
tagtttggaagctatctgcacccag

SEQ ID NO: 3235638 - DNA, 25 bp, Homo sapien
aacacgttccttgggaagtcaagca

SEQ ID NO: 3235639 - DNA, 25 bp, Homo sapien
gtttcccagctaatcaatgaagtga

SEQ ID NO: 3235640 - DNA, 25 bp, Homo sapien
tgacatgtcatcaagggcctaagaa

SEQ ID NO: 3235641 - DNA, 25 bp, Homo sapien
gggcctggaaaattgcaagcaacac

SEQ ID NO: 3235642 - DNA, 25 bp, Homo sapien
tgtgtatatcagtaccatgtggctg

SEQ ID NO: 3235643 - DNA, 25 bp, Homo sapien
gcaaagctatagacaccatgtccct

SEQ ID NO: 3235644 - DNA, 25 bp, Homo sapien
gactactttatagtttgtcaccata

SEQ ID NO: 3235645 - DNA, 25 bp, Homo sapien
ctgcagaacgtcaaggcaaagctat

SEQ ID NO: 3235646 - DNA, 25 bp, Homo sapien
attgctctgcagaacgtcaaggcaa

SEQ ID NO: 3235647 - DNA, 25 bp, Homo sapien
cagttgtgggactttcttatggcag

SEQ ID NO: 3235648 - DNA, 25 bp, Homo sapien
ggaggtgtggaagtctcccccacag

SEQ ID NO: 3235649 - DNA, 25 bp, Homo sapien
tctgtagatgccttgttctcagact

SEQ ID NO: 3235650 - DNA, 25 bp, Homo sapien
caaagaatgcccaagcatgctggca

SEQ ID NO: 3235651 - DNA, 25 bp, Homo sapien
tgatgttgcagagacaactgggaaa

SEQ ID NO: 3235652 - DNA, 25 bp, Homo sapien
cacaagtcgatcttatttagaaccc

SEQ ID NO: 3235653 - DNA, 25 bp, Homo sapien
taaagtcttcctattgctcttaaaa

SEQ ID NO: 3235654 - DNA, 25 bp, Homo sapien
gcatttcattgatgttgcagagaca

SEQ ID NO: 3235655 - DNA, 25 bp, Homo sapien
aaagaatcacccatagcccatcact

SEQ ID NO: 3235656 - DNA, 25 bp, Homo sapien
tcttaataaaagtcaaatctcttct

SEQ ID NO: 3235657 - DNA, 25 bp, Homo sapien
aataaaagtcaaatctcttctcaaa

SEQ ID NO: 3235658 - DNA, 25 bp, Homo sapien
tgttttgatgtacttccctgtggtt

SEQ ID NO: 3235659 - DNA, 25 bp, Homo sapien
aaagctcggagcatagccgtgccaa

SEQ ID NO: 3235660 - DNA, 25 bp, Homo sapien
taacccataatgaagctgaactatg

SEQ ID NO: 3235661 - DNA, 25 bp, Homo sapien
catcccagggtgctctaacagtttc

SEQ ID NO: 3235662 - DNA, 25 bp, Homo sapien
cttaagatcaggaactaggcctttc

SEQ ID NO: 3235663 - DNA, 25 bp, Homo sapien
aatgagggacctctatctcctgtac

SEQ ID NO: 3235664 - DNA, 25 bp, Homo sapien
tttgttctccaagcgcactcagtgc

SEQ ID NO: 3235665 - DNA, 25 bp, Homo sapien
caaagcctctgaactggcgctgtgg

SEQ ID NO: 3235666 - DNA, 25 bp, Homo sapien
tccaaggtgatgtaggcgaactcca

SEQ ID NO: 3235667 - DNA, 25 bp, Homo sapien
ttaaggctggatattagcaacagat

SEQ ID NO: 3235668 - DNA, 25 bp, Homo sapien
aaggctggatattagcaacagatac

SEQ ID NO: 3235669 - DNA, 25 bp, Homo sapien
gatattagcaacagatacatataca

SEQ ID NO: 3235670 - DNA, 25 bp, Homo sapien
gctggatattagcaacagatacata

SEQ ID NO: 3235671 - DNA, 25 bp, Homo sapien
cttggataatcagtaaggcctctcc

SEQ ID NO: 3235672 - DNA, 25 bp, Homo sapien
ggcaggcagttatacttgcagatca

SEQ ID NO: 3235673 - DNA, 25 bp, Homo sapien
tcaggagctcgatcaattctaaggc

SEQ ID NO: 3235674 - DNA, 25 bp, Homo sapien
cagagattgttcagccttaccagag

SEQ ID NO: 3235675 - DNA, 25 bp, Homo sapien
ctgagagagtaggatctggccgtcc

SEQ ID NO: 3235676 - DNA, 25 bp, Homo sapien
aagctgtgctactgcctggtgggaa

SEQ ID NO: 3235677 - DNA, 25 bp, Homo sapien
aagggaagtcgagaagaaggtcctg

SEQ ID NO: 3235678 - DNA, 25 bp, Homo sapien
cacagactgccgtggctgagagagt

SEQ ID NO: 3235679 - DNA, 25 bp, Homo sapien
tactgacgccctgtttggtggacca

SEQ ID NO: 3235680 - DNA, 25 bp, Homo sapien
cccttgctggctataatgtgatgga

SEQ ID NO: 3235681 - DNA, 25 bp, Homo sapien
cctgagtctgggatatggaacacac

SEQ ID NO: 3235682 - DNA, 25 bp, Homo sapien
ggaccagtgccctgtaataaaagca

SEQ ID NO: 3235683 - DNA, 25 bp, Homo sapien
ccctgtgtccagaagtgggcctgaa

SEQ ID NO: 3235684 - DNA, 25 bp, Homo sapien
cactccagcgctgatgatgaagatg

SEQ ID NO: 3235685 - DNA, 25 bp, Homo sapien
gaaactgatgtcttccacgtcagcc

SEQ ID NO: 3235686 - DNA, 25 bp, Homo sapien
gatggaactcctgtggatggactga

SEQ ID NO: 3235687 - DNA, 25 bp, Homo sapien
cacagaaggatctgctgatattgca

SEQ ID NO: 3235688 - DNA, 25 bp, Homo sapien
agagttgcacagaaggatctgctga

SEQ ID NO: 3235689 - DNA, 25 bp, Homo sapien
gctgatattgcatattcaaaactag

SEQ ID NO: 3235690 - DNA, 25 bp, Homo sapien
ttcaaaactaggacattcctgatgc

SEQ ID NO: 3235691 - DNA, 25 bp, Homo sapien
ggccagctgcgggaacttgcttcgc

SEQ ID NO: 3235692 - DNA, 25 bp, Homo sapien
tttcagcaagcgaatctgtccatcc

SEQ ID NO: 3235693 - DNA, 25 bp, Homo sapien
cagcgtcctgtgcacagagcatgtt

SEQ ID NO: 3235694 - DNA, 25 bp, Homo sapien
aataagtgggtttgtaggagtcaga

SEQ ID NO: 3235695 - DNA, 25 bp, Homo sapien
gtagttggaaccatgcaggaaagct

SEQ ID NO: 3235696 - DNA, 25 bp, Homo sapien
gctctaaaccgtctctgaaaattgg

SEQ ID NO: 3235697 - DNA, 25 bp, Homo sapien
tgcaggaaagctctaaaccgtctct

SEQ ID NO: 3235698 - DNA, 25 bp, Homo sapien
ttatatcacacgagtagttggaacc

SEQ ID NO: 3235699 - DNA, 25 bp, Homo sapien
tgcggccgacattcatcagatcacc

SEQ ID NO: 3235700 - DNA, 25 bp, Homo sapien
tgaaacgaggtctcctaacggcacc

SEQ ID NO: 3235701 - DNA, 25 bp, Homo sapien
caagtcttcctgtgcggccgacatt

SEQ ID NO: 3235702 - DNA, 25 bp, Homo sapien
tcagatctgagactggacggaggcc

SEQ ID NO: 3235703 - DNA, 25 bp, Homo sapien
ccacgaggtgtgagctgcactggtt

SEQ ID NO: 3235704 - DNA, 25 bp, Homo sapien
cacgaggtgtgagctgcactggttg

SEQ ID NO: 3235705 - DNA, 25 bp, Homo sapien
gggagttgaattttttggcactcag

SEQ ID NO: 3235706 - DNA, 25 bp, Homo sapien
ggagttgaattttttggcactcagc

SEQ ID NO: 3235707 - DNA, 25 bp, Homo sapien
catgggaattcgtctcaacagtgca

SEQ ID NO: 3235708 - DNA, 25 bp, Homo sapien
tttgaatagtcatccggcaggtttg

SEQ ID NO: 3235709 - DNA, 25 bp, Homo sapien
actgtatttctgcatgttgtcattg

SEQ ID NO: 3235710 - DNA, 25 bp, Homo sapien
acagtgcaactggaactgtatttct

SEQ ID NO: 3235711 - DNA, 25 bp, Homo sapien
gagcatctttgggtggtccatccat

SEQ ID NO: 3235712 - DNA, 25 bp, Homo sapien
aggagcatctttgggtggtccatcc

SEQ ID NO: 3235713 - DNA, 25 bp, Homo sapien
ggagcatctttgggtggtccatcca

SEQ ID NO: 3235714 - DNA, 25 bp, Homo sapien
tctaggtccaatctctgtgcagttt

SEQ ID NO: 3235715 - DNA, 25 bp, Homo sapien
tgtcttggtattggtaactcttgac

SEQ ID NO: 3235716 - DNA, 25 bp, Homo sapien
tttgatgtcttggtattggtaactc

SEQ ID NO: 3235717 - DNA, 25 bp, Homo sapien
tgtgcagtttgatgtcttggtattg

SEQ ID NO: 3235718 - DNA, 25 bp, Homo sapien
tgtttgctttttgtcgtaaccatac

SEQ ID NO: 3235719 - DNA, 25 bp, Homo sapien
tcttctcccttctcatgctttattt

SEQ ID NO: 3235720 - DNA, 25 bp, Homo sapien
taaccatacagccaaccttcatgct

SEQ ID NO: 3235721 - DNA, 25 bp, Homo sapien
tcccttctcatgctttatttttgcc

SEQ ID NO: 3235722 - DNA, 25 bp, Homo sapien
ggagagtgccaggaacagcacatat

SEQ ID NO: 3235723 - DNA, 25 bp, Homo sapien
ccggagagtgccaggaacagcacat

SEQ ID NO: 3235724 - DNA, 25 bp, Homo sapien
ggggggccggagagtgccaggaaca

SEQ ID NO: 3235725 - DNA, 25 bp, Homo sapien
gggccggagagtgccaggaacagca

SEQ ID NO: 3235726 - DNA, 25 bp, Homo sapien
tcaaggggtggagggttgaacctca

SEQ ID NO: 3235727 - DNA, 25 bp, Homo sapien
gggtggagggttgaacctcaggata

SEQ ID NO: 3235728 - DNA, 25 bp, Homo sapien
gtggagggttgaacctcaggatata

SEQ ID NO: 3235729 - DNA, 25 bp, Homo sapien
ggagggttgaacctcaggatataac

SEQ ID NO: 3235730 - DNA, 25 bp, Homo sapien
tttgtgctcaggcaaaaatcctaca

SEQ ID NO: 3235731 - DNA, 25 bp, Homo sapien
aatggatttgccctggggcagaaag

SEQ ID NO: 3235732 - DNA, 25 bp, Homo sapien
gtatttgtgctcaggcaaaaatcct

SEQ ID NO: 3235733 - DNA, 25 bp, Homo sapien
ggcagcacaagggaagcctgcgctt

SEQ ID NO: 3235734 - DNA, 25 bp, Homo sapien
ggccacagtcaattgaagacattta

SEQ ID NO: 3235735 - DNA, 25 bp, Homo sapien
ctacttgtgcttcgtctttttcacg

SEQ ID NO: 3235736 - DNA, 25 bp, Homo sapien
ttttcacggagtctttgatggaaaa

SEQ ID NO: 3235737 - DNA, 25 bp, Homo sapien
tgtgcttcgtctttttcacggagtc

SEQ ID NO: 3235738 - DNA, 25 bp, Homo sapien
tgtactggcaccaatgcccctattt

SEQ ID NO: 3235739 - DNA, 25 bp, Homo sapien
atgcccctattttggtgtgccatct

SEQ ID NO: 3235740 - DNA, 25 bp, Homo sapien
cctattttggtgtgccatcttccct

SEQ ID NO: 3235741 - DNA, 25 bp, Homo sapien
cccctattttggtgtgccatcttcc

SEQ ID NO: 3235742 - DNA, 25 bp, Homo sapien
gaactaggatctgatcctaacatct

SEQ ID NO: 3235743 - DNA, 25 bp, Homo sapien
taccctgaatttatgtttaggattc

SEQ ID NO: 3235744 - DNA, 25 bp, Homo sapien
caagaactaggatctgatcctaaca

SEQ ID NO: 3235745 - DNA, 25 bp, Homo sapien
agaactaggatctgatcctaacatc

SEQ ID NO: 3235746 - DNA, 25 bp, Homo sapien
tgagatttccgtgggctggttgggc

SEQ ID NO: 3235747 - DNA, 25 bp, Homo sapien
gctgtcagaggagagaagtatcaac

SEQ ID NO: 3235748 - DNA, 25 bp, Homo sapien
ctcattaggattcctagcaactggg

SEQ ID NO: 3235749 - DNA, 25 bp, Homo sapien
gtatcaactcattaggattcctagc

SEQ ID NO: 3235750 - DNA, 25 bp, Homo sapien
tgtccctatgcatatcagttgagct

SEQ ID NO: 3235751 - DNA, 25 bp, Homo sapien
tatgagcacataggactctagacgg

SEQ ID NO: 3235752 - DNA, 25 bp, Homo sapien
cagtatgacatttcacgggagattt

SEQ ID NO: 3235753 - DNA, 25 bp, Homo sapien
cgccatcgccaagtaagaaagtgaa

SEQ ID NO: 3235754 - DNA, 25 bp, Homo sapien
ggagctgggagtcataagtcccatg

SEQ ID NO: 3235755 - DNA, 25 bp, Homo sapien
gctgggagtcataagtcccatgatc

SEQ ID NO: 3235756 - DNA, 25 bp, Homo sapien
gagctgggagtcataagtcccatga

SEQ ID NO: 3235757 - DNA, 25 bp, Homo sapien
ctgggagtcataagtcccatgatcc

SEQ ID NO: 3235758 - DNA, 25 bp, Homo sapien
aaaagtagtaaggagctggcttctt

SEQ ID NO: 3235759 - DNA, 25 bp, Homo sapien
gaactccagaaaagtagtaaggagc

SEQ ID NO: 3235760 - DNA, 25 bp, Homo sapien
aatgcctggtagaactccagaaaag

SEQ ID NO: 3235761 - DNA, 25 bp, Homo sapien
aaagccagaaaatgcctggtagaac

SEQ ID NO: 3235762 - DNA, 25 bp, Homo sapien
catacctgtggctgtgtatccgtgg

SEQ ID NO: 3235763 - DNA, 25 bp, Homo sapien
tttcggccctgcagagtttcgtgag

SEQ ID NO: 3235764 - DNA, 25 bp, Homo sapien
gaggagttagcgagccctgctcaca

SEQ ID NO: 3235765 - DNA, 25 bp, Homo sapien
ggttggcgtcgccttgaaatcccag

SEQ ID NO: 3235766 - DNA, 25 bp, Homo sapien
actgtgagatactcgccctgggggc

SEQ ID NO: 3235767 - DNA, 25 bp, Homo sapien
tccaattttggacgaggcttccgtc

SEQ ID NO: 3235768 - DNA, 25 bp, Homo sapien
caagctgggaaacggacggcgctac

SEQ ID NO: 3235769 - DNA, 25 bp, Homo sapien
tggccccgggaagcggtgctgcgag

SEQ ID NO: 3235770 - DNA, 25 bp, Homo sapien
gactctcaggaagacctagatttca

SEQ ID NO: 3235771 - DNA, 25 bp, Homo sapien
gggcctggcgcggtttccaagtctc

SEQ ID NO: 3235772 - DNA, 25 bp, Homo sapien
tctaggtacccgttgggcctggcgc

SEQ ID NO: 3235773 - DNA, 25 bp, Homo sapien
agaatcccgcgctgggagcggaagc

SEQ ID NO: 3235774 - DNA, 25 bp, Homo sapien
ctggaatgccccacgttgcttttcc

SEQ ID NO: 3235775 - DNA, 25 bp, Homo sapien
cccttccaggcccagatcaagttct

SEQ ID NO: 3235776 - DNA, 25 bp, Homo sapien
gaatgcattcgtactatttctccca

SEQ ID NO: 3235777 - DNA, 25 bp, Homo sapien
tctatgcttgagcagaagtaactca

SEQ ID NO: 3235778 - DNA, 25 bp, Homo sapien
caaatgaattgataatgacctctgc

SEQ ID NO: 3235779 - DNA, 25 bp, Homo sapien
tcacacaggtaaactaacgtcacga

SEQ ID NO: 3235780 - DNA, 25 bp, Homo sapien
tcatagaggatgaaagcccacatgg

SEQ ID NO: 3235781 - DNA, 25 bp, Homo sapien
tgcagcagacttggttatcccagag

SEQ ID NO: 3235782 - DNA, 25 bp, Homo sapien
gatggcacctaaactcactctcgta

SEQ ID NO: 3235783 - DNA, 25 bp, Homo sapien
gatatgtgagctgggccattccgga

SEQ ID NO: 3235784 - DNA, 25 bp, Homo sapien
tcttcatctaatggtattatgacct

SEQ ID NO: 3235785 - DNA, 25 bp, Homo sapien
ccttggacaggttaatgaagcgccc

SEQ ID NO: 3235786 - DNA, 25 bp, Homo sapien
gaagcgccctgaatcttagtttaat

SEQ ID NO: 3235787 - DNA, 25 bp, Homo sapien
gaaattcttagatcctggttcttca

SEQ ID NO: 3235788 - DNA, 25 bp, Homo sapien
ctatcccacgtaatatttctatcaa

SEQ ID NO: 3235789 - DNA, 25 bp, Homo sapien
tggttcagaagtgtggagagaataa

SEQ ID NO: 3235790 - DNA, 25 bp, Homo sapien
gttcagaagtgtggagagaataaat

SEQ ID NO: 3235791 - DNA, 25 bp, Homo sapien
ttcagaagtgtggagagaataaatc

SEQ ID NO: 3235792 - DNA, 25 bp, Homo sapien
ggttcagaagtgtggagagaataaa

SEQ ID NO: 3235793 - DNA, 25 bp, Homo sapien
tctcataatgagatgctcgttcttc

SEQ ID NO: 3235794 - DNA, 25 bp, Homo sapien
tcgatgaaatagtctccagatggag

SEQ ID NO: 3235795 - DNA, 25 bp, Homo sapien
gacaatcttggtctatacactgagg

SEQ ID NO: 3235796 - DNA, 25 bp, Homo sapien
aggacaacggtttcctctcataatg

SEQ ID NO: 3235797 - DNA, 25 bp, Homo sapien
aaaccaaaattcagcataggttgtc

SEQ ID NO: 3235798 - DNA, 25 bp, Homo sapien
cataggttgtcacaaggtaaatacg

SEQ ID NO: 3235799 - DNA, 25 bp, Homo sapien
tgtccatctcctactttgcattcca

SEQ ID NO: 3235800 - DNA, 25 bp, Homo sapien
caaggtaaatacgttgtccatctcc

SEQ ID NO: 3235801 - DNA, 25 bp, Homo sapien
tcaatgagtaatgcaaccatctttt

SEQ ID NO: 3235802 - DNA, 25 bp, Homo sapien
ctcaatgagtaatgcaaccatcttt

SEQ ID NO: 3235803 - DNA, 25 bp, Homo sapien
tttcaggaataacttcatagcagtg

SEQ ID NO: 3235804 - DNA, 25 bp, Homo sapien
taacttcatagcagtgtaagagatt

SEQ ID NO: 3235805 - DNA, 25 bp, Homo sapien
ctgagcaattaacaccgtataactc

SEQ ID NO: 3235806 - DNA, 25 bp, Homo sapien
gcaattaacaccgtataactcttga

SEQ ID NO: 3235807 - DNA, 25 bp, Homo sapien
taacaccgtataactcttgaagtgc

SEQ ID NO: 3235808 - DNA, 25 bp, Homo sapien
caccgtataactcttgaagtgcttt

SEQ ID NO: 3235809 - DNA, 25 bp, Homo sapien
ctgaaatattaaatgctggctgaat

SEQ ID NO: 3235810 - DNA, 25 bp, Homo sapien
gctgaaatattaaatgctggctgaa

SEQ ID NO: 3235811 - DNA, 25 bp, Homo sapien
ctgccaagcaagtcaagagcaggct

SEQ ID NO: 3235812 - DNA, 25 bp, Homo sapien
aaaaatggggaaatccatggcctgt

SEQ ID NO: 3235813 - DNA, 25 bp, Homo sapien
tctggagcgctatcatcatcttcac

SEQ ID NO: 3235814 - DNA, 25 bp, Homo sapien
ttgtctctggagcgctatcatcatc

SEQ ID NO: 3235815 - DNA, 25 bp, Homo sapien
ctttgaattcgatgtccagctttcc

SEQ ID NO: 3235816 - DNA, 25 bp, Homo sapien
tgaattcgatgtccagctttcctct

SEQ ID NO: 3235817 - DNA, 25 bp, Homo sapien
cccagcctctccagtttctttgaat

SEQ ID NO: 3235818 - DNA, 25 bp, Homo sapien
ccagcctctccagtttctttgaatt

SEQ ID NO: 3235819 - DNA, 25 bp, Homo sapien
ggaagcaagaatcccgagcacggtg

SEQ ID NO: 3235820 - DNA, 25 bp, Homo sapien
gctggtccaactgtcccctgtaaaa

SEQ ID NO: 3235821 - DNA, 25 bp, Homo sapien
ttgcatcgtgctggcgacttgggca

SEQ ID NO: 3235822 - DNA, 25 bp, Homo sapien
agcacggtgacgagtgggcaccaac

SEQ ID NO: 3235823 - DNA, 25 bp, Homo sapien
ctgcaggctagtcccacccggagat

SEQ ID NO: 3235824 - DNA, 25 bp, Homo sapien
aagaaggtgcctctgcccgtgtggc

SEQ ID NO: 3235825 - DNA, 25 bp, Homo sapien
cccggagatgatattctggtaataa

SEQ ID NO: 3235826 - DNA, 25 bp, Homo sapien
ttctggtgcttgattgccagaggtg

SEQ ID NO: 3235827 - DNA, 25 bp, Homo sapien
gctgtgcggagctaaattccagaga

SEQ ID NO: 3235828 - DNA, 25 bp, Homo sapien
aaaatgtcagttctcccctaggtga

SEQ ID NO: 3235829 - DNA, 25 bp, Homo sapien
agtttgagacaaccagagagcttcc

SEQ ID NO: 3235830 - DNA, 25 bp, Homo sapien
tgtgtaaaccggcaaactgactcta

SEQ ID NO: 3235831 - DNA, 25 bp, Homo sapien
gatgatttatatagccgaaagtttc

SEQ ID NO: 3235832 - DNA, 25 bp, Homo sapien
gccacacgctttccaatttttgatg

SEQ ID NO: 3235833 - DNA, 25 bp, Homo sapien
gacattgctgaccaaagaagagaga

SEQ ID NO: 3235834 - DNA, 25 bp, Homo sapien
gaaacatcttttgactgtataggaa

SEQ ID NO: 3235835 - DNA, 25 bp, Homo sapien
ctattatcttttagctaatggagaa

SEQ ID NO: 3235836 - DNA, 25 bp, Homo sapien
gattaaaggagctatacaaattata

SEQ ID NO: 3235837 - DNA, 25 bp, Homo sapien
ttagaactgtaagaactggctgggc

SEQ ID NO: 3235838 - DNA, 25 bp, Homo sapien
ccaaatgcaataccagtagtattgt

SEQ ID NO: 3235839 - DNA, 25 bp, Homo sapien
taaatcctctcgacaactccgtaag

SEQ ID NO: 3235840 - DNA, 25 bp, Homo sapien
caatttttacactcctgctacggca

SEQ ID NO: 3235841 - DNA, 25 bp, Homo sapien
gaatcccggatctactactgctacc

SEQ ID NO: 3235842 - DNA, 25 bp, Homo sapien
ggtgtggcaggaattacacaatttt

SEQ ID NO: 3235843 - DNA, 25 bp, Homo sapien
ctgtagttgcttttcccatatgagc

SEQ ID NO: 3235844 - DNA, 25 bp, Homo sapien
ccatatgagctagaactaacaatgt

SEQ ID NO: 3235845 - DNA, 25 bp, Homo sapien
cttctccatacgtggcagaaagaat

SEQ ID NO: 3235846 - DNA, 25 bp, Homo sapien
ttcacacttctccatacgtggcaga

SEQ ID NO: 3235847 - DNA, 25 bp, Homo sapien
cgaaagaaacgagattgggtaatcg

SEQ ID NO: 3235848 - DNA, 25 bp, Homo sapien
aactgcgaaagaaacgagattgggt

SEQ ID NO: 3235849 - DNA, 25 bp, Homo sapien
ctgcgaaagaaacgagattgggtaa

SEQ ID NO: 3235850 - DNA, 25 bp, Homo sapien
aaactgcgaaagaaacgagattggg

SEQ ID NO: 3235851 - DNA, 25 bp, Homo sapien
cagggaccttggaataataatcacc

SEQ ID NO: 3235852 - DNA, 25 bp, Homo sapien
cagacaccaggagacgactatataa

SEQ ID NO: 3235853 - DNA, 25 bp, Homo sapien
tataacaactatatagcatgtgcac

SEQ ID NO: 3235854 - DNA, 25 bp, Homo sapien
tgggttacgtgaaaatagtacatcc

SEQ ID NO: 3235855 - DNA, 25 bp, Homo sapien
tgagatggctcacatgtaagaattc

SEQ ID NO: 3235856 - DNA, 25 bp, Homo sapien
ctgaagtgccgatactgttaaaata

SEQ ID NO: 3235857 - DNA, 25 bp, Homo sapien
ggctcacatgtaagaattcgtaaag

SEQ ID NO: 3235858 - DNA, 25 bp, Homo sapien
taagaattcgtaaagtatctgagaa

SEQ ID NO: 3235859 - DNA, 25 bp, Homo sapien
acttcaggatagggagaacactgaa

SEQ ID NO: 3235860 - DNA, 25 bp, Homo sapien
cttcaggatagggagaacactgaaa

SEQ ID NO: 3235861 - DNA, 25 bp, Homo sapien
caacttcaggatagggagaacactg

SEQ ID NO: 3235862 - DNA, 25 bp, Homo sapien
aacttcaggatagggagaacactga

SEQ ID NO: 3235863 - DNA, 25 bp, Homo sapien
tattattactcttatgggctcttcc

SEQ ID NO: 3235864 - DNA, 25 bp, Homo sapien
atatcataaaccagtaattcttctg

SEQ ID NO: 3235865 - DNA, 25 bp, Homo sapien
tactcttatgggctcttccaatgtt

SEQ ID NO: 3235866 - DNA, 25 bp, Homo sapien
tatcataaaccagtaattcttctgg

SEQ ID NO: 3235867 - DNA, 25 bp, Homo sapien
gtgcatggattgctcacgcctgcct

SEQ ID NO: 3235868 - DNA, 25 bp, Homo sapien
tgattcacaacctcggtgcttcctg

SEQ ID NO: 3235869 - DNA, 25 bp, Homo sapien
tattagtaaagcttgacactgggca

SEQ ID NO: 3235870 - DNA, 25 bp, Homo sapien
gaggcatgctttccggaaatgtcac

SEQ ID NO: 3235871 - DNA, 25 bp, Homo sapien
gtagtctaaactacgtgagaggctg

SEQ ID NO: 3235872 - DNA, 25 bp, Homo sapien
ggagagtatacatcccattaataag

SEQ ID NO: 3235873 - DNA, 25 bp, Homo sapien
cattaacatcaatggagaacaaggt

SEQ ID NO: 3235874 - DNA, 25 bp, Homo sapien
gggtctaatctgattccagggttta

SEQ ID NO: 3235875 - DNA, 25 bp, Homo sapien
ggttgtaatagaaagcaccattaac

SEQ ID NO: 3235876 - DNA, 25 bp, Homo sapien
aagcaccattaacatcaggccgggc

SEQ ID NO: 3235877 - DNA, 25 bp, Homo sapien
aatagaaagcaccattaacatcagg

SEQ ID NO: 3235878 - DNA, 25 bp, Homo sapien
gggtgtggttgtaatagaaagcacc

SEQ ID NO: 3235879 - DNA, 25 bp, Homo sapien
gaaataagatggttaacactcccca

SEQ ID NO: 3235880 - DNA, 25 bp, Homo sapien
aaaaggcaggtgacttagtctaatc

SEQ ID NO: 3235881 - DNA, 25 bp, Homo sapien
ctccccatggcagtaggtgaggtgt

SEQ ID NO: 3235882 - DNA, 25 bp, Homo sapien
taaaaagaatcaacgaggcctacat

SEQ ID NO: 3235883 - DNA, 25 bp, Homo sapien
aatggacaggaccacaatgataaac

SEQ ID NO: 3235884 - DNA, 25 bp, Homo sapien
tatgcctaagacttaaagatggaga

SEQ ID NO: 3235885 - DNA, 25 bp, Homo sapien
tcaaaacggtggttgccaaaaatca

SEQ ID NO: 3235886 - DNA, 25 bp, Homo sapien
gatgtaacaattctcaacctgtact

SEQ ID NO: 3235887 - DNA, 25 bp, Homo sapien
ttcatttttcagatcaaccagaatc

SEQ ID NO: 3235888 - DNA, 25 bp, Homo sapien
gatttgaagttttctgctttacata

SEQ ID NO: 3235889 - DNA, 25 bp, Homo sapien
cagatttgaagttttctgctttaca

SEQ ID NO: 3235890 - DNA, 25 bp, Homo sapien
agtcagatttgaagttttctgcttt

SEQ ID NO: 3235891 - DNA, 25 bp, Homo sapien
tcagatttgaagttttctgctttac

SEQ ID NO: 3235892 - DNA, 25 bp, Homo sapien
gaaaagaaacaggagacatacttca

SEQ ID NO: 3235893 - DNA, 25 bp, Homo sapien
acaggagacatacttcagcaggtaa

SEQ ID NO: 3235894 - DNA, 25 bp, Homo sapien
aacaggagacatacttcagcaggta

SEQ ID NO: 3235895 - DNA, 25 bp, Homo sapien
tgaggcagagtcgctctgtctccca

SEQ ID NO: 3235896 - DNA, 25 bp, Homo sapien
cgtgatatcagctcactgcaacctc

SEQ ID NO: 3235897 - DNA, 25 bp, Homo sapien
ggctggagtgtaatggcgtgatatc

SEQ ID NO: 3235898 - DNA, 25 bp, Homo sapien
ttttgaggcagagtcgctctgtctc

SEQ ID NO: 3235899 - DNA, 25 bp, Homo sapien
gattcaaacgttgctgcactgaagc

SEQ ID NO: 3235900 - DNA, 25 bp, Homo sapien
gaagctcagacacacttgaaactcc

SEQ ID NO: 3235901 - DNA, 25 bp, Homo sapien
cgtgggaatgagtgcactgattcaa

SEQ ID NO: 3235902 - DNA, 25 bp, Homo sapien
catacttttcaatactccccgacgg

SEQ ID NO: 3235903 - DNA, 25 bp, Homo sapien
tttactcaggatatgtgatttaacc

SEQ ID NO: 3235904 - DNA, 25 bp, Homo sapien
tatttcagtggtgaagggatagaga

SEQ ID NO: 3235905 - DNA, 25 bp, Homo sapien
gaggaatgctgtctccgatatctca

SEQ ID NO: 3235906 - DNA, 25 bp, Homo sapien
tgaagtaaggtattaagtgacagat

SEQ ID NO: 3235907 - DNA, 25 bp, Homo sapien
ttcattgctcctagtttcatctgct

SEQ ID NO: 3235908 - DNA, 25 bp, Homo sapien
tcattgctcctagtttcatctgctt

SEQ ID NO: 3235909 - DNA, 25 bp, Homo sapien
ggtttcattgctcctagtttcatct

SEQ ID NO: 3235910 - DNA, 25 bp, Homo sapien
gtttcattgctcctagtttcatctg

SEQ ID NO: 3235911 - DNA, 25 bp, Homo sapien
ctataattagttcatcaggaatttc

SEQ ID NO: 3235912 - DNA, 25 bp, Homo sapien
tataattagttcatcaggaatttca

SEQ ID NO: 3235913 - DNA, 25 bp, Homo sapien
catcaggcaaattatagcctggtga

SEQ ID NO: 3235914 - DNA, 25 bp, Homo sapien
caaatctcacagacatcaggcaaat

SEQ ID NO: 3235915 - DNA, 25 bp, Homo sapien
tcaggcaaattatagcctggtgaca

SEQ ID NO: 3235916 - DNA, 25 bp, Homo sapien
aatctcacagacatcaggcaaatta

SEQ ID NO: 3235917 - DNA, 25 bp, Homo sapien
gagccgaaagccatctgcgaaatat

SEQ ID NO: 3235918 - DNA, 25 bp, Homo sapien
gagcagctccctagcaactttgtga

SEQ ID NO: 3235919 - DNA, 25 bp, Homo sapien
caagaacacttctgggagccgaaag

SEQ ID NO: 3235920 - DNA, 25 bp, Homo sapien
tgttgacaccttaatcggtcccagg

SEQ ID NO: 3235921 - DNA, 25 bp, Homo sapien
tctgtttggtctagcccatgttcac

SEQ ID NO: 3235922 - DNA, 25 bp, Homo sapien
ccatgttcacggcatcttttgcata

SEQ ID NO: 3235923 - DNA, 25 bp, Homo sapien
gccatgttcgaaagaccagcctctt

SEQ ID NO: 3235924 - DNA, 25 bp, Homo sapien
acaagctattttcccgtataagtgg

SEQ ID NO: 3235925 - DNA, 25 bp, Homo sapien
cactataagccagtgaaacttcatt

SEQ ID NO: 3235926 - DNA, 25 bp, Homo sapien
tcattatatcagcacttttcttagc

SEQ ID NO: 3235927 - DNA, 25 bp, Homo sapien
attatatcagcacttttcttagcta

SEQ ID NO: 3235928 - DNA, 25 bp, Homo sapien
atagtatcactataagccagtgaaa

SEQ ID NO: 3235929 - DNA, 25 bp, Homo sapien
tctgtgttagactgtagtgcctggc

SEQ ID NO: 3235930 - DNA, 25 bp, Homo sapien
aagcaagtcatctagttggccagcc

SEQ ID NO: 3235931 - DNA, 25 bp, Homo sapien
tgatccagtagttcccaagacttga

SEQ ID NO: 3235932 - DNA, 25 bp, Homo sapien
tacacattcgtagtttcagagccaa

SEQ ID NO: 3235933 - DNA, 25 bp, Homo sapien
cacatctagaactgcagtagtcagg

SEQ ID NO: 3235934 - DNA, 25 bp, Homo sapien
tgtgagttgtcagggtgggctgctt

SEQ ID NO: 3235935 - DNA, 25 bp, Homo sapien
catctagaactgcagtagtcaggca

SEQ ID NO: 3235936 - DNA, 25 bp, Homo sapien
tgtgtgagttgtcagggtgggctgc

SEQ ID NO: 3235937 - DNA, 25 bp, Homo sapien
cttggagtgtgaggtaaaaggccag

SEQ ID NO: 3235938 - DNA, 25 bp, Homo sapien
gtgttccttggagtgtgaggtaaaa

SEQ ID NO: 3235939 - DNA, 25 bp, Homo sapien
ggagtgtgaggtaaaaggccagtac

SEQ ID NO: 3235940 - DNA, 25 bp, Homo sapien
ctgtgttccttggagtgtgaggtaa

SEQ ID NO: 3235941 - DNA, 25 bp, Homo sapien
tctccaggatggctcgagcggtttt

SEQ ID NO: 3235942 - DNA, 25 bp, Homo sapien
tgcagacggtgcacaaagccatacg

SEQ ID NO: 3235943 - DNA, 25 bp, Homo sapien
caaaacgcgctctagaatgctggtc

SEQ ID NO: 3235944 - DNA, 25 bp, Homo sapien
taaactggagcataaatccggctgg

SEQ ID NO: 3235945 - DNA, 25 bp, Homo sapien
ggataacagtgatcccacctgcacg

SEQ ID NO: 3235946 - DNA, 25 bp, Homo sapien
gagtctcaaagtgctagcttgaaag

SEQ ID NO: 3235947 - DNA, 25 bp, Homo sapien
tacgtattgcctgcggtttgccaga

SEQ ID NO: 3235948 - DNA, 25 bp, Homo sapien
gagtgccgtccaaagtagtgagtct

SEQ ID NO: 3235949 - DNA, 25 bp, Homo sapien
ttccagtcgctcgagagcggagagc

SEQ ID NO: 3235950 - DNA, 25 bp, Homo sapien
gaagtcctgcgcacgcgcgcgtgct

SEQ ID NO: 3235951 - DNA, 25 bp, Homo sapien
gcttggcgggagcttccagtcgctc

SEQ ID NO: 3235952 - DNA, 25 bp, Homo sapien
ccggattggctgttcggagcggcga

SEQ ID NO: 3235953 - DNA, 25 bp, Homo sapien
ttggaccgtaggtaactggttgtgc

SEQ ID NO: 3235954 - DNA, 25 bp, Homo sapien
gtaactggttgtgcggcatggactc

SEQ ID NO: 3235955 - DNA, 25 bp, Homo sapien
aactttggcatgttttggaccgtag

SEQ ID NO: 3235956 - DNA, 25 bp, Homo sapien
ggttgtgcggcatggactccagctc

SEQ ID NO: 3235957 - DNA, 25 bp, Homo sapien
ccacaaggggccgtcccacgtggct

SEQ ID NO: 3235958 - DNA, 25 bp, Homo sapien
ctgcccacgactcagggacactagc

SEQ ID NO: 3235959 - DNA, 25 bp, Homo sapien
cacaaggggccgtcccacgtggctc

SEQ ID NO: 3235960 - DNA, 25 bp, Homo sapien
ctgaaaagaaaattcaacagaaaag

SEQ ID NO: 3235961 - DNA, 25 bp, Homo sapien
tgaaaagaaaattcaacagaaaagc

SEQ ID NO: 3235962 - DNA, 25 bp, Homo sapien
acatcgtcgaatctccaggcccttt

SEQ ID NO: 3235963 - DNA, 25 bp, Homo sapien
gaaagtgaggcgctctgtgctccaa

SEQ ID NO: 3235964 - DNA, 25 bp, Homo sapien
tcttcttgaactgactttgaagcag

SEQ ID NO: 3235965 - DNA, 25 bp, Homo sapien
gcagtatttacaacgtctgaaagtg

SEQ ID NO: 3235966 - DNA, 25 bp, Homo sapien
cactttattgtgagtctttgccaca

SEQ ID NO: 3235967 - DNA, 25 bp, Homo sapien
cagggcttgcactaaagaattgtca

SEQ ID NO: 3235968 - DNA, 25 bp, Homo sapien
ctatgaaatgtgtttgacaagccaa

SEQ ID NO: 3235969 - DNA, 25 bp, Homo sapien
taataacactacttggtagcctaac

SEQ ID NO: 3235970 - DNA, 25 bp, Homo sapien
catggcagaatgctcttggactcgg

SEQ ID NO: 3235971 - DNA, 25 bp, Homo sapien
caagaaagagttacctggatcagcc

SEQ ID NO: 3235972 - DNA, 25 bp, Homo sapien
cagtgcactagagggaagtgttccc

SEQ ID NO: 3235973 - DNA, 25 bp, Homo sapien
ggagaatctcacaagcggaccagag

SEQ ID NO: 3235974 - DNA, 25 bp, Homo sapien
cctgggtgtataccgaggtgtggaa

SEQ ID NO: 3235975 - DNA, 25 bp, Homo sapien
ttagaggaccggccaggctgtcaga

SEQ ID NO: 3235976 - DNA, 25 bp, Homo sapien
tgtatgtgtccattgctcctgggtg

SEQ ID NO: 3235977 - DNA, 25 bp, Homo sapien
tggcctacacattcctactcgatgg

SEQ ID NO: 3235978 - DNA, 25 bp, Homo sapien
taaaagactcctaaagcctgctgac

SEQ ID NO: 3235979 - DNA, 25 bp, Homo sapien
gttatgtcagaaggccgtaagggcc

SEQ ID NO: 3235980 - DNA, 25 bp, Homo sapien
tgctgactcactggctcatgactga

SEQ ID NO: 3235981 - DNA, 25 bp, Homo sapien
taggcgtccctagaaatagctacgt

SEQ ID NO: 3235982 - DNA, 25 bp, Homo sapien
cagctctggctactgtgaaaggaca

SEQ ID NO: 3235983 - DNA, 25 bp, Homo sapien
tgcagtttctcaaacaagtggagct

SEQ ID NO: 3235984 - DNA, 25 bp, Homo sapien
tggttagctgagtccagtaaggtga

SEQ ID NO: 3235985 - DNA, 25 bp, Homo sapien
tgaaaggacatttgatcctctctgc

SEQ ID NO: 3235986 - DNA, 25 bp, Homo sapien
gttaactcttgcaggtgtgtttgtc

SEQ ID NO: 3235987 - DNA, 25 bp, Homo sapien
ctgccgtggttatcagatctgtctt

SEQ ID NO: 3235988 - DNA, 25 bp, Homo sapien
tgtcttcattgatatcctaaacttg

SEQ ID NO: 3235989 - DNA, 25 bp, Homo sapien
tgccgtggttatcagatctgtcttc

SEQ ID NO: 3235990 - DNA, 25 bp, Homo sapien
tcctacctgctatctccactcctct

SEQ ID NO: 3235991 - DNA, 25 bp, Homo sapien
tgcagcttgcttcctacctgctatc

SEQ ID NO: 3235992 - DNA, 25 bp, Homo sapien
tagtaccttcagcaaccctgtaagg

SEQ ID NO: 3235993 - DNA, 25 bp, Homo sapien
gcagagtcatgagaaagtgcttccg

SEQ ID NO: 3235994 - DNA, 25 bp, Homo sapien
gacacggccaggcttaggaacagag

SEQ ID NO: 3235995 - DNA, 25 bp, Homo sapien
gtagctgaccgaggtggtagccaca

SEQ ID NO: 3235996 - DNA, 25 bp, Homo sapien
ttaccagggtttgtggcagcgactc

SEQ ID NO: 3235997 - DNA, 25 bp, Homo sapien
taaaggagcacaagccctgaaggag

SEQ ID NO: 3235998 - DNA, 25 bp, Homo sapien
ctgacaggaggtagataaaggtgcc

SEQ ID NO: 3235999 - DNA, 25 bp, Homo sapien
gatgcagtgcatgaggctcctgtac

SEQ ID NO: 3236000 - DNA, 25 bp, Homo sapien
tatttatagtcagtaaccttagagg

SEQ ID NO: 3236001 - DNA, 25 bp, Homo sapien
ggaaatagcaagactataggagtag

SEQ ID NO: 3236002 - DNA, 25 bp, Homo sapien
cagtttcacttgtctggaaatagca

SEQ ID NO: 3236003 - DNA, 25 bp, Homo sapien
taatgtctaggtcttgctacatctt

SEQ ID NO: 3236004 - DNA, 25 bp, Homo sapien
atttttattgttatcgcaggcagcc

SEQ ID NO: 3236005 - DNA, 25 bp, Homo sapien
tgaaagtgtaccagcatgcatggtg

SEQ ID NO: 3236006 - DNA, 25 bp, Homo sapien
ccccacaattataagcattttggca

SEQ ID NO: 3236007 - DNA, 25 bp, Homo sapien
tacaagtgacccatgcatgtagggt

SEQ ID NO: 3236008 - DNA, 25 bp, Homo sapien
ttctgaatttactgtaaacagaata

SEQ ID NO: 3236009 - DNA, 25 bp, Homo sapien
tttctgaatttactgtaaacagaat

SEQ ID NO: 3236010 - DNA, 25 bp, Homo sapien
tgatatagtggaaaaggaccaggtc

SEQ ID NO: 3236011 - DNA, 25 bp, Homo sapien
tcggaaaacacctccctagtctgag

SEQ ID NO: 3236012 - DNA, 25 bp, Homo sapien
taaggaaccattgctcgccatcaga

SEQ ID NO: 3236013 - DNA, 25 bp, Homo sapien
gccagacagtgcagtgtgatatagt

SEQ ID NO: 3236014 - DNA, 25 bp, Homo sapien
ggcttcttgctagcaaaaaaatcaa

SEQ ID NO: 3236015 - DNA, 25 bp, Homo sapien
acccatttcacaacttaacctgtga

SEQ ID NO: 3236016 - DNA, 25 bp, Homo sapien
tttcacaacttaacctgtgattgtc

SEQ ID NO: 3236017 - DNA, 25 bp, Homo sapien
attattggcttcttgctagcaaaaa

SEQ ID NO: 3236018 - DNA, 25 bp, Homo sapien
ggtgcaggagtgtctaaagtcccgc

SEQ ID NO: 3236019 - DNA, 25 bp, Homo sapien
cttggtgcaggagtgtctaaagtcc

SEQ ID NO: 3236020 - DNA, 25 bp, Homo sapien
agtgtctaaagtcccgcgactctca

SEQ ID NO: 3236021 - DNA, 25 bp, Homo sapien
caggagtgtctaaagtcccgcgact

SEQ ID NO: 3236022 - DNA, 25 bp, Homo sapien
cgttgtgagagtgtggaaacccctt

SEQ ID NO: 3236023 - DNA, 25 bp, Homo sapien
cacttggccgtggagtcattgatct

SEQ ID NO: 3236024 - DNA, 25 bp, Homo sapien
cattgatctaaggagtgctggcatt

SEQ ID NO: 3236025 - DNA, 25 bp, Homo sapien
gatgatgtctgtcacctggcagcgt

SEQ ID NO: 3236026 - DNA, 25 bp, Homo sapien
ttatgaggagggtctgaatcttcca

SEQ ID NO: 3236027 - DNA, 25 bp, Homo sapien
catagggtgacaaaagacctgatcc

SEQ ID NO: 3236028 - DNA, 25 bp, Homo sapien
caaggtggtgcatggcctccaaaag

SEQ ID NO: 3236029 - DNA, 25 bp, Homo sapien
cgagccaatataccaactctatggg

SEQ ID NO: 3236030 - DNA, 25 bp, Homo sapien
aactcaatagaccccataaacacac

SEQ ID NO: 3236031 - DNA, 25 bp, Homo sapien
ccccataaacacaccgccattcttc

SEQ ID NO: 3236032 - DNA, 25 bp, Homo sapien
cccataaacacaccgccattcttcc

SEQ ID NO: 3236033 - DNA, 25 bp, Homo sapien
tagaacatacaaaacaaaaaatagc

SEQ ID NO: 3236034 - DNA, 25 bp, Homo sapien
tccccacagggtgggtacaatagcg

SEQ ID NO: 3236035 - DNA, 25 bp, Homo sapien
tagaccattcattggctgcatagcc

SEQ ID NO: 3236036 - DNA, 25 bp, Homo sapien
caatagcgggtacaataacgacagc

SEQ ID NO: 3236037 - DNA, 25 bp, Homo sapien
taacgacagcaagcatcactttcca

SEQ ID NO: 3236038 - DNA, 25 bp, Homo sapien
gaagccccatgttgtagtggaagac

SEQ ID NO: 3236039 - DNA, 25 bp, Homo sapien
tacagaaagaaacgcccacgttgag

SEQ ID NO: 3236040 - DNA, 25 bp, Homo sapien
gccatgatgcatacttgttacagaa

SEQ ID NO: 3236041 - DNA, 25 bp, Homo sapien
caaaagctgctatcgccaagatcca

SEQ ID NO: 3236042 - DNA, 25 bp, Homo sapien
gaagtctgactcaggactacggact

SEQ ID NO: 3236043 - DNA, 25 bp, Homo sapien
taggaaagggcaaagaccagggtca

SEQ ID NO: 3236044 - DNA, 25 bp, Homo sapien
tgtcttcaaagcatccctccggaga

SEQ ID NO: 3236045 - DNA, 25 bp, Homo sapien
caccagatgttgtcttacgtctagg

SEQ ID NO: 3236046 - DNA, 25 bp, Homo sapien
cagagaggacggagacacgttccag

SEQ ID NO: 3236047 - DNA, 25 bp, Homo sapien
agaggacggagacacgttccagctg

SEQ ID NO: 3236048 - DNA, 25 bp, Homo sapien
gacacaatctcctggggtaggcaga

SEQ ID NO: 3236049 - DNA, 25 bp, Homo sapien
acggagacacgttccagctgccaga

SEQ ID NO: 3236050 - DNA, 25 bp, Homo sapien
ctgaagctggaaactcgggataaga

SEQ ID NO: 3236051 - DNA, 25 bp, Homo sapien
cctttggatccggccatagcaagca

SEQ ID NO: 3236052 - DNA, 25 bp, Homo sapien
ttggatccggccatagcaagcatcc

SEQ ID NO: 3236053 - DNA, 25 bp, Homo sapien
gagagctgcgttgtttcctcttgcc

SEQ ID NO: 3236054 - DNA, 25 bp, Homo sapien
gcccctggcctttgacgtgtctgtt

SEQ ID NO: 3236055 - DNA, 25 bp, Homo sapien
tgtctgcaaataacccagctgcttc

SEQ ID NO: 3236056 - DNA, 25 bp, Homo sapien
gcctgcgtctctgaggataagatag

SEQ ID NO: 3236057 - DNA, 25 bp, Homo sapien
aagaagccatcgtttttggcctgcg

SEQ ID NO: 3236058 - DNA, 25 bp, Homo sapien
aataactgtaccctggagttcctgg

SEQ ID NO: 3236059 - DNA, 25 bp, Homo sapien
ccagctacatgtgtcaaggaagcca

SEQ ID NO: 3236060 - DNA, 25 bp, Homo sapien
caattctgggaatgttcaggctctc

SEQ ID NO: 3236061 - DNA, 25 bp, Homo sapien
tgtggcttgtcccatgaccctttgg

SEQ ID NO: 3236062 - DNA, 25 bp, Homo sapien
atggtggaacagagtggaccctgct

SEQ ID NO: 3236063 - DNA, 25 bp, Homo sapien
caggtgcgtcctgcccattcttaag

SEQ ID NO: 3236064 - DNA, 25 bp, Homo sapien
ctaaagcacaggtgcgtcctgccca

SEQ ID NO: 3236065 - DNA, 25 bp, Homo sapien
cagagtggaccctgctgtgcatgat

SEQ ID NO: 3236066 - DNA, 25 bp, Homo sapien
agccgctgagggattgtgcagacaa

SEQ ID NO: 3236067 - DNA, 25 bp, Homo sapien
aaaaactgagtgcagcaaagtcccc

SEQ ID NO: 3236068 - DNA, 25 bp, Homo sapien
gccaggagcatctgcggtgctttct

SEQ ID NO: 3236069 - DNA, 25 bp, Homo sapien
gattggtatccacggtcctgcctct

SEQ ID NO: 3236070 - DNA, 25 bp, Homo sapien
gatggccacctttcacagacatggg

SEQ ID NO: 3236071 - DNA, 25 bp, Homo sapien
gctaaatatcttaattgccatgatc

SEQ ID NO: 3236072 - DNA, 25 bp, Homo sapien
ctataatgttacaatggtcattgtt

SEQ ID NO: 3236073 - DNA, 25 bp, Homo sapien
tgttttgctaaatatcttaattgcc

SEQ ID NO: 3236074 - DNA, 25 bp, Homo sapien
tcaatctggtaccaggtccagggtc

SEQ ID NO: 3236075 - DNA, 25 bp, Homo sapien
catgtagccctcgaaaaaaactgac

SEQ ID NO: 3236076 - DNA, 25 bp, Homo sapien
taccagccagctatatgaagaggct

SEQ ID NO: 3236077 - DNA, 25 bp, Homo sapien
aatggctggcgtttgcatactaaag

SEQ ID NO: 3236078 - DNA, 25 bp, Homo sapien
tcagctctaagagccggagcttttc

SEQ ID NO: 3236079 - DNA, 25 bp, Homo sapien
ggctttatatagattccaggtcaca

SEQ ID NO: 3236080 - DNA, 25 bp, Homo sapien
gagggctttatatagattccaggtc

SEQ ID NO: 3236081 - DNA, 25 bp, Homo sapien
ggccaggagggctttatatagattc

SEQ ID NO: 3236082 - DNA, 25 bp, Homo sapien
tatatagattccaggtcacacgcac

SEQ ID NO: 3236083 - DNA, 25 bp, Homo sapien
gtgtcctggtagtcttcggtgcgtt

SEQ ID NO: 3236084 - DNA, 25 bp, Homo sapien
ctctgacctcgatgggtagcacttt

SEQ ID NO: 3236085 - DNA, 25 bp, Homo sapien
cttcggtgcgttagagaaacagctc

SEQ ID NO: 3236086 - DNA, 25 bp, Homo sapien
aacagctctgacctcgatgggtagc

SEQ ID NO: 3236087 - DNA, 25 bp, Homo sapien
gactgctgaatgtaacaggccctag

SEQ ID NO: 3236088 - DNA, 25 bp, Homo sapien
tctgagaaatccttgactgctgaat

SEQ ID NO: 3236089 - DNA, 25 bp, Homo sapien
gcaggtaagggctctggtctaagtt

SEQ ID NO: 3236090 - DNA, 25 bp, Homo sapien
tctaagtttaggaggcgatatcttc

SEQ ID NO: 3236091 - DNA, 25 bp, Homo sapien
gaggaagcagcggtaactcgaacta

SEQ ID NO: 3236092 - DNA, 25 bp, Homo sapien
cctggtcccgtgcatggaggaagca

SEQ ID NO: 3236093 - DNA, 25 bp, Homo sapien
gagtggcccacacaaaaggcttcgc

SEQ ID NO: 3236094 - DNA, 25 bp, Homo sapien
ccagcaatggctgagtctgatttcc

SEQ ID NO: 3236095 - DNA, 25 bp, Homo sapien
cacaccaggcgccaacacgcatggc

SEQ ID NO: 3236096 - DNA, 25 bp, Homo sapien
caggcaccaacacgcatgggcacat

SEQ ID NO: 3236097 - DNA, 25 bp, Homo sapien
accaggcgccaacacgcatggccac

SEQ ID NO: 3236098 - DNA, 25 bp, Homo sapien
tccccaccccatacacatcaggcac

SEQ ID NO: 3236099 - DNA, 25 bp, Homo sapien
tcccattgtcacacacaagtccgaa

SEQ ID NO: 3236100 - DNA, 25 bp, Homo sapien
caggaatttattatccgaacttcca

SEQ ID NO: 3236101 - DNA, 25 bp, Homo sapien
aaacccactcgtccttccagtgaat

SEQ ID NO: 3236102 - DNA, 25 bp, Homo sapien
cactcgtccttccagtgaatggcat

SEQ ID NO: 3236103 - DNA, 25 bp, Homo sapien
gaccagtcccggctttgagaggagc

SEQ ID NO: 3236104 - DNA, 25 bp, Homo sapien
acaagccgcctctgtgcatctggca

SEQ ID NO: 3236105 - DNA, 25 bp, Homo sapien
ggagcgatggtgtccctaagcgcct

SEQ ID NO: 3236106 - DNA, 25 bp, Homo sapien
cgggagaaaggaacccatgggtgtg

SEQ ID NO: 3236107 - DNA, 25 bp, Homo sapien
tcagagtagtcaacacaatccgtgg

SEQ ID NO: 3236108 - DNA, 25 bp, Homo sapien
caatccgtggacttgggcccagatt

SEQ ID NO: 3236109 - DNA, 25 bp, Homo sapien
tctgttgagggcttgtgaaccatct

SEQ ID NO: 3236110 - DNA, 25 bp, Homo sapien
cttttcttggtgactgtgtgaaccc

SEQ ID NO: 3236111 - DNA, 25 bp, Homo sapien
tattgccacaagtttctgcagggcc

SEQ ID NO: 3236112 - DNA, 25 bp, Homo sapien
tcaggtatcctttagttgggcccat

SEQ ID NO: 3236113 - DNA, 25 bp, Homo sapien
aagggtccccaactctccgattatg

SEQ ID NO: 3236114 - DNA, 25 bp, Homo sapien
tgggctgtattctgagaccggctct

SEQ ID NO: 3236115 - DNA, 25 bp, Homo sapien
tcacatggtctggtgggatcttaca

SEQ ID NO: 3236116 - DNA, 25 bp, Homo sapien
catttttacgagtgggagtgaggct

SEQ ID NO: 3236117 - DNA, 25 bp, Homo sapien
ggatcttacatttttacgagtggga

SEQ ID NO: 3236118 - DNA, 25 bp, Homo sapien
accatatcacatggtctggtgggat

SEQ ID NO: 3236119 - DNA, 25 bp, Homo sapien
gcagggaggggttgacaacgccagg

SEQ ID NO: 3236120 - DNA, 25 bp, Homo sapien
aggggttgacaacgccaggagttca

SEQ ID NO: 3236121 - DNA, 25 bp, Homo sapien
tttttgcattgccatggaccacgca

SEQ ID NO: 3236122 - DNA, 25 bp, Homo sapien
cttttttgcattgccatggaccacg

SEQ ID NO: 3236123 - DNA, 25 bp, Homo sapien
acgaataggaaccatcccaattcat

SEQ ID NO: 3236124 - DNA, 25 bp, Homo sapien
cccaacgaataggaaccatcccaat

SEQ ID NO: 3236125 - DNA, 25 bp, Homo sapien
tcttccccaacgaataggaaccatc

SEQ ID NO: 3236126 - DNA, 25 bp, Homo sapien
caacgaataggaaccatcccaattc

SEQ ID NO: 3236127 - DNA, 25 bp, Homo sapien
gtgggaccgccctggtcaatccagc

SEQ ID NO: 3236128 - DNA, 25 bp, Homo sapien
ctggtcaatccagcgggcaagggca

SEQ ID NO: 3236129 - DNA, 25 bp, Homo sapien
cagccacgagtgttttgcagaagtg

SEQ ID NO: 3236130 - DNA, 25 bp, Homo sapien
tactgttgctgcctcttgcatccca

SEQ ID NO: 3236131 - DNA, 25 bp, Homo sapien
gggaccaatctgttgagttccaggg

SEQ ID NO: 3236132 - DNA, 25 bp, Homo sapien
ttctgaattattttggggaccaatc

SEQ ID NO: 3236133 - DNA, 25 bp, Homo sapien
tattttggggaccaatctgttgagt

SEQ ID NO: 3236134 - DNA, 25 bp, Homo sapien
aatctgttgagttccagggcctgct

SEQ ID NO: 3236135 - DNA, 25 bp, Homo sapien
ggtcctgcgtgtctcgtcgctcagc

SEQ ID NO: 3236136 - DNA, 25 bp, Homo sapien
ctcagtcctgcgagacggtcctgcg

SEQ ID NO: 3236137 - DNA, 25 bp, Homo sapien
tctgcgggtcgtaggcaaatgctct

SEQ ID NO: 3236138 - DNA, 25 bp, Homo sapien
gcttctgcttcgttccttccctctg

SEQ ID NO: 3236139 - DNA, 25 bp, Homo sapien
gaccatttctctgttggggtctctg

SEQ ID NO: 3236140 - DNA, 25 bp, Homo sapien
catccaggtctcttacatgatgagg

SEQ ID NO: 3236141 - DNA, 25 bp, Homo sapien
gaaaaccatccaggtctcttacatg

SEQ ID NO: 3236142 - DNA, 25 bp, Homo sapien
tacatgatgaggttgaccgtaagag

SEQ ID NO: 3236143 - DNA, 25 bp, Homo sapien
ccagcatgaggagcaaaacaggact

SEQ ID NO: 3236144 - DNA, 25 bp, Homo sapien
gcaaaggggtctaaggtcaggattc

SEQ ID NO: 3236145 - DNA, 25 bp, Homo sapien
acctgcaaaggggtctaaggtcagg

SEQ ID NO: 3236146 - DNA, 25 bp, Homo sapien
atcaaacctgcaaaggggtctaagg

SEQ ID NO: 3236147 - DNA, 25 bp, Homo sapien
tgcaaaggggtctaaggtcaggatt

SEQ ID NO: 3236148 - DNA, 25 bp, Homo sapien
tggatcctttgatggccttaaacag

SEQ ID NO: 3236149 - DNA, 25 bp, Homo sapien
actgagggctgcagggtttgaatgg

SEQ ID NO: 3236150 - DNA, 25 bp, Homo sapien
agggctgcagggtttgaatggatcc

SEQ ID NO: 3236151 - DNA, 25 bp, Homo sapien
tttgaatggatcctttgatggcctt

SEQ ID NO: 3236152 - DNA, 25 bp, Homo sapien
tccatggagacggttctttgaggat

SEQ ID NO: 3236153 - DNA, 25 bp, Homo sapien
gatgatgcggagaaacaggatgcta

SEQ ID NO: 3236154 - DNA, 25 bp, Homo sapien
gttctttgaggatgatgcggagaaa

SEQ ID NO: 3236155 - DNA, 25 bp, Homo sapien
ctgctgagtcagatccatggagacg

SEQ ID NO: 3236156 - DNA, 25 bp, Homo sapien
tttggttttctcaagtgaggacact

SEQ ID NO: 3236157 - DNA, 25 bp, Homo sapien
ccgtggctgggaggcaacataacat

SEQ ID NO: 3236158 - DNA, 25 bp, Homo sapien
cactggaaacgatgctcttttagct

SEQ ID NO: 3236159 - DNA, 25 bp, Homo sapien
tgggtctgtgccgttagcctttttg

SEQ ID NO: 3236160 - DNA, 25 bp, Homo sapien
gagatgttttgccaacaagctgccc

SEQ ID NO: 3236161 - DNA, 25 bp, Homo sapien
ggtgacttttgaaattgagatgttt

SEQ ID NO: 3236162 - DNA, 25 bp, Homo sapien
tgagatgttttgccaacaagctgcc

SEQ ID NO: 3236163 - DNA, 25 bp, Homo sapien
cttgagggtgacttttgaaattgag

SEQ ID NO: 3236164 - DNA, 25 bp, Homo sapien
cagtttatcacccaccattcccgga

SEQ ID NO: 3236165 - DNA, 25 bp, Homo sapien
agtgggaataggtctttcagtgctg

SEQ ID NO: 3236166 - DNA, 25 bp, Homo sapien
cattcccggaaacaggtaaagccag

SEQ ID NO: 3236167 - DNA, 25 bp, Homo sapien
ccatacaaccatcttgagtgggaat

SEQ ID NO: 3236168 - DNA, 25 bp, Homo sapien
aatgctcggagcaaacctctgggtg

SEQ ID NO: 3236169 - DNA, 25 bp, Homo sapien
gttcccagaatgtggggtgacccag

SEQ ID NO: 3236170 - DNA, 25 bp, Homo sapien
cataggaagctgtgaccgaggacaa

SEQ ID NO: 3236171 - DNA, 25 bp, Homo sapien
cgaggacaatgctcggagcaaacct

SEQ ID NO: 3236172 - DNA, 25 bp, Homo sapien
aagcagccctcagcaaaccaaagac

SEQ ID NO: 3236173 - DNA, 25 bp, Homo sapien
ggcaaacaatgctaattaaagtggt

SEQ ID NO: 3236174 - DNA, 25 bp, Homo sapien
gtttccaagcgttccagagtatgtg

SEQ ID NO: 3236175 - DNA, 25 bp, Homo sapien
gtatgtgggagaaactatacccttg

SEQ ID NO: 3236176 - DNA, 25 bp, Homo sapien
tcagattgggtcagaattcggcgct

SEQ ID NO: 3236177 - DNA, 25 bp, Homo sapien
cttttgttggttgaagacagggtat

SEQ ID NO: 3236178 - DNA, 25 bp, Homo sapien
tctggcttcgttgctcttttgttgg

SEQ ID NO: 3236179 - DNA, 25 bp, Homo sapien
cagggtatgggtgacatttgattca

SEQ ID NO: 3236180 - DNA, 25 bp, Homo sapien
ctgcattcctgagcgagtgagacca

SEQ ID NO: 3236181 - DNA, 25 bp, Homo sapien
agctgcattcctgagcgagtgagac

SEQ ID NO: 3236182 - DNA, 25 bp, Homo sapien
gctgcattcctgagcgagtgagacc

SEQ ID NO: 3236183 - DNA, 25 bp, Homo sapien
cagcctctgtgtagcctgcccattg

SEQ ID NO: 3236184 - DNA, 25 bp, Homo sapien
gaacgtcagtttcctgtgtttcaca

SEQ ID NO: 3236185 - DNA, 25 bp, Homo sapien
tgtagcctgcccattgaacgtcagt

SEQ ID NO: 3236186 - DNA, 25 bp, Homo sapien
tagaggtgatggctttgcaccagcc

SEQ ID NO: 3236187 - DNA, 25 bp, Homo sapien
ctgtctatgttatattccttctcac

SEQ ID NO: 3236188 - DNA, 25 bp, Homo sapien
tttggtgatagacccggcggagaca

SEQ ID NO: 3236189 - DNA, 25 bp, Homo sapien
gagtgaatctgccacctcggggtct

SEQ ID NO: 3236190 - DNA, 25 bp, Homo sapien
gggtcttgcactgggtgagaggttt

SEQ ID NO: 3236191 - DNA, 25 bp, Homo sapien
tcagaagtgacctcgagagggacgg

SEQ ID NO: 3236192 - DNA, 25 bp, Homo sapien
gctcttctgggatgagtgtggtcac

SEQ ID NO: 3236193 - DNA, 25 bp, Homo sapien
gatttcctttcatgccaacagagag

SEQ ID NO: 3236194 - DNA, 25 bp, Homo sapien
atccctcccgtgtcctgcagctgac

SEQ ID NO: 3236195 - DNA, 25 bp, Homo sapien
gcagctgacgggacccccggcacac

SEQ ID NO: 3236196 - DNA, 25 bp, Homo sapien
tctctcggaagtgcaggctgcagga

SEQ ID NO: 3236197 - DNA, 25 bp, Homo sapien
taagggcctttgttcctggtcagcc

SEQ ID NO: 3236198 - DNA, 25 bp, Homo sapien
tcagccttcccctggtgagagttgg

SEQ ID NO: 3236199 - DNA, 25 bp, Homo sapien
ctgcaggagtagagccgggctccgt

SEQ ID NO: 3236200 - DNA, 25 bp, Homo sapien
aaacgcgctggattctgacgcctga

SEQ ID NO: 3236201 - DNA, 25 bp, Homo sapien
tctgacgcctgacctgacgcttggt

SEQ ID NO: 3236202 - DNA, 25 bp, Homo sapien
ctgttctcgaggagcaaacgcgctg

SEQ ID NO: 3236203 - DNA, 25 bp, Homo sapien
tggtgtcgccgggatccttcagccc

SEQ ID NO: 3236204 - DNA, 25 bp, Homo sapien
gccttggcttggtcatggtaccctc

SEQ ID NO: 3236205 - DNA, 25 bp, Homo sapien
taggtcgggcttgactgcgtctgct

SEQ ID NO: 3236206 - DNA, 25 bp, Homo sapien
cctccactggcgtgtgagtgctctg

SEQ ID NO: 3236207 - DNA, 25 bp, Homo sapien
agtcttgtgaagtggagctcggcac

SEQ ID NO: 3236208 - DNA, 25 bp, Homo sapien
tccatcgagggttggctggtgccct

SEQ ID NO: 3236209 - DNA, 25 bp, Homo sapien
tctagtggttgaagcggttctgccg

SEQ ID NO: 3236210 - DNA, 25 bp, Homo sapien
ggttctgccgcttctaaggagaggc

SEQ ID NO: 3236211 - DNA, 25 bp, Homo sapien
cacgacgtgggcacatttggatcca

SEQ ID NO: 3236212 - DNA, 25 bp, Homo sapien
aaggctgctacggtgcctaggagca

SEQ ID NO: 3236213 - DNA, 25 bp, Homo sapien
tcagaaggctgctacggtgcctagg

SEQ ID NO: 3236214 - DNA, 25 bp, Homo sapien
aggtgcaggtggcttcaagaaggag

SEQ ID NO: 3236215 - DNA, 25 bp, Homo sapien
ctacggtgcctaggagcaaaggtgc

SEQ ID NO: 3236216 - DNA, 25 bp, Homo sapien
ggagtttccttgctcagcacgctaa

SEQ ID NO: 3236217 - DNA, 25 bp, Homo sapien
gatggtcccagtacagcagtctcca

SEQ ID NO: 3236218 - DNA, 25 bp, Homo sapien
tctggtcaccggtagtattctcaac

SEQ ID NO: 3236219 - DNA, 25 bp, Homo sapien
aacccaatagtgacgccaccaggaa

SEQ ID NO: 3236220 - DNA, 25 bp, Homo sapien
cagtggtaatggcacatgctgagca

SEQ ID NO: 3236221 - DNA, 25 bp, Homo sapien
tgagcccaagctggcaattccaagt

SEQ ID NO: 3236222 - DNA, 25 bp, Homo sapien
tgtcactatcaaggaggatctggtc

SEQ ID NO: 3236223 - DNA, 25 bp, Homo sapien
cacctgctgcccgtggcttgtatga

SEQ ID NO: 3236224 - DNA, 25 bp, Homo sapien
atggctggccctactgacttctgag

SEQ ID NO: 3236225 - DNA, 25 bp, Homo sapien
cagattgcaaacacagaaggatggc

SEQ ID NO: 3236226 - DNA, 25 bp, Homo sapien
cctgggctctgttatgaagtgagca

SEQ ID NO: 3236227 - DNA, 25 bp, Homo sapien
tctagacacattaacaggactggag

SEQ ID NO: 3236228 - DNA, 25 bp, Homo sapien
caggatagggaaggacgtatttcct

SEQ ID NO: 3236229 - DNA, 25 bp, Homo sapien
tccgcttcaggatagggaaggacgt

SEQ ID NO: 3236230 - DNA, 25 bp, Homo sapien
ctggaacgccctccgcttcaggata

SEQ ID NO: 3236231 - DNA, 25 bp, Homo sapien
cgccctccgcttcaggatagggaag

SEQ ID NO: 3236232 - DNA, 25 bp, Homo sapien
atgtctccctttcgctggcgtcttt

SEQ ID NO: 3236233 - DNA, 25 bp, Homo sapien
tgggcatcaatatttgtcactgaaa

SEQ ID NO: 3236234 - DNA, 25 bp, Homo sapien
cgctggcgtcttttcttaacgtttg

SEQ ID NO: 3236235 - DNA, 25 bp, Homo sapien
ggagagcgcagacactttgggcatc

SEQ ID NO: 3236236 - DNA, 25 bp, Homo sapien
ttacaccgctttatttgtccggaca

SEQ ID NO: 3236237 - DNA, 25 bp, Homo sapien
tacaccgctttatttgtccggacat

SEQ ID NO: 3236238 - DNA, 25 bp, Homo sapien
gacttggtgacacgtccttctcccc

SEQ ID NO: 3236239 - DNA, 25 bp, Homo sapien
acgacttggtgacacgtccttctcc

SEQ ID NO: 3236240 - DNA, 25 bp, Homo sapien
ggtcatctagggctccagatgcatt

SEQ ID NO: 3236241 - DNA, 25 bp, Homo sapien
taaagcggtcatctagggctccaga

SEQ ID NO: 3236242 - DNA, 25 bp, Homo sapien
cttataaagcggtcatctagggctc

SEQ ID NO: 3236243 - DNA, 25 bp, Homo sapien
tctagggctccagatgcattcacga

SEQ ID NO: 3236244 - DNA, 25 bp, Homo sapien
cctcctcgagtgtcccaggtagact

SEQ ID NO: 3236245 - DNA, 25 bp, Homo sapien
ctcctcgagtgtcccaggtagactg

SEQ ID NO: 3236246 - DNA, 25 bp, Homo sapien
cacccgtccacttttccgcctcgtg

SEQ ID NO: 3236247 - DNA, 25 bp, Homo sapien
ttccgcctcgtgtgcctcctcgagt

SEQ ID NO: 3236248 - DNA, 25 bp, Homo sapien
tttgcgttccttgagcttgtctgac

SEQ ID NO: 3236249 - DNA, 25 bp, Homo sapien
gtgcgggcacttccctgccatcggt

SEQ ID NO: 3236250 - DNA, 25 bp, Homo sapien
accagggcgcaagtgccatttgggc

SEQ ID NO: 3236251 - DNA, 25 bp, Homo sapien
atcggtccacccaagtggcgggtcg

SEQ ID NO: 3236252 - DNA, 25 bp, Homo sapien
cgggtcggtgagtcagatgcctcca

SEQ ID NO: 3236253 - DNA, 25 bp, Homo sapien
agctctgccttctgacgcccgcgct

SEQ ID NO: 3236254 - DNA, 25 bp, Homo sapien
tctgccttctgacgcccgcgctggc

SEQ ID NO: 3236255 - DNA, 25 bp, Homo sapien
cgctcgggccaggtgagctctgcct

SEQ ID NO: 3236256 - DNA, 25 bp, Homo sapien
ccacgctcgggccaggtgagctctg

SEQ ID NO: 3236257 - DNA, 25 bp, Homo sapien
ctgcgaagagagggttgtatgttta

SEQ ID NO: 3236258 - DNA, 25 bp, Homo sapien
gcagctgggtgcaagccgcctctcc

SEQ ID NO: 3236259 - DNA, 25 bp, Homo sapien
taggatggctttgcccgggaagtcg

SEQ ID NO: 3236260 - DNA, 25 bp, Homo sapien
gaagtcgtcaaaggcgcggctctag

SEQ ID NO: 3236261 - DNA, 25 bp, Homo sapien
ctgcttcgccaaggccatgggcact

SEQ ID NO: 3236262 - DNA, 25 bp, Homo sapien
gttcaagcagcggttgatcctgtcc

SEQ ID NO: 3236263 - DNA, 25 bp, Homo sapien
ttgcccagctcgttcaagcagcggt

SEQ ID NO: 3236264 - DNA, 25 bp, Homo sapien
tcgccaaggccatgggcactgtctt

SEQ ID NO: 3236265 - DNA, 25 bp, Homo sapien
ctggagaggaccagcgagcggacgc

SEQ ID NO: 3236266 - DNA, 25 bp, Homo sapien
agaggaccagcgagcggacgcggct

SEQ ID NO: 3236267 - DNA, 25 bp, Homo sapien
gagcggacgcggctgcggatctgcg

SEQ ID NO: 3236268 - DNA, 25 bp, Homo sapien
acgcggctgcggatctgcgccagag

SEQ ID NO: 3236269 - DNA, 25 bp, Homo sapien
caaaaggaggaagggcccctcgcag

SEQ ID NO: 3236270 - DNA, 25 bp, Homo sapien
gcccagcgcctgctggtcgggcact

SEQ ID NO: 3236271 - DNA, 25 bp, Homo sapien
ccagcgcctgctggtcgggcactgt

SEQ ID NO: 3236272 - DNA, 25 bp, Homo sapien
agcggcccagcgcctgctggtcggg

SEQ ID NO: 3236273 - DNA, 25 bp, Homo sapien
gaaaatcagcggagtgcagtgctct

SEQ ID NO: 3236274 - DNA, 25 bp, Homo sapien
tccccggggaaaatcagcggagtgc

SEQ ID NO: 3236275 - DNA, 25 bp, Homo sapien
tgctctcaggtactgaacggtcatc

SEQ ID NO: 3236276 - DNA, 25 bp, Homo sapien
aacggtcatctcgaggatctccgcc

SEQ ID NO: 3236277 - DNA, 25 bp, Homo sapien
tgataggagaaatccggctccggga

SEQ ID NO: 3236278 - DNA, 25 bp, Homo sapien
gaggatgcgcgcgtacttcgtgtcc

SEQ ID NO: 3236279 - DNA, 25 bp, Homo sapien
tcaggttgaggtaatgccggtccag

SEQ ID NO: 3236280 - DNA, 25 bp, Homo sapien
tccaccgtggtgaggtaatgcacca

SEQ ID NO: 3236281 - DNA, 25 bp, Homo sapien
cccaaagcgaggagaaatctggcgg

SEQ ID NO: 3236282 - DNA, 25 bp, Homo sapien
cctaaaagcgcccaaagcgaggaga

SEQ ID NO: 3236283 - DNA, 25 bp, Homo sapien
tttctcctaaaagcgcccaaagcga

SEQ ID NO: 3236284 - DNA, 25 bp, Homo sapien
tcagaagactcattcgctctttgcc

SEQ ID NO: 3236285 - DNA, 25 bp, Homo sapien
ttttgtgtccaatgcttactattct

SEQ ID NO: 3236286 - DNA, 25 bp, Homo sapien
cattttgtgtccaatgcttactatt

SEQ ID NO: 3236287 - DNA, 25 bp, Homo sapien
ttgtgtccaatgcttactattctcc

SEQ ID NO: 3236288 - DNA, 25 bp, Homo sapien
gtgtccaatgcttactattctccca

SEQ ID NO: 3236289 - DNA, 25 bp, Homo sapien
aattcactggcttggcgttactggc

SEQ ID NO: 3236290 - DNA, 25 bp, Homo sapien
caaaggtcatgtcctacacagcgtc

SEQ ID NO: 3236291 - DNA, 25 bp, Homo sapien
gagaggcaaccgtatatcatgaaat

SEQ ID NO: 3236292 - DNA, 25 bp, Homo sapien
tactggcttcaatacgtgcgacttc

SEQ ID NO: 3236293 - DNA, 25 bp, Homo sapien
gcttttctgaccagctaggaaggga

SEQ ID NO: 3236294 - DNA, 25 bp, Homo sapien
tagaaagaacctgtatggatacacg

SEQ ID NO: 3236295 - DNA, 25 bp, Homo sapien
gcttctgccagatcacttaggtgga

SEQ ID NO: 3236296 - DNA, 25 bp, Homo sapien
tggacatcctcaaagaagctcagag

SEQ ID NO: 3236297 - DNA, 25 bp, Homo sapien
gaatttagtcaggtggataaaccta

SEQ ID NO: 3236298 - DNA, 25 bp, Homo sapien
cggtggaatttagtcaggtggataa

SEQ ID NO: 3236299 - DNA, 25 bp, Homo sapien
gtggaatttagtcaggtggataaac

SEQ ID NO: 3236300 - DNA, 25 bp, Homo sapien
tggaatttagtcaggtggataaacc

SEQ ID NO: 3236301 - DNA, 25 bp, Homo sapien
tagttctatgaatctcgttattgag

SEQ ID NO: 3236302 - DNA, 25 bp, Homo sapien
catagcaggtgtagtcgttaaccat

SEQ ID NO: 3236303 - DNA, 25 bp, Homo sapien
tgctgtatcactagggagcagttat

SEQ ID NO: 3236304 - DNA, 25 bp, Homo sapien
atctcgttattgaggtggtttccag

SEQ ID NO: 3236305 - DNA, 25 bp, Homo sapien
aaaccagatttgggacgtgaacatt

SEQ ID NO: 3236306 - DNA, 25 bp, Homo sapien
taaaccagatttgggacgtgaacat

SEQ ID NO: 3236307 - DNA, 25 bp, Homo sapien
ataaaccagatttgggacgtgaaca

SEQ ID NO: 3236308 - DNA, 25 bp, Homo sapien
aaattaaacttccatgttgaccaca

SEQ ID NO: 3236309 - DNA, 25 bp, Homo sapien
aacttccatgttgaccacatatgct

SEQ ID NO: 3236310 - DNA, 25 bp, Homo sapien
taaacttccatgttgaccacatatg

SEQ ID NO: 3236311 - DNA, 25 bp, Homo sapien
aattaaacttccatgttgaccacat

SEQ ID NO: 3236312 - DNA, 25 bp, Homo sapien
tagagtctcacagttaagaggaggc

SEQ ID NO: 3236313 - DNA, 25 bp, Homo sapien
gagacggatagacaccctaaactgg

SEQ ID NO: 3236314 - DNA, 25 bp, Homo sapien
tgttgggcactctctcctaggcaga

SEQ ID NO: 3236315 - DNA, 25 bp, Homo sapien
cacagagggctactaatccagggag

SEQ ID NO: 3236316 - DNA, 25 bp, Homo sapien
tccaggattcgtcttcgttgaatag

SEQ ID NO: 3236317 - DNA, 25 bp, Homo sapien
caggattcgtcttcgttgaatagat

SEQ ID NO: 3236318 - DNA, 25 bp, Homo sapien
ggattcgtcttcgttgaatagatgc

SEQ ID NO: 3236319 - DNA, 25 bp, Homo sapien
ccaggattcgtcttcgttgaataga

SEQ ID NO: 3236320 - DNA, 25 bp, Homo sapien
caatgttgccttgtggatgaagcgc

SEQ ID NO: 3236321 - DNA, 25 bp, Homo sapien
gatgaagcgccgtaatcctctgagc

SEQ ID NO: 3236322 - DNA, 25 bp, Homo sapien
gggctgcctccacgacttagatatt

SEQ ID NO: 3236323 - DNA, 25 bp, Homo sapien
gattcctagagacagttgacagcgt

SEQ ID NO: 3236324 - DNA, 25 bp, Homo sapien
gaacaaatctcgtttccaaaagtca

SEQ ID NO: 3236325 - DNA, 25 bp, Homo sapien
cctcaggtgaagcaatctagggaga

SEQ ID NO: 3236326 - DNA, 25 bp, Homo sapien
gggagaacatctgctcaggatcaaa

SEQ ID NO: 3236327 - DNA, 25 bp, Homo sapien
cattgtctaattgctttgttcccca

SEQ ID NO: 3236328 - DNA, 25 bp, Homo sapien
taattgacatttgtcagtaattgag

SEQ ID NO: 3236329 - DNA, 25 bp, Homo sapien
gacatttgtcagtaattgagtattt

SEQ ID NO: 3236330 - DNA, 25 bp, Homo sapien
catttgtcagtaattgagtattttc

SEQ ID NO: 3236331 - DNA, 25 bp, Homo sapien
ttgacatttgtcagtaattgagtat

SEQ ID NO: 3236332 - DNA, 25 bp, Homo sapien
agaaaactgtatgagctgtcattta

SEQ ID NO: 3236333 - DNA, 25 bp, Homo sapien
aagaaaactgtatgagctgtcattt

SEQ ID NO: 3236334 - DNA, 25 bp, Homo sapien
gaaaactgtatgagctgtcatttaa

SEQ ID NO: 3236335 - DNA, 25 bp, Homo sapien
ctctctctgcccttactgttgcttg

SEQ ID NO: 3236336 - DNA, 25 bp, Homo sapien
gagccccaggcagagcgctttggga

SEQ ID NO: 3236337 - DNA, 25 bp, Homo sapien
cgctttgggagggtgcagcttctct

SEQ ID NO: 3236338 - DNA, 25 bp, Homo sapien
tggaatgggacacccacgaggcagt

SEQ ID NO: 3236339 - DNA, 25 bp, Homo sapien
aatgcacaactaaagcgtgtctcac

SEQ ID NO: 3236340 - DNA, 25 bp, Homo sapien
ctcaggaaagctaggcgtgggtgct

SEQ ID NO: 3236341 - DNA, 25 bp, Homo sapien
tcctcttcatcacaatgcacaacta

SEQ ID NO: 3236342 - DNA, 25 bp, Homo sapien
cacagggacccaagagcagctcagg

SEQ ID NO: 3236343 - DNA, 25 bp, Homo sapien
gacagtttgtcaaatagctaccaaa

SEQ ID NO: 3236344 - DNA, 25 bp, Homo sapien
tgaaagagaaagatcccataagtga

SEQ ID NO: 3236345 - DNA, 25 bp, Homo sapien
gggcccaaactaattagttagctca

SEQ ID NO: 3236346 - DNA, 25 bp, Homo sapien
tcagggcccaaactaattagttagc

SEQ ID NO: 3236347 - DNA, 25 bp, Homo sapien
gggctggagtcaccagcaaaatgtc

SEQ ID NO: 3236348 - DNA, 25 bp, Homo sapien
cctcaggtttgtgggagaatttgat

SEQ ID NO: 3236349 - DNA, 25 bp, Homo sapien
ttgtatttgaagcacaactaatctg

SEQ ID NO: 3236350 - DNA, 25 bp, Homo sapien
gcctagagaacaacaattctgttaa

SEQ ID NO: 3236351 - DNA, 25 bp, Homo sapien
tggtaaaattgagcccaactcatat

SEQ ID NO: 3236352 - DNA, 25 bp, Homo sapien
cattgacactagatgagaagcccaa

SEQ ID NO: 3236353 - DNA, 25 bp, Homo sapien
gattgactaatggtaaaattgagcc

SEQ ID NO: 3236354 - DNA, 25 bp, Homo sapien
cttgccaaaggataaagattgacta

SEQ ID NO: 3236355 - DNA, 25 bp, Homo sapien
tggcaatgggcttcttgcagcatca

SEQ ID NO: 3236356 - DNA, 25 bp, Homo sapien
aagtccagtgtcaaggcaccagcat

SEQ ID NO: 3236357 - DNA, 25 bp, Homo sapien
catctggcaatgggcttcttgcagc

SEQ ID NO: 3236358 - DNA, 25 bp, Homo sapien
tctggcaatgggcttcttgcagcat

SEQ ID NO: 3236359 - DNA, 25 bp, Homo sapien
tccatagtccgcaaaatgaaggcag

SEQ ID NO: 3236360 - DNA, 25 bp, Homo sapien
tcttaatgtctccaatgtggcgcag

SEQ ID NO: 3236361 - DNA, 25 bp, Homo sapien
cacagactgaagaccggaagcgaat

SEQ ID NO: 3236362 - DNA, 25 bp, Homo sapien
aagaacacccttgatggagcacaga

SEQ ID NO: 3236363 - DNA, 25 bp, Homo sapien
tctcgcgagaggaggcgggtcgcgg

SEQ ID NO: 3236364 - DNA, 25 bp, Homo sapien
tgcaacttgggacgtttaaagggca

SEQ ID NO: 3236365 - DNA, 25 bp, Homo sapien
gcgcagtccccgaccctgcgcgacg

SEQ ID NO: 3236366 - DNA, 25 bp, Homo sapien
gggcgaaggcgcttccgggagcgag

SEQ ID NO: 3236367 - DNA, 25 bp, Homo sapien
gcccgcaggcagcccgttcgtgctc

SEQ ID NO: 3236368 - DNA, 25 bp, Homo sapien
ggtgacagctcgacgctctcagccc

SEQ ID NO: 3236369 - DNA, 25 bp, Homo sapien
gtgacagctcgacgctctcagcccg

SEQ ID NO: 3236370 - DNA, 25 bp, Homo sapien
ggcagcccgttcgtgctctcgccca

SEQ ID NO: 3236371 - DNA, 25 bp, Homo sapien
cggtcttggagacggcagcggcgac

SEQ ID NO: 3236372 - DNA, 25 bp, Homo sapien
accgcggtcttggagacggcagcgg

SEQ ID NO: 3236373 - DNA, 25 bp, Homo sapien
taggaagctccaagcgtgatcaccc

SEQ ID NO: 3236374 - DNA, 25 bp, Homo sapien
gaccctctcgatgggggcgaccgcg

SEQ ID NO: 3236375 - DNA, 25 bp, Homo sapien
gagggtgggtgacagaggacaggca

SEQ ID NO: 3236376 - DNA, 25 bp, Homo sapien
acagaggacaggcagggtagagaga

SEQ ID NO: 3236377 - DNA, 25 bp, Homo sapien
gggagggtgggtgacagaggacagg

SEQ ID NO: 3236378 - DNA, 25 bp, Homo sapien
aggacaggcagggtagagagaaggg

SEQ ID NO: 3236379 - DNA, 25 bp, Homo sapien
agaccatggaactcacgctgggcgg

SEQ ID NO: 3236380 - DNA, 25 bp, Homo sapien
gatcttgatgatacagtcgcccaga

SEQ ID NO: 3236381 - DNA, 25 bp, Homo sapien
tggtcctagcaaagtccagcgggta

SEQ ID NO: 3236382 - DNA, 25 bp, Homo sapien
ccttggacagagacgttgaaaccct

SEQ ID NO: 3236383 - DNA, 25 bp, Homo sapien
tatcaggtcctttgtgagttataga

SEQ ID NO: 3236384 - DNA, 25 bp, Homo sapien
tgagttatagatcccataggatcct

SEQ ID NO: 3236385 - DNA, 25 bp, Homo sapien
cctttgtgagttatagatcccatag

SEQ ID NO: 3236386 - DNA, 25 bp, Homo sapien
caagatcaatatatatcaggtcctt

SEQ ID NO: 3236387 - DNA, 25 bp, Homo sapien
tcagtagaggacacaaggaacgctt

SEQ ID NO: 3236388 - DNA, 25 bp, Homo sapien
gaagccgaacggctatgaagtgcct

SEQ ID NO: 3236389 - DNA, 25 bp, Homo sapien
ggcagtgctcagcttgtatacaggg

SEQ ID NO: 3236390 - DNA, 25 bp, Homo sapien
tatacagggcattggaagtggcttc

SEQ ID NO: 3236391 - DNA, 25 bp, Homo sapien
acactctgggcaatcatccagctca

SEQ ID NO: 3236392 - DNA, 25 bp, Homo sapien
cctgcgactgccgtcacactctggg

SEQ ID NO: 3236393 - DNA, 25 bp, Homo sapien
ttctacgacgaacagtgtcaaaggg

SEQ ID NO: 3236394 - DNA, 25 bp, Homo sapien
aaaatgtgcacgttcttggggtcag

SEQ ID NO: 3236395 - DNA, 25 bp, Homo sapien
tcatggactgcccaactgcgaaaca

SEQ ID NO: 3236396 - DNA, 25 bp, Homo sapien
ttttatggaggaccgaactgaggcc

SEQ ID NO: 3236397 - DNA, 25 bp, Homo sapien
taacacctgtaactaggagggaagc

SEQ ID NO: 3236398 - DNA, 25 bp, Homo sapien
ctgtaaaatgttctcctcgggcaaa

SEQ ID NO: 3236399 - DNA, 25 bp, Homo sapien
gcagtcaactgtccccgtgtacata

SEQ ID NO: 3236400 - DNA, 25 bp, Homo sapien
tcatcatacaacaccaatacaaaag

SEQ ID NO: 3236401 - DNA, 25 bp, Homo sapien
gcacattggaccaggcacctttgaa

SEQ ID NO: 3236402 - DNA, 25 bp, Homo sapien
cacctttgaagaaggccttggctcc

SEQ ID NO: 3236403 - DNA, 25 bp, Homo sapien
taatgaacactcaatgaagcatctc

SEQ ID NO: 3236404 - DNA, 25 bp, Homo sapien
ggaatagtctattaaaccacacaat

SEQ ID NO: 3236405 - DNA, 25 bp, Homo sapien
cacacaatggatctgtgaacttgta

SEQ ID NO: 3236406 - DNA, 25 bp, Homo sapien
tcactgtaaatctgtgaacttgtgt

SEQ ID NO: 3236407 - DNA, 25 bp, Homo sapien
aatgaatactctctacttaacataa

SEQ ID NO: 3236408 - DNA, 25 bp, Homo sapien
ttcaatgaatactctctacttaaca

SEQ ID NO: 3236409 - DNA, 25 bp, Homo sapien
caatgaatactctctacttaacata

SEQ ID NO: 3236410 - DNA, 25 bp, Homo sapien
tgaatactctctacttaacataaaa

SEQ ID NO: 3236411 - DNA, 25 bp, Homo sapien
caagctttgccaaggatacagggac

SEQ ID NO: 3236412 - DNA, 25 bp, Homo sapien
aataaaatggaacgggagcagtcgc

SEQ ID NO: 3236413 - DNA, 25 bp, Homo sapien
tgtggaagataagctcgccttgcgg

SEQ ID NO: 3236414 - DNA, 25 bp, Homo sapien
tagaggtaaccttcgcaggaagcgg

SEQ ID NO: 3236415 - DNA, 25 bp, Homo sapien
tagatatcgagacagctttaggaag

SEQ ID NO: 3236416 - DNA, 25 bp, Homo sapien
cctgagtgtccacagtagatatcga

SEQ ID NO: 3236417 - DNA, 25 bp, Homo sapien
tcatgggtaagtgacggctgtgcct

SEQ ID NO: 3236418 - DNA, 25 bp, Homo sapien
gaaagtatgctaatccgaggtctgg

SEQ ID NO: 3236419 - DNA, 25 bp, Homo sapien
caagagtcttttaagcggaacttca

SEQ ID NO: 3236420 - DNA, 25 bp, Homo sapien
tgccacatgtcaggatacaacacaa

SEQ ID NO: 3236421 - DNA, 25 bp, Homo sapien
caaataggacttggaaaatgtggta

SEQ ID NO: 3236422 - DNA, 25 bp, Homo sapien
tgtggtatattctaagtcaagatgc

SEQ ID NO: 3236423 - DNA, 25 bp, Homo sapien
tgagctatactaaaccaaggcttta

SEQ ID NO: 3236424 - DNA, 25 bp, Homo sapien
cagtgctcaggctctgtagcatgta

SEQ ID NO: 3236425 - DNA, 25 bp, Homo sapien
cagtatgcccttaaaatgtattgga

SEQ ID NO: 3236426 - DNA, 25 bp, Homo sapien
taaataattcacctggccacaacct

SEQ ID NO: 3236427 - DNA, 25 bp, Homo sapien
aattccagcaagtatttataaggcc

SEQ ID NO: 3236428 - DNA, 25 bp, Homo sapien
cagatcctgaggtgtgtcggacagt

SEQ ID NO: 3236429 - DNA, 25 bp, Homo sapien
tatcagcatgaagagccgagaagca

SEQ ID NO: 3236430 - DNA, 25 bp, Homo sapien
tagtttaaggaccacatcagttgca

SEQ ID NO: 3236431 - DNA, 25 bp, Homo sapien
taaatctttcctaataaatgctcat

SEQ ID NO: 3236432 - DNA, 25 bp, Homo sapien
cactcttattggctaagtcttcacc

SEQ ID NO: 3236433 - DNA, 25 bp, Homo sapien
gtacctattgattgtttagagtctc

SEQ ID NO: 3236434 - DNA, 25 bp, Homo sapien
ctgattgtacctattgatttttctc

SEQ ID NO: 3236435 - DNA, 25 bp, Homo sapien
ctctggtccacagaactaactagtg

SEQ ID NO: 3236436 - DNA, 25 bp, Homo sapien
aaatatcacaaacacacagccgccg

SEQ ID NO: 3236437 - DNA, 25 bp, Homo sapien
cctattaacgcacgagaacaacggg

SEQ ID NO: 3236438 - DNA, 25 bp, Homo sapien
ctcgtttaccactcggcaaaggtct

SEQ ID NO: 3236439 - DNA, 25 bp, Homo sapien
cttcctgggccgctaaggacaggca

SEQ ID NO: 3236440 - DNA, 25 bp, Homo sapien
cactgtcggtcgcatcggggtgcat

SEQ ID NO: 3236441 - DNA, 25 bp, Homo sapien
gagcctgaacaggacggagctcagc

SEQ ID NO: 3236442 - DNA, 25 bp, Homo sapien
gagccccaccgtgttgtgactgaag

SEQ ID NO: 3236443 - DNA, 25 bp, Homo sapien
ctccggcagacgagggcaaacagga

SEQ ID NO: 3236444 - DNA, 25 bp, Homo sapien
cggcggcgaagtcgggcggctgggc

SEQ ID NO: 3236445 - DNA, 25 bp, Homo sapien
gcgggctccggcagacgagggcaaa

SEQ ID NO: 3236446 - DNA, 25 bp, Homo sapien
agacgagggcaaacaggatccccag

SEQ ID NO: 3236447 - DNA, 25 bp, Homo sapien
taaggctattttaggaattcaagga

SEQ ID NO: 3236448 - DNA, 25 bp, Homo sapien
ccttagattatacttcccctcttct

SEQ ID NO: 3236449 - DNA, 25 bp, Homo sapien
tcttcgggtagtattcatgagagat

SEQ ID NO: 3236450 - DNA, 25 bp, Homo sapien
tcattttccttagattatacttccc

SEQ ID NO: 3236451 - DNA, 25 bp, Homo sapien
taggagatgctcaacaggtacaagc

SEQ ID NO: 3236452 - DNA, 25 bp, Homo sapien
actaagttagtgaccataaatggac

SEQ ID NO: 3236453 - DNA, 25 bp, Homo sapien
ctgaagataccacggaagtctggga

SEQ ID NO: 3236454 - DNA, 25 bp, Homo sapien
taaactgggatccagatatcatctg

SEQ ID NO: 3236455 - DNA, 25 bp, Homo sapien
catgttagcgggtagatgaacttgc

SEQ ID NO: 3236456 - DNA, 25 bp, Homo sapien
aagaagtctctaagggctgggcatg

SEQ ID NO: 3236457 - DNA, 25 bp, Homo sapien
tgccctacagggagagtctgctaaa

SEQ ID NO: 3236458 - DNA, 25 bp, Homo sapien
tactcggttacatcacggtcaggcc

SEQ ID NO: 3236459 - DNA, 25 bp, Homo sapien
tgaacgctcggcaccaaacttgctg

SEQ ID NO: 3236460 - DNA, 25 bp, Homo sapien
cattttaaggaatctagggcacttc

SEQ ID NO: 3236461 - DNA, 25 bp, Homo sapien
gactttcctaggatacatctgctgc

SEQ ID NO: 3236462 - DNA, 25 bp, Homo sapien
tctgctgctatatattgtgggatcc

SEQ ID NO: 3236463 - DNA, 25 bp, Homo sapien
gtgctatatatctaccatgaaggag

SEQ ID NO: 3236464 - DNA, 25 bp, Homo sapien
tggtgctatatatctaccatgaagg

SEQ ID NO: 3236465 - DNA, 25 bp, Homo sapien
tgctatatatctaccatgaaggagg

SEQ ID NO: 3236466 - DNA, 25 bp, Homo sapien
gctatatatctaccatgaaggaggg

SEQ ID NO: 3236467 - DNA, 25 bp, Homo sapien
gagctgaatacctaccatgaaggag

SEQ ID NO: 3236468 - DNA, 25 bp, Homo sapien
tggtgctgtatacctacagtgaatg

SEQ ID NO: 3236469 - DNA, 25 bp, Homo sapien
ggttatatggagctgaatacctacc

SEQ ID NO: 3236470 - DNA, 25 bp, Homo sapien
ctgccatgaaggagggttatatgga

SEQ ID NO: 3236471 - DNA, 25 bp, Homo sapien
tatagggcgctgtatacctaccgtg

SEQ ID NO: 3236472 - DNA, 25 bp, Homo sapien
tggtgctgtatacctacagtgaacg

SEQ ID NO: 3236473 - DNA, 25 bp, Homo sapien
tgctgtatacctaccgcgaaggagg

SEQ ID NO: 3236474 - DNA, 25 bp, Homo sapien
cagtgaacgaggagtatatggtgct

SEQ ID NO: 3236475 - DNA, 25 bp, Homo sapien
ctcaatggtctccacatggagcctg

SEQ ID NO: 3236476 - DNA, 25 bp, Homo sapien
gctcttccgactcacggggctaaaa

SEQ ID NO: 3236477 - DNA, 25 bp, Homo sapien
gtcaacagcccgcaagctcttccga

SEQ ID NO: 3236478 - DNA, 25 bp, Homo sapien
tcctctctctggactgtgtattctt

SEQ ID NO: 3236479 - DNA, 25 bp, Homo sapien
tggacctcctcacctccagcaaccc

SEQ ID NO: 3236480 - DNA, 25 bp, Homo sapien
cctcctcacctccagcaaccctcat

SEQ ID NO: 3236481 - DNA, 25 bp, Homo sapien
cgcaactggacctcctcacctccag

SEQ ID NO: 3236482 - DNA, 25 bp, Homo sapien
ggacctcctcacctccagcaaccct

SEQ ID NO: 3236483 - DNA, 25 bp, Homo sapien
tcgtaatgtttcctggtgaataacc

SEQ ID NO: 3236484 - DNA, 25 bp, Homo sapien
cgtaatgtttcctggtgaataacct

SEQ ID NO: 3236485 - DNA, 25 bp, Homo sapien
tcctatgaagggatatgaaaccatt

SEQ ID NO: 3236486 - DNA, 25 bp, Homo sapien
cgaattatgcataggtgaactggaa

SEQ ID NO: 3236487 - DNA, 25 bp, Homo sapien
tgagtaatgaacaagagaggcagtg

SEQ ID NO: 3236488 - DNA, 25 bp, Homo sapien
tagaccgagagactacatcctatga

SEQ ID NO: 3236489 - DNA, 25 bp, Homo sapien
gtgctgaaccatgaactaaagaata

SEQ ID NO: 3236490 - DNA, 25 bp, Homo sapien
gggcaagttacttttccatacctca

SEQ ID NO: 3236491 - DNA, 25 bp, Homo sapien
tactttagatacaggaaggagcagc

SEQ ID NO: 3236492 - DNA, 25 bp, Homo sapien
caccaagtactgtaacaatgtctga

SEQ ID NO: 3236493 - DNA, 25 bp, Homo sapien
caaactccccaaaaatcatcattaa

SEQ ID NO: 3236494 - DNA, 25 bp, Homo sapien
acacaaactccccaaaaatcatcat

SEQ ID NO: 3236495 - DNA, 25 bp, Homo sapien
gcaaacacaaactccccaaaaatca

SEQ ID NO: 3236496 - DNA, 25 bp, Homo sapien
caaacacaaactccccaaaaatcat

SEQ ID NO: 3236497 - DNA, 25 bp, Homo sapien
tcaaaagggtagaatccactaatca

SEQ ID NO: 3236498 - DNA, 25 bp, Homo sapien
caaaagggtagaatccactaatcat

SEQ ID NO: 3236499 - DNA, 25 bp, Homo sapien
gtcaaaagggtagaatccactaatc

SEQ ID NO: 3236500 - DNA, 25 bp, Homo sapien
attatgagaaattactacccttcta

SEQ ID NO: 3236501 - DNA, 25 bp, Homo sapien
tgactcatgtgagtttccatacaca

SEQ ID NO: 3236502 - DNA, 25 bp, Homo sapien
gagctgactcatgtgagtttccata

SEQ ID NO: 3236503 - DNA, 25 bp, Homo sapien
actgagctgactcatgtgagtttcc

SEQ ID NO: 3236504 - DNA, 25 bp, Homo sapien
gcttcattgtaaactcactcctctg

SEQ ID NO: 3236505 - DNA, 25 bp, Homo sapien
ccaacatagcttctctaggttatag

SEQ ID NO: 3236506 - DNA, 25 bp, Homo sapien
taactggtttatctatgagtgagcc

SEQ ID NO: 3236507 - DNA, 25 bp, Homo sapien
gagcctgagtctatttatcccaaca

SEQ ID NO: 3236508 - DNA, 25 bp, Homo sapien
tagaattccactaacggtgttgggc

SEQ ID NO: 3236509 - DNA, 25 bp, Homo sapien
caattgtggaaaggccatgaaccag

SEQ ID NO: 3236510 - DNA, 25 bp, Homo sapien
ggtaagactacaggagaccagtgga

SEQ ID NO: 3236511 - DNA, 25 bp, Homo sapien
aacagatttaagagttgccagggct

SEQ ID NO: 3236512 - DNA, 25 bp, Homo sapien
tccaagagcagatggtaaagttgtc

SEQ ID NO: 3236513 - DNA, 25 bp, Homo sapien
tccataccaggacagaatgtaatct

SEQ ID NO: 3236514 - DNA, 25 bp, Homo sapien
cagaatgtaatctctataactgtag

SEQ ID NO: 3236515 - DNA, 25 bp, Homo sapien
gagcagatggtaaagttgtccctca

SEQ ID NO: 3236516 - DNA, 25 bp, Homo sapien
acaacatcattgcagacaactttaa

SEQ ID NO: 3236517 - DNA, 25 bp, Homo sapien
catcattgcagacaactttaaccac

SEQ ID NO: 3236518 - DNA, 25 bp, Homo sapien
cattgcagacaactttaaccacatc

SEQ ID NO: 3236519 - DNA, 25 bp, Homo sapien
ttgcagacaactttaaccacatcca

SEQ ID NO: 3236520 - DNA, 25 bp, Homo sapien
ccctacacgaacagcatcacagggc

SEQ ID NO: 3236521 - DNA, 25 bp, Homo sapien
agcaaggtcccctacacgaacagca

SEQ ID NO: 3236522 - DNA, 25 bp, Homo sapien
ttcagcagcaaggtcccctacacga

SEQ ID NO: 3236523 - DNA, 25 bp, Homo sapien
aaggtcccctacacgaacagcatca

SEQ ID NO: 3236524 - DNA, 25 bp, Homo sapien
tctccgttaacagtggaaggcagat

SEQ ID NO: 3236525 - DNA, 25 bp, Homo sapien
gccaaagcagcttgatctatggaag

SEQ ID NO: 3236526 - DNA, 25 bp, Homo sapien
gcctggtactcagactgccacaagt

SEQ ID NO: 3236527 - DNA, 25 bp, Homo sapien
tagccttctggtgggttgtagcatc

SEQ ID NO: 3236528 - DNA, 25 bp, Homo sapien
gtgcaacacaaaaggtcttggctgt

SEQ ID NO: 3236529 - DNA, 25 bp, Homo sapien
cgtgcaacacaaaaggtcttggctg

SEQ ID NO: 3236530 - DNA, 25 bp, Homo sapien
cagaacccgagaacacgtttgtaga

SEQ ID NO: 3236531 - DNA, 25 bp, Homo sapien
acaccagaacccgagaacacgtttg

SEQ ID NO: 3236532 - DNA, 25 bp, Homo sapien
caaaacaccagaacccgagaacacg

SEQ ID NO: 3236533 - DNA, 25 bp, Homo sapien
ccagaacccgagaacacgtttgtag

SEQ ID NO: 3236534 - DNA, 25 bp, Homo sapien
tctggattactcagtaactccacta

SEQ ID NO: 3236535 - DNA, 25 bp, Homo sapien
tactcagtaactccactaccggctt

SEQ ID NO: 3236536 - DNA, 25 bp, Homo sapien
gcttcaagaactccacatcagagtt

SEQ ID NO: 3236537 - DNA, 25 bp, Homo sapien
tgctgttaatgagcttgatgaagtc

SEQ ID NO: 3236538 - DNA, 25 bp, Homo sapien
gggttaccaaatagtccacacctgc

SEQ ID NO: 3236539 - DNA, 25 bp, Homo sapien
caaatagtccacacctgcctttact

SEQ ID NO: 3236540 - DNA, 25 bp, Homo sapien
gttaccaaatagtccacacctgcct

SEQ ID NO: 3236541 - DNA, 25 bp, Homo sapien
taccaaatagtccacacctgccttt

SEQ ID NO: 3236542 - DNA, 25 bp, Homo sapien
tcatcttacaatacaggaactgtgt

SEQ ID NO: 3236543 - DNA, 25 bp, Homo sapien
taaaaaatcaggagctcgcctgtag

SEQ ID NO: 3236544 - DNA, 25 bp, Homo sapien
tggtgctagagaaccagtggtagat

SEQ ID NO: 3236545 - DNA, 25 bp, Homo sapien
tgtgggcaacaccacaggaccttgt

SEQ ID NO: 3236546 - DNA, 25 bp, Homo sapien
ctattagcagagtcagtcactgctc

SEQ ID NO: 3236547 - DNA, 25 bp, Homo sapien
cagctgccctttaatatccggaacc

SEQ ID NO: 3236548 - DNA, 25 bp, Homo sapien
tgagtttcactaacagatgcacctt

SEQ ID NO: 3236549 - DNA, 25 bp, Homo sapien
aaggtggcattcacatttttggctc

SEQ ID NO: 3236550 - DNA, 25 bp, Homo sapien
taatggcaattgtgagtttcactaa

SEQ ID NO: 3236551 - DNA, 25 bp, Homo sapien
ccgtcctccacctttggaagaactg

SEQ ID NO: 3236552 - DNA, 25 bp, Homo sapien
ctgaggtgcttgactgattgccata

SEQ ID NO: 3236553 - DNA, 25 bp, Homo sapien
tgacttgcattgttaaccgtcctcc

SEQ ID NO: 3236554 - DNA, 25 bp, Homo sapien
gactgattgccataagttgacttgc

SEQ ID NO: 3236555 - DNA, 25 bp, Homo sapien
gaatgacttctgctctataatagta

SEQ ID NO: 3236556 - DNA, 25 bp, Homo sapien
ctataatgcacaccaatatctgtct

SEQ ID NO: 3236557 - DNA, 25 bp, Homo sapien
aatcctgaatgacttctgctctata

SEQ ID NO: 3236558 - DNA, 25 bp, Homo sapien
gacttctgctctataatagtatcta

SEQ ID NO: 3236559 - DNA, 25 bp, Homo sapien
aaagctgctaattgtagtcgcctgg

SEQ ID NO: 3236560 - DNA, 25 bp, Homo sapien
gggaaagctgctaattgtagtcgcc

SEQ ID NO: 3236561 - DNA, 25 bp, Homo sapien
aattgtagtcgcctggattatttcc

SEQ ID NO: 3236562 - DNA, 25 bp, Homo sapien
tgctaattgtagtcgcctggattat

SEQ ID NO: 3236563 - DNA, 25 bp, Homo sapien
caaactccagataagtaagaaataa

SEQ ID NO: 3236564 - DNA, 25 bp, Homo sapien
ggtttcagagagttaacaatcaggt

SEQ ID NO: 3236565 - DNA, 25 bp, Homo sapien
aatggagcgagacagcggttaaccc

SEQ ID NO: 3236566 - DNA, 25 bp, Homo sapien
cagccactgaatgccgcaggcttga

SEQ ID NO: 3236567 - DNA, 25 bp, Homo sapien
tccaccttgttaaggagagtaatgt

SEQ ID NO: 3236568 - DNA, 25 bp, Homo sapien
aaaattaaactagctgaggcaccaa

SEQ ID NO: 3236569 - DNA, 25 bp, Homo sapien
gacaaactaatctactgtgaaccta

SEQ ID NO: 3236570 - DNA, 25 bp, Homo sapien
gagtgtgttgaagcctcaaaagcct

SEQ ID NO: 3236571 - DNA, 25 bp, Homo sapien
taagtaatggtttgcacatcctccc

SEQ ID NO: 3236572 - DNA, 25 bp, Homo sapien
tcccacgagtgcagtctaagtaatg

SEQ ID NO: 3236573 - DNA, 25 bp, Homo sapien
ggttccctaggatggtcattaccca

SEQ ID NO: 3236574 - DNA, 25 bp, Homo sapien
tggagacctccatccggttccctag

SEQ ID NO: 3236575 - DNA, 25 bp, Homo sapien
tcctggccctcaggagatcagcttt

SEQ ID NO: 3236576 - DNA, 25 bp, Homo sapien
tggccctcaggagatcagctttcat

SEQ ID NO: 3236577 - DNA, 25 bp, Homo sapien
ctggccctcaggagatcagctttca

SEQ ID NO: 3236578 - DNA, 25 bp, Homo sapien
gttcctggccctcaggagatcagct

SEQ ID NO: 3236579 - DNA, 25 bp, Homo sapien
cttgctggtcataggcagggcctcc

SEQ ID NO: 3236580 - DNA, 25 bp, Homo sapien
caggattcggattctcttctcacac

SEQ ID NO: 3236581 - DNA, 25 bp, Homo sapien
cacagtcagttggttgatgtacctc

SEQ ID NO: 3236582 - DNA, 25 bp, Homo sapien
cagggcctcccaggattcggattct

SEQ ID NO: 3236583 - DNA, 25 bp, Homo sapien
aaaaacaagagttccttggagctgc

SEQ ID NO: 3236584 - DNA, 25 bp, Homo sapien
tggttagaggattataaaaacaaga

SEQ ID NO: 3236585 - DNA, 25 bp, Homo sapien
gatgctgtagaaccctggcgtatgc

SEQ ID NO: 3236586 - DNA, 25 bp, Homo sapien
tagcaacatcaacagacttcctgtg

SEQ ID NO: 3236587 - DNA, 25 bp, Homo sapien
aacatgagtttgagctgcacaggcc

SEQ ID NO: 3236588 - DNA, 25 bp, Homo sapien
tgctctgcctagacaacaggaagat

SEQ ID NO: 3236589 - DNA, 25 bp, Homo sapien
tgcacaggcccactcgtacagggtt

SEQ ID NO: 3236590 - DNA, 25 bp, Homo sapien
tatgggcagttaagcttttggagac

SEQ ID NO: 3236591 - DNA, 25 bp, Homo sapien
gcttgaagttgtccacattattccc

SEQ ID NO: 3236592 - DNA, 25 bp, Homo sapien
ccttagcctcctttgaatgtatgta

SEQ ID NO: 3236593 - DNA, 25 bp, Homo sapien
attattcccttagcctcctttgaat

SEQ ID NO: 3236594 - DNA, 25 bp, Homo sapien
tgaagttgtccacattattccctta

SEQ ID NO: 3236595 - DNA, 25 bp, Homo sapien
tggtattagaattgtgctagtctcc

SEQ ID NO: 3236596 - DNA, 25 bp, Homo sapien
tctcctcctaggatgagttgaagtg

SEQ ID NO: 3236597 - DNA, 25 bp, Homo sapien
gattatactaaggacccactgtcag

SEQ ID NO: 3236598 - DNA, 25 bp, Homo sapien
tttgtgaattacagattgttgaatc

SEQ ID NO: 3236599 - DNA, 25 bp, Homo sapien
tatttacttttcataatgcttccag

SEQ ID NO: 3236600 - DNA, 25 bp, Homo sapien
ttatttacttttcataatgcttcca

SEQ ID NO: 3236601 - DNA, 25 bp, Homo sapien
tgttctactaccacttatgagtgaa

SEQ ID NO: 3236602 - DNA, 25 bp, Homo sapien
agtgctctcggtagaacgtattggc

SEQ ID NO: 3236603 - DNA, 25 bp, Homo sapien
gaacgtattggccaagatatcttca

SEQ ID NO: 3236604 - DNA, 25 bp, Homo sapien
tccaaagtgctctcggtagaacgta

SEQ ID NO: 3236605 - DNA, 25 bp, Homo sapien
tctcggtagaacgtattggccaaga

SEQ ID NO: 3236606 - DNA, 25 bp, Homo sapien
taaatgttccacagattcccaaaaa

SEQ ID NO: 3236607 - DNA, 25 bp, Homo sapien
cttgttagcattctttaaatgttcc

SEQ ID NO: 3236608 - DNA, 25 bp, Homo sapien
aatcagagctcttttgtccatcctt

SEQ ID NO: 3236609 - DNA, 25 bp, Homo sapien
ttcccaaaaactaatcagagctctt

SEQ ID NO: 3236610 - DNA, 25 bp, Homo sapien
tttatttcctacaagacactgctga

SEQ ID NO: 3236611 - DNA, 25 bp, Homo sapien
ctttagggtctcataaacatcttcc

SEQ ID NO: 3236612 - DNA, 25 bp, Homo sapien
gataaatttcaccaactaattgtgg

SEQ ID NO: 3236613 - DNA, 25 bp, Homo sapien
ataaatgaagggtaatacctatcct

SEQ ID NO: 3236614 - DNA, 25 bp, Homo sapien
aaatcatctgtgaggcatgtttttc

SEQ ID NO: 3236615 - DNA, 25 bp, Homo sapien
gaaatcatctgtgaggcatgttttt

SEQ ID NO: 3236616 - DNA, 25 bp, Homo sapien
ggaaatcatctgtgaggcatgtttt

SEQ ID NO: 3236617 - DNA, 25 bp, Homo sapien
ccttgttggaaatcatctgtgaggc

SEQ ID NO: 3236618 - DNA, 25 bp, Homo sapien
aaaactggcttgttcattgatctga

SEQ ID NO: 3236619 - DNA, 25 bp, Homo sapien
ttgatctgattggtaccatcatcca

SEQ ID NO: 3236620 - DNA, 25 bp, Homo sapien
tctcgcagtttgtttacagcaaaac

SEQ ID NO: 3236621 - DNA, 25 bp, Homo sapien
tctcatttagttctcgcagtttgtt

SEQ ID NO: 3236622 - DNA, 25 bp, Homo sapien
cattttgaatagaatttagagcttg

SEQ ID NO: 3236623 - DNA, 25 bp, Homo sapien
attttgaatagaatttagagcttgc

SEQ ID NO: 3236624 - DNA, 25 bp, Homo sapien
gcattttgaatagaatttagagctt

SEQ ID NO: 3236625 - DNA, 25 bp, Homo sapien
gacaaccttgaaagcaaagagttac

SEQ ID NO: 3236626 - DNA, 25 bp, Homo sapien
agacaaccttgaaagcaaagagtta

SEQ ID NO: 3236627 - DNA, 25 bp, Homo sapien
aggtctgtgcgttctttctctatta

SEQ ID NO: 3236628 - DNA, 25 bp, Homo sapien
catgccaaggttttcacaccaccaa

SEQ ID NO: 3236629 - DNA, 25 bp, Homo sapien
tccgttcttgccatgtgcagctgaa

SEQ ID NO: 3236630 - DNA, 25 bp, Homo sapien
ttctctattaggattatttcatcct

SEQ ID NO: 3236631 - DNA, 25 bp, Homo sapien
taccatgacaaagtaacatggcaat

SEQ ID NO: 3236632 - DNA, 25 bp, Homo sapien
caacttcttgtaggcttaccatgac

SEQ ID NO: 3236633 - DNA, 25 bp, Homo sapien
ctcactgagtttccggtgtaaattc

SEQ ID NO: 3236634 - DNA, 25 bp, Homo sapien
aaagtaacatggcaattgctcacca

SEQ ID NO: 3236635 - DNA, 25 bp, Homo sapien
tttaattgattcttcgacttttcca

SEQ ID NO: 3236636 - DNA, 25 bp, Homo sapien
tgattcttcgacttttccataaact

SEQ ID NO: 3236637 - DNA, 25 bp, Homo sapien
gatctatagatttgaaaggcagctt

SEQ ID NO: 3236638 - DNA, 25 bp, Homo sapien
tttgatctatagatttgaaaggcag

SEQ ID NO: 3236639 - DNA, 25 bp, Homo sapien
tcgaaccccccgatatacatgatgg

SEQ ID NO: 3236640 - DNA, 25 bp, Homo sapien
gacataagttgagtgaaacagacta

SEQ ID NO: 3236641 - DNA, 25 bp, Homo sapien
tggtcagtggctagaaagttacaat

SEQ ID NO: 3236642 - DNA, 25 bp, Homo sapien
ccccgatatacatgatggaatatta

SEQ ID NO: 3236643 - DNA, 25 bp, Homo sapien
taaccttgaggtagtcaggagaagg

SEQ ID NO: 3236644 - DNA, 25 bp, Homo sapien
aagaagtcgcgaggaagtctttcca

SEQ ID NO: 3236645 - DNA, 25 bp, Homo sapien
gagaagggctcaagaaggcataaag

SEQ ID NO: 3236646 - DNA, 25 bp, Homo sapien
tcccctgcacgtcgataaccttgag

SEQ ID NO: 3236647 - DNA, 25 bp, Homo sapien
cagattcagaaaagcttgattctcg

SEQ ID NO: 3236648 - DNA, 25 bp, Homo sapien
gtgtaaattccaaactatctgctcg

SEQ ID NO: 3236649 - DNA, 25 bp, Homo sapien
tgattctcgagccttattcaaggct

SEQ ID NO: 3236650 - DNA, 25 bp, Homo sapien
aatacagcaaagtcataggaagcag

SEQ ID NO: 3236651 - DNA, 25 bp, Homo sapien
gttcagccaaggcgtctttcctccc

SEQ ID NO: 3236652 - DNA, 25 bp, Homo sapien
tcctcgaagttcaaaaatctcccca

SEQ ID NO: 3236653 - DNA, 25 bp, Homo sapien
ggttcagccaaggcgtctttcctcc

SEQ ID NO: 3236654 - DNA, 25 bp, Homo sapien
tcgaagttcaaaaatctccccaatc

SEQ ID NO: 3236655 - DNA, 25 bp, Homo sapien
atttgcttcctcttcgaggtggtca

SEQ ID NO: 3236656 - DNA, 25 bp, Homo sapien
gcttcctcttcgaggtggtcaggtg

SEQ ID NO: 3236657 - DNA, 25 bp, Homo sapien
catatctctagctggtactgaggct

SEQ ID NO: 3236658 - DNA, 25 bp, Homo sapien
tcctcttcgaggtggtcaggtgtgc

SEQ ID NO: 3236659 - DNA, 25 bp, Homo sapien
ggcaattaatgttcttctcacccat

SEQ ID NO: 3236660 - DNA, 25 bp, Homo sapien
gttgatggttcttccaaaagtgacc

SEQ ID NO: 3236661 - DNA, 25 bp, Homo sapien
tccaaaagtgacctgaacgagggca

SEQ ID NO: 3236662 - DNA, 25 bp, Homo sapien
cctgaacgagggcaattaatgttct

SEQ ID NO: 3236663 - DNA, 25 bp, Homo sapien
taaaactattatactaatcttgtac

SEQ ID NO: 3236664 - DNA, 25 bp, Homo sapien
tagcaaatgttctttacagtgtttc

SEQ ID NO: 3236665 - DNA, 25 bp, Homo sapien
ttctgaccacaaggaaaatatattc

SEQ ID NO: 3236666 - DNA, 25 bp, Homo sapien
gaatcacaggcatgcgtgtactacc

SEQ ID NO: 3236667 - DNA, 25 bp, Homo sapien
tctgattgtggtcggtggtgccaac

SEQ ID NO: 3236668 - DNA, 25 bp, Homo sapien
tggtgccaacttcccatttggccaa

SEQ ID NO: 3236669 - DNA, 25 bp, Homo sapien
aaaatccagctgactgtgtcccgga

SEQ ID NO: 3236670 - DNA, 25 bp, Homo sapien
cggaaaatattgatgtagtaaacca

SEQ ID NO: 3236671 - DNA, 25 bp, Homo sapien
gatctctatgcttttcaggctaata

SEQ ID NO: 3236672 - DNA, 25 bp, Homo sapien
tctatgcttttcaggctaatagccc

SEQ ID NO: 3236673 - DNA, 25 bp, Homo sapien
ttcaggctaatagcccaggcctcac

SEQ ID NO: 3236674 - DNA, 25 bp, Homo sapien
tgcttttcaggctaatagcccaggc

SEQ ID NO: 3236675 - DNA, 25 bp, Homo sapien
gtggcgggcattttgctgtccaaca

SEQ ID NO: 3236676 - DNA, 25 bp, Homo sapien
tcttgtttcttgcagtgcattgaat

SEQ ID NO: 3236677 - DNA, 25 bp, Homo sapien
ttattataccgtggcgggcattttg

SEQ ID NO: 3236678 - DNA, 25 bp, Homo sapien
tggctcttgtttcttgcagtgcatt

SEQ ID NO: 3236679 - DNA, 25 bp, Homo sapien
taagttgatctaaatgaactctcag

SEQ ID NO: 3236680 - DNA, 25 bp, Homo sapien
taaatgaactctcagctcaggacac

SEQ ID NO: 3236681 - DNA, 25 bp, Homo sapien
cttggccagctttaagttgatctaa

SEQ ID NO: 3236682 - DNA, 25 bp, Homo sapien
caaacttggccagctttaagttgat

SEQ ID NO: 3236683 - DNA, 25 bp, Homo sapien
tcaatacggttctcagttaagccct

SEQ ID NO: 3236684 - DNA, 25 bp, Homo sapien
cacataaaactagagggaggtaact

SEQ ID NO: 3236685 - DNA, 25 bp, Homo sapien
gctttgaatgctcaaactatgggaa

SEQ ID NO: 3236686 - DNA, 25 bp, Homo sapien
gttgcctaccacagcataagtcccg

SEQ ID NO: 3236687 - DNA, 25 bp, Homo sapien
aagatcggccctaagtaaagagcac

SEQ ID NO: 3236688 - DNA, 25 bp, Homo sapien
cataaactttgacgtgtgccataca

SEQ ID NO: 3236689 - DNA, 25 bp, Homo sapien
aactgccattaaagatgggtttcag

SEQ ID NO: 3236690 - DNA, 25 bp, Homo sapien
agttaccataaagctaatgctctgg

SEQ ID NO: 3236691 - DNA, 25 bp, Homo sapien
ttttgcaacttgaaacctagacaca

SEQ ID NO: 3236692 - DNA, 25 bp, Homo sapien
caaggtcaaattgctggaagagtcc

SEQ ID NO: 3236693 - DNA, 25 bp, Homo sapien
gactggccgagaccatatcaagtat

SEQ ID NO: 3236694 - DNA, 25 bp, Homo sapien
ttgtcgtctgaatcccgcattggca

SEQ ID NO: 3236695 - DNA, 25 bp, Homo sapien
caactgtcgtgggtactgaagggac

SEQ ID NO: 3236696 - DNA, 25 bp, Homo sapien
gaagcaaccaagcaaatacctagtg

SEQ ID NO: 3236697 - DNA, 25 bp, Homo sapien
taacttcctgctactggaagcaacc

SEQ ID NO: 3236698 - DNA, 25 bp, Homo sapien
cgcgcccggccataagggagagttt

SEQ ID NO: 3236699 - DNA, 25 bp, Homo sapien
ctgtgggattccaatgtcaggtaag

SEQ ID NO: 3236700 - DNA, 25 bp, Homo sapien
attaaaacttccagagcatcaaagc

SEQ ID NO: 3236701 - DNA, 25 bp, Homo sapien
aattaaaacttccagagcatcaaag

SEQ ID NO: 3236702 - DNA, 25 bp, Homo sapien
aaagctgtgcacatcttaggtccat

SEQ ID NO: 3236703 - DNA, 25 bp, Homo sapien
taggtccatcacatccacgagtcag

SEQ ID NO: 3236704 - DNA, 25 bp, Homo sapien
aaatttcaatcatggtctctaggag

SEQ ID NO: 3236705 - DNA, 25 bp, Homo sapien
catcatagcagacttggtagagcag

SEQ ID NO: 3236706 - DNA, 25 bp, Homo sapien
tacctctaccgaaggaaaccatgaa

SEQ ID NO: 3236707 - DNA, 25 bp, Homo sapien
tacagccaaaatccttctaagcatg

SEQ ID NO: 3236708 - DNA, 25 bp, Homo sapien
taatggcaaatttgcaagagacaca

SEQ ID NO: 3236709 - DNA, 25 bp, Homo sapien
taccgttgacttgagaaattgatac

SEQ ID NO: 3236710 - DNA, 25 bp, Homo sapien
gctttccttgtgaccacgtagcaga

SEQ ID NO: 3236711 - DNA, 25 bp, Homo sapien
gggctcgcaagtgtatcgtaagaat

SEQ ID NO: 3236712 - DNA, 25 bp, Homo sapien
gacttaaatcaactcaggcagctgt

SEQ ID NO: 3236713 - DNA, 25 bp, Homo sapien
tagatacaaactatgagcacacagt

SEQ ID NO: 3236714 - DNA, 25 bp, Homo sapien
gctcatttggttagaggaactctca

SEQ ID NO: 3236715 - DNA, 25 bp, Homo sapien
ccatgagcagggttagtgtgaaacc

SEQ ID NO: 3236716 - DNA, 25 bp, Homo sapien
caatgccaggcttgacttgcaatta

SEQ ID NO: 3236717 - DNA, 25 bp, Homo sapien
tgttagggctctacttggccatgag

SEQ ID NO: 3236718 - DNA, 25 bp, Homo sapien
cacctggtgggaatagagtctctct

SEQ ID NO: 3236719 - DNA, 25 bp, Homo sapien
gcttttcctaatgagcacctggtgg

SEQ ID NO: 3236720 - DNA, 25 bp, Homo sapien
tccgatgagtgtcagttacaagggc

SEQ ID NO: 3236721 - DNA, 25 bp, Homo sapien
tataaacccatagccagacaggacg

SEQ ID NO: 3236722 - DNA, 25 bp, Homo sapien
tacagttagatggttcagagcacaa

SEQ ID NO: 3236723 - DNA, 25 bp, Homo sapien
agaactgatttggacctttccctca

SEQ ID NO: 3236724 - DNA, 25 bp, Homo sapien
gaatgaactcaatggatcaaagacc

SEQ ID NO: 3236725 - DNA, 25 bp, Homo sapien
acaaacaggtactgggcaaatggat

SEQ ID NO: 3236726 - DNA, 25 bp, Homo sapien
aagtttgggccaggactagtgagga

SEQ ID NO: 3236727 - DNA, 25 bp, Homo sapien
gactagtgaggatgcagcttgtgca

SEQ ID NO: 3236728 - DNA, 25 bp, Homo sapien
aaaacaccatcaggcagcttttcca

SEQ ID NO: 3236729 - DNA, 25 bp, Homo sapien
gatgcagcttgtgcaaagactaaaa

SEQ ID NO: 3236730 - DNA, 25 bp, Homo sapien
aatctctgccttacacgccgtggaa

SEQ ID NO: 3236731 - DNA, 25 bp, Homo sapien
tgagtccgaatctctgccttacacg

SEQ ID NO: 3236732 - DNA, 25 bp, Homo sapien
cacgccgtggaactcctccatcatc

SEQ ID NO: 3236733 - DNA, 25 bp, Homo sapien
taatttctgagtccgaatctctgcc

SEQ ID NO: 3236734 - DNA, 25 bp, Homo sapien
gcaacagtgtgagactccgttctca

SEQ ID NO: 3236735 - DNA, 25 bp, Homo sapien
aggctgattcaagcaggagaattgc

SEQ ID NO: 3236736 - DNA, 25 bp, Homo sapien
tacttgggaggctgattcaagcagg

SEQ ID NO: 3236737 - DNA, 25 bp, Homo sapien
aacagtgtgagactccgttctcaaa

SEQ ID NO: 3236738 - DNA, 25 bp, Homo sapien
ctcgtaagacgtgccgactgcccat

SEQ ID NO: 3236739 - DNA, 25 bp, Homo sapien
ggtctgcttatccaacacgcttcat

SEQ ID NO: 3236740 - DNA, 25 bp, Homo sapien
acgcttcatttcctcgtaagacgtg

SEQ ID NO: 3236741 - DNA, 25 bp, Homo sapien
tgtttggtctgcttatccaacacgc

SEQ ID NO: 3236742 - DNA, 25 bp, Homo sapien
tattccctggtgaagacgattccgc

SEQ ID NO: 3236743 - DNA, 25 bp, Homo sapien
tgacacgatgtgatgagaaggccac

SEQ ID NO: 3236744 - DNA, 25 bp, Homo sapien
tcctggcacagcaaaagaacgtcag

SEQ ID NO: 3236745 - DNA, 25 bp, Homo sapien
gacactctgtggtatccttgcagct

SEQ ID NO: 3236746 - DNA, 25 bp, Homo sapien
tatcaatgctgaccagagtccactg

SEQ ID NO: 3236747 - DNA, 25 bp, Homo sapien
taattctgggcttcattgcaatgcc

SEQ ID NO: 3236748 - DNA, 25 bp, Homo sapien
gccaggcacccatggtatatcaatg

SEQ ID NO: 3236749 - DNA, 25 bp, Homo sapien
tgcaatgccactgtcaagaaaccca

SEQ ID NO: 3236750 - DNA, 25 bp, Homo sapien
agaagccgctgtgcactgcgctgct

SEQ ID NO: 3236751 - DNA, 25 bp, Homo sapien
atggctgtcccgagtggcaacggcc

SEQ ID NO: 3236752 - DNA, 25 bp, Homo sapien
tgctgtcgggcgtgcgtcactgctt

SEQ ID NO: 3236753 - DNA, 25 bp, Homo sapien
aagttcctttacctcgcgcgcagtc

SEQ ID NO: 3236754 - DNA, 25 bp, Homo sapien
gagtttgacacgtctcccggtagtg

SEQ ID NO: 3236755 - DNA, 25 bp, Homo sapien
tagtgcgcccgccctttaatcctta

SEQ ID NO: 3236756 - DNA, 25 bp, Homo sapien
tgagtttgacacgtctcccggtagt

SEQ ID NO: 3236757 - DNA, 25 bp, Homo sapien
tttgacacgtctcccggtagtgcgc

SEQ ID NO: 3236758 - DNA, 25 bp, Homo sapien
tagcacgggagaatttaaagaccgc

SEQ ID NO: 3236759 - DNA, 25 bp, Homo sapien
catccgccgattggccagctgtgga

SEQ ID NO: 3236760 - DNA, 25 bp, Homo sapien
gtacacaaacactggcacgtggagc

SEQ ID NO: 3236761 - DNA, 25 bp, Homo sapien
ggttacgcccgagcagcctaatcct

SEQ ID NO: 3236762 - DNA, 25 bp, Homo sapien
cccgacaggtaagaatgcgcaggct

SEQ ID NO: 3236763 - DNA, 25 bp, Homo sapien
tcgccgcaccccgacaggtaagaat

SEQ ID NO: 3236764 - DNA, 25 bp, Homo sapien
agagaggtgagacactcgccgcacc

SEQ ID NO: 3236765 - DNA, 25 bp, Homo sapien
gcaccccgacaggtaagaatgcgca

SEQ ID NO: 3236766 - DNA, 25 bp, Homo sapien
ctcggggttgcaatccagcaacagc

SEQ ID NO: 3236767 - DNA, 25 bp, Homo sapien
cggggttgcaatccagcaacagcat

SEQ ID NO: 3236768 - DNA, 25 bp, Homo sapien
tcggggttgcaatccagcaacagca

SEQ ID NO: 3236769 - DNA, 25 bp, Homo sapien
taacgagaagacgaatctagaagct

SEQ ID NO: 3236770 - DNA, 25 bp, Homo sapien
gtccgtccccgcattaacgagaaga

SEQ ID NO: 3236771 - DNA, 25 bp, Homo sapien
ctagaagcttgagcctgcaggacaa

SEQ ID NO: 3236772 - DNA, 25 bp, Homo sapien
tgcaggacaaaagctcgggctctgt

SEQ ID NO: 3236773 - DNA, 25 bp, Homo sapien
tgtccagtcccgcgcccctccgggc

SEQ ID NO: 3236774 - DNA, 25 bp, Homo sapien
acctccccgcccttcacaaccagct

SEQ ID NO: 3236775 - DNA, 25 bp, Homo sapien
ctttgtccagtcccgcgcccctccg

SEQ ID NO: 3236776 - DNA, 25 bp, Homo sapien
tccagtcccgcgcccctccgggctg

SEQ ID NO: 3236777 - DNA, 25 bp, Homo sapien
ggtgcgttgaccgaggcccctgtct

SEQ ID NO: 3236778 - DNA, 25 bp, Homo sapien
cttcctgcggctaagtggacaggcg

SEQ ID NO: 3236779 - DNA, 25 bp, Homo sapien
gacaggcgactgcttgcagggatcc

SEQ ID NO: 3236780 - DNA, 25 bp, Homo sapien
tgctggttgaggtcagcgcccgttt

SEQ ID NO: 3236781 - DNA, 25 bp, Homo sapien
gaatgcttgtggacatagctcctaa

SEQ ID NO: 3236782 - DNA, 25 bp, Homo sapien
caactccatgggctaatttgaaaca

SEQ ID NO: 3236783 - DNA, 25 bp, Homo sapien
gattacattagggatagccaactcc

SEQ ID NO: 3236784 - DNA, 25 bp, Homo sapien
tgatttgagatacgctgtcacacca

SEQ ID NO: 3236785 - DNA, 25 bp, Homo sapien
aggcttaggcactccaggcttccaa

SEQ ID NO: 3236786 - DNA, 25 bp, Homo sapien
catcactggctacaagcaggcttag

SEQ ID NO: 3236787 - DNA, 25 bp, Homo sapien
gctgccttgtgtagtggagcttctc

SEQ ID NO: 3236788 - DNA, 25 bp, Homo sapien
gggcatcactggctacaagcaggct

SEQ ID NO: 3236789 - DNA, 25 bp, Homo sapien
tatcttacaagggaattttgggctc

SEQ ID NO: 3236790 - DNA, 25 bp, Homo sapien
taacagaatccagcatagagcgggc

SEQ ID NO: 3236791 - DNA, 25 bp, Homo sapien
gagtattattcgatagcaccaacaa

SEQ ID NO: 3236792 - DNA, 25 bp, Homo sapien
aatacagtgtatgagtacccaaagg

SEQ ID NO: 3236793 - DNA, 25 bp, Homo sapien
gaaacttggcacagtctggaaatcc

SEQ ID NO: 3236794 - DNA, 25 bp, Homo sapien
aacacaatcattcctgtcagggtgt

SEQ ID NO: 3236795 - DNA, 25 bp, Homo sapien
tctgtctgagcacggcaacacaatc

SEQ ID NO: 3236796 - DNA, 25 bp, Homo sapien
tggaaatccacatgaccaagcgaga

SEQ ID NO: 3236797 - DNA, 25 bp, Homo sapien
ctgcgggaggaaaaaagcagcagct

SEQ ID NO: 3236798 - DNA, 25 bp, Homo sapien
aaagcagcagctctgagttacttac

SEQ ID NO: 3236799 - DNA, 25 bp, Homo sapien
aaaaaagcagcagctctgagttact

SEQ ID NO: 3236800 - DNA, 25 bp, Homo sapien
gaaaaaagcagcagctctgagttac

SEQ ID NO: 3236801 - DNA, 25 bp, Homo sapien
tataaccagtactaaaatgttaatg

SEQ ID NO: 3236802 - DNA, 25 bp, Homo sapien
tctagactctggtaagtataaccag

SEQ ID NO: 3236803 - DNA, 25 bp, Homo sapien
gcagtcccatttttggtctctagac

SEQ ID NO: 3236804 - DNA, 25 bp, Homo sapien
tactactagaaatacgagtgtcagt

SEQ ID NO: 3236805 - DNA, 25 bp, Homo sapien
tctcagaaggagattagacacaaca

SEQ ID NO: 3236806 - DNA, 25 bp, Homo sapien
taaaagacaaagcatacacaaccag

SEQ ID NO: 3236807 - DNA, 25 bp, Homo sapien
tttgcatgaaatgaaggcgttcttc

SEQ ID NO: 3236808 - DNA, 25 bp, Homo sapien
cacaaccagcatattataggcatgt

SEQ ID NO: 3236809 - DNA, 25 bp, Homo sapien
tggaacaaggatgcatactataact

SEQ ID NO: 3236810 - DNA, 25 bp, Homo sapien
tataacttatgtcttcctcagcgac

SEQ ID NO: 3236811 - DNA, 25 bp, Homo sapien
caaaggttgtaaatactgcacggag

SEQ ID NO: 3236812 - DNA, 25 bp, Homo sapien
gagtcaaagactgcagtagagtggt

SEQ ID NO: 3236813 - DNA, 25 bp, Homo sapien
tgatgtcacgatttccatgacataa

SEQ ID NO: 3236814 - DNA, 25 bp, Homo sapien
ttcaaatccttgaatgataaagcca

SEQ ID NO: 3236815 - DNA, 25 bp, Homo sapien
tacttttctatgctagtaggaattc

SEQ ID NO: 3236816 - DNA, 25 bp, Homo sapien
tcaaatccttgaatgataaagccat

SEQ ID NO: 3236817 - DNA, 25 bp, Homo sapien
gctagtaggaattcaaatccttgaa

SEQ ID NO: 3236818 - DNA, 25 bp, Homo sapien
gaaggacacaccaagctcagtcaga

SEQ ID NO: 3236819 - DNA, 25 bp, Homo sapien
gaaagccgcactgcaggtagatcag

SEQ ID NO: 3236820 - DNA, 25 bp, Homo sapien
tcaggtgcttctacgaggctggtgc

SEQ ID NO: 3236821 - DNA, 25 bp, Homo sapien
ttaaagtacctaacaagtgccaggc

SEQ ID NO: 3236822 - DNA, 25 bp, Homo sapien
gaccagcatgggccagaccgcgtct

SEQ ID NO: 3236823 - DNA, 25 bp, Homo sapien
caggaggatagcttgcatccaggaa

SEQ ID NO: 3236824 - DNA, 25 bp, Homo sapien
tcaagaccagcatgggccagaccgc

SEQ ID NO: 3236825 - DNA, 25 bp, Homo sapien
aagaccagcatgggccagaccgcgt

SEQ ID NO: 3236826 - DNA, 25 bp, Homo sapien
tccatgtaacatatacccggttgcc

SEQ ID NO: 3236827 - DNA, 25 bp, Homo sapien
gatagatcctccctaaaggtagctc

SEQ ID NO: 3236828 - DNA, 25 bp, Homo sapien
ttaaggatacatggaggccagtgag

SEQ ID NO: 3236829 - DNA, 25 bp, Homo sapien
ccttataaggcatccaagattagga

SEQ ID NO: 3236830 - DNA, 25 bp, Homo sapien
cgtcgcggacatggtgagtatctct

SEQ ID NO: 3236831 - DNA, 25 bp, Homo sapien
catgccgccgagcatgtcgggagtt

SEQ ID NO: 3236832 - DNA, 25 bp, Homo sapien
aacttttgggcaggcgtcagcgccc

SEQ ID NO: 3236833 - DNA, 25 bp, Homo sapien
ggtgtggtacgctccgtgacgtcat

SEQ ID NO: 3236834 - DNA, 25 bp, Homo sapien
actccgacagccgagatcaggttgc

SEQ ID NO: 3236835 - DNA, 25 bp, Homo sapien
tattgtgtgatgtgttgccccgggt

SEQ ID NO: 3236836 - DNA, 25 bp, Homo sapien
tccacgttaactgcgctgcgggagc

SEQ ID NO: 3236837 - DNA, 25 bp, Homo sapien
ggttgccccagcttgtccacgttaa

SEQ ID NO: 3236838 - DNA, 25 bp, Homo sapien
aactcgtgagcgcaggtgatgcgtc

SEQ ID NO: 3236839 - DNA, 25 bp, Homo sapien
tagagcatagccgaattatggcacg

SEQ ID NO: 3236840 - DNA, 25 bp, Homo sapien
caagcttgctggtagaaactagaaa

SEQ ID NO: 3236841 - DNA, 25 bp, Homo sapien
gatgctgcccgcaaggagcttacaa

SEQ ID NO: 3236842 - DNA, 25 bp, Homo sapien
tgactctccgtatgaagtgctcaca

SEQ ID NO: 3236843 - DNA, 25 bp, Homo sapien
caagatctcatcgattacactgcca

SEQ ID NO: 3236844 - DNA, 25 bp, Homo sapien
cagcttttcaggatgtacaacacat

SEQ ID NO: 3236845 - DNA, 25 bp, Homo sapien
taaacataataagtgtgtcactggc

SEQ ID NO: 3236846 - DNA, 25 bp, Homo sapien
tctctataccgctaacttcaaaagt

SEQ ID NO: 3236847 - DNA, 25 bp, Homo sapien
gggtcacgtgttttatagcaaagtc

SEQ ID NO: 3236848 - DNA, 25 bp, Homo sapien
tccctagggtcacgtgttttatagc

SEQ ID NO: 3236849 - DNA, 25 bp, Homo sapien
ggtggtactctctataccgctaact

SEQ ID NO: 3236850 - DNA, 25 bp, Homo sapien
atttatcacccacagtaatatattc

SEQ ID NO: 3236851 - DNA, 25 bp, Homo sapien
tattccatctcactaaagaggccaa

SEQ ID NO: 3236852 - DNA, 25 bp, Homo sapien
gaggccaatcctttccatgtccgtt

SEQ ID NO: 3236853 - DNA, 25 bp, Homo sapien
aaattgtgacacatatttatcaccc

SEQ ID NO: 3236854 - DNA, 25 bp, Homo sapien
aaataacctgcctgaagatctgaca

SEQ ID NO: 3236855 - DNA, 25 bp, Homo sapien
ttttctctccattactagggaggaa

SEQ ID NO: 3236856 - DNA, 25 bp, Homo sapien
agggaggaatgctttgcctagattt

SEQ ID NO: 3236857 - DNA, 25 bp, Homo sapien
tctttggaccctccaggtagcatct

SEQ ID NO: 3236858 - DNA, 25 bp, Homo sapien
tattgttccatagtagcttcctaag

SEQ ID NO: 3236859 - DNA, 25 bp, Homo sapien
tttgactgtgcgctgaaaaatggga

SEQ ID NO: 3236860 - DNA, 25 bp, Homo sapien
ccacctattgttccatagtagcttc

SEQ ID NO: 3236861 - DNA, 25 bp, Homo sapien
tatttttctcgaggttttgactgtg

SEQ ID NO: 3236862 - DNA, 25 bp, Homo sapien
gaagtcggcagagtgtgaaaactgt

SEQ ID NO: 3236863 - DNA, 25 bp, Homo sapien
cttatactttagttttgctgcatca

SEQ ID NO: 3236864 - DNA, 25 bp, Homo sapien
gctgcatcatagaagtcggcagagt

SEQ ID NO: 3236865 - DNA, 25 bp, Homo sapien
tgaaaactgtttacctatggtaata

SEQ ID NO: 3236866 - DNA, 25 bp, Homo sapien
gcgtcaaaatagtcccttgggtgaa

SEQ ID NO: 3236867 - DNA, 25 bp, Homo sapien
taaacgatggtgctcttcattcgct

SEQ ID NO: 3236868 - DNA, 25 bp, Homo sapien
agatttaacttaaatggtgctcctt

SEQ ID NO: 3236869 - DNA, 25 bp, Homo sapien
taaggattagcgtcaaaatagtccc

SEQ ID NO: 3236870 - DNA, 25 bp, Homo sapien
aatttagccacataagggtcagcag

SEQ ID NO: 3236871 - DNA, 25 bp, Homo sapien
cagcagaatgtgatgggtaaggatc

SEQ ID NO: 3236872 - DNA, 25 bp, Homo sapien
tggtccacttggtgggtggaaaatc

SEQ ID NO: 3236873 - DNA, 25 bp, Homo sapien
cattatactttcaactggtctgctt

SEQ ID NO: 3236874 - DNA, 25 bp, Homo sapien
gggagaacttctacaagggagggca

SEQ ID NO: 3236875 - DNA, 25 bp, Homo sapien
tttgctaggtcagaatcaattttcc

SEQ ID NO: 3236876 - DNA, 25 bp, Homo sapien
gcaaaaaacggtcaccatcgtcatc

SEQ ID NO: 3236877 - DNA, 25 bp, Homo sapien
taaaacccatatgagttaagctacc

SEQ ID NO: 3236878 - DNA, 25 bp, Homo sapien
tgccacaaaattgtcaccaaagtgc

SEQ ID NO: 3236879 - DNA, 25 bp, Homo sapien
ttaaagccatatatacttagaagat

SEQ ID NO: 3236880 - DNA, 25 bp, Homo sapien
caaatatactttgtaacatattaac

SEQ ID NO: 3236881 - DNA, 25 bp, Homo sapien
aattctggtgtccaaaggtttactg

SEQ ID NO: 3236882 - DNA, 25 bp, Homo sapien
attctggtgtccaaaggtttactgg

SEQ ID NO: 3236883 - DNA, 25 bp, Homo sapien
tataggtgcaagtcaaatacctgta

SEQ ID NO: 3236884 - DNA, 25 bp, Homo sapien
cacattaattttataggtgcaagtc

SEQ ID NO: 3236885 - DNA, 25 bp, Homo sapien
aataggatggtactgaagaagtctt

SEQ ID NO: 3236886 - DNA, 25 bp, Homo sapien
taataggatggtactgaagaagtct

SEQ ID NO: 3236887 - DNA, 25 bp, Homo sapien
ataggatggtactgaagaagtcttg

SEQ ID NO: 3236888 - DNA, 25 bp, Homo sapien
ctaataggatggtactgaagaagtc

SEQ ID NO: 3236889 - DNA, 25 bp, Homo sapien
tagaaagctacttgtcttccagttg

SEQ ID NO: 3236890 - DNA, 25 bp, Homo sapien
ttttaactgcttgagctatctgctc

SEQ ID NO: 3236891 - DNA, 25 bp, Homo sapien
gctatctgctccataacatcttata

SEQ ID NO: 3236892 - DNA, 25 bp, Homo sapien
tactcatagttaagatctagaaagc

SEQ ID NO: 3236893 - DNA, 25 bp, Homo sapien
ctagcgggtaaggcctaggtgggat

SEQ ID NO: 3236894 - DNA, 25 bp, Homo sapien
taaggcctaggtgggatgccccagg

SEQ ID NO: 3236895 - DNA, 25 bp, Homo sapien
gcgggtaaggcctaggtgggatgcc

SEQ ID NO: 3236896 - DNA, 25 bp, Homo sapien
ggtaaggcctaggtgggatgcccca

SEQ ID NO: 3236897 - DNA, 25 bp, Homo sapien
cgatgagcccgggtaagagttggac

SEQ ID NO: 3236898 - DNA, 25 bp, Homo sapien
cgagagagatgagccgcggcgatga

SEQ ID NO: 3236899 - DNA, 25 bp, Homo sapien
cctgcgtccgctgtggcttacaggc

SEQ ID NO: 3236900 - DNA, 25 bp, Homo sapien
gtgcggcggcggttgcgagagagat

SEQ ID NO: 3236901 - DNA, 25 bp, Homo sapien
tggtcatgggccgttcaaatcccca

SEQ ID NO: 3236902 - DNA, 25 bp, Homo sapien
tattggtcatgggccgttcaaatcc

SEQ ID NO: 3236903 - DNA, 25 bp, Homo sapien
catgggccgttcaaatccccaaatg

SEQ ID NO: 3236904 - DNA, 25 bp, Homo sapien
taatacatgtttaggttaattcatt

SEQ ID NO: 3236905 - DNA, 25 bp, Homo sapien
ggtgtgcacgcttccagcttcctga

SEQ ID NO: 3236906 - DNA, 25 bp, Homo sapien
gagattccatggtggacatgcctgg

SEQ ID NO: 3236907 - DNA, 25 bp, Homo sapien
agcttcctgatctatctttgcaagg

SEQ ID NO: 3236908 - DNA, 25 bp, Homo sapien
gtagcccttttctatcagcgcagct

SEQ ID NO: 3236909 - DNA, 25 bp, Homo sapien
tcaaaatgcaggtagtttcaagcgc

SEQ ID NO: 3236910 - DNA, 25 bp, Homo sapien
tgccattcactgtcagccccgtatg

SEQ ID NO: 3236911 - DNA, 25 bp, Homo sapien
gagaggcccatcattcggtcagcca

SEQ ID NO: 3236912 - DNA, 25 bp, Homo sapien
tcaaaagtgtttatggaatcccacc

SEQ ID NO: 3236913 - DNA, 25 bp, Homo sapien
caatctggtcgttttttcatgctac

SEQ ID NO: 3236914 - DNA, 25 bp, Homo sapien
gggcaatctggtcgttttttcatgc

SEQ ID NO: 3236915 - DNA, 25 bp, Homo sapien
ctggtcgttttttcatgctactata

SEQ ID NO: 3236916 - DNA, 25 bp, Homo sapien
taagggcaatctggtcgttttttca

SEQ ID NO: 3236917 - DNA, 25 bp, Homo sapien
tattgttagggtggccgtactccta

SEQ ID NO: 3236918 - DNA, 25 bp, Homo sapien
gccgtactcctaatttgaggcacag

SEQ ID NO: 3236919 - DNA, 25 bp, Homo sapien
tagggtggccgtactcctaatttga

SEQ ID NO: 3236920 - DNA, 25 bp, Homo sapien
ggtggccgtactcctaatttgaggc

SEQ ID NO: 3236921 - DNA, 25 bp, Homo sapien
tcatgccactgcaacaagcgtgaga

SEQ ID NO: 3236922 - DNA, 25 bp, Homo sapien
gaattataagagtgcccccaacatc

SEQ ID NO: 3236923 - DNA, 25 bp, Homo sapien
ccaaactattcttcatcaaggtgga

SEQ ID NO: 3236924 - DNA, 25 bp, Homo sapien
tgtccctcctcactatttgctataa

SEQ ID NO: 3236925 - DNA, 25 bp, Homo sapien
taagctgcggatagcaggtcatccc

SEQ ID NO: 3236926 - DNA, 25 bp, Homo sapien
tagacacccgagcttatgactcctg

SEQ ID NO: 3236927 - DNA, 25 bp, Homo sapien
ctttcaggaagctacaggcagagcc

SEQ ID NO: 3236928 - DNA, 25 bp, Homo sapien
taccgcagctgttgcaaactgatgg

SEQ ID NO: 3236929 - DNA, 25 bp, Homo sapien
cacaggacgggaactactttgaaca

SEQ ID NO: 3236930 - DNA, 25 bp, Homo sapien
gccagaatgataaggagcaagctct

SEQ ID NO: 3236931 - DNA, 25 bp, Homo sapien
ggcagtcagtatgtctatcccaggt

SEQ ID NO: 3236932 - DNA, 25 bp, Homo sapien
tatttatagcgaacacccctgaggc

SEQ ID NO: 3236933 - DNA, 25 bp, Homo sapien
acttgtttgtagagagtgaaatgcg

SEQ ID NO: 3236934 - DNA, 25 bp, Homo sapien
ttaaaaatccttcagcggcatcact

SEQ ID NO: 3236935 - DNA, 25 bp, Homo sapien
tgaaatgcgtgtctttgcacaacat

SEQ ID NO: 3236936 - DNA, 25 bp, Homo sapien
cagcggcatcacttgtttgtagaga

SEQ ID NO: 3236937 - DNA, 25 bp, Homo sapien
atcgcccttccgtaacaaatgatgg

SEQ ID NO: 3236938 - DNA, 25 bp, Homo sapien
cgtaacaaatgatgggtcccgggtg

SEQ ID NO: 3236939 - DNA, 25 bp, Homo sapien
cattccctggagctggcgcgcatct

SEQ ID NO: 3236940 - DNA, 25 bp, Homo sapien
ttctcgtccggatgaaaagttcagc

SEQ ID NO: 3236941 - DNA, 25 bp, Homo sapien
cggagcggctcagagatttgacaaa

SEQ ID NO: 3236942 - DNA, 25 bp, Homo sapien
gcggagcggctcagagatttgacaa

SEQ ID NO: 3236943 - DNA, 25 bp, Homo sapien
ctgcggagcggctcagagatttgac

SEQ ID NO: 3236944 - DNA, 25 bp, Homo sapien
tgcggagcggctcagagatttgaca

SEQ ID NO: 3236945 - DNA, 25 bp, Homo sapien
tccgggggcggcggcaactccgtca

SEQ ID NO: 3236946 - DNA, 25 bp, Homo sapien
gggcggcggcaactccgtcaagtgg

SEQ ID NO: 3236947 - DNA, 25 bp, Homo sapien
cgggggcggcggcaactccgtcaag

SEQ ID NO: 3236948 - DNA, 25 bp, Homo sapien
ggggcggcggcaactccgtcaagtg

SEQ ID NO: 3236949 - DNA, 25 bp, Homo sapien
ggggcatagacttcaaccagccttt

SEQ ID NO: 3236950 - DNA, 25 bp, Homo sapien
cgagggcggccagaaagcgcgcgag

SEQ ID NO: 3236951 - DNA, 25 bp, Homo sapien
gcttttgctgcgaggtggggactcc

SEQ ID NO: 3236952 - DNA, 25 bp, Homo sapien
ccagggtaggtgtcggcattcttgc

SEQ ID NO: 3236953 - DNA, 25 bp, Homo sapien
tgctggtctccgtgaagagcaggat

SEQ ID NO: 3236954 - DNA, 25 bp, Homo sapien
ctgctggtctccgtgaagagcagga

SEQ ID NO: 3236955 - DNA, 25 bp, Homo sapien
ggtctccgtgaagagcaggatgtag

SEQ ID NO: 3236956 - DNA, 25 bp, Homo sapien
ctggtctccgtgaagagcaggatgt

SEQ ID NO: 3236957 - DNA, 25 bp, Homo sapien
ccttcaaggtccacctctgacaccc

SEQ ID NO: 3236958 - DNA, 25 bp, Homo sapien
cttcaaggtccacctctgacacccc

SEQ ID NO: 3236959 - DNA, 25 bp, Homo sapien
gccaacaagaggtgaagtccccgaa

SEQ ID NO: 3236960 - DNA, 25 bp, Homo sapien
gcaatctcagaacacttgccgccaa

SEQ ID NO: 3236961 - DNA, 25 bp, Homo sapien
agattgttggcagggaagcaatctc

SEQ ID NO: 3236962 - DNA, 25 bp, Homo sapien
aagcacaggaaagattgttggcagg

SEQ ID NO: 3236963 - DNA, 25 bp, Homo sapien
gagcgtccacggcacatgtttacag

SEQ ID NO: 3236964 - DNA, 25 bp, Homo sapien
ccagggcaatgaagtgctagcatag

SEQ ID NO: 3236965 - DNA, 25 bp, Homo sapien
tgacagcgtctccatctggcataag

SEQ ID NO: 3236966 - DNA, 25 bp, Homo sapien
tacagatgatgaaaggccctccaag

SEQ ID NO: 3236967 - DNA, 25 bp, Homo sapien
aaggaagtcatacacaatgcgtgga

SEQ ID NO: 3236968 - DNA, 25 bp, Homo sapien
taagttgatctgcacagccagaccg

SEQ ID NO: 3236969 - DNA, 25 bp, Homo sapien
gagatttcacaagggccaggtcctc

SEQ ID NO: 3236970 - DNA, 25 bp, Homo sapien
gccagaccggcaagtatatgcaaat

SEQ ID NO: 3236971 - DNA, 25 bp, Homo sapien
gaagaaattggatccactggtgcat

SEQ ID NO: 3236972 - DNA, 25 bp, Homo sapien
actggtgcatttgaactcaatagcc

SEQ ID NO: 3236973 - DNA, 25 bp, Homo sapien
cctgcctttgggagtagacccttct

SEQ ID NO: 3236974 - DNA, 25 bp, Homo sapien
gaactcaatagcctgcctttgggag

SEQ ID NO: 3236975 - DNA, 25 bp, Homo sapien
cagggactcatctctactggtaaca

SEQ ID NO: 3236976 - DNA, 25 bp, Homo sapien
ccactgagcatgtccctacttgcaa

SEQ ID NO: 3236977 - DNA, 25 bp, Homo sapien
ggctgagattccaacagtcctttcc

SEQ ID NO: 3236978 - DNA, 25 bp, Homo sapien
agaagatcaaagctaggtcccctgc

SEQ ID NO: 3236979 - DNA, 25 bp, Homo sapien
gagctgtgatacctagagctgtgtc

SEQ ID NO: 3236980 - DNA, 25 bp, Homo sapien
accaagagctgtgatacctagagct

SEQ ID NO: 3236981 - DNA, 25 bp, Homo sapien
tgtgatacctagagctgtgtcacca

SEQ ID NO: 3236982 - DNA, 25 bp, Homo sapien
caagagctgtgatacctagagctgt

SEQ ID NO: 3236983 - DNA, 25 bp, Homo sapien
ggaaaatggctactacacataggag

SEQ ID NO: 3236984 - DNA, 25 bp, Homo sapien
cacctagagcagtgtcaccgagagc

SEQ ID NO: 3236985 - DNA, 25 bp, Homo sapien
tgatacctagatccgtgacaccaag

SEQ ID NO: 3236986 - DNA, 25 bp, Homo sapien
aaatctgtgatacctagagctatga

SEQ ID NO: 3236987 - DNA, 25 bp, Homo sapien
cgtgctctaggaatgctgcgtgctt

SEQ ID NO: 3236988 - DNA, 25 bp, Homo sapien
ttttgactgagcacaagcctgtctg

SEQ ID NO: 3236989 - DNA, 25 bp, Homo sapien
gaatcaatgggagacaggcgagccc

SEQ ID NO: 3236990 - DNA, 25 bp, Homo sapien
tctgctggatgactctaagtgacct

SEQ ID NO: 3236991 - DNA, 25 bp, Homo sapien
ccctagatagtgtgattctgtcaga

SEQ ID NO: 3236992 - DNA, 25 bp, Homo sapien
gaaacatcgttgagtagcctacctt

SEQ ID NO: 3236993 - DNA, 25 bp, Homo sapien
gactagcctctccttatctcacaga

SEQ ID NO: 3236994 - DNA, 25 bp, Homo sapien
gaaattaagtcaactgcatgcagct

SEQ ID NO: 3236995 - DNA, 25 bp, Homo sapien
ggtaagatttcactgtgtgtacaca

SEQ ID NO: 3236996 - DNA, 25 bp, Homo sapien
tgtatgagaacatataatccatatg

SEQ ID NO: 3236997 - DNA, 25 bp, Homo sapien
tataatccatatgatatgttgtaca

SEQ ID NO: 3236998 - DNA, 25 bp, Homo sapien
tatctgtaagcaatactagtaggta

SEQ ID NO: 3236999 - DNA, 25 bp, Homo sapien
cagcatcatgaacaatgagctctta

SEQ ID NO: 3237000 - DNA, 25 bp, Homo sapien
tgtgttgtaaagttgcatcgctatt

SEQ ID NO: 3237001 - DNA, 25 bp, Homo sapien
ttagaagtgcaaacagtaagtaaat

SEQ ID NO: 3237002 - DNA, 25 bp, Homo sapien
aaagccttcggtaataatcatgaca

SEQ ID NO: 3237003 - DNA, 25 bp, Homo sapien
ctgtcagagggctcagcggttccca

SEQ ID NO: 3237004 - DNA, 25 bp, Homo sapien
ctgtgtgacgaagatgagagctaac

SEQ ID NO: 3237005 - DNA, 25 bp, Homo sapien
tgggtaagcctcctcgtagcccagt

SEQ ID NO: 3237006 - DNA, 25 bp, Homo sapien
tttccaggctgacgtaaaaagcgag

SEQ ID NO: 3237007 - DNA, 25 bp, Homo sapien
gcgagatatgtgtcctgggtaagcc

SEQ ID NO: 3237008 - DNA, 25 bp, Homo sapien
gacaggatgatctttggcattgact

SEQ ID NO: 3237009 - DNA, 25 bp, Homo sapien
ggatgatctttggcattgactgtct

SEQ ID NO: 3237010 - DNA, 25 bp, Homo sapien
aggatgatctttggcattgactgtc

SEQ ID NO: 3237011 - DNA, 25 bp, Homo sapien
ggactcattgtctcccgtcatttcc

SEQ ID NO: 3237012 - DNA, 25 bp, Homo sapien
ccaccgatcggcaggttcagcagag

SEQ ID NO: 3237013 - DNA, 25 bp, Homo sapien
cgtcatttcccaccgatcggcaggt

SEQ ID NO: 3237014 - DNA, 25 bp, Homo sapien
tcacctctcagtggactcattgtct

SEQ ID NO: 3237015 - DNA, 25 bp, Homo sapien
gaaactttagcttgcaaacctctct

SEQ ID NO: 3237016 - DNA, 25 bp, Homo sapien
atccagaaactttagcttgcaaacc

SEQ ID NO: 3237017 - DNA, 25 bp, Homo sapien
agcctgcaacgccagcacttccaga

SEQ ID NO: 3237018 - DNA, 25 bp, Homo sapien
gcttgcaaacctctctcttaaaaca

SEQ ID NO: 3237019 - DNA, 25 bp, Homo sapien
tacctttgacataacggcactttgc

SEQ ID NO: 3237020 - DNA, 25 bp, Homo sapien
gagaagaggaagttgatgcccagaa

SEQ ID NO: 3237021 - DNA, 25 bp, Homo sapien
gagaaactgtacaccatacctttga

SEQ ID NO: 3237022 - DNA, 25 bp, Homo sapien
ctttaatcgtcaaaacccagtgagg

SEQ ID NO: 3237023 - DNA, 25 bp, Homo sapien
tggactctgcccttaaagacatctg

SEQ ID NO: 3237024 - DNA, 25 bp, Homo sapien
cccagaaggcaagaaatggaccctg

SEQ ID NO: 3237025 - DNA, 25 bp, Homo sapien
tggaccctggcctttctaaacttgc

SEQ ID NO: 3237026 - DNA, 25 bp, Homo sapien
cagtcctgtgcctttccggaggaaa

SEQ ID NO: 3237027 - DNA, 25 bp, Homo sapien
ctagatgatggcaacttaagacaac

SEQ ID NO: 3237028 - DNA, 25 bp, Homo sapien
aagggaccttgtaagactgatatac

SEQ ID NO: 3237029 - DNA, 25 bp, Homo sapien
tagttaatagaagcgtaagttatgc

SEQ ID NO: 3237030 - DNA, 25 bp, Homo sapien
ttgtaaagtgagatttgatttccac

SEQ ID NO: 3237031 - DNA, 25 bp, Homo sapien
ggtgtaaaccaaatataatactggc

SEQ ID NO: 3237032 - DNA, 25 bp, Homo sapien
tctaatagtaggatgttctctctga

SEQ ID NO: 3237033 - DNA, 25 bp, Homo sapien
cactattacttctgaggtgtaaacc

SEQ ID NO: 3237034 - DNA, 25 bp, Homo sapien
tgtcagttaccctaaaaaccagctc

SEQ ID NO: 3237035 - DNA, 25 bp, Homo sapien
aaagattcaatacggcaaccacagc

SEQ ID NO: 3237036 - DNA, 25 bp, Homo sapien
tgctgtactcaaaggaatgtccatg

SEQ ID NO: 3237037 - DNA, 25 bp, Homo sapien
caccaaggctagaaagatgcatatc

SEQ ID NO: 3237038 - DNA, 25 bp, Homo sapien
tgtgtcactgactgttgcgaggctt

SEQ ID NO: 3237039 - DNA, 25 bp, Homo sapien
tgccctccttccgtggtacctttga

SEQ ID NO: 3237040 - DNA, 25 bp, Homo sapien
ttcacgcctgcataatccccagagc

SEQ ID NO: 3237041 - DNA, 25 bp, Homo sapien
ttgaaccgagccactttctcaccag

SEQ ID NO: 3237042 - DNA, 25 bp, Homo sapien
cacacagacaaaccacaccagaagc

SEQ ID NO: 3237043 - DNA, 25 bp, Homo sapien
tgactccttgcatttgggtacccga

SEQ ID NO: 3237044 - DNA, 25 bp, Homo sapien
tgtggccagcaaaatgatgatccgg

SEQ ID NO: 3237045 - DNA, 25 bp, Homo sapien
tattcccgatctgaataccacagag

SEQ ID NO: 3237046 - DNA, 25 bp, Homo sapien
aattttagatcacttgtcacccagc

SEQ ID NO: 3237047 - DNA, 25 bp, Homo sapien
tttatccaggctgcgcagagacggt

SEQ ID NO: 3237048 - DNA, 25 bp, Homo sapien
tgtgactgtacagacaggcccgtgc

SEQ ID NO: 3237049 - DNA, 25 bp, Homo sapien
tatattatccccagggtatcggcac

SEQ ID NO: 3237050 - DNA, 25 bp, Homo sapien
tcagtgagcagactcgccagtgtcc

SEQ ID NO: 3237051 - DNA, 25 bp, Homo sapien
tgaccagcgtgaagaaacagagcct

SEQ ID NO: 3237052 - DNA, 25 bp, Homo sapien
tatttctagtgtccttcagacccgc

SEQ ID NO: 3237053 - DNA, 25 bp, Homo sapien
cagggctatgctaaaaagtgtccac

SEQ ID NO: 3237054 - DNA, 25 bp, Homo sapien
cactgtgcgatgcaagacccttcag

SEQ ID NO: 3237055 - DNA, 25 bp, Homo sapien
accacctatttgtcccctgagtcag

SEQ ID NO: 3237056 - DNA, 25 bp, Homo sapien
ctccagaaaaggtcccaagccattt

SEQ ID NO: 3237057 - DNA, 25 bp, Homo sapien
tggacaatccatcagagcacacacg

SEQ ID NO: 3237058 - DNA, 25 bp, Homo sapien
tgtcagcctaaaggaatgccgcagt

SEQ ID NO: 3237059 - DNA, 25 bp, Homo sapien
cgaggcggaaagagcccttgagcca

SEQ ID NO: 3237060 - DNA, 25 bp, Homo sapien
tctggtcataaatagaacattggcc

SEQ ID NO: 3237061 - DNA, 25 bp, Homo sapien
aaacgttagccggtgtgtgcctgtg

SEQ ID NO: 3237062 - DNA, 25 bp, Homo sapien
tctcatagcacattaaaatggctga

SEQ ID NO: 3237063 - DNA, 25 bp, Homo sapien
catgacagtagcatagtggtttgca

SEQ ID NO: 3237064 - DNA, 25 bp, Homo sapien
taaaactcaggctcatcgaagtgaa

SEQ ID NO: 3237065 - DNA, 25 bp, Homo sapien
tcatgatgctatcagaagcacgggt

SEQ ID NO: 3237066 - DNA, 25 bp, Homo sapien
ggtagggcactggagataatataga

SEQ ID NO: 3237067 - DNA, 25 bp, Homo sapien
gcaccgcatgagctggtcagagact

SEQ ID NO: 3237068 - DNA, 25 bp, Homo sapien
agtgaagcaacagtataactcctgc

SEQ ID NO: 3237069 - DNA, 25 bp, Homo sapien
ctgtgtgacactggaacatcatcat

SEQ ID NO: 3237070 - DNA, 25 bp, Homo sapien
tcggatccattgctgttatgggaaa

SEQ ID NO: 3237071 - DNA, 25 bp, Homo sapien
aatccacaaactcgtggcctttgag

SEQ ID NO: 3237072 - DNA, 25 bp, Homo sapien
tatcgaccaacttctgggtagtcct

SEQ ID NO: 3237073 - DNA, 25 bp, Homo sapien
tcctttgaggctttaatatcgacca

SEQ ID NO: 3237074 - DNA, 25 bp, Homo sapien
gtactgaactaggaagataaaatcc

SEQ ID NO: 3237075 - DNA, 25 bp, Homo sapien
cccacgctgcatgagcaacaggctg

SEQ ID NO: 3237076 - DNA, 25 bp, Homo sapien
cagtgcccaccgttaccatcagcag

SEQ ID NO: 3237077 - DNA, 25 bp, Homo sapien
cacgctgcatgagcaacaggctggc

SEQ ID NO: 3237078 - DNA, 25 bp, Homo sapien
gttaccatcagcagccacgacgaat

SEQ ID NO: 3237079 - DNA, 25 bp, Homo sapien
tttccctaagctcatcaggcagcac

SEQ ID NO: 3237080 - DNA, 25 bp, Homo sapien
ccctaagctcatcaggcagcaccac

SEQ ID NO: 3237081 - DNA, 25 bp, Homo sapien
cgggtttccctaagctcatcaggca

SEQ ID NO: 3237082 - DNA, 25 bp, Homo sapien
ggtttccctaagctcatcaggcagc

SEQ ID NO: 3237083 - DNA, 25 bp, Homo sapien
caccagcggaaggtgcaatgaacac

SEQ ID NO: 3237084 - DNA, 25 bp, Homo sapien
acccgcctgcgcagtctggtgtgct

SEQ ID NO: 3237085 - DNA, 25 bp, Homo sapien
gtgctggtgagaccagtcaggcaga

SEQ ID NO: 3237086 - DNA, 25 bp, Homo sapien
actgatgtttcctccccgtgggcct

SEQ ID NO: 3237087 - DNA, 25 bp, Homo sapien
tataactctgagtttccacatgaca

SEQ ID NO: 3237088 - DNA, 25 bp, Homo sapien
cacatgacaggtctgcatagagcaa

SEQ ID NO: 3237089 - DNA, 25 bp, Homo sapien
gtttccacatgacaggtctgcatag

SEQ ID NO: 3237090 - DNA, 25 bp, Homo sapien
ctaatttataactctgagtttccac

SEQ ID NO: 3237091 - DNA, 25 bp, Homo sapien
tgtgacttttacttgctgcttctcc

SEQ ID NO: 3237092 - DNA, 25 bp, Homo sapien
ctgtgacttttacttgctgcttctc

SEQ ID NO: 3237093 - DNA, 25 bp, Homo sapien
gtgacttttacttgctgcttctcca

SEQ ID NO: 3237094 - DNA, 25 bp, Homo sapien
acatctgtcatagttaaagagtagg

SEQ ID NO: 3237095 - DNA, 25 bp, Homo sapien
catctgtcatagttaaagagtaggt

SEQ ID NO: 3237096 - DNA, 25 bp, Homo sapien
ctgtcatagttaaagagtaggtggg

SEQ ID NO: 3237097 - DNA, 25 bp, Homo sapien
tcatagttaaagagtaggtggggac

SEQ ID NO: 3237098 - DNA, 25 bp, Homo sapien
tgcttaggaaggtagggcaaagacc

SEQ ID NO: 3237099 - DNA, 25 bp, Homo sapien
gacccagtcaccgtgctgatcttgt

SEQ ID NO: 3237100 - DNA, 25 bp, Homo sapien
gcaaagacccagtcaccgtgctgat

SEQ ID NO: 3237101 - DNA, 25 bp, Homo sapien
ccagttctgtcatttgcttaggaag

SEQ ID NO: 3237102 - DNA, 25 bp, Homo sapien
ccaactgaatgtgacgaaaaggagg

SEQ ID NO: 3237103 - DNA, 25 bp, Homo sapien
caactgaatgtgacgaaaaggaggg

SEQ ID NO: 3237104 - DNA, 25 bp, Homo sapien
tttctccattatgcttggtttccaa

SEQ ID NO: 3237105 - DNA, 25 bp, Homo sapien
tatttctccattatgcttggtttcc

SEQ ID NO: 3237106 - DNA, 25 bp, Homo sapien
agggttcatcttccggctataccaa

SEQ ID NO: 3237107 - DNA, 25 bp, Homo sapien
caagggttcatcttccggctatacc

SEQ ID NO: 3237108 - DNA, 25 bp, Homo sapien
tcatcttccggctataccaaaaaag

SEQ ID NO: 3237109 - DNA, 25 bp, Homo sapien
gttcatcttccggctataccaaaaa

SEQ ID NO: 3237110 - DNA, 25 bp, Homo sapien
gtctcatcaccggttggcccatagg

SEQ ID NO: 3237111 - DNA, 25 bp, Homo sapien
ccggttggcccataggatactgttt

SEQ ID NO: 3237112 - DNA, 25 bp, Homo sapien
actgttttgtgggttaattctgcaa

SEQ ID NO: 3237113 - DNA, 25 bp, Homo sapien
aaactcagtctcatcaccggttggc

SEQ ID NO: 3237114 - DNA, 25 bp, Homo sapien
cagatagtctggcaaattgagagag

SEQ ID NO: 3237115 - DNA, 25 bp, Homo sapien
cccatactttggctaggtattagga

SEQ ID NO: 3237116 - DNA, 25 bp, Homo sapien
tagaagttgacctctcagacagcag

SEQ ID NO: 3237117 - DNA, 25 bp, Homo sapien
ggtggccttgaggtcacactaaatt

SEQ ID NO: 3237118 - DNA, 25 bp, Homo sapien
tccaaacaagaacctctgcagcctg

SEQ ID NO: 3237119 - DNA, 25 bp, Homo sapien
tctcctttgaacacaagtgggtagt

SEQ ID NO: 3237120 - DNA, 25 bp, Homo sapien
gggtagttagaatatccaacagcag

SEQ ID NO: 3237121 - DNA, 25 bp, Homo sapien
cagcctggcgctttttgcaggataa

SEQ ID NO: 3237122 - DNA, 25 bp, Homo sapien
cttgggcaggctggatagacccgca

SEQ ID NO: 3237123 - DNA, 25 bp, Homo sapien
catttgcctaagtaacagacggtag

SEQ ID NO: 3237124 - DNA, 25 bp, Homo sapien
acgctactcagtggactttctcggg

SEQ ID NO: 3237125 - DNA, 25 bp, Homo sapien
tagacccgcagactcagaaagcaag

SEQ ID NO: 3237126 - DNA, 25 bp, Homo sapien
tcagttaaccagatttagaaacaag

SEQ ID NO: 3237127 - DNA, 25 bp, Homo sapien
ttgcatctggtctgcctggctccaa

SEQ ID NO: 3237128 - DNA, 25 bp, Homo sapien
tcgtgtgcacccagcacagttccag

SEQ ID NO: 3237129 - DNA, 25 bp, Homo sapien
acatgcatttggctcctcgtgtgca

SEQ ID NO: 3237130 - DNA, 25 bp, Homo sapien
aaaacatgcatttggctcctcgtgt

SEQ ID NO: 3237131 - DNA, 25 bp, Homo sapien
caccctgagtggtttcaggtagagg

SEQ ID NO: 3237132 - DNA, 25 bp, Homo sapien
tcaagagctggtgtaatgatcaagg

SEQ ID NO: 3237133 - DNA, 25 bp, Homo sapien
agctggtgtaatgatcaaggatgag

SEQ ID NO: 3237134 - DNA, 25 bp, Homo sapien
agagctggtgtaatgatcaaggatg

SEQ ID NO: 3237135 - DNA, 25 bp, Homo sapien
gaaaagagcttgctgtaatagtaag

SEQ ID NO: 3237136 - DNA, 25 bp, Homo sapien
gggaactcagcaacattaggataat

SEQ ID NO: 3237137 - DNA, 25 bp, Homo sapien
catgatatcgtctagggatgtcaaa

SEQ ID NO: 3237138 - DNA, 25 bp, Homo sapien
catggtagatgttggctgcaataaa

SEQ ID NO: 3237139 - DNA, 25 bp, Homo sapien
tatacaaacagaaacgaacaccgcc

SEQ ID NO: 3237140 - DNA, 25 bp, Homo sapien
gaaaggtattgtgtccgaagcccca

SEQ ID NO: 3237141 - DNA, 25 bp, Homo sapien
cataccttgtgcctgtaacgaagca

SEQ ID NO: 3237142 - DNA, 25 bp, Homo sapien
caatgacaaggcaaactctgtggga

SEQ ID NO: 3237143 - DNA, 25 bp, Homo sapien
gaaataagggttcctaagcagcttg

SEQ ID NO: 3237144 - DNA, 25 bp, Homo sapien
ttttttggatcgctaaagtgcctta

SEQ ID NO: 3237145 - DNA, 25 bp, Homo sapien
gttgagcccttgtttaaatcctgta

SEQ ID NO: 3237146 - DNA, 25 bp, Homo sapien
tgacccacctaaggtcaaggagaag

SEQ ID NO: 3237147 - DNA, 25 bp, Homo sapien
tgatctggtgtataaagataacctt

SEQ ID NO: 3237148 - DNA, 25 bp, Homo sapien
cttgatctggtgtataaagataacc

SEQ ID NO: 3237149 - DNA, 25 bp, Homo sapien
gatctggtgtataaagataaccttt

SEQ ID NO: 3237150 - DNA, 25 bp, Homo sapien
ttgatctggtgtataaagataacct

SEQ ID NO: 3237151 - DNA, 25 bp, Homo sapien
caatcagctttggaatattctcttc

SEQ ID NO: 3237152 - DNA, 25 bp, Homo sapien
tcacagtcctcagccaaatacagag

SEQ ID NO: 3237153 - DNA, 25 bp, Homo sapien
ccctggcaaacggtccctgcgtgtt

SEQ ID NO: 3237154 - DNA, 25 bp, Homo sapien
acagagtttgacgttccctggcaaa

SEQ ID NO: 3237155 - DNA, 25 bp, Homo sapien
gctggcaggtttctctaacgtgaca

SEQ ID NO: 3237156 - DNA, 25 bp, Homo sapien
taacgtgacaatgtgatacttcggg

SEQ ID NO: 3237157 - DNA, 25 bp, Homo sapien
ccctcgttacgcttgcacttgacat

SEQ ID NO: 3237158 - DNA, 25 bp, Homo sapien
tgcgaagtactttgatctgtggact

SEQ ID NO: 3237159 - DNA, 25 bp, Homo sapien
caaccagaatgatttcttcattggc

SEQ ID NO: 3237160 - DNA, 25 bp, Homo sapien
gccagtgacccaaccagaatgattt

SEQ ID NO: 3237161 - DNA, 25 bp, Homo sapien
gtcattgccagtgacccaaccagaa

SEQ ID NO: 3237162 - DNA, 25 bp, Homo sapien
tcaaagtttgtcagtcattgccagt

SEQ ID NO: 3237163 - DNA, 25 bp, Homo sapien
actccaacaaattcaagcaactgaa

SEQ ID NO: 3237164 - DNA, 25 bp, Homo sapien
aatgtaagtcatgtgaggggcaagc

SEQ ID NO: 3237165 - DNA, 25 bp, Homo sapien
aagcgggagctgataggctagtgga

SEQ ID NO: 3237166 - DNA, 25 bp, Homo sapien
gggctccgatcaattactccaacaa

SEQ ID NO: 3237167 - DNA, 25 bp, Homo sapien
tctcagtgcaagcaaggcaggtgcc

SEQ ID NO: 3237168 - DNA, 25 bp, Homo sapien
gaggaaggaattgccgaagctgccc

SEQ ID NO: 3237169 - DNA, 25 bp, Homo sapien
tacagatcaaagattgctgaggcag

SEQ ID NO: 3237170 - DNA, 25 bp, Homo sapien
cccgtggttgccatgtagaccttca

SEQ ID NO: 3237171 - DNA, 25 bp, Homo sapien
gatagtgagtaaaatcgagcaagca

SEQ ID NO: 3237172 - DNA, 25 bp, Homo sapien
gtaaaatcgagcaagcagaccagag

SEQ ID NO: 3237173 - DNA, 25 bp, Homo sapien
ctggaatgcaggatgcccgatatgg

SEQ ID NO: 3237174 - DNA, 25 bp, Homo sapien
cccgatatggagagatagtgagtaa

SEQ ID NO: 3237175 - DNA, 25 bp, Homo sapien
caggcatggagcgatggatttcata

SEQ ID NO: 3237176 - DNA, 25 bp, Homo sapien
gcatggagcgatggatttcatataa

SEQ ID NO: 3237177 - DNA, 25 bp, Homo sapien
ccacagcgcccaggcatggagcgat

SEQ ID NO: 3237178 - DNA, 25 bp, Homo sapien
cgcccaggcatggagcgatggattt

SEQ ID NO: 3237179 - DNA, 25 bp, Homo sapien
tacccgtggcttgtggaggagcctc

SEQ ID NO: 3237180 - DNA, 25 bp, Homo sapien
tgtgtcagtcgctctcctaagtgtc

SEQ ID NO: 3237181 - DNA, 25 bp, Homo sapien
taagtgtctggaacgcatctgaaac

SEQ ID NO: 3237182 - DNA, 25 bp, Homo sapien
gctctactcgagtgtggtcctgcgt

SEQ ID NO: 3237183 - DNA, 25 bp, Homo sapien
ctgttcacagccttccagagctttg

SEQ ID NO: 3237184 - DNA, 25 bp, Homo sapien
gctgaaccatattgcatttgtccct

SEQ ID NO: 3237185 - DNA, 25 bp, Homo sapien
ttctgtctgctgaaccatattgcat

SEQ ID NO: 3237186 - DNA, 25 bp, Homo sapien
ttgtccagtgtccagaattttgcat

SEQ ID NO: 3237187 - DNA, 25 bp, Homo sapien
gggtagttgtaaagcaaacagtgta

SEQ ID NO: 3237188 - DNA, 25 bp, Homo sapien
cctggactgagtgtcttggtgtcct

SEQ ID NO: 3237189 - DNA, 25 bp, Homo sapien
cctttccgagtatctgcatgccttg

SEQ ID NO: 3237190 - DNA, 25 bp, Homo sapien
tattggaagccgttcacacctcctt

SEQ ID NO: 3237191 - DNA, 25 bp, Homo sapien
ggcggacgctctcgggtttacctgc

SEQ ID NO: 3237192 - DNA, 25 bp, Homo sapien
cgcaggcggacgctctcgggtttac

SEQ ID NO: 3237193 - DNA, 25 bp, Homo sapien
ggaacgcaggcggacgctctcgggt

SEQ ID NO: 3237194 - DNA, 25 bp, Homo sapien
ggacgctctcgggtttacctgcttc

SEQ ID NO: 3237195 - DNA, 25 bp, Homo sapien
tatgagcggcaggtctgaaaaagca

SEQ ID NO: 3237196 - DNA, 25 bp, Homo sapien
ctgaaaacgagggatccaaacggag

SEQ ID NO: 3237197 - DNA, 25 bp, Homo sapien
ccaaacggagggtgttgcactctgc

SEQ ID NO: 3237198 - DNA, 25 bp, Homo sapien
tgcactctgctaacgctggtcctgt

SEQ ID NO: 3237199 - DNA, 25 bp, Homo sapien
taatgtgaatccggttggggaggaa

SEQ ID NO: 3237200 - DNA, 25 bp, Homo sapien
tccccaaatctacatccacaggatt

SEQ ID NO: 3237201 - DNA, 25 bp, Homo sapien
gaaggggagcgggcatccccaaatc

SEQ ID NO: 3237202 - DNA, 25 bp, Homo sapien
gggagcgggcatccccaaatctaca

SEQ ID NO: 3237203 - DNA, 25 bp, Homo sapien
cagggcaaggaaatggtgtgtaatg

SEQ ID NO: 3237204 - DNA, 25 bp, Homo sapien
gcagggcaaggaaatggtgtgtaat

SEQ ID NO: 3237205 - DNA, 25 bp, Homo sapien
gggcaaggaaatggtgtgtaatgca

SEQ ID NO: 3237206 - DNA, 25 bp, Homo sapien
ggcaaggaaatggtgtgtaatgcag

SEQ ID NO: 3237207 - DNA, 25 bp, Homo sapien
gattgggatggaggttaaaggtgct

SEQ ID NO: 3237208 - DNA, 25 bp, Homo sapien
tccatttgggccaggtgttggaaga

SEQ ID NO: 3237209 - DNA, 25 bp, Homo sapien
gagaaggtttttaatagtagcagca

SEQ ID NO: 3237210 - DNA, 25 bp, Homo sapien
agtcatgagtgaggtggtccatttg

SEQ ID NO: 3237211 - DNA, 25 bp, Homo sapien
ttcccagttccggttcagtgcaaac

SEQ ID NO: 3237212 - DNA, 25 bp, Homo sapien
gcttcccagttccggttcagtgcaa

SEQ ID NO: 3237213 - DNA, 25 bp, Homo sapien
cccagttccggttcagtgcaaactg

SEQ ID NO: 3237214 - DNA, 25 bp, Homo sapien
cagttccggttcagtgcaaactggg

SEQ ID NO: 3237215 - DNA, 25 bp, Homo sapien
cgtccagctgatgtttcccacggta

SEQ ID NO: 3237216 - DNA, 25 bp, Homo sapien
tgatgacactagtgcctgtttctcc

SEQ ID NO: 3237217 - DNA, 25 bp, Homo sapien
ggagcctgcgataagttcccactga

SEQ ID NO: 3237218 - DNA, 25 bp, Homo sapien
tgtgttgctttttgacgctctggtc

SEQ ID NO: 3237219 - DNA, 25 bp, Homo sapien
ggcagaagcgaaaaggcctcctgct

SEQ ID NO: 3237220 - DNA, 25 bp, Homo sapien
ggaggcagaagcgaaaaggcctcct

SEQ ID NO: 3237221 - DNA, 25 bp, Homo sapien
cagaagcgaaaaggcctcctgctgg

SEQ ID NO: 3237222 - DNA, 25 bp, Homo sapien
gaagcgaaaaggcctcctgctggct

SEQ ID NO: 3237223 - DNA, 25 bp, Homo sapien
ttgtcttcctttggggcaactagaa

SEQ ID NO: 3237224 - DNA, 25 bp, Homo sapien
tatctcagcaccatagcatcctgtg

SEQ ID NO: 3237225 - DNA, 25 bp, Homo sapien
tgtggcctctgctgaagatttatca

SEQ ID NO: 3237226 - DNA, 25 bp, Homo sapien
cagagtgtgcattgctgagggctca

SEQ ID NO: 3237227 - DNA, 25 bp, Homo sapien
tatgatttgagagcatctagagggc

SEQ ID NO: 3237228 - DNA, 25 bp, Homo sapien
tctagagggccaaccagaatgtgca

SEQ ID NO: 3237229 - DNA, 25 bp, Homo sapien
gcaggagtgttaggtatccttccca

SEQ ID NO: 3237230 - DNA, 25 bp, Homo sapien
caaatggcatgcgattacaactgtg

SEQ ID NO: 3237231 - DNA, 25 bp, Homo sapien
cttcttctgccacatttggccagag

SEQ ID NO: 3237232 - DNA, 25 bp, Homo sapien
tggccagagcaatctgctcctgtag

SEQ ID NO: 3237233 - DNA, 25 bp, Homo sapien
cagagcaatctgctcctgtaggagt

SEQ ID NO: 3237234 - DNA, 25 bp, Homo sapien
tcttctgccacatttggccagagca

SEQ ID NO: 3237235 - DNA, 25 bp, Homo sapien
gaaggtttcatagactgctggtaac

SEQ ID NO: 3237236 - DNA, 25 bp, Homo sapien
ggtctccaacctatgctgtgaaagt

SEQ ID NO: 3237237 - DNA, 25 bp, Homo sapien
tgtgaccaaaccacgtccatggtga

SEQ ID NO: 3237238 - DNA, 25 bp, Homo sapien
tatcttgttcagaaacggtctccaa

SEQ ID NO: 3237239 - DNA, 25 bp, Homo sapien
gaacctaacatgagatcctgctggc

SEQ ID NO: 3237240 - DNA, 25 bp, Homo sapien
gatcctgctggctagtaagtgaata

SEQ ID NO: 3237241 - DNA, 25 bp, Homo sapien
tgttgctgcaaaataataagtttcc

SEQ ID NO: 3237242 - DNA, 25 bp, Homo sapien
ggacctccatgggaggaacctaaca

SEQ ID NO: 3237243 - DNA, 25 bp, Homo sapien
actctttagtatagaacctgtttga

SEQ ID NO: 3237244 - DNA, 25 bp, Homo sapien
cattctttaaagaaacgcttgtcac

SEQ ID NO: 3237245 - DNA, 25 bp, Homo sapien
cgcttgtcacactctttagtataga

SEQ ID NO: 3237246 - DNA, 25 bp, Homo sapien
tttaaagaaacgcttgtcacactct

SEQ ID NO: 3237247 - DNA, 25 bp, Homo sapien
ggctgacttcctcaaccactcccct

SEQ ID NO: 3237248 - DNA, 25 bp, Homo sapien
gggctgacttcctcaaccactcccc

SEQ ID NO: 3237249 - DNA, 25 bp, Homo sapien
gctgacttcctcaaccactcccctc

SEQ ID NO: 3237250 - DNA, 25 bp, Homo sapien
ttctcatgcttgttttcgactagcc

SEQ ID NO: 3237251 - DNA, 25 bp, Homo sapien
tcaagttttccgactgaaataagtc

SEQ ID NO: 3237252 - DNA, 25 bp, Homo sapien
tcgactagccttttgggttcaccaa

SEQ ID NO: 3237253 - DNA, 25 bp, Homo sapien
cccgttatggccattagtatatgtt

SEQ ID NO: 3237254 - DNA, 25 bp, Homo sapien
tcagccaccagagggatctaagtgg

SEQ ID NO: 3237255 - DNA, 25 bp, Homo sapien
ggagaaattcccttggcagccatgc

SEQ ID NO: 3237256 - DNA, 25 bp, Homo sapien
ctaagtggaccttgtgtttaggagg

SEQ ID NO: 3237257 - DNA, 25 bp, Homo sapien
atggcgagcctggactcccatcttg

SEQ ID NO: 3237258 - DNA, 25 bp, Homo sapien
gaattctgcaattcccctacgcagg

SEQ ID NO: 3237259 - DNA, 25 bp, Homo sapien
tgtctcgtctcctgaagatttcacg

SEQ ID NO: 3237260 - DNA, 25 bp, Homo sapien
tgttatgtcagactgcagtgtctcg

SEQ ID NO: 3237261 - DNA, 25 bp, Homo sapien
agtcttctgtgcgaccccttgggtc

SEQ ID NO: 3237262 - DNA, 25 bp, Homo sapien
gagccgcatggttccccctgaggaa

SEQ ID NO: 3237263 - DNA, 25 bp, Homo sapien
gagagcaaagccggagccgcatggt

SEQ ID NO: 3237264 - DNA, 25 bp, Homo sapien
agcaaagccggagccgcatggttcc

SEQ ID NO: 3237265 - DNA, 25 bp, Homo sapien
ggagccgcatggttccccctgagga

SEQ ID NO: 3237266 - DNA, 25 bp, Homo sapien
agtcccaggattcaccgggcagccc

SEQ ID NO: 3237267 - DNA, 25 bp, Homo sapien
aggcccagtcccaggattcaccggg

SEQ ID NO: 3237268 - DNA, 25 bp, Homo sapien
ccagtcccaggattcaccgggcagc

SEQ ID NO: 3237269 - DNA, 25 bp, Homo sapien
gcccagtcccaggattcaccgggca

SEQ ID NO: 3237270 - DNA, 25 bp, Homo sapien
cgctctaaggattctttgtttcatg

SEQ ID NO: 3237271 - DNA, 25 bp, Homo sapien
atttgtaaaatccatcttttgctga

SEQ ID NO: 3237272 - DNA, 25 bp, Homo sapien
cctcggtattctcggaaacgtgaat

SEQ ID NO: 3237273 - DNA, 25 bp, Homo sapien
tttgtattttcgctctaaggattct

SEQ ID NO: 3237274 - DNA, 25 bp, Homo sapien
ccaggagggagactttcatatttat

SEQ ID NO: 3237275 - DNA, 25 bp, Homo sapien
gccaggagggagactttcatattta

SEQ ID NO: 3237276 - DNA, 25 bp, Homo sapien
caggagggagactttcatatttatt

SEQ ID NO: 3237277 - DNA, 25 bp, Homo sapien
tattttcacaactgccgtgtcccgg

SEQ ID NO: 3237278 - DNA, 25 bp, Homo sapien
tgtcaccgtggctctcgtagaaggt

SEQ ID NO: 3237279 - DNA, 25 bp, Homo sapien
gaaatctgctgtacgtgtcaccgtg

SEQ ID NO: 3237280 - DNA, 25 bp, Homo sapien
agcagggcacaaagacacgtggacg

SEQ ID NO: 3237281 - DNA, 25 bp, Homo sapien
ttttaaatagggtgacaacctgaga

SEQ ID NO: 3237282 - DNA, 25 bp, Homo sapien
ttaaatagggtgacaacctgagaaa

SEQ ID NO: 3237283 - DNA, 25 bp, Homo sapien
cttttaaatagggtgacaacctgag

SEQ ID NO: 3237284 - DNA, 25 bp, Homo sapien
agagacatgtctaatgctgtggatt

SEQ ID NO: 3237285 - DNA, 25 bp, Homo sapien
ctcttctacccggcccatgtagggt

SEQ ID NO: 3237286 - DNA, 25 bp, Homo sapien
cttctcttctacccggcccatgtag

SEQ ID NO: 3237287 - DNA, 25 bp, Homo sapien
ttctcttctacccggcccatgtagg

SEQ ID NO: 3237288 - DNA, 25 bp, Homo sapien
tctcttctacccggcccatgtaggg

SEQ ID NO: 3237289 - DNA, 25 bp, Homo sapien
acactgtaatttcgcttgctcaaag

SEQ ID NO: 3237290 - DNA, 25 bp, Homo sapien
caaacactgtaatttcgcttgctca

SEQ ID NO: 3237291 - DNA, 25 bp, Homo sapien
gcttgctcaaagacttcctccatac

SEQ ID NO: 3237292 - DNA, 25 bp, Homo sapien
caaagacttcctccatacacagagc

SEQ ID NO: 3237293 - DNA, 25 bp, Homo sapien
agtgactcccagtcatgcgggttgg

SEQ ID NO: 3237294 - DNA, 25 bp, Homo sapien
tcagaggaggagttgagtgactccc

SEQ ID NO: 3237295 - DNA, 25 bp, Homo sapien
gactccggggctttccctgtgttga

SEQ ID NO: 3237296 - DNA, 25 bp, Homo sapien
gaagctaagcctggaagcactggca

SEQ ID NO: 3237297 - DNA, 25 bp, Homo sapien
tcacgtcatgaagccgtcagggtga

SEQ ID NO: 3237298 - DNA, 25 bp, Homo sapien
gtcatgaagccgtcagggtgagact

SEQ ID NO: 3237299 - DNA, 25 bp, Homo sapien
gtccggaagcgggtgtgagtggagg

SEQ ID NO: 3237300 - DNA, 25 bp, Homo sapien
gagactgtgggggagtccggaagcg

SEQ ID NO: 3237301 - DNA, 25 bp, Homo sapien
ccgggatcctggcgggggtgatgcc

SEQ ID NO: 3237302 - DNA, 25 bp, Homo sapien
cagcaccaggtgtcgcccgggcgcc

SEQ ID NO: 3237303 - DNA, 25 bp, Homo sapien
gggtgatgccactgccatgcagcac

SEQ ID NO: 3237304 - DNA, 25 bp, Homo sapien
actgccatgcagcaccaggtgtcgc

SEQ ID NO: 3237305 - DNA, 25 bp, Homo sapien
actctgagcaagaaggcagccgggc

SEQ ID NO: 3237306 - DNA, 25 bp, Homo sapien
ctgactctgagcaagaaggcagccg

SEQ ID NO: 3237307 - DNA, 25 bp, Homo sapien
tctgagcaagaaggcagccgggcac

SEQ ID NO: 3237308 - DNA, 25 bp, Homo sapien
gcagccgggcactgggcccggtgca

SEQ ID NO: 3237309 - DNA, 25 bp, Homo sapien
gaaagtactgtctaggaccacagac

SEQ ID NO: 3237310 - DNA, 25 bp, Homo sapien
gcagaaagtactgtctaggaccaca

SEQ ID NO: 3237311 - DNA, 25 bp, Homo sapien
tcagcagaaagtactgtctaggacc

SEQ ID NO: 3237312 - DNA, 25 bp, Homo sapien
cagaaagtactgtctaggaccacag

SEQ ID NO: 3237313 - DNA, 25 bp, Homo sapien
cacaatgttgttccagatagtcatg

SEQ ID NO: 3237314 - DNA, 25 bp, Homo sapien
gatagtcatgggtgacttcttccta

SEQ ID NO: 3237315 - DNA, 25 bp, Homo sapien
tcatgggtgacttcttcctactggc

SEQ ID NO: 3237316 - DNA, 25 bp, Homo sapien
tcctactggcctcatgtatccacat

SEQ ID NO: 3237317 - DNA, 25 bp, Homo sapien
tgaacttagatcttcctcccagcct

SEQ ID NO: 3237318 - DNA, 25 bp, Homo sapien
cacagacgaagatcctgctgctctt

SEQ ID NO: 3237319 - DNA, 25 bp, Homo sapien
tgtgacgttccttcccgcacacaga

SEQ ID NO: 3237320 - DNA, 25 bp, Homo sapien
taaagtgcacaaatacatagtccca

SEQ ID NO: 3237321 - DNA, 25 bp, Homo sapien
cattagtctttagtgtcgtcattca

SEQ ID NO: 3237322 - DNA, 25 bp, Homo sapien
cattcgggtctctttattaaagtca

SEQ ID NO: 3237323 - DNA, 25 bp, Homo sapien
gagtggtatgagtgaccttggtcca

SEQ ID NO: 3237324 - DNA, 25 bp, Homo sapien
tgctgctgaaagcagtataaaggcc

SEQ ID NO: 3237325 - DNA, 25 bp, Homo sapien
ggagtgtcgtatcttgggcgtcaaa

SEQ ID NO: 3237326 - DNA, 25 bp, Homo sapien
cctctacagaccaggtgccagttct

SEQ ID NO: 3237327 - DNA, 25 bp, Homo sapien
taatagcatcgctctcctctacaga

SEQ ID NO: 3237328 - DNA, 25 bp, Homo sapien
taaaattgccaccattgagaagcac

SEQ ID NO: 3237329 - DNA, 25 bp, Homo sapien
cataatacatggaagtcttgacccg

SEQ ID NO: 3237330 - DNA, 25 bp, Homo sapien
tgctttcccggaacatcacatttct

SEQ ID NO: 3237331 - DNA, 25 bp, Homo sapien
gacccgttctatcgttgacagtcag

SEQ ID NO: 3237332 - DNA, 25 bp, Homo sapien
tgatgcctagtaaacactggttgag

SEQ ID NO: 3237333 - DNA, 25 bp, Homo sapien
tgtaaagatcagtcagttgggcact

SEQ ID NO: 3237334 - DNA, 25 bp, Homo sapien
cagagggtagatgcatctgttgaca

SEQ ID NO: 3237335 - DNA, 25 bp, Homo sapien
tgttgacaccatctgtaaagatcag

SEQ ID NO: 3237336 - DNA, 25 bp, Homo sapien
caactcaacttgaagccagagggta

SEQ ID NO: 3237337 - DNA, 25 bp, Homo sapien
taggaaatggctaagatggagactt

SEQ ID NO: 3237338 - DNA, 25 bp, Homo sapien
aatgtcatgtactttccgcagcgcc

SEQ ID NO: 3237339 - DNA, 25 bp, Homo sapien
tctatgttcatcttgatgaggagcc

SEQ ID NO: 3237340 - DNA, 25 bp, Homo sapien
gtttatttataatcacagaactagg

SEQ ID NO: 3237341 - DNA, 25 bp, Homo sapien
acagagacaccttgtgctacggtaa

SEQ ID NO: 3237342 - DNA, 25 bp, Homo sapien
tgtgctacggtaaattgatctgctg

SEQ ID NO: 3237343 - DNA, 25 bp, Homo sapien
gacaccttgtgctacggtaaattga

SEQ ID NO: 3237344 - DNA, 25 bp, Homo sapien
taaattgatctgctgctggcgtcca

SEQ ID NO: 3237345 - DNA, 25 bp, Homo sapien
cagccagaggagatgtgtaatatat

SEQ ID NO: 3237346 - DNA, 25 bp, Homo sapien
aatatatgactggacttgccgcaaa

SEQ ID NO: 3237347 - DNA, 25 bp, Homo sapien
gacttgccgcaaatgcaagtacaca

SEQ ID NO: 3237348 - DNA, 25 bp, Homo sapien
tacagccagaggagatgtgtaatat

SEQ ID NO: 3237349 - DNA, 25 bp, Homo sapien
gaatgcaagactactccttttgaag

SEQ ID NO: 3237350 - DNA, 25 bp, Homo sapien
gaagactggaaggatcgctttgaaa

SEQ ID NO: 3237351 - DNA, 25 bp, Homo sapien
ttggcagtgttcctgtaacaggcag

SEQ ID NO: 3237352 - DNA, 25 bp, Homo sapien
cagggcagtctgaataaaggaatct

SEQ ID NO: 3237353 - DNA, 25 bp, Homo sapien
tccttgttatctttcttctctttct

SEQ ID NO: 3237354 - DNA, 25 bp, Homo sapien
atgtccttgttatctttcttctctt

SEQ ID NO: 3237355 - DNA, 25 bp, Homo sapien
tgttatctttcttctctttctgcat

SEQ ID NO: 3237356 - DNA, 25 bp, Homo sapien
ttgttatctttcttctctttctgca

SEQ ID NO: 3237357 - DNA, 25 bp, Homo sapien
cctgtttgtgagttcccatacgtac

SEQ ID NO: 3237358 - DNA, 25 bp, Homo sapien
tatgtgcaactgcattcagcctttg

SEQ ID NO: 3237359 - DNA, 25 bp, Homo sapien
gaactgaggatactgcccactctca

SEQ ID NO: 3237360 - DNA, 25 bp, Homo sapien
tagccctaaaattgggacatgtgac

SEQ ID NO: 3237361 - DNA, 25 bp, Homo sapien
gggctggatgccggtccctgctgag

SEQ ID NO: 3237362 - DNA, 25 bp, Homo sapien
tgctggagccgactccacagcacag

SEQ ID NO: 3237363 - DNA, 25 bp, Homo sapien
gtagatgctggagccgactccacag

SEQ ID NO: 3237364 - DNA, 25 bp, Homo sapien
agatgctggagccgactccacagca

SEQ ID NO: 3237365 - DNA, 25 bp, Homo sapien
atggtctgctgcagattggagagat

SEQ ID NO: 3237366 - DNA, 25 bp, Homo sapien
caggatggtctgctgcagattggag

SEQ ID NO: 3237367 - DNA, 25 bp, Homo sapien
tctgctgcagattggagagattcag

SEQ ID NO: 3237368 - DNA, 25 bp, Homo sapien
ggtctgctgcagattggagagattc

SEQ ID NO: 3237369 - DNA, 25 bp, Homo sapien
ccttattagcgtcttcatctctgtc

SEQ ID NO: 3237370 - DNA, 25 bp, Homo sapien
tgtcctcaccctcgccagtctcttt

SEQ ID NO: 3237371 - DNA, 25 bp, Homo sapien
gccagcaacagaaaggcccttatta

SEQ ID NO: 3237372 - DNA, 25 bp, Homo sapien
gatggagttgacatgattactcctg

SEQ ID NO: 3237373 - DNA, 25 bp, Homo sapien
tggatgaacaccacgtacatgccgt

SEQ ID NO: 3237374 - DNA, 25 bp, Homo sapien
tacatgccgtaaatgctccctaggc

SEQ ID NO: 3237375 - DNA, 25 bp, Homo sapien
tccaaggatctgatgcctccaggcg

SEQ ID NO: 3237376 - DNA, 25 bp, Homo sapien
gaccgggtagcagccaatcagatgg

SEQ ID NO: 3237377 - DNA, 25 bp, Homo sapien
tgtttcagaggtgtccgttttgacc

SEQ ID NO: 3237378 - DNA, 25 bp, Homo sapien
ccgttttgacccctatgacagggag

SEQ ID NO: 3237379 - DNA, 25 bp, Homo sapien
aggctcctgtgtattgtaaagctgt

SEQ ID NO: 3237380 - DNA, 25 bp, Homo sapien
ctgtggtcgaatatatttgttgggc

SEQ ID NO: 3237381 - DNA, 25 bp, Homo sapien
gcagcctcagaagcgaagtttccct

SEQ ID NO: 3237382 - DNA, 25 bp, Homo sapien
tagaatctctctgccccaacgagtg

SEQ ID NO: 3237383 - DNA, 25 bp, Homo sapien
cgagtgtcacagaaaccagagttcc

SEQ ID NO: 3237384 - DNA, 25 bp, Homo sapien
ccattacagaaagggtcctgccgga

SEQ ID NO: 3237385 - DNA, 25 bp, Homo sapien
cagtgggtccaagtgaatggagttc

SEQ ID NO: 3237386 - DNA, 25 bp, Homo sapien
cctcctgcaagggtggaaatgcagt

SEQ ID NO: 3237387 - DNA, 25 bp, Homo sapien
caccacattcacttgtgcaatccct

SEQ ID NO: 3237388 - DNA, 25 bp, Homo sapien
attcacttgtgcaatccctcctgtg

SEQ ID NO: 3237389 - DNA, 25 bp, Homo sapien
cctggggggcatccttgcagcagga

SEQ ID NO: 3237390 - DNA, 25 bp, Homo sapien
ggaagtcgaagctccatggggtggg

SEQ ID NO: 3237391 - DNA, 25 bp, Homo sapien
ctggttaggtgaggcagcatcctgg

SEQ ID NO: 3237392 - DNA, 25 bp, Homo sapien
gctcagccccatggcgttgccctct

SEQ ID NO: 3237393 - DNA, 25 bp, Homo sapien
caaagccataactggctgacaggcg

SEQ ID NO: 3237394 - DNA, 25 bp, Homo sapien
catttcgttgtgtgcacaggtaggg

SEQ ID NO: 3237395 - DNA, 25 bp, Homo sapien
gacaggcgtggttcaagcacttaga

SEQ ID NO: 3237396 - DNA, 25 bp, Homo sapien
gggaagcctcaagtatctcaccggg

SEQ ID NO: 3237397 - DNA, 25 bp, Homo sapien
tcctcagcctgaagtgcattcttta

SEQ ID NO: 3237398 - DNA, 25 bp, Homo sapien
cagaggctggagtttgtcaaggctc

SEQ ID NO: 3237399 - DNA, 25 bp, Homo sapien
tttgtgtagtgtaaaactgctagtg

SEQ ID NO: 3237400 - DNA, 25 bp, Homo sapien
caccccggtgcctagattccttaga

SEQ ID NO: 3237401 - DNA, 25 bp, Homo sapien
atctccaggcagcagctaaggccat

SEQ ID NO: 3237402 - DNA, 25 bp, Homo sapien
catctccaggcagcagctaaggcca

SEQ ID NO: 3237403 - DNA, 25 bp, Homo sapien
gcatctccaggcagcagctaaggcc

SEQ ID NO: 3237404 - DNA, 25 bp, Homo sapien
ctggttcctgacaccttcaggatct

SEQ ID NO: 3237405 - DNA, 25 bp, Homo sapien
agcctggttcctgacaccttcagga

SEQ ID NO: 3237406 - DNA, 25 bp, Homo sapien
cagcctggttcctgacaccttcagg

SEQ ID NO: 3237407 - DNA, 25 bp, Homo sapien
gcctggttcctgacaccttcaggat

SEQ ID NO: 3237408 - DNA, 25 bp, Homo sapien
ttacaagataaataaacacaggcaa

SEQ ID NO: 3237409 - DNA, 25 bp, Homo sapien
taaataaacacaggcaagaactagc

SEQ ID NO: 3237410 - DNA, 25 bp, Homo sapien
tgcgttagggaggttttacaagata

SEQ ID NO: 3237411 - DNA, 25 bp, Homo sapien
ctgcgttagggaggttttacaagat

SEQ ID NO: 3237412 - DNA, 25 bp, Homo sapien
agaggcagacaacgtgtaccgacca

SEQ ID NO: 3237413 - DNA, 25 bp, Homo sapien
tgtggatctgtgttgctcgacctcg

SEQ ID NO: 3237414 - DNA, 25 bp, Homo sapien
ccagagtgtggatctgtgttgctcg

SEQ ID NO: 3237415 - DNA, 25 bp, Homo sapien
aaacccggagccgtggtgccagagt

SEQ ID NO: 3237416 - DNA, 25 bp, Homo sapien
gaaatgtttggaagactgtgccctg

SEQ ID NO: 3237417 - DNA, 25 bp, Homo sapien
gaaacgtttggaagactgtgccctg

SEQ ID NO: 3237418 - DNA, 25 bp, Homo sapien
tgtgccctgtgagtgaaacgtttgc

SEQ ID NO: 3237419 - DNA, 25 bp, Homo sapien
tgaaatgtttggaagactgtgccct

SEQ ID NO: 3237420 - DNA, 25 bp, Homo sapien
tatcggcagcttagtttccctgcaa

SEQ ID NO: 3237421 - DNA, 25 bp, Homo sapien
gctgacacaacaggacctagaacct

SEQ ID NO: 3237422 - DNA, 25 bp, Homo sapien
tctttatatcggcagcttagtttcc

SEQ ID NO: 3237423 - DNA, 25 bp, Homo sapien
accacctgcaactcggatgctgaca

SEQ ID NO: 3237424 - DNA, 25 bp, Homo sapien
gaatgcaagtctggaggtgacctcg

SEQ ID NO: 3237425 - DNA, 25 bp, Homo sapien
tgagtggaaaatctcgcacaaagcc

SEQ ID NO: 3237426 - DNA, 25 bp, Homo sapien
ggtgacctcgtttccaggagctttg

SEQ ID NO: 3237427 - DNA, 25 bp, Homo sapien
tacagcgatgctatctctcaaaggc

SEQ ID NO: 3237428 - DNA, 25 bp, Homo sapien
ccagcaaaacaggtagtagatgcca

SEQ ID NO: 3237429 - DNA, 25 bp, Homo sapien
aagttctaccctgccagcaaaacag

SEQ ID NO: 3237430 - DNA, 25 bp, Homo sapien
aaagttctaccctgccagcaaaaca

SEQ ID NO: 3237431 - DNA, 25 bp, Homo sapien
tttaccacattcctccataacagaa

SEQ ID NO: 3237432 - DNA, 25 bp, Homo sapien
taacccgtgtaggacatttaccaca

SEQ ID NO: 3237433 - DNA, 25 bp, Homo sapien
gggcacatgatgaagctaacccgtg

SEQ ID NO: 3237434 - DNA, 25 bp, Homo sapien
cattcctccataacagaacacattt

SEQ ID NO: 3237435 - DNA, 25 bp, Homo sapien
taggtccatgtttaacgctcagccg

SEQ ID NO: 3237436 - DNA, 25 bp, Homo sapien
gtccatgtttaacgctcagccgagg

SEQ ID NO: 3237437 - DNA, 25 bp, Homo sapien
caggtaggtccatgtttaacgctca

SEQ ID NO: 3237438 - DNA, 25 bp, Homo sapien
acacaggtaggtccatgtttaacgc

SEQ ID NO: 3237439 - DNA, 25 bp, Homo sapien
tgagtccttcttcgctcgcactggg

SEQ ID NO: 3237440 - DNA, 25 bp, Homo sapien
tgatgaaggctttgttcccagcggc

SEQ ID NO: 3237441 - DNA, 25 bp, Homo sapien
ggctttgttcccagcggcttcagct

SEQ ID NO: 3237442 - DNA, 25 bp, Homo sapien
tttacgtgaagagatctccggtggc

SEQ ID NO: 3237443 - DNA, 25 bp, Homo sapien
tcccaggaccaagtctgtggatgtg

SEQ ID NO: 3237444 - DNA, 25 bp, Homo sapien
cttgctgcactcaggtgcacgacgc

SEQ ID NO: 3237445 - DNA, 25 bp, Homo sapien
tgctgcactcaggtgcacgacgcct

SEQ ID NO: 3237446 - DNA, 25 bp, Homo sapien
tgtccgtctcccaggaccaagtctg

SEQ ID NO: 3237447 - DNA, 25 bp, Homo sapien
cattagacttctcgtggttgcggaa

SEQ ID NO: 3237448 - DNA, 25 bp, Homo sapien
agagacgggtgaacttggtgtccca

SEQ ID NO: 3237449 - DNA, 25 bp, Homo sapien
actttcccatgggacggtggccacg

SEQ ID NO: 3237450 - DNA, 25 bp, Homo sapien
cgctgtgtgggctggttccattttc

SEQ ID NO: 3237451 - DNA, 25 bp, Homo sapien
ccaaagccagccattagaaactaga

SEQ ID NO: 3237452 - DNA, 25 bp, Homo sapien
tcacggaaactagaatctctttccc

SEQ ID NO: 3237453 - DNA, 25 bp, Homo sapien
aggaagaaggaacgccacacaggga

SEQ ID NO: 3237454 - DNA, 25 bp, Homo sapien
gggccctgccctacacgcaggaaga

SEQ ID NO: 3237455 - DNA, 25 bp, Homo sapien
aggcaccgccaccatgtccggctag

SEQ ID NO: 3237456 - DNA, 25 bp, Homo sapien
ggcaccgccaccatgtccggctagt

SEQ ID NO: 3237457 - DNA, 25 bp, Homo sapien
atgtctccacgccaagtccaggtct

SEQ ID NO: 3237458 - DNA, 25 bp, Homo sapien
agcatgtctccacgccaagtccagg

SEQ ID NO: 3237459 - DNA, 25 bp, Homo sapien
gaaggagcatgtctccacgccaagt

SEQ ID NO: 3237460 - DNA, 25 bp, Homo sapien
ggagcatgtctccacgccaagtcca

SEQ ID NO: 3237461 - DNA, 25 bp, Homo sapien
ggtgtgatctgtaccctgagggact

SEQ ID NO: 3237462 - DNA, 25 bp, Homo sapien
tgtaccctgagggactgggaatccg

SEQ ID NO: 3237463 - DNA, 25 bp, Homo sapien
taccctgagggactgggaatccgtg

SEQ ID NO: 3237464 - DNA, 25 bp, Homo sapien
gaatccgtgcgtgtatcaggtgtga

SEQ ID NO: 3237465 - DNA, 25 bp, Homo sapien
atgcatgtatcaggtgtgatctgta

SEQ ID NO: 3237466 - DNA, 25 bp, Homo sapien
aatgcatgtatcaggtgtgatctgt

SEQ ID NO: 3237467 - DNA, 25 bp, Homo sapien
gagacttggaatcaatgcatgtatc

SEQ ID NO: 3237468 - DNA, 25 bp, Homo sapien
ggattgggaatcaatgcatgtatga

SEQ ID NO: 3237469 - DNA, 25 bp, Homo sapien
gggattgggaatcaatgcatgtatg

SEQ ID NO: 3237470 - DNA, 25 bp, Homo sapien
ggtgtatctggcgtgatctgtaccc

SEQ ID NO: 3237471 - DNA, 25 bp, Homo sapien
tccacgggtgtatctggcgtgatct

SEQ ID NO: 3237472 - DNA, 25 bp, Homo sapien
ttaggaatccacgggtgtatctggc

SEQ ID NO: 3237473 - DNA, 25 bp, Homo sapien
gaatccacgggtgtatctggcgtga

SEQ ID NO: 3237474 - DNA, 25 bp, Homo sapien
gagtcgattttccttcacctgtgga

SEQ ID NO: 3237475 - DNA, 25 bp, Homo sapien
taggtaaaggatccacagagtcgat

SEQ ID NO: 3237476 - DNA, 25 bp, Homo sapien
tttcctgctgccgaaacagtgtagg

SEQ ID NO: 3237477 - DNA, 25 bp, Homo sapien
cctgtggaaacactagggaatggca

SEQ ID NO: 3237478 - DNA, 25 bp, Homo sapien
attacagatgcaaagaattagacac

SEQ ID NO: 3237479 - DNA, 25 bp, Homo sapien
aattacagatgcaaagaattagaca

SEQ ID NO: 3237480 - DNA, 25 bp, Homo sapien
ctaattacagatgcaaagaattaga

SEQ ID NO: 3237481 - DNA, 25 bp, Homo sapien
taattacagatgcaaagaattagac

SEQ ID NO: 3237482 - DNA, 25 bp, Homo sapien
tgcttaaccaagtcagggagccgag

SEQ ID NO: 3237483 - DNA, 25 bp, Homo sapien
agggctcggcacctctcacgttggt

SEQ ID NO: 3237484 - DNA, 25 bp, Homo sapien
gcaggaaagactcatcggcagggac

SEQ ID NO: 3237485 - DNA, 25 bp, Homo sapien
gaagctcttgacaggtactagcagg

SEQ ID NO: 3237486 - DNA, 25 bp, Homo sapien
gagtttatgatcatgcaaattgacc

SEQ ID NO: 3237487 - DNA, 25 bp, Homo sapien
gaattggttattggagagtttatga

SEQ ID NO: 3237488 - DNA, 25 bp, Homo sapien
cataatccgattgaattggttattg

SEQ ID NO: 3237489 - DNA, 25 bp, Homo sapien
tatgatcatgcaaattgacctccat

SEQ ID NO: 3237490 - DNA, 25 bp, Homo sapien
gcagtattgaagttgaatttcccct

SEQ ID NO: 3237491 - DNA, 25 bp, Homo sapien
tactctcgctcatgtccactgagca

SEQ ID NO: 3237492 - DNA, 25 bp, Homo sapien
ctgagcagtattgaagttgaatttc

SEQ ID NO: 3237493 - DNA, 25 bp, Homo sapien
cgctcatgtccactgagcagtattg

SEQ ID NO: 3237494 - DNA, 25 bp, Homo sapien
tttcgtctggcttttatctctttgc

SEQ ID NO: 3237495 - DNA, 25 bp, Homo sapien
ttcgtctggcttttatctctttgca

SEQ ID NO: 3237496 - DNA, 25 bp, Homo sapien
tcgtctggcttttatctctttgcaa

SEQ ID NO: 3237497 - DNA, 25 bp, Homo sapien
ctttcgtctggcttttatctctttg

SEQ ID NO: 3237498 - DNA, 25 bp, Homo sapien
ccttggatttcattgaaagggtcac

SEQ ID NO: 3237499 - DNA, 25 bp, Homo sapien
ttttttaagctgagatccttggatt

SEQ ID NO: 3237500 - DNA, 25 bp, Homo sapien
ttttaagctgagatccttggatttc

SEQ ID NO: 3237501 - DNA, 25 bp, Homo sapien
ggatttcattgaaagggtcacagat

SEQ ID NO: 3237502 - DNA, 25 bp, Homo sapien
tgtgtggcaaatagacggcactctc

SEQ ID NO: 3237503 - DNA, 25 bp, Homo sapien
aagtgtgtggcaaatagacggcact

SEQ ID NO: 3237504 - DNA, 25 bp, Homo sapien
tgtggcaaatagacggcactctcga

SEQ ID NO: 3237505 - DNA, 25 bp, Homo sapien
ttggatgactgctagcctttccttt

SEQ ID NO: 3237506 - DNA, 25 bp, Homo sapien
agaccctgcccagtaagaacgtgaa

SEQ ID NO: 3237507 - DNA, 25 bp, Homo sapien
gaaggctaaaaccacatgcattctg

SEQ ID NO: 3237508 - DNA, 25 bp, Homo sapien
taattctgactagatttcaagcacc

SEQ ID NO: 3237509 - DNA, 25 bp, Homo sapien
tagcaaactctactcagcaagagag

SEQ ID NO: 3237510 - DNA, 25 bp, Homo sapien
taccccacaattgccgataccagtt

SEQ ID NO: 3237511 - DNA, 25 bp, Homo sapien
gagtaccccacaattgccgatacca

SEQ ID NO: 3237512 - DNA, 25 bp, Homo sapien
cacaattgccgataccagtttctga

SEQ ID NO: 3237513 - DNA, 25 bp, Homo sapien
catacaccttaacaactttccactt

SEQ ID NO: 3237514 - DNA, 25 bp, Homo sapien
aggtgagatgtacccctctggtagg

SEQ ID NO: 3237515 - DNA, 25 bp, Homo sapien
cattctccttgcttaggtgagatgt

SEQ ID NO: 3237516 - DNA, 25 bp, Homo sapien
aactcataggtaaggtccctacaat

SEQ ID NO: 3237517 - DNA, 25 bp, Homo sapien
gtaaggtccctacaatacattctcc

SEQ ID NO: 3237518 - DNA, 25 bp, Homo sapien
ccaaaagtagatacaaggcaaagtc

SEQ ID NO: 3237519 - DNA, 25 bp, Homo sapien
cccaaaagtagatacaaggcaaagt

SEQ ID NO: 3237520 - DNA, 25 bp, Homo sapien
ccccaaaagtagatacaaggcaaag

SEQ ID NO: 3237521 - DNA, 25 bp, Homo sapien
tggtggtggaggatgcacacagcat

SEQ ID NO: 3237522 - DNA, 25 bp, Homo sapien
ttggtggtggaggatgcacacagca

SEQ ID NO: 3237523 - DNA, 25 bp, Homo sapien
cttggtggtggaggatgcacacagc

SEQ ID NO: 3237524 - DNA, 25 bp, Homo sapien
ctgcagtcagcaacttcatggctaa

SEQ ID NO: 3237525 - DNA, 25 bp, Homo sapien
tcagcaacttcatggctaacagtgc

SEQ ID NO: 3237526 - DNA, 25 bp, Homo sapien
cagtcagcaacttcatggctaacag

SEQ ID NO: 3237527 - DNA, 25 bp, Homo sapien
gtcagcaacttcatggctaacagtg

SEQ ID NO: 3237528 - DNA, 25 bp, Homo sapien
tcaaattcgtgcagaaggcaaaggt

SEQ ID NO: 3237529 - DNA, 25 bp, Homo sapien
tataccttgtgaagttggcggctgg

SEQ ID NO: 3237530 - DNA, 25 bp, Homo sapien
tagctcattgtgctggaggttcaaa

SEQ ID NO: 3237531 - DNA, 25 bp, Homo sapien
tagatcatcgggtacctgagtcaac

SEQ ID NO: 3237532 - DNA, 25 bp, Homo sapien
cagttcttcactttttagcgcttga

SEQ ID NO: 3237533 - DNA, 25 bp, Homo sapien
cctgagttcctaattttgtagatga

SEQ ID NO: 3237534 - DNA, 25 bp, Homo sapien
tgtttgataatagaagctcttggag

SEQ ID NO: 3237535 - DNA, 25 bp, Homo sapien
tgtagatgacaagccattatgagac

SEQ ID NO: 3237536 - DNA, 25 bp, Homo sapien
aactgctcgtgaagtcactcctggg

SEQ ID NO: 3237537 - DNA, 25 bp, Homo sapien
tcaccatgagaacaattgcaatgaa

SEQ ID NO: 3237538 - DNA, 25 bp, Homo sapien
acgggctaacttctgctcagcattc

SEQ ID NO: 3237539 - DNA, 25 bp, Homo sapien
agcttagatgccaccttttcaggga

SEQ ID NO: 3237540 - DNA, 25 bp, Homo sapien
ccagatgcagttctttactccatct

SEQ ID NO: 3237541 - DNA, 25 bp, Homo sapien
gaacacagactctgtaatgctgttg

SEQ ID NO: 3237542 - DNA, 25 bp, Homo sapien
cctgtaatgcacgagtccttcctta

SEQ ID NO: 3237543 - DNA, 25 bp, Homo sapien
cccttcctgtaatgcacgagtcctt

SEQ ID NO: 3237544 - DNA, 25 bp, Homo sapien
gggacccagctggacattgttcaga

SEQ ID NO: 3237545 - DNA, 25 bp, Homo sapien
gcttctctgtaaggctgggacccag

SEQ ID NO: 3237546 - DNA, 25 bp, Homo sapien
gagatttgtccactttagtcccaag

SEQ ID NO: 3237547 - DNA, 25 bp, Homo sapien
ttccaattgcgtgaaaacaccctgg

SEQ ID NO: 3237548 - DNA, 25 bp, Homo sapien
gccaagcaaaggaatcgttaccaac

SEQ ID NO: 3237549 - DNA, 25 bp, Homo sapien
gaccgtttcaaattcaggtacctca

SEQ ID NO: 3237550 - DNA, 25 bp, Homo sapien
caaattcaggtacctcacattgaaa

SEQ ID NO: 3237551 - DNA, 25 bp, Homo sapien
aaatattctagttgtggaagccaag

SEQ ID NO: 3237552 - DNA, 25 bp, Homo sapien
caaaggagttcctagtcagctgcag

SEQ ID NO: 3237553 - DNA, 25 bp, Homo sapien
tcaactgggatctcgtcaaagccgt

SEQ ID NO: 3237554 - DNA, 25 bp, Homo sapien
tcaagtacttctaggtggcccaacc

SEQ ID NO: 3237555 - DNA, 25 bp, Homo sapien
cacccttcggagcatcagtcgttga

SEQ ID NO: 3237556 - DNA, 25 bp, Homo sapien
atctaactcagtcaggttcctgaaa

SEQ ID NO: 3237557 - DNA, 25 bp, Homo sapien
ctgaaagctggcccgaaaaccttct

SEQ ID NO: 3237558 - DNA, 25 bp, Homo sapien
agctggcccgaaaaccttcttctca

SEQ ID NO: 3237559 - DNA, 25 bp, Homo sapien
gtcaggttcctgaaagctggcccga

SEQ ID NO: 3237560 - DNA, 25 bp, Homo sapien
tttcacacgtgcaatcaaagggatt

SEQ ID NO: 3237561 - DNA, 25 bp, Homo sapien
tatgggtctcgttaatccaattaac

SEQ ID NO: 3237562 - DNA, 25 bp, Homo sapien
acaaaccaggcaatactttcacacg

SEQ ID NO: 3237563 - DNA, 25 bp, Homo sapien
cagctcagggatgttggtatgggtc

SEQ ID NO: 3237564 - DNA, 25 bp, Homo sapien
gagaaatgttcccagacccaatcct

SEQ ID NO: 3237565 - DNA, 25 bp, Homo sapien
cctcaaagtggatgagaagtacaat

SEQ ID NO: 3237566 - DNA, 25 bp, Homo sapien
tctttgaaaccaagaactcgatgta

SEQ ID NO: 3237567 - DNA, 25 bp, Homo sapien
taacaattgcttctagttcaaaaac

SEQ ID NO: 3237568 - DNA, 25 bp, Homo sapien
gcttgttgaactgcatgatgtacct

SEQ ID NO: 3237569 - DNA, 25 bp, Homo sapien
tatccgttctttctgaactggccag

SEQ ID NO: 3237570 - DNA, 25 bp, Homo sapien
tcgcaaacagagtgcatggttcagt

SEQ ID NO: 3237571 - DNA, 25 bp, Homo sapien
tttatgacgaaaggcacctatccgt

SEQ ID NO: 3237572 - DNA, 25 bp, Homo sapien
taggcctgaaataaggagacacatt

SEQ ID NO: 3237573 - DNA, 25 bp, Homo sapien
gacaatgttcttacgtgcttatatg

SEQ ID NO: 3237574 - DNA, 25 bp, Homo sapien
taagctgtcataggctcagtggctg

SEQ ID NO: 3237575 - DNA, 25 bp, Homo sapien
aagtcaattgtcaaaaataggcctg

SEQ ID NO: 3237576 - DNA, 25 bp, Homo sapien
gattagccttcagaaagcaagcctg

SEQ ID NO: 3237577 - DNA, 25 bp, Homo sapien
tgattttgccaacgccatctcctga

SEQ ID NO: 3237578 - DNA, 25 bp, Homo sapien
tcaagatcaggagtcaaagaatccc

SEQ ID NO: 3237579 - DNA, 25 bp, Homo sapien
gcaagcctgcctacaatacttttag

SEQ ID NO: 3237580 - DNA, 25 bp, Homo sapien
gtctttctagataaggactacctta

SEQ ID NO: 3237581 - DNA, 25 bp, Homo sapien
gaatatattatacagcgatcatcat

SEQ ID NO: 3237582 - DNA, 25 bp, Homo sapien
tgggccgaggttggaccactgaact

SEQ ID NO: 3237583 - DNA, 25 bp, Homo sapien
tatgcgtagcacattattttatggt

SEQ ID NO: 3237584 - DNA, 25 bp, Homo sapien
ctgtcagggtggcaaataacatgaa

SEQ ID NO: 3237585 - DNA, 25 bp, Homo sapien
tgttggccgactatagactcttcag

SEQ ID NO: 3237586 - DNA, 25 bp, Homo sapien
cagccttgggaatactgaactattt

SEQ ID NO: 3237587 - DNA, 25 bp, Homo sapien
gactcttcagaaccagaggtacagt

SEQ ID NO: 3237588 - DNA, 25 bp, Homo sapien
tctgcaggcagggaaactaaaggct

SEQ ID NO: 3237589 - DNA, 25 bp, Homo sapien
tatgtcattgatatatctgaggcag

SEQ ID NO: 3237590 - DNA, 25 bp, Homo sapien
taaaggcttcctagaactcaatcaa

SEQ ID NO: 3237591 - DNA, 25 bp, Homo sapien
tggcattcatttagaggtcattacc

SEQ ID NO: 3237592 - DNA, 25 bp, Homo sapien
tgcagaagttctggatgttacttcc

SEQ ID NO: 3237593 - DNA, 25 bp, Homo sapien
tcacttgggcaaatcaaacaagagc

SEQ ID NO: 3237594 - DNA, 25 bp, Homo sapien
ggttcctccggagaacaattacaca

SEQ ID NO: 3237595 - DNA, 25 bp, Homo sapien
aaatcaaacaagagctcagacaaac

SEQ ID NO: 3237596 - DNA, 25 bp, Homo sapien
tggagtggacagattacatgatggc

SEQ ID NO: 3237597 - DNA, 25 bp, Homo sapien
gaagaagttggagtggacagattac

SEQ ID NO: 3237598 - DNA, 25 bp, Homo sapien
tggacagattacatgatggcaccct

SEQ ID NO: 3237599 - DNA, 25 bp, Homo sapien
cagattacatgatggcaccctgaga

SEQ ID NO: 3237600 - DNA, 25 bp, Homo sapien
tgagtctcctttacaacctagatgt

SEQ ID NO: 3237601 - DNA, 25 bp, Homo sapien
tggtcactataacttaccgttgagt

SEQ ID NO: 3237602 - DNA, 25 bp, Homo sapien
taaactaagtggcatcgaaaactcc

SEQ ID NO: 3237603 - DNA, 25 bp, Homo sapien
tatagagcactttcatcacccaaaa

SEQ ID NO: 3237604 - DNA, 25 bp, Homo sapien
tacagaacttgttggcaggtgggtc

SEQ ID NO: 3237605 - DNA, 25 bp, Homo sapien
tcttgaaaggccaatcttacattct

SEQ ID NO: 3237606 - DNA, 25 bp, Homo sapien
caggtgggtcgagccgttatttatc

SEQ ID NO: 3237607 - DNA, 25 bp, Homo sapien
gagctggttcctaggtggagctaca

SEQ ID NO: 3237608 - DNA, 25 bp, Homo sapien
tacaggacgggagttttgcaccagg

SEQ ID NO: 3237609 - DNA, 25 bp, Homo sapien
caggacgggagttttgcaccaggat

SEQ ID NO: 3237610 - DNA, 25 bp, Homo sapien
gacgggagttttgcaccaggatgct

SEQ ID NO: 3237611 - DNA, 25 bp, Homo sapien
ctacaggacgggagttttgcaccag

SEQ ID NO: 3237612 - DNA, 25 bp, Homo sapien
tgtgcccaccaagtaaaggcttctc

SEQ ID NO: 3237613 - DNA, 25 bp, Homo sapien
tctccaactgggaaagggtttgtgc

SEQ ID NO: 3237614 - DNA, 25 bp, Homo sapien
aaaggaagtcaacaccacgccagtc

SEQ ID NO: 3237615 - DNA, 25 bp, Homo sapien
tgcagtgggcctcggacagagaaga

SEQ ID NO: 3237616 - DNA, 25 bp, Homo sapien
ttccttggtctggtatttgagcttc

SEQ ID NO: 3237617 - DNA, 25 bp, Homo sapien
tgcgctggcccatccaaaatctggg

SEQ ID NO: 3237618 - DNA, 25 bp, Homo sapien
gtctggtatttgagcttccccacct

SEQ ID NO: 3237619 - DNA, 25 bp, Homo sapien
catgcgctggcccatccaaaatctg

SEQ ID NO: 3237620 - DNA, 25 bp, Homo sapien
aagaacagttttaggctggatgtgg

SEQ ID NO: 3237621 - DNA, 25 bp, Homo sapien
caataagaacagttttaggctggat

SEQ ID NO: 3237622 - DNA, 25 bp, Homo sapien
aacaataagaacagttttaggctgg

SEQ ID NO: 3237623 - DNA, 25 bp, Homo sapien
ataacaataagaacagttttaggct

SEQ ID NO: 3237624 - DNA, 25 bp, Homo sapien
agtttttgttatatatgaccccagg

SEQ ID NO: 3237625 - DNA, 25 bp, Homo sapien
gactaatggactgtgggtctgaact

SEQ ID NO: 3237626 - DNA, 25 bp, Homo sapien
gaactatgtaggctcatggtctgtc

SEQ ID NO: 3237627 - DNA, 25 bp, Homo sapien
ctagagggaggcattgcagactaat

SEQ ID NO: 3237628 - DNA, 25 bp, Homo sapien
ttaaaggcccttggatgttcggaga

SEQ ID NO: 3237629 - DNA, 25 bp, Homo sapien
taaaggcccttggatgttcggagag

SEQ ID NO: 3237630 - DNA, 25 bp, Homo sapien
agtcgtcagcgtgtgaagcaccagc

SEQ ID NO: 3237631 - DNA, 25 bp, Homo sapien
gttcggagaggcgagagcacgcagt

SEQ ID NO: 3237632 - DNA, 25 bp, Homo sapien
tcatatgctgagtgtcccgtgagtg

SEQ ID NO: 3237633 - DNA, 25 bp, Homo sapien
tgagtgtcccgtgagtgccctggaa

SEQ ID NO: 3237634 - DNA, 25 bp, Homo sapien
catcgtggtcaacattcgcttgggg

SEQ ID NO: 3237635 - DNA, 25 bp, Homo sapien
tatgctgagtgtcccgtgagtgccc

SEQ ID NO: 3237636 - DNA, 25 bp, Homo sapien
gaaagacctacgcacacctgtttaa

SEQ ID NO: 3237637 - DNA, 25 bp, Homo sapien
cacctgtcggagtgaaccaagagac

SEQ ID NO: 3237638 - DNA, 25 bp, Homo sapien
tttgggcgaacgagcttgaaacagc

SEQ ID NO: 3237639 - DNA, 25 bp, Homo sapien
taacctgcaaacaagaccggctctg

SEQ ID NO: 3237640 - DNA, 25 bp, Homo sapien
gaacacgcccccatttcccctgcgc

SEQ ID NO: 3237641 - DNA, 25 bp, Homo sapien
gcgctccaggctaattgggccccag

SEQ ID NO: 3237642 - DNA, 25 bp, Homo sapien
cgccccgagcctcgcagatcccatc

SEQ ID NO: 3237643 - DNA, 25 bp, Homo sapien
ccccaggtgcggctcgggctgtgcc

SEQ ID NO: 3237644 - DNA, 25 bp, Homo sapien
cgtcccagcgccgtgagacccccga

SEQ ID NO: 3237645 - DNA, 25 bp, Homo sapien
gcctcgtcccagcgccgtgagaccc

SEQ ID NO: 3237646 - DNA, 25 bp, Homo sapien
cagcgccgtgagacccccgagggcc

SEQ ID NO: 3237647 - DNA, 25 bp, Homo sapien
cccagcgccgtgagacccccgaggg

SEQ ID NO: 3237648 - DNA, 25 bp, Homo sapien
tcgacagtggacacgccgtcctcgc

SEQ ID NO: 3237649 - DNA, 25 bp, Homo sapien
ttcagaccgcggagatccggccgag

SEQ ID NO: 3237650 - DNA, 25 bp, Homo sapien
ccgccgcccgagagttcagaccgcg

SEQ ID NO: 3237651 - DNA, 25 bp, Homo sapien
gcctcgacagtggacacgccgtcct

SEQ ID NO: 3237652 - DNA, 25 bp, Homo sapien
tctagggctactgggccaagagagc

SEQ ID NO: 3237653 - DNA, 25 bp, Homo sapien
ccgctctagggctactgggccaaga

SEQ ID NO: 3237654 - DNA, 25 bp, Homo sapien
gcgccgtcgaggtctcgaagagttt

SEQ ID NO: 3237655 - DNA, 25 bp, Homo sapien
agagtttggccaagagagacccaag

SEQ ID NO: 3237656 - DNA, 25 bp, Homo sapien
ggaccaccaggcgagcaggggagca

SEQ ID NO: 3237657 - DNA, 25 bp, Homo sapien
ggagcagcccccgccggagggagtg

SEQ ID NO: 3237658 - DNA, 25 bp, Homo sapien
agggcggccgcgctgggaccaccag

SEQ ID NO: 3237659 - DNA, 25 bp, Homo sapien
gagcagcccccgccggagggagtgg

SEQ ID NO: 3237660 - DNA, 25 bp, Homo sapien
tccggggccaggctggagcgggttc

SEQ ID NO: 3237661 - DNA, 25 bp, Homo sapien
ctccggggccaggctggagcgggtt

SEQ ID NO: 3237662 - DNA, 25 bp, Homo sapien
ccgatgtcaggcagcgtaaggaaca

SEQ ID NO: 3237663 - DNA, 25 bp, Homo sapien
caggcagcgtaaggaacagggttct

SEQ ID NO: 3237664 - DNA, 25 bp, Homo sapien
ctcctcgccgatgtcaggcagcgta

SEQ ID NO: 3237665 - DNA, 25 bp, Homo sapien
tcaggcagcgtaaggaacagggttc

SEQ ID NO: 3237666 - DNA, 25 bp, Homo sapien
ttccaaaagcaattaactgataggg

SEQ ID NO: 3237667 - DNA, 25 bp, Homo sapien
aattcctcaggcatatgtattccag

SEQ ID NO: 3237668 - DNA, 25 bp, Homo sapien
gtttcactggccatgctgcatattt

SEQ ID NO: 3237669 - DNA, 25 bp, Homo sapien
taaggaccagttgccaataacaaag

SEQ ID NO: 3237670 - DNA, 25 bp, Homo sapien
attcaatttcatggccagatgcagt

SEQ ID NO: 3237671 - DNA, 25 bp, Homo sapien
ttcaatttcatggccagatgcagtg

SEQ ID NO: 3237672 - DNA, 25 bp, Homo sapien
aattcaatttcatggccagatgcag

SEQ ID NO: 3237673 - DNA, 25 bp, Homo sapien
ggtcaacctcaaagggaagcctatc

SEQ ID NO: 3237674 - DNA, 25 bp, Homo sapien
gggccaatattcaacattcttaaag

SEQ ID NO: 3237675 - DNA, 25 bp, Homo sapien
gactaacagcggatctctcggcaga

SEQ ID NO: 3237676 - DNA, 25 bp, Homo sapien
aaccctacaagccagaagagagtgg

SEQ ID NO: 3237677 - DNA, 25 bp, Homo sapien
tcaaggtgtgtatcccagagtgaac

SEQ ID NO: 3237678 - DNA, 25 bp, Homo sapien
gaagagtgtcccctgtacgtgaagg

SEQ ID NO: 3237679 - DNA, 25 bp, Homo sapien
tgcacttaccgcttcatggacaggg

SEQ ID NO: 3237680 - DNA, 25 bp, Homo sapien
cattatgagcttggcacaagggcca

SEQ ID NO: 3237681 - DNA, 25 bp, Homo sapien
gttacctgtacttagtccatacgat

SEQ ID NO: 3237682 - DNA, 25 bp, Homo sapien
gatgtagacatgtatctcctattgc

SEQ ID NO: 3237683 - DNA, 25 bp, Homo sapien
aaaataccagatgctggcaagttgg

SEQ ID NO: 3237684 - DNA, 25 bp, Homo sapien
ttgaaggccttgtgacttgtcagcc

SEQ ID NO: 3237685 - DNA, 25 bp, Homo sapien
tgtgtcccagatatctattacccca

SEQ ID NO: 3237686 - DNA, 25 bp, Homo sapien
tcagagaccttaagtaacatgttcg

SEQ ID NO: 3237687 - DNA, 25 bp, Homo sapien
cagctaggatgtatatgtgtgaatg

SEQ ID NO: 3237688 - DNA, 25 bp, Homo sapien
cagaactcaggaattgcggcaggtt

SEQ ID NO: 3237689 - DNA, 25 bp, Homo sapien
aacccagcggccactcctccgcgca

SEQ ID NO: 3237690 - DNA, 25 bp, Homo sapien
agcggccactcctccgcgcacggcc

SEQ ID NO: 3237691 - DNA, 25 bp, Homo sapien
ccagcggccactcctccgcgcacgg

SEQ ID NO: 3237692 - DNA, 25 bp, Homo sapien
acccagcggccactcctccgcgcac

SEQ ID NO: 3237693 - DNA, 25 bp, Homo sapien
aggcaccgcgcgcgggccccacgca

SEQ ID NO: 3237694 - DNA, 25 bp, Homo sapien
tccgcgctaggctcgggcaccgtca

SEQ ID NO: 3237695 - DNA, 25 bp, Homo sapien
cgattacgatcagccccgggcctgt

SEQ ID NO: 3237696 - DNA, 25 bp, Homo sapien
agacagccggtcacgcgcccccgcg

SEQ ID NO: 3237697 - DNA, 25 bp, Homo sapien
ttgtaaaatgcgtaggtaaagaatc

SEQ ID NO: 3237698 - DNA, 25 bp, Homo sapien
cacagtaaaaccgtgccttctacgt

SEQ ID NO: 3237699 - DNA, 25 bp, Homo sapien
tctacgtccttctgacagtcctctt

SEQ ID NO: 3237700 - DNA, 25 bp, Homo sapien
taggtaaagaatctttgctcctcac

SEQ ID NO: 3237701 - DNA, 25 bp, Homo sapien
agaaattcatggccagtcactaact

SEQ ID NO: 3237702 - DNA, 25 bp, Homo sapien
tcactaacttccttcccacatttgt

SEQ ID NO: 3237703 - DNA, 25 bp, Homo sapien
ttagaaattcatggccagtcactaa

SEQ ID NO: 3237704 - DNA, 25 bp, Homo sapien
tagaaattcatggccagtcactaac

SEQ ID NO: 3237705 - DNA, 25 bp, Homo sapien
ctggaggaaaaggatgacaaggatt

SEQ ID NO: 3237706 - DNA, 25 bp, Homo sapien
tggaggaaaaggatgacaaggattt

SEQ ID NO: 3237707 - DNA, 25 bp, Homo sapien
ggaggaaaaggatgacaaggatttg

SEQ ID NO: 3237708 - DNA, 25 bp, Homo sapien
tctccaggaataaacggagcccctc

SEQ ID NO: 3237709 - DNA, 25 bp, Homo sapien
cctctccgtggatgagccggtggta

SEQ ID NO: 3237710 - DNA, 25 bp, Homo sapien
cagaccaagaggtgtgggctcccgt

SEQ ID NO: 3237711 - DNA, 25 bp, Homo sapien
ggtagagctctgtgtggccgaccca

SEQ ID NO: 3237712 - DNA, 25 bp, Homo sapien
gctgcggacagaagcggattcccat

SEQ ID NO: 3237713 - DNA, 25 bp, Homo sapien
acagctgcggacagaagcggattcc

SEQ ID NO: 3237714 - DNA, 25 bp, Homo sapien
cagctgcacagctgcggacagaagc

SEQ ID NO: 3237715 - DNA, 25 bp, Homo sapien
agctgcacagctgcggacagaagcg

SEQ ID NO: 3237716 - DNA, 25 bp, Homo sapien
cgcattcggccagcagactctgggt

SEQ ID NO: 3237717 - DNA, 25 bp, Homo sapien
ctcccagagtaaccgctgcactgac

SEQ ID NO: 3237718 - DNA, 25 bp, Homo sapien
actgtgaactggcttcgtcaaattc

SEQ ID NO: 3237719 - DNA, 25 bp, Homo sapien
ctcaaatggagggatcttcttgtcc

SEQ ID NO: 3237720 - DNA, 25 bp, Homo sapien
ctggaaatgctggacgcctttgtca

SEQ ID NO: 3237721 - DNA, 25 bp, Homo sapien
ggcaggatcagctgtcttcctaata

SEQ ID NO: 3237722 - DNA, 25 bp, Homo sapien
ctgctgtgtccgcaggcactgagcg

SEQ ID NO: 3237723 - DNA, 25 bp, Homo sapien
ggtctgtggactgcggaggcaggag

SEQ ID NO: 3237724 - DNA, 25 bp, Homo sapien
cgcctttggaacaaacatggaaggt

SEQ ID NO: 3237725 - DNA, 25 bp, Homo sapien
cacctatcatcaattcagaatcaaa

SEQ ID NO: 3237726 - DNA, 25 bp, Homo sapien
cacagtgaggcggtttccatcctgc

SEQ ID NO: 3237727 - DNA, 25 bp, Homo sapien
agtccacctttcacagcgcctttgg

SEQ ID NO: 3237728 - DNA, 25 bp, Homo sapien
tgctagtgaacagaaacgacaggac

SEQ ID NO: 3237729 - DNA, 25 bp, Homo sapien
aacgacaggacagagcttcatttct

SEQ ID NO: 3237730 - DNA, 25 bp, Homo sapien
ccaccgcctggaggcttataatcca

SEQ ID NO: 3237731 - DNA, 25 bp, Homo sapien
gagtcatcaaaatctgctagtgaac

SEQ ID NO: 3237732 - DNA, 25 bp, Homo sapien
ttctatgagtttgtaccctctttgg

SEQ ID NO: 3237733 - DNA, 25 bp, Homo sapien
aggactgcattgtgtcacggcacac

SEQ ID NO: 3237734 - DNA, 25 bp, Homo sapien
gcagtgaaaggactgcattgtgtca

SEQ ID NO: 3237735 - DNA, 25 bp, Homo sapien
taaaagcctaaattattctatgagt

SEQ ID NO: 3237736 - DNA, 25 bp, Homo sapien
tgctgctgggactatttgagagcca

SEQ ID NO: 3237737 - DNA, 25 bp, Homo sapien
gtcagcaacccctgtgtcatcaggg

SEQ ID NO: 3237738 - DNA, 25 bp, Homo sapien
tctgtcaaaagcgaaatactcctca

SEQ ID NO: 3237739 - DNA, 25 bp, Homo sapien
tgaacgtgccgttaggtcagcaacc

SEQ ID NO: 3237740 - DNA, 25 bp, Homo sapien
tgaggtcaatgtcaaataagattct

SEQ ID NO: 3237741 - DNA, 25 bp, Homo sapien
aggtcaatgtcaaataagattctat

SEQ ID NO: 3237742 - DNA, 25 bp, Homo sapien
tatgaggtcaatgtcaaataagatt

SEQ ID NO: 3237743 - DNA, 25 bp, Homo sapien
ttatgaggtcaatgtcaaataagat

SEQ ID NO: 3237744 - DNA, 25 bp, Homo sapien
tgaacaccctcttcgctgctcccgc

SEQ ID NO: 3237745 - DNA, 25 bp, Homo sapien
gcacgtgcaccgctggctaggaatc

SEQ ID NO: 3237746 - DNA, 25 bp, Homo sapien
gtgcaccgctggctaggaatccaaa

SEQ ID NO: 3237747 - DNA, 25 bp, Homo sapien
gccttgtctgcttttacaagggcac

SEQ ID NO: 3237748 - DNA, 25 bp, Homo sapien
ggcatttattgccataggcttccct

SEQ ID NO: 3237749 - DNA, 25 bp, Homo sapien
cctactgcctggttgttgaggagca

SEQ ID NO: 3237750 - DNA, 25 bp, Homo sapien
gcttctactgtaccccataagtttg

SEQ ID NO: 3237751 - DNA, 25 bp, Homo sapien
ttttctcattccttcaagtataaag

SEQ ID NO: 3237752 - DNA, 25 bp, Homo sapien
aggaggaagtccgagtttgcgccat

SEQ ID NO: 3237753 - DNA, 25 bp, Homo sapien
ggcatctttgacacagtcacgcggg

SEQ ID NO: 3237754 - DNA, 25 bp, Homo sapien
tttgcgccatttcctaccgggctga

SEQ ID NO: 3237755 - DNA, 25 bp, Homo sapien
taccatatttgtccagacgtgatca

SEQ ID NO: 3237756 - DNA, 25 bp, Homo sapien
taagctaaattctgcatgtaagtac

SEQ ID NO: 3237757 - DNA, 25 bp, Homo sapien
ttaagctaaattctgcatgtaagta

SEQ ID NO: 3237758 - DNA, 25 bp, Homo sapien
ggcgggttcagacgagaagccaggg

SEQ ID NO: 3237759 - DNA, 25 bp, Homo sapien
gaacgaggacgtgcggaaatctgtt

SEQ ID NO: 3237760 - DNA, 25 bp, Homo sapien
agatgccgtgagcctcggcgtgtcc

SEQ ID NO: 3237761 - DNA, 25 bp, Homo sapien
ctccatcggcgtgagcgtgtggaac

SEQ ID NO: 3237762 - DNA, 25 bp, Homo sapien
gcaagagggagaagggtgtgaaagc

SEQ ID NO: 3237763 - DNA, 25 bp, Homo sapien
gggagaagggtgtgaaagcaccgac

SEQ ID NO: 3237764 - DNA, 25 bp, Homo sapien
gtgaaggcaagagggagaagggtgt

SEQ ID NO: 3237765 - DNA, 25 bp, Homo sapien
gagggagaagggtgtgaaagcaccg

SEQ ID NO: 3237766 - DNA, 25 bp, Homo sapien
cattgtgacactgtgaaggtttccc

SEQ ID NO: 3237767 - DNA, 25 bp, Homo sapien
ttcataggcaggacgtccaggtctc

SEQ ID NO: 3237768 - DNA, 25 bp, Homo sapien
ccctctgcgggcagcgtggaaagca

SEQ ID NO: 3237769 - DNA, 25 bp, Homo sapien
ttaccatggaaagcctgcatggacc

SEQ ID NO: 3237770 - DNA, 25 bp, Homo sapien
cgtccttttgtggatatactgctcc

SEQ ID NO: 3237771 - DNA, 25 bp, Homo sapien
gatatactgctccatctggaagcca

SEQ ID NO: 3237772 - DNA, 25 bp, Homo sapien
cagatttatgacagagatgccatcg

SEQ ID NO: 3237773 - DNA, 25 bp, Homo sapien
gagatgccatcgctggtccgtcctt

SEQ ID NO: 3237774 - DNA, 25 bp, Homo sapien
ggacctcagcagggttcaacagcaa

SEQ ID NO: 3237775 - DNA, 25 bp, Homo sapien
tgggcggcaatgctcagcaggcact

SEQ ID NO: 3237776 - DNA, 25 bp, Homo sapien
tcgcctgggaccagcagacatggct

SEQ ID NO: 3237777 - DNA, 25 bp, Homo sapien
tagccaagacgcctctctgagaggc

SEQ ID NO: 3237778 - DNA, 25 bp, Homo sapien
caggcgtggactcccatgggtgttc

SEQ ID NO: 3237779 - DNA, 25 bp, Homo sapien
ggctgaataggcacagggggtacct

SEQ ID NO: 3237780 - DNA, 25 bp, Homo sapien
cagtctgcagtagggacggctgaat

SEQ ID NO: 3237781 - DNA, 25 bp, Homo sapien
tagggacggctgaataggcacaggg

SEQ ID NO: 3237782 - DNA, 25 bp, Homo sapien
tccagtctgcagtagggacggctga

SEQ ID NO: 3237783 - DNA, 25 bp, Homo sapien
tgtcacggcttttgtatcactagga

SEQ ID NO: 3237784 - DNA, 25 bp, Homo sapien
ttttgcgcgaccctcacagaatgta

SEQ ID NO: 3237785 - DNA, 25 bp, Homo sapien
tcagagcagtgccatgtggtaattc

SEQ ID NO: 3237786 - DNA, 25 bp, Homo sapien
gaatgtattgcacctgaccctgtgt

SEQ ID NO: 3237787 - DNA, 25 bp, Homo sapien
tgtggtgtgttgtgggttgtgtatg

SEQ ID NO: 3237788 - DNA, 25 bp, Homo sapien
ggtgtgttgtgggttgtgtatgcat

SEQ ID NO: 3237789 - DNA, 25 bp, Homo sapien
gtggtgtgttgtgggttgtgtatgc

SEQ ID NO: 3237790 - DNA, 25 bp, Homo sapien
gtgtggtgtgttgtgggttgtgtat

SEQ ID NO: 3237791 - DNA, 25 bp, Homo sapien
gactcccagaggacttatgatccaa

SEQ ID NO: 3237792 - DNA, 25 bp, Homo sapien
tctacaccagacactacacaaaatg

SEQ ID NO: 3237793 - DNA, 25 bp, Homo sapien
caatcacggagtattaaatgcagac

SEQ ID NO: 3237794 - DNA, 25 bp, Homo sapien
aacgaatcacacctgtcatttaggg

SEQ ID NO: 3237795 - DNA, 25 bp, Homo sapien
cacagaagacttacactagagagtg

SEQ ID NO: 3237796 - DNA, 25 bp, Homo sapien
gttcaggcctgtgtcccttcagtct

SEQ ID NO: 3237797 - DNA, 25 bp, Homo sapien
cttgtcagagcagtttaaagagacc

SEQ ID NO: 3237798 - DNA, 25 bp, Homo sapien
ttcagtctcacaaagatcgcgggtt

SEQ ID NO: 3237799 - DNA, 25 bp, Homo sapien
gacaccattcatgtcactataaaaa

SEQ ID NO: 3237800 - DNA, 25 bp, Homo sapien
aaaaactgctggagaagtgatgaat

SEQ ID NO: 3237801 - DNA, 25 bp, Homo sapien
gtcactataaaaactgctggagaag

SEQ ID NO: 3237802 - DNA, 25 bp, Homo sapien
tataaaaactgctggagaagtgatg

SEQ ID NO: 3237803 - DNA, 25 bp, Homo sapien
gaagcggttttgcttgaattgtcat

SEQ ID NO: 3237804 - DNA, 25 bp, Homo sapien
agcaaaataggcaggtctccgctga

SEQ ID NO: 3237805 - DNA, 25 bp, Homo sapien
tccgctgaagcggttttgcttgaat

SEQ ID NO: 3237806 - DNA, 25 bp, Homo sapien
tgcgttctgtcagcaaaataggcag

SEQ ID NO: 3237807 - DNA, 25 bp, Homo sapien
agtcttcagtgctccagtgtttgca

SEQ ID NO: 3237808 - DNA, 25 bp, Homo sapien
ggctgggtaactactactgattctg

SEQ ID NO: 3237809 - DNA, 25 bp, Homo sapien
gtcttcagtgctccagtgtttgcag

SEQ ID NO: 3237810 - DNA, 25 bp, Homo sapien
ggaagaggctgggtaactactactg

SEQ ID NO: 3237811 - DNA, 25 bp, Homo sapien
taatccatgagtgtctgaggcccgt

SEQ ID NO: 3237812 - DNA, 25 bp, Homo sapien
gcccctccacccgatgctttgtcct

SEQ ID NO: 3237813 - DNA, 25 bp, Homo sapien
tgtctgaggcccgtcccagtctgtg

SEQ ID NO: 3237814 - DNA, 25 bp, Homo sapien
ctttgcagaaggtgataatccatga

SEQ ID NO: 3237815 - DNA, 25 bp, Homo sapien
gaaggcagcctccagggcactggtg

SEQ ID NO: 3237816 - DNA, 25 bp, Homo sapien
aggcagcctccagggcactggtgtt

SEQ ID NO: 3237817 - DNA, 25 bp, Homo sapien
ctgaagcaagagaaggcagcctcca

SEQ ID NO: 3237818 - DNA, 25 bp, Homo sapien
gcagcctccagggcactggtgtttt

SEQ ID NO: 3237819 - DNA, 25 bp, Homo sapien
tcgtcactatagatgttgggagttt

SEQ ID NO: 3237820 - DNA, 25 bp, Homo sapien
tccccgaagaacttcgtcactatag

SEQ ID NO: 3237821 - DNA, 25 bp, Homo sapien
cgaagaacttcgtcactatagatgt

SEQ ID NO: 3237822 - DNA, 25 bp, Homo sapien
gaacttcgtcactatagatgttggg

SEQ ID NO: 3237823 - DNA, 25 bp, Homo sapien
aatgttatctcaatacaagtgaaag

SEQ ID NO: 3237824 - DNA, 25 bp, Homo sapien
tcaatacaagtgaaagacagaggat

SEQ ID NO: 3237825 - DNA, 25 bp, Homo sapien
tatctcaatacaagtgaaagacaga

SEQ ID NO: 3237826 - DNA, 25 bp, Homo sapien
tgttatctcaatacaagtgaaagac

SEQ ID NO: 3237827 - DNA, 25 bp, Homo sapien
tcatcatgtcactgagcacccaggt

SEQ ID NO: 3237828 - DNA, 25 bp, Homo sapien
tccccagggaacttatagcactctg

SEQ ID NO: 3237829 - DNA, 25 bp, Homo sapien
gtattatccggatgctccccaggga

SEQ ID NO: 3237830 - DNA, 25 bp, Homo sapien
cacacaggaggtctttgatttctgc

SEQ ID NO: 3237831 - DNA, 25 bp, Homo sapien
gaaacaaggcggcatccaggaactg

SEQ ID NO: 3237832 - DNA, 25 bp, Homo sapien
ctgctccgtgacgtttgaaccagtg

SEQ ID NO: 3237833 - DNA, 25 bp, Homo sapien
aggcggcatccaggaactgctgtat

SEQ ID NO: 3237834 - DNA, 25 bp, Homo sapien
gctccgtgacgtttgaaccagtggg

SEQ ID NO: 3237835 - DNA, 25 bp, Homo sapien
ttactaaggatcaggtctcctaagg

SEQ ID NO: 3237836 - DNA, 25 bp, Homo sapien
tcaatcgttcactcatctatttgga

SEQ ID NO: 3237837 - DNA, 25 bp, Homo sapien
gaaaatctcgacatgctcaatcgtt

SEQ ID NO: 3237838 - DNA, 25 bp, Homo sapien
tgcatttgtgaagtagcagactttt

SEQ ID NO: 3237839 - DNA, 25 bp, Homo sapien
caacacacggttttgtagatgcctt

SEQ ID NO: 3237840 - DNA, 25 bp, Homo sapien
ctcaacacacggttttgtagatgcc

SEQ ID NO: 3237841 - DNA, 25 bp, Homo sapien
ggcactcaacacacggttttgtaga

SEQ ID NO: 3237842 - DNA, 25 bp, Homo sapien
cacacggttttgtagatgccttcct

SEQ ID NO: 3237843 - DNA, 25 bp, Homo sapien
cagggtggctgttctttctcgaaga

SEQ ID NO: 3237844 - DNA, 25 bp, Homo sapien
gccttgacaaccgttccagggtggc

SEQ ID NO: 3237845 - DNA, 25 bp, Homo sapien
cggaacgtgtgggttgtgctgggcc

SEQ ID NO: 3237846 - DNA, 25 bp, Homo sapien
gcgatcgttctgtaccgtcaggcat

SEQ ID NO: 3237847 - DNA, 25 bp, Homo sapien
tttgtgtcaatgaactttttcgagg

SEQ ID NO: 3237848 - DNA, 25 bp, Homo sapien
agcaaaataggcttatcaaggtaga

SEQ ID NO: 3237849 - DNA, 25 bp, Homo sapien
ttcactgtctgaaacttgaaatctc

SEQ ID NO: 3237850 - DNA, 25 bp, Homo sapien
tctcacttactacatcactttattt

SEQ ID NO: 3237851 - DNA, 25 bp, Homo sapien
gcttatcaaggtagatcatcttcca

SEQ ID NO: 3237852 - DNA, 25 bp, Homo sapien
cctcacagcaggtaagtaagtctct

SEQ ID NO: 3237853 - DNA, 25 bp, Homo sapien
tgatcgaggtttctgaggtcaggcc

SEQ ID NO: 3237854 - DNA, 25 bp, Homo sapien
gaaatccaacgtcagactccagagg

SEQ ID NO: 3237855 - DNA, 25 bp, Homo sapien
acattcctagggttgcacagccggt

SEQ ID NO: 3237856 - DNA, 25 bp, Homo sapien
gctgttgacatgtgaatgaccgcta

SEQ ID NO: 3237857 - DNA, 25 bp, Homo sapien
ctttttagagaacgagctgttgaca

SEQ ID NO: 3237858 - DNA, 25 bp, Homo sapien
gacatgtgaatgaccgctaatgctg

SEQ ID NO: 3237859 - DNA, 25 bp, Homo sapien
catgtagcatggctgctttttagag

SEQ ID NO: 3237860 - DNA, 25 bp, Homo sapien
acagccttttccagcttgcctgcca

SEQ ID NO: 3237861 - DNA, 25 bp, Homo sapien
agccttttccagcttgcctgccagg

SEQ ID NO: 3237862 - DNA, 25 bp, Homo sapien
tcctctaggaagcctcggcaccctc

SEQ ID NO: 3237863 - DNA, 25 bp, Homo sapien
gccttttccagcttgcctgccaggc

SEQ ID NO: 3237864 - DNA, 25 bp, Homo sapien
cagatacctccactcggcgtgctgt

SEQ ID NO: 3237865 - DNA, 25 bp, Homo sapien
caaaagtgaactcgtcagaatttcc

SEQ ID NO: 3237866 - DNA, 25 bp, Homo sapien
tccactcggcgtgctgtagtcagca

SEQ ID NO: 3237867 - DNA, 25 bp, Homo sapien
gtcagcatccccaaaagtgaactcg

SEQ ID NO: 3237868 - DNA, 25 bp, Homo sapien
tccactctggtttttaattcattcc

SEQ ID NO: 3237869 - DNA, 25 bp, Homo sapien
tgtcctattagatcgtggtgtgctg

SEQ ID NO: 3237870 - DNA, 25 bp, Homo sapien
atgtcctattagatcgtggtgtgct

SEQ ID NO: 3237871 - DNA, 25 bp, Homo sapien
tcaccatgaatccactctggttttt

SEQ ID NO: 3237872 - DNA, 25 bp, Homo sapien
gcagcacaagcctggctggttctag

SEQ ID NO: 3237873 - DNA, 25 bp, Homo sapien
tgctggtcccgagtgccttggcttg

SEQ ID NO: 3237874 - DNA, 25 bp, Homo sapien
ggtcccgagtgccttggcttggcca

SEQ ID NO: 3237875 - DNA, 25 bp, Homo sapien
cacaagcctggctggttctaggcgg

SEQ ID NO: 3237876 - DNA, 25 bp, Homo sapien
aaaagatttaggcacatattgtgaa

SEQ ID NO: 3237877 - DNA, 25 bp, Homo sapien
ctgaaaagatttaggcacatattgt

SEQ ID NO: 3237878 - DNA, 25 bp, Homo sapien
aaagatttaggcacatattgtgaac

SEQ ID NO: 3237879 - DNA, 25 bp, Homo sapien
tgaaaagatttaggcacatattgtg

SEQ ID NO: 3237880 - DNA, 25 bp, Homo sapien
tcacttggaatctcctcttgaaagt

SEQ ID NO: 3237881 - DNA, 25 bp, Homo sapien
cacttggaatctcctcttgaaagtc

SEQ ID NO: 3237882 - DNA, 25 bp, Homo sapien
tggaatctcctcttgaaagtcaaag

SEQ ID NO: 3237883 - DNA, 25 bp, Homo sapien
cttggaatctcctcttgaaagtcaa

SEQ ID NO: 3237884 - DNA, 25 bp, Homo sapien
tcaagtgataagcagtgtgccgagg

SEQ ID NO: 3237885 - DNA, 25 bp, Homo sapien
tgataagcagtgtgccgaggccaca

SEQ ID NO: 3237886 - DNA, 25 bp, Homo sapien
tcggtctaacatctcacactgtcag

SEQ ID NO: 3237887 - DNA, 25 bp, Homo sapien
gcttttctctcggtctaacatctca

SEQ ID NO: 3237888 - DNA, 25 bp, Homo sapien
gggtacttcacgtgaactgtctgaa

SEQ ID NO: 3237889 - DNA, 25 bp, Homo sapien
gacggactgcaaacacacatcaggg

SEQ ID NO: 3237890 - DNA, 25 bp, Homo sapien
ttggagatgctttcagcaaggcagc

SEQ ID NO: 3237891 - DNA, 25 bp, Homo sapien
caaagaggttcatggcggaagcact

SEQ ID NO: 3237892 - DNA, 25 bp, Homo sapien
gatgaaatgcaattatctgatagaa

SEQ ID NO: 3237893 - DNA, 25 bp, Homo sapien
ttttctacagtaatgtcagatgggg

SEQ ID NO: 3237894 - DNA, 25 bp, Homo sapien
taaggacttgaatcacaatcaagag

SEQ ID NO: 3237895 - DNA, 25 bp, Homo sapien
aaatgagtgtaaggacttgaatcac

SEQ ID NO: 3237896 - DNA, 25 bp, Homo sapien
cagtaatgatgcaccagagagcacc

SEQ ID NO: 3237897 - DNA, 25 bp, Homo sapien
ggagagctgctgaattaagactggc

SEQ ID NO: 3237898 - DNA, 25 bp, Homo sapien
aatcttccccggacacatggagctg

SEQ ID NO: 3237899 - DNA, 25 bp, Homo sapien
tataacatgggctccaggctactca

SEQ ID NO: 3237900 - DNA, 25 bp, Homo sapien
tgttttccctactacgaagcttgag

SEQ ID NO: 3237901 - DNA, 25 bp, Homo sapien
tagactgaatatccggtgttttccc

SEQ ID NO: 3237902 - DNA, 25 bp, Homo sapien
cttatttgcaaacctctggagccaa

SEQ ID NO: 3237903 - DNA, 25 bp, Homo sapien
cagggccaagtctctatgtaatctc

SEQ ID NO: 3237904 - DNA, 25 bp, Homo sapien
cctagtgacctaggatagtcagcat

SEQ ID NO: 3237905 - DNA, 25 bp, Homo sapien
cctaggctgagcgttgaaagtttag

SEQ ID NO: 3237906 - DNA, 25 bp, Homo sapien
tgttggctatttcagagagcaccta

SEQ ID NO: 3237907 - DNA, 25 bp, Homo sapien
tcattttccgtgttgaacgttgtag

SEQ ID NO: 3237908 - DNA, 25 bp, Homo sapien
agtatacaacactcaaacgtccagt

SEQ ID NO: 3237909 - DNA, 25 bp, Homo sapien
ctggcttcctaaactcaaccctgag

SEQ ID NO: 3237910 - DNA, 25 bp, Homo sapien
cccagatcatgcgatacaacgtgaa

SEQ ID NO: 3237911 - DNA, 25 bp, Homo sapien
catcaaatcataaagggtagcagga

SEQ ID NO: 3237912 - DNA, 25 bp, Homo sapien
tggctgggagtgcaagaaatccttg

SEQ ID NO: 3237913 - DNA, 25 bp, Homo sapien
tttcagactaaaccagtcaggtggc

SEQ ID NO: 3237914 - DNA, 25 bp, Homo sapien
tagcagatgattgcaaggccagtgt

SEQ ID NO: 3237915 - DNA, 25 bp, Homo sapien
aactctgcgggttgtcagcttcatg

SEQ ID NO: 3237916 - DNA, 25 bp, Homo sapien
gttgctctacgtgcgggattccgcg

SEQ ID NO: 3237917 - DNA, 25 bp, Homo sapien
ggccccagggcgtagtgattgcact

SEQ ID NO: 3237918 - DNA, 25 bp, Homo sapien
ctgttctgagggtgctgcgaggttg

SEQ ID NO: 3237919 - DNA, 25 bp, Homo sapien
cgtcggaaaggtcaccgcggcagcc

SEQ ID NO: 3237920 - DNA, 25 bp, Homo sapien
cagcaggctcaggaccagactggcg

SEQ ID NO: 3237921 - DNA, 25 bp, Homo sapien
tcaggaccagactggcgccggccag

SEQ ID NO: 3237922 - DNA, 25 bp, Homo sapien
gggaaagggcactcgccgcgcccca

SEQ ID NO: 3237923 - DNA, 25 bp, Homo sapien
caggctcaggaccagactggcgccg

SEQ ID NO: 3237924 - DNA, 25 bp, Homo sapien
caccagtgggtaggcgcgggccacc

SEQ ID NO: 3237925 - DNA, 25 bp, Homo sapien
gcgggccaccgtggggatgggccgc

SEQ ID NO: 3237926 - DNA, 25 bp, Homo sapien
caccgtggggatgggccgcatctgc

SEQ ID NO: 3237927 - DNA, 25 bp, Homo sapien
gtggcccaccagtgggtaggcgcgg

SEQ ID NO: 3237928 - DNA, 25 bp, Homo sapien
gcccgtccggcttcatcagcagcgc

SEQ ID NO: 3237929 - DNA, 25 bp, Homo sapien
tcgcccgtccggcttcatcagcagc

SEQ ID NO: 3237930 - DNA, 25 bp, Homo sapien
cgcccgtccggcttcatcagcagcg

SEQ ID NO: 3237931 - DNA, 25 bp, Homo sapien
ctcgcccgtccggcttcatcagcag

SEQ ID NO: 3237932 - DNA, 25 bp, Homo sapien
ttgcgctccaggaggagcgccggcc

SEQ ID NO: 3237933 - DNA, 25 bp, Homo sapien
accccgttgcgctccaggaggagcg

SEQ ID NO: 3237934 - DNA, 25 bp, Homo sapien
tgatcggagggtgggaacggggctg

SEQ ID NO: 3237935 - DNA, 25 bp, Homo sapien
gctgcggaccccgttgcgctccagg

SEQ ID NO: 3237936 - DNA, 25 bp, Homo sapien
tagaactgggagtgcattctccaca

SEQ ID NO: 3237937 - DNA, 25 bp, Homo sapien
cactagcagtgtcggcgggtgccaa

SEQ ID NO: 3237938 - DNA, 25 bp, Homo sapien
agcgccacaagcagcgggttcctgg

SEQ ID NO: 3237939 - DNA, 25 bp, Homo sapien
ggcaacgactagaactgggagtgca

SEQ ID NO: 3237940 - DNA, 25 bp, Homo sapien
ggcaggggtttggaaataccgcatc

SEQ ID NO: 3237941 - DNA, 25 bp, Homo sapien
gggtttggaaataccgcatcctgtg

SEQ ID NO: 3237942 - DNA, 25 bp, Homo sapien
ttgagagctgagcagcggtgaggtg

SEQ ID NO: 3237943 - DNA, 25 bp, Homo sapien
ggaggaaacggcagggctttgagag

SEQ ID NO: 3237944 - DNA, 25 bp, Homo sapien
taaacaaggcgtttgacaccctcca

SEQ ID NO: 3237945 - DNA, 25 bp, Homo sapien
taaagtatgaaggtcaagcgggaac

SEQ ID NO: 3237946 - DNA, 25 bp, Homo sapien
tgttggccagtttaaaaccgctctg

SEQ ID NO: 3237947 - DNA, 25 bp, Homo sapien
ctgaagcagcagtcaagtcttgtga

SEQ ID NO: 3237948 - DNA, 25 bp, Homo sapien
catgaggcctcatcttgtgaagttg

SEQ ID NO: 3237949 - DNA, 25 bp, Homo sapien
gaaacaggtctttattcactagaga

SEQ ID NO: 3237950 - DNA, 25 bp, Homo sapien
ggtacctcaacgtaatccctgatga

SEQ ID NO: 3237951 - DNA, 25 bp, Homo sapien
cagggagttgtaaataccaggtact

SEQ ID NO: 3237952 - DNA, 25 bp, Homo sapien
ttaaatagtccagtcagctcacagg

SEQ ID NO: 3237953 - DNA, 25 bp, Homo sapien
tgaggccagcgtttggacattagcc

SEQ ID NO: 3237954 - DNA, 25 bp, Homo sapien
ttcaaggtgaaatggctgaggccag

SEQ ID NO: 3237955 - DNA, 25 bp, Homo sapien
tgaggtcaacactgggcacaaagca

SEQ ID NO: 3237956 - DNA, 25 bp, Homo sapien
gtactcaatgatctgctgaaaaaat

SEQ ID NO: 3237957 - DNA, 25 bp, Homo sapien
ctgcattataaagggccaccatggg

SEQ ID NO: 3237958 - DNA, 25 bp, Homo sapien
cacattttctgcattataaagggcc

SEQ ID NO: 3237959 - DNA, 25 bp, Homo sapien
accatgggcactggcccgacccaga

SEQ ID NO: 3237960 - DNA, 25 bp, Homo sapien
acactaggccaacagcggcagaaat

SEQ ID NO: 3237961 - DNA, 25 bp, Homo sapien
caacagcggcagaaatcctgtctgc

SEQ ID NO: 3237962 - DNA, 25 bp, Homo sapien
caccaacttctattaacactaggcc

SEQ ID NO: 3237963 - DNA, 25 bp, Homo sapien
caacttctattaacactaggccaac

SEQ ID NO: 3237964 - DNA, 25 bp, Homo sapien
gagatgcctgttcggagtgtcccca

SEQ ID NO: 3237965 - DNA, 25 bp, Homo sapien
tggtctgaaagcaagtgagacagcc

SEQ ID NO: 3237966 - DNA, 25 bp, Homo sapien
cagcatagaggcagcaatggaagcc

SEQ ID NO: 3237967 - DNA, 25 bp, Homo sapien
tgagacagccaagataaggcctgag

SEQ ID NO: 3237968 - DNA, 25 bp, Homo sapien
gtacatagaggatttgtcaatttgc

SEQ ID NO: 3237969 - DNA, 25 bp, Homo sapien
aaaaacttgtacatagaggatttgt

SEQ ID NO: 3237970 - DNA, 25 bp, Homo sapien
aacttgtacatagaggatttgtcaa

SEQ ID NO: 3237971 - DNA, 25 bp, Homo sapien
tgtacatagaggatttgtcaatttg

SEQ ID NO: 3237972 - DNA, 25 bp, Homo sapien
ttgtaagaagtcctaggccaagcca

SEQ ID NO: 3237973 - DNA, 25 bp, Homo sapien
tgtaagaagtcctaggccaagccat

SEQ ID NO: 3237974 - DNA, 25 bp, Homo sapien
cttgtaagaagtcctaggccaagcc

SEQ ID NO: 3237975 - DNA, 25 bp, Homo sapien
tcttggcctcttgacgggcaaaggc

SEQ ID NO: 3237976 - DNA, 25 bp, Homo sapien
tggactcttggcctcttgacgggca

SEQ ID NO: 3237977 - DNA, 25 bp, Homo sapien
acagctttacaaaggtacactggca

SEQ ID NO: 3237978 - DNA, 25 bp, Homo sapien
aagtaaccatttctatagacagctt

SEQ ID NO: 3237979 - DNA, 25 bp, Homo sapien
tcttcctgaacactggcgacagtcg

SEQ ID NO: 3237980 - DNA, 25 bp, Homo sapien
gattggattttcaagatttccctgc

SEQ ID NO: 3237981 - DNA, 25 bp, Homo sapien
ctccagacactcctttgctttactg

SEQ ID NO: 3237982 - DNA, 25 bp, Homo sapien
tgctttactgtgtcctccatcccgt

SEQ ID NO: 3237983 - DNA, 25 bp, Homo sapien
agtaacatccaaaacgattaaagca

SEQ ID NO: 3237984 - DNA, 25 bp, Homo sapien
gcttcatctacaggttctcaaatgc

SEQ ID NO: 3237985 - DNA, 25 bp, Homo sapien
catccaaaacgattaaagcataaat

SEQ ID NO: 3237986 - DNA, 25 bp, Homo sapien
cagcttcatctacaggttctcaaat

SEQ ID NO: 3237987 - DNA, 25 bp, Homo sapien
tagaaataaaatatgtggttacaaa

SEQ ID NO: 3237988 - DNA, 25 bp, Homo sapien
ctagaaataaaatatgtggttacaa

SEQ ID NO: 3237989 - DNA, 25 bp, Homo sapien
aaatatgtggttacaaaaaatatat

SEQ ID NO: 3237990 - DNA, 25 bp, Homo sapien
tcttaaccaatatatttgcttgttc

SEQ ID NO: 3237991 - DNA, 25 bp, Homo sapien
caagtttcttaaccaatatatttgc

SEQ ID NO: 3237992 - DNA, 25 bp, Homo sapien
ctttctcctggagcgccatttgttt

SEQ ID NO: 3237993 - DNA, 25 bp, Homo sapien
aatggaaagtgggtgttaacatctt

SEQ ID NO: 3237994 - DNA, 25 bp, Homo sapien
aaatttagaaacagatcgatgagac

SEQ ID NO: 3237995 - DNA, 25 bp, Homo sapien
atttagaaacagatcgatgagactc

SEQ ID NO: 3237996 - DNA, 25 bp, Homo sapien
ttagaaacagatcgatgagactcac

SEQ ID NO: 3237997 - DNA, 25 bp, Homo sapien
taaatttagaaacagatcgatgaga

SEQ ID NO: 3237998 - DNA, 25 bp, Homo sapien
tcctcagaaggccagtgcggtcgta

SEQ ID NO: 3237999 - DNA, 25 bp, Homo sapien
tctcttgtacggtccacttctactc

SEQ ID NO: 3238000 - DNA, 25 bp, Homo sapien
tgccttcccggtggagtgtgatttc

SEQ ID NO: 3238001 - DNA, 25 bp, Homo sapien
tgcggtcgtagaaccgcgctgaaga

SEQ ID NO: 3238002 - DNA, 25 bp, Homo sapien
caaccattcaattcacgcacgttag

SEQ ID NO: 3238003 - DNA, 25 bp, Homo sapien
caattcacgcacgttagttatctcg

SEQ ID NO: 3238004 - DNA, 25 bp, Homo sapien
taaaatatgggtgagaagcaaccat

SEQ ID NO: 3238005 - DNA, 25 bp, Homo sapien
tagttatctcgtgtttattttgcag

SEQ ID NO: 3238006 - DNA, 25 bp, Homo sapien
ctataaactgcacggacatactcgg

SEQ ID NO: 3238007 - DNA, 25 bp, Homo sapien
tgagcaccaatattcttccccatag

SEQ ID NO: 3238008 - DNA, 25 bp, Homo sapien
tcattactttgagcaccaatattct

SEQ ID NO: 3238009 - DNA, 25 bp, Homo sapien
cggacatactcggaatcatcattac

SEQ ID NO: 3238010 - DNA, 25 bp, Homo sapien
catccttactagatagccatttggt

SEQ ID NO: 3238011 - DNA, 25 bp, Homo sapien
tgaaggcatgggctattacgcatcc

SEQ ID NO: 3238012 - DNA, 25 bp, Homo sapien
ggacctctgcaccagggtttgagat

SEQ ID NO: 3238013 - DNA, 25 bp, Homo sapien
gcttctccagggcaagtttcccact

SEQ ID NO: 3238014 - DNA, 25 bp, Homo sapien
tcttagaggctactaagagctccat

SEQ ID NO: 3238015 - DNA, 25 bp, Homo sapien
gattgtcttagaggctactaagagc

SEQ ID NO: 3238016 - DNA, 25 bp, Homo sapien
ccttgatgaaggcaatcgtgggaat

SEQ ID NO: 3238017 - DNA, 25 bp, Homo sapien
cgtgggaatgacgatgattgtctta

SEQ ID NO: 3238018 - DNA, 25 bp, Homo sapien
tgttgtatcagaaatgtgtatttct

SEQ ID NO: 3238019 - DNA, 25 bp, Homo sapien
gttgtatcagaaatgtgtatttctt

SEQ ID NO: 3238020 - DNA, 25 bp, Homo sapien
gccagggcatctttattcttcgaaa

SEQ ID NO: 3238021 - DNA, 25 bp, Homo sapien
ggtaccagagatcaagccaaagcca

SEQ ID NO: 3238022 - DNA, 25 bp, Homo sapien
gaaggctctttttgtgttcccatcc

SEQ ID NO: 3238023 - DNA, 25 bp, Homo sapien
aaagtatgtaggatctgaaggctct

SEQ ID NO: 3238024 - DNA, 25 bp, Homo sapien
cacaattgtaaaagtcagggactta

SEQ ID NO: 3238025 - DNA, 25 bp, Homo sapien
tattttaccacaattgtaaaagtca

SEQ ID NO: 3238026 - DNA, 25 bp, Homo sapien
accacaattgtaaaagtcagggact

SEQ ID NO: 3238027 - DNA, 25 bp, Homo sapien
ttaccacaattgtaaaagtcaggga

SEQ ID NO: 3238028 - DNA, 25 bp, Homo sapien
tagggtgtacttcaccacaaggaca

SEQ ID NO: 3238029 - DNA, 25 bp, Homo sapien
gatactgctatcaatgccctctgcc

SEQ ID NO: 3238030 - DNA, 25 bp, Homo sapien
gaaaggacatatttaaacaggcagt

SEQ ID NO: 3238031 - DNA, 25 bp, Homo sapien
caggtacggaccatatacacatgtc

SEQ ID NO: 3238032 - DNA, 25 bp, Homo sapien
tttgaatgataatcacatgcttctg

SEQ ID NO: 3238033 - DNA, 25 bp, Homo sapien
tgcttctgtttggacttggatgcac

SEQ ID NO: 3238034 - DNA, 25 bp, Homo sapien
gatttgaatgataatcacatgcttc

SEQ ID NO: 3238035 - DNA, 25 bp, Homo sapien
gcttctgtttggacttggatgcacc

SEQ ID NO: 3238036 - DNA, 25 bp, Homo sapien
gttcatttcattggcccgttcagcg

SEQ ID NO: 3238037 - DNA, 25 bp, Homo sapien
ggcgttcatttcattggcccgttca

SEQ ID NO: 3238038 - DNA, 25 bp, Homo sapien
tttcattggcccgttcagcgatgac

SEQ ID NO: 3238039 - DNA, 25 bp, Homo sapien
atttcattggcccgttcagcgatga

SEQ ID NO: 3238040 - DNA, 25 bp, Homo sapien
caacttcttctcgaatatcttcatg

SEQ ID NO: 3238041 - DNA, 25 bp, Homo sapien
tatcttcatgacttagcctgttccc

SEQ ID NO: 3238042 - DNA, 25 bp, Homo sapien
gtcatcagtcacacttaaaagcaag

SEQ ID NO: 3238043 - DNA, 25 bp, Homo sapien
tagcctgttcccttcgtcatcagtc

SEQ ID NO: 3238044 - DNA, 25 bp, Homo sapien
gcctgaactggaactcggatcgaaa

SEQ ID NO: 3238045 - DNA, 25 bp, Homo sapien
tcttctaccgtgtcgtggagcctca

SEQ ID NO: 3238046 - DNA, 25 bp, Homo sapien
taataacacccggtatgtgccgcat

SEQ ID NO: 3238047 - DNA, 25 bp, Homo sapien
tattcaggcccagaacggctaggtg

SEQ ID NO: 3238048 - DNA, 25 bp, Homo sapien
tgcagaaagcatgataaggcaaacg

SEQ ID NO: 3238049 - DNA, 25 bp, Homo sapien
tttagctcacagctggaacctgggc

SEQ ID NO: 3238050 - DNA, 25 bp, Homo sapien
gataaggcaaacgtaaagcaccgag

SEQ ID NO: 3238051 - DNA, 25 bp, Homo sapien
gggaggacgcccacttttagctcac

SEQ ID NO: 3238052 - DNA, 25 bp, Homo sapien
cttgaatttatgagcggaagcctga

SEQ ID NO: 3238053 - DNA, 25 bp, Homo sapien
tttatgagcggaagcctgatccaaa

SEQ ID NO: 3238054 - DNA, 25 bp, Homo sapien
tagctttccttgaatttatgagcgg

SEQ ID NO: 3238055 - DNA, 25 bp, Homo sapien
agcggaagcctgatccaaatgcata

SEQ ID NO: 3238056 - DNA, 25 bp, Homo sapien
taagctagtgtaatgtctcgggcaa

SEQ ID NO: 3238057 - DNA, 25 bp, Homo sapien
cagctcctaaaatgaattgctcggg

SEQ ID NO: 3238058 - DNA, 25 bp, Homo sapien
cggcccgttgtgctcagttgtctaa

SEQ ID NO: 3238059 - DNA, 25 bp, Homo sapien
ctcttagcggtagcgtaacgtctcc

SEQ ID NO: 3238060 - DNA, 25 bp, Homo sapien
ggcgtgtccgatgacaaagccagct

SEQ ID NO: 3238061 - DNA, 25 bp, Homo sapien
aataaaggcggcgttccatgggcac

SEQ ID NO: 3238062 - DNA, 25 bp, Homo sapien
gcctagagatggcagttccacgccg

SEQ ID NO: 3238063 - DNA, 25 bp, Homo sapien
caaagtctgattttcacgagcctgc

SEQ ID NO: 3238064 - DNA, 25 bp, Homo sapien
ttgcctcggtgacaaacaaggaaac

SEQ ID NO: 3238065 - DNA, 25 bp, Homo sapien
cttgcctcggtgacaaacaaggaaa

SEQ ID NO: 3238066 - DNA, 25 bp, Homo sapien
aacaaggaaacaagcctgcaaagcg

SEQ ID NO: 3238067 - DNA, 25 bp, Homo sapien
taaaaagcagagttatgctgcgatg

SEQ ID NO: 3238068 - DNA, 25 bp, Homo sapien
gattaggagtgaccagaaacctctt

SEQ ID NO: 3238069 - DNA, 25 bp, Homo sapien
tctctggatttgatgactgcactgt

SEQ ID NO: 3238070 - DNA, 25 bp, Homo sapien
ctgcaaacataagaaatgaattctg

SEQ ID NO: 3238071 - DNA, 25 bp, Homo sapien
ccagtttattgcagctgcagttgta

SEQ ID NO: 3238072 - DNA, 25 bp, Homo sapien
tggacttctgggttagaacccaaca

SEQ ID NO: 3238073 - DNA, 25 bp, Homo sapien
ccaacaggtataaggaccagtttat

SEQ ID NO: 3238074 - DNA, 25 bp, Homo sapien
caaacacgtcatccaattcatgatc

SEQ ID NO: 3238075 - DNA, 25 bp, Homo sapien
agcagtgggggctgggggtgcagac

SEQ ID NO: 3238076 - DNA, 25 bp, Homo sapien
ctgaaagagcagtgggggctggggg

SEQ ID NO: 3238077 - DNA, 25 bp, Homo sapien
cagtgggggctgggggtgcagacat

SEQ ID NO: 3238078 - DNA, 25 bp, Homo sapien
aagagcagtgggggctgggggtgca

SEQ ID NO: 3238079 - DNA, 25 bp, Homo sapien
gatgaaagcaagtagataagatgac

SEQ ID NO: 3238080 - DNA, 25 bp, Homo sapien
tccagataccgaagtttcttcaggt

SEQ ID NO: 3238081 - DNA, 25 bp, Homo sapien
ttcttcaggtcttctactgtagcgg

SEQ ID NO: 3238082 - DNA, 25 bp, Homo sapien
aataacacattccagataccgaagt

SEQ ID NO: 3238083 - DNA, 25 bp, Homo sapien
tactgtagcgggacggtcagacttc

SEQ ID NO: 3238084 - DNA, 25 bp, Homo sapien
tcactaacactacgggcaaataaag

SEQ ID NO: 3238085 - DNA, 25 bp, Homo sapien
tcttcactaacactacgggcaaata

SEQ ID NO: 3238086 - DNA, 25 bp, Homo sapien
caatcttcactaacactacgggcaa

SEQ ID NO: 3238087 - DNA, 25 bp, Homo sapien
tcacaatcttcactaacactacggg

SEQ ID NO: 3238088 - DNA, 25 bp, Homo sapien
ggaagtatctcggatctctgtgcaa

SEQ ID NO: 3238089 - DNA, 25 bp, Homo sapien
gatggcgcccttgtgcattctcggg

SEQ ID NO: 3238090 - DNA, 25 bp, Homo sapien
caatgcatagggaatgatgacggct

SEQ ID NO: 3238091 - DNA, 25 bp, Homo sapien
cacgtaggcatatggatggcgccct

SEQ ID NO: 3238092 - DNA, 25 bp, Homo sapien
tctatccaaaagtgcctcaggatgc

SEQ ID NO: 3238093 - DNA, 25 bp, Homo sapien
ttggacgaagaatcaactgtccttc

SEQ ID NO: 3238094 - DNA, 25 bp, Homo sapien
gtccttctagaccaagctcttctct

SEQ ID NO: 3238095 - DNA, 25 bp, Homo sapien
tcttttctggttggattctatccaa

SEQ ID NO: 3238096 - DNA, 25 bp, Homo sapien
ttctcctcttcaacttgatccagat

SEQ ID NO: 3238097 - DNA, 25 bp, Homo sapien
tttctcctcttcaacttgatccaga

SEQ ID NO: 3238098 - DNA, 25 bp, Homo sapien
ggaagaatcccaaaagtatgcctga

SEQ ID NO: 3238099 - DNA, 25 bp, Homo sapien
caactggtaacatgactttgggcag

SEQ ID NO: 3238100 - DNA, 25 bp, Homo sapien
tttcttcatcaacttagggcctggg

SEQ ID NO: 3238101 - DNA, 25 bp, Homo sapien
tcttaaatggcccaggctacagggc

SEQ ID NO: 3238102 - DNA, 25 bp, Homo sapien
taaatttaatgtcatgtagggtcac

SEQ ID NO: 3238103 - DNA, 25 bp, Homo sapien
tgagtaacaataattctggagctga

SEQ ID NO: 3238104 - DNA, 25 bp, Homo sapien
gaggaaaggtaatgggcacacaaac

SEQ ID NO: 3238105 - DNA, 25 bp, Homo sapien
gaaagacattctcaagccaaaaggt

SEQ ID NO: 3238106 - DNA, 25 bp, Homo sapien
ttatgaatcagccatctcctgattt

SEQ ID NO: 3238107 - DNA, 25 bp, Homo sapien
cccattatgaatcagccatctcctg

SEQ ID NO: 3238108 - DNA, 25 bp, Homo sapien
tatgaatcagccatctcctgattta

SEQ ID NO: 3238109 - DNA, 25 bp, Homo sapien
cattatgaatcagccatctcctgat

SEQ ID NO: 3238110 - DNA, 25 bp, Homo sapien
ttgcctaagaatatggcacatattt

SEQ ID NO: 3238111 - DNA, 25 bp, Homo sapien
gccggtaattcattgtaggataatt

SEQ ID NO: 3238112 - DNA, 25 bp, Homo sapien
aaggttgagaaagtgggattgccta

SEQ ID NO: 3238113 - DNA, 25 bp, Homo sapien
gaacagaagaaaagccggtaattca

SEQ ID NO: 3238114 - DNA, 25 bp, Homo sapien
ctcgaatttaaccttgcttgggtca

SEQ ID NO: 3238115 - DNA, 25 bp, Homo sapien
agaactcgaatttaaccttgcttgg

SEQ ID NO: 3238116 - DNA, 25 bp, Homo sapien
gagaactcgaatttaaccttgcttg

SEQ ID NO: 3238117 - DNA, 25 bp, Homo sapien
ggttctattgctgattgatcttgag

SEQ ID NO: 3238118 - DNA, 25 bp, Homo sapien
tcttgagtttcacaacctggagttt

SEQ ID NO: 3238119 - DNA, 25 bp, Homo sapien
ttcacaacctggagtttccaccaca

SEQ ID NO: 3238120 - DNA, 25 bp, Homo sapien
cagagatggactgtatctcttcttc

SEQ ID NO: 3238121 - DNA, 25 bp, Homo sapien
gacagtccttttaagcaaacggcaa

SEQ ID NO: 3238122 - DNA, 25 bp, Homo sapien
tggtcataaatgaaagacagtcctt

SEQ ID NO: 3238123 - DNA, 25 bp, Homo sapien
cacactaactcgcttttggtcataa

SEQ ID NO: 3238124 - DNA, 25 bp, Homo sapien
gcagacatgcagtgagcctcagcat

SEQ ID NO: 3238125 - DNA, 25 bp, Homo sapien
cctgaaatgtggcatacagctagcc

SEQ ID NO: 3238126 - DNA, 25 bp, Homo sapien
gaagacctaagatcatatccagaga

SEQ ID NO: 3238127 - DNA, 25 bp, Homo sapien
tattgcatttaaaggactggtgggc

SEQ ID NO: 3238128 - DNA, 25 bp, Homo sapien
tagactgatgtgttaggttaagcct

SEQ ID NO: 3238129 - DNA, 25 bp, Homo sapien
gagtttcatttaagtacagccgtta

SEQ ID NO: 3238130 - DNA, 25 bp, Homo sapien
taatgtctgtatgacccttactgaa

SEQ ID NO: 3238131 - DNA, 25 bp, Homo sapien
tagtatcaggaaaggcagagatcaa

SEQ ID NO: 3238132 - DNA, 25 bp, Homo sapien
caagatcaacagctaaatgctggag

SEQ ID NO: 3238133 - DNA, 25 bp, Homo sapien
ctaaattgaaaagaggcgtggtaag

SEQ ID NO: 3238134 - DNA, 25 bp, Homo sapien
cctctgtagattcaggtgaaccaaa

SEQ ID NO: 3238135 - DNA, 25 bp, Homo sapien
taaaaggtgagattacagactttta

SEQ ID NO: 3238136 - DNA, 25 bp, Homo sapien
actgggacaaaagcaccctgccttc

SEQ ID NO: 3238137 - DNA, 25 bp, Homo sapien
tatcaggcttgacaaaccacagttc

SEQ ID NO: 3238138 - DNA, 25 bp, Homo sapien
aagttgctacagaggcagcatggcc

SEQ ID NO: 3238139 - DNA, 25 bp, Homo sapien
aaaatgctgcactcaaaaggaccct

SEQ ID NO: 3238140 - DNA, 25 bp, Homo sapien
tgggtatggatagctcctcctagag

SEQ ID NO: 3238141 - DNA, 25 bp, Homo sapien
cagaggtggctatccttataacaga

SEQ ID NO: 3238142 - DNA, 25 bp, Homo sapien
catgataaccaaacgaaagcagagg

SEQ ID NO: 3238143 - DNA, 25 bp, Homo sapien
tagacctaacggacatgtgcagaac

SEQ ID NO: 3238144 - DNA, 25 bp, Homo sapien
tcctttcaaaagcagcagaatgcac

SEQ ID NO: 3238145 - DNA, 25 bp, Homo sapien
gcgacagcctgagctatggaccctt

SEQ ID NO: 3238146 - DNA, 25 bp, Homo sapien
aacgcatatgacttgactgtatgct

SEQ ID NO: 3238147 - DNA, 25 bp, Homo sapien
gctttcagaaaaagccaggttatat

SEQ ID NO: 3238148 - DNA, 25 bp, Homo sapien
tctttgtgaacgcatatgacttgac

SEQ ID NO: 3238149 - DNA, 25 bp, Homo sapien
ggaagcttcataagattattggtgg

SEQ ID NO: 3238150 - DNA, 25 bp, Homo sapien
ttgaaagtacaaaacctggcaacca

SEQ ID NO: 3238151 - DNA, 25 bp, Homo sapien
tataatatcaggcaaagctgtcctt

SEQ ID NO: 3238152 - DNA, 25 bp, Homo sapien
tggcaaccaagaatataatatcagg

SEQ ID NO: 3238153 - DNA, 25 bp, Homo sapien
gaggttatgccacctggttgcagca

SEQ ID NO: 3238154 - DNA, 25 bp, Homo sapien
gtgtcatctcaccttcaagcctggg

SEQ ID NO: 3238155 - DNA, 25 bp, Homo sapien
gaacaggagtttctagcgctcatcc

SEQ ID NO: 3238156 - DNA, 25 bp, Homo sapien
caagctgttctaatgtggcactgca

SEQ ID NO: 3238157 - DNA, 25 bp, Homo sapien
attatagtttatttggaaacaatca

SEQ ID NO: 3238158 - DNA, 25 bp, Homo sapien
tatagtttatttggaaacaatcaga

SEQ ID NO: 3238159 - DNA, 25 bp, Homo sapien
agtttatttggaaacaatcagaata

SEQ ID NO: 3238160 - DNA, 25 bp, Homo sapien
tagtttatttggaaacaatcagaat

SEQ ID NO: 3238161 - DNA, 25 bp, Homo sapien
aatgaaataagttgcttgcttgaat

SEQ ID NO: 3238162 - DNA, 25 bp, Homo sapien
gaaatgaaataagttgcttgcttga

SEQ ID NO: 3238163 - DNA, 25 bp, Homo sapien
ggaaatgaaataagttgcttgcttg

SEQ ID NO: 3238164 - DNA, 25 bp, Homo sapien
gaaataagttgcttgcttgaataaa

SEQ ID NO: 3238165 - DNA, 25 bp, Homo sapien
gtcctgaatcatcagggacaatctc

SEQ ID NO: 3238166 - DNA, 25 bp, Homo sapien
tcctgaatcatcagggacaatctcc

SEQ ID NO: 3238167 - DNA, 25 bp, Homo sapien
agggacaatctccacccccgaagct

SEQ ID NO: 3238168 - DNA, 25 bp, Homo sapien
ctgaatcatcagggacaatctccac

SEQ ID NO: 3238169 - DNA, 25 bp, Homo sapien
gatggaaaacctagtacaaagtggc

SEQ ID NO: 3238170 - DNA, 25 bp, Homo sapien
tgaccatgacaatgatagctgtgtc

SEQ ID NO: 3238171 - DNA, 25 bp, Homo sapien
tttatccctgagattagcaaaaatg

SEQ ID NO: 3238172 - DNA, 25 bp, Homo sapien
tattttggagcctatgtaaagtact

SEQ ID NO: 3238173 - DNA, 25 bp, Homo sapien
tggaatgtgcacctcatctggcagt

SEQ ID NO: 3238174 - DNA, 25 bp, Homo sapien
cgttttcatagagttgagtcagaca

SEQ ID NO: 3238175 - DNA, 25 bp, Homo sapien
tgtacatggaagctacatccccacc

SEQ ID NO: 3238176 - DNA, 25 bp, Homo sapien
acctctgaagaaggcgttttcatag

SEQ ID NO: 3238177 - DNA, 25 bp, Homo sapien
tccatgtcattgattgaacttgctg

SEQ ID NO: 3238178 - DNA, 25 bp, Homo sapien
ctccatgtcattgattgaacttgct

SEQ ID NO: 3238179 - DNA, 25 bp, Homo sapien
catgtcattgattgaacttgctgga

SEQ ID NO: 3238180 - DNA, 25 bp, Homo sapien
tgtcattgattgaacttgctggaag

SEQ ID NO: 3238181 - DNA, 25 bp, Homo sapien
gaaactgcacctgttcgatgtactt

SEQ ID NO: 3238182 - DNA, 25 bp, Homo sapien
accacattgcttcaaggaatgtcca

SEQ ID NO: 3238183 - DNA, 25 bp, Homo sapien
cgatgtacttttggcagggttcctg

SEQ ID NO: 3238184 - DNA, 25 bp, Homo sapien
ttgcttcaaggaatgtccagaaact

SEQ ID NO: 3238185 - DNA, 25 bp, Homo sapien
ttgcatccagatcaatcattacaaa

SEQ ID NO: 3238186 - DNA, 25 bp, Homo sapien
tttacgcatgatgaaaccacttcca

SEQ ID NO: 3238187 - DNA, 25 bp, Homo sapien
tgtctgatgacaaattgcatccaga

SEQ ID NO: 3238188 - DNA, 25 bp, Homo sapien
ttcgcattgaatgaaagagcttctc

SEQ ID NO: 3238189 - DNA, 25 bp, Homo sapien
tgtgaaatgtttgcgtggcatatga

SEQ ID NO: 3238190 - DNA, 25 bp, Homo sapien
cctttataaatgtctcgatggcaag

SEQ ID NO: 3238191 - DNA, 25 bp, Homo sapien
gcagcgaatgttactggtgcacctt

SEQ ID NO: 3238192 - DNA, 25 bp, Homo sapien
gactcctctcatatcaactccttta

SEQ ID NO: 3238193 - DNA, 25 bp, Homo sapien
gaaaagaggttactttgctttctgc

SEQ ID NO: 3238194 - DNA, 25 bp, Homo sapien
ctgaatgggaagaaaagaggttact

SEQ ID NO: 3238195 - DNA, 25 bp, Homo sapien
aaaagaggttactttgctttctgca

SEQ ID NO: 3238196 - DNA, 25 bp, Homo sapien
agaaaagaggttactttgctttctg

SEQ ID NO: 3238197 - DNA, 25 bp, Homo sapien
tatagcggtaggtgttcctccggga

SEQ ID NO: 3238198 - DNA, 25 bp, Homo sapien
ctttatagcggtaggtgttcctccg

SEQ ID NO: 3238199 - DNA, 25 bp, Homo sapien
ggcttcagtgagaatccagattcca

SEQ ID NO: 3238200 - DNA, 25 bp, Homo sapien
agggcttcagtgagaatccagattc

SEQ ID NO: 3238201 - DNA, 25 bp, Homo sapien
atccagattccacgttactcagcac

SEQ ID NO: 3238202 - DNA, 25 bp, Homo sapien
gaatccagattccacgttactcagc

SEQ ID NO: 3238203 - DNA, 25 bp, Homo sapien
gtacacagatgagccatccagggtg

SEQ ID NO: 3238204 - DNA, 25 bp, Homo sapien
cacagcacgagcttgcctgttccct

SEQ ID NO: 3238205 - DNA, 25 bp, Homo sapien
aagcaagtacacagatgagccatcc

SEQ ID NO: 3238206 - DNA, 25 bp, Homo sapien
ctgggtaagtgcagcaaatccttcc

SEQ ID NO: 3238207 - DNA, 25 bp, Homo sapien
tgggcccaggcctgcacgtatacat

SEQ ID NO: 3238208 - DNA, 25 bp, Homo sapien
tcttattaatataagaagacaggaa

SEQ ID NO: 3238209 - DNA, 25 bp, Homo sapien
atgtcaggcctctgggcccaggcct

SEQ ID NO: 3238210 - DNA, 25 bp, Homo sapien
ttcttattaatataagaagacagga

SEQ ID NO: 3238211 - DNA, 25 bp, Homo sapien
tgtgaactcacagagagaagatgtt

SEQ ID NO: 3238212 - DNA, 25 bp, Homo sapien
ctgtgaactcacagagagaagatgt

SEQ ID NO: 3238213 - DNA, 25 bp, Homo sapien
gtgaactcacagagagaagatgttc

SEQ ID NO: 3238214 - DNA, 25 bp, Homo sapien
gagaacgcaagatgctggaagatgt

SEQ ID NO: 3238215 - DNA, 25 bp, Homo sapien
gaacgcaagatgctggaagatgttc

SEQ ID NO: 3238216 - DNA, 25 bp, Homo sapien
ctgagaacgcaagatgctggaagat

SEQ ID NO: 3238217 - DNA, 25 bp, Homo sapien
acgcaagatgctggaagatgttcat

SEQ ID NO: 3238218 - DNA, 25 bp, Homo sapien
ggtgcagatggtccgacacacaaaa

SEQ ID NO: 3238219 - DNA, 25 bp, Homo sapien
gcagttggggtgataggtgcagatg

SEQ ID NO: 3238220 - DNA, 25 bp, Homo sapien
aagaggcagttggggtgataggtgc

SEQ ID NO: 3238221 - DNA, 25 bp, Homo sapien
taggtgcagatggtccgacacacaa

SEQ ID NO: 3238222 - DNA, 25 bp, Homo sapien
ttgtgatgcgattttccatgcatac

SEQ ID NO: 3238223 - DNA, 25 bp, Homo sapien
ctttgtgatgcgattttccatgcat

SEQ ID NO: 3238224 - DNA, 25 bp, Homo sapien
cctttgtgatgcgattttccatgca

SEQ ID NO: 3238225 - DNA, 25 bp, Homo sapien
cgcctttgtgatgcgattttccatg

SEQ ID NO: 3238226 - DNA, 25 bp, Homo sapien
taagggctatattgccagcaagtgg

SEQ ID NO: 3238227 - DNA, 25 bp, Homo sapien
gagaagaggcaacaagcttaagggc

SEQ ID NO: 3238228 - DNA, 25 bp, Homo sapien
catggctattgcttccttgattcaa

SEQ ID NO: 3238229 - DNA, 25 bp, Homo sapien
ttatctgagataaagacagtgggcc

SEQ ID NO: 3238230 - DNA, 25 bp, Homo sapien
ttcttttgcaggttaaaaggctata

SEQ ID NO: 3238231 - DNA, 25 bp, Homo sapien
ggctatatccagatatggtgttttc

SEQ ID NO: 3238232 - DNA, 25 bp, Homo sapien
gaggaacttggtgtgccactttcag

SEQ ID NO: 3238233 - DNA, 25 bp, Homo sapien
ggtgtgccactttcagatgttttaa

SEQ ID NO: 3238234 - DNA, 25 bp, Homo sapien
tgaaaaactgacagcgaatcatctt

SEQ ID NO: 3238235 - DNA, 25 bp, Homo sapien
gaaaaactgacagcgaatcatcttt

SEQ ID NO: 3238236 - DNA, 25 bp, Homo sapien
ttgtgcaagtctcttggcaaacatt

SEQ ID NO: 3238237 - DNA, 25 bp, Homo sapien
aaaaactgacagcgaatcatctttg

SEQ ID NO: 3238238 - DNA, 25 bp, Homo sapien
atatgaaatggtcatgtcaactgtc

SEQ ID NO: 3238239 - DNA, 25 bp, Homo sapien
tggtcatgtcaactgtctttgaaaa

SEQ ID NO: 3238240 - DNA, 25 bp, Homo sapien
tgaacagtagaaagagtaagccttc

SEQ ID NO: 3238241 - DNA, 25 bp, Homo sapien
atgaacagtagaaagagtaagcctt

SEQ ID NO: 3238242 - DNA, 25 bp, Homo sapien
tcctagttggagaaccatccataga

SEQ ID NO: 3238243 - DNA, 25 bp, Homo sapien
gagttgtccccagtgttacacaatc

SEQ ID NO: 3238244 - DNA, 25 bp, Homo sapien
gtaaccagagctcccttgtgtccca

SEQ ID NO: 3238245 - DNA, 25 bp, Homo sapien
ttgtgtcccatacgcaatcctagtt

SEQ ID NO: 3238246 - DNA, 25 bp, Homo sapien
cataattccttaagactaagcaaac

SEQ ID NO: 3238247 - DNA, 25 bp, Homo sapien
gacatccctgacaggtccacgaaaa

SEQ ID NO: 3238248 - DNA, 25 bp, Homo sapien
agactaagcaaactatcaacatgac

SEQ ID NO: 3238249 - DNA, 25 bp, Homo sapien
atcaacatgacagacatccctgaca

SEQ ID NO: 3238250 - DNA, 25 bp, Homo sapien
tgaaaagagagcgttgacgctaatg

SEQ ID NO: 3238251 - DNA, 25 bp, Homo sapien
agagcgttgacgctaatggttggaa

SEQ ID NO: 3238252 - DNA, 25 bp, Homo sapien
gaattagaagtgaatcaaagtccct

SEQ ID NO: 3238253 - DNA, 25 bp, Homo sapien
gcgttgacgctaatggttggaatta

SEQ ID NO: 3238254 - DNA, 25 bp, Homo sapien
ccaacaatgcgtgtgcttgtttttg

SEQ ID NO: 3238255 - DNA, 25 bp, Homo sapien
gacccactggtgtcctatgagtgac

SEQ ID NO: 3238256 - DNA, 25 bp, Homo sapien
ggtgtcctatgagtgaccctccaca

SEQ ID NO: 3238257 - DNA, 25 bp, Homo sapien
tccccaagaagagtttgttcctcca

SEQ ID NO: 3238258 - DNA, 25 bp, Homo sapien
aaggtgtatcttttgtaatgtctga

SEQ ID NO: 3238259 - DNA, 25 bp, Homo sapien
tagatgcgccaaacatcctgcaggg

SEQ ID NO: 3238260 - DNA, 25 bp, Homo sapien
ggagcctggagttttatcaaggcga

SEQ ID NO: 3238261 - DNA, 25 bp, Homo sapien
gcgatatcatgattcccttctgaga

SEQ ID NO: 3238262 - DNA, 25 bp, Homo sapien
aggtaggcatattggtttttggaat

SEQ ID NO: 3238263 - DNA, 25 bp, Homo sapien
tggaaggtaggcatattggtttttg

SEQ ID NO: 3238264 - DNA, 25 bp, Homo sapien
ctttggaaggtaggcatattggttt

SEQ ID NO: 3238265 - DNA, 25 bp, Homo sapien
gaaggtaggcatattggtttttgga

SEQ ID NO: 3238266 - DNA, 25 bp, Homo sapien
catccggttacccaacagttggtat

SEQ ID NO: 3238267 - DNA, 25 bp, Homo sapien
ttggtataaattgtgcttgtgtcac

SEQ ID NO: 3238268 - DNA, 25 bp, Homo sapien
tcgagaagccccatccggttaccca

SEQ ID NO: 3238269 - DNA, 25 bp, Homo sapien
gttggtataaattgtgcttgtgtca

SEQ ID NO: 3238270 - DNA, 25 bp, Homo sapien
gaagcaatatttaaagcgtcatgct

SEQ ID NO: 3238271 - DNA, 25 bp, Homo sapien
gcaatatttaaagcgtcatgcttac

SEQ ID NO: 3238272 - DNA, 25 bp, Homo sapien
aagcaatatttaaagcgtcatgctt

SEQ ID NO: 3238273 - DNA, 25 bp, Homo sapien
agcaatatttaaagcgtcatgctta

SEQ ID NO: 3238274 - DNA, 25 bp, Homo sapien
gcacagaccatccgttgggttattt

SEQ ID NO: 3238275 - DNA, 25 bp, Homo sapien
cacagaccatccgttgggttatttt

SEQ ID NO: 3238276 - DNA, 25 bp, Homo sapien
cagaccatccgttgggttattttat

SEQ ID NO: 3238277 - DNA, 25 bp, Homo sapien
ggtgtagacaccaggttgctccctg

SEQ ID NO: 3238278 - DNA, 25 bp, Homo sapien
ccagtccatgtactcagcgactttg

SEQ ID NO: 3238279 - DNA, 25 bp, Homo sapien
actcagcgactttggtgtagacacc

SEQ ID NO: 3238280 - DNA, 25 bp, Homo sapien
tgtttgcaaactaagggaccacctg

SEQ ID NO: 3238281 - DNA, 25 bp, Homo sapien
tcatgctggtgactgcatctgagct

SEQ ID NO: 3238282 - DNA, 25 bp, Homo sapien
ctggtgactgcatctgagcttttcc

SEQ ID NO: 3238283 - DNA, 25 bp, Homo sapien
cactgctctgtgttttctctaaaat

SEQ ID NO: 3238284 - DNA, 25 bp, Homo sapien
gtgactgcatctgagcttttccatc

SEQ ID NO: 3238285 - DNA, 25 bp, Homo sapien
gcgggcttcagccagacattgtcct

SEQ ID NO: 3238286 - DNA, 25 bp, Homo sapien
attgtcagcccctggttacggcgtg

SEQ ID NO: 3238287 - DNA, 25 bp, Homo sapien
ttacggcgtgctgaaagcgggcttc

SEQ ID NO: 3238288 - DNA, 25 bp, Homo sapien
gctcagaatttgacttgaactcagg

SEQ ID NO: 3238289 - DNA, 25 bp, Homo sapien
cgctagctctttgccacacgtgaag

SEQ ID NO: 3238290 - DNA, 25 bp, Homo sapien
agcagtgcaattagagggatcccag

SEQ ID NO: 3238291 - DNA, 25 bp, Homo sapien
gaactgtgctggaacctcaaccact

SEQ ID NO: 3238292 - DNA, 25 bp, Homo sapien
caatagtgggtttcagtggccgacc

SEQ ID NO: 3238293 - DNA, 25 bp, Homo sapien
gaccttgttggcttacttgctgcaa

SEQ ID NO: 3238294 - DNA, 25 bp, Homo sapien
gcttgtgtaggaaatggtcacttca

SEQ ID NO: 3238295 - DNA, 25 bp, Homo sapien
cagtacagcatatttgtgaaagtcg

SEQ ID NO: 3238296 - DNA, 25 bp, Homo sapien
taccttgagagaattgcttgctttc

SEQ ID NO: 3238297 - DNA, 25 bp, Homo sapien
cattaatcgattgtcttggtcacct

SEQ ID NO: 3238298 - DNA, 25 bp, Homo sapien
aacagactgctctaggaaaaacgga

SEQ ID NO: 3238299 - DNA, 25 bp, Homo sapien
gaaaaacggagtcatcagtgagaca

SEQ ID NO: 3238300 - DNA, 25 bp, Homo sapien
tattagcggaacatctctacaaagc

SEQ ID NO: 3238301 - DNA, 25 bp, Homo sapien
taaaatgaaatgtaccacttgatat

SEQ ID NO: 3238302 - DNA, 25 bp, Homo sapien
aatgaaatgtaccacttgatataag

SEQ ID NO: 3238303 - DNA, 25 bp, Homo sapien
aatgtaccacttgatataagaaaat

SEQ ID NO: 3238304 - DNA, 25 bp, Homo sapien
tgaaatgtaccacttgatataagaa

SEQ ID NO: 3238305 - DNA, 25 bp, Homo sapien
gaaacaaagacttcagagtgatcac

SEQ ID NO: 3238306 - DNA, 25 bp, Homo sapien
gggtgtgataacacacatcctcacc

SEQ ID NO: 3238307 - DNA, 25 bp, Homo sapien
taattgcgtctctttatccaaaccc

SEQ ID NO: 3238308 - DNA, 25 bp, Homo sapien
tatatttaataatgcggagtgggcg

SEQ ID NO: 3238309 - DNA, 25 bp, Homo sapien
gatcctcagatggtgattccgccgt

SEQ ID NO: 3238310 - DNA, 25 bp, Homo sapien
tacctggcagtacttggcgcttggt

SEQ ID NO: 3238311 - DNA, 25 bp, Homo sapien
tcttgggtggtaagtgcagactacc

SEQ ID NO: 3238312 - DNA, 25 bp, Homo sapien
caaagcaggtgtccttcaacaactg

SEQ ID NO: 3238313 - DNA, 25 bp, Homo sapien
aaatacatattaatgaataggaatt

SEQ ID NO: 3238314 - DNA, 25 bp, Homo sapien
aaaaatacatattaatgaataggaa

SEQ ID NO: 3238315 - DNA, 25 bp, Homo sapien
aaaatacatattaatgaataggaat

SEQ ID NO: 3238316 - DNA, 25 bp, Homo sapien
aagaatacccagaaatcgctgctgt

SEQ ID NO: 3238317 - DNA, 25 bp, Homo sapien
ggtgtgagcattgcttgaaagaata

SEQ ID NO: 3238318 - DNA, 25 bp, Homo sapien
cttatttggtgtgagcattgcttga

SEQ ID NO: 3238319 - DNA, 25 bp, Homo sapien
gctgctgtcctattcactcttggca

SEQ ID NO: 3238320 - DNA, 25 bp, Homo sapien
tcttgagcactcttggcaactgagc

SEQ ID NO: 3238321 - DNA, 25 bp, Homo sapien
aaactgccttgtggcgtacgtgaaa

SEQ ID NO: 3238322 - DNA, 25 bp, Homo sapien
aaaaagtggcagtggacgtcatccg

SEQ ID NO: 3238323 - DNA, 25 bp, Homo sapien
acgtcatccgtgcatctttcttggc

SEQ ID NO: 3238324 - DNA, 25 bp, Homo sapien
tatggagcaggataagactttttac

SEQ ID NO: 3238325 - DNA, 25 bp, Homo sapien
gaagggcactgacaatcataccaat

SEQ ID NO: 3238326 - DNA, 25 bp, Homo sapien
cattttttagactgggaagggcact

SEQ ID NO: 3238327 - DNA, 25 bp, Homo sapien
gaccactcgaatgtcctgggactca

SEQ ID NO: 3238328 - DNA, 25 bp, Homo sapien
ggtgtccctgtttgggtgtgcttca

SEQ ID NO: 3238329 - DNA, 25 bp, Homo sapien
ttcgttattctggttggtgtccctg

SEQ ID NO: 3238330 - DNA, 25 bp, Homo sapien
gacaccactttatcgagcttcgtta

SEQ ID NO: 3238331 - DNA, 25 bp, Homo sapien
gaaagtgcacaggatttcagtgaaa

SEQ ID NO: 3238332 - DNA, 25 bp, Homo sapien
tgtaatcatcagcatatttaatggt

SEQ ID NO: 3238333 - DNA, 25 bp, Homo sapien
aatcatcagcatatttaatggttga

SEQ ID NO: 3238334 - DNA, 25 bp, Homo sapien
catcagcatatttaatggttgaatt

SEQ ID NO: 3238335 - DNA, 25 bp, Homo sapien
gtaatcatcagcatatttaatggtt

SEQ ID NO: 3238336 - DNA, 25 bp, Homo sapien
atcgggagccatgacactgtcgatg

SEQ ID NO: 3238337 - DNA, 25 bp, Homo sapien
gatgatgagtgcagattcggccaca

SEQ ID NO: 3238338 - DNA, 25 bp, Homo sapien
cacagacaaaagcatcgggagccat

SEQ ID NO: 3238339 - DNA, 25 bp, Homo sapien
gctgtctgcaaacaccgtattaggg

SEQ ID NO: 3238340 - DNA, 25 bp, Homo sapien
cctagatgagccaagggcattgctt

SEQ ID NO: 3238341 - DNA, 25 bp, Homo sapien
tatcagctgtatattggtgacacct

SEQ ID NO: 3238342 - DNA, 25 bp, Homo sapien
taaacttccaatgtcccaaggcttg

SEQ ID NO: 3238343 - DNA, 25 bp, Homo sapien
tctgctgcttgcgaaatcctccaca

SEQ ID NO: 3238344 - DNA, 25 bp, Homo sapien
ttaaattgccaagtttgggcttata

SEQ ID NO: 3238345 - DNA, 25 bp, Homo sapien
atgttcctatcacatactgtattaa

SEQ ID NO: 3238346 - DNA, 25 bp, Homo sapien
gtttgggcttatagaagccatgttc

SEQ ID NO: 3238347 - DNA, 25 bp, Homo sapien
caaatgtgttattcctattctagga

SEQ ID NO: 3238348 - DNA, 25 bp, Homo sapien
gcagctttgtagactgaaaccagaa

SEQ ID NO: 3238349 - DNA, 25 bp, Homo sapien
caatccactctcagatgttttaagg

SEQ ID NO: 3238350 - DNA, 25 bp, Homo sapien
ctttgctctttttaatgcgtgtact

SEQ ID NO: 3238351 - DNA, 25 bp, Homo sapien
taatgcgtgtactgggcaatccact

SEQ ID NO: 3238352 - DNA, 25 bp, Homo sapien
ccttcgttgcaggatgcttgggctg

SEQ ID NO: 3238353 - DNA, 25 bp, Homo sapien
tataggtaaaaaactggcagcggac

SEQ ID NO: 3238354 - DNA, 25 bp, Homo sapien
caggcctcgtgactttttgcagcaa

SEQ ID NO: 3238355 - DNA, 25 bp, Homo sapien
gacggcattggtgcacagtttctgg

SEQ ID NO: 3238356 - DNA, 25 bp, Homo sapien
caaaacggtataaacataatgcacc

SEQ ID NO: 3238357 - DNA, 25 bp, Homo sapien
acaagggtgtctgcataacccttca

SEQ ID NO: 3238358 - DNA, 25 bp, Homo sapien
ggtgtctgcataacccttcatatgg

SEQ ID NO: 3238359 - DNA, 25 bp, Homo sapien
cctcacaggcagacgggacaagggt

SEQ ID NO: 3238360 - DNA, 25 bp, Homo sapien
tatccattttacacaaccttaatgt

SEQ ID NO: 3238361 - DNA, 25 bp, Homo sapien
accttaatgtgtatccagagatgcc

SEQ ID NO: 3238362 - DNA, 25 bp, Homo sapien
tattttagttggagatccgtttgaa

SEQ ID NO: 3238363 - DNA, 25 bp, Homo sapien
gatgcctcctctcccgtgaagtatt

SEQ ID NO: 3238364 - DNA, 25 bp, Homo sapien
gcttctaaaactatcacgaggcagg

SEQ ID NO: 3238365 - DNA, 25 bp, Homo sapien
gattgattcgccttctcggtacagc

SEQ ID NO: 3238366 - DNA, 25 bp, Homo sapien
ttggccactgggatggaaacactgc

SEQ ID NO: 3238367 - DNA, 25 bp, Homo sapien
gtttgcctacaaagcatctctcgtg

SEQ ID NO: 3238368 - DNA, 25 bp, Homo sapien
catccagagattttcatcggagcgc

SEQ ID NO: 3238369 - DNA, 25 bp, Homo sapien
ttgagccatccagagattttcatcg

SEQ ID NO: 3238370 - DNA, 25 bp, Homo sapien
cagagattttcatcggagcgcctct

SEQ ID NO: 3238371 - DNA, 25 bp, Homo sapien
gattttcatcggagcgcctctaagc

SEQ ID NO: 3238372 - DNA, 25 bp, Homo sapien
tgtatgagatacgacgtaattgact

SEQ ID NO: 3238373 - DNA, 25 bp, Homo sapien
gaatgtatgagatacgacgtaattg

SEQ ID NO: 3238374 - DNA, 25 bp, Homo sapien
tgtcttagggaaatttattgtgagg

SEQ ID NO: 3238375 - DNA, 25 bp, Homo sapien
atgagatacgacgtaattgacttgc

SEQ ID NO: 3238376 - DNA, 25 bp, Homo sapien
ctgggcttgattttggtggtacact

SEQ ID NO: 3238377 - DNA, 25 bp, Homo sapien
aacagacgcagttcctccaacgatc

SEQ ID NO: 3238378 - DNA, 25 bp, Homo sapien
cacgaacagacgcagttcctccaac

SEQ ID NO: 3238379 - DNA, 25 bp, Homo sapien
gaacagacgcagttcctccaacgat

SEQ ID NO: 3238380 - DNA, 25 bp, Homo sapien
cgaacagacgcagttcctccaacga

SEQ ID NO: 3238381 - DNA, 25 bp, Homo sapien
aacagtgagcggctgttaatatcca

SEQ ID NO: 3238382 - DNA, 25 bp, Homo sapien
tgagcggctgttaatatccactggt

SEQ ID NO: 3238383 - DNA, 25 bp, Homo sapien
catagaaacagtgagcggctgttaa

SEQ ID NO: 3238384 - DNA, 25 bp, Homo sapien
ccatagaaacagtgagcggctgtta

SEQ ID NO: 3238385 - DNA, 25 bp, Homo sapien
tatactgatcatggattattatttc

SEQ ID NO: 3238386 - DNA, 25 bp, Homo sapien
aatgccactgtagacacgcaaaatc

SEQ ID NO: 3238387 - DNA, 25 bp, Homo sapien
gctttctgccattttatactgatca

SEQ ID NO: 3238388 - DNA, 25 bp, Homo sapien
aaggcaatatcatacccgctttctg

SEQ ID NO: 3238389 - DNA, 25 bp, Homo sapien
cattggagacaactttccggataaa

SEQ ID NO: 3238390 - DNA, 25 bp, Homo sapien
tcaggccgtaagtctagtagtgtta

SEQ ID NO: 3238391 - DNA, 25 bp, Homo sapien
gccgtaagtctagtagtgttaaaca

SEQ ID NO: 3238392 - DNA, 25 bp, Homo sapien
tctagtagtgttaaacattttatcc

SEQ ID NO: 3238393 - DNA, 25 bp, Homo sapien
cgtaagtctagtagtgttaaacatt

SEQ ID NO: 3238394 - DNA, 25 bp, Homo sapien
aggcaggcatatgggtcgttgagaa

SEQ ID NO: 3238395 - DNA, 25 bp, Homo sapien
cccagcaatcagtgtatattacatt

SEQ ID NO: 3238396 - DNA, 25 bp, Homo sapien
ttggaaggcaggcatatgggtcgtt

SEQ ID NO: 3238397 - DNA, 25 bp, Homo sapien
tacatttctatctcctttggaaggc

SEQ ID NO: 3238398 - DNA, 25 bp, Homo sapien
tattaatccgcttcctgcaactgag

SEQ ID NO: 3238399 - DNA, 25 bp, Homo sapien
tgactcgagttgtgcttcagctaca

SEQ ID NO: 3238400 - DNA, 25 bp, Homo sapien
tcagctacatgacttgacagggcag

SEQ ID NO: 3238401 - DNA, 25 bp, Homo sapien
gacagggcagaaaaggttccgctct

SEQ ID NO: 3238402 - DNA, 25 bp, Homo sapien
ttggttcgtttgtagaataaccata

SEQ ID NO: 3238403 - DNA, 25 bp, Homo sapien
tggttcgtttgtagaataaccatac

SEQ ID NO: 3238404 - DNA, 25 bp, Homo sapien
tccttccctgtagccggcacagatc

SEQ ID NO: 3238405 - DNA, 25 bp, Homo sapien
cgttggtcactaagggtatcttggc

SEQ ID NO: 3238406 - DNA, 25 bp, Homo sapien
tatctcttctggcactcttcgttgg

SEQ ID NO: 3238407 - DNA, 25 bp, Homo sapien
ccggcacagatcatcttatgggtta

SEQ ID NO: 3238408 - DNA, 25 bp, Homo sapien
agaaaaggtgcacagatcaactcag

SEQ ID NO: 3238409 - DNA, 25 bp, Homo sapien
ctagaacgaggggagacaagaaaag

SEQ ID NO: 3238410 - DNA, 25 bp, Homo sapien
tcagacgcttcccatcttcagcaca

SEQ ID NO: 3238411 - DNA, 25 bp, Homo sapien
acagatcaactcagacgcttcccat

SEQ ID NO: 3238412 - DNA, 25 bp, Homo sapien
agaatccagtccacgtactcgacca

SEQ ID NO: 3238413 - DNA, 25 bp, Homo sapien
ctcgaccacgttggtgtaaacacct

SEQ ID NO: 3238414 - DNA, 25 bp, Homo sapien
ccagctcgtgatgcctaccagatgc

SEQ ID NO: 3238415 - DNA, 25 bp, Homo sapien
tggccgctccctttgagcacagcct

SEQ ID NO: 3238416 - DNA, 25 bp, Homo sapien
aaatcccagtgcttagaatacaggc

SEQ ID NO: 3238417 - DNA, 25 bp, Homo sapien
tcttggactccatagaagcgtgatc

SEQ ID NO: 3238418 - DNA, 25 bp, Homo sapien
cacataggcagagtgtagattcctg

SEQ ID NO: 3238419 - DNA, 25 bp, Homo sapien
tcctgcaaaatggtgaagactgtct

SEQ ID NO: 3238420 - DNA, 25 bp, Homo sapien
gccaggatatatgtttgctcaccac

SEQ ID NO: 3238421 - DNA, 25 bp, Homo sapien
tatctcatagaatctggtgcagcca

SEQ ID NO: 3238422 - DNA, 25 bp, Homo sapien
gatctggccccgttatgttctactg

SEQ ID NO: 3238423 - DNA, 25 bp, Homo sapien
gaagtgttgcttccagtctactaag

SEQ ID NO: 3238424 - DNA, 25 bp, Homo sapien
tcacaagcgtggcttcgttgccggc

SEQ ID NO: 3238425 - DNA, 25 bp, Homo sapien
tctttagagtgtagggcagtggcca

SEQ ID NO: 3238426 - DNA, 25 bp, Homo sapien
tgtccaagagcaccgctcatgtcag

SEQ ID NO: 3238427 - DNA, 25 bp, Homo sapien
ggtgagaaccgctgtgtccttcaca

SEQ ID NO: 3238428 - DNA, 25 bp, Homo sapien
ccagcgccgtcctggagcatctggt

SEQ ID NO: 3238429 - DNA, 25 bp, Homo sapien
agcaagggcccagcgccgtcctgga

SEQ ID NO: 3238430 - DNA, 25 bp, Homo sapien
tggtggacaggcgaacctgctgtcc

SEQ ID NO: 3238431 - DNA, 25 bp, Homo sapien
tccggggaccagatatttacaagtg

SEQ ID NO: 3238432 - DNA, 25 bp, Homo sapien
ttggctggcagcgaacaccggcccg

SEQ ID NO: 3238433 - DNA, 25 bp, Homo sapien
ggagcgggcttaggtttggctggca

SEQ ID NO: 3238434 - DNA, 25 bp, Homo sapien
ggtttggctggcagcgaacaccggc

SEQ ID NO: 3238435 - DNA, 25 bp, Homo sapien
gcgaggagcgggcttaggtttggct

SEQ ID NO: 3238436 - DNA, 25 bp, Homo sapien
tgctatagggtgctcaggctgagac

SEQ ID NO: 3238437 - DNA, 25 bp, Homo sapien
gggctgactcctaactttgctatag

SEQ ID NO: 3238438 - DNA, 25 bp, Homo sapien
gactggattccagtatcttttggaa

SEQ ID NO: 3238439 - DNA, 25 bp, Homo sapien
tcctaactttgctatagggtgctca

SEQ ID NO: 3238440 - DNA, 25 bp, Homo sapien
tgtcctcacagggtaataactgggt

SEQ ID NO: 3238441 - DNA, 25 bp, Homo sapien
cctcacagggtaataactgggtcat

SEQ ID NO: 3238442 - DNA, 25 bp, Homo sapien
cctgtcctcacagggtaataactgg

SEQ ID NO: 3238443 - DNA, 25 bp, Homo sapien
tcctcacagggtaataactgggtca

SEQ ID NO: 3238444 - DNA, 25 bp, Homo sapien
tccctgcagtaggcacagcacagaa

SEQ ID NO: 3238445 - DNA, 25 bp, Homo sapien
tccaggtcctcaataactccgatga

SEQ ID NO: 3238446 - DNA, 25 bp, Homo sapien
caataactccgatgagagaatccat

SEQ ID NO: 3238447 - DNA, 25 bp, Homo sapien
aatcatttctaaagtgcccagaaac

SEQ ID NO: 3238448 - DNA, 25 bp, Homo sapien
ttccccctgtgaacaggcatgttgt

SEQ ID NO: 3238449 - DNA, 25 bp, Homo sapien
gtgaacaggcatgttgtattatata

SEQ ID NO: 3238450 - DNA, 25 bp, Homo sapien
gtacacataagttatttcctaggat

SEQ ID NO: 3238451 - DNA, 25 bp, Homo sapien
gaagtacacataagttatttcctag

SEQ ID NO: 3238452 - DNA, 25 bp, Homo sapien
tcagccgtatgatcgcgcagtccgt

SEQ ID NO: 3238453 - DNA, 25 bp, Homo sapien
gggttgacttcctatccatttgacg

SEQ ID NO: 3238454 - DNA, 25 bp, Homo sapien
tgatcgcgcagtccgtcactgccgt

SEQ ID NO: 3238455 - DNA, 25 bp, Homo sapien
atgtcatcagccgtatgatcgcgca

SEQ ID NO: 3238456 - DNA, 25 bp, Homo sapien
gagctgcctgcttcggtgtctatga

SEQ ID NO: 3238457 - DNA, 25 bp, Homo sapien
tgtaccaaggctctaacaggtctgt

SEQ ID NO: 3238458 - DNA, 25 bp, Homo sapien
caaggctctaacaggtctgtgcagg

SEQ ID NO: 3238459 - DNA, 25 bp, Homo sapien
ctgtgcagggtattatcatctaccg

SEQ ID NO: 3238460 - DNA, 25 bp, Homo sapien
ccctcttgattttgaccgtacccat

SEQ ID NO: 3238461 - DNA, 25 bp, Homo sapien
gacaagaggatccagttttggcaca

SEQ ID NO: 3238462 - DNA, 25 bp, Homo sapien
cgtacccatctagcagctgatgtgg

SEQ ID NO: 3238463 - DNA, 25 bp, Homo sapien
aacaagcagatcttcccggggggtg

SEQ ID NO: 3238464 - DNA, 25 bp, Homo sapien
gtgcagagtgccagcaagcagatca

SEQ ID NO: 3238465 - DNA, 25 bp, Homo sapien
gcaagcagatcaccgcagataagca

SEQ ID NO: 3238466 - DNA, 25 bp, Homo sapien
cagataagcaatacacgggcgttgt

SEQ ID NO: 3238467 - DNA, 25 bp, Homo sapien
agactgcatggtccgcattcccaag

SEQ ID NO: 3238468 - DNA, 25 bp, Homo sapien
ctgtgtgtatgttaccccaccgaga

SEQ ID NO: 3238469 - DNA, 25 bp, Homo sapien
tgtatgttaccccaccgagagttag

SEQ ID NO: 3238470 - DNA, 25 bp, Homo sapien
tatgttaccccaccgagagttagaa

SEQ ID NO: 3238471 - DNA, 25 bp, Homo sapien
gtgtgtatgttaccccaccgagagt

SEQ ID NO: 3238472 - DNA, 25 bp, Homo sapien
tttccagaatgcaggatcgagaacc

SEQ ID NO: 3238473 - DNA, 25 bp, Homo sapien
ttggcaaattcaacccagaccaggt

SEQ ID NO: 3238474 - DNA, 25 bp, Homo sapien
ggatataatcacctcatagaattga

SEQ ID NO: 3238475 - DNA, 25 bp, Homo sapien
gagatcagagctgtactcagtggat

SEQ ID NO: 3238476 - DNA, 25 bp, Homo sapien
tgagtccagttcctcaacagccacg

SEQ ID NO: 3238477 - DNA, 25 bp, Homo sapien
tgtctgaagtctggcgactcccgca

SEQ ID NO: 3238478 - DNA, 25 bp, Homo sapien
aacagccacgatcgctgctgtctga

SEQ ID NO: 3238479 - DNA, 25 bp, Homo sapien
ttccaagcttgcatgctgccagcat

SEQ ID NO: 3238480 - DNA, 25 bp, Homo sapien
tcttcacagcgatagcacaggcctg

SEQ ID NO: 3238481 - DNA, 25 bp, Homo sapien
gggccttgccacaaacgcttgagct

SEQ ID NO: 3238482 - DNA, 25 bp, Homo sapien
gccagtcatgacgtttctcccagaa

SEQ ID NO: 3238483 - DNA, 25 bp, Homo sapien
tggcttcgcaggcaggtcttcacag

SEQ ID NO: 3238484 - DNA, 25 bp, Homo sapien
ctattctggcaagtcccgggaatgt

SEQ ID NO: 3238485 - DNA, 25 bp, Homo sapien
ctggcaagtcccgggaatgtctcat

SEQ ID NO: 3238486 - DNA, 25 bp, Homo sapien
ggcaagtcccgggaatgtctcatgt

SEQ ID NO: 3238487 - DNA, 25 bp, Homo sapien
attctggcaagtcccgggaatgtct

SEQ ID NO: 3238488 - DNA, 25 bp, Homo sapien
tgaaggagcccattaatcaatgcag

SEQ ID NO: 3238489 - DNA, 25 bp, Homo sapien
cctgtgaaactgtggtgattggcga

SEQ ID NO: 3238490 - DNA, 25 bp, Homo sapien
gatcctccgggtctgagacgtggct

SEQ ID NO: 3238491 - DNA, 25 bp, Homo sapien
gctgtcagaaccagcccctgtgaaa

SEQ ID NO: 3238492 - DNA, 25 bp, Homo sapien
agcatgggcagcatgatgtcggcct

SEQ ID NO: 3238493 - DNA, 25 bp, Homo sapien
caccaggagcatgggcagcatgatg

SEQ ID NO: 3238494 - DNA, 25 bp, Homo sapien
gccaccaggagcatgggcagcatga

SEQ ID NO: 3238495 - DNA, 25 bp, Homo sapien
aggagcatgggcagcatgatgtcgg

SEQ ID NO: 3238496 - DNA, 25 bp, Homo sapien
catgatgtcggcctctgtgccatca

SEQ ID NO: 3238497 - DNA, 25 bp, Homo sapien
tgatgtcggcctctgtgccatcagg

SEQ ID NO: 3238498 - DNA, 25 bp, Homo sapien
atgatgtcggcctctgtgccatcag

SEQ ID NO: 3238499 - DNA, 25 bp, Homo sapien
aaatgcatgcacaggatactagaaa

SEQ ID NO: 3238500 - DNA, 25 bp, Homo sapien
attttgagcaaaactaggagataga

SEQ ID NO: 3238501 - DNA, 25 bp, Homo sapien
taggagatagatgtattccctctag

SEQ ID NO: 3238502 - DNA, 25 bp, Homo sapien
caaaatgcatgcacaggatactaga

SEQ ID NO: 3238503 - DNA, 25 bp, Homo sapien
agtaacaatgtattcagagccctct

SEQ ID NO: 3238504 - DNA, 25 bp, Homo sapien
ggacagcatgttcaagtaagtaaca

SEQ ID NO: 3238505 - DNA, 25 bp, Homo sapien
cttgaaggacagcatgttcaagtaa

SEQ ID NO: 3238506 - DNA, 25 bp, Homo sapien
aagtaagtaacaatgtattcagagc

SEQ ID NO: 3238507 - DNA, 25 bp, Homo sapien
catgtgacggccgtgctgtggaaat

SEQ ID NO: 3238508 - DNA, 25 bp, Homo sapien
atctgtgtaactggagcgctctgca

SEQ ID NO: 3238509 - DNA, 25 bp, Homo sapien
tattcgttccatgtgacggccgtgc

SEQ ID NO: 3238510 - DNA, 25 bp, Homo sapien
tttaactattcgttccatgtgacgg

SEQ ID NO: 3238511 - DNA, 25 bp, Homo sapien
tggcaccgtcagcaacatccttatt

SEQ ID NO: 3238512 - DNA, 25 bp, Homo sapien
ccgtcagcaacatccttatttgtcc

SEQ ID NO: 3238513 - DNA, 25 bp, Homo sapien
ctttggcaccgtcagcaacatcctt

SEQ ID NO: 3238514 - DNA, 25 bp, Homo sapien
gcaccgtcagcaacatccttatttg

SEQ ID NO: 3238515 - DNA, 25 bp, Homo sapien
cgctggtggttggaactgctgtcat

SEQ ID NO: 3238516 - DNA, 25 bp, Homo sapien
caccaaaatcgaaaggctggcccaa

SEQ ID NO: 3238517 - DNA, 25 bp, Homo sapien
gattcgacctaatctaagttcacca

SEQ ID NO: 3238518 - DNA, 25 bp, Homo sapien
ctgtgcattctgacgtgttgaggga

SEQ ID NO: 3238519 - DNA, 25 bp, Homo sapien
cataaggagagtctttggaatgatg

SEQ ID NO: 3238520 - DNA, 25 bp, Homo sapien
ttaaggcaggatccagcacttctgg

SEQ ID NO: 3238521 - DNA, 25 bp, Homo sapien
gaactagtggttccttcatgaaccc

SEQ ID NO: 3238522 - DNA, 25 bp, Homo sapien
aattgttatcatcataaggagagtc

SEQ ID NO: 3238523 - DNA, 25 bp, Homo sapien
ttccctatgtgacattgccttcaga

SEQ ID NO: 3238524 - DNA, 25 bp, Homo sapien
gcctgtctggcttcctcgtgactcg

SEQ ID NO: 3238525 - DNA, 25 bp, Homo sapien
tggatcttcaaggtggaaagcgtcc

SEQ ID NO: 3238526 - DNA, 25 bp, Homo sapien
ggaaagcgtccatgtgcttgtgcct

SEQ ID NO: 3238527 - DNA, 25 bp, Homo sapien
tgcccaggagcgccgtgctggttac

SEQ ID NO: 3238528 - DNA, 25 bp, Homo sapien
actttacagctggtcccgggctgcc

SEQ ID NO: 3238529 - DNA, 25 bp, Homo sapien
cactttacagctggtcccgggctgc

SEQ ID NO: 3238530 - DNA, 25 bp, Homo sapien
cgggctgcccaggagcgccgtgctg

SEQ ID NO: 3238531 - DNA, 25 bp, Homo sapien
gctactaatgacttgcggaccacgg

SEQ ID NO: 3238532 - DNA, 25 bp, Homo sapien
gaggtagtcacaggtttcacaaggt

SEQ ID NO: 3238533 - DNA, 25 bp, Homo sapien
taaatcattgacttccccagtcggg

SEQ ID NO: 3238534 - DNA, 25 bp, Homo sapien
cattccagaagatagacccgtgtgc

SEQ ID NO: 3238535 - DNA, 25 bp, Homo sapien
aatgttagtccatgcgctgccgaag

SEQ ID NO: 3238536 - DNA, 25 bp, Homo sapien
atttggaacacttcaggaattcgcg

SEQ ID NO: 3238537 - DNA, 25 bp, Homo sapien
tgtaccgttccaatgttagtccatg

SEQ ID NO: 3238538 - DNA, 25 bp, Homo sapien
aattcgcgtgccgtcctggcacagg

SEQ ID NO: 3238539 - DNA, 25 bp, Homo sapien
cctggttccccgctgctcgttatta

SEQ ID NO: 3238540 - DNA, 25 bp, Homo sapien
ggttccccgctgctcgttattattc

SEQ ID NO: 3238541 - DNA, 25 bp, Homo sapien
tggttccccgctgctcgttattatt

SEQ ID NO: 3238542 - DNA, 25 bp, Homo sapien
ctggttccccgctgctcgttattat

SEQ ID NO: 3238543 - DNA, 25 bp, Homo sapien
caccataaggcagattcgtaacagc

SEQ ID NO: 3238544 - DNA, 25 bp, Homo sapien
taaggcagattcgtaacagcttcca

SEQ ID NO: 3238545 - DNA, 25 bp, Homo sapien
catttcactgccaacacctcgatct

SEQ ID NO: 3238546 - DNA, 25 bp, Homo sapien
tctctgtcttcctcaccataaggca

SEQ ID NO: 3238547 - DNA, 25 bp, Homo sapien
tcaactgtgcgaaaggttggcttcc

SEQ ID NO: 3238548 - DNA, 25 bp, Homo sapien
gtagttaagtctttggagagtccaa

SEQ ID NO: 3238549 - DNA, 25 bp, Homo sapien
caagggtcagctgcatatgattgta

SEQ ID NO: 3238550 - DNA, 25 bp, Homo sapien
caaaaatgtctatcccatgaggttt

SEQ ID NO: 3238551 - DNA, 25 bp, Homo sapien
tcacatactggagggtgtgtgaatg

SEQ ID NO: 3238552 - DNA, 25 bp, Homo sapien
gcccatagttcttgggccttatcat

SEQ ID NO: 3238553 - DNA, 25 bp, Homo sapien
gaggacatcgatgcctgcccatagt

SEQ ID NO: 3238554 - DNA, 25 bp, Homo sapien
ctgaagtgatgccagaggtgtagca

SEQ ID NO: 3238555 - DNA, 25 bp, Homo sapien
cgaggtggggactgtacatagaacc

SEQ ID NO: 3238556 - DNA, 25 bp, Homo sapien
taggtagcaggcaaggcacaggacc

SEQ ID NO: 3238557 - DNA, 25 bp, Homo sapien
ttggatgttcagtaggtagcaggca

SEQ ID NO: 3238558 - DNA, 25 bp, Homo sapien
tccagagaccgactcagggaattgg

SEQ ID NO: 3238559 - DNA, 25 bp, Homo sapien
gataaacagggtattgggcaatttc

SEQ ID NO: 3238560 - DNA, 25 bp, Homo sapien
aaggataaacagggtattgggcaat

SEQ ID NO: 3238561 - DNA, 25 bp, Homo sapien
aacagggtattgggcaatttcaaat

SEQ ID NO: 3238562 - DNA, 25 bp, Homo sapien
taaacagggtattgggcaatttcaa

SEQ ID NO: 3238563 - DNA, 25 bp, Homo sapien
gaattcaaacagtgcccctgatcgc

SEQ ID NO: 3238564 - DNA, 25 bp, Homo sapien
gcccctgatcgccaacatcatggga

SEQ ID NO: 3238565 - DNA, 25 bp, Homo sapien
ctgatcgccaacatcatgggaaagg

SEQ ID NO: 3238566 - DNA, 25 bp, Homo sapien
aaacagtgcccctgatcgccaacat

SEQ ID NO: 3238567 - DNA, 25 bp, Homo sapien
tgaagggcaacggtgaagagaaacg

SEQ ID NO: 3238568 - DNA, 25 bp, Homo sapien
aagggcaacggtgaagagaaacgct

SEQ ID NO: 3238569 - DNA, 25 bp, Homo sapien
gaagggcaacggtgaagagaaacgc

SEQ ID NO: 3238570 - DNA, 25 bp, Homo sapien
agggcaacggtgaagagaaacgctc

SEQ ID NO: 3238571 - DNA, 25 bp, Homo sapien
tcaccatggccttcttgaaccatag

SEQ ID NO: 3238572 - DNA, 25 bp, Homo sapien
ctctggtcaccatggccttcttgaa

SEQ ID NO: 3238573 - DNA, 25 bp, Homo sapien
tggccttcttgaaccatagctgctg

SEQ ID NO: 3238574 - DNA, 25 bp, Homo sapien
catggccttcttgaaccatagctgc

SEQ ID NO: 3238575 - DNA, 25 bp, Homo sapien
gacagttagtaaggagtgaagccat

SEQ ID NO: 3238576 - DNA, 25 bp, Homo sapien
tgtaagacacggtacatggcgctca

SEQ ID NO: 3238577 - DNA, 25 bp, Homo sapien
cctaagaggaagctgctcattatcc

SEQ ID NO: 3238578 - DNA, 25 bp, Homo sapien
atggcgctcaccacagatagtctca

SEQ ID NO: 3238579 - DNA, 25 bp, Homo sapien
aatagttctttattactggtcttcg

SEQ ID NO: 3238580 - DNA, 25 bp, Homo sapien
gatgcttaagctcaggcacactcag

SEQ ID NO: 3238581 - DNA, 25 bp, Homo sapien
actcagttccttttagtcttcgtga

SEQ ID NO: 3238582 - DNA, 25 bp, Homo sapien
tcttcgtgaacagtactattcaggg

SEQ ID NO: 3238583 - DNA, 25 bp, Homo sapien
aaatattctttctgagtatgtgctg

SEQ ID NO: 3238584 - DNA, 25 bp, Homo sapien
caaatattctttctgagtatgtgct

SEQ ID NO: 3238585 - DNA, 25 bp, Homo sapien
cattcggtgcgtccaacactggaga

SEQ ID NO: 3238586 - DNA, 25 bp, Homo sapien
gagccctggcgtcgaatgcttgtta

SEQ ID NO: 3238587 - DNA, 25 bp, Homo sapien
caaatgactgttcgcaagtgactct

SEQ ID NO: 3238588 - DNA, 25 bp, Homo sapien
aatcattcgctagtccggaggagcc

SEQ ID NO: 3238589 - DNA, 25 bp, Homo sapien
ctttctgaaggtcaacgcggctgct

SEQ ID NO: 3238590 - DNA, 25 bp, Homo sapien
tactgcattgggtcagtagctttct

SEQ ID NO: 3238591 - DNA, 25 bp, Homo sapien
tatacgttctgacagctcttcgtga

SEQ ID NO: 3238592 - DNA, 25 bp, Homo sapien
ttctctttggccgactggcgttccc

SEQ ID NO: 3238593 - DNA, 25 bp, Homo sapien
acaaaggggcctgttcccatggcct

SEQ ID NO: 3238594 - DNA, 25 bp, Homo sapien
caaaggggcctgttcccatggcctc

SEQ ID NO: 3238595 - DNA, 25 bp, Homo sapien
cttcattaccttccatgtgtgacaa

SEQ ID NO: 3238596 - DNA, 25 bp, Homo sapien
tgaacaccgttcagacagcatccct

SEQ ID NO: 3238597 - DNA, 25 bp, Homo sapien
gcattctaacagcttgaacaccgtt

SEQ ID NO: 3238598 - DNA, 25 bp, Homo sapien
ggctcaggatagagctgagaatctg

SEQ ID NO: 3238599 - DNA, 25 bp, Homo sapien
atttcatcatcgaggcggctcagga

SEQ ID NO: 3238600 - DNA, 25 bp, Homo sapien
cctcttgcttgacttgagcctaatg

SEQ ID NO: 3238601 - DNA, 25 bp, Homo sapien
tgacagaaagccatgactgtgctcc

SEQ ID NO: 3238602 - DNA, 25 bp, Homo sapien
taatgaggcacccaagctgacagaa

SEQ ID NO: 3238603 - DNA, 25 bp, Homo sapien
ccttagctcctggacttctctgtga

SEQ ID NO: 3238604 - DNA, 25 bp, Homo sapien
cgtgaggttttcatcggctgtgcca

SEQ ID NO: 3238605 - DNA, 25 bp, Homo sapien
tgtcccaactactgtcatcgtgagg

SEQ ID NO: 3238606 - DNA, 25 bp, Homo sapien
gggaccttctgcatacctgtttaga

SEQ ID NO: 3238607 - DNA, 25 bp, Homo sapien
gcgcctctggacgtgctagccattt

SEQ ID NO: 3238608 - DNA, 25 bp, Homo sapien
cagtaactaagtacacggctgcatg

SEQ ID NO: 3238609 - DNA, 25 bp, Homo sapien
gctgggtcgcccagtgtttgcagca

SEQ ID NO: 3238610 - DNA, 25 bp, Homo sapien
gaattggcatgctttgatacatacc

SEQ ID NO: 3238611 - DNA, 25 bp, Homo sapien
tgcgcattgcatttgaagcacggat

SEQ ID NO: 3238612 - DNA, 25 bp, Homo sapien
tctctgccgtaagatgattagtcgg

SEQ ID NO: 3238613 - DNA, 25 bp, Homo sapien
tacaccccgagtattccaagtgact

SEQ ID NO: 3238614 - DNA, 25 bp, Homo sapien
gtcggaaaaagaagcatcaggctga

SEQ ID NO: 3238615 - DNA, 25 bp, Homo sapien
acccgctacggctttcttgcaaaga

SEQ ID NO: 3238616 - DNA, 25 bp, Homo sapien
ttttggtggccacatccgtcagcag

SEQ ID NO: 3238617 - DNA, 25 bp, Homo sapien
tacaagtttgactgtggaagtggcc

SEQ ID NO: 3238618 - DNA, 25 bp, Homo sapien
caagttcatactgcatcgggcacag

SEQ ID NO: 3238619 - DNA, 25 bp, Homo sapien
gaagtgaatggaaactatgctcgct

SEQ ID NO: 3238620 - DNA, 25 bp, Homo sapien
tgtgatggaaagtgaccccgttgct

SEQ ID NO: 3238621 - DNA, 25 bp, Homo sapien
tcatcgaaccgaaaactggagtggt

SEQ ID NO: 3238622 - DNA, 25 bp, Homo sapien
tacactgaggagaacctgcatacgg

SEQ ID NO: 3238623 - DNA, 25 bp, Homo sapien
aatctcctacagcatcgaagacggg

SEQ ID NO: 3238624 - DNA, 25 bp, Homo sapien
tctcatggtgacatttgggaacagc

SEQ ID NO: 3238625 - DNA, 25 bp, Homo sapien
gagcagttgaatgacagtgcacagt

SEQ ID NO: 3238626 - DNA, 25 bp, Homo sapien
tgcctttgaggacaagagccttgtc

SEQ ID NO: 3238627 - DNA, 25 bp, Homo sapien
gaacaagtgggtgactgagatcgta

SEQ ID NO: 3238628 - DNA, 25 bp, Homo sapien
tcctcatgagtggagagtgtgattt

SEQ ID NO: 3238629 - DNA, 25 bp, Homo sapien
gaaaccttcatgagatggtacaggc

SEQ ID NO: 3238630 - DNA, 25 bp, Homo sapien
tggctctggcatggagcgggaagaa

SEQ ID NO: 3238631 - DNA, 25 bp, Homo sapien
tcagcatgggatggaatcaccggga

SEQ ID NO: 3238632 - DNA, 25 bp, Homo sapien
acaatagctgctgagacggccacag

SEQ ID NO: 3238633 - DNA, 25 bp, Homo sapien
gaagctgcgtgtttgctcgtggcca

SEQ ID NO: 3238634 - DNA, 25 bp, Homo sapien
ccggctgtagtgacgtgtggtctta

SEQ ID NO: 3238635 - DNA, 25 bp, Homo sapien
caccacctgagtaaagacggtgcgg

SEQ ID NO: 3238636 - DNA, 25 bp, Homo sapien
ttattgtggctggaacgaatactga

SEQ ID NO: 3238637 - DNA, 25 bp, Homo sapien
tggctggaacgaatactgaacaaac

SEQ ID NO: 3238638 - DNA, 25 bp, Homo sapien
tgcaataggaaatagctaaagctgc

SEQ ID NO: 3238639 - DNA, 25 bp, Homo sapien
gaacgaatactgaacaaactgcaat

SEQ ID NO: 3238640 - DNA, 25 bp, Homo sapien
ccctgttgaggctcgtgtgtgtaga

SEQ ID NO: 3238641 - DNA, 25 bp, Homo sapien
tgtcccctgttgaggctcgtgtgtg

SEQ ID NO: 3238642 - DNA, 25 bp, Homo sapien
acaggtgccacagccgcttcctctt

SEQ ID NO: 3238643 - DNA, 25 bp, Homo sapien
gtttctgtcccctgttgaggctcgt

SEQ ID NO: 3238644 - DNA, 25 bp, Homo sapien
tgttcctttactgcacaagtggtga

SEQ ID NO: 3238645 - DNA, 25 bp, Homo sapien
gttcctttactgcacaagtggtgac

SEQ ID NO: 3238646 - DNA, 25 bp, Homo sapien
acaggagaggactccgttttgtggc

SEQ ID NO: 3238647 - DNA, 25 bp, Homo sapien
gactccgttttgtggcacacactct

SEQ ID NO: 3238648 - DNA, 25 bp, Homo sapien
ggagaggactccgttttgtggcaca

SEQ ID NO: 3238649 - DNA, 25 bp, Homo sapien
gaggactccgttttgtggcacacac

SEQ ID NO: 3238650 - DNA, 25 bp, Homo sapien
gagaagagtggcaagtgtgcctgct

SEQ ID NO: 3238651 - DNA, 25 bp, Homo sapien
ctccaggggccgcaggtcagcagct

SEQ ID NO: 3238652 - DNA, 25 bp, Homo sapien
ggagaagagtggcaagtgtgcctgc

SEQ ID NO: 3238653 - DNA, 25 bp, Homo sapien
tgctttgtttgatctcagtgtaatg

SEQ ID NO: 3238654 - DNA, 25 bp, Homo sapien
atgctttgtttgatctcagtgtaat

SEQ ID NO: 3238655 - DNA, 25 bp, Homo sapien
gctttgtttgatctcagtgtaatgc

SEQ ID NO: 3238656 - DNA, 25 bp, Homo sapien
tacatgtcgtggttgtcgatgccaa

SEQ ID NO: 3238657 - DNA, 25 bp, Homo sapien
gctgcgtggcgtcttctacatgtcg

SEQ ID NO: 3238658 - DNA, 25 bp, Homo sapien
gatgccaatgataatccacccgagt

SEQ ID NO: 3238659 - DNA, 25 bp, Homo sapien
tcacataccgcagtttagaagcact

SEQ ID NO: 3238660 - DNA, 25 bp, Homo sapien
gacagcatggggagagaacagccaa

SEQ ID NO: 3238661 - DNA, 25 bp, Homo sapien
caaagcagtctgacgtgttggccat

SEQ ID NO: 3238662 - DNA, 25 bp, Homo sapien
agccaaagcagtctgacgtgttggc

SEQ ID NO: 3238663 - DNA, 25 bp, Homo sapien
agcatggggagagaacagccaaagc

SEQ ID NO: 3238664 - DNA, 25 bp, Homo sapien
cagctgtattgtgtcccgtgagaac

SEQ ID NO: 3238665 - DNA, 25 bp, Homo sapien
gatttcagttaggaatgtggtccac

SEQ ID NO: 3238666 - DNA, 25 bp, Homo sapien
ccacaagtccgtcccagctgtattg

SEQ ID NO: 3238667 - DNA, 25 bp, Homo sapien
caagtttgcagagtacattcaggtt

SEQ ID NO: 3238668 - DNA, 25 bp, Homo sapien
aacttgggagtggaagaagtggcca

SEQ ID NO: 3238669 - DNA, 25 bp, Homo sapien
acttgggagtggaagaagtggccat

SEQ ID NO: 3238670 - DNA, 25 bp, Homo sapien
caacttgggagtggaagaagtggcc

SEQ ID NO: 3238671 - DNA, 25 bp, Homo sapien
agaaagagtttttggtccttcattg

SEQ ID NO: 3238672 - DNA, 25 bp, Homo sapien
gaaagagtttttggtccttcattgc

SEQ ID NO: 3238673 - DNA, 25 bp, Homo sapien
gtgactcggtccttcccagttggga

SEQ ID NO: 3238674 - DNA, 25 bp, Homo sapien
tccggcgctgccgaaaacggatgag

SEQ ID NO: 3238675 - DNA, 25 bp, Homo sapien
ctctgggtgtttgcgccctgcagga

SEQ ID NO: 3238676 - DNA, 25 bp, Homo sapien
gctgcccggaggtgcagatgcaacc

SEQ ID NO: 3238677 - DNA, 25 bp, Homo sapien
gtgttaaaatgcctgagtcccacaa

SEQ ID NO: 3238678 - DNA, 25 bp, Homo sapien
tgcctgagtcccacaaactttccga

SEQ ID NO: 3238679 - DNA, 25 bp, Homo sapien
tccgagatcaagtccgccctcttgt

SEQ ID NO: 3238680 - DNA, 25 bp, Homo sapien
cagtcccagggaaatcggatctctt

SEQ ID NO: 3238681 - DNA, 25 bp, Homo sapien
agcgtgtgcgccctacgggttctcg

SEQ ID NO: 3238682 - DNA, 25 bp, Homo sapien
cggcgatgaaagattcgtatgcata

SEQ ID NO: 3238683 - DNA, 25 bp, Homo sapien
cctctggctttgtgcggatcggcga

SEQ ID NO: 3238684 - DNA, 25 bp, Homo sapien
ggtgtgtggctctaagcgagtgcgg

SEQ ID NO: 3238685 - DNA, 25 bp, Homo sapien
gacgttggcactctggttagggaca

SEQ ID NO: 3238686 - DNA, 25 bp, Homo sapien
cctgggcacgtcctgacaaacttgg

SEQ ID NO: 3238687 - DNA, 25 bp, Homo sapien
gctgccgaggactttagagcccagg

SEQ ID NO: 3238688 - DNA, 25 bp, Homo sapien
taagtttgccctggtcggaagcctc

SEQ ID NO: 3238689 - DNA, 25 bp, Homo sapien
agagagaccgcagaggccgggaccc

SEQ ID NO: 3238690 - DNA, 25 bp, Homo sapien
cggccagagagaccgcagaggccgg

SEQ ID NO: 3238691 - DNA, 25 bp, Homo sapien
ctgcggccggccagagagaccgcag

SEQ ID NO: 3238692 - DNA, 25 bp, Homo sapien
ggccggccagagagaccgcagaggc

SEQ ID NO: 3238693 - DNA, 25 bp, Homo sapien
cgcgacgaatttcggctgcagaaga

SEQ ID NO: 3238694 - DNA, 25 bp, Homo sapien
gaagagcatcacctgcagtccgcgg

SEQ ID NO: 3238695 - DNA, 25 bp, Homo sapien
ctgagtgcgaggaacgcccgcgctc

SEQ ID NO: 3238696 - DNA, 25 bp, Homo sapien
tggcaggcgacacatcgcgacgaat

SEQ ID NO: 3238697 - DNA, 25 bp, Homo sapien
ccagaagttggagggccacaaagta

SEQ ID NO: 3238698 - DNA, 25 bp, Homo sapien
cacaaagtacaagtcgtccaggcca

SEQ ID NO: 3238699 - DNA, 25 bp, Homo sapien
aaagtacaagtcgtccaggccagtc

SEQ ID NO: 3238700 - DNA, 25 bp, Homo sapien
gagactgttcatgcttccgcccagc

SEQ ID NO: 3238701 - DNA, 25 bp, Homo sapien
tcagagtacggtcaagacaagagga

SEQ ID NO: 3238702 - DNA, 25 bp, Homo sapien
tcagaaccttataagcttcagagta

SEQ ID NO: 3238703 - DNA, 25 bp, Homo sapien
taaaaatacagctccgtgattttca

SEQ ID NO: 3238704 - DNA, 25 bp, Homo sapien
cacaaagaccacgaagagcataata

SEQ ID NO: 3238705 - DNA, 25 bp, Homo sapien
cccatttctctattactcacgataa

SEQ ID NO: 3238706 - DNA, 25 bp, Homo sapien
tattactcacgataacagctcttct

SEQ ID NO: 3238707 - DNA, 25 bp, Homo sapien
tttctctattactcacgataacagc

SEQ ID NO: 3238708 - DNA, 25 bp, Homo sapien
tctctattactcacgataacagctc

SEQ ID NO: 3238709 - DNA, 25 bp, Homo sapien
aaaaatgaatcagtgcagcatgcca

SEQ ID NO: 3238710 - DNA, 25 bp, Homo sapien
cagcatgccaagataatgatcacag

SEQ ID NO: 3238711 - DNA, 25 bp, Homo sapien
tagcaagtattcatggccactctcc

SEQ ID NO: 3238712 - DNA, 25 bp, Homo sapien
tccagaagcgtctggatcacagtca

SEQ ID NO: 3238713 - DNA, 25 bp, Homo sapien
cacactcgtgtgcttggcatactga

SEQ ID NO: 3238714 - DNA, 25 bp, Homo sapien
tgctcacctggctgcctacatgctg

SEQ ID NO: 3238715 - DNA, 25 bp, Homo sapien
gggccgtaatttgcacctgcacact

SEQ ID NO: 3238716 - DNA, 25 bp, Homo sapien
gtttgtaggtcatcactagagcgca

SEQ ID NO: 3238717 - DNA, 25 bp, Homo sapien
ccattggcccatccctgagattgtg

SEQ ID NO: 3238718 - DNA, 25 bp, Homo sapien
tgagattgtgaaccctacatagaaa

SEQ ID NO: 3238719 - DNA, 25 bp, Homo sapien
ctgaattcctctgtaccattggccc

SEQ ID NO: 3238720 - DNA, 25 bp, Homo sapien
taatatcgaacaggttctcctgcgt

SEQ ID NO: 3238721 - DNA, 25 bp, Homo sapien
agggcctgagtatcaacattcttaa

SEQ ID NO: 3238722 - DNA, 25 bp, Homo sapien
tgctggcctcatgtcctcaacagag

SEQ ID NO: 3238723 - DNA, 25 bp, Homo sapien
tcttcagggccgtaattaacagagt

SEQ ID NO: 3238724 - DNA, 25 bp, Homo sapien
acagagtagggaatttcaattcgaa

SEQ ID NO: 3238725 - DNA, 25 bp, Homo sapien
gatgatgttcctcaagcttacttaa

SEQ ID NO: 3238726 - DNA, 25 bp, Homo sapien
tacttaacttgcacgtggatgcaga

SEQ ID NO: 3238727 - DNA, 25 bp, Homo sapien
tggtaccgaagacgggacacagctg

SEQ ID NO: 3238728 - DNA, 25 bp, Homo sapien
taaattcaactgacgtgaggttgca

SEQ ID NO: 3238729 - DNA, 25 bp, Homo sapien
ttttgcagccccctcctcgatcgat

SEQ ID NO: 3238730 - DNA, 25 bp, Homo sapien
tcgatcgatgcctcaggcacatctg

SEQ ID NO: 3238731 - DNA, 25 bp, Homo sapien
aactacataaaaacaccaacatttg

SEQ ID NO: 3238732 - DNA, 25 bp, Homo sapien
ccctcctcgatcgatgcctcaggca

SEQ ID NO: 3238733 - DNA, 25 bp, Homo sapien
cgagattgcgaggagtaacattcct

SEQ ID NO: 3238734 - DNA, 25 bp, Homo sapien
taggagtcgagttctgctgagaaac

SEQ ID NO: 3238735 - DNA, 25 bp, Homo sapien
cacatgtatagctttcgaaggaccg

SEQ ID NO: 3238736 - DNA, 25 bp, Homo sapien
ccgtaagctggctatgtaattcatt

SEQ ID NO: 3238737 - DNA, 25 bp, Homo sapien
ctgctgttcacagcctttctctgat

SEQ ID NO: 3238738 - DNA, 25 bp, Homo sapien
tgctgttcacagcctttctctgatt

SEQ ID NO: 3238739 - DNA, 25 bp, Homo sapien
cacaaatgatgcggccacagtaaca

SEQ ID NO: 3238740 - DNA, 25 bp, Homo sapien
ccacaaatgatgcggccacagtaac

SEQ ID NO: 3238741 - DNA, 25 bp, Homo sapien
tgtgctccacttcatacacttgcat

SEQ ID NO: 3238742 - DNA, 25 bp, Homo sapien
ttatgccgaaaccaccacagagaac

SEQ ID NO: 3238743 - DNA, 25 bp, Homo sapien
gagttccagtggaccaagctccacg

SEQ ID NO: 3238744 - DNA, 25 bp, Homo sapien
tgaagggcaggttcgcttgagttcc

SEQ ID NO: 3238745 - DNA, 25 bp, Homo sapien
gacttcaagacaccctgctttaaac

SEQ ID NO: 3238746 - DNA, 25 bp, Homo sapien
tttgacttcaagacaccctgcttta

SEQ ID NO: 3238747 - DNA, 25 bp, Homo sapien
acttcaagacaccctgctttaaaca

SEQ ID NO: 3238748 - DNA, 25 bp, Homo sapien
tgacttcaagacaccctgctttaaa

SEQ ID NO: 3238749 - DNA, 25 bp, Homo sapien
ggaattcagaagcacagagcctgga

SEQ ID NO: 3238750 - DNA, 25 bp, Homo sapien
catcgggaggctgcctgatgacaga

SEQ ID NO: 3238751 - DNA, 25 bp, Homo sapien
caaagcgggggcggcaagtaccaat

SEQ ID NO: 3238752 - DNA, 25 bp, Homo sapien
tgacagagagagcatcccatgagct

SEQ ID NO: 3238753 - DNA, 25 bp, Homo sapien
ttgctggttggagccagtcttttaa

SEQ ID NO: 3238754 - DNA, 25 bp, Homo sapien
tgctggttggagccagtcttttaaa

SEQ ID NO: 3238755 - DNA, 25 bp, Homo sapien
ccgattccgtaaacactcccaacag

SEQ ID NO: 3238756 - DNA, 25 bp, Homo sapien
ggcacccgcttcacaggccctgctc

SEQ ID NO: 3238757 - DNA, 25 bp, Homo sapien
attccgtaaacactcccaacagctt

SEQ ID NO: 3238758 - DNA, 25 bp, Homo sapien
ccttctccacggcacccgcttcaca

SEQ ID NO: 3238759 - DNA, 25 bp, Homo sapien
ggtggtggtaattcaatatcggaca

SEQ ID NO: 3238760 - DNA, 25 bp, Homo sapien
tttgacggaatggtggagcattgtc

SEQ ID NO: 3238761 - DNA, 25 bp, Homo sapien
gaagccaagatgtaggcttggagct

SEQ ID NO: 3238762 - DNA, 25 bp, Homo sapien
tatcggacatattgtgtttgacgga

SEQ ID NO: 3238763 - DNA, 25 bp, Homo sapien
catctccccagttagacatacttga

SEQ ID NO: 3238764 - DNA, 25 bp, Homo sapien
gccttgacagctgacatcttagagg

SEQ ID NO: 3238765 - DNA, 25 bp, Homo sapien
ccagttgggccttgacagctgacat

SEQ ID NO: 3238766 - DNA, 25 bp, Homo sapien
ctccccagttagacatacttgaatg

SEQ ID NO: 3238767 - DNA, 25 bp, Homo sapien
tgctgctccggcatggaagggcttc

SEQ ID NO: 3238768 - DNA, 25 bp, Homo sapien
tagtaggctatgctgtaaccctccc

SEQ ID NO: 3238769 - DNA, 25 bp, Homo sapien
cctgacttgccgacagcagtggtgc

SEQ ID NO: 3238770 - DNA, 25 bp, Homo sapien
tcactgagagtaactgtgctgctcc

SEQ ID NO: 3238771 - DNA, 25 bp, Homo sapien
aggacagggttgataaactcccact

SEQ ID NO: 3238772 - DNA, 25 bp, Homo sapien
caggaaagttagagacatgaagaag

SEQ ID NO: 3238773 - DNA, 25 bp, Homo sapien
ctcccactcaggaaagttagagaca

SEQ ID NO: 3238774 - DNA, 25 bp, Homo sapien
tcccggaacaagtagtgagttgtaa

SEQ ID NO: 3238775 - DNA, 25 bp, Homo sapien
ggatgcttgaaatccaccgaaaggg

SEQ ID NO: 3238776 - DNA, 25 bp, Homo sapien
gggacagccacgtgcttcccctcag

SEQ ID NO: 3238777 - DNA, 25 bp, Homo sapien
agcctgagttgggtgtggacctcaa

SEQ ID NO: 3238778 - DNA, 25 bp, Homo sapien
ctgcacctgcgccagggatgcttga

SEQ ID NO: 3238779 - DNA, 25 bp, Homo sapien
gaggctaactcatgtgcaagtcacc

SEQ ID NO: 3238780 - DNA, 25 bp, Homo sapien
aaataactatgtggaggaagtcacc

SEQ ID NO: 3238781 - DNA, 25 bp, Homo sapien
tcgtccaggacttaatgaggctaac

SEQ ID NO: 3238782 - DNA, 25 bp, Homo sapien
ggcagtaagttcacttgaatccagg

SEQ ID NO: 3238783 - DNA, 25 bp, Homo sapien
tgcaacaatacctccattgataact

SEQ ID NO: 3238784 - DNA, 25 bp, Homo sapien
taactggcttaaatgccttcacagt

SEQ ID NO: 3238785 - DNA, 25 bp, Homo sapien
ttgcaacaatacctccattgataac

SEQ ID NO: 3238786 - DNA, 25 bp, Homo sapien
ctgagcacctaaaactagtaatatg

SEQ ID NO: 3238787 - DNA, 25 bp, Homo sapien
gagcacctaaaactagtaatatgaa

SEQ ID NO: 3238788 - DNA, 25 bp, Homo sapien
tgagcacctaaaactagtaatatga

SEQ ID NO: 3238789 - DNA, 25 bp, Homo sapien
catgcctggaattgttggtgccatg

SEQ ID NO: 3238790 - DNA, 25 bp, Homo sapien
gagacttcttggtagcatgcctgga

SEQ ID NO: 3238791 - DNA, 25 bp, Homo sapien
ttctttgctgaaagcagatgttctc

SEQ ID NO: 3238792 - DNA, 25 bp, Homo sapien
cctggaattgttggtgccatgacac

SEQ ID NO: 3238793 - DNA, 25 bp, Homo sapien
gagaagcagggccatgcggaatcca

SEQ ID NO: 3238794 - DNA, 25 bp, Homo sapien
agaagcagggccatgcggaatccac

SEQ ID NO: 3238795 - DNA, 25 bp, Homo sapien
gggtgtccaagggcacgtgcagcca

SEQ ID NO: 3238796 - DNA, 25 bp, Homo sapien
tgtccaagggcacgtgcagccaagg

SEQ ID NO: 3238797 - DNA, 25 bp, Homo sapien
tggcagctggggagtatagatacac

SEQ ID NO: 3238798 - DNA, 25 bp, Homo sapien
atcgggttctgccagcccaacagac

SEQ ID NO: 3238799 - DNA, 25 bp, Homo sapien
tagatacacaatcgggttctgccag

SEQ ID NO: 3238800 - DNA, 25 bp, Homo sapien
ggagtatagatacacaatcgggttc

SEQ ID NO: 3238801 - DNA, 25 bp, Homo sapien
cttttcctaagaggactaaagctat

SEQ ID NO: 3238802 - DNA, 25 bp, Homo sapien
cctaagaggactaaagctatttctg

SEQ ID NO: 3238803 - DNA, 25 bp, Homo sapien
ctgtgagaagctcagcactgaataa

SEQ ID NO: 3238804 - DNA, 25 bp, Homo sapien
ttcaattcttttcctaagaggacta

SEQ ID NO: 3238805 - DNA, 25 bp, Homo sapien
gaagaggctgagtgtaagtggactt

SEQ ID NO: 3238806 - DNA, 25 bp, Homo sapien
ccaggggacgatgcccacactggag

SEQ ID NO: 3238807 - DNA, 25 bp, Homo sapien
ggagaaccaggggacgatgcccaca

SEQ ID NO: 3238808 - DNA, 25 bp, Homo sapien
ggctgagtgtaagtggacttgagga

SEQ ID NO: 3238809 - DNA, 25 bp, Homo sapien
agaagccaccagctgataccagagc

SEQ ID NO: 3238810 - DNA, 25 bp, Homo sapien
ccagctgataccagagcggcaaagg

SEQ ID NO: 3238811 - DNA, 25 bp, Homo sapien
tctctattctctgcatggccacgga

SEQ ID NO: 3238812 - DNA, 25 bp, Homo sapien
tgtgcacatcagtttcaagttctgt

SEQ ID NO: 3238813 - DNA, 25 bp, Homo sapien
gacctcgggcaggttagctgacctt

SEQ ID NO: 3238814 - DNA, 25 bp, Homo sapien
gcgtaacgcgtgtgctaagaacact

SEQ ID NO: 3238815 - DNA, 25 bp, Homo sapien
cagtcatgacgaagaaatatagcga

SEQ ID NO: 3238816 - DNA, 25 bp, Homo sapien
cagtcactagctagagacctcgggc

SEQ ID NO: 3238817 - DNA, 25 bp, Homo sapien
ctggagttcaggctgcaaacaaagc

SEQ ID NO: 3238818 - DNA, 25 bp, Homo sapien
caaaaacagtggcaacagtacgatt

SEQ ID NO: 3238819 - DNA, 25 bp, Homo sapien
tacgattgacgtgatggaccctgga

SEQ ID NO: 3238820 - DNA, 25 bp, Homo sapien
gagttttgctgagcaaagcgggtaa

SEQ ID NO: 3238821 - DNA, 25 bp, Homo sapien
cagcagcagcactggtgcacgggtg

SEQ ID NO: 3238822 - DNA, 25 bp, Homo sapien
gcagcagcactggtgcacgggtggg

SEQ ID NO: 3238823 - DNA, 25 bp, Homo sapien
actggtgcacgggtggggaaatcgg

SEQ ID NO: 3238824 - DNA, 25 bp, Homo sapien
cagcactggtgcacgggtggggaaa

SEQ ID NO: 3238825 - DNA, 25 bp, Homo sapien
gaggaactcgacattaaagtttgaa

SEQ ID NO: 3238826 - DNA, 25 bp, Homo sapien
tacactggaaaaccgagcagattcg

SEQ ID NO: 3238827 - DNA, 25 bp, Homo sapien
gtcagagtcaccaagaagaggaact

SEQ ID NO: 3238828 - DNA, 25 bp, Homo sapien
caagctagaccagaggtcagagtca

SEQ ID NO: 3238829 - DNA, 25 bp, Homo sapien
gagacaggagtttccttctgtattt

SEQ ID NO: 3238830 - DNA, 25 bp, Homo sapien
cttgagacaggagtttccttctgta

SEQ ID NO: 3238831 - DNA, 25 bp, Homo sapien
tgagacaggagtttccttctgtatt

SEQ ID NO: 3238832 - DNA, 25 bp, Homo sapien
ttgagacaggagtttccttctgtat

SEQ ID NO: 3238833 - DNA, 25 bp, Homo sapien
tattggctctgatgataaacagccg

SEQ ID NO: 3238834 - DNA, 25 bp, Homo sapien
cgtcccagtgatgattctgggcctc

SEQ ID NO: 3238835 - DNA, 25 bp, Homo sapien
ggcctccacattgagtacgttcaat

SEQ ID NO: 3238836 - DNA, 25 bp, Homo sapien
gataaacagccgtcccagtgatgat

SEQ ID NO: 3238837 - DNA, 25 bp, Homo sapien
aattctctggaacttgcaatagctg

SEQ ID NO: 3238838 - DNA, 25 bp, Homo sapien
tcacacctataggataaggtcctgg

SEQ ID NO: 3238839 - DNA, 25 bp, Homo sapien
tgcatttgggcaagctgtgtattcc

SEQ ID NO: 3238840 - DNA, 25 bp, Homo sapien
gaatcatcattactctggttccttg

SEQ ID NO: 3238841 - DNA, 25 bp, Homo sapien
gatttgcaggcctagactttgcttt

SEQ ID NO: 3238842 - DNA, 25 bp, Homo sapien
cagtgatttgcaggcctagactttg

SEQ ID NO: 3238843 - DNA, 25 bp, Homo sapien
gtggcagtgatttgcaggcctagac

SEQ ID NO: 3238844 - DNA, 25 bp, Homo sapien
ggcctagactttgctttgttggcag

SEQ ID NO: 3238845 - DNA, 25 bp, Homo sapien
tgtcattttttcatgctccttggga

SEQ ID NO: 3238846 - DNA, 25 bp, Homo sapien
ttttttcatgctccttgggaatatt

SEQ ID NO: 3238847 - DNA, 25 bp, Homo sapien
ttatgcagctgtcattttttcatgc

SEQ ID NO: 3238848 - DNA, 25 bp, Homo sapien
tgcagctgtcattttttcatgctcc

SEQ ID NO: 3238849 - DNA, 25 bp, Homo sapien
agcactgatagtttcggccgggcgc

SEQ ID NO: 3238850 - DNA, 25 bp, Homo sapien
gaaattcaaactactggagatctgg

SEQ ID NO: 3238851 - DNA, 25 bp, Homo sapien
ctgtgggaacgagcctaaggatact

SEQ ID NO: 3238852 - DNA, 25 bp, Homo sapien
tcacagccggtctccaagggtagct

SEQ ID NO: 3238853 - DNA, 25 bp, Homo sapien
ggcgacaacataaaacaataggaac

SEQ ID NO: 3238854 - DNA, 25 bp, Homo sapien
ttagtgtatggtactggcgacaaca

SEQ ID NO: 3238855 - DNA, 25 bp, Homo sapien
tagaagttctagattacaacatagg

SEQ ID NO: 3238856 - DNA, 25 bp, Homo sapien
aatttgccacaagctcaggaataga

SEQ ID NO: 3238857 - DNA, 25 bp, Homo sapien
ttcataaacatctggattaagcttc

SEQ ID NO: 3238858 - DNA, 25 bp, Homo sapien
tgcatttgtaggaagtgccatgcta

SEQ ID NO: 3238859 - DNA, 25 bp, Homo sapien
gaacaatttgcaatagaggccccag

SEQ ID NO: 3238860 - DNA, 25 bp, Homo sapien
aagtgccatgctagcttcataaaca

SEQ ID NO: 3238861 - DNA, 25 bp, Homo sapien
tccagcactgacaccttaatctctt

SEQ ID NO: 3238862 - DNA, 25 bp, Homo sapien
tccagccagggcttgataccaggac

SEQ ID NO: 3238863 - DNA, 25 bp, Homo sapien
acaaattgcccaatagcctcttctg

SEQ ID NO: 3238864 - DNA, 25 bp, Homo sapien
ggtgtgcggtagaaccaggcaaaca

SEQ ID NO: 3238865 - DNA, 25 bp, Homo sapien
ctttccagcagtgtagggtttcgaa

SEQ ID NO: 3238866 - DNA, 25 bp, Homo sapien
gaatggctgaacaccaacagttcac

SEQ ID NO: 3238867 - DNA, 25 bp, Homo sapien
tccagcagtgtagggtttcgaatgg

SEQ ID NO: 3238868 - DNA, 25 bp, Homo sapien
atggcatctgaatggctgaacacca

SEQ ID NO: 3238869 - DNA, 25 bp, Homo sapien
tcatcattggcaagattaagattct

SEQ ID NO: 3238870 - DNA, 25 bp, Homo sapien
tataagggctaaaaattggaacaga

SEQ ID NO: 3238871 - DNA, 25 bp, Homo sapien
gagctctaccatgctttataaacaa

SEQ ID NO: 3238872 - DNA, 25 bp, Homo sapien
tatgacatacagctattcccagaca

SEQ ID NO: 3238873 - DNA, 25 bp, Homo sapien
aaagacccagtacaatgtctgtaca

SEQ ID NO: 3238874 - DNA, 25 bp, Homo sapien
aagacccagtacaatgtctgtacat

SEQ ID NO: 3238875 - DNA, 25 bp, Homo sapien
tctttctcgctgttcccgcaggatc

SEQ ID NO: 3238876 - DNA, 25 bp, Homo sapien
tttgcacggcctgcatagctacgtc

SEQ ID NO: 3238877 - DNA, 25 bp, Homo sapien
gttcccgcaggatcccctgcggcat

SEQ ID NO: 3238878 - DNA, 25 bp, Homo sapien
tcttttgtaactgcgagcccctctc

SEQ ID NO: 3238879 - DNA, 25 bp, Homo sapien
taacgcaacgtcatggaggagtccc

SEQ ID NO: 3238880 - DNA, 25 bp, Homo sapien
gtttcctagactcgcaaagccgtaa

SEQ ID NO: 3238881 - DNA, 25 bp, Homo sapien
tagactgcgttgatggccgctgtgt

SEQ ID NO: 3238882 - DNA, 25 bp, Homo sapien
tttcctttactgagagcctgtttcc

SEQ ID NO: 3238883 - DNA, 25 bp, Homo sapien
gccagatgcctcatttgttatttta

SEQ ID NO: 3238884 - DNA, 25 bp, Homo sapien
agtataaatcaaacgaaaacttctg

SEQ ID NO: 3238885 - DNA, 25 bp, Homo sapien
ttctccactaggaaactgagtcgct

SEQ ID NO: 3238886 - DNA, 25 bp, Homo sapien
tattttctaaaacgtccatgttatc

SEQ ID NO: 3238887 - DNA, 25 bp, Homo sapien
ttttctgcccgctccttgaggaatg

SEQ ID NO: 3238888 - DNA, 25 bp, Homo sapien
cccagctctgttttagacttttgtg

SEQ ID NO: 3238889 - DNA, 25 bp, Homo sapien
tgtgctgcaccatttgactctttct

SEQ ID NO: 3238890 - DNA, 25 bp, Homo sapien
cttttgtgttccacattccacttgc

SEQ ID NO: 3238891 - DNA, 25 bp, Homo sapien
gccttgaaacgtcttaatccacctc

SEQ ID NO: 3238892 - DNA, 25 bp, Homo sapien
gcctggcacgccttgtgccagagtc

SEQ ID NO: 3238893 - DNA, 25 bp, Homo sapien
tagagcctggcacgccttgtgccag

SEQ ID NO: 3238894 - DNA, 25 bp, Homo sapien
agcatggccttgaaacgtcttaatc

SEQ ID NO: 3238895 - DNA, 25 bp, Homo sapien
cagctgctggtatactcagtgactt

SEQ ID NO: 3238896 - DNA, 25 bp, Homo sapien
tggctggtggttttcaaaagcggac

SEQ ID NO: 3238897 - DNA, 25 bp, Homo sapien
gagccgaatcaccacacaagttcac

SEQ ID NO: 3238898 - DNA, 25 bp, Homo sapien
gacatttgtccctcagggccagagc

SEQ ID NO: 3238899 - DNA, 25 bp, Homo sapien
agaggtcttcctgcaatcggctcca

SEQ ID NO: 3238900 - DNA, 25 bp, Homo sapien
aatggtggcgtccagggttcctcct

SEQ ID NO: 3238901 - DNA, 25 bp, Homo sapien
ttccatgtgaaatggtggcgtccag

SEQ ID NO: 3238902 - DNA, 25 bp, Homo sapien
tgaaatggtggcgtccagggttcct

SEQ ID NO: 3238903 - DNA, 25 bp, Homo sapien
ctcctcagcactcgcatgtcgcctg

SEQ ID NO: 3238904 - DNA, 25 bp, Homo sapien
cctcttcatgtgaaatggtggcgtc

SEQ ID NO: 3238905 - DNA, 25 bp, Homo sapien
tgcctcttcatgtgaaatggtggcg

SEQ ID NO: 3238906 - DNA, 25 bp, Homo sapien
cttcatgtgaaatggtggcgtccgg

SEQ ID NO: 3238907 - DNA, 25 bp, Homo sapien
cctgcctcttcatgtgaaatggtgg

SEQ ID NO: 3238908 - DNA, 25 bp, Homo sapien
tgcctcttcatgtgaaatggtggcg

SEQ ID NO: 3238909 - DNA, 25 bp, Homo sapien
cctgcctcttcatgtgaaatggtgg

SEQ ID NO: 3238910 - DNA, 25 bp, Homo sapien
cttcatgtgaaatggtggcgtccgg

SEQ ID NO: 3238911 - DNA, 25 bp, Homo sapien
cctcttcatgtgaaatggtggcgtc

SEQ ID NO: 3238912 - DNA, 25 bp, Homo sapien
atgtgaaatcttggcgtccaggatt

SEQ ID NO: 3238913 - DNA, 25 bp, Homo sapien
catgtgaaatcttggcgtccaggat

SEQ ID NO: 3238914 - DNA, 25 bp, Homo sapien
tgcctcttcatgtgaaatggtggcg

SEQ ID NO: 3238915 - DNA, 25 bp, Homo sapien
ctgcctcttcatgtgaaatggtggc

SEQ ID NO: 3238916 - DNA, 25 bp, Homo sapien
cttcatgtgaaatggtggcgtccgg

SEQ ID NO: 3238917 - DNA, 25 bp, Homo sapien
catgtgaaatggtggcgtccggggt

SEQ ID NO: 3238918 - DNA, 25 bp, Homo sapien
catgtgaaatggtggcgtccggggt

SEQ ID NO: 3238919 - DNA, 25 bp, Homo sapien
tgcctcttcatgtgaaatggtggcg

SEQ ID NO: 3238920 - DNA, 25 bp, Homo sapien
cttcatgtgaaatggtggcgtccgg

SEQ ID NO: 3238921 - DNA, 25 bp, Homo sapien
cctgcctcttcatgtgaaatggtgg

SEQ ID NO: 3238922 - DNA, 25 bp, Homo sapien
cctcttcatgtgaaatggtggcgtc

SEQ ID NO: 3238923 - DNA, 25 bp, Homo sapien
tgcctcttcatgtgaaatggtggcg

SEQ ID NO: 3238924 - DNA, 25 bp, Homo sapien
cttcatgtgaaatggtggcgtccgg

SEQ ID NO: 3238925 - DNA, 25 bp, Homo sapien
cctgcctcttcatgtgaaatggtgg

SEQ ID NO: 3238926 - DNA, 25 bp, Homo sapien
cctcttcatgtgaaatggtggcgtc

SEQ ID NO: 3238927 - DNA, 25 bp, Homo sapien
aatagtggcgtccagggttcctcct

SEQ ID NO: 3238928 - DNA, 25 bp, Homo sapien
gaaatagtggcgtccagggttcctc

SEQ ID NO: 3238929 - DNA, 25 bp, Homo sapien
gtgaaatagtggcgtccagggttcc

SEQ ID NO: 3238930 - DNA, 25 bp, Homo sapien
tagtggcgtccagggttcctcctca

SEQ ID NO: 3238931 - DNA, 25 bp, Homo sapien
cctgcctcttcatgtgaaatggtgg

SEQ ID NO: 3238932 - DNA, 25 bp, Homo sapien
catgtgaaatggtggcgtccggggt

SEQ ID NO: 3238933 - DNA, 25 bp, Homo sapien
ctgcctcttcatgtgaaatggtggc

SEQ ID NO: 3238934 - DNA, 25 bp, Homo sapien
tgtgaaatggtggcgtccggggttc

SEQ ID NO: 3238935 - DNA, 25 bp, Homo sapien
atgtgaaatggtggcgtccggggtt

SEQ ID NO: 3238936 - DNA, 25 bp, Homo sapien
catgtgaaatggtggcgtccggggt

SEQ ID NO: 3238937 - DNA, 25 bp, Homo sapien
tgtgaaatggtggcgtccggggttc

SEQ ID NO: 3238938 - DNA, 25 bp, Homo sapien
tcttcatgtgaaatggtggcgtccg

SEQ ID NO: 3238939 - DNA, 25 bp, Homo sapien
cttcatgtgaaatggtggcgtccgg

SEQ ID NO: 3238940 - DNA, 25 bp, Homo sapien
ctgcctgcctctgcctcccagagtg

SEQ ID NO: 3238941 - DNA, 25 bp, Homo sapien
tttttagcagcgatggggtttcgct

SEQ ID NO: 3238942 - DNA, 25 bp, Homo sapien
tgcctgcctctgcctcccagagtgc

SEQ ID NO: 3238943 - DNA, 25 bp, Homo sapien
ttttagcagcgatggggtttcgcta

SEQ ID NO: 3238944 - DNA, 25 bp, Homo sapien
tacatagccctatgtagagagacca

SEQ ID NO: 3238945 - DNA, 25 bp, Homo sapien
tattactcaaccttcgaaaacaaca

SEQ ID NO: 3238946 - DNA, 25 bp, Homo sapien
gaattaaacaatagatacatagccc

SEQ ID NO: 3238947 - DNA, 25 bp, Homo sapien
caataaaagattgtccattgacaga

SEQ ID NO: 3238948 - DNA, 25 bp, Homo sapien
aatgagaaataatcctaatgagaag

SEQ ID NO: 3238949 - DNA, 25 bp, Homo sapien
caagagttcaaagtggctagattca

SEQ ID NO: 3238950 - DNA, 25 bp, Homo sapien
taaccatctactaaccatctaacca

SEQ ID NO: 3238951 - DNA, 25 bp, Homo sapien
ccatcaattagaatgaaatagagaa

SEQ ID NO: 3238952 - DNA, 25 bp, Homo sapien
aatgttgtacagtcaccatatgatg

SEQ ID NO: 3238953 - DNA, 25 bp, Homo sapien
tgtacagtcaccatatgatgatagg

SEQ ID NO: 3238954 - DNA, 25 bp, Homo sapien
cagtcaccatatgatgataggattt

SEQ ID NO: 3238955 - DNA, 25 bp, Homo sapien
tgttgctttaatgttgtacagtcac

SEQ ID NO: 3238956 - DNA, 25 bp, Homo sapien
acaggtggtgaaagacctggagaac

SEQ ID NO: 3238957 - DNA, 25 bp, Homo sapien
caggtggtgaaagacctggagaact

SEQ ID NO: 3238958 - DNA, 25 bp, Homo sapien
gagaactgagtttagttgaaaagat

SEQ ID NO: 3238959 - DNA, 25 bp, Homo sapien
gttgaaaagatactcacaagtctca

SEQ ID NO: 3238960 - DNA, 25 bp, Homo sapien
tcagtctgctgagagccatacccaa

SEQ ID NO: 3238961 - DNA, 25 bp, Homo sapien
tgctggccctcgtgggtcagtctgc

SEQ ID NO: 3238962 - DNA, 25 bp, Homo sapien
gaggctggtccagatgaaccgtacc

SEQ ID NO: 3238963 - DNA, 25 bp, Homo sapien
aaaatcagcgaattaaatccagcag

SEQ ID NO: 3238964 - DNA, 25 bp, Homo sapien
atattagtactgtctaccttgttca

SEQ ID NO: 3238965 - DNA, 25 bp, Homo sapien
tattagtactgtctaccttgttcat

SEQ ID NO: 3238966 - DNA, 25 bp, Homo sapien
gacatattagtactgtctaccttgt

SEQ ID NO: 3238967 - DNA, 25 bp, Homo sapien
catattagtactgtctaccttgttc

SEQ ID NO: 3238968 - DNA, 25 bp, Homo sapien
tctgtggcaaaataagctgggagca

SEQ ID NO: 3238969 - DNA, 25 bp, Homo sapien
gggagcaaccgggaaatgcacactg

SEQ ID NO: 3238970 - DNA, 25 bp, Homo sapien
ttttgtgtaaattcctgtccacagg

SEQ ID NO: 3238971 - DNA, 25 bp, Homo sapien
gaagtctggtctctgtaggtctgtg

SEQ ID NO: 3238972 - DNA, 25 bp, Homo sapien
tttgggtgtcgctgttagcatgatc

SEQ ID NO: 3238973 - DNA, 25 bp, Homo sapien
tctggcctgagttgccgcctggaga

SEQ ID NO: 3238974 - DNA, 25 bp, Homo sapien
gatttggagataagtagatttgggt

SEQ ID NO: 3238975 - DNA, 25 bp, Homo sapien
ctgagttgccgcctggagatttgga

SEQ ID NO: 3238976 - DNA, 25 bp, Homo sapien
tgtgtatttctagtcaaacctggta

SEQ ID NO: 3238977 - DNA, 25 bp, Homo sapien
gaagtctatagccatcgggctgaga

SEQ ID NO: 3238978 - DNA, 25 bp, Homo sapien
ctctctgtgcctatggttggaacgt

SEQ ID NO: 3238979 - DNA, 25 bp, Homo sapien
gtaagccgatgtcagagcccaagag

SEQ ID NO: 3238980 - DNA, 25 bp, Homo sapien
gatggagattcagccagtgccaaga

SEQ ID NO: 3238981 - DNA, 25 bp, Homo sapien
ggatatacacctagatattgatagc

SEQ ID NO: 3238982 - DNA, 25 bp, Homo sapien
aatgagttagtagggaattccaagc

SEQ ID NO: 3238983 - DNA, 25 bp, Homo sapien
caacaacacgtcttctcatggaaag

SEQ ID NO: 3238984 - DNA, 25 bp, Homo sapien
agaaaactggatttacctcaatcac

SEQ ID NO: 3238985 - DNA, 25 bp, Homo sapien
gctacagactgagggagggagcggg

SEQ ID NO: 3238986 - DNA, 25 bp, Homo sapien
tggtctgttgggaactactcacacg

SEQ ID NO: 3238987 - DNA, 25 bp, Homo sapien
gtaacgtctggctctgtgtttctcc

SEQ ID NO: 3238988 - DNA, 25 bp, Homo sapien
tctttgaaaagcagtgtaacgtctg

SEQ ID NO: 3238989 - DNA, 25 bp, Homo sapien
ggaactactcacacggtagctccct

SEQ ID NO: 3238990 - DNA, 25 bp, Homo sapien
cctcgctggggcagcagaggcaact

SEQ ID NO: 3238991 - DNA, 25 bp, Homo sapien
aagtgctggcaggtgctgaactgcg

SEQ ID NO: 3238992 - DNA, 25 bp, Homo sapien
ctgacaccaccgctgtccgctgaca

SEQ ID NO: 3238993 - DNA, 25 bp, Homo sapien
gacaccaccgctgtttgtgtcgcca

SEQ ID NO: 3238994 - DNA, 25 bp, Homo sapien
agcttgaacccgaagggccctggag

SEQ ID NO: 3238995 - DNA, 25 bp, Homo sapien
tcaggcaagcgtgacaatcacacac

SEQ ID NO: 3238996 - DNA, 25 bp, Homo sapien
cattccctcgataaaaaactgttga

SEQ ID NO: 3238997 - DNA, 25 bp, Homo sapien
ggtattgcactctattattgtcgga

SEQ ID NO: 3238998 - DNA, 25 bp, Homo sapien
tacaaattgctatgggagcccaaag

SEQ ID NO: 3238999 - DNA, 25 bp, Homo sapien
ggaagttctagagctctaagaaaag

SEQ ID NO: 3239000 - DNA, 25 bp, Homo sapien
cgaaggaagttctagagctctaaga

SEQ ID NO: 3239001 - DNA, 25 bp, Homo sapien
agttctagagctctaagaaaagtct

SEQ ID NO: 3239002 - DNA, 25 bp, Homo sapien
cttgagtaccacgaaggaagttcta

SEQ ID NO: 3239003 - DNA, 25 bp, Homo sapien
tgagaacgacgaaggaattcccagg

SEQ ID NO: 3239004 - DNA, 25 bp, Homo sapien
ttgagaacgacgaaggaattcccag

SEQ ID NO: 3239005 - DNA, 25 bp, Homo sapien
cttgagaacgacgaaggaattccca

SEQ ID NO: 3239006 - DNA, 25 bp, Homo sapien
cttgagtaccacgaagaagtcccgg

SEQ ID NO: 3239007 - DNA, 25 bp, Homo sapien
ggtaccacgaaggaagctccccatg

SEQ ID NO: 3239008 - DNA, 25 bp, Homo sapien
ggaagccctgggtaccatgaaggaa

SEQ ID NO: 3239009 - DNA, 25 bp, Homo sapien
tgggtgtccgagcacagaaaccgtg

SEQ ID NO: 3239010 - DNA, 25 bp, Homo sapien
gaggccagtgtcttccgcggctaaa

SEQ ID NO: 3239011 - DNA, 25 bp, Homo sapien
agcaagtctgcgctgtcgctgtgca

SEQ ID NO: 3239012 - DNA, 25 bp, Homo sapien
gtcaggaagcaacgcggacgacttt

SEQ ID NO: 3239013 - DNA, 25 bp, Homo sapien
ccttgtaagtcgtatatgtgggacc

SEQ ID NO: 3239014 - DNA, 25 bp, Homo sapien
cacctgaaaggtactggcacacata

SEQ ID NO: 3239015 - DNA, 25 bp, Homo sapien
tcacctgaaaggtactggcacacat

SEQ ID NO: 3239016 - DNA, 25 bp, Homo sapien
acctgaaaggtactggcacacatat

SEQ ID NO: 3239017 - DNA, 25 bp, Homo sapien
gcgcccggccacgtctttcgtcttc

SEQ ID NO: 3239018 - DNA, 25 bp, Homo sapien
tctttcgtcttctcattcaatgtga

SEQ ID NO: 3239019 - DNA, 25 bp, Homo sapien
atgtgatcgtgtgctcaaattgtcc

SEQ ID NO: 3239020 - DNA, 25 bp, Homo sapien
ccagtgggtaatgggcacacactga

SEQ ID NO: 3239021 - DNA, 25 bp, Homo sapien
gactcaacacccatccatggaacat

SEQ ID NO: 3239022 - DNA, 25 bp, Homo sapien
tccgactcaacacccatccatggaa

SEQ ID NO: 3239023 - DNA, 25 bp, Homo sapien
ctgctccgactcaacacccatccat

SEQ ID NO: 3239024 - DNA, 25 bp, Homo sapien
ctccgactcaacacccatccatgga

SEQ ID NO: 3239025 - DNA, 25 bp, Homo sapien
tcatgcgcattctctgctgccactt

SEQ ID NO: 3239026 - DNA, 25 bp, Homo sapien
atgcgcattctctgctgccacttgc

SEQ ID NO: 3239027 - DNA, 25 bp, Homo sapien
catgcgcattctctgctgccacttg

SEQ ID NO: 3239028 - DNA, 25 bp, Homo sapien
aaagccctgatccagtcccagctga

SEQ ID NO: 3239029 - DNA, 25 bp, Homo sapien
acctgaaaatctagtctaaccaaag

SEQ ID NO: 3239030 - DNA, 25 bp, Homo sapien
tggtacccagcgtcctcaacctgaa

SEQ ID NO: 3239031 - DNA, 25 bp, Homo sapien
gtacccagcgtcctcaacctgaaaa

SEQ ID NO: 3239032 - DNA, 25 bp, Homo sapien
gtcttcctccaccttttgcattttg

SEQ ID NO: 3239033 - DNA, 25 bp, Homo sapien
cagtcttcctccaccttttgcattt

SEQ ID NO: 3239034 - DNA, 25 bp, Homo sapien
tcttcctccaccttttgcattttga

SEQ ID NO: 3239035 - DNA, 25 bp, Homo sapien
tcctccaccttttgcattttgatct

SEQ ID NO: 3239036 - DNA, 25 bp, Homo sapien
tcacccttcattcctctccacatcc

SEQ ID NO: 3239037 - DNA, 25 bp, Homo sapien
tctccacatcctctctgcattcctc

SEQ ID NO: 3239038 - DNA, 25 bp, Homo sapien
acccttcattcctctccacatcctc

SEQ ID NO: 3239039 - DNA, 25 bp, Homo sapien
tccacatcctctctgcattcctcac

SEQ ID NO: 3239040 - DNA, 25 bp, Homo sapien
atttgccaaggcatccttgaaagcc

SEQ ID NO: 3239041 - DNA, 25 bp, Homo sapien
aatttgccaaggcatccttgaaagc

SEQ ID NO: 3239042 - DNA, 25 bp, Homo sapien
cctcgggtggaggtgctatgactcc

SEQ ID NO: 3239043 - DNA, 25 bp, Homo sapien
cagtggcctcgggtggaggtgctat

SEQ ID NO: 3239044 - DNA, 25 bp, Homo sapien
aagtggaaccagtatgattatctct

SEQ ID NO: 3239045 - DNA, 25 bp, Homo sapien
gctgagtagtcacactcctattaac

SEQ ID NO: 3239046 - DNA, 25 bp, Homo sapien
taacttgcatgggtacagagctctc

SEQ ID NO: 3239047 - DNA, 25 bp, Homo sapien
tctcaggcatgattgtggcatcagt

SEQ ID NO: 3239048 - DNA, 25 bp, Homo sapien
ctcagaaaagcgtggactggtgcgt

SEQ ID NO: 3239049 - DNA, 25 bp, Homo sapien
cacggtcaagtccaagcggaaagct

SEQ ID NO: 3239050 - DNA, 25 bp, Homo sapien
gagatttgattccaactgggcagca

SEQ ID NO: 3239051 - DNA, 25 bp, Homo sapien
tatgcagccactaacggatacgcct

SEQ ID NO: 3239052 - DNA, 25 bp, Homo sapien
aaaatcaatacatcagcattctgcc

SEQ ID NO: 3239053 - DNA, 25 bp, Homo sapien
actctcctcacacttcacaaggaaa

SEQ ID NO: 3239054 - DNA, 25 bp, Homo sapien
ttcacaaggaaaatcaatacatcag

SEQ ID NO: 3239055 - DNA, 25 bp, Homo sapien
ggaaaatcaatacatcagcattctg

SEQ ID NO: 3239056 - DNA, 25 bp, Homo sapien
ccggactcacctccgcgcttcccat

SEQ ID NO: 3239057 - DNA, 25 bp, Homo sapien
acaagcgccggatggcagaatggct

SEQ ID NO: 3239058 - DNA, 25 bp, Homo sapien
ccctgctccgcaagagagacctgct

SEQ ID NO: 3239059 - DNA, 25 bp, Homo sapien
tgcgccgcgcatgctccctgcgcca

SEQ ID NO: 3239060 - DNA, 25 bp, Homo sapien
taggcgcctggaaacgtttcctaga

SEQ ID NO: 3239061 - DNA, 25 bp, Homo sapien
ccatcctccgattctgttttgagca

SEQ ID NO: 3239062 - DNA, 25 bp, Homo sapien
tttgattgcaaagactaggcgcctg

SEQ ID NO: 3239063 - DNA, 25 bp, Homo sapien
cagctgtgcagaactgcctcttagg

SEQ ID NO: 3239064 - DNA, 25 bp, Homo sapien
aatatgtcacataccgtgctcaggg

SEQ ID NO: 3239065 - DNA, 25 bp, Homo sapien
cagcagagatgcagtctgtctggca

SEQ ID NO: 3239066 - DNA, 25 bp, Homo sapien
tcccaggacgtctggcagcagagat

SEQ ID NO: 3239067 - DNA, 25 bp, Homo sapien
gcaagaagcctgtcaaaaacccaca

SEQ ID NO: 3239068 - DNA, 25 bp, Homo sapien
ctggctgctgaccgctgccaaatca

SEQ ID NO: 3239069 - DNA, 25 bp, Homo sapien
gctgctgaccgctgccaaatcaaag

SEQ ID NO: 3239070 - DNA, 25 bp, Homo sapien
atcaaagcacccgtgtttcctctgt

SEQ ID NO: 3239071 - DNA, 25 bp, Homo sapien
gccaaatcaaagcacccgtgtttcc

SEQ ID NO: 3239072 - DNA, 25 bp, Homo sapien
tgcatgccccaaatgtaatgtgaag

SEQ ID NO: 3239073 - DNA, 25 bp, Homo sapien
gatattccccttgctgagtcttaaa

SEQ ID NO: 3239074 - DNA, 25 bp, Homo sapien
gaagtaaattccactgtgaatgagc

SEQ ID NO: 3239075 - DNA, 25 bp, Homo sapien
tagcccgagtatgtgtgatatatct

SEQ ID NO: 3239076 - DNA, 25 bp, Homo sapien
cacaaacgagaagaaccacgggaga

SEQ ID NO: 3239077 - DNA, 25 bp, Homo sapien
catttgaagggacagctgcaggtca

SEQ ID NO: 3239078 - DNA, 25 bp, Homo sapien
cagtgcaaggagctgtgttacccga

SEQ ID NO: 3239079 - DNA, 25 bp, Homo sapien
gaaccaggcgtacacatttgaaggg

SEQ ID NO: 3239080 - DNA, 25 bp, Homo sapien
ctaagaatgtaatgcgtgaaaaggg

SEQ ID NO: 3239081 - DNA, 25 bp, Homo sapien
tgcatcgcagcgacgtctggacttt

SEQ ID NO: 3239082 - DNA, 25 bp, Homo sapien
ggaatcacacgatggattctgtgct

SEQ ID NO: 3239083 - DNA, 25 bp, Homo sapien
tggattctgtgcttggaaagctgaa

SEQ ID NO: 3239084 - DNA, 25 bp, Homo sapien
tccgtgaccgatacaagacactcag

SEQ ID NO: 3239085 - DNA, 25 bp, Homo sapien
ctctttcttcgttataaacaattcg

SEQ ID NO: 3239086 - DNA, 25 bp, Homo sapien
ctgactcctccgtgaccgatacaag

SEQ ID NO: 3239087 - DNA, 25 bp, Homo sapien
gaccgatacaagacactcaggtgcc

SEQ ID NO: 3239088 - DNA, 25 bp, Homo sapien
tttttcctcgggagcaactgcccca

SEQ ID NO: 3239089 - DNA, 25 bp, Homo sapien
gtccgtcctctcatgcgcacgtggg

SEQ ID NO: 3239090 - DNA, 25 bp, Homo sapien
aaagccctgttccaccgggcgctgg

SEQ ID NO: 3239091 - DNA, 25 bp, Homo sapien
tctccctctgtcttaaatactggct

SEQ ID NO: 3239092 - DNA, 25 bp, Homo sapien
tgctggcattttctacaacatacgg

SEQ ID NO: 3239093 - DNA, 25 bp, Homo sapien
ctgctggcattttctacaacatacg

SEQ ID NO: 3239094 - DNA, 25 bp, Homo sapien
ggtggtggggttcttggtgcactgg

SEQ ID NO: 3239095 - DNA, 25 bp, Homo sapien
gatggtggtggggttcttggtgcac

SEQ ID NO: 3239096 - DNA, 25 bp, Homo sapien
tgtgtgtgggtagtggtgatggtgg

SEQ ID NO: 3239097 - DNA, 25 bp, Homo sapien
tgatggtggtggggttcttggtgca

SEQ ID NO: 3239098 - DNA, 25 bp, Homo sapien
ggtggttgctttgccttgaggtggt

SEQ ID NO: 3239099 - DNA, 25 bp, Homo sapien
ctggtggttgctttgccttgaggtg

SEQ ID NO: 3239100 - DNA, 25 bp, Homo sapien
tggttgctttgccttgaggtggtcc

SEQ ID NO: 3239101 - DNA, 25 bp, Homo sapien
tggtccagggctgctggatttcagg

SEQ ID NO: 3239102 - DNA, 25 bp, Homo sapien
atagaaagaaccctgaccacttatg

SEQ ID NO: 3239103 - DNA, 25 bp, Homo sapien
gaccacttatgcacttgcatgagac

SEQ ID NO: 3239104 - DNA, 25 bp, Homo sapien
cctgaccacttatgcacttgcatga

SEQ ID NO: 3239105 - DNA, 25 bp, Homo sapien
agaaagaaccctgaccacttatgca

SEQ ID NO: 3239106 - DNA, 25 bp, Homo sapien
tgactgcaatcacgctgaccctggt

SEQ ID NO: 3239107 - DNA, 25 bp, Homo sapien
tgaccctggtccacagcggcacaaa

SEQ ID NO: 3239108 - DNA, 25 bp, Homo sapien
cactcggacaggttgctgccttctc

SEQ ID NO: 3239109 - DNA, 25 bp, Homo sapien
ggcacaaacccatgtgagactggaa

SEQ ID NO: 3239110 - DNA, 25 bp, Homo sapien
aggagccctgctgatcgggggccac

SEQ ID NO: 3239111 - DNA, 25 bp, Homo sapien
atcgggggccactttgagggcctct

SEQ ID NO: 3239112 - DNA, 25 bp, Homo sapien
cctgctgatcgggggccactttgag

SEQ ID NO: 3239113 - DNA, 25 bp, Homo sapien
tgatcgggggccactttgagggcct

SEQ ID NO: 3239114 - DNA, 25 bp, Homo sapien
cccatatgttcccatcaaaggattc

SEQ ID NO: 3239115 - DNA, 25 bp, Homo sapien
tgctgctgtggaccagggtcagtgt

SEQ ID NO: 3239116 - DNA, 25 bp, Homo sapien
gtgggttctccccatatgttcccat

SEQ ID NO: 3239117 - DNA, 25 bp, Homo sapien
cagtgtgattgcagtcagagaaggc

SEQ ID NO: 3239118 - DNA, 25 bp, Homo sapien
gaggtaccactctcagggataaaga

SEQ ID NO: 3239119 - DNA, 25 bp, Homo sapien
caccaagaaagttgccgaagcagct

SEQ ID NO: 3239120 - DNA, 25 bp, Homo sapien
aaactctaggcgctgtgtctcccag

SEQ ID NO: 3239121 - DNA, 25 bp, Homo sapien
gaagcagctgcatgagaggtaccac

SEQ ID NO: 3239122 - DNA, 25 bp, Homo sapien
gggaagccttcagaaaagtgacaag

SEQ ID NO: 3239123 - DNA, 25 bp, Homo sapien
tggtctgtccatctttgaatcctcc

SEQ ID NO: 3239124 - DNA, 25 bp, Homo sapien
tgtcgttggtctgtccatctttgaa

SEQ ID NO: 3239125 - DNA, 25 bp, Homo sapien
cgttggtctgtccatctttgaatcc

SEQ ID NO: 3239126 - DNA, 25 bp, Homo sapien
ttggtctgtccatctttgaatcctc

SEQ ID NO: 3239127 - DNA, 25 bp, Homo sapien
ggctattaggctggagtgttctttc

SEQ ID NO: 3239128 - DNA, 25 bp, Homo sapien
tctttctcattagtctcatcctgag

SEQ ID NO: 3239129 - DNA, 25 bp, Homo sapien
catcctgagatctcttagggttagg

SEQ ID NO: 3239130 - DNA, 25 bp, Homo sapien
cttagggttaggctattaggctgga

SEQ ID NO: 3239131 - DNA, 25 bp, Homo sapien
tcaatttgttcgtggcgaggtgttt

SEQ ID NO: 3239132 - DNA, 25 bp, Homo sapien
aggaaatgaaacgaagcgggcccag

SEQ ID NO: 3239133 - DNA, 25 bp, Homo sapien
ggcccagtaggagcctagcacgaat

SEQ ID NO: 3239134 - DNA, 25 bp, Homo sapien
gaatgcacaagttcctgttcattgc

SEQ ID NO: 3239135 - DNA, 25 bp, Homo sapien
tagacggagtgcactactagttctt

SEQ ID NO: 3239136 - DNA, 25 bp, Homo sapien
caagcttaaagcctcaattgtgaat

SEQ ID NO: 3239137 - DNA, 25 bp, Homo sapien
accacactatcttgctctagacgga

SEQ ID NO: 3239138 - DNA, 25 bp, Homo sapien
cagttcttgacctatttatccccta

SEQ ID NO: 3239139 - DNA, 25 bp, Homo sapien
ttccctgtggatggcaattgctcag

SEQ ID NO: 3239140 - DNA, 25 bp, Homo sapien
tccccatcaccttcgtgtatccatt

SEQ ID NO: 3239141 - DNA, 25 bp, Homo sapien
tggatggcaattgctcagagtaata

SEQ ID NO: 3239142 - DNA, 25 bp, Homo sapien
tcagagtaatattgacctcttgtct

SEQ ID NO: 3239143 - DNA, 25 bp, Homo sapien
tgaaggacttgcgaaattgcacggt

SEQ ID NO: 3239144 - DNA, 25 bp, Homo sapien
tattgaagccttgctgtgactcgac

SEQ ID NO: 3239145 - DNA, 25 bp, Homo sapien
gactcgactggttgaaggacttgcg

SEQ ID NO: 3239146 - DNA, 25 bp, Homo sapien
tctgtcgtctgagcatattgaagcc

SEQ ID NO: 3239147 - DNA, 25 bp, Homo sapien
gcagccctaaatccaagtaagcagg

SEQ ID NO: 3239148 - DNA, 25 bp, Homo sapien
acaggaatggtgcagcaagctaggc

SEQ ID NO: 3239149 - DNA, 25 bp, Homo sapien
gagtacggtccacatctaccaagaa

SEQ ID NO: 3239150 - DNA, 25 bp, Homo sapien
tgtgaggctatgcttgtctaacagc

SEQ ID NO: 3239151 - DNA, 25 bp, Homo sapien
cctgcctttggactgtaagttgcac

SEQ ID NO: 3239152 - DNA, 25 bp, Homo sapien
caaaggccttgtgggttctttcctg

SEQ ID NO: 3239153 - DNA, 25 bp, Homo sapien
tacccttggaagagtatgatgacaa

SEQ ID NO: 3239154 - DNA, 25 bp, Homo sapien
tatctagaagggcaatgagtaattc

SEQ ID NO: 3239155 - DNA, 25 bp, Homo sapien
ctttgaggcttttcatttttctctt

SEQ ID NO: 3239156 - DNA, 25 bp, Homo sapien
catttttctcttgtaactccaacat

SEQ ID NO: 3239157 - DNA, 25 bp, Homo sapien
ttgaggcttttcatttttctcttgt

SEQ ID NO: 3239158 - DNA, 25 bp, Homo sapien
tttcatttttctcttgtaactccaa

SEQ ID NO: 3239159 - DNA, 25 bp, Homo sapien
ttcgcttgccatcgggctgacttgt

SEQ ID NO: 3239160 - DNA, 25 bp, Homo sapien
tgccatcgggctgacttgtgtcttg

SEQ ID NO: 3239161 - DNA, 25 bp, Homo sapien
aacggttcgcttgccatcgggctga

SEQ ID NO: 3239162 - DNA, 25 bp, Homo sapien
gttaacggttcgcttgccatcgggc

SEQ ID NO: 3239163 - DNA, 25 bp, Homo sapien
tactgtaaacattggatgaaaggat

SEQ ID NO: 3239164 - DNA, 25 bp, Homo sapien
tcctttactgtaaacattggatgaa

SEQ ID NO: 3239165 - DNA, 25 bp, Homo sapien
tttcccagtgtatgtgcattgtaat

SEQ ID NO: 3239166 - DNA, 25 bp, Homo sapien
gtatgtgcattgtaatcctttactg

SEQ ID NO: 3239167 - DNA, 25 bp, Homo sapien
gtttagcaggaacgcagatattcag

SEQ ID NO: 3239168 - DNA, 25 bp, Homo sapien
tggtttagcaggaacgcagatattc

SEQ ID NO: 3239169 - DNA, 25 bp, Homo sapien
ctctggtttagcaggaacgcagata

SEQ ID NO: 3239170 - DNA, 25 bp, Homo sapien
tagcaggaacgcagatattcagctc

SEQ ID NO: 3239171 - DNA, 25 bp, Homo sapien
cacagggtgacatccaggtgaatga

SEQ ID NO: 3239172 - DNA, 25 bp, Homo sapien
gtgacatccaggtgaatgaagagga

SEQ ID NO: 3239173 - DNA, 25 bp, Homo sapien
ccacagggtgacatccaggtgaatg

SEQ ID NO: 3239174 - DNA, 25 bp, Homo sapien
acatccaggtgaatgaagaggacat

SEQ ID NO: 3239175 - DNA, 25 bp, Homo sapien
gaggagtaatcatcgctctttttgc

SEQ ID NO: 3239176 - DNA, 25 bp, Homo sapien
actgctggtaagcagaggagtaatc

SEQ ID NO: 3239177 - DNA, 25 bp, Homo sapien
ggggaggctccagtatcaataggtg

SEQ ID NO: 3239178 - DNA, 25 bp, Homo sapien
taagcagaggagtaatcatcgctct

SEQ ID NO: 3239179 - DNA, 25 bp, Homo sapien
gcagcaagaggctccgcagacccat

SEQ ID NO: 3239180 - DNA, 25 bp, Homo sapien
tgagcagcaagaggctccgcagacc

SEQ ID NO: 3239181 - DNA, 25 bp, Homo sapien
atgagcagcaagaggctccgcagac

SEQ ID NO: 3239182 - DNA, 25 bp, Homo sapien
agcagcaagaggctccgcagaccca

SEQ ID NO: 3239183 - DNA, 25 bp, Homo sapien
caacagatagatgtgttctcccatt

SEQ ID NO: 3239184 - DNA, 25 bp, Homo sapien
gccttgtgaggtttacgggctctcc

SEQ ID NO: 3239185 - DNA, 25 bp, Homo sapien
gctgtcttgaatgtccagccttgtg

SEQ ID NO: 3239186 - DNA, 25 bp, Homo sapien
tgctcagtgctgtcttgaatgtcca

SEQ ID NO: 3239187 - DNA, 25 bp, Homo sapien
gcaggattcctagggccggttccaa

SEQ ID NO: 3239188 - DNA, 25 bp, Homo sapien
ggcaggattcctagggccggttcca

SEQ ID NO: 3239189 - DNA, 25 bp, Homo sapien
tttgtcttcgttgtttcctgcctca

SEQ ID NO: 3239190 - DNA, 25 bp, Homo sapien
tgtcttcgttgtttcctgcctcaac

SEQ ID NO: 3239191 - DNA, 25 bp, Homo sapien
cagggacggctaagaatagaacaca

SEQ ID NO: 3239192 - DNA, 25 bp, Homo sapien
tacatggtccacttcaccgataaac

SEQ ID NO: 3239193 - DNA, 25 bp, Homo sapien
ttacatggtccacttcaccgataaa

SEQ ID NO: 3239194 - DNA, 25 bp, Homo sapien
gtcaggcccagggacggctaagaat

SEQ ID NO: 3239195 - DNA, 25 bp, Homo sapien
ggatttgcctgactctgctcaaaga

SEQ ID NO: 3239196 - DNA, 25 bp, Homo sapien
ggtgtccctctccaataggagaaaa

SEQ ID NO: 3239197 - DNA, 25 bp, Homo sapien
acgggcccacctcttcggcatggat

SEQ ID NO: 3239198 - DNA, 25 bp, Homo sapien
ccacggtgtccctctccaataggag

SEQ ID NO: 3239199 - DNA, 25 bp, Homo sapien
tcaattccccgcaacagccgcccac

SEQ ID NO: 3239200 - DNA, 25 bp, Homo sapien
gtaatggaatcacactcttattctg

SEQ ID NO: 3239201 - DNA, 25 bp, Homo sapien
cctagattgtccaatttcctcctgc

SEQ ID NO: 3239202 - DNA, 25 bp, Homo sapien
aatggaatcacactcttattctgaa

SEQ ID NO: 3239203 - DNA, 25 bp, Homo sapien
ggtaatggaatcacactcttattct

SEQ ID NO: 3239204 - DNA, 25 bp, Homo sapien
ggacattggtctctgggtttcattc

SEQ ID NO: 3239205 - DNA, 25 bp, Homo sapien
ttctgtacacttcaacattatgtag

SEQ ID NO: 3239206 - DNA, 25 bp, Homo sapien
ttggtctctgggtttcattcatcac

SEQ ID NO: 3239207 - DNA, 25 bp, Homo sapien
tgtgggagatgcagactgggctatg

SEQ ID NO: 3239208 - DNA, 25 bp, Homo sapien
taattcggcattgcctctgtagagc

SEQ ID NO: 3239209 - DNA, 25 bp, Homo sapien
tgccagatggatgtgaaactcctcc

SEQ ID NO: 3239210 - DNA, 25 bp, Homo sapien
cagctgatccttgtggaaacccatc

SEQ ID NO: 3239211 - DNA, 25 bp, Homo sapien
tccctggaaaacacgaggcttatct

SEQ ID NO: 3239212 - DNA, 25 bp, Homo sapien
tgcccaggagaggccgtttcttcca

SEQ ID NO: 3239213 - DNA, 25 bp, Homo sapien
gcccaggagaggccgtttcttccat

SEQ ID NO: 3239214 - DNA, 25 bp, Homo sapien
gaatgaaatgccgtagagcacttca

SEQ ID NO: 3239215 - DNA, 25 bp, Homo sapien
ggtgacatttcctgcaacactgact

SEQ ID NO: 3239216 - DNA, 25 bp, Homo sapien
agttcataatcctcttttgacaagc

SEQ ID NO: 3239217 - DNA, 25 bp, Homo sapien
aaggattttcacagtcagacgctcc

SEQ ID NO: 3239218 - DNA, 25 bp, Homo sapien
catttgaaaaactaggcttaatgtc

SEQ ID NO: 3239219 - DNA, 25 bp, Homo sapien
taggcttaatgtcttgaacttgggc

SEQ ID NO: 3239220 - DNA, 25 bp, Homo sapien
tcactcttctcggattcttctggta

SEQ ID NO: 3239221 - DNA, 25 bp, Homo sapien
tgccctgtttctcaatatgttcact

SEQ ID NO: 3239222 - DNA, 25 bp, Homo sapien
tcctcctagggcaagactcaacatt

SEQ ID NO: 3239223 - DNA, 25 bp, Homo sapien
cacatcaactttggtctggtgccca

SEQ ID NO: 3239224 - DNA, 25 bp, Homo sapien
ggcaaagccattgtctccaggaccg

SEQ ID NO: 3239225 - DNA, 25 bp, Homo sapien
ctggtgcccatcacagaggaaggga

SEQ ID NO: 3239226 - DNA, 25 bp, Homo sapien
ccaaggtatctacaagggtacagaa

SEQ ID NO: 3239227 - DNA, 25 bp, Homo sapien
gaaaagactcagatggctctaaatc

SEQ ID NO: 3239228 - DNA, 25 bp, Homo sapien
ttcaacgcttacaatacaagaagtg

SEQ ID NO: 3239229 - DNA, 25 bp, Homo sapien
caggaatggatatgttgactcatgg

SEQ ID NO: 3239230 - DNA, 25 bp, Homo sapien
tcccatcagcccctcatacactctg

SEQ ID NO: 3239231 - DNA, 25 bp, Homo sapien
tcagcccctcatacactctgtcatc

SEQ ID NO: 3239232 - DNA, 25 bp, Homo sapien
gatcttttcccagtccacaccattg

SEQ ID NO: 3239233 - DNA, 25 bp, Homo sapien
catcagcccctcatacactctgtca

SEQ ID NO: 3239234 - DNA, 25 bp, Homo sapien
gcaatcgtcacactctgaggctcgc

SEQ ID NO: 3239235 - DNA, 25 bp, Homo sapien
tcgtcacactctgaggctcgctgct

SEQ ID NO: 3239236 - DNA, 25 bp, Homo sapien
aatcgtcacactctgaggctcgctg

SEQ ID NO: 3239237 - DNA, 25 bp, Homo sapien
tgcaatcgtcacactctgaggctcg

SEQ ID NO: 3239238 - DNA, 25 bp, Homo sapien
tgttcgtactcaccaagatccatgt

SEQ ID NO: 3239239 - DNA, 25 bp, Homo sapien
caatgtacacatgttcgtactcacc

SEQ ID NO: 3239240 - DNA, 25 bp, Homo sapien
aatatgtcatggttgagaggcctcc

SEQ ID NO: 3239241 - DNA, 25 bp, Homo sapien
ttgccctccgccgaaagattagtaa

SEQ ID NO: 3239242 - DNA, 25 bp, Homo sapien
gtacatagtacccatggatgaatgg

SEQ ID NO: 3239243 - DNA, 25 bp, Homo sapien
tgacttatgtaaggagcttcacaga

SEQ ID NO: 3239244 - DNA, 25 bp, Homo sapien
tagtgacagcgtcaagaattccaac

SEQ ID NO: 3239245 - DNA, 25 bp, Homo sapien
gcttcacagacgctcatgacatcat

SEQ ID NO: 3239246 - DNA, 25 bp, Homo sapien
tccaactttactgtagtgacttatg

SEQ ID NO: 3239247 - DNA, 25 bp, Homo sapien
tgatgctccattggcagactccagg

SEQ ID NO: 3239248 - DNA, 25 bp, Homo sapien
tgtcaccttttcaaggaggcttgga

SEQ ID NO: 3239249 - DNA, 25 bp, Homo sapien
ccagcagtaaggatgaatgtgcaca

SEQ ID NO: 3239250 - DNA, 25 bp, Homo sapien
gatggtacaaaacgagtgcttttcc

SEQ ID NO: 3239251 - DNA, 25 bp, Homo sapien
caatgtgaaggaacatcggtttggg

SEQ ID NO: 3239252 - DNA, 25 bp, Homo sapien
gaaatatggtaaatactagaacaaa

SEQ ID NO: 3239253 - DNA, 25 bp, Homo sapien
gaatagtaagcacagcaatgtgaag

SEQ ID NO: 3239254 - DNA, 25 bp, Homo sapien
gagaaaactaccaagtagaatgcat

SEQ ID NO: 3239255 - DNA, 25 bp, Homo sapien
tttggccaatgcaaattgtagcgac

SEQ ID NO: 3239256 - DNA, 25 bp, Homo sapien
caacctttcttcctactgagtgtga

SEQ ID NO: 3239257 - DNA, 25 bp, Homo sapien
agaagcgtactggaagaaacaacct

SEQ ID NO: 3239258 - DNA, 25 bp, Homo sapien
tgtggacttccccaatagaagttgg

SEQ ID NO: 3239259 - DNA, 25 bp, Homo sapien
tctagggtatctgcagtcttgccaa

SEQ ID NO: 3239260 - DNA, 25 bp, Homo sapien
gtatctgcagtcttgccaattaggc

SEQ ID NO: 3239261 - DNA, 25 bp, Homo sapien
aattcctctagggtatctgcagtct

SEQ ID NO: 3239262 - DNA, 25 bp, Homo sapien
tttcctcaattcctctagggtatct

SEQ ID NO: 3239263 - DNA, 25 bp, Homo sapien
agacttttactgatggtctaaggaa

SEQ ID NO: 3239264 - DNA, 25 bp, Homo sapien
gatgtgctgcatactcctctgactt

SEQ ID NO: 3239265 - DNA, 25 bp, Homo sapien
ggtgatgtgctgcatactcctctga

SEQ ID NO: 3239266 - DNA, 25 bp, Homo sapien
tggtctaaggaagggtgatgtgctg

SEQ ID NO: 3239267 - DNA, 25 bp, Homo sapien
tcgtaaggcaaattgttcccgtagc

SEQ ID NO: 3239268 - DNA, 25 bp, Homo sapien
tttcctgctcagtgaatcgtaaggc

SEQ ID NO: 3239269 - DNA, 25 bp, Homo sapien
gactcaccgtgtctgattggccacc

SEQ ID NO: 3239270 - DNA, 25 bp, Homo sapien
caattgtccatcttccaagtaggag

SEQ ID NO: 3239271 - DNA, 25 bp, Homo sapien
tgtcaccagccgagtgtaagccgtc

SEQ ID NO: 3239272 - DNA, 25 bp, Homo sapien
tcctgagacccccaaaaatggctga

SEQ ID NO: 3239273 - DNA, 25 bp, Homo sapien
agggcaagcagaggtactgtgaacc

SEQ ID NO: 3239274 - DNA, 25 bp, Homo sapien
ggtactgtgaaccttgtgaagccca

SEQ ID NO: 3239275 - DNA, 25 bp, Homo sapien
ttgtgtctgtagccgcaggagcagt

SEQ ID NO: 3239276 - DNA, 25 bp, Homo sapien
ccattgtgtctgtagccgcaggagc

SEQ ID NO: 3239277 - DNA, 25 bp, Homo sapien
ttccattgtgtctgtagccgcagga

SEQ ID NO: 3239278 - DNA, 25 bp, Homo sapien
cattgtgtctgtagccgcaggagca

SEQ ID NO: 3239279 - DNA, 25 bp, Homo sapien
gaaacccgccgtgattgtccatgtg

SEQ ID NO: 3239280 - DNA, 25 bp, Homo sapien
cttcagtgaaccctgcttctgtcag

SEQ ID NO: 3239281 - DNA, 25 bp, Homo sapien
tgtcaggaaacccgccgtgattgtc

SEQ ID NO: 3239282 - DNA, 25 bp, Homo sapien
agtgaaccctgcttctgtcaggaaa

SEQ ID NO: 3239283 - DNA, 25 bp, Homo sapien
tggtacaaatggtctcagaaagttt

SEQ ID NO: 3239284 - DNA, 25 bp, Homo sapien
gcatgctctgggtctcgttggtaca

SEQ ID NO: 3239285 - DNA, 25 bp, Homo sapien
ctgggtctcgttggtacaaatggtc

SEQ ID NO: 3239286 - DNA, 25 bp, Homo sapien
aaacgtcagcaattgcatataaatg

SEQ ID NO: 3239287 - DNA, 25 bp, Homo sapien
ccactctgtagtccgagggggcaag

SEQ ID NO: 3239288 - DNA, 25 bp, Homo sapien
tccgagggggcaagaactgctccat

SEQ ID NO: 3239289 - DNA, 25 bp, Homo sapien
cagcttccactctgtagtccgaggg

SEQ ID NO: 3239290 - DNA, 25 bp, Homo sapien
tctgtagtccgagggggcaagaact

SEQ ID NO: 3239291 - DNA, 25 bp, Homo sapien
ctgtaggagctccacaagcctcagg

SEQ ID NO: 3239292 - DNA, 25 bp, Homo sapien
tgaggctgtaggagctccacaagcc

SEQ ID NO: 3239293 - DNA, 25 bp, Homo sapien
cagtgaggctgtaggagctccacaa

SEQ ID NO: 3239294 - DNA, 25 bp, Homo sapien
ggctgtaggagctccacaagcctca

SEQ ID NO: 3239295 - DNA, 25 bp, Homo sapien
cacagcaattccaggttgtgtaaaa

SEQ ID NO: 3239296 - DNA, 25 bp, Homo sapien
aggttgtgtaaaagctgcttcagat

SEQ ID NO: 3239297 - DNA, 25 bp, Homo sapien
catctcctgcactcgttcttagtgg

SEQ ID NO: 3239298 - DNA, 25 bp, Homo sapien
gcactcgttcttagtggctgctcat

SEQ ID NO: 3239299 - DNA, 25 bp, Homo sapien
tgccggattggagggcgcctgcccc

SEQ ID NO: 3239300 - DNA, 25 bp, Homo sapien
aagctgccggattggagggcgcctg

SEQ ID NO: 3239301 - DNA, 25 bp, Homo sapien
tccaagctgccggattggagggcgc

SEQ ID NO: 3239302 - DNA, 25 bp, Homo sapien
ctccatccaagctgccggattggag

SEQ ID NO: 3239303 - DNA, 25 bp, Homo sapien
ctctttttgcatgaatttatccagg

SEQ ID NO: 3239304 - DNA, 25 bp, Homo sapien
gcatgaatttatccaggggttccaa

SEQ ID NO: 3239305 - DNA, 25 bp, Homo sapien
ttgcatgaatttatccaggggttcc

SEQ ID NO: 3239306 - DNA, 25 bp, Homo sapien
agtaccttgacagctttgtcaaaaa

SEQ ID NO: 3239307 - DNA, 25 bp, Homo sapien
tcttctgtgttgatagcacctgttg

SEQ ID NO: 3239308 - DNA, 25 bp, Homo sapien
cttctgtgttgatagcacctgttgt

SEQ ID NO: 3239309 - DNA, 25 bp, Homo sapien
atcttctgtgttgatagcacctgtt

SEQ ID NO: 3239310 - DNA, 25 bp, Homo sapien
ttctgtgttgatagcacctgttgtc

SEQ ID NO: 3239311 - DNA, 25 bp, Homo sapien
ctgtaggcacaccagaagaccttgg

SEQ ID NO: 3239312 - DNA, 25 bp, Homo sapien
taccaatgacagcaagacggtaatt

SEQ ID NO: 3239313 - DNA, 25 bp, Homo sapien
taggcacaccagaagaccttggcat

SEQ ID NO: 3239314 - DNA, 25 bp, Homo sapien
ggtttgctggcagccataccaatga

SEQ ID NO: 3239315 - DNA, 25 bp, Homo sapien
cagctgactctcaactttatcatca

SEQ ID NO: 3239316 - DNA, 25 bp, Homo sapien
tatagaactcagtgctgcagccagt

SEQ ID NO: 3239317 - DNA, 25 bp, Homo sapien
gaaaggtgagcagatgcttctatag

SEQ ID NO: 3239318 - DNA, 25 bp, Homo sapien
aaatccagctgactctcaactttat

SEQ ID NO: 3239319 - DNA, 25 bp, Homo sapien
aggcggcaaccgcttaccagggtca

SEQ ID NO: 3239320 - DNA, 25 bp, Homo sapien
gttttcacgtgtgcgctggatttcc

SEQ ID NO: 3239321 - DNA, 25 bp, Homo sapien
gatttccgtttcctcaacgctcgca

SEQ ID NO: 3239322 - DNA, 25 bp, Homo sapien
tcaacctcaggcgagtagagcagcg

SEQ ID NO: 3239323 - DNA, 25 bp, Homo sapien
tgtctaacgtttcacgacaggactg

SEQ ID NO: 3239324 - DNA, 25 bp, Homo sapien
taggaatgtgcctgtttcgtccacg

SEQ ID NO: 3239325 - DNA, 25 bp, Homo sapien
gaatcccctagttcagtttctgtgc

SEQ ID NO: 3239326 - DNA, 25 bp, Homo sapien
gaacatccgctgtctctcctttagt

SEQ ID NO: 3239327 - DNA, 25 bp, Homo sapien
tgaggactcaagtcactagactggc

SEQ ID NO: 3239328 - DNA, 25 bp, Homo sapien
gatctataccgttaatcacactgca

SEQ ID NO: 3239329 - DNA, 25 bp, Homo sapien
tgtcagctgacagacattcccagct

SEQ ID NO: 3239330 - DNA, 25 bp, Homo sapien
tcatagtgagtctttttaacccacc

SEQ ID NO: 3239331 - DNA, 25 bp, Homo sapien
agatcaaagcatcagcagatttggt

SEQ ID NO: 3239332 - DNA, 25 bp, Homo sapien
gtctggtgagggcttgtcttctcct

SEQ ID NO: 3239333 - DNA, 25 bp, Homo sapien
tgtcttctccttcatagatggcacc

SEQ ID NO: 3239334 - DNA, 25 bp, Homo sapien
atcaaagcatcagcagatttggtgt

SEQ ID NO: 3239335 - DNA, 25 bp, Homo sapien
catgagtaagaaactgctcccatcc

SEQ ID NO: 3239336 - DNA, 25 bp, Homo sapien
tgtgcctagtacatgagtgcctcag

SEQ ID NO: 3239337 - DNA, 25 bp, Homo sapien
ccactggtagagacaaacatgcact

SEQ ID NO: 3239338 - DNA, 25 bp, Homo sapien
taggagctggtccttagtccactgg

SEQ ID NO: 3239339 - DNA, 25 bp, Homo sapien
catgtagagctgttatggaaccggg

SEQ ID NO: 3239340 - DNA, 25 bp, Homo sapien
gcaaccattgctctaaggtctgtga

SEQ ID NO: 3239341 - DNA, 25 bp, Homo sapien
ctatagtttctgtatggtccagggc

SEQ ID NO: 3239342 - DNA, 25 bp, Homo sapien
tctatagcagtgactgtagggtcca

SEQ ID NO: 3239343 - DNA, 25 bp, Homo sapien
cttctcagggcaggtatcatgatag

SEQ ID NO: 3239344 - DNA, 25 bp, Homo sapien
caatccattgctgtaaatcgatagt

SEQ ID NO: 3239345 - DNA, 25 bp, Homo sapien
gagagactttattgctgtacagcag

SEQ ID NO: 3239346 - DNA, 25 bp, Homo sapien
tttaaattcacctgtcatacaatat

SEQ ID NO: 3239347 - DNA, 25 bp, Homo sapien
tctgtgaggaatggctagaccacat

SEQ ID NO: 3239348 - DNA, 25 bp, Homo sapien
agcccctggtttcctgctctgtgag

SEQ ID NO: 3239349 - DNA, 25 bp, Homo sapien
acagctgaatgcaacagcccctggt

SEQ ID NO: 3239350 - DNA, 25 bp, Homo sapien
cacagctgaatgcaacagcccctgg

SEQ ID NO: 3239351 - DNA, 25 bp, Homo sapien
tcaaaggcagcttccaaatgtactg

SEQ ID NO: 3239352 - DNA, 25 bp, Homo sapien
catgtgtgaacaggcttcaaaggca

SEQ ID NO: 3239353 - DNA, 25 bp, Homo sapien
tatccaacccctatgctgagagtcc

SEQ ID NO: 3239354 - DNA, 25 bp, Homo sapien
cagaaagcctcacgggacatgatgg

SEQ ID NO: 3239355 - DNA, 25 bp, Homo sapien
acgcactggcatatcaccctctgac

SEQ ID NO: 3239356 - DNA, 25 bp, Homo sapien
tctgactgcaaccagtcagcatcca

SEQ ID NO: 3239357 - DNA, 25 bp, Homo sapien
ctctgactgcaaccagtcagcatcc

SEQ ID NO: 3239358 - DNA, 25 bp, Homo sapien
ctgactgcaaccagtcagcatccat

SEQ ID NO: 3239359 - DNA, 25 bp, Homo sapien
gggctccgatctccgtgctggtgct

SEQ ID NO: 3239360 - DNA, 25 bp, Homo sapien
caccttcacgtacaagtaacacggg

SEQ ID NO: 3239361 - DNA, 25 bp, Homo sapien
actcaggcactgacaccttcacgta

SEQ ID NO: 3239362 - DNA, 25 bp, Homo sapien
tggtgtgagtatcagcagcactagc

SEQ ID NO: 3239363 - DNA, 25 bp, Homo sapien
tgtgtgtttgcaggacgggatcccc

SEQ ID NO: 3239364 - DNA, 25 bp, Homo sapien
cagtggccactgctacgaaaagaga

SEQ ID NO: 3239365 - DNA, 25 bp, Homo sapien
tcaacgggacttcgcatgagtgtgc

SEQ ID NO: 3239366 - DNA, 25 bp, Homo sapien
catcgtgtgaaaagagccatgttgc

SEQ ID NO: 3239367 - DNA, 25 bp, Homo sapien
tttgcactcgtagcagcacctgagc

SEQ ID NO: 3239368 - DNA, 25 bp, Homo sapien
ttttggacataacagagtgggatct

SEQ ID NO: 3239369 - DNA, 25 bp, Homo sapien
tgggtatgactcatgatacaaaaac

SEQ ID NO: 3239370 - DNA, 25 bp, Homo sapien
gccaatgttggaacagtatgttata

SEQ ID NO: 3239371 - DNA, 25 bp, Homo sapien
tgtgtcctgtcaactgctacccctg

SEQ ID NO: 3239372 - DNA, 25 bp, Homo sapien
tgtcaactgctacccctggcatctg

SEQ ID NO: 3239373 - DNA, 25 bp, Homo sapien
caactgctacccctggcatctggga

SEQ ID NO: 3239374 - DNA, 25 bp, Homo sapien
tggcatctgggaggcaccagcttct

SEQ ID NO: 3239375 - DNA, 25 bp, Homo sapien
tctagagatcttgatttcataaaac

SEQ ID NO: 3239376 - DNA, 25 bp, Homo sapien
gttttagtatcgaaatattgacttc

SEQ ID NO: 3239377 - DNA, 25 bp, Homo sapien
aagtatcttgagcttttgccacatt

SEQ ID NO: 3239378 - DNA, 25 bp, Homo sapien
cttttgccacattgacggtccattc

SEQ ID NO: 3239379 - DNA, 25 bp, Homo sapien
tatcgaaatattgacttccaaaagt

SEQ ID NO: 3239380 - DNA, 25 bp, Homo sapien
aatgacacctcttctatccacagca

SEQ ID NO: 3239381 - DNA, 25 bp, Homo sapien
cactggaatgacacctcttctatcc

SEQ ID NO: 3239382 - DNA, 25 bp, Homo sapien
ggccacactggaatgacacctcttc

SEQ ID NO: 3239383 - DNA, 25 bp, Homo sapien
ctccggccacactggaatgacacct

SEQ ID NO: 3239384 - DNA, 25 bp, Homo sapien
taataatgcgttctgtgtagggcta

SEQ ID NO: 3239385 - DNA, 25 bp, Homo sapien
gattgtgaattgaattttaagtgga

SEQ ID NO: 3239386 - DNA, 25 bp, Homo sapien
tagggctatgtagtgtgcaaagttc

SEQ ID NO: 3239387 - DNA, 25 bp, Homo sapien
cagccttagctggtgattgtgaatt

SEQ ID NO: 3239388 - DNA, 25 bp, Homo sapien
ctctgtttattgacgaagaaaacct

SEQ ID NO: 3239389 - DNA, 25 bp, Homo sapien
aagaggcattccttgacctctgttt

SEQ ID NO: 3239390 - DNA, 25 bp, Homo sapien
gacacttaactttgaccagactcca

SEQ ID NO: 3239391 - DNA, 25 bp, Homo sapien
tgtccacaagtgggacacttaactt

SEQ ID NO: 3239392 - DNA, 25 bp, Homo sapien
aatggatccttcgtgagagctccag

SEQ ID NO: 3239393 - DNA, 25 bp, Homo sapien
cacgcttagattgcacagtggtcaa

SEQ ID NO: 3239394 - DNA, 25 bp, Homo sapien
gcacagtggtcaaatggatccttcg

SEQ ID NO: 3239395 - DNA, 25 bp, Homo sapien
tcacactctcctcacgcttagattg

SEQ ID NO: 3239396 - DNA, 25 bp, Homo sapien
gtctgagacatgttcagtattagca

SEQ ID NO: 3239397 - DNA, 25 bp, Homo sapien
ctgagacatgttcagtattagcaga

SEQ ID NO: 3239398 - DNA, 25 bp, Homo sapien
tccctgtctccggtggcgtagtctg

SEQ ID NO: 3239399 - DNA, 25 bp, Homo sapien
tccggtggcgtagtctgagacatgt

SEQ ID NO: 3239400 - DNA, 25 bp, Homo sapien
tcaacaggacgaatgtgactgggtc

SEQ ID NO: 3239401 - DNA, 25 bp, Homo sapien
tgactgggtcatgtattgtaagaac

SEQ ID NO: 3239402 - DNA, 25 bp, Homo sapien
ggtttccgattctcagctgatctag

SEQ ID NO: 3239403 - DNA, 25 bp, Homo sapien
tctgagttagtgagagtcctcaaca

SEQ ID NO: 3239404 - DNA, 25 bp, Homo sapien
ggtgggcgttcaggccaaccagggc

SEQ ID NO: 3239405 - DNA, 25 bp, Homo sapien
tgctggtggtggactagagacccat

SEQ ID NO: 3239406 - DNA, 25 bp, Homo sapien
actgagatctgcacgcgaagaggtc

SEQ ID NO: 3239407 - DNA, 25 bp, Homo sapien
gacccataatgctaacgaggcgttg

SEQ ID NO: 3239408 - DNA, 25 bp, Homo sapien
aagaggtcatcttaggccttccgag

SEQ ID NO: 3239409 - DNA, 25 bp, Homo sapien
aggcacagctcagacggcaaccaac

SEQ ID NO: 3239410 - DNA, 25 bp, Homo sapien
ctcagacggcaaccaacccggtggt

SEQ ID NO: 3239411 - DNA, 25 bp, Homo sapien
cggtgacgaggaggcacagctcaga

SEQ ID NO: 3239412 - DNA, 25 bp, Homo sapien
ccaggcatagcggtggcggtgacga

SEQ ID NO: 3239413 - DNA, 25 bp, Homo sapien
tggcctcaaagttgggagccacgtc

SEQ ID NO: 3239414 - DNA, 25 bp, Homo sapien
ggcctcaaagttgggagccacgtcc

SEQ ID NO: 3239415 - DNA, 25 bp, Homo sapien
ttggcctcaaagttgggagccacgt

SEQ ID NO: 3239416 - DNA, 25 bp, Homo sapien
agtgagtttcccagaaagtcctgga

SEQ ID NO: 3239417 - DNA, 25 bp, Homo sapien
gagaagagaatgcccagtgagtttc

SEQ ID NO: 3239418 - DNA, 25 bp, Homo sapien
gcaaattccggtgccagttttgcag

SEQ ID NO: 3239419 - DNA, 25 bp, Homo sapien
gctctgccaagctctgtggtgcaca

SEQ ID NO: 3239420 - DNA, 25 bp, Homo sapien
gctccaggcaagacggtcctcaaca

SEQ ID NO: 3239421 - DNA, 25 bp, Homo sapien
cttgctccaggcaagacggtcctca

SEQ ID NO: 3239422 - DNA, 25 bp, Homo sapien
tccaggcaagacggtcctcaacacg

SEQ ID NO: 3239423 - DNA, 25 bp, Homo sapien
caggcaagacggtcctcaacacggt

SEQ ID NO: 3239424 - DNA, 25 bp, Homo sapien
gattcttcaccattgtaagcattga

SEQ ID NO: 3239425 - DNA, 25 bp, Homo sapien
ggtcccgattcttatcatggatgat

SEQ ID NO: 3239426 - DNA, 25 bp, Homo sapien
tctgtggattcttcaccattgtaag

SEQ ID NO: 3239427 - DNA, 25 bp, Homo sapien
caggatgaaaaggtcccgattctta

SEQ ID NO: 3239428 - DNA, 25 bp, Homo sapien
ctgtcacaggcatgtccttttcatc

SEQ ID NO: 3239429 - DNA, 25 bp, Homo sapien
catccttctccgctggatccagcat

SEQ ID NO: 3239430 - DNA, 25 bp, Homo sapien
cacaggcatgtccttttcatccttc

SEQ ID NO: 3239431 - DNA, 25 bp, Homo sapien
cacacgagctgtcacaggcatgtcc

SEQ ID NO: 3239432 - DNA, 25 bp, Homo sapien
ccaggtagatgatagacagcttcgg

SEQ ID NO: 3239433 - DNA, 25 bp, Homo sapien
aggtagatgatagacagcttcggct

SEQ ID NO: 3239434 - DNA, 25 bp, Homo sapien
gccaggtagatgatagacagcttcg

SEQ ID NO: 3239435 - DNA, 25 bp, Homo sapien
caggtagatgatagacagcttcggc

SEQ ID NO: 3239436 - DNA, 25 bp, Homo sapien
tcctcttcaggaatcactggaagga

SEQ ID NO: 3239437 - DNA, 25 bp, Homo sapien
cttcaggaatcactggaaggaccat

SEQ ID NO: 3239438 - DNA, 25 bp, Homo sapien
gcagcggatgtcctctggctcacag

SEQ ID NO: 3239439 - DNA, 25 bp, Homo sapien
aacatgattggcagcggatgtcctc

SEQ ID NO: 3239440 - DNA, 25 bp, Homo sapien
aagcctccgttgctgctgccgactt

SEQ ID NO: 3239441 - DNA, 25 bp, Homo sapien
gactttccactcaagcccacgctgt

SEQ ID NO: 3239442 - DNA, 25 bp, Homo sapien
tcaagcccacgctgtcaacctgggt

SEQ ID NO: 3239443 - DNA, 25 bp, Homo sapien
cgctgtcaacctgggtggacttgca

SEQ ID NO: 3239444 - DNA, 25 bp, Homo sapien
ctgtctgccctgtatccccgataag

SEQ ID NO: 3239445 - DNA, 25 bp, Homo sapien
caggaggtaattgtgcaccactgta

SEQ ID NO: 3239446 - DNA, 25 bp, Homo sapien
gataagccaatcctcatgcaggcag

SEQ ID NO: 3239447 - DNA, 25 bp, Homo sapien
caaagtggccttttcagacacgctc

SEQ ID NO: 3239448 - DNA, 25 bp, Homo sapien
aagcactctgctatttccaatgcca

SEQ ID NO: 3239449 - DNA, 25 bp, Homo sapien
cctgttaccgcgaagcactctgcta

SEQ ID NO: 3239450 - DNA, 25 bp, Homo sapien
taccgcgaagcactctgctatttcc

SEQ ID NO: 3239451 - DNA, 25 bp, Homo sapien
agcactctgctatttccaatgccac

SEQ ID NO: 3239452 - DNA, 25 bp, Homo sapien
tttgcctagtgtgctggtggtcagc

SEQ ID NO: 3239453 - DNA, 25 bp, Homo sapien
ttcagctcagcgatggttaggtctg

SEQ ID NO: 3239454 - DNA, 25 bp, Homo sapien
tagtgtgctggtggtcagctattca

SEQ ID NO: 3239455 - DNA, 25 bp, Homo sapien
ttaggtctgaattcccaagggaggc

SEQ ID NO: 3239456 - DNA, 25 bp, Homo sapien
cactactagagtgaaggcctcttct

SEQ ID NO: 3239457 - DNA, 25 bp, Homo sapien
gcactactagagtgaaggcctcttc

SEQ ID NO: 3239458 - DNA, 25 bp, Homo sapien
actactagagtgaaggcctcttctg

SEQ ID NO: 3239459 - DNA, 25 bp, Homo sapien
tactagagtgaaggcctcttctgtt

SEQ ID NO: 3239460 - DNA, 25 bp, Homo sapien
cctattgttttcttatgtaatactg

SEQ ID NO: 3239461 - DNA, 25 bp, Homo sapien
actagggtggtaagtggcagttggt

SEQ ID NO: 3239462 - DNA, 25 bp, Homo sapien
ctagggtggtaagtggcagttggtt

SEQ ID NO: 3239463 - DNA, 25 bp, Homo sapien
ggcagttggttaaaagcctgaaggc

SEQ ID NO: 3239464 - DNA, 25 bp, Homo sapien
ttggttaaaagcctgaaggcggtga

SEQ ID NO: 3239465 - DNA, 25 bp, Homo sapien
tatatcaaccacctccaggcagtag

SEQ ID NO: 3239466 - DNA, 25 bp, Homo sapien
ccaggatatatcaaccacctccagg

SEQ ID NO: 3239467 - DNA, 25 bp, Homo sapien
tatcaaccacctccaggcagtagtg

SEQ ID NO: 3239468 - DNA, 25 bp, Homo sapien
gatatatcaaccacctccaggcagt

SEQ ID NO: 3239469 - DNA, 25 bp, Homo sapien
gagggccaggctcatagcacacata

SEQ ID NO: 3239470 - DNA, 25 bp, Homo sapien
aggtcttggcttgacttgccttgcc

SEQ ID NO: 3239471 - DNA, 25 bp, Homo sapien
ccacaccgcgctgacaggttctatt

SEQ ID NO: 3239472 - DNA, 25 bp, Homo sapien
tctatttccgcctgcaggtcttggc

SEQ ID NO: 3239473 - DNA, 25 bp, Homo sapien
cactctgaggacaagcgattgcgct

SEQ ID NO: 3239474 - DNA, 25 bp, Homo sapien
catgtactcagaatactcaagcgaa

SEQ ID NO: 3239475 - DNA, 25 bp, Homo sapien
tcaagggagcttgcttcgaaaacct

SEQ ID NO: 3239476 - DNA, 25 bp, Homo sapien
gacgcattctatgtaacagtctgag

SEQ ID NO: 3239477 - DNA, 25 bp, Homo sapien
cgtgcgtacgcaaattaaagtccag

SEQ ID NO: 3239478 - DNA, 25 bp, Homo sapien
tccagtatgaaccaggaaatgtctc

SEQ ID NO: 3239479 - DNA, 25 bp, Homo sapien
cttcaaaagtgcaccgaaacggctt

SEQ ID NO: 3239480 - DNA, 25 bp, Homo sapien
tgcagccttgaaagggacacacgaa

SEQ ID NO: 3239481 - DNA, 25 bp, Homo sapien
tttgcatgcgttaggatgtgggctt

SEQ ID NO: 3239482 - DNA, 25 bp, Homo sapien
tcgtatttgcatgcgttaggatgtg

SEQ ID NO: 3239483 - DNA, 25 bp, Homo sapien
ttgttcattcttgttcgtatttgca

SEQ ID NO: 3239484 - DNA, 25 bp, Homo sapien
tcttgttcgtatttgcatgcgttag

SEQ ID NO: 3239485 - DNA, 25 bp, Homo sapien
gttggaagcacactttaagaacaca

SEQ ID NO: 3239486 - DNA, 25 bp, Homo sapien
aaaatgcaccatgtccttaaaacgg

SEQ ID NO: 3239487 - DNA, 25 bp, Homo sapien
gaacacaggcgtatgcaaccaggcc

SEQ ID NO: 3239488 - DNA, 25 bp, Homo sapien
cggtatcacaaagtgtaggagcatc

SEQ ID NO: 3239489 - DNA, 25 bp, Homo sapien
tattgctcgaatagactcctgtagt

SEQ ID NO: 3239490 - DNA, 25 bp, Homo sapien
aagtctcacttacagtcattaggca

SEQ ID NO: 3239491 - DNA, 25 bp, Homo sapien
ccagatgtggaattggtgatcaaag

SEQ ID NO: 3239492 - DNA, 25 bp, Homo sapien
gacaagtgtccggagagtatctcca

SEQ ID NO: 3239493 - DNA, 25 bp, Homo sapien
ccggggcgcggaccaagaactgcat

SEQ ID NO: 3239494 - DNA, 25 bp, Homo sapien
cggtcacctggagggcgtgtagctc

SEQ ID NO: 3239495 - DNA, 25 bp, Homo sapien
tagctccggggcgcggaccaagaac

SEQ ID NO: 3239496 - DNA, 25 bp, Homo sapien
cacctggagggcgtgtagctccggg

SEQ ID NO: 3239497 - DNA, 25 bp, Homo sapien
ctgtcactttcccagcgcgggccgg

SEQ ID NO: 3239498 - DNA, 25 bp, Homo sapien
tgtcactttcccagcgcgggccggg

SEQ ID NO: 3239499 - DNA, 25 bp, Homo sapien
tcactttcccagcgcgggccgggga

SEQ ID NO: 3239500 - DNA, 25 bp, Homo sapien
ggtggtaccgcacccgcggctcagc

SEQ ID NO: 3239501 - DNA, 25 bp, Homo sapien
tcgacaaagcgccggtggtaccgca

SEQ ID NO: 3239502 - DNA, 25 bp, Homo sapien
gacaaagcgccggtggtaccgcacc

SEQ ID NO: 3239503 - DNA, 25 bp, Homo sapien
cgtcgacaaagcgccggtggtaccg

SEQ ID NO: 3239504 - DNA, 25 bp, Homo sapien
aaaaggccacggagaacaagaccag

SEQ ID NO: 3239505 - DNA, 25 bp, Homo sapien
gggagaccagaactcaaccttgaag

SEQ ID NO: 3239506 - DNA, 25 bp, Homo sapien
cttgaagcaccccaagattgagagg

SEQ ID NO: 3239507 - DNA, 25 bp, Homo sapien
taagattacctagggagagaccagg

SEQ ID NO: 3239508 - DNA, 25 bp, Homo sapien
tcctgccgcagatttggtccaaagt

SEQ ID NO: 3239509 - DNA, 25 bp, Homo sapien
cagaagccgagagtatgccagcctg

SEQ ID NO: 3239510 - DNA, 25 bp, Homo sapien
tgcccggctgggatacgactgttat

SEQ ID NO: 3239511 - DNA, 25 bp, Homo sapien
acagccttgtttggcaccagccata

SEQ ID NO: 3239512 - DNA, 25 bp, Homo sapien
gagacttatctctgtgaaaagcaca

SEQ ID NO: 3239513 - DNA, 25 bp, Homo sapien
aaaagcacacatgctagaggctgag

SEQ ID NO: 3239514 - DNA, 25 bp, Homo sapien
gaactcctgtatactgggctcctca

SEQ ID NO: 3239515 - DNA, 25 bp, Homo sapien
cactgtggaaccatgtgagcatgtg

SEQ ID NO: 3239516 - DNA, 25 bp, Homo sapien
cagttttgagtaacacgcgggtgac

SEQ ID NO: 3239517 - DNA, 25 bp, Homo sapien
tgccgtcctacagttttgagtaaca

SEQ ID NO: 3239518 - DNA, 25 bp, Homo sapien
cgcgggtgacctgttcctatgttgt

SEQ ID NO: 3239519 - DNA, 25 bp, Homo sapien
tttctcgaggctggatatgcagcca

SEQ ID NO: 3239520 - DNA, 25 bp, Homo sapien
tgctcgtcatcggagagcgccttgg

SEQ ID NO: 3239521 - DNA, 25 bp, Homo sapien
tttgactggaaatgcgggccctcca

SEQ ID NO: 3239522 - DNA, 25 bp, Homo sapien
atggctctgggctacgaaggcgctt

SEQ ID NO: 3239523 - DNA, 25 bp, Homo sapien
ggagagatgcactctgtttgcacca

SEQ ID NO: 3239524 - DNA, 25 bp, Homo sapien
tctccttacacgcaaaagattcagg

SEQ ID NO: 3239525 - DNA, 25 bp, Homo sapien
cttcctttctccttacacgcaaaag

SEQ ID NO: 3239526 - DNA, 25 bp, Homo sapien
tttctccttacacgcaaaagattca

SEQ ID NO: 3239527 - DNA, 25 bp, Homo sapien
tcctttctccttacacgcaaaagat

SEQ ID NO: 3239528 - DNA, 25 bp, Homo sapien
gtattctgacacaacaacctgttta

SEQ ID NO: 3239529 - DNA, 25 bp, Homo sapien
gacacaacaacctgtttacaagtct

SEQ ID NO: 3239530 - DNA, 25 bp, Homo sapien
cacaacaacctgtttacaagtcttt

SEQ ID NO: 3239531 - DNA, 25 bp, Homo sapien
caacaacctgtttacaagtctttgt

SEQ ID NO: 3239532 - DNA, 25 bp, Homo sapien
ctcaagagattcgaaagccgagctt

SEQ ID NO: 3239533 - DNA, 25 bp, Homo sapien
cagtttgatctcattgttcctcagc

SEQ ID NO: 3239534 - DNA, 25 bp, Homo sapien
ttgacttgaggactcaatctgtgcg

SEQ ID NO: 3239535 - DNA, 25 bp, Homo sapien
aatctgtgcgatcattttgcttagg

SEQ ID NO: 3239536 - DNA, 25 bp, Homo sapien
agcacaccatgagtgggagcacaga

SEQ ID NO: 3239537 - DNA, 25 bp, Homo sapien
aagcacaccatgagtgggagcacag

SEQ ID NO: 3239538 - DNA, 25 bp, Homo sapien
tgaagcacaccatgagtgggagcac

SEQ ID NO: 3239539 - DNA, 25 bp, Homo sapien
gaagcacaccatgagtgggagcaca

SEQ ID NO: 3239540 - DNA, 25 bp, Homo sapien
atggtgcgctttgatcataacacag

SEQ ID NO: 3239541 - DNA, 25 bp, Homo sapien
agaaagaagttagcatggtgcgctt

SEQ ID NO: 3239542 - DNA, 25 bp, Homo sapien
gatcataacacagacgaaattcatt

SEQ ID NO: 3239543 - DNA, 25 bp, Homo sapien
aagttagcatggtgcgctttgatca

SEQ ID NO: 3239544 - DNA, 25 bp, Homo sapien
cccgtgatgcggcacagactcagct

SEQ ID NO: 3239545 - DNA, 25 bp, Homo sapien
tcccgtgatgcggcacagactcagc

SEQ ID NO: 3239546 - DNA, 25 bp, Homo sapien
ctgaattttcttagcatctccttca

SEQ ID NO: 3239547 - DNA, 25 bp, Homo sapien
gctgaattttcttagcatctccttc

SEQ ID NO: 3239548 - DNA, 25 bp, Homo sapien
tgctgaattttcttagcatctcctt

SEQ ID NO: 3239549 - DNA, 25 bp, Homo sapien
tgaattttcttagcatctccttcat

SEQ ID NO: 3239550 - DNA, 25 bp, Homo sapien
tggagcattctacaaggacagttcg

SEQ ID NO: 3239551 - DNA, 25 bp, Homo sapien
aagtcagctttcatcctaacgggat

SEQ ID NO: 3239552 - DNA, 25 bp, Homo sapien
ggacagttcgttgaatgcaccctca

SEQ ID NO: 3239553 - DNA, 25 bp, Homo sapien
gttggctggactaaacatctggagc

SEQ ID NO: 3239554 - DNA, 25 bp, Homo sapien
aggaggaaagaagagatttcccttg

SEQ ID NO: 3239555 - DNA, 25 bp, Homo sapien
gaaagaagagatttcccttgggcat

SEQ ID NO: 3239556 - DNA, 25 bp, Homo sapien
ctgcaagaggaggaaagaagagatt

SEQ ID NO: 3239557 - DNA, 25 bp, Homo sapien
caagaggaggaaagaagagatttcc

SEQ ID NO: 3239558 - DNA, 25 bp, Homo sapien
tccgacaacacgagataggcattag

SEQ ID NO: 3239559 - DNA, 25 bp, Homo sapien
ttcaaaggtgacgagacccagaggc

SEQ ID NO: 3239560 - DNA, 25 bp, Homo sapien
cacagagtccttgcagatgcccact

SEQ ID NO: 3239561 - DNA, 25 bp, Homo sapien
tattagtgagaacaggtccccaggt

SEQ ID NO: 3239562 - DNA, 25 bp, Homo sapien
gatgccttcatcgtcttaatagttg

SEQ ID NO: 3239563 - DNA, 25 bp, Homo sapien
ttacgggagtttatttcagatcacc

SEQ ID NO: 3239564 - DNA, 25 bp, Homo sapien
ttggtctcagacatcgcccgctgtg

SEQ ID NO: 3239565 - DNA, 25 bp, Homo sapien
tctggcctatggcagtaggattcat

SEQ ID NO: 3239566 - DNA, 25 bp, Homo sapien
gtttcctttctgagaagcgagacaa

SEQ ID NO: 3239567 - DNA, 25 bp, Homo sapien
aaagcagcatggactctccgattcg

SEQ ID NO: 3239568 - DNA, 25 bp, Homo sapien
gaactaggatgtgtgtaaaagcagc

SEQ ID NO: 3239569 - DNA, 25 bp, Homo sapien
caggatgtaaccagcgccagataag

SEQ ID NO: 3239570 - DNA, 25 bp, Homo sapien
tgtgaggttttagtgcagctgctgc

SEQ ID NO: 3239571 - DNA, 25 bp, Homo sapien
cattttcgcagacacctggaccgga

SEQ ID NO: 3239572 - DNA, 25 bp, Homo sapien
tcaaagcatttttcccgtcaagcag

SEQ ID NO: 3239573 - DNA, 25 bp, Homo sapien
aatgtgctctcctcttagcgcttgg

SEQ ID NO: 3239574 - DNA, 25 bp, Homo sapien
ggagcgggaggaccaaattcacact

SEQ ID NO: 3239575 - DNA, 25 bp, Homo sapien
tcacattgatcaggcacaagttcct

SEQ ID NO: 3239576 - DNA, 25 bp, Homo sapien
ataggaccctggagtgaagctgagc

SEQ ID NO: 3239577 - DNA, 25 bp, Homo sapien
tcttgggcatcaggaaaaagtggtc

SEQ ID NO: 3239578 - DNA, 25 bp, Homo sapien
agcaggtcccgatctggggctcaag

SEQ ID NO: 3239579 - DNA, 25 bp, Homo sapien
agcttggagggaccgcctcgacagc

SEQ ID NO: 3239580 - DNA, 25 bp, Homo sapien
gcgacaacagcaacgcaatcagctt

SEQ ID NO: 3239581 - DNA, 25 bp, Homo sapien
gagaaatatgaaagagcagcgacaa

SEQ ID NO: 3239582 - DNA, 25 bp, Homo sapien
cactggatccatgggtgccctggat

SEQ ID NO: 3239583 - DNA, 25 bp, Homo sapien
gatttgcgaacaggcgaatgaacac

SEQ ID NO: 3239584 - DNA, 25 bp, Homo sapien
actcatcgttatgtgggagaggcca

SEQ ID NO: 3239585 - DNA, 25 bp, Homo sapien
ggtaacatattatcacactcatcgt

SEQ ID NO: 3239586 - DNA, 25 bp, Homo sapien
ctgcaccagctgaagctccggttcg

SEQ ID NO: 3239587 - DNA, 25 bp, Homo sapien
aatggctgacaagtggtgatggcac

SEQ ID NO: 3239588 - DNA, 25 bp, Homo sapien
tgctgactcggtgctggtcaggtct

SEQ ID NO: 3239589 - DNA, 25 bp, Homo sapien
gctagcccagaagatgtagagggaa

SEQ ID NO: 3239590 - DNA, 25 bp, Homo sapien
gtaacaacctgaattctcttgtacg

SEQ ID NO: 3239591 - DNA, 25 bp, Homo sapien
gacatctaactttgtaacaacctga

SEQ ID NO: 3239592 - DNA, 25 bp, Homo sapien
tttatagacatctaactttgtaaca

SEQ ID NO: 3239593 - DNA, 25 bp, Homo sapien
tagacatctaactttgtaacaacct

SEQ ID NO: 3239594 - DNA, 25 bp, Homo sapien
ttttgtgtaagcactgacgaactgg

SEQ ID NO: 3239595 - DNA, 25 bp, Homo sapien
ttgtgtaagcactgacgaactggca

SEQ ID NO: 3239596 - DNA, 25 bp, Homo sapien
tgtaagcactgacgaactggcagta

SEQ ID NO: 3239597 - DNA, 25 bp, Homo sapien
taagcactgacgaactggcagtaca

SEQ ID NO: 3239598 - DNA, 25 bp, Homo sapien
cctcagcacaaatcttgtatcgatg

SEQ ID NO: 3239599 - DNA, 25 bp, Homo sapien
tagtgcatgattaggtcctggaaga

SEQ ID NO: 3239600 - DNA, 25 bp, Homo sapien
gtatcgatgatcacggaaataccct

SEQ ID NO: 3239601 - DNA, 25 bp, Homo sapien
tattattgacctctgaaatctgcat

SEQ ID NO: 3239602 - DNA, 25 bp, Homo sapien
ccaggaagatgggagttacatgagt

SEQ ID NO: 3239603 - DNA, 25 bp, Homo sapien
cagttctgggaaaatagattctcaa

SEQ ID NO: 3239604 - DNA, 25 bp, Homo sapien
tacaagatatctgccctctatcgga

SEQ ID NO: 3239605 - DNA, 25 bp, Homo sapien
agatggtatattttagtgggccagg

SEQ ID NO: 3239606 - DNA, 25 bp, Homo sapien
gagtaaatcaacagggtaatgcccc

SEQ ID NO: 3239607 - DNA, 25 bp, Homo sapien
aatgccccttgtaggttctgccacc

SEQ ID NO: 3239608 - DNA, 25 bp, Homo sapien
tcacctgtttcctgcgatgaagcca

SEQ ID NO: 3239609 - DNA, 25 bp, Homo sapien
acccaacaatggctgtcctgtttcc

SEQ ID NO: 3239610 - DNA, 25 bp, Homo sapien
gtcatcggtgcccagtaaaatttcc

SEQ ID NO: 3239611 - DNA, 25 bp, Homo sapien
tgagtcatcggtgcccagtaaaatt

SEQ ID NO: 3239612 - DNA, 25 bp, Homo sapien
catcggtgcccagtaaaatttccca

SEQ ID NO: 3239613 - DNA, 25 bp, Homo sapien
ttatgagtcatcggtgcccagtaaa

SEQ ID NO: 3239614 - DNA, 25 bp, Homo sapien
gcacgggcagatggggccggcggca

SEQ ID NO: 3239615 - DNA, 25 bp, Homo sapien
gggctgcgtgaaggcctcgtccgtg

SEQ ID NO: 3239616 - DNA, 25 bp, Homo sapien
tgaaggcctcgtccgtgtcgggcac

SEQ ID NO: 3239617 - DNA, 25 bp, Homo sapien
ctgcgtgaaggcctcgtccgtgtcg

SEQ ID NO: 3239618 - DNA, 25 bp, Homo sapien
tgattggataaaccttaaagctcat

SEQ ID NO: 3239619 - DNA, 25 bp, Homo sapien
gcagggtatcaagcccaaagagaaa

SEQ ID NO: 3239620 - DNA, 25 bp, Homo sapien
tggcattcgtattcctccagcatcc

SEQ ID NO: 3239621 - DNA, 25 bp, Homo sapien
tccttgtacatcagacgcagggtat

SEQ ID NO: 3239622 - DNA, 25 bp, Homo sapien
ggcagaaccatttcatctgtcgaag

SEQ ID NO: 3239623 - DNA, 25 bp, Homo sapien
gctataatgaagtccctctcagctc

SEQ ID NO: 3239624 - DNA, 25 bp, Homo sapien
tcataacaacgtgggcacagttcct

SEQ ID NO: 3239625 - DNA, 25 bp, Homo sapien
cagctctcttaatgaccatgaaatg

SEQ ID NO: 3239626 - DNA, 25 bp, Homo sapien
gaaaaacagaatggtcgcagtatgg

SEQ ID NO: 3239627 - DNA, 25 bp, Homo sapien
aaagttcatgtagcaccctatgtgg

SEQ ID NO: 3239628 - DNA, 25 bp, Homo sapien
tattcatagacctacaccttggccc

SEQ ID NO: 3239629 - DNA, 25 bp, Homo sapien
ccttggcccctgaactatgtatttc

SEQ ID NO: 3239630 - DNA, 25 bp, Homo sapien
ctttcaatgcactggccatggaggc

SEQ ID NO: 3239631 - DNA, 25 bp, Homo sapien
tttgtcaaatccagttccagccagc

SEQ ID NO: 3239632 - DNA, 25 bp, Homo sapien
tataatcagccaaaggtccaccagc

SEQ ID NO: 3239633 - DNA, 25 bp, Homo sapien
cttttgctgcatacacggaggtttg

SEQ ID NO: 3239634 - DNA, 25 bp, Homo sapien
gcgtcccaggagtatggcaatggta

SEQ ID NO: 3239635 - DNA, 25 bp, Homo sapien
tctgtttgggtaaagagccaccact

SEQ ID NO: 3239636 - DNA, 25 bp, Homo sapien
tattatcctgtcactgcgtcccagg

SEQ ID NO: 3239637 - DNA, 25 bp, Homo sapien
cagacagaccatagggaatattgcc

SEQ ID NO: 3239638 - DNA, 25 bp, Homo sapien
tccctgcagatcagggactacccaa

SEQ ID NO: 3239639 - DNA, 25 bp, Homo sapien
ttgtgagctgattccctgcagatca

SEQ ID NO: 3239640 - DNA, 25 bp, Homo sapien
tgttggccactcctttgtgagctga

SEQ ID NO: 3239641 - DNA, 25 bp, Homo sapien
gatcagggactacccaaacagcaaa

SEQ ID NO: 3239642 - DNA, 25 bp, Homo sapien
tgtgttcattataagaaccaaagtg

SEQ ID NO: 3239643 - DNA, 25 bp, Homo sapien
ttgttgtgtgagaaagcaactgatt

SEQ ID NO: 3239644 - DNA, 25 bp, Homo sapien
gacgaatcatcttgtgttccagaca

SEQ ID NO: 3239645 - DNA, 25 bp, Homo sapien
ccagacactagggatgttttaatga

SEQ ID NO: 3239646 - DNA, 25 bp, Homo sapien
tgctgctgatgtcagcatctttcca

SEQ ID NO: 3239647 - DNA, 25 bp, Homo sapien
ctgatgtcagcatctttccacgtgt

SEQ ID NO: 3239648 - DNA, 25 bp, Homo sapien
ctgctgatgtcagcatctttccacg

SEQ ID NO: 3239649 - DNA, 25 bp, Homo sapien
cagtgaatctgctgctgatgtcagc

SEQ ID NO: 3239650 - DNA, 25 bp, Homo sapien
aattctatcctaggcagttgctgta

SEQ ID NO: 3239651 - DNA, 25 bp, Homo sapien
cctttgtggagcctcaattctatcc

SEQ ID NO: 3239652 - DNA, 25 bp, Homo sapien
agaacacctttgtggagcctcaatt

SEQ ID NO: 3239653 - DNA, 25 bp, Homo sapien
ggagcctcaattctatcctaggcag

SEQ ID NO: 3239654 - DNA, 25 bp, Homo sapien
tacgcgggtttcctggaaggctctc

SEQ ID NO: 3239655 - DNA, 25 bp, Homo sapien
gagcctgatgtacgcgggtttcctg

SEQ ID NO: 3239656 - DNA, 25 bp, Homo sapien
aacgggaggagcctgatgtacgcgg

SEQ ID NO: 3239657 - DNA, 25 bp, Homo sapien
atgtacgcgggtttcctggaaggct

SEQ ID NO: 3239658 - DNA, 25 bp, Homo sapien
ataaaggggagcattggggggtgtg

SEQ ID NO: 3239659 - DNA, 25 bp, Homo sapien
caggataaaggggagcattgggggg

SEQ ID NO: 3239660 - DNA, 25 bp, Homo sapien
gagctagggagaagcctgagagcac

SEQ ID NO: 3239661 - DNA, 25 bp, Homo sapien
gggtgagcagggagagctagggaga

SEQ ID NO: 3239662 - DNA, 25 bp, Homo sapien
tatttaattcactcttaagcatggg

SEQ ID NO: 3239663 - DNA, 25 bp, Homo sapien
cactcttaagcatggggtgagcagg

SEQ ID NO: 3239664 - DNA, 25 bp, Homo sapien
tggggcgcagaggaaaatgtctcat

SEQ ID NO: 3239665 - DNA, 25 bp, Homo sapien
ggcgcagaggaaaatgtctcattag

SEQ ID NO: 3239666 - DNA, 25 bp, Homo sapien
gggcgcagaggaaaatgtctcatta

SEQ ID NO: 3239667 - DNA, 25 bp, Homo sapien
ctggggcgcagaggaaaatgtctca

SEQ ID NO: 3239668 - DNA, 25 bp, Homo sapien
aacgaaggaaagctccggtgaagct

SEQ ID NO: 3239669 - DNA, 25 bp, Homo sapien
aagtacgaggacagtagaagtaggt

SEQ ID NO: 3239670 - DNA, 25 bp, Homo sapien
cgaaggaaagctccggtgaagctga

SEQ ID NO: 3239671 - DNA, 25 bp, Homo sapien
gctgaagtacgaggacagtagaagt

SEQ ID NO: 3239672 - DNA, 25 bp, Homo sapien
tcaagcaggtgctgcgccgctaagc

SEQ ID NO: 3239673 - DNA, 25 bp, Homo sapien
gaggatggccaagggttcgtatgga

SEQ ID NO: 3239674 - DNA, 25 bp, Homo sapien
ttcgtatggaagagaaatggccttc

SEQ ID NO: 3239675 - DNA, 25 bp, Homo sapien
tgcagggacccgctcagcacaggca

SEQ ID NO: 3239676 - DNA, 25 bp, Homo sapien
catgttaatgccaaataatcccaga

SEQ ID NO: 3239677 - DNA, 25 bp, Homo sapien
ctgccatcaaacacactgtattcat

SEQ ID NO: 3239678 - DNA, 25 bp, Homo sapien
cacactgtattcatctggcccatgt

SEQ ID NO: 3239679 - DNA, 25 bp, Homo sapien
catctggcccatgttaatgccaaat

SEQ ID NO: 3239680 - DNA, 25 bp, Homo sapien
gaataggttgcccattgcaaggcca

SEQ ID NO: 3239681 - DNA, 25 bp, Homo sapien
tcactcacggtaggcacatgcaggt

SEQ ID NO: 3239682 - DNA, 25 bp, Homo sapien
tcctcttcagggtgagacctcggct

SEQ ID NO: 3239683 - DNA, 25 bp, Homo sapien
ccttgtgcatggaacaccagtttca

SEQ ID NO: 3239684 - DNA, 25 bp, Homo sapien
tacagtaaacccagctccactgaat

SEQ ID NO: 3239685 - DNA, 25 bp, Homo sapien
cacttcagtgaattctctataaata

SEQ ID NO: 3239686 - DNA, 25 bp, Homo sapien
tcattgataaccttcgttaacataa

SEQ ID NO: 3239687 - DNA, 25 bp, Homo sapien
gaggcatgagcttctcacctccttg

SEQ ID NO: 3239688 - DNA, 25 bp, Homo sapien
agtcctaggagagaggactaggtca

SEQ ID NO: 3239689 - DNA, 25 bp, Homo sapien
tgccactctttcctgactaccaggc

SEQ ID NO: 3239690 - DNA, 25 bp, Homo sapien
aggtgcctgattggctctcccttca

SEQ ID NO: 3239691 - DNA, 25 bp, Homo sapien
agaggactaggtcaaggctattcat

SEQ ID NO: 3239692 - DNA, 25 bp, Homo sapien
cttgaagaggattctcaggcgccga

SEQ ID NO: 3239693 - DNA, 25 bp, Homo sapien
aaggtgctcaccaaagggctacggg

SEQ ID NO: 3239694 - DNA, 25 bp, Homo sapien
tacctcttcagatgcatgcagcggg

SEQ ID NO: 3239695 - DNA, 25 bp, Homo sapien
gctacgggctacattcagcagagtg

SEQ ID NO: 3239696 - DNA, 25 bp, Homo sapien
ctgtactgaccacaaaacaaagccc

SEQ ID NO: 3239697 - DNA, 25 bp, Homo sapien
gaaagtattgttgtctctgtggacc

SEQ ID NO: 3239698 - DNA, 25 bp, Homo sapien
gaacaaaagagtattgaaagtattg

SEQ ID NO: 3239699 - DNA, 25 bp, Homo sapien
ttctaggcaattctgtgttgagctc

SEQ ID NO: 3239700 - DNA, 25 bp, Homo sapien
gaggcccgtcctagagggctcgcca

SEQ ID NO: 3239701 - DNA, 25 bp, Homo sapien
ggaggcacgggctgctactaatttc

SEQ ID NO: 3239702 - DNA, 25 bp, Homo sapien
taaagcccaatgtgagaggcccgtc

SEQ ID NO: 3239703 - DNA, 25 bp, Homo sapien
caccataaagcccaatgtgagaggc

SEQ ID NO: 3239704 - DNA, 25 bp, Homo sapien
gattgacagagacccgtacctgacg

SEQ ID NO: 3239705 - DNA, 25 bp, Homo sapien
caaagggcggagatgccttcaggtc

SEQ ID NO: 3239706 - DNA, 25 bp, Homo sapien
ttcaggtcgtgtgtagaaaccccag

SEQ ID NO: 3239707 - DNA, 25 bp, Homo sapien
tagtgaacctgagagcacagggtgt

SEQ ID NO: 3239708 - DNA, 25 bp, Homo sapien
tcagtcttgtggagtctcaacaggc

SEQ ID NO: 3239709 - DNA, 25 bp, Homo sapien
gtcttgtggagtctcaacaggctgc

SEQ ID NO: 3239710 - DNA, 25 bp, Homo sapien
tgtggagtctcaacaggctgcagct

SEQ ID NO: 3239711 - DNA, 25 bp, Homo sapien
tcttcagtcttgtggagtctcaaca

SEQ ID NO: 3239712 - DNA, 25 bp, Homo sapien
ggtggttctccgtgcgggcattcat

SEQ ID NO: 3239713 - DNA, 25 bp, Homo sapien
ccccagttgataatgggcgtgatca

SEQ ID NO: 3239714 - DNA, 25 bp, Homo sapien
cgtgatcattagagcgggagcagca

SEQ ID NO: 3239715 - DNA, 25 bp, Homo sapien
ttggtccatgtaatgcaaggacaag

SEQ ID NO: 3239716 - DNA, 25 bp, Homo sapien
tggaactgtgccaccttagagggaa

SEQ ID NO: 3239717 - DNA, 25 bp, Homo sapien
gggcttgcatccacttgtcactgtg

SEQ ID NO: 3239718 - DNA, 25 bp, Homo sapien
ccaggagtactggtggttacaaagc

SEQ ID NO: 3239719 - DNA, 25 bp, Homo sapien
gccaggagctcacactcctgataca

SEQ ID NO: 3239720 - DNA, 25 bp, Homo sapien
actgccggatgcagtgagcactgcc

SEQ ID NO: 3239721 - DNA, 25 bp, Homo sapien
tcgtaactgctgttcgtaacttcag

SEQ ID NO: 3239722 - DNA, 25 bp, Homo sapien
gtgtagccccaagtccacgcagctg

SEQ ID NO: 3239723 - DNA, 25 bp, Homo sapien
aaacaaccccaaagagcaatggtgt

SEQ ID NO: 3239724 - DNA, 25 bp, Homo sapien
ctgctgttcgtaacttcaggatgcc

SEQ ID NO: 3239725 - DNA, 25 bp, Homo sapien
tcacctgtgcttatgtaatcacagc

SEQ ID NO: 3239726 - DNA, 25 bp, Homo sapien
gcttttccccattcacctgtgctta

SEQ ID NO: 3239727 - DNA, 25 bp, Homo sapien
cttttccccattcacctgtgcttat

SEQ ID NO: 3239728 - DNA, 25 bp, Homo sapien
aataccagtggcaagaggcgtgcag

SEQ ID NO: 3239729 - DNA, 25 bp, Homo sapien
tgattccagatgtttgtacagactc

SEQ ID NO: 3239730 - DNA, 25 bp, Homo sapien
gggcaaaaccataggattgtccatc

SEQ ID NO: 3239731 - DNA, 25 bp, Homo sapien
gaaagcgcaggtggatttcctccat

SEQ ID NO: 3239732 - DNA, 25 bp, Homo sapien
gcgaatcgagcgtacttcctctgga

SEQ ID NO: 3239733 - DNA, 25 bp, Homo sapien
gagcgtacttcctctggacctaaca

SEQ ID NO: 3239734 - DNA, 25 bp, Homo sapien
ccccgagatcaagcgaatcgagcgt

SEQ ID NO: 3239735 - DNA, 25 bp, Homo sapien
ggacctaacagtctcatggcacacc

SEQ ID NO: 3239736 - DNA, 25 bp, Homo sapien
tcctccatctaactggaaactcatt

SEQ ID NO: 3239737 - DNA, 25 bp, Homo sapien
actggaaactcattgcgaagagaga

SEQ ID NO: 3239738 - DNA, 25 bp, Homo sapien
aactcattgcgaagagagagatttg

SEQ ID NO: 3239739 - DNA, 25 bp, Homo sapien
agagagagatttggatatccacctt

SEQ ID NO: 3239740 - DNA, 25 bp, Homo sapien
ccagaagattccctttagtaaacat

SEQ ID NO: 3239741 - DNA, 25 bp, Homo sapien
gattccctttagtaaacatctcctc

SEQ ID NO: 3239742 - DNA, 25 bp, Homo sapien
tccatgaggcaggtaagtacggagg

SEQ ID NO: 3239743 - DNA, 25 bp, Homo sapien
cggaggaaggtaacagtgaccagaa

SEQ ID NO: 3239744 - DNA, 25 bp, Homo sapien
gtaagtaaactgcattcttcagtgt

SEQ ID NO: 3239745 - DNA, 25 bp, Homo sapien
aataactgtcttctgtcaaacagaa

SEQ ID NO: 3239746 - DNA, 25 bp, Homo sapien
acagaaaaagatgtaagtaaactgc

SEQ ID NO: 3239747 - DNA, 25 bp, Homo sapien
taataactgtcttctgtcaaacaga

SEQ ID NO: 3239748 - DNA, 25 bp, Homo sapien
cagagtctcagcaaatacttagcag

SEQ ID NO: 3239749 - DNA, 25 bp, Homo sapien
gtcattttgatgtcccaagggtaac

SEQ ID NO: 3239750 - DNA, 25 bp, Homo sapien
cttgaaagaatcatagcagagtctc

SEQ ID NO: 3239751 - DNA, 25 bp, Homo sapien
tgccggcaccacataacagagtttc

SEQ ID NO: 3239752 - DNA, 25 bp, Homo sapien
cttatcaaagagtatgcgacacttt

SEQ ID NO: 3239753 - DNA, 25 bp, Homo sapien
ccagtcgtatagcttcttcctttcg

SEQ ID NO: 3239754 - DNA, 25 bp, Homo sapien
tttatctaatgagtgtgcttctaag

SEQ ID NO: 3239755 - DNA, 25 bp, Homo sapien
gtgcttctaagacatgtgtccccag

SEQ ID NO: 3239756 - DNA, 25 bp, Homo sapien
caggagctttctacacgtagagcac

SEQ ID NO: 3239757 - DNA, 25 bp, Homo sapien
gacaattctccaggcttaattctgg

SEQ ID NO: 3239758 - DNA, 25 bp, Homo sapien
tagagcacctgctttacttcgagga

SEQ ID NO: 3239759 - DNA, 25 bp, Homo sapien
ggacaaaggcccgtcgtagccaggc

SEQ ID NO: 3239760 - DNA, 25 bp, Homo sapien
ccttggtgggcccacagtggcatct

SEQ ID NO: 3239761 - DNA, 25 bp, Homo sapien
accataaggaaagtccacggccacg

SEQ ID NO: 3239762 - DNA, 25 bp, Homo sapien
cacatggaaagtttgtgtaagtcca

SEQ ID NO: 3239763 - DNA, 25 bp, Homo sapien
gccacgccgccaatggccttggtgt

SEQ ID NO: 3239764 - DNA, 25 bp, Homo sapien
gcctagcactgcaagaatatttggg

SEQ ID NO: 3239765 - DNA, 25 bp, Homo sapien
ttaaatcagtgttgcaccacagcat

SEQ ID NO: 3239766 - DNA, 25 bp, Homo sapien
ccatcttgatgtggatctgaggcag

SEQ ID NO: 3239767 - DNA, 25 bp, Homo sapien
tatagagactagctacctttgcggg

SEQ ID NO: 3239768 - DNA, 25 bp, Homo sapien
tgtactctgagcgaaggaaagcctg

SEQ ID NO: 3239769 - DNA, 25 bp, Homo sapien
gactttaacatatctcgtgagggac

SEQ ID NO: 3239770 - DNA, 25 bp, Homo sapien
aatttcaaagggttctctcagggca

SEQ ID NO: 3239771 - DNA, 25 bp, Homo sapien
cattcagcgcaatgtgaggccggga

SEQ ID NO: 3239772 - DNA, 25 bp, Homo sapien
tgccgaaaagattatttggattaca

SEQ ID NO: 3239773 - DNA, 25 bp, Homo sapien
acatttgccgaaaagattatttgga

SEQ ID NO: 3239774 - DNA, 25 bp, Homo sapien
ggaaattaatttcctcttgacgagc

SEQ ID NO: 3239775 - DNA, 25 bp, Homo sapien
tcctcttgacgagcattatgagttt

SEQ ID NO: 3239776 - DNA, 25 bp, Homo sapien
tacagttccagtctccaacctgtca

SEQ ID NO: 3239777 - DNA, 25 bp, Homo sapien
ctacagttccagtctccaacctgtc

SEQ ID NO: 3239778 - DNA, 25 bp, Homo sapien
acagttccagtctccaacctgtcaa

SEQ ID NO: 3239779 - DNA, 25 bp, Homo sapien
cagttccagtctccaacctgtcaac

SEQ ID NO: 3239780 - DNA, 25 bp, Homo sapien
ttcgtttctgggaaaagatgagact

SEQ ID NO: 3239781 - DNA, 25 bp, Homo sapien
ttctgggaaaagatgagactagtac

SEQ ID NO: 3239782 - DNA, 25 bp, Homo sapien
cttcgtttctgggaaaagatgagac

SEQ ID NO: 3239783 - DNA, 25 bp, Homo sapien
cgtttctgggaaaagatgagactag

SEQ ID NO: 3239784 - DNA, 25 bp, Homo sapien
actgagtcatggtcgcaccacacac

SEQ ID NO: 3239785 - DNA, 25 bp, Homo sapien
gagttgtgcatccattacctaattt

SEQ ID NO: 3239786 - DNA, 25 bp, Homo sapien
gtcatggtcgcaccacacacttcaa

SEQ ID NO: 3239787 - DNA, 25 bp, Homo sapien
aaaagtaatatcatacccagactgg

SEQ ID NO: 3239788 - DNA, 25 bp, Homo sapien
gggaaggtgactctctgaccttctc

SEQ ID NO: 3239789 - DNA, 25 bp, Homo sapien
ctgggaaggtgactctctgaccttc

SEQ ID NO: 3239790 - DNA, 25 bp, Homo sapien
tgggaaggtgactctctgaccttct

SEQ ID NO: 3239791 - DNA, 25 bp, Homo sapien
tatctgcacctagacagaggtagct

SEQ ID NO: 3239792 - DNA, 25 bp, Homo sapien
tccgcatgatgtaagttctgggtct

SEQ ID NO: 3239793 - DNA, 25 bp, Homo sapien
ctgaaaagccgcaagcacaagagaa

SEQ ID NO: 3239794 - DNA, 25 bp, Homo sapien
gagccctcagcatgtacttcgtcaa

SEQ ID NO: 3239795 - DNA, 25 bp, Homo sapien
ttgtttttagctgcacggctcctgg

SEQ ID NO: 3239796 - DNA, 25 bp, Homo sapien
ttttgtttttagctgcacggctcct

SEQ ID NO: 3239797 - DNA, 25 bp, Homo sapien
ctggcgaaaagacggagcaccagag

SEQ ID NO: 3239798 - DNA, 25 bp, Homo sapien
gtttttagctgcacggctcctggga

SEQ ID NO: 3239799 - DNA, 25 bp, Homo sapien
ccagggatgagcgttgatctgtctc

SEQ ID NO: 3239800 - DNA, 25 bp, Homo sapien
taacaggcgtcttctcttaaaacca

SEQ ID NO: 3239801 - DNA, 25 bp, Homo sapien
aagcccagggatgagcgttgatctg

SEQ ID NO: 3239802 - DNA, 25 bp, Homo sapien
tgagcactaattgccttttgtctgg

SEQ ID NO: 3239803 - DNA, 25 bp, Homo sapien
tgatagttttaattttgaccattcc

SEQ ID NO: 3239804 - DNA, 25 bp, Homo sapien
gatagttttaattttgaccattcca

SEQ ID NO: 3239805 - DNA, 25 bp, Homo sapien
gcatgatagttttaattttgaccat

SEQ ID NO: 3239806 - DNA, 25 bp, Homo sapien
cttgattctgcatgatagttttaat

SEQ ID NO: 3239807 - DNA, 25 bp, Homo sapien
agccttcacttcgatcgacttcaat

SEQ ID NO: 3239808 - DNA, 25 bp, Homo sapien
tcaatatctgaccagggtaaacatc

SEQ ID NO: 3239809 - DNA, 25 bp, Homo sapien
tcccttgtttcttgaacctaactca

SEQ ID NO: 3239810 - DNA, 25 bp, Homo sapien
tctgaccagggtaaacatcccttgt

SEQ ID NO: 3239811 - DNA, 25 bp, Homo sapien
gacatattgccttcctattttagtg

SEQ ID NO: 3239812 - DNA, 25 bp, Homo sapien
cgctggcagtctcccaaggttcaat

SEQ ID NO: 3239813 - DNA, 25 bp, Homo sapien
tgcttaactcactatctggacttcg

SEQ ID NO: 3239814 - DNA, 25 bp, Homo sapien
tgtcttcttgctactaaaccttgtg

SEQ ID NO: 3239815 - DNA, 25 bp, Homo sapien
atccaatgttgggaaggacacgggt

SEQ ID NO: 3239816 - DNA, 25 bp, Homo sapien
gcaggagcaacatcatgtctttagc

SEQ ID NO: 3239817 - DNA, 25 bp, Homo sapien
catcatgtctttagcattgcatcca

SEQ ID NO: 3239818 - DNA, 25 bp, Homo sapien
attccttcaaggtgtggtccagcag

SEQ ID NO: 3239819 - DNA, 25 bp, Homo sapien
cagagtgaatatttgctgcagaact

SEQ ID NO: 3239820 - DNA, 25 bp, Homo sapien
tggagtgcctaatactagaatgaga

SEQ ID NO: 3239821 - DNA, 25 bp, Homo sapien
ctttgctactcacatcctaatgagg

SEQ ID NO: 3239822 - DNA, 25 bp, Homo sapien
taaacataacggaagctctgctgct

SEQ ID NO: 3239823 - DNA, 25 bp, Homo sapien
actatgctaatgctctcctcttctc

SEQ ID NO: 3239824 - DNA, 25 bp, Homo sapien
ccctgcaccactatgctaatgctct

SEQ ID NO: 3239825 - DNA, 25 bp, Homo sapien
tgcaccactatgctaatgctctcct

SEQ ID NO: 3239826 - DNA, 25 bp, Homo sapien
accactatgctaatgctctcctctt

SEQ ID NO: 3239827 - DNA, 25 bp, Homo sapien
gactgataatcctgtcttccttgtt

SEQ ID NO: 3239828 - DNA, 25 bp, Homo sapien
tgactgataatcctgtcttccttgt

SEQ ID NO: 3239829 - DNA, 25 bp, Homo sapien
gaatatcaattagctgagaatcaaa

SEQ ID NO: 3239830 - DNA, 25 bp, Homo sapien
aatgtagccagttctaaagtcaacg

SEQ ID NO: 3239831 - DNA, 25 bp, Homo sapien
aacatcgctacatggccccagtgtc

SEQ ID NO: 3239832 - DNA, 25 bp, Homo sapien
aagtcaacgcagctttcaaagtcac

SEQ ID NO: 3239833 - DNA, 25 bp, Homo sapien
ggtcccattaccttacagagagaag

SEQ ID NO: 3239834 - DNA, 25 bp, Homo sapien
gtatttagcaatgaccgaaaccaaa

SEQ ID NO: 3239835 - DNA, 25 bp, Homo sapien
tcttccaggacgttcatataccaca

SEQ ID NO: 3239836 - DNA, 25 bp, Homo sapien
tacaacaggcactaggtatttagca

SEQ ID NO: 3239837 - DNA, 25 bp, Homo sapien
aaatgttgttagtttgcatgcctgg

SEQ ID NO: 3239838 - DNA, 25 bp, Homo sapien
tactgggtggtagacattgtgaatt

SEQ ID NO: 3239839 - DNA, 25 bp, Homo sapien
tctcccggttatgagccaaatgttg

SEQ ID NO: 3239840 - DNA, 25 bp, Homo sapien
cacaggtaagaaccttatgggttag

SEQ ID NO: 3239841 - DNA, 25 bp, Homo sapien
ctggaaagacaggagcccagtgccc

SEQ ID NO: 3239842 - DNA, 25 bp, Homo sapien
aggagcccagtgcccttctgcatct

SEQ ID NO: 3239843 - DNA, 25 bp, Homo sapien
agcccagtgcccttctgcatctcat

SEQ ID NO: 3239844 - DNA, 25 bp, Homo sapien
tggaaagacaggagcccagtgccct

SEQ ID NO: 3239845 - DNA, 25 bp, Homo sapien
gggcagtttccgtttctcacagagc

SEQ ID NO: 3239846 - DNA, 25 bp, Homo sapien
catcacagtgaggtcaactggtgcg

SEQ ID NO: 3239847 - DNA, 25 bp, Homo sapien
tcaaccggtgtaggaacgtggagta

SEQ ID NO: 3239848 - DNA, 25 bp, Homo sapien
gaggtcaaccggtgcaggaacttgc

SEQ ID NO: 3239849 - DNA, 25 bp, Homo sapien
agaggttcacacagcaaggtaacag

SEQ ID NO: 3239850 - DNA, 25 bp, Homo sapien
ccttgaacatcggtgggacgtagtg

SEQ ID NO: 3239851 - DNA, 25 bp, Homo sapien
cattttatagccatgagagttccag

SEQ ID NO: 3239852 - DNA, 25 bp, Homo sapien
gccagatgccattagtgaggacact

SEQ ID NO: 3239853 - DNA, 25 bp, Homo sapien
ggaaatgtgctttgctccaacatca

SEQ ID NO: 3239854 - DNA, 25 bp, Homo sapien
ctccaacatcactgtcaatcacggg

SEQ ID NO: 3239855 - DNA, 25 bp, Homo sapien
aacatcactgtcaatcacgggaatc

SEQ ID NO: 3239856 - DNA, 25 bp, Homo sapien
tcactgtcaatcacgggaatctcca

SEQ ID NO: 3239857 - DNA, 25 bp, Homo sapien
tgctgcggggactcagcagctctaa

SEQ ID NO: 3239858 - DNA, 25 bp, Homo sapien
caggaaagtgactgcagtatccatt

SEQ ID NO: 3239859 - DNA, 25 bp, Homo sapien
gccaggaaagtgactgcagtatcca

SEQ ID NO: 3239860 - DNA, 25 bp, Homo sapien
tgctgccaggaaagtgactgcagta

SEQ ID NO: 3239861 - DNA, 25 bp, Homo sapien
cagcctttgttccttagaagacagg

SEQ ID NO: 3239862 - DNA, 25 bp, Homo sapien
aaatctcaaggccaagttgcagccg

SEQ ID NO: 3239863 - DNA, 25 bp, Homo sapien
gttgcagccggaactcaagctcagt

SEQ ID NO: 3239864 - DNA, 25 bp, Homo sapien
gagtgagctgcttttgacttcagca

SEQ ID NO: 3239865 - DNA, 25 bp, Homo sapien
aggagcggccctggtgcgacagcca

SEQ ID NO: 3239866 - DNA, 25 bp, Homo sapien
tccttcattaccagggtgggcccag

SEQ ID NO: 3239867 - DNA, 25 bp, Homo sapien
gtgggcccagcgttacttacaccag

SEQ ID NO: 3239868 - DNA, 25 bp, Homo sapien
accgtcagtgcccagggtgcgagcc

SEQ ID NO: 3239869 - DNA, 25 bp, Homo sapien
tgctgcgggcattcaaaattaatgg

SEQ ID NO: 3239870 - DNA, 25 bp, Homo sapien
tgtagaaagcccaaagtccagttgt

SEQ ID NO: 3239871 - DNA, 25 bp, Homo sapien
gtccagttgttggatgttttcagca

SEQ ID NO: 3239872 - DNA, 25 bp, Homo sapien
tctctatagctttaacactgatgtt

SEQ ID NO: 3239873 - DNA, 25 bp, Homo sapien
tgcacggcaagaacacggcgtctgc

SEQ ID NO: 3239874 - DNA, 25 bp, Homo sapien
attccagctgcacggcaagaacacg

SEQ ID NO: 3239875 - DNA, 25 bp, Homo sapien
tgttattccagctgcacggcaagaa

SEQ ID NO: 3239876 - DNA, 25 bp, Homo sapien
cagctgcacggcaagaacacggcgt

SEQ ID NO: 3239877 - DNA, 25 bp, Homo sapien
gccaacggcccggcggggccagagc

SEQ ID NO: 3239878 - DNA, 25 bp, Homo sapien
ccggcggggccagagccaccgggca

SEQ ID NO: 3239879 - DNA, 25 bp, Homo sapien
cggggccagagccaccgggcagcgc

SEQ ID NO: 3239880 - DNA, 25 bp, Homo sapien
ggcggggccagagccaccgggcagc

SEQ ID NO: 3239881 - DNA, 25 bp, Homo sapien
cagcggcgggctaccggagctcagg

SEQ ID NO: 3239882 - DNA, 25 bp, Homo sapien
agcggcgggctaccggagctcaggg

SEQ ID NO: 3239883 - DNA, 25 bp, Homo sapien
ctccagcggcgggctaccggagctc

SEQ ID NO: 3239884 - DNA, 25 bp, Homo sapien
ccagcggcgggctaccggagctcag

SEQ ID NO: 3239885 - DNA, 25 bp, Homo sapien
gaagatgaactatccggacagcact

SEQ ID NO: 3239886 - DNA, 25 bp, Homo sapien
cgttcagcagtttgatcaccgccag

SEQ ID NO: 3239887 - DNA, 25 bp, Homo sapien
ggctcgcttagtgtcaattctcaaa

SEQ ID NO: 3239888 - DNA, 25 bp, Homo sapien
tgctggcagatgcatgtctaaggcc

SEQ ID NO: 3239889 - DNA, 25 bp, Homo sapien
gcatgctgtacagttttgcacgtaa

SEQ ID NO: 3239890 - DNA, 25 bp, Homo sapien
catgctgtacagttttgcacgtaac

SEQ ID NO: 3239891 - DNA, 25 bp, Homo sapien
ttcaagatcatgcagcgtcttgttt

SEQ ID NO: 3239892 - DNA, 25 bp, Homo sapien
gatcatgcagcgtcttgtttattct

SEQ ID NO: 3239893 - DNA, 25 bp, Homo sapien
catgcagcgtcttgtttattctgtg

SEQ ID NO: 3239894 - DNA, 25 bp, Homo sapien
gcagcgtcttgtttattctgtgatc

SEQ ID NO: 3239895 - DNA, 25 bp, Homo sapien
caccctatgtggatgtactgtagaa

SEQ ID NO: 3239896 - DNA, 25 bp, Homo sapien
tatgcatattacctccaactgtgtt

SEQ ID NO: 3239897 - DNA, 25 bp, Homo sapien
caatgtaaatcgaggaccatctgta

SEQ ID NO: 3239898 - DNA, 25 bp, Homo sapien
tgctaatgcattgagagagatctgt

SEQ ID NO: 3239899 - DNA, 25 bp, Homo sapien
tctagttattgtaaggtagcgtcca

SEQ ID NO: 3239900 - DNA, 25 bp, Homo sapien
tagcgtccaagatttaccaccacat

SEQ ID NO: 3239901 - DNA, 25 bp, Homo sapien
gaatcatacctctttcacaccatgg

SEQ ID NO: 3239902 - DNA, 25 bp, Homo sapien
taggagactgctgtgttgctaacgt

SEQ ID NO: 3239903 - DNA, 25 bp, Homo sapien
cagggaatttcccaatcactgagta

SEQ ID NO: 3239904 - DNA, 25 bp, Homo sapien
ctgagtaggctgtagccactctctc

SEQ ID NO: 3239905 - DNA, 25 bp, Homo sapien
tgtgaggttctttgcttgtaagacc

SEQ ID NO: 3239906 - DNA, 25 bp, Homo sapien
ttgcttgtaagacctgatccaccag

SEQ ID NO: 3239907 - DNA, 25 bp, Homo sapien
cacaggtgcctagctactgggtcat

SEQ ID NO: 3239908 - DNA, 25 bp, Homo sapien
tacctttggactggaccttgcacca

SEQ ID NO: 3239909 - DNA, 25 bp, Homo sapien
tacagaaggcaagctagcaggatgc

SEQ ID NO: 3239910 - DNA, 25 bp, Homo sapien
catggcctagtgatctcttaaagac

SEQ ID NO: 3239911 - DNA, 25 bp, Homo sapien
ccaatgcgaggaagaggaacgtaag

SEQ ID NO: 3239912 - DNA, 25 bp, Homo sapien
gcatggtgttagcttccgaagagac

SEQ ID NO: 3239913 - DNA, 25 bp, Homo sapien
tccattagtggcattgtgagaggtc

SEQ ID NO: 3239914 - DNA, 25 bp, Homo sapien
gcagtgcatttactaccttgtgaag

SEQ ID NO: 3239915 - DNA, 25 bp, Homo sapien
cactggaaccactgttggctcagca

SEQ ID NO: 3239916 - DNA, 25 bp, Homo sapien
tcacattgctgtattccactggaac

SEQ ID NO: 3239917 - DNA, 25 bp, Homo sapien
tccactggaaccactgttggctcag

SEQ ID NO: 3239918 - DNA, 25 bp, Homo sapien
actggaaccactgttggctcagcac

SEQ ID NO: 3239919 - DNA, 25 bp, Homo sapien
ctacttcccattataagcctcggtt

SEQ ID NO: 3239920 - DNA, 25 bp, Homo sapien
tccattgctggagaataaggcacaa

SEQ ID NO: 3239921 - DNA, 25 bp, Homo sapien
gcacaaagaattctgcatgagggcc

SEQ ID NO: 3239922 - DNA, 25 bp, Homo sapien
taaggcacaaagaattctgcatgag

SEQ ID NO: 3239923 - DNA, 25 bp, Homo sapien
cttgaaatctctagatgccgaagtt

SEQ ID NO: 3239924 - DNA, 25 bp, Homo sapien
tggtttgccaccgcaggctccgcgg

SEQ ID NO: 3239925 - DNA, 25 bp, Homo sapien
aggctccgcgggacagccaaggaac

SEQ ID NO: 3239926 - DNA, 25 bp, Homo sapien
ggctccgcgggacagccaaggaact

SEQ ID NO: 3239927 - DNA, 25 bp, Homo sapien
gaggtggtttgccaccgcaggctcc

SEQ ID NO: 3239928 - DNA, 25 bp, Homo sapien
gttgtagcatattgtttgctcagca

SEQ ID NO: 3239929 - DNA, 25 bp, Homo sapien
acttctgttgtagcatattgtttgc

SEQ ID NO: 3239930 - DNA, 25 bp, Homo sapien
gcatattgtttgctcagcatactat

SEQ ID NO: 3239931 - DNA, 25 bp, Homo sapien
ttgaacttctgttgtagcatattgt

SEQ ID NO: 3239932 - DNA, 25 bp, Homo sapien
ttctttcccatcgaattcttcacac

SEQ ID NO: 3239933 - DNA, 25 bp, Homo sapien
gttctttcccatcgaattcttcaca

SEQ ID NO: 3239934 - DNA, 25 bp, Homo sapien
tgttctttcccatcgaattcttcac

SEQ ID NO: 3239935 - DNA, 25 bp, Homo sapien
tggaccttgcagacttcaacccagg

SEQ ID NO: 3239936 - DNA, 25 bp, Homo sapien
tctcagccactgataggtgccaatg

SEQ ID NO: 3239937 - DNA, 25 bp, Homo sapien
gcataaggatgccaagtgttaccct

SEQ ID NO: 3239938 - DNA, 25 bp, Homo sapien
caacagaatttgaggaatccaggct

SEQ ID NO: 3239939 - DNA, 25 bp, Homo sapien
ggtttcagtagctcccatttcctgg

SEQ ID NO: 3239940 - DNA, 25 bp, Homo sapien
cagatcctgtggtttcagtagctcc

SEQ ID NO: 3239941 - DNA, 25 bp, Homo sapien
cagagagtgtttggaagccgtgagc

SEQ ID NO: 3239942 - DNA, 25 bp, Homo sapien
aggacatggacgtggtcatattgtc

SEQ ID NO: 3239943 - DNA, 25 bp, Homo sapien
acttcctcctctgggagaaacagga

SEQ ID NO: 3239944 - DNA, 25 bp, Homo sapien
ctctgggagaaacaggaaagggcct

SEQ ID NO: 3239945 - DNA, 25 bp, Homo sapien
ctgccttggacttcctcctctggga

SEQ ID NO: 3239946 - DNA, 25 bp, Homo sapien
gcctggggtccatgaaaagggcctc

SEQ ID NO: 3239947 - DNA, 25 bp, Homo sapien
aatttgtaacacgtataaccagact

SEQ ID NO: 3239948 - DNA, 25 bp, Homo sapien
tagctctctgtgaaccccacaggaa

SEQ ID NO: 3239949 - DNA, 25 bp, Homo sapien
ttgcaaagacgagggagatgcagac

SEQ ID NO: 3239950 - DNA, 25 bp, Homo sapien
ccagactaaacagccaagaagtttt

SEQ ID NO: 3239951 - DNA, 25 bp, Homo sapien
gcatgtgtttgactttcctgattga

SEQ ID NO: 3239952 - DNA, 25 bp, Homo sapien
ctttcctgattgatgactgccttat

SEQ ID NO: 3239953 - DNA, 25 bp, Homo sapien
ttcctgattgatgactgccttatct

SEQ ID NO: 3239954 - DNA, 25 bp, Homo sapien
gtcatctgcatgtgtttgactttcc

SEQ ID NO: 3239955 - DNA, 25 bp, Homo sapien
ttcgggagcagtgggactccggcaa

SEQ ID NO: 3239956 - DNA, 25 bp, Homo sapien
cctcagggcatgtgttcgggagcag

SEQ ID NO: 3239957 - DNA, 25 bp, Homo sapien
aagctggttgtgcaggcacgctgcc

SEQ ID NO: 3239958 - DNA, 25 bp, Homo sapien
tgaatgcagcgcatgtctgaagcgt

SEQ ID NO: 3239959 - DNA, 25 bp, Homo sapien
tattaccctggtttgcttccatccg

SEQ ID NO: 3239960 - DNA, 25 bp, Homo sapien
catgcaggtcatctttatctgatac

SEQ ID NO: 3239961 - DNA, 25 bp, Homo sapien
tccgcctacatataaaccacagatt

SEQ ID NO: 3239962 - DNA, 25 bp, Homo sapien
gaggatattgtgagagccctctgcc

SEQ ID NO: 3239963 - DNA, 25 bp, Homo sapien
ggcccatttgttcctctatgtgtaa

SEQ ID NO: 3239964 - DNA, 25 bp, Homo sapien
cagaccagatcctctccattgaact

SEQ ID NO: 3239965 - DNA, 25 bp, Homo sapien
tctgggaatccaactatgcacaagt

SEQ ID NO: 3239966 - DNA, 25 bp, Homo sapien
aatttggaggaatacctggctatgc

SEQ ID NO: 3239967 - DNA, 25 bp, Homo sapien
attccacgtctgctactaccacagc

SEQ ID NO: 3239968 - DNA, 25 bp, Homo sapien
tactaccacagctactattgctacc

SEQ ID NO: 3239969 - DNA, 25 bp, Homo sapien
tattgtcaaagtggcttctaattcc

SEQ ID NO: 3239970 - DNA, 25 bp, Homo sapien
ttgctattgtcaaagtggcttctaa

SEQ ID NO: 3239971 - DNA, 25 bp, Homo sapien
aattaatgtcgctatctccccagcc

SEQ ID NO: 3239972 - DNA, 25 bp, Homo sapien
aactatgtaattaatgtcgctatct

SEQ ID NO: 3239973 - DNA, 25 bp, Homo sapien
tgtccacataggcagttttttgtac

SEQ ID NO: 3239974 - DNA, 25 bp, Homo sapien
ggcagttttttgtacaactatgtaa

SEQ ID NO: 3239975 - DNA, 25 bp, Homo sapien
tctgccctctgtgtcccactctcac

SEQ ID NO: 3239976 - DNA, 25 bp, Homo sapien
tattcacgtgacactggatgacagt

SEQ ID NO: 3239977 - DNA, 25 bp, Homo sapien
aaatcccacgttgccacagtagcag

SEQ ID NO: 3239978 - DNA, 25 bp, Homo sapien
tgtaaattgccagccaactcacagc

SEQ ID NO: 3239979 - DNA, 25 bp, Homo sapien
ggatgacagtgactctcaaatccca

SEQ ID NO: 3239980 - DNA, 25 bp, Homo sapien
agagcgtcccgcaaccctgagggtc

SEQ ID NO: 3239981 - DNA, 25 bp, Homo sapien
agtccagagtgtcccgcagaccaga

SEQ ID NO: 3239982 - DNA, 25 bp, Homo sapien
cagtccagagtgtcccgcagaccag

SEQ ID NO: 3239983 - DNA, 25 bp, Homo sapien
agagcgtcccgcagccctgagggtc

SEQ ID NO: 3239984 - DNA, 25 bp, Homo sapien
gagggcggatggggcagaaaaggct

SEQ ID NO: 3239985 - DNA, 25 bp, Homo sapien
cccaggttatgcacagagggcggat

SEQ ID NO: 3239986 - DNA, 25 bp, Homo sapien
cggatggggcagaaaaggctgggtg

SEQ ID NO: 3239987 - DNA, 25 bp, Homo sapien
ccccaggttatgcacagagggcgga

SEQ ID NO: 3239988 - DNA, 25 bp, Homo sapien
ccgggacacggaagcacaactgaag

SEQ ID NO: 3239989 - DNA, 25 bp, Homo sapien
gaaagcgaagcagggagattgtctc

SEQ ID NO: 3239990 - DNA, 25 bp, Homo sapien
aagaagcaggacacgcccggaggat

SEQ ID NO: 3239991 - DNA, 25 bp, Homo sapien
agtcatatcttagaggcttctctcg

SEQ ID NO: 3239992 - DNA, 25 bp, Homo sapien
gagagaggagagagcgtatgattcc

SEQ ID NO: 3239993 - DNA, 25 bp, Homo sapien
aggagagagcgtatgattcctgtac

SEQ ID NO: 3239994 - DNA, 25 bp, Homo sapien
gagaggagagagcgtatgattcctg

SEQ ID NO: 3239995 - DNA, 25 bp, Homo sapien
gaggagagagcgtatgattcctgta

SEQ ID NO: 3239996 - DNA, 25 bp, Homo sapien
taactgggtaccattgcctcatcag

SEQ ID NO: 3239997 - DNA, 25 bp, Homo sapien
tgaagcatcacagatacaaacagga

SEQ ID NO: 3239998 - DNA, 25 bp, Homo sapien
gcagttttgaagcagaatcacccct

SEQ ID NO: 3239999 - DNA, 25 bp, Homo sapien
tggtgtttgccctcataactgggta

SEQ ID NO: 3240000 - DNA, 25 bp, Homo sapien
tgaaatggttcaggctatattgaaa

SEQ ID NO: 3240001 - DNA, 25 bp, Homo sapien
tggttcaggctatattgaaaaatag

SEQ ID NO: 3240002 - DNA, 25 bp, Homo sapien
gaggtgcaatgaaatggttcaggct

SEQ ID NO: 3240003 - DNA, 25 bp, Homo sapien
caatgaaatggttcaggctatattg

SEQ ID NO: 3240004 - DNA, 25 bp, Homo sapien
atctctggcccacaagatgggccct

SEQ ID NO: 3240005 - DNA, 25 bp, Homo sapien
gggccctgtggtggcaatgaccgta

SEQ ID NO: 3240006 - DNA, 25 bp, Homo sapien
ccctgtggtggcaatgaccgtattg

SEQ ID NO: 3240007 - DNA, 25 bp, Homo sapien
tatctctggcccacaagatgggccc

SEQ ID NO: 3240008 - DNA, 25 bp, Homo sapien
gataacggcttctttagctcccagc

SEQ ID NO: 3240009 - DNA, 25 bp, Homo sapien
tggtgaatccaatacaaacttttcc

SEQ ID NO: 3240010 - DNA, 25 bp, Homo sapien
aaagacagctccgtttatcctgtag

SEQ ID NO: 3240011 - DNA, 25 bp, Homo sapien
aagaaggagatacacggataacggc

SEQ ID NO: 3240012 - DNA, 25 bp, Homo sapien
gggcaacgcgatgttcagggagtgg

SEQ ID NO: 3240013 - DNA, 25 bp, Homo sapien
cacttcctcaggggcaacgcgatgt

SEQ ID NO: 3240014 - DNA, 25 bp, Homo sapien
cctcaggggcaacgcgatgttcagg

SEQ ID NO: 3240015 - DNA, 25 bp, Homo sapien
gcaacgcgatgttcagggagtggga

SEQ ID NO: 3240016 - DNA, 25 bp, Homo sapien
catccagaaactgctgacctaatgg

SEQ ID NO: 3240017 - DNA, 25 bp, Homo sapien
aaggatgggatgtatgggacctaac

SEQ ID NO: 3240018 - DNA, 25 bp, Homo sapien
tatgggacctaacatgaactgcacc

SEQ ID NO: 3240019 - DNA, 25 bp, Homo sapien
aatacagcgatggttaaaggatggg

SEQ ID NO: 3240020 - DNA, 25 bp, Homo sapien
cacaccagggcttcggtcaacatta

SEQ ID NO: 3240021 - DNA, 25 bp, Homo sapien
ccagggcttcggtcaacattattat

SEQ ID NO: 3240022 - DNA, 25 bp, Homo sapien
tatttaaggcgttcagtagtttctg

SEQ ID NO: 3240023 - DNA, 25 bp, Homo sapien
ttcacaccagggcttcggtcaacat

SEQ ID NO: 3240024 - DNA, 25 bp, Homo sapien
ttccccaaagatagcccaccacaga

SEQ ID NO: 3240025 - DNA, 25 bp, Homo sapien
caaaatgtctgctagtaccctttgg

SEQ ID NO: 3240026 - DNA, 25 bp, Homo sapien
tctgctagtaccctttgggctttga

SEQ ID NO: 3240027 - DNA, 25 bp, Homo sapien
ctagtaccctttgggctttgaaatg

SEQ ID NO: 3240028 - DNA, 25 bp, Homo sapien
caaaatagaatactgaccaacagtg

SEQ ID NO: 3240029 - DNA, 25 bp, Homo sapien
taagaggaagttgctcactacattg

SEQ ID NO: 3240030 - DNA, 25 bp, Homo sapien
ttattcactgatggctgccgcgtca

SEQ ID NO: 3240031 - DNA, 25 bp, Homo sapien
gaaatcagaatagttgccagcaaag

SEQ ID NO: 3240032 - DNA, 25 bp, Homo sapien
ccacgttgtattcttctacagcgac

SEQ ID NO: 3240033 - DNA, 25 bp, Homo sapien
gcctctaccacgttgtattcttcta

SEQ ID NO: 3240034 - DNA, 25 bp, Homo sapien
tcgggcctctaccacgttgtattct

SEQ ID NO: 3240035 - DNA, 25 bp, Homo sapien
tctaccacgttgtattcttctacag

SEQ ID NO: 3240036 - DNA, 25 bp, Homo sapien
ggaacagacagcagccttgttctga

SEQ ID NO: 3240037 - DNA, 25 bp, Homo sapien
cagacagcagccttgttctgaggag

SEQ ID NO: 3240038 - DNA, 25 bp, Homo sapien
gacagcagccttgttctgaggaggt

SEQ ID NO: 3240039 - DNA, 25 bp, Homo sapien
ctcccagctgaggaacagacagcag

SEQ ID NO: 3240040 - DNA, 25 bp, Homo sapien
atcattccccgccctgtagggcttc

SEQ ID NO: 3240041 - DNA, 25 bp, Homo sapien
cattccccgcctgtagggacatcat

SEQ ID NO: 3240042 - DNA, 25 bp, Homo sapien
tgtggggacatcattccccgcctgt

SEQ ID NO: 3240043 - DNA, 25 bp, Homo sapien
tagggcttcactccccgccctgtgg

SEQ ID NO: 3240044 - DNA, 25 bp, Homo sapien
tgttccaacgacagaaacacctgca

SEQ ID NO: 3240045 - DNA, 25 bp, Homo sapien
tcagcgcttaggtttcctgaaccgc

SEQ ID NO: 3240046 - DNA, 25 bp, Homo sapien
tcgtaaaacccaaagcaatgctgga

SEQ ID NO: 3240047 - DNA, 25 bp, Homo sapien
gagcacacagcattgttccaacgac

SEQ ID NO: 3240048 - DNA, 25 bp, Homo sapien
taaatggctgtgattgacctgccca

SEQ ID NO: 3240049 - DNA, 25 bp, Homo sapien
cacaggtgtgaggatttaaatggct

SEQ ID NO: 3240050 - DNA, 25 bp, Homo sapien
gatgcttagcatgccacaaggcgat

SEQ ID NO: 3240051 - DNA, 25 bp, Homo sapien
caccgacagggaattctaatgagga

SEQ ID NO: 3240052 - DNA, 25 bp, Homo sapien
gaggcacctgttggacctttgtcct

SEQ ID NO: 3240053 - DNA, 25 bp, Homo sapien
ttaagtggatcggagagaggcacct

SEQ ID NO: 3240054 - DNA, 25 bp, Homo sapien
tacttcagacacagtcgggccatga

SEQ ID NO: 3240055 - DNA, 25 bp, Homo sapien
cactgtcctgcttccatgatatgcg

SEQ ID NO: 3240056 - DNA, 25 bp, Homo sapien
tgacgtttaagatcagaacagcaga

SEQ ID NO: 3240057 - DNA, 25 bp, Homo sapien
cttgtttgacgtttaagatcagaac

SEQ ID NO: 3240058 - DNA, 25 bp, Homo sapien
gtttgacgtttaagatcagaacagc

SEQ ID NO: 3240059 - DNA, 25 bp, Homo sapien
cccgcttgtttgacgtttaagatca

SEQ ID NO: 3240060 - DNA, 25 bp, Homo sapien
cttccgcaaggaggattttgattta

SEQ ID NO: 3240061 - DNA, 25 bp, Homo sapien
cgtgacagatcagctgggagccctc

SEQ ID NO: 3240062 - DNA, 25 bp, Homo sapien
tgcctgtggaaacccgcgtcttccg

SEQ ID NO: 3240063 - DNA, 25 bp, Homo sapien
aggctcctgagcatccgtgtcccag

SEQ ID NO: 3240064 - DNA, 25 bp, Homo sapien
aacggccgtcttcaagccaaagcgg

SEQ ID NO: 3240065 - DNA, 25 bp, Homo sapien
tcttgcagcgcttgctctagatgcg

SEQ ID NO: 3240066 - DNA, 25 bp, Homo sapien
gctgagcgcctaacgcagtgagtgc

SEQ ID NO: 3240067 - DNA, 25 bp, Homo sapien
tctagatgcgaaggcacgcgcgtat

SEQ ID NO: 3240068 - DNA, 25 bp, Homo sapien
gagcccatcgtctcattgccagaga

SEQ ID NO: 3240069 - DNA, 25 bp, Homo sapien
gagaggccacctggatagtgtagct

SEQ ID NO: 3240070 - DNA, 25 bp, Homo sapien
ccagacgaagggctcttctatgcat

SEQ ID NO: 3240071 - DNA, 25 bp, Homo sapien
tagctcatagactgctctgcttccc

SEQ ID NO: 3240072 - DNA, 25 bp, Homo sapien
tagtctggtagtagtttaacgagta

SEQ ID NO: 3240073 - DNA, 25 bp, Homo sapien
gctatttatcaccatcatgaccagt

SEQ ID NO: 3240074 - DNA, 25 bp, Homo sapien
tgctttcagtcgcaattctgtgcta

SEQ ID NO: 3240075 - DNA, 25 bp, Homo sapien
tgacaaattgctttcagtcgcaatt

SEQ ID NO: 3240076 - DNA, 25 bp, Homo sapien
ttcataaaatgcctgaaggtgattg

SEQ ID NO: 3240077 - DNA, 25 bp, Homo sapien
tgcggaggcaatcttcataaaatgc

SEQ ID NO: 3240078 - DNA, 25 bp, Homo sapien
ctgaatcatgcggaggcaatcttca

SEQ ID NO: 3240079 - DNA, 25 bp, Homo sapien
caggttgctgaatcatgcggaggca

SEQ ID NO: 3240080 - DNA, 25 bp, Homo sapien
gagaaagcttctagaattcaatgtg

SEQ ID NO: 3240081 - DNA, 25 bp, Homo sapien
ttcaatgtgcttccgcaagtgggag

SEQ ID NO: 3240082 - DNA, 25 bp, Homo sapien
tctcatcttgactcagcggttccat

SEQ ID NO: 3240083 - DNA, 25 bp, Homo sapien
ctagaattcaatgtgcttccgcaag

SEQ ID NO: 3240084 - DNA, 25 bp, Homo sapien
ctcttggagtaaggtcagcttcttg

SEQ ID NO: 3240085 - DNA, 25 bp, Homo sapien
cttggagtaaggtcagcttcttgaa

SEQ ID NO: 3240086 - DNA, 25 bp, Homo sapien
ttggagtaaggtcagcttcttgaag

SEQ ID NO: 3240087 - DNA, 25 bp, Homo sapien
tcttggagtaaggtcagcttcttga

SEQ ID NO: 3240088 - DNA, 25 bp, Homo sapien
aatgctcccaggacaaaattcaagg

SEQ ID NO: 3240089 - DNA, 25 bp, Homo sapien
ggctgggtggcatcttattcatcat

SEQ ID NO: 3240090 - DNA, 25 bp, Homo sapien
ggagatgccaatgccacatgctgaa

SEQ ID NO: 3240091 - DNA, 25 bp, Homo sapien
ctgtgctgccatgtgtaacttcaca

SEQ ID NO: 3240092 - DNA, 25 bp, Homo sapien
tcttaagccggtctgaaaagcgcaa

SEQ ID NO: 3240093 - DNA, 25 bp, Homo sapien
tcggctcgcgcacggtgcgcgcaca

SEQ ID NO: 3240094 - DNA, 25 bp, Homo sapien
cttaagccggtctgaaaagcgcaat

SEQ ID NO: 3240095 - DNA, 25 bp, Homo sapien
cggtgcgcgcacacactggcctgcg

SEQ ID NO: 3240096 - DNA, 25 bp, Homo sapien
ggatggaatagacgtgcaatgctca

SEQ ID NO: 3240097 - DNA, 25 bp, Homo sapien
ttttggaacgtgtcacagccacgag

SEQ ID NO: 3240098 - DNA, 25 bp, Homo sapien
tatcgtctgagtgacgttttggaac

SEQ ID NO: 3240099 - DNA, 25 bp, Homo sapien
gcaatgctcatttgatatcgtctga

SEQ ID NO: 3240100 - DNA, 25 bp, Homo sapien
ggtcaccaggtcgttgttcactaag

SEQ ID NO: 3240101 - DNA, 25 bp, Homo sapien
ttcgcaagacggaggatctttctcc

SEQ ID NO: 3240102 - DNA, 25 bp, Homo sapien
cgtggtttccactctcttcgcaaga

SEQ ID NO: 3240103 - DNA, 25 bp, Homo sapien
cacggactcccagggtgtagaatat

SEQ ID NO: 3240104 - DNA, 25 bp, Homo sapien
gtgatggacagttctagtaacagcc

SEQ ID NO: 3240105 - DNA, 25 bp, Homo sapien
agtgatggacagttctagtaacagc

SEQ ID NO: 3240106 - DNA, 25 bp, Homo sapien
gtaacagccacagcctcgtcttcct

SEQ ID NO: 3240107 - DNA, 25 bp, Homo sapien
ctagtgatggacagttctagtaaca

SEQ ID NO: 3240108 - DNA, 25 bp, Homo sapien
tccagataaacaacagtaaatctgc

SEQ ID NO: 3240109 - DNA, 25 bp, Homo sapien
taaatctgcaggtaactttccgata

SEQ ID NO: 3240110 - DNA, 25 bp, Homo sapien
acagtaaatctgcaggtaactttcc

SEQ ID NO: 3240111 - DNA, 25 bp, Homo sapien
gcaggtaactttccgatattgcaaa

SEQ ID NO: 3240112 - DNA, 25 bp, Homo sapien
tttcctgtttctcatgctccctcag

SEQ ID NO: 3240113 - DNA, 25 bp, Homo sapien
cctgtttctcatgctccctcagcat

SEQ ID NO: 3240114 - DNA, 25 bp, Homo sapien
ttttcctgtttctcatgctccctca

SEQ ID NO: 3240115 - DNA, 25 bp, Homo sapien
cattttcctgtttctcatgctccct

SEQ ID NO: 3240116 - DNA, 25 bp, Homo sapien
catacttgtttttcagatcgatctc

SEQ ID NO: 3240117 - DNA, 25 bp, Homo sapien
tgaacgattgtcacagtcacggaag

SEQ ID NO: 3240118 - DNA, 25 bp, Homo sapien
tccacgcgtgtaaaccatacttgtt

SEQ ID NO: 3240119 - DNA, 25 bp, Homo sapien
gaagacaaggtgattccacgcgtgt

SEQ ID NO: 3240120 - DNA, 25 bp, Homo sapien
ggacttctatgccaccaggtgggct

SEQ ID NO: 3240121 - DNA, 25 bp, Homo sapien
ttctgagctcggatcctctgtcctg

SEQ ID NO: 3240122 - DNA, 25 bp, Homo sapien
ggcttctgagctcggatcctctgtc

SEQ ID NO: 3240123 - DNA, 25 bp, Homo sapien
gggggacttctatgccaccaggtgg

SEQ ID NO: 3240124 - DNA, 25 bp, Homo sapien
tagactattagaggccctctgtcct

SEQ ID NO: 3240125 - DNA, 25 bp, Homo sapien
tttgccgttggtggccgcattgagc

SEQ ID NO: 3240126 - DNA, 25 bp, Homo sapien
cgttggtggccgcattgagctttgc

SEQ ID NO: 3240127 - DNA, 25 bp, Homo sapien
tcatttgccgttggtggccgcattg

SEQ ID NO: 3240128 - DNA, 25 bp, Homo sapien
ttggtggccgcattgagctttgcat

SEQ ID NO: 3240129 - DNA, 25 bp, Homo sapien
gttccacataagctcatacgcaaga

SEQ ID NO: 3240130 - DNA, 25 bp, Homo sapien
ggaatattgttccacataagctcat

SEQ ID NO: 3240131 - DNA, 25 bp, Homo sapien
cctggaactggaatattgttccaca

SEQ ID NO: 3240132 - DNA, 25 bp, Homo sapien
catacgcaagataattgttggaagg

SEQ ID NO: 3240133 - DNA, 25 bp, Homo sapien
caagtaaatctgatacttggtccca

SEQ ID NO: 3240134 - DNA, 25 bp, Homo sapien
ttcactcttgtatgtttgctgccag

SEQ ID NO: 3240135 - DNA, 25 bp, Homo sapien
aatctgatacttggtcccatttctg

SEQ ID NO: 3240136 - DNA, 25 bp, Homo sapien
gccagtcatactgctaatgcttcca

SEQ ID NO: 3240137 - DNA, 25 bp, Homo sapien
ctgcatagcaggcctgacggccatc

SEQ ID NO: 3240138 - DNA, 25 bp, Homo sapien
catagcaggcctgacggccatctta

SEQ ID NO: 3240139 - DNA, 25 bp, Homo sapien
tgcatagcaggcctgacggccatct

SEQ ID NO: 3240140 - DNA, 25 bp, Homo sapien
atagcaggcctgacggccatcttac

SEQ ID NO: 3240141 - DNA, 25 bp, Homo sapien
cccctgctttttgagatgctgcttc

SEQ ID NO: 3240142 - DNA, 25 bp, Homo sapien
gggtcagggcattcccctctacagt

SEQ ID NO: 3240143 - DNA, 25 bp, Homo sapien
cctctacagtgagatgcttcccctg

SEQ ID NO: 3240144 - DNA, 25 bp, Homo sapien
tacagtgagatgcttcccctgcttt

SEQ ID NO: 3240145 - DNA, 25 bp, Homo sapien
tgctagagcaagatcactctctccc

SEQ ID NO: 3240146 - DNA, 25 bp, Homo sapien
cttctcatgtgttgctagagcaaga

SEQ ID NO: 3240147 - DNA, 25 bp, Homo sapien
cctatttctatcgttgtctcttcca

SEQ ID NO: 3240148 - DNA, 25 bp, Homo sapien
ccactgacattttagattcctgtgt

SEQ ID NO: 3240149 - DNA, 25 bp, Homo sapien
tcaagatcggactggcacccttgtt

SEQ ID NO: 3240150 - DNA, 25 bp, Homo sapien
aattgtccttggagcctttgctgtc

SEQ ID NO: 3240151 - DNA, 25 bp, Homo sapien
gtgaaacaaaggttgctggaaccat

SEQ ID NO: 3240152 - DNA, 25 bp, Homo sapien
catgacattcacagcctttgcacag

SEQ ID NO: 3240153 - DNA, 25 bp, Homo sapien
ggttgctggaaccatgacattcaca

SEQ ID NO: 3240154 - DNA, 25 bp, Homo sapien
tggaaccatgacattcacagccttt

SEQ ID NO: 3240155 - DNA, 25 bp, Homo sapien
gaagttcagcgttgtcagtcaccct

SEQ ID NO: 3240156 - DNA, 25 bp, Homo sapien
tctgcaacggctacttctaaacttg

SEQ ID NO: 3240157 - DNA, 25 bp, Homo sapien
gactttccctatctcacacctttga

SEQ ID NO: 3240158 - DNA, 25 bp, Homo sapien
gaacgttggatgttgaatcttctga

SEQ ID NO: 3240159 - DNA, 25 bp, Homo sapien
ttcaacggaaccagggaaagaggca

SEQ ID NO: 3240160 - DNA, 25 bp, Homo sapien
tgacccaaatggcaaatccctaagg

SEQ ID NO: 3240161 - DNA, 25 bp, Homo sapien
aatccctaaggagagcttgctgatg

SEQ ID NO: 3240162 - DNA, 25 bp, Homo sapien
ggaaagaggcaaacacgttctgtga

SEQ ID NO: 3240163 - DNA, 25 bp, Homo sapien
tgagctgtcaatgtgggctcttccc

SEQ ID NO: 3240164 - DNA, 25 bp, Homo sapien
tagtttacaagaatctgcaaaccac

SEQ ID NO: 3240165 - DNA, 25 bp, Homo sapien
gaatctgcaaaccacagctgaaacc

SEQ ID NO: 3240166 - DNA, 25 bp, Homo sapien
aatgagctgtcaatgtgggctcttc

SEQ ID NO: 3240167 - DNA, 25 bp, Homo sapien
tattgcagtgtcgacatgtgagctg

SEQ ID NO: 3240168 - DNA, 25 bp, Homo sapien
atttctattgcagtgtcgacatgtg

SEQ ID NO: 3240169 - DNA, 25 bp, Homo sapien
cagtgtcgacatgtgagctgagagc

SEQ ID NO: 3240170 - DNA, 25 bp, Homo sapien
agacaggctgccttcaggggaagaa

SEQ ID NO: 3240171 - DNA, 25 bp, Homo sapien
ccacggaacttgaggagacgaaaca

SEQ ID NO: 3240172 - DNA, 25 bp, Homo sapien
gatgcgtcttcctgatgcctctgct

SEQ ID NO: 3240173 - DNA, 25 bp, Homo sapien
tcagtcttactagtctgccacggaa

SEQ ID NO: 3240174 - DNA, 25 bp, Homo sapien
cagacgtgtctctcccaaggtgtca

SEQ ID NO: 3240175 - DNA, 25 bp, Homo sapien
tgagacattcgttggcatcactgag

SEQ ID NO: 3240176 - DNA, 25 bp, Homo sapien
tgataactgcctgcggtgaacggct

SEQ ID NO: 3240177 - DNA, 25 bp, Homo sapien
tggcatccatccaaggagcggacag

SEQ ID NO: 3240178 - DNA, 25 bp, Homo sapien
tggtctggaccatgattgccagcgg

SEQ ID NO: 3240179 - DNA, 25 bp, Homo sapien
taaattgtaattgcaaccaagtggg

SEQ ID NO: 3240180 - DNA, 25 bp, Homo sapien
agatatgcaagtctggttccacact

SEQ ID NO: 3240181 - DNA, 25 bp, Homo sapien
tattatgtcagtagatgcggcaacg

SEQ ID NO: 3240182 - DNA, 25 bp, Homo sapien
tattgcatcaaaaggctaaagaaga

SEQ ID NO: 3240183 - DNA, 25 bp, Homo sapien
tcctctgtacaatcccatcatccac

SEQ ID NO: 3240184 - DNA, 25 bp, Homo sapien
gtacaatcccatcgtccactcctct

SEQ ID NO: 3240185 - DNA, 25 bp, Homo sapien
tccactcctctgtacaatcccatcg

SEQ ID NO: 3240186 - DNA, 25 bp, Homo sapien
tgtacaatcccatcgtccactcctc

SEQ ID NO: 3240187 - DNA, 25 bp, Homo sapien
tcaactaggtttatggaattttcta

SEQ ID NO: 3240188 - DNA, 25 bp, Homo sapien
gttcatagcatctccacctggatta

SEQ ID NO: 3240189 - DNA, 25 bp, Homo sapien
atcaactaggtttatggaattttct

SEQ ID NO: 3240190 - DNA, 25 bp, Homo sapien
ccacctggattagattccatctcaa

SEQ ID NO: 3240191 - DNA, 25 bp, Homo sapien
catgttgcacgttctgagtcttgac

SEQ ID NO: 3240192 - DNA, 25 bp, Homo sapien
tcaaagcttacagtgcacattcagg

SEQ ID NO: 3240193 - DNA, 25 bp, Homo sapien
cactgctaacgggagatgatctatc

SEQ ID NO: 3240194 - DNA, 25 bp, Homo sapien
gcaggttcacagctaaatggagcag

SEQ ID NO: 3240195 - DNA, 25 bp, Homo sapien
ggtgactgtgctaaaattctcctgc

SEQ ID NO: 3240196 - DNA, 25 bp, Homo sapien
ttctcctgctcatgtgggcactggc

SEQ ID NO: 3240197 - DNA, 25 bp, Homo sapien
taacaaagcttaggacctctagtcc

SEQ ID NO: 3240198 - DNA, 25 bp, Homo sapien
gggcactggctcatgatattaacaa

SEQ ID NO: 3240199 - DNA, 25 bp, Homo sapien
cagcctcagtggtttcgggggctag

SEQ ID NO: 3240200 - DNA, 25 bp, Homo sapien
acagcctcagtggtttcgggggcta

SEQ ID NO: 3240201 - DNA, 25 bp, Homo sapien
cacagcctcagtggtttcgggggct

SEQ ID NO: 3240202 - DNA, 25 bp, Homo sapien
ctaggtccggggtgcgtccgccctg

SEQ ID NO: 3240203 - DNA, 25 bp, Homo sapien
gtggcagtggccctcacccctggaa

SEQ ID NO: 3240204 - DNA, 25 bp, Homo sapien
tgaattcatacacgccctgtccaac

SEQ ID NO: 3240205 - DNA, 25 bp, Homo sapien
tcacccctggaaagtctgccataca

SEQ ID NO: 3240206 - DNA, 25 bp, Homo sapien
ctgctgaattcatacacgccctgtc

SEQ ID NO: 3240207 - DNA, 25 bp, Homo sapien
gactattgagtagcttgttgagtac

SEQ ID NO: 3240208 - DNA, 25 bp, Homo sapien
tattaggcctaatgagactattgag

SEQ ID NO: 3240209 - DNA, 25 bp, Homo sapien
caggaagacacatacgaacaatggc

SEQ ID NO: 3240210 - DNA, 25 bp, Homo sapien
tgttgagtacatgaaacatacactc

SEQ ID NO: 3240211 - DNA, 25 bp, Homo sapien
gggaagctctaatagtgtaacctaa

SEQ ID NO: 3240212 - DNA, 25 bp, Homo sapien
ggagcagtgcattccactggacgtg

SEQ ID NO: 3240213 - DNA, 25 bp, Homo sapien
taacctaaactgtaggacctcagct

SEQ ID NO: 3240214 - DNA, 25 bp, Homo sapien
aaatctctttctcgcccagcaagtc

SEQ ID NO: 3240215 - DNA, 25 bp, Homo sapien
gcacactgccgctgttgtctgggtt

SEQ ID NO: 3240216 - DNA, 25 bp, Homo sapien
catccgtgctcattttcaaacttag

SEQ ID NO: 3240217 - DNA, 25 bp, Homo sapien
tgttgaaggtaaggaacatccgtgc

SEQ ID NO: 3240218 - DNA, 25 bp, Homo sapien
ggccgcgcacactgccgctgttgtg

SEQ ID NO: 3240219 - DNA, 25 bp, Homo sapien
acactgccgcgggagttcacgcaca

SEQ ID NO: 3240220 - DNA, 25 bp, Homo sapien
gtacactgccgccacgcggtcacgc

SEQ ID NO: 3240221 - DNA, 25 bp, Homo sapien
gcacattcccgccagtaggccacgt

SEQ ID NO: 3240222 - DNA, 25 bp, Homo sapien
ggtcacgcacactgccgcgggagtt

SEQ ID NO: 3240223 - DNA, 25 bp, Homo sapien
taagtcacgtcttaaagcgttgcac

SEQ ID NO: 3240224 - DNA, 25 bp, Homo sapien
tcctgagggaactggctcacagcaa

SEQ ID NO: 3240225 - DNA, 25 bp, Homo sapien
aaaggttgtcgcatctccccgaggt

SEQ ID NO: 3240226 - DNA, 25 bp, Homo sapien
gttctgtgcgttctcccactctgga

SEQ ID NO: 3240227 - DNA, 25 bp, Homo sapien
gataactggctccatggtttggcat

SEQ ID NO: 3240228 - DNA, 25 bp, Homo sapien
gggcagctgcttgtgtcattatcca

SEQ ID NO: 3240229 - DNA, 25 bp, Homo sapien
caaaagcgaagctggctgtcactgt

SEQ ID NO: 3240230 - DNA, 25 bp, Homo sapien
tcaacaagtccttgctggccccaaa

SEQ ID NO: 3240231 - DNA, 25 bp, Homo sapien
cagcagttcagaaggtctatttcct

SEQ ID NO: 3240232 - DNA, 25 bp, Homo sapien
tccatctgcctaagattggtgtgca

SEQ ID NO: 3240233 - DNA, 25 bp, Homo sapien
ctaagattggtgtgcactgtgcttc

SEQ ID NO: 3240234 - DNA, 25 bp, Homo sapien
ctggaacggtccgactccatgggct

SEQ ID NO: 3240235 - DNA, 25 bp, Homo sapien
tggcatggctggaacggtccgactc

SEQ ID NO: 3240236 - DNA, 25 bp, Homo sapien
ccacaaactcagttggcctctgccg

SEQ ID NO: 3240237 - DNA, 25 bp, Homo sapien
actcagttggcctctgccgcactgt

SEQ ID NO: 3240238 - DNA, 25 bp, Homo sapien
gcctctgccgcactgtctcttctat

SEQ ID NO: 3240239 - DNA, 25 bp, Homo sapien
ggcctctgccgcactgtctcttcta

SEQ ID NO: 3240240 - DNA, 25 bp, Homo sapien
aaattcagttgacctctgccacact

SEQ ID NO: 3240241 - DNA, 25 bp, Homo sapien
ttgtgttggagggtgtacctaatcc

SEQ ID NO: 3240242 - DNA, 25 bp, Homo sapien
gcaggaagcaggggcagttgaaatc

SEQ ID NO: 3240243 - DNA, 25 bp, Homo sapien
gagcaggaagcaggggcagttgaaa

SEQ ID NO: 3240244 - DNA, 25 bp, Homo sapien
agcaggaagcaggggcagttgaaat

SEQ ID NO: 3240245 - DNA, 25 bp, Homo sapien
caggaagcaggggcagttgaaatcc

SEQ ID NO: 3240246 - DNA, 25 bp, Homo sapien
taagaagggagagaatgtttagacc

SEQ ID NO: 3240247 - DNA, 25 bp, Homo sapien
aacggaataagaagggagagaatgt

SEQ ID NO: 3240248 - DNA, 25 bp, Homo sapien
gaataagaagggagagaatgtttag

SEQ ID NO: 3240249 - DNA, 25 bp, Homo sapien
taacggaataagaagggagagaatg

SEQ ID NO: 3240250 - DNA, 25 bp, Homo sapien
gcaattccgactgggccttgacaaa

SEQ ID NO: 3240251 - DNA, 25 bp, Homo sapien
tcacaggtgcatccagaagactcca

SEQ ID NO: 3240252 - DNA, 25 bp, Homo sapien
tcaacgtggccaatgttggaatgcc

SEQ ID NO: 3240253 - DNA, 25 bp, Homo sapien
gaagagatcctgtgttaaaacgtgc

SEQ ID NO: 3240254 - DNA, 25 bp, Homo sapien
catcgtgtggggctcgaatttgaaa

SEQ ID NO: 3240255 - DNA, 25 bp, Homo sapien
tgaaaaatcctgagctggatatgac

SEQ ID NO: 3240256 - DNA, 25 bp, Homo sapien
aaaaatcctgagctggatatgacat

SEQ ID NO: 3240257 - DNA, 25 bp, Homo sapien
tgtggggctcgaatttgaaaaatcc

SEQ ID NO: 3240258 - DNA, 25 bp, Homo sapien
tcagtgaactgtcaactgaaaagta

SEQ ID NO: 3240259 - DNA, 25 bp, Homo sapien
gatatctaacatgtggtccagtctc

SEQ ID NO: 3240260 - DNA, 25 bp, Homo sapien
aaagtattgcttggaatcaaaggcc

SEQ ID NO: 3240261 - DNA, 25 bp, Homo sapien
gtctcctcgactaggttaacagcct

SEQ ID NO: 3240262 - DNA, 25 bp, Homo sapien
gaattaggggtcttactgtccacat

SEQ ID NO: 3240263 - DNA, 25 bp, Homo sapien
gggtcttactgtccacatctgtttt

SEQ ID NO: 3240264 - DNA, 25 bp, Homo sapien
gagggcgtcgtaactgttgtgtgct

SEQ ID NO: 3240265 - DNA, 25 bp, Homo sapien
acccagggttgaaagcagtatctct

SEQ ID NO: 3240266 - DNA, 25 bp, Homo sapien
tgtgtcagcacgcagcgagttgtgt

SEQ ID NO: 3240267 - DNA, 25 bp, Homo sapien
cacgcagcgagttgtgtttggcttt

SEQ ID NO: 3240268 - DNA, 25 bp, Homo sapien
aggctgtgtcagcacgcagcgagtt

SEQ ID NO: 3240269 - DNA, 25 bp, Homo sapien
cagcacgcagcgagttgtgtttggc

SEQ ID NO: 3240270 - DNA, 25 bp, Homo sapien
gcgtctgggctcagcggtggcctcc

SEQ ID NO: 3240271 - DNA, 25 bp, Homo sapien
tcgggttgaattcaagccggcgtct

SEQ ID NO: 3240272 - DNA, 25 bp, Homo sapien
taaaatcctcgggttgaattcaagc

SEQ ID NO: 3240273 - DNA, 25 bp, Homo sapien
attcaagccggcgtctgggctcagc

SEQ ID NO: 3240274 - DNA, 25 bp, Homo sapien
gatcttgatgggagtctcgaggtaa

SEQ ID NO: 3240275 - DNA, 25 bp, Homo sapien
ccagatcttgatgggagtctcgagg

SEQ ID NO: 3240276 - DNA, 25 bp, Homo sapien
tgccagatcttgatgggagtctcga

SEQ ID NO: 3240277 - DNA, 25 bp, Homo sapien
ctgccagatcttgatgggagtctcg

SEQ ID NO: 3240278 - DNA, 25 bp, Homo sapien
gcactggagagtttataaagacctt

SEQ ID NO: 3240279 - DNA, 25 bp, Homo sapien
catagcactggagagtttataaaga

SEQ ID NO: 3240280 - DNA, 25 bp, Homo sapien
agcactggagagtttataaagacct

SEQ ID NO: 3240281 - DNA, 25 bp, Homo sapien
tagcactggagagtttataaagacc

SEQ ID NO: 3240282 - DNA, 25 bp, Homo sapien
aaatgaccagtaatacacataaata

SEQ ID NO: 3240283 - DNA, 25 bp, Homo sapien
cacataaatatatgcagtgttgcat

SEQ ID NO: 3240284 - DNA, 25 bp, Homo sapien
ctaaaatgaccagtaatacacataa

SEQ ID NO: 3240285 - DNA, 25 bp, Homo sapien
acacataaatatatgcagtgttgca

SEQ ID NO: 3240286 - DNA, 25 bp, Homo sapien
cttagggttttatgtatggaggtgt

SEQ ID NO: 3240287 - DNA, 25 bp, Homo sapien
aggatgcttagcttcacccccagga

SEQ ID NO: 3240288 - DNA, 25 bp, Homo sapien
cttcacccccaggatgcttagctcc

SEQ ID NO: 3240289 - DNA, 25 bp, Homo sapien
ttcacccccaggatgcttagctcca

SEQ ID NO: 3240290 - DNA, 25 bp, Homo sapien
tcacccccaggatgcttagctccac

SEQ ID NO: 3240291 - DNA, 25 bp, Homo sapien
cctccaggctgcttagctccacccc

SEQ ID NO: 3240292 - DNA, 25 bp, Homo sapien
ctgcttagctccacccccaggctgc

SEQ ID NO: 3240293 - DNA, 25 bp, Homo sapien
aggctgcttagctccacccccaggc

SEQ ID NO: 3240294 - DNA, 25 bp, Homo sapien
ccaggctgcttagctccacccccag

SEQ ID NO: 3240295 - DNA, 25 bp, Homo sapien
ggctgcttagctccacccccaggct

SEQ ID NO: 3240296 - DNA, 25 bp, Homo sapien
caggatgcttagctccacctccagg

SEQ ID NO: 3240297 - DNA, 25 bp, Homo sapien
gctgcttagctccacccccaggctg

SEQ ID NO: 3240298 - DNA, 25 bp, Homo sapien
ttcacccccaggatgcttagctcca

SEQ ID NO: 3240299 - DNA, 25 bp, Homo sapien
ccaggatgcttagctccacccccag

SEQ ID NO: 3240300 - DNA, 25 bp, Homo sapien
acccccaggatgcttagctccaccc

SEQ ID NO: 3240301 - DNA, 25 bp, Homo sapien
ttcacccccaggatgcttagctcca

SEQ ID NO: 3240302 - DNA, 25 bp, Homo sapien
ggatgcttagctccacccccaggat

SEQ ID NO: 3240303 - DNA, 25 bp, Homo sapien
acccccaggctgcttacctccacct

SEQ ID NO: 3240304 - DNA, 25 bp, Homo sapien
cacccccaggctgcttacctccacc

SEQ ID NO: 3240305 - DNA, 25 bp, Homo sapien
aggatgcttagcttcacccccagga

SEQ ID NO: 3240306 - DNA, 25 bp, Homo sapien
aagctccacccccaggctgcttagc

SEQ ID NO: 3240307 - DNA, 25 bp, Homo sapien
ccacccccaggctgcttagcttcac

SEQ ID NO: 3240308 - DNA, 25 bp, Homo sapien
ctccacccccaggctgcttagcttc

SEQ ID NO: 3240309 - DNA, 25 bp, Homo sapien
ctaagctccacccccaggctgctta

SEQ ID NO: 3240310 - DNA, 25 bp, Homo sapien
gtctgtggcagcttgtaaggagaat

SEQ ID NO: 3240311 - DNA, 25 bp, Homo sapien
gagaaggccacaccccatgatgtgt

SEQ ID NO: 3240312 - DNA, 25 bp, Homo sapien
ggagacaaggaagaatgagattggc

SEQ ID NO: 3240313 - DNA, 25 bp, Homo sapien
agaatgccgacaaccagagcacaca

SEQ ID NO: 3240314 - DNA, 25 bp, Homo sapien
aattccagtatccacaatagtgagt

SEQ ID NO: 3240315 - DNA, 25 bp, Homo sapien
ctaatttactgggatccgtcaagct

SEQ ID NO: 3240316 - DNA, 25 bp, Homo sapien
ccacaatagtgagtgttcgatcttg

SEQ ID NO: 3240317 - DNA, 25 bp, Homo sapien
tggtataaggctaatatgcggctct

SEQ ID NO: 3240318 - DNA, 25 bp, Homo sapien
gatccccttaatgaggactcccagg

SEQ ID NO: 3240319 - DNA, 25 bp, Homo sapien
gaatgatccccttaatgaggactcc

SEQ ID NO: 3240320 - DNA, 25 bp, Homo sapien
aaaacttccatgaacactttggtct

SEQ ID NO: 3240321 - DNA, 25 bp, Homo sapien
ggtctcagacttggtgatagttcca

SEQ ID NO: 3240322 - DNA, 25 bp, Homo sapien
tggtcttcttttagcggtaggataa

SEQ ID NO: 3240323 - DNA, 25 bp, Homo sapien
ataacctttgttccatgacctatag

SEQ ID NO: 3240324 - DNA, 25 bp, Homo sapien
ctttgttccatgacctataggttca

SEQ ID NO: 3240325 - DNA, 25 bp, Homo sapien
aacctttgttccatgacctataggt

SEQ ID NO: 3240326 - DNA, 25 bp, Homo sapien
tctctgcgtgcagacaatttgattt

SEQ ID NO: 3240327 - DNA, 25 bp, Homo sapien
tttccaacagctcaaaaggagcaag

SEQ ID NO: 3240328 - DNA, 25 bp, Homo sapien
tccatgatgagatctctgcgtgcag

SEQ ID NO: 3240329 - DNA, 25 bp, Homo sapien
cagttaatggtcaagcttttgtaga

SEQ ID NO: 3240330 - DNA, 25 bp, Homo sapien
cagatattcagggattagctcctca

SEQ ID NO: 3240331 - DNA, 25 bp, Homo sapien
agatattcagggattagctcctcac

SEQ ID NO: 3240332 - DNA, 25 bp, Homo sapien
cacccctctgatgaagttcagatat

SEQ ID NO: 3240333 - DNA, 25 bp, Homo sapien
gttcagatattcagggattagctcc

SEQ ID NO: 3240334 - DNA, 25 bp, Homo sapien
atttagagggagatcctccgagtct

SEQ ID NO: 3240335 - DNA, 25 bp, Homo sapien
ggaaaatatttagagggagatcctc

SEQ ID NO: 3240336 - DNA, 25 bp, Homo sapien
aatatttagagggagatcctccgag

SEQ ID NO: 3240337 - DNA, 25 bp, Homo sapien
aaaatatttagagggagatcctccg

SEQ ID NO: 3240338 - DNA, 25 bp, Homo sapien
tctgattttgagagtctccgtgtat

SEQ ID NO: 3240339 - DNA, 25 bp, Homo sapien
ttgagagtctccgtgtattccaagc

SEQ ID NO: 3240340 - DNA, 25 bp, Homo sapien
tgattttgagagtctccgtgtattc

SEQ ID NO: 3240341 - DNA, 25 bp, Homo sapien
cttctgattttgagagtctccgtgt

SEQ ID NO: 3240342 - DNA, 25 bp, Homo sapien
gaggcatatgtgtagtatcttagca

SEQ ID NO: 3240343 - DNA, 25 bp, Homo sapien
tagtatcttagcagctctgaaagtt

SEQ ID NO: 3240344 - DNA, 25 bp, Homo sapien
cagaggcatatgtgtagtatcttag

SEQ ID NO: 3240345 - DNA, 25 bp, Homo sapien
gtagtatcttagcagctctgaaagt

SEQ ID NO: 3240346 - DNA, 25 bp, Homo sapien
tgtgatataatagatatgtttctgg

SEQ ID NO: 3240347 - DNA, 25 bp, Homo sapien
tttccttcattctggtgcagtagtc

SEQ ID NO: 3240348 - DNA, 25 bp, Homo sapien
ggttttccttcattctggtgcagta

SEQ ID NO: 3240349 - DNA, 25 bp, Homo sapien
tataatagatatgtttctggttttc

SEQ ID NO: 3240350 - DNA, 25 bp, Homo sapien
gcacaatggttgagttagctacctg

SEQ ID NO: 3240351 - DNA, 25 bp, Homo sapien
gttagctacctggtccttggtctca

SEQ ID NO: 3240352 - DNA, 25 bp, Homo sapien
ttagctacctggtccttggtctcac

SEQ ID NO: 3240353 - DNA, 25 bp, Homo sapien
gttgcacaatggttgagttagctac

SEQ ID NO: 3240354 - DNA, 25 bp, Homo sapien
gctcgatcgtatagatcacttccaa

SEQ ID NO: 3240355 - DNA, 25 bp, Homo sapien
gggctcgatcgtatagatcacttcc

SEQ ID NO: 3240356 - DNA, 25 bp, Homo sapien
ggctcgatcgtatagatcacttcca

SEQ ID NO: 3240357 - DNA, 25 bp, Homo sapien
acatggagacgtcaccaattggttt

SEQ ID NO: 3240358 - DNA, 25 bp, Homo sapien
cttgagacaatacaacatggagacg

SEQ ID NO: 3240359 - DNA, 25 bp, Homo sapien
agacaatacaacatggagacgtcac

SEQ ID NO: 3240360 - DNA, 25 bp, Homo sapien
tacaacatggagacgtcaccaattg

SEQ ID NO: 3240361 - DNA, 25 bp, Homo sapien
agcccgaagtcagaagacaggagcg

SEQ ID NO: 3240362 - DNA, 25 bp, Homo sapien
atgtgtctggggaccttccagcccg

SEQ ID NO: 3240363 - DNA, 25 bp, Homo sapien
gggaccttccagcccgaagtcagaa

SEQ ID NO: 3240364 - DNA, 25 bp, Homo sapien
ttccagcccgaagtcagaagacagg

SEQ ID NO: 3240365 - DNA, 25 bp, Homo sapien
gtgatgtgtcgtcatctccttcgag

SEQ ID NO: 3240366 - DNA, 25 bp, Homo sapien
gatgtgtcgtcatctccttcgaggg

SEQ ID NO: 3240367 - DNA, 25 bp, Homo sapien
ttttccatgcgtgatgtgtcgtcat

SEQ ID NO: 3240368 - DNA, 25 bp, Homo sapien
atgcgtgatgtgtcgtcatctcctt

SEQ ID NO: 3240369 - DNA, 25 bp, Homo sapien
tttttcacagtggatcagctcaaca

SEQ ID NO: 3240370 - DNA, 25 bp, Homo sapien
gctttttcacagtggatcagctcaa

SEQ ID NO: 3240371 - DNA, 25 bp, Homo sapien
ctttttcacagtggatcagctcaac

SEQ ID NO: 3240372 - DNA, 25 bp, Homo sapien
ttttcacagtggatcagctcaacat

SEQ ID NO: 3240373 - DNA, 25 bp, Homo sapien
gcttgtgtgtagcacgtacacaatg

SEQ ID NO: 3240374 - DNA, 25 bp, Homo sapien
gctcaggatgacagattcacactct

SEQ ID NO: 3240375 - DNA, 25 bp, Homo sapien
gtgtagcacgtacacaatgcctcat

SEQ ID NO: 3240376 - DNA, 25 bp, Homo sapien
tgtgtgtagcacgtacacaatgcct

SEQ ID NO: 3240377 - DNA, 25 bp, Homo sapien
ggtcagcagggcagacgcaggttga

SEQ ID NO: 3240378 - DNA, 25 bp, Homo sapien
tcagcagggcagacgcaggttgaat

SEQ ID NO: 3240379 - DNA, 25 bp, Homo sapien
cagcagggcagacgcaggttgaatg

SEQ ID NO: 3240380 - DNA, 25 bp, Homo sapien
cagggcagacgcaggttgaatggga

SEQ ID NO: 3240381 - DNA, 25 bp, Homo sapien
ccgggtgagggtcagccacagccca

SEQ ID NO: 3240382 - DNA, 25 bp, Homo sapien
cgggtgagggtcagccacagcccac

SEQ ID NO: 3240383 - DNA, 25 bp, Homo sapien
tgaagctcccagccgtgacttctct

SEQ ID NO: 3240384 - DNA, 25 bp, Homo sapien
cgtgacttctctactcctcggccca

SEQ ID NO: 3240385 - DNA, 25 bp, Homo sapien
tcaaaagggccatggggactggtct

SEQ ID NO: 3240386 - DNA, 25 bp, Homo sapien
ctcaaaagggccatggggactggtc

SEQ ID NO: 3240387 - DNA, 25 bp, Homo sapien
tgataaagttcacaaggccaagctc

SEQ ID NO: 3240388 - DNA, 25 bp, Homo sapien
tgtgttctgactttgggtgcccgga

SEQ ID NO: 3240389 - DNA, 25 bp, Homo sapien
tgtgatagggatgacagcattctcc

SEQ ID NO: 3240390 - DNA, 25 bp, Homo sapien
caatttgccagtgggctatgttcca

SEQ ID NO: 3240391 - DNA, 25 bp, Homo sapien
ctaggctgaccacgcgtctaggctg

SEQ ID NO: 3240392 - DNA, 25 bp, Homo sapien
gctgaccacgcgtctaggctggcca

SEQ ID NO: 3240393 - DNA, 25 bp, Homo sapien
gcacacgtctaggctggctgcacgt

SEQ ID NO: 3240394 - DNA, 25 bp, Homo sapien
cacacgtctaggctggctgcacgtc

SEQ ID NO: 3240395 - DNA, 25 bp, Homo sapien
tcagtccctaagacccgccttggga

SEQ ID NO: 3240396 - DNA, 25 bp, Homo sapien
ggcagttgccgttgcagtcctcttt

SEQ ID NO: 3240397 - DNA, 25 bp, Homo sapien
gactcgttggtagatggctgtgaat

SEQ ID NO: 3240398 - DNA, 25 bp, Homo sapien
gaaaggacttgacggtaggctcctg

SEQ ID NO: 3240399 - DNA, 25 bp, Homo sapien
gaagtcgagtgataggatgcctctg

SEQ ID NO: 3240400 - DNA, 25 bp, Homo sapien
catgttgaagttgggttacatgatg

SEQ ID NO: 3240401 - DNA, 25 bp, Homo sapien
tattgcattttgacgtcgggttata

SEQ ID NO: 3240402 - DNA, 25 bp, Homo sapien
gcatgttgccgtcgggttgtatgat

SEQ ID NO: 3240403 - DNA, 25 bp, Homo sapien
cacaatgattagattcaaggcctgc

SEQ ID NO: 3240404 - DNA, 25 bp, Homo sapien
ggtgacagctctgacggaaacgaat

SEQ ID NO: 3240405 - DNA, 25 bp, Homo sapien
tcagtcaagacgtagtcacgggtca

SEQ ID NO: 3240406 - DNA, 25 bp, Homo sapien
gaaacgaatagcaggtgggatgaca

SEQ ID NO: 3240407 - DNA, 25 bp, Homo sapien
gatttaaggaatcgtagttgctcaa

SEQ ID NO: 3240408 - DNA, 25 bp, Homo sapien
cacaaggagcatgagctatcagcca

SEQ ID NO: 3240409 - DNA, 25 bp, Homo sapien
ttaatagacatagggcccacttccc

SEQ ID NO: 3240410 - DNA, 25 bp, Homo sapien
tgtatgctgttagcttgctgaacca

SEQ ID NO: 3240411 - DNA, 25 bp, Homo sapien
aaggcgcatcatgagtgtctcctcc

SEQ ID NO: 3240412 - DNA, 25 bp, Homo sapien
ctatggccaaaaggcgcatcatgag

SEQ ID NO: 3240413 - DNA, 25 bp, Homo sapien
caggtcttccgtcatcccatttcat

SEQ ID NO: 3240414 - DNA, 25 bp, Homo sapien
ctgttcctggtgagtgctaaggacc

SEQ ID NO: 3240415 - DNA, 25 bp, Homo sapien
tgggttggagttgctttcttagcca

SEQ ID NO: 3240416 - DNA, 25 bp, Homo sapien
ttgtggtccttcatatttgcagtgt

SEQ ID NO: 3240417 - DNA, 25 bp, Homo sapien
tatttgcagtgtgtgggttggagtt

SEQ ID NO: 3240418 - DNA, 25 bp, Homo sapien
tatgcaaaccagagcctgcgtgcct

SEQ ID NO: 3240419 - DNA, 25 bp, Homo sapien
tcatgcttaggaacacggtcgctca

SEQ ID NO: 3240420 - DNA, 25 bp, Homo sapien
cttcatgcttaggaacacggtcgct

SEQ ID NO: 3240421 - DNA, 25 bp, Homo sapien
ttaggaacacggtcgctcatcttca

SEQ ID NO: 3240422 - DNA, 25 bp, Homo sapien
tgcttaggaacacggtcgctcatct

SEQ ID NO: 3240423 - DNA, 25 bp, Homo sapien
catgcttaggaacagacactcatct

SEQ ID NO: 3240424 - DNA, 25 bp, Homo sapien
agacactcatcttcactacgcaaac

SEQ ID NO: 3240425 - DNA, 25 bp, Homo sapien
ttcatgcttaggaacagacactcat

SEQ ID NO: 3240426 - DNA, 25 bp, Homo sapien
gacactcatcttcactacgcaaacc

SEQ ID NO: 3240427 - DNA, 25 bp, Homo sapien
ctagacctgaaagggtgaatacatt

SEQ ID NO: 3240428 - DNA, 25 bp, Homo sapien
gacctgaaagggtgaatacattcat

SEQ ID NO: 3240429 - DNA, 25 bp, Homo sapien
tgcagtaggtgtccaggatcctcat

SEQ ID NO: 3240430 - DNA, 25 bp, Homo sapien
gaatacattcatgcagtaggtgtcc

SEQ ID NO: 3240431 - DNA, 25 bp, Homo sapien
aagtctgtaataagggcacctacac

SEQ ID NO: 3240432 - DNA, 25 bp, Homo sapien
aacttgtaagagtggttagccttgg

SEQ ID NO: 3240433 - DNA, 25 bp, Homo sapien
ctgtaataagggcacctacactaag

SEQ ID NO: 3240434 - DNA, 25 bp, Homo sapien
taagagtggttagccttggacttta

SEQ ID NO: 3240435 - DNA, 25 bp, Homo sapien
ggcctgagcggccttctcagttgca

SEQ ID NO: 3240436 - DNA, 25 bp, Homo sapien
agcggccttctcagttgcacaggta

SEQ ID NO: 3240437 - DNA, 25 bp, Homo sapien
aaggtgatggcgtgaaatcaagttc

SEQ ID NO: 3240438 - DNA, 25 bp, Homo sapien
gggacactcctgagagcattcctgc

SEQ ID NO: 3240439 - DNA, 25 bp, Homo sapien
gaagagcttccaagtgtagcgagtc

SEQ ID NO: 3240440 - DNA, 25 bp, Homo sapien
aagtgtagcgagtctcctggcatca

SEQ ID NO: 3240441 - DNA, 25 bp, Homo sapien
cctggcatcaggtatggctggtatc

SEQ ID NO: 3240442 - DNA, 25 bp, Homo sapien
tcatggaaacactcggctgactgtc

SEQ ID NO: 3240443 - DNA, 25 bp, Homo sapien
gcacttgttaggacgttatacttat

SEQ ID NO: 3240444 - DNA, 25 bp, Homo sapien
cctgtgttgactactgagaatgaaa

SEQ ID NO: 3240445 - DNA, 25 bp, Homo sapien
tttcagccatgatcatttattccag

SEQ ID NO: 3240446 - DNA, 25 bp, Homo sapien
ttccagaagcacttgttaggacgtt

SEQ ID NO: 3240447 - DNA, 25 bp, Homo sapien
tcttgtaggtgctagagcctcaaag

SEQ ID NO: 3240448 - DNA, 25 bp, Homo sapien
gcttctccaagattcagttcacaaa

SEQ ID NO: 3240449 - DNA, 25 bp, Homo sapien
cacacgggtgagacaggtgatccac

SEQ ID NO: 3240450 - DNA, 25 bp, Homo sapien
catgactggtttctgtgtggagact

SEQ ID NO: 3240451 - DNA, 25 bp, Homo sapien
aaaaggtcatggttctctcatcagg

SEQ ID NO: 3240452 - DNA, 25 bp, Homo sapien
tcaaaggcttatcccatggcccgag

SEQ ID NO: 3240453 - DNA, 25 bp, Homo sapien
gggcttcataaattcacacgaggga

SEQ ID NO: 3240454 - DNA, 25 bp, Homo sapien
cagtgattctcaggaagcgaggccc

SEQ ID NO: 3240455 - DNA, 25 bp, Homo sapien
tggtgaacgtttattttctatggag

SEQ ID NO: 3240456 - DNA, 25 bp, Homo sapien
ccttggtgaacgtttattttctatg

SEQ ID NO: 3240457 - DNA, 25 bp, Homo sapien
ggtgaacgtttattttctatggaga

SEQ ID NO: 3240458 - DNA, 25 bp, Homo sapien
tgccttggtgaacgtttattttcta

SEQ ID NO: 3240459 - DNA, 25 bp, Homo sapien
ttatctcggcatttaaaccgtgcct

SEQ ID NO: 3240460 - DNA, 25 bp, Homo sapien
tttaaaccgtgcctggactctgtgc

SEQ ID NO: 3240461 - DNA, 25 bp, Homo sapien
gcatttaaaccgtgcctggactctg

SEQ ID NO: 3240462 - DNA, 25 bp, Homo sapien
tctcggcatttaaaccgtgcctgga

SEQ ID NO: 3240463 - DNA, 25 bp, Homo sapien
tggtgatgtccttgctgaggactgg

SEQ ID NO: 3240464 - DNA, 25 bp, Homo sapien
tgtgctgttggctacgtccagtgct

SEQ ID NO: 3240465 - DNA, 25 bp, Homo sapien
cttttcttcccgctttaggatcatg

SEQ ID NO: 3240466 - DNA, 25 bp, Homo sapien
gctgttggctacgtccagtgctgag

SEQ ID NO: 3240467 - DNA, 25 bp, Homo sapien
cattcaggtgtttctcgcataaaaa

SEQ ID NO: 3240468 - DNA, 25 bp, Homo sapien
tcaaggctcgatgaaaatgtgaggt

SEQ ID NO: 3240469 - DNA, 25 bp, Homo sapien
tattaaggaaactaactggatacac

SEQ ID NO: 3240470 - DNA, 25 bp, Homo sapien
tagtttacaacaagccactgtacag

SEQ ID NO: 3240471 - DNA, 25 bp, Homo sapien
tttggaaaagaggacttctgcaaat

SEQ ID NO: 3240472 - DNA, 25 bp, Homo sapien
tccaagactctggtgttgaaattca

SEQ ID NO: 3240473 - DNA, 25 bp, Homo sapien
ttccttgtctgactccaagactctg

SEQ ID NO: 3240474 - DNA, 25 bp, Homo sapien
gaaaagaggacttctgcaaattcaa

SEQ ID NO: 3240475 - DNA, 25 bp, Homo sapien
cattcggcagttactccagtctcct

SEQ ID NO: 3240476 - DNA, 25 bp, Homo sapien
agtctcctgctcttgcttatccttg

SEQ ID NO: 3240477 - DNA, 25 bp, Homo sapien
gctcttgcttatccttgaaatgcat

SEQ ID NO: 3240478 - DNA, 25 bp, Homo sapien
ggcagttactccagtctcctgctct

SEQ ID NO: 3240479 - DNA, 25 bp, Homo sapien
ttgcattcttcaataggacacttag

SEQ ID NO: 3240480 - DNA, 25 bp, Homo sapien
caccatgccaaaaggagttactaaa

SEQ ID NO: 3240481 - DNA, 25 bp, Homo sapien
taggacacttagtccattgggccag

SEQ ID NO: 3240482 - DNA, 25 bp, Homo sapien
tgttgaggccaatctcgctgtctgc

SEQ ID NO: 3240483 - DNA, 25 bp, Homo sapien
gaacggcatgatcttccagttgaca

SEQ ID NO: 3240484 - DNA, 25 bp, Homo sapien
tgtcaggaacggcatgatcttccag

SEQ ID NO: 3240485 - DNA, 25 bp, Homo sapien
acggcatgatcttccagttgacatc

SEQ ID NO: 3240486 - DNA, 25 bp, Homo sapien
cttctaattgtcaggaacggcatga

SEQ ID NO: 3240487 - DNA, 25 bp, Homo sapien
ccatgaatgtgaaattatctagcac

SEQ ID NO: 3240488 - DNA, 25 bp, Homo sapien
ggcaccactgtccttgataaattga

SEQ ID NO: 3240489 - DNA, 25 bp, Homo sapien
cctgatggtacttgtgataaaatac

SEQ ID NO: 3240490 - DNA, 25 bp, Homo sapien
taaattgagcactagaaaagccatg

SEQ ID NO: 3240491 - DNA, 25 bp, Homo sapien
tgatggagaattcatgtggtcctgc

SEQ ID NO: 3240492 - DNA, 25 bp, Homo sapien
aagtcatggtttcagaccacttcag

SEQ ID NO: 3240493 - DNA, 25 bp, Homo sapien
taatcaacgtgctgtatctccagcc

SEQ ID NO: 3240494 - DNA, 25 bp, Homo sapien
cagtgttattagtagctgcattcac

SEQ ID NO: 3240495 - DNA, 25 bp, Homo sapien
aaatgagaggctctgtttctcttgc

SEQ ID NO: 3240496 - DNA, 25 bp, Homo sapien
aaaatgagaggctctgtttctcttg

SEQ ID NO: 3240497 - DNA, 25 bp, Homo sapien
gtagcattaaccctaccatgtgctt

SEQ ID NO: 3240498 - DNA, 25 bp, Homo sapien
tgcttcccttgagcagggaactcct

SEQ ID NO: 3240499 - DNA, 25 bp, Homo sapien
ttcaccaccttcatggaaaccaaaa

SEQ ID NO: 3240500 - DNA, 25 bp, Homo sapien
gaaaccaaaatgaggatcttcaaag

SEQ ID NO: 3240501 - DNA, 25 bp, Homo sapien
tgttgaaattacacagtggctgcca

SEQ ID NO: 3240502 - DNA, 25 bp, Homo sapien
gagccaccaaattcaaccagagatg

SEQ ID NO: 3240503 - DNA, 25 bp, Homo sapien
gtggctgccattccaatgacttgtg

SEQ ID NO: 3240504 - DNA, 25 bp, Homo sapien
cagagggatgaagcgttttgttgaa

SEQ ID NO: 3240505 - DNA, 25 bp, Homo sapien
catcctgcgtgtagagatatgcact

SEQ ID NO: 3240506 - DNA, 25 bp, Homo sapien
tatagatgacagctgtacacccatg

SEQ ID NO: 3240507 - DNA, 25 bp, Homo sapien
cagagagaaaacttagaggagcagc

SEQ ID NO: 3240508 - DNA, 25 bp, Homo sapien
cagggacgtacttccaacatgcagg

SEQ ID NO: 3240509 - DNA, 25 bp, Homo sapien
ttttacggtcgcagacagcagggct

SEQ ID NO: 3240510 - DNA, 25 bp, Homo sapien
ggagctgagtcagaagacgcctggc

SEQ ID NO: 3240511 - DNA, 25 bp, Homo sapien
cagcagggctgtttgtgagagcagc

SEQ ID NO: 3240512 - DNA, 25 bp, Homo sapien
gtgtacctgtgaaaacgtccctcgc

SEQ ID NO: 3240513 - DNA, 25 bp, Homo sapien
tggaccctggccacactatgccgtc

SEQ ID NO: 3240514 - DNA, 25 bp, Homo sapien
tacttatgggggatctggcgtcagc

SEQ ID NO: 3240515 - DNA, 25 bp, Homo sapien
cgtccctgagggtagatgttactta

SEQ ID NO: 3240516 - DNA, 25 bp, Homo sapien
tatgccgtcctcatcgttcctgctc

SEQ ID NO: 3240517 - DNA, 25 bp, Homo sapien
tcccgaatccagagcagcagtctca

SEQ ID NO: 3240518 - DNA, 25 bp, Homo sapien
cccgaatccagagcagcagtctcac

SEQ ID NO: 3240519 - DNA, 25 bp, Homo sapien
gtttgtagcccggatgacatctgcc

SEQ ID NO: 3240520 - DNA, 25 bp, Homo sapien
aacggagctcaaatgccactaaaac

SEQ ID NO: 3240521 - DNA, 25 bp, Homo sapien
catcctccacaacggagctcaaatg

SEQ ID NO: 3240522 - DNA, 25 bp, Homo sapien
aatttccagactttgtccatatttc

SEQ ID NO: 3240523 - DNA, 25 bp, Homo sapien
agagagtggcttgagtgggcaaccc

SEQ ID NO: 3240524 - DNA, 25 bp, Homo sapien
ggcagtcatggtcccgtgtatcttc

SEQ ID NO: 3240525 - DNA, 25 bp, Homo sapien
aaatgtgttagcaggcctcttcagg

SEQ ID NO: 3240526 - DNA, 25 bp, Homo sapien
ggtgacagaacaaaaggattccgtc

SEQ ID NO: 3240527 - DNA, 25 bp, Homo sapien
aataggccactttccgagtgatagc

SEQ ID NO: 3240528 - DNA, 25 bp, Homo sapien
gactgaggccaatcttctgttttgc

SEQ ID NO: 3240529 - DNA, 25 bp, Homo sapien
atttgaggtttgtagggccagtcgc

SEQ ID NO: 3240530 - DNA, 25 bp, Homo sapien
tcctttgtttgggtcagtggcccca

SEQ ID NO: 3240531 - DNA, 25 bp, Homo sapien
ggtggtgggaagcatcttttcccag

SEQ ID NO: 3240532 - DNA, 25 bp, Homo sapien
tggtggtgggaagcatcttttccca

SEQ ID NO: 3240533 - DNA, 25 bp, Homo sapien
ttctgtgcatggagggaaaaaggct

SEQ ID NO: 3240534 - DNA, 25 bp, Homo sapien
aaggctctgagaatacagctagaac

SEQ ID NO: 3240535 - DNA, 25 bp, Homo sapien
ggctctgagaatacagctagaaccc

SEQ ID NO: 3240536 - DNA, 25 bp, Homo sapien
ctctgagaatacagctagaacccac

SEQ ID NO: 3240537 - DNA, 25 bp, Homo sapien
gtcgctctcccgccattatcagcat

SEQ ID NO: 3240538 - DNA, 25 bp, Homo sapien
cgtcgctctcccgccattatcagca

SEQ ID NO: 3240539 - DNA, 25 bp, Homo sapien
cccgtcgctctcccgccattatcag

SEQ ID NO: 3240540 - DNA, 25 bp, Homo sapien
tcgctctcccgccattatcagcatc

SEQ ID NO: 3240541 - DNA, 25 bp, Homo sapien
gccgcgctcccgccttcgtcagcat

SEQ ID NO: 3240542 - DNA, 25 bp, Homo sapien
cgccgcgctcccgccttcgtcagca

SEQ ID NO: 3240543 - DNA, 25 bp, Homo sapien
ttaccaagcacttcacctaactgct

SEQ ID NO: 3240544 - DNA, 25 bp, Homo sapien
gaaacccccaggaatcccagagcga

SEQ ID NO: 3240545 - DNA, 25 bp, Homo sapien
cccaggaatcccagagcgactgtca

SEQ ID NO: 3240546 - DNA, 25 bp, Homo sapien
gcacttcacctaactgctgaagttt

SEQ ID NO: 3240547 - DNA, 25 bp, Homo sapien
ccttatgggtgatgttgggagccta

SEQ ID NO: 3240548 - DNA, 25 bp, Homo sapien
gcctatgaccatgttctgaccagtg

SEQ ID NO: 3240549 - DNA, 25 bp, Homo sapien
ggaagcagctcctatctctgagtta

SEQ ID NO: 3240550 - DNA, 25 bp, Homo sapien
tccagagttgaccataagacacgac

SEQ ID NO: 3240551 - DNA, 25 bp, Homo sapien
ctttcttcttcatgctcgagtccct

SEQ ID NO: 3240552 - DNA, 25 bp, Homo sapien
cctccgcgtagatgcctttcttctt

SEQ ID NO: 3240553 - DNA, 25 bp, Homo sapien
ctcgagtcccttattttcatggagc

SEQ ID NO: 3240554 - DNA, 25 bp, Homo sapien
ttcatgctcgagtcccttattttca

SEQ ID NO: 3240555 - DNA, 25 bp, Homo sapien
ctccaaatttctgctcatacagtac

SEQ ID NO: 3240556 - DNA, 25 bp, Homo sapien
cccttattccactggtgtttccatc

SEQ ID NO: 3240557 - DNA, 25 bp, Homo sapien
cacccttattccactggtgtttcca

SEQ ID NO: 3240558 - DNA, 25 bp, Homo sapien
acccttattccactggtgtttccat

SEQ ID NO: 3240559 - DNA, 25 bp, Homo sapien
acgaccccaccctctatctcttatt

SEQ ID NO: 3240560 - DNA, 25 bp, Homo sapien
ttccatctccacgaccccaccctct

SEQ ID NO: 3240561 - DNA, 25 bp, Homo sapien
ctatctcttattccactggtgtttc

SEQ ID NO: 3240562 - DNA, 25 bp, Homo sapien
cccttattccactggtgtttccatc

SEQ ID NO: 3240563 - DNA, 25 bp, Homo sapien
gatcctgcacctttgtgccctctga

SEQ ID NO: 3240564 - DNA, 25 bp, Homo sapien
tctgctgcagacaaaggttccctac

SEQ ID NO: 3240565 - DNA, 25 bp, Homo sapien
tttaacctgcagctcgggacagcct

SEQ ID NO: 3240566 - DNA, 25 bp, Homo sapien
gagcagtgtcttagatgaaatgagc

SEQ ID NO: 3240567 - DNA, 25 bp, Homo sapien
caaataggggtagtgctttgcctca

SEQ ID NO: 3240568 - DNA, 25 bp, Homo sapien
ttggattctgacctggagatagtgt

SEQ ID NO: 3240569 - DNA, 25 bp, Homo sapien
tgtccactgacttcacggcagtctc

SEQ ID NO: 3240570 - DNA, 25 bp, Homo sapien
taaaggcctttaggttggattctga

SEQ ID NO: 3240571 - DNA, 25 bp, Homo sapien
gctcctacagtttggctgatgctgc

SEQ ID NO: 3240572 - DNA, 25 bp, Homo sapien
tgatgctgctcaagagtcccccaca

SEQ ID NO: 3240573 - DNA, 25 bp, Homo sapien
atgctgctcaagagtcccccacagt

SEQ ID NO: 3240574 - DNA, 25 bp, Homo sapien
cagctcctacagtttggctgatgct

SEQ ID NO: 3240575 - DNA, 25 bp, Homo sapien
cagagtgctcgcaaatgcttggcaa

SEQ ID NO: 3240576 - DNA, 25 bp, Homo sapien
aacttcatgagcttattccgggacc

SEQ ID NO: 3240577 - DNA, 25 bp, Homo sapien
ggagggctttccacgttcacagcgt

SEQ ID NO: 3240578 - DNA, 25 bp, Homo sapien
gatacaaagttccagtgacggcttg

SEQ ID NO: 3240579 - DNA, 25 bp, Homo sapien
caggtagtcacttgggaatgcacgc

SEQ ID NO: 3240580 - DNA, 25 bp, Homo sapien
ccaggtagtcacttgggaatgcacg

SEQ ID NO: 3240581 - DNA, 25 bp, Homo sapien
ggtagtcacttgggaatgcacgctg

SEQ ID NO: 3240582 - DNA, 25 bp, Homo sapien
aggtagtcacttgggaatgcacgct

SEQ ID NO: 3240583 - DNA, 25 bp, Homo sapien
tggaaacagacatccagatatcggg

SEQ ID NO: 3240584 - DNA, 25 bp, Homo sapien
cagacatccagatatcgggaaaagc

SEQ ID NO: 3240585 - DNA, 25 bp, Homo sapien
acatccagatatcgggaaaagcagt

SEQ ID NO: 3240586 - DNA, 25 bp, Homo sapien
gaaaagcagttctatcttcttgcca

SEQ ID NO: 3240587 - DNA, 25 bp, Homo sapien
agcggccacagcatttccacgtctt

SEQ ID NO: 3240588 - DNA, 25 bp, Homo sapien
ccacgtctttaggaagatttgggtg

SEQ ID NO: 3240589 - DNA, 25 bp, Homo sapien
cagcatttccacgtctttaggaaga

SEQ ID NO: 3240590 - DNA, 25 bp, Homo sapien
gccacagcatttccacgtctttagg

SEQ ID NO: 3240591 - DNA, 25 bp, Homo sapien
ggccaccagccatcctggggatggg

SEQ ID NO: 3240592 - DNA, 25 bp, Homo sapien
aaatgcacacagcacagggggccac

SEQ ID NO: 3240593 - DNA, 25 bp, Homo sapien
ccaccagccatcctggggatgggaa

SEQ ID NO: 3240594 - DNA, 25 bp, Homo sapien
gcacacagcacagggggccaccagc

SEQ ID NO: 3240595 - DNA, 25 bp, Homo sapien
ggatgcaatacctgagtagctccca

SEQ ID NO: 3240596 - DNA, 25 bp, Homo sapien
agtgaacagttaattactcccagag

SEQ ID NO: 3240597 - DNA, 25 bp, Homo sapien
tgctgttgctggttacacgcaaacc

SEQ ID NO: 3240598 - DNA, 25 bp, Homo sapien
cacgcaaacctcctgttagtgaaca

SEQ ID NO: 3240599 - DNA, 25 bp, Homo sapien
cttagctcgggattgtccggagcag

SEQ ID NO: 3240600 - DNA, 25 bp, Homo sapien
attgtccggagcaggcacgctgtcg

SEQ ID NO: 3240601 - DNA, 25 bp, Homo sapien
agatccttagctcgggattgtccgg

SEQ ID NO: 3240602 - DNA, 25 bp, Homo sapien
gattgtccggagcaggcacgctgtc

SEQ ID NO: 3240603 - DNA, 25 bp, Homo sapien
cactgcaccccagaaaaaggcactc

SEQ ID NO: 3240604 - DNA, 25 bp, Homo sapien
gcagagccgggagtgtgcgaggtga

SEQ ID NO: 3240605 - DNA, 25 bp, Homo sapien
aggcagcagggacgtggcacgactg

SEQ ID NO: 3240606 - DNA, 25 bp, Homo sapien
agagggagccgtgcaagcatcccct

SEQ ID NO: 3240607 - DNA, 25 bp, Homo sapien
gttacacttaggagcttacctacca

SEQ ID NO: 3240608 - DNA, 25 bp, Homo sapien
taagcagatagaggaagggtaaaca

SEQ ID NO: 3240609 - DNA, 25 bp, Homo sapien
agcaactgctctggcggtgctccag

SEQ ID NO: 3240610 - DNA, 25 bp, Homo sapien
tatgcatgggaactgcagagaaaga

SEQ ID NO: 3240611 - DNA, 25 bp, Homo sapien
ctagtgctttcttgcgtgttgaggt

SEQ ID NO: 3240612 - DNA, 25 bp, Homo sapien
gctttcttgcgtgttgaggttaata

SEQ ID NO: 3240613 - DNA, 25 bp, Homo sapien
agcacattcattatagccagttttc

SEQ ID NO: 3240614 - DNA, 25 bp, Homo sapien
cgtgttgaggttaatagataactaa

SEQ ID NO: 3240615 - DNA, 25 bp, Homo sapien
gaagcacggtgaaagaactggaaat

SEQ ID NO: 3240616 - DNA, 25 bp, Homo sapien
caacagctactgtgaaccaaggtct

SEQ ID NO: 3240617 - DNA, 25 bp, Homo sapien
tttgactctgaggtaagaagcacgg

SEQ ID NO: 3240618 - DNA, 25 bp, Homo sapien
gcaaagctcacatggcatcccagag

SEQ ID NO: 3240619 - DNA, 25 bp, Homo sapien
ccatagcactagattatgagatcca

SEQ ID NO: 3240620 - DNA, 25 bp, Homo sapien
cctatgtaaagatgactaagtatga

SEQ ID NO: 3240621 - DNA, 25 bp, Homo sapien
gaaatcaagtattgtgcctccctga

SEQ ID NO: 3240622 - DNA, 25 bp, Homo sapien
cctggccttgggacataaccactgc

SEQ ID NO: 3240623 - DNA, 25 bp, Homo sapien
cagatcagatctgtttgacctcaca

SEQ ID NO: 3240624 - DNA, 25 bp, Homo sapien
taatgttattgcattgggaattagg

SEQ ID NO: 3240625 - DNA, 25 bp, Homo sapien
ttaatgttattgcattgggaattag

SEQ ID NO: 3240626 - DNA, 25 bp, Homo sapien
atcagatctgtttgacctcacagcc

SEQ ID NO: 3240627 - DNA, 25 bp, Homo sapien
ggccagaggtccaagctcaaggcag

SEQ ID NO: 3240628 - DNA, 25 bp, Homo sapien
ctgctgcaatgtaccttagactagg

SEQ ID NO: 3240629 - DNA, 25 bp, Homo sapien
ctcaaggcagcagtagaatcggtgc

SEQ ID NO: 3240630 - DNA, 25 bp, Homo sapien
tcatatggcagcagtagactcggtg

SEQ ID NO: 3240631 - DNA, 25 bp, Homo sapien
tcggtccatagaggttctgaatcca

SEQ ID NO: 3240632 - DNA, 25 bp, Homo sapien
ctgcagatacggctaagagcttaac

SEQ ID NO: 3240633 - DNA, 25 bp, Homo sapien
tctgcagatacacctaagtcatcgg

SEQ ID NO: 3240634 - DNA, 25 bp, Homo sapien
gaaagtcttcgatgacctcggtcca

SEQ ID NO: 3240635 - DNA, 25 bp, Homo sapien
cagatatggctaagtcttctccttc

SEQ ID NO: 3240636 - DNA, 25 bp, Homo sapien
ttaggtggcttctgcagatatggct

SEQ ID NO: 3240637 - DNA, 25 bp, Homo sapien
ggtggcttctgcagatatggctaag

SEQ ID NO: 3240638 - DNA, 25 bp, Homo sapien
tgcagatatggctaagtcttctcct

SEQ ID NO: 3240639 - DNA, 25 bp, Homo sapien
tgcattcaaatctcacacatgtggc

SEQ ID NO: 3240640 - DNA, 25 bp, Homo sapien
agaaaagctgctacatgaggacact

SEQ ID NO: 3240641 - DNA, 25 bp, Homo sapien
tacagccaaagtatcatctcaaggg

SEQ ID NO: 3240642 - DNA, 25 bp, Homo sapien
cacatgtggcttgaaagtgatctct

SEQ ID NO: 3240643 - DNA, 25 bp, Homo sapien
caaagccggcctggcaattcagacc

SEQ ID NO: 3240644 - DNA, 25 bp, Homo sapien
gacaaagccggcctggcaattcaga

SEQ ID NO: 3240645 - DNA, 25 bp, Homo sapien
atttatcactcctgacaaagccggc

SEQ ID NO: 3240646 - DNA, 25 bp, Homo sapien
actcctgacaaagccggcctggcaa

SEQ ID NO: 3240647 - DNA, 25 bp, Homo sapien
caaaatccagggttaggagtgcagt

SEQ ID NO: 3240648 - DNA, 25 bp, Homo sapien
cagtggcagtgtgactaggtgtttc

SEQ ID NO: 3240649 - DNA, 25 bp, Homo sapien
cacagtgtgagaatgcaaaatccag

SEQ ID NO: 3240650 - DNA, 25 bp, Homo sapien
tgtttgcctcttgtaacccacagtg

SEQ ID NO: 3240651 - DNA, 25 bp, Homo sapien
tgcaaagtgtctcgttctttaaggg

SEQ ID NO: 3240652 - DNA, 25 bp, Homo sapien
gaatggtattcgtcagatttctgac

SEQ ID NO: 3240653 - DNA, 25 bp, Homo sapien
ttttgattcagttgtggaagtctcc

SEQ ID NO: 3240654 - DNA, 25 bp, Homo sapien
cctcagtgagggctgtaaaaggcaa

SEQ ID NO: 3240655 - DNA, 25 bp, Homo sapien
ccgtcttgtgctagacgcatagtca

SEQ ID NO: 3240656 - DNA, 25 bp, Homo sapien
ctatcatgacatgtttgcgatcgtc

SEQ ID NO: 3240657 - DNA, 25 bp, Homo sapien
cttcggcaactatcatgacatgttt

SEQ ID NO: 3240658 - DNA, 25 bp, Homo sapien
gcgatcgtcaccgtcttgtgctaga

SEQ ID NO: 3240659 - DNA, 25 bp, Homo sapien
gaagggagtgatgtttgtccacagc

SEQ ID NO: 3240660 - DNA, 25 bp, Homo sapien
cccatcttgtctctaacgtggaggg

SEQ ID NO: 3240661 - DNA, 25 bp, Homo sapien
agggagtgatgtttgtccacagcac

SEQ ID NO: 3240662 - DNA, 25 bp, Homo sapien
tcttgtctctaacgtggagggaagg

SEQ ID NO: 3240663 - DNA, 25 bp, Homo sapien
tccacatgcactctgtgacgctcat

SEQ ID NO: 3240664 - DNA, 25 bp, Homo sapien
ctccacatgcactctgtgacgctca

SEQ ID NO: 3240665 - DNA, 25 bp, Homo sapien
ctggtggcccatactcagtgacagg

SEQ ID NO: 3240666 - DNA, 25 bp, Homo sapien
cctggtggcccatactcagtgacag

SEQ ID NO: 3240667 - DNA, 25 bp, Homo sapien
tggtggcccatactcagtgacaggg

SEQ ID NO: 3240668 - DNA, 25 bp, Homo sapien
tggtggcccatactcagtgacagga

SEQ ID NO: 3240669 - DNA, 25 bp, Homo sapien
tcacagatgacaaccctggtggccc

SEQ ID NO: 3240670 - DNA, 25 bp, Homo sapien
agacatgaaagtccttttactagca

SEQ ID NO: 3240671 - DNA, 25 bp, Homo sapien
atgccatccccaaaacgcttaaagt

SEQ ID NO: 3240672 - DNA, 25 bp, Homo sapien
tactagcattgcagatcgaggggta

SEQ ID NO: 3240673 - DNA, 25 bp, Homo sapien
tgccatccccaaaacgcttaaagtg

SEQ ID NO: 3240674 - DNA, 25 bp, Homo sapien
agaaattttggttgatttggggctg

SEQ ID NO: 3240675 - DNA, 25 bp, Homo sapien
taatttgggagccgatgcatggaga

SEQ ID NO: 3240676 - DNA, 25 bp, Homo sapien
ctgattaatttgggagccgatgcat

SEQ ID NO: 3240677 - DNA, 25 bp, Homo sapien
gattaatttgggagccgatgcatgg

SEQ ID NO: 3240678 - DNA, 25 bp, Homo sapien
cttggagaagttctgactgatgtgg

SEQ ID NO: 3240679 - DNA, 25 bp, Homo sapien
cttggagaagttccgggtgacttgg

SEQ ID NO: 3240680 - DNA, 25 bp, Homo sapien
ctgaaacttggagaagttccgggtg

SEQ ID NO: 3240681 - DNA, 25 bp, Homo sapien
tgaaacttggagaagttccgggtga

SEQ ID NO: 3240682 - DNA, 25 bp, Homo sapien
acttggagaagttccgggtgacttg

SEQ ID NO: 3240683 - DNA, 25 bp, Homo sapien
gctgatttgggagctgaaccttgga

SEQ ID NO: 3240684 - DNA, 25 bp, Homo sapien
gttgatttgggagctgaaccttgga

SEQ ID NO: 3240685 - DNA, 25 bp, Homo sapien
tggctgatttgggagctgaaccttg

SEQ ID NO: 3240686 - DNA, 25 bp, Homo sapien
gaagttctgactgatttgggagctg

SEQ ID NO: 3240687 - DNA, 25 bp, Homo sapien
ctgatccttggagaagttctggttg

SEQ ID NO: 3240688 - DNA, 25 bp, Homo sapien
tccttggagaagttctggttgattt

SEQ ID NO: 3240689 - DNA, 25 bp, Homo sapien
atccttggagaagttctggttgatt

SEQ ID NO: 3240690 - DNA, 25 bp, Homo sapien
tgatccttggagaagttctggttga

SEQ ID NO: 3240691 - DNA, 25 bp, Homo sapien
cataccattggatgcagcgggttct

SEQ ID NO: 3240692 - DNA, 25 bp, Homo sapien
gagtgacttcgaggtcagcatagca

SEQ ID NO: 3240693 - DNA, 25 bp, Homo sapien
gcctgtgtccaaggcgagtgacttc

SEQ ID NO: 3240694 - DNA, 25 bp, Homo sapien
tctgcgcacagtgcctcatcagaac

SEQ ID NO: 3240695 - DNA, 25 bp, Homo sapien
tggaaatgaacggagccagcacagt

SEQ ID NO: 3240696 - DNA, 25 bp, Homo sapien
cagtgtggaaatgaacggagccagc

SEQ ID NO: 3240697 - DNA, 25 bp, Homo sapien
cttgaggccaggattacccatagtg

SEQ ID NO: 3240698 - DNA, 25 bp, Homo sapien
catagtgcgttgtttgtgtgtctgc

SEQ ID NO: 3240699 - DNA, 25 bp, Homo sapien
ctttcaccagaataatatgcattgg

SEQ ID NO: 3240700 - DNA, 25 bp, Homo sapien
caacgggtagacatggcttctcttc

SEQ ID NO: 3240701 - DNA, 25 bp, Homo sapien
tggtaagagccatgatgaaggcaag

SEQ ID NO: 3240702 - DNA, 25 bp, Homo sapien
tctgtgtggtaagagccatgatgaa

SEQ ID NO: 3240703 - DNA, 25 bp, Homo sapien
tcatgacaactaaaagatcaacggg

SEQ ID NO: 3240704 - DNA, 25 bp, Homo sapien
cactgagaacaagtgacactacgga

SEQ ID NO: 3240705 - DNA, 25 bp, Homo sapien
ttagcacactgagaacaagtgacac

SEQ ID NO: 3240706 - DNA, 25 bp, Homo sapien
caagtgacactacggacaggtcggc

SEQ ID NO: 3240707 - DNA, 25 bp, Homo sapien
caggtcggccccactctggtgtcat

SEQ ID NO: 3240708 - DNA, 25 bp, Homo sapien
ctgtgttgttcctctgaagctcatt

SEQ ID NO: 3240709 - DNA, 25 bp, Homo sapien
attcatggctgtgttgttcctctga

SEQ ID NO: 3240710 - DNA, 25 bp, Homo sapien
tattcatggctgtgttgttcctctg

SEQ ID NO: 3240711 - DNA, 25 bp, Homo sapien
ctgtatgaattgggctccagctgga

SEQ ID NO: 3240712 - DNA, 25 bp, Homo sapien
gcataaaacagacacccccataagt

SEQ ID NO: 3240713 - DNA, 25 bp, Homo sapien
aacgtctatttctgaatatgcaaaa

SEQ ID NO: 3240714 - DNA, 25 bp, Homo sapien
cgtctatttctgaatatgcaaaatc

SEQ ID NO: 3240715 - DNA, 25 bp, Homo sapien
ttaaacgtctatttctgaatatgca

SEQ ID NO: 3240716 - DNA, 25 bp, Homo sapien
aggacagtggcagcaagcccttttc

SEQ ID NO: 3240717 - DNA, 25 bp, Homo sapien
attccaccttctgcggtctaatgct

SEQ ID NO: 3240718 - DNA, 25 bp, Homo sapien
gcattccaccttctgcggtctaatg

SEQ ID NO: 3240719 - DNA, 25 bp, Homo sapien
cgcttgtgaaactgcggctcctcgg

SEQ ID NO: 3240720 - DNA, 25 bp, Homo sapien
cattccaccttctgcggtctaatgc

SEQ ID NO: 3240721 - DNA, 25 bp, Homo sapien
ccacggtgcatcaggaggtgttgga

SEQ ID NO: 3240722 - DNA, 25 bp, Homo sapien
tgccacggtgcatcaggaggtgttg

SEQ ID NO: 3240723 - DNA, 25 bp, Homo sapien
caggaggtgttggaatccttcctac

SEQ ID NO: 3240724 - DNA, 25 bp, Homo sapien
ctgccacggtgcatcaggaggtgtt

SEQ ID NO: 3240725 - DNA, 25 bp, Homo sapien
tccaggttatatgcgaggcccgttc

SEQ ID NO: 3240726 - DNA, 25 bp, Homo sapien
cttttcacctcatttgtaaatgtga

SEQ ID NO: 3240727 - DNA, 25 bp, Homo sapien
gaggcccgttcattctttaagttca

SEQ ID NO: 3240728 - DNA, 25 bp, Homo sapien
taattatcatccaggttatatgcga

SEQ ID NO: 3240729 - DNA, 25 bp, Homo sapien
tccacgtggtgttgccccaaagaag

SEQ ID NO: 3240730 - DNA, 25 bp, Homo sapien
ttgtgcacagcaagcctcagatggt

SEQ ID NO: 3240731 - DNA, 25 bp, Homo sapien
aaagcaccagtgaccgtgggttacg

SEQ ID NO: 3240732 - DNA, 25 bp, Homo sapien
tacgtcccgaaataagcttccagtg

SEQ ID NO: 3240733 - DNA, 25 bp, Homo sapien
tgtggcttggtaagaaatcctgctg

SEQ ID NO: 3240734 - DNA, 25 bp, Homo sapien
accgggcctgggcaatagtcgcaag

SEQ ID NO: 3240735 - DNA, 25 bp, Homo sapien
tatgtgaacagccttcaccgggcct

SEQ ID NO: 3240736 - DNA, 25 bp, Homo sapien
ccatcaaggtaatcagggaggagcc

SEQ ID NO: 3240737 - DNA, 25 bp, Homo sapien
tcttttgacataccgcagtggtaat

SEQ ID NO: 3240738 - DNA, 25 bp, Homo sapien
gacataccgcagtggtaattgttta

SEQ ID NO: 3240739 - DNA, 25 bp, Homo sapien
atctcttttgacataccgcagtggt

SEQ ID NO: 3240740 - DNA, 25 bp, Homo sapien
tttgacataccgcagtggtaattgt

SEQ ID NO: 3240741 - DNA, 25 bp, Homo sapien
cgtcgctgacctgtgagataggaca

SEQ ID NO: 3240742 - DNA, 25 bp, Homo sapien
tggactgtgtaacgtcgctgacctg

SEQ ID NO: 3240743 - DNA, 25 bp, Homo sapien
tgtgtaacgtcgctgacctgtgaga

SEQ ID NO: 3240744 - DNA, 25 bp, Homo sapien
tgacctgtgagataggacagctctt

SEQ ID NO: 3240745 - DNA, 25 bp, Homo sapien
taatcctgggtaccccaaggtgcag

SEQ ID NO: 3240746 - DNA, 25 bp, Homo sapien
atttggagggaagcagacttcccga

SEQ ID NO: 3240747 - DNA, 25 bp, Homo sapien
tgcatgggctgacgcgtaggacaga

SEQ ID NO: 3240748 - DNA, 25 bp, Homo sapien
gacttcccgagaatcagcggcttgt

SEQ ID NO: 3240749 - DNA, 25 bp, Homo sapien
gagggggaatgtgtgatttgtggga

SEQ ID NO: 3240750 - DNA, 25 bp, Homo sapien
ggggaatgtgtgatttgtgggagct

SEQ ID NO: 3240751 - DNA, 25 bp, Homo sapien
ctgagggggaatgtgtgatttgtgg

SEQ ID NO: 3240752 - DNA, 25 bp, Homo sapien
gggggaatgtgtgatttgtgggagc

SEQ ID NO: 3240753 - DNA, 25 bp, Homo sapien
tagtcagacaggagccatttgtagg

SEQ ID NO: 3240754 - DNA, 25 bp, Homo sapien
gtcagacaggagccatttgtagggg

SEQ ID NO: 3240755 - DNA, 25 bp, Homo sapien
agtcagacaggagccatttgtaggg

SEQ ID NO: 3240756 - DNA, 25 bp, Homo sapien
ctagtcagacaggagccatttgtag

SEQ ID NO: 3240757 - DNA, 25 bp, Homo sapien
cttccgaaaaaggattccagatgtt

SEQ ID NO: 3240758 - DNA, 25 bp, Homo sapien
ggattccagatgtttcagagacatt

SEQ ID NO: 3240759 - DNA, 25 bp, Homo sapien
tgctctctgaatacccgtgtgctca

SEQ ID NO: 3240760 - DNA, 25 bp, Homo sapien
ttaatgctctctgaatacccgtgtg

SEQ ID NO: 3240761 - DNA, 25 bp, Homo sapien
gggcttctctgtcatgaccaccagc

SEQ ID NO: 3240762 - DNA, 25 bp, Homo sapien
gagagggcttctctgtcatgaccac

SEQ ID NO: 3240763 - DNA, 25 bp, Homo sapien
tggctacatctgagagggcttctct

SEQ ID NO: 3240764 - DNA, 25 bp, Homo sapien
cttggctacatctgagagggcttct

SEQ ID NO: 3240765 - DNA, 25 bp, Homo sapien
tctcctctgtcatacactttctcca

SEQ ID NO: 3240766 - DNA, 25 bp, Homo sapien
tccaagacaagaaagtgctatcagt

SEQ ID NO: 3240767 - DNA, 25 bp, Homo sapien
agacaagaaagtgctatcagtttga

SEQ ID NO: 3240768 - DNA, 25 bp, Homo sapien
tttctccaagacaagaaagtgctat

SEQ ID NO: 3240769 - DNA, 25 bp, Homo sapien
cctgcttgggctctgacaccggcat

SEQ ID NO: 3240770 - DNA, 25 bp, Homo sapien
tatgtgtttgtggttgactgctttg

SEQ ID NO: 3240771 - DNA, 25 bp, Homo sapien
tccatgtgcctcttctgagggcaca

SEQ ID NO: 3240772 - DNA, 25 bp, Homo sapien
catggcgtagggtcatcacttagct

SEQ ID NO: 3240773 - DNA, 25 bp, Homo sapien
ctgcatggcgtagggtcatcactta

SEQ ID NO: 3240774 - DNA, 25 bp, Homo sapien
tcatgttgcttcccaggaagatgat

SEQ ID NO: 3240775 - DNA, 25 bp, Homo sapien
aagatgatgggctggacaaaggagc

SEQ ID NO: 3240776 - DNA, 25 bp, Homo sapien
aggagctgggaggtcaggtttgtac

SEQ ID NO: 3240777 - DNA, 25 bp, Homo sapien
atgttgcttcccaggaagatgatgg

SEQ ID NO: 3240778 - DNA, 25 bp, Homo sapien
tagggtcagcgtgtcaggcaatagc

SEQ ID NO: 3240779 - DNA, 25 bp, Homo sapien
ggtgacctctcctgcagtgtaagcg

SEQ ID NO: 3240780 - DNA, 25 bp, Homo sapien
ttgagagagatccttccatgaccca

SEQ ID NO: 3240781 - DNA, 25 bp, Homo sapien
gctaagctgactgaagtaccacgaa

SEQ ID NO: 3240782 - DNA, 25 bp, Homo sapien
cggaaattctgttgaaagagttcca

SEQ ID NO: 3240783 - DNA, 25 bp, Homo sapien
ggaaattctgttgaaagagttccat

SEQ ID NO: 3240784 - DNA, 25 bp, Homo sapien
tggacccggaaattctgttgaaaga

SEQ ID NO: 3240785 - DNA, 25 bp, Homo sapien
gactggacggactcactgcttctgt

SEQ ID NO: 3240786 - DNA, 25 bp, Homo sapien
cgactggacggactcactgcttctg

SEQ ID NO: 3240787 - DNA, 25 bp, Homo sapien
actggacggactcactgcttctgtc

SEQ ID NO: 3240788 - DNA, 25 bp, Homo sapien
cagaacgaggctgtgtgaaaccttt

SEQ ID NO: 3240789 - DNA, 25 bp, Homo sapien
ggtgtgttaggctgaagcacttgtt

SEQ ID NO: 3240790 - DNA, 25 bp, Homo sapien
aaaccttttcgaatgtgtaggtgtg

SEQ ID NO: 3240791 - DNA, 25 bp, Homo sapien
tgtaggtgtgttaggctgaagcact

SEQ ID NO: 3240792 - DNA, 25 bp, Homo sapien
acacaggctgaacggaccctccaag

SEQ ID NO: 3240793 - DNA, 25 bp, Homo sapien
gtcagttgcagcagctccttcgcct

SEQ ID NO: 3240794 - DNA, 25 bp, Homo sapien
ttagagaggtttggcccacacaggc

SEQ ID NO: 3240795 - DNA, 25 bp, Homo sapien
tccaagcaattggacggtccctccg

SEQ ID NO: 3240796 - DNA, 25 bp, Homo sapien
gtgtctcctctgaacagcctctgac

SEQ ID NO: 3240797 - DNA, 25 bp, Homo sapien
agtgtctgctgggtgtctcctctga

SEQ ID NO: 3240798 - DNA, 25 bp, Homo sapien
gtctcctctgaacagcctctgacat

SEQ ID NO: 3240799 - DNA, 25 bp, Homo sapien
tgtctgctgggtgtctcctctgaac

SEQ ID NO: 3240800 - DNA, 25 bp, Homo sapien
tctgagcagcctctgacatagtgtc

SEQ ID NO: 3240801 - DNA, 25 bp, Homo sapien
ctgagcagcctctgacatagtgtct

SEQ ID NO: 3240802 - DNA, 25 bp, Homo sapien
tgagcagcctctgacatagtgtctg

SEQ ID NO: 3240803 - DNA, 25 bp, Homo sapien
tctgacgtagtgtctgctgggtgtc

SEQ ID NO: 3240804 - DNA, 25 bp, Homo sapien
tgtgtatgaatccagctcagagtct

SEQ ID NO: 3240805 - DNA, 25 bp, Homo sapien
tgacatcggtcatccatccgggaag

SEQ ID NO: 3240806 - DNA, 25 bp, Homo sapien
gctggagcctgctcaaggcacttta

SEQ ID NO: 3240807 - DNA, 25 bp, Homo sapien
tgactcctgagaggctagacacaca

SEQ ID NO: 3240808 - DNA, 25 bp, Homo sapien
agacacaagaggaggaaggtaatga

SEQ ID NO: 3240809 - DNA, 25 bp, Homo sapien
aaagacacaagaggaggaaggtaat

SEQ ID NO: 3240810 - DNA, 25 bp, Homo sapien
aagacacaagaggaggaaggtaatg

SEQ ID NO: 3240811 - DNA, 25 bp, Homo sapien
acacaagaggaggaaggtaatgaga

SEQ ID NO: 3240812 - DNA, 25 bp, Homo sapien
gtttgcacatgctgagaattgtccc

SEQ ID NO: 3240813 - DNA, 25 bp, Homo sapien
caacaaggaacacactttagctttg

SEQ ID NO: 3240814 - DNA, 25 bp, Homo sapien
accaggctgacgtgttcacctcttc

SEQ ID NO: 3240815 - DNA, 25 bp, Homo sapien
tgtaacataggctagaatttaccta

SEQ ID NO: 3240816 - DNA, 25 bp, Homo sapien
ggtcactgtactaatgtctaatttc

SEQ ID NO: 3240817 - DNA, 25 bp, Homo sapien
aggtcactgtactaatgtctaattt

SEQ ID NO: 3240818 - DNA, 25 bp, Homo sapien
gaggtcactgtactaatgtctaatt

SEQ ID NO: 3240819 - DNA, 25 bp, Homo sapien
tccacaccagaaaactcgcttttga

SEQ ID NO: 3240820 - DNA, 25 bp, Homo sapien
ttggccagtggctatgccctcaggg

SEQ ID NO: 3240821 - DNA, 25 bp, Homo sapien
aatatcttggccagtggctatgccc

SEQ ID NO: 3240822 - DNA, 25 bp, Homo sapien
gcctagctttcttgatccacaccag

SEQ ID NO: 3240823 - DNA, 25 bp, Homo sapien
accgcggggaaccattgcctgtcat

SEQ ID NO: 3240824 - DNA, 25 bp, Homo sapien
tgattggctagtggtaagttaaacc

SEQ ID NO: 3240825 - DNA, 25 bp, Homo sapien
taggaccgcggggaaccattgcctg

SEQ ID NO: 3240826 - DNA, 25 bp, Homo sapien
tggcctgtaggaccgcggggaacca

SEQ ID NO: 3240827 - DNA, 25 bp, Homo sapien
tacagcaggccgagcagacataact

SEQ ID NO: 3240828 - DNA, 25 bp, Homo sapien
ttactaagtcattggctgctacagc

SEQ ID NO: 3240829 - DNA, 25 bp, Homo sapien
gttgggttgactggcaattggcaca

SEQ ID NO: 3240830 - DNA, 25 bp, Homo sapien
caaaactgacgctagaatcaggcct

SEQ ID NO: 3240831 - DNA, 25 bp, Homo sapien
catgacctgcagcacattggcgacc

SEQ ID NO: 3240832 - DNA, 25 bp, Homo sapien
gcagctctgagatccgcaaggtgga

SEQ ID NO: 3240833 - DNA, 25 bp, Homo sapien
tgcctcgagaagagcagaggtgccc

SEQ ID NO: 3240834 - DNA, 25 bp, Homo sapien
tctgacatctatgagtgggcggcca

SEQ ID NO: 3240835 - DNA, 25 bp, Homo sapien
catttgcccgacagagatggaggaa

SEQ ID NO: 3240836 - DNA, 25 bp, Homo sapien
gagagttatggtagcccgtgttaca

SEQ ID NO: 3240837 - DNA, 25 bp, Homo sapien
gaagcctaatcgtggaggcggcatc

SEQ ID NO: 3240838 - DNA, 25 bp, Homo sapien
aatgaagcgccatgttgagggtcgc

SEQ ID NO: 3240839 - DNA, 25 bp, Homo sapien
ccggttctggacgagtatgtgagtc

SEQ ID NO: 3240840 - DNA, 25 bp, Homo sapien
gcggacgcgaaataaacactccctg

SEQ ID NO: 3240841 - DNA, 25 bp, Homo sapien
ttcacccaaacgctgaatggctcag

SEQ ID NO: 3240842 - DNA, 25 bp, Homo sapien
aatggctcagagttccacttccggg

SEQ ID NO: 3240843 - DNA, 25 bp, Homo sapien
gacttcacgtaggagtactcggcca

SEQ ID NO: 3240844 - DNA, 25 bp, Homo sapien
cttggtagacttcacgtaggagtac

SEQ ID NO: 3240845 - DNA, 25 bp, Homo sapien
ctcttcgtcttggttcccttgagca

SEQ ID NO: 3240846 - DNA, 25 bp, Homo sapien
tcttcgtcttggttcccttgagcac

SEQ ID NO: 3240847 - DNA, 25 bp, Homo sapien
aacggaggaggctcccgcccaagct

SEQ ID NO: 3240848 - DNA, 25 bp, Homo sapien
tatcctgtttccagggtcgtccgcg

SEQ ID NO: 3240849 - DNA, 25 bp, Homo sapien
ccacggcttccaccggagttgcggg

SEQ ID NO: 3240850 - DNA, 25 bp, Homo sapien
tgggaggccacaaagccggctctcc

SEQ ID NO: 3240851 - DNA, 25 bp, Homo sapien
ccaggaggaaatactcgacatttgt

SEQ ID NO: 3240852 - DNA, 25 bp, Homo sapien
caggaggaaatactcgacatttgta

SEQ ID NO: 3240853 - DNA, 25 bp, Homo sapien
accaggaggaaatactcgacatttg

SEQ ID NO: 3240854 - DNA, 25 bp, Homo sapien
ggaggaaatactcgacatttgtatg

SEQ ID NO: 3240855 - DNA, 25 bp, Homo sapien
ggccagactcctcgagagggttctc

SEQ ID NO: 3240856 - DNA, 25 bp, Homo sapien
tcatgaggccagactcctcgagagg

SEQ ID NO: 3240857 - DNA, 25 bp, Homo sapien
agactcctcgagagggttctcaagg

SEQ ID NO: 3240858 - DNA, 25 bp, Homo sapien
tgaggccagactcctcgagagggtt

SEQ ID NO: 3240859 - DNA, 25 bp, Homo sapien
aaaaatctcacattcattcaggata

SEQ ID NO: 3240860 - DNA, 25 bp, Homo sapien
tcacagagtaaaaatctcacattca

SEQ ID NO: 3240861 - DNA, 25 bp, Homo sapien
ctcctcccaggaaattcacagagta

SEQ ID NO: 3240862 - DNA, 25 bp, Homo sapien
aaatctcacattcattcaggataaa

SEQ ID NO: 3240863 - DNA, 25 bp, Homo sapien
tttgcacatattacgttagagttca

SEQ ID NO: 3240864 - DNA, 25 bp, Homo sapien
cacatattacgttagagttcaaagc

SEQ ID NO: 3240865 - DNA, 25 bp, Homo sapien
tcaggctttgcacatattacgttag

SEQ ID NO: 3240866 - DNA, 25 bp, Homo sapien
ggctttgcacatattacgttagagt

SEQ ID NO: 3240867 - DNA, 25 bp, Homo sapien
ctttttcttttcttatctttgctct

SEQ ID NO: 3240868 - DNA, 25 bp, Homo sapien
caatatcaagctgggtttcttcatc

SEQ ID NO: 3240869 - DNA, 25 bp, Homo sapien
caacaatatcaagctgggtttcttc

SEQ ID NO: 3240870 - DNA, 25 bp, Homo sapien
tcttttcttatctttgctctttttc

SEQ ID NO: 3240871 - DNA, 25 bp, Homo sapien
gattggaacacaggcagaacaggac

SEQ ID NO: 3240872 - DNA, 25 bp, Homo sapien
tttcttgaccacacggagagaggta

SEQ ID NO: 3240873 - DNA, 25 bp, Homo sapien
caatgtcactgtcactaagctgaga

SEQ ID NO: 3240874 - DNA, 25 bp, Homo sapien
gagggaactacatacaggtgaggcc

SEQ ID NO: 3240875 - DNA, 25 bp, Homo sapien
caatcccttcagatccttgtgagga

SEQ ID NO: 3240876 - DNA, 25 bp, Homo sapien
cccttcagatccttgtgaggaacca

SEQ ID NO: 3240877 - DNA, 25 bp, Homo sapien
tccttgtgaggaaccaacagaacag

SEQ ID NO: 3240878 - DNA, 25 bp, Homo sapien
tcagatccttgtgaggaaccaacag

SEQ ID NO: 3240879 - DNA, 25 bp, Homo sapien
agacatgctcgtttttattaatgtc

SEQ ID NO: 3240880 - DNA, 25 bp, Homo sapien
cgtttttattaatgtcacacttggt

SEQ ID NO: 3240881 - DNA, 25 bp, Homo sapien
tgctcgtttttattaatgtcacact

SEQ ID NO: 3240882 - DNA, 25 bp, Homo sapien
catgctcgtttttattaatgtcaca

SEQ ID NO: 3240883 - DNA, 25 bp, Homo sapien
gctgataagatagtaccagggcacc

SEQ ID NO: 3240884 - DNA, 25 bp, Homo sapien
gtcatggctgataagatagtaccag

SEQ ID NO: 3240885 - DNA, 25 bp, Homo sapien
taagatagtaccagggcaccctcat

SEQ ID NO: 3240886 - DNA, 25 bp, Homo sapien
catggctgataagatagtaccaggg

SEQ ID NO: 3240887 - DNA, 25 bp, Homo sapien
agctcccagggtaaaaagaccattg

SEQ ID NO: 3240888 - DNA, 25 bp, Homo sapien
cgtaaactgctctggaggactaggg

SEQ ID NO: 3240889 - DNA, 25 bp, Homo sapien
ctggaatcagataatttgacagccg

SEQ ID NO: 3240890 - DNA, 25 bp, Homo sapien
gataatttgacagccgtaaactgct

SEQ ID NO: 3240891 - DNA, 25 bp, Homo sapien
gacagccgtaaactgctctggagga

SEQ ID NO: 3240892 - DNA, 25 bp, Homo sapien
gaacgcccaacaacaagtccatctg

SEQ ID NO: 3240893 - DNA, 25 bp, Homo sapien
ttagtcaaggtcacaagggctgggt

SEQ ID NO: 3240894 - DNA, 25 bp, Homo sapien
aaaaagtgctgataacatggattta

SEQ ID NO: 3240895 - DNA, 25 bp, Homo sapien
ggtctctcatctggatggctcctgg

SEQ ID NO: 3240896 - DNA, 25 bp, Homo sapien
cctggaacatggtggtgtggtccaa

SEQ ID NO: 3240897 - DNA, 25 bp, Homo sapien
tgcttctatgtcccctgcttcattg

SEQ ID NO: 3240898 - DNA, 25 bp, Homo sapien
tcccctgcttcattgcatctaataa

SEQ ID NO: 3240899 - DNA, 25 bp, Homo sapien
tctatgtcccctgcttcattgcatc

SEQ ID NO: 3240900 - DNA, 25 bp, Homo sapien
tatgtcccctgcttcattgcatcta

SEQ ID NO: 3240901 - DNA, 25 bp, Homo sapien
taacgcgtctgactacggatgaggg

SEQ ID NO: 3240902 - DNA, 25 bp, Homo sapien
cactggtgcaatggataacgcgtct

SEQ ID NO: 3240903 - DNA, 25 bp, Homo sapien
tatttccagcttagtgacgcacaca

SEQ ID NO: 3240904 - DNA, 25 bp, Homo sapien
tcctaatgcaaagaagacgggtact

SEQ ID NO: 3240905 - DNA, 25 bp, Homo sapien
aaaaggcaatctttgtgtaagtatc

SEQ ID NO: 3240906 - DNA, 25 bp, Homo sapien
gtatctttgtataagtgcaaagcac

SEQ ID NO: 3240907 - DNA, 25 bp, Homo sapien
actttgtatttcgtctgaaaattgc

SEQ ID NO: 3240908 - DNA, 25 bp, Homo sapien
caaagcactgcacatatatttgcaa

SEQ ID NO: 3240909 - DNA, 25 bp, Homo sapien
taagagggatctgtgttctggtaga

SEQ ID NO: 3240910 - DNA, 25 bp, Homo sapien
cataaaggtgaagggctgacagaga

SEQ ID NO: 3240911 - DNA, 25 bp, Homo sapien
tggtagataaggcaaggtcataaag

SEQ ID NO: 3240912 - DNA, 25 bp, Homo sapien
agtaagagggatctgtgttctggta

SEQ ID NO: 3240913 - DNA, 25 bp, Homo sapien
tttagtaagagggatctgtgttctg

SEQ ID NO: 3240914 - DNA, 25 bp, Homo sapien
ttagtaagagggatctgtgttctgg

SEQ ID NO: 3240915 - DNA, 25 bp, Homo sapien
tagtaagagggatctgtgttctggt

SEQ ID NO: 3240916 - DNA, 25 bp, Homo sapien
ctttagtaagagggatctgtgttct

SEQ ID NO: 3240917 - DNA, 25 bp, Homo sapien
gttgcacagactattaccaaagtat

SEQ ID NO: 3240918 - DNA, 25 bp, Homo sapien
tatccctagtagacaagtgttcatt

SEQ ID NO: 3240919 - DNA, 25 bp, Homo sapien
gatcggattgaaagcttaatagcta

SEQ ID NO: 3240920 - DNA, 25 bp, Homo sapien
gatgtttactaccacatgtcataag

SEQ ID NO: 3240921 - DNA, 25 bp, Homo sapien
ttcttggtttctctttcagcacagg

SEQ ID NO: 3240922 - DNA, 25 bp, Homo sapien
gtttctctttcagcacaggatctaa

SEQ ID NO: 3240923 - DNA, 25 bp, Homo sapien
tggtttctctttcagcacaggatct

SEQ ID NO: 3240924 - DNA, 25 bp, Homo sapien
cttggtttctctttcagcacaggat

SEQ ID NO: 3240925 - DNA, 25 bp, Homo sapien
gctctgtcctagaggctacattgtg

SEQ ID NO: 3240926 - DNA, 25 bp, Homo sapien
aagcacttcactgtcaaatctgtag

SEQ ID NO: 3240927 - DNA, 25 bp, Homo sapien
gaagcacttcactgtcaaatctgta

SEQ ID NO: 3240928 - DNA, 25 bp, Homo sapien
ctctgtcctagaggctacattgtgt

SEQ ID NO: 3240929 - DNA, 25 bp, Homo sapien
ccacttctattagggcatgctggct

SEQ ID NO: 3240930 - DNA, 25 bp, Homo sapien
tagcacagcctttgactggcatcac

SEQ ID NO: 3240931 - DNA, 25 bp, Homo sapien
aaggccccacttctattagggcatg

SEQ ID NO: 3240932 - DNA, 25 bp, Homo sapien
ccatagcacagcctttgactggcat

SEQ ID NO: 3240933 - DNA, 25 bp, Homo sapien
gcaggcacatcgctcaaggtcagga

SEQ ID NO: 3240934 - DNA, 25 bp, Homo sapien
caggcacatcgctcaaggtcaggag

SEQ ID NO: 3240935 - DNA, 25 bp, Homo sapien
ccagaagcgtctcatgcaaaaatcc

SEQ ID NO: 3240936 - DNA, 25 bp, Homo sapien
cagaagcgtctcatgcaaaaatcca

SEQ ID NO: 3240937 - DNA, 25 bp, Homo sapien
caaacttacgatgtcctctttaggt

SEQ ID NO: 3240938 - DNA, 25 bp, Homo sapien
tacgatgtcctctttaggtaatatt

SEQ ID NO: 3240939 - DNA, 25 bp, Homo sapien
cttacgatgtcctctttaggtaata

SEQ ID NO: 3240940 - DNA, 25 bp, Homo sapien
tcccaaacttacgatgtcctcttta

SEQ ID NO: 3240941 - DNA, 25 bp, Homo sapien
agtatctgtcggctttcaatttggc

SEQ ID NO: 3240942 - DNA, 25 bp, Homo sapien
tgcagtatctgtcggctttcaattt

SEQ ID NO: 3240943 - DNA, 25 bp, Homo sapien
tctgtcggctttcaatttggctctc

SEQ ID NO: 3240944 - DNA, 25 bp, Homo sapien
tatctgtcggctttcaatttggctc

SEQ ID NO: 3240945 - DNA, 25 bp, Homo sapien
gataaggcagaaacaaaaatcccag

SEQ ID NO: 3240946 - DNA, 25 bp, Homo sapien
agataaggcagaaacaaaaatccca

SEQ ID NO: 3240947 - DNA, 25 bp, Homo sapien
aaaacacagaaagataaggcagaaa

SEQ ID NO: 3240948 - DNA, 25 bp, Homo sapien
acacagaaagataaggcagaaacaa

SEQ ID NO: 3240949 - DNA, 25 bp, Homo sapien
catgggaatattgtgtttaggaact

SEQ ID NO: 3240950 - DNA, 25 bp, Homo sapien
tagatgccatgggaatattgtgttt

SEQ ID NO: 3240951 - DNA, 25 bp, Homo sapien
tgccatgggaatattgtgtttagga

SEQ ID NO: 3240952 - DNA, 25 bp, Homo sapien
gatgccatgggaatattgtgtttag

SEQ ID NO: 3240953 - DNA, 25 bp, Homo sapien
gagggtgaacgaggtgacatggagt

SEQ ID NO: 3240954 - DNA, 25 bp, Homo sapien
ggtgaacgaggtgacatggagtcca

SEQ ID NO: 3240955 - DNA, 25 bp, Homo sapien
gaacgaggtgacatggagtccagga

SEQ ID NO: 3240956 - DNA, 25 bp, Homo sapien
tgaacgaggtgacatggagtccagg

SEQ ID NO: 3240957 - DNA, 25 bp, Homo sapien
ctggggacaggaaccgagggaacat

SEQ ID NO: 3240958 - DNA, 25 bp, Homo sapien
caggcaagttattttcaatctgtat

SEQ ID NO: 3240959 - DNA, 25 bp, Homo sapien
tgtcctccttgactagtggataaag

SEQ ID NO: 3240960 - DNA, 25 bp, Homo sapien
ggataaagtccacgggaacaggcaa

SEQ ID NO: 3240961 - DNA, 25 bp, Homo sapien
tgttaagatctgtaatcagttctgc

SEQ ID NO: 3240962 - DNA, 25 bp, Homo sapien
atagatttcctagttccacatttaa

SEQ ID NO: 3240963 - DNA, 25 bp, Homo sapien
agaatactttaacctggtgttctag

SEQ ID NO: 3240964 - DNA, 25 bp, Homo sapien
tagagagcagagtaagtcagctaaa

SEQ ID NO: 3240965 - DNA, 25 bp, Homo sapien
agtagctagtaccacaggtacgtgg

SEQ ID NO: 3240966 - DNA, 25 bp, Homo sapien
aagcaagagcaacagctctatatcc

SEQ ID NO: 3240967 - DNA, 25 bp, Homo sapien
cacttatacaagcaagagcaacagc

SEQ ID NO: 3240968 - DNA, 25 bp, Homo sapien
aatattacacttatacaagcaagag

SEQ ID NO: 3240969 - DNA, 25 bp, Homo sapien
gtagccaaatgtaatcaactccctt

SEQ ID NO: 3240970 - DNA, 25 bp, Homo sapien
aactttcagatgtttatattacaag

SEQ ID NO: 3240971 - DNA, 25 bp, Homo sapien
ctttcagatgtttatattacaagta

SEQ ID NO: 3240972 - DNA, 25 bp, Homo sapien
aaaactttcagatgtttatattaca

SEQ ID NO: 3240973 - DNA, 25 bp, Homo sapien
aaactttcagatgtttatattacaa

SEQ ID NO: 3240974 - DNA, 25 bp, Homo sapien
tttgtatgaattggcagccgtctgt

SEQ ID NO: 3240975 - DNA, 25 bp, Homo sapien
caaggcatattgatgagcgggcatc

SEQ ID NO: 3240976 - DNA, 25 bp, Homo sapien
tctgctataacgtgctttcatggtc

SEQ ID NO: 3240977 - DNA, 25 bp, Homo sapien
gcctcacatacttttgcgaatgtaa

SEQ ID NO: 3240978 - DNA, 25 bp, Homo sapien
gagacaagtggatcaggtacattgt

SEQ ID NO: 3240979 - DNA, 25 bp, Homo sapien
agacaagtggatcaggtacattgta

SEQ ID NO: 3240980 - DNA, 25 bp, Homo sapien
gtgtgacatgcagtggccttgtttg

SEQ ID NO: 3240981 - DNA, 25 bp, Homo sapien
tggccacctggtgtgacatgcagtg

SEQ ID NO: 3240982 - DNA, 25 bp, Homo sapien
cacctggtgtgacatgcagtggcct

SEQ ID NO: 3240983 - DNA, 25 bp, Homo sapien
cctggtgtgacatgcagtggccttg

SEQ ID NO: 3240984 - DNA, 25 bp, Homo sapien
ggcctctgccagctgtttggctgcc

SEQ ID NO: 3240985 - DNA, 25 bp, Homo sapien
tgcccccgtttctgcccttcacaga

SEQ ID NO: 3240986 - DNA, 25 bp, Homo sapien
agctgtttggctgcccccgtttctg

SEQ ID NO: 3240987 - DNA, 25 bp, Homo sapien
tggctgcccccgtttctgcccttca

SEQ ID NO: 3240988 - DNA, 25 bp, Homo sapien
cacagctgtggatagaagctgggag

SEQ ID NO: 3240989 - DNA, 25 bp, Homo sapien
tggagcacagctgtggatagaagct

SEQ ID NO: 3240990 - DNA, 25 bp, Homo sapien
cagctgtggatagaagctgggagag

SEQ ID NO: 3240991 - DNA, 25 bp, Homo sapien
agcacagctgtggatagaagctggg

SEQ ID NO: 3240992 - DNA, 25 bp, Homo sapien
gcttggtttagtcttgcagggaatt

SEQ ID NO: 3240993 - DNA, 25 bp, Homo sapien
tcggactggcagctaaccagtgtag

SEQ ID NO: 3240994 - DNA, 25 bp, Homo sapien
gttgtagggcttggtttagtcttgc

SEQ ID NO: 3240995 - DNA, 25 bp, Homo sapien
tgtaggactccagaactgtacagac

SEQ ID NO: 3240996 - DNA, 25 bp, Homo sapien
ctggtgtctccactcacgtgtggac

SEQ ID NO: 3240997 - DNA, 25 bp, Homo sapien
tgtctccactcacgtgtggacctgg

SEQ ID NO: 3240998 - DNA, 25 bp, Homo sapien
gttcctccctctcatagtggtacag

SEQ ID NO: 3240999 - DNA, 25 bp, Homo sapien
actcacgtgtggacctggatgttcc

SEQ ID NO: 3241000 - DNA, 25 bp, Homo sapien
tctgaggggtgtccttgcccaatcc

SEQ ID NO: 3241001 - DNA, 25 bp, Homo sapien
tccaggtgcacacccatctgagatg

SEQ ID NO: 3241002 - DNA, 25 bp, Homo sapien
ccatctgagatggtcttgcatggac

SEQ ID NO: 3241003 - DNA, 25 bp, Homo sapien
gtgtccttgcccaatccaggtgcac

SEQ ID NO: 3241004 - DNA, 25 bp, Homo sapien
agcaaagataatccaagattgccag

SEQ ID NO: 3241005 - DNA, 25 bp, Homo sapien
agggataggcccttcagactggcag

SEQ ID NO: 3241006 - DNA, 25 bp, Homo sapien
aagatgggtgatgtgcagtgtctgc

SEQ ID NO: 3241007 - DNA, 25 bp, Homo sapien
tccaaaacctcagagcaaagataat

SEQ ID NO: 3241008 - DNA, 25 bp, Homo sapien
tcctgggggtcgtatatggtggttg

SEQ ID NO: 3241009 - DNA, 25 bp, Homo sapien
cctgggggtcgtatatggtggttgc

SEQ ID NO: 3241010 - DNA, 25 bp, Homo sapien
accaagacggtctgggtgtgtttgt

SEQ ID NO: 3241011 - DNA, 25 bp, Homo sapien
actccatcaccaagacggtctgggt

SEQ ID NO: 3241012 - DNA, 25 bp, Homo sapien
ccatcaccaagacggtctgggtgtg

SEQ ID NO: 3241013 - DNA, 25 bp, Homo sapien
tcaccaagacggtctgggtgtgttt

SEQ ID NO: 3241014 - DNA, 25 bp, Homo sapien
acacattgagcatcctgctcttgcc

SEQ ID NO: 3241015 - DNA, 25 bp, Homo sapien
aaacacattgagcatcctgctcttg

SEQ ID NO: 3241016 - DNA, 25 bp, Homo sapien
tataaacacattgagcatcctgctc

SEQ ID NO: 3241017 - DNA, 25 bp, Homo sapien
ttataaacacattgagcatcctgct

SEQ ID NO: 3241018 - DNA, 25 bp, Homo sapien
ttagcttcacgagctcagaggagct

SEQ ID NO: 3241019 - DNA, 25 bp, Homo sapien
agcctacggtacccgctattcccag

SEQ ID NO: 3241020 - DNA, 25 bp, Homo sapien
ctacggtacccgctattcccaggcg

SEQ ID NO: 3241021 - DNA, 25 bp, Homo sapien
agaggagctggggcgcgctcagggt

SEQ ID NO: 3241022 - DNA, 25 bp, Homo sapien
tctgcttcctcaatggatcacgacc

SEQ ID NO: 3241023 - DNA, 25 bp, Homo sapien
ctctgcttcctcaatggatcacgac

SEQ ID NO: 3241024 - DNA, 25 bp, Homo sapien
ataggcagacagcccggtgtcacac

SEQ ID NO: 3241025 - DNA, 25 bp, Homo sapien
aaagatatacccctgacctactcgg

SEQ ID NO: 3241026 - DNA, 25 bp, Homo sapien
cgctgcatgcggcccccagtcagta

SEQ ID NO: 3241027 - DNA, 25 bp, Homo sapien
tctgatctaattaccgctgcatgcg

SEQ ID NO: 3241028 - DNA, 25 bp, Homo sapien
ttcaaggtcagtcgagatcccgtgc

SEQ ID NO: 3241029 - DNA, 25 bp, Homo sapien
tagctttcaaggtcagtcgagatcc

SEQ ID NO: 3241030 - DNA, 25 bp, Homo sapien
agtcgagatcccgtgcgttcagggt

SEQ ID NO: 3241031 - DNA, 25 bp, Homo sapien
tgcttagctttcaaggtcagtcgag

SEQ ID NO: 3241032 - DNA, 25 bp, Homo sapien
ggcaatgtccttccgcggtggaaac

SEQ ID NO: 3241033 - DNA, 25 bp, Homo sapien
gggtctctctcgtgtccccgagact

SEQ ID NO: 3241034 - DNA, 25 bp, Homo sapien
ggctgacgaaggcaatgtccttccg

SEQ ID NO: 3241035 - DNA, 25 bp, Homo sapien
gagactggattttacacgaagtcgg

SEQ ID NO: 3241036 - DNA, 25 bp, Homo sapien
gagccataacgccgagcgtgcttac

SEQ ID NO: 3241037 - DNA, 25 bp, Homo sapien
ggagccataacgccgagcgtgctta

SEQ ID NO: 3241038 - DNA, 25 bp, Homo sapien
cggagccataacgccgagcgtgctt

SEQ ID NO: 3241039 - DNA, 25 bp, Homo sapien
caccattgtcgcttgtcccgaggaa

SEQ ID NO: 3241040 - DNA, 25 bp, Homo sapien
tcgcttgtcccgaggaagaccggcc

SEQ ID NO: 3241041 - DNA, 25 bp, Homo sapien
aaggccctgctttgtcccgcgctgg

SEQ ID NO: 3241042 - DNA, 25 bp, Homo sapien
gccctgctttgtcccgcgctggcac

SEQ ID NO: 3241043 - DNA, 25 bp, Homo sapien
cctcttgccccacgctcccagagaa

SEQ ID NO: 3241044 - DNA, 25 bp, Homo sapien
tcttgccccacgctcccagagaagc

SEQ ID NO: 3241045 - DNA, 25 bp, Homo sapien
ttgccccacgctcccagagaagcca

SEQ ID NO: 3241046 - DNA, 25 bp, Homo sapien
ccctcttgccccacgctcccagaga

SEQ ID NO: 3241047 - DNA, 25 bp, Homo sapien
cctgggatcccctctggtcctccgc

SEQ ID NO: 3241048 - DNA, 25 bp, Homo sapien
tcctgggatcccctctggtcctccg

SEQ ID NO: 3241049 - DNA, 25 bp, Homo sapien
gtcctgggatcccctctggtcctcc

SEQ ID NO: 3241050 - DNA, 25 bp, Homo sapien
ggtcctgggatcccctctggtcctc

SEQ ID NO: 3241051 - DNA, 25 bp, Homo sapien
ctgctcaggacggggtgtgatccca

SEQ ID NO: 3241052 - DNA, 25 bp, Homo sapien
tgtgatcccaggtgtcagggcccag

SEQ ID NO: 3241053 - DNA, 25 bp, Homo sapien
ggtgtgatcccaggtgtcagggccc

SEQ ID NO: 3241054 - DNA, 25 bp, Homo sapien
ggggtgtgatcccaggtgtcagggc

SEQ ID NO: 3241055 - DNA, 25 bp, Homo sapien
gcgcgtctgattccaggcgtcacca

SEQ ID NO: 3241056 - DNA, 25 bp, Homo sapien
tatggccgtagacaatggcggtggc

SEQ ID NO: 3241057 - DNA, 25 bp, Homo sapien
ggctctggactctccaggcggcctc

SEQ ID NO: 3241058 - DNA, 25 bp, Homo sapien
gttttccgccggcctcgcagagcgt

SEQ ID NO: 3241059 - DNA, 25 bp, Homo sapien
gaatcacgctcaggccaactaaagc

SEQ ID NO: 3241060 - DNA, 25 bp, Homo sapien
tggactgtctactgcgcatgcgcag

SEQ ID NO: 3241061 - DNA, 25 bp, Homo sapien
acaggaatcacgctcaggccaacta

SEQ ID NO: 3241062 - DNA, 25 bp, Homo sapien
cagttctcctttccgtggctcgact

SEQ ID NO: 3241063 - DNA, 25 bp, Homo sapien
gagctaacagtgtagatcaactttg

SEQ ID NO: 3241064 - DNA, 25 bp, Homo sapien
cattcatgcagaaagacgtatacaa

SEQ ID NO: 3241065 - DNA, 25 bp, Homo sapien
cacacgtgtgtaacctagaaataga

SEQ ID NO: 3241066 - DNA, 25 bp, Homo sapien
gttacccaggctcaacaacaactaa

SEQ ID NO: 3241067 - DNA, 25 bp, Homo sapien
gctcgtgtcgctctgagcagccgtc

SEQ ID NO: 3241068 - DNA, 25 bp, Homo sapien
gagttcttccagctgcgtgcggagc

SEQ ID NO: 3241069 - DNA, 25 bp, Homo sapien
gttactgagttcttccagctgcgtg

SEQ ID NO: 3241070 - DNA, 25 bp, Homo sapien
agctcctggcggttgctcgtgtcgc

SEQ ID NO: 3241071 - DNA, 25 bp, Homo sapien
ctccatgtctcccacagcggagtac

SEQ ID NO: 3241072 - DNA, 25 bp, Homo sapien
cttaaagatgaattgagatgttttc

SEQ ID NO: 3241073 - DNA, 25 bp, Homo sapien
attaaaaggagattccataggattt

SEQ ID NO: 3241074 - DNA, 25 bp, Homo sapien
aaaaggagattccataggatttcca

SEQ ID NO: 3241075 - DNA, 25 bp, Homo sapien
ttgagatgttttcattaaaaggaga

SEQ ID NO: 3241076 - DNA, 25 bp, Homo sapien
tttactggtaatgccttcatcataa

SEQ ID NO: 3241077 - DNA, 25 bp, Homo sapien
atcataactaccctcggtctgagag

SEQ ID NO: 3241078 - DNA, 25 bp, Homo sapien
tttgcagttgcattgcctttactgg

SEQ ID NO: 3241079 - DNA, 25 bp, Homo sapien
tgccttcatcataactaccctcggt

SEQ ID NO: 3241080 - DNA, 25 bp, Homo sapien
gcacaggtgatctaatgacaatcac

SEQ ID NO: 3241081 - DNA, 25 bp, Homo sapien
tgacaatcactctcatatatgaggc

SEQ ID NO: 3241082 - DNA, 25 bp, Homo sapien
atcactctcatatatgaggccacac

SEQ ID NO: 3241083 - DNA, 25 bp, Homo sapien
tgtagcacaggtgatctaatgacaa

SEQ ID NO: 3241084 - DNA, 25 bp, Homo sapien
tttggaaagtatgctccatatcatt

SEQ ID NO: 3241085 - DNA, 25 bp, Homo sapien
ttggaaagtatgctccatatcattt

SEQ ID NO: 3241086 - DNA, 25 bp, Homo sapien
gatttggaaagtatgctccatatca

SEQ ID NO: 3241087 - DNA, 25 bp, Homo sapien
tggaaagtatgctccatatcatttt

SEQ ID NO: 3241088 - DNA, 25 bp, Homo sapien
aaatagatttctgcatgaaacttac

SEQ ID NO: 3241089 - DNA, 25 bp, Homo sapien
tttgtaagtcaaggtcaaaatagat

SEQ ID NO: 3241090 - DNA, 25 bp, Homo sapien
ctttgtaagtcaaggtcaaaataga

SEQ ID NO: 3241091 - DNA, 25 bp, Homo sapien
tcaaaatagatttctgcatgaaact

SEQ ID NO: 3241092 - DNA, 25 bp, Homo sapien
cattttacattaacaattgttccat

SEQ ID NO: 3241093 - DNA, 25 bp, Homo sapien
tccaacacagctattactgccagtg

SEQ ID NO: 3241094 - DNA, 25 bp, Homo sapien
catgctcaggttcataaggctcaca

SEQ ID NO: 3241095 - DNA, 25 bp, Homo sapien
ctgccagtgtgaatgtaataagata

SEQ ID NO: 3241096 - DNA, 25 bp, Homo sapien
gataacacagtgtctccaactttca

SEQ ID NO: 3241097 - DNA, 25 bp, Homo sapien
catctttgtagtctgtattctgtaa

SEQ ID NO: 3241098 - DNA, 25 bp, Homo sapien
atatttttgattctccagtatctta

SEQ ID NO: 3241099 - DNA, 25 bp, Homo sapien
tatcatctttgtagtctgtattctg

SEQ ID NO: 3241100 - DNA, 25 bp, Homo sapien
atcttatcatctttgtagtctgtat

SEQ ID NO: 3241101 - DNA, 25 bp, Homo sapien
cagatgcaggagcatcatctctttg

SEQ ID NO: 3241102 - DNA, 25 bp, Homo sapien
aacagatgcaggagcatcatctctt

SEQ ID NO: 3241103 - DNA, 25 bp, Homo sapien
tgaacagatgcaggagcatcatctc

SEQ ID NO: 3241104 - DNA, 25 bp, Homo sapien
tttcagaatgaacagatgcaggagc

SEQ ID NO: 3241105 - DNA, 25 bp, Homo sapien
tcaacacatctttttcaacatcttc

SEQ ID NO: 3241106 - DNA, 25 bp, Homo sapien
ctgttttcaacacatctttttcaac

SEQ ID NO: 3241107 - DNA, 25 bp, Homo sapien
tttcaacacatctttttcaacatct

SEQ ID NO: 3241108 - DNA, 25 bp, Homo sapien
gttttcaacacatctttttcaacat

SEQ ID NO: 3241109 - DNA, 25 bp, Homo sapien
aagttttcggcaaacctctcctgag

SEQ ID NO: 3241110 - DNA, 25 bp, Homo sapien
tttaattgaggatggtttgtctgtc

SEQ ID NO: 3241111 - DNA, 25 bp, Homo sapien
ccaaggaatggttcctaggtcatct

SEQ ID NO: 3241112 - DNA, 25 bp, Homo sapien
tgtgtttgccaaggctgaagctgta

SEQ ID NO: 3241113 - DNA, 25 bp, Homo sapien
tagaatctaagcttgtttcacctcc

SEQ ID NO: 3241114 - DNA, 25 bp, Homo sapien
gagtcttctgtagaatctaagcttg

SEQ ID NO: 3241115 - DNA, 25 bp, Homo sapien
agcatccccacactatcagagtctt

SEQ ID NO: 3241116 - DNA, 25 bp, Homo sapien
ccacactatcagagtcttctgtaga

SEQ ID NO: 3241117 - DNA, 25 bp, Homo sapien
ttccagaggagtacgtcttctgcag

SEQ ID NO: 3241118 - DNA, 25 bp, Homo sapien
ttctttccagaggagtacgtcttct

SEQ ID NO: 3241119 - DNA, 25 bp, Homo sapien
cctaaactgcgtgagaactttcctg

SEQ ID NO: 3241120 - DNA, 25 bp, Homo sapien
tctttcctaaactgcgtgagaactt

SEQ ID NO: 3241121 - DNA, 25 bp, Homo sapien
ggtaagcttcagagctataatccca

SEQ ID NO: 3241122 - DNA, 25 bp, Homo sapien
tactctcagcctgtttgtcggtaag

SEQ ID NO: 3241123 - DNA, 25 bp, Homo sapien
tctcagcctgtttgtcggtaagctt

SEQ ID NO: 3241124 - DNA, 25 bp, Homo sapien
gcctgtttgtcggtaagcttcagag

SEQ ID NO: 3241125 - DNA, 25 bp, Homo sapien
tgaactcataggatccagcgatcat

SEQ ID NO: 3241126 - DNA, 25 bp, Homo sapien
actcataggatccagcgatcatccc

SEQ ID NO: 3241127 - DNA, 25 bp, Homo sapien
gaaactgagcctacttatgttgccc

SEQ ID NO: 3241128 - DNA, 25 bp, Homo sapien
tttttgtagaaactgagcctactta

SEQ ID NO: 3241129 - DNA, 25 bp, Homo sapien
aggtgtgcagctggacggctcccca

SEQ ID NO: 3241130 - DNA, 25 bp, Homo sapien
ccattcatgagggtcaccaccacat

SEQ ID NO: 3241131 - DNA, 25 bp, Homo sapien
tcatgagggtcaccaccacattgca

SEQ ID NO: 3241132 - DNA, 25 bp, Homo sapien
accaccacattgcaggtgtgcagct

SEQ ID NO: 3241133 - DNA, 25 bp, Homo sapien
gcttcaagatgcatgggtacctcat

SEQ ID NO: 3241134 - DNA, 25 bp, Homo sapien
gctggaacccactccctgagagctt

SEQ ID NO: 3241135 - DNA, 25 bp, Homo sapien
gagagcttcaagatgcatgggtacc

SEQ ID NO: 3241136 - DNA, 25 bp, Homo sapien
ttcaagatgcatgggtacctcatgt

SEQ ID NO: 3241137 - DNA, 25 bp, Homo sapien
gttccatgtccaagacgagctcaag

SEQ ID NO: 3241138 - DNA, 25 bp, Homo sapien
ttccatgtccaagacgagctcaaga

SEQ ID NO: 3241139 - DNA, 25 bp, Homo sapien
tccatgtccaagacgagctcaagag

SEQ ID NO: 3241140 - DNA, 25 bp, Homo sapien
gagaggttgcgcctgctgcagaaac

SEQ ID NO: 3241141 - DNA, 25 bp, Homo sapien
gcccggtattcttcctcgctgaggg

SEQ ID NO: 3241142 - DNA, 25 bp, Homo sapien
agcgaggcggcctcttccgaggcct

SEQ ID NO: 3241143 - DNA, 25 bp, Homo sapien
agaaactccgggctcgccaggagct

SEQ ID NO: 3241144 - DNA, 25 bp, Homo sapien
tgacgatggattcccgcgtgcggca

SEQ ID NO: 3241145 - DNA, 25 bp, Homo sapien
catttccacgtagaagaccagagcg

SEQ ID NO: 3241146 - DNA, 25 bp, Homo sapien
tccccggcgtgatggcctgacgatg

SEQ ID NO: 3241147 - DNA, 25 bp, Homo sapien
ggcgtgtggctctcgttcatttcca

SEQ ID NO: 3241148 - DNA, 25 bp, Homo sapien
ctctccagggatcccgcgggaacgg

SEQ ID NO: 3241149 - DNA, 25 bp, Homo sapien
cgctctctgggctcccacgcgtcgg

SEQ ID NO: 3241150 - DNA, 25 bp, Homo sapien
ccgcgggaacgggaagccgctctct

SEQ ID NO: 3241151 - DNA, 25 bp, Homo sapien
gctcccacgcgtcggcagcagggag

SEQ ID NO: 3241152 - DNA, 25 bp, Homo sapien
tgctgtccgaaggtgtcgggagggc

SEQ ID NO: 3241153 - DNA, 25 bp, Homo sapien
ggagggtgctgtccgaaggtgtcgg

SEQ ID NO: 3241154 - DNA, 25 bp, Homo sapien
gggagggtgctgtccgaaggtgtcg

SEQ ID NO: 3241155 - DNA, 25 bp, Homo sapien
tgtccgaaggtgtcgggagggccat

SEQ ID NO: 3241156 - DNA, 25 bp, Homo sapien
acgagtctccgtcgccgtcctcgtc

SEQ ID NO: 3241157 - DNA, 25 bp, Homo sapien
gtccaaacgagtctccgtcgccgtc

SEQ ID NO: 3241158 - DNA, 25 bp, Homo sapien
ccaaacgagtctccgtcgccgtcct

SEQ ID NO: 3241159 - DNA, 25 bp, Homo sapien
aaacgagtctccgtcgccgtcctcg

SEQ ID NO: 3241160 - DNA, 25 bp, Homo sapien
ggtgctgcctcagctggcgtgacct

SEQ ID NO: 3241161 - DNA, 25 bp, Homo sapien
gatccttctcaaaggctcggaggag

SEQ ID NO: 3241162 - DNA, 25 bp, Homo sapien
cgatgcctggaaagcgatccttctc

SEQ ID NO: 3241163 - DNA, 25 bp, Homo sapien
ggtgcctggcccttcgattctgaaa

SEQ ID NO: 3241164 - DNA, 25 bp, Homo sapien
gcctgcctgcgcgggcgccctgcca

SEQ ID NO: 3241165 - DNA, 25 bp, Homo sapien
ccgcctgcctgcgcgggcgccctgc

SEQ ID NO: 3241166 - DNA, 25 bp, Homo sapien
ccgggggccgcgctgcacaggccgc

SEQ ID NO: 3241167 - DNA, 25 bp, Homo sapien
aggccgcctgcctgcgcgggcgccc

SEQ ID NO: 3241168 - DNA, 25 bp, Homo sapien
agaaactccgggctcgccaggagct

SEQ ID NO: 3241169 - DNA, 25 bp, Homo sapien
agcgaggcggcctcttccgaggcct

SEQ ID NO: 3241170 - DNA, 25 bp, Homo sapien
gcccggtattcttcctcgctgaggg

SEQ ID NO: 3241171 - DNA, 25 bp, Homo sapien
gagaggttgcgcctgctgcagaaac

SEQ ID NO: 3241172 - DNA, 25 bp, Homo sapien
tttcgggggccggagagacgtgagc

SEQ ID NO: 3241173 - DNA, 25 bp, Homo sapien
tcgggggccggagagacgtgagcaa

SEQ ID NO: 3241174 - DNA, 25 bp, Homo sapien
gggggccggagagacgtgagcaaca

SEQ ID NO: 3241175 - DNA, 25 bp, Homo sapien
ggccggagagacgtgagcaacaggc

SEQ ID NO: 3241176 - DNA, 25 bp, Homo sapien
ggagcaaacagtcggcatggccagc

SEQ ID NO: 3241177 - DNA, 25 bp, Homo sapien
catgtttccgggtgcccgcagagct

SEQ ID NO: 3241178 - DNA, 25 bp, Homo sapien
gcagagctccgggagcaaacagtcg

SEQ ID NO: 3241179 - DNA, 25 bp, Homo sapien
tccctgcatgtttccgggtgcccgc

SEQ ID NO: 3241180 - DNA, 25 bp, Homo sapien
gctcccacgcgtcggcagcagggag

SEQ ID NO: 3241181 - DNA, 25 bp, Homo sapien
ctctccagggatcccgcgggaacgg

SEQ ID NO: 3241182 - DNA, 25 bp, Homo sapien
ccgcgggaacgggaagccgctctct

SEQ ID NO: 3241183 - DNA, 25 bp, Homo sapien
cgctctctgggctcccacgcgtcgg

SEQ ID NO: 3241184 - DNA, 25 bp, Homo sapien
agggtgctgtccgagggtgtcggga

SEQ ID NO: 3241185 - DNA, 25 bp, Homo sapien
cttccgcggggagggtgctgtccga

SEQ ID NO: 3241186 - DNA, 25 bp, Homo sapien
gggagggtgctgtccgagggtgtcg

SEQ ID NO: 3241187 - DNA, 25 bp, Homo sapien
ggtgctgtccgagggtgtcgggagg

SEQ ID NO: 3241188 - DNA, 25 bp, Homo sapien
gtccaaacgagtctccgtcgccgtc

SEQ ID NO: 3241189 - DNA, 25 bp, Homo sapien
acgagtctccgtcgccgtcctcgtc

SEQ ID NO: 3241190 - DNA, 25 bp, Homo sapien
ccaaacgagtctccgtcgccgtcct

SEQ ID NO: 3241191 - DNA, 25 bp, Homo sapien
aaacgagtctccgtcgccgtcctcg

SEQ ID NO: 3241192 - DNA, 25 bp, Homo sapien
ggtgctgcctcagctggcgtgacct

SEQ ID NO: 3241193 - DNA, 25 bp, Homo sapien
gatccttctcaaaggctcggaggag

SEQ ID NO: 3241194 - DNA, 25 bp, Homo sapien
cgatgcctggaaagcgatccttctc

SEQ ID NO: 3241195 - DNA, 25 bp, Homo sapien
ggtgcctggcccttcgattctgaaa

SEQ ID NO: 3241196 - DNA, 25 bp, Homo sapien
gcctgcctgcgcgggcgccctgcca

SEQ ID NO: 3241197 - DNA, 25 bp, Homo sapien
aggccgcctgcctgcgcgggcgccc

SEQ ID NO: 3241198 - DNA, 25 bp, Homo sapien
ccgcctgcctgcgcgggcgccctgc

SEQ ID NO: 3241199 - DNA, 25 bp, Homo sapien
ccgggggccgcgctgcacaggccgc

SEQ ID NO: 3241200 - DNA, 25 bp, Homo sapien
gagaggttgcgcctgctgcagaaac

SEQ ID NO: 3241201 - DNA, 25 bp, Homo sapien
agcgaggcggcctcttccgaggcct

SEQ ID NO: 3241202 - DNA, 25 bp, Homo sapien
gcccggtattcttcctcgctgaggg

SEQ ID NO: 3241203 - DNA, 25 bp, Homo sapien
agaaactccgggctcgccaggagct

SEQ ID NO: 3241204 - DNA, 25 bp, Homo sapien
ggccggagagacgtgagcaacaggc

SEQ ID NO: 3241205 - DNA, 25 bp, Homo sapien
gggggccggagagacgtgagcaaca

SEQ ID NO: 3241206 - DNA, 25 bp, Homo sapien
tttcgggggccggagagacgtgagc

SEQ ID NO: 3241207 - DNA, 25 bp, Homo sapien
tcgggggccggagagacgtgagcaa

SEQ ID NO: 3241208 - DNA, 25 bp, Homo sapien
tccctgcatgtttccgggtgcccgc

SEQ ID NO: 3241209 - DNA, 25 bp, Homo sapien
gcagagctccgggagcaaacagtcg

SEQ ID NO: 3241210 - DNA, 25 bp, Homo sapien
ggagcaaacagtcggcatggccagc

SEQ ID NO: 3241211 - DNA, 25 bp, Homo sapien
catgtttccgggtgcccgcagagct

SEQ ID NO: 3241212 - DNA, 25 bp, Homo sapien
gctcccacgcgtcggcagcagggag

SEQ ID NO: 3241213 - DNA, 25 bp, Homo sapien
ctctccagggatcccgcgggaacgg

SEQ ID NO: 3241214 - DNA, 25 bp, Homo sapien
cgctctctgggctcccacgcgtcgg

SEQ ID NO: 3241215 - DNA, 25 bp, Homo sapien
ccgcgggaacgggaagccgctctct

SEQ ID NO: 3241216 - DNA, 25 bp, Homo sapien
cttccgcggggagggtgctgtccga

SEQ ID NO: 3241217 - DNA, 25 bp, Homo sapien
agggtgctgtccgagggtgtcggga

SEQ ID NO: 3241218 - DNA, 25 bp, Homo sapien
gggagggtgctgtccgagggtgtcg

SEQ ID NO: 3241219 - DNA, 25 bp, Homo sapien
ggtgctgtccgagggtgtcgggagg

SEQ ID NO: 3241220 - DNA, 25 bp, Homo sapien
acgagtctccgtcgccgtcctcgtc

SEQ ID NO: 3241221 - DNA, 25 bp, Homo sapien
ccaaacgagtctccgtcgccgtcct

SEQ ID NO: 3241222 - DNA, 25 bp, Homo sapien
aaacgagtctccgtcgccgtcctcg

SEQ ID NO: 3241223 - DNA, 25 bp, Homo sapien
gtccaaacgagtctccgtcgccgtc

SEQ ID NO: 3241224 - DNA, 25 bp, Homo sapien
ggtgctgcctcagctggcgtgacct

SEQ ID NO: 3241225 - DNA, 25 bp, Homo sapien
ggtgcctggcccttcgattctgaaa

SEQ ID NO: 3241226 - DNA, 25 bp, Homo sapien
cgatgcctggaaagcgatccttctc

SEQ ID NO: 3241227 - DNA, 25 bp, Homo sapien
gatccttctcaaaggctcggaggag

SEQ ID NO: 3241228 - DNA, 25 bp, Homo sapien
gcctgcctgcgcgggcgccctgcca

SEQ ID NO: 3241229 - DNA, 25 bp, Homo sapien
ccgggggccgcgctgcacaggccgc

SEQ ID NO: 3241230 - DNA, 25 bp, Homo sapien
ccgcctgcctgcgcgggcgccctgc

SEQ ID NO: 3241231 - DNA, 25 bp, Homo sapien
aggccgcctgcctgcgcgggcgccc

SEQ ID NO: 3241232 - DNA, 25 bp, Homo sapien
gagaggttgcgcctgctgcagaaac

SEQ ID NO: 3241233 - DNA, 25 bp, Homo sapien
agcgaggcggcctcttccgaggcct

SEQ ID NO: 3241234 - DNA, 25 bp, Homo sapien
gcccggtattcttcctcgctgaggg

SEQ ID NO: 3241235 - DNA, 25 bp, Homo sapien
agaaactccgggctcgccaggagct

SEQ ID NO: 3241236 - DNA, 25 bp, Homo sapien
tctaggtctcccgttcctctctcca

SEQ ID NO: 3241237 - DNA, 25 bp, Homo sapien
ctctaggtctcccgttcctctctcc

SEQ ID NO: 3241238 - DNA, 25 bp, Homo sapien
ctaggtctcccgttcctctctccat

SEQ ID NO: 3241239 - DNA, 25 bp, Homo sapien
ccctctaggtctcccgttcctctct

SEQ ID NO: 3241240 - DNA, 25 bp, Homo sapien
tggctcctccgtggccgggtctgtc

SEQ ID NO: 3241241 - DNA, 25 bp, Homo sapien
tgaaccgcgcgggtgaagacccgac

SEQ ID NO: 3241242 - DNA, 25 bp, Homo sapien
aagccacgcggaaaccaaaatcacg

SEQ ID NO: 3241243 - DNA, 25 bp, Homo sapien
gtcgtcctgcgtgtggctcctccgt

SEQ ID NO: 3241244 - DNA, 25 bp, Homo sapien
tttcgggggccggagagacgtgagc

SEQ ID NO: 3241245 - DNA, 25 bp, Homo sapien
tcgggggccggagagacgtgagcaa

SEQ ID NO: 3241246 - DNA, 25 bp, Homo sapien
gggggccggagagacgtgagcaaca

SEQ ID NO: 3241247 - DNA, 25 bp, Homo sapien
ggccggagagacgtgagcaacaggc

SEQ ID NO: 3241248 - DNA, 25 bp, Homo sapien
tccctgcatgtttccgggtgcccgc

SEQ ID NO: 3241249 - DNA, 25 bp, Homo sapien
catgtttccgggtgcccgcagagct

SEQ ID NO: 3241250 - DNA, 25 bp, Homo sapien
ggagcaaacagtcggcatggccagc

SEQ ID NO: 3241251 - DNA, 25 bp, Homo sapien
gcagagctccgggagcaaacagtcg

SEQ ID NO: 3241252 - DNA, 25 bp, Homo sapien
gagggtggaggggagtgtggaactg

SEQ ID NO: 3241253 - DNA, 25 bp, Homo sapien
ctgggagggtggaggggagtgtgga

SEQ ID NO: 3241254 - DNA, 25 bp, Homo sapien
tgggagggtggaggggagtgtggaa

SEQ ID NO: 3241255 - DNA, 25 bp, Homo sapien
ggtggaggggagtgtggaactgaac

SEQ ID NO: 3241256 - DNA, 25 bp, Homo sapien
cgctctctgggctcccacgcgtcgg

SEQ ID NO: 3241257 - DNA, 25 bp, Homo sapien
gctcccacgcgtcggcagcagggag

SEQ ID NO: 3241258 - DNA, 25 bp, Homo sapien
ccgcgggaacgggaagccgctctct

SEQ ID NO: 3241259 - DNA, 25 bp, Homo sapien
ctctccagggatcccgcgggaacgg

SEQ ID NO: 3241260 - DNA, 25 bp, Homo sapien
ggaatttcacggacggacgcgggca

SEQ ID NO: 3241261 - DNA, 25 bp, Homo sapien
ccccttcatgaatggcggtgagccc

SEQ ID NO: 3241262 - DNA, 25 bp, Homo sapien
tcccgtgcacctcagccggactgtg

SEQ ID NO: 3241263 - DNA, 25 bp, Homo sapien
agccagccgcccttgtaaaggccca

SEQ ID NO: 3241264 - DNA, 25 bp, Homo sapien
tgctgtccgaaggtgtcgggagggc

SEQ ID NO: 3241265 - DNA, 25 bp, Homo sapien
tgtccgaaggtgtcgggagggccat

SEQ ID NO: 3241266 - DNA, 25 bp, Homo sapien
gggagggtgctgtccgaaggtgtcg

SEQ ID NO: 3241267 - DNA, 25 bp, Homo sapien
ggagggtgctgtccgaaggtgtcgg

SEQ ID NO: 3241268 - DNA, 25 bp, Homo sapien
acgagtctccgtcgccgtcctcgtc

SEQ ID NO: 3241269 - DNA, 25 bp, Homo sapien
ccaaacgagtctccgtcgccgtcct

SEQ ID NO: 3241270 - DNA, 25 bp, Homo sapien
aaacgagtctccgtcgccgtcctcg

SEQ ID NO: 3241271 - DNA, 25 bp, Homo sapien
gtccaaacgagtctccgtcgccgtc

SEQ ID NO: 3241272 - DNA, 25 bp, Homo sapien
ggtgctgcctcagctggcgtgacct

SEQ ID NO: 3241273 - DNA, 25 bp, Homo sapien
gatccttctcaaaggctcggaggag

SEQ ID NO: 3241274 - DNA, 25 bp, Homo sapien
cgatgcctggaaagcgatccttctc

SEQ ID NO: 3241275 - DNA, 25 bp, Homo sapien
ggtgcctggcccttcgattctgaaa

SEQ ID NO: 3241276 - DNA, 25 bp, Homo sapien
gcctgcctgcgcgggcgccctgcca

SEQ ID NO: 3241277 - DNA, 25 bp, Homo sapien
ccgcctgcctgcgcgggcgccctgc

SEQ ID NO: 3241278 - DNA, 25 bp, Homo sapien
ccgggggccgcgctgcacaggccgc

SEQ ID NO: 3241279 - DNA, 25 bp, Homo sapien
aggccgcctgcctgcgcgggcgccc

SEQ ID NO: 3241280 - DNA, 25 bp, Homo sapien
gcttttgcccgggtgcggaggccac

SEQ ID NO: 3241281 - DNA, 25 bp, Homo sapien
ggcggcgtaggcgaaatccccgcgc

SEQ ID NO: 3241282 - DNA, 25 bp, Homo sapien
agagcgccccgtccggaggagccgg

SEQ ID NO: 3241283 - DNA, 25 bp, Homo sapien
ttccccacgcgccggtgtgggcgaa

SEQ ID NO: 3241284 - DNA, 25 bp, Homo sapien
gagaggttgcgcctgctgcagaaac

SEQ ID NO: 3241285 - DNA, 25 bp, Homo sapien
agaaactccgggctcgccaggagct

SEQ ID NO: 3241286 - DNA, 25 bp, Homo sapien
agcgaggcggcctcttccgaggcct

SEQ ID NO: 3241287 - DNA, 25 bp, Homo sapien
gcccggtattcttcctcgctgaggg

SEQ ID NO: 3241288 - DNA, 25 bp, Homo sapien
tgaaccgcgcgggtgaagacccgac

SEQ ID NO: 3241289 - DNA, 25 bp, Homo sapien
gtcgtcctgcgtgtggctcctccgt

SEQ ID NO: 3241290 - DNA, 25 bp, Homo sapien
aagccacgcggaaaccaaaatcacg

SEQ ID NO: 3241291 - DNA, 25 bp, Homo sapien
tggctcctccgtggccgggtctgtc

SEQ ID NO: 3241292 - DNA, 25 bp, Homo sapien
gggggccggagagacgtgagcaaca

SEQ ID NO: 3241293 - DNA, 25 bp, Homo sapien
tttcgggggccggagagacgtgagc

SEQ ID NO: 3241294 - DNA, 25 bp, Homo sapien
tcgggggccggagagacgtgagcaa

SEQ ID NO: 3241295 - DNA, 25 bp, Homo sapien
ggccggagagacgtgagcaacaggc

SEQ ID NO: 3241296 - DNA, 25 bp, Homo sapien
ggagcaaacagtcggcatggccagc

SEQ ID NO: 3241297 - DNA, 25 bp, Homo sapien
tccctgcatgtttccgggtgcccgc

SEQ ID NO: 3241298 - DNA, 25 bp, Homo sapien
gcagagctccgggagcaaacagtcg

SEQ ID NO: 3241299 - DNA, 25 bp, Homo sapien
catgtttccgggtgcccgcagagct

SEQ ID NO: 3241300 - DNA, 25 bp, Homo sapien
gagggtggaggggagtgtggaactg

SEQ ID NO: 3241301 - DNA, 25 bp, Homo sapien
tgggagggtggaggggagtgtggaa

SEQ ID NO: 3241302 - DNA, 25 bp, Homo sapien
ctgggagggtggaggggagtgtgga

SEQ ID NO: 3241303 - DNA, 25 bp, Homo sapien
ggtggaggggagtgtggaactgaac

SEQ ID NO: 3241304 - DNA, 25 bp, Homo sapien
gctcccacgcgtcggcagcagggag

SEQ ID NO: 3241305 - DNA, 25 bp, Homo sapien
ctctccagggatcccgcgggaacgg

SEQ ID NO: 3241306 - DNA, 25 bp, Homo sapien
ccgcgggaacgggaagccgctctct

SEQ ID NO: 3241307 - DNA, 25 bp, Homo sapien
cgctctctgggctcccacgcgtcgg

SEQ ID NO: 3241308 - DNA, 25 bp, Homo sapien
ggaatttcacggacggacgcgggca

SEQ ID NO: 3241309 - DNA, 25 bp, Homo sapien
ccccttcatgaatggcggtgagccc

SEQ ID NO: 3241310 - DNA, 25 bp, Homo sapien
tcccgtgcacctcagccggactgtg

SEQ ID NO: 3241311 - DNA, 25 bp, Homo sapien
agccagccgcccttgtaaaggccca

SEQ ID NO: 3241312 - DNA, 25 bp, Homo sapien
acgagtctccgtcgccgtcctcgtc

SEQ ID NO: 3241313 - DNA, 25 bp, Homo sapien
ccaaacgagtctccgtcgccgtcct

SEQ ID NO: 3241314 - DNA, 25 bp, Homo sapien
aaacgagtctccgtcgccgtcctcg

SEQ ID NO: 3241315 - DNA, 25 bp, Homo sapien
gtccaaacgagtctccgtcgccgtc

SEQ ID NO: 3241316 - DNA, 25 bp, Homo sapien
ggtgcctggcccttcgattctgaaa

SEQ ID NO: 3241317 - DNA, 25 bp, Homo sapien
ggtgctgcctcagctggcgtgacct

SEQ ID NO: 3241318 - DNA, 25 bp, Homo sapien
cgatgcctggaaagcgatccttctc

SEQ ID NO: 3241319 - DNA, 25 bp, Homo sapien
gatccttctcaaaggctcggaggag

SEQ ID NO: 3241320 - DNA, 25 bp, Homo sapien
gcctgcctgcgcgggcgccctgcca

SEQ ID NO: 3241321 - DNA, 25 bp, Homo sapien
ccgcctgcctgcgcgggcgccctgc

SEQ ID NO: 3241322 - DNA, 25 bp, Homo sapien
ccgggggccgcgctgcacaggccgc

SEQ ID NO: 3241323 - DNA, 25 bp, Homo sapien
aggccgcctgcctgcgcgggcgccc

SEQ ID NO: 3241324 - DNA, 25 bp, Homo sapien
ttccccacgcgccggtgtgggcgaa

SEQ ID NO: 3241325 - DNA, 25 bp, Homo sapien
ggcggcgtaggcgaaatccccgcgc

SEQ ID NO: 3241326 - DNA, 25 bp, Homo sapien
agagcgccccgtccggaggagccgg

SEQ ID NO: 3241327 - DNA, 25 bp, Homo sapien
gcttttgcccgggtgcggaggccac

SEQ ID NO: 3241328 - DNA, 25 bp, Homo sapien
ctaggagaggttgcgcctgctgcag

SEQ ID NO: 3241329 - DNA, 25 bp, Homo sapien
tgctgcagaaactccgggctcgcca

SEQ ID NO: 3241330 - DNA, 25 bp, Homo sapien
gggagtgcagaccagggcgccggct

SEQ ID NO: 3241331 - DNA, 25 bp, Homo sapien
aaactccgggctcgccaggagctca

SEQ ID NO: 3241332 - DNA, 25 bp, Homo sapien
ttccagcgaggcggcctcttccgag

SEQ ID NO: 3241333 - DNA, 25 bp, Homo sapien
ttcttcctcgctgaggggtgcttcc

SEQ ID NO: 3241334 - DNA, 25 bp, Homo sapien
agcgaggcggcctcttccgaggcct

SEQ ID NO: 3241335 - DNA, 25 bp, Homo sapien
gcccggtattcttcctcgctgaggg

SEQ ID NO: 3241336 - DNA, 25 bp, Homo sapien
tttcgggggccggagagacgtgagc

SEQ ID NO: 3241337 - DNA, 25 bp, Homo sapien
tcgggggccggagagacgtgagcaa

SEQ ID NO: 3241338 - DNA, 25 bp, Homo sapien
gggggccggagagacgtgagcaaca

SEQ ID NO: 3241339 - DNA, 25 bp, Homo sapien
ggccggagagacgtgagcaacaggc

SEQ ID NO: 3241340 - DNA, 25 bp, Homo sapien
ggagcaaacagtcggcatggccagc

SEQ ID NO: 3241341 - DNA, 25 bp, Homo sapien
tccctgcatgtttccgggtgcccgc

SEQ ID NO: 3241342 - DNA, 25 bp, Homo sapien
gcagagctccgggagcaaacagtcg

SEQ ID NO: 3241343 - DNA, 25 bp, Homo sapien
catgtttccgggtgcccgcagagct

SEQ ID NO: 3241344 - DNA, 25 bp, Homo sapien
gctcccacgcgtcggcagcagggag

SEQ ID NO: 3241345 - DNA, 25 bp, Homo sapien
ccgcgggaacgggaagccgctctct

SEQ ID NO: 3241346 - DNA, 25 bp, Homo sapien
ctctccagggatcccgcgggaacgg

SEQ ID NO: 3241347 - DNA, 25 bp, Homo sapien
cgctctctgggctcccacgcgtcgg

SEQ ID NO: 3241348 - DNA, 25 bp, Homo sapien
cttccgcggggagggtgctgtccga

SEQ ID NO: 3241349 - DNA, 25 bp, Homo sapien
agggtgctgtccgagggtgtcggga

SEQ ID NO: 3241350 - DNA, 25 bp, Homo sapien
gggagggtgctgtccgagggtgtcg

SEQ ID NO: 3241351 - DNA, 25 bp, Homo sapien
ggtgctgtccgagggtgtcgggagg

SEQ ID NO: 3241352 - DNA, 25 bp, Homo sapien
acgagtctccgtcgccgtcctcgtc

SEQ ID NO: 3241353 - DNA, 25 bp, Homo sapien
aaacgagtctccgtcgccgtcctcg

SEQ ID NO: 3241354 - DNA, 25 bp, Homo sapien
ccaaacgagtctccgtcgccgtcct

SEQ ID NO: 3241355 - DNA, 25 bp, Homo sapien
gtccaaacgagtctccgtcgccgtc

SEQ ID NO: 3241356 - DNA, 25 bp, Homo sapien
ggtgcctggcccttcgattctgaaa

SEQ ID NO: 3241357 - DNA, 25 bp, Homo sapien
ggtgctgcctcagctggcgtgacct

SEQ ID NO: 3241358 - DNA, 25 bp, Homo sapien
gatccttctcaaaggctcggaggag

SEQ ID NO: 3241359 - DNA, 25 bp, Homo sapien
cgatgcctggaaagcgatccttctc

SEQ ID NO: 3241360 - DNA, 25 bp, Homo sapien
gcctgcctgcgcgggcgccctgcca

SEQ ID NO: 3241361 - DNA, 25 bp, Homo sapien
ccgcctgcctgcgcgggcgccctgc

SEQ ID NO: 3241362 - DNA, 25 bp, Homo sapien
aggccgcctgcctgcgcgggcgccc

SEQ ID NO: 3241363 - DNA, 25 bp, Homo sapien
ccgggggccgcgctgcacaggccgc

SEQ ID NO: 3241364 - DNA, 25 bp, Homo sapien
gcttttgcccgggtgcggaggccac

SEQ ID NO: 3241365 - DNA, 25 bp, Homo sapien
ttccccacgcgccggtgtgggcgaa

SEQ ID NO: 3241366 - DNA, 25 bp, Homo sapien
ggcggcgtaggcgaaatccccgcgc

SEQ ID NO: 3241367 - DNA, 25 bp, Homo sapien
agagcgccccgtccggaggagccgg

SEQ ID NO: 3241368 - DNA, 25 bp, Homo sapien
ccaccacggactcccctgggacgtg

SEQ ID NO: 3241369 - DNA, 25 bp, Homo sapien
gcatctgcccctgccgcgcggaggc

SEQ ID NO: 3241370 - DNA, 25 bp, Homo sapien
gagaggttgcgcctgctgcagaaac

SEQ ID NO: 3241371 - DNA, 25 bp, Homo sapien
agaaactccgggctcgccaggagct

SEQ ID NO: 3241372 - DNA, 25 bp, Homo sapien
gcccggtattcttcctcgctgaggg

SEQ ID NO: 3241373 - DNA, 25 bp, Homo sapien
agcgaggcggcctcttccgaggcct

SEQ ID NO: 3241374 - DNA, 25 bp, Homo sapien
gggggccggagagacgtgagcaaca

SEQ ID NO: 3241375 - DNA, 25 bp, Homo sapien
tcgggggccggagagacgtgagcaa

SEQ ID NO: 3241376 - DNA, 25 bp, Homo sapien
ggccggagagacgtgagcaacaggc

SEQ ID NO: 3241377 - DNA, 25 bp, Homo sapien
tttcgggggccggagagacgtgagc

SEQ ID NO: 3241378 - DNA, 25 bp, Homo sapien
tccctgcatgtttccgggtgcccgc

SEQ ID NO: 3241379 - DNA, 25 bp, Homo sapien
ggagcaaacagtcggcatggccagc

SEQ ID NO: 3241380 - DNA, 25 bp, Homo sapien
gcagagctccgggagcaaacagtcg

SEQ ID NO: 3241381 - DNA, 25 bp, Homo sapien
catgtttccgggtgcccgcagagct

SEQ ID NO: 3241382 - DNA, 25 bp, Homo sapien
ctctccagggatcccgcgggaacgg

SEQ ID NO: 3241383 - DNA, 25 bp, Homo sapien
gctcccacgcgtcggcagcagggag

SEQ ID NO: 3241384 - DNA, 25 bp, Homo sapien
ccgcgggaacgggaagccgctctct

SEQ ID NO: 3241385 - DNA, 25 bp, Homo sapien
cgctctctgggctcccacgcgtcgg

SEQ ID NO: 3241386 - DNA, 25 bp, Homo sapien
agggtgctgtccgagggtgtcggga

SEQ ID NO: 3241387 - DNA, 25 bp, Homo sapien
ggtgctgtccgagggtgtcgggagg

SEQ ID NO: 3241388 - DNA, 25 bp, Homo sapien
cttccgcggggagggtgctgtccga

SEQ ID NO: 3241389 - DNA, 25 bp, Homo sapien
gggagggtgctgtccgagggtgtcg

SEQ ID NO: 3241390 - DNA, 25 bp, Homo sapien
aaacgagtctccgtcgccgtcctcg

SEQ ID NO: 3241391 - DNA, 25 bp, Homo sapien
ccaaacgagtctccgtcgccgtcct

SEQ ID NO: 3241392 - DNA, 25 bp, Homo sapien
acgagtctccgtcgccgtcctcgtc

SEQ ID NO: 3241393 - DNA, 25 bp, Homo sapien
gtccaaacgagtctccgtcgccgtc

SEQ ID NO: 3241394 - DNA, 25 bp, Homo sapien
ggtgctgcctcagctggcgtgacct

SEQ ID NO: 3241395 - DNA, 25 bp, Homo sapien
gatccttctcaaaggctcggaggag

SEQ ID NO: 3241396 - DNA, 25 bp, Homo sapien
cgatgcctggaaagcgatccttctc

SEQ ID NO: 3241397 - DNA, 25 bp, Homo sapien
ggtgcctggcccttcgattctgaaa

SEQ ID NO: 3241398 - DNA, 25 bp, Homo sapien
ccacgcgccggtgtgggcgaaggcg

SEQ ID NO: 3241399 - DNA, 25 bp, Homo sapien
ttccccacgcgccggtgtgggcgaa

SEQ ID NO: 3241400 - DNA, 25 bp, Homo sapien
ccccacgcgccggtgtgggcgaagg

SEQ ID NO: 3241401 - DNA, 25 bp, Homo sapien
acgcgccggtgtgggcgaaggcgac

SEQ ID NO: 3241402 - DNA, 25 bp, Homo sapien
gaaagccccctgtgggagagcccca

SEQ ID NO: 3241403 - DNA, 25 bp, Homo sapien
tgggagagccccaggcgcgcagggc

SEQ ID NO: 3241404 - DNA, 25 bp, Homo sapien
tgtgggagagccccaggcgcgcagg

SEQ ID NO: 3241405 - DNA, 25 bp, Homo sapien
ggagagccccaggcgcgcagggcac

SEQ ID NO: 3241406 - DNA, 25 bp, Homo sapien
gcccgggtgcggaggccaccgagga

SEQ ID NO: 3241407 - DNA, 25 bp, Homo sapien
ggcggcgtaggcgaaatccccgcgc

SEQ ID NO: 3241408 - DNA, 25 bp, Homo sapien
agagcgccccgtccggaggagccgg

SEQ ID NO: 3241409 - DNA, 25 bp, Homo sapien
gcttttgcccgggtgcggaggccac

SEQ ID NO: 3241410 - DNA, 25 bp, Homo sapien
ggcgccgggatgccttgcatctgcc

SEQ ID NO: 3241411 - DNA, 25 bp, Homo sapien
agcgaggcggcctcttccgaggcct

SEQ ID NO: 3241412 - DNA, 25 bp, Homo sapien
gagaggttgcgcctgctgcagaaac

SEQ ID NO: 3241413 - DNA, 25 bp, Homo sapien
gcccggtattcttcctcgctgaggg

SEQ ID NO: 3241414 - DNA, 25 bp, Homo sapien
agaaactccgggctcgccaggagct

SEQ ID NO: 3241415 - DNA, 25 bp, Homo sapien
catttgcatgcatgtaacttcatgg

SEQ ID NO: 3241416 - DNA, 25 bp, Homo sapien
gataatacccttcagcttcatccat

SEQ ID NO: 3241417 - DNA, 25 bp, Homo sapien
atacagttaaatacgtgtcacaggg

SEQ ID NO: 3241418 - DNA, 25 bp, Homo sapien
tatccaatccgtgactgatgagtat

SEQ ID NO: 3241419 - DNA, 25 bp, Homo sapien
ccagtgagaatggaccatgatgacc

SEQ ID NO: 3241420 - DNA, 25 bp, Homo sapien
gcccagttaaatctggtaccagaaa

SEQ ID NO: 3241421 - DNA, 25 bp, Homo sapien
tagtctacaggtgtatccagcagct

SEQ ID NO: 3241422 - DNA, 25 bp, Homo sapien
aatccttgtatgtccgttctctctg

SEQ ID NO: 3241423 - DNA, 25 bp, Homo sapien
cactcttattttcacgatgatatag

SEQ ID NO: 3241424 - DNA, 25 bp, Homo sapien
acactcttattttcacgatgatata

SEQ ID NO: 3241425 - DNA, 25 bp, Homo sapien
gatgcttccttaactatccctgggc

SEQ ID NO: 3241426 - DNA, 25 bp, Homo sapien
tgcctggacagaactagacaagccc

SEQ ID NO: 3241427 - DNA, 25 bp, Homo sapien
aaatgtgaggtcttattccagccaa

SEQ ID NO: 3241428 - DNA, 25 bp, Homo sapien
gtgtcttccaagtcagttgtcctag

SEQ ID NO: 3241429 - DNA, 25 bp, Homo sapien
gaggcttagatatttgtccagtatg

SEQ ID NO: 3241430 - DNA, 25 bp, Homo sapien
ttgtggagtggtagcagtaaccaac

SEQ ID NO: 3241431 - DNA, 25 bp, Homo sapien
tggtagcagtaaccaactggtgagc

SEQ ID NO: 3241432 - DNA, 25 bp, Homo sapien
catgaggcttagatatttgtccagt

SEQ ID NO: 3241433 - DNA, 25 bp, Homo sapien
ggagaataccggttcacatagttca

SEQ ID NO: 3241434 - DNA, 25 bp, Homo sapien
agggcatcaccacctgttttcaaga

SEQ ID NO: 3241435 - DNA, 25 bp, Homo sapien
gttttcttaaactatcaggcccata

SEQ ID NO: 3241436 - DNA, 25 bp, Homo sapien
gcccataactaatgccagtggctcc

SEQ ID NO: 3241437 - DNA, 25 bp, Homo sapien
aatctgcacaagagtcgccacagga

SEQ ID NO: 3241438 - DNA, 25 bp, Homo sapien
tctgcacaagagtcgccacaggaaa

SEQ ID NO: 3241439 - DNA, 25 bp, Homo sapien
caaatctgcacaagagtcgccacag

SEQ ID NO: 3241440 - DNA, 25 bp, Homo sapien
aaatctgcacaagagtcgccacagg

SEQ ID NO: 3241441 - DNA, 25 bp, Homo sapien
catgggtttgtacaccatgtgctgg

SEQ ID NO: 3241442 - DNA, 25 bp, Homo sapien
ggtttgtacaccatgtgctggaagc

SEQ ID NO: 3241443 - DNA, 25 bp, Homo sapien
gtttgtacaccatgtgctggaagcc

SEQ ID NO: 3241444 - DNA, 25 bp, Homo sapien
tgggtttgtacaccatgtgctggaa

SEQ ID NO: 3241445 - DNA, 25 bp, Homo sapien
catttgcatgcatgtaacttcatgg

SEQ ID NO: 3241446 - DNA, 25 bp, Homo sapien
gataatacccttcagcttcatccat

SEQ ID NO: 3241447 - DNA, 25 bp, Homo sapien
tatccaatccgtgactgatgagtat

SEQ ID NO: 3241448 - DNA, 25 bp, Homo sapien
atacagttaaatacgtgtcacaggg

SEQ ID NO: 3241449 - DNA, 25 bp, Homo sapien
gtattgttgcaccacttattcaggg

SEQ ID NO: 3241450 - DNA, 25 bp, Homo sapien
tattcccatatgaattggcctgagg

SEQ ID NO: 3241451 - DNA, 25 bp, Homo sapien
ggcctgggaagacgcattgtaacca

SEQ ID NO: 3241452 - DNA, 25 bp, Homo sapien
gaaccactgtactgcctttcggaga

SEQ ID NO: 3241453 - DNA, 25 bp, Homo sapien
cgtgggatgggtgctgatatccctt

SEQ ID NO: 3241454 - DNA, 25 bp, Homo sapien
tttgtatttccgtgggatgggtgct

SEQ ID NO: 3241455 - DNA, 25 bp, Homo sapien
tttccgtgggatgggtgctgatatc

SEQ ID NO: 3241456 - DNA, 25 bp, Homo sapien
tatttccgtgggatgggtgctgata

SEQ ID NO: 3241457 - DNA, 25 bp, Homo sapien
aggatgtggccggagaatagggtaa

SEQ ID NO: 3241458 - DNA, 25 bp, Homo sapien
aggaggatgtggccggagaataggg

SEQ ID NO: 3241459 - DNA, 25 bp, Homo sapien
atttatgggtgttgggctaggggat

SEQ ID NO: 3241460 - DNA, 25 bp, Homo sapien
aaggccatctctcaggctattacat

SEQ ID NO: 3241461 - DNA, 25 bp, Homo sapien
gcattaagctcaaaggtcctgaggt

SEQ ID NO: 3241462 - DNA, 25 bp, Homo sapien
tccattagggtgttcaggaaaggcc

SEQ ID NO: 3241463 - DNA, 25 bp, Homo sapien
cagaattgcctagctgggtccctca

SEQ ID NO: 3241464 - DNA, 25 bp, Homo sapien
gctgctgtataagaagtcaacctcc

SEQ ID NO: 3241465 - DNA, 25 bp, Homo sapien
aatgttatgcccatggttaaaccag

SEQ ID NO: 3241466 - DNA, 25 bp, Homo sapien
ggtacaacacccctaagagctgact

SEQ ID NO: 3241467 - DNA, 25 bp, Homo sapien
tagcagctgctgttgtgaacttcat

SEQ ID NO: 3241468 - DNA, 25 bp, Homo sapien
acttacaggctcagaaagctaggga

SEQ ID NO: 3241469 - DNA, 25 bp, Homo sapien
tgtgagagaaggtgtaaagcaacaa

SEQ ID NO: 3241470 - DNA, 25 bp, Homo sapien
gggtaatagcccatatcctccacat

SEQ ID NO: 3241471 - DNA, 25 bp, Homo sapien
cagtatatcataccatgtgagagaa

SEQ ID NO: 3241472 - DNA, 25 bp, Homo sapien
aaagtgtaggtgttatcagtatatc

SEQ ID NO: 3241473 - DNA, 25 bp, Homo sapien
gctgggattaccagagtacaccacc

SEQ ID NO: 3241474 - DNA, 25 bp, Homo sapien
taattttgtacttctttagtagaga

SEQ ID NO: 3241475 - DNA, 25 bp, Homo sapien
gattaccagagtacaccaccaggcc

SEQ ID NO: 3241476 - DNA, 25 bp, Homo sapien
caggcccggctaattttgtacttct

SEQ ID NO: 3241477 - DNA, 25 bp, Homo sapien
tcaacttagattgccagtaaaacac

SEQ ID NO: 3241478 - DNA, 25 bp, Homo sapien
catgtgtatctaaatcttccctaaa

SEQ ID NO: 3241479 - DNA, 25 bp, Homo sapien
tcctggagggtatttgtagctaaaa

SEQ ID NO: 3241480 - DNA, 25 bp, Homo sapien
tctccaatcaacaaattaggtgact

SEQ ID NO: 3241481 - DNA, 25 bp, Homo sapien
taaaaagcatttagcctacacgtac

SEQ ID NO: 3241482 - DNA, 25 bp, Homo sapien
gatacctaaatccagtgtgtactga

SEQ ID NO: 3241483 - DNA, 25 bp, Homo sapien
gactcaggattctctttatctagga

SEQ ID NO: 3241484 - DNA, 25 bp, Homo sapien
catccaaggcgattatatcaaaggt

SEQ ID NO: 3241485 - DNA, 25 bp, Homo sapien
tatagattcccaatccaacggccgg

SEQ ID NO: 3241486 - DNA, 25 bp, Homo sapien
tgtggccacccaagaatcatagtag

SEQ ID NO: 3241487 - DNA, 25 bp, Homo sapien
tcaggtgtgttccagtatagattcc

SEQ ID NO: 3241488 - DNA, 25 bp, Homo sapien
ctattcccggacaaataaatgcagg

SEQ ID NO: 3241489 - DNA, 25 bp, Homo sapien
caaggacctggacaactcacactca

SEQ ID NO: 3241490 - DNA, 25 bp, Homo sapien
ggacctggacaactcacactcacgg

SEQ ID NO: 3241491 - DNA, 25 bp, Homo sapien
aggacctggacaactcacactcacg

SEQ ID NO: 3241492 - DNA, 25 bp, Homo sapien
aaggacctggacaactcacactcac

SEQ ID NO: 3241493 - DNA, 25 bp, Homo sapien
gagtggagccctttgagttttccag

SEQ ID NO: 3241494 - DNA, 25 bp, Homo sapien
agtggagccctttgagttttccaga

SEQ ID NO: 3241495 - DNA, 25 bp, Homo sapien
atcagggacaggggatatcacatcc

SEQ ID NO: 3241496 - DNA, 25 bp, Homo sapien
tcagggacaggggatatcacatcca

SEQ ID NO: 3241497 - DNA, 25 bp, Homo sapien
aatgaagacttaacatacatctgtg

SEQ ID NO: 3241498 - DNA, 25 bp, Homo sapien
ggaaattctcgcttaacatcattga

SEQ ID NO: 3241499 - DNA, 25 bp, Homo sapien
tgtcacaagaacacttgaggtctac

SEQ ID NO: 3241500 - DNA, 25 bp, Homo sapien
gctttctcagacttactcaacttac

SEQ ID NO: 3241501 - DNA, 25 bp, Homo sapien
taatgtgatattcgaaaaacctgcc

SEQ ID NO: 3241502 - DNA, 25 bp, Homo sapien
ccatgctaatgggtgagagttaaga

SEQ ID NO: 3241503 - DNA, 25 bp, Homo sapien
cccttgatgtgtggatatgcagaag

SEQ ID NO: 3241504 - DNA, 25 bp, Homo sapien
gatggcatttgtactccacttagtg

SEQ ID NO: 3241505 - DNA, 25 bp, Homo sapien
tcgcaggtgcacatgagatggacca

SEQ ID NO: 3241506 - DNA, 25 bp, Homo sapien
ccttgaggaagggtaagatgcaaac

SEQ ID NO: 3241507 - DNA, 25 bp, Homo sapien
aaattctgctcgtcacccttcaggg

SEQ ID NO: 3241508 - DNA, 25 bp, Homo sapien
ggaccagtgaatggtcactcccctg

SEQ ID NO: 3241509 - DNA, 25 bp, Homo sapien
ggtatctgaggtaatctattctctc

SEQ ID NO: 3241510 - DNA, 25 bp, Homo sapien
cttgtggtatctgaggtaatctatt

SEQ ID NO: 3241511 - DNA, 25 bp, Homo sapien
ctctgattccatgccattggtctcc

SEQ ID NO: 3241512 - DNA, 25 bp, Homo sapien
ctctctgattccatgccattggtct

SEQ ID NO: 3241513 - DNA, 25 bp, Homo sapien
cagaatgagattgaggcccatcaaa

SEQ ID NO: 3241514 - DNA, 25 bp, Homo sapien
ttgtcagtccccgtacagcggctct

SEQ ID NO: 3241515 - DNA, 25 bp, Homo sapien
gtaggagctcatccggaagacaccg

SEQ ID NO: 3241516 - DNA, 25 bp, Homo sapien
aggagctgtggtccggaatcccgtc

SEQ ID NO: 3241517 - DNA, 25 bp, Homo sapien
tatagtcaagttagtgaacacatct

SEQ ID NO: 3241518 - DNA, 25 bp, Homo sapien
catttccgtattttccaccctcagg

SEQ ID NO: 3241519 - DNA, 25 bp, Homo sapien
tgctgatctaatgctgaatgtactt

SEQ ID NO: 3241520 - DNA, 25 bp, Homo sapien
gtactctttgaacaacatttccgta

SEQ ID NO: 3241521 - DNA, 25 bp, Homo sapien
tcacttatgataatacggtactttg

SEQ ID NO: 3241522 - DNA, 25 bp, Homo sapien
ttctgtcattaacatcttattgtat

SEQ ID NO: 3241523 - DNA, 25 bp, Homo sapien
catcttattgtatttagtgtataca

SEQ ID NO: 3241524 - DNA, 25 bp, Homo sapien
acatatttaatctcatcggttaaat

SEQ ID NO: 3241525 - DNA, 25 bp, Homo sapien
caccactactccagcctggagacag

SEQ ID NO: 3241526 - DNA, 25 bp, Homo sapien
caggaggtggaaattacagtgagct

SEQ ID NO: 3241527 - DNA, 25 bp, Homo sapien
agattgcaccactactccagcctgg

SEQ ID NO: 3241528 - DNA, 25 bp, Homo sapien
aggaggtggaaattacagtgagctg

SEQ ID NO: 3241529 - DNA, 25 bp, Homo sapien
taaattttggctaatgtgaacactg

SEQ ID NO: 3241530 - DNA, 25 bp, Homo sapien
tcccaccaagagagtactagagttc

SEQ ID NO: 3241531 - DNA, 25 bp, Homo sapien
tactttgtccattcatgtaagggac

SEQ ID NO: 3241532 - DNA, 25 bp, Homo sapien
aactggtctccatggtcattgtagt

SEQ ID NO: 3241533 - DNA, 25 bp, Homo sapien
tgtctctaatccgttttgatttaat

SEQ ID NO: 3241534 - DNA, 25 bp, Homo sapien
gatagaggtctagttttattcctct

SEQ ID NO: 3241535 - DNA, 25 bp, Homo sapien
gagatagaggtctagttttattcct

SEQ ID NO: 3241536 - DNA, 25 bp, Homo sapien
ctcccccattatattgaggcaggaa

SEQ ID NO: 3241537 - DNA, 25 bp, Homo sapien
cagactctagcggacagggaatggc

SEQ ID NO: 3241538 - DNA, 25 bp, Homo sapien
gagcagggttggtccttgatcacag

SEQ ID NO: 3241539 - DNA, 25 bp, Homo sapien
gaatggcgctggttacagggctact

SEQ ID NO: 3241540 - DNA, 25 bp, Homo sapien
gcccctggactttggttgcatggac

SEQ ID NO: 3241541 - DNA, 25 bp, Homo sapien
ttgcctgtataaatagtgcccctcc

SEQ ID NO: 3241542 - DNA, 25 bp, Homo sapien
aaataattgggtttcacttgaggca

SEQ ID NO: 3241543 - DNA, 25 bp, Homo sapien
cattttactgggcaatcttttttca

SEQ ID NO: 3241544 - DNA, 25 bp, Homo sapien
tcctggctcttcaataagaacatag

SEQ ID NO: 3241545 - DNA, 25 bp, Homo sapien
tcttaatccagtctacactgttgga

SEQ ID NO: 3241546 - DNA, 25 bp, Homo sapien
aatccagtctacactgttggacatt

SEQ ID NO: 3241547 - DNA, 25 bp, Homo sapien
tatgtatacatgtgcacatgtgcca

SEQ ID NO: 3241548 - DNA, 25 bp, Homo sapien
aacttgtcatttaatattagatata

SEQ ID NO: 3241549 - DNA, 25 bp, Homo sapien
tgtacatccttaccattgattatga

SEQ ID NO: 3241550 - DNA, 25 bp, Homo sapien
ttttcctgtataacggagtctcctg

SEQ ID NO: 3241551 - DNA, 25 bp, Homo sapien
aatatgggggacaaatgctttattc

SEQ ID NO: 3241552 - DNA, 25 bp, Homo sapien
cttaaatattttagatctcctattg

SEQ ID NO: 3241553 - DNA, 25 bp, Homo sapien
cagccagcatgcctacaggggcaca

SEQ ID NO: 3241554 - DNA, 25 bp, Homo sapien
tggaggtaggttttgggactggagc

SEQ ID NO: 3241555 - DNA, 25 bp, Homo sapien
ggttttaggactgcttcaagattca

SEQ ID NO: 3241556 - DNA, 25 bp, Homo sapien
gactgctcccagactttagttgaca

SEQ ID NO: 3241557 - DNA, 25 bp, Homo sapien
gagaccaggttgtgtttcatcccta

SEQ ID NO: 3241558 - DNA, 25 bp, Homo sapien
tttccctaattgtcggccggcctga

SEQ ID NO: 3241559 - DNA, 25 bp, Homo sapien
caaggtcagggcaaaactagaatta

SEQ ID NO: 3241560 - DNA, 25 bp, Homo sapien
tccttactagggaaagagttcagca

SEQ ID NO: 3241561 - DNA, 25 bp, Homo sapien
atacatgttttaaggatgtgtcttg

SEQ ID NO: 3241562 - DNA, 25 bp, Homo sapien
gattatgggagcctcccatacatgt

SEQ ID NO: 3241563 - DNA, 25 bp, Homo sapien
tcttaacagtctctaatcacttgcc

SEQ ID NO: 3241564 - DNA, 25 bp, Homo sapien
aattgtctttgatagagattatggg

SEQ ID NO: 3241565 - DNA, 25 bp, Homo sapien
cgatgtgagctggtgagaaattata

SEQ ID NO: 3241566 - DNA, 25 bp, Homo sapien
ttttgtggctttaactggagaactc

SEQ ID NO: 3241567 - DNA, 25 bp, Homo sapien
tctggagtcagtttgtagctgcaag

SEQ ID NO: 3241568 - DNA, 25 bp, Homo sapien
tgctgtgtgtgtaatagatgctcca

SEQ ID NO: 3241569 - DNA, 25 bp, Homo sapien
caaaaatgcaaacttagggaggaca

SEQ ID NO: 3241570 - DNA, 25 bp, Homo sapien
tcccagatggtagggccgccgagca

SEQ ID NO: 3241571 - DNA, 25 bp, Homo sapien
aatgcaaacttagggaggacataaa

SEQ ID NO: 3241572 - DNA, 25 bp, Homo sapien
aaaatgcaaacttagggaggacata

SEQ ID NO: 3241573 - DNA, 25 bp, Homo sapien
gcagtggccgggcaaaggcgcttct

SEQ ID NO: 3241574 - DNA, 25 bp, Homo sapien
cagaggcgctccttaaagaggattt

SEQ ID NO: 3241575 - DNA, 25 bp, Homo sapien
gggcaaaggcgcttctcattcccag

SEQ ID NO: 3241576 - DNA, 25 bp, Homo sapien
tgtttatcctcagctatgtatgcct

SEQ ID NO: 3241577 - DNA, 25 bp, Homo sapien
cagattgatactgcaatcctgagga

SEQ ID NO: 3241578 - DNA, 25 bp, Homo sapien
cacagaatggacaattatgggacct

SEQ ID NO: 3241579 - DNA, 25 bp, Homo sapien
gagaagtcttttagtgttcacaggt

SEQ ID NO: 3241580 - DNA, 25 bp, Homo sapien
gagtgggttgcatattgtcagcacc

SEQ ID NO: 3241581 - DNA, 25 bp, Homo sapien
taattccatagcataggcattatta

SEQ ID NO: 3241582 - DNA, 25 bp, Homo sapien
taatttgtactaaacactacccata

SEQ ID NO: 3241583 - DNA, 25 bp, Homo sapien
tacgccagacatagatcttagatat

SEQ ID NO: 3241584 - DNA, 25 bp, Homo sapien
gattatcttcaacacccattcttag

SEQ ID NO: 3241585 - DNA, 25 bp, Homo sapien
gtgcccctagactcaaagatttttg

SEQ ID NO: 3241586 - DNA, 25 bp, Homo sapien
gttttacaaaccaggcctgtcacca

SEQ ID NO: 3241587 - DNA, 25 bp, Homo sapien
caatgcaagttcaaccttctgggag

SEQ ID NO: 3241588 - DNA, 25 bp, Homo sapien
gccactgaaagctagttctcttggg

SEQ ID NO: 3241589 - DNA, 25 bp, Homo sapien
gaagagcagtgaagcatacatagct

SEQ ID NO: 3241590 - DNA, 25 bp, Homo sapien
ataacacaaagaagagcagtgaagc

SEQ ID NO: 3241591 - DNA, 25 bp, Homo sapien
gagcagtgaagcatacatagctggg

SEQ ID NO: 3241592 - DNA, 25 bp, Homo sapien
cacaaagaagagcagtgaagcatac

SEQ ID NO: 3241593 - DNA, 25 bp, Homo sapien
aactctctagtgtttcttaacctgc

SEQ ID NO: 3241594 - DNA, 25 bp, Homo sapien
gtcgtatttcgctccaatgtaaatt

SEQ ID NO: 3241595 - DNA, 25 bp, Homo sapien
tataaactctctagtgtttcttaac

SEQ ID NO: 3241596 - DNA, 25 bp, Homo sapien
tattacatttgtcgtatttcgctcc

SEQ ID NO: 3241597 - DNA, 25 bp, Homo sapien
tacgattagaaaagattgaggaaca

SEQ ID NO: 3241598 - DNA, 25 bp, Homo sapien
ttacgattagaaaagattgaggaac

SEQ ID NO: 3241599 - DNA, 25 bp, Homo sapien
acgattagaaaagattgaggaacat

SEQ ID NO: 3241600 - DNA, 25 bp, Homo sapien
ttcatattggtaagacattcctcca

SEQ ID NO: 3241601 - DNA, 25 bp, Homo sapien
cattcctccagtacgagttctctta

SEQ ID NO: 3241602 - DNA, 25 bp, Homo sapien
gctggagtacagcttaaaggctttt

SEQ ID NO: 3241603 - DNA, 25 bp, Homo sapien
tggagtacagcttaaaggcttttcc

SEQ ID NO: 3241604 - DNA, 25 bp, Homo sapien
ctatgttcaattagggttttggagc

SEQ ID NO: 3241605 - DNA, 25 bp, Homo sapien
tatgttcaattagggttttggagct

SEQ ID NO: 3241606 - DNA, 25 bp, Homo sapien
tgttcaattagggttttggagctat

SEQ ID NO: 3241607 - DNA, 25 bp, Homo sapien
cctatgttcaattagggttttggag

SEQ ID NO: 3241608 - DNA, 25 bp, Homo sapien
taggattcatctcccatatgaattt

SEQ ID NO: 3241609 - DNA, 25 bp, Homo sapien
cttatgttgattcaggtatgcggac

SEQ ID NO: 3241610 - DNA, 25 bp, Homo sapien
gtatgcggactgtttgaaggctttc

SEQ ID NO: 3241611 - DNA, 25 bp, Homo sapien
tgattcaggtatgcggactgtttga

SEQ ID NO: 3241612 - DNA, 25 bp, Homo sapien
tattatgttgattaaggtatgagga

SEQ ID NO: 3241613 - DNA, 25 bp, Homo sapien
attttattatgttgattaaggtatg

SEQ ID NO: 3241614 - DNA, 25 bp, Homo sapien
tttattatgttgattaaggtatgag

SEQ ID NO: 3241615 - DNA, 25 bp, Homo sapien
attatgttgattaaggtatgaggac

SEQ ID NO: 3241616 - DNA, 25 bp, Homo sapien
cagggctctggaacataaaaaggct

SEQ ID NO: 3241617 - DNA, 25 bp, Homo sapien
ttcattaagggttgtgaaccgacta

SEQ ID NO: 3241618 - DNA, 25 bp, Homo sapien
tcattaagggttgtgaaccgactaa

SEQ ID NO: 3241619 - DNA, 25 bp, Homo sapien
ttcagggctctggaacataaaaagg

SEQ ID NO: 3241620 - DNA, 25 bp, Homo sapien
tgtttggcaacatttgaggatgagg

SEQ ID NO: 3241621 - DNA, 25 bp, Homo sapien
caacatttgaggatgaggtaatgat

SEQ ID NO: 3241622 - DNA, 25 bp, Homo sapien
ttcttatgtttggcaacatttgagg

SEQ ID NO: 3241623 - DNA, 25 bp, Homo sapien
ggatgaggtaatgattttgccacat

SEQ ID NO: 3241624 - DNA, 25 bp, Homo sapien
tattcattaaagattaaataccatt

SEQ ID NO: 3241625 - DNA, 25 bp, Homo sapien
gaggatgtggtaaagatgttgccac

SEQ ID NO: 3241626 - DNA, 25 bp, Homo sapien
tgaattatctcatattcattaaaga

SEQ ID NO: 3241627 - DNA, 25 bp, Homo sapien
aactttatgtttagcaaagtttgag

SEQ ID NO: 3241628 - DNA, 25 bp, Homo sapien
gacatgtacattacactgaaatatt

SEQ ID NO: 3241629 - DNA, 25 bp, Homo sapien
ccagtatgtcttatcctacgttggt

SEQ ID NO: 3241630 - DNA, 25 bp, Homo sapien
taatataagtttgtggaacgaatct

SEQ ID NO: 3241631 - DNA, 25 bp, Homo sapien
tactaaatactttgacatgtacatt

SEQ ID NO: 3241632 - DNA, 25 bp, Homo sapien
tataccaaaaatatccgaggcagga

SEQ ID NO: 3241633 - DNA, 25 bp, Homo sapien
gaggcaggactttacatatttacac

SEQ ID NO: 3241634 - DNA, 25 bp, Homo sapien
gaaggctttatgcaactagtctcaa

SEQ ID NO: 3241635 - DNA, 25 bp, Homo sapien
tatagccaaggtattcgatcaatcc

SEQ ID NO: 3241636 - DNA, 25 bp, Homo sapien
gaagcaatgttactatataccaaac

SEQ ID NO: 3241637 - DNA, 25 bp, Homo sapien
cgcaaacacagatatatagtaagta

SEQ ID NO: 3241638 - DNA, 25 bp, Homo sapien
aatatgtgcatatcattacattgta

SEQ ID NO: 3241639 - DNA, 25 bp, Homo sapien
tcagaaaaattcatatcacgcaaac

SEQ ID NO: 3241640 - DNA, 25 bp, Homo sapien
atgatacgttgcttcacttcgtttc

SEQ ID NO: 3241641 - DNA, 25 bp, Homo sapien
aatgatacgttgcttcacttcgttt

SEQ ID NO: 3241642 - DNA, 25 bp, Homo sapien
cacccagccctaaaatacgctttct

SEQ ID NO: 3241643 - DNA, 25 bp, Homo sapien
tctaaggtggtggatatcacaaaac

SEQ ID NO: 3241644 - DNA, 25 bp, Homo sapien
aaaatacactgacatagagctcctc

SEQ ID NO: 3241645 - DNA, 25 bp, Homo sapien
cactactcaccgtgcacattttaga

SEQ ID NO: 3241646 - DNA, 25 bp, Homo sapien
tattaatgtatttcacgtgtggctc

SEQ ID NO: 3241647 - DNA, 25 bp, Homo sapien
atgtatcttcactttgtagggctcc

SEQ ID NO: 3241648 - DNA, 25 bp, Homo sapien
tcctttctttgctccagatagatga

SEQ ID NO: 3241649 - DNA, 25 bp, Homo sapien
cactttgtagggctcctttctttgc

SEQ ID NO: 3241650 - DNA, 25 bp, Homo sapien
ctttctttgctccagatagatgacc

SEQ ID NO: 3241651 - DNA, 25 bp, Homo sapien
gagatcaggttcctgtagttctcca

SEQ ID NO: 3241652 - DNA, 25 bp, Homo sapien
gatcaggttcctgtagttctccaac

SEQ ID NO: 3241653 - DNA, 25 bp, Homo sapien
ccagggagatcaggttcctgtagtt

SEQ ID NO: 3241654 - DNA, 25 bp, Homo sapien
tcaggttcctgtagttctccaacat

SEQ ID NO: 3241655 - DNA, 25 bp, Homo sapien
tttccactcttctggagagaattct

SEQ ID NO: 3241656 - DNA, 25 bp, Homo sapien
tctctatacaaattctgctgggcag

SEQ ID NO: 3241657 - DNA, 25 bp, Homo sapien
cacatctctatacaaattctgctgg

SEQ ID NO: 3241658 - DNA, 25 bp, Homo sapien
tacaaattctgctgggcagggtcca

SEQ ID NO: 3241659 - DNA, 25 bp, Homo sapien
caattcagagaaatttatttttgtg

SEQ ID NO: 3241660 - DNA, 25 bp, Homo sapien
gcaattcagagaaatttatttttgt

SEQ ID NO: 3241661 - DNA, 25 bp, Homo sapien
tgcaattcagagaaatttatttttg

SEQ ID NO: 3241662 - DNA, 25 bp, Homo sapien
aattcagagaaatttatttttgtgt

SEQ ID NO: 3241663 - DNA, 25 bp, Homo sapien
atttaaggcacaaaagtatattgct

SEQ ID NO: 3241664 - DNA, 25 bp, Homo sapien
aagaatttaaggcacaaaagtatat

SEQ ID NO: 3241665 - DNA, 25 bp, Homo sapien
ggatgagatgtctctagaaacactg

SEQ ID NO: 3241666 - DNA, 25 bp, Homo sapien
gaatttaaggcacaaaagtatattg

SEQ ID NO: 3241667 - DNA, 25 bp, Homo sapien
tagcaacagtcacctttgatccttt

SEQ ID NO: 3241668 - DNA, 25 bp, Homo sapien
ctttaggaattcagcacgaattggc

SEQ ID NO: 3241669 - DNA, 25 bp, Homo sapien
gagagggttgtagcaacagtcacct

SEQ ID NO: 3241670 - DNA, 25 bp, Homo sapien
cttctttaggaattcagcacgaatt

SEQ ID NO: 3241671 - DNA, 25 bp, Homo sapien
gccagcttttcgtgtccttcacggg

SEQ ID NO: 3241672 - DNA, 25 bp, Homo sapien
gactcaggattgatgcttccctaac

SEQ ID NO: 3241673 - DNA, 25 bp, Homo sapien
taatgcactcaacatagctgcaaac

SEQ ID NO: 3241674 - DNA, 25 bp, Homo sapien
tcacggggctgaagagtgacacttc

SEQ ID NO: 3241675 - DNA, 25 bp, Homo sapien
tgatgactgaatgtaaatgctccac

SEQ ID NO: 3241676 - DNA, 25 bp, Homo sapien
tattagtatccatctcatgatgact

SEQ ID NO: 3241677 - DNA, 25 bp, Homo sapien
tcatgatgactgaatgtaaatgctc

SEQ ID NO: 3241678 - DNA, 25 bp, Homo sapien
ttagtatccatctcatgatgactga

SEQ ID NO: 3241679 - DNA, 25 bp, Homo sapien
catgtcttgactggggggctctacc

SEQ ID NO: 3241680 - DNA, 25 bp, Homo sapien
gacttctgacttacttataagaaca

SEQ ID NO: 3241681 - DNA, 25 bp, Homo sapien
gacaccctggatttcttgacttctg

SEQ ID NO: 3241682 - DNA, 25 bp, Homo sapien
tataagaacagattcaggacagttg

SEQ ID NO: 3241683 - DNA, 25 bp, Homo sapien
tccacaatgctagggaggcctcaca

SEQ ID NO: 3241684 - DNA, 25 bp, Homo sapien
gaggcctcacaatcacggcgcaagc

SEQ ID NO: 3241685 - DNA, 25 bp, Homo sapien
cacaatgctagggaggcctcacaat

SEQ ID NO: 3241686 - DNA, 25 bp, Homo sapien
ctccacaatgctagggaggcctcac

SEQ ID NO: 3241687 - DNA, 25 bp, Homo sapien
tgcacattgcacaacctcgaccata

SEQ ID NO: 3241688 - DNA, 25 bp, Homo sapien
ttcatgcacatgctggaactcatgc

SEQ ID NO: 3241689 - DNA, 25 bp, Homo sapien
ggtgccccagaaataaggacagcgt

SEQ ID NO: 3241690 - DNA, 25 bp, Homo sapien
ctcgaccatattgtgccctggaagg

SEQ ID NO: 3241691 - DNA, 25 bp, Homo sapien
ttcctgattgtattgccttgaaaca

SEQ ID NO: 3241692 - DNA, 25 bp, Homo sapien
gtttcacattaatgggagataccac

SEQ ID NO: 3241693 - DNA, 25 bp, Homo sapien
ccacaattgcaatgtctgcagttag

SEQ ID NO: 3241694 - DNA, 25 bp, Homo sapien
tgcctatgtcaacttggtcaacccc

SEQ ID NO: 3241695 - DNA, 25 bp, Homo sapien
ttatactaaccaaacaatatggcat

SEQ ID NO: 3241696 - DNA, 25 bp, Homo sapien
tatggcattaccataagaattgatt

SEQ ID NO: 3241697 - DNA, 25 bp, Homo sapien
atgttatactaaccaaacaatatgg

SEQ ID NO: 3241698 - DNA, 25 bp, Homo sapien
atggcattaccataagaattgattt

SEQ ID NO: 3241699 - DNA, 25 bp, Homo sapien
cacagtggtcagactgttaaaagaa

SEQ ID NO: 3241700 - DNA, 25 bp, Homo sapien
ataaccacaataaccctatccaaag

SEQ ID NO: 3241701 - DNA, 25 bp, Homo sapien
ggagcagacctccagaaaaccacag

SEQ ID NO: 3241702 - DNA, 25 bp, Homo sapien
cctacacacagtggtcagactgtta

SEQ ID NO: 3241703 - DNA, 25 bp, Homo sapien
gcctgcaatcatctaccgttaagta

SEQ ID NO: 3241704 - DNA, 25 bp, Homo sapien
taactgcgagcaggcctaactgatg

SEQ ID NO: 3241705 - DNA, 25 bp, Homo sapien
tgctgcccacatacctaaatggttt

SEQ ID NO: 3241706 - DNA, 25 bp, Homo sapien
tcatctccggtgattggtaaggtca

SEQ ID NO: 3241707 - DNA, 25 bp, Homo sapien
gcgcccggagcggatgggcctggcc

SEQ ID NO: 3241708 - DNA, 25 bp, Homo sapien
cgacctcaaagcgaccgcgcggtgg

SEQ ID NO: 3241709 - DNA, 25 bp, Homo sapien
tggctaggccgacggcagccgggtc

SEQ ID NO: 3241710 - DNA, 25 bp, Homo sapien
ggcttcgtcctcgacggtgtccgcc

SEQ ID NO: 3241711 - DNA, 25 bp, Homo sapien
cccacctcgccccgcccgacagcgc

SEQ ID NO: 3241712 - DNA, 25 bp, Homo sapien
tctacagacacgaaggtgaagccaa

SEQ ID NO: 3241713 - DNA, 25 bp, Homo sapien
gtgaagccaaagacgggacgctcac

SEQ ID NO: 3241714 - DNA, 25 bp, Homo sapien
ggtgaagccaaagacgggacgctca

SEQ ID NO: 3241715 - DNA, 25 bp, Homo sapien
tgtttacagcggtcagggacccgcc

SEQ ID NO: 3241716 - DNA, 25 bp, Homo sapien
gcgtggacaccaccgacctattgtt

SEQ ID NO: 3241717 - DNA, 25 bp, Homo sapien
tcagcaacggtgacccgcaccaaag

SEQ ID NO: 3241718 - DNA, 25 bp, Homo sapien
gagggtgtcctcagcaacggtgacc

SEQ ID NO: 3241719 - DNA, 25 bp, Homo sapien
ggatgcgcgaccgactcccgtgaac

SEQ ID NO: 3241720 - DNA, 25 bp, Homo sapien
ctcctcgcgcgtcagggagagctgt

SEQ ID NO: 3241721 - DNA, 25 bp, Homo sapien
gaggacggactgaggtcggcctgca

SEQ ID NO: 3241722 - DNA, 25 bp, Homo sapien
cacccaactaggctctgtgaggacg

SEQ ID NO: 3241723 - DNA, 25 bp, Homo sapien
aaaataatacagcactacagaaaaa

SEQ ID NO: 3241724 - DNA, 25 bp, Homo sapien
tgttgttgtcccagatttattgaaa

SEQ ID NO: 3241725 - DNA, 25 bp, Homo sapien
tattgaaaataatacagcactacag

SEQ ID NO: 3241726 - DNA, 25 bp, Homo sapien
ttgaaaataatacagcactacagaa

SEQ ID NO: 3241727 - DNA, 25 bp, Homo sapien
acaggtccccgaggcattttgaaat

SEQ ID NO: 3241728 - DNA, 25 bp, Homo sapien
tcaaacaggtccccgaggcattttg

SEQ ID NO: 3241729 - DNA, 25 bp, Homo sapien
aaattcatcccaactgtaggctgag

SEQ ID NO: 3241730 - DNA, 25 bp, Homo sapien
tgaaattcatcccaactgtaggctg

SEQ ID NO: 3241731 - DNA, 25 bp, Homo sapien
acttcaattatctcctgatccaagg

SEQ ID NO: 3241732 - DNA, 25 bp, Homo sapien
cttagtgtcaggatctacttcaatt

SEQ ID NO: 3241733 - DNA, 25 bp, Homo sapien
ctgaaggttgaacagactgccgaag

SEQ ID NO: 3241734 - DNA, 25 bp, Homo sapien
tgaaggttgaacagactgccgaagt

SEQ ID NO: 3241735 - DNA, 25 bp, Homo sapien
tggcacgctgttggctcaccacagc

SEQ ID NO: 3241736 - DNA, 25 bp, Homo sapien
accacagcctctgggtcctgggttc

SEQ ID NO: 3241737 - DNA, 25 bp, Homo sapien
tcaccacagcctctgggtcctgggt

SEQ ID NO: 3241738 - DNA, 25 bp, Homo sapien
gcagtggcacgctgttggctcacca

SEQ ID NO: 3241739 - DNA, 25 bp, Homo sapien
cacttgagataagagtaattcacta

SEQ ID NO: 3241740 - DNA, 25 bp, Homo sapien
tcaacaggtaagaggattaagtcag

SEQ ID NO: 3241741 - DNA, 25 bp, Homo sapien
tgtatattgtaccaccatatgaaga

SEQ ID NO: 3241742 - DNA, 25 bp, Homo sapien
tataggttatcagtgcaacatttag

SEQ ID NO: 3241743 - DNA, 25 bp, Homo sapien
gacttgctcacaacacaggcaactt

SEQ ID NO: 3241744 - DNA, 25 bp, Homo sapien
aggcaactttgactctagagataac

SEQ ID NO: 3241745 - DNA, 25 bp, Homo sapien
aatgacttgctcacaacacaggcaa

SEQ ID NO: 3241746 - DNA, 25 bp, Homo sapien
tagagataacacttattacagtaaa

SEQ ID NO: 3241747 - DNA, 25 bp, Homo sapien
gatttctatgtgtgctctaggcact

SEQ ID NO: 3241748 - DNA, 25 bp, Homo sapien
cgcccggccttagttgtgtgtgatt

SEQ ID NO: 3241749 - DNA, 25 bp, Homo sapien
cggccttagttgtgtgtgatttcta

SEQ ID NO: 3241750 - DNA, 25 bp, Homo sapien
tgatttctatgtgtgctctaggcac

SEQ ID NO: 3241751 - DNA, 25 bp, Homo sapien
tctctcacagaactgcttagaggag

SEQ ID NO: 3241752 - DNA, 25 bp, Homo sapien
gggtggctactcctactgccactcc

SEQ ID NO: 3241753 - DNA, 25 bp, Homo sapien
ggtctgaccccacactgaaatctct

SEQ ID NO: 3241754 - DNA, 25 bp, Homo sapien
agtttggggtggctactcctactgc

SEQ ID NO: 3241755 - DNA, 25 bp, Homo sapien
cagatgggctgaggccaaaaaagga

SEQ ID NO: 3241756 - DNA, 25 bp, Homo sapien
tttgggataggcatacaaagtaccg

SEQ ID NO: 3241757 - DNA, 25 bp, Homo sapien
gcatacaaagtaccgtcttaagggc

SEQ ID NO: 3241758 - DNA, 25 bp, Homo sapien
gataggcatacaaagtaccgtctta

SEQ ID NO: 3241759 - DNA, 25 bp, Homo sapien
aaaggaggtcatcagtagcccggta

SEQ ID NO: 3241760 - DNA, 25 bp, Homo sapien
caatcttgaccctgccaaaggaggt

SEQ ID NO: 3241761 - DNA, 25 bp, Homo sapien
gtttcaaacagaacctcagggccta

SEQ ID NO: 3241762 - DNA, 25 bp, Homo sapien
gactgttgactgcaaggtaaggcca

SEQ ID NO: 3241763 - DNA, 25 bp, Homo sapien
tgaatttgtgatacctaaagaggga

SEQ ID NO: 3241764 - DNA, 25 bp, Homo sapien
tcctcagaagtatagatgggtccct

SEQ ID NO: 3241765 - DNA, 25 bp, Homo sapien
catcaagagggttgtatgctggctt

SEQ ID NO: 3241766 - DNA, 25 bp, Homo sapien
taagcacaagatctgcaagcacctc

SEQ ID NO: 3241767 - DNA, 25 bp, Homo sapien
gccacgtaagtgtcccgaagattca

SEQ ID NO: 3241768 - DNA, 25 bp, Homo sapien
ggccagtatctgtagcactaaccag

SEQ ID NO: 3241769 - DNA, 25 bp, Homo sapien
tgtgcaccaaagctcacccatggat

SEQ ID NO: 3241770 - DNA, 25 bp, Homo sapien
tcctccaagggtcaaaggagactga

SEQ ID NO: 3241771 - DNA, 25 bp, Homo sapien
tctcacaatggtagttaaattttaa

SEQ ID NO: 3241772 - DNA, 25 bp, Homo sapien
gggatgctcacactatagcaatgtt

SEQ ID NO: 3241773 - DNA, 25 bp, Homo sapien
aaaggaattactgattgataagaac

SEQ ID NO: 3241774 - DNA, 25 bp, Homo sapien
ctgattgataagaacttattacttc

SEQ ID NO: 3241775 - DNA, 25 bp, Homo sapien
cagcctcacacgctacatcttttta

SEQ ID NO: 3241776 - DNA, 25 bp, Homo sapien
ataccatagttaaaagtgatttttg

SEQ ID NO: 3241777 - DNA, 25 bp, Homo sapien
tgcgcccagcctcacacgctacatc

SEQ ID NO: 3241778 - DNA, 25 bp, Homo sapien
ttatatcgtatacccattaacaatt

SEQ ID NO: 3241779 - DNA, 25 bp, Homo sapien
tagaagttcccttgtatgtgaagaa

SEQ ID NO: 3241780 - DNA, 25 bp, Homo sapien
tactatgcagtatgggacccaaatg

SEQ ID NO: 3241781 - DNA, 25 bp, Homo sapien
gggcaatctgctgataaccttatag

SEQ ID NO: 3241782 - DNA, 25 bp, Homo sapien
gttaggattccattacaactcgaaa

SEQ ID NO: 3241783 - DNA, 25 bp, Homo sapien
taattcggagatcactgagaggagc

SEQ ID NO: 3241784 - DNA, 25 bp, Homo sapien
gacaggttcctagatgagaagtact

SEQ ID NO: 3241785 - DNA, 25 bp, Homo sapien
tgagaggagcaacatctaaagtcct

SEQ ID NO: 3241786 - DNA, 25 bp, Homo sapien
gactatgatgggcaagcatgccact

SEQ ID NO: 3241787 - DNA, 25 bp, Homo sapien
catataacccaaacacaacaactct

SEQ ID NO: 3241788 - DNA, 25 bp, Homo sapien
taacccaaacacaacaactctggta

SEQ ID NO: 3241789 - DNA, 25 bp, Homo sapien
tataacccaaacacaacaactctgg

SEQ ID NO: 3241790 - DNA, 25 bp, Homo sapien
ttacatataacccaaacacaacaac

SEQ ID NO: 3241791 - DNA, 25 bp, Homo sapien
gcctactgatactacctttgaaaaa

SEQ ID NO: 3241792 - DNA, 25 bp, Homo sapien
aacattcttgtagaattatggaaac

SEQ ID NO: 3241793 - DNA, 25 bp, Homo sapien
tgttggggatgaataacatgtctga

SEQ ID NO: 3241794 - DNA, 25 bp, Homo sapien
actgtgaggtgaaaagatacagaaa

SEQ ID NO: 3241795 - DNA, 25 bp, Homo sapien
aagtttccatcgaactgttatatca

SEQ ID NO: 3241796 - DNA, 25 bp, Homo sapien
agaagtttccatcgaactgttatat

SEQ ID NO: 3241797 - DNA, 25 bp, Homo sapien
gtttccatcgaactgttatatcaat

SEQ ID NO: 3241798 - DNA, 25 bp, Homo sapien
tccatcgaactgttatatcaatttt

SEQ ID NO: 3241799 - DNA, 25 bp, Homo sapien
ctgagagaggctgtattcctccagg

SEQ ID NO: 3241800 - DNA, 25 bp, Homo sapien
tagcctgagagaggctgtattcctc

SEQ ID NO: 3241801 - DNA, 25 bp, Homo sapien
tgctccaaggtagcctgagagaggc

SEQ ID NO: 3241802 - DNA, 25 bp, Homo sapien
ggctgtattcctccaggttgaaggt

SEQ ID NO: 3241803 - DNA, 25 bp, Homo sapien
tacatgccattaaagaggaatatct

SEQ ID NO: 3241804 - DNA, 25 bp, Homo sapien
cacaggtaacttacatgccattaaa

SEQ ID NO: 3241805 - DNA, 25 bp, Homo sapien
gccattaaagaggaatatctttcct

SEQ ID NO: 3241806 - DNA, 25 bp, Homo sapien
taacttacatgccattaaagaggaa

SEQ ID NO: 3241807 - DNA, 25 bp, Homo sapien
tgtgtggagagcttccacctgagta

SEQ ID NO: 3241808 - DNA, 25 bp, Homo sapien
tccacctgagtaggttctttcattt

SEQ ID NO: 3241809 - DNA, 25 bp, Homo sapien
aatctctgtgtggagagcttccacc

SEQ ID NO: 3241810 - DNA, 25 bp, Homo sapien
gagagcttccacctgagtaggttct

SEQ ID NO: 3241811 - DNA, 25 bp, Homo sapien
ttcagctgttgaatggaaccaatac

SEQ ID NO: 3241812 - DNA, 25 bp, Homo sapien
aacttttcagctgttgaatggaacc

SEQ ID NO: 3241813 - DNA, 25 bp, Homo sapien
cagctgttgaatggaaccaatacac

SEQ ID NO: 3241814 - DNA, 25 bp, Homo sapien
caaacttttcagctgttgaatggaa

SEQ ID NO: 3241815 - DNA, 25 bp, Homo sapien
ggtcacacagagacttagcctctga

SEQ ID NO: 3241816 - DNA, 25 bp, Homo sapien
acggtcacacagagacttagcctct

SEQ ID NO: 3241817 - DNA, 25 bp, Homo sapien
tcacacagagacttagcctctgaca

SEQ ID NO: 3241818 - DNA, 25 bp, Homo sapien
acacggtcacacagagacttagcct

SEQ ID NO: 3241819 - DNA, 25 bp, Homo sapien
gaagcaccactgatgggttccccag

SEQ ID NO: 3241820 - DNA, 25 bp, Homo sapien
agcaccactgatgggttccccagta

SEQ ID NO: 3241821 - DNA, 25 bp, Homo sapien
ctagaagcaccactgatgggttccc

SEQ ID NO: 3241822 - DNA, 25 bp, Homo sapien
caccactgatgggttccccagtatg

SEQ ID NO: 3241823 - DNA, 25 bp, Homo sapien
ctcagcacgaagcatagctttctct

SEQ ID NO: 3241824 - DNA, 25 bp, Homo sapien
tcagcacgaagcatagctttctctt

SEQ ID NO: 3241825 - DNA, 25 bp, Homo sapien
ctgatagagttttcacgggagcctt

SEQ ID NO: 3241826 - DNA, 25 bp, Homo sapien
ttttcacgggagccttaagttgctc

SEQ ID NO: 3241827 - DNA, 25 bp, Homo sapien
gatagagttttcacgggagccttaa

SEQ ID NO: 3241828 - DNA, 25 bp, Homo sapien
atagagttttcacgggagccttaag

SEQ ID NO: 3241829 - DNA, 25 bp, Homo sapien
tctttgcccagtcctttcacggctg

SEQ ID NO: 3241830 - DNA, 25 bp, Homo sapien
aatactaagagcagcatctttgccc

SEQ ID NO: 3241831 - DNA, 25 bp, Homo sapien
gctgcatacaactccaaatgctctt

SEQ ID NO: 3241832 - DNA, 25 bp, Homo sapien
cttccaccaatcatgaaatactaag

SEQ ID NO: 3241833 - DNA, 25 bp, Homo sapien
cagtgagttctcctgagggcagtac

SEQ ID NO: 3241834 - DNA, 25 bp, Homo sapien
cacagtgagttctcctgagggcagt

SEQ ID NO: 3241835 - DNA, 25 bp, Homo sapien
tcattgtaagtttgggacacagtga

SEQ ID NO: 3241836 - DNA, 25 bp, Homo sapien
gacacagtgagttctcctgagggca

SEQ ID NO: 3241837 - DNA, 25 bp, Homo sapien
cttgaggctgttgtcacgctgttgc

SEQ ID NO: 3241838 - DNA, 25 bp, Homo sapien
tgaggctgttgtcacgctgttgcct

SEQ ID NO: 3241839 - DNA, 25 bp, Homo sapien
aacttgaggctgttgtcacgctgtt

SEQ ID NO: 3241840 - DNA, 25 bp, Homo sapien
aggctgttgtcacgctgttgcctta

SEQ ID NO: 3241841 - DNA, 25 bp, Homo sapien
gattggtatgagttcctctacttcg

SEQ ID NO: 3241842 - DNA, 25 bp, Homo sapien
tcttctggattggtatgagttcctc

SEQ ID NO: 3241843 - DNA, 25 bp, Homo sapien
ggtatgagttcctctacttcgtgga

SEQ ID NO: 3241844 - DNA, 25 bp, Homo sapien
caggctcttctggattggtatgagt

SEQ ID NO: 3241845 - DNA, 25 bp, Homo sapien
atatacataaagttgagctggatca

SEQ ID NO: 3241846 - DNA, 25 bp, Homo sapien
tccaagtttctcatatacataaagt

SEQ ID NO: 3241847 - DNA, 25 bp, Homo sapien
catatacataaagttgagctggatc

SEQ ID NO: 3241848 - DNA, 25 bp, Homo sapien
tgtcattgggtttcacttggagcaa

SEQ ID NO: 3241849 - DNA, 25 bp, Homo sapien
gctgctgtaccttgaatgccaaaga

SEQ ID NO: 3241850 - DNA, 25 bp, Homo sapien
ccgtagatgtgggtagagaacctcc

SEQ ID NO: 3241851 - DNA, 25 bp, Homo sapien
acctgtaccttttatgaccacgtgg

SEQ ID NO: 3241852 - DNA, 25 bp, Homo sapien
atggatctctaattttaccttacaa

SEQ ID NO: 3241853 - DNA, 25 bp, Homo sapien
ccatattcttatcagtgtaattata

SEQ ID NO: 3241854 - DNA, 25 bp, Homo sapien
aaatttgatactgatccctaaaggg

SEQ ID NO: 3241855 - DNA, 25 bp, Homo sapien
tagtaccttataaacaataaagtgc

SEQ ID NO: 3241856 - DNA, 25 bp, Homo sapien
ttgctaagaccagttgcatgaaggc

SEQ ID NO: 3241857 - DNA, 25 bp, Homo sapien
ggatacagtgttgtagtactatgtg

SEQ ID NO: 3241858 - DNA, 25 bp, Homo sapien
gatgttatatccaaaaactgattgc

SEQ ID NO: 3241859 - DNA, 25 bp, Homo sapien
taaggtcatgtagtatttgtctcag

SEQ ID NO: 3241860 - DNA, 25 bp, Homo sapien
tgaatttattgctaggctcactgga

SEQ ID NO: 3241861 - DNA, 25 bp, Homo sapien
aaaatcacttggctctaggttcatg

SEQ ID NO: 3241862 - DNA, 25 bp, Homo sapien
tatagatggtatgtaccccagcaca

SEQ ID NO: 3241863 - DNA, 25 bp, Homo sapien
ttctcagtgtagagcgtggttaccc

SEQ ID NO: 3241864 - DNA, 25 bp, Homo sapien
tcccctgctaccctcattggccagg

SEQ ID NO: 3241865 - DNA, 25 bp, Homo sapien
tgctaccctcattggccaggtactc

SEQ ID NO: 3241866 - DNA, 25 bp, Homo sapien
ggccaggtactcctatgcatctgtg

SEQ ID NO: 3241867 - DNA, 25 bp, Homo sapien
gtactcctatgcatctgtgctactg

SEQ ID NO: 3241868 - DNA, 25 bp, Homo sapien
aattctgcgtcggtcacacctctgg

SEQ ID NO: 3241869 - DNA, 25 bp, Homo sapien
tatcggatagccaacaaggaccctg

SEQ ID NO: 3241870 - DNA, 25 bp, Homo sapien
tggcagtcaacccaacccatggtgt

SEQ ID NO: 3241871 - DNA, 25 bp, Homo sapien
aaaacacataggacccatgtctggc

SEQ ID NO: 3241872 - DNA, 25 bp, Homo sapien
gaaacttgacgaggacatgcactct

SEQ ID NO: 3241873 - DNA, 25 bp, Homo sapien
tactacctcaaaccagatcaactgt

SEQ ID NO: 3241874 - DNA, 25 bp, Homo sapien
cacaagtgccactacaggaatagct

SEQ ID NO: 3241875 - DNA, 25 bp, Homo sapien
tcctcaatgagcttggcatcacaag

SEQ ID NO: 3241876 - DNA, 25 bp, Homo sapien
aacaggagtatcaacctattttctt

SEQ ID NO: 3241877 - DNA, 25 bp, Homo sapien
ttcccttctgtacaactgtgtttct

SEQ ID NO: 3241878 - DNA, 25 bp, Homo sapien
caggagtatcaacctattttcttcc

SEQ ID NO: 3241879 - DNA, 25 bp, Homo sapien
tcccttctgtacaactgtgtttctc

SEQ ID NO: 3241880 - DNA, 25 bp, Homo sapien
tactggctcttctgttgtgagcaag

SEQ ID NO: 3241881 - DNA, 25 bp, Homo sapien
ctggctcttctgttgtgagcaagtc

SEQ ID NO: 3241882 - DNA, 25 bp, Homo sapien
tactactggctcttctgttgtgagc

SEQ ID NO: 3241883 - DNA, 25 bp, Homo sapien
ttttactactggctcttctgttgtg

SEQ ID NO: 3241884 - DNA, 25 bp, Homo sapien
gctcccgcctgtaatcccagcactt

SEQ ID NO: 3241885 - DNA, 25 bp, Homo sapien
tgggaggcagaggcaggcggatcat

SEQ ID NO: 3241886 - DNA, 25 bp, Homo sapien
cattaagtctcttaaaaatttcaag

SEQ ID NO: 3241887 - DNA, 25 bp, Homo sapien
aatttcaagagggccgggtgtggtg

SEQ ID NO: 3241888 - DNA, 25 bp, Homo sapien
tacctgtgaacagtgaattactctc

SEQ ID NO: 3241889 - DNA, 25 bp, Homo sapien
gagaagcaatgctgacttaatcctc

SEQ ID NO: 3241890 - DNA, 25 bp, Homo sapien
ggtgcttacaatatgcaacccactt

SEQ ID NO: 3241891 - DNA, 25 bp, Homo sapien
ttttcctttaccaatacagagaagc

SEQ ID NO: 3241892 - DNA, 25 bp, Homo sapien
aggaggacatgccacatgttcaaag

SEQ ID NO: 3241893 - DNA, 25 bp, Homo sapien
catttactgtggtgtgattattaca

SEQ ID NO: 3241894 - DNA, 25 bp, Homo sapien
taaaagtattcaagactcaggaatg

SEQ ID NO: 3241895 - DNA, 25 bp, Homo sapien
attaccagatagtacattgttacca

SEQ ID NO: 3241896 - DNA, 25 bp, Homo sapien
tcgtaagacattcccctggtatgag

SEQ ID NO: 3241897 - DNA, 25 bp, Homo sapien
gattctctctcagtataacgcaaag

SEQ ID NO: 3241898 - DNA, 25 bp, Homo sapien
tagaagtctatgaataatgcccacc

SEQ ID NO: 3241899 - DNA, 25 bp, Homo sapien
gattgaggagcatttaaagaccgcg

SEQ ID NO: 3241900 - DNA, 25 bp, Homo sapien
aagatttgcagactgtctaaaggtt

SEQ ID NO: 3241901 - DNA, 25 bp, Homo sapien
taaagatttgcagactgtctaaagg

SEQ ID NO: 3241902 - DNA, 25 bp, Homo sapien
cataaagatttgcagactgtctaaa

SEQ ID NO: 3241903 - DNA, 25 bp, Homo sapien
gcataaagatttgcagactgtctaa

SEQ ID NO: 3241904 - DNA, 25 bp, Homo sapien
tgtctaaaggttttgccacattctc

SEQ ID NO: 3241905 - DNA, 25 bp, Homo sapien
aggttttgccacattctccacatgt

SEQ ID NO: 3241906 - DNA, 25 bp, Homo sapien
gtctaaaggttttgccacattctcc

SEQ ID NO: 3241907 - DNA, 25 bp, Homo sapien
ttttgccacattctccacatgtgta

SEQ ID NO: 3241908 - DNA, 25 bp, Homo sapien
gaggatgacgtaatgactttgccac

SEQ ID NO: 3241909 - DNA, 25 bp, Homo sapien
cttatattcgttcaggtttgtggac

SEQ ID NO: 3241910 - DNA, 25 bp, Homo sapien
ggaccatccaaaggatctgccacga

SEQ ID NO: 3241911 - DNA, 25 bp, Homo sapien
tgtacataaaggattgctgactgtc

SEQ ID NO: 3241912 - DNA, 25 bp, Homo sapien
gttgattcagggctatggaccatcc

SEQ ID NO: 3241913 - DNA, 25 bp, Homo sapien
tgtgttgattcagggctatggacca

SEQ ID NO: 3241914 - DNA, 25 bp, Homo sapien
gattcagggctatggaccatccaaa

SEQ ID NO: 3241915 - DNA, 25 bp, Homo sapien
gattcaggtctgttgatggggcaaa

SEQ ID NO: 3241916 - DNA, 25 bp, Homo sapien
tttcttgtgttgattcaggtctgtg

SEQ ID NO: 3241917 - DNA, 25 bp, Homo sapien
cttgtgttgattcaggtctgtgtac

SEQ ID NO: 3241918 - DNA, 25 bp, Homo sapien
gaattttcttgtgttgattcaggtc

SEQ ID NO: 3241919 - DNA, 25 bp, Homo sapien
aattttcttgtgttgattcaggtct

SEQ ID NO: 3241920 - DNA, 25 bp, Homo sapien
tattcaggtgcaaggaatgtataaa

SEQ ID NO: 3241921 - DNA, 25 bp, Homo sapien
attcaggtgcaaggaatgtataaag

SEQ ID NO: 3241922 - DNA, 25 bp, Homo sapien
ttcaggtgcaaggaatgtataaagg

SEQ ID NO: 3241923 - DNA, 25 bp, Homo sapien
tattcattcaggtttgtggacaatc

SEQ ID NO: 3241924 - DNA, 25 bp, Homo sapien
ggctctgccacgatcttcacatgtg

SEQ ID NO: 3241925 - DNA, 25 bp, Homo sapien
tttgtggacaatccaaaggctctgc

SEQ ID NO: 3241926 - DNA, 25 bp, Homo sapien
tctgccacgatcttcacatgtgtag

SEQ ID NO: 3241927 - DNA, 25 bp, Homo sapien
acataaaggtttgcggactgtctaa

SEQ ID NO: 3241928 - DNA, 25 bp, Homo sapien
tacataaaggtttgcggactgtcta

SEQ ID NO: 3241929 - DNA, 25 bp, Homo sapien
ggaccatccaaaggctctgtcacga

SEQ ID NO: 3241930 - DNA, 25 bp, Homo sapien
tccaaaggctctgtcacgatcttca

SEQ ID NO: 3241931 - DNA, 25 bp, Homo sapien
aggtttgtggaccatccaaaggctc

SEQ ID NO: 3241932 - DNA, 25 bp, Homo sapien
gtgtgaggaatgcataaaggctttc

SEQ ID NO: 3241933 - DNA, 25 bp, Homo sapien
cttatgtgcagtaaggtttgttgac

SEQ ID NO: 3241934 - DNA, 25 bp, Homo sapien
ctgtgtaagctttctctctgttgtg

SEQ ID NO: 3241935 - DNA, 25 bp, Homo sapien
ctcttatgtgcagtaaggtttgttg

SEQ ID NO: 3241936 - DNA, 25 bp, Homo sapien
ttctcttatgtgcagtaaggtttgt

SEQ ID NO: 3241937 - DNA, 25 bp, Homo sapien
atgaattttcttgtgttgattcagg

SEQ ID NO: 3241938 - DNA, 25 bp, Homo sapien
tgaattttcttgtgttgattcaggt

SEQ ID NO: 3241939 - DNA, 25 bp, Homo sapien
tatgaattttcttgtgttgattcag

SEQ ID NO: 3241940 - DNA, 25 bp, Homo sapien
agtatgaattttcttgtgttgattc

SEQ ID NO: 3241941 - DNA, 25 bp, Homo sapien
taggtctgagaacttctgaaatgac

SEQ ID NO: 3241942 - DNA, 25 bp, Homo sapien
aggtctgagaacttctgaaatgact

SEQ ID NO: 3241943 - DNA, 25 bp, Homo sapien
ggtctgagaacttctgaaatgactt

SEQ ID NO: 3241944 - DNA, 25 bp, Homo sapien
actaaaaactttgacacgtgcatta

SEQ ID NO: 3241945 - DNA, 25 bp, Homo sapien
aaaaactttgacacgtgcattacat

SEQ ID NO: 3241946 - DNA, 25 bp, Homo sapien
ctaaaaactttgacacgtgcattac

SEQ ID NO: 3241947 - DNA, 25 bp, Homo sapien
taaaaactttgacacgtgcattaca

SEQ ID NO: 3241948 - DNA, 25 bp, Homo sapien
tataaactcccttctgcactttaca

SEQ ID NO: 3241949 - DNA, 25 bp, Homo sapien
taattccattataaactcccttctg

SEQ ID NO: 3241950 - DNA, 25 bp, Homo sapien
ttctgcactttacacacgttcatac

SEQ ID NO: 3241951 - DNA, 25 bp, Homo sapien
ccttctgcactttacacacgttcat

SEQ ID NO: 3241952 - DNA, 25 bp, Homo sapien
tcttctcagtataagtttgtggaat

SEQ ID NO: 3241953 - DNA, 25 bp, Homo sapien
tatcccctgcactggcaaaaagtct

SEQ ID NO: 3241954 - DNA, 25 bp, Homo sapien
tgaatcttctatcccctgcactggc

SEQ ID NO: 3241955 - DNA, 25 bp, Homo sapien
ccttaattgtaaattatcatgccca

SEQ ID NO: 3241956 - DNA, 25 bp, Homo sapien
aacaaattatcccagttactagatt

SEQ ID NO: 3241957 - DNA, 25 bp, Homo sapien
caaattatcccagttactagattca

SEQ ID NO: 3241958 - DNA, 25 bp, Homo sapien
tatcccagttactagattcatatgc

SEQ ID NO: 3241959 - DNA, 25 bp, Homo sapien
cagttactagattcatatgcatata

SEQ ID NO: 3241960 - DNA, 25 bp, Homo sapien
ctttttgtatttttaatagagacag

SEQ ID NO: 3241961 - DNA, 25 bp, Homo sapien
caccaccatgctcttctactttttg

SEQ ID NO: 3241962 - DNA, 25 bp, Homo sapien
tacacaccaccatgctcttctactt

SEQ ID NO: 3241963 - DNA, 25 bp, Homo sapien
cacaccaccatgctcttctactttt

SEQ ID NO: 3241964 - DNA, 25 bp, Homo sapien
tcaaatgcaactcgtttttaccagt

SEQ ID NO: 3241965 - DNA, 25 bp, Homo sapien
ttcaaatgcaactcgtttttaccag

SEQ ID NO: 3241966 - DNA, 25 bp, Homo sapien
caaatgcaactcgtttttaccagtt

SEQ ID NO: 3241967 - DNA, 25 bp, Homo sapien
tgacgtggcactataacctgattcc

SEQ ID NO: 3241968 - DNA, 25 bp, Homo sapien
gcccctggatgtagacttgccaata

SEQ ID NO: 3241969 - DNA, 25 bp, Homo sapien
aatccatgtcaagggttgtgaaccc

SEQ ID NO: 3241970 - DNA, 25 bp, Homo sapien
tattgaaaagacatgcccttgcttg

SEQ ID NO: 3241971 - DNA, 25 bp, Homo sapien
aatttttttgcaatctacccatctg

SEQ ID NO: 3241972 - DNA, 25 bp, Homo sapien
tacccatctgacaaaggaataatat

SEQ ID NO: 3241973 - DNA, 25 bp, Homo sapien
aggaataatatccagaaactacaaa

SEQ ID NO: 3241974 - DNA, 25 bp, Homo sapien
gacgtaaatgtaaggcctaaaatca

SEQ ID NO: 3241975 - DNA, 25 bp, Homo sapien
agcaaactaacacaaagacaggaaa

SEQ ID NO: 3241976 - DNA, 25 bp, Homo sapien
ctgtttacagtagcaaagatttgga

SEQ ID NO: 3241977 - DNA, 25 bp, Homo sapien
cactgtttacagtagcaaagatttg

SEQ ID NO: 3241978 - DNA, 25 bp, Homo sapien
acacaaagacaggaaaccaaacatc

SEQ ID NO: 3241979 - DNA, 25 bp, Homo sapien
gcctacatggcttacacatacaatg

SEQ ID NO: 3241980 - DNA, 25 bp, Homo sapien
caaacaaaaaaggatgtggcctaca

SEQ ID NO: 3241981 - DNA, 25 bp, Homo sapien
tgaaaatatcttgtcggatcataca

SEQ ID NO: 3241982 - DNA, 25 bp, Homo sapien
taatttaaaaggatgcggcttggcc

SEQ ID NO: 3241983 - DNA, 25 bp, Homo sapien
catttgtagtcacagtccgtggcca

SEQ ID NO: 3241984 - DNA, 25 bp, Homo sapien
ggcccacagagagacctataaaaac

SEQ ID NO: 3241985 - DNA, 25 bp, Homo sapien
gtggccactcgtacacactcagagg

SEQ ID NO: 3241986 - DNA, 25 bp, Homo sapien
cagacaagaaaatggtgcatgcagc

SEQ ID NO: 3241987 - DNA, 25 bp, Homo sapien
gaaatatttgcaagcgatatacctg

SEQ ID NO: 3241988 - DNA, 25 bp, Homo sapien
cctgataacaagttaattttgggag

SEQ ID NO: 3241989 - DNA, 25 bp, Homo sapien
aaaccttgatactggtcttggcaat

SEQ ID NO: 3241990 - DNA, 25 bp, Homo sapien
caaacaagtgggattgtatcaaagt

SEQ ID NO: 3241991 - DNA, 25 bp, Homo sapien
ccacatccctgaatgttaagggttc

SEQ ID NO: 3241992 - DNA, 25 bp, Homo sapien
tttccactcttctggagagaattct

SEQ ID NO: 3241993 - DNA, 25 bp, Homo sapien
catctctatacaaattctgctgggc

SEQ ID NO: 3241994 - DNA, 25 bp, Homo sapien
tacaaattctgctgggcagggtcca

SEQ ID NO: 3241995 - DNA, 25 bp, Homo sapien
cagactgcgcgcctgattgggcagt

SEQ ID NO: 3241996 - DNA, 25 bp, Homo sapien
ggtgtcgcgaagtcttagctacgaa

SEQ ID NO: 3241997 - DNA, 25 bp, Homo sapien
ggctctggcaaaatcaccgaggcct

SEQ ID NO: 3241998 - DNA, 25 bp, Homo sapien
tttctcagcttcaagggtgtcgcga

SEQ ID NO: 3241999 - DNA, 25 bp, Homo sapien
aaaacataaccccaactttctgcat

SEQ ID NO: 3242000 - DNA, 25 bp, Homo sapien
aatcacattatgcatgtatttgtct

SEQ ID NO: 3242001 - DNA, 25 bp, Homo sapien
caatcacattatgcatgtatttgtc

SEQ ID NO: 3242002 - DNA, 25 bp, Homo sapien
gtttgactacttgagatagctcgta

SEQ ID NO: 3242003 - DNA, 25 bp, Homo sapien
ggtagagccgtattccactgcatgc

SEQ ID NO: 3242004 - DNA, 25 bp, Homo sapien
gcatgtttcactgaatgtcctaaag

SEQ ID NO: 3242005 - DNA, 25 bp, Homo sapien
taaatacccctgaagcattaactgc

SEQ ID NO: 3242006 - DNA, 25 bp, Homo sapien
gaaatctccatcccaattttcttgg

SEQ ID NO: 3242007 - DNA, 25 bp, Homo sapien
atctccatcccaattttcttggggg

SEQ ID NO: 3242008 - DNA, 25 bp, Homo sapien
agaaatctccatcccaattttcttg

SEQ ID NO: 3242009 - DNA, 25 bp, Homo sapien
aaatctccatcccaattttcttggg

SEQ ID NO: 3242010 - DNA, 25 bp, Homo sapien
tggtagtagacacgcatacgctgcc

SEQ ID NO: 3242011 - DNA, 25 bp, Homo sapien
tttgggcgagtcagtaaaggtcaca

SEQ ID NO: 3242012 - DNA, 25 bp, Homo sapien
ttcagcagttgaacacagcgtccac

SEQ ID NO: 3242013 - DNA, 25 bp, Homo sapien
tgcctgtgcaaatgctggaactcaa

SEQ ID NO: 3242014 - DNA, 25 bp, Homo sapien
ggagcatttacactcaggcatcatg

SEQ ID NO: 3242015 - DNA, 25 bp, Homo sapien
ggagagcctaaaatcgccattgcct

SEQ ID NO: 3242016 - DNA, 25 bp, Homo sapien
actggtcctccgaaagatgttggtt

SEQ ID NO: 3242017 - DNA, 25 bp, Homo sapien
ttattcttgccctgacccttgggag

SEQ ID NO: 3242018 - DNA, 25 bp, Homo sapien
gaaacctggctgagtagtgtggtct

SEQ ID NO: 3242019 - DNA, 25 bp, Homo sapien
gcttcagagtcaggccaacgttgat

SEQ ID NO: 3242020 - DNA, 25 bp, Homo sapien
attgtttcgcttttcccaagagact

SEQ ID NO: 3242021 - DNA, 25 bp, Homo sapien
gctgtgggatagttatacaagacac

SEQ ID NO: 3242022 - DNA, 25 bp, Homo sapien
caaaggatcgaaggcgactgtcact

SEQ ID NO: 3242023 - DNA, 25 bp, Homo sapien
cctcagcctttgattagccaaggac

SEQ ID NO: 3242024 - DNA, 25 bp, Homo sapien
ccccttgtaccagttctctgataga

SEQ ID NO: 3242025 - DNA, 25 bp, Homo sapien
tctacacccgagtagcaaaggatcg

SEQ ID NO: 3242026 - DNA, 25 bp, Homo sapien
gatctgaagacatggtggtctctct

SEQ ID NO: 3242027 - DNA, 25 bp, Homo sapien
tccacatctaaactctggagggcaa

SEQ ID NO: 3242028 - DNA, 25 bp, Homo sapien
gtgcttaaactcacgcagtgcccca

SEQ ID NO: 3242029 - DNA, 25 bp, Homo sapien
aaacacacagttacagcctgacagg

SEQ ID NO: 3242030 - DNA, 25 bp, Homo sapien
tctcgatcaggggtagctttgccac

SEQ ID NO: 3242031 - DNA, 25 bp, Homo sapien
atctttgtgtggcaagttttagagg

SEQ ID NO: 3242032 - DNA, 25 bp, Homo sapien
tgccacagatttcagcaatggataa

SEQ ID NO: 3242033 - DNA, 25 bp, Homo sapien
aattgagtgtgagatctcaggtgca

SEQ ID NO: 3242034 - DNA, 25 bp, Homo sapien
ccaaccataccgccttttttgtgtg

SEQ ID NO: 3242035 - DNA, 25 bp, Homo sapien
gctctttcggtttggtctggctggc

SEQ ID NO: 3242036 - DNA, 25 bp, Homo sapien
gccggacagaatgctactttcagaa

SEQ ID NO: 3242037 - DNA, 25 bp, Homo sapien
ctcattaccatatttcggccggaca

SEQ ID NO: 3242038 - DNA, 25 bp, Homo sapien
ggttgttaatgttatctttagtcat

SEQ ID NO: 3242039 - DNA, 25 bp, Homo sapien
taatgttatctttagtcatttaaaa

SEQ ID NO: 3242040 - DNA, 25 bp, Homo sapien
gaatttgcaagacaaaattccaaat

SEQ ID NO: 3242041 - DNA, 25 bp, Homo sapien
aatttgcaagacaaaattccaaatc

SEQ ID NO: 3242042 - DNA, 25 bp, Homo sapien
ccttgatgaagcgagtgggaactcc

SEQ ID NO: 3242043 - DNA, 25 bp, Homo sapien
tgtataataacaggccggacagggc

SEQ ID NO: 3242044 - DNA, 25 bp, Homo sapien
ggtgccaagccaataccgaggatca

SEQ ID NO: 3242045 - DNA, 25 bp, Homo sapien
gatcaataggcgaactgctgcaggc

SEQ ID NO: 3242046 - DNA, 25 bp, Homo sapien
aatttgacgggcgtggcggcgggcg

SEQ ID NO: 3242047 - DNA, 25 bp, Homo sapien
acacgggaggctgcggtaggaaaat

SEQ ID NO: 3242048 - DNA, 25 bp, Homo sapien
tggcgtgaacccgggaggcggagct

SEQ ID NO: 3242049 - DNA, 25 bp, Homo sapien
cctgtagtcccagctacacgggagg

SEQ ID NO: 3242050 - DNA, 25 bp, Homo sapien
ccgctgttcgtatgtccgaggtgac

SEQ ID NO: 3242051 - DNA, 25 bp, Homo sapien
cggagccgggaacaccgcccgctgt

SEQ ID NO: 3242052 - DNA, 25 bp, Homo sapien
gaacaccgcccgctgttcgtatgtc

SEQ ID NO: 3242053 - DNA, 25 bp, Homo sapien
cgtgggcggcgaccgtcgcggactc

SEQ ID NO: 3242054 - DNA, 25 bp, Homo sapien
gagttaataagtgttgcttttctaa

SEQ ID NO: 3242055 - DNA, 25 bp, Homo sapien
gcttttctaatcacagcaagtcaag

SEQ ID NO: 3242056 - DNA, 25 bp, Homo sapien
tcacagcaagtcaaggtgactgctg

SEQ ID NO: 3242057 - DNA, 25 bp, Homo sapien
taatcacagcaagtcaaggtgactg

SEQ ID NO: 3242058 - DNA, 25 bp, Homo sapien
gtacagacccctgaggcagaacaga

SEQ ID NO: 3242059 - DNA, 25 bp, Homo sapien
gtgccaggccctaaagcaatacgaa

SEQ ID NO: 3242060 - DNA, 25 bp, Homo sapien
tacgaacccctgaggtagtacaggc

SEQ ID NO: 3242061 - DNA, 25 bp, Homo sapien
tagtacaggcccctgaagatactcc

SEQ ID NO: 3242062 - DNA, 25 bp, Homo sapien
ccctgagttgttggtatggagccct

SEQ ID NO: 3242063 - DNA, 25 bp, Homo sapien
aaccctgagttggtatgggaccctg

SEQ ID NO: 3242064 - DNA, 25 bp, Homo sapien
ggaactctgaattggtatggaaccc

SEQ ID NO: 3242065 - DNA, 25 bp, Homo sapien
aaccctgagttgttgctatggaacc

SEQ ID NO: 3242066 - DNA, 25 bp, Homo sapien
ccctgagttgatatggagcactgag

SEQ ID NO: 3242067 - DNA, 25 bp, Homo sapien
ccctgagttgttggtatggagccct

SEQ ID NO: 3242068 - DNA, 25 bp, Homo sapien
tgagttgctatggagccctgagttg

SEQ ID NO: 3242069 - DNA, 25 bp, Homo sapien
ccctgagttggtatgtagccttgag

SEQ ID NO: 3242070 - DNA, 25 bp, Homo sapien
cctgcgttggtatggagctttgagt

SEQ ID NO: 3242071 - DNA, 25 bp, Homo sapien
gaaccctgcgttggtatggagcttt

SEQ ID NO: 3242072 - DNA, 25 bp, Homo sapien
accctgcgttggtatggagctttga

SEQ ID NO: 3242073 - DNA, 25 bp, Homo sapien
ggaaccctgcgttggtatggagctt

SEQ ID NO: 3242074 - DNA, 25 bp, Homo sapien
ctagttccatcacgtcaccccagac

SEQ ID NO: 3242075 - DNA, 25 bp, Homo sapien
ttctagttccatcacgtcaccccag

SEQ ID NO: 3242076 - DNA, 25 bp, Homo sapien
agttgttgtgattcttgcttctagt

SEQ ID NO: 3242077 - DNA, 25 bp, Homo sapien
tctagttccatcacgtcaccccaga

SEQ ID NO: 3242078 - DNA, 25 bp, Homo sapien
tcactgccttgtccaatcaacatca

SEQ ID NO: 3242079 - DNA, 25 bp, Homo sapien
cgtcctcactgccttgtccaatcaa

SEQ ID NO: 3242080 - DNA, 25 bp, Homo sapien
tgacacgtcctcactgccttgtcca

SEQ ID NO: 3242081 - DNA, 25 bp, Homo sapien
actgccttgtccaatcaacatcaca

SEQ ID NO: 3242082 - DNA, 25 bp, Homo sapien
tactcccggagttagggacactcaa

SEQ ID NO: 3242083 - DNA, 25 bp, Homo sapien
tagtacatgaacacctatgacagtg

SEQ ID NO: 3242084 - DNA, 25 bp, Homo sapien
cagtaactagcaagtcagtggtaac

SEQ ID NO: 3242085 - DNA, 25 bp, Homo sapien
gggtaacctcattattcagctagag

SEQ ID NO: 3242086 - DNA, 25 bp, Homo sapien
catccacatagcaaggagaggacac

SEQ ID NO: 3242087 - DNA, 25 bp, Homo sapien
gcatccacatagcaaggagaggaca

SEQ ID NO: 3242088 - DNA, 25 bp, Homo sapien
cagcatccacatagcaaggagagga

SEQ ID NO: 3242089 - DNA, 25 bp, Homo sapien
agcatccacatagcaaggagaggac

SEQ ID NO: 3242090 - DNA, 25 bp, Homo sapien
cagtcccacggcaggaggtactcat

SEQ ID NO: 3242091 - DNA, 25 bp, Homo sapien
caagaaaagtgcagtcgggctagcc

SEQ ID NO: 3242092 - DNA, 25 bp, Homo sapien
gccccagggtttggacttgccaaga

SEQ ID NO: 3242093 - DNA, 25 bp, Homo sapien
tctgctttgcagtcgaaaccacaca

SEQ ID NO: 3242094 - DNA, 25 bp, Homo sapien
tggattcagtcaactagctagcaga

SEQ ID NO: 3242095 - DNA, 25 bp, Homo sapien
agggccgcggcgtctcgcagggcgg

SEQ ID NO: 3242096 - DNA, 25 bp, Homo sapien
tcgtccagcgcgtggaggacgccta

SEQ ID NO: 3242097 - DNA, 25 bp, Homo sapien
agaccgcgtggtgcgccgcgaagcc

SEQ ID NO: 3242098 - DNA, 25 bp, Homo sapien
ctacgttgatgtaggagaccgcgtg

SEQ ID NO: 3242099 - DNA, 25 bp, Homo sapien
ctccggggacaggatggaggcctcg

SEQ ID NO: 3242100 - DNA, 25 bp, Homo sapien
ctccgcctgccgcgccgaccgcgcc

SEQ ID NO: 3242101 - DNA, 25 bp, Homo sapien
ccctccgcctgccgcgccgaccgcg

SEQ ID NO: 3242102 - DNA, 25 bp, Homo sapien
gcctgccgcgccgaccgcgccgggc

SEQ ID NO: 3242103 - DNA, 25 bp, Homo sapien
ccgcctgccgcgccgaccgcgccgg

SEQ ID NO: 3242104 - DNA, 25 bp, Homo sapien
cactcaagcgagttgaagacggtgg

SEQ ID NO: 3242105 - DNA, 25 bp, Homo sapien
aggcactcaagcgagttgaagacgg

SEQ ID NO: 3242106 - DNA, 25 bp, Homo sapien
actcaagcgagttgaagacggtgga

SEQ ID NO: 3242107 - DNA, 25 bp, Homo sapien
agacggtggagagcaccaggccgcg

SEQ ID NO: 3242108 - DNA, 25 bp, Homo sapien
cacttggcggacgtggcgctgtcca

SEQ ID NO: 3242109 - DNA, 25 bp, Homo sapien
ggcacttggcggacgtggcgctgtc

SEQ ID NO: 3242110 - DNA, 25 bp, Homo sapien
agtccttcagctggcggcacttggc

SEQ ID NO: 3242111 - DNA, 25 bp, Homo sapien
ctggtagtccttcagctggcggcac

SEQ ID NO: 3242112 - DNA, 25 bp, Homo sapien
tgaggaccccgagcatgaagaccag

SEQ ID NO: 3242113 - DNA, 25 bp, Homo sapien
cagggacacggtgtcgccgtcgatc

SEQ ID NO: 3242114 - DNA, 25 bp, Homo sapien
acggcgcccgcgaatgcgctgagga

SEQ ID NO: 3242115 - DNA, 25 bp, Homo sapien
ccaggacgccgagcagaagcaggtt

SEQ ID NO: 3242116 - DNA, 25 bp, Homo sapien
cgcggcccccgactcgcccggcgtg

SEQ ID NO: 3242117 - DNA, 25 bp, Homo sapien
ccccgactcgcccggcgtggcctcg

SEQ ID NO: 3242118 - DNA, 25 bp, Homo sapien
gcccggcgtggcctcgggagcgcct

SEQ ID NO: 3242119 - DNA, 25 bp, Homo sapien
gactcgcccggcgtggcctcgggag

SEQ ID NO: 3242120 - DNA, 25 bp, Homo sapien
agcagcagcccggagtagaaggcgc

SEQ ID NO: 3242121 - DNA, 25 bp, Homo sapien
gcgcagctccgagcccaacgagaag

SEQ ID NO: 3242122 - DNA, 25 bp, Homo sapien
gagcccaacgagaagcacttgaggc

SEQ ID NO: 3242123 - DNA, 25 bp, Homo sapien
aggccccgcggacgctccacttcat

SEQ ID NO: 3242124 - DNA, 25 bp, Homo sapien
gagggcggcgaattcctccgcctca

SEQ ID NO: 3242125 - DNA, 25 bp, Homo sapien
tcagaaggcggttcacggcctgagt

SEQ ID NO: 3242126 - DNA, 25 bp, Homo sapien
gacgagggcggcgaattcctccgcc

SEQ ID NO: 3242127 - DNA, 25 bp, Homo sapien
ttaattcatcagaaggcggttcacg

SEQ ID NO: 3242128 - DNA, 25 bp, Homo sapien
agccgtcatccagagcgcacagctt

SEQ ID NO: 3242129 - DNA, 25 bp, Homo sapien
tgtgtcccgtggtgcccggtgggcc

SEQ ID NO: 3242130 - DNA, 25 bp, Homo sapien
ccttgaagggcgcagtgtgtcccgt

SEQ ID NO: 3242131 - DNA, 25 bp, Homo sapien
aagttctggcctgtggagccgtcat

SEQ ID NO: 3242132 - DNA, 25 bp, Homo sapien
tgccacattgggagttcagctcact

SEQ ID NO: 3242133 - DNA, 25 bp, Homo sapien
caggtgcccacccagaagggtcttt

SEQ ID NO: 3242134 - DNA, 25 bp, Homo sapien
ccggagctggcgcacagtaaagtct

SEQ ID NO: 3242135 - DNA, 25 bp, Homo sapien
ggaagttcagactttaccctgagga

SEQ ID NO: 3242136 - DNA, 25 bp, Homo sapien
cgactgcgtgctgccttcggaggaa

SEQ ID NO: 3242137 - DNA, 25 bp, Homo sapien
cagacatgacgcgaagcagaaagct

SEQ ID NO: 3242138 - DNA, 25 bp, Homo sapien
tgcaattccaggtcacgactgcgtg

SEQ ID NO: 3242139 - DNA, 25 bp, Homo sapien
taagtggtgggcaacaagcatgccc

SEQ ID NO: 3242140 - DNA, 25 bp, Homo sapien
ccagggcgatgcaagcctgtagaag

SEQ ID NO: 3242141 - DNA, 25 bp, Homo sapien
ccgcagaaccggcttccagctgcca

SEQ ID NO: 3242142 - DNA, 25 bp, Homo sapien
ctaacaccgcagaaccggcttccag

SEQ ID NO: 3242143 - DNA, 25 bp, Homo sapien
gatgcaagcctgtagaagcacagat

SEQ ID NO: 3242144 - DNA, 25 bp, Homo sapien
tgagcatcctagacgcgcggtttgg

SEQ ID NO: 3242145 - DNA, 25 bp, Homo sapien
tatgttaccatctgctccggtgcgc

SEQ ID NO: 3242146 - DNA, 25 bp, Homo sapien
tgcgtttctgtgttcgcgctcccgg

SEQ ID NO: 3242147 - DNA, 25 bp, Homo sapien
agtagcgcctttagcatattgatca

SEQ ID NO: 3242148 - DNA, 25 bp, Homo sapien
taaaccaggcaacaagtgaattacc

SEQ ID NO: 3242149 - DNA, 25 bp, Homo sapien
catgtggagaccagctcaaggttct

SEQ ID NO: 3242150 - DNA, 25 bp, Homo sapien
caagagtcaggcgtatttgcccgtt

SEQ ID NO: 3242151 - DNA, 25 bp, Homo sapien
gattttgcaccagacattgcccagt

SEQ ID NO: 3242152 - DNA, 25 bp, Homo sapien
gcttcactctcagacgcttggcgga

SEQ ID NO: 3242153 - DNA, 25 bp, Homo sapien
tcctgagtgatcagggacacgaccg

SEQ ID NO: 3242154 - DNA, 25 bp, Homo sapien
gacctcgtggagtgcgtcagcaatg

SEQ ID NO: 3242155 - DNA, 25 bp, Homo sapien
tttgcctgtcaagctcaaagcgaca

SEQ ID NO: 3242156 - DNA, 25 bp, Homo sapien
ctggccacggagccaccaatcaggg

SEQ ID NO: 3242157 - DNA, 25 bp, Homo sapien
ggccacggagccaccaatcagggtc

SEQ ID NO: 3242158 - DNA, 25 bp, Homo sapien
tggccacggagccaccaatcagggt

SEQ ID NO: 3242159 - DNA, 25 bp, Homo sapien
caggctccacggctgggcaggtggt

SEQ ID NO: 3242160 - DNA, 25 bp, Homo sapien
tacctcaactgcgagcggtactccg

SEQ ID NO: 3242161 - DNA, 25 bp, Homo sapien
acaaggccttctacacggtgcgggc

SEQ ID NO: 3242162 - DNA, 25 bp, Homo sapien
tgtgtcaggcttgagttaaacccct

SEQ ID NO: 3242163 - DNA, 25 bp, Homo sapien
gacggacatcgagaggcagttccac

SEQ ID NO: 3242164 - DNA, 25 bp, Homo sapien
agggcctgtccacacgcctctgttt

SEQ ID NO: 3242165 - DNA, 25 bp, Homo sapien
tctgcccaggaattttttgacgtgt

SEQ ID NO: 3242166 - DNA, 25 bp, Homo sapien
agagtcccagccgtactcgggccca

SEQ ID NO: 3242167 - DNA, 25 bp, Homo sapien
ccacgcacgcctgatggccgggtga

SEQ ID NO: 3242168 - DNA, 25 bp, Homo sapien
ggcaccaacgctgagtcctagaaag

SEQ ID NO: 3242169 - DNA, 25 bp, Homo sapien
cagtggccctgtgatcccataagcc

SEQ ID NO: 3242170 - DNA, 25 bp, Homo sapien
gcaacaattgagcatgaaggcccca

SEQ ID NO: 3242171 - DNA, 25 bp, Homo sapien
tggacatccagagtggacatacagg

SEQ ID NO: 3242172 - DNA, 25 bp, Homo sapien
gttttattattaggagttccaagca

SEQ ID NO: 3242173 - DNA, 25 bp, Homo sapien
tcccatcacctaaacagaaagcaca

SEQ ID NO: 3242174 - DNA, 25 bp, Homo sapien
ccaagcaatttgatcattaggcaca

SEQ ID NO: 3242175 - DNA, 25 bp, Homo sapien
tgctgaggagatagaagcatcccat

SEQ ID NO: 3242176 - DNA, 25 bp, Homo sapien
gaacatctaccagaacctgaaccgg

SEQ ID NO: 3242177 - DNA, 25 bp, Homo sapien
tctcggaggaggttggtatactcac

SEQ ID NO: 3242178 - DNA, 25 bp, Homo sapien
gacctggccctgtacttcaagtgcg

SEQ ID NO: 3242179 - DNA, 25 bp, Homo sapien
tttggagcggcaccacctggagttt

SEQ ID NO: 3242180 - DNA, 25 bp, Homo sapien
ccatttttggatagttaccactggg

SEQ ID NO: 3242181 - DNA, 25 bp, Homo sapien
aaaagggtccatgaactctgaaatc

SEQ ID NO: 3242182 - DNA, 25 bp, Homo sapien
tgtgaataaactgtagcctacatta

SEQ ID NO: 3242183 - DNA, 25 bp, Homo sapien
catttgcagccacacatgtacatat

SEQ ID NO: 3242184 - DNA, 25 bp, Homo sapien
taaacaccatgtagagtggctctga

SEQ ID NO: 3242185 - DNA, 25 bp, Homo sapien
cccccatgattaaatattggtgagc

SEQ ID NO: 3242186 - DNA, 25 bp, Homo sapien
ggctggatgccgaagcccgtgcacc

SEQ ID NO: 3242187 - DNA, 25 bp, Homo sapien
tcagtggtctgagcggaaatgatct

SEQ ID NO: 3242188 - DNA, 25 bp, Homo sapien
aatctgtccattgcaaaccaccagg

SEQ ID NO: 3242189 - DNA, 25 bp, Homo sapien
ggccttatatttgcaaacgaactca

SEQ ID NO: 3242190 - DNA, 25 bp, Homo sapien
cacataactgggaagtagcaaattc

SEQ ID NO: 3242191 - DNA, 25 bp, Homo sapien
ggctccaagcctagatttgctcaag

SEQ ID NO: 3242192 - DNA, 25 bp, Homo sapien
ttattcatccgctgctggtccaaag

SEQ ID NO: 3242193 - DNA, 25 bp, Homo sapien
gaagctttattcatccgctgctggt

SEQ ID NO: 3242194 - DNA, 25 bp, Homo sapien
caggaagctttattcatccgctgct

SEQ ID NO: 3242195 - DNA, 25 bp, Homo sapien
ctgctggtccaaagagtgggtcgca

SEQ ID NO: 3242196 - DNA, 25 bp, Homo sapien
ccgcatctacttagctctgcttaaa

SEQ ID NO: 3242197 - DNA, 25 bp, Homo sapien
tccattttccttatccctgcacaaa

SEQ ID NO: 3242198 - DNA, 25 bp, Homo sapien
ccatttttaaacaatccgcatctac

SEQ ID NO: 3242199 - DNA, 25 bp, Homo sapien
gaaaagcacatgttaccactcaggc

SEQ ID NO: 3242200 - DNA, 25 bp, Homo sapien
caatctataagagccagtgtcactc

SEQ ID NO: 3242201 - DNA, 25 bp, Homo sapien
ctgggagggacaatctataagagcc

SEQ ID NO: 3242202 - DNA, 25 bp, Homo sapien
gagggacaatctataagagccagtg

SEQ ID NO: 3242203 - DNA, 25 bp, Homo sapien
ctataagagccagtgtcactcgtac

SEQ ID NO: 3242204 - DNA, 25 bp, Homo sapien
ttctctggcaatccgtttcagttca

SEQ ID NO: 3242205 - DNA, 25 bp, Homo sapien
cttctgccaattctctggcaatccg

SEQ ID NO: 3242206 - DNA, 25 bp, Homo sapien
gcaatccgtttcagttcatcctgct

SEQ ID NO: 3242207 - DNA, 25 bp, Homo sapien
ccaattctctggcaatccgtttcag

SEQ ID NO: 3242208 - DNA, 25 bp, Homo sapien
tggaaatgctgtacaaaaggaactg

SEQ ID NO: 3242209 - DNA, 25 bp, Homo sapien
tcagcgacgctgtaaaccagacgca

SEQ ID NO: 3242210 - DNA, 25 bp, Homo sapien
cacaggtcaaggtatcttcagcgac

SEQ ID NO: 3242211 - DNA, 25 bp, Homo sapien
ctgtttggcggaatgcaggagaata

SEQ ID NO: 3242212 - DNA, 25 bp, Homo sapien
tatgttaatgcgagtcaacgcctga

SEQ ID NO: 3242213 - DNA, 25 bp, Homo sapien
tggctcactcgtcctctgcgaacag

SEQ ID NO: 3242214 - DNA, 25 bp, Homo sapien
ttagcacccgttttcaccaagaagc

SEQ ID NO: 3242215 - DNA, 25 bp, Homo sapien
caagaagcagccgttttcgagtccc

SEQ ID NO: 3242216 - DNA, 25 bp, Homo sapien
acaccgaggaacagggcggagtagc

SEQ ID NO: 3242217 - DNA, 25 bp, Homo sapien
gctccgtaggccacaccgaggaaca

SEQ ID NO: 3242218 - DNA, 25 bp, Homo sapien
tgtagcgcgtggctccgtaggccac

SEQ ID NO: 3242219 - DNA, 25 bp, Homo sapien
gcgtggctccgtaggccacaccgag

SEQ ID NO: 3242220 - DNA, 25 bp, Homo sapien
aggttggtcagaggcggcgcgaaac

SEQ ID NO: 3242221 - DNA, 25 bp, Homo sapien
ttggtcagaggcggcgcgaaacggg

SEQ ID NO: 3242222 - DNA, 25 bp, Homo sapien
gggtcgctgggcagaggtcgcagga

SEQ ID NO: 3242223 - DNA, 25 bp, Homo sapien
ggtcagaggcggcgcgaaacggggc

SEQ ID NO: 3242224 - DNA, 25 bp, Homo sapien
gcggagagacctgcaccggtggcac

SEQ ID NO: 3242225 - DNA, 25 bp, Homo sapien
gagagacctgcaccggtggcaccat

SEQ ID NO: 3242226 - DNA, 25 bp, Homo sapien
ttgatgagcggagagacctgcaccg

SEQ ID NO: 3242227 - DNA, 25 bp, Homo sapien
cttgatgagcggagagacctgcacc

SEQ ID NO: 3242228 - DNA, 25 bp, Homo sapien
cccctggcgaccgaagggtgactgc

SEQ ID NO: 3242229 - DNA, 25 bp, Homo sapien
agcaggatgccgcacaagccagcaa

SEQ ID NO: 3242230 - DNA, 25 bp, Homo sapien
tgacgtcacgtgaggcgcacgcgca

SEQ ID NO: 3242231 - DNA, 25 bp, Homo sapien
gaagcacaacctgcagacggagcag

SEQ ID NO: 3242232 - DNA, 25 bp, Homo sapien
ggcagggcaccagcagagaaaacat

SEQ ID NO: 3242233 - DNA, 25 bp, Homo sapien
cggggcagggcaccagcagagaaaa

SEQ ID NO: 3242234 - DNA, 25 bp, Homo sapien
ggcggggcagggcaccagcagagaa

SEQ ID NO: 3242235 - DNA, 25 bp, Homo sapien
gcagcttccaccagaggtggggcgg

SEQ ID NO: 3242236 - DNA, 25 bp, Homo sapien
tgagcagactcagatccaggagttc

SEQ ID NO: 3242237 - DNA, 25 bp, Homo sapien
ggtaggtacccaggcagaacgcctc

SEQ ID NO: 3242238 - DNA, 25 bp, Homo sapien
aaggacacctatgcctccctgggta

SEQ ID NO: 3242239 - DNA, 25 bp, Homo sapien
cactcatggatcagaaccgagatgg

SEQ ID NO: 3242240 - DNA, 25 bp, Homo sapien
ggcaacctggactacaaggcgctca

SEQ ID NO: 3242241 - DNA, 25 bp, Homo sapien
gcttgtaattcgctcccggagcccg

SEQ ID NO: 3242242 - DNA, 25 bp, Homo sapien
agatgttccagttcgcctccatcga

SEQ ID NO: 3242243 - DNA, 25 bp, Homo sapien
tcgcctccatcgatgtggcgggcaa

SEQ ID NO: 3242244 - DNA, 25 bp, Homo sapien
gcgggagggcgcgtcggtggctgct

SEQ ID NO: 3242245 - DNA, 25 bp, Homo sapien
aataaacctggacgcttggaccctg

SEQ ID NO: 3242246 - DNA, 25 bp, Homo sapien
ggagtgagacccagccgggtcaata

SEQ ID NO: 3242247 - DNA, 25 bp, Homo sapien
gggagtcgctcggtggcaggctggg

SEQ ID NO: 3242248 - DNA, 25 bp, Homo sapien
gtgtggaagaagaccgccaggatgc

SEQ ID NO: 3242249 - DNA, 25 bp, Homo sapien
gcctgcaggcgccggtatggggtgt

SEQ ID NO: 3242250 - DNA, 25 bp, Homo sapien
gcaggcgccggtatggggtgtggaa

SEQ ID NO: 3242251 - DNA, 25 bp, Homo sapien
gggtgtggaagaagaccgccaggat

SEQ ID NO: 3242252 - DNA, 25 bp, Homo sapien
agaaggtgcacaggccggccatcag

SEQ ID NO: 3242253 - DNA, 25 bp, Homo sapien
aagaaggtgcacaggccggccatca

SEQ ID NO: 3242254 - DNA, 25 bp, Homo sapien
gaaggtgcacaggccggccatcagc

SEQ ID NO: 3242255 - DNA, 25 bp, Homo sapien
gaagaaggtgcacaggccggccatc

SEQ ID NO: 3242256 - DNA, 25 bp, Homo sapien
agagcccactcgcagctcttgacag

SEQ ID NO: 3242257 - DNA, 25 bp, Homo sapien
agacggagagcccactcgcagctct

SEQ ID NO: 3242258 - DNA, 25 bp, Homo sapien
agagcccaatgctggcctatggtga

SEQ ID NO: 3242259 - DNA, 25 bp, Homo sapien
accccactacccttgaccacagagt

SEQ ID NO: 3242260 - DNA, 25 bp, Homo sapien
ggtggacaaggacggctccgagcgt

SEQ ID NO: 3242261 - DNA, 25 bp, Homo sapien
gtcgcacagtcagtgccgtcattgc

SEQ ID NO: 3242262 - DNA, 25 bp, Homo sapien
ggctccgagcgtcgcacagtcagtg

SEQ ID NO: 3242263 - DNA, 25 bp, Homo sapien
aggacggctccgagcgtcgcacagt

SEQ ID NO: 3242264 - DNA, 25 bp, Homo sapien
accgagaagccaaacagcccgagca

SEQ ID NO: 3242265 - DNA, 25 bp, Homo sapien
ggaaggaacactcgaccgccaactc

SEQ ID NO: 3242266 - DNA, 25 bp, Homo sapien
cgccaactccatggccacggggccc

SEQ ID NO: 3242267 - DNA, 25 bp, Homo sapien
cggggcccaccgagaagccaaacag

SEQ ID NO: 3242268 - DNA, 25 bp, Homo sapien
aatcttggtggcctcagtgaagtgc

SEQ ID NO: 3242269 - DNA, 25 bp, Homo sapien
gaagtgcttggtccggtccacatag

SEQ ID NO: 3242270 - DNA, 25 bp, Homo sapien
tcccaaacgtgatgaagagagcgcc

SEQ ID NO: 3242271 - DNA, 25 bp, Homo sapien
aaagggcacgcaggccagagagaac

SEQ ID NO: 3242272 - DNA, 25 bp, Homo sapien
gctggcagagatcccgatcattccc

SEQ ID NO: 3242273 - DNA, 25 bp, Homo sapien
agtggccgcttgcacagaggatctg

SEQ ID NO: 3242274 - DNA, 25 bp, Homo sapien
agaagctggcagagatcccgatcat

SEQ ID NO: 3242275 - DNA, 25 bp, Homo sapien
ctggagtggccgcttgcacagagga

SEQ ID NO: 3242276 - DNA, 25 bp, Homo sapien
ccagcagggatggtatagacaccga

SEQ ID NO: 3242277 - DNA, 25 bp, Homo sapien
acgacgccagcagggatggtataga

SEQ ID NO: 3242278 - DNA, 25 bp, Homo sapien
cagacgacgccagcagggatggtat

SEQ ID NO: 3242279 - DNA, 25 bp, Homo sapien
agcaggcagacgacgccagcaggga

SEQ ID NO: 3242280 - DNA, 25 bp, Homo sapien
atggggacccctggctgtcaacgca

SEQ ID NO: 3242281 - DNA, 25 bp, Homo sapien
tgtgcacaaggagaccacgcagact

SEQ ID NO: 3242282 - DNA, 25 bp, Homo sapien
ggctgtcaacgcatccctcaccagt

SEQ ID NO: 3242283 - DNA, 25 bp, Homo sapien
gcagctgccctttgcgaggcccagg

SEQ ID NO: 3242284 - DNA, 25 bp, Homo sapien
acagcacattggccacaaggacgcc

SEQ ID NO: 3242285 - DNA, 25 bp, Homo sapien
gtcctcacccttcttgaccagcaca

SEQ ID NO: 3242286 - DNA, 25 bp, Homo sapien
cctcacccttcttgaccagcacagg

SEQ ID NO: 3242287 - DNA, 25 bp, Homo sapien
cattaacggaatgtcctcacccttc

SEQ ID NO: 3242288 - DNA, 25 bp, Homo sapien
acatggtggcgagcatgttggccgt

SEQ ID NO: 3242289 - DNA, 25 bp, Homo sapien
tctgggaaccacaaggcagccagct

SEQ ID NO: 3242290 - DNA, 25 bp, Homo sapien
atgttggccgtggctcgctggtgct

SEQ ID NO: 3242291 - DNA, 25 bp, Homo sapien
gttggccgtggctcgctggtgctct

SEQ ID NO: 3242292 - DNA, 25 bp, Homo sapien
gcaagggcacagaggctctggccac

SEQ ID NO: 3242293 - DNA, 25 bp, Homo sapien
tgggcaagggcacagaggctctggc

SEQ ID NO: 3242294 - DNA, 25 bp, Homo sapien
caggctctgggcaagggcacagagg

SEQ ID NO: 3242295 - DNA, 25 bp, Homo sapien
ctgggcaagggcacagaggctctgg

SEQ ID NO: 3242296 - DNA, 25 bp, Homo sapien
caccatgcgtagcacactcccggca

SEQ ID NO: 3242297 - DNA, 25 bp, Homo sapien
catgcgtagcacactcccggcaaag

SEQ ID NO: 3242298 - DNA, 25 bp, Homo sapien
gcgtagcacactcccggcaaagttc

SEQ ID NO: 3242299 - DNA, 25 bp, Homo sapien
actcccggcaaagttcagccacgca

SEQ ID NO: 3242300 - DNA, 25 bp, Homo sapien
cgccaaatggggtggataccacgag

SEQ ID NO: 3242301 - DNA, 25 bp, Homo sapien
ccagatggccgccacgccaaatggg

SEQ ID NO: 3242302 - DNA, 25 bp, Homo sapien
cgacggagtccaggatccagatggc

SEQ ID NO: 3242303 - DNA, 25 bp, Homo sapien
ggtagaccagtgacagccagttgat

SEQ ID NO: 3242304 - DNA, 25 bp, Homo sapien
agtcctcagcaatgacgtcagccac

SEQ ID NO: 3242305 - DNA, 25 bp, Homo sapien
ccacaggtgcaaagctgagccacag

SEQ ID NO: 3242306 - DNA, 25 bp, Homo sapien
gccacaggtgcaaagctgagccaca

SEQ ID NO: 3242307 - DNA, 25 bp, Homo sapien
gtcctcagcaatgacgtcagccaca

SEQ ID NO: 3242308 - DNA, 25 bp, Homo sapien
gaggcccttgactgtccaaggaacg

SEQ ID NO: 3242309 - DNA, 25 bp, Homo sapien
tgactcgtggatattaataaaacag

SEQ ID NO: 3242310 - DNA, 25 bp, Homo sapien
tctgtgtgctccatgatgactcgtg

SEQ ID NO: 3242311 - DNA, 25 bp, Homo sapien
aggcagagaccatgacgactcttgg

SEQ ID NO: 3242312 - DNA, 25 bp, Homo sapien
gctgatgagggcacacagggcggga

SEQ ID NO: 3242313 - DNA, 25 bp, Homo sapien
cgggaaaggctgcagcgtgcaacac

SEQ ID NO: 3242314 - DNA, 25 bp, Homo sapien
tgagggcacacagggcgggaaaggc

SEQ ID NO: 3242315 - DNA, 25 bp, Homo sapien
ggatggctgatgagggcacacaggg

SEQ ID NO: 3242316 - DNA, 25 bp, Homo sapien
cggctggtccgagggactgagggtc

SEQ ID NO: 3242317 - DNA, 25 bp, Homo sapien
aacccggctggtccgagggactgag

SEQ ID NO: 3242318 - DNA, 25 bp, Homo sapien
tcgggctgtggccacaggaaaacaa

SEQ ID NO: 3242319 - DNA, 25 bp, Homo sapien
cccggctggtccgagggactgaggg

SEQ ID NO: 3242320 - DNA, 25 bp, Homo sapien
tggcgttggagcagttgagcaggct

SEQ ID NO: 3242321 - DNA, 25 bp, Homo sapien
agcggcgcgcgtaggtgcggtggcc

SEQ ID NO: 3242322 - DNA, 25 bp, Homo sapien
caggaacacccagcggcgcgcgtag

SEQ ID NO: 3242323 - DNA, 25 bp, Homo sapien
gctgatcgcgagcaggaacacccag

SEQ ID NO: 3242324 - DNA, 25 bp, Homo sapien
gcacagggcccggggctcggccaac

SEQ ID NO: 3242325 - DNA, 25 bp, Homo sapien
tctcggcctccgtcggccccgccat

SEQ ID NO: 3242326 - DNA, 25 bp, Homo sapien
gctcggccaaccccgtctcggcctc

SEQ ID NO: 3242327 - DNA, 25 bp, Homo sapien
ctgcgcgcacagggcccggggctcg

SEQ ID NO: 3242328 - DNA, 25 bp, Homo sapien
ccgcgtgggccgggaccgcctgcgg

SEQ ID NO: 3242329 - DNA, 25 bp, Homo sapien
tcccgcgtgggccgggaccgcctgc

SEQ ID NO: 3242330 - DNA, 25 bp, Homo sapien
cgtgggccgggaccgcctgcgggcg

SEQ ID NO: 3242331 - DNA, 25 bp, Homo sapien
ccgggaccgcctgcgggcggaggtg

SEQ ID NO: 3242332 - DNA, 25 bp, Homo sapien
tctgactcttttgtgggcgtcctgc

SEQ ID NO: 3242333 - DNA, 25 bp, Homo sapien
tcagttgttggtgatgtgccagctg

SEQ ID NO: 3242334 - DNA, 25 bp, Homo sapien
tcttctgactcttttgtgggcgtcc

SEQ ID NO: 3242335 - DNA, 25 bp, Homo sapien
tgactcttttgtgggcgtcctgcct

SEQ ID NO: 3242336 - DNA, 25 bp, Homo sapien
gactggttttcgtgtgtgtccagga

SEQ ID NO: 3242337 - DNA, 25 bp, Homo sapien
aactggtttgtgaattacctcatgg

SEQ ID NO: 3242338 - DNA, 25 bp, Homo sapien
cctggttgattgaaacaggcattca

SEQ ID NO: 3242339 - DNA, 25 bp, Homo sapien
tttccaagatttccacctggttgat

SEQ ID NO: 3242340 - DNA, 25 bp, Homo sapien
cccagccctgttccgccagcttctt

SEQ ID NO: 3242341 - DNA, 25 bp, Homo sapien
gccctgttccgccagcttctttcca

SEQ ID NO: 3242342 - DNA, 25 bp, Homo sapien
tggtgcccctgggacgacgaggaca

SEQ ID NO: 3242343 - DNA, 25 bp, Homo sapien
ccctgggacgacgaggacatcctgg

SEQ ID NO: 3242344 - DNA, 25 bp, Homo sapien
aagccatccggccatgtggcattta

SEQ ID NO: 3242345 - DNA, 25 bp, Homo sapien
ggaagccatccggccatgtggcatt

SEQ ID NO: 3242346 - DNA, 25 bp, Homo sapien
ccatccggccatgtggcatttaagc

SEQ ID NO: 3242347 - DNA, 25 bp, Homo sapien
gccatccggccatgtggcatttaag

SEQ ID NO: 3242348 - DNA, 25 bp, Homo sapien
cagcccagaacccgcaaaccgggag

SEQ ID NO: 3242349 - DNA, 25 bp, Homo sapien
gccgccagcccagaacccgcaaacc

SEQ ID NO: 3242350 - DNA, 25 bp, Homo sapien
gagaccctaggaccccgcgtgcctg

SEQ ID NO: 3242351 - DNA, 25 bp, Homo sapien
ccgcgtgcctgcacgtccgcctcac

SEQ ID NO: 3242352 - DNA, 25 bp, Homo sapien
tcggatcccgccctctcaggacagt

SEQ ID NO: 3242353 - DNA, 25 bp, Homo sapien
gaaggcgcaaatgccgcccgtactg

SEQ ID NO: 3242354 - DNA, 25 bp, Homo sapien
acgcgccctcggtcctcggatcccg

SEQ ID NO: 3242355 - DNA, 25 bp, Homo sapien
tcaggacagtgccagtcccacgaag

SEQ ID NO: 3242356 - DNA, 25 bp, Homo sapien
cgcatgctccgagcgcggcgccccc

SEQ ID NO: 3242357 - DNA, 25 bp, Homo sapien
ctgggacagccctgttttcccctgg

SEQ ID NO: 3242358 - DNA, 25 bp, Homo sapien
ggaccctgagacagctctgttttca

SEQ ID NO: 3242359 - DNA, 25 bp, Homo sapien
cagctctgttttcccctgggggtcg

SEQ ID NO: 3242360 - DNA, 25 bp, Homo sapien
gggtcgggactctgggacagctctg

SEQ ID NO: 3242361 - DNA, 25 bp, Homo sapien
tgagacagccctgttttcccctggg

SEQ ID NO: 3242362 - DNA, 25 bp, Homo sapien
ctgagacagccctgttttctcccag

SEQ ID NO: 3242363 - DNA, 25 bp, Homo sapien
ctgggacagccctgttttcccctgg

SEQ ID NO: 3242364 - DNA, 25 bp, Homo sapien
ggaccctgggacagccctgttttca

SEQ ID NO: 3242365 - DNA, 25 bp, Homo sapien
tgaccggtgtgaggacttagctcca

SEQ ID NO: 3242366 - DNA, 25 bp, Homo sapien
cagttacagtagaccttgcgcttgc

SEQ ID NO: 3242367 - DNA, 25 bp, Homo sapien
cgtaggagacgtgagaccttgacca

SEQ ID NO: 3242368 - DNA, 25 bp, Homo sapien
ttgaccacactggacatttgaccgg

SEQ ID NO: 3242369 - DNA, 25 bp, Homo sapien
tctccttgtcagaggccgtgtgagg

SEQ ID NO: 3242370 - DNA, 25 bp, Homo sapien
tgtgaggtgcgtattgcggaccgcc

SEQ ID NO: 3242371 - DNA, 25 bp, Homo sapien
gactcgtatttcagctcctgtctct

SEQ ID NO: 3242372 - DNA, 25 bp, Homo sapien
ttttgatgaggactcgtatttcagc

SEQ ID NO: 3242373 - DNA, 25 bp, Homo sapien
cacccggtttaatagtgcacggcca

SEQ ID NO: 3242374 - DNA, 25 bp, Homo sapien
catagcttctgtgcagactcgacac

SEQ ID NO: 3242375 - DNA, 25 bp, Homo sapien
tcatcatatcttgtccgtgctcgga

SEQ ID NO: 3242376 - DNA, 25 bp, Homo sapien
tgctcggacgtcacctgctttaggt

SEQ ID NO: 3242377 - DNA, 25 bp, Homo sapien
cactaagccacagacactgtacgtc

SEQ ID NO: 3242378 - DNA, 25 bp, Homo sapien
taagccacagacactgtacgtcatc

SEQ ID NO: 3242379 - DNA, 25 bp, Homo sapien
acagacactgtacgtcatcccaggc

SEQ ID NO: 3242380 - DNA, 25 bp, Homo sapien
atcccagacgcagggtccctacgtg

SEQ ID NO: 3242381 - DNA, 25 bp, Homo sapien
ttgcagtgcctctgaaacgcaggct

SEQ ID NO: 3242382 - DNA, 25 bp, Homo sapien
tgtggtcggcgttccttgcagtgcc

SEQ ID NO: 3242383 - DNA, 25 bp, Homo sapien
cattccgccctttgctcggtagggc

SEQ ID NO: 3242384 - DNA, 25 bp, Homo sapien
caagttccagtaggaatggcggagt

SEQ ID NO: 3242385 - DNA, 25 bp, Homo sapien
gagggacggacacgcggacgtctag

SEQ ID NO: 3242386 - DNA, 25 bp, Homo sapien
agtccgcgtgcggagccaggaggca

SEQ ID NO: 3242387 - DNA, 25 bp, Homo sapien
gggtgcagaagcgagtccgcgtgcg

SEQ ID NO: 3242388 - DNA, 25 bp, Homo sapien
gcagcgtcgcgtgggagtgctggcc

SEQ ID NO: 3242389 - DNA, 25 bp, Homo sapien
tgtcagagcagatgaggcctcgctt

SEQ ID NO: 3242390 - DNA, 25 bp, Homo sapien
tagctcaagcccgacaaaagcagga

SEQ ID NO: 3242391 - DNA, 25 bp, Homo sapien
ttaggagagcgaaacacaggagaga

SEQ ID NO: 3242392 - DNA, 25 bp, Homo sapien
catttcacgctaaaggtcctgtggg

SEQ ID NO: 3242393 - DNA, 25 bp, Homo sapien
ggccctcacagacttttctttacat

SEQ ID NO: 3242394 - DNA, 25 bp, Homo sapien
cggccctcacagacttttctttaca

SEQ ID NO: 3242395 - DNA, 25 bp, Homo sapien
cagacttttctttacattatttgga

SEQ ID NO: 3242396 - DNA, 25 bp, Homo sapien
ccacacccggccctcacagactttt

SEQ ID NO: 3242397 - DNA, 25 bp, Homo sapien
agaaaagcctctgttcattggaaat

SEQ ID NO: 3242398 - DNA, 25 bp, Homo sapien
ctagaaaagcctctgttcattggaa

SEQ ID NO: 3242399 - DNA, 25 bp, Homo sapien
tagaaaagcctctgttcattggaaa

SEQ ID NO: 3242400 - DNA, 25 bp, Homo sapien
gaacctggggtgtctgcagggacgg

SEQ ID NO: 3242401 - DNA, 25 bp, Homo sapien
cctggggtgtctgcagggacggtgt

SEQ ID NO: 3242402 - DNA, 25 bp, Homo sapien
gacgcggggaacctggggtgtctgc

SEQ ID NO: 3242403 - DNA, 25 bp, Homo sapien
ggggtgtctgcagggacggtgtccc

SEQ ID NO: 3242404 - DNA, 25 bp, Homo sapien
tgtccggcagacagaagcacgggtt

SEQ ID NO: 3242405 - DNA, 25 bp, Homo sapien
ggtgtcccctgagcgcacgggacgt

SEQ ID NO: 3242406 - DNA, 25 bp, Homo sapien
gaagcacgggttcccagaagagcct

SEQ ID NO: 3242407 - DNA, 25 bp, Homo sapien
cagacagaagcacgggttcccagaa

SEQ ID NO: 3242408 - DNA, 25 bp, Homo sapien
gccagagcccaagttaaatgacgcg

SEQ ID NO: 3242409 - DNA, 25 bp, Homo sapien
tttacaaattggtaccaggcctcca

SEQ ID NO: 3242410 - DNA, 25 bp, Homo sapien
gacgcgttaattcagctcatacatg

SEQ ID NO: 3242411 - DNA, 25 bp, Homo sapien
ccaagaaggtgagtgtctgactgtc

SEQ ID NO: 3242412 - DNA, 25 bp, Homo sapien
tagatttcctgagtaaacgtagata

SEQ ID NO: 3242413 - DNA, 25 bp, Homo sapien
taaacgtagatagaaacaattagtc

SEQ ID NO: 3242414 - DNA, 25 bp, Homo sapien
gcaggaagaatttagatttcctgag

SEQ ID NO: 3242415 - DNA, 25 bp, Homo sapien
tcctgagtaaacgtagatagaaaca

SEQ ID NO: 3242416 - DNA, 25 bp, Homo sapien
cattgtcctgggttgtcctgcggca

SEQ ID NO: 3242417 - DNA, 25 bp, Homo sapien
ttgtcctgggttgtcctgcggcagt

SEQ ID NO: 3242418 - DNA, 25 bp, Homo sapien
tcccattgtcctgggttgtcctgcg

SEQ ID NO: 3242419 - DNA, 25 bp, Homo sapien
cctgggttgtcctgcggcagtggac

SEQ ID NO: 3242420 - DNA, 25 bp, Homo sapien
tccatcagggcaggtgtcgtccatg

SEQ ID NO: 3242421 - DNA, 25 bp, Homo sapien
cgtgtttttgggaagcccgcttctg

SEQ ID NO: 3242422 - DNA, 25 bp, Homo sapien
tccatgtgctgagccgggtggcact

SEQ ID NO: 3242423 - DNA, 25 bp, Homo sapien
tgggaagcccgcttctgggcatcca

SEQ ID NO: 3242424 - DNA, 25 bp, Homo sapien
ggttgtatgttctcgtccacctcag

SEQ ID NO: 3242425 - DNA, 25 bp, Homo sapien
cacgtgttagttggagtgtgcgtcc

SEQ ID NO: 3242426 - DNA, 25 bp, Homo sapien
tccatcgctcgtctccacgtgttag

SEQ ID NO: 3242427 - DNA, 25 bp, Homo sapien
tgtccggtgtggacgctgccaactc

SEQ ID NO: 3242428 - DNA, 25 bp, Homo sapien
gggcaggccctcaacgctgtccccg

SEQ ID NO: 3242429 - DNA, 25 bp, Homo sapien
ggactccgggcaggccctcaacgct

SEQ ID NO: 3242430 - DNA, 25 bp, Homo sapien
tccgggcaggccctcaacgctgtcc

SEQ ID NO: 3242431 - DNA, 25 bp, Homo sapien
ctccgggcaggccctcaacgctgtc

SEQ ID NO: 3242432 - DNA, 25 bp, Homo sapien
tgaaatttcatggtgcgtagcctgg

SEQ ID NO: 3242433 - DNA, 25 bp, Homo sapien
agaaacctgtcttcgtagaggcaac

SEQ ID NO: 3242434 - DNA, 25 bp, Homo sapien
tcacctcttgctttagaaacgtggg

SEQ ID NO: 3242435 - DNA, 25 bp, Homo sapien
tctttcactcggtgggcgtgtcatg

SEQ ID NO: 3242436 - DNA, 25 bp, Homo sapien
tgtcccctgggtgtgaactaaggtc

SEQ ID NO: 3242437 - DNA, 25 bp, Homo sapien
tggtccggccagaggtgacccaatg

SEQ ID NO: 3242438 - DNA, 25 bp, Homo sapien
tcctccctggaatttgtgcctgtgg

SEQ ID NO: 3242439 - DNA, 25 bp, Homo sapien
tgccgagagtctgtttgcttttccc

SEQ ID NO: 3242440 - DNA, 25 bp, Homo sapien
aatgtttaggctcctccgggcgtct

SEQ ID NO: 3242441 - DNA, 25 bp, Homo sapien
cagtgcggagcgtgtctgtgtccca

SEQ ID NO: 3242442 - DNA, 25 bp, Homo sapien
tgcagacactttgcggacggctttc

SEQ ID NO: 3242443 - DNA, 25 bp, Homo sapien
ttaggaagcgagtctgggaaccaag

SEQ ID NO: 3242444 - DNA, 25 bp, Homo sapien
ctcggcttcccaaagtgtgagtcac

SEQ ID NO: 3242445 - DNA, 25 bp, Homo sapien
cctcggcttcccaaagtgtgagtca

SEQ ID NO: 3242446 - DNA, 25 bp, Homo sapien
gcttcccaaagtgtgagtcactgca

SEQ ID NO: 3242447 - DNA, 25 bp, Homo sapien
cggcttcccaaagtgtgagtcactg

SEQ ID NO: 3242448 - DNA, 25 bp, Homo sapien
tgttggcagatcacaccagttaact

SEQ ID NO: 3242449 - DNA, 25 bp, Homo sapien
caagtctttgtaagcgcatttccgg

SEQ ID NO: 3242450 - DNA, 25 bp, Homo sapien
ctggctgctccctgcggactttgat

SEQ ID NO: 3242451 - DNA, 25 bp, Homo sapien
ccctgcggactttgatgaataatat

SEQ ID NO: 3242452 - DNA, 25 bp, Homo sapien
tgtgaactccgacatccaagtccgg

SEQ ID NO: 3242453 - DNA, 25 bp, Homo sapien
tcacttgggtgcagattttccaggg

SEQ ID NO: 3242454 - DNA, 25 bp, Homo sapien
taacctcgcggtgttgcttaggagc

SEQ ID NO: 3242455 - DNA, 25 bp, Homo sapien
ggtgtggcccttcacaagtgaccta

SEQ ID NO: 3242456 - DNA, 25 bp, Homo sapien
ggtttgttcagcagccaactcagag

SEQ ID NO: 3242457 - DNA, 25 bp, Homo sapien
tcagctgtgttacggaggcctttgc

SEQ ID NO: 3242458 - DNA, 25 bp, Homo sapien
tatttaggcttaacgggaggttgca

SEQ ID NO: 3242459 - DNA, 25 bp, Homo sapien
gaagtcatccgagggtttgttccag

SEQ ID NO: 3242460 - DNA, 25 bp, Homo sapien
agatgtagtcttatactctgtcgcc

SEQ ID NO: 3242461 - DNA, 25 bp, Homo sapien
caccagctgtgttcccgtatagaaa

SEQ ID NO: 3242462 - DNA, 25 bp, Homo sapien
tctgtagtgacctatagagaaccac

SEQ ID NO: 3242463 - DNA, 25 bp, Homo sapien
gacactgtttacaacgtagagctag

SEQ ID NO: 3242464 - DNA, 25 bp, Homo sapien
cacctgttccctgagtcggagacgg

SEQ ID NO: 3242465 - DNA, 25 bp, Homo sapien
ttaggacattaatctgtcctcggct

SEQ ID NO: 3242466 - DNA, 25 bp, Homo sapien
gtttatctctactcctgatgggtaa

SEQ ID NO: 3242467 - DNA, 25 bp, Homo sapien
tttttaggacattaatctgtcctcg

SEQ ID NO: 3242468 - DNA, 25 bp, Homo sapien
cctgatgggtaacttcctcaagtga

SEQ ID NO: 3242469 - DNA, 25 bp, Homo sapien
tatctgattaccttcaatacttgcc

SEQ ID NO: 3242470 - DNA, 25 bp, Homo sapien
acttgcccgtctgtacccctggtgt

SEQ ID NO: 3242471 - DNA, 25 bp, Homo sapien
taggccctaactgtgccgtttgttg

SEQ ID NO: 3242472 - DNA, 25 bp, Homo sapien
gacatacatgtttcagttaaccccc

SEQ ID NO: 3242473 - DNA, 25 bp, Homo sapien
caggcgaccgtcttgcatctgaaga

SEQ ID NO: 3242474 - DNA, 25 bp, Homo sapien
gaaatatgtctaaggaagcctccag

SEQ ID NO: 3242475 - DNA, 25 bp, Homo sapien
cagagacagggaacgtggaatgcta

SEQ ID NO: 3242476 - DNA, 25 bp, Homo sapien
aaaatccgttttgcctgcttcaccg

SEQ ID NO: 3242477 - DNA, 25 bp, Homo sapien
tttgaaaatcgctcaggctgtgcag

SEQ ID NO: 3242478 - DNA, 25 bp, Homo sapien
gttggaaattccatccccagcaggg

SEQ ID NO: 3242479 - DNA, 25 bp, Homo sapien
tctgtggcagcagcacggaatggac

SEQ ID NO: 3242480 - DNA, 25 bp, Homo sapien
tattgtttgaagacaccacctcgtg

SEQ ID NO: 3242481 - DNA, 25 bp, Homo sapien
gaaaaggctgtaggccgtgcgactc

SEQ ID NO: 3242482 - DNA, 25 bp, Homo sapien
gaaaagaaatgagcagtcgggccaa

SEQ ID NO: 3242483 - DNA, 25 bp, Homo sapien
tggaaaaataaaccgtggtgcatcc

SEQ ID NO: 3242484 - DNA, 25 bp, Homo sapien
aaaaggcagaaccatccggaggctg

SEQ ID NO: 3242485 - DNA, 25 bp, Homo sapien
ggctgcaaaccacctcttcccgttg

SEQ ID NO: 3242486 - DNA, 25 bp, Homo sapien
tcccgttgctcagtacggcaggtgt

SEQ ID NO: 3242487 - DNA, 25 bp, Homo sapien
ctcagtacggcaggtgtggtagaca

SEQ ID NO: 3242488 - DNA, 25 bp, Homo sapien
agggtgcccgattccggagctgtca

SEQ ID NO: 3242489 - DNA, 25 bp, Homo sapien
gggttgagcacctctccgctgctaa

SEQ ID NO: 3242490 - DNA, 25 bp, Homo sapien
tatcccccagctggacattttatgc

SEQ ID NO: 3242491 - DNA, 25 bp, Homo sapien
tttatgcaacgaggagatcctgggc

SEQ ID NO: 3242492 - DNA, 25 bp, Homo sapien
tgggcaaggaccacacactcaagtt

SEQ ID NO: 3242493 - DNA, 25 bp, Homo sapien
taccagcaccacgtttacagaggat

SEQ ID NO: 3242494 - DNA, 25 bp, Homo sapien
gatgctccaggcaacacggttctga

SEQ ID NO: 3242495 - DNA, 25 bp, Homo sapien
tgagtcaccttctgacacgagctcc

SEQ ID NO: 3242496 - DNA, 25 bp, Homo sapien
gataagcctcaagtgtagttggact

SEQ ID NO: 3242497 - DNA, 25 bp, Homo sapien
cccaaattgttgagtgccgccgttt

SEQ ID NO: 3242498 - DNA, 25 bp, Homo sapien
catgctcagcaggtagaccagaggc

SEQ ID NO: 3242499 - DNA, 25 bp, Homo sapien
cagctcagtgctggtttacggaaca

SEQ ID NO: 3242500 - DNA, 25 bp, Homo sapien
tcccaggacggtttgagttactcag

SEQ ID NO: 3242501 - DNA, 25 bp, Homo sapien
gctaattacccggaatacggtctca

SEQ ID NO: 3242502 - DNA, 25 bp, Homo sapien
ggtctcaccgatgcagttttcatgg

SEQ ID NO: 3242503 - DNA, 25 bp, Homo sapien
tatgcgtcgttttcaacagcagtgg

SEQ ID NO: 3242504 - DNA, 25 bp, Homo sapien
tatgcttttgtgcaataggttccaa

SEQ ID NO: 3242505 - DNA, 25 bp, Homo sapien
aatgtctcgatttgcttcaggcggc

SEQ ID NO: 3242506 - DNA, 25 bp, Homo sapien
gagatgtgcgtagcctccgtgtaaa

SEQ ID NO: 3242507 - DNA, 25 bp, Homo sapien
tggacgttctgggtacaagccaacc

SEQ ID NO: 3242508 - DNA, 25 bp, Homo sapien
ccataatttgtacgggacagggtgc

SEQ ID NO: 3242509 - DNA, 25 bp, Homo sapien
tagcagccacgggagcctgaggtct

SEQ ID NO: 3242510 - DNA, 25 bp, Homo sapien
cacaagcagacactgatgtcagcgt

SEQ ID NO: 3242511 - DNA, 25 bp, Homo sapien
tgtcaagatactggctgaaaccaca

SEQ ID NO: 3242512 - DNA, 25 bp, Homo sapien
cacaagtcctcaaaattgggtccac

SEQ ID NO: 3242513 - DNA, 25 bp, Homo sapien
ttagtcaaagtcttttgaaagatga

SEQ ID NO: 3242514 - DNA, 25 bp, Homo sapien
tgaaagatgaaaggtctggccttgg

SEQ ID NO: 3242515 - DNA, 25 bp, Homo sapien
tagtcaaagtcttttgaaagatgaa

SEQ ID NO: 3242516 - DNA, 25 bp, Homo sapien
tcttttgaaagatgaaaggtctggc

SEQ ID NO: 3242517 - DNA, 25 bp, Homo sapien
acctcttgctgggagattaccccga

SEQ ID NO: 3242518 - DNA, 25 bp, Homo sapien
cctgggacgcacaaccaggacctga

SEQ ID NO: 3242519 - DNA, 25 bp, Homo sapien
tcagtcatcaccatgcacactgcct

SEQ ID NO: 3242520 - DNA, 25 bp, Homo sapien
cactgccttgtaggaaggctgggaa

SEQ ID NO: 3242521 - DNA, 25 bp, Homo sapien
gggcagggtccctcctcacatttct

SEQ ID NO: 3242522 - DNA, 25 bp, Homo sapien
tcagaggttgagggggcagggtccc

SEQ ID NO: 3242523 - DNA, 25 bp, Homo sapien
cagggtccctcctcacatttctcac

SEQ ID NO: 3242524 - DNA, 25 bp, Homo sapien
cagaggttgagggggcagggtccct

SEQ ID NO: 3242525 - DNA, 25 bp, Homo sapien
gtgaatgttggagttgtccagtccc

SEQ ID NO: 3242526 - DNA, 25 bp, Homo sapien
ttggagttgtccagtcccacagctt

SEQ ID NO: 3242527 - DNA, 25 bp, Homo sapien
ggagttgtccagtcccacagcttcc

SEQ ID NO: 3242528 - DNA, 25 bp, Homo sapien
ggtgccacaactgtgaatgttggag

SEQ ID NO: 3242529 - DNA, 25 bp, Homo sapien
tcgctctggctggtagctttctcct

SEQ ID NO: 3242530 - DNA, 25 bp, Homo sapien
tctggtcatctcacctgcttaattc

SEQ ID NO: 3242531 - DNA, 25 bp, Homo sapien
tggagagacagacgcgggtgggaac

SEQ ID NO: 3242532 - DNA, 25 bp, Homo sapien
gtgttgtccacagctctgctcgggt

SEQ ID NO: 3242533 - DNA, 25 bp, Homo sapien
cctcaagccatactcccacctcacc

SEQ ID NO: 3242534 - DNA, 25 bp, Homo sapien
ctcactgtaacctcgggctcctggc

SEQ ID NO: 3242535 - DNA, 25 bp, Homo sapien
gcctcaagccatactcccacctcac

SEQ ID NO: 3242536 - DNA, 25 bp, Homo sapien
actgtaacctcgggctcctggcctc

SEQ ID NO: 3242537 - DNA, 25 bp, Homo sapien
aagagagagtaccattctgtcaccc

SEQ ID NO: 3242538 - DNA, 25 bp, Homo sapien
tgggattatggcaggagcctccacg

SEQ ID NO: 3242539 - DNA, 25 bp, Homo sapien
attatggcaggagcctccacgccag

SEQ ID NO: 3242540 - DNA, 25 bp, Homo sapien
gtgtgaaagagagagtaccattctg

SEQ ID NO: 3242541 - DNA, 25 bp, Homo sapien
tccagaagcagcttatcctgtgtca

SEQ ID NO: 3242542 - DNA, 25 bp, Homo sapien
caatgaatgtacagtttactttgtg

SEQ ID NO: 3242543 - DNA, 25 bp, Homo sapien
cacgatgtggcatgtctgccaactc

SEQ ID NO: 3242544 - DNA, 25 bp, Homo sapien
gctgacatccttcacccacgatgtg

SEQ ID NO: 3242545 - DNA, 25 bp, Homo sapien
agcatcttcctcaggcggtccttac

SEQ ID NO: 3242546 - DNA, 25 bp, Homo sapien
tgtgattctttcatatggaggtgga

SEQ ID NO: 3242547 - DNA, 25 bp, Homo sapien
tttgtgattctttcatatggaggtg

SEQ ID NO: 3242548 - DNA, 25 bp, Homo sapien
ttcctcaggcggtccttacacactt

SEQ ID NO: 3242549 - DNA, 25 bp, Homo sapien
atgggttattgtggagtagagaaac

SEQ ID NO: 3242550 - DNA, 25 bp, Homo sapien
ctccgatgggttattgtggagtaga

SEQ ID NO: 3242551 - DNA, 25 bp, Homo sapien
ggttattgtggagtagagaaaccca

SEQ ID NO: 3242552 - DNA, 25 bp, Homo sapien
ttattgtggagtagagaaacccact

SEQ ID NO: 3242553 - DNA, 25 bp, Homo sapien
ccatggtgcccaatgtgtcagtctc

SEQ ID NO: 3242554 - DNA, 25 bp, Homo sapien
ccccattgtcactgcagaggagtat

SEQ ID NO: 3242555 - DNA, 25 bp, Homo sapien
cacactgtctttggtagttcaaacg

SEQ ID NO: 3242556 - DNA, 25 bp, Homo sapien
taacacatgtacagtcacgcgacca

SEQ ID NO: 3242557 - DNA, 25 bp, Homo sapien
cctttgggatcatgtctaagaactc

SEQ ID NO: 3242558 - DNA, 25 bp, Homo sapien
cactgctctgttgaatggacaatcc

SEQ ID NO: 3242559 - DNA, 25 bp, Homo sapien
tcaaatggccctatttatgtgggtc

SEQ ID NO: 3242560 - DNA, 25 bp, Homo sapien
tccagtctatgagcgtgctgtgtgc

SEQ ID NO: 3242561 - DNA, 25 bp, Homo sapien
aaatatttggactcctcctgcatgg

SEQ ID NO: 3242562 - DNA, 25 bp, Homo sapien
tgtataccttctgcgccagtcctag

SEQ ID NO: 3242563 - DNA, 25 bp, Homo sapien
tctgcatacactatttggactcggc

SEQ ID NO: 3242564 - DNA, 25 bp, Homo sapien
gttattccagcctcgcccattggga

SEQ ID NO: 3242565 - DNA, 25 bp, Homo sapien
tctgggaaaaacctgcttccgaggc

SEQ ID NO: 3242566 - DNA, 25 bp, Homo sapien
gggcaggacgagacaagcacacaac

SEQ ID NO: 3242567 - DNA, 25 bp, Homo sapien
cttcggggcgtcctcctgagctggc

SEQ ID NO: 3242568 - DNA, 25 bp, Homo sapien
caggcccgagacccgcacttagtta

SEQ ID NO: 3242569 - DNA, 25 bp, Homo sapien
gggtgagcggcggactgacccagct

SEQ ID NO: 3242570 - DNA, 25 bp, Homo sapien
ggggtgagcggcggactgacccagc

SEQ ID NO: 3242571 - DNA, 25 bp, Homo sapien
cggggtgagcggcggactgacccag

SEQ ID NO: 3242572 - DNA, 25 bp, Homo sapien
ggtgagcggcggactgacccagctc

SEQ ID NO: 3242573 - DNA, 25 bp, Homo sapien
ggtctgctgggaaggccggatctgc

SEQ ID NO: 3242574 - DNA, 25 bp, Homo sapien
tatcctggaggggcggatctactcg

SEQ ID NO: 3242575 - DNA, 25 bp, Homo sapien
cgctgggggcggttctgctggagag

SEQ ID NO: 3242576 - DNA, 25 bp, Homo sapien
tcttctggaggggccgatctgctga

SEQ ID NO: 3242577 - DNA, 25 bp, Homo sapien
tgattttcctccagggcaaacaccg

SEQ ID NO: 3242578 - DNA, 25 bp, Homo sapien
tagtaaccctaaccattgctctctg

SEQ ID NO: 3242579 - DNA, 25 bp, Homo sapien
caaacgttcagaaggaggagactcc

SEQ ID NO: 3242580 - DNA, 25 bp, Homo sapien
aagccggccccgctgtgttcaagat

SEQ ID NO: 3242581 - DNA, 25 bp, Homo sapien
aagtcgctgcttaggcttgcaaggg

SEQ ID NO: 3242582 - DNA, 25 bp, Homo sapien
caagtcgctgcttaggcttgcaagg

SEQ ID NO: 3242583 - DNA, 25 bp, Homo sapien
tccaagtcgctgcttaggcttgcaa

SEQ ID NO: 3242584 - DNA, 25 bp, Homo sapien
cgtccaagtcgctgcttaggcttgc

SEQ ID NO: 3242585 - DNA, 25 bp, Homo sapien
taacagcttccaaacttggaggtca

SEQ ID NO: 3242586 - DNA, 25 bp, Homo sapien
cttccaaacttggaggtcaaacaag

SEQ ID NO: 3242587 - DNA, 25 bp, Homo sapien
cttttaacagcttccaaacttggag

SEQ ID NO: 3242588 - DNA, 25 bp, Homo sapien
caaacttggaggtcaaacaaggact

SEQ ID NO: 3242589 - DNA, 25 bp, Homo sapien
gcggcgcctgtcaagataaaactca

SEQ ID NO: 3242590 - DNA, 25 bp, Homo sapien
gacaccacggtctaagctaagctcg

SEQ ID NO: 3242591 - DNA, 25 bp, Homo sapien
ccgaaacacgtggagacttgatgca

SEQ ID NO: 3242592 - DNA, 25 bp, Homo sapien
catttttgatgtggacgaaagggcc

SEQ ID NO: 3242593 - DNA, 25 bp, Homo sapien
gtggattaggccacacacgcgccag

SEQ ID NO: 3242594 - DNA, 25 bp, Homo sapien
ccaggtggattaggccacacacgcg

SEQ ID NO: 3242595 - DNA, 25 bp, Homo sapien
ggccaccaggtggattaggccacac

SEQ ID NO: 3242596 - DNA, 25 bp, Homo sapien
aattaaacatgaatggaggagaaac

SEQ ID NO: 3242597 - DNA, 25 bp, Homo sapien
gcgcgcagggaaccccgcaggcccc

SEQ ID NO: 3242598 - DNA, 25 bp, Homo sapien
tccggtgcctcgggcctctgcggct

SEQ ID NO: 3242599 - DNA, 25 bp, Homo sapien
cgcgcagggaaccccgcaggcccca

SEQ ID NO: 3242600 - DNA, 25 bp, Homo sapien
tgcgcgcagggaaccccgcaggccc

SEQ ID NO: 3242601 - DNA, 25 bp, Homo sapien
gcagtgttcaatggccgagggcagg

SEQ ID NO: 3242602 - DNA, 25 bp, Homo sapien
gctgggcgtcccccaaacctattgc

SEQ ID NO: 3242603 - DNA, 25 bp, Homo sapien
gagggtgcagtgttcaatggccgag

SEQ ID NO: 3242604 - DNA, 25 bp, Homo sapien
gtggagggtgcagtgttcaatggcc

SEQ ID NO: 3242605 - DNA, 25 bp, Homo sapien
gccgtggcgttcgtaagaagcaaaa

SEQ ID NO: 3242606 - DNA, 25 bp, Homo sapien
ttagaagtgaacacggccgtggcgt

SEQ ID NO: 3242607 - DNA, 25 bp, Homo sapien
gcggagcgatccgaaccccggagtc

SEQ ID NO: 3242608 - DNA, 25 bp, Homo sapien
gacgcaaatactcacggcggagcga

SEQ ID NO: 3242609 - DNA, 25 bp, Homo sapien
gagaaaggggcgtcccaggcgatgg

SEQ ID NO: 3242610 - DNA, 25 bp, Homo sapien
tccctcaggggcctccgcggaggat

SEQ ID NO: 3242611 - DNA, 25 bp, Homo sapien
tgggtgggcggtaaacagcaagaga

SEQ ID NO: 3242612 - DNA, 25 bp, Homo sapien
gggctatggcttatatcggcgtggg

SEQ ID NO: 3242613 - DNA, 25 bp, Homo sapien
gcgggggctccgcggggccgctgtc

SEQ ID NO: 3242614 - DNA, 25 bp, Homo sapien
ctccgcggggccgctgtcccgcgcg

SEQ ID NO: 3242615 - DNA, 25 bp, Homo sapien
ggctccgcggggccgctgtcccgcg

SEQ ID NO: 3242616 - DNA, 25 bp, Homo sapien
ccgcggggccgctgtcccgcgcgcg

SEQ ID NO: 3242617 - DNA, 25 bp, Homo sapien
cggcccgggcaggtacttgatgacg

SEQ ID NO: 3242618 - DNA, 25 bp, Homo sapien
gtcaagctcccctcggagttggcct

SEQ ID NO: 3242619 - DNA, 25 bp, Homo sapien
gggcaggtacttgatgacggtgtcc

SEQ ID NO: 3242620 - DNA, 25 bp, Homo sapien
ttgggccgcgtcaagctcccctcgg

SEQ ID NO: 3242621 - DNA, 25 bp, Homo sapien
atgggaagcccccacggagaatggg

SEQ ID NO: 3242622 - DNA, 25 bp, Homo sapien
ggagctgacatgggggggagcaggg

SEQ ID NO: 3242623 - DNA, 25 bp, Homo sapien
gaatgggaagcccccacggagaatg

SEQ ID NO: 3242624 - DNA, 25 bp, Homo sapien
caggagctgacatgggggggagcag

SEQ ID NO: 3242625 - DNA, 25 bp, Homo sapien
caaattcatattgcctggagcttca

SEQ ID NO: 3242626 - DNA, 25 bp, Homo sapien
ggtcgcgagtggtcaagaaacacca

SEQ ID NO: 3242627 - DNA, 25 bp, Homo sapien
gtctgccctccgtagtagctgaata

SEQ ID NO: 3242628 - DNA, 25 bp, Homo sapien
ggtgatctcattcggaaacaggtct

SEQ ID NO: 3242629 - DNA, 25 bp, Homo sapien
tggttctcgtcctagccatccacag

SEQ ID NO: 3242630 - DNA, 25 bp, Homo sapien
ccaggcacggaagtggagggagcat

SEQ ID NO: 3242631 - DNA, 25 bp, Homo sapien
gcaagagcagattggttctcgtcct

SEQ ID NO: 3242632 - DNA, 25 bp, Homo sapien
ctagccatccacagcgggaagggca

SEQ ID NO: 3242633 - DNA, 25 bp, Homo sapien
ttccacgtggtctggctgagaccca

SEQ ID NO: 3242634 - DNA, 25 bp, Homo sapien
tgctccagagacaaacgcccaggca

SEQ ID NO: 3242635 - DNA, 25 bp, Homo sapien
tccagagacaaacgcccaggcacac

SEQ ID NO: 3242636 - DNA, 25 bp, Homo sapien
tctgctccagagacaaacgcccagg

SEQ ID NO: 3242637 - DNA, 25 bp, Homo sapien
cgtgatgctgggcagcagctctcca

SEQ ID NO: 3242638 - DNA, 25 bp, Homo sapien
ctgggcagcagctctccaggaagta

SEQ ID NO: 3242639 - DNA, 25 bp, Homo sapien
gcagcagctctccaggaagtaacac

SEQ ID NO: 3242640 - DNA, 25 bp, Homo sapien
tgggcagcagctctccaggaagtaa

SEQ ID NO: 3242641 - DNA, 25 bp, Homo sapien
aggaggccctgacacgtctgaggtg

SEQ ID NO: 3242642 - DNA, 25 bp, Homo sapien
gccctgacacgtctgaggtgagacc

SEQ ID NO: 3242643 - DNA, 25 bp, Homo sapien
ctgacacgtctgaggtgagaccctg

SEQ ID NO: 3242644 - DNA, 25 bp, Homo sapien
aggccctgacacgtctgaggtgaga

SEQ ID NO: 3242645 - DNA, 25 bp, Homo sapien
cctggctggagactcctccaggctg

SEQ ID NO: 3242646 - DNA, 25 bp, Homo sapien
ctggctggagactcctccaggctga

SEQ ID NO: 3242647 - DNA, 25 bp, Homo sapien
tcctccaggctgatgtctgtgccca

SEQ ID NO: 3242648 - DNA, 25 bp, Homo sapien
agactcctccaggctgatgtctgtg

SEQ ID NO: 3242649 - DNA, 25 bp, Homo sapien
ttccagccagggccgtgctggagcc

SEQ ID NO: 3242650 - DNA, 25 bp, Homo sapien
gctgctccctgtgcctcgtgcccct

SEQ ID NO: 3242651 - DNA, 25 bp, Homo sapien
ggccgtgctggagccaccgaggaag

SEQ ID NO: 3242652 - DNA, 25 bp, Homo sapien
ccggagcggctgtcgggacccaggc

SEQ ID NO: 3242653 - DNA, 25 bp, Homo sapien
cctccatcttggcgtacttggcctt

SEQ ID NO: 3242654 - DNA, 25 bp, Homo sapien
tcttggcggcgtctgggtccttctc

SEQ ID NO: 3242655 - DNA, 25 bp, Homo sapien
cttggcggcgtctgggtccttctcc

SEQ ID NO: 3242656 - DNA, 25 bp, Homo sapien
ttggcggcgtctgggtccttctcct

SEQ ID NO: 3242657 - DNA, 25 bp, Homo sapien
aagttggtgattcagaccgccccat

SEQ ID NO: 3242658 - DNA, 25 bp, Homo sapien
cagaagttggtgattcagaccgccc

SEQ ID NO: 3242659 - DNA, 25 bp, Homo sapien
tggtacagaagttggtgattcagac

SEQ ID NO: 3242660 - DNA, 25 bp, Homo sapien
tacagaagttggtgattcagaccgc

SEQ ID NO: 3242661 - DNA, 25 bp, Homo sapien
ctcgtttctgtggattcagcagctc

SEQ ID NO: 3242662 - DNA, 25 bp, Homo sapien
ttcgaagggtccagtgaagcgcatg

SEQ ID NO: 3242663 - DNA, 25 bp, Homo sapien
taaatctgcctgcagtaagaccgag

SEQ ID NO: 3242664 - DNA, 25 bp, Homo sapien
acagctgccgctgcgattctgcgct

SEQ ID NO: 3242665 - DNA, 25 bp, Homo sapien
aacagcaggccgcatgtacgacagt

SEQ ID NO: 3242666 - DNA, 25 bp, Homo sapien
tcctctgtggagaaacgtgcccacg

SEQ ID NO: 3242667 - DNA, 25 bp, Homo sapien
cagccattttggaacgcaggcggca

SEQ ID NO: 3242668 - DNA, 25 bp, Homo sapien
tcgccgcgagcacgtgcggagttca

SEQ ID NO: 3242669 - DNA, 25 bp, Homo sapien
gcagccattttggaacgcagtgcgt

SEQ ID NO: 3242670 - DNA, 25 bp, Homo sapien
gatatcttgggcgtgtggccatacg

SEQ ID NO: 3242671 - DNA, 25 bp, Homo sapien
tctgtctcggcagcggccctggcgt

SEQ ID NO: 3242672 - DNA, 25 bp, Homo sapien
gcccatcgcacatccacacagggaa

SEQ ID NO: 3242673 - DNA, 25 bp, Homo sapien
acaggcagacaaacgcgccgcagag

SEQ ID NO: 3242674 - DNA, 25 bp, Homo sapien
cctagagcctgcttcatcacaaact

SEQ ID NO: 3242675 - DNA, 25 bp, Homo sapien
ctcctagagcctgcttcatcacaaa

SEQ ID NO: 3242676 - DNA, 25 bp, Homo sapien
tcctagagcctgcttcatcacaaac

SEQ ID NO: 3242677 - DNA, 25 bp, Homo sapien
aagtatggccgggagcgagtgttct

SEQ ID NO: 3242678 - DNA, 25 bp, Homo sapien
agaactcacacgcaagtatggccgg

SEQ ID NO: 3242679 - DNA, 25 bp, Homo sapien
tcacacgcaagtatggccgggagcg

SEQ ID NO: 3242680 - DNA, 25 bp, Homo sapien
ggtcagaactcacacgcaagtatgg

SEQ ID NO: 3242681 - DNA, 25 bp, Homo sapien
ctgggtccatgtggcgcccggtgag

SEQ ID NO: 3242682 - DNA, 25 bp, Homo sapien
gggcaccgcgaggagggcgcgtcac

SEQ ID NO: 3242683 - DNA, 25 bp, Homo sapien
ggctgggtccatgtggcgcccggtg

SEQ ID NO: 3242684 - DNA, 25 bp, Homo sapien
gaagggcaccgcgaggagggcgcgt

SEQ ID NO: 3242685 - DNA, 25 bp, Homo sapien
tgggccaaacacctgcactcctggg

SEQ ID NO: 3242686 - DNA, 25 bp, Homo sapien
gctccttagggtcttgagtgccgtg

SEQ ID NO: 3242687 - DNA, 25 bp, Homo sapien
gggccaaacacctgcactcctggga

SEQ ID NO: 3242688 - DNA, 25 bp, Homo sapien
agtgccgtgtgatggagccggaagg

SEQ ID NO: 3242689 - DNA, 25 bp, Homo sapien
gaagatggtgtttgaggcaggaagc

SEQ ID NO: 3242690 - DNA, 25 bp, Homo sapien
tgtggccggcacctagcgggtgcag

SEQ ID NO: 3242691 - DNA, 25 bp, Homo sapien
tgcagaaccagcagatgccttgcag

SEQ ID NO: 3242692 - DNA, 25 bp, Homo sapien
cagtcgggcgtggtctgtttctgag

SEQ ID NO: 3242693 - DNA, 25 bp, Homo sapien
tttgcttcccttgacgtgtcctgca

SEQ ID NO: 3242694 - DNA, 25 bp, Homo sapien
ttgcttcccttgacgtgtcctgcac

SEQ ID NO: 3242695 - DNA, 25 bp, Homo sapien
cagcgcggcagcaagaacgagcaca

SEQ ID NO: 3242696 - DNA, 25 bp, Homo sapien
cgcggcagcaagaacgagcacacgg

SEQ ID NO: 3242697 - DNA, 25 bp, Homo sapien
agcacacggggacagaagctcatct

SEQ ID NO: 3242698 - DNA, 25 bp, Homo sapien
agccagcgcggcagcaagaacgagc

SEQ ID NO: 3242699 - DNA, 25 bp, Homo sapien
ctgcatcctcataagctggactgac

SEQ ID NO: 3242700 - DNA, 25 bp, Homo sapien
tgccggcccgtgtcggtgtccagcg

SEQ ID NO: 3242701 - DNA, 25 bp, Homo sapien
ggcacctgcatcctcataagctgga

SEQ ID NO: 3242702 - DNA, 25 bp, Homo sapien
gcggaggcgctgtgtccgcagggca

SEQ ID NO: 3242703 - DNA, 25 bp, Homo sapien
cttggcttcgttccccggcagaggg

SEQ ID NO: 3242704 - DNA, 25 bp, Homo sapien
tacgttttgagctgccccaatggac

SEQ ID NO: 3242705 - DNA, 25 bp, Homo sapien
tgctgcactcgggaaggacaggcct

SEQ ID NO: 3242706 - DNA, 25 bp, Homo sapien
aacagtccgctttatgttacgtgga

SEQ ID NO: 3242707 - DNA, 25 bp, Homo sapien
gagacactggactggcctgtaggtt

SEQ ID NO: 3242708 - DNA, 25 bp, Homo sapien
tttgcagttcccagataaaacacta

SEQ ID NO: 3242709 - DNA, 25 bp, Homo sapien
gctgacttcatagactaagttggga

SEQ ID NO: 3242710 - DNA, 25 bp, Homo sapien
tgtgttcattcctgagagacactgg

SEQ ID NO: 3242711 - DNA, 25 bp, Homo sapien
cccggcaggacgctcagcagctcca

SEQ ID NO: 3242712 - DNA, 25 bp, Homo sapien
agaaagcagtttggggcggccagac

SEQ ID NO: 3242713 - DNA, 25 bp, Homo sapien
caggactcggtgggcaaagctttgg

SEQ ID NO: 3242714 - DNA, 25 bp, Homo sapien
gccagacggtggtctgtggccctgg

SEQ ID NO: 3242715 - DNA, 25 bp, Homo sapien
cacagacgtgacaattgcgggagga

SEQ ID NO: 3242716 - DNA, 25 bp, Homo sapien
ttacaaagtgcggtgcaaacaccag

SEQ ID NO: 3242717 - DNA, 25 bp, Homo sapien
cgggaggagcatgaatcagctgttc

SEQ ID NO: 3242718 - DNA, 25 bp, Homo sapien
cacgcccgaaacaccaaataaatca

SEQ ID NO: 3242719 - DNA, 25 bp, Homo sapien
tcttcatgtgcctggaacgctgggc

SEQ ID NO: 3242720 - DNA, 25 bp, Homo sapien
aaaaggaaacaacaatcagaggctt

SEQ ID NO: 3242721 - DNA, 25 bp, Homo sapien
acaacaatcagaggctttggaatgc

SEQ ID NO: 3242722 - DNA, 25 bp, Homo sapien
cctgctgtcgcccacggggtcctca

SEQ ID NO: 3242723 - DNA, 25 bp, Homo sapien
tgtggagctgtgtgcgcagccacca

SEQ ID NO: 3242724 - DNA, 25 bp, Homo sapien
gtggagctgtgtgcgcagccaccac

SEQ ID NO: 3242725 - DNA, 25 bp, Homo sapien
ggagccctggttctcaaactccgac

SEQ ID NO: 3242726 - DNA, 25 bp, Homo sapien
cagaagaggggccgggagccctggt

SEQ ID NO: 3242727 - DNA, 25 bp, Homo sapien
tcagaagaggggccgggagccctgg

SEQ ID NO: 3242728 - DNA, 25 bp, Homo sapien
gccgggagccctggttctcaaactc

SEQ ID NO: 3242729 - DNA, 25 bp, Homo sapien
tcatcttggcgtgctgctcgtacgg

SEQ ID NO: 3242730 - DNA, 25 bp, Homo sapien
caggcgtcattcagctccatgaaga

SEQ ID NO: 3242731 - DNA, 25 bp, Homo sapien
cagctccatgaagatcatcttggcg

SEQ ID NO: 3242732 - DNA, 25 bp, Homo sapien
ccatgaagatcatcttggcgtgctg

SEQ ID NO: 3242733 - DNA, 25 bp, Homo sapien
gcggcgatagtgcttcttcacttgc

SEQ ID NO: 3242734 - DNA, 25 bp, Homo sapien
gcaccgcgcggcgatagtgcttctt

SEQ ID NO: 3242735 - DNA, 25 bp, Homo sapien
acttgctccggagccaccaggtcgg

SEQ ID NO: 3242736 - DNA, 25 bp, Homo sapien
agcagggcccggatgttccgctcct

SEQ ID NO: 3242737 - DNA, 25 bp, Homo sapien
agccagatgttcaccgaggacacaa

SEQ ID NO: 3242738 - DNA, 25 bp, Homo sapien
ggagacacggagcttgccgagccct

SEQ ID NO: 3242739 - DNA, 25 bp, Homo sapien
tcaactatatagagcccactccgga

SEQ ID NO: 3242740 - DNA, 25 bp, Homo sapien
actccggacgacacagggccaggtg

SEQ ID NO: 3242741 - DNA, 25 bp, Homo sapien
ttgagggctgccaggcccatcggca

SEQ ID NO: 3242742 - DNA, 25 bp, Homo sapien
agacgccggctccatgtggtacagc

SEQ ID NO: 3242743 - DNA, 25 bp, Homo sapien
tggagacgccggctccataaggcac

SEQ ID NO: 3242744 - DNA, 25 bp, Homo sapien
aaggaccccaaggtcacaggcgcat

SEQ ID NO: 3242745 - DNA, 25 bp, Homo sapien
tcatctctgcaatggtctttggccc

SEQ ID NO: 3242746 - DNA, 25 bp, Homo sapien
gtccgtgtctttagccaggtcctgc

SEQ ID NO: 3242747 - DNA, 25 bp, Homo sapien
ggccctttcttgtcagacctggagg

SEQ ID NO: 3242748 - DNA, 25 bp, Homo sapien
ttgagtgggtccgtgtctttagcca

SEQ ID NO: 3242749 - DNA, 25 bp, Homo sapien
agtgaacacacatcggaaaccgcgt

SEQ ID NO: 3242750 - DNA, 25 bp, Homo sapien
gacaagacagggttgcaaaggccat

SEQ ID NO: 3242751 - DNA, 25 bp, Homo sapien
gaaaccgcgtcgttctctgagtggc

SEQ ID NO: 3242752 - DNA, 25 bp, Homo sapien
tacctttagccaattcagggaggtc

SEQ ID NO: 3242753 - DNA, 25 bp, Homo sapien
tcccgcgccccgatcacactgaagt

SEQ ID NO: 3242754 - DNA, 25 bp, Homo sapien
gcgccccgatcacactgaagttcga

SEQ ID NO: 3242755 - DNA, 25 bp, Homo sapien
actgaagttcgaggcatagttaggc

SEQ ID NO: 3242756 - DNA, 25 bp, Homo sapien
agggggccatgaggcgccctgggct

SEQ ID NO: 3242757 - DNA, 25 bp, Homo sapien
gaatgaagcccccaggagggaatcc

SEQ ID NO: 3242758 - DNA, 25 bp, Homo sapien
ccccaggagggaatccagctggtga

SEQ ID NO: 3242759 - DNA, 25 bp, Homo sapien
ggcgtggtggccgttttgggaatga

SEQ ID NO: 3242760 - DNA, 25 bp, Homo sapien
gtggtggccgttttgggaatgaagc

SEQ ID NO: 3242761 - DNA, 25 bp, Homo sapien
ctgtggagatggagatcggaaactc

SEQ ID NO: 3242762 - DNA, 25 bp, Homo sapien
tgtccatgaggggcaactactgttt

SEQ ID NO: 3242763 - DNA, 25 bp, Homo sapien
tggagatcggaaactcggcatctgg

SEQ ID NO: 3242764 - DNA, 25 bp, Homo sapien
aactcggcatctggttgtccatgag

SEQ ID NO: 3242765 - DNA, 25 bp, Homo sapien
caagggccatctcgtggtgtgcaga

SEQ ID NO: 3242766 - DNA, 25 bp, Homo sapien
ggataaatgtcccacggtagctcag

SEQ ID NO: 3242767 - DNA, 25 bp, Homo sapien
catgcgcttgcaaaatagaacaccg

SEQ ID NO: 3242768 - DNA, 25 bp, Homo sapien
tggactggcactcttcactagggct

SEQ ID NO: 3242769 - DNA, 25 bp, Homo sapien
tctgtagaacgagggcttagggctt

SEQ ID NO: 3242770 - DNA, 25 bp, Homo sapien
tcagagctctgaagttgggtccacc

SEQ ID NO: 3242771 - DNA, 25 bp, Homo sapien
ccatctgatgaacgggttttctgcc

SEQ ID NO: 3242772 - DNA, 25 bp, Homo sapien
aggttttcacctaaaggccctgcat

SEQ ID NO: 3242773 - DNA, 25 bp, Homo sapien
cttcagatgtgagctcgcaagagca

SEQ ID NO: 3242774 - DNA, 25 bp, Homo sapien
gaaacgctcatggatgtcctcaaga

SEQ ID NO: 3242775 - DNA, 25 bp, Homo sapien
tcttgggacttcatgacagaacaga

SEQ ID NO: 3242776 - DNA, 25 bp, Homo sapien
taaaatacaaaaccacaccgacaga

SEQ ID NO: 3242777 - DNA, 25 bp, Homo sapien
aacgatgaggagacgggaaatgctc

SEQ ID NO: 3242778 - DNA, 25 bp, Homo sapien
cgccgccgacgcttcttctgagaag

SEQ ID NO: 3242779 - DNA, 25 bp, Homo sapien
ttcttgtggccgacagctagcacgc

SEQ ID NO: 3242780 - DNA, 25 bp, Homo sapien
tcttgggagtgaacccagagaccca

SEQ ID NO: 3242781 - DNA, 25 bp, Homo sapien
gccagttggcagtcgcctggaacag

SEQ ID NO: 3242782 - DNA, 25 bp, Homo sapien
tgcagacacgctgtccccttgggct

SEQ ID NO: 3242783 - DNA, 25 bp, Homo sapien
gtgtcagcaactcccggttttagct

SEQ ID NO: 3242784 - DNA, 25 bp, Homo sapien
cctggaacaggtgcagacacgctgt

SEQ ID NO: 3242785 - DNA, 25 bp, Homo sapien
gacgagaataaacctcctacaagga

SEQ ID NO: 3242786 - DNA, 25 bp, Homo sapien
gagtcagatagacgagaataaacct

SEQ ID NO: 3242787 - DNA, 25 bp, Homo sapien
cagctcagagtcagatagacgagaa

SEQ ID NO: 3242788 - DNA, 25 bp, Homo sapien
aaagacttcactttgggcagctcag

SEQ ID NO: 3242789 - DNA, 25 bp, Homo sapien
cttggaggccggagctgaggtcgcc

SEQ ID NO: 3242790 - DNA, 25 bp, Homo sapien
gtccgggttctgagacttggtccag

SEQ ID NO: 3242791 - DNA, 25 bp, Homo sapien
cagcaaatgggtccgggttctgaga

SEQ ID NO: 3242792 - DNA, 25 bp, Homo sapien
tgagagccacaaggggccggctgac

SEQ ID NO: 3242793 - DNA, 25 bp, Homo sapien
ggttgctggacgaggctgtcatctt

SEQ ID NO: 3242794 - DNA, 25 bp, Homo sapien
gatgctgcagtctcggtccaggcag

SEQ ID NO: 3242795 - DNA, 25 bp, Homo sapien
gggccactgccgatgctgcagtctc

SEQ ID NO: 3242796 - DNA, 25 bp, Homo sapien
ctggacgaggctgtcatcttgctgg

SEQ ID NO: 3242797 - DNA, 25 bp, Homo sapien
ggaaccagaagagagcacagtttgg

SEQ ID NO: 3242798 - DNA, 25 bp, Homo sapien
cagcagcaggcaaatgtggcggggc

SEQ ID NO: 3242799 - DNA, 25 bp, Homo sapien
gaagaaggaaccagaagagagcaca

SEQ ID NO: 3242800 - DNA, 25 bp, Homo sapien
agcacagtttggtgtctcagcagca

SEQ ID NO: 3242801 - DNA, 25 bp, Homo sapien
caggtgcaggaagtcggcgctgcag

SEQ ID NO: 3242802 - DNA, 25 bp, Homo sapien
tcgccgaagagatcaggattggagc

SEQ ID NO: 3242803 - DNA, 25 bp, Homo sapien
gaaggatggtgggacggtcacagag

SEQ ID NO: 3242804 - DNA, 25 bp, Homo sapien
ccgaattgagaaattcgccgaagag

SEQ ID NO: 3242805 - DNA, 25 bp, Homo sapien
gaagacggcagaagcgggccaaagg

SEQ ID NO: 3242806 - DNA, 25 bp, Homo sapien
cggcagaagcgggccaaaggggtca

SEQ ID NO: 3242807 - DNA, 25 bp, Homo sapien
ggcagaagcgggccaaaggggtcag

SEQ ID NO: 3242808 - DNA, 25 bp, Homo sapien
agacggcagaagcgggccaaagggg

SEQ ID NO: 3242809 - DNA, 25 bp, Homo sapien
gaagccactcgccttcagaacagaa

SEQ ID NO: 3242810 - DNA, 25 bp, Homo sapien
ctgtgaagccactcgccttcagaac

SEQ ID NO: 3242811 - DNA, 25 bp, Homo sapien
cactcgccttcagaacagaaacacg

SEQ ID NO: 3242812 - DNA, 25 bp, Homo sapien
gccactcgccttcagaacagaaaca

SEQ ID NO: 3242813 - DNA, 25 bp, Homo sapien
cagcggcagggggccctcctcttgg

SEQ ID NO: 3242814 - DNA, 25 bp, Homo sapien
agcggcagggggccctcctcttggg

SEQ ID NO: 3242815 - DNA, 25 bp, Homo sapien
ggccttgcaggcctgcgggggtaca

SEQ ID NO: 3242816 - DNA, 25 bp, Homo sapien
tgcaggcctgcgggggtacagctgg

SEQ ID NO: 3242817 - DNA, 25 bp, Homo sapien
caggcctgcgggggtacagctggcc

SEQ ID NO: 3242818 - DNA, 25 bp, Homo sapien
ggtcgaccccgtcttcctgtggcac

SEQ ID NO: 3242819 - DNA, 25 bp, Homo sapien
tctgacacctcactctcgtctctgt

SEQ ID NO: 3242820 - DNA, 25 bp, Homo sapien
gggcagactcgctctccttggaaga

SEQ ID NO: 3242821 - DNA, 25 bp, Homo sapien
gaagaggcattttctgcaccagtct

SEQ ID NO: 3242822 - DNA, 25 bp, Homo sapien
tctctgtcctccatcagggcagact

SEQ ID NO: 3242823 - DNA, 25 bp, Homo sapien
tcagagtctgtgggttcggcttccg

SEQ ID NO: 3242824 - DNA, 25 bp, Homo sapien
aagcgactggcgtccgcgctgctgc

SEQ ID NO: 3242825 - DNA, 25 bp, Homo sapien
ccagtccagcgtgtgcaggaagcga

SEQ ID NO: 3242826 - DNA, 25 bp, Homo sapien
gcatcatactgagccgtggagccag

SEQ ID NO: 3242827 - DNA, 25 bp, Homo sapien
gcctctttcagggacgctgaagatg

SEQ ID NO: 3242828 - DNA, 25 bp, Homo sapien
tttcagggacgctgaagatgctcag

SEQ ID NO: 3242829 - DNA, 25 bp, Homo sapien
ctctttcagggacgctgaagatgct

SEQ ID NO: 3242830 - DNA, 25 bp, Homo sapien
cagggacgctgaagatgctcagaaa

SEQ ID NO: 3242831 - DNA, 25 bp, Homo sapien
aactgctcggaagtgaagagcgaca

SEQ ID NO: 3242832 - DNA, 25 bp, Homo sapien
gggctgccgtttcgaaactgctcgg

SEQ ID NO: 3242833 - DNA, 25 bp, Homo sapien
gcacttcctgggctgccgtttcgaa

SEQ ID NO: 3242834 - DNA, 25 bp, Homo sapien
gaagagcgacaggagcgagggttct

SEQ ID NO: 3242835 - DNA, 25 bp, Homo sapien
gctcctcccggctggaaaacaggat

SEQ ID NO: 3242836 - DNA, 25 bp, Homo sapien
caaacttagacagaatgtcttgctg

SEQ ID NO: 3242837 - DNA, 25 bp, Homo sapien
catgctcgagttctcccatggtggg

SEQ ID NO: 3242838 - DNA, 25 bp, Homo sapien
agacagaatgtcttgctgctcctcc

SEQ ID NO: 3242839 - DNA, 25 bp, Homo sapien
gcagagcagcgccccctcaatgccc

SEQ ID NO: 3242840 - DNA, 25 bp, Homo sapien
ctcacgcagagcagcgccccctcaa

SEQ ID NO: 3242841 - DNA, 25 bp, Homo sapien
acgcagagcagcgccccctcaatgc

SEQ ID NO: 3242842 - DNA, 25 bp, Homo sapien
agagcagcgccccctcaatgcccac

SEQ ID NO: 3242843 - DNA, 25 bp, Homo sapien
ctttgcgtgccgctgtctgtcgtca

SEQ ID NO: 3242844 - DNA, 25 bp, Homo sapien
agcggaggctcagaccggccacgac

SEQ ID NO: 3242845 - DNA, 25 bp, Homo sapien
aatccgacggccaccgcagcggagg

SEQ ID NO: 3242846 - DNA, 25 bp, Homo sapien
aagccgggactgatgtgcactccag

SEQ ID NO: 3242847 - DNA, 25 bp, Homo sapien
ctgggacagaccgaacttgggcagc

SEQ ID NO: 3242848 - DNA, 25 bp, Homo sapien
gagggagtgccgctcatgcccagcc

SEQ ID NO: 3242849 - DNA, 25 bp, Homo sapien
ccccagagggagtgccgctcatgcc

SEQ ID NO: 3242850 - DNA, 25 bp, Homo sapien
tgggcctgcaggctcggctcaccca

SEQ ID NO: 3242851 - DNA, 25 bp, Homo sapien
tgctgaaatggagcagttctgccaa

SEQ ID NO: 3242852 - DNA, 25 bp, Homo sapien
tttaatctgccctagggattggtac

SEQ ID NO: 3242853 - DNA, 25 bp, Homo sapien
ttcaccacagagtcatgcattccag

SEQ ID NO: 3242854 - DNA, 25 bp, Homo sapien
aacccacaggacgttagtattggtg

SEQ ID NO: 3242855 - DNA, 25 bp, Homo sapien
agagccaccaagcagcagtcacaca

SEQ ID NO: 3242856 - DNA, 25 bp, Homo sapien
caggtgctgcggcacagggcacctg

SEQ ID NO: 3242857 - DNA, 25 bp, Homo sapien
acgaccggcccacatgcaggtgctg

SEQ ID NO: 3242858 - DNA, 25 bp, Homo sapien
ctacacacgcgcagctccaggatgg

SEQ ID NO: 3242859 - DNA, 25 bp, Homo sapien
aaatttcacagtggtggcgttccga

SEQ ID NO: 3242860 - DNA, 25 bp, Homo sapien
aaaccccgtgtggaactgaatctgg

SEQ ID NO: 3242861 - DNA, 25 bp, Homo sapien
agtggtggcgttccgaggcacaaac

SEQ ID NO: 3242862 - DNA, 25 bp, Homo sapien
ttccgaggcacaaaccccgtgtgga

SEQ ID NO: 3242863 - DNA, 25 bp, Homo sapien
tggtgctggaggcatggacggcgcc

SEQ ID NO: 3242864 - DNA, 25 bp, Homo sapien
atttttcccaatgggcgagatctga

SEQ ID NO: 3242865 - DNA, 25 bp, Homo sapien
cgagatctgagagcggctcatggtg

SEQ ID NO: 3242866 - DNA, 25 bp, Homo sapien
tgaatccagatcctggggccacagg

SEQ ID NO: 3242867 - DNA, 25 bp, Homo sapien
agtggaccgggcgtgatagatgacg

SEQ ID NO: 3242868 - DNA, 25 bp, Homo sapien
gggaatcaccgctttgccatcttca

SEQ ID NO: 3242869 - DNA, 25 bp, Homo sapien
gagcacgtctccttgcaccgtgacg

SEQ ID NO: 3242870 - DNA, 25 bp, Homo sapien
accgtgacgcccaggggaatcaccg

SEQ ID NO: 3242871 - DNA, 25 bp, Homo sapien
cagcggcacgggtgtcatgaccacg

SEQ ID NO: 3242872 - DNA, 25 bp, Homo sapien
atgaccacggccctcaccaggatgg

SEQ ID NO: 3242873 - DNA, 25 bp, Homo sapien
tcttgtcgtactcctgggaggtgct

SEQ ID NO: 3242874 - DNA, 25 bp, Homo sapien
ccacgtagacctcgcagaagggcct

SEQ ID NO: 3242875 - DNA, 25 bp, Homo sapien
ctttcccgtggctggcgttcccgtg

SEQ ID NO: 3242876 - DNA, 25 bp, Homo sapien
ctggctttcccgtggctggcgttcc

SEQ ID NO: 3242877 - DNA, 25 bp, Homo sapien
cccgtggctggcgttcccgtggtgc

SEQ ID NO: 3242878 - DNA, 25 bp, Homo sapien
tggctttcccgtggctggcgttccc

SEQ ID NO: 3242879 - DNA, 25 bp, Homo sapien
gttgacttcttaattacagcaccga

SEQ ID NO: 3242880 - DNA, 25 bp, Homo sapien
gagttctgaccggtatgcacccgag

SEQ ID NO: 3242881 - DNA, 25 bp, Homo sapien
tctgacgagaaccttgcggctgaca

SEQ ID NO: 3242882 - DNA, 25 bp, Homo sapien
cctgtggactggtatctgttactca

SEQ ID NO: 3242883 - DNA, 25 bp, Homo sapien
gacatgtggaccactggaccacgca

SEQ ID NO: 3242884 - DNA, 25 bp, Homo sapien
gcatgagggtcctctttccacagct

SEQ ID NO: 3242885 - DNA, 25 bp, Homo sapien
ttccacagctctgacatgtggacca

SEQ ID NO: 3242886 - DNA, 25 bp, Homo sapien
gacgaatgccccactggaccatgca

SEQ ID NO: 3242887 - DNA, 25 bp, Homo sapien
ctgcatgagggtcctctctccacag

SEQ ID NO: 3242888 - DNA, 25 bp, Homo sapien
actggaccgtgcaccctgcatgagg

SEQ ID NO: 3242889 - DNA, 25 bp, Homo sapien
gcatgagggtcctctctccacagct

SEQ ID NO: 3242890 - DNA, 25 bp, Homo sapien
acagctctgacgaacgccccactgg

SEQ ID NO: 3242891 - DNA, 25 bp, Homo sapien
gagggtcctctttccacggctctga

SEQ ID NO: 3242892 - DNA, 25 bp, Homo sapien
cctgcatgagggtcctctttccacg

SEQ ID NO: 3242893 - DNA, 25 bp, Homo sapien
cgaatgccccactggaccgtgcact

SEQ ID NO: 3242894 - DNA, 25 bp, Homo sapien
ctttccacggctctgacgaatgccc

SEQ ID NO: 3242895 - DNA, 25 bp, Homo sapien
tccagctagctgcccggtgggagca

SEQ ID NO: 3242896 - DNA, 25 bp, Homo sapien
tgggagcagcactctgcacatctct

SEQ ID NO: 3242897 - DNA, 25 bp, Homo sapien
gactctccttagattctgggccagt

SEQ ID NO: 3242898 - DNA, 25 bp, Homo sapien
tgactctccttagattctgggccag

SEQ ID NO: 3242899 - DNA, 25 bp, Homo sapien
tgtgtggaggggctcccaactttgc

SEQ ID NO: 3242900 - DNA, 25 bp, Homo sapien
tggatggggcggcaatgatctcctc

SEQ ID NO: 3242901 - DNA, 25 bp, Homo sapien
tcctcttgccgggggtcacacagaa

SEQ ID NO: 3242902 - DNA, 25 bp, Homo sapien
tggctttcagctcaatgtgtggagg

SEQ ID NO: 3242903 - DNA, 25 bp, Homo sapien
cagccatggctccgcgaggccgggc

SEQ ID NO: 3242904 - DNA, 25 bp, Homo sapien
gctccgcgaggccgggcctgccttt

SEQ ID NO: 3242905 - DNA, 25 bp, Homo sapien
tccgcgaggccgggcctgcctttcc

SEQ ID NO: 3242906 - DNA, 25 bp, Homo sapien
gcgaggccgggcctgcctttcccac

SEQ ID NO: 3242907 - DNA, 25 bp, Homo sapien
cagcgcctgcagcggcaccgactgg

SEQ ID NO: 3242908 - DNA, 25 bp, Homo sapien
aggagacaccacagcgggggcggca

SEQ ID NO: 3242909 - DNA, 25 bp, Homo sapien
tgcagcggcaccgactggccctcca

SEQ ID NO: 3242910 - DNA, 25 bp, Homo sapien
agtgccacacgggcccacagagctg

SEQ ID NO: 3242911 - DNA, 25 bp, Homo sapien
ttgtgggatggccagatgcctggtg

SEQ ID NO: 3242912 - DNA, 25 bp, Homo sapien
gtgctgaagagacggcagaagcaca

SEQ ID NO: 3242913 - DNA, 25 bp, Homo sapien
ggatggccagatgcctggtgggcag

SEQ ID NO: 3242914 - DNA, 25 bp, Homo sapien
tgggcagcgcttcatgctgaacatg

SEQ ID NO: 3242915 - DNA, 25 bp, Homo sapien
ccacagcagacgcggctctcccgtc

SEQ ID NO: 3242916 - DNA, 25 bp, Homo sapien
gccacagcagacgcggctctcccgt

SEQ ID NO: 3242917 - DNA, 25 bp, Homo sapien
cctgcagatgttgtacagggtgtgc

SEQ ID NO: 3242918 - DNA, 25 bp, Homo sapien
cagacgttcttgtggtcctgccgca

SEQ ID NO: 3242919 - DNA, 25 bp, Homo sapien
tgcagtgcacgacgcagacgttctt

SEQ ID NO: 3242920 - DNA, 25 bp, Homo sapien
ccaggcgtgcatgttcctgcagatg

SEQ ID NO: 3242921 - DNA, 25 bp, Homo sapien
ctgggctttgggtccctttgcatac

SEQ ID NO: 3242922 - DNA, 25 bp, Homo sapien
ccactggccttgcagacagagctca

SEQ ID NO: 3242923 - DNA, 25 bp, Homo sapien
ggaaggaatgcctcggcctcgagca

SEQ ID NO: 3242924 - DNA, 25 bp, Homo sapien
catactgacaagtgtcgtgtctgga

SEQ ID NO: 3242925 - DNA, 25 bp, Homo sapien
gtttttgagcgctgactccacacct

SEQ ID NO: 3242926 - DNA, 25 bp, Homo sapien
gacaggttgtagacggcatagtgcc

SEQ ID NO: 3242927 - DNA, 25 bp, Homo sapien
caggaacaaccgcacatcttcgatg

SEQ ID NO: 3242928 - DNA, 25 bp, Homo sapien
ctgggtgcttggagtccaggaacaa

SEQ ID NO: 3242929 - DNA, 25 bp, Homo sapien
tgaaacaagcagacctgcgtcagca

SEQ ID NO: 3242930 - DNA, 25 bp, Homo sapien
gaaacaagcagacctgcgtcagcac

SEQ ID NO: 3242931 - DNA, 25 bp, Homo sapien
ctgaaacaagcagacctgcgtcagc

SEQ ID NO: 3242932 - DNA, 25 bp, Homo sapien
actgcccacacagccggccccctca

SEQ ID NO: 3242933 - DNA, 25 bp, Homo sapien
ctcctgacgcccccgggcaagcgca

SEQ ID NO: 3242934 - DNA, 25 bp, Homo sapien
cgctgctcctgacgcccccgggcaa

SEQ ID NO: 3242935 - DNA, 25 bp, Homo sapien
tgctcctgacgcccccgggcaagcg

SEQ ID NO: 3242936 - DNA, 25 bp, Homo sapien
ctgcaattctggatgtgatgtaaga

SEQ ID NO: 3242937 - DNA, 25 bp, Homo sapien
caattctggatgtgatgtaagatat

SEQ ID NO: 3242938 - DNA, 25 bp, Homo sapien
gcaattctggatgtgatgtaagata

SEQ ID NO: 3242939 - DNA, 25 bp, Homo sapien
tgcaattctggatgtgatgtaagat

SEQ ID NO: 3242940 - DNA, 25 bp, Homo sapien
ggatgcgggtcttccgtgcgttcaa

SEQ ID NO: 3242941 - DNA, 25 bp, Homo sapien
aggatgcgggtcttccgtgcgttca

SEQ ID NO: 3242942 - DNA, 25 bp, Homo sapien
tgcgggtcttccgtgcgttcaaacg

SEQ ID NO: 3242943 - DNA, 25 bp, Homo sapien
gatgcgggtcttccgtgcgttcaaa

SEQ ID NO: 3242944 - DNA, 25 bp, Homo sapien
tgcgggtcttccgtgcgttcaaacg

SEQ ID NO: 3242945 - DNA, 25 bp, Homo sapien
gatgcgggtcttccgtgcgttcaaa

SEQ ID NO: 3242946 - DNA, 25 bp, Homo sapien
ggatgcgggtcttccgtgcgttcaa

SEQ ID NO: 3242947 - DNA, 25 bp, Homo sapien
aggatgcgggtcttccgtgcgttca

SEQ ID NO: 3242948 - DNA, 25 bp, Homo sapien
tgtcagccacaactcaggcaggagg

SEQ ID NO: 3242949 - DNA, 25 bp, Homo sapien
tgtgctgcggccatggagaccattt

SEQ ID NO: 3242950 - DNA, 25 bp, Homo sapien
caaggattcacaagcacaaggactc

SEQ ID NO: 3242951 - DNA, 25 bp, Homo sapien
gacaaggcacacaggtaatggaacc

SEQ ID NO: 3242952 - DNA, 25 bp, Homo sapien
ggccgcagttcctgcatcacgggca

SEQ ID NO: 3242953 - DNA, 25 bp, Homo sapien
agccgacgcccttgagctggtgcga

SEQ ID NO: 3242954 - DNA, 25 bp, Homo sapien
gctgtttcctgacatagccgacgcc

SEQ ID NO: 3242955 - DNA, 25 bp, Homo sapien
ctggtgcgaccgcagggccagatga

SEQ ID NO: 3242956 - DNA, 25 bp, Homo sapien
gagaagcgggtgatgctgtcccact

SEQ ID NO: 3242957 - DNA, 25 bp, Homo sapien
cagtgttccgtgagcagaggctgcc

SEQ ID NO: 3242958 - DNA, 25 bp, Homo sapien
caatttacagagtcccgggaacaag

SEQ ID NO: 3242959 - DNA, 25 bp, Homo sapien
tcacctggtctaagtctgagtaact

SEQ ID NO: 3242960 - DNA, 25 bp, Homo sapien
ccaggaagccgccatacggctggtc

SEQ ID NO: 3242961 - DNA, 25 bp, Homo sapien
aggttggtgaagagccgctctgtcc

SEQ ID NO: 3242962 - DNA, 25 bp, Homo sapien
tacggctggtcgtactccgccagcg

SEQ ID NO: 3242963 - DNA, 25 bp, Homo sapien
tcccaccccgcagaatgtccaggaa

SEQ ID NO: 3242964 - DNA, 25 bp, Homo sapien
gtgaaacctcccacaccgcagtggg

SEQ ID NO: 3242965 - DNA, 25 bp, Homo sapien
ggaaccttctggaacactcccggca

SEQ ID NO: 3242966 - DNA, 25 bp, Homo sapien
accggggtgccccagacatggagct

SEQ ID NO: 3242967 - DNA, 25 bp, Homo sapien
ctcccggcacggagttccaagagca

SEQ ID NO: 3242968 - DNA, 25 bp, Homo sapien
ccctcgggacagtgtggcgctcccg

SEQ ID NO: 3242969 - DNA, 25 bp, Homo sapien
tggcgctcccgtagcctccattctg

SEQ ID NO: 3242970 - DNA, 25 bp, Homo sapien
tgtagccactgccagcggggcccac

SEQ ID NO: 3242971 - DNA, 25 bp, Homo sapien
gacagtgtggcgctcccgtagcctc

SEQ ID NO: 3242972 - DNA, 25 bp, Homo sapien
tggcccctggaagttccggcttcca

SEQ ID NO: 3242973 - DNA, 25 bp, Homo sapien
ctgcagtggcccctggaagttccgg

SEQ ID NO: 3242974 - DNA, 25 bp, Homo sapien
cacacccaccgcctgggtcagctcc

SEQ ID NO: 3242975 - DNA, 25 bp, Homo sapien
cagtggcccctggaagttccggctt

SEQ ID NO: 3242976 - DNA, 25 bp, Homo sapien
tccacaaagcacacggccctgtggg

SEQ ID NO: 3242977 - DNA, 25 bp, Homo sapien
ccacaaagcacacggccctgtgggc

SEQ ID NO: 3242978 - DNA, 25 bp, Homo sapien
ttccacaaagcacacggccctgtgg

SEQ ID NO: 3242979 - DNA, 25 bp, Homo sapien
aaacaaagacacaggagcaattcat

SEQ ID NO: 3242980 - DNA, 25 bp, Homo sapien
aagacacaggagcaattcatgctgt

SEQ ID NO: 3242981 - DNA, 25 bp, Homo sapien
agacacaggagcaattcatgctgtc

SEQ ID NO: 3242982 - DNA, 25 bp, Homo sapien
ttcacgttgcgggcggccgcgatct

SEQ ID NO: 3242983 - DNA, 25 bp, Homo sapien
tgcagctggtgcaccacctcggcga

SEQ ID NO: 3242984 - DNA, 25 bp, Homo sapien
ggtgcaccacctcggcgatggacag

SEQ ID NO: 3242985 - DNA, 25 bp, Homo sapien
agacttggggttcacgttgcgggcg

SEQ ID NO: 3242986 - DNA, 25 bp, Homo sapien
aagcacagcgcgctcggccccacgg

SEQ ID NO: 3242987 - DNA, 25 bp, Homo sapien
cagaagcacagcgcgctcggcccca

SEQ ID NO: 3242988 - DNA, 25 bp, Homo sapien
gcagcagaagcacagcgcgctcggc

SEQ ID NO: 3242989 - DNA, 25 bp, Homo sapien
agcacagcgcgctcggccccacggt

SEQ ID NO: 3242990 - DNA, 25 bp, Homo sapien
ctgcactggcagaggtcacagacca

SEQ ID NO: 3242991 - DNA, 25 bp, Homo sapien
aggtcacagaccaccagaggccact

SEQ ID NO: 3242992 - DNA, 25 bp, Homo sapien
agaggtcacagaccaccagaggcca

SEQ ID NO: 3242993 - DNA, 25 bp, Homo sapien
ggcagaggtcacagaccaccagagg

SEQ ID NO: 3242994 - DNA, 25 bp, Homo sapien
gaagtttcgctccatcctcaaaagg

SEQ ID NO: 3242995 - DNA, 25 bp, Homo sapien
tcccattgactattcgaagtttcgc

SEQ ID NO: 3242996 - DNA, 25 bp, Homo sapien
gggatcgagtacttcccattgacta

SEQ ID NO: 3242997 - DNA, 25 bp, Homo sapien
aagaccgtgtactgcgtgtcgtgcg

SEQ ID NO: 3242998 - DNA, 25 bp, Homo sapien
cacagcaggtacaagatgcagccca

SEQ ID NO: 3242999 - DNA, 25 bp, Homo sapien
gcacagcaggtacaagatgcagccc

SEQ ID NO: 3243000 - DNA, 25 bp, Homo sapien
cccacggggaatgcaggggtgacat

SEQ ID NO: 3243001 - DNA, 25 bp, Homo sapien
gcccacggggaatgcaggggtgaca

SEQ ID NO: 3243002 - DNA, 25 bp, Homo sapien
atatcgggaacatgggaaatgcagg

SEQ ID NO: 3243003 - DNA, 25 bp, Homo sapien
gatatcgggaacatgggaaatgcag

SEQ ID NO: 3243004 - DNA, 25 bp, Homo sapien
gggtgatatcgggaacatgggaaat

SEQ ID NO: 3243005 - DNA, 25 bp, Homo sapien
gtgatatcgggaacatgggaaatgc

SEQ ID NO: 3243006 - DNA, 25 bp, Homo sapien
agcgcaggggtgacgttggggccgt

SEQ ID NO: 3243007 - DNA, 25 bp, Homo sapien
cgcaggggtgacgttggggccgtgg

SEQ ID NO: 3243008 - DNA, 25 bp, Homo sapien
ggagcgcaggggtgacgttggggcc

SEQ ID NO: 3243009 - DNA, 25 bp, Homo sapien
ctgcgggaacaacaggggtgacacc

SEQ ID NO: 3243010 - DNA, 25 bp, Homo sapien
catcacttgactgtgcggagctggc

SEQ ID NO: 3243011 - DNA, 25 bp, Homo sapien
gggaggcctggatgctccacttcta

SEQ ID NO: 3243012 - DNA, 25 bp, Homo sapien
accgcaaagaactgtccaggtgaca

SEQ ID NO: 3243013 - DNA, 25 bp, Homo sapien
ccaggtgacagtgttaaacggactc

SEQ ID NO: 3243014 - DNA, 25 bp, Homo sapien
gcagagacccacttttcagaactga

SEQ ID NO: 3243015 - DNA, 25 bp, Homo sapien
cagagacccacttttcagaactgac

SEQ ID NO: 3243016 - DNA, 25 bp, Homo sapien
cagcagagacccacttttcagaact

SEQ ID NO: 3243017 - DNA, 25 bp, Homo sapien
aacagcagagacccacttttcagaa

SEQ ID NO: 3243018 - DNA, 25 bp, Homo sapien
caggattttcgcagaactggccttg

SEQ ID NO: 3243019 - DNA, 25 bp, Homo sapien
aatcacccaatatgtgagcccagag

SEQ ID NO: 3243020 - DNA, 25 bp, Homo sapien
agagaagggactggtgattacttcg

SEQ ID NO: 3243021 - DNA, 25 bp, Homo sapien
gccttgaacaatcagcgacttctcg

SEQ ID NO: 3243022 - DNA, 25 bp, Homo sapien
caggacaccctccacgcgtggtcac

SEQ ID NO: 3243023 - DNA, 25 bp, Homo sapien
ccacgcgtggtcaccctcggtcaat

SEQ ID NO: 3243024 - DNA, 25 bp, Homo sapien
ctggtggctgaatgacggggtaagg

SEQ ID NO: 3243025 - DNA, 25 bp, Homo sapien
caccctcggtcaatggggacatggc

SEQ ID NO: 3243026 - DNA, 25 bp, Homo sapien
aggctcagccctcactctggcctgg

SEQ ID NO: 3243027 - DNA, 25 bp, Homo sapien
catcaggctcagccctcactctggc

SEQ ID NO: 3243028 - DNA, 25 bp, Homo sapien
tcaggctcagccctcactctggcct

SEQ ID NO: 3243029 - DNA, 25 bp, Homo sapien
ggctcagccctcactctggcctggc

SEQ ID NO: 3243030 - DNA, 25 bp, Homo sapien
atggtgagaccaccccttctaccaa

SEQ ID NO: 3243031 - DNA, 25 bp, Homo sapien
actgccactgagaggcgccagacct

SEQ ID NO: 3243032 - DNA, 25 bp, Homo sapien
ggaggcaggccagttccgagtggca

SEQ ID NO: 3243033 - DNA, 25 bp, Homo sapien
ctcaggttaagtagggcgcacggag

SEQ ID NO: 3243034 - DNA, 25 bp, Homo sapien
tcgccgatcgggaagttggaataca

SEQ ID NO: 3243035 - DNA, 25 bp, Homo sapien
ctggtgttctatacattggtgttgt

SEQ ID NO: 3243036 - DNA, 25 bp, Homo sapien
agatatcctgcttctcgccgatcgg

SEQ ID NO: 3243037 - DNA, 25 bp, Homo sapien
tggaatacaagtctatgatttctgg

SEQ ID NO: 3243038 - DNA, 25 bp, Homo sapien
tcagcgcgctccttacgatgaggac

SEQ ID NO: 3243039 - DNA, 25 bp, Homo sapien
gcaccaagtccgcttgctgaggaga

SEQ ID NO: 3243040 - DNA, 25 bp, Homo sapien
gaaaagttgcatcccacaaacagta

SEQ ID NO: 3243041 - DNA, 25 bp, Homo sapien
tgcttcatggcatgtcggcaccgac

SEQ ID NO: 3243042 - DNA, 25 bp, Homo sapien
tgcgagatggtcgtggcactgccaa

SEQ ID NO: 3243043 - DNA, 25 bp, Homo sapien
cacagcttaatggtcccttggttac

SEQ ID NO: 3243044 - DNA, 25 bp, Homo sapien
cgcctctgggcgctccagctgtagt

SEQ ID NO: 3243045 - DNA, 25 bp, Homo sapien
tccagctgtagtcagggtagtgcga

SEQ ID NO: 3243046 - DNA, 25 bp, Homo sapien
tgaacttggcgtagacagagatggg

SEQ ID NO: 3243047 - DNA, 25 bp, Homo sapien
gccccgtgaacttggcgtagacaga

SEQ ID NO: 3243048 - DNA, 25 bp, Homo sapien
cccgtgaacttggcgtagacagaga

SEQ ID NO: 3243049 - DNA, 25 bp, Homo sapien
cgtgaacttggcgtagacagagatg

SEQ ID NO: 3243050 - DNA, 25 bp, Homo sapien
ggccgctccaggcctaggcagaggg

SEQ ID NO: 3243051 - DNA, 25 bp, Homo sapien
gtgcaggggccgctccaggcctagg

SEQ ID NO: 3243052 - DNA, 25 bp, Homo sapien
gctcggggtgcaggggccgctccag

SEQ ID NO: 3243053 - DNA, 25 bp, Homo sapien
tctgcaccagcagctcggggtgcag

SEQ ID NO: 3243054 - DNA, 25 bp, Homo sapien
tgacaaggcagcaacgcagtgactc

SEQ ID NO: 3243055 - DNA, 25 bp, Homo sapien
tgctgagaagccacggacgccagag

SEQ ID NO: 3243056 - DNA, 25 bp, Homo sapien
acgccagaggctgcacgcgtgacaa

SEQ ID NO: 3243057 - DNA, 25 bp, Homo sapien
aacagggaatccagcgagtgctgct

SEQ ID NO: 3243058 - DNA, 25 bp, Homo sapien
gcacaccagccacggacggaaggtg

SEQ ID NO: 3243059 - DNA, 25 bp, Homo sapien
cagcacaccagccacggacggaagg

SEQ ID NO: 3243060 - DNA, 25 bp, Homo sapien
cacaccagccacggacggaaggtgc

SEQ ID NO: 3243061 - DNA, 25 bp, Homo sapien
agcacaccagccacggacggaaggt

SEQ ID NO: 3243062 - DNA, 25 bp, Homo sapien
ggccagccaaaatcaacacaggcag

SEQ ID NO: 3243063 - DNA, 25 bp, Homo sapien
gaagtttactgaagagcaagacccg

SEQ ID NO: 3243064 - DNA, 25 bp, Homo sapien
ggcaggacggcccttttacatgcag

SEQ ID NO: 3243065 - DNA, 25 bp, Homo sapien
gcctcggagaaacccgtggtgacag

SEQ ID NO: 3243066 - DNA, 25 bp, Homo sapien
cgaaagggggcctcgagattccatt

SEQ ID NO: 3243067 - DNA, 25 bp, Homo sapien
gcgcggcacgtctggtagaagatct

SEQ ID NO: 3243068 - DNA, 25 bp, Homo sapien
ttctgccggtgcatgtgctgcacgg

SEQ ID NO: 3243069 - DNA, 25 bp, Homo sapien
tagaagatcttcagaaccgtgtcgc

SEQ ID NO: 3243070 - DNA, 25 bp, Homo sapien
cgtgtctgactcctcttttcctata

SEQ ID NO: 3243071 - DNA, 25 bp, Homo sapien
tctgactcctcttttcctatagacg

SEQ ID NO: 3243072 - DNA, 25 bp, Homo sapien
aagaggaactcagcctgccccgtgt

SEQ ID NO: 3243073 - DNA, 25 bp, Homo sapien
agcctgccccgtgtctgactcctct

SEQ ID NO: 3243074 - DNA, 25 bp, Homo sapien
aaactggacaatgttcgggtggccg

SEQ ID NO: 3243075 - DNA, 25 bp, Homo sapien
gacaatgttcgggtggccggaaagc

SEQ ID NO: 3243076 - DNA, 25 bp, Homo sapien
caatgttcgggtggccggaaagctt

SEQ ID NO: 3243077 - DNA, 25 bp, Homo sapien
ctggacaatgttcgggtggccggaa

SEQ ID NO: 3243078 - DNA, 25 bp, Homo sapien
gtcttgttaaaggagaacgtacata

SEQ ID NO: 3243079 - DNA, 25 bp, Homo sapien
tcttgttaaaggagaacgtacataa

SEQ ID NO: 3243080 - DNA, 25 bp, Homo sapien
ccacagcgacaccaaagtccatccc

SEQ ID NO: 3243081 - DNA, 25 bp, Homo sapien
aggcagccggcgggctctccgagtg

SEQ ID NO: 3243082 - DNA, 25 bp, Homo sapien
gtgtccacccgaacccacactcagg

SEQ ID NO: 3243083 - DNA, 25 bp, Homo sapien
tccatcccgcgcgtggcaggaggag

SEQ ID NO: 3243084 - DNA, 25 bp, Homo sapien
cttcttgaatgatggctctgttctt

SEQ ID NO: 3243085 - DNA, 25 bp, Homo sapien
tctctgccactccccacatcttgag

SEQ ID NO: 3243086 - DNA, 25 bp, Homo sapien
ccacatcttgagcttcatacacaaa

SEQ ID NO: 3243087 - DNA, 25 bp, Homo sapien
ccccacatcttgagcttcatacaca

SEQ ID NO: 3243088 - DNA, 25 bp, Homo sapien
gccactccccacatcttgagcttca

SEQ ID NO: 3243089 - DNA, 25 bp, Homo sapien
cagtgccgcatgaccttagaaagac

SEQ ID NO: 3243090 - DNA, 25 bp, Homo sapien
gccgcatgaccttagaaagacagaa

SEQ ID NO: 3243091 - DNA, 25 bp, Homo sapien
gtgccgcatgaccttagaaagacag

SEQ ID NO: 3243092 - DNA, 25 bp, Homo sapien
gcatgaccttagaaagacagaaggc

SEQ ID NO: 3243093 - DNA, 25 bp, Homo sapien
cgtccatgcaaagggctgaggacac

SEQ ID NO: 3243094 - DNA, 25 bp, Homo sapien
cagcgtccatgcaaagggctgagga

SEQ ID NO: 3243095 - DNA, 25 bp, Homo sapien
tgcaaagggctgaggacacctctca

SEQ ID NO: 3243096 - DNA, 25 bp, Homo sapien
ccatgcaaagggctgaggacacctc

SEQ ID NO: 3243097 - DNA, 25 bp, Homo sapien
gatgcgtgtaggatgcacggagcac

SEQ ID NO: 3243098 - DNA, 25 bp, Homo sapien
caggatgcgtgtaggatgcacggag

SEQ ID NO: 3243099 - DNA, 25 bp, Homo sapien
ggatgcgtgtaggatgcacggagca

SEQ ID NO: 3243100 - DNA, 25 bp, Homo sapien
atgcgtgtaggatgcacggagcacg

SEQ ID NO: 3243101 - DNA, 25 bp, Homo sapien
actctgcaagttctatataggtcac

SEQ ID NO: 3243102 - DNA, 25 bp, Homo sapien
cgagtagatgttcaccgggaagaga

SEQ ID NO: 3243103 - DNA, 25 bp, Homo sapien
gtactacacacggaatcacacgagt

SEQ ID NO: 3243104 - DNA, 25 bp, Homo sapien
tctatataggtcacaaccactggct

SEQ ID NO: 3243105 - DNA, 25 bp, Homo sapien
ccaagaagtcgagcgccgactgcag

SEQ ID NO: 3243106 - DNA, 25 bp, Homo sapien
agttccaccgtctgccccacgaagt

SEQ ID NO: 3243107 - DNA, 25 bp, Homo sapien
aagtcactctggtcgcggccggaag

SEQ ID NO: 3243108 - DNA, 25 bp, Homo sapien
agggagcctggacccgccaagaagt

SEQ ID NO: 3243109 - DNA, 25 bp, Homo sapien
tcgccgtccgggtcagctcagcaac

SEQ ID NO: 3243110 - DNA, 25 bp, Homo sapien
agccggagtggtcgggctcgggctc

SEQ ID NO: 3243111 - DNA, 25 bp, Homo sapien
cgcccgtgaggacgcgtcgcgtcag

SEQ ID NO: 3243112 - DNA, 25 bp, Homo sapien
tcgacgccgtgacgtaggcgcccgt

SEQ ID NO: 3243113 - DNA, 25 bp, Homo sapien
tcatggggacatcagctgttggtgc

SEQ ID NO: 3243114 - DNA, 25 bp, Homo sapien
gataagaccagtatctgctcatggg

SEQ ID NO: 3243115 - DNA, 25 bp, Homo sapien
tgtgtcaggacagtaaacatcaaac

SEQ ID NO: 3243116 - DNA, 25 bp, Homo sapien
ggagcccctggggataagaccagta

SEQ ID NO: 3243117 - DNA, 25 bp, Homo sapien
catctgagaaccgtggaggcaagcc

SEQ ID NO: 3243118 - DNA, 25 bp, Homo sapien
tgagacccccatgtgcatctgagaa

SEQ ID NO: 3243119 - DNA, 25 bp, Homo sapien
cagggtgttgtgtgggtggctccga

SEQ ID NO: 3243120 - DNA, 25 bp, Homo sapien
ggagggaacagacctcgctgcccca

SEQ ID NO: 3243121 - DNA, 25 bp, Homo sapien
aatccttgggcacgtggaggcagct

SEQ ID NO: 3243122 - DNA, 25 bp, Homo sapien
caagcggccttacaatgcgtgtgtc

SEQ ID NO: 3243123 - DNA, 25 bp, Homo sapien
tctccacacgctgacgagggatagg

SEQ ID NO: 3243124 - DNA, 25 bp, Homo sapien
gacgtaaacaagagtgcacgctgga

SEQ ID NO: 3243125 - DNA, 25 bp, Homo sapien
aagtgagatcagacccacctggacg

SEQ ID NO: 3243126 - DNA, 25 bp, Homo sapien
gagcctgctgctcttaaggactggc

SEQ ID NO: 3243127 - DNA, 25 bp, Homo sapien
caagcagaggcactaggaaagggcc

SEQ ID NO: 3243128 - DNA, 25 bp, Homo sapien
tccacgtggacagaggttctcctcc

SEQ ID NO: 3243129 - DNA, 25 bp, Homo sapien
cagggccggccactgtgtggacgtg

SEQ ID NO: 3243130 - DNA, 25 bp, Homo sapien
cgctccgtcactgggaagatgctgt

SEQ ID NO: 3243131 - DNA, 25 bp, Homo sapien
tcaccaatgggatgagggcgggtcc

SEQ ID NO: 3243132 - DNA, 25 bp, Homo sapien
ctgtagccaggtccgaccacagggc

SEQ ID NO: 3243133 - DNA, 25 bp, Homo sapien
gggagcagagatggctcgagccctt

SEQ ID NO: 3243134 - DNA, 25 bp, Homo sapien
cagagatggctcgagcccttgggct

SEQ ID NO: 3243135 - DNA, 25 bp, Homo sapien
gcgggagcagagatggctcgagccc

SEQ ID NO: 3243136 - DNA, 25 bp, Homo sapien
ctggcgggagcagagatggctcgag

SEQ ID NO: 3243137 - DNA, 25 bp, Homo sapien
acctaggatcgctctcaggggcagg

SEQ ID NO: 3243138 - DNA, 25 bp, Homo sapien
atccgcccgggcatccctggtggtc

SEQ ID NO: 3243139 - DNA, 25 bp, Homo sapien
ctacctaggatcgctctcaggggca

SEQ ID NO: 3243140 - DNA, 25 bp, Homo sapien
caggcgcagcatccgcccgggcatc

SEQ ID NO: 3243141 - DNA, 25 bp, Homo sapien
gtgacatggccgatgaaagaacggt

SEQ ID NO: 3243142 - DNA, 25 bp, Homo sapien
tcagccccatttcacggaaggggag

SEQ ID NO: 3243143 - DNA, 25 bp, Homo sapien
atgaaagaacggtacacgggcagcc

SEQ ID NO: 3243144 - DNA, 25 bp, Homo sapien
ccccgggcagctgatgccatctcag

SEQ ID NO: 3243145 - DNA, 25 bp, Homo sapien
accctgggcaatccggattccggag

SEQ ID NO: 3243146 - DNA, 25 bp, Homo sapien
ccttgaggagcgtgactcggaagta

SEQ ID NO: 3243147 - DNA, 25 bp, Homo sapien
gactcggaagtaggaaccctgggca

SEQ ID NO: 3243148 - DNA, 25 bp, Homo sapien
ggcaatccggattccggagcgcagc

SEQ ID NO: 3243149 - DNA, 25 bp, Homo sapien
gtccatgcgtggcttctcaaacctg

SEQ ID NO: 3243150 - DNA, 25 bp, Homo sapien
ttctcaaacctggtgtcgctgtcgg

SEQ ID NO: 3243151 - DNA, 25 bp, Homo sapien
agcagcccgtcgtccatgcgtggct

SEQ ID NO: 3243152 - DNA, 25 bp, Homo sapien
tcaaacctggtgtcgctgtcggagc

SEQ ID NO: 3243153 - DNA, 25 bp, Homo sapien
tgaagatgaggccttcaatactggg

SEQ ID NO: 3243154 - DNA, 25 bp, Homo sapien
acctgcagccggatctgcttgtgca

SEQ ID NO: 3243155 - DNA, 25 bp, Homo sapien
gatgaggccttcaatactgggcagc

SEQ ID NO: 3243156 - DNA, 25 bp, Homo sapien
caggctccgagagtgactgatcttc

SEQ ID NO: 3243157 - DNA, 25 bp, Homo sapien
cacagtagttactcatctgcacgat

SEQ ID NO: 3243158 - DNA, 25 bp, Homo sapien
cttcccgtgcctggtggaagtccag

SEQ ID NO: 3243159 - DNA, 25 bp, Homo sapien
tgcttgtgaacttgccaggctcctc

SEQ ID NO: 3243160 - DNA, 25 bp, Homo sapien
cgcgtcgatgccaatgccacagtag

SEQ ID NO: 3243161 - DNA, 25 bp, Homo sapien
agagcaaggaccaccctggcaccaa

SEQ ID NO: 3243162 - DNA, 25 bp, Homo sapien
gaccaccctggcaccaagccgagca

SEQ ID NO: 3243163 - DNA, 25 bp, Homo sapien
ccctggcaccaagccgagcacccag

SEQ ID NO: 3243164 - DNA, 25 bp, Homo sapien
gagcaaggaccaccctggcaccaag

SEQ ID NO: 3243165 - DNA, 25 bp, Homo sapien
ttctgtgtctccctcaactgcccgc

SEQ ID NO: 3243166 - DNA, 25 bp, Homo sapien
ccagcagtggctactttctgtgtct

SEQ ID NO: 3243167 - DNA, 25 bp, Homo sapien
gtgtctccctcaactgcccgctttg

SEQ ID NO: 3243168 - DNA, 25 bp, Homo sapien
tggctcagcacaatccccagcagtg

SEQ ID NO: 3243169 - DNA, 25 bp, Homo sapien
aagaggacgcccgttgtgacgcgtg

SEQ ID NO: 3243170 - DNA, 25 bp, Homo sapien
cgcccgttgtgacgcgtgtagcggg

SEQ ID NO: 3243171 - DNA, 25 bp, Homo sapien
tgtagcggggtcatatgcaggagcc

SEQ ID NO: 3243172 - DNA, 25 bp, Homo sapien
cggggtcatatgcaggagcctggaa

SEQ ID NO: 3243173 - DNA, 25 bp, Homo sapien
acagcagtacggagaacgggtcctc

SEQ ID NO: 3243174 - DNA, 25 bp, Homo sapien
tcggcctcgtccacagacagcagta

SEQ ID NO: 3243175 - DNA, 25 bp, Homo sapien
atggtccagcggtccatgagcacgg

SEQ ID NO: 3243176 - DNA, 25 bp, Homo sapien
agcggaggactcgaccaaggtcatt

SEQ ID NO: 3243177 - DNA, 25 bp, Homo sapien
ccgggcaggccagtcggtaccgtgt

SEQ ID NO: 3243178 - DNA, 25 bp, Homo sapien
ctccgggcaggccagtcggtaccgt

SEQ ID NO: 3243179 - DNA, 25 bp, Homo sapien
ggccagtcggtaccgtgtctcctcc

SEQ ID NO: 3243180 - DNA, 25 bp, Homo sapien
tccgggcaggccagtcggtaccgtg

SEQ ID NO: 3243181 - DNA, 25 bp, Homo sapien
ggagctcctgccggccgagacagct

SEQ ID NO: 3243182 - DNA, 25 bp, Homo sapien
gccgtgtggaggacttcaaggtccc

SEQ ID NO: 3243183 - DNA, 25 bp, Homo sapien
cccgtcctggccgtgtggaggactt

SEQ ID NO: 3243184 - DNA, 25 bp, Homo sapien
ttccaagtgcccgtcctggccgtgt

SEQ ID NO: 3243185 - DNA, 25 bp, Homo sapien
gaggacctccgttggtcaggtcgaa

SEQ ID NO: 3243186 - DNA, 25 bp, Homo sapien
caggtcgaagacctgatgagggttc

SEQ ID NO: 3243187 - DNA, 25 bp, Homo sapien
gagcaggtctcggcccttgaggcct

SEQ ID NO: 3243188 - DNA, 25 bp, Homo sapien
tgagggttcagtagcttccggaagc

SEQ ID NO: 3243189 - DNA, 25 bp, Homo sapien
cagcagcatgtacagccgctcggcc

SEQ ID NO: 3243190 - DNA, 25 bp, Homo sapien
gccgctcggcctccgcaaagcaggc

SEQ ID NO: 3243191 - DNA, 25 bp, Homo sapien
agcagcatgtacagccgctcggcct

SEQ ID NO: 3243192 - DNA, 25 bp, Homo sapien
tccgcaaagcaggcaacgtccaaca

SEQ ID NO: 3243193 - DNA, 25 bp, Homo sapien
aagggaaaggtcaggtgctacgtga

SEQ ID NO: 3243194 - DNA, 25 bp, Homo sapien
gaaaggtcaggtgctacgtgagggc

SEQ ID NO: 3243195 - DNA, 25 bp, Homo sapien
aggactcagggggagcctgtcccat

SEQ ID NO: 3243196 - DNA, 25 bp, Homo sapien
gtcaggtgctacgtgagggccaggg

SEQ ID NO: 3243197 - DNA, 25 bp, Homo sapien
agatgtgactcacggacaccacggt

SEQ ID NO: 3243198 - DNA, 25 bp, Homo sapien
gagtagatgtgactcacggacacca

SEQ ID NO: 3243199 - DNA, 25 bp, Homo sapien
atgtgactcacggacaccacggtgg

SEQ ID NO: 3243200 - DNA, 25 bp, Homo sapien
gtagatgtgactcacggacaccacg

SEQ ID NO: 3243201 - DNA, 25 bp, Homo sapien
cctccgcctgtccaggggtgacatc

SEQ ID NO: 3243202 - DNA, 25 bp, Homo sapien
ccctccgcctgtccaggggtgacat

SEQ ID NO: 3243203 - DNA, 25 bp, Homo sapien
cccctccgcctgtccaggggtgaca

SEQ ID NO: 3243204 - DNA, 25 bp, Homo sapien
ctgccccgtgccagcagcccacggc

SEQ ID NO: 3243205 - DNA, 25 bp, Homo sapien
cctgccccgtgccagcagcccacgg

SEQ ID NO: 3243206 - DNA, 25 bp, Homo sapien
ctctgccacgtagaaccgcgtctgg

SEQ ID NO: 3243207 - DNA, 25 bp, Homo sapien
gtagaaccgcgtctggctcacctgc

SEQ ID NO: 3243208 - DNA, 25 bp, Homo sapien
tctggctcacctgccgcacagacat

SEQ ID NO: 3243209 - DNA, 25 bp, Homo sapien
tcctcgggagacaggccgggaggca

SEQ ID NO: 3243210 - DNA, 25 bp, Homo sapien
ggccggggagaacggcaccaccgca

SEQ ID NO: 3243211 - DNA, 25 bp, Homo sapien
gccggggagaacggcaccaccgcac

SEQ ID NO: 3243212 - DNA, 25 bp, Homo sapien
tctcctcacccgcaaaacagcaaaa

SEQ ID NO: 3243213 - DNA, 25 bp, Homo sapien
cctcgaggacctcggggagatctgc

SEQ ID NO: 3243214 - DNA, 25 bp, Homo sapien
gcttccttgctgtggacaacccctg

SEQ ID NO: 3243215 - DNA, 25 bp, Homo sapien
catcaggaacactcccaggaattaa

SEQ ID NO: 3243216 - DNA, 25 bp, Homo sapien
ctgccggatgtcctgtagccggtcc

SEQ ID NO: 3243217 - DNA, 25 bp, Homo sapien
tcgtccatcagcatcgtccgctgga

SEQ ID NO: 3243218 - DNA, 25 bp, Homo sapien
cagcaggggctgttcgtccatcagc

SEQ ID NO: 3243219 - DNA, 25 bp, Homo sapien
tgccggatgtcctgtagccggtcca

SEQ ID NO: 3243220 - DNA, 25 bp, Homo sapien
ggcacaggccgtcagcacccggctc

SEQ ID NO: 3243221 - DNA, 25 bp, Homo sapien
ggctcctcgcccaccttggaagcag

SEQ ID NO: 3243222 - DNA, 25 bp, Homo sapien
aggccgtcagcacccggctcctcgc

SEQ ID NO: 3243223 - DNA, 25 bp, Homo sapien
cggctcctcgcccaccttggaagca

SEQ ID NO: 3243224 - DNA, 25 bp, Homo sapien
tgcagcccatcgccacctccaccag

SEQ ID NO: 3243225 - DNA, 25 bp, Homo sapien
gtgcctgcagcccatcgccacctcc

SEQ ID NO: 3243226 - DNA, 25 bp, Homo sapien
cgtgcctgcagcccatcgccacctc

SEQ ID NO: 3243227 - DNA, 25 bp, Homo sapien
gcctgcagcccatcgccacctccac

SEQ ID NO: 3243228 - DNA, 25 bp, Homo sapien
ctccagcaccacagagcgggccgtg

SEQ ID NO: 3243229 - DNA, 25 bp, Homo sapien
gtcactcgcacggacacgtaggcca

SEQ ID NO: 3243230 - DNA, 25 bp, Homo sapien
gcaccacagagcgggccgtgctctt

SEQ ID NO: 3243231 - DNA, 25 bp, Homo sapien
ggccgtgctcttcggggtcactcgc

SEQ ID NO: 3243232 - DNA, 25 bp, Homo sapien
ttctgccctcctccgagatcacagc

SEQ ID NO: 3243233 - DNA, 25 bp, Homo sapien
agccagggtagatcttcaggacctc

SEQ ID NO: 3243234 - DNA, 25 bp, Homo sapien
gccagccagggtagatcttcaggac

SEQ ID NO: 3243235 - DNA, 25 bp, Homo sapien
ttgagccagccagggtagatcttca

SEQ ID NO: 3243236 - DNA, 25 bp, Homo sapien
cctcggggatgtggtgggcccgcag

SEQ ID NO: 3243237 - DNA, 25 bp, Homo sapien
ggccagggtcctcggggatgtggtg

SEQ ID NO: 3243238 - DNA, 25 bp, Homo sapien
gtggccagggtcctcggggatgtgg

SEQ ID NO: 3243239 - DNA, 25 bp, Homo sapien
gtcctcggggatgtggtgggcccgc

SEQ ID NO: 3243240 - DNA, 25 bp, Homo sapien
tcaccgcgtcgtcgccatcaaagat

SEQ ID NO: 3243241 - DNA, 25 bp, Homo sapien
ggccaggcgggacaccgtgacgagg

SEQ ID NO: 3243242 - DNA, 25 bp, Homo sapien
tcaaagatcttcagcgtttgcttcc

SEQ ID NO: 3243243 - DNA, 25 bp, Homo sapien
tgacgaggcggaactggcttcttct

SEQ ID NO: 3243244 - DNA, 25 bp, Homo sapien
tgggccgggtaagctccgtgagtcc

SEQ ID NO: 3243245 - DNA, 25 bp, Homo sapien
ctgggccgggtaagctccgtgagtc

SEQ ID NO: 3243246 - DNA, 25 bp, Homo sapien
gcagcgctcccgtcggcgccgtcgc

SEQ ID NO: 3243247 - DNA, 25 bp, Homo sapien
tctctgcctggacccacggcagcgc

SEQ ID NO: 3243248 - DNA, 25 bp, Homo sapien
gactccggagttgcctgtgtctctc

SEQ ID NO: 3243249 - DNA, 25 bp, Homo sapien
cggactccggagttgcctgtgtctc

SEQ ID NO: 3243250 - DNA, 25 bp, Homo sapien
agggagcgcagacgcccgaagccac

SEQ ID NO: 3243251 - DNA, 25 bp, Homo sapien
tctgcgtcttgctgaagccgccggg

SEQ ID NO: 3243252 - DNA, 25 bp, Homo sapien
ccagcgccgcggagcagagggagtg

SEQ ID NO: 3243253 - DNA, 25 bp, Homo sapien
tccacgatgcggaagctctgcgtct

SEQ ID NO: 3243254 - DNA, 25 bp, Homo sapien
cggccagcacgtcagaggagccgca

SEQ ID NO: 3243255 - DNA, 25 bp, Homo sapien
acgccggccagcacgtcagaggagc

SEQ ID NO: 3243256 - DNA, 25 bp, Homo sapien
aggagccgcacgtcttcctgcagac

SEQ ID NO: 3243257 - DNA, 25 bp, Homo sapien
gcacgtcagaggagccgcacgtctt

SEQ ID NO: 3243258 - DNA, 25 bp, Homo sapien
actgcaggcgaagggcacacagtct

SEQ ID NO: 3243259 - DNA, 25 bp, Homo sapien
cctggtggcactggcggcagtcact

SEQ ID NO: 3243260 - DNA, 25 bp, Homo sapien
gcgaagggcacacagtctgggtgga

SEQ ID NO: 3243261 - DNA, 25 bp, Homo sapien
gcagtcactgcaggcgaagggcaca

SEQ ID NO: 3243262 - DNA, 25 bp, Homo sapien
ccttgcggcagacagcacagaactt

SEQ ID NO: 3243263 - DNA, 25 bp, Homo sapien
cttcgcagtggagcgccggtgcctc

SEQ ID NO: 3243264 - DNA, 25 bp, Homo sapien
agcacagaacttgcgcttgtggagc

SEQ ID NO: 3243265 - DNA, 25 bp, Homo sapien
ctccaggaccttgcggcagacagca

SEQ ID NO: 3243266 - DNA, 25 bp, Homo sapien
ctggtggggcagcctcacctcagca

SEQ ID NO: 3243267 - DNA, 25 bp, Homo sapien
ggtggggcagcctcacctcagcacc

SEQ ID NO: 3243268 - DNA, 25 bp, Homo sapien
tggtggggcagcctcacctcagcac

SEQ ID NO: 3243269 - DNA, 25 bp, Homo sapien
caggctgggtgccacactcgtgcac

SEQ ID NO: 3243270 - DNA, 25 bp, Homo sapien
tcacgtgcttcaggcacttctcatg

SEQ ID NO: 3243271 - DNA, 25 bp, Homo sapien
ctcgtgcacgggatcctcacgtgct

SEQ ID NO: 3243272 - DNA, 25 bp, Homo sapien
tcaggcacttctcatgagacatgaa

SEQ ID NO: 3243273 - DNA, 25 bp, Homo sapien
gtgagttggcccctgtcctacccaa

SEQ ID NO: 3243274 - DNA, 25 bp, Homo sapien
cactgtgtgagttggcccctgtcct

SEQ ID NO: 3243275 - DNA, 25 bp, Homo sapien
tgtgtgagttggcccctgtcctacc

SEQ ID NO: 3243276 - DNA, 25 bp, Homo sapien
actgtgtgagttggcccctgtccta

SEQ ID NO: 3243277 - DNA, 25 bp, Homo sapien
cctaattgtccctgctacgtgctgt

SEQ ID NO: 3243278 - DNA, 25 bp, Homo sapien
acagccccgggtgaaggttgtgcca

SEQ ID NO: 3243279 - DNA, 25 bp, Homo sapien
gggcataagaggagcaagcgccaca

SEQ ID NO: 3243280 - DNA, 25 bp, Homo sapien
tacgtgctgtgcaccgtgcctgaga

SEQ ID NO: 3243281 - DNA, 25 bp, Homo sapien
actatggagatgctgtccgcacctc

SEQ ID NO: 3243282 - DNA, 25 bp, Homo sapien
cacgaaggcacgtcccgcgagcagg

SEQ ID NO: 3243283 - DNA, 25 bp, Homo sapien
gctgaggtcccgctcgcatcaggca

SEQ ID NO: 3243284 - DNA, 25 bp, Homo sapien
tgggtcgcagccatcgcgcggcact

SEQ ID NO: 3243285 - DNA, 25 bp, Homo sapien
gtgggcttggtgagcgtcaccttcc

SEQ ID NO: 3243286 - DNA, 25 bp, Homo sapien
ggcttggtgagcgtcaccttccgga

SEQ ID NO: 3243287 - DNA, 25 bp, Homo sapien
cttggtgagcgtcaccttccggaag

SEQ ID NO: 3243288 - DNA, 25 bp, Homo sapien
cccagatgaagtcggagcagaggtg

SEQ ID NO: 3243289 - DNA, 25 bp, Homo sapien
ccggggctctgacgcccgcccgctc

SEQ ID NO: 3243290 - DNA, 25 bp, Homo sapien
ggctctgacgcccgcccgctcgggt

SEQ ID NO: 3243291 - DNA, 25 bp, Homo sapien
gcccggggctctgacgcccgcccgc

SEQ ID NO: 3243292 - DNA, 25 bp, Homo sapien
gggctctgacgcccgcccgctcggg

SEQ ID NO: 3243293 - DNA, 25 bp, Homo sapien
ggggtacaggagccgccgctccacg

SEQ ID NO: 3243294 - DNA, 25 bp, Homo sapien
gggtacaggagccgccgctccacgg

SEQ ID NO: 3243295 - DNA, 25 bp, Homo sapien
gggggtacaggagccgccgctccac

SEQ ID NO: 3243296 - DNA, 25 bp, Homo sapien
agggccatcgcagcaggcggtctca

SEQ ID NO: 3243297 - DNA, 25 bp, Homo sapien
gcctgtggggagacgcctgaaaggg

SEQ ID NO: 3243298 - DNA, 25 bp, Homo sapien
tgtggataggagtctgcgaagcggg

SEQ ID NO: 3243299 - DNA, 25 bp, Homo sapien
agggcctgtggggagacgcctgaaa

SEQ ID NO: 3243300 - DNA, 25 bp, Homo sapien
gaaaggtaatcctcaggcccactag

SEQ ID NO: 3243301 - DNA, 25 bp, Homo sapien
tgagggtcccgcattctcgatgtcg

SEQ ID NO: 3243302 - DNA, 25 bp, Homo sapien
caagcctccctctggaataagctgt

SEQ ID NO: 3243303 - DNA, 25 bp, Homo sapien
tatccaccggcttctcgtgaggctg

SEQ ID NO: 3243304 - DNA, 25 bp, Homo sapien
actcctctgtgttaattgccatggg

SEQ ID NO: 3243305 - DNA, 25 bp, Homo sapien
gaagttcctgcgagtcactcctctg

SEQ ID NO: 3243306 - DNA, 25 bp, Homo sapien
cactcctctgtgttaattgccatgg

SEQ ID NO: 3243307 - DNA, 25 bp, Homo sapien
tggaagctgtttctaccccaggacg

SEQ ID NO: 3243308 - DNA, 25 bp, Homo sapien
tactaagtttcatgaggttttaata

SEQ ID NO: 3243309 - DNA, 25 bp, Homo sapien
cagtatatagttttcacccaggttc

SEQ ID NO: 3243310 - DNA, 25 bp, Homo sapien
tatatagttttcacccaggttcacc

SEQ ID NO: 3243311 - DNA, 25 bp, Homo sapien
taacagtatatagttttcacccagg

SEQ ID NO: 3243312 - DNA, 25 bp, Homo sapien
aaattgtgaatgtccccatcatgca

SEQ ID NO: 3243313 - DNA, 25 bp, Homo sapien
ggcttcagtccccacaaagacaatt

SEQ ID NO: 3243314 - DNA, 25 bp, Homo sapien
ggatccattccagcaccgtgcagtg

SEQ ID NO: 3243315 - DNA, 25 bp, Homo sapien
gagcggctcaccttaattctctcag

SEQ ID NO: 3243316 - DNA, 25 bp, Homo sapien
tcaatttcgtgggtagctgggcctc

SEQ ID NO: 3243317 - DNA, 25 bp, Homo sapien
gtgagaaaatcgctgaagccccgga

SEQ ID NO: 3243318 - DNA, 25 bp, Homo sapien
tctgaagccaagtgtaaggagggcc

SEQ ID NO: 3243319 - DNA, 25 bp, Homo sapien
aaagcgcacgctttactcaggaggc

SEQ ID NO: 3243320 - DNA, 25 bp, Homo sapien
caggcttctggtgagcgctccgcgg

SEQ ID NO: 3243321 - DNA, 25 bp, Homo sapien
actgcgcactgtgagagcttcagag

SEQ ID NO: 3243322 - DNA, 25 bp, Homo sapien
cccctgcggcgcttctggaggagca

SEQ ID NO: 3243323 - DNA, 25 bp, Homo sapien
gctgtggcccctgcggcgcttctgg

SEQ ID NO: 3243324 - DNA, 25 bp, Homo sapien
tattagtcactgaacgcacgggcag

SEQ ID NO: 3243325 - DNA, 25 bp, Homo sapien
agtcctgggcttgaacgtgtgtgtc

SEQ ID NO: 3243326 - DNA, 25 bp, Homo sapien
cattcctggccctaagggtcatttt

SEQ ID NO: 3243327 - DNA, 25 bp, Homo sapien
ccatgctgaggctcgggactgagcc

SEQ ID NO: 3243328 - DNA, 25 bp, Homo sapien
agcagctcaacctcgcctatgtggg

SEQ ID NO: 3243329 - DNA, 25 bp, Homo sapien
tcaacctcgcctatgtgggcgccgt

SEQ ID NO: 3243330 - DNA, 25 bp, Homo sapien
cagtacgtcctcagctgggaccagc

SEQ ID NO: 3243331 - DNA, 25 bp, Homo sapien
tcaccgcggcatcaagcaggtccgg

SEQ ID NO: 3243332 - DNA, 25 bp, Homo sapien
cctcccgccgaagcaccctgttggg

SEQ ID NO: 3243333 - DNA, 25 bp, Homo sapien
ctcagggttggctgcgccgcacctg

SEQ ID NO: 3243334 - DNA, 25 bp, Homo sapien
cctgttggggagagcgtgtccttgc

SEQ ID NO: 3243335 - DNA, 25 bp, Homo sapien
gtgcacccgtgagcatccctgtgtg

SEQ ID NO: 3243336 - DNA, 25 bp, Homo sapien
gtctcatcggtcacagcaccctggg

SEQ ID NO: 3243337 - DNA, 25 bp, Homo sapien
cctgggccctgacgctggtgcaggt

SEQ ID NO: 3243338 - DNA, 25 bp, Homo sapien
tgagctgaggtctcatcggtcacag

SEQ ID NO: 3243339 - DNA, 25 bp, Homo sapien
ctgaggtctcatcggtcacagcacc

SEQ ID NO: 3243340 - DNA, 25 bp, Homo sapien
ctcctgagctgagggacggtgcatt

SEQ ID NO: 3243341 - DNA, 25 bp, Homo sapien
tcaaccctgagcgtcaggtcaggcc

SEQ ID NO: 3243342 - DNA, 25 bp, Homo sapien
ggaaacacagagaccctcgtgcact

SEQ ID NO: 3243343 - DNA, 25 bp, Homo sapien
ggcatagggagtcctcttggcacct

SEQ ID NO: 3243344 - DNA, 25 bp, Homo sapien
ctccagctccctgtggcgggctcgt

SEQ ID NO: 3243345 - DNA, 25 bp, Homo sapien
cgggctcgtgctgtctgcacggcat

SEQ ID NO: 3243346 - DNA, 25 bp, Homo sapien
gctgtctgcacggcatcgtgcacac

SEQ ID NO: 3243347 - DNA, 25 bp, Homo sapien
ctccctgtggcgggctcgtgctgtc

SEQ ID NO: 3243348 - DNA, 25 bp, Homo sapien
ctcctctgctcagaatgtctctcac

SEQ ID NO: 3243349 - DNA, 25 bp, Homo sapien
tcctcctcagccgtgtccccggggc

SEQ ID NO: 3243350 - DNA, 25 bp, Homo sapien
tgctcctcctcagccgtgtccccgg

SEQ ID NO: 3243351 - DNA, 25 bp, Homo sapien
gccctccccgaggaagcctcctctg

SEQ ID NO: 3243352 - DNA, 25 bp, Homo sapien
tcctggttggcacgcacagagtagc

SEQ ID NO: 3243353 - DNA, 25 bp, Homo sapien
tctgtggcatcctcgtagaaggccg

SEQ ID NO: 3243354 - DNA, 25 bp, Homo sapien
tccttgttggcatagtacagcggcc

SEQ ID NO: 3243355 - DNA, 25 bp, Homo sapien
tagcggtctgagagctccttcgcgg

SEQ ID NO: 3243356 - DNA, 25 bp, Homo sapien
ccccactccacctaggacagaaggc

SEQ ID NO: 3243357 - DNA, 25 bp, Homo sapien
taagacctctggtatcagaaggcaa

SEQ ID NO: 3243358 - DNA, 25 bp, Homo sapien
agaattaagacctctggtatcagaa

SEQ ID NO: 3243359 - DNA, 25 bp, Homo sapien
ctctggtatcagaaggcaacccctt

SEQ ID NO: 3243360 - DNA, 25 bp, Homo sapien
gtaaagcccggtcatcagcgtgagg

SEQ ID NO: 3243361 - DNA, 25 bp, Homo sapien
catggcagccgagccgttgagggtg

SEQ ID NO: 3243362 - DNA, 25 bp, Homo sapien
gacacggatggcgtagcagtcacgc

SEQ ID NO: 3243363 - DNA, 25 bp, Homo sapien
gcgtgagggcggtggcgacacggat

SEQ ID NO: 3243364 - DNA, 25 bp, Homo sapien
cgaagaaggacgtatagaggctgta

SEQ ID NO: 3243365 - DNA, 25 bp, Homo sapien
gctgaagatgcccacggagacatgc

SEQ ID NO: 3243366 - DNA, 25 bp, Homo sapien
gagacatgccgtgaggtgcccatga

SEQ ID NO: 3243367 - DNA, 25 bp, Homo sapien
ccagcaatgagtaggcgatggcctg

SEQ ID NO: 3243368 - DNA, 25 bp, Homo sapien
ctgttgcgtcaggtcccgtggccga

SEQ ID NO: 3243369 - DNA, 25 bp, Homo sapien
tgttgcgtcaggtcccgtggccgac

SEQ ID NO: 3243370 - DNA, 25 bp, Homo sapien
cctgttgcgtcaggtcccgtggccg

SEQ ID NO: 3243371 - DNA, 25 bp, Homo sapien
acagttctgggacgtgaggcgccct

SEQ ID NO: 3243372 - DNA, 25 bp, Homo sapien
tgtggaacggccatgacacactgtc

SEQ ID NO: 3243373 - DNA, 25 bp, Homo sapien
catccgcctggacttgggacagaat

SEQ ID NO: 3243374 - DNA, 25 bp, Homo sapien
gaagtctcaggaagaggcctcctat

SEQ ID NO: 3243375 - DNA, 25 bp, Homo sapien
tgatctcggaaaacaccgtggcgtt

SEQ ID NO: 3243376 - DNA, 25 bp, Homo sapien
tcttctcagcgacgttaggcaaaga

SEQ ID NO: 3243377 - DNA, 25 bp, Homo sapien
actggtcccacgtgaggcctcgggt

SEQ ID NO: 3243378 - DNA, 25 bp, Homo sapien
tctgtcctgtttgcagactccaatg

SEQ ID NO: 3243379 - DNA, 25 bp, Homo sapien
tacagattgctgagtcatgggtttc

SEQ ID NO: 3243380 - DNA, 25 bp, Homo sapien
tgtgccctggactctgtagttcaat

SEQ ID NO: 3243381 - DNA, 25 bp, Homo sapien
cctgatcggctgatccgggagttga

SEQ ID NO: 3243382 - DNA, 25 bp, Homo sapien
ctggcaagaccaccgaggaccgcag

SEQ ID NO: 3243383 - DNA, 25 bp, Homo sapien
cgggctatcgccttggggttctgca

SEQ ID NO: 3243384 - DNA, 25 bp, Homo sapien
gggtctacaagggctgacgcgcccc

SEQ ID NO: 3243385 - DNA, 25 bp, Homo sapien
tgggcggtggctcgtctgcgtctcc

SEQ ID NO: 3243386 - DNA, 25 bp, Homo sapien
gatgacactcagaggcgccttgggt

SEQ ID NO: 3243387 - DNA, 25 bp, Homo sapien
tctctcaggacggtaaggcgtacac

SEQ ID NO: 3243388 - DNA, 25 bp, Homo sapien
gaagccatcgaccttcaacctcttt

SEQ ID NO: 3243389 - DNA, 25 bp, Homo sapien
gtaaggcgtacaccccggtcagcag

SEQ ID NO: 3243390 - DNA, 25 bp, Homo sapien
aggaagccatcgaccttcaacctct

SEQ ID NO: 3243391 - DNA, 25 bp, Homo sapien
gtctctggctcctaccgagttcgag

SEQ ID NO: 3243392 - DNA, 25 bp, Homo sapien
tccccgggcaatccatgagcctgtg

SEQ ID NO: 3243393 - DNA, 25 bp, Homo sapien
cgagttcgagccctggactactggg

SEQ ID NO: 3243394 - DNA, 25 bp, Homo sapien
gaccctgtgccgtacctggaggtcc

SEQ ID NO: 3243395 - DNA, 25 bp, Homo sapien
gcacgcatcaccacattggcgactt

SEQ ID NO: 3243396 - DNA, 25 bp, Homo sapien
tttggtgggacctgaactgtattta

SEQ ID NO: 3243397 - DNA, 25 bp, Homo sapien
tctcgaatgtgatcaagttacttgg

SEQ ID NO: 3243398 - DNA, 25 bp, Homo sapien
cgtgttgatgcttccctactacggg

SEQ ID NO: 3243399 - DNA, 25 bp, Homo sapien
catgcagatatgctgcctgggcaca

SEQ ID NO: 3243400 - DNA, 25 bp, Homo sapien
gaagcctgcagtacgtgtgccgtga

SEQ ID NO: 3243401 - DNA, 25 bp, Homo sapien
gcagatatgctgtccggatacacac

SEQ ID NO: 3243402 - DNA, 25 bp, Homo sapien
gatatgctgcctggacacacgcaga

SEQ ID NO: 3243403 - DNA, 25 bp, Homo sapien
gcccctcctcaggctttggtgggtg

SEQ ID NO: 3243404 - DNA, 25 bp, Homo sapien
cccagcccctcctcaggctttggtg

SEQ ID NO: 3243405 - DNA, 25 bp, Homo sapien
gcagggcctggccactccccagccc

SEQ ID NO: 3243406 - DNA, 25 bp, Homo sapien
cctcctcaggctttggtgggtggcc

SEQ ID NO: 3243407 - DNA, 25 bp, Homo sapien
ccttcacgtgggcaagaccaggtcc

SEQ ID NO: 3243408 - DNA, 25 bp, Homo sapien
cacacgcgtcgggaggctccttggg

SEQ ID NO: 3243409 - DNA, 25 bp, Homo sapien
tgtcacccttcacgtgggcaagacc

SEQ ID NO: 3243410 - DNA, 25 bp, Homo sapien
caggaagagaccgacacacacgcgt

SEQ ID NO: 3243411 - DNA, 25 bp, Homo sapien
ctgagtccggggtagcggtggaggc

SEQ ID NO: 3243412 - DNA, 25 bp, Homo sapien
cctgagtccggggtagcggtggagg

SEQ ID NO: 3243413 - DNA, 25 bp, Homo sapien
tctgtggcagccgcatctggcccag

SEQ ID NO: 3243414 - DNA, 25 bp, Homo sapien
ggcctgagtccggggtagcggtgga

SEQ ID NO: 3243415 - DNA, 25 bp, Homo sapien
catgggggaccggtgggaatctgcc

SEQ ID NO: 3243416 - DNA, 25 bp, Homo sapien
accggtgggaatctgccctgatgcc

SEQ ID NO: 3243417 - DNA, 25 bp, Homo sapien
ggtgtctgggggctcgcggtgtcgg

SEQ ID NO: 3243418 - DNA, 25 bp, Homo sapien
caggatgctccgtctgcctctgggg

SEQ ID NO: 3243419 - DNA, 25 bp, Homo sapien
cacttggcggccacaaagcctcttt

SEQ ID NO: 3243420 - DNA, 25 bp, Homo sapien
ttgacggcccaggtccaacagcggg

SEQ ID NO: 3243421 - DNA, 25 bp, Homo sapien
agacaatcggcacccggctccactt

SEQ ID NO: 3243422 - DNA, 25 bp, Homo sapien
tggagcccctccaagacaatcggca

SEQ ID NO: 3243423 - DNA, 25 bp, Homo sapien
gcagggccccggctgggtccggctg

SEQ ID NO: 3243424 - DNA, 25 bp, Homo sapien
cagggccccggctgggtccggctgg

SEQ ID NO: 3243425 - DNA, 25 bp, Homo sapien
ctggggcggcagacgctggaggccg

SEQ ID NO: 3243426 - DNA, 25 bp, Homo sapien
gcggcagacgctggaggccggcagg

SEQ ID NO: 3243427 - DNA, 25 bp, Homo sapien
tgggcgtccagccagccagggacca

SEQ ID NO: 3243428 - DNA, 25 bp, Homo sapien
ggcccaaggccttggagcaccgttc

SEQ ID NO: 3243429 - DNA, 25 bp, Homo sapien
acctgggacgggatggtgcttgcca

SEQ ID NO: 3243430 - DNA, 25 bp, Homo sapien
ctgaccccgcgtctctcctcagagc

SEQ ID NO: 3243431 - DNA, 25 bp, Homo sapien
gatggtgcttgcccgtggattgcct

SEQ ID NO: 3243432 - DNA, 25 bp, Homo sapien
tgcttgcccgtggattgcctgtcca

SEQ ID NO: 3243433 - DNA, 25 bp, Homo sapien
tggtgcttgcccgtggattgcctgt

SEQ ID NO: 3243434 - DNA, 25 bp, Homo sapien
ggaggatggtgcttgcccgtggatt

SEQ ID NO: 3243435 - DNA, 25 bp, Homo sapien
gagtgaggcacaatccagcctttgt

SEQ ID NO: 3243436 - DNA, 25 bp, Homo sapien
caaacgttgtctgcagagccctgct

SEQ ID NO: 3243437 - DNA, 25 bp, Homo sapien
cttgcttggctggaagcacaaacgt

SEQ ID NO: 3243438 - DNA, 25 bp, Homo sapien
agcaaccaggcggagtgagcatcgg

SEQ ID NO: 3243439 - DNA, 25 bp, Homo sapien
ctgcagggtgcgtgtggccgcggct

SEQ ID NO: 3243440 - DNA, 25 bp, Homo sapien
caggcgggtctgaggtgcaggtccg

SEQ ID NO: 3243441 - DNA, 25 bp, Homo sapien
gggtctgaggtgcaggtccgcacag

SEQ ID NO: 3243442 - DNA, 25 bp, Homo sapien
gccgcggcttgtgcgcccagtgctg

SEQ ID NO: 3243443 - DNA, 25 bp, Homo sapien
ttcccgaagtggtgccgggcagaca

SEQ ID NO: 3243444 - DNA, 25 bp, Homo sapien
gtccgactcccaggactgccgtgtg

SEQ ID NO: 3243445 - DNA, 25 bp, Homo sapien
tggatacagcccaccctgaaaggga

SEQ ID NO: 3243446 - DNA, 25 bp, Homo sapien
ggttgtcactatgttcccgaagtgg

SEQ ID NO: 3243447 - DNA, 25 bp, Homo sapien
tgggcccacagaccccagaggcaac

SEQ ID NO: 3243448 - DNA, 25 bp, Homo sapien
ggcccacagaccccagaggcaacct

SEQ ID NO: 3243449 - DNA, 25 bp, Homo sapien
cccacagaccccagaggcaacctca

SEQ ID NO: 3243450 - DNA, 25 bp, Homo sapien
catgtcgggtagcacctgggcccac

SEQ ID NO: 3243451 - DNA, 25 bp, Homo sapien
tcgtccagggtgtgtcggccatggg

SEQ ID NO: 3243452 - DNA, 25 bp, Homo sapien
gcttcgtccagggtgtgtcggccat

SEQ ID NO: 3243453 - DNA, 25 bp, Homo sapien
tgtgtcggccatgggggccccgtgg

SEQ ID NO: 3243454 - DNA, 25 bp, Homo sapien
gtgtgtcggccatgggggccccgtg

SEQ ID NO: 3243455 - DNA, 25 bp, Homo sapien
aggccaatgtggttgttcctgccgg

SEQ ID NO: 3243456 - DNA, 25 bp, Homo sapien
gccaatgtggttgttcctgccggcc

SEQ ID NO: 3243457 - DNA, 25 bp, Homo sapien
ggccaatgtggttgttcctgccggc

SEQ ID NO: 3243458 - DNA, 25 bp, Homo sapien
caggccaatgtggttgttcctgccg

SEQ ID NO: 3243459 - DNA, 25 bp, Homo sapien
agaccccaggctggcagcccggctg

SEQ ID NO: 3243460 - DNA, 25 bp, Homo sapien
tgggtagaccggagaccccaggctg

SEQ ID NO: 3243461 - DNA, 25 bp, Homo sapien
ggagaccccaggctggcagcccggc

SEQ ID NO: 3243462 - DNA, 25 bp, Homo sapien
accccaggctggcagcccggctgca

SEQ ID NO: 3243463 - DNA, 25 bp, Homo sapien
cactttaacgccaaaaacatctgga

SEQ ID NO: 3243464 - DNA, 25 bp, Homo sapien
tggattccagccttcgcctttggaa

SEQ ID NO: 3243465 - DNA, 25 bp, Homo sapien
cacaggaggcactttaacgccaaaa

SEQ ID NO: 3243466 - DNA, 25 bp, Homo sapien
tccagccttcgcctttggaagctca

SEQ ID NO: 3243467 - DNA, 25 bp, Homo sapien
gagtgtccgtcggcttccacagctc

SEQ ID NO: 3243468 - DNA, 25 bp, Homo sapien
agtgtccgtcggcttccacagctcc

SEQ ID NO: 3243469 - DNA, 25 bp, Homo sapien
gagcagccaccaaagaccaccgtcc

SEQ ID NO: 3243470 - DNA, 25 bp, Homo sapien
gcagccaccaaagaccaccgtcctc

SEQ ID NO: 3243471 - DNA, 25 bp, Homo sapien
gagtctgagagtgccccccagcagg

SEQ ID NO: 3243472 - DNA, 25 bp, Homo sapien
gccaccaaagaccaccgtcctccaa

SEQ ID NO: 3243473 - DNA, 25 bp, Homo sapien
ggcttaaggccacatttctcagtgt

SEQ ID NO: 3243474 - DNA, 25 bp, Homo sapien
agccccgggctccatcgggcttaag

SEQ ID NO: 3243475 - DNA, 25 bp, Homo sapien
ctagttgcaggtccgagccctccgg

SEQ ID NO: 3243476 - DNA, 25 bp, Homo sapien
gagccctccggtgcctgatcgcagg

SEQ ID NO: 3243477 - DNA, 25 bp, Homo sapien
tgaggtttctgaaggtccgtaagtc

SEQ ID NO: 3243478 - DNA, 25 bp, Homo sapien
attcctgaggtttctgaaggtccgt

SEQ ID NO: 3243479 - DNA, 25 bp, Homo sapien
aagacatttcctgagagtggattcc

SEQ ID NO: 3243480 - DNA, 25 bp, Homo sapien
ttctgaaggtccgtaagtccaagaa

SEQ ID NO: 3243481 - DNA, 25 bp, Homo sapien
agcacagtgagactgatgggctgcc

SEQ ID NO: 3243482 - DNA, 25 bp, Homo sapien
ctgcatcaggcgactgcagcacagt

SEQ ID NO: 3243483 - DNA, 25 bp, Homo sapien
gcgcttctccgcgtatccggtggga

SEQ ID NO: 3243484 - DNA, 25 bp, Homo sapien
acagggcacgaggaaccttgcgctt

SEQ ID NO: 3243485 - DNA, 25 bp, Homo sapien
gcttctgctttgtagtgagtgactt

SEQ ID NO: 3243486 - DNA, 25 bp, Homo sapien
gactttctcaaccaagcctggccat

SEQ ID NO: 3243487 - DNA, 25 bp, Homo sapien
gcagaggttcggatgtggccggata

SEQ ID NO: 3243488 - DNA, 25 bp, Homo sapien
aggttcggatgtggccggataccca

SEQ ID NO: 3243489 - DNA, 25 bp, Homo sapien
tgtgtcctcggtcacgtgttccgtc

SEQ ID NO: 3243490 - DNA, 25 bp, Homo sapien
tcctcggtcacgtgttccgtcaggg

SEQ ID NO: 3243491 - DNA, 25 bp, Homo sapien
tgtcctcggtcacgtgttccgtcag

SEQ ID NO: 3243492 - DNA, 25 bp, Homo sapien
cggtcacgtgttccgtcagggtgct

SEQ ID NO: 3243493 - DNA, 25 bp, Homo sapien
acctgcgagaaccaaggcggccgct

SEQ ID NO: 3243494 - DNA, 25 bp, Homo sapien
aggaacaccacaggcatgaggacag

SEQ ID NO: 3243495 - DNA, 25 bp, Homo sapien
ccccggccacgttcctttgcaggat

SEQ ID NO: 3243496 - DNA, 25 bp, Homo sapien
agcaagtccacctgcgagaaccaag

SEQ ID NO: 3243497 - DNA, 25 bp, Homo sapien
gcacatacagggaatgcagcaccag

SEQ ID NO: 3243498 - DNA, 25 bp, Homo sapien
tgcgcatatcacatagcacatacag

SEQ ID NO: 3243499 - DNA, 25 bp, Homo sapien
tgcagctggacgtgtgaagccctca

SEQ ID NO: 3243500 - DNA, 25 bp, Homo sapien
cgtgtgaagccctcatgcgcatatc

SEQ ID NO: 3243501 - DNA, 25 bp, Homo sapien
tacacatgctggtgggcacgaaggc

SEQ ID NO: 3243502 - DNA, 25 bp, Homo sapien
cgggtggctgggtgctcatctttca

SEQ ID NO: 3243503 - DNA, 25 bp, Homo sapien
tcgcactggctgtctaacgtacaca

SEQ ID NO: 3243504 - DNA, 25 bp, Homo sapien
gaggcatggaagtcgcggtaaaaac

SEQ ID NO: 3243505 - DNA, 25 bp, Homo sapien
gggtcccttgtagggaatttgcaga

SEQ ID NO: 3243506 - DNA, 25 bp, Homo sapien
cctgggagcccccgaagcttggaga

SEQ ID NO: 3243507 - DNA, 25 bp, Homo sapien
ggagcccccgaagcttggagagtcc

SEQ ID NO: 3243508 - DNA, 25 bp, Homo sapien
taactgtggtgttggcgttagtggg

SEQ ID NO: 3243509 - DNA, 25 bp, Homo sapien
caggccgggatgctcggggcccagg

SEQ ID NO: 3243510 - DNA, 25 bp, Homo sapien
catgctcctctgactcgttgtcagg

SEQ ID NO: 3243511 - DNA, 25 bp, Homo sapien
gctcctctgactcgttgtcaggccg

SEQ ID NO: 3243512 - DNA, 25 bp, Homo sapien
tgctcctctgactcgttgtcaggcc

SEQ ID NO: 3243513 - DNA, 25 bp, Homo sapien
aacatgagtcgttcatgttaacaca

SEQ ID NO: 3243514 - DNA, 25 bp, Homo sapien
taaaacatgagtcgttcatgttaac

SEQ ID NO: 3243515 - DNA, 25 bp, Homo sapien
gaataaaacatgagtcgttcatgtt

SEQ ID NO: 3243516 - DNA, 25 bp, Homo sapien
caagaataaaacatgagtcgttcat

SEQ ID NO: 3243517 - DNA, 25 bp, Homo sapien
gagcttctccgtagctgtcactgcc

SEQ ID NO: 3243518 - DNA, 25 bp, Homo sapien
tcacggtgctttgaggacgacgacc

SEQ ID NO: 3243519 - DNA, 25 bp, Homo sapien
cagcctgctgagcttctccgtagct

SEQ ID NO: 3243520 - DNA, 25 bp, Homo sapien
aggacgacgaccaggccagcctgct

SEQ ID NO: 3243521 - DNA, 25 bp, Homo sapien
ccacatgagggcgtaaatatcctac

SEQ ID NO: 3243522 - DNA, 25 bp, Homo sapien
gcaagacctggaaacgaactggcca

SEQ ID NO: 3243523 - DNA, 25 bp, Homo sapien
ggtgccaacacgacactctgagaag

SEQ ID NO: 3243524 - DNA, 25 bp, Homo sapien
gtcctcttaggttgcgggcagccct

SEQ ID NO: 3243525 - DNA, 25 bp, Homo sapien
tttcagtgccccacccgtgtttgct

SEQ ID NO: 3243526 - DNA, 25 bp, Homo sapien
gggcaaaagcgcgtccagaatttct

SEQ ID NO: 3243527 - DNA, 25 bp, Homo sapien
tgagcatctggagcacgagcttcct

SEQ ID NO: 3243528 - DNA, 25 bp, Homo sapien
tgagaactgccggaagggcaaaagc

SEQ ID NO: 3243529 - DNA, 25 bp, Homo sapien
gttatctctacgaagccaagtgcga

SEQ ID NO: 3243530 - DNA, 25 bp, Homo sapien
tacccaggttgtccagattgcagcc

SEQ ID NO: 3243531 - DNA, 25 bp, Homo sapien
tgagaatcaagtcacaccaggcgtc

SEQ ID NO: 3243532 - DNA, 25 bp, Homo sapien
tattgaaagttccagagagggcggt

SEQ ID NO: 3243533 - DNA, 25 bp, Homo sapien
ggaattcagtcggtgttcacctcag

SEQ ID NO: 3243534 - DNA, 25 bp, Homo sapien
gcaagtccatcaagatgctggctga

SEQ ID NO: 3243535 - DNA, 25 bp, Homo sapien
gcaatgtggttacgttccactggaa

SEQ ID NO: 3243536 - DNA, 25 bp, Homo sapien
tacatatgacaaagcaggtgggagg

SEQ ID NO: 3243537 - DNA, 25 bp, Homo sapien
caaaggcagttaaggagataccgat

SEQ ID NO: 3243538 - DNA, 25 bp, Homo sapien
aagacagcaggcacaaatccaacca

SEQ ID NO: 3243539 - DNA, 25 bp, Homo sapien
taaccatatgttgtctatcagaggc

SEQ ID NO: 3243540 - DNA, 25 bp, Homo sapien
taatgaaatacctagggccgggtgc

SEQ ID NO: 3243541 - DNA, 25 bp, Homo sapien
taacacatggactgctctggtggag

SEQ ID NO: 3243542 - DNA, 25 bp, Homo sapien
tggcacatggacatctatagcagct

SEQ ID NO: 3243543 - DNA, 25 bp, Homo sapien
tgggaatgcgaaaagctgctgccac

SEQ ID NO: 3243544 - DNA, 25 bp, Homo sapien
ctgctggaacggaaacaagacggcc

SEQ ID NO: 3243545 - DNA, 25 bp, Homo sapien
ttagagttggtgagttccccgtgcc

SEQ ID NO: 3243546 - DNA, 25 bp, Homo sapien
atgcagaaacatggtgaacctctgg

SEQ ID NO: 3243547 - DNA, 25 bp, Homo sapien
gaactgaacgctaggaggagcagcc

SEQ ID NO: 3243548 - DNA, 25 bp, Homo sapien
ccagtgaggacagacgtctatgcag

SEQ ID NO: 3243549 - DNA, 25 bp, Homo sapien
agattctcgcagggccggctgctat

SEQ ID NO: 3243550 - DNA, 25 bp, Homo sapien
ggactaatcatggagattctcgcag

SEQ ID NO: 3243551 - DNA, 25 bp, Homo sapien
aggtggactaatcatggagattctc

SEQ ID NO: 3243552 - DNA, 25 bp, Homo sapien
tcgcagggccggctgctatctcaga

SEQ ID NO: 3243553 - DNA, 25 bp, Homo sapien
gcggcttacgagattcggactccca

SEQ ID NO: 3243554 - DNA, 25 bp, Homo sapien
taaaattccaatattgcggcttacg

SEQ ID NO: 3243555 - DNA, 25 bp, Homo sapien
caatattgcggcttacgagattcgg

SEQ ID NO: 3243556 - DNA, 25 bp, Homo sapien
ttacgagattcggactcccactgtc

SEQ ID NO: 3243557 - DNA, 25 bp, Homo sapien
tcctgatccctcctatggggtgcag

SEQ ID NO: 3243558 - DNA, 25 bp, Homo sapien
aagtcctgatccctcctatggggtg

SEQ ID NO: 3243559 - DNA, 25 bp, Homo sapien
tcaagtcctgatccctcctatgggg

SEQ ID NO: 3243560 - DNA, 25 bp, Homo sapien
gatccctcctatggggtgcagctca

SEQ ID NO: 3243561 - DNA, 25 bp, Homo sapien
tctcccgtttccgagctgcctggtg

SEQ ID NO: 3243562 - DNA, 25 bp, Homo sapien
tcccgtttccgagctgcctggtgtg

SEQ ID NO: 3243563 - DNA, 25 bp, Homo sapien
ccgtttccgagctgcctggtgtgtg

SEQ ID NO: 3243564 - DNA, 25 bp, Homo sapien
tcctctctcccgtttccgagctgcc

SEQ ID NO: 3243565 - DNA, 25 bp, Homo sapien
gagagatcaacttccatcgactcca

SEQ ID NO: 3243566 - DNA, 25 bp, Homo sapien
gagatcaacttccatcgactccagt

SEQ ID NO: 3243567 - DNA, 25 bp, Homo sapien
gagagagatcaacttccatcgactc

SEQ ID NO: 3243568 - DNA, 25 bp, Homo sapien
aaggagagagatcaacttccatcga

SEQ ID NO: 3243569 - DNA, 25 bp, Homo sapien
gttgaaatacacacatgacgagatg

SEQ ID NO: 3243570 - DNA, 25 bp, Homo sapien
tcagttgaaatacacacatgacgag

SEQ ID NO: 3243571 - DNA, 25 bp, Homo sapien
caacgtcagttgaaatacacacatg

SEQ ID NO: 3243572 - DNA, 25 bp, Homo sapien
ctctaacaacgtcagttgaaataca

SEQ ID NO: 3243573 - DNA, 25 bp, Homo sapien
caatcactgtcgctgcaggatggag

SEQ ID NO: 3243574 - DNA, 25 bp, Homo sapien
tgccgggcactggaacgccagttga

SEQ ID NO: 3243575 - DNA, 25 bp, Homo sapien
ggccacctggatcacacacttagtt

SEQ ID NO: 3243576 - DNA, 25 bp, Homo sapien
ggcacgcagaacactgggtcacatg

SEQ ID NO: 3243577 - DNA, 25 bp, Homo sapien
tgatttctgcaagcaacccacacac

SEQ ID NO: 3243578 - DNA, 25 bp, Homo sapien
ggcaggtgcagaatcggaaagacct

SEQ ID NO: 3243579 - DNA, 25 bp, Homo sapien
gaaagacctgcaggtcctgtgattt

SEQ ID NO: 3243580 - DNA, 25 bp, Homo sapien
cctgtgatttctgcaagcaacccac

SEQ ID NO: 3243581 - DNA, 25 bp, Homo sapien
tgaggtggcagcaggcatccgtgtg

SEQ ID NO: 3243582 - DNA, 25 bp, Homo sapien
gctgatgagtgaggtggcagcaggc

SEQ ID NO: 3243583 - DNA, 25 bp, Homo sapien
tggcagcaggcatccgtgtggtttt

SEQ ID NO: 3243584 - DNA, 25 bp, Homo sapien
ctgtcgggggctgatgagtgaggtg

SEQ ID NO: 3243585 - DNA, 25 bp, Homo sapien
aaagctgtttgttgtgatgatctca

SEQ ID NO: 3243586 - DNA, 25 bp, Homo sapien
agctgtttgttgtgatgatctcata

SEQ ID NO: 3243587 - DNA, 25 bp, Homo sapien
ctgaaagctgtttgttgtgatgatc

SEQ ID NO: 3243588 - DNA, 25 bp, Homo sapien
gaaagctgtttgttgtgatgatctc

SEQ ID NO: 3243589 - DNA, 25 bp, Homo sapien
agttcccatagcgtcctgtgagtcg

SEQ ID NO: 3243590 - DNA, 25 bp, Homo sapien
tagcgctgaagccaagtgaactcaa

SEQ ID NO: 3243591 - DNA, 25 bp, Homo sapien
tgttcttactgggtttgcaaacggc

SEQ ID NO: 3243592 - DNA, 25 bp, Homo sapien
tcagcacatggccactgcgggtgtt

SEQ ID NO: 3243593 - DNA, 25 bp, Homo sapien
gctgagatgcacacgtaagactggg

SEQ ID NO: 3243594 - DNA, 25 bp, Homo sapien
gtggacatgctgagatgcacacgta

SEQ ID NO: 3243595 - DNA, 25 bp, Homo sapien
gacatgctgagatgcacacgtaaga

SEQ ID NO: 3243596 - DNA, 25 bp, Homo sapien
catgctgagatgcacacgtaagact

SEQ ID NO: 3243597 - DNA, 25 bp, Homo sapien
gcagtgggtgcctcgactgcgcact

SEQ ID NO: 3243598 - DNA, 25 bp, Homo sapien
tggtaaatgaacgagctcttccctc

SEQ ID NO: 3243599 - DNA, 25 bp, Homo sapien
ttgatcttggagagccagacgacca

SEQ ID NO: 3243600 - DNA, 25 bp, Homo sapien
cgaccaatgcacatggcagtgggtg

SEQ ID NO: 3243601 - DNA, 25 bp, Homo sapien
tgtagttgttctatctgcagcactg

SEQ ID NO: 3243602 - DNA, 25 bp, Homo sapien
gtagttgttctatctgcagcactga

SEQ ID NO: 3243603 - DNA, 25 bp, Homo sapien
agcactgacttcctaagggattctt

SEQ ID NO: 3243604 - DNA, 25 bp, Homo sapien
ttctctatagaaggctaacaatctc

SEQ ID NO: 3243605 - DNA, 25 bp, Homo sapien
tctatagaaggctaacaatctcttc

SEQ ID NO: 3243606 - DNA, 25 bp, Homo sapien
atagaaggctaacaatctcttcctg

SEQ ID NO: 3243607 - DNA, 25 bp, Homo sapien
tttctctatagaaggctaacaatct

SEQ ID NO: 3243608 - DNA, 25 bp, Homo sapien
ccccacagacgcccatggccagtgc

SEQ ID NO: 3243609 - DNA, 25 bp, Homo sapien
aaacacaggggaggcttaatgggca

SEQ ID NO: 3243610 - DNA, 25 bp, Homo sapien
agggcaaacacaggggaggcttaat

SEQ ID NO: 3243611 - DNA, 25 bp, Homo sapien
ccaagggcaaacacaggggaggctt

SEQ ID NO: 3243612 - DNA, 25 bp, Homo sapien
gctccactggtactgaaagtcggcg

SEQ ID NO: 3243613 - DNA, 25 bp, Homo sapien
ggtactgaaagtcggcgtcctctag

SEQ ID NO: 3243614 - DNA, 25 bp, Homo sapien
aaagtcggcgtcctctagctccatc

SEQ ID NO: 3243615 - DNA, 25 bp, Homo sapien
ctaactgtggctccactggtactga

SEQ ID NO: 3243616 - DNA, 25 bp, Homo sapien
tttgccgacgcttctcaagtcctgc

SEQ ID NO: 3243617 - DNA, 25 bp, Homo sapien
caaagccacactcaattgtgcctgt

SEQ ID NO: 3243618 - DNA, 25 bp, Homo sapien
caattgtgcctgtgtgggaagcttc

SEQ ID NO: 3243619 - DNA, 25 bp, Homo sapien
cagcttcacatgttcgtggaggaac

SEQ ID NO: 3243620 - DNA, 25 bp, Homo sapien
gcctccgtggtttgtctggcctggc

SEQ ID NO: 3243621 - DNA, 25 bp, Homo sapien
ccacttgtctgggtgttgcagggtc

SEQ ID NO: 3243622 - DNA, 25 bp, Homo sapien
ccagagacttgagacactgggtgtg

SEQ ID NO: 3243623 - DNA, 25 bp, Homo sapien
ccaaggaagagctgcccggtgctca

SEQ ID NO: 3243624 - DNA, 25 bp, Homo sapien
atgagctccaaactacgccaggacc

SEQ ID NO: 3243625 - DNA, 25 bp, Homo sapien
tgcattcgtccacatgagctccaaa

SEQ ID NO: 3243626 - DNA, 25 bp, Homo sapien
gcggactctcgccaagaggccagga

SEQ ID NO: 3243627 - DNA, 25 bp, Homo sapien
cactcttcggttcaataccagttct

SEQ ID NO: 3243628 - DNA, 25 bp, Homo sapien
acgtcacacagctgcgggaaaactc

SEQ ID NO: 3243629 - DNA, 25 bp, Homo sapien
tttatgttacgttgatattagagca

SEQ ID NO: 3243630 - DNA, 25 bp, Homo sapien
tccaccctgcgtttgtgatgctcac

SEQ ID NO: 3243631 - DNA, 25 bp, Homo sapien
tgatattagagcataaatgttacaa

SEQ ID NO: 3243632 - DNA, 25 bp, Homo sapien
gtgtaactgacaaacagtggggcca

SEQ ID NO: 3243633 - DNA, 25 bp, Homo sapien
acagtgtaactgacaaacagtgggg

SEQ ID NO: 3243634 - DNA, 25 bp, Homo sapien
ctgacaaacagtggggccacgaggt

SEQ ID NO: 3243635 - DNA, 25 bp, Homo sapien
taactgacaaacagtggggccacga

SEQ ID NO: 3243636 - DNA, 25 bp, Homo sapien
cttccatgggtcgagcctctgggca

SEQ ID NO: 3243637 - DNA, 25 bp, Homo sapien
tatgaactcaagcaacttctggccc

SEQ ID NO: 3243638 - DNA, 25 bp, Homo sapien
tggctgggcataacttgagacggca

SEQ ID NO: 3243639 - DNA, 25 bp, Homo sapien
agcacttggcaaaaccaccctggag

SEQ ID NO: 3243640 - DNA, 25 bp, Homo sapien
tcttacacagactgtctatgctcat

SEQ ID NO: 3243641 - DNA, 25 bp, Homo sapien
tgtctatgctcatgaagaatgcctg

SEQ ID NO: 3243642 - DNA, 25 bp, Homo sapien
ctatgctcatgaagaatgcctggat

SEQ ID NO: 3243643 - DNA, 25 bp, Homo sapien
acagactgtctatgctcatgaagaa

SEQ ID NO: 3243644 - DNA, 25 bp, Homo sapien
tttgctgcgtctgacgtcatcatgg

SEQ ID NO: 3243645 - DNA, 25 bp, Homo sapien
gaaggcctttgctgcgtctgacgtc

SEQ ID NO: 3243646 - DNA, 25 bp, Homo sapien
gcgtctgacgtcatcatggcagagg

SEQ ID NO: 3243647 - DNA, 25 bp, Homo sapien
aaggcctttgctgcgtctgacgtca

SEQ ID NO: 3243648 - DNA, 25 bp, Homo sapien
aagcggacacgggtacccctgtgcg

SEQ ID NO: 3243649 - DNA, 25 bp, Homo sapien
gggctctcctcacgcagctgtaaag

SEQ ID NO: 3243650 - DNA, 25 bp, Homo sapien
ccctggtgcagagcaatcgagtcca

SEQ ID NO: 3243651 - DNA, 25 bp, Homo sapien
cacaaggtccgacggcgcaagcgga

SEQ ID NO: 3243652 - DNA, 25 bp, Homo sapien
tccaacttttgactaacaaatggtc

SEQ ID NO: 3243653 - DNA, 25 bp, Homo sapien
gaattttacgtcagaaattagatga

SEQ ID NO: 3243654 - DNA, 25 bp, Homo sapien
aatgacccattactggaatcatcag

SEQ ID NO: 3243655 - DNA, 25 bp, Homo sapien
gcacccggccgcgttttccatattg

SEQ ID NO: 3243656 - DNA, 25 bp, Homo sapien
actcaaaagcaactggcgtgtccat

SEQ ID NO: 3243657 - DNA, 25 bp, Homo sapien
cttggaactcaaaagcaactggcgt

SEQ ID NO: 3243658 - DNA, 25 bp, Homo sapien
tggaactcaaaagcaactggcgtgt

SEQ ID NO: 3243659 - DNA, 25 bp, Homo sapien
gaactcaaaagcaactggcgtgtcc

SEQ ID NO: 3243660 - DNA, 25 bp, Homo sapien
gaaagcaaaactgtacgacaaggag

SEQ ID NO: 3243661 - DNA, 25 bp, Homo sapien
tttgaaagcaaaactgtacgacaag

SEQ ID NO: 3243662 - DNA, 25 bp, Homo sapien
gcaaaactgtacgacaaggagcttt

SEQ ID NO: 3243663 - DNA, 25 bp, Homo sapien
aaactgtacgacaaggagctttaca

SEQ ID NO: 3243664 - DNA, 25 bp, Homo sapien
tgcgactgtccacttgacaccaggg

SEQ ID NO: 3243665 - DNA, 25 bp, Homo sapien
gcgctgcccatggaatagggccaga

SEQ ID NO: 3243666 - DNA, 25 bp, Homo sapien
tcctccactggcgttaaggttgccg

SEQ ID NO: 3243667 - DNA, 25 bp, Homo sapien
aaacgcctccctgacaatgcgactg

SEQ ID NO: 3243668 - DNA, 25 bp, Homo sapien
agagcccccgactgacaggactcgt

SEQ ID NO: 3243669 - DNA, 25 bp, Homo sapien
gactgacaggactcgtggcccgacc

SEQ ID NO: 3243670 - DNA, 25 bp, Homo sapien
ccgactgacaggactcgtggcccga

SEQ ID NO: 3243671 - DNA, 25 bp, Homo sapien
aggactcgtggcccgacccctgtgt

SEQ ID NO: 3243672 - DNA, 25 bp, Homo sapien
gtgaggctgaagcacgacgtcctgt

SEQ ID NO: 3243673 - DNA, 25 bp, Homo sapien
cgcagtacacgtgcccgcagttggt

SEQ ID NO: 3243674 - DNA, 25 bp, Homo sapien
ctttgccgaggcaggcgtcgcagta

SEQ ID NO: 3243675 - DNA, 25 bp, Homo sapien
tgaggctgaagcacgacgtcctgtg

SEQ ID NO: 3243676 - DNA, 25 bp, Homo sapien
ctggaagcagcgattacagaacacc

SEQ ID NO: 3243677 - DNA, 25 bp, Homo sapien
ggaagcagcgattacagaacaccca

SEQ ID NO: 3243678 - DNA, 25 bp, Homo sapien
gcagcgattacagaacacccagttg

SEQ ID NO: 3243679 - DNA, 25 bp, Homo sapien
agcgattacagaacacccagttggc

SEQ ID NO: 3243680 - DNA, 25 bp, Homo sapien
gcccacgcaaggttgggaccagcct

SEQ ID NO: 3243681 - DNA, 25 bp, Homo sapien
ccacgcgaagcccacgcaaggttgg

SEQ ID NO: 3243682 - DNA, 25 bp, Homo sapien
cgaagcccacgcaaggttgggacca

SEQ ID NO: 3243683 - DNA, 25 bp, Homo sapien
gcgggcgaccgcagcggcgaggccg

SEQ ID NO: 3243684 - DNA, 25 bp, Homo sapien
gcggaggaacgcaccgcgagcacca

SEQ ID NO: 3243685 - DNA, 25 bp, Homo sapien
tcttggcggtcctcaggtgttttgt

SEQ ID NO: 3243686 - DNA, 25 bp, Homo sapien
ggcgcgtgtgactcgtctcccaggt

SEQ ID NO: 3243687 - DNA, 25 bp, Homo sapien
tcgtctcccaggtcgtttgggctgg

SEQ ID NO: 3243688 - DNA, 25 bp, Homo sapien
tgatttattaactcaaacattatgc

SEQ ID NO: 3243689 - DNA, 25 bp, Homo sapien
tttattaactcaaacattatgcaga

SEQ ID NO: 3243690 - DNA, 25 bp, Homo sapien
ttatgcagattatttgtccttattg

SEQ ID NO: 3243691 - DNA, 25 bp, Homo sapien
gcagattatttgtccttattgataa

SEQ ID NO: 3243692 - DNA, 25 bp, Homo sapien
ttggaaaattccgactgagataaag

SEQ ID NO: 3243693 - DNA, 25 bp, Homo sapien
tggaaaattccgactgagataaaga

SEQ ID NO: 3243694 - DNA, 25 bp, Homo sapien
aattccgactgagataaagattaat

SEQ ID NO: 3243695 - DNA, 25 bp, Homo sapien
gaaaattccgactgagataaagatt

SEQ ID NO: 3243696 - DNA, 25 bp, Homo sapien
tttgtatcttcactggtcgttcgaa

SEQ ID NO: 3243697 - DNA, 25 bp, Homo sapien
tgtatcttcactggtcgttcgaaaa

SEQ ID NO: 3243698 - DNA, 25 bp, Homo sapien
atcttcactggtcgttcgaaaattt

SEQ ID NO: 3243699 - DNA, 25 bp, Homo sapien
gtatcttcactggtcgttcgaaaat

SEQ ID NO: 3243700 - DNA, 25 bp, Homo sapien
ttgtgttgagaaatgcgttgctggt

SEQ ID NO: 3243701 - DNA, 25 bp, Homo sapien
gttgagaaatgcgttgctggtagca

SEQ ID NO: 3243702 - DNA, 25 bp, Homo sapien
aaataagttgaataggcagactgac

SEQ ID NO: 3243703 - DNA, 25 bp, Homo sapien
taaaataagttgaataggcagactg

SEQ ID NO: 3243704 - DNA, 25 bp, Homo sapien
caactcgaatatctaagtggatccg

SEQ ID NO: 3243705 - DNA, 25 bp, Homo sapien
gatgttcaagcttgaaggtaagttc

SEQ ID NO: 3243706 - DNA, 25 bp, Homo sapien
tgtcctttgcttgagcaatggccgc

SEQ ID NO: 3243707 - DNA, 25 bp, Homo sapien
caaggtcgtgttctccaactcgaat

SEQ ID NO: 3243708 - DNA, 25 bp, Homo sapien
taaaatagaatgtcccttgcgggcc

SEQ ID NO: 3243709 - DNA, 25 bp, Homo sapien
gcgggccgtataacttcgacaatat

SEQ ID NO: 3243710 - DNA, 25 bp, Homo sapien
gcaaatggtgtgttcaccaggtgaa

SEQ ID NO: 3243711 - DNA, 25 bp, Homo sapien
tgtgttcaccaggtgaatgtgaagt

SEQ ID NO: 3243712 - DNA, 25 bp, Homo sapien
ggaaacttcatatgctaacagagag

SEQ ID NO: 3243713 - DNA, 25 bp, Homo sapien
gaaattcgacttggactagttgtga

SEQ ID NO: 3243714 - DNA, 25 bp, Homo sapien
taataaaaggcacttgcggctgggc

SEQ ID NO: 3243715 - DNA, 25 bp, Homo sapien
gaatgtatatggcaaactctaggga

SEQ ID NO: 3243716 - DNA, 25 bp, Homo sapien
tgtaagttgtaatagtcacaaacat

SEQ ID NO: 3243717 - DNA, 25 bp, Homo sapien
gagcagattcaaggaacgtatgtct

SEQ ID NO: 3243718 - DNA, 25 bp, Homo sapien
tcccattgctgtatcttgaaagtcc

SEQ ID NO: 3243719 - DNA, 25 bp, Homo sapien
ccaggagcagattcaaggaacgtat

SEQ ID NO: 3243720 - DNA, 25 bp, Homo sapien
acgtatgtctgcctatgtcccattg

SEQ ID NO: 3243721 - DNA, 25 bp, Homo sapien
agtcagagaagagccttggcaggaa

SEQ ID NO: 3243722 - DNA, 25 bp, Homo sapien
cagtcagagaagagccttggcagga

SEQ ID NO: 3243723 - DNA, 25 bp, Homo sapien
tcagtcagagaagagccttggcagg

SEQ ID NO: 3243724 - DNA, 25 bp, Homo sapien
agccagggtgtcacaacgcgtgttc

SEQ ID NO: 3243725 - DNA, 25 bp, Homo sapien
ccctttgtgcctgcggctctcagca

SEQ ID NO: 3243726 - DNA, 25 bp, Homo sapien
gtcacaacgcgtgttcagctcctag

SEQ ID NO: 3243727 - DNA, 25 bp, Homo sapien
tgctcctgtctgcagacgggccatc

SEQ ID NO: 3243728 - DNA, 25 bp, Homo sapien
agttccttgagatgtcccagtgggt

SEQ ID NO: 3243729 - DNA, 25 bp, Homo sapien
cagttccttgagatgtcccagtggg

SEQ ID NO: 3243730 - DNA, 25 bp, Homo sapien
gctgcagttccttgagatgtcccag

SEQ ID NO: 3243731 - DNA, 25 bp, Homo sapien
tgcagttccttgagatgtcccagtg

SEQ ID NO: 3243732 - DNA, 25 bp, Homo sapien
cagcttttactagccgtttgcttgg

SEQ ID NO: 3243733 - DNA, 25 bp, Homo sapien
catggtgttagcagcttttactagc

SEQ ID NO: 3243734 - DNA, 25 bp, Homo sapien
accacgatgccttctccccatggct

SEQ ID NO: 3243735 - DNA, 25 bp, Homo sapien
tggaaaacagtctccgatctgcact

SEQ ID NO: 3243736 - DNA, 25 bp, Homo sapien
ctgttaccagtgtgtcgcttggaat

SEQ ID NO: 3243737 - DNA, 25 bp, Homo sapien
cagtgtgtcgcttggaatgtcttct

SEQ ID NO: 3243738 - DNA, 25 bp, Homo sapien
aatgtcttctattaggcatttctcc

SEQ ID NO: 3243739 - DNA, 25 bp, Homo sapien
ttaccagtgtgtcgcttggaatgtc

SEQ ID NO: 3243740 - DNA, 25 bp, Homo sapien
ctgcgtggaaataaaaggcagttga

SEQ ID NO: 3243741 - DNA, 25 bp, Homo sapien
atttctgttgcttgagccacttctg

SEQ ID NO: 3243742 - DNA, 25 bp, Homo sapien
gccacttctgataatactttctttg

SEQ ID NO: 3243743 - DNA, 25 bp, Homo sapien
gcgtggaaataaaaggcagttgaaa

SEQ ID NO: 3243744 - DNA, 25 bp, Homo sapien
tttgttccctaacagccgccatgta

SEQ ID NO: 3243745 - DNA, 25 bp, Homo sapien
gctagagttgctgctgagtgcctcc

SEQ ID NO: 3243746 - DNA, 25 bp, Homo sapien
gactcgggctcagactttaagctag

SEQ ID NO: 3243747 - DNA, 25 bp, Homo sapien
tctgcctggcagttttgacatccac

SEQ ID NO: 3243748 - DNA, 25 bp, Homo sapien
attggagtcaactttaagtcaccag

SEQ ID NO: 3243749 - DNA, 25 bp, Homo sapien
catccaggccatgttgttccatgta

SEQ ID NO: 3243750 - DNA, 25 bp, Homo sapien
tgaaatccactgtttagtgtagccg

SEQ ID NO: 3243751 - DNA, 25 bp, Homo sapien
ccatgtatagagcataagtggagga

SEQ ID NO: 3243752 - DNA, 25 bp, Homo sapien
tgtgctcgttgcctgattttgattg

SEQ ID NO: 3243753 - DNA, 25 bp, Homo sapien
actctgctgctagccaagctcacag

SEQ ID NO: 3243754 - DNA, 25 bp, Homo sapien
actgggaaagctcctgaggagagaa

SEQ ID NO: 3243755 - DNA, 25 bp, Homo sapien
ttcctatatcacagggcattgctgg

SEQ ID NO: 3243756 - DNA, 25 bp, Homo sapien
tgggcagtaaatgttctggccccaa

SEQ ID NO: 3243757 - DNA, 25 bp, Homo sapien
ccaaagtgacgcctgtcctacccca

SEQ ID NO: 3243758 - DNA, 25 bp, Homo sapien
tctggccccaaagtgacgcctgtcc

SEQ ID NO: 3243759 - DNA, 25 bp, Homo sapien
gggcagtaaatgttctggccccaaa

SEQ ID NO: 3243760 - DNA, 25 bp, Homo sapien
ccagtcactgggagaggactgaaga

SEQ ID NO: 3243761 - DNA, 25 bp, Homo sapien
gggatggcgtgcagggtggtgggag

SEQ ID NO: 3243762 - DNA, 25 bp, Homo sapien
taccaggcctcggtgagagaagtga

SEQ ID NO: 3243763 - DNA, 25 bp, Homo sapien
cttagacagttacgaggaagggtcg

SEQ ID NO: 3243764 - DNA, 25 bp, Homo sapien
aatgtgtgtccccaattagcgcaca

SEQ ID NO: 3243765 - DNA, 25 bp, Homo sapien
tcatggccctgacggcagcaccagg

SEQ ID NO: 3243766 - DNA, 25 bp, Homo sapien
accaggcgccttctgaatgtgtgtc

SEQ ID NO: 3243767 - DNA, 25 bp, Homo sapien
acacacagagcacgtgcctcatggc

SEQ ID NO: 3243768 - DNA, 25 bp, Homo sapien
ttcaaacgcagagagatccataaca

SEQ ID NO: 3243769 - DNA, 25 bp, Homo sapien
tagtctttattcaaacgcagagaga

SEQ ID NO: 3243770 - DNA, 25 bp, Homo sapien
aaacgcagagagatccataacatgg

SEQ ID NO: 3243771 - DNA, 25 bp, Homo sapien
tttattcaaacgcagagagatccat

SEQ ID NO: 3243772 - DNA, 25 bp, Homo sapien
gaggtatctgcaaccacgtgggagc

SEQ ID NO: 3243773 - DNA, 25 bp, Homo sapien
taatttagagtagctggagccttgg

SEQ ID NO: 3243774 - DNA, 25 bp, Homo sapien
gcccctggacgatgaaggacaatct

SEQ ID NO: 3243775 - DNA, 25 bp, Homo sapien
ccttcagtgcagagatggtcggcgc

SEQ ID NO: 3243776 - DNA, 25 bp, Homo sapien
tagcgagtcctgctcttggtcccga

SEQ ID NO: 3243777 - DNA, 25 bp, Homo sapien
acctcgcagtccagcggcgtttctg

SEQ ID NO: 3243778 - DNA, 25 bp, Homo sapien
ttagacgcagttatcagggacgcac

SEQ ID NO: 3243779 - DNA, 25 bp, Homo sapien
gctcccgttgttggcgggctggacc

SEQ ID NO: 3243780 - DNA, 25 bp, Homo sapien
tttctacgtaagagccggagctgcc

SEQ ID NO: 3243781 - DNA, 25 bp, Homo sapien
tgggatggcaccatagcaacctcgg

SEQ ID NO: 3243782 - DNA, 25 bp, Homo sapien
tcggacacaacctagggactggagt

SEQ ID NO: 3243783 - DNA, 25 bp, Homo sapien
gaagaggcgcttcgtacaaacggaa

SEQ ID NO: 3243784 - DNA, 25 bp, Homo sapien
ggactcagaccttttcagtatcgtt

SEQ ID NO: 3243785 - DNA, 25 bp, Homo sapien
ggtggtggaactcccacatcgtggc

SEQ ID NO: 3243786 - DNA, 25 bp, Homo sapien
cacctgattagctgtcttgcgggac

SEQ ID NO: 3243787 - DNA, 25 bp, Homo sapien
tacatttacccgaataacagacagg

SEQ ID NO: 3243788 - DNA, 25 bp, Homo sapien
agtcagcaagggctcggctctcctc

SEQ ID NO: 3243789 - DNA, 25 bp, Homo sapien
agggctcggctctcctcacaaatct

SEQ ID NO: 3243790 - DNA, 25 bp, Homo sapien
tctgccgtgcacgggaggacagtca

SEQ ID NO: 3243791 - DNA, 25 bp, Homo sapien
ccgtgcacgggaggacagtcagcaa

SEQ ID NO: 3243792 - DNA, 25 bp, Homo sapien
gagtggagaagggggtcaatgtgca

SEQ ID NO: 3243793 - DNA, 25 bp, Homo sapien
tggagaagggggtcaatgtgcaggt

SEQ ID NO: 3243794 - DNA, 25 bp, Homo sapien
aggtgcagtgcctggactggtctgg

SEQ ID NO: 3243795 - DNA, 25 bp, Homo sapien
aagggggtcaatgtgcaggtgcagt

SEQ ID NO: 3243796 - DNA, 25 bp, Homo sapien
ggcttgcaaagaccttgggcgctga

SEQ ID NO: 3243797 - DNA, 25 bp, Homo sapien
gcactggtgtagaagccagagagcc

SEQ ID NO: 3243798 - DNA, 25 bp, Homo sapien
tgcaaagaccttgggcgctgaggct

SEQ ID NO: 3243799 - DNA, 25 bp, Homo sapien
cactggtgtagaagccagagagcca

SEQ ID NO: 3243800 - DNA, 25 bp, Homo sapien
ttcctgactgaaaccgaggtggtgg

SEQ ID NO: 3243801 - DNA, 25 bp, Homo sapien
cagtgcctgttctacagcgagggcc

SEQ ID NO: 3243802 - DNA, 25 bp, Homo sapien
tcgggaagccagaagtcacaggaga

SEQ ID NO: 3243803 - DNA, 25 bp, Homo sapien
tcagagctcatagcacagtctctcc

SEQ ID NO: 3243804 - DNA, 25 bp, Homo sapien
tggcacgtctgcctgttgggtaagt

SEQ ID NO: 3243805 - DNA, 25 bp, Homo sapien
tggctcggggacatctgcttggaat

SEQ ID NO: 3243806 - DNA, 25 bp, Homo sapien
agaccagttgcacaccacgaacagt

SEQ ID NO: 3243807 - DNA, 25 bp, Homo sapien
ggcatccgcgtggacaaatgagtga

SEQ ID NO: 3243808 - DNA, 25 bp, Homo sapien
tgctgctcctcaagacgacatctgt

SEQ ID NO: 3243809 - DNA, 25 bp, Homo sapien
cccaaatgaggagggacccaggact

SEQ ID NO: 3243810 - DNA, 25 bp, Homo sapien
caggactgggcacagtctctgtctg

SEQ ID NO: 3243811 - DNA, 25 bp, Homo sapien
ttccagggacggctgacagtaagct

SEQ ID NO: 3243812 - DNA, 25 bp, Homo sapien
aaagtctgaagtccgctgttgtctg

SEQ ID NO: 3243813 - DNA, 25 bp, Homo sapien
tcctcctcgggaaagtctgaagtcc

SEQ ID NO: 3243814 - DNA, 25 bp, Homo sapien
ctccagttcctcctcgggaaagtct

SEQ ID NO: 3243815 - DNA, 25 bp, Homo sapien
tcgggaaagtctgaagtccgctgtt

SEQ ID NO: 3243816 - DNA, 25 bp, Homo sapien
tacgcactacgaatccctacttgga

SEQ ID NO: 3243817 - DNA, 25 bp, Homo sapien
aaatcttctaggcaccatcttgcag

SEQ ID NO: 3243818 - DNA, 25 bp, Homo sapien
gctgtgtgtcccatgtgacctgtat

SEQ ID NO: 3243819 - DNA, 25 bp, Homo sapien
tcacctgtgggtgcgtgtctgacag

SEQ ID NO: 3243820 - DNA, 25 bp, Homo sapien
ggctctgtcgcagccgcaccagtgt

SEQ ID NO: 3243821 - DNA, 25 bp, Homo sapien
aaggagttggccgggtggctgggag

SEQ ID NO: 3243822 - DNA, 25 bp, Homo sapien
ccttcagccgcgggtagtagaagga

SEQ ID NO: 3243823 - DNA, 25 bp, Homo sapien
accagtgtcaccctggcgatgggag

SEQ ID NO: 3243824 - DNA, 25 bp, Homo sapien
tctggtatgcgtatggcctcactgg

SEQ ID NO: 3243825 - DNA, 25 bp, Homo sapien
ttccacacaaaagccgcaagcggct

SEQ ID NO: 3243826 - DNA, 25 bp, Homo sapien
catcccacggaacacgggctggaaa

SEQ ID NO: 3243827 - DNA, 25 bp, Homo sapien
tgctggcgctagaagcagagcctct

SEQ ID NO: 3243828 - DNA, 25 bp, Homo sapien
tccccgtcgcacaggtccaggctgt

SEQ ID NO: 3243829 - DNA, 25 bp, Homo sapien
ggcacgatgcgcaccacaaacgaga

SEQ ID NO: 3243830 - DNA, 25 bp, Homo sapien
cccacgaaccagtcggggctgggca

SEQ ID NO: 3243831 - DNA, 25 bp, Homo sapien
ctcggtcaccgtgtcctgcgggatg

SEQ ID NO: 3243832 - DNA, 25 bp, Homo sapien
cggcgacagcggctcagcgcgcctg

SEQ ID NO: 3243833 - DNA, 25 bp, Homo sapien
gcgacagcggctcagcgcgcctggc

SEQ ID NO: 3243834 - DNA, 25 bp, Homo sapien
ggcgacagcggctcagcgcgcctgg

SEQ ID NO: 3243835 - DNA, 25 bp, Homo sapien
gcggcgacagcggctcagcgcgcct

SEQ ID NO: 3243836 - DNA, 25 bp, Homo sapien
ccacatgctgtagtcggagctatgc

SEQ ID NO: 3243837 - DNA, 25 bp, Homo sapien
ttactgacgtactggttcttcctcc

SEQ ID NO: 3243838 - DNA, 25 bp, Homo sapien
tcgatctccttcatcagcgcccagg

SEQ ID NO: 3243839 - DNA, 25 bp, Homo sapien
gcaaagtcgcgcagcccgttactga

SEQ ID NO: 3243840 - DNA, 25 bp, Homo sapien
gtcagcacgccccagactgggaagc

SEQ ID NO: 3243841 - DNA, 25 bp, Homo sapien
ggtgttagagtctcccgacgtcagc

SEQ ID NO: 3243842 - DNA, 25 bp, Homo sapien
catggtcagacactgcggtcgggct

SEQ ID NO: 3243843 - DNA, 25 bp, Homo sapien
gtcggaccgtgacaccctgtggctg

SEQ ID NO: 3243844 - DNA, 25 bp, Homo sapien
tccacttgcccgtgaaggtgatgct

SEQ ID NO: 3243845 - DNA, 25 bp, Homo sapien
tgatgctgtatttggccagggctct

SEQ ID NO: 3243846 - DNA, 25 bp, Homo sapien
tctggcggaacagatggactctccc

SEQ ID NO: 3243847 - DNA, 25 bp, Homo sapien
cagcagcgaagaccactgcgcaggg

SEQ ID NO: 3243848 - DNA, 25 bp, Homo sapien
gctcctatttaagcccgaggccggc

SEQ ID NO: 3243849 - DNA, 25 bp, Homo sapien
tgtcttcgatgctgcacggcctggc

SEQ ID NO: 3243850 - DNA, 25 bp, Homo sapien
gggccggccaatgaggctccagttc

SEQ ID NO: 3243851 - DNA, 25 bp, Homo sapien
ccagcgagaggcagataggacgtgg

SEQ ID NO: 3243852 - DNA, 25 bp, Homo sapien
tgttttcaccttctcgaaattagag

SEQ ID NO: 3243853 - DNA, 25 bp, Homo sapien
tagagccagcgtgctacaccttctt

SEQ ID NO: 3243854 - DNA, 25 bp, Homo sapien
aagcctttcgggaaagctcagggcg

SEQ ID NO: 3243855 - DNA, 25 bp, Homo sapien
ggtgcctccctaggtgccactgagg

SEQ ID NO: 3243856 - DNA, 25 bp, Homo sapien
aatgatctaacctgtattttaagcg

SEQ ID NO: 3243857 - DNA, 25 bp, Homo sapien
cagccactcaatgcagtatttagac

SEQ ID NO: 3243858 - DNA, 25 bp, Homo sapien
tagaagcaactaggacagaatgcaa

SEQ ID NO: 3243859 - DNA, 25 bp, Homo sapien
ttaagcgaaaaccacagatcagcca

SEQ ID NO: 3243860 - DNA, 25 bp, Homo sapien
tctcaactagtcaggagactgtgtc

SEQ ID NO: 3243861 - DNA, 25 bp, Homo sapien
ctgtggtctcaactagtcaggagac

SEQ ID NO: 3243862 - DNA, 25 bp, Homo sapien
tggtctcaactagtcaggagactgt

SEQ ID NO: 3243863 - DNA, 25 bp, Homo sapien
tcaactagtcaggagactgtgtctg

SEQ ID NO: 3243864 - DNA, 25 bp, Homo sapien
ggattcccatatcggctccagcact

SEQ ID NO: 3243865 - DNA, 25 bp, Homo sapien
aaacccgcctgagaaaagtggcgtg

SEQ ID NO: 3243866 - DNA, 25 bp, Homo sapien
tattgtccggcttagtggaagctgg

SEQ ID NO: 3243867 - DNA, 25 bp, Homo sapien
tgttaccagccttgtcaggtgcctg

SEQ ID NO: 3243868 - DNA, 25 bp, Homo sapien
catgcaatgggcttcgatctcatca

SEQ ID NO: 3243869 - DNA, 25 bp, Homo sapien
ggacaatcctcgctttctggacagc

SEQ ID NO: 3243870 - DNA, 25 bp, Homo sapien
catggcaaagctactggctctgggt

SEQ ID NO: 3243871 - DNA, 25 bp, Homo sapien
tctggacagcttcctcggctgaaag

SEQ ID NO: 3243872 - DNA, 25 bp, Homo sapien
ccagtctcacaggaggccaaggagg

SEQ ID NO: 3243873 - DNA, 25 bp, Homo sapien
caggagctgttctcccagcccggcc

SEQ ID NO: 3243874 - DNA, 25 bp, Homo sapien
gcagcaggagctgttctcccagccc

SEQ ID NO: 3243875 - DNA, 25 bp, Homo sapien
gccaaggaggctgcggaacagccca

SEQ ID NO: 3243876 - DNA, 25 bp, Homo sapien
gagctgcggccagactttgggcaca

SEQ ID NO: 3243877 - DNA, 25 bp, Homo sapien
tgcagccacaagctttgaagtggcc

SEQ ID NO: 3243878 - DNA, 25 bp, Homo sapien
caagctttgaagtggccttgccaga

SEQ ID NO: 3243879 - DNA, 25 bp, Homo sapien
agaggccccacaggacgtctccggg

SEQ ID NO: 3243880 - DNA, 25 bp, Homo sapien
gaacctctcatctataccgtggaag

SEQ ID NO: 3243881 - DNA, 25 bp, Homo sapien
aggccacgtgttccagggtcagaga

SEQ ID NO: 3243882 - DNA, 25 bp, Homo sapien
tctttaacgtctcttactgggcaca

SEQ ID NO: 3243883 - DNA, 25 bp, Homo sapien
tgtgaaccacgaagcacatcgatgg

SEQ ID NO: 3243884 - DNA, 25 bp, Homo sapien
ccagaagtgtcaccggtaagcgcga

SEQ ID NO: 3243885 - DNA, 25 bp, Homo sapien
taagcgcgacagcagacactagaag

SEQ ID NO: 3243886 - DNA, 25 bp, Homo sapien
ctaaactcggaaagccaacaggacg

SEQ ID NO: 3243887 - DNA, 25 bp, Homo sapien
gtccaaacatgggagctaaactcgg

SEQ ID NO: 3243888 - DNA, 25 bp, Homo sapien
tattggctgcaaagaaaacctcaag

SEQ ID NO: 3243889 - DNA, 25 bp, Homo sapien
gaacgtgcactctctgaaaagccga

SEQ ID NO: 3243890 - DNA, 25 bp, Homo sapien
gaaacagagcttccaaacgttccga

SEQ ID NO: 3243891 - DNA, 25 bp, Homo sapien
tatcgaggactcagctaatgcagcg

SEQ ID NO: 3243892 - DNA, 25 bp, Homo sapien
cagcatcgtgttatggccaagcaga

SEQ ID NO: 3243893 - DNA, 25 bp, Homo sapien
caatgcagcatcagcggattctaca

SEQ ID NO: 3243894 - DNA, 25 bp, Homo sapien
gacgatgacctcaccttccatggaa

SEQ ID NO: 3243895 - DNA, 25 bp, Homo sapien
gaatgactctggatgagcggcacca

SEQ ID NO: 3243896 - DNA, 25 bp, Homo sapien
gattgtaaacctagttatgcctctg

SEQ ID NO: 3243897 - DNA, 25 bp, Homo sapien
ttgtaaacctagttatgcctctgct

SEQ ID NO: 3243898 - DNA, 25 bp, Homo sapien
catgattgtaaacctagttatgcct

SEQ ID NO: 3243899 - DNA, 25 bp, Homo sapien
gacatgattgtaaacctagttatgc

SEQ ID NO: 3243900 - DNA, 25 bp, Homo sapien
tgaaggttaggatgctgtatggagc

SEQ ID NO: 3243901 - DNA, 25 bp, Homo sapien
taggatgctgtatggagcagctccg

SEQ ID NO: 3243902 - DNA, 25 bp, Homo sapien
gagctcgacagaggcgtcatttctc

SEQ ID NO: 3243903 - DNA, 25 bp, Homo sapien
ggtggctgagaatagctgggtgtgc

SEQ ID NO: 3243904 - DNA, 25 bp, Homo sapien
gaaatcacctccagttattccagga

SEQ ID NO: 3243905 - DNA, 25 bp, Homo sapien
caaaagcctccgacaatttggcgag

SEQ ID NO: 3243906 - DNA, 25 bp, Homo sapien
ccggagctggcaggaacagtgtctc

SEQ ID NO: 3243907 - DNA, 25 bp, Homo sapien
ggttctactgggtgcagaaatgccc

SEQ ID NO: 3243908 - DNA, 25 bp, Homo sapien
tccaatcccggctgctagttaccag

SEQ ID NO: 3243909 - DNA, 25 bp, Homo sapien
ttgatggttgtgtccgcccggtggg

SEQ ID NO: 3243910 - DNA, 25 bp, Homo sapien
cagacgggcagccacatcgcgtctg

SEQ ID NO: 3243911 - DNA, 25 bp, Homo sapien
gggtgagaaacgcttccctgtccac

SEQ ID NO: 3243912 - DNA, 25 bp, Homo sapien
acggacagttgagaaggcgtccagc

SEQ ID NO: 3243913 - DNA, 25 bp, Homo sapien
aggcaggctccacggacagttgaga

SEQ ID NO: 3243914 - DNA, 25 bp, Homo sapien
tccacggacagttgagaaggcgtcc

SEQ ID NO: 3243915 - DNA, 25 bp, Homo sapien
caggctccacggacagttgagaagg

SEQ ID NO: 3243916 - DNA, 25 bp, Homo sapien
ctgcagaacggagtccaggacccag

SEQ ID NO: 3243917 - DNA, 25 bp, Homo sapien
ttcaggggtgagcagggtgggtcgg

SEQ ID NO: 3243918 - DNA, 25 bp, Homo sapien
gtccaggacccagagaagcttcagg

SEQ ID NO: 3243919 - DNA, 25 bp, Homo sapien
gagtccaggacccagagaagcttca

SEQ ID NO: 3243920 - DNA, 25 bp, Homo sapien
tctgcctccaggatgttatggatct

SEQ ID NO: 3243921 - DNA, 25 bp, Homo sapien
acaggaggtgcaggctaagcgagga

SEQ ID NO: 3243922 - DNA, 25 bp, Homo sapien
gctgagccgccctggtgtcagagca

SEQ ID NO: 3243923 - DNA, 25 bp, Homo sapien
cagggaacgtgtaaaccatgagctc

SEQ ID NO: 3243924 - DNA, 25 bp, Homo sapien
aggtgtggacgaccctcacaactct

SEQ ID NO: 3243925 - DNA, 25 bp, Homo sapien
tcacaactctcccatctgcgtggac

SEQ ID NO: 3243926 - DNA, 25 bp, Homo sapien
aggccaggtgtggacgaccctcaca

SEQ ID NO: 3243927 - DNA, 25 bp, Homo sapien
ccaggtgtggacgaccctcacaact

SEQ ID NO: 3243928 - DNA, 25 bp, Homo sapien
tggactgttcccaccatacctggtc

SEQ ID NO: 3243929 - DNA, 25 bp, Homo sapien
tacgccagggccttctagacggttc

SEQ ID NO: 3243930 - DNA, 25 bp, Homo sapien
cccgcagtatgtgggcagtgacaaa

SEQ ID NO: 3243931 - DNA, 25 bp, Homo sapien
tctgttgcagcagacctgtacgcca

SEQ ID NO: 3243932 - DNA, 25 bp, Homo sapien
acttccaagccccttgctcgcttcc

SEQ ID NO: 3243933 - DNA, 25 bp, Homo sapien
gagtgtcccggccgtgagtccccag

SEQ ID NO: 3243934 - DNA, 25 bp, Homo sapien
aagccccttgctcgcttccctgaag

SEQ ID NO: 3243935 - DNA, 25 bp, Homo sapien
tgagtgtcccggccgtgagtcccca

SEQ ID NO: 3243936 - DNA, 25 bp, Homo sapien
tgtggtcagcaatgcaggcaggtgt

SEQ ID NO: 3243937 - DNA, 25 bp, Homo sapien
agcaatgcaggcaggtgtttgtgat

SEQ ID NO: 3243938 - DNA, 25 bp, Homo sapien
gtcagcaatgcaggcaggtgtttgt

SEQ ID NO: 3243939 - DNA, 25 bp, Homo sapien
tggtcagcaatgcaggcaggtgttt

SEQ ID NO: 3243940 - DNA, 25 bp, Homo sapien
gacgtcctgtgcctgttagcaaccg

SEQ ID NO: 3243941 - DNA, 25 bp, Homo sapien
gaggccacaacagaacatcagacag

SEQ ID NO: 3243942 - DNA, 25 bp, Homo sapien
cggtgctgccttcttgagccgtggc

SEQ ID NO: 3243943 - DNA, 25 bp, Homo sapien
ccgccacggtttgagtgaggccaca

SEQ ID NO: 3243944 - DNA, 25 bp, Homo sapien
gcagagaaatgctactgtgtgaccc

SEQ ID NO: 3243945 - DNA, 25 bp, Homo sapien
tagcacactggtttttcactacctt

SEQ ID NO: 3243946 - DNA, 25 bp, Homo sapien
tattgctgagctgtgagagttcttt

SEQ ID NO: 3243947 - DNA, 25 bp, Homo sapien
cctggagccgatacacatcctttct

SEQ ID NO: 3243948 - DNA, 25 bp, Homo sapien
tgcagcctccggtgtgtgttaaaac

SEQ ID NO: 3243949 - DNA, 25 bp, Homo sapien
tataacaggtatagatgtgcccgcc

SEQ ID NO: 3243950 - DNA, 25 bp, Homo sapien
gtgcccgccgtttgctcctagaaat

SEQ ID NO: 3243951 - DNA, 25 bp, Homo sapien
gcattgttactgtgagcgacccacg

SEQ ID NO: 3243952 - DNA, 25 bp, Homo sapien
gcctgtccctgtggctaaggcggaa

SEQ ID NO: 3243953 - DNA, 25 bp, Homo sapien
gtaacgctgaccagactttgcacag

SEQ ID NO: 3243954 - DNA, 25 bp, Homo sapien
tctatgaggagtcgcagcaggctgt

SEQ ID NO: 3243955 - DNA, 25 bp, Homo sapien
agagcctctctccagccgtgtgcat

SEQ ID NO: 3243956 - DNA, 25 bp, Homo sapien
ctgggggcacatggacaggaactgg

SEQ ID NO: 3243957 - DNA, 25 bp, Homo sapien
catgtccacatctttactagaactg

SEQ ID NO: 3243958 - DNA, 25 bp, Homo sapien
ttactagaactgcagctggcatccg

SEQ ID NO: 3243959 - DNA, 25 bp, Homo sapien
aactgcagctggcatccgtggagct

SEQ ID NO: 3243960 - DNA, 25 bp, Homo sapien
ctggcatccgtggagctgtgggctt

SEQ ID NO: 3243961 - DNA, 25 bp, Homo sapien
cacccggctgcagcccccagctccc

SEQ ID NO: 3243962 - DNA, 25 bp, Homo sapien
ctgcagcccccagctcccctgggct

SEQ ID NO: 3243963 - DNA, 25 bp, Homo sapien
cagcccccagctcccctgggctgac

SEQ ID NO: 3243964 - DNA, 25 bp, Homo sapien
ccacccggctgcagcccccagctcc

SEQ ID NO: 3243965 - DNA, 25 bp, Homo sapien
cgtgggcctaggccgagctgaaggg

SEQ ID NO: 3243966 - DNA, 25 bp, Homo sapien
gcagcccaggttgtggggccagagg

SEQ ID NO: 3243967 - DNA, 25 bp, Homo sapien
ggcctaggccgagctgaaggggctg

SEQ ID NO: 3243968 - DNA, 25 bp, Homo sapien
cagcccaggttgtggggccagaggg

SEQ ID NO: 3243969 - DNA, 25 bp, Homo sapien
tgctgctgagaacctgctgtctggg

SEQ ID NO: 3243970 - DNA, 25 bp, Homo sapien
gggccccgccaggtgtgactgccca

SEQ ID NO: 3243971 - DNA, 25 bp, Homo sapien
ctgctgagaacctgctgtctgggca

SEQ ID NO: 3243972 - DNA, 25 bp, Homo sapien
agggctgctgctgagaacctgctgt

SEQ ID NO: 3243973 - DNA, 25 bp, Homo sapien
ctgcacagagggggtggaggccgga

SEQ ID NO: 3243974 - DNA, 25 bp, Homo sapien
cacagagggggtggaggccggaggc

SEQ ID NO: 3243975 - DNA, 25 bp, Homo sapien
cagagggggtggaggccggaggcct

SEQ ID NO: 3243976 - DNA, 25 bp, Homo sapien
gggtggaggccggaggcctagacgc

SEQ ID NO: 3243977 - DNA, 25 bp, Homo sapien
gggagcgggtcaggccgcgagaggc

SEQ ID NO: 3243978 - DNA, 25 bp, Homo sapien
atgccaaggggagcgggtcaggccg

SEQ ID NO: 3243979 - DNA, 25 bp, Homo sapien
cctggtgcttgatgccaaggggagc

SEQ ID NO: 3243980 - DNA, 25 bp, Homo sapien
gcttgatgccaaggggagcgggtca

SEQ ID NO: 3243981 - DNA, 25 bp, Homo sapien
cggtctttaccagccgggtgccagt

SEQ ID NO: 3243982 - DNA, 25 bp, Homo sapien
cagccgggtgccagtggctgggacc

SEQ ID NO: 3243983 - DNA, 25 bp, Homo sapien
tggtcactcccacggtctttaccag

SEQ ID NO: 3243984 - DNA, 25 bp, Homo sapien
ctggtcactcccacggtctttacca

SEQ ID NO: 3243985 - DNA, 25 bp, Homo sapien
tggaatcgcgtgagcaggccagacc

SEQ ID NO: 3243986 - DNA, 25 bp, Homo sapien
gtggaatcgcgtgagcaggccagac

SEQ ID NO: 3243987 - DNA, 25 bp, Homo sapien
ctgtggaatcgcgtgagcaggccag

SEQ ID NO: 3243988 - DNA, 25 bp, Homo sapien
tgtggaatcgcgtgagcaggccaga

SEQ ID NO: 3243989 - DNA, 25 bp, Homo sapien
cataaatgagttgggactctgctga

SEQ ID NO: 3243990 - DNA, 25 bp, Homo sapien
tgcagccccttctcataaatgagtt

SEQ ID NO: 3243991 - DNA, 25 bp, Homo sapien
tcctcgtactacctggacccgctgc

SEQ ID NO: 3243992 - DNA, 25 bp, Homo sapien
gcatggaccacgcttccaaaagcag

SEQ ID NO: 3243993 - DNA, 25 bp, Homo sapien
tcatacaaatggttacagtcacaaa

SEQ ID NO: 3243994 - DNA, 25 bp, Homo sapien
tacaaatggttacagtcacaaacat

SEQ ID NO: 3243995 - DNA, 25 bp, Homo sapien
aatggttacagtcacaaacatgatt

SEQ ID NO: 3243996 - DNA, 25 bp, Homo sapien
ataattcatacaaatggttacagtc

SEQ ID NO: 3243997 - DNA, 25 bp, Homo sapien
gacggcactggtgcaggcggggacg

SEQ ID NO: 3243998 - DNA, 25 bp, Homo sapien
cggcactggtgcaggcggggacgct

SEQ ID NO: 3243999 - DNA, 25 bp, Homo sapien
aggacggcactggtgcaggcgggga

SEQ ID NO: 3244000 - DNA, 25 bp, Homo sapien
caggacggcactggtgcaggcgggg

SEQ ID NO: 3244001 - DNA, 25 bp, Homo sapien
gacgtcgatgggcagcgggcacgct

SEQ ID NO: 3244002 - DNA, 25 bp, Homo sapien
cttttggagctgcttcgtgatgccg

SEQ ID NO: 3244003 - DNA, 25 bp, Homo sapien
tgtacacagacaagaacgttcatgg

SEQ ID NO: 3244004 - DNA, 25 bp, Homo sapien
tcattgtcctgagaagtttgccaac

SEQ ID NO: 3244005 - DNA, 25 bp, Homo sapien
tgttgacagctaagcaaacagatcc

SEQ ID NO: 3244006 - DNA, 25 bp, Homo sapien
tcttctgcttaacgaggaacgcgaa

SEQ ID NO: 3244007 - DNA, 25 bp, Homo sapien
cgggcttgacggtttggccaggaga

SEQ ID NO: 3244008 - DNA, 25 bp, Homo sapien
tggcgtggtctctatccgcctcggg

SEQ ID NO: 3244009 - DNA, 25 bp, Homo sapien
ggcgtggtctctatccgcctcgggc

SEQ ID NO: 3244010 - DNA, 25 bp, Homo sapien
cgcctcgggcttgacggtttggcca

SEQ ID NO: 3244011 - DNA, 25 bp, Homo sapien
atgccagtgggggccacgcccacca

SEQ ID NO: 3244012 - DNA, 25 bp, Homo sapien
gatgccagtgggggccacgcccacc

SEQ ID NO: 3244013 - DNA, 25 bp, Homo sapien
tgccagtgggggccacgcccaccac

SEQ ID NO: 3244014 - DNA, 25 bp, Homo sapien
gtccatccgtgaggcccacctgtag

SEQ ID NO: 3244015 - DNA, 25 bp, Homo sapien
cgtgaggcccacctgtaggcggcct

SEQ ID NO: 3244016 - DNA, 25 bp, Homo sapien
ctgggagagggtccatccgtgaggc

SEQ ID NO: 3244017 - DNA, 25 bp, Homo sapien
ctcctagcatcggcagcaccgaggg

SEQ ID NO: 3244018 - DNA, 25 bp, Homo sapien
gtcagtcagtggagacgccgcccct

SEQ ID NO: 3244019 - DNA, 25 bp, Homo sapien
tccaggtcagtcagtggagacgccg

SEQ ID NO: 3244020 - DNA, 25 bp, Homo sapien
tggccttaccaattctacccagatc

SEQ ID NO: 3244021 - DNA, 25 bp, Homo sapien
catgggcctttcaggtgaggttggc

SEQ ID NO: 3244022 - DNA, 25 bp, Homo sapien
tggcggctgtcagatggtccttgtt

SEQ ID NO: 3244023 - DNA, 25 bp, Homo sapien
tgtcagatggtccttgttgacacag

SEQ ID NO: 3244024 - DNA, 25 bp, Homo sapien
tcagggtgcacgacggcggggtcca

SEQ ID NO: 3244025 - DNA, 25 bp, Homo sapien
gatggtccttgttgacacagttctt

SEQ ID NO: 3244026 - DNA, 25 bp, Homo sapien
cggatgcgagcccatgagcatctgg

SEQ ID NO: 3244027 - DNA, 25 bp, Homo sapien
caaggcacggcagggtcctgtctct

SEQ ID NO: 3244028 - DNA, 25 bp, Homo sapien
gacacgggcagcaggattcttggca

SEQ ID NO: 3244029 - DNA, 25 bp, Homo sapien
tcctgtgtgtaagacacgacgccag

SEQ ID NO: 3244030 - DNA, 25 bp, Homo sapien
tgtgatggctctgcggatctcccgt

SEQ ID NO: 3244031 - DNA, 25 bp, Homo sapien
atgaggttgggtgcatccttcagag

SEQ ID NO: 3244032 - DNA, 25 bp, Homo sapien
gcctcctctcgcatctcgatggatg

SEQ ID NO: 3244033 - DNA, 25 bp, Homo sapien
tgctcgctgtaccatgcagcatggg

SEQ ID NO: 3244034 - DNA, 25 bp, Homo sapien
ctgcctgggaaccacagaccccacg

SEQ ID NO: 3244035 - DNA, 25 bp, Homo sapien
tggtcagtgcagcctgagtgctgtg

SEQ ID NO: 3244036 - DNA, 25 bp, Homo sapien
ccctgcctgggaaccacagacccca

SEQ ID NO: 3244037 - DNA, 25 bp, Homo sapien
gtcagtgcagcctgagtgctgtggc

SEQ ID NO: 3244038 - DNA, 25 bp, Homo sapien
ggtctggacgggatgccatgactcc

SEQ ID NO: 3244039 - DNA, 25 bp, Homo sapien
gtacaggcaagtgtccggcctggca

SEQ ID NO: 3244040 - DNA, 25 bp, Homo sapien
tcaaggccggcaggatggtggacag

SEQ ID NO: 3244041 - DNA, 25 bp, Homo sapien
tgctggccagcgagaggcctgagta

SEQ ID NO: 3244042 - DNA, 25 bp, Homo sapien
ctgaagggttccgactcgtgcacat

SEQ ID NO: 3244043 - DNA, 25 bp, Homo sapien
gttccgactcgtgcacatccagggc

SEQ ID NO: 3244044 - DNA, 25 bp, Homo sapien
cgcgccgcggatccggccctccttc

SEQ ID NO: 3244045 - DNA, 25 bp, Homo sapien
agggttccgactcgtgcacatccag

SEQ ID NO: 3244046 - DNA, 25 bp, Homo sapien
tccagctgcagatgtcagaggccga

SEQ ID NO: 3244047 - DNA, 25 bp, Homo sapien
gcacagcccgttccagctgcagatg

SEQ ID NO: 3244048 - DNA, 25 bp, Homo sapien
tgagcacagcccgttccagctgcag

SEQ ID NO: 3244049 - DNA, 25 bp, Homo sapien
ccagctgcagatgtcagaggccgac

SEQ ID NO: 3244050 - DNA, 25 bp, Homo sapien
tgagcacagccctttccagctgcag

SEQ ID NO: 3244051 - DNA, 25 bp, Homo sapien
agccctttccagctgcagatgtcag

SEQ ID NO: 3244052 - DNA, 25 bp, Homo sapien
ccagctgcagatgtcagaggccgac

SEQ ID NO: 3244053 - DNA, 25 bp, Homo sapien
tttccagctgcagatgtcagaggcc

SEQ ID NO: 3244054 - DNA, 25 bp, Homo sapien
ctgagcacagcccgttccagctgca

SEQ ID NO: 3244055 - DNA, 25 bp, Homo sapien
gcacagcccgttccagctgcagatg

SEQ ID NO: 3244056 - DNA, 25 bp, Homo sapien
agcacagcccgttccagctgcagat

SEQ ID NO: 3244057 - DNA, 25 bp, Homo sapien
ccagctgcagatgtgaaacctgaac

SEQ ID NO: 3244058 - DNA, 25 bp, Homo sapien
ggcagcacggaagtcacaagggccg

SEQ ID NO: 3244059 - DNA, 25 bp, Homo sapien
agcacggaagtcacaagggccgacc

SEQ ID NO: 3244060 - DNA, 25 bp, Homo sapien
cacggaagtcacaagggccgaccca

SEQ ID NO: 3244061 - DNA, 25 bp, Homo sapien
gcagcacggaagtcacaagggccga

SEQ ID NO: 3244062 - DNA, 25 bp, Homo sapien
tctgtcttgtccagagagtatttta

SEQ ID NO: 3244063 - DNA, 25 bp, Homo sapien
gggaatttggtgttcaaaggtatga

SEQ ID NO: 3244064 - DNA, 25 bp, Homo sapien
tgttcaaaggtatgaggttctgtct

SEQ ID NO: 3244065 - DNA, 25 bp, Homo sapien
tatgaggttctgtcttgtccagaga

SEQ ID NO: 3244066 - DNA, 25 bp, Homo sapien
ctgccccgcagaagtagagtcctgt

SEQ ID NO: 3244067 - DNA, 25 bp, Homo sapien
cccgcagaagtagagtcctgtgtcc

SEQ ID NO: 3244068 - DNA, 25 bp, Homo sapien
gccccgcagaagtagagtcctgtgt

SEQ ID NO: 3244069 - DNA, 25 bp, Homo sapien
ccgcagaagtagagtcctgtgtccc

SEQ ID NO: 3244070 - DNA, 25 bp, Homo sapien
tgcttgacggtgaagtcgttgatga

SEQ ID NO: 3244071 - DNA, 25 bp, Homo sapien
ttgtgctcgttgaggccgcagtgca

SEQ ID NO: 3244072 - DNA, 25 bp, Homo sapien
gtggtggttgtgctcgttgaggccg

SEQ ID NO: 3244073 - DNA, 25 bp, Homo sapien
ctgcttgacggtgaagtcgttgatg

SEQ ID NO: 3244074 - DNA, 25 bp, Homo sapien
tccacgccatccgacaagtaagggt

SEQ ID NO: 3244075 - DNA, 25 bp, Homo sapien
tcacgcagtcgctgtggaagagcag

SEQ ID NO: 3244076 - DNA, 25 bp, Homo sapien
acaagtaagggtcgtagaagagcac

SEQ ID NO: 3244077 - DNA, 25 bp, Homo sapien
cacgttgaagccgaaggccttggcc

SEQ ID NO: 3244078 - DNA, 25 bp, Homo sapien
gaaagccagggtcggagtggcctct

SEQ ID NO: 3244079 - DNA, 25 bp, Homo sapien
tgtgagacccttgctcacccgtggc

SEQ ID NO: 3244080 - DNA, 25 bp, Homo sapien
gaccatctgccaaggatgacaccag

SEQ ID NO: 3244081 - DNA, 25 bp, Homo sapien
cagctgtggtcaagccaaggtgccc

SEQ ID NO: 3244082 - DNA, 25 bp, Homo sapien
gagcgctccacgtccgctccaacgc

SEQ ID NO: 3244083 - DNA, 25 bp, Homo sapien
tgcacaggggtggaaagggtacact

SEQ ID NO: 3244084 - DNA, 25 bp, Homo sapien
gggtacactagcccctcggcccaca

SEQ ID NO: 3244085 - DNA, 25 bp, Homo sapien
actgccaaggcggaggagatgcaca

SEQ ID NO: 3244086 - DNA, 25 bp, Homo sapien
acacagaaggctgcgtgcccgtgat

SEQ ID NO: 3244087 - DNA, 25 bp, Homo sapien
aactgctgggtcgtatgaaaacaca

SEQ ID NO: 3244088 - DNA, 25 bp, Homo sapien
ccaagagtctggagaagcaaatcgt

SEQ ID NO: 3244089 - DNA, 25 bp, Homo sapien
gcctgctctgtcaacgtgctggtgg

SEQ ID NO: 3244090 - DNA, 25 bp, Homo sapien
gacagtgcatttttcagaaggaagg

SEQ ID NO: 3244091 - DNA, 25 bp, Homo sapien
agacagtgcatttttcagaaggaag

SEQ ID NO: 3244092 - DNA, 25 bp, Homo sapien
aagacagtgcatttttcagaaggaa

SEQ ID NO: 3244093 - DNA, 25 bp, Homo sapien
gagatgtaagtcacgggcaccagag

SEQ ID NO: 3244094 - DNA, 25 bp, Homo sapien
atgtaagtcacgggcaccagagcct

SEQ ID NO: 3244095 - DNA, 25 bp, Homo sapien
taagtcacgggcaccagagcctcgt

SEQ ID NO: 3244096 - DNA, 25 bp, Homo sapien
agatgtaagtcacgggcaccagagc

SEQ ID NO: 3244097 - DNA, 25 bp, Homo sapien
ctgtagccaccacacacgcggattc

SEQ ID NO: 3244098 - DNA, 25 bp, Homo sapien
tgcgccgagtggcaccaacaccgtg

SEQ ID NO: 3244099 - DNA, 25 bp, Homo sapien
ctagtctgcgccgagtggcaccaac

SEQ ID NO: 3244100 - DNA, 25 bp, Homo sapien
cgagtggcaccaacaccgtgagcca

SEQ ID NO: 3244101 - DNA, 25 bp, Homo sapien
ggtcccgtccacaaggtagaggctg

SEQ ID NO: 3244102 - DNA, 25 bp, Homo sapien
taaggacagaactgctctcctcagc

SEQ ID NO: 3244103 - DNA, 25 bp, Homo sapien
tgttctgcagtcaagggtgccaggt

SEQ ID NO: 3244104 - DNA, 25 bp, Homo sapien
taagaacaacccagacagtgtgtgc

SEQ ID NO: 3244105 - DNA, 25 bp, Homo sapien
tcgtacacctcaggtgaggtgtcag

SEQ ID NO: 3244106 - DNA, 25 bp, Homo sapien
gggaactacagacatccctggccac

SEQ ID NO: 3244107 - DNA, 25 bp, Homo sapien
acagtccctcgtacacctcaggtga

SEQ ID NO: 3244108 - DNA, 25 bp, Homo sapien
ggaactacagacatccctggccaca

SEQ ID NO: 3244109 - DNA, 25 bp, Homo sapien
caaggacagcggtcagcaggagtgg

SEQ ID NO: 3244110 - DNA, 25 bp, Homo sapien
aggacagcggtcagcaggagtgggc

SEQ ID NO: 3244111 - DNA, 25 bp, Homo sapien
acaaggacagcggtcagcaggagtg

SEQ ID NO: 3244112 - DNA, 25 bp, Homo sapien
ctgctggtgaccacggaggaagccc

SEQ ID NO: 3244113 - DNA, 25 bp, Homo sapien
cccagcaggatctacacagccagct

SEQ ID NO: 3244114 - DNA, 25 bp, Homo sapien
gtgcgtgcccacacatatgccggta

SEQ ID NO: 3244115 - DNA, 25 bp, Homo sapien
tagaccgtggttgatgtgcgtgccc

SEQ ID NO: 3244116 - DNA, 25 bp, Homo sapien
tgcgcccgtgaggtcatgtatactg

SEQ ID NO: 3244117 - DNA, 25 bp, Homo sapien
tgttatctgtgcgtgcccatgaggc

SEQ ID NO: 3244118 - DNA, 25 bp, Homo sapien
ccctgtgtgctgtgacgtccgtgca

SEQ ID NO: 3244119 - DNA, 25 bp, Homo sapien
catgtgtgatttctgtgtgcgcccg

SEQ ID NO: 3244120 - DNA, 25 bp, Homo sapien
aagtccgatgatgcccaaggtctcc

SEQ ID NO: 3244121 - DNA, 25 bp, Homo sapien
caagtccgatgatgcccaaggtctc

SEQ ID NO: 3244122 - DNA, 25 bp, Homo sapien
agcgccggacgccacctcgcggatc

SEQ ID NO: 3244123 - DNA, 25 bp, Homo sapien
tggcacagcgtcgagtcggccgtct

SEQ ID NO: 3244124 - DNA, 25 bp, Homo sapien
tggtgcagccaggtggcccgccggt

SEQ ID NO: 3244125 - DNA, 25 bp, Homo sapien
tctggactcgtgtgccctcccgcag

SEQ ID NO: 3244126 - DNA, 25 bp, Homo sapien
gcgggcacgttgcagacggcaatgc

SEQ ID NO: 3244127 - DNA, 25 bp, Homo sapien
tgtggggacaaggacacggcggtca

SEQ ID NO: 3244128 - DNA, 25 bp, Homo sapien
ctgtggggacaaggacacggcggtc

SEQ ID NO: 3244129 - DNA, 25 bp, Homo sapien
cctcatccctggcttgtccctggcc

SEQ ID NO: 3244130 - DNA, 25 bp, Homo sapien
gccagggccgcccctgcacggcact

SEQ ID NO: 3244131 - DNA, 25 bp, Homo sapien
cagggccgcccctgcacggcacttc

SEQ ID NO: 3244132 - DNA, 25 bp, Homo sapien
tggccagggccgcccctgcacggca

SEQ ID NO: 3244133 - DNA, 25 bp, Homo sapien
gatgattgcattcctgtgtccgact

SEQ ID NO: 3244134 - DNA, 25 bp, Homo sapien
tgcattcctgtgtccgactggccat

SEQ ID NO: 3244135 - DNA, 25 bp, Homo sapien
cccatccggatgattgcattcctgt

SEQ ID NO: 3244136 - DNA, 25 bp, Homo sapien
ttcctgtgtccgactggccatccgt

SEQ ID NO: 3244137 - DNA, 25 bp, Homo sapien
attcataggcccggaagctggacag

SEQ ID NO: 3244138 - DNA, 25 bp, Homo sapien
acaggaccgtgtggttccgcaaggg

SEQ ID NO: 3244139 - DNA, 25 bp, Homo sapien
cataggcccggaagctggacaggac

SEQ ID NO: 3244140 - DNA, 25 bp, Homo sapien
gctgcattcataggcccggaagctg

SEQ ID NO: 3244141 - DNA, 25 bp, Homo sapien
gccaccacagagacaaaggcgggag

SEQ ID NO: 3244142 - DNA, 25 bp, Homo sapien
aggcctgcacccgacaccgcagccg

SEQ ID NO: 3244143 - DNA, 25 bp, Homo sapien
gcagccggcccttcctgggacgcca

SEQ ID NO: 3244144 - DNA, 25 bp, Homo sapien
ctgggacgccaccacagagacaaag

SEQ ID NO: 3244145 - DNA, 25 bp, Homo sapien
cccgcaggaacacagacggttccaa

SEQ ID NO: 3244146 - DNA, 25 bp, Homo sapien
caactttgcaatgccataaactgta

SEQ ID NO: 3244147 - DNA, 25 bp, Homo sapien
agacccccagatggaggcatggctt

SEQ ID NO: 3244148 - DNA, 25 bp, Homo sapien
tggaggcatggcttccgacaccacc

SEQ ID NO: 3244149 - DNA, 25 bp, Homo sapien
aaatccccggccgacttgatgtcga

SEQ ID NO: 3244150 - DNA, 25 bp, Homo sapien
gcggagggctttgaacttctccagg

SEQ ID NO: 3244151 - DNA, 25 bp, Homo sapien
tgtcgatgttgtcaaaaccactgcc

SEQ ID NO: 3244152 - DNA, 25 bp, Homo sapien
actgccaatccggacgatgatgcgg

SEQ ID NO: 3244153 - DNA, 25 bp, Homo sapien
tcacaacagtcacgtttttaatttc

SEQ ID NO: 3244154 - DNA, 25 bp, Homo sapien
cggaacagctcccgcgaacaaagac

SEQ ID NO: 3244155 - DNA, 25 bp, Homo sapien
gacaactcttagaccggaacagctc

SEQ ID NO: 3244156 - DNA, 25 bp, Homo sapien
agcagtgttcacaacagtcacgttt

SEQ ID NO: 3244157 - DNA, 25 bp, Homo sapien
gaacaggtgtgtgtaacactcatca

SEQ ID NO: 3244158 - DNA, 25 bp, Homo sapien
cacttgaccagacgtagtgtggacg

SEQ ID NO: 3244159 - DNA, 25 bp, Homo sapien
cactcatcagttcatggacagggct

SEQ ID NO: 3244160 - DNA, 25 bp, Homo sapien
cccctgcgctgcgtggactggagat

SEQ ID NO: 3244161 - DNA, 25 bp, Homo sapien
caaagcagccgcagctaagagagag

SEQ ID NO: 3244162 - DNA, 25 bp, Homo sapien
aaagcagccgcagctaagagagagt

SEQ ID NO: 3244163 - DNA, 25 bp, Homo sapien
gcaaagcagccgcagctaagagaga

SEQ ID NO: 3244164 - DNA, 25 bp, Homo sapien
gcagatgaagcttcgtcggcaccca

SEQ ID NO: 3244165 - DNA, 25 bp, Homo sapien
ctgcagatgaagcttcgtcggcacc

SEQ ID NO: 3244166 - DNA, 25 bp, Homo sapien
tgcagatgaagcttcgtcggcaccc

SEQ ID NO: 3244167 - DNA, 25 bp, Homo sapien
ctgcgcatgcgagcggtgggcagag

SEQ ID NO: 3244168 - DNA, 25 bp, Homo sapien
ctcagctgcagggccacagctgcta

SEQ ID NO: 3244169 - DNA, 25 bp, Homo sapien
gctgcagggccacagctgctagcat

SEQ ID NO: 3244170 - DNA, 25 bp, Homo sapien
caggttggcctgtgctcagctgcag

SEQ ID NO: 3244171 - DNA, 25 bp, Homo sapien
cagctgcagggccacagctgctagc

SEQ ID NO: 3244172 - DNA, 25 bp, Homo sapien
gctttaccacgtggcggccacgtca

SEQ ID NO: 3244173 - DNA, 25 bp, Homo sapien
ctttaccacgtggcggccacgtcat

SEQ ID NO: 3244174 - DNA, 25 bp, Homo sapien
gcgctttaccacgtggcggccacgt

SEQ ID NO: 3244175 - DNA, 25 bp, Homo sapien
gtgcgctttaccacgtggcggccac

SEQ ID NO: 3244176 - DNA, 25 bp, Homo sapien
cctgttgcattggtctcccacggag

SEQ ID NO: 3244177 - DNA, 25 bp, Homo sapien
ctttccccctcgtggctgccacgtg

SEQ ID NO: 3244178 - DNA, 25 bp, Homo sapien
cccgcctgttgcattggtctcccac

SEQ ID NO: 3244179 - DNA, 25 bp, Homo sapien
cgcctgttgcattggtctcccacgg

SEQ ID NO: 3244180 - DNA, 25 bp, Homo sapien
gatgtttctctacgacacgcagcca

SEQ ID NO: 3244181 - DNA, 25 bp, Homo sapien
tgctcaggactcgacgtcgcactta

SEQ ID NO: 3244182 - DNA, 25 bp, Homo sapien
gctgggctgaagaccgcaggtttca

SEQ ID NO: 3244183 - DNA, 25 bp, Homo sapien
gagaaactgccaaagcaccatcgag

SEQ ID NO: 3244184 - DNA, 25 bp, Homo sapien
aacattgtatgttctgtattgtcat

SEQ ID NO: 3244185 - DNA, 25 bp, Homo sapien
cattgtatgttctgtattgtcataa

SEQ ID NO: 3244186 - DNA, 25 bp, Homo sapien
attgtatgttctgtattgtcataac

SEQ ID NO: 3244187 - DNA, 25 bp, Homo sapien
acattgtatgttctgtattgtcata

SEQ ID NO: 3244188 - DNA, 25 bp, Homo sapien
gttcctctaactgctcttcattcaa

SEQ ID NO: 3244189 - DNA, 25 bp, Homo sapien
ggtaataaacacattctcttgcaag

SEQ ID NO: 3244190 - DNA, 25 bp, Homo sapien
acgtggccgcttcagtaggcagcga

SEQ ID NO: 3244191 - DNA, 25 bp, Homo sapien
acattctcttgcaagcgttcctcta

SEQ ID NO: 3244192 - DNA, 25 bp, Homo sapien
cagaattcaccgactccccagtcct

SEQ ID NO: 3244193 - DNA, 25 bp, Homo sapien
ctgcagttcctgaacggccacccca

SEQ ID NO: 3244194 - DNA, 25 bp, Homo sapien
gcagttcctgaacggccaccccagg

SEQ ID NO: 3244195 - DNA, 25 bp, Homo sapien
caggggccccagaattcaccgactc

SEQ ID NO: 3244196 - DNA, 25 bp, Homo sapien
aactggatcttctagacctgagagg

SEQ ID NO: 3244197 - DNA, 25 bp, Homo sapien
ggtattaaggtcagagcccacggca

SEQ ID NO: 3244198 - DNA, 25 bp, Homo sapien
gaagcgactgtgacccggtattaag

SEQ ID NO: 3244199 - DNA, 25 bp, Homo sapien
tggtaccaacactgcccaactggat

SEQ ID NO: 3244200 - DNA, 25 bp, Homo sapien
tgcaggtcctcgcaggccactgcgt

SEQ ID NO: 3244201 - DNA, 25 bp, Homo sapien
cagtgctgggctgaaaacccttctc

SEQ ID NO: 3244202 - DNA, 25 bp, Homo sapien
tgctcagcagtttgatcagatgtgc

SEQ ID NO: 3244203 - DNA, 25 bp, Homo sapien
caggagtgcaactgtccagctggct

SEQ ID NO: 3244204 - DNA, 25 bp, Homo sapien
caacactctcgtctcttccaagaat

SEQ ID NO: 3244205 - DNA, 25 bp, Homo sapien
tgtatttatgttgtcctttctctgc

SEQ ID NO: 3244206 - DNA, 25 bp, Homo sapien
atgccaggacggttcccaacactct

SEQ ID NO: 3244207 - DNA, 25 bp, Homo sapien
ggctcctttctgtggcgccggctct

SEQ ID NO: 3244208 - DNA, 25 bp, Homo sapien
gggcactgtccaaaccgagctggtg

SEQ ID NO: 3244209 - DNA, 25 bp, Homo sapien
tggccactgggctgcattacaagca

SEQ ID NO: 3244210 - DNA, 25 bp, Homo sapien
tctacccgtgtgagaaaccatgaag

SEQ ID NO: 3244211 - DNA, 25 bp, Homo sapien
gaagagatcatacagtgtgcacccc

SEQ ID NO: 3244212 - DNA, 25 bp, Homo sapien
tccagagtcatcagctcttcgtcgg

SEQ ID NO: 3244213 - DNA, 25 bp, Homo sapien
agctcttcgtcggtgtctggcccag

SEQ ID NO: 3244214 - DNA, 25 bp, Homo sapien
tgcgttttgcgcatctccttgactg

SEQ ID NO: 3244215 - DNA, 25 bp, Homo sapien
ggtgatcggctcgtgggcagcacgg

SEQ ID NO: 3244216 - DNA, 25 bp, Homo sapien
ttgtagaaatgacccgaggcctcgg

SEQ ID NO: 3244217 - DNA, 25 bp, Homo sapien
gatggaccccgcaccagatggtgat

SEQ ID NO: 3244218 - DNA, 25 bp, Homo sapien
ggtgatttgtagaaatgacccgagg

SEQ ID NO: 3244219 - DNA, 25 bp, Homo sapien
aggcctcggctgacgctgtcttcct

SEQ ID NO: 3244220 - DNA, 25 bp, Homo sapien
actgatccctggctacaagtagaag

SEQ ID NO: 3244221 - DNA, 25 bp, Homo sapien
caagtagaagccagaccaacctagt

SEQ ID NO: 3244222 - DNA, 25 bp, Homo sapien
caacctagttctcatcacggaggag

SEQ ID NO: 3244223 - DNA, 25 bp, Homo sapien
tcaggccatggatatcccggcaggg

SEQ ID NO: 3244224 - DNA, 25 bp, Homo sapien
ctgagcaaacaagaatcaggaaagc

SEQ ID NO: 3244225 - DNA, 25 bp, Homo sapien
gcaaacaagaatcaggaaagctgcc

SEQ ID NO: 3244226 - DNA, 25 bp, Homo sapien
caggaaagctgcccaaaggctgctc

SEQ ID NO: 3244227 - DNA, 25 bp, Homo sapien
aggaaagctgcccaaaggctgctca

SEQ ID NO: 3244228 - DNA, 25 bp, Homo sapien
cgtgtgaagaccgccgcgcaactgg

SEQ ID NO: 3244229 - DNA, 25 bp, Homo sapien
caggccgcgggcaatgccgagaccg

SEQ ID NO: 3244230 - DNA, 25 bp, Homo sapien
gcaatgccgagaccgcccgtgtgaa

SEQ ID NO: 3244231 - DNA, 25 bp, Homo sapien
cacaaaagctggcatcccgaggacc

SEQ ID NO: 3244232 - DNA, 25 bp, Homo sapien
ccccaacgtgcggttctgccagccc

SEQ ID NO: 3244233 - DNA, 25 bp, Homo sapien
ggtgttcacctcctgatggtgtgca

SEQ ID NO: 3244234 - DNA, 25 bp, Homo sapien
tggcccgggcctgccgtgctcccgt

SEQ ID NO: 3244235 - DNA, 25 bp, Homo sapien
agccccaggcgaccacgtggtggta

SEQ ID NO: 3244236 - DNA, 25 bp, Homo sapien
gggcccgttcatgatcggaggtcgg

SEQ ID NO: 3244237 - DNA, 25 bp, Homo sapien
agtcccggccatccagcaatgccac

SEQ ID NO: 3244238 - DNA, 25 bp, Homo sapien
ctccactgtgcagtcccggccatcc

SEQ ID NO: 3244239 - DNA, 25 bp, Homo sapien
cccgttcatgatcggaggtcggacg

SEQ ID NO: 3244240 - DNA, 25 bp, Homo sapien
agaaccgcgtcctgtctcggagcct

SEQ ID NO: 3244241 - DNA, 25 bp, Homo sapien
aaagtgctcaggcttctgatccgcg

SEQ ID NO: 3244242 - DNA, 25 bp, Homo sapien
cacgtccttaattgtctcgagccaa

SEQ ID NO: 3244243 - DNA, 25 bp, Homo sapien
tgggctcagcttccacgaccatgaa

SEQ ID NO: 3244244 - DNA, 25 bp, Homo sapien
aactcacagactccagggaacgcct

SEQ ID NO: 3244245 - DNA, 25 bp, Homo sapien
acccgggactgctgtctgggaccta

SEQ ID NO: 3244246 - DNA, 25 bp, Homo sapien
cattaaaatgccatcgaaggtccga

SEQ ID NO: 3244247 - DNA, 25 bp, Homo sapien
aagtggacctcactgcatctgccac

SEQ ID NO: 3244248 - DNA, 25 bp, Homo sapien
tctgtgaccaggcaaggacgtggaa

SEQ ID NO: 3244249 - DNA, 25 bp, Homo sapien
tactcatcaatgctacccacggtgg

SEQ ID NO: 3244250 - DNA, 25 bp, Homo sapien
tagaggcttgagagtgcacacgatc

SEQ ID NO: 3244251 - DNA, 25 bp, Homo sapien
caagagcaacactgtggagcgggat

SEQ ID NO: 3244252 - DNA, 25 bp, Homo sapien
cccaaaccgcagctgtcatcctcag

SEQ ID NO: 3244253 - DNA, 25 bp, Homo sapien
tgcaacggcaaatagttaccccacg

SEQ ID NO: 3244254 - DNA, 25 bp, Homo sapien
tacacagacgcgcaaaggccacgcg

SEQ ID NO: 3244255 - DNA, 25 bp, Homo sapien
agctgcagacgggtacacagacgcg

SEQ ID NO: 3244256 - DNA, 25 bp, Homo sapien
gccgccagcgccgttttcttcccga

SEQ ID NO: 3244257 - DNA, 25 bp, Homo sapien
ctaggagctcagcgaggacggccgc

SEQ ID NO: 3244258 - DNA, 25 bp, Homo sapien
ttcccgagggacgtgtgctccctgc

SEQ ID NO: 3244259 - DNA, 25 bp, Homo sapien
taggagctcagcgaggacggccgcg

SEQ ID NO: 3244260 - DNA, 25 bp, Homo sapien
acagcaaaagggatctggcccaggc

SEQ ID NO: 3244261 - DNA, 25 bp, Homo sapien
caatcacggagacgacagcaaaagg

SEQ ID NO: 3244262 - DNA, 25 bp, Homo sapien
aggccgccagagaacgctccagtct

SEQ ID NO: 3244263 - DNA, 25 bp, Homo sapien
aagggaattctgtcccggcaatcac

SEQ ID NO: 3244264 - DNA, 25 bp, Homo sapien
cctccccgcgggaggcgcgctcccg

SEQ ID NO: 3244265 - DNA, 25 bp, Homo sapien
agcgcgcggccacggtcgccggcgg

SEQ ID NO: 3244266 - DNA, 25 bp, Homo sapien
cgcggccacggtcgccggcggcctc

SEQ ID NO: 3244267 - DNA, 25 bp, Homo sapien
cgcgcggccacggtcgccggcggcc

SEQ ID NO: 3244268 - DNA, 25 bp, Homo sapien
ggcggggagagcagactgcggcgct

SEQ ID NO: 3244269 - DNA, 25 bp, Homo sapien
ccgcgggcggggagagcagactgcg

SEQ ID NO: 3244270 - DNA, 25 bp, Homo sapien
ggccgcgggcggggagagcagactg

SEQ ID NO: 3244271 - DNA, 25 bp, Homo sapien
cgggcggggagagcagactgcggcg

SEQ ID NO: 3244272 - DNA, 25 bp, Homo sapien
aagcggcaggcccttgttgagcaag

SEQ ID NO: 3244273 - DNA, 25 bp, Homo sapien
caagcggcaggcccttgttgagcaa

SEQ ID NO: 3244274 - DNA, 25 bp, Homo sapien
cggcaggcccttgttgagcaagtgc

SEQ ID NO: 3244275 - DNA, 25 bp, Homo sapien
aggcccttgttgagcaagtgcgagc

SEQ ID NO: 3244276 - DNA, 25 bp, Homo sapien
gccgtgccgagtctccgccgcgccg

SEQ ID NO: 3244277 - DNA, 25 bp, Homo sapien
tggccgccgccgtgccgagtctccg

SEQ ID NO: 3244278 - DNA, 25 bp, Homo sapien
cgaccactccggcgcgctgcgccgc

SEQ ID NO: 3244279 - DNA, 25 bp, Homo sapien
gcctggccgccgccgtgccgagtct

SEQ ID NO: 3244280 - DNA, 25 bp, Homo sapien
accccgagaggagaagcgcgcctgc

SEQ ID NO: 3244281 - DNA, 25 bp, Homo sapien
gactcctggagggaccgcgtcctgc

SEQ ID NO: 3244282 - DNA, 25 bp, Homo sapien
aaagccctgcctgctaccggtgaag

SEQ ID NO: 3244283 - DNA, 25 bp, Homo sapien
ggtttgtagctaaccaacgtcctga

SEQ ID NO: 3244284 - DNA, 25 bp, Homo sapien
tttatgtgcagtgtagctggagcag

SEQ ID NO: 3244285 - DNA, 25 bp, Homo sapien
cagccacgtggctgagtgtccagca

SEQ ID NO: 3244286 - DNA, 25 bp, Homo sapien
cccggaattccacaggcaactgaga

SEQ ID NO: 3244287 - DNA, 25 bp, Homo sapien
cacataaggctttgggtcctgcagg

SEQ ID NO: 3244288 - DNA, 25 bp, Homo sapien
cttgtgagcacaagatagaaacaac

SEQ ID NO: 3244289 - DNA, 25 bp, Homo sapien
tggtgcaaaagtagatttccccttc

SEQ ID NO: 3244290 - DNA, 25 bp, Homo sapien
agaaattgatcttagaaatggtgca

SEQ ID NO: 3244291 - DNA, 25 bp, Homo sapien
tgtgatggtctaaccccaaaagcct

SEQ ID NO: 3244292 - DNA, 25 bp, Homo sapien
gactgcaatcaggacaatagcacag

SEQ ID NO: 3244293 - DNA, 25 bp, Homo sapien
cttactcttcgttggctgttgggca

SEQ ID NO: 3244294 - DNA, 25 bp, Homo sapien
tgtaggctttcccatggtgcagctt

SEQ ID NO: 3244295 - DNA, 25 bp, Homo sapien
gaagtctgcatccaagcttactctt

SEQ ID NO: 3244296 - DNA, 25 bp, Homo sapien
cattagtgacggctgtactggttaa

SEQ ID NO: 3244297 - DNA, 25 bp, Homo sapien
tggtcgtgtacattagtgacggctg

SEQ ID NO: 3244298 - DNA, 25 bp, Homo sapien
aacggtggtcgtgtacattagtgac

SEQ ID NO: 3244299 - DNA, 25 bp, Homo sapien
gttaacagaacggtggtcgtgtaca

SEQ ID NO: 3244300 - DNA, 25 bp, Homo sapien
ggaccccctgcagcatgtgatgtga

SEQ ID NO: 3244301 - DNA, 25 bp, Homo sapien
tggagataagaagggccccaggatg

SEQ ID NO: 3244302 - DNA, 25 bp, Homo sapien
gagccctgacgtccgtccatcagtg

SEQ ID NO: 3244303 - DNA, 25 bp, Homo sapien
gctggctatgacagtgcgtccctga

SEQ ID NO: 3244304 - DNA, 25 bp, Homo sapien
cctgagtgtgggagcgtcttctttc

SEQ ID NO: 3244305 - DNA, 25 bp, Homo sapien
cctggttccggtcaccaagtgtcta

SEQ ID NO: 3244306 - DNA, 25 bp, Homo sapien
cccggagattggttggcaggaattc

SEQ ID NO: 3244307 - DNA, 25 bp, Homo sapien
gggcctccagatatcactagaaaga

SEQ ID NO: 3244308 - DNA, 25 bp, Homo sapien
tgctaattagctcttttagtctgca

SEQ ID NO: 3244309 - DNA, 25 bp, Homo sapien
cgtcaacagctctgtcagccgcttg

SEQ ID NO: 3244310 - DNA, 25 bp, Homo sapien
ctgcatcctgatggacagtggtgcg

SEQ ID NO: 3244311 - DNA, 25 bp, Homo sapien
tgttacagcatgctaattagctctt

SEQ ID NO: 3244312 - DNA, 25 bp, Homo sapien
ggctgcaggaccggggttgtggaag

SEQ ID NO: 3244313 - DNA, 25 bp, Homo sapien
ctgcaggaccggggttgtggaaggt

SEQ ID NO: 3244314 - DNA, 25 bp, Homo sapien
gctgcaggaccggggttgtggaagg

SEQ ID NO: 3244315 - DNA, 25 bp, Homo sapien
tggatgttctgcttctctagtctga

SEQ ID NO: 3244316 - DNA, 25 bp, Homo sapien
tcagccttgcgtcctggctgtggct

SEQ ID NO: 3244317 - DNA, 25 bp, Homo sapien
tcatgaggactcagccttgcgtcct

SEQ ID NO: 3244318 - DNA, 25 bp, Homo sapien
tgtgaacgccgtccggtgtagggtg

SEQ ID NO: 3244319 - DNA, 25 bp, Homo sapien
gctgtgaacgccgtccggtgtaggg

SEQ ID NO: 3244320 - DNA, 25 bp, Homo sapien
tttatctgcagtaacgtcacagccc

SEQ ID NO: 3244321 - DNA, 25 bp, Homo sapien
agaatccgcccggtctctagagcac

SEQ ID NO: 3244322 - DNA, 25 bp, Homo sapien
tgacacacacattgggttggaccct

SEQ ID NO: 3244323 - DNA, 25 bp, Homo sapien
tctgtggccggctttttcgatgtac

SEQ ID NO: 3244324 - DNA, 25 bp, Homo sapien
tatctgctgaggaacccggttgctg

SEQ ID NO: 3244325 - DNA, 25 bp, Homo sapien
tgaggcattttagcaccctgtaccc

SEQ ID NO: 3244326 - DNA, 25 bp, Homo sapien
tgtaccccaggtactgttccatatg

SEQ ID NO: 3244327 - DNA, 25 bp, Homo sapien
tactgcctggcagcatagccatgct

SEQ ID NO: 3244328 - DNA, 25 bp, Homo sapien
gaggactcttcggtgtggacacacc

SEQ ID NO: 3244329 - DNA, 25 bp, Homo sapien
ttgtggcaaatcaaaaaggtctcca

SEQ ID NO: 3244330 - DNA, 25 bp, Homo sapien
tttccagaaggatcatcagaactgc

SEQ ID NO: 3244331 - DNA, 25 bp, Homo sapien
actgtggtgaacaagcattcctgca

SEQ ID NO: 3244332 - DNA, 25 bp, Homo sapien
gaccctctcatcttgcaaaccggaa

SEQ ID NO: 3244333 - DNA, 25 bp, Homo sapien
cccatgttacagtgagtgagaggat

SEQ ID NO: 3244334 - DNA, 25 bp, Homo sapien
tccatttatagcgtagacaccgttc

SEQ ID NO: 3244335 - DNA, 25 bp, Homo sapien
gacaccgttccgtaagcacacagta

SEQ ID NO: 3244336 - DNA, 25 bp, Homo sapien
ggcccggagtcacgtgctgagtccc

SEQ ID NO: 3244337 - DNA, 25 bp, Homo sapien
tcacgtgctgagtcccccggaagag

SEQ ID NO: 3244338 - DNA, 25 bp, Homo sapien
agcttttagggcccggagtcacgtg

SEQ ID NO: 3244339 - DNA, 25 bp, Homo sapien
tgtgaaggggctcttgctaaccagc

SEQ ID NO: 3244340 - DNA, 25 bp, Homo sapien
tcagattggatagccccgggccagc

SEQ ID NO: 3244341 - DNA, 25 bp, Homo sapien
cagattggatagccccgggccagcg

SEQ ID NO: 3244342 - DNA, 25 bp, Homo sapien
tgtgtggctgtctggtgtggacgag

SEQ ID NO: 3244343 - DNA, 25 bp, Homo sapien
tgtcacccgcggtgggtccacgtcg

SEQ ID NO: 3244344 - DNA, 25 bp, Homo sapien
tggacgagagcgtgtgcaccctgtc

SEQ ID NO: 3244345 - DNA, 25 bp, Homo sapien
ctgctcggtagcagacggtgatgct

SEQ ID NO: 3244346 - DNA, 25 bp, Homo sapien
ggcccactgctcttgggcggcagca

SEQ ID NO: 3244347 - DNA, 25 bp, Homo sapien
ttctggcacagctgcgacggcagag

SEQ ID NO: 3244348 - DNA, 25 bp, Homo sapien
cccatggttgggcacggctggagag

SEQ ID NO: 3244349 - DNA, 25 bp, Homo sapien
cacggccgtgttgctgatgcgctgt

SEQ ID NO: 3244350 - DNA, 25 bp, Homo sapien
gagaggtgtgggtcgtgcacttgtg

SEQ ID NO: 3244351 - DNA, 25 bp, Homo sapien
gtcgtgcacttgtggcttcccgtgc

SEQ ID NO: 3244352 - DNA, 25 bp, Homo sapien
gtgtgaggcttgctgtgcccaaccc

SEQ ID NO: 3244353 - DNA, 25 bp, Homo sapien
cttcccgtgcgtgtgtgaggcttgc

SEQ ID NO: 3244354 - DNA, 25 bp, Homo sapien
ctaaagagagtttggaccttggtat

SEQ ID NO: 3244355 - DNA, 25 bp, Homo sapien
aagagagtttggaccttggtatgga

SEQ ID NO: 3244356 - DNA, 25 bp, Homo sapien
gagagtttggaccttggtatggaaa

SEQ ID NO: 3244357 - DNA, 25 bp, Homo sapien
taaagagagtttggaccttggtatg

SEQ ID NO: 3244358 - DNA, 25 bp, Homo sapien
gagcacacgacctgtctgaagctgc

SEQ ID NO: 3244359 - DNA, 25 bp, Homo sapien
gtgttggaggcttgccacgagcaca

SEQ ID NO: 3244360 - DNA, 25 bp, Homo sapien
ctggtcaatgagtgtgcctggcgtt

SEQ ID NO: 3244361 - DNA, 25 bp, Homo sapien
ttgagattgggtgagcatgccttgt

SEQ ID NO: 3244362 - DNA, 25 bp, Homo sapien
tttagatgctgtccagaaatgcgcc

SEQ ID NO: 3244363 - DNA, 25 bp, Homo sapien
gaagactccaaatgacacgaaaaca

SEQ ID NO: 3244364 - DNA, 25 bp, Homo sapien
tgaagactccaaatgacacgaaaac

SEQ ID NO: 3244365 - DNA, 25 bp, Homo sapien
aagactccaaatgacacgaaaacat

SEQ ID NO: 3244366 - DNA, 25 bp, Homo sapien
gtccacctctgaactcacggtccac

SEQ ID NO: 3244367 - DNA, 25 bp, Homo sapien
tccacctctgaactcacggtccaca

SEQ ID NO: 3244368 - DNA, 25 bp, Homo sapien
ccacctctgaactcacggtccacat

SEQ ID NO: 3244369 - DNA, 25 bp, Homo sapien
cgtccacctctgaactcacggtcca

SEQ ID NO: 3244370 - DNA, 25 bp, Homo sapien
ggcttcattcgagagctgctgccaa

SEQ ID NO: 3244371 - DNA, 25 bp, Homo sapien
catagtttcgatatcacatcgcggg

SEQ ID NO: 3244372 - DNA, 25 bp, Homo sapien
cctgcttcgagaatgtataacgtgg

SEQ ID NO: 3244373 - DNA, 25 bp, Homo sapien
tgaaccaccgtagctgacagagaac

SEQ ID NO: 3244374 - DNA, 25 bp, Homo sapien
ttgagtcctcaacccatgaatatgg

SEQ ID NO: 3244375 - DNA, 25 bp, Homo sapien
cactgtgtacctctcgtggtggact

SEQ ID NO: 3244376 - DNA, 25 bp, Homo sapien
cacggttctagaggagatgctggca

SEQ ID NO: 3244377 - DNA, 25 bp, Homo sapien
tcctatcagatgagggctctatccc

SEQ ID NO: 3244378 - DNA, 25 bp, Homo sapien
cagtgagccgagatcacaccactgc

SEQ ID NO: 3244379 - DNA, 25 bp, Homo sapien
ctgggaggcagaggttgcagtgagc

SEQ ID NO: 3244380 - DNA, 25 bp, Homo sapien
gggaggccaagacacgagaatcatt

SEQ ID NO: 3244381 - DNA, 25 bp, Homo sapien
gccaagacacgagaatcatttgaac

SEQ ID NO: 3244382 - DNA, 25 bp, Homo sapien
tggatgtgttctgaaggtagggctg

SEQ ID NO: 3244383 - DNA, 25 bp, Homo sapien
caggaattggcagtggcaatgaggc

SEQ ID NO: 3244384 - DNA, 25 bp, Homo sapien
cagtgggacgtgctcagatctggat

SEQ ID NO: 3244385 - DNA, 25 bp, Homo sapien
ggtagggctgtcaggatttgcaaac

SEQ ID NO: 3244386 - DNA, 25 bp, Homo sapien
gagctaccaccaccgtaatgcaagg

SEQ ID NO: 3244387 - DNA, 25 bp, Homo sapien
actcccctgcgttcgaggctgcgga

SEQ ID NO: 3244388 - DNA, 25 bp, Homo sapien
cccagtcgggcgtctgctctgcgtg

SEQ ID NO: 3244389 - DNA, 25 bp, Homo sapien
cgattaacagagttgtgagctacca

SEQ ID NO: 3244390 - DNA, 25 bp, Homo sapien
ggctggctgacaaacgtggacgtta

SEQ ID NO: 3244391 - DNA, 25 bp, Homo sapien
tgggaacatggaacgctgctagctg

SEQ ID NO: 3244392 - DNA, 25 bp, Homo sapien
gaacagggcacgctaattcagtcat

SEQ ID NO: 3244393 - DNA, 25 bp, Homo sapien
tagattgcgtgtccagccttgccgc

SEQ ID NO: 3244394 - DNA, 25 bp, Homo sapien
cgaagtgggggttcacaccttgtct

SEQ ID NO: 3244395 - DNA, 25 bp, Homo sapien
cccggcctcggtcccttctggagag

SEQ ID NO: 3244396 - DNA, 25 bp, Homo sapien
tctgtcatggctcccgggtgtcttg

SEQ ID NO: 3244397 - DNA, 25 bp, Homo sapien
ggtggggtggcactgtattgcccaa

SEQ ID NO: 3244398 - DNA, 25 bp, Homo sapien
gaattatcttcgcaccattattgat

SEQ ID NO: 3244399 - DNA, 25 bp, Homo sapien
tgacctgtttaaccttatgccagtg

SEQ ID NO: 3244400 - DNA, 25 bp, Homo sapien
gatcacagagatttacacctagttt

SEQ ID NO: 3244401 - DNA, 25 bp, Homo sapien
ggtgtaagagcccacattcttttgc

SEQ ID NO: 3244402 - DNA, 25 bp, Homo sapien
tctgtagacacagtttcctttagtt

SEQ ID NO: 3244403 - DNA, 25 bp, Homo sapien
gaacatatgtgtagaagctgattta

SEQ ID NO: 3244404 - DNA, 25 bp, Homo sapien
tgatttaaagtacttgtctaagccg

SEQ ID NO: 3244405 - DNA, 25 bp, Homo sapien
aagtacttgtctaagccgggcgtgg

SEQ ID NO: 3244406 - DNA, 25 bp, Homo sapien
cagttgatatgtggtcagtgctcca

SEQ ID NO: 3244407 - DNA, 25 bp, Homo sapien
cagtgactggacagaggaccccttt

SEQ ID NO: 3244408 - DNA, 25 bp, Homo sapien
tgccgacacgcagttgatgcatggt

SEQ ID NO: 3244409 - DNA, 25 bp, Homo sapien
ggtgagtgtgccttcagcgctccat

SEQ ID NO: 3244410 - DNA, 25 bp, Homo sapien
gcctgctcacacgtgcccatgtgga

SEQ ID NO: 3244411 - DNA, 25 bp, Homo sapien
cacacgtgtccatgtggagtgccca

SEQ ID NO: 3244412 - DNA, 25 bp, Homo sapien
ctgctcacacatgcccatgtggagt

SEQ ID NO: 3244413 - DNA, 25 bp, Homo sapien
cacctgctcatgtgcccatgtggag

SEQ ID NO: 3244414 - DNA, 25 bp, Homo sapien
acatgtgccgatgtggagtgccacc

SEQ ID NO: 3244415 - DNA, 25 bp, Homo sapien
catgtgccgatgtggagtgccacct

SEQ ID NO: 3244416 - DNA, 25 bp, Homo sapien
tcacatgtgccgatgtggagtgcca

SEQ ID NO: 3244417 - DNA, 25 bp, Homo sapien
cacatgtgccgatgtggagtgccac

SEQ ID NO: 3244418 - DNA, 25 bp, Homo sapien
ccatgtggagtgctcgcctgctcac

SEQ ID NO: 3244419 - DNA, 25 bp, Homo sapien
ggagtgctcgcctgctcacacgtgc

SEQ ID NO: 3244420 - DNA, 25 bp, Homo sapien
atgtggagtgctcgcctgctcacac

SEQ ID NO: 3244421 - DNA, 25 bp, Homo sapien
gtggagtgctcgcctgctcacacgt

SEQ ID NO: 3244422 - DNA, 25 bp, Homo sapien
tctctgcacctcgagataacgtagg

SEQ ID NO: 3244423 - DNA, 25 bp, Homo sapien
gcctggtgcttttcgtatcagacct

SEQ ID NO: 3244424 - DNA, 25 bp, Homo sapien
taccgtacattctactcatggtggc

SEQ ID NO: 3244425 - DNA, 25 bp, Homo sapien
ggccgagtcagacgctgttaccgta

SEQ ID NO: 3244426 - DNA, 25 bp, Homo sapien
tgttttcgggcatctggatgtgagt

SEQ ID NO: 3244427 - DNA, 25 bp, Homo sapien
tttcgggcatctggatgtgagtaga

SEQ ID NO: 3244428 - DNA, 25 bp, Homo sapien
ttcgggcatctggatgtgagtagat

SEQ ID NO: 3244429 - DNA, 25 bp, Homo sapien
atcaggttggatgccgggtgttttc

SEQ ID NO: 3244430 - DNA, 25 bp, Homo sapien
tttgtggtgcctggagggcccctgg

SEQ ID NO: 3244431 - DNA, 25 bp, Homo sapien
agcttggtctggctttgtggtgcct

SEQ ID NO: 3244432 - DNA, 25 bp, Homo sapien
ggcgaggcacaccattaccaggaca

SEQ ID NO: 3244433 - DNA, 25 bp, Homo sapien
ggggggacatcgcagggcaaggaca

SEQ ID NO: 3244434 - DNA, 25 bp, Homo sapien
cattgccaggacatcgcggggcaag

SEQ ID NO: 3244435 - DNA, 25 bp, Homo sapien
acagggccaggcacaccattgccat

SEQ ID NO: 3244436 - DNA, 25 bp, Homo sapien
caaggacagggccaggcacaccatt

SEQ ID NO: 3244437 - DNA, 25 bp, Homo sapien
aggacagggccaggcacaccattgc

SEQ ID NO: 3244438 - DNA, 25 bp, Homo sapien
agcacgaagggcgagagcaccgccg

SEQ ID NO: 3244439 - DNA, 25 bp, Homo sapien
gtaggtctgcgagcccagcacgaag

SEQ ID NO: 3244440 - DNA, 25 bp, Homo sapien
accgccgggctcgacaggaacggca

SEQ ID NO: 3244441 - DNA, 25 bp, Homo sapien
gaggtgcggcgcgtagaaggcgggc

SEQ ID NO: 3244442 - DNA, 25 bp, Homo sapien
cgggtacccggccgggccgtgcatg

SEQ ID NO: 3244443 - DNA, 25 bp, Homo sapien
ggccgggccgtgcatgccgagcggg

SEQ ID NO: 3244444 - DNA, 25 bp, Homo sapien
cgtgcatgccgagcggggcgcccat

SEQ ID NO: 3244445 - DNA, 25 bp, Homo sapien
cgcacaccaggcctccggggccgtg

SEQ ID NO: 3244446 - DNA, 25 bp, Homo sapien
cgccggtcggagcgctggtgtcggc

SEQ ID NO: 3244447 - DNA, 25 bp, Homo sapien
ccgccggtcggagcgctggtgtcgg

SEQ ID NO: 3244448 - DNA, 25 bp, Homo sapien
gccgccggtcggagcgctggtgtcg

SEQ ID NO: 3244449 - DNA, 25 bp, Homo sapien
gccggtcggagcgctggtgtcggcg

SEQ ID NO: 3244450 - DNA, 25 bp, Homo sapien
ttggttcggcggttctggaaccaga

SEQ ID NO: 3244451 - DNA, 25 bp, Homo sapien
tcggcggttctggaaccagatcttc

SEQ ID NO: 3244452 - DNA, 25 bp, Homo sapien
ggcggttctggaaccagatcttcac

SEQ ID NO: 3244453 - DNA, 25 bp, Homo sapien
gttcggcggttctggaaccagatct

SEQ ID NO: 3244454 - DNA, 25 bp, Homo sapien
ggctgagcgacagcgccaggttgag

SEQ ID NO: 3244455 - DNA, 25 bp, Homo sapien
gacttggagtcggaccccgtgcgct

SEQ ID NO: 3244456 - DNA, 25 bp, Homo sapien
acttgttctccagcgccacgagctg

SEQ ID NO: 3244457 - DNA, 25 bp, Homo sapien
gaccccgtgcgcttccgcttgggct

SEQ ID NO: 3244458 - DNA, 25 bp, Homo sapien
tgggcaacgggcgagttctcgcggg

SEQ ID NO: 3244459 - DNA, 25 bp, Homo sapien
ctgcctcgtcgacggtggctccggg

SEQ ID NO: 3244460 - DNA, 25 bp, Homo sapien
acgcgtcggtctcagccgcgccctg

SEQ ID NO: 3244461 - DNA, 25 bp, Homo sapien
gtctcgggcgcttcgtcctcgtcgt

SEQ ID NO: 3244462 - DNA, 25 bp, Homo sapien
agccgccgcagagtccgtagggtcc

SEQ ID NO: 3244463 - DNA, 25 bp, Homo sapien
cggctgtagtatgcgcgcgccttcc

SEQ ID NO: 3244464 - DNA, 25 bp, Homo sapien
tggcccagatgactccccggctgta

SEQ ID NO: 3244465 - DNA, 25 bp, Homo sapien
ttcccggcttcagcgggatcccggc

SEQ ID NO: 3244466 - DNA, 25 bp, Homo sapien
gcacatttccccttaactgtaatcg

SEQ ID NO: 3244467 - DNA, 25 bp, Homo sapien
taattgtttttccagcgataaccag

SEQ ID NO: 3244468 - DNA, 25 bp, Homo sapien
gaaagagatatgcacgcgccgtaat

SEQ ID NO: 3244469 - DNA, 25 bp, Homo sapien
cgtaatgggatatcgacccgaccgg

SEQ ID NO: 3244470 - DNA, 25 bp, Homo sapien
tcagcgaactttccacggagcctcg

SEQ ID NO: 3244471 - DNA, 25 bp, Homo sapien
gcggacccggcgctcagcgaacttt

SEQ ID NO: 3244472 - DNA, 25 bp, Homo sapien
ggtcgtaaacgcatagaagcctccg

SEQ ID NO: 3244473 - DNA, 25 bp, Homo sapien
aactcgccacggtgtcccagggtcg

SEQ ID NO: 3244474 - DNA, 25 bp, Homo sapien
ctcctccgcgcgtggcgggcgtccc

SEQ ID NO: 3244475 - DNA, 25 bp, Homo sapien
ggtgcaggggcgcatggggccgaag

SEQ ID NO: 3244476 - DNA, 25 bp, Homo sapien
gccgaagcgcaaggggcgcacgcag

SEQ ID NO: 3244477 - DNA, 25 bp, Homo sapien
cgcatggggccgaagcgcaaggggc

SEQ ID NO: 3244478 - DNA, 25 bp, Homo sapien
caggatgtccagtaccgagaaggag

SEQ ID NO: 3244479 - DNA, 25 bp, Homo sapien
gcaacgacgcctcctgctgttgaac

SEQ ID NO: 3244480 - DNA, 25 bp, Homo sapien
ctgttgaacttgttggggtccagga

SEQ ID NO: 3244481 - DNA, 25 bp, Homo sapien
ggcgccgcaggcacagtgtcgctgg

SEQ ID NO: 3244482 - DNA, 25 bp, Homo sapien
ggaggcggcggtagcgcgggaatgt

SEQ ID NO: 3244483 - DNA, 25 bp, Homo sapien
gcggtagcgcgggaatgtccccagg

SEQ ID NO: 3244484 - DNA, 25 bp, Homo sapien
cggtgcgggccccgaacctggctgg

SEQ ID NO: 3244485 - DNA, 25 bp, Homo sapien
ggtagcgcgggaatgtccccaggag

SEQ ID NO: 3244486 - DNA, 25 bp, Homo sapien
aatttgggccaagctcggacacgct

SEQ ID NO: 3244487 - DNA, 25 bp, Homo sapien
tgggagaaataatggtggaccgatc

SEQ ID NO: 3244488 - DNA, 25 bp, Homo sapien
tggtggaccgatcggctgtaatttg

SEQ ID NO: 3244489 - DNA, 25 bp, Homo sapien
taccgcgggcaatgatcctttggaa

SEQ ID NO: 3244490 - DNA, 25 bp, Homo sapien
cacaagtgcgtagcacacacaagca

SEQ ID NO: 3244491 - DNA, 25 bp, Homo sapien
gagcatccgttcacgagcacccagg

SEQ ID NO: 3244492 - DNA, 25 bp, Homo sapien
tcacaagtgcgtagcacacacaagc

SEQ ID NO: 3244493 - DNA, 25 bp, Homo sapien
cagcatccgttcacgagcatccgtt

SEQ ID NO: 3244494 - DNA, 25 bp, Homo sapien
agacactttccagattgctgcgccc

SEQ ID NO: 3244495 - DNA, 25 bp, Homo sapien
tcactgtttcccgaggaggggcaca

SEQ ID NO: 3244496 - DNA, 25 bp, Homo sapien
acaccagacactttccagattgctg

SEQ ID NO: 3244497 - DNA, 25 bp, Homo sapien
cgcgctggtgttggttcctctttca

SEQ ID NO: 3244498 - DNA, 25 bp, Homo sapien
tgggtggcgggcgaggcctgggtcg

SEQ ID NO: 3244499 - DNA, 25 bp, Homo sapien
agggccgggcaggtctcaagggcat

SEQ ID NO: 3244500 - DNA, 25 bp, Homo sapien
ctgggtggcgggcgaggcctgggtc

SEQ ID NO: 3244501 - DNA, 25 bp, Homo sapien
cggggagggccgggcaggtctcaag

SEQ ID NO: 3244502 - DNA, 25 bp, Homo sapien
tcctccacgaacagtgtggtctggc

SEQ ID NO: 3244503 - DNA, 25 bp, Homo sapien
tctccgtgtgggctggtggacccct

SEQ ID NO: 3244504 - DNA, 25 bp, Homo sapien
ctgagcggctggtgggatttacacc

SEQ ID NO: 3244505 - DNA, 25 bp, Homo sapien
catggcttaacttggaggaacttcc

SEQ ID NO: 3244506 - DNA, 25 bp, Homo sapien
gcgctcagggagaccccgcggttac

SEQ ID NO: 3244507 - DNA, 25 bp, Homo sapien
ggtgggcactgtggcggtcgtaagg

SEQ ID NO: 3244508 - DNA, 25 bp, Homo sapien
tcctcgtggctcctccgacagggtg

SEQ ID NO: 3244509 - DNA, 25 bp, Homo sapien
gggcagggatgagcgcgctcaggga

SEQ ID NO: 3244510 - DNA, 25 bp, Homo sapien
aggccgatcccctgcccagatggcc

SEQ ID NO: 3244511 - DNA, 25 bp, Homo sapien
gggctggctcgctgtttgaaactcc

SEQ ID NO: 3244512 - DNA, 25 bp, Homo sapien
cctgtcaggccaggccgatcccctg

SEQ ID NO: 3244513 - DNA, 25 bp, Homo sapien
tgaggttctttggaacctcctggcg

SEQ ID NO: 3244514 - DNA, 25 bp, Homo sapien
gcctggaaccactgctgtgtagatt

SEQ ID NO: 3244515 - DNA, 25 bp, Homo sapien
cgtccatccgtgtgcctaggcagtc

SEQ ID NO: 3244516 - DNA, 25 bp, Homo sapien
gtgcctggaaccactgctgtgtaga

SEQ ID NO: 3244517 - DNA, 25 bp, Homo sapien
cacacggagggcgtgagccgtccat

SEQ ID NO: 3244518 - DNA, 25 bp, Homo sapien
cggccggccagcgtagctgcaaagg

SEQ ID NO: 3244519 - DNA, 25 bp, Homo sapien
tcccggccggccagcgtagctgcaa

SEQ ID NO: 3244520 - DNA, 25 bp, Homo sapien
ggagacctcccggccggccagcgta

SEQ ID NO: 3244521 - DNA, 25 bp, Homo sapien
ccggccagcgtagctgcaaaggctg

SEQ ID NO: 3244522 - DNA, 25 bp, Homo sapien
gggtctgactgcgtcagcaagcaca

SEQ ID NO: 3244523 - DNA, 25 bp, Homo sapien
ccttcctaccctgatcgtcatgagg

SEQ ID NO: 3244524 - DNA, 25 bp, Homo sapien
caggggtctgactgcgtcagcaagc

SEQ ID NO: 3244525 - DNA, 25 bp, Homo sapien
tgactgcgtcagcaagcacagggaa

SEQ ID NO: 3244526 - DNA, 25 bp, Homo sapien
ctcatcactggcattatttcagaag

SEQ ID NO: 3244527 - DNA, 25 bp, Homo sapien
acagaagcactgggagcacgtagga

SEQ ID NO: 3244528 - DNA, 25 bp, Homo sapien
tctcatcactggcattatttcagaa

SEQ ID NO: 3244529 - DNA, 25 bp, Homo sapien
cagaagcactgggagcacgtaggag

SEQ ID NO: 3244530 - DNA, 25 bp, Homo sapien
gggtctctttcgagtgcccgtcggc

SEQ ID NO: 3244531 - DNA, 25 bp, Homo sapien
gcggctgagcgtggcaagctaaatc

SEQ ID NO: 3244532 - DNA, 25 bp, Homo sapien
taaatccacctggacgcgaacacag

SEQ ID NO: 3244533 - DNA, 25 bp, Homo sapien
tggacgcgaacacagtgcgcggcct

SEQ ID NO: 3244534 - DNA, 25 bp, Homo sapien
ttggatgacaaggtcgagtgggaag

SEQ ID NO: 3244535 - DNA, 25 bp, Homo sapien
gttggatgacaaggtcgagtgggaa

SEQ ID NO: 3244536 - DNA, 25 bp, Homo sapien
ggttggatgacaaggtcgagtggga

SEQ ID NO: 3244537 - DNA, 25 bp, Homo sapien
ctggttggatgacaaggtcgagtgg

SEQ ID NO: 3244538 - DNA, 25 bp, Homo sapien
ggccacgctgtccacgcccccccag

SEQ ID NO: 3244539 - DNA, 25 bp, Homo sapien
acccagctaaattcagccccagccc

SEQ ID NO: 3244540 - DNA, 25 bp, Homo sapien
agcacccagctaaattcagccccag

SEQ ID NO: 3244541 - DNA, 25 bp, Homo sapien
ccagcacccagctaaattcagcccc

SEQ ID NO: 3244542 - DNA, 25 bp, Homo sapien
catcgctggtacagcgctggcagct

SEQ ID NO: 3244543 - DNA, 25 bp, Homo sapien
tggtggccgtggcatcgctggtaca

SEQ ID NO: 3244544 - DNA, 25 bp, Homo sapien
tggtacagcgctggcagctgacact

SEQ ID NO: 3244545 - DNA, 25 bp, Homo sapien
gccgtggcatcgctggtacagcgct

SEQ ID NO: 3244546 - DNA, 25 bp, Homo sapien
acggctcgaccctgacgctggccac

SEQ ID NO: 3244547 - DNA, 25 bp, Homo sapien
agcggcaacgggcagtagtgtcttc

SEQ ID NO: 3244548 - DNA, 25 bp, Homo sapien
gcaacgggcagtagtgtcttcagac

SEQ ID NO: 3244549 - DNA, 25 bp, Homo sapien
cctcagtgggcttgaagcggcaacg

SEQ ID NO: 3244550 - DNA, 25 bp, Homo sapien
tctaggaagcctggcctgactctgc

SEQ ID NO: 3244551 - DNA, 25 bp, Homo sapien
ttgttctgtttttcagcgccctgcg

SEQ ID NO: 3244552 - DNA, 25 bp, Homo sapien
tcacccgacagactcgtaggtttgt

SEQ ID NO: 3244553 - DNA, 25 bp, Homo sapien
tagccttaggacatggcagcggcct

SEQ ID NO: 3244554 - DNA, 25 bp, Homo sapien
attatcgtatccactgcaaaatgcg

SEQ ID NO: 3244555 - DNA, 25 bp, Homo sapien
tttaattatcgtatccactgcaaaa

SEQ ID NO: 3244556 - DNA, 25 bp, Homo sapien
tcgtatccactgcaaaatgcgtcat

SEQ ID NO: 3244557 - DNA, 25 bp, Homo sapien
tatcgtatccactgcaaaatgcgtc

SEQ ID NO: 3244558 - DNA, 25 bp, Homo sapien
tgaggtcctggatacagggacaagg

SEQ ID NO: 3244559 - DNA, 25 bp, Homo sapien
aggtcctggatacagggacaaggac

SEQ ID NO: 3244560 - DNA, 25 bp, Homo sapien
ctgaggtcctggatacagggacaag

SEQ ID NO: 3244561 - DNA, 25 bp, Homo sapien
gaggtcctggatacagggacaagga

SEQ ID NO: 3244562 - DNA, 25 bp, Homo sapien
gccagctccccacggggtgagtgtt

SEQ ID NO: 3244563 - DNA, 25 bp, Homo sapien
caagccagagaccacggggccagct

SEQ ID NO: 3244564 - DNA, 25 bp, Homo sapien
cacagagcttgtgcctccctgccca

SEQ ID NO: 3244565 - DNA, 25 bp, Homo sapien
cccacggggtgagtgttgcccacat

SEQ ID NO: 3244566 - DNA, 25 bp, Homo sapien
tttaggaatgtcgttcttggtgtcc

SEQ ID NO: 3244567 - DNA, 25 bp, Homo sapien
ccagtgagactgctgaaaccagctt

SEQ ID NO: 3244568 - DNA, 25 bp, Homo sapien
cccaggtttaggaatgtcgttcttg

SEQ ID NO: 3244569 - DNA, 25 bp, Homo sapien
ggcagagcgagggtgtggccccgca

SEQ ID NO: 3244570 - DNA, 25 bp, Homo sapien
caagaaaagggtggcaccaaccaca

SEQ ID NO: 3244571 - DNA, 25 bp, Homo sapien
cggatcccaggggtagtctgtgttt

SEQ ID NO: 3244572 - DNA, 25 bp, Homo sapien
ctgtgtttgtgtctcgtgggcatca

SEQ ID NO: 3244573 - DNA, 25 bp, Homo sapien
tcgtgggcatcagacacagatgctg

SEQ ID NO: 3244574 - DNA, 25 bp, Homo sapien
gaggcggcaccaagcgggccccgca

SEQ ID NO: 3244575 - DNA, 25 bp, Homo sapien
cagagccaccgctaaagacgcagtg

SEQ ID NO: 3244576 - DNA, 25 bp, Homo sapien
cggcaccaagcgggccccgcagagc

SEQ ID NO: 3244577 - DNA, 25 bp, Homo sapien
cgcagagccaccgctaaagacgcag

SEQ ID NO: 3244578 - DNA, 25 bp, Homo sapien
agatgagaatgccacggtgcccagg

SEQ ID NO: 3244579 - DNA, 25 bp, Homo sapien
tgaatgctgggagctggtaaatcca

SEQ ID NO: 3244580 - DNA, 25 bp, Homo sapien
ctgccgatgcggagatgagaatgcc

SEQ ID NO: 3244581 - DNA, 25 bp, Homo sapien
aggcgtccactctcccgggagaggt

SEQ ID NO: 3244582 - DNA, 25 bp, Homo sapien
ttcgaggtctctggtaggctgagct

SEQ ID NO: 3244583 - DNA, 25 bp, Homo sapien
gcacgcagccggaacatggaccgca

SEQ ID NO: 3244584 - DNA, 25 bp, Homo sapien
gcatgagaaacgccaggccctcggg

SEQ ID NO: 3244585 - DNA, 25 bp, Homo sapien
acaggcccggcaagctgctgtcccg

SEQ ID NO: 3244586 - DNA, 25 bp, Homo sapien
tgccagggaagaacgtctccaggtc

SEQ ID NO: 3244587 - DNA, 25 bp, Homo sapien
gggtcggcaggtgaaccagacctgg

SEQ ID NO: 3244588 - DNA, 25 bp, Homo sapien
gggaagaacgtctccaggtcctggc

SEQ ID NO: 3244589 - DNA, 25 bp, Homo sapien
tgaaccagacctggtgccgggtgct

SEQ ID NO: 3244590 - DNA, 25 bp, Homo sapien
gggcactgcttgacatcctgcagag

SEQ ID NO: 3244591 - DNA, 25 bp, Homo sapien
ttgtcgccttcgtcacagcctggca

SEQ ID NO: 3244592 - DNA, 25 bp, Homo sapien
tgcaaagacagcacatagagtttgg

SEQ ID NO: 3244593 - DNA, 25 bp, Homo sapien
gggacatccagcacgtttcttcaga

SEQ ID NO: 3244594 - DNA, 25 bp, Homo sapien
tcatccaatctccacttggcatcat

SEQ ID NO: 3244595 - DNA, 25 bp, Homo sapien
ggcatcatccaaggtgcagactgga

SEQ ID NO: 3244596 - DNA, 25 bp, Homo sapien
gcagactggatgcagatcatccagt

SEQ ID NO: 3244597 - DNA, 25 bp, Homo sapien
tgtgcccgagttggcatcatccaat

SEQ ID NO: 3244598 - DNA, 25 bp, Homo sapien
tgtgccggggtaatatgtgctcatt

SEQ ID NO: 3244599 - DNA, 25 bp, Homo sapien
agatcccatttaatctcgcgcctat

SEQ ID NO: 3244600 - DNA, 25 bp, Homo sapien
gggtaatatgtgctcattacaaaag

SEQ ID NO: 3244601 - DNA, 25 bp, Homo sapien
tatctatcacgcggctgccttcatc

SEQ ID NO: 3244602 - DNA, 25 bp, Homo sapien
cgttacggtaaatctgctccagaaa

SEQ ID NO: 3244603 - DNA, 25 bp, Homo sapien
tccagaaagtcgaagaggcggcagc

SEQ ID NO: 3244604 - DNA, 25 bp, Homo sapien
gggcgactgggactgtgccccggct

SEQ ID NO: 3244605 - DNA, 25 bp, Homo sapien
ttcagagtgtgaacgttacggtaaa

SEQ ID NO: 3244606 - DNA, 25 bp, Homo sapien
ctcagggatggccatgcggaccccg

SEQ ID NO: 3244607 - DNA, 25 bp, Homo sapien
gcagcagcggtgaggtacccagcac

SEQ ID NO: 3244608 - DNA, 25 bp, Homo sapien
ggtgaggtacccagcacctcctcaa

SEQ ID NO: 3244609 - DNA, 25 bp, Homo sapien
accccgccagcagacggagcctgga

SEQ ID NO: 3244610 - DNA, 25 bp, Homo sapien
tcattaccgcggccatttaattcaa

SEQ ID NO: 3244611 - DNA, 25 bp, Homo sapien
atctgctcattaccgcggccattta

SEQ ID NO: 3244612 - DNA, 25 bp, Homo sapien
catctgctcattaccgcggccattt

SEQ ID NO: 3244613 - DNA, 25 bp, Homo sapien
tgctcattaccgcggccatttaatt

SEQ ID NO: 3244614 - DNA, 25 bp, Homo sapien
aatgtcggggccttgtcagggagcc

SEQ ID NO: 3244615 - DNA, 25 bp, Homo sapien
cttaattagagggacagccttgtcc

SEQ ID NO: 3244616 - DNA, 25 bp, Homo sapien
tagagggacagccttgtccaatgtc

SEQ ID NO: 3244617 - DNA, 25 bp, Homo sapien
agggacagccttgtccaatgtcggg

SEQ ID NO: 3244618 - DNA, 25 bp, Homo sapien
ctgatgagcagagacaaacacaggc

SEQ ID NO: 3244619 - DNA, 25 bp, Homo sapien
tgagcagagacaaacacaggctctg

SEQ ID NO: 3244620 - DNA, 25 bp, Homo sapien
caaacacaggctctgccgggaccag

SEQ ID NO: 3244621 - DNA, 25 bp, Homo sapien
caggcagccgcagggctgcgggtcg

SEQ ID NO: 3244622 - DNA, 25 bp, Homo sapien
acagcggtgcgtgcgctagtgcccg

SEQ ID NO: 3244623 - DNA, 25 bp, Homo sapien
ttggggacagcggtgcgtgcgctag

SEQ ID NO: 3244624 - DNA, 25 bp, Homo sapien
gggacagcggtgcgtgcgctagtgc

SEQ ID NO: 3244625 - DNA, 25 bp, Homo sapien
gcggtgcgtgcgctagtgcccgcac

SEQ ID NO: 3244626 - DNA, 25 bp, Homo sapien
tagaagggcgcgagcgttggcgtga

SEQ ID NO: 3244627 - DNA, 25 bp, Homo sapien
cgttggcgtgagagccggtgtggcc

SEQ ID NO: 3244628 - DNA, 25 bp, Homo sapien
gcgagcgttggcgtgagagccggtg

SEQ ID NO: 3244629 - DNA, 25 bp, Homo sapien
ccggtgtgtagaagggcgcgagcgt

SEQ ID NO: 3244630 - DNA, 25 bp, Homo sapien
ctccaacaattcatggtccctgtaa

SEQ ID NO: 3244631 - DNA, 25 bp, Homo sapien
aattcatggtccctgtaatgaactc

SEQ ID NO: 3244632 - DNA, 25 bp, Homo sapien
caacaattcatggtccctgtaatga

SEQ ID NO: 3244633 - DNA, 25 bp, Homo sapien
ttcatggtccctgtaatgaactccc

SEQ ID NO: 3244634 - DNA, 25 bp, Homo sapien
tcccgctgtcatccgtcgatgatgg

SEQ ID NO: 3244635 - DNA, 25 bp, Homo sapien
gccgccgaaccaaccgcggaggcca

SEQ ID NO: 3244636 - DNA, 25 bp, Homo sapien
atccgtcgatgatggagtgcgagcc

SEQ ID NO: 3244637 - DNA, 25 bp, Homo sapien
gatggagtgcgagccgggagctgca

SEQ ID NO: 3244638 - DNA, 25 bp, Homo sapien
ggccaccagtgtggccagaaaagat

SEQ ID NO: 3244639 - DNA, 25 bp, Homo sapien
gggccaccagtgtggccagaaaaga

SEQ ID NO: 3244640 - DNA, 25 bp, Homo sapien
cccgcgggccaccagtgtggccaga

SEQ ID NO: 3244641 - DNA, 25 bp, Homo sapien
gcgggccaccagtgtggccagaaaa

SEQ ID NO: 3244642 - DNA, 25 bp, Homo sapien
aattttctcttcctcgtggtcctgc

SEQ ID NO: 3244643 - DNA, 25 bp, Homo sapien
gaattttctcttcctcgtggtcctg

SEQ ID NO: 3244644 - DNA, 25 bp, Homo sapien
ttttctcttcctcgtggtcctgcat

SEQ ID NO: 3244645 - DNA, 25 bp, Homo sapien
ctgaattttctcttcctcgtggtcc

SEQ ID NO: 3244646 - DNA, 25 bp, Homo sapien
ccatcagtctccgtgggcggagcga

SEQ ID NO: 3244647 - DNA, 25 bp, Homo sapien
taaattaagaccaaacagatgaccg

SEQ ID NO: 3244648 - DNA, 25 bp, Homo sapien
tgtgcacggcgcgtaccagccacgt

SEQ ID NO: 3244649 - DNA, 25 bp, Homo sapien
aaaaatgccacgtaataatctcgtg

SEQ ID NO: 3244650 - DNA, 25 bp, Homo sapien
agggggcaggatcccggaggctggg

SEQ ID NO: 3244651 - DNA, 25 bp, Homo sapien
ccaggattcctgagcaaggccgagg

SEQ ID NO: 3244652 - DNA, 25 bp, Homo sapien
caagcccaggattcctgagcaaggc

SEQ ID NO: 3244653 - DNA, 25 bp, Homo sapien
ggcccaagcccaggattcctgagca

SEQ ID NO: 3244654 - DNA, 25 bp, Homo sapien
acggaaccggccctgattcgggcag

SEQ ID NO: 3244655 - DNA, 25 bp, Homo sapien
atggcaacggaaccggccctgattc

SEQ ID NO: 3244656 - DNA, 25 bp, Homo sapien
ctatggcaacggaaccggccctgat

SEQ ID NO: 3244657 - DNA, 25 bp, Homo sapien
ctagcctatggcaacggaaccggcc

SEQ ID NO: 3244658 - DNA, 25 bp, Homo sapien
ccggcctcgcgggtccagggcttgg

SEQ ID NO: 3244659 - DNA, 25 bp, Homo sapien
acaggcgtcctgtgcgggagccggt

SEQ ID NO: 3244660 - DNA, 25 bp, Homo sapien
agcagagggtcgggctttctccgcc

SEQ ID NO: 3244661 - DNA, 25 bp, Homo sapien
atgcggagcacgagcgggcgcagca

SEQ ID NO: 3244662 - DNA, 25 bp, Homo sapien
tgacaccaacaagcacgaaatacgg

SEQ ID NO: 3244663 - DNA, 25 bp, Homo sapien
gacaccaacaagcacgaaatacggt

SEQ ID NO: 3244664 - DNA, 25 bp, Homo sapien
aactggtccctctgcccacagggac

SEQ ID NO: 3244665 - DNA, 25 bp, Homo sapien
tggtccctctgcccacagggacccc

SEQ ID NO: 3244666 - DNA, 25 bp, Homo sapien
tccctctgcccacagggacccccgc

SEQ ID NO: 3244667 - DNA, 25 bp, Homo sapien
tctgcccacagggacccccgcccac

SEQ ID NO: 3244668 - DNA, 25 bp, Homo sapien
tctttgtacagacgctgccatggtc

SEQ ID NO: 3244669 - DNA, 25 bp, Homo sapien
ggctcctctttgtacagacgctgcc

SEQ ID NO: 3244670 - DNA, 25 bp, Homo sapien
ctccaggctctggacggccacaggg

SEQ ID NO: 3244671 - DNA, 25 bp, Homo sapien
cctctttgtacagacgctgccatgg

SEQ ID NO: 3244672 - DNA, 25 bp, Homo sapien
ctcccaggcttttgtctattgaagg

SEQ ID NO: 3244673 - DNA, 25 bp, Homo sapien
gaccctcccaggcttttgtctattg

SEQ ID NO: 3244674 - DNA, 25 bp, Homo sapien
tgaccctcccaggcttttgtctatt

SEQ ID NO: 3244675 - DNA, 25 bp, Homo sapien
ccctcccaggcttttgtctattgaa

SEQ ID NO: 3244676 - DNA, 25 bp, Homo sapien
gaggaagcagcagaattgcaactca

SEQ ID NO: 3244677 - DNA, 25 bp, Homo sapien
ctcaggtaggcccatctgtggtcta

SEQ ID NO: 3244678 - DNA, 25 bp, Homo sapien
ttgcaactcagtccaggcaccagct

SEQ ID NO: 3244679 - DNA, 25 bp, Homo sapien
gtaggcccatctgtggtctactggg

SEQ ID NO: 3244680 - DNA, 25 bp, Homo sapien
gaccccacagcaaacacgcactggg

SEQ ID NO: 3244681 - DNA, 25 bp, Homo sapien
acagcaaacacgcactgggggacca

SEQ ID NO: 3244682 - DNA, 25 bp, Homo sapien
ggagccctgaggactgccccgtgcc

SEQ ID NO: 3244683 - DNA, 25 bp, Homo sapien
aggggagccctgaggactgccccgt

SEQ ID NO: 3244684 - DNA, 25 bp, Homo sapien
gattgcttcaatttccgaagatttt

SEQ ID NO: 3244685 - DNA, 25 bp, Homo sapien
ccggcgggcggagcgtaatgaaatg

SEQ ID NO: 3244686 - DNA, 25 bp, Homo sapien
catgcggtttaagagccgcaggatg

SEQ ID NO: 3244687 - DNA, 25 bp, Homo sapien
gccttcacgtggcacagcccagctc

SEQ ID NO: 3244688 - DNA, 25 bp, Homo sapien
aagcacagtgggactcgggccagcc

SEQ ID NO: 3244689 - DNA, 25 bp, Homo sapien
gtacttggccggagcagaagcacag

SEQ ID NO: 3244690 - DNA, 25 bp, Homo sapien
agctccaacaactccgcccggtact

SEQ ID NO: 3244691 - DNA, 25 bp, Homo sapien
tccgcccggtacttggccggagcag

SEQ ID NO: 3244692 - DNA, 25 bp, Homo sapien
ggccagctgtcttgaggcctccatc

SEQ ID NO: 3244693 - DNA, 25 bp, Homo sapien
cccagggccagctgtcttgaggcct

SEQ ID NO: 3244694 - DNA, 25 bp, Homo sapien
agaacagcaggcagacgccccccag

SEQ ID NO: 3244695 - DNA, 25 bp, Homo sapien
tcttgaggcctccatctcaagagcc

SEQ ID NO: 3244696 - DNA, 25 bp, Homo sapien
ttccggacacaccaccctcaagggc

SEQ ID NO: 3244697 - DNA, 25 bp, Homo sapien
tgctcttccggacacaccaccctca

SEQ ID NO: 3244698 - DNA, 25 bp, Homo sapien
cttccggacacaccaccctcaaggg

SEQ ID NO: 3244699 - DNA, 25 bp, Homo sapien
ctcttccggacacaccaccctcaag

SEQ ID NO: 3244700 - DNA, 25 bp, Homo sapien
tgccagggcaccagggctggttcat

SEQ ID NO: 3244701 - DNA, 25 bp, Homo sapien
cttggcgtgccagggcaccagggct

SEQ ID NO: 3244702 - DNA, 25 bp, Homo sapien
cgtgccagggcaccagggctggttc

SEQ ID NO: 3244703 - DNA, 25 bp, Homo sapien
ggcgtgccagggcaccagggctggt

SEQ ID NO: 3244704 - DNA, 25 bp, Homo sapien
ataattggataattccattttaaga

SEQ ID NO: 3244705 - DNA, 25 bp, Homo sapien
tccacacagtggctgggcagagatg

SEQ ID NO: 3244706 - DNA, 25 bp, Homo sapien
gggggcctggcataattggataatt

SEQ ID NO: 3244707 - DNA, 25 bp, Homo sapien
tcatgcatggctgatggtgtcatcc

SEQ ID NO: 3244708 - DNA, 25 bp, Homo sapien
ctttctggaatgacaggtgacccga

SEQ ID NO: 3244709 - DNA, 25 bp, Homo sapien
tcggcagcggcctcgaaaattgctg

SEQ ID NO: 3244710 - DNA, 25 bp, Homo sapien
ccgagagatatctgaggtgggtatc

SEQ ID NO: 3244711 - DNA, 25 bp, Homo sapien
tgctgctgcccgaaaataaacaata

SEQ ID NO: 3244712 - DNA, 25 bp, Homo sapien
gcaggagccggctccggcgggaggg

SEQ ID NO: 3244713 - DNA, 25 bp, Homo sapien
agggcagcaggagccggctccggcg

SEQ ID NO: 3244714 - DNA, 25 bp, Homo sapien
ggctgcttggaagccggcccaccag

SEQ ID NO: 3244715 - DNA, 25 bp, Homo sapien
aggaggtccactagggccccaggag

SEQ ID NO: 3244716 - DNA, 25 bp, Homo sapien
tggagatggtgaccggggatcccag

SEQ ID NO: 3244717 - DNA, 25 bp, Homo sapien
gcccaacactgggagggccagacta

SEQ ID NO: 3244718 - DNA, 25 bp, Homo sapien
cctgttttcggggccagagcagcaa

SEQ ID NO: 3244719 - DNA, 25 bp, Homo sapien
tacgtgcctcgaaggtctgtggaga

SEQ ID NO: 3244720 - DNA, 25 bp, Homo sapien
acactggaggggcatagcacagcca

SEQ ID NO: 3244721 - DNA, 25 bp, Homo sapien
agccaccgccggcaaggacaggagg

SEQ ID NO: 3244722 - DNA, 25 bp, Homo sapien
tgccacactcggtgtggagcagcag

SEQ ID NO: 3244723 - DNA, 25 bp, Homo sapien
acaggaggattggggcctgcaggct

SEQ ID NO: 3244724 - DNA, 25 bp, Homo sapien
accccacctgggcgcacactgaaga

SEQ ID NO: 3244725 - DNA, 25 bp, Homo sapien
gaagacaggatgcggccacacccac

SEQ ID NO: 3244726 - DNA, 25 bp, Homo sapien
ccaccccacctgggcgcacactgaa

SEQ ID NO: 3244727 - DNA, 25 bp, Homo sapien
ccacctgggcgcacactgaagacag

SEQ ID NO: 3244728 - DNA, 25 bp, Homo sapien
ggcacgcacggaagacaggatgtgg

SEQ ID NO: 3244729 - DNA, 25 bp, Homo sapien
tgggcacgcacggaagacaggatgt

SEQ ID NO: 3244730 - DNA, 25 bp, Homo sapien
gggcacgcacggaagacaggatgtg

SEQ ID NO: 3244731 - DNA, 25 bp, Homo sapien
ttatttgagcaaatacattcttgaa

SEQ ID NO: 3244732 - DNA, 25 bp, Homo sapien
tctgtcccgcggagaagccttagtt

SEQ ID NO: 3244733 - DNA, 25 bp, Homo sapien
cactgttgcctgcttcggtctgtcc

SEQ ID NO: 3244734 - DNA, 25 bp, Homo sapien
gaaggctttgataagaaggatgcag

SEQ ID NO: 3244735 - DNA, 25 bp, Homo sapien
caggcctgagggtgcctgcgcccac

SEQ ID NO: 3244736 - DNA, 25 bp, Homo sapien
tcaggcctgagggtgcctgcgccca

SEQ ID NO: 3244737 - DNA, 25 bp, Homo sapien
gacgtgtgtcacgaatgcttggcat

SEQ ID NO: 3244738 - DNA, 25 bp, Homo sapien
agaagtcgctgcgatggtgccacca

SEQ ID NO: 3244739 - DNA, 25 bp, Homo sapien
tacttggtgaaacagtccgtgaggc

SEQ ID NO: 3244740 - DNA, 25 bp, Homo sapien
ccgaccagtgaggagacggctgtca

SEQ ID NO: 3244741 - DNA, 25 bp, Homo sapien
gctggagctgcatggggacggcagc

SEQ ID NO: 3244742 - DNA, 25 bp, Homo sapien
gtgggctggagctgcatggggacgg

SEQ ID NO: 3244743 - DNA, 25 bp, Homo sapien
ctggagctgcatggggacggcagct

SEQ ID NO: 3244744 - DNA, 25 bp, Homo sapien
gggctggagctgcatggggacggca

SEQ ID NO: 3244745 - DNA, 25 bp, Homo sapien
cactgcccggggctgggcaaacacg

SEQ ID NO: 3244746 - DNA, 25 bp, Homo sapien
actgcccggggctgggcaaacacgg

SEQ ID NO: 3244747 - DNA, 25 bp, Homo sapien
ctgcccggggctgggcaaacacgga

SEQ ID NO: 3244748 - DNA, 25 bp, Homo sapien
tgcccggggctgggcaaacacggag

SEQ ID NO: 3244749 - DNA, 25 bp, Homo sapien
ccagctggtggcgcgcatggagggg

SEQ ID NO: 3244750 - DNA, 25 bp, Homo sapien
gctggtggcgcgcatggaggggtat

SEQ ID NO: 3244751 - DNA, 25 bp, Homo sapien
tggcgcgcatggaggggtatggcag

SEQ ID NO: 3244752 - DNA, 25 bp, Homo sapien
ggtggcgcgcatggaggggtatggc

SEQ ID NO: 3244753 - DNA, 25 bp, Homo sapien
ggcaggttcagcgggtgggatctgg

SEQ ID NO: 3244754 - DNA, 25 bp, Homo sapien
cagaggcaggttcagcgggtgggat

SEQ ID NO: 3244755 - DNA, 25 bp, Homo sapien
aggcaggttcagcgggtgggatctg

SEQ ID NO: 3244756 - DNA, 25 bp, Homo sapien
gcatgtttttcctgccccgactcgg

SEQ ID NO: 3244757 - DNA, 25 bp, Homo sapien
tccacaggatcctctgcagagcctt

SEQ ID NO: 3244758 - DNA, 25 bp, Homo sapien
ttcctgccccgactcggtgtggctg

SEQ ID NO: 3244759 - DNA, 25 bp, Homo sapien
aggaggcggcccagcatgtttttcc

SEQ ID NO: 3244760 - DNA, 25 bp, Homo sapien
tggtgcatagggctttcgtcttgtg

SEQ ID NO: 3244761 - DNA, 25 bp, Homo sapien
tgaccctggtgcatagggctttcgt

SEQ ID NO: 3244762 - DNA, 25 bp, Homo sapien
ccctggtgcatagggctttcgtctt

SEQ ID NO: 3244763 - DNA, 25 bp, Homo sapien
gtgcatagggctttcgtcttgtgct

SEQ ID NO: 3244764 - DNA, 25 bp, Homo sapien
gccacagctccccagcagaccctgc

SEQ ID NO: 3244765 - DNA, 25 bp, Homo sapien
ccccagcagaccctgccaggctgac

SEQ ID NO: 3244766 - DNA, 25 bp, Homo sapien
tggccacagctccccagcagaccct

SEQ ID NO: 3244767 - DNA, 25 bp, Homo sapien
gctccccagcagaccctgccaggct

SEQ ID NO: 3244768 - DNA, 25 bp, Homo sapien
agctggggctcccatccgccgtggg

SEQ ID NO: 3244769 - DNA, 25 bp, Homo sapien
cgccgtgggcctgatccttcttgtc

SEQ ID NO: 3244770 - DNA, 25 bp, Homo sapien
atccgccgtgggcctgatccttctt

SEQ ID NO: 3244771 - DNA, 25 bp, Homo sapien
tcccatccgccgtgggcctgatcct

SEQ ID NO: 3244772 - DNA, 25 bp, Homo sapien
aagtgactctgggagagacaggctc

SEQ ID NO: 3244773 - DNA, 25 bp, Homo sapien
caacggcagcatccagtgatgaggc

SEQ ID NO: 3244774 - DNA, 25 bp, Homo sapien
tcagggtcctcctgtcaacggcagc

SEQ ID NO: 3244775 - DNA, 25 bp, Homo sapien
ctctgcttgtgagctgatgcccgca

SEQ ID NO: 3244776 - DNA, 25 bp, Homo sapien
ctcgatcccctccaggcggatacct

SEQ ID NO: 3244777 - DNA, 25 bp, Homo sapien
cccgtgaccgcgtggtctccaggag

SEQ ID NO: 3244778 - DNA, 25 bp, Homo sapien
cccaggatgtgcgccatgcctgcgt

SEQ ID NO: 3244779 - DNA, 25 bp, Homo sapien
taaatccacgatgagtccccgtgac

SEQ ID NO: 3244780 - DNA, 25 bp, Homo sapien
tcactgccaccggtggaaaaccagg

SEQ ID NO: 3244781 - DNA, 25 bp, Homo sapien
actggcacgtgggtgacaaggttca

SEQ ID NO: 3244782 - DNA, 25 bp, Homo sapien
cagaagtcgtatgcacaaagcaaag

SEQ ID NO: 3244783 - DNA, 25 bp, Homo sapien
gcagccaggcccacttcagatggtg

SEQ ID NO: 3244784 - DNA, 25 bp, Homo sapien
taatagaacgcccttctgaaatgca

SEQ ID NO: 3244785 - DNA, 25 bp, Homo sapien
caagcaacacgaaacctactctgtg

SEQ ID NO: 3244786 - DNA, 25 bp, Homo sapien
gagaagctttctcccgaactgcaaa

SEQ ID NO: 3244787 - DNA, 25 bp, Homo sapien
tacgccttaatgttccaagcaacac

SEQ ID NO: 3244788 - DNA, 25 bp, Homo sapien
gggaggacagaaccgtcttcactgg

SEQ ID NO: 3244789 - DNA, 25 bp, Homo sapien
tggtcaccgactccctagaggccca

SEQ ID NO: 3244790 - DNA, 25 bp, Homo sapien
cgtcatcttcgtaattgagggagca

SEQ ID NO: 3244791 - DNA, 25 bp, Homo sapien
ctgcgggagccatcactggtcaccg

SEQ ID NO: 3244792 - DNA, 25 bp, Homo sapien
tcgagggctcggtgtgctggggctc

SEQ ID NO: 3244793 - DNA, 25 bp, Homo sapien
aacccatcgagggctcggtgtgctg

SEQ ID NO: 3244794 - DNA, 25 bp, Homo sapien
catcgagggctcggtgtgctggggc

SEQ ID NO: 3244795 - DNA, 25 bp, Homo sapien
cccatcgagggctcggtgtgctggg

SEQ ID NO: 3244796 - DNA, 25 bp, Homo sapien
tcgtggctcaggcttgtgagggcac

SEQ ID NO: 3244797 - DNA, 25 bp, Homo sapien
ctcgtggctcaggcttgtgagggca

SEQ ID NO: 3244798 - DNA, 25 bp, Homo sapien
cagctcggtctggtgtcacccgtga

SEQ ID NO: 3244799 - DNA, 25 bp, Homo sapien
ggtctggtgtcacccgtgaccttgc

SEQ ID NO: 3244800 - DNA, 25 bp, Homo sapien
tcacccgtgaccttgcagactctgg

SEQ ID NO: 3244801 - DNA, 25 bp, Homo sapien
gtgtcacccgtgaccttgcagactc

SEQ ID NO: 3244802 - DNA, 25 bp, Homo sapien
gggactcgcactcgcgggcacagct

SEQ ID NO: 3244803 - DNA, 25 bp, Homo sapien
tggactgactgctcggacccgacag

SEQ ID NO: 3244804 - DNA, 25 bp, Homo sapien
ttgttttcattcagagtcgaccctc

SEQ ID NO: 3244805 - DNA, 25 bp, Homo sapien
agatgctgtaaggtcacgccgaggc

SEQ ID NO: 3244806 - DNA, 25 bp, Homo sapien
tttcaaactgtgtgcgaagccctcc

SEQ ID NO: 3244807 - DNA, 25 bp, Homo sapien
ttaactcagctaccggaagccggtg

SEQ ID NO: 3244808 - DNA, 25 bp, Homo sapien
aaattgggctccaaagcgcagaggc

SEQ ID NO: 3244809 - DNA, 25 bp, Homo sapien
cacgctgtagagacggtggaaaccg

SEQ ID NO: 3244810 - DNA, 25 bp, Homo sapien
agaaagcgcaagctccatccaccat

SEQ ID NO: 3244811 - DNA, 25 bp, Homo sapien
ttgagaaagcgcaagctccatccac

SEQ ID NO: 3244812 - DNA, 25 bp, Homo sapien
tctcttgagaaagcgcaagctccat

SEQ ID NO: 3244813 - DNA, 25 bp, Homo sapien
ctctcttgagaaagcgcaagctcca

SEQ ID NO: 3244814 - DNA, 25 bp, Homo sapien
tcagtagccgaagagggtatcaagg

SEQ ID NO: 3244815 - DNA, 25 bp, Homo sapien
cagtagccgaagagggtatcaaggc

SEQ ID NO: 3244816 - DNA, 25 bp, Homo sapien
tgggctgtggccaggtcgaggagga

SEQ ID NO: 3244817 - DNA, 25 bp, Homo sapien
gggctgtggccaggtcgaggaggac

SEQ ID NO: 3244818 - DNA, 25 bp, Homo sapien
acccgcgagtcgctcctgtgagagg

SEQ ID NO: 3244819 - DNA, 25 bp, Homo sapien
aagtccaaggatgggcgtgtccacc

SEQ ID NO: 3244820 - DNA, 25 bp, Homo sapien
ttcccactgagcacgcaaggctgtg

SEQ ID NO: 3244821 - DNA, 25 bp, Homo sapien
agggcaagcaggactccgcggaaca

SEQ ID NO: 3244822 - DNA, 25 bp, Homo sapien
cttccctgccgcgtggcactcccgc

SEQ ID NO: 3244823 - DNA, 25 bp, Homo sapien
ggcgaggtgggaccggtcgaccaca

SEQ ID NO: 3244824 - DNA, 25 bp, Homo sapien
tgggaccggtcgaccacacagcact

SEQ ID NO: 3244825 - DNA, 25 bp, Homo sapien
tgccgcgtggcactcccgccgctgt

SEQ ID NO: 3244826 - DNA, 25 bp, Homo sapien
cgggttctgacaaggaccggcaatg

SEQ ID NO: 3244827 - DNA, 25 bp, Homo sapien
aaggaccggcaatgccgcttggtcg

SEQ ID NO: 3244828 - DNA, 25 bp, Homo sapien
gagtccagaccttggagctgccggg

SEQ ID NO: 3244829 - DNA, 25 bp, Homo sapien
accggcagcgcacaagctcctcggg

SEQ ID NO: 3244830 - DNA, 25 bp, Homo sapien
gctttcactggggtccacggtgctg

SEQ ID NO: 3244831 - DNA, 25 bp, Homo sapien
tttcactggggtccacggtgctggc

SEQ ID NO: 3244832 - DNA, 25 bp, Homo sapien
tgtgctttcactggggtccacggtg

SEQ ID NO: 3244833 - DNA, 25 bp, Homo sapien
ttcactggggtccacggtgctggct

SEQ ID NO: 3244834 - DNA, 25 bp, Homo sapien
tgacgggcggtcctccactgaagac

SEQ ID NO: 3244835 - DNA, 25 bp, Homo sapien
ctgaagacccatggtgtgagcggca

SEQ ID NO: 3244836 - DNA, 25 bp, Homo sapien
ttctgacgggcggtcctccactgaa

SEQ ID NO: 3244837 - DNA, 25 bp, Homo sapien
ggctgccactgaagacccatggtgt

SEQ ID NO: 3244838 - DNA, 25 bp, Homo sapien
agcctccatactcggggcacctgct

SEQ ID NO: 3244839 - DNA, 25 bp, Homo sapien
ctggcccgtgaacaccagccagcct

SEQ ID NO: 3244840 - DNA, 25 bp, Homo sapien
cagccagcctccatactcggggcac

SEQ ID NO: 3244841 - DNA, 25 bp, Homo sapien
cccgtgaacaccagccagcctccat

SEQ ID NO: 3244842 - DNA, 25 bp, Homo sapien
gagctccaaagggaacagacgaccg

SEQ ID NO: 3244843 - DNA, 25 bp, Homo sapien
gacgaccgctcttgttcagggtttc

SEQ ID NO: 3244844 - DNA, 25 bp, Homo sapien
cgttgagctccaaagggaacagacg

SEQ ID NO: 3244845 - DNA, 25 bp, Homo sapien
aaagggaacagacgaccgctcttgt

SEQ ID NO: 3244846 - DNA, 25 bp, Homo sapien
ctgacaggaaagagaagtttcaata

SEQ ID NO: 3244847 - DNA, 25 bp, Homo sapien
gtgagaattcggcaataatatcccc

SEQ ID NO: 3244848 - DNA, 25 bp, Homo sapien
ttcggcaataatatcccccattttc

SEQ ID NO: 3244849 - DNA, 25 bp, Homo sapien
acacgtgagaattcggcaataatat

SEQ ID NO: 3244850 - DNA, 25 bp, Homo sapien
agaattcggcaataatatcccccat

SEQ ID NO: 3244851 - DNA, 25 bp, Homo sapien
gccattaatgtgtctgcttccacgc

SEQ ID NO: 3244852 - DNA, 25 bp, Homo sapien
tcacggcttggaggccattaatgtg

SEQ ID NO: 3244853 - DNA, 25 bp, Homo sapien
gcttggaggccattaatgtgtctgc

SEQ ID NO: 3244854 - DNA, 25 bp, Homo sapien
aatgtgtctgcttccacgcactggc

SEQ ID NO: 3244855 - DNA, 25 bp, Homo sapien
ggcagctctgctaaaggacttgaag

SEQ ID NO: 3244856 - DNA, 25 bp, Homo sapien
gacttgaaggctttcacgccacagg

SEQ ID NO: 3244857 - DNA, 25 bp, Homo sapien
ggacccttgttgctgtcgatcctcc

SEQ ID NO: 3244858 - DNA, 25 bp, Homo sapien
gctcgacgctgccacggaaaaacgt

SEQ ID NO: 3244859 - DNA, 25 bp, Homo sapien
gagcacaagaggtggaaaccagcct

SEQ ID NO: 3244860 - DNA, 25 bp, Homo sapien
tgagaccccctttctaaaagatata

SEQ ID NO: 3244861 - DNA, 25 bp, Homo sapien
tggacaataacacgcgttgatgaga

SEQ ID NO: 3244862 - DNA, 25 bp, Homo sapien
aaaaatggacaataacacgcgttga

SEQ ID NO: 3244863 - DNA, 25 bp, Homo sapien
taacacgcgttgatgagagttggag

SEQ ID NO: 3244864 - DNA, 25 bp, Homo sapien
catagctaaccatagggaaatgaaa

SEQ ID NO: 3244865 - DNA, 25 bp, Homo sapien
ccgccttgcaggtgaggtcgtccag

SEQ ID NO: 3244866 - DNA, 25 bp, Homo sapien
gcttctcagtgatgagtgtgaccat

SEQ ID NO: 3244867 - DNA, 25 bp, Homo sapien
aggtgaggtcgtccaggctctggct

SEQ ID NO: 3244868 - DNA, 25 bp, Homo sapien
cagcctccgccttgcaggtgaggtc

SEQ ID NO: 3244869 - DNA, 25 bp, Homo sapien
cgtccacaccaacaggcactggagt

SEQ ID NO: 3244870 - DNA, 25 bp, Homo sapien
ccgtgtcctccgtccacaccaacag

SEQ ID NO: 3244871 - DNA, 25 bp, Homo sapien
gtccacaccaacaggcactggagtc

SEQ ID NO: 3244872 - DNA, 25 bp, Homo sapien
gtcctccgtccacaccaacaggcac

SEQ ID NO: 3244873 - DNA, 25 bp, Homo sapien
ctggaacatcagacttgcgaaggcc

SEQ ID NO: 3244874 - DNA, 25 bp, Homo sapien
cagacttgcgaaggccccagcattg

SEQ ID NO: 3244875 - DNA, 25 bp, Homo sapien
tttacagatgagcagtccacgccca

SEQ ID NO: 3244876 - DNA, 25 bp, Homo sapien
gggtcagccaaatctcaaggtcatg

SEQ ID NO: 3244877 - DNA, 25 bp, Homo sapien
ttttgcaacccaacaaaggagaaga

SEQ ID NO: 3244878 - DNA, 25 bp, Homo sapien
tgacctacccaccttgtagggtcca

SEQ ID NO: 3244879 - DNA, 25 bp, Homo sapien
cattcgaagtgttccttttgcaacc

SEQ ID NO: 3244880 - DNA, 25 bp, Homo sapien
gcccggctgaactcgctatttttaa

SEQ ID NO: 3244881 - DNA, 25 bp, Homo sapien
ctgtaatggactgaacaagcaacag

SEQ ID NO: 3244882 - DNA, 25 bp, Homo sapien
tgtaatggactgaacaagcaacaga

SEQ ID NO: 3244883 - DNA, 25 bp, Homo sapien
tctgtaatggactgaacaagcaaca

SEQ ID NO: 3244884 - DNA, 25 bp, Homo sapien
ctgggagatagatgatcatagaaac

SEQ ID NO: 3244885 - DNA, 25 bp, Homo sapien
agaagaggcaccaaggatgccgcgc

SEQ ID NO: 3244886 - DNA, 25 bp, Homo sapien
gccaaactcatccatccgtactggg

SEQ ID NO: 3244887 - DNA, 25 bp, Homo sapien
aggcaccaaggatgccgcgcgaaaa

SEQ ID NO: 3244888 - DNA, 25 bp, Homo sapien
gaggccacttaacacaggctgcgtg

SEQ ID NO: 3244889 - DNA, 25 bp, Homo sapien
tccacacaggagaatctcggcgatt

SEQ ID NO: 3244890 - DNA, 25 bp, Homo sapien
ccaggctacgcagaaaaagcggctt

SEQ ID NO: 3244891 - DNA, 25 bp, Homo sapien
ggctccgcgactgcgctcagattaa

SEQ ID NO: 3244892 - DNA, 25 bp, Homo sapien
tcgtgcggaaaagtcgcctcgacgg

SEQ ID NO: 3244893 - DNA, 25 bp, Homo sapien
tcgcgccaccgaaccacggcgcggg

SEQ ID NO: 3244894 - DNA, 25 bp, Homo sapien
agtccacgcgcccagctcggagcgc

SEQ ID NO: 3244895 - DNA, 25 bp, Homo sapien
acgggcggcgcagacggcggaggca

SEQ ID NO: 3244896 - DNA, 25 bp, Homo sapien
cgcgggggtgcggagcgagaagact

SEQ ID NO: 3244897 - DNA, 25 bp, Homo sapien
ggccgcgggggtgcggagcgagaag

SEQ ID NO: 3244898 - DNA, 25 bp, Homo sapien
cgggggtgcggagcgagaagactgc

SEQ ID NO: 3244899 - DNA, 25 bp, Homo sapien
agcgagaagactgccggccgcccag

SEQ ID NO: 3244900 - DNA, 25 bp, Homo sapien
agcgcgccctgtgcgagggtctggc

SEQ ID NO: 3244901 - DNA, 25 bp, Homo sapien
cagcgcgccctgtgcgagggtctgg

SEQ ID NO: 3244902 - DNA, 25 bp, Homo sapien
gcagcgcgccctgtgcgagggtctg

SEQ ID NO: 3244903 - DNA, 25 bp, Homo sapien
agaaggcaagacctgtggcggcggc

SEQ ID NO: 3244904 - DNA, 25 bp, Homo sapien
ctagaaggcaagacctgtggcggcg

SEQ ID NO: 3244905 - DNA, 25 bp, Homo sapien
tagaaggcaagacctgtggcggcgg

SEQ ID NO: 3244906 - DNA, 25 bp, Homo sapien
aaggcaagacctgtggcggcggcga

SEQ ID NO: 3244907 - DNA, 25 bp, Homo sapien
tggggcctggttccgtccgagcaca

SEQ ID NO: 3244908 - DNA, 25 bp, Homo sapien
cttggggggtccctagggatgagca

SEQ ID NO: 3244909 - DNA, 25 bp, Homo sapien
tggggggtccctagggatgagcacc

SEQ ID NO: 3244910 - DNA, 25 bp, Homo sapien
cagggctccttctggcgataggcgg

SEQ ID NO: 3244911 - DNA, 25 bp, Homo sapien
atggaggccggctggttccgggaat

SEQ ID NO: 3244912 - DNA, 25 bp, Homo sapien
tggaggccggctggttccgggaata

SEQ ID NO: 3244913 - DNA, 25 bp, Homo sapien
ctgtctggaagagtgggagtcccag

SEQ ID NO: 3244914 - DNA, 25 bp, Homo sapien
aagggctggagcaggcgtccaggcc

SEQ ID NO: 3244915 - DNA, 25 bp, Homo sapien
gtctggaagagtgggagtcccagcg

SEQ ID NO: 3244916 - DNA, 25 bp, Homo sapien
gagaagggctggagcaggcgtccag

SEQ ID NO: 3244917 - DNA, 25 bp, Homo sapien
tgaactgtcaccatctaacaaggac

SEQ ID NO: 3244918 - DNA, 25 bp, Homo sapien
ggaggccacagcaccactgaactgt

SEQ ID NO: 3244919 - DNA, 25 bp, Homo sapien
ctcctcccacattttaggactcttg

SEQ ID NO: 3244920 - DNA, 25 bp, Homo sapien
tcaagactgaggcttgcagtcaggc

SEQ ID NO: 3244921 - DNA, 25 bp, Homo sapien
gctctcacggcagctggcccacctg

SEQ ID NO: 3244922 - DNA, 25 bp, Homo sapien
agctctcacggcagctggcccacct

SEQ ID NO: 3244923 - DNA, 25 bp, Homo sapien
tacgcaattaagctcgctggaagag

SEQ ID NO: 3244924 - DNA, 25 bp, Homo sapien
tagacgtgtcagcttaccctggagg

SEQ ID NO: 3244925 - DNA, 25 bp, Homo sapien
gaggacaacagggattacgcaatta

SEQ ID NO: 3244926 - DNA, 25 bp, Homo sapien
agtagctgactctcaattggtccca

SEQ ID NO: 3244927 - DNA, 25 bp, Homo sapien
tcatggctgagaagtctctcaaggg

SEQ ID NO: 3244928 - DNA, 25 bp, Homo sapien
tccacttgactgtccatgtgtctca

SEQ ID NO: 3244929 - DNA, 25 bp, Homo sapien
cacttgactgtccatgtgtctcacc

SEQ ID NO: 3244930 - DNA, 25 bp, Homo sapien
gagaagtctctcaagggttcagtta

SEQ ID NO: 3244931 - DNA, 25 bp, Homo sapien
gctggtctggggctcggagctgctt

SEQ ID NO: 3244932 - DNA, 25 bp, Homo sapien
tctggggctcggagctgctttctgc

SEQ ID NO: 3244933 - DNA, 25 bp, Homo sapien
aaagtcatcctgagagctggtctgg

SEQ ID NO: 3244934 - DNA, 25 bp, Homo sapien
gagctgctttctgcagattcaaggt

SEQ ID NO: 3244935 - DNA, 25 bp, Homo sapien
catggttgagccgaaatgactcaaa

SEQ ID NO: 3244936 - DNA, 25 bp, Homo sapien
ttgagccgaaatgactcaaatactt

SEQ ID NO: 3244937 - DNA, 25 bp, Homo sapien
tttcatggttgagccgaaatgactc

SEQ ID NO: 3244938 - DNA, 25 bp, Homo sapien
tattttcatggttgagccgaaatga

SEQ ID NO: 3244939 - DNA, 25 bp, Homo sapien
gctccagtcactggaccaatcagag

SEQ ID NO: 3244940 - DNA, 25 bp, Homo sapien
tcctgtcccagtggtgcgcagctgc

SEQ ID NO: 3244941 - DNA, 25 bp, Homo sapien
tcacaggacaagaatgcaataaaga

SEQ ID NO: 3244942 - DNA, 25 bp, Homo sapien
tcactggaccaatcagagaatcaca

SEQ ID NO: 3244943 - DNA, 25 bp, Homo sapien
ttgctggtcccatgaacgtcgacta

SEQ ID NO: 3244944 - DNA, 25 bp, Homo sapien
atgaatgccaggttgtcgaaggtgt

SEQ ID NO: 3244945 - DNA, 25 bp, Homo sapien
tattaggggtcttgggatgaatgcc

SEQ ID NO: 3244946 - DNA, 25 bp, Homo sapien
ttcttgcaaatcacatccttcttcc

SEQ ID NO: 3244947 - DNA, 25 bp, Homo sapien
tagacatagactcctttgaatcaga

SEQ ID NO: 3244948 - DNA, 25 bp, Homo sapien
tgtctcaaagtcagccggcacagta

SEQ ID NO: 3244949 - DNA, 25 bp, Homo sapien
tctttaatataacgatcgtaggcaa

SEQ ID NO: 3244950 - DNA, 25 bp, Homo sapien
tcttcccatagttgatctgcttctg

SEQ ID NO: 3244951 - DNA, 25 bp, Homo sapien
tcattgatgaggagtttccttttat

SEQ ID NO: 3244952 - DNA, 25 bp, Homo sapien
gtcattgatgaggagtttcctttta

SEQ ID NO: 3244953 - DNA, 25 bp, Homo sapien
ttgccatttctttgttaactctggt

SEQ ID NO: 3244954 - DNA, 25 bp, Homo sapien
cttgccatttctttgttaactctgg

SEQ ID NO: 3244955 - DNA, 25 bp, Homo sapien
tgccatttctttgttaactctggtc

SEQ ID NO: 3244956 - DNA, 25 bp, Homo sapien
gccatttctttgttaactctggtcc

SEQ ID NO: 3244957 - DNA, 25 bp, Homo sapien
ctacagcaaattgtccactctgcaa

SEQ ID NO: 3244958 - DNA, 25 bp, Homo sapien
tctacagcaaattgtccactctgca

SEQ ID NO: 3244959 - DNA, 25 bp, Homo sapien
ggcctacttcttaaagtgattgtac

SEQ ID NO: 3244960 - DNA, 25 bp, Homo sapien
cggcctacttcttaaagtgattgta

SEQ ID NO: 3244961 - DNA, 25 bp, Homo sapien
cctacttcttaaagtgattgtactc

SEQ ID NO: 3244962 - DNA, 25 bp, Homo sapien
tacttcttaaagtgattgtactcaa

SEQ ID NO: 3244963 - DNA, 25 bp, Homo sapien
aatggccccaatcaacagcgttcag

SEQ ID NO: 3244964 - DNA, 25 bp, Homo sapien
gtcgaggctggtccccaacaatggg

SEQ ID NO: 3244965 - DNA, 25 bp, Homo sapien
gtgcctgaagatgcctcccatgtag

SEQ ID NO: 3244966 - DNA, 25 bp, Homo sapien
tcattccgggtaagtgtcgaggctg

SEQ ID NO: 3244967 - DNA, 25 bp, Homo sapien
cgctcggcgccgcggtgctctgcct

SEQ ID NO: 3244968 - DNA, 25 bp, Homo sapien
tcggcgccgcggtgctctgcctcct

SEQ ID NO: 3244969 - DNA, 25 bp, Homo sapien
gctcggcgccgcggtgctctgcctc

SEQ ID NO: 3244970 - DNA, 25 bp, Homo sapien
ctcggcgccgcggtgctctgcctcc

SEQ ID NO: 3244971 - DNA, 25 bp, Homo sapien
ctccagcgcctgccgtcggctctgc

SEQ ID NO: 3244972 - DNA, 25 bp, Homo sapien
gccgtcggctctgcgcttccgtccc

SEQ ID NO: 3244973 - DNA, 25 bp, Homo sapien
gctccatcgcgcgggggacggcggg

SEQ ID NO: 3244974 - DNA, 25 bp, Homo sapien
tctgcgcttccgtcccaggctccat

SEQ ID NO: 3244975 - DNA, 25 bp, Homo sapien
tcgcagcggctctgatgcctcggcg

SEQ ID NO: 3244976 - DNA, 25 bp, Homo sapien
gctctgatgcctcggcgggcttcgc

SEQ ID NO: 3244977 - DNA, 25 bp, Homo sapien
gtcaccgtcgcagcggctctgatgc

SEQ ID NO: 3244978 - DNA, 25 bp, Homo sapien
tggcgtcaccgtcgcagcggctctg

SEQ ID NO: 3244979 - DNA, 25 bp, Homo sapien
ccctcggctcgggagccagatggac

SEQ ID NO: 3244980 - DNA, 25 bp, Homo sapien
caaccgcctttatgtgggcgccggg

SEQ ID NO: 3244981 - DNA, 25 bp, Homo sapien
caggggtccactcagctgtgcgcgc

SEQ ID NO: 3244982 - DNA, 25 bp, Homo sapien
agagagcgcagagtagagcagggca

SEQ ID NO: 3244983 - DNA, 25 bp, Homo sapien
gttgactgggtttgtatcctgaaga

SEQ ID NO: 3244984 - DNA, 25 bp, Homo sapien
gagttgactgggtttgtatcctgaa

SEQ ID NO: 3244985 - DNA, 25 bp, Homo sapien
ctggagttgactgggtttgtatcct

SEQ ID NO: 3244986 - DNA, 25 bp, Homo sapien
ggagttgactgggtttgtatcctga

SEQ ID NO: 3244987 - DNA, 25 bp, Homo sapien
gaggcgaggtcctgtagatccgcac

SEQ ID NO: 3244988 - DNA, 25 bp, Homo sapien
ctggaggcgaggtcctgtagatccg

SEQ ID NO: 3244989 - DNA, 25 bp, Homo sapien
ggcgaggtcctgtagatccgcacca

SEQ ID NO: 3244990 - DNA, 25 bp, Homo sapien
gcgaggtcctgtagatccgcaccat

SEQ ID NO: 3244991 - DNA, 25 bp, Homo sapien
ctgacggccccgcggatccagccaa

SEQ ID NO: 3244992 - DNA, 25 bp, Homo sapien
cacagttgcagctgacggccccgcg

SEQ ID NO: 3244993 - DNA, 25 bp, Homo sapien
caacgggtgcactacacctgagaac

SEQ ID NO: 3244994 - DNA, 25 bp, Homo sapien
cccaacgggtgcactacacctgaga

SEQ ID NO: 3244995 - DNA, 25 bp, Homo sapien
ctagaaccccaacgggtgcactaca

SEQ ID NO: 3244996 - DNA, 25 bp, Homo sapien
accccaacgggtgcactacacctga

SEQ ID NO: 3244997 - DNA, 25 bp, Homo sapien
actcgtagcgcaggaaactagagcc

SEQ ID NO: 3244998 - DNA, 25 bp, Homo sapien
gaatctgaagacactcgtagcgcag

SEQ ID NO: 3244999 - DNA, 25 bp, Homo sapien
tgaagacactcgtagcgcaggaaac

SEQ ID NO: 3245000 - DNA, 25 bp, Homo sapien
gaaagaatctgaagacactcgtagc

SEQ ID NO: 3245001 - DNA, 25 bp, Homo sapien
ctttcaataggattacgtgtactgt

SEQ ID NO: 3245002 - DNA, 25 bp, Homo sapien
ttcaataggattacgtgtactgttt

SEQ ID NO: 3245003 - DNA, 25 bp, Homo sapien
atctttcaataggattacgtgtact

SEQ ID NO: 3245004 - DNA, 25 bp, Homo sapien
caataggattacgtgtactgtttcc

SEQ ID NO: 3245005 - DNA, 25 bp, Homo sapien
ctaggtgctcggctggcaattcctg

SEQ ID NO: 3245006 - DNA, 25 bp, Homo sapien
ctgccctaggtgctcggctggcaat

SEQ ID NO: 3245007 - DNA, 25 bp, Homo sapien
gctgtcttggctgccctaggtgctc

SEQ ID NO: 3245008 - DNA, 25 bp, Homo sapien
tgctgtcttggctgccctaggtgct

SEQ ID NO: 3245009 - DNA, 25 bp, Homo sapien
tttaatatcgggcaacacaaaacac

SEQ ID NO: 3245010 - DNA, 25 bp, Homo sapien
tttggttttaatatcgggcaacaca

SEQ ID NO: 3245011 - DNA, 25 bp, Homo sapien
tggttttaatatcgggcaacacaaa

SEQ ID NO: 3245012 - DNA, 25 bp, Homo sapien
ttttaatatcgggcaacacaaaaca

SEQ ID NO: 3245013 - DNA, 25 bp, Homo sapien
aaatgagggcgctctgacctgtcct

SEQ ID NO: 3245014 - DNA, 25 bp, Homo sapien
gaaactcagttcaaagctaggcctg

SEQ ID NO: 3245015 - DNA, 25 bp, Homo sapien
tctggatgtcgctatggcactttgg

SEQ ID NO: 3245016 - DNA, 25 bp, Homo sapien
ttcacctgctgagcgctctaggaag

SEQ ID NO: 3245017 - DNA, 25 bp, Homo sapien
tgggtatgctccagagaagtaaggc

SEQ ID NO: 3245018 - DNA, 25 bp, Homo sapien
aatggcccagatgacgaccacctgg

SEQ ID NO: 3245019 - DNA, 25 bp, Homo sapien
acagggcaggagaatgcggtccagg

SEQ ID NO: 3245020 - DNA, 25 bp, Homo sapien
ccaggtctggcacgtaactgagggt

SEQ ID NO: 3245021 - DNA, 25 bp, Homo sapien
aagtagagccctttgccagccagga

SEQ ID NO: 3245022 - DNA, 25 bp, Homo sapien
tttggggggagacacagagtcacct

SEQ ID NO: 3245023 - DNA, 25 bp, Homo sapien
tgtgctttaagtagagccctttgcc

SEQ ID NO: 3245024 - DNA, 25 bp, Homo sapien
ggcgagttgctctacatcatgtgct

SEQ ID NO: 3245025 - DNA, 25 bp, Homo sapien
catccaggatgcagaagcgtgcgcg

SEQ ID NO: 3245026 - DNA, 25 bp, Homo sapien
agtaacactgctggcactcgcctgt

SEQ ID NO: 3245027 - DNA, 25 bp, Homo sapien
cacgctggcacgtgtctgcatgcag

SEQ ID NO: 3245028 - DNA, 25 bp, Homo sapien
tggcgaaccacttgcccatgcaggt

SEQ ID NO: 3245029 - DNA, 25 bp, Homo sapien
acacccgtgggcacccacccatcca

SEQ ID NO: 3245030 - DNA, 25 bp, Homo sapien
cacccgtgggcacccacccatccac

SEQ ID NO: 3245031 - DNA, 25 bp, Homo sapien
tgagtaggccgggttgacctctacc

SEQ ID NO: 3245032 - DNA, 25 bp, Homo sapien
acatgggctgccctgcggatgggtg

SEQ ID NO: 3245033 - DNA, 25 bp, Homo sapien
gctccccgtactcagtggagttcag

SEQ ID NO: 3245034 - DNA, 25 bp, Homo sapien
atgggtgcccggagcttctcgcaga

SEQ ID NO: 3245035 - DNA, 25 bp, Homo sapien
ggcacgggacggacctaggagcaag

SEQ ID NO: 3245036 - DNA, 25 bp, Homo sapien
ccaggaccaaccaggagagatggcc

SEQ ID NO: 3245037 - DNA, 25 bp, Homo sapien
gagatggccctaaggccagagccca

SEQ ID NO: 3245038 - DNA, 25 bp, Homo sapien
gagcggaagatggaggctacacccc

SEQ ID NO: 3245039 - DNA, 25 bp, Homo sapien
gcaaacttgtcaatccgccggaact

SEQ ID NO: 3245040 - DNA, 25 bp, Homo sapien
tgtctgtcacaatcacacgggcacc

SEQ ID NO: 3245041 - DNA, 25 bp, Homo sapien
caagttcgagtctggcgagagctca

SEQ ID NO: 3245042 - DNA, 25 bp, Homo sapien
cacgggaccagtagtagatcaggat

SEQ ID NO: 3245043 - DNA, 25 bp, Homo sapien
ggctgatcaaatgtggtgcatccca

SEQ ID NO: 3245044 - DNA, 25 bp, Homo sapien
cagctgcctggacaggatctcagtc

SEQ ID NO: 3245045 - DNA, 25 bp, Homo sapien
tcagctcccagggtaattgggcttt

SEQ ID NO: 3245046 - DNA, 25 bp, Homo sapien
tggcaaaggcaggatatattagcgg

SEQ ID NO: 3245047 - DNA, 25 bp, Homo sapien
gcgtgaacacgaagcacacggcgaa

SEQ ID NO: 3245048 - DNA, 25 bp, Homo sapien
agcagcgagtggcacaacagcgtgg

SEQ ID NO: 3245049 - DNA, 25 bp, Homo sapien
cagataggcgagagtgaaggtcacc

SEQ ID NO: 3245050 - DNA, 25 bp, Homo sapien
agcaggttctgcaccgtgagccccg

SEQ ID NO: 3245051 - DNA, 25 bp, Homo sapien
cagtcccggacctgtcggttgcggc

SEQ ID NO: 3245052 - DNA, 25 bp, Homo sapien
ccgggaagctgtcgagctaggcccc

SEQ ID NO: 3245053 - DNA, 25 bp, Homo sapien
cgcagccgccgggaagctgtcgagc

SEQ ID NO: 3245054 - DNA, 25 bp, Homo sapien
cgcccagtcccggacctgtcggttg

SEQ ID NO: 3245055 - DNA, 25 bp, Homo sapien
aattcatggggcgactgcgagcccg

SEQ ID NO: 3245056 - DNA, 25 bp, Homo sapien
ccagtagcgtcagttgcggaactcg

SEQ ID NO: 3245057 - DNA, 25 bp, Homo sapien
cggcaccgcacctgtgcattgagca

SEQ ID NO: 3245058 - DNA, 25 bp, Homo sapien
tgcgggtgcggcctctcttctcggc

SEQ ID NO: 3245059 - DNA, 25 bp, Homo sapien
gcgaggcggtgtctgtctttgccta

SEQ ID NO: 3245060 - DNA, 25 bp, Homo sapien
gattcttaactgcaagtggatggcg

SEQ ID NO: 3245061 - DNA, 25 bp, Homo sapien
gaccccagaggcatgattttctgtt

SEQ ID NO: 3245062 - DNA, 25 bp, Homo sapien
gcggctgaactaatctgtctgggca

SEQ ID NO: 3245063 - DNA, 25 bp, Homo sapien
ttcctgacacaggtagccctactgc

SEQ ID NO: 3245064 - DNA, 25 bp, Homo sapien
cacacagtctaagccaattccaatt

SEQ ID NO: 3245065 - DNA, 25 bp, Homo sapien
cctgttggctaaggttggaccacac

SEQ ID NO: 3245066 - DNA, 25 bp, Homo sapien
ggaggccgaagcaagacaatggctt

SEQ ID NO: 3245067 - DNA, 25 bp, Homo sapien
tcgaagaggttgtgtaccaggccat

SEQ ID NO: 3245068 - DNA, 25 bp, Homo sapien
cacaggaagatcatggacaggttcg

SEQ ID NO: 3245069 - DNA, 25 bp, Homo sapien
tgaggccccttttcctaacacacga

SEQ ID NO: 3245070 - DNA, 25 bp, Homo sapien
cagttgtgcagatgctgagctagca

SEQ ID NO: 3245071 - DNA, 25 bp, Homo sapien
catgggatgacctgtgaacgagaca

SEQ ID NO: 3245072 - DNA, 25 bp, Homo sapien
cacagcatagctggtttgcgaggca

SEQ ID NO: 3245073 - DNA, 25 bp, Homo sapien
aacagaaagaggtgatcgagggcta

SEQ ID NO: 3245074 - DNA, 25 bp, Homo sapien
cagacgactcggctatgatcaggca

SEQ ID NO: 3245075 - DNA, 25 bp, Homo sapien
ggttcagccatggcacctaggaccc

SEQ ID NO: 3245076 - DNA, 25 bp, Homo sapien
agccatggcacctaggaccccagca

SEQ ID NO: 3245077 - DNA, 25 bp, Homo sapien
cctgggtaccgagctgagagatgct

SEQ ID NO: 3245078 - DNA, 25 bp, Homo sapien
ccgggaacctgggtaccgagctgag

SEQ ID NO: 3245079 - DNA, 25 bp, Homo sapien
caggggtcgcttgccgccatgggcc

SEQ ID NO: 3245080 - DNA, 25 bp, Homo sapien
tcgggtgggcgcaacaacaccccca

SEQ ID NO: 3245081 - DNA, 25 bp, Homo sapien
gccgccaggggtcgcttgccgccat

SEQ ID NO: 3245082 - DNA, 25 bp, Homo sapien
gggtgggcgcaacaacacccccagc

SEQ ID NO: 3245083 - DNA, 25 bp, Homo sapien
cagggaccggaccaggtgggtgaca

SEQ ID NO: 3245084 - DNA, 25 bp, Homo sapien
agtgccacgccaccagtccacaggc

SEQ ID NO: 3245085 - DNA, 25 bp, Homo sapien
cacgccaccagtccacaggcgctca

SEQ ID NO: 3245086 - DNA, 25 bp, Homo sapien
acgccaccagtccacaggcgctcac

SEQ ID NO: 3245087 - DNA, 25 bp, Homo sapien
cagtgccacgccaccagtccacagg

SEQ ID NO: 3245088 - DNA, 25 bp, Homo sapien
acccagacagcagggacctgccggg

SEQ ID NO: 3245089 - DNA, 25 bp, Homo sapien
cagcagggacctgccgggcgctcct

SEQ ID NO: 3245090 - DNA, 25 bp, Homo sapien
cagacagcagggacctgccgggcgc

SEQ ID NO: 3245091 - DNA, 25 bp, Homo sapien
gacagcagggacctgccgggcgctc

SEQ ID NO: 3245092 - DNA, 25 bp, Homo sapien
tccccagcccgaacctgtggcctgg

SEQ ID NO: 3245093 - DNA, 25 bp, Homo sapien
ttaaggtgcgcctgccaagcaggga

SEQ ID NO: 3245094 - DNA, 25 bp, Homo sapien
ccagctctccaggttaaggtgcgcc

SEQ ID NO: 3245095 - DNA, 25 bp, Homo sapien
tccaggttaaggtgcgcctgccaag

SEQ ID NO: 3245096 - DNA, 25 bp, Homo sapien
catgctgctcactcgcctctgtgtg

SEQ ID NO: 3245097 - DNA, 25 bp, Homo sapien
ggccccgggacaaggccatgctgct

SEQ ID NO: 3245098 - DNA, 25 bp, Homo sapien
gggcctttgtcacccccaatgctgg

SEQ ID NO: 3245099 - DNA, 25 bp, Homo sapien
tggtgatgaggtgcaggccccggga

SEQ ID NO: 3245100 - DNA, 25 bp, Homo sapien
ggggctctgattcgggagcccagga

SEQ ID NO: 3245101 - DNA, 25 bp, Homo sapien
aggggctctgattcgggagcccagg

SEQ ID NO: 3245102 - DNA, 25 bp, Homo sapien
gaggggctctgattcgggagcccag

SEQ ID NO: 3245103 - DNA, 25 bp, Homo sapien
agcaggaagcgccaggggctctccc

SEQ ID NO: 3245104 - DNA, 25 bp, Homo sapien
gttgttgtcgttgactcgcttctcc

SEQ ID NO: 3245105 - DNA, 25 bp, Homo sapien
agggcgggcgatgatggttgttgtc

SEQ ID NO: 3245106 - DNA, 25 bp, Homo sapien
cttctccgagctcaggcggcagagg

SEQ ID NO: 3245107 - DNA, 25 bp, Homo sapien
ggcctcctcggcatttctgggaacc

SEQ ID NO: 3245108 - DNA, 25 bp, Homo sapien
aggcctcctcggcatttctgggaac

SEQ ID NO: 3245109 - DNA, 25 bp, Homo sapien
gcctcctcggcatttctgggaaccc

SEQ ID NO: 3245110 - DNA, 25 bp, Homo sapien
acctctgccccgagcccaggcttgt

SEQ ID NO: 3245111 - DNA, 25 bp, Homo sapien
cttgtctggtcccaggtgcccctcc

SEQ ID NO: 3245112 - DNA, 25 bp, Homo sapien
ccaggcttgtctggtcccaggtgcc

SEQ ID NO: 3245113 - DNA, 25 bp, Homo sapien
agaaagcaggaaggcacctctgccc

SEQ ID NO: 3245114 - DNA, 25 bp, Homo sapien
agtcctctggacttcaggcactgct

SEQ ID NO: 3245115 - DNA, 25 bp, Homo sapien
cccgggagagcccagccaggctcac

SEQ ID NO: 3245116 - DNA, 25 bp, Homo sapien
gcacccgggagagcccagccaggct

SEQ ID NO: 3245117 - DNA, 25 bp, Homo sapien
cacccggcacccgggagagcccagc

SEQ ID NO: 3245118 - DNA, 25 bp, Homo sapien
ccggcacccgggagagcccagccag

SEQ ID NO: 3245119 - DNA, 25 bp, Homo sapien
tggagctgggccgcgtgtctttact

SEQ ID NO: 3245120 - DNA, 25 bp, Homo sapien
ctggggccgcttgaggccctgagac

SEQ ID NO: 3245121 - DNA, 25 bp, Homo sapien
catggagctgggccgcgtgtcttta

SEQ ID NO: 3245122 - DNA, 25 bp, Homo sapien
agctgggccgcgtgtctttactggg

SEQ ID NO: 3245123 - DNA, 25 bp, Homo sapien
gaggtgtggttttcatcagccactg

SEQ ID NO: 3245124 - DNA, 25 bp, Homo sapien
tcagcgatggggccttcggaagtct

SEQ ID NO: 3245125 - DNA, 25 bp, Homo sapien
ccttcggaagtctgctggctgatca

SEQ ID NO: 3245126 - DNA, 25 bp, Homo sapien
gcagagagatggaaggtcgctgggc

SEQ ID NO: 3245127 - DNA, 25 bp, Homo sapien
gatggaaggtcgctgggcggtcagc

SEQ ID NO: 3245128 - DNA, 25 bp, Homo sapien
caataaaatgggcatacagcagaac

SEQ ID NO: 3245129 - DNA, 25 bp, Homo sapien
cctcagtgcccccacaataaaatgg

SEQ ID NO: 3245130 - DNA, 25 bp, Homo sapien
actgtacggcgcgcctaggacagga

SEQ ID NO: 3245131 - DNA, 25 bp, Homo sapien
agaggcctggcgactgtacggcgcg

SEQ ID NO: 3245132 - DNA, 25 bp, Homo sapien
ttgctccttgcaatcccccacaggg

SEQ ID NO: 3245133 - DNA, 25 bp, Homo sapien
ccaaagacctagaggtggccccagc

SEQ ID NO: 3245134 - DNA, 25 bp, Homo sapien
cttgctccttgcaatcccccacagg

SEQ ID NO: 3245135 - DNA, 25 bp, Homo sapien
ggccttgctccttgcaatcccccac

SEQ ID NO: 3245136 - DNA, 25 bp, Homo sapien
ggccaggctgtagcccggcccccaa

SEQ ID NO: 3245137 - DNA, 25 bp, Homo sapien
ccccatggccagtgtgggagcaccg

SEQ ID NO: 3245138 - DNA, 25 bp, Homo sapien
cagtgtgggagcaccggggtgcccc

SEQ ID NO: 3245139 - DNA, 25 bp, Homo sapien
cccatggccagtgtgggagcaccgg

SEQ ID NO: 3245140 - DNA, 25 bp, Homo sapien
agggagatgctgacttccatttcaa

SEQ ID NO: 3245141 - DNA, 25 bp, Homo sapien
agctccacgtccacgcctcccacct

SEQ ID NO: 3245142 - DNA, 25 bp, Homo sapien
gacttccatttcaactcccagctcc

SEQ ID NO: 3245143 - DNA, 25 bp, Homo sapien
gctcccaggattcagggagatgctg

SEQ ID NO: 3245144 - DNA, 25 bp, Homo sapien
cacaagtggttgaccccgggtctgg

SEQ ID NO: 3245145 - DNA, 25 bp, Homo sapien
cttggcacaagtggttgaccccggg

SEQ ID NO: 3245146 - DNA, 25 bp, Homo sapien
tggcacaagtggttgaccccgggtc

SEQ ID NO: 3245147 - DNA, 25 bp, Homo sapien
caagtggttgaccccgggtctggag

SEQ ID NO: 3245148 - DNA, 25 bp, Homo sapien
gaaacctgggtcccactgaacagag

SEQ ID NO: 3245149 - DNA, 25 bp, Homo sapien
aggaaacctgggtcccactgaacag

SEQ ID NO: 3245150 - DNA, 25 bp, Homo sapien
aaacctgggtcccactgaacagaga

SEQ ID NO: 3245151 - DNA, 25 bp, Homo sapien
ggaaacctgggtcccactgaacaga

SEQ ID NO: 3245152 - DNA, 25 bp, Homo sapien
ccaaggcacaaacgacacagcttgt

SEQ ID NO: 3245153 - DNA, 25 bp, Homo sapien
aggcacaaacgacacagcttgtctt

SEQ ID NO: 3245154 - DNA, 25 bp, Homo sapien
catgggggttggagagcggccgccg

SEQ ID NO: 3245155 - DNA, 25 bp, Homo sapien
gccatgggggttggagagcggccgc

SEQ ID NO: 3245156 - DNA, 25 bp, Homo sapien
ctgcatgaggaacgtggccgggcgg

SEQ ID NO: 3245157 - DNA, 25 bp, Homo sapien
gcatgaggaacgtggccgggcggga

SEQ ID NO: 3245158 - DNA, 25 bp, Homo sapien
agcctgcggtggccgtgaatggagc

SEQ ID NO: 3245159 - DNA, 25 bp, Homo sapien
gggagcctgcggtggccgtgaatgg

SEQ ID NO: 3245160 - DNA, 25 bp, Homo sapien
ggtgcgggcaagatgggtgcctggc

SEQ ID NO: 3245161 - DNA, 25 bp, Homo sapien
ggcaagatgggtgcctggcgccaga

SEQ ID NO: 3245162 - DNA, 25 bp, Homo sapien
tccagccctgcgaggggtgcgggca

SEQ ID NO: 3245163 - DNA, 25 bp, Homo sapien
agatgggtgcctggcgccagagcag

SEQ ID NO: 3245164 - DNA, 25 bp, Homo sapien
ggcctgccagggactggaactcgat

SEQ ID NO: 3245165 - DNA, 25 bp, Homo sapien
caaagagttgggtggcactgaagcc

SEQ ID NO: 3245166 - DNA, 25 bp, Homo sapien
gactggaactcgatgtttggggaca

SEQ ID NO: 3245167 - DNA, 25 bp, Homo sapien
gcacaaagagttgggtggcactgaa

SEQ ID NO: 3245168 - DNA, 25 bp, Homo sapien
cctctccagtccagggtccgaggac

SEQ ID NO: 3245169 - DNA, 25 bp, Homo sapien
cagtccagggtccgaggacgggtct

SEQ ID NO: 3245170 - DNA, 25 bp, Homo sapien
ctccagtccagggtccgaggacggg

SEQ ID NO: 3245171 - DNA, 25 bp, Homo sapien
ctctccagtccagggtccgaggacg

SEQ ID NO: 3245172 - DNA, 25 bp, Homo sapien
tcaggggtcagcacagaagctccag

SEQ ID NO: 3245173 - DNA, 25 bp, Homo sapien
tggtccctgccctcttcagaccagg

SEQ ID NO: 3245174 - DNA, 25 bp, Homo sapien
cacagaagctccagccagagcctgg

SEQ ID NO: 3245175 - DNA, 25 bp, Homo sapien
ggtccctgccctcttcagaccaggg

SEQ ID NO: 3245176 - DNA, 25 bp, Homo sapien
gcttctgggtcagttgggactgctc

SEQ ID NO: 3245177 - DNA, 25 bp, Homo sapien
tctgggtcagttgggactgctcttc

SEQ ID NO: 3245178 - DNA, 25 bp, Homo sapien
tgggtcagttgggactgctcttctg

SEQ ID NO: 3245179 - DNA, 25 bp, Homo sapien
cttctgggtcagttgggactgctct

SEQ ID NO: 3245180 - DNA, 25 bp, Homo sapien
ggtggtcgcgggcattggtggcctg

SEQ ID NO: 3245181 - DNA, 25 bp, Homo sapien
catgctggtgcatgttctggcatgc

SEQ ID NO: 3245182 - DNA, 25 bp, Homo sapien
cctctcctccggacactggtggtcg

SEQ ID NO: 3245183 - DNA, 25 bp, Homo sapien
tgctggtgcatgttctggcatgcac

SEQ ID NO: 3245184 - DNA, 25 bp, Homo sapien
cagagtgagaaactggagggtcccg

SEQ ID NO: 3245185 - DNA, 25 bp, Homo sapien
gccagactgcgtgcccgaaggccat

SEQ ID NO: 3245186 - DNA, 25 bp, Homo sapien
agggtccctggccagactgcgtgcc

SEQ ID NO: 3245187 - DNA, 25 bp, Homo sapien
cctggccagactgcgtgcccgaagg

SEQ ID NO: 3245188 - DNA, 25 bp, Homo sapien
tcagcagggcactaccagggactct

SEQ ID NO: 3245189 - DNA, 25 bp, Homo sapien
ctgctcagcagggcactaccaggga

SEQ ID NO: 3245190 - DNA, 25 bp, Homo sapien
ctttccgacctgaccgcttgcaggg

SEQ ID NO: 3245191 - DNA, 25 bp, Homo sapien
agcagggcactaccagggactctgc

SEQ ID NO: 3245192 - DNA, 25 bp, Homo sapien
ctcgtcgcgcccgaagcaggtgtcg

SEQ ID NO: 3245193 - DNA, 25 bp, Homo sapien
ttgttccctggacagccggtgagcg

SEQ ID NO: 3245194 - DNA, 25 bp, Homo sapien
ggaggtgttatctctgacaggagca

SEQ ID NO: 3245195 - DNA, 25 bp, Homo sapien
caggagcagaatggactcgtcgcgc

SEQ ID NO: 3245196 - DNA, 25 bp, Homo sapien
tgtgcataggggtgcgggcagctgc

SEQ ID NO: 3245197 - DNA, 25 bp, Homo sapien
ctgttctgacccctcatggctcagt

SEQ ID NO: 3245198 - DNA, 25 bp, Homo sapien
ccctcatggctcagtgtgggtgatg

SEQ ID NO: 3245199 - DNA, 25 bp, Homo sapien
tctgacccctcatggctcagtgtgg

SEQ ID NO: 3245200 - DNA, 25 bp, Homo sapien
ctcctcccatggtgtccccaagctt

SEQ ID NO: 3245201 - DNA, 25 bp, Homo sapien
tcctcccatggtgtccccaagcttc

SEQ ID NO: 3245202 - DNA, 25 bp, Homo sapien
tgctcctcccatggtgtccccaagc

SEQ ID NO: 3245203 - DNA, 25 bp, Homo sapien
gctcctcccatggtgtccccaagct

SEQ ID NO: 3245204 - DNA, 25 bp, Homo sapien
cgtggatgagcggacattggacaaa

SEQ ID NO: 3245205 - DNA, 25 bp, Homo sapien
cccatgaatggaccgtgtctgtctg

SEQ ID NO: 3245206 - DNA, 25 bp, Homo sapien
acaaagcccattggccgtggatgag

SEQ ID NO: 3245207 - DNA, 25 bp, Homo sapien
acggctgtgtctccgcggcccatga

SEQ ID NO: 3245208 - DNA, 25 bp, Homo sapien
cctgctcagatcgaggtggtctcct

SEQ ID NO: 3245209 - DNA, 25 bp, Homo sapien
ggatcagtcagcaaacccatgtggt

SEQ ID NO: 3245210 - DNA, 25 bp, Homo sapien
tctcaatggcggctcacagtggcct

SEQ ID NO: 3245211 - DNA, 25 bp, Homo sapien
ttatgtaggtcacatgcctcctcca

SEQ ID NO: 3245212 - DNA, 25 bp, Homo sapien
actctccccaaacacgaatccattt

SEQ ID NO: 3245213 - DNA, 25 bp, Homo sapien
tccccaaacacgaatccatttccat

SEQ ID NO: 3245214 - DNA, 25 bp, Homo sapien
ctctccccaaacacgaatccatttc

SEQ ID NO: 3245215 - DNA, 25 bp, Homo sapien
ctccccaaacacgaatccatttcca

SEQ ID NO: 3245216 - DNA, 25 bp, Homo sapien
ccaggttttcatgcagcgtggcccc

SEQ ID NO: 3245217 - DNA, 25 bp, Homo sapien
ccaggacctcagggcatggtgacct

SEQ ID NO: 3245218 - DNA, 25 bp, Homo sapien
aggacctcagggcatggtgacctca

SEQ ID NO: 3245219 - DNA, 25 bp, Homo sapien
acctcagggcatggtgacctcaagc

SEQ ID NO: 3245220 - DNA, 25 bp, Homo sapien
tgaccacctggatggagggttccct

SEQ ID NO: 3245221 - DNA, 25 bp, Homo sapien
ccctgaccacctggatggagggttc

SEQ ID NO: 3245222 - DNA, 25 bp, Homo sapien
cctgaccacctggatggagggttcc

SEQ ID NO: 3245223 - DNA, 25 bp, Homo sapien
ctgaccacctggatggagggttccc

SEQ ID NO: 3245224 - DNA, 25 bp, Homo sapien
tggggcctggccattgacgacagac

SEQ ID NO: 3245225 - DNA, 25 bp, Homo sapien
gcagtccacgacattcagagcagag

SEQ ID NO: 3245226 - DNA, 25 bp, Homo sapien
gagcctgcagtccacgacattcaga

SEQ ID NO: 3245227 - DNA, 25 bp, Homo sapien
ggcctggccattgacgacagacggg

SEQ ID NO: 3245228 - DNA, 25 bp, Homo sapien
ctgctgggtctttccgggtgtatgg

SEQ ID NO: 3245229 - DNA, 25 bp, Homo sapien
tgctgggtctttccgggtgtatggt

SEQ ID NO: 3245230 - DNA, 25 bp, Homo sapien
tgggtctttccgggtgtatggtgcc

SEQ ID NO: 3245231 - DNA, 25 bp, Homo sapien
gtctttccgggtgtatggtgccagc

SEQ ID NO: 3245232 - DNA, 25 bp, Homo sapien
gggggtgcagggcgtctgggtagaa

SEQ ID NO: 3245233 - DNA, 25 bp, Homo sapien
ggggtgcagggcgtctgggtagaac

SEQ ID NO: 3245234 - DNA, 25 bp, Homo sapien
ggggggtgcagggcgtctgggtaga

SEQ ID NO: 3245235 - DNA, 25 bp, Homo sapien
ggagatttgcccgtccccctgctct

SEQ ID NO: 3245236 - DNA, 25 bp, Homo sapien
tccactctagacctgcaggctgctt

SEQ ID NO: 3245237 - DNA, 25 bp, Homo sapien
agggagcgatccctgtggccctcca

SEQ ID NO: 3245238 - DNA, 25 bp, Homo sapien
tggctgtagaccagatccttgaggg

SEQ ID NO: 3245239 - DNA, 25 bp, Homo sapien
tgtcatccagggagcgatccctgtg

SEQ ID NO: 3245240 - DNA, 25 bp, Homo sapien
aaagggtcgtcttgtccatcagggc

SEQ ID NO: 3245241 - DNA, 25 bp, Homo sapien
agaaagggtcgtcttgtccatcagg

SEQ ID NO: 3245242 - DNA, 25 bp, Homo sapien
cttgcttccactgtcctgcccagcc

SEQ ID NO: 3245243 - DNA, 25 bp, Homo sapien
gggcagaaagggtcgtcttgtccat

SEQ ID NO: 3245244 - DNA, 25 bp, Homo sapien
ttctgacaggtcaacagctgggcta

SEQ ID NO: 3245245 - DNA, 25 bp, Homo sapien
tttctgacaggtcaacagctgggct

SEQ ID NO: 3245246 - DNA, 25 bp, Homo sapien
tctgacaggtcaacagctgggctag

SEQ ID NO: 3245247 - DNA, 25 bp, Homo sapien
cgaggaagccgcccagggggtcaga

SEQ ID NO: 3245248 - DNA, 25 bp, Homo sapien
ccgaggaagccgcccagggggtcag

SEQ ID NO: 3245249 - DNA, 25 bp, Homo sapien
aggaagccgcccagggggtcagagc

SEQ ID NO: 3245250 - DNA, 25 bp, Homo sapien
ataatagctatagccccactaacag

SEQ ID NO: 3245251 - DNA, 25 bp, Homo sapien
aactataatagctatagccccacta

SEQ ID NO: 3245252 - DNA, 25 bp, Homo sapien
ctccatcccatggtggcctgccctg

SEQ ID NO: 3245253 - DNA, 25 bp, Homo sapien
ctataatagctatagccccactaac

SEQ ID NO: 3245254 - DNA, 25 bp, Homo sapien
tgagactgtgctgggaatgtcctct

SEQ ID NO: 3245255 - DNA, 25 bp, Homo sapien
ggaacaggcggtgtggatctgagac

SEQ ID NO: 3245256 - DNA, 25 bp, Homo sapien
gggaatgtcctctctgccgaaggcg

SEQ ID NO: 3245257 - DNA, 25 bp, Homo sapien
aatgtcctctctgccgaaggcgcct

SEQ ID NO: 3245258 - DNA, 25 bp, Homo sapien
cgggccgtcagccgcacgcgccgct

SEQ ID NO: 3245259 - DNA, 25 bp, Homo sapien
gggccgtcagccgcacgcgccgctt

SEQ ID NO: 3245260 - DNA, 25 bp, Homo sapien
acgcgccgcttgtctcggcccctgc

SEQ ID NO: 3245261 - DNA, 25 bp, Homo sapien
cgcacgcgccgcttgtctcggcccc

SEQ ID NO: 3245262 - DNA, 25 bp, Homo sapien
cctgaaggtgggagcagatggcctt

SEQ ID NO: 3245263 - DNA, 25 bp, Homo sapien
gcctgaaggtgggagcagatggcct

SEQ ID NO: 3245264 - DNA, 25 bp, Homo sapien
catttagctggccacatggcggaga

SEQ ID NO: 3245265 - DNA, 25 bp, Homo sapien
gcgattttgttaacccagcgacgaa

SEQ ID NO: 3245266 - DNA, 25 bp, Homo sapien
taaagctatttatgggcccctggca

SEQ ID NO: 3245267 - DNA, 25 bp, Homo sapien
ttatcccgccgatagagggacggcc

SEQ ID NO: 3245268 - DNA, 25 bp, Homo sapien
gactccctagggcagtactcggtgc

SEQ ID NO: 3245269 - DNA, 25 bp, Homo sapien
gacatgtctcatgggaggcccagct

SEQ ID NO: 3245270 - DNA, 25 bp, Homo sapien
cctgggcaggcaagggtttaactca

SEQ ID NO: 3245271 - DNA, 25 bp, Homo sapien
cgcagagaagcctgtgaggtgccca

SEQ ID NO: 3245272 - DNA, 25 bp, Homo sapien
caaaaggtgcttaacacggcccagg

SEQ ID NO: 3245273 - DNA, 25 bp, Homo sapien
gcccaggacgggctgtccggtggag

SEQ ID NO: 3245274 - DNA, 25 bp, Homo sapien
aggtgcttaacacggcccaggacgg

SEQ ID NO: 3245275 - DNA, 25 bp, Homo sapien
caggacgggctgtccggtggagtca

SEQ ID NO: 3245276 - DNA, 25 bp, Homo sapien
tgaatccctgcgttagaactgagag

SEQ ID NO: 3245277 - DNA, 25 bp, Homo sapien
gcttttggaggccatgcggagtcca

SEQ ID NO: 3245278 - DNA, 25 bp, Homo sapien
tacacttggacaaacgaacaccagg

SEQ ID NO: 3245279 - DNA, 25 bp, Homo sapien
tcgtttcattttcaccaggcgcaga

SEQ ID NO: 3245280 - DNA, 25 bp, Homo sapien
aaatcctatgcttggaggcccctgg

SEQ ID NO: 3245281 - DNA, 25 bp, Homo sapien
caacctgaccttaaaaagatgagtg

SEQ ID NO: 3245282 - DNA, 25 bp, Homo sapien
gcattgtctgagtgcagctgctttc

SEQ ID NO: 3245283 - DNA, 25 bp, Homo sapien
gcacagggcaaaccctaagcacggg

SEQ ID NO: 3245284 - DNA, 25 bp, Homo sapien
tgctgaaggagcccaggggcctgag

SEQ ID NO: 3245285 - DNA, 25 bp, Homo sapien
tcattgactagcctgcttgctgaag

SEQ ID NO: 3245286 - DNA, 25 bp, Homo sapien
attgactagcctgcttgctgaagga

SEQ ID NO: 3245287 - DNA, 25 bp, Homo sapien
agcccaggggcctgagcctgcaaca

SEQ ID NO: 3245288 - DNA, 25 bp, Homo sapien
cacaggcgaatggaggcatcttcag

SEQ ID NO: 3245289 - DNA, 25 bp, Homo sapien
gaagctacaaagaaccccaaatgcg

SEQ ID NO: 3245290 - DNA, 25 bp, Homo sapien
gaaagagctccgatacacaagggaa

SEQ ID NO: 3245291 - DNA, 25 bp, Homo sapien
tctagaaatcaaggtccacaggcga

SEQ ID NO: 3245292 - DNA, 25 bp, Homo sapien
gtcagatgctgagactgaggccaca

SEQ ID NO: 3245293 - DNA, 25 bp, Homo sapien
gttccgggattccagacagactgaa

SEQ ID NO: 3245294 - DNA, 25 bp, Homo sapien
gatccagacacgattctgtggaggg

SEQ ID NO: 3245295 - DNA, 25 bp, Homo sapien
cagccacaccacagtgtggatccag

SEQ ID NO: 3245296 - DNA, 25 bp, Homo sapien
ccaaaatattagatgagccactgag

SEQ ID NO: 3245297 - DNA, 25 bp, Homo sapien
gaatcaccacaaagcaatcgccctc

SEQ ID NO: 3245298 - DNA, 25 bp, Homo sapien
ccttgccagggtgacggcacagcag

SEQ ID NO: 3245299 - DNA, 25 bp, Homo sapien
aaagcaatcgccctcacggcccttg

SEQ ID NO: 3245300 - DNA, 25 bp, Homo sapien
tctttttccagtgttgctacaatct

SEQ ID NO: 3245301 - DNA, 25 bp, Homo sapien
ttttccagtgttgctacaatctcag

SEQ ID NO: 3245302 - DNA, 25 bp, Homo sapien
ggtggagatgtgaacatcttctttg

SEQ ID NO: 3245303 - DNA, 25 bp, Homo sapien
ggctggtggagatgtgaacatcttc

SEQ ID NO: 3245304 - DNA, 25 bp, Homo sapien
ctggctggtggagatgtgaacatct

SEQ ID NO: 3245305 - DNA, 25 bp, Homo sapien
ctggtggagatgtgaacatcttctt

SEQ ID NO: 3245306 - DNA, 25 bp, Homo sapien
tgacgaggtcgtcgatgttgacctt

SEQ ID NO: 3245307 - DNA, 25 bp, Homo sapien
cttgacgaggtcgtcgatgttgacc

SEQ ID NO: 3245308 - DNA, 25 bp, Homo sapien
gacgaggtcgtcgatgttgaccttg

SEQ ID NO: 3245309 - DNA, 25 bp, Homo sapien
cgaggtcgtcgatgttgaccttgcc

SEQ ID NO: 3245310 - DNA, 25 bp, Homo sapien
acgggcaggcgtcctgccacacagg

SEQ ID NO: 3245311 - DNA, 25 bp, Homo sapien
tgcatgtggccacgggcaggcgtcc

SEQ ID NO: 3245312 - DNA, 25 bp, Homo sapien
ccacgggcaggcgtcctgccacaca

SEQ ID NO: 3245313 - DNA, 25 bp, Homo sapien
tggccacgggcaggcgtcctgccac

SEQ ID NO: 3245314 - DNA, 25 bp, Homo sapien
acgggcatgtctgcccctcagtggc

SEQ ID NO: 3245315 - DNA, 25 bp, Homo sapien
ttggcaatacgttcacgatcatggg

SEQ ID NO: 3245316 - DNA, 25 bp, Homo sapien
gctgttgtcctcaggcctgtggcca

SEQ ID NO: 3245317 - DNA, 25 bp, Homo sapien
agagctcccagggccagcgtggaca

SEQ ID NO: 3245318 - DNA, 25 bp, Homo sapien
tcaagccatcgatctgcccgatcat

SEQ ID NO: 3245319 - DNA, 25 bp, Homo sapien
tcgatctgcccgatcatttgctgca

SEQ ID NO: 3245320 - DNA, 25 bp, Homo sapien
agccatcgatctgcccgatcatttg

SEQ ID NO: 3245321 - DNA, 25 bp, Homo sapien
atcgatctgcccgatcatttgctgc

SEQ ID NO: 3245322 - DNA, 25 bp, Homo sapien
tcgatttcctccttcgtgatctctt

SEQ ID NO: 3245323 - DNA, 25 bp, Homo sapien
cgatttcctccttcgtgatctcttc

SEQ ID NO: 3245324 - DNA, 25 bp, Homo sapien
tccagcaccggggcagtgtccttca

SEQ ID NO: 3245325 - DNA, 25 bp, Homo sapien
aagccctccagcaccggggcagtgt

SEQ ID NO: 3245326 - DNA, 25 bp, Homo sapien
agcaccggggcagtgtccttcaagg

SEQ ID NO: 3245327 - DNA, 25 bp, Homo sapien
tcaagccctccagcaccggggcagt

SEQ ID NO: 3245328 - DNA, 25 bp, Homo sapien
agcagctaccacacgttcgggctca

SEQ ID NO: 3245329 - DNA, 25 bp, Homo sapien
tttggggagcagctaccacacgttc

SEQ ID NO: 3245330 - DNA, 25 bp, Homo sapien
gctaccacacgttcgggctcaaaat

SEQ ID NO: 3245331 - DNA, 25 bp, Homo sapien
gggagcagctaccacacgttcgggc

SEQ ID NO: 3245332 - DNA, 25 bp, Homo sapien
cacctccgagcgcttctgcagctcc

SEQ ID NO: 3245333 - DNA, 25 bp, Homo sapien
acctcggccactttcacctgtgctt

SEQ ID NO: 3245334 - DNA, 25 bp, Homo sapien
tccttctcacggtgctcctgctgga

SEQ ID NO: 3245335 - DNA, 25 bp, Homo sapien
cttgttgtccacctgctcgccctcc

SEQ ID NO: 3245336 - DNA, 25 bp, Homo sapien
gggatctcctgatgcaggtgcaggt

SEQ ID NO: 3245337 - DNA, 25 bp, Homo sapien
ggggatctcctgatgcaggtgcagg

SEQ ID NO: 3245338 - DNA, 25 bp, Homo sapien
atctcctgatgcaggtgcaggtcca

SEQ ID NO: 3245339 - DNA, 25 bp, Homo sapien
gatctcctgatgcaggtgcaggtcc

SEQ ID NO: 3245340 - DNA, 25 bp, Homo sapien
tcaggcggtcttccgtgacgcccag

SEQ ID NO: 3245341 - DNA, 25 bp, Homo sapien
ttcagctgacccctcaggcggtctt

SEQ ID NO: 3245342 - DNA, 25 bp, Homo sapien
gcttcagctgacccctcaggcggtc

SEQ ID NO: 3245343 - DNA, 25 bp, Homo sapien
tgacccctcaggcggtcttccgtga

SEQ ID NO: 3245344 - DNA, 25 bp, Homo sapien
tgcccgttcacagacgcgcttgtct

SEQ ID NO: 3245345 - DNA, 25 bp, Homo sapien
agctcccggtgctgcccgttcacag

SEQ ID NO: 3245346 - DNA, 25 bp, Homo sapien
ggtgctgcccgttcacagacgcgct

SEQ ID NO: 3245347 - DNA, 25 bp, Homo sapien
gctgcccgttcacagacgcgcttgt

SEQ ID NO: 3245348 - DNA, 25 bp, Homo sapien
tctgctgctgtcacctggagtgctc

SEQ ID NO: 3245349 - DNA, 25 bp, Homo sapien
gtctgctgctgtcacctggagtgct

SEQ ID NO: 3245350 - DNA, 25 bp, Homo sapien
ctgctgctgtcacctggagtgctct

SEQ ID NO: 3245351 - DNA, 25 bp, Homo sapien
caatcccaggaccaagctaacaagg

SEQ ID NO: 3245352 - DNA, 25 bp, Homo sapien
catctcagggttggtaccaggcgtt

SEQ ID NO: 3245353 - DNA, 25 bp, Homo sapien
gacctcctccggtgcatggtggcat

SEQ ID NO: 3245354 - DNA, 25 bp, Homo sapien
gacttccagtgtgtcgcagctgacc

SEQ ID NO: 3245355 - DNA, 25 bp, Homo sapien
ggaaatgactggccctcaacctgct

SEQ ID NO: 3245356 - DNA, 25 bp, Homo sapien
tcatggaaatgactggccctcaacc

SEQ ID NO: 3245357 - DNA, 25 bp, Homo sapien
atggaaatgactggccctcaacctg

SEQ ID NO: 3245358 - DNA, 25 bp, Homo sapien
aaatgactggccctcaacctgctca

SEQ ID NO: 3245359 - DNA, 25 bp, Homo sapien
agagttcaacactgccctgaacctc

SEQ ID NO: 3245360 - DNA, 25 bp, Homo sapien
gaagagttcaacactgccctgaacc

SEQ ID NO: 3245361 - DNA, 25 bp, Homo sapien
cctggaagagttcaacactgccctg

SEQ ID NO: 3245362 - DNA, 25 bp, Homo sapien
tggaagagttcaacactgccctgaa

SEQ ID NO: 3245363 - DNA, 25 bp, Homo sapien
ctgcctttatggagcgcagccgcat

SEQ ID NO: 3245364 - DNA, 25 bp, Homo sapien
tctgcctttatggagcgcagccgca

SEQ ID NO: 3245365 - DNA, 25 bp, Homo sapien
gacgaggctgacttggtgcccaact

SEQ ID NO: 3245366 - DNA, 25 bp, Homo sapien
aaatcgtaacatgcaggatgccagc

SEQ ID NO: 3245367 - DNA, 25 bp, Homo sapien
ttagcgtggatcactcagggccctt

SEQ ID NO: 3245368 - DNA, 25 bp, Homo sapien
tcctgcctgaaccagcaaagctgag

SEQ ID NO: 3245369 - DNA, 25 bp, Homo sapien
agctgggcggcccaggaaaggttgg

SEQ ID NO: 3245370 - DNA, 25 bp, Homo sapien
catccttcttggcagctgggcggcc

SEQ ID NO: 3245371 - DNA, 25 bp, Homo sapien
tgactgcaagcacatccttcttggc

SEQ ID NO: 3245372 - DNA, 25 bp, Homo sapien
ccccgtgcaggtgactgcaagcaca

SEQ ID NO: 3245373 - DNA, 25 bp, Homo sapien
tgggtaaactttcaagcgccagcca

SEQ ID NO: 3245374 - DNA, 25 bp, Homo sapien
gcacacgcatggctggagtttctag

SEQ ID NO: 3245375 - DNA, 25 bp, Homo sapien
tcacagggactcagacgtatcacag

SEQ ID NO: 3245376 - DNA, 25 bp, Homo sapien
tagtcctcagggatctcggtccgtg

SEQ ID NO: 3245377 - DNA, 25 bp, Homo sapien
gtggcgctgcccttggctgccttgt

SEQ ID NO: 3245378 - DNA, 25 bp, Homo sapien
agcttgacccgaagctccttcttca

SEQ ID NO: 3245379 - DNA, 25 bp, Homo sapien
cagagaagtctttggtggcgctgcc

SEQ ID NO: 3245380 - DNA, 25 bp, Homo sapien
ttcaaggccatctcctcgatggtgt

SEQ ID NO: 3245381 - DNA, 25 bp, Homo sapien
agaggtcagcgcagatccggagaaa

SEQ ID NO: 3245382 - DNA, 25 bp, Homo sapien
cggaagaggtcagcgcagatccgga

SEQ ID NO: 3245383 - DNA, 25 bp, Homo sapien
cttgagtgactgagtctcaaatgtg

SEQ ID NO: 3245384 - DNA, 25 bp, Homo sapien
caggcggaagaggtcagcgcagatc

SEQ ID NO: 3245385 - DNA, 25 bp, Homo sapien
tgcaatcgcctgatcttgggtcatt

SEQ ID NO: 3245386 - DNA, 25 bp, Homo sapien
gtcattgtatctccatctccctggt

SEQ ID NO: 3245387 - DNA, 25 bp, Homo sapien
gtgcaatcgcctgatcttgggtcat

SEQ ID NO: 3245388 - DNA, 25 bp, Homo sapien
ttgggtcattgtatctccatctccc

SEQ ID NO: 3245389 - DNA, 25 bp, Homo sapien
ccccaagagctagaaaccatgaggt

SEQ ID NO: 3245390 - DNA, 25 bp, Homo sapien
cgagcaggttctatcacagatggca

SEQ ID NO: 3245391 - DNA, 25 bp, Homo sapien
tctgtgctgaagaaactagctcacc

SEQ ID NO: 3245392 - DNA, 25 bp, Homo sapien
gactcgattcccacatagggctgca

SEQ ID NO: 3245393 - DNA, 25 bp, Homo sapien
aagaaaggactagacatgtccccat

SEQ ID NO: 3245394 - DNA, 25 bp, Homo sapien
gaaaggactagacatgtccccatta

SEQ ID NO: 3245395 - DNA, 25 bp, Homo sapien
aaagaaaggactagacatgtcccca

SEQ ID NO: 3245396 - DNA, 25 bp, Homo sapien
aaaggactagacatgtccccattac

SEQ ID NO: 3245397 - DNA, 25 bp, Homo sapien
cgcgatcttggtgtcgatccatagc

SEQ ID NO: 3245398 - DNA, 25 bp, Homo sapien
cgctcccggcgggtcaggctgtggc

SEQ ID NO: 3245399 - DNA, 25 bp, Homo sapien
cacctctgcgggggggctgtacacc

SEQ ID NO: 3245400 - DNA, 25 bp, Homo sapien
gtgccgcgatcttggtgtcgatcca

SEQ ID NO: 3245401 - DNA, 25 bp, Homo sapien
aacagggcgcgaagagtgccagcca

SEQ ID NO: 3245402 - DNA, 25 bp, Homo sapien
ctaccgagtcatcgcgaacagggcg

SEQ ID NO: 3245403 - DNA, 25 bp, Homo sapien
tcatcgcgaacagggcgcgaagagt

SEQ ID NO: 3245404 - DNA, 25 bp, Homo sapien
aagagtgccagccacgcacaggaag

SEQ ID NO: 3245405 - DNA, 25 bp, Homo sapien
tgaggtcccacagccacaaaaccca

SEQ ID NO: 3245406 - DNA, 25 bp, Homo sapien
gaggtcccacagccacaaaacccac

SEQ ID NO: 3245407 - DNA, 25 bp, Homo sapien
ctgaggtcccacagccacaaaaccc

SEQ ID NO: 3245408 - DNA, 25 bp, Homo sapien
agccgaggtgatcgcctctggagga

SEQ ID NO: 3245409 - DNA, 25 bp, Homo sapien
caacagccgaggtgatcgcctctgg

SEQ ID NO: 3245410 - DNA, 25 bp, Homo sapien
cgaggtgatcgcctctggaggatgt

SEQ ID NO: 3245411 - DNA, 25 bp, Homo sapien
acagccgaggtgatcgcctctggag

SEQ ID NO: 3245412 - DNA, 25 bp, Homo sapien
taaaaggccatgtgtgtcgcataac

SEQ ID NO: 3245413 - DNA, 25 bp, Homo sapien
tctgtgcatggcctgacgccagcag

SEQ ID NO: 3245414 - DNA, 25 bp, Homo sapien
gcccgagctccggagcagactgtta

SEQ ID NO: 3245415 - DNA, 25 bp, Homo sapien
aattccagctccattacttactgct

SEQ ID NO: 3245416 - DNA, 25 bp, Homo sapien
atcctcggcttgcagcccagagagg

SEQ ID NO: 3245417 - DNA, 25 bp, Homo sapien
caacgacgtggctctcgtgattacc

SEQ ID NO: 3245418 - DNA, 25 bp, Homo sapien
agcctcggagaagccaccaatcagg

SEQ ID NO: 3245419 - DNA, 25 bp, Homo sapien
gctggtgcagggcactgtcagccca

SEQ ID NO: 3245420 - DNA, 25 bp, Homo sapien
ctcacggagaggttctcaagaatac

SEQ ID NO: 3245421 - DNA, 25 bp, Homo sapien
gttctcaagaatacgggaaatagac

SEQ ID NO: 3245422 - DNA, 25 bp, Homo sapien
gagaggttctcaagaatacgggaaa

SEQ ID NO: 3245423 - DNA, 25 bp, Homo sapien
cggagaggttctcaagaatacggga

SEQ ID NO: 3245424 - DNA, 25 bp, Homo sapien
tgtgagggcagcttcagactctctc

SEQ ID NO: 3245425 - DNA, 25 bp, Homo sapien
tccccaatccctgtgagggcagctt

SEQ ID NO: 3245426 - DNA, 25 bp, Homo sapien
tccctgtgagggcagcttcagactc

SEQ ID NO: 3245427 - DNA, 25 bp, Homo sapien
gcttcagactctctccaggcgctgg

SEQ ID NO: 3245428 - DNA, 25 bp, Homo sapien
caaagtctgggtgctgcttctctgc

SEQ ID NO: 3245429 - DNA, 25 bp, Homo sapien
tctgggtgctgcttctctgcctttg

SEQ ID NO: 3245430 - DNA, 25 bp, Homo sapien
gggtgctgcttctctgcctttgttt

SEQ ID NO: 3245431 - DNA, 25 bp, Homo sapien
ccaaagtctgggtgctgcttctctg

SEQ ID NO: 3245432 - DNA, 25 bp, Homo sapien
tgagccgctgcaccttgcctcatcc

SEQ ID NO: 3245433 - DNA, 25 bp, Homo sapien
ccgctgcaccttgcctcatccataa

SEQ ID NO: 3245434 - DNA, 25 bp, Homo sapien
agccgctgcaccttgcctcatccat

SEQ ID NO: 3245435 - DNA, 25 bp, Homo sapien
gccgctgcaccttgcctcatccata

SEQ ID NO: 3245436 - DNA, 25 bp, Homo sapien
taaatgctaaaaagttgcttgacaa

SEQ ID NO: 3245437 - DNA, 25 bp, Homo sapien
aatttaaatgctaaaaagttgcttg

SEQ ID NO: 3245438 - DNA, 25 bp, Homo sapien
tgctaaaaagttgcttgacaaattc

SEQ ID NO: 3245439 - DNA, 25 bp, Homo sapien
gcccggccagcatttatgttttagt

SEQ ID NO: 3245440 - DNA, 25 bp, Homo sapien
agatgagcaggatcccctggactac

SEQ ID NO: 3245441 - DNA, 25 bp, Homo sapien
ctggtggaaacatgacctctatgca

SEQ ID NO: 3245442 - DNA, 25 bp, Homo sapien
cttctctctaacactgcctgtccca

SEQ ID NO: 3245443 - DNA, 25 bp, Homo sapien
aacctgttctgacggcttctgtccc

SEQ ID NO: 3245444 - DNA, 25 bp, Homo sapien
ggccgttcggggtgatggggatcat

SEQ ID NO: 3245445 - DNA, 25 bp, Homo sapien
aaaacctgttctgacggcttctgtc

SEQ ID NO: 3245446 - DNA, 25 bp, Homo sapien
cccagtcaaggccgttcggggtgat

SEQ ID NO: 3245447 - DNA, 25 bp, Homo sapien
cgcgggacggtgtaccgaggcggcg

SEQ ID NO: 3245448 - DNA, 25 bp, Homo sapien
cggcagctcctcagtaagatggacg

SEQ ID NO: 3245449 - DNA, 25 bp, Homo sapien
agctcctcagtaagatggacgccat

SEQ ID NO: 3245450 - DNA, 25 bp, Homo sapien
ccgcggcagctcctcagtaagatgg

SEQ ID NO: 3245451 - DNA, 25 bp, Homo sapien
ggcctcggacgggaggcgctctcct

SEQ ID NO: 3245452 - DNA, 25 bp, Homo sapien
gtcccggcggcgcttcagacccggc

SEQ ID NO: 3245453 - DNA, 25 bp, Homo sapien
ggcggccttgtcccggcacagacgt

SEQ ID NO: 3245454 - DNA, 25 bp, Homo sapien
gcgcggacggctgacagaggcggct

SEQ ID NO: 3245455 - DNA, 25 bp, Homo sapien
agcggcggactaccctgaggcgcgg

SEQ ID NO: 3245456 - DNA, 25 bp, Homo sapien
cggcgtgcaccggagcggcggacta

SEQ ID NO: 3245457 - DNA, 25 bp, Homo sapien
cggactaccctgaggcgcggactac

SEQ ID NO: 3245458 - DNA, 25 bp, Homo sapien
accggagcggcggactaccctgagg

SEQ ID NO: 3245459 - DNA, 25 bp, Homo sapien
catcctggttcccgtcgtaccgtgg

SEQ ID NO: 3245460 - DNA, 25 bp, Homo sapien
cttgcgcggggagtgtcttttcgtc

SEQ ID NO: 3245461 - DNA, 25 bp, Homo sapien
agcagcgcgtgtgtccggaactttt

SEQ ID NO: 3245462 - DNA, 25 bp, Homo sapien
gcagcagcgcgtgtgtccggaactt

SEQ ID NO: 3245463 - DNA, 25 bp, Homo sapien
gtcttttcgtctccgggcggcggca

SEQ ID NO: 3245464 - DNA, 25 bp, Homo sapien
aagtcctgcacccacgagtagaaaa

SEQ ID NO: 3245465 - DNA, 25 bp, Homo sapien
tgcacccacgagtagaaaacggctc

SEQ ID NO: 3245466 - DNA, 25 bp, Homo sapien
tcctgcacccacgagtagaaaacgg

SEQ ID NO: 3245467 - DNA, 25 bp, Homo sapien
ctgcacccacgagtagaaaacggct

SEQ ID NO: 3245468 - DNA, 25 bp, Homo sapien
ctccaagggcaagtcaggggacgct

SEQ ID NO: 3245469 - DNA, 25 bp, Homo sapien
acgctggggatggaggggcgccctc

SEQ ID NO: 3245470 - DNA, 25 bp, Homo sapien
gcggtctgcactctggcgcgcgcag

SEQ ID NO: 3245471 - DNA, 25 bp, Homo sapien
ggctctgccctcggcggtctgcact

SEQ ID NO: 3245472 - DNA, 25 bp, Homo sapien
ggcggcgctccccagatacggcgct

SEQ ID NO: 3245473 - DNA, 25 bp, Homo sapien
tgctcggcgtcgggagtccccgtca

SEQ ID NO: 3245474 - DNA, 25 bp, Homo sapien
caccactggggggacgggagcgcag

SEQ ID NO: 3245475 - DNA, 25 bp, Homo sapien
tggaggcgagggcactaggccgggt

SEQ ID NO: 3245476 - DNA, 25 bp, Homo sapien
caaaggtgggtgtctgactgtccaa

SEQ ID NO: 3245477 - DNA, 25 bp, Homo sapien
gatggatttccagttgcccccacga

SEQ ID NO: 3245478 - DNA, 25 bp, Homo sapien
tcagctgagagctcgcacagcgaga

SEQ ID NO: 3245479 - DNA, 25 bp, Homo sapien
ggtaaagttcagattggtgcttgcc

SEQ ID NO: 3245480 - DNA, 25 bp, Homo sapien
tactaactgctagcccaggtctctc

SEQ ID NO: 3245481 - DNA, 25 bp, Homo sapien
aagttcaaggtccaagaggtgtgtc

SEQ ID NO: 3245482 - DNA, 25 bp, Homo sapien
cttcccaggcgtcccatgacaaggg

SEQ ID NO: 3245483 - DNA, 25 bp, Homo sapien
tagttgagattacgccctgataatg

SEQ ID NO: 3245484 - DNA, 25 bp, Homo sapien
ggtgtaagccactgcctttttgtcc

SEQ ID NO: 3245485 - DNA, 25 bp, Homo sapien
acctgcctcggatttccaaataact

SEQ ID NO: 3245486 - DNA, 25 bp, Homo sapien
cacctgcctcggatttccaaataac

SEQ ID NO: 3245487 - DNA, 25 bp, Homo sapien
cctgcctcggatttccaaataacta

SEQ ID NO: 3245488 - DNA, 25 bp, Homo sapien
ctgcttcacagactttcaagccttg

SEQ ID NO: 3245489 - DNA, 25 bp, Homo sapien
gcctgacctctgattctgtaccctg

SEQ ID NO: 3245490 - DNA, 25 bp, Homo sapien
tgtgtgccaatgatgagccaagacc

SEQ ID NO: 3245491 - DNA, 25 bp, Homo sapien
ctatatgtgcatggaagactgagcc

SEQ ID NO: 3245492 - DNA, 25 bp, Homo sapien
agacctatgtcctcgttcccatggg

SEQ ID NO: 3245493 - DNA, 25 bp, Homo sapien
gattcacggaattatcagagtgggc

SEQ ID NO: 3245494 - DNA, 25 bp, Homo sapien
tatcagagtgggctttagctgacat

SEQ ID NO: 3245495 - DNA, 25 bp, Homo sapien
tgctgtcctagggttgagacctcct

SEQ ID NO: 3245496 - DNA, 25 bp, Homo sapien
ccttctgctcagttggattcacgga

SEQ ID NO: 3245497 - DNA, 25 bp, Homo sapien
gccccagtccaggaaggaatagtct

SEQ ID NO: 3245498 - DNA, 25 bp, Homo sapien
agccccagtccaggaaggaatagtc

SEQ ID NO: 3245499 - DNA, 25 bp, Homo sapien
tgctgagaactgatcgtcagacatg

SEQ ID NO: 3245500 - DNA, 25 bp, Homo sapien
gctgagaactgatcgtcagacatga

SEQ ID NO: 3245501 - DNA, 25 bp, Homo sapien
ctgctgagaactgatcgtcagacat

SEQ ID NO: 3245502 - DNA, 25 bp, Homo sapien
ttatgtctttgtactgccacctgca

SEQ ID NO: 3245503 - DNA, 25 bp, Homo sapien
cgttgctgcccttgctatgagctta

SEQ ID NO: 3245504 - DNA, 25 bp, Homo sapien
taggccaatgctccagtccaatatt

SEQ ID NO: 3245505 - DNA, 25 bp, Homo sapien
ggtggtccttgcgtacatgtcccct

SEQ ID NO: 3245506 - DNA, 25 bp, Homo sapien
ctaggaatggggtacagaggtgcct

SEQ ID NO: 3245507 - DNA, 25 bp, Homo sapien
ggctgctaggaatggggtacagagg

SEQ ID NO: 3245508 - DNA, 25 bp, Homo sapien
ggtggctgctaggaatggggtacag

SEQ ID NO: 3245509 - DNA, 25 bp, Homo sapien
aggaatggggtacagaggtgcctcc

SEQ ID NO: 3245510 - DNA, 25 bp, Homo sapien
tggcagatgtagatgttagaggggc

SEQ ID NO: 3245511 - DNA, 25 bp, Homo sapien
ctggcagatgtagatgttagagggg

SEQ ID NO: 3245512 - DNA, 25 bp, Homo sapien
gcagatgtagatgttagaggggcag

SEQ ID NO: 3245513 - DNA, 25 bp, Homo sapien
cagatgtagatgttagaggggcagg

SEQ ID NO: 3245514 - DNA, 25 bp, Homo sapien
ccctggtaggcgatgaccaccagag

SEQ ID NO: 3245515 - DNA, 25 bp, Homo sapien
ctggtaggcgatgaccaccagagct

SEQ ID NO: 3245516 - DNA, 25 bp, Homo sapien
cctggtaggcgatgaccaccagagc

SEQ ID NO: 3245517 - DNA, 25 bp, Homo sapien
tggtaggcgatgaccaccagagctc

SEQ ID NO: 3245518 - DNA, 25 bp, Homo sapien
tttaagagcacgacacttagagctg

SEQ ID NO: 3245519 - DNA, 25 bp, Homo sapien
tatcctttgattcatctgggccagt

SEQ ID NO: 3245520 - DNA, 25 bp, Homo sapien
tcatactggatgcttccctgggtcc

SEQ ID NO: 3245521 - DNA, 25 bp, Homo sapien
tcctctggagcacttcaggtcttca

SEQ ID NO: 3245522 - DNA, 25 bp, Homo sapien
ggcctgaggatttgctctaccagat

SEQ ID NO: 3245523 - DNA, 25 bp, Homo sapien
gccctttgtaagtggatgctgctgt

SEQ ID NO: 3245524 - DNA, 25 bp, Homo sapien
tatataggaagattcaagcttctga

SEQ ID NO: 3245525 - DNA, 25 bp, Homo sapien
gctgctgtggccacatttgaagaga

SEQ ID NO: 3245526 - DNA, 25 bp, Homo sapien
tctccgtactagtgaagaaatgtac

SEQ ID NO: 3245527 - DNA, 25 bp, Homo sapien
tccgtactagtgaagaaatgtactt

SEQ ID NO: 3245528 - DNA, 25 bp, Homo sapien
ctttctccgtactagtgaagaaatg

SEQ ID NO: 3245529 - DNA, 25 bp, Homo sapien
tcctttctccgtactagtgaagaaa

SEQ ID NO: 3245530 - DNA, 25 bp, Homo sapien
tcctggatgaatggagaggtgctca

SEQ ID NO: 3245531 - DNA, 25 bp, Homo sapien
tgtgctgtgtcaaggacctcgcctg

SEQ ID NO: 3245532 - DNA, 25 bp, Homo sapien
gctggctttgtgctcacgaacgggt

SEQ ID NO: 3245533 - DNA, 25 bp, Homo sapien
gctgccgagcattccacgggcttct

SEQ ID NO: 3245534 - DNA, 25 bp, Homo sapien
tcaggcctagacctgaggtgaggct

SEQ ID NO: 3245535 - DNA, 25 bp, Homo sapien
gctcaggcctagacctgaggtgagg

SEQ ID NO: 3245536 - DNA, 25 bp, Homo sapien
gggctcaggcctagacctgaggtga

SEQ ID NO: 3245537 - DNA, 25 bp, Homo sapien
tgggctcaggcctagacctgaggtg

SEQ ID NO: 3245538 - DNA, 25 bp, Homo sapien
ggattaactgctattcctgggaaca

SEQ ID NO: 3245539 - DNA, 25 bp, Homo sapien
tcttggattaactgctattcctggg

SEQ ID NO: 3245540 - DNA, 25 bp, Homo sapien
tgatattgtttggatgccttaggtc

SEQ ID NO: 3245541 - DNA, 25 bp, Homo sapien
tgtttggatgccttaggtcttggat

SEQ ID NO: 3245542 - DNA, 25 bp, Homo sapien
catgtgtccagggacagagtttgcc

SEQ ID NO: 3245543 - DNA, 25 bp, Homo sapien
tgtccagggacagagtttgcctggt

SEQ ID NO: 3245544 - DNA, 25 bp, Homo sapien
ccagcatgtgtccagggacagagtt

SEQ ID NO: 3245545 - DNA, 25 bp, Homo sapien
tccagggacagagtttgcctggtac

SEQ ID NO: 3245546 - DNA, 25 bp, Homo sapien
ttgtatttgtagttgagaggagcag

SEQ ID NO: 3245547 - DNA, 25 bp, Homo sapien
tatttgtagttgagaggagcaggca

SEQ ID NO: 3245548 - DNA, 25 bp, Homo sapien
acttgtatttgtagttgagaggagc

SEQ ID NO: 3245549 - DNA, 25 bp, Homo sapien
taaacttgtatttgtagttgagagg

SEQ ID NO: 3245550 - DNA, 25 bp, Homo sapien
gaggttctcctgtggttgaaaacta

SEQ ID NO: 3245551 - DNA, 25 bp, Homo sapien
tcactgacaaaacggccagaacaag

SEQ ID NO: 3245552 - DNA, 25 bp, Homo sapien
cagaacaagctcttacaaggccatg

SEQ ID NO: 3245553 - DNA, 25 bp, Homo sapien
caggtaatgtggtcagcgccctttc

SEQ ID NO: 3245554 - DNA, 25 bp, Homo sapien
gtagacatgggtcctgtttttgtca

SEQ ID NO: 3245555 - DNA, 25 bp, Homo sapien
ttctcattgtagacatgggtcctgt

SEQ ID NO: 3245556 - DNA, 25 bp, Homo sapien
cattgtagacatgggtcctgttttt

SEQ ID NO: 3245557 - DNA, 25 bp, Homo sapien
ctcattgtagacatgggtcctgttt

SEQ ID NO: 3245558 - DNA, 25 bp, Homo sapien
acagggtagtgaggcaagggttgga

SEQ ID NO: 3245559 - DNA, 25 bp, Homo sapien
aacagggtagtgaggcaagggttgg

SEQ ID NO: 3245560 - DNA, 25 bp, Homo sapien
tcttgctgagtcagaaggcggcact

SEQ ID NO: 3245561 - DNA, 25 bp, Homo sapien
gtcagaaggcggcacttctggccag

SEQ ID NO: 3245562 - DNA, 25 bp, Homo sapien
ttgctgagtcagaaggcggcacttc

SEQ ID NO: 3245563 - DNA, 25 bp, Homo sapien
gctgagtcagaaggcggcacttctg

SEQ ID NO: 3245564 - DNA, 25 bp, Homo sapien
gggactcaaaccaactcagtggtgg

SEQ ID NO: 3245565 - DNA, 25 bp, Homo sapien
gggctcatagagctctgcggcttgc

SEQ ID NO: 3245566 - DNA, 25 bp, Homo sapien
tcagcgaccactcctccgagtggga

SEQ ID NO: 3245567 - DNA, 25 bp, Homo sapien
tggtcgagacctgttcacggatggt

SEQ ID NO: 3245568 - DNA, 25 bp, Homo sapien
tgtggaaaatatcagcgtcgctacc

SEQ ID NO: 3245569 - DNA, 25 bp, Homo sapien
gctgcaggtggcgtatcatcgtaca

SEQ ID NO: 3245570 - DNA, 25 bp, Homo sapien
tcagaaacaaactaacagcacacgt

SEQ ID NO: 3245571 - DNA, 25 bp, Homo sapien
gggagcccacaccagtcaagttgga

SEQ ID NO: 3245572 - DNA, 25 bp, Homo sapien
tcctctgggctagtagccaggtgct

SEQ ID NO: 3245573 - DNA, 25 bp, Homo sapien
ccagcaggcgtaaggagattgctct

SEQ ID NO: 3245574 - DNA, 25 bp, Homo sapien
ggaagatctgtgaagtgacccactt

SEQ ID NO: 3245575 - DNA, 25 bp, Homo sapien
catgaaaggtatctgctataactca

SEQ ID NO: 3245576 - DNA, 25 bp, Homo sapien
cagaggccgcgtgtgaatagtgact

SEQ ID NO: 3245577 - DNA, 25 bp, Homo sapien
gggaccatgtttatcccagtgttta

SEQ ID NO: 3245578 - DNA, 25 bp, Homo sapien
tccctgttcacacacgtggttttgt

SEQ ID NO: 3245579 - DNA, 25 bp, Homo sapien
atagtgactccgaagcctgccgctt

SEQ ID NO: 3245580 - DNA, 25 bp, Homo sapien
cctggcaggtactgtggagtcaaca

SEQ ID NO: 3245581 - DNA, 25 bp, Homo sapien
agagcttttacagagtcatgccaga

SEQ ID NO: 3245582 - DNA, 25 bp, Homo sapien
taaagagacgctaacaggtggtcct

SEQ ID NO: 3245583 - DNA, 25 bp, Homo sapien
tcagttgccgaaacataaagagacg

SEQ ID NO: 3245584 - DNA, 25 bp, Homo sapien
tcccaagggtcgctagaaactcgtc

SEQ ID NO: 3245585 - DNA, 25 bp, Homo sapien
gcccgtgtgaggactgaccctggat

SEQ ID NO: 3245586 - DNA, 25 bp, Homo sapien
ggttgggcctacttctcacctgggc

SEQ ID NO: 3245587 - DNA, 25 bp, Homo sapien
tttacgcggagcactttcgaggcct

SEQ ID NO: 3245588 - DNA, 25 bp, Homo sapien
cctgagagtggctactccgtggttt

SEQ ID NO: 3245589 - DNA, 25 bp, Homo sapien
ggacacatccatcttgcagagaagt

SEQ ID NO: 3245590 - DNA, 25 bp, Homo sapien
caccatgtgtgcctttgcccacgtg

SEQ ID NO: 3245591 - DNA, 25 bp, Homo sapien
gtggcatcttttatgccttggtaaa

SEQ ID NO: 3245592 - DNA, 25 bp, Homo sapien
gtcttgacatctaaaccccggcgtg

SEQ ID NO: 3245593 - DNA, 25 bp, Homo sapien
tcatacaatgtaaggtcagattcct

SEQ ID NO: 3245594 - DNA, 25 bp, Homo sapien
cctgttgaggtgtgaaatgccccgt

SEQ ID NO: 3245595 - DNA, 25 bp, Homo sapien
gaaatagagagttgagacttgccag

SEQ ID NO: 3245596 - DNA, 25 bp, Homo sapien
ctgatggccgcctagggagggactg

SEQ ID NO: 3245597 - DNA, 25 bp, Homo sapien
cgtcctgatggccgcctagggaggg

SEQ ID NO: 3245598 - DNA, 25 bp, Homo sapien
tcctgatggccgcctagggagggac

SEQ ID NO: 3245599 - DNA, 25 bp, Homo sapien
cccgtcctgatggccgcctagggag

SEQ ID NO: 3245600 - DNA, 25 bp, Homo sapien
tgcatccagaacttaaaacaggctg

SEQ ID NO: 3245601 - DNA, 25 bp, Homo sapien
aaagtaagagtctaacaggcagagc

SEQ ID NO: 3245602 - DNA, 25 bp, Homo sapien
ggcactgccccagcgagggaaaata

SEQ ID NO: 3245603 - DNA, 25 bp, Homo sapien
tccgccatccggttactttaagctg

SEQ ID NO: 3245604 - DNA, 25 bp, Homo sapien
ggcccgtggcatagttcatctcaaa

SEQ ID NO: 3245605 - DNA, 25 bp, Homo sapien
cagcatggttgtgctaccctggccg

SEQ ID NO: 3245606 - DNA, 25 bp, Homo sapien
caaacactgtgtccaccagcatggt

SEQ ID NO: 3245607 - DNA, 25 bp, Homo sapien
gtacttcttgaagcgcgtccactgg

SEQ ID NO: 3245608 - DNA, 25 bp, Homo sapien
cggtgcacccccaggccctgcctta

SEQ ID NO: 3245609 - DNA, 25 bp, Homo sapien
cccaggccctgccttatgaacatac

SEQ ID NO: 3245610 - DNA, 25 bp, Homo sapien
ccccaggccctgccttatgaacata

SEQ ID NO: 3245611 - DNA, 25 bp, Homo sapien
cacccccaggccctgccttatgaac

SEQ ID NO: 3245612 - DNA, 25 bp, Homo sapien
atgagggccttctcgggccgcgtga

SEQ ID NO: 3245613 - DNA, 25 bp, Homo sapien
tgttggccgtcttgaacatctcctg

SEQ ID NO: 3245614 - DNA, 25 bp, Homo sapien
catctcctgggcagcgaacatctgc

SEQ ID NO: 3245615 - DNA, 25 bp, Homo sapien
ggccgcgtgactttgttggccgtct

SEQ ID NO: 3245616 - DNA, 25 bp, Homo sapien
cagggccgtaccacctacctggtgg

SEQ ID NO: 3245617 - DNA, 25 bp, Homo sapien
accacctacctggtggcctgtgggc

SEQ ID NO: 3245618 - DNA, 25 bp, Homo sapien
tggccagggccgtaccacctacctg

SEQ ID NO: 3245619 - DNA, 25 bp, Homo sapien
cgtaccacctacctggtggcctgtg

SEQ ID NO: 3245620 - DNA, 25 bp, Homo sapien
gctcaggccgctgttgtacatgggc

SEQ ID NO: 3245621 - DNA, 25 bp, Homo sapien
gctgcttgaactgcgctggcaacgt

SEQ ID NO: 3245622 - DNA, 25 bp, Homo sapien
gtgggtgtcagaggcgaggtgggcg

SEQ ID NO: 3245623 - DNA, 25 bp, Homo sapien
gcgccgcaggcgtgggtgtggcagg

SEQ ID NO: 3245624 - DNA, 25 bp, Homo sapien
atgcaggagtgagaaccgcagccct

SEQ ID NO: 3245625 - DNA, 25 bp, Homo sapien
agcgcccgtgggcaaggtcatgtcc

SEQ ID NO: 3245626 - DNA, 25 bp, Homo sapien
tgttcccaaaccctagtgctcctgg

SEQ ID NO: 3245627 - DNA, 25 bp, Homo sapien
gaaggctgtatcctcaagccccttg

SEQ ID NO: 3245628 - DNA, 25 bp, Homo sapien
gagggaaggtagctcgtggagggca

SEQ ID NO: 3245629 - DNA, 25 bp, Homo sapien
gaggcgggaaccacgctgggcgtgg

SEQ ID NO: 3245630 - DNA, 25 bp, Homo sapien
gtagctcgtggagggcagcgcaggc

SEQ ID NO: 3245631 - DNA, 25 bp, Homo sapien
gcgtggagggaaggtagctcgtgga

SEQ ID NO: 3245632 - DNA, 25 bp, Homo sapien
gccggctgcgtagtccggggtggcg

SEQ ID NO: 3245633 - DNA, 25 bp, Homo sapien
tctccaccaccgtttcctccttggc

SEQ ID NO: 3245634 - DNA, 25 bp, Homo sapien
tagtccggggtggcgttctccacca

SEQ ID NO: 3245635 - DNA, 25 bp, Homo sapien
ctgcgtggacaccaggccggctgcg

SEQ ID NO: 3245636 - DNA, 25 bp, Homo sapien
agtcttccttctccgcttcgcctct

SEQ ID NO: 3245637 - DNA, 25 bp, Homo sapien
cttccttctccgcttcgcctctcgg

SEQ ID NO: 3245638 - DNA, 25 bp, Homo sapien
ccttctccgcttcgcctctcggcca

SEQ ID NO: 3245639 - DNA, 25 bp, Homo sapien
tctccgcttcgcctctcggccagcg

SEQ ID NO: 3245640 - DNA, 25 bp, Homo sapien
gggctgaagacgctgggcgccgtgg

SEQ ID NO: 3245641 - DNA, 25 bp, Homo sapien
gaagggcgcctgcttcgggatgcct

SEQ ID NO: 3245642 - DNA, 25 bp, Homo sapien
ggctgaagacgctgggcgccgtggg

SEQ ID NO: 3245643 - DNA, 25 bp, Homo sapien
gccgtggggcttctgaagggcgcct

SEQ ID NO: 3245644 - DNA, 25 bp, Homo sapien
tcagaacgtcccaccctcttctagg

SEQ ID NO: 3245645 - DNA, 25 bp, Homo sapien
cagcagcagtgaccggcaaacgtcc

SEQ ID NO: 3245646 - DNA, 25 bp, Homo sapien
acggcaacagtcagggcgccagcag

SEQ ID NO: 3245647 - DNA, 25 bp, Homo sapien
ctcttctaggctagcgccgcagagg

SEQ ID NO: 3245648 - DNA, 25 bp, Homo sapien
gcttcaactgctgggcggtctccgt

SEQ ID NO: 3245649 - DNA, 25 bp, Homo sapien
ggcgctccgcttcaactgctgggcg

SEQ ID NO: 3245650 - DNA, 25 bp, Homo sapien
ggcaccccggcgctccgcttcaact

SEQ ID NO: 3245651 - DNA, 25 bp, Homo sapien
tccgcttcaactgctgggcggtctc

SEQ ID NO: 3245652 - DNA, 25 bp, Homo sapien
cgcgagggtcgtcagggcgtttttg

SEQ ID NO: 3245653 - DNA, 25 bp, Homo sapien
cgcagcgtggcgctcttgggtttcc

SEQ ID NO: 3245654 - DNA, 25 bp, Homo sapien
ttttgttcaagtactggcactccag

SEQ ID NO: 3245655 - DNA, 25 bp, Homo sapien
ggcagcatggcagacgcttcacact

SEQ ID NO: 3245656 - DNA, 25 bp, Homo sapien
aagaaccacatgaagttaggggcgc

SEQ ID NO: 3245657 - DNA, 25 bp, Homo sapien
accacatgaagttaggggcgcccag

SEQ ID NO: 3245658 - DNA, 25 bp, Homo sapien
ccaggccgcagacctcccggctgag

SEQ ID NO: 3245659 - DNA, 25 bp, Homo sapien
cagacctcccggctgagaggagctg

SEQ ID NO: 3245660 - DNA, 25 bp, Homo sapien
gcacatgagagttcaccggcctcag

SEQ ID NO: 3245661 - DNA, 25 bp, Homo sapien
acatgagagttcaccggcctcagcc

SEQ ID NO: 3245662 - DNA, 25 bp, Homo sapien
tgagagttcaccggcctcagccttc

SEQ ID NO: 3245663 - DNA, 25 bp, Homo sapien
ggcacatgagagttcaccggcctca

SEQ ID NO: 3245664 - DNA, 25 bp, Homo sapien
tctgagcatgtactctgggccaggg

SEQ ID NO: 3245665 - DNA, 25 bp, Homo sapien
tcacggagccgaccagagagagacg

SEQ ID NO: 3245666 - DNA, 25 bp, Homo sapien
gctctgggccctagaacctaggatc

SEQ ID NO: 3245667 - DNA, 25 bp, Homo sapien
gataccacctgaatgggcagagccc

SEQ ID NO: 3245668 - DNA, 25 bp, Homo sapien
tatcctgaacgttgggattctgctc

SEQ ID NO: 3245669 - DNA, 25 bp, Homo sapien
tccagctccaggttaagcgagcctg

SEQ ID NO: 3245670 - DNA, 25 bp, Homo sapien
caaaatatcctgaacgttgggattc

SEQ ID NO: 3245671 - DNA, 25 bp, Homo sapien
cctgtgtccggaaaggacttcaaga

SEQ ID NO: 3245672 - DNA, 25 bp, Homo sapien
gggtccgagtcgaggctggcgagct

SEQ ID NO: 3245673 - DNA, 25 bp, Homo sapien
caggggtccgagtcgaggctggcga

SEQ ID NO: 3245674 - DNA, 25 bp, Homo sapien
acccaggggtccgagtcgaggctgg

SEQ ID NO: 3245675 - DNA, 25 bp, Homo sapien
ccgagtcgaggctggcgagctggat

SEQ ID NO: 3245676 - DNA, 25 bp, Homo sapien
aaataggatgctgccggcgccacca

SEQ ID NO: 3245677 - DNA, 25 bp, Homo sapien
ctgcccacttccaagcccactccct

SEQ ID NO: 3245678 - DNA, 25 bp, Homo sapien
gcaaaataggatgctgccggcgcca

SEQ ID NO: 3245679 - DNA, 25 bp, Homo sapien
ctgcaaaataggatgctgccggcgc

SEQ ID NO: 3245680 - DNA, 25 bp, Homo sapien
gttgcaaggccccggcatccggtgc

SEQ ID NO: 3245681 - DNA, 25 bp, Homo sapien
ggctctctggcagttgcccccaaca

SEQ ID NO: 3245682 - DNA, 25 bp, Homo sapien
tctctggcagttgcccccaacactt

SEQ ID NO: 3245683 - DNA, 25 bp, Homo sapien
gccaggttgcaaggccccggcatcc

SEQ ID NO: 3245684 - DNA, 25 bp, Homo sapien
cagcagcacccagtccactgggcct

SEQ ID NO: 3245685 - DNA, 25 bp, Homo sapien
ctcccagcagcacccagtccactgg

SEQ ID NO: 3245686 - DNA, 25 bp, Homo sapien
cccagcagcacccagtccactgggc

SEQ ID NO: 3245687 - DNA, 25 bp, Homo sapien
gcagcacccagtccactgggcctac

SEQ ID NO: 3245688 - DNA, 25 bp, Homo sapien
tgctcccgcagaaagcctgcgggtg

SEQ ID NO: 3245689 - DNA, 25 bp, Homo sapien
gagcgcaggagcagggtggagtcac

SEQ ID NO: 3245690 - DNA, 25 bp, Homo sapien
ggtgcgcagatgcaagaaaacctga

SEQ ID NO: 3245691 - DNA, 25 bp, Homo sapien
tcttccaccggtgcgcagatgcaag

SEQ ID NO: 3245692 - DNA, 25 bp, Homo sapien
gggcagcacccgtgacagctgagct

SEQ ID NO: 3245693 - DNA, 25 bp, Homo sapien
catgggcgacgtgcgtggaggaagc

SEQ ID NO: 3245694 - DNA, 25 bp, Homo sapien
gaggaagcaggcgcaccccgtgctc

SEQ ID NO: 3245695 - DNA, 25 bp, Homo sapien
ggagttggcgctcgtggagcctgga

SEQ ID NO: 3245696 - DNA, 25 bp, Homo sapien
ctgggtctggacggcgctgggagtt

SEQ ID NO: 3245697 - DNA, 25 bp, Homo sapien
tgggaggccagatccatccacacca

SEQ ID NO: 3245698 - DNA, 25 bp, Homo sapien
cactgggctgctcacagtgtgagac

SEQ ID NO: 3245699 - DNA, 25 bp, Homo sapien
tcccacgaggaaacgcagagagcca

SEQ ID NO: 3245700 - DNA, 25 bp, Homo sapien
aggccatggcgtgcctgtgcctctg

SEQ ID NO: 3245701 - DNA, 25 bp, Homo sapien
caggagtcaagaaccccccgcgtgg

SEQ ID NO: 3245702 - DNA, 25 bp, Homo sapien
ggagggtgtcgccccggccgctgac

SEQ ID NO: 3245703 - DNA, 25 bp, Homo sapien
ctcaggagtcaagaaccccccgcgt

SEQ ID NO: 3245704 - DNA, 25 bp, Homo sapien
cagggagggtgtcgccccggccgct

SEQ ID NO: 3245705 - DNA, 25 bp, Homo sapien
cggcagaagatgctacgtggctgca

SEQ ID NO: 3245706 - DNA, 25 bp, Homo sapien
agggaaaccctacgcctgccaagag

SEQ ID NO: 3245707 - DNA, 25 bp, Homo sapien
gcaggaagcgctgcgcacacgctgc

SEQ ID NO: 3245708 - DNA, 25 bp, Homo sapien
ctgccaagaggcaagcgcgcggcat

SEQ ID NO: 3245709 - DNA, 25 bp, Homo sapien
aaggaccactgttgtggagtcaatg

SEQ ID NO: 3245710 - DNA, 25 bp, Homo sapien
ttttctctccagaacgcgcatgttg

SEQ ID NO: 3245711 - DNA, 25 bp, Homo sapien
cgcgcatgttgaagcctggctcgct

SEQ ID NO: 3245712 - DNA, 25 bp, Homo sapien
aacaaaaaggaccactgttgtggag

SEQ ID NO: 3245713 - DNA, 25 bp, Homo sapien
actcttcactgaataaactatcaca

SEQ ID NO: 3245714 - DNA, 25 bp, Homo sapien
gctgtttactaagcttttcagagga

SEQ ID NO: 3245715 - DNA, 25 bp, Homo sapien
tttcagaggaatagggccgggtata

SEQ ID NO: 3245716 - DNA, 25 bp, Homo sapien
gtctcgctgttgtcgtcgcccgggc

SEQ ID NO: 3245717 - DNA, 25 bp, Homo sapien
cacagggatcagtgaagaacttact

SEQ ID NO: 3245718 - DNA, 25 bp, Homo sapien
catatgattcgcaagcttactggca

SEQ ID NO: 3245719 - DNA, 25 bp, Homo sapien
ggatgcacctaataacacagcccca

SEQ ID NO: 3245720 - DNA, 25 bp, Homo sapien
gatccaaggttgagctcacatggta

SEQ ID NO: 3245721 - DNA, 25 bp, Homo sapien
taagggtagcataaccccaatacca

SEQ ID NO: 3245722 - DNA, 25 bp, Homo sapien
gacagtctgggtaagtaaaactaca

SEQ ID NO: 3245723 - DNA, 25 bp, Homo sapien
tcccacaaagtaaatttcaggtcca

SEQ ID NO: 3245724 - DNA, 25 bp, Homo sapien
taggtttaccgcaggaatgcaaggt

SEQ ID NO: 3245725 - DNA, 25 bp, Homo sapien
cccatcagactaactaatggcagac

SEQ ID NO: 3245726 - DNA, 25 bp, Homo sapien
cactaagacactccatgagaagatc

SEQ ID NO: 3245727 - DNA, 25 bp, Homo sapien
taactaatggcagacctctgcagaa

SEQ ID NO: 3245728 - DNA, 25 bp, Homo sapien
gagaaccccactaagacactccatg

SEQ ID NO: 3245729 - DNA, 25 bp, Homo sapien
atggtactggtaccacaacagacct

SEQ ID NO: 3245730 - DNA, 25 bp, Homo sapien
gacctacagaccaatggagaagaac

SEQ ID NO: 3245731 - DNA, 25 bp, Homo sapien
gagaagaacagggacctcagaaata

SEQ ID NO: 3245732 - DNA, 25 bp, Homo sapien
aaaggatcttctattcagtaaatgg

SEQ ID NO: 3245733 - DNA, 25 bp, Homo sapien
gaatcccttgaacctgggaggcgca

SEQ ID NO: 3245734 - DNA, 25 bp, Homo sapien
tacaaaaattagctaattagctggg

SEQ ID NO: 3245735 - DNA, 25 bp, Homo sapien
agctactcgggaggctgaggcagga

SEQ ID NO: 3245736 - DNA, 25 bp, Homo sapien
catggtggcgcgtgtctctagtccc

SEQ ID NO: 3245737 - DNA, 25 bp, Homo sapien
caaacagcaggccgagtgccatggc

SEQ ID NO: 3245738 - DNA, 25 bp, Homo sapien
aaaccaaacagcaggccgagtgcca

SEQ ID NO: 3245739 - DNA, 25 bp, Homo sapien
aaccaaacagcaggccgagtgccat

SEQ ID NO: 3245740 - DNA, 25 bp, Homo sapien
accaaacagcaggccgagtgccatg

SEQ ID NO: 3245741 - DNA, 25 bp, Homo sapien
tgagatgggaagatctgaggtgagg

SEQ ID NO: 3245742 - DNA, 25 bp, Homo sapien
ctgcagtgagtcacgatggtgccac

SEQ ID NO: 3245743 - DNA, 25 bp, Homo sapien
gctgcagtgagtcacgatggtgcca

SEQ ID NO: 3245744 - DNA, 25 bp, Homo sapien
ggctgagatgggaagatctgaggtg

SEQ ID NO: 3245745 - DNA, 25 bp, Homo sapien
gatgaggatcgaggcgggggatgag

SEQ ID NO: 3245746 - DNA, 25 bp, Homo sapien
tgaagacccacggtggggatgagaa

SEQ ID NO: 3245747 - DNA, 25 bp, Homo sapien
ccacggtggggatgagaaccgaggt

SEQ ID NO: 3245748 - DNA, 25 bp, Homo sapien
tggggatgagaaccgaggtgggaga

SEQ ID NO: 3245749 - DNA, 25 bp, Homo sapien
gcgtcccgagtagcaacttgagctt

SEQ ID NO: 3245750 - DNA, 25 bp, Homo sapien
atgttgtcgatgaccgcggccgtga

SEQ ID NO: 3245751 - DNA, 25 bp, Homo sapien
cgtgagcagggacgcgatgctgggc

SEQ ID NO: 3245752 - DNA, 25 bp, Homo sapien
cttgagcttcactgccgacgagagg

SEQ ID NO: 3245753 - DNA, 25 bp, Homo sapien
gctgccccggcatcttatgaagaca

SEQ ID NO: 3245754 - DNA, 25 bp, Homo sapien
ccggcatcttatgaagacacctacg

SEQ ID NO: 3245755 - DNA, 25 bp, Homo sapien
ccgctgccccggcatcttatgaaga

SEQ ID NO: 3245756 - DNA, 25 bp, Homo sapien
ttatgaagacacctacgcgtccctc

SEQ ID NO: 3245757 - DNA, 25 bp, Homo sapien
tgtcaagcgccgcagacttgctgct

SEQ ID NO: 3245758 - DNA, 25 bp, Homo sapien
cgtcttcgggaagctttgtggcaaa

SEQ ID NO: 3245759 - DNA, 25 bp, Homo sapien
tcggcttccgtaaaacatcatggcg

SEQ ID NO: 3245760 - DNA, 25 bp, Homo sapien
gctgagcaaggactatcggcttccg

SEQ ID NO: 3245761 - DNA, 25 bp, Homo sapien
ttttgacgaggccttcctatgttgg

SEQ ID NO: 3245762 - DNA, 25 bp, Homo sapien
tggccctggcggcttgaacttggca

SEQ ID NO: 3245763 - DNA, 25 bp, Homo sapien
ccaggcaggagccagtagtgaactt

SEQ ID NO: 3245764 - DNA, 25 bp, Homo sapien
gccgttcacagctattgccactggg

SEQ ID NO: 3245765 - DNA, 25 bp, Homo sapien
ccaagaagacaaaccactaggagga

SEQ ID NO: 3245766 - DNA, 25 bp, Homo sapien
ggaggacttagttacagcatcagaa

SEQ ID NO: 3245767 - DNA, 25 bp, Homo sapien
tggagggagcggaaatcacaccact

SEQ ID NO: 3245768 - DNA, 25 bp, Homo sapien
tagctttctgtaggatacgcagcac

SEQ ID NO: 3245769 - DNA, 25 bp, Homo sapien
cagcagccagtcctaatcggctgct

SEQ ID NO: 3245770 - DNA, 25 bp, Homo sapien
gtcctaatcggctgctacgacggct

SEQ ID NO: 3245771 - DNA, 25 bp, Homo sapien
cggctgctacgacggctcctggaag

SEQ ID NO: 3245772 - DNA, 25 bp, Homo sapien
agccagtcctaatcggctgctacga

SEQ ID NO: 3245773 - DNA, 25 bp, Homo sapien
ctttattgcactcttgctgcaagct

SEQ ID NO: 3245774 - DNA, 25 bp, Homo sapien
cactcttgctgcaagctcctccact

SEQ ID NO: 3245775 - DNA, 25 bp, Homo sapien
tttattgcactcttgctgcaagctc

SEQ ID NO: 3245776 - DNA, 25 bp, Homo sapien
tcttgctgcaagctcctccactgcc

SEQ ID NO: 3245777 - DNA, 25 bp, Homo sapien
gacaggagggtttggcagccttatt

SEQ ID NO: 3245778 - DNA, 25 bp, Homo sapien
caaggattcggttcagaagacagga

SEQ ID NO: 3245779 - DNA, 25 bp, Homo sapien
cattttcttgatgtagaagtgttgc

SEQ ID NO: 3245780 - DNA, 25 bp, Homo sapien
ctcagaatattcctatgaaggtgcg

SEQ ID NO: 3245781 - DNA, 25 bp, Homo sapien
cctgattcctcccagaattaatcct

SEQ ID NO: 3245782 - DNA, 25 bp, Homo sapien
taagattgtcctattactaccctga

SEQ ID NO: 3245783 - DNA, 25 bp, Homo sapien
caaagtcacatcagggggctaagat

SEQ ID NO: 3245784 - DNA, 25 bp, Homo sapien
agggtttgagtcgaattcttcaggg

SEQ ID NO: 3245785 - DNA, 25 bp, Homo sapien
aagcttttgagctgaatcagtgggg

SEQ ID NO: 3245786 - DNA, 25 bp, Homo sapien
tgcaccccggagatgaagctgactt

SEQ ID NO: 3245787 - DNA, 25 bp, Homo sapien
ctttgcaccccggagatgaagctga

SEQ ID NO: 3245788 - DNA, 25 bp, Homo sapien
tgaaccagctttgcaccccggagat

SEQ ID NO: 3245789 - DNA, 25 bp, Homo sapien
tgaagacagacggaagctccactac

SEQ ID NO: 3245790 - DNA, 25 bp, Homo sapien
taactgcctaagagtctgagctgac

SEQ ID NO: 3245791 - DNA, 25 bp, Homo sapien
cactacaacatgttcagggcggccc

SEQ ID NO: 3245792 - DNA, 25 bp, Homo sapien
caaagtctgagttacagccgaccca

SEQ ID NO: 3245793 - DNA, 25 bp, Homo sapien
tgcgctcagccaatacacttctaaa

SEQ ID NO: 3245794 - DNA, 25 bp, Homo sapien
tgaaacaaattgctgaacatacata

SEQ ID NO: 3245795 - DNA, 25 bp, Homo sapien
tcttaatcaaggaagaatcacagta

SEQ ID NO: 3245796 - DNA, 25 bp, Homo sapien
aattaccccgtcttagcagagatgg

SEQ ID NO: 3245797 - DNA, 25 bp, Homo sapien
ctgagctccagccacagatttccca

SEQ ID NO: 3245798 - DNA, 25 bp, Homo sapien
gccggccttgcgctctggaggtctc

SEQ ID NO: 3245799 - DNA, 25 bp, Homo sapien
actgcatccgccatgggcctggacg

SEQ ID NO: 3245800 - DNA, 25 bp, Homo sapien
caggcagtcctctagactgcatccg

SEQ ID NO: 3245801 - DNA, 25 bp, Homo sapien
ggcgcggactagaggctcgctgggc

SEQ ID NO: 3245802 - DNA, 25 bp, Homo sapien
gacgcggaacgtctgccggtgtccc

SEQ ID NO: 3245803 - DNA, 25 bp, Homo sapien
ggtcgggtcggagcgcatgcgcgtt

SEQ ID NO: 3245804 - DNA, 25 bp, Homo sapien
cgaatgggcgttttctagatacggg

SEQ ID NO: 3245805 - DNA, 25 bp, Homo sapien
ccgcccgcgtgccggtccccgatgt

SEQ ID NO: 3245806 - DNA, 25 bp, Homo sapien
cgccgctgacccctcgctggcttca

SEQ ID NO: 3245807 - DNA, 25 bp, Homo sapien
gccgggagtgccgtccccgcgcaga

SEQ ID NO: 3245808 - DNA, 25 bp, Homo sapien
ccgcgtgccggtccccgatgtcacc

SEQ ID NO: 3245809 - DNA, 25 bp, Homo sapien
catgcgtggactgccacgccttcga

SEQ ID NO: 3245810 - DNA, 25 bp, Homo sapien
gcgccctgcaggacctgcggaagac

SEQ ID NO: 3245811 - DNA, 25 bp, Homo sapien
ttcgagttcatgcagcgcgccctgc

SEQ ID NO: 3245812 - DNA, 25 bp, Homo sapien
aggacctgcggaagacagcctgcag

SEQ ID NO: 3245813 - DNA, 25 bp, Homo sapien
gggcactgaggaccacgctgctccg

SEQ ID NO: 3245814 - DNA, 25 bp, Homo sapien
gaggaccacgctgctccgtgtgaat

SEQ ID NO: 3245815 - DNA, 25 bp, Homo sapien
cactgaggaccacgctgctccgtgt

SEQ ID NO: 3245816 - DNA, 25 bp, Homo sapien
ctgaggaccacgctgctccgtgtga

SEQ ID NO: 3245817 - DNA, 25 bp, Homo sapien
gaggtgacggcagactgagaaggac

SEQ ID NO: 3245818 - DNA, 25 bp, Homo sapien
taagaggccgctggattccgggtgt

SEQ ID NO: 3245819 - DNA, 25 bp, Homo sapien
caaggtttggtaacgggagcttctg

SEQ ID NO: 3245820 - DNA, 25 bp, Homo sapien
ttctggctgccggtagggaagggac

SEQ ID NO: 3245821 - DNA, 25 bp, Homo sapien
tgcaggtcacccttcctaccgcagg

SEQ ID NO: 3245822 - DNA, 25 bp, Homo sapien
cctaccgcagggcctgtgcatgtgc

SEQ ID NO: 3245823 - DNA, 25 bp, Homo sapien
ccatctgcaggtcacccttcctacc

SEQ ID NO: 3245824 - DNA, 25 bp, Homo sapien
taccgcagggcctgtgcatgtgccc

SEQ ID NO: 3245825 - DNA, 25 bp, Homo sapien
tccaagctgacggtgttctggtgcc

SEQ ID NO: 3245826 - DNA, 25 bp, Homo sapien
aagctgacggtgttctggtgccttc

SEQ ID NO: 3245827 - DNA, 25 bp, Homo sapien
caagctgacggtgttctggtgcctt

SEQ ID NO: 3245828 - DNA, 25 bp, Homo sapien
ttccaagctgacggtgttctggtgc

SEQ ID NO: 3245829 - DNA, 25 bp, Homo sapien
ctcagctgaccatcagggctactgg

SEQ ID NO: 3245830 - DNA, 25 bp, Homo sapien
tgggggtcacatggccacgggcttt

SEQ ID NO: 3245831 - DNA, 25 bp, Homo sapien
catcagggctactgggggtcacatg

SEQ ID NO: 3245832 - DNA, 25 bp, Homo sapien
cacgggctttgggtgacttgtaggg

SEQ ID NO: 3245833 - DNA, 25 bp, Homo sapien
cttaggacgacactgcggagctgcc

SEQ ID NO: 3245834 - DNA, 25 bp, Homo sapien
gttgttgaatggatcagcgagttcc

SEQ ID NO: 3245835 - DNA, 25 bp, Homo sapien
cctggtcagcacttgagcgtcgggt

SEQ ID NO: 3245836 - DNA, 25 bp, Homo sapien
gagttccttcgagattgtccatgac

SEQ ID NO: 3245837 - DNA, 25 bp, Homo sapien
gcgaaaaatgtaaaacgtcactgac

SEQ ID NO: 3245838 - DNA, 25 bp, Homo sapien
cagcctgagacctcttgaggaacac

SEQ ID NO: 3245839 - DNA, 25 bp, Homo sapien
tctgcctttctcacggagtctcgag

SEQ ID NO: 3245840 - DNA, 25 bp, Homo sapien
aaaatcttgagaaccggctcctctg

SEQ ID NO: 3245841 - DNA, 25 bp, Homo sapien
cttggtgaatttaggagctgcgtct

SEQ ID NO: 3245842 - DNA, 25 bp, Homo sapien
cgtgcattcagaccaacctgagtct

SEQ ID NO: 3245843 - DNA, 25 bp, Homo sapien
caactgctgcgaatgagagcgcgtg

SEQ ID NO: 3245844 - DNA, 25 bp, Homo sapien
taggttgaaaagctgacagcgggcc

SEQ ID NO: 3245845 - DNA, 25 bp, Homo sapien
tccaccgcacaacgcagactgcggg

SEQ ID NO: 3245846 - DNA, 25 bp, Homo sapien
ggccccaactccaccgcacaacgca

SEQ ID NO: 3245847 - DNA, 25 bp, Homo sapien
ccaactccaccgcacaacgcagact

SEQ ID NO: 3245848 - DNA, 25 bp, Homo sapien
aactccaccgcacaacgcagactgc

SEQ ID NO: 3245849 - DNA, 25 bp, Homo sapien
caaaatgcggcgcagctccctgcgc

SEQ ID NO: 3245850 - DNA, 25 bp, Homo sapien
ctccaaaatgcggcgcagctccctg

SEQ ID NO: 3245851 - DNA, 25 bp, Homo sapien
aaaatgcggcgcagctccctgcgcg

SEQ ID NO: 3245852 - DNA, 25 bp, Homo sapien
ccgccgcgggtccgagggcgccgcg

SEQ ID NO: 3245853 - DNA, 25 bp, Homo sapien
cattcagcttagaagtggacctggc

SEQ ID NO: 3245854 - DNA, 25 bp, Homo sapien
cttcagaagcgagcgaagggacaga

SEQ ID NO: 3245855 - DNA, 25 bp, Homo sapien
gcatcaaggccacgtgcagggccat

SEQ ID NO: 3245856 - DNA, 25 bp, Homo sapien
gagggatgcttctcacgaggcgctt

SEQ ID NO: 3245857 - DNA, 25 bp, Homo sapien
tcccttggtcctgtgcctttggagc

SEQ ID NO: 3245858 - DNA, 25 bp, Homo sapien
tggttgtgtgcagaaccctgccgcc

SEQ ID NO: 3245859 - DNA, 25 bp, Homo sapien
tgcgcccgtgagtgacctcttcctt

SEQ ID NO: 3245860 - DNA, 25 bp, Homo sapien
tctctcattctggtggcatctgcgc

SEQ ID NO: 3245861 - DNA, 25 bp, Homo sapien
tgcccagagccacgggtcttgctgt

SEQ ID NO: 3245862 - DNA, 25 bp, Homo sapien
gtgtgagtcgctgcagacctggtcc

SEQ ID NO: 3245863 - DNA, 25 bp, Homo sapien
ctcctgagcgtagggagttgagccc

SEQ ID NO: 3245864 - DNA, 25 bp, Homo sapien
ggacatcctcactggacgagcactg

SEQ ID NO: 3245865 - DNA, 25 bp, Homo sapien
gtgcttccagaggtggcgtgatgcc

SEQ ID NO: 3245866 - DNA, 25 bp, Homo sapien
gcttccagaggtggcgtgatgcctc

SEQ ID NO: 3245867 - DNA, 25 bp, Homo sapien
tgcttccagaggtggcgtgatgcct

SEQ ID NO: 3245868 - DNA, 25 bp, Homo sapien
cttccagaggtggcgtgatgcctcc

SEQ ID NO: 3245869 - DNA, 25 bp, Homo sapien
tgacaccatagggcgtcagagctgg

SEQ ID NO: 3245870 - DNA, 25 bp, Homo sapien
ggtgacaccatagggcgtcagagct

SEQ ID NO: 3245871 - DNA, 25 bp, Homo sapien
gtgacaccatagggcgtcagagctg

SEQ ID NO: 3245872 - DNA, 25 bp, Homo sapien
gacaccatagggcgtcagagctggt

SEQ ID NO: 3245873 - DNA, 25 bp, Homo sapien
agccccaaagggttaatgcgtcctg

SEQ ID NO: 3245874 - DNA, 25 bp, Homo sapien
ttcccactcacaggaagaattcact

SEQ ID NO: 3245875 - DNA, 25 bp, Homo sapien
agaattcactcagacaaggatgagg

SEQ ID NO: 3245876 - DNA, 25 bp, Homo sapien
cagccccaaagggttaatgcgtcct

SEQ ID NO: 3245877 - DNA, 25 bp, Homo sapien
gacaaaatgaaggcgaaaaatgcag

SEQ ID NO: 3245878 - DNA, 25 bp, Homo sapien
caaaatgaaggcgaaaaatgcaggg

SEQ ID NO: 3245879 - DNA, 25 bp, Homo sapien
cagacaaaatgaaggcgaaaaatgc

SEQ ID NO: 3245880 - DNA, 25 bp, Homo sapien
ctacagacaaaatgaaggcgaaaaa

SEQ ID NO: 3245881 - DNA, 25 bp, Homo sapien
cagtggcaccaggtgtccccatgag

SEQ ID NO: 3245882 - DNA, 25 bp, Homo sapien
atgagcggccggcactcaggctcac

SEQ ID NO: 3245883 - DNA, 25 bp, Homo sapien
cactcaggctcaccttgaggggtac

SEQ ID NO: 3245884 - DNA, 25 bp, Homo sapien
tggcaccaggtgtccccatgagcgg

SEQ ID NO: 3245885 - DNA, 25 bp, Homo sapien
atgatcagacagccacacgcacaca

SEQ ID NO: 3245886 - DNA, 25 bp, Homo sapien
cagtcacgacacctcgatcttggcg

SEQ ID NO: 3245887 - DNA, 25 bp, Homo sapien
gcccagcaacaggcttatgccacat

SEQ ID NO: 3245888 - DNA, 25 bp, Homo sapien
gcagccagaggtgagccccacgcct

SEQ ID NO: 3245889 - DNA, 25 bp, Homo sapien
agtgggtaggctgcggccggcagac

SEQ ID NO: 3245890 - DNA, 25 bp, Homo sapien
ctgcggccggcagacaaggtgccct

SEQ ID NO: 3245891 - DNA, 25 bp, Homo sapien
tgcggccggcagacaaggtgccctt

SEQ ID NO: 3245892 - DNA, 25 bp, Homo sapien
ctgtgccagtgggtaggctgcggcc

SEQ ID NO: 3245893 - DNA, 25 bp, Homo sapien
ctgcccccgggaggattggtggctc

SEQ ID NO: 3245894 - DNA, 25 bp, Homo sapien
gaagaccgggcaggcttaagtgtcc

SEQ ID NO: 3245895 - DNA, 25 bp, Homo sapien
tgggctccggaagaccgggcaggct

SEQ ID NO: 3245896 - DNA, 25 bp, Homo sapien
ccgggcaggcttaagtgtcccctca

SEQ ID NO: 3245897 - DNA, 25 bp, Homo sapien
gctccggaagaccgggcaggcttaa

SEQ ID NO: 3245898 - DNA, 25 bp, Homo sapien
ctgaagctgcagctccaatgcctgc

SEQ ID NO: 3245899 - DNA, 25 bp, Homo sapien
gaagctgcagctccaatgcctgcac

SEQ ID NO: 3245900 - DNA, 25 bp, Homo sapien
tgaagctgcagctccaatgcctgca

SEQ ID NO: 3245901 - DNA, 25 bp, Homo sapien
ctgttccaaggactccatggtcctc

SEQ ID NO: 3245902 - DNA, 25 bp, Homo sapien
ctagagtgcggaagagagaggaggc

SEQ ID NO: 3245903 - DNA, 25 bp, Homo sapien
gaggccctgctggtctcttggcctt

SEQ ID NO: 3245904 - DNA, 25 bp, Homo sapien
aggaggccctgctggtctcttggcc

SEQ ID NO: 3245905 - DNA, 25 bp, Homo sapien
gagagaggaggccctgctggtctct

SEQ ID NO: 3245906 - DNA, 25 bp, Homo sapien
tgctctgaaacctggagcccctgga

SEQ ID NO: 3245907 - DNA, 25 bp, Homo sapien
gtgggacccgcaagctcaggctttc

SEQ ID NO: 3245908 - DNA, 25 bp, Homo sapien
caacagtggctttgtgccacaggca

SEQ ID NO: 3245909 - DNA, 25 bp, Homo sapien
tcagagccctacgaaagggaaggcc

SEQ ID NO: 3245910 - DNA, 25 bp, Homo sapien
ccagcagagcgagggtctccctggg

SEQ ID NO: 3245911 - DNA, 25 bp, Homo sapien
ggccagcggccacccaagctctgtg

SEQ ID NO: 3245912 - DNA, 25 bp, Homo sapien
caagctctgtggccctcaatgtctt

SEQ ID NO: 3245913 - DNA, 25 bp, Homo sapien
gacctgtccctggtgtgtcctgagc

SEQ ID NO: 3245914 - DNA, 25 bp, Homo sapien
acaggtccacgtgggcacctgctct

SEQ ID NO: 3245915 - DNA, 25 bp, Homo sapien
gcacaggtccacgtgggcacctgct

SEQ ID NO: 3245916 - DNA, 25 bp, Homo sapien
ggggcacaggtccacgtgggcacct

SEQ ID NO: 3245917 - DNA, 25 bp, Homo sapien
ctgggggcacaggtccacgtgggca

SEQ ID NO: 3245918 - DNA, 25 bp, Homo sapien
tgagctaactcatctatgggccgtg

SEQ ID NO: 3245919 - DNA, 25 bp, Homo sapien
aaagaaccccttgggctgaccgctg

SEQ ID NO: 3245920 - DNA, 25 bp, Homo sapien
tagacccccaagacatagaggcctt

SEQ ID NO: 3245921 - DNA, 25 bp, Homo sapien
tgaccgctggggtgattctgcctga

SEQ ID NO: 3245922 - DNA, 25 bp, Homo sapien
cagggtggagcccacttgggccttt

SEQ ID NO: 3245923 - DNA, 25 bp, Homo sapien
ccaagcaaccctgtgttgccccagg

SEQ ID NO: 3245924 - DNA, 25 bp, Homo sapien
tgggctgtgcccatggggcatggag

SEQ ID NO: 3245925 - DNA, 25 bp, Homo sapien
atggggcatggagcctcctcttagc

SEQ ID NO: 3245926 - DNA, 25 bp, Homo sapien
ctgtctgtgatgtccaagcaaccct

SEQ ID NO: 3245927 - DNA, 25 bp, Homo sapien
gggatctgcggatcttccacttcaa

SEQ ID NO: 3245928 - DNA, 25 bp, Homo sapien
cgggatctgcggatcttccacttca

SEQ ID NO: 3245929 - DNA, 25 bp, Homo sapien
tccgggatctgcggatcttccactt

SEQ ID NO: 3245930 - DNA, 25 bp, Homo sapien
ccgggatctgcggatcttccacttc

SEQ ID NO: 3245931 - DNA, 25 bp, Homo sapien
gagggaaggagtcaccctgggaggc

SEQ ID NO: 3245932 - DNA, 25 bp, Homo sapien
cagggagggaaggagtcaccctggg

SEQ ID NO: 3245933 - DNA, 25 bp, Homo sapien
aggactgtggggcgtgggccaccag

SEQ ID NO: 3245934 - DNA, 25 bp, Homo sapien
gaggccaggactgtggggcgtgggc

SEQ ID NO: 3245935 - DNA, 25 bp, Homo sapien
tgatgtgagacctctgctgaggcct

SEQ ID NO: 3245936 - DNA, 25 bp, Homo sapien
cttgggcagatgatgcctcaaatct

SEQ ID NO: 3245937 - DNA, 25 bp, Homo sapien
cttggtgatgtgagacctctgctga

SEQ ID NO: 3245938 - DNA, 25 bp, Homo sapien
tgatgcctcaaatcttggtgatgtg

SEQ ID NO: 3245939 - DNA, 25 bp, Homo sapien
agagatttccggtgacctgccccaa

SEQ ID NO: 3245940 - DNA, 25 bp, Homo sapien
tctgtctcctggatcgagtcttcag

SEQ ID NO: 3245941 - DNA, 25 bp, Homo sapien
tcacgggcatgtgacggagagcccc

SEQ ID NO: 3245942 - DNA, 25 bp, Homo sapien
ccttgccgggcagtagtcacgggca

SEQ ID NO: 3245943 - DNA, 25 bp, Homo sapien
gggcagctcccttgcaagggatgcc

SEQ ID NO: 3245944 - DNA, 25 bp, Homo sapien
tgggcgcatggtggcctcatgcaga

SEQ ID NO: 3245945 - DNA, 25 bp, Homo sapien
gcatggtggcctcatgcagacccgc

SEQ ID NO: 3245946 - DNA, 25 bp, Homo sapien
ggcagctcccttgcaagggatgccc

SEQ ID NO: 3245947 - DNA, 25 bp, Homo sapien
gaccagcgagtaactgcgttcctga

SEQ ID NO: 3245948 - DNA, 25 bp, Homo sapien
ctgcttcagcgagagatgcctggcc

SEQ ID NO: 3245949 - DNA, 25 bp, Homo sapien
gaagcatttcctcgtgacagccaat

SEQ ID NO: 3245950 - DNA, 25 bp, Homo sapien
tgtgcctcccagtgatcgagtttca

SEQ ID NO: 3245951 - DNA, 25 bp, Homo sapien
gccaagacggaaactagcacaagct

SEQ ID NO: 3245952 - DNA, 25 bp, Homo sapien
cagtatcttagaggcaggaccacca

SEQ ID NO: 3245953 - DNA, 25 bp, Homo sapien
tgaacacgtgtatgggtgcatgtgc

SEQ ID NO: 3245954 - DNA, 25 bp, Homo sapien
gcacaagctgctcatatcctgggag

SEQ ID NO: 3245955 - DNA, 25 bp, Homo sapien
agtgaagacatggatcatggccagc

SEQ ID NO: 3245956 - DNA, 25 bp, Homo sapien
aagacatggatcatggccagcttgc

SEQ ID NO: 3245957 - DNA, 25 bp, Homo sapien
gggaagcagccactgcagtgaagac

SEQ ID NO: 3245958 - DNA, 25 bp, Homo sapien
tggccgtcaaggtgtgggaagcagc

SEQ ID NO: 3245959 - DNA, 25 bp, Homo sapien
tccacacagaggtgctggctctgag

SEQ ID NO: 3245960 - DNA, 25 bp, Homo sapien
cacacagaggtgctggctctgagct

SEQ ID NO: 3245961 - DNA, 25 bp, Homo sapien
cacagaggtgctggctctgagctgt

SEQ ID NO: 3245962 - DNA, 25 bp, Homo sapien
ccacacagaggtgctggctctgagc

SEQ ID NO: 3245963 - DNA, 25 bp, Homo sapien
tcatgagcgtgaatccttggcaggg

SEQ ID NO: 3245964 - DNA, 25 bp, Homo sapien
cgctctgcttgtgcccggagttgct

SEQ ID NO: 3245965 - DNA, 25 bp, Homo sapien
gagttgctggtcatgagcgtgaatc

SEQ ID NO: 3245966 - DNA, 25 bp, Homo sapien
gttcactgcctgtcgctctgcttgt

SEQ ID NO: 3245967 - DNA, 25 bp, Homo sapien
catgccaggcaatatacaagattct

SEQ ID NO: 3245968 - DNA, 25 bp, Homo sapien
taatctagggctagtctagacctgc

SEQ ID NO: 3245969 - DNA, 25 bp, Homo sapien
gacttttggccggatgctgggcact

SEQ ID NO: 3245970 - DNA, 25 bp, Homo sapien
gcagtgaggacacgagagatcttct

SEQ ID NO: 3245971 - DNA, 25 bp, Homo sapien
gcaatagctgctcgggcgaagtcct

SEQ ID NO: 3245972 - DNA, 25 bp, Homo sapien
cagcttcctgaataggaactccaag

SEQ ID NO: 3245973 - DNA, 25 bp, Homo sapien
cactgggcaatagctgctcgggcga

SEQ ID NO: 3245974 - DNA, 25 bp, Homo sapien
gcttcctgaataggaactccaaggc

SEQ ID NO: 3245975 - DNA, 25 bp, Homo sapien
ggtattatcgctacaagaggactta

SEQ ID NO: 3245976 - DNA, 25 bp, Homo sapien
cagtgcaaaaatacgcattagctaa

SEQ ID NO: 3245977 - DNA, 25 bp, Homo sapien
gtcaaatggtattatcgctacaaga

SEQ ID NO: 3245978 - DNA, 25 bp, Homo sapien
gcattagctaatcaactgatctaca

SEQ ID NO: 3245979 - DNA, 25 bp, Homo sapien
cggccttggtccgagacagagaaaa

SEQ ID NO: 3245980 - DNA, 25 bp, Homo sapien
caacggccttggtccgagacagaga

SEQ ID NO: 3245981 - DNA, 25 bp, Homo sapien
aacggccttggtccgagacagagaa

SEQ ID NO: 3245982 - DNA, 25 bp, Homo sapien
cagcaacggccttggtccgagacag

SEQ ID NO: 3245983 - DNA, 25 bp, Homo sapien
ttcagttagggatggactttcacac

SEQ ID NO: 3245984 - DNA, 25 bp, Homo sapien
cagatgactggttacaaaggtcaga

SEQ ID NO: 3245985 - DNA, 25 bp, Homo sapien
aaaggatcccaaacttagatctgtg

SEQ ID NO: 3245986 - DNA, 25 bp, Homo sapien
gacaaattctcaaggtctcttgtgg

SEQ ID NO: 3245987 - DNA, 25 bp, Homo sapien
ggattatctgaacttcctaaactgt

SEQ ID NO: 3245988 - DNA, 25 bp, Homo sapien
ctagcatttaaattatcaacagtca

SEQ ID NO: 3245989 - DNA, 25 bp, Homo sapien
gttaagcacaaaggattatctgaac

SEQ ID NO: 3245990 - DNA, 25 bp, Homo sapien
attttccaacaagctagttaagcac

SEQ ID NO: 3245991 - DNA, 25 bp, Homo sapien
tcagtgttgtgctctttatcattat

SEQ ID NO: 3245992 - DNA, 25 bp, Homo sapien
agatggatgaagtctcaacaaatca

SEQ ID NO: 3245993 - DNA, 25 bp, Homo sapien
agtgttgtgctctttatcattatgg

SEQ ID NO: 3245994 - DNA, 25 bp, Homo sapien
gatgaagtctcaacaaatcagcatc

SEQ ID NO: 3245995 - DNA, 25 bp, Homo sapien
aaaaacgagcttgattaaatccact

SEQ ID NO: 3245996 - DNA, 25 bp, Homo sapien
catgatcgtattcttctataggctc

SEQ ID NO: 3245997 - DNA, 25 bp, Homo sapien
gctgatggttcgaaacataattgaa

SEQ ID NO: 3245998 - DNA, 25 bp, Homo sapien
tcaagatcttcatcgcagtcacagc

SEQ ID NO: 3245999 - DNA, 25 bp, Homo sapien
ccgcgtacaccaccttcttggtttg

SEQ ID NO: 3246000 - DNA, 25 bp, Homo sapien
ctgctccatagaccaccgcgtacac

SEQ ID NO: 3246001 - DNA, 25 bp, Homo sapien
gtgtcacctgttccacgggcacatc

SEQ ID NO: 3246002 - DNA, 25 bp, Homo sapien
tctgtctgcgtgtgtcacctgttcc

SEQ ID NO: 3246003 - DNA, 25 bp, Homo sapien
gttattacaccagtagatgtgggag

SEQ ID NO: 3246004 - DNA, 25 bp, Homo sapien
tcttagagagataacgggggtagca

SEQ ID NO: 3246005 - DNA, 25 bp, Homo sapien
atgtgggagataacgaaggcctgat

SEQ ID NO: 3246006 - DNA, 25 bp, Homo sapien
ccattgaaggcttggaggggttgca

SEQ ID NO: 3246007 - DNA, 25 bp, Homo sapien
catcaaccacttctgaggtcttgcc

SEQ ID NO: 3246008 - DNA, 25 bp, Homo sapien
acatattgccaatgatggacacatc

SEQ ID NO: 3246009 - DNA, 25 bp, Homo sapien
ggacacatcaaccacttctgaggtc

SEQ ID NO: 3246010 - DNA, 25 bp, Homo sapien
taacagccacatattgccaatgatg

SEQ ID NO: 3246011 - DNA, 25 bp, Homo sapien
gccagaagtttgtggctgacaatca

SEQ ID NO: 3246012 - DNA, 25 bp, Homo sapien
cccagacagtgccagaagtttgtgg

SEQ ID NO: 3246013 - DNA, 25 bp, Homo sapien
gtgccagaagtttgtggctgacaat

SEQ ID NO: 3246014 - DNA, 25 bp, Homo sapien
gaagtttgtggctgacaatcacccc

SEQ ID NO: 3246015 - DNA, 25 bp, Homo sapien
caccaccttgcaacttccgccagca

SEQ ID NO: 3246016 - DNA, 25 bp, Homo sapien
agctgccaccaccttgcaacttccg

SEQ ID NO: 3246017 - DNA, 25 bp, Homo sapien
gctgccaccaccttgcaacttccgc

SEQ ID NO: 3246018 - DNA, 25 bp, Homo sapien
tggaggccactcatgtgaaaggaca

SEQ ID NO: 3246019 - DNA, 25 bp, Homo sapien
gaggccactcatgtgaaaggacagg

SEQ ID NO: 3246020 - DNA, 25 bp, Homo sapien
ccccgattggggtggaggccactca

SEQ ID NO: 3246021 - DNA, 25 bp, Homo sapien
gggtggaggccactcatgtgaaagg

SEQ ID NO: 3246022 - DNA, 25 bp, Homo sapien
gcagcctttctgtgtgacatcgtga

SEQ ID NO: 3246023 - DNA, 25 bp, Homo sapien
tgacttctccgatccccatgatctg

SEQ ID NO: 3246024 - DNA, 25 bp, Homo sapien
tctgtgtgacatcgtgagggtgaac

SEQ ID NO: 3246025 - DNA, 25 bp, Homo sapien
agatgagctgggacggagggtaggg

SEQ ID NO: 3246026 - DNA, 25 bp, Homo sapien
tcaaaggggcactgatgcacccggc

SEQ ID NO: 3246027 - DNA, 25 bp, Homo sapien
acacctgtgatgtataagccaaaca

SEQ ID NO: 3246028 - DNA, 25 bp, Homo sapien
ggcactgatgcacccggcccggtga

SEQ ID NO: 3246029 - DNA, 25 bp, Homo sapien
taagccaaacacaataatccactcc

SEQ ID NO: 3246030 - DNA, 25 bp, Homo sapien
tgcatgacctgctctagaaagtggg

SEQ ID NO: 3246031 - DNA, 25 bp, Homo sapien
gcagctgcatgacctgctctagaaa

SEQ ID NO: 3246032 - DNA, 25 bp, Homo sapien
gtctgcaccgggctctccaagagca

SEQ ID NO: 3246033 - DNA, 25 bp, Homo sapien
gaaagtgggtatagctgttgtctgc

SEQ ID NO: 3246034 - DNA, 25 bp, Homo sapien
agagagagccttgcacccgtctctc

SEQ ID NO: 3246035 - DNA, 25 bp, Homo sapien
gagagagccttgcacccgtctctcc

SEQ ID NO: 3246036 - DNA, 25 bp, Homo sapien
gagagagagccttgcacccgtctct

SEQ ID NO: 3246037 - DNA, 25 bp, Homo sapien
ggcgtgagtacgcagcaagcacctt

SEQ ID NO: 3246038 - DNA, 25 bp, Homo sapien
caccttggctctcctcggagggcag

SEQ ID NO: 3246039 - DNA, 25 bp, Homo sapien
gtgagtacgcagcaagcaccttggc

SEQ ID NO: 3246040 - DNA, 25 bp, Homo sapien
ggctcgctctttccgtggtgctcgc

SEQ ID NO: 3246041 - DNA, 25 bp, Homo sapien
taaatgtgtaagaatgcgcaattca

SEQ ID NO: 3246042 - DNA, 25 bp, Homo sapien
gaagttccggatctccagataaatg

SEQ ID NO: 3246043 - DNA, 25 bp, Homo sapien
taagaatgcgcaattcaatctgtga

SEQ ID NO: 3246044 - DNA, 25 bp, Homo sapien
ccggatctccagataaatgtgtaag

SEQ ID NO: 3246045 - DNA, 25 bp, Homo sapien
tctcctgactctgtagcctcaaggt

SEQ ID NO: 3246046 - DNA, 25 bp, Homo sapien
actctcctgactctgtagcctcaag

SEQ ID NO: 3246047 - DNA, 25 bp, Homo sapien
tcctgactctgtagcctcaaggtcc

SEQ ID NO: 3246048 - DNA, 25 bp, Homo sapien
cctgactctgtagcctcaaggtcca

SEQ ID NO: 3246049 - DNA, 25 bp, Homo sapien
ctgctagaaaggtgtggcctttgga

SEQ ID NO: 3246050 - DNA, 25 bp, Homo sapien
ggtgtggcctttggatgaaacaaac

SEQ ID NO: 3246051 - DNA, 25 bp, Homo sapien
tgtggcctttggatgaaacaaacat

SEQ ID NO: 3246052 - DNA, 25 bp, Homo sapien
aaggtgtggcctttggatgaaacaa

SEQ ID NO: 3246053 - DNA, 25 bp, Homo sapien
ggccctcggggagatcgtgagaatc

SEQ ID NO: 3246054 - DNA, 25 bp, Homo sapien
cctcggggagatcgtgagaatcttg

SEQ ID NO: 3246055 - DNA, 25 bp, Homo sapien
gggagatcgtgagaatcttgtcttc

SEQ ID NO: 3246056 - DNA, 25 bp, Homo sapien
gagatcgtgagaatcttgtcttctt

SEQ ID NO: 3246057 - DNA, 25 bp, Homo sapien
tcttaggtgtagtaatctgaattgg

SEQ ID NO: 3246058 - DNA, 25 bp, Homo sapien
tgtagtaatctgaattgggtgcttg

SEQ ID NO: 3246059 - DNA, 25 bp, Homo sapien
gtaatctgaattgggtgcttggaga

SEQ ID NO: 3246060 - DNA, 25 bp, Homo sapien
taggtgtagtaatctgaattgggtg

SEQ ID NO: 3246061 - DNA, 25 bp, Homo sapien
tcatgcagtggactccgaggagcaa

SEQ ID NO: 3246062 - DNA, 25 bp, Homo sapien
aggagcaaggatgagcacccttgac

SEQ ID NO: 3246063 - DNA, 25 bp, Homo sapien
cccttgaccacaacaaatgggcaga

SEQ ID NO: 3246064 - DNA, 25 bp, Homo sapien
tgagcacccttgaccacaacaaatg

SEQ ID NO: 3246065 - DNA, 25 bp, Homo sapien
tgtgctctcagcacggccagcatct

SEQ ID NO: 3246066 - DNA, 25 bp, Homo sapien
tccttgtgggcctcggctgcccatg

SEQ ID NO: 3246067 - DNA, 25 bp, Homo sapien
tgcggtgcgttctgtgctctcagca

SEQ ID NO: 3246068 - DNA, 25 bp, Homo sapien
tgttggtgaagtgttcatgaaggac

SEQ ID NO: 3246069 - DNA, 25 bp, Homo sapien
taatcatgagtcttttttagttcaa

SEQ ID NO: 3246070 - DNA, 25 bp, Homo sapien
tcttttctgtatctaaggaattttc

SEQ ID NO: 3246071 - DNA, 25 bp, Homo sapien
ataagttcaagggaatttagagctt

SEQ ID NO: 3246072 - DNA, 25 bp, Homo sapien
tgtgcttagcaaaaagtgtggaaag

SEQ ID NO: 3246073 - DNA, 25 bp, Homo sapien
ggagctgttcatcatagcatcagat

SEQ ID NO: 3246074 - DNA, 25 bp, Homo sapien
gaaatcagaagccacctgtctggca

SEQ ID NO: 3246075 - DNA, 25 bp, Homo sapien
tcagatacttcaacacatttctgga

SEQ ID NO: 3246076 - DNA, 25 bp, Homo sapien
caaccaccaaaaaatggagctgttc

SEQ ID NO: 3246077 - DNA, 25 bp, Homo sapien
ggtacgggtgtcctttttgcctgca

SEQ ID NO: 3246078 - DNA, 25 bp, Homo sapien
ctgcacactggagtgcatgggtttc

SEQ ID NO: 3246079 - DNA, 25 bp, Homo sapien
tatcagtatgaagtcccctcttgga

SEQ ID NO: 3246080 - DNA, 25 bp, Homo sapien
aaatggcgtttaacaaagacagttg

SEQ ID NO: 3246081 - DNA, 25 bp, Homo sapien
cagtctgattccatgtagaggaaat

SEQ ID NO: 3246082 - DNA, 25 bp, Homo sapien
agtcacagttccagtctgattccat

SEQ ID NO: 3246083 - DNA, 25 bp, Homo sapien
ctttattagttaaaaagaatcagtg

SEQ ID NO: 3246084 - DNA, 25 bp, Homo sapien
taatccatctacaaaggttgacttg

SEQ ID NO: 3246085 - DNA, 25 bp, Homo sapien
aatccatctacaaaggttgacttga

SEQ ID NO: 3246086 - DNA, 25 bp, Homo sapien
gtaatccatctacaaaggttgactt

SEQ ID NO: 3246087 - DNA, 25 bp, Homo sapien
atccatctacaaaggttgacttgat

SEQ ID NO: 3246088 - DNA, 25 bp, Homo sapien
gccgtggcatgccacctacttccga

SEQ ID NO: 3246089 - DNA, 25 bp, Homo sapien
gtggcatgccacctacttccgattc

SEQ ID NO: 3246090 - DNA, 25 bp, Homo sapien
acctacttccgattcctcattgtct

SEQ ID NO: 3246091 - DNA, 25 bp, Homo sapien
acacagccgtggcatgccacctact

SEQ ID NO: 3246092 - DNA, 25 bp, Homo sapien
ggatgaaggtctcgcagagcattta

SEQ ID NO: 3246093 - DNA, 25 bp, Homo sapien
taatggatgaaggtctcgcagagca

SEQ ID NO: 3246094 - DNA, 25 bp, Homo sapien
ttgggtaatggatgaaggtctcgca

SEQ ID NO: 3246095 - DNA, 25 bp, Homo sapien
atcttgggtaatggatgaaggtctc

SEQ ID NO: 3246096 - DNA, 25 bp, Homo sapien
atgggagaaaaatgagctcctcgtg

SEQ ID NO: 3246097 - DNA, 25 bp, Homo sapien
agaaaaatgagctcctcgtgaaagc

SEQ ID NO: 3246098 - DNA, 25 bp, Homo sapien
tgagctcctcgtgaaagctgttgtc

SEQ ID NO: 3246099 - DNA, 25 bp, Homo sapien
tgtctttatgggagaaaaatgagct

SEQ ID NO: 3246100 - DNA, 25 bp, Homo sapien
gtgatgcgtcctttcttgcactgtt

SEQ ID NO: 3246101 - DNA, 25 bp, Homo sapien
cacatcggcaccagaagagagtgat

SEQ ID NO: 3246102 - DNA, 25 bp, Homo sapien
cagaagagagtgatgcgtcctttct

SEQ ID NO: 3246103 - DNA, 25 bp, Homo sapien
ttaacaagagagcacatcggcacca

SEQ ID NO: 3246104 - DNA, 25 bp, Homo sapien
cagagcagtcgagcaatgttttcat

SEQ ID NO: 3246105 - DNA, 25 bp, Homo sapien
tgaccccactgcccttgttcttact

SEQ ID NO: 3246106 - DNA, 25 bp, Homo sapien
gagcagtcgagcaatgttttcatgt

SEQ ID NO: 3246107 - DNA, 25 bp, Homo sapien
gcagtcgagcaatgttttcatgttg

SEQ ID NO: 3246108 - DNA, 25 bp, Homo sapien
gacgggcccttcactaaggtggaga

SEQ ID NO: 3246109 - DNA, 25 bp, Homo sapien
ctggaaggaggacgggcccttcact

SEQ ID NO: 3246110 - DNA, 25 bp, Homo sapien
tggaaggaggacgggcccttcacta

SEQ ID NO: 3246111 - DNA, 25 bp, Homo sapien
gtccattaaaccagcaaaggccaag

SEQ ID NO: 3246112 - DNA, 25 bp, Homo sapien
ggagacatcttagaaggaaaccttc

SEQ ID NO: 3246113 - DNA, 25 bp, Homo sapien
tacaaagtcgaatgctggacagagc

SEQ ID NO: 3246114 - DNA, 25 bp, Homo sapien
ttgagggcctgtactctaagacacc

SEQ ID NO: 3246115 - DNA, 25 bp, Homo sapien
cgggtatttctgcaaccccgttctg

SEQ ID NO: 3246116 - DNA, 25 bp, Homo sapien
gggagactgttcctttgactcagca

SEQ ID NO: 3246117 - DNA, 25 bp, Homo sapien
tgcttctgatgtagacgggtatttc

SEQ ID NO: 3246118 - DNA, 25 bp, Homo sapien
tttgactcagcaggtgcagctttaa

SEQ ID NO: 3246119 - DNA, 25 bp, Homo sapien
gctggttattgctcgttataagaaa

SEQ ID NO: 3246120 - DNA, 25 bp, Homo sapien
cgttataagaaaccgttctcctgca

SEQ ID NO: 3246121 - DNA, 25 bp, Homo sapien
cgttctcctgcaacaaaatgagctt

SEQ ID NO: 3246122 - DNA, 25 bp, Homo sapien
gttctcctgcaacaaaatgagcttc

SEQ ID NO: 3246123 - DNA, 25 bp, Homo sapien
cctctttgttcacctgaatggcatg

SEQ ID NO: 3246124 - DNA, 25 bp, Homo sapien
cccaagaagtgctgacgtcttctcc

SEQ ID NO: 3246125 - DNA, 25 bp, Homo sapien
ttgttcacctgaatggcatggcttt

SEQ ID NO: 3246126 - DNA, 25 bp, Homo sapien
tctttgttcacctgaatggcatggc

SEQ ID NO: 3246127 - DNA, 25 bp, Homo sapien
ctgtgattcgaaacccaaaccagat

SEQ ID NO: 3246128 - DNA, 25 bp, Homo sapien
gtgattcgaaacccaaaccagatca

SEQ ID NO: 3246129 - DNA, 25 bp, Homo sapien
tgattcgaaacccaaaccagatcat

SEQ ID NO: 3246130 - DNA, 25 bp, Homo sapien
tgtgattcgaaacccaaaccagatc

SEQ ID NO: 3246131 - DNA, 25 bp, Homo sapien
agctccaaagtacgaaatagttgcc

SEQ ID NO: 3246132 - DNA, 25 bp, Homo sapien
aattggtatcagaggaagctccaaa

SEQ ID NO: 3246133 - DNA, 25 bp, Homo sapien
gtacgaaatagttgccataaaccat

SEQ ID NO: 3246134 - DNA, 25 bp, Homo sapien
ggtatcagaggaagctccaaagtac

SEQ ID NO: 3246135 - DNA, 25 bp, Homo sapien
cagaaattataataaaatgccttgc

SEQ ID NO: 3246136 - DNA, 25 bp, Homo sapien
tcagccagaaattataataaaatgc

SEQ ID NO: 3246137 - DNA, 25 bp, Homo sapien
cagccagaaattataataaaatgcc

SEQ ID NO: 3246138 - DNA, 25 bp, Homo sapien
gccagaaattataataaaatgcctt

SEQ ID NO: 3246139 - DNA, 25 bp, Homo sapien
tgtaagtctgtagagtgtcttcagg

SEQ ID NO: 3246140 - DNA, 25 bp, Homo sapien
gtccattgtaagtctgtagagtgtc

SEQ ID NO: 3246141 - DNA, 25 bp, Homo sapien
aaggtccattgtaagtctgtagagt

SEQ ID NO: 3246142 - DNA, 25 bp, Homo sapien
cattgtaagtctgtagagtgtcttc

SEQ ID NO: 3246143 - DNA, 25 bp, Homo sapien
cactaggatctataagccatgcagc

SEQ ID NO: 3246144 - DNA, 25 bp, Homo sapien
gtggcatcactaggatctataagcc

SEQ ID NO: 3246145 - DNA, 25 bp, Homo sapien
tataagccatgcagcaattctggga

SEQ ID NO: 3246146 - DNA, 25 bp, Homo sapien
ggaatttccatatgtgctgttcact

SEQ ID NO: 3246147 - DNA, 25 bp, Homo sapien
aaactgcagcactattctcacaaaa

SEQ ID NO: 3246148 - DNA, 25 bp, Homo sapien
aaacaaataacaggacatttacatt

SEQ ID NO: 3246149 - DNA, 25 bp, Homo sapien
actgccatcattgccaaaaaactgc

SEQ ID NO: 3246150 - DNA, 25 bp, Homo sapien
tcacaaaatccttagcattaaaaca

SEQ ID NO: 3246151 - DNA, 25 bp, Homo sapien
ttcctagccaaggtaactcttgagg

SEQ ID NO: 3246152 - DNA, 25 bp, Homo sapien
actgttcctagccaaggtaactctt

SEQ ID NO: 3246153 - DNA, 25 bp, Homo sapien
tctttacaggaaattttagccacta

SEQ ID NO: 3246154 - DNA, 25 bp, Homo sapien
aaagacatgaaggataaggtaaaca

SEQ ID NO: 3246155 - DNA, 25 bp, Homo sapien
tagatgcatggatcatctgacacaa

SEQ ID NO: 3246156 - DNA, 25 bp, Homo sapien
gcttggcgttttactaacaccacaa

SEQ ID NO: 3246157 - DNA, 25 bp, Homo sapien
caccctctgcttggcgttttactaa

SEQ ID NO: 3246158 - DNA, 25 bp, Homo sapien
ggtcccagatagcagagtgctctat

SEQ ID NO: 3246159 - DNA, 25 bp, Homo sapien
tcctagctgggtggaaccatcagta

SEQ ID NO: 3246160 - DNA, 25 bp, Homo sapien
gggctgctgcctgtttgagcatttc

SEQ ID NO: 3246161 - DNA, 25 bp, Homo sapien
tggaaccatcagtatacatcacagt

SEQ ID NO: 3246162 - DNA, 25 bp, Homo sapien
ctggtcagctcctagctgggtggaa

SEQ ID NO: 3246163 - DNA, 25 bp, Homo sapien
agaatttaggtagccttcggcgtca

SEQ ID NO: 3246164 - DNA, 25 bp, Homo sapien
ttaggtagccttcggcgtcatcagt

SEQ ID NO: 3246165 - DNA, 25 bp, Homo sapien
gccttcggcgtcatcagtatcttct

SEQ ID NO: 3246166 - DNA, 25 bp, Homo sapien
gttttttcaatgctcctgagttccc

SEQ ID NO: 3246167 - DNA, 25 bp, Homo sapien
ttatattctccattaggaaatgctt

SEQ ID NO: 3246168 - DNA, 25 bp, Homo sapien
acttgttttctctgacaaattatta

SEQ ID NO: 3246169 - DNA, 25 bp, Homo sapien
tatattctccattaggaaatgcttt

SEQ ID NO: 3246170 - DNA, 25 bp, Homo sapien
ggcagaacctcttgatgtctgactt

SEQ ID NO: 3246171 - DNA, 25 bp, Homo sapien
tttggtcagcagacagctgatctgt

SEQ ID NO: 3246172 - DNA, 25 bp, Homo sapien
tgtggaattaaacaacttgaaagag

SEQ ID NO: 3246173 - DNA, 25 bp, Homo sapien
agacagcttggcagaacctcttgat

SEQ ID NO: 3246174 - DNA, 25 bp, Homo sapien
cttcctgtcttcaagttgtactgaa

SEQ ID NO: 3246175 - DNA, 25 bp, Homo sapien
cctgtcttcaagttgtactgaatac

SEQ ID NO: 3246176 - DNA, 25 bp, Homo sapien
tttttctggtgattgagtcttcctg

SEQ ID NO: 3246177 - DNA, 25 bp, Homo sapien
acttaacactggacttgtttatcac

SEQ ID NO: 3246178 - DNA, 25 bp, Homo sapien
catcagtgccagcttacctgcggga

SEQ ID NO: 3246179 - DNA, 25 bp, Homo sapien
tgtattgcacccacaacttgtgatg

SEQ ID NO: 3246180 - DNA, 25 bp, Homo sapien
tctcagatgtgcagtattgtcccag

SEQ ID NO: 3246181 - DNA, 25 bp, Homo sapien
cagacaaacccaccttgagccaaaa

SEQ ID NO: 3246182 - DNA, 25 bp, Homo sapien
taggttgcccacatagaggatcaca

SEQ ID NO: 3246183 - DNA, 25 bp, Homo sapien
tgagctgccatattgtaggttgccc

SEQ ID NO: 3246184 - DNA, 25 bp, Homo sapien
tgcagaggacctagcagagtcaggt

SEQ ID NO: 3246185 - DNA, 25 bp, Homo sapien
gcttagaagagaatgcttccccact

SEQ ID NO: 3246186 - DNA, 25 bp, Homo sapien
ctcatattatagctgccagaggcat

SEQ ID NO: 3246187 - DNA, 25 bp, Homo sapien
gagcttttgtgctaatattcggcaa

SEQ ID NO: 3246188 - DNA, 25 bp, Homo sapien
tatgagatggactgactgtcgtaaa

SEQ ID NO: 3246189 - DNA, 25 bp, Homo sapien
gatcgtcccaggcattaacaatgta

SEQ ID NO: 3246190 - DNA, 25 bp, Homo sapien
tcgcccacgctggagacctcagctc

SEQ ID NO: 3246191 - DNA, 25 bp, Homo sapien
ctgtcgcccacgctggagacctcag

SEQ ID NO: 3246192 - DNA, 25 bp, Homo sapien
gcccacgctggagacctcagctcac

SEQ ID NO: 3246193 - DNA, 25 bp, Homo sapien
gtcgcccacgctggagacctcagct

SEQ ID NO: 3246194 - DNA, 25 bp, Homo sapien
gatcaaagcctaccaatgcctcata

SEQ ID NO: 3246195 - DNA, 25 bp, Homo sapien
tcacctgaatgcatagcagacataa

SEQ ID NO: 3246196 - DNA, 25 bp, Homo sapien
gcaacactggagagcggtgtattac

SEQ ID NO: 3246197 - DNA, 25 bp, Homo sapien
gacataatcttctgagcaacactgg

SEQ ID NO: 3246198 - DNA, 25 bp, Homo sapien
taaattgggcactcaagaagcatct

SEQ ID NO: 3246199 - DNA, 25 bp, Homo sapien
cattccatattacgaacaggtgagg

SEQ ID NO: 3246200 - DNA, 25 bp, Homo sapien
ctaataaatcaagcgtctggccaca

SEQ ID NO: 3246201 - DNA, 25 bp, Homo sapien
tactctgtggtacaagtagggacat

SEQ ID NO: 3246202 - DNA, 25 bp, Homo sapien
ccaggactaagtaccactaaacaca

SEQ ID NO: 3246203 - DNA, 25 bp, Homo sapien
taccaggactaagtaccactaaaca

SEQ ID NO: 3246204 - DNA, 25 bp, Homo sapien
acacatgctcaagtcataaaaagca

SEQ ID NO: 3246205 - DNA, 25 bp, Homo sapien
cacatgctcaagtcataaaaagcac

SEQ ID NO: 3246206 - DNA, 25 bp, Homo sapien
ataaaagaggacacgtaataaagat

SEQ ID NO: 3246207 - DNA, 25 bp, Homo sapien
gaggacacgtaataaagattcagtt

SEQ ID NO: 3246208 - DNA, 25 bp, Homo sapien
aaagaggacacgtaataaagattca

SEQ ID NO: 3246209 - DNA, 25 bp, Homo sapien
cacgtaataaagattcagttttcag

SEQ ID NO: 3246210 - DNA, 25 bp, Homo sapien
caatatctttcagataatcttcatc

SEQ ID NO: 3246211 - DNA, 25 bp, Homo sapien
gaatatcagtgaggagatgatttag

SEQ ID NO: 3246212 - DNA, 25 bp, Homo sapien
tatcagtgaggagatgatttagctt

SEQ ID NO: 3246213 - DNA, 25 bp, Homo sapien
tttgtcttcacatcagcaagaatat

SEQ ID NO: 3246214 - DNA, 25 bp, Homo sapien
tgatggcgtgccatatggtcaatgg

SEQ ID NO: 3246215 - DNA, 25 bp, Homo sapien
ccagctacaaaattgatggcacagt

SEQ ID NO: 3246216 - DNA, 25 bp, Homo sapien
aaagtgtatataccaccctggcaca

SEQ ID NO: 3246217 - DNA, 25 bp, Homo sapien
caatctggccatatcaaaggcaaaa

SEQ ID NO: 3246218 - DNA, 25 bp, Homo sapien
aatggtactggcatgtgtgcaagtc

SEQ ID NO: 3246219 - DNA, 25 bp, Homo sapien
taccactccaagacggcaatgactg

SEQ ID NO: 3246220 - DNA, 25 bp, Homo sapien
tgtgcaaatggtactggcatgtgtg

SEQ ID NO: 3246221 - DNA, 25 bp, Homo sapien
ccaagacggcaatgactgctaaagg

SEQ ID NO: 3246222 - DNA, 25 bp, Homo sapien
tgattcactgcaatttaaaacgacc

SEQ ID NO: 3246223 - DNA, 25 bp, Homo sapien
gcatcaccaggaatagtcattatgt

SEQ ID NO: 3246224 - DNA, 25 bp, Homo sapien
tacaactacatggagaaattttctt

SEQ ID NO: 3246225 - DNA, 25 bp, Homo sapien
tattagacaaaacaatatcaagaga

SEQ ID NO: 3246226 - DNA, 25 bp, Homo sapien
cttgagcagatactgccaactgatc

SEQ ID NO: 3246227 - DNA, 25 bp, Homo sapien
cacatccttattccgtttggacaga

SEQ ID NO: 3246228 - DNA, 25 bp, Homo sapien
caaagtatcacaaagcatgtccaca

SEQ ID NO: 3246229 - DNA, 25 bp, Homo sapien
gatactgccaactgatcttgtacta

SEQ ID NO: 3246230 - DNA, 25 bp, Homo sapien
gcactcctacctaggcaagagagtg

SEQ ID NO: 3246231 - DNA, 25 bp, Homo sapien
tcactgcactcctacctaggcaaga

SEQ ID NO: 3246232 - DNA, 25 bp, Homo sapien
tgagaccttgtcttaaaaggaaaga

SEQ ID NO: 3246233 - DNA, 25 bp, Homo sapien
acatcactgcactcctacctaggca

SEQ ID NO: 3246234 - DNA, 25 bp, Homo sapien
tcaagttgtaacagacttcctaaaa

SEQ ID NO: 3246235 - DNA, 25 bp, Homo sapien
tagatgtaactacacaattccaggg

SEQ ID NO: 3246236 - DNA, 25 bp, Homo sapien
gctataatagtaaacttttgctcag

SEQ ID NO: 3246237 - DNA, 25 bp, Homo sapien
gttcaatcccaaagctgccaattag

SEQ ID NO: 3246238 - DNA, 25 bp, Homo sapien
aactaactcttgtcttgctgtataa

SEQ ID NO: 3246239 - DNA, 25 bp, Homo sapien
tatgtcccgatgctttcttaattca

SEQ ID NO: 3246240 - DNA, 25 bp, Homo sapien
ttcaagttgacgatatatgtcccga

SEQ ID NO: 3246241 - DNA, 25 bp, Homo sapien
tcttgtttagcaatctgcagatcaa

SEQ ID NO: 3246242 - DNA, 25 bp, Homo sapien
tcactggtcaagctagaaattttag

SEQ ID NO: 3246243 - DNA, 25 bp, Homo sapien
tctgtcttttatttgagtgacctct

SEQ ID NO: 3246244 - DNA, 25 bp, Homo sapien
atctcactggtcaagctagaaattt

SEQ ID NO: 3246245 - DNA, 25 bp, Homo sapien
gggcattctctcttaccacagcagg

SEQ ID NO: 3246246 - DNA, 25 bp, Homo sapien
tctctagtcgtctctcctcaaggat

SEQ ID NO: 3246247 - DNA, 25 bp, Homo sapien
gagcacaaatgtatgcgagctgcag

SEQ ID NO: 3246248 - DNA, 25 bp, Homo sapien
tgctggttaggctgtgaagactctc

SEQ ID NO: 3246249 - DNA, 25 bp, Homo sapien
catgctcgaattacttgcttttaag

SEQ ID NO: 3246250 - DNA, 25 bp, Homo sapien
tcatcagtaagagcctgaagttcat

SEQ ID NO: 3246251 - DNA, 25 bp, Homo sapien
aataccagtggatttgtcccttgac

SEQ ID NO: 3246252 - DNA, 25 bp, Homo sapien
catgtataccctgaaagaactgttt

SEQ ID NO: 3246253 - DNA, 25 bp, Homo sapien
gaaaattgcgataaaaataccagtg

SEQ ID NO: 3246254 - DNA, 25 bp, Homo sapien
gatcttagtgatcattgcatttaga

SEQ ID NO: 3246255 - DNA, 25 bp, Homo sapien
tagcatttaacctcagagatttgtg

SEQ ID NO: 3246256 - DNA, 25 bp, Homo sapien
ttaacctcagagatttgtggctagt

SEQ ID NO: 3246257 - DNA, 25 bp, Homo sapien
agatttgtggctagttactgaagcc

SEQ ID NO: 3246258 - DNA, 25 bp, Homo sapien
gatttgtggctagttactgaagcca

SEQ ID NO: 3246259 - DNA, 25 bp, Homo sapien
ttctttaatttcagtagagtttgaa

SEQ ID NO: 3246260 - DNA, 25 bp, Homo sapien
gttctttaatttcagtagagtttga

SEQ ID NO: 3246261 - DNA, 25 bp, Homo sapien
tctttaatttcagtagagtttgaac

SEQ ID NO: 3246262 - DNA, 25 bp, Homo sapien
aacgccctcaaacaaccagtcaaag

SEQ ID NO: 3246263 - DNA, 25 bp, Homo sapien
caatgccgccccttctagaataggc

SEQ ID NO: 3246264 - DNA, 25 bp, Homo sapien
taagattatcagctttgggataacc

SEQ ID NO: 3246265 - DNA, 25 bp, Homo sapien
tccagtctaggtgtcttcaaatcag

SEQ ID NO: 3246266 - DNA, 25 bp, Homo sapien
ctgatatgggtttacggtgttgatt

SEQ ID NO: 3246267 - DNA, 25 bp, Homo sapien
tgatatgggtttacggtgttgattt

SEQ ID NO: 3246268 - DNA, 25 bp, Homo sapien
tataccaagtccacagagaagggaa

SEQ ID NO: 3246269 - DNA, 25 bp, Homo sapien
tttataccaagtccacagagaaggg

SEQ ID NO: 3246270 - DNA, 25 bp, Homo sapien
cctgccctccgtacgtaagaagacg

SEQ ID NO: 3246271 - DNA, 25 bp, Homo sapien
cgtaagaagacgcaaataagcatgg

SEQ ID NO: 3246272 - DNA, 25 bp, Homo sapien
cgcaaataagcatggcacatcttct

SEQ ID NO: 3246273 - DNA, 25 bp, Homo sapien
gaagacgcaaataagcatggcacat

SEQ ID NO: 3246274 - DNA, 25 bp, Homo sapien
gaagcgcgcggccacaattaagggt

SEQ ID NO: 3246275 - DNA, 25 bp, Homo sapien
gtctcgccgggcaaggctccacctc

SEQ ID NO: 3246276 - DNA, 25 bp, Homo sapien
gagtccaccaccgcgacgcggagaa

SEQ ID NO: 3246277 - DNA, 25 bp, Homo sapien
cacaattaagggtgcttcgggccgg

SEQ ID NO: 3246278 - DNA, 25 bp, Homo sapien
gagggtcacccagctgtgacaccta

SEQ ID NO: 3246279 - DNA, 25 bp, Homo sapien
atacaccagacgcgccagcggcaaa

SEQ ID NO: 3246280 - DNA, 25 bp, Homo sapien
ttccttcggagggtcacccagctgt

SEQ ID NO: 3246281 - DNA, 25 bp, Homo sapien
gccagcggcaaaaccttccttcgga

SEQ ID NO: 3246282 - DNA, 25 bp, Homo sapien
ctgacaaaacaaacgcacaagccca

SEQ ID NO: 3246283 - DNA, 25 bp, Homo sapien
tgacaaaacaaacgcacaagcccac

SEQ ID NO: 3246284 - DNA, 25 bp, Homo sapien
atcgccgtcgacaccgagctgcaga

SEQ ID NO: 3246285 - DNA, 25 bp, Homo sapien
accgggccctgatccccgggcagct

SEQ ID NO: 3246286 - DNA, 25 bp, Homo sapien
gccgtcgacaccgagctgcagaaga

SEQ ID NO: 3246287 - DNA, 25 bp, Homo sapien
gaatcgccgtcgacaccgagctgca

SEQ ID NO: 3246288 - DNA, 25 bp, Homo sapien
cccaggagcgcaggaaaaaaaagag

SEQ ID NO: 3246289 - DNA, 25 bp, Homo sapien
gggatcgcggccactcctccagccc

SEQ ID NO: 3246290 - DNA, 25 bp, Homo sapien
gcccagaaccgaggcccgcgtcagt

SEQ ID NO: 3246291 - DNA, 25 bp, Homo sapien
tgcagacggggatcgcggccactcc

SEQ ID NO: 3246292 - DNA, 25 bp, Homo sapien
gttccgcttgcttctcgcaggagcc

SEQ ID NO: 3246293 - DNA, 25 bp, Homo sapien
actgcctcacgggagcgcctggacg

SEQ ID NO: 3246294 - DNA, 25 bp, Homo sapien
gcgcgcctcgcactgcctcacggga

SEQ ID NO: 3246295 - DNA, 25 bp, Homo sapien
caggaagttccgcttgcttctcgca

SEQ ID NO: 3246296 - DNA, 25 bp, Homo sapien
cagctggctacaccatctcgcttca

SEQ ID NO: 3246297 - DNA, 25 bp, Homo sapien
aagcagaagccgtgcccaggtagtt

SEQ ID NO: 3246298 - DNA, 25 bp, Homo sapien
ctcgcttcacctcagcacggcaggt

SEQ ID NO: 3246299 - DNA, 25 bp, Homo sapien
cccgtgatgggcacgacaggagcct

SEQ ID NO: 3246300 - DNA, 25 bp, Homo sapien
agcacaagggccagaggcaaagtcc

SEQ ID NO: 3246301 - DNA, 25 bp, Homo sapien
gcaacaagagcatccagttggccaa

SEQ ID NO: 3246302 - DNA, 25 bp, Homo sapien
cagcacaagggccagaggcaaagtc

SEQ ID NO: 3246303 - DNA, 25 bp, Homo sapien
caagagcaacaagagcatccagttg

SEQ ID NO: 3246304 - DNA, 25 bp, Homo sapien
cacggggtgccgtgctccgtcaggc

SEQ ID NO: 3246305 - DNA, 25 bp, Homo sapien
cgggcccggtgtggttggcggcacg

SEQ ID NO: 3246306 - DNA, 25 bp, Homo sapien
gggtgccgtgctccgtcaggcctcc

SEQ ID NO: 3246307 - DNA, 25 bp, Homo sapien
gcagctgtgacggcgggcccggtgt

SEQ ID NO: 3246308 - DNA, 25 bp, Homo sapien
gggccacggcccgaaggccacatgg

SEQ ID NO: 3246309 - DNA, 25 bp, Homo sapien
cgaaggccacatggcgtggtgccat

SEQ ID NO: 3246310 - DNA, 25 bp, Homo sapien
cggcccgaaggccacatggcgtggt

SEQ ID NO: 3246311 - DNA, 25 bp, Homo sapien
gcaacgagggccacggcccgaaggc

SEQ ID NO: 3246312 - DNA, 25 bp, Homo sapien
ggccacagaccggtacagggttcca

SEQ ID NO: 3246313 - DNA, 25 bp, Homo sapien
gggagctgccttccaataaggctgg

SEQ ID NO: 3246314 - DNA, 25 bp, Homo sapien
tatagacacggtgatggcctcttgg

SEQ ID NO: 3246315 - DNA, 25 bp, Homo sapien
ggcccaagcaccgtgccactaagat

SEQ ID NO: 3246316 - DNA, 25 bp, Homo sapien
gcatgtggtgactcctagcacgggc

SEQ ID NO: 3246317 - DNA, 25 bp, Homo sapien
agtgggaggttggagcatgtggtga

SEQ ID NO: 3246318 - DNA, 25 bp, Homo sapien
cacccagtgggcaacccctcaccca

SEQ ID NO: 3246319 - DNA, 25 bp, Homo sapien
tgtggtgactcctagcacgggcccc

SEQ ID NO: 3246320 - DNA, 25 bp, Homo sapien
tatgggaattggctacagatgtacc

SEQ ID NO: 3246321 - DNA, 25 bp, Homo sapien
gaagcaagcttttacacacggcccg

SEQ ID NO: 3246322 - DNA, 25 bp, Homo sapien
tgacacctgcgaagtgggaaggacc

SEQ ID NO: 3246323 - DNA, 25 bp, Homo sapien
cactttgacgacgtgacggagggac

SEQ ID NO: 3246324 - DNA, 25 bp, Homo sapien
gcagcaatgacgtttaatacttctg

SEQ ID NO: 3246325 - DNA, 25 bp, Homo sapien
gcaatgacgtttaatacttctggaa

SEQ ID NO: 3246326 - DNA, 25 bp, Homo sapien
agcaatgacgtttaatacttctgga

SEQ ID NO: 3246327 - DNA, 25 bp, Homo sapien
caatgacgtttaatacttctggaat

SEQ ID NO: 3246328 - DNA, 25 bp, Homo sapien
accagggctccggatgtggaagctg

SEQ ID NO: 3246329 - DNA, 25 bp, Homo sapien
ctatgctgaccagggctccggatgt

SEQ ID NO: 3246330 - DNA, 25 bp, Homo sapien
gtgggcggctatgctgaccagggct

SEQ ID NO: 3246331 - DNA, 25 bp, Homo sapien
tgcctccttgcaggggactctgccc

SEQ ID NO: 3246332 - DNA, 25 bp, Homo sapien
ccagcagcagctggagcttccagaa

SEQ ID NO: 3246333 - DNA, 25 bp, Homo sapien
tgaccggcaagcgggcagtgccagg

SEQ ID NO: 3246334 - DNA, 25 bp, Homo sapien
ctgaccggcaagcgggcagtgccag

SEQ ID NO: 3246335 - DNA, 25 bp, Homo sapien
gcagcagctggagcttccagaatgg

SEQ ID NO: 3246336 - DNA, 25 bp, Homo sapien
gctgacacgcgtggctggcgggcag

SEQ ID NO: 3246337 - DNA, 25 bp, Homo sapien
ggctgacacgcgtggctggcgggca

SEQ ID NO: 3246338 - DNA, 25 bp, Homo sapien
agggctgacacgcgtggctggcggg

SEQ ID NO: 3246339 - DNA, 25 bp, Homo sapien
gggctgacacgcgtggctggcgggc

SEQ ID NO: 3246340 - DNA, 25 bp, Homo sapien
gccaaactccatgccctctatgtcc

SEQ ID NO: 3246341 - DNA, 25 bp, Homo sapien
tgtagtggtcgtccgcgtcactgct

SEQ ID NO: 3246342 - DNA, 25 bp, Homo sapien
gtggtcgtccgcgtcactgctgctg

SEQ ID NO: 3246343 - DNA, 25 bp, Homo sapien
caggctgtagtggtcgtccgcgtca

SEQ ID NO: 3246344 - DNA, 25 bp, Homo sapien
cactctgagggtgccagcccatttc

SEQ ID NO: 3246345 - DNA, 25 bp, Homo sapien
ctctggctgagaacccggcctcaga

SEQ ID NO: 3246346 - DNA, 25 bp, Homo sapien
agaagcaccagtcctcagcgggcca

SEQ ID NO: 3246347 - DNA, 25 bp, Homo sapien
tcccttctgcgcttagtgacaaaca

SEQ ID NO: 3246348 - DNA, 25 bp, Homo sapien
gcttcaggaaacgatgctcctgctg

SEQ ID NO: 3246349 - DNA, 25 bp, Homo sapien
cttgctctgagtcgtccgtggagac

SEQ ID NO: 3246350 - DNA, 25 bp, Homo sapien
tgctccttgatgctcagtgcccggc

SEQ ID NO: 3246351 - DNA, 25 bp, Homo sapien
tccaggcgccgcttcaggaaacgat

SEQ ID NO: 3246352 - DNA, 25 bp, Homo sapien
gcccaggggcaccagttgcttgagc

SEQ ID NO: 3246353 - DNA, 25 bp, Homo sapien
gatgtgcaccttggcccgcttcagg

SEQ ID NO: 3246354 - DNA, 25 bp, Homo sapien
cttgatgtgcaccttggcccgcttc

SEQ ID NO: 3246355 - DNA, 25 bp, Homo sapien
ttgagctgctcaaggtacagcctga

SEQ ID NO: 3246356 - DNA, 25 bp, Homo sapien
gaaagagccagagacagaaccatca

SEQ ID NO: 3246357 - DNA, 25 bp, Homo sapien
aagagccagagacagaaccatcagg

SEQ ID NO: 3246358 - DNA, 25 bp, Homo sapien
tgaaagagccagagacagaaccatc

SEQ ID NO: 3246359 - DNA, 25 bp, Homo sapien
ctgaaagagccagagacagaaccat

SEQ ID NO: 3246360 - DNA, 25 bp, Homo sapien
taggcaagaggccaaagcgtgctct

SEQ ID NO: 3246361 - DNA, 25 bp, Homo sapien
catgatcagcctaggtcaagggagg

SEQ ID NO: 3246362 - DNA, 25 bp, Homo sapien
caagggtacttgctcacatgccaca

SEQ ID NO: 3246363 - DNA, 25 bp, Homo sapien
cagaatgcctcgatgtcacaacggg

SEQ ID NO: 3246364 - DNA, 25 bp, Homo sapien
gctgacatgagaagggatggctcct

SEQ ID NO: 3246365 - DNA, 25 bp, Homo sapien
tgcaccctccgacaggctgacatga

SEQ ID NO: 3246366 - DNA, 25 bp, Homo sapien
acacacaaacaaggaggtacaactt

SEQ ID NO: 3246367 - DNA, 25 bp, Homo sapien
atgagaagggatggctcctgcgcca

SEQ ID NO: 3246368 - DNA, 25 bp, Homo sapien
ggacacaggtctgaagggccatcga

SEQ ID NO: 3246369 - DNA, 25 bp, Homo sapien
ccagatccacaaaggtctgcgctca

SEQ ID NO: 3246370 - DNA, 25 bp, Homo sapien
agggccatcgatacagttatcactg

SEQ ID NO: 3246371 - DNA, 25 bp, Homo sapien
cagatccacaaaggtctgcgctcac

SEQ ID NO: 3246372 - DNA, 25 bp, Homo sapien
acatcgcaggactgtccggaagtcc

SEQ ID NO: 3246373 - DNA, 25 bp, Homo sapien
ggcacatcgcaggactgtccggaag

SEQ ID NO: 3246374 - DNA, 25 bp, Homo sapien
aaggcacatcgcaggactgtccgga

SEQ ID NO: 3246375 - DNA, 25 bp, Homo sapien
caaggcacatcgcaggactgtccgg

SEQ ID NO: 3246376 - DNA, 25 bp, Homo sapien
gggtcatcacaaagaacgctggtgg

SEQ ID NO: 3246377 - DNA, 25 bp, Homo sapien
taaaccagagggtcatcacaaagaa

SEQ ID NO: 3246378 - DNA, 25 bp, Homo sapien
ccagagggtcatcacaaagaacgct

SEQ ID NO: 3246379 - DNA, 25 bp, Homo sapien
ctgtgtaaaccagagggtcatcaca

SEQ ID NO: 3246380 - DNA, 25 bp, Homo sapien
tgtgccctgacgcaggcggacagga

SEQ ID NO: 3246381 - DNA, 25 bp, Homo sapien
ggagtgtgccctgacgcaggcggac

SEQ ID NO: 3246382 - DNA, 25 bp, Homo sapien
tgccctgacgcaggcggacaggact

SEQ ID NO: 3246383 - DNA, 25 bp, Homo sapien
agtgtgccctgacgcaggcggacag

SEQ ID NO: 3246384 - DNA, 25 bp, Homo sapien
tcgggtgaaagatcaagtgaggaaa

SEQ ID NO: 3246385 - DNA, 25 bp, Homo sapien
tccttatccaagtctcatcggcaat

SEQ ID NO: 3246386 - DNA, 25 bp, Homo sapien
aagtctcatcggcaatgttagtgcc

SEQ ID NO: 3246387 - DNA, 25 bp, Homo sapien
catcggcaatgttagtgcccgcggg

SEQ ID NO: 3246388 - DNA, 25 bp, Homo sapien
gaccgctttagaaatcacggaacac

SEQ ID NO: 3246389 - DNA, 25 bp, Homo sapien
cgctttagaaatcacggaacacctt

SEQ ID NO: 3246390 - DNA, 25 bp, Homo sapien
tgaacagaccgctttagaaatcacg

SEQ ID NO: 3246391 - DNA, 25 bp, Homo sapien
ggaggtccgtgaacagaccgcttta

SEQ ID NO: 3246392 - DNA, 25 bp, Homo sapien
caaaacccagtaacaggtccacctg

SEQ ID NO: 3246393 - DNA, 25 bp, Homo sapien
acacgcactgtccaaaacccagtaa

SEQ ID NO: 3246394 - DNA, 25 bp, Homo sapien
cactgtccaaaacccagtaacaggt

SEQ ID NO: 3246395 - DNA, 25 bp, Homo sapien
tgtccaaaacccagtaacaggtcca

SEQ ID NO: 3246396 - DNA, 25 bp, Homo sapien
gaggcagaacccgcctgcaggacta

SEQ ID NO: 3246397 - DNA, 25 bp, Homo sapien
ctggagccaactctacagtggctgg

SEQ ID NO: 3246398 - DNA, 25 bp, Homo sapien
gaaccctgtgtggattcaggaggca

SEQ ID NO: 3246399 - DNA, 25 bp, Homo sapien
tctacagtggctggttgcgggaccc

SEQ ID NO: 3246400 - DNA, 25 bp, Homo sapien
agacgcgggcacacaattcccagca

SEQ ID NO: 3246401 - DNA, 25 bp, Homo sapien
tccgtgtccaggcaggaccccacag

SEQ ID NO: 3246402 - DNA, 25 bp, Homo sapien
ctgtcttgcccattcagacgcgggc

SEQ ID NO: 3246403 - DNA, 25 bp, Homo sapien
catctgcctggaggataacgaggca

SEQ ID NO: 3246404 - DNA, 25 bp, Homo sapien
tcagctttggattctccatgctggg

SEQ ID NO: 3246405 - DNA, 25 bp, Homo sapien
catagaggcagtgttcgggcagcct

SEQ ID NO: 3246406 - DNA, 25 bp, Homo sapien
ctggctgcatgtgtgaaacgctcag

SEQ ID NO: 3246407 - DNA, 25 bp, Homo sapien
tggccaggacgctggttgtcagctt

SEQ ID NO: 3246408 - DNA, 25 bp, Homo sapien
ttcggattccctagaacaggtggac

SEQ ID NO: 3246409 - DNA, 25 bp, Homo sapien
gctgacaacttttctaccgcctgga

SEQ ID NO: 3246410 - DNA, 25 bp, Homo sapien
ggcacccgtagtaacgacttcatgg

SEQ ID NO: 3246411 - DNA, 25 bp, Homo sapien
gagactcaaccaattcctcgcctgg

SEQ ID NO: 3246412 - DNA, 25 bp, Homo sapien
tgttttctccctggcgaagtcgccg

SEQ ID NO: 3246413 - DNA, 25 bp, Homo sapien
ctgttgttcggggccttgcgcacca

SEQ ID NO: 3246414 - DNA, 25 bp, Homo sapien
ccttgcgcaccaggccggccgcctt

SEQ ID NO: 3246415 - DNA, 25 bp, Homo sapien
cagcaccgaggcgtagccgtgctcg

SEQ ID NO: 3246416 - DNA, 25 bp, Homo sapien
cgcctccagcaggatcagcagggag

SEQ ID NO: 3246417 - DNA, 25 bp, Homo sapien
ctcggccgcctccagcaggatcagc

SEQ ID NO: 3246418 - DNA, 25 bp, Homo sapien
ggccgcctccagcaggatcagcagg

SEQ ID NO: 3246419 - DNA, 25 bp, Homo sapien
tcgatccctgcgctccaggtactcg

SEQ ID NO: 3246420 - DNA, 25 bp, Homo sapien
gccgcacttccagactccgcggact

SEQ ID NO: 3246421 - DNA, 25 bp, Homo sapien
ccggccgccgcacttccagactccg

SEQ ID NO: 3246422 - DNA, 25 bp, Homo sapien
gccgccgcacttccagactccgcgg

SEQ ID NO: 3246423 - DNA, 25 bp, Homo sapien
cgcacttccagactccgcggactcc

SEQ ID NO: 3246424 - DNA, 25 bp, Homo sapien
tcgggccgggccgagaatgttgaca

SEQ ID NO: 3246425 - DNA, 25 bp, Homo sapien
aattgacacataagggagagcggcg

SEQ ID NO: 3246426 - DNA, 25 bp, Homo sapien
atgggaggcggcgttcgcgccccgg

SEQ ID NO: 3246427 - DNA, 25 bp, Homo sapien
ggcggcccgcagagccaatgggagg

SEQ ID NO: 3246428 - DNA, 25 bp, Homo sapien
catgggactagacgctcagggattt

SEQ ID NO: 3246429 - DNA, 25 bp, Homo sapien
gaaagcttcgtgtgcatctccctgt

SEQ ID NO: 3246430 - DNA, 25 bp, Homo sapien
cacacacggctcagggctataggaa

SEQ ID NO: 3246431 - DNA, 25 bp, Homo sapien
gcttgcagatcaggacatgggacta

SEQ ID NO: 3246432 - DNA, 25 bp, Homo sapien
aaccttgcctggtagtgtgggcacc

SEQ ID NO: 3246433 - DNA, 25 bp, Homo sapien
ccttgcctggtagtgtgggcaccac

SEQ ID NO: 3246434 - DNA, 25 bp, Homo sapien
aaaccttgcctggtagtgtgggcac

SEQ ID NO: 3246435 - DNA, 25 bp, Homo sapien
accttgcctggtagtgtgggcacca

SEQ ID NO: 3246436 - DNA, 25 bp, Homo sapien
gttggcagggtctctacacccacgg

SEQ ID NO: 3246437 - DNA, 25 bp, Homo sapien
tctgtgagagtatctaaggccagcc

SEQ ID NO: 3246438 - DNA, 25 bp, Homo sapien
cagggagctttccatgggcacaagc

SEQ ID NO: 3246439 - DNA, 25 bp, Homo sapien
caatgggcaccaatgaaagctagga

SEQ ID NO: 3246440 - DNA, 25 bp, Homo sapien
tcctgtcactgggtgggctgccagc

SEQ ID NO: 3246441 - DNA, 25 bp, Homo sapien
cctgcaccagcattcagggcgggag

SEQ ID NO: 3246442 - DNA, 25 bp, Homo sapien
cttgggcctcctgtcactgggtggg

SEQ ID NO: 3246443 - DNA, 25 bp, Homo sapien
cctccactccgtcagaatcctgcag

SEQ ID NO: 3246444 - DNA, 25 bp, Homo sapien
tctcagccggtcagtagcagagtct

SEQ ID NO: 3246445 - DNA, 25 bp, Homo sapien
cccaggaagtgccaggaatgtgaac

SEQ ID NO: 3246446 - DNA, 25 bp, Homo sapien
aagaggcctggttgtgtcccggcac

SEQ ID NO: 3246447 - DNA, 25 bp, Homo sapien
tctcgctgagaacctgggtggagct

SEQ ID NO: 3246448 - DNA, 25 bp, Homo sapien
tagggtgcctggccacggtggggag

SEQ ID NO: 3246449 - DNA, 25 bp, Homo sapien
gggtgcctggccacggtggggagac

SEQ ID NO: 3246450 - DNA, 25 bp, Homo sapien
tggccacggtggggagaccccaaca

SEQ ID NO: 3246451 - DNA, 25 bp, Homo sapien
tgcctggccacggtggggagacccc

SEQ ID NO: 3246452 - DNA, 25 bp, Homo sapien
tcaagttgcactgcttcgaggaggc

SEQ ID NO: 3246453 - DNA, 25 bp, Homo sapien
gccattagggacaacaccaggactc

SEQ ID NO: 3246454 - DNA, 25 bp, Homo sapien
ctcaagttgcactgcttcgaggagg

SEQ ID NO: 3246455 - DNA, 25 bp, Homo sapien
ggccttggtggccattagggacaac

SEQ ID NO: 3246456 - DNA, 25 bp, Homo sapien
cgaggaagggccgctgtacaggtga

SEQ ID NO: 3246457 - DNA, 25 bp, Homo sapien
ccagtcctgtgcatagcccgggcag

SEQ ID NO: 3246458 - DNA, 25 bp, Homo sapien
ggacccgccacagtgcaggtgggtg

SEQ ID NO: 3246459 - DNA, 25 bp, Homo sapien
cctccccaagatcaggtatggcaat

SEQ ID NO: 3246460 - DNA, 25 bp, Homo sapien
ttgccttagcccggaaggcggccac

SEQ ID NO: 3246461 - DNA, 25 bp, Homo sapien
gaggagccccttgccttagcccgga

SEQ ID NO: 3246462 - DNA, 25 bp, Homo sapien
cttgccttagcccggaaggcggcca

SEQ ID NO: 3246463 - DNA, 25 bp, Homo sapien
tgccttagcccggaaggcggccacc

SEQ ID NO: 3246464 - DNA, 25 bp, Homo sapien
cagcttcgtgcagcacagctgtccg

SEQ ID NO: 3246465 - DNA, 25 bp, Homo sapien
tgtggcgcagcttcgtgcagcacag

SEQ ID NO: 3246466 - DNA, 25 bp, Homo sapien
gggatgtggcgcagcttcgtgcagc

SEQ ID NO: 3246467 - DNA, 25 bp, Homo sapien
agccaggggatgtggcgcagcttcg

SEQ ID NO: 3246468 - DNA, 25 bp, Homo sapien
agggtacccgagtcctgtgggcaca

SEQ ID NO: 3246469 - DNA, 25 bp, Homo sapien
caaagggcagggtacccgagtcctg

SEQ ID NO: 3246470 - DNA, 25 bp, Homo sapien
tgcccatctccaaagggcagggtac

SEQ ID NO: 3246471 - DNA, 25 bp, Homo sapien
atctccaaagggcagggtacccgag

SEQ ID NO: 3246472 - DNA, 25 bp, Homo sapien
cgtcctggctgattggtaaacccga

SEQ ID NO: 3246473 - DNA, 25 bp, Homo sapien
gatttaagcctgaggaggtgtccgc

SEQ ID NO: 3246474 - DNA, 25 bp, Homo sapien
aaagctgacctcttgttggcccctg

SEQ ID NO: 3246475 - DNA, 25 bp, Homo sapien
ttgtttagccaagtcctgaggaagg

SEQ ID NO: 3246476 - DNA, 25 bp, Homo sapien
tcacaggccggccttgtcgctgtag

SEQ ID NO: 3246477 - DNA, 25 bp, Homo sapien
tagaagggcgtgacatggaacatgt

SEQ ID NO: 3246478 - DNA, 25 bp, Homo sapien
gtgctgagtgcgaggagcagcgcga

SEQ ID NO: 3246479 - DNA, 25 bp, Homo sapien
agtgggtgcacactcggaccggctt

SEQ ID NO: 3246480 - DNA, 25 bp, Homo sapien
ctgccaggggttgtgaccttcagga

SEQ ID NO: 3246481 - DNA, 25 bp, Homo sapien
agccccagctgccaggggttgtgac

SEQ ID NO: 3246482 - DNA, 25 bp, Homo sapien
ttcaggaggctggactctatgaggg

SEQ ID NO: 3246483 - DNA, 25 bp, Homo sapien
cagctcaggccgcattggtgggtgg

SEQ ID NO: 3246484 - DNA, 25 bp, Homo sapien
tgcaggctcctgttcacactcgctg

SEQ ID NO: 3246485 - DNA, 25 bp, Homo sapien
gctgcaggctcctgttcacactcgc

SEQ ID NO: 3246486 - DNA, 25 bp, Homo sapien
aggctcctgttcacactcgctgtcc

SEQ ID NO: 3246487 - DNA, 25 bp, Homo sapien
gcaggctcctgttcacactcgctgt

SEQ ID NO: 3246488 - DNA, 25 bp, Homo sapien
ccttggatgctgagggaccctccgt

SEQ ID NO: 3246489 - DNA, 25 bp, Homo sapien
catcggttctgacttccagacctca

SEQ ID NO: 3246490 - DNA, 25 bp, Homo sapien
ctccctgggcatcggttctgacttc

SEQ ID NO: 3246491 - DNA, 25 bp, Homo sapien
ggctctgtccgtggacgcccttgga

SEQ ID NO: 3246492 - DNA, 25 bp, Homo sapien
agctgcggcagtggtgcttccggcg

SEQ ID NO: 3246493 - DNA, 25 bp, Homo sapien
agaagccacaggcctcgtctggcac

SEQ ID NO: 3246494 - DNA, 25 bp, Homo sapien
ttccggcggatgacggtgaagggtg

SEQ ID NO: 3246495 - DNA, 25 bp, Homo sapien
tgaagggtgctttgcacgccgtgca

SEQ ID NO: 3246496 - DNA, 25 bp, Homo sapien
tcttggctgccagttcagaggatga

SEQ ID NO: 3246497 - DNA, 25 bp, Homo sapien
cttcaaagtccccatcgcgggtctt

SEQ ID NO: 3246498 - DNA, 25 bp, Homo sapien
gccgcactccgcagagtctgggtga

SEQ ID NO: 3246499 - DNA, 25 bp, Homo sapien
caaggccgcactccgcagagtctgg

SEQ ID NO: 3246500 - DNA, 25 bp, Homo sapien
tccccagggccagaaggtgtggatt

SEQ ID NO: 3246501 - DNA, 25 bp, Homo sapien
cacatttggagtgcagaggtcaggg

SEQ ID NO: 3246502 - DNA, 25 bp, Homo sapien
cgacgattgcttggtcgggacccta

SEQ ID NO: 3246503 - DNA, 25 bp, Homo sapien
ctggcccatctgctcgtttgcaggg

SEQ ID NO: 3246504 - DNA, 25 bp, Homo sapien
tcgtctgtttcaggcttggtggcca

SEQ ID NO: 3246505 - DNA, 25 bp, Homo sapien
taagaatacttctcaggtcactggc

SEQ ID NO: 3246506 - DNA, 25 bp, Homo sapien
aacttttccttgtcgtctgtttcag

SEQ ID NO: 3246507 - DNA, 25 bp, Homo sapien
catagttcgtctgcagctggtcagc

SEQ ID NO: 3246508 - DNA, 25 bp, Homo sapien
gctgccgtggaacctggaccggatc

SEQ ID NO: 3246509 - DNA, 25 bp, Homo sapien
ctgaaatgcagacgaacaggcggtg

SEQ ID NO: 3246510 - DNA, 25 bp, Homo sapien
aaatgcagacgaacaggcggtggat

SEQ ID NO: 3246511 - DNA, 25 bp, Homo sapien
ccgtggaacctggaccggatcttct

SEQ ID NO: 3246512 - DNA, 25 bp, Homo sapien
ggcagcatgcgtggctgctggggcc

SEQ ID NO: 3246513 - DNA, 25 bp, Homo sapien
gggcagcatgcgtggctgctggggc

SEQ ID NO: 3246514 - DNA, 25 bp, Homo sapien
tgtggggcagcatgcgtggctgctg

SEQ ID NO: 3246515 - DNA, 25 bp, Homo sapien
tggggcagcatgcgtggctgctggg

SEQ ID NO: 3246516 - DNA, 25 bp, Homo sapien
ggagcaggacccagctgtggagctg

SEQ ID NO: 3246517 - DNA, 25 bp, Homo sapien
cttgtctgaggagcaggacccagct

SEQ ID NO: 3246518 - DNA, 25 bp, Homo sapien
tgtctgaggagcaggacccagctgt

SEQ ID NO: 3246519 - DNA, 25 bp, Homo sapien
gaggagcaggacccagctgtggagc

SEQ ID NO: 3246520 - DNA, 25 bp, Homo sapien
atttatttggccgtgtctcatgccg

SEQ ID NO: 3246521 - DNA, 25 bp, Homo sapien
caaatgttcggggatcctcgtcgac

SEQ ID NO: 3246522 - DNA, 25 bp, Homo sapien
tcatgccgagccttgccccaaatgt

SEQ ID NO: 3246523 - DNA, 25 bp, Homo sapien
tggcatcctgcacggcctcttttgg

SEQ ID NO: 3246524 - DNA, 25 bp, Homo sapien
gggttcctggaaggcgcagcatgag

SEQ ID NO: 3246525 - DNA, 25 bp, Homo sapien
gactgtagggaaccccctggtgatg

SEQ ID NO: 3246526 - DNA, 25 bp, Homo sapien
cagcatgaggacagcttgaatgaaa

SEQ ID NO: 3246527 - DNA, 25 bp, Homo sapien
gaagcagccgacagactgtagggaa

SEQ ID NO: 3246528 - DNA, 25 bp, Homo sapien
ttcattgacatcaatcgacagctca

SEQ ID NO: 3246529 - DNA, 25 bp, Homo sapien
gacatcaatcgacagctcaggctcg

SEQ ID NO: 3246530 - DNA, 25 bp, Homo sapien
ttgacatcaatcgacagctcaggct

SEQ ID NO: 3246531 - DNA, 25 bp, Homo sapien
agcccccgcatccacattcattgac

SEQ ID NO: 3246532 - DNA, 25 bp, Homo sapien
tccaggaatcggctctggaactgtc

SEQ ID NO: 3246533 - DNA, 25 bp, Homo sapien
ggccacagcggaaaccaacagcagg

SEQ ID NO: 3246534 - DNA, 25 bp, Homo sapien
ccacagcggaaaccaacagcaggta

SEQ ID NO: 3246535 - DNA, 25 bp, Homo sapien
tgtctgccaaagtcgtaccagctca

SEQ ID NO: 3246536 - DNA, 25 bp, Homo sapien
tggtgtcagccctaataacttccag

SEQ ID NO: 3246537 - DNA, 25 bp, Homo sapien
ttgccgcggtgcttcgtcacagcag

SEQ ID NO: 3246538 - DNA, 25 bp, Homo sapien
gggaactaacacgtggcgctgaccc

SEQ ID NO: 3246539 - DNA, 25 bp, Homo sapien
tgtgtgactcgccttcccaaggaag

SEQ ID NO: 3246540 - DNA, 25 bp, Homo sapien
tgagaaggagacgaatgctgttccg

SEQ ID NO: 3246541 - DNA, 25 bp, Homo sapien
gagacgaatgctgttccgtgaccag

SEQ ID NO: 3246542 - DNA, 25 bp, Homo sapien
ctgttccgtgaccagggcatcctca

SEQ ID NO: 3246543 - DNA, 25 bp, Homo sapien
aatgctgttccgtgaccagggcatc

SEQ ID NO: 3246544 - DNA, 25 bp, Homo sapien
gaatgaaggacagaaccgagggaca

SEQ ID NO: 3246545 - DNA, 25 bp, Homo sapien
cctggatgtgtcacccggtcttggc

SEQ ID NO: 3246546 - DNA, 25 bp, Homo sapien
tgtccatattcctccggtctcaggg

SEQ ID NO: 3246547 - DNA, 25 bp, Homo sapien
tcttggcgcattgtcttggagcacc

SEQ ID NO: 3246548 - DNA, 25 bp, Homo sapien
agatttgctgctgcaggacttcggt

SEQ ID NO: 3246549 - DNA, 25 bp, Homo sapien
atttgctgctgcaggacttcggtcc

SEQ ID NO: 3246550 - DNA, 25 bp, Homo sapien
agggacagtggcctgagatttgctg

SEQ ID NO: 3246551 - DNA, 25 bp, Homo sapien
tggcctgagatttgctgctgcagga

SEQ ID NO: 3246552 - DNA, 25 bp, Homo sapien
caggacccttactcggcattgctta

SEQ ID NO: 3246553 - DNA, 25 bp, Homo sapien
gatgaaataaacgtcagccgctcca

SEQ ID NO: 3246554 - DNA, 25 bp, Homo sapien
caggattcagacgtcacggtgggct

SEQ ID NO: 3246555 - DNA, 25 bp, Homo sapien
tgagacaggcatctgacgcatggat

SEQ ID NO: 3246556 - DNA, 25 bp, Homo sapien
taagatagccactgacgggtcagac

SEQ ID NO: 3246557 - DNA, 25 bp, Homo sapien
gatgaaaccatcctggactatctgg

SEQ ID NO: 3246558 - DNA, 25 bp, Homo sapien
catctagaggtggaatctgtcatct

SEQ ID NO: 3246559 - DNA, 25 bp, Homo sapien
gacaagtgagatcctctcagcggcg

SEQ ID NO: 3246560 - DNA, 25 bp, Homo sapien
acgaatcctggcttaagcccctgaa

SEQ ID NO: 3246561 - DNA, 25 bp, Homo sapien
cagccgtaggatgggctgaacgaat

SEQ ID NO: 3246562 - DNA, 25 bp, Homo sapien
cgaggaggcgttgatttgctgtatt

SEQ ID NO: 3246563 - DNA, 25 bp, Homo sapien
ccctgaagggcctctgagtttgcag

SEQ ID NO: 3246564 - DNA, 25 bp, Homo sapien
tgtcccaggcgcccttgggatctct

SEQ ID NO: 3246565 - DNA, 25 bp, Homo sapien
tacagaggccagcagacatcacaga

SEQ ID NO: 3246566 - DNA, 25 bp, Homo sapien
tttccaggacgtctggagctaaggg

SEQ ID NO: 3246567 - DNA, 25 bp, Homo sapien
gcagacatcacagatttccaggacg

SEQ ID NO: 3246568 - DNA, 25 bp, Homo sapien
cttgacgggctccctgatgctgcca

SEQ ID NO: 3246569 - DNA, 25 bp, Homo sapien
tagggccggaagtggccctgagtcc

SEQ ID NO: 3246570 - DNA, 25 bp, Homo sapien
agcagggagtagggccggaagtggc

SEQ ID NO: 3246571 - DNA, 25 bp, Homo sapien
ccccttgacgggctccctgatgctg

SEQ ID NO: 3246572 - DNA, 25 bp, Homo sapien
ctgtcctgagggacagggctggggg

SEQ ID NO: 3246573 - DNA, 25 bp, Homo sapien
tgtcctgagggacagggctgggggt

SEQ ID NO: 3246574 - DNA, 25 bp, Homo sapien
ctacatcttcgtccaggcagccatg

SEQ ID NO: 3246575 - DNA, 25 bp, Homo sapien
ctccctacatcttcgtccaggcagc

SEQ ID NO: 3246576 - DNA, 25 bp, Homo sapien
gtggctccatgccaaagggacaggg

SEQ ID NO: 3246577 - DNA, 25 bp, Homo sapien
ggctgaacgatggtggctccatgcc

SEQ ID NO: 3246578 - DNA, 25 bp, Homo sapien
gggatagaccggctgcaggctctcc

SEQ ID NO: 3246579 - DNA, 25 bp, Homo sapien
tgcagccacctcgggatagaccggc

SEQ ID NO: 3246580 - DNA, 25 bp, Homo sapien
agccacctcgggatagaccggctgc

SEQ ID NO: 3246581 - DNA, 25 bp, Homo sapien
cctcgggatagaccggctgcaggct

SEQ ID NO: 3246582 - DNA, 25 bp, Homo sapien
cttcctcctggaggctgtcgtctgc

SEQ ID NO: 3246583 - DNA, 25 bp, Homo sapien
gcgtgcatccgtcccctggctggtg

SEQ ID NO: 3246584 - DNA, 25 bp, Homo sapien
tcctgcgtgcatccgtcccctggct

SEQ ID NO: 3246585 - DNA, 25 bp, Homo sapien
tggtggctgggaagccctgtccttc

SEQ ID NO: 3246586 - DNA, 25 bp, Homo sapien
ccttcatttgcagtacacggagacg

SEQ ID NO: 3246587 - DNA, 25 bp, Homo sapien
aatgggaggcgtaaccaaacacagc

SEQ ID NO: 3246588 - DNA, 25 bp, Homo sapien
cgcgactcgcacgtgagactggaag

SEQ ID NO: 3246589 - DNA, 25 bp, Homo sapien
gactggaagccgtgaatcaaggccg

SEQ ID NO: 3246590 - DNA, 25 bp, Homo sapien
ggtttcatgtcaaactcggagaaaa

SEQ ID NO: 3246591 - DNA, 25 bp, Homo sapien
attgccagtgaactgggtctgagcc

SEQ ID NO: 3246592 - DNA, 25 bp, Homo sapien
ttgccagtgaactgggtctgagccc

SEQ ID NO: 3246593 - DNA, 25 bp, Homo sapien
tgtcaaactcggagaaaaacgatcc

SEQ ID NO: 3246594 - DNA, 25 bp, Homo sapien
tccgtctctcttccagttagcgagg

SEQ ID NO: 3246595 - DNA, 25 bp, Homo sapien
gcgaggcctatagacacggccacag

SEQ ID NO: 3246596 - DNA, 25 bp, Homo sapien
tctcttccagttagcgaggcctata

SEQ ID NO: 3246597 - DNA, 25 bp, Homo sapien
tctggtctccagttgaacctcgtcc

SEQ ID NO: 3246598 - DNA, 25 bp, Homo sapien
ctgtagggcagggtcctggccaggg

SEQ ID NO: 3246599 - DNA, 25 bp, Homo sapien
ggcagggtcctggccagggggtcaa

SEQ ID NO: 3246600 - DNA, 25 bp, Homo sapien
cagggtcctggccagggggtcaatg

SEQ ID NO: 3246601 - DNA, 25 bp, Homo sapien
gggtcctggccagggggtcaatggc

SEQ ID NO: 3246602 - DNA, 25 bp, Homo sapien
cctgaggcgcctcgtgagccgaggg

SEQ ID NO: 3246603 - DNA, 25 bp, Homo sapien
agggcctgaggcgcctcgtgagccg

SEQ ID NO: 3246604 - DNA, 25 bp, Homo sapien
cagggcctgaggcgcctcgtgagcc

SEQ ID NO: 3246605 - DNA, 25 bp, Homo sapien
ggcctgaggcgcctcgtgagccgag

SEQ ID NO: 3246606 - DNA, 25 bp, Homo sapien
ggctcccgcccgttggaggcatctt

SEQ ID NO: 3246607 - DNA, 25 bp, Homo sapien
cagcgtacgaggcaccaatgacgcc

SEQ ID NO: 3246608 - DNA, 25 bp, Homo sapien
gcgatcatctcagccgtctctgcgt

SEQ ID NO: 3246609 - DNA, 25 bp, Homo sapien
ggccttggctaagccggcagcgtac

SEQ ID NO: 3246610 - DNA, 25 bp, Homo sapien
gattgttgttgctcaagtcctcctc

SEQ ID NO: 3246611 - DNA, 25 bp, Homo sapien
tgtgccctcggcctcgagattgttg

SEQ ID NO: 3246612 - DNA, 25 bp, Homo sapien
ggtcggcccaggtactgcctgccca

SEQ ID NO: 3246613 - DNA, 25 bp, Homo sapien
ctccttttccgaggcgggcaagctg

SEQ ID NO: 3246614 - DNA, 25 bp, Homo sapien
cctggtcgtcgtactgcatggagca

SEQ ID NO: 3246615 - DNA, 25 bp, Homo sapien
ggaactccacgtcttgggaaatgca

SEQ ID NO: 3246616 - DNA, 25 bp, Homo sapien
tgaaagcaaagaggacatctcgtcc

SEQ ID NO: 3246617 - DNA, 25 bp, Homo sapien
gaaatgcagaggttccgttccagcg

SEQ ID NO: 3246618 - DNA, 25 bp, Homo sapien
tggttgtcagctattttccttcagc

SEQ ID NO: 3246619 - DNA, 25 bp, Homo sapien
taatattcacttatgttaacccaca

SEQ ID NO: 3246620 - DNA, 25 bp, Homo sapien
gcctctctagcatttctacatttcc

SEQ ID NO: 3246621 - DNA, 25 bp, Homo sapien
ctccacagacactataattattttg

SEQ ID NO: 3246622 - DNA, 25 bp, Homo sapien
agcacactaggatttagaactcctg

SEQ ID NO: 3246623 - DNA, 25 bp, Homo sapien
cagcatagcacactaggatttagaa

SEQ ID NO: 3246624 - DNA, 25 bp, Homo sapien
gcatagcacactaggatttagaact

SEQ ID NO: 3246625 - DNA, 25 bp, Homo sapien
atagcacactaggatttagaactcc

SEQ ID NO: 3246626 - DNA, 25 bp, Homo sapien
taacggataagtcctcaaaccctga

SEQ ID NO: 3246627 - DNA, 25 bp, Homo sapien
aaaccctgacgctggaggagatgca

SEQ ID NO: 3246628 - DNA, 25 bp, Homo sapien
gctttctgcaaggtgaggtgactca

SEQ ID NO: 3246629 - DNA, 25 bp, Homo sapien
tacccatgggtgaggttcccacatc

SEQ ID NO: 3246630 - DNA, 25 bp, Homo sapien
cttattttccgcagcaacgtgtgga

SEQ ID NO: 3246631 - DNA, 25 bp, Homo sapien
tgtcttccaccttgcggtccaagtt

SEQ ID NO: 3246632 - DNA, 25 bp, Homo sapien
ttccgcagcaacgtgtggaagggcc

SEQ ID NO: 3246633 - DNA, 25 bp, Homo sapien
aggtccgtccgcatagaccacgagg

SEQ ID NO: 3246634 - DNA, 25 bp, Homo sapien
agctgaggcccgcacgggttccctt

SEQ ID NO: 3246635 - DNA, 25 bp, Homo sapien
tccaaaagcaaaaccagctggaggt

SEQ ID NO: 3246636 - DNA, 25 bp, Homo sapien
agctggaggtgcgagctgaggcccg

SEQ ID NO: 3246637 - DNA, 25 bp, Homo sapien
ctccacaagccacgagaccaaagca

SEQ ID NO: 3246638 - DNA, 25 bp, Homo sapien
gtggtgcccaccatgccccgagaag

SEQ ID NO: 3246639 - DNA, 25 bp, Homo sapien
ttgtggtgcccaccatgccccgaga

SEQ ID NO: 3246640 - DNA, 25 bp, Homo sapien
gcccaccatgccccgagaagctccc

SEQ ID NO: 3246641 - DNA, 25 bp, Homo sapien
ctcccttgtggtgcccaccatgccc

SEQ ID NO: 3246642 - DNA, 25 bp, Homo sapien
cggctcaaagcctgctgaaggacaa

SEQ ID NO: 3246643 - DNA, 25 bp, Homo sapien
ccagagtccggctcaaagcctgctg

SEQ ID NO: 3246644 - DNA, 25 bp, Homo sapien
cacctccagtggcacccactcctct

SEQ ID NO: 3246645 - DNA, 25 bp, Homo sapien
agcctgctgaaggacaagcttccca

SEQ ID NO: 3246646 - DNA, 25 bp, Homo sapien
gctccgagtgtgccttgatcatcca

SEQ ID NO: 3246647 - DNA, 25 bp, Homo sapien
ctccgagtgtgccttgatcatccat

SEQ ID NO: 3246648 - DNA, 25 bp, Homo sapien
aagctccgagtgtgccttgatcatc

SEQ ID NO: 3246649 - DNA, 25 bp, Homo sapien
agctccgagtgtgccttgatcatcc

SEQ ID NO: 3246650 - DNA, 25 bp, Homo sapien
tcagcccgtctctccttgagggcac

SEQ ID NO: 3246651 - DNA, 25 bp, Homo sapien
tctgcattcacggtgctgtgcaccc

SEQ ID NO: 3246652 - DNA, 25 bp, Homo sapien
cataatacgtgacctttgtgaccgc

SEQ ID NO: 3246653 - DNA, 25 bp, Homo sapien
tcaccatgctgtggcacgtggcgaa

SEQ ID NO: 3246654 - DNA, 25 bp, Homo sapien
tgtgaccgcttttcactttgcacca

SEQ ID NO: 3246655 - DNA, 25 bp, Homo sapien
cagggccttccattaattggatgag

SEQ ID NO: 3246656 - DNA, 25 bp, Homo sapien
tgagaacaggaagatttaccctctg

SEQ ID NO: 3246657 - DNA, 25 bp, Homo sapien
tgggaacccggagaagagttgacac

SEQ ID NO: 3246658 - DNA, 25 bp, Homo sapien
gacacggcagctccaatccaaggag

SEQ ID NO: 3246659 - DNA, 25 bp, Homo sapien
caacctaagcgtttaacagatgaat

SEQ ID NO: 3246660 - DNA, 25 bp, Homo sapien
gaaagataagtgttaccaaggatgt

SEQ ID NO: 3246661 - DNA, 25 bp, Homo sapien
gaacccttgcacaccattggtagga

SEQ ID NO: 3246662 - DNA, 25 bp, Homo sapien
tctgggtatttaccccaaacatctg

SEQ ID NO: 3246663 - DNA, 25 bp, Homo sapien
tttggctatttagggcccattgcag

SEQ ID NO: 3246664 - DNA, 25 bp, Homo sapien
gaaatcaggacgtatgaatcttcca

SEQ ID NO: 3246665 - DNA, 25 bp, Homo sapien
taatgtggcctacccaagatgacac

SEQ ID NO: 3246666 - DNA, 25 bp, Homo sapien
catgaagttaaccatcgcagggtcc

SEQ ID NO: 3246667 - DNA, 25 bp, Homo sapien
cagcacggaggagggaacatcataa

SEQ ID NO: 3246668 - DNA, 25 bp, Homo sapien
tggcagtagggataggacagtcaag

SEQ ID NO: 3246669 - DNA, 25 bp, Homo sapien
tttatctcagtaacatggaaaaata

SEQ ID NO: 3246670 - DNA, 25 bp, Homo sapien
aataacagagtaagtcacgcaacct

SEQ ID NO: 3246671 - DNA, 25 bp, Homo sapien
tcacggtgggagctccggcaagggt

SEQ ID NO: 3246672 - DNA, 25 bp, Homo sapien
aggatccggcaaccatcctgcaggc

SEQ ID NO: 3246673 - DNA, 25 bp, Homo sapien
ggagctccggcaagggtctgagcag

SEQ ID NO: 3246674 - DNA, 25 bp, Homo sapien
agggcccctgaagaggatccggcaa

SEQ ID NO: 3246675 - DNA, 25 bp, Homo sapien
gcaggagggactgactggatgcagg

SEQ ID NO: 3246676 - DNA, 25 bp, Homo sapien
agcaggagggactgactggatgcag

SEQ ID NO: 3246677 - DNA, 25 bp, Homo sapien
taacggcaggaggatttccgagcct

SEQ ID NO: 3246678 - DNA, 25 bp, Homo sapien
gatgtgaggctcactctctctggtt

SEQ ID NO: 3246679 - DNA, 25 bp, Homo sapien
ttgctaactttgtgaaagacgcaac

SEQ ID NO: 3246680 - DNA, 25 bp, Homo sapien
gagcctccctctggcgcgatgtgag

SEQ ID NO: 3246681 - DNA, 25 bp, Homo sapien
tcactcctccgcccccgtgaccatc

SEQ ID NO: 3246682 - DNA, 25 bp, Homo sapien
ctgagtcaggtacccgaagtccagg

SEQ ID NO: 3246683 - DNA, 25 bp, Homo sapien
gggccggctcgtagtcatcaatcat

SEQ ID NO: 3246684 - DNA, 25 bp, Homo sapien
catgtcctgagtcaggtacccgaag

SEQ ID NO: 3246685 - DNA, 25 bp, Homo sapien
gggatgctgaacatgagggccggct

SEQ ID NO: 3246686 - DNA, 25 bp, Homo sapien
caccgtctcgcagaagagcacgatg

SEQ ID NO: 3246687 - DNA, 25 bp, Homo sapien
tgcacgtagtactccctgggggact

SEQ ID NO: 3246688 - DNA, 25 bp, Homo sapien
tctcgcagaagagcacgatgacctc

SEQ ID NO: 3246689 - DNA, 25 bp, Homo sapien
ctctccaccgtctcgcagaagagca

SEQ ID NO: 3246690 - DNA, 25 bp, Homo sapien
ttcatgatgatggagccggcggcca

SEQ ID NO: 3246691 - DNA, 25 bp, Homo sapien
tgtgtaggtgttcaggtcccgcagc

SEQ ID NO: 3246692 - DNA, 25 bp, Homo sapien
ggacgtcgaagtgcctcagcgcttc

SEQ ID NO: 3246693 - DNA, 25 bp, Homo sapien
caaactctgcgaacaggacgtcgaa

SEQ ID NO: 3246694 - DNA, 25 bp, Homo sapien
tcgtgagggcgataaccgatgtccc

SEQ ID NO: 3246695 - DNA, 25 bp, Homo sapien
gcacaggccagctcgtgttcccggt

SEQ ID NO: 3246696 - DNA, 25 bp, Homo sapien
gatgtcccccaatgtgacccacggg

SEQ ID NO: 3246697 - DNA, 25 bp, Homo sapien
tttcttacattcagagcaatcgtga

SEQ ID NO: 3246698 - DNA, 25 bp, Homo sapien
tttccgctccccgtccaggccacag

SEQ ID NO: 3246699 - DNA, 25 bp, Homo sapien
agccgggctgatccgggcccgaggt

SEQ ID NO: 3246700 - DNA, 25 bp, Homo sapien
cacaatcaggtctgtgctcccaggg

SEQ ID NO: 3246701 - DNA, 25 bp, Homo sapien
ccaggccacagggatgaagttcaag

SEQ ID NO: 3246702 - DNA, 25 bp, Homo sapien
gccacagacaccacctgtcaagttg

SEQ ID NO: 3246703 - DNA, 25 bp, Homo sapien
agacaccacctgtcaagttgctcac

SEQ ID NO: 3246704 - DNA, 25 bp, Homo sapien
gagccacagacaccacctgtcaagt

SEQ ID NO: 3246705 - DNA, 25 bp, Homo sapien
ctagggagccacagacaccacctgt

SEQ ID NO: 3246706 - DNA, 25 bp, Homo sapien
cctgggcaggtaaggagggctcctc

SEQ ID NO: 3246707 - DNA, 25 bp, Homo sapien
gaatttcaccaagctgccctctggc

SEQ ID NO: 3246708 - DNA, 25 bp, Homo sapien
cagcgtgcgctcagcaactgggaat

SEQ ID NO: 3246709 - DNA, 25 bp, Homo sapien
gactcatcagtgtgagagtccctgg

SEQ ID NO: 3246710 - DNA, 25 bp, Homo sapien
tgtaactaacccaagcctcggcaga

SEQ ID NO: 3246711 - DNA, 25 bp, Homo sapien
cgcaccccagggattcctagaaagg

SEQ ID NO: 3246712 - DNA, 25 bp, Homo sapien
gacagaatgagacggcgctgatcgc

SEQ ID NO: 3246713 - DNA, 25 bp, Homo sapien
gggcctcgccaggtttaggatagaa

SEQ ID NO: 3246714 - DNA, 25 bp, Homo sapien
aaccacttttaggtcctggctgtct

SEQ ID NO: 3246715 - DNA, 25 bp, Homo sapien
accacttttaggtcctggctgtctg

SEQ ID NO: 3246716 - DNA, 25 bp, Homo sapien
gccaggttgtcgtgccggatctcct

SEQ ID NO: 3246717 - DNA, 25 bp, Homo sapien
tccatgatctggttaatgatgttca

SEQ ID NO: 3246718 - DNA, 25 bp, Homo sapien
tcggcaccgaaccacagctggccgg

SEQ ID NO: 3246719 - DNA, 25 bp, Homo sapien
tgcactcatccatgatctggttaat

SEQ ID NO: 3246720 - DNA, 25 bp, Homo sapien
ttctttaaacattgactattcattc

SEQ ID NO: 3246721 - DNA, 25 bp, Homo sapien
tctgtaaatttgtcctattctttaa

SEQ ID NO: 3246722 - DNA, 25 bp, Homo sapien
gactattcattctgtaggttacaaa

SEQ ID NO: 3246723 - DNA, 25 bp, Homo sapien
acagagtgttttgaacactttgtgt

SEQ ID NO: 3246724 - DNA, 25 bp, Homo sapien
taattctcatcttccgagggcctgt

SEQ ID NO: 3246725 - DNA, 25 bp, Homo sapien
tgcaattccagcatatggaccgtcc

SEQ ID NO: 3246726 - DNA, 25 bp, Homo sapien
gcaatgctgccctcactactgtggt

SEQ ID NO: 3246727 - DNA, 25 bp, Homo sapien
cctgttttcagccaacgttgagacg

SEQ ID NO: 3246728 - DNA, 25 bp, Homo sapien
ccttctcaggcaagaaatcatgcac

SEQ ID NO: 3246729 - DNA, 25 bp, Homo sapien
gatacgaaaactcactatgagtggg

SEQ ID NO: 3246730 - DNA, 25 bp, Homo sapien
tttttaatctcgaccatccctcctg

SEQ ID NO: 3246731 - DNA, 25 bp, Homo sapien
cactaaactctgaaggaaattctgc

SEQ ID NO: 3246732 - DNA, 25 bp, Homo sapien
tcctcgtcggcatagtagaaccggg

SEQ ID NO: 3246733 - DNA, 25 bp, Homo sapien
ctgacaggagcggaactggctgacc

SEQ ID NO: 3246734 - DNA, 25 bp, Homo sapien
gggcaagcagctgcggatccgacct

SEQ ID NO: 3246735 - DNA, 25 bp, Homo sapien
ctgaccagcagcgtgcaccgctggg

SEQ ID NO: 3246736 - DNA, 25 bp, Homo sapien
actgttcacaggaggctgacggagc

SEQ ID NO: 3246737 - DNA, 25 bp, Homo sapien
agatgctgcctgagcaaccactctg

SEQ ID NO: 3246738 - DNA, 25 bp, Homo sapien
cacaggaggctgacggagcctctgc

SEQ ID NO: 3246739 - DNA, 25 bp, Homo sapien
caaccactctgctaggagccgatct

SEQ ID NO: 3246740 - DNA, 25 bp, Homo sapien
cccttcagagcagtaggtatgggag

SEQ ID NO: 3246741 - DNA, 25 bp, Homo sapien
tggtgtggatggtcccacagcagac

SEQ ID NO: 3246742 - DNA, 25 bp, Homo sapien
gcccgctccccttcagagcagtagg

SEQ ID NO: 3246743 - DNA, 25 bp, Homo sapien
agcagtaggtatgggagggtgggag

SEQ ID NO: 3246744 - DNA, 25 bp, Homo sapien
agctcgctgacgagacaccatctgg

SEQ ID NO: 3246745 - DNA, 25 bp, Homo sapien
tggatgacaacacctcctggaagct

SEQ ID NO: 3246746 - DNA, 25 bp, Homo sapien
gcccagcaaacaggccaggtactga

SEQ ID NO: 3246747 - DNA, 25 bp, Homo sapien
actgaatttagggcactggatgaca

SEQ ID NO: 3246748 - DNA, 25 bp, Homo sapien
tgcagtgccatgcaggagggcctgg

SEQ ID NO: 3246749 - DNA, 25 bp, Homo sapien
gggctcaagcttccctgaaagaccc

SEQ ID NO: 3246750 - DNA, 25 bp, Homo sapien
gccctgacatccacttagcaaaccc

SEQ ID NO: 3246751 - DNA, 25 bp, Homo sapien
aaatctgtgggcctgtacaactctg

SEQ ID NO: 3246752 - DNA, 25 bp, Homo sapien
gccccctcgggccctggacctgagc

SEQ ID NO: 3246753 - DNA, 25 bp, Homo sapien
agccccctcgggccctggacctgag

SEQ ID NO: 3246754 - DNA, 25 bp, Homo sapien
acggcgtctacaacaacctgcgagg

SEQ ID NO: 3246755 - DNA, 25 bp, Homo sapien
ctacaacaacctgcgaggccatttg

SEQ ID NO: 3246756 - DNA, 25 bp, Homo sapien
aagcgcacggcgtctacaacaacct

SEQ ID NO: 3246757 - DNA, 25 bp, Homo sapien
ccggacaagcgcacggcgtctacaa

SEQ ID NO: 3246758 - DNA, 25 bp, Homo sapien
ccatgggctctgacggtataattgc

SEQ ID NO: 3246759 - DNA, 25 bp, Homo sapien
gccatgggctctgacggtataattg

SEQ ID NO: 3246760 - DNA, 25 bp, Homo sapien
gctccgagtgtcttcacgaccacga

SEQ ID NO: 3246761 - DNA, 25 bp, Homo sapien
cattgcccccgagaacagggaagct

SEQ ID NO: 3246762 - DNA, 25 bp, Homo sapien
cctgaacagcgtgtccaaagccatt

SEQ ID NO: 3246763 - DNA, 25 bp, Homo sapien
gggcatcctgaacagcgtgtccaaa

SEQ ID NO: 3246764 - DNA, 25 bp, Homo sapien
agcataacgttgtgcattcccgccg

SEQ ID NO: 3246765 - DNA, 25 bp, Homo sapien
caaagtgggcttaaggacgcagaga

SEQ ID NO: 3246766 - DNA, 25 bp, Homo sapien
aatttagacggtcggcactgggcac

SEQ ID NO: 3246767 - DNA, 25 bp, Homo sapien
agagaacccgcttagcctggacaag

SEQ ID NO: 3246768 - DNA, 25 bp, Homo sapien
tggaagagctggcagccttccccac

SEQ ID NO: 3246769 - DNA, 25 bp, Homo sapien
agccacagccagctcggaggggcag

SEQ ID NO: 3246770 - DNA, 25 bp, Homo sapien
ccacagccagctcggaggggcaggt

SEQ ID NO: 3246771 - DNA, 25 bp, Homo sapien
cagccagctcggaggggcaggtgaa

SEQ ID NO: 3246772 - DNA, 25 bp, Homo sapien
ggcgcagcccgagtctggctcttct

SEQ ID NO: 3246773 - DNA, 25 bp, Homo sapien
ccactgagaagacacggtgcccact

SEQ ID NO: 3246774 - DNA, 25 bp, Homo sapien
ccgctccttaggagaagttgcaggt

SEQ ID NO: 3246775 - DNA, 25 bp, Homo sapien
tcttcctgtgtaatgcagcattcca

SEQ ID NO: 3246776 - DNA, 25 bp, Homo sapien
ccgtgagctgatggccgtgtgtccc

SEQ ID NO: 3246777 - DNA, 25 bp, Homo sapien
cagggccgtgagctgatggccgtgt

SEQ ID NO: 3246778 - DNA, 25 bp, Homo sapien
caacaggatgaaggttgggctccag

SEQ ID NO: 3246779 - DNA, 25 bp, Homo sapien
ccggcctcggcggcaacaggatgaa

SEQ ID NO: 3246780 - DNA, 25 bp, Homo sapien
cgggtctctgcctggacgtcaccat

SEQ ID NO: 3246781 - DNA, 25 bp, Homo sapien
ccgattcgggtctctgcctggacgt

SEQ ID NO: 3246782 - DNA, 25 bp, Homo sapien
gattcgggtctctgcctggacgtca

SEQ ID NO: 3246783 - DNA, 25 bp, Homo sapien
attcgggtctctgcctggacgtcac

SEQ ID NO: 3246784 - DNA, 25 bp, Homo sapien
tggaaggccaagtcactcagggacc

SEQ ID NO: 3246785 - DNA, 25 bp, Homo sapien
ttcaagatgtgacggagacaggctc

SEQ ID NO: 3246786 - DNA, 25 bp, Homo sapien
taagcaaacctagctggcctgacct

SEQ ID NO: 3246787 - DNA, 25 bp, Homo sapien
tacaccctcaaggagtgcagcaaag

SEQ ID NO: 3246788 - DNA, 25 bp, Homo sapien
ttgagggtcccctacaagcactgca

SEQ ID NO: 3246789 - DNA, 25 bp, Homo sapien
ggctttccactcagacagggctatg

SEQ ID NO: 3246790 - DNA, 25 bp, Homo sapien
tccttgcttaagagccgcagacagg

SEQ ID NO: 3246791 - DNA, 25 bp, Homo sapien
caccaggctttcacaaggcgggact

SEQ ID NO: 3246792 - DNA, 25 bp, Homo sapien
ttagtgcctttttacaattccgcat

SEQ ID NO: 3246793 - DNA, 25 bp, Homo sapien
tttagtgcctttttacaattccgca

SEQ ID NO: 3246794 - DNA, 25 bp, Homo sapien
ggaccatcccactgcatcctagtga

SEQ ID NO: 3246795 - DNA, 25 bp, Homo sapien
ggaacgaactcatttaaagccagtg

SEQ ID NO: 3246796 - DNA, 25 bp, Homo sapien
taagggtcgataataggaccatccc

SEQ ID NO: 3246797 - DNA, 25 bp, Homo sapien
caagcaggtccggatagattcatcc

SEQ ID NO: 3246798 - DNA, 25 bp, Homo sapien
aggtcactggtgtccgatcctggca

SEQ ID NO: 3246799 - DNA, 25 bp, Homo sapien
actggtgtccgatcctggcagctcc

SEQ ID NO: 3246800 - DNA, 25 bp, Homo sapien
ccccatcactgccacgccagtcgta

SEQ ID NO: 3246801 - DNA, 25 bp, Homo sapien
gccacgccagtcgtaccctactggg

SEQ ID NO: 3246802 - DNA, 25 bp, Homo sapien
ggtgaagcctttgctttcgcgcaga

SEQ ID NO: 3246803 - DNA, 25 bp, Homo sapien
tccatccaattaggccccttcataa

SEQ ID NO: 3246804 - DNA, 25 bp, Homo sapien
tgctttcgcgcagacagcactgctc

SEQ ID NO: 3246805 - DNA, 25 bp, Homo sapien
tgtttctcatccaagagcaggcgag

SEQ ID NO: 3246806 - DNA, 25 bp, Homo sapien
ccagcaagtggcgatactcggatcc

SEQ ID NO: 3246807 - DNA, 25 bp, Homo sapien
cagtgcaggcccctgacttggagca

SEQ ID NO: 3246808 - DNA, 25 bp, Homo sapien
caagtggcgatactcggatcccaag

SEQ ID NO: 3246809 - DNA, 25 bp, Homo sapien
cgatactcggatcccaagtgcagag

SEQ ID NO: 3246810 - DNA, 25 bp, Homo sapien
gccgagctgtaaccttgagcaggcc

SEQ ID NO: 3246811 - DNA, 25 bp, Homo sapien
agtttcccatcattccctgcagtgc

SEQ ID NO: 3246812 - DNA, 25 bp, Homo sapien
atggccgagctgtaaccttgagcag

SEQ ID NO: 3246813 - DNA, 25 bp, Homo sapien
gtttcccatcattccctgcagtgcc

SEQ ID NO: 3246814 - DNA, 25 bp, Homo sapien
gctggctgctcgctgtccctccgat

SEQ ID NO: 3246815 - DNA, 25 bp, Homo sapien
cccatgccggcgctgtgagaaggct

SEQ ID NO: 3246816 - DNA, 25 bp, Homo sapien
ccccactccgctggctgctcgctgt

SEQ ID NO: 3246817 - DNA, 25 bp, Homo sapien
ctgagcagcccatgccggcgctgtg

SEQ ID NO: 3246818 - DNA, 25 bp, Homo sapien
acttgacttgcccatcaatatctaa

SEQ ID NO: 3246819 - DNA, 25 bp, Homo sapien
caaacacttgacttgcccatcaata

SEQ ID NO: 3246820 - DNA, 25 bp, Homo sapien
tccttcaaacacttgacttgcccat

SEQ ID NO: 3246821 - DNA, 25 bp, Homo sapien
tgacttgcccatcaatatctaagtt

SEQ ID NO: 3246822 - DNA, 25 bp, Homo sapien
ggttggcacccaggcagactttacc

SEQ ID NO: 3246823 - DNA, 25 bp, Homo sapien
catgtcatcgctaatctgggcctgg

SEQ ID NO: 3246824 - DNA, 25 bp, Homo sapien
aaggaatgttctcctacaaagcggg

SEQ ID NO: 3246825 - DNA, 25 bp, Homo sapien
tcttctcggagtgcaaggttgagca

SEQ ID NO: 3246826 - DNA, 25 bp, Homo sapien
ctgggcgcagacggctcggccccaa

SEQ ID NO: 3246827 - DNA, 25 bp, Homo sapien
gcgcagacggctcggccccaaacca

SEQ ID NO: 3246828 - DNA, 25 bp, Homo sapien
gggcgcagacggctcggccccaaac

SEQ ID NO: 3246829 - DNA, 25 bp, Homo sapien
aggctgggcgcagacggctcggccc

SEQ ID NO: 3246830 - DNA, 25 bp, Homo sapien
cgccaggaaacgcaaggctcgggac

SEQ ID NO: 3246831 - DNA, 25 bp, Homo sapien
caggaaacgcaaggctcgggacgaa

SEQ ID NO: 3246832 - DNA, 25 bp, Homo sapien
ccagcgccaggaaacgcaaggctcg

SEQ ID NO: 3246833 - DNA, 25 bp, Homo sapien
cagcgccaggaaacgcaaggctcgg

SEQ ID NO: 3246834 - DNA, 25 bp, Homo sapien
atgggcgcacgcgaggcacggattt

SEQ ID NO: 3246835 - DNA, 25 bp, Homo sapien
cgcgaggcacggatttcaggaaacc

SEQ ID NO: 3246836 - DNA, 25 bp, Homo sapien
tgacagctcacccacggtggaggcg

SEQ ID NO: 3246837 - DNA, 25 bp, Homo sapien
caggaaacctctgccgtgacagctc

SEQ ID NO: 3246838 - DNA, 25 bp, Homo sapien
ccgcgccttcatcccgcgccgagcg

SEQ ID NO: 3246839 - DNA, 25 bp, Homo sapien
gggtgccaccctcggacgcccagat

SEQ ID NO: 3246840 - DNA, 25 bp, Homo sapien
gggatcctgaacaccgccgcgcctt

SEQ ID NO: 3246841 - DNA, 25 bp, Homo sapien
ctcccccaagatctcagggcccggg

SEQ ID NO: 3246842 - DNA, 25 bp, Homo sapien
tgggtttgtagagccactttcggaa

SEQ ID NO: 3246843 - DNA, 25 bp, Homo sapien
tagagccactttcggaacctgttca

SEQ ID NO: 3246844 - DNA, 25 bp, Homo sapien
tttgtagagccactttcggaacctg

SEQ ID NO: 3246845 - DNA, 25 bp, Homo sapien
cttgggtttgtagagccactttcgg

SEQ ID NO: 3246846 - DNA, 25 bp, Homo sapien
catcgccgcgccggccctggccgga

SEQ ID NO: 3246847 - DNA, 25 bp, Homo sapien
ccgggcggccctcgccctccgcagc

SEQ ID NO: 3246848 - DNA, 25 bp, Homo sapien
tcgccgcgccggccctggccggact

SEQ ID NO: 3246849 - DNA, 25 bp, Homo sapien
cgcgccggccctggccggactccgg

SEQ ID NO: 3246850 - DNA, 25 bp, Homo sapien
aggctggctagcgaagcccggagcg

SEQ ID NO: 3246851 - DNA, 25 bp, Homo sapien
ccgggcagacctcagacccgggagt

SEQ ID NO: 3246852 - DNA, 25 bp, Homo sapien
cgcgctgtcgcagggaggctggcta

SEQ ID NO: 3246853 - DNA, 25 bp, Homo sapien
ctgagtatgctctgcaagcggcgcg

SEQ ID NO: 3246854 - DNA, 25 bp, Homo sapien
tgccaacaccttagccccagctggc

SEQ ID NO: 3246855 - DNA, 25 bp, Homo sapien
ggagctgacggacgacgactgccaa

SEQ ID NO: 3246856 - DNA, 25 bp, Homo sapien
cggacgacgactgccaacaccttag

SEQ ID NO: 3246857 - DNA, 25 bp, Homo sapien
tgacggacgacgactgccaacacct

SEQ ID NO: 3246858 - DNA, 25 bp, Homo sapien
agaagcaggcacaacgaggccggcg

SEQ ID NO: 3246859 - DNA, 25 bp, Homo sapien
tcacttaaacttcccattgacagcc

SEQ ID NO: 3246860 - DNA, 25 bp, Homo sapien
aggcacaacgaggccggcgtgccct

SEQ ID NO: 3246861 - DNA, 25 bp, Homo sapien
acttaaacttcccattgacagccag

SEQ ID NO: 3246862 - DNA, 25 bp, Homo sapien
aggtgctcagaaaggtccgtgggct

SEQ ID NO: 3246863 - DNA, 25 bp, Homo sapien
ccaggtgctcagaaaggtccgtggg

SEQ ID NO: 3246864 - DNA, 25 bp, Homo sapien
tgccaggtgctcagaaaggtccgtg

SEQ ID NO: 3246865 - DNA, 25 bp, Homo sapien
ggtgctcagaaaggtccgtgggctc

SEQ ID NO: 3246866 - DNA, 25 bp, Homo sapien
agcacaaaatgagagcgcagccgga

SEQ ID NO: 3246867 - DNA, 25 bp, Homo sapien
cccatgtgagcatgactagggtggc

SEQ ID NO: 3246868 - DNA, 25 bp, Homo sapien
ggcctgctgggatcagacaccatgt

SEQ ID NO: 3246869 - DNA, 25 bp, Homo sapien
gctaatagggtgcaacagaagtgac

SEQ ID NO: 3246870 - DNA, 25 bp, Homo sapien
gattaatcatgtacggccccattta

SEQ ID NO: 3246871 - DNA, 25 bp, Homo sapien
accatgcccgccctaaatctgatca

SEQ ID NO: 3246872 - DNA, 25 bp, Homo sapien
caatcaagctgacgtgcaatcacag

SEQ ID NO: 3246873 - DNA, 25 bp, Homo sapien
cattttgattaatcatgtacggccc

SEQ ID NO: 3246874 - DNA, 25 bp, Homo sapien
tataatcacaaacttcggaaaatgt

SEQ ID NO: 3246875 - DNA, 25 bp, Homo sapien
ttgagcccggggcttcaagacaaga

SEQ ID NO: 3246876 - DNA, 25 bp, Homo sapien
cggggcttcaagacaagactgggca

SEQ ID NO: 3246877 - DNA, 25 bp, Homo sapien
aattctcatagatatattaaatgtc

SEQ ID NO: 3246878 - DNA, 25 bp, Homo sapien
cttcacgttgcctgagggtgccgag

SEQ ID NO: 3246879 - DNA, 25 bp, Homo sapien
gagatgctggccatggactaaggtc

SEQ ID NO: 3246880 - DNA, 25 bp, Homo sapien
ttgctaaacccacgtcaaagtcgag

SEQ ID NO: 3246881 - DNA, 25 bp, Homo sapien
tggtttccagccgatcgtcagagtc

SEQ ID NO: 3246882 - DNA, 25 bp, Homo sapien
tgtctctctttaggagcccggagcc

SEQ ID NO: 3246883 - DNA, 25 bp, Homo sapien
tattgtcccttagcccacagatgca

SEQ ID NO: 3246884 - DNA, 25 bp, Homo sapien
tctggtgtgcccttcgagaattccc

SEQ ID NO: 3246885 - DNA, 25 bp, Homo sapien
acagtgctgtttgagattaggcccc

SEQ ID NO: 3246886 - DNA, 25 bp, Homo sapien
ggaagacctggttacttggcatctg

SEQ ID NO: 3246887 - DNA, 25 bp, Homo sapien
cctgattgctggtggcagcttaatc

SEQ ID NO: 3246888 - DNA, 25 bp, Homo sapien
gcatctgaacaagcctcattgcctc

SEQ ID NO: 3246889 - DNA, 25 bp, Homo sapien
gctgatagatgtgaaagccctttgc

SEQ ID NO: 3246890 - DNA, 25 bp, Homo sapien
cctgttctaagtctaagccgttgtg

SEQ ID NO: 3246891 - DNA, 25 bp, Homo sapien
ttgtgattagctacatcctgccaag

SEQ ID NO: 3246892 - DNA, 25 bp, Homo sapien
cattggctgtgtgccggctttcttc

SEQ ID NO: 3246893 - DNA, 25 bp, Homo sapien
aataactctgggtgagaactgcctg

SEQ ID NO: 3246894 - DNA, 25 bp, Homo sapien
cgtggagcggataaatagatttgca

SEQ ID NO: 3246895 - DNA, 25 bp, Homo sapien
agaagacatcgtggagcggataaat

SEQ ID NO: 3246896 - DNA, 25 bp, Homo sapien
catcgtggagcggataaatagattt

SEQ ID NO: 3246897 - DNA, 25 bp, Homo sapien
agagaagacatcgtggagcggataa

SEQ ID NO: 3246898 - DNA, 25 bp, Homo sapien
gataaaatccatcccgtgtttgcca

SEQ ID NO: 3246899 - DNA, 25 bp, Homo sapien
gcagcccacaagatgtagcactatt

SEQ ID NO: 3246900 - DNA, 25 bp, Homo sapien
catgcaagataaatagggcaggcac

SEQ ID NO: 3246901 - DNA, 25 bp, Homo sapien
gcaataaaggccattcgttacctac

SEQ ID NO: 3246902 - DNA, 25 bp, Homo sapien
gcaaggcaaccttggagtcagtcca

SEQ ID NO: 3246903 - DNA, 25 bp, Homo sapien
ttctgggcatcacggcaatgtcacg

SEQ ID NO: 3246904 - DNA, 25 bp, Homo sapien
cagcacagaattcactttagacggg

SEQ ID NO: 3246905 - DNA, 25 bp, Homo sapien
caatgtcacgatgcccagacttgga

SEQ ID NO: 3246906 - DNA, 25 bp, Homo sapien
gtgaacagttagttatcaacagcac

SEQ ID NO: 3246907 - DNA, 25 bp, Homo sapien
agagcagtcaaacaaagcagtggga

SEQ ID NO: 3246908 - DNA, 25 bp, Homo sapien
aagagcagtcaaacaaagcagtggg

SEQ ID NO: 3246909 - DNA, 25 bp, Homo sapien
cagttagttatcaacagcactgcat

SEQ ID NO: 3246910 - DNA, 25 bp, Homo sapien
gaggaagcttctcacgcatgtgtgc

SEQ ID NO: 3246911 - DNA, 25 bp, Homo sapien
tgataggcccctcttctctacggga

SEQ ID NO: 3246912 - DNA, 25 bp, Homo sapien
aaaagcattgggtggattgataagc

SEQ ID NO: 3246913 - DNA, 25 bp, Homo sapien
ctgcttgaggagtacggcgccctct

SEQ ID NO: 3246914 - DNA, 25 bp, Homo sapien
tatcaaacaactcttacactgtaca

SEQ ID NO: 3246915 - DNA, 25 bp, Homo sapien
ttctctgttgtttgacacatacata

SEQ ID NO: 3246916 - DNA, 25 bp, Homo sapien
gattttataataactgcagacatat

SEQ ID NO: 3246917 - DNA, 25 bp, Homo sapien
tacataagcctgcaggtacccaaat

SEQ ID NO: 3246918 - DNA, 25 bp, Homo sapien
cctttactgtatcctgggtggcccg

SEQ ID NO: 3246919 - DNA, 25 bp, Homo sapien
tccaggaggcacttaacgtagcttc

SEQ ID NO: 3246920 - DNA, 25 bp, Homo sapien
tcatggtcgtgtcttgaggagtcca

SEQ ID NO: 3246921 - DNA, 25 bp, Homo sapien
tctctgctccgaagcactgtggaag

SEQ ID NO: 3246922 - DNA, 25 bp, Homo sapien
gagtagactgacatctttgccgtag

SEQ ID NO: 3246923 - DNA, 25 bp, Homo sapien
tttgccgtagtctcccgtggaagcc

SEQ ID NO: 3246924 - DNA, 25 bp, Homo sapien
gaactggaatcctggcactttcttg

SEQ ID NO: 3246925 - DNA, 25 bp, Homo sapien
actgtgtgacagagcggagcaagac

SEQ ID NO: 3246926 - DNA, 25 bp, Homo sapien
cagtggtgcgatctgtgatcctcct

SEQ ID NO: 3246927 - DNA, 25 bp, Homo sapien
gagtatcctgtcagtgttaaatgcc

SEQ ID NO: 3246928 - DNA, 25 bp, Homo sapien
tatgggttataccttagatgagagt

SEQ ID NO: 3246929 - DNA, 25 bp, Homo sapien
catggtattcagcaaaatgtcaaaa

SEQ ID NO: 3246930 - DNA, 25 bp, Homo sapien
actgggcctgggaccttagagagca

SEQ ID NO: 3246931 - DNA, 25 bp, Homo sapien
tctgtgcccatgctgcaagaacctg

SEQ ID NO: 3246932 - DNA, 25 bp, Homo sapien
ttagagagcagcgtgagctctgtgc

SEQ ID NO: 3246933 - DNA, 25 bp, Homo sapien
aagctgtgcagtggtttggattgga

SEQ ID NO: 3246934 - DNA, 25 bp, Homo sapien
tatatatggtgcttgcctgggcaac

SEQ ID NO: 3246935 - DNA, 25 bp, Homo sapien
tggcacactactgtagtagttccag

SEQ ID NO: 3246936 - DNA, 25 bp, Homo sapien
ggcacactactgtagtagttccagc

SEQ ID NO: 3246937 - DNA, 25 bp, Homo sapien
acatatatatggtgcttgcctgggc

SEQ ID NO: 3246938 - DNA, 25 bp, Homo sapien
gcatgcgcatgctccagtaaacaca

SEQ ID NO: 3246939 - DNA, 25 bp, Homo sapien
acaccgggaagggaagatcgcctca

SEQ ID NO: 3246940 - DNA, 25 bp, Homo sapien
gacgcgaggccctgaagtatgccaa

SEQ ID NO: 3246941 - DNA, 25 bp, Homo sapien
tgcactaaggcacagaatggtggag

SEQ ID NO: 3246942 - DNA, 25 bp, Homo sapien
aatctaaacccctgaccccgcagtg

SEQ ID NO: 3246943 - DNA, 25 bp, Homo sapien
ctgaccccgcagtgagtttctggca

SEQ ID NO: 3246944 - DNA, 25 bp, Homo sapien
ctaaacccctgaccccgcagtgagt

SEQ ID NO: 3246945 - DNA, 25 bp, Homo sapien
cccctgaccccgcagtgagtttctg

SEQ ID NO: 3246946 - DNA, 25 bp, Homo sapien
gactgtctatcaactggtccaattt

SEQ ID NO: 3246947 - DNA, 25 bp, Homo sapien
ctgcttggattctgctagacagacc

SEQ ID NO: 3246948 - DNA, 25 bp, Homo sapien
tagacagacccgacaaagactgtct

SEQ ID NO: 3246949 - DNA, 25 bp, Homo sapien
tttgtctttgcaggttctgcttgga

SEQ ID NO: 3246950 - DNA, 25 bp, Homo sapien
tagctctgtgctgtcggattggaac

SEQ ID NO: 3246951 - DNA, 25 bp, Homo sapien
cgagaagttgatgctcggcccacgc

SEQ ID NO: 3246952 - DNA, 25 bp, Homo sapien
tagtctgtgcgtgagactccttcga

SEQ ID NO: 3246953 - DNA, 25 bp, Homo sapien
ccgttagctcgtgtgcgtgtagtct

SEQ ID NO: 3246954 - DNA, 25 bp, Homo sapien
taggagtttgcatcatccacgtggc

SEQ ID NO: 3246955 - DNA, 25 bp, Homo sapien
gccgtggccagataggagtttgcat

SEQ ID NO: 3246956 - DNA, 25 bp, Homo sapien
ccacgtggctccgttgcctctgcat

SEQ ID NO: 3246957 - DNA, 25 bp, Homo sapien
gccagataggagtttgcatcatcca

SEQ ID NO: 3246958 - DNA, 25 bp, Homo sapien
caatactccatttgactggttcgag

SEQ ID NO: 3246959 - DNA, 25 bp, Homo sapien
ggtggccaccctagtgtgacgtgca

SEQ ID NO: 3246960 - DNA, 25 bp, Homo sapien
cagcagcaagaacgtttattataaa

SEQ ID NO: 3246961 - DNA, 25 bp, Homo sapien
taagtgtgctttaacttccggctgg

SEQ ID NO: 3246962 - DNA, 25 bp, Homo sapien
tcagtagagctcaacccatggcatc

SEQ ID NO: 3246963 - DNA, 25 bp, Homo sapien
caaagtgaacgatcagagtgccccg

SEQ ID NO: 3246964 - DNA, 25 bp, Homo sapien
ggcttaagcctgatggagacacaga

SEQ ID NO: 3246965 - DNA, 25 bp, Homo sapien
catagccaaagggaccaaagtgaac

SEQ ID NO: 3246966 - DNA, 25 bp, Homo sapien
ccaccaggcaccataagctctaatg

SEQ ID NO: 3246967 - DNA, 25 bp, Homo sapien
ggcaccataagctctaatgcgtcgg

SEQ ID NO: 3246968 - DNA, 25 bp, Homo sapien
agctctaatgcgtcggcggccaaat

SEQ ID NO: 3246969 - DNA, 25 bp, Homo sapien
gtcggcggccaaatacttggcagtt

SEQ ID NO: 3246970 - DNA, 25 bp, Homo sapien
gacacgtagggagctcacactttga

SEQ ID NO: 3246971 - DNA, 25 bp, Homo sapien
tgttcagttggacctatcggcccca

SEQ ID NO: 3246972 - DNA, 25 bp, Homo sapien
gggacgcatcgattctcaagaggca

SEQ ID NO: 3246973 - DNA, 25 bp, Homo sapien
caaaatcttcaagaggcggcctgag

SEQ ID NO: 3246974 - DNA, 25 bp, Homo sapien
agttcttgaatcctactttgagccc

SEQ ID NO: 3246975 - DNA, 25 bp, Homo sapien
ttgaatcctactttgagcccgttcc

SEQ ID NO: 3246976 - DNA, 25 bp, Homo sapien
tactttgagcccgttcccgatcggc

SEQ ID NO: 3246977 - DNA, 25 bp, Homo sapien
tcttgaatcctactttgagcccgtt

SEQ ID NO: 3246978 - DNA, 25 bp, Homo sapien
catctggtcagtgccgtccggagcc

SEQ ID NO: 3246979 - DNA, 25 bp, Homo sapien
ccaccggccagcagacatctggtca

SEQ ID NO: 3246980 - DNA, 25 bp, Homo sapien
cagcctgtcccatgatttcggccac

SEQ ID NO: 3246981 - DNA, 25 bp, Homo sapien
ctgaagagaggcgagacacacattt

SEQ ID NO: 3246982 - DNA, 25 bp, Homo sapien
gcttcacttcggcacagtcatttat

SEQ ID NO: 3246983 - DNA, 25 bp, Homo sapien
ctcacgtattcgtccctgctggcgt

SEQ ID NO: 3246984 - DNA, 25 bp, Homo sapien
tgtagcgctgccacttggcattgag

SEQ ID NO: 3246985 - DNA, 25 bp, Homo sapien
caactgtctgttgagccgggagatc

SEQ ID NO: 3246986 - DNA, 25 bp, Homo sapien
gtcaccttctgttttaacagtcgat

SEQ ID NO: 3246987 - DNA, 25 bp, Homo sapien
taacagtcgattttcttcctgcaac

SEQ ID NO: 3246988 - DNA, 25 bp, Homo sapien
cctgcaacttctcaataacactctg

SEQ ID NO: 3246989 - DNA, 25 bp, Homo sapien
acttctcaataacactctggacaga

SEQ ID NO: 3246990 - DNA, 25 bp, Homo sapien
gaggaagggacagagagaagacact

SEQ ID NO: 3246991 - DNA, 25 bp, Homo sapien
ctgcatgaggaagggacagagagaa

SEQ ID NO: 3246992 - DNA, 25 bp, Homo sapien
catgaggaagggacagagagaagac

SEQ ID NO: 3246993 - DNA, 25 bp, Homo sapien
tgaggaagggacagagagaagacac

SEQ ID NO: 3246994 - DNA, 25 bp, Homo sapien
ggtgggcctggccatgcaccctgct

SEQ ID NO: 3246995 - DNA, 25 bp, Homo sapien
ccagtgagggggcccccagctgccc

SEQ ID NO: 3246996 - DNA, 25 bp, Homo sapien
cagggtgggcctggccatgcaccct

SEQ ID NO: 3246997 - DNA, 25 bp, Homo sapien
ccagggtgggcctggccatgcaccc

SEQ ID NO: 3246998 - DNA, 25 bp, Homo sapien
tcgggttcaaccaggtgattctgga

SEQ ID NO: 3246999 - DNA, 25 bp, Homo sapien
tctgcagacaatcgggttcaaccag

SEQ ID NO: 3247000 - DNA, 25 bp, Homo sapien
tcctgtctgcagacaatcgggttca

SEQ ID NO: 3247001 - DNA, 25 bp, Homo sapien
cagacaatcgggttcaaccaggtga

SEQ ID NO: 3247002 - DNA, 25 bp, Homo sapien
gccccacgcagggtcaggagtcacc

SEQ ID NO: 3247003 - DNA, 25 bp, Homo sapien
ccacgcagggtcaggagtcaccgaa

SEQ ID NO: 3247004 - DNA, 25 bp, Homo sapien
ctgccccacgcagggtcaggagtca

SEQ ID NO: 3247005 - DNA, 25 bp, Homo sapien
cccacgcagggtcaggagtcaccga

SEQ ID NO: 3247006 - DNA, 25 bp, Homo sapien
gcgtgtgtttctgcatgaaccttgg

SEQ ID NO: 3247007 - DNA, 25 bp, Homo sapien
gatgggtgcgggatgtactgtctgc

SEQ ID NO: 3247008 - DNA, 25 bp, Homo sapien
tgaaccttggtgctgcctcagagaa

SEQ ID NO: 3247009 - DNA, 25 bp, Homo sapien
tgggcgcctcggtgaagctgctgat

SEQ ID NO: 3247010 - DNA, 25 bp, Homo sapien
ttggccagatgctgacacatgtggg

SEQ ID NO: 3247011 - DNA, 25 bp, Homo sapien
tcctttgtgcatgctgtcgttcatc

SEQ ID NO: 3247012 - DNA, 25 bp, Homo sapien
tggccagatgctgacacatgtgggc

SEQ ID NO: 3247013 - DNA, 25 bp, Homo sapien
tgtcgttcatccagacacttggcca

SEQ ID NO: 3247014 - DNA, 25 bp, Homo sapien
gtcgctcagtcagcctctcaatttc

SEQ ID NO: 3247015 - DNA, 25 bp, Homo sapien
tagtcgctcagtcagcctctcaatt

SEQ ID NO: 3247016 - DNA, 25 bp, Homo sapien
ctagtcgctcagtcagcctctcaat

SEQ ID NO: 3247017 - DNA, 25 bp, Homo sapien
agtcgctcagtcagcctctcaattt

SEQ ID NO: 3247018 - DNA, 25 bp, Homo sapien
gatgagggtttcgctatatatagcc

SEQ ID NO: 3247019 - DNA, 25 bp, Homo sapien
tgagggtttcgctatatatagccca

SEQ ID NO: 3247020 - DNA, 25 bp, Homo sapien
atgagggtttcgctatatatagccc

SEQ ID NO: 3247021 - DNA, 25 bp, Homo sapien
gccaaccctggagacaaaaactatc

SEQ ID NO: 3247022 - DNA, 25 bp, Homo sapien
gatgccagagctcacccgaatgttt

SEQ ID NO: 3247023 - DNA, 25 bp, Homo sapien
tgggcaaactaggataatagccatg

SEQ ID NO: 3247024 - DNA, 25 bp, Homo sapien
aaaactatctttcgcagactactgc

SEQ ID NO: 3247025 - DNA, 25 bp, Homo sapien
cggcggccgccacacgcactctcgc

SEQ ID NO: 3247026 - DNA, 25 bp, Homo sapien
ggcggccgccacacgcactctcgct

SEQ ID NO: 3247027 - DNA, 25 bp, Homo sapien
gcggccgccacacgcactctcgctc

SEQ ID NO: 3247028 - DNA, 25 bp, Homo sapien
gcgtccactagggacggcgcggcgt

SEQ ID NO: 3247029 - DNA, 25 bp, Homo sapien
acagggtgcagagcgcggcagctgc

SEQ ID NO: 3247030 - DNA, 25 bp, Homo sapien
tccggcctcgtggtacagggtgcag

SEQ ID NO: 3247031 - DNA, 25 bp, Homo sapien
gcgcggaggcgagcgatgagggcgt

SEQ ID NO: 3247032 - DNA, 25 bp, Homo sapien
ctgtaggcccgcccgggaggccgcg

SEQ ID NO: 3247033 - DNA, 25 bp, Homo sapien
gctgtaggcccgcccgggaggccgc

SEQ ID NO: 3247034 - DNA, 25 bp, Homo sapien
cgcgcccgggccccgccggctgccg

SEQ ID NO: 3247035 - DNA, 25 bp, Homo sapien
gcgcccgggccccgccggctgccgc

SEQ ID NO: 3247036 - DNA, 25 bp, Homo sapien
tccgcgcccgggccccgccggctgc

SEQ ID NO: 3247037 - DNA, 25 bp, Homo sapien
tgctagatggactgttgctcccagc

SEQ ID NO: 3247038 - DNA, 25 bp, Homo sapien
ggtagctactaatcccagaatgggt

SEQ ID NO: 3247039 - DNA, 25 bp, Homo sapien
cagagatcatgcaagagaaggccta

SEQ ID NO: 3247040 - DNA, 25 bp, Homo sapien
agaaggcctaatgcgagacaccagc

SEQ ID NO: 3247041 - DNA, 25 bp, Homo sapien
tctggagtttcgtgaggaagtattc

SEQ ID NO: 3247042 - DNA, 25 bp, Homo sapien
aggtaaccatgagctactggcaggc

SEQ ID NO: 3247043 - DNA, 25 bp, Homo sapien
gtattcgggctgtgcggcgccgcga

SEQ ID NO: 3247044 - DNA, 25 bp, Homo sapien
aaccatgagctactggcaggccggg

SEQ ID NO: 3247045 - DNA, 25 bp, Homo sapien
cgggggtgcagcggggagagccagg

SEQ ID NO: 3247046 - DNA, 25 bp, Homo sapien
ctgcgggcagcgggggtgcagcggg

SEQ ID NO: 3247047 - DNA, 25 bp, Homo sapien
agcgggggtgcagcggggagagcca

SEQ ID NO: 3247048 - DNA, 25 bp, Homo sapien
gcagcgggggtgcagcggggagagc

SEQ ID NO: 3247049 - DNA, 25 bp, Homo sapien
cctgtctgcctgtgatacagactat

SEQ ID NO: 3247050 - DNA, 25 bp, Homo sapien
agttagggccgggacatcttcccag

SEQ ID NO: 3247051 - DNA, 25 bp, Homo sapien
atttcccaatcatagttagggccgg

SEQ ID NO: 3247052 - DNA, 25 bp, Homo sapien
gatacagactatatccccgggagcc

SEQ ID NO: 3247053 - DNA, 25 bp, Homo sapien
ttgaacttgtgcctcgggatcgaca

SEQ ID NO: 3247054 - DNA, 25 bp, Homo sapien
ttcccttgttggtaagtcagcggga

SEQ ID NO: 3247055 - DNA, 25 bp, Homo sapien
tcagcgggatttgaacttgtgcctc

SEQ ID NO: 3247056 - DNA, 25 bp, Homo sapien
ttctgtgtagtactagagcatgtcc

SEQ ID NO: 3247057 - DNA, 25 bp, Homo sapien
gcctcctgcactggagaatgcaggg

SEQ ID NO: 3247058 - DNA, 25 bp, Homo sapien
cctcctgcactggagaatgcaggga

SEQ ID NO: 3247059 - DNA, 25 bp, Homo sapien
gagggagactctgcctcaagaaaaa

SEQ ID NO: 3247060 - DNA, 25 bp, Homo sapien
cagagggagactctgcctcaagaaa

SEQ ID NO: 3247061 - DNA, 25 bp, Homo sapien
agagggagactctgcctcaagaaaa

SEQ ID NO: 3247062 - DNA, 25 bp, Homo sapien
ctgagctggctttcccgggatgacg

SEQ ID NO: 3247063 - DNA, 25 bp, Homo sapien
tactgagctggctttcccgggatga

SEQ ID NO: 3247064 - DNA, 25 bp, Homo sapien
ctactgagctggctttcccgggatg

SEQ ID NO: 3247065 - DNA, 25 bp, Homo sapien
actgagctggctttcccgggatgac

SEQ ID NO: 3247066 - DNA, 25 bp, Homo sapien
gtggggccgcccaggatcaggacca

SEQ ID NO: 3247067 - DNA, 25 bp, Homo sapien
gtggacagcgccctttccacctggg

SEQ ID NO: 3247068 - DNA, 25 bp, Homo sapien
cgcccaggatcaggaccacggggct

SEQ ID NO: 3247069 - DNA, 25 bp, Homo sapien
gggtggacagcgccctttccacctg

SEQ ID NO: 3247070 - DNA, 25 bp, Homo sapien
gataggcagccgtgtctaggaactg

SEQ ID NO: 3247071 - DNA, 25 bp, Homo sapien
aagacagataggcagccgtgtctag

SEQ ID NO: 3247072 - DNA, 25 bp, Homo sapien
cctccaggatcatgggggagcccac

SEQ ID NO: 3247073 - DNA, 25 bp, Homo sapien
tgacaggggacctggcctttcaggg

SEQ ID NO: 3247074 - DNA, 25 bp, Homo sapien
tccttcctccaggataggcggctcc

SEQ ID NO: 3247075 - DNA, 25 bp, Homo sapien
gggtggtagggagcatttcaggctc

SEQ ID NO: 3247076 - DNA, 25 bp, Homo sapien
gctggagacagtcccacgtgtgggc

SEQ ID NO: 3247077 - DNA, 25 bp, Homo sapien
cgtgtgggctgcctaagtcccagag

SEQ ID NO: 3247078 - DNA, 25 bp, Homo sapien
aacgccctgaggtgactggcccttt

SEQ ID NO: 3247079 - DNA, 25 bp, Homo sapien
tcatggattccggtcacatctggtc

SEQ ID NO: 3247080 - DNA, 25 bp, Homo sapien
tccaaggccatgagagtggtcaggc

SEQ ID NO: 3247081 - DNA, 25 bp, Homo sapien
gatcacagatcgtgctggaactgct

SEQ ID NO: 3247082 - DNA, 25 bp, Homo sapien
catccctgtagctgagctgattcca

SEQ ID NO: 3247083 - DNA, 25 bp, Homo sapien
gcttccttgtgaatcagatgtttac

SEQ ID NO: 3247084 - DNA, 25 bp, Homo sapien
tgtttactgcgctcctgctgagcct

SEQ ID NO: 3247085 - DNA, 25 bp, Homo sapien
gctgattccaagaagtgccctctgc

SEQ ID NO: 3247086 - DNA, 25 bp, Homo sapien
cccactcatgcaacactgggtgcct

SEQ ID NO: 3247087 - DNA, 25 bp, Homo sapien
gccccactcatgcaacactgggtgc

SEQ ID NO: 3247088 - DNA, 25 bp, Homo sapien
agtggtggacctccttcagaaggct

SEQ ID NO: 3247089 - DNA, 25 bp, Homo sapien
gcagtggtggacctccttcagaagg

SEQ ID NO: 3247090 - DNA, 25 bp, Homo sapien
ggctttgggtcccaaagagctggca

SEQ ID NO: 3247091 - DNA, 25 bp, Homo sapien
caccagggctttgggtcccaaagag

SEQ ID NO: 3247092 - DNA, 25 bp, Homo sapien
cagggctttgggtcccaaagagctg

SEQ ID NO: 3247093 - DNA, 25 bp, Homo sapien
gtgccaccagggctttgggtcccaa

SEQ ID NO: 3247094 - DNA, 25 bp, Homo sapien
gtctggagaccactgccgaacatac

SEQ ID NO: 3247095 - DNA, 25 bp, Homo sapien
ggggtctggagaccactgccgaaca

SEQ ID NO: 3247096 - DNA, 25 bp, Homo sapien
ctggggtctggagaccactgccgaa

SEQ ID NO: 3247097 - DNA, 25 bp, Homo sapien
ggtctggagaccactgccgaacata

SEQ ID NO: 3247098 - DNA, 25 bp, Homo sapien
cgtgaccaggatggggtcggtgacc

SEQ ID NO: 3247099 - DNA, 25 bp, Homo sapien
acagacagaagtgggttcgtcgagg

SEQ ID NO: 3247100 - DNA, 25 bp, Homo sapien
cagaagtgggttcgtcgaggctgca

SEQ ID NO: 3247101 - DNA, 25 bp, Homo sapien
tgggttcgtcgaggctgcagaaggc

SEQ ID NO: 3247102 - DNA, 25 bp, Homo sapien
gtcccggccacagctgatctgctca

SEQ ID NO: 3247103 - DNA, 25 bp, Homo sapien
gctgctgcccttgcctatcgatgag

SEQ ID NO: 3247104 - DNA, 25 bp, Homo sapien
ctgcccttgcctatcgatgaggatg

SEQ ID NO: 3247105 - DNA, 25 bp, Homo sapien
agctgatctgctcagtgactgctgc

SEQ ID NO: 3247106 - DNA, 25 bp, Homo sapien
ctcgctgctgcgccgtggtgaatgt

SEQ ID NO: 3247107 - DNA, 25 bp, Homo sapien
tcgctgctgcgccgtggtgaatgtg

SEQ ID NO: 3247108 - DNA, 25 bp, Homo sapien
cgctgctgcgccgtggtgaatgtgg

SEQ ID NO: 3247109 - DNA, 25 bp, Homo sapien
gctgctgcgccgtggtgaatgtggc

SEQ ID NO: 3247110 - DNA, 25 bp, Homo sapien
ctgggctggactccccctgtagcat

SEQ ID NO: 3247111 - DNA, 25 bp, Homo sapien
cctgtagcatcacagcattggacca

SEQ ID NO: 3247112 - DNA, 25 bp, Homo sapien
tctcctctgggctggactccccctg

SEQ ID NO: 3247113 - DNA, 25 bp, Homo sapien
tgtagcatcacagcattggaccagg

SEQ ID NO: 3247114 - DNA, 25 bp, Homo sapien
ccacagccttcctcggggctggccg

SEQ ID NO: 3247115 - DNA, 25 bp, Homo sapien
ccgtgggagcccacaggaggtggcc

SEQ ID NO: 3247116 - DNA, 25 bp, Homo sapien
gccgtgggagcccacaggaggtggc

SEQ ID NO: 3247117 - DNA, 25 bp, Homo sapien
tggccgtgggagcccacaggaggtg

SEQ ID NO: 3247118 - DNA, 25 bp, Homo sapien
gcacatgagggcctgcacaggccat

SEQ ID NO: 3247119 - DNA, 25 bp, Homo sapien
tgggtgtgcagagacacagcgcaca

SEQ ID NO: 3247120 - DNA, 25 bp, Homo sapien
acacagcgcacatgagggcctgcac

SEQ ID NO: 3247121 - DNA, 25 bp, Homo sapien
gggtgtgcagagacacagcgcacat

SEQ ID NO: 3247122 - DNA, 25 bp, Homo sapien
aacgctggcccatgtgtctccagag

SEQ ID NO: 3247123 - DNA, 25 bp, Homo sapien
accagctttggccgcccaacgctgg

SEQ ID NO: 3247124 - DNA, 25 bp, Homo sapien
tttctggaagggctcatggagccca

SEQ ID NO: 3247125 - DNA, 25 bp, Homo sapien
ctggaagggctcatggagcccagca

SEQ ID NO: 3247126 - DNA, 25 bp, Homo sapien
gaggggaggagccggcggctgccag

SEQ ID NO: 3247127 - DNA, 25 bp, Homo sapien
aggagccggcggctgccaggccagg

SEQ ID NO: 3247128 - DNA, 25 bp, Homo sapien
tgcccgcccagtcccccgccgagag

SEQ ID NO: 3247129 - DNA, 25 bp, Homo sapien
cagtcccccgccgagaggggaggag

SEQ ID NO: 3247130 - DNA, 25 bp, Homo sapien
tgatggatgagtagaagttctctgc

SEQ ID NO: 3247131 - DNA, 25 bp, Homo sapien
cagcatggtgtatctcaaggagagc

SEQ ID NO: 3247132 - DNA, 25 bp, Homo sapien
actaagggcttaacaggacactggc

SEQ ID NO: 3247133 - DNA, 25 bp, Homo sapien
gaggaggaagcattaaacagcatgg

SEQ ID NO: 3247134 - DNA, 25 bp, Homo sapien
tgggcagcatggtggagcactacca

SEQ ID NO: 3247135 - DNA, 25 bp, Homo sapien
agcatggtggagcactaccacaccc

SEQ ID NO: 3247136 - DNA, 25 bp, Homo sapien
ctaggtgatggcagtccatgtggct

SEQ ID NO: 3247137 - DNA, 25 bp, Homo sapien
ccctacggctacactgggcctaggt

SEQ ID NO: 3247138 - DNA, 25 bp, Homo sapien
tgcagatgacggcagccagctgctt

SEQ ID NO: 3247139 - DNA, 25 bp, Homo sapien
aaggccacctctgcaggggtttcct

SEQ ID NO: 3247140 - DNA, 25 bp, Homo sapien
ttccaggaaccaggtgtccaaggcc

SEQ ID NO: 3247141 - DNA, 25 bp, Homo sapien
tagcggatgtgggaggctgtgaccc

SEQ ID NO: 3247142 - DNA, 25 bp, Homo sapien
caggtggctggggtgagaggattgc

SEQ ID NO: 3247143 - DNA, 25 bp, Homo sapien
gtgagctgtgattgtgccactgcac

SEQ ID NO: 3247144 - DNA, 25 bp, Homo sapien
acttcagcctgtgagacagagtgag

SEQ ID NO: 3247145 - DNA, 25 bp, Homo sapien
ttgagcccagaaggtcaaggctgca

SEQ ID NO: 3247146 - DNA, 25 bp, Homo sapien
gattcatgaacatggtttacctctc

SEQ ID NO: 3247147 - DNA, 25 bp, Homo sapien
taatctaactttctgcgcccatctg

SEQ ID NO: 3247148 - DNA, 25 bp, Homo sapien
tctccatagggttacacacctgtcc

SEQ ID NO: 3247149 - DNA, 25 bp, Homo sapien
gagagtgtcttgactattctggctc

SEQ ID NO: 3247150 - DNA, 25 bp, Homo sapien
ctgccggccggggtgtactccgcgc

SEQ ID NO: 3247151 - DNA, 25 bp, Homo sapien
aagccatgacctggcgcccgaagct

SEQ ID NO: 3247152 - DNA, 25 bp, Homo sapien
ggcctggcgagtccaatcgccctgc

SEQ ID NO: 3247153 - DNA, 25 bp, Homo sapien
gtgtactccgcgcgggaccctgggc

SEQ ID NO: 3247154 - DNA, 25 bp, Homo sapien
gagccgacgggcggtggccgcactg

SEQ ID NO: 3247155 - DNA, 25 bp, Homo sapien
cggagccgacgggcggtggccgcac

SEQ ID NO: 3247156 - DNA, 25 bp, Homo sapien
agccgacgggcggtggccgcactgg

SEQ ID NO: 3247157 - DNA, 25 bp, Homo sapien
ccgacgggcggtggccgcactggga

SEQ ID NO: 3247158 - DNA, 25 bp, Homo sapien
acgaccctggctggacgctggtcag

SEQ ID NO: 3247159 - DNA, 25 bp, Homo sapien
tctgtcggctctcgtatttaaaaac

SEQ ID NO: 3247160 - DNA, 25 bp, Homo sapien
gctgcaaggtttgtgtacggacgca

SEQ ID NO: 3247161 - DNA, 25 bp, Homo sapien
tcagcatcctgcttgtgagaccggt

SEQ ID NO: 3247162 - DNA, 25 bp, Homo sapien
actctcaagttacatgctgctgttg

SEQ ID NO: 3247163 - DNA, 25 bp, Homo sapien
tcagactggagtgcacaagtttttt

SEQ ID NO: 3247164 - DNA, 25 bp, Homo sapien
ctcctagatacagcaaaggcatgaa

SEQ ID NO: 3247165 - DNA, 25 bp, Homo sapien
tattctgtcgccctcctagatacag

SEQ ID NO: 3247166 - DNA, 25 bp, Homo sapien
ggcgtgcaccaccattgggcatggt

SEQ ID NO: 3247167 - DNA, 25 bp, Homo sapien
gcgtgcaccaccattgggcatggtg

SEQ ID NO: 3247168 - DNA, 25 bp, Homo sapien
tacaggcgtgcaccaccattgggca

SEQ ID NO: 3247169 - DNA, 25 bp, Homo sapien
caggcgtgcaccaccattgggcatg

SEQ ID NO: 3247170 - DNA, 25 bp, Homo sapien
actcggaaattatttcacacaagtt

SEQ ID NO: 3247171 - DNA, 25 bp, Homo sapien
gctactcggaaattatttcacacaa

SEQ ID NO: 3247172 - DNA, 25 bp, Homo sapien
tactcggaaattatttcacacaagt

SEQ ID NO: 3247173 - DNA, 25 bp, Homo sapien
agctactcggaaattatttcacaca

SEQ ID NO: 3247174 - DNA, 25 bp, Homo sapien
agggcgttgctggtacaaagtcaaa

SEQ ID NO: 3247175 - DNA, 25 bp, Homo sapien
tgatcgtagggcgttgctggtacaa

SEQ ID NO: 3247176 - DNA, 25 bp, Homo sapien
tatgaagtgatcgtagggcgttgct

SEQ ID NO: 3247177 - DNA, 25 bp, Homo sapien
aaacctgcatcattgggccctgcgc

SEQ ID NO: 3247178 - DNA, 25 bp, Homo sapien
tcttggatttaggttttgagccggc

SEQ ID NO: 3247179 - DNA, 25 bp, Homo sapien
tataggagtatgagtggaaccaacc

SEQ ID NO: 3247180 - DNA, 25 bp, Homo sapien
gacaattcgtggtcacttttctgga

SEQ ID NO: 3247181 - DNA, 25 bp, Homo sapien
tacaggtgaggtaactccatacgtg

SEQ ID NO: 3247182 - DNA, 25 bp, Homo sapien
tgaccacctgttataatgtcttgcc

SEQ ID NO: 3247183 - DNA, 25 bp, Homo sapien
gacttagcctggcaaccataactca

SEQ ID NO: 3247184 - DNA, 25 bp, Homo sapien
tcagaacccaaatctcaaatgggcc

SEQ ID NO: 3247185 - DNA, 25 bp, Homo sapien
tgggtacccttactgacatttgtag

SEQ ID NO: 3247186 - DNA, 25 bp, Homo sapien
tagatgctcctaaaaccatgggcaa

SEQ ID NO: 3247187 - DNA, 25 bp, Homo sapien
tcaagttatcgtttgtcctgagagg

SEQ ID NO: 3247188 - DNA, 25 bp, Homo sapien
cccatgtcgtggtgctgagacctcc

SEQ ID NO: 3247189 - DNA, 25 bp, Homo sapien
tttaaactgtatgtagaagaggccc

SEQ ID NO: 3247190 - DNA, 25 bp, Homo sapien
tttccaaagcgtttaggcagcagcg

SEQ ID NO: 3247191 - DNA, 25 bp, Homo sapien
gcagcagcgcgagctttatttacca

SEQ ID NO: 3247192 - DNA, 25 bp, Homo sapien
cacagtgctgaattgccatgaggaa

SEQ ID NO: 3247193 - DNA, 25 bp, Homo sapien
aaaacacctttctgcggctgatgtg

SEQ ID NO: 3247194 - DNA, 25 bp, Homo sapien
gttccgcacgggactttggtcagtg

SEQ ID NO: 3247195 - DNA, 25 bp, Homo sapien
gccactagaggtcatatcattgaaa

SEQ ID NO: 3247196 - DNA, 25 bp, Homo sapien
tcagtgcgtgttttgggtttcagaa

SEQ ID NO: 3247197 - DNA, 25 bp, Homo sapien
accctcgctggttcaactttgactg

SEQ ID NO: 3247198 - DNA, 25 bp, Homo sapien
tcacaagcaggagacggatgcgcta

SEQ ID NO: 3247199 - DNA, 25 bp, Homo sapien
catggttgctggtgtccacgttgcc

SEQ ID NO: 3247200 - DNA, 25 bp, Homo sapien
tgtgtgcttgcatcagcgccaggac

SEQ ID NO: 3247201 - DNA, 25 bp, Homo sapien
gatgcgctagagagtacctgttacc

SEQ ID NO: 3247202 - DNA, 25 bp, Homo sapien
gatgtaagtgcagcctcggttcaga

SEQ ID NO: 3247203 - DNA, 25 bp, Homo sapien
gggcctcaggagttcctacctccag

SEQ ID NO: 3247204 - DNA, 25 bp, Homo sapien
cagtcccttggaggccttcctggaa

SEQ ID NO: 3247205 - DNA, 25 bp, Homo sapien
tgccacactggatcagatgtaagtg

SEQ ID NO: 3247206 - DNA, 25 bp, Homo sapien
tcccaaaggtaaagcactgagagtt

SEQ ID NO: 3247207 - DNA, 25 bp, Homo sapien
cggttctcatgaagcgtggcctgga

SEQ ID NO: 3247208 - DNA, 25 bp, Homo sapien
tttacgaatggacagagcgggtgcc

SEQ ID NO: 3247209 - DNA, 25 bp, Homo sapien
taaacactaaacagcttgtggtgcc

SEQ ID NO: 3247210 - DNA, 25 bp, Homo sapien
tgtgtgcacccaacgtgatgctatg

SEQ ID NO: 3247211 - DNA, 25 bp, Homo sapien
tttggctgcacgtcaccctcctgag

SEQ ID NO: 3247212 - DNA, 25 bp, Homo sapien
aggtgacggactcagactcctggct

SEQ ID NO: 3247213 - DNA, 25 bp, Homo sapien
tggtcccgtgaaaacactcgtgtgc

SEQ ID NO: 3247214 - DNA, 25 bp, Homo sapien
tctttgagcaggtttacaatttagc

SEQ ID NO: 3247215 - DNA, 25 bp, Homo sapien
tgaacgtgaataggctgctttttgc

SEQ ID NO: 3247216 - DNA, 25 bp, Homo sapien
tagcttacatttttcgactgtgaac

SEQ ID NO: 3247217 - DNA, 25 bp, Homo sapien
tcctgtcatagggaaggtatatcag

SEQ ID NO: 3247218 - DNA, 25 bp, Homo sapien
gttgttacttccctccaagaggctg

SEQ ID NO: 3247219 - DNA, 25 bp, Homo sapien
tgatcaaaggtaactcgaggtggag

SEQ ID NO: 3247220 - DNA, 25 bp, Homo sapien
cctcggcagatgctgttgttgttac

SEQ ID NO: 3247221 - DNA, 25 bp, Homo sapien
gacatcaccgtcattgatggagcct

SEQ ID NO: 3247222 - DNA, 25 bp, Homo sapien
ctgagcaggaaccggagggtgaccc

SEQ ID NO: 3247223 - DNA, 25 bp, Homo sapien
gagcaggaaccggagggtgacccat

SEQ ID NO: 3247224 - DNA, 25 bp, Homo sapien
tgagcaggaaccggagggtgaccca

SEQ ID NO: 3247225 - DNA, 25 bp, Homo sapien
agcaggaaccggagggtgacccatt

SEQ ID NO: 3247226 - DNA, 25 bp, Homo sapien
gtacaggcaagcttgtgtgggccca

SEQ ID NO: 3247227 - DNA, 25 bp, Homo sapien
ggtgccagatgtgggctcagatcct

SEQ ID NO: 3247228 - DNA, 25 bp, Homo sapien
gcaagcttgtgtgggcccaacaggc

SEQ ID NO: 3247229 - DNA, 25 bp, Homo sapien
cccaacaggcccttggtagagctgg

SEQ ID NO: 3247230 - DNA, 25 bp, Homo sapien
gattggccagccgagcgagaaccag

SEQ ID NO: 3247231 - DNA, 25 bp, Homo sapien
ccactgattggccagccgagcgaga

SEQ ID NO: 3247232 - DNA, 25 bp, Homo sapien
actgattggccagccgagcgagaac

SEQ ID NO: 3247233 - DNA, 25 bp, Homo sapien
ttggccagccgagcgagaaccaggc

SEQ ID NO: 3247234 - DNA, 25 bp, Homo sapien
tgctacgcgggcaagcgtgctgcct

SEQ ID NO: 3247235 - DNA, 25 bp, Homo sapien
cctttaccccacatatgcaatgact

SEQ ID NO: 3247236 - DNA, 25 bp, Homo sapien
tctgtgtcgttttgttgccaaggca

SEQ ID NO: 3247237 - DNA, 25 bp, Homo sapien
cagaatgaaaagtccttaaccgtgg

SEQ ID NO: 3247238 - DNA, 25 bp, Homo sapien
tccacgggaactcagggtgtccagg

SEQ ID NO: 3247239 - DNA, 25 bp, Homo sapien
gcagccacgcgtgcggcaggacgtg

SEQ ID NO: 3247240 - DNA, 25 bp, Homo sapien
tggtgtccctctccacgggaactca

SEQ ID NO: 3247241 - DNA, 25 bp, Homo sapien
gtgcggcaggacgtgccacccagca

SEQ ID NO: 3247242 - DNA, 25 bp, Homo sapien
cagctcggagtcactgaaggagtaa

SEQ ID NO: 3247243 - DNA, 25 bp, Homo sapien
gtaagtaagtctggaggagctgcct

SEQ ID NO: 3247244 - DNA, 25 bp, Homo sapien
tgagcttcctgcttaggggccggcc

SEQ ID NO: 3247245 - DNA, 25 bp, Homo sapien
gggcctgacctaggctcccactctg

SEQ ID NO: 3247246 - DNA, 25 bp, Homo sapien
ttgagcgtctgtgccgggtaactca

SEQ ID NO: 3247247 - DNA, 25 bp, Homo sapien
ctactcagccttgagcgtctgtgcc

SEQ ID NO: 3247248 - DNA, 25 bp, Homo sapien
tcagccttgagcgtctgtgccgggt

SEQ ID NO: 3247249 - DNA, 25 bp, Homo sapien
ccttgagcgtctgtgccgggtaact

SEQ ID NO: 3247250 - DNA, 25 bp, Homo sapien
gagcaaaaagagcccggaccacgtg

SEQ ID NO: 3247251 - DNA, 25 bp, Homo sapien
caaaaagagcccggaccacgtggtg

SEQ ID NO: 3247252 - DNA, 25 bp, Homo sapien
agagcccggaccacgtggtgaagca

SEQ ID NO: 3247253 - DNA, 25 bp, Homo sapien
aaagagcccggaccacgtggtgaag

SEQ ID NO: 3247254 - DNA, 25 bp, Homo sapien
tgcggagagacggtggcgtcaccca

SEQ ID NO: 3247255 - DNA, 25 bp, Homo sapien
cggagagacggtggcgtcacccagt

SEQ ID NO: 3247256 - DNA, 25 bp, Homo sapien
agagacggtggcgtcacccagtccc

SEQ ID NO: 3247257 - DNA, 25 bp, Homo sapien
gggggctggcacttgggaggcgagg

SEQ ID NO: 3247258 - DNA, 25 bp, Homo sapien
ctaggctgcgcagtgtacccatgac

SEQ ID NO: 3247259 - DNA, 25 bp, Homo sapien
gtgtacccatgaccgtgcccttctg

SEQ ID NO: 3247260 - DNA, 25 bp, Homo sapien
gagcacctaggctgcgcagtgtacc

SEQ ID NO: 3247261 - DNA, 25 bp, Homo sapien
ctgcgcagtgtacccatgaccgtgc

SEQ ID NO: 3247262 - DNA, 25 bp, Homo sapien
ggaagaggcacagtcaggcaccact

SEQ ID NO: 3247263 - DNA, 25 bp, Homo sapien
ccttctcccgctcaggtggcttcgg

SEQ ID NO: 3247264 - DNA, 25 bp, Homo sapien
agaggcacagtcaggcaccactgcc

SEQ ID NO: 3247265 - DNA, 25 bp, Homo sapien
ctcaggtggcttcggccgagggaag

SEQ ID NO: 3247266 - DNA, 25 bp, Homo sapien
atagccagcgaccacggaggacagg

SEQ ID NO: 3247267 - DNA, 25 bp, Homo sapien
tagccagcgaccacggaggacaggc

SEQ ID NO: 3247268 - DNA, 25 bp, Homo sapien
catagccagcgaccacggaggacag

SEQ ID NO: 3247269 - DNA, 25 bp, Homo sapien
agccagcgaccacggaggacaggca

SEQ ID NO: 3247270 - DNA, 25 bp, Homo sapien
cccagccgatgaggaggaaggcggg

SEQ ID NO: 3247271 - DNA, 25 bp, Homo sapien
gtccccagccgatgaggaggaaggc

SEQ ID NO: 3247272 - DNA, 25 bp, Homo sapien
agagaacgtccccagccgatgagga

SEQ ID NO: 3247273 - DNA, 25 bp, Homo sapien
agaacgtccccagccgatgaggagg

SEQ ID NO: 3247274 - DNA, 25 bp, Homo sapien
aggactcaggggactgcctgccacc

SEQ ID NO: 3247275 - DNA, 25 bp, Homo sapien
gcctgccacccgctttggagggagc

SEQ ID NO: 3247276 - DNA, 25 bp, Homo sapien
agcccgtgccctgcaggactcaggg

SEQ ID NO: 3247277 - DNA, 25 bp, Homo sapien
tcagcacagcccgtgccctgcagga

SEQ ID NO: 3247278 - DNA, 25 bp, Homo sapien
acggcagcaacttccccgccagggt

SEQ ID NO: 3247279 - DNA, 25 bp, Homo sapien
ccgcttcacggcagcaacttccccg

SEQ ID NO: 3247280 - DNA, 25 bp, Homo sapien
gccagggtggatccgccgggcatag

SEQ ID NO: 3247281 - DNA, 25 bp, Homo sapien
tccgccgggcataggcaccctggat

SEQ ID NO: 3247282 - DNA, 25 bp, Homo sapien
gagcgggtgtgttagtgcagggcac

SEQ ID NO: 3247283 - DNA, 25 bp, Homo sapien
ggatgggggttgcttccctgaagca

SEQ ID NO: 3247284 - DNA, 25 bp, Homo sapien
agacagcaggccgtcgccagatggg

SEQ ID NO: 3247285 - DNA, 25 bp, Homo sapien
tccctgaagcaggggcgttatttca

SEQ ID NO: 3247286 - DNA, 25 bp, Homo sapien
tactccaggcccgagaacaggaaga

SEQ ID NO: 3247287 - DNA, 25 bp, Homo sapien
tactgaactggaagcgctggtgtgt

SEQ ID NO: 3247288 - DNA, 25 bp, Homo sapien
ctactgaactggaagcgctggtgtg

SEQ ID NO: 3247289 - DNA, 25 bp, Homo sapien
aggaagctcagcgtgtactccaggc

SEQ ID NO: 3247290 - DNA, 25 bp, Homo sapien
gcgtgctgagaaggcgaccacagca

SEQ ID NO: 3247291 - DNA, 25 bp, Homo sapien
caggctccacgcttgggttggtcga

SEQ ID NO: 3247292 - DNA, 25 bp, Homo sapien
gagaggtggcgcgtgctgagaaggc

SEQ ID NO: 3247293 - DNA, 25 bp, Homo sapien
cacgcttgggttggtcgagtcctta

SEQ ID NO: 3247294 - DNA, 25 bp, Homo sapien
ggaaccccagggcgatagagggcgc

SEQ ID NO: 3247295 - DNA, 25 bp, Homo sapien
ctgagcagatcagccgcatcacgga

SEQ ID NO: 3247296 - DNA, 25 bp, Homo sapien
tgggtcctggccacgagcgacagcc

SEQ ID NO: 3247297 - DNA, 25 bp, Homo sapien
tggccacgagcgacagccgagaagc

SEQ ID NO: 3247298 - DNA, 25 bp, Homo sapien
agcagaagatgaacagcaggtcgga

SEQ ID NO: 3247299 - DNA, 25 bp, Homo sapien
tttctccaggggcagcgtctctggc

SEQ ID NO: 3247300 - DNA, 25 bp, Homo sapien
tccaggggcagcgtctctggcagga

SEQ ID NO: 3247301 - DNA, 25 bp, Homo sapien
ctggcaggaagcagaagatgaacag

SEQ ID NO: 3247302 - DNA, 25 bp, Homo sapien
aagagcagggcaaaccagggtgcca

SEQ ID NO: 3247303 - DNA, 25 bp, Homo sapien
aagcccagtgagaaggccaccccaa

SEQ ID NO: 3247304 - DNA, 25 bp, Homo sapien
gggcaaaccagggtgccatttccag

SEQ ID NO: 3247305 - DNA, 25 bp, Homo sapien
ctccgagcatagggcccagggtgaa

SEQ ID NO: 3247306 - DNA, 25 bp, Homo sapien
ccaggtcagcaacgatggccgtgga

SEQ ID NO: 3247307 - DNA, 25 bp, Homo sapien
catgccttgactgcgggccagaggc

SEQ ID NO: 3247308 - DNA, 25 bp, Homo sapien
gagaggctgacgttccctttgctga

SEQ ID NO: 3247309 - DNA, 25 bp, Homo sapien
gcgagcccaggtcagcaacgatggc

SEQ ID NO: 3247310 - DNA, 25 bp, Homo sapien
aaggccgcaaagctccgagaggtgg

SEQ ID NO: 3247311 - DNA, 25 bp, Homo sapien
ggaaggccgcaaagctccgagaggt

SEQ ID NO: 3247312 - DNA, 25 bp, Homo sapien
gaaggccgcaaagctccgagaggtg

SEQ ID NO: 3247313 - DNA, 25 bp, Homo sapien
aggaaggccgcaaagctccgagagg

SEQ ID NO: 3247314 - DNA, 25 bp, Homo sapien
ctgcatatgaggtggccacacccat

SEQ ID NO: 3247315 - DNA, 25 bp, Homo sapien
tgagggccacttgcgttctcagtgc

SEQ ID NO: 3247316 - DNA, 25 bp, Homo sapien
agaaccccctccaggatgcgatgag

SEQ ID NO: 3247317 - DNA, 25 bp, Homo sapien
tcagagtagggcttggcaacccaga

SEQ ID NO: 3247318 - DNA, 25 bp, Homo sapien
caggatgcgatgagggccaaccagt

SEQ ID NO: 3247319 - DNA, 25 bp, Homo sapien
gtggccccagtgagtggcgcacaca

SEQ ID NO: 3247320 - DNA, 25 bp, Homo sapien
ccccagtgagtggcgcacacagaaa

SEQ ID NO: 3247321 - DNA, 25 bp, Homo sapien
ggcgcctccccaagcagtcagaggt

SEQ ID NO: 3247322 - DNA, 25 bp, Homo sapien
ggcacagcagcatcaccgggcgcct

SEQ ID NO: 3247323 - DNA, 25 bp, Homo sapien
ctgcaggacagagaatgccgagcca

SEQ ID NO: 3247324 - DNA, 25 bp, Homo sapien
atcccgatggcggtggcaaaccagt

SEQ ID NO: 3247325 - DNA, 25 bp, Homo sapien
ctccactggcatcccgatggcggtg

SEQ ID NO: 3247326 - DNA, 25 bp, Homo sapien
tggcatcccgatggcggtggcaaac

SEQ ID NO: 3247327 - DNA, 25 bp, Homo sapien
cccgatggcggtggcaaaccagtcc

SEQ ID NO: 3247328 - DNA, 25 bp, Homo sapien
gaggccgagaaagacaacggtgacc

SEQ ID NO: 3247329 - DNA, 25 bp, Homo sapien
aagacaacggtgaccacgcggcgct

SEQ ID NO: 3247330 - DNA, 25 bp, Homo sapien
ccgagaaagacaacggtgaccacgc

SEQ ID NO: 3247331 - DNA, 25 bp, Homo sapien
cagcaggaggccgagaaagacaacg

SEQ ID NO: 3247332 - DNA, 25 bp, Homo sapien
tggatgggtgggcgcggggtgcagc

SEQ ID NO: 3247333 - DNA, 25 bp, Homo sapien
gacagccggcgagcaccctaaaggg

SEQ ID NO: 3247334 - DNA, 25 bp, Homo sapien
tcctgagagaccagggtgagcacat

SEQ ID NO: 3247335 - DNA, 25 bp, Homo sapien
gggattgcacaaaaaatagccgcaa

SEQ ID NO: 3247336 - DNA, 25 bp, Homo sapien
tagccgcaaaggcaacggtcctgag

SEQ ID NO: 3247337 - DNA, 25 bp, Homo sapien
tcgggacggacggtcgcacagacgc

SEQ ID NO: 3247338 - DNA, 25 bp, Homo sapien
cggacggtcgcacagacgcggaaca

SEQ ID NO: 3247339 - DNA, 25 bp, Homo sapien
tgcgcgctcgggacggacggtcgca

SEQ ID NO: 3247340 - DNA, 25 bp, Homo sapien
cgcggctgcgcgctcgggacggacg

SEQ ID NO: 3247341 - DNA, 25 bp, Homo sapien
gacggccacgcccggccacgccacg

SEQ ID NO: 3247342 - DNA, 25 bp, Homo sapien
aggcacgccgccaggggcgggacgg

SEQ ID NO: 3247343 - DNA, 25 bp, Homo sapien
ggcacgccgccaggggcgggacggc

SEQ ID NO: 3247344 - DNA, 25 bp, Homo sapien
gcgggacggccacgcccggccacgc

SEQ ID NO: 3247345 - DNA, 25 bp, Homo sapien
gcacgttctcttccggccggagtca

SEQ ID NO: 3247346 - DNA, 25 bp, Homo sapien
acacacagcggtggccgcgggcctg

SEQ ID NO: 3247347 - DNA, 25 bp, Homo sapien
ttagcagcaccctgagcggagcgga

SEQ ID NO: 3247348 - DNA, 25 bp, Homo sapien
tcctgcgggtcgctgcttggctgtg

SEQ ID NO: 3247349 - DNA, 25 bp, Homo sapien
tcaccgtggctagatgtgacctccg

SEQ ID NO: 3247350 - DNA, 25 bp, Homo sapien
tttgtggatccgtgcacctgccaga

SEQ ID NO: 3247351 - DNA, 25 bp, Homo sapien
cacaccccgttagaagctggaactg

SEQ ID NO: 3247352 - DNA, 25 bp, Homo sapien
gaggatggctcatgctctggtccag

SEQ ID NO: 3247353 - DNA, 25 bp, Homo sapien
cctgggcagggctggtcactgtgat

SEQ ID NO: 3247354 - DNA, 25 bp, Homo sapien
gggatgccggctaaggacacaagtt

SEQ ID NO: 3247355 - DNA, 25 bp, Homo sapien
ctcatgaggtgtgaacttgaccccg

SEQ ID NO: 3247356 - DNA, 25 bp, Homo sapien
tgaggtgtgaacttgaccccggcct

SEQ ID NO: 3247357 - DNA, 25 bp, Homo sapien
ggttgacagaaattacactggccag

SEQ ID NO: 3247358 - DNA, 25 bp, Homo sapien
catgaaggcaaacgtccgtggttga

SEQ ID NO: 3247359 - DNA, 25 bp, Homo sapien
tcccgatcccagaggtgcatttcag

SEQ ID NO: 3247360 - DNA, 25 bp, Homo sapien
gaaccagtcgcagctgataacacac

SEQ ID NO: 3247361 - DNA, 25 bp, Homo sapien
tcacacctataattggggggccaag

SEQ ID NO: 3247362 - DNA, 25 bp, Homo sapien
ctcacacctataattggggggccaa

SEQ ID NO: 3247363 - DNA, 25 bp, Homo sapien
cacacctataattggggggccaagg

SEQ ID NO: 3247364 - DNA, 25 bp, Homo sapien
ctgtaaccttggactcagctcaagc

SEQ ID NO: 3247365 - DNA, 25 bp, Homo sapien
taaccttggactcagctcaagcagt

SEQ ID NO: 3247366 - DNA, 25 bp, Homo sapien
ttaagcgacacagtcttgcactgtg

SEQ ID NO: 3247367 - DNA, 25 bp, Homo sapien
tcactgtaaccttggactcagctca

SEQ ID NO: 3247368 - DNA, 25 bp, Homo sapien
tgcagatgtgaggtaatgtccagtt

SEQ ID NO: 3247369 - DNA, 25 bp, Homo sapien
cagatgtgaggtaatgtccagttcc

SEQ ID NO: 3247370 - DNA, 25 bp, Homo sapien
tgtgaggtaatgtccagttccttgc

SEQ ID NO: 3247371 - DNA, 25 bp, Homo sapien
aattgcagatgtgaggtaatgtcca

SEQ ID NO: 3247372 - DNA, 25 bp, Homo sapien
tgtgtagccaggctgttaaaaagct

SEQ ID NO: 3247373 - DNA, 25 bp, Homo sapien
cattcgccttcctgtgtagccaggc

SEQ ID NO: 3247374 - DNA, 25 bp, Homo sapien
agagccttccattcgccttcctgtg

SEQ ID NO: 3247375 - DNA, 25 bp, Homo sapien
tagccaggctgttaaaaagctgctt

SEQ ID NO: 3247376 - DNA, 25 bp, Homo sapien
caggaactgattgtccttgcggatt

SEQ ID NO: 3247377 - DNA, 25 bp, Homo sapien
cttgcggatttctcgaacggcccct

SEQ ID NO: 3247378 - DNA, 25 bp, Homo sapien
tctgagagttgcatcctcgccagga

SEQ ID NO: 3247379 - DNA, 25 bp, Homo sapien
aattcacgcttgtgtttgtggatca

SEQ ID NO: 3247380 - DNA, 25 bp, Homo sapien
cctgttcctccttactactgccttg

SEQ ID NO: 3247381 - DNA, 25 bp, Homo sapien
ctgttcctccttactactgccttgt

SEQ ID NO: 3247382 - DNA, 25 bp, Homo sapien
tcctgttcctccttactactgcctt

SEQ ID NO: 3247383 - DNA, 25 bp, Homo sapien
ttcctgttcctccttactactgcct

SEQ ID NO: 3247384 - DNA, 25 bp, Homo sapien
agtgtggcttcactccgtagtcatc

SEQ ID NO: 3247385 - DNA, 25 bp, Homo sapien
tccgtagtcatctgctcaactgcag

SEQ ID NO: 3247386 - DNA, 25 bp, Homo sapien
gcttcactccgtagtcatctgctca

SEQ ID NO: 3247387 - DNA, 25 bp, Homo sapien
gcctgcttgggagtgtggcttcact

SEQ ID NO: 3247388 - DNA, 25 bp, Homo sapien
tctggctttccatttcggtcagtgt

SEQ ID NO: 3247389 - DNA, 25 bp, Homo sapien
tctcacaggtcagcggccggcagag

SEQ ID NO: 3247390 - DNA, 25 bp, Homo sapien
cagccggggtgtgaaaagcttcagt

SEQ ID NO: 3247391 - DNA, 25 bp, Homo sapien
tggctttccatttcggtcagtgtgc

SEQ ID NO: 3247392 - DNA, 25 bp, Homo sapien
gagttggaggtcaccatagcctgtg

SEQ ID NO: 3247393 - DNA, 25 bp, Homo sapien
tggcacagccggaacgaagtaaagc

SEQ ID NO: 3247394 - DNA, 25 bp, Homo sapien
tctgcgatgactcacctgctgcgtg

SEQ ID NO: 3247395 - DNA, 25 bp, Homo sapien
tgagctccacgcacgggttctgtgg

SEQ ID NO: 3247396 - DNA, 25 bp, Homo sapien
tccgtgcggcctcttggaggaagca

SEQ ID NO: 3247397 - DNA, 25 bp, Homo sapien
ctgtagaggacaggatgtgccatca

SEQ ID NO: 3247398 - DNA, 25 bp, Homo sapien
aagacttgttcttgggtccagctga

SEQ ID NO: 3247399 - DNA, 25 bp, Homo sapien
aaaacccatcgggactgcagagcgc

SEQ ID NO: 3247400 - DNA, 25 bp, Homo sapien
aaggatggcagggacccgtacatga

SEQ ID NO: 3247401 - DNA, 25 bp, Homo sapien
tacatgagcacgcagcgcttcagca

SEQ ID NO: 3247402 - DNA, 25 bp, Homo sapien
cagtccgccaggtgatccgtgagga

SEQ ID NO: 3247403 - DNA, 25 bp, Homo sapien
aggtgatccgtgaggagggcttgga

SEQ ID NO: 3247404 - DNA, 25 bp, Homo sapien
tggggccctcagtctactcgcccag

SEQ ID NO: 3247405 - DNA, 25 bp, Homo sapien
tgtgattggcctctgtcgaagttgg

SEQ ID NO: 3247406 - DNA, 25 bp, Homo sapien
cggatgtgattggcctctgtcgaag

SEQ ID NO: 3247407 - DNA, 25 bp, Homo sapien
cctctgtcgaagttggggccctcag

SEQ ID NO: 3247408 - DNA, 25 bp, Homo sapien
acgagcagttccgagttcttcccaa

SEQ ID NO: 3247409 - DNA, 25 bp, Homo sapien
cagttccgagttcttcccaagcgct

SEQ ID NO: 3247410 - DNA, 25 bp, Homo sapien
tctctagcagacaccacgagcagtt

SEQ ID NO: 3247411 - DNA, 25 bp, Homo sapien
gacaccacgagcagttccgagttct

SEQ ID NO: 3247412 - DNA, 25 bp, Homo sapien
ctgaaagggtgcaccagagtggaac

SEQ ID NO: 3247413 - DNA, 25 bp, Homo sapien
gctcaggccacatccgggaacagac

SEQ ID NO: 3247414 - DNA, 25 bp, Homo sapien
atggggctgatgaggcgctcaggcc

SEQ ID NO: 3247415 - DNA, 25 bp, Homo sapien
tggggctgatgaggcgctcaggcca

SEQ ID NO: 3247416 - DNA, 25 bp, Homo sapien
ggcgctcaggccacatccgggaaca

SEQ ID NO: 3247417 - DNA, 25 bp, Homo sapien
cctgtgtgagctgcacgagaacttt

SEQ ID NO: 3247418 - DNA, 25 bp, Homo sapien
ttaagagaagcgacacagcagcgcg

SEQ ID NO: 3247419 - DNA, 25 bp, Homo sapien
cactgccttgtcgtcacgtgagaaa

SEQ ID NO: 3247420 - DNA, 25 bp, Homo sapien
cactgaaccggaagagtgggccaga

SEQ ID NO: 3247421 - DNA, 25 bp, Homo sapien
tcaggtataaacctctgggacaaag

SEQ ID NO: 3247422 - DNA, 25 bp, Homo sapien
tgctatgtaaagaatcccaagaaga

SEQ ID NO: 3247423 - DNA, 25 bp, Homo sapien
aattaataagctcaggtataaacct

SEQ ID NO: 3247424 - DNA, 25 bp, Homo sapien
tgctttgtttggagttgctatgtaa

SEQ ID NO: 3247425 - DNA, 25 bp, Homo sapien
agcacacgaacaggcccttcaccac

SEQ ID NO: 3247426 - DNA, 25 bp, Homo sapien
ccaggaacaggcagcacacgaacag

SEQ ID NO: 3247427 - DNA, 25 bp, Homo sapien
aggcagcacacgaacaggcccttca

SEQ ID NO: 3247428 - DNA, 25 bp, Homo sapien
ggaacaggcagcacacgaacaggcc

SEQ ID NO: 3247429 - DNA, 25 bp, Homo sapien
tgagcagctgactgaggcacacgag

SEQ ID NO: 3247430 - DNA, 25 bp, Homo sapien
gaagttggaaatagcagcccagtga

SEQ ID NO: 3247431 - DNA, 25 bp, Homo sapien
caccactgggtgccagaagtcggaa

SEQ ID NO: 3247432 - DNA, 25 bp, Homo sapien
cttggtgagcagctgactgaggcac

SEQ ID NO: 3247433 - DNA, 25 bp, Homo sapien
tcatgcatcgcatctcggagaacaa

SEQ ID NO: 3247434 - DNA, 25 bp, Homo sapien
gatagcgtcacttgcagattcagga

SEQ ID NO: 3247435 - DNA, 25 bp, Homo sapien
cggagaacaaatttgatagcgtcac

SEQ ID NO: 3247436 - DNA, 25 bp, Homo sapien
tggcaatgccgcccggcctttggtc

SEQ ID NO: 3247437 - DNA, 25 bp, Homo sapien
atcgccaacgtattccaaaagaaag

SEQ ID NO: 3247438 - DNA, 25 bp, Homo sapien
tagccaaatcgccaacgtattccaa

SEQ ID NO: 3247439 - DNA, 25 bp, Homo sapien
acaaccaacttatcaatgactgtga

SEQ ID NO: 3247440 - DNA, 25 bp, Homo sapien
tgggtcatctgtagccaaatcgcca

SEQ ID NO: 3247441 - DNA, 25 bp, Homo sapien
ttccttctgcgagactcgggtggtt

SEQ ID NO: 3247442 - DNA, 25 bp, Homo sapien
tttgtttccttctgcgagactcggg

SEQ ID NO: 3247443 - DNA, 25 bp, Homo sapien
caccaaaagctgctcttccatcgat

SEQ ID NO: 3247444 - DNA, 25 bp, Homo sapien
aaaagctgctcttccatcgatcttc

SEQ ID NO: 3247445 - DNA, 25 bp, Homo sapien
tctcagttcctcataggattcaggg

SEQ ID NO: 3247446 - DNA, 25 bp, Homo sapien
gatctcagttcctcataggattcag

SEQ ID NO: 3247447 - DNA, 25 bp, Homo sapien
caacagagatctcagttcctcatag

SEQ ID NO: 3247448 - DNA, 25 bp, Homo sapien
ctaacaacagagatctcagttcctc

SEQ ID NO: 3247449 - DNA, 25 bp, Homo sapien
caggcacaagctattgcaccaggct

SEQ ID NO: 3247450 - DNA, 25 bp, Homo sapien
caagctattgcaccaggcttatttt

SEQ ID NO: 3247451 - DNA, 25 bp, Homo sapien
aggaacacaggcacaagctattgca

SEQ ID NO: 3247452 - DNA, 25 bp, Homo sapien
ggcacaagctattgcaccaggctta

SEQ ID NO: 3247453 - DNA, 25 bp, Homo sapien
ggcatccttggtccccattccacaa

SEQ ID NO: 3247454 - DNA, 25 bp, Homo sapien
atccttggtccccattccacaaatg

SEQ ID NO: 3247455 - DNA, 25 bp, Homo sapien
tctaagacctggatcagcagacaca

SEQ ID NO: 3247456 - DNA, 25 bp, Homo sapien
agggcatccttggtccccattccac

SEQ ID NO: 3247457 - DNA, 25 bp, Homo sapien
agctcgtctctggtagcttttccag

SEQ ID NO: 3247458 - DNA, 25 bp, Homo sapien
tatcaaccctttcccaggagtctgc

SEQ ID NO: 3247459 - DNA, 25 bp, Homo sapien
caagtggctatctgggctgtcgctc

SEQ ID NO: 3247460 - DNA, 25 bp, Homo sapien
tgcgaacgtgtagggcagctcgtct

SEQ ID NO: 3247461 - DNA, 25 bp, Homo sapien
tcctccccgcctgaactgtcacctt

SEQ ID NO: 3247462 - DNA, 25 bp, Homo sapien
tcctggacatcttcctcgacattca

SEQ ID NO: 3247463 - DNA, 25 bp, Homo sapien
atcttcctcgacattcatctttcca

SEQ ID NO: 3247464 - DNA, 25 bp, Homo sapien
tcaccttcttcctcgttgctctcag

SEQ ID NO: 3247465 - DNA, 25 bp, Homo sapien
tatctagcacgaagccatcattcag

SEQ ID NO: 3247466 - DNA, 25 bp, Homo sapien
tttgtaggaaagcaaacgcctgtca

SEQ ID NO: 3247467 - DNA, 25 bp, Homo sapien
gatcatctgctgacatatgttttgg

SEQ ID NO: 3247468 - DNA, 25 bp, Homo sapien
gcaaacgcctgtcatctttatctag

SEQ ID NO: 3247469 - DNA, 25 bp, Homo sapien
ccaagcattcttcgaagtctctcag

SEQ ID NO: 3247470 - DNA, 25 bp, Homo sapien
ttccaagcattcttcgaagtctctc

SEQ ID NO: 3247471 - DNA, 25 bp, Homo sapien
ctttccaagcattcttcgaagtctc

SEQ ID NO: 3247472 - DNA, 25 bp, Homo sapien
caagcattcttcgaagtctctcagc

SEQ ID NO: 3247473 - DNA, 25 bp, Homo sapien
cttcatttcaaagccaagctcgcga

SEQ ID NO: 3247474 - DNA, 25 bp, Homo sapien
ctccgtcttcatcctgttagagggc

SEQ ID NO: 3247475 - DNA, 25 bp, Homo sapien
tgttagagggctgcgccttcatttc

SEQ ID NO: 3247476 - DNA, 25 bp, Homo sapien
gaaccatcatgtcatatgcatcggg

SEQ ID NO: 3247477 - DNA, 25 bp, Homo sapien
cctaaaggagacaggtagaagagcc

SEQ ID NO: 3247478 - DNA, 25 bp, Homo sapien
ttctctggagaaagtcggtcaccca

SEQ ID NO: 3247479 - DNA, 25 bp, Homo sapien
gaaagtcggtcacccaagctcagtg

SEQ ID NO: 3247480 - DNA, 25 bp, Homo sapien
gtttgtttcagtacttggctcccac

SEQ ID NO: 3247481 - DNA, 25 bp, Homo sapien
tagcttctccgtgagctcgagggca

SEQ ID NO: 3247482 - DNA, 25 bp, Homo sapien
gagctcgagggcatcttctcgttga

SEQ ID NO: 3247483 - DNA, 25 bp, Homo sapien
catcttctcgttgagcttgtctctc

SEQ ID NO: 3247484 - DNA, 25 bp, Homo sapien
tggtctagcttctccgtgagctcga

SEQ ID NO: 3247485 - DNA, 25 bp, Homo sapien
tctcccgctcctcgccttcctgttg

SEQ ID NO: 3247486 - DNA, 25 bp, Homo sapien
ttctcttgttttgacttggcaatga

SEQ ID NO: 3247487 - DNA, 25 bp, Homo sapien
gtcttcttgtgaaggagcccaccgc

SEQ ID NO: 3247488 - DNA, 25 bp, Homo sapien
cttcaatcagctctttccgggactt

SEQ ID NO: 3247489 - DNA, 25 bp, Homo sapien
tcgatcctcagcatcgctgtcactg

SEQ ID NO: 3247490 - DNA, 25 bp, Homo sapien
tcttcatttagattgtagatgcttt

SEQ ID NO: 3247491 - DNA, 25 bp, Homo sapien
tctgccaaagactggccataatgag

SEQ ID NO: 3247492 - DNA, 25 bp, Homo sapien
gtcattatgcttctcgatgtctgcc

SEQ ID NO: 3247493 - DNA, 25 bp, Homo sapien
tctccgaagcgtttatctctgaata

SEQ ID NO: 3247494 - DNA, 25 bp, Homo sapien
tctctgaatacattggatttatccc

SEQ ID NO: 3247495 - DNA, 25 bp, Homo sapien
tctgaatacattggatttatccctt

SEQ ID NO: 3247496 - DNA, 25 bp, Homo sapien
gttgctgttgtattctccgaagcgt

SEQ ID NO: 3247497 - DNA, 25 bp, Homo sapien
tagtcaagctcaaggcatgaatggc

SEQ ID NO: 3247498 - DNA, 25 bp, Homo sapien
caagttagcgaggtcacagtttagg

SEQ ID NO: 3247499 - DNA, 25 bp, Homo sapien
ggtgtttacacagcaattccgaaag

SEQ ID NO: 3247500 - DNA, 25 bp, Homo sapien
tagagtctaccggtgccaaaaggaa

SEQ ID NO: 3247501 - DNA, 25 bp, Homo sapien
ggaacttctgcctgttaactttcac

SEQ ID NO: 3247502 - DNA, 25 bp, Homo sapien
tcttccggcccaggatctggaactt

SEQ ID NO: 3247503 - DNA, 25 bp, Homo sapien
ggcagtcccacgtcgtggcgcgtct

SEQ ID NO: 3247504 - DNA, 25 bp, Homo sapien
tcctgagggcccgtgcgcgagacac

SEQ ID NO: 3247505 - DNA, 25 bp, Homo sapien
gcgccccggaggccttccttcgcgc

SEQ ID NO: 3247506 - DNA, 25 bp, Homo sapien
gcgctcccgccggcgccccggaggc

SEQ ID NO: 3247507 - DNA, 25 bp, Homo sapien
tcgccgggccccctcgcgctcccgc

SEQ ID NO: 3247508 - DNA, 25 bp, Homo sapien
ctcgcgctcccgccggcgccccgga

SEQ ID NO: 3247509 - DNA, 25 bp, Homo sapien
gcgctaccctaagacacgtgccggg

SEQ ID NO: 3247510 - DNA, 25 bp, Homo sapien
aggcgcgcgctaccctaagacacgt

SEQ ID NO: 3247511 - DNA, 25 bp, Homo sapien
acccgaagagagacaggcgcgcgct

SEQ ID NO: 3247512 - DNA, 25 bp, Homo sapien
caagggcccgagacccgaagagaga

SEQ ID NO: 3247513 - DNA, 25 bp, Homo sapien
gcgctgccatgcacagataattttg

SEQ ID NO: 3247514 - DNA, 25 bp, Homo sapien
gggaaatcatagctactgaagcctc

SEQ ID NO: 3247515 - DNA, 25 bp, Homo sapien
ggggaaatcatagctactgaagcct

SEQ ID NO: 3247516 - DNA, 25 bp, Homo sapien
tggggaaatcatagctactgaagcc

SEQ ID NO: 3247517 - DNA, 25 bp, Homo sapien
cttctgtcgatgtaggaaacatacc

SEQ ID NO: 3247518 - DNA, 25 bp, Homo sapien
gtcttcagtgggaatcttctgtcga

SEQ ID NO: 3247519 - DNA, 25 bp, Homo sapien
tcatccaagatgggaacccgggaac

SEQ ID NO: 3247520 - DNA, 25 bp, Homo sapien
gcaccttgacttgtttccctcatca

SEQ ID NO: 3247521 - DNA, 25 bp, Homo sapien
actgcttctctggaatgagtttctg

SEQ ID NO: 3247522 - DNA, 25 bp, Homo sapien
tgcttctctggaatgagtttctgtg

SEQ ID NO: 3247523 - DNA, 25 bp, Homo sapien
gcttctctggaatgagtttctgtgt

SEQ ID NO: 3247524 - DNA, 25 bp, Homo sapien
ctactgcttctctggaatgagtttc

SEQ ID NO: 3247525 - DNA, 25 bp, Homo sapien
tcattgaatctaatcctagtgggta

SEQ ID NO: 3247526 - DNA, 25 bp, Homo sapien
tgaggaacgccagactcttccaaac

SEQ ID NO: 3247527 - DNA, 25 bp, Homo sapien
tcccagtagcaatgtgttcagttgc

SEQ ID NO: 3247528 - DNA, 25 bp, Homo sapien
gcggagattgtaccgctgccctcca

SEQ ID NO: 3247529 - DNA, 25 bp, Homo sapien
aattctgtggtctgttgcatgccgg

SEQ ID NO: 3247530 - DNA, 25 bp, Homo sapien
gaatgaggctagatacctgctgacc

SEQ ID NO: 3247531 - DNA, 25 bp, Homo sapien
gatagaagctaatgcccagtcatgc

SEQ ID NO: 3247532 - DNA, 25 bp, Homo sapien
aagcttttccccgtgagatctggaa

SEQ ID NO: 3247533 - DNA, 25 bp, Homo sapien
gagattccttcggtttgtgtgtttg

SEQ ID NO: 3247534 - DNA, 25 bp, Homo sapien
tctgcccttgaaaggggcggctccc

SEQ ID NO: 3247535 - DNA, 25 bp, Homo sapien
aggtgcgcccggcatgcggtgacag

SEQ ID NO: 3247536 - DNA, 25 bp, Homo sapien
tttctctgagcatatctatctgccc

SEQ ID NO: 3247537 - DNA, 25 bp, Homo sapien
gaaccccacgccagggcgtagcgga

SEQ ID NO: 3247538 - DNA, 25 bp, Homo sapien
tgccagggcatgaagatttcccagg

SEQ ID NO: 3247539 - DNA, 25 bp, Homo sapien
accggcactgaagcccgcggaggca

SEQ ID NO: 3247540 - DNA, 25 bp, Homo sapien
acgtggctttgtgcgcttggcgaac

SEQ ID NO: 3247541 - DNA, 25 bp, Homo sapien
gggtgcactcccataaagaaacgcc

SEQ ID NO: 3247542 - DNA, 25 bp, Homo sapien
gctgcttctcgctgcactaatcaca

SEQ ID NO: 3247543 - DNA, 25 bp, Homo sapien
ccccaggtcgggactcattcctgtg

SEQ ID NO: 3247544 - DNA, 25 bp, Homo sapien
gactcattcctgtgggcggcatctt

SEQ ID NO: 3247545 - DNA, 25 bp, Homo sapien
ctccggggactgccgtgccgggcgg

SEQ ID NO: 3247546 - DNA, 25 bp, Homo sapien
ctgcggcccagagccccattcattg

SEQ ID NO: 3247547 - DNA, 25 bp, Homo sapien
agcggcgccgcgagtcggcccgagg

SEQ ID NO: 3247548 - DNA, 25 bp, Homo sapien
gccccattcattgccccggtgctga

SEQ ID NO: 3247549 - DNA, 25 bp, Homo sapien
tatgcttttataagtttgttgatca

SEQ ID NO: 3247550 - DNA, 25 bp, Homo sapien
atcattactgatgtggacttttggt

SEQ ID NO: 3247551 - DNA, 25 bp, Homo sapien
attactgatgtggacttttggtgcc

SEQ ID NO: 3247552 - DNA, 25 bp, Homo sapien
cttttataagtttgttgatcattac

SEQ ID NO: 3247553 - DNA, 25 bp, Homo sapien
cttgttctccgtgcctgctgatcat

SEQ ID NO: 3247554 - DNA, 25 bp, Homo sapien
ttgttctccgtgcctgctgatcatt

SEQ ID NO: 3247555 - DNA, 25 bp, Homo sapien
taaagtctccgttctgtgaggtgct

SEQ ID NO: 3247556 - DNA, 25 bp, Homo sapien
accaccaccgtcaagaggctgaagt

SEQ ID NO: 3247557 - DNA, 25 bp, Homo sapien
gaagcacgtgtgtccagcaagaact

SEQ ID NO: 3247558 - DNA, 25 bp, Homo sapien
gcaagaacttcatatgtggcataaa

SEQ ID NO: 3247559 - DNA, 25 bp, Homo sapien
tagcctcacaagtgagcaaggaggg

SEQ ID NO: 3247560 - DNA, 25 bp, Homo sapien
cctcacaagtgagcaaggagggttg

SEQ ID NO: 3247561 - DNA, 25 bp, Homo sapien
ggtttagcctcacaagtgagcaagg

SEQ ID NO: 3247562 - DNA, 25 bp, Homo sapien
ttctggtttagcctcacaagtgagc

SEQ ID NO: 3247563 - DNA, 25 bp, Homo sapien
gcccacttcttgattggggccttca

SEQ ID NO: 3247564 - DNA, 25 bp, Homo sapien
cacttcttgattggggccttcagca

SEQ ID NO: 3247565 - DNA, 25 bp, Homo sapien
cagccgcccacttcttgattggggc

SEQ ID NO: 3247566 - DNA, 25 bp, Homo sapien
gccgcccacttcttgattggggcct

SEQ ID NO: 3247567 - DNA, 25 bp, Homo sapien
tatttagtagataggccaagttgct

SEQ ID NO: 3247568 - DNA, 25 bp, Homo sapien
tgtgcctttgaggaaattaccctgg

SEQ ID NO: 3247569 - DNA, 25 bp, Homo sapien
gagatggcttttgttaagatctgaa

SEQ ID NO: 3247570 - DNA, 25 bp, Homo sapien
caaactcttctgttatagctggaaa

SEQ ID NO: 3247571 - DNA, 25 bp, Homo sapien
taattcattctctttagtatgccca

SEQ ID NO: 3247572 - DNA, 25 bp, Homo sapien
tatgcccacagagttgtacagccat

SEQ ID NO: 3247573 - DNA, 25 bp, Homo sapien
ttagtatgcccacagagttgtacag

SEQ ID NO: 3247574 - DNA, 25 bp, Homo sapien
ataattcattctctttagtatgccc

SEQ ID NO: 3247575 - DNA, 25 bp, Homo sapien
accctcattgtgctcagtagtggaa

SEQ ID NO: 3247576 - DNA, 25 bp, Homo sapien
tcttcaattcagagggttgcctgtc

SEQ ID NO: 3247577 - DNA, 25 bp, Homo sapien
tcaggcaggagggtaaacccagtcc

SEQ ID NO: 3247578 - DNA, 25 bp, Homo sapien
taggaactctctcaaagcagcgagt

SEQ ID NO: 3247579 - DNA, 25 bp, Homo sapien
tcagctggaaagtccactgttggga

SEQ ID NO: 3247580 - DNA, 25 bp, Homo sapien
gagacagaccagtgacgacatttga

SEQ ID NO: 3247581 - DNA, 25 bp, Homo sapien
tatggatactggaccttgtgctgcc

SEQ ID NO: 3247582 - DNA, 25 bp, Homo sapien
ggcctgttacgatgactgagcactg

SEQ ID NO: 3247583 - DNA, 25 bp, Homo sapien
gctgaaatgctcaggaggaagtaga

SEQ ID NO: 3247584 - DNA, 25 bp, Homo sapien
gagacctcacatgtagcgatagaga

SEQ ID NO: 3247585 - DNA, 25 bp, Homo sapien
tgacttggacttaagcaaggaccgt

SEQ ID NO: 3247586 - DNA, 25 bp, Homo sapien
caaggaccgtgagacacaaaaaggg

SEQ ID NO: 3247587 - DNA, 25 bp, Homo sapien
attcattgcccactaggatcccact

SEQ ID NO: 3247588 - DNA, 25 bp, Homo sapien
taggatcccactggcgaagatggtc

SEQ ID NO: 3247589 - DNA, 25 bp, Homo sapien
tcattgcccactaggatcccactgg

SEQ ID NO: 3247590 - DNA, 25 bp, Homo sapien
tcattcattgcccactaggatccca

SEQ ID NO: 3247591 - DNA, 25 bp, Homo sapien
aagctccggacgagcctctcggaag

SEQ ID NO: 3247592 - DNA, 25 bp, Homo sapien
ccagcggggatgcttctaagctccg

SEQ ID NO: 3247593 - DNA, 25 bp, Homo sapien
gggatgcttctaagctccggacgag

SEQ ID NO: 3247594 - DNA, 25 bp, Homo sapien
ctctcggaagccttggtgattggtg

SEQ ID NO: 3247595 - DNA, 25 bp, Homo sapien
tgtgccctgtgccttcggtggtatt

SEQ ID NO: 3247596 - DNA, 25 bp, Homo sapien
tgttgggatctggaagtcgcttccc

SEQ ID NO: 3247597 - DNA, 25 bp, Homo sapien
cctgtgccttcggtggtatttgatt

SEQ ID NO: 3247598 - DNA, 25 bp, Homo sapien
gtccccttgccgagctgtgccctgt

SEQ ID NO: 3247599 - DNA, 25 bp, Homo sapien
aaggtgcccctcagtgggacgccca

SEQ ID NO: 3247600 - DNA, 25 bp, Homo sapien
gtgcccctcagtgggacgcccacct

SEQ ID NO: 3247601 - DNA, 25 bp, Homo sapien
gcccctcagtgggacgcccacctcc

SEQ ID NO: 3247602 - DNA, 25 bp, Homo sapien
ggaaggtgcccctcagtgggacgcc

SEQ ID NO: 3247603 - DNA, 25 bp, Homo sapien
gcagggcagaaaatccacccagaaa

SEQ ID NO: 3247604 - DNA, 25 bp, Homo sapien
tgtcaggcagggcagaaaatccacc

SEQ ID NO: 3247605 - DNA, 25 bp, Homo sapien
tcaggcagggcagaaaatccaccca

SEQ ID NO: 3247606 - DNA, 25 bp, Homo sapien
agggcagaaaatccacccagaaatg

SEQ ID NO: 3247607 - DNA, 25 bp, Homo sapien
cccagtgccaggcagtagggatgat

SEQ ID NO: 3247608 - DNA, 25 bp, Homo sapien
cttagtcgagtggagatgccccagt

SEQ ID NO: 3247609 - DNA, 25 bp, Homo sapien
tgccaggcagtagggatgatgtctc

SEQ ID NO: 3247610 - DNA, 25 bp, Homo sapien
atgccccagtgccaggcagtaggga

SEQ ID NO: 3247611 - DNA, 25 bp, Homo sapien
gctgcccttcttggggcagcccaca

SEQ ID NO: 3247612 - DNA, 25 bp, Homo sapien
ctgcccttcttggggcagcccacac

SEQ ID NO: 3247613 - DNA, 25 bp, Homo sapien
tcagctgcccttcttggggcagccc

SEQ ID NO: 3247614 - DNA, 25 bp, Homo sapien
cagctgcccttcttggggcagccca

SEQ ID NO: 3247615 - DNA, 25 bp, Homo sapien
tcctgcagttggtcaggcctgagga

SEQ ID NO: 3247616 - DNA, 25 bp, Homo sapien
cacaggtgccgtgggctccacagag

SEQ ID NO: 3247617 - DNA, 25 bp, Homo sapien
ctgagagtctcctgcagttggtcag

SEQ ID NO: 3247618 - DNA, 25 bp, Homo sapien
tgcacaggtgccgtgggctccacag

SEQ ID NO: 3247619 - DNA, 25 bp, Homo sapien
tggggctctcggcaggctgtggtcc

SEQ ID NO: 3247620 - DNA, 25 bp, Homo sapien
cggttccggttccgctgcatctggg

SEQ ID NO: 3247621 - DNA, 25 bp, Homo sapien
gccgatgcccttgggcggcacttct

SEQ ID NO: 3247622 - DNA, 25 bp, Homo sapien
tttcgggtgccgatgcccttgggcg

SEQ ID NO: 3247623 - DNA, 25 bp, Homo sapien
ctaagaatagcagcgctccaccgag

SEQ ID NO: 3247624 - DNA, 25 bp, Homo sapien
gcctccatgtgggagccgtgcccag

SEQ ID NO: 3247625 - DNA, 25 bp, Homo sapien
cctccatgtgggagccgtgcccagg

SEQ ID NO: 3247626 - DNA, 25 bp, Homo sapien
atagcagcgctccaccgagcggctg

SEQ ID NO: 3247627 - DNA, 25 bp, Homo sapien
tccaaggcccggaaacagtcattcc

SEQ ID NO: 3247628 - DNA, 25 bp, Homo sapien
attacagtccaaggcccggaaacag

SEQ ID NO: 3247629 - DNA, 25 bp, Homo sapien
tgtccttagaattacagtccaaggc

SEQ ID NO: 3247630 - DNA, 25 bp, Homo sapien
tcctcttgtccttagaattacagtc

SEQ ID NO: 3247631 - DNA, 25 bp, Homo sapien
ccattgttaagggtacagctcaggg

SEQ ID NO: 3247632 - DNA, 25 bp, Homo sapien
tatccacctaatccatcgacgagcg

SEQ ID NO: 3247633 - DNA, 25 bp, Homo sapien
cacatgtaagttagaccgggcaata

SEQ ID NO: 3247634 - DNA, 25 bp, Homo sapien
cgacgagcgcttaggtgggttccac

SEQ ID NO: 3247635 - DNA, 25 bp, Homo sapien
cttcttgggccacccccctgctggg

SEQ ID NO: 3247636 - DNA, 25 bp, Homo sapien
ccctggctttcacggggatggacta

SEQ ID NO: 3247637 - DNA, 25 bp, Homo sapien
tgctgggcatgagttctctcacagg

SEQ ID NO: 3247638 - DNA, 25 bp, Homo sapien
agttctctcacaggctcggtgaccc

SEQ ID NO: 3247639 - DNA, 25 bp, Homo sapien
gaaaaccagcttgcgggaacgcagt

SEQ ID NO: 3247640 - DNA, 25 bp, Homo sapien
ggagcgggacttcctcggacaccga

SEQ ID NO: 3247641 - DNA, 25 bp, Homo sapien
agtgcgggtacacaccgtgcgcacc

SEQ ID NO: 3247642 - DNA, 25 bp, Homo sapien
acaccgacggcgaaggacagagaca

SEQ ID NO: 3247643 - DNA, 25 bp, Homo sapien
agactgtgcgtcctttattgccttc

SEQ ID NO: 3247644 - DNA, 25 bp, Homo sapien
gcagagagactgtgcgtcctttatt

SEQ ID NO: 3247645 - DNA, 25 bp, Homo sapien
caccataaggatagggcctatgggc

SEQ ID NO: 3247646 - DNA, 25 bp, Homo sapien
gccttcctctgatgcgagcaccata

SEQ ID NO: 3247647 - DNA, 25 bp, Homo sapien
gacaggtgcacagcttgtccttaac

SEQ ID NO: 3247648 - DNA, 25 bp, Homo sapien
taacacgcttggtgctgaagaggct

SEQ ID NO: 3247649 - DNA, 25 bp, Homo sapien
aggctcacagtactgtgaacattgg

SEQ ID NO: 3247650 - DNA, 25 bp, Homo sapien
cacagtactgtgaacattggcaatg

SEQ ID NO: 3247651 - DNA, 25 bp, Homo sapien
gaaccagcagtgctgtatttcagca

SEQ ID NO: 3247652 - DNA, 25 bp, Homo sapien
ggaaccagcagtgctgtatttcagc

SEQ ID NO: 3247653 - DNA, 25 bp, Homo sapien
tggaaccagcagtgctgtatttcag

SEQ ID NO: 3247654 - DNA, 25 bp, Homo sapien
aggatcctgcagagtttcccctcct

SEQ ID NO: 3247655 - DNA, 25 bp, Homo sapien
gaggatcctgcagagtttcccctcc

SEQ ID NO: 3247656 - DNA, 25 bp, Homo sapien
ggatcctgcagagtttcccctcctt

SEQ ID NO: 3247657 - DNA, 25 bp, Homo sapien
tttatgggatgtgttgccgctggct

SEQ ID NO: 3247658 - DNA, 25 bp, Homo sapien
taggagctttatgggatgtgttgcc

SEQ ID NO: 3247659 - DNA, 25 bp, Homo sapien
aagcttaggagctttatgggatgtg

SEQ ID NO: 3247660 - DNA, 25 bp, Homo sapien
gagctttatgggatgtgttgccgct

SEQ ID NO: 3247661 - DNA, 25 bp, Homo sapien
tgggatacggcctttgccgacgcac

SEQ ID NO: 3247662 - DNA, 25 bp, Homo sapien
tttgccgacgcaccttgctcttagg

SEQ ID NO: 3247663 - DNA, 25 bp, Homo sapien
taggatacggcctttgccgacgtgt

SEQ ID NO: 3247664 - DNA, 25 bp, Homo sapien
gactgtcttggacatgagcccgcgc

SEQ ID NO: 3247665 - DNA, 25 bp, Homo sapien
tgtgcacacggcatgaggtccgtct

SEQ ID NO: 3247666 - DNA, 25 bp, Homo sapien
ctgcggcagcgtgtgcacacggcat

SEQ ID NO: 3247667 - DNA, 25 bp, Homo sapien
atgaggtccgtctccaccaagccag

SEQ ID NO: 3247668 - DNA, 25 bp, Homo sapien
acggcatgaggtccgtctccaccaa

SEQ ID NO: 3247669 - DNA, 25 bp, Homo sapien
ggtgtatttgggttccagccagact

SEQ ID NO: 3247670 - DNA, 25 bp, Homo sapien
gtatttgggttccagccagactcac

SEQ ID NO: 3247671 - DNA, 25 bp, Homo sapien
tgtatttgggttccagccagactca

SEQ ID NO: 3247672 - DNA, 25 bp, Homo sapien
ctggtgtatttgggttccagccaga

SEQ ID NO: 3247673 - DNA, 25 bp, Homo sapien
aagcgtgcaggggcttaggaagcat

SEQ ID NO: 3247674 - DNA, 25 bp, Homo sapien
cagaggaagcgtgcaggggcttagg

SEQ ID NO: 3247675 - DNA, 25 bp, Homo sapien
aggaagcgtgcaggggcttaggaag

SEQ ID NO: 3247676 - DNA, 25 bp, Homo sapien
gaggaagcgtgcaggggcttaggaa

SEQ ID NO: 3247677 - DNA, 25 bp, Homo sapien
ctcccaggccctttgttgaaggctg

SEQ ID NO: 3247678 - DNA, 25 bp, Homo sapien
agaggtcttcctggaagggactgtt

SEQ ID NO: 3247679 - DNA, 25 bp, Homo sapien
gcagcctgagcctgcgtggagtccc

SEQ ID NO: 3247680 - DNA, 25 bp, Homo sapien
gacgcggtcggcactcgcagcactg

SEQ ID NO: 3247681 - DNA, 25 bp, Homo sapien
cagctcactccctttggcaccgtgt

SEQ ID NO: 3247682 - DNA, 25 bp, Homo sapien
gccttggtgattccagaatctgcca

SEQ ID NO: 3247683 - DNA, 25 bp, Homo sapien
agaatctgccagctcactccctttg

SEQ ID NO: 3247684 - DNA, 25 bp, Homo sapien
cactccctttggcaccgtgtcctgc

SEQ ID NO: 3247685 - DNA, 25 bp, Homo sapien
gactctctctgccttcggaggacgg

SEQ ID NO: 3247686 - DNA, 25 bp, Homo sapien
cctggaggccgtgattgctgatgtt

SEQ ID NO: 3247687 - DNA, 25 bp, Homo sapien
tcacactgtgtgcacgggcagtgcg

SEQ ID NO: 3247688 - DNA, 25 bp, Homo sapien
tgctgcatcgtagctcaggcctagg

SEQ ID NO: 3247689 - DNA, 25 bp, Homo sapien
aagatcacggtgctgctgagattct

SEQ ID NO: 3247690 - DNA, 25 bp, Homo sapien
caggaagctgatctccgggagctgt

SEQ ID NO: 3247691 - DNA, 25 bp, Homo sapien
gatggtcctgatgtccggggaatat

SEQ ID NO: 3247692 - DNA, 25 bp, Homo sapien
gagattcttgtgcttgaccaggaag

SEQ ID NO: 3247693 - DNA, 25 bp, Homo sapien
gaggcccatgacagtaagagtctag

SEQ ID NO: 3247694 - DNA, 25 bp, Homo sapien
tgggtggactgcatagaagacattg

SEQ ID NO: 3247695 - DNA, 25 bp, Homo sapien
tgtccatcattatgtcacacagtgt

SEQ ID NO: 3247696 - DNA, 25 bp, Homo sapien
tctttttaataagcagaggcccatg

SEQ ID NO: 3247697 - DNA, 25 bp, Homo sapien
attcctgtttggaagagaaagccga

SEQ ID NO: 3247698 - DNA, 25 bp, Homo sapien
catctattcctgtttggaagagaaa

SEQ ID NO: 3247699 - DNA, 25 bp, Homo sapien
ttagagcagcagaagcttccagggg

SEQ ID NO: 3247700 - DNA, 25 bp, Homo sapien
gtgaccgtccgcagcgatcagggcc

SEQ ID NO: 3247701 - DNA, 25 bp, Homo sapien
tctgcagagtttcgaaggtggccgt

SEQ ID NO: 3247702 - DNA, 25 bp, Homo sapien
tcatgaggcggccacaagatgggtc

SEQ ID NO: 3247703 - DNA, 25 bp, Homo sapien
acgtcgccgtggacaggtctgcaga

SEQ ID NO: 3247704 - DNA, 25 bp, Homo sapien
ctggaagttagaagaagcagcagag

SEQ ID NO: 3247705 - DNA, 25 bp, Homo sapien
gaagcagcagagttggcacagggag

SEQ ID NO: 3247706 - DNA, 25 bp, Homo sapien
agaagcagcagagttggcacaggga

SEQ ID NO: 3247707 - DNA, 25 bp, Homo sapien
gttagaagaagcagcagagttggca

SEQ ID NO: 3247708 - DNA, 25 bp, Homo sapien
gaagtggactgctttcccttttgtg

SEQ ID NO: 3247709 - DNA, 25 bp, Homo sapien
gtggactgctttcccttttgtgtag

SEQ ID NO: 3247710 - DNA, 25 bp, Homo sapien
ctaatgtctgtagccagcacaagct

SEQ ID NO: 3247711 - DNA, 25 bp, Homo sapien
tgtctctgcctaatgtctgtagcca

SEQ ID NO: 3247712 - DNA, 25 bp, Homo sapien
tttggtcccagagctagctttccca

SEQ ID NO: 3247713 - DNA, 25 bp, Homo sapien
tcgtgggtcttgatagcttccacca

SEQ ID NO: 3247714 - DNA, 25 bp, Homo sapien
cagcgatggcagatcttgtcatatc

SEQ ID NO: 3247715 - DNA, 25 bp, Homo sapien
cagcttagagctcccttgtcttcca

SEQ ID NO: 3247716 - DNA, 25 bp, Homo sapien
gcagactcgttggtcctgcgggctt

SEQ ID NO: 3247717 - DNA, 25 bp, Homo sapien
gggcttgacgccctcgtcaggcctt

SEQ ID NO: 3247718 - DNA, 25 bp, Homo sapien
cgacagtggagcagactcgttggtc

SEQ ID NO: 3247719 - DNA, 25 bp, Homo sapien
tcccttgacagtgcggtcgggaacc

SEQ ID NO: 3247720 - DNA, 25 bp, Homo sapien
ggagccacgtcacgtgcgatcacca

SEQ ID NO: 3247721 - DNA, 25 bp, Homo sapien
tccaccaaggttgtgacagtatcaa

SEQ ID NO: 3247722 - DNA, 25 bp, Homo sapien
ccaccaaggttgtgacagtatcaac

SEQ ID NO: 3247723 - DNA, 25 bp, Homo sapien
ctcagtgggagccacgtcacgtgcg

SEQ ID NO: 3247724 - DNA, 25 bp, Homo sapien
tcagacgtccatcttcttggccatc

SEQ ID NO: 3247725 - DNA, 25 bp, Homo sapien
tcttccctttcagcatcttaggtag

SEQ ID NO: 3247726 - DNA, 25 bp, Homo sapien
ccatctgctgctgcatggtggcagg

SEQ ID NO: 3247727 - DNA, 25 bp, Homo sapien
ccttcttccctttcagcatcttagg

SEQ ID NO: 3247728 - DNA, 25 bp, Homo sapien
tcttcaaactacatgcgactgtgtc

SEQ ID NO: 3247729 - DNA, 25 bp, Homo sapien
gtcaggtgggtgggaggagccttca

SEQ ID NO: 3247730 - DNA, 25 bp, Homo sapien
tcaggtgggtgggaggagccttcac

SEQ ID NO: 3247731 - DNA, 25 bp, Homo sapien
cagggggtcaggtgggtgggaggag

SEQ ID NO: 3247732 - DNA, 25 bp, Homo sapien
ggtcaggtgggtgggaggagccttc

SEQ ID NO: 3247733 - DNA, 25 bp, Homo sapien
catggtggccccgatggaagctgcc

SEQ ID NO: 3247734 - DNA, 25 bp, Homo sapien
attccactttgagttccatggtggc

SEQ ID NO: 3247735 - DNA, 25 bp, Homo sapien
tttgagttccatggtggccccgatg

SEQ ID NO: 3247736 - DNA, 25 bp, Homo sapien
tggccccgatggaagctgccctcat

SEQ ID NO: 3247737 - DNA, 25 bp, Homo sapien
gagagctgcatagtttatatggcat

SEQ ID NO: 3247738 - DNA, 25 bp, Homo sapien
tcaggccccatgatgtaagtctctc

SEQ ID NO: 3247739 - DNA, 25 bp, Homo sapien
gtggcgttggccatcacgctgtgta

SEQ ID NO: 3247740 - DNA, 25 bp, Homo sapien
cacgctgtgtaaacagggatcccgg

SEQ ID NO: 3247741 - DNA, 25 bp, Homo sapien
acactgggcagcggcactcggagtc

SEQ ID NO: 3247742 - DNA, 25 bp, Homo sapien
tgggatcactaggacagatggcttg

SEQ ID NO: 3247743 - DNA, 25 bp, Homo sapien
ctgggaagcagtggacagaagcccc

SEQ ID NO: 3247744 - DNA, 25 bp, Homo sapien
catgggtttcatcctgaccacggcc

SEQ ID NO: 3247745 - DNA, 25 bp, Homo sapien
gaatggtatcgcagtgaggacagct

SEQ ID NO: 3247746 - DNA, 25 bp, Homo sapien
tctgggcctgtgtgtggtagtaatg

SEQ ID NO: 3247747 - DNA, 25 bp, Homo sapien
gagggaacccgatgcttttctgggc

SEQ ID NO: 3247748 - DNA, 25 bp, Homo sapien
tggagggaacccgatgcttttctgg

SEQ ID NO: 3247749 - DNA, 25 bp, Homo sapien
tagtaatgccggttgaccggccgtc

SEQ ID NO: 3247750 - DNA, 25 bp, Homo sapien
atcagacgaagcgaagggcgctgct

SEQ ID NO: 3247751 - DNA, 25 bp, Homo sapien
cagcatcagacgaagcgaagggcgc

SEQ ID NO: 3247752 - DNA, 25 bp, Homo sapien
agcatcagacgaagcgaagggcgct

SEQ ID NO: 3247753 - DNA, 25 bp, Homo sapien
agacgaagcgaagggcgctgctgct

SEQ ID NO: 3247754 - DNA, 25 bp, Homo sapien
ctggccgctgtgcttctaggcctct

SEQ ID NO: 3247755 - DNA, 25 bp, Homo sapien
tggccgctgtgcttctaggcctctg

SEQ ID NO: 3247756 - DNA, 25 bp, Homo sapien
ttcaggatgacagccttagagcctt

SEQ ID NO: 3247757 - DNA, 25 bp, Homo sapien
tagagccttctctcggcctggtggg

SEQ ID NO: 3247758 - DNA, 25 bp, Homo sapien
agtggtggcgtccctccccgagcat

SEQ ID NO: 3247759 - DNA, 25 bp, Homo sapien
ccctccccgagcatcctctcgtgtt

SEQ ID NO: 3247760 - DNA, 25 bp, Homo sapien
tgggtgtccccagtggatgctccat

SEQ ID NO: 3247761 - DNA, 25 bp, Homo sapien
ggtgtccccagtggatgctccatct

SEQ ID NO: 3247762 - DNA, 25 bp, Homo sapien
tcactgggtgtccccagtggatgct

SEQ ID NO: 3247763 - DNA, 25 bp, Homo sapien
actgggtgtccccagtggatgctcc

SEQ ID NO: 3247764 - DNA, 25 bp, Homo sapien
tgccccacaccttaaacttcctggc

SEQ ID NO: 3247765 - DNA, 25 bp, Homo sapien
gctttccacatggcttgtggtccct

SEQ ID NO: 3247766 - DNA, 25 bp, Homo sapien
tgctttccacatggcttgtggtccc

SEQ ID NO: 3247767 - DNA, 25 bp, Homo sapien
ctgtctttgccccacaccttaaact

SEQ ID NO: 3247768 - DNA, 25 bp, Homo sapien
gccaaggaggatggcccaggtggca

SEQ ID NO: 3247769 - DNA, 25 bp, Homo sapien
cctgtccttttctgtgtgggccctg

SEQ ID NO: 3247770 - DNA, 25 bp, Homo sapien
gtgtgggccctgctcgctgctggct

SEQ ID NO: 3247771 - DNA, 25 bp, Homo sapien
ggcagggctgcctgtccttttctgt

SEQ ID NO: 3247772 - DNA, 25 bp, Homo sapien
tgtggcccacgcatcaggaatggga

SEQ ID NO: 3247773 - DNA, 25 bp, Homo sapien
tattctgccgagtcaaaaaggtagg

SEQ ID NO: 3247774 - DNA, 25 bp, Homo sapien
gactcaaggatctcttagggttcta

SEQ ID NO: 3247775 - DNA, 25 bp, Homo sapien
ggttctatctagttcccagcagaag

SEQ ID NO: 3247776 - DNA, 25 bp, Homo sapien
taataagccaagaacaaacttacat

SEQ ID NO: 3247777 - DNA, 25 bp, Homo sapien
taattactttgtgtattaacaggca

SEQ ID NO: 3247778 - DNA, 25 bp, Homo sapien
catctctcgctctcctacttagtgg

SEQ ID NO: 3247779 - DNA, 25 bp, Homo sapien
taaataatctccaaactagacaaaa

SEQ ID NO: 3247780 - DNA, 25 bp, Homo sapien
ttacaagtcctgagtggggctctgc

SEQ ID NO: 3247781 - DNA, 25 bp, Homo sapien
caagtcctgagtggggctctgccat

SEQ ID NO: 3247782 - DNA, 25 bp, Homo sapien
tacaagtcctgagtggggctctgcc

SEQ ID NO: 3247783 - DNA, 25 bp, Homo sapien
ctttacaagtcctgagtggggctct

SEQ ID NO: 3247784 - DNA, 25 bp, Homo sapien
gtagcgctccccctcgtcaccctca

SEQ ID NO: 3247785 - DNA, 25 bp, Homo sapien
gcgtgtagcgctccccctcgtcacc

SEQ ID NO: 3247786 - DNA, 25 bp, Homo sapien
cagcgtgtagcgctccccctcgtca

SEQ ID NO: 3247787 - DNA, 25 bp, Homo sapien
caggagccagcgtgtagcgctcccc

SEQ ID NO: 3247788 - DNA, 25 bp, Homo sapien
gctccatgcgggagtgaggcggcag

SEQ ID NO: 3247789 - DNA, 25 bp, Homo sapien
gcttggcgggaacagcccaaagacc

SEQ ID NO: 3247790 - DNA, 25 bp, Homo sapien
gttggggcaggcttggcgggaacag

SEQ ID NO: 3247791 - DNA, 25 bp, Homo sapien
tgcagggctccatgcgggagtgagg

SEQ ID NO: 3247792 - DNA, 25 bp, Homo sapien
gctggggaagggcagtgccgggatg

SEQ ID NO: 3247793 - DNA, 25 bp, Homo sapien
tggggaagggcagtgccgggatggg

SEQ ID NO: 3247794 - DNA, 25 bp, Homo sapien
cacaggccccccaggcttgcagaag

SEQ ID NO: 3247795 - DNA, 25 bp, Homo sapien
ggccccccaggcttgcagaagccat

SEQ ID NO: 3247796 - DNA, 25 bp, Homo sapien
aggtcgagctgtgcgccaggcatgg

SEQ ID NO: 3247797 - DNA, 25 bp, Homo sapien
aggcatggccggaaagctcaggagg

SEQ ID NO: 3247798 - DNA, 25 bp, Homo sapien
agagtgaggtggtccggccccgtga

SEQ ID NO: 3247799 - DNA, 25 bp, Homo sapien
ttcctgggtgttccgcgcccgtctc

SEQ ID NO: 3247800 - DNA, 25 bp, Homo sapien
cttctctgggatccgcggtgggcct

SEQ ID NO: 3247801 - DNA, 25 bp, Homo sapien
gaacggctcgccctttccgagctag

SEQ ID NO: 3247802 - DNA, 25 bp, Homo sapien
tcacgccccgtcctggtgaggcggt

SEQ ID NO: 3247803 - DNA, 25 bp, Homo sapien
cctgtgcagcgcatgatcgggtgct

SEQ ID NO: 3247804 - DNA, 25 bp, Homo sapien
ccagaatcttctggggatgtggctg

SEQ ID NO: 3247805 - DNA, 25 bp, Homo sapien
ggagcacgaagcaggggcaatgggc

SEQ ID NO: 3247806 - DNA, 25 bp, Homo sapien
gaggtggagcacgaagcaggggcaa

SEQ ID NO: 3247807 - DNA, 25 bp, Homo sapien
tgggctggggcccagaatcttctgg

SEQ ID NO: 3247808 - DNA, 25 bp, Homo sapien
aatctggctgatgtggtcgtcaggc

SEQ ID NO: 3247809 - DNA, 25 bp, Homo sapien
tacactggcagataagttgttcacg

SEQ ID NO: 3247810 - DNA, 25 bp, Homo sapien
tcaggcatcagaagtgagcggctcc

SEQ ID NO: 3247811 - DNA, 25 bp, Homo sapien
tcacgggagtgtattggaatctggc

SEQ ID NO: 3247812 - DNA, 25 bp, Homo sapien
ccactgcaagtgagtgcccaggtga

SEQ ID NO: 3247813 - DNA, 25 bp, Homo sapien
tggcgcacggctggacaagcatgac

SEQ ID NO: 3247814 - DNA, 25 bp, Homo sapien
tgtgggaacaagtccccactgcaag

SEQ ID NO: 3247815 - DNA, 25 bp, Homo sapien
caagcatgacagttgtcgcggagcc

SEQ ID NO: 3247816 - DNA, 25 bp, Homo sapien
aggccatggtcgctgaggaagggca

SEQ ID NO: 3247817 - DNA, 25 bp, Homo sapien
cagtgtggaggccatggtcgctgag

SEQ ID NO: 3247818 - DNA, 25 bp, Homo sapien
gtggaatattctcttgtaggcagtg

SEQ ID NO: 3247819 - DNA, 25 bp, Homo sapien
cgtggaatattctcttgtaggcagt

SEQ ID NO: 3247820 - DNA, 25 bp, Homo sapien
ccagacctctgttgccctgagcctg

SEQ ID NO: 3247821 - DNA, 25 bp, Homo sapien
agatgctggttgcagattcttctct

SEQ ID NO: 3247822 - DNA, 25 bp, Homo sapien
gcatcagcgcgtcccacttcagatg

SEQ ID NO: 3247823 - DNA, 25 bp, Homo sapien
ctggagtctgtgccggcgagcatca

SEQ ID NO: 3247824 - DNA, 25 bp, Homo sapien
tcctagccgcccctgctctttgccc

SEQ ID NO: 3247825 - DNA, 25 bp, Homo sapien
agcgccatcctagccgcccctgctc

SEQ ID NO: 3247826 - DNA, 25 bp, Homo sapien
agcagcgccatcctagccgcccctg

SEQ ID NO: 3247827 - DNA, 25 bp, Homo sapien
agagtgagcagcgccatcctagccg

SEQ ID NO: 3247828 - DNA, 25 bp, Homo sapien
atcacaggagcagcgatggcccatg

SEQ ID NO: 3247829 - DNA, 25 bp, Homo sapien
tgcccatcacaggagcagcgatggc

SEQ ID NO: 3247830 - DNA, 25 bp, Homo sapien
aggagcagcgatggcccatgcccat

SEQ ID NO: 3247831 - DNA, 25 bp, Homo sapien
agcgatggcccatgcccatattctt

SEQ ID NO: 3247832 - DNA, 25 bp, Homo sapien
taaaaaccagttcctgcggctgagg

SEQ ID NO: 3247833 - DNA, 25 bp, Homo sapien
gcttcaggggtgtgtgctctttccc

SEQ ID NO: 3247834 - DNA, 25 bp, Homo sapien
tgccccagagcctctgataaaaacc

SEQ ID NO: 3247835 - DNA, 25 bp, Homo sapien
cagcatctgtgacgtggctgcccca

SEQ ID NO: 3247836 - DNA, 25 bp, Homo sapien
cacacagtgcctgtcagggggctta

SEQ ID NO: 3247837 - DNA, 25 bp, Homo sapien
acacagtgcctgtcagggggcttac

SEQ ID NO: 3247838 - DNA, 25 bp, Homo sapien
tcacacagtgcctgtcagggggctt

SEQ ID NO: 3247839 - DNA, 25 bp, Homo sapien
catagctggtgtaggtcgcagggcc

SEQ ID NO: 3247840 - DNA, 25 bp, Homo sapien
gaggaggatgcgcatagctggtgta

SEQ ID NO: 3247841 - DNA, 25 bp, Homo sapien
gctggcagtggaccccggatggcca

SEQ ID NO: 3247842 - DNA, 25 bp, Homo sapien
agggctggcagtggaccccggatgg

SEQ ID NO: 3247843 - DNA, 25 bp, Homo sapien
ttgttagatgtagggcaccgaggca

SEQ ID NO: 3247844 - DNA, 25 bp, Homo sapien
ccgttgttagatgtagggcaccgag

SEQ ID NO: 3247845 - DNA, 25 bp, Homo sapien
tcacattctgccgttgttagatgta

SEQ ID NO: 3247846 - DNA, 25 bp, Homo sapien
tctgccgttgttagatgtagggcac

SEQ ID NO: 3247847 - DNA, 25 bp, Homo sapien
tgcaggtgagatggccagactcagg

SEQ ID NO: 3247848 - DNA, 25 bp, Homo sapien
ctgcaggtgagatggccagactcag

SEQ ID NO: 3247849 - DNA, 25 bp, Homo sapien
gcaggtgagatggccagactcaggc

SEQ ID NO: 3247850 - DNA, 25 bp, Homo sapien
gtgccaagaggcctgccagaatccc

SEQ ID NO: 3247851 - DNA, 25 bp, Homo sapien
ctccgttggtcaagctctgtgccaa

SEQ ID NO: 3247852 - DNA, 25 bp, Homo sapien
acagaagcccgttcttgtggcttcc

SEQ ID NO: 3247853 - DNA, 25 bp, Homo sapien
gcacagaagcccgttcttgtggctt

SEQ ID NO: 3247854 - DNA, 25 bp, Homo sapien
caggtggatgttcccgctgtgacca

SEQ ID NO: 3247855 - DNA, 25 bp, Homo sapien
ccacaggtggatgttcccgctgtga

SEQ ID NO: 3247856 - DNA, 25 bp, Homo sapien
ctccacaggtggatgttcccgctgt

SEQ ID NO: 3247857 - DNA, 25 bp, Homo sapien
tggatgttcccgctgtgaccacctc

SEQ ID NO: 3247858 - DNA, 25 bp, Homo sapien
tgtggagactatcggggagctccca

SEQ ID NO: 3247859 - DNA, 25 bp, Homo sapien
tcctgcgtacggcgtctgtgccagc

SEQ ID NO: 3247860 - DNA, 25 bp, Homo sapien
tctgaagtcggggtgtggagactat

SEQ ID NO: 3247861 - DNA, 25 bp, Homo sapien
ggaaagccggggaactgtgcggctc

SEQ ID NO: 3247862 - DNA, 25 bp, Homo sapien
gcttgccatagagcagacatcccgt

SEQ ID NO: 3247863 - DNA, 25 bp, Homo sapien
catagagcagacatcccgtcagcac

SEQ ID NO: 3247864 - DNA, 25 bp, Homo sapien
tgccatagagcagacatcccgtcag

SEQ ID NO: 3247865 - DNA, 25 bp, Homo sapien
aatacagcttgccatagagcagaca

SEQ ID NO: 3247866 - DNA, 25 bp, Homo sapien
ccttagcctcgtctcttgctgcgta

SEQ ID NO: 3247867 - DNA, 25 bp, Homo sapien
tctcttgctgcgtaaaagtccaggg

SEQ ID NO: 3247868 - DNA, 25 bp, Homo sapien
ggagagccctgccttagcctcgtct

SEQ ID NO: 3247869 - DNA, 25 bp, Homo sapien
tgctgcgtaaaagtccagggctttg

SEQ ID NO: 3247870 - DNA, 25 bp, Homo sapien
ccctgggccagtggacatgggacca

SEQ ID NO: 3247871 - DNA, 25 bp, Homo sapien
ctgggccagtggacatgggaccagc

SEQ ID NO: 3247872 - DNA, 25 bp, Homo sapien
gggccagtggacatgggaccagcat

SEQ ID NO: 3247873 - DNA, 25 bp, Homo sapien
ctccctgggccagtggacatgggac

SEQ ID NO: 3247874 - DNA, 25 bp, Homo sapien
gacatgttcaaggagcagcagctgc

SEQ ID NO: 3247875 - DNA, 25 bp, Homo sapien
cagacatgttcaaggagcagcagct

SEQ ID NO: 3247876 - DNA, 25 bp, Homo sapien
catgttcaaggagcagcagctgcag

SEQ ID NO: 3247877 - DNA, 25 bp, Homo sapien
ccagacatgttcaaggagcagcagc

SEQ ID NO: 3247878 - DNA, 25 bp, Homo sapien
tgaagtccccgctgtaccaggaatg

SEQ ID NO: 3247879 - DNA, 25 bp, Homo sapien
actccagtgtgtccacgccaaaaaa

SEQ ID NO: 3247880 - DNA, 25 bp, Homo sapien
catgaagtttgatagctacactcgc

SEQ ID NO: 3247881 - DNA, 25 bp, Homo sapien
gcctcggttcagaccactccagtgt

SEQ ID NO: 3247882 - DNA, 25 bp, Homo sapien
ggccgatccctgaatgaagagctgg

SEQ ID NO: 3247883 - DNA, 25 bp, Homo sapien
aaggcgcgtttttctcgtggtcgcg

SEQ ID NO: 3247884 - DNA, 25 bp, Homo sapien
aaaatccggccgatccctgaatgaa

SEQ ID NO: 3247885 - DNA, 25 bp, Homo sapien
ccaggagcaccgggaggtcccagaa

SEQ ID NO: 3247886 - DNA, 25 bp, Homo sapien
gcatgccaatggaggcctgtgtcgc

SEQ ID NO: 3247887 - DNA, 25 bp, Homo sapien
ccaatggaggcctgtgtcgccgaga

SEQ ID NO: 3247888 - DNA, 25 bp, Homo sapien
gtcgccgagagtcgcagggctctgt

SEQ ID NO: 3247889 - DNA, 25 bp, Homo sapien
agtcgcagggctctgtgtcctctgc

SEQ ID NO: 3247890 - DNA, 25 bp, Homo sapien
acatcctgtccggactctgtgagcg

SEQ ID NO: 3247891 - DNA, 25 bp, Homo sapien
ctttggcacccgagaaggacaaggc

SEQ ID NO: 3247892 - DNA, 25 bp, Homo sapien
tgctgcattcatctcccggatggga

SEQ ID NO: 3247893 - DNA, 25 bp, Homo sapien
tctgtgagcggcatggcatcaacgg

SEQ ID NO: 3247894 - DNA, 25 bp, Homo sapien
gcatcttggagtcaagggacctgcg

SEQ ID NO: 3247895 - DNA, 25 bp, Homo sapien
agggacctgcgcctagaaaagcgca

SEQ ID NO: 3247896 - DNA, 25 bp, Homo sapien
tgcgcctagaaaagcgcaccttgtt

SEQ ID NO: 3247897 - DNA, 25 bp, Homo sapien
gtcaagggacctgcgcctagaaaag

SEQ ID NO: 3247898 - DNA, 25 bp, Homo sapien
taaccggtcagtgggactcaaggcc

SEQ ID NO: 3247899 - DNA, 25 bp, Homo sapien
gctggatcttgttccgattaaccgg

SEQ ID NO: 3247900 - DNA, 25 bp, Homo sapien
gccagatacggcctggacctcagtg

SEQ ID NO: 3247901 - DNA, 25 bp, Homo sapien
accaagcccgtcacggaggtgctgc

SEQ ID NO: 3247902 - DNA, 25 bp, Homo sapien
accttggcgcccctatatcgagtct

SEQ ID NO: 3247903 - DNA, 25 bp, Homo sapien
cgcccctatatcgagtctggacgga

SEQ ID NO: 3247904 - DNA, 25 bp, Homo sapien
gacagcgggttgtcttggaggagaa

SEQ ID NO: 3247905 - DNA, 25 bp, Homo sapien
tatatcgagtctggacggacagcgg

SEQ ID NO: 3247906 - DNA, 25 bp, Homo sapien
cagaacacagctgtaaattccagct

SEQ ID NO: 3247907 - DNA, 25 bp, Homo sapien
cacagctgtaaattccagctccaga

SEQ ID NO: 3247908 - DNA, 25 bp, Homo sapien
gaacacagctgtaaattccagctcc

SEQ ID NO: 3247909 - DNA, 25 bp, Homo sapien
gaaacagaacacagctgtaaattcc

SEQ ID NO: 3247910 - DNA, 25 bp, Homo sapien
ggagaggaaagaacactaggcaagt

SEQ ID NO: 3247911 - DNA, 25 bp, Homo sapien
gaggaaagaacactaggcaagtcta

SEQ ID NO: 3247912 - DNA, 25 bp, Homo sapien
gagaggaaagaacactaggcaagtc

SEQ ID NO: 3247913 - DNA, 25 bp, Homo sapien
ggaaagaacactaggcaagtctaat

SEQ ID NO: 3247914 - DNA, 25 bp, Homo sapien
cctgtggcctggaagacatgtttct

SEQ ID NO: 3247915 - DNA, 25 bp, Homo sapien
ggctgttgggatcactccaccgaaa

SEQ ID NO: 3247916 - DNA, 25 bp, Homo sapien
cagttttgagactgagtgccaggcc

SEQ ID NO: 3247917 - DNA, 25 bp, Homo sapien
tcagcatctgggtgactgcggtccg

SEQ ID NO: 3247918 - DNA, 25 bp, Homo sapien
gcagggatgtttccgtgagccacaa

SEQ ID NO: 3247919 - DNA, 25 bp, Homo sapien
ccgcgggtgtcacgggcatttctca

SEQ ID NO: 3247920 - DNA, 25 bp, Homo sapien
gaagcccgctgtgttcatagcagga

SEQ ID NO: 3247921 - DNA, 25 bp, Homo sapien
gcccgtcctcggaagagccttgaga

SEQ ID NO: 3247922 - DNA, 25 bp, Homo sapien
ttggaggccacgtgtggcatgggag

SEQ ID NO: 3247923 - DNA, 25 bp, Homo sapien
ggaggccacgtgtggcatgggaggg

SEQ ID NO: 3247924 - DNA, 25 bp, Homo sapien
tggaggccacgtgtggcatgggagg

SEQ ID NO: 3247925 - DNA, 25 bp, Homo sapien
tttggaggccacgtgtggcatggga

SEQ ID NO: 3247926 - DNA, 25 bp, Homo sapien
gccaggacacgcctggatgagaaag

SEQ ID NO: 3247927 - DNA, 25 bp, Homo sapien
ccaggacacgcctggatgagaaagc

SEQ ID NO: 3247928 - DNA, 25 bp, Homo sapien
aggacacgcctggatgagaaagcct

SEQ ID NO: 3247929 - DNA, 25 bp, Homo sapien
caggacacgcctggatgagaaagcc

SEQ ID NO: 3247930 - DNA, 25 bp, Homo sapien
cctggcctgagtccccctccatccg

SEQ ID NO: 3247931 - DNA, 25 bp, Homo sapien
cacccctggcctgagtccccctcca

SEQ ID NO: 3247932 - DNA, 25 bp, Homo sapien
cctccatccgtcttggtggacacct

SEQ ID NO: 3247933 - DNA, 25 bp, Homo sapien
ccccctccatccgtcttggtggaca

SEQ ID NO: 3247934 - DNA, 25 bp, Homo sapien
cttccaggagtaataaattctggac

SEQ ID NO: 3247935 - DNA, 25 bp, Homo sapien
ctgttcttccaggagtaataaattc

SEQ ID NO: 3247936 - DNA, 25 bp, Homo sapien
ttgagtctgttcttccaggagtaat

SEQ ID NO: 3247937 - DNA, 25 bp, Homo sapien
gagtctgttcttccaggagtaataa

SEQ ID NO: 3247938 - DNA, 25 bp, Homo sapien
actggactggcttacaacttttctt

SEQ ID NO: 3247939 - DNA, 25 bp, Homo sapien
cactggactggcttacaacttttct

SEQ ID NO: 3247940 - DNA, 25 bp, Homo sapien
cttttctttctcatttgaaactttg

SEQ ID NO: 3247941 - DNA, 25 bp, Homo sapien
ttctcatttgaaactttgtttccac

SEQ ID NO: 3247942 - DNA, 25 bp, Homo sapien
agggacctcagaactgtagatcgag

SEQ ID NO: 3247943 - DNA, 25 bp, Homo sapien
gaccctgcggccatttcagggacct

SEQ ID NO: 3247944 - DNA, 25 bp, Homo sapien
tcatggaggctgcttccggaagctt

SEQ ID NO: 3247945 - DNA, 25 bp, Homo sapien
tgtagatcgaggagggtcttcacct

SEQ ID NO: 3247946 - DNA, 25 bp, Homo sapien
gaggcactggccccggacattcgcc

SEQ ID NO: 3247947 - DNA, 25 bp, Homo sapien
agccactggcgggtggcaatgtgcc

SEQ ID NO: 3247948 - DNA, 25 bp, Homo sapien
tagtcagggacaggtcccttggcca

SEQ ID NO: 3247949 - DNA, 25 bp, Homo sapien
ctagtcagggacaggtcccttggcc

SEQ ID NO: 3247950 - DNA, 25 bp, Homo sapien
tgtgccacgaccatggggtctggca

SEQ ID NO: 3247951 - DNA, 25 bp, Homo sapien
tggccgacagaagaaagcaccacag

SEQ ID NO: 3247952 - DNA, 25 bp, Homo sapien
ggtcgtcagtttcctgtggccgaca

SEQ ID NO: 3247953 - DNA, 25 bp, Homo sapien
cagctgggccttcaaacaatgagaa

SEQ ID NO: 3247954 - DNA, 25 bp, Homo sapien
gagtcctgggagttagagctctgca

SEQ ID NO: 3247955 - DNA, 25 bp, Homo sapien
cccttgatggctgagttctttggcc

SEQ ID NO: 3247956 - DNA, 25 bp, Homo sapien
aggaggtgcggttggctctgcagga

SEQ ID NO: 3247957 - DNA, 25 bp, Homo sapien
tcctgctccattgagtggggagaga

SEQ ID NO: 3247958 - DNA, 25 bp, Homo sapien
cttagtgggaggaggtgcggttggc

SEQ ID NO: 3247959 - DNA, 25 bp, Homo sapien
tctgcccgcaggaacctcagtgtgg

SEQ ID NO: 3247960 - DNA, 25 bp, Homo sapien
tggacggagtctccccacgctcgat

SEQ ID NO: 3247961 - DNA, 25 bp, Homo sapien
cctcagtgtggagtgtcgaggaggg

SEQ ID NO: 3247962 - DNA, 25 bp, Homo sapien
atgtccaaggtcctctgcccgcagg

SEQ ID NO: 3247963 - DNA, 25 bp, Homo sapien
aaggcgatggctgcgcctcactcat

SEQ ID NO: 3247964 - DNA, 25 bp, Homo sapien
gatggctgcgcctcactcatcctga

SEQ ID NO: 3247965 - DNA, 25 bp, Homo sapien
tggctgcgcctcactcatcctgaga

SEQ ID NO: 3247966 - DNA, 25 bp, Homo sapien
ctggcccaaggcgatggctgcgcct

SEQ ID NO: 3247967 - DNA, 25 bp, Homo sapien
tcagacatctttgagcacgaatggg

SEQ ID NO: 3247968 - DNA, 25 bp, Homo sapien
tttgagcacgaatgggtgtcccgaa

SEQ ID NO: 3247969 - DNA, 25 bp, Homo sapien
tgtcccgaagggctgtgtaggagcc

SEQ ID NO: 3247970 - DNA, 25 bp, Homo sapien
aaagggcacttcagacatctttgag

SEQ ID NO: 3247971 - DNA, 25 bp, Homo sapien
aggccttgcccggttgaccgtgtct

SEQ ID NO: 3247972 - DNA, 25 bp, Homo sapien
tccagggccactgatgtcagctctg

SEQ ID NO: 3247973 - DNA, 25 bp, Homo sapien
tggcgagggtgtcgcgtgggcacgt

SEQ ID NO: 3247974 - DNA, 25 bp, Homo sapien
acgctccgcagacgccgcatggaat

SEQ ID NO: 3247975 - DNA, 25 bp, Homo sapien
aagggccagccgattcccggttgct

SEQ ID NO: 3247976 - DNA, 25 bp, Homo sapien
ggaagcgatgctcacagaagccgaa

SEQ ID NO: 3247977 - DNA, 25 bp, Homo sapien
tcactgaaagagtatccgaggtact

SEQ ID NO: 3247978 - DNA, 25 bp, Homo sapien
tgagccaggcccaagtggtagcgtc

SEQ ID NO: 3247979 - DNA, 25 bp, Homo sapien
tgtgtgggtcagaaagcctcagccc

SEQ ID NO: 3247980 - DNA, 25 bp, Homo sapien
ggaaacttataacctcacgcgcttg

SEQ ID NO: 3247981 - DNA, 25 bp, Homo sapien
gatttccaactccagcaatgacagg

SEQ ID NO: 3247982 - DNA, 25 bp, Homo sapien
gaaagtgctcacctggcaagatctg

SEQ ID NO: 3247983 - DNA, 25 bp, Homo sapien
tgggaataacgctaagaccaggctg

SEQ ID NO: 3247984 - DNA, 25 bp, Homo sapien
caagccagaggatcggaaattattc

SEQ ID NO: 3247985 - DNA, 25 bp, Homo sapien
tatctgaggaaggactcacacctag

SEQ ID NO: 3247986 - DNA, 25 bp, Homo sapien
cggccggctcgagctgtttttaaga

SEQ ID NO: 3247987 - DNA, 25 bp, Homo sapien
tagggcacaggattaaagcaccacg

SEQ ID NO: 3247988 - DNA, 25 bp, Homo sapien
ggaataagattagcgagcgccggct

SEQ ID NO: 3247989 - DNA, 25 bp, Homo sapien
gaacttgtttcaggaggcccactta

SEQ ID NO: 3247990 - DNA, 25 bp, Homo sapien
catggtctcccacatacaaaagagg

SEQ ID NO: 3247991 - DNA, 25 bp, Homo sapien
tggctttaaatcaggccgggccgtc

SEQ ID NO: 3247992 - DNA, 25 bp, Homo sapien
gacacaggaacattctcggagccgg

SEQ ID NO: 3247993 - DNA, 25 bp, Homo sapien
ggaagctggctatgacgcgatccct

SEQ ID NO: 3247994 - DNA, 25 bp, Homo sapien
ttagtgaccagccaacaagcgggtg

SEQ ID NO: 3247995 - DNA, 25 bp, Homo sapien
tcagagttcgttgtgccgagctctg

SEQ ID NO: 3247996 - DNA, 25 bp, Homo sapien
gccggacaggtcctgcagatgcttc

SEQ ID NO: 3247997 - DNA, 25 bp, Homo sapien
gagatcctgccggacaggtcctgca

SEQ ID NO: 3247998 - DNA, 25 bp, Homo sapien
tcgttgtgccgagctctggagatcc

SEQ ID NO: 3247999 - DNA, 25 bp, Homo sapien
tccccggtcctggaacccgtgcgca

SEQ ID NO: 3248000 - DNA, 25 bp, Homo sapien
tcatctttcctgcaggggaactgtg

SEQ ID NO: 3248001 - DNA, 25 bp, Homo sapien
gaactgtggcctccccggtcctgga

SEQ ID NO: 3248002 - DNA, 25 bp, Homo sapien
cctgcaggggaactgtggcctcccc

SEQ ID NO: 3248003 - DNA, 25 bp, Homo sapien
gcttctcgcggctgcggctcacacg

SEQ ID NO: 3248004 - DNA, 25 bp, Homo sapien
tctggtagtggttgtgcttctcgat

SEQ ID NO: 3248005 - DNA, 25 bp, Homo sapien
gcttctcgtgcgcaatctccagctg

SEQ ID NO: 3248006 - DNA, 25 bp, Homo sapien
gcttctcgattttggcttcgaagtg

SEQ ID NO: 3248007 - DNA, 25 bp, Homo sapien
caaggtttccataggtgagtgttcc

SEQ ID NO: 3248008 - DNA, 25 bp, Homo sapien
gccacgccatcttgtggtcccgggt

SEQ ID NO: 3248009 - DNA, 25 bp, Homo sapien
gaacaaggtttccataggtgagtgt

SEQ ID NO: 3248010 - DNA, 25 bp, Homo sapien
gtgagtgttcccttcccgtgctcgc

SEQ ID NO: 3248011 - DNA, 25 bp, Homo sapien
ggacgccaaaggacggcgccatacc

SEQ ID NO: 3248012 - DNA, 25 bp, Homo sapien
ctgcaaggacgccaaaggacggcgc

SEQ ID NO: 3248013 - DNA, 25 bp, Homo sapien
tgcaaggacgccaaaggacggcgcc

SEQ ID NO: 3248014 - DNA, 25 bp, Homo sapien
aaggacgccaaaggacggcgccata

SEQ ID NO: 3248015 - DNA, 25 bp, Homo sapien
cggtgacatgggcaatgagggggcg

SEQ ID NO: 3248016 - DNA, 25 bp, Homo sapien
gtgacatgggcaatgagggggcggc

SEQ ID NO: 3248017 - DNA, 25 bp, Homo sapien
gacatgggcaatgagggggcggcag

SEQ ID NO: 3248018 - DNA, 25 bp, Homo sapien
cttgcggtgacatgggcaatgaggg

SEQ ID NO: 3248019 - DNA, 25 bp, Homo sapien
catcacactagcaacgggtcccagc

SEQ ID NO: 3248020 - DNA, 25 bp, Homo sapien
ttggcagccctaagccgaccccttc

SEQ ID NO: 3248021 - DNA, 25 bp, Homo sapien
tccctgtctctgcaaatggcacccc

SEQ ID NO: 3248022 - DNA, 25 bp, Homo sapien
gttcccagccagaccccatgtccag

SEQ ID NO: 3248023 - DNA, 25 bp, Homo sapien
ccggaaactgcaagagaatcttcac

SEQ ID NO: 3248024 - DNA, 25 bp, Homo sapien
cggaaactgcaagagaatcttcacc

SEQ ID NO: 3248025 - DNA, 25 bp, Homo sapien
ggaaactgcaagagaatcttcacca

SEQ ID NO: 3248026 - DNA, 25 bp, Homo sapien
ctagaaggagagggccgtgtttcct

SEQ ID NO: 3248027 - DNA, 25 bp, Homo sapien
tccagctccttgtccgtgaggttgg

SEQ ID NO: 3248028 - DNA, 25 bp, Homo sapien
tccttgtccgtgaggttggcggact

SEQ ID NO: 3248029 - DNA, 25 bp, Homo sapien
gtcaatcaccctgggctcctcgaac

SEQ ID NO: 3248030 - DNA, 25 bp, Homo sapien
gctccttgtccgtgaggttggcgga

SEQ ID NO: 3248031 - DNA, 25 bp, Homo sapien
ccttgatgtcgctcaggtccgaggg

SEQ ID NO: 3248032 - DNA, 25 bp, Homo sapien
gggctaatgacgttctcgtggattt

SEQ ID NO: 3248033 - DNA, 25 bp, Homo sapien
agcctcagtgctgtagccctggtgg

SEQ ID NO: 3248034 - DNA, 25 bp, Homo sapien
ggccctggttgatgctgcgcagctt

SEQ ID NO: 3248035 - DNA, 25 bp, Homo sapien
ccagcaggacgttgtactcgtgaac

SEQ ID NO: 3248036 - DNA, 25 bp, Homo sapien
gttcttcgccggagaatttcccaga

SEQ ID NO: 3248037 - DNA, 25 bp, Homo sapien
tgtgatgcaggaactcccgccagag

SEQ ID NO: 3248038 - DNA, 25 bp, Homo sapien
cgttgtactcgtgaactttctcttt

SEQ ID NO: 3248039 - DNA, 25 bp, Homo sapien
ggtcacctgccgagcgtccttcttt

SEQ ID NO: 3248040 - DNA, 25 bp, Homo sapien
gcttttccagcctggggtcatccag

SEQ ID NO: 3248041 - DNA, 25 bp, Homo sapien
ctgagggagttgctggtcacctgcc

SEQ ID NO: 3248042 - DNA, 25 bp, Homo sapien
tccagcccgtcttcctgggtgccac

SEQ ID NO: 3248043 - DNA, 25 bp, Homo sapien
ctgtttcctggatgaccactggaga

SEQ ID NO: 3248044 - DNA, 25 bp, Homo sapien
tgtttcctggatgaccactggagat

SEQ ID NO: 3248045 - DNA, 25 bp, Homo sapien
caggagcaccgagcccttagagctc

SEQ ID NO: 3248046 - DNA, 25 bp, Homo sapien
agcagcagggactatggaaggttct

SEQ ID NO: 3248047 - DNA, 25 bp, Homo sapien
cttagagctcctggggaggatgaac

SEQ ID NO: 3248048 - DNA, 25 bp, Homo sapien
tcagcagcagggactatggaaggtt

SEQ ID NO: 3248049 - DNA, 25 bp, Homo sapien
aacccgggcgctgcaatgcctgagg

SEQ ID NO: 3248050 - DNA, 25 bp, Homo sapien
catcagcgcgtgtgaaaagcagggc

SEQ ID NO: 3248051 - DNA, 25 bp, Homo sapien
gacagcaacaagtgcgatggcagcc

SEQ ID NO: 3248052 - DNA, 25 bp, Homo sapien
gggctacagcagactccagacatgg

SEQ ID NO: 3248053 - DNA, 25 bp, Homo sapien
tatcttcagatcagcgtggagctcg

SEQ ID NO: 3248054 - DNA, 25 bp, Homo sapien
cattgaggttgcgtatgagtctcgc

SEQ ID NO: 3248055 - DNA, 25 bp, Homo sapien
catcttcgtccaagccgtcaagctt

SEQ ID NO: 3248056 - DNA, 25 bp, Homo sapien
caagctttagtttcttccaggcgag

SEQ ID NO: 3248057 - DNA, 25 bp, Homo sapien
tgcactgcccgggagggtctgagat

SEQ ID NO: 3248058 - DNA, 25 bp, Homo sapien
tctgagatgcgaggcccacagtgat

SEQ ID NO: 3248059 - DNA, 25 bp, Homo sapien
ccgggagggtctgagatgcgaggcc

SEQ ID NO: 3248060 - DNA, 25 bp, Homo sapien
gtgctgcactgcccgggagggtctg

SEQ ID NO: 3248061 - DNA, 25 bp, Homo sapien
gaagacccagggctgctgaagtcct

SEQ ID NO: 3248062 - DNA, 25 bp, Homo sapien
agggctgctgaagtcctgggcccat

SEQ ID NO: 3248063 - DNA, 25 bp, Homo sapien
agctgaagacccagggctgctgaag

SEQ ID NO: 3248064 - DNA, 25 bp, Homo sapien
gctgaagacccagggctgctgaagt

SEQ ID NO: 3248065 - DNA, 25 bp, Homo sapien
ccgccaccctccaagcttccgttat

SEQ ID NO: 3248066 - DNA, 25 bp, Homo sapien
tcacagcaccgccaccctccaagct

SEQ ID NO: 3248067 - DNA, 25 bp, Homo sapien
caccgccaccctccaagcttccgtt

SEQ ID NO: 3248068 - DNA, 25 bp, Homo sapien
cagcaccgccaccctccaagcttcc

SEQ ID NO: 3248069 - DNA, 25 bp, Homo sapien
cctcggggtgccggccgccacctgc

SEQ ID NO: 3248070 - DNA, 25 bp, Homo sapien
ctcggggtgccggccgccacctgct

SEQ ID NO: 3248071 - DNA, 25 bp, Homo sapien
acacggcgtcgtcgccggcacgggt

SEQ ID NO: 3248072 - DNA, 25 bp, Homo sapien
cacggcgtcgtcgccggcacgggta

SEQ ID NO: 3248073 - DNA, 25 bp, Homo sapien
tcacacggcgtcgtcgccggcacgg

SEQ ID NO: 3248074 - DNA, 25 bp, Homo sapien
cacacggcgtcgtcgccggcacggg

SEQ ID NO: 3248075 - DNA, 25 bp, Homo sapien
tcggggcgccccacctgacacttgg

SEQ ID NO: 3248076 - DNA, 25 bp, Homo sapien
gtcggggcgccccacctgacacttg

SEQ ID NO: 3248077 - DNA, 25 bp, Homo sapien
cggggcgccccacctgacacttggg

SEQ ID NO: 3248078 - DNA, 25 bp, Homo sapien
actcctctccggactcgcgtttcgg

SEQ ID NO: 3248079 - DNA, 25 bp, Homo sapien
tgggctggttcttctcccgcgagta

SEQ ID NO: 3248080 - DNA, 25 bp, Homo sapien
gacggcttgggctggttcttctccc

SEQ ID NO: 3248081 - DNA, 25 bp, Homo sapien
cagctggttcaacttctccatgcgg

SEQ ID NO: 3248082 - DNA, 25 bp, Homo sapien
cgccgggagcccgcgcagaaacgac

SEQ ID NO: 3248083 - DNA, 25 bp, Homo sapien
gcagaaacgacctgaccctccgcgg

SEQ ID NO: 3248084 - DNA, 25 bp, Homo sapien
ggagcccgcgcagaaacgacctgac

SEQ ID NO: 3248085 - DNA, 25 bp, Homo sapien
agaaacgacctgaccctccgcggcg

SEQ ID NO: 3248086 - DNA, 25 bp, Homo sapien
gtttggactatagattgttattctc

SEQ ID NO: 3248087 - DNA, 25 bp, Homo sapien
ttgagtttggactatagattgttat

SEQ ID NO: 3248088 - DNA, 25 bp, Homo sapien
tggactatagattgttattctctcc

SEQ ID NO: 3248089 - DNA, 25 bp, Homo sapien
gactatagattgttattctctccag

SEQ ID NO: 3248090 - DNA, 25 bp, Homo sapien
ggacaagggaaggtgcccgcgagga

SEQ ID NO: 3248091 - DNA, 25 bp, Homo sapien
ggagccagcgcaagggtgcgagaag

SEQ ID NO: 3248092 - DNA, 25 bp, Homo sapien
tgcgagaaggagcttgcaaaggaag

SEQ ID NO: 3248093 - DNA, 25 bp, Homo sapien
ccgcgaggaatttgcctgtagaccc

SEQ ID NO: 3248094 - DNA, 25 bp, Homo sapien
tagagacgatgtaaacctgtctgtc

SEQ ID NO: 3248095 - DNA, 25 bp, Homo sapien
taatagagacgatgtaaacctgtct

SEQ ID NO: 3248096 - DNA, 25 bp, Homo sapien
gacgatgtaaacctgtctgtcagta

SEQ ID NO: 3248097 - DNA, 25 bp, Homo sapien
gaaaagtaatagagacgatgtaaac

SEQ ID NO: 3248098 - DNA, 25 bp, Homo sapien
ctcctgaaacgtctccagggtctgc

SEQ ID NO: 3248099 - DNA, 25 bp, Homo sapien
cctggcaggtctcctgaaacgtctc

SEQ ID NO: 3248100 - DNA, 25 bp, Homo sapien
tggtgacaacagtgctgttgcatgg

SEQ ID NO: 3248101 - DNA, 25 bp, Homo sapien
acctgggcgctcagttgctctgtga

SEQ ID NO: 3248102 - DNA, 25 bp, Homo sapien
gcgatttcgtctggagtccccggac

SEQ ID NO: 3248103 - DNA, 25 bp, Homo sapien
ggtaggtggctgtgcgatttcgtct

SEQ ID NO: 3248104 - DNA, 25 bp, Homo sapien
tgtgcgatttcgtctggagtccccg

SEQ ID NO: 3248105 - DNA, 25 bp, Homo sapien
tggctgtgcgatttcgtctggagtc

SEQ ID NO: 3248106 - DNA, 25 bp, Homo sapien
gtgcctccttagatcctgcgtttga

SEQ ID NO: 3248107 - DNA, 25 bp, Homo sapien
tgtgcctccttagatcctgcgtttg

SEQ ID NO: 3248108 - DNA, 25 bp, Homo sapien
gacctgggcatagatggtttcttcg

SEQ ID NO: 3248109 - DNA, 25 bp, Homo sapien
agatggtttcttcggcatcacgacc

SEQ ID NO: 3248110 - DNA, 25 bp, Homo sapien
tcttcggcatcacgacctgaaggtg

SEQ ID NO: 3248111 - DNA, 25 bp, Homo sapien
ggcacctttatggattaagacctgg

SEQ ID NO: 3248112 - DNA, 25 bp, Homo sapien
tgggcaccaggaagacgcattccct

SEQ ID NO: 3248113 - DNA, 25 bp, Homo sapien
tctgtgtctccttcgtgggcaccag

SEQ ID NO: 3248114 - DNA, 25 bp, Homo sapien
tggggtcgctgtggacgctttccct

SEQ ID NO: 3248115 - DNA, 25 bp, Homo sapien
gacgctttcccttccgaagcctgga

SEQ ID NO: 3248116 - DNA, 25 bp, Homo sapien
ctgtaggaagctctagaacaggtca

SEQ ID NO: 3248117 - DNA, 25 bp, Homo sapien
ggccagtgcggcctgactctgcctg

SEQ ID NO: 3248118 - DNA, 25 bp, Homo sapien
acagctggtggtgtgtgggtgcaca

SEQ ID NO: 3248119 - DNA, 25 bp, Homo sapien
tgcggcctgactctgcctgtaggaa

SEQ ID NO: 3248120 - DNA, 25 bp, Homo sapien
gccagagcatggtcctccgtggagt

SEQ ID NO: 3248121 - DNA, 25 bp, Homo sapien
tgccagagcatggtcctccgtggag

SEQ ID NO: 3248122 - DNA, 25 bp, Homo sapien
tctgccagagcatggtcctccgtgg

SEQ ID NO: 3248123 - DNA, 25 bp, Homo sapien
cagagcatggtcctccgtggagtcg

SEQ ID NO: 3248124 - DNA, 25 bp, Homo sapien
tgtcgcctctccagcatgactgtat

SEQ ID NO: 3248125 - DNA, 25 bp, Homo sapien
tgtctgcgtggggcctctcctgcgt

SEQ ID NO: 3248126 - DNA, 25 bp, Homo sapien
tgcatgtcgcctctccagcatgact

SEQ ID NO: 3248127 - DNA, 25 bp, Homo sapien
atgtcgcctctccagcatgactgta

SEQ ID NO: 3248128 - DNA, 25 bp, Homo sapien
cactgccatggcatttctcagatca

SEQ ID NO: 3248129 - DNA, 25 bp, Homo sapien
agaacactgccatggcatttctcag

SEQ ID NO: 3248130 - DNA, 25 bp, Homo sapien
ttagaacactgccatggcatttctc

SEQ ID NO: 3248131 - DNA, 25 bp, Homo sapien
gaacactgccatggcatttctcaga

SEQ ID NO: 3248132 - DNA, 25 bp, Homo sapien
cggtgagtctgtccaggatgagcca

SEQ ID NO: 3248133 - DNA, 25 bp, Homo sapien
atgagccactccaggctaccgaggg

SEQ ID NO: 3248134 - DNA, 25 bp, Homo sapien
tccccctgcgtcatagcggtgagtc

SEQ ID NO: 3248135 - DNA, 25 bp, Homo sapien
tggcagttccccctgcgtcatagcg

SEQ ID NO: 3248136 - DNA, 25 bp, Homo sapien
gggttactggcacccagggaggaga

SEQ ID NO: 3248137 - DNA, 25 bp, Homo sapien
ctggcacccagggaggagaagccct

SEQ ID NO: 3248138 - DNA, 25 bp, Homo sapien
gagaagccctgagctgtgcggctgc

SEQ ID NO: 3248139 - DNA, 25 bp, Homo sapien
agaagccctgagctgtgcggctgct

SEQ ID NO: 3248140 - DNA, 25 bp, Homo sapien
gccagtgggctcagcccgatgtctc

SEQ ID NO: 3248141 - DNA, 25 bp, Homo sapien
gaggccagtgggctcagcccgatgt

SEQ ID NO: 3248142 - DNA, 25 bp, Homo sapien
tgggctcagcccgatgtctccattc

SEQ ID NO: 3248143 - DNA, 25 bp, Homo sapien
gggctcagcccgatgtctccattct

SEQ ID NO: 3248144 - DNA, 25 bp, Homo sapien
agggtttgcacattgagtggcgcct

SEQ ID NO: 3248145 - DNA, 25 bp, Homo sapien
gggagggtttgcacattgagtggcg

SEQ ID NO: 3248146 - DNA, 25 bp, Homo sapien
gtttgcacattgagtggcgcctgct

SEQ ID NO: 3248147 - DNA, 25 bp, Homo sapien
tgcacattgagtggcgcctgctcca

SEQ ID NO: 3248148 - DNA, 25 bp, Homo sapien
gtcacacgacattgcagcactgccg

SEQ ID NO: 3248149 - DNA, 25 bp, Homo sapien
tggcaagactgtgacacacggcggc

SEQ ID NO: 3248150 - DNA, 25 bp, Homo sapien
ccgtggcaatggcaagactgtgaca

SEQ ID NO: 3248151 - DNA, 25 bp, Homo sapien
caatggcaagactgtgacacacggc

SEQ ID NO: 3248152 - DNA, 25 bp, Homo sapien
tccaccgtggcaacggcaagactgt

SEQ ID NO: 3248153 - DNA, 25 bp, Homo sapien
ctccaccgtggcaacggcaagactg

SEQ ID NO: 3248154 - DNA, 25 bp, Homo sapien
tgaggtgtcggttgctttgcaccca

SEQ ID NO: 3248155 - DNA, 25 bp, Homo sapien
tgacgtttcccagacgccgttgcgg

SEQ ID NO: 3248156 - DNA, 25 bp, Homo sapien
ctggcagagtggacctgacgtttcc

SEQ ID NO: 3248157 - DNA, 25 bp, Homo sapien
caaaggggctgtcatgcacggagat

SEQ ID NO: 3248158 - DNA, 25 bp, Homo sapien
gggctgtgcaaacgggaacagccac

SEQ ID NO: 3248159 - DNA, 25 bp, Homo sapien
gcagggctgtgcaaacgggaacagc

SEQ ID NO: 3248160 - DNA, 25 bp, Homo sapien
tgcaaacgggaacagccacagcgcg

SEQ ID NO: 3248161 - DNA, 25 bp, Homo sapien
ctgtgcaaacgggaacagccacagc

SEQ ID NO: 3248162 - DNA, 25 bp, Homo sapien
ctccgctagactcgggggcccggtg

SEQ ID NO: 3248163 - DNA, 25 bp, Homo sapien
caggtgtccaacagggtcgggaagg

SEQ ID NO: 3248164 - DNA, 25 bp, Homo sapien
ggcccggtgcaggtgtccaacaggg

SEQ ID NO: 3248165 - DNA, 25 bp, Homo sapien
gcgggaaggctccgctagactcggg

SEQ ID NO: 3248166 - DNA, 25 bp, Homo sapien
cagaaaattacccttccctgccttg

SEQ ID NO: 3248167 - DNA, 25 bp, Homo sapien
gcaagggcagaggcgcttcccgcac

SEQ ID NO: 3248168 - DNA, 25 bp, Homo sapien
ctggaggggcaagggcagaggcgct

SEQ ID NO: 3248169 - DNA, 25 bp, Homo sapien
ggaggggcaagggcagaggcgcttc

SEQ ID NO: 3248170 - DNA, 25 bp, Homo sapien
gggcaagggcagaggcgcttcccgc

SEQ ID NO: 3248171 - DNA, 25 bp, Homo sapien
cacagcccagcggtcagggagcagg

SEQ ID NO: 3248172 - DNA, 25 bp, Homo sapien
agctgctggacctctggggtgaccc

SEQ ID NO: 3248173 - DNA, 25 bp, Homo sapien
ctggtgggcactgatttccaggagc

SEQ ID NO: 3248174 - DNA, 25 bp, Homo sapien
tctggggtgacccaggtggccctcc

SEQ ID NO: 3248175 - DNA, 25 bp, Homo sapien
caaggagcttggtccatatatactc

SEQ ID NO: 3248176 - DNA, 25 bp, Homo sapien
tgtttttctgacgccgtggaccctc

SEQ ID NO: 3248177 - DNA, 25 bp, Homo sapien
gcattcgtccactctgtccttgagg

SEQ ID NO: 3248178 - DNA, 25 bp, Homo sapien
tgtgcgtgcctgacagcaaggagct

SEQ ID NO: 3248179 - DNA, 25 bp, Homo sapien
tcttcccttggtgcccagtgcggtg

SEQ ID NO: 3248180 - DNA, 25 bp, Homo sapien
cccagtgcggtgctgacaacaggtg

SEQ ID NO: 3248181 - DNA, 25 bp, Homo sapien
ggtgtcaactcatggaatccccgaa

SEQ ID NO: 3248182 - DNA, 25 bp, Homo sapien
agagtccctttctgggctcttccct

SEQ ID NO: 3248183 - DNA, 25 bp, Homo sapien
tgcgcgggtcggtttccaggactac

SEQ ID NO: 3248184 - DNA, 25 bp, Homo sapien
tctgaagacgcccagcaagtgggtg

SEQ ID NO: 3248185 - DNA, 25 bp, Homo sapien
tcccgcgtgctctgcgttggtcgat

SEQ ID NO: 3248186 - DNA, 25 bp, Homo sapien
tcacgtgctctgtgctcttctccag

SEQ ID NO: 3248187 - DNA, 25 bp, Homo sapien
tctggtttgtctctttccggcagcc

SEQ ID NO: 3248188 - DNA, 25 bp, Homo sapien
tgtgtttgattcgtcctgccgcaat

SEQ ID NO: 3248189 - DNA, 25 bp, Homo sapien
tcaggtttcacccacactcgggatg

SEQ ID NO: 3248190 - DNA, 25 bp, Homo sapien
ggtgagaaagggtccacccactcag

SEQ ID NO: 3248191 - DNA, 25 bp, Homo sapien
ttcttgggtgcaccggtaaaggcga

SEQ ID NO: 3248192 - DNA, 25 bp, Homo sapien
tgcgcccagggttcttgggtgcacc

SEQ ID NO: 3248193 - DNA, 25 bp, Homo sapien
gctgcgcccagggttcttgggtgca

SEQ ID NO: 3248194 - DNA, 25 bp, Homo sapien
ctgctgcgcccagggttcttgggtg

SEQ ID NO: 3248195 - DNA, 25 bp, Homo sapien
ctgcccatagcggtgagcaggtcgg

SEQ ID NO: 3248196 - DNA, 25 bp, Homo sapien
caggtcggccgcaggcaattccagg

SEQ ID NO: 3248197 - DNA, 25 bp, Homo sapien
tgagcaggtcggccgcaggcaattc

SEQ ID NO: 3248198 - DNA, 25 bp, Homo sapien
catagcggtgagcaggtcggccgca

SEQ ID NO: 3248199 - DNA, 25 bp, Homo sapien
gcagaacctggcacggccaagactt

SEQ ID NO: 3248200 - DNA, 25 bp, Homo sapien
agacttcgtcctctgcggttctgga

SEQ ID NO: 3248201 - DNA, 25 bp, Homo sapien
ggaacatctgcttcccgtctggtca

SEQ ID NO: 3248202 - DNA, 25 bp, Homo sapien
gtcccggcaggttctggcaggttct

SEQ ID NO: 3248203 - DNA, 25 bp, Homo sapien
actggcggcatggtcttcctcaaac

SEQ ID NO: 3248204 - DNA, 25 bp, Homo sapien
caagtgacccgttcttctgtggaga

SEQ ID NO: 3248205 - DNA, 25 bp, Homo sapien
actttggcccctctgacatatgcgg

SEQ ID NO: 3248206 - DNA, 25 bp, Homo sapien
tgggtggcacgtgatcccttctgct

SEQ ID NO: 3248207 - DNA, 25 bp, Homo sapien
caggtctcggtgttccccatggata

SEQ ID NO: 3248208 - DNA, 25 bp, Homo sapien
tccccggatgtttcaggtctcggtg

SEQ ID NO: 3248209 - DNA, 25 bp, Homo sapien
gatgtttcaggtctcggtgttcccc

SEQ ID NO: 3248210 - DNA, 25 bp, Homo sapien
tccccatggatatgtagcgctgtcc

SEQ ID NO: 3248211 - DNA, 25 bp, Homo sapien
ccccatgtccagtggttgcgggtga

SEQ ID NO: 3248212 - DNA, 25 bp, Homo sapien
cagtggttgcgggtgacattcctct

SEQ ID NO: 3248213 - DNA, 25 bp, Homo sapien
tctggactgtaacccacaccaggca

SEQ ID NO: 3248214 - DNA, 25 bp, Homo sapien
cttggtccaaccctgatttctttgg

SEQ ID NO: 3248215 - DNA, 25 bp, Homo sapien
tcccagatgagagacaggcaagctt

SEQ ID NO: 3248216 - DNA, 25 bp, Homo sapien
ggggatctgcggaaccgcccatcgt

SEQ ID NO: 3248217 - DNA, 25 bp, Homo sapien
gacaggcaagctttgggcagagcct

SEQ ID NO: 3248218 - DNA, 25 bp, Homo sapien
ctggaggggatctgcggaaccgccc

SEQ ID NO: 3248219 - DNA, 25 bp, Homo sapien
tgacagaccaggggctggggctggg

SEQ ID NO: 3248220 - DNA, 25 bp, Homo sapien
gtgacagaccaggggctggggctgg

SEQ ID NO: 3248221 - DNA, 25 bp, Homo sapien
ctgtgacagaccaggggctggggct

SEQ ID NO: 3248222 - DNA, 25 bp, Homo sapien
tgtgacagaccaggggctggggctg

SEQ ID NO: 3248223 - DNA, 25 bp, Homo sapien
gtcacggaaggaacttgaatgcgac

SEQ ID NO: 3248224 - DNA, 25 bp, Homo sapien
ctgggagcctccgaacctcttgcgg

SEQ ID NO: 3248225 - DNA, 25 bp, Homo sapien
cggaaggaacttgaatgcgacctgc

SEQ ID NO: 3248226 - DNA, 25 bp, Homo sapien
tccgaacctcttgcgggtcacggaa

SEQ ID NO: 3248227 - DNA, 25 bp, Homo sapien
ctgtggcaggaggtgagagggccct

SEQ ID NO: 3248228 - DNA, 25 bp, Homo sapien
tcactgtggcaggaggtgagagggc

SEQ ID NO: 3248229 - DNA, 25 bp, Homo sapien
tgtcactgtggcaggaggtgagagg

SEQ ID NO: 3248230 - DNA, 25 bp, Homo sapien
actgtggcaggaggtgagagggccc

SEQ ID NO: 3248231 - DNA, 25 bp, Homo sapien
gctgtgggggaaacgcgcctgtcag

SEQ ID NO: 3248232 - DNA, 25 bp, Homo sapien
gggaaacgcgcctgtcagtgctgct

SEQ ID NO: 3248233 - DNA, 25 bp, Homo sapien
gggggaaacgcgcctgtcagtgctg

SEQ ID NO: 3248234 - DNA, 25 bp, Homo sapien
gggctgtgggggaaacgcgcctgtc

SEQ ID NO: 3248235 - DNA, 25 bp, Homo sapien
gctgaggtctgctcacggcaaggac

SEQ ID NO: 3248236 - DNA, 25 bp, Homo sapien
ggactgactggtcctgcttcacgct

SEQ ID NO: 3248237 - DNA, 25 bp, Homo sapien
gagcgcgtgttcctctcgggcttga

SEQ ID NO: 3248238 - DNA, 25 bp, Homo sapien
tggatgtggctcccacgcaggtccc

SEQ ID NO: 3248239 - DNA, 25 bp, Homo sapien
gcactcacagctacaactgcacagt

SEQ ID NO: 3248240 - DNA, 25 bp, Homo sapien
ggcaggagggatggcgcgtggagag

SEQ ID NO: 3248241 - DNA, 25 bp, Homo sapien
agggaaggcccttgagcctccggca

SEQ ID NO: 3248242 - DNA, 25 bp, Homo sapien
tggagaagaggtcgcgggcaggagg

SEQ ID NO: 3248243 - DNA, 25 bp, Homo sapien
ctccggcgccccgtggctgctgtct

SEQ ID NO: 3248244 - DNA, 25 bp, Homo sapien
gctgctgtcttcttcctttcgaaac

SEQ ID NO: 3248245 - DNA, 25 bp, Homo sapien
ctgctccggcgccccgtggctgctg

SEQ ID NO: 3248246 - DNA, 25 bp, Homo sapien
tcctttcgaaacaccctggaggtca

SEQ ID NO: 3248247 - DNA, 25 bp, Homo sapien
tggggattttctcgtggttctgctg

SEQ ID NO: 3248248 - DNA, 25 bp, Homo sapien
tcagggagatgctgtacaagagcag

SEQ ID NO: 3248249 - DNA, 25 bp, Homo sapien
gcagttgggaggttgccgaggtgca

SEQ ID NO: 3248250 - DNA, 25 bp, Homo sapien
ctgtacaagagcagcccctctccag

SEQ ID NO: 3248251 - DNA, 25 bp, Homo sapien
cacagcaggcatcgctgctggctca

SEQ ID NO: 3248252 - DNA, 25 bp, Homo sapien
gggtcaccagctccgtccccacagc

SEQ ID NO: 3248253 - DNA, 25 bp, Homo sapien
tgtgcacatggtggcttccgatggc

SEQ ID NO: 3248254 - DNA, 25 bp, Homo sapien
cctgcggagagccttctgtgggtca

SEQ ID NO: 3248255 - DNA, 25 bp, Homo sapien
gtctcccgcaatttcccactcgcat

SEQ ID NO: 3248256 - DNA, 25 bp, Homo sapien
tgtccggagcgtgcagggactggcc

SEQ ID NO: 3248257 - DNA, 25 bp, Homo sapien
ccagcaccttggcagtgtgtccgga

SEQ ID NO: 3248258 - DNA, 25 bp, Homo sapien
caatttcccactcgcatgggcaggg

SEQ ID NO: 3248259 - DNA, 25 bp, Homo sapien
ctgtcactgccatcaaggagcccag

SEQ ID NO: 3248260 - DNA, 25 bp, Homo sapien
agcactgtcactgccatcaaggagc

SEQ ID NO: 3248261 - DNA, 25 bp, Homo sapien
gcttcagtgcccagcactgtcactg

SEQ ID NO: 3248262 - DNA, 25 bp, Homo sapien
tatagggcttcagtgcccagcactg

SEQ ID NO: 3248263 - DNA, 25 bp, Homo sapien
atggaatgaagagacccctggatgc

SEQ ID NO: 3248264 - DNA, 25 bp, Homo sapien
aaaatgggacgtgttgtatgagacc

SEQ ID NO: 3248265 - DNA, 25 bp, Homo sapien
tttcttaggctatatccataatgga

SEQ ID NO: 3248266 - DNA, 25 bp, Homo sapien
cctttactgtcaccatttcttaggc

SEQ ID NO: 3248267 - DNA, 25 bp, Homo sapien
gtcctgagctgattgctccaggtcg

SEQ ID NO: 3248268 - DNA, 25 bp, Homo sapien
cctgagctgattgctccaggtcgat

SEQ ID NO: 3248269 - DNA, 25 bp, Homo sapien
ctaacagtcctgagctgattgctcc

SEQ ID NO: 3248270 - DNA, 25 bp, Homo sapien
tgagctgattgctccaggtcgatgg

SEQ ID NO: 3248271 - DNA, 25 bp, Homo sapien
tggtcacctggcaggtgcaggtcca

SEQ ID NO: 3248272 - DNA, 25 bp, Homo sapien
gtcacctggcaggtgcaggtccagc

SEQ ID NO: 3248273 - DNA, 25 bp, Homo sapien
ccatggtcacctggcaggtgcaggt

SEQ ID NO: 3248274 - DNA, 25 bp, Homo sapien
aggccatggtcacctggcaggtgca

SEQ ID NO: 3248275 - DNA, 25 bp, Homo sapien
gtaggccgtgatcttggagccagga

SEQ ID NO: 3248276 - DNA, 25 bp, Homo sapien
tcacatggacgtggggtaggccgtg

SEQ ID NO: 3248277 - DNA, 25 bp, Homo sapien
catggacgtggggtaggccgtgatc

SEQ ID NO: 3248278 - DNA, 25 bp, Homo sapien
tggggtaggccgtgatcttggagcc

SEQ ID NO: 3248279 - DNA, 25 bp, Homo sapien
cacagagcagacacctgtgtcttcc

SEQ ID NO: 3248280 - DNA, 25 bp, Homo sapien
ggacaccctgctgagccgttgtgga

SEQ ID NO: 3248281 - DNA, 25 bp, Homo sapien
ttgtggacctccgtggacccaggat

SEQ ID NO: 3248282 - DNA, 25 bp, Homo sapien
tggtcacaaccctcatcctgttctt

SEQ ID NO: 3248283 - DNA, 25 bp, Homo sapien
cagggcacaggctaccagcactctg

SEQ ID NO: 3248284 - DNA, 25 bp, Homo sapien
aggcgcattgcaggcggctttctga

SEQ ID NO: 3248285 - DNA, 25 bp, Homo sapien
gaaccccgggctgcgaccagggcac

SEQ ID NO: 3248286 - DNA, 25 bp, Homo sapien
cacaggcgcattgcaggcggctttc

SEQ ID NO: 3248287 - DNA, 25 bp, Homo sapien
gcgtgggagtgaggaatcccagcca

SEQ ID NO: 3248288 - DNA, 25 bp, Homo sapien
tctcaggcttgaggcgtgggagtga

SEQ ID NO: 3248289 - DNA, 25 bp, Homo sapien
tttccggaaggattctcaggcttga

SEQ ID NO: 3248290 - DNA, 25 bp, Homo sapien
cttgtgtttccggaaggattctcag

SEQ ID NO: 3248291 - DNA, 25 bp, Homo sapien
tagggtagcctatcctgcacacggc

SEQ ID NO: 3248292 - DNA, 25 bp, Homo sapien
tatctgttagaaaatccgctgcagc

SEQ ID NO: 3248293 - DNA, 25 bp, Homo sapien
tgtagattcaataccctggatgccc

SEQ ID NO: 3248294 - DNA, 25 bp, Homo sapien
gaggtgaggcacagttcttccagat

SEQ ID NO: 3248295 - DNA, 25 bp, Homo sapien
ttgtcctgctgcagttcggagcctc

SEQ ID NO: 3248296 - DNA, 25 bp, Homo sapien
caggattattccagaaggcccaacc

SEQ ID NO: 3248297 - DNA, 25 bp, Homo sapien
gaaggcccaacccttgtcctgctgc

SEQ ID NO: 3248298 - DNA, 25 bp, Homo sapien
cccagcacctccgaaccccagccag

SEQ ID NO: 3248299 - DNA, 25 bp, Homo sapien
caggtctcatcctcagccaccagtg

SEQ ID NO: 3248300 - DNA, 25 bp, Homo sapien
ccaggtctcatcctcagccaccagt

SEQ ID NO: 3248301 - DNA, 25 bp, Homo sapien
aggtctcatcctcagccaccagtgc

SEQ ID NO: 3248302 - DNA, 25 bp, Homo sapien
aatgtctgatgctcatgtaactgca

SEQ ID NO: 3248303 - DNA, 25 bp, Homo sapien
gagctgcggtcgtgtgagtcataca

SEQ ID NO: 3248304 - DNA, 25 bp, Homo sapien
tctctgcttggtcgcaggattggca

SEQ ID NO: 3248305 - DNA, 25 bp, Homo sapien
tcatacagagcgctccccgatttgt

SEQ ID NO: 3248306 - DNA, 25 bp, Homo sapien
gcctctgcagcgtgtgattcctgaa

SEQ ID NO: 3248307 - DNA, 25 bp, Homo sapien
acgtcgtatgagaaactgcggtgtc

SEQ ID NO: 3248308 - DNA, 25 bp, Homo sapien
ctcggagaggcgtgtggcaaggtcg

SEQ ID NO: 3248309 - DNA, 25 bp, Homo sapien
tcctgaagcccacatcatcttctgt

SEQ ID NO: 3248310 - DNA, 25 bp, Homo sapien
gctttccctccagtgacaaggttga

SEQ ID NO: 3248311 - DNA, 25 bp, Homo sapien
tccctccagtgacaaggttgacgga

SEQ ID NO: 3248312 - DNA, 25 bp, Homo sapien
tccagtgacaaggttgacggagact

SEQ ID NO: 3248313 - DNA, 25 bp, Homo sapien
ccgctttccctccagtgacaaggtt

SEQ ID NO: 3248314 - DNA, 25 bp, Homo sapien
cgtggtagttgtagggtctgtgtgc

SEQ ID NO: 3248315 - DNA, 25 bp, Homo sapien
tgtgtgcctgcatgcggatgtgtgg

SEQ ID NO: 3248316 - DNA, 25 bp, Homo sapien
cttcagtgagcggtggaagcggcaa

SEQ ID NO: 3248317 - DNA, 25 bp, Homo sapien
ccgtacgtggccgtggtagttgtag

SEQ ID NO: 3248318 - DNA, 25 bp, Homo sapien
ggatgaataccagggcctctgcatt

SEQ ID NO: 3248319 - DNA, 25 bp, Homo sapien
tctgcatgccagcaggggctaggaa

SEQ ID NO: 3248320 - DNA, 25 bp, Homo sapien
ccagcaggggctaggaaccccttct

SEQ ID NO: 3248321 - DNA, 25 bp, Homo sapien
tgcatgccagcaggggctaggaacc

SEQ ID NO: 3248322 - DNA, 25 bp, Homo sapien
gcctgccggagttcttggtgggttc

SEQ ID NO: 3248323 - DNA, 25 bp, Homo sapien
gctacagaaacaggcgagctctggc

SEQ ID NO: 3248324 - DNA, 25 bp, Homo sapien
gttagcagcctcacaaccctggttc

SEQ ID NO: 3248325 - DNA, 25 bp, Homo sapien
gtcgcagctccaggttgctacagaa

SEQ ID NO: 3248326 - DNA, 25 bp, Homo sapien
caccagccggtgttaggaaagcctg

SEQ ID NO: 3248327 - DNA, 25 bp, Homo sapien
aagcctgggccgagacagaaaacac

SEQ ID NO: 3248328 - DNA, 25 bp, Homo sapien
tgcaaatctgctgaccctgcaggag

SEQ ID NO: 3248329 - DNA, 25 bp, Homo sapien
cctattctggagtgaggtcggcgcc

SEQ ID NO: 3248330 - DNA, 25 bp, Homo sapien
cagtgtctatccacaccctggacat

SEQ ID NO: 3248331 - DNA, 25 bp, Homo sapien
gtgtctatccacaccctggacattc

SEQ ID NO: 3248332 - DNA, 25 bp, Homo sapien
cttcaggcccagtgtctatccacac

SEQ ID NO: 3248333 - DNA, 25 bp, Homo sapien
aggcccagtgtctatccacaccctg

SEQ ID NO: 3248334 - DNA, 25 bp, Homo sapien
cactcatcagtgtgttgggccgagg

SEQ ID NO: 3248335 - DNA, 25 bp, Homo sapien
ggctgcaggaccgccacatctggaa

SEQ ID NO: 3248336 - DNA, 25 bp, Homo sapien
tcactcatcagtgtgttgggccgag

SEQ ID NO: 3248337 - DNA, 25 bp, Homo sapien
ggaccgccacatctggaatatccat

SEQ ID NO: 3248338 - DNA, 25 bp, Homo sapien
gtgtccagggtggttctggtcatac

SEQ ID NO: 3248339 - DNA, 25 bp, Homo sapien
ttgtgtccagggtggttctggtcat

SEQ ID NO: 3248340 - DNA, 25 bp, Homo sapien
agcagaatgtgccagtggcggaggg

SEQ ID NO: 3248341 - DNA, 25 bp, Homo sapien
cagtggcggagggttgtgtccaggg

SEQ ID NO: 3248342 - DNA, 25 bp, Homo sapien
ctgaggctgcgagtacagcgtgtct

SEQ ID NO: 3248343 - DNA, 25 bp, Homo sapien
ttagatccatccaacttaggtcctg

SEQ ID NO: 3248344 - DNA, 25 bp, Homo sapien
tctggagatggggtgattagatcca

SEQ ID NO: 3248345 - DNA, 25 bp, Homo sapien
aacttaggtcctggccgatggtagt

SEQ ID NO: 3248346 - DNA, 25 bp, Homo sapien
aggcaggggtggctggcagatgagt

SEQ ID NO: 3248347 - DNA, 25 bp, Homo sapien
tgcaggcaggggtggctggcagatg

SEQ ID NO: 3248348 - DNA, 25 bp, Homo sapien
gcaggggtggctggcagatgagtgc

SEQ ID NO: 3248349 - DNA, 25 bp, Homo sapien
ctgcaggcaggggtggctggcagat

SEQ ID NO: 3248350 - DNA, 25 bp, Homo sapien
ccagcgtgagccaatttaggagcta

SEQ ID NO: 3248351 - DNA, 25 bp, Homo sapien
gccagcgtgagccaatttaggagct

SEQ ID NO: 3248352 - DNA, 25 bp, Homo sapien
ctgtggccagcgtgagccaatttag

SEQ ID NO: 3248353 - DNA, 25 bp, Homo sapien
tggccagcgtgagccaatttaggag

SEQ ID NO: 3248354 - DNA, 25 bp, Homo sapien
caggcctcagaactgctcatcacgt

SEQ ID NO: 3248355 - DNA, 25 bp, Homo sapien
gctgcccggacttccatgattcaca

SEQ ID NO: 3248356 - DNA, 25 bp, Homo sapien
caggcatgccagcacatctccaggc

SEQ ID NO: 3248357 - DNA, 25 bp, Homo sapien
tatccagactttggccgtgggagcc

SEQ ID NO: 3248358 - DNA, 25 bp, Homo sapien
gtgaatgtgtggcatgggactccca

SEQ ID NO: 3248359 - DNA, 25 bp, Homo sapien
ctgtgaatgtgtggcatgggactcc

SEQ ID NO: 3248360 - DNA, 25 bp, Homo sapien
tgtgaatgtgtggcatgggactccc

SEQ ID NO: 3248361 - DNA, 25 bp, Homo sapien
aaggcggctcgtccagactctggaa

SEQ ID NO: 3248362 - DNA, 25 bp, Homo sapien
cgtccagactctggaagcgtctgat

SEQ ID NO: 3248363 - DNA, 25 bp, Homo sapien
tctggaagcgtctgatcttctgagg

SEQ ID NO: 3248364 - DNA, 25 bp, Homo sapien
cgggaaggcggctcgtccagactct

SEQ ID NO: 3248365 - DNA, 25 bp, Homo sapien
caagcggagttccaagacggtccca

SEQ ID NO: 3248366 - DNA, 25 bp, Homo sapien
agcggagttccaagacggtcccagc

SEQ ID NO: 3248367 - DNA, 25 bp, Homo sapien
cggagttccaagacggtcccagcag

SEQ ID NO: 3248368 - DNA, 25 bp, Homo sapien
ccagccgcccactcctccccctctg

SEQ ID NO: 3248369 - DNA, 25 bp, Homo sapien
gggggcatccctgtgctgtagttcc

SEQ ID NO: 3248370 - DNA, 25 bp, Homo sapien
tggggggcatccctgtgctgtagtt

SEQ ID NO: 3248371 - DNA, 25 bp, Homo sapien
gggcatccctgtgctgtagttcctg

SEQ ID NO: 3248372 - DNA, 25 bp, Homo sapien
ggcatccctgtgctgtagttcctgg

SEQ ID NO: 3248373 - DNA, 25 bp, Homo sapien
ccttctgttcctgaccggggcctgg

SEQ ID NO: 3248374 - DNA, 25 bp, Homo sapien
aggccctgtgagttgcaatcatgga

SEQ ID NO: 3248375 - DNA, 25 bp, Homo sapien
gccaggccctgtgagttgcaatcat

SEQ ID NO: 3248376 - DNA, 25 bp, Homo sapien
cagggacatctagggctgaacctgg

SEQ ID NO: 3248377 - DNA, 25 bp, Homo sapien
cctccagggacatctagggctgaac

SEQ ID NO: 3248378 - DNA, 25 bp, Homo sapien
tgtctgctgtctgtcattcccgtgg

SEQ ID NO: 3248379 - DNA, 25 bp, Homo sapien
gtggaggcggaggcccgtgcctgcc

SEQ ID NO: 3248380 - DNA, 25 bp, Homo sapien
gcctgccgtctgtcattcccgtggg

SEQ ID NO: 3248381 - DNA, 25 bp, Homo sapien
ctgggacagctgtggaggcggaggc

SEQ ID NO: 3248382 - DNA, 25 bp, Homo sapien
tagtccattggtgcaactggcttct

SEQ ID NO: 3248383 - DNA, 25 bp, Homo sapien
ttagtccattggtgcaactggcttc

SEQ ID NO: 3248384 - DNA, 25 bp, Homo sapien
agtccattggtgcaactggcttctc

SEQ ID NO: 3248385 - DNA, 25 bp, Homo sapien
cctggggagcggcagggtcggcgct

SEQ ID NO: 3248386 - DNA, 25 bp, Homo sapien
gggagcggcagggtcggcgctggcc

SEQ ID NO: 3248387 - DNA, 25 bp, Homo sapien
gccctggggagcggcagggtcggcg

SEQ ID NO: 3248388 - DNA, 25 bp, Homo sapien
tcggcgctggccctcggccggccat

SEQ ID NO: 3248389 - DNA, 25 bp, Homo sapien
gacagcgcggggaccttcagttcct

SEQ ID NO: 3248390 - DNA, 25 bp, Homo sapien
gacttcaaggccacacgaccatgtg

SEQ ID NO: 3248391 - DNA, 25 bp, Homo sapien
tataagcagcactgacggaaggcgc

SEQ ID NO: 3248392 - DNA, 25 bp, Homo sapien
tcagttcctgtgttctataagcagc

SEQ ID NO: 3248393 - DNA, 25 bp, Homo sapien
cctgagacccctgatctctgctgcg

SEQ ID NO: 3248394 - DNA, 25 bp, Homo sapien
gaccctgcggttcaggccccaggcc

SEQ ID NO: 3248395 - DNA, 25 bp, Homo sapien
gagacccctgatctctgctgcgccc

SEQ ID NO: 3248396 - DNA, 25 bp, Homo sapien
caggcccctgagacccctgatctct

SEQ ID NO: 3248397 - DNA, 25 bp, Homo sapien
ccagcttcggaaacccagcccaggg

SEQ ID NO: 3248398 - DNA, 25 bp, Homo sapien
cagggcacctggtcgggcctgggcc

SEQ ID NO: 3248399 - DNA, 25 bp, Homo sapien
cccagggcacctggtcgggcctggg

SEQ ID NO: 3248400 - DNA, 25 bp, Homo sapien
cctctggcccagcttcggaaaccca

SEQ ID NO: 3248401 - DNA, 25 bp, Homo sapien
tagacattagccgtgtcccgtgaga

SEQ ID NO: 3248402 - DNA, 25 bp, Homo sapien
ccgtgtcccgtgagatgttcgccat

SEQ ID NO: 3248403 - DNA, 25 bp, Homo sapien
cattagccgtgtcccgtgagatgtt

SEQ ID NO: 3248404 - DNA, 25 bp, Homo sapien
tcagtagacattagccgtgtcccgt

SEQ ID NO: 3248405 - DNA, 25 bp, Homo sapien
tcactcaatatgcaggtaaaagtca

SEQ ID NO: 3248406 - DNA, 25 bp, Homo sapien
aatatgcaggtaaaagtcaaccctg

SEQ ID NO: 3248407 - DNA, 25 bp, Homo sapien
tatgcaggtaaaagtcaaccctgac

SEQ ID NO: 3248408 - DNA, 25 bp, Homo sapien
ctcaatatgcaggtaaaagtcaacc

SEQ ID NO: 3248409 - DNA, 25 bp, Homo sapien
agccttgagatctggaaacaagccc

SEQ ID NO: 3248410 - DNA, 25 bp, Homo sapien
gccttgagatctggaaacaagccca

SEQ ID NO: 3248411 - DNA, 25 bp, Homo sapien
cagccttgagatctggaaacaagcc

SEQ ID NO: 3248412 - DNA, 25 bp, Homo sapien
tactctcggagcctgtaaggcgaga

SEQ ID NO: 3248413 - DNA, 25 bp, Homo sapien
tggcgtgaaggacgatgtcgctaac

SEQ ID NO: 3248414 - DNA, 25 bp, Homo sapien
atgagttactctcggagcctgtaag

SEQ ID NO: 3248415 - DNA, 25 bp, Homo sapien
tgtaaggcgagatggcgtgaaggac

SEQ ID NO: 3248416 - DNA, 25 bp, Homo sapien
cccacgacagagtaggtccccacac

SEQ ID NO: 3248417 - DNA, 25 bp, Homo sapien
atcccgagatctccactgggcaggc

SEQ ID NO: 3248418 - DNA, 25 bp, Homo sapien
ggcccgccgtgtatgaggccctgct

SEQ ID NO: 3248419 - DNA, 25 bp, Homo sapien
tcacaggcaaaacgggggctcctgt

SEQ ID NO: 3248420 - DNA, 25 bp, Homo sapien
attcatcttcacatcccgagatctc

SEQ ID NO: 3248421 - DNA, 25 bp, Homo sapien
ctgcggccactcgtggagacgccag

SEQ ID NO: 3248422 - DNA, 25 bp, Homo sapien
ttctcttccgttcaccgagagtcca

SEQ ID NO: 3248423 - DNA, 25 bp, Homo sapien
ccactcgtggagacgccaggctgtg

SEQ ID NO: 3248424 - DNA, 25 bp, Homo sapien
acccctgcggccactcgtggagacg

SEQ ID NO: 3248425 - DNA, 25 bp, Homo sapien
gacatgaggcgagggcgtggcctgc

SEQ ID NO: 3248426 - DNA, 25 bp, Homo sapien
gccacaaggccttggcgccatccca

SEQ ID NO: 3248427 - DNA, 25 bp, Homo sapien
ctcgtccagcgccacaaggccttgg

SEQ ID NO: 3248428 - DNA, 25 bp, Homo sapien
ggacatgaggcgagggcgtggcctg

SEQ ID NO: 3248429 - DNA, 25 bp, Homo sapien
cctggaggttaatcccgggctctgg

SEQ ID NO: 3248430 - DNA, 25 bp, Homo sapien
gagttctggataaagccccgcatgg

SEQ ID NO: 3248431 - DNA, 25 bp, Homo sapien
tcctgatgcggctgccttaagagct

SEQ ID NO: 3248432 - DNA, 25 bp, Homo sapien
tgctttccggtggtaagaacagccc

SEQ ID NO: 3248433 - DNA, 25 bp, Homo sapien
gggcggtctctacggtatgggtaga

SEQ ID NO: 3248434 - DNA, 25 bp, Homo sapien
accagcagagcgagtcgagttcagg

SEQ ID NO: 3248435 - DNA, 25 bp, Homo sapien
tctctacggtatgggtagagtcagg

SEQ ID NO: 3248436 - DNA, 25 bp, Homo sapien
gggcgcacaccagcagagtgagccc

SEQ ID NO: 3248437 - DNA, 25 bp, Homo sapien
cctgaggacaggagggacgcaggca

SEQ ID NO: 3248438 - DNA, 25 bp, Homo sapien
ccacgcctgaggacaggagggacgc

SEQ ID NO: 3248439 - DNA, 25 bp, Homo sapien
gagggacgcaggcagaccccagagg

SEQ ID NO: 3248440 - DNA, 25 bp, Homo sapien
ggacaggagggacgcaggcagaccc

SEQ ID NO: 3248441 - DNA, 25 bp, Homo sapien
tgacacaaaaatacacagggccgtg

SEQ ID NO: 3248442 - DNA, 25 bp, Homo sapien
tatcagacgctaaagcacgcagtgg

SEQ ID NO: 3248443 - DNA, 25 bp, Homo sapien
ggatgttccagcatcaccgagatgt

SEQ ID NO: 3248444 - DNA, 25 bp, Homo sapien
ttgacacagccatacgggatacggg

SEQ ID NO: 3248445 - DNA, 25 bp, Homo sapien
tggtgaatgtcggggaagtgccggg

SEQ ID NO: 3248446 - DNA, 25 bp, Homo sapien
tgaatgtcggggaagtgccgggttc

SEQ ID NO: 3248447 - DNA, 25 bp, Homo sapien
ggagcagaccgtgtccatgctggta

SEQ ID NO: 3248448 - DNA, 25 bp, Homo sapien
gtgtccatgctggtaaagcgtcccc

SEQ ID NO: 3248449 - DNA, 25 bp, Homo sapien
ttctggccggcgtcgttcacgggac

SEQ ID NO: 3248450 - DNA, 25 bp, Homo sapien
tcgttcacgggacattcctccaggg

SEQ ID NO: 3248451 - DNA, 25 bp, Homo sapien
ggcagaggcagttggtacacagtac

SEQ ID NO: 3248452 - DNA, 25 bp, Homo sapien
cctagttagtcctgaaagctacgca

SEQ ID NO: 3248453 - DNA, 25 bp, Homo sapien
atgtagcatcagtctcctcccaggc

SEQ ID NO: 3248454 - DNA, 25 bp, Homo sapien
aagctacgcattcgaggctcagaga

SEQ ID NO: 3248455 - DNA, 25 bp, Homo sapien
catctactgtggctgcggtgagaaa

SEQ ID NO: 3248456 - DNA, 25 bp, Homo sapien
tacaaggaccctgatgacactgggt

SEQ ID NO: 3248457 - DNA, 25 bp, Homo sapien
tgggacgtcactctccaaaggaggc

SEQ ID NO: 3248458 - DNA, 25 bp, Homo sapien
aactcatggcttggacgcattcagc

SEQ ID NO: 3248459 - DNA, 25 bp, Homo sapien
tgggttcttggaggctcaagaacaa

SEQ ID NO: 3248460 - DNA, 25 bp, Homo sapien
tacgtccttcggcaggaggaagtct

SEQ ID NO: 3248461 - DNA, 25 bp, Homo sapien
acagtaagtccacttagtacgtcct

SEQ ID NO: 3248462 - DNA, 25 bp, Homo sapien
ctcaagaacaatggcacaggggaca

SEQ ID NO: 3248463 - DNA, 25 bp, Homo sapien
aggcagtgggcctcccggcaccttt

SEQ ID NO: 3248464 - DNA, 25 bp, Homo sapien
tgtcctcagggaggtatcattggct

SEQ ID NO: 3248465 - DNA, 25 bp, Homo sapien
aggagtgtgcacagcggccaccaag

SEQ ID NO: 3248466 - DNA, 25 bp, Homo sapien
tgagagctctgcagacgtcattctg

SEQ ID NO: 3248467 - DNA, 25 bp, Homo sapien
gcttcctggtgtctgcggactgcat

SEQ ID NO: 3248468 - DNA, 25 bp, Homo sapien
cactggagggccctgaatgtcaggc

SEQ ID NO: 3248469 - DNA, 25 bp, Homo sapien
ggctgcacgcagaggatgcttcctg

SEQ ID NO: 3248470 - DNA, 25 bp, Homo sapien
catgacaactgaaccagtgaagggc

SEQ ID NO: 3248471 - DNA, 25 bp, Homo sapien
cctgcatgtgaagagtacacgggca

SEQ ID NO: 3248472 - DNA, 25 bp, Homo sapien
tgtaagaactcgactgtgccaaacc

SEQ ID NO: 3248473 - DNA, 25 bp, Homo sapien
ttgtcagcgcattcacctcagtggg

SEQ ID NO: 3248474 - DNA, 25 bp, Homo sapien
gacagacatgctccccagtagggct

SEQ ID NO: 3248475 - DNA, 25 bp, Homo sapien
ctgggccttcatggtgtagggacca

SEQ ID NO: 3248476 - DNA, 25 bp, Homo sapien
agactcagccgtgtcacagggcctg

SEQ ID NO: 3248477 - DNA, 25 bp, Homo sapien
ggtgtagggaccactcagactcagc

SEQ ID NO: 3248478 - DNA, 25 bp, Homo sapien
gacagaataccaaggtgggcttcct

SEQ ID NO: 3248479 - DNA, 25 bp, Homo sapien
tcacttcttcatgccgacttcatgg

SEQ ID NO: 3248480 - DNA, 25 bp, Homo sapien
gccgacttcatggatccagagtggc

SEQ ID NO: 3248481 - DNA, 25 bp, Homo sapien
tggcctgatgtcaacccccatatgt

SEQ ID NO: 3248482 - DNA, 25 bp, Homo sapien
cccatatgtggttgtggaaactgag

SEQ ID NO: 3248483 - DNA, 25 bp, Homo sapien
tctatcacatccatcggcagggctc

SEQ ID NO: 3248484 - DNA, 25 bp, Homo sapien
ggcagccggctgtatttttctatca

SEQ ID NO: 3248485 - DNA, 25 bp, Homo sapien
gcagggctcaaatattccgtgccgt

SEQ ID NO: 3248486 - DNA, 25 bp, Homo sapien
gtgtcggatcaaaacacacggcgcc

SEQ ID NO: 3248487 - DNA, 25 bp, Homo sapien
cccgtggtggcccccacgtgcaagg

SEQ ID NO: 3248488 - DNA, 25 bp, Homo sapien
tggtggcccccacgtgcaaggggtg

SEQ ID NO: 3248489 - DNA, 25 bp, Homo sapien
cccactcccgtcagcccgtggtggc

SEQ ID NO: 3248490 - DNA, 25 bp, Homo sapien
ccactcccgtcagcccgtggtggcc

SEQ ID NO: 3248491 - DNA, 25 bp, Homo sapien
tatttttgacataacccgtgcactt

SEQ ID NO: 3248492 - DNA, 25 bp, Homo sapien
cactccaccggcattgcttcattat

SEQ ID NO: 3248493 - DNA, 25 bp, Homo sapien
taacccgtgcacttaaacttcagca

SEQ ID NO: 3248494 - DNA, 25 bp, Homo sapien
tcacaatgggaataaggcctggctc

SEQ ID NO: 3248495 - DNA, 25 bp, Homo sapien
ttgtaacggacacgcttctcgcctc

SEQ ID NO: 3248496 - DNA, 25 bp, Homo sapien
tcttctcttccgtcagatgcggctg

SEQ ID NO: 3248497 - DNA, 25 bp, Homo sapien
ggctgatgatcccaggctcccaggt

SEQ ID NO: 3248498 - DNA, 25 bp, Homo sapien
tgggtcctctgggagatccgtgctt

SEQ ID NO: 3248499 - DNA, 25 bp, Homo sapien
ccttggtcgcctggccagtccttgg

SEQ ID NO: 3248500 - DNA, 25 bp, Homo sapien
ggctgctgaggcaagggcccttggt

SEQ ID NO: 3248501 - DNA, 25 bp, Homo sapien
tggtcgcctggccagtccttggtca

SEQ ID NO: 3248502 - DNA, 25 bp, Homo sapien
gcaagggcccttggtcgcctggcca

SEQ ID NO: 3248503 - DNA, 25 bp, Homo sapien
ggtgattctcagagaacaccaccat

SEQ ID NO: 3248504 - DNA, 25 bp, Homo sapien
caggtgattctcagagaacaccacc

SEQ ID NO: 3248505 - DNA, 25 bp, Homo sapien
tcaggtgattctcagagaacaccac

SEQ ID NO: 3248506 - DNA, 25 bp, Homo sapien
aggtgattctcagagaacaccacca

SEQ ID NO: 3248507 - DNA, 25 bp, Homo sapien
ggatcaggggctcccggacagctgc

SEQ ID NO: 3248508 - DNA, 25 bp, Homo sapien
cacttgatcccgtgatggatcaggg

SEQ ID NO: 3248509 - DNA, 25 bp, Homo sapien
tggatcaggggctcccggacagctg

SEQ ID NO: 3248510 - DNA, 25 bp, Homo sapien
tggagcacttgatcccgtgatggat

SEQ ID NO: 3248511 - DNA, 25 bp, Homo sapien
ttcgggctccggctcagagctcagc

SEQ ID NO: 3248512 - DNA, 25 bp, Homo sapien
gcataggcccaacttgggtcctgca

SEQ ID NO: 3248513 - DNA, 25 bp, Homo sapien
gaggaaatgtggttcgggctccggc

SEQ ID NO: 3248514 - DNA, 25 bp, Homo sapien
caaggcgctgggaacctccgcatag

SEQ ID NO: 3248515 - DNA, 25 bp, Homo sapien
ttctctgctgatttttcattggccc

SEQ ID NO: 3248516 - DNA, 25 bp, Homo sapien
cagtgtgctggacatgctctgaggc

SEQ ID NO: 3248517 - DNA, 25 bp, Homo sapien
tctgctgatttttcattggcccagg

SEQ ID NO: 3248518 - DNA, 25 bp, Homo sapien
cttccaggctgtgcacagtgtgctg

SEQ ID NO: 3248519 - DNA, 25 bp, Homo sapien
ctggggactggccgggctcgcctgg

SEQ ID NO: 3248520 - DNA, 25 bp, Homo sapien
tggccgggctcgcctggttctccat

SEQ ID NO: 3248521 - DNA, 25 bp, Homo sapien
gactggccgggctcgcctggttctc

SEQ ID NO: 3248522 - DNA, 25 bp, Homo sapien
gggactggccgggctcgcctggttc

SEQ ID NO: 3248523 - DNA, 25 bp, Homo sapien
caagggccccatatttgcgtgcctg

SEQ ID NO: 3248524 - DNA, 25 bp, Homo sapien
acacaagggccccatatttgcgtgc

SEQ ID NO: 3248525 - DNA, 25 bp, Homo sapien
gcacaccacacaagggccccatatt

SEQ ID NO: 3248526 - DNA, 25 bp, Homo sapien
agggccccatatttgcgtgcctggc

SEQ ID NO: 3248527 - DNA, 25 bp, Homo sapien
tccatcagctttctaggaagctttg

SEQ ID NO: 3248528 - DNA, 25 bp, Homo sapien
caagactttagtaaatccatcagct

SEQ ID NO: 3248529 - DNA, 25 bp, Homo sapien
atccatcagctttctaggaagcttt

SEQ ID NO: 3248530 - DNA, 25 bp, Homo sapien
tacttaaagagaaatgctggtacta

SEQ ID NO: 3248531 - DNA, 25 bp, Homo sapien
tttacttaaagagaaatgctggtac

SEQ ID NO: 3248532 - DNA, 25 bp, Homo sapien
ttaaagagaaatgctggtactaagc

SEQ ID NO: 3248533 - DNA, 25 bp, Homo sapien
taaagagaaatgctggtactaagcc

SEQ ID NO: 3248534 - DNA, 25 bp, Homo sapien
gtgttattaagtattgacttccaca

SEQ ID NO: 3248535 - DNA, 25 bp, Homo sapien
ggctaatacccatacaaaagcacaa

SEQ ID NO: 3248536 - DNA, 25 bp, Homo sapien
ctagagaaccccggctaatacccat

SEQ ID NO: 3248537 - DNA, 25 bp, Homo sapien
tatatcccattatatatcctattag

SEQ ID NO: 3248538 - DNA, 25 bp, Homo sapien
ggtgggtgccacacaagttaagctg

SEQ ID NO: 3248539 - DNA, 25 bp, Homo sapien
caggcataggtggtgtggttttaca

SEQ ID NO: 3248540 - DNA, 25 bp, Homo sapien
gacacttattgtagaatgccgaggg

SEQ ID NO: 3248541 - DNA, 25 bp, Homo sapien
agatagtccccatcacaggcatagg

SEQ ID NO: 3248542 - DNA, 25 bp, Homo sapien
ggccaggcgttactccagaaccttc

SEQ ID NO: 3248543 - DNA, 25 bp, Homo sapien
gccaggcgttactccagaaccttct

SEQ ID NO: 3248544 - DNA, 25 bp, Homo sapien
tggccaggcgttactccagaacctt

SEQ ID NO: 3248545 - DNA, 25 bp, Homo sapien
ttctaccagaaattccgtgtagaat

SEQ ID NO: 3248546 - DNA, 25 bp, Homo sapien
acagagccagagtctgtcggaaaaa

SEQ ID NO: 3248547 - DNA, 25 bp, Homo sapien
cagagccagagtctgtcggaaaaaa

SEQ ID NO: 3248548 - DNA, 25 bp, Homo sapien
gactcttgacggacacaaccttcct

SEQ ID NO: 3248549 - DNA, 25 bp, Homo sapien
gccacgacgcttcgctaattttgtg

SEQ ID NO: 3248550 - DNA, 25 bp, Homo sapien
cctgtgtgtgcgttgtgaacttcaa

SEQ ID NO: 3248551 - DNA, 25 bp, Homo sapien
ggacctgggcgtctgtctagacacg

SEQ ID NO: 3248552 - DNA, 25 bp, Homo sapien
gattacatgcgggaggtgaacctgg

SEQ ID NO: 3248553 - DNA, 25 bp, Homo sapien
aaacatcaagaaaacggcttggtct

SEQ ID NO: 3248554 - DNA, 25 bp, Homo sapien
acatcaagaaaacggcttggtcttt

SEQ ID NO: 3248555 - DNA, 25 bp, Homo sapien
aacatcaagaaaacggcttggtctt

SEQ ID NO: 3248556 - DNA, 25 bp, Homo sapien
tcagtaaaggtccaagtcggaagtc

SEQ ID NO: 3248557 - DNA, 25 bp, Homo sapien
tcgttcttgccaacagaatgactgg

SEQ ID NO: 3248558 - DNA, 25 bp, Homo sapien
tgggtcccctagtctctgtcagaac

SEQ ID NO: 3248559 - DNA, 25 bp, Homo sapien
agtcggaagtcatttagactgggtc

SEQ ID NO: 3248560 - DNA, 25 bp, Homo sapien
ggctgtagtttgtgatccttgattc

SEQ ID NO: 3248561 - DNA, 25 bp, Homo sapien
caggctgtagtttgtgatccttgat

SEQ ID NO: 3248562 - DNA, 25 bp, Homo sapien
gcaggctgtagtttgtgatccttga

SEQ ID NO: 3248563 - DNA, 25 bp, Homo sapien
tgtagtttgtgatccttgattcaga

SEQ ID NO: 3248564 - DNA, 25 bp, Homo sapien
aaacagtttctggtcatgacaagct

SEQ ID NO: 3248565 - DNA, 25 bp, Homo sapien
agggaaacagtttctggtcatgaca

SEQ ID NO: 3248566 - DNA, 25 bp, Homo sapien
cagtttctggtcatgacaagcttcc

SEQ ID NO: 3248567 - DNA, 25 bp, Homo sapien
gtttctggtcatgacaagcttccac

SEQ ID NO: 3248568 - DNA, 25 bp, Homo sapien
gggcatgctagctttacgccggcgc

SEQ ID NO: 3248569 - DNA, 25 bp, Homo sapien
gctagctttacgccggcgcccagtt

SEQ ID NO: 3248570 - DNA, 25 bp, Homo sapien
tggggcatgctagctttacgccggc

SEQ ID NO: 3248571 - DNA, 25 bp, Homo sapien
gcatgctagctttacgccggcgccc

SEQ ID NO: 3248572 - DNA, 25 bp, Homo sapien
acagctggcacgtctgtgggttgtg

SEQ ID NO: 3248573 - DNA, 25 bp, Homo sapien
tgtggacggtaaaggccacgtagac

SEQ ID NO: 3248574 - DNA, 25 bp, Homo sapien
tcaactagctcagtggtgaacagct

SEQ ID NO: 3248575 - DNA, 25 bp, Homo sapien
tctgtgggttgtggacggtaaaggc

SEQ ID NO: 3248576 - DNA, 25 bp, Homo sapien
aagttccaggtcatgctgaccacag

SEQ ID NO: 3248577 - DNA, 25 bp, Homo sapien
agactattagatgccatttaaacat

SEQ ID NO: 3248578 - DNA, 25 bp, Homo sapien
gagactattagatgccatttaaaca

SEQ ID NO: 3248579 - DNA, 25 bp, Homo sapien
tgaaagggacaagtggaaagttcca

SEQ ID NO: 3248580 - DNA, 25 bp, Homo sapien
caggtatccgctgatttgtctgctg

SEQ ID NO: 3248581 - DNA, 25 bp, Homo sapien
ggtatccgctgatttgtctgctggc

SEQ ID NO: 3248582 - DNA, 25 bp, Homo sapien
aggtatccgctgatttgtctgctgg

SEQ ID NO: 3248583 - DNA, 25 bp, Homo sapien
ctgggacccaggaccacaggcagag

SEQ ID NO: 3248584 - DNA, 25 bp, Homo sapien
gggacccaggaccacaggcagagct

SEQ ID NO: 3248585 - DNA, 25 bp, Homo sapien
tgggacccaggaccacaggcagagc

SEQ ID NO: 3248586 - DNA, 25 bp, Homo sapien
tgacaactggaacgggagtatgcct

SEQ ID NO: 3248587 - DNA, 25 bp, Homo sapien
ccatgtggtgacaactggaacggga

SEQ ID NO: 3248588 - DNA, 25 bp, Homo sapien
agagccatgtggtgacaactggaac

SEQ ID NO: 3248589 - DNA, 25 bp, Homo sapien
gtgacaactggaacgggagtatgcc

SEQ ID NO: 3248590 - DNA, 25 bp, Homo sapien
ggctggacggcagagagctgacaga

SEQ ID NO: 3248591 - DNA, 25 bp, Homo sapien
ctggacggcagagagctgacagacc

SEQ ID NO: 3248592 - DNA, 25 bp, Homo sapien
tggacggcagagagctgacagaccg

SEQ ID NO: 3248593 - DNA, 25 bp, Homo sapien
gacggcagagagctgacagaccgtc

SEQ ID NO: 3248594 - DNA, 25 bp, Homo sapien
tgcaccagggtaagcctgcctcggt

SEQ ID NO: 3248595 - DNA, 25 bp, Homo sapien
gggaccgtgtctgtgactgcaccag

SEQ ID NO: 3248596 - DNA, 25 bp, Homo sapien
accagggtaagcctgcctcggtgcc

SEQ ID NO: 3248597 - DNA, 25 bp, Homo sapien
gtgtctgtgactgcaccagggtaag

SEQ ID NO: 3248598 - DNA, 25 bp, Homo sapien
gctgctgggttctcggcccattctg

SEQ ID NO: 3248599 - DNA, 25 bp, Homo sapien
gaaggctgctgggttctcggcccat

SEQ ID NO: 3248600 - DNA, 25 bp, Homo sapien
gtgaaggctgctgggttctcggccc

SEQ ID NO: 3248601 - DNA, 25 bp, Homo sapien
aaggctgctgggttctcggcccatt

SEQ ID NO: 3248602 - DNA, 25 bp, Homo sapien
gccatcaaagtctccgccagcacct

SEQ ID NO: 3248603 - DNA, 25 bp, Homo sapien
ccatcaaagtctccgccagcacctc

SEQ ID NO: 3248604 - DNA, 25 bp, Homo sapien
tcaaagtctccgccagcacctcgta

SEQ ID NO: 3248605 - DNA, 25 bp, Homo sapien
ttggccatcaaagtctccgccagca

SEQ ID NO: 3248606 - DNA, 25 bp, Homo sapien
caggctgagtgagagcttgtttgct

SEQ ID NO: 3248607 - DNA, 25 bp, Homo sapien
gagagcttgtttgctttcgttctaa

SEQ ID NO: 3248608 - DNA, 25 bp, Homo sapien
gctgagtgagagcttgtttgctttc

SEQ ID NO: 3248609 - DNA, 25 bp, Homo sapien
ggggcaggctgagtgagagcttgtt

SEQ ID NO: 3248610 - DNA, 25 bp, Homo sapien
tttttcatgagttctgagagaaagc

SEQ ID NO: 3248611 - DNA, 25 bp, Homo sapien
aaagcaccgggcatacttgactgac

SEQ ID NO: 3248612 - DNA, 25 bp, Homo sapien
ttcatgagttctgagagaaagcacc

SEQ ID NO: 3248613 - DNA, 25 bp, Homo sapien
accgggcatacttgactgacggcgg

SEQ ID NO: 3248614 - DNA, 25 bp, Homo sapien
tgtattgccccgaaagtcttccctg

SEQ ID NO: 3248615 - DNA, 25 bp, Homo sapien
tgccccgaaagtcttccctgctgtg

SEQ ID NO: 3248616 - DNA, 25 bp, Homo sapien
tattgccccgaaagtcttccctgct

SEQ ID NO: 3248617 - DNA, 25 bp, Homo sapien
ttgccccgaaagtcttccctgctgt

SEQ ID NO: 3248618 - DNA, 25 bp, Homo sapien
aaaatatcccgccgcagctcagaat

SEQ ID NO: 3248619 - DNA, 25 bp, Homo sapien
tctgcaaaatatcccgccgcagctc

SEQ ID NO: 3248620 - DNA, 25 bp, Homo sapien
atcccgccgcagctcagaatctgat

SEQ ID NO: 3248621 - DNA, 25 bp, Homo sapien
atatcccgccgcagctcagaatctg

SEQ ID NO: 3248622 - DNA, 25 bp, Homo sapien
ctgcggtcctgagggcgctgacttt

SEQ ID NO: 3248623 - DNA, 25 bp, Homo sapien
actttttagaatgggcgagggcagc

SEQ ID NO: 3248624 - DNA, 25 bp, Homo sapien
agggcagctgtgtcgcagtgaccag

SEQ ID NO: 3248625 - DNA, 25 bp, Homo sapien
agctgtgtcgcagtgaccagaacga

SEQ ID NO: 3248626 - DNA, 25 bp, Homo sapien
ccgggggcttcagcacggagacaca

SEQ ID NO: 3248627 - DNA, 25 bp, Homo sapien
cgccgggggcttcagcacggagaca

SEQ ID NO: 3248628 - DNA, 25 bp, Homo sapien
gcttcagcacggagacacatcccgt

SEQ ID NO: 3248629 - DNA, 25 bp, Homo sapien
acacatcccgtctgcccctggactc

SEQ ID NO: 3248630 - DNA, 25 bp, Homo sapien
cgcagtgagcgcgccgccaggaagt

SEQ ID NO: 3248631 - DNA, 25 bp, Homo sapien
gagcgcgccgccaggaagtggcgct

SEQ ID NO: 3248632 - DNA, 25 bp, Homo sapien
gtgagcgcgccgccaggaagtggcg

SEQ ID NO: 3248633 - DNA, 25 bp, Homo sapien
tgcagcaagagttctgtccccgcgt

SEQ ID NO: 3248634 - DNA, 25 bp, Homo sapien
cggagggtttgaggcaggtccagga

SEQ ID NO: 3248635 - DNA, 25 bp, Homo sapien
ggcaggtccaggagcgagcccacgg

SEQ ID NO: 3248636 - DNA, 25 bp, Homo sapien
ctgcggagggtttgaggcaggtcca

SEQ ID NO: 3248637 - DNA, 25 bp, Homo sapien
gcaggtccaggagcgagcccacggt

SEQ ID NO: 3248638 - DNA, 25 bp, Homo sapien
caggggcgggccccaggattcggag

SEQ ID NO: 3248639 - DNA, 25 bp, Homo sapien
ctgccgacacggggccaggggcggg

SEQ ID NO: 3248640 - DNA, 25 bp, Homo sapien
tgccgacacggggccaggggcgggc

SEQ ID NO: 3248641 - DNA, 25 bp, Homo sapien
cagaacccggtcatgtttagtgaga

SEQ ID NO: 3248642 - DNA, 25 bp, Homo sapien
tccttcttgtagacgtggaggtgag

SEQ ID NO: 3248643 - DNA, 25 bp, Homo sapien
gatagtgtaaccagagttggcatac

SEQ ID NO: 3248644 - DNA, 25 bp, Homo sapien
tgtagacgtggaggtgagggtacgc

SEQ ID NO: 3248645 - DNA, 25 bp, Homo sapien
ttgggcaggggcttcccaaagccaa

SEQ ID NO: 3248646 - DNA, 25 bp, Homo sapien
tcttgcccccatttgggcaggggct

SEQ ID NO: 3248647 - DNA, 25 bp, Homo sapien
tcctcttgcccccatttgggcaggg

SEQ ID NO: 3248648 - DNA, 25 bp, Homo sapien
ttcccaaagccaacgtagcccacaa

SEQ ID NO: 3248649 - DNA, 25 bp, Homo sapien
tgggtctcttcttcacggtggtcac

SEQ ID NO: 3248650 - DNA, 25 bp, Homo sapien
caagggatcttgttgacgttgggtc

SEQ ID NO: 3248651 - DNA, 25 bp, Homo sapien
acgttgggtctcttcttcacggtgg

SEQ ID NO: 3248652 - DNA, 25 bp, Homo sapien
aacttgatgtagttggacaagggat

SEQ ID NO: 3248653 - DNA, 25 bp, Homo sapien
caggctgtgcttctctgtggctccc

SEQ ID NO: 3248654 - DNA, 25 bp, Homo sapien
tctgcaggctgtgcttctctgtggc

SEQ ID NO: 3248655 - DNA, 25 bp, Homo sapien
gtgctctgcaggctgtgcttctctg

SEQ ID NO: 3248656 - DNA, 25 bp, Homo sapien
gatgatgctgaggtgctctgcaggc

SEQ ID NO: 3248657 - DNA, 25 bp, Homo sapien
ttctggcccgaatcgatgtcccacg

SEQ ID NO: 3248658 - DNA, 25 bp, Homo sapien
cccttggaatagtggaatgatgccg

SEQ ID NO: 3248659 - DNA, 25 bp, Homo sapien
atgacggtatcgacgttctccctcc

SEQ ID NO: 3248660 - DNA, 25 bp, Homo sapien
ctcgaatttagcacctcccttggaa

SEQ ID NO: 3248661 - DNA, 25 bp, Homo sapien
gaagaaaattccatcagggccattt

SEQ ID NO: 3248662 - DNA, 25 bp, Homo sapien
tgcaagtacgagaagaaaattccat

SEQ ID NO: 3248663 - DNA, 25 bp, Homo sapien
cgagaagaaaattccatcagggcca

SEQ ID NO: 3248664 - DNA, 25 bp, Homo sapien
ctgcaagtacgagaagaaaattcca

SEQ ID NO: 3248665 - DNA, 25 bp, Homo sapien
atacctttctcacaatcagcaaagc

SEQ ID NO: 3248666 - DNA, 25 bp, Homo sapien
gccctgggttcgctctgattgcagc

SEQ ID NO: 3248667 - DNA, 25 bp, Homo sapien
gattgcagcggtttcctgccacctc

SEQ ID NO: 3248668 - DNA, 25 bp, Homo sapien
ttcgctctgattgcagcggtttcct

SEQ ID NO: 3248669 - DNA, 25 bp, Homo sapien
ccgggccctgggttcgctctgattg

SEQ ID NO: 3248670 - DNA, 25 bp, Homo sapien
gtcgtcttgaaggagtaattccaga

SEQ ID NO: 3248671 - DNA, 25 bp, Homo sapien
tcttgaaggagtaattccagagcgt

SEQ ID NO: 3248672 - DNA, 25 bp, Homo sapien
cttgaaggagtaattccagagcgtc

SEQ ID NO: 3248673 - DNA, 25 bp, Homo sapien
tgagtcgtcttgaaggagtaattcc

SEQ ID NO: 3248674 - DNA, 25 bp, Homo sapien
ctcagaaataaggaagttaacttcg

SEQ ID NO: 3248675 - DNA, 25 bp, Homo sapien
tcagaaataaggaagttaacttcga

SEQ ID NO: 3248676 - DNA, 25 bp, Homo sapien
aggaccagcattccacgaaggcagc

SEQ ID NO: 3248677 - DNA, 25 bp, Homo sapien
tcctgctatagaaatgaggcttctc

SEQ ID NO: 3248678 - DNA, 25 bp, Homo sapien
cttgaaatgaggacgggtagctccg

SEQ ID NO: 3248679 - DNA, 25 bp, Homo sapien
ccaatcggaatttaaaactatgtca

SEQ ID NO: 3248680 - DNA, 25 bp, Homo sapien
tttgctataaaacctgagattgtga

SEQ ID NO: 3248681 - DNA, 25 bp, Homo sapien
cctgagattgtgaaaatgttcattt

SEQ ID NO: 3248682 - DNA, 25 bp, Homo sapien
ctataaaacctgagattgtgaaaat

SEQ ID NO: 3248683 - DNA, 25 bp, Homo sapien
tgctataaaacctgagattgtgaaa

SEQ ID NO: 3248684 - DNA, 25 bp, Homo sapien
cagtgatggagcagtaagtacagag

SEQ ID NO: 3248685 - DNA, 25 bp, Homo sapien
agtgatggagcagtaagtacagagt

SEQ ID NO: 3248686 - DNA, 25 bp, Homo sapien
gtgatggagcagtaagtacagagtt

SEQ ID NO: 3248687 - DNA, 25 bp, Homo sapien
cagaattgcttttaatcttggtgag

SEQ ID NO: 3248688 - DNA, 25 bp, Homo sapien
ctcagaattgcttttaatcttggtg

SEQ ID NO: 3248689 - DNA, 25 bp, Homo sapien
gaattgcttttaatcttggtgagaa

SEQ ID NO: 3248690 - DNA, 25 bp, Homo sapien
cctcagaattgcttttaatcttggt

SEQ ID NO: 3248691 - DNA, 25 bp, Homo sapien
gtatgtgccaaattttgttgatcca

SEQ ID NO: 3248692 - DNA, 25 bp, Homo sapien
ttgtttaattcttagctatgagtga

SEQ ID NO: 3248693 - DNA, 25 bp, Homo sapien
tgtatgtgccaaattttgttgatcc

SEQ ID NO: 3248694 - DNA, 25 bp, Homo sapien
tgtttaattcttagctatgagtgag

SEQ ID NO: 3248695 - DNA, 25 bp, Homo sapien
tagttagccattcatccactctagt

SEQ ID NO: 3248696 - DNA, 25 bp, Homo sapien
ttagccattcatccactctagttag

SEQ ID NO: 3248697 - DNA, 25 bp, Homo sapien
tctagttagccattcatccactcta

SEQ ID NO: 3248698 - DNA, 25 bp, Homo sapien
catccatcacgtagttcttgtgcct

SEQ ID NO: 3248699 - DNA, 25 bp, Homo sapien
gtgtgcatattcctgatcctagtcc

SEQ ID NO: 3248700 - DNA, 25 bp, Homo sapien
gggtgtgcatattcctgatcctagt

SEQ ID NO: 3248701 - DNA, 25 bp, Homo sapien
gggggtgtgcatattcctgatccta

SEQ ID NO: 3248702 - DNA, 25 bp, Homo sapien
gttgggggtgtgcatattcctgatc

SEQ ID NO: 3248703 - DNA, 25 bp, Homo sapien
tacttacaactttcatggtgctaga

SEQ ID NO: 3248704 - DNA, 25 bp, Homo sapien
tatggcgatctaaatacttacaact

SEQ ID NO: 3248705 - DNA, 25 bp, Homo sapien
tcacttggacgaggagtatggcgat

SEQ ID NO: 3248706 - DNA, 25 bp, Homo sapien
gctagaaatcttaatcaggcaaatg

SEQ ID NO: 3248707 - DNA, 25 bp, Homo sapien
acgtcttgacatgcaaaactttgac

SEQ ID NO: 3248708 - DNA, 25 bp, Homo sapien
tcttgggcaatatcaacgtcttgac

SEQ ID NO: 3248709 - DNA, 25 bp, Homo sapien
gacagacaaggagagggtttcctgt

SEQ ID NO: 3248710 - DNA, 25 bp, Homo sapien
caaacagttgactttagggcatgta

SEQ ID NO: 3248711 - DNA, 25 bp, Homo sapien
gacggtcacctttcgaggacctgaa

SEQ ID NO: 3248712 - DNA, 25 bp, Homo sapien
tatggtcacccacacggtagtcgat

SEQ ID NO: 3248713 - DNA, 25 bp, Homo sapien
tctggaagacggtcacctttcgagg

SEQ ID NO: 3248714 - DNA, 25 bp, Homo sapien
ccttggggtcagaagtcgaggactc

SEQ ID NO: 3248715 - DNA, 25 bp, Homo sapien
aatcgctggtattagaagagtgaaa

SEQ ID NO: 3248716 - DNA, 25 bp, Homo sapien
agtaattaaggctacgactgtgctc

SEQ ID NO: 3248717 - DNA, 25 bp, Homo sapien
aacttcctgagaactgagatggggg

SEQ ID NO: 3248718 - DNA, 25 bp, Homo sapien
gagagacaagccagaatcatgatct

SEQ ID NO: 3248719 - DNA, 25 bp, Homo sapien
tattatttgactggtacggcacact

SEQ ID NO: 3248720 - DNA, 25 bp, Homo sapien
gagctccaggcatgatggataagtg

SEQ ID NO: 3248721 - DNA, 25 bp, Homo sapien
tctcgattttgacacagtattattt

SEQ ID NO: 3248722 - DNA, 25 bp, Homo sapien
tgagctccaggcatgatggataagt

SEQ ID NO: 3248723 - DNA, 25 bp, Homo sapien
agacagggcgagaccacaggaccga

SEQ ID NO: 3248724 - DNA, 25 bp, Homo sapien
acagggcgagaccacaggaccgaag

SEQ ID NO: 3248725 - DNA, 25 bp, Homo sapien
ggcgagaccacaggaccgaagtgaa

SEQ ID NO: 3248726 - DNA, 25 bp, Homo sapien
cgagaccacaggaccgaagtgaaat

SEQ ID NO: 3248727 - DNA, 25 bp, Homo sapien
ctagtggtcaggatgatttgggttc

SEQ ID NO: 3248728 - DNA, 25 bp, Homo sapien
gagattgcagtaaaggaaggcatag

SEQ ID NO: 3248729 - DNA, 25 bp, Homo sapien
gattgcagtaaaggaaggcatagga

SEQ ID NO: 3248730 - DNA, 25 bp, Homo sapien
ccctagttaggacactctagtggtc

SEQ ID NO: 3248731 - DNA, 25 bp, Homo sapien
tgcctgggtgcccaatgatgagacc

SEQ ID NO: 3248732 - DNA, 25 bp, Homo sapien
ggtgcccaatgatgagacctcctgc

SEQ ID NO: 3248733 - DNA, 25 bp, Homo sapien
atgcctgggtgcccaatgatgagac

SEQ ID NO: 3248734 - DNA, 25 bp, Homo sapien
ctgggtgcccaatgatgagacctcc

SEQ ID NO: 3248735 - DNA, 25 bp, Homo sapien
tgcctaagccaatgtgtagaaccat

SEQ ID NO: 3248736 - DNA, 25 bp, Homo sapien
tattccctatgctgtgcaggaggcc

SEQ ID NO: 3248737 - DNA, 25 bp, Homo sapien
gaatgtttatggtttcagaccttag

SEQ ID NO: 3248738 - DNA, 25 bp, Homo sapien
agagttccctgtagattctggacat

SEQ ID NO: 3248739 - DNA, 25 bp, Homo sapien
cggactgttggtgctgatcataaga

SEQ ID NO: 3248740 - DNA, 25 bp, Homo sapien
cttcttctggatttggcggactgtt

SEQ ID NO: 3248741 - DNA, 25 bp, Homo sapien
tcttctggatttggcggactgttgg

SEQ ID NO: 3248742 - DNA, 25 bp, Homo sapien
ggcggactgttggtgctgatcataa

SEQ ID NO: 3248743 - DNA, 25 bp, Homo sapien
acacaagacgcttgagaccatcaga

SEQ ID NO: 3248744 - DNA, 25 bp, Homo sapien
agatgcaatttgggttcctttggta

SEQ ID NO: 3248745 - DNA, 25 bp, Homo sapien
cttcaaacacaagacgcttgagacc

SEQ ID NO: 3248746 - DNA, 25 bp, Homo sapien
tcaaacacaagacgcttgagaccat

SEQ ID NO: 3248747 - DNA, 25 bp, Homo sapien
gcgaccaagtctttccaatatttat

SEQ ID NO: 3248748 - DNA, 25 bp, Homo sapien
gaccaagtctttccaatatttatta

SEQ ID NO: 3248749 - DNA, 25 bp, Homo sapien
cgaccaagtctttccaatatttatt

SEQ ID NO: 3248750 - DNA, 25 bp, Homo sapien
caagtctttccaatatttattatat

SEQ ID NO: 3248751 - DNA, 25 bp, Homo sapien
ctttcttagagaatggaccaactac

SEQ ID NO: 3248752 - DNA, 25 bp, Homo sapien
gatctttcttagagaatggaccaac

SEQ ID NO: 3248753 - DNA, 25 bp, Homo sapien
actgatctttcttagagaatggacc

SEQ ID NO: 3248754 - DNA, 25 bp, Homo sapien
tactgatctttcttagagaatggac

SEQ ID NO: 3248755 - DNA, 25 bp, Homo sapien
ggcacttgttcttaacaaccgccat

SEQ ID NO: 3248756 - DNA, 25 bp, Homo sapien
cataaggcacttgttcttaacaacc

SEQ ID NO: 3248757 - DNA, 25 bp, Homo sapien
ttttttgccacctttcataaggcac

SEQ ID NO: 3248758 - DNA, 25 bp, Homo sapien
cttttttgccacctttcataaggca

SEQ ID NO: 3248759 - DNA, 25 bp, Homo sapien
tgatgacttgcctcgcaactgccca

SEQ ID NO: 3248760 - DNA, 25 bp, Homo sapien
ggaaaatctccataccccattgatg

SEQ ID NO: 3248761 - DNA, 25 bp, Homo sapien
tgaactcgttcttcccttccttcaa

SEQ ID NO: 3248762 - DNA, 25 bp, Homo sapien
tgctcaccctggaccttacagtcac

SEQ ID NO: 3248763 - DNA, 25 bp, Homo sapien
accaccatcatgaatgacacagtaa

SEQ ID NO: 3248764 - DNA, 25 bp, Homo sapien
caccatcatgaatgacacagtaact

SEQ ID NO: 3248765 - DNA, 25 bp, Homo sapien
tcaaccaccatcatgaatgacacag

SEQ ID NO: 3248766 - DNA, 25 bp, Homo sapien
ccatcatgaatgacacagtaactac

SEQ ID NO: 3248767 - DNA, 25 bp, Homo sapien
tcgaccgctccagaggaaacaaatg

SEQ ID NO: 3248768 - DNA, 25 bp, Homo sapien
caaatggtcaccaatgtccttcacc

SEQ ID NO: 3248769 - DNA, 25 bp, Homo sapien
aagttcatgaccaatcgaccgctcc

SEQ ID NO: 3248770 - DNA, 25 bp, Homo sapien
aaacaaatggtcaccaatgtccttc

SEQ ID NO: 3248771 - DNA, 25 bp, Homo sapien
cctgtaaacagggagacgagagtcc

SEQ ID NO: 3248772 - DNA, 25 bp, Homo sapien
gatgacagattccactcatcactca

SEQ ID NO: 3248773 - DNA, 25 bp, Homo sapien
aacagggagacgagagtcctggtct

SEQ ID NO: 3248774 - DNA, 25 bp, Homo sapien
tggctcccccatttaagaccctgta

SEQ ID NO: 3248775 - DNA, 25 bp, Homo sapien
catctaatcttgtcttcctagcagt

SEQ ID NO: 3248776 - DNA, 25 bp, Homo sapien
ctgccatctaatcttgtcttcctag

SEQ ID NO: 3248777 - DNA, 25 bp, Homo sapien
atctaatcttgtcttcctagcagtc

SEQ ID NO: 3248778 - DNA, 25 bp, Homo sapien
gccatctaatcttgtcttcctagca

SEQ ID NO: 3248779 - DNA, 25 bp, Homo sapien
tgttgttgacaaaatccagaacaag

SEQ ID NO: 3248780 - DNA, 25 bp, Homo sapien
ttgttgacaaaatccagaacaagct

SEQ ID NO: 3248781 - DNA, 25 bp, Homo sapien
caaacgttggaactgttgttgacaa

SEQ ID NO: 3248782 - DNA, 25 bp, Homo sapien
gttgacaaaatccagaacaagctgg

SEQ ID NO: 3248783 - DNA, 25 bp, Homo sapien
tagtaatgcggaaaaattctaagca

SEQ ID NO: 3248784 - DNA, 25 bp, Homo sapien
gaagcaggctgtagtaatgcggaaa

SEQ ID NO: 3248785 - DNA, 25 bp, Homo sapien
gtaatgcggaaaaattctaagcaat

SEQ ID NO: 3248786 - DNA, 25 bp, Homo sapien
gcaggctgtagtaatgcggaaaaat

SEQ ID NO: 3248787 - DNA, 25 bp, Homo sapien
ttggcaagaagccttcatctcaagg

SEQ ID NO: 3248788 - DNA, 25 bp, Homo sapien
ggtccaggacctattagaagcccca

SEQ ID NO: 3248789 - DNA, 25 bp, Homo sapien
caagaagccttcatctcaagggcca

SEQ ID NO: 3248790 - DNA, 25 bp, Homo sapien
tcaagggccactggtccaggaccta

SEQ ID NO: 3248791 - DNA, 25 bp, Homo sapien
gctgcaacccaagcccagacttgtg

SEQ ID NO: 3248792 - DNA, 25 bp, Homo sapien
cccagacttgtgtacatttcaaggg

SEQ ID NO: 3248793 - DNA, 25 bp, Homo sapien
tgctgcaacccaagcccagacttgt

SEQ ID NO: 3248794 - DNA, 25 bp, Homo sapien
gtgtacatttcaagggtggctggac

SEQ ID NO: 3248795 - DNA, 25 bp, Homo sapien
catcgtcatgtgagtcaccagcatc

SEQ ID NO: 3248796 - DNA, 25 bp, Homo sapien
ctacacatcaacatcgtcatgtgag

SEQ ID NO: 3248797 - DNA, 25 bp, Homo sapien
agcatcactggcagggaccactgac

SEQ ID NO: 3248798 - DNA, 25 bp, Homo sapien
cagcatcactggcagggaccactga

SEQ ID NO: 3248799 - DNA, 25 bp, Homo sapien
tccttcctgtcccttgagttctgtg

SEQ ID NO: 3248800 - DNA, 25 bp, Homo sapien
cctccaactcatctccttcctgtcc

SEQ ID NO: 3248801 - DNA, 25 bp, Homo sapien
tcctgtcccttgagttctgtgtcac

SEQ ID NO: 3248802 - DNA, 25 bp, Homo sapien
ccttcctgtcccttgagttctgtgt

SEQ ID NO: 3248803 - DNA, 25 bp, Homo sapien
gctaacaggaatgtgctccgtgtct

SEQ ID NO: 3248804 - DNA, 25 bp, Homo sapien
gtagctaacaggaatgtgctccgtg

SEQ ID NO: 3248805 - DNA, 25 bp, Homo sapien
caggaatgtgctccgtgtcttcttc

SEQ ID NO: 3248806 - DNA, 25 bp, Homo sapien
tcaaaggaccgtccaccaacctgcg

SEQ ID NO: 3248807 - DNA, 25 bp, Homo sapien
gaaatcactgctgatcctcgtacca

SEQ ID NO: 3248808 - DNA, 25 bp, Homo sapien
aatcactgctgatcctcgtaccagc

SEQ ID NO: 3248809 - DNA, 25 bp, Homo sapien
gagtgaagaaatgggctctcttcct

SEQ ID NO: 3248810 - DNA, 25 bp, Homo sapien
aagaaatcactgctgatcctcgtac

SEQ ID NO: 3248811 - DNA, 25 bp, Homo sapien
gcctgttgaccgatccatttgccac

SEQ ID NO: 3248812 - DNA, 25 bp, Homo sapien
tgcttctatggacgagcttccctta

SEQ ID NO: 3248813 - DNA, 25 bp, Homo sapien
ccttgtctcttgtgatgcaccccag

SEQ ID NO: 3248814 - DNA, 25 bp, Homo sapien
cagagagggtaattggcttgtgcca

SEQ ID NO: 3248815 - DNA, 25 bp, Homo sapien
gttcagtgtccaggtgacccaagct

SEQ ID NO: 3248816 - DNA, 25 bp, Homo sapien
ctgagttcagtgtccaggtgaccca

SEQ ID NO: 3248817 - DNA, 25 bp, Homo sapien
tgagttcagtgtccaggtgacccaa

SEQ ID NO: 3248818 - DNA, 25 bp, Homo sapien
gagttcagtgtccaggtgacccaag

SEQ ID NO: 3248819 - DNA, 25 bp, Homo sapien
ctgaatgcagtaacgtgcacgggga

SEQ ID NO: 3248820 - DNA, 25 bp, Homo sapien
gatgtcaccatgagcaaccccaaga

SEQ ID NO: 3248821 - DNA, 25 bp, Homo sapien
tgaggatgtcaccatgagcaacccc

SEQ ID NO: 3248822 - DNA, 25 bp, Homo sapien
gtcaccatgagcaaccccaagactg

SEQ ID NO: 3248823 - DNA, 25 bp, Homo sapien
cggcgaggagggctgcccgtgctgc

SEQ ID NO: 3248824 - DNA, 25 bp, Homo sapien
ccacggcgaggagggctgcccgtgc

SEQ ID NO: 3248825 - DNA, 25 bp, Homo sapien
tgatgcagcccacggcgaggagggc

SEQ ID NO: 3248826 - DNA, 25 bp, Homo sapien
ctgatgcagcccacggcgaggaggg

SEQ ID NO: 3248827 - DNA, 25 bp, Homo sapien
gccccgcgggatgcaaggaactatg

SEQ ID NO: 3248828 - DNA, 25 bp, Homo sapien
gcgggatgcaaggaactatgcctct

SEQ ID NO: 3248829 - DNA, 25 bp, Homo sapien
cccggtggctcaggggcccaggtgt

SEQ ID NO: 3248830 - DNA, 25 bp, Homo sapien
gtgtgcaggacaccgggagctcata

SEQ ID NO: 3248831 - DNA, 25 bp, Homo sapien
cctccccgtcctcgcagtcgccggg

SEQ ID NO: 3248832 - DNA, 25 bp, Homo sapien
tcctcgcagtcgccgggctgtgcgc

SEQ ID NO: 3248833 - DNA, 25 bp, Homo sapien
tcgcagtcgccgggctgtgcgcttc

SEQ ID NO: 3248834 - DNA, 25 bp, Homo sapien
ccccgtcctcgcagtcgccgggctg

SEQ ID NO: 3248835 - DNA, 25 bp, Homo sapien
gggctggcagtggctccgggggctc

SEQ ID NO: 3248836 - DNA, 25 bp, Homo sapien
ctggcagtggctccgggggctctgc

SEQ ID NO: 3248837 - DNA, 25 bp, Homo sapien
tgcgggaagggctggcagtggctcc

SEQ ID NO: 3248838 - DNA, 25 bp, Homo sapien
ctgcgggaagggctggcagtggctc

SEQ ID NO: 3248839 - DNA, 25 bp, Homo sapien
ggaagaggaaggacctgtcgcgagc

SEQ ID NO: 3248840 - DNA, 25 bp, Homo sapien
gagctgggcatcggcgccggcgcgg

SEQ ID NO: 3248841 - DNA, 25 bp, Homo sapien
gcggagctgggcatcggcgccggcg

SEQ ID NO: 3248842 - DNA, 25 bp, Homo sapien
aaggacctgtcgcgagcggcctctc

SEQ ID NO: 3248843 - DNA, 25 bp, Homo sapien
acctgtcccggcccaggtgctcgct

SEQ ID NO: 3248844 - DNA, 25 bp, Homo sapien
tgtcccggcccaggtgctcgctgtc

SEQ ID NO: 3248845 - DNA, 25 bp, Homo sapien
tcacctgtcccggcccaggtgctcg

SEQ ID NO: 3248846 - DNA, 25 bp, Homo sapien
gcggacacgcaaggcccgggcctgc

SEQ ID NO: 3248847 - DNA, 25 bp, Homo sapien
agggaagccccgagagggtggacat

SEQ ID NO: 3248848 - DNA, 25 bp, Homo sapien
agagaagggaagccccgagagggtg

SEQ ID NO: 3248849 - DNA, 25 bp, Homo sapien
agaagagaagggaagccccgagagg

SEQ ID NO: 3248850 - DNA, 25 bp, Homo sapien
gagagaagagaagggaagccccgag

SEQ ID NO: 3248851 - DNA, 25 bp, Homo sapien
gaatttgcatgtctctgtctagagc

SEQ ID NO: 3248852 - DNA, 25 bp, Homo sapien
catagaccagaatttgcatgtctct

SEQ ID NO: 3248853 - DNA, 25 bp, Homo sapien
accagaatttgcatgtctctgtcta

SEQ ID NO: 3248854 - DNA, 25 bp, Homo sapien
tcatagaccagaatttgcatgtctc

SEQ ID NO: 3248855 - DNA, 25 bp, Homo sapien
ccgtgagcctccacatcgggcccat

SEQ ID NO: 3248856 - DNA, 25 bp, Homo sapien
gctccgtgagcctccacatcgggcc

SEQ ID NO: 3248857 - DNA, 25 bp, Homo sapien
gacgctccgtgagcctccacatcgg

SEQ ID NO: 3248858 - DNA, 25 bp, Homo sapien
aaggccgttgtaaagctttagcatc

SEQ ID NO: 3248859 - DNA, 25 bp, Homo sapien
gctttcatcacatcgttgaggaaag

SEQ ID NO: 3248860 - DNA, 25 bp, Homo sapien
catcacatcgttgaggaaagaggtg

SEQ ID NO: 3248861 - DNA, 25 bp, Homo sapien
tacttggcttttgctttcatcacat

SEQ ID NO: 3248862 - DNA, 25 bp, Homo sapien
aggaaagaggtggttgcttatggta

SEQ ID NO: 3248863 - DNA, 25 bp, Homo sapien
ataatccaggtgcttgatcccccat

SEQ ID NO: 3248864 - DNA, 25 bp, Homo sapien
ggtggataatccaggtgcttgatcc

SEQ ID NO: 3248865 - DNA, 25 bp, Homo sapien
tggataatccaggtgcttgatcccc

SEQ ID NO: 3248866 - DNA, 25 bp, Homo sapien
gataatccaggtgcttgatccccca

SEQ ID NO: 3248867 - DNA, 25 bp, Homo sapien
tcaatagaaatggaagccaaactcc

SEQ ID NO: 3248868 - DNA, 25 bp, Homo sapien
agaaatggaagccaaactccgaatt

SEQ ID NO: 3248869 - DNA, 25 bp, Homo sapien
aaatggaagccaaactccgaattga

SEQ ID NO: 3248870 - DNA, 25 bp, Homo sapien
atagaaatggaagccaaactccgaa

SEQ ID NO: 3248871 - DNA, 25 bp, Homo sapien
gactgttctggggcgcagcctccgc

SEQ ID NO: 3248872 - DNA, 25 bp, Homo sapien
gattcgactgttctggggcgcagcc

SEQ ID NO: 3248873 - DNA, 25 bp, Homo sapien
attcgactgttctggggcgcagcct

SEQ ID NO: 3248874 - DNA, 25 bp, Homo sapien
gttctggggcgcagcctccgcaggg

SEQ ID NO: 3248875 - DNA, 25 bp, Homo sapien
tgaaatcctgagaatgtaggggacg

SEQ ID NO: 3248876 - DNA, 25 bp, Homo sapien
aaatcctgagaatgtaggggacgat

SEQ ID NO: 3248877 - DNA, 25 bp, Homo sapien
tcctgagaatgtaggggacgatttt

SEQ ID NO: 3248878 - DNA, 25 bp, Homo sapien
gagaatgtaggggacgattttatag

SEQ ID NO: 3248879 - DNA, 25 bp, Homo sapien
gaccaagaaagacatctgcgtcagg

SEQ ID NO: 3248880 - DNA, 25 bp, Homo sapien
gaggatgacagatggctataaagca

SEQ ID NO: 3248881 - DNA, 25 bp, Homo sapien
gcagaggatgacagatggctataaa

SEQ ID NO: 3248882 - DNA, 25 bp, Homo sapien
aggatgacagatggctataaagcag

SEQ ID NO: 3248883 - DNA, 25 bp, Homo sapien
tgtggaggggggagtcagagcggac

SEQ ID NO: 3248884 - DNA, 25 bp, Homo sapien
gggtgtggaggggggagtcagagcg

SEQ ID NO: 3248885 - DNA, 25 bp, Homo sapien
gaggggggagtcagagcggacagcc

SEQ ID NO: 3248886 - DNA, 25 bp, Homo sapien
tggaggggggagtcagagcggacag

SEQ ID NO: 3248887 - DNA, 25 bp, Homo sapien
aggaccggctgcagttctggatcct

SEQ ID NO: 3248888 - DNA, 25 bp, Homo sapien
ggacagggacagggacagcaaagcg

SEQ ID NO: 3248889 - DNA, 25 bp, Homo sapien
agggacagcaaagcgaggaccggct

SEQ ID NO: 3248890 - DNA, 25 bp, Homo sapien
acagggacagcaaagcgaggaccgg

SEQ ID NO: 3248891 - DNA, 25 bp, Homo sapien
ctgagagtcccaggaggacgaattc

SEQ ID NO: 3248892 - DNA, 25 bp, Homo sapien
ggtgccacctacgccagtgtcatct

SEQ ID NO: 3248893 - DNA, 25 bp, Homo sapien
tgctcgaaaagagccagcctgctga

SEQ ID NO: 3248894 - DNA, 25 bp, Homo sapien
tcttctcctgctcgaaaagagccag

SEQ ID NO: 3248895 - DNA, 25 bp, Homo sapien
tgagctcttctcctgctcgaaaaga

SEQ ID NO: 3248896 - DNA, 25 bp, Homo sapien
tctcctgctcgaaaagagccagcct

SEQ ID NO: 3248897 - DNA, 25 bp, Homo sapien
tgtgatgtgtgtttcacgtcgcacg

SEQ ID NO: 3248898 - DNA, 25 bp, Homo sapien
ctgtgatgtgtgtttcacgtcgcac

SEQ ID NO: 3248899 - DNA, 25 bp, Homo sapien
gtgatgtgtgtttcacgtcgcacgg

SEQ ID NO: 3248900 - DNA, 25 bp, Homo sapien
tgatgtgtgtttcacgtcgcacggc

SEQ ID NO: 3248901 - DNA, 25 bp, Homo sapien
gtgcacgtgtgttgtcatgtagtgt

SEQ ID NO: 3248902 - DNA, 25 bp, Homo sapien
tgtgatatgtgtttcccatcatgtg

SEQ ID NO: 3248903 - DNA, 25 bp, Homo sapien
tatgtgtttcccatcatgtgtgcac

SEQ ID NO: 3248904 - DNA, 25 bp, Homo sapien
gtgtgcacgtgtgttgtcatgtagt

SEQ ID NO: 3248905 - DNA, 25 bp, Homo sapien
agagctcttcatggcgggggtgtcc

SEQ ID NO: 3248906 - DNA, 25 bp, Homo sapien
cgggtggaggaacggcaccttcagg

SEQ ID NO: 3248907 - DNA, 25 bp, Homo sapien
aagaggagcgggtggaggaacggca

SEQ ID NO: 3248908 - DNA, 25 bp, Homo sapien
ttcagagctcttcatggcgggggtg

SEQ ID NO: 3248909 - DNA, 25 bp, Homo sapien
tactgggcacagggtgaccccaccg

SEQ ID NO: 3248910 - DNA, 25 bp, Homo sapien
ctactgggcacagggtgaccccacc

SEQ ID NO: 3248911 - DNA, 25 bp, Homo sapien
cctggagggtgtgcctcgggagtct

SEQ ID NO: 3248912 - DNA, 25 bp, Homo sapien
gggagtctgtctcgccctctggacc

SEQ ID NO: 3248913 - DNA, 25 bp, Homo sapien
ggcccctggagggtgtgcctcggga

SEQ ID NO: 3248914 - DNA, 25 bp, Homo sapien
gcctcgggagtctgtctcgccctct

SEQ ID NO: 3248915 - DNA, 25 bp, Homo sapien
ctgccagccgctcccccgctccctt

SEQ ID NO: 3248916 - DNA, 25 bp, Homo sapien
tcccccgctcccttctcctggctgg

SEQ ID NO: 3248917 - DNA, 25 bp, Homo sapien
tcctctgtctctgccagccgctccc

SEQ ID NO: 3248918 - DNA, 25 bp, Homo sapien
cgctcccccgctcccttctcctggc

SEQ ID NO: 3248919 - DNA, 25 bp, Homo sapien
cgtggtaaactgaggccggcgagga

SEQ ID NO: 3248920 - DNA, 25 bp, Homo sapien
gtggtaaactgaggccggcgaggag

SEQ ID NO: 3248921 - DNA, 25 bp, Homo sapien
tccgcgtcgctctcgtccgagttgt

SEQ ID NO: 3248922 - DNA, 25 bp, Homo sapien
ccctccgcgtcgctctcgtccgagt

SEQ ID NO: 3248923 - DNA, 25 bp, Homo sapien
tcgccctccgcgtcgctctcgtccg

SEQ ID NO: 3248924 - DNA, 25 bp, Homo sapien
gcgtcgctctcgtccgagttgtcct

SEQ ID NO: 3248925 - DNA, 25 bp, Homo sapien
tagcgcggggccatgccccgccgca

SEQ ID NO: 3248926 - DNA, 25 bp, Homo sapien
cttctgctccatccgcaggtaggag

SEQ ID NO: 3248927 - DNA, 25 bp, Homo sapien
tccatccgcaggtaggagaccgcgg

SEQ ID NO: 3248928 - DNA, 25 bp, Homo sapien
ctagcgcggggccatgccccgccgc

SEQ ID NO: 3248929 - DNA, 25 bp, Homo sapien
gcgtcaccagcagcaccgccagctt

SEQ ID NO: 3248930 - DNA, 25 bp, Homo sapien
gtcaccagcagcaccgccagcttaa

SEQ ID NO: 3248931 - DNA, 25 bp, Homo sapien
cagcgtcaccagcagcaccgccagc

SEQ ID NO: 3248932 - DNA, 25 bp, Homo sapien
tcaccagcagcaccgccagcttaac

SEQ ID NO: 3248933 - DNA, 25 bp, Homo sapien
atgtgcaggctcgagcccaggtaca

SEQ ID NO: 3248934 - DNA, 25 bp, Homo sapien
ccaggtacacggggaagatggccac

SEQ ID NO: 3248935 - DNA, 25 bp, Homo sapien
gtgcaggctcgagcccaggtacacg

SEQ ID NO: 3248936 - DNA, 25 bp, Homo sapien
ttcatgtgcaggctcgagcccaggt

SEQ ID NO: 3248937 - DNA, 25 bp, Homo sapien
tccttgtcttcttacaagattccca

SEQ ID NO: 3248938 - DNA, 25 bp, Homo sapien
tcttcttacaagattcccaggagtg

SEQ ID NO: 3248939 - DNA, 25 bp, Homo sapien
ctgccaccagtggtagatgtgaaga

SEQ ID NO: 3248940 - DNA, 25 bp, Homo sapien
tagatgtgaagatgaagtcctgtct

SEQ ID NO: 3248941 - DNA, 25 bp, Homo sapien
gtgcctggactctggtactgagcag

SEQ ID NO: 3248942 - DNA, 25 bp, Homo sapien
tggatgtacaacaggccacttgctc

SEQ ID NO: 3248943 - DNA, 25 bp, Homo sapien
catgtctgtatctatgccgtggatg

SEQ ID NO: 3248944 - DNA, 25 bp, Homo sapien
ctctggtactgagcagactgggttg

SEQ ID NO: 3248945 - DNA, 25 bp, Homo sapien
cctccagtgttgatggggccctgtg

SEQ ID NO: 3248946 - DNA, 25 bp, Homo sapien
tccagtgttgatggggccctgtgcc

SEQ ID NO: 3248947 - DNA, 25 bp, Homo sapien
cagtgttgatggggccctgtgcccg

SEQ ID NO: 3248948 - DNA, 25 bp, Homo sapien
gtgttgatggggccctgtgcccgcc

SEQ ID NO: 3248949 - DNA, 25 bp, Homo sapien
gcagccacgaggggcactgggcgtg

SEQ ID NO: 3248950 - DNA, 25 bp, Homo sapien
caggctgtaagccacgaagacgtaa

SEQ ID NO: 3248951 - DNA, 25 bp, Homo sapien
gtgctgcccacgccccaaagggcag

SEQ ID NO: 3248952 - DNA, 25 bp, Homo sapien
gccacgaagacgtaagccagccgct

SEQ ID NO: 3248953 - DNA, 25 bp, Homo sapien
acaggtccactgtcctccctgtgtg

SEQ ID NO: 3248954 - DNA, 25 bp, Homo sapien
ggtccactgtcctccctgtgtggtg

SEQ ID NO: 3248955 - DNA, 25 bp, Homo sapien
cacggagaacaggtccactgtcctc

SEQ ID NO: 3248956 - DNA, 25 bp, Homo sapien
ccactgtcctccctgtgtggtgcac

SEQ ID NO: 3248957 - DNA, 25 bp, Homo sapien
agtttgagaagatgagaggggtcac

SEQ ID NO: 3248958 - DNA, 25 bp, Homo sapien
aggcaagtttgagaagatgagaggg

SEQ ID NO: 3248959 - DNA, 25 bp, Homo sapien
caagtttgagaagatgagaggggtc

SEQ ID NO: 3248960 - DNA, 25 bp, Homo sapien
tttgagaagatgagaggggtcacag

SEQ ID NO: 3248961 - DNA, 25 bp, Homo sapien
tagtgcagaggacgacagatggcta

SEQ ID NO: 3248962 - DNA, 25 bp, Homo sapien
gactgggtagtgcagaggacgacag

SEQ ID NO: 3248963 - DNA, 25 bp, Homo sapien
aaaaggaccaagaaagacatctgcg

SEQ ID NO: 3248964 - DNA, 25 bp, Homo sapien
gtgcagaggacgacagatggctaca

SEQ ID NO: 3248965 - DNA, 25 bp, Homo sapien
caggcagcccgcatgagagatgact

SEQ ID NO: 3248966 - DNA, 25 bp, Homo sapien
tcaggcagcccgcatgagagatgac

SEQ ID NO: 3248967 - DNA, 25 bp, Homo sapien
ttgtggaggggggagtcagagcgga

SEQ ID NO: 3248968 - DNA, 25 bp, Homo sapien
gaggggggagtcagagcggacagcc

SEQ ID NO: 3248969 - DNA, 25 bp, Homo sapien
tggaggggggagtcagagcggacag

SEQ ID NO: 3248970 - DNA, 25 bp, Homo sapien
tggggttgtggaggggggagtcaga

SEQ ID NO: 3248971 - DNA, 25 bp, Homo sapien
agggacagcaaagcgaggaccggct

SEQ ID NO: 3248972 - DNA, 25 bp, Homo sapien
ggacagggacagggacagcaaagcg

SEQ ID NO: 3248973 - DNA, 25 bp, Homo sapien
acagggacagcaaagcgaggaccgg

SEQ ID NO: 3248974 - DNA, 25 bp, Homo sapien
aggaccggctgcagttctggatcct

SEQ ID NO: 3248975 - DNA, 25 bp, Homo sapien
ctgagagtcccaggaggagaaattc

SEQ ID NO: 3248976 - DNA, 25 bp, Homo sapien
tgccaatgtagggcatctgttccct

SEQ ID NO: 3248977 - DNA, 25 bp, Homo sapien
aggtgccaatgtagggcatctgttc

SEQ ID NO: 3248978 - DNA, 25 bp, Homo sapien
gccaatgtagggcatctgttccctt

SEQ ID NO: 3248979 - DNA, 25 bp, Homo sapien
ggtgccaatgtagggcatctgttcc

SEQ ID NO: 3248980 - DNA, 25 bp, Homo sapien
ggtgaccatcttgtacatcagtgag

SEQ ID NO: 3248981 - DNA, 25 bp, Homo sapien
catcttgtacatcagtgaggccact

SEQ ID NO: 3248982 - DNA, 25 bp, Homo sapien
gggtgaccatcttgtacatcagtga

SEQ ID NO: 3248983 - DNA, 25 bp, Homo sapien
gaccatcttgtacatcagtgaggcc

SEQ ID NO: 3248984 - DNA, 25 bp, Homo sapien
gcagggaaatacatgatgatgttat

SEQ ID NO: 3248985 - DNA, 25 bp, Homo sapien
ggaaggaaaccaaatacggcagcag

SEQ ID NO: 3248986 - DNA, 25 bp, Homo sapien
ggaaaccaaatacggcagcagggaa

SEQ ID NO: 3248987 - DNA, 25 bp, Homo sapien
cgagatgggaaggaaaccaaatacg

SEQ ID NO: 3248988 - DNA, 25 bp, Homo sapien
acaacaaaagtaagaagccacagaa

SEQ ID NO: 3248989 - DNA, 25 bp, Homo sapien
acaaaccggacataggccatcacat

SEQ ID NO: 3248990 - DNA, 25 bp, Homo sapien
aagacaacaaaagtaagaagccaca

SEQ ID NO: 3248991 - DNA, 25 bp, Homo sapien
gaaacacgggttcatgatggctgaa

SEQ ID NO: 3248992 - DNA, 25 bp, Homo sapien
tcaggagcatgtgtctcttccatgc

SEQ ID NO: 3248993 - DNA, 25 bp, Homo sapien
agcatgtgtctcttccatgcctcca

SEQ ID NO: 3248994 - DNA, 25 bp, Homo sapien
ctccaaaaatggcaaagagagacat

SEQ ID NO: 3248995 - DNA, 25 bp, Homo sapien
ggagcatgtgtctcttccatgcctc

SEQ ID NO: 3248996 - DNA, 25 bp, Homo sapien
ctgagtcaggcagcctgcataggag

SEQ ID NO: 3248997 - DNA, 25 bp, Homo sapien
tcaggcagcctgcataggagatgac

SEQ ID NO: 3248998 - DNA, 25 bp, Homo sapien
gagtcaggcagcctgcataggagat

SEQ ID NO: 3248999 - DNA, 25 bp, Homo sapien
gtcaggcagcctgcataggagatga

SEQ ID NO: 3249000 - DNA, 25 bp, Homo sapien
aaggacaggttggagaggaagaagt

SEQ ID NO: 3249001 - DNA, 25 bp, Homo sapien
ggacaggttggagaggaagaagtac

SEQ ID NO: 3249002 - DNA, 25 bp, Homo sapien
cgatgtcaggcaaggacaggttgga

SEQ ID NO: 3249003 - DNA, 25 bp, Homo sapien
gcaaggacaggttggagaggaagaa

SEQ ID NO: 3249004 - DNA, 25 bp, Homo sapien
gaagtgtggaggtgggagtcagggc

SEQ ID NO: 3249005 - DNA, 25 bp, Homo sapien
gtgtggaggtgggagtcagggctga

SEQ ID NO: 3249006 - DNA, 25 bp, Homo sapien
tgtggaggtgggagtcagggctgac

SEQ ID NO: 3249007 - DNA, 25 bp, Homo sapien
atggaagtgtggaggtgggagtcag

SEQ ID NO: 3249008 - DNA, 25 bp, Homo sapien
aacagcccagcaaggaccggctgca

SEQ ID NO: 3249009 - DNA, 25 bp, Homo sapien
aggaacagcccagcaaggaccggct

SEQ ID NO: 3249010 - DNA, 25 bp, Homo sapien
acaggaacagcccagcaaggaccgg

SEQ ID NO: 3249011 - DNA, 25 bp, Homo sapien
ggaacagcccagcaaggaccggctg

SEQ ID NO: 3249012 - DNA, 25 bp, Homo sapien
aatcgagagacatccgttacattct

SEQ ID NO: 3249013 - DNA, 25 bp, Homo sapien
ggaggaatcgagagacatccgttac

SEQ ID NO: 3249014 - DNA, 25 bp, Homo sapien
cgagagacatccgttacattctgtg

SEQ ID NO: 3249015 - DNA, 25 bp, Homo sapien
ggaatcgagagacatccgttacatt

SEQ ID NO: 3249016 - DNA, 25 bp, Homo sapien
aacaagtaaaccaacacccagcatt

SEQ ID NO: 3249017 - DNA, 25 bp, Homo sapien
ccaacacccagcattgtgtctgcat

SEQ ID NO: 3249018 - DNA, 25 bp, Homo sapien
aaaccaacacccagcattgtgtctg

SEQ ID NO: 3249019 - DNA, 25 bp, Homo sapien
gaaacaagtaaaccaacacccagca

SEQ ID NO: 3249020 - DNA, 25 bp, Homo sapien
caggttgaccacaattatccagggt

SEQ ID NO: 3249021 - DNA, 25 bp, Homo sapien
gaaaatagaaaaaggcatggccagg

SEQ ID NO: 3249022 - DNA, 25 bp, Homo sapien
tgtcatactcaggtcgacagccaaa

SEQ ID NO: 3249023 - DNA, 25 bp, Homo sapien
cacaattatccagggttcaaagcca

SEQ ID NO: 3249024 - DNA, 25 bp, Homo sapien
ctggactggctcccgatgctggaga

SEQ ID NO: 3249025 - DNA, 25 bp, Homo sapien
gactggctcccgatgctggagaaga

SEQ ID NO: 3249026 - DNA, 25 bp, Homo sapien
actggctcccgatgctggagaagac

SEQ ID NO: 3249027 - DNA, 25 bp, Homo sapien
tggactggctcccgatgctggagaa

SEQ ID NO: 3249028 - DNA, 25 bp, Homo sapien
agaaggctgcaatattcctcaggac

SEQ ID NO: 3249029 - DNA, 25 bp, Homo sapien
aagaaggctgcaatattcctcagga

SEQ ID NO: 3249030 - DNA, 25 bp, Homo sapien
ctccttgtcatggctttctctcatg

SEQ ID NO: 3249031 - DNA, 25 bp, Homo sapien
cctccttgtcatggctttctctcat

SEQ ID NO: 3249032 - DNA, 25 bp, Homo sapien
ggagatggcagtgcacagagttggg

SEQ ID NO: 3249033 - DNA, 25 bp, Homo sapien
ggtgtagcgggggtggccctcagca

SEQ ID NO: 3249034 - DNA, 25 bp, Homo sapien
atgtacttctccacgatcgccagga

SEQ ID NO: 3249035 - DNA, 25 bp, Homo sapien
acttctccacgatcgccaggatgga

SEQ ID NO: 3249036 - DNA, 25 bp, Homo sapien
tgttatgttcccaaaacccagagtg

SEQ ID NO: 3249037 - DNA, 25 bp, Homo sapien
tatgttcccaaaacccagagtgatg

SEQ ID NO: 3249038 - DNA, 25 bp, Homo sapien
tgttgttatgttcccaaaacccaga

SEQ ID NO: 3249039 - DNA, 25 bp, Homo sapien
ctgttgttatgttcccaaaacccag

SEQ ID NO: 3249040 - DNA, 25 bp, Homo sapien
gagttggtgctttgactcattgagg

SEQ ID NO: 3249041 - DNA, 25 bp, Homo sapien
ggtgctttgactcattgaggacgcc

SEQ ID NO: 3249042 - DNA, 25 bp, Homo sapien
cttgtgctcattgagttggtgcttt

SEQ ID NO: 3249043 - DNA, 25 bp, Homo sapien
ctcattgagttggtgctttgactca

SEQ ID NO: 3249044 - DNA, 25 bp, Homo sapien
agtgttttgaaagactggataatat

SEQ ID NO: 3249045 - DNA, 25 bp, Homo sapien
actggataatatcctttgcatgccc

SEQ ID NO: 3249046 - DNA, 25 bp, Homo sapien
tatcctttgcatgcccccaaagaaa

SEQ ID NO: 3249047 - DNA, 25 bp, Homo sapien
gtgttttgaaagactggataatatc

SEQ ID NO: 3249048 - DNA, 25 bp, Homo sapien
aaatgccctcctttgtgctgcctca

SEQ ID NO: 3249049 - DNA, 25 bp, Homo sapien
aatgccctcctttgtgctgcctcat

SEQ ID NO: 3249050 - DNA, 25 bp, Homo sapien
cccaagctgccgaaatgccctcctt

SEQ ID NO: 3249051 - DNA, 25 bp, Homo sapien
aagctgccgaaatgccctcctttgt

SEQ ID NO: 3249052 - DNA, 25 bp, Homo sapien
caaagtatgcactgaatgggtgact

SEQ ID NO: 3249053 - DNA, 25 bp, Homo sapien
tgggtgactgggaaaactccttcag

SEQ ID NO: 3249054 - DNA, 25 bp, Homo sapien
tgacggtaatgactgcaaacaatgt

SEQ ID NO: 3249055 - DNA, 25 bp, Homo sapien
ccaattttaaggcatcccaggatga

SEQ ID NO: 3249056 - DNA, 25 bp, Homo sapien
cagtggagtggagggtacagacatg

SEQ ID NO: 3249057 - DNA, 25 bp, Homo sapien
ctaggaccgagagacagggatcaca

SEQ ID NO: 3249058 - DNA, 25 bp, Homo sapien
agacagggatcacagagctccccag

SEQ ID NO: 3249059 - DNA, 25 bp, Homo sapien
gagctccccagtggagtggagggta

SEQ ID NO: 3249060 - DNA, 25 bp, Homo sapien
ggaagcacagcaggtcgctcttgct

SEQ ID NO: 3249061 - DNA, 25 bp, Homo sapien
agcatgagcgccgtcaggaagcaca

SEQ ID NO: 3249062 - DNA, 25 bp, Homo sapien
acacgatcagcccatactggctgct

SEQ ID NO: 3249063 - DNA, 25 bp, Homo sapien
gcgtgcgtgtccttgaggcggaaga

SEQ ID NO: 3249064 - DNA, 25 bp, Homo sapien
tggccccgacgaccctgcgaccgag

SEQ ID NO: 3249065 - DNA, 25 bp, Homo sapien
ctgcgaccgaggcgcttgcagctgc

SEQ ID NO: 3249066 - DNA, 25 bp, Homo sapien
cgacgaccctgcgaccgaggcgctt

SEQ ID NO: 3249067 - DNA, 25 bp, Homo sapien
gaccctgcgaccgaggcgcttgcag

SEQ ID NO: 3249068 - DNA, 25 bp, Homo sapien
cttcgagacacccgcgccaagtctg

SEQ ID NO: 3249069 - DNA, 25 bp, Homo sapien
gagacacccgcgccaagtctggtcc

SEQ ID NO: 3249070 - DNA, 25 bp, Homo sapien
agacacccgcgccaagtctggtccc

SEQ ID NO: 3249071 - DNA, 25 bp, Homo sapien
tcgagacacccgcgccaagtctggt

SEQ ID NO: 3249072 - DNA, 25 bp, Homo sapien
aatattaacagtgcactatgtacct

SEQ ID NO: 3249073 - DNA, 25 bp, Homo sapien
aaatattaacagtgcactatgtacc

SEQ ID NO: 3249074 - DNA, 25 bp, Homo sapien
atattaacagtgcactatgtaccta

SEQ ID NO: 3249075 - DNA, 25 bp, Homo sapien
aaaatattaacagtgcactatgtac

SEQ ID NO: 3249076 - DNA, 25 bp, Homo sapien
atacaaagtcacaattttccccagg

SEQ ID NO: 3249077 - DNA, 25 bp, Homo sapien
cagctagctggatgtttaaccattc

SEQ ID NO: 3249078 - DNA, 25 bp, Homo sapien
acacactgtagcttttctgttaggg

SEQ ID NO: 3249079 - DNA, 25 bp, Homo sapien
gttagggtctgccatgctttcagct

SEQ ID NO: 3249080 - DNA, 25 bp, Homo sapien
agtaagagctcccaaacatctgtaa

SEQ ID NO: 3249081 - DNA, 25 bp, Homo sapien
cactaaaaagcatagttcactctgt

SEQ ID NO: 3249082 - DNA, 25 bp, Homo sapien
gtcagagtaagagctcccaaacatc

SEQ ID NO: 3249083 - DNA, 25 bp, Homo sapien
ttcatgtcagagtaagagctcccaa

SEQ ID NO: 3249084 - DNA, 25 bp, Homo sapien
ctgagaacacgagaaggggagatgg

SEQ ID NO: 3249085 - DNA, 25 bp, Homo sapien
gtggcaccacaggtgtacaggaatg

SEQ ID NO: 3249086 - DNA, 25 bp, Homo sapien
caccacaggtgtacaggaatgaagg

SEQ ID NO: 3249087 - DNA, 25 bp, Homo sapien
cacaggtgtacaggaatgaagggcc

SEQ ID NO: 3249088 - DNA, 25 bp, Homo sapien
aggcagaaattctataaataacacc

SEQ ID NO: 3249089 - DNA, 25 bp, Homo sapien
ggcagaaattctataaataacacca

SEQ ID NO: 3249090 - DNA, 25 bp, Homo sapien
tgataaacatgacaacccccataaa

SEQ ID NO: 3249091 - DNA, 25 bp, Homo sapien
ggagtgtgataaacatgacaacccc

SEQ ID NO: 3249092 - DNA, 25 bp, Homo sapien
tcatccaaggagtgtgataaacatg

SEQ ID NO: 3249093 - DNA, 25 bp, Homo sapien
atccaaggagtgtgataaacatgac

SEQ ID NO: 3249094 - DNA, 25 bp, Homo sapien
gagtgaaaaacgaccacacatgcca

SEQ ID NO: 3249095 - DNA, 25 bp, Homo sapien
gaaaaacgaccacacatgccataaa

SEQ ID NO: 3249096 - DNA, 25 bp, Homo sapien
acaatggagtgaaaaacgaccacac

SEQ ID NO: 3249097 - DNA, 25 bp, Homo sapien
tggagtgaaaaacgaccacacatgc

SEQ ID NO: 3249098 - DNA, 25 bp, Homo sapien
ggctggatacttgacatcatattct

SEQ ID NO: 3249099 - DNA, 25 bp, Homo sapien
tccacaataccattccaggtagact

SEQ ID NO: 3249100 - DNA, 25 bp, Homo sapien
caggtagactatgcagtaaaatgca

SEQ ID NO: 3249101 - DNA, 25 bp, Homo sapien
tggtaatgggtatcaaggctggata

SEQ ID NO: 3249102 - DNA, 25 bp, Homo sapien
atgaaaacctagagaccttttcctg

SEQ ID NO: 3249103 - DNA, 25 bp, Homo sapien
gaagtcaacataataggtcacaaca

SEQ ID NO: 3249104 - DNA, 25 bp, Homo sapien
gaatggatattaagtcttggaagag

SEQ ID NO: 3249105 - DNA, 25 bp, Homo sapien
gatattaagtcttggaagaggtttc

SEQ ID NO: 3249106 - DNA, 25 bp, Homo sapien
ggtcacaacaatggatgccaaaatc

SEQ ID NO: 3249107 - DNA, 25 bp, Homo sapien
aacatatgagataaaaaatatccaa

SEQ ID NO: 3249108 - DNA, 25 bp, Homo sapien
caaccaccacttacaatttctactg

SEQ ID NO: 3249109 - DNA, 25 bp, Homo sapien
gcaaccaccacttacaatttctact

SEQ ID NO: 3249110 - DNA, 25 bp, Homo sapien
tcagatctaatccccagaagcaacc

SEQ ID NO: 3249111 - DNA, 25 bp, Homo sapien
ctgttttgtacccaaatggcggcat

SEQ ID NO: 3249112 - DNA, 25 bp, Homo sapien
taggtgtcaaatcagctctccagag

SEQ ID NO: 3249113 - DNA, 25 bp, Homo sapien
catacgagtcgacctgatgtgtcag

SEQ ID NO: 3249114 - DNA, 25 bp, Homo sapien
cagctttctgctgacgggcaaggca

SEQ ID NO: 3249115 - DNA, 25 bp, Homo sapien
gatgcacagcactccgcgattctaa

SEQ ID NO: 3249116 - DNA, 25 bp, Homo sapien
gcctcggcgtccggcaggaggagga

SEQ ID NO: 3249117 - DNA, 25 bp, Homo sapien
gaggaggaatcgccgccggagctgc

SEQ ID NO: 3249118 - DNA, 25 bp, Homo sapien
cggcgtccggcaggaggaggaatcg

SEQ ID NO: 3249119 - DNA, 25 bp, Homo sapien
ggcccggcgtcaccctcgcggtcca

SEQ ID NO: 3249120 - DNA, 25 bp, Homo sapien
tctggacctcctggcgtttggattg

SEQ ID NO: 3249121 - DNA, 25 bp, Homo sapien
gaagtgacgtcagacacagcgcttc

SEQ ID NO: 3249122 - DNA, 25 bp, Homo sapien
ccccgaaatgcgacggaagtgacgt

SEQ ID NO: 3249123 - DNA, 25 bp, Homo sapien
cgtttggattggagactgtgttctc

SEQ ID NO: 3249124 - DNA, 25 bp, Homo sapien
aggaggaccaggattaccgctgccg

SEQ ID NO: 3249125 - DNA, 25 bp, Homo sapien
tgagacgctgcgcttccgaagccct

SEQ ID NO: 3249126 - DNA, 25 bp, Homo sapien
aggcttccgggtgccagagcaggag

SEQ ID NO: 3249127 - DNA, 25 bp, Homo sapien
gtccagggccgggatgcgcgaccgt

SEQ ID NO: 3249128 - DNA, 25 bp, Homo sapien
ctctcgtacggggttagaagccttg

SEQ ID NO: 3249129 - DNA, 25 bp, Homo sapien
tagaagccttgttaacaggaagtga

SEQ ID NO: 3249130 - DNA, 25 bp, Homo sapien
cagggcctccgtggtaactgaatac

SEQ ID NO: 3249131 - DNA, 25 bp, Homo sapien
tctcctcgaaaaagggtcagtgcag

SEQ ID NO: 3249132 - DNA, 25 bp, Homo sapien
ctttgatctacaatggacagaagtc

SEQ ID NO: 3249133 - DNA, 25 bp, Homo sapien
ttgatctacaatggacagaagtcgg

SEQ ID NO: 3249134 - DNA, 25 bp, Homo sapien
tttgatctacaatggacagaagtcg

SEQ ID NO: 3249135 - DNA, 25 bp, Homo sapien
tgatctacaatggacagaagtcggc

SEQ ID NO: 3249136 - DNA, 25 bp, Homo sapien
ttatcatccagtggtacccggtgac

SEQ ID NO: 3249137 - DNA, 25 bp, Homo sapien
aaaatggagtcaccattttccacag

SEQ ID NO: 3249138 - DNA, 25 bp, Homo sapien
catccaagactgaaatccgctggga

SEQ ID NO: 3249139 - DNA, 25 bp, Homo sapien
tggttgacagcatccaataagagag

SEQ ID NO: 3249140 - DNA, 25 bp, Homo sapien
tccaactcttttgctaaaatccagt

SEQ ID NO: 3249141 - DNA, 25 bp, Homo sapien
ttccaactcttttgctaaaatccag

SEQ ID NO: 3249142 - DNA, 25 bp, Homo sapien
cttccaactcttttgctaaaatcca

SEQ ID NO: 3249143 - DNA, 25 bp, Homo sapien
caactcttttgctaaaatccagttt

SEQ ID NO: 3249144 - DNA, 25 bp, Homo sapien
tttgtccttgtagagttgagggagc

SEQ ID NO: 3249145 - DNA, 25 bp, Homo sapien
tgtccttgtagagttgagggagcta

SEQ ID NO: 3249146 - DNA, 25 bp, Homo sapien
gcttttttgtccttgtagagttgag

SEQ ID NO: 3249147 - DNA, 25 bp, Homo sapien
tttttgtccttgtagagttgaggga

SEQ ID NO: 3249148 - DNA, 25 bp, Homo sapien
aatttgagttgttagaattcattac

SEQ ID NO: 3249149 - DNA, 25 bp, Homo sapien
tttgagttgttagaattcattacac

SEQ ID NO: 3249150 - DNA, 25 bp, Homo sapien
gagttgttagaattcattacacatt

SEQ ID NO: 3249151 - DNA, 25 bp, Homo sapien
aaaatttgagttgttagaattcatt

SEQ ID NO: 3249152 - DNA, 25 bp, Homo sapien
ttgttaaagatgaccaggagttcct

SEQ ID NO: 3249153 - DNA, 25 bp, Homo sapien
cttaaaggtagggttcttgctgatt

SEQ ID NO: 3249154 - DNA, 25 bp, Homo sapien
tttcttgttaaagatgaccaggagt

SEQ ID NO: 3249155 - DNA, 25 bp, Homo sapien
tcatttcacaagcttgactttgtcc

SEQ ID NO: 3249156 - DNA, 25 bp, Homo sapien
tttgatggttatttcattgtctggg

SEQ ID NO: 3249157 - DNA, 25 bp, Homo sapien
tcattgtctggggcctgtttcagaa

SEQ ID NO: 3249158 - DNA, 25 bp, Homo sapien
ggttatttcattgtctggggcctgt

SEQ ID NO: 3249159 - DNA, 25 bp, Homo sapien
tccttagctttttgatggttatttc

SEQ ID NO: 3249160 - DNA, 25 bp, Homo sapien
gctctcttggcaaaggaccgggaaa

SEQ ID NO: 3249161 - DNA, 25 bp, Homo sapien
gagttctctaccctcgcaaggctgt

SEQ ID NO: 3249162 - DNA, 25 bp, Homo sapien
tcacagaaaaaacggtggctccacc

SEQ ID NO: 3249163 - DNA, 25 bp, Homo sapien
tgtgatgtcagtggaacctgcacca

SEQ ID NO: 3249164 - DNA, 25 bp, Homo sapien
aatctccagagaaaaacgctgagcg

SEQ ID NO: 3249165 - DNA, 25 bp, Homo sapien
tgatgcacgcacagcacgggatact

SEQ ID NO: 3249166 - DNA, 25 bp, Homo sapien
cagagactagaaaccacccaggtgt

SEQ ID NO: 3249167 - DNA, 25 bp, Homo sapien
gggatactcctcaccaataagatga

SEQ ID NO: 3249168 - DNA, 25 bp, Homo sapien
cttttgcaggagcctcatcgtcttc

SEQ ID NO: 3249169 - DNA, 25 bp, Homo sapien
ctcatcgtcttctggttctccgccc

SEQ ID NO: 3249170 - DNA, 25 bp, Homo sapien
gttctccgccctcaggatgctctgg

SEQ ID NO: 3249171 - DNA, 25 bp, Homo sapien
tttgcaggagcctcatcgtcttctg

SEQ ID NO: 3249172 - DNA, 25 bp, Homo sapien
cttccgagtgcctccgcttcctctt

SEQ ID NO: 3249173 - DNA, 25 bp, Homo sapien
gagccattggcctcagggacttcct

SEQ ID NO: 3249174 - DNA, 25 bp, Homo sapien
tgcgcccacgtgtgcctcttcctca

SEQ ID NO: 3249175 - DNA, 25 bp, Homo sapien
ttgcgcttcttaggcttctgattcc

SEQ ID NO: 3249176 - DNA, 25 bp, Homo sapien
ttctttctcttttattcttcttcac

SEQ ID NO: 3249177 - DNA, 25 bp, Homo sapien
tttctttctcttttattcttcttca

SEQ ID NO: 3249178 - DNA, 25 bp, Homo sapien
cttctgccgttcttcctttctttct

SEQ ID NO: 3249179 - DNA, 25 bp, Homo sapien
ctgccgttcttcctttctttctctt

SEQ ID NO: 3249180 - DNA, 25 bp, Homo sapien
cactgggtggagtggccgttgatcc

SEQ ID NO: 3249181 - DNA, 25 bp, Homo sapien
gcgtctttcactttggaggctggaa

SEQ ID NO: 3249182 - DNA, 25 bp, Homo sapien
ccttgctgttccacggcgtctttca

SEQ ID NO: 3249183 - DNA, 25 bp, Homo sapien
gatcctgttccttattgactggttc

SEQ ID NO: 3249184 - DNA, 25 bp, Homo sapien
tacccctgttaaatacattacctca

SEQ ID NO: 3249185 - DNA, 25 bp, Homo sapien
tgacctggagcaattcattgaactg

SEQ ID NO: 3249186 - DNA, 25 bp, Homo sapien
gacatcagcaagttcagtcccattc

SEQ ID NO: 3249187 - DNA, 25 bp, Homo sapien
gcattaccttattaaaatcagcaca

SEQ ID NO: 3249188 - DNA, 25 bp, Homo sapien
cacctggtccagaatggattcatta

SEQ ID NO: 3249189 - DNA, 25 bp, Homo sapien
gctgttggaagcttcagaaaagata

SEQ ID NO: 3249190 - DNA, 25 bp, Homo sapien
tgttggaagcttcagaaaagatatt

SEQ ID NO: 3249191 - DNA, 25 bp, Homo sapien
acacctggtccagaatggattcatt

SEQ ID NO: 3249192 - DNA, 25 bp, Homo sapien
tttcctgggaacgttgtcaaaagca

SEQ ID NO: 3249193 - DNA, 25 bp, Homo sapien
cattgggtctctttattaattcact

SEQ ID NO: 3249194 - DNA, 25 bp, Homo sapien
ttgctctaaaagttctctcactttg

SEQ ID NO: 3249195 - DNA, 25 bp, Homo sapien
tgggaacgttgtcaaaagcactaat

SEQ ID NO: 3249196 - DNA, 25 bp, Homo sapien
acgcctgctgtttgatgtcgccttt

SEQ ID NO: 3249197 - DNA, 25 bp, Homo sapien
cgcctgctgtttgatgtcgcctttg

SEQ ID NO: 3249198 - DNA, 25 bp, Homo sapien
cctgctgtttgatgtcgcctttgtg

SEQ ID NO: 3249199 - DNA, 25 bp, Homo sapien
gctgtttgatgtcgcctttgtgggt

SEQ ID NO: 3249200 - DNA, 25 bp, Homo sapien
tctgatcttcacttatgcatttcac

SEQ ID NO: 3249201 - DNA, 25 bp, Homo sapien
ttcacttatgcatttcacgtggttt

SEQ ID NO: 3249202 - DNA, 25 bp, Homo sapien
gatcttcacttatgcatttcacgtg

SEQ ID NO: 3249203 - DNA, 25 bp, Homo sapien
acttctgatcttcacttatgcattt

SEQ ID NO: 3249204 - DNA, 25 bp, Homo sapien
actgattcaccacatgcattgcatg

SEQ ID NO: 3249205 - DNA, 25 bp, Homo sapien
cagaaatctttaccgcagtcaatgc

SEQ ID NO: 3249206 - DNA, 25 bp, Homo sapien
tctttaccgcagtcaatgcaagaaa

SEQ ID NO: 3249207 - DNA, 25 bp, Homo sapien
ttcactgattcaccacatgcattgc

SEQ ID NO: 3249208 - DNA, 25 bp, Homo sapien
gctaaatattctctatccaagacag

SEQ ID NO: 3249209 - DNA, 25 bp, Homo sapien
tggctaaatattctctatccaagac

SEQ ID NO: 3249210 - DNA, 25 bp, Homo sapien
taaatattctctatccaagacaggt

SEQ ID NO: 3249211 - DNA, 25 bp, Homo sapien
aatggctaaatattctctatccaag

SEQ ID NO: 3249212 - DNA, 25 bp, Homo sapien
atgtagaaattcagtcactccaatg

SEQ ID NO: 3249213 - DNA, 25 bp, Homo sapien
tcagtcactccaatggaagacagca

SEQ ID NO: 3249214 - DNA, 25 bp, Homo sapien
tagaaattcagtcactccaatggaa

SEQ ID NO: 3249215 - DNA, 25 bp, Homo sapien
gaaattcagtcactccaatggaaga

SEQ ID NO: 3249216 - DNA, 25 bp, Homo sapien
gttggtcaccctaagtccaggactc

SEQ ID NO: 3249217 - DNA, 25 bp, Homo sapien
cctaagtatgtgctctggaccgcta

SEQ ID NO: 3249218 - DNA, 25 bp, Homo sapien
gaagagccctgtctccaacatgcag

SEQ ID NO: 3249219 - DNA, 25 bp, Homo sapien
tccaggtagtggcaacccagattca

SEQ ID NO: 3249220 - DNA, 25 bp, Homo sapien
agccccagcctcccaggtcggacct

SEQ ID NO: 3249221 - DNA, 25 bp, Homo sapien
ccagcctcccaggtcggacctctgg

SEQ ID NO: 3249222 - DNA, 25 bp, Homo sapien
ccccagcctcccaggtcggacctct

SEQ ID NO: 3249223 - DNA, 25 bp, Homo sapien
cagcctcccaggtcggacctctggg

SEQ ID NO: 3249224 - DNA, 25 bp, Homo sapien
cctctcaggcttcgcggtgcagaat

SEQ ID NO: 3249225 - DNA, 25 bp, Homo sapien
cggccgcggggagcacgtggactcg

SEQ ID NO: 3249226 - DNA, 25 bp, Homo sapien
agcgccgcagctacctgcctctcag

SEQ ID NO: 3249227 - DNA, 25 bp, Homo sapien
tcagccagcgcccgccaacggtttc

SEQ ID NO: 3249228 - DNA, 25 bp, Homo sapien
cgttgtcgtgatgattccgcggcca

SEQ ID NO: 3249229 - DNA, 25 bp, Homo sapien
ccagcggatcgctgcgagtggcctt

SEQ ID NO: 3249230 - DNA, 25 bp, Homo sapien
caggaaggcggttccggcaagccaa

SEQ ID NO: 3249231 - DNA, 25 bp, Homo sapien
ccagtggaagtgacgccaacggaag

SEQ ID NO: 3249232 - DNA, 25 bp, Homo sapien
tcttccaactatttctcttccataa

SEQ ID NO: 3249233 - DNA, 25 bp, Homo sapien
ttcttccaactatttctcttccata

SEQ ID NO: 3249234 - DNA, 25 bp, Homo sapien
gaagacgctgcagaatgaaaacgag

SEQ ID NO: 3249235 - DNA, 25 bp, Homo sapien
gagttagaccagtgatgtaccgcgc

SEQ ID NO: 3249236 - DNA, 25 bp, Homo sapien
gaagcgcgtgtgcatcgtgtcaact

SEQ ID NO: 3249237 - DNA, 25 bp, Homo sapien
gaagcgaaggcttgatgctgtctca

SEQ ID NO: 3249238 - DNA, 25 bp, Homo sapien
gctgttccccgtgttaaggccacca

SEQ ID NO: 3249239 - DNA, 25 bp, Homo sapien
caacaggcagagacgtggcccggct

SEQ ID NO: 3249240 - DNA, 25 bp, Homo sapien
gccgccagatgacaacatagccact

SEQ ID NO: 3249241 - DNA, 25 bp, Homo sapien
ggcccgttggagagtggcactctct

SEQ ID NO: 3249242 - DNA, 25 bp, Homo sapien
gagcttgaacgcgatgacagatgcc

SEQ ID NO: 3249243 - DNA, 25 bp, Homo sapien
gcttgaacgcgatgacagatgccat

SEQ ID NO: 3249244 - DNA, 25 bp, Homo sapien
gcttaggagcttgaacgcgatgaca

SEQ ID NO: 3249245 - DNA, 25 bp, Homo sapien
taggagcttgaacgcgatgacagat

SEQ ID NO: 3249246 - DNA, 25 bp, Homo sapien
ctcctcatttatttctacctttttg

SEQ ID NO: 3249247 - DNA, 25 bp, Homo sapien
tcactcagcagtcggtagcattgca

SEQ ID NO: 3249248 - DNA, 25 bp, Homo sapien
tctagtaactgcaaaggcttctgag

SEQ ID NO: 3249249 - DNA, 25 bp, Homo sapien
ttccagaactgagctcctgaggatc

SEQ ID NO: 3249250 - DNA, 25 bp, Homo sapien
gactgtgggcgccaccaagagtttc

SEQ ID NO: 3249251 - DNA, 25 bp, Homo sapien
tatgtggccttcgttatttatcccc

SEQ ID NO: 3249252 - DNA, 25 bp, Homo sapien
ggccacatggctagtatgaggacta

SEQ ID NO: 3249253 - DNA, 25 bp, Homo sapien
catcgtgacagcgaacacaatgtgg

SEQ ID NO: 3249254 - DNA, 25 bp, Homo sapien
cctcattttatggaagcggaaacgg

SEQ ID NO: 3249255 - DNA, 25 bp, Homo sapien
tgcttcgtgattccggtgatgaccg

SEQ ID NO: 3249256 - DNA, 25 bp, Homo sapien
gctccagcccttcgtgcttcgtgat

SEQ ID NO: 3249257 - DNA, 25 bp, Homo sapien
tgaccggttgctgacgctggagagg

SEQ ID NO: 3249258 - DNA, 25 bp, Homo sapien
gattccggtgatgaccggttgctga

SEQ ID NO: 3249259 - DNA, 25 bp, Homo sapien
tcaccgggtaccatgtcaccctggg

SEQ ID NO: 3249260 - DNA, 25 bp, Homo sapien
agagatctgaaggtcggctttgcac

SEQ ID NO: 3249261 - DNA, 25 bp, Homo sapien
tgaaggtcggctttgcacgggaaca

SEQ ID NO: 3249262 - DNA, 25 bp, Homo sapien
gggtggtccagccttgaccctcacc

SEQ ID NO: 3249263 - DNA, 25 bp, Homo sapien
catcatagacgcaggtgctgggccg

SEQ ID NO: 3249264 - DNA, 25 bp, Homo sapien
ttcacaggaaaccaggcgttggggc

SEQ ID NO: 3249265 - DNA, 25 bp, Homo sapien
ggggcgaatgccctttgcagggtca

SEQ ID NO: 3249266 - DNA, 25 bp, Homo sapien
tgcacaccccatcatagacgcaggt

SEQ ID NO: 3249267 - DNA, 25 bp, Homo sapien
gttccagggactctcgcattctcgt

SEQ ID NO: 3249268 - DNA, 25 bp, Homo sapien
tcgcattctcgttgcacggttcggc

SEQ ID NO: 3249269 - DNA, 25 bp, Homo sapien
tcgttgcacggttcggctggctcct

SEQ ID NO: 3249270 - DNA, 25 bp, Homo sapien
tctccccttgactgttccagggact

SEQ ID NO: 3249271 - DNA, 25 bp, Homo sapien
taacagcagcgacagcagacagctc

SEQ ID NO: 3249272 - DNA, 25 bp, Homo sapien
tgagagtgaggataacagcagcgac

SEQ ID NO: 3249273 - DNA, 25 bp, Homo sapien
ccagggccagtgaggagatgagagt

SEQ ID NO: 3249274 - DNA, 25 bp, Homo sapien
agatgagagtgaggataacagcagc

SEQ ID NO: 3249275 - DNA, 25 bp, Homo sapien
tgggaacacacttacgtagctacct

SEQ ID NO: 3249276 - DNA, 25 bp, Homo sapien
cttttccagtgctgactgagtgctg

SEQ ID NO: 3249277 - DNA, 25 bp, Homo sapien
gacaggtccgtcatcagcttcactt

SEQ ID NO: 3249278 - DNA, 25 bp, Homo sapien
catcgcacccggaccttagtggcta

SEQ ID NO: 3249279 - DNA, 25 bp, Homo sapien
ccatgtgggcgctgggatgcttcct

SEQ ID NO: 3249280 - DNA, 25 bp, Homo sapien
tgcagactgtctcatgcccatgtgg

SEQ ID NO: 3249281 - DNA, 25 bp, Homo sapien
gctccttggacccagtggcgggaaa

SEQ ID NO: 3249282 - DNA, 25 bp, Homo sapien
gaacatgaggatacctgtgctgccc

SEQ ID NO: 3249283 - DNA, 25 bp, Homo sapien
tgatgagggctacgcaggctgcctc

SEQ ID NO: 3249284 - DNA, 25 bp, Homo sapien
ggaagtacatgaaagcacgcagtct

SEQ ID NO: 3249285 - DNA, 25 bp, Homo sapien
taaatggctgaacaccatcggcctg

SEQ ID NO: 3249286 - DNA, 25 bp, Homo sapien
aagtctgtgtattcgttgactcaga

SEQ ID NO: 3249287 - DNA, 25 bp, Homo sapien
aggagaaggagcacatcacgaggaa

SEQ ID NO: 3249288 - DNA, 25 bp, Homo sapien
aaggagaaggagcacatcacgagga

SEQ ID NO: 3249289 - DNA, 25 bp, Homo sapien
ggaagccagcgttgtttttaatggc

SEQ ID NO: 3249290 - DNA, 25 bp, Homo sapien
gcggaagccagcgttgtttttaatg

SEQ ID NO: 3249291 - DNA, 25 bp, Homo sapien
caattttgtgatcagccccgtgagc

SEQ ID NO: 3249292 - DNA, 25 bp, Homo sapien
aacatgatgtccgtggtgacccaac

SEQ ID NO: 3249293 - DNA, 25 bp, Homo sapien
gcagctccgcggtcacacaattttg

SEQ ID NO: 3249294 - DNA, 25 bp, Homo sapien
tgtacatccctggacatgaagagct

SEQ ID NO: 3249295 - DNA, 25 bp, Homo sapien
taactggtgaatgctgtcaatctca

SEQ ID NO: 3249296 - DNA, 25 bp, Homo sapien
aactggtgaatgctgtcaatctcag

SEQ ID NO: 3249297 - DNA, 25 bp, Homo sapien
actggtgaatgctgtcaatctcagc

SEQ ID NO: 3249298 - DNA, 25 bp, Homo sapien
tctgggtagtgagagcttttccctg

SEQ ID NO: 3249299 - DNA, 25 bp, Homo sapien
cacctgctagcaacacatggctctg

SEQ ID NO: 3249300 - DNA, 25 bp, Homo sapien
gtacattcccctttgagtgaaaaca

SEQ ID NO: 3249301 - DNA, 25 bp, Homo sapien
gaaaaatgtctcgtgctctcaagta

SEQ ID NO: 3249302 - DNA, 25 bp, Homo sapien
agtctggaaatctcaaccactctcc

SEQ ID NO: 3249303 - DNA, 25 bp, Homo sapien
ttgcaaaaccttttccgtgaatatc

SEQ ID NO: 3249304 - DNA, 25 bp, Homo sapien
aaaccttttccgtgaatatctcttg

SEQ ID NO: 3249305 - DNA, 25 bp, Homo sapien
gcaaaaccttttccgtgaatatctc

SEQ ID NO: 3249306 - DNA, 25 bp, Homo sapien
cctatcttctacgtgaaggtgggag

SEQ ID NO: 3249307 - DNA, 25 bp, Homo sapien
aaggcgaactctccttactgggtca

SEQ ID NO: 3249308 - DNA, 25 bp, Homo sapien
gcacttggtaatctaacaggactgt

SEQ ID NO: 3249309 - DNA, 25 bp, Homo sapien
tggcatagcctagcacactggtctt

SEQ ID NO: 3249310 - DNA, 25 bp, Homo sapien
ttcaccaattagtcgctgattttcc

SEQ ID NO: 3249311 - DNA, 25 bp, Homo sapien
tcatttcaccaattagtcgctgatt

SEQ ID NO: 3249312 - DNA, 25 bp, Homo sapien
caattagtcgctgattttcctgttc

SEQ ID NO: 3249313 - DNA, 25 bp, Homo sapien
accaattagtcgctgattttcctgt

SEQ ID NO: 3249314 - DNA, 25 bp, Homo sapien
tcttaggatagtagcgcccaacggt

SEQ ID NO: 3249315 - DNA, 25 bp, Homo sapien
gggatacatacaagcaagcctctgg

SEQ ID NO: 3249316 - DNA, 25 bp, Homo sapien
cattagtgtgaacaacgtccctgct

SEQ ID NO: 3249317 - DNA, 25 bp, Homo sapien
gaactgggtggaacataactttgca

SEQ ID NO: 3249318 - DNA, 25 bp, Homo sapien
gagtggccgctggtgtctttagaca

SEQ ID NO: 3249319 - DNA, 25 bp, Homo sapien
cagttgctaaaacacgtgcagggca

SEQ ID NO: 3249320 - DNA, 25 bp, Homo sapien
catgctgcatcaacctcaatgtggg

SEQ ID NO: 3249321 - DNA, 25 bp, Homo sapien
tctttagacaatgactcgggacagt

SEQ ID NO: 3249322 - DNA, 25 bp, Homo sapien
ccttgcagggcactttaaggtgttt

SEQ ID NO: 3249323 - DNA, 25 bp, Homo sapien
tcaggaaagtcagggctaatggtac

SEQ ID NO: 3249324 - DNA, 25 bp, Homo sapien
aaggaccttgcagggcactttaagg

SEQ ID NO: 3249325 - DNA, 25 bp, Homo sapien
aatggtaccatcactggaatcagtt

SEQ ID NO: 3249326 - DNA, 25 bp, Homo sapien
gagagcagacatgtggacctggcca

SEQ ID NO: 3249327 - DNA, 25 bp, Homo sapien
gacagtacactgttcccactaggct

SEQ ID NO: 3249328 - DNA, 25 bp, Homo sapien
ttggcggccaatgctcacgagagca

SEQ ID NO: 3249329 - DNA, 25 bp, Homo sapien
tacaatgacacttcggtgggccggc

SEQ ID NO: 3249330 - DNA, 25 bp, Homo sapien
caggttgtgtttcagccaaaatttt

SEQ ID NO: 3249331 - DNA, 25 bp, Homo sapien
tcttctggggataactcatcttcgc

SEQ ID NO: 3249332 - DNA, 25 bp, Homo sapien
ggggataactcatcttcgcctttgc

SEQ ID NO: 3249333 - DNA, 25 bp, Homo sapien
ccccacgttcccaattcaggttgtg

SEQ ID NO: 3249334 - DNA, 25 bp, Homo sapien
gccctaaggatcagcctgaagcaca

SEQ ID NO: 3249335 - DNA, 25 bp, Homo sapien
tagagaaagctcactaggcaggcca

SEQ ID NO: 3249336 - DNA, 25 bp, Homo sapien
gaagccttcttgataggctgcccta

SEQ ID NO: 3249337 - DNA, 25 bp, Homo sapien
tcagccccatgagatggcaacaagt

SEQ ID NO: 3249338 - DNA, 25 bp, Homo sapien
cttcatggagaccctgtatttcttc

SEQ ID NO: 3249339 - DNA, 25 bp, Homo sapien
ttctaagccatgggccctctagtat

SEQ ID NO: 3249340 - DNA, 25 bp, Homo sapien
attctaagccatgggccctctagta

SEQ ID NO: 3249341 - DNA, 25 bp, Homo sapien
ctggcagctcagagctgacatgcag

SEQ ID NO: 3249342 - DNA, 25 bp, Homo sapien
agctcagagctgacatgcagggcat

SEQ ID NO: 3249343 - DNA, 25 bp, Homo sapien
gcagctcagagctgacatgcagggc

SEQ ID NO: 3249344 - DNA, 25 bp, Homo sapien
aggcctggcagctcagagctgacat

SEQ ID NO: 3249345 - DNA, 25 bp, Homo sapien
tcagagtcttttgaaggactctgtg

SEQ ID NO: 3249346 - DNA, 25 bp, Homo sapien
tcttcagagtcttttgaaggactct

SEQ ID NO: 3249347 - DNA, 25 bp, Homo sapien
cttcagagtcttttgaaggactctg

SEQ ID NO: 3249348 - DNA, 25 bp, Homo sapien
agagtcttttgaaggactctgtgaa

SEQ ID NO: 3249349 - DNA, 25 bp, Homo sapien
cacatgtgaccctgcgcttttgctc

SEQ ID NO: 3249350 - DNA, 25 bp, Homo sapien
gtgaccctgcgcttttgctctgtgt

SEQ ID NO: 3249351 - DNA, 25 bp, Homo sapien
tccataacaggattcctttttgaaa

SEQ ID NO: 3249352 - DNA, 25 bp, Homo sapien
tgggcccagtggccatccggacaca

SEQ ID NO: 3249353 - DNA, 25 bp, Homo sapien
tgcctgcagggtagagattgtgcat

SEQ ID NO: 3249354 - DNA, 25 bp, Homo sapien
actggggcacttaacactggcatta

SEQ ID NO: 3249355 - DNA, 25 bp, Homo sapien
cactggggcacttaacactggcatt

SEQ ID NO: 3249356 - DNA, 25 bp, Homo sapien
ctctgcatttgcagccacggcacag

SEQ ID NO: 3249357 - DNA, 25 bp, Homo sapien
gctgcagttggtatgtgctgaatac

SEQ ID NO: 3249358 - DNA, 25 bp, Homo sapien
cagtgaccagcatgcagggggaggc

SEQ ID NO: 3249359 - DNA, 25 bp, Homo sapien
ggctgcagttggtatgtgctgaata

SEQ ID NO: 3249360 - DNA, 25 bp, Homo sapien
ccactctattttgaccagttatctc

SEQ ID NO: 3249361 - DNA, 25 bp, Homo sapien
cacactgctcctaactagtacttct

SEQ ID NO: 3249362 - DNA, 25 bp, Homo sapien
tcacacactgctcctaactagtact

SEQ ID NO: 3249363 - DNA, 25 bp, Homo sapien
ttttgaccagttatctcagtaatat

SEQ ID NO: 3249364 - DNA, 25 bp, Homo sapien
caaatggagggtatgtggcaacact

SEQ ID NO: 3249365 - DNA, 25 bp, Homo sapien
aacagccttattgccgatgggagaa

SEQ ID NO: 3249366 - DNA, 25 bp, Homo sapien
caaagcacgttcacataagacagcg

SEQ ID NO: 3249367 - DNA, 25 bp, Homo sapien
gccaatgaataacccagcagcggcc

SEQ ID NO: 3249368 - DNA, 25 bp, Homo sapien
ttatccaccactcttttaactcgga

SEQ ID NO: 3249369 - DNA, 25 bp, Homo sapien
ccactcttttaactcggatggctct

SEQ ID NO: 3249370 - DNA, 25 bp, Homo sapien
tccaccactcttttaactcggatgg

SEQ ID NO: 3249371 - DNA, 25 bp, Homo sapien
tcttatccaccactcttttaactcg

SEQ ID NO: 3249372 - DNA, 25 bp, Homo sapien
gaagagagactgcttaaaacagctt

SEQ ID NO: 3249373 - DNA, 25 bp, Homo sapien
ggcaaagccatcattaaatataatg

SEQ ID NO: 3249374 - DNA, 25 bp, Homo sapien
gtcttcagctagcaaagctaaattc

SEQ ID NO: 3249375 - DNA, 25 bp, Homo sapien
tataatgagatactacagtcttcag

SEQ ID NO: 3249376 - DNA, 25 bp, Homo sapien
caagtaatcttcaatgaaatccaaa

SEQ ID NO: 3249377 - DNA, 25 bp, Homo sapien
ttgctgggaatgtatctccttgtga

SEQ ID NO: 3249378 - DNA, 25 bp, Homo sapien
ccaaaacagcggtcctgtgctcctt

SEQ ID NO: 3249379 - DNA, 25 bp, Homo sapien
gaaatccaaaacagcggtcctgtgc

SEQ ID NO: 3249380 - DNA, 25 bp, Homo sapien
tctcgttctgtgtctgtcatcctcc

SEQ ID NO: 3249381 - DNA, 25 bp, Homo sapien
ctgtcatcctcccatattcagacat

SEQ ID NO: 3249382 - DNA, 25 bp, Homo sapien
gtctcgttctgtgtctgtcatcctc

SEQ ID NO: 3249383 - DNA, 25 bp, Homo sapien
ggtctcgttctgtgtctgtcatcct

SEQ ID NO: 3249384 - DNA, 25 bp, Homo sapien
agcaggccaaggctagcacattgca

SEQ ID NO: 3249385 - DNA, 25 bp, Homo sapien
cataaaatgttcctaggagcaggcc

SEQ ID NO: 3249386 - DNA, 25 bp, Homo sapien
tcaattccatgatcatactccacat

SEQ ID NO: 3249387 - DNA, 25 bp, Homo sapien
tcataggtctgaaggcagtatttct

SEQ ID NO: 3249388 - DNA, 25 bp, Homo sapien
tctaagaagtatggatgggccacat

SEQ ID NO: 3249389 - DNA, 25 bp, Homo sapien
tatctaagaagtatggatgggccac

SEQ ID NO: 3249390 - DNA, 25 bp, Homo sapien
ctaagaagtatggatgggccacatc

SEQ ID NO: 3249391 - DNA, 25 bp, Homo sapien
ttatctaagaagtatggatgggcca

SEQ ID NO: 3249392 - DNA, 25 bp, Homo sapien
taaaggatatgcttgtaccgctgaa

SEQ ID NO: 3249393 - DNA, 25 bp, Homo sapien
tgagaagcggtgtgagggatgagat

SEQ ID NO: 3249394 - DNA, 25 bp, Homo sapien
atgcttgtaccgctgaatgtataaa

SEQ ID NO: 3249395 - DNA, 25 bp, Homo sapien
tgagggatgagataaaggatatgct

SEQ ID NO: 3249396 - DNA, 25 bp, Homo sapien
gcaccacttctcaggtactgctgca

SEQ ID NO: 3249397 - DNA, 25 bp, Homo sapien
ctgagaggcggtgtgagtgatgaca

SEQ ID NO: 3249398 - DNA, 25 bp, Homo sapien
gatgcactcgcaccacttctcaggt

SEQ ID NO: 3249399 - DNA, 25 bp, Homo sapien
gatgacataaaggatgcactcgcac

SEQ ID NO: 3249400 - DNA, 25 bp, Homo sapien
taatataatctttcctgtgttccag

SEQ ID NO: 3249401 - DNA, 25 bp, Homo sapien
aagaaaatctctcagtttgccaatg

SEQ ID NO: 3249402 - DNA, 25 bp, Homo sapien
ctctcagtttgccaatgtgagaaat

SEQ ID NO: 3249403 - DNA, 25 bp, Homo sapien
tcctgtgttccagaagaaaatctct

SEQ ID NO: 3249404 - DNA, 25 bp, Homo sapien
ctttaacccaggataagcccacatc

SEQ ID NO: 3249405 - DNA, 25 bp, Homo sapien
cctttaacccaggataagcccacat

SEQ ID NO: 3249406 - DNA, 25 bp, Homo sapien
ttaacccaggataagcccacatcct

SEQ ID NO: 3249407 - DNA, 25 bp, Homo sapien
acccaggataagcccacatcctcat

SEQ ID NO: 3249408 - DNA, 25 bp, Homo sapien
caaacaggttctatccaaagccgtc

SEQ ID NO: 3249409 - DNA, 25 bp, Homo sapien
ggtcctagcgctacttaaaaatatg

SEQ ID NO: 3249410 - DNA, 25 bp, Homo sapien
ctcgtgaggtgaacagattagcagc

SEQ ID NO: 3249411 - DNA, 25 bp, Homo sapien
caaagccgtctcttactaccgaggt

SEQ ID NO: 3249412 - DNA, 25 bp, Homo sapien
taatcactccgtaacataacatttg

SEQ ID NO: 3249413 - DNA, 25 bp, Homo sapien
tagcaaattgccaacagcttagttt

SEQ ID NO: 3249414 - DNA, 25 bp, Homo sapien
caaaatgagggctcaactgctaaaa

SEQ ID NO: 3249415 - DNA, 25 bp, Homo sapien
aaatggattgctccttaagtgtaca

SEQ ID NO: 3249416 - DNA, 25 bp, Homo sapien
agatttaaaattcatggcttcagat

SEQ ID NO: 3249417 - DNA, 25 bp, Homo sapien
atgagatttaaaattcatggcttca

SEQ ID NO: 3249418 - DNA, 25 bp, Homo sapien
taaaattcatggcttcagatttttc

SEQ ID NO: 3249419 - DNA, 25 bp, Homo sapien
ttaaaattcatggcttcagattttt

SEQ ID NO: 3249420 - DNA, 25 bp, Homo sapien
aactggcacccaaaaatcgctgagg

SEQ ID NO: 3249421 - DNA, 25 bp, Homo sapien
caacgccagtggtaaggtaacagag

SEQ ID NO: 3249422 - DNA, 25 bp, Homo sapien
tactgggaaggtgaataagagcatc

SEQ ID NO: 3249423 - DNA, 25 bp, Homo sapien
tgtcagagggacttgccaaagctgc

SEQ ID NO: 3249424 - DNA, 25 bp, Homo sapien
agctttattaatgcacaacccattt

SEQ ID NO: 3249425 - DNA, 25 bp, Homo sapien
ttcaaaaatttatcctagtgcctaa

SEQ ID NO: 3249426 - DNA, 25 bp, Homo sapien
tattaatgcacaacccatttcaaat

SEQ ID NO: 3249427 - DNA, 25 bp, Homo sapien
caaaaatttatcctagtgcctaaca

SEQ ID NO: 3249428 - DNA, 25 bp, Homo sapien
tataaagtggaatggaggacttcaa

SEQ ID NO: 3249429 - DNA, 25 bp, Homo sapien
gaaagccataattgtaatgtggaat

SEQ ID NO: 3249430 - DNA, 25 bp, Homo sapien
cagtagtaagaagttattaatctga

SEQ ID NO: 3249431 - DNA, 25 bp, Homo sapien
cataattgtaatgtggaatgagacc

SEQ ID NO: 3249432 - DNA, 25 bp, Homo sapien
aacagcatttcatatgcacagatgc

SEQ ID NO: 3249433 - DNA, 25 bp, Homo sapien
tgcacagatgcttgcccacgttgta

SEQ ID NO: 3249434 - DNA, 25 bp, Homo sapien
tagaaaaacagcatttcatatgcac

SEQ ID NO: 3249435 - DNA, 25 bp, Homo sapien
ttcatatgcacagatgcttgcccac

SEQ ID NO: 3249436 - DNA, 25 bp, Homo sapien
tggatcccagcaagcctagcactga

SEQ ID NO: 3249437 - DNA, 25 bp, Homo sapien
tcccagcaagcctagcactgattaa

SEQ ID NO: 3249438 - DNA, 25 bp, Homo sapien
gcctagcactgattaaagctgcatt

SEQ ID NO: 3249439 - DNA, 25 bp, Homo sapien
gcaagcctagcactgattaaagctg

SEQ ID NO: 3249440 - DNA, 25 bp, Homo sapien
cagcacaggcatcagggactatttg

SEQ ID NO: 3249441 - DNA, 25 bp, Homo sapien
caactgctcatgttccaaatgggtc

SEQ ID NO: 3249442 - DNA, 25 bp, Homo sapien
tgtgtgtgactatcccagcacaggc

SEQ ID NO: 3249443 - DNA, 25 bp, Homo sapien
tttgtggatttgacccaactgctca

SEQ ID NO: 3249444 - DNA, 25 bp, Homo sapien
ttgacttttcccactgtaatgctga

SEQ ID NO: 3249445 - DNA, 25 bp, Homo sapien
tgacttttcccactgtaatgctgag

SEQ ID NO: 3249446 - DNA, 25 bp, Homo sapien
gacttttcccactgtaatgctgagc

SEQ ID NO: 3249447 - DNA, 25 bp, Homo sapien
ttagtattcatagtctttgaggatc

SEQ ID NO: 3249448 - DNA, 25 bp, Homo sapien
tattcatagtctttgaggatctgaa

SEQ ID NO: 3249449 - DNA, 25 bp, Homo sapien
agtattcatagtctttgaggatctg

SEQ ID NO: 3249450 - DNA, 25 bp, Homo sapien
attcatagtctttgaggatctgaaa

SEQ ID NO: 3249451 - DNA, 25 bp, Homo sapien
gagaagacgtgtttctgcagcccta

SEQ ID NO: 3249452 - DNA, 25 bp, Homo sapien
ccagcccctgatgggaagaattcac

SEQ ID NO: 3249453 - DNA, 25 bp, Homo sapien
tggctctagcctcaatatgtagaaa

SEQ ID NO: 3249454 - DNA, 25 bp, Homo sapien
aattcactaaaaacgtcacactgag

SEQ ID NO: 3249455 - DNA, 25 bp, Homo sapien
ctcctcaacccgccgtttccatagc

SEQ ID NO: 3249456 - DNA, 25 bp, Homo sapien
tcaacccgccgtttccatagcaacc

SEQ ID NO: 3249457 - DNA, 25 bp, Homo sapien
ggtccctgtcgcaggactgccccct

SEQ ID NO: 3249458 - DNA, 25 bp, Homo sapien
gcccggggtccctgtcgcaggactg

SEQ ID NO: 3249459 - DNA, 25 bp, Homo sapien
gcgtcttcacggtcttgacgctggc

SEQ ID NO: 3249460 - DNA, 25 bp, Homo sapien
tggcccggaatagcagcgtgatgtc

SEQ ID NO: 3249461 - DNA, 25 bp, Homo sapien
acggtcttgacgctggcccggaata

SEQ ID NO: 3249462 - DNA, 25 bp, Homo sapien
gaatagcagcgtgatgtccaccgcc

SEQ ID NO: 3249463 - DNA, 25 bp, Homo sapien
agccccacactaggcccgcccacgt

SEQ ID NO: 3249464 - DNA, 25 bp, Homo sapien
cgcccacgtaagcagccggcgaccg

SEQ ID NO: 3249465 - DNA, 25 bp, Homo sapien
accgcggcgcgaacccggccgctga

SEQ ID NO: 3249466 - DNA, 25 bp, Homo sapien
gcgcgaacccggccgctgaaggact

SEQ ID NO: 3249467 - DNA, 25 bp, Homo sapien
gctttgtgcagcttaagggcttggt

SEQ ID NO: 3249468 - DNA, 25 bp, Homo sapien
acccaggatccccatgctttgtgca

SEQ ID NO: 3249469 - DNA, 25 bp, Homo sapien
ggcttggtagcctgcaccccagcct

SEQ ID NO: 3249470 - DNA, 25 bp, Homo sapien
ggctggacccaggatccccatgctt

SEQ ID NO: 3249471 - DNA, 25 bp, Homo sapien
tttccttacacatggccgtggccgc

SEQ ID NO: 3249472 - DNA, 25 bp, Homo sapien
ttctagtcagcaccgaaatctcctc

SEQ ID NO: 3249473 - DNA, 25 bp, Homo sapien
ctagaagcagccatcgtcccagtcc

SEQ ID NO: 3249474 - DNA, 25 bp, Homo sapien
gtggccgctcttctagtcagcaccg

SEQ ID NO: 3249475 - DNA, 25 bp, Homo sapien
gagacaattaccatacactacaatg

SEQ ID NO: 3249476 - DNA, 25 bp, Homo sapien
gaggctgttacattcagagacaatt

SEQ ID NO: 3249477 - DNA, 25 bp, Homo sapien
aaaccccacaacgatgtggatccct

SEQ ID NO: 3249478 - DNA, 25 bp, Homo sapien
tgctttgatgaagggaggcaaaaaa

SEQ ID NO: 3249479 - DNA, 25 bp, Homo sapien
gcatttttttaagcagaaagtagta

SEQ ID NO: 3249480 - DNA, 25 bp, Homo sapien
taagcagaaagtagtatttattttg

SEQ ID NO: 3249481 - DNA, 25 bp, Homo sapien
catttttttaagcagaaagtagtat

SEQ ID NO: 3249482 - DNA, 25 bp, Homo sapien
gcagaaagtagtatttattttggcc

SEQ ID NO: 3249483 - DNA, 25 bp, Homo sapien
tgtcacctgggaataagtggcaggg

SEQ ID NO: 3249484 - DNA, 25 bp, Homo sapien
gtgtcacctgggaataagtggcagg

SEQ ID NO: 3249485 - DNA, 25 bp, Homo sapien
ttctcagtgaaggtgagttgagcag

SEQ ID NO: 3249486 - DNA, 25 bp, Homo sapien
cagtatccaaccaatcaagtgcagc

SEQ ID NO: 3249487 - DNA, 25 bp, Homo sapien
cattaggtagaaagttgggcattgc

SEQ ID NO: 3249488 - DNA, 25 bp, Homo sapien
cgtgggaatggtctaatacagtatc

SEQ ID NO: 3249489 - DNA, 25 bp, Homo sapien
tgaagaggtctacatggggtgctat

SEQ ID NO: 3249490 - DNA, 25 bp, Homo sapien
gctggacactctgtgagcatggcca

SEQ ID NO: 3249491 - DNA, 25 bp, Homo sapien
gaaaggctgcagcaggtaaatcagc

SEQ ID NO: 3249492 - DNA, 25 bp, Homo sapien
catgctagggcctgtgctcagtgag

SEQ ID NO: 3249493 - DNA, 25 bp, Homo sapien
ggtgtggccagcggcctttgcaaag

SEQ ID NO: 3249494 - DNA, 25 bp, Homo sapien
gcaaagcttctagcaagaaggaacc

SEQ ID NO: 3249495 - DNA, 25 bp, Homo sapien
caaagcttctagcaagaaggaacct

SEQ ID NO: 3249496 - DNA, 25 bp, Homo sapien
tgggtgtggccagcggcctttgcaa

SEQ ID NO: 3249497 - DNA, 25 bp, Homo sapien
tgaagaggaaactctactttttgca

SEQ ID NO: 3249498 - DNA, 25 bp, Homo sapien
cattggctggaaccgggcttcacat

SEQ ID NO: 3249499 - DNA, 25 bp, Homo sapien
gaggaaactctactttttgcattgc

SEQ ID NO: 3249500 - DNA, 25 bp, Homo sapien
tcttaattcgatggggaggaaagcc

SEQ ID NO: 3249501 - DNA, 25 bp, Homo sapien
gatggctactgctgctctgaccatg

SEQ ID NO: 3249502 - DNA, 25 bp, Homo sapien
tgttttctcttggttgcaagatggc

SEQ ID NO: 3249503 - DNA, 25 bp, Homo sapien
gctactgctgctctgaccatgacat

SEQ ID NO: 3249504 - DNA, 25 bp, Homo sapien
tactgctgctctgaccatgacattc

SEQ ID NO: 3249505 - DNA, 25 bp, Homo sapien
tggagaacagcgtttttggtagaag

SEQ ID NO: 3249506 - DNA, 25 bp, Homo sapien
ccagagcaaggatacacagaatgat

SEQ ID NO: 3249507 - DNA, 25 bp, Homo sapien
tggtagaaggaacagccagccagag

SEQ ID NO: 3249508 - DNA, 25 bp, Homo sapien
agtgagtaggttaacagcttggaga

SEQ ID NO: 3249509 - DNA, 25 bp, Homo sapien
caatgttacgaagttatccagtggg

SEQ ID NO: 3249510 - DNA, 25 bp, Homo sapien
tcccagcgtcaatgttacgaagtta

SEQ ID NO: 3249511 - DNA, 25 bp, Homo sapien
tacgaagttatccagtgggtccctc

SEQ ID NO: 3249512 - DNA, 25 bp, Homo sapien
ttcttcccagcgtcaatgttacgaa

SEQ ID NO: 3249513 - DNA, 25 bp, Homo sapien
agtgcctgatacacagtaggtcctc

SEQ ID NO: 3249514 - DNA, 25 bp, Homo sapien
tgcctgatacacagtaggtcctcat

SEQ ID NO: 3249515 - DNA, 25 bp, Homo sapien
cagggagtgcctgatacacagtagg

SEQ ID NO: 3249516 - DNA, 25 bp, Homo sapien
gacagggagtgcctgatacacagta

SEQ ID NO: 3249517 - DNA, 25 bp, Homo sapien
ttaaataaagatcaaatttctctgc

SEQ ID NO: 3249518 - DNA, 25 bp, Homo sapien
tgaatcttttaaataaagatcaaat

SEQ ID NO: 3249519 - DNA, 25 bp, Homo sapien
tctttgaatcttttaaataaagatc

SEQ ID NO: 3249520 - DNA, 25 bp, Homo sapien
tttaaataaagatcaaatttctctg

SEQ ID NO: 3249521 - DNA, 25 bp, Homo sapien
caataggtacttgagagagagaagc

SEQ ID NO: 3249522 - DNA, 25 bp, Homo sapien
gacttcagacaggagttctaacgga

SEQ ID NO: 3249523 - DNA, 25 bp, Homo sapien
tgagggcaatttccgtatcagtcca

SEQ ID NO: 3249524 - DNA, 25 bp, Homo sapien
tgtatccatgcacaaggctctcggc

SEQ ID NO: 3249525 - DNA, 25 bp, Homo sapien
caccagttctattgcatcagggcct

SEQ ID NO: 3249526 - DNA, 25 bp, Homo sapien
tccaggctcccaagtttcaatttta

SEQ ID NO: 3249527 - DNA, 25 bp, Homo sapien
gcccttatggcttcatttgcttcct

SEQ ID NO: 3249528 - DNA, 25 bp, Homo sapien
cagggccttgcccttatggcttcat

SEQ ID NO: 3249529 - DNA, 25 bp, Homo sapien
ctggctccacgctccttcaacatct

SEQ ID NO: 3249530 - DNA, 25 bp, Homo sapien
tgtgggttcccatcgtgttcctgcg

SEQ ID NO: 3249531 - DNA, 25 bp, Homo sapien
tgtgatatcgttgattttcccctct

SEQ ID NO: 3249532 - DNA, 25 bp, Homo sapien
tctctcccttcaagcagatgagtca

SEQ ID NO: 3249533 - DNA, 25 bp, Homo sapien
gaatcacagaatttcacgtccacag

SEQ ID NO: 3249534 - DNA, 25 bp, Homo sapien
agaatcacagaatttcacgtccaca

SEQ ID NO: 3249535 - DNA, 25 bp, Homo sapien
gcagaattccctgccgttttgcagc

SEQ ID NO: 3249536 - DNA, 25 bp, Homo sapien
aattccctgccgttttgcagcagca

SEQ ID NO: 3249537 - DNA, 25 bp, Homo sapien
ctggcagaattccctgccgttttgc

SEQ ID NO: 3249538 - DNA, 25 bp, Homo sapien
gaattccctgccgttttgcagcagc

SEQ ID NO: 3249539 - DNA, 25 bp, Homo sapien
tgaattgaactgtgatgaggaccct

SEQ ID NO: 3249540 - DNA, 25 bp, Homo sapien
agaaaacccacttgagacctgatgc

SEQ ID NO: 3249541 - DNA, 25 bp, Homo sapien
gatgttcaataggacacggctccac

SEQ ID NO: 3249542 - DNA, 25 bp, Homo sapien
gattgaaatgtcaaggaacctccct

SEQ ID NO: 3249543 - DNA, 25 bp, Homo sapien
ctgggaccttaacctattgaaagat

SEQ ID NO: 3249544 - DNA, 25 bp, Homo sapien
catctgggaccttaacctattgaaa

SEQ ID NO: 3249545 - DNA, 25 bp, Homo sapien
gggcatctgggaccttaacctattg

SEQ ID NO: 3249546 - DNA, 25 bp, Homo sapien
ggcatctgggaccttaacctattga

SEQ ID NO: 3249547 - DNA, 25 bp, Homo sapien
ttgctccagctatttcctccacaga

SEQ ID NO: 3249548 - DNA, 25 bp, Homo sapien
ctttgctccagctatttcctccaca

SEQ ID NO: 3249549 - DNA, 25 bp, Homo sapien
cagctatttcctccacagaaaacag

SEQ ID NO: 3249550 - DNA, 25 bp, Homo sapien
tccagctatttcctccacagaaaac

SEQ ID NO: 3249551 - DNA, 25 bp, Homo sapien
gctggttccacatgcgagtcatatt

SEQ ID NO: 3249552 - DNA, 25 bp, Homo sapien
tatttaagccataaacggtggcgcc

SEQ ID NO: 3249553 - DNA, 25 bp, Homo sapien
cgcccagggagcactcgtggattgc

SEQ ID NO: 3249554 - DNA, 25 bp, Homo sapien
gattgccttgagaaacccgatactt

SEQ ID NO: 3249555 - DNA, 25 bp, Homo sapien
gttttatgtgccagatccctgccca

SEQ ID NO: 3249556 - DNA, 25 bp, Homo sapien
catagtagatgtacacccatggtga

SEQ ID NO: 3249557 - DNA, 25 bp, Homo sapien
tagtctgtgggtgtcccgtgaccaa

SEQ ID NO: 3249558 - DNA, 25 bp, Homo sapien
cacaatttcttggtgcagcgcctat

SEQ ID NO: 3249559 - DNA, 25 bp, Homo sapien
ctgggttggggtacttggcataatt

SEQ ID NO: 3249560 - DNA, 25 bp, Homo sapien
gcataatttgcagcactaaatccaa

SEQ ID NO: 3249561 - DNA, 25 bp, Homo sapien
ttttcccaagctccgtcctcaaggc

SEQ ID NO: 3249562 - DNA, 25 bp, Homo sapien
ccaaaacagatttgagcagccacag

SEQ ID NO: 3249563 - DNA, 25 bp, Homo sapien
caaagttgtggtcacgctggctgcg

SEQ ID NO: 3249564 - DNA, 25 bp, Homo sapien
gattatgactcctgggaaacaggaa

SEQ ID NO: 3249565 - DNA, 25 bp, Homo sapien
cagtcttatgattatgactcctggg

SEQ ID NO: 3249566 - DNA, 25 bp, Homo sapien
tcccaaatataactgtgcccccaaa

SEQ ID NO: 3249567 - DNA, 25 bp, Homo sapien
ctggagccttctaggttggaaattc

SEQ ID NO: 3249568 - DNA, 25 bp, Homo sapien
agccttctaggttggaaattcccat

SEQ ID NO: 3249569 - DNA, 25 bp, Homo sapien
gagccttctaggttggaaattccca

SEQ ID NO: 3249570 - DNA, 25 bp, Homo sapien
gtctctggagccttctaggttggaa

SEQ ID NO: 3249571 - DNA, 25 bp, Homo sapien
tgtagagcagattccttcgcaagcc

SEQ ID NO: 3249572 - DNA, 25 bp, Homo sapien
ccctgccggccctttagaggaggct

SEQ ID NO: 3249573 - DNA, 25 bp, Homo sapien
cgcaagcctctgtccacatggtgat

SEQ ID NO: 3249574 - DNA, 25 bp, Homo sapien
ccatttcgaacagacaggccggtgc

SEQ ID NO: 3249575 - DNA, 25 bp, Homo sapien
tgcttctgcatgtatggccattgga

SEQ ID NO: 3249576 - DNA, 25 bp, Homo sapien
gcagaggaatatacccaggttgaat

SEQ ID NO: 3249577 - DNA, 25 bp, Homo sapien
aggggctgggatgcactatttgctt

SEQ ID NO: 3249578 - DNA, 25 bp, Homo sapien
tgctgaggaggaacacaatcttagc

SEQ ID NO: 3249579 - DNA, 25 bp, Homo sapien
gatacctcgaaatgttagcacgacg

SEQ ID NO: 3249580 - DNA, 25 bp, Homo sapien
tcttgatacctcgaaatgttagcac

SEQ ID NO: 3249581 - DNA, 25 bp, Homo sapien
gaaatgttagcacgacgtgcaccat

SEQ ID NO: 3249582 - DNA, 25 bp, Homo sapien
ggacatcttgatacctcgaaatgtt

SEQ ID NO: 3249583 - DNA, 25 bp, Homo sapien
catggcttggcatttggacacgctt

SEQ ID NO: 3249584 - DNA, 25 bp, Homo sapien
acatggcttggcatttggacacgct

SEQ ID NO: 3249585 - DNA, 25 bp, Homo sapien
atggcttggcatttggacacgcttt

SEQ ID NO: 3249586 - DNA, 25 bp, Homo sapien
agataaagccgagcacatgtatccc

SEQ ID NO: 3249587 - DNA, 25 bp, Homo sapien
caagctctgaattacggagaaaggg

SEQ ID NO: 3249588 - DNA, 25 bp, Homo sapien
gacagctgagacgttcaagctctga

SEQ ID NO: 3249589 - DNA, 25 bp, Homo sapien
agcaattgtctgcagatcggccgac

SEQ ID NO: 3249590 - DNA, 25 bp, Homo sapien
actgagcctgttcgttctccagata

SEQ ID NO: 3249591 - DNA, 25 bp, Homo sapien
ctgagcctgttcgttctccagataa

SEQ ID NO: 3249592 - DNA, 25 bp, Homo sapien
tatctgataaaatgggatcaaaatg

SEQ ID NO: 3249593 - DNA, 25 bp, Homo sapien
caaaatcaatagtgctgacagcctt

SEQ ID NO: 3249594 - DNA, 25 bp, Homo sapien
ctagtaattgaaactgccaaaatca

SEQ ID NO: 3249595 - DNA, 25 bp, Homo sapien
agagcccggcgtctgcgggccactt

SEQ ID NO: 3249596 - DNA, 25 bp, Homo sapien
cacttgaccctccggctgagcgtgc

SEQ ID NO: 3249597 - DNA, 25 bp, Homo sapien
cagcactaacaaactgtcccttcat

SEQ ID NO: 3249598 - DNA, 25 bp, Homo sapien
tttgctcggctgtcggcaggcttga

SEQ ID NO: 3249599 - DNA, 25 bp, Homo sapien
tgacatgaaataggcggctcgagtt

SEQ ID NO: 3249600 - DNA, 25 bp, Homo sapien
gagttccccaatgtttatgtcagca

SEQ ID NO: 3249601 - DNA, 25 bp, Homo sapien
ctagtaccgggtatcatcccccact

SEQ ID NO: 3249602 - DNA, 25 bp, Homo sapien
cccccacttcctggcctctgtgctc

SEQ ID NO: 3249603 - DNA, 25 bp, Homo sapien
tcctggcctctgtgctcagagacca

SEQ ID NO: 3249604 - DNA, 25 bp, Homo sapien
gtgctcagagaccacggagcctctg

SEQ ID NO: 3249605 - DNA, 25 bp, Homo sapien
gagtccatggaagcccataacggcc

SEQ ID NO: 3249606 - DNA, 25 bp, Homo sapien
tctggaaagcttgtaaacaggaaaa

SEQ ID NO: 3249607 - DNA, 25 bp, Homo sapien
agctgcaacgactatcattacaggg

SEQ ID NO: 3249608 - DNA, 25 bp, Homo sapien
gagcaggcagctgcaacgactatca

SEQ ID NO: 3249609 - DNA, 25 bp, Homo sapien
tgcagggtgccccacactttacagc

SEQ ID NO: 3249610 - DNA, 25 bp, Homo sapien
ctgcagggtgccccacactttacag

SEQ ID NO: 3249611 - DNA, 25 bp, Homo sapien
caccccagtcctcacgaatgggcat

SEQ ID NO: 3249612 - DNA, 25 bp, Homo sapien
agggtgccccacactttacagcctt

SEQ ID NO: 3249613 - DNA, 25 bp, Homo sapien
gaagtctgatccctgccaaaaagtg

SEQ ID NO: 3249614 - DNA, 25 bp, Homo sapien
ccaaaaagtggctggaagagtccct

SEQ ID NO: 3249615 - DNA, 25 bp, Homo sapien
gcatgtaccacctgacatagagggt

SEQ ID NO: 3249616 - DNA, 25 bp, Homo sapien
gaacagagctagaggccatgtctcc

SEQ ID NO: 3249617 - DNA, 25 bp, Homo sapien
gctcctccaaattccacgcaggata

SEQ ID NO: 3249618 - DNA, 25 bp, Homo sapien
ttcgggcggcggcagacctgcgcat

SEQ ID NO: 3249619 - DNA, 25 bp, Homo sapien
tccacgcaggatagcgccggacagt

SEQ ID NO: 3249620 - DNA, 25 bp, Homo sapien
tccaggcaccgctctgttgtctttc

SEQ ID NO: 3249621 - DNA, 25 bp, Homo sapien
cgcagaatccgggaactagttctga

SEQ ID NO: 3249622 - DNA, 25 bp, Homo sapien
taactccttgcgctctaaccacgaa

SEQ ID NO: 3249623 - DNA, 25 bp, Homo sapien
cgaagtgcgcgtcgcgctggaaaac

SEQ ID NO: 3249624 - DNA, 25 bp, Homo sapien
tgagcagctctcctgcgaagtgcgc

SEQ ID NO: 3249625 - DNA, 25 bp, Homo sapien
gcggagtccgttgcggacaccctca

SEQ ID NO: 3249626 - DNA, 25 bp, Homo sapien
ggagtccccgaactcggctgtgcca

SEQ ID NO: 3249627 - DNA, 25 bp, Homo sapien
acccaggtgcgtgccagctgtagga

SEQ ID NO: 3249628 - DNA, 25 bp, Homo sapien
agctgtaggagcctgctccgcctgc

SEQ ID NO: 3249629 - DNA, 25 bp, Homo sapien
ttggatgagccgcaagaaatgttcc

SEQ ID NO: 3249630 - DNA, 25 bp, Homo sapien
ttggtttcggaagggcgttgatctc

SEQ ID NO: 3249631 - DNA, 25 bp, Homo sapien
tggtttctgcgggatcatgagctgt

SEQ ID NO: 3249632 - DNA, 25 bp, Homo sapien
agagcatggcgcacacagaacacat

SEQ ID NO: 3249633 - DNA, 25 bp, Homo sapien
agcagggactctggaagtcccaggc

SEQ ID NO: 3249634 - DNA, 25 bp, Homo sapien
cagagagctggcagggcatgaaaac

SEQ ID NO: 3249635 - DNA, 25 bp, Homo sapien
aagtcccaggctcggaatcagagag

SEQ ID NO: 3249636 - DNA, 25 bp, Homo sapien
ggaagtcccaggctcggaatcagag

SEQ ID NO: 3249637 - DNA, 25 bp, Homo sapien
tggcgcgagctaagcctgctaatgc

SEQ ID NO: 3249638 - DNA, 25 bp, Homo sapien
aaatcagacaaaatgggtcccgctc

SEQ ID NO: 3249639 - DNA, 25 bp, Homo sapien
tgtgaaaaatcaagctctgaggcct

SEQ ID NO: 3249640 - DNA, 25 bp, Homo sapien
gaattttccactggcgcgagctaag

SEQ ID NO: 3249641 - DNA, 25 bp, Homo sapien
tcctttattccatagagacccttaa

SEQ ID NO: 3249642 - DNA, 25 bp, Homo sapien
caaacaggcctcttcctcaggagtc

SEQ ID NO: 3249643 - DNA, 25 bp, Homo sapien
ccattctgtcccaagatgcaaggaa

SEQ ID NO: 3249644 - DNA, 25 bp, Homo sapien
gatgcaaggaacactaaggaagaca

SEQ ID NO: 3249645 - DNA, 25 bp, Homo sapien
ctcataagcattcttgaccacctgc

SEQ ID NO: 3249646 - DNA, 25 bp, Homo sapien
ttgaacctctttccaccattcctta

SEQ ID NO: 3249647 - DNA, 25 bp, Homo sapien
tgaccacctgcttttgaacctcttt

SEQ ID NO: 3249648 - DNA, 25 bp, Homo sapien
gcattcttgaccacctgcttttgaa

SEQ ID NO: 3249649 - DNA, 25 bp, Homo sapien
tgcagccacttccaataacacggct

SEQ ID NO: 3249650 - DNA, 25 bp, Homo sapien
tcctccatcaggtaacggaattggg

SEQ ID NO: 3249651 - DNA, 25 bp, Homo sapien
aatgggtgaacacccagcctttcct

SEQ ID NO: 3249652 - DNA, 25 bp, Homo sapien
tgggctgaatccagactgcagccac

SEQ ID NO: 3249653 - DNA, 25 bp, Homo sapien
aaaacaataagcaacttgcagttgg

SEQ ID NO: 3249654 - DNA, 25 bp, Homo sapien
ttaaaacaataagcaacttgcagtt

SEQ ID NO: 3249655 - DNA, 25 bp, Homo sapien
aaacaataagcaacttgcagttggg

SEQ ID NO: 3249656 - DNA, 25 bp, Homo sapien
taaaacaataagcaacttgcagttg

SEQ ID NO: 3249657 - DNA, 25 bp, Homo sapien
ctgtattttacaacattagaaatga

SEQ ID NO: 3249658 - DNA, 25 bp, Homo sapien
agaaatgatgaatttaaagatgttt

SEQ ID NO: 3249659 - DNA, 25 bp, Homo sapien
gtattttacaacattagaaatgatg

SEQ ID NO: 3249660 - DNA, 25 bp, Homo sapien
aaatgatgaatttaaagatgtttac

SEQ ID NO: 3249661 - DNA, 25 bp, Homo sapien
actggacccaattaagagagctttc

SEQ ID NO: 3249662 - DNA, 25 bp, Homo sapien
ggacccaattaagagagctttctcc

SEQ ID NO: 3249663 - DNA, 25 bp, Homo sapien
tggacccaattaagagagctttctc

SEQ ID NO: 3249664 - DNA, 25 bp, Homo sapien
acactggacccaattaagagagctt

SEQ ID NO: 3249665 - DNA, 25 bp, Homo sapien
ggccatgtgaacagcaccaacctca

SEQ ID NO: 3249666 - DNA, 25 bp, Homo sapien
caacctcaacaactataatcatatt

SEQ ID NO: 3249667 - DNA, 25 bp, Homo sapien
gcaccaacctcaacaactataatca

SEQ ID NO: 3249668 - DNA, 25 bp, Homo sapien
caccaacctcaacaactataatcat

SEQ ID NO: 3249669 - DNA, 25 bp, Homo sapien
atcgggaatgcacatcgggtggcca

SEQ ID NO: 3249670 - DNA, 25 bp, Homo sapien
tcgggaatgcacatcgggtggccat

SEQ ID NO: 3249671 - DNA, 25 bp, Homo sapien
aatcgggaatgcacatcgggtggcc

SEQ ID NO: 3249672 - DNA, 25 bp, Homo sapien
gaatcgggaatgcacatcgggtggc

SEQ ID NO: 3249673 - DNA, 25 bp, Homo sapien
gcacatggcaaggagatctggactt

SEQ ID NO: 3249674 - DNA, 25 bp, Homo sapien
acatggcaaggagatctggacttgg

SEQ ID NO: 3249675 - DNA, 25 bp, Homo sapien
gggcacatggcaaggagatctggac

SEQ ID NO: 3249676 - DNA, 25 bp, Homo sapien
ggcacatggcaaggagatctggact

SEQ ID NO: 3249677 - DNA, 25 bp, Homo sapien
tggggctatgatcatagatagatga

SEQ ID NO: 3249678 - DNA, 25 bp, Homo sapien
gggctatgatcatagatagatgagg

SEQ ID NO: 3249679 - DNA, 25 bp, Homo sapien
gctatgatcatagatagatgaggcc

SEQ ID NO: 3249680 - DNA, 25 bp, Homo sapien
ctatgatcatagatagatgaggcca

SEQ ID NO: 3249681 - DNA, 25 bp, Homo sapien
tgggccagccacatgaccccttgac

SEQ ID NO: 3249682 - DNA, 25 bp, Homo sapien
gctgcatgtggccattcacatctgc

SEQ ID NO: 3249683 - DNA, 25 bp, Homo sapien
gtccttgggccagccacatgacccc

SEQ ID NO: 3249684 - DNA, 25 bp, Homo sapien
acatctgccttgaatttcgcagagg

SEQ ID NO: 3249685 - DNA, 25 bp, Homo sapien
attgtcgtgagtgcagctttgggaa

SEQ ID NO: 3249686 - DNA, 25 bp, Homo sapien
gccccaacaagcatgtgcctctttg

SEQ ID NO: 3249687 - DNA, 25 bp, Homo sapien
gtctttgctcactagattccctcag

SEQ ID NO: 3249688 - DNA, 25 bp, Homo sapien
tagaacattctatgccccaacaagc

SEQ ID NO: 3249689 - DNA, 25 bp, Homo sapien
gttcagtctctggaaggttaacact

SEQ ID NO: 3249690 - DNA, 25 bp, Homo sapien
tcctggctagtagatgctgatggcc

SEQ ID NO: 3249691 - DNA, 25 bp, Homo sapien
tgggaccctgtaattagactgctgg

SEQ ID NO: 3249692 - DNA, 25 bp, Homo sapien
gggtgaccatccaagtggctccaag

SEQ ID NO: 3249693 - DNA, 25 bp, Homo sapien
catttcctgacttagcagtccttga

SEQ ID NO: 3249694 - DNA, 25 bp, Homo sapien
agtgtcttggacctgctcatttggg

SEQ ID NO: 3249695 - DNA, 25 bp, Homo sapien
gatactgccatggaatgctgggtca

SEQ ID NO: 3249696 - DNA, 25 bp, Homo sapien
gcagtccttgaggagaggttcccat

SEQ ID NO: 3249697 - DNA, 25 bp, Homo sapien
ttagaggaactggcaatgagactga

SEQ ID NO: 3249698 - DNA, 25 bp, Homo sapien
aattcagagagacaacgaagagagg

SEQ ID NO: 3249699 - DNA, 25 bp, Homo sapien
tagtgcttcaggactggcaagaggg

SEQ ID NO: 3249700 - DNA, 25 bp, Homo sapien
tgcaaactgtcaaagcccagggcca

SEQ ID NO: 3249701 - DNA, 25 bp, Homo sapien
cttttagcaagtcactctgaagctc

SEQ ID NO: 3249702 - DNA, 25 bp, Homo sapien
tgcttgttctccattggtcatcttt

SEQ ID NO: 3249703 - DNA, 25 bp, Homo sapien
gctgggaggcttttagcaagtcact

SEQ ID NO: 3249704 - DNA, 25 bp, Homo sapien
cactctgaagctcgagttttaagtc

SEQ ID NO: 3249705 - DNA, 25 bp, Homo sapien
ctgaaacatctagccagccagagac

SEQ ID NO: 3249706 - DNA, 25 bp, Homo sapien
gccagccagagacagagggacttca

SEQ ID NO: 3249707 - DNA, 25 bp, Homo sapien
aaacatctagccagccagagacaga

SEQ ID NO: 3249708 - DNA, 25 bp, Homo sapien
ccagccagagacagagggacttcat

SEQ ID NO: 3249709 - DNA, 25 bp, Homo sapien
caatggagaaggcaagagatacaga

SEQ ID NO: 3249710 - DNA, 25 bp, Homo sapien
gctggctgtgcagaaagctgaagaa

SEQ ID NO: 3249711 - DNA, 25 bp, Homo sapien
gaggaaacagggataaccagctggc

SEQ ID NO: 3249712 - DNA, 25 bp, Homo sapien
ctgaagaaggagtccagggtggcgg

SEQ ID NO: 3249713 - DNA, 25 bp, Homo sapien
tgctaactctatgctcaaaggaggt

SEQ ID NO: 3249714 - DNA, 25 bp, Homo sapien
caatgaaagagtgggtcctgtcagc

SEQ ID NO: 3249715 - DNA, 25 bp, Homo sapien
gctgtgtatctaaccatcctggcaa

SEQ ID NO: 3249716 - DNA, 25 bp, Homo sapien
tcctggcaagacatgagtcaaggga

SEQ ID NO: 3249717 - DNA, 25 bp, Homo sapien
ttagcgctgacgatctggcaggacc

SEQ ID NO: 3249718 - DNA, 25 bp, Homo sapien
agcgctgacgatctggcaggaccgt

SEQ ID NO: 3249719 - DNA, 25 bp, Homo sapien
gcgctgacgatctggcaggaccgta

SEQ ID NO: 3249720 - DNA, 25 bp, Homo sapien
cgctgacgatctggcaggaccgtag

SEQ ID NO: 3249721 - DNA, 25 bp, Homo sapien
attccaaggcattgcagtcatccaa

SEQ ID NO: 3249722 - DNA, 25 bp, Homo sapien
tagggctcttggttatcctcaaagg

SEQ ID NO: 3249723 - DNA, 25 bp, Homo sapien
tggtcacggagtccatatgcaactg

SEQ ID NO: 3249724 - DNA, 25 bp, Homo sapien
gaaagttactgaaggtggtcacgga

SEQ ID NO: 3249725 - DNA, 25 bp, Homo sapien
gcaatgagcaggaaagttactgaag

SEQ ID NO: 3249726 - DNA, 25 bp, Homo sapien
tacagcttccgtgctttgtccttca

SEQ ID NO: 3249727 - DNA, 25 bp, Homo sapien
gaacgagttcatgatggtgtacagc

SEQ ID NO: 3249728 - DNA, 25 bp, Homo sapien
caacacgggggcgaggccacaaagt

SEQ ID NO: 3249729 - DNA, 25 bp, Homo sapien
tcaaggaatctacctgggccacttt

SEQ ID NO: 3249730 - DNA, 25 bp, Homo sapien
caggtacagcctgggcaggtatctc

SEQ ID NO: 3249731 - DNA, 25 bp, Homo sapien
ggtacagcctgggcaggtatctcac

SEQ ID NO: 3249732 - DNA, 25 bp, Homo sapien
tccaggtacagcctgggcaggtatc

SEQ ID NO: 3249733 - DNA, 25 bp, Homo sapien
ccaggtacagcctgggcaggtatct

SEQ ID NO: 3249734 - DNA, 25 bp, Homo sapien
aggttgaagtcgcgggtgatctcct

SEQ ID NO: 3249735 - DNA, 25 bp, Homo sapien
gctccgagacctgcaggaggttgaa

SEQ ID NO: 3249736 - DNA, 25 bp, Homo sapien
ccgagacctgcaggaggttgaagtc

SEQ ID NO: 3249737 - DNA, 25 bp, Homo sapien
agtcgcgggtgatctcctggctcag

SEQ ID NO: 3249738 - DNA, 25 bp, Homo sapien
ggagtgggccgcgcggcgggggctc

SEQ ID NO: 3249739 - DNA, 25 bp, Homo sapien
cagcagcagcacgggcagaggccca

SEQ ID NO: 3249740 - DNA, 25 bp, Homo sapien
ggcgggggctcccgccaggagcagc

SEQ ID NO: 3249741 - DNA, 25 bp, Homo sapien
ggagtagcaggtcgggggagtgggc

SEQ ID NO: 3249742 - DNA, 25 bp, Homo sapien
tgccaggcgctggtgcagcctcgcc

SEQ ID NO: 3249743 - DNA, 25 bp, Homo sapien
ggtgccaggcgctggtgcagcctcg

SEQ ID NO: 3249744 - DNA, 25 bp, Homo sapien
gtgccaggcgctggtgcagcctcgc

SEQ ID NO: 3249745 - DNA, 25 bp, Homo sapien
tttgtatcaatgttatactggtctc

SEQ ID NO: 3249746 - DNA, 25 bp, Homo sapien
tcttcataggtaaattcttccaaac

SEQ ID NO: 3249747 - DNA, 25 bp, Homo sapien
aatatcagaatagaactaaatctgt

SEQ ID NO: 3249748 - DNA, 25 bp, Homo sapien
cccatgaagaaaagtcaaggctcag

SEQ ID NO: 3249749 - DNA, 25 bp, Homo sapien
caagctgactttcgtgtcctggagt

SEQ ID NO: 3249750 - DNA, 25 bp, Homo sapien
ggcagaggcccgttcttagaagtct

SEQ ID NO: 3249751 - DNA, 25 bp, Homo sapien
gctgatgtggatcaagctgactttc

SEQ ID NO: 3249752 - DNA, 25 bp, Homo sapien
cagcgtcctcttgtcatgttgttgc

SEQ ID NO: 3249753 - DNA, 25 bp, Homo sapien
gccttgtcgactggcatctctgtgt

SEQ ID NO: 3249754 - DNA, 25 bp, Homo sapien
tggagaactggctgccacatgtagc

SEQ ID NO: 3249755 - DNA, 25 bp, Homo sapien
acttctttgtattggagaactggct

SEQ ID NO: 3249756 - DNA, 25 bp, Homo sapien
gtgtgtgttttgctgagcgccttct

SEQ ID NO: 3249757 - DNA, 25 bp, Homo sapien
aagcccactgctaaggaggattttt

SEQ ID NO: 3249758 - DNA, 25 bp, Homo sapien
caaagcccactgctaaggaggattt

SEQ ID NO: 3249759 - DNA, 25 bp, Homo sapien
cccactgctaaggaggatttttctc

SEQ ID NO: 3249760 - DNA, 25 bp, Homo sapien
agcccactgctaaggaggatttttc

SEQ ID NO: 3249761 - DNA, 25 bp, Homo sapien
gaaaaggagacgttcatatccaagc

SEQ ID NO: 3249762 - DNA, 25 bp, Homo sapien
aactcgctcccgtcttccaatgaaa

SEQ ID NO: 3249763 - DNA, 25 bp, Homo sapien
cccgtcttccaatgaaaaggagacg

SEQ ID NO: 3249764 - DNA, 25 bp, Homo sapien
catatccaagcagtacatcttcaga

SEQ ID NO: 3249765 - DNA, 25 bp, Homo sapien
ccaagcccagttctaatctctgcat

SEQ ID NO: 3249766 - DNA, 25 bp, Homo sapien
tctctgcatcagcatacttcccaga

SEQ ID NO: 3249767 - DNA, 25 bp, Homo sapien
tctgcatcagcatacttcccagagc

SEQ ID NO: 3249768 - DNA, 25 bp, Homo sapien
cacacattggattaggcccaagccc

SEQ ID NO: 3249769 - DNA, 25 bp, Homo sapien
tctcctgatggctagcagatcccgc

SEQ ID NO: 3249770 - DNA, 25 bp, Homo sapien
tgatggctagcagatcccgcaccct

SEQ ID NO: 3249771 - DNA, 25 bp, Homo sapien
tgggaacgcgggctgcaggctctcc

SEQ ID NO: 3249772 - DNA, 25 bp, Homo sapien
caggctctcctgatggctagcagat

SEQ ID NO: 3249773 - DNA, 25 bp, Homo sapien
gctggtggtttggcataattcccac

SEQ ID NO: 3249774 - DNA, 25 bp, Homo sapien
cacagcgtttagcataatttccaca

SEQ ID NO: 3249775 - DNA, 25 bp, Homo sapien
tttccacagcgtttagccagcactt

SEQ ID NO: 3249776 - DNA, 25 bp, Homo sapien
ggcataattcccacagcgtttagca

SEQ ID NO: 3249777 - DNA, 25 bp, Homo sapien
gctgactgcatctggcgttggcctt

SEQ ID NO: 3249778 - DNA, 25 bp, Homo sapien
gttggccttgctggaccactccctt

SEQ ID NO: 3249779 - DNA, 25 bp, Homo sapien
ctctcattgaggttgctgggctgac

SEQ ID NO: 3249780 - DNA, 25 bp, Homo sapien
tgtgcaggtcctggctctcattgag

SEQ ID NO: 3249781 - DNA, 25 bp, Homo sapien
gccacggatgtgtaaggtatcccaa

SEQ ID NO: 3249782 - DNA, 25 bp, Homo sapien
cacagagagggcacagtgagcatca

SEQ ID NO: 3249783 - DNA, 25 bp, Homo sapien
agaggccactccctaaagtcagact

SEQ ID NO: 3249784 - DNA, 25 bp, Homo sapien
cactcggataacttgcaccaccttg

SEQ ID NO: 3249785 - DNA, 25 bp, Homo sapien
ttctcgacaggacatgtgcatttcc

SEQ ID NO: 3249786 - DNA, 25 bp, Homo sapien
cgggagtttctcgacaggacatgtg

SEQ ID NO: 3249787 - DNA, 25 bp, Homo sapien
gacctcgggagtttctcgacaggac

SEQ ID NO: 3249788 - DNA, 25 bp, Homo sapien
cgacaggacatgtgcatttcctagc

SEQ ID NO: 3249789 - DNA, 25 bp, Homo sapien
ttgtgcttcataaactctggccttt

SEQ ID NO: 3249790 - DNA, 25 bp, Homo sapien
caccagatggtttcttataattgtc

SEQ ID NO: 3249791 - DNA, 25 bp, Homo sapien
tgtgcttcataaactctggcctttt

SEQ ID NO: 3249792 - DNA, 25 bp, Homo sapien
cctttttgtagcctccaacaccaga

SEQ ID NO: 3249793 - DNA, 25 bp, Homo sapien
tctgcattgattgccctagtagagg

SEQ ID NO: 3249794 - DNA, 25 bp, Homo sapien
gctgttacaaaggttgggctcccaa

SEQ ID NO: 3249795 - DNA, 25 bp, Homo sapien
tgtgagagggtctcaaccccatgtt

SEQ ID NO: 3249796 - DNA, 25 bp, Homo sapien
tttctcacagctccgctcggcagtg

SEQ ID NO: 3249797 - DNA, 25 bp, Homo sapien
cttggatgttgccagatgggaaacc

SEQ ID NO: 3249798 - DNA, 25 bp, Homo sapien
tcttcatcttggaagctttgtgatc

SEQ ID NO: 3249799 - DNA, 25 bp, Homo sapien
aattcacagtgtggaattatggaaa

SEQ ID NO: 3249800 - DNA, 25 bp, Homo sapien
gaattatggaaagggcttggatgtt

SEQ ID NO: 3249801 - DNA, 25 bp, Homo sapien
tcacctccaagagcgatcacttaaa

SEQ ID NO: 3249802 - DNA, 25 bp, Homo sapien
gcgatcacttaaacctacttcaggg

SEQ ID NO: 3249803 - DNA, 25 bp, Homo sapien
cagcttcgttatgcttcacctccaa

SEQ ID NO: 3249804 - DNA, 25 bp, Homo sapien
gcttcgttatgcttcacctccaaga

SEQ ID NO: 3249805 - DNA, 25 bp, Homo sapien
gaggcctcagtaattgaaatgacga

SEQ ID NO: 3249806 - DNA, 25 bp, Homo sapien
taattgaaatgacgaatgatgagtc

SEQ ID NO: 3249807 - DNA, 25 bp, Homo sapien
ctggcagatggataggccgatgaat

SEQ ID NO: 3249808 - DNA, 25 bp, Homo sapien
aatgatgagtcatgcacacacaagc

SEQ ID NO: 3249809 - DNA, 25 bp, Homo sapien
ctcctcgggccatgcacaacagcct

SEQ ID NO: 3249810 - DNA, 25 bp, Homo sapien
tgggcctggtgttcccagtcttctt

SEQ ID NO: 3249811 - DNA, 25 bp, Homo sapien
catctcctcgggccatgcacaacag

SEQ ID NO: 3249812 - DNA, 25 bp, Homo sapien
atctcctcgggccatgcacaacagc

SEQ ID NO: 3249813 - DNA, 25 bp, Homo sapien
gcaaactggcacctcgtgaagtcag

SEQ ID NO: 3249814 - DNA, 25 bp, Homo sapien
taagtcatgactttctgcactgagg

SEQ ID NO: 3249815 - DNA, 25 bp, Homo sapien
ttgttatgttagcaaaggccaccag

SEQ ID NO: 3249816 - DNA, 25 bp, Homo sapien
tcatgtgaagggtacgaaaaccgga

SEQ ID NO: 3249817 - DNA, 25 bp, Homo sapien
gatgagtgagaggaaacacgctttt

SEQ ID NO: 3249818 - DNA, 25 bp, Homo sapien
atgagttggcctgcaagagatctcg

SEQ ID NO: 3249819 - DNA, 25 bp, Homo sapien
ggggctgctggctgtaagtataaaa

SEQ ID NO: 3249820 - DNA, 25 bp, Homo sapien
cctgcaagagatctcgatgagtgag

SEQ ID NO: 3249821 - DNA, 25 bp, Homo sapien
gccttgtgaatgctgcgtctttttt

SEQ ID NO: 3249822 - DNA, 25 bp, Homo sapien
aggtggagtctgaccaatgtttcaa

SEQ ID NO: 3249823 - DNA, 25 bp, Homo sapien
acccacgagggctctcagcagtctg

SEQ ID NO: 3249824 - DNA, 25 bp, Homo sapien
cattgatggtggacctcactgctgt

SEQ ID NO: 3249825 - DNA, 25 bp, Homo sapien
ctgcaggcttatttctgtcactagc

SEQ ID NO: 3249826 - DNA, 25 bp, Homo sapien
gagattgttgctttggtgcaggact

SEQ ID NO: 3249827 - DNA, 25 bp, Homo sapien
gcaggactggtagggagcggaccct

SEQ ID NO: 3249828 - DNA, 25 bp, Homo sapien
aggatctgcaggcttatttctgtca

SEQ ID NO: 3249829 - DNA, 25 bp, Homo sapien
ggaacaggacagtggttgaaagaat

SEQ ID NO: 3249830 - DNA, 25 bp, Homo sapien
gaacaggacagtggttgaaagaata

SEQ ID NO: 3249831 - DNA, 25 bp, Homo sapien
ataaaagaggtttcacacagtggtc

SEQ ID NO: 3249832 - DNA, 25 bp, Homo sapien
tatttgaggacctagcattccaccc

SEQ ID NO: 3249833 - DNA, 25 bp, Homo sapien
tgtttctaaaccaccaaggctcaga

SEQ ID NO: 3249834 - DNA, 25 bp, Homo sapien
gatgattaggccaccaggtctcctc

SEQ ID NO: 3249835 - DNA, 25 bp, Homo sapien
gatcccccaacgagtctttgaagaa

SEQ ID NO: 3249836 - DNA, 25 bp, Homo sapien
agcagcaacaaccccccatcagatg

SEQ ID NO: 3249837 - DNA, 25 bp, Homo sapien
ctgaagatcccccaacgagtctttg

SEQ ID NO: 3249838 - DNA, 25 bp, Homo sapien
ttccaacctgaagatcccccaacga

SEQ ID NO: 3249839 - DNA, 25 bp, Homo sapien
ggattgttgtaacccgctcactgtg

SEQ ID NO: 3249840 - DNA, 25 bp, Homo sapien
ttgtaacccgctcactgtgcaccat

SEQ ID NO: 3249841 - DNA, 25 bp, Homo sapien
caggattgttgtaacccgctcactg

SEQ ID NO: 3249842 - DNA, 25 bp, Homo sapien
tgttgtaacccgctcactgtgcacc

SEQ ID NO: 3249843 - DNA, 25 bp, Homo sapien
tctctggaggctgcccagaagttga

SEQ ID NO: 3249844 - DNA, 25 bp, Homo sapien
catctctggaggctgcccagaagtt

SEQ ID NO: 3249845 - DNA, 25 bp, Homo sapien
ctggaggctgcccagaagttgacag

SEQ ID NO: 3249846 - DNA, 25 bp, Homo sapien
caccatctctggaggctgcccagaa

SEQ ID NO: 3249847 - DNA, 25 bp, Homo sapien
gcttgctaactcctgttcgtgcctc

SEQ ID NO: 3249848 - DNA, 25 bp, Homo sapien
cttctgtgaatcagttgcttgctaa

SEQ ID NO: 3249849 - DNA, 25 bp, Homo sapien
ctttgatgttgtctcggtgattgcc

SEQ ID NO: 3249850 - DNA, 25 bp, Homo sapien
ctgttcgtgcctcagatcttggctt

SEQ ID NO: 3249851 - DNA, 25 bp, Homo sapien
ctattcttagctcctctcttgctgg

SEQ ID NO: 3249852 - DNA, 25 bp, Homo sapien
ttggatttctgtagcgtgtgaggct

SEQ ID NO: 3249853 - DNA, 25 bp, Homo sapien
tcagaaggccgagcgctccattgtt

SEQ ID NO: 3249854 - DNA, 25 bp, Homo sapien
gcgtgtgaggctattcttagctcct

SEQ ID NO: 3249855 - DNA, 25 bp, Homo sapien
gtggatgctacactgtttgccaggc

SEQ ID NO: 3249856 - DNA, 25 bp, Homo sapien
tggatgctacactgtttgccaggcc

SEQ ID NO: 3249857 - DNA, 25 bp, Homo sapien
tgtggatgctacactgtttgccagg

SEQ ID NO: 3249858 - DNA, 25 bp, Homo sapien
gaaacggtgatcacctgcaagtccc

SEQ ID NO: 3249859 - DNA, 25 bp, Homo sapien
taagcccactatgagcaggttctga

SEQ ID NO: 3249860 - DNA, 25 bp, Homo sapien
gagttctgaaatggaatcacctccg

SEQ ID NO: 3249861 - DNA, 25 bp, Homo sapien
tgagcacggctgcttcttctggact

SEQ ID NO: 3249862 - DNA, 25 bp, Homo sapien
tgctgctgtgcgtgcgagcctgtct

SEQ ID NO: 3249863 - DNA, 25 bp, Homo sapien
agttcatccgtgagcatgacgcaca

SEQ ID NO: 3249864 - DNA, 25 bp, Homo sapien
tgaagaacattcacctcgtgctctg

SEQ ID NO: 3249865 - DNA, 25 bp, Homo sapien
tcgtgaagtagtccctgaagaacat

SEQ ID NO: 3249866 - DNA, 25 bp, Homo sapien
tcagtagggagagggatccccaaag

SEQ ID NO: 3249867 - DNA, 25 bp, Homo sapien
cagtagggagagggatccccaaagg

SEQ ID NO: 3249868 - DNA, 25 bp, Homo sapien
acacggatccctggaaactgtcaga

SEQ ID NO: 3249869 - DNA, 25 bp, Homo sapien
tattaagccccatttcaggtcgttg

SEQ ID NO: 3249870 - DNA, 25 bp, Homo sapien
tccaatgccaaatagacaggtcacc

SEQ ID NO: 3249871 - DNA, 25 bp, Homo sapien
ggtcgttggtcagacttcgtgtcca

SEQ ID NO: 3249872 - DNA, 25 bp, Homo sapien
aatttgacctagtaactgaacatct

SEQ ID NO: 3249873 - DNA, 25 bp, Homo sapien
atttgacctagtaactgaacatctc

SEQ ID NO: 3249874 - DNA, 25 bp, Homo sapien
aatgacatcagacgagagctgggcg

SEQ ID NO: 3249875 - DNA, 25 bp, Homo sapien
taactgtcagcaggaagcgctcgag

SEQ ID NO: 3249876 - DNA, 25 bp, Homo sapien
cacgtggatagagtcggattcagcc

SEQ ID NO: 3249877 - DNA, 25 bp, Homo sapien
gaaaatgagagaccacgtgatcgtg

SEQ ID NO: 3249878 - DNA, 25 bp, Homo sapien
tgcagtcactgcaggaccgtaggac

SEQ ID NO: 3249879 - DNA, 25 bp, Homo sapien
gaagatgactccctcattgggccaa

SEQ ID NO: 3249880 - DNA, 25 bp, Homo sapien
gcaggctgactcacggatctatcat

SEQ ID NO: 3249881 - DNA, 25 bp, Homo sapien
taactatgaccatggagaagtcgct

SEQ ID NO: 3249882 - DNA, 25 bp, Homo sapien
tcaaagtcgttgtctgtgtttccca

SEQ ID NO: 3249883 - DNA, 25 bp, Homo sapien
actaccatgcgcttcttgtcactgt

SEQ ID NO: 3249884 - DNA, 25 bp, Homo sapien
tctggtccatagaatgctgctttgt

SEQ ID NO: 3249885 - DNA, 25 bp, Homo sapien
tccgtgtagaaatcactaccatgcg

SEQ ID NO: 3249886 - DNA, 25 bp, Homo sapien
gtttctttccgtgtagaaatcacta

SEQ ID NO: 3249887 - DNA, 25 bp, Homo sapien
tcctgcctcacactgtctgaggcag

SEQ ID NO: 3249888 - DNA, 25 bp, Homo sapien
cctcaaaggctctactggggcttcc

SEQ ID NO: 3249889 - DNA, 25 bp, Homo sapien
gagcctcctcaaaggctctactggg

SEQ ID NO: 3249890 - DNA, 25 bp, Homo sapien
gaggcagcccagtccaggttcttgg

SEQ ID NO: 3249891 - DNA, 25 bp, Homo sapien
gcagtgggactgctaaaggaacaaa

SEQ ID NO: 3249892 - DNA, 25 bp, Homo sapien
aagcagtgggactgctaaaggaaca

SEQ ID NO: 3249893 - DNA, 25 bp, Homo sapien
tataaacaccactatacttagacca

SEQ ID NO: 3249894 - DNA, 25 bp, Homo sapien
tctgttaccacttgtgatcaattag

SEQ ID NO: 3249895 - DNA, 25 bp, Homo sapien
tccactgtacctgtgaagagccttg

SEQ ID NO: 3249896 - DNA, 25 bp, Homo sapien
ctggaggacgaaaccctagggctgc

SEQ ID NO: 3249897 - DNA, 25 bp, Homo sapien
gaggaagcccctgtctagcctgggc

SEQ ID NO: 3249898 - DNA, 25 bp, Homo sapien
tagcagaggcctattctgaggagtc

SEQ ID NO: 3249899 - DNA, 25 bp, Homo sapien
caacagttcccagagtatgatattc

SEQ ID NO: 3249900 - DNA, 25 bp, Homo sapien
aacagttcccagagtatgatattcc

SEQ ID NO: 3249901 - DNA, 25 bp, Homo sapien
cacaacagttcccagagtatgatat

SEQ ID NO: 3249902 - DNA, 25 bp, Homo sapien
ccacaacagttcccagagtatgata

SEQ ID NO: 3249903 - DNA, 25 bp, Homo sapien
tgggtgcacagctttcggagggatg

SEQ ID NO: 3249904 - DNA, 25 bp, Homo sapien
ttgactgggtgcacagctttcggag

SEQ ID NO: 3249905 - DNA, 25 bp, Homo sapien
actgggtgcacagctttcggaggga

SEQ ID NO: 3249906 - DNA, 25 bp, Homo sapien
ctttgactgggtgcacagctttcgg

SEQ ID NO: 3249907 - DNA, 25 bp, Homo sapien
atgtgccattttggttgctgcaccc

SEQ ID NO: 3249908 - DNA, 25 bp, Homo sapien
atacatgtgccattttggttgctgc

SEQ ID NO: 3249909 - DNA, 25 bp, Homo sapien
ctccccaactctccaccccacaaca

SEQ ID NO: 3249910 - DNA, 25 bp, Homo sapien
gccattttggttgctgcacccatta

SEQ ID NO: 3249911 - DNA, 25 bp, Homo sapien
tgccaccatccacatgcaatgacag

SEQ ID NO: 3249912 - DNA, 25 bp, Homo sapien
cagctgtggtatagcgaatgaactt

SEQ ID NO: 3249913 - DNA, 25 bp, Homo sapien
cagaaacagagggatattgacatct

SEQ ID NO: 3249914 - DNA, 25 bp, Homo sapien
catgtgaaaggtgaccaagtggccc

SEQ ID NO: 3249915 - DNA, 25 bp, Homo sapien
cccaagcattggatgactcatagaa

SEQ ID NO: 3249916 - DNA, 25 bp, Homo sapien
tgtgcaaacaaacctgtttaggatt

SEQ ID NO: 3249917 - DNA, 25 bp, Homo sapien
taaataagatcctgtgtgtaacccc

SEQ ID NO: 3249918 - DNA, 25 bp, Homo sapien
ccttttttgtcagcataatcgtcat

SEQ ID NO: 3249919 - DNA, 25 bp, Homo sapien
gaactctcgggcacacttgctgtca

SEQ ID NO: 3249920 - DNA, 25 bp, Homo sapien
cactcacggctctgcttgctgacaa

SEQ ID NO: 3249921 - DNA, 25 bp, Homo sapien
tcgggcacacttgctgtcactcacg

SEQ ID NO: 3249922 - DNA, 25 bp, Homo sapien
acacttgctgtcactcacggctctg

SEQ ID NO: 3249923 - DNA, 25 bp, Homo sapien
agagccttttaaagccaggtaccag

SEQ ID NO: 3249924 - DNA, 25 bp, Homo sapien
tgaactcatgtaggcaaccacattg

SEQ ID NO: 3249925 - DNA, 25 bp, Homo sapien
agctttataagcattggctccataa

SEQ ID NO: 3249926 - DNA, 25 bp, Homo sapien
ggaaatgtgatattccagtcaaagc

SEQ ID NO: 3249927 - DNA, 25 bp, Homo sapien
tgcggttcacgaaaatccacagtac

SEQ ID NO: 3249928 - DNA, 25 bp, Homo sapien
agaggaatgatcaggcagcagaatt

SEQ ID NO: 3249929 - DNA, 25 bp, Homo sapien
atccacagtacaacagccacccctg

SEQ ID NO: 3249930 - DNA, 25 bp, Homo sapien
gcagcagaatttgcggttcacgaaa

SEQ ID NO: 3249931 - DNA, 25 bp, Homo sapien
catggagtctacatgaaaagaaatc

SEQ ID NO: 3249932 - DNA, 25 bp, Homo sapien
gtctccggtgctcactcaactgcag

SEQ ID NO: 3249933 - DNA, 25 bp, Homo sapien
aaacagcagaccctgatggtgccca

SEQ ID NO: 3249934 - DNA, 25 bp, Homo sapien
aactttctgtccagatcatggagtc

SEQ ID NO: 3249935 - DNA, 25 bp, Homo sapien
tcttgatactgttatatcgctgttg

SEQ ID NO: 3249936 - DNA, 25 bp, Homo sapien
gatgttgtaactatggaagtagtga

SEQ ID NO: 3249937 - DNA, 25 bp, Homo sapien
actacaggtgttgtgatgatgctgc

SEQ ID NO: 3249938 - DNA, 25 bp, Homo sapien
ggctattgacactattactacaggt

SEQ ID NO: 3249939 - DNA, 25 bp, Homo sapien
tgctgagcagttgcatggattttct

SEQ ID NO: 3249940 - DNA, 25 bp, Homo sapien
atgctgagcagttgcatggattttc

SEQ ID NO: 3249941 - DNA, 25 bp, Homo sapien
gctgagcagttgcatggattttctc

SEQ ID NO: 3249942 - DNA, 25 bp, Homo sapien
ctgagcagttgcatggattttctca

SEQ ID NO: 3249943 - DNA, 25 bp, Homo sapien
ctagaccgacccagatttccatcaa

SEQ ID NO: 3249944 - DNA, 25 bp, Homo sapien
gaaccattgatacatgcgacatgtg

SEQ ID NO: 3249945 - DNA, 25 bp, Homo sapien
aagtgtatatcttaactatgtgcga

SEQ ID NO: 3249946 - DNA, 25 bp, Homo sapien
cagtgatagagcaggtaagctgtta

SEQ ID NO: 3249947 - DNA, 25 bp, Homo sapien
gtcagcgcagtgtgcccacagctgg

SEQ ID NO: 3249948 - DNA, 25 bp, Homo sapien
caagtcatcctcgtcatgagggcca

SEQ ID NO: 3249949 - DNA, 25 bp, Homo sapien
tcatgagggccatgacattgtgtca

SEQ ID NO: 3249950 - DNA, 25 bp, Homo sapien
attggctcctccaagtcatcctcgt

SEQ ID NO: 3249951 - DNA, 25 bp, Homo sapien
cgattgcactgctcagtccgaggta

SEQ ID NO: 3249952 - DNA, 25 bp, Homo sapien
tattacgcaaacagaggctccaacg

SEQ ID NO: 3249953 - DNA, 25 bp, Homo sapien
taactcatctatgtttgggacaaac

SEQ ID NO: 3249954 - DNA, 25 bp, Homo sapien
ttgggacaaacttgcaggtaagttc

SEQ ID NO: 3249955 - DNA, 25 bp, Homo sapien
tcaattaacccaatctctggagtcc

SEQ ID NO: 3249956 - DNA, 25 bp, Homo sapien
tttcagacatccactcaattaaccc

SEQ ID NO: 3249957 - DNA, 25 bp, Homo sapien
tctctggagtccctaccaggtactg

SEQ ID NO: 3249958 - DNA, 25 bp, Homo sapien
aggtactgccagaagctctcttggt

SEQ ID NO: 3249959 - DNA, 25 bp, Homo sapien
ggggttggcaccagggctgcgaggg

SEQ ID NO: 3249960 - DNA, 25 bp, Homo sapien
tgcttattaattgcagttccagccc

SEQ ID NO: 3249961 - DNA, 25 bp, Homo sapien
ttggcaccagggctgcgaggggcat

SEQ ID NO: 3249962 - DNA, 25 bp, Homo sapien
ttaattgcagttccagcccctgtgg

SEQ ID NO: 3249963 - DNA, 25 bp, Homo sapien
gggccatctggaaattcatgagaca

SEQ ID NO: 3249964 - DNA, 25 bp, Homo sapien
cctgcaagttggcatgcgctacggg

SEQ ID NO: 3249965 - DNA, 25 bp, Homo sapien
cacagaccatagcttctgcagcaga

SEQ ID NO: 3249966 - DNA, 25 bp, Homo sapien
caagattaaaccgagtccctgcaag

SEQ ID NO: 3249967 - DNA, 25 bp, Homo sapien
aaggccctcatggcctttttggcat

SEQ ID NO: 3249968 - DNA, 25 bp, Homo sapien
ccaaggccctcatggcctttttggc

SEQ ID NO: 3249969 - DNA, 25 bp, Homo sapien
caaggccctcatggcctttttggca

SEQ ID NO: 3249970 - DNA, 25 bp, Homo sapien
ggccctcatggcctttttggcattc

SEQ ID NO: 3249971 - DNA, 25 bp, Homo sapien
tttctgaatataaagagcttctctc

SEQ ID NO: 3249972 - DNA, 25 bp, Homo sapien
ggccagttcgccaatgggctccagt

SEQ ID NO: 3249973 - DNA, 25 bp, Homo sapien
tgggaggaacgtgcagtgagatctc

SEQ ID NO: 3249974 - DNA, 25 bp, Homo sapien
tttaatagatcaatggtttctgccc

SEQ ID NO: 3249975 - DNA, 25 bp, Homo sapien
agggagacatgtcttctttaatatg

SEQ ID NO: 3249976 - DNA, 25 bp, Homo sapien
ctgagagggagacatgtcttcttta

SEQ ID NO: 3249977 - DNA, 25 bp, Homo sapien
gagagggagacatgtcttctttaat

SEQ ID NO: 3249978 - DNA, 25 bp, Homo sapien
gagggagacatgtcttctttaatat

SEQ ID NO: 3249979 - DNA, 25 bp, Homo sapien
tctgcttatcagatctcctcgcagt

SEQ ID NO: 3249980 - DNA, 25 bp, Homo sapien
gcagtttgccatctaaggcttgcca

SEQ ID NO: 3249981 - DNA, 25 bp, Homo sapien
taaggcttgccaccagctctggtgt

SEQ ID NO: 3249982 - DNA, 25 bp, Homo sapien
tttctcttgcgggcccacagcatct

SEQ ID NO: 3249983 - DNA, 25 bp, Homo sapien
ctccgccatcgctctcagctgcgtg

SEQ ID NO: 3249984 - DNA, 25 bp, Homo sapien
catgtctctcggtggccgaatccag

SEQ ID NO: 3249985 - DNA, 25 bp, Homo sapien
tcggtggccgaatccagcagggcca

SEQ ID NO: 3249986 - DNA, 25 bp, Homo sapien
tgcgtggtccacatgtctctcggtg

SEQ ID NO: 3249987 - DNA, 25 bp, Homo sapien
gctagcaaggcccacgggtcagctc

SEQ ID NO: 3249988 - DNA, 25 bp, Homo sapien
cctgcagctagcaaggcccacgggt

SEQ ID NO: 3249989 - DNA, 25 bp, Homo sapien
tgcagctagcaaggcccacgggtca

SEQ ID NO: 3249990 - DNA, 25 bp, Homo sapien
cagctagcaaggcccacgggtcagc

SEQ ID NO: 3249991 - DNA, 25 bp, Homo sapien
tcaggttgcgagggaaacctgctgc

SEQ ID NO: 3249992 - DNA, 25 bp, Homo sapien
cttgatgagaaagaacgggcatggt

SEQ ID NO: 3249993 - DNA, 25 bp, Homo sapien
tgcgagggaaacctgctgcagggac

SEQ ID NO: 3249994 - DNA, 25 bp, Homo sapien
ccttgatgagaaagaacgggcatgg

SEQ ID NO: 3249995 - DNA, 25 bp, Homo sapien
atgcgtataaaacccgatcggtagc

SEQ ID NO: 3249996 - DNA, 25 bp, Homo sapien
gcagacagtcaggtacatgactgca

SEQ ID NO: 3249997 - DNA, 25 bp, Homo sapien
gactgcataaggctccgtgcacagc

SEQ ID NO: 3249998 - DNA, 25 bp, Homo sapien
gaagcccatcgcaggatgcgtataa

SEQ ID NO: 3249999 - DNA, 25 bp, Homo sapien
gtcttctagcacgacactgttctgt

SEQ ID NO: 3250000 - DNA, 25 bp, Homo sapien
caagtcttctagcacgacactgttc

SEQ ID NO: 3250001 - DNA, 25 bp, Homo sapien
cttctagcacgacactgttctgttg

SEQ ID NO: 3250002 - DNA, 25 bp, Homo sapien
tagcacgacactgttctgttgttcc

SEQ ID NO: 3250003 - DNA, 25 bp, Homo sapien
gggcttggtgcaggacagtagagac

SEQ ID NO: 3250004 - DNA, 25 bp, Homo sapien
ctccccaggttcgttcagaatcccg

SEQ ID NO: 3250005 - DNA, 25 bp, Homo sapien
gacagtagagacctgcctttcagaa

SEQ ID NO: 3250006 - DNA, 25 bp, Homo sapien
gaatcccgggcccatcggccaccca

SEQ ID NO: 3250007 - DNA, 25 bp, Homo sapien
tgtaggccgacagagtctcggtcac

SEQ ID NO: 3250008 - DNA, 25 bp, Homo sapien
ccgggacgccttctggaactgcaga

SEQ ID NO: 3250009 - DNA, 25 bp, Homo sapien
caggccgacttggtcagcatctcag

SEQ ID NO: 3250010 - DNA, 25 bp, Homo sapien
ggctgtgcgactccaggatctgtgt

SEQ ID NO: 3250011 - DNA, 25 bp, Homo sapien
caccaaaagtttacaatggagacgc

SEQ ID NO: 3250012 - DNA, 25 bp, Homo sapien
ccaaaagtttacaatggagacgcac

SEQ ID NO: 3250013 - DNA, 25 bp, Homo sapien
accaaaagtttacaatggagacgca

SEQ ID NO: 3250014 - DNA, 25 bp, Homo sapien
aaggctgtccctgcgtatgaagacg

SEQ ID NO: 3250015 - DNA, 25 bp, Homo sapien
tgtccctgcgtatgaagacgccagg

SEQ ID NO: 3250016 - DNA, 25 bp, Homo sapien
cagaaaaggctgtccctgcgtatga

SEQ ID NO: 3250017 - DNA, 25 bp, Homo sapien
aaaaggctgtccctgcgtatgaaga

SEQ ID NO: 3250018 - DNA, 25 bp, Homo sapien
gacccaggtttcctatccaaatgga

SEQ ID NO: 3250019 - DNA, 25 bp, Homo sapien
catgtgtcaactggataaggtggcc

SEQ ID NO: 3250020 - DNA, 25 bp, Homo sapien
gcaagagtcacaacccattagttgg

SEQ ID NO: 3250021 - DNA, 25 bp, Homo sapien
taaggtggcccagtacacaaggatt

SEQ ID NO: 3250022 - DNA, 25 bp, Homo sapien
tcctggatcccttaagacatcaaca

SEQ ID NO: 3250023 - DNA, 25 bp, Homo sapien
tgttcaatttcatatagaacctggg

SEQ ID NO: 3250024 - DNA, 25 bp, Homo sapien
tgctgttcaatttcatatagaacct

SEQ ID NO: 3250025 - DNA, 25 bp, Homo sapien
gaatagggttgccacttcctggatc

SEQ ID NO: 3250026 - DNA, 25 bp, Homo sapien
tggaccgtgactttctcaccttgga

SEQ ID NO: 3250027 - DNA, 25 bp, Homo sapien
tgcttttactcttggaccgtgactt

SEQ ID NO: 3250028 - DNA, 25 bp, Homo sapien
tcctcacagaggtgaattttgtctt

SEQ ID NO: 3250029 - DNA, 25 bp, Homo sapien
ttttgtcttcgatgcacttcttcag

SEQ ID NO: 3250030 - DNA, 25 bp, Homo sapien
gcctggtccagcttcacgaactctg

SEQ ID NO: 3250031 - DNA, 25 bp, Homo sapien
tctcgccacgcagtctgaaattgct

SEQ ID NO: 3250032 - DNA, 25 bp, Homo sapien
tctgcttctcgccacgcagtctgaa

SEQ ID NO: 3250033 - DNA, 25 bp, Homo sapien
tgcagcagaactcgggcccggatct

SEQ ID NO: 3250034 - DNA, 25 bp, Homo sapien
tcagggtcctgagatcgtccagggc

SEQ ID NO: 3250035 - DNA, 25 bp, Homo sapien
tcaaacagcgaaagggtcagggtcc

SEQ ID NO: 3250036 - DNA, 25 bp, Homo sapien
atgaagatcaggtgctcccagcgtc

SEQ ID NO: 3250037 - DNA, 25 bp, Homo sapien
gcagctcgtcggtggccttttcaaa

SEQ ID NO: 3250038 - DNA, 25 bp, Homo sapien
ctgggccacttgtaatgtttatcaa

SEQ ID NO: 3250039 - DNA, 25 bp, Homo sapien
ggacctacatcctaattctgggcca

SEQ ID NO: 3250040 - DNA, 25 bp, Homo sapien
tgccagaatctcctataggatgtgg

SEQ ID NO: 3250041 - DNA, 25 bp, Homo sapien
ggatgcaacgtaagtttttgccttc

SEQ ID NO: 3250042 - DNA, 25 bp, Homo sapien
taagtcattgtccaacttctgcttg

SEQ ID NO: 3250043 - DNA, 25 bp, Homo sapien
gattgaaaagacttctgtctgagcc

SEQ ID NO: 3250044 - DNA, 25 bp, Homo sapien
tctgagcccgctccaatagcatttc

SEQ ID NO: 3250045 - DNA, 25 bp, Homo sapien
cttttgtagcaactctcgtcttctc

SEQ ID NO: 3250046 - DNA, 25 bp, Homo sapien
tacatcaaaactggccatgagtggg

SEQ ID NO: 3250047 - DNA, 25 bp, Homo sapien
tgaccacaggatcccaggtgctgct

SEQ ID NO: 3250048 - DNA, 25 bp, Homo sapien
tgaataaacagtagtgggtctccag

SEQ ID NO: 3250049 - DNA, 25 bp, Homo sapien
tcaaaggtgaatgcgagagccggca

SEQ ID NO: 3250050 - DNA, 25 bp, Homo sapien
gctgcagcggtgctcagaaggccct

SEQ ID NO: 3250051 - DNA, 25 bp, Homo sapien
ggttctggaccagatattccctgtg

SEQ ID NO: 3250052 - DNA, 25 bp, Homo sapien
tgtggccaaatcttttacttagatg

SEQ ID NO: 3250053 - DNA, 25 bp, Homo sapien
cctgcacacgggtctctgatgactg

SEQ ID NO: 3250054 - DNA, 25 bp, Homo sapien
ttccaggccatggagggtccgcaga

SEQ ID NO: 3250055 - DNA, 25 bp, Homo sapien
tcttgttgcaaagcgagagacttcc

SEQ ID NO: 3250056 - DNA, 25 bp, Homo sapien
gaaggttgctgcactctacagcaga

SEQ ID NO: 3250057 - DNA, 25 bp, Homo sapien
tctgggtaaaaaagatactgtgcag

SEQ ID NO: 3250058 - DNA, 25 bp, Homo sapien
gaatgtgaaagtaatgattactcac

SEQ ID NO: 3250059 - DNA, 25 bp, Homo sapien
ccacaaatgtgcattataaaggaat

SEQ ID NO: 3250060 - DNA, 25 bp, Homo sapien
aggaatgtgaaagtaatgattactc

SEQ ID NO: 3250061 - DNA, 25 bp, Homo sapien
ggaatgtgaaagtaatgattactca

SEQ ID NO: 3250062 - DNA, 25 bp, Homo sapien
gataaggcacatgcatcctatggct

SEQ ID NO: 3250063 - DNA, 25 bp, Homo sapien
aagacttcagggagataaggcacat

SEQ ID NO: 3250064 - DNA, 25 bp, Homo sapien
aacccactattgaacttctcaatga

SEQ ID NO: 3250065 - DNA, 25 bp, Homo sapien
cacatgcatcctatggcttccaaca

SEQ ID NO: 3250066 - DNA, 25 bp, Homo sapien
ctagaaaagcaagtgtcccctggag

SEQ ID NO: 3250067 - DNA, 25 bp, Homo sapien
gtcccctggagggagtgtcccatgg

SEQ ID NO: 3250068 - DNA, 25 bp, Homo sapien
tagaaaagcaagtgtcccctggagg

SEQ ID NO: 3250069 - DNA, 25 bp, Homo sapien
agtgtcccctggagggagtgtccca

SEQ ID NO: 3250070 - DNA, 25 bp, Homo sapien
taggagctgaatcaccgaacagtgc

SEQ ID NO: 3250071 - DNA, 25 bp, Homo sapien
ttctgagcaatctaggccagccctg

SEQ ID NO: 3250072 - DNA, 25 bp, Homo sapien
aagtgacgcagttacaaccccagga

SEQ ID NO: 3250073 - DNA, 25 bp, Homo sapien
caaggctgacctatgagaactccaa

SEQ ID NO: 3250074 - DNA, 25 bp, Homo sapien
cttctgcttcctccattgccatcat

SEQ ID NO: 3250075 - DNA, 25 bp, Homo sapien
gcttcctccattgccatcatctctc

SEQ ID NO: 3250076 - DNA, 25 bp, Homo sapien
gcacgtttcagcaactcttctgctt

SEQ ID NO: 3250077 - DNA, 25 bp, Homo sapien
agcacgtttcagcaactcttctgct

SEQ ID NO: 3250078 - DNA, 25 bp, Homo sapien
tcaatgccaccatcttccgatcgta

SEQ ID NO: 3250079 - DNA, 25 bp, Homo sapien
cattttccagcaatagaaactgctt

SEQ ID NO: 3250080 - DNA, 25 bp, Homo sapien
tccaggtcacattcagctgtcaatg

SEQ ID NO: 3250081 - DNA, 25 bp, Homo sapien
tccgatcgtactcctcttgtatttc

SEQ ID NO: 3250082 - DNA, 25 bp, Homo sapien
tgtgttcgacaagcctccagatctg

SEQ ID NO: 3250083 - DNA, 25 bp, Homo sapien
gcagaagggcaatgatatccttgct

SEQ ID NO: 3250084 - DNA, 25 bp, Homo sapien
tgctgatttgtgttcgacaagcctc

SEQ ID NO: 3250085 - DNA, 25 bp, Homo sapien
cccgattcagggttgcaatctccaa

SEQ ID NO: 3250086 - DNA, 25 bp, Homo sapien
taagggaaaggtcctcattcacgcc

SEQ ID NO: 3250087 - DNA, 25 bp, Homo sapien
tgtctatcatttggtcgttaaggga

SEQ ID NO: 3250088 - DNA, 25 bp, Homo sapien
taaggcttgaagcatgctcccaggg

SEQ ID NO: 3250089 - DNA, 25 bp, Homo sapien
tgaacggcaagggttccagcttgct

SEQ ID NO: 3250090 - DNA, 25 bp, Homo sapien
tcccttcagacactgatagcgaacc

SEQ ID NO: 3250091 - DNA, 25 bp, Homo sapien
ttcagacactgatagcgaaccatga

SEQ ID NO: 3250092 - DNA, 25 bp, Homo sapien
actgatagcgaaccatgaggaagag

SEQ ID NO: 3250093 - DNA, 25 bp, Homo sapien
ctgctgcgtggaggccgtggtgcgg

SEQ ID NO: 3250094 - DNA, 25 bp, Homo sapien
tccagggggctgtatgtttttctaa

SEQ ID NO: 3250095 - DNA, 25 bp, Homo sapien
tgtccagggggctgtatgtttttct

SEQ ID NO: 3250096 - DNA, 25 bp, Homo sapien
gtccagggggctgtatgtttttcta

SEQ ID NO: 3250097 - DNA, 25 bp, Homo sapien
tgagaatcactgtaagtacagattc

SEQ ID NO: 3250098 - DNA, 25 bp, Homo sapien
tacttctgagattcccttaaacatg

SEQ ID NO: 3250099 - DNA, 25 bp, Homo sapien
cagattccaaagagcatctttacct

SEQ ID NO: 3250100 - DNA, 25 bp, Homo sapien
cagaatcagccccacgtaaatcata

SEQ ID NO: 3250101 - DNA, 25 bp, Homo sapien
agctttgctaatttcccaatctagc

SEQ ID NO: 3250102 - DNA, 25 bp, Homo sapien
aacgcagctttgctaatttcccaat

SEQ ID NO: 3250103 - DNA, 25 bp, Homo sapien
caacgcagctttgctaatttcccaa

SEQ ID NO: 3250104 - DNA, 25 bp, Homo sapien
attacactcatacagcaaccagcca

SEQ ID NO: 3250105 - DNA, 25 bp, Homo sapien
catcgtcattgacgacaataagctc

SEQ ID NO: 3250106 - DNA, 25 bp, Homo sapien
ttattacactcatacagcaaccagc

SEQ ID NO: 3250107 - DNA, 25 bp, Homo sapien
gacaataagctcaatcacgggatat

SEQ ID NO: 3250108 - DNA, 25 bp, Homo sapien
cacctacaatgtaccgcacagtggg

SEQ ID NO: 3250109 - DNA, 25 bp, Homo sapien
tgagtgccacctacaatgtaccgca

SEQ ID NO: 3250110 - DNA, 25 bp, Homo sapien
ctgttgagtgccacctacaatgtac

SEQ ID NO: 3250111 - DNA, 25 bp, Homo sapien
tgccacctacaatgtaccgcacagt

SEQ ID NO: 3250112 - DNA, 25 bp, Homo sapien
cgtagggtatgactgtacacgacta

SEQ ID NO: 3250113 - DNA, 25 bp, Homo sapien
gaaggcgtagggtatgactgtacac

SEQ ID NO: 3250114 - DNA, 25 bp, Homo sapien
gaatgtgaaggcgtagggtatgact

SEQ ID NO: 3250115 - DNA, 25 bp, Homo sapien
tatgactgtacacgactatagactt

SEQ ID NO: 3250116 - DNA, 25 bp, Homo sapien
ccgagagactgcacagagtcccagt

SEQ ID NO: 3250117 - DNA, 25 bp, Homo sapien
agtcccagtctcaacgcataactgg

SEQ ID NO: 3250118 - DNA, 25 bp, Homo sapien
cttgtccaggtggagggtcatccag

SEQ ID NO: 3250119 - DNA, 25 bp, Homo sapien
ggaaaccagtcagatagcctcaggg

SEQ ID NO: 3250120 - DNA, 25 bp, Homo sapien
tctgctgttatggaaaaaagcactt

SEQ ID NO: 3250121 - DNA, 25 bp, Homo sapien
aaagcactttcagctgtgttctgtt

SEQ ID NO: 3250122 - DNA, 25 bp, Homo sapien
gttacgttttcttctgctgttatgg

SEQ ID NO: 3250123 - DNA, 25 bp, Homo sapien
aaaagcactttcagctgtgttctgt

SEQ ID NO: 3250124 - DNA, 25 bp, Homo sapien
tggagcgtggctgcgtagctgacag

SEQ ID NO: 3250125 - DNA, 25 bp, Homo sapien
gctctccccgttcccgaggtctcca

SEQ ID NO: 3250126 - DNA, 25 bp, Homo sapien
ggctgcgtagctgacagcaaaggca

SEQ ID NO: 3250127 - DNA, 25 bp, Homo sapien
gcgtggctgcgtagctgacagcaaa

SEQ ID NO: 3250128 - DNA, 25 bp, Homo sapien
cgaggttgtcttggtgttgttaaca

SEQ ID NO: 3250129 - DNA, 25 bp, Homo sapien
tgttaacaagcagccatatgcgggc

SEQ ID NO: 3250130 - DNA, 25 bp, Homo sapien
ttccgaggtcctgtttcccacagag

SEQ ID NO: 3250131 - DNA, 25 bp, Homo sapien
cttcttgctaaaagcctggaatcct

SEQ ID NO: 3250132 - DNA, 25 bp, Homo sapien
catttctgaaaaattactccatttt

SEQ ID NO: 3250133 - DNA, 25 bp, Homo sapien
tttcagaagtcccttgaacttctct

SEQ ID NO: 3250134 - DNA, 25 bp, Homo sapien
gaagtcccttgaacttctcttgaaa

SEQ ID NO: 3250135 - DNA, 25 bp, Homo sapien
gaacttctcttgaaatgtccccata

SEQ ID NO: 3250136 - DNA, 25 bp, Homo sapien
tgaagatatcatttaacatgtaccg

SEQ ID NO: 3250137 - DNA, 25 bp, Homo sapien
agtgaagatatcatttaacatgtac

SEQ ID NO: 3250138 - DNA, 25 bp, Homo sapien
gatatcatttaacatgtaccgtgtg

SEQ ID NO: 3250139 - DNA, 25 bp, Homo sapien
catttaacatgtaccgtgtgcttac

SEQ ID NO: 3250140 - DNA, 25 bp, Homo sapien
tgggctgacagtacacctgtgcacc

SEQ ID NO: 3250141 - DNA, 25 bp, Homo sapien
ggctgacagtacacctgtgcaccat

SEQ ID NO: 3250142 - DNA, 25 bp, Homo sapien
gtgtgggctgacagtacacctgtgc

SEQ ID NO: 3250143 - DNA, 25 bp, Homo sapien
caggtgtgggctgacagtacacctg

SEQ ID NO: 3250144 - DNA, 25 bp, Homo sapien
gttgagagtgggatgaagacttcca

SEQ ID NO: 3250145 - DNA, 25 bp, Homo sapien
aggaatgagcccatggcccactaga

SEQ ID NO: 3250146 - DNA, 25 bp, Homo sapien
cccactagaggctgcagaagttgag

SEQ ID NO: 3250147 - DNA, 25 bp, Homo sapien
caggcggtgtgttataggagactct

SEQ ID NO: 3250148 - DNA, 25 bp, Homo sapien
cagcattccactttgggccaaatca

SEQ ID NO: 3250149 - DNA, 25 bp, Homo sapien
ctgcagtcttaaagtgacagcattc

SEQ ID NO: 3250150 - DNA, 25 bp, Homo sapien
tgacagcattccactttgggccaaa

SEQ ID NO: 3250151 - DNA, 25 bp, Homo sapien
gcagtcttaaagtgacagcattcca

SEQ ID NO: 3250152 - DNA, 25 bp, Homo sapien
taacatcagttgatcagcaacctga

SEQ ID NO: 3250153 - DNA, 25 bp, Homo sapien
tgctgcgttccttaagttcatggcc

SEQ ID NO: 3250154 - DNA, 25 bp, Homo sapien
tggactaaagtcaaagtattggcag

SEQ ID NO: 3250155 - DNA, 25 bp, Homo sapien
gtagctgagtccttctcacgttgca

SEQ ID NO: 3250156 - DNA, 25 bp, Homo sapien
ctgacatggcgtttttccagtgaaa

SEQ ID NO: 3250157 - DNA, 25 bp, Homo sapien
actgacatggcgtttttccagtgaa

SEQ ID NO: 3250158 - DNA, 25 bp, Homo sapien
acactgacatggcgtttttccagtg

SEQ ID NO: 3250159 - DNA, 25 bp, Homo sapien
tgacatggcgtttttccagtgaaaa

SEQ ID NO: 3250160 - DNA, 25 bp, Homo sapien
ccagcggggacgtgagctggcgccg

SEQ ID NO: 3250161 - DNA, 25 bp, Homo sapien
gggacgtgagctggcgccgagacag

SEQ ID NO: 3250162 - DNA, 25 bp, Homo sapien
agctggcgccgagacagcctcggcc

SEQ ID NO: 3250163 - DNA, 25 bp, Homo sapien
atcccggggtggctgcgcgccgagg

SEQ ID NO: 3250164 - DNA, 25 bp, Homo sapien
cgcctgtcgggacccgctacctcaa

SEQ ID NO: 3250165 - DNA, 25 bp, Homo sapien
gcggcgggtgccgccgagtcgctgg

SEQ ID NO: 3250166 - DNA, 25 bp, Homo sapien
cgctacctcaaagcggcgggtgccg

SEQ ID NO: 3250167 - DNA, 25 bp, Homo sapien
tgtcgggacccgctacctcaaagcg

SEQ ID NO: 3250168 - DNA, 25 bp, Homo sapien
tctgaagtcgcagccctaagcaagc

SEQ ID NO: 3250169 - DNA, 25 bp, Homo sapien
ataacccagaccatccaaggacagg

SEQ ID NO: 3250170 - DNA, 25 bp, Homo sapien
acttccggttgcgttcagtgcagac

SEQ ID NO: 3250171 - DNA, 25 bp, Homo sapien
ttcctgacctaacatggacaaggcc

SEQ ID NO: 3250172 - DNA, 25 bp, Homo sapien
tgctgcatttggacacggcactgag

SEQ ID NO: 3250173 - DNA, 25 bp, Homo sapien
tgagggacgtgccaatattcttact

SEQ ID NO: 3250174 - DNA, 25 bp, Homo sapien
gcgtaaggacctcagcatgctgcag

SEQ ID NO: 3250175 - DNA, 25 bp, Homo sapien
ggttttctcttggaagtcccaggca

SEQ ID NO: 3250176 - DNA, 25 bp, Homo sapien
ctattgtgcgattctcaggagctgc

SEQ ID NO: 3250177 - DNA, 25 bp, Homo sapien
aagaatgattgcagccgaagggcta

SEQ ID NO: 3250178 - DNA, 25 bp, Homo sapien
gctgatgatgactctgacggaaaga

SEQ ID NO: 3250179 - DNA, 25 bp, Homo sapien
gctccaaagcccgacagctgatgat

SEQ ID NO: 3250180 - DNA, 25 bp, Homo sapien
gacatagctatattgaatagtggtg

SEQ ID NO: 3250181 - DNA, 25 bp, Homo sapien
tgagcctttattgtaaccatcaccc

SEQ ID NO: 3250182 - DNA, 25 bp, Homo sapien
ttgaaggagtgacagtacaattttg

SEQ ID NO: 3250183 - DNA, 25 bp, Homo sapien
gacagtacaattttgtgacatagct

SEQ ID NO: 3250184 - DNA, 25 bp, Homo sapien
taggcacggtttctagtggaactcg

SEQ ID NO: 3250185 - DNA, 25 bp, Homo sapien
tgagtgatttgtttactgtccaccc

SEQ ID NO: 3250186 - DNA, 25 bp, Homo sapien
ttcacacctttgtctcagaacccag

SEQ ID NO: 3250187 - DNA, 25 bp, Homo sapien
tcggcctcctttaaggtgtgagaga

SEQ ID NO: 3250188 - DNA, 25 bp, Homo sapien
tcccaccggtagagaaacttccaga

SEQ ID NO: 3250189 - DNA, 25 bp, Homo sapien
gagaaacttccagaccagcccctca

SEQ ID NO: 3250190 - DNA, 25 bp, Homo sapien
agagaaacttccagaccagcccctc

SEQ ID NO: 3250191 - DNA, 25 bp, Homo sapien
catctgtggaatgatcacgggaccc

SEQ ID NO: 3250192 - DNA, 25 bp, Homo sapien
gaacgtgtcatttgctcgaccctgg

SEQ ID NO: 3250193 - DNA, 25 bp, Homo sapien
tatattgtcacatgggccctctgca

SEQ ID NO: 3250194 - DNA, 25 bp, Homo sapien
tgtgtatagtaaatgcaggccctct

SEQ ID NO: 3250195 - DNA, 25 bp, Homo sapien
ctgggcacagactcggggctgccct

SEQ ID NO: 3250196 - DNA, 25 bp, Homo sapien
ggggctgccctgaagctgatgaagg

SEQ ID NO: 3250197 - DNA, 25 bp, Homo sapien
tgggcacagactcggggctgccctg

SEQ ID NO: 3250198 - DNA, 25 bp, Homo sapien
ctcggggctgccctgaagctgatga

SEQ ID NO: 3250199 - DNA, 25 bp, Homo sapien
gtcccccctggaatgtacaccattg

SEQ ID NO: 3250200 - DNA, 25 bp, Homo sapien
tgtacaccattgaccggccacatgc

SEQ ID NO: 3250201 - DNA, 25 bp, Homo sapien
cggccacatgccacctggcatataa

SEQ ID NO: 3250202 - DNA, 25 bp, Homo sapien
tggaatgtacaccattgaccggcca

SEQ ID NO: 3250203 - DNA, 25 bp, Homo sapien
gcatcgtgtctcagtcagtccttgg

SEQ ID NO: 3250204 - DNA, 25 bp, Homo sapien
ttctgagtgtgaacctggctcggcc

SEQ ID NO: 3250205 - DNA, 25 bp, Homo sapien
gaatgaaaacaccatgctccgaggt

SEQ ID NO: 3250206 - DNA, 25 bp, Homo sapien
tagaacatctacagggtgcaaagga

SEQ ID NO: 3250207 - DNA, 25 bp, Homo sapien
aggaaaagggatggacatgattccc

SEQ ID NO: 3250208 - DNA, 25 bp, Homo sapien
gcaccaactaaaactgtgggtttca

SEQ ID NO: 3250209 - DNA, 25 bp, Homo sapien
ggaaagagcatccttcgacttcccc

SEQ ID NO: 3250210 - DNA, 25 bp, Homo sapien
agaatccttcaggctagctcctccg

SEQ ID NO: 3250211 - DNA, 25 bp, Homo sapien
gccggtgcgcctgggattgttgtca

SEQ ID NO: 3250212 - DNA, 25 bp, Homo sapien
gggcgccacgatgcggtggccggtg

SEQ ID NO: 3250213 - DNA, 25 bp, Homo sapien
gcgccacgatgcggtggccggtgcg

SEQ ID NO: 3250214 - DNA, 25 bp, Homo sapien
ggattgttgtcatctatctgggcac

SEQ ID NO: 3250215 - DNA, 25 bp, Homo sapien
cactgcagtgggtgaacaggctaaa

SEQ ID NO: 3250216 - DNA, 25 bp, Homo sapien
taaacccacatcaggtaccaccatg

SEQ ID NO: 3250217 - DNA, 25 bp, Homo sapien
agcacatgccctgcaaatggcagct

SEQ ID NO: 3250218 - DNA, 25 bp, Homo sapien
tggtacctctctttgtaaacccaca

SEQ ID NO: 3250219 - DNA, 25 bp, Homo sapien
cggcctgaactgctgcaattgtggg

SEQ ID NO: 3250220 - DNA, 25 bp, Homo sapien
ggactcggcctgaactgctgcaatt

SEQ ID NO: 3250221 - DNA, 25 bp, Homo sapien
agcctgggccaccactctttcctac

SEQ ID NO: 3250222 - DNA, 25 bp, Homo sapien
aactgctgcaattgtggggagcctg

SEQ ID NO: 3250223 - DNA, 25 bp, Homo sapien
catatttgggtgtagctggtacctc

SEQ ID NO: 3250224 - DNA, 25 bp, Homo sapien
tggtacctcgtacacaggaccgtca

SEQ ID NO: 3250225 - DNA, 25 bp, Homo sapien
tgtttagaaggcgaagatttggctg

SEQ ID NO: 3250226 - DNA, 25 bp, Homo sapien
aggaccgtcatacatgcccctggaa

SEQ ID NO: 3250227 - DNA, 25 bp, Homo sapien
ttcttgtagaagtcaacagcgaggc

SEQ ID NO: 3250228 - DNA, 25 bp, Homo sapien
ttctgggcagataaagcagagccct

SEQ ID NO: 3250229 - DNA, 25 bp, Homo sapien
tgcacatgcagtaacaaaacaggcc

SEQ ID NO: 3250230 - DNA, 25 bp, Homo sapien
tacacagtagcatacacgcgtgaac

SEQ ID NO: 3250231 - DNA, 25 bp, Homo sapien
gttgatgtttccgtcttcaaagacg

SEQ ID NO: 3250232 - DNA, 25 bp, Homo sapien
ttgacgcgctggtacaggtgctccg

SEQ ID NO: 3250233 - DNA, 25 bp, Homo sapien
aatgaagcggcccatgcccttgttg

SEQ ID NO: 3250234 - DNA, 25 bp, Homo sapien
aggtgctccgggaacgccttccgcg

SEQ ID NO: 3250235 - DNA, 25 bp, Homo sapien
gcaccaacagcctcagtgttacttc

SEQ ID NO: 3250236 - DNA, 25 bp, Homo sapien
ctgcaccaacagcctcagtgttact

SEQ ID NO: 3250237 - DNA, 25 bp, Homo sapien
tcagtgttacttcccaggatttgct

SEQ ID NO: 3250238 - DNA, 25 bp, Homo sapien
acagcctcagtgttacttcccagga

SEQ ID NO: 3250239 - DNA, 25 bp, Homo sapien
tcaccgttgcgcatgtaggctgccg

SEQ ID NO: 3250240 - DNA, 25 bp, Homo sapien
gatcaattgacacgatatcggcact

SEQ ID NO: 3250241 - DNA, 25 bp, Homo sapien
ggctgccggtggctttctataatca

SEQ ID NO: 3250242 - DNA, 25 bp, Homo sapien
taaagcacgtgtgccatatggccaa

SEQ ID NO: 3250243 - DNA, 25 bp, Homo sapien
gttgtgtgtcaactgtcaccagcca

SEQ ID NO: 3250244 - DNA, 25 bp, Homo sapien
tttaaaagtaggtcacatacatggt

SEQ ID NO: 3250245 - DNA, 25 bp, Homo sapien
tacatggttgaaaacaatcaactgg

SEQ ID NO: 3250246 - DNA, 25 bp, Homo sapien
ctccagcattgggtaatgccatttt

SEQ ID NO: 3250247 - DNA, 25 bp, Homo sapien
aatgacctggattggtgagccggac

SEQ ID NO: 3250248 - DNA, 25 bp, Homo sapien
taatagaattgcaagccctgctgga

SEQ ID NO: 3250249 - DNA, 25 bp, Homo sapien
tgtggcagccaatggatactccagg

SEQ ID NO: 3250250 - DNA, 25 bp, Homo sapien
tcagtgagcagctaccgagacctct

SEQ ID NO: 3250251 - DNA, 25 bp, Homo sapien
tatctcagcagcacaaataggccag

SEQ ID NO: 3250252 - DNA, 25 bp, Homo sapien
gcagcacaaataggccaggacttac

SEQ ID NO: 3250253 - DNA, 25 bp, Homo sapien
ttatctcagcagcacaaataggcca

SEQ ID NO: 3250254 - DNA, 25 bp, Homo sapien
tcagcagcacaaataggccaggact

SEQ ID NO: 3250255 - DNA, 25 bp, Homo sapien
ctgttatggtcttcaacttgtcggg

SEQ ID NO: 3250256 - DNA, 25 bp, Homo sapien
ccttgggtacaggttaaagatcttg

SEQ ID NO: 3250257 - DNA, 25 bp, Homo sapien
ggtacaggttaaagatcttggctgc

SEQ ID NO: 3250258 - DNA, 25 bp, Homo sapien
gtcggcatccgagcccacggcaatc

SEQ ID NO: 3250259 - DNA, 25 bp, Homo sapien
accgccttgtcccagacgaccgtca

SEQ ID NO: 3250260 - DNA, 25 bp, Homo sapien
agtggccgctgcctgtgacctgcaa

SEQ ID NO: 3250261 - DNA, 25 bp, Homo sapien
cctctatcccgttgacaccctcggg

SEQ ID NO: 3250262 - DNA, 25 bp, Homo sapien
agacgaccgtcatccgctcctctat

SEQ ID NO: 3250263 - DNA, 25 bp, Homo sapien
cagatgttgagtaagcccttggcta

SEQ ID NO: 3250264 - DNA, 25 bp, Homo sapien
tgaggcgttgtcagactctagggcc

SEQ ID NO: 3250265 - DNA, 25 bp, Homo sapien
tgggcccgtgtggaaatagaaagtc

SEQ ID NO: 3250266 - DNA, 25 bp, Homo sapien
tggctacgctagtcaaaggtttctg

SEQ ID NO: 3250267 - DNA, 25 bp, Homo sapien
tagggaggtcaagtagtcgggcgtg

SEQ ID NO: 3250268 - DNA, 25 bp, Homo sapien
ggaggtcaagtagtcgggcgtggta

SEQ ID NO: 3250269 - DNA, 25 bp, Homo sapien
agtagggaggtcaagtagtcgggcg

SEQ ID NO: 3250270 - DNA, 25 bp, Homo sapien
agggaggtcaagtagtcgggcgtgg

SEQ ID NO: 3250271 - DNA, 25 bp, Homo sapien
agtaatgggtgccatcggtccccag

SEQ ID NO: 3250272 - DNA, 25 bp, Homo sapien
gtaatgggtgccatcggtccccagg

SEQ ID NO: 3250273 - DNA, 25 bp, Homo sapien
ggctggcggcaatgggctctccaaa

SEQ ID NO: 3250274 - DNA, 25 bp, Homo sapien
cggcaatgggctctccaaaaactag

SEQ ID NO: 3250275 - DNA, 25 bp, Homo sapien
tggccagagcgatgatgtcggctgc

SEQ ID NO: 3250276 - DNA, 25 bp, Homo sapien
cgatgatgtcggctgcactcttgct

SEQ ID NO: 3250277 - DNA, 25 bp, Homo sapien
gagcgatgatgtcggctgcactctt

SEQ ID NO: 3250278 - DNA, 25 bp, Homo sapien
cagagcgatgatgtcggctgcactc

SEQ ID NO: 3250279 - DNA, 25 bp, Homo sapien
agggcagttgatccggcccgcaatg

SEQ ID NO: 3250280 - DNA, 25 bp, Homo sapien
cacagggcagttgatccggcccgca

SEQ ID NO: 3250281 - DNA, 25 bp, Homo sapien
ggtgatggcccggaacaccgcctcg

SEQ ID NO: 3250282 - DNA, 25 bp, Homo sapien
cttggtgatgtacacagggcagttg

SEQ ID NO: 3250283 - DNA, 25 bp, Homo sapien
agggcatggccctcgggacccgtga

SEQ ID NO: 3250284 - DNA, 25 bp, Homo sapien
tcagggcatggccctcgggacccgt

SEQ ID NO: 3250285 - DNA, 25 bp, Homo sapien
gggcatggccctcgggacccgtgat

SEQ ID NO: 3250286 - DNA, 25 bp, Homo sapien
cagggcatggccctcgggacccgtg

SEQ ID NO: 3250287 - DNA, 25 bp, Homo sapien
gcatggaccaagatcacagctccca

SEQ ID NO: 3250288 - DNA, 25 bp, Homo sapien
tctccattttctgcatggaccaaga

SEQ ID NO: 3250289 - DNA, 25 bp, Homo sapien
ctgagctatcaaatctccattttct

SEQ ID NO: 3250290 - DNA, 25 bp, Homo sapien
cattttctgcatggaccaagatcac

SEQ ID NO: 3250291 - DNA, 25 bp, Homo sapien
tgttctccatgcatgcaagacaaca

SEQ ID NO: 3250292 - DNA, 25 bp, Homo sapien
tggtaagggccaaagccacgaagct

SEQ ID NO: 3250293 - DNA, 25 bp, Homo sapien
gagaatctgcatttgggcattgccc

SEQ ID NO: 3250294 - DNA, 25 bp, Homo sapien
tcggatgtctgctttccgacagaca

SEQ ID NO: 3250295 - DNA, 25 bp, Homo sapien
tagacatccttataggccatgtaga

SEQ ID NO: 3250296 - DNA, 25 bp, Homo sapien
ctggctgtcggacatttggtagaca

SEQ ID NO: 3250297 - DNA, 25 bp, Homo sapien
catttggtagacatccttataggcc

SEQ ID NO: 3250298 - DNA, 25 bp, Homo sapien
taggccatgtagacttggaaggaat

SEQ ID NO: 3250299 - DNA, 25 bp, Homo sapien
ggcagcctcgagcagatgggaaacg

SEQ ID NO: 3250300 - DNA, 25 bp, Homo sapien
gcagcctcgagcagatgggaaacgg

SEQ ID NO: 3250301 - DNA, 25 bp, Homo sapien
gaggcagcctcgagcagatgggaaa

SEQ ID NO: 3250302 - DNA, 25 bp, Homo sapien
tcgaaagaggtcagtaggctggacc

SEQ ID NO: 3250303 - DNA, 25 bp, Homo sapien
gcttcgtgccacttctcgaaagagg

SEQ ID NO: 3250304 - DNA, 25 bp, Homo sapien
cacagcaggatttggtgtcagctgc

SEQ ID NO: 3250305 - DNA, 25 bp, Homo sapien
gaacgccatcgtaccagcttgtgat

SEQ ID NO: 3250306 - DNA, 25 bp, Homo sapien
agagagcctcgaacacactgagcac

SEQ ID NO: 3250307 - DNA, 25 bp, Homo sapien
gaatgaaatccaatggcaccctggg

SEQ ID NO: 3250308 - DNA, 25 bp, Homo sapien
tcacagtctatgtccctaaggcagg

SEQ ID NO: 3250309 - DNA, 25 bp, Homo sapien
taaaacagtgacctgtgtcataggg

SEQ ID NO: 3250310 - DNA, 25 bp, Homo sapien
agggcttctgcaggtacgtgttgac

SEQ ID NO: 3250311 - DNA, 25 bp, Homo sapien
tgatcatcgtggtcccgcccaccag

SEQ ID NO: 3250312 - DNA, 25 bp, Homo sapien
ggaagaagtcatcagccgcagtcat

SEQ ID NO: 3250313 - DNA, 25 bp, Homo sapien
gttgacatcaatacctccgggaata

SEQ ID NO: 3250314 - DNA, 25 bp, Homo sapien
tccaccaggaacgattaagttctct

SEQ ID NO: 3250315 - DNA, 25 bp, Homo sapien
caccaggaacgattaagttctctcc

SEQ ID NO: 3250316 - DNA, 25 bp, Homo sapien
tcactccaccaggaacgattaagtt

SEQ ID NO: 3250317 - DNA, 25 bp, Homo sapien
caggaacgattaagttctctcctat

SEQ ID NO: 3250318 - DNA, 25 bp, Homo sapien
gcaaacaacagagacagccttggtt

SEQ ID NO: 3250319 - DNA, 25 bp, Homo sapien
tcattttgcaaaagaggacagcaca

SEQ ID NO: 3250320 - DNA, 25 bp, Homo sapien
gaggctctttcttaccaggcacaat

SEQ ID NO: 3250321 - DNA, 25 bp, Homo sapien
ggttggccagagtcctaagatgctt

SEQ ID NO: 3250322 - DNA, 25 bp, Homo sapien
catttcctgaacagcctggttggcc

SEQ ID NO: 3250323 - DNA, 25 bp, Homo sapien
gagagcttctcagcaacgggttcaa

SEQ ID NO: 3250324 - DNA, 25 bp, Homo sapien
gatgttgacacataacagcaggcac

SEQ ID NO: 3250325 - DNA, 25 bp, Homo sapien
taggactgccaacacgcagagagct

SEQ ID NO: 3250326 - DNA, 25 bp, Homo sapien
acagcctggttagccggagtcctag

SEQ ID NO: 3250327 - DNA, 25 bp, Homo sapien
gccatggttgagttagaaaacctca

SEQ ID NO: 3250328 - DNA, 25 bp, Homo sapien
cacaaaggggtgttccctcagagtt

SEQ ID NO: 3250329 - DNA, 25 bp, Homo sapien
gctttctctctatctaagccatggt

SEQ ID NO: 3250330 - DNA, 25 bp, Homo sapien
tgtggtcagatcaaacttctagcag

SEQ ID NO: 3250331 - DNA, 25 bp, Homo sapien
atttgtttgcgctttccctgaatcg

SEQ ID NO: 3250332 - DNA, 25 bp, Homo sapien
tgaatcggtgctccaggacctacag

SEQ ID NO: 3250333 - DNA, 25 bp, Homo sapien
cacctgatggccagcattcatttgt

SEQ ID NO: 3250334 - DNA, 25 bp, Homo sapien
tcaccacctgatggccagcattcat

SEQ ID NO: 3250335 - DNA, 25 bp, Homo sapien
tccaggtagacgtcagcataaaggg

SEQ ID NO: 3250336 - DNA, 25 bp, Homo sapien
ccacctttgatgaggagtcggtcac

SEQ ID NO: 3250337 - DNA, 25 bp, Homo sapien
tggtcatcgttgatgatccgtccac

SEQ ID NO: 3250338 - DNA, 25 bp, Homo sapien
tcagcataaagggattggtcatcgt

SEQ ID NO: 3250339 - DNA, 25 bp, Homo sapien
gcctcttgacggcaatccgggacca

SEQ ID NO: 3250340 - DNA, 25 bp, Homo sapien
caagcctcttgacggcaatccggga

SEQ ID NO: 3250341 - DNA, 25 bp, Homo sapien
ctcttgacggcaatccgggaccaat

SEQ ID NO: 3250342 - DNA, 25 bp, Homo sapien
cttgacggcaatccgggaccaatgg

SEQ ID NO: 3250343 - DNA, 25 bp, Homo sapien
ctgatcatgaccttgacatcatgga

SEQ ID NO: 3250344 - DNA, 25 bp, Homo sapien
tgatcatgaccttgacatcatggag

SEQ ID NO: 3250345 - DNA, 25 bp, Homo sapien
gccttgcaggccatcctattaagtt

SEQ ID NO: 3250346 - DNA, 25 bp, Homo sapien
gccatcctattaagtttccaccttg

SEQ ID NO: 3250347 - DNA, 25 bp, Homo sapien
gcagactgggactgcacactttcag

SEQ ID NO: 3250348 - DNA, 25 bp, Homo sapien
ggcctggtgaccacttcagcttagc

SEQ ID NO: 3250349 - DNA, 25 bp, Homo sapien
gcggcccagcgtcgggaacattaac

SEQ ID NO: 3250350 - DNA, 25 bp, Homo sapien
cagcgtcgccccattaggttatttt

SEQ ID NO: 3250351 - DNA, 25 bp, Homo sapien
caccccgagacaaagcgtaaagacg

SEQ ID NO: 3250352 - DNA, 25 bp, Homo sapien
ggaacagtcaggctccacgctgatg

SEQ ID NO: 3250353 - DNA, 25 bp, Homo sapien
actccatcagtaaaggcggggagtg

SEQ ID NO: 3250354 - DNA, 25 bp, Homo sapien
ggtccggacttccactccatcagta

SEQ ID NO: 3250355 - DNA, 25 bp, Homo sapien
ctaggtccggacttccactccatca

SEQ ID NO: 3250356 - DNA, 25 bp, Homo sapien
cactccatcagtaaaggcggggagt

SEQ ID NO: 3250357 - DNA, 25 bp, Homo sapien
cgtgatgtgcgggatgctcttcttg

SEQ ID NO: 3250358 - DNA, 25 bp, Homo sapien
gatgtgcgggatgctcttcttgccc

SEQ ID NO: 3250359 - DNA, 25 bp, Homo sapien
tgtgcgggatgctcttcttgccctg

SEQ ID NO: 3250360 - DNA, 25 bp, Homo sapien
tgatgtgcgggatgctcttcttgcc

SEQ ID NO: 3250361 - DNA, 25 bp, Homo sapien
ccctctggcgccctcggcccggccg

SEQ ID NO: 3250362 - DNA, 25 bp, Homo sapien
gcgctctcggccccgctcccagcgg

SEQ ID NO: 3250363 - DNA, 25 bp, Homo sapien
ccggcgctctcggccccgctcccag

SEQ ID NO: 3250364 - DNA, 25 bp, Homo sapien
ctctcggccccgctcccagcgggcg

SEQ ID NO: 3250365 - DNA, 25 bp, Homo sapien
gctctcggccccgctcccagcgggc

SEQ ID NO: 3250366 - DNA, 25 bp, Homo sapien
atagagacacggacggaggctcggc

SEQ ID NO: 3250367 - DNA, 25 bp, Homo sapien
tggatgcccacgcgcggctgccccg

SEQ ID NO: 3250368 - DNA, 25 bp, Homo sapien
ccgggagggatagagacacggacgg

SEQ ID NO: 3250369 - DNA, 25 bp, Homo sapien
gctcggcgcccgtggatgcccacgc

SEQ ID NO: 3250370 - DNA, 25 bp, Homo sapien
gcggagcgaagccggattcgcccct

SEQ ID NO: 3250371 - DNA, 25 bp, Homo sapien
ggcgcggagcgaagccggattcgcc

SEQ ID NO: 3250372 - DNA, 25 bp, Homo sapien
ggagcgaagccggattcgcccctct

SEQ ID NO: 3250373 - DNA, 25 bp, Homo sapien
cggcggcgcggagcgaagccggatt

SEQ ID NO: 3250374 - DNA, 25 bp, Homo sapien
gtcaccccacagaattgcctccaag

SEQ ID NO: 3250375 - DNA, 25 bp, Homo sapien
gcctaaaatccctgtcaatgaccgg

SEQ ID NO: 3250376 - DNA, 25 bp, Homo sapien
ttcaagttgccatccagagcgaggg

SEQ ID NO: 3250377 - DNA, 25 bp, Homo sapien
taccccgggtgcaaaacatattagc

SEQ ID NO: 3250378 - DNA, 25 bp, Homo sapien
agaagccagctcagtatcccaggaa

SEQ ID NO: 3250379 - DNA, 25 bp, Homo sapien
cgttccctggggtcagtctggagat

SEQ ID NO: 3250380 - DNA, 25 bp, Homo sapien
gtctggagatctgagcagaaagccc

SEQ ID NO: 3250381 - DNA, 25 bp, Homo sapien
ggtcagtctggagatctgagcagaa

SEQ ID NO: 3250382 - DNA, 25 bp, Homo sapien
agggcgttccctggggtcagtctgg

SEQ ID NO: 3250383 - DNA, 25 bp, Homo sapien
ggcagcggcaatccttgcgcctgcg

SEQ ID NO: 3250384 - DNA, 25 bp, Homo sapien
caagggacaagaccacgtgcgtatc

SEQ ID NO: 3250385 - DNA, 25 bp, Homo sapien
gccactggccaaacagatcgctgct

SEQ ID NO: 3250386 - DNA, 25 bp, Homo sapien
tgctcccaagcagatttcgccggta

SEQ ID NO: 3250387 - DNA, 25 bp, Homo sapien
tggctctcgtcggtccatccaaagg

SEQ ID NO: 3250388 - DNA, 25 bp, Homo sapien
caacttccgtttttctggcacctga

SEQ ID NO: 3250389 - DNA, 25 bp, Homo sapien
ggcatccaggtctggaccaattcga

SEQ ID NO: 3250390 - DNA, 25 bp, Homo sapien
tcggtccatccaaaggctacgccgt

SEQ ID NO: 3250391 - DNA, 25 bp, Homo sapien
ggctcgctcacgtcgctggccgtgt

SEQ ID NO: 3250392 - DNA, 25 bp, Homo sapien
cactgtaggcgtcgaagtcgatggt

SEQ ID NO: 3250393 - DNA, 25 bp, Homo sapien
ggcaggtcgtcctcggtgttccacg

SEQ ID NO: 3250394 - DNA, 25 bp, Homo sapien
gatggtcttgttctcgtaggcgccc

SEQ ID NO: 3250395 - DNA, 25 bp, Homo sapien
gcgcctcggtgcgggcctgcggcgg

SEQ ID NO: 3250396 - DNA, 25 bp, Homo sapien
tccgcgcctcggtgcgggcctgcgg

SEQ ID NO: 3250397 - DNA, 25 bp, Homo sapien
cccgggcgcgactgcggcccaggga

SEQ ID NO: 3250398 - DNA, 25 bp, Homo sapien
ccgggcgcgactgcggcccagggag

SEQ ID NO: 3250399 - DNA, 25 bp, Homo sapien
catttgggattcagcgggaaagtac

SEQ ID NO: 3250400 - DNA, 25 bp, Homo sapien
tgaatgagggcgcataggagacctt

SEQ ID NO: 3250401 - DNA, 25 bp, Homo sapien
tagattcatgcaaccgcaaggtgta

SEQ ID NO: 3250402 - DNA, 25 bp, Homo sapien
tcaacctggaagaactaaggagtcc

SEQ ID NO: 3250403 - DNA, 25 bp, Homo sapien
gaccccagctgtaaaaggacttgcg

SEQ ID NO: 3250404 - DNA, 25 bp, Homo sapien
ggtaggtaccctgtccaagcttgca

SEQ ID NO: 3250405 - DNA, 25 bp, Homo sapien
tgtgcaaacccgaactgtggaagag

SEQ ID NO: 3250406 - DNA, 25 bp, Homo sapien
gagtccaacatgcaaccagggtgaa

SEQ ID NO: 3250407 - DNA, 25 bp, Homo sapien
ttaatccttgtaatagcccagtggg

SEQ ID NO: 3250408 - DNA, 25 bp, Homo sapien
cttcccatcccaattgcattcaatg

SEQ ID NO: 3250409 - DNA, 25 bp, Homo sapien
aaaacagatccccagacgctaggtt

SEQ ID NO: 3250410 - DNA, 25 bp, Homo sapien
taggttgcctgacatggcctgtgct

SEQ ID NO: 3250411 - DNA, 25 bp, Homo sapien
gaggagccttcagccagtgcaaaag

SEQ ID NO: 3250412 - DNA, 25 bp, Homo sapien
agaggaggagccttcagccagtgca

SEQ ID NO: 3250413 - DNA, 25 bp, Homo sapien
ggagccttcagccagtgcaaaagcc

SEQ ID NO: 3250414 - DNA, 25 bp, Homo sapien
aggaggagccttcagccagtgcaaa

SEQ ID NO: 3250415 - DNA, 25 bp, Homo sapien
taaggcagtaaatcgtccacagacg

SEQ ID NO: 3250416 - DNA, 25 bp, Homo sapien
tgtccttaacattccggtccaattg

SEQ ID NO: 3250417 - DNA, 25 bp, Homo sapien
gattcgttcaggagtcagggtccct

SEQ ID NO: 3250418 - DNA, 25 bp, Homo sapien
gaatctcattacactagggctcctg

SEQ ID NO: 3250419 - DNA, 25 bp, Homo sapien
tggtccctagggccatgccaggacc

SEQ ID NO: 3250420 - DNA, 25 bp, Homo sapien
catcattttgtccacacgctttaag

SEQ ID NO: 3250421 - DNA, 25 bp, Homo sapien
cttgataccgttatgtgcacacatg

SEQ ID NO: 3250422 - DNA, 25 bp, Homo sapien
ggtttgatcatatccagttcctgcc

SEQ ID NO: 3250423 - DNA, 25 bp, Homo sapien
cctagaaccatagatttcactgaga

SEQ ID NO: 3250424 - DNA, 25 bp, Homo sapien
catagatttcactgagatagaccag

SEQ ID NO: 3250425 - DNA, 25 bp, Homo sapien
gaagtacactgtacctagaaccata

SEQ ID NO: 3250426 - DNA, 25 bp, Homo sapien
ctgctgggaagtacactgtacctag

SEQ ID NO: 3250427 - DNA, 25 bp, Homo sapien
tgtgaaaggaaccaaactgaagttg

SEQ ID NO: 3250428 - DNA, 25 bp, Homo sapien
gtgaaaggaaccaaactgaagttgc

SEQ ID NO: 3250429 - DNA, 25 bp, Homo sapien
ctgggcaaaaatggcacaggaaggc

SEQ ID NO: 3250430 - DNA, 25 bp, Homo sapien
aatggcacaggaaggcaaggctagt

SEQ ID NO: 3250431 - DNA, 25 bp, Homo sapien
ggcaaaaatggcacaggaaggcaag

SEQ ID NO: 3250432 - DNA, 25 bp, Homo sapien
atggcacaggaaggcaaggctagtc

SEQ ID NO: 3250433 - DNA, 25 bp, Homo sapien
tcagcagccccacagagactgtgca

SEQ ID NO: 3250434 - DNA, 25 bp, Homo sapien
tgcctcatgcctcagcagccccaca

SEQ ID NO: 3250435 - DNA, 25 bp, Homo sapien
cccacagagactgtgcaggaggcca

SEQ ID NO: 3250436 - DNA, 25 bp, Homo sapien
cagccccacagagactgtgcaggag

SEQ ID NO: 3250437 - DNA, 25 bp, Homo sapien
gccaggcaatgtcccaggagcagtt

SEQ ID NO: 3250438 - DNA, 25 bp, Homo sapien
agccaggcaatgtcccaggagcagt

SEQ ID NO: 3250439 - DNA, 25 bp, Homo sapien
ggaagagccaggcaatgtcccagga

SEQ ID NO: 3250440 - DNA, 25 bp, Homo sapien
agagccaggcaatgtcccaggagca

SEQ ID NO: 3250441 - DNA, 25 bp, Homo sapien
aatggctccggagaatgagtggccc

SEQ ID NO: 3250442 - DNA, 25 bp, Homo sapien
catgaagtcacaagacgacggacgt

SEQ ID NO: 3250443 - DNA, 25 bp, Homo sapien
gttgtcccaagccaagtagaacgga

SEQ ID NO: 3250444 - DNA, 25 bp, Homo sapien
gacagaattggacaggtagcggctt

SEQ ID NO: 3250445 - DNA, 25 bp, Homo sapien
acgttatcgacttggagggcaggac

SEQ ID NO: 3250446 - DNA, 25 bp, Homo sapien
taactccagcggtgatttatggacc

SEQ ID NO: 3250447 - DNA, 25 bp, Homo sapien
cacgttccaggatcaagcgtggaca

SEQ ID NO: 3250448 - DNA, 25 bp, Homo sapien
ggagacctggttccacagtgaccgc

SEQ ID NO: 3250449 - DNA, 25 bp, Homo sapien
cagaatggagccgacttctccacca

SEQ ID NO: 3250450 - DNA, 25 bp, Homo sapien
tcagtgccttgccagacagatgagc

SEQ ID NO: 3250451 - DNA, 25 bp, Homo sapien
aagagcagccgcaggtttgcaatga

SEQ ID NO: 3250452 - DNA, 25 bp, Homo sapien
gcagccgcaggtttgcaatgagcag

SEQ ID NO: 3250453 - DNA, 25 bp, Homo sapien
tcaaattgtgtcatcaaggttttca

SEQ ID NO: 3250454 - DNA, 25 bp, Homo sapien
tggccactccggctcgggaataggc

SEQ ID NO: 3250455 - DNA, 25 bp, Homo sapien
ctgtccatttcaggattcaagaggt

SEQ ID NO: 3250456 - DNA, 25 bp, Homo sapien
taggccaggactctgaagacaatga

SEQ ID NO: 3250457 - DNA, 25 bp, Homo sapien
tcaggattcaagaggtatgtctgag

SEQ ID NO: 3250458 - DNA, 25 bp, Homo sapien
tgccgtcatctcagacttgacgtcc

SEQ ID NO: 3250459 - DNA, 25 bp, Homo sapien
cagacttgacgtccaggtggtggct

SEQ ID NO: 3250460 - DNA, 25 bp, Homo sapien
tctcagacttgacgtccaggtggtg

SEQ ID NO: 3250461 - DNA, 25 bp, Homo sapien
gtcatctcagacttgacgtccaggt

SEQ ID NO: 3250462 - DNA, 25 bp, Homo sapien
gccacgtcgttgagcatgttctgcg

SEQ ID NO: 3250463 - DNA, 25 bp, Homo sapien
cacttccggacgagggaagctatct

SEQ ID NO: 3250464 - DNA, 25 bp, Homo sapien
atgttctgcgccagctcggagagca

SEQ ID NO: 3250465 - DNA, 25 bp, Homo sapien
agctcggagagcaggaggttcccca

SEQ ID NO: 3250466 - DNA, 25 bp, Homo sapien
ggagtcactgccaactttgcttcat

SEQ ID NO: 3250467 - DNA, 25 bp, Homo sapien
gtcactgccaactttgcttcatgtt

SEQ ID NO: 3250468 - DNA, 25 bp, Homo sapien
tcaggggagtcactgccaactttgc

SEQ ID NO: 3250469 - DNA, 25 bp, Homo sapien
cactgccaactttgcttcatgttgc

SEQ ID NO: 3250470 - DNA, 25 bp, Homo sapien
ggtggcctcgtccagagacgcctgg

SEQ ID NO: 3250471 - DNA, 25 bp, Homo sapien
agcctgggatcctcctcagtaacct

SEQ ID NO: 3250472 - DNA, 25 bp, Homo sapien
tggcctcgtccagagacgcctggtg

SEQ ID NO: 3250473 - DNA, 25 bp, Homo sapien
tgggatcctcctcagtaacctcggc

SEQ ID NO: 3250474 - DNA, 25 bp, Homo sapien
ctggaattcccggtgcctgtggaag

SEQ ID NO: 3250475 - DNA, 25 bp, Homo sapien
cagggcattggctacaccagtgttt

SEQ ID NO: 3250476 - DNA, 25 bp, Homo sapien
tgacatttccttgcagggcattggc

SEQ ID NO: 3250477 - DNA, 25 bp, Homo sapien
ggagaatcagcaccgcgtctggaat

SEQ ID NO: 3250478 - DNA, 25 bp, Homo sapien
tctttgtctagagcgtgcatcttgg

SEQ ID NO: 3250479 - DNA, 25 bp, Homo sapien
tctagagcgtgcatcttggcttttc

SEQ ID NO: 3250480 - DNA, 25 bp, Homo sapien
tagagcgtgcatcttggcttttccc

SEQ ID NO: 3250481 - DNA, 25 bp, Homo sapien
ctgcacctctttgtctagagcgtgc

SEQ ID NO: 3250482 - DNA, 25 bp, Homo sapien
aaacgcccctgatccgtgctcctct

SEQ ID NO: 3250483 - DNA, 25 bp, Homo sapien
gatccgtgctcctctgcaaggtgac

SEQ ID NO: 3250484 - DNA, 25 bp, Homo sapien
gcccctgatccgtgctcctctgcaa

SEQ ID NO: 3250485 - DNA, 25 bp, Homo sapien
cctgatccgtgctcctctgcaaggt

SEQ ID NO: 3250486 - DNA, 25 bp, Homo sapien
tctttataactgacgccaagctccg

SEQ ID NO: 3250487 - DNA, 25 bp, Homo sapien
gaaggtgctcgttctccccacttaa

SEQ ID NO: 3250488 - DNA, 25 bp, Homo sapien
catggaccctgcgtagaaggtgctc

SEQ ID NO: 3250489 - DNA, 25 bp, Homo sapien
gatttcctgacactctcagacgtgg

SEQ ID NO: 3250490 - DNA, 25 bp, Homo sapien
gactttccctgcgaggagctgactg

SEQ ID NO: 3250491 - DNA, 25 bp, Homo sapien
cagtggtcgccaagaagcggagtcc

SEQ ID NO: 3250492 - DNA, 25 bp, Homo sapien
tgaccatgatcagtgggttcggccc

SEQ ID NO: 3250493 - DNA, 25 bp, Homo sapien
aagggcgcacactctttcatggaac

SEQ ID NO: 3250494 - DNA, 25 bp, Homo sapien
tcctggggttctccgtgtttcctca

SEQ ID NO: 3250495 - DNA, 25 bp, Homo sapien
tggggttctccgtgtttcctcacca

SEQ ID NO: 3250496 - DNA, 25 bp, Homo sapien
cgtccaggcctgatgcggctccagg

SEQ ID NO: 3250497 - DNA, 25 bp, Homo sapien
tggtctccgggcctggagccaaaac

SEQ ID NO: 3250498 - DNA, 25 bp, Homo sapien
ttcacggttggatccggccaggtct

SEQ ID NO: 3250499 - DNA, 25 bp, Homo sapien
caaaacagaagaggcccgtccaggc

SEQ ID NO: 3250500 - DNA, 25 bp, Homo sapien
ccgcagggagttccgccagtcttgg

SEQ ID NO: 3250501 - DNA, 25 bp, Homo sapien
gtgagtcaccctgaacacagcccag

SEQ ID NO: 3250502 - DNA, 25 bp, Homo sapien
tgtctgggtgcatcattggaccgca

SEQ ID NO: 3250503 - DNA, 25 bp, Homo sapien
ggcagtgagtcaccctgaacacagc

SEQ ID NO: 3250504 - DNA, 25 bp, Homo sapien
cactgttgtccagagcaaggtgctg

SEQ ID NO: 3250505 - DNA, 25 bp, Homo sapien
aagacctgcgtgtggctctcggtcc

SEQ ID NO: 3250506 - DNA, 25 bp, Homo sapien
tgggtcactcccagtcctttgaaga

SEQ ID NO: 3250507 - DNA, 25 bp, Homo sapien
gcagctcagtgtgactaaggtggca

SEQ ID NO: 3250508 - DNA, 25 bp, Homo sapien
agaggcgccgcacgttgcgctccag

SEQ ID NO: 3250509 - DNA, 25 bp, Homo sapien
agcccatagatgcagcagcgcagct

SEQ ID NO: 3250510 - DNA, 25 bp, Homo sapien
gcaggccaatctctgacagcttcag

SEQ ID NO: 3250511 - DNA, 25 bp, Homo sapien
ctctcgcaggcactggttttgctgg

SEQ ID NO: 3250512 - DNA, 25 bp, Homo sapien
cttgcgccgcaaccgctcctgcaac

SEQ ID NO: 3250513 - DNA, 25 bp, Homo sapien
gtccttgcgccgcaaccgctcctgc

SEQ ID NO: 3250514 - DNA, 25 bp, Homo sapien
cagtgcctcgtccttgcgccgcaac

SEQ ID NO: 3250515 - DNA, 25 bp, Homo sapien
ctgccccagtgcctcgtccttgcgc

SEQ ID NO: 3250516 - DNA, 25 bp, Homo sapien
gctgctgctgagttcccacggctct

SEQ ID NO: 3250517 - DNA, 25 bp, Homo sapien
tgctgctgagttcccacggctctgc

SEQ ID NO: 3250518 - DNA, 25 bp, Homo sapien
ctgctgctgagttcccacggctctg

SEQ ID NO: 3250519 - DNA, 25 bp, Homo sapien
gctgctgagttcccacggctctgct

SEQ ID NO: 3250520 - DNA, 25 bp, Homo sapien
gagtttcctttctgacagctccagc

SEQ ID NO: 3250521 - DNA, 25 bp, Homo sapien
ggagccaggcgcttctctcctgggc

SEQ ID NO: 3250522 - DNA, 25 bp, Homo sapien
gtgctcagctggtccaccttccgga

SEQ ID NO: 3250523 - DNA, 25 bp, Homo sapien
agctggtccaccttccggaggagtt

SEQ ID NO: 3250524 - DNA, 25 bp, Homo sapien
gatgtcacgtacttgtcctctgctg

SEQ ID NO: 3250525 - DNA, 25 bp, Homo sapien
cccatatccatgtctgggcggccag

SEQ ID NO: 3250526 - DNA, 25 bp, Homo sapien
tcattatgtcgaacccctcactgct

SEQ ID NO: 3250527 - DNA, 25 bp, Homo sapien
tcagtccgtcccttggctgttggct

SEQ ID NO: 3250528 - DNA, 25 bp, Homo sapien
acctaaggtgctcggcacaggcact

SEQ ID NO: 3250529 - DNA, 25 bp, Homo sapien
cgtgtgaagcacaaagcccatttca

SEQ ID NO: 3250530 - DNA, 25 bp, Homo sapien
caggcactgcgtgcttcagccaaaa

SEQ ID NO: 3250531 - DNA, 25 bp, Homo sapien
ccttgagcgtgagctgactctcggg

SEQ ID NO: 3250532 - DNA, 25 bp, Homo sapien
tccttctacctgatgagcagggcct

SEQ ID NO: 3250533 - DNA, 25 bp, Homo sapien
cattctaattccaaacgtcttcccg

SEQ ID NO: 3250534 - DNA, 25 bp, Homo sapien
cgtcttcccgcgcagaagtttggga

SEQ ID NO: 3250535 - DNA, 25 bp, Homo sapien
tcctcgtcacattcagtcttctatt

SEQ ID NO: 3250536 - DNA, 25 bp, Homo sapien
cctccagttctttcaggtgccgctt

SEQ ID NO: 3250537 - DNA, 25 bp, Homo sapien
tgaaactccagtttgtcctccagtt

SEQ ID NO: 3250538 - DNA, 25 bp, Homo sapien
gtttgtcctccagttctcggattct

SEQ ID NO: 3250539 - DNA, 25 bp, Homo sapien
agttctttcaggtgccgcttctgaa

SEQ ID NO: 3250540 - DNA, 25 bp, Homo sapien
tgagccgccatcacaaaaggtagca

SEQ ID NO: 3250541 - DNA, 25 bp, Homo sapien
cgcaacatcgaaccttggaagacat

SEQ ID NO: 3250542 - DNA, 25 bp, Homo sapien
tacaactggtacagcttctaggccc

SEQ ID NO: 3250543 - DNA, 25 bp, Homo sapien
ttctaggcccaatgctccaatgagc

SEQ ID NO: 3250544 - DNA, 25 bp, Homo sapien
aactcgcggctctgcctgaggatct

SEQ ID NO: 3250545 - DNA, 25 bp, Homo sapien
gaggatctgcctgcgcaccttttcc

SEQ ID NO: 3250546 - DNA, 25 bp, Homo sapien
tcccgcaggatctggctgtcgaact

SEQ ID NO: 3250547 - DNA, 25 bp, Homo sapien
ggatctggctgtcgaactcgcggct

SEQ ID NO: 3250548 - DNA, 25 bp, Homo sapien
gcttgcttccggtagtcgagctcct

SEQ ID NO: 3250549 - DNA, 25 bp, Homo sapien
gcttccggtagtcgagctcctcttc

SEQ ID NO: 3250550 - DNA, 25 bp, Homo sapien
agggcttgcttccggtagtcgagct

SEQ ID NO: 3250551 - DNA, 25 bp, Homo sapien
ttgcttccggtagtcgagctcctct

SEQ ID NO: 3250552 - DNA, 25 bp, Homo sapien
ggcctcggtcccctctatttgcttc

SEQ ID NO: 3250553 - DNA, 25 bp, Homo sapien
ggcggcctcggtcccctctatttgc

SEQ ID NO: 3250554 - DNA, 25 bp, Homo sapien
cttctgggtcagggcggcctcggtc

SEQ ID NO: 3250555 - DNA, 25 bp, Homo sapien
tctgggtcagggcggcctcggtccc

SEQ ID NO: 3250556 - DNA, 25 bp, Homo sapien
tcacacgggtgcagaatggagattt

SEQ ID NO: 3250557 - DNA, 25 bp, Homo sapien
ttacgaccaccccaagcagtaggca

SEQ ID NO: 3250558 - DNA, 25 bp, Homo sapien
cagcgtcacccctattttgcaggta

SEQ ID NO: 3250559 - DNA, 25 bp, Homo sapien
atggagatttggaacccagcctgca

SEQ ID NO: 3250560 - DNA, 25 bp, Homo sapien
gcaggtgtcatacgtggatgtgcct

SEQ ID NO: 3250561 - DNA, 25 bp, Homo sapien
tgagcacggaggcaggtgtcatacg

SEQ ID NO: 3250562 - DNA, 25 bp, Homo sapien
caggtaagggagtgggagctctgtc

SEQ ID NO: 3250563 - DNA, 25 bp, Homo sapien
gtggatgtgcctctacgaggagccc

SEQ ID NO: 3250564 - DNA, 25 bp, Homo sapien
tgtctttttctcgatccactttgaa

SEQ ID NO: 3250565 - DNA, 25 bp, Homo sapien
gccggtgtctttttctcgatccact

SEQ ID NO: 3250566 - DNA, 25 bp, Homo sapien
tgaggccggtgtctttttctcgatc

SEQ ID NO: 3250567 - DNA, 25 bp, Homo sapien
tggctgaggccggtgtctttttctc

SEQ ID NO: 3250568 - DNA, 25 bp, Homo sapien
gattccgacagacactgtgagccac

SEQ ID NO: 3250569 - DNA, 25 bp, Homo sapien
tgattgaacctgatggcaatgcctg

SEQ ID NO: 3250570 - DNA, 25 bp, Homo sapien
catggccccaggtgcttgattgaac

SEQ ID NO: 3250571 - DNA, 25 bp, Homo sapien
gcctcctggattccgacagacactg

SEQ ID NO: 3250572 - DNA, 25 bp, Homo sapien
cagggcaagcacagttccagcttgg

SEQ ID NO: 3250573 - DNA, 25 bp, Homo sapien
acagggcaagcacagttccagcttg

SEQ ID NO: 3250574 - DNA, 25 bp, Homo sapien
ttggattattgcaacctgttcttca

SEQ ID NO: 3250575 - DNA, 25 bp, Homo sapien
ggcaagcacagttccagcttggatt

SEQ ID NO: 3250576 - DNA, 25 bp, Homo sapien
ggatatctaatttcttcataagttc

SEQ ID NO: 3250577 - DNA, 25 bp, Homo sapien
ttcttcataagttcagaaacattca

SEQ ID NO: 3250578 - DNA, 25 bp, Homo sapien
cgttatcgccaaggatatctaattt

SEQ ID NO: 3250579 - DNA, 25 bp, Homo sapien
cccgttatcgccaaggatatctaat

SEQ ID NO: 3250580 - DNA, 25 bp, Homo sapien
tggccaagttttgcgcccagccgtt

SEQ ID NO: 3250581 - DNA, 25 bp, Homo sapien
tctagggccacggcctttcctctgg

SEQ ID NO: 3250582 - DNA, 25 bp, Homo sapien
tttcctctggacaagacaccgcgct

SEQ ID NO: 3250583 - DNA, 25 bp, Homo sapien
tctggacaagacaccgcgctctttc

SEQ ID NO: 3250584 - DNA, 25 bp, Homo sapien
tggaggttaaatgctggcgacctcc

SEQ ID NO: 3250585 - DNA, 25 bp, Homo sapien
atttggaggttaaatgctggcgacc

SEQ ID NO: 3250586 - DNA, 25 bp, Homo sapien
tgacagaacagctggagagcgctgc

SEQ ID NO: 3250587 - DNA, 25 bp, Homo sapien
agcgctgctgtggttctcggggaag

SEQ ID NO: 3250588 - DNA, 25 bp, Homo sapien
caaaacaagccataggcaataaata

SEQ ID NO: 3250589 - DNA, 25 bp, Homo sapien
ataacatgtcccctttacacatgct

SEQ ID NO: 3250590 - DNA, 25 bp, Homo sapien
cccctttacacatgcttgaaaacat

SEQ ID NO: 3250591 - DNA, 25 bp, Homo sapien
tattagctctggtacatgtccatag

SEQ ID NO: 3250592 - DNA, 25 bp, Homo sapien
gctccgtttgagagtttacaacaga

SEQ ID NO: 3250593 - DNA, 25 bp, Homo sapien
tgctccgtttgagagtttacaacag

SEQ ID NO: 3250594 - DNA, 25 bp, Homo sapien
agtttgggttcaaagagaatgtctg

SEQ ID NO: 3250595 - DNA, 25 bp, Homo sapien
cagctcgttctgatccttggcgtct

SEQ ID NO: 3250596 - DNA, 25 bp, Homo sapien
tctagcactctgaattctaacagct

SEQ ID NO: 3250597 - DNA, 25 bp, Homo sapien
tctgaattctaacagctcgttctga

SEQ ID NO: 3250598 - DNA, 25 bp, Homo sapien
gatccttggcgtcttgcatttcatt

SEQ ID NO: 3250599 - DNA, 25 bp, Homo sapien
atcgcctggcagcagcgagaagtca

SEQ ID NO: 3250600 - DNA, 25 bp, Homo sapien
ttctgtccaagaagggaaacagcag

SEQ ID NO: 3250601 - DNA, 25 bp, Homo sapien
catcgcctggcagcagcgagaagtc

SEQ ID NO: 3250602 - DNA, 25 bp, Homo sapien
cttctgtccaagaagggaaacagca

SEQ ID NO: 3250603 - DNA, 25 bp, Homo sapien
ctgcttctcttcaacccacttggaa

SEQ ID NO: 3250604 - DNA, 25 bp, Homo sapien
ggtttgttctgatgagcagctgctt

SEQ ID NO: 3250605 - DNA, 25 bp, Homo sapien
gctgcttctcttcaacccacttgga

SEQ ID NO: 3250606 - DNA, 25 bp, Homo sapien
tttccagcaagtcttggtttgttct

SEQ ID NO: 3250607 - DNA, 25 bp, Homo sapien
cacctcagcagatcagcttgtagct

SEQ ID NO: 3250608 - DNA, 25 bp, Homo sapien
cgattttggcctgacacctcagcag

SEQ ID NO: 3250609 - DNA, 25 bp, Homo sapien
aacttctccaaatcttcgattttgg

SEQ ID NO: 3250610 - DNA, 25 bp, Homo sapien
tctcaaccagtaacttctccaaatc

SEQ ID NO: 3250611 - DNA, 25 bp, Homo sapien
tccctctcagcgtccagcgtgcctc

SEQ ID NO: 3250612 - DNA, 25 bp, Homo sapien
cgggcctccctctcagcgtccagcg

SEQ ID NO: 3250613 - DNA, 25 bp, Homo sapien
cctctcagcgtccagcgtgcctccc

SEQ ID NO: 3250614 - DNA, 25 bp, Homo sapien
gcctccctctcagcgtccagcgtgc

SEQ ID NO: 3250615 - DNA, 25 bp, Homo sapien
tggagcagggcgtaggcgcgttgca

SEQ ID NO: 3250616 - DNA, 25 bp, Homo sapien
gagcagggcgtaggcgcgttgcagg

SEQ ID NO: 3250617 - DNA, 25 bp, Homo sapien
ctggagcagggcgtaggcgcgttgc

SEQ ID NO: 3250618 - DNA, 25 bp, Homo sapien
tcctggagcagggcgtaggcgcgtt

SEQ ID NO: 3250619 - DNA, 25 bp, Homo sapien
gtcagctggcagaagcgcaggtcag

SEQ ID NO: 3250620 - DNA, 25 bp, Homo sapien
tcagctggcagaagcgcaggtcagc

SEQ ID NO: 3250621 - DNA, 25 bp, Homo sapien
tgttgtaggatgtttcggacaacgt

SEQ ID NO: 3250622 - DNA, 25 bp, Homo sapien
ggacaacgtttctgagtccacagac

SEQ ID NO: 3250623 - DNA, 25 bp, Homo sapien
ccaagtcttcttcgggcgtggctgg

SEQ ID NO: 3250624 - DNA, 25 bp, Homo sapien
tcctcatcaaatccaaaaaatgtct

SEQ ID NO: 3250625 - DNA, 25 bp, Homo sapien
cactgagctgaccttatttcttgta

SEQ ID NO: 3250626 - DNA, 25 bp, Homo sapien
cctgagctccacgttccacattttt

SEQ ID NO: 3250627 - DNA, 25 bp, Homo sapien
cactgctaactgcaaggcctttggg

SEQ ID NO: 3250628 - DNA, 25 bp, Homo sapien
cctttggggacgagtctgtttgttg

SEQ ID NO: 3250629 - DNA, 25 bp, Homo sapien
gcatcatcaagttacacactttcca

SEQ ID NO: 3250630 - DNA, 25 bp, Homo sapien
tccaaacatttagaacacactgctg

SEQ ID NO: 3250631 - DNA, 25 bp, Homo sapien
aaacatttagaacacactgctgggc

SEQ ID NO: 3250632 - DNA, 25 bp, Homo sapien
catcatcaagttacacactttccaa

SEQ ID NO: 3250633 - DNA, 25 bp, Homo sapien
ttcctatcattttcaacagagccac

SEQ ID NO: 3250634 - DNA, 25 bp, Homo sapien
cttcctatcattttcaacagagcca

SEQ ID NO: 3250635 - DNA, 25 bp, Homo sapien
gcttataggtcatctcctggcagcc

SEQ ID NO: 3250636 - DNA, 25 bp, Homo sapien
ggacatattccatggtggcgtgaag

SEQ ID NO: 3250637 - DNA, 25 bp, Homo sapien
catgcttataggtcatctcctggca

SEQ ID NO: 3250638 - DNA, 25 bp, Homo sapien
gtacagcacaaagaggacatattcc

SEQ ID NO: 3250639 - DNA, 25 bp, Homo sapien
ttttggagcgcaacagccgttctct

SEQ ID NO: 3250640 - DNA, 25 bp, Homo sapien
gatgccttttggagcgcaacagccg

SEQ ID NO: 3250641 - DNA, 25 bp, Homo sapien
tccctcgatgccttttggagcgcaa

SEQ ID NO: 3250642 - DNA, 25 bp, Homo sapien
cagacttttccctcgatgccttttg

SEQ ID NO: 3250643 - DNA, 25 bp, Homo sapien
caggctgaggtcattcaaggaggta

SEQ ID NO: 3250644 - DNA, 25 bp, Homo sapien
ttcagagacgcctgcgctgacagct

SEQ ID NO: 3250645 - DNA, 25 bp, Homo sapien
cagtgagaggtcgtcaatgacgtgc

SEQ ID NO: 3250646 - DNA, 25 bp, Homo sapien
cgtcaatgacgtgctgctgctccag

SEQ ID NO: 3250647 - DNA, 25 bp, Homo sapien
tgttcatccgcttgttcttctccac

SEQ ID NO: 3250648 - DNA, 25 bp, Homo sapien
gggcttcagctgaacctcggtctct

SEQ ID NO: 3250649 - DNA, 25 bp, Homo sapien
cgttttcccgcgtgaggttcttgat

SEQ ID NO: 3250650 - DNA, 25 bp, Homo sapien
ggatactctgcaacagatcctcatt

SEQ ID NO: 3250651 - DNA, 25 bp, Homo sapien
tttttagttgaaatcgcctcacatc

SEQ ID NO: 3250652 - DNA, 25 bp, Homo sapien
catctcgctcgtccatatgttgatc

SEQ ID NO: 3250653 - DNA, 25 bp, Homo sapien
ccagcttccgtatcactgaattcag

SEQ ID NO: 3250654 - DNA, 25 bp, Homo sapien
tcatctgccaacagcgtatttctgt

SEQ ID NO: 3250655 - DNA, 25 bp, Homo sapien
cacgccaagttccttctccaaggcc

SEQ ID NO: 3250656 - DNA, 25 bp, Homo sapien
atcccgggcgggagctctctctttg

SEQ ID NO: 3250657 - DNA, 25 bp, Homo sapien
caaggccagaatcacacggtctttc

SEQ ID NO: 3250658 - DNA, 25 bp, Homo sapien
ttggactactgtggtgccgctcggc

SEQ ID NO: 3250659 - DNA, 25 bp, Homo sapien
ctgggattttggtaagggatagcac

SEQ ID NO: 3250660 - DNA, 25 bp, Homo sapien
ccttataagagaaatatgagctgcc

SEQ ID NO: 3250661 - DNA, 25 bp, Homo sapien
ggcaaagcctttatgaagggagtta

SEQ ID NO: 3250662 - DNA, 25 bp, Homo sapien
gaattttgtggtgctctactgtaaa

SEQ ID NO: 3250663 - DNA, 25 bp, Homo sapien
acctcgtcttggtgcgcctggtagg

SEQ ID NO: 3250664 - DNA, 25 bp, Homo sapien
cactcgcgcttgatgcggtgcacct

SEQ ID NO: 3250665 - DNA, 25 bp, Homo sapien
gctccgaaatgtaggccgtgtgccg

SEQ ID NO: 3250666 - DNA, 25 bp, Homo sapien
tgcatgcagttactgagcgcctcct

SEQ ID NO: 3250667 - DNA, 25 bp, Homo sapien
ccttgctccggcctttcttcgacat

SEQ ID NO: 3250668 - DNA, 25 bp, Homo sapien
tcctgctggaactcgatctgaatgc

SEQ ID NO: 3250669 - DNA, 25 bp, Homo sapien
ttggccatctgcaccgcgtccgtct

SEQ ID NO: 3250670 - DNA, 25 bp, Homo sapien
gcgtccgtctccatctcgggcttct

SEQ ID NO: 3250671 - DNA, 25 bp, Homo sapien
agtgctgagatcctgcggtccacac

SEQ ID NO: 3250672 - DNA, 25 bp, Homo sapien
agatcctgcggtccacacctgttca

SEQ ID NO: 3250673 - DNA, 25 bp, Homo sapien
cagagtgctgagatcctgcggtcca

SEQ ID NO: 3250674 - DNA, 25 bp, Homo sapien
tgagatcctgcggtccacacctgtt

SEQ ID NO: 3250675 - DNA, 25 bp, Homo sapien
gtgctaaccagtcgcgcaggactca

SEQ ID NO: 3250676 - DNA, 25 bp, Homo sapien
aaccagtcgcgcaggactcagctcg

SEQ ID NO: 3250677 - DNA, 25 bp, Homo sapien
caccgtgctaaccagtcgcgcagga

SEQ ID NO: 3250678 - DNA, 25 bp, Homo sapien
agctccaccgtgctaaccagtcgcg

SEQ ID NO: 3250679 - DNA, 25 bp, Homo sapien
tcctatgactagatggctccaaacg

SEQ ID NO: 3250680 - DNA, 25 bp, Homo sapien
aaatgtcttccatgtggtcctcaag

SEQ ID NO: 3250681 - DNA, 25 bp, Homo sapien
tctgtgccagtcacggaaacatggg

SEQ ID NO: 3250682 - DNA, 25 bp, Homo sapien
ggtgaattaatagctgaggccaggc

SEQ ID NO: 3250683 - DNA, 25 bp, Homo sapien
cgggtttgcactgacttcggccaca

SEQ ID NO: 3250684 - DNA, 25 bp, Homo sapien
tgaattccaagaggccgtgtaaccc

SEQ ID NO: 3250685 - DNA, 25 bp, Homo sapien
tgcaggagccccaataaacggcagc

SEQ ID NO: 3250686 - DNA, 25 bp, Homo sapien
ggaggagtattttctagccagggca

SEQ ID NO: 3250687 - DNA, 25 bp, Homo sapien
cccggtgtcagcttctaactaaaag

SEQ ID NO: 3250688 - DNA, 25 bp, Homo sapien
gcttctcaaggacagtgtccacggt

SEQ ID NO: 3250689 - DNA, 25 bp, Homo sapien
taaaagccttactgtgcagcgggct

SEQ ID NO: 3250690 - DNA, 25 bp, Homo sapien
ggttggcccccggtgtcagcttcta

SEQ ID NO: 3250691 - DNA, 25 bp, Homo sapien
gagtcctcatggaaggaaaccctgt

SEQ ID NO: 3250692 - DNA, 25 bp, Homo sapien
gagggacccgggtcagtccaggctc

SEQ ID NO: 3250693 - DNA, 25 bp, Homo sapien
aaccctgtagtgatgtgtcccaccc

SEQ ID NO: 3250694 - DNA, 25 bp, Homo sapien
gtgctgtggagggacccgggtcagt

SEQ ID NO: 3250695 - DNA, 25 bp, Homo sapien
gcggacgtagcgagcgcagccccgc

SEQ ID NO: 3250696 - DNA, 25 bp, Homo sapien
agcagcggacgtagcgagcgcagcc

SEQ ID NO: 3250697 - DNA, 25 bp, Homo sapien
agcggacgtagcgagcgcagccccg

SEQ ID NO: 3250698 - DNA, 25 bp, Homo sapien
gcagcggacgtagcgagcgcagccc

SEQ ID NO: 3250699 - DNA, 25 bp, Homo sapien
tggtggccgcgatccgggcaggcgg

SEQ ID NO: 3250700 - DNA, 25 bp, Homo sapien
gctgcgagcttacgccgctgtcgcc

SEQ ID NO: 3250701 - DNA, 25 bp, Homo sapien
tgaatgcatgcacaaaaaaaatcgt

SEQ ID NO: 3250702 - DNA, 25 bp, Homo sapien
gcgggagtcgagaggccgcggcact

SEQ ID NO: 3250703 - DNA, 25 bp, Homo sapien
gctccagagcaagaagccatcgtgg

SEQ ID NO: 3250704 - DNA, 25 bp, Homo sapien
caggtcgagccgtttacggatggaa

SEQ ID NO: 3250705 - DNA, 25 bp, Homo sapien
cagccaggtggatgacagttcccag

SEQ ID NO: 3250706 - DNA, 25 bp, Homo sapien
ccaggcaggactagagcttccagaa

SEQ ID NO: 3250707 - DNA, 25 bp, Homo sapien
ccctgcaaagggtttgggaagtgct

SEQ ID NO: 3250708 - DNA, 25 bp, Homo sapien
actgacatgaactacgccgctttga

SEQ ID NO: 3250709 - DNA, 25 bp, Homo sapien
gccgctttgacaaaagtcctccgaa

SEQ ID NO: 3250710 - DNA, 25 bp, Homo sapien
tcttcccttagacctccacaggagg

SEQ ID NO: 3250711 - DNA, 25 bp, Homo sapien
agaggagcgaaaggccccgagcacc

SEQ ID NO: 3250712 - DNA, 25 bp, Homo sapien
aggcgcgttcccgactcaatgccac

SEQ ID NO: 3250713 - DNA, 25 bp, Homo sapien
tcaatgccacagcctcgttggagca

SEQ ID NO: 3250714 - DNA, 25 bp, Homo sapien
tggccctggccctggtgttagagac

SEQ ID NO: 3250715 - DNA, 25 bp, Homo sapien
tttgctcatcttgctctggcgctgc

SEQ ID NO: 3250716 - DNA, 25 bp, Homo sapien
gcgctgcttgtgaccggaaggcaaa

SEQ ID NO: 3250717 - DNA, 25 bp, Homo sapien
caccccgagcgctttgagttgctgt

SEQ ID NO: 3250718 - DNA, 25 bp, Homo sapien
tctgggcttcgggtacaggtgcttt

SEQ ID NO: 3250719 - DNA, 25 bp, Homo sapien
gcccagcttgtatcatattttaaga

SEQ ID NO: 3250720 - DNA, 25 bp, Homo sapien
taacagtggcattgttagccagaat

SEQ ID NO: 3250721 - DNA, 25 bp, Homo sapien
tactcataaccttgaagcccagaag

SEQ ID NO: 3250722 - DNA, 25 bp, Homo sapien
tagccagaatttctcaccaacccag

SEQ ID NO: 3250723 - DNA, 25 bp, Homo sapien
tgccctaggaacagtgcgccagttt

SEQ ID NO: 3250724 - DNA, 25 bp, Homo sapien
tgcagggcacgaggagatagtcaac

SEQ ID NO: 3250725 - DNA, 25 bp, Homo sapien
gactgtgtccatcaccaagtgggag

SEQ ID NO: 3250726 - DNA, 25 bp, Homo sapien
tctaccaatgggacggactgtgtcc

SEQ ID NO: 3250727 - DNA, 25 bp, Homo sapien
agtttgagattaccgtgggcatgcc

SEQ ID NO: 3250728 - DNA, 25 bp, Homo sapien
tcaccaaggacatcgtgctgcgggc

SEQ ID NO: 3250729 - DNA, 25 bp, Homo sapien
cagggcagcctcatcgagttcagca

SEQ ID NO: 3250730 - DNA, 25 bp, Homo sapien
gaagttcgaccgctacaagtttgag

SEQ ID NO: 3250731 - DNA, 25 bp, Homo sapien
ttgagcctgtcacgtggtcaaggcc

SEQ ID NO: 3250732 - DNA, 25 bp, Homo sapien
tttcttatttgtttggtcactgcta

SEQ ID NO: 3250733 - DNA, 25 bp, Homo sapien
gatgtgcacggcagcttgagcctgt

SEQ ID NO: 3250734 - DNA, 25 bp, Homo sapien
tggtcactgctacaccttagcagct

SEQ ID NO: 3250735 - DNA, 25 bp, Homo sapien
caatgactatgtgaacgcccgtaca

SEQ ID NO: 3250736 - DNA, 25 bp, Homo sapien
tatggccagaagtgagtacacatgc

SEQ ID NO: 3250737 - DNA, 25 bp, Homo sapien
caaactacgtggctctgctgcaagt

SEQ ID NO: 3250738 - DNA, 25 bp, Homo sapien
tatccaagtaatgggtaaggccctc

SEQ ID NO: 3250739 - DNA, 25 bp, Homo sapien
cagagcctggcacgcttcgagaagt

SEQ ID NO: 3250740 - DNA, 25 bp, Homo sapien
caaaaaatcgtgcatgggagtcagt

SEQ ID NO: 3250741 - DNA, 25 bp, Homo sapien
atgagccgcccacgagatggactgg

SEQ ID NO: 3250742 - DNA, 25 bp, Homo sapien
tgaatgtcgctctaacatgagccgc

SEQ ID NO: 3250743 - DNA, 25 bp, Homo sapien
tcagctctgagacagggcgaattgc

SEQ ID NO: 3250744 - DNA, 25 bp, Homo sapien
cacaattctggcctaggaaagctgg

SEQ ID NO: 3250745 - DNA, 25 bp, Homo sapien
ttgatgtggtaaagaccgcagaccg

SEQ ID NO: 3250746 - DNA, 25 bp, Homo sapien
gaacccctggctggctcgtttgaga

SEQ ID NO: 3250747 - DNA, 25 bp, Homo sapien
ggcggcgatggcaatgatgttctca

SEQ ID NO: 3250748 - DNA, 25 bp, Homo sapien
gcacacgcgccgtggcttgagcaca

SEQ ID NO: 3250749 - DNA, 25 bp, Homo sapien
ggtgttccgatcgaacatgcggaag

SEQ ID NO: 3250750 - DNA, 25 bp, Homo sapien
tccagggtcacgtcccgcttggtgt

SEQ ID NO: 3250751 - DNA, 25 bp, Homo sapien
agggcaccccacccattgcgggagg

SEQ ID NO: 3250752 - DNA, 25 bp, Homo sapien
tcagaacaggttgagtcatagtagc

SEQ ID NO: 3250753 - DNA, 25 bp, Homo sapien
cccattgcgggaggcaaacaaggac

SEQ ID NO: 3250754 - DNA, 25 bp, Homo sapien
gaacaggttgagtcatagtagcccc

SEQ ID NO: 3250755 - DNA, 25 bp, Homo sapien
aaatgcagtcgttctcgtacaggga

SEQ ID NO: 3250756 - DNA, 25 bp, Homo sapien
gcttgctccgaaggtagtcatggac

SEQ ID NO: 3250757 - DNA, 25 bp, Homo sapien
agggaacagagcttgctccgaaggt

SEQ ID NO: 3250758 - DNA, 25 bp, Homo sapien
ttcaaacttgtcgaaaatgcagtcg

SEQ ID NO: 3250759 - DNA, 25 bp, Homo sapien
acggctgacctccaccgtgacacag

SEQ ID NO: 3250760 - DNA, 25 bp, Homo sapien
acgaccaggcacacggctgacctct

SEQ ID NO: 3250761 - DNA, 25 bp, Homo sapien
agccctgctcatcttatcggggggc

SEQ ID NO: 3250762 - DNA, 25 bp, Homo sapien
agccctgctcatcttatcgggggcc

SEQ ID NO: 3250763 - DNA, 25 bp, Homo sapien
ccaacgcccaaatgatggtggactg

SEQ ID NO: 3250764 - DNA, 25 bp, Homo sapien
gaaagactgtcaatctaaggtccgc

SEQ ID NO: 3250765 - DNA, 25 bp, Homo sapien
tattatggacttacctcagtgtggc

SEQ ID NO: 3250766 - DNA, 25 bp, Homo sapien
tgtgaaggtggaaaaccaacgccca

SEQ ID NO: 3250767 - DNA, 25 bp, Homo sapien
actgtaaggtagtcccgggtgagca

SEQ ID NO: 3250768 - DNA, 25 bp, Homo sapien
cgtcggacacggaggagatgatttc

SEQ ID NO: 3250769 - DNA, 25 bp, Homo sapien
tgtagcggccgctgtggctgaactt

SEQ ID NO: 3250770 - DNA, 25 bp, Homo sapien
gatttccgagaagaatgagcggtta

SEQ ID NO: 3250771 - DNA, 25 bp, Homo sapien
tggagacagagaagcaatggccgtc

SEQ ID NO: 3250772 - DNA, 25 bp, Homo sapien
ggagacagagaagcaatggccgtca

SEQ ID NO: 3250773 - DNA, 25 bp, Homo sapien
cagagaagcaatggccgtcactgcg

SEQ ID NO: 3250774 - DNA, 25 bp, Homo sapien
aaggtttaggctcctacctgtagct

SEQ ID NO: 3250775 - DNA, 25 bp, Homo sapien
cttctcaatgggtcccaaccagcct

SEQ ID NO: 3250776 - DNA, 25 bp, Homo sapien
gcggctctgacggacctgtgaatca

SEQ ID NO: 3250777 - DNA, 25 bp, Homo sapien
tgttgcacggtgttgtggccacaga

SEQ ID NO: 3250778 - DNA, 25 bp, Homo sapien
tccgtaaggtcctccatgttggccg

SEQ ID NO: 3250779 - DNA, 25 bp, Homo sapien
tgcggatggaactcagatgctgtga

SEQ ID NO: 3250780 - DNA, 25 bp, Homo sapien
tggaatgcttgtcacacagggcagc

SEQ ID NO: 3250781 - DNA, 25 bp, Homo sapien
tgctgctgtagacgaagaggttgca

SEQ ID NO: 3250782 - DNA, 25 bp, Homo sapien
accctcgcgtctgagctgcctctct

SEQ ID NO: 3250783 - DNA, 25 bp, Homo sapien
ttcctgagaccctcaaaatgcgtcc

SEQ ID NO: 3250784 - DNA, 25 bp, Homo sapien
tctgacacctctcccgaggcaaaac

SEQ ID NO: 3250785 - DNA, 25 bp, Homo sapien
gtgaagggcgccctcaatgctccgc

SEQ ID NO: 3250786 - DNA, 25 bp, Homo sapien
gatccagagaaaaagtgcggccact

SEQ ID NO: 3250787 - DNA, 25 bp, Homo sapien
gagtgagttcccagctatccatgcc

SEQ ID NO: 3250788 - DNA, 25 bp, Homo sapien
aagggtctctgtgctcgtgctcaaa

SEQ ID NO: 3250789 - DNA, 25 bp, Homo sapien
tgaagatcatcagaggcaaagccct

SEQ ID NO: 3250790 - DNA, 25 bp, Homo sapien
ctttagaaagggtttcggcatccat

SEQ ID NO: 3250791 - DNA, 25 bp, Homo sapien
acccaagtccggcaggaaggaagca

SEQ ID NO: 3250792 - DNA, 25 bp, Homo sapien
tagtgtcacggaatcctcacagcag

SEQ ID NO: 3250793 - DNA, 25 bp, Homo sapien
gaaaaccgagcagcaattaccatcc

SEQ ID NO: 3250794 - DNA, 25 bp, Homo sapien
tcgtccagagcagctgaaccctgaa

SEQ ID NO: 3250795 - DNA, 25 bp, Homo sapien
gagcaaggccagcagtccctcgtcc

SEQ ID NO: 3250796 - DNA, 25 bp, Homo sapien
gctgaaccctgaactctgtctcctt

SEQ ID NO: 3250797 - DNA, 25 bp, Homo sapien
aaggccagcagtccctcgtccagag

SEQ ID NO: 3250798 - DNA, 25 bp, Homo sapien
tctgcccgtgggaggcactggccag

SEQ ID NO: 3250799 - DNA, 25 bp, Homo sapien
ctggccaggccacagtgaaggatac

SEQ ID NO: 3250800 - DNA, 25 bp, Homo sapien
cactggccaggccacagtgaaggat

SEQ ID NO: 3250801 - DNA, 25 bp, Homo sapien
ggcactggccaggccacagtgaagg

SEQ ID NO: 3250802 - DNA, 25 bp, Homo sapien
tcctgtcggtgatggccaggtgcca

SEQ ID NO: 3250803 - DNA, 25 bp, Homo sapien
cattggcaaagatcctccgagggct

SEQ ID NO: 3250804 - DNA, 25 bp, Homo sapien
ccagaggttgatgcgcaggtcatcc

SEQ ID NO: 3250805 - DNA, 25 bp, Homo sapien
gacatgtaggtctcgcagtcactgt

SEQ ID NO: 3250806 - DNA, 25 bp, Homo sapien
tgtatccttcgggccttttatctcg

SEQ ID NO: 3250807 - DNA, 25 bp, Homo sapien
cgtcaccgtggacaggtccttaagt

SEQ ID NO: 3250808 - DNA, 25 bp, Homo sapien
tatctcgttcggtaatcttccataa

SEQ ID NO: 3250809 - DNA, 25 bp, Homo sapien
tgcagtgacgtcaccgtggacaggt

SEQ ID NO: 3250810 - DNA, 25 bp, Homo sapien
ggcctgtgcccatgcaagcgaggcc

SEQ ID NO: 3250811 - DNA, 25 bp, Homo sapien
gtgcccatgcaagcgaggccgggca

SEQ ID NO: 3250812 - DNA, 25 bp, Homo sapien
ccatgcaagcgaggccgggcagcgc

SEQ ID NO: 3250813 - DNA, 25 bp, Homo sapien
cctgtgcccatgcaagcgaggccgg

SEQ ID NO: 3250814 - DNA, 25 bp, Homo sapien
caggctcttgagatagtcaaactcc

SEQ ID NO: 3250815 - DNA, 25 bp, Homo sapien
tccggctcgtggctctggaaagtgc

SEQ ID NO: 3250816 - DNA, 25 bp, Homo sapien
gacaggagtgagtgggcggcgttct

SEQ ID NO: 3250817 - DNA, 25 bp, Homo sapien
gctgtacacgtcgtattcgccctgg

SEQ ID NO: 3250818 - DNA, 25 bp, Homo sapien
tgagcagtgcagagtaaaccagaag

SEQ ID NO: 3250819 - DNA, 25 bp, Homo sapien
taaatgggcttttgtcccgaggctc

SEQ ID NO: 3250820 - DNA, 25 bp, Homo sapien
taattccaggcacagtccgtgtttg

SEQ ID NO: 3250821 - DNA, 25 bp, Homo sapien
tctgagtttccgcatctgtcacagg

SEQ ID NO: 3250822 - DNA, 25 bp, Homo sapien
tcccaccagacccagggcttcgcac

SEQ ID NO: 3250823 - DNA, 25 bp, Homo sapien
ctcccaccagacccagggcttcgca

SEQ ID NO: 3250824 - DNA, 25 bp, Homo sapien
tctggttcccgctggaagatgacga

SEQ ID NO: 3250825 - DNA, 25 bp, Homo sapien
aagatgacgacccggccgcccttgt

SEQ ID NO: 3250826 - DNA, 25 bp, Homo sapien
ctggaagatgacgacccggccgccc

SEQ ID NO: 3250827 - DNA, 25 bp, Homo sapien
ctctggttcccgctggaagatgacg

SEQ ID NO: 3250828 - DNA, 25 bp, Homo sapien
tgaactcaacggtagagatgatgtc

SEQ ID NO: 3250829 - DNA, 25 bp, Homo sapien
ccgtgtggttgaactcaacggtaga

SEQ ID NO: 3250830 - DNA, 25 bp, Homo sapien
tgtggttgaactcaacggtagagat

SEQ ID NO: 3250831 - DNA, 25 bp, Homo sapien
ggttgaactcaacggtagagatgat

SEQ ID NO: 3250832 - DNA, 25 bp, Homo sapien
ctggatgggcaagtgtttggagaaa

SEQ ID NO: 3250833 - DNA, 25 bp, Homo sapien
ccttcctggatgggcaagtgtttgg

SEQ ID NO: 3250834 - DNA, 25 bp, Homo sapien
tcctggatgggcaagtgtttggaga

SEQ ID NO: 3250835 - DNA, 25 bp, Homo sapien
cttcctggatgggcaagtgtttgga

SEQ ID NO: 3250836 - DNA, 25 bp, Homo sapien
aggtgggccgcatctggagccaaac

SEQ ID NO: 3250837 - DNA, 25 bp, Homo sapien
tgggccgcatctggagccaaacctt

SEQ ID NO: 3250838 - DNA, 25 bp, Homo sapien
ccaggtgggccgcatctggagccaa

SEQ ID NO: 3250839 - DNA, 25 bp, Homo sapien
ggccgcatctggagccaaaccttca

SEQ ID NO: 3250840 - DNA, 25 bp, Homo sapien
gaagcaactgcatacacctgcctaa

SEQ ID NO: 3250841 - DNA, 25 bp, Homo sapien
ggcatgcactaggagcagctccaga

SEQ ID NO: 3250842 - DNA, 25 bp, Homo sapien
cgtgtgcagcgccaaagtccttcat

SEQ ID NO: 3250843 - DNA, 25 bp, Homo sapien
tgcacccaccagctagtgaggtctg

SEQ ID NO: 3250844 - DNA, 25 bp, Homo sapien
ctgggaaatggtagtaattaacgat

SEQ ID NO: 3250845 - DNA, 25 bp, Homo sapien
ttaacatccctggtgcatcatctgg

SEQ ID NO: 3250846 - DNA, 25 bp, Homo sapien
tcatctgggaaatggtagtaattaa

SEQ ID NO: 3250847 - DNA, 25 bp, Homo sapien
tggccctgccatattccttggttac

SEQ ID NO: 3250848 - DNA, 25 bp, Homo sapien
gcagttggctactgccatgttgcca

SEQ ID NO: 3250849 - DNA, 25 bp, Homo sapien
atggccaaaaccagatctatgtggc

SEQ ID NO: 3250850 - DNA, 25 bp, Homo sapien
cgttatactcaatcagaatgaggct

SEQ ID NO: 3250851 - DNA, 25 bp, Homo sapien
gccaaaaccagatctatgtggccca

SEQ ID NO: 3250852 - DNA, 25 bp, Homo sapien
ggctcgcaaactctctgatcatgtg

SEQ ID NO: 3250853 - DNA, 25 bp, Homo sapien
ctgatcatgtgcacggtgggcattc

SEQ ID NO: 3250854 - DNA, 25 bp, Homo sapien
gctaggctcgcaaactctctgatca

SEQ ID NO: 3250855 - DNA, 25 bp, Homo sapien
aactctctgatcatgtgcacggtgg

SEQ ID NO: 3250856 - DNA, 25 bp, Homo sapien
gcatggtcactcagaggacggccct

SEQ ID NO: 3250857 - DNA, 25 bp, Homo sapien
tcgccgagcctcaaaaggcagcatg

SEQ ID NO: 3250858 - DNA, 25 bp, Homo sapien
ggctttctcagaacccgcactgagc

SEQ ID NO: 3250859 - DNA, 25 bp, Homo sapien
acatccttgcagcagtgagtcagag

SEQ ID NO: 3250860 - DNA, 25 bp, Homo sapien
gaggaagcggtgctttgtgtgcacc

SEQ ID NO: 3250861 - DNA, 25 bp, Homo sapien
cagccaagagcttgggcagctggtt

SEQ ID NO: 3250862 - DNA, 25 bp, Homo sapien
tatttggggtgtccacagaagtgga

SEQ ID NO: 3250863 - DNA, 25 bp, Homo sapien
aggagggcttcgtggaggaagcggt

SEQ ID NO: 3250864 - DNA, 25 bp, Homo sapien
ttaacagtgactttcaggccctcgt

SEQ ID NO: 3250865 - DNA, 25 bp, Homo sapien
aacagtgactttcaggccctcgtac

SEQ ID NO: 3250866 - DNA, 25 bp, Homo sapien
taacagtgactttcaggccctcgta

SEQ ID NO: 3250867 - DNA, 25 bp, Homo sapien
attaacagtgactttcaggccctcg

SEQ ID NO: 3250868 - DNA, 25 bp, Homo sapien
tgttactagagttccctgagccagg

SEQ ID NO: 3250869 - DNA, 25 bp, Homo sapien
aacacccctgtgtagatgcatggcc

SEQ ID NO: 3250870 - DNA, 25 bp, Homo sapien
taaagactcacgaatatgctcaggg

SEQ ID NO: 3250871 - DNA, 25 bp, Homo sapien
tatacaagattcgtgcaccagagtg

SEQ ID NO: 3250872 - DNA, 25 bp, Homo sapien
gacccaagatgatggaccctggcag

SEQ ID NO: 3250873 - DNA, 25 bp, Homo sapien
caaggagtgcgacttgagctcagtc

SEQ ID NO: 3250874 - DNA, 25 bp, Homo sapien
tagcaacctctaagggaggcccaag

SEQ ID NO: 3250875 - DNA, 25 bp, Homo sapien
taacatgctggctccgtaaacgcca

SEQ ID NO: 3250876 - DNA, 25 bp, Homo sapien
tcacagcaccgtgcacgtgtggaca

SEQ ID NO: 3250877 - DNA, 25 bp, Homo sapien
tgagctcctgtgtcttggtcatcac

SEQ ID NO: 3250878 - DNA, 25 bp, Homo sapien
ctgccaggatctacctggtcagcct

SEQ ID NO: 3250879 - DNA, 25 bp, Homo sapien
agtcactgccaggatctacctggtc

SEQ ID NO: 3250880 - DNA, 25 bp, Homo sapien
tggtcagcctgaaccacctcccctt

SEQ ID NO: 3250881 - DNA, 25 bp, Homo sapien
gggaatccgcgcacacttctgcggc

SEQ ID NO: 3250882 - DNA, 25 bp, Homo sapien
gttagcggctgacagtccccgcact

SEQ ID NO: 3250883 - DNA, 25 bp, Homo sapien
tgacagtccccgcactcgggcaggg

SEQ ID NO: 3250884 - DNA, 25 bp, Homo sapien
gccgccagcccgtgggttagcggct

SEQ ID NO: 3250885 - DNA, 25 bp, Homo sapien
cttcggagggcattcggtgcgacgg

SEQ ID NO: 3250886 - DNA, 25 bp, Homo sapien
agggcattcggtgcgacggcatccc

SEQ ID NO: 3250887 - DNA, 25 bp, Homo sapien
ggcattcggtgcgacggcatcccca

SEQ ID NO: 3250888 - DNA, 25 bp, Homo sapien
tcggagggcattcggtgcgacggca

SEQ ID NO: 3250889 - DNA, 25 bp, Homo sapien
gctgtggttaattttccgcgtgtcc

SEQ ID NO: 3250890 - DNA, 25 bp, Homo sapien
ctgtggttaattttccgcgtgtccg

SEQ ID NO: 3250891 - DNA, 25 bp, Homo sapien
agctgtggttaattttccgcgtgtc

SEQ ID NO: 3250892 - DNA, 25 bp, Homo sapien
tccgcgtgtccgtgtcctcgcccat

SEQ ID NO: 3250893 - DNA, 25 bp, Homo sapien
ctgggcatgccccgccgccacacac

SEQ ID NO: 3250894 - DNA, 25 bp, Homo sapien
ggccatgccgccgcagcctagcagg

SEQ ID NO: 3250895 - DNA, 25 bp, Homo sapien
ccgcggtcaagcgagcgcgcggtgg

SEQ ID NO: 3250896 - DNA, 25 bp, Homo sapien
atgcaatccgcagaggtcgcgccgg

SEQ ID NO: 3250897 - DNA, 25 bp, Homo sapien
gccccgaagggagggcatcgcggca

SEQ ID NO: 3250898 - DNA, 25 bp, Homo sapien
taaaagctgacacgggaagagtggc

SEQ ID NO: 3250899 - DNA, 25 bp, Homo sapien
ttaaccacagggctgcgaagccgtc

SEQ ID NO: 3250900 - DNA, 25 bp, Homo sapien
gggagctgggtgttcatgataataa

SEQ ID NO: 3250901 - DNA, 25 bp, Homo sapien
tgggcaagacggcagaatgcctgcc

SEQ ID NO: 3250902 - DNA, 25 bp, Homo sapien
caggaccatcctgggagagtttctt

SEQ ID NO: 3250903 - DNA, 25 bp, Homo sapien
cctgggagagtttcttggcattgca

SEQ ID NO: 3250904 - DNA, 25 bp, Homo sapien
gctccaggaccatcctgggagagtt

SEQ ID NO: 3250905 - DNA, 25 bp, Homo sapien
gaccatcctgggagagtttcttggc

SEQ ID NO: 3250906 - DNA, 25 bp, Homo sapien
gccctgtgagcgtgtgctgcctgtc

SEQ ID NO: 3250907 - DNA, 25 bp, Homo sapien
ctgctttgcaaggtgaggaccacca

SEQ ID NO: 3250908 - DNA, 25 bp, Homo sapien
cagggcctgataggatgcccagctc

SEQ ID NO: 3250909 - DNA, 25 bp, Homo sapien
gctgcctgtcgtggcttctataaaa

SEQ ID NO: 3250910 - DNA, 25 bp, Homo sapien
ggccacagggcacggagggaccagc

SEQ ID NO: 3250911 - DNA, 25 bp, Homo sapien
gcatggtggattcccccacaggaac

SEQ ID NO: 3250912 - DNA, 25 bp, Homo sapien
gctggctgcgtgagcacccagaagt

SEQ ID NO: 3250913 - DNA, 25 bp, Homo sapien
cactgagttctgctcaaatgtgggc

SEQ ID NO: 3250914 - DNA, 25 bp, Homo sapien
ctcattaagtgcaatcaggcctgat

SEQ ID NO: 3250915 - DNA, 25 bp, Homo sapien
agcctcattaagtgcaatcaggcct

SEQ ID NO: 3250916 - DNA, 25 bp, Homo sapien
cattaagtgcaatcaggcctgattc

SEQ ID NO: 3250917 - DNA, 25 bp, Homo sapien
cctcattaagtgcaatcaggcctga

SEQ ID NO: 3250918 - DNA, 25 bp, Homo sapien
cctgcccgggcaaacatctcttcct

SEQ ID NO: 3250919 - DNA, 25 bp, Homo sapien
tcttcccggcctgcaaagcccgccc

SEQ ID NO: 3250920 - DNA, 25 bp, Homo sapien
cttcccggcctgcaaagcccgccct

SEQ ID NO: 3250921 - DNA, 25 bp, Homo sapien
gcccctgcccgggcaaacatctctt

SEQ ID NO: 3250922 - DNA, 25 bp, Homo sapien
atgtattcacatcggtcttcccagg

SEQ ID NO: 3250923 - DNA, 25 bp, Homo sapien
ggatgccccgtcctgcatgtattca

SEQ ID NO: 3250924 - DNA, 25 bp, Homo sapien
ccaaggctacacgtgatagaaccca

SEQ ID NO: 3250925 - DNA, 25 bp, Homo sapien
ctttcaccgaaagatcctgcaggct

SEQ ID NO: 3250926 - DNA, 25 bp, Homo sapien
ccggctgtgagaacgggcttcttac

SEQ ID NO: 3250927 - DNA, 25 bp, Homo sapien
cccggctgtgagaacgggcttctta

SEQ ID NO: 3250928 - DNA, 25 bp, Homo sapien
ctgcccggctgtgagaacgggcttc

SEQ ID NO: 3250929 - DNA, 25 bp, Homo sapien
tgcccggctgtgagaacgggcttct

SEQ ID NO: 3250930 - DNA, 25 bp, Homo sapien
gcctcaacgtgtccgcctcacgcat

SEQ ID NO: 3250931 - DNA, 25 bp, Homo sapien
agctgaggtggcctcaacgtgtccg

SEQ ID NO: 3250932 - DNA, 25 bp, Homo sapien
aggtggcctcaacgtgtccgcctca

SEQ ID NO: 3250933 - DNA, 25 bp, Homo sapien
gaaacttccatcagctgaggtggcc

SEQ ID NO: 3250934 - DNA, 25 bp, Homo sapien
gagaggtgactaacacaggtcattt

SEQ ID NO: 3250935 - DNA, 25 bp, Homo sapien
gacactgggtgccttctggcgggat

SEQ ID NO: 3250936 - DNA, 25 bp, Homo sapien
gaagcccacctcaccaataaccaag

SEQ ID NO: 3250937 - DNA, 25 bp, Homo sapien
accctgtgctccagtacccgtggga

SEQ ID NO: 3250938 - DNA, 25 bp, Homo sapien
tacccgtgggaacactggacactgg

SEQ ID NO: 3250939 - DNA, 25 bp, Homo sapien
tcctgctcctgtagagtggccacag

SEQ ID NO: 3250940 - DNA, 25 bp, Homo sapien
ctgggcacgaccctccacttctcca

SEQ ID NO: 3250941 - DNA, 25 bp, Homo sapien
tgcagagccagactgataacaccgg

SEQ ID NO: 3250942 - DNA, 25 bp, Homo sapien
gccagactgataacaccggctcctt

SEQ ID NO: 3250943 - DNA, 25 bp, Homo sapien
tgtgccagagcacctggttcttcac

SEQ ID NO: 3250944 - DNA, 25 bp, Homo sapien
ccttgcctgtgccagagcacctggt

SEQ ID NO: 3250945 - DNA, 25 bp, Homo sapien
taggcaccttgcctgtgccagagca

SEQ ID NO: 3250946 - DNA, 25 bp, Homo sapien
cgataggcaccttgcctgtgccaga

SEQ ID NO: 3250947 - DNA, 25 bp, Homo sapien
cagctctgcaccaccgcaggaatcc

SEQ ID NO: 3250948 - DNA, 25 bp, Homo sapien
caccgcaggaatcctttgaatgatg

SEQ ID NO: 3250949 - DNA, 25 bp, Homo sapien
gcgagggccctttgccgcagctctg

SEQ ID NO: 3250950 - DNA, 25 bp, Homo sapien
aatgatgtgatgcttgtgggcgacg

SEQ ID NO: 3250951 - DNA, 25 bp, Homo sapien
tatgcaggcgttagccaggcaaggc

SEQ ID NO: 3250952 - DNA, 25 bp, Homo sapien
ggaagcactggaagcgtccctggat

SEQ ID NO: 3250953 - DNA, 25 bp, Homo sapien
gtaaaacggagccaacaagagcacc

SEQ ID NO: 3250954 - DNA, 25 bp, Homo sapien
gaaagcagctcatacctaggaagca

SEQ ID NO: 3250955 - DNA, 25 bp, Homo sapien
tagacgctgctggatggtacccgcg

SEQ ID NO: 3250956 - DNA, 25 bp, Homo sapien
gcagcgggaggagcgcgtagacgct

SEQ ID NO: 3250957 - DNA, 25 bp, Homo sapien
cgcgtagacgctgctggatggtacc

SEQ ID NO: 3250958 - DNA, 25 bp, Homo sapien
acgctgctggatggtacccgcggcc

SEQ ID NO: 3250959 - DNA, 25 bp, Homo sapien
ttgaggcacccccataaattttgtg

SEQ ID NO: 3250960 - DNA, 25 bp, Homo sapien
caactactaagaattgaggcacccc

SEQ ID NO: 3250961 - DNA, 25 bp, Homo sapien
aatatcatttatctcaactactaag

SEQ ID NO: 3250962 - DNA, 25 bp, Homo sapien
cataaattttgtgccctaggccagg

SEQ ID NO: 3250963 - DNA, 25 bp, Homo sapien
cattatatcagtcagggtggctggc

SEQ ID NO: 3250964 - DNA, 25 bp, Homo sapien
caatgagcctttctgagtgggaaga

SEQ ID NO: 3250965 - DNA, 25 bp, Homo sapien
gctgcagtaacaaagagccccgaat

SEQ ID NO: 3250966 - DNA, 25 bp, Homo sapien
gactggagtatttgaggacatgccc

SEQ ID NO: 3250967 - DNA, 25 bp, Homo sapien
tctgtaaagtacacggccagtcctg

SEQ ID NO: 3250968 - DNA, 25 bp, Homo sapien
tttgcggtcacaagatggcacaggc

SEQ ID NO: 3250969 - DNA, 25 bp, Homo sapien
gatttgagcatgctgcaccgctgga

SEQ ID NO: 3250970 - DNA, 25 bp, Homo sapien
gctctactatcaggcgaggcttccg

SEQ ID NO: 3250971 - DNA, 25 bp, Homo sapien
cagagtccatgagaggtgaaaccac

SEQ ID NO: 3250972 - DNA, 25 bp, Homo sapien
gtaactgtggacctactgcgtgcca

SEQ ID NO: 3250973 - DNA, 25 bp, Homo sapien
ttgtagcgcctagcgagagttccag

SEQ ID NO: 3250974 - DNA, 25 bp, Homo sapien
catgacagctaacagggacgggctt

SEQ ID NO: 3250975 - DNA, 25 bp, Homo sapien
tactctgcagaatttacagctgagc

SEQ ID NO: 3250976 - DNA, 25 bp, Homo sapien
tggtccaggacaaactgttctccaa

SEQ ID NO: 3250977 - DNA, 25 bp, Homo sapien
tgcctcatggcagcatttaccagct

SEQ ID NO: 3250978 - DNA, 25 bp, Homo sapien
cagctgagccataggactgggagtt

SEQ ID NO: 3250979 - DNA, 25 bp, Homo sapien
tattgctaagcatagcgagtgtcgg

SEQ ID NO: 3250980 - DNA, 25 bp, Homo sapien
gacatcgctattgcggttccgaggc

SEQ ID NO: 3250981 - DNA, 25 bp, Homo sapien
tgaccgtaaagaggcccggctgtgt

SEQ ID NO: 3250982 - DNA, 25 bp, Homo sapien
cctggacatcgtcgagctggcggaa

SEQ ID NO: 3250983 - DNA, 25 bp, Homo sapien
cctggctgggactcgtgaatctgga

SEQ ID NO: 3250984 - DNA, 25 bp, Homo sapien
tgtgtgacctgatagctccctggaa

SEQ ID NO: 3250985 - DNA, 25 bp, Homo sapien
ggaagacgactccatgcagcaacta

SEQ ID NO: 3250986 - DNA, 25 bp, Homo sapien
gcattggaccctaaactggactaga

SEQ ID NO: 3250987 - DNA, 25 bp, Homo sapien
gggccacatttagctcctggaggcc

SEQ ID NO: 3250988 - DNA, 25 bp, Homo sapien
accgcttctaagtgcattcaggttg

SEQ ID NO: 3250989 - DNA, 25 bp, Homo sapien
agagagaaaccgcttctaagtgcat

SEQ ID NO: 3250990 - DNA, 25 bp, Homo sapien
cagaagtcacgaatggcttagaagg

SEQ ID NO: 3250991 - DNA, 25 bp, Homo sapien
cagcctgggcagattgagtcaccgt

SEQ ID NO: 3250992 - DNA, 25 bp, Homo sapien
agtgagctgtgttcaggtcaccgca

SEQ ID NO: 3250993 - DNA, 25 bp, Homo sapien
ccagcctgggcagattgagtcaccg

SEQ ID NO: 3250994 - DNA, 25 bp, Homo sapien
ctgtgttcaggtcaccgcactccag

SEQ ID NO: 3250995 - DNA, 25 bp, Homo sapien
tgagatcatgtcactgcactccagc

SEQ ID NO: 3250996 - DNA, 25 bp, Homo sapien
aggatcgcttgtgcctgggaggttg

SEQ ID NO: 3250997 - DNA, 25 bp, Homo sapien
aggctgcaatgagctgagatcatgt

SEQ ID NO: 3250998 - DNA, 25 bp, Homo sapien
ctgcaatgagctgagatcatgtcac

SEQ ID NO: 3250999 - DNA, 25 bp, Homo sapien
caggctatgacattctgttacagca

SEQ ID NO: 3251000 - DNA, 25 bp, Homo sapien
gaaatcctacccgcaatgtgatggg

SEQ ID NO: 3251001 - DNA, 25 bp, Homo sapien
agcatccttcggcagcactccattt

SEQ ID NO: 3251002 - DNA, 25 bp, Homo sapien
agccccccaggctatgacattctgt

SEQ ID NO: 3251003 - DNA, 25 bp, Homo sapien
aatgtaaggctttggttctgcaacc

SEQ ID NO: 3251004 - DNA, 25 bp, Homo sapien
tttaaaatgcgccagtttgggctac

SEQ ID NO: 3251005 - DNA, 25 bp, Homo sapien
tcggtggagtaaacattgccaggtc

SEQ ID NO: 3251006 - DNA, 25 bp, Homo sapien
cagggacaggataaggcccattggt

SEQ ID NO: 3251007 - DNA, 25 bp, Homo sapien
gggtgaaaactgtcggtcagcccat

SEQ ID NO: 3251008 - DNA, 25 bp, Homo sapien
gatcgtgacattaggattcctggga

SEQ ID NO: 3251009 - DNA, 25 bp, Homo sapien
cgctgggcagaatttaagatggctc

SEQ ID NO: 3251010 - DNA, 25 bp, Homo sapien
ttactgctgtgtttgtcacattggc

SEQ ID NO: 3251011 - DNA, 25 bp, Homo sapien
tgaccctagaatcaacgcccaaaga

SEQ ID NO: 3251012 - DNA, 25 bp, Homo sapien
tccggacacattgggaacttagagc

SEQ ID NO: 3251013 - DNA, 25 bp, Homo sapien
tcgactttaaccttccagcagtgtg

SEQ ID NO: 3251014 - DNA, 25 bp, Homo sapien
ccttaaactagcgtgaagtcgactt

SEQ ID NO: 3251015 - DNA, 25 bp, Homo sapien
ctagtctggtcgttggtgacagcga

SEQ ID NO: 3251016 - DNA, 25 bp, Homo sapien
gagcctgctcgacgccatcaagagt

SEQ ID NO: 3251017 - DNA, 25 bp, Homo sapien
tgacagcgaggcttccgcgctcgct

SEQ ID NO: 3251018 - DNA, 25 bp, Homo sapien
gtgatgcggcccgtggacgcggacg

SEQ ID NO: 3251019 - DNA, 25 bp, Homo sapien
tgtcccacgtaaaggaatatggcct

SEQ ID NO: 3251020 - DNA, 25 bp, Homo sapien
tatacagtacgtacgctgctgcgtg

SEQ ID NO: 3251021 - DNA, 25 bp, Homo sapien
taggtggccaactgacgaactgtgt

SEQ ID NO: 3251022 - DNA, 25 bp, Homo sapien
cgagattggagcgtttgcgatgacc

SEQ ID NO: 3251023 - DNA, 25 bp, Homo sapien
tataatacagtctctgccacagatg

SEQ ID NO: 3251024 - DNA, 25 bp, Homo sapien
gactagcctaggtcatcagagccca

SEQ ID NO: 3251025 - DNA, 25 bp, Homo sapien
tggtgagcaacctacaattgggatg

SEQ ID NO: 3251026 - DNA, 25 bp, Homo sapien
cctatggcatgttaactggtgcaca

SEQ ID NO: 3251027 - DNA, 25 bp, Homo sapien
tgctcaccgtcaagcaacttggcgg

SEQ ID NO: 3251028 - DNA, 25 bp, Homo sapien
gatcattgtcactggttcctaggaa

SEQ ID NO: 3251029 - DNA, 25 bp, Homo sapien
tgactgaactggtagctcctcgagg

SEQ ID NO: 3251030 - DNA, 25 bp, Homo sapien
ttctcggctccagaaccaagaggga

SEQ ID NO: 3251031 - DNA, 25 bp, Homo sapien
tcaaatatttgtcggaggcattatc

SEQ ID NO: 3251032 - DNA, 25 bp, Homo sapien
ggcattatcaaggatcaaaccggtt

SEQ ID NO: 3251033 - DNA, 25 bp, Homo sapien
aagttcctcgctgtgagcctcggtt

SEQ ID NO: 3251034 - DNA, 25 bp, Homo sapien
aaaccggtttgatccagtgcagtgc

SEQ ID NO: 3251035 - DNA, 25 bp, Homo sapien
ggccgtctgtcgcatctgctgagca

SEQ ID NO: 3251036 - DNA, 25 bp, Homo sapien
tcctgggctacactcgaggggccgt

SEQ ID NO: 3251037 - DNA, 25 bp, Homo sapien
tccagagctgttcccatgacactca

SEQ ID NO: 3251038 - DNA, 25 bp, Homo sapien
cctgccccactgcatagcttgtgtt

SEQ ID NO: 3251039 - DNA, 25 bp, Homo sapien
gagtgagcagaatggacctgtccct

SEQ ID NO: 3251040 - DNA, 25 bp, Homo sapien
tatataacgcagtgaatgcccttcc

SEQ ID NO: 3251041 - DNA, 25 bp, Homo sapien
gaaagccggctcttgtgagacctgc

SEQ ID NO: 3251042 - DNA, 25 bp, Homo sapien
ctgtgcgaccttatcccaagaggga

SEQ ID NO: 3251043 - DNA, 25 bp, Homo sapien
tctgttcctcatcaagcatttaatt

SEQ ID NO: 3251044 - DNA, 25 bp, Homo sapien
ccaggcctggccactttttaataag

SEQ ID NO: 3251045 - DNA, 25 bp, Homo sapien
tgaaactatgtatatattctgttcc

SEQ ID NO: 3251046 - DNA, 25 bp, Homo sapien
attctgttcctcatcaagcatttaa

SEQ ID NO: 3251047 - DNA, 25 bp, Homo sapien
ggttctgaaccccataccagtctgt

SEQ ID NO: 3251048 - DNA, 25 bp, Homo sapien
gttcacacagagacttccattcaag

SEQ ID NO: 3251049 - DNA, 25 bp, Homo sapien
ctctgctggtacctggtctcctgca

SEQ ID NO: 3251050 - DNA, 25 bp, Homo sapien
taccacagggtccattctagctttc

SEQ ID NO: 3251051 - DNA, 25 bp, Homo sapien
tcaatcactgaccataagggagact

SEQ ID NO: 3251052 - DNA, 25 bp, Homo sapien
taacagcaaaatacgaggccatgcc

SEQ ID NO: 3251053 - DNA, 25 bp, Homo sapien
tctctgatgcccctataatgtgtga

SEQ ID NO: 3251054 - DNA, 25 bp, Homo sapien
caatcaggtcacaaaggtaacagca

SEQ ID NO: 3251055 - DNA, 25 bp, Homo sapien
tagacaggtctacttctggcgactg

SEQ ID NO: 3251056 - DNA, 25 bp, Homo sapien
agaacataactttttacagggcgcg

SEQ ID NO: 3251057 - DNA, 25 bp, Homo sapien
ggtttaaccatgcttagggcgacta

SEQ ID NO: 3251058 - DNA, 25 bp, Homo sapien
gaaatttcaggtaatggcctctggc

SEQ ID NO: 3251059 - DNA, 25 bp, Homo sapien
agacgagctcgaccagcatctctgc

SEQ ID NO: 3251060 - DNA, 25 bp, Homo sapien
ttcgccagacgagctcgaccagcat

SEQ ID NO: 3251061 - DNA, 25 bp, Homo sapien
gactcgcttctctctattcgccaga

SEQ ID NO: 3251062 - DNA, 25 bp, Homo sapien
tctctattcgccagacgagctcgac

SEQ ID NO: 3251063 - DNA, 25 bp, Homo sapien
cactcgggtgctgcacgtgattgag

SEQ ID NO: 3251064 - DNA, 25 bp, Homo sapien
tctcgtcggcttcgccactcgggtg

SEQ ID NO: 3251065 - DNA, 25 bp, Homo sapien
ctgcacgtgattgagggcgctctcc

SEQ ID NO: 3251066 - DNA, 25 bp, Homo sapien
ttctcgcacaactccgacactctct

SEQ ID NO: 3251067 - DNA, 25 bp, Homo sapien
cgtgctcgcgtataagagacgcgat

SEQ ID NO: 3251068 - DNA, 25 bp, Homo sapien
gcgtataagagacgcgatgtcctcg

SEQ ID NO: 3251069 - DNA, 25 bp, Homo sapien
ccgcccgtgctcgcgtataagagac

SEQ ID NO: 3251070 - DNA, 25 bp, Homo sapien
tcgcgtataagagacgcgatgtcct

SEQ ID NO: 3251071 - DNA, 25 bp, Homo sapien
tcaggcgcttccacctcgtctatgt

SEQ ID NO: 3251072 - DNA, 25 bp, Homo sapien
ttcctcaggcgcttccacctcgtct

SEQ ID NO: 3251073 - DNA, 25 bp, Homo sapien
gcttccacctcgtctatgtccaggg

SEQ ID NO: 3251074 - DNA, 25 bp, Homo sapien
gcgcttccacctcgtctatgtccag

SEQ ID NO: 3251075 - DNA, 25 bp, Homo sapien
aataagcggcctacaaaatggagtc

SEQ ID NO: 3251076 - DNA, 25 bp, Homo sapien
caactctgcgggaagaatcgccgtg

SEQ ID NO: 3251077 - DNA, 25 bp, Homo sapien
aaatggagtcgcagccgtcaactcg

SEQ ID NO: 3251078 - DNA, 25 bp, Homo sapien
tgccgcttcctcagtaccgcagtag

SEQ ID NO: 3251079 - DNA, 25 bp, Homo sapien
taatattcagcaactgctggtaccc

SEQ ID NO: 3251080 - DNA, 25 bp, Homo sapien
ttcatgtgtttcgatgacatagtca

SEQ ID NO: 3251081 - DNA, 25 bp, Homo sapien
tgctggtacccctataagtaattca

SEQ ID NO: 3251082 - DNA, 25 bp, Homo sapien
taagtaattcatgtgtttcgatgac

SEQ ID NO: 3251083 - DNA, 25 bp, Homo sapien
agcaagcaggtagcacatccctggt

SEQ ID NO: 3251084 - DNA, 25 bp, Homo sapien
ttatgtctgccgagttcagctggcg

SEQ ID NO: 3251085 - DNA, 25 bp, Homo sapien
tttctgtgctcagttatgtctgccg

SEQ ID NO: 3251086 - DNA, 25 bp, Homo sapien
gctcagttatgtctgccgagttcag

SEQ ID NO: 3251087 - DNA, 25 bp, Homo sapien
ccgagttcagctggcgtgcaggcac

SEQ ID NO: 3251088 - DNA, 25 bp, Homo sapien
caccggcaaaggacaatggatctcc

SEQ ID NO: 3251089 - DNA, 25 bp, Homo sapien
tgcccacggccatagagagccctga

SEQ ID NO: 3251090 - DNA, 25 bp, Homo sapien
gagttctgggccgtccaccggcaaa

SEQ ID NO: 3251091 - DNA, 25 bp, Homo sapien
ccagcggatgggtgatggcatggat

SEQ ID NO: 3251092 - DNA, 25 bp, Homo sapien
caggttcatgcacaggcgaagggtc

SEQ ID NO: 3251093 - DNA, 25 bp, Homo sapien
gacagcaccatttgggtgaaaagcc

SEQ ID NO: 3251094 - DNA, 25 bp, Homo sapien
ctccatcttgtggtgcggctgtcca

SEQ ID NO: 3251095 - DNA, 25 bp, Homo sapien
cagctgcagccaaacagcgttgttt

SEQ ID NO: 3251096 - DNA, 25 bp, Homo sapien
taggggcagcctgagaattgtccag

SEQ ID NO: 3251097 - DNA, 25 bp, Homo sapien
cagagatgtctaataggggcagcct

SEQ ID NO: 3251098 - DNA, 25 bp, Homo sapien
catcctgcaggtgctatggcatttg

SEQ ID NO: 3251099 - DNA, 25 bp, Homo sapien
agaaatagttgttcaggctccaagt

SEQ ID NO: 3251100 - DNA, 25 bp, Homo sapien
gctcacatttccgcactggccccat

SEQ ID NO: 3251101 - DNA, 25 bp, Homo sapien
gagggtgggctgacgctcacatttc

SEQ ID NO: 3251102 - DNA, 25 bp, Homo sapien
gctgagggtgggctgacgctcacat

SEQ ID NO: 3251103 - DNA, 25 bp, Homo sapien
ggcgctgagggtgggctgacgctca

SEQ ID NO: 3251104 - DNA, 25 bp, Homo sapien
cccagatggcagctgctagaatcct

SEQ ID NO: 3251105 - DNA, 25 bp, Homo sapien
aacatccaagtcagagggcactcag

SEQ ID NO: 3251106 - DNA, 25 bp, Homo sapien
gggcactcagagtcgtcagcttcct

SEQ ID NO: 3251107 - DNA, 25 bp, Homo sapien
gaatcctcgctagcatcgaacatcc

SEQ ID NO: 3251108 - DNA, 25 bp, Homo sapien
ttagacttgataggacgtagagccc

SEQ ID NO: 3251109 - DNA, 25 bp, Homo sapien
ggctgtggacgatgagtccgcacaa

SEQ ID NO: 3251110 - DNA, 25 bp, Homo sapien
cagcttgcggctcttgcgcccgggt

SEQ ID NO: 3251111 - DNA, 25 bp, Homo sapien
cgcacaatgggttgccgttggctgc

SEQ ID NO: 3251112 - DNA, 25 bp, Homo sapien
tgcctggactcaagccgacttttta

SEQ ID NO: 3251113 - DNA, 25 bp, Homo sapien
cttcctatcctgtattcatcttgcc

SEQ ID NO: 3251114 - DNA, 25 bp, Homo sapien
gactcaagccgactttttaacatga

SEQ ID NO: 3251115 - DNA, 25 bp, Homo sapien
ccttcctatcctgtattcatcttgc

SEQ ID NO: 3251116 - DNA, 25 bp, Homo sapien
cagactaatacacagatctacttta

SEQ ID NO: 3251117 - DNA, 25 bp, Homo sapien
ccttgtgtgaaggtgcctgaattta

SEQ ID NO: 3251118 - DNA, 25 bp, Homo sapien
ggtacagatttgctttaccatgttc

SEQ ID NO: 3251119 - DNA, 25 bp, Homo sapien
cctcttttgactgtcaccatccatg

SEQ ID NO: 3251120 - DNA, 25 bp, Homo sapien
atgaagtaagcagaatggcagaaat

SEQ ID NO: 3251121 - DNA, 25 bp, Homo sapien
acacatggcctacacgtatatgaag

SEQ ID NO: 3251122 - DNA, 25 bp, Homo sapien
gacaaatgggccttatcgaaaccaa

SEQ ID NO: 3251123 - DNA, 25 bp, Homo sapien
aaactatttatctgatagggaactg

SEQ ID NO: 3251124 - DNA, 25 bp, Homo sapien
aaatagacaaatgggccttatcgaa

SEQ ID NO: 3251125 - DNA, 25 bp, Homo sapien
gaccccttatcctaattattctcag

SEQ ID NO: 3251126 - DNA, 25 bp, Homo sapien
tgtttctgttgcataatctacccta

SEQ ID NO: 3251127 - DNA, 25 bp, Homo sapien
cattgaaccttccatgattacattg

SEQ ID NO: 3251128 - DNA, 25 bp, Homo sapien
tagctgtgattagtagcctttcttc

SEQ ID NO: 3251129 - DNA, 25 bp, Homo sapien
tagttaataagcacaccaaaatact

SEQ ID NO: 3251130 - DNA, 25 bp, Homo sapien
tatatcggttgaatagagctgccca

SEQ ID NO: 3251131 - DNA, 25 bp, Homo sapien
gctgtggtactaatatatatcggca

SEQ ID NO: 3251132 - DNA, 25 bp, Homo sapien
tactaacagtgaatattaggtgctg

SEQ ID NO: 3251133 - DNA, 25 bp, Homo sapien
aatatctgggaattagggctgaccc

SEQ ID NO: 3251134 - DNA, 25 bp, Homo sapien
tcagtgccccgtcttttagcttgcc

SEQ ID NO: 3251135 - DNA, 25 bp, Homo sapien
tatctgggaattagggctgacccca

SEQ ID NO: 3251136 - DNA, 25 bp, Homo sapien
cagggcctacagtaaaatcagtgcc

SEQ ID NO: 3251137 - DNA, 25 bp, Homo sapien
cttgcctgtgattctaggaagcccc

SEQ ID NO: 3251138 - DNA, 25 bp, Homo sapien
ccccaggcgacttgagaggcactgc

SEQ ID NO: 3251139 - DNA, 25 bp, Homo sapien
tctgcatcagaattaattttgcccc

SEQ ID NO: 3251140 - DNA, 25 bp, Homo sapien
cttatttgtcgcatcagagtgccca

SEQ ID NO: 3251141 - DNA, 25 bp, Homo sapien
tgttgtcagcactgctctctcggca

SEQ ID NO: 3251142 - DNA, 25 bp, Homo sapien
ttttaagaggatgtgcttccggccc

SEQ ID NO: 3251143 - DNA, 25 bp, Homo sapien
ccttgaaaggtcttagctgccaaaa

SEQ ID NO: 3251144 - DNA, 25 bp, Homo sapien
cacctggttccagattgggaagaaa

SEQ ID NO: 3251145 - DNA, 25 bp, Homo sapien
tctttatacactgtgaacacgctgg

SEQ ID NO: 3251146 - DNA, 25 bp, Homo sapien
agagcacctcatgccagtaaaggct

SEQ ID NO: 3251147 - DNA, 25 bp, Homo sapien
taagattttcatgtcgcttcccatc

SEQ ID NO: 3251148 - DNA, 25 bp, Homo sapien
agggcttccccattacctgtatgca

SEQ ID NO: 3251149 - DNA, 25 bp, Homo sapien
aacagggtggtggtcaacttgagca

SEQ ID NO: 3251150 - DNA, 25 bp, Homo sapien
tgaaaggcccaggattgagaactgt

SEQ ID NO: 3251151 - DNA, 25 bp, Homo sapien
tggcatgtcatagcccgaaacaggg

SEQ ID NO: 3251152 - DNA, 25 bp, Homo sapien
cctgtggcacaataaaaccctcttg

SEQ ID NO: 3251153 - DNA, 25 bp, Homo sapien
gcaaagtcagatggcttccgcggaa

SEQ ID NO: 3251154 - DNA, 25 bp, Homo sapien
agctccacctcggaagagacaggct

SEQ ID NO: 3251155 - DNA, 25 bp, Homo sapien
tgggccctagtgaagaggagctctt

SEQ ID NO: 3251156 - DNA, 25 bp, Homo sapien
tccgcggaaagatgtgctccagcgc

SEQ ID NO: 3251157 - DNA, 25 bp, Homo sapien
tttgctgactgtcgctccgtgggac

SEQ ID NO: 3251158 - DNA, 25 bp, Homo sapien
tgaaatcagcgtagcatgcctggag

SEQ ID NO: 3251159 - DNA, 25 bp, Homo sapien
catcttgtgagtcgcgtctgtgcat

SEQ ID NO: 3251160 - DNA, 25 bp, Homo sapien
gagtcatgagttttccacatccctg

SEQ ID NO: 3251161 - DNA, 25 bp, Homo sapien
tggtaacatctgtgcaagccccttt

SEQ ID NO: 3251162 - DNA, 25 bp, Homo sapien
tggcaaacgctgaaacgcactgtgg

SEQ ID NO: 3251163 - DNA, 25 bp, Homo sapien
tactcatgagcatccgtggaagagc

SEQ ID NO: 3251164 - DNA, 25 bp, Homo sapien
tgtccgtggatggtacacaaagctc

SEQ ID NO: 3251165 - DNA, 25 bp, Homo sapien
gcaggtggtcgtggctgagaaggag

SEQ ID NO: 3251166 - DNA, 25 bp, Homo sapien
gctgcgggggcgtctcctggcaggt

SEQ ID NO: 3251167 - DNA, 25 bp, Homo sapien
gcagctgcgggggcgtctcctggca

SEQ ID NO: 3251168 - DNA, 25 bp, Homo sapien
gtgggcagatgggcagctgcggggg

SEQ ID NO: 3251169 - DNA, 25 bp, Homo sapien
tccaggaacacgaaggcattcaaga

SEQ ID NO: 3251170 - DNA, 25 bp, Homo sapien
gggtccaggaacacgaaggcattca

SEQ ID NO: 3251171 - DNA, 25 bp, Homo sapien
acacgaaggcattcaagaacgcggg

SEQ ID NO: 3251172 - DNA, 25 bp, Homo sapien
tgccagggtccaggaacacgaaggc

SEQ ID NO: 3251173 - DNA, 25 bp, Homo sapien
tcatggaacccacagcctagaaggg

SEQ ID NO: 3251174 - DNA, 25 bp, Homo sapien
tgtcacagcgcgataagagagaacg

SEQ ID NO: 3251175 - DNA, 25 bp, Homo sapien
caaatatgcagataacgccaggcca

SEQ ID NO: 3251176 - DNA, 25 bp, Homo sapien
gactgtgacttaatcggcctgggct

SEQ ID NO: 3251177 - DNA, 25 bp, Homo sapien
agatggctgcgggtggagccgacca

SEQ ID NO: 3251178 - DNA, 25 bp, Homo sapien
aggggccccctgtcggatgtccgtg

SEQ ID NO: 3251179 - DNA, 25 bp, Homo sapien
aggggagccccatcgatgcgctccg

SEQ ID NO: 3251180 - DNA, 25 bp, Homo sapien
ctcggctccctacgcctgagccctg

SEQ ID NO: 3251181 - DNA, 25 bp, Homo sapien
gagcgccgagctccagacgcggcgg

SEQ ID NO: 3251182 - DNA, 25 bp, Homo sapien
cccggaagagggacagccgggcgag

SEQ ID NO: 3251183 - DNA, 25 bp, Homo sapien
gccactccggttggttctccggcaa

SEQ ID NO: 3251184 - DNA, 25 bp, Homo sapien
cacaaaggcccgctcaaggcagctc

SEQ ID NO: 3251185 - DNA, 25 bp, Homo sapien
cgctgtgtcccgctcctttacggaa

SEQ ID NO: 3251186 - DNA, 25 bp, Homo sapien
tcccggcctgagaagaggcgcctcg

SEQ ID NO: 3251187 - DNA, 25 bp, Homo sapien
gcgactctcgggactcggcggccct

SEQ ID NO: 3251188 - DNA, 25 bp, Homo sapien
agttttcctactccgacgcgaggct

SEQ ID NO: 3251189 - DNA, 25 bp, Homo sapien
catctctgacccctctacccctgga

SEQ ID NO: 3251190 - DNA, 25 bp, Homo sapien
cctttcatctcggagccctgacctc

SEQ ID NO: 3251191 - DNA, 25 bp, Homo sapien
cgaaccgtctgtccctgggctaggg

SEQ ID NO: 3251192 - DNA, 25 bp, Homo sapien
ttggagcctcccattaccgggccgc

SEQ ID NO: 3251193 - DNA, 25 bp, Homo sapien
gctccatcagtatcacacggcaggt

SEQ ID NO: 3251194 - DNA, 25 bp, Homo sapien
caactggttgctaaaatagtgggac

SEQ ID NO: 3251195 - DNA, 25 bp, Homo sapien
tgattgtccatctggaaggctctca

SEQ ID NO: 3251196 - DNA, 25 bp, Homo sapien
tgtggccttgtagacacagactggc

SEQ ID NO: 3251197 - DNA, 25 bp, Homo sapien
ctaacatggcgaaactccatcttta

SEQ ID NO: 3251198 - DNA, 25 bp, Homo sapien
ggctaacatggcgaaactccatctt

SEQ ID NO: 3251199 - DNA, 25 bp, Homo sapien
gctaacatggcgaaactccatcttt

SEQ ID NO: 3251200 - DNA, 25 bp, Homo sapien
gtgcgcactaccacacccaggtaag

SEQ ID NO: 3251201 - DNA, 25 bp, Homo sapien
cactaccacacccaggtaagttttg

SEQ ID NO: 3251202 - DNA, 25 bp, Homo sapien
caggtaagttttgtattttgaatag

SEQ ID NO: 3251203 - DNA, 25 bp, Homo sapien
cgcactaccacacccaggtaagttt

SEQ ID NO: 3251204 - DNA, 25 bp, Homo sapien
agatcgccgccactgcacgatcttg

SEQ ID NO: 3251205 - DNA, 25 bp, Homo sapien
gcttgaaccattcgggcttgaaccc

SEQ ID NO: 3251206 - DNA, 25 bp, Homo sapien
gaattgcttgaaccattcgggcttg

SEQ ID NO: 3251207 - DNA, 25 bp, Homo sapien
atcgccgccactgcacgatcttggg

SEQ ID NO: 3251208 - DNA, 25 bp, Homo sapien
gcagagaatggggtgatagctggag

SEQ ID NO: 3251209 - DNA, 25 bp, Homo sapien
ggaggcagaagtggtgtgatttttt

SEQ ID NO: 3251210 - DNA, 25 bp, Homo sapien
tggaggcagaagtggtgtgattttt

SEQ ID NO: 3251211 - DNA, 25 bp, Homo sapien
cagtgagcagatgattcttttggtg

SEQ ID NO: 3251212 - DNA, 25 bp, Homo sapien
gggctccgagtgcacccatggagtt

SEQ ID NO: 3251213 - DNA, 25 bp, Homo sapien
gagctgcgaggtcacagtagacatg

SEQ ID NO: 3251214 - DNA, 25 bp, Homo sapien
gagagtccgtgcttctgcagccggc

SEQ ID NO: 3251215 - DNA, 25 bp, Homo sapien
ggaactggagacttaactggaagca

SEQ ID NO: 3251216 - DNA, 25 bp, Homo sapien
tgtgcggggaaggagcactgggtct

SEQ ID NO: 3251217 - DNA, 25 bp, Homo sapien
aagagagccgcggttcctcaccgct

SEQ ID NO: 3251218 - DNA, 25 bp, Homo sapien
ttctcaccaagagagccgcggttcc

SEQ ID NO: 3251219 - DNA, 25 bp, Homo sapien
tgcctgtgcggggaaggagcactgg

SEQ ID NO: 3251220 - DNA, 25 bp, Homo sapien
cgagggggttatgtcccttgagcat

SEQ ID NO: 3251221 - DNA, 25 bp, Homo sapien
tcgagggggttatgtcccttgagca

SEQ ID NO: 3251222 - DNA, 25 bp, Homo sapien
gtcgagggggttatgtcccttgagc

SEQ ID NO: 3251223 - DNA, 25 bp, Homo sapien
catactgggggtcgagggggttatg

SEQ ID NO: 3251224 - DNA, 25 bp, Homo sapien
tgcacctttggcgtgtccagtggct

SEQ ID NO: 3251225 - DNA, 25 bp, Homo sapien
tgagctgcacctttggcgtgtccag

SEQ ID NO: 3251226 - DNA, 25 bp, Homo sapien
agctgcacctttggcgtgtccagtg

SEQ ID NO: 3251227 - DNA, 25 bp, Homo sapien
acctttggcgtgtccagtggctcct

SEQ ID NO: 3251228 - DNA, 25 bp, Homo sapien
tgctggactccggagcagcagcacc

SEQ ID NO: 3251229 - DNA, 25 bp, Homo sapien
ggccacacagcccatgaagcagcag

SEQ ID NO: 3251230 - DNA, 25 bp, Homo sapien
ggactgctggactccggagcagcag

SEQ ID NO: 3251231 - DNA, 25 bp, Homo sapien
actgctggactccggagcagcagca

SEQ ID NO: 3251232 - DNA, 25 bp, Homo sapien
ccgccgagaggaggctgactgccgg

SEQ ID NO: 3251233 - DNA, 25 bp, Homo sapien
gccgggaggaggctgaccgccgaga

SEQ ID NO: 3251234 - DNA, 25 bp, Homo sapien
gggaggaggctgaccgccgagagga

SEQ ID NO: 3251235 - DNA, 25 bp, Homo sapien
gaccgccgagaggaggctgactgcc

SEQ ID NO: 3251236 - DNA, 25 bp, Homo sapien
tgagggtgaagtacaatgcagcatg

SEQ ID NO: 3251237 - DNA, 25 bp, Homo sapien
cattgcctatgctcgtgagggtgaa

SEQ ID NO: 3251238 - DNA, 25 bp, Homo sapien
tcggcacggtcaggactcctcattg

SEQ ID NO: 3251239 - DNA, 25 bp, Homo sapien
tcctctgcagaggtagtgctcacat

SEQ ID NO: 3251240 - DNA, 25 bp, Homo sapien
gatccagtcaggtttgtgtattgcc

SEQ ID NO: 3251241 - DNA, 25 bp, Homo sapien
tttcctcagttgtatcaagctgttc

SEQ ID NO: 3251242 - DNA, 25 bp, Homo sapien
tattttacgccttgaggagaccagt

SEQ ID NO: 3251243 - DNA, 25 bp, Homo sapien
tgccaagagcatttgaggaattagg

SEQ ID NO: 3251244 - DNA, 25 bp, Homo sapien
tgaggtctcatcgacagcgtaccgc

SEQ ID NO: 3251245 - DNA, 25 bp, Homo sapien
cagctctcgggtgatctttaaggca

SEQ ID NO: 3251246 - DNA, 25 bp, Homo sapien
tgttgtcgcagaccggacttgctca

SEQ ID NO: 3251247 - DNA, 25 bp, Homo sapien
ggcccgcggctgaccagaagtaatt

SEQ ID NO: 3251248 - DNA, 25 bp, Homo sapien
tggtcggaggcaaaacgtaaacatc

SEQ ID NO: 3251249 - DNA, 25 bp, Homo sapien
gaattctgtcttccgaccatgggag

SEQ ID NO: 3251250 - DNA, 25 bp, Homo sapien
ccatgggaggagtactgagccgtct

SEQ ID NO: 3251251 - DNA, 25 bp, Homo sapien
cttaggacggtgcagagctcttgga

SEQ ID NO: 3251252 - DNA, 25 bp, Homo sapien
tgacctgcatttcctgttccgagtc

SEQ ID NO: 3251253 - DNA, 25 bp, Homo sapien
tccccagtgggattgacctgcattt

SEQ ID NO: 3251254 - DNA, 25 bp, Homo sapien
gggattgacctgcatttcctgttcc

SEQ ID NO: 3251255 - DNA, 25 bp, Homo sapien
cagtgggattgacctgcatttcctg

SEQ ID NO: 3251256 - DNA, 25 bp, Homo sapien
tgttggaaagaccacgaaggacgta

SEQ ID NO: 3251257 - DNA, 25 bp, Homo sapien
aaagaccacgaaggacgtaggagtg

SEQ ID NO: 3251258 - DNA, 25 bp, Homo sapien
cacgaaggacgtaggagtggaagac

SEQ ID NO: 3251259 - DNA, 25 bp, Homo sapien
tggaaagaccacgaaggacgtagga

SEQ ID NO: 3251260 - DNA, 25 bp, Homo sapien
tttagaacgtgtgcttcatgacccg

SEQ ID NO: 3251261 - DNA, 25 bp, Homo sapien
catcctaagtgccagtgagtccctc

SEQ ID NO: 3251262 - DNA, 25 bp, Homo sapien
acagttgaacgatgggcagtggctc

SEQ ID NO: 3251263 - DNA, 25 bp, Homo sapien
ctatttgcgaggaagccctgtggca

SEQ ID NO: 3251264 - DNA, 25 bp, Homo sapien
cagtctaagacttcagggccgggac

SEQ ID NO: 3251265 - DNA, 25 bp, Homo sapien
atttcaaagatgagacacggccggg

SEQ ID NO: 3251266 - DNA, 25 bp, Homo sapien
gattcgagagttgagtgtgcccctt

SEQ ID NO: 3251267 - DNA, 25 bp, Homo sapien
tctgcggatgacagggctattgccc

SEQ ID NO: 3251268 - DNA, 25 bp, Homo sapien
tggactccagaacctcacaaagttt

SEQ ID NO: 3251269 - DNA, 25 bp, Homo sapien
ttgtcaactcagaagcatcactctg

SEQ ID NO: 3251270 - DNA, 25 bp, Homo sapien
tcaaacgttgttcctccagcttctt

SEQ ID NO: 3251271 - DNA, 25 bp, Homo sapien
tttatcctcaaacgttgttcctcca

SEQ ID NO: 3251272 - DNA, 25 bp, Homo sapien
ggacctatttttgctcaatcccaga

SEQ ID NO: 3251273 - DNA, 25 bp, Homo sapien
tgtaccttgcccattcgctgaactt

SEQ ID NO: 3251274 - DNA, 25 bp, Homo sapien
ccaggtttgggctcagcactgattt

SEQ ID NO: 3251275 - DNA, 25 bp, Homo sapien
taataattagcttaatgcacagggt

SEQ ID NO: 3251276 - DNA, 25 bp, Homo sapien
tagcaacgaaggtaaaataaagcag

SEQ ID NO: 3251277 - DNA, 25 bp, Homo sapien
gcaacgaaggtaaaataaagcagga

SEQ ID NO: 3251278 - DNA, 25 bp, Homo sapien
ggatgaagtgttttgcagactcttc

SEQ ID NO: 3251279 - DNA, 25 bp, Homo sapien
caggacagcacgtcctgaggatgaa

SEQ ID NO: 3251280 - DNA, 25 bp, Homo sapien
gattcagtctgatgttgtccgtccg

SEQ ID NO: 3251281 - DNA, 25 bp, Homo sapien
ttccaagtcccgaagaagtgagtcc

SEQ ID NO: 3251282 - DNA, 25 bp, Homo sapien
tgcgcagcgcctcgaagatcttgtg

SEQ ID NO: 3251283 - DNA, 25 bp, Homo sapien
tctgcaggacaaagtgaggctagcg

SEQ ID NO: 3251284 - DNA, 25 bp, Homo sapien
ctcgaggtcctcaaactcgtccctt

SEQ ID NO: 3251285 - DNA, 25 bp, Homo sapien
aactcgtcccttccatagaggcgct

SEQ ID NO: 3251286 - DNA, 25 bp, Homo sapien
tcaaactcgtcccttccatagaggc

SEQ ID NO: 3251287 - DNA, 25 bp, Homo sapien
ccatagaggcgcttcccctcttcct

SEQ ID NO: 3251288 - DNA, 25 bp, Homo sapien
cctcatcgatcctggtcagcggcag

SEQ ID NO: 3251289 - DNA, 25 bp, Homo sapien
ctctccgcgccgtctctctgcgtct

SEQ ID NO: 3251290 - DNA, 25 bp, Homo sapien
atcgatcctggtcagcggcagagag

SEQ ID NO: 3251291 - DNA, 25 bp, Homo sapien
tcttcctcatcgatcctggtcagcg

SEQ ID NO: 3251292 - DNA, 25 bp, Homo sapien
gttcgggagaggtcggagggccaga

SEQ ID NO: 3251293 - DNA, 25 bp, Homo sapien
tggccttgatcttggacggccgcgc

SEQ ID NO: 3251294 - DNA, 25 bp, Homo sapien
ctcggctgccgttagccctttcggg

SEQ ID NO: 3251295 - DNA, 25 bp, Homo sapien
gggtccttagtgtgctcagagctga

SEQ ID NO: 3251296 - DNA, 25 bp, Homo sapien
cttgtccttccatgctgtttgtgga

SEQ ID NO: 3251297 - DNA, 25 bp, Homo sapien
accagcactgggatctccatttttc

SEQ ID NO: 3251298 - DNA, 25 bp, Homo sapien
gagcatgtgttctgtgcggattcta

SEQ ID NO: 3251299 - DNA, 25 bp, Homo sapien
tttgtggatatgcactgagcatgtg

SEQ ID NO: 3251300 - DNA, 25 bp, Homo sapien
tttccgaacgaatgtgcacacagag

SEQ ID NO: 3251301 - DNA, 25 bp, Homo sapien
ctgggacttggtgcacagcgagcct

SEQ ID NO: 3251302 - DNA, 25 bp, Homo sapien
gcagttggctttggacggaccagtt

SEQ ID NO: 3251303 - DNA, 25 bp, Homo sapien
gcatatctgtgcgtatctcaggaca

SEQ ID NO: 3251304 - DNA, 25 bp, Homo sapien
cgtgcccagccgtaagtaagatatt

SEQ ID NO: 3251305 - DNA, 25 bp, Homo sapien
taaaaacatctctgcaagtgagaag

SEQ ID NO: 3251306 - DNA, 25 bp, Homo sapien
tgaccttgggtaagcaagccggcac

SEQ ID NO: 3251307 - DNA, 25 bp, Homo sapien
tcactggcttgagaccagggccaat

SEQ ID NO: 3251308 - DNA, 25 bp, Homo sapien
taattaaagaccacctccagaagcg

SEQ ID NO: 3251309 - DNA, 25 bp, Homo sapien
tctttaaacttgagtccagcccgct

SEQ ID NO: 3251310 - DNA, 25 bp, Homo sapien
tccagggacgcgtcttgaagctgag

SEQ ID NO: 3251311 - DNA, 25 bp, Homo sapien
gcccgctacgtgactgtgaagacta

SEQ ID NO: 3251312 - DNA, 25 bp, Homo sapien
ccgggcacgcggcactttacatggg

SEQ ID NO: 3251313 - DNA, 25 bp, Homo sapien
tgcctgcaggctcccgttttctgag

SEQ ID NO: 3251314 - DNA, 25 bp, Homo sapien
tcatacactgcgatgatgctccgcc

SEQ ID NO: 3251315 - DNA, 25 bp, Homo sapien
tggtgacacaagctcttctcaggcg

SEQ ID NO: 3251316 - DNA, 25 bp, Homo sapien
tcagcggcaaggatctccatgagag

SEQ ID NO: 3251317 - DNA, 25 bp, Homo sapien
ttttctaagccctggatgaccgtgt

SEQ ID NO: 3251318 - DNA, 25 bp, Homo sapien
gtatccccaaatctgaaaggctgca

SEQ ID NO: 3251319 - DNA, 25 bp, Homo sapien
tattcttaccggacgggctgcagct

SEQ ID NO: 3251320 - DNA, 25 bp, Homo sapien
tcagccgctgttgactgaagacaaa

SEQ ID NO: 3251321 - DNA, 25 bp, Homo sapien
taaatacgccagtcactcatgcgcc

SEQ ID NO: 3251322 - DNA, 25 bp, Homo sapien
gacacatggtgcagactggcgtgcc

SEQ ID NO: 3251323 - DNA, 25 bp, Homo sapien
tttctcagtggtcagtttcagccgc

SEQ ID NO: 3251324 - DNA, 25 bp, Homo sapien
tcattaatgcagttgggcaaccggc

SEQ ID NO: 3251325 - DNA, 25 bp, Homo sapien
tatgtggaactattcaacgcgtggc

SEQ ID NO: 3251326 - DNA, 25 bp, Homo sapien
gggaaaaggtcacacgtactcatag

SEQ ID NO: 3251327 - DNA, 25 bp, Homo sapien
tactcatgatgctcgggagaccagg

SEQ ID NO: 3251328 - DNA, 25 bp, Homo sapien
actttgctaactagggccactgtgc

SEQ ID NO: 3251329 - DNA, 25 bp, Homo sapien
tcaaccggtgtgtggaacaaggcct

SEQ ID NO: 3251330 - DNA, 25 bp, Homo sapien
ttggctccgacagggttcaacttga

SEQ ID NO: 3251331 - DNA, 25 bp, Homo sapien
caaggcctcatgttcataagggtcg

SEQ ID NO: 3251332 - DNA, 25 bp, Homo sapien
ccagtgttacttccggagggctaag

SEQ ID NO: 3251333 - DNA, 25 bp, Homo sapien
tgtggatgccactaagcccgtaaga

SEQ ID NO: 3251334 - DNA, 25 bp, Homo sapien
aaaagctacttgtgggatgagaccc

SEQ ID NO: 3251335 - DNA, 25 bp, Homo sapien
caagcccagatgtcaagcaagcagt

SEQ ID NO: 3251336 - DNA, 25 bp, Homo sapien
agtgtctgccaaagctcgtttatat

SEQ ID NO: 3251337 - DNA, 25 bp, Homo sapien
ggctcctctgccgtaagttctcagt

SEQ ID NO: 3251338 - DNA, 25 bp, Homo sapien
ctgccaaagctcgtttatatttttc

SEQ ID NO: 3251339 - DNA, 25 bp, Homo sapien
ctctgccgtaagttctcagtgtctg

SEQ ID NO: 3251340 - DNA, 25 bp, Homo sapien
ttctgttcactctgacccatgtcct

SEQ ID NO: 3251341 - DNA, 25 bp, Homo sapien
cttctgttcactctgacccatgtcc

SEQ ID NO: 3251342 - DNA, 25 bp, Homo sapien
gcaggaggatctgccttctgttcac

SEQ ID NO: 3251343 - DNA, 25 bp, Homo sapien
agcaggaggatctgccttctgttca

SEQ ID NO: 3251344 - DNA, 25 bp, Homo sapien
tgtgcacaacaaccggggagatggc

SEQ ID NO: 3251345 - DNA, 25 bp, Homo sapien
ctgtgcacaacaaccggggagatgg

SEQ ID NO: 3251346 - DNA, 25 bp, Homo sapien
ggccacagtcctatctgagaataag

SEQ ID NO: 3251347 - DNA, 25 bp, Homo sapien
gaaacaatgtttgtcagcgagcaaa

SEQ ID NO: 3251348 - DNA, 25 bp, Homo sapien
cactgcgagcgacaagttggaaaca

SEQ ID NO: 3251349 - DNA, 25 bp, Homo sapien
gaataaacttgctaacacaatctgg

SEQ ID NO: 3251350 - DNA, 25 bp, Homo sapien
cttcctctccagttgttctgcctgg

SEQ ID NO: 3251351 - DNA, 25 bp, Homo sapien
atgtgcaacaggacccacacccggg

SEQ ID NO: 3251352 - DNA, 25 bp, Homo sapien
gtggccaggaatgtgcaacaggacc

SEQ ID NO: 3251353 - DNA, 25 bp, Homo sapien
cctttccgaagcacagccaacacaa

SEQ ID NO: 3251354 - DNA, 25 bp, Homo sapien
tcttcaaccgcacaagttgcggctg

SEQ ID NO: 3251355 - DNA, 25 bp, Homo sapien
gctgcggcacggaaatgagtaacca

SEQ ID NO: 3251356 - DNA, 25 bp, Homo sapien
cttgcgacacgaagtttcccgagca

SEQ ID NO: 3251357 - DNA, 25 bp, Homo sapien
gaccttggacaaagctcgagcttct

SEQ ID NO: 3251358 - DNA, 25 bp, Homo sapien
ctcctgacacggcgcccgcccgctc

SEQ ID NO: 3251359 - DNA, 25 bp, Homo sapien
agccaaacgccccccgcgctgcggt

SEQ ID NO: 3251360 - DNA, 25 bp, Homo sapien
tccgagccaaacgccccccgcgctg

SEQ ID NO: 3251361 - DNA, 25 bp, Homo sapien
tcctcctgacacggcgcccgcccgc

SEQ ID NO: 3251362 - DNA, 25 bp, Homo sapien
agacaacgccaaagcaggaagactg

SEQ ID NO: 3251363 - DNA, 25 bp, Homo sapien
ccaacctcacgcactgagccgccat

SEQ ID NO: 3251364 - DNA, 25 bp, Homo sapien
ctgagagacaacgccaaagcaggaa

SEQ ID NO: 3251365 - DNA, 25 bp, Homo sapien
aagcaggaagactgcgccgcgccaa

SEQ ID NO: 3251366 - DNA, 25 bp, Homo sapien
actgcccgtcgcagtcgccgcgcac

SEQ ID NO: 3251367 - DNA, 25 bp, Homo sapien
ctgccactgcccgtcgcagtcgccg

SEQ ID NO: 3251368 - DNA, 25 bp, Homo sapien
acgcaccaagcgtgcgtgcaggcag

SEQ ID NO: 3251369 - DNA, 25 bp, Homo sapien
agtcgccgcgcacgcaccaagcgtg

SEQ ID NO: 3251370 - DNA, 25 bp, Homo sapien
atccctggacccatcgcgcagaaga

SEQ ID NO: 3251371 - DNA, 25 bp, Homo sapien
ttgcctggaaaagggttaactgaca

SEQ ID NO: 3251372 - DNA, 25 bp, Homo sapien
ccctggacccatcgcgcagaagaaa

SEQ ID NO: 3251373 - DNA, 25 bp, Homo sapien
ttaactgacagcttggcagcagagc

SEQ ID NO: 3251374 - DNA, 25 bp, Homo sapien
caccgtcagtggcgtcggtcaccac

SEQ ID NO: 3251375 - DNA, 25 bp, Homo sapien
cgtcagtggcgtcggtcaccaccat

SEQ ID NO: 3251376 - DNA, 25 bp, Homo sapien
ccgtcagtggcgtcggtcaccacca

SEQ ID NO: 3251377 - DNA, 25 bp, Homo sapien
accgtcagtggcgtcggtcaccacc

SEQ ID NO: 3251378 - DNA, 25 bp, Homo sapien
actcggccttgatctccaaatttcc

SEQ ID NO: 3251379 - DNA, 25 bp, Homo sapien
gggtaatcacccctctgatgttgct

SEQ ID NO: 3251380 - DNA, 25 bp, Homo sapien
cttggctgaggccaactcggccttg

SEQ ID NO: 3251381 - DNA, 25 bp, Homo sapien
tctttggcaattgggggtaatcacc

SEQ ID NO: 3251382 - DNA, 25 bp, Homo sapien
tgggtttgcaaaagttctgccagaa

SEQ ID NO: 3251383 - DNA, 25 bp, Homo sapien
ctgggatgggtttgcaaaagttctg

SEQ ID NO: 3251384 - DNA, 25 bp, Homo sapien
gatgggtttgcaaaagttctgccag

SEQ ID NO: 3251385 - DNA, 25 bp, Homo sapien
agaaacaggaatggatgtgtttagg

SEQ ID NO: 3251386 - DNA, 25 bp, Homo sapien
caaaattgacaaaatgtatggctca

SEQ ID NO: 3251387 - DNA, 25 bp, Homo sapien
tgaaattcaaactcccagcatccca

SEQ ID NO: 3251388 - DNA, 25 bp, Homo sapien
tggacacctgaaccggtgagacgag

SEQ ID NO: 3251389 - DNA, 25 bp, Homo sapien
tacaattaagatgggaaataaacca

SEQ ID NO: 3251390 - DNA, 25 bp, Homo sapien
gaagacacccctcatattggcttag

SEQ ID NO: 3251391 - DNA, 25 bp, Homo sapien
tattctagggtcaacttggagtcca

SEQ ID NO: 3251392 - DNA, 25 bp, Homo sapien
cattaggaagacgatgccaaccacc

SEQ ID NO: 3251393 - DNA, 25 bp, Homo sapien
tagggcccaccgtaatctccagtgt

SEQ ID NO: 3251394 - DNA, 25 bp, Homo sapien
tcaagagttggaacctggacctctg

SEQ ID NO: 3251395 - DNA, 25 bp, Homo sapien
agagttggaacctggacctctgctt

SEQ ID NO: 3251396 - DNA, 25 bp, Homo sapien
cctggctgcctcgggtgcagtgttt

SEQ ID NO: 3251397 - DNA, 25 bp, Homo sapien
gaggtcttcggaagctgcctggctg

SEQ ID NO: 3251398 - DNA, 25 bp, Homo sapien
gaagtcctcgggagcaaagtgcaag

SEQ ID NO: 3251399 - DNA, 25 bp, Homo sapien
gccgtgtgcaccaaactcagcttga

SEQ ID NO: 3251400 - DNA, 25 bp, Homo sapien
tcttgttttgtcacgctgggattcg

SEQ ID NO: 3251401 - DNA, 25 bp, Homo sapien
catctgtagagtgggctcaggcctg

SEQ ID NO: 3251402 - DNA, 25 bp, Homo sapien
ccgtctagccagcaagatcaaccga

SEQ ID NO: 3251403 - DNA, 25 bp, Homo sapien
cccgtctagccagcaagatcaaccg

SEQ ID NO: 3251404 - DNA, 25 bp, Homo sapien
tgttggggatggtcaatggagcatg

SEQ ID NO: 3251405 - DNA, 25 bp, Homo sapien
ttggggatggtcaatggagcatgca

SEQ ID NO: 3251406 - DNA, 25 bp, Homo sapien
atcagcttgaaagcatcctcctcct

SEQ ID NO: 3251407 - DNA, 25 bp, Homo sapien
tgggagtctatcaggccctcaacat

SEQ ID NO: 3251408 - DNA, 25 bp, Homo sapien
cacctcatagtgtcgtgtacagcca

SEQ ID NO: 3251409 - DNA, 25 bp, Homo sapien
ccatctattaccatgtagggttcag

SEQ ID NO: 3251410 - DNA, 25 bp, Homo sapien
cagtgggaatgagacctgccaggct

SEQ ID NO: 3251411 - DNA, 25 bp, Homo sapien
ctggaggaaaatgccatagaagtgt

SEQ ID NO: 3251412 - DNA, 25 bp, Homo sapien
gatcgtgaatgttatctggtgtctg

SEQ ID NO: 3251413 - DNA, 25 bp, Homo sapien
tctgtgtggctaaatcccctcggtg

SEQ ID NO: 3251414 - DNA, 25 bp, Homo sapien
tttttgtagtagtggaaggagatcg

SEQ ID NO: 3251415 - DNA, 25 bp, Homo sapien
cttatgcacttgtgcgtgctcacac

SEQ ID NO: 3251416 - DNA, 25 bp, Homo sapien
tcttatgcacttgtgcgtgctcaca

SEQ ID NO: 3251417 - DNA, 25 bp, Homo sapien
tggccgggtgttcatcatcgtctgc

SEQ ID NO: 3251418 - DNA, 25 bp, Homo sapien
gacgctggccgggtgttcatcatcg

SEQ ID NO: 3251419 - DNA, 25 bp, Homo sapien
gaaagcacccgtcattctggttctg

SEQ ID NO: 3251420 - DNA, 25 bp, Homo sapien
ttgtcaaagaaagcacccgtcattc

SEQ ID NO: 3251421 - DNA, 25 bp, Homo sapien
tttgcacacacgagtgggtgaccac

SEQ ID NO: 3251422 - DNA, 25 bp, Homo sapien
tgcagggctttgcacacacgagtgg

SEQ ID NO: 3251423 - DNA, 25 bp, Homo sapien
catgcagacagtaaagcccagggca

SEQ ID NO: 3251424 - DNA, 25 bp, Homo sapien
ttagtggtaactgcaaacctccgag

SEQ ID NO: 3251425 - DNA, 25 bp, Homo sapien
gtcattctctggaacagcaaaggtc

SEQ ID NO: 3251426 - DNA, 25 bp, Homo sapien
gtgctgggatgagggccggtgatgc

SEQ ID NO: 3251427 - DNA, 25 bp, Homo sapien
gatgagggccggtgatgccagggtg

SEQ ID NO: 3251428 - DNA, 25 bp, Homo sapien
tcccaggaggatggcactgtcattc

SEQ ID NO: 3251429 - DNA, 25 bp, Homo sapien
tcgcttgttcgtttgttggttcatc

SEQ ID NO: 3251430 - DNA, 25 bp, Homo sapien
gttcgtttgttggttcatccattca

SEQ ID NO: 3251431 - DNA, 25 bp, Homo sapien
ttctcgcttgttcgtttgttggttc

SEQ ID NO: 3251432 - DNA, 25 bp, Homo sapien
gcttgttcgtttgttggttcatcca

SEQ ID NO: 3251433 - DNA, 25 bp, Homo sapien
taactttgattaaccgctgagcaca

SEQ ID NO: 3251434 - DNA, 25 bp, Homo sapien
tgcttttgaggactcgtgagactca

SEQ ID NO: 3251435 - DNA, 25 bp, Homo sapien
aaaggctgcggcaagtttctccagg

SEQ ID NO: 3251436 - DNA, 25 bp, Homo sapien
tccatcctcattacgataagatagt

SEQ ID NO: 3251437 - DNA, 25 bp, Homo sapien
gcaatcagatctcgcgcttcagggc

SEQ ID NO: 3251438 - DNA, 25 bp, Homo sapien
gcagccatcaataatcgcaatcaga

SEQ ID NO: 3251439 - DNA, 25 bp, Homo sapien
ggatggacaatttgcgaaggaacaa

SEQ ID NO: 3251440 - DNA, 25 bp, Homo sapien
gaaggaacaataccatccgcggcat

SEQ ID NO: 3251441 - DNA, 25 bp, Homo sapien
ccagggttctggctcggtggtggat

SEQ ID NO: 3251442 - DNA, 25 bp, Homo sapien
tggtggtcgggccagcgaggggctg

SEQ ID NO: 3251443 - DNA, 25 bp, Homo sapien
ctttcatcatgagggctcccagggt

SEQ ID NO: 3251444 - DNA, 25 bp, Homo sapien
cgtgagcaagaaggctttcatcatg

SEQ ID NO: 3251445 - DNA, 25 bp, Homo sapien
aggtttctgccgctcccacggtgac

SEQ ID NO: 3251446 - DNA, 25 bp, Homo sapien
cactcccgccgtagtatagggagcg

SEQ ID NO: 3251447 - DNA, 25 bp, Homo sapien
gcagccatgccgctggtgtcatgga

SEQ ID NO: 3251448 - DNA, 25 bp, Homo sapien
actggcggctgtgaaggacccaggt

SEQ ID NO: 3251449 - DNA, 25 bp, Homo sapien
tggcgttggcctccgcttgtccttc

SEQ ID NO: 3251450 - DNA, 25 bp, Homo sapien
tgtaggcaggaaagctggcgttggc

SEQ ID NO: 3251451 - DNA, 25 bp, Homo sapien
ggaaagctggcgttggcctccgctt

SEQ ID NO: 3251452 - DNA, 25 bp, Homo sapien
tcccagagcccgctggacactgcac

SEQ ID NO: 3251453 - DNA, 25 bp, Homo sapien
ggagagagcgatgttccctgtggac

SEQ ID NO: 3251454 - DNA, 25 bp, Homo sapien
caggagagagcgatgttccctgtgg

SEQ ID NO: 3251455 - DNA, 25 bp, Homo sapien
caggcaggagagagcgatgttccct

SEQ ID NO: 3251456 - DNA, 25 bp, Homo sapien
tccaggcaggagagagcgatgttcc

SEQ ID NO: 3251457 - DNA, 25 bp, Homo sapien
taggcttgttgatggtccgagggtg

SEQ ID NO: 3251458 - DNA, 25 bp, Homo sapien
cacgctccctgaaaatgagtatccc

SEQ ID NO: 3251459 - DNA, 25 bp, Homo sapien
tccagagcccacagtcggctggctg

SEQ ID NO: 3251460 - DNA, 25 bp, Homo sapien
gagggcggcatctggaaggaagtcc

SEQ ID NO: 3251461 - DNA, 25 bp, Homo sapien
ggttgacccttacatgaaacccatc

SEQ ID NO: 3251462 - DNA, 25 bp, Homo sapien
tggcctgttacactgagcactggtg

SEQ ID NO: 3251463 - DNA, 25 bp, Homo sapien
tttctagagcggtgtcagactggcc

SEQ ID NO: 3251464 - DNA, 25 bp, Homo sapien
tcttcttccgatgccaggttgaccc

SEQ ID NO: 3251465 - DNA, 25 bp, Homo sapien
gcagcatggcctgaatcaatccagg

SEQ ID NO: 3251466 - DNA, 25 bp, Homo sapien
atcaatccaggcaatgaacactgac

SEQ ID NO: 3251467 - DNA, 25 bp, Homo sapien
aatccaggcaatgaacactgactgg

SEQ ID NO: 3251468 - DNA, 25 bp, Homo sapien
gcatggcctgaatcaatccaggcaa

SEQ ID NO: 3251469 - DNA, 25 bp, Homo sapien
cagggccccgtgactctttgatgag

SEQ ID NO: 3251470 - DNA, 25 bp, Homo sapien
tctgttgccagatggctggtgtgac

SEQ ID NO: 3251471 - DNA, 25 bp, Homo sapien
gagtcattctgtacaccttggaggt

SEQ ID NO: 3251472 - DNA, 25 bp, Homo sapien
tgacagctgatgtctgccagacggc

SEQ ID NO: 3251473 - DNA, 25 bp, Homo sapien
gctgcagacgaggctgtcatcctgc

SEQ ID NO: 3251474 - DNA, 25 bp, Homo sapien
gctgctgagtgcacgcaccaagctc

SEQ ID NO: 3251475 - DNA, 25 bp, Homo sapien
ggctgcagacgaggctgtcatcctg

SEQ ID NO: 3251476 - DNA, 25 bp, Homo sapien
ctgctgctgagtgcacgcaccaagc

SEQ ID NO: 3251477 - DNA, 25 bp, Homo sapien
gcagaccgctcttggctgacaacgg

SEQ ID NO: 3251478 - DNA, 25 bp, Homo sapien
ccttccggcctgaggatgagcatcc

SEQ ID NO: 3251479 - DNA, 25 bp, Homo sapien
cacttgctggcagagttgcctcagc

SEQ ID NO: 3251480 - DNA, 25 bp, Homo sapien
ggcacccttggcagttagctcaggg

SEQ ID NO: 3251481 - DNA, 25 bp, Homo sapien
tgtctttgtacaagtctccccttag

SEQ ID NO: 3251482 - DNA, 25 bp, Homo sapien
tgtgcacagctactcttgggtagga

SEQ ID NO: 3251483 - DNA, 25 bp, Homo sapien
ctactcttgggtaggaaccaaggct

SEQ ID NO: 3251484 - DNA, 25 bp, Homo sapien
ctccgtgtgcacagctactcttggg

SEQ ID NO: 3251485 - DNA, 25 bp, Homo sapien
acagctactcttgggtaggaaccaa

SEQ ID NO: 3251486 - DNA, 25 bp, Homo sapien
aaatggctttgaatactcctctgca

SEQ ID NO: 3251487 - DNA, 25 bp, Homo sapien
ctcttgcacgtgagcacgcttgcac

SEQ ID NO: 3251488 - DNA, 25 bp, Homo sapien
actcctctgcactcttgcacgtgag

SEQ ID NO: 3251489 - DNA, 25 bp, Homo sapien
tctgcactcttgcacgtgagcacgc

SEQ ID NO: 3251490 - DNA, 25 bp, Homo sapien
ggccttcagaggtacatggaactga

SEQ ID NO: 3251491 - DNA, 25 bp, Homo sapien
gggacatagggtggctgcagacagg

SEQ ID NO: 3251492 - DNA, 25 bp, Homo sapien
agggacatagggtggctgcagacag

SEQ ID NO: 3251493 - DNA, 25 bp, Homo sapien
gtggccttcagaggtacatggaact

SEQ ID NO: 3251494 - DNA, 25 bp, Homo sapien
ggctttgtgccatgttgcgagcatg

SEQ ID NO: 3251495 - DNA, 25 bp, Homo sapien
gccatgttgcgagcatgagttgaga

SEQ ID NO: 3251496 - DNA, 25 bp, Homo sapien
acctttacccgcaccacttctctct

SEQ ID NO: 3251497 - DNA, 25 bp, Homo sapien
tgcgagcatgagttgagatctcttt

SEQ ID NO: 3251498 - DNA, 25 bp, Homo sapien
tgaatgtgccggaatcctgttccaa

SEQ ID NO: 3251499 - DNA, 25 bp, Homo sapien
cctgttccaaaaccgggtggccatg

SEQ ID NO: 3251500 - DNA, 25 bp, Homo sapien
tggacacagatgaaggggaaccgcc

SEQ ID NO: 3251501 - DNA, 25 bp, Homo sapien
ccctgttcacgtgtggtggtgaggc

SEQ ID NO: 3251502 - DNA, 25 bp, Homo sapien
agcagccagcgcaccccatcaccat

SEQ ID NO: 3251503 - DNA, 25 bp, Homo sapien
ggtcacgcctgccaatccactgggt

SEQ ID NO: 3251504 - DNA, 25 bp, Homo sapien
ttccaccttgactgcccggacctgc

SEQ ID NO: 3251505 - DNA, 25 bp, Homo sapien
ggccttcagggtcacgcctgccaat

SEQ ID NO: 3251506 - DNA, 25 bp, Homo sapien
agctgcctgcgccctgtgtggtggt

SEQ ID NO: 3251507 - DNA, 25 bp, Homo sapien
gtctgagagcatcgggcccgtcccg

SEQ ID NO: 3251508 - DNA, 25 bp, Homo sapien
tggtggatcggcctctgcttctaac

SEQ ID NO: 3251509 - DNA, 25 bp, Homo sapien
aggtctgagagcatcgggcccgtcc

SEQ ID NO: 3251510 - DNA, 25 bp, Homo sapien
gcacatctgaagtgacgctgccggg

SEQ ID NO: 3251511 - DNA, 25 bp, Homo sapien
ggcccttcttgagaaccttgccgca

SEQ ID NO: 3251512 - DNA, 25 bp, Homo sapien
ggtttccatggcgatgtccgtttcc

SEQ ID NO: 3251513 - DNA, 25 bp, Homo sapien
gctgccgggcccttcttgagaacct

SEQ ID NO: 3251514 - DNA, 25 bp, Homo sapien
tttgtctgtgccacgtccaggcctt

SEQ ID NO: 3251515 - DNA, 25 bp, Homo sapien
ctttgtctgtgccacgtccaggcct

SEQ ID NO: 3251516 - DNA, 25 bp, Homo sapien
tgtctgtgccacgtccaggccttgc

SEQ ID NO: 3251517 - DNA, 25 bp, Homo sapien
ctgtgccacgtccaggccttgcccc

SEQ ID NO: 3251518 - DNA, 25 bp, Homo sapien
tcacgggcaaccatctagtggagac

SEQ ID NO: 3251519 - DNA, 25 bp, Homo sapien
tgcatctggtgtggccgagaaagcc

SEQ ID NO: 3251520 - DNA, 25 bp, Homo sapien
gaacgcggcggctatggagtcattt

SEQ ID NO: 3251521 - DNA, 25 bp, Homo sapien
tccataggtgttctgggacgtccca

SEQ ID NO: 3251522 - DNA, 25 bp, Homo sapien
gcttgtggtttatacagcgcttgca

SEQ ID NO: 3251523 - DNA, 25 bp, Homo sapien
ttgcaccgccagactctcctgggtg

SEQ ID NO: 3251524 - DNA, 25 bp, Homo sapien
tcatgaatgccggtctcgggggaaa

SEQ ID NO: 3251525 - DNA, 25 bp, Homo sapien
tgtctcaacattcttgtgaggcagg

SEQ ID NO: 3251526 - DNA, 25 bp, Homo sapien
aatgtccagggatacgtgcttgtca

SEQ ID NO: 3251527 - DNA, 25 bp, Homo sapien
taatgaccctactagtgatgggccc

SEQ ID NO: 3251528 - DNA, 25 bp, Homo sapien
tcccgggagcttttgcctggcatat

SEQ ID NO: 3251529 - DNA, 25 bp, Homo sapien
tcattaccagggcagcggagggtct

SEQ ID NO: 3251530 - DNA, 25 bp, Homo sapien
tcatgggaccaccggcaacatctca

SEQ ID NO: 3251531 - DNA, 25 bp, Homo sapien
tctcatgggaccaccggcaacatct

SEQ ID NO: 3251532 - DNA, 25 bp, Homo sapien
gggaccaccggcaacatctcagcct

SEQ ID NO: 3251533 - DNA, 25 bp, Homo sapien
atgggaccaccggcaacatctcagc

SEQ ID NO: 3251534 - DNA, 25 bp, Homo sapien
cggcaccgttgttaagagagaggct

SEQ ID NO: 3251535 - DNA, 25 bp, Homo sapien
ccagtagagatgctttcaagggcaa

SEQ ID NO: 3251536 - DNA, 25 bp, Homo sapien
gagtgtgttccggtccagtagagat

SEQ ID NO: 3251537 - DNA, 25 bp, Homo sapien
agaggctttcgggatcaggaatact

SEQ ID NO: 3251538 - DNA, 25 bp, Homo sapien
ccccagcgtggaggtgcatctcttt

SEQ ID NO: 3251539 - DNA, 25 bp, Homo sapien
tcatgggcctcgctagcaggctctg

SEQ ID NO: 3251540 - DNA, 25 bp, Homo sapien
ggcagccacggtcacgcgtgttccc

SEQ ID NO: 3251541 - DNA, 25 bp, Homo sapien
gtcacgcgtgttccccagcgtggag

SEQ ID NO: 3251542 - DNA, 25 bp, Homo sapien
cactggatcatatagggcagcggca

SEQ ID NO: 3251543 - DNA, 25 bp, Homo sapien
gactctcaatgagcacgggctcgta

SEQ ID NO: 3251544 - DNA, 25 bp, Homo sapien
acagcgttgcacagcttggcggcct

SEQ ID NO: 3251545 - DNA, 25 bp, Homo sapien
cgtactgggtgacgaagtgcttgca

SEQ ID NO: 3251546 - DNA, 25 bp, Homo sapien
cataggcatcatggactgcccgggc

SEQ ID NO: 3251547 - DNA, 25 bp, Homo sapien
tggttctccgcgtcccactctgggg

SEQ ID NO: 3251548 - DNA, 25 bp, Homo sapien
cacacagacggatgaacttgcacac

SEQ ID NO: 3251549 - DNA, 25 bp, Homo sapien
ggacggcacgatggcataggcatca

SEQ ID NO: 3251550 - DNA, 25 bp, Homo sapien
tatgtcctggcatacgtcgcagggc

SEQ ID NO: 3251551 - DNA, 25 bp, Homo sapien
gatagaggcaggcattaccgagcac

SEQ ID NO: 3251552 - DNA, 25 bp, Homo sapien
tcagagctgttggacatgagccagt

SEQ ID NO: 3251553 - DNA, 25 bp, Homo sapien
tacttgagtcaaacgggcaggtgcc

SEQ ID NO: 3251554 - DNA, 25 bp, Homo sapien
tttgcacactcctgggggcctgagg

SEQ ID NO: 3251555 - DNA, 25 bp, Homo sapien
cctgggggcctgaggtggggctgcc

SEQ ID NO: 3251556 - DNA, 25 bp, Homo sapien
actcctgggggcctgaggtggggct

SEQ ID NO: 3251557 - DNA, 25 bp, Homo sapien
ctttgcacactcctgggggcctgag

SEQ ID NO: 3251558 - DNA, 25 bp, Homo sapien
ggctccagagtacccagcagtggct

SEQ ID NO: 3251559 - DNA, 25 bp, Homo sapien
aggagcagggcacacagcatgctgc

SEQ ID NO: 3251560 - DNA, 25 bp, Homo sapien
agcatgctgcccagggactctctgg

SEQ ID NO: 3251561 - DNA, 25 bp, Homo sapien
ctctggctccagagtacccagcagt

SEQ ID NO: 3251562 - DNA, 25 bp, Homo sapien
catttcaccattggcccttgtggcc

SEQ ID NO: 3251563 - DNA, 25 bp, Homo sapien
acccccatttcaccattggcccttg

SEQ ID NO: 3251564 - DNA, 25 bp, Homo sapien
tgaggctttggccctttcaccccca

SEQ ID NO: 3251565 - DNA, 25 bp, Homo sapien
ccccatttcaccattggcccttgtg

SEQ ID NO: 3251566 - DNA, 25 bp, Homo sapien
ggtgccgagggctgggcagggtgca

SEQ ID NO: 3251567 - DNA, 25 bp, Homo sapien
gggtgcaggggaggcgcaggccggc

SEQ ID NO: 3251568 - DNA, 25 bp, Homo sapien
caggagagggaagcgcccttgccat

SEQ ID NO: 3251569 - DNA, 25 bp, Homo sapien
ctgagctgagtgtgggtgccgaggg

SEQ ID NO: 3251570 - DNA, 25 bp, Homo sapien
ggacaacaatggtgtttggagcttg

SEQ ID NO: 3251571 - DNA, 25 bp, Homo sapien
tggagcttgggggatgcttggagaa

SEQ ID NO: 3251572 - DNA, 25 bp, Homo sapien
ctgaggacaacaatggtgtttggag

SEQ ID NO: 3251573 - DNA, 25 bp, Homo sapien
gaggacaacaatggtgtttggagct

SEQ ID NO: 3251574 - DNA, 25 bp, Homo sapien
tgcgccattgtgtctagagccgctc

SEQ ID NO: 3251575 - DNA, 25 bp, Homo sapien
ccaccttgcgccattgtgtctagag

SEQ ID NO: 3251576 - DNA, 25 bp, Homo sapien
gtctagagccgctccaaggccctct

SEQ ID NO: 3251577 - DNA, 25 bp, Homo sapien
ccttgcgccattgtgtctagagccg

SEQ ID NO: 3251578 - DNA, 25 bp, Homo sapien
tgtgaatagccccaggtctaagtgg

SEQ ID NO: 3251579 - DNA, 25 bp, Homo sapien
tacagggtgtggaagacggcaaatc

SEQ ID NO: 3251580 - DNA, 25 bp, Homo sapien
ttcacagtgcaacagcaaggcctgg

SEQ ID NO: 3251581 - DNA, 25 bp, Homo sapien
cacaccgaggtatgaggatggcagc

SEQ ID NO: 3251582 - DNA, 25 bp, Homo sapien
tctagcttctccctggcggctcttg

SEQ ID NO: 3251583 - DNA, 25 bp, Homo sapien
tcccgtgtcttgcaagaaggtccca

SEQ ID NO: 3251584 - DNA, 25 bp, Homo sapien
gggacccgaggctgagctatctcct

SEQ ID NO: 3251585 - DNA, 25 bp, Homo sapien
tgggccactatttgcagaaccaggt

SEQ ID NO: 3251586 - DNA, 25 bp, Homo sapien
ccttgtaccccagctgagagcgctg

SEQ ID NO: 3251587 - DNA, 25 bp, Homo sapien
ccctgtgctaggagaggttcggaaa

SEQ ID NO: 3251588 - DNA, 25 bp, Homo sapien
cctgcgatggccagtaggtttcagc

SEQ ID NO: 3251589 - DNA, 25 bp, Homo sapien
cagccaggagtgtggtcatcaacta

SEQ ID NO: 3251590 - DNA, 25 bp, Homo sapien
taaggtaatgcgcatctcccggtac

SEQ ID NO: 3251591 - DNA, 25 bp, Homo sapien
ctgagtcgcagtgttggatctgttg

SEQ ID NO: 3251592 - DNA, 25 bp, Homo sapien
tctctgtgggtacatctgagtcgca

SEQ ID NO: 3251593 - DNA, 25 bp, Homo sapien
ctgacccttggtgtctaagcagctg

SEQ ID NO: 3251594 - DNA, 25 bp, Homo sapien
gatctgttggtggtcgtggttcaac

SEQ ID NO: 3251595 - DNA, 25 bp, Homo sapien
taccctgctgtacccttgctgagct

SEQ ID NO: 3251596 - DNA, 25 bp, Homo sapien
tcagagagagaacacgcggagccat

SEQ ID NO: 3251597 - DNA, 25 bp, Homo sapien
tggtcagagagagaacacgcggagc

SEQ ID NO: 3251598 - DNA, 25 bp, Homo sapien
gctggtcagagagagaacacgcgga

SEQ ID NO: 3251599 - DNA, 25 bp, Homo sapien
tggatgacatccacgcacccacatt

SEQ ID NO: 3251600 - DNA, 25 bp, Homo sapien
gggcttggagattcatctcctccag

SEQ ID NO: 3251601 - DNA, 25 bp, Homo sapien
ctccagtttgaccaggcctccgttt

SEQ ID NO: 3251602 - DNA, 25 bp, Homo sapien
tttcaaatggctgcccttccactgg

SEQ ID NO: 3251603 - DNA, 25 bp, Homo sapien
tgggcagcaggggatcagcacagct

SEQ ID NO: 3251604 - DNA, 25 bp, Homo sapien
tcctagggacgcagggcctgggcag

SEQ ID NO: 3251605 - DNA, 25 bp, Homo sapien
ctcctagggacgcagggcctgggca

SEQ ID NO: 3251606 - DNA, 25 bp, Homo sapien
agcaggggatcagcacagctgccag

SEQ ID NO: 3251607 - DNA, 25 bp, Homo sapien
cacgtcgtccaagaggacctctctg

SEQ ID NO: 3251608 - DNA, 25 bp, Homo sapien
gtaacgagtgggagcctcagcgacc

SEQ ID NO: 3251609 - DNA, 25 bp, Homo sapien
aggaaccggcttttacatcgcacgt

SEQ ID NO: 3251610 - DNA, 25 bp, Homo sapien
cacagaggatgtcagtgtgccggct

SEQ ID NO: 3251611 - DNA, 25 bp, Homo sapien
tgtctgtccgtgtcgcgtgtctgcg

SEQ ID NO: 3251612 - DNA, 25 bp, Homo sapien
aggtgtctgtccgtgtcgcgtgtct

SEQ ID NO: 3251613 - DNA, 25 bp, Homo sapien
ggtgcaggtgtctgtccgtgtcgcg

SEQ ID NO: 3251614 - DNA, 25 bp, Homo sapien
tgcaggtgtctgtccgtgtcgcgtg

SEQ ID NO: 3251615 - DNA, 25 bp, Homo sapien
actctgcggtcgacgctggggcctc

SEQ ID NO: 3251616 - DNA, 25 bp, Homo sapien
ccgcactcgccactcacgggaggac

SEQ ID NO: 3251617 - DNA, 25 bp, Homo sapien
tgcggtcgacgctggggcctccatc

SEQ ID NO: 3251618 - DNA, 25 bp, Homo sapien
ctcacgggaggactctgcggtcgac

SEQ ID NO: 3251619 - DNA, 25 bp, Homo sapien
gccagcggcttgttctgtgcgcggc

SEQ ID NO: 3251620 - DNA, 25 bp, Homo sapien
gcttcatggtttcggccagttccag

SEQ ID NO: 3251621 - DNA, 25 bp, Homo sapien
ccttgttctgggtgcggcatgtcct

SEQ ID NO: 3251622 - DNA, 25 bp, Homo sapien
ttggccaggacagccgaggttaaaa

SEQ ID NO: 3251623 - DNA, 25 bp, Homo sapien
caggttccagagagcgggagcttaa

SEQ ID NO: 3251624 - DNA, 25 bp, Homo sapien
caagagtccaagcttggcgagtgca

SEQ ID NO: 3251625 - DNA, 25 bp, Homo sapien
taaccacgatccaagagtctgaact

SEQ ID NO: 3251626 - DNA, 25 bp, Homo sapien
catagaaagacgagggcatccatca

SEQ ID NO: 3251627 - DNA, 25 bp, Homo sapien
actcattcctatccgaggtggctgg

SEQ ID NO: 3251628 - DNA, 25 bp, Homo sapien
tcactcattcctatccgaggtggct

SEQ ID NO: 3251629 - DNA, 25 bp, Homo sapien
gtctcactcattcctatccgaggtg

SEQ ID NO: 3251630 - DNA, 25 bp, Homo sapien
tctcactcattcctatccgaggtgg

SEQ ID NO: 3251631 - DNA, 25 bp, Homo sapien
gacagtggccatctctaaggtggag

SEQ ID NO: 3251632 - DNA, 25 bp, Homo sapien
gggctgtgctttgtctctcaatggc

SEQ ID NO: 3251633 - DNA, 25 bp, Homo sapien
gaaagaagacagaccccgctgtcag

SEQ ID NO: 3251634 - DNA, 25 bp, Homo sapien
gagcctcagagaatacactgtatta

SEQ ID NO: 3251635 - DNA, 25 bp, Homo sapien
gcacctgaaaccctcacactgttgt

SEQ ID NO: 3251636 - DNA, 25 bp, Homo sapien
cccgggaaccatgtggaagagcata

SEQ ID NO: 3251637 - DNA, 25 bp, Homo sapien
tcgtagggtgtctgagactgtgcca

SEQ ID NO: 3251638 - DNA, 25 bp, Homo sapien
gacagtaaagaaatagggacggctc

SEQ ID NO: 3251639 - DNA, 25 bp, Homo sapien
cacttgtttccctatcgacagaggt

SEQ ID NO: 3251640 - DNA, 25 bp, Homo sapien
ggagctttgcccgacattccattct

SEQ ID NO: 3251641 - DNA, 25 bp, Homo sapien
tctctgagagttagacacttgtttc

SEQ ID NO: 3251642 - DNA, 25 bp, Homo sapien
tgtaaggctgggtaatgaggtctcc

SEQ ID NO: 3251643 - DNA, 25 bp, Homo sapien
catgtgtggagcaccatttaaccca

SEQ ID NO: 3251644 - DNA, 25 bp, Homo sapien
catccctgggtgtctagagtcctac

SEQ ID NO: 3251645 - DNA, 25 bp, Homo sapien
gaaacgtattctcacactgctctgg

SEQ ID NO: 3251646 - DNA, 25 bp, Homo sapien
catacagggctactgagacatggga

SEQ ID NO: 3251647 - DNA, 25 bp, Homo sapien
gactcttcaaacaatgactgcatgc

SEQ ID NO: 3251648 - DNA, 25 bp, Homo sapien
tgttcttggtcttgggcgtgtagca

SEQ ID NO: 3251649 - DNA, 25 bp, Homo sapien
tgtggatgggagtctgctgacccct

SEQ ID NO: 3251650 - DNA, 25 bp, Homo sapien
tgtagcagataacatcaccagcaag

SEQ ID NO: 3251651 - DNA, 25 bp, Homo sapien
gagtaagtgacctacccagggcaag

SEQ ID NO: 3251652 - DNA, 25 bp, Homo sapien
ccagggcaagtctagtgcaacagcc

SEQ ID NO: 3251653 - DNA, 25 bp, Homo sapien
tccctttctgggagcacgttccttg

SEQ ID NO: 3251654 - DNA, 25 bp, Homo sapien
ttcccacattcgcaaatcaagcagg

SEQ ID NO: 3251655 - DNA, 25 bp, Homo sapien
caggttccagattgcacagatggag

SEQ ID NO: 3251656 - DNA, 25 bp, Homo sapien
atgggagcctcactgactctaatac

SEQ ID NO: 3251657 - DNA, 25 bp, Homo sapien
gactctaatacacagctcagctggt

SEQ ID NO: 3251658 - DNA, 25 bp, Homo sapien
ggttccagattgcacagatggagtt

SEQ ID NO: 3251659 - DNA, 25 bp, Homo sapien
taattatccccactacaccagaggt

SEQ ID NO: 3251660 - DNA, 25 bp, Homo sapien
gaaaccaaggtcaagatgctaggca

SEQ ID NO: 3251661 - DNA, 25 bp, Homo sapien
acgtccttgctttctggcgctacaa

SEQ ID NO: 3251662 - DNA, 25 bp, Homo sapien
cacagtgcccttcgtggctcaaaaa

SEQ ID NO: 3251663 - DNA, 25 bp, Homo sapien
gttgggtcccgtgcgcctttgcggc

SEQ ID NO: 3251664 - DNA, 25 bp, Homo sapien
gggatcaccttgatgactggcttcc

SEQ ID NO: 3251665 - DNA, 25 bp, Homo sapien
ctcgagcatcagctcagagaagcgg

SEQ ID NO: 3251666 - DNA, 25 bp, Homo sapien
gcagcgagggtgtggtcccttctcc

SEQ ID NO: 3251667 - DNA, 25 bp, Homo sapien
gccttttaggtcaacccccatgagc

SEQ ID NO: 3251668 - DNA, 25 bp, Homo sapien
cttttaggtcaacccccatgagcag

SEQ ID NO: 3251669 - DNA, 25 bp, Homo sapien
ttcatctgaaagatgccgtgtggca

SEQ ID NO: 3251670 - DNA, 25 bp, Homo sapien
cattcatctgaaagatgccgtgtgg

SEQ ID NO: 3251671 - DNA, 25 bp, Homo sapien
gaaagtcagccctcgacacaagggt

SEQ ID NO: 3251672 - DNA, 25 bp, Homo sapien
ccaccgtgggcttattccttgaaca

SEQ ID NO: 3251673 - DNA, 25 bp, Homo sapien
ggctgtggcttcctaggacttggca

SEQ ID NO: 3251674 - DNA, 25 bp, Homo sapien
tagcagccgtagcagcaattttaac

SEQ ID NO: 3251675 - DNA, 25 bp, Homo sapien
cccaggggcagagttttttgtctgt

SEQ ID NO: 3251676 - DNA, 25 bp, Homo sapien
cacccaggggcagagttttttgtct

SEQ ID NO: 3251677 - DNA, 25 bp, Homo sapien
tcagaacacccaggggcagagtttt

SEQ ID NO: 3251678 - DNA, 25 bp, Homo sapien
gttttttgtctgtttgacagcctac

SEQ ID NO: 3251679 - DNA, 25 bp, Homo sapien
ccttggtcctccagtcgctgggtcc

SEQ ID NO: 3251680 - DNA, 25 bp, Homo sapien
gtccttggtcctccagtcgctgggt

SEQ ID NO: 3251681 - DNA, 25 bp, Homo sapien
agtgtccttggtcctccagtcgctg

SEQ ID NO: 3251682 - DNA, 25 bp, Homo sapien
gtgtccttggtcctccagtcgctgg

SEQ ID NO: 3251683 - DNA, 25 bp, Homo sapien
cagaacatcttctgcggtcggcaaa

SEQ ID NO: 3251684 - DNA, 25 bp, Homo sapien
gccaaaccgcattgagagcccattt

SEQ ID NO: 3251685 - DNA, 25 bp, Homo sapien
gcttcgggctgtgaaatgtctccca

SEQ ID NO: 3251686 - DNA, 25 bp, Homo sapien
tctcaagtgtcactttggagccggc

SEQ ID NO: 3251687 - DNA, 25 bp, Homo sapien
ctgccaaggccacgttggaggagga

SEQ ID NO: 3251688 - DNA, 25 bp, Homo sapien
cacgttggaggaggatctggggaac

SEQ ID NO: 3251689 - DNA, 25 bp, Homo sapien
ccaaggccacgttggaggaggatct

SEQ ID NO: 3251690 - DNA, 25 bp, Homo sapien
ttggaggaggatctggggaactggc

SEQ ID NO: 3251691 - DNA, 25 bp, Homo sapien
cagcagatgtggcaactgggatcta

SEQ ID NO: 3251692 - DNA, 25 bp, Homo sapien
gaaaactggagttggacataccttc

SEQ ID NO: 3251693 - DNA, 25 bp, Homo sapien
gagttggacataccttcaaggaaaa

SEQ ID NO: 3251694 - DNA, 25 bp, Homo sapien
tggagttggacataccttcaaggaa

SEQ ID NO: 3251695 - DNA, 25 bp, Homo sapien
tgtgtgtgaaccaagagctttccat

SEQ ID NO: 3251696 - DNA, 25 bp, Homo sapien
ctgcctggggcacggaatggcgggg

SEQ ID NO: 3251697 - DNA, 25 bp, Homo sapien
tgactgcctggggcacggaatggcg

SEQ ID NO: 3251698 - DNA, 25 bp, Homo sapien
ctgtgtgtgaaccaagagctttcca

SEQ ID NO: 3251699 - DNA, 25 bp, Homo sapien
gaaattgcccaatttcgaatgaata

SEQ ID NO: 3251700 - DNA, 25 bp, Homo sapien
caatttcgaatgaataatattgtca

SEQ ID NO: 3251701 - DNA, 25 bp, Homo sapien
tttacagaaattgcccaatttcgaa

SEQ ID NO: 3251702 - DNA, 25 bp, Homo sapien
ttgcccaatttcgaatgaataatat

SEQ ID NO: 3251703 - DNA, 25 bp, Homo sapien
ggcgatacctctgcccctctcggga

SEQ ID NO: 3251704 - DNA, 25 bp, Homo sapien
tatggttaaactcatcaactccggc

SEQ ID NO: 3251705 - DNA, 25 bp, Homo sapien
taaactcatcaactccggcgatacc

SEQ ID NO: 3251706 - DNA, 25 bp, Homo sapien
tggttaaactcatcaactccggcga

SEQ ID NO: 3251707 - DNA, 25 bp, Homo sapien
tgacaccacgaacaccttggctgct

SEQ ID NO: 3251708 - DNA, 25 bp, Homo sapien
gagtgtccctggaatacagcatgga

SEQ ID NO: 3251709 - DNA, 25 bp, Homo sapien
tgcctggatcacgaagccagctcct

SEQ ID NO: 3251710 - DNA, 25 bp, Homo sapien
acgggtggccgctggtgccttcaaa

SEQ ID NO: 3251711 - DNA, 25 bp, Homo sapien
tagcctggcgtttttagatctcaca

SEQ ID NO: 3251712 - DNA, 25 bp, Homo sapien
taagaaggctgcctcgagtttacac

SEQ ID NO: 3251713 - DNA, 25 bp, Homo sapien
aattcctagcctggcgtttttagat

SEQ ID NO: 3251714 - DNA, 25 bp, Homo sapien
agaaggctgcctcgagtttacacat

SEQ ID NO: 3251715 - DNA, 25 bp, Homo sapien
cagcatttcaatacttggatctgag

SEQ ID NO: 3251716 - DNA, 25 bp, Homo sapien
cagacgcttttggagacttgctgtg

SEQ ID NO: 3251717 - DNA, 25 bp, Homo sapien
tgctgtgtcctgaagccacgtggat

SEQ ID NO: 3251718 - DNA, 25 bp, Homo sapien
ctgagacagatgctccacgcagacg

SEQ ID NO: 3251719 - DNA, 25 bp, Homo sapien
cacaggccagttttcaatcatgagg

SEQ ID NO: 3251720 - DNA, 25 bp, Homo sapien
tgcagccgggcaccctattttcctt

SEQ ID NO: 3251721 - DNA, 25 bp, Homo sapien
tgtctgaccgtaatcatccacaggc

SEQ ID NO: 3251722 - DNA, 25 bp, Homo sapien
cggatagcgccagtgaatgtctgac

SEQ ID NO: 3251723 - DNA, 25 bp, Homo sapien
gcccttgtctcaagaaacagccggg

SEQ ID NO: 3251724 - DNA, 25 bp, Homo sapien
acctgcccttgtctcaagaaacagc

SEQ ID NO: 3251725 - DNA, 25 bp, Homo sapien
aggccccccgggttcattgcatggc

SEQ ID NO: 3251726 - DNA, 25 bp, Homo sapien
acattggcagagtcaacaccgggcc

SEQ ID NO: 3251727 - DNA, 25 bp, Homo sapien
cagtccacactcagggacatgaggg

SEQ ID NO: 3251728 - DNA, 25 bp, Homo sapien
tgagggacagtttccagatgtgcag

SEQ ID NO: 3251729 - DNA, 25 bp, Homo sapien
gggacatgagggacagtttccagat

SEQ ID NO: 3251730 - DNA, 25 bp, Homo sapien
ctcagggacatgagggacagtttcc

SEQ ID NO: 3251731 - DNA, 25 bp, Homo sapien
cttctctctcaaggaggctcggagg

SEQ ID NO: 3251732 - DNA, 25 bp, Homo sapien
ccaacacacaggtatcaggccgata

SEQ ID NO: 3251733 - DNA, 25 bp, Homo sapien
tccttaggacaacaaccttcagtgg

SEQ ID NO: 3251734 - DNA, 25 bp, Homo sapien
tgccagtgtcccgacagaggttgga

SEQ ID NO: 3251735 - DNA, 25 bp, Homo sapien
gcctttaggagcacacgcatgtaca

SEQ ID NO: 3251736 - DNA, 25 bp, Homo sapien
gtggcatagtgcccgagtgggaagg

SEQ ID NO: 3251737 - DNA, 25 bp, Homo sapien
tgggaagggacggcctttaggagca

SEQ ID NO: 3251738 - DNA, 25 bp, Homo sapien
tgtacacgtctgtgcacgtgttcat

SEQ ID NO: 3251739 - DNA, 25 bp, Homo sapien
tgacctggaaatctagctgcaaggg

SEQ ID NO: 3251740 - DNA, 25 bp, Homo sapien
cacctgacctggaaatctagctgca

SEQ ID NO: 3251741 - DNA, 25 bp, Homo sapien
ccaaaattggcacgagtgcatccac

SEQ ID NO: 3251742 - DNA, 25 bp, Homo sapien
ctgcaagggagtccaagtgatgctg

SEQ ID NO: 3251743 - DNA, 25 bp, Homo sapien
aacagctgtgcaggcgtgagctccg

SEQ ID NO: 3251744 - DNA, 25 bp, Homo sapien
acggattccgggctaccgctggtgc

SEQ ID NO: 3251745 - DNA, 25 bp, Homo sapien
gtgagctccgcacagcgcacacggg

SEQ ID NO: 3251746 - DNA, 25 bp, Homo sapien
ctgtgagcggcttagccgaggagca

SEQ ID NO: 3251747 - DNA, 25 bp, Homo sapien
gaggcgggacacctttgccaggaca

SEQ ID NO: 3251748 - DNA, 25 bp, Homo sapien
aagacaccgtggaggcgggacacct

SEQ ID NO: 3251749 - DNA, 25 bp, Homo sapien
cacgggtggagccttcatccctgaa

SEQ ID NO: 3251750 - DNA, 25 bp, Homo sapien
cgctcactgtcagcgtcacgggtgg

SEQ ID NO: 3251751 - DNA, 25 bp, Homo sapien
tcggctggttcttctgatctgctca

SEQ ID NO: 3251752 - DNA, 25 bp, Homo sapien
ccagtcttgcagtgggctcagccct

SEQ ID NO: 3251753 - DNA, 25 bp, Homo sapien
aacctgccatgggaagcctgcatga

SEQ ID NO: 3251754 - DNA, 25 bp, Homo sapien
ggttccttgggcaacatcctggcca

SEQ ID NO: 3251755 - DNA, 25 bp, Homo sapien
tgaaccgtggtaaagctttgctgct

SEQ ID NO: 3251756 - DNA, 25 bp, Homo sapien
gctaattggcagcttgagcatctga

SEQ ID NO: 3251757 - DNA, 25 bp, Homo sapien
gctgctgcaggaccggctaattggc

SEQ ID NO: 3251758 - DNA, 25 bp, Homo sapien
gcttgcatagtgtctcatcgctgaa

SEQ ID NO: 3251759 - DNA, 25 bp, Homo sapien
tcctggaaggtctgcgtggagagtg

SEQ ID NO: 3251760 - DNA, 25 bp, Homo sapien
tccacggagatggtgtggcccagct

SEQ ID NO: 3251761 - DNA, 25 bp, Homo sapien
aaggtctgcgtggagagtggcagga

SEQ ID NO: 3251762 - DNA, 25 bp, Homo sapien
tggaaggtctgcgtggagagtggca

SEQ ID NO: 3251763 - DNA, 25 bp, Homo sapien
tgtctgtccctctgaggtgagggac

SEQ ID NO: 3251764 - DNA, 25 bp, Homo sapien
gaggtgagggaccttttcagcatct

SEQ ID NO: 3251765 - DNA, 25 bp, Homo sapien
tccctcgacctttgggggctacagc

SEQ ID NO: 3251766 - DNA, 25 bp, Homo sapien
gggctacagcattagaagctcctgt

SEQ ID NO: 3251767 - DNA, 25 bp, Homo sapien
ctggacctgcagatgcaatgtcagt

SEQ ID NO: 3251768 - DNA, 25 bp, Homo sapien
ttgagcgatggctccctgggcgtct

SEQ ID NO: 3251769 - DNA, 25 bp, Homo sapien
cttgagcgatggctccctgggcgtc

SEQ ID NO: 3251770 - DNA, 25 bp, Homo sapien
gcaatgtcagtgagatttgcaggaa

SEQ ID NO: 3251771 - DNA, 25 bp, Homo sapien
tagactaggataggaatcctcacac

SEQ ID NO: 3251772 - DNA, 25 bp, Homo sapien
acactgagttataccctgtgagatc

SEQ ID NO: 3251773 - DNA, 25 bp, Homo sapien
tcttcctttcaatagactaggatag

SEQ ID NO: 3251774 - DNA, 25 bp, Homo sapien
gggatcccagcgagccagtgttccc

SEQ ID NO: 3251775 - DNA, 25 bp, Homo sapien
atcgccggtgctccctgtctcggga

SEQ ID NO: 3251776 - DNA, 25 bp, Homo sapien
ctgtgtcttggtgatcgccggtgct

SEQ ID NO: 3251777 - DNA, 25 bp, Homo sapien
cctgtctcgggagccattggcgtct

SEQ ID NO: 3251778 - DNA, 25 bp, Homo sapien
tcgggagccattggcgtctgccccg

SEQ ID NO: 3251779 - DNA, 25 bp, Homo sapien
tgtctccaaacacaaactcggccat

SEQ ID NO: 3251780 - DNA, 25 bp, Homo sapien
ccaggagctgtctccaaacacaaac

SEQ ID NO: 3251781 - DNA, 25 bp, Homo sapien
ggagctgtctccaaacacaaactcg

SEQ ID NO: 3251782 - DNA, 25 bp, Homo sapien
agctgtctccaaacacaaactcggc

SEQ ID NO: 3251783 - DNA, 25 bp, Homo sapien
tcttatttgtggaccacactggtgg

SEQ ID NO: 3251784 - DNA, 25 bp, Homo sapien
catgcttcttatttgtggaccacac

SEQ ID NO: 3251785 - DNA, 25 bp, Homo sapien
cacactggtgggttctctgaggtac

SEQ ID NO: 3251786 - DNA, 25 bp, Homo sapien
catccctagccacactccatgcttc

SEQ ID NO: 3251787 - DNA, 25 bp, Homo sapien
agggctgatccttcactgcatagac

SEQ ID NO: 3251788 - DNA, 25 bp, Homo sapien
taaagctggacgatcctaagggtag

SEQ ID NO: 3251789 - DNA, 25 bp, Homo sapien
cactggccaccgttgcttgaggttt

SEQ ID NO: 3251790 - DNA, 25 bp, Homo sapien
gaggtttttccatgctcagacttgt

SEQ ID NO: 3251791 - DNA, 25 bp, Homo sapien
gtgacagatgcaagaaacgtctcca

SEQ ID NO: 3251792 - DNA, 25 bp, Homo sapien
cgtgtcactgcgaacatctgagaaa

SEQ ID NO: 3251793 - DNA, 25 bp, Homo sapien
tctccacacagttggacgtgtcact

SEQ ID NO: 3251794 - DNA, 25 bp, Homo sapien
acggggataaatgccagggaacagc

SEQ ID NO: 3251795 - DNA, 25 bp, Homo sapien
ggatgcggccactcccaccagcaca

SEQ ID NO: 3251796 - DNA, 25 bp, Homo sapien
gcaggatgcggccactcccaccagc

SEQ ID NO: 3251797 - DNA, 25 bp, Homo sapien
gatgcggccactcccaccagcacag

SEQ ID NO: 3251798 - DNA, 25 bp, Homo sapien
aggatgcggccactcccaccagcac

SEQ ID NO: 3251799 - DNA, 25 bp, Homo sapien
ggcaaatgcgaggtcacagatgtaa

SEQ ID NO: 3251800 - DNA, 25 bp, Homo sapien
gatgtaattcaagcatggaccgccg

SEQ ID NO: 3251801 - DNA, 25 bp, Homo sapien
ggtgccccgtggagccaaatcttca

SEQ ID NO: 3251802 - DNA, 25 bp, Homo sapien
caggaatgcgggatggaaccagcct

SEQ ID NO: 3251803 - DNA, 25 bp, Homo sapien
agtccacgtcctggtgcatcaaggg

SEQ ID NO: 3251804 - DNA, 25 bp, Homo sapien
ggaggagcttcacgtcggcgctcac

SEQ ID NO: 3251805 - DNA, 25 bp, Homo sapien
ttcctgtggtgagcgacgggctcct

SEQ ID NO: 3251806 - DNA, 25 bp, Homo sapien
tgcgagtgccgggactcggacttcc

SEQ ID NO: 3251807 - DNA, 25 bp, Homo sapien
gggaaggcatcaccaagtgcaagca

SEQ ID NO: 3251808 - DNA, 25 bp, Homo sapien
tgtgcatgaggggaaggcatcacca

SEQ ID NO: 3251809 - DNA, 25 bp, Homo sapien
actgtaagctccacaacacacagta

SEQ ID NO: 3251810 - DNA, 25 bp, Homo sapien
gcaagcagttacgatgcttttcctc

SEQ ID NO: 3251811 - DNA, 25 bp, Homo sapien
caagtagcaagctggatgaggccac

SEQ ID NO: 3251812 - DNA, 25 bp, Homo sapien
caaagcactaatgaaatgggcctgt

SEQ ID NO: 3251813 - DNA, 25 bp, Homo sapien
catagtgtagcctgagggagcttca

SEQ ID NO: 3251814 - DNA, 25 bp, Homo sapien
gggcctgtgcatgatcaacttctga

SEQ ID NO: 3251815 - DNA, 25 bp, Homo sapien
tctaccatgatgagccgttgggtct

SEQ ID NO: 3251816 - DNA, 25 bp, Homo sapien
aacccttgctatgattggtgagcca

SEQ ID NO: 3251817 - DNA, 25 bp, Homo sapien
tttgctcgaggtcagagacagcgtc

SEQ ID NO: 3251818 - DNA, 25 bp, Homo sapien
gccacatggtctggttgcccaagga

SEQ ID NO: 3251819 - DNA, 25 bp, Homo sapien
tatggaatgcgagaacccagtttca

SEQ ID NO: 3251820 - DNA, 25 bp, Homo sapien
ctatggaatgcgagaacccagtttc

SEQ ID NO: 3251821 - DNA, 25 bp, Homo sapien
tggaatgcgagaacccagtttcagt

SEQ ID NO: 3251822 - DNA, 25 bp, Homo sapien
gaatgcgagaacccagtttcagtgg

SEQ ID NO: 3251823 - DNA, 25 bp, Homo sapien
tggaaccagtggacgcctcccaaca

SEQ ID NO: 3251824 - DNA, 25 bp, Homo sapien
ttggaaccagtggacgcctcccaac

SEQ ID NO: 3251825 - DNA, 25 bp, Homo sapien
caacaccttagccaatggagtgtcc

SEQ ID NO: 3251826 - DNA, 25 bp, Homo sapien
caccttagccaatggagtgtcctct

SEQ ID NO: 3251827 - DNA, 25 bp, Homo sapien
ttttcagaataatgtcagggcctaa

SEQ ID NO: 3251828 - DNA, 25 bp, Homo sapien
cattgcttggctgtgaactcgaggg

SEQ ID NO: 3251829 - DNA, 25 bp, Homo sapien
cagggcctaaaactgtaacagcaaa

SEQ ID NO: 3251830 - DNA, 25 bp, Homo sapien
catttttgtgctccggggcctgaca

SEQ ID NO: 3251831 - DNA, 25 bp, Homo sapien
ctgtcgcagttgtcccgggcagtag

SEQ ID NO: 3251832 - DNA, 25 bp, Homo sapien
ggcagccacggcacccgtgctttcc

SEQ ID NO: 3251833 - DNA, 25 bp, Homo sapien
ggcctgcgctttgctgtcaaacttg

SEQ ID NO: 3251834 - DNA, 25 bp, Homo sapien
ctgtcaaacttgtctgtcgcagttg

SEQ ID NO: 3251835 - DNA, 25 bp, Homo sapien
ctgggggcagtcggctgcgtgctgc

SEQ ID NO: 3251836 - DNA, 25 bp, Homo sapien
ccctcctgctgcgacttaggatctc

SEQ ID NO: 3251837 - DNA, 25 bp, Homo sapien
ctgccctcctgctgcgacttaggat

SEQ ID NO: 3251838 - DNA, 25 bp, Homo sapien
ctcctgctgcgacttaggatctcac

SEQ ID NO: 3251839 - DNA, 25 bp, Homo sapien
ccatcgacccgagggccagaaggtt

SEQ ID NO: 3251840 - DNA, 25 bp, Homo sapien
ctgagggcgagaaggttggcttggt

SEQ ID NO: 3251841 - DNA, 25 bp, Homo sapien
gaactatttcatgaactacgggcga

SEQ ID NO: 3251842 - DNA, 25 bp, Homo sapien
tctggaagaccaaagccggaactat

SEQ ID NO: 3251843 - DNA, 25 bp, Homo sapien
caagggcgccagtctagggttacac

SEQ ID NO: 3251844 - DNA, 25 bp, Homo sapien
tacagacgccctgctatggcttggg

SEQ ID NO: 3251845 - DNA, 25 bp, Homo sapien
ctctggatggcagtcgccggccaca

SEQ ID NO: 3251846 - DNA, 25 bp, Homo sapien
catccttggatggtgtctaatgaca

SEQ ID NO: 3251847 - DNA, 25 bp, Homo sapien
gacatcagttccgtgcatgaacaca

SEQ ID NO: 3251848 - DNA, 25 bp, Homo sapien
ctaatgacatcagttccgtgcatga

SEQ ID NO: 3251849 - DNA, 25 bp, Homo sapien
cataatgacaatgaacctcaaactc

SEQ ID NO: 3251850 - DNA, 25 bp, Homo sapien
tcccgtgcacaagcaccaaactgtg

SEQ ID NO: 3251851 - DNA, 25 bp, Homo sapien
cccaaatagtgggtgagtagaatta

SEQ ID NO: 3251852 - DNA, 25 bp, Homo sapien
ccagcttcgacgctgccctttgagt

SEQ ID NO: 3251853 - DNA, 25 bp, Homo sapien
ctatttagaaatggccagtaataat

SEQ ID NO: 3251854 - DNA, 25 bp, Homo sapien
tatttagaaatggccagtaataatt

SEQ ID NO: 3251855 - DNA, 25 bp, Homo sapien
ggaaggttaagcctggcaacgccag

SEQ ID NO: 3251856 - DNA, 25 bp, Homo sapien
tgggactgacccagctggtaagccg

SEQ ID NO: 3251857 - DNA, 25 bp, Homo sapien
gtgactcagcagatccacactggtt

SEQ ID NO: 3251858 - DNA, 25 bp, Homo sapien
gaaggccccatggacagtggcccat

SEQ ID NO: 3251859 - DNA, 25 bp, Homo sapien
gccgagggagagagctaccagcctt

SEQ ID NO: 3251860 - DNA, 25 bp, Homo sapien
ggagccctcgaatctgatagttgtt

SEQ ID NO: 3251861 - DNA, 25 bp, Homo sapien
ctgggaagagggagccatcgcccat

SEQ ID NO: 3251862 - DNA, 25 bp, Homo sapien
tgcaactgccgtggactctggaagc

SEQ ID NO: 3251863 - DNA, 25 bp, Homo sapien
gaaaaagttggtcagtggcttaaca

SEQ ID NO: 3251864 - DNA, 25 bp, Homo sapien
gacaccttaacaaaatagagccagg

SEQ ID NO: 3251865 - DNA, 25 bp, Homo sapien
cagagccctgaagagtgacactgtg

SEQ ID NO: 3251866 - DNA, 25 bp, Homo sapien
gaggttgaaggctgatgacacctta

SEQ ID NO: 3251867 - DNA, 25 bp, Homo sapien
cacattcctcgcattgcggtcggca

SEQ ID NO: 3251868 - DNA, 25 bp, Homo sapien
cattgcggtcggcaccgtagtacag

SEQ ID NO: 3251869 - DNA, 25 bp, Homo sapien
gcaccgtagtacaggtggctagccc

SEQ ID NO: 3251870 - DNA, 25 bp, Homo sapien
tcgcattgcggtcggcaccgtagta

SEQ ID NO: 3251871 - DNA, 25 bp, Homo sapien
cctcagcctggcttcgttatgaaat

SEQ ID NO: 3251872 - DNA, 25 bp, Homo sapien
ggctcgcgtgtgtctaatatgtaca

SEQ ID NO: 3251873 - DNA, 25 bp, Homo sapien
taccagtgacattgcgaagaaatcc

SEQ ID NO: 3251874 - DNA, 25 bp, Homo sapien
gaattctggcaagatggctcgcgtg

SEQ ID NO: 3251875 - DNA, 25 bp, Homo sapien
gagtatccgccatggaaggaaccca

SEQ ID NO: 3251876 - DNA, 25 bp, Homo sapien
ccagggcacccattttgaaaggctc

SEQ ID NO: 3251877 - DNA, 25 bp, Homo sapien
tgggagtcgagcaccaatcagctgt

SEQ ID NO: 3251878 - DNA, 25 bp, Homo sapien
tgaaaggctccatggaccacgatgg

SEQ ID NO: 3251879 - DNA, 25 bp, Homo sapien
ctgggccaggaccgtgacttcaggc

SEQ ID NO: 3251880 - DNA, 25 bp, Homo sapien
gccaggaccgtgacttcaggctggc

SEQ ID NO: 3251881 - DNA, 25 bp, Homo sapien
tgggccaggaccgtgacttcaggct

SEQ ID NO: 3251882 - DNA, 25 bp, Homo sapien
tgctgggccaggaccgtgacttcag

SEQ ID NO: 3251883 - DNA, 25 bp, Homo sapien
tcaagttcaggtggactcaagcagc

SEQ ID NO: 3251884 - DNA, 25 bp, Homo sapien
gaaactatttgacccgaaggcagca

SEQ ID NO: 3251885 - DNA, 25 bp, Homo sapien
tgatggctcaggaacccaaaaccgt

SEQ ID NO: 3251886 - DNA, 25 bp, Homo sapien
tatacatgggagaccgctttccgct

SEQ ID NO: 3251887 - DNA, 25 bp, Homo sapien
gaatcggtgaaagcaatggcctatc

SEQ ID NO: 3251888 - DNA, 25 bp, Homo sapien
gagtcagtcagtgttttcccgccat

SEQ ID NO: 3251889 - DNA, 25 bp, Homo sapien
taaacgtcctgtacagcggcgagga

SEQ ID NO: 3251890 - DNA, 25 bp, Homo sapien
cagcctccgggagaccaagaagtta

SEQ ID NO: 3251891 - DNA, 25 bp, Homo sapien
ctaggtcccgttcttcaattcccat

SEQ ID NO: 3251892 - DNA, 25 bp, Homo sapien
catgcactgggtgcggctatgtctg

SEQ ID NO: 3251893 - DNA, 25 bp, Homo sapien
cggctatgtctggtctgacaacagc

SEQ ID NO: 3251894 - DNA, 25 bp, Homo sapien
ggattgtgtgatgccaggagtttaa

SEQ ID NO: 3251895 - DNA, 25 bp, Homo sapien
ggacagtacccccacttcataagtg

SEQ ID NO: 3251896 - DNA, 25 bp, Homo sapien
gacacacacggtcttcagtacacgg

SEQ ID NO: 3251897 - DNA, 25 bp, Homo sapien
cgacacacacggtcttcagtacacg

SEQ ID NO: 3251898 - DNA, 25 bp, Homo sapien
acacacacggtcttcagtacacgga

SEQ ID NO: 3251899 - DNA, 25 bp, Homo sapien
cacacacggtcttcagtacacggat

SEQ ID NO: 3251900 - DNA, 25 bp, Homo sapien
aagacggccgcgctgttcaccggca

SEQ ID NO: 3251901 - DNA, 25 bp, Homo sapien
ctcttcttcaagacggccgcgctgt

SEQ ID NO: 3251902 - DNA, 25 bp, Homo sapien
tccgcagcacatgccctcggcaggg

SEQ ID NO: 3251903 - DNA, 25 bp, Homo sapien
cggcacggggccctcggtgtcactg

SEQ ID NO: 3251904 - DNA, 25 bp, Homo sapien
tccagggtccggtgccggaacactg

SEQ ID NO: 3251905 - DNA, 25 bp, Homo sapien
agatgggcgagttttccagggtccg

SEQ ID NO: 3251906 - DNA, 25 bp, Homo sapien
ggagatgggcgagttttccagggtc

SEQ ID NO: 3251907 - DNA, 25 bp, Homo sapien
ctggagatgggcgagttttccaggg

SEQ ID NO: 3251908 - DNA, 25 bp, Homo sapien
gggcgggacagctcctcagagcact

SEQ ID NO: 3251909 - DNA, 25 bp, Homo sapien
caccctccacgcaggacaaaagaca

SEQ ID NO: 3251910 - DNA, 25 bp, Homo sapien
gtcaggaaggatgagatcgaggcac

SEQ ID NO: 3251911 - DNA, 25 bp, Homo sapien
tgtgtgcactcctgcctcagatcac

SEQ ID NO: 3251912 - DNA, 25 bp, Homo sapien
aggctgacacgctccgcctccttct

SEQ ID NO: 3251913 - DNA, 25 bp, Homo sapien
ctctccttgacctccgtcagctcca

SEQ ID NO: 3251914 - DNA, 25 bp, Homo sapien
cctgacttgggctcgatggccagcc

SEQ ID NO: 3251915 - DNA, 25 bp, Homo sapien
tgtggactcgatgtccctgacttgg

SEQ ID NO: 3251916 - DNA, 25 bp, Homo sapien
agaaacgccgttactcccgcggcag

SEQ ID NO: 3251917 - DNA, 25 bp, Homo sapien
tccacaaaacgtctgaggtcgagct

SEQ ID NO: 3251918 - DNA, 25 bp, Homo sapien
gcacctggtccccaagaagaacttc

SEQ ID NO: 3251919 - DNA, 25 bp, Homo sapien
ccaaacaacagagaaggcacctggt

SEQ ID NO: 3251920 - DNA, 25 bp, Homo sapien
tctctgttgtcagcgccagaagccg

SEQ ID NO: 3251921 - DNA, 25 bp, Homo sapien
tctactgcgtcctgcggatacaggg

SEQ ID NO: 3251922 - DNA, 25 bp, Homo sapien
ccggtgaccagaatctactgcgtcc

SEQ ID NO: 3251923 - DNA, 25 bp, Homo sapien
tcccctgcctcggtgagcagcgtgt

SEQ ID NO: 3251924 - DNA, 25 bp, Homo sapien
ctctttggtctgtagccgcttggca

SEQ ID NO: 3251925 - DNA, 25 bp, Homo sapien
cttttctttccttgcggagctgggc

SEQ ID NO: 3251926 - DNA, 25 bp, Homo sapien
tgggccagcctattccgcagggcct

SEQ ID NO: 3251927 - DNA, 25 bp, Homo sapien
ggcgttcacttcaatagccgctcga

SEQ ID NO: 3251928 - DNA, 25 bp, Homo sapien
ctgtgaccccattagacgccacggg

SEQ ID NO: 3251929 - DNA, 25 bp, Homo sapien
ccttttcctgtgaccccattagacg

SEQ ID NO: 3251930 - DNA, 25 bp, Homo sapien
tcgaacccgtccttttcacaacagc

SEQ ID NO: 3251931 - DNA, 25 bp, Homo sapien
gggatccgctttctttggctgactg

SEQ ID NO: 3251932 - DNA, 25 bp, Homo sapien
tgcggaggcggcaagttatcgtaca

SEQ ID NO: 3251933 - DNA, 25 bp, Homo sapien
tagaggcctttctgtcagcaggaga

SEQ ID NO: 3251934 - DNA, 25 bp, Homo sapien
gtaatggttagaggacagcttgtca

SEQ ID NO: 3251935 - DNA, 25 bp, Homo sapien
tccccacagaagaggtattagtgac

SEQ ID NO: 3251936 - DNA, 25 bp, Homo sapien
gcagatataacacgcctgttcatga

SEQ ID NO: 3251937 - DNA, 25 bp, Homo sapien
ccctagatatgggttagcagatata

SEQ ID NO: 3251938 - DNA, 25 bp, Homo sapien
gagccgttgatgcacgggacatcgt

SEQ ID NO: 3251939 - DNA, 25 bp, Homo sapien
atcgtcataatgaagtgccgtcccg

SEQ ID NO: 3251940 - DNA, 25 bp, Homo sapien
tctccccacgctccgcaccagccgc

SEQ ID NO: 3251941 - DNA, 25 bp, Homo sapien
atctccccacgctccgcaccagccg

SEQ ID NO: 3251942 - DNA, 25 bp, Homo sapien
ctccccacgctccgcaccagccgct

SEQ ID NO: 3251943 - DNA, 25 bp, Homo sapien
cactctgcaccagcccgctttccat

SEQ ID NO: 3251944 - DNA, 25 bp, Homo sapien
cccacactctgcaccagcccgcttt

SEQ ID NO: 3251945 - DNA, 25 bp, Homo sapien
gcccgctttccatcctctttatcct

SEQ ID NO: 3251946 - DNA, 25 bp, Homo sapien
accagcccgctttccatcctcttta

SEQ ID NO: 3251947 - DNA, 25 bp, Homo sapien
cagagcctccgggtctgtggacgat

SEQ ID NO: 3251948 - DNA, 25 bp, Homo sapien
tgcgagtaaaatcccaatccacctg

SEQ ID NO: 3251949 - DNA, 25 bp, Homo sapien
ggacgatcccgtctctgcgagtaaa

SEQ ID NO: 3251950 - DNA, 25 bp, Homo sapien
aatgtagtcatagtgcagagcctcc

SEQ ID NO: 3251951 - DNA, 25 bp, Homo sapien
gaagggatgttaacaaacaagcagc

SEQ ID NO: 3251952 - DNA, 25 bp, Homo sapien
cacaatgaggccatgaggacaaagg

SEQ ID NO: 3251953 - DNA, 25 bp, Homo sapien
ttccatgcaatgtataaaggcctct

SEQ ID NO: 3251954 - DNA, 25 bp, Homo sapien
gaaggagtgcccattaagtacctta

SEQ ID NO: 3251955 - DNA, 25 bp, Homo sapien
aaatgtttacaaggtacactgactc

SEQ ID NO: 3251956 - DNA, 25 bp, Homo sapien
tgttacatcaagagtacagtttctt

SEQ ID NO: 3251957 - DNA, 25 bp, Homo sapien
cagcattcgtgttttacggtgggta

SEQ ID NO: 3251958 - DNA, 25 bp, Homo sapien
atgggagacccgcattgttacatca

SEQ ID NO: 3251959 - DNA, 25 bp, Homo sapien
cacaatatgggtcttcaggtcggtc

SEQ ID NO: 3251960 - DNA, 25 bp, Homo sapien
gccacggagcggaatagacacaata

SEQ ID NO: 3251961 - DNA, 25 bp, Homo sapien
cagccggaacgtcagaggatgttta

SEQ ID NO: 3251962 - DNA, 25 bp, Homo sapien
tgtttagaatccaaacccgggatca

SEQ ID NO: 3251963 - DNA, 25 bp, Homo sapien
acaccttattagcaattgataaatg

SEQ ID NO: 3251964 - DNA, 25 bp, Homo sapien
ttataaagtctaaattttcattggc

SEQ ID NO: 3251965 - DNA, 25 bp, Homo sapien
tgatcacaggcctgccgaagccaaa

SEQ ID NO: 3251966 - DNA, 25 bp, Homo sapien
aaatgtcaggaaactgctggcagct

SEQ ID NO: 3251967 - DNA, 25 bp, Homo sapien
aaaccaaatgtcaggaaactgctgg

SEQ ID NO: 3251968 - DNA, 25 bp, Homo sapien
gcaagaggggcatcaagaagcagct

SEQ ID NO: 3251969 - DNA, 25 bp, Homo sapien
cgtttcaaaacttccatctggtggc

SEQ ID NO: 3251970 - DNA, 25 bp, Homo sapien
acgtttcaaaacttccatctggtgg

SEQ ID NO: 3251971 - DNA, 25 bp, Homo sapien
aacgtttcaaaacttccatctggtg

SEQ ID NO: 3251972 - DNA, 25 bp, Homo sapien
gagccttggatgaactgggtaccga

SEQ ID NO: 3251973 - DNA, 25 bp, Homo sapien
gaaacccacttaggtgcacgctgct

SEQ ID NO: 3251974 - DNA, 25 bp, Homo sapien
ttccaagtccaatgcaaaagagctc

SEQ ID NO: 3251975 - DNA, 25 bp, Homo sapien
tcgtctccgggaagcgcagtcttac

SEQ ID NO: 3251976 - DNA, 25 bp, Homo sapien
tttcccagtgactttcgacacagtg

SEQ ID NO: 3251977 - DNA, 25 bp, Homo sapien
tctttcccagactgatgatcttggt

SEQ ID NO: 3251978 - DNA, 25 bp, Homo sapien
ggtctgctcgtctgtggacggcttt

SEQ ID NO: 3251979 - DNA, 25 bp, Homo sapien
cgcaggtgggaacatcttcctcagc

SEQ ID NO: 3251980 - DNA, 25 bp, Homo sapien
tctgagctgggtctctctgaagaca

SEQ ID NO: 3251981 - DNA, 25 bp, Homo sapien
atctgagctgggtctctctgaagac

SEQ ID NO: 3251982 - DNA, 25 bp, Homo sapien
cttgctcctttccattacatgtggt

SEQ ID NO: 3251983 - DNA, 25 bp, Homo sapien
ctcctttccattacatgtggtaatt

SEQ ID NO: 3251984 - DNA, 25 bp, Homo sapien
ggaggacactctgaatccacggggc

SEQ ID NO: 3251985 - DNA, 25 bp, Homo sapien
ccagttctgccttgtgcaccgggga

SEQ ID NO: 3251986 - DNA, 25 bp, Homo sapien
actctgaatccacggggccactaca

SEQ ID NO: 3251987 - DNA, 25 bp, Homo sapien
cacggggccactacaaccactgtag

SEQ ID NO: 3251988 - DNA, 25 bp, Homo sapien
aaatctgaccactccgtttctggga

SEQ ID NO: 3251989 - DNA, 25 bp, Homo sapien
ttttcaaccagtcggagaggtcagg

SEQ ID NO: 3251990 - DNA, 25 bp, Homo sapien
ttgggaggatcgcattcagcaaccc

SEQ ID NO: 3251991 - DNA, 25 bp, Homo sapien
tatgtccaaggtacgaagaaaggca

SEQ ID NO: 3251992 - DNA, 25 bp, Homo sapien
ctgccaactctctccaaggtcttta

SEQ ID NO: 3251993 - DNA, 25 bp, Homo sapien
tgttgacaattcaaggtgccccggt

SEQ ID NO: 3251994 - DNA, 25 bp, Homo sapien
tgggtatgcaggtacagaacagaag

SEQ ID NO: 3251995 - DNA, 25 bp, Homo sapien
gaatgagtccacagtcacctgccaa

SEQ ID NO: 3251996 - DNA, 25 bp, Homo sapien
aaggcaattccaatgtaacaggagc

SEQ ID NO: 3251997 - DNA, 25 bp, Homo sapien
gcaattccaatgtaacaggagcgtc

SEQ ID NO: 3251998 - DNA, 25 bp, Homo sapien
taaggcaattccaatgtaacaggag

SEQ ID NO: 3251999 - DNA, 25 bp, Homo sapien
ggcaattccaatgtaacaggagcgt

SEQ ID NO: 3252000 - DNA, 25 bp, Homo sapien
gctgtctttcgggatgtacgtaatg

SEQ ID NO: 3252001 - DNA, 25 bp, Homo sapien
tgagtaatcttcagctcgtgcttct

SEQ ID NO: 3252002 - DNA, 25 bp, Homo sapien
taatgttacagccttggagtggcag

SEQ ID NO: 3252003 - DNA, 25 bp, Homo sapien
tccttgctctggacggcgagaacaa

SEQ ID NO: 3252004 - DNA, 25 bp, Homo sapien
ttaatggtgactggatataaacgcc

SEQ ID NO: 3252005 - DNA, 25 bp, Homo sapien
tataaacgccatggcttctgagtgc

SEQ ID NO: 3252006 - DNA, 25 bp, Homo sapien
gcagcaatcttacaaaaaatgcaag

SEQ ID NO: 3252007 - DNA, 25 bp, Homo sapien
aatgcaagcgattccaaatgtctta

SEQ ID NO: 3252008 - DNA, 25 bp, Homo sapien
gcagattttggcgtccttgaccagg

SEQ ID NO: 3252009 - DNA, 25 bp, Homo sapien
tctttgatgacgcagagcaacttgg

SEQ ID NO: 3252010 - DNA, 25 bp, Homo sapien
tacgactcataagagctgctcatcg

SEQ ID NO: 3252011 - DNA, 25 bp, Homo sapien
ccgcagcaggaaggcgcagattttg

SEQ ID NO: 3252012 - DNA, 25 bp, Homo sapien
cacattcttgcaggacgagcgccat

SEQ ID NO: 3252013 - DNA, 25 bp, Homo sapien
ccataacatcagaaatgccatttca

SEQ ID NO: 3252014 - DNA, 25 bp, Homo sapien
agaaatgccatttcaaccaatcccc

SEQ ID NO: 3252015 - DNA, 25 bp, Homo sapien
tcagaaatgccatttcaaccaatcc

SEQ ID NO: 3252016 - DNA, 25 bp, Homo sapien
acaccccataacatcagaaatgcca

SEQ ID NO: 3252017 - DNA, 25 bp, Homo sapien
catggtctggctacaggagaaactg

SEQ ID NO: 3252018 - DNA, 25 bp, Homo sapien
taactggaacgccacttccattgct

SEQ ID NO: 3252019 - DNA, 25 bp, Homo sapien
cattgctctgcatggtctggctaca

SEQ ID NO: 3252020 - DNA, 25 bp, Homo sapien
tatgtcaccgtagctaactggaacg

SEQ ID NO: 3252021 - DNA, 25 bp, Homo sapien
agagccaagggcatccgcatcttgt

SEQ ID NO: 3252022 - DNA, 25 bp, Homo sapien
atcttgtgcgggtcacttgtgtcac

SEQ ID NO: 3252023 - DNA, 25 bp, Homo sapien
gcttcggtgttttgtacaactccag

SEQ ID NO: 3252024 - DNA, 25 bp, Homo sapien
gctgcaggctctcccgcttcggtgt

SEQ ID NO: 3252025 - DNA, 25 bp, Homo sapien
gccatttctcttccgcactgctgat

SEQ ID NO: 3252026 - DNA, 25 bp, Homo sapien
agccatttctcttccgcactgctga

SEQ ID NO: 3252027 - DNA, 25 bp, Homo sapien
ccacagcaataagctttcactacct

SEQ ID NO: 3252028 - DNA, 25 bp, Homo sapien
ttgatgtgatgtattccggagcttt

SEQ ID NO: 3252029 - DNA, 25 bp, Homo sapien
tgatgtattccggagcttttccggg

SEQ ID NO: 3252030 - DNA, 25 bp, Homo sapien
gcggcacagcttcctcataataacc

SEQ ID NO: 3252031 - DNA, 25 bp, Homo sapien
ttttccggggctcagcggcacagct

SEQ ID NO: 3252032 - DNA, 25 bp, Homo sapien
gagggaggatgttggcaatggtgga

SEQ ID NO: 3252033 - DNA, 25 bp, Homo sapien
ttggcaatggtggaggcccactgtc

SEQ ID NO: 3252034 - DNA, 25 bp, Homo sapien
gatgttggcaatggtggaggcccac

SEQ ID NO: 3252035 - DNA, 25 bp, Homo sapien
atggtggaggcccactgtcaggagg

SEQ ID NO: 3252036 - DNA, 25 bp, Homo sapien
cttccaaaattccattgagagctga

SEQ ID NO: 3252037 - DNA, 25 bp, Homo sapien
aaattccattgagagctgaccccat

SEQ ID NO: 3252038 - DNA, 25 bp, Homo sapien
tccaaaattccattgagagctgacc

SEQ ID NO: 3252039 - DNA, 25 bp, Homo sapien
caaaattccattgagagctgacccc

SEQ ID NO: 3252040 - DNA, 25 bp, Homo sapien
ttcaggaatcgtacatttctgctgt

SEQ ID NO: 3252041 - DNA, 25 bp, Homo sapien
tcaggaatcgtacatttctgctgta

SEQ ID NO: 3252042 - DNA, 25 bp, Homo sapien
gttatttaatctacagaaaggacat

SEQ ID NO: 3252043 - DNA, 25 bp, Homo sapien
cattatgattcacctaaacgcacca

SEQ ID NO: 3252044 - DNA, 25 bp, Homo sapien
tcaggaatgctttgtttcaacacaa

SEQ ID NO: 3252045 - DNA, 25 bp, Homo sapien
cgcccagccccataaagaacaatta

SEQ ID NO: 3252046 - DNA, 25 bp, Homo sapien
gggcaacagactacactcacggatt

SEQ ID NO: 3252047 - DNA, 25 bp, Homo sapien
tgatagacgaaaatcacggaggcct

SEQ ID NO: 3252048 - DNA, 25 bp, Homo sapien
gagcaatcagcctaccaagtcaagt

SEQ ID NO: 3252049 - DNA, 25 bp, Homo sapien
ggattctgctcacaacagcgggagt

SEQ ID NO: 3252050 - DNA, 25 bp, Homo sapien
atctcctgaccttgtgatctgccca

SEQ ID NO: 3252051 - DNA, 25 bp, Homo sapien
gaaacagggtttcaggatggtctca

SEQ ID NO: 3252052 - DNA, 25 bp, Homo sapien
agaaacagggtttcaggatggtctc

SEQ ID NO: 3252053 - DNA, 25 bp, Homo sapien
gccaagtacatctactcaaggcact

SEQ ID NO: 3252054 - DNA, 25 bp, Homo sapien
tacatctactcaaggcactctcaaa

SEQ ID NO: 3252055 - DNA, 25 bp, Homo sapien
ctactcaaggcactctcaaaattcc

SEQ ID NO: 3252056 - DNA, 25 bp, Homo sapien
cacaaagccaagtacatctactcaa

SEQ ID NO: 3252057 - DNA, 25 bp, Homo sapien
caatgggtcggcatgagctgatgac

SEQ ID NO: 3252058 - DNA, 25 bp, Homo sapien
tcaacagagtccatagcaatgggtc

SEQ ID NO: 3252059 - DNA, 25 bp, Homo sapien
tgatgactggaggtgcggcgtagag

SEQ ID NO: 3252060 - DNA, 25 bp, Homo sapien
gagaagggagccacctcaacagagt

SEQ ID NO: 3252061 - DNA, 25 bp, Homo sapien
agccgcagccgccttaacaatggag

SEQ ID NO: 3252062 - DNA, 25 bp, Homo sapien
gtgtaccccgctcgagatccggctc

SEQ ID NO: 3252063 - DNA, 25 bp, Homo sapien
tgggccgactggagcgcagctgaac

SEQ ID NO: 3252064 - DNA, 25 bp, Homo sapien
agctgaacagccgacagagccgcag

SEQ ID NO: 3252065 - DNA, 25 bp, Homo sapien
ggtgggctcttctgtagccccggat

SEQ ID NO: 3252066 - DNA, 25 bp, Homo sapien
gtgggctcttctgtagccccggatc

SEQ ID NO: 3252067 - DNA, 25 bp, Homo sapien
cccgatgcaggcatgtatgccctgg

SEQ ID NO: 3252068 - DNA, 25 bp, Homo sapien
cgatgcaggcatgtatgccctggtg

SEQ ID NO: 3252069 - DNA, 25 bp, Homo sapien
gcaagaccaggtgcatatgccacag

SEQ ID NO: 3252070 - DNA, 25 bp, Homo sapien
gaaggcaccgactctagatgaatgg

SEQ ID NO: 3252071 - DNA, 25 bp, Homo sapien
cacaaagcttgggtatggccaccca

SEQ ID NO: 3252072 - DNA, 25 bp, Homo sapien
tgaaatctgtcacttccagagacgg

SEQ ID NO: 3252073 - DNA, 25 bp, Homo sapien
caaggacggtgcatcaagagctacg

SEQ ID NO: 3252074 - DNA, 25 bp, Homo sapien
gaaaacagtggtggctatacctcac

SEQ ID NO: 3252075 - DNA, 25 bp, Homo sapien
tgaaaccacacagatccgagcggtg

SEQ ID NO: 3252076 - DNA, 25 bp, Homo sapien
gaacatcgggacacacacaaagagg

SEQ ID NO: 3252077 - DNA, 25 bp, Homo sapien
gccaggcggtcaaactcctcgatgc

SEQ ID NO: 3252078 - DNA, 25 bp, Homo sapien
caggcggtcaaactcctcgatgctc

SEQ ID NO: 3252079 - DNA, 25 bp, Homo sapien
aggcggtcaaactcctcgatgctca

SEQ ID NO: 3252080 - DNA, 25 bp, Homo sapien
caaacacttcctggaactcctcggg

SEQ ID NO: 3252081 - DNA, 25 bp, Homo sapien
actgagctcagaggacagcgaccct

SEQ ID NO: 3252082 - DNA, 25 bp, Homo sapien
cagttagccacgcagcaagggacac

SEQ ID NO: 3252083 - DNA, 25 bp, Homo sapien
caccattgggcagtttgctgccgcc

SEQ ID NO: 3252084 - DNA, 25 bp, Homo sapien
gtatctgctgctgtggaccaagttc

SEQ ID NO: 3252085 - DNA, 25 bp, Homo sapien
aaatggtcaatttggatgggtgtgg

SEQ ID NO: 3252086 - DNA, 25 bp, Homo sapien
actgggactgggacgctccatcacc

SEQ ID NO: 3252087 - DNA, 25 bp, Homo sapien
gggactgggacgctccatcaccaga

SEQ ID NO: 3252088 - DNA, 25 bp, Homo sapien
tctctgggagtgtggcactgggact

SEQ ID NO: 3252089 - DNA, 25 bp, Homo sapien
actgggacgctccatcaccagaggc

SEQ ID NO: 3252090 - DNA, 25 bp, Homo sapien
ctgggccaggccactcgtatgtggc

SEQ ID NO: 3252091 - DNA, 25 bp, Homo sapien
ccactcgtatgtggcctacagggcc

SEQ ID NO: 3252092 - DNA, 25 bp, Homo sapien
tctgtctgcagcgtgagagaacttg

SEQ ID NO: 3252093 - DNA, 25 bp, Homo sapien
ggtgtcccgagcatgtgggctgggc

SEQ ID NO: 3252094 - DNA, 25 bp, Homo sapien
aaaactggcattcaatctcactcag

SEQ ID NO: 3252095 - DNA, 25 bp, Homo sapien
aaactggcattcaatctcactcagg

SEQ ID NO: 3252096 - DNA, 25 bp, Homo sapien
gtgagtcttgcttaagccgggccca

SEQ ID NO: 3252097 - DNA, 25 bp, Homo sapien
ccatctcaggtttgcggtgaagcct

SEQ ID NO: 3252098 - DNA, 25 bp, Homo sapien
tgggctccgtggtgcattccaccgg

SEQ ID NO: 3252099 - DNA, 25 bp, Homo sapien
ggtgaagcctcagggacctatgcca

SEQ ID NO: 3252100 - DNA, 25 bp, Homo sapien
catcactgtcataatgacggtggcc

SEQ ID NO: 3252101 - DNA, 25 bp, Homo sapien
tcactgtcataatgacggtggccat

SEQ ID NO: 3252102 - DNA, 25 bp, Homo sapien
ctgtcataatgacggtggccattgc

SEQ ID NO: 3252103 - DNA, 25 bp, Homo sapien
gtgacatcactgtcataatgacggt

SEQ ID NO: 3252104 - DNA, 25 bp, Homo sapien
tgtgaatccacgagccatggaccgg

SEQ ID NO: 3252105 - DNA, 25 bp, Homo sapien
catgaagtctgttggcagcctgaag

SEQ ID NO: 3252106 - DNA, 25 bp, Homo sapien
caccttgcgttctgagatggctgag

SEQ ID NO: 3252107 - DNA, 25 bp, Homo sapien
tgcagatgcggctcacactgacagt

SEQ ID NO: 3252108 - DNA, 25 bp, Homo sapien
agccgctgctgagaaaagaggggca

SEQ ID NO: 3252109 - DNA, 25 bp, Homo sapien
gaaaagaggggcattccccatatgt

SEQ ID NO: 3252110 - DNA, 25 bp, Homo sapien
cagccgctgctgagaaaagaggggc

SEQ ID NO: 3252111 - DNA, 25 bp, Homo sapien
aaaagaggggcattccccatatgta

SEQ ID NO: 3252112 - DNA, 25 bp, Homo sapien
ggtgagagcaattaactccagcacc

SEQ ID NO: 3252113 - DNA, 25 bp, Homo sapien
gagcaattaactccagcaccattag

SEQ ID NO: 3252114 - DNA, 25 bp, Homo sapien
cagcaccattagacagcccagaggg

SEQ ID NO: 3252115 - DNA, 25 bp, Homo sapien
ttaactccagcaccattagacagcc

SEQ ID NO: 3252116 - DNA, 25 bp, Homo sapien
cgcgaattcggtttgtgacgatgag

SEQ ID NO: 3252117 - DNA, 25 bp, Homo sapien
ctccagtctcgtccggtccacgtct

SEQ ID NO: 3252118 - DNA, 25 bp, Homo sapien
tttgggcagtttcacgcgaattcgg

SEQ ID NO: 3252119 - DNA, 25 bp, Homo sapien
cggtccacgtctttgggcagtttca

SEQ ID NO: 3252120 - DNA, 25 bp, Homo sapien
tcacctcacgaagcaagtgtatgct

SEQ ID NO: 3252121 - DNA, 25 bp, Homo sapien
ggtcacctcacgaagcaagtgtatg

SEQ ID NO: 3252122 - DNA, 25 bp, Homo sapien
cctcacgaagcaagtgtatgctggc

SEQ ID NO: 3252123 - DNA, 25 bp, Homo sapien
cacgaagcaagtgtatgctggcacc

SEQ ID NO: 3252124 - DNA, 25 bp, Homo sapien
agctggcatccgggtctgctccaca

SEQ ID NO: 3252125 - DNA, 25 bp, Homo sapien
gccccagctggcatccgggtctgct

SEQ ID NO: 3252126 - DNA, 25 bp, Homo sapien
cccagctggcatccgggtctgctcc

SEQ ID NO: 3252127 - DNA, 25 bp, Homo sapien
catgccccagctggcatccgggtct

SEQ ID NO: 3252128 - DNA, 25 bp, Homo sapien
gtgcccgtggcattcatcagcaaac

SEQ ID NO: 3252129 - DNA, 25 bp, Homo sapien
ggtgcccgtggcattcatcagcaaa

SEQ ID NO: 3252130 - DNA, 25 bp, Homo sapien
aaaggagagacggtatgctcagccc

SEQ ID NO: 3252131 - DNA, 25 bp, Homo sapien
tcaacgcgagctttgcagtaggaaa

SEQ ID NO: 3252132 - DNA, 25 bp, Homo sapien
tggaagcatcatcgacacgtcctgc

SEQ ID NO: 3252133 - DNA, 25 bp, Homo sapien
ttcgcactatgagccctgagccatg

SEQ ID NO: 3252134 - DNA, 25 bp, Homo sapien
aaccagcttcctttggtattccagg

SEQ ID NO: 3252135 - DNA, 25 bp, Homo sapien
tagtgcccatcgctctgcataacgg

SEQ ID NO: 3252136 - DNA, 25 bp, Homo sapien
ccaggatctgagataaggtggagac

SEQ ID NO: 3252137 - DNA, 25 bp, Homo sapien
tcaccttggacggttggaaactcac

SEQ ID NO: 3252138 - DNA, 25 bp, Homo sapien
ggagctaccacaaggacctgctgcc

SEQ ID NO: 3252139 - DNA, 25 bp, Homo sapien
gagctaccacaaggacctgctgcca

SEQ ID NO: 3252140 - DNA, 25 bp, Homo sapien
agctaccacaaggacctgctgccac

SEQ ID NO: 3252141 - DNA, 25 bp, Homo sapien
gctaccacaaggacctgctgccacc

SEQ ID NO: 3252142 - DNA, 25 bp, Homo sapien
gcttggtcggactgtgaacactgtg

SEQ ID NO: 3252143 - DNA, 25 bp, Homo sapien
gatggtggaacaccttggcttggtc

SEQ ID NO: 3252144 - DNA, 25 bp, Homo sapien
cgtcttttggtgtcgtaggagtcct

SEQ ID NO: 3252145 - DNA, 25 bp, Homo sapien
caggacccctaacattgagctcagg

SEQ ID NO: 3252146 - DNA, 25 bp, Homo sapien
agctgcgcctgatcactctgggtgg

SEQ ID NO: 3252147 - DNA, 25 bp, Homo sapien
ggcatcttggagctgcgcctgatca

SEQ ID NO: 3252148 - DNA, 25 bp, Homo sapien
aatgcaacagcccttggttatcagg

SEQ ID NO: 3252149 - DNA, 25 bp, Homo sapien
cataggaggacgaagacggttagga

SEQ ID NO: 3252150 - DNA, 25 bp, Homo sapien
gctggtccaagccattctttccatg

SEQ ID NO: 3252151 - DNA, 25 bp, Homo sapien
ccgctggtccaagccattctttcca

SEQ ID NO: 3252152 - DNA, 25 bp, Homo sapien
gggtcagatttggaataggggaatc

SEQ ID NO: 3252153 - DNA, 25 bp, Homo sapien
tctttccatgtcctgggagagggtc

SEQ ID NO: 3252154 - DNA, 25 bp, Homo sapien
gggcaaggctgggcaagcaacacag

SEQ ID NO: 3252155 - DNA, 25 bp, Homo sapien
ggcaaggctgggcaagcaacacagg

SEQ ID NO: 3252156 - DNA, 25 bp, Homo sapien
gcaaggctgggcaagcaacacaggg

SEQ ID NO: 3252157 - DNA, 25 bp, Homo sapien
gaagtgctattctggtctgctaaat

SEQ ID NO: 3252158 - DNA, 25 bp, Homo sapien
tcctctatttgagcaggctgtcacc

SEQ ID NO: 3252159 - DNA, 25 bp, Homo sapien
tggaggctacggttccaatgacaat

SEQ ID NO: 3252160 - DNA, 25 bp, Homo sapien
taggtttcgcgtgtacagcctgttc

SEQ ID NO: 3252161 - DNA, 25 bp, Homo sapien
ggaggaaaacacctgcctcgtcacc

SEQ ID NO: 3252162 - DNA, 25 bp, Homo sapien
tcgtcaccttttgccaccacatggg

SEQ ID NO: 3252163 - DNA, 25 bp, Homo sapien
gtcccttgaggtcccgaggctgcct

SEQ ID NO: 3252164 - DNA, 25 bp, Homo sapien
tgcctgccacgggtggagaccatgc

SEQ ID NO: 3252165 - DNA, 25 bp, Homo sapien
ttgtcctgtgaccaaccgtctgccg

SEQ ID NO: 3252166 - DNA, 25 bp, Homo sapien
tcctgtgaccaaccgtctgccgtat

SEQ ID NO: 3252167 - DNA, 25 bp, Homo sapien
gaccaaccgtctgccgtatcatttg

SEQ ID NO: 3252168 - DNA, 25 bp, Homo sapien
aaccgtctgccgtatcatttgcagg

SEQ ID NO: 3252169 - DNA, 25 bp, Homo sapien
gagagacgaggcgacactatctcac

SEQ ID NO: 3252170 - DNA, 25 bp, Homo sapien
agagagacgaggcgacactatctca

SEQ ID NO: 3252171 - DNA, 25 bp, Homo sapien
catggcggcaactgggtagtcctga

SEQ ID NO: 3252172 - DNA, 25 bp, Homo sapien
gatgctgtgcacaaccagcgctgag

SEQ ID NO: 3252173 - DNA, 25 bp, Homo sapien
gtggctcacacagcatccgggtctg

SEQ ID NO: 3252174 - DNA, 25 bp, Homo sapien
agtcaccgctggacattcaaggccg

SEQ ID NO: 3252175 - DNA, 25 bp, Homo sapien
atccgctcctgggtgcacgggcagg

SEQ ID NO: 3252176 - DNA, 25 bp, Homo sapien
tgtggcactgcacgggttcaggtcc

SEQ ID NO: 3252177 - DNA, 25 bp, Homo sapien
ttgggcagttcccatccgctcctgg

SEQ ID NO: 3252178 - DNA, 25 bp, Homo sapien
tgggtgcacgggcaggaggcttgga

SEQ ID NO: 3252179 - DNA, 25 bp, Homo sapien
ctctgccggcctgcaccagagccaa

SEQ ID NO: 3252180 - DNA, 25 bp, Homo sapien
agtgtcttctttgattccgtcaccc

SEQ ID NO: 3252181 - DNA, 25 bp, Homo sapien
ccgtcacccccgcagccagtggttc

SEQ ID NO: 3252182 - DNA, 25 bp, Homo sapien
tgcaccagagccaacccagtgtctt

SEQ ID NO: 3252183 - DNA, 25 bp, Homo sapien
taaatacccgttgaatgtaacgcat

SEQ ID NO: 3252184 - DNA, 25 bp, Homo sapien
tgaatgtaacgcatttcaattcaac

SEQ ID NO: 3252185 - DNA, 25 bp, Homo sapien
tacccgttgaatgtaacgcatttca

SEQ ID NO: 3252186 - DNA, 25 bp, Homo sapien
caataaatacccgttgaatgtaacg

SEQ ID NO: 3252187 - DNA, 25 bp, Homo sapien
gccttgctgtgtgcaaatgctttgt

SEQ ID NO: 3252188 - DNA, 25 bp, Homo sapien
tccttgggcgcgctacagatggacg

SEQ ID NO: 3252189 - DNA, 25 bp, Homo sapien
tgggcgcgctacagatggacgtccc

SEQ ID NO: 3252190 - DNA, 25 bp, Homo sapien
gtggcgtgccttgctgtgtgcaaat

SEQ ID NO: 3252191 - DNA, 25 bp, Homo sapien
tctccccggggaattcatgagtgca

SEQ ID NO: 3252192 - DNA, 25 bp, Homo sapien
acacatatgtctgtgctggagcaga

SEQ ID NO: 3252193 - DNA, 25 bp, Homo sapien
aaggacacatatgtctgtgctggag

SEQ ID NO: 3252194 - DNA, 25 bp, Homo sapien
gcacgggccattggagtcctgcaga

SEQ ID NO: 3252195 - DNA, 25 bp, Homo sapien
gcggccggaagcaaacagcattatc

SEQ ID NO: 3252196 - DNA, 25 bp, Homo sapien
cacctatgatttacagcggccggaa

SEQ ID NO: 3252197 - DNA, 25 bp, Homo sapien
tgaacttgggactgcctcactgcaa

SEQ ID NO: 3252198 - DNA, 25 bp, Homo sapien
taggacggtttacagtttgcaggca

SEQ ID NO: 3252199 - DNA, 25 bp, Homo sapien
ctgtgggacaaggactgggtgtcca

SEQ ID NO: 3252200 - DNA, 25 bp, Homo sapien
ttggagagggtctctgtcggtcccg

SEQ ID NO: 3252201 - DNA, 25 bp, Homo sapien
tgtcggtcccgctgctgtgggacaa

SEQ ID NO: 3252202 - DNA, 25 bp, Homo sapien
tgtctgcatcccccttgagcatcag

SEQ ID NO: 3252203 - DNA, 25 bp, Homo sapien
ccatcctccccatccgatcgcctgg

SEQ ID NO: 3252204 - DNA, 25 bp, Homo sapien
catcctccccatccgatcgcctggc

SEQ ID NO: 3252205 - DNA, 25 bp, Homo sapien
tcctccccatccgatcgcctggcag

SEQ ID NO: 3252206 - DNA, 25 bp, Homo sapien
atcctccccatccgatcgcctggca

SEQ ID NO: 3252207 - DNA, 25 bp, Homo sapien
ccacacaccattgcttgtgggtttc

SEQ ID NO: 3252208 - DNA, 25 bp, Homo sapien
gccacacaccattgcttgtgggttt

SEQ ID NO: 3252209 - DNA, 25 bp, Homo sapien
ggccacacaccattgcttgtgggtt

SEQ ID NO: 3252210 - DNA, 25 bp, Homo sapien
cacacaccattgcttgtgggtttct

SEQ ID NO: 3252211 - DNA, 25 bp, Homo sapien
gacatttccagcgaagaatgagcaa

SEQ ID NO: 3252212 - DNA, 25 bp, Homo sapien
aaggccatgctgacatttctcggca

SEQ ID NO: 3252213 - DNA, 25 bp, Homo sapien
tctgcagctgagcaacgaggcatct

SEQ ID NO: 3252214 - DNA, 25 bp, Homo sapien
tgagcaaataaatcacacaaggcca

SEQ ID NO: 3252215 - DNA, 25 bp, Homo sapien
cggcgggctcgggcccgtctgtctt

SEQ ID NO: 3252216 - DNA, 25 bp, Homo sapien
taacatctcgttactctcaacggct

SEQ ID NO: 3252217 - DNA, 25 bp, Homo sapien
agagacagtgattttcagcgtgaaa

SEQ ID NO: 3252218 - DNA, 25 bp, Homo sapien
gaagactgagcagttccgttccgaa

SEQ ID NO: 3252219 - DNA, 25 bp, Homo sapien
gaaatttgggattgggctacaggac

SEQ ID NO: 3252220 - DNA, 25 bp, Homo sapien
tgagtgtgcagccatacatcagcga

SEQ ID NO: 3252221 - DNA, 25 bp, Homo sapien
tcaagaagcgcttaatggagaggca

SEQ ID NO: 3252222 - DNA, 25 bp, Homo sapien
gaggcaaatcaacgccaagcctgct

SEQ ID NO: 3252223 - DNA, 25 bp, Homo sapien
acccggcagcggagcccttgagtgt

SEQ ID NO: 3252224 - DNA, 25 bp, Homo sapien
cttccagggaaagggccgcatctga

SEQ ID NO: 3252225 - DNA, 25 bp, Homo sapien
ccgaggtccggagtctaaggtcaca

SEQ ID NO: 3252226 - DNA, 25 bp, Homo sapien
cacatagctggtgattggaaccttg

SEQ ID NO: 3252227 - DNA, 25 bp, Homo sapien
cagtaactgatgtgccaacctgcag

SEQ ID NO: 3252228 - DNA, 25 bp, Homo sapien
ctctttggcggcatcaacacaccga

SEQ ID NO: 3252229 - DNA, 25 bp, Homo sapien
tggcggcatcaacacaccgacagct

SEQ ID NO: 3252230 - DNA, 25 bp, Homo sapien
ggcatcaacacaccgacagctctaa

SEQ ID NO: 3252231 - DNA, 25 bp, Homo sapien
tttggcggcatcaacacaccgacag

SEQ ID NO: 3252232 - DNA, 25 bp, Homo sapien
gcagccagcaagtggtctatgccat

SEQ ID NO: 3252233 - DNA, 25 bp, Homo sapien
tatgccatgctcctcaccagttttc

SEQ ID NO: 3252234 - DNA, 25 bp, Homo sapien
tccagtgcagaatcattcctgagac

SEQ ID NO: 3252235 - DNA, 25 bp, Homo sapien
tgcaagaacctgaggcaagtctggg

SEQ ID NO: 3252236 - DNA, 25 bp, Homo sapien
gacaagggaaggagctgatagcaac

SEQ ID NO: 3252237 - DNA, 25 bp, Homo sapien
caagggaaggagctgatagcaactg

SEQ ID NO: 3252238 - DNA, 25 bp, Homo sapien
ctgatagcaactggggaaggtgccc

SEQ ID NO: 3252239 - DNA, 25 bp, Homo sapien
ctgacaagggaaggagctgatagca

SEQ ID NO: 3252240 - DNA, 25 bp, Homo sapien
tatcagaacaggactctcgggaggc

SEQ ID NO: 3252241 - DNA, 25 bp, Homo sapien
tctccctgaggaataaacgaccgat

SEQ ID NO: 3252242 - DNA, 25 bp, Homo sapien
gctgcataattgaaggcgccaccac

SEQ ID NO: 3252243 - DNA, 25 bp, Homo sapien
tctatattccaaagatcgggcctgg

SEQ ID NO: 3252244 - DNA, 25 bp, Homo sapien
tttcctatagatgttatcttttacg

SEQ ID NO: 3252245 - DNA, 25 bp, Homo sapien
tcctatagatgttatcttttacgcc

SEQ ID NO: 3252246 - DNA, 25 bp, Homo sapien
tagatgttatcttttacgccagtgt

SEQ ID NO: 3252247 - DNA, 25 bp, Homo sapien
ctatagatgttatcttttacgccag

SEQ ID NO: 3252248 - DNA, 25 bp, Homo sapien
tgctgtcagagagcacggagaggct

SEQ ID NO: 3252249 - DNA, 25 bp, Homo sapien
gaagtggcgaggtgcctgctggtag

SEQ ID NO: 3252250 - DNA, 25 bp, Homo sapien
tgggggtgctccggccactttcact

SEQ ID NO: 3252251 - DNA, 25 bp, Homo sapien
cgaggtgcctgctggtaggtggagg

SEQ ID NO: 3252252 - DNA, 25 bp, Homo sapien
gctgggcggtgaactaagaacacct

SEQ ID NO: 3252253 - DNA, 25 bp, Homo sapien
aaaagcttatttgcagcgagcccca

SEQ ID NO: 3252254 - DNA, 25 bp, Homo sapien
gacttgctaatccaaccctgagttg

SEQ ID NO: 3252255 - DNA, 25 bp, Homo sapien
gaagtctgtccagagtcccaaggca

SEQ ID NO: 3252256 - DNA, 25 bp, Homo sapien
tgagcattttctcgtgcttgggcat

SEQ ID NO: 3252257 - DNA, 25 bp, Homo sapien
ctgatgccgtagaaaggactgcagg

SEQ ID NO: 3252258 - DNA, 25 bp, Homo sapien
agccaggctgatgccgtagaaagga

SEQ ID NO: 3252259 - DNA, 25 bp, Homo sapien
gactgcaggctctaactttgagcat

SEQ ID NO: 3252260 - DNA, 25 bp, Homo sapien
cgtacagtgccgtccggagggaaat

SEQ ID NO: 3252261 - DNA, 25 bp, Homo sapien
gtgaggccctgccagcattcggtgg

SEQ ID NO: 3252262 - DNA, 25 bp, Homo sapien
caggccttgcctcgggcagccgccc

SEQ ID NO: 3252263 - DNA, 25 bp, Homo sapien
agtgccgtccggagggaaatgtcca

SEQ ID NO: 3252264 - DNA, 25 bp, Homo sapien
cagaggaggacaggcaccttcgtgt

SEQ ID NO: 3252265 - DNA, 25 bp, Homo sapien
aggacaggcaccttcgtgtggcctc

SEQ ID NO: 3252266 - DNA, 25 bp, Homo sapien
gtggcctccgaggtcgacccaggac

SEQ ID NO: 3252267 - DNA, 25 bp, Homo sapien
cgtgtggcctccgaggtcgacccag

SEQ ID NO: 3252268 - DNA, 25 bp, Homo sapien
aggcaatgtggccgggggaaccagg

SEQ ID NO: 3252269 - DNA, 25 bp, Homo sapien
tggcctcatgtgatttctgaacgaa

SEQ ID NO: 3252270 - DNA, 25 bp, Homo sapien
tttctgaacgaagggcactggcagg

SEQ ID NO: 3252271 - DNA, 25 bp, Homo sapien
tcatgtgatttctgaacgaagggca

SEQ ID NO: 3252272 - DNA, 25 bp, Homo sapien
tcagaaaaatgaggacggccatgtc

SEQ ID NO: 3252273 - DNA, 25 bp, Homo sapien
ccaaagcaatgatgatgaggtacac

SEQ ID NO: 3252274 - DNA, 25 bp, Homo sapien
tcccaaagctgtagggacaggccct

SEQ ID NO: 3252275 - DNA, 25 bp, Homo sapien
catcaatggccaggaactctcagta

SEQ ID NO: 3252276 - DNA, 25 bp, Homo sapien
aatgatgtctgaacacggatgtagg

SEQ ID NO: 3252277 - DNA, 25 bp, Homo sapien
gatgtagggcttgggtgttgggaca

SEQ ID NO: 3252278 - DNA, 25 bp, Homo sapien
aggcagctactggtacccacactca

SEQ ID NO: 3252279 - DNA, 25 bp, Homo sapien
gctactggtacccacactcacagta

SEQ ID NO: 3252280 - DNA, 25 bp, Homo sapien
tgaccgtgaggtcggagtgtagcgc

SEQ ID NO: 3252281 - DNA, 25 bp, Homo sapien
ggctaaccgacccagtggagcttgg

SEQ ID NO: 3252282 - DNA, 25 bp, Homo sapien
ctgcttgtaggaccggtcatcctga

SEQ ID NO: 3252283 - DNA, 25 bp, Homo sapien
cttgggctggaggtccgacactgct

SEQ ID NO: 3252284 - DNA, 25 bp, Homo sapien
ggcagctctctatgtcactgattaa

SEQ ID NO: 3252285 - DNA, 25 bp, Homo sapien
tcttttgtagagagacacgtccagt

SEQ ID NO: 3252286 - DNA, 25 bp, Homo sapien
gatctgctcagggtagacccgcgtc

SEQ ID NO: 3252287 - DNA, 25 bp, Homo sapien
tccacgaggactgggtgcttccaca

SEQ ID NO: 3252288 - DNA, 25 bp, Homo sapien
ctcggtcggcgttggcgagagcaac

SEQ ID NO: 3252289 - DNA, 25 bp, Homo sapien
cggcgttggcgagagcaactgaggg

SEQ ID NO: 3252290 - DNA, 25 bp, Homo sapien
tcggtcggcgttggcgagagcaact

SEQ ID NO: 3252291 - DNA, 25 bp, Homo sapien
ggtcggcgttggcgagagcaactga

SEQ ID NO: 3252292 - DNA, 25 bp, Homo sapien
aaaggaagacactggctcagggcac

SEQ ID NO: 3252293 - DNA, 25 bp, Homo sapien
gtccacctgccgaggcaggccccat

SEQ ID NO: 3252294 - DNA, 25 bp, Homo sapien
gcccagccctgtccacctgccgagg

SEQ ID NO: 3252295 - DNA, 25 bp, Homo sapien
ccagccctgtccacctgccgaggca

SEQ ID NO: 3252296 - DNA, 25 bp, Homo sapien
ccctgtccacctgccgaggcaggcc

SEQ ID NO: 3252297 - DNA, 25 bp, Homo sapien
ctgaaataggatgtgcacatggcta

SEQ ID NO: 3252298 - DNA, 25 bp, Homo sapien
cagtgccttgggcattactgaaata

SEQ ID NO: 3252299 - DNA, 25 bp, Homo sapien
ctccttcagcaacggcagctttggg

SEQ ID NO: 3252300 - DNA, 25 bp, Homo sapien
ggcattactgaaataggatgtgcac

SEQ ID NO: 3252301 - DNA, 25 bp, Homo sapien
ccaagtccctgtagtccaggatctc

SEQ ID NO: 3252302 - DNA, 25 bp, Homo sapien
tagggtgagtaggagatcatgtcgg

SEQ ID NO: 3252303 - DNA, 25 bp, Homo sapien
ctgatgtagggtgagtaggagatca

SEQ ID NO: 3252304 - DNA, 25 bp, Homo sapien
catgtcggggcggtcgatgtcatag

SEQ ID NO: 3252305 - DNA, 25 bp, Homo sapien
tgtggctccattacttagaggctgc

SEQ ID NO: 3252306 - DNA, 25 bp, Homo sapien
tctcagagtggcatcagcgacgtgg

SEQ ID NO: 3252307 - DNA, 25 bp, Homo sapien
cagaattgggagcacgtgtccttgc

SEQ ID NO: 3252308 - DNA, 25 bp, Homo sapien
caaagtcagctcatatctcagagtg

SEQ ID NO: 3252309 - DNA, 25 bp, Homo sapien
ctctcctgtggacgggaactccttc

SEQ ID NO: 3252310 - DNA, 25 bp, Homo sapien
agctgagacacagtgcaccacgctg

SEQ ID NO: 3252311 - DNA, 25 bp, Homo sapien
gggtctgccccgatctctcctgtgg

SEQ ID NO: 3252312 - DNA, 25 bp, Homo sapien
tgccccactggtgcagaaattcttt

SEQ ID NO: 3252313 - DNA, 25 bp, Homo sapien
tgcgtcatggtaactgaggactcgt

SEQ ID NO: 3252314 - DNA, 25 bp, Homo sapien
aggactcgtgcacccctcagtggca

SEQ ID NO: 3252315 - DNA, 25 bp, Homo sapien
gtcatggtaactgaggactcgtgca

SEQ ID NO: 3252316 - DNA, 25 bp, Homo sapien
gcagtgcgtcatggtaactgaggac

SEQ ID NO: 3252317 - DNA, 25 bp, Homo sapien
tgtcaggattaaggtcaggaaggac

SEQ ID NO: 3252318 - DNA, 25 bp, Homo sapien
ctgtcaggattaaggtcaggaagga

SEQ ID NO: 3252319 - DNA, 25 bp, Homo sapien
acggctcggagaccctgaggtgctg

SEQ ID NO: 3252320 - DNA, 25 bp, Homo sapien
cggctcggagaccctgaggtgctgg

SEQ ID NO: 3252321 - DNA, 25 bp, Homo sapien
aatcacacggctcggagaccctgag

SEQ ID NO: 3252322 - DNA, 25 bp, Homo sapien
ataaatcacacggctcggagaccct

SEQ ID NO: 3252323 - DNA, 25 bp, Homo sapien
cagaggcgtcattttccaccgggat

SEQ ID NO: 3252324 - DNA, 25 bp, Homo sapien
caagccattctgcaagctccggtta

SEQ ID NO: 3252325 - DNA, 25 bp, Homo sapien
gcagcttagtccactggcccaggtt

SEQ ID NO: 3252326 - DNA, 25 bp, Homo sapien
gagtgatgcacaggccaagccattc

SEQ ID NO: 3252327 - DNA, 25 bp, Homo sapien
ggctgcacctgctgtccctccccac

SEQ ID NO: 3252328 - DNA, 25 bp, Homo sapien
gcaggaggacaaccctgtgcggcat

SEQ ID NO: 3252329 - DNA, 25 bp, Homo sapien
cagcaggaggacaaccctgtgcggc

SEQ ID NO: 3252330 - DNA, 25 bp, Homo sapien
agcgaggatgggcaacatcagcgcc

SEQ ID NO: 3252331 - DNA, 25 bp, Homo sapien
gatgggcaacatcagcgccggatgt

SEQ ID NO: 3252332 - DNA, 25 bp, Homo sapien
ctcctgggaccacggatttctgcag

SEQ ID NO: 3252333 - DNA, 25 bp, Homo sapien
gaccacggatttctgcaggctggca

SEQ ID NO: 3252334 - DNA, 25 bp, Homo sapien
gggtcctcagtcatgcccacgatgg

SEQ ID NO: 3252335 - DNA, 25 bp, Homo sapien
caggtgggcatcaactctggggtct

SEQ ID NO: 3252336 - DNA, 25 bp, Homo sapien
tcgacacgccggatgccagatggag

SEQ ID NO: 3252337 - DNA, 25 bp, Homo sapien
tctggctgcttgtcgacacgccgga

SEQ ID NO: 3252338 - DNA, 25 bp, Homo sapien
tgcttgtcgacacgccggatgccag

SEQ ID NO: 3252339 - DNA, 25 bp, Homo sapien
tggctgcttgtcgacacgccggatg

SEQ ID NO: 3252340 - DNA, 25 bp, Homo sapien
tgttgacaaattcccaagagggaaa

SEQ ID NO: 3252341 - DNA, 25 bp, Homo sapien
ctgttgacaaattcccaagagggaa

SEQ ID NO: 3252342 - DNA, 25 bp, Homo sapien
cccaagagggaaatgattagagtta

SEQ ID NO: 3252343 - DNA, 25 bp, Homo sapien
ggaaatgattagagttatttcccat

SEQ ID NO: 3252344 - DNA, 25 bp, Homo sapien
cagtgaatgtcaactctctctgccc

SEQ ID NO: 3252345 - DNA, 25 bp, Homo sapien
gaattctaccttgtcaggtcactgg

SEQ ID NO: 3252346 - DNA, 25 bp, Homo sapien
tagtgcgatccttcttgtgcatggg

SEQ ID NO: 3252347 - DNA, 25 bp, Homo sapien
aagtgctttgtgagttgctgcatac

SEQ ID NO: 3252348 - DNA, 25 bp, Homo sapien
tgcctcatcgcccaggagaccgtgg

SEQ ID NO: 3252349 - DNA, 25 bp, Homo sapien
tttatgggaaagtccgcggcaggaa

SEQ ID NO: 3252350 - DNA, 25 bp, Homo sapien
gcggcaggaacggtggtggcattgc

SEQ ID NO: 3252351 - DNA, 25 bp, Homo sapien
aaataacatctgcatggagccccga

SEQ ID NO: 3252352 - DNA, 25 bp, Homo sapien
tgtggacatcgaagagggtagttcc

SEQ ID NO: 3252353 - DNA, 25 bp, Homo sapien
acacccagcatgtgtgtggacatcg

SEQ ID NO: 3252354 - DNA, 25 bp, Homo sapien
ccagcatgtgtgtggacatcgaaga

SEQ ID NO: 3252355 - DNA, 25 bp, Homo sapien
acatcgaagagggtagttccttgct

SEQ ID NO: 3252356 - DNA, 25 bp, Homo sapien
gatacatctcttcgccttctgcaaa

SEQ ID NO: 3252357 - DNA, 25 bp, Homo sapien
gcacctgacacatagcgcgcaggaa

SEQ ID NO: 3252358 - DNA, 25 bp, Homo sapien
aagggtggtagtgcttctctccggc

SEQ ID NO: 3252359 - DNA, 25 bp, Homo sapien
tctgcaaacatctggccgcacctga

SEQ ID NO: 3252360 - DNA, 25 bp, Homo sapien
aagcagaatgtttctactaaagcca

SEQ ID NO: 3252361 - DNA, 25 bp, Homo sapien
caaagcagaatgtttctactaaagc

SEQ ID NO: 3252362 - DNA, 25 bp, Homo sapien
agaaaggtcggctgggtcccagcgc

SEQ ID NO: 3252363 - DNA, 25 bp, Homo sapien
aaagcagaatgtttctactaaagcc

SEQ ID NO: 3252364 - DNA, 25 bp, Homo sapien
cagttcagagctctagtttcctttc

SEQ ID NO: 3252365 - DNA, 25 bp, Homo sapien
tcggcccagttcagagctctagttt

SEQ ID NO: 3252366 - DNA, 25 bp, Homo sapien
cagctgctcctcacagtcatcggcc

SEQ ID NO: 3252367 - DNA, 25 bp, Homo sapien
gctcctcacagtcatcggcccagtt

SEQ ID NO: 3252368 - DNA, 25 bp, Homo sapien
ttctgaacaaggcaacacggtgccc

SEQ ID NO: 3252369 - DNA, 25 bp, Homo sapien
gcagaatcccgcctgtggatgttca

SEQ ID NO: 3252370 - DNA, 25 bp, Homo sapien
tgagcggccctagaggaccagagaa

SEQ ID NO: 3252371 - DNA, 25 bp, Homo sapien
tttgggaaaggctagggcagaatcc

SEQ ID NO: 3252372 - DNA, 25 bp, Homo sapien
acaggccagcgtggaagggtaggac

SEQ ID NO: 3252373 - DNA, 25 bp, Homo sapien
tgatgagcacattgcccggggacca

SEQ ID NO: 3252374 - DNA, 25 bp, Homo sapien
ggtcccaccacgaagacagtgatga

SEQ ID NO: 3252375 - DNA, 25 bp, Homo sapien
agcgtgtccaggctcggagggtccc

SEQ ID NO: 3252376 - DNA, 25 bp, Homo sapien
tggagttgcgggccaggtttcctac

SEQ ID NO: 3252377 - DNA, 25 bp, Homo sapien
tcagccccttggagttgcgggccag

SEQ ID NO: 3252378 - DNA, 25 bp, Homo sapien
catcagccccttggagttgcgggcc

SEQ ID NO: 3252379 - DNA, 25 bp, Homo sapien
cccatcagccccttggagttgcggg

SEQ ID NO: 3252380 - DNA, 25 bp, Homo sapien
cccagtctgacggccctgcttgagt

SEQ ID NO: 3252381 - DNA, 25 bp, Homo sapien
tgacggccctgcttgagtgccgtgc

SEQ ID NO: 3252382 - DNA, 25 bp, Homo sapien
gtgccgtgctccctggaacgtgtgc

SEQ ID NO: 3252383 - DNA, 25 bp, Homo sapien
ttgagtgccgtgctccctggaacgt

SEQ ID NO: 3252384 - DNA, 25 bp, Homo sapien
ctcaccttcagccaacagtctgtca

SEQ ID NO: 3252385 - DNA, 25 bp, Homo sapien
ctgcgagggtggacaccctcacctt

SEQ ID NO: 3252386 - DNA, 25 bp, Homo sapien
accctcaccttcagccaacagtctg

SEQ ID NO: 3252387 - DNA, 25 bp, Homo sapien
ggtggacaccctcaccttcagccaa

SEQ ID NO: 3252388 - DNA, 25 bp, Homo sapien
acccagcggggcaccggcacactgg

SEQ ID NO: 3252389 - DNA, 25 bp, Homo sapien
ctgtcacccagcggggcaccggcac

SEQ ID NO: 3252390 - DNA, 25 bp, Homo sapien
acactgggccgagcatcaggcagtg

SEQ ID NO: 3252391 - DNA, 25 bp, Homo sapien
actgggccgagcatcaggcagtgcc

SEQ ID NO: 3252392 - DNA, 25 bp, Homo sapien
agcacgcgccccgtgatgtatttct

SEQ ID NO: 3252393 - DNA, 25 bp, Homo sapien
ccgaacttggcgtgatagtcagctt

SEQ ID NO: 3252394 - DNA, 25 bp, Homo sapien
cacgcgccccgtgatgtatttctca

SEQ ID NO: 3252395 - DNA, 25 bp, Homo sapien
gtcacagcggatgccgaacttggcg

SEQ ID NO: 3252396 - DNA, 25 bp, Homo sapien
ccatgcggaaggcttgcctgcctca

SEQ ID NO: 3252397 - DNA, 25 bp, Homo sapien
caccatgcggaaggcttgcctgcct

SEQ ID NO: 3252398 - DNA, 25 bp, Homo sapien
ctgcaccatgcggaaggcttgcctg

SEQ ID NO: 3252399 - DNA, 25 bp, Homo sapien
tgcaccatgcggaaggcttgcctgc

SEQ ID NO: 3252400 - DNA, 25 bp, Homo sapien
ctgcctccattcaaggccattatct

SEQ ID NO: 3252401 - DNA, 25 bp, Homo sapien
gcctccattcaaggccattatcttc

SEQ ID NO: 3252402 - DNA, 25 bp, Homo sapien
atgtttggtgtcgatggcagctgcc

SEQ ID NO: 3252403 - DNA, 25 bp, Homo sapien
gcacatttgtgggacatgtttggtg

SEQ ID NO: 3252404 - DNA, 25 bp, Homo sapien
cccacagctcttgcacttaaaacag

SEQ ID NO: 3252405 - DNA, 25 bp, Homo sapien
tactcggcattcaggagcttcccac

SEQ ID NO: 3252406 - DNA, 25 bp, Homo sapien
agtgcttgtccaaggctaccagggc

SEQ ID NO: 3252407 - DNA, 25 bp, Homo sapien
ttaaaacagcccaagtgccagtgct

SEQ ID NO: 3252408 - DNA, 25 bp, Homo sapien
gggctccacagccagcatcatgggc

SEQ ID NO: 3252409 - DNA, 25 bp, Homo sapien
acagccagcatcatgggcatgctcc

SEQ ID NO: 3252410 - DNA, 25 bp, Homo sapien
gctccacagccagcatcatgggcat

SEQ ID NO: 3252411 - DNA, 25 bp, Homo sapien
tccacagccagcatcatgggcatgc

SEQ ID NO: 3252412 - DNA, 25 bp, Homo sapien
aaagccgttggtcaagctcaggatt

SEQ ID NO: 3252413 - DNA, 25 bp, Homo sapien
tgcacattcacatgctactttggaa

SEQ ID NO: 3252414 - DNA, 25 bp, Homo sapien
aagctcaggatttcctaagtgacca

SEQ ID NO: 3252415 - DNA, 25 bp, Homo sapien
agtgaccacactgtgcacattcaca

SEQ ID NO: 3252416 - DNA, 25 bp, Homo sapien
ctgtggactagagctgtcagcggca

SEQ ID NO: 3252417 - DNA, 25 bp, Homo sapien
ctgcgcatggcagctcagagtcctg

SEQ ID NO: 3252418 - DNA, 25 bp, Homo sapien
tgctttgcgggctctgcgcatggca

SEQ ID NO: 3252419 - DNA, 25 bp, Homo sapien
tttctaaacacatccggagctccac

SEQ ID NO: 3252420 - DNA, 25 bp, Homo sapien
gaagctgaggcatgcggggtgttcg

SEQ ID NO: 3252421 - DNA, 25 bp, Homo sapien
caggggacctcccaacgagagtggt

SEQ ID NO: 3252422 - DNA, 25 bp, Homo sapien
ctgtgcggcccaccctaaaggattt

SEQ ID NO: 3252423 - DNA, 25 bp, Homo sapien
gcatgcggggtgttcgctgctcctt

SEQ ID NO: 3252424 - DNA, 25 bp, Homo sapien
tctggtgttggtgtctcagtgccat

SEQ ID NO: 3252425 - DNA, 25 bp, Homo sapien
acaccacggcgtggctttggaggaa

SEQ ID NO: 3252426 - DNA, 25 bp, Homo sapien
ggcctccagatgtaccgagaacacc

SEQ ID NO: 3252427 - DNA, 25 bp, Homo sapien
gccatctggtgttggtgtctcagtg

SEQ ID NO: 3252428 - DNA, 25 bp, Homo sapien
ctgggggtgcccacgctgcagtccc

SEQ ID NO: 3252429 - DNA, 25 bp, Homo sapien
tgcccacgctgcagtcccgtccact

SEQ ID NO: 3252430 - DNA, 25 bp, Homo sapien
tgcagtcccgtccactcacacggct

SEQ ID NO: 3252431 - DNA, 25 bp, Homo sapien
gctgcagtcccgtccactcacacgg

SEQ ID NO: 3252432 - DNA, 25 bp, Homo sapien
gcccacgctgcagccccgtccactc

SEQ ID NO: 3252433 - DNA, 25 bp, Homo sapien
atggctctgggggtgcccacgctgc

SEQ ID NO: 3252434 - DNA, 25 bp, Homo sapien
ccacgctgcagccccgtccactcac

SEQ ID NO: 3252435 - DNA, 25 bp, Homo sapien
ggctctgggggtgcccacgctgcag

SEQ ID NO: 3252436 - DNA, 25 bp, Homo sapien
tgcagccccgtccactcacgtgggt

SEQ ID NO: 3252437 - DNA, 25 bp, Homo sapien
cagccctgtccactcacgcaggtct

SEQ ID NO: 3252438 - DNA, 25 bp, Homo sapien
tgtccactcacgcaggtctgggggt

SEQ ID NO: 3252439 - DNA, 25 bp, Homo sapien
cgggtctggggggtgcccacgctgc

SEQ ID NO: 3252440 - DNA, 25 bp, Homo sapien
caccgatacgggcagggaacacttc

SEQ ID NO: 3252441 - DNA, 25 bp, Homo sapien
acacttctggcacatgcattccttc

SEQ ID NO: 3252442 - DNA, 25 bp, Homo sapien
attccttcccgttgaaggtcactcg

SEQ ID NO: 3252443 - DNA, 25 bp, Homo sapien
ccctgggacaggtgcgcgctgctgc

SEQ ID NO: 3252444 - DNA, 25 bp, Homo sapien
ctgaaacaagagagctcgttaccag

SEQ ID NO: 3252445 - DNA, 25 bp, Homo sapien
gagagctcgttaccagccaggccca

SEQ ID NO: 3252446 - DNA, 25 bp, Homo sapien
gaaacaagagagctcgttaccagcc

SEQ ID NO: 3252447 - DNA, 25 bp, Homo sapien
acaagagagctcgttaccagccagg

SEQ ID NO: 3252448 - DNA, 25 bp, Homo sapien
gggctggcatccagtaccctcggtc

SEQ ID NO: 3252449 - DNA, 25 bp, Homo sapien
tcccactgggccagtaccttctggg

SEQ ID NO: 3252450 - DNA, 25 bp, Homo sapien
ctgggttcccactgggccagtacct

SEQ ID NO: 3252451 - DNA, 25 bp, Homo sapien
gtaccctcggtccatgcagcaggtg

SEQ ID NO: 3252452 - DNA, 25 bp, Homo sapien
ctagacatactccttgtcatcgtca

SEQ ID NO: 3252453 - DNA, 25 bp, Homo sapien
tagacatactccttgtcatcgtcac

SEQ ID NO: 3252454 - DNA, 25 bp, Homo sapien
cttagcatcctctgacgaaggttcc

SEQ ID NO: 3252455 - DNA, 25 bp, Homo sapien
aactgctttggaaacaacattgaaa

SEQ ID NO: 3252456 - DNA, 25 bp, Homo sapien
cacagggaactgctttggaaacaac

SEQ ID NO: 3252457 - DNA, 25 bp, Homo sapien
tgtaaccacagggaactgctttgga

SEQ ID NO: 3252458 - DNA, 25 bp, Homo sapien
gaactgctttggaaacaacattgaa

SEQ ID NO: 3252459 - DNA, 25 bp, Homo sapien
ggaggcctctgtatgcaccaagaca

SEQ ID NO: 3252460 - DNA, 25 bp, Homo sapien
gaggcctctgtatgcaccaagacag

SEQ ID NO: 3252461 - DNA, 25 bp, Homo sapien
ggcctctgtatgcaccaagacagaa

SEQ ID NO: 3252462 - DNA, 25 bp, Homo sapien
gaggaggcctctgtatgcaccaaga

SEQ ID NO: 3252463 - DNA, 25 bp, Homo sapien
tagagcctctggtagtccagcgtgc

SEQ ID NO: 3252464 - DNA, 25 bp, Homo sapien
cctcaatgaactggtcgcagctgaa

SEQ ID NO: 3252465 - DNA, 25 bp, Homo sapien
tgtactcgccctgccgcacgaagaa

SEQ ID NO: 3252466 - DNA, 25 bp, Homo sapien
agcgtgcagatgtactcgccctgcc

SEQ ID NO: 3252467 - DNA, 25 bp, Homo sapien
cctgtctccccacagtgtgaacaag

SEQ ID NO: 3252468 - DNA, 25 bp, Homo sapien
tctccatgccctcatggccctcgac

SEQ ID NO: 3252469 - DNA, 25 bp, Homo sapien
tctccccacagtgtgaacaaggcca

SEQ ID NO: 3252470 - DNA, 25 bp, Homo sapien
ctcatggccctcgacgcctgtctcc

SEQ ID NO: 3252471 - DNA, 25 bp, Homo sapien
ttccaataggaccagaaaatgcccg

SEQ ID NO: 3252472 - DNA, 25 bp, Homo sapien
caataggaccagaaaatgcccgctc

SEQ ID NO: 3252473 - DNA, 25 bp, Homo sapien
taacattgtggacttgctcagttcc

SEQ ID NO: 3252474 - DNA, 25 bp, Homo sapien
ttttcttggctcttgctaacattgt

SEQ ID NO: 3252475 - DNA, 25 bp, Homo sapien
gctttgcgggcccaggatcgccgct

SEQ ID NO: 3252476 - DNA, 25 bp, Homo sapien
atcgccgctgggaggcccgtttcag

SEQ ID NO: 3252477 - DNA, 25 bp, Homo sapien
ctttgcgggcccaggatcgccgctg

SEQ ID NO: 3252478 - DNA, 25 bp, Homo sapien
caggatcgccgctgggaggcccgtt

SEQ ID NO: 3252479 - DNA, 25 bp, Homo sapien
cacattcccacacgtgttgcacagg

SEQ ID NO: 3252480 - DNA, 25 bp, Homo sapien
tggaagtacttgtcctgcacccgca

SEQ ID NO: 3252481 - DNA, 25 bp, Homo sapien
gggcgacttctccagcgggctggga

SEQ ID NO: 3252482 - DNA, 25 bp, Homo sapien
caggatcgccgtgctgggcgacttc

SEQ ID NO: 3252483 - DNA, 25 bp, Homo sapien
gggtcggtctgttgtctccttttgc

SEQ ID NO: 3252484 - DNA, 25 bp, Homo sapien
caccagcacgagccgcacggggcat

SEQ ID NO: 3252485 - DNA, 25 bp, Homo sapien
gggcatcggggtcggtctgttgtct

SEQ ID NO: 3252486 - DNA, 25 bp, Homo sapien
cgcacggggcatcggggtcggtctg

SEQ ID NO: 3252487 - DNA, 25 bp, Homo sapien
gggtccctgtgggctcagtctgcag

SEQ ID NO: 3252488 - DNA, 25 bp, Homo sapien
cctgggcctgcctccggttttgcaa

SEQ ID NO: 3252489 - DNA, 25 bp, Homo sapien
tttgcaaactggacggggcacagcc

SEQ ID NO: 3252490 - DNA, 25 bp, Homo sapien
gcaggcttgtcccacgcgccttttg

SEQ ID NO: 3252491 - DNA, 25 bp, Homo sapien
tgcagctgccaaattgtgaggacgg

SEQ ID NO: 3252492 - DNA, 25 bp, Homo sapien
tatcgcacacatgggcttacacaag

SEQ ID NO: 3252493 - DNA, 25 bp, Homo sapien
gcttacacaagatgcccaggaacgg

SEQ ID NO: 3252494 - DNA, 25 bp, Homo sapien
caggaacgggttctctaaatccgtg

SEQ ID NO: 3252495 - DNA, 25 bp, Homo sapien
ccacttctgctatcgcacacatggg

SEQ ID NO: 3252496 - DNA, 25 bp, Homo sapien
tgtgcatctccatcatatccgaatg

SEQ ID NO: 3252497 - DNA, 25 bp, Homo sapien
cctgtgcatctccatcatatccgaa

SEQ ID NO: 3252498 - DNA, 25 bp, Homo sapien
tgcatctccatcatatccgaatggc

SEQ ID NO: 3252499 - DNA, 25 bp, Homo sapien
tggggagtctcgctgccccctgtgc

SEQ ID NO: 3252500 - DNA, 25 bp, Homo sapien
ctatgtgactgctagttttaattgt

SEQ ID NO: 3252501 - DNA, 25 bp, Homo sapien
tgtgactgctagttttaattgtgga

SEQ ID NO: 3252502 - DNA, 25 bp, Homo sapien
gactgctagttttaattgtggatac

SEQ ID NO: 3252503 - DNA, 25 bp, Homo sapien
tgactgctagttttaattgtggata

SEQ ID NO: 3252504 - DNA, 25 bp, Homo sapien
catgtgaatcgcgatctgcagtgct

SEQ ID NO: 3252505 - DNA, 25 bp, Homo sapien
agtcgatctgcagtgctgatggcca

SEQ ID NO: 3252506 - DNA, 25 bp, Homo sapien
gctctgccatcagcgttgacggtct

SEQ ID NO: 3252507 - DNA, 25 bp, Homo sapien
tgacggtccgtccagcacagttgtc

SEQ ID NO: 3252508 - DNA, 25 bp, Homo sapien
acggacatcgtcacctgctgtctgc

SEQ ID NO: 3252509 - DNA, 25 bp, Homo sapien
gggcatccacggctgtcctcagaat

SEQ ID NO: 3252510 - DNA, 25 bp, Homo sapien
atctgggacacggacatcgtcacct

SEQ ID NO: 3252511 - DNA, 25 bp, Homo sapien
agaaggcatcgcagactcagctgag

SEQ ID NO: 3252512 - DNA, 25 bp, Homo sapien
gcttgcaaagggccagcgggtcggc

SEQ ID NO: 3252513 - DNA, 25 bp, Homo sapien
cctggcacccccatggagcgtggct

SEQ ID NO: 3252514 - DNA, 25 bp, Homo sapien
acaaggtcacgtggcagctgccacc

SEQ ID NO: 3252515 - DNA, 25 bp, Homo sapien
gagtggaccggggaagagcctctgt

SEQ ID NO: 3252516 - DNA, 25 bp, Homo sapien
acagcatcccgcatccctgagcaca

SEQ ID NO: 3252517 - DNA, 25 bp, Homo sapien
agcagcccgcatccctgagcacagc

SEQ ID NO: 3252518 - DNA, 25 bp, Homo sapien
agcagcccgcatccccagcacagca

SEQ ID NO: 3252519 - DNA, 25 bp, Homo sapien
agaagcctgcatccctgagcacagc

SEQ ID NO: 3252520 - DNA, 25 bp, Homo sapien
accagtgcattcgtccatgggggga

SEQ ID NO: 3252521 - DNA, 25 bp, Homo sapien
actaacaccagtgcattcgtccatg

SEQ ID NO: 3252522 - DNA, 25 bp, Homo sapien
taacaccagtgcattcgtccatggg

SEQ ID NO: 3252523 - DNA, 25 bp, Homo sapien
acaccagtgcattcgtccatggggg

SEQ ID NO: 3252524 - DNA, 25 bp, Homo sapien
gtgaacagcgaggtgagtgccctct

SEQ ID NO: 3252525 - DNA, 25 bp, Homo sapien
tctgcagctgctacggctgccatgg

SEQ ID NO: 3252526 - DNA, 25 bp, Homo sapien
tgacgaacagtgaacagcgaggtga

SEQ ID NO: 3252527 - DNA, 25 bp, Homo sapien
acaggcgggcggatgggcctcatga

SEQ ID NO: 3252528 - DNA, 25 bp, Homo sapien
cgggacccaccagacaactcgtggt

SEQ ID NO: 3252529 - DNA, 25 bp, Homo sapien
caactcgtggtctgcagggcatctg

SEQ ID NO: 3252530 - DNA, 25 bp, Homo sapien
caccagacaactcgtggtctgcagg

SEQ ID NO: 3252531 - DNA, 25 bp, Homo sapien
tgagtacccgggacccaccagacaa

SEQ ID NO: 3252532 - DNA, 25 bp, Homo sapien
gccgacaaggccgagggaagcggag

SEQ ID NO: 3252533 - DNA, 25 bp, Homo sapien
agggaagcggaggaaggaaggtgca

SEQ ID NO: 3252534 - DNA, 25 bp, Homo sapien
gacaaggccgagggaagcggaggaa

SEQ ID NO: 3252535 - DNA, 25 bp, Homo sapien
caaggccgagggaagcggaggaagg

SEQ ID NO: 3252536 - DNA, 25 bp, Homo sapien
atggcaggggatttcatgccaggca

SEQ ID NO: 3252537 - DNA, 25 bp, Homo sapien
tgccagaggaggaccgcatcgtgca

SEQ ID NO: 3252538 - DNA, 25 bp, Homo sapien
gaccgcatcgtgcaccacctggagg

SEQ ID NO: 3252539 - DNA, 25 bp, Homo sapien
gcaggaacttcgtgaaacagtgcca

SEQ ID NO: 3252540 - DNA, 25 bp, Homo sapien
cactgccccaacatcacccctgggg

SEQ ID NO: 3252541 - DNA, 25 bp, Homo sapien
ttttccatgtgcgatcccggggaca

SEQ ID NO: 3252542 - DNA, 25 bp, Homo sapien
tgtcattttccatgtgcgatcccgg

SEQ ID NO: 3252543 - DNA, 25 bp, Homo sapien
gtcattttccatgtgcgatcccggg

SEQ ID NO: 3252544 - DNA, 25 bp, Homo sapien
tccatgtgcgatcccggggacactg

SEQ ID NO: 3252545 - DNA, 25 bp, Homo sapien
gaggacagacgccagcgaggacaga

SEQ ID NO: 3252546 - DNA, 25 bp, Homo sapien
ccatcgtgccctgaggacagacgcc

SEQ ID NO: 3252547 - DNA, 25 bp, Homo sapien
gctttcaggggagccagtacaaggc

SEQ ID NO: 3252548 - DNA, 25 bp, Homo sapien
ggggagccagtacaaggccccatcg

SEQ ID NO: 3252549 - DNA, 25 bp, Homo sapien
ttgctcaaggatctggtgcccactg

SEQ ID NO: 3252550 - DNA, 25 bp, Homo sapien
cacacgagggttagacaggctgccc

SEQ ID NO: 3252551 - DNA, 25 bp, Homo sapien
taggctctaaccaagtctggctggg

SEQ ID NO: 3252552 - DNA, 25 bp, Homo sapien
tatataaacaatcgctctggccacc

SEQ ID NO: 3252553 - DNA, 25 bp, Homo sapien
gcgctgcgacagccagaccctcggg

SEQ ID NO: 3252554 - DNA, 25 bp, Homo sapien
ggggcggcccggcgctgcgacagcc

SEQ ID NO: 3252555 - DNA, 25 bp, Homo sapien
ccctcgggcccgcaggtgccgcgcc

SEQ ID NO: 3252556 - DNA, 25 bp, Homo sapien
cagaccctcgggcccgcaggtgccg

SEQ ID NO: 3252557 - DNA, 25 bp, Homo sapien
aacagacgaggaccgtcaggaacac

SEQ ID NO: 3252558 - DNA, 25 bp, Homo sapien
cagaaacagacgaggaccgtcagga

SEQ ID NO: 3252559 - DNA, 25 bp, Homo sapien
tcagcagaaacagacgaggaccgtc

SEQ ID NO: 3252560 - DNA, 25 bp, Homo sapien
ttcctgttcagcagaaacagacgag

SEQ ID NO: 3252561 - DNA, 25 bp, Homo sapien
gatcaagcaagacatcgtgtccctt

SEQ ID NO: 3252562 - DNA, 25 bp, Homo sapien
tgttctgtgggcctcccaatcgggt

SEQ ID NO: 3252563 - DNA, 25 bp, Homo sapien
ccaatcgggtgttcccttgaggtca

SEQ ID NO: 3252564 - DNA, 25 bp, Homo sapien
ttcgaagaagcttaatcaggagccc

SEQ ID NO: 3252565 - DNA, 25 bp, Homo sapien
tgaactttcgtcagggagaggtccc

SEQ ID NO: 3252566 - DNA, 25 bp, Homo sapien
agagaagacgcagacaccagtgggc

SEQ ID NO: 3252567 - DNA, 25 bp, Homo sapien
gaggtccccatgtaggtttctgagc

SEQ ID NO: 3252568 - DNA, 25 bp, Homo sapien
gccaactatctgctttcttgcacag

SEQ ID NO: 3252569 - DNA, 25 bp, Homo sapien
tctgattttccgctagaggacagcg

SEQ ID NO: 3252570 - DNA, 25 bp, Homo sapien
tgttcttctgattttccgctagagg

SEQ ID NO: 3252571 - DNA, 25 bp, Homo sapien
tcttctgattttccgctagaggaca

SEQ ID NO: 3252572 - DNA, 25 bp, Homo sapien
attttccgctagaggacagcggcgg

SEQ ID NO: 3252573 - DNA, 25 bp, Homo sapien
gcttgcggccctccaggaattccag

SEQ ID NO: 3252574 - DNA, 25 bp, Homo sapien
aggagcttgcggccctccaggaatt

SEQ ID NO: 3252575 - DNA, 25 bp, Homo sapien
gagcttgcggccctccaggaattcc

SEQ ID NO: 3252576 - DNA, 25 bp, Homo sapien
agcttgcggccctccaggaattcca

SEQ ID NO: 3252577 - DNA, 25 bp, Homo sapien
tcgggcaatgtgagctcccaaggtg

SEQ ID NO: 3252578 - DNA, 25 bp, Homo sapien
ctgacaagggtgatgctcgggcaat

SEQ ID NO: 3252579 - DNA, 25 bp, Homo sapien
tggggcctgtccgaaatccctggtc

SEQ ID NO: 3252580 - DNA, 25 bp, Homo sapien
gtgatgctcgggcaatgtgagctcc

SEQ ID NO: 3252581 - DNA, 25 bp, Homo sapien
cagggcgggtgctgcctcgaatggg

SEQ ID NO: 3252582 - DNA, 25 bp, Homo sapien
tcccatgtatgagaaatgggccaat

SEQ ID NO: 3252583 - DNA, 25 bp, Homo sapien
gcctggtgttcccatgtatgagaaa

SEQ ID NO: 3252584 - DNA, 25 bp, Homo sapien
gggtttcaggcgaagggccagcctg

SEQ ID NO: 3252585 - DNA, 25 bp, Homo sapien
gggactggacgcagaggctgttggg

SEQ ID NO: 3252586 - DNA, 25 bp, Homo sapien
agggcagaggagaggctgccctggg

SEQ ID NO: 3252587 - DNA, 25 bp, Homo sapien
agaggagggcagaggagaggctgcc

SEQ ID NO: 3252588 - DNA, 25 bp, Homo sapien
agaggagaggctgccctgggggtga

SEQ ID NO: 3252589 - DNA, 25 bp, Homo sapien
aggagggcagaggagaggctgccct

SEQ ID NO: 3252590 - DNA, 25 bp, Homo sapien
gggaccttcgagatggataattaaa

SEQ ID NO: 3252591 - DNA, 25 bp, Homo sapien
tgtcctgggaccttcgagatggata

SEQ ID NO: 3252592 - DNA, 25 bp, Homo sapien
ttggtggtggcgctaaaaagccaca

SEQ ID NO: 3252593 - DNA, 25 bp, Homo sapien
tggtggtggcgctaaaaagccacag

SEQ ID NO: 3252594 - DNA, 25 bp, Homo sapien
gaggaagtgaccactccatgaggtt

SEQ ID NO: 3252595 - DNA, 25 bp, Homo sapien
tgtgttggacccgaggcacgaatgt

SEQ ID NO: 3252596 - DNA, 25 bp, Homo sapien
tgaccctcggtggagaagactcgct

SEQ ID NO: 3252597 - DNA, 25 bp, Homo sapien
cactccatgaggttgtgttgatgga

SEQ ID NO: 3252598 - DNA, 25 bp, Homo sapien
ggtgggtgcccagagttgcacccat

SEQ ID NO: 3252599 - DNA, 25 bp, Homo sapien
cttcagcagtgggacctttgtcaag

SEQ ID NO: 3252600 - DNA, 25 bp, Homo sapien
attccacagggaagctgccagtaga

SEQ ID NO: 3252601 - DNA, 25 bp, Homo sapien
caagggtggaagcattacccagtcc

SEQ ID NO: 3252602 - DNA, 25 bp, Homo sapien
tcgagttcttttcagggcagcgagg

SEQ ID NO: 3252603 - DNA, 25 bp, Homo sapien
cagcgaggggcatgcctagggcatc

SEQ ID NO: 3252604 - DNA, 25 bp, Homo sapien
ctgggccatcctcgagttcttttca

SEQ ID NO: 3252605 - DNA, 25 bp, Homo sapien
ccatcctcgagttcttttcagggca

SEQ ID NO: 3252606 - DNA, 25 bp, Homo sapien
ttgaggtaagcgtcagcccctgggc

SEQ ID NO: 3252607 - DNA, 25 bp, Homo sapien
cagggacttgaggtaagcgtcagcc

SEQ ID NO: 3252608 - DNA, 25 bp, Homo sapien
gacttgaggtaagcgtcagcccctg

SEQ ID NO: 3252609 - DNA, 25 bp, Homo sapien
gggacttgaggtaagcgtcagcccc

SEQ ID NO: 3252610 - DNA, 25 bp, Homo sapien
gctgcctctgaggaacacgccgcag

SEQ ID NO: 3252611 - DNA, 25 bp, Homo sapien
ttcctgcgtgctacggccctgtggg

SEQ ID NO: 3252612 - DNA, 25 bp, Homo sapien
ctctgaggaacacgccgcaggtatg

SEQ ID NO: 3252613 - DNA, 25 bp, Homo sapien
ctggttcctgcgtgctacggccctg

SEQ ID NO: 3252614 - DNA, 25 bp, Homo sapien
gatctttacactttcttgaggactt

SEQ ID NO: 3252615 - DNA, 25 bp, Homo sapien
tggatctttacactttcttgaggac

SEQ ID NO: 3252616 - DNA, 25 bp, Homo sapien
gttggatctttacactttcttgagg

SEQ ID NO: 3252617 - DNA, 25 bp, Homo sapien
ggttggatctttacactttcttgag

SEQ ID NO: 3252618 - DNA, 25 bp, Homo sapien
acccggcaccgcagtggctataact

SEQ ID NO: 3252619 - DNA, 25 bp, Homo sapien
gcaccgcagtggctataactggcca

SEQ ID NO: 3252620 - DNA, 25 bp, Homo sapien
tttccaacaaccaaatggaccagca

SEQ ID NO: 3252621 - DNA, 25 bp, Homo sapien
tataactggccactctgatgccgcc

SEQ ID NO: 3252622 - DNA, 25 bp, Homo sapien
cctcctttggaaagcaagtctcatg

SEQ ID NO: 3252623 - DNA, 25 bp, Homo sapien
gcctcttggcgtcagatgtctcctg

SEQ ID NO: 3252624 - DNA, 25 bp, Homo sapien
aagtctcatgggctgcaccctgctc

SEQ ID NO: 3252625 - DNA, 25 bp, Homo sapien
cagcttccccggagggtctcttggg

SEQ ID NO: 3252626 - DNA, 25 bp, Homo sapien
ctggcaaatggaggcacgaacgcag

SEQ ID NO: 3252627 - DNA, 25 bp, Homo sapien
ctcgctgaggacagcatccaaggga

SEQ ID NO: 3252628 - DNA, 25 bp, Homo sapien
tcctggaccgtgagaagtcgctctt

SEQ ID NO: 3252629 - DNA, 25 bp, Homo sapien
gaaggcacagctgaagatctacacg

SEQ ID NO: 3252630 - DNA, 25 bp, Homo sapien
gaatattctcgaacacccgttctga

SEQ ID NO: 3252631 - DNA, 25 bp, Homo sapien
tgttaactgcatgtttgacaaatga

SEQ ID NO: 3252632 - DNA, 25 bp, Homo sapien
tgctgcagaaatcgtggccaggctg

SEQ ID NO: 3252633 - DNA, 25 bp, Homo sapien
cccgttctgaacaatggcctgcgct

SEQ ID NO: 3252634 - DNA, 25 bp, Homo sapien
tgtcctgattcgtggataggctggt

SEQ ID NO: 3252635 - DNA, 25 bp, Homo sapien
tgagggctgcgtcctgattcatgga

SEQ ID NO: 3252636 - DNA, 25 bp, Homo sapien
attcgtggataggctggtgagggct

SEQ ID NO: 3252637 - DNA, 25 bp, Homo sapien
aggtgagggccgtgttctgattcgt

SEQ ID NO: 3252638 - DNA, 25 bp, Homo sapien
cccacatggccaggtagcgtgggat

SEQ ID NO: 3252639 - DNA, 25 bp, Homo sapien
ccagcaggtagaacagcccctgttg

SEQ ID NO: 3252640 - DNA, 25 bp, Homo sapien
cccacgtggccaggtagcatgggac

SEQ ID NO: 3252641 - DNA, 25 bp, Homo sapien
caggaaatcccagtttcctgacggg

SEQ ID NO: 3252642 - DNA, 25 bp, Homo sapien
ggaaccgggtctggagattctgccc

SEQ ID NO: 3252643 - DNA, 25 bp, Homo sapien
tgcatcggtgtccaccacatgaagc

SEQ ID NO: 3252644 - DNA, 25 bp, Homo sapien
ggtgtccaccacatgaagccacttc

SEQ ID NO: 3252645 - DNA, 25 bp, Homo sapien
cattcacactgtccctgcatcggtg

SEQ ID NO: 3252646 - DNA, 25 bp, Homo sapien
cttgcagcctggcttcggagtccca

SEQ ID NO: 3252647 - DNA, 25 bp, Homo sapien
ggctctgtctgggtcgcgctcacct

SEQ ID NO: 3252648 - DNA, 25 bp, Homo sapien
tcactcacagatgggctgtgctctc

SEQ ID NO: 3252649 - DNA, 25 bp, Homo sapien
tcggagtcccaagatcccttgcagg

SEQ ID NO: 3252650 - DNA, 25 bp, Homo sapien
tccggaggagagttcggaggtcggc

SEQ ID NO: 3252651 - DNA, 25 bp, Homo sapien
ggaggagagttcggaggtcggccat

SEQ ID NO: 3252652 - DNA, 25 bp, Homo sapien
tgtccccaaagagctcccttttgcc

SEQ ID NO: 3252653 - DNA, 25 bp, Homo sapien
tctggggtccggaggagagttcgga

SEQ ID NO: 3252654 - DNA, 25 bp, Homo sapien
gcctggtcatcaactggcgcgtctg

SEQ ID NO: 3252655 - DNA, 25 bp, Homo sapien
tggtcatcaactggcgcgtctgcag

SEQ ID NO: 3252656 - DNA, 25 bp, Homo sapien
tcaactggcgcgtctgcagaaggct

SEQ ID NO: 3252657 - DNA, 25 bp, Homo sapien
ggagcagccgtagcggggaggcctg

SEQ ID NO: 3252658 - DNA, 25 bp, Homo sapien
gagccagcactggatatgggcttga

SEQ ID NO: 3252659 - DNA, 25 bp, Homo sapien
tgtgaggagccagcactggatatgg

SEQ ID NO: 3252660 - DNA, 25 bp, Homo sapien
ccagcactggatatgggcttgaggt

SEQ ID NO: 3252661 - DNA, 25 bp, Homo sapien
aggagccagcactggatatgggctt

SEQ ID NO: 3252662 - DNA, 25 bp, Homo sapien
ctgggcatgagaggcatccaggctg

SEQ ID NO: 3252663 - DNA, 25 bp, Homo sapien
gcccgggcacagagagaggggctag

SEQ ID NO: 3252664 - DNA, 25 bp, Homo sapien
catgagaggcatccaggctgtggcc

SEQ ID NO: 3252665 - DNA, 25 bp, Homo sapien
gggcatgagaggcatccaggctgtg

SEQ ID NO: 3252666 - DNA, 25 bp, Homo sapien
aaagccaagcccttggggagacatg

SEQ ID NO: 3252667 - DNA, 25 bp, Homo sapien
agccaagcccttggggagacatggg

SEQ ID NO: 3252668 - DNA, 25 bp, Homo sapien
ccaagcccttggggagacatgggca

SEQ ID NO: 3252669 - DNA, 25 bp, Homo sapien
aagccaagcccttggggagacatgg

SEQ ID NO: 3252670 - DNA, 25 bp, Homo sapien
tggccaggtgcccagtgacctcctc

SEQ ID NO: 3252671 - DNA, 25 bp, Homo sapien
ctcaccatctccacccatcagcccc

SEQ ID NO: 3252672 - DNA, 25 bp, Homo sapien
tcaccatctccacccatcagcccca

SEQ ID NO: 3252673 - DNA, 25 bp, Homo sapien
gcccagtgacctcctcaccatctcc

SEQ ID NO: 3252674 - DNA, 25 bp, Homo sapien
gccagcgttcacaagctgggtttct

SEQ ID NO: 3252675 - DNA, 25 bp, Homo sapien
ctggatctggccagcgttcacaagc

SEQ ID NO: 3252676 - DNA, 25 bp, Homo sapien
tggccagcgttcacaagctgggttt

SEQ ID NO: 3252677 - DNA, 25 bp, Homo sapien
atctggccagcgttcacaagctggg

SEQ ID NO: 3252678 - DNA, 25 bp, Homo sapien
gctcggctttgagggaagctcctgc

SEQ ID NO: 3252679 - DNA, 25 bp, Homo sapien
acggtgagtgatgctgcccaacagg

SEQ ID NO: 3252680 - DNA, 25 bp, Homo sapien
ggcagggtaggtgccaagtcctcat

SEQ ID NO: 3252681 - DNA, 25 bp, Homo sapien
gctgtgatgatggtcccaggaggac

SEQ ID NO: 3252682 - DNA, 25 bp, Homo sapien
tccgggtccattctcagagaaaggc

SEQ ID NO: 3252683 - DNA, 25 bp, Homo sapien
ctcactccgggtccattctcagaga

SEQ ID NO: 3252684 - DNA, 25 bp, Homo sapien
cactccgggtccattctcagagaaa

SEQ ID NO: 3252685 - DNA, 25 bp, Homo sapien
tgggatgcatttggcaaatgcatcc

SEQ ID NO: 3252686 - DNA, 25 bp, Homo sapien
ggaaggacacgcgacctgatcttta

SEQ ID NO: 3252687 - DNA, 25 bp, Homo sapien
agggcgcaggaaggacacgcgacct

SEQ ID NO: 3252688 - DNA, 25 bp, Homo sapien
gcaggaaggacacgcgacctgatct

SEQ ID NO: 3252689 - DNA, 25 bp, Homo sapien
atgaagggcgcaggaaggacacgcg

SEQ ID NO: 3252690 - DNA, 25 bp, Homo sapien
tccctcgctgaagggggccggcttc

SEQ ID NO: 3252691 - DNA, 25 bp, Homo sapien
tcttcccgtgcccctgtaaccgcca

SEQ ID NO: 3252692 - DNA, 25 bp, Homo sapien
ctgtaaccgccaccggcctctgcgt

SEQ ID NO: 3252693 - DNA, 25 bp, Homo sapien
cccatccctcgctgaagggggccgg

SEQ ID NO: 3252694 - DNA, 25 bp, Homo sapien
aacacacccccgtaggggagctgag

SEQ ID NO: 3252695 - DNA, 25 bp, Homo sapien
agaacacacccccgtaggggagctg

SEQ ID NO: 3252696 - DNA, 25 bp, Homo sapien
cacacccccgtaggggagctgaggg

SEQ ID NO: 3252697 - DNA, 25 bp, Homo sapien
gaacacacccccgtaggggagctga

SEQ ID NO: 3252698 - DNA, 25 bp, Homo sapien
gcccagtgaataggcagaggtcctg

SEQ ID NO: 3252699 - DNA, 25 bp, Homo sapien
gcttcaccagcgcacggatggcccc

SEQ ID NO: 3252700 - DNA, 25 bp, Homo sapien
ttcaccagcgcacggatggcccctc

SEQ ID NO: 3252701 - DNA, 25 bp, Homo sapien
attcaggcccagtgaataggcagag

SEQ ID NO: 3252702 - DNA, 25 bp, Homo sapien
atggaggtaactaccccgtgattca

SEQ ID NO: 3252703 - DNA, 25 bp, Homo sapien
ttcaataaggtgaccaaaataaaca

SEQ ID NO: 3252704 - DNA, 25 bp, Homo sapien
cactatttgccaatgatagagaagg

SEQ ID NO: 3252705 - DNA, 25 bp, Homo sapien
cgttttcacatgacggcaggaagga

SEQ ID NO: 3252706 - DNA, 25 bp, Homo sapien
tcttagatgggaagaccacttacca

SEQ ID NO: 3252707 - DNA, 25 bp, Homo sapien
aacctccagacaaactccagagagc

SEQ ID NO: 3252708 - DNA, 25 bp, Homo sapien
cttgacaaataacaccaaagttcac

SEQ ID NO: 3252709 - DNA, 25 bp, Homo sapien
gggagaatgcccagacttgacaaat

SEQ ID NO: 3252710 - DNA, 25 bp, Homo sapien
tgccacggagcagaagccttgatct

SEQ ID NO: 3252711 - DNA, 25 bp, Homo sapien
cactgctggtataagaaatctcccc

SEQ ID NO: 3252712 - DNA, 25 bp, Homo sapien
tacgctaacatgatcccggcaggtg

SEQ ID NO: 3252713 - DNA, 25 bp, Homo sapien
catttcatcagtgagggaagtccca

SEQ ID NO: 3252714 - DNA, 25 bp, Homo sapien
tgggtgcaggaacactggcatgaac

SEQ ID NO: 3252715 - DNA, 25 bp, Homo sapien
tttacaatcagaaaacggtggcagc

SEQ ID NO: 3252716 - DNA, 25 bp, Homo sapien
catgaaccaaggagtacaatgaatc

SEQ ID NO: 3252717 - DNA, 25 bp, Homo sapien
ccctgtggcccaaaagtaaatcaat

SEQ ID NO: 3252718 - DNA, 25 bp, Homo sapien
aacgggactccggtatagcatcaca

SEQ ID NO: 3252719 - DNA, 25 bp, Homo sapien
taagggcctataagagacatgcaca

SEQ ID NO: 3252720 - DNA, 25 bp, Homo sapien
gaatgtcatggctacacctcaacct

SEQ ID NO: 3252721 - DNA, 25 bp, Homo sapien
tgacacatagtagccccgaaggaat

SEQ ID NO: 3252722 - DNA, 25 bp, Homo sapien
cattccccgatggttaggtagtcta

SEQ ID NO: 3252723 - DNA, 25 bp, Homo sapien
cactggttggccgactttgaataag

SEQ ID NO: 3252724 - DNA, 25 bp, Homo sapien
gaaaggtaaggacgcttgctcaacc

SEQ ID NO: 3252725 - DNA, 25 bp, Homo sapien
agtgactatagtgtggaaaccccag

SEQ ID NO: 3252726 - DNA, 25 bp, Homo sapien
tatgcaggtgagatattaagtttgc

SEQ ID NO: 3252727 - DNA, 25 bp, Homo sapien
caggtgagatattaagtttgctaaa

SEQ ID NO: 3252728 - DNA, 25 bp, Homo sapien
tggcccaggttcagggttcaattcc

SEQ ID NO: 3252729 - DNA, 25 bp, Homo sapien
gaatgaaagagctttaactaattgg

SEQ ID NO: 3252730 - DNA, 25 bp, Homo sapien
gtgtctgacatggtgacatcatggc

SEQ ID NO: 3252731 - DNA, 25 bp, Homo sapien
tggtgacatcgtggcatcgcaaagc

SEQ ID NO: 3252732 - DNA, 25 bp, Homo sapien
gagctctcctgcacgagaacctgtc

SEQ ID NO: 3252733 - DNA, 25 bp, Homo sapien
aagctctcctgcacgagaacccgtt

SEQ ID NO: 3252734 - DNA, 25 bp, Homo sapien
cctgggttcgagtgacaatggatac

SEQ ID NO: 3252735 - DNA, 25 bp, Homo sapien
ggataccagcacctacctattgcgt

SEQ ID NO: 3252736 - DNA, 25 bp, Homo sapien
ctggcaggcggtaggtgatcatcaa

SEQ ID NO: 3252737 - DNA, 25 bp, Homo sapien
gctgagcgtcccacgagatgatgaa

SEQ ID NO: 3252738 - DNA, 25 bp, Homo sapien
ggacaggccacatgtgtgcaaggac

SEQ ID NO: 3252739 - DNA, 25 bp, Homo sapien
ggccacatgtgtgcaaggacttgct

SEQ ID NO: 3252740 - DNA, 25 bp, Homo sapien
tggggacaggccacatgtgtgcaag

SEQ ID NO: 3252741 - DNA, 25 bp, Homo sapien
catgtgtgcaaggacttgctgggta

SEQ ID NO: 3252742 - DNA, 25 bp, Homo sapien
caatcagcagtttaggcgcacaggt

SEQ ID NO: 3252743 - DNA, 25 bp, Homo sapien
aaagcagcagcaatctccggcgtgt

SEQ ID NO: 3252744 - DNA, 25 bp, Homo sapien
taattatcaaaaaacccacggcgca

SEQ ID NO: 3252745 - DNA, 25 bp, Homo sapien
caattatgtgacaaagccgagggag

SEQ ID NO: 3252746 - DNA, 25 bp, Homo sapien
cagcgccccagaggtttttgtagag

SEQ ID NO: 3252747 - DNA, 25 bp, Homo sapien
caggatgcccgctccaacaccttgc

SEQ ID NO: 3252748 - DNA, 25 bp, Homo sapien
tgctttcctgcaggacagcgcccca

SEQ ID NO: 3252749 - DNA, 25 bp, Homo sapien
cgatttcagacttcctatgacaggt

SEQ ID NO: 3252750 - DNA, 25 bp, Homo sapien
gtcggctctgccaatcggtgagtcc

SEQ ID NO: 3252751 - DNA, 25 bp, Homo sapien
gccgtcggctctgccaatcggtgag

SEQ ID NO: 3252752 - DNA, 25 bp, Homo sapien
cgtcggctctgccaatcggtgagtc

SEQ ID NO: 3252753 - DNA, 25 bp, Homo sapien
ctcgccgtcggctctgccaatcggt

SEQ ID NO: 3252754 - DNA, 25 bp, Homo sapien
ggagcgatcacgtctaccagggcaa

SEQ ID NO: 3252755 - DNA, 25 bp, Homo sapien
gatcacgtctaccagggcaactgca

SEQ ID NO: 3252756 - DNA, 25 bp, Homo sapien
tcaggaggagcgatcacgtctacca

SEQ ID NO: 3252757 - DNA, 25 bp, Homo sapien
aggaggagcgatcacgtctaccagg

SEQ ID NO: 3252758 - DNA, 25 bp, Homo sapien
tgtgtcggctcatgggtgacgctaa

SEQ ID NO: 3252759 - DNA, 25 bp, Homo sapien
tcgctctgggcggttgtgtaacatg

SEQ ID NO: 3252760 - DNA, 25 bp, Homo sapien
tcagtctgggtgatactaaggcggt

SEQ ID NO: 3252761 - DNA, 25 bp, Homo sapien
cacacgtgaatgtttgggttgcaaa

SEQ ID NO: 3252762 - DNA, 25 bp, Homo sapien
tgggaacacaaagccaggacggcgc

SEQ ID NO: 3252763 - DNA, 25 bp, Homo sapien
tccaacacttctcccgcctgctcac

SEQ ID NO: 3252764 - DNA, 25 bp, Homo sapien
acaaagccaggacggcgctctccaa

SEQ ID NO: 3252765 - DNA, 25 bp, Homo sapien
aacacaaagccaggacggcgctctc

SEQ ID NO: 3252766 - DNA, 25 bp, Homo sapien
acatgccctgagtgcactttccaaa

SEQ ID NO: 3252767 - DNA, 25 bp, Homo sapien
caacatgccctgagtgcactttcca

SEQ ID NO: 3252768 - DNA, 25 bp, Homo sapien
tgcactttccaaatcggccatatag

SEQ ID NO: 3252769 - DNA, 25 bp, Homo sapien
tttccaaatcggccatataggaggc

SEQ ID NO: 3252770 - DNA, 25 bp, Homo sapien
gtggccgctgggctcatacctgctg

SEQ ID NO: 3252771 - DNA, 25 bp, Homo sapien
ccgctgggctcatacctgctggggt

SEQ ID NO: 3252772 - DNA, 25 bp, Homo sapien
ctgggctcatacctgctggggttca

SEQ ID NO: 3252773 - DNA, 25 bp, Homo sapien
tccttcctcgggagaaagtgaggaa

SEQ ID NO: 3252774 - DNA, 25 bp, Homo sapien
gacttggtccttggtgtcacctcca

SEQ ID NO: 3252775 - DNA, 25 bp, Homo sapien
tatgcagtgtatcctagtaccaaag

SEQ ID NO: 3252776 - DNA, 25 bp, Homo sapien
taccaaagatgcatgggtgccagcc

SEQ ID NO: 3252777 - DNA, 25 bp, Homo sapien
ccctaagaggtccaaggctgtggcc

SEQ ID NO: 3252778 - DNA, 25 bp, Homo sapien
tctgtgccttatgggacctagtggg

SEQ ID NO: 3252779 - DNA, 25 bp, Homo sapien
tctctgaaccgaaccccaagtgaaa

SEQ ID NO: 3252780 - DNA, 25 bp, Homo sapien
tctcattatggaactgggcttctca

SEQ ID NO: 3252781 - DNA, 25 bp, Homo sapien
actcctggctcgtgtctgtctgtgc

SEQ ID NO: 3252782 - DNA, 25 bp, Homo sapien
aaggccagcgccaacggacggccgt

SEQ ID NO: 3252783 - DNA, 25 bp, Homo sapien
ggaccacagggcgtacagagcactg

SEQ ID NO: 3252784 - DNA, 25 bp, Homo sapien
cacggaaggctggtgcacgtgctcg

SEQ ID NO: 3252785 - DNA, 25 bp, Homo sapien
tcgtggaacctctggaccaccgtga

SEQ ID NO: 3252786 - DNA, 25 bp, Homo sapien
acacgaacgcgggtctgcgttcccg

SEQ ID NO: 3252787 - DNA, 25 bp, Homo sapien
ttctcaggaaacacgaacgcgggtc

SEQ ID NO: 3252788 - DNA, 25 bp, Homo sapien
gaacgcgggtctgcgttcccgtgca

SEQ ID NO: 3252789 - DNA, 25 bp, Homo sapien
aggaaacacgaacgcgggtctgcgt

SEQ ID NO: 3252790 - DNA, 25 bp, Homo sapien
tgtccaagtgtgagaaccaaagcgc

SEQ ID NO: 3252791 - DNA, 25 bp, Homo sapien
ttgtggaaaaccaagcagggcgctg

SEQ ID NO: 3252792 - DNA, 25 bp, Homo sapien
gagtctccccacagctatggttagg

SEQ ID NO: 3252793 - DNA, 25 bp, Homo sapien
cctggaacatgagagacagccctgt

SEQ ID NO: 3252794 - DNA, 25 bp, Homo sapien
atttttgataagtctctcggagcag

SEQ ID NO: 3252795 - DNA, 25 bp, Homo sapien
tctctcggagcaggtagcaaaccag

SEQ ID NO: 3252796 - DNA, 25 bp, Homo sapien
tgataagtctctcggagcaggtagc

SEQ ID NO: 3252797 - DNA, 25 bp, Homo sapien
gagcaggtagcaaaccagccacttg

SEQ ID NO: 3252798 - DNA, 25 bp, Homo sapien
gttctacactgttccagcagcctgg

SEQ ID NO: 3252799 - DNA, 25 bp, Homo sapien
ccagcatcctgcaggtaccaggttg

SEQ ID NO: 3252800 - DNA, 25 bp, Homo sapien
gaggccacaggaacacggtgccgcc

SEQ ID NO: 3252801 - DNA, 25 bp, Homo sapien
ggttgtcttcattgacaaccaagtg

SEQ ID NO: 3252802 - DNA, 25 bp, Homo sapien
ctcggtctgtgtgaagcgtggtgct

SEQ ID NO: 3252803 - DNA, 25 bp, Homo sapien
gctcggtctgtgtgaagcgtggtgc

SEQ ID NO: 3252804 - DNA, 25 bp, Homo sapien
ggctcggtctgtgtgaagcgtggtg

SEQ ID NO: 3252805 - DNA, 25 bp, Homo sapien
caggctcggtctgtgtgaagcgtgg

SEQ ID NO: 3252806 - DNA, 25 bp, Homo sapien
gaaaatacccaacgttgctgggcgc

SEQ ID NO: 3252807 - DNA, 25 bp, Homo sapien
gacacgtgtccttacaagatgcaga

SEQ ID NO: 3252808 - DNA, 25 bp, Homo sapien
cgaacagcaaggaaaggtagacgcc

SEQ ID NO: 3252809 - DNA, 25 bp, Homo sapien
cacagtactccgtatggaccaggca

SEQ ID NO: 3252810 - DNA, 25 bp, Homo sapien
gtgttcaggactgtggccccccaca

SEQ ID NO: 3252811 - DNA, 25 bp, Homo sapien
aggaagtgttcaggactgtggcccc

SEQ ID NO: 3252812 - DNA, 25 bp, Homo sapien
aagtgttcaggactgtggcccccca

SEQ ID NO: 3252813 - DNA, 25 bp, Homo sapien
ggaagtgttcaggactgtggccccc

SEQ ID NO: 3252814 - DNA, 25 bp, Homo sapien
tcagaagctgtaacccagcgcagtg

SEQ ID NO: 3252815 - DNA, 25 bp, Homo sapien
gatgcagacgcttcctgatgacgat

SEQ ID NO: 3252816 - DNA, 25 bp, Homo sapien
gaagctgtaacccagcgcagtgacc

SEQ ID NO: 3252817 - DNA, 25 bp, Homo sapien
taacccagcgcagtgaccacgagaa

SEQ ID NO: 3252818 - DNA, 25 bp, Homo sapien
gaaggcgctgggaagccggaccggc

SEQ ID NO: 3252819 - DNA, 25 bp, Homo sapien
gcgctgggaagccggaccggcccag

SEQ ID NO: 3252820 - DNA, 25 bp, Homo sapien
gctgggaagccggaccggcccaggc

SEQ ID NO: 3252821 - DNA, 25 bp, Homo sapien
ggcgctgggaagccggaccggccca

SEQ ID NO: 3252822 - DNA, 25 bp, Homo sapien
tttgccgtgtgaacaaggaagtagc

SEQ ID NO: 3252823 - DNA, 25 bp, Homo sapien
gtcctgttctttgccgtgtgaacaa

SEQ ID NO: 3252824 - DNA, 25 bp, Homo sapien
ttgccgtgtgaacaaggaagtagcc

SEQ ID NO: 3252825 - DNA, 25 bp, Homo sapien
tgttctttgccgtgtgaacaaggaa

SEQ ID NO: 3252826 - DNA, 25 bp, Homo sapien
ggtcctgatggctggaacgcgtcct

SEQ ID NO: 3252827 - DNA, 25 bp, Homo sapien
ctgctatcacatccacggcgtcggt

SEQ ID NO: 3252828 - DNA, 25 bp, Homo sapien
tggagacggacaaggacacacgctc

SEQ ID NO: 3252829 - DNA, 25 bp, Homo sapien
aacgcgtcctccatgtgtgcctgtc

SEQ ID NO: 3252830 - DNA, 25 bp, Homo sapien
aatactgctgagtgaggcgatggcg

SEQ ID NO: 3252831 - DNA, 25 bp, Homo sapien
gttctctgtgatacgcggctttaca

SEQ ID NO: 3252832 - DNA, 25 bp, Homo sapien
gcgatggcgagatggaggcgttgct

SEQ ID NO: 3252833 - DNA, 25 bp, Homo sapien
ttgctgcggctttgagctgttctct

SEQ ID NO: 3252834 - DNA, 25 bp, Homo sapien
acagaccccgtgtgggtgaggcgga

SEQ ID NO: 3252835 - DNA, 25 bp, Homo sapien
agaccccgtgtgggtgaggcggagc

SEQ ID NO: 3252836 - DNA, 25 bp, Homo sapien
cagaccccgtgtgggtgaggcggag

SEQ ID NO: 3252837 - DNA, 25 bp, Homo sapien
gctgcttagtggacagagaccaggc

SEQ ID NO: 3252838 - DNA, 25 bp, Homo sapien
aggctgcttagtggacagagaccag

SEQ ID NO: 3252839 - DNA, 25 bp, Homo sapien
agaggctgcttagtggacagagacc

SEQ ID NO: 3252840 - DNA, 25 bp, Homo sapien
gcttagtggacagagaccaggccag

SEQ ID NO: 3252841 - DNA, 25 bp, Homo sapien
agggtcccctcaccgaggcacggtg

SEQ ID NO: 3252842 - DNA, 25 bp, Homo sapien
tagtccatgagccagcccaggacaa

SEQ ID NO: 3252843 - DNA, 25 bp, Homo sapien
taactcggcgtcaggcacaaagaga

SEQ ID NO: 3252844 - DNA, 25 bp, Homo sapien
catctgtggagtcagcgcctaactc

SEQ ID NO: 3252845 - DNA, 25 bp, Homo sapien
gataggcgtccagaaagtccactga

SEQ ID NO: 3252846 - DNA, 25 bp, Homo sapien
caaacttctggtcaaggatgccggg

SEQ ID NO: 3252847 - DNA, 25 bp, Homo sapien
gagtccaagcagtcggcaacactgg

SEQ ID NO: 3252848 - DNA, 25 bp, Homo sapien
ccactgacttcagcggactgcggaa

SEQ ID NO: 3252849 - DNA, 25 bp, Homo sapien
tggtggaagacaggaacccaaacca

SEQ ID NO: 3252850 - DNA, 25 bp, Homo sapien
tggaagacaggaacccaaaccattg

SEQ ID NO: 3252851 - DNA, 25 bp, Homo sapien
gcaaatagttgcttgtctgctgcag

SEQ ID NO: 3252852 - DNA, 25 bp, Homo sapien
tctctaaggacacccaaccggttca

SEQ ID NO: 3252853 - DNA, 25 bp, Homo sapien
ccttcgtatgtgcagttgggatcgt

SEQ ID NO: 3252854 - DNA, 25 bp, Homo sapien
cagcaggatgttgttgtcaccttcg

SEQ ID NO: 3252855 - DNA, 25 bp, Homo sapien
gcctcccggcattcctgaattcctt

SEQ ID NO: 3252856 - DNA, 25 bp, Homo sapien
ttgctggccgatgccagggcgtgga

SEQ ID NO: 3252857 - DNA, 25 bp, Homo sapien
tccttgctgggtggtccacgaggcc

SEQ ID NO: 3252858 - DNA, 25 bp, Homo sapien
cgtggatctcacgtccaagctctgc

SEQ ID NO: 3252859 - DNA, 25 bp, Homo sapien
gcaaaaccgtcatgttctcaaaagg

SEQ ID NO: 3252860 - DNA, 25 bp, Homo sapien
gaaccgggagtcgtgtcagcacatc

SEQ ID NO: 3252861 - DNA, 25 bp, Homo sapien
tgaactcacagactggaaccgggag

SEQ ID NO: 3252862 - DNA, 25 bp, Homo sapien
tcaaaaggagaccaacagctgaact

SEQ ID NO: 3252863 - DNA, 25 bp, Homo sapien
gtgtggacgcgtgcccagcccgttc

SEQ ID NO: 3252864 - DNA, 25 bp, Homo sapien
agcccgttcaatcgcggcagaggcc

SEQ ID NO: 3252865 - DNA, 25 bp, Homo sapien
cagaggccaagagctccgagtgggt

SEQ ID NO: 3252866 - DNA, 25 bp, Homo sapien
ggaatgctctgtcctcgcaaatcaa

SEQ ID NO: 3252867 - DNA, 25 bp, Homo sapien
ccaggaagagcgacttggagaaatg

SEQ ID NO: 3252868 - DNA, 25 bp, Homo sapien
ctgtctggcgctgcggtctcccgat

SEQ ID NO: 3252869 - DNA, 25 bp, Homo sapien
tctcccgatgcaagtcctcgctgga

SEQ ID NO: 3252870 - DNA, 25 bp, Homo sapien
taaggcgtagacagctgccagatat

SEQ ID NO: 3252871 - DNA, 25 bp, Homo sapien
tgcattggatactcaagcactggta

SEQ ID NO: 3252872 - DNA, 25 bp, Homo sapien
tctgtgggtccaaactgacgccgag

SEQ ID NO: 3252873 - DNA, 25 bp, Homo sapien
ctgagaagcgaagagcgatggccac

SEQ ID NO: 3252874 - DNA, 25 bp, Homo sapien
tggccacggccagctttaggttaag

SEQ ID NO: 3252875 - DNA, 25 bp, Homo sapien
cctggacaccagcacctggtgctgt

SEQ ID NO: 3252876 - DNA, 25 bp, Homo sapien
ggacaccagcacctggtgctgtggc

SEQ ID NO: 3252877 - DNA, 25 bp, Homo sapien
cccctggacaccagcacctggtgct

SEQ ID NO: 3252878 - DNA, 25 bp, Homo sapien
ggtgctgtggctgccccaagagtcc

SEQ ID NO: 3252879 - DNA, 25 bp, Homo sapien
tgccctcgggggtgacgtctcccat

SEQ ID NO: 3252880 - DNA, 25 bp, Homo sapien
aaaggggctgacataggtgccctcg

SEQ ID NO: 3252881 - DNA, 25 bp, Homo sapien
gaaggctctggcgaggaactctgac

SEQ ID NO: 3252882 - DNA, 25 bp, Homo sapien
tctcccatccggttcagaaggctct

SEQ ID NO: 3252883 - DNA, 25 bp, Homo sapien
gagcaggccgttgagttcggcagcc

SEQ ID NO: 3252884 - DNA, 25 bp, Homo sapien
cagagcaggccgttgagttcggcag

SEQ ID NO: 3252885 - DNA, 25 bp, Homo sapien
agcaggccgttgagttcggcagcca

SEQ ID NO: 3252886 - DNA, 25 bp, Homo sapien
gcaggccgttgagttcggcagccat

SEQ ID NO: 3252887 - DNA, 25 bp, Homo sapien
gagatttaagacactccctgcccat

SEQ ID NO: 3252888 - DNA, 25 bp, Homo sapien
aggaggtttctccatcgctgagcgc

SEQ ID NO: 3252889 - DNA, 25 bp, Homo sapien
ttcaggctatcaggctcaggcatgg

SEQ ID NO: 3252890 - DNA, 25 bp, Homo sapien
tgtggagtccagcattcgcagtgag

SEQ ID NO: 3252891 - DNA, 25 bp, Homo sapien
ggccccaccagttgtacacagaggt

SEQ ID NO: 3252892 - DNA, 25 bp, Homo sapien
cccaaagtggagttcaagcaggacg

SEQ ID NO: 3252893 - DNA, 25 bp, Homo sapien
ggtctctgatcaagttggcctccca

SEQ ID NO: 3252894 - DNA, 25 bp, Homo sapien
ggtccccaccgcatttgagtctaag

SEQ ID NO: 3252895 - DNA, 25 bp, Homo sapien
actccaggcatgggaagaagggtct

SEQ ID NO: 3252896 - DNA, 25 bp, Homo sapien
ttttttcctatgtcgccaaccatca

SEQ ID NO: 3252897 - DNA, 25 bp, Homo sapien
cattatccagaccgttctgcccgag

SEQ ID NO: 3252898 - DNA, 25 bp, Homo sapien
aaccatcactccaggcatgggaaga

SEQ ID NO: 3252899 - DNA, 25 bp, Homo sapien
tgcactgtgggcaggactgtctgca

SEQ ID NO: 3252900 - DNA, 25 bp, Homo sapien
tctgtactgtgggtggagctgtctg

SEQ ID NO: 3252901 - DNA, 25 bp, Homo sapien
aatacactgtgggcggagctgtctg

SEQ ID NO: 3252902 - DNA, 25 bp, Homo sapien
tctgtgcactgtgggcgcggctgtc

SEQ ID NO: 3252903 - DNA, 25 bp, Homo sapien
aaacaccaccgcgtgagtggctgtc

SEQ ID NO: 3252904 - DNA, 25 bp, Homo sapien
aaacttggcagcttcgaaatcaggg

SEQ ID NO: 3252905 - DNA, 25 bp, Homo sapien
gcgtgagtggctgtcttgcccatgt

SEQ ID NO: 3252906 - DNA, 25 bp, Homo sapien
tgttgccaacccaaaacttggcagc

SEQ ID NO: 3252907 - DNA, 25 bp, Homo sapien
tggcactgcaggccacaggcaaaga

SEQ ID NO: 3252908 - DNA, 25 bp, Homo sapien
gcactgcaggccacaggcaaagagg

SEQ ID NO: 3252909 - DNA, 25 bp, Homo sapien
caaagaggacagcaggaggagaagc

SEQ ID NO: 3252910 - DNA, 25 bp, Homo sapien
cctggcactgcaggccacaggcaaa

SEQ ID NO: 3252911 - DNA, 25 bp, Homo sapien
tgacgtctcatatgctccaaactca

SEQ ID NO: 3252912 - DNA, 25 bp, Homo sapien
gacgtctcatatgctccaaactcag

SEQ ID NO: 3252913 - DNA, 25 bp, Homo sapien
catgacgtctcatatgctccaaact

SEQ ID NO: 3252914 - DNA, 25 bp, Homo sapien
tcatgacgtctcatatgctccaaac

SEQ ID NO: 3252915 - DNA, 25 bp, Homo sapien
gcagttgtgcgaatggccttggtat

SEQ ID NO: 3252916 - DNA, 25 bp, Homo sapien
ccttggtattactgccgtggcttaa

SEQ ID NO: 3252917 - DNA, 25 bp, Homo sapien
caggatcgtagtgggcagttgtgcg

SEQ ID NO: 3252918 - DNA, 25 bp, Homo sapien
cgtggcttaattcggtcagagcaaa

SEQ ID NO: 3252919 - DNA, 25 bp, Homo sapien
aactgtaaactgctgatccaaaaac

SEQ ID NO: 3252920 - DNA, 25 bp, Homo sapien
gaactgtaaactgctgatccaaaaa

SEQ ID NO: 3252921 - DNA, 25 bp, Homo sapien
agaactgtaaactgctgatccaaaa

SEQ ID NO: 3252922 - DNA, 25 bp, Homo sapien
tgaggaagtcatactcgaagatccg

SEQ ID NO: 3252923 - DNA, 25 bp, Homo sapien
gatacttctccaaggacagatcggc

SEQ ID NO: 3252924 - DNA, 25 bp, Homo sapien
gaagagtcatacatgcccaggcact

SEQ ID NO: 3252925 - DNA, 25 bp, Homo sapien
gaagatccgcttgcatcgaaggaag

SEQ ID NO: 3252926 - DNA, 25 bp, Homo sapien
ttaaagcggagcatgccctcccctt

SEQ ID NO: 3252927 - DNA, 25 bp, Homo sapien
gacgctcttgctcggtaggcatcga

SEQ ID NO: 3252928 - DNA, 25 bp, Homo sapien
tccccttccgtgaacagcgccagct

SEQ ID NO: 3252929 - DNA, 25 bp, Homo sapien
cagcgccagctccttccagctgaag

SEQ ID NO: 3252930 - DNA, 25 bp, Homo sapien
gcagagctgtgtcgcctccttccac

SEQ ID NO: 3252931 - DNA, 25 bp, Homo sapien
gtgtcgcctccttccacagtggatg

SEQ ID NO: 3252932 - DNA, 25 bp, Homo sapien
ctgtgtcgcctccttccacagtgga

SEQ ID NO: 3252933 - DNA, 25 bp, Homo sapien
agcagagctgtgtcgcctccttcca

SEQ ID NO: 3252934 - DNA, 25 bp, Homo sapien
gcccgcacagcgcagctgtctctgg

SEQ ID NO: 3252935 - DNA, 25 bp, Homo sapien
ggcccgcgaccgactcggagtactg

SEQ ID NO: 3252936 - DNA, 25 bp, Homo sapien
gtactgggactagctgcccgcacag

SEQ ID NO: 3252937 - DNA, 25 bp, Homo sapien
actcggagtactgggactagctgcc

SEQ ID NO: 3252938 - DNA, 25 bp, Homo sapien
acactccacagttcaacccctgcca

SEQ ID NO: 3252939 - DNA, 25 bp, Homo sapien
ccacacactccacagttcaacccct

SEQ ID NO: 3252940 - DNA, 25 bp, Homo sapien
accaaaagcaggaaaggatctccag

SEQ ID NO: 3252941 - DNA, 25 bp, Homo sapien
ctccacagttcaacccctgccaggg

SEQ ID NO: 3252942 - DNA, 25 bp, Homo sapien
cctgcccaggtagcacggtcagtag

SEQ ID NO: 3252943 - DNA, 25 bp, Homo sapien
agcactcttgggctgagagcggcac

SEQ ID NO: 3252944 - DNA, 25 bp, Homo sapien
gacggccagtcatgtatacacagac

SEQ ID NO: 3252945 - DNA, 25 bp, Homo sapien
tacacagacaacagtatggaacagt

SEQ ID NO: 3252946 - DNA, 25 bp, Homo sapien
tgcgctggacacatcaggatgggta

SEQ ID NO: 3252947 - DNA, 25 bp, Homo sapien
cacaaactcagttagaggtaccgtc

SEQ ID NO: 3252948 - DNA, 25 bp, Homo sapien
catccaggcagagggattgatgtcc

SEQ ID NO: 3252949 - DNA, 25 bp, Homo sapien
gaaaaatctgggacatgtatggacc

SEQ ID NO: 3252950 - DNA, 25 bp, Homo sapien
cctgattattggcagcagccgtgtg

SEQ ID NO: 3252951 - DNA, 25 bp, Homo sapien
actttctgcagtgtaccctggtgcc

SEQ ID NO: 3252952 - DNA, 25 bp, Homo sapien
cactgttctgccgttgactttctgc

SEQ ID NO: 3252953 - DNA, 25 bp, Homo sapien
tgtggcattccgtggcagcgccgca

SEQ ID NO: 3252954 - DNA, 25 bp, Homo sapien
ggttcccttgcagcaatgaacagta

SEQ ID NO: 3252955 - DNA, 25 bp, Homo sapien
gtaccatttcttactgccccccagc

SEQ ID NO: 3252956 - DNA, 25 bp, Homo sapien
tgcccctgtccacaggtcatgtgac

SEQ ID NO: 3252957 - DNA, 25 bp, Homo sapien
tcatgtgactgggtgtcgggcacgg

SEQ ID NO: 3252958 - DNA, 25 bp, Homo sapien
gccccttggactggtgctggggatt

SEQ ID NO: 3252959 - DNA, 25 bp, Homo sapien
acaccaggtcacgtaggccttggct

SEQ ID NO: 3252960 - DNA, 25 bp, Homo sapien
ccaggtcacgtaggccttggctcgt

SEQ ID NO: 3252961 - DNA, 25 bp, Homo sapien
cccttggactggtgctggggattca

SEQ ID NO: 3252962 - DNA, 25 bp, Homo sapien
ggctgaggccgcgtattctccctct

SEQ ID NO: 3252963 - DNA, 25 bp, Homo sapien
atccgctgcggctactctccagggc

SEQ ID NO: 3252964 - DNA, 25 bp, Homo sapien
cacaactgtcacagaacgaggaacc

SEQ ID NO: 3252965 - DNA, 25 bp, Homo sapien
taggtggattgagaagagagtccca

SEQ ID NO: 3252966 - DNA, 25 bp, Homo sapien
acctgagctacctgcacagcatggt

SEQ ID NO: 3252967 - DNA, 25 bp, Homo sapien
gaggattttcccctcagggttctgc

SEQ ID NO: 3252968 - DNA, 25 bp, Homo sapien
cctgcacagcatggtgtatgggagc

SEQ ID NO: 3252969 - DNA, 25 bp, Homo sapien
catggtgtatgggagctgtgccact

SEQ ID NO: 3252970 - DNA, 25 bp, Homo sapien
tgagtagaagcgatgccactgtgcc

SEQ ID NO: 3252971 - DNA, 25 bp, Homo sapien
atggtctgtgagtagaagcgatgcc

SEQ ID NO: 3252972 - DNA, 25 bp, Homo sapien
ctggctgatggtctgtgagtagaag

SEQ ID NO: 3252973 - DNA, 25 bp, Homo sapien
tctgtgagtagaagcgatgccactg

SEQ ID NO: 3252974 - DNA, 25 bp, Homo sapien
ccagttgcccagaggaggtaccctt

SEQ ID NO: 3252975 - DNA, 25 bp, Homo sapien
tggtccctgcgtggtccagttgccc

SEQ ID NO: 3252976 - DNA, 25 bp, Homo sapien
ccacggggccctctatatttgtcgg

SEQ ID NO: 3252977 - DNA, 25 bp, Homo sapien
tgcagcaggggcagatacagctgca

SEQ ID NO: 3252978 - DNA, 25 bp, Homo sapien
aatccttgggtgtggacctgcgcca

SEQ ID NO: 3252979 - DNA, 25 bp, Homo sapien
tcatctcttccacccgggaggaagt

SEQ ID NO: 3252980 - DNA, 25 bp, Homo sapien
tacggagctcctgccattccttggg

SEQ ID NO: 3252981 - DNA, 25 bp, Homo sapien
gtctgtagtgtgcacaggtcctgcc

SEQ ID NO: 3252982 - DNA, 25 bp, Homo sapien
cctgttggaggctccgccagagccc

SEQ ID NO: 3252983 - DNA, 25 bp, Homo sapien
ctgttggaggctccgccagagccca

SEQ ID NO: 3252984 - DNA, 25 bp, Homo sapien
atttcttggcacaaatataaaaaca

SEQ ID NO: 3252985 - DNA, 25 bp, Homo sapien
ccgagcaaatgtctcttctgtgtcc

SEQ ID NO: 3252986 - DNA, 25 bp, Homo sapien
gggagaacgtcgctgtccgagcaaa

SEQ ID NO: 3252987 - DNA, 25 bp, Homo sapien
atcccggccgttgccctggagggct

SEQ ID NO: 3252988 - DNA, 25 bp, Homo sapien
agcctcatgcaccatcccggccgtt

SEQ ID NO: 3252989 - DNA, 25 bp, Homo sapien
gcccttgtttgctgcgtccagcgac

SEQ ID NO: 3252990 - DNA, 25 bp, Homo sapien
aggcctcacggggaagcgagagcag

SEQ ID NO: 3252991 - DNA, 25 bp, Homo sapien
ggtgagccatgagcgaggcctcacg

SEQ ID NO: 3252992 - DNA, 25 bp, Homo sapien
gaagcgagagcagcggtgttgccat

SEQ ID NO: 3252993 - DNA, 25 bp, Homo sapien
gccgcacacgggactctgagccagg

SEQ ID NO: 3252994 - DNA, 25 bp, Homo sapien
tgtcagacgcgctcacttgcttctg

SEQ ID NO: 3252995 - DNA, 25 bp, Homo sapien
ctggatgtcagacgcgctcacttgc

SEQ ID NO: 3252996 - DNA, 25 bp, Homo sapien
tcacttgcttctgccgcacacggga

SEQ ID NO: 3252997 - DNA, 25 bp, Homo sapien
tgggaggtgcccatttctctcgagt

SEQ ID NO: 3252998 - DNA, 25 bp, Homo sapien
tcgagtttgcacgaggcacaaactt

SEQ ID NO: 3252999 - DNA, 25 bp, Homo sapien
tctctcgagtttgcacgaggcacaa

SEQ ID NO: 3253000 - DNA, 25 bp, Homo sapien
gcccatttctctcgagtttgcacga

SEQ ID NO: 3253001 - DNA, 25 bp, Homo sapien
tcttggggtaccccatctgcagctc

SEQ ID NO: 3253002 - DNA, 25 bp, Homo sapien
ttcttggggtaccccatctgcagct

SEQ ID NO: 3253003 - DNA, 25 bp, Homo sapien
cttggggtaccccatctgcagctct

SEQ ID NO: 3253004 - DNA, 25 bp, Homo sapien
tgctctaggaagacaaaaggaacct

SEQ ID NO: 3253005 - DNA, 25 bp, Homo sapien
cattcagctgcttactgggtggtct

SEQ ID NO: 3253006 - DNA, 25 bp, Homo sapien
ctgagacgactcattcagctgctta

SEQ ID NO: 3253007 - DNA, 25 bp, Homo sapien
tcagctgcttactgggtggtcttgg

SEQ ID NO: 3253008 - DNA, 25 bp, Homo sapien
cctgagacgactcattcagctgctt

SEQ ID NO: 3253009 - DNA, 25 bp, Homo sapien
gaggacactgtccatgagtatctgc

SEQ ID NO: 3253010 - DNA, 25 bp, Homo sapien
ctaaaccttccagggcactggacgg

SEQ ID NO: 3253011 - DNA, 25 bp, Homo sapien
gtccatgagtatctgctgcttctcc

SEQ ID NO: 3253012 - DNA, 25 bp, Homo sapien
ttcctaaaccttccagggcactgga

SEQ ID NO: 3253013 - DNA, 25 bp, Homo sapien
ggagggtgccaggtctgattttcca

SEQ ID NO: 3253014 - DNA, 25 bp, Homo sapien
gggtgccaggtctgattttccacag

SEQ ID NO: 3253015 - DNA, 25 bp, Homo sapien
gaacgcctggaagggacgaggtggc

SEQ ID NO: 3253016 - DNA, 25 bp, Homo sapien
cgtagactggaaccccctttctctg

SEQ ID NO: 3253017 - DNA, 25 bp, Homo sapien
ctcccactgaacacgtgtgggataa

SEQ ID NO: 3253018 - DNA, 25 bp, Homo sapien
aagaagtggcaggaactaaaccgag

SEQ ID NO: 3253019 - DNA, 25 bp, Homo sapien
ccagctcccactgaacacgtgtggg

SEQ ID NO: 3253020 - DNA, 25 bp, Homo sapien
agaagtggcaggaactaaaccgagg

SEQ ID NO: 3253021 - DNA, 25 bp, Homo sapien
accctggccgactggagccaacgaa

SEQ ID NO: 3253022 - DNA, 25 bp, Homo sapien
ggtactgagagcacttggagccctt

SEQ ID NO: 3253023 - DNA, 25 bp, Homo sapien
caacgaagaaggtactgagagcact

SEQ ID NO: 3253024 - DNA, 25 bp, Homo sapien
gagggagatgctgcgggaccagggt

SEQ ID NO: 3253025 - DNA, 25 bp, Homo sapien
ctcctggagtctggcagtaagagga

SEQ ID NO: 3253026 - DNA, 25 bp, Homo sapien
tcacacaggccatgtgctggagtgg

SEQ ID NO: 3253027 - DNA, 25 bp, Homo sapien
cagtaagaggagagctaaacccacc

SEQ ID NO: 3253028 - DNA, 25 bp, Homo sapien
taaacccaccattgtgaattgtgct

SEQ ID NO: 3253029 - DNA, 25 bp, Homo sapien
cagttagtaggctcatgatgggaac

SEQ ID NO: 3253030 - DNA, 25 bp, Homo sapien
taggctcatgatgggaacagcaagt

SEQ ID NO: 3253031 - DNA, 25 bp, Homo sapien
tagtaggctcatgatgggaacagca

SEQ ID NO: 3253032 - DNA, 25 bp, Homo sapien
gttagtaggctcatgatgggaacag

SEQ ID NO: 3253033 - DNA, 25 bp, Homo sapien
agcgttcagggcgattctccgggtt

SEQ ID NO: 3253034 - DNA, 25 bp, Homo sapien
attctccgggttggactctgggtgc

SEQ ID NO: 3253035 - DNA, 25 bp, Homo sapien
cagggcgattctccgggttggactc

SEQ ID NO: 3253036 - DNA, 25 bp, Homo sapien
tgaggagggagcgttcagggcgatt

SEQ ID NO: 3253037 - DNA, 25 bp, Homo sapien
aaagagcaataactgcttcccaaag

SEQ ID NO: 3253038 - DNA, 25 bp, Homo sapien
agccccaggtcggtggcaaagagca

SEQ ID NO: 3253039 - DNA, 25 bp, Homo sapien
aaagggctgctggagattcctcgaa

SEQ ID NO: 3253040 - DNA, 25 bp, Homo sapien
ggagctgagcgtgtccccggcagtg

SEQ ID NO: 3253041 - DNA, 25 bp, Homo sapien
aggactacagcaacggcctcgctga

SEQ ID NO: 3253042 - DNA, 25 bp, Homo sapien
gatggctgctcccttaggacttttc

SEQ ID NO: 3253043 - DNA, 25 bp, Homo sapien
agctgcttgcgggattggccacatc

SEQ ID NO: 3253044 - DNA, 25 bp, Homo sapien
ttgaccgcgcccgcatctgctgtgt

SEQ ID NO: 3253045 - DNA, 25 bp, Homo sapien
aaatgggtgaatggcgccctctttg

SEQ ID NO: 3253046 - DNA, 25 bp, Homo sapien
taaaatgggtgaatggcgccctctt

SEQ ID NO: 3253047 - DNA, 25 bp, Homo sapien
ggtgaatggcgccctctttggccat

SEQ ID NO: 3253048 - DNA, 25 bp, Homo sapien
tgtaaaatgggtgaatggcgccctc

SEQ ID NO: 3253049 - DNA, 25 bp, Homo sapien
gaagcccgcattacatctgctcttt

SEQ ID NO: 3253050 - DNA, 25 bp, Homo sapien
ccgcattacatctgctcttttctga

SEQ ID NO: 3253051 - DNA, 25 bp, Homo sapien
tcagaagcccgcattacatctgctc

SEQ ID NO: 3253052 - DNA, 25 bp, Homo sapien
cgcattacatctgctcttttctgac

SEQ ID NO: 3253053 - DNA, 25 bp, Homo sapien
taatacatgagcagcttgtacctcc

SEQ ID NO: 3253054 - DNA, 25 bp, Homo sapien
ccatctggcggatgcgtcttgcgca

SEQ ID NO: 3253055 - DNA, 25 bp, Homo sapien
catcacagtgccgtagagtggctgc

SEQ ID NO: 3253056 - DNA, 25 bp, Homo sapien
gagtggtcgcatctcccgtgtctct

SEQ ID NO: 3253057 - DNA, 25 bp, Homo sapien
tgtccccagacactctttcctggaa

SEQ ID NO: 3253058 - DNA, 25 bp, Homo sapien
ttgcaggcccttcctgcctaagctt

SEQ ID NO: 3253059 - DNA, 25 bp, Homo sapien
gggcctgctgccttccaggaagtgt

SEQ ID NO: 3253060 - DNA, 25 bp, Homo sapien
tgcctaagcttctttgcttctgggc

SEQ ID NO: 3253061 - DNA, 25 bp, Homo sapien
ttcgccttgtgaggctgaaagccgg

SEQ ID NO: 3253062 - DNA, 25 bp, Homo sapien
gctctgtgatggttcgccttgtgag

SEQ ID NO: 3253063 - DNA, 25 bp, Homo sapien
tggttccggaatcggcaccacccag

SEQ ID NO: 3253064 - DNA, 25 bp, Homo sapien
gattctgggcccgtcggtggcagca

SEQ ID NO: 3253065 - DNA, 25 bp, Homo sapien
agttcgggggccactgaaaagctgc

SEQ ID NO: 3253066 - DNA, 25 bp, Homo sapien
tggagacgctgtcaggcccagttcg

SEQ ID NO: 3253067 - DNA, 25 bp, Homo sapien
tcgggggccactgaaaagctgctac

SEQ ID NO: 3253068 - DNA, 25 bp, Homo sapien
ccagttcgggggccactgaaaagct

SEQ ID NO: 3253069 - DNA, 25 bp, Homo sapien
tggccagctgcagccactatcaagg

SEQ ID NO: 3253070 - DNA, 25 bp, Homo sapien
cttggccagctgcagccactatcaa

SEQ ID NO: 3253071 - DNA, 25 bp, Homo sapien
cagctgcagccactatcaaggacat

SEQ ID NO: 3253072 - DNA, 25 bp, Homo sapien
gccagctgcagccactatcaaggac

SEQ ID NO: 3253073 - DNA, 25 bp, Homo sapien
gagggtgcaggatagcgtcttcatc

SEQ ID NO: 3253074 - DNA, 25 bp, Homo sapien
agctctggcaggatggctaggccaa

SEQ ID NO: 3253075 - DNA, 25 bp, Homo sapien
gatggctaggccaatggcattggca

SEQ ID NO: 3253076 - DNA, 25 bp, Homo sapien
agggtgcaggatagcgtcttcatca

SEQ ID NO: 3253077 - DNA, 25 bp, Homo sapien
ccacgtcctccgtggtgccccggca

SEQ ID NO: 3253078 - DNA, 25 bp, Homo sapien
cacgtcctccgtggtgccccggcat

SEQ ID NO: 3253079 - DNA, 25 bp, Homo sapien
tagcctcagttgtgccccaaggaag

SEQ ID NO: 3253080 - DNA, 25 bp, Homo sapien
cagtgctgggactcgtggaagggca

SEQ ID NO: 3253081 - DNA, 25 bp, Homo sapien
tcacgggtcgccttctctaccttag

SEQ ID NO: 3253082 - DNA, 25 bp, Homo sapien
cctggcttggcacagaatttggctg

SEQ ID NO: 3253083 - DNA, 25 bp, Homo sapien
gtccgggaagcccggccagagccac

SEQ ID NO: 3253084 - DNA, 25 bp, Homo sapien
agaattcaatcatcctgagtgtgga

SEQ ID NO: 3253085 - DNA, 25 bp, Homo sapien
accatgcagaattcaatcatcctga

SEQ ID NO: 3253086 - DNA, 25 bp, Homo sapien
ttgtccgggaagcccggccagagcc

SEQ ID NO: 3253087 - DNA, 25 bp, Homo sapien
agctcggcccccatttccctggcca

SEQ ID NO: 3253088 - DNA, 25 bp, Homo sapien
ctggccagcaccgagccgcagggga

SEQ ID NO: 3253089 - DNA, 25 bp, Homo sapien
ccgcaggggagggtgagaatctttg

SEQ ID NO: 3253090 - DNA, 25 bp, Homo sapien
caggggagggtgagaatctttggca

SEQ ID NO: 3253091 - DNA, 25 bp, Homo sapien
gaatccaggtgttgctccgaaggta

SEQ ID NO: 3253092 - DNA, 25 bp, Homo sapien
gaaattgtcctagatcacccgggtg

SEQ ID NO: 3253093 - DNA, 25 bp, Homo sapien
tatccagtcgaacatgaatccaggt

SEQ ID NO: 3253094 - DNA, 25 bp, Homo sapien
tcctgggatcgagggaagaccaagt

SEQ ID NO: 3253095 - DNA, 25 bp, Homo sapien
gccagttatggaggccatgggacag

SEQ ID NO: 3253096 - DNA, 25 bp, Homo sapien
aggccatgggacaggccttctggct

SEQ ID NO: 3253097 - DNA, 25 bp, Homo sapien
cctggtgtcctctttgggccagtta

SEQ ID NO: 3253098 - DNA, 25 bp, Homo sapien
ctctttgggccagttatggaggcca

SEQ ID NO: 3253099 - DNA, 25 bp, Homo sapien
tacaccgacagcttgttacatgcaa

SEQ ID NO: 3253100 - DNA, 25 bp, Homo sapien
tattgcagtgctatcactgatgaca

SEQ ID NO: 3253101 - DNA, 25 bp, Homo sapien
aattcatttccacagatatacaccg

SEQ ID NO: 3253102 - DNA, 25 bp, Homo sapien
tgctatcactgatgacaaattcatt

SEQ ID NO: 3253103 - DNA, 25 bp, Homo sapien
cgtatctcagcaagaatgggcagga

SEQ ID NO: 3253104 - DNA, 25 bp, Homo sapien
ggtccagcatttcaccctacagagg

SEQ ID NO: 3253105 - DNA, 25 bp, Homo sapien
caaagggcccgtcatgagtggctaa

SEQ ID NO: 3253106 - DNA, 25 bp, Homo sapien
aaagtacagagagggcattcaggcc

SEQ ID NO: 3253107 - DNA, 25 bp, Homo sapien
cgctcagcgtccacgagaactaagc

SEQ ID NO: 3253108 - DNA, 25 bp, Homo sapien
taggagacaccctcaacaggtgggc

SEQ ID NO: 3253109 - DNA, 25 bp, Homo sapien
ggctgaacgctcagcgtccacgaga

SEQ ID NO: 3253110 - DNA, 25 bp, Homo sapien
aacaggtgggccactcacggctgaa

SEQ ID NO: 3253111 - DNA, 25 bp, Homo sapien
tgggatcagcgctgcagccagaacc

SEQ ID NO: 3253112 - DNA, 25 bp, Homo sapien
ttcattcattgactcttgcaggtag

SEQ ID NO: 3253113 - DNA, 25 bp, Homo sapien
caggtagtgcacaccaagggtgcga

SEQ ID NO: 3253114 - DNA, 25 bp, Homo sapien
cattggtttattcccgcactccttc

SEQ ID NO: 3253115 - DNA, 25 bp, Homo sapien
agacctctgcaagtgcccgcagagg

SEQ ID NO: 3253116 - DNA, 25 bp, Homo sapien
caactgctttgagatcacggtagag

SEQ ID NO: 3253117 - DNA, 25 bp, Homo sapien
ttgcgggacccttaaatgcctcatg

SEQ ID NO: 3253118 - DNA, 25 bp, Homo sapien
gggaagcctgtggactttgccgcca

SEQ ID NO: 3253119 - DNA, 25 bp, Homo sapien
ccaagcggcctgagctcaagatgca

SEQ ID NO: 3253120 - DNA, 25 bp, Homo sapien
agggctctgccctgacactctatac

SEQ ID NO: 3253121 - DNA, 25 bp, Homo sapien
ctctataccccagcatggataataa

SEQ ID NO: 3253122 - DNA, 25 bp, Homo sapien
taaataaaagaagacggactgatgt

SEQ ID NO: 3253123 - DNA, 25 bp, Homo sapien
aaaagaagacggactgatgtttaca

SEQ ID NO: 3253124 - DNA, 25 bp, Homo sapien
taaataaaagaagacggactgatgt

SEQ ID NO: 3253125 - DNA, 25 bp, Homo sapien
agggctctgccctgacactctatac

SEQ ID NO: 3253126 - DNA, 25 bp, Homo sapien
ctctataccccagcatggataataa

SEQ ID NO: 3253127 - DNA, 25 bp, Homo sapien
aaaagaagacggactgatgtttaca

SEQ ID NO: 3253128 - DNA, 25 bp, Homo sapien
tggtggcatcggaacaccgggacca

SEQ ID NO: 3253129 - DNA, 25 bp, Homo sapien
atgcaagggaacagcgccgcctggt

SEQ ID NO: 3253130 - DNA, 25 bp, Homo sapien
ggagaaggtgcacccagtccctggt

SEQ ID NO: 3253131 - DNA, 25 bp, Homo sapien
agcgagccctcggtggaaacctgga

SEQ ID NO: 3253132 - DNA, 25 bp, Homo sapien
cactagggctatatgtaagctccga

SEQ ID NO: 3253133 - DNA, 25 bp, Homo sapien
ttctgggatataacccactagggct

SEQ ID NO: 3253134 - DNA, 25 bp, Homo sapien
aacagctccagttgtttcctcaagt

SEQ ID NO: 3253135 - DNA, 25 bp, Homo sapien
gaacaaggtgccgtgaagagccaca

SEQ ID NO: 3253136 - DNA, 25 bp, Homo sapien
gagacttgtcaaaggcgtctctggg

SEQ ID NO: 3253137 - DNA, 25 bp, Homo sapien
cagagacttgtcaaaggcgtctctg

SEQ ID NO: 3253138 - DNA, 25 bp, Homo sapien
tcacagagacttgtcaaaggcgtct

SEQ ID NO: 3253139 - DNA, 25 bp, Homo sapien
tgtggtggagggtggactgagccat

SEQ ID NO: 3253140 - DNA, 25 bp, Homo sapien
tggatttttctcgtcgtgaaaaagc

SEQ ID NO: 3253141 - DNA, 25 bp, Homo sapien
tcctggatttttctcgtcgtgaaaa

SEQ ID NO: 3253142 - DNA, 25 bp, Homo sapien
tttctcgtcgtgaaaaagcacttcc

SEQ ID NO: 3253143 - DNA, 25 bp, Homo sapien
gatttttctcgtcgtgaaaaagcac

SEQ ID NO: 3253144 - DNA, 25 bp, Homo sapien
gtccaccgaatgtggccctcggcag

SEQ ID NO: 3253145 - DNA, 25 bp, Homo sapien
catttcttctttgaaccgtccaccg

SEQ ID NO: 3253146 - DNA, 25 bp, Homo sapien
ttgaaccgtccaccgaatgtggccc

SEQ ID NO: 3253147 - DNA, 25 bp, Homo sapien
ccgaatgtggccctcggcagctgca

SEQ ID NO: 3253148 - DNA, 25 bp, Homo sapien
actggcgaacgatcagggccaggcc

SEQ ID NO: 3253149 - DNA, 25 bp, Homo sapien
tttctctctgctaagtgccgtgttc

SEQ ID NO: 3253150 - DNA, 25 bp, Homo sapien
caagcatgacaccataaaacactgg

SEQ ID NO: 3253151 - DNA, 25 bp, Homo sapien
gttttgaccgctgggcagatcctgt

SEQ ID NO: 3253152 - DNA, 25 bp, Homo sapien
ctaactgcgcctctctggcttcctg

SEQ ID NO: 3253153 - DNA, 25 bp, Homo sapien
cttaggaggtgtctgcaggttggcc

SEQ ID NO: 3253154 - DNA, 25 bp, Homo sapien
gccatgtctacagccaggttgagac

SEQ ID NO: 3253155 - DNA, 25 bp, Homo sapien
gtgggcggcaggccccgacactggg

SEQ ID NO: 3253156 - DNA, 25 bp, Homo sapien
gattcctgagggtgacagagtaagg

SEQ ID NO: 3253157 - DNA, 25 bp, Homo sapien
cctgagggtgacagagtaaggggac

SEQ ID NO: 3253158 - DNA, 25 bp, Homo sapien
tgagggtgacagagtaaggggaccc

SEQ ID NO: 3253159 - DNA, 25 bp, Homo sapien
ttcctgagggtgacagagtaagggg

SEQ ID NO: 3253160 - DNA, 25 bp, Homo sapien
cgctggctacatggaaggtatctgg

SEQ ID NO: 3253161 - DNA, 25 bp, Homo sapien
gaaggtatctggcactggagttctc

SEQ ID NO: 3253162 - DNA, 25 bp, Homo sapien
cactggagttctctgctctgaacct

SEQ ID NO: 3253163 - DNA, 25 bp, Homo sapien
gctacatggaaggtatctggcactg

SEQ ID NO: 3253164 - DNA, 25 bp, Homo sapien
gcggcagcgccacatcaagcagggc

SEQ ID NO: 3253165 - DNA, 25 bp, Homo sapien
gcagcgccacatcaagcagggccag

SEQ ID NO: 3253166 - DNA, 25 bp, Homo sapien
cagggagcggcagcgccacatcaag

SEQ ID NO: 3253167 - DNA, 25 bp, Homo sapien
gagcggcagcgccacatcaagcagg

SEQ ID NO: 3253168 - DNA, 25 bp, Homo sapien
gagaagcagccgtgtgcatcatggg

SEQ ID NO: 3253169 - DNA, 25 bp, Homo sapien
gaggatcctggcacactggagcggg

SEQ ID NO: 3253170 - DNA, 25 bp, Homo sapien
gggctcccagagaagcagccgtgtg

SEQ ID NO: 3253171 - DNA, 25 bp, Homo sapien
caaggccgcgtgcaatgccagcgtg

SEQ ID NO: 3253172 - DNA, 25 bp, Homo sapien
agatgcagccgtgagcaggtgtgca

SEQ ID NO: 3253173 - DNA, 25 bp, Homo sapien
ctgcaccatccccaattggtgagtc

SEQ ID NO: 3253174 - DNA, 25 bp, Homo sapien
tgtgcatgggaagaaggttcgtgct

SEQ ID NO: 3253175 - DNA, 25 bp, Homo sapien
attggtgagtcccagtcactccccg

SEQ ID NO: 3253176 - DNA, 25 bp, Homo sapien
cttactggtaagaaatccgatcgga

SEQ ID NO: 3253177 - DNA, 25 bp, Homo sapien
ggcaggcatcgccagtgtcacctta

SEQ ID NO: 3253178 - DNA, 25 bp, Homo sapien
agcccacgtggcaggcatcgccagt

SEQ ID NO: 3253179 - DNA, 25 bp, Homo sapien
tccgatcggattctctgatcctgcc

SEQ ID NO: 3253180 - DNA, 25 bp, Homo sapien
ccgctgagcactcagagtggtccca

SEQ ID NO: 3253181 - DNA, 25 bp, Homo sapien
cagggaccaccctggcaactaagga

SEQ ID NO: 3253182 - DNA, 25 bp, Homo sapien
gcactcagagtggtcccagggacca

SEQ ID NO: 3253183 - DNA, 25 bp, Homo sapien
accctggcaactaaggacacagtga

SEQ ID NO: 3253184 - DNA, 25 bp, Homo sapien
gctcctcccctacgagaggaggctg

SEQ ID NO: 3253185 - DNA, 25 bp, Homo sapien
ctgccccggtgagggtttgaatgct

SEQ ID NO: 3253186 - DNA, 25 bp, Homo sapien
cgggagcagagatgacgtccaccca

SEQ ID NO: 3253187 - DNA, 25 bp, Homo sapien
tgagggtttgaatgcttcagggaca

SEQ ID NO: 3253188 - DNA, 25 bp, Homo sapien
agccttggtgtcctcgtcgcgaagg

SEQ ID NO: 3253189 - DNA, 25 bp, Homo sapien
tgtcctcgtcgcgaaggtgaccgtg

SEQ ID NO: 3253190 - DNA, 25 bp, Homo sapien
gggcaccagctttgcacagagcctg

SEQ ID NO: 3253191 - DNA, 25 bp, Homo sapien
accagctttgcacagagcctgcggg

SEQ ID NO: 3253192 - DNA, 25 bp, Homo sapien
ctgggtcagggcaagtccgggaagg

SEQ ID NO: 3253193 - DNA, 25 bp, Homo sapien
cagggctggatttgcccagaatgcc

SEQ ID NO: 3253194 - DNA, 25 bp, Homo sapien
gaccagggctggatttgcccagaat

SEQ ID NO: 3253195 - DNA, 25 bp, Homo sapien
tcagggcaagtccgggaagggacca

SEQ ID NO: 3253196 - DNA, 25 bp, Homo sapien
gaccataatcatctttacgctgcgg

SEQ ID NO: 3253197 - DNA, 25 bp, Homo sapien
cagagaccataatcatctttacgct

SEQ ID NO: 3253198 - DNA, 25 bp, Homo sapien
catctttacgctgcggttttctaca

SEQ ID NO: 3253199 - DNA, 25 bp, Homo sapien
taatcatctttacgctgcggttttc

SEQ ID NO: 3253200 - DNA, 25 bp, Homo sapien
gctcggatcatgagaattgccacag

SEQ ID NO: 3253201 - DNA, 25 bp, Homo sapien
tcgggtattgatcggagatttcact

SEQ ID NO: 3253202 - DNA, 25 bp, Homo sapien
agctggtggctccacgcggttctcg

SEQ ID NO: 3253203 - DNA, 25 bp, Homo sapien
caagctccctggttgatatctgcag

SEQ ID NO: 3253204 - DNA, 25 bp, Homo sapien
gatatacggctgctgccaatgacag

SEQ ID NO: 3253205 - DNA, 25 bp, Homo sapien
tgggatggtgcagccccttctgaat

SEQ ID NO: 3253206 - DNA, 25 bp, Homo sapien
gctgcctcctccattatcattctgg

SEQ ID NO: 3253207 - DNA, 25 bp, Homo sapien
caaaacaaccgaagtctagacgcat

SEQ ID NO: 3253208 - DNA, 25 bp, Homo sapien
tgatccagtcggtccccagggatgg

SEQ ID NO: 3253209 - DNA, 25 bp, Homo sapien
cgctgatccagtcggtccccaggga

SEQ ID NO: 3253210 - DNA, 25 bp, Homo sapien
tgctccttcggctccgctgatccag

SEQ ID NO: 3253211 - DNA, 25 bp, Homo sapien
ttcggctccgctgatccagtcggtc

SEQ ID NO: 3253212 - DNA, 25 bp, Homo sapien
gcttgtccagggcagttcctgggag

SEQ ID NO: 3253213 - DNA, 25 bp, Homo sapien
cagttcctgggagtggctggaggga

SEQ ID NO: 3253214 - DNA, 25 bp, Homo sapien
catggacacggtggaggcttgtcca

SEQ ID NO: 3253215 - DNA, 25 bp, Homo sapien
tcacatggacacggtggaggcttgt

SEQ ID NO: 3253216 - DNA, 25 bp, Homo sapien
gagagaaatcagaggcagggacctc

SEQ ID NO: 3253217 - DNA, 25 bp, Homo sapien
gcaggagagaaatcagaggcaggga

SEQ ID NO: 3253218 - DNA, 25 bp, Homo sapien
ctgggcaggagagaaatcagaggca

SEQ ID NO: 3253219 - DNA, 25 bp, Homo sapien
caggagagaaatcagaggcagggac

SEQ ID NO: 3253220 - DNA, 25 bp, Homo sapien
tgctctgagctattctggtcaccag

SEQ ID NO: 3253221 - DNA, 25 bp, Homo sapien
tctgagctattctggtcaccagcat

SEQ ID NO: 3253222 - DNA, 25 bp, Homo sapien
agcatcacctttctcgtcagaaaga

SEQ ID NO: 3253223 - DNA, 25 bp, Homo sapien
cagaaagaaaagacgcttgcctaca

SEQ ID NO: 3253224 - DNA, 25 bp, Homo sapien
gatgaatcctgggaccgccagagta

SEQ ID NO: 3253225 - DNA, 25 bp, Homo sapien
aatggcactgtctgatgaatcctgg

SEQ ID NO: 3253226 - DNA, 25 bp, Homo sapien
gggaccgccagagtagatcaggaca

SEQ ID NO: 3253227 - DNA, 25 bp, Homo sapien
tgaaccccatatcctctgagaaaag

SEQ ID NO: 3253228 - DNA, 25 bp, Homo sapien
tctcagatctggtcccatcaatgac

SEQ ID NO: 3253229 - DNA, 25 bp, Homo sapien
tccttcatccaggttctcagatctg

SEQ ID NO: 3253230 - DNA, 25 bp, Homo sapien
agatctggtcccatcaatgacctct

SEQ ID NO: 3253231 - DNA, 25 bp, Homo sapien
atccaggttctcagatctggtccca

SEQ ID NO: 3253232 - DNA, 25 bp, Homo sapien
tggccctgggaaaatagcatattac

SEQ ID NO: 3253233 - DNA, 25 bp, Homo sapien
tcataagccttagactcccatctct

SEQ ID NO: 3253234 - DNA, 25 bp, Homo sapien
aaatagcatattacccgcagaggcg

SEQ ID NO: 3253235 - DNA, 25 bp, Homo sapien
taagccttagactcccatctctggc

SEQ ID NO: 3253236 - DNA, 25 bp, Homo sapien
ggagcagtggccagtgctgcctgac

SEQ ID NO: 3253237 - DNA, 25 bp, Homo sapien
ttaagccggccctgcatctcctggg

SEQ ID NO: 3253238 - DNA, 25 bp, Homo sapien
ccctgcatctcctgggttgggagga

SEQ ID NO: 3253239 - DNA, 25 bp, Homo sapien
cggccctgcatctcctgggttggga

SEQ ID NO: 3253240 - DNA, 25 bp, Homo sapien
cttccagcagaggacttcccatgcc

SEQ ID NO: 3253241 - DNA, 25 bp, Homo sapien
gaggacttcccatgcctccattctg

SEQ ID NO: 3253242 - DNA, 25 bp, Homo sapien
ttccagcagaggacttcccatgcct

SEQ ID NO: 3253243 - DNA, 25 bp, Homo sapien
agcagaggacttcccatgcctccat

SEQ ID NO: 3253244 - DNA, 25 bp, Homo sapien
ttgcactgagggcaccagtgctctc

SEQ ID NO: 3253245 - DNA, 25 bp, Homo sapien
gtctctgtccccgtttggaacactg

SEQ ID NO: 3253246 - DNA, 25 bp, Homo sapien
actggagcacgcgtgcctgacccgt

SEQ ID NO: 3253247 - DNA, 25 bp, Homo sapien
actgagggcaccagtgctctcctgc

SEQ ID NO: 3253248 - DNA, 25 bp, Homo sapien
ggaggcttccgatgccctgctgcag

SEQ ID NO: 3253249 - DNA, 25 bp, Homo sapien
ctggcatttagtgaccgtgtgactg

SEQ ID NO: 3253250 - DNA, 25 bp, Homo sapien
tgtgactgtattgacacgggaggct

SEQ ID NO: 3253251 - DNA, 25 bp, Homo sapien
tattgacacgggaggcttccgatgc

SEQ ID NO: 3253252 - DNA, 25 bp, Homo sapien
cagggaggatggccctggaactcag

SEQ ID NO: 3253253 - DNA, 25 bp, Homo sapien
gggaggatggccctggaactcaggg

SEQ ID NO: 3253254 - DNA, 25 bp, Homo sapien
ctggcccaggcagggaggatggccc

SEQ ID NO: 3253255 - DNA, 25 bp, Homo sapien
ggcagggaggatggccctggaactc

SEQ ID NO: 3253256 - DNA, 25 bp, Homo sapien
taactgacgttatctcccttctgtc

SEQ ID NO: 3253257 - DNA, 25 bp, Homo sapien
ttagatccacctgcacatttgccct

SEQ ID NO: 3253258 - DNA, 25 bp, Homo sapien
cattgtctgtgcaatccatgttgac

SEQ ID NO: 3253259 - DNA, 25 bp, Homo sapien
ctgttgctttcactcaatgcttttt

SEQ ID NO: 3253260 - DNA, 25 bp, Homo sapien
ggtgagtccattgatcaagtccttc

SEQ ID NO: 3253261 - DNA, 25 bp, Homo sapien
gctgttgactggtctttctagattc

SEQ ID NO: 3253262 - DNA, 25 bp, Homo sapien
ttcagttctgccaatgctgttgact

SEQ ID NO: 3253263 - DNA, 25 bp, Homo sapien
ttcttatcccccatcttgtagtggg

SEQ ID NO: 3253264 - DNA, 25 bp, Homo sapien
cccgtggggaccctgagccaaggct

SEQ ID NO: 3253265 - DNA, 25 bp, Homo sapien
ctgcccgtggggaccctgagccaag

SEQ ID NO: 3253266 - DNA, 25 bp, Homo sapien
tgggctgcccgtggggaccctgagc

SEQ ID NO: 3253267 - DNA, 25 bp, Homo sapien
cgtggggaccctgagccaaggctac

SEQ ID NO: 3253268 - DNA, 25 bp, Homo sapien
catcacagagcacttgccaacagct

SEQ ID NO: 3253269 - DNA, 25 bp, Homo sapien
ctatggatgccggtcctccagggcc

SEQ ID NO: 3253270 - DNA, 25 bp, Homo sapien
agcatagccggcaacatcacagagc

SEQ ID NO: 3253271 - DNA, 25 bp, Homo sapien
ggacaaggacccgagcatagccggc

SEQ ID NO: 3253272 - DNA, 25 bp, Homo sapien
tgggcctggagtgggaggctttgca

SEQ ID NO: 3253273 - DNA, 25 bp, Homo sapien
gccaccaggagggaccccggtctgc

SEQ ID NO: 3253274 - DNA, 25 bp, Homo sapien
gggaggctttgcaggaggccaccag

SEQ ID NO: 3253275 - DNA, 25 bp, Homo sapien
ggctttgcaggaggccaccaggagg

SEQ ID NO: 3253276 - DNA, 25 bp, Homo sapien
ccttctgcgcatgggggtccagtga

SEQ ID NO: 3253277 - DNA, 25 bp, Homo sapien
cccttctgcgcatgggggtccagtg

SEQ ID NO: 3253278 - DNA, 25 bp, Homo sapien
tgccccttctgcgcatgggggtcca

SEQ ID NO: 3253279 - DNA, 25 bp, Homo sapien
ctgcgcatgggggtccagtgactct

SEQ ID NO: 3253280 - DNA, 25 bp, Homo sapien
ctcgtcggatgtagggatgttcaac

SEQ ID NO: 3253281 - DNA, 25 bp, Homo sapien
gatgtagggatgttcaacacagcca

SEQ ID NO: 3253282 - DNA, 25 bp, Homo sapien
tatcccagatctcctcgtcggatgt

SEQ ID NO: 3253283 - DNA, 25 bp, Homo sapien
cagatctcctcgtcggatgtaggga

SEQ ID NO: 3253284 - DNA, 25 bp, Homo sapien
agcattcgcggagctcctgtgtgga

SEQ ID NO: 3253285 - DNA, 25 bp, Homo sapien
tcaagctatccggttaacaagccag

SEQ ID NO: 3253286 - DNA, 25 bp, Homo sapien
cagcgggaggccttcttcacaggaa

SEQ ID NO: 3253287 - DNA, 25 bp, Homo sapien
aaacagtgaggaaacgtgcagccag

SEQ ID NO: 3253288 - DNA, 25 bp, Homo sapien
aatataacctttatgattcttcttg

SEQ ID NO: 3253289 - DNA, 25 bp, Homo sapien
cctttatgattcttcttgtggtaaa

SEQ ID NO: 3253290 - DNA, 25 bp, Homo sapien
tatgattcttcttgtggtaaagata

SEQ ID NO: 3253291 - DNA, 25 bp, Homo sapien
atcaactgaaatgcgcatcaacaat

SEQ ID NO: 3253292 - DNA, 25 bp, Homo sapien
tctatagattaggagtgggcaaact

SEQ ID NO: 3253293 - DNA, 25 bp, Homo sapien
caagtatttaactctgccattgaag

SEQ ID NO: 3253294 - DNA, 25 bp, Homo sapien
ggagccgaacaattatatcacatgg

SEQ ID NO: 3253295 - DNA, 25 bp, Homo sapien
acaaaagactgagggtaagcaatca

SEQ ID NO: 3253296 - DNA, 25 bp, Homo sapien
gattgtcatcaattagtctctcggg

SEQ ID NO: 3253297 - DNA, 25 bp, Homo sapien
cactggcaggtaatttcactcggac

SEQ ID NO: 3253298 - DNA, 25 bp, Homo sapien
taggctcaacgtggaaaggttatcg

SEQ ID NO: 3253299 - DNA, 25 bp, Homo sapien
tcactcggacagagaatcaataggc

SEQ ID NO: 3253300 - DNA, 25 bp, Homo sapien
cgcacacggtttcctaggtaaagat

SEQ ID NO: 3253301 - DNA, 25 bp, Homo sapien
tgtgcctatcatcctgaggagtaat

SEQ ID NO: 3253302 - DNA, 25 bp, Homo sapien
cacacacgcacacggtttcctaggt

SEQ ID NO: 3253303 - DNA, 25 bp, Homo sapien
aacccggttacactcctattatatg

SEQ ID NO: 3253304 - DNA, 25 bp, Homo sapien
ttttcccacgggcatgtaagtcatc

SEQ ID NO: 3253305 - DNA, 25 bp, Homo sapien
tcctgaatggacctcaggcgccctg

SEQ ID NO: 3253306 - DNA, 25 bp, Homo sapien
tgcccgcttcccatgagtcgaaacg

SEQ ID NO: 3253307 - DNA, 25 bp, Homo sapien
tgtgctcttgctggaacccacataa

SEQ ID NO: 3253308 - DNA, 25 bp, Homo sapien
tgctaagccagacagccggaagaca

SEQ ID NO: 3253309 - DNA, 25 bp, Homo sapien
gatatgcacggcttattttggcctt

SEQ ID NO: 3253310 - DNA, 25 bp, Homo sapien
agaatccaggatatgcacggcttat

SEQ ID NO: 3253311 - DNA, 25 bp, Homo sapien
tcattcctgctaagccagacagccg

SEQ ID NO: 3253312 - DNA, 25 bp, Homo sapien
ttttcttaaactgccgtcgcacgtc

SEQ ID NO: 3253313 - DNA, 25 bp, Homo sapien
ttaaactgccgtcgcacgtccgaaa

SEQ ID NO: 3253314 - DNA, 25 bp, Homo sapien
cgcacgtccgaaaccgctcactatg

SEQ ID NO: 3253315 - DNA, 25 bp, Homo sapien
tcgcacgtccgaaaccgctcactat

SEQ ID NO: 3253316 - DNA, 25 bp, Homo sapien
ttttcccacgggcatgtaagtcatc

SEQ ID NO: 3253317 - DNA, 25 bp, Homo sapien
tgcccgcttcccatgagtcgaaacg

SEQ ID NO: 3253318 - DNA, 25 bp, Homo sapien
tgtgctcttgctggaacccacataa

SEQ ID NO: 3253319 - DNA, 25 bp, Homo sapien
tcctgaatggacctcaggcgccctg

SEQ ID NO: 3253320 - DNA, 25 bp, Homo sapien
tcattcctgctaagccagacagccg

SEQ ID NO: 3253321 - DNA, 25 bp, Homo sapien
tgctaagccagacagccggaagaca

SEQ ID NO: 3253322 - DNA, 25 bp, Homo sapien
gatatgcacggcttattttggcctt

SEQ ID NO: 3253323 - DNA, 25 bp, Homo sapien
agaatccaggatatgcacggcttat

SEQ ID NO: 3253324 - DNA, 25 bp, Homo sapien
ttttcttaaactgccgtcgcacgtc

SEQ ID NO: 3253325 - DNA, 25 bp, Homo sapien
ttaaactgccgtcgcacgtccgaaa

SEQ ID NO: 3253326 - DNA, 25 bp, Homo sapien
tcgcacgtccgaaaccgctcactat

SEQ ID NO: 3253327 - DNA, 25 bp, Homo sapien
cgcacgtccgaaaccgctcactatg

SEQ ID NO: 3253328 - DNA, 25 bp, Homo sapien
ttttcccacgggcatgtaagtcatc

SEQ ID NO: 3253329 - DNA, 25 bp, Homo sapien
tcctgaatggacctcaggcgccctg

SEQ ID NO: 3253330 - DNA, 25 bp, Homo sapien
tgcccgcttcccatgagtcgaaacg

SEQ ID NO: 3253331 - DNA, 25 bp, Homo sapien
tgtgctcttgctggaacccacataa

SEQ ID NO: 3253332 - DNA, 25 bp, Homo sapien
tcattcctgctaagccagacagccg

SEQ ID NO: 3253333 - DNA, 25 bp, Homo sapien
agaatccaggatatgcacggcttat

SEQ ID NO: 3253334 - DNA, 25 bp, Homo sapien
tgctaagccagacagccggaagaca

SEQ ID NO: 3253335 - DNA, 25 bp, Homo sapien
gatatgcacggcttattttggcctt

SEQ ID NO: 3253336 - DNA, 25 bp, Homo sapien
ttaaactgccgtcgcacgtccgaaa

SEQ ID NO: 3253337 - DNA, 25 bp, Homo sapien
tcgcacgtccgaaaccgctcactat

SEQ ID NO: 3253338 - DNA, 25 bp, Homo sapien
cgcacgtccgaaaccgctcactatg

SEQ ID NO: 3253339 - DNA, 25 bp, Homo sapien
ttttcttaaactgccgtcgcacgtc

SEQ ID NO: 3253340 - DNA, 25 bp, Homo sapien
ttttcccacgggcatgtaagtcatc

SEQ ID NO: 3253341 - DNA, 25 bp, Homo sapien
tcctgaatggacctcaggcgccctg

SEQ ID NO: 3253342 - DNA, 25 bp, Homo sapien
tgcccgcttcccatgagtcgaaacg

SEQ ID NO: 3253343 - DNA, 25 bp, Homo sapien
tgtgctcttgctggaacccacataa

SEQ ID NO: 3253344 - DNA, 25 bp, Homo sapien
tcattcctgctaagccagacagccg

SEQ ID NO: 3253345 - DNA, 25 bp, Homo sapien
gatatgcacggcttattttggcctt

SEQ ID NO: 3253346 - DNA, 25 bp, Homo sapien
agaatccaggatatgcacggcttat

SEQ ID NO: 3253347 - DNA, 25 bp, Homo sapien
tgctaagccagacagccggaagaca

SEQ ID NO: 3253348 - DNA, 25 bp, Homo sapien
ttaaactgccgtcgcacgtccgaaa

SEQ ID NO: 3253349 - DNA, 25 bp, Homo sapien
ttttcttaaactgccgtcgcacgtc

SEQ ID NO: 3253350 - DNA, 25 bp, Homo sapien
tcgcacgtccgaaaccgctcactat

SEQ ID NO: 3253351 - DNA, 25 bp, Homo sapien
cgcacgtccgaaaccgctcactatg

SEQ ID NO: 3253352 - DNA, 25 bp, Homo sapien
tgtgctcttgctggaacccacataa

SEQ ID NO: 3253353 - DNA, 25 bp, Homo sapien
ttttcccacgggcatgtaagtcatc

SEQ ID NO: 3253354 - DNA, 25 bp, Homo sapien
tgcccgcttcccatgagtcgaaacg

SEQ ID NO: 3253355 - DNA, 25 bp, Homo sapien
tcctgaatggacctcaggcgccctg

SEQ ID NO: 3253356 - DNA, 25 bp, Homo sapien
tcattcctgctaagccagacagccg

SEQ ID NO: 3253357 - DNA, 25 bp, Homo sapien
agaatccaggatatgcacggcttat

SEQ ID NO: 3253358 - DNA, 25 bp, Homo sapien
tgctaagccagacagccggaagaca

SEQ ID NO: 3253359 - DNA, 25 bp, Homo sapien
gatatgcacggcttattttggcctt

SEQ ID NO: 3253360 - DNA, 25 bp, Homo sapien
tcgcacgtccgaaaccgctcactat

SEQ ID NO: 3253361 - DNA, 25 bp, Homo sapien
ttaaactgccgtcgcacgtccgaaa

SEQ ID NO: 3253362 - DNA, 25 bp, Homo sapien
cgcacgtccgaaaccgctcactatg

SEQ ID NO: 3253363 - DNA, 25 bp, Homo sapien
ttttcttaaactgccgtcgcacgtc

SEQ ID NO: 3253364 - DNA, 25 bp, Homo sapien
tagtgatggctacatctcaggatga

SEQ ID NO: 3253365 - DNA, 25 bp, Homo sapien
ttcagtgtgtatttctgaatatgac

SEQ ID NO: 3253366 - DNA, 25 bp, Homo sapien
tggggtcgtgagtcttccgaacctc

SEQ ID NO: 3253367 - DNA, 25 bp, Homo sapien
gatgagcccgcatatgggaaacatc

SEQ ID NO: 3253368 - DNA, 25 bp, Homo sapien
cgtcagttgttggtcggcatgagaa

SEQ ID NO: 3253369 - DNA, 25 bp, Homo sapien
gggtgtgtttcattcgtcagttgtt

SEQ ID NO: 3253370 - DNA, 25 bp, Homo sapien
taggtttgcgtgtgaggtaattgca

SEQ ID NO: 3253371 - DNA, 25 bp, Homo sapien
taattgcaggggactcggtttcgta

SEQ ID NO: 3253372 - DNA, 25 bp, Homo sapien
gacatccgtggatcattctcgccac

SEQ ID NO: 3253373 - DNA, 25 bp, Homo sapien
tgggacatccgtggatcattctcgc

SEQ ID NO: 3253374 - DNA, 25 bp, Homo sapien
tgtgggacatccgtggatcattctc

SEQ ID NO: 3253375 - DNA, 25 bp, Homo sapien
catgtgggacatccgtggatcattc

SEQ ID NO: 3253376 - DNA, 25 bp, Homo sapien
agaagaacggtgctcttctttcttc

SEQ ID NO: 3253377 - DNA, 25 bp, Homo sapien
tgaatggacctcaggcgccctggga

SEQ ID NO: 3253378 - DNA, 25 bp, Homo sapien
aagagaagaacggtgctcttctttc

SEQ ID NO: 3253379 - DNA, 25 bp, Homo sapien
tcgccgtttttacactggttcctga

SEQ ID NO: 3253380 - DNA, 25 bp, Homo sapien
ttttcccacgggcatgtaagtcatc

SEQ ID NO: 3253381 - DNA, 25 bp, Homo sapien
tgtgctcttgctggaacccacataa

SEQ ID NO: 3253382 - DNA, 25 bp, Homo sapien
tgcccgcttcccatgagtcgaaacg

SEQ ID NO: 3253383 - DNA, 25 bp, Homo sapien
cggacagaccgacttgcctgtttca

SEQ ID NO: 3253384 - DNA, 25 bp, Homo sapien
tcattcctgctaagccagacagccg

SEQ ID NO: 3253385 - DNA, 25 bp, Homo sapien
agaatccaggatatgcacggcttat

SEQ ID NO: 3253386 - DNA, 25 bp, Homo sapien
gatatgcacggcttattttggcctt

SEQ ID NO: 3253387 - DNA, 25 bp, Homo sapien
tgctaagccagacagccggaagaca

SEQ ID NO: 3253388 - DNA, 25 bp, Homo sapien
tcgcacgtccgaaaccgctcactat

SEQ ID NO: 3253389 - DNA, 25 bp, Homo sapien
ttaaactgccgtcgcacgtccgaaa

SEQ ID NO: 3253390 - DNA, 25 bp, Homo sapien
cgcacgtccgaaaccgctcactatg

SEQ ID NO: 3253391 - DNA, 25 bp, Homo sapien
ttttcttaaactgccgtcgcacgtc

SEQ ID NO: 3253392 - DNA, 25 bp, Homo sapien
tcctgaatggacctcaggcgccctg

SEQ ID NO: 3253393 - DNA, 25 bp, Homo sapien
tgcccgcttcccatgagtcgaaacg

SEQ ID NO: 3253394 - DNA, 25 bp, Homo sapien
ttttcccacgggcatgtaagtcatc

SEQ ID NO: 3253395 - DNA, 25 bp, Homo sapien
tgtgctcttgctggaacccacataa

SEQ ID NO: 3253396 - DNA, 25 bp, Homo sapien
tcattcctgctaagccagacagccg

SEQ ID NO: 3253397 - DNA, 25 bp, Homo sapien
tgctaagccagacagccggaagaca

SEQ ID NO: 3253398 - DNA, 25 bp, Homo sapien
agaatccaggatatgcacggcttat

SEQ ID NO: 3253399 - DNA, 25 bp, Homo sapien
gatatgcacggcttattttggcctt

SEQ ID NO: 3253400 - DNA, 25 bp, Homo sapien
cgcacgtccgaaaccgctcactatg

SEQ ID NO: 3253401 - DNA, 25 bp, Homo sapien
tcgcacgtccgaaaccgctcactat

SEQ ID NO: 3253402 - DNA, 25 bp, Homo sapien
ttaaactgccgtcgcacgtccgaaa

SEQ ID NO: 3253403 - DNA, 25 bp, Homo sapien
ttttcttaaactgccgtcgcacgtc

SEQ ID NO: 3253404 - DNA, 25 bp, Homo sapien
ttttcccacgggcatgtaagtcatc

SEQ ID NO: 3253405 - DNA, 25 bp, Homo sapien
tcctgaatggacctcaggcgccctg

SEQ ID NO: 3253406 - DNA, 25 bp, Homo sapien
tgcccgcttcccatgagtcgaaacg

SEQ ID NO: 3253407 - DNA, 25 bp, Homo sapien
tgtgctcttgctggaacccacataa

SEQ ID NO: 3253408 - DNA, 25 bp, Homo sapien
tcattcctgctaagccagacagccg

SEQ ID NO: 3253409 - DNA, 25 bp, Homo sapien
gatatgcacggcttattttggcctt

SEQ ID NO: 3253410 - DNA, 25 bp, Homo sapien
agaatccaggatatgcacggcttat

SEQ ID NO: 3253411 - DNA, 25 bp, Homo sapien
tgctaagccagacagccggaagaca

SEQ ID NO: 3253412 - DNA, 25 bp, Homo sapien
ttttcttaaactgccgtcgcacgtc

SEQ ID NO: 3253413 - DNA, 25 bp, Homo sapien
ttaaactgccgtcgcacgtccgaaa

SEQ ID NO: 3253414 - DNA, 25 bp, Homo sapien
cgcacgtccgaaaccgctcactatg

SEQ ID NO: 3253415 - DNA, 25 bp, Homo sapien
tcgcacgtccgaaaccgctcactat

SEQ ID NO: 3253416 - DNA, 25 bp, Homo sapien
ttttcccacgggcatgtaagtcatc

SEQ ID NO: 3253417 - DNA, 25 bp, Homo sapien
tcctgaatggacctcaggcgccctg

SEQ ID NO: 3253418 - DNA, 25 bp, Homo sapien
tgtgctcttgctggaacccacataa

SEQ ID NO: 3253419 - DNA, 25 bp, Homo sapien
tgcccgcttcccatgagtcgaaacg

SEQ ID NO: 3253420 - DNA, 25 bp, Homo sapien
agaatccaggatatgcacggcttat

SEQ ID NO: 3253421 - DNA, 25 bp, Homo sapien
tcattcctgctaagccagacagccg

SEQ ID NO: 3253422 - DNA, 25 bp, Homo sapien
tgctaagccagacagccggaagaca

SEQ ID NO: 3253423 - DNA, 25 bp, Homo sapien
gatatgcacggcttattttggcctt

SEQ ID NO: 3253424 - DNA, 25 bp, Homo sapien
cgcacgtccgaaaccgctcactatg

SEQ ID NO: 3253425 - DNA, 25 bp, Homo sapien
ttttcttaaactgccgtcgcacgtc

SEQ ID NO: 3253426 - DNA, 25 bp, Homo sapien
tcgcacgtccgaaaccgctcactat

SEQ ID NO: 3253427 - DNA, 25 bp, Homo sapien
ttaaactgccgtcgcacgtccgaaa

SEQ ID NO: 3253428 - DNA, 25 bp, Homo sapien
gtagttcatccagacatccagttgg

SEQ ID NO: 3253429 - DNA, 25 bp, Homo sapien
atccagacatccagttggaagtggg

SEQ ID NO: 3253430 - DNA, 25 bp, Homo sapien
cagtagttcatccagacatccagtt

SEQ ID NO: 3253431 - DNA, 25 bp, Homo sapien
gttcatccagacatccagttggaag

SEQ ID NO: 3253432 - DNA, 25 bp, Homo sapien
cactgaattctaacaccagggccca

SEQ ID NO: 3253433 - DNA, 25 bp, Homo sapien
actgaattctaacaccagggcccag

SEQ ID NO: 3253434 - DNA, 25 bp, Homo sapien
acactgaattctaacaccagggccc

SEQ ID NO: 3253435 - DNA, 25 bp, Homo sapien
tacactgaattctaacaccagggcc

SEQ ID NO: 3253436 - DNA, 25 bp, Homo sapien
gaggatcttgttttggctttcaggc

SEQ ID NO: 3253437 - DNA, 25 bp, Homo sapien
tggacagctttgtaataagaggatc

SEQ ID NO: 3253438 - DNA, 25 bp, Homo sapien
caggccttcacataggttgtttaga

SEQ ID NO: 3253439 - DNA, 25 bp, Homo sapien
gttgtttagatcatggaagtgtttc

SEQ ID NO: 3253440 - DNA, 25 bp, Homo sapien
ttcgtcattcctatcaccgtgtcat

SEQ ID NO: 3253441 - DNA, 25 bp, Homo sapien
cttcgtcattcctatcaccgtgtca

SEQ ID NO: 3253442 - DNA, 25 bp, Homo sapien
ttgaagacttatatggtctctgtcc

SEQ ID NO: 3253443 - DNA, 25 bp, Homo sapien
tgccatctaaggtgaaaacaattag

SEQ ID NO: 3253444 - DNA, 25 bp, Homo sapien
cattgaagacttatatggtctctgt

SEQ ID NO: 3253445 - DNA, 25 bp, Homo sapien
catcttgtgccatctaaggtgaaaa

SEQ ID NO: 3253446 - DNA, 25 bp, Homo sapien
ttaggggacaaaagattatgaaggc

SEQ ID NO: 3253447 - DNA, 25 bp, Homo sapien
gcaaccttctcccaaatcattacat

SEQ ID NO: 3253448 - DNA, 25 bp, Homo sapien
gggacaaaagattatgaaggcattt

SEQ ID NO: 3253449 - DNA, 25 bp, Homo sapien
tccactatgagttaacaaacactga

SEQ ID NO: 3253450 - DNA, 25 bp, Homo sapien
atgcatggatatcgtgtgtgttttc

SEQ ID NO: 3253451 - DNA, 25 bp, Homo sapien
gtcatactggtggatgcatcttttc

SEQ ID NO: 3253452 - DNA, 25 bp, Homo sapien
cattgtcatactggtggatgcatct

SEQ ID NO: 3253453 - DNA, 25 bp, Homo sapien
ctgatgataggatgcatggatatcg

SEQ ID NO: 3253454 - DNA, 25 bp, Homo sapien
atataggatttgctcatctggtacc

SEQ ID NO: 3253455 - DNA, 25 bp, Homo sapien
ggattctggtcttgaagaaattctc

SEQ ID NO: 3253456 - DNA, 25 bp, Homo sapien
ctgcaaaattatataggatttgctc

SEQ ID NO: 3253457 - DNA, 25 bp, Homo sapien
ctggattctggtcttgaagaaattc

SEQ ID NO: 3253458 - DNA, 25 bp, Homo sapien
cgagggacaccagatgactgatatt

SEQ ID NO: 3253459 - DNA, 25 bp, Homo sapien
tgatattttccagcgtcacatctct

SEQ ID NO: 3253460 - DNA, 25 bp, Homo sapien
tctgtacagctttctcttggatgtg

SEQ ID NO: 3253461 - DNA, 25 bp, Homo sapien
gatgactgatattttccagcgtcac

SEQ ID NO: 3253462 - DNA, 25 bp, Homo sapien
ttcctgggtgaagtcaatagctaca

SEQ ID NO: 3253463 - DNA, 25 bp, Homo sapien
cttcctgggtgaagtcaatagctac

SEQ ID NO: 3253464 - DNA, 25 bp, Homo sapien
agctacatcttcaaaagtcactttc

SEQ ID NO: 3253465 - DNA, 25 bp, Homo sapien
agtcaatagctacatcttcaaaagt

SEQ ID NO: 3253466 - DNA, 25 bp, Homo sapien
ctgactgtggagaataacataatat

SEQ ID NO: 3253467 - DNA, 25 bp, Homo sapien
actgactgtggagaataacataata

SEQ ID NO: 3253468 - DNA, 25 bp, Homo sapien
gaactgaatgtacacagaagtcctc

SEQ ID NO: 3253469 - DNA, 25 bp, Homo sapien
agaactgaatgtacacagaagtcct

SEQ ID NO: 3253470 - DNA, 25 bp, Homo sapien
ttcagagaactgaatgtacacagaa

SEQ ID NO: 3253471 - DNA, 25 bp, Homo sapien
ctcttcagagaactgaatgtacaca

SEQ ID NO: 3253472 - DNA, 25 bp, Homo sapien
cagtcgcatagcagagtcatctctc

SEQ ID NO: 3253473 - DNA, 25 bp, Homo sapien
catcggtttcacctaggccacagtc

SEQ ID NO: 3253474 - DNA, 25 bp, Homo sapien
gatgattgtggacatgcagtcgcat

SEQ ID NO: 3253475 - DNA, 25 bp, Homo sapien
gccacagtccccaagatgattgtgg

SEQ ID NO: 3253476 - DNA, 25 bp, Homo sapien
cagctctcgacttcctcaaaggagt

SEQ ID NO: 3253477 - DNA, 25 bp, Homo sapien
gtcatcaattcggagtttggcttcc

SEQ ID NO: 3253478 - DNA, 25 bp, Homo sapien
ggctttccttacagctctcgacttc

SEQ ID NO: 3253479 - DNA, 25 bp, Homo sapien
ggattccagaaagaattggcacagg

SEQ ID NO: 3253480 - DNA, 25 bp, Homo sapien
gcgttggagggtatctcggttcaga

SEQ ID NO: 3253481 - DNA, 25 bp, Homo sapien
tatggaacaggcgttggagggtatc

SEQ ID NO: 3253482 - DNA, 25 bp, Homo sapien
aacaggcgttggagggtatctcggt

SEQ ID NO: 3253483 - DNA, 25 bp, Homo sapien
tgctgtttgctgattttatggaaca

SEQ ID NO: 3253484 - DNA, 25 bp, Homo sapien
ctggttcttcggacccccatgtcag

SEQ ID NO: 3253485 - DNA, 25 bp, Homo sapien
ggcgcggggcgacaccgcgctgcgg

SEQ ID NO: 3253486 - DNA, 25 bp, Homo sapien
gcgacaccgcgctgcggggaggaaa

SEQ ID NO: 3253487 - DNA, 25 bp, Homo sapien
tggttcttcggacccccatgtcagg

SEQ ID NO: 3253488 - DNA, 25 bp, Homo sapien
tcacaactgagaaacattgctggcg

SEQ ID NO: 3253489 - DNA, 25 bp, Homo sapien
gtgaaaaggtctcccgattgagaac

SEQ ID NO: 3253490 - DNA, 25 bp, Homo sapien
tatgtacagaaagccttgtatagca

SEQ ID NO: 3253491 - DNA, 25 bp, Homo sapien
tggtcctagctcttgtgtcgtcctt

SEQ ID NO: 3253492 - DNA, 25 bp, Homo sapien
actctttccttctcaaggtgtccaa

SEQ ID NO: 3253493 - DNA, 25 bp, Homo sapien
atactctttccttctcaaggtgtcc

SEQ ID NO: 3253494 - DNA, 25 bp, Homo sapien
tttttccaatactctttccttctca

SEQ ID NO: 3253495 - DNA, 25 bp, Homo sapien
tccaatactctttccttctcaaggt

SEQ ID NO: 3253496 - DNA, 25 bp, Homo sapien
catctctcatgagggctgcctcaca

SEQ ID NO: 3253497 - DNA, 25 bp, Homo sapien
ctctcatgagggctgcctcacacag

SEQ ID NO: 3253498 - DNA, 25 bp, Homo sapien
ctcatgagggctgcctcacacagat

SEQ ID NO: 3253499 - DNA, 25 bp, Homo sapien
catgagggctgcctcacacagatgt

SEQ ID NO: 3253500 - DNA, 25 bp, Homo sapien
aatggtgtagtggcgtcaatgatgt

SEQ ID NO: 3253501 - DNA, 25 bp, Homo sapien
gaatggtgtagtggcgtcaatgatg

SEQ ID NO: 3253502 - DNA, 25 bp, Homo sapien
tggtgtagtggcgtcaatgatgtac

SEQ ID NO: 3253503 - DNA, 25 bp, Homo sapien
aggaatggtgtagtggcgtcaatga

SEQ ID NO: 3253504 - DNA, 25 bp, Homo sapien
gctcagcagaacagtcgaatctcat

SEQ ID NO: 3253505 - DNA, 25 bp, Homo sapien
ggctgctcagcagaacagtcgaatc

SEQ ID NO: 3253506 - DNA, 25 bp, Homo sapien
gctgctcagcagaacagtcgaatct

SEQ ID NO: 3253507 - DNA, 25 bp, Homo sapien
tacaaagtgccctgcggaggctgct

SEQ ID NO: 3253508 - DNA, 25 bp, Homo sapien
gcttgtggctgccacgcccggtttc

SEQ ID NO: 3253509 - DNA, 25 bp, Homo sapien
tgtgtctcgggtccttcaacacagc

SEQ ID NO: 3253510 - DNA, 25 bp, Homo sapien
gggcccctgtgtctcgggtccttca

SEQ ID NO: 3253511 - DNA, 25 bp, Homo sapien
ccggtttccctcgtggctggagcag

SEQ ID NO: 3253512 - DNA, 25 bp, Homo sapien
tgacacttggagcatatgttttggt

SEQ ID NO: 3253513 - DNA, 25 bp, Homo sapien
acttggagcatatgttttggtctct

SEQ ID NO: 3253514 - DNA, 25 bp, Homo sapien
tcatagttttcgtgacacttggagc

SEQ ID NO: 3253515 - DNA, 25 bp, Homo sapien
cacttggagcatatgttttggtctc

SEQ ID NO: 3253516 - DNA, 25 bp, Homo sapien
agtggcctgttgtacatccacggca

SEQ ID NO: 3253517 - DNA, 25 bp, Homo sapien
agtctgctcagtaccagagtccagg

SEQ ID NO: 3253518 - DNA, 25 bp, Homo sapien
catgggactttgtatagagaggagc

SEQ ID NO: 3253519 - DNA, 25 bp, Homo sapien
tacatccacggcatagatacagaca

SEQ ID NO: 3253520 - DNA, 25 bp, Homo sapien
cccatctccataggtgaacgctggg

SEQ ID NO: 3253521 - DNA, 25 bp, Homo sapien
gctgggggatccttgtctcttcata

SEQ ID NO: 3253522 - DNA, 25 bp, Homo sapien
agctccatatcccatctccataggt

SEQ ID NO: 3253523 - DNA, 25 bp, Homo sapien
gtgccctgtctggtcatggcatccc

SEQ ID NO: 3253524 - DNA, 25 bp, Homo sapien
tagcttcaggtttgatttgcagagt

SEQ ID NO: 3253525 - DNA, 25 bp, Homo sapien
ggcagctgcaaacagttcgatctct

SEQ ID NO: 3253526 - DNA, 25 bp, Homo sapien
gatctctctagtcccggctgaggag

SEQ ID NO: 3253527 - DNA, 25 bp, Homo sapien
ccctctccatgcttagcttcaggtt

SEQ ID NO: 3253528 - DNA, 25 bp, Homo sapien
tgtgggtgcatcacagccatcctgt

SEQ ID NO: 3253529 - DNA, 25 bp, Homo sapien
ctctgaggggatttgtgggtgcatc

SEQ ID NO: 3253530 - DNA, 25 bp, Homo sapien
atttgtgggtgcatcacagccatcc

SEQ ID NO: 3253531 - DNA, 25 bp, Homo sapien
tgggtgcatcacagccatcctgtgg

SEQ ID NO: 3253532 - DNA, 25 bp, Homo sapien
gttaccgctacttggaggaggacaa

SEQ ID NO: 3253533 - DNA, 25 bp, Homo sapien
aggacaactcggacgagagcgacgc

SEQ ID NO: 3253534 - DNA, 25 bp, Homo sapien
tacttggaggaggacaactcggacg

SEQ ID NO: 3253535 - DNA, 25 bp, Homo sapien
acaactcggacgagagcgacgcgga

SEQ ID NO: 3253536 - DNA, 25 bp, Homo sapien
catcctgactgtcagctctgtctct

SEQ ID NO: 3253537 - DNA, 25 bp, Homo sapien
tgcctgacgcagatgtatttcttgg

SEQ ID NO: 3253538 - DNA, 25 bp, Homo sapien
gacgcagatgtatttcttggtcttt

SEQ ID NO: 3253539 - DNA, 25 bp, Homo sapien
atcctgactgtcagctctgtctctc

SEQ ID NO: 3253540 - DNA, 25 bp, Homo sapien
tgcgcagcagaacagtcgaatctca

SEQ ID NO: 3253541 - DNA, 25 bp, Homo sapien
aacatacaaagtgccctgcggaggc

SEQ ID NO: 3253542 - DNA, 25 bp, Homo sapien
gcggaggctgcgcagcagaacagtc

SEQ ID NO: 3253543 - DNA, 25 bp, Homo sapien
acaggaacatacaaagtgccctgcg

SEQ ID NO: 3253544 - DNA, 25 bp, Homo sapien
tatgaggaaatccttcgtggttggg

SEQ ID NO: 3253545 - DNA, 25 bp, Homo sapien
gtccctgctgtaccctttatgagca

SEQ ID NO: 3253546 - DNA, 25 bp, Homo sapien
gctgtaccctttatgagcaatgctt

SEQ ID NO: 3253547 - DNA, 25 bp, Homo sapien
taggaagactatatgggatttactg

SEQ ID NO: 3253548 - DNA, 25 bp, Homo sapien
tgagatacactttcataggaagact

SEQ ID NO: 3253549 - DNA, 25 bp, Homo sapien
cctgcagagccggctgtctgagaca

SEQ ID NO: 3253550 - DNA, 25 bp, Homo sapien
attccaggagtctgggatgtggtca

SEQ ID NO: 3253551 - DNA, 25 bp, Homo sapien
ccaggagtctgggatgtggtcaggc

SEQ ID NO: 3253552 - DNA, 25 bp, Homo sapien
gtctgggatgtggtcaggcagggca

SEQ ID NO: 3253553 - DNA, 25 bp, Homo sapien
ctttggtccatagggaaatgtcttc

SEQ ID NO: 3253554 - DNA, 25 bp, Homo sapien
gctggccggctggatcttgatatgt

SEQ ID NO: 3253555 - DNA, 25 bp, Homo sapien
ttaaccactgggctggccggctgga

SEQ ID NO: 3253556 - DNA, 25 bp, Homo sapien
tctcagttggaaagactttggtcca

SEQ ID NO: 3253557 - DNA, 25 bp, Homo sapien
gaatgttcgtgggatatgttccaca

SEQ ID NO: 3253558 - DNA, 25 bp, Homo sapien
tgggatatgttccacagcactgacg

SEQ ID NO: 3253559 - DNA, 25 bp, Homo sapien
gatatgttccacagcactgacggat

SEQ ID NO: 3253560 - DNA, 25 bp, Homo sapien
tcgtgggatatgttccacagcactg

SEQ ID NO: 3253561 - DNA, 25 bp, Homo sapien
gtctgcacactaagggctgctttcc

SEQ ID NO: 3253562 - DNA, 25 bp, Homo sapien
gcacactaagggctgctttccttct

SEQ ID NO: 3253563 - DNA, 25 bp, Homo sapien
ccttcaagtatctgagcagctcctg

SEQ ID NO: 3253564 - DNA, 25 bp, Homo sapien
tccttctccattcctccttcaagta

SEQ ID NO: 3253565 - DNA, 25 bp, Homo sapien
ccttgaaatgtacataagtctgggc

SEQ ID NO: 3253566 - DNA, 25 bp, Homo sapien
gggtttcctcaccactatggctggg

SEQ ID NO: 3253567 - DNA, 25 bp, Homo sapien
cccagttttgcaggtctttggcatc

SEQ ID NO: 3253568 - DNA, 25 bp, Homo sapien
ggtttcagcaggtgagtcccagttt

SEQ ID NO: 3253569 - DNA, 25 bp, Homo sapien
caggaagggagataaaagaatggtt

SEQ ID NO: 3253570 - DNA, 25 bp, Homo sapien
taagttgcaaggtataggtgcctgg

SEQ ID NO: 3253571 - DNA, 25 bp, Homo sapien
gaggggcttggccaggtcttgtgtc

SEQ ID NO: 3253572 - DNA, 25 bp, Homo sapien
acgtgcacggccctcttgactgatc

SEQ ID NO: 3253573 - DNA, 25 bp, Homo sapien
ttatccctcagaccatcctcctgga

SEQ ID NO: 3253574 - DNA, 25 bp, Homo sapien
tgttctaggcccgagactggaagct

SEQ ID NO: 3253575 - DNA, 25 bp, Homo sapien
ctgtgtgttctaggcccgagactgg

SEQ ID NO: 3253576 - DNA, 25 bp, Homo sapien
gctgtgctgtgtgttctaggcccga

SEQ ID NO: 3253577 - DNA, 25 bp, Homo sapien
taggcccgagactggaagctaggcc

SEQ ID NO: 3253578 - DNA, 25 bp, Homo sapien
tatatatgtagaagtccttacagtt

SEQ ID NO: 3253579 - DNA, 25 bp, Homo sapien
tatatgtagaagtccttacagttga

SEQ ID NO: 3253580 - DNA, 25 bp, Homo sapien
atatgtagaagtccttacagttgag

SEQ ID NO: 3253581 - DNA, 25 bp, Homo sapien
tccttacagttgagtgatcatctca

SEQ ID NO: 3253582 - DNA, 25 bp, Homo sapien
tttcctctggagtggtccattggtc

SEQ ID NO: 3253583 - DNA, 25 bp, Homo sapien
ggagtggtccattggtcatgaactt

SEQ ID NO: 3253584 - DNA, 25 bp, Homo sapien
cctctggagtggtccattggtcatg

SEQ ID NO: 3253585 - DNA, 25 bp, Homo sapien
tttgtttcctctggagtggtccatt

SEQ ID NO: 3253586 - DNA, 25 bp, Homo sapien
aacatggcacttggaaaagagagtc

SEQ ID NO: 3253587 - DNA, 25 bp, Homo sapien
cctccctgaagagggcgggtgaagc

SEQ ID NO: 3253588 - DNA, 25 bp, Homo sapien
aaagatctcagatgcccttgcagca

SEQ ID NO: 3253589 - DNA, 25 bp, Homo sapien
actgtgtgtcagtctgtagtgccta

SEQ ID NO: 3253590 - DNA, 25 bp, Homo sapien
gaccggcgcatagcataccaaggac

SEQ ID NO: 3253591 - DNA, 25 bp, Homo sapien
caggggaccggcgcatagcatacca

SEQ ID NO: 3253592 - DNA, 25 bp, Homo sapien
aggggaccggcgcatagcataccaa

SEQ ID NO: 3253593 - DNA, 25 bp, Homo sapien
gggaccggcgcatagcataccaagg

SEQ ID NO: 3253594 - DNA, 25 bp, Homo sapien
agcctcattaacttctattctgcag

SEQ ID NO: 3253595 - DNA, 25 bp, Homo sapien
gcctcattaacttctattctgcagc

SEQ ID NO: 3253596 - DNA, 25 bp, Homo sapien
gaagcctcattaacttctattctgc

SEQ ID NO: 3253597 - DNA, 25 bp, Homo sapien
aagcctcattaacttctattctgca

SEQ ID NO: 3253598 - DNA, 25 bp, Homo sapien
cgttggtcatggctgacttgctttg

SEQ ID NO: 3253599 - DNA, 25 bp, Homo sapien
caatggggggcctgatggggaggga

SEQ ID NO: 3253600 - DNA, 25 bp, Homo sapien
tgtacggccgactccacgttggtca

SEQ ID NO: 3253601 - DNA, 25 bp, Homo sapien
aattgtgtacggccgactccacgtt

SEQ ID NO: 3253602 - DNA, 25 bp, Homo sapien
agatgtctagactttgaaacgccat

SEQ ID NO: 3253603 - DNA, 25 bp, Homo sapien
ttgaggtccctttgtgaagaggaat

SEQ ID NO: 3253604 - DNA, 25 bp, Homo sapien
agaggaatgtttgtgttgatgatga

SEQ ID NO: 3253605 - DNA, 25 bp, Homo sapien
gatgaagatgtctagactttgaaac

SEQ ID NO: 3253606 - DNA, 25 bp, Homo sapien
gcatcaggcacagctcgatccgagg

SEQ ID NO: 3253607 - DNA, 25 bp, Homo sapien
tcaggcacagctcgatccgaggtgg

SEQ ID NO: 3253608 - DNA, 25 bp, Homo sapien
acagctcgatccgaggtggaagttt

SEQ ID NO: 3253609 - DNA, 25 bp, Homo sapien
gcacagctcgatccgaggtggaagt

SEQ ID NO: 3253610 - DNA, 25 bp, Homo sapien
acacttttcctcttcccatctagct

SEQ ID NO: 3253611 - DNA, 25 bp, Homo sapien
ttccttcaagacacttttcctcttc

SEQ ID NO: 3253612 - DNA, 25 bp, Homo sapien
acttttcctcttcccatctagctcc

SEQ ID NO: 3253613 - DNA, 25 bp, Homo sapien
ttttcctcttcccatctagctccat

SEQ ID NO: 3253614 - DNA, 25 bp, Homo sapien
agctcacgggtgatgcaatgctgcg

SEQ ID NO: 3253615 - DNA, 25 bp, Homo sapien
cacgggtgatgcaatgctgcgggtc

SEQ ID NO: 3253616 - DNA, 25 bp, Homo sapien
gctcacgggtgatgcaatgctgcgg

SEQ ID NO: 3253617 - DNA, 25 bp, Homo sapien
tctgaaggtgtacacaaattacctg

SEQ ID NO: 3253618 - DNA, 25 bp, Homo sapien
cactgtgccctgataaaagtgtcct

SEQ ID NO: 3253619 - DNA, 25 bp, Homo sapien
ccactgtgccctgataaaagtgtcc

SEQ ID NO: 3253620 - DNA, 25 bp, Homo sapien
actgtgccctgataaaagtgtcctc

SEQ ID NO: 3253621 - DNA, 25 bp, Homo sapien
ctgtgccctgataaaagtgtcctct

SEQ ID NO: 3253622 - DNA, 25 bp, Homo sapien
tatctatgtccaaatggactctctg

SEQ ID NO: 3253623 - DNA, 25 bp, Homo sapien
gatttagcttatatggtaggttcga

SEQ ID NO: 3253624 - DNA, 25 bp, Homo sapien
gcttaatgaagcattggacctccca

SEQ ID NO: 3253625 - DNA, 25 bp, Homo sapien
cgaaggagttagtgaacaaacacag

SEQ ID NO: 3253626 - DNA, 25 bp, Homo sapien
atcccaagccaatagtccagccaaa

SEQ ID NO: 3253627 - DNA, 25 bp, Homo sapien
ccattcctcatggtatctgaagccc

SEQ ID NO: 3253628 - DNA, 25 bp, Homo sapien
ccaagccaatagtccagccaaaaat

SEQ ID NO: 3253629 - DNA, 25 bp, Homo sapien
atggtatctgaagccccatgaaggc

SEQ ID NO: 3253630 - DNA, 25 bp, Homo sapien
gctcatctggcaagtggatatcaaa

SEQ ID NO: 3253631 - DNA, 25 bp, Homo sapien
tcatctggcaagtggatatcaaatt

SEQ ID NO: 3253632 - DNA, 25 bp, Homo sapien
ctcatctggcaagtggatatcaaat

SEQ ID NO: 3253633 - DNA, 25 bp, Homo sapien
tttccttcaatgacagtaatgctgc

SEQ ID NO: 3253634 - DNA, 25 bp, Homo sapien
gggtctgtgacagcaccttgttagg

SEQ ID NO: 3253635 - DNA, 25 bp, Homo sapien
cagagagctccagagtatcaaagag

SEQ ID NO: 3253636 - DNA, 25 bp, Homo sapien
gtcatcatggctggcaagggtctgt

SEQ ID NO: 3253637 - DNA, 25 bp, Homo sapien
agagctccagagtatcaaagagtga

SEQ ID NO: 3253638 - DNA, 25 bp, Homo sapien
gttgggtgtaatctgctgccatctc

SEQ ID NO: 3253639 - DNA, 25 bp, Homo sapien
cctgttgggtgtaatctgctgccat

SEQ ID NO: 3253640 - DNA, 25 bp, Homo sapien
ccttttcctgttgggtgtaatctgc

SEQ ID NO: 3253641 - DNA, 25 bp, Homo sapien
tttcctgttgggtgtaatctgctgc

SEQ ID NO: 3253642 - DNA, 25 bp, Homo sapien
tgagaaatagccctgatggaatttt

SEQ ID NO: 3253643 - DNA, 25 bp, Homo sapien
tgctgattgtgagaaaggtatgaga

SEQ ID NO: 3253644 - DNA, 25 bp, Homo sapien
gggcacagatgtagacaactcgagc

SEQ ID NO: 3253645 - DNA, 25 bp, Homo sapien
catatttcctatgcctttggactgg

SEQ ID NO: 3253646 - DNA, 25 bp, Homo sapien
tctgtgctacagagagccagataac

SEQ ID NO: 3253647 - DNA, 25 bp, Homo sapien
tttgtgactctgtgctacagagagc

SEQ ID NO: 3253648 - DNA, 25 bp, Homo sapien
tgactctgtgctacagagagccaga

SEQ ID NO: 3253649 - DNA, 25 bp, Homo sapien
gactctgtgctacagagagccagat

SEQ ID NO: 3253650 - DNA, 25 bp, Homo sapien
agaccatgggatgaccaccgtgaag

SEQ ID NO: 3253651 - DNA, 25 bp, Homo sapien
gatcccttgtccaactacatcaagt

SEQ ID NO: 3253652 - DNA, 25 bp, Homo sapien
tgatattgtgggctacggtggcttt

SEQ ID NO: 3253653 - DNA, 25 bp, Homo sapien
gcatcatcatcacatgagaccatgg

SEQ ID NO: 3253654 - DNA, 25 bp, Homo sapien
ggaggagtttccagagcatttccat

SEQ ID NO: 3253655 - DNA, 25 bp, Homo sapien
cttcaagaaggaggagtttccagag

SEQ ID NO: 3253656 - DNA, 25 bp, Homo sapien
caagaaggaggagtttccagagcat

SEQ ID NO: 3253657 - DNA, 25 bp, Homo sapien
aaggaggagtttccagagcatttcc

SEQ ID NO: 3253658 - DNA, 25 bp, Homo sapien
cactgggaggcgctactcgaaagga

SEQ ID NO: 3253659 - DNA, 25 bp, Homo sapien
tgggaggcgctactcgaaaggattt

SEQ ID NO: 3253660 - DNA, 25 bp, Homo sapien
gaggcgctactcgaaaggatttgcc

SEQ ID NO: 3253661 - DNA, 25 bp, Homo sapien
cgctactcgaaaggatttgccctga

SEQ ID NO: 3253662 - DNA, 25 bp, Homo sapien
ttagcttgccctcagggtcaggaaa

SEQ ID NO: 3253663 - DNA, 25 bp, Homo sapien
ctggtttagcttgccctcagggtca

SEQ ID NO: 3253664 - DNA, 25 bp, Homo sapien
tcatcccatcggagcttctgcgact

SEQ ID NO: 3253665 - DNA, 25 bp, Homo sapien
gccctcagggtcaggaaagtttgag

SEQ ID NO: 3253666 - DNA, 25 bp, Homo sapien
aggaccaggccgttttcttcatgtt

SEQ ID NO: 3253667 - DNA, 25 bp, Homo sapien
tgagtcctcaaggaccaggccgttt

SEQ ID NO: 3253668 - DNA, 25 bp, Homo sapien
caaggaccaggccgttttcttcatg

SEQ ID NO: 3253669 - DNA, 25 bp, Homo sapien
ctcaaggaccaggccgttttcttca

SEQ ID NO: 3253670 - DNA, 25 bp, Homo sapien
ctgaggctactgcttctagaatctc

SEQ ID NO: 3253671 - DNA, 25 bp, Homo sapien
gggccaagggctcaacttgtgctga

SEQ ID NO: 3253672 - DNA, 25 bp, Homo sapien
tcctctagtgccacccttccaaaca

SEQ ID NO: 3253673 - DNA, 25 bp, Homo sapien
ctagaatctcctctagtgccaccct

SEQ ID NO: 3253674 - DNA, 25 bp, Homo sapien
cacacaggcaaacagcacccgaaca

SEQ ID NO: 3253675 - DNA, 25 bp, Homo sapien
cacttgaagttcatggcacacacag

SEQ ID NO: 3253676 - DNA, 25 bp, Homo sapien
cttgaagttcatggcacacacaggc

SEQ ID NO: 3253677 - DNA, 25 bp, Homo sapien
cacaggcaaacagcacccgaacatg

SEQ ID NO: 3253678 - DNA, 25 bp, Homo sapien
acagacacccaggtccaccgaccat

SEQ ID NO: 3253679 - DNA, 25 bp, Homo sapien
cagacagacacccaggtccaccgac

SEQ ID NO: 3253680 - DNA, 25 bp, Homo sapien
gtgcagacagacacccaggtccacc

SEQ ID NO: 3253681 - DNA, 25 bp, Homo sapien
cagacacccaggtccaccgaccatg

SEQ ID NO: 3253682 - DNA, 25 bp, Homo sapien
taatactccctcagaggccgtttgc

SEQ ID NO: 3253683 - DNA, 25 bp, Homo sapien
agccagggggtgcagacctggatat

SEQ ID NO: 3253684 - DNA, 25 bp, Homo sapien
gggggtgcagacctggatatgctgg

SEQ ID NO: 3253685 - DNA, 25 bp, Homo sapien
ggatgaggcagctgtaatactccct

SEQ ID NO: 3253686 - DNA, 25 bp, Homo sapien
tggccccaggcccaagacactcccc

SEQ ID NO: 3253687 - DNA, 25 bp, Homo sapien
caggggtgtgtgcacgctgacccct

SEQ ID NO: 3253688 - DNA, 25 bp, Homo sapien
gcaggggtgtgtgcacgctgacccc

SEQ ID NO: 3253689 - DNA, 25 bp, Homo sapien
gggtgtgtgcacgctgacccctgac

SEQ ID NO: 3253690 - DNA, 25 bp, Homo sapien
tgtgtgcacgctgacccctgacgca

SEQ ID NO: 3253691 - DNA, 25 bp, Homo sapien
aaacatggcggggtaagcactggcc

SEQ ID NO: 3253692 - DNA, 25 bp, Homo sapien
tggcgcgggttccaaaccactcctg

SEQ ID NO: 3253693 - DNA, 25 bp, Homo sapien
gcctccagagcacatggcgcgggtt

SEQ ID NO: 3253694 - DNA, 25 bp, Homo sapien
actgggtggatccagccttctgtct

SEQ ID NO: 3253695 - DNA, 25 bp, Homo sapien
agaaggaaggttgtgtccgtcaaga

SEQ ID NO: 3253696 - DNA, 25 bp, Homo sapien
ttgtgtccgtcaagagtcagttgtt

SEQ ID NO: 3253697 - DNA, 25 bp, Homo sapien
ctgttatcacacagacgagagaagg

SEQ ID NO: 3253698 - DNA, 25 bp, Homo sapien
aaggttgtgtccgtcaagagtcagt

SEQ ID NO: 3253699 - DNA, 25 bp, Homo sapien
caggctgccccacccagtggtccag

SEQ ID NO: 3253700 - DNA, 25 bp, Homo sapien
gctgccccacccagtggtccagctc

SEQ ID NO: 3253701 - DNA, 25 bp, Homo sapien
cccacccagtggtccagctcaggaa

SEQ ID NO: 3253702 - DNA, 25 bp, Homo sapien
cacccagtggtccagctcaggaaca

SEQ ID NO: 3253703 - DNA, 25 bp, Homo sapien
ccagcaggatggagaagtcttcatc

SEQ ID NO: 3253704 - DNA, 25 bp, Homo sapien
agcaggatggagaagtcttcatcct

SEQ ID NO: 3253705 - DNA, 25 bp, Homo sapien
tctaaagcttccagcaggatggaga

SEQ ID NO: 3253706 - DNA, 25 bp, Homo sapien
tttctaaagcttccagcaggatgga

SEQ ID NO: 3253707 - DNA, 25 bp, Homo sapien
aaacccatgtgccccaggggtcctg

SEQ ID NO: 3253708 - DNA, 25 bp, Homo sapien
caaacccatgtgccccaggggtcct

SEQ ID NO: 3253709 - DNA, 25 bp, Homo sapien
atggagacgtgtcaccagcctgctc

SEQ ID NO: 3253710 - DNA, 25 bp, Homo sapien
gctgctcatggagacgtgtcaccag

SEQ ID NO: 3253711 - DNA, 25 bp, Homo sapien
ggctggctgctcatggagacgtgtc

SEQ ID NO: 3253712 - DNA, 25 bp, Homo sapien
tcatggagacgtgtcaccagcctgc

SEQ ID NO: 3253713 - DNA, 25 bp, Homo sapien
gatcctcaggttctgagatgaaaga

SEQ ID NO: 3253714 - DNA, 25 bp, Homo sapien
tggctggatcctcaggttctgagat

SEQ ID NO: 3253715 - DNA, 25 bp, Homo sapien
ctcaggttctgagatgaaagagcag

SEQ ID NO: 3253716 - DNA, 25 bp, Homo sapien
ttctgagatgaaagagcagaaaaaa

SEQ ID NO: 3253717 - DNA, 25 bp, Homo sapien
aggacgggcatctcctgccatggcg

SEQ ID NO: 3253718 - DNA, 25 bp, Homo sapien
tgcaggctcccagcggttggggtgc

SEQ ID NO: 3253719 - DNA, 25 bp, Homo sapien
accaaggacgggcatctcctgccat

SEQ ID NO: 3253720 - DNA, 25 bp, Homo sapien
gcccaggaccaaggacgggcatctc

SEQ ID NO: 3253721 - DNA, 25 bp, Homo sapien
aacagagagtgtgtgctgcccagct

SEQ ID NO: 3253722 - DNA, 25 bp, Homo sapien
cctgaacagagagtgtgtgctgccc

SEQ ID NO: 3253723 - DNA, 25 bp, Homo sapien
cagagagtgtgtgctgcccagcttc

SEQ ID NO: 3253724 - DNA, 25 bp, Homo sapien
tgaacagagagtgtgtgctgcccag

SEQ ID NO: 3253725 - DNA, 25 bp, Homo sapien
gaagaagattgatgtcctcttgcct

SEQ ID NO: 3253726 - DNA, 25 bp, Homo sapien
tggaggtgcctccatttacttggga

SEQ ID NO: 3253727 - DNA, 25 bp, Homo sapien
cctactgcctggaagaagattgatg

SEQ ID NO: 3253728 - DNA, 25 bp, Homo sapien
caggtcaaacgtgcctcacaaaggg

SEQ ID NO: 3253729 - DNA, 25 bp, Homo sapien
tcggcctggtctcttgttgcctggg

SEQ ID NO: 3253730 - DNA, 25 bp, Homo sapien
gttgcctggggggttcactgtacaa

SEQ ID NO: 3253731 - DNA, 25 bp, Homo sapien
gccactgaagggtctcggcctggtc

SEQ ID NO: 3253732 - DNA, 25 bp, Homo sapien
cactgtacaagtgatgatgtagttc

SEQ ID NO: 3253733 - DNA, 25 bp, Homo sapien
ctatgcctgtgatggggactatctg

SEQ ID NO: 3253734 - DNA, 25 bp, Homo sapien
tatgcctgtgatggggactatctga

SEQ ID NO: 3253735 - DNA, 25 bp, Homo sapien
tgtgatggggactatctgaatccat

SEQ ID NO: 3253736 - DNA, 25 bp, Homo sapien
gcctgtgatggggactatctgaatc

SEQ ID NO: 3253737 - DNA, 25 bp, Homo sapien
caggggaggaccagcagccaatcac

SEQ ID NO: 3253738 - DNA, 25 bp, Homo sapien
ggaggaccagcagccaatcactcct

SEQ ID NO: 3253739 - DNA, 25 bp, Homo sapien
cagcagccaatcactccttcctgcc

SEQ ID NO: 3253740 - DNA, 25 bp, Homo sapien
gggaggaccagcagccaatcactcc

SEQ ID NO: 3253741 - DNA, 25 bp, Homo sapien
ttctgacatcagtaacagctgccca

SEQ ID NO: 3253742 - DNA, 25 bp, Homo sapien
tttctgacatcagtaacagctgccc

SEQ ID NO: 3253743 - DNA, 25 bp, Homo sapien
ctttgatatcaagggtaagtccgct

SEQ ID NO: 3253744 - DNA, 25 bp, Homo sapien
tttgggtgattggtctaagccaagg

SEQ ID NO: 3253745 - DNA, 25 bp, Homo sapien
taagccaaggacctttgatatcaag

SEQ ID NO: 3253746 - DNA, 25 bp, Homo sapien
gatatcaagggtaagtccgctaccc

SEQ ID NO: 3253747 - DNA, 25 bp, Homo sapien
ccttgtgtccgcagggtcccatggc

SEQ ID NO: 3253748 - DNA, 25 bp, Homo sapien
cattcagaccatcagctgcagacgg

SEQ ID NO: 3253749 - DNA, 25 bp, Homo sapien
tcccatggcagaagtgtggttcggg

SEQ ID NO: 3253750 - DNA, 25 bp, Homo sapien
gtgtgcccttccctgaacaagcaca

SEQ ID NO: 3253751 - DNA, 25 bp, Homo sapien
ttagtcaagcaacttaatgctaggc

SEQ ID NO: 3253752 - DNA, 25 bp, Homo sapien
tcaagcaacttaatgctaggctaag

SEQ ID NO: 3253753 - DNA, 25 bp, Homo sapien
tagtcaagcaacttaatgctaggct

SEQ ID NO: 3253754 - DNA, 25 bp, Homo sapien
tattagtcaagcaacttaatgctag

SEQ ID NO: 3253755 - DNA, 25 bp, Homo sapien
aaagaagggtttcatatctggagtg

SEQ ID NO: 3253756 - DNA, 25 bp, Homo sapien
tatctggagtgtgatgcaggtcaat

SEQ ID NO: 3253757 - DNA, 25 bp, Homo sapien
tcacctggtgactcaggtatccagg

SEQ ID NO: 3253758 - DNA, 25 bp, Homo sapien
ggtcaatgggagtttccttcacctg

SEQ ID NO: 3253759 - DNA, 25 bp, Homo sapien
ttctgcaggtctgccttcttgacat

SEQ ID NO: 3253760 - DNA, 25 bp, Homo sapien
caggtctgccttcttgacatgaggt

SEQ ID NO: 3253761 - DNA, 25 bp, Homo sapien
gcaggtctgccttcttgacatgagg

SEQ ID NO: 3253762 - DNA, 25 bp, Homo sapien
ctgcaggtctgccttcttgacatga

SEQ ID NO: 3253763 - DNA, 25 bp, Homo sapien
gagatctgcagcactctgctcacat

SEQ ID NO: 3253764 - DNA, 25 bp, Homo sapien
gccagttcttaggtgctcctgacaa

SEQ ID NO: 3253765 - DNA, 25 bp, Homo sapien
caaagagtctgggaagcatagagag

SEQ ID NO: 3253766 - DNA, 25 bp, Homo sapien
ggagagagggtgtagagtcatgcca

SEQ ID NO: 3253767 - DNA, 25 bp, Homo sapien
ttttaggaggattgccttggtggta

SEQ ID NO: 3253768 - DNA, 25 bp, Homo sapien
gcacagggcctgaaagaactaggct

SEQ ID NO: 3253769 - DNA, 25 bp, Homo sapien
agaacactgtggttgtgttttagga

SEQ ID NO: 3253770 - DNA, 25 bp, Homo sapien
aacactgtggttgtgttttaggagg

SEQ ID NO: 3253771 - DNA, 25 bp, Homo sapien
acccctgcacaatgagaagagcaag

SEQ ID NO: 3253772 - DNA, 25 bp, Homo sapien
caggactgtctcgtaagcccatcct

SEQ ID NO: 3253773 - DNA, 25 bp, Homo sapien
actgtctcgtaagcccatccttctg

SEQ ID NO: 3253774 - DNA, 25 bp, Homo sapien
tagccattttaacctgccagaaacc

SEQ ID NO: 3253775 - DNA, 25 bp, Homo sapien
tttcaaaggtggcaagctcctgagt

SEQ ID NO: 3253776 - DNA, 25 bp, Homo sapien
tcctgtagctacagaacagagcttt

SEQ ID NO: 3253777 - DNA, 25 bp, Homo sapien
tgctaactggattaggaaaactcgc

SEQ ID NO: 3253778 - DNA, 25 bp, Homo sapien
ccaggcatgtgaaaggatcgtttcc

SEQ ID NO: 3253779 - DNA, 25 bp, Homo sapien
tcttttgatatcagcagtgggtgca

SEQ ID NO: 3253780 - DNA, 25 bp, Homo sapien
agctcagttgtgctctagaccagaa

SEQ ID NO: 3253781 - DNA, 25 bp, Homo sapien
ggccagaactccatctgacccttgt

SEQ ID NO: 3253782 - DNA, 25 bp, Homo sapien
gggtcatgggccttccctgtagcta

SEQ ID NO: 3253783 - DNA, 25 bp, Homo sapien
tccaggccagaactccatctgaccc

SEQ ID NO: 3253784 - DNA, 25 bp, Homo sapien
gaagcctccgagttcttataacagg

SEQ ID NO: 3253785 - DNA, 25 bp, Homo sapien
tattggccataatctcgctccctag

SEQ ID NO: 3253786 - DNA, 25 bp, Homo sapien
acttgacagcaagggaacccgaggg

SEQ ID NO: 3253787 - DNA, 25 bp, Homo sapien
tgatgcccaagtcagagaggtgctg

SEQ ID NO: 3253788 - DNA, 25 bp, Homo sapien
tctgggagatggttgcagcagaatc

SEQ ID NO: 3253789 - DNA, 25 bp, Homo sapien
aatataagcccaagaaagataagga

SEQ ID NO: 3253790 - DNA, 25 bp, Homo sapien
cctagctgaaatggcaatcttgtgc

SEQ ID NO: 3253791 - DNA, 25 bp, Homo sapien
ggttgcagcagaatccctagctgaa

SEQ ID NO: 3253792 - DNA, 25 bp, Homo sapien
aagaatgaatgactggaattcaaac

SEQ ID NO: 3253793 - DNA, 25 bp, Homo sapien
gaataaaagaatgaatgactggaat

SEQ ID NO: 3253794 - DNA, 25 bp, Homo sapien
ataaaagaatgaatgactggaattc

SEQ ID NO: 3253795 - DNA, 25 bp, Homo sapien
aaaagaatgaatgactggaattcaa

SEQ ID NO: 3253796 - DNA, 25 bp, Homo sapien
tctccaggagaagaagataggggaa

SEQ ID NO: 3253797 - DNA, 25 bp, Homo sapien
taccacatgaccgtttacaatgggt

SEQ ID NO: 3253798 - DNA, 25 bp, Homo sapien
tccaggttgaggaaataccacatga

SEQ ID NO: 3253799 - DNA, 25 bp, Homo sapien
tgaatccaggctgtattcggagtag

SEQ ID NO: 3253800 - DNA, 25 bp, Homo sapien
ggactgtgtaggctgagcagcttaa

SEQ ID NO: 3253801 - DNA, 25 bp, Homo sapien
ggacagatggtcttgccctctccag

SEQ ID NO: 3253802 - DNA, 25 bp, Homo sapien
cttaagtctgagaaggtgggccact

SEQ ID NO: 3253803 - DNA, 25 bp, Homo sapien
agtttcaggtttaggcacctggaca

SEQ ID NO: 3253804 - DNA, 25 bp, Homo sapien
gactcgggtctgtgggtaatccaag

SEQ ID NO: 3253805 - DNA, 25 bp, Homo sapien
tgtagggcccttaaagtcgcagagc

SEQ ID NO: 3253806 - DNA, 25 bp, Homo sapien
taggaatcattatcccacgctgtgg

SEQ ID NO: 3253807 - DNA, 25 bp, Homo sapien
tagacggcttccatgagttctgaca

SEQ ID NO: 3253808 - DNA, 25 bp, Homo sapien
tactcatcatctggaccctgctggg

SEQ ID NO: 3253809 - DNA, 25 bp, Homo sapien
ttttgggagcccgacgtgaatgcag

SEQ ID NO: 3253810 - DNA, 25 bp, Homo sapien
tgggtggccttcgacatcatgtgct

SEQ ID NO: 3253811 - DNA, 25 bp, Homo sapien
tactggccctttggagcgttctgcg

SEQ ID NO: 3253812 - DNA, 25 bp, Homo sapien
gctacattgggtttcaggattgctt

SEQ ID NO: 3253813 - DNA, 25 bp, Homo sapien
ttgcttctgaagaaacgatgagtgc

SEQ ID NO: 3253814 - DNA, 25 bp, Homo sapien
gctttgctacattgggtttcaggat

SEQ ID NO: 3253815 - DNA, 25 bp, Homo sapien
ctttgctttgctacattgggtttca

SEQ ID NO: 3253816 - DNA, 25 bp, Homo sapien
ctgtgaatggatagctaagcgaacc

SEQ ID NO: 3253817 - DNA, 25 bp, Homo sapien
gagatcgtcgcatgaccttgagtga

SEQ ID NO: 3253818 - DNA, 25 bp, Homo sapien
gcagtgaaaagcacccagctctagg

SEQ ID NO: 3253819 - DNA, 25 bp, Homo sapien
aaatgatactggaatctgaggtccg

SEQ ID NO: 3253820 - DNA, 25 bp, Homo sapien
gacacggacctttgtgaagattacc

SEQ ID NO: 3253821 - DNA, 25 bp, Homo sapien
gctcatgaggttacggtgctgtcca

SEQ ID NO: 3253822 - DNA, 25 bp, Homo sapien
ggcaggtgctgttaattagtcccat

SEQ ID NO: 3253823 - DNA, 25 bp, Homo sapien
gattacctggccagctacttggtag

SEQ ID NO: 3253824 - DNA, 25 bp, Homo sapien
ttagagacaagattgcactacgtca

SEQ ID NO: 3253825 - DNA, 25 bp, Homo sapien
gagacaagattgcactacgtcaccc

SEQ ID NO: 3253826 - DNA, 25 bp, Homo sapien
agacaagattgcactacgtcaccca

SEQ ID NO: 3253827 - DNA, 25 bp, Homo sapien
ttattagagacaagattgcactacg

SEQ ID NO: 3253828 - DNA, 25 bp, Homo sapien
gattggggcatgttcagggtatatg

SEQ ID NO: 3253829 - DNA, 25 bp, Homo sapien
tggggcatgttcagggtatatggct

SEQ ID NO: 3253830 - DNA, 25 bp, Homo sapien
caggtctgaccgtttttagcttcca

SEQ ID NO: 3253831 - DNA, 25 bp, Homo sapien
atgttcagggtatatggctgtagcc

SEQ ID NO: 3253832 - DNA, 25 bp, Homo sapien
ctcagactgatgctgtgaggctgct

SEQ ID NO: 3253833 - DNA, 25 bp, Homo sapien
tcaacaggaaaggatgcactactgc

SEQ ID NO: 3253834 - DNA, 25 bp, Homo sapien
tatatggtgagggacgcattgcctt

SEQ ID NO: 3253835 - DNA, 25 bp, Homo sapien
gaattctggattcagcgtgcatcag

SEQ ID NO: 3253836 - DNA, 25 bp, Homo sapien
agtggtgcacatgatcctacaacct

SEQ ID NO: 3253837 - DNA, 25 bp, Homo sapien
tgcacatgatcctacaaccttgatg

SEQ ID NO: 3253838 - DNA, 25 bp, Homo sapien
gatcctacaaccttgatgtatatat

SEQ ID NO: 3253839 - DNA, 25 bp, Homo sapien
cagcaggggctagatgaaagtgtgt

SEQ ID NO: 3253840 - DNA, 25 bp, Homo sapien
tgcacttgcccagctgatttagaag

SEQ ID NO: 3253841 - DNA, 25 bp, Homo sapien
tcactacaattagggactgccagag

SEQ ID NO: 3253842 - DNA, 25 bp, Homo sapien
tagatgtcatgagcgtgatagggcc

SEQ ID NO: 3253843 - DNA, 25 bp, Homo sapien
tggcaccttcgcaatcagtctggag

SEQ ID NO: 3253844 - DNA, 25 bp, Homo sapien
tagtccagcagtcccgtgttgtaga

SEQ ID NO: 3253845 - DNA, 25 bp, Homo sapien
gaagtcttgagactcacccgatggt

SEQ ID NO: 3253846 - DNA, 25 bp, Homo sapien
gactcctatgttccctggctctcag

SEQ ID NO: 3253847 - DNA, 25 bp, Homo sapien
gccatagtaaaggagttggtgccag

SEQ ID NO: 3253848 - DNA, 25 bp, Homo sapien
ggtcattaatcccattcagaatggc

SEQ ID NO: 3253849 - DNA, 25 bp, Homo sapien
cccattcagaatggctctgcccaaa

SEQ ID NO: 3253850 - DNA, 25 bp, Homo sapien
aaggtcattaatcccattcagaatg

SEQ ID NO: 3253851 - DNA, 25 bp, Homo sapien
attaatcccattcagaatggctctg

SEQ ID NO: 3253852 - DNA, 25 bp, Homo sapien
ggttggaaagatggtaatctatctt

SEQ ID NO: 3253853 - DNA, 25 bp, Homo sapien
tatgcagtggtgaaatatttggtaa

SEQ ID NO: 3253854 - DNA, 25 bp, Homo sapien
aatatttggtaaagctgttgtagga

SEQ ID NO: 3253855 - DNA, 25 bp, Homo sapien
acttcaagggcggatgatgtgctga

SEQ ID NO: 3253856 - DNA, 25 bp, Homo sapien
cctgcacgtggtgaatctaagttat

SEQ ID NO: 3253857 - DNA, 25 bp, Homo sapien
cagcagctgcagtcagctacagtgg

SEQ ID NO: 3253858 - DNA, 25 bp, Homo sapien
tcagagggcattgagatgaaaagcc

SEQ ID NO: 3253859 - DNA, 25 bp, Homo sapien
cagtggcatctcctgcacgtggtga

SEQ ID NO: 3253860 - DNA, 25 bp, Homo sapien
tcataatgagaagtaatgaatttca

SEQ ID NO: 3253861 - DNA, 25 bp, Homo sapien
aagtaatgaatttcaaagaagtagt

SEQ ID NO: 3253862 - DNA, 25 bp, Homo sapien
cataatgagaagtaatgaatttcaa

SEQ ID NO: 3253863 - DNA, 25 bp, Homo sapien
taatgaatttcaaagaagtagtgac

SEQ ID NO: 3253864 - DNA, 25 bp, Homo sapien
ggctctgtggccgatatgatatgga

SEQ ID NO: 3253865 - DNA, 25 bp, Homo sapien
tatgatatggaggaagggactgggt

SEQ ID NO: 3253866 - DNA, 25 bp, Homo sapien
gatcctggcaacgtggaaaatacaa

SEQ ID NO: 3253867 - DNA, 25 bp, Homo sapien
ccagcgccatacttgggaaggaagg

SEQ ID NO: 3253868 - DNA, 25 bp, Homo sapien
gaatgcagagaaggtgttagcctga

SEQ ID NO: 3253869 - DNA, 25 bp, Homo sapien
gatgaatagtaatggcaatagccaa

SEQ ID NO: 3253870 - DNA, 25 bp, Homo sapien
gagtcccacagcaagtacgcggtgg

SEQ ID NO: 3253871 - DNA, 25 bp, Homo sapien
ttcactggtgaagaatgctgaggca

SEQ ID NO: 3253872 - DNA, 25 bp, Homo sapien
tggtccacgcagggaaaaccgctta

SEQ ID NO: 3253873 - DNA, 25 bp, Homo sapien
tttattaatctacaacctatagaaa

SEQ ID NO: 3253874 - DNA, 25 bp, Homo sapien
tattaatctacaacctatagaaata

SEQ ID NO: 3253875 - DNA, 25 bp, Homo sapien
cacactgaaagttgtcggtttaccg

SEQ ID NO: 3253876 - DNA, 25 bp, Homo sapien
aagataccaaactcatcgatttcct

SEQ ID NO: 3253877 - DNA, 25 bp, Homo sapien
gactcttgaagactgaaagatacca

SEQ ID NO: 3253878 - DNA, 25 bp, Homo sapien
ggagcatctggttggcttttaagac

SEQ ID NO: 3253879 - DNA, 25 bp, Homo sapien
ccaaactcatcgatttcctcctgag

SEQ ID NO: 3253880 - DNA, 25 bp, Homo sapien
ttttctagcagctgtgcacaagccc

SEQ ID NO: 3253881 - DNA, 25 bp, Homo sapien
gggttctgcttttggtgtactctgc

SEQ ID NO: 3253882 - DNA, 25 bp, Homo sapien
gagcagggacctgacttctgggact

SEQ ID NO: 3253883 - DNA, 25 bp, Homo sapien
tggaacttgaaagtgcgggttctgc

SEQ ID NO: 3253884 - DNA, 25 bp, Homo sapien
cagagtgtgtggatcagatgtccct

SEQ ID NO: 3253885 - DNA, 25 bp, Homo sapien
gaatgttagtgttgctctgaagcca

SEQ ID NO: 3253886 - DNA, 25 bp, Homo sapien
caggaaagcacctagttagtgagga

SEQ ID NO: 3253887 - DNA, 25 bp, Homo sapien
tggacagataatcccagcctggaag

SEQ ID NO: 3253888 - DNA, 25 bp, Homo sapien
cctgaagcccacgagtaacattttg

SEQ ID NO: 3253889 - DNA, 25 bp, Homo sapien
tctggccatccaatctaaagtcaca

SEQ ID NO: 3253890 - DNA, 25 bp, Homo sapien
tccggtctagacagatgcatgcaaa

SEQ ID NO: 3253891 - DNA, 25 bp, Homo sapien
gtccaacaccgagaacattaccgag

SEQ ID NO: 3253892 - DNA, 25 bp, Homo sapien
tgctctcatcactaaaaatatctgt

SEQ ID NO: 3253893 - DNA, 25 bp, Homo sapien
tatctgtctttagatgtcctttctg

SEQ ID NO: 3253894 - DNA, 25 bp, Homo sapien
ctgctctcatcactaaaaatatctg

SEQ ID NO: 3253895 - DNA, 25 bp, Homo sapien
aaaatatctgtctttagatgtcctt

SEQ ID NO: 3253896 - DNA, 25 bp, Homo sapien
cccagggttgctagttatgatcagt

SEQ ID NO: 3253897 - DNA, 25 bp, Homo sapien
tggagtgtgcttacttagccagaac

SEQ ID NO: 3253898 - DNA, 25 bp, Homo sapien
gttttcattacgattctgcccaggg

SEQ ID NO: 3253899 - DNA, 25 bp, Homo sapien
gaagagttacttttagcgaacctga

SEQ ID NO: 3253900 - DNA, 25 bp, Homo sapien
tatcatatgaacatcgggaaaaatg

SEQ ID NO: 3253901 - DNA, 25 bp, Homo sapien
catatgaacatcgggaaaaatgtga

SEQ ID NO: 3253902 - DNA, 25 bp, Homo sapien
tcatatgaacatcgggaaaaatgtg

SEQ ID NO: 3253903 - DNA, 25 bp, Homo sapien
atcatatgaacatcgggaaaaatgt

SEQ ID NO: 3253904 - DNA, 25 bp, Homo sapien
gacaacaaatcctagattatcaact

SEQ ID NO: 3253905 - DNA, 25 bp, Homo sapien
gtttcatgtattctgtgattccaac

SEQ ID NO: 3253906 - DNA, 25 bp, Homo sapien
caaaagggtttggaattgagatgat

SEQ ID NO: 3253907 - DNA, 25 bp, Homo sapien
tctgtactgaaacacagctattcca

SEQ ID NO: 3253908 - DNA, 25 bp, Homo sapien
caagaggccccaccagtaagaaggc

SEQ ID NO: 3253909 - DNA, 25 bp, Homo sapien
ccagtgaacaaacttagccgcctca

SEQ ID NO: 3253910 - DNA, 25 bp, Homo sapien
taattcctggcctattgcctgacag

SEQ ID NO: 3253911 - DNA, 25 bp, Homo sapien
taagaaggcactcgtcagatgtccc

SEQ ID NO: 3253912 - DNA, 25 bp, Homo sapien
gatggcatagtgcattgagttggca

SEQ ID NO: 3253913 - DNA, 25 bp, Homo sapien
tggcccagtgatgaaagaatactcc

SEQ ID NO: 3253914 - DNA, 25 bp, Homo sapien
gtctcaggcacttttggaacccaca

SEQ ID NO: 3253915 - DNA, 25 bp, Homo sapien
caaattttgcctaaggctgccatgg

SEQ ID NO: 3253916 - DNA, 25 bp, Homo sapien
cacacattacgatggcaggctgtaa

SEQ ID NO: 3253917 - DNA, 25 bp, Homo sapien
gcatgtaagagttagaagagcccct

SEQ ID NO: 3253918 - DNA, 25 bp, Homo sapien
tacatgtgctgacactctgagcccc

SEQ ID NO: 3253919 - DNA, 25 bp, Homo sapien
tagaagcaagtataggaaatcgccc

SEQ ID NO: 3253920 - DNA, 25 bp, Homo sapien
tggggtgaggacagcgtcagccctg

SEQ ID NO: 3253921 - DNA, 25 bp, Homo sapien
taatagtctggggtgaggacagcgt

SEQ ID NO: 3253922 - DNA, 25 bp, Homo sapien
ggtgtgttggtattaggctctccaa

SEQ ID NO: 3253923 - DNA, 25 bp, Homo sapien
tgcaggctggtgtgttggtattagg

SEQ ID NO: 3253924 - DNA, 25 bp, Homo sapien
tggaagcctagggtcattgaggcac

SEQ ID NO: 3253925 - DNA, 25 bp, Homo sapien
cttgtggtaaagctgggactagaac

SEQ ID NO: 3253926 - DNA, 25 bp, Homo sapien
aaagcctatatcagggatggaagcc

SEQ ID NO: 3253927 - DNA, 25 bp, Homo sapien
taatccgttgagtcccctatcagac

SEQ ID NO: 3253928 - DNA, 25 bp, Homo sapien
tactgaaacatagagtgattccttg

SEQ ID NO: 3253929 - DNA, 25 bp, Homo sapien
gaacgctgggtctactgaaacatag

SEQ ID NO: 3253930 - DNA, 25 bp, Homo sapien
ctatatagaagaacgctgggtctac

SEQ ID NO: 3253931 - DNA, 25 bp, Homo sapien
agagtgattccttgcagcttccaga

SEQ ID NO: 3253932 - DNA, 25 bp, Homo sapien
gcaatgttagattagtacaggttta

SEQ ID NO: 3253933 - DNA, 25 bp, Homo sapien
ccatgtagacaatcctgtttttgac

SEQ ID NO: 3253934 - DNA, 25 bp, Homo sapien
taaaagacttgcatagcttcaattc

SEQ ID NO: 3253935 - DNA, 25 bp, Homo sapien
tgtccaacgtggaggaggaaacttg

SEQ ID NO: 3253936 - DNA, 25 bp, Homo sapien
atcagtgacagctgagtcgattttc

SEQ ID NO: 3253937 - DNA, 25 bp, Homo sapien
tttctgcataggttctgtttttggt

SEQ ID NO: 3253938 - DNA, 25 bp, Homo sapien
cagtgacagctgagtcgattttctc

SEQ ID NO: 3253939 - DNA, 25 bp, Homo sapien
ctgcataggttctgtttttggtctc

SEQ ID NO: 3253940 - DNA, 25 bp, Homo sapien
aggaaacagtaggtgtccagacttt

SEQ ID NO: 3253941 - DNA, 25 bp, Homo sapien
taggaaacagtaggtgtccagactt

SEQ ID NO: 3253942 - DNA, 25 bp, Homo sapien
gactaggaaacagtaggtgtccaga

SEQ ID NO: 3253943 - DNA, 25 bp, Homo sapien
aagactaggaaacagtaggtgtcca

SEQ ID NO: 3253944 - DNA, 25 bp, Homo sapien
tgtggctctactggctcagacattt

SEQ ID NO: 3253945 - DNA, 25 bp, Homo sapien
tgctcagggccctccgctaatacat

SEQ ID NO: 3253946 - DNA, 25 bp, Homo sapien
taatacatgggcttcaatacaggcg

SEQ ID NO: 3253947 - DNA, 25 bp, Homo sapien
catgcttgaggagcatgctcagggc

SEQ ID NO: 3253948 - DNA, 25 bp, Homo sapien
gagagccagttgacggtgcctgcaa

SEQ ID NO: 3253949 - DNA, 25 bp, Homo sapien
gctggaagaactcaccagtcaagat

SEQ ID NO: 3253950 - DNA, 25 bp, Homo sapien
ccagtcaagatgaacgggatgccac

SEQ ID NO: 3253951 - DNA, 25 bp, Homo sapien
ccagttgacggtgcctgcaatgatg

SEQ ID NO: 3253952 - DNA, 25 bp, Homo sapien
aatctccttctctggtcagtgctgt

SEQ ID NO: 3253953 - DNA, 25 bp, Homo sapien
gaattatcctttattggctgctagt

SEQ ID NO: 3253954 - DNA, 25 bp, Homo sapien
ccttgtttggttactgctggccatt

SEQ ID NO: 3253955 - DNA, 25 bp, Homo sapien
gcaagagttcttagggttcataaaa

SEQ ID NO: 3253956 - DNA, 25 bp, Homo sapien
aattctttatgcagttgaggagatg

SEQ ID NO: 3253957 - DNA, 25 bp, Homo sapien
ttctttatgcagttgaggagatgga

SEQ ID NO: 3253958 - DNA, 25 bp, Homo sapien
attctttatgcagttgaggagatgg

SEQ ID NO: 3253959 - DNA, 25 bp, Homo sapien
cagggtgcacgttcagtgagagcct

SEQ ID NO: 3253960 - DNA, 25 bp, Homo sapien
agggtgcacgttcagtgagagcctg

SEQ ID NO: 3253961 - DNA, 25 bp, Homo sapien
gggtgcacgttcagtgagagcctgg

SEQ ID NO: 3253962 - DNA, 25 bp, Homo sapien
gatttgaaaagtgtccccgatgcag

SEQ ID NO: 3253963 - DNA, 25 bp, Homo sapien
gaaaagaagttcgtgcctctcagca

SEQ ID NO: 3253964 - DNA, 25 bp, Homo sapien
ttctagggtgtctaggaggccatgc

SEQ ID NO: 3253965 - DNA, 25 bp, Homo sapien
taggaaacagtagttcagaactcca

SEQ ID NO: 3253966 - DNA, 25 bp, Homo sapien
gacacaactccaaaccatataatta

SEQ ID NO: 3253967 - DNA, 25 bp, Homo sapien
gctcacggttccaacaggttgtaca

SEQ ID NO: 3253968 - DNA, 25 bp, Homo sapien
gtgaggtgtctcacatgatggcagc

SEQ ID NO: 3253969 - DNA, 25 bp, Homo sapien
gatgggatctcatcgtttaaaatga

SEQ ID NO: 3253970 - DNA, 25 bp, Homo sapien
caagggcgattccatcagggttagt

SEQ ID NO: 3253971 - DNA, 25 bp, Homo sapien
ctgctctccaagggcgattccatca

SEQ ID NO: 3253972 - DNA, 25 bp, Homo sapien
tgcaagtgcccagagctgtagagct

SEQ ID NO: 3253973 - DNA, 25 bp, Homo sapien
ctctccaagggcgattccatcaggg

SEQ ID NO: 3253974 - DNA, 25 bp, Homo sapien
cacaattggattgatgagacagccc

SEQ ID NO: 3253975 - DNA, 25 bp, Homo sapien
cataatagctctcaaggtggaggct

SEQ ID NO: 3253976 - DNA, 25 bp, Homo sapien
gcttagggaggctggtgactttcca

SEQ ID NO: 3253977 - DNA, 25 bp, Homo sapien
tcacacatggctggaggtgtagcct

SEQ ID NO: 3253978 - DNA, 25 bp, Homo sapien
tttctcatgtcagctgaggcggctg

SEQ ID NO: 3253979 - DNA, 25 bp, Homo sapien
tagacgcagtgtttccttcaaggcc

SEQ ID NO: 3253980 - DNA, 25 bp, Homo sapien
tgcttggcccataataagtactcaa

SEQ ID NO: 3253981 - DNA, 25 bp, Homo sapien
aagtacttaattccatgcttggccc

SEQ ID NO: 3253982 - DNA, 25 bp, Homo sapien
aattctcacatgcaaacctggtcag

SEQ ID NO: 3253983 - DNA, 25 bp, Homo sapien
cacactaatccgtaagacagagaca

SEQ ID NO: 3253984 - DNA, 25 bp, Homo sapien
tgtagcttagacctagcacagtgac

SEQ ID NO: 3253985 - DNA, 25 bp, Homo sapien
tatgtattgacagagcctattggca

SEQ ID NO: 3253986 - DNA, 25 bp, Homo sapien
tagatctggccaccaattctggagg

SEQ ID NO: 3253987 - DNA, 25 bp, Homo sapien
tgcagccatgtagttagagagccct

SEQ ID NO: 3253988 - DNA, 25 bp, Homo sapien
gaaagtcacattgtcagctcaaggt

SEQ ID NO: 3253989 - DNA, 25 bp, Homo sapien
tgtggaaatgctgtccctaggcctc

SEQ ID NO: 3253990 - DNA, 25 bp, Homo sapien
gacatgatgaagaacttagaaactg

SEQ ID NO: 3253991 - DNA, 25 bp, Homo sapien
cattctacagaattcactacgcaga

SEQ ID NO: 3253992 - DNA, 25 bp, Homo sapien
aaagctgttagaaccattccattct

SEQ ID NO: 3253993 - DNA, 25 bp, Homo sapien
aattcactacgcagacatgatgaag

SEQ ID NO: 3253994 - DNA, 25 bp, Homo sapien
taacctccattggcactgggcattg

SEQ ID NO: 3253995 - DNA, 25 bp, Homo sapien
ttaacctccattggcactgggcatt

SEQ ID NO: 3253996 - DNA, 25 bp, Homo sapien
aacctccattggcactgggcattgc

SEQ ID NO: 3253997 - DNA, 25 bp, Homo sapien
acctccattggcactgggcattgcc

SEQ ID NO: 3253998 - DNA, 25 bp, Homo sapien
ctgcctcctgtaaatccagtaagca

SEQ ID NO: 3253999 - DNA, 25 bp, Homo sapien
aaaggactgagccctttcacttgca

SEQ ID NO: 3254000 - DNA, 25 bp, Homo sapien
cagggccaggatgtttcatggtttc

SEQ ID NO: 3254001 - DNA, 25 bp, Homo sapien
tccagtaagcaatacttattcattc

SEQ ID NO: 3254002 - DNA, 25 bp, Homo sapien
tataatgaacccctaatgtggtgac

SEQ ID NO: 3254003 - DNA, 25 bp, Homo sapien
tggagcctccatagaaacgtctaaa

SEQ ID NO: 3254004 - DNA, 25 bp, Homo sapien
cattagatggtttcaaggcagcgct

SEQ ID NO: 3254005 - DNA, 25 bp, Homo sapien
gtttcccagttggtaaacgcactga

SEQ ID NO: 3254006 - DNA, 25 bp, Homo sapien
tccctgatgttaggaggactgacca

SEQ ID NO: 3254007 - DNA, 25 bp, Homo sapien
tcaaatgctgatacgcccctgcagt

SEQ ID NO: 3254008 - DNA, 25 bp, Homo sapien
gcaggcagagacgaccacataggtt

SEQ ID NO: 3254009 - DNA, 25 bp, Homo sapien
tattgagtgctgacccactgtcagg

SEQ ID NO: 3254010 - DNA, 25 bp, Homo sapien
cactcagatacaatgctgacattta

SEQ ID NO: 3254011 - DNA, 25 bp, Homo sapien
tcactcagatacaatgctgacattt

SEQ ID NO: 3254012 - DNA, 25 bp, Homo sapien
actcagatacaatgctgacatttac

SEQ ID NO: 3254013 - DNA, 25 bp, Homo sapien
tacagctttcttgccctcatgacct

SEQ ID NO: 3254014 - DNA, 25 bp, Homo sapien
gcactgtcccagataactgccctgg

SEQ ID NO: 3254015 - DNA, 25 bp, Homo sapien
ggcactgtcccagataactgccctg

SEQ ID NO: 3254016 - DNA, 25 bp, Homo sapien
tgacctgcacttatcatagtggcaa

SEQ ID NO: 3254017 - DNA, 25 bp, Homo sapien
agacggtaactgcttaggcacagac

SEQ ID NO: 3254018 - DNA, 25 bp, Homo sapien
ggtaactgcttaggcacagactgtg

SEQ ID NO: 3254019 - DNA, 25 bp, Homo sapien
taactgcttaggcacagactgtgac

SEQ ID NO: 3254020 - DNA, 25 bp, Homo sapien
gcttaggcacagactgtgacttggt

SEQ ID NO: 3254021 - DNA, 25 bp, Homo sapien
tcatcttcaggtgagtccactttca

SEQ ID NO: 3254022 - DNA, 25 bp, Homo sapien
accttctgtgggatagactgcagac

SEQ ID NO: 3254023 - DNA, 25 bp, Homo sapien
gacagtcggctacatttaaattggg

SEQ ID NO: 3254024 - DNA, 25 bp, Homo sapien
tcccgcgtatgaactgctcttgctg

SEQ ID NO: 3254025 - DNA, 25 bp, Homo sapien
gaatgcccacgatactcaggtaggg

SEQ ID NO: 3254026 - DNA, 25 bp, Homo sapien
ctgcagaaagaggcgatgatggcca

SEQ ID NO: 3254027 - DNA, 25 bp, Homo sapien
gcgatgatggccagaatgcccacga

SEQ ID NO: 3254028 - DNA, 25 bp, Homo sapien
gccagaatgcccacgatactcaggt

SEQ ID NO: 3254029 - DNA, 25 bp, Homo sapien
gttcagcatacacaagggcatagaa

SEQ ID NO: 3254030 - DNA, 25 bp, Homo sapien
atcctaagagggcaccatcggcggg

SEQ ID NO: 3254031 - DNA, 25 bp, Homo sapien
tacacaagggcatagaatcctaaga

SEQ ID NO: 3254032 - DNA, 25 bp, Homo sapien
gaaggtaagagcctgcgttcatctc

SEQ ID NO: 3254033 - DNA, 25 bp, Homo sapien
cacaaatcaaaggccccaaaacgat

SEQ ID NO: 3254034 - DNA, 25 bp, Homo sapien
atcaaaggccccaaaacgatgaagc

SEQ ID NO: 3254035 - DNA, 25 bp, Homo sapien
cagaagtcagctccatgcttatctc

SEQ ID NO: 3254036 - DNA, 25 bp, Homo sapien
ttcactgagaccctcagcagctcca

SEQ ID NO: 3254037 - DNA, 25 bp, Homo sapien
gcagggtcagcgtgatggtgagggt

SEQ ID NO: 3254038 - DNA, 25 bp, Homo sapien
tgcagggtcagcgtgatggtgaggg

SEQ ID NO: 3254039 - DNA, 25 bp, Homo sapien
cagggtcagcgtgatggtgagggtc

SEQ ID NO: 3254040 - DNA, 25 bp, Homo sapien
tgatggtgagggtcccaaagaagag

SEQ ID NO: 3254041 - DNA, 25 bp, Homo sapien
caatgaggaggggtctccgtcccag

SEQ ID NO: 3254042 - DNA, 25 bp, Homo sapien
gggtctccgtcccaggtgctcaatg

SEQ ID NO: 3254043 - DNA, 25 bp, Homo sapien
agccaccaatgaggaggggtctccg

SEQ ID NO: 3254044 - DNA, 25 bp, Homo sapien
gaggggtctccgtcccaggtgctca

SEQ ID NO: 3254045 - DNA, 25 bp, Homo sapien
taacgagcactctcctccgaatctt

SEQ ID NO: 3254046 - DNA, 25 bp, Homo sapien
agcattaataacgagcactctcctc

SEQ ID NO: 3254047 - DNA, 25 bp, Homo sapien
cattaataacgagcactctcctccg

SEQ ID NO: 3254048 - DNA, 25 bp, Homo sapien
taataacgagcactctcctccgaat

SEQ ID NO: 3254049 - DNA, 25 bp, Homo sapien
cacttgaaggctaggagccttcatc

SEQ ID NO: 3254050 - DNA, 25 bp, Homo sapien
cctgacaggtgtggcgtaagtgttt

SEQ ID NO: 3254051 - DNA, 25 bp, Homo sapien
gaatacctgacaggtgtggcgtaag

SEQ ID NO: 3254052 - DNA, 25 bp, Homo sapien
cttgaaggctaggagccttcatctt

SEQ ID NO: 3254053 - DNA, 25 bp, Homo sapien
tgtgattatcactgacgcagctccc

SEQ ID NO: 3254054 - DNA, 25 bp, Homo sapien
ggagcagagaatggtgtgattatca

SEQ ID NO: 3254055 - DNA, 25 bp, Homo sapien
gaacccttggcacatgagcaattgg

SEQ ID NO: 3254056 - DNA, 25 bp, Homo sapien
ctgaggaacccttggcacatgagca

SEQ ID NO: 3254057 - DNA, 25 bp, Homo sapien
gatgctggggcactgactctgtttc

SEQ ID NO: 3254058 - DNA, 25 bp, Homo sapien
tgcttggggatgctggggcactgac

SEQ ID NO: 3254059 - DNA, 25 bp, Homo sapien
tctgcttggggatgctggggcactg

SEQ ID NO: 3254060 - DNA, 25 bp, Homo sapien
gggcactgactctgtttcttccctt

SEQ ID NO: 3254061 - DNA, 25 bp, Homo sapien
gctggcacagtatgagtgcacctta

SEQ ID NO: 3254062 - DNA, 25 bp, Homo sapien
gacagctggcacagtatgagtgcac

SEQ ID NO: 3254063 - DNA, 25 bp, Homo sapien
cagctggcacagtatgagtgcacct

SEQ ID NO: 3254064 - DNA, 25 bp, Homo sapien
gcacagtatgagtgcaccttaggtg

SEQ ID NO: 3254065 - DNA, 25 bp, Homo sapien
cccctctttcaaacaatggcagtca

SEQ ID NO: 3254066 - DNA, 25 bp, Homo sapien
ttgcaccaagggaagaagtgtagcc

SEQ ID NO: 3254067 - DNA, 25 bp, Homo sapien
gaatgaataagaatggcttcccgtg

SEQ ID NO: 3254068 - DNA, 25 bp, Homo sapien
tgcctgccagagcatcgggatgaga

SEQ ID NO: 3254069 - DNA, 25 bp, Homo sapien
cagtgaagagctgcatgatgacctc

SEQ ID NO: 3254070 - DNA, 25 bp, Homo sapien
tgttgccttaggttcccacattgca

SEQ ID NO: 3254071 - DNA, 25 bp, Homo sapien
aactgggtgagaattgtcgctcttc

SEQ ID NO: 3254072 - DNA, 25 bp, Homo sapien
cacattgcagtgttgcctgccccgg

SEQ ID NO: 3254073 - DNA, 25 bp, Homo sapien
tactcaaggtgacgtatgggatctt

SEQ ID NO: 3254074 - DNA, 25 bp, Homo sapien
tctcgatgccccctgtactcaaggt

SEQ ID NO: 3254075 - DNA, 25 bp, Homo sapien
gatctttgccggagggatcccagct

SEQ ID NO: 3254076 - DNA, 25 bp, Homo sapien
gaagacggcagccaaagtctcgatg

SEQ ID NO: 3254077 - DNA, 25 bp, Homo sapien
gccagtgaaaactacgacacccatt

SEQ ID NO: 3254078 - DNA, 25 bp, Homo sapien
ccatttcttcgagcttgcaggcatg

SEQ ID NO: 3254079 - DNA, 25 bp, Homo sapien
tacgacacccatttcttcgagcttg

SEQ ID NO: 3254080 - DNA, 25 bp, Homo sapien
caagagatgccagtgaaaactacga

SEQ ID NO: 3254081 - DNA, 25 bp, Homo sapien
acatcagctgatagagtgggaaggt

SEQ ID NO: 3254082 - DNA, 25 bp, Homo sapien
agtcttaatctgtttgtgacacgaa

SEQ ID NO: 3254083 - DNA, 25 bp, Homo sapien
gaaggtgactgccttcagctttacc

SEQ ID NO: 3254084 - DNA, 25 bp, Homo sapien
ctgtttgtgacacgaagccactgcc

SEQ ID NO: 3254085 - DNA, 25 bp, Homo sapien
ttctcccccagacactcaggtgccc

SEQ ID NO: 3254086 - DNA, 25 bp, Homo sapien
cttttctcccccagacactcaggtg

SEQ ID NO: 3254087 - DNA, 25 bp, Homo sapien
tccttttctcccccagacactcagg

SEQ ID NO: 3254088 - DNA, 25 bp, Homo sapien
ttttctcccccagacactcaggtgc

SEQ ID NO: 3254089 - DNA, 25 bp, Homo sapien
tcatgctgaggacaaactgctcgaa

SEQ ID NO: 3254090 - DNA, 25 bp, Homo sapien
cagggttgataagatgcagcctcca

SEQ ID NO: 3254091 - DNA, 25 bp, Homo sapien
gactgacactcacactgaagcctgg

SEQ ID NO: 3254092 - DNA, 25 bp, Homo sapien
actaatagctctctccaggtgaggg

SEQ ID NO: 3254093 - DNA, 25 bp, Homo sapien
gcagctgaagttttggatcccaggg

SEQ ID NO: 3254094 - DNA, 25 bp, Homo sapien
gaagacaaagcaagtcttccaaggc

SEQ ID NO: 3254095 - DNA, 25 bp, Homo sapien
ccccaaataatgtctgggataatga

SEQ ID NO: 3254096 - DNA, 25 bp, Homo sapien
tgtctccagtgacatgtcatgtccc

SEQ ID NO: 3254097 - DNA, 25 bp, Homo sapien
tagctctctttgtcccgtgaatttg

SEQ ID NO: 3254098 - DNA, 25 bp, Homo sapien
ttgccactaaacagcatgggtctct

SEQ ID NO: 3254099 - DNA, 25 bp, Homo sapien
tctttgtcccgtgaatttggatgac

SEQ ID NO: 3254100 - DNA, 25 bp, Homo sapien
ggcatttgccactaaacagcatggg

SEQ ID NO: 3254101 - DNA, 25 bp, Homo sapien
ctgtatgtaacacggaagaagactt

SEQ ID NO: 3254102 - DNA, 25 bp, Homo sapien
tatgtaacacggaagaagacttgtc

SEQ ID NO: 3254103 - DNA, 25 bp, Homo sapien
taacacggaagaagacttgtcccca

SEQ ID NO: 3254104 - DNA, 25 bp, Homo sapien
ggaagaagacttgtccccatggctg

SEQ ID NO: 3254105 - DNA, 25 bp, Homo sapien
cacctgccagcggacgtagggagct

SEQ ID NO: 3254106 - DNA, 25 bp, Homo sapien
cctctacctcttgggaaacgtctgc

SEQ ID NO: 3254107 - DNA, 25 bp, Homo sapien
tctgctttacccaagaacgtttgga

SEQ ID NO: 3254108 - DNA, 25 bp, Homo sapien
catggtgacaatcacggtgaccacc

SEQ ID NO: 3254109 - DNA, 25 bp, Homo sapien
tgcaaacagaggcacacatggactt

SEQ ID NO: 3254110 - DNA, 25 bp, Homo sapien
tttcagcagggattagagtgtccat

SEQ ID NO: 3254111 - DNA, 25 bp, Homo sapien
agaggcacacatggactttcagcag

SEQ ID NO: 3254112 - DNA, 25 bp, Homo sapien
cacatggactttcagcagggattag

SEQ ID NO: 3254113 - DNA, 25 bp, Homo sapien
tgcacacaaatctgtgctgtcttgc

SEQ ID NO: 3254114 - DNA, 25 bp, Homo sapien
gaaaaggcactcgtcctccattcca

SEQ ID NO: 3254115 - DNA, 25 bp, Homo sapien
gggccactcttctgcacacaaatct

SEQ ID NO: 3254116 - DNA, 25 bp, Homo sapien
cctggaaaaggcactcgtcctccat

SEQ ID NO: 3254117 - DNA, 25 bp, Homo sapien
tgattttccaatggcaggctcccca

SEQ ID NO: 3254118 - DNA, 25 bp, Homo sapien
gacaccttcagagcacagcagagtg

SEQ ID NO: 3254119 - DNA, 25 bp, Homo sapien
gccagtatctgttcggtgttctccc

SEQ ID NO: 3254120 - DNA, 25 bp, Homo sapien
tactgttccgggcatggtgtgattt

SEQ ID NO: 3254121 - DNA, 25 bp, Homo sapien
gcaaagcgcagaacaacccggaggc

SEQ ID NO: 3254122 - DNA, 25 bp, Homo sapien
agcgcagaacaacccggaggcctct

SEQ ID NO: 3254123 - DNA, 25 bp, Homo sapien
agcaaagcgcagaacaacccggagg

SEQ ID NO: 3254124 - DNA, 25 bp, Homo sapien
aaagcgcagaacaacccggaggcct

SEQ ID NO: 3254125 - DNA, 25 bp, Homo sapien
ctgggatgagacaggcaaagggact

SEQ ID NO: 3254126 - DNA, 25 bp, Homo sapien
gatgagacaggcaaagggacttcac

SEQ ID NO: 3254127 - DNA, 25 bp, Homo sapien
tgggatgagacaggcaaagggactt

SEQ ID NO: 3254128 - DNA, 25 bp, Homo sapien
ggatgagacaggcaaagggacttca

SEQ ID NO: 3254129 - DNA, 25 bp, Homo sapien
tataagttccatgcccagagtggca

SEQ ID NO: 3254130 - DNA, 25 bp, Homo sapien
tgagcttgttctcccttacacaggg

SEQ ID NO: 3254131 - DNA, 25 bp, Homo sapien
tgttctcccttacacagggcaggcc

SEQ ID NO: 3254132 - DNA, 25 bp, Homo sapien
tggagcatagggcaatagcctcgta

SEQ ID NO: 3254133 - DNA, 25 bp, Homo sapien
tcagttctgcggggcttctgagcag

SEQ ID NO: 3254134 - DNA, 25 bp, Homo sapien
agttctgcggggcttctgagcagca

SEQ ID NO: 3254135 - DNA, 25 bp, Homo sapien
ggcttctgagcagcacatggaatac

SEQ ID NO: 3254136 - DNA, 25 bp, Homo sapien
ggggcttctgagcagcacatggaat

SEQ ID NO: 3254137 - DNA, 25 bp, Homo sapien
cacgtgctgtgcttaaggtgggcaa

SEQ ID NO: 3254138 - DNA, 25 bp, Homo sapien
tacactgcgctgcagatggctgagc

SEQ ID NO: 3254139 - DNA, 25 bp, Homo sapien
gaagatggggcatttatctgccagc

SEQ ID NO: 3254140 - DNA, 25 bp, Homo sapien
cctgagcatttggagaggcacgtgc

SEQ ID NO: 3254141 - DNA, 25 bp, Homo sapien
agcccacatggactgtctgctgcag

SEQ ID NO: 3254142 - DNA, 25 bp, Homo sapien
acatggactgtctgctgcagcaagg

SEQ ID NO: 3254143 - DNA, 25 bp, Homo sapien
ctgagcccacatggactgtctgctg

SEQ ID NO: 3254144 - DNA, 25 bp, Homo sapien
cccacatggactgtctgctgcagca

SEQ ID NO: 3254145 - DNA, 25 bp, Homo sapien
gtcctgtcagctcggggcagcgctt

SEQ ID NO: 3254146 - DNA, 25 bp, Homo sapien
cagtcctgtcagctcggggcagcgc

SEQ ID NO: 3254147 - DNA, 25 bp, Homo sapien
cagctcggggcagcgcttgcactag

SEQ ID NO: 3254148 - DNA, 25 bp, Homo sapien
tcggggcagcgcttgcactagggga

SEQ ID NO: 3254149 - DNA, 25 bp, Homo sapien
cttcatggaagaggttggttttcct

SEQ ID NO: 3254150 - DNA, 25 bp, Homo sapien
cagatgcttcatggaagaggttggt

SEQ ID NO: 3254151 - DNA, 25 bp, Homo sapien
tgcttcatggaagaggttggttttc

SEQ ID NO: 3254152 - DNA, 25 bp, Homo sapien
gatgcttcatggaagaggttggttt

SEQ ID NO: 3254153 - DNA, 25 bp, Homo sapien
ggtggggcttgatgccacatggaga

SEQ ID NO: 3254154 - DNA, 25 bp, Homo sapien
gggcttgatgccacatggagagtga

SEQ ID NO: 3254155 - DNA, 25 bp, Homo sapien
gttggtggggcttgatgccacatgg

SEQ ID NO: 3254156 - DNA, 25 bp, Homo sapien
gagttggtggggcttgatgccacat

SEQ ID NO: 3254157 - DNA, 25 bp, Homo sapien
tcagccacgttaacgagagcagctc

SEQ ID NO: 3254158 - DNA, 25 bp, Homo sapien
aagaacatcagccacgttaacgaga

SEQ ID NO: 3254159 - DNA, 25 bp, Homo sapien
tcctggttagcctcagaggctgtgg

SEQ ID NO: 3254160 - DNA, 25 bp, Homo sapien
tcccacgtcatctgtgccaagaaca

SEQ ID NO: 3254161 - DNA, 25 bp, Homo sapien
ctttggtagggtggtttccgagctg

SEQ ID NO: 3254162 - DNA, 25 bp, Homo sapien
acgacttcgtgctctgagggctgga

SEQ ID NO: 3254163 - DNA, 25 bp, Homo sapien
caatttctaggaacgacttcgtgct

SEQ ID NO: 3254164 - DNA, 25 bp, Homo sapien
gtgggcaatttctaggaacgacttc

SEQ ID NO: 3254165 - DNA, 25 bp, Homo sapien
cacgaggggtgttggaggaaaatct

SEQ ID NO: 3254166 - DNA, 25 bp, Homo sapien
tggtatctctctgtgcacgaggggt

SEQ ID NO: 3254167 - DNA, 25 bp, Homo sapien
atctctctgtgcacgaggggtgttg

SEQ ID NO: 3254168 - DNA, 25 bp, Homo sapien
atcttctttgggttccaatcctttg

SEQ ID NO: 3254169 - DNA, 25 bp, Homo sapien
caagagcaggtagcgtgggctgtcc

SEQ ID NO: 3254170 - DNA, 25 bp, Homo sapien
gggaccacaatcactccaaacaggt

SEQ ID NO: 3254171 - DNA, 25 bp, Homo sapien
ctcagcagctggacaacggcaggga

SEQ ID NO: 3254172 - DNA, 25 bp, Homo sapien
ccaaacaggtatggccaggtactct

SEQ ID NO: 3254173 - DNA, 25 bp, Homo sapien
ggaccaggtggtttcgaccctgcag

SEQ ID NO: 3254174 - DNA, 25 bp, Homo sapien
ccaggtggtttcgaccctgcagaag

SEQ ID NO: 3254175 - DNA, 25 bp, Homo sapien
aggtggtttcgaccctgcagaaggt

SEQ ID NO: 3254176 - DNA, 25 bp, Homo sapien
cctttggtcattgttgaggggactg

SEQ ID NO: 3254177 - DNA, 25 bp, Homo sapien
acttcacatgataggcagaggttct

SEQ ID NO: 3254178 - DNA, 25 bp, Homo sapien
catgataggcagaggttctgttggc

SEQ ID NO: 3254179 - DNA, 25 bp, Homo sapien
tcacatgataggcagaggttctgtt

SEQ ID NO: 3254180 - DNA, 25 bp, Homo sapien
gataggcagaggttctgttggcttc

SEQ ID NO: 3254181 - DNA, 25 bp, Homo sapien
tcccaagactcgctccctactgagg

SEQ ID NO: 3254182 - DNA, 25 bp, Homo sapien
gctccctactgaggtccatggtaac

SEQ ID NO: 3254183 - DNA, 25 bp, Homo sapien
aggtccatggtaacagagacttttg

SEQ ID NO: 3254184 - DNA, 25 bp, Homo sapien
gactcgctccctactgaggtccatg

SEQ ID NO: 3254185 - DNA, 25 bp, Homo sapien
cagcccccggattgggatgccaaca

SEQ ID NO: 3254186 - DNA, 25 bp, Homo sapien
ggcagcccccggattgggatgccaa

SEQ ID NO: 3254187 - DNA, 25 bp, Homo sapien
agcccccggattgggatgccaacat

SEQ ID NO: 3254188 - DNA, 25 bp, Homo sapien
gcagcccccggattgggatgccaac

SEQ ID NO: 3254189 - DNA, 25 bp, Homo sapien
attccatagggttgctttgttacat

SEQ ID NO: 3254190 - DNA, 25 bp, Homo sapien
gttgctttgttacatctttgaatgc

SEQ ID NO: 3254191 - DNA, 25 bp, Homo sapien
gcttgtttagcagtggggcctcaca

SEQ ID NO: 3254192 - DNA, 25 bp, Homo sapien
ttcctgcttgtttagcagtggggcc

SEQ ID NO: 3254193 - DNA, 25 bp, Homo sapien
gattaccggcgtgagtcaggtgttt

SEQ ID NO: 3254194 - DNA, 25 bp, Homo sapien
agaagcggtcgggtcattttctgct

SEQ ID NO: 3254195 - DNA, 25 bp, Homo sapien
gccgtgcaagaatggccaaatacaa

SEQ ID NO: 3254196 - DNA, 25 bp, Homo sapien
tctgcattccagaagcggtcgggtc

SEQ ID NO: 3254197 - DNA, 25 bp, Homo sapien
tcattgggcagtgacgagaggtccc

SEQ ID NO: 3254198 - DNA, 25 bp, Homo sapien
ggtgccttgcccatctgagtttgag

SEQ ID NO: 3254199 - DNA, 25 bp, Homo sapien
ccatgggtaggaggtagagaaccaa

SEQ ID NO: 3254200 - DNA, 25 bp, Homo sapien
tgctgttgcttaaagagctggagcc

SEQ ID NO: 3254201 - DNA, 25 bp, Homo sapien
gaaaggtggacacgcggatgaccac

SEQ ID NO: 3254202 - DNA, 25 bp, Homo sapien
gatgagaacttggactttggtccca

SEQ ID NO: 3254203 - DNA, 25 bp, Homo sapien
gaccccacggtcagctctacgttga

SEQ ID NO: 3254204 - DNA, 25 bp, Homo sapien
tgaccacctgaccactatgtagaac

SEQ ID NO: 3254205 - DNA, 25 bp, Homo sapien
ccagcctcagaatctaggtacccag

SEQ ID NO: 3254206 - DNA, 25 bp, Homo sapien
gtacccaggtcctcgaatcagctct

SEQ ID NO: 3254207 - DNA, 25 bp, Homo sapien
cctcagaatctaggtacccaggtcc

SEQ ID NO: 3254208 - DNA, 25 bp, Homo sapien
caggtcctcgaatcagctcttcctt

SEQ ID NO: 3254209 - DNA, 25 bp, Homo sapien
gctgggatccaatcctttctccatg

SEQ ID NO: 3254210 - DNA, 25 bp, Homo sapien
tcagtcctggctgggatccaatcct

SEQ ID NO: 3254211 - DNA, 25 bp, Homo sapien
tggctgggatccaatcctttctcca

SEQ ID NO: 3254212 - DNA, 25 bp, Homo sapien
tcctggctgggatccaatcctttct

SEQ ID NO: 3254213 - DNA, 25 bp, Homo sapien
tgcccagtgaacacgccaatgcaga

SEQ ID NO: 3254214 - DNA, 25 bp, Homo sapien
gtgaacacgccaatgcagataaaga

SEQ ID NO: 3254215 - DNA, 25 bp, Homo sapien
gtgagatctcactaaggtacatggg

SEQ ID NO: 3254216 - DNA, 25 bp, Homo sapien
agagagccacggatctccttgggtg

SEQ ID NO: 3254217 - DNA, 25 bp, Homo sapien
gatgaagcgtcccacgatgagcatt

SEQ ID NO: 3254218 - DNA, 25 bp, Homo sapien
tccatctatgcccatgatgaagcgt

SEQ ID NO: 3254219 - DNA, 25 bp, Homo sapien
ctggagcgagcaggccatcagcaat

SEQ ID NO: 3254220 - DNA, 25 bp, Homo sapien
tcccacgatgagcatttcaaaggct

SEQ ID NO: 3254221 - DNA, 25 bp, Homo sapien
gaattggcccctaactaagatctgc

SEQ ID NO: 3254222 - DNA, 25 bp, Homo sapien
ctgagaagtgaggtgtcaaagtccc

SEQ ID NO: 3254223 - DNA, 25 bp, Homo sapien
ccactaggacaagcaagaggaccat

SEQ ID NO: 3254224 - DNA, 25 bp, Homo sapien
gccacggtcaggtataaagcaagga

SEQ ID NO: 3254225 - DNA, 25 bp, Homo sapien
taactcttgtaacattccctgcagg

SEQ ID NO: 3254226 - DNA, 25 bp, Homo sapien
tcagattgatgtgacgactcctcca

SEQ ID NO: 3254227 - DNA, 25 bp, Homo sapien
taagacacgaatgttctggccccat

SEQ ID NO: 3254228 - DNA, 25 bp, Homo sapien
tttattcagctacaactcatggcca

SEQ ID NO: 3254229 - DNA, 25 bp, Homo sapien
tctgggtctattggacgtccatgcc

SEQ ID NO: 3254230 - DNA, 25 bp, Homo sapien
caccgatggcgaatatggacacagt

SEQ ID NO: 3254231 - DNA, 25 bp, Homo sapien
ccatgactcattgtaaaaggccttg

SEQ ID NO: 3254232 - DNA, 25 bp, Homo sapien
gacacagtcacagaccagagcaaag

SEQ ID NO: 3254233 - DNA, 25 bp, Homo sapien
catgttatttccttctgttctctcc

SEQ ID NO: 3254234 - DNA, 25 bp, Homo sapien
tgttatttccttctgttctctcctg

SEQ ID NO: 3254235 - DNA, 25 bp, Homo sapien
acaacaaaccatgttatttccttct

SEQ ID NO: 3254236 - DNA, 25 bp, Homo sapien
ctgaaaataaacaacaaaccatgtt

SEQ ID NO: 3254237 - DNA, 25 bp, Homo sapien
acagcttgtacagagcattttcatg

SEQ ID NO: 3254238 - DNA, 25 bp, Homo sapien
gaagcaagccagtgtacaaaacaaa

SEQ ID NO: 3254239 - DNA, 25 bp, Homo sapien
gcttgtacagagcattttcatgcat

SEQ ID NO: 3254240 - DNA, 25 bp, Homo sapien
cttgaagcaagccagtgtacaaaac

SEQ ID NO: 3254241 - DNA, 25 bp, Homo sapien
taggccccctgcaggaacacttttc

SEQ ID NO: 3254242 - DNA, 25 bp, Homo sapien
cagaagacttgctgcatagcctagg

SEQ ID NO: 3254243 - DNA, 25 bp, Homo sapien
tggcaactgaacgtttgtcttccag

SEQ ID NO: 3254244 - DNA, 25 bp, Homo sapien
agacttgctgcatagcctaggcccc

SEQ ID NO: 3254245 - DNA, 25 bp, Homo sapien
aattcagcaatagcccaggtgaaag

SEQ ID NO: 3254246 - DNA, 25 bp, Homo sapien
ttcagcaatagcccaggtgaaaggc

SEQ ID NO: 3254247 - DNA, 25 bp, Homo sapien
ctgaattcagcaatagcccaggtga

SEQ ID NO: 3254248 - DNA, 25 bp, Homo sapien
tgaattcagcaatagcccaggtgaa

SEQ ID NO: 3254249 - DNA, 25 bp, Homo sapien
gggccccgtctgcaacatcaattct

SEQ ID NO: 3254250 - DNA, 25 bp, Homo sapien
ttttgcatatcctccggttggccgg

SEQ ID NO: 3254251 - DNA, 25 bp, Homo sapien
tcttattcaatcacagtcctgagcc

SEQ ID NO: 3254252 - DNA, 25 bp, Homo sapien
ttcattgtctatttggccccaggca

SEQ ID NO: 3254253 - DNA, 25 bp, Homo sapien
tgggcccttttggactgaagtctgg

SEQ ID NO: 3254254 - DNA, 25 bp, Homo sapien
ttgggcccttttggactgaagtctg

SEQ ID NO: 3254255 - DNA, 25 bp, Homo sapien
tgggctccatactgtcggccctgcc

SEQ ID NO: 3254256 - DNA, 25 bp, Homo sapien
agtctgggctccatactgtcggccc

SEQ ID NO: 3254257 - DNA, 25 bp, Homo sapien
tcatgtggcctatcagcacctctgt

SEQ ID NO: 3254258 - DNA, 25 bp, Homo sapien
tgccagttcatgcaaagtccagtgt

SEQ ID NO: 3254259 - DNA, 25 bp, Homo sapien
caaggacccttgtggatgcacgagg

SEQ ID NO: 3254260 - DNA, 25 bp, Homo sapien
ggatgctgccataaaccaggcctca

SEQ ID NO: 3254261 - DNA, 25 bp, Homo sapien
agctggtgcccagaggcgagttatt

SEQ ID NO: 3254262 - DNA, 25 bp, Homo sapien
gttattttcattttcggcattacag

SEQ ID NO: 3254263 - DNA, 25 bp, Homo sapien
cattttcggcattacagaaagtttc

SEQ ID NO: 3254264 - DNA, 25 bp, Homo sapien
tgggtcaagtgcagagctggtgccc

SEQ ID NO: 3254265 - DNA, 25 bp, Homo sapien
gtgctaaaggcagcacaccttccca

SEQ ID NO: 3254266 - DNA, 25 bp, Homo sapien
cagtgctaaaggcagcacaccttcc

SEQ ID NO: 3254267 - DNA, 25 bp, Homo sapien
ggccagtgctaaaggcagcacacct

SEQ ID NO: 3254268 - DNA, 25 bp, Homo sapien
ctaaaggcagcacaccttcccatgg

SEQ ID NO: 3254269 - DNA, 25 bp, Homo sapien
agagaattcgaggtgatcgctggac

SEQ ID NO: 3254270 - DNA, 25 bp, Homo sapien
aattcgaggtgatcgctggacgctg

SEQ ID NO: 3254271 - DNA, 25 bp, Homo sapien
atctcctttcatttcgcagcgacct

SEQ ID NO: 3254272 - DNA, 25 bp, Homo sapien
tcatttcgcagcgacctcacaaggg

SEQ ID NO: 3254273 - DNA, 25 bp, Homo sapien
catctagtctcccaacgttctccca

SEQ ID NO: 3254274 - DNA, 25 bp, Homo sapien
ctagtctcccaacgttctcccagga

SEQ ID NO: 3254275 - DNA, 25 bp, Homo sapien
gtctcccaacgttctcccaggacac

SEQ ID NO: 3254276 - DNA, 25 bp, Homo sapien
tagtctcccaacgttctcccaggac

SEQ ID NO: 3254277 - DNA, 25 bp, Homo sapien
cctgtccccgtgtcatcattgtctg

SEQ ID NO: 3254278 - DNA, 25 bp, Homo sapien
tctgtccccgcggtgtcccgcgccg

SEQ ID NO: 3254279 - DNA, 25 bp, Homo sapien
tgcgcacccgaaggtttccgcaggg

SEQ ID NO: 3254280 - DNA, 25 bp, Homo sapien
cgagtgggggctaatctctgtcccc

SEQ ID NO: 3254281 - DNA, 25 bp, Homo sapien
ccgacaggttgtagccgtagaggaa

SEQ ID NO: 3254282 - DNA, 25 bp, Homo sapien
ccacgaggagcgagcaggaccagtc

SEQ ID NO: 3254283 - DNA, 25 bp, Homo sapien
ttcaccaccgacaggttgtagccgt

SEQ ID NO: 3254284 - DNA, 25 bp, Homo sapien
aaggcgcccgcgagggaggccacga

SEQ ID NO: 3254285 - DNA, 25 bp, Homo sapien
gcaagtagggttccagtccaggtcc

SEQ ID NO: 3254286 - DNA, 25 bp, Homo sapien
gtttagcggccacgcccttgcgttc

SEQ ID NO: 3254287 - DNA, 25 bp, Homo sapien
gaggaaaccacgtcagagccggcac

SEQ ID NO: 3254288 - DNA, 25 bp, Homo sapien
gacctggaacgttccctcagctggg

SEQ ID NO: 3254289 - DNA, 25 bp, Homo sapien
agggtgcccactgaccgacggtgct

SEQ ID NO: 3254290 - DNA, 25 bp, Homo sapien
tgcccactgaccgacggtgctgctg

SEQ ID NO: 3254291 - DNA, 25 bp, Homo sapien
ctgaccgacggtgctgctgcccgtg

SEQ ID NO: 3254292 - DNA, 25 bp, Homo sapien
cagagggtgcccactgaccgacggt

SEQ ID NO: 3254293 - DNA, 25 bp, Homo sapien
tgtgaggggaactaggcccagttcc

SEQ ID NO: 3254294 - DNA, 25 bp, Homo sapien
gcccggcgtggctggtgtcatctgt

SEQ ID NO: 3254295 - DNA, 25 bp, Homo sapien
ggaggcccggcgtggctggtgtcat

SEQ ID NO: 3254296 - DNA, 25 bp, Homo sapien
catctgtgaggggaactaggcccag

SEQ ID NO: 3254297 - DNA, 25 bp, Homo sapien
ggcaatttgatcatgcctgaacagg

SEQ ID NO: 3254298 - DNA, 25 bp, Homo sapien
gctcctaagttattacagcaatgaa

SEQ ID NO: 3254299 - DNA, 25 bp, Homo sapien
tgatcatgcctgaacaggcaacggg

SEQ ID NO: 3254300 - DNA, 25 bp, Homo sapien
tctgccaaggcatttccgtgagtga

SEQ ID NO: 3254301 - DNA, 25 bp, Homo sapien
tgcctccaaagcgagggctggttcc

SEQ ID NO: 3254302 - DNA, 25 bp, Homo sapien
ttccccattccacagggccatcggc

SEQ ID NO: 3254303 - DNA, 25 bp, Homo sapien
catgatatcgtttagtcctcagagg

SEQ ID NO: 3254304 - DNA, 25 bp, Homo sapien
ggaactatcagacctacatttcggg

SEQ ID NO: 3254305 - DNA, 25 bp, Homo sapien
aactgtcctccggatgatttcctaa

SEQ ID NO: 3254306 - DNA, 25 bp, Homo sapien
cttaaactgtcctccggatgatttc

SEQ ID NO: 3254307 - DNA, 25 bp, Homo sapien
cggatgatttcctaaggctaaaaag

SEQ ID NO: 3254308 - DNA, 25 bp, Homo sapien
cctccggatgatttcctaaggctaa

SEQ ID NO: 3254309 - DNA, 25 bp, Homo sapien
cctgggtgaccggaataatcatgta

SEQ ID NO: 3254310 - DNA, 25 bp, Homo sapien
tgggtgaccggaataatcatgtaag

SEQ ID NO: 3254311 - DNA, 25 bp, Homo sapien
cccctgggtgaccggaataatcatg

SEQ ID NO: 3254312 - DNA, 25 bp, Homo sapien
gtgaccggaataatcatgtaaggga

SEQ ID NO: 3254313 - DNA, 25 bp, Homo sapien
tttctttttcgctgaatcactttct

SEQ ID NO: 3254314 - DNA, 25 bp, Homo sapien
atttctttttcgctgaatcactttc

SEQ ID NO: 3254315 - DNA, 25 bp, Homo sapien
cctcggtcctttttactgagcttca

SEQ ID NO: 3254316 - DNA, 25 bp, Homo sapien
atcttctcctcggtcctttttactg

SEQ ID NO: 3254317 - DNA, 25 bp, Homo sapien
ccctcatctggttgatcgggggtcc

SEQ ID NO: 3254318 - DNA, 25 bp, Homo sapien
catctggttgatcgggggtcccaca

SEQ ID NO: 3254319 - DNA, 25 bp, Homo sapien
ctcatctggttgatcgggggtccca

SEQ ID NO: 3254320 - DNA, 25 bp, Homo sapien
atctggttgatcgggggtcccacag

SEQ ID NO: 3254321 - DNA, 25 bp, Homo sapien
cacgcaaggagctgatggacacaga

SEQ ID NO: 3254322 - DNA, 25 bp, Homo sapien
tcttgtcttcatacgagggcagctg

SEQ ID NO: 3254323 - DNA, 25 bp, Homo sapien
gactgtagccagagctctcacttgg

SEQ ID NO: 3254324 - DNA, 25 bp, Homo sapien
cactgtggcgtgaggcaaatccctt

SEQ ID NO: 3254325 - DNA, 25 bp, Homo sapien
aaacaggtgtgcagacaatgatgcc

SEQ ID NO: 3254326 - DNA, 25 bp, Homo sapien
tgtaaacaggtgtgcagacaatgat

SEQ ID NO: 3254327 - DNA, 25 bp, Homo sapien
ctgtaaacaggtgtgcagacaatga

SEQ ID NO: 3254328 - DNA, 25 bp, Homo sapien
agtgttatgaggattgaaacagtag

SEQ ID NO: 3254329 - DNA, 25 bp, Homo sapien
actagctctggaggccattggctct

SEQ ID NO: 3254330 - DNA, 25 bp, Homo sapien
tcagagaggtgaagctactagccca

SEQ ID NO: 3254331 - DNA, 25 bp, Homo sapien
gaaagaagcaggatgacacgtgagc

SEQ ID NO: 3254332 - DNA, 25 bp, Homo sapien
gccattggctctcaggtgatgggtt

SEQ ID NO: 3254333 - DNA, 25 bp, Homo sapien
catctcgaaggtggaataagggcaa

SEQ ID NO: 3254334 - DNA, 25 bp, Homo sapien
tggatttggactgagccgtgctgcc

SEQ ID NO: 3254335 - DNA, 25 bp, Homo sapien
tactgacagttgaccagctaagctg

SEQ ID NO: 3254336 - DNA, 25 bp, Homo sapien
gaatccctagaaagctggtcaagcc

SEQ ID NO: 3254337 - DNA, 25 bp, Homo sapien
accaccggctcccagcatagagagc

SEQ ID NO: 3254338 - DNA, 25 bp, Homo sapien
tagagagctccactttgcccacaca

SEQ ID NO: 3254339 - DNA, 25 bp, Homo sapien
gcacatgacctgcagagacaccacc

SEQ ID NO: 3254340 - DNA, 25 bp, Homo sapien
atgacctgcagagacaccaccggct

SEQ ID NO: 3254341 - DNA, 25 bp, Homo sapien
gacagtcagcttctatttgtgagaa

SEQ ID NO: 3254342 - DNA, 25 bp, Homo sapien
tgatgttgaccaagttgaattgtaa

SEQ ID NO: 3254343 - DNA, 25 bp, Homo sapien
ttttcctccagttcgaatcttcctc

SEQ ID NO: 3254344 - DNA, 25 bp, Homo sapien
gaatgtttaattccagtgcctggtg

SEQ ID NO: 3254345 - DNA, 25 bp, Homo sapien
gattcatgcccacacagcaatgtaa

SEQ ID NO: 3254346 - DNA, 25 bp, Homo sapien
agagcgtctgattcatgcccacaca

SEQ ID NO: 3254347 - DNA, 25 bp, Homo sapien
cctcgggtcttgcactgacttggtg

SEQ ID NO: 3254348 - DNA, 25 bp, Homo sapien
ggtgctagaactcttcatgggcaga

SEQ ID NO: 3254349 - DNA, 25 bp, Homo sapien
tatagatgccggagtgaggccacct

SEQ ID NO: 3254350 - DNA, 25 bp, Homo sapien
ggtcaaggtaccctcagagcgtcaa

SEQ ID NO: 3254351 - DNA, 25 bp, Homo sapien
tcaaagtcatttagtcgagggtggg

SEQ ID NO: 3254352 - DNA, 25 bp, Homo sapien
tggtcatgacaaccacatggagagc

SEQ ID NO: 3254353 - DNA, 25 bp, Homo sapien
tagctgccagttaggatgccaacca

SEQ ID NO: 3254354 - DNA, 25 bp, Homo sapien
cagtcttgctgtgcacctaagggca

SEQ ID NO: 3254355 - DNA, 25 bp, Homo sapien
taacaagattttccaggcagtggca

SEQ ID NO: 3254356 - DNA, 25 bp, Homo sapien
tgcaggcctagcactgggaacgact

SEQ ID NO: 3254357 - DNA, 25 bp, Homo sapien
caagttccgtgagcctagtgggttc

SEQ ID NO: 3254358 - DNA, 25 bp, Homo sapien
tcagggtcaaacactggcctaaggt

SEQ ID NO: 3254359 - DNA, 25 bp, Homo sapien
cactgcagcccgaggtcttggaatc

SEQ ID NO: 3254360 - DNA, 25 bp, Homo sapien
caaagatattctgccttcaacggag

SEQ ID NO: 3254361 - DNA, 25 bp, Homo sapien
cctgaaagctatacaggctgctaag

SEQ ID NO: 3254362 - DNA, 25 bp, Homo sapien
tgcatgctattccttacctgaaagc

SEQ ID NO: 3254363 - DNA, 25 bp, Homo sapien
gaagtagatgggatgcagacatcat

SEQ ID NO: 3254364 - DNA, 25 bp, Homo sapien
catgatggatctgacaatcctgtgt

SEQ ID NO: 3254365 - DNA, 25 bp, Homo sapien
gggagggattgttctcagccaacat

SEQ ID NO: 3254366 - DNA, 25 bp, Homo sapien
tttaccagtgattccgacacacgca

SEQ ID NO: 3254367 - DNA, 25 bp, Homo sapien
caggctaatctcttaaagcgctcaa

SEQ ID NO: 3254368 - DNA, 25 bp, Homo sapien
tgattccgacacacgcaaaaacact

SEQ ID NO: 3254369 - DNA, 25 bp, Homo sapien
tcccctgacagatagtgagagccgc

SEQ ID NO: 3254370 - DNA, 25 bp, Homo sapien
tcggtctggctaacaagggttctaa

SEQ ID NO: 3254371 - DNA, 25 bp, Homo sapien
tctgtgtgctttggaggctactgcc

SEQ ID NO: 3254372 - DNA, 25 bp, Homo sapien
ccatctgatctggaggtggcgctct

SEQ ID NO: 3254373 - DNA, 25 bp, Homo sapien
tgttactgtctaaagctttcagaag

SEQ ID NO: 3254374 - DNA, 25 bp, Homo sapien
gctttcagaagaacgtgtacagaca

SEQ ID NO: 3254375 - DNA, 25 bp, Homo sapien
aaagctttcagaagaacgtgtacag

SEQ ID NO: 3254376 - DNA, 25 bp, Homo sapien
gtgcaaactgttactgtctaaagct

SEQ ID NO: 3254377 - DNA, 25 bp, Homo sapien
catgggggcgcgtcacagaaataga

SEQ ID NO: 3254378 - DNA, 25 bp, Homo sapien
ctgattcggtccatccagaggcggg

SEQ ID NO: 3254379 - DNA, 25 bp, Homo sapien
tagagaaatgacatgttccgctgca

SEQ ID NO: 3254380 - DNA, 25 bp, Homo sapien
aaactctagtccctgattcggtcca

SEQ ID NO: 3254381 - DNA, 25 bp, Homo sapien
tcagtaggtgattgtccactccttg

SEQ ID NO: 3254382 - DNA, 25 bp, Homo sapien
gtgaccagcgtgtgctcgtccagcc

SEQ ID NO: 3254383 - DNA, 25 bp, Homo sapien
catcatgggaggtcgtgaccagcgt

SEQ ID NO: 3254384 - DNA, 25 bp, Homo sapien
tgattgtccactccttgacagaggc

SEQ ID NO: 3254385 - DNA, 25 bp, Homo sapien
tgaggctcacattatacactggacg

SEQ ID NO: 3254386 - DNA, 25 bp, Homo sapien
tacaatacgtgcatggccacgcggg

SEQ ID NO: 3254387 - DNA, 25 bp, Homo sapien
gatgccaatagtgagacggtgcctg

SEQ ID NO: 3254388 - DNA, 25 bp, Homo sapien
tatctgcacgagaacccgatgctga

SEQ ID NO: 3254389 - DNA, 25 bp, Homo sapien
gcccatggagccccgaaccatgggt

SEQ ID NO: 3254390 - DNA, 25 bp, Homo sapien
cccatggagccccgaaccatgggtg

SEQ ID NO: 3254391 - DNA, 25 bp, Homo sapien
gtggcccatggagccccgaaccatg

SEQ ID NO: 3254392 - DNA, 25 bp, Homo sapien
tggcccatggagccccgaaccatgg

SEQ ID NO: 3254393 - DNA, 25 bp, Homo sapien
tgactctggtttccgggtcactcag

SEQ ID NO: 3254394 - DNA, 25 bp, Homo sapien
atgtccatgccaccggaggcaaagt

SEQ ID NO: 3254395 - DNA, 25 bp, Homo sapien
gccaccggaggcaaagtgttcattg

SEQ ID NO: 3254396 - DNA, 25 bp, Homo sapien
gggtccaaacatacaccatcatgtc

SEQ ID NO: 3254397 - DNA, 25 bp, Homo sapien
atggtgtccataaaaaacattgttc

SEQ ID NO: 3254398 - DNA, 25 bp, Homo sapien
ggtgtccataaaaaacattgttctc

SEQ ID NO: 3254399 - DNA, 25 bp, Homo sapien
tggtgtccataaaaaacattgttct

SEQ ID NO: 3254400 - DNA, 25 bp, Homo sapien
tcagcaacgctgaacactgtgacca

SEQ ID NO: 3254401 - DNA, 25 bp, Homo sapien
tgggagtaggccacgtcggtcacgg

SEQ ID NO: 3254402 - DNA, 25 bp, Homo sapien
tggaatacaggcggacgttgccgtc

SEQ ID NO: 3254403 - DNA, 25 bp, Homo sapien
ttgctggcgtcgcacaccgcgagga

SEQ ID NO: 3254404 - DNA, 25 bp, Homo sapien
gggtgcactgccacaacttcgggct

SEQ ID NO: 3254405 - DNA, 25 bp, Homo sapien
tgcactgccacaacttcgggctcgt

SEQ ID NO: 3254406 - DNA, 25 bp, Homo sapien
gccggggttgtcgatgctgaagcac

SEQ ID NO: 3254407 - DNA, 25 bp, Homo sapien
actgccacaacttcgggctcgtagc

SEQ ID NO: 3254408 - DNA, 25 bp, Homo sapien
cgtggattgtgggtggatcgcgatg

SEQ ID NO: 3254409 - DNA, 25 bp, Homo sapien
tggatcgcgatgaatggtagcagca

SEQ ID NO: 3254410 - DNA, 25 bp, Homo sapien
gaatggtagcagcaccctgactaaa

SEQ ID NO: 3254411 - DNA, 25 bp, Homo sapien
tcgcgatgaatggtagcagcaccct

SEQ ID NO: 3254412 - DNA, 25 bp, Homo sapien
gctgaacgtccagtttcacaactcc

SEQ ID NO: 3254413 - DNA, 25 bp, Homo sapien
gctacgcactttggctgaacgtcca

SEQ ID NO: 3254414 - DNA, 25 bp, Homo sapien
gggccgacggctacgcactttggct

SEQ ID NO: 3254415 - DNA, 25 bp, Homo sapien
tccaatgcacacgaccacggcgtat

SEQ ID NO: 3254416 - DNA, 25 bp, Homo sapien
agagcattacccagaccacctggat

SEQ ID NO: 3254417 - DNA, 25 bp, Homo sapien
ctggtcgttgtctgtgggcaagagc

SEQ ID NO: 3254418 - DNA, 25 bp, Homo sapien
tcagggcccaacaacaggagaacaa

SEQ ID NO: 3254419 - DNA, 25 bp, Homo sapien
cctggatctgtaacacagtgctggg

SEQ ID NO: 3254420 - DNA, 25 bp, Homo sapien
atcctggacacctggttcgtgtggc

SEQ ID NO: 3254421 - DNA, 25 bp, Homo sapien
gcacggtgtcgtccatgctgcagct

SEQ ID NO: 3254422 - DNA, 25 bp, Homo sapien
tcgtgtggcctttcccagcgaagga

SEQ ID NO: 3254423 - DNA, 25 bp, Homo sapien
tgtagtcccgcagcatgaggctggt

SEQ ID NO: 3254424 - DNA, 25 bp, Homo sapien
ccaacgtaagggtgtccaggtgctt

SEQ ID NO: 3254425 - DNA, 25 bp, Homo sapien
gtggctcccagagtaaatgtaggac

SEQ ID NO: 3254426 - DNA, 25 bp, Homo sapien
tcgtggctcccagagtaaatgtagg

SEQ ID NO: 3254427 - DNA, 25 bp, Homo sapien
cgtcgtggctcccagagtaaatgta

SEQ ID NO: 3254428 - DNA, 25 bp, Homo sapien
tgtccgtcgtggctcccagagtaaa

SEQ ID NO: 3254429 - DNA, 25 bp, Homo sapien
tatgcaccgtcagacactggatcga

SEQ ID NO: 3254430 - DNA, 25 bp, Homo sapien
ttgccgccgtttttatgcaccgtca

SEQ ID NO: 3254431 - DNA, 25 bp, Homo sapien
cgccgtttttatgcaccgtcagaca

SEQ ID NO: 3254432 - DNA, 25 bp, Homo sapien
gacactggatcgatttactgtgacc

SEQ ID NO: 3254433 - DNA, 25 bp, Homo sapien
tcggtccaggaggacttcgctggcc

SEQ ID NO: 3254434 - DNA, 25 bp, Homo sapien
gccacattcgcttcaggccctggtt

SEQ ID NO: 3254435 - DNA, 25 bp, Homo sapien
gcacctaacgtgtgcagacacgtgg

SEQ ID NO: 3254436 - DNA, 25 bp, Homo sapien
tgggcccagacctgcgtctaaccaa

SEQ ID NO: 3254437 - DNA, 25 bp, Homo sapien
gggcacacaaggctggtccacaacc

SEQ ID NO: 3254438 - DNA, 25 bp, Homo sapien
gcagtggagggcacacaaggctggt

SEQ ID NO: 3254439 - DNA, 25 bp, Homo sapien
gcgtttagccccctccatatctgag

SEQ ID NO: 3254440 - DNA, 25 bp, Homo sapien
tggagggcacacaaggctggtccac

SEQ ID NO: 3254441 - DNA, 25 bp, Homo sapien
cagcagtggtattaggaagagcact

SEQ ID NO: 3254442 - DNA, 25 bp, Homo sapien
tgcttttttgggacataagtttagc

SEQ ID NO: 3254443 - DNA, 25 bp, Homo sapien
gacatgggggttttgacaactggcc

SEQ ID NO: 3254444 - DNA, 25 bp, Homo sapien
gccacggtggcaggccgggtgcact

SEQ ID NO: 3254445 - DNA, 25 bp, Homo sapien
cgaggccacgtctagtgaaccttta

SEQ ID NO: 3254446 - DNA, 25 bp, Homo sapien
ggagcatggtctcgacaagagccct

SEQ ID NO: 3254447 - DNA, 25 bp, Homo sapien
tgaacctttatggttcagccttccc

SEQ ID NO: 3254448 - DNA, 25 bp, Homo sapien
tttttatactcatcaccctgggctg

SEQ ID NO: 3254449 - DNA, 25 bp, Homo sapien
tgccccggcacaaaggaaccgtgac

SEQ ID NO: 3254450 - DNA, 25 bp, Homo sapien
ctgccccggcacaaaggaaccgtga

SEQ ID NO: 3254451 - DNA, 25 bp, Homo sapien
aacctgacttggagttcccagcaga

SEQ ID NO: 3254452 - DNA, 25 bp, Homo sapien
gagattcccagaggcgtcaacttgg

SEQ ID NO: 3254453 - DNA, 25 bp, Homo sapien
tgaggatacagaagggacccctgct

SEQ ID NO: 3254454 - DNA, 25 bp, Homo sapien
tcctgtccagctgcgagattcccag

SEQ ID NO: 3254455 - DNA, 25 bp, Homo sapien
tgcaggaagtaaccgctctcaacag

SEQ ID NO: 3254456 - DNA, 25 bp, Homo sapien
ctcttgcctgcagtcgggtaaagca

SEQ ID NO: 3254457 - DNA, 25 bp, Homo sapien
gctgtgcactcccaattcagggaag

SEQ ID NO: 3254458 - DNA, 25 bp, Homo sapien
cagtcgggtaaagcacaggctgtgc

SEQ ID NO: 3254459 - DNA, 25 bp, Homo sapien
tcttccctgtccacccagcgggcag

SEQ ID NO: 3254460 - DNA, 25 bp, Homo sapien
cttccctgtccacccagcgggcaga

SEQ ID NO: 3254461 - DNA, 25 bp, Homo sapien
ctcttccctgtccacccagcgggca

SEQ ID NO: 3254462 - DNA, 25 bp, Homo sapien
tctcttccctgtccacccagcgggc

SEQ ID NO: 3254463 - DNA, 25 bp, Homo sapien
cagaaccgtggagcccatgggaaat

SEQ ID NO: 3254464 - DNA, 25 bp, Homo sapien
tctgtccagatagttgatgtacccg

SEQ ID NO: 3254465 - DNA, 25 bp, Homo sapien
caaatgggtgctgtcgggactccaa

SEQ ID NO: 3254466 - DNA, 25 bp, Homo sapien
ttcacgctgacgtcccaaatcttgg

SEQ ID NO: 3254467 - DNA, 25 bp, Homo sapien
ccagcgcgcacaccttctccccagt

SEQ ID NO: 3254468 - DNA, 25 bp, Homo sapien
tccccagtcttcccgtcatagatgt

SEQ ID NO: 3254469 - DNA, 25 bp, Homo sapien
cagtcttcccgtcatagatgtatat

SEQ ID NO: 3254470 - DNA, 25 bp, Homo sapien
tgcgtaaatcccaccgtcgtgggcc

SEQ ID NO: 3254471 - DNA, 25 bp, Homo sapien
ggagagaatcgcacacagttgacaa

SEQ ID NO: 3254472 - DNA, 25 bp, Homo sapien
cacagttgacaaagcggctgtggtc

SEQ ID NO: 3254473 - DNA, 25 bp, Homo sapien
tcccatcaggagagaatcgcacaca

SEQ ID NO: 3254474 - DNA, 25 bp, Homo sapien
agcactggctgtggcaaatctgttc

SEQ ID NO: 3254475 - DNA, 25 bp, Homo sapien
tgacctcatgtttccccgctttggc

SEQ ID NO: 3254476 - DNA, 25 bp, Homo sapien
cctgagcgactaaaaggaaatgaca

SEQ ID NO: 3254477 - DNA, 25 bp, Homo sapien
gttaatgattatgaccttcatcaag

SEQ ID NO: 3254478 - DNA, 25 bp, Homo sapien
aatgacatgacttccaggggcgact

SEQ ID NO: 3254479 - DNA, 25 bp, Homo sapien
aagcagtttccccagaaggcccgat

SEQ ID NO: 3254480 - DNA, 25 bp, Homo sapien
aaccaactttccagatggggctcca

SEQ ID NO: 3254481 - DNA, 25 bp, Homo sapien
tagttctaaggctggtcttctttgc

SEQ ID NO: 3254482 - DNA, 25 bp, Homo sapien
tctaagttttctagcacttctaggt

SEQ ID NO: 3254483 - DNA, 25 bp, Homo sapien
gcaaattcttcacaggagaacacca

SEQ ID NO: 3254484 - DNA, 25 bp, Homo sapien
aattcttcacaggagaacaccaggc

SEQ ID NO: 3254485 - DNA, 25 bp, Homo sapien
cgggcaaattcttcacaggagaaca

SEQ ID NO: 3254486 - DNA, 25 bp, Homo sapien
ctgcgggcaaattcttcacaggaga

SEQ ID NO: 3254487 - DNA, 25 bp, Homo sapien
agagctctcgtctcagctgcgctgg

SEQ ID NO: 3254488 - DNA, 25 bp, Homo sapien
tccagagctctcgtctcagctgcgc

SEQ ID NO: 3254489 - DNA, 25 bp, Homo sapien
cagagctctcgtctcagctgcgctg

SEQ ID NO: 3254490 - DNA, 25 bp, Homo sapien
ccagagctctcgtctcagctgcgct

SEQ ID NO: 3254491 - DNA, 25 bp, Homo sapien
agaggtcagatccctaactccgcag

SEQ ID NO: 3254492 - DNA, 25 bp, Homo sapien
tcagatccctaactccgcaggccca

SEQ ID NO: 3254493 - DNA, 25 bp, Homo sapien
agatccctaactccgcaggcccatt

SEQ ID NO: 3254494 - DNA, 25 bp, Homo sapien
aggtcagatccctaactccgcaggc

SEQ ID NO: 3254495 - DNA, 25 bp, Homo sapien
catgagggagccgtcatgcactgag

SEQ ID NO: 3254496 - DNA, 25 bp, Homo sapien
tccatgtcagtccatagggtccaca

SEQ ID NO: 3254497 - DNA, 25 bp, Homo sapien
tgcaccactactccttccagatgag

SEQ ID NO: 3254498 - DNA, 25 bp, Homo sapien
gagggcctgaggcaaagcacttcta

SEQ ID NO: 3254499 - DNA, 25 bp, Homo sapien
cacagctcgaatcctagacctctga

SEQ ID NO: 3254500 - DNA, 25 bp, Homo sapien
acagctcgaatcctagacctctgac

SEQ ID NO: 3254501 - DNA, 25 bp, Homo sapien
ttgccgctgacttcgcactggctcc

SEQ ID NO: 3254502 - DNA, 25 bp, Homo sapien
catcgagttctctcgctgccgaact

SEQ ID NO: 3254503 - DNA, 25 bp, Homo sapien
tgccgaactccgcttccttggccag

SEQ ID NO: 3254504 - DNA, 25 bp, Homo sapien
gcacagcctcgccttgccgctgact

SEQ ID NO: 3254505 - DNA, 25 bp, Homo sapien
cagtggacgctgatggctcttgcta

SEQ ID NO: 3254506 - DNA, 25 bp, Homo sapien
cgaatcacccaagcccagatgagtg

SEQ ID NO: 3254507 - DNA, 25 bp, Homo sapien
tggctccctgaggtcaaaacatgga

SEQ ID NO: 3254508 - DNA, 25 bp, Homo sapien
tcccagaagcgaggacattcctgct

SEQ ID NO: 3254509 - DNA, 25 bp, Homo sapien
caaggagtccaaatgcagacactga

SEQ ID NO: 3254510 - DNA, 25 bp, Homo sapien
cctgcacctcgagccaaggagtcca

SEQ ID NO: 3254511 - DNA, 25 bp, Homo sapien
cgagtagctcatccccatcaccttt

SEQ ID NO: 3254512 - DNA, 25 bp, Homo sapien
acacagatgcccctcgagtagctca

SEQ ID NO: 3254513 - DNA, 25 bp, Homo sapien
tttccacacggaggcccggccagtg

SEQ ID NO: 3254514 - DNA, 25 bp, Homo sapien
aagactgacctgtatcaacgagccc

SEQ ID NO: 3254515 - DNA, 25 bp, Homo sapien
catccctggtggacaactgacggtg

SEQ ID NO: 3254516 - DNA, 25 bp, Homo sapien
tcaaagagagaagccgcgaaaagcc

SEQ ID NO: 3254517 - DNA, 25 bp, Homo sapien
gagagaaactcagtggggcctttaa

SEQ ID NO: 3254518 - DNA, 25 bp, Homo sapien
aggagtacctatcccaggagcctgc

SEQ ID NO: 3254519 - DNA, 25 bp, Homo sapien
gcatggcgaaggcagacaacagaga

SEQ ID NO: 3254520 - DNA, 25 bp, Homo sapien
tggcccaagtaatgcgcatggcgaa

SEQ ID NO: 3254521 - DNA, 25 bp, Homo sapien
ttgttgtgtcctgtaatctcgccca

SEQ ID NO: 3254522 - DNA, 25 bp, Homo sapien
gtccctcaaagaatgccgcgcagtt

SEQ ID NO: 3254523 - DNA, 25 bp, Homo sapien
tgcttgatgtccacgctgttgatga

SEQ ID NO: 3254524 - DNA, 25 bp, Homo sapien
agttatcatcgcttcccgtggccag

SEQ ID NO: 3254525 - DNA, 25 bp, Homo sapien
tccttccccgaccacggcgatcctc

SEQ ID NO: 3254526 - DNA, 25 bp, Homo sapien
ggcgatcctcttactgtcttcagtc

SEQ ID NO: 3254527 - DNA, 25 bp, Homo sapien
cgatcctcttactgtcttcagtcca

SEQ ID NO: 3254528 - DNA, 25 bp, Homo sapien
cacggcgatcctcttactgtcttca

SEQ ID NO: 3254529 - DNA, 25 bp, Homo sapien
tgcgtggtatcccagatcctcagct

SEQ ID NO: 3254530 - DNA, 25 bp, Homo sapien
gcgaaaggctggtactcatacttca

SEQ ID NO: 3254531 - DNA, 25 bp, Homo sapien
ctttgatcttcccagcgaaaggctg

SEQ ID NO: 3254532 - DNA, 25 bp, Homo sapien
tacttcaacaggtgctccttctgcg

SEQ ID NO: 3254533 - DNA, 25 bp, Homo sapien
ctgtggggcacagcgggcgggggag

SEQ ID NO: 3254534 - DNA, 25 bp, Homo sapien
tgtggggcacagcgggcgggggagg

SEQ ID NO: 3254535 - DNA, 25 bp, Homo sapien
ctttgtggaatgggacggcactggc

SEQ ID NO: 3254536 - DNA, 25 bp, Homo sapien
tgtggaatgggacggcactggctac

SEQ ID NO: 3254537 - DNA, 25 bp, Homo sapien
tggaatgggacggcactggctacac

SEQ ID NO: 3254538 - DNA, 25 bp, Homo sapien
tttgtggaatgggacggcactggct

SEQ ID NO: 3254539 - DNA, 25 bp, Homo sapien
gacttctggaaacgaggtgcacagc

SEQ ID NO: 3254540 - DNA, 25 bp, Homo sapien
actgcgatgcctcagcgtggcctgg

SEQ ID NO: 3254541 - DNA, 25 bp, Homo sapien
gagcagttccacgacgcacaggaat

SEQ ID NO: 3254542 - DNA, 25 bp, Homo sapien
gtgcagcgtgctgcccactgcgatg

SEQ ID NO: 3254543 - DNA, 25 bp, Homo sapien
agaattacacacagaactcgatgct

SEQ ID NO: 3254544 - DNA, 25 bp, Homo sapien
gaattacacacagaactcgatgctg

SEQ ID NO: 3254545 - DNA, 25 bp, Homo sapien
aattacacacagaactcgatgctga

SEQ ID NO: 3254546 - DNA, 25 bp, Homo sapien
gaactcgatgctgattctcttctca

SEQ ID NO: 3254547 - DNA, 25 bp, Homo sapien
cgtgggcagccaattgtaacagaag

SEQ ID NO: 3254548 - DNA, 25 bp, Homo sapien
gtaacagaagcaacaccgggggcca

SEQ ID NO: 3254549 - DNA, 25 bp, Homo sapien
aattgtaacagaagcaacaccgggg

SEQ ID NO: 3254550 - DNA, 25 bp, Homo sapien
gcgtgggcagccaattgtaacagaa

SEQ ID NO: 3254551 - DNA, 25 bp, Homo sapien
gatcctgtcaccaagtaccaagtcc

SEQ ID NO: 3254552 - DNA, 25 bp, Homo sapien
aatcccgacacaccctctccaaatg

SEQ ID NO: 3254553 - DNA, 25 bp, Homo sapien
ccaccacgatcctgtcaccaagtac

SEQ ID NO: 3254554 - DNA, 25 bp, Homo sapien
tgtcaccaagtaccaagtcccaatc

SEQ ID NO: 3254555 - DNA, 25 bp, Homo sapien
gtgttggcgtgaagaaatgggagca

SEQ ID NO: 3254556 - DNA, 25 bp, Homo sapien
ctgtgttggcgtgaagaaatgggag

SEQ ID NO: 3254557 - DNA, 25 bp, Homo sapien
tgtgttggcgtgaagaaatgggagc

SEQ ID NO: 3254558 - DNA, 25 bp, Homo sapien
tgttggcgtgaagaaatgggagcat

SEQ ID NO: 3254559 - DNA, 25 bp, Homo sapien
aattaacggaggctctacacaggcc

SEQ ID NO: 3254560 - DNA, 25 bp, Homo sapien
ttacgagtcaggtggaacgagtcca

SEQ ID NO: 3254561 - DNA, 25 bp, Homo sapien
tctgctaagcaggtaaaggcgcctt

SEQ ID NO: 3254562 - DNA, 25 bp, Homo sapien
gagttaacacgtgcgaagtctccaa

SEQ ID NO: 3254563 - DNA, 25 bp, Homo sapien
gggtaagtacccattagtgcaacag

SEQ ID NO: 3254564 - DNA, 25 bp, Homo sapien
gtattatgacatgagcagcttccca

SEQ ID NO: 3254565 - DNA, 25 bp, Homo sapien
tacgccaccagtaagaggctgccat

SEQ ID NO: 3254566 - DNA, 25 bp, Homo sapien
tgtgacctcgaaaaccatgtgctgg

SEQ ID NO: 3254567 - DNA, 25 bp, Homo sapien
catggcttcccgcaaaaggtccctg

SEQ ID NO: 3254568 - DNA, 25 bp, Homo sapien
gcaaaaggtccctggccaacctcat

SEQ ID NO: 3254569 - DNA, 25 bp, Homo sapien
tggcttcccgcaaaaggtccctggc

SEQ ID NO: 3254570 - DNA, 25 bp, Homo sapien
catgccatggcttcccgcaaaaggt

SEQ ID NO: 3254571 - DNA, 25 bp, Homo sapien
tccacgagccttgcccccatacagt

SEQ ID NO: 3254572 - DNA, 25 bp, Homo sapien
gtgtccacgagccttgcccccatac

SEQ ID NO: 3254573 - DNA, 25 bp, Homo sapien
gtccacgagccttgcccccatacag

SEQ ID NO: 3254574 - DNA, 25 bp, Homo sapien
aggtgtccacgagccttgcccccat

SEQ ID NO: 3254575 - DNA, 25 bp, Homo sapien
tctgtgtagatgtcagcaagggctg

SEQ ID NO: 3254576 - DNA, 25 bp, Homo sapien
ccaccacctgatgggcgtgctctgt

SEQ ID NO: 3254577 - DNA, 25 bp, Homo sapien
atccgctgggcgcatacttggccac

SEQ ID NO: 3254578 - DNA, 25 bp, Homo sapien
gtagaatccgctgggcgcatacttg

SEQ ID NO: 3254579 - DNA, 25 bp, Homo sapien
ggagccctctctatcaaaaacttgg

SEQ ID NO: 3254580 - DNA, 25 bp, Homo sapien
aaaggtggattagagcaagaagccc

SEQ ID NO: 3254581 - DNA, 25 bp, Homo sapien
tcccatttgtgggaagctgcattca

SEQ ID NO: 3254582 - DNA, 25 bp, Homo sapien
tgctaaaagtagatccctgcgcctc

SEQ ID NO: 3254583 - DNA, 25 bp, Homo sapien
tgcccatcccgccagacagatggcc

SEQ ID NO: 3254584 - DNA, 25 bp, Homo sapien
ccgtagaaagggtggggctcccatg

SEQ ID NO: 3254585 - DNA, 25 bp, Homo sapien
cccaggccgtgctgccgtagaaagg

SEQ ID NO: 3254586 - DNA, 25 bp, Homo sapien
tctcccagcctggacgacctcctcc

SEQ ID NO: 3254587 - DNA, 25 bp, Homo sapien
ctgctgccgccctgacgttgccagc

SEQ ID NO: 3254588 - DNA, 25 bp, Homo sapien
aggcttcagcccactcgtcgctacc

SEQ ID NO: 3254589 - DNA, 25 bp, Homo sapien
tgccagccactccttgggctgacta

SEQ ID NO: 3254590 - DNA, 25 bp, Homo sapien
cggcttgcaacccacccttcctgag

SEQ ID NO: 3254591 - DNA, 25 bp, Homo sapien
ttgctggccccagaccccttcccca

SEQ ID NO: 3254592 - DNA, 25 bp, Homo sapien
ctggccccagaccccttccccagtg

SEQ ID NO: 3254593 - DNA, 25 bp, Homo sapien
gaccccttccccagtggcctccaca

SEQ ID NO: 3254594 - DNA, 25 bp, Homo sapien
cagaccccttccccagtggcctcca

SEQ ID NO: 3254595 - DNA, 25 bp, Homo sapien
acaagccccagaattctgccaccac

SEQ ID NO: 3254596 - DNA, 25 bp, Homo sapien
gggctgggataagacctcgagacaa

SEQ ID NO: 3254597 - DNA, 25 bp, Homo sapien
ctgggataagacctcgagacaagcc

SEQ ID NO: 3254598 - DNA, 25 bp, Homo sapien
ataagacctcgagacaagccccaga

SEQ ID NO: 3254599 - DNA, 25 bp, Homo sapien
ttgccactggtatctcagctcctgg

SEQ ID NO: 3254600 - DNA, 25 bp, Homo sapien
gaacatgctagaaggttggagatac

SEQ ID NO: 3254601 - DNA, 25 bp, Homo sapien
gctcctggcccacagtgaacctgat

SEQ ID NO: 3254602 - DNA, 25 bp, Homo sapien
gggcttgggtctcaaggcttgccac

SEQ ID NO: 3254603 - DNA, 25 bp, Homo sapien
gcactggctttgtaaatactccaag

SEQ ID NO: 3254604 - DNA, 25 bp, Homo sapien
gtccacccaggccaagtgagcgtga

SEQ ID NO: 3254605 - DNA, 25 bp, Homo sapien
gagaaagtctcaggcgtcctccatg

SEQ ID NO: 3254606 - DNA, 25 bp, Homo sapien
tgagcgtgagcttccagtcagggca

SEQ ID NO: 3254607 - DNA, 25 bp, Homo sapien
ctgcaagcaacagaggctgaaagct

SEQ ID NO: 3254608 - DNA, 25 bp, Homo sapien
cagaggctgaaagctgttactgctg

SEQ ID NO: 3254609 - DNA, 25 bp, Homo sapien
gcaacagaggctgaaagctgttact

SEQ ID NO: 3254610 - DNA, 25 bp, Homo sapien
gaaagctgttactgctgtaactgac

SEQ ID NO: 3254611 - DNA, 25 bp, Homo sapien
tggactacgtgtgagcgggacacca

SEQ ID NO: 3254612 - DNA, 25 bp, Homo sapien
gcccaccagggccttaactgatgag

SEQ ID NO: 3254613 - DNA, 25 bp, Homo sapien
gcagcacccctcattggactacgtg

SEQ ID NO: 3254614 - DNA, 25 bp, Homo sapien
taactgatgagttgcaaaggtagac

SEQ ID NO: 3254615 - DNA, 25 bp, Homo sapien
tctttagagtaacggacccatgtgg

SEQ ID NO: 3254616 - DNA, 25 bp, Homo sapien
cagcaggtactttatgtgaggcccc

SEQ ID NO: 3254617 - DNA, 25 bp, Homo sapien
ggtccggcaatctacactgagctga

SEQ ID NO: 3254618 - DNA, 25 bp, Homo sapien
gacactctcttaggcgaggacacgg

SEQ ID NO: 3254619 - DNA, 25 bp, Homo sapien
gcttagatccatggtggcagatctg

SEQ ID NO: 3254620 - DNA, 25 bp, Homo sapien
catggtggcagatctggctggccca

SEQ ID NO: 3254621 - DNA, 25 bp, Homo sapien
gggcttagatccatggtggcagatc

SEQ ID NO: 3254622 - DNA, 25 bp, Homo sapien
tagatccatggtggcagatctggct

SEQ ID NO: 3254623 - DNA, 25 bp, Homo sapien
ccagggtattaacagcgagttagct

SEQ ID NO: 3254624 - DNA, 25 bp, Homo sapien
agttagctgagtgccattccattca

SEQ ID NO: 3254625 - DNA, 25 bp, Homo sapien
caggcgaagcgagagtggtcatcat

SEQ ID NO: 3254626 - DNA, 25 bp, Homo sapien
gagggacgccagcagctcattcatt

SEQ ID NO: 3254627 - DNA, 25 bp, Homo sapien
tccggcgctttcagggtgctatgac

SEQ ID NO: 3254628 - DNA, 25 bp, Homo sapien
aagatcagaggcgatccggcgcttt

SEQ ID NO: 3254629 - DNA, 25 bp, Homo sapien
gctttcagggtgctatgaccgtaga

SEQ ID NO: 3254630 - DNA, 25 bp, Homo sapien
gcgatccggcgctttcagggtgcta

SEQ ID NO: 3254631 - DNA, 25 bp, Homo sapien
gtcgccgccgatgatcttggagacg

SEQ ID NO: 3254632 - DNA, 25 bp, Homo sapien
ttccttaggatgacgcactttccat

SEQ ID NO: 3254633 - DNA, 25 bp, Homo sapien
gttgcccttagggtcgccgccgatg

SEQ ID NO: 3254634 - DNA, 25 bp, Homo sapien
gcactttccattggtgtacagaaaa

SEQ ID NO: 3254635 - DNA, 25 bp, Homo sapien
cggtcacctgttgactgcgccggga

SEQ ID NO: 3254636 - DNA, 25 bp, Homo sapien
aggaaccgcgcgacttcctggtccg

SEQ ID NO: 3254637 - DNA, 25 bp, Homo sapien
gagggcggcctccactttccacgag

SEQ ID NO: 3254638 - DNA, 25 bp, Homo sapien
cggtctcggccggtcacctgttgac

SEQ ID NO: 3254639 - DNA, 25 bp, Homo sapien
cgccgcgctcgccgagagcctccgg

SEQ ID NO: 3254640 - DNA, 25 bp, Homo sapien
tcgcccacttgttaccgcgccgcgc

SEQ ID NO: 3254641 - DNA, 25 bp, Homo sapien
cctcgcccacttgttaccgcgccgc

SEQ ID NO: 3254642 - DNA, 25 bp, Homo sapien
gcccacttgttaccgcgccgcgctc

SEQ ID NO: 3254643 - DNA, 25 bp, Homo sapien
ggactggagccggaaggcggcaccg

SEQ ID NO: 3254644 - DNA, 25 bp, Homo sapien
gctgtggttgcggacgccccgaacc

SEQ ID NO: 3254645 - DNA, 25 bp, Homo sapien
gcgaattacacctcgccgaggccga

SEQ ID NO: 3254646 - DNA, 25 bp, Homo sapien
ccccagctttgaccatatatagtca

SEQ ID NO: 3254647 - DNA, 25 bp, Homo sapien
tagtgaccagcgtccttgcatctcc

SEQ ID NO: 3254648 - DNA, 25 bp, Homo sapien
gaacgacagccagaataagactaat

SEQ ID NO: 3254649 - DNA, 25 bp, Homo sapien
ggtgctgcttccgatagtgaccagc

SEQ ID NO: 3254650 - DNA, 25 bp, Homo sapien
ctgaacgacagccagaataagacta

SEQ ID NO: 3254651 - DNA, 25 bp, Homo sapien
gagtcctggcttctagagccacaaa

SEQ ID NO: 3254652 - DNA, 25 bp, Homo sapien
tcagatgtgtgaggcctatactgga

SEQ ID NO: 3254653 - DNA, 25 bp, Homo sapien
gagccacaaactgcaaatacgtcag

SEQ ID NO: 3254654 - DNA, 25 bp, Homo sapien
cctctgagcacgctctgagtcctgg

SEQ ID NO: 3254655 - DNA, 25 bp, Homo sapien
gattccggtcatgaggctgttcgct

SEQ ID NO: 3254656 - DNA, 25 bp, Homo sapien
gagtctccttgtacagaccctgtgg

SEQ ID NO: 3254657 - DNA, 25 bp, Homo sapien
gctgttcgctgcagcgagtctcctt

SEQ ID NO: 3254658 - DNA, 25 bp, Homo sapien
tgtttggctgttgagcaccggtgtc

SEQ ID NO: 3254659 - DNA, 25 bp, Homo sapien
agagggctggccgtcaaagcatacc

SEQ ID NO: 3254660 - DNA, 25 bp, Homo sapien
agacaaggtattacagctcttcctg

SEQ ID NO: 3254661 - DNA, 25 bp, Homo sapien
gccgtcaaagcataccccacagggt

SEQ ID NO: 3254662 - DNA, 25 bp, Homo sapien
caattggggccttcaagactagaca

SEQ ID NO: 3254663 - DNA, 25 bp, Homo sapien
taagtacttcggttgagtgactccg

SEQ ID NO: 3254664 - DNA, 25 bp, Homo sapien
gtgcttcacttctgtaaaaccgtag

SEQ ID NO: 3254665 - DNA, 25 bp, Homo sapien
tgggcagccactgtgattccagtgt

SEQ ID NO: 3254666 - DNA, 25 bp, Homo sapien
cagtgtcagaccagtccgggtatta

SEQ ID NO: 3254667 - DNA, 25 bp, Homo sapien
ctacgtggaaaagatgactgaattg

SEQ ID NO: 3254668 - DNA, 25 bp, Homo sapien
actttgccctcttaatcctcatggt

SEQ ID NO: 3254669 - DNA, 25 bp, Homo sapien
gagccatgttgaccttggactttgc

SEQ ID NO: 3254670 - DNA, 25 bp, Homo sapien
gccatgttgaccttggactttgccc

SEQ ID NO: 3254671 - DNA, 25 bp, Homo sapien
aatcctcatggttctcatcactagg

SEQ ID NO: 3254672 - DNA, 25 bp, Homo sapien
ctgtcctagtttctgtcgtggcgtt

SEQ ID NO: 3254673 - DNA, 25 bp, Homo sapien
tgtcgtggcgttgggtctgcgtggc

SEQ ID NO: 3254674 - DNA, 25 bp, Homo sapien
cctgcagtgtacttcctcacgtgca

SEQ ID NO: 3254675 - DNA, 25 bp, Homo sapien
cagtgtacttcctcacgtgcactca

SEQ ID NO: 3254676 - DNA, 25 bp, Homo sapien
gggagaacctggctgaaatttccag

SEQ ID NO: 3254677 - DNA, 25 bp, Homo sapien
ggagaacctggctgaaatttccagc

SEQ ID NO: 3254678 - DNA, 25 bp, Homo sapien
agaacctggctgaaatttccagctg

SEQ ID NO: 3254679 - DNA, 25 bp, Homo sapien
ttgaggtcttgatggggagaacctg

SEQ ID NO: 3254680 - DNA, 25 bp, Homo sapien
acttggccaccacaggcagttttta

SEQ ID NO: 3254681 - DNA, 25 bp, Homo sapien
ttggccaccacaggcagtttttatg

SEQ ID NO: 3254682 - DNA, 25 bp, Homo sapien
ctacttggccaccacaggcagtttt

SEQ ID NO: 3254683 - DNA, 25 bp, Homo sapien
ggccaccacaggcagtttttatgat

SEQ ID NO: 3254684 - DNA, 25 bp, Homo sapien
gggcagttttagacttgataagagg

SEQ ID NO: 3254685 - DNA, 25 bp, Homo sapien
gagccatgctgcccttaggctgcag

SEQ ID NO: 3254686 - DNA, 25 bp, Homo sapien
cactgagcagtgtagagacctgagg

SEQ ID NO: 3254687 - DNA, 25 bp, Homo sapien
cagttttagacttgataagagggca

SEQ ID NO: 3254688 - DNA, 25 bp, Homo sapien
gcatttacctagagaatctgctccg

SEQ ID NO: 3254689 - DNA, 25 bp, Homo sapien
tagagaatctgctccgatataaggc

SEQ ID NO: 3254690 - DNA, 25 bp, Homo sapien
ccccagtgacggcatttacctagag

SEQ ID NO: 3254691 - DNA, 25 bp, Homo sapien
gctccgatataaggctggctaattt

SEQ ID NO: 3254692 - DNA, 25 bp, Homo sapien
ttcagtagtaagcactcatcccgcg

SEQ ID NO: 3254693 - DNA, 25 bp, Homo sapien
ggtcgctgctattgggagaaatcct

SEQ ID NO: 3254694 - DNA, 25 bp, Homo sapien
tatcccataaacatagggtcgctgc

SEQ ID NO: 3254695 - DNA, 25 bp, Homo sapien
ttgaatgtcctcagtgtgaacagcc

SEQ ID NO: 3254696 - DNA, 25 bp, Homo sapien
gaattgaggaacataattgctggaa

SEQ ID NO: 3254697 - DNA, 25 bp, Homo sapien
catgggaacgtgttctggaattgag

SEQ ID NO: 3254698 - DNA, 25 bp, Homo sapien
ctactgtgactgtggcaatgagggc

SEQ ID NO: 3254699 - DNA, 25 bp, Homo sapien
caggcctcacatgggaacgtgttct

SEQ ID NO: 3254700 - DNA, 25 bp, Homo sapien
tgaggcaggtggacacgggggctct

SEQ ID NO: 3254701 - DNA, 25 bp, Homo sapien
gcagtacataactgggaatatcaca

SEQ ID NO: 3254702 - DNA, 25 bp, Homo sapien
tggcagtacataactgggaatatca

SEQ ID NO: 3254703 - DNA, 25 bp, Homo sapien
cagtacataactgggaatatcacac

SEQ ID NO: 3254704 - DNA, 25 bp, Homo sapien
ggcagtacataactgggaatatcac

SEQ ID NO: 3254705 - DNA, 25 bp, Homo sapien
gagtgacagtccatgaccgatgacg

SEQ ID NO: 3254706 - DNA, 25 bp, Homo sapien
agtccggcactcagcccattgtggg

SEQ ID NO: 3254707 - DNA, 25 bp, Homo sapien
ccgatgacgtggtggtttgataacc

SEQ ID NO: 3254708 - DNA, 25 bp, Homo sapien
tgtgaaacacataggctggagttct

SEQ ID NO: 3254709 - DNA, 25 bp, Homo sapien
ccagggagagttgcctttatctcca

SEQ ID NO: 3254710 - DNA, 25 bp, Homo sapien
taggctgtgctgcagactaggagaa

SEQ ID NO: 3254711 - DNA, 25 bp, Homo sapien
ctgttcttgtggtccttaacttgga

SEQ ID NO: 3254712 - DNA, 25 bp, Homo sapien
agaagcattctcaaggtggtcctcg

SEQ ID NO: 3254713 - DNA, 25 bp, Homo sapien
ccctcagcagttgggtgttccatgg

SEQ ID NO: 3254714 - DNA, 25 bp, Homo sapien
catggaatgtactggggtcctgcca

SEQ ID NO: 3254715 - DNA, 25 bp, Homo sapien
cagacgaattcccaacagaccacat

SEQ ID NO: 3254716 - DNA, 25 bp, Homo sapien
tcagcagttgggtgttccatggaat

SEQ ID NO: 3254717 - DNA, 25 bp, Homo sapien
tgaacataaagggcacgtgctttgg

SEQ ID NO: 3254718 - DNA, 25 bp, Homo sapien
tgtgaacataaagggcacgtgcttt

SEQ ID NO: 3254719 - DNA, 25 bp, Homo sapien
gaacataaagggcacgtgctttggg

SEQ ID NO: 3254720 - DNA, 25 bp, Homo sapien
aacataaagggcacgtgctttgggg

SEQ ID NO: 3254721 - DNA, 25 bp, Homo sapien
ttctggatgtcttggtcctcctggt

SEQ ID NO: 3254722 - DNA, 25 bp, Homo sapien
ggtcctcctggtatctgagcacttc

SEQ ID NO: 3254723 - DNA, 25 bp, Homo sapien
tggcctcgaagggtatacagcagcc

SEQ ID NO: 3254724 - DNA, 25 bp, Homo sapien
cgaagggtatacagcagcccatggg

SEQ ID NO: 3254725 - DNA, 25 bp, Homo sapien
ctggctgtgacagggtcctcttgtc

SEQ ID NO: 3254726 - DNA, 25 bp, Homo sapien
tttcagatagtcaaagctgttcctg

SEQ ID NO: 3254727 - DNA, 25 bp, Homo sapien
gctggctgtgacagggtcctcttgt

SEQ ID NO: 3254728 - DNA, 25 bp, Homo sapien
cagatagtcaaagctgttcctgcag

SEQ ID NO: 3254729 - DNA, 25 bp, Homo sapien
cagaagggttgacttgcaaagattc

SEQ ID NO: 3254730 - DNA, 25 bp, Homo sapien
aagggttgacttgcaaagattcaca

SEQ ID NO: 3254731 - DNA, 25 bp, Homo sapien
cccagaagggttgacttgcaaagat

SEQ ID NO: 3254732 - DNA, 25 bp, Homo sapien
ggttgacttgcaaagattcacatct

SEQ ID NO: 3254733 - DNA, 25 bp, Homo sapien
cacccagtagcaaattctgcagggc

SEQ ID NO: 3254734 - DNA, 25 bp, Homo sapien
cataagatccccaataggctgtctg

SEQ ID NO: 3254735 - DNA, 25 bp, Homo sapien
ggtctaggtcagtctcaccgtttca

SEQ ID NO: 3254736 - DNA, 25 bp, Homo sapien
tgtgcccaacagatgagaagggttg

SEQ ID NO: 3254737 - DNA, 25 bp, Homo sapien
cacttcttcaggtggttcatgactg

SEQ ID NO: 3254738 - DNA, 25 bp, Homo sapien
cagttcctggcaatcagctttcagc

SEQ ID NO: 3254739 - DNA, 25 bp, Homo sapien
tccacttcttcaggtggttcatgac

SEQ ID NO: 3254740 - DNA, 25 bp, Homo sapien
tcagctttcagctcagggctttgag

SEQ ID NO: 3254741 - DNA, 25 bp, Homo sapien
tgtgatgtccaaactttgaaaaggg

SEQ ID NO: 3254742 - DNA, 25 bp, Homo sapien
gtgatgtccaaactttgaaaaggga

SEQ ID NO: 3254743 - DNA, 25 bp, Homo sapien
gaaaagggagcctactgatactcat

SEQ ID NO: 3254744 - DNA, 25 bp, Homo sapien
actttgaaaagggagcctactgata

SEQ ID NO: 3254745 - DNA, 25 bp, Homo sapien
ggggcagaatagaagttgtactttg

SEQ ID NO: 3254746 - DNA, 25 bp, Homo sapien
tggggcagaatagaagttgtacttt

SEQ ID NO: 3254747 - DNA, 25 bp, Homo sapien
gggcagaatagaagttgtactttga

SEQ ID NO: 3254748 - DNA, 25 bp, Homo sapien
tgtcgtccaccactgttatctgaac

SEQ ID NO: 3254749 - DNA, 25 bp, Homo sapien
gagagtggtggattgtcgtccacca

SEQ ID NO: 3254750 - DNA, 25 bp, Homo sapien
aatggcctttgtcaagtgatgagag

SEQ ID NO: 3254751 - DNA, 25 bp, Homo sapien
tatctgaacatacttgttctcatcc

SEQ ID NO: 3254752 - DNA, 25 bp, Homo sapien
cagggtgataaaaagagcatgccat

SEQ ID NO: 3254753 - DNA, 25 bp, Homo sapien
tcagggtgataaaaagagcatgcca

SEQ ID NO: 3254754 - DNA, 25 bp, Homo sapien
ctcagggtgataaaaagagcatgcc

SEQ ID NO: 3254755 - DNA, 25 bp, Homo sapien
tgaaccaatgatgcccgagatgact

SEQ ID NO: 3254756 - DNA, 25 bp, Homo sapien
tcagccaagctggaactctgcggga

SEQ ID NO: 3254757 - DNA, 25 bp, Homo sapien
agtccatcgggaagcacgagctgtg

SEQ ID NO: 3254758 - DNA, 25 bp, Homo sapien
gaacttaggctttcaccagggacag

SEQ ID NO: 3254759 - DNA, 25 bp, Homo sapien
gaatgttctagagcttgcttacagg

SEQ ID NO: 3254760 - DNA, 25 bp, Homo sapien
ggcattggccatagacatcctacaa

SEQ ID NO: 3254761 - DNA, 25 bp, Homo sapien
tccccgtgtatagacagatggcttt

SEQ ID NO: 3254762 - DNA, 25 bp, Homo sapien
tgaactatttgatcaggatgcatcc

SEQ ID NO: 3254763 - DNA, 25 bp, Homo sapien
gagcccactcaaagcagctgtctgt

SEQ ID NO: 3254764 - DNA, 25 bp, Homo sapien
gaatgctccccgatgtctaatagcc

SEQ ID NO: 3254765 - DNA, 25 bp, Homo sapien
taatagccccaagcagaacatagac

SEQ ID NO: 3254766 - DNA, 25 bp, Homo sapien
cctgggtaggatgaatgctcttgca

SEQ ID NO: 3254767 - DNA, 25 bp, Homo sapien
ccttttggtagtggttaggagagca

SEQ ID NO: 3254768 - DNA, 25 bp, Homo sapien
tgtctgctggcatagctctggtacc

SEQ ID NO: 3254769 - DNA, 25 bp, Homo sapien
tgttgggtgttcagggtctccggtg

SEQ ID NO: 3254770 - DNA, 25 bp, Homo sapien
ggcatagctctggtaccttttggta

SEQ ID NO: 3254771 - DNA, 25 bp, Homo sapien
tctgacacttgagctgggtccagga

SEQ ID NO: 3254772 - DNA, 25 bp, Homo sapien
cttcctggacaaagattctcatgtc

SEQ ID NO: 3254773 - DNA, 25 bp, Homo sapien
ggtccaggatgcagccattctgagt

SEQ ID NO: 3254774 - DNA, 25 bp, Homo sapien
caggatgcagccattctgagttgca

SEQ ID NO: 3254775 - DNA, 25 bp, Homo sapien
tggtagaagtgcacttggaggtgac

SEQ ID NO: 3254776 - DNA, 25 bp, Homo sapien
tagaagtgcacttggaggtgacgcc

SEQ ID NO: 3254777 - DNA, 25 bp, Homo sapien
aatggtagaagtgcacttggaggtg

SEQ ID NO: 3254778 - DNA, 25 bp, Homo sapien
gaagtgcacttggaggtgacgcccc

SEQ ID NO: 3254779 - DNA, 25 bp, Homo sapien
gacagtgtaagtatgtaatgagtct

SEQ ID NO: 3254780 - DNA, 25 bp, Homo sapien
tgacagtgtaagtatgtaatgagtc

SEQ ID NO: 3254781 - DNA, 25 bp, Homo sapien
ctgacagtgtaagtatgtaatgagt

SEQ ID NO: 3254782 - DNA, 25 bp, Homo sapien
gacttagcatcaagagcttttctcc

SEQ ID NO: 3254783 - DNA, 25 bp, Homo sapien
tcccctcttcctcgtggtgttctgg

SEQ ID NO: 3254784 - DNA, 25 bp, Homo sapien
ggcaggattcagtgagtggtgctcc

SEQ ID NO: 3254785 - DNA, 25 bp, Homo sapien
tgctggggttgaaagaggacttagc

SEQ ID NO: 3254786 - DNA, 25 bp, Homo sapien
ccttgcttagttatcgggaaggagg

SEQ ID NO: 3254787 - DNA, 25 bp, Homo sapien
cataatcttcgcagatgaaaccctg

SEQ ID NO: 3254788 - DNA, 25 bp, Homo sapien
gaaaccctgtccttgacatcctaac

SEQ ID NO: 3254789 - DNA, 25 bp, Homo sapien
gaaggaggggcatattccataatct

SEQ ID NO: 3254790 - DNA, 25 bp, Homo sapien
tcctaacatcctttgacacatcagt

SEQ ID NO: 3254791 - DNA, 25 bp, Homo sapien
ttcctaacatcctttgacacatcag

SEQ ID NO: 3254792 - DNA, 25 bp, Homo sapien
tttcctaacatcctttgacacatca

SEQ ID NO: 3254793 - DNA, 25 bp, Homo sapien
ggtcagcattgttacatgcaagctc

SEQ ID NO: 3254794 - DNA, 25 bp, Homo sapien
aggtcagcattgttacatgcaagct

SEQ ID NO: 3254795 - DNA, 25 bp, Homo sapien
gaggtcagcattgttacatgcaagc

SEQ ID NO: 3254796 - DNA, 25 bp, Homo sapien
gtcagcattgttacatgcaagctct

SEQ ID NO: 3254797 - DNA, 25 bp, Homo sapien
atatcttgcccagggggcacttgtg

SEQ ID NO: 3254798 - DNA, 25 bp, Homo sapien
ctgctggacttgagacctgggttgc

SEQ ID NO: 3254799 - DNA, 25 bp, Homo sapien
ggacttgagacctgggttgctctgc

SEQ ID NO: 3254800 - DNA, 25 bp, Homo sapien
gctgctgcatatcttgcccaggggg

SEQ ID NO: 3254801 - DNA, 25 bp, Homo sapien
gctttcttgcatctcaggcttgaga

SEQ ID NO: 3254802 - DNA, 25 bp, Homo sapien
attgaggctgctagggatgacatcc

SEQ ID NO: 3254803 - DNA, 25 bp, Homo sapien
gaaatggtgagagaagcccttttgt

SEQ ID NO: 3254804 - DNA, 25 bp, Homo sapien
ttagaacctgttcctgaaagactag

SEQ ID NO: 3254805 - DNA, 25 bp, Homo sapien
tctgctttggacctacgtttgggaa

SEQ ID NO: 3254806 - DNA, 25 bp, Homo sapien
aagtatctggagctacactgtctag

SEQ ID NO: 3254807 - DNA, 25 bp, Homo sapien
cctggcagtgtagttgggtcctctg

SEQ ID NO: 3254808 - DNA, 25 bp, Homo sapien
agtaaatgccttctaaactcactat

SEQ ID NO: 3254809 - DNA, 25 bp, Homo sapien
tgtagtcttggtcccttcatggagt

SEQ ID NO: 3254810 - DNA, 25 bp, Homo sapien
tgaaagaatcctccaagagccttgg

SEQ ID NO: 3254811 - DNA, 25 bp, Homo sapien
cagatatagccaatgacaaagcagg

SEQ ID NO: 3254812 - DNA, 25 bp, Homo sapien
gaatgttagtctgagtgccgctgca

SEQ ID NO: 3254813 - DNA, 25 bp, Homo sapien
ggatgtttcccttgtccacttcaga

SEQ ID NO: 3254814 - DNA, 25 bp, Homo sapien
tcctggccctggttgtgattctatc

SEQ ID NO: 3254815 - DNA, 25 bp, Homo sapien
cataggcctcttgtggcgattgcac

SEQ ID NO: 3254816 - DNA, 25 bp, Homo sapien
gcaaaggtgcagatatgtatgcctc

SEQ ID NO: 3254817 - DNA, 25 bp, Homo sapien
gaacctcaatgaggaggatttgaaa

SEQ ID NO: 3254818 - DNA, 25 bp, Homo sapien
gattttccagaatggcggtaagcct

SEQ ID NO: 3254819 - DNA, 25 bp, Homo sapien
catgaataagccaaactgaacttgg

SEQ ID NO: 3254820 - DNA, 25 bp, Homo sapien
cggtaagcctccactcaatgtcaga

SEQ ID NO: 3254821 - DNA, 25 bp, Homo sapien
catgccgggagtgtctgcaatggca

SEQ ID NO: 3254822 - DNA, 25 bp, Homo sapien
aggtctttctgccagtttgcatgtt

SEQ ID NO: 3254823 - DNA, 25 bp, Homo sapien
agtaggtctttctgccagtttgcat

SEQ ID NO: 3254824 - DNA, 25 bp, Homo sapien
ggcttctgatgcctcatgaactatg

SEQ ID NO: 3254825 - DNA, 25 bp, Homo sapien
tccttcataggcttttggtagaacc

SEQ ID NO: 3254826 - DNA, 25 bp, Homo sapien
tcctggctgatctagagtggggact

SEQ ID NO: 3254827 - DNA, 25 bp, Homo sapien
tctacctgcagaattggatccttca

SEQ ID NO: 3254828 - DNA, 25 bp, Homo sapien
gggactgaaatgtagggtctacctg

SEQ ID NO: 3254829 - DNA, 25 bp, Homo sapien
tggacgtgtgtgatggaagcctctg

SEQ ID NO: 3254830 - DNA, 25 bp, Homo sapien
cagctggctggatatcaagtctttc

SEQ ID NO: 3254831 - DNA, 25 bp, Homo sapien
agcttcctctgacagtggacgtgtg

SEQ ID NO: 3254832 - DNA, 25 bp, Homo sapien
gctggctggatatcaagtctttcag

SEQ ID NO: 3254833 - DNA, 25 bp, Homo sapien
gggacttgcaccacagccatcgtgt

SEQ ID NO: 3254834 - DNA, 25 bp, Homo sapien
tagtcagagttgattcgatccctgc

SEQ ID NO: 3254835 - DNA, 25 bp, Homo sapien
tgtcctcatgcagtacagcccagtg

SEQ ID NO: 3254836 - DNA, 25 bp, Homo sapien
gatccctgcgtggtatgaactgctc

SEQ ID NO: 3254837 - DNA, 25 bp, Homo sapien
gacttcacataggctacatgtggcc

SEQ ID NO: 3254838 - DNA, 25 bp, Homo sapien
acttcacataggctacatgtggccc

SEQ ID NO: 3254839 - DNA, 25 bp, Homo sapien
tacatgtggcccaatagcatcctat

SEQ ID NO: 3254840 - DNA, 25 bp, Homo sapien
gctacatgtggcccaatagcatcct

SEQ ID NO: 3254841 - DNA, 25 bp, Homo sapien
gcttctgccctcttcggacagcatt

SEQ ID NO: 3254842 - DNA, 25 bp, Homo sapien
caatgtcccagtaaagcaagttaac

SEQ ID NO: 3254843 - DNA, 25 bp, Homo sapien
taacggtggcaatcttaaggatgat

SEQ ID NO: 3254844 - DNA, 25 bp, Homo sapien
aattgtgctaggattagaagcctgc

SEQ ID NO: 3254845 - DNA, 25 bp, Homo sapien
cgtgctggtaggtgtatctgtaggc

SEQ ID NO: 3254846 - DNA, 25 bp, Homo sapien
gtgctggtaggtgtatctgtaggca

SEQ ID NO: 3254847 - DNA, 25 bp, Homo sapien
tgctggtaggtgtatctgtaggcat

SEQ ID NO: 3254848 - DNA, 25 bp, Homo sapien
ccacgcagatgttacagcataagat

SEQ ID NO: 3254849 - DNA, 25 bp, Homo sapien
caggtattgtgtaccacgcagatgt

SEQ ID NO: 3254850 - DNA, 25 bp, Homo sapien
gatagaccgtaaaagccaacctgta

SEQ ID NO: 3254851 - DNA, 25 bp, Homo sapien
cagcataagatagaccgtaaaagcc

SEQ ID NO: 3254852 - DNA, 25 bp, Homo sapien
atctttgttgcctgatgtgaataaa

SEQ ID NO: 3254853 - DNA, 25 bp, Homo sapien
ttgcctgatgtgaataaagaggact

SEQ ID NO: 3254854 - DNA, 25 bp, Homo sapien
tttgttgcctgatgtgaataaagag

SEQ ID NO: 3254855 - DNA, 25 bp, Homo sapien
gcctgatgtgaataaagaggactcc

SEQ ID NO: 3254856 - DNA, 25 bp, Homo sapien
gatttactgcatcggcttaaaggaa

SEQ ID NO: 3254857 - DNA, 25 bp, Homo sapien
tactgcatcggcttaaaggaagtaa

SEQ ID NO: 3254858 - DNA, 25 bp, Homo sapien
ctttagatttactgcatcggcttaa

SEQ ID NO: 3254859 - DNA, 25 bp, Homo sapien
gcatcggcttaaaggaagtaaccca

SEQ ID NO: 3254860 - DNA, 25 bp, Homo sapien
tgatgagccatagtctaacaggagg

SEQ ID NO: 3254861 - DNA, 25 bp, Homo sapien
ggttctgccatctttgtgagattca

SEQ ID NO: 3254862 - DNA, 25 bp, Homo sapien
caaaggaagttcaagtgatgagcca

SEQ ID NO: 3254863 - DNA, 25 bp, Homo sapien
tttaactccaagaccatagatccgt

SEQ ID NO: 3254864 - DNA, 25 bp, Homo sapien
tcctggtagctgtgtgagcccctac

SEQ ID NO: 3254865 - DNA, 25 bp, Homo sapien
ctgtgtccagataccctaatctgtg

SEQ ID NO: 3254866 - DNA, 25 bp, Homo sapien
tgaattgactgagacctccaacctg

SEQ ID NO: 3254867 - DNA, 25 bp, Homo sapien
gagaggctcccctgaattgactgag

SEQ ID NO: 3254868 - DNA, 25 bp, Homo sapien
cattggcttgtgtgagggttagact

SEQ ID NO: 3254869 - DNA, 25 bp, Homo sapien
ggttagacttaagatagaagaaggc

SEQ ID NO: 3254870 - DNA, 25 bp, Homo sapien
tgtgtgagggttagacttaagatag

SEQ ID NO: 3254871 - DNA, 25 bp, Homo sapien
tgtggttctcattggcttgtgtgag

SEQ ID NO: 3254872 - DNA, 25 bp, Homo sapien
tgtatacagacccttgtaggcaaca

SEQ ID NO: 3254873 - DNA, 25 bp, Homo sapien
catgtctgtatacagacccttgtag

SEQ ID NO: 3254874 - DNA, 25 bp, Homo sapien
tacagacccttgtaggcaacagtgg

SEQ ID NO: 3254875 - DNA, 25 bp, Homo sapien
cagacccttgtaggcaacagtggac

SEQ ID NO: 3254876 - DNA, 25 bp, Homo sapien
taggactgtttttcgcaggagagcg

SEQ ID NO: 3254877 - DNA, 25 bp, Homo sapien
acttcatttccatgcgtccacggga

SEQ ID NO: 3254878 - DNA, 25 bp, Homo sapien
tggagtctacaaatgctgacatccc

SEQ ID NO: 3254879 - DNA, 25 bp, Homo sapien
tccacgggatgcacgggaatgagtt

SEQ ID NO: 3254880 - DNA, 25 bp, Homo sapien
tggaacaaagccatccccagagaag

SEQ ID NO: 3254881 - DNA, 25 bp, Homo sapien
tccaggcatcgtcagtggcacagtg

SEQ ID NO: 3254882 - DNA, 25 bp, Homo sapien
tggtttccccatggaagtggcatga

SEQ ID NO: 3254883 - DNA, 25 bp, Homo sapien
caggaaaatcctggccgtgaccttt

SEQ ID NO: 3254884 - DNA, 25 bp, Homo sapien
cacagcccaggattgacagatctgg

SEQ ID NO: 3254885 - DNA, 25 bp, Homo sapien
ttgacagatctggtgcctgtgttgc

SEQ ID NO: 3254886 - DNA, 25 bp, Homo sapien
cccaggattgacagatctggtgcct

SEQ ID NO: 3254887 - DNA, 25 bp, Homo sapien
caggattgacagatctggtgcctgt

SEQ ID NO: 3254888 - DNA, 25 bp, Homo sapien
ccttttgggctttgtgaagttagag

SEQ ID NO: 3254889 - DNA, 25 bp, Homo sapien
gaagttagagctcctgatccccaaa

SEQ ID NO: 3254890 - DNA, 25 bp, Homo sapien
gaactcggtattccctgacacaagt

SEQ ID NO: 3254891 - DNA, 25 bp, Homo sapien
cactgggagttttggcaagtggtct

SEQ ID NO: 3254892 - DNA, 25 bp, Homo sapien
caccacgaggttctgtgagcattga

SEQ ID NO: 3254893 - DNA, 25 bp, Homo sapien
ctagttgtttaggagggcaatggct

SEQ ID NO: 3254894 - DNA, 25 bp, Homo sapien
gaacctggtaaggatgtcatccctc

SEQ ID NO: 3254895 - DNA, 25 bp, Homo sapien
tctgtgagcattgaacctggtaagg

SEQ ID NO: 3254896 - DNA, 25 bp, Homo sapien
cctgtatcatttttgtgagtcttca

SEQ ID NO: 3254897 - DNA, 25 bp, Homo sapien
tcttcattaaaagtaggccaagtgc

SEQ ID NO: 3254898 - DNA, 25 bp, Homo sapien
cgtgggtaagcctgtatcatttttg

SEQ ID NO: 3254899 - DNA, 25 bp, Homo sapien
ttaaaagtaggccaagtgctacatc

SEQ ID NO: 3254900 - DNA, 25 bp, Homo sapien
gcagatgaaatgacagttctataga

SEQ ID NO: 3254901 - DNA, 25 bp, Homo sapien
tactctgcaggatccatctgtaccc

SEQ ID NO: 3254902 - DNA, 25 bp, Homo sapien
tcttagtattacaagcatactctgc

SEQ ID NO: 3254903 - DNA, 25 bp, Homo sapien
gggccgtgactgtaactctcaattt

SEQ ID NO: 3254904 - DNA, 25 bp, Homo sapien
tacccaggtttgcacacttcttgag

SEQ ID NO: 3254905 - DNA, 25 bp, Homo sapien
agtcccagacagactgagcgctagg

SEQ ID NO: 3254906 - DNA, 25 bp, Homo sapien
tcccagacagactgagcgctaggct

SEQ ID NO: 3254907 - DNA, 25 bp, Homo sapien
ccagacagactgagcgctaggctta

SEQ ID NO: 3254908 - DNA, 25 bp, Homo sapien
gaagtcccagacagactgagcgcta

SEQ ID NO: 3254909 - DNA, 25 bp, Homo sapien
tcaacactgatagctcttcctggaa

SEQ ID NO: 3254910 - DNA, 25 bp, Homo sapien
aacactgatagctcttcctggaagg

SEQ ID NO: 3254911 - DNA, 25 bp, Homo sapien
catagtcaacactgatagctcttcc

SEQ ID NO: 3254912 - DNA, 25 bp, Homo sapien
agtcaacactgatagctcttcctgg

SEQ ID NO: 3254913 - DNA, 25 bp, Homo sapien
ccttctggtgagtggaaccctctgg

SEQ ID NO: 3254914 - DNA, 25 bp, Homo sapien
gagtatccgacacttgaagctgatg

SEQ ID NO: 3254915 - DNA, 25 bp, Homo sapien
taagaagtgcagaactgaacgtggg

SEQ ID NO: 3254916 - DNA, 25 bp, Homo sapien
taagccatgctatcttaggtgggca

SEQ ID NO: 3254917 - DNA, 25 bp, Homo sapien
gtactgccaagtgtgtcctcctgtg

SEQ ID NO: 3254918 - DNA, 25 bp, Homo sapien
gatctccacgtttaagtactgccaa

SEQ ID NO: 3254919 - DNA, 25 bp, Homo sapien
cagtggaggtttaggaggtttggat

SEQ ID NO: 3254920 - DNA, 25 bp, Homo sapien
aacccacacccctgagtacagtgga

SEQ ID NO: 3254921 - DNA, 25 bp, Homo sapien
tcagaggcctttttgggtcagctac

SEQ ID NO: 3254922 - DNA, 25 bp, Homo sapien
cttgtgtatcttgctaagatctagg

SEQ ID NO: 3254923 - DNA, 25 bp, Homo sapien
attgctttcgggcagttcttgtgta

SEQ ID NO: 3254924 - DNA, 25 bp, Homo sapien
tatcttgctaagatctaggaatggg

SEQ ID NO: 3254925 - DNA, 25 bp, Homo sapien
cttaatctgctgagaatcacttcgg

SEQ ID NO: 3254926 - DNA, 25 bp, Homo sapien
ggtgtgacttcactgttgccaaacc

SEQ ID NO: 3254927 - DNA, 25 bp, Homo sapien
tgctgagaatcacttcggtgtgact

SEQ ID NO: 3254928 - DNA, 25 bp, Homo sapien
cttcgttcagatcgcctctggggcc

SEQ ID NO: 3254929 - DNA, 25 bp, Homo sapien
tgaaacagttctgatagagcctgac

SEQ ID NO: 3254930 - DNA, 25 bp, Homo sapien
tgccacttaacctgaaacagttctg

SEQ ID NO: 3254931 - DNA, 25 bp, Homo sapien
ggtcaggttgacaaccttggaggat

SEQ ID NO: 3254932 - DNA, 25 bp, Homo sapien
cttggaggatcttgactgcattgcc

SEQ ID NO: 3254933 - DNA, 25 bp, Homo sapien
ggtttgggttgtggaccagctcact

SEQ ID NO: 3254934 - DNA, 25 bp, Homo sapien
ggatctgtccatgaggtctaacgtt

SEQ ID NO: 3254935 - DNA, 25 bp, Homo sapien
ctgatctaagcagagcgtgccacta

SEQ ID NO: 3254936 - DNA, 25 bp, Homo sapien
cactatatgggcttgtatttcccca

SEQ ID NO: 3254937 - DNA, 25 bp, Homo sapien
ccactggcagttccgatatctggca

SEQ ID NO: 3254938 - DNA, 25 bp, Homo sapien
cctgatcataggttgagcttcagac

SEQ ID NO: 3254939 - DNA, 25 bp, Homo sapien
ttctgtcctgatcataggttgagct

SEQ ID NO: 3254940 - DNA, 25 bp, Homo sapien
actggcagttccgatatctggcaag

SEQ ID NO: 3254941 - DNA, 25 bp, Homo sapien
tcagttccaacaccagcagacattg

SEQ ID NO: 3254942 - DNA, 25 bp, Homo sapien
taaagtcctggtgagtgaccttgct

SEQ ID NO: 3254943 - DNA, 25 bp, Homo sapien
ggaagagccactctccccatagctt

SEQ ID NO: 3254944 - DNA, 25 bp, Homo sapien
tacttccaaagcatctgacatctca

SEQ ID NO: 3254945 - DNA, 25 bp, Homo sapien
agaggcagggacttcgtggtcccct

SEQ ID NO: 3254946 - DNA, 25 bp, Homo sapien
tctggtggaggtggtcagaaaccag

SEQ ID NO: 3254947 - DNA, 25 bp, Homo sapien
cagatttgtactggcagatgccttc

SEQ ID NO: 3254948 - DNA, 25 bp, Homo sapien
gttgaggaggttcagagccgtctgt

SEQ ID NO: 3254949 - DNA, 25 bp, Homo sapien
gaatgaggatgttgcaaatgcttct

SEQ ID NO: 3254950 - DNA, 25 bp, Homo sapien
tgaggatgttgcaaatgcttctagt

SEQ ID NO: 3254951 - DNA, 25 bp, Homo sapien
ctggaatgaggatgttgcaaatgct

SEQ ID NO: 3254952 - DNA, 25 bp, Homo sapien
ggatgttgcaaatgcttctagtggc

SEQ ID NO: 3254953 - DNA, 25 bp, Homo sapien
taaagccttcacttgtgtactcggc

SEQ ID NO: 3254954 - DNA, 25 bp, Homo sapien
cacttagttcctaaagccttcactt

SEQ ID NO: 3254955 - DNA, 25 bp, Homo sapien
ccttcacttgtgtactcggcagttc

SEQ ID NO: 3254956 - DNA, 25 bp, Homo sapien
tcagttgtacacttagttcctaaag

SEQ ID NO: 3254957 - DNA, 25 bp, Homo sapien
tctgggacactgctggatatgaccc

SEQ ID NO: 3254958 - DNA, 25 bp, Homo sapien
tctgtggcttgataattccatgatc

SEQ ID NO: 3254959 - DNA, 25 bp, Homo sapien
cagatagttctggtggacctgttca

SEQ ID NO: 3254960 - DNA, 25 bp, Homo sapien
tatgacccaggtcattgagtcttgc

SEQ ID NO: 3254961 - DNA, 25 bp, Homo sapien
tattgttacttgactatgcaaagcc

SEQ ID NO: 3254962 - DNA, 25 bp, Homo sapien
tgactatgcaaagcctgctgagaag

SEQ ID NO: 3254963 - DNA, 25 bp, Homo sapien
tcctctattgttacttgactatgca

SEQ ID NO: 3254964 - DNA, 25 bp, Homo sapien
ttgtagtcctctattgttacttgac

SEQ ID NO: 3254965 - DNA, 25 bp, Homo sapien
tgcttgagtattgtactgttcatca

SEQ ID NO: 3254966 - DNA, 25 bp, Homo sapien
gccttgtacgagaaaatagcactaa

SEQ ID NO: 3254967 - DNA, 25 bp, Homo sapien
aaattgctgagatacacgtgaactg

SEQ ID NO: 3254968 - DNA, 25 bp, Homo sapien
gaactgctctaagatgcttgagtat

SEQ ID NO: 3254969 - DNA, 25 bp, Homo sapien
aatatgccaaatcttcagcccatgg

SEQ ID NO: 3254970 - DNA, 25 bp, Homo sapien
cagcccatggattgtagtgaaacct

SEQ ID NO: 3254971 - DNA, 25 bp, Homo sapien
gtgtctaaaaactggcttactcgag

SEQ ID NO: 3254972 - DNA, 25 bp, Homo sapien
aaacctgactggctttgcaccggat

SEQ ID NO: 3254973 - DNA, 25 bp, Homo sapien
cagctgcagacagggtgaggacagg

SEQ ID NO: 3254974 - DNA, 25 bp, Homo sapien
ctcttagagatgtgacagctgcaga

SEQ ID NO: 3254975 - DNA, 25 bp, Homo sapien
agcagcatggtctctgggcagacag

SEQ ID NO: 3254976 - DNA, 25 bp, Homo sapien
gcagcagcatggtctctgggcagac

SEQ ID NO: 3254977 - DNA, 25 bp, Homo sapien
aaggggcctatcagggcggctctgc

SEQ ID NO: 3254978 - DNA, 25 bp, Homo sapien
agagaaggggcctatcagggcggct

SEQ ID NO: 3254979 - DNA, 25 bp, Homo sapien
caaatttggtgtgcgtggagagaag

SEQ ID NO: 3254980 - DNA, 25 bp, Homo sapien
tatgaagcaaatttggtgtgcgtgg

SEQ ID NO: 3254981 - DNA, 25 bp, Homo sapien
tccgatttagttgtgtgcgtctact

SEQ ID NO: 3254982 - DNA, 25 bp, Homo sapien
gatttagttgtgtgcgtctactcac

SEQ ID NO: 3254983 - DNA, 25 bp, Homo sapien
cctttagtccgatttagttgtgtgc

SEQ ID NO: 3254984 - DNA, 25 bp, Homo sapien
ttagtccgatttagttgtgtgcgtc

SEQ ID NO: 3254985 - DNA, 25 bp, Homo sapien
catggcctgcatatgaaacactcac

SEQ ID NO: 3254986 - DNA, 25 bp, Homo sapien
aacatggcctgcatatgaaacactc

SEQ ID NO: 3254987 - DNA, 25 bp, Homo sapien
aaaacatggcctgcatatgaaacac

SEQ ID NO: 3254988 - DNA, 25 bp, Homo sapien
aaacatggcctgcatatgaaacact

SEQ ID NO: 3254989 - DNA, 25 bp, Homo sapien
tgagctggaagatctaggtagaagt

SEQ ID NO: 3254990 - DNA, 25 bp, Homo sapien
tgccatgtatttggggatggcttga

SEQ ID NO: 3254991 - DNA, 25 bp, Homo sapien
ctaggtagaagtgagtatggacttc

SEQ ID NO: 3254992 - DNA, 25 bp, Homo sapien
tctgagtcaagattgccatgtattt

SEQ ID NO: 3254993 - DNA, 25 bp, Homo sapien
gcagctgtgctgactacgactcctg

SEQ ID NO: 3254994 - DNA, 25 bp, Homo sapien
tgtgtacgtgtgcaggtggttagtg

SEQ ID NO: 3254995 - DNA, 25 bp, Homo sapien
ctgtgctgactacgactcctgatga

SEQ ID NO: 3254996 - DNA, 25 bp, Homo sapien
tgctgactacgactcctgatgagga

SEQ ID NO: 3254997 - DNA, 25 bp, Homo sapien
ctgggtggaggatgttgagaatgca

SEQ ID NO: 3254998 - DNA, 25 bp, Homo sapien
tgggtggaggatgttgagaatgcat

SEQ ID NO: 3254999 - DNA, 25 bp, Homo sapien
tgtttggctacatttagttaacctc

SEQ ID NO: 3255000 - DNA, 25 bp, Homo sapien
attttgttctgcatttgggtttgtt

SEQ ID NO: 3255001 - DNA, 25 bp, Homo sapien
catttagttaacctcctctgtaaag

SEQ ID NO: 3255002 - DNA, 25 bp, Homo sapien
taaagcttgatctaggaggtacagg

SEQ ID NO: 3255003 - DNA, 25 bp, Homo sapien
tcagtagctttgagtgaaaccttac

SEQ ID NO: 3255004 - DNA, 25 bp, Homo sapien
cagtcagtagctttgagtgaaacct

SEQ ID NO: 3255005 - DNA, 25 bp, Homo sapien
gcagtcagtagctttgagtgaaacc

SEQ ID NO: 3255006 - DNA, 25 bp, Homo sapien
gtcagtagctttgagtgaaacctta

SEQ ID NO: 3255007 - DNA, 25 bp, Homo sapien
tggtggatttctctcgaactgcctg

SEQ ID NO: 3255008 - DNA, 25 bp, Homo sapien
gattccttatatgggaggatctggg

SEQ ID NO: 3255009 - DNA, 25 bp, Homo sapien
aatgtgtggtgtcctgtactgtggt

SEQ ID NO: 3255010 - DNA, 25 bp, Homo sapien
tgagacgtgtctgcatgaaaaatgg

SEQ ID NO: 3255011 - DNA, 25 bp, Homo sapien
ctaatcagaggtgcacgactggact

SEQ ID NO: 3255012 - DNA, 25 bp, Homo sapien
gttttgtgtgacctcatcctgccag

SEQ ID NO: 3255013 - DNA, 25 bp, Homo sapien
tttgcactgatggacgaagacagcc

SEQ ID NO: 3255014 - DNA, 25 bp, Homo sapien
taaatgctgccaactgtctttctgg

SEQ ID NO: 3255015 - DNA, 25 bp, Homo sapien
ccagcagacatatggtctgtttgca

SEQ ID NO: 3255016 - DNA, 25 bp, Homo sapien
gttgctgcttgaacctccaaatgca

SEQ ID NO: 3255017 - DNA, 25 bp, Homo sapien
tttgcatgttgctgcttgaacctcc

SEQ ID NO: 3255018 - DNA, 25 bp, Homo sapien
tggtctgtttgcatgttgctgcttg

SEQ ID NO: 3255019 - DNA, 25 bp, Homo sapien
accagagatgggacagcccagacag

SEQ ID NO: 3255020 - DNA, 25 bp, Homo sapien
gcctttggaaacaccagagatggga

SEQ ID NO: 3255021 - DNA, 25 bp, Homo sapien
aacaccagagatgggacagcccaga

SEQ ID NO: 3255022 - DNA, 25 bp, Homo sapien
gaaacaccagagatgggacagccca

SEQ ID NO: 3255023 - DNA, 25 bp, Homo sapien
tgaggacagtgcacatcatggtcgt

SEQ ID NO: 3255024 - DNA, 25 bp, Homo sapien
catcatggtcgtcagtggcaggttc

SEQ ID NO: 3255025 - DNA, 25 bp, Homo sapien
ggacagtgcacatcatggtcgtcag

SEQ ID NO: 3255026 - DNA, 25 bp, Homo sapien
tgcacatcatggtcgtcagtggcag

SEQ ID NO: 3255027 - DNA, 25 bp, Homo sapien
ttgctgaccttaggcataatctcca

SEQ ID NO: 3255028 - DNA, 25 bp, Homo sapien
aaggttgctgaccttaggcataatc

SEQ ID NO: 3255029 - DNA, 25 bp, Homo sapien
aggtcataaggttgctgaccttagg

SEQ ID NO: 3255030 - DNA, 25 bp, Homo sapien
cataaggttgctgaccttaggcata

SEQ ID NO: 3255031 - DNA, 25 bp, Homo sapien
gcattgggcagcagacttaaatctc

SEQ ID NO: 3255032 - DNA, 25 bp, Homo sapien
caggtatttgcattgggcagcagac

SEQ ID NO: 3255033 - DNA, 25 bp, Homo sapien
atttgcattgggcagcagacttaaa

SEQ ID NO: 3255034 - DNA, 25 bp, Homo sapien
ggtatttgcattgggcagcagactt

SEQ ID NO: 3255035 - DNA, 25 bp, Homo sapien
tgaggtctctcagcagtttagcccc

SEQ ID NO: 3255036 - DNA, 25 bp, Homo sapien
tatccattgctcttggtcagcaagg

SEQ ID NO: 3255037 - DNA, 25 bp, Homo sapien
tctcagcagtttagcccctctggga

SEQ ID NO: 3255038 - DNA, 25 bp, Homo sapien
tcgtctcctgaagtgtgaggtctct

SEQ ID NO: 3255039 - DNA, 25 bp, Homo sapien
gtccatgtaactgagggcagccacc

SEQ ID NO: 3255040 - DNA, 25 bp, Homo sapien
tgcttacagaggtcatcctcgagtg

SEQ ID NO: 3255041 - DNA, 25 bp, Homo sapien
cctcgagtgccttgatctgatgtgc

SEQ ID NO: 3255042 - DNA, 25 bp, Homo sapien
gccaccaagtggattgtctcctgct

SEQ ID NO: 3255043 - DNA, 25 bp, Homo sapien
gatagccccaagccacttgactcat

SEQ ID NO: 3255044 - DNA, 25 bp, Homo sapien
ctgatagccccaagccacttgactc

SEQ ID NO: 3255045 - DNA, 25 bp, Homo sapien
tgatagccccaagccacttgactca

SEQ ID NO: 3255046 - DNA, 25 bp, Homo sapien
tagtgtgacaacgacacagccttgg

SEQ ID NO: 3255047 - DNA, 25 bp, Homo sapien
gtcctggagaatctcatatagtgtg

SEQ ID NO: 3255048 - DNA, 25 bp, Homo sapien
tgacaacgacacagccttggtttcc

SEQ ID NO: 3255049 - DNA, 25 bp, Homo sapien
aatctcatatagtgtgacaacgaca

SEQ ID NO: 3255050 - DNA, 25 bp, Homo sapien
agatccttgatctggagtagctgca

SEQ ID NO: 3255051 - DNA, 25 bp, Homo sapien
ctatgataggatggccatgaaagcc

SEQ ID NO: 3255052 - DNA, 25 bp, Homo sapien
caatgaaaggcatgtggctagagat

SEQ ID NO: 3255053 - DNA, 25 bp, Homo sapien
tctgcagtttttggacatgagaact

SEQ ID NO: 3255054 - DNA, 25 bp, Homo sapien
gacaggggatcagcagctgagattt

SEQ ID NO: 3255055 - DNA, 25 bp, Homo sapien
gatcagcagctgagatttcagccat

SEQ ID NO: 3255056 - DNA, 25 bp, Homo sapien
ctggtggacaggggatcagcagctg

SEQ ID NO: 3255057 - DNA, 25 bp, Homo sapien
ggatcagcagctgagatttcagcca

SEQ ID NO: 3255058 - DNA, 25 bp, Homo sapien
tctctaatgccctatgattcacaag

SEQ ID NO: 3255059 - DNA, 25 bp, Homo sapien
gacttggaagttctatggaggttaa

SEQ ID NO: 3255060 - DNA, 25 bp, Homo sapien
gaaggtgagttagaccccctgtcag

SEQ ID NO: 3255061 - DNA, 25 bp, Homo sapien
gcttgttcacgtctaatggcttgga

SEQ ID NO: 3255062 - DNA, 25 bp, Homo sapien
gtctgcctgatgctcttattccttc

SEQ ID NO: 3255063 - DNA, 25 bp, Homo sapien
tctgcctgatgctcttattccttct

SEQ ID NO: 3255064 - DNA, 25 bp, Homo sapien
tgcctgatgctcttattccttctgt

SEQ ID NO: 3255065 - DNA, 25 bp, Homo sapien
ctgcctgatgctcttattccttctg

SEQ ID NO: 3255066 - DNA, 25 bp, Homo sapien
tcactagggctggtccactgcttat

SEQ ID NO: 3255067 - DNA, 25 bp, Homo sapien
cccttcctttatgactggacgagga

SEQ ID NO: 3255068 - DNA, 25 bp, Homo sapien
tcagcttcatttgggctggaagtgg

SEQ ID NO: 3255069 - DNA, 25 bp, Homo sapien
cagctgccttgtcagtgtcactagg

SEQ ID NO: 3255070 - DNA, 25 bp, Homo sapien
tggtgaaggactgagcgcagaatgc

SEQ ID NO: 3255071 - DNA, 25 bp, Homo sapien
ccattgaaacgtgctgttccgcaaa

SEQ ID NO: 3255072 - DNA, 25 bp, Homo sapien
cgcagaatgcgtggtgctggaaacc

SEQ ID NO: 3255073 - DNA, 25 bp, Homo sapien
ttgcttttcttacggcttgtgcaaa

SEQ ID NO: 3255074 - DNA, 25 bp, Homo sapien
ctgtttctgactccatgcccatcac

SEQ ID NO: 3255075 - DNA, 25 bp, Homo sapien
agtcttgaatccaagaatcctgttt

SEQ ID NO: 3255076 - DNA, 25 bp, Homo sapien
gctgcacaagaaaggctcagtagtc

SEQ ID NO: 3255077 - DNA, 25 bp, Homo sapien
cacaagaaaggctcagtagtcttga

SEQ ID NO: 3255078 - DNA, 25 bp, Homo sapien
gctgtctggttcctggggcccaaga

SEQ ID NO: 3255079 - DNA, 25 bp, Homo sapien
ctattttcaggttctgggtaagtgt

SEQ ID NO: 3255080 - DNA, 25 bp, Homo sapien
gagtgaaccaaagggctctcttgat

SEQ ID NO: 3255081 - DNA, 25 bp, Homo sapien
tgcttggctgtctggttcctggggc

SEQ ID NO: 3255082 - DNA, 25 bp, Homo sapien
gagtgggtggcaatagcagcttcta

SEQ ID NO: 3255083 - DNA, 25 bp, Homo sapien
cacctggaagtgatgccgtgaacac

SEQ ID NO: 3255084 - DNA, 25 bp, Homo sapien
cacttagcggtgaccaaggctcaat

SEQ ID NO: 3255085 - DNA, 25 bp, Homo sapien
tattagaggactgtctctggccgct

SEQ ID NO: 3255086 - DNA, 25 bp, Homo sapien
gttgccaatgtgacaactgctgtag

SEQ ID NO: 3255087 - DNA, 25 bp, Homo sapien
gccaatgtgacaactgctgtagaaa

SEQ ID NO: 3255088 - DNA, 25 bp, Homo sapien
atgtgacaactgctgtagaaatgtg

SEQ ID NO: 3255089 - DNA, 25 bp, Homo sapien
caatgtgacaactgctgtagaaatg

SEQ ID NO: 3255090 - DNA, 25 bp, Homo sapien
gacccttgtatgactgacactgctg

SEQ ID NO: 3255091 - DNA, 25 bp, Homo sapien
gacactgctgttctgtctgtgcaca

SEQ ID NO: 3255092 - DNA, 25 bp, Homo sapien
taggttgtcctttgacccttgtatg

SEQ ID NO: 3255093 - DNA, 25 bp, Homo sapien
ttggttttaactgtgctaccctctg

SEQ ID NO: 3255094 - DNA, 25 bp, Homo sapien
ggcaccaataaaagttgttacagac

SEQ ID NO: 3255095 - DNA, 25 bp, Homo sapien
aagcttggggttggatgttccctgt

SEQ ID NO: 3255096 - DNA, 25 bp, Homo sapien
tggcaccaataaaagttgttacaga

SEQ ID NO: 3255097 - DNA, 25 bp, Homo sapien
tgttccctgtagtttctctggatgc

SEQ ID NO: 3255098 - DNA, 25 bp, Homo sapien
gccagctctgtatcaccgtattgta

SEQ ID NO: 3255099 - DNA, 25 bp, Homo sapien
cccaggacgactctggtggaaaggc

SEQ ID NO: 3255100 - DNA, 25 bp, Homo sapien
tggaaaggcgttgatctctggaacc

SEQ ID NO: 3255101 - DNA, 25 bp, Homo sapien
cattgtggacaatgctgtgccttct

SEQ ID NO: 3255102 - DNA, 25 bp, Homo sapien
cagaggaggatagcaagctgctcat

SEQ ID NO: 3255103 - DNA, 25 bp, Homo sapien
tctccatagggactgatttttgaac

SEQ ID NO: 3255104 - DNA, 25 bp, Homo sapien
tggaacctggacagctatgcagagg

SEQ ID NO: 3255105 - DNA, 25 bp, Homo sapien
tccagaggtgaggccgatggaacct

SEQ ID NO: 3255106 - DNA, 25 bp, Homo sapien
ggttgggctcagttgatgataaaat

SEQ ID NO: 3255107 - DNA, 25 bp, Homo sapien
tgatgataaaatggcccagacttga

SEQ ID NO: 3255108 - DNA, 25 bp, Homo sapien
cccagacttgatgatagcctcccat

SEQ ID NO: 3255109 - DNA, 25 bp, Homo sapien
agcctgtttgtgtcaggttgggctc

SEQ ID NO: 3255110 - DNA, 25 bp, Homo sapien
gtcaaccctatcagacatgttcctt

SEQ ID NO: 3255111 - DNA, 25 bp, Homo sapien
gatgttctggtcaccgtcaacccta

SEQ ID NO: 3255112 - DNA, 25 bp, Homo sapien
cgatcgtccctttgggatgatgttc

SEQ ID NO: 3255113 - DNA, 25 bp, Homo sapien
tcagccagggataatgcatctcgat

SEQ ID NO: 3255114 - DNA, 25 bp, Homo sapien
tacttagttgcttggaaacgggcat

SEQ ID NO: 3255115 - DNA, 25 bp, Homo sapien
gaagcactcggttgtctgtcagtct

SEQ ID NO: 3255116 - DNA, 25 bp, Homo sapien
tgggagcctctctgggacgcagaac

SEQ ID NO: 3255117 - DNA, 25 bp, Homo sapien
agcctctctgggacgcagaacttca

SEQ ID NO: 3255118 - DNA, 25 bp, Homo sapien
tttacccaagtatctattcccctga

SEQ ID NO: 3255119 - DNA, 25 bp, Homo sapien
ctttacccaagtatctattcccctg

SEQ ID NO: 3255120 - DNA, 25 bp, Homo sapien
tttctctttacccaagtatctattc

SEQ ID NO: 3255121 - DNA, 25 bp, Homo sapien
tctctttacccaagtatctattccc

SEQ ID NO: 3255122 - DNA, 25 bp, Homo sapien
tatgtggctagttcggaaaactcct

SEQ ID NO: 3255123 - DNA, 25 bp, Homo sapien
tgcccatggtcatagcagtctgtcc

SEQ ID NO: 3255124 - DNA, 25 bp, Homo sapien
ggttaaaggcccagcaacatccatg

SEQ ID NO: 3255125 - DNA, 25 bp, Homo sapien
ccagtgttcttaggttgagccccaa

SEQ ID NO: 3255126 - DNA, 25 bp, Homo sapien
atgttcccagcaaaatctgaattgc

SEQ ID NO: 3255127 - DNA, 25 bp, Homo sapien
gggatgtgcattccttgtagtttat

SEQ ID NO: 3255128 - DNA, 25 bp, Homo sapien
cccagggttaaaggtgataatgtat

SEQ ID NO: 3255129 - DNA, 25 bp, Homo sapien
ccaaagctgtaccatgtgagtgctg

SEQ ID NO: 3255130 - DNA, 25 bp, Homo sapien
ttcaagttgtgaactgcctgagtct

SEQ ID NO: 3255131 - DNA, 25 bp, Homo sapien
gaagctagtgagaattcaagttgtg

SEQ ID NO: 3255132 - DNA, 25 bp, Homo sapien
gcagtgaagctagtgagaattcaag

SEQ ID NO: 3255133 - DNA, 25 bp, Homo sapien
tgagtcttcatggtcctcggggatg

SEQ ID NO: 3255134 - DNA, 25 bp, Homo sapien
cattgcagatgttggtgttgtggtg

SEQ ID NO: 3255135 - DNA, 25 bp, Homo sapien
gatcatctacattggaagactcaag

SEQ ID NO: 3255136 - DNA, 25 bp, Homo sapien
atgaggctaatgtgaaccttctccc

SEQ ID NO: 3255137 - DNA, 25 bp, Homo sapien
cagatatcacaaggatcatctacat

SEQ ID NO: 3255138 - DNA, 25 bp, Homo sapien
gacgttcaaagatcctctcgcctga

SEQ ID NO: 3255139 - DNA, 25 bp, Homo sapien
ctccctgaatgctgacgttcaaaga

SEQ ID NO: 3255140 - DNA, 25 bp, Homo sapien
tgttgtgtagtcatccttctccctg

SEQ ID NO: 3255141 - DNA, 25 bp, Homo sapien
cttccatgttgtgtagtcatccttc

SEQ ID NO: 3255142 - DNA, 25 bp, Homo sapien
cactgagtccaaccaggcaattgct

SEQ ID NO: 3255143 - DNA, 25 bp, Homo sapien
catggagtctgtcactggaatcccc

SEQ ID NO: 3255144 - DNA, 25 bp, Homo sapien
aatcccatgcatgtatcaggcaacg

SEQ ID NO: 3255145 - DNA, 25 bp, Homo sapien
tcaggcaacgttctcaggtactggc

SEQ ID NO: 3255146 - DNA, 25 bp, Homo sapien
ccactggatatagattattcgggca

SEQ ID NO: 3255147 - DNA, 25 bp, Homo sapien
aaccccactggatatagattattcg

SEQ ID NO: 3255148 - DNA, 25 bp, Homo sapien
gatatagattattcgggcagtagtt

SEQ ID NO: 3255149 - DNA, 25 bp, Homo sapien
tcaaggaaaccccactggatataga

SEQ ID NO: 3255150 - DNA, 25 bp, Homo sapien
gatgtctctggcattggtccttaaa

SEQ ID NO: 3255151 - DNA, 25 bp, Homo sapien
tggcatctacctcagctgaagaact

SEQ ID NO: 3255152 - DNA, 25 bp, Homo sapien
gaggacaccaaccacgtatttaata

SEQ ID NO: 3255153 - DNA, 25 bp, Homo sapien
taaatatgtatggtcaacacctgag

SEQ ID NO: 3255154 - DNA, 25 bp, Homo sapien
tgactaggagtcagtaaattctctt

SEQ ID NO: 3255155 - DNA, 25 bp, Homo sapien
aaatgagggttatatctctcatccc

SEQ ID NO: 3255156 - DNA, 25 bp, Homo sapien
tggagaatgtcaactctagatgtgg

SEQ ID NO: 3255157 - DNA, 25 bp, Homo sapien
tataagccaacaatcctgccctgaa

SEQ ID NO: 3255158 - DNA, 25 bp, Homo sapien
taatactgacatgtctaatgaaggg

SEQ ID NO: 3255159 - DNA, 25 bp, Homo sapien
gaatgtcgtgcgttctgcagtggat

SEQ ID NO: 3255160 - DNA, 25 bp, Homo sapien
gatgcacaggaatgtcgtgcgttct

SEQ ID NO: 3255161 - DNA, 25 bp, Homo sapien
gtctaatgaagggatgcacaggaat

SEQ ID NO: 3255162 - DNA, 25 bp, Homo sapien
aagccagtgttccagtgataattct

SEQ ID NO: 3255163 - DNA, 25 bp, Homo sapien
tgctgtagagataagccataattat

SEQ ID NO: 3255164 - DNA, 25 bp, Homo sapien
ctaatccaggagagtctacagtggt

SEQ ID NO: 3255165 - DNA, 25 bp, Homo sapien
tggtagctgatctagggagcatgct

SEQ ID NO: 3255166 - DNA, 25 bp, Homo sapien
ggctgcaggcatggttctgtcctcc

SEQ ID NO: 3255167 - DNA, 25 bp, Homo sapien
tgttgagctccgagtctctgccacg

SEQ ID NO: 3255168 - DNA, 25 bp, Homo sapien
gaaagggatggcctcagtcctactg

SEQ ID NO: 3255169 - DNA, 25 bp, Homo sapien
cagtagtcatgtccaaagagttcca

SEQ ID NO: 3255170 - DNA, 25 bp, Homo sapien
tcttctcccctgaattctgtgtcga

SEQ ID NO: 3255171 - DNA, 25 bp, Homo sapien
ctcccagattcagtcaaagccttca

SEQ ID NO: 3255172 - DNA, 25 bp, Homo sapien
ctgggttcctcccagattcagtcaa

SEQ ID NO: 3255173 - DNA, 25 bp, Homo sapien
tgtgtcgattctctggtctgcccct

SEQ ID NO: 3255174 - DNA, 25 bp, Homo sapien
tttcttttccgacagtgatccctgg

SEQ ID NO: 3255175 - DNA, 25 bp, Homo sapien
tgattatcaacctcaattccatgtg

SEQ ID NO: 3255176 - DNA, 25 bp, Homo sapien
ctggaccatccacggtaacttttgt

SEQ ID NO: 3255177 - DNA, 25 bp, Homo sapien
aacttttgtgtaccctgaagtcagc

SEQ ID NO: 3255178 - DNA, 25 bp, Homo sapien
ctccaatctggtgttcaggcttctc

SEQ ID NO: 3255179 - DNA, 25 bp, Homo sapien
tcaggatcccacatccaaggctcca

SEQ ID NO: 3255180 - DNA, 25 bp, Homo sapien
aggctccaatctggtgttcaggctt

SEQ ID NO: 3255181 - DNA, 25 bp, Homo sapien
aggatcccacatccaaggctccaat

SEQ ID NO: 3255182 - DNA, 25 bp, Homo sapien
gtcctcaggaatgaatccaagtgat

SEQ ID NO: 3255183 - DNA, 25 bp, Homo sapien
ctcaggaatgaatccaagtgattcc

SEQ ID NO: 3255184 - DNA, 25 bp, Homo sapien
gattccagagtggcctgtgttaacc

SEQ ID NO: 3255185 - DNA, 25 bp, Homo sapien
tccagagtggcctgtgttaaccact

SEQ ID NO: 3255186 - DNA, 25 bp, Homo sapien
gggcagagcatcttcaagtactgac

SEQ ID NO: 3255187 - DNA, 25 bp, Homo sapien
gacgtcgatgttgtcgttggagatt

SEQ ID NO: 3255188 - DNA, 25 bp, Homo sapien
caagtactgactgttgaggcttcac

SEQ ID NO: 3255189 - DNA, 25 bp, Homo sapien
ggagattccataatacttaatgtga

SEQ ID NO: 3255190 - DNA, 25 bp, Homo sapien
tgattgttgtgatctgtgggatgtc

SEQ ID NO: 3255191 - DNA, 25 bp, Homo sapien
gggatgtcactgaacttcccagact

SEQ ID NO: 3255192 - DNA, 25 bp, Homo sapien
tgttgtgatctgtgggatgtcactg

SEQ ID NO: 3255193 - DNA, 25 bp, Homo sapien
tctgtgggatgtcactgaacttccc

SEQ ID NO: 3255194 - DNA, 25 bp, Homo sapien
acaggattagttcttctgcagcagg

SEQ ID NO: 3255195 - DNA, 25 bp, Homo sapien
gctcctggggctcttaaacatcagg

SEQ ID NO: 3255196 - DNA, 25 bp, Homo sapien
ggctcctggggctcttaaacatcag

SEQ ID NO: 3255197 - DNA, 25 bp, Homo sapien
gacaggattagttcttctgcagcag

SEQ ID NO: 3255198 - DNA, 25 bp, Homo sapien
atactgtgaggcctgtacccaacca

SEQ ID NO: 3255199 - DNA, 25 bp, Homo sapien
ttgttgtgggctgcccatactgtga

SEQ ID NO: 3255200 - DNA, 25 bp, Homo sapien
ttcatctctgcaggataattccaca

SEQ ID NO: 3255201 - DNA, 25 bp, Homo sapien
cagtgactgagtccactttgaagac

SEQ ID NO: 3255202 - DNA, 25 bp, Homo sapien
ggtgaaggagtaaacgcaaagtaca

SEQ ID NO: 3255203 - DNA, 25 bp, Homo sapien
gtgaaggagtaaacgcaaagtacat

SEQ ID NO: 3255204 - DNA, 25 bp, Homo sapien
tgctccaacattgggtgtatacgta

SEQ ID NO: 3255205 - DNA, 25 bp, Homo sapien
cattaggagcaattggttaagtgca

SEQ ID NO: 3255206 - DNA, 25 bp, Homo sapien
tcagtgatctgtcagtgagaagtca

SEQ ID NO: 3255207 - DNA, 25 bp, Homo sapien
ggatggcatattctgtagatgtcca

SEQ ID NO: 3255208 - DNA, 25 bp, Homo sapien
tctcatctattctgagttccttgag

SEQ ID NO: 3255209 - DNA, 25 bp, Homo sapien
ctattctgagttccttgagggccat

SEQ ID NO: 3255210 - DNA, 25 bp, Homo sapien
tcatctattctgagttccttgaggg

SEQ ID NO: 3255211 - DNA, 25 bp, Homo sapien
cttctcatctattctgagttccttg

SEQ ID NO: 3255212 - DNA, 25 bp, Homo sapien
ggcagaaagggacacaaacacatcc

SEQ ID NO: 3255213 - DNA, 25 bp, Homo sapien
catggcagaaagggacacaaacaca

SEQ ID NO: 3255214 - DNA, 25 bp, Homo sapien
cagaaagggacacaaacacatcctt

SEQ ID NO: 3255215 - DNA, 25 bp, Homo sapien
gagaagagacaagaggggtgaaaag

SEQ ID NO: 3255216 - DNA, 25 bp, Homo sapien
aacatctcataagtataatagacta

SEQ ID NO: 3255217 - DNA, 25 bp, Homo sapien
taaaacatctcataagtataataga

SEQ ID NO: 3255218 - DNA, 25 bp, Homo sapien
catctcataagtataatagactatt

SEQ ID NO: 3255219 - DNA, 25 bp, Homo sapien
acattagacttgtacctgcccccca

SEQ ID NO: 3255220 - DNA, 25 bp, Homo sapien
cctcaaaaaactagttctgcccctg

SEQ ID NO: 3255221 - DNA, 25 bp, Homo sapien
agtagagaaatataagtacttctga

SEQ ID NO: 3255222 - DNA, 25 bp, Homo sapien
tgaaggagggtccaaaatttgtgta

SEQ ID NO: 3255223 - DNA, 25 bp, Homo sapien
gtacttctgaaggagatcttggcaa

SEQ ID NO: 3255224 - DNA, 25 bp, Homo sapien
tctattggtgcctgactgtctgcct

SEQ ID NO: 3255225 - DNA, 25 bp, Homo sapien
ccatatggcccatggttctccagct

SEQ ID NO: 3255226 - DNA, 25 bp, Homo sapien
aagtgagtatggaaggatcagctcc

SEQ ID NO: 3255227 - DNA, 25 bp, Homo sapien
ccactggaaatggaatgacatgcaa

SEQ ID NO: 3255228 - DNA, 25 bp, Homo sapien
gaaacactgtaaggacgtactgaaa

SEQ ID NO: 3255229 - DNA, 25 bp, Homo sapien
tatacacacagatcatgacaaggta

SEQ ID NO: 3255230 - DNA, 25 bp, Homo sapien
aaaggaaattgccttaagctgagca

SEQ ID NO: 3255231 - DNA, 25 bp, Homo sapien
caaggtagggttgattccaggagta

SEQ ID NO: 3255232 - DNA, 25 bp, Homo sapien
ggtactccatgcataatacagagcc

SEQ ID NO: 3255233 - DNA, 25 bp, Homo sapien
acactacagctaccaggtccctggt

SEQ ID NO: 3255234 - DNA, 25 bp, Homo sapien
actctcccctaaataactactgcca

SEQ ID NO: 3255235 - DNA, 25 bp, Homo sapien
ctgccaaaggtgacaattaacgatc

SEQ ID NO: 3255236 - DNA, 25 bp, Homo sapien
cagtatttgtcacaagtccaattct

SEQ ID NO: 3255237 - DNA, 25 bp, Homo sapien
tgccagtatttgtcacaagtccaat

SEQ ID NO: 3255238 - DNA, 25 bp, Homo sapien
ttgtcacaagtccaattctcttcct

SEQ ID NO: 3255239 - DNA, 25 bp, Homo sapien
tatttgtcacaagtccaattctctt

SEQ ID NO: 3255240 - DNA, 25 bp, Homo sapien
tctagtaatcgcatgagggaaaacc

SEQ ID NO: 3255241 - DNA, 25 bp, Homo sapien
caatgaaaactagggatcgtgttcc

SEQ ID NO: 3255242 - DNA, 25 bp, Homo sapien
ctttgtgctatacggaacactcggg

SEQ ID NO: 3255243 - DNA, 25 bp, Homo sapien
gattcaaggccaattctcagtccag

SEQ ID NO: 3255244 - DNA, 25 bp, Homo sapien
gcttctatcaaatgccgttggccat

SEQ ID NO: 3255245 - DNA, 25 bp, Homo sapien
ttcatacagtcgcccacaaaaccag

SEQ ID NO: 3255246 - DNA, 25 bp, Homo sapien
gttggccatgactcatccactcttc

SEQ ID NO: 3255247 - DNA, 25 bp, Homo sapien
aagaacatcccaatctctagttgct

SEQ ID NO: 3255248 - DNA, 25 bp, Homo sapien
gagacagcggctaggttcagcttga

SEQ ID NO: 3255249 - DNA, 25 bp, Homo sapien
taggtcaggcgtacatgatgccgtc

SEQ ID NO: 3255250 - DNA, 25 bp, Homo sapien
tctggcgagtccacatcagggtggt

SEQ ID NO: 3255251 - DNA, 25 bp, Homo sapien
gatgccgtctgatgcctagctgaca

SEQ ID NO: 3255252 - DNA, 25 bp, Homo sapien
tctcacagggcaaaatggaactggt

SEQ ID NO: 3255253 - DNA, 25 bp, Homo sapien
ttgctgtccatacaagaggccagtt

SEQ ID NO: 3255254 - DNA, 25 bp, Homo sapien
ttctatggatggtgctacagacagc

SEQ ID NO: 3255255 - DNA, 25 bp, Homo sapien
tttctcagtttaggccgcagaggtg

SEQ ID NO: 3255256 - DNA, 25 bp, Homo sapien
cattctcagaggaattaagaaccct

SEQ ID NO: 3255257 - DNA, 25 bp, Homo sapien
cactggcgtggcaacatgagccttc

SEQ ID NO: 3255258 - DNA, 25 bp, Homo sapien
caaggtatgctgacaggtgcttcac

SEQ ID NO: 3255259 - DNA, 25 bp, Homo sapien
acatgtagcctctatgatgtgggca

SEQ ID NO: 3255260 - DNA, 25 bp, Homo sapien
ctgcaaagtgtggatatatttgttg

SEQ ID NO: 3255261 - DNA, 25 bp, Homo sapien
tgcaaagtgtggatatatttgttga

SEQ ID NO: 3255262 - DNA, 25 bp, Homo sapien
gacgatgtgcactatttgaagccaa

SEQ ID NO: 3255263 - DNA, 25 bp, Homo sapien
tgcctgccctacagagcgacgatgt

SEQ ID NO: 3255264 - DNA, 25 bp, Homo sapien
aaagatgacggcttcccacaggact

SEQ ID NO: 3255265 - DNA, 25 bp, Homo sapien
cattcggaggtttctgaagagtacc

SEQ ID NO: 3255266 - DNA, 25 bp, Homo sapien
caaatgggagtaactgctgtgagct

SEQ ID NO: 3255267 - DNA, 25 bp, Homo sapien
gatgcagctccaagactacgtaaaa

SEQ ID NO: 3255268 - DNA, 25 bp, Homo sapien
aaatctggcctacagttgaaactgc

SEQ ID NO: 3255269 - DNA, 25 bp, Homo sapien
aaggcttatccccaggctgttgaga

SEQ ID NO: 3255270 - DNA, 25 bp, Homo sapien
cagcgggtcctttgtagagaatcga

SEQ ID NO: 3255271 - DNA, 25 bp, Homo sapien
aactgtcaatggcatacctggctga

SEQ ID NO: 3255272 - DNA, 25 bp, Homo sapien
tcttgtctatttggccgaggtgctc

SEQ ID NO: 3255273 - DNA, 25 bp, Homo sapien
aatgaaaattgggaggagctgcacc

SEQ ID NO: 3255274 - DNA, 25 bp, Homo sapien
taggtgcatgatcccaaaatatgac

SEQ ID NO: 3255275 - DNA, 25 bp, Homo sapien
tcacatgataaaatccttaggagat

SEQ ID NO: 3255276 - DNA, 25 bp, Homo sapien
ccttctatacagtttgtgatgggta

SEQ ID NO: 3255277 - DNA, 25 bp, Homo sapien
tctttatatactgccgcagtaggtg

SEQ ID NO: 3255278 - DNA, 25 bp, Homo sapien
cctcaagctggcaaacaatacatgg

SEQ ID NO: 3255279 - DNA, 25 bp, Homo sapien
gggaccatgattttgcacaggacac

SEQ ID NO: 3255280 - DNA, 25 bp, Homo sapien
caatacatgggcaaagataaggcct

SEQ ID NO: 3255281 - DNA, 25 bp, Homo sapien
gataaggccttttacattacactgc

SEQ ID NO: 3255282 - DNA, 25 bp, Homo sapien
ggtttcttcataacaagtagatggg

SEQ ID NO: 3255283 - DNA, 25 bp, Homo sapien
gataatgcaatgttactacattgcc

SEQ ID NO: 3255284 - DNA, 25 bp, Homo sapien
tactacattgccacatccctctgtg

SEQ ID NO: 3255285 - DNA, 25 bp, Homo sapien
ccctctgtgcaagtgaaaaagatgt

SEQ ID NO: 3255286 - DNA, 25 bp, Homo sapien
tggcgtcttaggactttcagatagc

SEQ ID NO: 3255287 - DNA, 25 bp, Homo sapien
gactttcagatagcttaggaaaggt

SEQ ID NO: 3255288 - DNA, 25 bp, Homo sapien
catttggcgtcttaggactttcaga

SEQ ID NO: 3255289 - DNA, 25 bp, Homo sapien
gcctctgcatttggcgtcttaggac

SEQ ID NO: 3255290 - DNA, 25 bp, Homo sapien
ccaaaggcaagaggcacggtgtgtc

SEQ ID NO: 3255291 - DNA, 25 bp, Homo sapien
aaataccaatcacatagtcagaggg

SEQ ID NO: 3255292 - DNA, 25 bp, Homo sapien
aagatgactgccacgcaccaaaggc

SEQ ID NO: 3255293 - DNA, 25 bp, Homo sapien
tatcgagtttgggagaatccacatc

SEQ ID NO: 3255294 - DNA, 25 bp, Homo sapien
tatgcaaagcattaagcccaatggc

SEQ ID NO: 3255295 - DNA, 25 bp, Homo sapien
gagtggcagggtttacagttccaac

SEQ ID NO: 3255296 - DNA, 25 bp, Homo sapien
tgccgacaaatgtacccatgcttgg

SEQ ID NO: 3255297 - DNA, 25 bp, Homo sapien
tatagctgctgtacccatgaagatc

SEQ ID NO: 3255298 - DNA, 25 bp, Homo sapien
accctgtctacagggagtattttgg

SEQ ID NO: 3255299 - DNA, 25 bp, Homo sapien
catgagttcattagtcggcaggaag

SEQ ID NO: 3255300 - DNA, 25 bp, Homo sapien
tgaatctgatgaggcaaaggtctgt

SEQ ID NO: 3255301 - DNA, 25 bp, Homo sapien
gacactgctgtgcacatcaactgag

SEQ ID NO: 3255302 - DNA, 25 bp, Homo sapien
gatggaaagagtgcctgcatgagca

SEQ ID NO: 3255303 - DNA, 25 bp, Homo sapien
caattggcctgtcatgtgcccggga

SEQ ID NO: 3255304 - DNA, 25 bp, Homo sapien
gtgagtacaatgagcactgcccagg

SEQ ID NO: 3255305 - DNA, 25 bp, Homo sapien
tgcttgtcaatcacggagcaccttg

SEQ ID NO: 3255306 - DNA, 25 bp, Homo sapien
gatcacagagttggtgaacagctgc

SEQ ID NO: 3255307 - DNA, 25 bp, Homo sapien
caggtctggagaagctatatggctt

SEQ ID NO: 3255308 - DNA, 25 bp, Homo sapien
gaacagctgcaactgggtccaatct

SEQ ID NO: 3255309 - DNA, 25 bp, Homo sapien
atagtcagtatctgctgccacttga

SEQ ID NO: 3255310 - DNA, 25 bp, Homo sapien
ttctacatcagaaccctgggcgtca

SEQ ID NO: 3255311 - DNA, 25 bp, Homo sapien
tgcagatgtaagtcaaaaccgtggc

SEQ ID NO: 3255312 - DNA, 25 bp, Homo sapien
tcagcaaggcgctgcacaaagaggc

SEQ ID NO: 3255313 - DNA, 25 bp, Homo sapien
aaaccgtggcaagtcccatgggctc

SEQ ID NO: 3255314 - DNA, 25 bp, Homo sapien
tgtaacgggatacattaactaccca

SEQ ID NO: 3255315 - DNA, 25 bp, Homo sapien
ccaaagacaccaagataagacgggc

SEQ ID NO: 3255316 - DNA, 25 bp, Homo sapien
taaagtcagaggtattgtaacggga

SEQ ID NO: 3255317 - DNA, 25 bp, Homo sapien
tttcttggctttacagagccccaaa

SEQ ID NO: 3255318 - DNA, 25 bp, Homo sapien
aagacaatgccaggctggttttcga

SEQ ID NO: 3255319 - DNA, 25 bp, Homo sapien
gccaggctggttttcgagtttattg

SEQ ID NO: 3255320 - DNA, 25 bp, Homo sapien
cgagtttattgtcggcacgctcccc

SEQ ID NO: 3255321 - DNA, 25 bp, Homo sapien
cccgatggcaggcagcatccgaggc

SEQ ID NO: 3255322 - DNA, 25 bp, Homo sapien
ccggcaggccggattcgggtgccag

SEQ ID NO: 3255323 - DNA, 25 bp, Homo sapien
tgccaggtcccggcgaaggggcgtc

SEQ ID NO: 3255324 - DNA, 25 bp, Homo sapien
cggcaggccggattcgggtgccagg

SEQ ID NO: 3255325 - DNA, 25 bp, Homo sapien
tacaccgccggccgcagaccgccgg

SEQ ID NO: 3255326 - DNA, 25 bp, Homo sapien
aggattcggcttcggtcctggccca

SEQ ID NO: 3255327 - DNA, 25 bp, Homo sapien
ctgccttgtaccgggtcccgcggag

SEQ ID NO: 3255328 - DNA, 25 bp, Homo sapien
ccacatttagccatgccgcaggcaa

SEQ ID NO: 3255329 - DNA, 25 bp, Homo sapien
tagcgagcgaggtccacatttagcc

SEQ ID NO: 3255330 - DNA, 25 bp, Homo sapien
gaagaagaccatattgccaggtccc

SEQ ID NO: 3255331 - DNA, 25 bp, Homo sapien
gagcagcgtcactgggaagtacagt

SEQ ID NO: 3255332 - DNA, 25 bp, Homo sapien
tctacggtccggaaggaagacatat

SEQ ID NO: 3255333 - DNA, 25 bp, Homo sapien
gccaggtcccgcacaatcagtgact

SEQ ID NO: 3255334 - DNA, 25 bp, Homo sapien
ccagtatgctgcacggaggagatgt

SEQ ID NO: 3255335 - DNA, 25 bp, Homo sapien
cgtgcacggacagcggccagtatgc

SEQ ID NO: 3255336 - DNA, 25 bp, Homo sapien
ctgttggcggccaaaggtcggcgtg

SEQ ID NO: 3255337 - DNA, 25 bp, Homo sapien
ccaaaggtcggcgtgcacggacagc

SEQ ID NO: 3255338 - DNA, 25 bp, Homo sapien
cagggaccacgtcccagccgccctt

SEQ ID NO: 3255339 - DNA, 25 bp, Homo sapien
cgcggaagcgcgcagtgaggctagt

SEQ ID NO: 3255340 - DNA, 25 bp, Homo sapien
gctggagcgtggctaaggcagggac

SEQ ID NO: 3255341 - DNA, 25 bp, Homo sapien
ctttcccgccctgcggcgcaggccc

SEQ ID NO: 3255342 - DNA, 25 bp, Homo sapien
gcccagctcggcgtgtagagctcta

SEQ ID NO: 3255343 - DNA, 25 bp, Homo sapien
gtgtagagctctaccccgcgcggcg

SEQ ID NO: 3255344 - DNA, 25 bp, Homo sapien
atagagcctcgagatgcgccgggcc

SEQ ID NO: 3255345 - DNA, 25 bp, Homo sapien
tgcagtgtcgctgcgagcccggctg

SEQ ID NO: 3255346 - DNA, 25 bp, Homo sapien
cgaaaatcgggaatgtaatgttttg

SEQ ID NO: 3255347 - DNA, 25 bp, Homo sapien
ggaatccgagggttcctgatgactg

SEQ ID NO: 3255348 - DNA, 25 bp, Homo sapien
ccaggctggcgtggaatccgagggt

SEQ ID NO: 3255349 - DNA, 25 bp, Homo sapien
cccgcgcttccgaaaatcgggaatg

SEQ ID NO: 3255350 - DNA, 25 bp, Homo sapien
cagaactgcgtagactcgagtaggt

SEQ ID NO: 3255351 - DNA, 25 bp, Homo sapien
cccagatctgttccggaggatgcag

SEQ ID NO: 3255352 - DNA, 25 bp, Homo sapien
gaggatgcagatcagaaccagagag

SEQ ID NO: 3255353 - DNA, 25 bp, Homo sapien
gacaaagttgcagcgttgtagcgcg

SEQ ID NO: 3255354 - DNA, 25 bp, Homo sapien
tttgccggttgtgagagaacaagag

SEQ ID NO: 3255355 - DNA, 25 bp, Homo sapien
tgtctgctggtaatttgccggttgt

SEQ ID NO: 3255356 - DNA, 25 bp, Homo sapien
gccgatgaccactggaggaagaaca

SEQ ID NO: 3255357 - DNA, 25 bp, Homo sapien
aacaagaggagccttttagaatact

SEQ ID NO: 3255358 - DNA, 25 bp, Homo sapien
ctggtaagcagctctacctggaaaa

SEQ ID NO: 3255359 - DNA, 25 bp, Homo sapien
aaaattagtcctgaagtactgtttg

SEQ ID NO: 3255360 - DNA, 25 bp, Homo sapien
agcagctctacctggaaaattagtc

SEQ ID NO: 3255361 - DNA, 25 bp, Homo sapien
tttgtaaattacactgacagtactg

SEQ ID NO: 3255362 - DNA, 25 bp, Homo sapien
atttatgtccaccagcaaaattgtt

SEQ ID NO: 3255363 - DNA, 25 bp, Homo sapien
catttatgtccaccagcaaaattgt

SEQ ID NO: 3255364 - DNA, 25 bp, Homo sapien
tagctgctttggctacctctcctgc

SEQ ID NO: 3255365 - DNA, 25 bp, Homo sapien
agaacttcacccatttttgtaagag

SEQ ID NO: 3255366 - DNA, 25 bp, Homo sapien
caagctgtgcatttgaagagtccat

SEQ ID NO: 3255367 - DNA, 25 bp, Homo sapien
cttgtttagctgctttggctacctc

SEQ ID NO: 3255368 - DNA, 25 bp, Homo sapien
ggcttttgcagtcctgatcaccttt

SEQ ID NO: 3255369 - DNA, 25 bp, Homo sapien
tggtcctgttgactaacacaccttg

SEQ ID NO: 3255370 - DNA, 25 bp, Homo sapien
tgttgactaacacaccttggccata

SEQ ID NO: 3255371 - DNA, 25 bp, Homo sapien
actaacacaccttggccatatggcc

SEQ ID NO: 3255372 - DNA, 25 bp, Homo sapien
agctaacccttctcttgaggcctct

SEQ ID NO: 3255373 - DNA, 25 bp, Homo sapien
cattaggctccatgtcattcgctcc

SEQ ID NO: 3255374 - DNA, 25 bp, Homo sapien
gctccattaggctctatgtcatcca

SEQ ID NO: 3255375 - DNA, 25 bp, Homo sapien
cattcgctccatgacagtggctatt

SEQ ID NO: 3255376 - DNA, 25 bp, Homo sapien
ccctgttaattgcatcaccgaccag

SEQ ID NO: 3255377 - DNA, 25 bp, Homo sapien
aggtagtcactgcttcattccccat

SEQ ID NO: 3255378 - DNA, 25 bp, Homo sapien
cttcaaacaggtagtcactgcttca

SEQ ID NO: 3255379 - DNA, 25 bp, Homo sapien
ttcaaacaggtagtcactgcttcat

SEQ ID NO: 3255380 - DNA, 25 bp, Homo sapien
aacaggtagtcactgcttcattccc

SEQ ID NO: 3255381 - DNA, 25 bp, Homo sapien
ttttcaaagccatctcaaaggagct

SEQ ID NO: 3255382 - DNA, 25 bp, Homo sapien
ggcatcaccccacaagtactcagaa

SEQ ID NO: 3255383 - DNA, 25 bp, Homo sapien
ggataattgcatatggagaccttgg

SEQ ID NO: 3255384 - DNA, 25 bp, Homo sapien
gagaccttggttccagtcgcgacta

SEQ ID NO: 3255385 - DNA, 25 bp, Homo sapien
ccttgtgaaaggagaacacctgagc

SEQ ID NO: 3255386 - DNA, 25 bp, Homo sapien
gaccagtgagttctttcgtatccaa

SEQ ID NO: 3255387 - DNA, 25 bp, Homo sapien
tactctacgataggctcagctgggt

SEQ ID NO: 3255388 - DNA, 25 bp, Homo sapien
cagcttttagctttgaccggaccag

SEQ ID NO: 3255389 - DNA, 25 bp, Homo sapien
tagacttgtcttgcactgactgcaa

SEQ ID NO: 3255390 - DNA, 25 bp, Homo sapien
taaggcccaacaactgacataaagg

SEQ ID NO: 3255391 - DNA, 25 bp, Homo sapien
gcagtgtcctgtaaagagcacagat

SEQ ID NO: 3255392 - DNA, 25 bp, Homo sapien
ggtgccctttgctgctcgcctgtat

SEQ ID NO: 3255393 - DNA, 25 bp, Homo sapien
tgaaaacaatggaagcgctgaatcc

SEQ ID NO: 3255394 - DNA, 25 bp, Homo sapien
gaagcgctgaatccagtaaaccaaa

SEQ ID NO: 3255395 - DNA, 25 bp, Homo sapien
tttgaactttcaaaaccgtgagtga

SEQ ID NO: 3255396 - DNA, 25 bp, Homo sapien
tcaaaaccgtgagtgattttccact

SEQ ID NO: 3255397 - DNA, 25 bp, Homo sapien
cagaggcaagaggtgtctggtgaga

SEQ ID NO: 3255398 - DNA, 25 bp, Homo sapien
tctggtgagagggagtggctgagtg

SEQ ID NO: 3255399 - DNA, 25 bp, Homo sapien
agggagtggctgagtgaggtgacac

SEQ ID NO: 3255400 - DNA, 25 bp, Homo sapien
ctacagaggcaagaggtgtctggtg

SEQ ID NO: 3255401 - DNA, 25 bp, Homo sapien
ctttcccatcaattagtataatggg

SEQ ID NO: 3255402 - DNA, 25 bp, Homo sapien
tagtgttcgatgatgtcttctactg

SEQ ID NO: 3255403 - DNA, 25 bp, Homo sapien
aattcttgtagtgttcgatgatgtc

SEQ ID NO: 3255404 - DNA, 25 bp, Homo sapien
tcaattagtataatgggaaaattct

SEQ ID NO: 3255405 - DNA, 25 bp, Homo sapien
gaatgatcttccctaaagagcgaag

SEQ ID NO: 3255406 - DNA, 25 bp, Homo sapien
tactcagagtctcccatggctaggg

SEQ ID NO: 3255407 - DNA, 25 bp, Homo sapien
tagatcctccttagcaagcctgtga

SEQ ID NO: 3255408 - DNA, 25 bp, Homo sapien
tcagagaagtggaccgccttactca

SEQ ID NO: 3255409 - DNA, 25 bp, Homo sapien
ttcaccaggtcgctcagaggcttcc

SEQ ID NO: 3255410 - DNA, 25 bp, Homo sapien
agggatgacgttctgttgggagcag

SEQ ID NO: 3255411 - DNA, 25 bp, Homo sapien
tccgttgaggcttaagaacttcacc

SEQ ID NO: 3255412 - DNA, 25 bp, Homo sapien
tgtgctgtgaaaattgtccgttgag

SEQ ID NO: 3255413 - DNA, 25 bp, Homo sapien
caaaacatagggctcttccttggat

SEQ ID NO: 3255414 - DNA, 25 bp, Homo sapien
ccagggcaaactgctgattcctctc

SEQ ID NO: 3255415 - DNA, 25 bp, Homo sapien
ccaggaagcgtatttttacattgta

SEQ ID NO: 3255416 - DNA, 25 bp, Homo sapien
ttgtggaacaatctcggaccaagaa

SEQ ID NO: 3255417 - DNA, 25 bp, Homo sapien
tgatgttgcatcagtcttgagacac

SEQ ID NO: 3255418 - DNA, 25 bp, Homo sapien
catttgacctgatgacaagtattcc

SEQ ID NO: 3255419 - DNA, 25 bp, Homo sapien
gataatgatgcatgataacttcccc

SEQ ID NO: 3255420 - DNA, 25 bp, Homo sapien
taagcaatctcgtatagttctctgc

SEQ ID NO: 3255421 - DNA, 25 bp, Homo sapien
cctggcggctgtattctccaatgta

SEQ ID NO: 3255422 - DNA, 25 bp, Homo sapien
gcggctgtattctccaatgtaccat

SEQ ID NO: 3255423 - DNA, 25 bp, Homo sapien
tggcggctgtattctccaatgtacc

SEQ ID NO: 3255424 - DNA, 25 bp, Homo sapien
tgcctggcggctgtattctccaatg

SEQ ID NO: 3255425 - DNA, 25 bp, Homo sapien
cttggggcagagagacagaaaaagt

SEQ ID NO: 3255426 - DNA, 25 bp, Homo sapien
gatgcttggggcagagagacagaaa

SEQ ID NO: 3255427 - DNA, 25 bp, Homo sapien
agatgcttggggcagagagacagaa

SEQ ID NO: 3255428 - DNA, 25 bp, Homo sapien
ggggcagagagacagaaaaagttac

SEQ ID NO: 3255429 - DNA, 25 bp, Homo sapien
taataagcctgctatctatcagtgc

SEQ ID NO: 3255430 - DNA, 25 bp, Homo sapien
ttcagctgctgaggcttgttgaggt

SEQ ID NO: 3255431 - DNA, 25 bp, Homo sapien
gaattctgaagtctatgggaatctg

SEQ ID NO: 3255432 - DNA, 25 bp, Homo sapien
tactgtttgtgaagcctacactgcc

SEQ ID NO: 3255433 - DNA, 25 bp, Homo sapien
cagtgagtaatagcaggatatggga

SEQ ID NO: 3255434 - DNA, 25 bp, Homo sapien
cttagaaatcttcacgaactctgta

SEQ ID NO: 3255435 - DNA, 25 bp, Homo sapien
cacgaactctgtagcaggacagtga

SEQ ID NO: 3255436 - DNA, 25 bp, Homo sapien
tagcaggacagtgagtaatagcagg

SEQ ID NO: 3255437 - DNA, 25 bp, Homo sapien
tagggcagtatattttcgtgagggc

SEQ ID NO: 3255438 - DNA, 25 bp, Homo sapien
tatagggcagtatattttcgtgagg

SEQ ID NO: 3255439 - DNA, 25 bp, Homo sapien
atttatagggcagtatattttcgtg

SEQ ID NO: 3255440 - DNA, 25 bp, Homo sapien
ttgtgtatttatagggcagtatatt

SEQ ID NO: 3255441 - DNA, 25 bp, Homo sapien
tctctttccttagggctcccagagt

SEQ ID NO: 3255442 - DNA, 25 bp, Homo sapien
ctcctctctttccttagggctccca

SEQ ID NO: 3255443 - DNA, 25 bp, Homo sapien
ctctctttccttagggctcccagag

SEQ ID NO: 3255444 - DNA, 25 bp, Homo sapien
ctttccttagggctcccagagtcat

SEQ ID NO: 3255445 - DNA, 25 bp, Homo sapien
cagtcctgcctggataaaaggtaaa

SEQ ID NO: 3255446 - DNA, 25 bp, Homo sapien
aaagtgagcctgacacctcatggaa

SEQ ID NO: 3255447 - DNA, 25 bp, Homo sapien
tcaagtacaagacagaccaagggat

SEQ ID NO: 3255448 - DNA, 25 bp, Homo sapien
taatagcatatatcaacagtggcag

SEQ ID NO: 3255449 - DNA, 25 bp, Homo sapien
taaaaattccagttatgtactgatt

SEQ ID NO: 3255450 - DNA, 25 bp, Homo sapien
ttaaaatcagttacagattgattta

SEQ ID NO: 3255451 - DNA, 25 bp, Homo sapien
aaaaattccagttatgtactgattg

SEQ ID NO: 3255452 - DNA, 25 bp, Homo sapien
cttttaaaatcagttacagattgat

SEQ ID NO: 3255453 - DNA, 25 bp, Homo sapien
tgcttgactggactcatatctgtga

SEQ ID NO: 3255454 - DNA, 25 bp, Homo sapien
gtgcttgactggactcatatctgtg

SEQ ID NO: 3255455 - DNA, 25 bp, Homo sapien
actgtggttgcttgtcgtgaatgaa

SEQ ID NO: 3255456 - DNA, 25 bp, Homo sapien
ctgtggttgcttgtcgtgaatgaag

SEQ ID NO: 3255457 - DNA, 25 bp, Homo sapien
tctaacagatgagttgattcaggct

SEQ ID NO: 3255458 - DNA, 25 bp, Homo sapien
agtggaatctcttgagtattttggt

SEQ ID NO: 3255459 - DNA, 25 bp, Homo sapien
tttctaacagatgagttgattcagg

SEQ ID NO: 3255460 - DNA, 25 bp, Homo sapien
tggaatctcttgagtattttggttt

SEQ ID NO: 3255461 - DNA, 25 bp, Homo sapien
ggctgttcaaagtgctcaatcggat

SEQ ID NO: 3255462 - DNA, 25 bp, Homo sapien
tttacagatgaggtcccaaagggtc

SEQ ID NO: 3255463 - DNA, 25 bp, Homo sapien
tctgaaggctaaactaaccctgagc

SEQ ID NO: 3255464 - DNA, 25 bp, Homo sapien
cagtgattgctctcaggcttgtcaa

SEQ ID NO: 3255465 - DNA, 25 bp, Homo sapien
gcacctggcccccatccctatttta

SEQ ID NO: 3255466 - DNA, 25 bp, Homo sapien
acctggcccccatccctattttatg

SEQ ID NO: 3255467 - DNA, 25 bp, Homo sapien
ctgcacctggcccccatccctattt

SEQ ID NO: 3255468 - DNA, 25 bp, Homo sapien
cctggcccccatccctattttatgg

SEQ ID NO: 3255469 - DNA, 25 bp, Homo sapien
cacttaagtcccttaagcttatctg

SEQ ID NO: 3255470 - DNA, 25 bp, Homo sapien
acttaagtcccttaagcttatctga

SEQ ID NO: 3255471 - DNA, 25 bp, Homo sapien
tcacttaagtcccttaagcttatct

SEQ ID NO: 3255472 - DNA, 25 bp, Homo sapien
ctcacttaagtcccttaagcttatc

SEQ ID NO: 3255473 - DNA, 25 bp, Homo sapien
tccacggttttagcctcttacatct

SEQ ID NO: 3255474 - DNA, 25 bp, Homo sapien
agtgtcggatctgcaagcaacaggc

SEQ ID NO: 3255475 - DNA, 25 bp, Homo sapien
aggcaactgtaccaaggttccacgg

SEQ ID NO: 3255476 - DNA, 25 bp, Homo sapien
tcagatgctagatcccagtgtcgga

SEQ ID NO: 3255477 - DNA, 25 bp, Homo sapien
tcactaatgatgatattaccaccca

SEQ ID NO: 3255478 - DNA, 25 bp, Homo sapien
gattacatgggacttgggcatcact

SEQ ID NO: 3255479 - DNA, 25 bp, Homo sapien
ctggcagagacggagcaggcactct

SEQ ID NO: 3255480 - DNA, 25 bp, Homo sapien
tgcatggttcggctgcagaagctct

SEQ ID NO: 3255481 - DNA, 25 bp, Homo sapien
aatttgaaagcacatctctctttca

SEQ ID NO: 3255482 - DNA, 25 bp, Homo sapien
agccatgtcatttatcgtggtatcc

SEQ ID NO: 3255483 - DNA, 25 bp, Homo sapien
tgtcatttatcgtggtatccccagt

SEQ ID NO: 3255484 - DNA, 25 bp, Homo sapien
catgtcatttatcgtggtatcccca

SEQ ID NO: 3255485 - DNA, 25 bp, Homo sapien
gctcacctgggatccaaactcattg

SEQ ID NO: 3255486 - DNA, 25 bp, Homo sapien
aaactcattgctactgggtcccaag

SEQ ID NO: 3255487 - DNA, 25 bp, Homo sapien
tctgaagtcatactgccaaaagtgg

SEQ ID NO: 3255488 - DNA, 25 bp, Homo sapien
ggtcccaagatactgttctttccag

SEQ ID NO: 3255489 - DNA, 25 bp, Homo sapien
tctgagataaaggtggcctgctgct

SEQ ID NO: 3255490 - DNA, 25 bp, Homo sapien
tgtgtctctgagataaaggtggcct

SEQ ID NO: 3255491 - DNA, 25 bp, Homo sapien
cttcttcggaagtgttatgagaggc

SEQ ID NO: 3255492 - DNA, 25 bp, Homo sapien
ggtacttcttcggaagtgttatgag

SEQ ID NO: 3255493 - DNA, 25 bp, Homo sapien
ctgtgtggagagtcgcagtagggtc

SEQ ID NO: 3255494 - DNA, 25 bp, Homo sapien
agctttgggttgaaaatgctagttt

SEQ ID NO: 3255495 - DNA, 25 bp, Homo sapien
gaccgatctggtctggcactgtttt

SEQ ID NO: 3255496 - DNA, 25 bp, Homo sapien
cggagcagaccgatctggtctggca

SEQ ID NO: 3255497 - DNA, 25 bp, Homo sapien
ctgcggagcagaccgatctggtctg

SEQ ID NO: 3255498 - DNA, 25 bp, Homo sapien
agcagaccgatctggtctggcactg

SEQ ID NO: 3255499 - DNA, 25 bp, Homo sapien
ttgttctttcttacggatgcatctc

SEQ ID NO: 3255500 - DNA, 25 bp, Homo sapien
cttgttctttcttacggatgcatct

SEQ ID NO: 3255501 - DNA, 25 bp, Homo sapien
caaggaggttggactaaatcagtga

SEQ ID NO: 3255502 - DNA, 25 bp, Homo sapien
tatctctaaaaatgggcgtggtgta

SEQ ID NO: 3255503 - DNA, 25 bp, Homo sapien
ggttcaccaccccatgtcattaagg

SEQ ID NO: 3255504 - DNA, 25 bp, Homo sapien
actgtcccctggaagtcccgtggtg

SEQ ID NO: 3255505 - DNA, 25 bp, Homo sapien
tgtgatgtaggatatggaattagaa

SEQ ID NO: 3255506 - DNA, 25 bp, Homo sapien
ttttcatcctgcattataatcttct

SEQ ID NO: 3255507 - DNA, 25 bp, Homo sapien
tctgtcccttccatacaagcagctt

SEQ ID NO: 3255508 - DNA, 25 bp, Homo sapien
tcacattgtgatgtaggatatggaa

SEQ ID NO: 3255509 - DNA, 25 bp, Homo sapien
aatgttttggcttctgacgtccttg

SEQ ID NO: 3255510 - DNA, 25 bp, Homo sapien
tgttttggcttctgacgtccttgga

SEQ ID NO: 3255511 - DNA, 25 bp, Homo sapien
taatgttttggcttctgacgtcctt

SEQ ID NO: 3255512 - DNA, 25 bp, Homo sapien
ttaatgttttggcttctgacgtcct

SEQ ID NO: 3255513 - DNA, 25 bp, Homo sapien
gtgactatgacactatctgatgtct

SEQ ID NO: 3255514 - DNA, 25 bp, Homo sapien
cagttgtgactatgacactatctga

SEQ ID NO: 3255515 - DNA, 25 bp, Homo sapien
tctcttcagttgtgactatgacact

SEQ ID NO: 3255516 - DNA, 25 bp, Homo sapien
cttcagttgtgactatgacactatc

SEQ ID NO: 3255517 - DNA, 25 bp, Homo sapien
ccaaggataaagccgtaagtccctg

SEQ ID NO: 3255518 - DNA, 25 bp, Homo sapien
gataaagccgtaagtccctgggctc

SEQ ID NO: 3255519 - DNA, 25 bp, Homo sapien
caaggataaagccgtaagtccctgg

SEQ ID NO: 3255520 - DNA, 25 bp, Homo sapien
tctttccaacctcgtctgtgtgttc

SEQ ID NO: 3255521 - DNA, 25 bp, Homo sapien
tgtgtgttccaggtcggctgtccaa

SEQ ID NO: 3255522 - DNA, 25 bp, Homo sapien
tagaggtcctggtgtctaacggaag

SEQ ID NO: 3255523 - DNA, 25 bp, Homo sapien
tgtccaatggagatagaggtcctgg

SEQ ID NO: 3255524 - DNA, 25 bp, Homo sapien
tgtctcttccatccgaagctcaggg

SEQ ID NO: 3255525 - DNA, 25 bp, Homo sapien
tcagattcctttataggccgggctg

SEQ ID NO: 3255526 - DNA, 25 bp, Homo sapien
gattcctttataggccgggctggta

SEQ ID NO: 3255527 - DNA, 25 bp, Homo sapien
gaagctcagggtcatcatagtcatc

SEQ ID NO: 3255528 - DNA, 25 bp, Homo sapien
ctgtggccttttgctccatccagga

SEQ ID NO: 3255529 - DNA, 25 bp, Homo sapien
ccatccaggactgcagcaaagtttc

SEQ ID NO: 3255530 - DNA, 25 bp, Homo sapien
catccaggactgcagcaaagtttct

SEQ ID NO: 3255531 - DNA, 25 bp, Homo sapien
ccaggactgcagcaaagtttctttc

SEQ ID NO: 3255532 - DNA, 25 bp, Homo sapien
aggcttgttcatcctctggtactgg

SEQ ID NO: 3255533 - DNA, 25 bp, Homo sapien
agaggcttgttcatcctctggtact

SEQ ID NO: 3255534 - DNA, 25 bp, Homo sapien
ctagaagaggcttgttcatcctctg

SEQ ID NO: 3255535 - DNA, 25 bp, Homo sapien
ccagtctagaagaggcttgttcatc

SEQ ID NO: 3255536 - DNA, 25 bp, Homo sapien
aaagacagattggcttcctagggcc

SEQ ID NO: 3255537 - DNA, 25 bp, Homo sapien
tgttgccatgggatattcacattca

SEQ ID NO: 3255538 - DNA, 25 bp, Homo sapien
gttgccatgggatattcacattcaa

SEQ ID NO: 3255539 - DNA, 25 bp, Homo sapien
tgtggcactattgatgcgaggccat

SEQ ID NO: 3255540 - DNA, 25 bp, Homo sapien
ggcactattgatgcgaggccatgac

SEQ ID NO: 3255541 - DNA, 25 bp, Homo sapien
tggcactattgatgcgaggccatga

SEQ ID NO: 3255542 - DNA, 25 bp, Homo sapien
ctgtggcactattgatgcgaggcca

SEQ ID NO: 3255543 - DNA, 25 bp, Homo sapien
tggttaacagttggcgccctttcaa

SEQ ID NO: 3255544 - DNA, 25 bp, Homo sapien
ccttgtggttaacagttggcgccct

SEQ ID NO: 3255545 - DNA, 25 bp, Homo sapien
agagcccttgtggttaacagttggc

SEQ ID NO: 3255546 - DNA, 25 bp, Homo sapien
tgtggttaacagttggcgccctttc

SEQ ID NO: 3255547 - DNA, 25 bp, Homo sapien
tgtcaacactgtggcaagaaagtgc

SEQ ID NO: 3255548 - DNA, 25 bp, Homo sapien
tatataagccggtgtcaacactgtg

SEQ ID NO: 3255549 - DNA, 25 bp, Homo sapien
taagccggtgtcaacactgtggcaa

SEQ ID NO: 3255550 - DNA, 25 bp, Homo sapien
ccggtgtatataagccggtgtcaac

SEQ ID NO: 3255551 - DNA, 25 bp, Homo sapien
ccccttgagtgtggtatgcagtcct

SEQ ID NO: 3255552 - DNA, 25 bp, Homo sapien
ctttgatgaagtagacagggcatgc

SEQ ID NO: 3255553 - DNA, 25 bp, Homo sapien
gccttctacttatccatgggaacag

SEQ ID NO: 3255554 - DNA, 25 bp, Homo sapien
ccaggcaccgactgttagtccagaa

SEQ ID NO: 3255555 - DNA, 25 bp, Homo sapien
agtgcccaacaaagagaacttaagg

SEQ ID NO: 3255556 - DNA, 25 bp, Homo sapien
ggaggttaatgtaagaggtcagaca

SEQ ID NO: 3255557 - DNA, 25 bp, Homo sapien
caggactatgtctcgttcatctttg

SEQ ID NO: 3255558 - DNA, 25 bp, Homo sapien
tactgagcatgcaggtatccaggac

SEQ ID NO: 3255559 - DNA, 25 bp, Homo sapien
ttttggcagactgaagttctggaat

SEQ ID NO: 3255560 - DNA, 25 bp, Homo sapien
gaatttcaaatcgttggatccttct

SEQ ID NO: 3255561 - DNA, 25 bp, Homo sapien
ttctttagttgtctttctattgccc

SEQ ID NO: 3255562 - DNA, 25 bp, Homo sapien
ctgttttttggcagactgaagttct

SEQ ID NO: 3255563 - DNA, 25 bp, Homo sapien
agcaccttcaggtccaacactttgc

SEQ ID NO: 3255564 - DNA, 25 bp, Homo sapien
ttcttgagcacccttccagcacctt

SEQ ID NO: 3255565 - DNA, 25 bp, Homo sapien
ccagcaccttcaggtccaacacttt

SEQ ID NO: 3255566 - DNA, 25 bp, Homo sapien
caccttcaggtccaacactttgcat

SEQ ID NO: 3255567 - DNA, 25 bp, Homo sapien
aaggtgcatccatagagtttctgtg

SEQ ID NO: 3255568 - DNA, 25 bp, Homo sapien
gattggtagtccattctaggcaaca

SEQ ID NO: 3255569 - DNA, 25 bp, Homo sapien
aacagactctgttgatgattggtag

SEQ ID NO: 3255570 - DNA, 25 bp, Homo sapien
caagagtcgagcaaggctttgagct

SEQ ID NO: 3255571 - DNA, 25 bp, Homo sapien
gcaacttgagatgcagattgctcat

SEQ ID NO: 3255572 - DNA, 25 bp, Homo sapien
agtccacgcaaactgaacttcctgc

SEQ ID NO: 3255573 - DNA, 25 bp, Homo sapien
ttgctcatgcagtctcctcggcctg

SEQ ID NO: 3255574 - DNA, 25 bp, Homo sapien
tgctaggcccattccctctcttctc

SEQ ID NO: 3255575 - DNA, 25 bp, Homo sapien
tggtcatgcctgaaagattctggat

SEQ ID NO: 3255576 - DNA, 25 bp, Homo sapien
tctggatgcgtgatagaaaacaaca

SEQ ID NO: 3255577 - DNA, 25 bp, Homo sapien
taaatgaacctagacaaagagaggc

SEQ ID NO: 3255578 - DNA, 25 bp, Homo sapien
tataggtccatagacgtgttcctgg

SEQ ID NO: 3255579 - DNA, 25 bp, Homo sapien
tgggctcaacttctcattccctggg

SEQ ID NO: 3255580 - DNA, 25 bp, Homo sapien
tcttcagtgaagactgcgatgcctg

SEQ ID NO: 3255581 - DNA, 25 bp, Homo sapien
taagacggcacctagaatgtggtcc

SEQ ID NO: 3255582 - DNA, 25 bp, Homo sapien
ttccctgggacgaactgtgcacagt

SEQ ID NO: 3255583 - DNA, 25 bp, Homo sapien
tgctgccagtcaatcccaagtcatg

SEQ ID NO: 3255584 - DNA, 25 bp, Homo sapien
gaccacggcagtgcaaaacctctga

SEQ ID NO: 3255585 - DNA, 25 bp, Homo sapien
tgtttggggaccacggcagtgcaaa

SEQ ID NO: 3255586 - DNA, 25 bp, Homo sapien
caatcccaagtcatgcttggtgttt

SEQ ID NO: 3255587 - DNA, 25 bp, Homo sapien
cttcatcagctttgttgcgactgat

SEQ ID NO: 3255588 - DNA, 25 bp, Homo sapien
tgcattctctcaagtcgacagcgtt

SEQ ID NO: 3255589 - DNA, 25 bp, Homo sapien
tctctcaagtcgacagcgttattct

SEQ ID NO: 3255590 - DNA, 25 bp, Homo sapien
gacagcgttattctttgtgcatgtg

SEQ ID NO: 3255591 - DNA, 25 bp, Homo sapien
ggtcattagtaaggcccataagaag

SEQ ID NO: 3255592 - DNA, 25 bp, Homo sapien
actccccttggataatacttgcatt

SEQ ID NO: 3255593 - DNA, 25 bp, Homo sapien
catgttgaagtcactccccttggat

SEQ ID NO: 3255594 - DNA, 25 bp, Homo sapien
gagaaacagagtccatcagggtcat

SEQ ID NO: 3255595 - DNA, 25 bp, Homo sapien
tgtctccaaaatccgtgttctttct

SEQ ID NO: 3255596 - DNA, 25 bp, Homo sapien
tacatggctaggagatggcaggttt

SEQ ID NO: 3255597 - DNA, 25 bp, Homo sapien
tagactacgctcttctgcacagcat

SEQ ID NO: 3255598 - DNA, 25 bp, Homo sapien
cacagcatcaggcatcgtgaagaat

SEQ ID NO: 3255599 - DNA, 25 bp, Homo sapien
taatgtcaagtttcaggccctttct

SEQ ID NO: 3255600 - DNA, 25 bp, Homo sapien
tcttgcactgctgagtaaggctgca

SEQ ID NO: 3255601 - DNA, 25 bp, Homo sapien
tgagtcttttacccagccagcctct

SEQ ID NO: 3255602 - DNA, 25 bp, Homo sapien
tgagtaaggctgcatgaaactgact

SEQ ID NO: 3255603 - DNA, 25 bp, Homo sapien
gcaggaagtgctcacctgggagcct

SEQ ID NO: 3255604 - DNA, 25 bp, Homo sapien
cagcaacgtgaaacctacttatagg

SEQ ID NO: 3255605 - DNA, 25 bp, Homo sapien
tgctatagctagaagtgaagccaca

SEQ ID NO: 3255606 - DNA, 25 bp, Homo sapien
tcaccagacttgagatgcagactag

SEQ ID NO: 3255607 - DNA, 25 bp, Homo sapien
ttactggggttttgctggttgaagc

SEQ ID NO: 3255608 - DNA, 25 bp, Homo sapien
gcctgataacgggtttccaagacat

SEQ ID NO: 3255609 - DNA, 25 bp, Homo sapien
gagcagatgcgtccaagaaaattca

SEQ ID NO: 3255610 - DNA, 25 bp, Homo sapien
agacatattatcagctttggagcag

SEQ ID NO: 3255611 - DNA, 25 bp, Homo sapien
tagacccaagatttgatgtgcaaag

SEQ ID NO: 3255612 - DNA, 25 bp, Homo sapien
gatcaaatgttctgctacttcaagc

SEQ ID NO: 3255613 - DNA, 25 bp, Homo sapien
atcaaatgttctgctacttcaagca

SEQ ID NO: 3255614 - DNA, 25 bp, Homo sapien
tcaaatgttctgctacttcaagcat

SEQ ID NO: 3255615 - DNA, 25 bp, Homo sapien
tgatcaaatgttctgctacttcaag

SEQ ID NO: 3255616 - DNA, 25 bp, Homo sapien
attaaaactgccagtatggaaggac

SEQ ID NO: 3255617 - DNA, 25 bp, Homo sapien
aaaattaaaactgccagtatggaag

SEQ ID NO: 3255618 - DNA, 25 bp, Homo sapien
ttaaaactgccagtatggaaggact

SEQ ID NO: 3255619 - DNA, 25 bp, Homo sapien
aattaaaactgccagtatggaagga

SEQ ID NO: 3255620 - DNA, 25 bp, Homo sapien
ttaagtcaactagttctatcagcag

SEQ ID NO: 3255621 - DNA, 25 bp, Homo sapien
cagtcagtaggagattttgttcagc

SEQ ID NO: 3255622 - DNA, 25 bp, Homo sapien
cccaagtggtgataagctagttaag

SEQ ID NO: 3255623 - DNA, 25 bp, Homo sapien
gagagagagaagactatcttgacat

SEQ ID NO: 3255624 - DNA, 25 bp, Homo sapien
gagggcagccatactgactacacag

SEQ ID NO: 3255625 - DNA, 25 bp, Homo sapien
tctgatctcagggtgccaaaattgc

SEQ ID NO: 3255626 - DNA, 25 bp, Homo sapien
cacagctgggtgtaggactctgatc

SEQ ID NO: 3255627 - DNA, 25 bp, Homo sapien
ttctgggtaactaggagggcagcca

SEQ ID NO: 3255628 - DNA, 25 bp, Homo sapien
ggccgctagtgggtctgtctgctct

SEQ ID NO: 3255629 - DNA, 25 bp, Homo sapien
ttatctagccccagcggtgtaatgg

SEQ ID NO: 3255630 - DNA, 25 bp, Homo sapien
tactggaaaccaaaccccaagatgc

SEQ ID NO: 3255631 - DNA, 25 bp, Homo sapien
caaggttcttatcagtcctgtccag

SEQ ID NO: 3255632 - DNA, 25 bp, Homo sapien
gagctcctgctgtgcttttcatggc

SEQ ID NO: 3255633 - DNA, 25 bp, Homo sapien
cttcccatcccatgggcttggctgt

SEQ ID NO: 3255634 - DNA, 25 bp, Homo sapien
aggaagagcagaagctccagccttc

SEQ ID NO: 3255635 - DNA, 25 bp, Homo sapien
cttggctgtgagtcaggtggctcca

SEQ ID NO: 3255636 - DNA, 25 bp, Homo sapien
gtgttctgaacaccaaagcccacaa

SEQ ID NO: 3255637 - DNA, 25 bp, Homo sapien
ctggaaagaggagtgttctgaacac

SEQ ID NO: 3255638 - DNA, 25 bp, Homo sapien
ggagtgttctgaacaccaaagccca

SEQ ID NO: 3255639 - DNA, 25 bp, Homo sapien
tggaaagaggagtgttctgaacacc

SEQ ID NO: 3255640 - DNA, 25 bp, Homo sapien
cacctggcgggtaagagggatcttc

SEQ ID NO: 3255641 - DNA, 25 bp, Homo sapien
gggtaagagggatcttcaattcagc

SEQ ID NO: 3255642 - DNA, 25 bp, Homo sapien
cctggcgggtaagagggatcttcaa

SEQ ID NO: 3255643 - DNA, 25 bp, Homo sapien
agttcttggcacctggcgggtaaga

SEQ ID NO: 3255644 - DNA, 25 bp, Homo sapien
taggctgaggtgtccgtctcctgtg

SEQ ID NO: 3255645 - DNA, 25 bp, Homo sapien
ggatctaggctgaggtgtccgtctc

SEQ ID NO: 3255646 - DNA, 25 bp, Homo sapien
cgtggagagcaccaagggatctagg

SEQ ID NO: 3255647 - DNA, 25 bp, Homo sapien
ctgaggtgtccgtctcctgtgagga

SEQ ID NO: 3255648 - DNA, 25 bp, Homo sapien
ggttgaattcttctcgatgctaagc

SEQ ID NO: 3255649 - DNA, 25 bp, Homo sapien
taagcagtgcccttcagcagaaaac

SEQ ID NO: 3255650 - DNA, 25 bp, Homo sapien
gcagaaaacctcctgataggtccgt

SEQ ID NO: 3255651 - DNA, 25 bp, Homo sapien
cctgataggtccgttttagacttgg

SEQ ID NO: 3255652 - DNA, 25 bp, Homo sapien
gccacgtgaccctttatttggtgca

SEQ ID NO: 3255653 - DNA, 25 bp, Homo sapien
ggcctcaggactctaagccacgtga

SEQ ID NO: 3255654 - DNA, 25 bp, Homo sapien
taagctgctaacaagcatgggtggg

SEQ ID NO: 3255655 - DNA, 25 bp, Homo sapien
tcaaatgcagtggtcgtgctggagc

SEQ ID NO: 3255656 - DNA, 25 bp, Homo sapien
taaagtgtctggtgaaatgcctggc

SEQ ID NO: 3255657 - DNA, 25 bp, Homo sapien
tgtgctcaacatactaggcagtctg

SEQ ID NO: 3255658 - DNA, 25 bp, Homo sapien
gatcaaccatatgctgcagtaggcc

SEQ ID NO: 3255659 - DNA, 25 bp, Homo sapien
tagttaacacacctctgaagctcag

SEQ ID NO: 3255660 - DNA, 25 bp, Homo sapien
gccccagctgcttagaattaggatc

SEQ ID NO: 3255661 - DNA, 25 bp, Homo sapien
taagagctcgtagctgcttggcaga

SEQ ID NO: 3255662 - DNA, 25 bp, Homo sapien
cattacgggcaggaattagggatgt

SEQ ID NO: 3255663 - DNA, 25 bp, Homo sapien
tccaattccccagaacattacgggc

SEQ ID NO: 3255664 - DNA, 25 bp, Homo sapien
caagtcacagattcaatgggattga

SEQ ID NO: 3255665 - DNA, 25 bp, Homo sapien
aacacaaggctctcaccaacatggc

SEQ ID NO: 3255666 - DNA, 25 bp, Homo sapien
gctcctaagctcctaaatatgaaac

SEQ ID NO: 3255667 - DNA, 25 bp, Homo sapien
caatttggtgaagaaggatgtacca

SEQ ID NO: 3255668 - DNA, 25 bp, Homo sapien
cgtgacattgtgatacacgcataca

SEQ ID NO: 3255669 - DNA, 25 bp, Homo sapien
agtctctcgcaatgcaaccacaggg

SEQ ID NO: 3255670 - DNA, 25 bp, Homo sapien
gatttcttaggtacacgtgacattg

SEQ ID NO: 3255671 - DNA, 25 bp, Homo sapien
gtgaactatagtcatcacacagtgc

SEQ ID NO: 3255672 - DNA, 25 bp, Homo sapien
ccatgcatctgtgtgtttttcaaag

SEQ ID NO: 3255673 - DNA, 25 bp, Homo sapien
cagtgaatgatagcacattgctttc

SEQ ID NO: 3255674 - DNA, 25 bp, Homo sapien
aatgagtgtttcaaagtgcctagca

SEQ ID NO: 3255675 - DNA, 25 bp, Homo sapien
caaagtgcctagcaccttcagtgaa

SEQ ID NO: 3255676 - DNA, 25 bp, Homo sapien
catgtgtcttctagattatggccaa

SEQ ID NO: 3255677 - DNA, 25 bp, Homo sapien
tacgattgattgcatagttccacca

SEQ ID NO: 3255678 - DNA, 25 bp, Homo sapien
ctgggcttcctgacaccaaacctgg

SEQ ID NO: 3255679 - DNA, 25 bp, Homo sapien
taggatttgcaaagcctgaacctgg

SEQ ID NO: 3255680 - DNA, 25 bp, Homo sapien
caaaaatggccttctagtcaagctg

SEQ ID NO: 3255681 - DNA, 25 bp, Homo sapien
tgtgcacaatgtatacggagctctg

SEQ ID NO: 3255682 - DNA, 25 bp, Homo sapien
ggcatgcctcatttgcaaaccttga

SEQ ID NO: 3255683 - DNA, 25 bp, Homo sapien
tgaacattacttcgcgtggtggccg

SEQ ID NO: 3255684 - DNA, 25 bp, Homo sapien
gaattatggatcgtgtgcttctcca

SEQ ID NO: 3255685 - DNA, 25 bp, Homo sapien
gatggtgagttacaccccagagact

SEQ ID NO: 3255686 - DNA, 25 bp, Homo sapien
tttagctaatgaggaagtaggcagc

SEQ ID NO: 3255687 - DNA, 25 bp, Homo sapien
cctgctgatcgatatggctaccaaa

SEQ ID NO: 3255688 - DNA, 25 bp, Homo sapien
tctgcctgtcaaaagctttatatca

SEQ ID NO: 3255689 - DNA, 25 bp, Homo sapien
ttttcccctaggcaaatgcgggcta

SEQ ID NO: 3255690 - DNA, 25 bp, Homo sapien
gctagaggccataggcgggctttca

SEQ ID NO: 3255691 - DNA, 25 bp, Homo sapien
cctccttgcattctgtctgggaaaa

SEQ ID NO: 3255692 - DNA, 25 bp, Homo sapien
taccataagatctgtaagaccaaag

SEQ ID NO: 3255693 - DNA, 25 bp, Homo sapien
tcctttggcctggtgatatcttaca

SEQ ID NO: 3255694 - DNA, 25 bp, Homo sapien
catgaggcatatgtgctagaaattc

SEQ ID NO: 3255695 - DNA, 25 bp, Homo sapien
agtaatctcgatcaagtctggtgga

SEQ ID NO: 3255696 - DNA, 25 bp, Homo sapien
tgataatcagtggtaatgaccccat

SEQ ID NO: 3255697 - DNA, 25 bp, Homo sapien
ctggattccttattcccagtgataa

SEQ ID NO: 3255698 - DNA, 25 bp, Homo sapien
agtagggtatgtctcagggttgccc

SEQ ID NO: 3255699 - DNA, 25 bp, Homo sapien
gggttgccctgctccacgtcacggg

SEQ ID NO: 3255700 - DNA, 25 bp, Homo sapien
tcttcaagttttcttgtatactgtt

SEQ ID NO: 3255701 - DNA, 25 bp, Homo sapien
catccataccggtctggtcttttct

SEQ ID NO: 3255702 - DNA, 25 bp, Homo sapien
tacagatcctccatccataccggtc

SEQ ID NO: 3255703 - DNA, 25 bp, Homo sapien
ttggtctaatgttcatgatttggct

SEQ ID NO: 3255704 - DNA, 25 bp, Homo sapien
tatttggtctaatgttcatgatttg

SEQ ID NO: 3255705 - DNA, 25 bp, Homo sapien
tggtctaatgttcatgatttggctt

SEQ ID NO: 3255706 - DNA, 25 bp, Homo sapien
tttggtctaatgttcatgatttggc

SEQ ID NO: 3255707 - DNA, 25 bp, Homo sapien
gggacacccaaaagtcttctctgca

SEQ ID NO: 3255708 - DNA, 25 bp, Homo sapien
ctattgggacacccaaaagtcttct

SEQ ID NO: 3255709 - DNA, 25 bp, Homo sapien
tattgggacacccaaaagtcttctc

SEQ ID NO: 3255710 - DNA, 25 bp, Homo sapien
ttgggacacccaaaagtcttctctg

SEQ ID NO: 3255711 - DNA, 25 bp, Homo sapien
tccaaatctctcaaattcagactct

SEQ ID NO: 3255712 - DNA, 25 bp, Homo sapien
aaatctctcaaattcagactctttt

SEQ ID NO: 3255713 - DNA, 25 bp, Homo sapien
tttcttcccattcacgatctgatac

SEQ ID NO: 3255714 - DNA, 25 bp, Homo sapien
caaatctctcaaattcagactcttt

SEQ ID NO: 3255715 - DNA, 25 bp, Homo sapien
tctgaaggttctcctgatctcacca

SEQ ID NO: 3255716 - DNA, 25 bp, Homo sapien
cactcaaccttgtcgctctctgaag

SEQ ID NO: 3255717 - DNA, 25 bp, Homo sapien
ggttctcctgatctcaccacatgac

SEQ ID NO: 3255718 - DNA, 25 bp, Homo sapien
cagtcccttccggtaggatgcaacg

SEQ ID NO: 3255719 - DNA, 25 bp, Homo sapien
aacctcagatctttgcttgtcagaa

SEQ ID NO: 3255720 - DNA, 25 bp, Homo sapien
tcagcgttgctgaaccttggtgcca

SEQ ID NO: 3255721 - DNA, 25 bp, Homo sapien
tcttcagcgttgctgaaccttggtg

SEQ ID NO: 3255722 - DNA, 25 bp, Homo sapien
cctcagatctttgcttgtcagaagc

SEQ ID NO: 3255723 - DNA, 25 bp, Homo sapien
catgcccttttaactcaaaccattt

SEQ ID NO: 3255724 - DNA, 25 bp, Homo sapien
tcacatgcccttttaactcaaacca

SEQ ID NO: 3255725 - DNA, 25 bp, Homo sapien
atggaaacctttttcacatgccctt

SEQ ID NO: 3255726 - DNA, 25 bp, Homo sapien
ttaaatggaaacctttttcacatgc

SEQ ID NO: 3255727 - DNA, 25 bp, Homo sapien
ttctgtagcaaataaggtctagctc

SEQ ID NO: 3255728 - DNA, 25 bp, Homo sapien
catttgaagtgggtgatggacaatc

SEQ ID NO: 3255729 - DNA, 25 bp, Homo sapien
gcatctgttgttgtggtctttgaga

SEQ ID NO: 3255730 - DNA, 25 bp, Homo sapien
tggatgtggctgattggcatctgtt

SEQ ID NO: 3255731 - DNA, 25 bp, Homo sapien
ttgcccaagtccagcaccgactgag

SEQ ID NO: 3255732 - DNA, 25 bp, Homo sapien
gctgcaagaaggagaggcttgccca

SEQ ID NO: 3255733 - DNA, 25 bp, Homo sapien
gaagtaaccctctatgtcttcagag

SEQ ID NO: 3255734 - DNA, 25 bp, Homo sapien
gagtttggtagataggtctctctgg

SEQ ID NO: 3255735 - DNA, 25 bp, Homo sapien
tcatccagtgccaagagtacaagtg

SEQ ID NO: 3255736 - DNA, 25 bp, Homo sapien
gatggcaactccatctctatgctgg

SEQ ID NO: 3255737 - DNA, 25 bp, Homo sapien
gatgatgttggaacccatctggatg

SEQ ID NO: 3255738 - DNA, 25 bp, Homo sapien
gctgactttccggtttccagatgat

SEQ ID NO: 3255739 - DNA, 25 bp, Homo sapien
acactgactgatatagccatccaga

SEQ ID NO: 3255740 - DNA, 25 bp, Homo sapien
taggtgggcctaatgagtcagtcga

SEQ ID NO: 3255741 - DNA, 25 bp, Homo sapien
cagtcgaaggtgttaagagcagaaa

SEQ ID NO: 3255742 - DNA, 25 bp, Homo sapien
cagacttgcctagccagactctacg

SEQ ID NO: 3255743 - DNA, 25 bp, Homo sapien
taagggatgggcagttcactgagct

SEQ ID NO: 3255744 - DNA, 25 bp, Homo sapien
gatgggcagttcactgagctagttt

SEQ ID NO: 3255745 - DNA, 25 bp, Homo sapien
ttaagggatgggcagttcactgagc

SEQ ID NO: 3255746 - DNA, 25 bp, Homo sapien
ggcagttcactgagctagttttaaa

SEQ ID NO: 3255747 - DNA, 25 bp, Homo sapien
agatacatcttcgatgggacagtgt

SEQ ID NO: 3255748 - DNA, 25 bp, Homo sapien
gatttgcacaatctaaccattttcc

SEQ ID NO: 3255749 - DNA, 25 bp, Homo sapien
tagggtgctgcttagctatcctgtt

SEQ ID NO: 3255750 - DNA, 25 bp, Homo sapien
cccaagacatgcattcacagtgcct

SEQ ID NO: 3255751 - DNA, 25 bp, Homo sapien
agatcctgaaagatgtcattcttac

SEQ ID NO: 3255752 - DNA, 25 bp, Homo sapien
tcacaagtcaaaaggtagatcctga

SEQ ID NO: 3255753 - DNA, 25 bp, Homo sapien
cacaagtcaaaaggtagatcctgaa

SEQ ID NO: 3255754 - DNA, 25 bp, Homo sapien
aggtagatcctgaaagatgtcattc

SEQ ID NO: 3255755 - DNA, 25 bp, Homo sapien
gtgtttcttgtaagctccaaagcgt

SEQ ID NO: 3255756 - DNA, 25 bp, Homo sapien
aaccacagcaatcatgttctcatag

SEQ ID NO: 3255757 - DNA, 25 bp, Homo sapien
tgtgtctactgtggccaaccacagc

SEQ ID NO: 3255758 - DNA, 25 bp, Homo sapien
caaagcgtgtgtctactgtggccaa

SEQ ID NO: 3255759 - DNA, 25 bp, Homo sapien
ctttaaaatcgggaatgaatagatt

SEQ ID NO: 3255760 - DNA, 25 bp, Homo sapien
taagtcattaacaggtcaggcttca

SEQ ID NO: 3255761 - DNA, 25 bp, Homo sapien
gcagagcagatgcttacaatctggc

SEQ ID NO: 3255762 - DNA, 25 bp, Homo sapien
gcctggagctggtgccaatttcttc

SEQ ID NO: 3255763 - DNA, 25 bp, Homo sapien
tttcaattcttcggcatttattttg

SEQ ID NO: 3255764 - DNA, 25 bp, Homo sapien
tgcttcactcttaggacacccagtc

SEQ ID NO: 3255765 - DNA, 25 bp, Homo sapien
acacccagtccttggtttaacagtg

SEQ ID NO: 3255766 - DNA, 25 bp, Homo sapien
tcacagtccactccaataccagtag

SEQ ID NO: 3255767 - DNA, 25 bp, Homo sapien
cccaggctcagtgcagggactgtat

SEQ ID NO: 3255768 - DNA, 25 bp, Homo sapien
tgtaaggtgcttctgggctataagt

SEQ ID NO: 3255769 - DNA, 25 bp, Homo sapien
aagccttcaccaaccaaccctgcac

SEQ ID NO: 3255770 - DNA, 25 bp, Homo sapien
acactgtaaggtgcttctgggctat

SEQ ID NO: 3255771 - DNA, 25 bp, Homo sapien
gctataagtctcaaaatgtagtgtt

SEQ ID NO: 3255772 - DNA, 25 bp, Homo sapien
ccctccgaggagtatgcaatgcatc

SEQ ID NO: 3255773 - DNA, 25 bp, Homo sapien
gaggaccctccgaggagtatgcaat

SEQ ID NO: 3255774 - DNA, 25 bp, Homo sapien
tccgaggagtatgcaatgcatccat

SEQ ID NO: 3255775 - DNA, 25 bp, Homo sapien
tctctcctgaggaccctccgaggag

SEQ ID NO: 3255776 - DNA, 25 bp, Homo sapien
gtagcaaacattccatgactgtgtc

SEQ ID NO: 3255777 - DNA, 25 bp, Homo sapien
ggagggtgcctgtagcaaacattcc

SEQ ID NO: 3255778 - DNA, 25 bp, Homo sapien
gcctgtagcaaacattccatgactg

SEQ ID NO: 3255779 - DNA, 25 bp, Homo sapien
ggtgcctgtagcaaacattccatga

SEQ ID NO: 3255780 - DNA, 25 bp, Homo sapien
aagcaccagggctaattctgctgac

SEQ ID NO: 3255781 - DNA, 25 bp, Homo sapien
agcaccagggctaattctgctgacg

SEQ ID NO: 3255782 - DNA, 25 bp, Homo sapien
ggcagtcactgtttttaagctgaca

SEQ ID NO: 3255783 - DNA, 25 bp, Homo sapien
gcagtcactgtttttaagctgacag

SEQ ID NO: 3255784 - DNA, 25 bp, Homo sapien
ttttgatacaggatcggagaaccag

SEQ ID NO: 3255785 - DNA, 25 bp, Homo sapien
gctgcctgagacctgtttttgatac

SEQ ID NO: 3255786 - DNA, 25 bp, Homo sapien
aaccaggccttacaacaggcttcag

SEQ ID NO: 3255787 - DNA, 25 bp, Homo sapien
ggatcggagaaccaggccttacaac

SEQ ID NO: 3255788 - DNA, 25 bp, Homo sapien
aatacacatatgatggctgatgaac

SEQ ID NO: 3255789 - DNA, 25 bp, Homo sapien
aaaattgaggatgtatggtatcgac

SEQ ID NO: 3255790 - DNA, 25 bp, Homo sapien
cagccagtccttgcgggccactaga

SEQ ID NO: 3255791 - DNA, 25 bp, Homo sapien
cacagagggcgagtgaatacacata

SEQ ID NO: 3255792 - DNA, 25 bp, Homo sapien
aatccaaggaatctaggtgggccag

SEQ ID NO: 3255793 - DNA, 25 bp, Homo sapien
taagaaatccaaggaatctaggtgg

SEQ ID NO: 3255794 - DNA, 25 bp, Homo sapien
gaaatccaaggaatctaggtgggcc

SEQ ID NO: 3255795 - DNA, 25 bp, Homo sapien
tgaataagaaatccaaggaatctag

SEQ ID NO: 3255796 - DNA, 25 bp, Homo sapien
gaagggaaacacagttatggccctg

SEQ ID NO: 3255797 - DNA, 25 bp, Homo sapien
gaaacacagttatggccctggaact

SEQ ID NO: 3255798 - DNA, 25 bp, Homo sapien
tggaagggaaacacagttatggccc

SEQ ID NO: 3255799 - DNA, 25 bp, Homo sapien
gggaaacacagttatggccctggaa

SEQ ID NO: 3255800 - DNA, 25 bp, Homo sapien
gatggagaatgctttgacaacatca

SEQ ID NO: 3255801 - DNA, 25 bp, Homo sapien
cagagggtccatttcacttctcacc

SEQ ID NO: 3255802 - DNA, 25 bp, Homo sapien
gctttgacaacatcaagagcatcca

SEQ ID NO: 3255803 - DNA, 25 bp, Homo sapien
tctgcagagggtccatttcacttct

SEQ ID NO: 3255804 - DNA, 25 bp, Homo sapien
atgaggaaacaccttgccttaatac

SEQ ID NO: 3255805 - DNA, 25 bp, Homo sapien
aatgaggaaacaccttgccttaata

SEQ ID NO: 3255806 - DNA, 25 bp, Homo sapien
aaatgaggaaacaccttgccttaat

SEQ ID NO: 3255807 - DNA, 25 bp, Homo sapien
ccttgatctctccatagagtaaaca

SEQ ID NO: 3255808 - DNA, 25 bp, Homo sapien
acattgcagttagggcctgctcctc

SEQ ID NO: 3255809 - DNA, 25 bp, Homo sapien
gtaaacattgcagttagggcctgct

SEQ ID NO: 3255810 - DNA, 25 bp, Homo sapien
tctccatagagtaaacattgcagtt

SEQ ID NO: 3255811 - DNA, 25 bp, Homo sapien
atttgtactcttttgtacagaggac

SEQ ID NO: 3255812 - DNA, 25 bp, Homo sapien
aagagtatattttggttgcaccaaa

SEQ ID NO: 3255813 - DNA, 25 bp, Homo sapien
tgtactcttttgtacagaggaccat

SEQ ID NO: 3255814 - DNA, 25 bp, Homo sapien
ggttgcaccaaaagatttgtactct

SEQ ID NO: 3255815 - DNA, 25 bp, Homo sapien
ctctccttcatcctcgaaaattatt

SEQ ID NO: 3255816 - DNA, 25 bp, Homo sapien
tccttcatcctcgaaaattatttcc

SEQ ID NO: 3255817 - DNA, 25 bp, Homo sapien
ctccttcatcctcgaaaattatttc

SEQ ID NO: 3255818 - DNA, 25 bp, Homo sapien
cttcatcctcgaaaattatttccat

SEQ ID NO: 3255819 - DNA, 25 bp, Homo sapien
tacaaggtaaggtctatagtctcag

SEQ ID NO: 3255820 - DNA, 25 bp, Homo sapien
gtctcagatcctctcactaattcag

SEQ ID NO: 3255821 - DNA, 25 bp, Homo sapien
ctgaagtgtcagaagactcatctac

SEQ ID NO: 3255822 - DNA, 25 bp, Homo sapien
tcctctcactaattcagagaggccc

SEQ ID NO: 3255823 - DNA, 25 bp, Homo sapien
caagttgtacaatcacaaggagggc

SEQ ID NO: 3255824 - DNA, 25 bp, Homo sapien
gagttgagagtttcacaagttgtac

SEQ ID NO: 3255825 - DNA, 25 bp, Homo sapien
tgattcttttcctaccagcctcagg

SEQ ID NO: 3255826 - DNA, 25 bp, Homo sapien
caggtactgaggagtccttgtggaa

SEQ ID NO: 3255827 - DNA, 25 bp, Homo sapien
tggaaaactacaggatggatcacat

SEQ ID NO: 3255828 - DNA, 25 bp, Homo sapien
cactatttccttagccagcttctcg

SEQ ID NO: 3255829 - DNA, 25 bp, Homo sapien
gactccatttatcccagggctctgc

SEQ ID NO: 3255830 - DNA, 25 bp, Homo sapien
gatggatcacatggcctgtgcccca

SEQ ID NO: 3255831 - DNA, 25 bp, Homo sapien
tccatttgactagttgtgtacttcg

SEQ ID NO: 3255832 - DNA, 25 bp, Homo sapien
tgactagttgtgtacttcgtatata

SEQ ID NO: 3255833 - DNA, 25 bp, Homo sapien
tttctctccatttgactagttgtgt

SEQ ID NO: 3255834 - DNA, 25 bp, Homo sapien
tctctccatttgactagttgtgtac

SEQ ID NO: 3255835 - DNA, 25 bp, Homo sapien
ttgggactagcaccagcagtctgga

SEQ ID NO: 3255836 - DNA, 25 bp, Homo sapien
tggacggagactgatcacacccatg

SEQ ID NO: 3255837 - DNA, 25 bp, Homo sapien
gatcttgtttgggactagcaccagc

SEQ ID NO: 3255838 - DNA, 25 bp, Homo sapien
cagaaccatggacggagactgatca

SEQ ID NO: 3255839 - DNA, 25 bp, Homo sapien
gtagacttaacgctccatgaagccc

SEQ ID NO: 3255840 - DNA, 25 bp, Homo sapien
tagacttaacgctccatgaagccca

SEQ ID NO: 3255841 - DNA, 25 bp, Homo sapien
tcctggagagtcctctcctccacca

SEQ ID NO: 3255842 - DNA, 25 bp, Homo sapien
cctggagagtcctctcctccaccat

SEQ ID NO: 3255843 - DNA, 25 bp, Homo sapien
ctcctggagagtcctctcctccacc

SEQ ID NO: 3255844 - DNA, 25 bp, Homo sapien
gccgaggcagatgttgaacaatcat

SEQ ID NO: 3255845 - DNA, 25 bp, Homo sapien
tctgtgtcaggccctgcactgcctg

SEQ ID NO: 3255846 - DNA, 25 bp, Homo sapien
gatagagtcatccaagaaaactggt

SEQ ID NO: 3255847 - DNA, 25 bp, Homo sapien
tccttggaaccactctaggtgggat

SEQ ID NO: 3255848 - DNA, 25 bp, Homo sapien
gaagagcttcactcggaattgggaa

SEQ ID NO: 3255849 - DNA, 25 bp, Homo sapien
aaaactggtatggaatgctgtgagc

SEQ ID NO: 3255850 - DNA, 25 bp, Homo sapien
taaaggctaaaatgaccacgtcttc

SEQ ID NO: 3255851 - DNA, 25 bp, Homo sapien
cactaataaaggctaaaatgaccac

SEQ ID NO: 3255852 - DNA, 25 bp, Homo sapien
taaaatgaccacgtcttcagtcacg

SEQ ID NO: 3255853 - DNA, 25 bp, Homo sapien
ggctaaaatgaccacgtcttcagtc

SEQ ID NO: 3255854 - DNA, 25 bp, Homo sapien
cacttacacctgtgcttagcactca

SEQ ID NO: 3255855 - DNA, 25 bp, Homo sapien
aatgcgatggaattagatttattgc

SEQ ID NO: 3255856 - DNA, 25 bp, Homo sapien
aatcagcaagaatgcgatggaatta

SEQ ID NO: 3255857 - DNA, 25 bp, Homo sapien
tgcacttacacctgtgcttagcact

SEQ ID NO: 3255858 - DNA, 25 bp, Homo sapien
gagcacagtaagagtcttccgaatc

SEQ ID NO: 3255859 - DNA, 25 bp, Homo sapien
gcacagtaagagtcttccgaatcac

SEQ ID NO: 3255860 - DNA, 25 bp, Homo sapien
agcacagtaagagtcttccgaatca

SEQ ID NO: 3255861 - DNA, 25 bp, Homo sapien
ttcctgtgaacatccattttgaagc

SEQ ID NO: 3255862 - DNA, 25 bp, Homo sapien
gtttcctgtgaacatccattttgaa

SEQ ID NO: 3255863 - DNA, 25 bp, Homo sapien
aagtttcctgtgaacatccattttg

SEQ ID NO: 3255864 - DNA, 25 bp, Homo sapien
acaagtttcctgtgaacatccattt

SEQ ID NO: 3255865 - DNA, 25 bp, Homo sapien
cacaggtttgctcaggggatgatcc

SEQ ID NO: 3255866 - DNA, 25 bp, Homo sapien
tttcacggttgcctcctctctgtgc

SEQ ID NO: 3255867 - DNA, 25 bp, Homo sapien
gggatgatccgacgagaacaagtat

SEQ ID NO: 3255868 - DNA, 25 bp, Homo sapien
agaacaagtataggcttttcacggt

SEQ ID NO: 3255869 - DNA, 25 bp, Homo sapien
cacaggatcttatcttttgcgcact

SEQ ID NO: 3255870 - DNA, 25 bp, Homo sapien
ttaatctctcgatgttcagaaagtc

SEQ ID NO: 3255871 - DNA, 25 bp, Homo sapien
tgtgtctgggaagctgtgaagattc

SEQ ID NO: 3255872 - DNA, 25 bp, Homo sapien
taatagctttgcttacatatgacca

SEQ ID NO: 3255873 - DNA, 25 bp, Homo sapien
ccttgccatgtgctgactggctctg

SEQ ID NO: 3255874 - DNA, 25 bp, Homo sapien
cttgccatgtgctgactggctctga

SEQ ID NO: 3255875 - DNA, 25 bp, Homo sapien
cttttccccttcttctagagctcat

SEQ ID NO: 3255876 - DNA, 25 bp, Homo sapien
gcttttccccttcttctagagctca

SEQ ID NO: 3255877 - DNA, 25 bp, Homo sapien
ggcttttccccttcttctagagctc

SEQ ID NO: 3255878 - DNA, 25 bp, Homo sapien
aagcatcctattttctgctccaggt

SEQ ID NO: 3255879 - DNA, 25 bp, Homo sapien
taagggaggacactcctgatagtga

SEQ ID NO: 3255880 - DNA, 25 bp, Homo sapien
tatgccatattgtaccaattctgga

SEQ ID NO: 3255881 - DNA, 25 bp, Homo sapien
tacagctgacctagaaatatgccat

SEQ ID NO: 3255882 - DNA, 25 bp, Homo sapien
cttcatcttgctgtgatgaccccat

SEQ ID NO: 3255883 - DNA, 25 bp, Homo sapien
gttcctcgactctttttctggtcca

SEQ ID NO: 3255884 - DNA, 25 bp, Homo sapien
tcgactctttttctggtccaagttc

SEQ ID NO: 3255885 - DNA, 25 bp, Homo sapien
acacttcatcttgctgtgatgaccc

SEQ ID NO: 3255886 - DNA, 25 bp, Homo sapien
tgagcttcagaaaccctgagttgct

SEQ ID NO: 3255887 - DNA, 25 bp, Homo sapien
tcatattctgcttcgctctcttagt

SEQ ID NO: 3255888 - DNA, 25 bp, Homo sapien
gagttgcttgtgctccctcatcata

SEQ ID NO: 3255889 - DNA, 25 bp, Homo sapien
cttagacatttcacctgagcttcag

SEQ ID NO: 3255890 - DNA, 25 bp, Homo sapien
gcctggaactgtcagcccctatcaa

SEQ ID NO: 3255891 - DNA, 25 bp, Homo sapien
gagagcacggctgctcctgtttctg

SEQ ID NO: 3255892 - DNA, 25 bp, Homo sapien
gcccctatcaatccaatccttgaga

SEQ ID NO: 3255893 - DNA, 25 bp, Homo sapien
tccaatccttgagagcacggctgct

SEQ ID NO: 3255894 - DNA, 25 bp, Homo sapien
tactacaggccagcattaacagatg

SEQ ID NO: 3255895 - DNA, 25 bp, Homo sapien
ggagcttccacctaaccttcaattg

SEQ ID NO: 3255896 - DNA, 25 bp, Homo sapien
tattggaattacagggccgaatcac

SEQ ID NO: 3255897 - DNA, 25 bp, Homo sapien
tatctgggtctgatagcctgaaacc

SEQ ID NO: 3255898 - DNA, 25 bp, Homo sapien
aggttgcttggccaggttgccttca

SEQ ID NO: 3255899 - DNA, 25 bp, Homo sapien
ttcattatcaactccatcaggcctg

SEQ ID NO: 3255900 - DNA, 25 bp, Homo sapien
atcaggcctgaggtcaatgtgcaca

SEQ ID NO: 3255901 - DNA, 25 bp, Homo sapien
ttgcttggccaggttgccttcatta

SEQ ID NO: 3255902 - DNA, 25 bp, Homo sapien
cttttcaccacgtttgtccacactc

SEQ ID NO: 3255903 - DNA, 25 bp, Homo sapien
tttcaccacgtttgtccacactcag

SEQ ID NO: 3255904 - DNA, 25 bp, Homo sapien
gtccttttcaccacgtttgtccaca

SEQ ID NO: 3255905 - DNA, 25 bp, Homo sapien
ttcaccacgtttgtccacactcaga

SEQ ID NO: 3255906 - DNA, 25 bp, Homo sapien
tctggaccaaatgctcttgtcttag

SEQ ID NO: 3255907 - DNA, 25 bp, Homo sapien
ctgtgtctggatgatttcccacctg

SEQ ID NO: 3255908 - DNA, 25 bp, Homo sapien
cctctggaccaaatgctcttgtctt

SEQ ID NO: 3255909 - DNA, 25 bp, Homo sapien
tggctgtgtctggatgatttcccac

SEQ ID NO: 3255910 - DNA, 25 bp, Homo sapien
tacaggtagctcaatggcatttcct

SEQ ID NO: 3255911 - DNA, 25 bp, Homo sapien
gaagccaaagaagacttgggaagac

SEQ ID NO: 3255912 - DNA, 25 bp, Homo sapien
cttgcctacaggtagctcaatggca

SEQ ID NO: 3255913 - DNA, 25 bp, Homo sapien
caagaaaaggtgttggtgttagaag

SEQ ID NO: 3255914 - DNA, 25 bp, Homo sapien
catcagagtcaaatgctgctggcca

SEQ ID NO: 3255915 - DNA, 25 bp, Homo sapien
tctcagagaaggatgcggcttcctt

SEQ ID NO: 3255916 - DNA, 25 bp, Homo sapien
tatgggctgcatttaggacttcttg

SEQ ID NO: 3255917 - DNA, 25 bp, Homo sapien
caagaattcagtacgtatgggctgc

SEQ ID NO: 3255918 - DNA, 25 bp, Homo sapien
tcagaggacacagcacaattgtcac

SEQ ID NO: 3255919 - DNA, 25 bp, Homo sapien
tccgccaaggtgaacagatggcctc

SEQ ID NO: 3255920 - DNA, 25 bp, Homo sapien
ctccgccaaggtgaacagatggcct

SEQ ID NO: 3255921 - DNA, 25 bp, Homo sapien
cacaattgtcaccaaaaacagagcc

SEQ ID NO: 3255922 - DNA, 25 bp, Homo sapien
ggggttggttagctttgacctctgc

SEQ ID NO: 3255923 - DNA, 25 bp, Homo sapien
tagagagcatggactctcttctgct

SEQ ID NO: 3255924 - DNA, 25 bp, Homo sapien
gcccctagagagcatggactctctt

SEQ ID NO: 3255925 - DNA, 25 bp, Homo sapien
gctgcccctagagagcatggactct

SEQ ID NO: 3255926 - DNA, 25 bp, Homo sapien
tacaagtagcaccttctctgggcat

SEQ ID NO: 3255927 - DNA, 25 bp, Homo sapien
catcattacaagtagcaccttctct

SEQ ID NO: 3255928 - DNA, 25 bp, Homo sapien
cattacaagtagcaccttctctggg

SEQ ID NO: 3255929 - DNA, 25 bp, Homo sapien
agacatcattacaagtagcaccttc

SEQ ID NO: 3255930 - DNA, 25 bp, Homo sapien
atgcctgcatccaattgactatgag

SEQ ID NO: 3255931 - DNA, 25 bp, Homo sapien
gcctgcatccaattgactatgagtg

SEQ ID NO: 3255932 - DNA, 25 bp, Homo sapien
cctgcatccaattgactatgagtgc

SEQ ID NO: 3255933 - DNA, 25 bp, Homo sapien
tgcctgcatccaattgactatgagt

SEQ ID NO: 3255934 - DNA, 25 bp, Homo sapien
ctgcatccaggtggccattgaatgc

SEQ ID NO: 3255935 - DNA, 25 bp, Homo sapien
ctattgagtgcctgcatccaggtga

SEQ ID NO: 3255936 - DNA, 25 bp, Homo sapien
tattgagtgcctgcatccaggtgac

SEQ ID NO: 3255937 - DNA, 25 bp, Homo sapien
atgcctgcatccaattgactattga

SEQ ID NO: 3255938 - DNA, 25 bp, Homo sapien
aatgcctgcatccaattgactattg

SEQ ID NO: 3255939 - DNA, 25 bp, Homo sapien
gaatgcctgcatccaattgactatt

SEQ ID NO: 3255940 - DNA, 25 bp, Homo sapien
gatgaccatagaatgactgcatcca

SEQ ID NO: 3255941 - DNA, 25 bp, Homo sapien
cagatgaccatagaatgactgcatc

SEQ ID NO: 3255942 - DNA, 25 bp, Homo sapien
tccagatgaccatagaatgactgca

SEQ ID NO: 3255943 - DNA, 25 bp, Homo sapien
atgaccatagaatgactgcatccag

SEQ ID NO: 3255944 - DNA, 25 bp, Homo sapien
actctcaggtgttctcatattcatg

SEQ ID NO: 3255945 - DNA, 25 bp, Homo sapien
tctggcactctcaggtgttctcata

SEQ ID NO: 3255946 - DNA, 25 bp, Homo sapien
ggtgttctcatattcatggactcat

SEQ ID NO: 3255947 - DNA, 25 bp, Homo sapien
tcatattcatggactcattttcctg

SEQ ID NO: 3255948 - DNA, 25 bp, Homo sapien
tgcccgtggaaaggatgcatcccca

SEQ ID NO: 3255949 - DNA, 25 bp, Homo sapien
aaaatgattgacatgcccgtggaaa

SEQ ID NO: 3255950 - DNA, 25 bp, Homo sapien
tccaaaggctatgcgtgcgtagagt

SEQ ID NO: 3255951 - DNA, 25 bp, Homo sapien
tctgtccaaaggctatgcgtgcgta

SEQ ID NO: 3255952 - DNA, 25 bp, Homo sapien
tgaataaacccaagatcggaatgca

SEQ ID NO: 3255953 - DNA, 25 bp, Homo sapien
aataaacccaagatcggaatgcaaa

SEQ ID NO: 3255954 - DNA, 25 bp, Homo sapien
taaacccaagatcggaatgcaaatc

SEQ ID NO: 3255955 - DNA, 25 bp, Homo sapien
gttgaataaacccaagatcggaatg

SEQ ID NO: 3255956 - DNA, 25 bp, Homo sapien
ttgtaggtatgcggcgttttttctg

SEQ ID NO: 3255957 - DNA, 25 bp, Homo sapien
atagttgtaggtatgcggcgttttt

SEQ ID NO: 3255958 - DNA, 25 bp, Homo sapien
tgcggcgttttttctgagggctcta

SEQ ID NO: 3255959 - DNA, 25 bp, Homo sapien
cagatagttgtaggtatgcggcgtt

SEQ ID NO: 3255960 - DNA, 25 bp, Homo sapien
gaattctaataactccgtgggttga

SEQ ID NO: 3255961 - DNA, 25 bp, Homo sapien
tgttgggcccagaattgttttatga

SEQ ID NO: 3255962 - DNA, 25 bp, Homo sapien
tacaagatgttgctacataagatgg

SEQ ID NO: 3255963 - DNA, 25 bp, Homo sapien
taaaagagcctactacttggtaaca

SEQ ID NO: 3255964 - DNA, 25 bp, Homo sapien
tcagagtctgaatctaagatcccat

SEQ ID NO: 3255965 - DNA, 25 bp, Homo sapien
tatctaactgagaaatttgggcaaa

SEQ ID NO: 3255966 - DNA, 25 bp, Homo sapien
catggtcagtgattggtacagctag

SEQ ID NO: 3255967 - DNA, 25 bp, Homo sapien
gtacagctaggatgcacacccaggt

SEQ ID NO: 3255968 - DNA, 25 bp, Homo sapien
tctatacacagctaaatgtctttgc

SEQ ID NO: 3255969 - DNA, 25 bp, Homo sapien
ctctcaggaatgttgctgaactgaa

SEQ ID NO: 3255970 - DNA, 25 bp, Homo sapien
aacagttaatgactactggttcctg

SEQ ID NO: 3255971 - DNA, 25 bp, Homo sapien
gccaggaccactttttaaatctcag

SEQ ID NO: 3255972 - DNA, 25 bp, Homo sapien
cagggcctcctttgaatttgacagt

SEQ ID NO: 3255973 - DNA, 25 bp, Homo sapien
tgaatgaacagatagtgccactagg

SEQ ID NO: 3255974 - DNA, 25 bp, Homo sapien
gagtcactgcattttggccctgtaa

SEQ ID NO: 3255975 - DNA, 25 bp, Homo sapien
gaccgggtgctattaggctcctgag

SEQ ID NO: 3255976 - DNA, 25 bp, Homo sapien
ggatcccaagagacctctagccagt

SEQ ID NO: 3255977 - DNA, 25 bp, Homo sapien
gaatcgccgaggagataaatcttac

SEQ ID NO: 3255978 - DNA, 25 bp, Homo sapien
tcccctcagatgtacaccagaactt

SEQ ID NO: 3255979 - DNA, 25 bp, Homo sapien
tattctttgaggtcaagatggatcc

SEQ ID NO: 3255980 - DNA, 25 bp, Homo sapien
tcccagtcgaagaagtggacctcgt

SEQ ID NO: 3255981 - DNA, 25 bp, Homo sapien
cactttgggcgacgtgaaatacgcg

SEQ ID NO: 3255982 - DNA, 25 bp, Homo sapien
gcgcccggcctttggactcatgtaa

SEQ ID NO: 3255983 - DNA, 25 bp, Homo sapien
tgtcccgcaggcagtaaaagccctt

SEQ ID NO: 3255984 - DNA, 25 bp, Homo sapien
acaccacggtggcttcactgggccg

SEQ ID NO: 3255985 - DNA, 25 bp, Homo sapien
accacggtggcttcactgggccgcg

SEQ ID NO: 3255986 - DNA, 25 bp, Homo sapien
gctggacaccacggtggcttcactg

SEQ ID NO: 3255987 - DNA, 25 bp, Homo sapien
tggacaccacggtggcttcactggg

SEQ ID NO: 3255988 - DNA, 25 bp, Homo sapien
tggcacatgggcgtttcaggccttc

SEQ ID NO: 3255989 - DNA, 25 bp, Homo sapien
tcagtggcacatgggcgtttcaggc

SEQ ID NO: 3255990 - DNA, 25 bp, Homo sapien
cacatgggcgtttcaggccttcaat

SEQ ID NO: 3255991 - DNA, 25 bp, Homo sapien
ctgggtcatgaagtgccgcagcagg

SEQ ID NO: 3255992 - DNA, 25 bp, Homo sapien
atttagagcccaaattgaaaactct

SEQ ID NO: 3255993 - DNA, 25 bp, Homo sapien
ccattttatagagggtagtcttgtc

SEQ ID NO: 3255994 - DNA, 25 bp, Homo sapien
gcctggcctgtcaccaccattttat

SEQ ID NO: 3255995 - DNA, 25 bp, Homo sapien
tcttgtctaaggacacaattctatt

SEQ ID NO: 3255996 - DNA, 25 bp, Homo sapien
taccctttagagagctatactgtgt

SEQ ID NO: 3255997 - DNA, 25 bp, Homo sapien
tacatgtttgagatgtgagaatgta

SEQ ID NO: 3255998 - DNA, 25 bp, Homo sapien
gtatgcaattgtatgtgcatgcttg

SEQ ID NO: 3255999 - DNA, 25 bp, Homo sapien
agagagctatactgtgtgttggtca

SEQ ID NO: 3256000 - DNA, 25 bp, Homo sapien
tccaccatgtgaaggcacaggcaaa

SEQ ID NO: 3256001 - DNA, 25 bp, Homo sapien
acgtggccctctgcgagcaaggaat

SEQ ID NO: 3256002 - DNA, 25 bp, Homo sapien
caaaacgtggccctctgcgagcaag

SEQ ID NO: 3256003 - DNA, 25 bp, Homo sapien
gaatggggtttcatgaagaaccact

SEQ ID NO: 3256004 - DNA, 25 bp, Homo sapien
tagcttctgcagtcaggcacttgca

SEQ ID NO: 3256005 - DNA, 25 bp, Homo sapien
cacttgcagggcggtatagctgcag

SEQ ID NO: 3256006 - DNA, 25 bp, Homo sapien
gcataaaacactggatcttcctgga

SEQ ID NO: 3256007 - DNA, 25 bp, Homo sapien
gcttctgcagtcaggcacttgcagg

SEQ ID NO: 3256008 - DNA, 25 bp, Homo sapien
agattcagtccaatcactcattcaa

SEQ ID NO: 3256009 - DNA, 25 bp, Homo sapien
taaaatagaaatgacgccatctgct

SEQ ID NO: 3256010 - DNA, 25 bp, Homo sapien
tgtctaagtgccaggcaggcactga

SEQ ID NO: 3256011 - DNA, 25 bp, Homo sapien
ttaattaagttttccgatcggcaga

SEQ ID NO: 3256012 - DNA, 25 bp, Homo sapien
ttaaatccagctagcactctcctgc

SEQ ID NO: 3256013 - DNA, 25 bp, Homo sapien
tggctttaaatccagctagcactct

SEQ ID NO: 3256014 - DNA, 25 bp, Homo sapien
gctttaaatccagctagcactctcc

SEQ ID NO: 3256015 - DNA, 25 bp, Homo sapien
caagtgttctccaatcggcaagatg

SEQ ID NO: 3256016 - DNA, 25 bp, Homo sapien
gatttgcctgcaaagcgagaacgca

SEQ ID NO: 3256017 - DNA, 25 bp, Homo sapien
aacaggagactgtttctcggagcgc

SEQ ID NO: 3256018 - DNA, 25 bp, Homo sapien
cagtggatttggagtggcctcccta

SEQ ID NO: 3256019 - DNA, 25 bp, Homo sapien
gagcgcagcgcaaagacagtggatt

SEQ ID NO: 3256020 - DNA, 25 bp, Homo sapien
cccatcccgcgccggcacccggctt

SEQ ID NO: 3256021 - DNA, 25 bp, Homo sapien
agagcccagcacaccccatcccgcg

SEQ ID NO: 3256022 - DNA, 25 bp, Homo sapien
agcacaccccatcccgcgccggcac

SEQ ID NO: 3256023 - DNA, 25 bp, Homo sapien
ccccatcccgcgccggcacccggct

SEQ ID NO: 3256024 - DNA, 25 bp, Homo sapien
ccctcgggacttccagagcagaggt

SEQ ID NO: 3256025 - DNA, 25 bp, Homo sapien
tgaggaggatgggaaaatccccagc

SEQ ID NO: 3256026 - DNA, 25 bp, Homo sapien
ggatgggaaaatccccagcctttgc

SEQ ID NO: 3256027 - DNA, 25 bp, Homo sapien
cggtccctcgggacttccagagcag

SEQ ID NO: 3256028 - DNA, 25 bp, Homo sapien
cgcgcctctgtccagcccgtccggc

SEQ ID NO: 3256029 - DNA, 25 bp, Homo sapien
gccgcgcctctgtccagcccgtccg

SEQ ID NO: 3256030 - DNA, 25 bp, Homo sapien
cgcctctgtccagcccgtccggcgc

SEQ ID NO: 3256031 - DNA, 25 bp, Homo sapien
ctgagccgcgcctctgtccagcccg

SEQ ID NO: 3256032 - DNA, 25 bp, Homo sapien
cccgcggcgggtagagcaagtttct

SEQ ID NO: 3256033 - DNA, 25 bp, Homo sapien
ttacgcctgcttggtctgagcccga

SEQ ID NO: 3256034 - DNA, 25 bp, Homo sapien
ttttggtgctcaatcccgaggaggg

SEQ ID NO: 3256035 - DNA, 25 bp, Homo sapien
taaataggctcctaggctgggccat

SEQ ID NO: 3256036 - DNA, 25 bp, Homo sapien
aaacgggtttgcctgcttacctgag

SEQ ID NO: 3256037 - DNA, 25 bp, Homo sapien
caaagagcgccctgtcgccattgaa

SEQ ID NO: 3256038 - DNA, 25 bp, Homo sapien
ctaggattgcaaacgtcagctctga

SEQ ID NO: 3256039 - DNA, 25 bp, Homo sapien
agagcggacgccaatttgccaggag

SEQ ID NO: 3256040 - DNA, 25 bp, Homo sapien
tttcgaatagcaaaattctccactg

SEQ ID NO: 3256041 - DNA, 25 bp, Homo sapien
ggaagcacagctttagtgtcaatgg

SEQ ID NO: 3256042 - DNA, 25 bp, Homo sapien
tgtcaatggagaagtttcgaatagc

SEQ ID NO: 3256043 - DNA, 25 bp, Homo sapien
gatctgtacatgcacccaggaagca

SEQ ID NO: 3256044 - DNA, 25 bp, Homo sapien
tggttccatacccagctgtgaatat

SEQ ID NO: 3256045 - DNA, 25 bp, Homo sapien
gcagggtttcccagttttgatcact

SEQ ID NO: 3256046 - DNA, 25 bp, Homo sapien
cttcttggttccatacccagctgtg

SEQ ID NO: 3256047 - DNA, 25 bp, Homo sapien
ttctaactttgattcgtcattggag

SEQ ID NO: 3256048 - DNA, 25 bp, Homo sapien
tgttcttgatctcgatgtgtcggcc

SEQ ID NO: 3256049 - DNA, 25 bp, Homo sapien
ggcaattccacgtgtgtgaccctct

SEQ ID NO: 3256050 - DNA, 25 bp, Homo sapien
tgatgctaaagcgagaatgtccttg

SEQ ID NO: 3256051 - DNA, 25 bp, Homo sapien
tgtgtcggccactctcggaagcctt

SEQ ID NO: 3256052 - DNA, 25 bp, Homo sapien
ctgtgtgtagtatggaaggagatgc

SEQ ID NO: 3256053 - DNA, 25 bp, Homo sapien
tctgtgtgtagtatggaaggagatg

SEQ ID NO: 3256054 - DNA, 25 bp, Homo sapien
gtttctgtagattcagcagggatca

SEQ ID NO: 3256055 - DNA, 25 bp, Homo sapien
cttcttgagtttctgtagattcagc

SEQ ID NO: 3256056 - DNA, 25 bp, Homo sapien
gtagattcagcagggatcagaagcc

SEQ ID NO: 3256057 - DNA, 25 bp, Homo sapien
taaataacttcttgagtttctgtag

SEQ ID NO: 3256058 - DNA, 25 bp, Homo sapien
cgtggggaaatggatgacatccttc

SEQ ID NO: 3256059 - DNA, 25 bp, Homo sapien
cccaggagaagcactccacaaggac

SEQ ID NO: 3256060 - DNA, 25 bp, Homo sapien
ccacaaggacaccttcagcatgggc

SEQ ID NO: 3256061 - DNA, 25 bp, Homo sapien
tggggaaatggatgacatccttctc

SEQ ID NO: 3256062 - DNA, 25 bp, Homo sapien
gagtgttacagggatccagaagtcc

SEQ ID NO: 3256063 - DNA, 25 bp, Homo sapien
gtcatgacgtaaaagagcctgcagt

SEQ ID NO: 3256064 - DNA, 25 bp, Homo sapien
ggaaccgtggtgtctctgcagaaaa

SEQ ID NO: 3256065 - DNA, 25 bp, Homo sapien
caaccttgtactccagacatgggca

SEQ ID NO: 3256066 - DNA, 25 bp, Homo sapien
taaagggcccttgtatctgacctgc

SEQ ID NO: 3256067 - DNA, 25 bp, Homo sapien
gctctgtgaatgcaatgagaccatg

SEQ ID NO: 3256068 - DNA, 25 bp, Homo sapien
agatgagccagatgggcttcccgcc

SEQ ID NO: 3256069 - DNA, 25 bp, Homo sapien
taaccttctgtaacactgctctgtg

SEQ ID NO: 3256070 - DNA, 25 bp, Homo sapien
ggcttgctgaaacctgctggctctt

SEQ ID NO: 3256071 - DNA, 25 bp, Homo sapien
cagagaggctgacatcctggaagac

SEQ ID NO: 3256072 - DNA, 25 bp, Homo sapien
caccagatcagccagggaacggctt

SEQ ID NO: 3256073 - DNA, 25 bp, Homo sapien
gccagggaacggcttgctgaaacct

SEQ ID NO: 3256074 - DNA, 25 bp, Homo sapien
ctcccacagtatgtcaatggtgttg

SEQ ID NO: 3256075 - DNA, 25 bp, Homo sapien
tatgtcaatggtgttgttggatcag

SEQ ID NO: 3256076 - DNA, 25 bp, Homo sapien
tggatcagcattccccctattctgg

SEQ ID NO: 3256077 - DNA, 25 bp, Homo sapien
tgttgttggatcagcattcccccta

SEQ ID NO: 3256078 - DNA, 25 bp, Homo sapien
agttttctcagcgaatctgtgtgat

SEQ ID NO: 3256079 - DNA, 25 bp, Homo sapien
gacatcagcatcgttctgtgtttag

SEQ ID NO: 3256080 - DNA, 25 bp, Homo sapien
tgtgtttagatcctgccctgtcccc

SEQ ID NO: 3256081 - DNA, 25 bp, Homo sapien
ctgtgtgatttgcatgtagtgacat

SEQ ID NO: 3256082 - DNA, 25 bp, Homo sapien
caaaatgccggttttgactctggtt

SEQ ID NO: 3256083 - DNA, 25 bp, Homo sapien
aatcagttgacaaaatgccggtttt

SEQ ID NO: 3256084 - DNA, 25 bp, Homo sapien
cagttgacaaaatgccggttttgac

SEQ ID NO: 3256085 - DNA, 25 bp, Homo sapien
gacaaaatgccggttttgactctgg

SEQ ID NO: 3256086 - DNA, 25 bp, Homo sapien
ttcgaaggtactcccttggatgtgg

SEQ ID NO: 3256087 - DNA, 25 bp, Homo sapien
tgaggtactccctcacaatggtaca

SEQ ID NO: 3256088 - DNA, 25 bp, Homo sapien
gataggtctgcaagctagggcctcc

SEQ ID NO: 3256089 - DNA, 25 bp, Homo sapien
cataattcctcatgtcccatcatgg

SEQ ID NO: 3256090 - DNA, 25 bp, Homo sapien
caatgtcacaggacccataactcct

SEQ ID NO: 3256091 - DNA, 25 bp, Homo sapien
gacttaggataatatttggatgtaa

SEQ ID NO: 3256092 - DNA, 25 bp, Homo sapien
taatgctgcctgaattagtgacaat

SEQ ID NO: 3256093 - DNA, 25 bp, Homo sapien
gacccataactccttgcttgacatt

SEQ ID NO: 3256094 - DNA, 25 bp, Homo sapien
ccacatcgcataaatcctcttgcca

SEQ ID NO: 3256095 - DNA, 25 bp, Homo sapien
agcctgattgccaaattttggttaa

SEQ ID NO: 3256096 - DNA, 25 bp, Homo sapien
tgattgccaaattttggttaatcct

SEQ ID NO: 3256097 - DNA, 25 bp, Homo sapien
ttttttcccgcgaaactctgcacca

SEQ ID NO: 3256098 - DNA, 25 bp, Homo sapien
gggtccctcctagggactgctctgg

SEQ ID NO: 3256099 - DNA, 25 bp, Homo sapien
acagtgtgcatctcattatgccagt

SEQ ID NO: 3256100 - DNA, 25 bp, Homo sapien
gcatctcattatgccagtcactcag

SEQ ID NO: 3256101 - DNA, 25 bp, Homo sapien
tctcattatgccagtcactcagggt

SEQ ID NO: 3256102 - DNA, 25 bp, Homo sapien
tgtgttttccaaaggtatgccagtg

SEQ ID NO: 3256103 - DNA, 25 bp, Homo sapien
gacaacttgtacaggcccttcacat

SEQ ID NO: 3256104 - DNA, 25 bp, Homo sapien
tatgccagtgctcaacaacctctgt

SEQ ID NO: 3256105 - DNA, 25 bp, Homo sapien
tcacatcctcttggtgctttttcaa

SEQ ID NO: 3256106 - DNA, 25 bp, Homo sapien
atctttctgcatccaaggtggttga

SEQ ID NO: 3256107 - DNA, 25 bp, Homo sapien
ttatctttctgcatccaaggtggtt

SEQ ID NO: 3256108 - DNA, 25 bp, Homo sapien
tctttctgcatccaaggtggttgag

SEQ ID NO: 3256109 - DNA, 25 bp, Homo sapien
tatctttctgcatccaaggtggttg

SEQ ID NO: 3256110 - DNA, 25 bp, Homo sapien
tgtcctctggaagctctggggccat

SEQ ID NO: 3256111 - DNA, 25 bp, Homo sapien
atgtcctctggaagctctggggcca

SEQ ID NO: 3256112 - DNA, 25 bp, Homo sapien
gcaagacgtagtgacttcatcgagt

SEQ ID NO: 3256113 - DNA, 25 bp, Homo sapien
aacaaagggctgatattgcctcttt

SEQ ID NO: 3256114 - DNA, 25 bp, Homo sapien
tcacaactcgtgagttccaaatggt

SEQ ID NO: 3256115 - DNA, 25 bp, Homo sapien
gccgtgtgccactgagcaagacgta

SEQ ID NO: 3256116 - DNA, 25 bp, Homo sapien
tggcactaagtgagttatctttcag

SEQ ID NO: 3256117 - DNA, 25 bp, Homo sapien
cggcttacttataagcaaagtggca

SEQ ID NO: 3256118 - DNA, 25 bp, Homo sapien
cattcactggaagaacaccgccagt

SEQ ID NO: 3256119 - DNA, 25 bp, Homo sapien
gcagcaggcccttaattttgtgtat

SEQ ID NO: 3256120 - DNA, 25 bp, Homo sapien
tgtgcactgaacctcatcggagagt

SEQ ID NO: 3256121 - DNA, 25 bp, Homo sapien
gaacctcatcggagagtggaactgg

SEQ ID NO: 3256122 - DNA, 25 bp, Homo sapien
aatgaccgctgtgcactgaacctca

SEQ ID NO: 3256123 - DNA, 25 bp, Homo sapien
cgctgtgcactgaacctcatcggag

SEQ ID NO: 3256124 - DNA, 25 bp, Homo sapien
atagttaaacgtgtcagctgcattt

SEQ ID NO: 3256125 - DNA, 25 bp, Homo sapien
tccctggaaatagttaaacgtgtca

SEQ ID NO: 3256126 - DNA, 25 bp, Homo sapien
tggcaattccctggaaatagttaaa

SEQ ID NO: 3256127 - DNA, 25 bp, Homo sapien
gaaatagttaaacgtgtcagctgca

SEQ ID NO: 3256128 - DNA, 25 bp, Homo sapien
cagtcgaataggaggtaccaggttt

SEQ ID NO: 3256129 - DNA, 25 bp, Homo sapien
taaaggacatataagcagcacagtc

SEQ ID NO: 3256130 - DNA, 25 bp, Homo sapien
cataaaggttctcctgtcttttcgt

SEQ ID NO: 3256131 - DNA, 25 bp, Homo sapien
taccaggttttagggtcagtgaatc

SEQ ID NO: 3256132 - DNA, 25 bp, Homo sapien
atgccaaagggtgtgatttatccag

SEQ ID NO: 3256133 - DNA, 25 bp, Homo sapien
ctatttgtgctgcatagtatgctct

SEQ ID NO: 3256134 - DNA, 25 bp, Homo sapien
aaatgccaaagggtgtgatttatcc

SEQ ID NO: 3256135 - DNA, 25 bp, Homo sapien
tagtatgctcttgttgtatcaatgc

SEQ ID NO: 3256136 - DNA, 25 bp, Homo sapien
ttcctttggaagatataaccatccc

SEQ ID NO: 3256137 - DNA, 25 bp, Homo sapien
ttatctgtctccgatgccgtggcac

SEQ ID NO: 3256138 - DNA, 25 bp, Homo sapien
gatctggcatatgtttcgccaactt

SEQ ID NO: 3256139 - DNA, 25 bp, Homo sapien
tgagtttttccgcagctccaatctt

SEQ ID NO: 3256140 - DNA, 25 bp, Homo sapien
cattcttccgagagaggtcatcaga

SEQ ID NO: 3256141 - DNA, 25 bp, Homo sapien
gaaatagaggcactttgttcctgaa

SEQ ID NO: 3256142 - DNA, 25 bp, Homo sapien
tcatcagagcattggtaatgagctg

SEQ ID NO: 3256143 - DNA, 25 bp, Homo sapien
ccatgtcatctgagtaagctctggg

SEQ ID NO: 3256144 - DNA, 25 bp, Homo sapien
agagcacttctctcgaattcgtgac

SEQ ID NO: 3256145 - DNA, 25 bp, Homo sapien
cacctccacggaggctaaaatatgc

SEQ ID NO: 3256146 - DNA, 25 bp, Homo sapien
tgtgaagactgcatggagccaagcc

SEQ ID NO: 3256147 - DNA, 25 bp, Homo sapien
gagccaagccagatgtcaatgtgtg

SEQ ID NO: 3256148 - DNA, 25 bp, Homo sapien
tgtttggaggtgatatttactttct

SEQ ID NO: 3256149 - DNA, 25 bp, Homo sapien
ctgtttggaggtgatatttactttc

SEQ ID NO: 3256150 - DNA, 25 bp, Homo sapien
gggagcatgttggtgcatccaggct

SEQ ID NO: 3256151 - DNA, 25 bp, Homo sapien
atgttggtgcatccaggctctccat

SEQ ID NO: 3256152 - DNA, 25 bp, Homo sapien
ggtgggagcatgttggtgcatccag

SEQ ID NO: 3256153 - DNA, 25 bp, Homo sapien
atggtgggagcatgttggtgcatcc

SEQ ID NO: 3256154 - DNA, 25 bp, Homo sapien
ttcttgagaaggccacccttctatg

SEQ ID NO: 3256155 - DNA, 25 bp, Homo sapien
ttgagaaggccacccttctatggaa

SEQ ID NO: 3256156 - DNA, 25 bp, Homo sapien
tcttgagaaggccacccttctatgg

SEQ ID NO: 3256157 - DNA, 25 bp, Homo sapien
tgagaaggccacccttctatggaat

SEQ ID NO: 3256158 - DNA, 25 bp, Homo sapien
ttctcttttgaagcttccaggtgcc

SEQ ID NO: 3256159 - DNA, 25 bp, Homo sapien
ctcttctcttttgaagcttccaggt

SEQ ID NO: 3256160 - DNA, 25 bp, Homo sapien
tcttttgaagcttccaggtgcccca

SEQ ID NO: 3256161 - DNA, 25 bp, Homo sapien
cttttgaagcttccaggtgccccat

SEQ ID NO: 3256162 - DNA, 25 bp, Homo sapien
tggagagccaacaggccatctggtg

SEQ ID NO: 3256163 - DNA, 25 bp, Homo sapien
ctctctttgtggagctgggttacca

SEQ ID NO: 3256164 - DNA, 25 bp, Homo sapien
ggactgactgtcgagctatgtatac

SEQ ID NO: 3256165 - DNA, 25 bp, Homo sapien
tacagaagttcgtgatagtggtgac

SEQ ID NO: 3256166 - DNA, 25 bp, Homo sapien
atacatccataatattgcatatcca

SEQ ID NO: 3256167 - DNA, 25 bp, Homo sapien
aactacttagacagactatgaagag

SEQ ID NO: 3256168 - DNA, 25 bp, Homo sapien
acccggaatctctctattgctctag

SEQ ID NO: 3256169 - DNA, 25 bp, Homo sapien
tcacatgcgtaaaatagaaactagg

SEQ ID NO: 3256170 - DNA, 25 bp, Homo sapien
aagtagtatgacatcacccggaatc

SEQ ID NO: 3256171 - DNA, 25 bp, Homo sapien
tgatgaggccactctgtctgacctt

SEQ ID NO: 3256172 - DNA, 25 bp, Homo sapien
cagttctactcagttagggacctac

SEQ ID NO: 3256173 - DNA, 25 bp, Homo sapien
tcaagaacaaggtgccttcagagtt

SEQ ID NO: 3256174 - DNA, 25 bp, Homo sapien
tggtgtacttactctgtcataagag

SEQ ID NO: 3256175 - DNA, 25 bp, Homo sapien
taacagcctaagagtagtcaggaac

SEQ ID NO: 3256176 - DNA, 25 bp, Homo sapien
tataacccattagtggaggcagaca

SEQ ID NO: 3256177 - DNA, 25 bp, Homo sapien
tacttagtagaccacaaggaatcag

SEQ ID NO: 3256178 - DNA, 25 bp, Homo sapien
tgtcttcggtgagcaaaataatacc

SEQ ID NO: 3256179 - DNA, 25 bp, Homo sapien
gcctgacatgtgacttaccctgtga

SEQ ID NO: 3256180 - DNA, 25 bp, Homo sapien
taagattaaacaattgggtcgcctg

SEQ ID NO: 3256181 - DNA, 25 bp, Homo sapien
taccctgtgacattgaccttggcca

SEQ ID NO: 3256182 - DNA, 25 bp, Homo sapien
actggcagaacaccctaaaaccttg

SEQ ID NO: 3256183 - DNA, 25 bp, Homo sapien
cactcaggaattggatagtgcatgt

SEQ ID NO: 3256184 - DNA, 25 bp, Homo sapien
ggtcatttcctgaacccagatatgc

SEQ ID NO: 3256185 - DNA, 25 bp, Homo sapien
tgtaagatgggaaccatcagtgccc

SEQ ID NO: 3256186 - DNA, 25 bp, Homo sapien
tattctctcaatggacactcaggaa

SEQ ID NO: 3256187 - DNA, 25 bp, Homo sapien
tgtgctgagtcaacttcagtagttt

SEQ ID NO: 3256188 - DNA, 25 bp, Homo sapien
tacaaacaccacgagacagtttagg

SEQ ID NO: 3256189 - DNA, 25 bp, Homo sapien
cagggctttaggttgaaacaataca

SEQ ID NO: 3256190 - DNA, 25 bp, Homo sapien
gactgagaagtccagaacaaagtac

SEQ ID NO: 3256191 - DNA, 25 bp, Homo sapien
aaagccaggctaaacagtccgttgg

SEQ ID NO: 3256192 - DNA, 25 bp, Homo sapien
aaagacttgtcttacctcatgcaca

SEQ ID NO: 3256193 - DNA, 25 bp, Homo sapien
tggctgctgtcacactctatgtggg

SEQ ID NO: 3256194 - DNA, 25 bp, Homo sapien
gggtgaaagccctcactgcatggct

SEQ ID NO: 3256195 - DNA, 25 bp, Homo sapien
ctcccatgacttgggggtcaatttc

SEQ ID NO: 3256196 - DNA, 25 bp, Homo sapien
actcccatgacttgggggtcaattt

SEQ ID NO: 3256197 - DNA, 25 bp, Homo sapien
tactcccatgacttgggggtcaatt

SEQ ID NO: 3256198 - DNA, 25 bp, Homo sapien
ctactcccatgacttgggggtcaat

SEQ ID NO: 3256199 - DNA, 25 bp, Homo sapien
aacacagtaacctttagatattatg

SEQ ID NO: 3256200 - DNA, 25 bp, Homo sapien
taacctttagatattatgtagctag

SEQ ID NO: 3256201 - DNA, 25 bp, Homo sapien
aacctttagatattatgtagctaga

SEQ ID NO: 3256202 - DNA, 25 bp, Homo sapien
tatattaacacagtaacctttagat

SEQ ID NO: 3256203 - DNA, 25 bp, Homo sapien
caggtcttgagcctcccaaacctgt

SEQ ID NO: 3256204 - DNA, 25 bp, Homo sapien
tgttctcatcactgcatggcaattg

SEQ ID NO: 3256205 - DNA, 25 bp, Homo sapien
caggatgtcacaccaggtcttgagc

SEQ ID NO: 3256206 - DNA, 25 bp, Homo sapien
tatcttcttcctacagtcattgagc

SEQ ID NO: 3256207 - DNA, 25 bp, Homo sapien
cctccttatcggcttgaggctgaag

SEQ ID NO: 3256208 - DNA, 25 bp, Homo sapien
ttttcctccttatcggcttgaggct

SEQ ID NO: 3256209 - DNA, 25 bp, Homo sapien
cttatcggcttgaggctgaagtcag

SEQ ID NO: 3256210 - DNA, 25 bp, Homo sapien
gaagtcagcaactttgcttcacctc

SEQ ID NO: 3256211 - DNA, 25 bp, Homo sapien
cagggaatctttggatcgctctctc

SEQ ID NO: 3256212 - DNA, 25 bp, Homo sapien
agaaactgacggcttcttacactgg

SEQ ID NO: 3256213 - DNA, 25 bp, Homo sapien
tgaaaggtgggtattctgaaactct

SEQ ID NO: 3256214 - DNA, 25 bp, Homo sapien
tacactggctgtgagttgtaagggc

SEQ ID NO: 3256215 - DNA, 25 bp, Homo sapien
tccctggacgctctgttgtcaaggc

SEQ ID NO: 3256216 - DNA, 25 bp, Homo sapien
gataaaacgtccactagagggcatt

SEQ ID NO: 3256217 - DNA, 25 bp, Homo sapien
tgacagaatttgagaggctatccat

SEQ ID NO: 3256218 - DNA, 25 bp, Homo sapien
tgtcaaggctgtaagctcattcccc

SEQ ID NO: 3256219 - DNA, 25 bp, Homo sapien
taatgtggcactgtcttcttgtagc

SEQ ID NO: 3256220 - DNA, 25 bp, Homo sapien
ggttgagtatacgtccaagcactgc

SEQ ID NO: 3256221 - DNA, 25 bp, Homo sapien
gcatagatgcgtacatagattccaa

SEQ ID NO: 3256222 - DNA, 25 bp, Homo sapien
tacaggctgatattctccgtatggt

SEQ ID NO: 3256223 - DNA, 25 bp, Homo sapien
gtcactaagagaccttctgaggata

SEQ ID NO: 3256224 - DNA, 25 bp, Homo sapien
catcagtcactaagagaccttctga

SEQ ID NO: 3256225 - DNA, 25 bp, Homo sapien
ctgacttttcatcagtcactaagag

SEQ ID NO: 3256226 - DNA, 25 bp, Homo sapien
ctaagagaccttctgaggatacaga

SEQ ID NO: 3256227 - DNA, 25 bp, Homo sapien
acatgccatgagtcagataactaaa

SEQ ID NO: 3256228 - DNA, 25 bp, Homo sapien
tttactcaacatgccatgagtcaga

SEQ ID NO: 3256229 - DNA, 25 bp, Homo sapien
tgccatgagtcagataactaaaata

SEQ ID NO: 3256230 - DNA, 25 bp, Homo sapien
ccatgagtcagataactaaaatacc

SEQ ID NO: 3256231 - DNA, 25 bp, Homo sapien
gagctcttgaaggacgtcactttca

SEQ ID NO: 3256232 - DNA, 25 bp, Homo sapien
cactgtgcagacaacggtctatgac

SEQ ID NO: 3256233 - DNA, 25 bp, Homo sapien
catgagggcaagtggttctaaatta

SEQ ID NO: 3256234 - DNA, 25 bp, Homo sapien
tatgacattcagaggattccgcagg

SEQ ID NO: 3256235 - DNA, 25 bp, Homo sapien
tgttttgaaggacaagtccatttaa

SEQ ID NO: 3256236 - DNA, 25 bp, Homo sapien
ctgttttgaaggacaagtccattta

SEQ ID NO: 3256237 - DNA, 25 bp, Homo sapien
ttaacatccagtctttgtagaaata

SEQ ID NO: 3256238 - DNA, 25 bp, Homo sapien
catccagtctttgtagaaataaata

SEQ ID NO: 3256239 - DNA, 25 bp, Homo sapien
cgtccttaacatccagtctttgtag

SEQ ID NO: 3256240 - DNA, 25 bp, Homo sapien
cagtctttgtagaaataaatatgca

SEQ ID NO: 3256241 - DNA, 25 bp, Homo sapien
tcctcagaatagcaagagacctcat

SEQ ID NO: 3256242 - DNA, 25 bp, Homo sapien
gcaagagacctcatcacatttgcaa

SEQ ID NO: 3256243 - DNA, 25 bp, Homo sapien
tccttaaagagctcctcagaatagc

SEQ ID NO: 3256244 - DNA, 25 bp, Homo sapien
tcagtctctgagacctccttaaaga

SEQ ID NO: 3256245 - DNA, 25 bp, Homo sapien
agcacaggtctgcacgatgacaatg

SEQ ID NO: 3256246 - DNA, 25 bp, Homo sapien
gattctatagggtggagtgtcaggg

SEQ ID NO: 3256247 - DNA, 25 bp, Homo sapien
caatgtcatgaacaagagcacaggt

SEQ ID NO: 3256248 - DNA, 25 bp, Homo sapien
aaatgacaatgtcatgaacaagagc

SEQ ID NO: 3256249 - DNA, 25 bp, Homo sapien
taacagcttggcgttattttgaact

SEQ ID NO: 3256250 - DNA, 25 bp, Homo sapien
ttcctaacagcttggcgttattttg

SEQ ID NO: 3256251 - DNA, 25 bp, Homo sapien
tgtcactacatgagaaagaggagtg

SEQ ID NO: 3256252 - DNA, 25 bp, Homo sapien
cactttgtcactacatgagaaagag

SEQ ID NO: 3256253 - DNA, 25 bp, Homo sapien
cacttttccaatacgctctaaattc

SEQ ID NO: 3256254 - DNA, 25 bp, Homo sapien
tccaatacgctctaaattctcaata

SEQ ID NO: 3256255 - DNA, 25 bp, Homo sapien
ttgccacttttccaatacgctctaa

SEQ ID NO: 3256256 - DNA, 25 bp, Homo sapien
ttttccaatacgctctaaattctca

SEQ ID NO: 3256257 - DNA, 25 bp, Homo sapien
gctaggccgctaaaggaacacattt

SEQ ID NO: 3256258 - DNA, 25 bp, Homo sapien
gatgagacacttcttgaggcccgga

SEQ ID NO: 3256259 - DNA, 25 bp, Homo sapien
cagagggaggcacaacttgagaact

SEQ ID NO: 3256260 - DNA, 25 bp, Homo sapien
ccctcggtaaggagtagaacagcag

SEQ ID NO: 3256261 - DNA, 25 bp, Homo sapien
gagaccactcctcaaacacggtaga

SEQ ID NO: 3256262 - DNA, 25 bp, Homo sapien
gaccactcctcaaacacggtagagg

SEQ ID NO: 3256263 - DNA, 25 bp, Homo sapien
tgagaccactcctcaaacacggtag

SEQ ID NO: 3256264 - DNA, 25 bp, Homo sapien
atgagaccactcctcaaacacggta

SEQ ID NO: 3256265 - DNA, 25 bp, Homo sapien
attagccagagttgatgaacaatga

SEQ ID NO: 3256266 - DNA, 25 bp, Homo sapien
ctgtgccattagccagagttgatga

SEQ ID NO: 3256267 - DNA, 25 bp, Homo sapien
gtgccattagccagagttgatgaac

SEQ ID NO: 3256268 - DNA, 25 bp, Homo sapien
ccattagccagagttgatgaacaat

SEQ ID NO: 3256269 - DNA, 25 bp, Homo sapien
gaatccccaatttccacagcccttc

SEQ ID NO: 3256270 - DNA, 25 bp, Homo sapien
atttgaatccccaatttccacagcc

SEQ ID NO: 3256271 - DNA, 25 bp, Homo sapien
cccatttgaatccccaatttccaca

SEQ ID NO: 3256272 - DNA, 25 bp, Homo sapien
tgaatccccaatttccacagccctt

SEQ ID NO: 3256273 - DNA, 25 bp, Homo sapien
tctgcagagaatattgatcagaaaa

SEQ ID NO: 3256274 - DNA, 25 bp, Homo sapien
agaatattgatcagaaaatctctca

SEQ ID NO: 3256275 - DNA, 25 bp, Homo sapien
gagaatattgatcagaaaatctctc

SEQ ID NO: 3256276 - DNA, 25 bp, Homo sapien
ttctctgcagagaatattgatcaga

SEQ ID NO: 3256277 - DNA, 25 bp, Homo sapien
tccaagaatttagagattctcagtc

SEQ ID NO: 3256278 - DNA, 25 bp, Homo sapien
atcatccaagaatttagagattctc

SEQ ID NO: 3256279 - DNA, 25 bp, Homo sapien
catccaagaatttagagattctcag

SEQ ID NO: 3256280 - DNA, 25 bp, Homo sapien
ccaagaatttagagattctcagtcg

SEQ ID NO: 3256281 - DNA, 25 bp, Homo sapien
cacagatcctgagggagccctgtca

SEQ ID NO: 3256282 - DNA, 25 bp, Homo sapien
tctcagtcccacacagatcctgagg

SEQ ID NO: 3256283 - DNA, 25 bp, Homo sapien
cagacttgccactctcagtcccaca

SEQ ID NO: 3256284 - DNA, 25 bp, Homo sapien
gtcccacacagatcctgagggagcc

SEQ ID NO: 3256285 - DNA, 25 bp, Homo sapien
caaaggtttggggagattgtgcctc

SEQ ID NO: 3256286 - DNA, 25 bp, Homo sapien
cagtgctcacctgaaaaagcagctg

SEQ ID NO: 3256287 - DNA, 25 bp, Homo sapien
cttctgggactagggaaactggaag

SEQ ID NO: 3256288 - DNA, 25 bp, Homo sapien
cctcagtgctcacctgaaaaagcag

SEQ ID NO: 3256289 - DNA, 25 bp, Homo sapien
tggccataacttcatccttccatac

SEQ ID NO: 3256290 - DNA, 25 bp, Homo sapien
acagccctggccataacttcatcct

SEQ ID NO: 3256291 - DNA, 25 bp, Homo sapien
tcgtccagctctgatagacagccct

SEQ ID NO: 3256292 - DNA, 25 bp, Homo sapien
ttccatacccctccatcaacctcaa

SEQ ID NO: 3256293 - DNA, 25 bp, Homo sapien
tagtgtgaaagaatcaaagctctta

SEQ ID NO: 3256294 - DNA, 25 bp, Homo sapien
tgaaagaatcaaagctcttaagagg

SEQ ID NO: 3256295 - DNA, 25 bp, Homo sapien
ctagtgtgaaagaatcaaagctctt

SEQ ID NO: 3256296 - DNA, 25 bp, Homo sapien
gtgtgaaagaatcaaagctcttaag

SEQ ID NO: 3256297 - DNA, 25 bp, Homo sapien
agaacctgggtaaaccagagctgat

SEQ ID NO: 3256298 - DNA, 25 bp, Homo sapien
gatggtctgtgctggcctatggggc

SEQ ID NO: 3256299 - DNA, 25 bp, Homo sapien
tgcgtgtctttggagaacctgggta

SEQ ID NO: 3256300 - DNA, 25 bp, Homo sapien
ggaaatggagatctctgcaaactga

SEQ ID NO: 3256301 - DNA, 25 bp, Homo sapien
cacaaatgctgtcccatgtgagtct

SEQ ID NO: 3256302 - DNA, 25 bp, Homo sapien
ggaagtgagtaggaatcttggctat

SEQ ID NO: 3256303 - DNA, 25 bp, Homo sapien
gagtaggaatcttggctatttcaca

SEQ ID NO: 3256304 - DNA, 25 bp, Homo sapien
tttcacaaatgctgtcccatgtgag

SEQ ID NO: 3256305 - DNA, 25 bp, Homo sapien
atttttagcttcaatttcagcccct

SEQ ID NO: 3256306 - DNA, 25 bp, Homo sapien
agcttcaatttcagccccttttcca

SEQ ID NO: 3256307 - DNA, 25 bp, Homo sapien
ttagcttcaatttcagccccttttc

SEQ ID NO: 3256308 - DNA, 25 bp, Homo sapien
gcttcaatttcagccccttttccat

SEQ ID NO: 3256309 - DNA, 25 bp, Homo sapien
atattggcccagtgaaaaccttcat

SEQ ID NO: 3256310 - DNA, 25 bp, Homo sapien
aatattggcccagtgaaaaccttca

SEQ ID NO: 3256311 - DNA, 25 bp, Homo sapien
agttgtttatctccacaaatattgg

SEQ ID NO: 3256312 - DNA, 25 bp, Homo sapien
tttatctccacaaatattggcccag

SEQ ID NO: 3256313 - DNA, 25 bp, Homo sapien
ctctcttagctggaagctaacttga

SEQ ID NO: 3256314 - DNA, 25 bp, Homo sapien
tcctctcttagctggaagctaactt

SEQ ID NO: 3256315 - DNA, 25 bp, Homo sapien
cctctcttagctggaagctaacttg

SEQ ID NO: 3256316 - DNA, 25 bp, Homo sapien
tctcttagctggaagctaacttgac

SEQ ID NO: 3256317 - DNA, 25 bp, Homo sapien
tgcaggcattctacctgtggagaca

SEQ ID NO: 3256318 - DNA, 25 bp, Homo sapien
ttgcaggcattctacctgtggagac

SEQ ID NO: 3256319 - DNA, 25 bp, Homo sapien
gcaggcattctacctgtggagacat

SEQ ID NO: 3256320 - DNA, 25 bp, Homo sapien
cttgcaggcattctacctgtggaga

SEQ ID NO: 3256321 - DNA, 25 bp, Homo sapien
tcaattgttcagagcttgaggaaga

SEQ ID NO: 3256322 - DNA, 25 bp, Homo sapien
tcatggttccttaattccactccaa

SEQ ID NO: 3256323 - DNA, 25 bp, Homo sapien
gttccttaattccactccaatattc

SEQ ID NO: 3256324 - DNA, 25 bp, Homo sapien
ttccttaattccactccaatattct

SEQ ID NO: 3256325 - DNA, 25 bp, Homo sapien
tattagggacagaacactcataaga

SEQ ID NO: 3256326 - DNA, 25 bp, Homo sapien
cactctgtgaatttgccataaagta

SEQ ID NO: 3256327 - DNA, 25 bp, Homo sapien
gaatttgccataaagtagatgagga

SEQ ID NO: 3256328 - DNA, 25 bp, Homo sapien
aagggcatgatggttggtttgtatt

SEQ ID NO: 3256329 - DNA, 25 bp, Homo sapien
ccaattagggtaagaagcactcatt

SEQ ID NO: 3256330 - DNA, 25 bp, Homo sapien
tccaattagggtaagaagcactcat

SEQ ID NO: 3256331 - DNA, 25 bp, Homo sapien
caattagggtaagaagcactcattt

SEQ ID NO: 3256332 - DNA, 25 bp, Homo sapien
aattagggtaagaagcactcatttc

SEQ ID NO: 3256333 - DNA, 25 bp, Homo sapien
aggaacatggcacttgcgctgtgat

SEQ ID NO: 3256334 - DNA, 25 bp, Homo sapien
tgcgctgtgatcttatcaccacaca

SEQ ID NO: 3256335 - DNA, 25 bp, Homo sapien
gatttgccatttagaactggtgcca

SEQ ID NO: 3256336 - DNA, 25 bp, Homo sapien
ttcagtagcttctcgtgtctgcctc

SEQ ID NO: 3256337 - DNA, 25 bp, Homo sapien
cttggtggacatagtgtaggtagca

SEQ ID NO: 3256338 - DNA, 25 bp, Homo sapien
gacaagccaagccctggtattcctc

SEQ ID NO: 3256339 - DNA, 25 bp, Homo sapien
ctcctgactcttcttggtggacata

SEQ ID NO: 3256340 - DNA, 25 bp, Homo sapien
gggtgttcataactggaacacctca

SEQ ID NO: 3256341 - DNA, 25 bp, Homo sapien
aatactgtttactatttggtggaat

SEQ ID NO: 3256342 - DNA, 25 bp, Homo sapien
atactgtttactatttggtggaata

SEQ ID NO: 3256343 - DNA, 25 bp, Homo sapien
caatactgtttactatttggtggaa

SEQ ID NO: 3256344 - DNA, 25 bp, Homo sapien
tactgtttactatttggtggaataa

SEQ ID NO: 3256345 - DNA, 25 bp, Homo sapien
gcttttcatggacaatgacatgtcc

SEQ ID NO: 3256346 - DNA, 25 bp, Homo sapien
tggcttttcatggacaatgacatgt

SEQ ID NO: 3256347 - DNA, 25 bp, Homo sapien
ttttcatggacaatgacatgtcctt

SEQ ID NO: 3256348 - DNA, 25 bp, Homo sapien
ggcttttcatggacaatgacatgtc

SEQ ID NO: 3256349 - DNA, 25 bp, Homo sapien
ttgtctgtaggttctatccccccca

SEQ ID NO: 3256350 - DNA, 25 bp, Homo sapien
gtctgtaggttctatcccccccaga

SEQ ID NO: 3256351 - DNA, 25 bp, Homo sapien
cccattgtctgtaggttctatcccc

SEQ ID NO: 3256352 - DNA, 25 bp, Homo sapien
ctgtaggttctatcccccccagaat

SEQ ID NO: 3256353 - DNA, 25 bp, Homo sapien
ctcgggcgttatacctagatcctgt

SEQ ID NO: 3256354 - DNA, 25 bp, Homo sapien
ctagtggacactcgggcgttatacc

SEQ ID NO: 3256355 - DNA, 25 bp, Homo sapien
cctgctagtggacactcgggcgtta

SEQ ID NO: 3256356 - DNA, 25 bp, Homo sapien
ggacactcgggcgttatacctagat

SEQ ID NO: 3256357 - DNA, 25 bp, Homo sapien
tacatttgcacaatactgctcctag

SEQ ID NO: 3256358 - DNA, 25 bp, Homo sapien
gcaaccatagccttttacttaggta

SEQ ID NO: 3256359 - DNA, 25 bp, Homo sapien
tttgcactccaatgcttcagggtca

SEQ ID NO: 3256360 - DNA, 25 bp, Homo sapien
ttacttaggtatgcttttgcactcc

SEQ ID NO: 3256361 - DNA, 25 bp, Homo sapien
cacctatgcaggtacacagtcactc

SEQ ID NO: 3256362 - DNA, 25 bp, Homo sapien
tctttattggtactccaaacaggat

SEQ ID NO: 3256363 - DNA, 25 bp, Homo sapien
ttctttattggtactccaaacagga

SEQ ID NO: 3256364 - DNA, 25 bp, Homo sapien
ctcttgaatttgcttgctgctcctc

SEQ ID NO: 3256365 - DNA, 25 bp, Homo sapien
gctcctcctccacttactattgatt

SEQ ID NO: 3256366 - DNA, 25 bp, Homo sapien
tcctcctccacttactattgatttc

SEQ ID NO: 3256367 - DNA, 25 bp, Homo sapien
tcctccacttactattgatttcttt

SEQ ID NO: 3256368 - DNA, 25 bp, Homo sapien
tcccataggaggcaattgtggacct

SEQ ID NO: 3256369 - DNA, 25 bp, Homo sapien
cataggaggcaattgtggacctgac

SEQ ID NO: 3256370 - DNA, 25 bp, Homo sapien
taggaggcaattgtggacctgacat

SEQ ID NO: 3256371 - DNA, 25 bp, Homo sapien
tgtcccataggaggcaattgtggac

SEQ ID NO: 3256372 - DNA, 25 bp, Homo sapien
tgtcattccctttgtataggtgggt

SEQ ID NO: 3256373 - DNA, 25 bp, Homo sapien
aggcagacacctctagagctttaac

SEQ ID NO: 3256374 - DNA, 25 bp, Homo sapien
gcagacacctctagagctttaactt

SEQ ID NO: 3256375 - DNA, 25 bp, Homo sapien
tagagctttaacttcaagcctggca

SEQ ID NO: 3256376 - DNA, 25 bp, Homo sapien
ctttttgccgtaagatgagagatca

SEQ ID NO: 3256377 - DNA, 25 bp, Homo sapien
tttttgccgtaagatgagagatcat

SEQ ID NO: 3256378 - DNA, 25 bp, Homo sapien
gatgagagatcattccaggagctgt

SEQ ID NO: 3256379 - DNA, 25 bp, Homo sapien
taagatgagagatcattccaggagc

SEQ ID NO: 3256380 - DNA, 25 bp, Homo sapien
cccagaatggcctattgcctgaaaa

SEQ ID NO: 3256381 - DNA, 25 bp, Homo sapien
tctcaaaatgccttgacactgtctt

SEQ ID NO: 3256382 - DNA, 25 bp, Homo sapien
taaagtccgaacacttggtgtggcc

SEQ ID NO: 3256383 - DNA, 25 bp, Homo sapien
gtctttgtacatttgggtcccttca

SEQ ID NO: 3256384 - DNA, 25 bp, Homo sapien
tttaatggcattggttgaaagaaaa

SEQ ID NO: 3256385 - DNA, 25 bp, Homo sapien
tcaaaactgcttgggcttggtgctt

SEQ ID NO: 3256386 - DNA, 25 bp, Homo sapien
tcacaaccttcaacttggaaagcca

SEQ ID NO: 3256387 - DNA, 25 bp, Homo sapien
gttccaccatctctttcggctttaa

SEQ ID NO: 3256388 - DNA, 25 bp, Homo sapien
gaggtctaagccgagtgctcacaaa

SEQ ID NO: 3256389 - DNA, 25 bp, Homo sapien
tccaggatcctattgcataagggct

SEQ ID NO: 3256390 - DNA, 25 bp, Homo sapien
taagggcttgtatatacgctgttgc

SEQ ID NO: 3256391 - DNA, 25 bp, Homo sapien
taaaatgccatacccacacaatagg

SEQ ID NO: 3256392 - DNA, 25 bp, Homo sapien
gaaacgaggtcaccgctcagacttc

SEQ ID NO: 3256393 - DNA, 25 bp, Homo sapien
gatgaattcacccaatgaaacgagg

SEQ ID NO: 3256394 - DNA, 25 bp, Homo sapien
tagtctatttctcaaagttgccaga

SEQ ID NO: 3256395 - DNA, 25 bp, Homo sapien
ttctggcccatactccttaagttgg

SEQ ID NO: 3256396 - DNA, 25 bp, Homo sapien
ggttcctactagaaggctgatcctt

SEQ ID NO: 3256397 - DNA, 25 bp, Homo sapien
tgataatcggggttcctactagaag

SEQ ID NO: 3256398 - DNA, 25 bp, Homo sapien
aatcggggttcctactagaaggctg

SEQ ID NO: 3256399 - DNA, 25 bp, Homo sapien
cctttgccagactgtgataatcggg

SEQ ID NO: 3256400 - DNA, 25 bp, Homo sapien
agtctttttctgtagcacattctat

SEQ ID NO: 3256401 - DNA, 25 bp, Homo sapien
tctataatggcacctaccgtttcct

SEQ ID NO: 3256402 - DNA, 25 bp, Homo sapien
tgtgtgctgagctccatacctcctt

SEQ ID NO: 3256403 - DNA, 25 bp, Homo sapien
ggcacctaccgtttccttctgcagg

SEQ ID NO: 3256404 - DNA, 25 bp, Homo sapien
tgtaagccctcatgaccagaggtga

SEQ ID NO: 3256405 - DNA, 25 bp, Homo sapien
gtttgtaagccctcatgaccagagg

SEQ ID NO: 3256406 - DNA, 25 bp, Homo sapien
atgagggtctgggtttgtaagccct

SEQ ID NO: 3256407 - DNA, 25 bp, Homo sapien
ggtctgggtttgtaagccctcatga

SEQ ID NO: 3256408 - DNA, 25 bp, Homo sapien
tcttccattgatactcaagagaaag

SEQ ID NO: 3256409 - DNA, 25 bp, Homo sapien
ccattgatactcaagagaaagccca

SEQ ID NO: 3256410 - DNA, 25 bp, Homo sapien
cttcagtggtttgggcccatcttca

SEQ ID NO: 3256411 - DNA, 25 bp, Homo sapien
tttgggcccatcttcagtggtttgg

SEQ ID NO: 3256412 - DNA, 25 bp, Homo sapien
tgctcatgactagctttaagcatca

SEQ ID NO: 3256413 - DNA, 25 bp, Homo sapien
tacacagtaaattgcacagaggaca

SEQ ID NO: 3256414 - DNA, 25 bp, Homo sapien
ttatgtgttacaagaagtggacaca

SEQ ID NO: 3256415 - DNA, 25 bp, Homo sapien
aggtatgcaatttatatttccaggg

SEQ ID NO: 3256416 - DNA, 25 bp, Homo sapien
tgggccattttgaaccaagcctctg

SEQ ID NO: 3256417 - DNA, 25 bp, Homo sapien
ggtagggaccttgtccagagcagtc

SEQ ID NO: 3256418 - DNA, 25 bp, Homo sapien
gcctgtttgaccataaccatttttg

SEQ ID NO: 3256419 - DNA, 25 bp, Homo sapien
atgtctcccgcgacccgaagatgct

SEQ ID NO: 3256420 - DNA, 25 bp, Homo sapien
gaaagttatggactggccttcccga

SEQ ID NO: 3256421 - DNA, 25 bp, Homo sapien
ccttagaagactggaaagttatgga

SEQ ID NO: 3256422 - DNA, 25 bp, Homo sapien
tatggactggccttcccgaaaacta

SEQ ID NO: 3256423 - DNA, 25 bp, Homo sapien
aagactggaaagttatggactggcc

SEQ ID NO: 3256424 - DNA, 25 bp, Homo sapien
tactgcttctactgatgatgcatca

SEQ ID NO: 3256425 - DNA, 25 bp, Homo sapien
tcagcttgttccagactagctcttc

SEQ ID NO: 3256426 - DNA, 25 bp, Homo sapien
ctactgcttctactgatgatgcatc

SEQ ID NO: 3256427 - DNA, 25 bp, Homo sapien
tcaaaggaggtaccctgattcagtt

SEQ ID NO: 3256428 - DNA, 25 bp, Homo sapien
gattgtcaaaggaggtaccctgatt

SEQ ID NO: 3256429 - DNA, 25 bp, Homo sapien
agattgtcaaaggaggtaccctgat

SEQ ID NO: 3256430 - DNA, 25 bp, Homo sapien
tgtcaaaggaggtaccctgattcag

SEQ ID NO: 3256431 - DNA, 25 bp, Homo sapien
gtaacaggctgtaaatcccctccag

SEQ ID NO: 3256432 - DNA, 25 bp, Homo sapien
agcacccaactctgcctgagatgag

SEQ ID NO: 3256433 - DNA, 25 bp, Homo sapien
tgttgcagaaggtgaaaggatgccc

SEQ ID NO: 3256434 - DNA, 25 bp, Homo sapien
gatgcccttgatcatccgtaacagg

SEQ ID NO: 3256435 - DNA, 25 bp, Homo sapien
cctcttcaatgtcaaaacttgaagg

SEQ ID NO: 3256436 - DNA, 25 bp, Homo sapien
tcttcaatgtcaaaacttgaaggct

SEQ ID NO: 3256437 - DNA, 25 bp, Homo sapien
ctcctcttcaatgtcaaaacttgaa

SEQ ID NO: 3256438 - DNA, 25 bp, Homo sapien
tcaatgtcaaaacttgaaggctttt

SEQ ID NO: 3256439 - DNA, 25 bp, Homo sapien
aacaaaggtgatggatagagtggcc

SEQ ID NO: 3256440 - DNA, 25 bp, Homo sapien
taggtaggtccaaaggtgtgtcaaa

SEQ ID NO: 3256441 - DNA, 25 bp, Homo sapien
ccttgctaggacacagcttctacca

SEQ ID NO: 3256442 - DNA, 25 bp, Homo sapien
gcaataccatgctcttgttagaaga

SEQ ID NO: 3256443 - DNA, 25 bp, Homo sapien
cgtggagcacagagcactagtcagt

SEQ ID NO: 3256444 - DNA, 25 bp, Homo sapien
taggagatagcatcagcagacactg

SEQ ID NO: 3256445 - DNA, 25 bp, Homo sapien
caactggtcagagatcgtggagcac

SEQ ID NO: 3256446 - DNA, 25 bp, Homo sapien
gaggaatgtactccagccaactggt

SEQ ID NO: 3256447 - DNA, 25 bp, Homo sapien
tatttttctagagttgtacttgagc

SEQ ID NO: 3256448 - DNA, 25 bp, Homo sapien
tttctagagttgtacttgagcacac

SEQ ID NO: 3256449 - DNA, 25 bp, Homo sapien
ttatttttctagagttgtacttgag

SEQ ID NO: 3256450 - DNA, 25 bp, Homo sapien
tttttctagagttgtacttgagcac

SEQ ID NO: 3256451 - DNA, 25 bp, Homo sapien
cttaattgtgcctactggtttgtgg

SEQ ID NO: 3256452 - DNA, 25 bp, Homo sapien
gtactcactggtatgtcacacttaa

SEQ ID NO: 3256453 - DNA, 25 bp, Homo sapien
tactttcatagtattgcatattgcc

SEQ ID NO: 3256454 - DNA, 25 bp, Homo sapien
gctctcgttataattgtactcactg

SEQ ID NO: 3256455 - DNA, 25 bp, Homo sapien
tggggaagaagtgcttcctgtcacc

SEQ ID NO: 3256456 - DNA, 25 bp, Homo sapien
ctggggaagaagtgcttcctgtcac

SEQ ID NO: 3256457 - DNA, 25 bp, Homo sapien
ggggaagaagtgcttcctgtcacca

SEQ ID NO: 3256458 - DNA, 25 bp, Homo sapien
gggaagaagtgcttcctgtcaccat

SEQ ID NO: 3256459 - DNA, 25 bp, Homo sapien
ttttgggggcccactctgtatcctc

SEQ ID NO: 3256460 - DNA, 25 bp, Homo sapien
cttttgggggcccactctgtatcct

SEQ ID NO: 3256461 - DNA, 25 bp, Homo sapien
gggggcccactctgtatcctctcca

SEQ ID NO: 3256462 - DNA, 25 bp, Homo sapien
ttgggggcccactctgtatcctctc

SEQ ID NO: 3256463 - DNA, 25 bp, Homo sapien
caacaatggatccaactctatgtga

SEQ ID NO: 3256464 - DNA, 25 bp, Homo sapien
tagcttcttatactgccaacaatgg

SEQ ID NO: 3256465 - DNA, 25 bp, Homo sapien
tccatcgccatgttggatcagtgtc

SEQ ID NO: 3256466 - DNA, 25 bp, Homo sapien
aatttttcagagaggattccatcgc

SEQ ID NO: 3256467 - DNA, 25 bp, Homo sapien
gagtgtaaaggacgggaagtgatgt

SEQ ID NO: 3256468 - DNA, 25 bp, Homo sapien
agtgatgtggaaccggaattcagaa

SEQ ID NO: 3256469 - DNA, 25 bp, Homo sapien
ctgagtacataaaagctcataaaga

SEQ ID NO: 3256470 - DNA, 25 bp, Homo sapien
acagagctgagagagtgtaaaggac

SEQ ID NO: 3256471 - DNA, 25 bp, Homo sapien
tgtgtctagcccctgtgccactgaa

SEQ ID NO: 3256472 - DNA, 25 bp, Homo sapien
ctaatactctgttgtatatgtatca

SEQ ID NO: 3256473 - DNA, 25 bp, Homo sapien
gtgttgaatctaatactctgttgta

SEQ ID NO: 3256474 - DNA, 25 bp, Homo sapien
ttttcaagtgggaaagtgttgaatc

SEQ ID NO: 3256475 - DNA, 25 bp, Homo sapien
cagaatatccaggtttgtaggacac

SEQ ID NO: 3256476 - DNA, 25 bp, Homo sapien
aacaataaaagcacgtggacacaag

SEQ ID NO: 3256477 - DNA, 25 bp, Homo sapien
tggaagttgaacaataaaagcacgt

SEQ ID NO: 3256478 - DNA, 25 bp, Homo sapien
taggacaaatatctagcccatgcgg

SEQ ID NO: 3256479 - DNA, 25 bp, Homo sapien
tcaacattctcagccgcttgcccac

SEQ ID NO: 3256480 - DNA, 25 bp, Homo sapien
ttatcaacattctcagccgcttgcc

SEQ ID NO: 3256481 - DNA, 25 bp, Homo sapien
tccaagaagcaaggcaaaattcaca

SEQ ID NO: 3256482 - DNA, 25 bp, Homo sapien
tatcaacattctcagccgcttgccc

SEQ ID NO: 3256483 - DNA, 25 bp, Homo sapien
cacatattacactacatcttgcttc

SEQ ID NO: 3256484 - DNA, 25 bp, Homo sapien
tacacatattacactacatcttgct

SEQ ID NO: 3256485 - DNA, 25 bp, Homo sapien
atacacatattacactacatcttgc

SEQ ID NO: 3256486 - DNA, 25 bp, Homo sapien
aatacacatattacactacatcttg

SEQ ID NO: 3256487 - DNA, 25 bp, Homo sapien
caccaacactgcaaaggagcaaagc

SEQ ID NO: 3256488 - DNA, 25 bp, Homo sapien
gatgaactggtgtggtagaaccttc

SEQ ID NO: 3256489 - DNA, 25 bp, Homo sapien
ttcaagacggcagctaacccttctc

SEQ ID NO: 3256490 - DNA, 25 bp, Homo sapien
cttctccaagtacaaccagctgtga

SEQ ID NO: 3256491 - DNA, 25 bp, Homo sapien
taaaaaatcattgcagctgacattt

SEQ ID NO: 3256492 - DNA, 25 bp, Homo sapien
gaatgttgtcaaattaactgaagga

SEQ ID NO: 3256493 - DNA, 25 bp, Homo sapien
ttctatatatactaagccttcacac

SEQ ID NO: 3256494 - DNA, 25 bp, Homo sapien
taaacatgaatgttgtcaaattaac

SEQ ID NO: 3256495 - DNA, 25 bp, Homo sapien
atcaacaagccttctagggcctctt

SEQ ID NO: 3256496 - DNA, 25 bp, Homo sapien
aaggcacttacaggttcacagattg

SEQ ID NO: 3256497 - DNA, 25 bp, Homo sapien
acaagccttctagggcctcttttat

SEQ ID NO: 3256498 - DNA, 25 bp, Homo sapien
tagagatcaaggcacttacaggttc

SEQ ID NO: 3256499 - DNA, 25 bp, Homo sapien
tgagacctgtgggtggccatcttct

SEQ ID NO: 3256500 - DNA, 25 bp, Homo sapien
ggctgtcattacaaagcaccactga

SEQ ID NO: 3256501 - DNA, 25 bp, Homo sapien
cagcgtatgaactttggaagacaca

SEQ ID NO: 3256502 - DNA, 25 bp, Homo sapien
atcaaggcgacagagggtaggttcc

SEQ ID NO: 3256503 - DNA, 25 bp, Homo sapien
aaaagccagcttattgttcaatttt

SEQ ID NO: 3256504 - DNA, 25 bp, Homo sapien
tgactacagtaaccctgttgtatta

SEQ ID NO: 3256505 - DNA, 25 bp, Homo sapien
attttgttcatctttagaaaagcca

SEQ ID NO: 3256506 - DNA, 25 bp, Homo sapien
caactgctaggtgtattattcatta

SEQ ID NO: 3256507 - DNA, 25 bp, Homo sapien
tagctaaatgttaacgatagttttc

SEQ ID NO: 3256508 - DNA, 25 bp, Homo sapien
gaaattgttgctctcctaagtaatg

SEQ ID NO: 3256509 - DNA, 25 bp, Homo sapien
tttttcactcgatggagtttgactg

SEQ ID NO: 3256510 - DNA, 25 bp, Homo sapien
tctgcaggaatttttcactcgatgg

SEQ ID NO: 3256511 - DNA, 25 bp, Homo sapien
gtagacccaaagacttgatcagact

SEQ ID NO: 3256512 - DNA, 25 bp, Homo sapien
tcctgccaattggtaagtagaccca

SEQ ID NO: 3256513 - DNA, 25 bp, Homo sapien
cctcagaaccactaccaggttaaga

SEQ ID NO: 3256514 - DNA, 25 bp, Homo sapien
gaactgaacttgttgactgcataca

SEQ ID NO: 3256515 - DNA, 25 bp, Homo sapien
tcatctcatattacacaagcaacag

SEQ ID NO: 3256516 - DNA, 25 bp, Homo sapien
caccatatcacctatgatgactaac

SEQ ID NO: 3256517 - DNA, 25 bp, Homo sapien
tgaaacgtttggttctcaggacaca

SEQ ID NO: 3256518 - DNA, 25 bp, Homo sapien
ctccctcatatgtagaaagttgtgc

SEQ ID NO: 3256519 - DNA, 25 bp, Homo sapien
gatgggcaccaacgtatgacaggag

SEQ ID NO: 3256520 - DNA, 25 bp, Homo sapien
cacgacgtcttagcattgagagcca

SEQ ID NO: 3256521 - DNA, 25 bp, Homo sapien
tgcgtaacatggagaacacgacgtc

SEQ ID NO: 3256522 - DNA, 25 bp, Homo sapien
tatggagccagaaccaacagatggg

SEQ ID NO: 3256523 - DNA, 25 bp, Homo sapien
tcactaaaggtggctacttcttcat

SEQ ID NO: 3256524 - DNA, 25 bp, Homo sapien
cactaaaggtggctacttcttcatg

SEQ ID NO: 3256525 - DNA, 25 bp, Homo sapien
ctaaaggtggctacttcttcatgtt

SEQ ID NO: 3256526 - DNA, 25 bp, Homo sapien
taaaggtggctacttcttcatgttc

SEQ ID NO: 3256527 - DNA, 25 bp, Homo sapien
tctgaagattgccagaatgtttgca

SEQ ID NO: 3256528 - DNA, 25 bp, Homo sapien
ttcctaatggtaatattccgcacat

SEQ ID NO: 3256529 - DNA, 25 bp, Homo sapien
aatattccgcacatttaaaggacac

SEQ ID NO: 3256530 - DNA, 25 bp, Homo sapien
ggaaatccaatgatccacataaatg

SEQ ID NO: 3256531 - DNA, 25 bp, Homo sapien
ttaaaatgacgaccagctgcattca

SEQ ID NO: 3256532 - DNA, 25 bp, Homo sapien
gtcgtgtttgggagaagaccacagc

SEQ ID NO: 3256533 - DNA, 25 bp, Homo sapien
ggtacatgtgtaactctacacgggc

SEQ ID NO: 3256534 - DNA, 25 bp, Homo sapien
aaggtgaaaagccaggctccctcgc

SEQ ID NO: 3256535 - DNA, 25 bp, Homo sapien
cataaacccgttgtgctgttgccgg

SEQ ID NO: 3256536 - DNA, 25 bp, Homo sapien
catgatgaacaatgtagctagcacg

SEQ ID NO: 3256537 - DNA, 25 bp, Homo sapien
cagacctttgcagatggactacatc

SEQ ID NO: 3256538 - DNA, 25 bp, Homo sapien
agatggactacatctctcaaattcc

SEQ ID NO: 3256539 - DNA, 25 bp, Homo sapien
cacgttgtggatgcagacctttgca

SEQ ID NO: 3256540 - DNA, 25 bp, Homo sapien
tatccagagagcttggttaaatatc

SEQ ID NO: 3256541 - DNA, 25 bp, Homo sapien
gcccagtttcaagaatgtctttatt

SEQ ID NO: 3256542 - DNA, 25 bp, Homo sapien
tgggaatggaggagtagaaacattt

SEQ ID NO: 3256543 - DNA, 25 bp, Homo sapien
gaatggaccaatacgaatgggaatg

SEQ ID NO: 3256544 - DNA, 25 bp, Homo sapien
ttctgcacatatcttcaaactgcat

SEQ ID NO: 3256545 - DNA, 25 bp, Homo sapien
tgtaggtccggggtcggcttgggca

SEQ ID NO: 3256546 - DNA, 25 bp, Homo sapien
cttctgcacatatcttcaaactgca

SEQ ID NO: 3256547 - DNA, 25 bp, Homo sapien
ctgatggtcctgtgggataggattt

SEQ ID NO: 3256548 - DNA, 25 bp, Homo sapien
gatggtcctgtgggataggatttca

SEQ ID NO: 3256549 - DNA, 25 bp, Homo sapien
tgatggtcctgtgggataggatttc

SEQ ID NO: 3256550 - DNA, 25 bp, Homo sapien
atggtcctgtgggataggatttcag

SEQ ID NO: 3256551 - DNA, 25 bp, Homo sapien
tggtccagctgacttaggtggctga

SEQ ID NO: 3256552 - DNA, 25 bp, Homo sapien
gggtggtccagctgacttaggtggc

SEQ ID NO: 3256553 - DNA, 25 bp, Homo sapien
catgactgtgtcatggggtggtcca

SEQ ID NO: 3256554 - DNA, 25 bp, Homo sapien
tgtcatggggtggtccagctgactt

SEQ ID NO: 3256555 - DNA, 25 bp, Homo sapien
aaaaatgaaaagtctgcatttagcg

SEQ ID NO: 3256556 - DNA, 25 bp, Homo sapien
aatgaaaagtctgcatttagcgcat

SEQ ID NO: 3256557 - DNA, 25 bp, Homo sapien
tgaaaagtctgcatttagcgcatgc

SEQ ID NO: 3256558 - DNA, 25 bp, Homo sapien
aaaagtctgcatttagcgcatgcat

SEQ ID NO: 3256559 - DNA, 25 bp, Homo sapien
cttgattttcttggctagagaagaa

SEQ ID NO: 3256560 - DNA, 25 bp, Homo sapien
tcttgttctcttgaaggtgtatatt

SEQ ID NO: 3256561 - DNA, 25 bp, Homo sapien
gtatattttataataggtctccatt

SEQ ID NO: 3256562 - DNA, 25 bp, Homo sapien
taataggtctccattcaccaccctg

SEQ ID NO: 3256563 - DNA, 25 bp, Homo sapien
cattggcctgatgggagaacttttt

SEQ ID NO: 3256564 - DNA, 25 bp, Homo sapien
ccttccacccattggcctgatggga

SEQ ID NO: 3256565 - DNA, 25 bp, Homo sapien
cacccattggcctgatgggagaact

SEQ ID NO: 3256566 - DNA, 25 bp, Homo sapien
cttccacccattggcctgatgggag

SEQ ID NO: 3256567 - DNA, 25 bp, Homo sapien
ttattctcaatgttgacatggccat

SEQ ID NO: 3256568 - DNA, 25 bp, Homo sapien
tgcaacttctgcttccccagttcaa

SEQ ID NO: 3256569 - DNA, 25 bp, Homo sapien
aacttctgcttccccagttcaagcg

SEQ ID NO: 3256570 - DNA, 25 bp, Homo sapien
gcaacttctgcttccccagttcaag

SEQ ID NO: 3256571 - DNA, 25 bp, Homo sapien
actgcaacttctgcttccccagttc

SEQ ID NO: 3256572 - DNA, 25 bp, Homo sapien
gcaagaagaaaatactgccagaatt

SEQ ID NO: 3256573 - DNA, 25 bp, Homo sapien
accagtttgtcaacacactagtgat

SEQ ID NO: 3256574 - DNA, 25 bp, Homo sapien
ctgaggtaacaacgcctactttcca

SEQ ID NO: 3256575 - DNA, 25 bp, Homo sapien
aaatgttacctaaacagagtgtgac

SEQ ID NO: 3256576 - DNA, 25 bp, Homo sapien
gatgctcaggagtaagtcatccttc

SEQ ID NO: 3256577 - DNA, 25 bp, Homo sapien
tgcccaagaatcagccaaaggagtt

SEQ ID NO: 3256578 - DNA, 25 bp, Homo sapien
tcctggatgctcaggagtaagtcat

SEQ ID NO: 3256579 - DNA, 25 bp, Homo sapien
agtttccggttcattcggaatccag

SEQ ID NO: 3256580 - DNA, 25 bp, Homo sapien
aactttttgccgtgaaagtcacatc

SEQ ID NO: 3256581 - DNA, 25 bp, Homo sapien
ctaaattattgggtactgagggact

SEQ ID NO: 3256582 - DNA, 25 bp, Homo sapien
ggttatggtcaacatcatcctttca

SEQ ID NO: 3256583 - DNA, 25 bp, Homo sapien
tccccaaatcaaagcaacagggtta

SEQ ID NO: 3256584 - DNA, 25 bp, Homo sapien
taaccatttcttcaacactgaaatg

SEQ ID NO: 3256585 - DNA, 25 bp, Homo sapien
cactgaaatgtttatgggaacgttc

SEQ ID NO: 3256586 - DNA, 25 bp, Homo sapien
tgaggtctgggtctgtaaccatttc

SEQ ID NO: 3256587 - DNA, 25 bp, Homo sapien
tgaaatgtttatgggaacgttcaag

SEQ ID NO: 3256588 - DNA, 25 bp, Homo sapien
gtgcagctgccaacatgaagttgta

SEQ ID NO: 3256589 - DNA, 25 bp, Homo sapien
tatccagagccttgtataataaact

SEQ ID NO: 3256590 - DNA, 25 bp, Homo sapien
aataccgttgctatgaggtgtaaaa

SEQ ID NO: 3256591 - DNA, 25 bp, Homo sapien
tggtccccaaggtgtgattgtcctt

SEQ ID NO: 3256592 - DNA, 25 bp, Homo sapien
ttttctgtcgaggtcctcaacagtc

SEQ ID NO: 3256593 - DNA, 25 bp, Homo sapien
acagaggactcctgaaaccttttct

SEQ ID NO: 3256594 - DNA, 25 bp, Homo sapien
tgttgatgatcccacagtgtttgca

SEQ ID NO: 3256595 - DNA, 25 bp, Homo sapien
caacagtctgtgcaaccacagcaga

SEQ ID NO: 3256596 - DNA, 25 bp, Homo sapien
cgtactagagtcatcctagttgtca

SEQ ID NO: 3256597 - DNA, 25 bp, Homo sapien
gagtcatcctagttgtcaccaaaaa

SEQ ID NO: 3256598 - DNA, 25 bp, Homo sapien
gccccaggactgagctcagtcattg

SEQ ID NO: 3256599 - DNA, 25 bp, Homo sapien
tctcacttctcgtactagagtcatc

SEQ ID NO: 3256600 - DNA, 25 bp, Homo sapien
cttttgccagcatgttcatgatacg

SEQ ID NO: 3256601 - DNA, 25 bp, Homo sapien
ccaggaagctccaggtctacccctt

SEQ ID NO: 3256602 - DNA, 25 bp, Homo sapien
taactccagactgatcaccaagtct

SEQ ID NO: 3256603 - DNA, 25 bp, Homo sapien
tgccagcatgttcatgatacggcat

SEQ ID NO: 3256604 - DNA, 25 bp, Homo sapien
gaagaattcagtaaacagagcatgg

SEQ ID NO: 3256605 - DNA, 25 bp, Homo sapien
tcaaagcacttatgacatgaggaaa

SEQ ID NO: 3256606 - DNA, 25 bp, Homo sapien
gggccaataatagaccgaacttgta

SEQ ID NO: 3256607 - DNA, 25 bp, Homo sapien
tggtctagaaggaatttcagcagga

SEQ ID NO: 3256608 - DNA, 25 bp, Homo sapien
cacgactcattggcaaaattttccc

SEQ ID NO: 3256609 - DNA, 25 bp, Homo sapien
aaaaccagtgattctccatattacc

SEQ ID NO: 3256610 - DNA, 25 bp, Homo sapien
cccaaagttctataaaaccagtgat

SEQ ID NO: 3256611 - DNA, 25 bp, Homo sapien
accagtgattctccatattacccat

SEQ ID NO: 3256612 - DNA, 25 bp, Homo sapien
gctgttccgatctgtctagacagac

SEQ ID NO: 3256613 - DNA, 25 bp, Homo sapien
gatctgtctagacagacttctcttt

SEQ ID NO: 3256614 - DNA, 25 bp, Homo sapien
gttccgatctgtctagacagacttc

SEQ ID NO: 3256615 - DNA, 25 bp, Homo sapien
cagctgttccgatctgtctagacag

SEQ ID NO: 3256616 - DNA, 25 bp, Homo sapien
cattagtgggctctttagttcctgc

SEQ ID NO: 3256617 - DNA, 25 bp, Homo sapien
attagtgggctctttagttcctgct

SEQ ID NO: 3256618 - DNA, 25 bp, Homo sapien
caagaacttgaaagatggcttccag

SEQ ID NO: 3256619 - DNA, 25 bp, Homo sapien
caactttgttatccaattagctata

SEQ ID NO: 3256620 - DNA, 25 bp, Homo sapien
gccaggattgccattgcctcgcctg

SEQ ID NO: 3256621 - DNA, 25 bp, Homo sapien
tggaaggtaacttatttgaaggcaa

SEQ ID NO: 3256622 - DNA, 25 bp, Homo sapien
tagagagaggaagctatccaaggca

SEQ ID NO: 3256623 - DNA, 25 bp, Homo sapien
ctagagagaggaagctatccaaggc

SEQ ID NO: 3256624 - DNA, 25 bp, Homo sapien
gagagaggaagctatccaaggcacc

SEQ ID NO: 3256625 - DNA, 25 bp, Homo sapien
agagaggaagctatccaaggcacca

SEQ ID NO: 3256626 - DNA, 25 bp, Homo sapien
caattgcagaattggtcctcttttg

SEQ ID NO: 3256627 - DNA, 25 bp, Homo sapien
aggacaattgcagaattggtcctct

SEQ ID NO: 3256628 - DNA, 25 bp, Homo sapien
tgcagaattggtcctcttttgttgc

SEQ ID NO: 3256629 - DNA, 25 bp, Homo sapien
agaattggtcctcttttgttgcttc

SEQ ID NO: 3256630 - DNA, 25 bp, Homo sapien
tactctagcttcataaattgggccc

SEQ ID NO: 3256631 - DNA, 25 bp, Homo sapien
agttttgaccgttcgcaggccctga

SEQ ID NO: 3256632 - DNA, 25 bp, Homo sapien
gggcccttgacttgataacacacag

SEQ ID NO: 3256633 - DNA, 25 bp, Homo sapien
gacctatcttctagccagggcccta

SEQ ID NO: 3256634 - DNA, 25 bp, Homo sapien
gaagtcgtgcattttcaagaactaa

SEQ ID NO: 3256635 - DNA, 25 bp, Homo sapien
ggtggttgcctccacattgaggaac

SEQ ID NO: 3256636 - DNA, 25 bp, Homo sapien
gaggctgccacgatgttttaattga

SEQ ID NO: 3256637 - DNA, 25 bp, Homo sapien
tctgtgcccttgtagaggctgccac

SEQ ID NO: 3256638 - DNA, 25 bp, Homo sapien
cctttttggcacaaatagacagaga

SEQ ID NO: 3256639 - DNA, 25 bp, Homo sapien
tagagagtacctttttggcacaaat

SEQ ID NO: 3256640 - DNA, 25 bp, Homo sapien
gagtacctttttggcacaaatagac

SEQ ID NO: 3256641 - DNA, 25 bp, Homo sapien
aggtagagagtacctttttggcaca

SEQ ID NO: 3256642 - DNA, 25 bp, Homo sapien
aactttgccttcaagtttcccactg

SEQ ID NO: 3256643 - DNA, 25 bp, Homo sapien
actttgccttcaagtttcccactgg

SEQ ID NO: 3256644 - DNA, 25 bp, Homo sapien
gcctctgtaaagccaactttgcctt

SEQ ID NO: 3256645 - DNA, 25 bp, Homo sapien
ggccgtcgcagcacgcttgtcaaaa

SEQ ID NO: 3256646 - DNA, 25 bp, Homo sapien
ccaacattcgaggtattccatgagc

SEQ ID NO: 3256647 - DNA, 25 bp, Homo sapien
gacattcccactgctgatcctgtag

SEQ ID NO: 3256648 - DNA, 25 bp, Homo sapien
catttcaagtgtgagatgaatccca

SEQ ID NO: 3256649 - DNA, 25 bp, Homo sapien
taggccttgttgagcattgctggtg

SEQ ID NO: 3256650 - DNA, 25 bp, Homo sapien
ggccttgttgagcattgctggtgct

SEQ ID NO: 3256651 - DNA, 25 bp, Homo sapien
ttaggccttgttgagcattgctggt

SEQ ID NO: 3256652 - DNA, 25 bp, Homo sapien
aggccttgttgagcattgctggtgc

SEQ ID NO: 3256653 - DNA, 25 bp, Homo sapien
ggagccttcgccacacagtctttgg

SEQ ID NO: 3256654 - DNA, 25 bp, Homo sapien
ggcagcaggcaagcctcttcatctc

SEQ ID NO: 3256655 - DNA, 25 bp, Homo sapien
agtctttggcagcaggcaagcctct

SEQ ID NO: 3256656 - DNA, 25 bp, Homo sapien
acggagccttcgccacacagtcttt

SEQ ID NO: 3256657 - DNA, 25 bp, Homo sapien
ctatcgtgatgtctccgtagggcta

SEQ ID NO: 3256658 - DNA, 25 bp, Homo sapien
ctccgtagggctagtttccgcttgg

SEQ ID NO: 3256659 - DNA, 25 bp, Homo sapien
cgtgatgtctccgtagggctagttt

SEQ ID NO: 3256660 - DNA, 25 bp, Homo sapien
gatgtctccgtagggctagtttccg

SEQ ID NO: 3256661 - DNA, 25 bp, Homo sapien
actgagagtcttagaatagaaaacc

SEQ ID NO: 3256662 - DNA, 25 bp, Homo sapien
tattaacagactgagagtcttagaa

SEQ ID NO: 3256663 - DNA, 25 bp, Homo sapien
gagtggagagtaatagaaatagagt

SEQ ID NO: 3256664 - DNA, 25 bp, Homo sapien
gtaatagaaatagagtgtattccac

SEQ ID NO: 3256665 - DNA, 25 bp, Homo sapien
ttatcgttgtccactttatcagctt

SEQ ID NO: 3256666 - DNA, 25 bp, Homo sapien
catgaaattggaagggccagaattc

SEQ ID NO: 3256667 - DNA, 25 bp, Homo sapien
catcttagcataggtcttatcgttg

SEQ ID NO: 3256668 - DNA, 25 bp, Homo sapien
tatcagctttgccatgaaattggaa

SEQ ID NO: 3256669 - DNA, 25 bp, Homo sapien
aggaagtgtcagagctaaaaccgca

SEQ ID NO: 3256670 - DNA, 25 bp, Homo sapien
gggctctcagataggaagtgtcaga

SEQ ID NO: 3256671 - DNA, 25 bp, Homo sapien
gaagtgtcagagctaaaaccgcaaa

SEQ ID NO: 3256672 - DNA, 25 bp, Homo sapien
gtggtccaagggctctcagatagga

SEQ ID NO: 3256673 - DNA, 25 bp, Homo sapien
tttcgctgaataaacagcgcctcgg

SEQ ID NO: 3256674 - DNA, 25 bp, Homo sapien
aaatcctaaatgactcttgagctgg

SEQ ID NO: 3256675 - DNA, 25 bp, Homo sapien
tgatttcgctgataggacctgagtc

SEQ ID NO: 3256676 - DNA, 25 bp, Homo sapien
tgcacacgcttaattgcaccacaga

SEQ ID NO: 3256677 - DNA, 25 bp, Homo sapien
gccaaagaccagcagctatcactac

SEQ ID NO: 3256678 - DNA, 25 bp, Homo sapien
cttagccaaagaccagcagctatca

SEQ ID NO: 3256679 - DNA, 25 bp, Homo sapien
cacttagccaaagaccagcagctat

SEQ ID NO: 3256680 - DNA, 25 bp, Homo sapien
tagccaaagaccagcagctatcact

SEQ ID NO: 3256681 - DNA, 25 bp, Homo sapien
ttctgctccgctctagactctaaga

SEQ ID NO: 3256682 - DNA, 25 bp, Homo sapien
ctttcagacggtccctgctgctctt

SEQ ID NO: 3256683 - DNA, 25 bp, Homo sapien
tttgatgccttgtctgagcctctgg

SEQ ID NO: 3256684 - DNA, 25 bp, Homo sapien
ggtgacaggcttttattgtgggctt

SEQ ID NO: 3256685 - DNA, 25 bp, Homo sapien
cattgcccggatccctaacaaggtg

SEQ ID NO: 3256686 - DNA, 25 bp, Homo sapien
actgctcagtgaccgcgatgtggcc

SEQ ID NO: 3256687 - DNA, 25 bp, Homo sapien
cagggatcccattaaaatacagagc

SEQ ID NO: 3256688 - DNA, 25 bp, Homo sapien
tcttttcatagctcacattgcccgg

SEQ ID NO: 3256689 - DNA, 25 bp, Homo sapien
gccgcttgtaagtaatttagcttta

SEQ ID NO: 3256690 - DNA, 25 bp, Homo sapien
caatctgccgcttgtaagtaattta

SEQ ID NO: 3256691 - DNA, 25 bp, Homo sapien
ccccagggtttgggatctggaatga

SEQ ID NO: 3256692 - DNA, 25 bp, Homo sapien
tctgccgcttgtaagtaatttagct

SEQ ID NO: 3256693 - DNA, 25 bp, Homo sapien
ttggttgtcagtgaaacactcagat

SEQ ID NO: 3256694 - DNA, 25 bp, Homo sapien
aaacactcagattgtttctgtggct

SEQ ID NO: 3256695 - DNA, 25 bp, Homo sapien
gtgaaacactcagattgtttctgtg

SEQ ID NO: 3256696 - DNA, 25 bp, Homo sapien
gaaacactcagattgtttctgtggc

SEQ ID NO: 3256697 - DNA, 25 bp, Homo sapien
ggagagggaacatgaaaaggaccat

SEQ ID NO: 3256698 - DNA, 25 bp, Homo sapien
gggagatatctgaggcatcttcatg

SEQ ID NO: 3256699 - DNA, 25 bp, Homo sapien
cagggaagggagatatctgaggcat

SEQ ID NO: 3256700 - DNA, 25 bp, Homo sapien
aaaaggaccatactgtgagttcaaa

SEQ ID NO: 3256701 - DNA, 25 bp, Homo sapien
agaagccacgagacatttgtttgtt

SEQ ID NO: 3256702 - DNA, 25 bp, Homo sapien
gagaagccacgagacatttgtttgt

SEQ ID NO: 3256703 - DNA, 25 bp, Homo sapien
gacatttgtttgttcactaggcagt

SEQ ID NO: 3256704 - DNA, 25 bp, Homo sapien
aatcaccagagtcttccacagtggt

SEQ ID NO: 3256705 - DNA, 25 bp, Homo sapien
taaaagcattctaatttgtccacat

SEQ ID NO: 3256706 - DNA, 25 bp, Homo sapien
tgtaaaagcattctaatttgtccac

SEQ ID NO: 3256707 - DNA, 25 bp, Homo sapien
aaagcattctaatttgtccacatcc

SEQ ID NO: 3256708 - DNA, 25 bp, Homo sapien
cagtgctaaaagtcgatttgcagca

SEQ ID NO: 3256709 - DNA, 25 bp, Homo sapien
ctcttctcgtctgcttatcgactct

SEQ ID NO: 3256710 - DNA, 25 bp, Homo sapien
tgcttatcgactcttcttccagtgc

SEQ ID NO: 3256711 - DNA, 25 bp, Homo sapien
tccagtgctaaaagtcgatttgcag

SEQ ID NO: 3256712 - DNA, 25 bp, Homo sapien
tccacaggatagaattcagagcagt

SEQ ID NO: 3256713 - DNA, 25 bp, Homo sapien
gaaaagtggctactgctgaacaatc

SEQ ID NO: 3256714 - DNA, 25 bp, Homo sapien
gtaaaggagcaggaatatgaaccca

SEQ ID NO: 3256715 - DNA, 25 bp, Homo sapien
gaacaatcagcttgtagctctccta

SEQ ID NO: 3256716 - DNA, 25 bp, Homo sapien
aaagctggaaatatcctaagtacct

SEQ ID NO: 3256717 - DNA, 25 bp, Homo sapien
gaacgtcgaattcctcaaaagctgg

SEQ ID NO: 3256718 - DNA, 25 bp, Homo sapien
aatatcctaagtacctttgttatca

SEQ ID NO: 3256719 - DNA, 25 bp, Homo sapien
cctctgctgaacgtcgaattcctca

SEQ ID NO: 3256720 - DNA, 25 bp, Homo sapien
cacgagggtccacttgcaggaacat

SEQ ID NO: 3256721 - DNA, 25 bp, Homo sapien
aaaccctgcccatgaggtcaggacc

SEQ ID NO: 3256722 - DNA, 25 bp, Homo sapien
tcaggaccacgagggtccacttgca

SEQ ID NO: 3256723 - DNA, 25 bp, Homo sapien
catgaggtcaggaccacgagggtcc

SEQ ID NO: 3256724 - DNA, 25 bp, Homo sapien
cctgagaattaactgtgcgattctt

SEQ ID NO: 3256725 - DNA, 25 bp, Homo sapien
gcctggatcttacaacagccgagaa

SEQ ID NO: 3256726 - DNA, 25 bp, Homo sapien
ttaactgtgcgattcttataaacat

SEQ ID NO: 3256727 - DNA, 25 bp, Homo sapien
aacgaaggcttgaattgaggaacct

SEQ ID NO: 3256728 - DNA, 25 bp, Homo sapien
gaaaggacttcagacatattctagg

SEQ ID NO: 3256729 - DNA, 25 bp, Homo sapien
tctcactctgacgactgtaactgcc

SEQ ID NO: 3256730 - DNA, 25 bp, Homo sapien
gaatcaaagcctaccttctcacctg

SEQ ID NO: 3256731 - DNA, 25 bp, Homo sapien
cctgcctccgttgtgggaagagagt

SEQ ID NO: 3256732 - DNA, 25 bp, Homo sapien
agtcatactttctcgtttctgtgca

SEQ ID NO: 3256733 - DNA, 25 bp, Homo sapien
gtcttcatctagcaagtccaacatt

SEQ ID NO: 3256734 - DNA, 25 bp, Homo sapien
tcaaagacagtttctagtgactgct

SEQ ID NO: 3256735 - DNA, 25 bp, Homo sapien
gatggtatgccacaggtctatccag

SEQ ID NO: 3256736 - DNA, 25 bp, Homo sapien
tcactgatacccaaaccagacttat

SEQ ID NO: 3256737 - DNA, 25 bp, Homo sapien
ggagaggactttcagaggcctttat

SEQ ID NO: 3256738 - DNA, 25 bp, Homo sapien
tgcccactttcaatcaagacttgtt

SEQ ID NO: 3256739 - DNA, 25 bp, Homo sapien
tctactgctgttggccttaagtagg

SEQ ID NO: 3256740 - DNA, 25 bp, Homo sapien
gagcagcagatataaagatttgagc

SEQ ID NO: 3256741 - DNA, 25 bp, Homo sapien
ccttctaataccataagctcaggag

SEQ ID NO: 3256742 - DNA, 25 bp, Homo sapien
gaataagtccatctagctggagcca

SEQ ID NO: 3256743 - DNA, 25 bp, Homo sapien
tcacagatgacaccatttagccatg

SEQ ID NO: 3256744 - DNA, 25 bp, Homo sapien
tgaggttcagaaataaaagacgtga

SEQ ID NO: 3256745 - DNA, 25 bp, Homo sapien
tcacaggttggtgatgactgttctt

SEQ ID NO: 3256746 - DNA, 25 bp, Homo sapien
gacgtgaatgcacgggataagcccc

SEQ ID NO: 3256747 - DNA, 25 bp, Homo sapien
gataagccccaatccaagactcaca

SEQ ID NO: 3256748 - DNA, 25 bp, Homo sapien
taatagctatagcatagctccttac

SEQ ID NO: 3256749 - DNA, 25 bp, Homo sapien
agctccttacaatgataaaactcag

SEQ ID NO: 3256750 - DNA, 25 bp, Homo sapien
tagcatagctccttacaatgataaa

SEQ ID NO: 3256751 - DNA, 25 bp, Homo sapien
tttcctaatataatagctatagcat

SEQ ID NO: 3256752 - DNA, 25 bp, Homo sapien
gatcttatccaaagactggtagagc

SEQ ID NO: 3256753 - DNA, 25 bp, Homo sapien
gaagacatcgacttctgtgccagac

SEQ ID NO: 3256754 - DNA, 25 bp, Homo sapien
ttggcaacaacctgatgaagacatc

SEQ ID NO: 3256755 - DNA, 25 bp, Homo sapien
gccagactccacaagaaattcagtc

SEQ ID NO: 3256756 - DNA, 25 bp, Homo sapien
tggaagctctcgagaaacccatctc

SEQ ID NO: 3256757 - DNA, 25 bp, Homo sapien
gaagctctcgagaaacccatctctg

SEQ ID NO: 3256758 - DNA, 25 bp, Homo sapien
ctggaagctctcgagaaacccatct

SEQ ID NO: 3256759 - DNA, 25 bp, Homo sapien
agctctcgagaaacccatctctggt

SEQ ID NO: 3256760 - DNA, 25 bp, Homo sapien
tgataccttggtgggtctctgactg

SEQ ID NO: 3256761 - DNA, 25 bp, Homo sapien
agtgacctcatcattgataccttgg

SEQ ID NO: 3256762 - DNA, 25 bp, Homo sapien
taccttggtgggtctctgactgttt

SEQ ID NO: 3256763 - DNA, 25 bp, Homo sapien
cattgataccttggtgggtctctga

SEQ ID NO: 3256764 - DNA, 25 bp, Homo sapien
gagtttcagtacaagccgtttgcac

SEQ ID NO: 3256765 - DNA, 25 bp, Homo sapien
ggacaaggtgcttagcctctctgag

SEQ ID NO: 3256766 - DNA, 25 bp, Homo sapien
tttcagaagcccctatgcacctagc

SEQ ID NO: 3256767 - DNA, 25 bp, Homo sapien
tgctagttatgccacctggacaagg

SEQ ID NO: 3256768 - DNA, 25 bp, Homo sapien
gcctttcttgccagccctatctcta

SEQ ID NO: 3256769 - DNA, 25 bp, Homo sapien
tgcctttcttgccagccctatctct

SEQ ID NO: 3256770 - DNA, 25 bp, Homo sapien
acaatcacaagatgcatgttgacga

SEQ ID NO: 3256771 - DNA, 25 bp, Homo sapien
caagatgcatgttgacgagtgagtt

SEQ ID NO: 3256772 - DNA, 25 bp, Homo sapien
atgcatgttgacgagtgagttttac

SEQ ID NO: 3256773 - DNA, 25 bp, Homo sapien
atcacaagatgcatgttgacgagtg

SEQ ID NO: 3256774 - DNA, 25 bp, Homo sapien
ttctcaaacttgtttcgatgttgct

SEQ ID NO: 3256775 - DNA, 25 bp, Homo sapien
acttgtttcgatgttgctgaagcac

SEQ ID NO: 3256776 - DNA, 25 bp, Homo sapien
caaacttgtttcgatgttgctgaag

SEQ ID NO: 3256777 - DNA, 25 bp, Homo sapien
ctcaaacttgtttcgatgttgctga

SEQ ID NO: 3256778 - DNA, 25 bp, Homo sapien
ctgaaagtcaggcaagatatcaaga

SEQ ID NO: 3256779 - DNA, 25 bp, Homo sapien
aagtcaggcaagatatcaagaagtg

SEQ ID NO: 3256780 - DNA, 25 bp, Homo sapien
gttttacagttaatgagactttaca

SEQ ID NO: 3256781 - DNA, 25 bp, Homo sapien
tggttttacagttaatgagacttta

SEQ ID NO: 3256782 - DNA, 25 bp, Homo sapien
tctcacccagaatgaggatccacag

SEQ ID NO: 3256783 - DNA, 25 bp, Homo sapien
gaaattgagtctcacccagaatgag

SEQ ID NO: 3256784 - DNA, 25 bp, Homo sapien
tatacacgttcatgaaattgagtct

SEQ ID NO: 3256785 - DNA, 25 bp, Homo sapien
cgttcatgaaattgagtctcaccca

SEQ ID NO: 3256786 - DNA, 25 bp, Homo sapien
tccaacacatcccacattcaataac

SEQ ID NO: 3256787 - DNA, 25 bp, Homo sapien
catcccacattcaataacatcaagg

SEQ ID NO: 3256788 - DNA, 25 bp, Homo sapien
caacacatcccacattcaataacat

SEQ ID NO: 3256789 - DNA, 25 bp, Homo sapien
acacatcccacattcaataacatca

SEQ ID NO: 3256790 - DNA, 25 bp, Homo sapien
tgaaatagtaactgacaggtgctca

SEQ ID NO: 3256791 - DNA, 25 bp, Homo sapien
ggccagcactgaaatagtaactgac

SEQ ID NO: 3256792 - DNA, 25 bp, Homo sapien
tctcttgttctccacttatggccag

SEQ ID NO: 3256793 - DNA, 25 bp, Homo sapien
ttgttctccacttatggccagcact

SEQ ID NO: 3256794 - DNA, 25 bp, Homo sapien
tttgcacaatatatagtattgttta

SEQ ID NO: 3256795 - DNA, 25 bp, Homo sapien
tgtttgcacaatatatagtattgtt

SEQ ID NO: 3256796 - DNA, 25 bp, Homo sapien
ttgtttgcacaatatatagtattgt

SEQ ID NO: 3256797 - DNA, 25 bp, Homo sapien
gtttgcacaatatatagtattgttt

SEQ ID NO: 3256798 - DNA, 25 bp, Homo sapien
cccctggcaagactctgaactggag

SEQ ID NO: 3256799 - DNA, 25 bp, Homo sapien
aaggagagcgctgtggtcgtggaag

SEQ ID NO: 3256800 - DNA, 25 bp, Homo sapien
agagcgctgtggtcgtggaaggaga

SEQ ID NO: 3256801 - DNA, 25 bp, Homo sapien
gagccacggcgaggagagggtggct

SEQ ID NO: 3256802 - DNA, 25 bp, Homo sapien
ttgtaaacacaagtccactgtatgt

SEQ ID NO: 3256803 - DNA, 25 bp, Homo sapien
tgtttttaaaacgtgagaagaagca

SEQ ID NO: 3256804 - DNA, 25 bp, Homo sapien
caggatcctgccctcgtgttttgac

SEQ ID NO: 3256805 - DNA, 25 bp, Homo sapien
atcccttggcagtattgtaaacaca

SEQ ID NO: 3256806 - DNA, 25 bp, Homo sapien
caattctcagagtgggttgttgaaa

SEQ ID NO: 3256807 - DNA, 25 bp, Homo sapien
taattggtgcggacttactcatgtc

SEQ ID NO: 3256808 - DNA, 25 bp, Homo sapien
gttgttgaaattcccactctcaggg

SEQ ID NO: 3256809 - DNA, 25 bp, Homo sapien
atcaaggtgctcttatgttgggtgc

SEQ ID NO: 3256810 - DNA, 25 bp, Homo sapien
ctacactgttgattgggtaaggcac

SEQ ID NO: 3256811 - DNA, 25 bp, Homo sapien
ccctgtgatttcttgactgttatca

SEQ ID NO: 3256812 - DNA, 25 bp, Homo sapien
tttcctatagatgtgtcctacactg

SEQ ID NO: 3256813 - DNA, 25 bp, Homo sapien
tctggtggaagttgcctcttccaat

SEQ ID NO: 3256814 - DNA, 25 bp, Homo sapien
cactccacacctaaagtccttgaaa

SEQ ID NO: 3256815 - DNA, 25 bp, Homo sapien
tcataagagcccagcaagaaacagg

SEQ ID NO: 3256816 - DNA, 25 bp, Homo sapien
taagtaccatgctacactcacccat

SEQ ID NO: 3256817 - DNA, 25 bp, Homo sapien
gggcaagaagactaaccaagtgcta

SEQ ID NO: 3256818 - DNA, 25 bp, Homo sapien
gagtcactccggcacagcgtttgtg

SEQ ID NO: 3256819 - DNA, 25 bp, Homo sapien
aaagtcacagaacggctctggagtc

SEQ ID NO: 3256820 - DNA, 25 bp, Homo sapien
gggagatagatgctaacaaaatcct

SEQ ID NO: 3256821 - DNA, 25 bp, Homo sapien
tgtgtgttggagagccagcctacct

SEQ ID NO: 3256822 - DNA, 25 bp, Homo sapien
tggtaggggtaccaaagtgatcctc

SEQ ID NO: 3256823 - DNA, 25 bp, Homo sapien
tgaccatggtgagcctattggtagg

SEQ ID NO: 3256824 - DNA, 25 bp, Homo sapien
tattggtaggggtaccaaagtgatc

SEQ ID NO: 3256825 - DNA, 25 bp, Homo sapien
gcatgcctgagagtcttctgctgga

SEQ ID NO: 3256826 - DNA, 25 bp, Homo sapien
aagaactaaacaagaccaagcctat

SEQ ID NO: 3256827 - DNA, 25 bp, Homo sapien
agaactaaacaagaccaagcctatt

SEQ ID NO: 3256828 - DNA, 25 bp, Homo sapien
tagaaggtcagttggaattcagggc

SEQ ID NO: 3256829 - DNA, 25 bp, Homo sapien
gcattgctattcattcctccttagg

SEQ ID NO: 3256830 - DNA, 25 bp, Homo sapien
ttttctgtagaaggtcagttggaat

SEQ ID NO: 3256831 - DNA, 25 bp, Homo sapien
caatgactggaaagaccacttggca

SEQ ID NO: 3256832 - DNA, 25 bp, Homo sapien
tatctttgttagagtatgtttctcg

SEQ ID NO: 3256833 - DNA, 25 bp, Homo sapien
ggagcctggcagaataataagtgta

SEQ ID NO: 3256834 - DNA, 25 bp, Homo sapien
ttagaatagtatgcagaggagcctg

SEQ ID NO: 3256835 - DNA, 25 bp, Homo sapien
tggaaggtaaacaccacagaccatt

SEQ ID NO: 3256836 - DNA, 25 bp, Homo sapien
ggacttcaggttaagagcccctgct

SEQ ID NO: 3256837 - DNA, 25 bp, Homo sapien
tgaatgaggatgaagcctttgtgct

SEQ ID NO: 3256838 - DNA, 25 bp, Homo sapien
gccacctcgcaatctggaagccatt

SEQ ID NO: 3256839 - DNA, 25 bp, Homo sapien
catgcagacatggagtggatggcag

SEQ ID NO: 3256840 - DNA, 25 bp, Homo sapien
tctggaagccatttgaatgaggatg

SEQ ID NO: 3256841 - DNA, 25 bp, Homo sapien
cctttgcaagggcagttcccatggg

SEQ ID NO: 3256842 - DNA, 25 bp, Homo sapien
gagccctctgggggcctttgcaagg

SEQ ID NO: 3256843 - DNA, 25 bp, Homo sapien
tctgggggcctttgcaagggcagtt

SEQ ID NO: 3256844 - DNA, 25 bp, Homo sapien
ggggcctttgcaagggcagttccca

SEQ ID NO: 3256845 - DNA, 25 bp, Homo sapien
gatgccctgagatgcaacccgggct

SEQ ID NO: 3256846 - DNA, 25 bp, Homo sapien
cctgagatgcaacccgggctcgagt

SEQ ID NO: 3256847 - DNA, 25 bp, Homo sapien
gccctgagatgcaacccgggctcga

SEQ ID NO: 3256848 - DNA, 25 bp, Homo sapien
caggatgccctgagatgcaacccgg

SEQ ID NO: 3256849 - DNA, 25 bp, Homo sapien
caagtttttagtcagtgtgtccaga

SEQ ID NO: 3256850 - DNA, 25 bp, Homo sapien
tagtcagtgtgtccagagacccgtg

SEQ ID NO: 3256851 - DNA, 25 bp, Homo sapien
ggttgccctggcatgaatacaagtt

SEQ ID NO: 3256852 - DNA, 25 bp, Homo sapien
gaatgtgaaggttgccctggcatga

SEQ ID NO: 3256853 - DNA, 25 bp, Homo sapien
actgtgttattcttaagttctgtaa

SEQ ID NO: 3256854 - DNA, 25 bp, Homo sapien
tgtaatcctagagatggattcagcc

SEQ ID NO: 3256855 - DNA, 25 bp, Homo sapien
acactggcgtactcctgcttttgct

SEQ ID NO: 3256856 - DNA, 25 bp, Homo sapien
gtgagtcacactggcgtactcctgc

SEQ ID NO: 3256857 - DNA, 25 bp, Homo sapien
attcagtcatgaaaacagtttgttc

SEQ ID NO: 3256858 - DNA, 25 bp, Homo sapien
aatatatacttgtgtaacagattta

SEQ ID NO: 3256859 - DNA, 25 bp, Homo sapien
tgttcgttcacttgaaactgtgtaa

SEQ ID NO: 3256860 - DNA, 25 bp, Homo sapien
gaaaacagtttgttcgttcacttga

SEQ ID NO: 3256861 - DNA, 25 bp, Homo sapien
tctgaacctgacagagggtcactgc

SEQ ID NO: 3256862 - DNA, 25 bp, Homo sapien
tcaccagttcacaacctcagatggg

SEQ ID NO: 3256863 - DNA, 25 bp, Homo sapien
tcactgcagcatgaggcgtataacg

SEQ ID NO: 3256864 - DNA, 25 bp, Homo sapien
cgtataacgtgatgggtgagaagtc

SEQ ID NO: 3256865 - DNA, 25 bp, Homo sapien
caatctaccatgtgggaggcctaag

SEQ ID NO: 3256866 - DNA, 25 bp, Homo sapien
gattaagggaccaagtcaagaggct

SEQ ID NO: 3256867 - DNA, 25 bp, Homo sapien
tataggctgtgccagtgatctctgc

SEQ ID NO: 3256868 - DNA, 25 bp, Homo sapien
gctggctgttaacaaaggactggca

SEQ ID NO: 3256869 - DNA, 25 bp, Homo sapien
cagaaacaggtttacagtcagaaag

SEQ ID NO: 3256870 - DNA, 25 bp, Homo sapien
tcagaaaggttgtaacctgggctcc

SEQ ID NO: 3256871 - DNA, 25 bp, Homo sapien
tgtgcctcccatgttcctagggcct

SEQ ID NO: 3256872 - DNA, 25 bp, Homo sapien
gccttcctagcctgaacactatgat

SEQ ID NO: 3256873 - DNA, 25 bp, Homo sapien
tctgtataagctagtcgtggcccta

SEQ ID NO: 3256874 - DNA, 25 bp, Homo sapien
ccatagggctatgaatccagtccat

SEQ ID NO: 3256875 - DNA, 25 bp, Homo sapien
catccatagggtcctaccaaccgta

SEQ ID NO: 3256876 - DNA, 25 bp, Homo sapien
caaccgtagggccaccaatgttgta

SEQ ID NO: 3256877 - DNA, 25 bp, Homo sapien
ggaggtgacccatggatgtctaccg

SEQ ID NO: 3256878 - DNA, 25 bp, Homo sapien
gagttatcagttcatttcagagcga

SEQ ID NO: 3256879 - DNA, 25 bp, Homo sapien
gaggactccctcatgaggagctaga

SEQ ID NO: 3256880 - DNA, 25 bp, Homo sapien
gctagaagcagttgaaaattgaggg

SEQ ID NO: 3256881 - DNA, 25 bp, Homo sapien
ggaaggcctttcgtatcatcactta

SEQ ID NO: 3256882 - DNA, 25 bp, Homo sapien
gaaccaatttgtgtagcccctggct

SEQ ID NO: 3256883 - DNA, 25 bp, Homo sapien
tagaaatgttcaggccaaagaacgc

SEQ ID NO: 3256884 - DNA, 25 bp, Homo sapien
cagcgtagtccattctgtcacagaa

SEQ ID NO: 3256885 - DNA, 25 bp, Homo sapien
ttctttcaaatccaaggagctgcct

SEQ ID NO: 3256886 - DNA, 25 bp, Homo sapien
cattctcgggagtactcttatgcag

SEQ ID NO: 3256887 - DNA, 25 bp, Homo sapien
gaaattccacgtggagcatcagctg

SEQ ID NO: 3256888 - DNA, 25 bp, Homo sapien
gcaatgaagcagtctaattccaggg

SEQ ID NO: 3256889 - DNA, 25 bp, Homo sapien
cagtccttgacataggttcctggtt

SEQ ID NO: 3256890 - DNA, 25 bp, Homo sapien
gagggttaacagtccttgacatagg

SEQ ID NO: 3256891 - DNA, 25 bp, Homo sapien
tctaggagggttaacagtccttgac

SEQ ID NO: 3256892 - DNA, 25 bp, Homo sapien
tagagcttctaggagggttaacagt

SEQ ID NO: 3256893 - DNA, 25 bp, Homo sapien
gaagagaatggcaactcagctactg

SEQ ID NO: 3256894 - DNA, 25 bp, Homo sapien
tggacaccataaatgaagcaggagt

SEQ ID NO: 3256895 - DNA, 25 bp, Homo sapien
gacgtagacgtgatattaacttcca

SEQ ID NO: 3256896 - DNA, 25 bp, Homo sapien
gctgaacttctgatgatggacacca

SEQ ID NO: 3256897 - DNA, 25 bp, Homo sapien
tcactatttctgccctgacaatacg

SEQ ID NO: 3256898 - DNA, 25 bp, Homo sapien
tgattttcttcttccgggtacttca

SEQ ID NO: 3256899 - DNA, 25 bp, Homo sapien
gagtagaggtggtatgttgattttc

SEQ ID NO: 3256900 - DNA, 25 bp, Homo sapien
ctctgagtagaggtggtatgttgat

SEQ ID NO: 3256901 - DNA, 25 bp, Homo sapien
gacttataatatgctgtgggaacac

SEQ ID NO: 3256902 - DNA, 25 bp, Homo sapien
tgggcgacttacacagaatctattc

SEQ ID NO: 3256903 - DNA, 25 bp, Homo sapien
tacgaacatattagccttgggtggc

SEQ ID NO: 3256904 - DNA, 25 bp, Homo sapien
gactcatgatttactaggcactctg

SEQ ID NO: 3256905 - DNA, 25 bp, Homo sapien
gacaggactgaaaggactatgcttt

SEQ ID NO: 3256906 - DNA, 25 bp, Homo sapien
gctggatttcctaaacaacggcaat

SEQ ID NO: 3256907 - DNA, 25 bp, Homo sapien
cattcttaaagagccgattgctgga

SEQ ID NO: 3256908 - DNA, 25 bp, Homo sapien
caaaacttccttgcaattcagactg

SEQ ID NO: 3256909 - DNA, 25 bp, Homo sapien
tgtggtcagcaccttaactcattag

SEQ ID NO: 3256910 - DNA, 25 bp, Homo sapien
aatttcttggctgccgctatgcatg

SEQ ID NO: 3256911 - DNA, 25 bp, Homo sapien
tacttttttagttgcacagggtgcg

SEQ ID NO: 3256912 - DNA, 25 bp, Homo sapien
caaagcttttagagatacgtacaca

SEQ ID NO: 3256913 - DNA, 25 bp, Homo sapien
tttgatcccaaggatttcagcagca

SEQ ID NO: 3256914 - DNA, 25 bp, Homo sapien
gcagcaactttctgaaagcacagga

SEQ ID NO: 3256915 - DNA, 25 bp, Homo sapien
tttctgctttgtttaatttgatccc

SEQ ID NO: 3256916 - DNA, 25 bp, Homo sapien
taatttgatcccaaggatttcagca

SEQ ID NO: 3256917 - DNA, 25 bp, Homo sapien
gagacaaagtggctactaaaaccat

SEQ ID NO: 3256918 - DNA, 25 bp, Homo sapien
gagtctcctgtcttggctgagacaa

SEQ ID NO: 3256919 - DNA, 25 bp, Homo sapien
cattttcctggcaaaaccgtaagtg

SEQ ID NO: 3256920 - DNA, 25 bp, Homo sapien
tcttggctgagacaaagtggctact

SEQ ID NO: 3256921 - DNA, 25 bp, Homo sapien
tattgttcgcatatgctccaaatca

SEQ ID NO: 3256922 - DNA, 25 bp, Homo sapien
attgttcgcatatgctccaaatcaa

SEQ ID NO: 3256923 - DNA, 25 bp, Homo sapien
ttattgttcgcatatgctccaaatc

SEQ ID NO: 3256924 - DNA, 25 bp, Homo sapien
gaaatcgccacccattgaaatcacc

SEQ ID NO: 3256925 - DNA, 25 bp, Homo sapien
ggaaaaatccccattgaaatcgcca

SEQ ID NO: 3256926 - DNA, 25 bp, Homo sapien
cacaggcatcaatttgtggaagact

SEQ ID NO: 3256927 - DNA, 25 bp, Homo sapien
caaggaatgtccagataccacaggc

SEQ ID NO: 3256928 - DNA, 25 bp, Homo sapien
aagtgccccggcgtaccaagtacat

SEQ ID NO: 3256929 - DNA, 25 bp, Homo sapien
tcctgtaaagtgccccggcgtacca

SEQ ID NO: 3256930 - DNA, 25 bp, Homo sapien
tctctttatggcatattcctgcata

SEQ ID NO: 3256931 - DNA, 25 bp, Homo sapien
cttctctttatggcatattcctgca

SEQ ID NO: 3256932 - DNA, 25 bp, Homo sapien
tggcgatttgagtacttaccgggaa

SEQ ID NO: 3256933 - DNA, 25 bp, Homo sapien
ggagctgtggtaccccaaagatcta

SEQ ID NO: 3256934 - DNA, 25 bp, Homo sapien
gaaaacagctatctagggacatcgg

SEQ ID NO: 3256935 - DNA, 25 bp, Homo sapien
caggtgaccagcttgcacagatgtg

SEQ ID NO: 3256936 - DNA, 25 bp, Homo sapien
tataaagtggccaaacctaagacaa

SEQ ID NO: 3256937 - DNA, 25 bp, Homo sapien
gaaaaaaccccagtcaagaatgtca

SEQ ID NO: 3256938 - DNA, 25 bp, Homo sapien
gatgaccatccccaaggcatatagt

SEQ ID NO: 3256939 - DNA, 25 bp, Homo sapien
gagaactcttgggagatgctctaca

SEQ ID NO: 3256940 - DNA, 25 bp, Homo sapien
ttttatttcatttagtagactcagc

SEQ ID NO: 3256941 - DNA, 25 bp, Homo sapien
gcttttgtccaccatatgtccactg

SEQ ID NO: 3256942 - DNA, 25 bp, Homo sapien
tattccctcaggtacaattaaggac

SEQ ID NO: 3256943 - DNA, 25 bp, Homo sapien
tgtccactgtggattaactattccc

SEQ ID NO: 3256944 - DNA, 25 bp, Homo sapien
tttggcatgtgtatacttgtaaaca

SEQ ID NO: 3256945 - DNA, 25 bp, Homo sapien
aaatcataagcactaagtgaggtgc

SEQ ID NO: 3256946 - DNA, 25 bp, Homo sapien
catgcagtgcttgtcgttctgtgcc

SEQ ID NO: 3256947 - DNA, 25 bp, Homo sapien
taagatctccaaagaactactctct

SEQ ID NO: 3256948 - DNA, 25 bp, Homo sapien
acgcccagccgcgatttccttcttt

SEQ ID NO: 3256949 - DNA, 25 bp, Homo sapien
ctgaatagtattcgtgtgcgtgtgt

SEQ ID NO: 3256950 - DNA, 25 bp, Homo sapien
ggctgaatagtattcgtgtgcgtgt

SEQ ID NO: 3256951 - DNA, 25 bp, Homo sapien
accacgcccagccgcgatttccttc

SEQ ID NO: 3256952 - DNA, 25 bp, Homo sapien
cattgggttatagctcagcgaagtt

SEQ ID NO: 3256953 - DNA, 25 bp, Homo sapien
tctttaatgttcctatctaaactgg

SEQ ID NO: 3256954 - DNA, 25 bp, Homo sapien
tttagccccattctgtgccctggag

SEQ ID NO: 3256955 - DNA, 25 bp, Homo sapien
gccctggagaagtgttgcgatcatt

SEQ ID NO: 3256956 - DNA, 25 bp, Homo sapien
aagccacagtaatggcggtagcccc

SEQ ID NO: 3256957 - DNA, 25 bp, Homo sapien
cactgagcaagatcgcttggctccc

SEQ ID NO: 3256958 - DNA, 25 bp, Homo sapien
agctagtgtggttcttagtttgcgg

SEQ ID NO: 3256959 - DNA, 25 bp, Homo sapien
gagtctccttagcaccgtcgggaaa

SEQ ID NO: 3256960 - DNA, 25 bp, Homo sapien
tgtttctactcggtcattttggccc

SEQ ID NO: 3256961 - DNA, 25 bp, Homo sapien
tagactacatcttaccctggaatta

SEQ ID NO: 3256962 - DNA, 25 bp, Homo sapien
tctgctcgctctccgtgggttgcgc

SEQ ID NO: 3256963 - DNA, 25 bp, Homo sapien
cgtgcacttcccacgtgaagcgatg

SEQ ID NO: 3256964 - DNA, 25 bp, Homo sapien
acctctgaaccttgggataataaat

SEQ ID NO: 3256965 - DNA, 25 bp, Homo sapien
tcatatttctgaacctggtttgtac

SEQ ID NO: 3256966 - DNA, 25 bp, Homo sapien
ctctgaaccttgggataataaattt

SEQ ID NO: 3256967 - DNA, 25 bp, Homo sapien
catatttctgaacctggtttgtacc

SEQ ID NO: 3256968 - DNA, 25 bp, Homo sapien
gatgcactcttctctatgccctcat

SEQ ID NO: 3256969 - DNA, 25 bp, Homo sapien
cctgggcagagatagtactccaaga

SEQ ID NO: 3256970 - DNA, 25 bp, Homo sapien
gatagtactccaagaactatcaatc

SEQ ID NO: 3256971 - DNA, 25 bp, Homo sapien
cactcaacattcttaattagtgttg

SEQ ID NO: 3256972 - DNA, 25 bp, Homo sapien
tcctctagtagtgttagtttacatc

SEQ ID NO: 3256973 - DNA, 25 bp, Homo sapien
gaaggtctagtcttgttatttcgca

SEQ ID NO: 3256974 - DNA, 25 bp, Homo sapien
gcctatgtttgtgaggtcttattca

SEQ ID NO: 3256975 - DNA, 25 bp, Homo sapien
taaatttgcaataatcccatttgtt

SEQ ID NO: 3256976 - DNA, 25 bp, Homo sapien
gagtagggtgctgaagtcaacaact

SEQ ID NO: 3256977 - DNA, 25 bp, Homo sapien
aacgtctgttaggtgcagtttggtc

SEQ ID NO: 3256978 - DNA, 25 bp, Homo sapien
ggtctatcatgcagtttaaatccaa

SEQ ID NO: 3256979 - DNA, 25 bp, Homo sapien
taacacatgggtcaatccttgagaa

SEQ ID NO: 3256980 - DNA, 25 bp, Homo sapien
tctcaggtcagggtgcatacatgca

SEQ ID NO: 3256981 - DNA, 25 bp, Homo sapien
catgcacatggtaagttggccaact

SEQ ID NO: 3256982 - DNA, 25 bp, Homo sapien
catttatgagtagctcggtggccaa

SEQ ID NO: 3256983 - DNA, 25 bp, Homo sapien
cttactcatatagatgggccctggg

SEQ ID NO: 3256984 - DNA, 25 bp, Homo sapien
gatgcacagttgctaggtcagcctg

SEQ ID NO: 3256985 - DNA, 25 bp, Homo sapien
ccagcctgagggtatgtaagccact

SEQ ID NO: 3256986 - DNA, 25 bp, Homo sapien
tgtgtctgccagaagtcacccagtg

SEQ ID NO: 3256987 - DNA, 25 bp, Homo sapien
gacacacagatgctcggtcagcctg

SEQ ID NO: 3256988 - DNA, 25 bp, Homo sapien
tggacttccgatcaccaagtgccag

SEQ ID NO: 3256989 - DNA, 25 bp, Homo sapien
ggatctctccaaactagagtcagga

SEQ ID NO: 3256990 - DNA, 25 bp, Homo sapien
tgttcagtgaaagaatggccctacc

SEQ ID NO: 3256991 - DNA, 25 bp, Homo sapien
tctggaccaatctgatctggacagg

SEQ ID NO: 3256992 - DNA, 25 bp, Homo sapien
taactaaaagctggctactgctacc

SEQ ID NO: 3256993 - DNA, 25 bp, Homo sapien
tctaagttgtaaagaaagggacaca

SEQ ID NO: 3256994 - DNA, 25 bp, Homo sapien
tatgtaatgagtataataacccagc

SEQ ID NO: 3256995 - DNA, 25 bp, Homo sapien
tgtacggaaatgtgtattcaccctc

SEQ ID NO: 3256996 - DNA, 25 bp, Homo sapien
taaaatgagaagctgaacccagaaa

SEQ ID NO: 3256997 - DNA, 25 bp, Homo sapien
aatactcatctagtgtgcaaagcca

SEQ ID NO: 3256998 - DNA, 25 bp, Homo sapien
ccagaaacagaacgtaagctcatca

SEQ ID NO: 3256999 - DNA, 25 bp, Homo sapien
gtatgatagtatgacaatgcctgta

SEQ ID NO: 3257000 - DNA, 25 bp, Homo sapien
caccacagtataccaatcttctaaa

SEQ ID NO: 3257001 - DNA, 25 bp, Homo sapien
tcaccacagtataccaatcttctaa

SEQ ID NO: 3257002 - DNA, 25 bp, Homo sapien
ttcaccacagtataccaatcttcta

SEQ ID NO: 3257003 - DNA, 25 bp, Homo sapien
cattaatgtctgcttactgtaggca

SEQ ID NO: 3257004 - DNA, 25 bp, Homo sapien
cgataaaatgcaccaccaaaagaga

SEQ ID NO: 3257005 - DNA, 25 bp, Homo sapien
tggagtgtcacttgccatctggact

SEQ ID NO: 3257006 - DNA, 25 bp, Homo sapien
aagtcgatatgtaccttcaagacag

SEQ ID NO: 3257007 - DNA, 25 bp, Homo sapien
gctccatagatatatttatccaaca

SEQ ID NO: 3257008 - DNA, 25 bp, Homo sapien
ctccatagatatatttatccaacat

SEQ ID NO: 3257009 - DNA, 25 bp, Homo sapien
gtgctccatagatatatttatccaa

SEQ ID NO: 3257010 - DNA, 25 bp, Homo sapien
ctgtgctccatagatatatttatcc

SEQ ID NO: 3257011 - DNA, 25 bp, Homo sapien
tatatcccaaatttgaagggtaaca

SEQ ID NO: 3257012 - DNA, 25 bp, Homo sapien
caaatttgaagggtaacattcaagt

SEQ ID NO: 3257013 - DNA, 25 bp, Homo sapien
tttgcctcctattgtctgccctcct

SEQ ID NO: 3257014 - DNA, 25 bp, Homo sapien
gtctgccctcctatatcccaaattt

SEQ ID NO: 3257015 - DNA, 25 bp, Homo sapien
atccagtcctatagtttgtttgtac

SEQ ID NO: 3257016 - DNA, 25 bp, Homo sapien
ccagtcctatagtttgtttgtactg

SEQ ID NO: 3257017 - DNA, 25 bp, Homo sapien
aatccagtcctatagtttgtttgta

SEQ ID NO: 3257018 - DNA, 25 bp, Homo sapien
gaaatccagtcctatagtttgtttg

SEQ ID NO: 3257019 - DNA, 25 bp, Homo sapien
tgagcaaaacacgtagttaaggagg

SEQ ID NO: 3257020 - DNA, 25 bp, Homo sapien
cttgagcaaaacacgtagttaagga

SEQ ID NO: 3257021 - DNA, 25 bp, Homo sapien
ttgagcaaaacacgtagttaaggag

SEQ ID NO: 3257022 - DNA, 25 bp, Homo sapien
actgactgcttgtatcgagtgctga

SEQ ID NO: 3257023 - DNA, 25 bp, Homo sapien
ttcagttgccggtcctggctctcct

SEQ ID NO: 3257024 - DNA, 25 bp, Homo sapien
cacgacgattttcagttgccggtcc

SEQ ID NO: 3257025 - DNA, 25 bp, Homo sapien
ccccagcacgacgattttcagttgc

SEQ ID NO: 3257026 - DNA, 25 bp, Homo sapien
cgattttcagttgccggtcctggct

SEQ ID NO: 3257027 - DNA, 25 bp, Homo sapien
gcaggaggtattcgaggagaatcac

SEQ ID NO: 3257028 - DNA, 25 bp, Homo sapien
gaatcactcggcaagcgccatcttg

SEQ ID NO: 3257029 - DNA, 25 bp, Homo sapien
tcgaggagaatcactcggcaagcgc

SEQ ID NO: 3257030 - DNA, 25 bp, Homo sapien
tctccgcgccggcaggaggtattcg

SEQ ID NO: 3257031 - DNA, 25 bp, Homo sapien
ccagatagtatctgctgattcagga

SEQ ID NO: 3257032 - DNA, 25 bp, Homo sapien
gagacataggataagtagcattttt

SEQ ID NO: 3257033 - DNA, 25 bp, Homo sapien
aggaagtagaattgagacataggat

SEQ ID NO: 3257034 - DNA, 25 bp, Homo sapien
aactgtccccagatagtatctgctg

SEQ ID NO: 3257035 - DNA, 25 bp, Homo sapien
caaaccgctgcaaagtcctagtgag

SEQ ID NO: 3257036 - DNA, 25 bp, Homo sapien
aaacccgctggcttgggaagcctga

SEQ ID NO: 3257037 - DNA, 25 bp, Homo sapien
taattcacctggataggtaaaggcg

SEQ ID NO: 3257038 - DNA, 25 bp, Homo sapien
ggtaaaggcgagcaaacactgtctg

SEQ ID NO: 3257039 - DNA, 25 bp, Homo sapien
acttactatatacaccaggcgccag

SEQ ID NO: 3257040 - DNA, 25 bp, Homo sapien
gttcttacaggtgccagcggtgcga

SEQ ID NO: 3257041 - DNA, 25 bp, Homo sapien
cgtgtgatccacagcagacgtcgga

SEQ ID NO: 3257042 - DNA, 25 bp, Homo sapien
taggtgttaccgagaagccagaagc

SEQ ID NO: 3257043 - DNA, 25 bp, Homo sapien
tgggcacctggtctcgttgacactc

SEQ ID NO: 3257044 - DNA, 25 bp, Homo sapien
tcgagtgagagccacgccgaatttc

SEQ ID NO: 3257045 - DNA, 25 bp, Homo sapien
ccatctctgtttccctaatgggcac

SEQ ID NO: 3257046 - DNA, 25 bp, Homo sapien
ccgaatttcagaccttggcgcgtga

SEQ ID NO: 3257047 - DNA, 25 bp, Homo sapien
tacagatagcctctggggattcccc

SEQ ID NO: 3257048 - DNA, 25 bp, Homo sapien
cccgctcaggggtcagccgggacta

SEQ ID NO: 3257049 - DNA, 25 bp, Homo sapien
tcctgcctccttgcctgactggggc

SEQ ID NO: 3257050 - DNA, 25 bp, Homo sapien
acatcctctcagcgctcaacgcccc

SEQ ID NO: 3257051 - DNA, 25 bp, Homo sapien
ttccaaccgctcagcagtggcgcaa

SEQ ID NO: 3257052 - DNA, 25 bp, Homo sapien
tggcgtctcagcgaaggtccgcgcc

SEQ ID NO: 3257053 - DNA, 25 bp, Homo sapien
caagtgcttcctccacttgcgtggg

SEQ ID NO: 3257054 - DNA, 25 bp, Homo sapien
ccacttgcgtgggtggcgtctcagc

SEQ ID NO: 3257055 - DNA, 25 bp, Homo sapien
aaggagccgtgttgagcttgcaacc

SEQ ID NO: 3257056 - DNA, 25 bp, Homo sapien
gagccgtgttgagcttgcaaccatt

SEQ ID NO: 3257057 - DNA, 25 bp, Homo sapien
gccgtgttgagcttgcaaccatttt

SEQ ID NO: 3257058 - DNA, 25 bp, Homo sapien
tggaaaggagccgtgttgagcttgc

SEQ ID NO: 3257059 - DNA, 25 bp, Homo sapien
aggcggtatctgaggtttctgtgat

SEQ ID NO: 3257060 - DNA, 25 bp, Homo sapien
cggtatctgaggtttctgtgatgta

SEQ ID NO: 3257061 - DNA, 25 bp, Homo sapien
cagaggcggtatctgaggtttctgt

SEQ ID NO: 3257062 - DNA, 25 bp, Homo sapien
ttacagaggcggtatctgaggtttc

SEQ ID NO: 3257063 - DNA, 25 bp, Homo sapien
aggtctgcctttcccgggctgaagg

SEQ ID NO: 3257064 - DNA, 25 bp, Homo sapien
tcaccaattactagccttgagatct

SEQ ID NO: 3257065 - DNA, 25 bp, Homo sapien
aaggagggagccaggtctgcctttc

SEQ ID NO: 3257066 - DNA, 25 bp, Homo sapien
tctcaccactgggaatggttctgtg

SEQ ID NO: 3257067 - DNA, 25 bp, Homo sapien
gtcctccgccttgcctgtgaggccc

SEQ ID NO: 3257068 - DNA, 25 bp, Homo sapien
gtgaggcccgccagagctacctgca

SEQ ID NO: 3257069 - DNA, 25 bp, Homo sapien
tggcacgtggtaaatgaagccagga

SEQ ID NO: 3257070 - DNA, 25 bp, Homo sapien
gtcaccaaggagtggcacgtggtaa

SEQ ID NO: 3257071 - DNA, 25 bp, Homo sapien
cattcaaatgcttaggcgactctgc

SEQ ID NO: 3257072 - DNA, 25 bp, Homo sapien
ctaaataaagcgctggttaccagga

SEQ ID NO: 3257073 - DNA, 25 bp, Homo sapien
taccaggatgcaaagattggcccgc

SEQ ID NO: 3257074 - DNA, 25 bp, Homo sapien
gaacgttagtgatccggacctcaga

SEQ ID NO: 3257075 - DNA, 25 bp, Homo sapien
gcatatggagaacttggccaagtga

SEQ ID NO: 3257076 - DNA, 25 bp, Homo sapien
aaggcatatggagaacttggccaag

SEQ ID NO: 3257077 - DNA, 25 bp, Homo sapien
gaaggcatatggagaacttggccaa

SEQ ID NO: 3257078 - DNA, 25 bp, Homo sapien
ggcatatggagaacttggccaagtg

SEQ ID NO: 3257079 - DNA, 25 bp, Homo sapien
tgactttggcaggaatactctcgac

SEQ ID NO: 3257080 - DNA, 25 bp, Homo sapien
aggatgcacacggaggacgtcctgc

SEQ ID NO: 3257081 - DNA, 25 bp, Homo sapien
cacaagccaaaaggaagtagaccgg

SEQ ID NO: 3257082 - DNA, 25 bp, Homo sapien
tactctcgacccgtttgtgagcagg

SEQ ID NO: 3257083 - DNA, 25 bp, Homo sapien
tgagtttgaagtcctccccgaggaa

SEQ ID NO: 3257084 - DNA, 25 bp, Homo sapien
aaacctggactttccgaaacagctg

SEQ ID NO: 3257085 - DNA, 25 bp, Homo sapien
tttccgaaacagctgaccgctcagg

SEQ ID NO: 3257086 - DNA, 25 bp, Homo sapien
cgagcgcagtgagtttgaagtcctc

SEQ ID NO: 3257087 - DNA, 25 bp, Homo sapien
ctgatggcggaggcccaaagataca

SEQ ID NO: 3257088 - DNA, 25 bp, Homo sapien
gatggcggaggcccaaagatacagt

SEQ ID NO: 3257089 - DNA, 25 bp, Homo sapien
tggcggaggcccaaagatacagtga

SEQ ID NO: 3257090 - DNA, 25 bp, Homo sapien
ggcggaggcccaaagatacagtgac

SEQ ID NO: 3257091 - DNA, 25 bp, Homo sapien
gtgctcttggctccgcgggcgcaca

SEQ ID NO: 3257092 - DNA, 25 bp, Homo sapien
gcgcacaaaccgcaactgctggcgg

SEQ ID NO: 3257093 - DNA, 25 bp, Homo sapien
caggagggctgcagagactaggtgc

SEQ ID NO: 3257094 - DNA, 25 bp, Homo sapien
aaaccgcaactgctggcggcaccag

SEQ ID NO: 3257095 - DNA, 25 bp, Homo sapien
tctgcgaaccggatccgaacaggat

SEQ ID NO: 3257096 - DNA, 25 bp, Homo sapien
tgtaacgttccagacaaaagaatgg

SEQ ID NO: 3257097 - DNA, 25 bp, Homo sapien
gatttggaaacgcatcacctgtaac

SEQ ID NO: 3257098 - DNA, 25 bp, Homo sapien
tgcttccttcgaggctacggtcggg

SEQ ID NO: 3257099 - DNA, 25 bp, Homo sapien
caggtctgtgcggttgccaagtaag

SEQ ID NO: 3257100 - DNA, 25 bp, Homo sapien
tgcaacgcaggagcctttctgtaaa

SEQ ID NO: 3257101 - DNA, 25 bp, Homo sapien
gatctgccacgcttctgggaaagag

SEQ ID NO: 3257102 - DNA, 25 bp, Homo sapien
ccccggtttaggagaactgtctgat

SEQ ID NO: 3257103 - DNA, 25 bp, Homo sapien
cccaaatttgctgctaggagtaaga

SEQ ID NO: 3257104 - DNA, 25 bp, Homo sapien
gctcggcctgaatccttgggaccaa

SEQ ID NO: 3257105 - DNA, 25 bp, Homo sapien
tgctaggagtaagatttgtgggctc

SEQ ID NO: 3257106 - DNA, 25 bp, Homo sapien
tgggaccaatttcagtgcaagtgac

SEQ ID NO: 3257107 - DNA, 25 bp, Homo sapien
tggccagggatattcacattgagta

SEQ ID NO: 3257108 - DNA, 25 bp, Homo sapien
tgccattaaggaggcgaaaagcggc

SEQ ID NO: 3257109 - DNA, 25 bp, Homo sapien
caaacaactgaaaagtgcgacacgt

SEQ ID NO: 3257110 - DNA, 25 bp, Homo sapien
tactctagttgagtgcacagtgcca

SEQ ID NO: 3257111 - DNA, 25 bp, Homo sapien
caggtacctggacttcagagaagga

SEQ ID NO: 3257112 - DNA, 25 bp, Homo sapien
tccttacattcagcacccgaatcgg

SEQ ID NO: 3257113 - DNA, 25 bp, Homo sapien
ggctgcctgggtgtgcgctctcctc

SEQ ID NO: 3257114 - DNA, 25 bp, Homo sapien
ccggcttgcaccacacttggaggct

SEQ ID NO: 3257115 - DNA, 25 bp, Homo sapien
gattcaggctatgtggtctccagga

SEQ ID NO: 3257116 - DNA, 25 bp, Homo sapien
caagtcctggctaacgggagctgga

SEQ ID NO: 3257117 - DNA, 25 bp, Homo sapien
tagtgtggcctagtgcagaaagctc

SEQ ID NO: 3257118 - DNA, 25 bp, Homo sapien
gatcagggcccctaggccatagggt

SEQ ID NO: 3257119 - DNA, 25 bp, Homo sapien
gcggcagctgcgcaggtggagagcg

SEQ ID NO: 3257120 - DNA, 25 bp, Homo sapien
tcactgggtgcctgcggcagctgcg

SEQ ID NO: 3257121 - DNA, 25 bp, Homo sapien
tgcctgcggcagctgcgcaggtgga

SEQ ID NO: 3257122 - DNA, 25 bp, Homo sapien
aggtggagagcgcccagcctgggag

SEQ ID NO: 3257123 - DNA, 25 bp, Homo sapien
cgccgggcaggtattgtctctggtc

SEQ ID NO: 3257124 - DNA, 25 bp, Homo sapien
acttcgccgggcaggtattgtctct

SEQ ID NO: 3257125 - DNA, 25 bp, Homo sapien
agtggcagaagcgagggtggccgca

SEQ ID NO: 3257126 - DNA, 25 bp, Homo sapien
agggtggccgcagcacttcgccggg

SEQ ID NO: 3257127 - DNA, 25 bp, Homo sapien
gctgccatctgccggcgctttgtct

SEQ ID NO: 3257128 - DNA, 25 bp, Homo sapien
ttgtcttgtagcgacggttctggaa

SEQ ID NO: 3257129 - DNA, 25 bp, Homo sapien
catctgccggcgctttgtcttgtag

SEQ ID NO: 3257130 - DNA, 25 bp, Homo sapien
ggcgctttgtcttgtagcgacggtt

SEQ ID NO: 3257131 - DNA, 25 bp, Homo sapien
tctcggtgagcttcagcgacgcggc

SEQ ID NO: 3257132 - DNA, 25 bp, Homo sapien
gacaggtagcgctggtggttaaagc

SEQ ID NO: 3257133 - DNA, 25 bp, Homo sapien
ctggtggttaaagcggcgctccagc

SEQ ID NO: 3257134 - DNA, 25 bp, Homo sapien
gagcttcagcgacgcggccaggtct

SEQ ID NO: 3257135 - DNA, 25 bp, Homo sapien
gcgtgggagaaagcggcccgcgagc

SEQ ID NO: 3257136 - DNA, 25 bp, Homo sapien
ctgcgcgtgggagaaagcggcccgc

SEQ ID NO: 3257137 - DNA, 25 bp, Homo sapien
cttcttgcgtggcttgggcgccgcc

SEQ ID NO: 3257138 - DNA, 25 bp, Homo sapien
cgagcgcttcttgcgtggcttgggc

SEQ ID NO: 3257139 - DNA, 25 bp, Homo sapien
gccggccccgctgcacagcgcggac

SEQ ID NO: 3257140 - DNA, 25 bp, Homo sapien
ctccgcgacgcctgccggcccgctg

SEQ ID NO: 3257141 - DNA, 25 bp, Homo sapien
ctgcacagcgcggacacgtgtgcac

SEQ ID NO: 3257142 - DNA, 25 bp, Homo sapien
gccccgctgcacagcgcggacacgt

SEQ ID NO: 3257143 - DNA, 25 bp, Homo sapien
tcctcggtccttgggctgcggtcgc

SEQ ID NO: 3257144 - DNA, 25 bp, Homo sapien
caacaccgtcgtcctcggtccttgg

SEQ ID NO: 3257145 - DNA, 25 bp, Homo sapien
tctggggccaacaccgtcgtcctcg

SEQ ID NO: 3257146 - DNA, 25 bp, Homo sapien
cgtcgtcctcggtccttgggctgcg

SEQ ID NO: 3257147 - DNA, 25 bp, Homo sapien
aggtccagcggtcccctgtgcttga

SEQ ID NO: 3257148 - DNA, 25 bp, Homo sapien
gcttgaggcctacagaagcttgtac

SEQ ID NO: 3257149 - DNA, 25 bp, Homo sapien
agcttctcggtctcgtacccgccct

SEQ ID NO: 3257150 - DNA, 25 bp, Homo sapien
cccgcccttccgaagaactccagca

SEQ ID NO: 3257151 - DNA, 25 bp, Homo sapien
acgcaaggggcagcggttctcccaa

SEQ ID NO: 3257152 - DNA, 25 bp, Homo sapien
ccgcttccctgattttggggatttg

SEQ ID NO: 3257153 - DNA, 25 bp, Homo sapien
aactcccgaacgcaaggggcagcgg

SEQ ID NO: 3257154 - DNA, 25 bp, Homo sapien
gaaagcactggcgacgaactcaaaa

SEQ ID NO: 3257155 - DNA, 25 bp, Homo sapien
gtctctcgcgggctcagttcccgaa

SEQ ID NO: 3257156 - DNA, 25 bp, Homo sapien
tgaggagctactccggtctctcgcg

SEQ ID NO: 3257157 - DNA, 25 bp, Homo sapien
aacttcgggatttggccagcctccg

SEQ ID NO: 3257158 - DNA, 25 bp, Homo sapien
agtgatagagcagctcgcgccagag

SEQ ID NO: 3257159 - DNA, 25 bp, Homo sapien
tcgttctcctcgctgagcgcggagt

SEQ ID NO: 3257160 - DNA, 25 bp, Homo sapien
tctggtaccggcaggagacgccagc

SEQ ID NO: 3257161 - DNA, 25 bp, Homo sapien
tcttgttgaggatcgcctggatgga

SEQ ID NO: 3257162 - DNA, 25 bp, Homo sapien
gagacgctggcggacatctcgctgt

SEQ ID NO: 3257163 - DNA, 25 bp, Homo sapien
tctcagaatgaggttttgcagcatc

SEQ ID NO: 3257164 - DNA, 25 bp, Homo sapien
tctgcaccgcagaaggaaatacact

SEQ ID NO: 3257165 - DNA, 25 bp, Homo sapien
cttgctttgtgcaaaccttgtaggg

SEQ ID NO: 3257166 - DNA, 25 bp, Homo sapien
gcatctatacttttcagcatttcgg

SEQ ID NO: 3257167 - DNA, 25 bp, Homo sapien
tcagcaagtgtaaggacgcagagtg

SEQ ID NO: 3257168 - DNA, 25 bp, Homo sapien
tttggtgtcccgtacagcgatcgct

SEQ ID NO: 3257169 - DNA, 25 bp, Homo sapien
gattgacactggttgcctggaaggt

SEQ ID NO: 3257170 - DNA, 25 bp, Homo sapien
tgagatccgaacataaaggcaggca

SEQ ID NO: 3257171 - DNA, 25 bp, Homo sapien
gtcatctcgggccattacggcgctt

SEQ ID NO: 3257172 - DNA, 25 bp, Homo sapien
catgaaaagatgtggtttggcgact

SEQ ID NO: 3257173 - DNA, 25 bp, Homo sapien
tgaactcgcgggtcttgagctgcaa

SEQ ID NO: 3257174 - DNA, 25 bp, Homo sapien
tacggcgcttagtcgatcattaggt

SEQ ID NO: 3257175 - DNA, 25 bp, Homo sapien
gcttcctgcccatcgagggcgactt

SEQ ID NO: 3257176 - DNA, 25 bp, Homo sapien
ggttgtatgcccagagatatcccgg

SEQ ID NO: 3257177 - DNA, 25 bp, Homo sapien
gatatcccggcgtaactacggagtc

SEQ ID NO: 3257178 - DNA, 25 bp, Homo sapien
agggcgacttccttcgggctcagct

SEQ ID NO: 3257179 - DNA, 25 bp, Homo sapien
tccgcagtttggatcctacgggccc

SEQ ID NO: 3257180 - DNA, 25 bp, Homo sapien
gagcgggatttgactgcgaaagcca

SEQ ID NO: 3257181 - DNA, 25 bp, Homo sapien
agtaaactgctgcacacgtgcccgc

SEQ ID NO: 3257182 - DNA, 25 bp, Homo sapien
tgctgcgcggtgagacttccgcggg

SEQ ID NO: 3257183 - DNA, 25 bp, Homo sapien
ttcagaggaatccttacacaaatgc

SEQ ID NO: 3257184 - DNA, 25 bp, Homo sapien
taatggaatgtcagatgaacagatg

SEQ ID NO: 3257185 - DNA, 25 bp, Homo sapien
agccttcagaggaatccttacacaa

SEQ ID NO: 3257186 - DNA, 25 bp, Homo sapien
ggaatccttacacaaatgcaggtga

SEQ ID NO: 3257187 - DNA, 25 bp, Homo sapien
gtccccgctcttcagcttctaaaat

SEQ ID NO: 3257188 - DNA, 25 bp, Homo sapien
atggcatccattattgtctccagtc

SEQ ID NO: 3257189 - DNA, 25 bp, Homo sapien
attattgtctccagtcgtccccgct

SEQ ID NO: 3257190 - DNA, 25 bp, Homo sapien
tctctttaggttccaaccttgcttg

SEQ ID NO: 3257191 - DNA, 25 bp, Homo sapien
tatccaccttacattaagagtcaaa

SEQ ID NO: 3257192 - DNA, 25 bp, Homo sapien
agaaatatccaccttacattaagag

SEQ ID NO: 3257193 - DNA, 25 bp, Homo sapien
aatatccaccttacattaagagtca

SEQ ID NO: 3257194 - DNA, 25 bp, Homo sapien
ccaccttacattaagagtcaaaata

SEQ ID NO: 3257195 - DNA, 25 bp, Homo sapien
cttgaatgcatttctcttcactgaa

SEQ ID NO: 3257196 - DNA, 25 bp, Homo sapien
gtttgctcatatgagagttaaaaca

SEQ ID NO: 3257197 - DNA, 25 bp, Homo sapien
gtattggtagaagcttcagaacagc

SEQ ID NO: 3257198 - DNA, 25 bp, Homo sapien
caggagggacctaatcttgaatgca

SEQ ID NO: 3257199 - DNA, 25 bp, Homo sapien
ctgaaccagaacctgttttgtgtca

SEQ ID NO: 3257200 - DNA, 25 bp, Homo sapien
tggatacatgcgagtttctgccaga

SEQ ID NO: 3257201 - DNA, 25 bp, Homo sapien
cacagattaccagtaggcagcctgg

SEQ ID NO: 3257202 - DNA, 25 bp, Homo sapien
cgtgttcctccataagcctagggca

SEQ ID NO: 3257203 - DNA, 25 bp, Homo sapien
aagaaaaagcttgcacctagggact

SEQ ID NO: 3257204 - DNA, 25 bp, Homo sapien
gctggcctcttgttcgggccccagg

SEQ ID NO: 3257205 - DNA, 25 bp, Homo sapien
tgacttctctcttgcgcttgataga

SEQ ID NO: 3257206 - DNA, 25 bp, Homo sapien
tggcctcttgttcgggccccaggag

SEQ ID NO: 3257207 - DNA, 25 bp, Homo sapien
ttctctcttgcgcttgatagaaggg

SEQ ID NO: 3257208 - DNA, 25 bp, Homo sapien
caacacatggcaagcgggcagtaaa

SEQ ID NO: 3257209 - DNA, 25 bp, Homo sapien
gaaaaggagctacctcgcgaagagc

SEQ ID NO: 3257210 - DNA, 25 bp, Homo sapien
gacacgatgattctctagggcagct

SEQ ID NO: 3257211 - DNA, 25 bp, Homo sapien
tgagcttcgtagtttatccaggccc

SEQ ID NO: 3257212 - DNA, 25 bp, Homo sapien
ttttggcgatttctaggagaaactg

SEQ ID NO: 3257213 - DNA, 25 bp, Homo sapien
tgccaagtttggatgttgcacgtgc

SEQ ID NO: 3257214 - DNA, 25 bp, Homo sapien
cgctggtaggtaacttctcttttgc

SEQ ID NO: 3257215 - DNA, 25 bp, Homo sapien
cgtgcagatggcttgctatgttgct

SEQ ID NO: 3257216 - DNA, 25 bp, Homo sapien
tggtagcactgaatactccagtccc

SEQ ID NO: 3257217 - DNA, 25 bp, Homo sapien
ggcaatggtagcactgaatactcca

SEQ ID NO: 3257218 - DNA, 25 bp, Homo sapien
tagcactgaatactccagtccctgg

SEQ ID NO: 3257219 - DNA, 25 bp, Homo sapien
gcactgaatactccagtccctggaa

SEQ ID NO: 3257220 - DNA, 25 bp, Homo sapien
ttcttttctatttatgtgagctgct

SEQ ID NO: 3257221 - DNA, 25 bp, Homo sapien
ctcctagcagcagcaatttggattc

SEQ ID NO: 3257222 - DNA, 25 bp, Homo sapien
tttctatttatgtgagctgctccac

SEQ ID NO: 3257223 - DNA, 25 bp, Homo sapien
cagcagcaatttggattctgtgact

SEQ ID NO: 3257224 - DNA, 25 bp, Homo sapien
caaatggctaatactgtgttaagtc

SEQ ID NO: 3257225 - DNA, 25 bp, Homo sapien
gcttctagagtcctttggctctaaa

SEQ ID NO: 3257226 - DNA, 25 bp, Homo sapien
cctttggctctaaaatctgattctt

SEQ ID NO: 3257227 - DNA, 25 bp, Homo sapien
ctggaggaattagaaacagattgat

SEQ ID NO: 3257228 - DNA, 25 bp, Homo sapien
aatattcatgtttgggaaagtgatt

SEQ ID NO: 3257229 - DNA, 25 bp, Homo sapien
gattaacggttaggatgagacaata

SEQ ID NO: 3257230 - DNA, 25 bp, Homo sapien
caatacagttatgtaccatttctca

SEQ ID NO: 3257231 - DNA, 25 bp, Homo sapien
tgaacaggtataatgatataggcca

SEQ ID NO: 3257232 - DNA, 25 bp, Homo sapien
tctggtggtggatcttgtggtggct

SEQ ID NO: 3257233 - DNA, 25 bp, Homo sapien
ctgatttctggcgttttctttctgg

SEQ ID NO: 3257234 - DNA, 25 bp, Homo sapien
ggtggctcctgaaggctcgtcctct

SEQ ID NO: 3257235 - DNA, 25 bp, Homo sapien
tcatcagactcctgctctttcttgt

SEQ ID NO: 3257236 - DNA, 25 bp, Homo sapien
ttttcttcctctccgacgcacactt

SEQ ID NO: 3257237 - DNA, 25 bp, Homo sapien
cagtgagagaacgtttgggttttct

SEQ ID NO: 3257238 - DNA, 25 bp, Homo sapien
catcatctgatacagtgagagaacg

SEQ ID NO: 3257239 - DNA, 25 bp, Homo sapien
tctccgacgcacacttgttactatt

SEQ ID NO: 3257240 - DNA, 25 bp, Homo sapien
tcttgtaggttagctgtttctttat

SEQ ID NO: 3257241 - DNA, 25 bp, Homo sapien
tatacttctttcttgtaggttagct

SEQ ID NO: 3257242 - DNA, 25 bp, Homo sapien
ctttcttgtaggttagctgtttctt

SEQ ID NO: 3257243 - DNA, 25 bp, Homo sapien
attgcttatacttctttcttgtagg

SEQ ID NO: 3257244 - DNA, 25 bp, Homo sapien
tggaatgatatacaggcggagcatc

SEQ ID NO: 3257245 - DNA, 25 bp, Homo sapien
tttaaatttcaacaatcagcctggc

SEQ ID NO: 3257246 - DNA, 25 bp, Homo sapien
gaatacctagcagagatcacattgg

SEQ ID NO: 3257247 - DNA, 25 bp, Homo sapien
cgcccggctgggttagactactctt

SEQ ID NO: 3257248 - DNA, 25 bp, Homo sapien
ttgcattactttcagtttgctgcta

SEQ ID NO: 3257249 - DNA, 25 bp, Homo sapien
tactttcagtttgctgctagatgga

SEQ ID NO: 3257250 - DNA, 25 bp, Homo sapien
gcattactttcagtttgctgctaga

SEQ ID NO: 3257251 - DNA, 25 bp, Homo sapien
cagtttgctgctagatggagattgt

SEQ ID NO: 3257252 - DNA, 25 bp, Homo sapien
tcagcagtttataatcatcacatag

SEQ ID NO: 3257253 - DNA, 25 bp, Homo sapien
cagcagtttataatcatcacataga

SEQ ID NO: 3257254 - DNA, 25 bp, Homo sapien
agcagtttataatcatcacatagaa

SEQ ID NO: 3257255 - DNA, 25 bp, Homo sapien
tcgggataagtgacaaagctgaggc

SEQ ID NO: 3257256 - DNA, 25 bp, Homo sapien
tacaggatgagaagtgaggcaatgc

SEQ ID NO: 3257257 - DNA, 25 bp, Homo sapien
taggtcagtgaacacacgtctgtcc

SEQ ID NO: 3257258 - DNA, 25 bp, Homo sapien
gattggccctaagtcacaggtctcg

SEQ ID NO: 3257259 - DNA, 25 bp, Homo sapien
aatgccagtatctgttttggagtcg

SEQ ID NO: 3257260 - DNA, 25 bp, Homo sapien
gacaatgccagtatctgttttggag

SEQ ID NO: 3257261 - DNA, 25 bp, Homo sapien
caatgccagtatctgttttggagtc

SEQ ID NO: 3257262 - DNA, 25 bp, Homo sapien
agtgacaatgccagtatctgttttg

SEQ ID NO: 3257263 - DNA, 25 bp, Homo sapien
cagggtatttgcgaggtcttcctct

SEQ ID NO: 3257264 - DNA, 25 bp, Homo sapien
tgtttctacagggtatttgcgaggt

SEQ ID NO: 3257265 - DNA, 25 bp, Homo sapien
acgttgtttctacagggtatttgcg

SEQ ID NO: 3257266 - DNA, 25 bp, Homo sapien
ctacagggtatttgcgaggtcttcc

SEQ ID NO: 3257267 - DNA, 25 bp, Homo sapien
tgagattttatggtgtcatcatcgt

SEQ ID NO: 3257268 - DNA, 25 bp, Homo sapien
cctgagattttatggtgtcatcatc

SEQ ID NO: 3257269 - DNA, 25 bp, Homo sapien
ctgagattttatggtgtcatcatcg

SEQ ID NO: 3257270 - DNA, 25 bp, Homo sapien
aactttgttcaatgctagtgaccat

SEQ ID NO: 3257271 - DNA, 25 bp, Homo sapien
gaggtagtgctatttgtctcagaac

SEQ ID NO: 3257272 - DNA, 25 bp, Homo sapien
atgacccttgaggtagtgctatttg

SEQ ID NO: 3257273 - DNA, 25 bp, Homo sapien
gtgctatttgtctcagaactggttt

SEQ ID NO: 3257274 - DNA, 25 bp, Homo sapien
aattcttccaaatctctggagttct

SEQ ID NO: 3257275 - DNA, 25 bp, Homo sapien
ggctctttcagagccaacacttggt

SEQ ID NO: 3257276 - DNA, 25 bp, Homo sapien
aaccattggacgaactgcatttctg

SEQ ID NO: 3257277 - DNA, 25 bp, Homo sapien
tggtcctgtaagcacttaatcagat

SEQ ID NO: 3257278 - DNA, 25 bp, Homo sapien
tctgtttcatatagtgggctgaaga

SEQ ID NO: 3257279 - DNA, 25 bp, Homo sapien
cgtttcaggacactgcctttgtgct

SEQ ID NO: 3257280 - DNA, 25 bp, Homo sapien
gctccgtttcaggacactgcctttg

SEQ ID NO: 3257281 - DNA, 25 bp, Homo sapien
tgtggctccgtttcaggacactgcc

SEQ ID NO: 3257282 - DNA, 25 bp, Homo sapien
tgtgtcatgtggctccgtttcagga

SEQ ID NO: 3257283 - DNA, 25 bp, Homo sapien
atcttctgaagagagataatgctgc

SEQ ID NO: 3257284 - DNA, 25 bp, Homo sapien
tctgaagagagataatgctgctttc

SEQ ID NO: 3257285 - DNA, 25 bp, Homo sapien
cttctgaagagagataatgctgctt

SEQ ID NO: 3257286 - DNA, 25 bp, Homo sapien
tcatcttctgaagagagataatgct

SEQ ID NO: 3257287 - DNA, 25 bp, Homo sapien
ttcaacactgtgaccgcttatggct

SEQ ID NO: 3257288 - DNA, 25 bp, Homo sapien
ggcttctgcgttgtcttttctacca

SEQ ID NO: 3257289 - DNA, 25 bp, Homo sapien
acactgtgaccgcttatggcttctg

SEQ ID NO: 3257290 - DNA, 25 bp, Homo sapien
gtgaccgcttatggcttctgcgttg

SEQ ID NO: 3257291 - DNA, 25 bp, Homo sapien
caagaaggtcagtaacatgtctggg

SEQ ID NO: 3257292 - DNA, 25 bp, Homo sapien
gagtgacaactggtacaccacttgg

SEQ ID NO: 3257293 - DNA, 25 bp, Homo sapien
tacagggcattgtggtagatagtca

SEQ ID NO: 3257294 - DNA, 25 bp, Homo sapien
tgagtaccagttatatacagggcat

SEQ ID NO: 3257295 - DNA, 25 bp, Homo sapien
ctcctttgttataagattcgctatg

SEQ ID NO: 3257296 - DNA, 25 bp, Homo sapien
tcatttgttctgaagcctgaatttt

SEQ ID NO: 3257297 - DNA, 25 bp, Homo sapien
tataagattcgctatgaatttcttc

SEQ ID NO: 3257298 - DNA, 25 bp, Homo sapien
ttcttcatttgttctgaagcctgaa

SEQ ID NO: 3257299 - DNA, 25 bp, Homo sapien
tcattcaccaacaaaggctccctct

SEQ ID NO: 3257300 - DNA, 25 bp, Homo sapien
attcaccaacaaaggctccctctgg

SEQ ID NO: 3257301 - DNA, 25 bp, Homo sapien
gattcattcaccaacaaaggctccc

SEQ ID NO: 3257302 - DNA, 25 bp, Homo sapien
ttcaccaacaaaggctccctctgga

SEQ ID NO: 3257303 - DNA, 25 bp, Homo sapien
tgggtgcctgcaatacatgatcgag

SEQ ID NO: 3257304 - DNA, 25 bp, Homo sapien
caggactggctgacacttcttacga

SEQ ID NO: 3257305 - DNA, 25 bp, Homo sapien
ggaacctatcctatgtcaccaagtg

SEQ ID NO: 3257306 - DNA, 25 bp, Homo sapien
tatgaaagttcgttgcagccctgta

SEQ ID NO: 3257307 - DNA, 25 bp, Homo sapien
tttcagtgaatgacttacttccatc

SEQ ID NO: 3257308 - DNA, 25 bp, Homo sapien
tcagtgaatgacttacttccatcag

SEQ ID NO: 3257309 - DNA, 25 bp, Homo sapien
ttgcacgttgatttcagtgaatgac

SEQ ID NO: 3257310 - DNA, 25 bp, Homo sapien
cttatttgcacgttgatttcagtga

SEQ ID NO: 3257311 - DNA, 25 bp, Homo sapien
ccacttggctttcccccacacagac

SEQ ID NO: 3257312 - DNA, 25 bp, Homo sapien
agactttctggtggtgccagaattt

SEQ ID NO: 3257313 - DNA, 25 bp, Homo sapien
tggctttcccccacacagactttct

SEQ ID NO: 3257314 - DNA, 25 bp, Homo sapien
gcctagggtgatgactgtagaaaca

SEQ ID NO: 3257315 - DNA, 25 bp, Homo sapien
catatacttggatggtgccttcaga

SEQ ID NO: 3257316 - DNA, 25 bp, Homo sapien
gcagagcaatgacagggcctaagtt

SEQ ID NO: 3257317 - DNA, 25 bp, Homo sapien
tttctaatgactacctgcaggactg

SEQ ID NO: 3257318 - DNA, 25 bp, Homo sapien
aatcctcccaaaacattcaatggag

SEQ ID NO: 3257319 - DNA, 25 bp, Homo sapien
aaaacattcaatggagactcttcat

SEQ ID NO: 3257320 - DNA, 25 bp, Homo sapien
tcaatcctcccaaaacattcaatgg

SEQ ID NO: 3257321 - DNA, 25 bp, Homo sapien
acattcaatggagactcttcattgc

SEQ ID NO: 3257322 - DNA, 25 bp, Homo sapien
aaatgcactctgttgtacaatcatc

SEQ ID NO: 3257323 - DNA, 25 bp, Homo sapien
taaaatttgcaattaggtacagatt

SEQ ID NO: 3257324 - DNA, 25 bp, Homo sapien
tttgcaattaggtacagattctcac

SEQ ID NO: 3257325 - DNA, 25 bp, Homo sapien
tctgttgtacaatcatccttgtaaa

SEQ ID NO: 3257326 - DNA, 25 bp, Homo sapien
tcaatgctggtgcaaggcaaagcca

SEQ ID NO: 3257327 - DNA, 25 bp, Homo sapien
gatcatacgattccctcagaggcac

SEQ ID NO: 3257328 - DNA, 25 bp, Homo sapien
gaataacttgctgtgctactgcccc

SEQ ID NO: 3257329 - DNA, 25 bp, Homo sapien
ttatcaagactggacctgtagccct

SEQ ID NO: 3257330 - DNA, 25 bp, Homo sapien
ggtttctttggaatcttcttcatat

SEQ ID NO: 3257331 - DNA, 25 bp, Homo sapien
agggtttctttggaatcttcttcat

SEQ ID NO: 3257332 - DNA, 25 bp, Homo sapien
ctttggaatcttcttcatattgctg

SEQ ID NO: 3257333 - DNA, 25 bp, Homo sapien
ttctttggaatcttcttcatattgc

SEQ ID NO: 3257334 - DNA, 25 bp, Homo sapien
ttaattctggcggctttaggttcca

SEQ ID NO: 3257335 - DNA, 25 bp, Homo sapien
taattctggcggctttaggttccaa

SEQ ID NO: 3257336 - DNA, 25 bp, Homo sapien
cttctttaattctggcggctttagg

SEQ ID NO: 3257337 - DNA, 25 bp, Homo sapien
tatttcaaatgatcacataagtgtg

SEQ ID NO: 3257338 - DNA, 25 bp, Homo sapien
cttaagttgtgctggaatagatata

SEQ ID NO: 3257339 - DNA, 25 bp, Homo sapien
tagaaaagaagcaatcaataaaacg

SEQ ID NO: 3257340 - DNA, 25 bp, Homo sapien
agcaatcaataaaacgtatttcaga

SEQ ID NO: 3257341 - DNA, 25 bp, Homo sapien
tttttgaagactttgtcttttctgc

SEQ ID NO: 3257342 - DNA, 25 bp, Homo sapien
tattgatttgccttcttaaaagcct

SEQ ID NO: 3257343 - DNA, 25 bp, Homo sapien
tttctctattgatttgccttcttaa

SEQ ID NO: 3257344 - DNA, 25 bp, Homo sapien
tgccttcttaaaagcctctcttctt

SEQ ID NO: 3257345 - DNA, 25 bp, Homo sapien
tacgcatgccgtacactttttgttt

SEQ ID NO: 3257346 - DNA, 25 bp, Homo sapien
aatggactgtcgtcgttgttctaca

SEQ ID NO: 3257347 - DNA, 25 bp, Homo sapien
tacagtaagctcatcatcagaatca

SEQ ID NO: 3257348 - DNA, 25 bp, Homo sapien
aaagatatggtttgtggacatacgc

SEQ ID NO: 3257349 - DNA, 25 bp, Homo sapien
gctgtacaagcagtaaaggcaagat

SEQ ID NO: 3257350 - DNA, 25 bp, Homo sapien
catgactcaggcgttggaaccagga

SEQ ID NO: 3257351 - DNA, 25 bp, Homo sapien
caagatgaattggaggtccaaaagg

SEQ ID NO: 3257352 - DNA, 25 bp, Homo sapien
gaaagttaatagaaagaggagtatg

SEQ ID NO: 3257353 - DNA, 25 bp, Homo sapien
tgaaaggtcactggtatgaacagag

SEQ ID NO: 3257354 - DNA, 25 bp, Homo sapien
tcttccatgctatcagacgttacaa

SEQ ID NO: 3257355 - DNA, 25 bp, Homo sapien
gctaactgtgatgtctgtaagtcca

SEQ ID NO: 3257356 - DNA, 25 bp, Homo sapien
gacgttacaacttcctcctcagtat

SEQ ID NO: 3257357 - DNA, 25 bp, Homo sapien
tctgctttaaatacgtgtcaaacta

SEQ ID NO: 3257358 - DNA, 25 bp, Homo sapien
taaatacgtgtcaaactatcaaaca

SEQ ID NO: 3257359 - DNA, 25 bp, Homo sapien
tactcagagctcaattactaaatta

SEQ ID NO: 3257360 - DNA, 25 bp, Homo sapien
tattataagaacatactcagagctc

SEQ ID NO: 3257361 - DNA, 25 bp, Homo sapien
cttcactcttttttgagtgatcaaa

SEQ ID NO: 3257362 - DNA, 25 bp, Homo sapien
tcttcactcttttttgagtgatcaa

SEQ ID NO: 3257363 - DNA, 25 bp, Homo sapien
tcactcttttttgagtgatcaaatt

SEQ ID NO: 3257364 - DNA, 25 bp, Homo sapien
actcttttttgagtgatcaaatttc

SEQ ID NO: 3257365 - DNA, 25 bp, Homo sapien
ctttgtctgttgatttatttttttg

SEQ ID NO: 3257366 - DNA, 25 bp, Homo sapien
tctgttgatttatttttttgctcac

SEQ ID NO: 3257367 - DNA, 25 bp, Homo sapien
ttgtctgttgatttatttttttgct

SEQ ID NO: 3257368 - DNA, 25 bp, Homo sapien
gtctgttgatttatttttttgctca

SEQ ID NO: 3257369 - DNA, 25 bp, Homo sapien
ttgatgtttctgttgaagccctagc

SEQ ID NO: 3257370 - DNA, 25 bp, Homo sapien
atttttaatttcttcgactggacag

SEQ ID NO: 3257371 - DNA, 25 bp, Homo sapien
tttgacgctctctcactggtcttgg

SEQ ID NO: 3257372 - DNA, 25 bp, Homo sapien
ggtttccaatatcgacatggcatca

SEQ ID NO: 3257373 - DNA, 25 bp, Homo sapien
tcctctttgtgatttagcgtggcca

SEQ ID NO: 3257374 - DNA, 25 bp, Homo sapien
catcgggagctgtgttgccacttcc

SEQ ID NO: 3257375 - DNA, 25 bp, Homo sapien
tcatcatcgggagctgtgttgccac

SEQ ID NO: 3257376 - DNA, 25 bp, Homo sapien
aagggaagtgtctggtttctcatca

SEQ ID NO: 3257377 - DNA, 25 bp, Homo sapien
tcggtcaataccagactccaacatt

SEQ ID NO: 3257378 - DNA, 25 bp, Homo sapien
agaaataattcggtcaataccagac

SEQ ID NO: 3257379 - DNA, 25 bp, Homo sapien
aataccagactccaacattcctgat

SEQ ID NO: 3257380 - DNA, 25 bp, Homo sapien
taattcggtcaataccagactccaa

SEQ ID NO: 3257381 - DNA, 25 bp, Homo sapien
gcggactccatgtgtgagttgccaa

SEQ ID NO: 3257382 - DNA, 25 bp, Homo sapien
ggacttgttgtctaatgttgtttct

SEQ ID NO: 3257383 - DNA, 25 bp, Homo sapien
ggttcttattgagatgcggactcca

SEQ ID NO: 3257384 - DNA, 25 bp, Homo sapien
aaagttgtcaacacgctgtctcaga

SEQ ID NO: 3257385 - DNA, 25 bp, Homo sapien
tggctggcgagctccctgaagggcc

SEQ ID NO: 3257386 - DNA, 25 bp, Homo sapien
gctggcgagctccctgaagggcctc

SEQ ID NO: 3257387 - DNA, 25 bp, Homo sapien
ggctggcgagctccctgaagggcct

SEQ ID NO: 3257388 - DNA, 25 bp, Homo sapien
ctggctggcgagctccctgaagggc

SEQ ID NO: 3257389 - DNA, 25 bp, Homo sapien
tagtcatgcgccctgagaaaccttg

SEQ ID NO: 3257390 - DNA, 25 bp, Homo sapien
gaatcttctactttggcccacggtg

SEQ ID NO: 3257391 - DNA, 25 bp, Homo sapien
cacgttttacatagtgggcccagta

SEQ ID NO: 3257392 - DNA, 25 bp, Homo sapien
cagtagttggagcttagggttgccc

SEQ ID NO: 3257393 - DNA, 25 bp, Homo sapien
tttgcacagtccgtggcacacagct

SEQ ID NO: 3257394 - DNA, 25 bp, Homo sapien
gaaccaaaggacacgctaaggaatg

SEQ ID NO: 3257395 - DNA, 25 bp, Homo sapien
ggaagccactgcaaaagaagcgcgc

SEQ ID NO: 3257396 - DNA, 25 bp, Homo sapien
gctgcagctccaagaggaagccact

SEQ ID NO: 3257397 - DNA, 25 bp, Homo sapien
tgcggaactggtcgaagagcccctg

SEQ ID NO: 3257398 - DNA, 25 bp, Homo sapien
tcggccaggcagtctctgcggaact

SEQ ID NO: 3257399 - DNA, 25 bp, Homo sapien
ggtggttcacgatcatggccacgag

SEQ ID NO: 3257400 - DNA, 25 bp, Homo sapien
gagcccctggctcttgaggtggttc

SEQ ID NO: 3257401 - DNA, 25 bp, Homo sapien
gctgcggctgtgggttggtggccat

SEQ ID NO: 3257402 - DNA, 25 bp, Homo sapien
gcggcgccggaggaggcggctgcgg

SEQ ID NO: 3257403 - DNA, 25 bp, Homo sapien
aggcggctgcggctgtgggttggtg

SEQ ID NO: 3257404 - DNA, 25 bp, Homo sapien
cggctgcggctgtgggttggtggcc

SEQ ID NO: 3257405 - DNA, 25 bp, Homo sapien
ggcctgtgccggggagggcaagggc

SEQ ID NO: 3257406 - DNA, 25 bp, Homo sapien
tgccggggagggcaagggccctgac

SEQ ID NO: 3257407 - DNA, 25 bp, Homo sapien
ggtggcctgtgccggggagggcaag

SEQ ID NO: 3257408 - DNA, 25 bp, Homo sapien
ctgtgccggggagggcaagggccct

SEQ ID NO: 3257409 - DNA, 25 bp, Homo sapien
tgttacggaaccagcggatccagag

SEQ ID NO: 3257410 - DNA, 25 bp, Homo sapien
gatccagagcaaccccggaagtgaa

SEQ ID NO: 3257411 - DNA, 25 bp, Homo sapien
acggaggccgcgaagagccagtttc

SEQ ID NO: 3257412 - DNA, 25 bp, Homo sapien
caacattgacgaaagtccggcgacg

SEQ ID NO: 3257413 - DNA, 25 bp, Homo sapien
ctgtggcgacggagacgacaagact

SEQ ID NO: 3257414 - DNA, 25 bp, Homo sapien
ttaggtcaccggcaggggtctggag

SEQ ID NO: 3257415 - DNA, 25 bp, Homo sapien
gagacgacaagactgtgctggtcgc

SEQ ID NO: 3257416 - DNA, 25 bp, Homo sapien
gactgtgctggtcgcgggttgtggg

SEQ ID NO: 3257417 - DNA, 25 bp, Homo sapien
tggattagatccgatccctccagcc

SEQ ID NO: 3257418 - DNA, 25 bp, Homo sapien
cctgtggattagatccgatccctcc

SEQ ID NO: 3257419 - DNA, 25 bp, Homo sapien
tgcctgtggattagatccgatccct

SEQ ID NO: 3257420 - DNA, 25 bp, Homo sapien
tgtggattagatccgatccctccag

SEQ ID NO: 3257421 - DNA, 25 bp, Homo sapien
tcgcccagccgaagagaaacatttt

SEQ ID NO: 3257422 - DNA, 25 bp, Homo sapien
ctcgcccagccgaagagaaacattt

SEQ ID NO: 3257423 - DNA, 25 bp, Homo sapien
cctcgcccagccgaagagaaacatt

SEQ ID NO: 3257424 - DNA, 25 bp, Homo sapien
acctcgcccagccgaagagaaacat

SEQ ID NO: 3257425 - DNA, 25 bp, Homo sapien
gtgagcttaatgtgctcgatacgca

SEQ ID NO: 3257426 - DNA, 25 bp, Homo sapien
ggcaagaatcaggcccttgttggta

SEQ ID NO: 3257427 - DNA, 25 bp, Homo sapien
aagaatcaggcccttgttggtatac

SEQ ID NO: 3257428 - DNA, 25 bp, Homo sapien
tagtgagcttaatgtgctcgatacg

SEQ ID NO: 3257429 - DNA, 25 bp, Homo sapien
ttgaacagtagccattctcttgatg

SEQ ID NO: 3257430 - DNA, 25 bp, Homo sapien
cattgtagactcttctagttgtgcc

SEQ ID NO: 3257431 - DNA, 25 bp, Homo sapien
ttgtagactcttctagttgtgccat

SEQ ID NO: 3257432 - DNA, 25 bp, Homo sapien
gccagcagcgtgctgggtaacattg

SEQ ID NO: 3257433 - DNA, 25 bp, Homo sapien
gtcgtccaggccatagtgccgtggc

SEQ ID NO: 3257434 - DNA, 25 bp, Homo sapien
acaggcatgccctgccatgcctggc

SEQ ID NO: 3257435 - DNA, 25 bp, Homo sapien
gactacaggcatgccctgccatgcc

SEQ ID NO: 3257436 - DNA, 25 bp, Homo sapien
tacaggcatgccctgccatgcctgg

SEQ ID NO: 3257437 - DNA, 25 bp, Homo sapien
tgggactacaggcatgccctgccat

SEQ ID NO: 3257438 - DNA, 25 bp, Homo sapien
gaaactgccatcattctcctactct

SEQ ID NO: 3257439 - DNA, 25 bp, Homo sapien
ctagcagtagttagggcatagaaga

SEQ ID NO: 3257440 - DNA, 25 bp, Homo sapien
acattccaacaaaggtcaggtactt

SEQ ID NO: 3257441 - DNA, 25 bp, Homo sapien
gaagaggtgagatcttcacaaaaga

SEQ ID NO: 3257442 - DNA, 25 bp, Homo sapien
ttcataatcaaagggaaatcaatat

SEQ ID NO: 3257443 - DNA, 25 bp, Homo sapien
ttgaaagttcgtttttcagtgataa

SEQ ID NO: 3257444 - DNA, 25 bp, Homo sapien
tgataacggaaaacatcggaggagg

SEQ ID NO: 3257445 - DNA, 25 bp, Homo sapien
ttcccgactaggcttttcataatca

SEQ ID NO: 3257446 - DNA, 25 bp, Homo sapien
tttcctctggattggcctaaaggtc

SEQ ID NO: 3257447 - DNA, 25 bp, Homo sapien
ttctgtacttgccttccctaatgga

SEQ ID NO: 3257448 - DNA, 25 bp, Homo sapien
ccctaatggaagtgtagtactgtct

SEQ ID NO: 3257449 - DNA, 25 bp, Homo sapien
cttgctcaggtaaacttcgggttgg

SEQ ID NO: 3257450 - DNA, 25 bp, Homo sapien
gagtagcaccctagcaattaattgt

SEQ ID NO: 3257451 - DNA, 25 bp, Homo sapien
cagggtagtgccgtgatctctagat

SEQ ID NO: 3257452 - DNA, 25 bp, Homo sapien
aaacaactttcagcccgagtagcac

SEQ ID NO: 3257453 - DNA, 25 bp, Homo sapien
tgaagattttccagggtacagggta

SEQ ID NO: 3257454 - DNA, 25 bp, Homo sapien
gcggctatccgcacttcacttggaa

SEQ ID NO: 3257455 - DNA, 25 bp, Homo sapien
tgcttttggctccattagcagaatc

SEQ ID NO: 3257456 - DNA, 25 bp, Homo sapien
gcagaatccctaatgtgcttgtatt

SEQ ID NO: 3257457 - DNA, 25 bp, Homo sapien
tcacttggaattagagaaggtgctt

SEQ ID NO: 3257458 - DNA, 25 bp, Homo sapien
tggccagcggggtggccctttccat

SEQ ID NO: 3257459 - DNA, 25 bp, Homo sapien
cttcactgcacagcctggcattggg

SEQ ID NO: 3257460 - DNA, 25 bp, Homo sapien
ttactcattttcttcactgcacagc

SEQ ID NO: 3257461 - DNA, 25 bp, Homo sapien
actctgatggccagcggggtggccc

SEQ ID NO: 3257462 - DNA, 25 bp, Homo sapien
ccaacagataactgctccaaagaaa

SEQ ID NO: 3257463 - DNA, 25 bp, Homo sapien
tggccagggttgttggaggaaacat

SEQ ID NO: 3257464 - DNA, 25 bp, Homo sapien
ctagattccactttgaatccaatgc

SEQ ID NO: 3257465 - DNA, 25 bp, Homo sapien
ttgttgaaattccaggaccttaggc

SEQ ID NO: 3257466 - DNA, 25 bp, Homo sapien
gaaattccaggaccttaggctgcct

SEQ ID NO: 3257467 - DNA, 25 bp, Homo sapien
cttgcttgaagtatactttgttgaa

SEQ ID NO: 3257468 - DNA, 25 bp, Homo sapien
gaggaccattctctgaaggagctgc

SEQ ID NO: 3257469 - DNA, 25 bp, Homo sapien
ccattctctgaaggagctgcaggac

SEQ ID NO: 3257470 - DNA, 25 bp, Homo sapien
gaccattctctgaaggagctgcagg

SEQ ID NO: 3257471 - DNA, 25 bp, Homo sapien
aggaggaccattctctgaaggagct

SEQ ID NO: 3257472 - DNA, 25 bp, Homo sapien
aaaggaaccaaacagcttgactgaa

SEQ ID NO: 3257473 - DNA, 25 bp, Homo sapien
gagtgaagccagcttaaaggaacca

SEQ ID NO: 3257474 - DNA, 25 bp, Homo sapien
gcttaaaggaaccaaacagcttgac

SEQ ID NO: 3257475 - DNA, 25 bp, Homo sapien
gccagcttaaaggaaccaaacagct

SEQ ID NO: 3257476 - DNA, 25 bp, Homo sapien
tcagtctgaaggggcttggcagagg

SEQ ID NO: 3257477 - DNA, 25 bp, Homo sapien
tggaagccaggcctgtgaaaagatg

SEQ ID NO: 3257478 - DNA, 25 bp, Homo sapien
ggaagccaggcctgtgaaaagatga

SEQ ID NO: 3257479 - DNA, 25 bp, Homo sapien
ctgaaggggcttggcagaggtggaa

SEQ ID NO: 3257480 - DNA, 25 bp, Homo sapien
ttttggctagtataggaggtggccc

SEQ ID NO: 3257481 - DNA, 25 bp, Homo sapien
cgaatccaaggccatggattgctga

SEQ ID NO: 3257482 - DNA, 25 bp, Homo sapien
tgcacaactggattggaccacgaat

SEQ ID NO: 3257483 - DNA, 25 bp, Homo sapien
gctgaattccagatcctttaactag

SEQ ID NO: 3257484 - DNA, 25 bp, Homo sapien
cagagatgaaaggatccactgacag

SEQ ID NO: 3257485 - DNA, 25 bp, Homo sapien
cagcatgcagtctcttacaatcagc

SEQ ID NO: 3257486 - DNA, 25 bp, Homo sapien
ctctgttggaatccttcccatcccc

SEQ ID NO: 3257487 - DNA, 25 bp, Homo sapien
tctcttacaatcagcgttcacctca

SEQ ID NO: 3257488 - DNA, 25 bp, Homo sapien
tctgtaactaatcgaaggttcaaag

SEQ ID NO: 3257489 - DNA, 25 bp, Homo sapien
tctacagtgaccaactttaagggtc

SEQ ID NO: 3257490 - DNA, 25 bp, Homo sapien
agggtctgggttccatgcactgaac

SEQ ID NO: 3257491 - DNA, 25 bp, Homo sapien
gcatgattgagcttcctggttccag

SEQ ID NO: 3257492 - DNA, 25 bp, Homo sapien
taatggtctgtttctgcgaagctgc

SEQ ID NO: 3257493 - DNA, 25 bp, Homo sapien
tgacctttgttccacacttgaggct

SEQ ID NO: 3257494 - DNA, 25 bp, Homo sapien
gacctttgttccacacttgaggctg

SEQ ID NO: 3257495 - DNA, 25 bp, Homo sapien
tctctgtgagccaaatatggatgta

SEQ ID NO: 3257496 - DNA, 25 bp, Homo sapien
ctctgtgagccaaatatggatgtac

SEQ ID NO: 3257497 - DNA, 25 bp, Homo sapien
tggagtaatatttgctcataaacgc

SEQ ID NO: 3257498 - DNA, 25 bp, Homo sapien
gcagtgtctgaatcaccttccggaa

SEQ ID NO: 3257499 - DNA, 25 bp, Homo sapien
aaacgcagtcgtttcctcagaaagt

SEQ ID NO: 3257500 - DNA, 25 bp, Homo sapien
ctggcatagaatagatgttctttgc

SEQ ID NO: 3257501 - DNA, 25 bp, Homo sapien
ccatgacaaaactcttgtttccagc

SEQ ID NO: 3257502 - DNA, 25 bp, Homo sapien
catccatgacaaaactcttgtttcc

SEQ ID NO: 3257503 - DNA, 25 bp, Homo sapien
tccatgacaaaactcttgtttccag

SEQ ID NO: 3257504 - DNA, 25 bp, Homo sapien
ctcatccatgacaaaactcttgttt

SEQ ID NO: 3257505 - DNA, 25 bp, Homo sapien
tgcttttagggaaccgtctgtgact

SEQ ID NO: 3257506 - DNA, 25 bp, Homo sapien
cttgtcaatgtttatagcacagcag

SEQ ID NO: 3257507 - DNA, 25 bp, Homo sapien
tgccagtgtgcatgctccccaaagg

SEQ ID NO: 3257508 - DNA, 25 bp, Homo sapien
gcaaagtgaaatagccactttgtat

SEQ ID NO: 3257509 - DNA, 25 bp, Homo sapien
attgatgaggagtatggcccattgt

SEQ ID NO: 3257510 - DNA, 25 bp, Homo sapien
cccattgtgattcctagtatttctg

SEQ ID NO: 3257511 - DNA, 25 bp, Homo sapien
gatgaggagtatggcccattgtgat

SEQ ID NO: 3257512 - DNA, 25 bp, Homo sapien
tgaggagtatggcccattgtgattc

SEQ ID NO: 3257513 - DNA, 25 bp, Homo sapien
gagagaaaggcgaggatggatatgc

SEQ ID NO: 3257514 - DNA, 25 bp, Homo sapien
ggatatgccagagctgcatggccct

SEQ ID NO: 3257515 - DNA, 25 bp, Homo sapien
tagaccagtaccctgggatggctga

SEQ ID NO: 3257516 - DNA, 25 bp, Homo sapien
tgagagctccaactctatagttgcc

SEQ ID NO: 3257517 - DNA, 25 bp, Homo sapien
tggctgcttctttcttccctctttc

SEQ ID NO: 3257518 - DNA, 25 bp, Homo sapien
ctgcttctttcttccctctttcctt

SEQ ID NO: 3257519 - DNA, 25 bp, Homo sapien
cttctttcttccctctttccttcat

SEQ ID NO: 3257520 - DNA, 25 bp, Homo sapien
agttccttggtgtaatggctgcttc

SEQ ID NO: 3257521 - DNA, 25 bp, Homo sapien
ggtgggctggctgtaaacagagcca

SEQ ID NO: 3257522 - DNA, 25 bp, Homo sapien
tgggctggctgtaaacagagccaaa

SEQ ID NO: 3257523 - DNA, 25 bp, Homo sapien
cacatctgccactcaatacatggtc

SEQ ID NO: 3257524 - DNA, 25 bp, Homo sapien
acatctgccactcaatacatggtcc

SEQ ID NO: 3257525 - DNA, 25 bp, Homo sapien
tggtccactaggatgctgagctgag

SEQ ID NO: 3257526 - DNA, 25 bp, Homo sapien
ctttgagttgaggagcgatgctctc

SEQ ID NO: 3257527 - DNA, 25 bp, Homo sapien
tggcacttgctgatcctgaggcagg

SEQ ID NO: 3257528 - DNA, 25 bp, Homo sapien
tggttttaggacagcatccttctga

SEQ ID NO: 3257529 - DNA, 25 bp, Homo sapien
gaggattgatgtgctaagcctgcct

SEQ ID NO: 3257530 - DNA, 25 bp, Homo sapien
gattgatgtgctaagcctgcctttc

SEQ ID NO: 3257531 - DNA, 25 bp, Homo sapien
cagctggtgatgtttttacgtctgc

SEQ ID NO: 3257532 - DNA, 25 bp, Homo sapien
gtttttacgtctgctcgccccagct

SEQ ID NO: 3257533 - DNA, 25 bp, Homo sapien
gagggctgcccagctgtaagccctg

SEQ ID NO: 3257534 - DNA, 25 bp, Homo sapien
ctggcagtgaagctgtgatgattgc

SEQ ID NO: 3257535 - DNA, 25 bp, Homo sapien
ggcagtgaagctgtgatgattgccc

SEQ ID NO: 3257536 - DNA, 25 bp, Homo sapien
cctggcagtgaagctgtgatgattg

SEQ ID NO: 3257537 - DNA, 25 bp, Homo sapien
aagcttctctttgaaccctcttgct

SEQ ID NO: 3257538 - DNA, 25 bp, Homo sapien
gacaagctgtctggttttaatttcc

SEQ ID NO: 3257539 - DNA, 25 bp, Homo sapien
gctccttagtgccaatcttgcttcc

SEQ ID NO: 3257540 - DNA, 25 bp, Homo sapien
cccgcaggttgatgacttagttgga

SEQ ID NO: 3257541 - DNA, 25 bp, Homo sapien
gagccagagtccctgtcctaagcag

SEQ ID NO: 3257542 - DNA, 25 bp, Homo sapien
tgaatttccctacaggaggcagcaa

SEQ ID NO: 3257543 - DNA, 25 bp, Homo sapien
aaggcccttgtgcatccctcttgtg

SEQ ID NO: 3257544 - DNA, 25 bp, Homo sapien
gagtcgtgaccaccgtaagttatct

SEQ ID NO: 3257545 - DNA, 25 bp, Homo sapien
aggcatgcaccacgatggccatcta

SEQ ID NO: 3257546 - DNA, 25 bp, Homo sapien
caccacgatggccatctaatttttg

SEQ ID NO: 3257547 - DNA, 25 bp, Homo sapien
gtcacccagactgaaaggctgaagt

SEQ ID NO: 3257548 - DNA, 25 bp, Homo sapien
cccagactgaaaggctgaagtgcag

SEQ ID NO: 3257549 - DNA, 25 bp, Homo sapien
tgtgcccagaggcagtttgaccctc

SEQ ID NO: 3257550 - DNA, 25 bp, Homo sapien
tgcccagaggcagtttgaccctcac

SEQ ID NO: 3257551 - DNA, 25 bp, Homo sapien
cctgtgcccagaggcagtttgaccc

SEQ ID NO: 3257552 - DNA, 25 bp, Homo sapien
cagcctgtgcccagaggcagtttga

SEQ ID NO: 3257553 - DNA, 25 bp, Homo sapien
gcctcctttccagttggtgccctcc

SEQ ID NO: 3257554 - DNA, 25 bp, Homo sapien
ctcctttccagttggtgccctcctt

SEQ ID NO: 3257555 - DNA, 25 bp, Homo sapien
tttgcctcctttccagttggtgccc

SEQ ID NO: 3257556 - DNA, 25 bp, Homo sapien
cctttgcctctgtttgatggagctg

SEQ ID NO: 3257557 - DNA, 25 bp, Homo sapien
ccttgaaatatggtctggaagctac

SEQ ID NO: 3257558 - DNA, 25 bp, Homo sapien
tcaatgtccaaggatatcaaccagt

SEQ ID NO: 3257559 - DNA, 25 bp, Homo sapien
ggaagctacgagtggaaaaatacca

SEQ ID NO: 3257560 - DNA, 25 bp, Homo sapien
tgtccaaggatatcaaccagtcctt

SEQ ID NO: 3257561 - DNA, 25 bp, Homo sapien
ggagattccactgccatcaggtggt

SEQ ID NO: 3257562 - DNA, 25 bp, Homo sapien
tcccctttcccatggagattccact

SEQ ID NO: 3257563 - DNA, 25 bp, Homo sapien
ctgttcccctttcccatggagattc

SEQ ID NO: 3257564 - DNA, 25 bp, Homo sapien
tccactgccatcaggtggtccaggg

SEQ ID NO: 3257565 - DNA, 25 bp, Homo sapien
tctgtcagggagctagctctccatg

SEQ ID NO: 3257566 - DNA, 25 bp, Homo sapien
tgcttttgttcctgcggatgaaagg

SEQ ID NO: 3257567 - DNA, 25 bp, Homo sapien
ttcctgcggatgaaagggtctgtca

SEQ ID NO: 3257568 - DNA, 25 bp, Homo sapien
ggtctgtcagggagctagctctcca

SEQ ID NO: 3257569 - DNA, 25 bp, Homo sapien
tagtttcatggacacataccaccaa

SEQ ID NO: 3257570 - DNA, 25 bp, Homo sapien
catggacacataccaccaagtggca

SEQ ID NO: 3257571 - DNA, 25 bp, Homo sapien
tggacacataccaccaagtggcaca

SEQ ID NO: 3257572 - DNA, 25 bp, Homo sapien
tactaatagtttcatggacacatac

SEQ ID NO: 3257573 - DNA, 25 bp, Homo sapien
gactgctgcagactctatgccattg

SEQ ID NO: 3257574 - DNA, 25 bp, Homo sapien
gactctatgccattgctttctgttt

SEQ ID NO: 3257575 - DNA, 25 bp, Homo sapien
agtgagactgctgcagactctatgc

SEQ ID NO: 3257576 - DNA, 25 bp, Homo sapien
gctgcagactctatgccattgcttt

SEQ ID NO: 3257577 - DNA, 25 bp, Homo sapien
atcatctcttgcttggaccatcaca

SEQ ID NO: 3257578 - DNA, 25 bp, Homo sapien
gatattgccatgagttcagaccctc

SEQ ID NO: 3257579 - DNA, 25 bp, Homo sapien
tcttgcttggaccatcacacctgtc

SEQ ID NO: 3257580 - DNA, 25 bp, Homo sapien
tgcagatattgccatgagttcagac

SEQ ID NO: 3257581 - DNA, 25 bp, Homo sapien
aaccagaatgcctccgtgtggccac

SEQ ID NO: 3257582 - DNA, 25 bp, Homo sapien
ggtgacttgatcaacctagctggtg

SEQ ID NO: 3257583 - DNA, 25 bp, Homo sapien
tggtggtctcagagtagttgtgtta

SEQ ID NO: 3257584 - DNA, 25 bp, Homo sapien
ttcttttgggcagggctcaatggac

SEQ ID NO: 3257585 - DNA, 25 bp, Homo sapien
gctgttcccagccatattctatttt

SEQ ID NO: 3257586 - DNA, 25 bp, Homo sapien
caccagccttcccagatttaagagc

SEQ ID NO: 3257587 - DNA, 25 bp, Homo sapien
tattgatagaaacagtcaccagcct

SEQ ID NO: 3257588 - DNA, 25 bp, Homo sapien
gcatattctattgatagaaacagtc

SEQ ID NO: 3257589 - DNA, 25 bp, Homo sapien
aagaagatgtaactccagatcccag

SEQ ID NO: 3257590 - DNA, 25 bp, Homo sapien
tctgtggctccctcgtggtcagtgc

SEQ ID NO: 3257591 - DNA, 25 bp, Homo sapien
gtccttatagccctctctggtaggt

SEQ ID NO: 3257592 - DNA, 25 bp, Homo sapien
tggctcacactgaaggtccttatag

SEQ ID NO: 3257593 - DNA, 25 bp, Homo sapien
atcctgaagcacagcgacaccgtgc

SEQ ID NO: 3257594 - DNA, 25 bp, Homo sapien
taggctcctggctgcatactgtgcc

SEQ ID NO: 3257595 - DNA, 25 bp, Homo sapien
gcggtaagtgtcctccacagatgga

SEQ ID NO: 3257596 - DNA, 25 bp, Homo sapien
gaatgcacagaggacagcgcatcct

SEQ ID NO: 3257597 - DNA, 25 bp, Homo sapien
acttaacatgatccttgatgtagtc

SEQ ID NO: 3257598 - DNA, 25 bp, Homo sapien
tgatgtagtcatgtgatgtagttgg

SEQ ID NO: 3257599 - DNA, 25 bp, Homo sapien
catgatccttgatgtagtcatgtga

SEQ ID NO: 3257600 - DNA, 25 bp, Homo sapien
gatccttgatgtagtcatgtgatgt

SEQ ID NO: 3257601 - DNA, 25 bp, Homo sapien
gatactgcggatggggagataacaa

SEQ ID NO: 3257602 - DNA, 25 bp, Homo sapien
cagcccttcgtgaggggaatgccag

SEQ ID NO: 3257603 - DNA, 25 bp, Homo sapien
tttgggcgaaggagccttgctgtaa

SEQ ID NO: 3257604 - DNA, 25 bp, Homo sapien
aagccttgtgggggatgtttctgca

SEQ ID NO: 3257605 - DNA, 25 bp, Homo sapien
gattccactcgtgcatctcctttga

SEQ ID NO: 3257606 - DNA, 25 bp, Homo sapien
ggtagtgattccactcgtgcatctc

SEQ ID NO: 3257607 - DNA, 25 bp, Homo sapien
tagtgattccactcgtgcatctcct

SEQ ID NO: 3257608 - DNA, 25 bp, Homo sapien
caggtagtgattccactcgtgcatc

SEQ ID NO: 3257609 - DNA, 25 bp, Homo sapien
tcttgcaccaggtagaatcagatcc

SEQ ID NO: 3257610 - DNA, 25 bp, Homo sapien
ttggtcttgcaccaggtagaatcag

SEQ ID NO: 3257611 - DNA, 25 bp, Homo sapien
tagaatcagatcctggtttgtctgc

SEQ ID NO: 3257612 - DNA, 25 bp, Homo sapien
gaatcagatcctggtttgtctgcat

SEQ ID NO: 3257613 - DNA, 25 bp, Homo sapien
tttacctgtggggtgactaactgtc

SEQ ID NO: 3257614 - DNA, 25 bp, Homo sapien
gctgcccctcatttacctgtggggt

SEQ ID NO: 3257615 - DNA, 25 bp, Homo sapien
ctggaatgccctggtattagcatta

SEQ ID NO: 3257616 - DNA, 25 bp, Homo sapien
tgccctggtattagcattaacattt

SEQ ID NO: 3257617 - DNA, 25 bp, Homo sapien
cccagagggtagcagaaaaattctg

SEQ ID NO: 3257618 - DNA, 25 bp, Homo sapien
gatccttattgtagggccacttgtt

SEQ ID NO: 3257619 - DNA, 25 bp, Homo sapien
aaaaattctgattgtggccaactat

SEQ ID NO: 3257620 - DNA, 25 bp, Homo sapien
ttccctaagatccttattgtagggc

SEQ ID NO: 3257621 - DNA, 25 bp, Homo sapien
tctctaaatctaccttgctaagctc

SEQ ID NO: 3257622 - DNA, 25 bp, Homo sapien
aaatctaccttgctaagctcctgtg

SEQ ID NO: 3257623 - DNA, 25 bp, Homo sapien
ctgatctctaaatctaccttgctaa

SEQ ID NO: 3257624 - DNA, 25 bp, Homo sapien
agcagggctcttaccagacttctca

SEQ ID NO: 3257625 - DNA, 25 bp, Homo sapien
tgtgactctaggaatggaacattag

SEQ ID NO: 3257626 - DNA, 25 bp, Homo sapien
gaaaatggtgtatcagcagcttcct

SEQ ID NO: 3257627 - DNA, 25 bp, Homo sapien
gatgatgcagtaagaggtgtgactc

SEQ ID NO: 3257628 - DNA, 25 bp, Homo sapien
ccagccctgatagcttaagagaaga

SEQ ID NO: 3257629 - DNA, 25 bp, Homo sapien
taatcctgcaaatcttggttctgta

SEQ ID NO: 3257630 - DNA, 25 bp, Homo sapien
gtaattccaattcctcaacaccaga

SEQ ID NO: 3257631 - DNA, 25 bp, Homo sapien
aagcctggtacatcctaagagttgg

SEQ ID NO: 3257632 - DNA, 25 bp, Homo sapien
tgaatactaggactcacaactagca

SEQ ID NO: 3257633 - DNA, 25 bp, Homo sapien
ggaagccaacgatcagcttctttga

SEQ ID NO: 3257634 - DNA, 25 bp, Homo sapien
ctgggaagccaacgatcagcttctt

SEQ ID NO: 3257635 - DNA, 25 bp, Homo sapien
gatcagcttctttgaaaggccattg

SEQ ID NO: 3257636 - DNA, 25 bp, Homo sapien
aacgatcagcttctttgaaaggcca

SEQ ID NO: 3257637 - DNA, 25 bp, Homo sapien
ctctggctgatgttaacaataatag

SEQ ID NO: 3257638 - DNA, 25 bp, Homo sapien
tctggctgatgttaacaataatagc

SEQ ID NO: 3257639 - DNA, 25 bp, Homo sapien
cattcccagcaggttgtgtggacat

SEQ ID NO: 3257640 - DNA, 25 bp, Homo sapien
tcctttgggttgaggatctgctttt

SEQ ID NO: 3257641 - DNA, 25 bp, Homo sapien
actccattcccagcaggttgtgtgg

SEQ ID NO: 3257642 - DNA, 25 bp, Homo sapien
gaggatctgcttttctggaactcca

SEQ ID NO: 3257643 - DNA, 25 bp, Homo sapien
cactctcttgacacaaaattggagc

SEQ ID NO: 3257644 - DNA, 25 bp, Homo sapien
ctgagagtttcctccactgggatcc

SEQ ID NO: 3257645 - DNA, 25 bp, Homo sapien
tggttctgagagtttcctccactgg

SEQ ID NO: 3257646 - DNA, 25 bp, Homo sapien
tccttctttttgctgtgcgtgcact

SEQ ID NO: 3257647 - DNA, 25 bp, Homo sapien
ccactgggtttctacaagtttatca

SEQ ID NO: 3257648 - DNA, 25 bp, Homo sapien
caaacaaccactgggtttctacaag

SEQ ID NO: 3257649 - DNA, 25 bp, Homo sapien
tgcaaacaaccactgggtttctaca

SEQ ID NO: 3257650 - DNA, 25 bp, Homo sapien
actgggtttctacaagtttatcagc

SEQ ID NO: 3257651 - DNA, 25 bp, Homo sapien
tgaccaagatatccatgatgtctgg

SEQ ID NO: 3257652 - DNA, 25 bp, Homo sapien
gcagaggttttatgccagggcatta

SEQ ID NO: 3257653 - DNA, 25 bp, Homo sapien
cagtgtgtgcctagatgtgtgctta

SEQ ID NO: 3257654 - DNA, 25 bp, Homo sapien
gaaatgtgaaccctgaccatccagt

SEQ ID NO: 3257655 - DNA, 25 bp, Homo sapien
gtttcacagacatttccaccaactg

SEQ ID NO: 3257656 - DNA, 25 bp, Homo sapien
tcacctcattaaaggttgctcttct

SEQ ID NO: 3257657 - DNA, 25 bp, Homo sapien
tcattaaaggttgctcttcttaaag

SEQ ID NO: 3257658 - DNA, 25 bp, Homo sapien
cctcacctcattaaaggttgctctt

SEQ ID NO: 3257659 - DNA, 25 bp, Homo sapien
actccctagaggtgtgattatacct

SEQ ID NO: 3257660 - DNA, 25 bp, Homo sapien
cttctatacactgaaagagggtctc

SEQ ID NO: 3257661 - DNA, 25 bp, Homo sapien
taatgcatctcaagtgatatggccc

SEQ ID NO: 3257662 - DNA, 25 bp, Homo sapien
agagggtctccttctatctatgagt

SEQ ID NO: 3257663 - DNA, 25 bp, Homo sapien
ggtgaccggtctcctgtctggcctg

SEQ ID NO: 3257664 - DNA, 25 bp, Homo sapien
ctgcggtgaccggtctcctgtctgg

SEQ ID NO: 3257665 - DNA, 25 bp, Homo sapien
gacactgcggtgaccggtctcctgt

SEQ ID NO: 3257666 - DNA, 25 bp, Homo sapien
tgtgacactgcggtgaccggtctcc

SEQ ID NO: 3257667 - DNA, 25 bp, Homo sapien
tcagatctggtttcaaggtaccatc

SEQ ID NO: 3257668 - DNA, 25 bp, Homo sapien
tgccgtcagtaggtgtttcctgaac

SEQ ID NO: 3257669 - DNA, 25 bp, Homo sapien
atggccacatgatggctacagagag

SEQ ID NO: 3257670 - DNA, 25 bp, Homo sapien
cctgaacccatactggtgccaagca

SEQ ID NO: 3257671 - DNA, 25 bp, Homo sapien
gactcatgggggttggtcgcaccac

SEQ ID NO: 3257672 - DNA, 25 bp, Homo sapien
gacctgaaggactcatgggggttgg

SEQ ID NO: 3257673 - DNA, 25 bp, Homo sapien
tgaaggactcatgggggttggtcgc

SEQ ID NO: 3257674 - DNA, 25 bp, Homo sapien
catgggggttggtcgcaccacccat

SEQ ID NO: 3257675 - DNA, 25 bp, Homo sapien
cagcctaaattgctctttctctgtc

SEQ ID NO: 3257676 - DNA, 25 bp, Homo sapien
ggttgatgtagctatcagcctaaat

SEQ ID NO: 3257677 - DNA, 25 bp, Homo sapien
cagtggaaaattaaattcgtcagtg

SEQ ID NO: 3257678 - DNA, 25 bp, Homo sapien
caaatctgagctaggacattcatca

SEQ ID NO: 3257679 - DNA, 25 bp, Homo sapien
ggatgctcagctattagaaagtcat

SEQ ID NO: 3257680 - DNA, 25 bp, Homo sapien
ggtttgcaagtgattcagagcagga

SEQ ID NO: 3257681 - DNA, 25 bp, Homo sapien
aaagtgtatcttagtggtttgcaag

SEQ ID NO: 3257682 - DNA, 25 bp, Homo sapien
gctgttctctgtctcaagtcagaaa

SEQ ID NO: 3257683 - DNA, 25 bp, Homo sapien
aggtggtagtttctatctttgtgac

SEQ ID NO: 3257684 - DNA, 25 bp, Homo sapien
tatctttgtgacttgccatccatac

SEQ ID NO: 3257685 - DNA, 25 bp, Homo sapien
tcaggtacccactggtctcaaggtg

SEQ ID NO: 3257686 - DNA, 25 bp, Homo sapien
tttcgacgtacactgctttctagca

SEQ ID NO: 3257687 - DNA, 25 bp, Homo sapien
ggcccatgcaggtttaatgatgatt

SEQ ID NO: 3257688 - DNA, 25 bp, Homo sapien
gtttaacaactggatgatgtggagt

SEQ ID NO: 3257689 - DNA, 25 bp, Homo sapien
gatgtggagttacctcattaggccc

SEQ ID NO: 3257690 - DNA, 25 bp, Homo sapien
ttacagagaatgcattggtaagtcc

SEQ ID NO: 3257691 - DNA, 25 bp, Homo sapien
ctttgtagttgtggtttagcaggac

SEQ ID NO: 3257692 - DNA, 25 bp, Homo sapien
gttgtggtttagcaggacaaaactg

SEQ ID NO: 3257693 - DNA, 25 bp, Homo sapien
gtggtttagcaggacaaaactggaa

SEQ ID NO: 3257694 - DNA, 25 bp, Homo sapien
tgtagttgtggtttagcaggacaaa

SEQ ID NO: 3257695 - DNA, 25 bp, Homo sapien
catcaccttaaagaaagtactgttt

SEQ ID NO: 3257696 - DNA, 25 bp, Homo sapien
cttaagcatcaccttaaagaaagta

SEQ ID NO: 3257697 - DNA, 25 bp, Homo sapien
caaaagtacttagtacttcacccat

SEQ ID NO: 3257698 - DNA, 25 bp, Homo sapien
tcaaaagtacttagtacttcaccca

SEQ ID NO: 3257699 - DNA, 25 bp, Homo sapien
tacaggaaatggaccggaaagcaga

SEQ ID NO: 3257700 - DNA, 25 bp, Homo sapien
tataataatgtggtagatcaagttc

SEQ ID NO: 3257701 - DNA, 25 bp, Homo sapien
cctgaatgacacttagactttctga

SEQ ID NO: 3257702 - DNA, 25 bp, Homo sapien
gataaatggcttattccgcattgcc

SEQ ID NO: 3257703 - DNA, 25 bp, Homo sapien
ccacataatctggaagtgtccccat

SEQ ID NO: 3257704 - DNA, 25 bp, Homo sapien
cagtcaacagacttcactttcaaca

SEQ ID NO: 3257705 - DNA, 25 bp, Homo sapien
cattttcccagtcaacagacttcac

SEQ ID NO: 3257706 - DNA, 25 bp, Homo sapien
cttgactcagagcagcagaagtcaa

SEQ ID NO: 3257707 - DNA, 25 bp, Homo sapien
gagcagcagaagtcaacattttccc

SEQ ID NO: 3257708 - DNA, 25 bp, Homo sapien
tgccagcagaagagagctctcacca

SEQ ID NO: 3257709 - DNA, 25 bp, Homo sapien
gaagagacactagagatcttgttct

SEQ ID NO: 3257710 - DNA, 25 bp, Homo sapien
tggctgtgggacagagaagaaccct

SEQ ID NO: 3257711 - DNA, 25 bp, Homo sapien
aaactacgagcctaaacttctgtgg

SEQ ID NO: 3257712 - DNA, 25 bp, Homo sapien
tctttctgtaagtggttgacagact

SEQ ID NO: 3257713 - DNA, 25 bp, Homo sapien
agcttcctgtctggataatagaaaa

SEQ ID NO: 3257714 - DNA, 25 bp, Homo sapien
agtggttgacagactttcattcgta

SEQ ID NO: 3257715 - DNA, 25 bp, Homo sapien
tctgtaagtggttgacagactttca

SEQ ID NO: 3257716 - DNA, 25 bp, Homo sapien
tgggctgccaggagccatttgtaac

SEQ ID NO: 3257717 - DNA, 25 bp, Homo sapien
gctgccaggagccatttgtaactcc

SEQ ID NO: 3257718 - DNA, 25 bp, Homo sapien
gggctgccaggagccatttgtaact

SEQ ID NO: 3257719 - DNA, 25 bp, Homo sapien
gccaggagccatttgtaactcccat

SEQ ID NO: 3257720 - DNA, 25 bp, Homo sapien
cacacagatttgttatcaacagccc

SEQ ID NO: 3257721 - DNA, 25 bp, Homo sapien
tcacacagatttgttatcaacagcc

SEQ ID NO: 3257722 - DNA, 25 bp, Homo sapien
tttcctctatgggttccactaacta

SEQ ID NO: 3257723 - DNA, 25 bp, Homo sapien
tgctggtagacctttttggaatttg

SEQ ID NO: 3257724 - DNA, 25 bp, Homo sapien
taattctggagcatctggaacatcc

SEQ ID NO: 3257725 - DNA, 25 bp, Homo sapien
acatcctcacttgaagttctttgaa

SEQ ID NO: 3257726 - DNA, 25 bp, Homo sapien
gcatggcattcaggaagagaaagta

SEQ ID NO: 3257727 - DNA, 25 bp, Homo sapien
tgaatagcatggcattcaggaagag

SEQ ID NO: 3257728 - DNA, 25 bp, Homo sapien
gagaaagtaggtagccagagtcaca

SEQ ID NO: 3257729 - DNA, 25 bp, Homo sapien
gaagagaaagtaggtagccagagtc

SEQ ID NO: 3257730 - DNA, 25 bp, Homo sapien
tacagattcaaagactggtgtgtga

SEQ ID NO: 3257731 - DNA, 25 bp, Homo sapien
ctgtctctggtgctaaaatgaattc

SEQ ID NO: 3257732 - DNA, 25 bp, Homo sapien
tccaccgtccctgaatctttgcaaa

SEQ ID NO: 3257733 - DNA, 25 bp, Homo sapien
tgtgtgatttgatgacacaccttcc

SEQ ID NO: 3257734 - DNA, 25 bp, Homo sapien
caactgaagaagatattaacacaat

SEQ ID NO: 3257735 - DNA, 25 bp, Homo sapien
acaactgaagaagatattaacacaa

SEQ ID NO: 3257736 - DNA, 25 bp, Homo sapien
aacaactgaagaagatattaacaca

SEQ ID NO: 3257737 - DNA, 25 bp, Homo sapien
cccactacccatgttgttctgagag

SEQ ID NO: 3257738 - DNA, 25 bp, Homo sapien
tgatcagtcttaaatgccactccga

SEQ ID NO: 3257739 - DNA, 25 bp, Homo sapien
agaaccttaatctagtccactgtca

SEQ ID NO: 3257740 - DNA, 25 bp, Homo sapien
gctcttagctctaggcatccacaca

SEQ ID NO: 3257741 - DNA, 25 bp, Homo sapien
gcttccaagtacgacatcttgaaaa

SEQ ID NO: 3257742 - DNA, 25 bp, Homo sapien
cagagaatgtgggatctacatcagc

SEQ ID NO: 3257743 - DNA, 25 bp, Homo sapien
tgtgggatctacatcagcaccttca

SEQ ID NO: 3257744 - DNA, 25 bp, Homo sapien
agagctgcttccaagtacgacatct

SEQ ID NO: 3257745 - DNA, 25 bp, Homo sapien
gaagggcatctacctcattcaagtt

SEQ ID NO: 3257746 - DNA, 25 bp, Homo sapien
tgtaaacatgttagaccaggctata

SEQ ID NO: 3257747 - DNA, 25 bp, Homo sapien
cattcaagttaaatggaaagcaagt

SEQ ID NO: 3257748 - DNA, 25 bp, Homo sapien
ttcttgccccataaaaacattaggc

SEQ ID NO: 3257749 - DNA, 25 bp, Homo sapien
gctcctgctgtagtcataagtggcc

SEQ ID NO: 3257750 - DNA, 25 bp, Homo sapien
ctcctgctgtagtcataagtggcct

SEQ ID NO: 3257751 - DNA, 25 bp, Homo sapien
tctttgtccacctgaagcagagctg

SEQ ID NO: 3257752 - DNA, 25 bp, Homo sapien
caatttggcatatggtctttgtcca

SEQ ID NO: 3257753 - DNA, 25 bp, Homo sapien
atggtctttgtccacctgaagcaga

SEQ ID NO: 3257754 - DNA, 25 bp, Homo sapien
cagagctgcagcacgttgccaccat

SEQ ID NO: 3257755 - DNA, 25 bp, Homo sapien
cagatgaaaagagtgctcaagccaa

SEQ ID NO: 3257756 - DNA, 25 bp, Homo sapien
tgctttggtgtatattcagaaatct

SEQ ID NO: 3257757 - DNA, 25 bp, Homo sapien
tagggtacgacagaaagtgtgcttt

SEQ ID NO: 3257758 - DNA, 25 bp, Homo sapien
tctctgtgtgaattcccagatgaaa

SEQ ID NO: 3257759 - DNA, 25 bp, Homo sapien
attcaacagggatgtttttagtcat

SEQ ID NO: 3257760 - DNA, 25 bp, Homo sapien
cacattcaacagggatgtttttagt

SEQ ID NO: 3257761 - DNA, 25 bp, Homo sapien
acattcaacagggatgtttttagtc

SEQ ID NO: 3257762 - DNA, 25 bp, Homo sapien
cattcaacagggatgtttttagtca

SEQ ID NO: 3257763 - DNA, 25 bp, Homo sapien
tccaagccctgttggtaggtcttct

SEQ ID NO: 3257764 - DNA, 25 bp, Homo sapien
ggagccctaactcctcgcagataaa

SEQ ID NO: 3257765 - DNA, 25 bp, Homo sapien
cgtgtgcgtgctcctctgttaaaat

SEQ ID NO: 3257766 - DNA, 25 bp, Homo sapien
tactctactgagttgtgcctgacta

SEQ ID NO: 3257767 - DNA, 25 bp, Homo sapien
tcaaccgacaacaaaatgacaaaac

SEQ ID NO: 3257768 - DNA, 25 bp, Homo sapien
gtctcctcaaccgacaacaaaatga

SEQ ID NO: 3257769 - DNA, 25 bp, Homo sapien
aaaacagatcagcagagggtgatct

SEQ ID NO: 3257770 - DNA, 25 bp, Homo sapien
attttgttgtctcctcaaccgacaa

SEQ ID NO: 3257771 - DNA, 25 bp, Homo sapien
gaattgtgtacaggtagttgtttca

SEQ ID NO: 3257772 - DNA, 25 bp, Homo sapien
ctaccctcaatgcatccggcaaaag

SEQ ID NO: 3257773 - DNA, 25 bp, Homo sapien
caatgcatccggcaaaagtttcaga

SEQ ID NO: 3257774 - DNA, 25 bp, Homo sapien
tttcagaatggctgaattgtgtaca

SEQ ID NO: 3257775 - DNA, 25 bp, Homo sapien
tcattaagtagctcacagtggctgg

SEQ ID NO: 3257776 - DNA, 25 bp, Homo sapien
taatggacccttattacagaggcag

SEQ ID NO: 3257777 - DNA, 25 bp, Homo sapien
attaagcagcagagcttgagcctca

SEQ ID NO: 3257778 - DNA, 25 bp, Homo sapien
tatctctcgcaagaatcaggcctgg

SEQ ID NO: 3257779 - DNA, 25 bp, Homo sapien
catgcccacatttagactgcctgag

SEQ ID NO: 3257780 - DNA, 25 bp, Homo sapien
gcttagcattttagtgccatgccca

SEQ ID NO: 3257781 - DNA, 25 bp, Homo sapien
cactgccgtagggatgggttttctc

SEQ ID NO: 3257782 - DNA, 25 bp, Homo sapien
tgtacctaactcttgacctgcatcc

SEQ ID NO: 3257783 - DNA, 25 bp, Homo sapien
tctgactgggtctttaactctgctt

SEQ ID NO: 3257784 - DNA, 25 bp, Homo sapien
tctatgtccagatagcaagtatcgc

SEQ ID NO: 3257785 - DNA, 25 bp, Homo sapien
caaaatccttttctggggcaactgc

SEQ ID NO: 3257786 - DNA, 25 bp, Homo sapien
gatgcgtctttggatagagtgtgca

SEQ ID NO: 3257787 - DNA, 25 bp, Homo sapien
aacaaaatgaacagtgagcactgtc

SEQ ID NO: 3257788 - DNA, 25 bp, Homo sapien
ccaacaaaatgaacagtgagcactg

SEQ ID NO: 3257789 - DNA, 25 bp, Homo sapien
cttcccaacaaaatgaacagtgagc

SEQ ID NO: 3257790 - DNA, 25 bp, Homo sapien
aaaatgaacagtgagcactgtcaca

SEQ ID NO: 3257791 - DNA, 25 bp, Homo sapien
ctgccttggagctatcactgagaat

SEQ ID NO: 3257792 - DNA, 25 bp, Homo sapien
cactgagaatttgcaacaagaagca

SEQ ID NO: 3257793 - DNA, 25 bp, Homo sapien
tccacagtctgaggccccatataac

SEQ ID NO: 3257794 - DNA, 25 bp, Homo sapien
caagaagcaatggtcagactccaca

SEQ ID NO: 3257795 - DNA, 25 bp, Homo sapien
gaggaggttctataaataggatttg

SEQ ID NO: 3257796 - DNA, 25 bp, Homo sapien
attttgacagttggttgggtcatga

SEQ ID NO: 3257797 - DNA, 25 bp, Homo sapien
ttttgacagttggttgggtcatgaa

SEQ ID NO: 3257798 - DNA, 25 bp, Homo sapien
agtgagcaattttccttatgttcca

SEQ ID NO: 3257799 - DNA, 25 bp, Homo sapien
tgtgagttacaaagatccagtgagc

SEQ ID NO: 3257800 - DNA, 25 bp, Homo sapien
tccatgttgtcaagtgagctacagt

SEQ ID NO: 3257801 - DNA, 25 bp, Homo sapien
ctgatactgtgcaaactcttgtgag

SEQ ID NO: 3257802 - DNA, 25 bp, Homo sapien
catagacttccttttgtcttgtaac

SEQ ID NO: 3257803 - DNA, 25 bp, Homo sapien
tcttctcatagacttccttttgtct

SEQ ID NO: 3257804 - DNA, 25 bp, Homo sapien
tcatagacttccttttgtcttgtaa

SEQ ID NO: 3257805 - DNA, 25 bp, Homo sapien
gatttttcttctcatagacttcctt

SEQ ID NO: 3257806 - DNA, 25 bp, Homo sapien
gcccattgccgaaacacagatttta

SEQ ID NO: 3257807 - DNA, 25 bp, Homo sapien
actgacgcaatgacagctgtgaaga

SEQ ID NO: 3257808 - DNA, 25 bp, Homo sapien
aacagcgtaatccacagactagcag

SEQ ID NO: 3257809 - DNA, 25 bp, Homo sapien
aatgcttcatcccagaaaggtcagg

SEQ ID NO: 3257810 - DNA, 25 bp, Homo sapien
gacctatgtgagtcttcctcctgta

SEQ ID NO: 3257811 - DNA, 25 bp, Homo sapien
taccagttgctagtggttgggagct

SEQ ID NO: 3257812 - DNA, 25 bp, Homo sapien
tcttagcaaagtcgcccacttaggg

SEQ ID NO: 3257813 - DNA, 25 bp, Homo sapien
ggagctgtctatggtcctgtctgga

SEQ ID NO: 3257814 - DNA, 25 bp, Homo sapien
ttctttccgtcacttttagatacag

SEQ ID NO: 3257815 - DNA, 25 bp, Homo sapien
tctttccgtcacttttagatacagc

SEQ ID NO: 3257816 - DNA, 25 bp, Homo sapien
ccattctttccgtcacttttagata

SEQ ID NO: 3257817 - DNA, 25 bp, Homo sapien
cattctttccgtcacttttagatac

SEQ ID NO: 3257818 - DNA, 25 bp, Homo sapien
atggggtcacgggtatatctgggtt

SEQ ID NO: 3257819 - DNA, 25 bp, Homo sapien
ggtatatctgggttgaaggcaaggt

SEQ ID NO: 3257820 - DNA, 25 bp, Homo sapien
tatctgggttgaaggcaaggtggag

SEQ ID NO: 3257821 - DNA, 25 bp, Homo sapien
gagacatgctttgtcaatctgccaa

SEQ ID NO: 3257822 - DNA, 25 bp, Homo sapien
taagtgctcccaatactcccagtgc

SEQ ID NO: 3257823 - DNA, 25 bp, Homo sapien
cccagtgctccagaatctgaagacg

SEQ ID NO: 3257824 - DNA, 25 bp, Homo sapien
tctgccaagggaatctaagtgctcc

SEQ ID NO: 3257825 - DNA, 25 bp, Homo sapien
agagaacatgcacactggactttgc

SEQ ID NO: 3257826 - DNA, 25 bp, Homo sapien
cagagaacatgcacactggactttg

SEQ ID NO: 3257827 - DNA, 25 bp, Homo sapien
tcagaaacttgttttaggactccac

SEQ ID NO: 3257828 - DNA, 25 bp, Homo sapien
cagaggtagggggacaggtcagaaa

SEQ ID NO: 3257829 - DNA, 25 bp, Homo sapien
tcagaggtagggggacaggtcagaa

SEQ ID NO: 3257830 - DNA, 25 bp, Homo sapien
gacaggtcagaaacttgttttagga

SEQ ID NO: 3257831 - DNA, 25 bp, Homo sapien
caacgccgctctctgctggcgtccc

SEQ ID NO: 3257832 - DNA, 25 bp, Homo sapien
cttatcaacgccgctctctgctggc

SEQ ID NO: 3257833 - DNA, 25 bp, Homo sapien
tcaacgccgctctctgctggcgtcc

SEQ ID NO: 3257834 - DNA, 25 bp, Homo sapien
tatcaacgccgctctctgctggcgt

SEQ ID NO: 3257835 - DNA, 25 bp, Homo sapien
acgaaaaggaatggtttaggcatct

SEQ ID NO: 3257836 - DNA, 25 bp, Homo sapien
gaagaaaagccaacttctaggctta

SEQ ID NO: 3257837 - DNA, 25 bp, Homo sapien
aaggaatggtttaggcatctcagac

SEQ ID NO: 3257838 - DNA, 25 bp, Homo sapien
catctcagactttaaattggaagaa

SEQ ID NO: 3257839 - DNA, 25 bp, Homo sapien
ccttgtacacatcagagccattcac

SEQ ID NO: 3257840 - DNA, 25 bp, Homo sapien
cttgtacacatcagagccattcacc

SEQ ID NO: 3257841 - DNA, 25 bp, Homo sapien
ttccttgtacacatcagagccattc

SEQ ID NO: 3257842 - DNA, 25 bp, Homo sapien
tccttgtacacatcagagccattca

SEQ ID NO: 3257843 - DNA, 25 bp, Homo sapien
ggattgaatccccagcacttgctaa

SEQ ID NO: 3257844 - DNA, 25 bp, Homo sapien
gacacagaattgatcgtagcaagca

SEQ ID NO: 3257845 - DNA, 25 bp, Homo sapien
ggagactatacccatcagcacatat

SEQ ID NO: 3257846 - DNA, 25 bp, Homo sapien
gaccgaatgttgaaaactggccgca

SEQ ID NO: 3257847 - DNA, 25 bp, Homo sapien
cagggcatccatgtgttgtgccagt

SEQ ID NO: 3257848 - DNA, 25 bp, Homo sapien
acagggcatccatgtgttgtgccag

SEQ ID NO: 3257849 - DNA, 25 bp, Homo sapien
gacagggcatccatgtgttgtgcca

SEQ ID NO: 3257850 - DNA, 25 bp, Homo sapien
ttgcactgtcatcgtacatatattt

SEQ ID NO: 3257851 - DNA, 25 bp, Homo sapien
gattgcactgtcatcgtacatatat

SEQ ID NO: 3257852 - DNA, 25 bp, Homo sapien
tgcactgtcatcgtacatatatttt

SEQ ID NO: 3257853 - DNA, 25 bp, Homo sapien
cactgtcatcgtacatatatttttt

SEQ ID NO: 3257854 - DNA, 25 bp, Homo sapien
cagcctccagggttaatcatttctt

SEQ ID NO: 3257855 - DNA, 25 bp, Homo sapien
gcagcctccagggttaatcatttct

SEQ ID NO: 3257856 - DNA, 25 bp, Homo sapien
agcctccagggttaatcatttcttc

SEQ ID NO: 3257857 - DNA, 25 bp, Homo sapien
ggcagcctccagggttaatcatttc

SEQ ID NO: 3257858 - DNA, 25 bp, Homo sapien
acatctgtggctcttgagaccttct

SEQ ID NO: 3257859 - DNA, 25 bp, Homo sapien
ccaagacatctgtggctcttgagac

SEQ ID NO: 3257860 - DNA, 25 bp, Homo sapien
atacagaaatatccaagacatctgt

SEQ ID NO: 3257861 - DNA, 25 bp, Homo sapien
tgtggctcttgagaccttcttttag

SEQ ID NO: 3257862 - DNA, 25 bp, Homo sapien
ctgacaggcaagcccttcaggatgg

SEQ ID NO: 3257863 - DNA, 25 bp, Homo sapien
atctctgacaggcaagcccttcagg

SEQ ID NO: 3257864 - DNA, 25 bp, Homo sapien
tctctgacaggcaagcccttcagga

SEQ ID NO: 3257865 - DNA, 25 bp, Homo sapien
tctgacaggcaagcccttcaggatg

SEQ ID NO: 3257866 - DNA, 25 bp, Homo sapien
caggccctccaagctaattggattt

SEQ ID NO: 3257867 - DNA, 25 bp, Homo sapien
gatcaattatcaaagtccctgcatc

SEQ ID NO: 3257868 - DNA, 25 bp, Homo sapien
atgatcaattatcaaagtccctgca

SEQ ID NO: 3257869 - DNA, 25 bp, Homo sapien
tccaagctaattggattttcccacc

SEQ ID NO: 3257870 - DNA, 25 bp, Homo sapien
taggagagattatcttcactcttgt

SEQ ID NO: 3257871 - DNA, 25 bp, Homo sapien
agattatcttcactcttgtttgtgg

SEQ ID NO: 3257872 - DNA, 25 bp, Homo sapien
cagataggagagattatcttcactc

SEQ ID NO: 3257873 - DNA, 25 bp, Homo sapien
gagagattatcttcactcttgtttg

SEQ ID NO: 3257874 - DNA, 25 bp, Homo sapien
tctctacatttgaaggtgctggact

SEQ ID NO: 3257875 - DNA, 25 bp, Homo sapien
gactttctgttggggtcactgctcc

SEQ ID NO: 3257876 - DNA, 25 bp, Homo sapien
cacttctctacatttgaaggtgctg

SEQ ID NO: 3257877 - DNA, 25 bp, Homo sapien
ggactttctgttggggtcactgctc

SEQ ID NO: 3257878 - DNA, 25 bp, Homo sapien
agacgataatacgatcccctgaaca

SEQ ID NO: 3257879 - DNA, 25 bp, Homo sapien
aataagcacgaagtaccacgtccag

SEQ ID NO: 3257880 - DNA, 25 bp, Homo sapien
tttccgagcctttatattctagacg

SEQ ID NO: 3257881 - DNA, 25 bp, Homo sapien
caaagaatagaatttccgagccttt

SEQ ID NO: 3257882 - DNA, 25 bp, Homo sapien
taacaaagacactggaaatgcaacc

SEQ ID NO: 3257883 - DNA, 25 bp, Homo sapien
gccactcagacaacccactgggatg

SEQ ID NO: 3257884 - DNA, 25 bp, Homo sapien
aaaacgtcctgtcagatctctggga

SEQ ID NO: 3257885 - DNA, 25 bp, Homo sapien
caaagtgagacctacgtgcatgcct

SEQ ID NO: 3257886 - DNA, 25 bp, Homo sapien
tacacacatcccctcttcaataacc

SEQ ID NO: 3257887 - DNA, 25 bp, Homo sapien
tcctctacacacatcccctcttcaa

SEQ ID NO: 3257888 - DNA, 25 bp, Homo sapien
cagcccttccacactgttgttcttt

SEQ ID NO: 3257889 - DNA, 25 bp, Homo sapien
acatcccctcttcaataaccaccat

SEQ ID NO: 3257890 - DNA, 25 bp, Homo sapien
tctcatgctcaatgagagctagctg

SEQ ID NO: 3257891 - DNA, 25 bp, Homo sapien
ctgagaagattggatacctctggct

SEQ ID NO: 3257892 - DNA, 25 bp, Homo sapien
tagctgagaagattggatacctctg

SEQ ID NO: 3257893 - DNA, 25 bp, Homo sapien
tcaatgagagctagctgagaagatt

SEQ ID NO: 3257894 - DNA, 25 bp, Homo sapien
aaaacagagttgcaggctgggcgca

SEQ ID NO: 3257895 - DNA, 25 bp, Homo sapien
aagcaaaaaacagagttgcaggctg

SEQ ID NO: 3257896 - DNA, 25 bp, Homo sapien
aaaaaacagagttgcaggctgggcg

SEQ ID NO: 3257897 - DNA, 25 bp, Homo sapien
ctgaaagcaaaaaacagagttgcag

SEQ ID NO: 3257898 - DNA, 25 bp, Homo sapien
gaaacttccagcatgactagtggtg

SEQ ID NO: 3257899 - DNA, 25 bp, Homo sapien
gtttacaagatgaacagtcggtcta

SEQ ID NO: 3257900 - DNA, 25 bp, Homo sapien
aagtcccatgtcacttggtattgca

SEQ ID NO: 3257901 - DNA, 25 bp, Homo sapien
tcggtctaagatggcagcaactgca

SEQ ID NO: 3257902 - DNA, 25 bp, Homo sapien
aagggataagaggtaatctgtttgc

SEQ ID NO: 3257903 - DNA, 25 bp, Homo sapien
ctgatttagggtccgtgcacagcca

SEQ ID NO: 3257904 - DNA, 25 bp, Homo sapien
cctggcttgaggacctgatgaatct

SEQ ID NO: 3257905 - DNA, 25 bp, Homo sapien
tgtttgctgatttagggtccgtgca

SEQ ID NO: 3257906 - DNA, 25 bp, Homo sapien
agagagttctaaccccaggaaaatg

SEQ ID NO: 3257907 - DNA, 25 bp, Homo sapien
ctgcagggctgtaataggagtcaca

SEQ ID NO: 3257908 - DNA, 25 bp, Homo sapien
cagagttcagtaatcctgtgttgag

SEQ ID NO: 3257909 - DNA, 25 bp, Homo sapien
tgtatccagcgcagaatcagcagct

SEQ ID NO: 3257910 - DNA, 25 bp, Homo sapien
ggccacaaggcagacagcagaaatc

SEQ ID NO: 3257911 - DNA, 25 bp, Homo sapien
ctatggccacaaggcagacagcaga

SEQ ID NO: 3257912 - DNA, 25 bp, Homo sapien
cacaaggcagacagcagaaatcagt

SEQ ID NO: 3257913 - DNA, 25 bp, Homo sapien
acaaggcagacagcagaaatcagtc

SEQ ID NO: 3257914 - DNA, 25 bp, Homo sapien
tgaagagctttgattaatatagcca

SEQ ID NO: 3257915 - DNA, 25 bp, Homo sapien
gaagagctttgattaatatagccat

SEQ ID NO: 3257916 - DNA, 25 bp, Homo sapien
gtccagcagggagttagaaatccag

SEQ ID NO: 3257917 - DNA, 25 bp, Homo sapien
ctgtccagcagggagttagaaatcc

SEQ ID NO: 3257918 - DNA, 25 bp, Homo sapien
tgtccagcagggagttagaaatcca

SEQ ID NO: 3257919 - DNA, 25 bp, Homo sapien
tcagaatgagcagtggtgactgcaa

SEQ ID NO: 3257920 - DNA, 25 bp, Homo sapien
aagggccttagctgagatcaggcag

SEQ ID NO: 3257921 - DNA, 25 bp, Homo sapien
tactgagtgggaaacccagtaggga

SEQ ID NO: 3257922 - DNA, 25 bp, Homo sapien
ccagtagggagaactttatgaggtg

SEQ ID NO: 3257923 - DNA, 25 bp, Homo sapien
tttaaaaggtttcacatttccatga

SEQ ID NO: 3257924 - DNA, 25 bp, Homo sapien
tcctaatctcttgatgggcactggg

SEQ ID NO: 3257925 - DNA, 25 bp, Homo sapien
ctgtcactggagatatgccaagtgt

SEQ ID NO: 3257926 - DNA, 25 bp, Homo sapien
tagtcaggctttagaatacaattaa

SEQ ID NO: 3257927 - DNA, 25 bp, Homo sapien
tcctctgagaagctctccttgatca

SEQ ID NO: 3257928 - DNA, 25 bp, Homo sapien
catactcccatagatcctgtgtaca

SEQ ID NO: 3257929 - DNA, 25 bp, Homo sapien
gaatgatttggttgtactcgcaggg

SEQ ID NO: 3257930 - DNA, 25 bp, Homo sapien
cactaggtctgagtgtggtcccctc

SEQ ID NO: 3257931 - DNA, 25 bp, Homo sapien
gaacactccggatatgaaacagaca

SEQ ID NO: 3257932 - DNA, 25 bp, Homo sapien
ctgtgggatgatttactggaggaac

SEQ ID NO: 3257933 - DNA, 25 bp, Homo sapien
gatttactggaggaacactccggat

SEQ ID NO: 3257934 - DNA, 25 bp, Homo sapien
caataaagaacattctgtctcctcc

SEQ ID NO: 3257935 - DNA, 25 bp, Homo sapien
tgttacatatggacccaaaaagaga

SEQ ID NO: 3257936 - DNA, 25 bp, Homo sapien
tcattccaccaaggcatgccctgct

SEQ ID NO: 3257937 - DNA, 25 bp, Homo sapien
tctgggcatctgcatcaactgtctc

SEQ ID NO: 3257938 - DNA, 25 bp, Homo sapien
tatgatctggatctacataacaaac

SEQ ID NO: 3257939 - DNA, 25 bp, Homo sapien
taccaattttcttcatactcattcc

SEQ ID NO: 3257940 - DNA, 25 bp, Homo sapien
ccatgctccttccaactgggtcctg

SEQ ID NO: 3257941 - DNA, 25 bp, Homo sapien
ctgggtcctggtaatttgtaccaat

SEQ ID NO: 3257942 - DNA, 25 bp, Homo sapien
agtcttcatggggaattccccccat

SEQ ID NO: 3257943 - DNA, 25 bp, Homo sapien
cccaggcacacccacttcacttcac

SEQ ID NO: 3257944 - DNA, 25 bp, Homo sapien
cagctgtgtgtgatcccaggcacac

SEQ ID NO: 3257945 - DNA, 25 bp, Homo sapien
tgtgtgatcccaggcacacccactt

SEQ ID NO: 3257946 - DNA, 25 bp, Homo sapien
gctgtgtgtgatcccaggcacaccc

SEQ ID NO: 3257947 - DNA, 25 bp, Homo sapien
gttcctggtctctggctttccacat

SEQ ID NO: 3257948 - DNA, 25 bp, Homo sapien
tgacagaccctgaagatggggacat

SEQ ID NO: 3257949 - DNA, 25 bp, Homo sapien
acagaccctgaagatggggacatag

SEQ ID NO: 3257950 - DNA, 25 bp, Homo sapien
catgacagaccctgaagatggggac

SEQ ID NO: 3257951 - DNA, 25 bp, Homo sapien
tcacatgacagaccctgaagatggg

SEQ ID NO: 3257952 - DNA, 25 bp, Homo sapien
tggcattcacagttaccttattcat

SEQ ID NO: 3257953 - DNA, 25 bp, Homo sapien
aggaagagatctgcatttgaatcca

SEQ ID NO: 3257954 - DNA, 25 bp, Homo sapien
gcatgcccatctagtaaggaagaga

SEQ ID NO: 3257955 - DNA, 25 bp, Homo sapien
ccatctagtaaggaagagatctgca

SEQ ID NO: 3257956 - DNA, 25 bp, Homo sapien
ccaagcatgcccatctagtaaggaa

SEQ ID NO: 3257957 - DNA, 25 bp, Homo sapien
tcatcagcacaaagggcagtagacc

SEQ ID NO: 3257958 - DNA, 25 bp, Homo sapien
tgtcattaggaaggaccaagcccca

SEQ ID NO: 3257959 - DNA, 25 bp, Homo sapien
gagagggctttatgaactgactccc

SEQ ID NO: 3257960 - DNA, 25 bp, Homo sapien
tctctaggtaggaaattagtgagct

SEQ ID NO: 3257961 - DNA, 25 bp, Homo sapien
agctcgtagaatgtgccgaccaggg

SEQ ID NO: 3257962 - DNA, 25 bp, Homo sapien
gcttgcccttttccacgagctcgta

SEQ ID NO: 3257963 - DNA, 25 bp, Homo sapien
tctaagctgattcctagggctgtcc

SEQ ID NO: 3257964 - DNA, 25 bp, Homo sapien
ggctgtccacatcctttgggagaat

SEQ ID NO: 3257965 - DNA, 25 bp, Homo sapien
ttcgtttactctttggtccaagtca

SEQ ID NO: 3257966 - DNA, 25 bp, Homo sapien
aagtcacttctctggtagattgtct

SEQ ID NO: 3257967 - DNA, 25 bp, Homo sapien
tactctttggtccaagtcacttctc

SEQ ID NO: 3257968 - DNA, 25 bp, Homo sapien
gtcacttctctggtagattgtcttt

SEQ ID NO: 3257969 - DNA, 25 bp, Homo sapien
ttgatgagtctatggaaataatctc

SEQ ID NO: 3257970 - DNA, 25 bp, Homo sapien
gaagttgatgagtctatggaaataa

SEQ ID NO: 3257971 - DNA, 25 bp, Homo sapien
gatgagtctatggaaataatctcct

SEQ ID NO: 3257972 - DNA, 25 bp, Homo sapien
tagaagttgatgagtctatggaaat

SEQ ID NO: 3257973 - DNA, 25 bp, Homo sapien
ggagttggcaaccaccaattcttcg

SEQ ID NO: 3257974 - DNA, 25 bp, Homo sapien
gaatctaaggcacagtaggactcat

SEQ ID NO: 3257975 - DNA, 25 bp, Homo sapien
gagagatccagtccgatgtagggca

SEQ ID NO: 3257976 - DNA, 25 bp, Homo sapien
gaaccacggcatatcagtttcctag

SEQ ID NO: 3257977 - DNA, 25 bp, Homo sapien
gggacgccaggacaattacttcaga

SEQ ID NO: 3257978 - DNA, 25 bp, Homo sapien
gcaaaatcctcaaagctggactggt

SEQ ID NO: 3257979 - DNA, 25 bp, Homo sapien
tttagagagtttcccagagatgcac

SEQ ID NO: 3257980 - DNA, 25 bp, Homo sapien
tcaaggacagcttgaccacccaggt

SEQ ID NO: 3257981 - DNA, 25 bp, Homo sapien
ggtgaggtggtgtcaagtcacctct

SEQ ID NO: 3257982 - DNA, 25 bp, Homo sapien
gaaggcagcaggcatagggtggctg

SEQ ID NO: 3257983 - DNA, 25 bp, Homo sapien
taccgatcaaagattcatcccatgg

SEQ ID NO: 3257984 - DNA, 25 bp, Homo sapien
tatgcacaggtgactaaaggtactg

SEQ ID NO: 3257985 - DNA, 25 bp, Homo sapien
gctcatgagaaagttccagtgctca

SEQ ID NO: 3257986 - DNA, 25 bp, Homo sapien
aaagttccagtgctcacagttgttc

SEQ ID NO: 3257987 - DNA, 25 bp, Homo sapien
atgagaaagttccagtgctcacagt

SEQ ID NO: 3257988 - DNA, 25 bp, Homo sapien
gagaaagttccagtgctcacagttg

SEQ ID NO: 3257989 - DNA, 25 bp, Homo sapien
tgtggatctctccagagaacaactc

SEQ ID NO: 3257990 - DNA, 25 bp, Homo sapien
cctccttcaatttcttgccatgtgg

SEQ ID NO: 3257991 - DNA, 25 bp, Homo sapien
ggcctccttcaatttcttgccatgt

SEQ ID NO: 3257992 - DNA, 25 bp, Homo sapien
actcacaacatggaagttggttttc

SEQ ID NO: 3257993 - DNA, 25 bp, Homo sapien
caaccctctcctttactgagtggag

SEQ ID NO: 3257994 - DNA, 25 bp, Homo sapien
cctctcctttactgagtggaggttc

SEQ ID NO: 3257995 - DNA, 25 bp, Homo sapien
cctttactgagtggaggttctttct

SEQ ID NO: 3257996 - DNA, 25 bp, Homo sapien
tctcctttactgagtggaggttctt

SEQ ID NO: 3257997 - DNA, 25 bp, Homo sapien
cacactcatagtaggggtgctgagt

SEQ ID NO: 3257998 - DNA, 25 bp, Homo sapien
cccacactcatagtaggggtgctga

SEQ ID NO: 3257999 - DNA, 25 bp, Homo sapien
ggggtgctgagtggcagtcctatgg

SEQ ID NO: 3258000 - DNA, 25 bp, Homo sapien
ttcccacactcatagtaggggtgct

SEQ ID NO: 3258001 - DNA, 25 bp, Homo sapien
caggctgtctcagtgttccctaaga

SEQ ID NO: 3258002 - DNA, 25 bp, Homo sapien
gttccctaagaggatgtagagttgc

SEQ ID NO: 3258003 - DNA, 25 bp, Homo sapien
ttccctaagaggatgtagagttgca

SEQ ID NO: 3258004 - DNA, 25 bp, Homo sapien
tttcatagagctgagctctgtaaaa

SEQ ID NO: 3258005 - DNA, 25 bp, Homo sapien
tagagctgagctctgtaaaatgagt

SEQ ID NO: 3258006 - DNA, 25 bp, Homo sapien
ggttctgctatcagcagaggccacc

SEQ ID NO: 3258007 - DNA, 25 bp, Homo sapien
caaggaacaatggttctgctatcag

SEQ ID NO: 3258008 - DNA, 25 bp, Homo sapien
gaggcaaagtaccatttttgagcag

SEQ ID NO: 3258009 - DNA, 25 bp, Homo sapien
taatctggtcatatctccgaaccca

SEQ ID NO: 3258010 - DNA, 25 bp, Homo sapien
ggtcacttgtcccatgaacagtata

SEQ ID NO: 3258011 - DNA, 25 bp, Homo sapien
gaacccagcctgtcactcacatggt

SEQ ID NO: 3258012 - DNA, 25 bp, Homo sapien
tactatgccactagtgctaacaagg

SEQ ID NO: 3258013 - DNA, 25 bp, Homo sapien
taacaaggccctgtccgttgaggag

SEQ ID NO: 3258014 - DNA, 25 bp, Homo sapien
gctacagcgcccatcattttgaatg

SEQ ID NO: 3258015 - DNA, 25 bp, Homo sapien
ccaaagtacagtgcgttagggctgg

SEQ ID NO: 3258016 - DNA, 25 bp, Homo sapien
acagtgagtcataacgctgtttgtc

SEQ ID NO: 3258017 - DNA, 25 bp, Homo sapien
tgtcagaagccacagtgagtcataa

SEQ ID NO: 3258018 - DNA, 25 bp, Homo sapien
gccacagtgagtcataacgctgttt

SEQ ID NO: 3258019 - DNA, 25 bp, Homo sapien
gaagccacagtgagtcataacgctg

SEQ ID NO: 3258020 - DNA, 25 bp, Homo sapien
taatagtgacgtcttccagtgtctt

SEQ ID NO: 3258021 - DNA, 25 bp, Homo sapien
cccgtaatagtgacgtcttccagtg

SEQ ID NO: 3258022 - DNA, 25 bp, Homo sapien
aggcccgtaatagtgacgtcttcca

SEQ ID NO: 3258023 - DNA, 25 bp, Homo sapien
gcttgggaaaggcccgtaatagtga

SEQ ID NO: 3258024 - DNA, 25 bp, Homo sapien
aaaaggggactatatggtagtctct

SEQ ID NO: 3258025 - DNA, 25 bp, Homo sapien
aacagcagatcttacatcgtctgcc

SEQ ID NO: 3258026 - DNA, 25 bp, Homo sapien
aagtaacagcagatcttacatcgtc

SEQ ID NO: 3258027 - DNA, 25 bp, Homo sapien
gatcttacatcgtctgcctcagctc

SEQ ID NO: 3258028 - DNA, 25 bp, Homo sapien
gcagatcttacatcgtctgcctcag

SEQ ID NO: 3258029 - DNA, 25 bp, Homo sapien
tccagggaccacaacgagatccttt

SEQ ID NO: 3258030 - DNA, 25 bp, Homo sapien
cacagtcacgttggatttgggtcca

SEQ ID NO: 3258031 - DNA, 25 bp, Homo sapien
gggtccatccattctaacggcctca

SEQ ID NO: 3258032 - DNA, 25 bp, Homo sapien
caaatggagtgtacccaggaacctc

SEQ ID NO: 3258033 - DNA, 25 bp, Homo sapien
ttagctgatgggatgtggctgcatc

SEQ ID NO: 3258034 - DNA, 25 bp, Homo sapien
gatgggatgtggctgcatctcatac

SEQ ID NO: 3258035 - DNA, 25 bp, Homo sapien
ctgatgggatgtggctgcatctcat

SEQ ID NO: 3258036 - DNA, 25 bp, Homo sapien
agctgatgggatgtggctgcatctc

SEQ ID NO: 3258037 - DNA, 25 bp, Homo sapien
atgtggacatgctatgggactgcac

SEQ ID NO: 3258038 - DNA, 25 bp, Homo sapien
gtcggttccaaatgtggacatgcta

SEQ ID NO: 3258039 - DNA, 25 bp, Homo sapien
ggtcggttccaaatgtggacatgct

SEQ ID NO: 3258040 - DNA, 25 bp, Homo sapien
cggtcggttccaaatgtggacatgc

SEQ ID NO: 3258041 - DNA, 25 bp, Homo sapien
ctttggctacgatgctaggatgctc

SEQ ID NO: 3258042 - DNA, 25 bp, Homo sapien
ctccactttggctacgatgctagga

SEQ ID NO: 3258043 - DNA, 25 bp, Homo sapien
tgctcgtcagaatgcccttgtctct

SEQ ID NO: 3258044 - DNA, 25 bp, Homo sapien
tgctaggatgctcgtcagaatgccc

SEQ ID NO: 3258045 - DNA, 25 bp, Homo sapien
acttgcagttcgacgtggctgtgta

SEQ ID NO: 3258046 - DNA, 25 bp, Homo sapien
tgcagttcgacgtggctgtgtaggc

SEQ ID NO: 3258047 - DNA, 25 bp, Homo sapien
cttgcagttcgacgtggctgtgtag

SEQ ID NO: 3258048 - DNA, 25 bp, Homo sapien
gcagttcgacgtggctgtgtaggcc

SEQ ID NO: 3258049 - DNA, 25 bp, Homo sapien
aaattgatacctcctcaacattccc

SEQ ID NO: 3258050 - DNA, 25 bp, Homo sapien
tcaaaattgatacctcctcaacatt

SEQ ID NO: 3258051 - DNA, 25 bp, Homo sapien
cccaaacatggtgtttccactgttg

SEQ ID NO: 3258052 - DNA, 25 bp, Homo sapien
acatggtgtttccactgttggtata

SEQ ID NO: 3258053 - DNA, 25 bp, Homo sapien
aataccaggtttcagtttcactcag

SEQ ID NO: 3258054 - DNA, 25 bp, Homo sapien
tggatgtccaaacgcaataaaggca

SEQ ID NO: 3258055 - DNA, 25 bp, Homo sapien
tcagttcagttttggcgccttccca

SEQ ID NO: 3258056 - DNA, 25 bp, Homo sapien
aatagagtgttggtacgtccagagc

SEQ ID NO: 3258057 - DNA, 25 bp, Homo sapien
tgtcaagttaaggtgcttctctttg

SEQ ID NO: 3258058 - DNA, 25 bp, Homo sapien
actccaggatgagaaacagccccat

SEQ ID NO: 3258059 - DNA, 25 bp, Homo sapien
tgccagaaagtgtcatcactagaga

SEQ ID NO: 3258060 - DNA, 25 bp, Homo sapien
tcatcactagagaagcctcacttct

SEQ ID NO: 3258061 - DNA, 25 bp, Homo sapien
ggtatgttctaccaaacaaagccat

SEQ ID NO: 3258062 - DNA, 25 bp, Homo sapien
aaagaagatgaagggtatgttctac

SEQ ID NO: 3258063 - DNA, 25 bp, Homo sapien
gtctgttgctcctgtcctcgtgttc

SEQ ID NO: 3258064 - DNA, 25 bp, Homo sapien
ggttcgagctacatgtgagagtttg

SEQ ID NO: 3258065 - DNA, 25 bp, Homo sapien
aaaattccaccacccagtcatagtg

SEQ ID NO: 3258066 - DNA, 25 bp, Homo sapien
gcctatttccttaactcctaatgaa

SEQ ID NO: 3258067 - DNA, 25 bp, Homo sapien
caaataccattgtggtaaacaaaca

SEQ ID NO: 3258068 - DNA, 25 bp, Homo sapien
gaaagattgaattatagtgcagaaa

SEQ ID NO: 3258069 - DNA, 25 bp, Homo sapien
taagcatgggcagatacttaattgc

SEQ ID NO: 3258070 - DNA, 25 bp, Homo sapien
caagcttcctgttgttattctaaag

SEQ ID NO: 3258071 - DNA, 25 bp, Homo sapien
cattggctggttgatattgtgcgtg

SEQ ID NO: 3258072 - DNA, 25 bp, Homo sapien
gctctttcatgtggaaagccttcct

SEQ ID NO: 3258073 - DNA, 25 bp, Homo sapien
attcagactatcttaaataataagg

SEQ ID NO: 3258074 - DNA, 25 bp, Homo sapien
cagaggtggtttgtttaagtgagaa

SEQ ID NO: 3258075 - DNA, 25 bp, Homo sapien
ggcaagagaaggaacaaaacatatc

SEQ ID NO: 3258076 - DNA, 25 bp, Homo sapien
gccagtgtgtctcatggcaagagaa

SEQ ID NO: 3258077 - DNA, 25 bp, Homo sapien
agatcacaggccacatttccaagct

SEQ ID NO: 3258078 - DNA, 25 bp, Homo sapien
ccacatctccatagtatacctggtg

SEQ ID NO: 3258079 - DNA, 25 bp, Homo sapien
accacatctccatagtatacctggt

SEQ ID NO: 3258080 - DNA, 25 bp, Homo sapien
tgaaattagatcacaggccacattt

SEQ ID NO: 3258081 - DNA, 25 bp, Homo sapien
cttgttggccttcccttattatttg

SEQ ID NO: 3258082 - DNA, 25 bp, Homo sapien
tatgattcattatacttttatacat

SEQ ID NO: 3258083 - DNA, 25 bp, Homo sapien
aaaatggctgcaatggatccagact

SEQ ID NO: 3258084 - DNA, 25 bp, Homo sapien
tgtgcaaaactcctaggacagtgtt

SEQ ID NO: 3258085 - DNA, 25 bp, Homo sapien
cgtcttgagaataggaacatgtcca

SEQ ID NO: 3258086 - DNA, 25 bp, Homo sapien
cctactgtatagcaaacgtcttgag

SEQ ID NO: 3258087 - DNA, 25 bp, Homo sapien
gtacttaacaggcattggaaacaga

SEQ ID NO: 3258088 - DNA, 25 bp, Homo sapien
gatttccgttacttctccagccttg

SEQ ID NO: 3258089 - DNA, 25 bp, Homo sapien
gatgaatccctgtctcgactggctt

SEQ ID NO: 3258090 - DNA, 25 bp, Homo sapien
tagtaaaagtatccagcatccctga

SEQ ID NO: 3258091 - DNA, 25 bp, Homo sapien
acagatgctataccaaaggtctggg

SEQ ID NO: 3258092 - DNA, 25 bp, Homo sapien
tgttctgctagttcaaaggtctttc

SEQ ID NO: 3258093 - DNA, 25 bp, Homo sapien
gaaatatgttctgctagttcaaagg

SEQ ID NO: 3258094 - DNA, 25 bp, Homo sapien
tcttgttgagcaatagggcagacaa

SEQ ID NO: 3258095 - DNA, 25 bp, Homo sapien
tgaagttcctaagtccctcaaagaa

SEQ ID NO: 3258096 - DNA, 25 bp, Homo sapien
tctttggagatctcacaaacttgtg

SEQ ID NO: 3258097 - DNA, 25 bp, Homo sapien
tctcacaaacttgtgaagagtggac

SEQ ID NO: 3258098 - DNA, 25 bp, Homo sapien
cttttgagtatagtggagctttgag

SEQ ID NO: 3258099 - DNA, 25 bp, Homo sapien
caaacttgtgaagagtggacactca

SEQ ID NO: 3258100 - DNA, 25 bp, Homo sapien
tttccgctcttatcctcacttccca

SEQ ID NO: 3258101 - DNA, 25 bp, Homo sapien
ctcacttcccagatctcaacacaaa

SEQ ID NO: 3258102 - DNA, 25 bp, Homo sapien
gtctgaggctcctttccgctcttat

SEQ ID NO: 3258103 - DNA, 25 bp, Homo sapien
cctcacttcccagatctcaacacaa

SEQ ID NO: 3258104 - DNA, 25 bp, Homo sapien
gcaggaagctagcttgagtacagga

SEQ ID NO: 3258105 - DNA, 25 bp, Homo sapien
caggaagctagcttgagtacaggag

SEQ ID NO: 3258106 - DNA, 25 bp, Homo sapien
agcaggaagctagcttgagtacagg

SEQ ID NO: 3258107 - DNA, 25 bp, Homo sapien
gtctttacctccacagatgagaata

SEQ ID NO: 3258108 - DNA, 25 bp, Homo sapien
tgccaaagttacatagtaacagagg

SEQ ID NO: 3258109 - DNA, 25 bp, Homo sapien
tccaggactaccactgtgttcaggc

SEQ ID NO: 3258110 - DNA, 25 bp, Homo sapien
taacagaggaagtcggactaaaagc

SEQ ID NO: 3258111 - DNA, 25 bp, Homo sapien
tgaatttgattgtgttagattccac

SEQ ID NO: 3258112 - DNA, 25 bp, Homo sapien
ccattctattcccagcttccatgaa

SEQ ID NO: 3258113 - DNA, 25 bp, Homo sapien
tttgaccaacattccctgttctccc

SEQ ID NO: 3258114 - DNA, 25 bp, Homo sapien
ccctggcctcgataaccaccattct

SEQ ID NO: 3258115 - DNA, 25 bp, Homo sapien
cgtgtcttcgctactgcgactaatg

SEQ ID NO: 3258116 - DNA, 25 bp, Homo sapien
tgtttccgtgtcttcgctactgcga

SEQ ID NO: 3258117 - DNA, 25 bp, Homo sapien
tccgtgtcttcgctactgcgactaa

SEQ ID NO: 3258118 - DNA, 25 bp, Homo sapien
taggttgtttccgtgtcttcgctac

SEQ ID NO: 3258119 - DNA, 25 bp, Homo sapien
gacatactggtttcaagtcctcagg

SEQ ID NO: 3258120 - DNA, 25 bp, Homo sapien
tagcctgagggccaactaatgaagc

SEQ ID NO: 3258121 - DNA, 25 bp, Homo sapien
tttttaagcgtgtgtccctgtgacc

SEQ ID NO: 3258122 - DNA, 25 bp, Homo sapien
cacaagagtgcagacgtcgcttcga

SEQ ID NO: 3258123 - DNA, 25 bp, Homo sapien
tatagatcacaaggctccaccgatg

SEQ ID NO: 3258124 - DNA, 25 bp, Homo sapien
cagttatacccatagtgccttgcac

SEQ ID NO: 3258125 - DNA, 25 bp, Homo sapien
tcagtcagtctacgtaagggcccag

SEQ ID NO: 3258126 - DNA, 25 bp, Homo sapien
taattcaatcgagttcacatggcct

SEQ ID NO: 3258127 - DNA, 25 bp, Homo sapien
ccagcgttatagtcttgggatgact

SEQ ID NO: 3258128 - DNA, 25 bp, Homo sapien
ctcctgtaatgaacccctgtgttcc

SEQ ID NO: 3258129 - DNA, 25 bp, Homo sapien
tgtaatgaacccctgtgttcctgga

SEQ ID NO: 3258130 - DNA, 25 bp, Homo sapien
tgtactccagggttatctattcccc

SEQ ID NO: 3258131 - DNA, 25 bp, Homo sapien
gtacttatcctatatctgacaatgc

SEQ ID NO: 3258132 - DNA, 25 bp, Homo sapien
tcatgtacttatcctatatctgaca

SEQ ID NO: 3258133 - DNA, 25 bp, Homo sapien
tgtacttatcctatatctgacaatg

SEQ ID NO: 3258134 - DNA, 25 bp, Homo sapien
catgtacttatcctatatctgacaa

SEQ ID NO: 3258135 - DNA, 25 bp, Homo sapien
ggcctcttgcaccaagtagttagtc

SEQ ID NO: 3258136 - DNA, 25 bp, Homo sapien
tgtggaaagctgaaataggttgaaa

SEQ ID NO: 3258137 - DNA, 25 bp, Homo sapien
attccttagttgcagaagtagtttt

SEQ ID NO: 3258138 - DNA, 25 bp, Homo sapien
cattccttagttgcagaagtagttt

SEQ ID NO: 3258139 - DNA, 25 bp, Homo sapien
ttacattccttagttgcagaagtag

SEQ ID NO: 3258140 - DNA, 25 bp, Homo sapien
tacattccttagttgcagaagtagt

SEQ ID NO: 3258141 - DNA, 25 bp, Homo sapien
gtagtatggatcactctgttattct

SEQ ID NO: 3258142 - DNA, 25 bp, Homo sapien
ctcatcatgtagtatggatcactct

SEQ ID NO: 3258143 - DNA, 25 bp, Homo sapien
tattctttatctagaccttcaaata

SEQ ID NO: 3258144 - DNA, 25 bp, Homo sapien
ctttatctagaccttcaaatacttt

SEQ ID NO: 3258145 - DNA, 25 bp, Homo sapien
tgcctggaatatagccgaggcttca

SEQ ID NO: 3258146 - DNA, 25 bp, Homo sapien
acgtcggtgacagcactcctaccag

SEQ ID NO: 3258147 - DNA, 25 bp, Homo sapien
tacagaaacaccctcggcggctcta

SEQ ID NO: 3258148 - DNA, 25 bp, Homo sapien
tatagccgaggcttcatgtttaccc

SEQ ID NO: 3258149 - DNA, 25 bp, Homo sapien
tagagggcgctacctagggctacaa

SEQ ID NO: 3258150 - DNA, 25 bp, Homo sapien
agagcccagacgctagttcaccaca

SEQ ID NO: 3258151 - DNA, 25 bp, Homo sapien
tcagcggacttcaagccggcagagc

SEQ ID NO: 3258152 - DNA, 25 bp, Homo sapien
tcgggcgcctatttctacgcgggtc

SEQ ID NO: 3258153 - DNA, 25 bp, Homo sapien
cgacccaggcagactctgcgcggat

SEQ ID NO: 3258154 - DNA, 25 bp, Homo sapien
agcggagagacccaacgggacacgc

SEQ ID NO: 3258155 - DNA, 25 bp, Homo sapien
aatgctcccgaccactgtttgccag

SEQ ID NO: 3258156 - DNA, 25 bp, Homo sapien
gcctgtccatttccccgggagcgga

SEQ ID NO: 3258157 - DNA, 25 bp, Homo sapien
cgcgcaaccccagcgccggcggctt

SEQ ID NO: 3258158 - DNA, 25 bp, Homo sapien
agcgccggcggcttcctaggtgggg

SEQ ID NO: 3258159 - DNA, 25 bp, Homo sapien
gccgcgcaaccccagcgccggcggc

SEQ ID NO: 3258160 - DNA, 25 bp, Homo sapien
cggcggcttcctaggtggggcaggg

SEQ ID NO: 3258161 - DNA, 25 bp, Homo sapien
ggacttcaaaccgagtctgcaccac

SEQ ID NO: 3258162 - DNA, 25 bp, Homo sapien
caggacttcaaaccgagtctgcacc

SEQ ID NO: 3258163 - DNA, 25 bp, Homo sapien
ctcccaggacttcaaaccgagtctg

SEQ ID NO: 3258164 - DNA, 25 bp, Homo sapien
cccaggacttcaaaccgagtctgca

SEQ ID NO: 3258165 - DNA, 25 bp, Homo sapien
ttgacttgtcttgccacaggtttga

SEQ ID NO: 3258166 - DNA, 25 bp, Homo sapien
tgaatcaacttgatggagacttgta

SEQ ID NO: 3258167 - DNA, 25 bp, Homo sapien
caggtttgagattaggatgtaattt

SEQ ID NO: 3258168 - DNA, 25 bp, Homo sapien
tctttgatgatttgacttgtcttgc

SEQ ID NO: 3258169 - DNA, 25 bp, Homo sapien
ggaactatgaatcagatatctccat

SEQ ID NO: 3258170 - DNA, 25 bp, Homo sapien
gcagagatcatcgtagaaccggaaa

SEQ ID NO: 3258171 - DNA, 25 bp, Homo sapien
ccgttttctggtaatgtcatagcac

SEQ ID NO: 3258172 - DNA, 25 bp, Homo sapien
gaaatttactcgctcaactccatca

SEQ ID NO: 3258173 - DNA, 25 bp, Homo sapien
gcactgcagccggaacatccagaat

SEQ ID NO: 3258174 - DNA, 25 bp, Homo sapien
tgagatctagtttgcagttgccagc

SEQ ID NO: 3258175 - DNA, 25 bp, Homo sapien
ccagaatagaccaggtaggctgcac

SEQ ID NO: 3258176 - DNA, 25 bp, Homo sapien
tccaagatagttggtgcactgcagc

SEQ ID NO: 3258177 - DNA, 25 bp, Homo sapien
aaaggttgaagtatttgaagttgag

SEQ ID NO: 3258178 - DNA, 25 bp, Homo sapien
cataaaaggttgaagtatttgaagt

SEQ ID NO: 3258179 - DNA, 25 bp, Homo sapien
aagagctgaacacgtaatcgaattc

SEQ ID NO: 3258180 - DNA, 25 bp, Homo sapien
gcgggctttacctgtgtcaagagct

SEQ ID NO: 3258181 - DNA, 25 bp, Homo sapien
tcttatacttggataccgcgggctt

SEQ ID NO: 3258182 - DNA, 25 bp, Homo sapien
gaaagagctagttttgtaggttgat

SEQ ID NO: 3258183 - DNA, 25 bp, Homo sapien
aaatttcattagcatacttgttttt

SEQ ID NO: 3258184 - DNA, 25 bp, Homo sapien
agtcttcactaattgtttgtagtat

SEQ ID NO: 3258185 - DNA, 25 bp, Homo sapien
cagtcttcactaattgtttgtagta

SEQ ID NO: 3258186 - DNA, 25 bp, Homo sapien
catgaataggaaattagggtttcac

SEQ ID NO: 3258187 - DNA, 25 bp, Homo sapien
gaaataacgtaagacatagcaattg

SEQ ID NO: 3258188 - DNA, 25 bp, Homo sapien
tagcaattggatgtaacctatgtgg

SEQ ID NO: 3258189 - DNA, 25 bp, Homo sapien
taaatgtgctcttagaaacagggaa

SEQ ID NO: 3258190 - DNA, 25 bp, Homo sapien
tgctggacgtgagttccataagcca

SEQ ID NO: 3258191 - DNA, 25 bp, Homo sapien
ccataagccattggtaaaggaaggt

SEQ ID NO: 3258192 - DNA, 25 bp, Homo sapien
ggaactaagaatagcaaactggcct

SEQ ID NO: 3258193 - DNA, 25 bp, Homo sapien
caaatatccactctcgtgctggacg

SEQ ID NO: 3258194 - DNA, 25 bp, Homo sapien
gaatgtactagaacaccctttttgc

SEQ ID NO: 3258195 - DNA, 25 bp, Homo sapien
aagaaatcagtagttttgcaatgtt

SEQ ID NO: 3258196 - DNA, 25 bp, Homo sapien
agaaatcagtagttttgcaatgtta

SEQ ID NO: 3258197 - DNA, 25 bp, Homo sapien
ttgggaatcacttgtagtgttttac

SEQ ID NO: 3258198 - DNA, 25 bp, Homo sapien
tgggaatcacttgtagtgttttact

SEQ ID NO: 3258199 - DNA, 25 bp, Homo sapien
tcactgatcataaccaaatgttttg

SEQ ID NO: 3258200 - DNA, 25 bp, Homo sapien
gatcactgatcataaccaaatgttt

SEQ ID NO: 3258201 - DNA, 25 bp, Homo sapien
actgatcataaccaaatgttttgtt

SEQ ID NO: 3258202 - DNA, 25 bp, Homo sapien
agatcactgatcataaccaaatgtt

SEQ ID NO: 3258203 - DNA, 25 bp, Homo sapien
gttcccatcatcatactcatgttct

SEQ ID NO: 3258204 - DNA, 25 bp, Homo sapien
catcatcatactcatgttcttgtaa

SEQ ID NO: 3258205 - DNA, 25 bp, Homo sapien
tcccatcatcatactcatgttcttg

SEQ ID NO: 3258206 - DNA, 25 bp, Homo sapien
tgttcccatcatcatactcatgttc

SEQ ID NO: 3258207 - DNA, 25 bp, Homo sapien
ttgaaaccggacatacagattccta

SEQ ID NO: 3258208 - DNA, 25 bp, Homo sapien
catttatctgtttatccctctgcaa

SEQ ID NO: 3258209 - DNA, 25 bp, Homo sapien
tgagtttctaactggtcttgtacca

SEQ ID NO: 3258210 - DNA, 25 bp, Homo sapien
tagctatataactccttgaaaccgg

SEQ ID NO: 3258211 - DNA, 25 bp, Homo sapien
gaaagcacacggagcggtgagggag

SEQ ID NO: 3258212 - DNA, 25 bp, Homo sapien
tgggaggaaagcacacggagcggtg

SEQ ID NO: 3258213 - DNA, 25 bp, Homo sapien
gagggaagcgcagctaactagtaca

SEQ ID NO: 3258214 - DNA, 25 bp, Homo sapien
cagctaactagtacacccttgaccg

SEQ ID NO: 3258215 - DNA, 25 bp, Homo sapien
tcagatccgaggttcatgggccacc

SEQ ID NO: 3258216 - DNA, 25 bp, Homo sapien
gatttacattgctatcccctagagc

SEQ ID NO: 3258217 - DNA, 25 bp, Homo sapien
taaatcatacctgcggtggccttgc

SEQ ID NO: 3258218 - DNA, 25 bp, Homo sapien
tccttgtcggagcattcagagatgg

SEQ ID NO: 3258219 - DNA, 25 bp, Homo sapien
gctggcagtgcctcaactcacgtgt

SEQ ID NO: 3258220 - DNA, 25 bp, Homo sapien
tacccttctggtggacaatgctgag

SEQ ID NO: 3258221 - DNA, 25 bp, Homo sapien
ttcttagaaccattgagcagctcag

SEQ ID NO: 3258222 - DNA, 25 bp, Homo sapien
ttcactgcagtagccaacttggtag

SEQ ID NO: 3258223 - DNA, 25 bp, Homo sapien
tattccttgcgcctttatgtttcct

SEQ ID NO: 3258224 - DNA, 25 bp, Homo sapien
tgttggggcttttcaggctacttag

SEQ ID NO: 3258225 - DNA, 25 bp, Homo sapien
gacaggctccatcactagccttaag

SEQ ID NO: 3258226 - DNA, 25 bp, Homo sapien
tagccttaaggcctcattcaagttc

SEQ ID NO: 3258227 - DNA, 25 bp, Homo sapien
tgcatgttcccaaccgcttgaccag

SEQ ID NO: 3258228 - DNA, 25 bp, Homo sapien
ttggggcttctcctcacttgtcttc

SEQ ID NO: 3258229 - DNA, 25 bp, Homo sapien
cctcctcacttggttgccatttggg

SEQ ID NO: 3258230 - DNA, 25 bp, Homo sapien
aaccgcttgaccagacatggtccct

SEQ ID NO: 3258231 - DNA, 25 bp, Homo sapien
tagcatgatgcaaccatatttagcc

SEQ ID NO: 3258232 - DNA, 25 bp, Homo sapien
gatgcaaccatatttagccctagtt

SEQ ID NO: 3258233 - DNA, 25 bp, Homo sapien
ccatcaccaccctgtgattaggtaa

SEQ ID NO: 3258234 - DNA, 25 bp, Homo sapien
tgattaggtaaatggaaaccagatg

SEQ ID NO: 3258235 - DNA, 25 bp, Homo sapien
tcaacaataaatccattcacaccaa

SEQ ID NO: 3258236 - DNA, 25 bp, Homo sapien
caataaatccattcacaccaattgt

SEQ ID NO: 3258237 - DNA, 25 bp, Homo sapien
cagtttcaacaataaatccattcac

SEQ ID NO: 3258238 - DNA, 25 bp, Homo sapien
taaatccattcacaccaattgtttt

SEQ ID NO: 3258239 - DNA, 25 bp, Homo sapien
cattccttgaaggtcttggtctgaa

SEQ ID NO: 3258240 - DNA, 25 bp, Homo sapien
tgtatcaggagtgtaaaactacaag

SEQ ID NO: 3258241 - DNA, 25 bp, Homo sapien
gattatatatccaaccctcaagtgg

SEQ ID NO: 3258242 - DNA, 25 bp, Homo sapien
aaacaatgatcactagcctaagggc

SEQ ID NO: 3258243 - DNA, 25 bp, Homo sapien
tcagtaggttatcaaatagatacgc

SEQ ID NO: 3258244 - DNA, 25 bp, Homo sapien
agtaggttatcaaatagatacgcac

SEQ ID NO: 3258245 - DNA, 25 bp, Homo sapien
cagtaggttatcaaatagatacgca

SEQ ID NO: 3258246 - DNA, 25 bp, Homo sapien
gtgtacctcttatgtgcaaggcatt

SEQ ID NO: 3258247 - DNA, 25 bp, Homo sapien
cgtgtacctcttatgtgcaaggcat

SEQ ID NO: 3258248 - DNA, 25 bp, Homo sapien
cttggccctattgtctgtgagggtg

SEQ ID NO: 3258249 - DNA, 25 bp, Homo sapien
tgtctgtgagggtgaacaggaaatc

SEQ ID NO: 3258250 - DNA, 25 bp, Homo sapien
agggtgaacaggaaatcagcaaggt

SEQ ID NO: 3258251 - DNA, 25 bp, Homo sapien
ccctattgtctgtgagggtgaacag

SEQ ID NO: 3258252 - DNA, 25 bp, Homo sapien
ttttggcttaggtcctccgacaatg

SEQ ID NO: 3258253 - DNA, 25 bp, Homo sapien
aaggtaattaacaaaggcacactat

SEQ ID NO: 3258254 - DNA, 25 bp, Homo sapien
aggtaattaacaaaggcacactatt

SEQ ID NO: 3258255 - DNA, 25 bp, Homo sapien
ttggcttaggtcctccgacaatgca

SEQ ID NO: 3258256 - DNA, 25 bp, Homo sapien
ccccgagaaggctcagtcgtcgtaa

SEQ ID NO: 3258257 - DNA, 25 bp, Homo sapien
taatggtctccacagtgatgccgac

SEQ ID NO: 3258258 - DNA, 25 bp, Homo sapien
caagaaaactcaatgccccgagaag

SEQ ID NO: 3258259 - DNA, 25 bp, Homo sapien
catctgtgccgaaggatgtccttga

SEQ ID NO: 3258260 - DNA, 25 bp, Homo sapien
aggctccagcagcgagctcattctg

SEQ ID NO: 3258261 - DNA, 25 bp, Homo sapien
taggctccagcagcgagctcattct

SEQ ID NO: 3258262 - DNA, 25 bp, Homo sapien
ctaggctccagcagcgagctcattc

SEQ ID NO: 3258263 - DNA, 25 bp, Homo sapien
ccagcagcaaatactgcttggaggg

SEQ ID NO: 3258264 - DNA, 25 bp, Homo sapien
gcttggagggccctacacatgcaga

SEQ ID NO: 3258265 - DNA, 25 bp, Homo sapien
tctcatctcccatttgatgctccag

SEQ ID NO: 3258266 - DNA, 25 bp, Homo sapien
gagggccctacacatgcagagctgg

SEQ ID NO: 3258267 - DNA, 25 bp, Homo sapien
gctactagcttatacattcagtgga

SEQ ID NO: 3258268 - DNA, 25 bp, Homo sapien
ggatcttaggatcaactatgcccag

SEQ ID NO: 3258269 - DNA, 25 bp, Homo sapien
tctccagtgcctagttcaagggtat

SEQ ID NO: 3258270 - DNA, 25 bp, Homo sapien
tgttggcaagagcataaaccctgat

SEQ ID NO: 3258271 - DNA, 25 bp, Homo sapien
gttaggagctggaacatagtcccct

SEQ ID NO: 3258272 - DNA, 25 bp, Homo sapien
gggtcagccacatggtcaaccttaa

SEQ ID NO: 3258273 - DNA, 25 bp, Homo sapien
tatatataaggacaagggcttacag

SEQ ID NO: 3258274 - DNA, 25 bp, Homo sapien
aagcaggacatttgcacttgcagaa

SEQ ID NO: 3258275 - DNA, 25 bp, Homo sapien
taactggacagttcctcgagttcgg

SEQ ID NO: 3258276 - DNA, 25 bp, Homo sapien
tgggcagttgccttctgtacagaga

SEQ ID NO: 3258277 - DNA, 25 bp, Homo sapien
cagagaagtagacaataccctttgg

SEQ ID NO: 3258278 - DNA, 25 bp, Homo sapien
catgggcctgaatgttctataaagg

SEQ ID NO: 3258279 - DNA, 25 bp, Homo sapien
cagccttcttttgtagtttggtggg

SEQ ID NO: 3258280 - DNA, 25 bp, Homo sapien
tttgtagtttggtgggactaagcag

SEQ ID NO: 3258281 - DNA, 25 bp, Homo sapien
ttttgtagtttggtgggactaagca

SEQ ID NO: 3258282 - DNA, 25 bp, Homo sapien
tcagccttcttttgtagtttggtgg

SEQ ID NO: 3258283 - DNA, 25 bp, Homo sapien
aatctacataggaaacagattgtcc

SEQ ID NO: 3258284 - DNA, 25 bp, Homo sapien
tggtattgacaaatccgggttcttc

SEQ ID NO: 3258285 - DNA, 25 bp, Homo sapien
gaagcataccggataagacaggttt

SEQ ID NO: 3258286 - DNA, 25 bp, Homo sapien
agaagataattctgaggaatctaca

SEQ ID NO: 3258287 - DNA, 25 bp, Homo sapien
gcattttctgctacgttctctctca

SEQ ID NO: 3258288 - DNA, 25 bp, Homo sapien
catggtaactgggagcacagtcccc

SEQ ID NO: 3258289 - DNA, 25 bp, Homo sapien
tcgtcttcatggtaactgggagcac

SEQ ID NO: 3258290 - DNA, 25 bp, Homo sapien
tcttcatggtaactgggagcacagt

SEQ ID NO: 3258291 - DNA, 25 bp, Homo sapien
taagttcacagctaccagaagaggt

SEQ ID NO: 3258292 - DNA, 25 bp, Homo sapien
tgtaaaaatatgactcagaatcttc

SEQ ID NO: 3258293 - DNA, 25 bp, Homo sapien
tgcaagactacctaatgataagggt

SEQ ID NO: 3258294 - DNA, 25 bp, Homo sapien
cagaagaggtcctgcataggagcta

SEQ ID NO: 3258295 - DNA, 25 bp, Homo sapien
cattacacagtcctgggaaacgttc

SEQ ID NO: 3258296 - DNA, 25 bp, Homo sapien
cttctccggaaacattacacagtcc

SEQ ID NO: 3258297 - DNA, 25 bp, Homo sapien
ctgggcagtttcaaacagatgggac

SEQ ID NO: 3258298 - DNA, 25 bp, Homo sapien
gctgggcagtttcaaacagatggga

SEQ ID NO: 3258299 - DNA, 25 bp, Homo sapien
gggcaggctatggtaagaattcaac

SEQ ID NO: 3258300 - DNA, 25 bp, Homo sapien
ccactgccaatgcatttgctaacca

SEQ ID NO: 3258301 - DNA, 25 bp, Homo sapien
ttctataagtgcactctaggtttca

SEQ ID NO: 3258302 - DNA, 25 bp, Homo sapien
aaaaaacaacacagagggcaggcta

SEQ ID NO: 3258303 - DNA, 25 bp, Homo sapien
tcaatcgagaccatcagtgggctga

SEQ ID NO: 3258304 - DNA, 25 bp, Homo sapien
agagatattcatgggttacctgcac

SEQ ID NO: 3258305 - DNA, 25 bp, Homo sapien
tcatgtggacaactcaaaagtgagg

SEQ ID NO: 3258306 - DNA, 25 bp, Homo sapien
tggcttcgcaccaacagtacaggaa

SEQ ID NO: 3258307 - DNA, 25 bp, Homo sapien
gatcagtccaagtgccaacacctca

SEQ ID NO: 3258308 - DNA, 25 bp, Homo sapien
agtggtggatcagtccaagtgccaa

SEQ ID NO: 3258309 - DNA, 25 bp, Homo sapien
tggatcagtccaagtgccaacacct

SEQ ID NO: 3258310 - DNA, 25 bp, Homo sapien
tggtggatcagtccaagtgccaaca

SEQ ID NO: 3258311 - DNA, 25 bp, Homo sapien
caaaatagtcttaaaggcagtgacc

SEQ ID NO: 3258312 - DNA, 25 bp, Homo sapien
tccatgttggagagtacaatgatga

SEQ ID NO: 3258313 - DNA, 25 bp, Homo sapien
acaatgatgagggaaactccatccc

SEQ ID NO: 3258314 - DNA, 25 bp, Homo sapien
gagaagccagggaattctgccatga

SEQ ID NO: 3258315 - DNA, 25 bp, Homo sapien
tcaactcatttatcattgaccagaa

SEQ ID NO: 3258316 - DNA, 25 bp, Homo sapien
gtggtttcaggcctatacatcaaaa

SEQ ID NO: 3258317 - DNA, 25 bp, Homo sapien
ggtgcataaatgaactgctaggtaa

SEQ ID NO: 3258318 - DNA, 25 bp, Homo sapien
gtggtttcaggcctatacatcagaa

SEQ ID NO: 3258319 - DNA, 25 bp, Homo sapien
tctggccagatgtctagagtttaca

SEQ ID NO: 3258320 - DNA, 25 bp, Homo sapien
catagccgtcttgggacaaaaaagg

SEQ ID NO: 3258321 - DNA, 25 bp, Homo sapien
gctgcagccgtcatttgggttttac

SEQ ID NO: 3258322 - DNA, 25 bp, Homo sapien
caataggcccctaattagcaatagg

SEQ ID NO: 3258323 - DNA, 25 bp, Homo sapien
ggatgcagagcagctatacatgccc

SEQ ID NO: 3258324 - DNA, 25 bp, Homo sapien
gtgcctccacatgcacaccagaccc

SEQ ID NO: 3258325 - DNA, 25 bp, Homo sapien
tggatgcagagcagctatacatgcc

SEQ ID NO: 3258326 - DNA, 25 bp, Homo sapien
aacagcccctggatccagtgcctcc

SEQ ID NO: 3258327 - DNA, 25 bp, Homo sapien
tggacagagaatgactttgatgagc

SEQ ID NO: 3258328 - DNA, 25 bp, Homo sapien
aggaatgcagctcctcaccagcaat

SEQ ID NO: 3258329 - DNA, 25 bp, Homo sapien
gaatgcagctcctcaccagcaatgg

SEQ ID NO: 3258330 - DNA, 25 bp, Homo sapien
acagagaatgactttgatgagctga

SEQ ID NO: 3258331 - DNA, 25 bp, Homo sapien
tatgcaaagtatatgagagaaacgt

SEQ ID NO: 3258332 - DNA, 25 bp, Homo sapien
tacatggcggtgtttctcaaaaagc

SEQ ID NO: 3258333 - DNA, 25 bp, Homo sapien
gggcaggaaatcagcctagacatat

SEQ ID NO: 3258334 - DNA, 25 bp, Homo sapien
tctgcagattaacacctagtcaaaa

SEQ ID NO: 3258335 - DNA, 25 bp, Homo sapien
taattatttcagctcctgaagtcct

SEQ ID NO: 3258336 - DNA, 25 bp, Homo sapien
ttctaacgaattagcctctcctgct

SEQ ID NO: 3258337 - DNA, 25 bp, Homo sapien
gaatacaggaatttagtgaactcca

SEQ ID NO: 3258338 - DNA, 25 bp, Homo sapien
cctgaagtccttgttaaagtgtctc

SEQ ID NO: 3258339 - DNA, 25 bp, Homo sapien
gaaggcatccgcacagctgagtact

SEQ ID NO: 3258340 - DNA, 25 bp, Homo sapien
gacagttaagacaacctactgaagg

SEQ ID NO: 3258341 - DNA, 25 bp, Homo sapien
cattatgcacagaatagttgcccca

SEQ ID NO: 3258342 - DNA, 25 bp, Homo sapien
acaatttggtgcctgagtcattcaa

SEQ ID NO: 3258343 - DNA, 25 bp, Homo sapien
gaaatcctatgttgcgatcagtggg

SEQ ID NO: 3258344 - DNA, 25 bp, Homo sapien
ggttccaaacagcaacacgtactga

SEQ ID NO: 3258345 - DNA, 25 bp, Homo sapien
caactgtaggactgagatccatgct

SEQ ID NO: 3258346 - DNA, 25 bp, Homo sapien
cttttagggcacatgggatcagatc

SEQ ID NO: 3258347 - DNA, 25 bp, Homo sapien
atgaggacaatcatcccatcatgag

SEQ ID NO: 3258348 - DNA, 25 bp, Homo sapien
cattggaagatagggcttcaacatg

SEQ ID NO: 3258349 - DNA, 25 bp, Homo sapien
taatggcaaggctttgaattaagtt

SEQ ID NO: 3258350 - DNA, 25 bp, Homo sapien
tcagctcatagccttgtaatggcaa

SEQ ID NO: 3258351 - DNA, 25 bp, Homo sapien
tataaaatgtaaggaaggcgtccag

SEQ ID NO: 3258352 - DNA, 25 bp, Homo sapien
tttctgtataaaatgtaaggaaggc

SEQ ID NO: 3258353 - DNA, 25 bp, Homo sapien
ctgtataaaatgtaaggaaggcgtc

SEQ ID NO: 3258354 - DNA, 25 bp, Homo sapien
ataaaatgtaaggaaggcgtccagt

SEQ ID NO: 3258355 - DNA, 25 bp, Homo sapien
gatcaattaaagtttgcctcttgtg

SEQ ID NO: 3258356 - DNA, 25 bp, Homo sapien
aaggatcaattaaagtttgcctctt

SEQ ID NO: 3258357 - DNA, 25 bp, Homo sapien
atcaattaaagtttgcctcttgtgc

SEQ ID NO: 3258358 - DNA, 25 bp, Homo sapien
ggatcaattaaagtttgcctcttgt

SEQ ID NO: 3258359 - DNA, 25 bp, Homo sapien
tatagaaccttcaaacaacgaggac

SEQ ID NO: 3258360 - DNA, 25 bp, Homo sapien
tctccagtcaagtcatgttaggtag

SEQ ID NO: 3258361 - DNA, 25 bp, Homo sapien
gaacattgtcgtctttgacctgaga

SEQ ID NO: 3258362 - DNA, 25 bp, Homo sapien
gagatgtgcatatccatccacaaag

SEQ ID NO: 3258363 - DNA, 25 bp, Homo sapien
actttccactttgaccatcatgaac

SEQ ID NO: 3258364 - DNA, 25 bp, Homo sapien
gttagtcataggcaacttgacctgc

SEQ ID NO: 3258365 - DNA, 25 bp, Homo sapien
gcataactccacttacaaaatgtaa

SEQ ID NO: 3258366 - DNA, 25 bp, Homo sapien
caacttgacctgcagcataactcca

SEQ ID NO: 3258367 - DNA, 25 bp, Homo sapien
attcttgatccttgtgcgttagtca

SEQ ID NO: 3258368 - DNA, 25 bp, Homo sapien
taattatctccccatgtcactgtga

SEQ ID NO: 3258369 - DNA, 25 bp, Homo sapien
tagcctttctctatcagtgcatgcc

SEQ ID NO: 3258370 - DNA, 25 bp, Homo sapien
tcatggaacccaactcagacaggat

SEQ ID NO: 3258371 - DNA, 25 bp, Homo sapien
tcttaacccgtgaagccaggtttca

SEQ ID NO: 3258372 - DNA, 25 bp, Homo sapien
cagcctgacagcacccgaatgtgaa

SEQ ID NO: 3258373 - DNA, 25 bp, Homo sapien
gaatgtgaagattcagccacttgta

SEQ ID NO: 3258374 - DNA, 25 bp, Homo sapien
tcattccaacttgaccagggcacca

SEQ ID NO: 3258375 - DNA, 25 bp, Homo sapien
tgattgagattgagaggctctggct

SEQ ID NO: 3258376 - DNA, 25 bp, Homo sapien
actgacacagaggaccataaaatgt

SEQ ID NO: 3258377 - DNA, 25 bp, Homo sapien
agggggcagacagcactgacacaga

SEQ ID NO: 3258378 - DNA, 25 bp, Homo sapien
gcactgacacagaggaccataaaat

SEQ ID NO: 3258379 - DNA, 25 bp, Homo sapien
tgacacagaggaccataaaatgtat

SEQ ID NO: 3258380 - DNA, 25 bp, Homo sapien
gctccgtgtcacactgggcttgaag

SEQ ID NO: 3258381 - DNA, 25 bp, Homo sapien
agctccgtgtcacactgggcttgaa

SEQ ID NO: 3258382 - DNA, 25 bp, Homo sapien
cacactgggcttgaagatagtaagt

SEQ ID NO: 3258383 - DNA, 25 bp, Homo sapien
actgggcttgaagatagtaagtcat

SEQ ID NO: 3258384 - DNA, 25 bp, Homo sapien
tcataaaacatgagtgcgcataccc

SEQ ID NO: 3258385 - DNA, 25 bp, Homo sapien
aacagagaatagaggccaatgcctt

SEQ ID NO: 3258386 - DNA, 25 bp, Homo sapien
ctcagaccgctaagattaatagaca

SEQ ID NO: 3258387 - DNA, 25 bp, Homo sapien
gcttcacacttgctcaactgaacaa

SEQ ID NO: 3258388 - DNA, 25 bp, Homo sapien
gagcaactggcctgtatgtattatt

SEQ ID NO: 3258389 - DNA, 25 bp, Homo sapien
gcaatatggctacattaatattttg

SEQ ID NO: 3258390 - DNA, 25 bp, Homo sapien
tgggaacacaggcttgagcaactgg

SEQ ID NO: 3258391 - DNA, 25 bp, Homo sapien
gaaaatacaaatcacccataacctc

SEQ ID NO: 3258392 - DNA, 25 bp, Homo sapien
ctttctccagatagcagtccaagaa

SEQ ID NO: 3258393 - DNA, 25 bp, Homo sapien
tttctccagatagcagtccaagaaa

SEQ ID NO: 3258394 - DNA, 25 bp, Homo sapien
gcagtccaagaaatctatctattaa

SEQ ID NO: 3258395 - DNA, 25 bp, Homo sapien
ttctccagatagcagtccaagaaat

SEQ ID NO: 3258396 - DNA, 25 bp, Homo sapien
tctacatgtgaagtagaaaccaggt

SEQ ID NO: 3258397 - DNA, 25 bp, Homo sapien
gagcaaagactcttttggccaccct

SEQ ID NO: 3258398 - DNA, 25 bp, Homo sapien
taaataggttatttgggcaagtcac

SEQ ID NO: 3258399 - DNA, 25 bp, Homo sapien
ccagttctggtttagcataaatagg

SEQ ID NO: 3258400 - DNA, 25 bp, Homo sapien
tgagctaaagtgcatggcagatcca

SEQ ID NO: 3258401 - DNA, 25 bp, Homo sapien
tagatctagttaagagccagtgagc

SEQ ID NO: 3258402 - DNA, 25 bp, Homo sapien
tccaaattacgtgctagaagggttc

SEQ ID NO: 3258403 - DNA, 25 bp, Homo sapien
tccccggtttgtaaggacaagcaga

SEQ ID NO: 3258404 - DNA, 25 bp, Homo sapien
ctgtatccccaaggacaaccctgag

SEQ ID NO: 3258405 - DNA, 25 bp, Homo sapien
caagcctgcagtcattagaattgtg

SEQ ID NO: 3258406 - DNA, 25 bp, Homo sapien
ttcagctgcataagttgttgagggc

SEQ ID NO: 3258407 - DNA, 25 bp, Homo sapien
cactttttgcacaactaccatgact

SEQ ID NO: 3258408 - DNA, 25 bp, Homo sapien
tagacctgattagcatcccacaaca

SEQ ID NO: 3258409 - DNA, 25 bp, Homo sapien
tcaaatcaagctcatagaacccaag

SEQ ID NO: 3258410 - DNA, 25 bp, Homo sapien
gagccatggagaggtaagccactaa

SEQ ID NO: 3258411 - DNA, 25 bp, Homo sapien
gaagttcctatctttcagagcagca

SEQ ID NO: 3258412 - DNA, 25 bp, Homo sapien
gaggtccaccactctattgctatag

SEQ ID NO: 3258413 - DNA, 25 bp, Homo sapien
catgaggtccaccactctattgcta

SEQ ID NO: 3258414 - DNA, 25 bp, Homo sapien
atgaggtccaccactctattgctat

SEQ ID NO: 3258415 - DNA, 25 bp, Homo sapien
tgaggtccaccactctattgctata

SEQ ID NO: 3258416 - DNA, 25 bp, Homo sapien
cccatgtagaggggattactggcac

SEQ ID NO: 3258417 - DNA, 25 bp, Homo sapien
ccatgtagaggggattactggcaca

SEQ ID NO: 3258418 - DNA, 25 bp, Homo sapien
gtccatatgtagctcaatgtttagc

SEQ ID NO: 3258419 - DNA, 25 bp, Homo sapien
ctcccatgtagaggggattactggc

SEQ ID NO: 3258420 - DNA, 25 bp, Homo sapien
cagtgctgattgcaatcttccaggg

SEQ ID NO: 3258421 - DNA, 25 bp, Homo sapien
tgcattggcacagatgaaaattatg

SEQ ID NO: 3258422 - DNA, 25 bp, Homo sapien
taggcttacctccaattccttcaac

SEQ ID NO: 3258423 - DNA, 25 bp, Homo sapien
caacttccagaacaggctttgcaga

SEQ ID NO: 3258424 - DNA, 25 bp, Homo sapien
tttattgctggattgaaattgaatg

SEQ ID NO: 3258425 - DNA, 25 bp, Homo sapien
atttaatttagcatgctcaatcctt

SEQ ID NO: 3258426 - DNA, 25 bp, Homo sapien
agcatgctcaatccttttaagtata

SEQ ID NO: 3258427 - DNA, 25 bp, Homo sapien
taatttagcatgctcaatcctttta

SEQ ID NO: 3258428 - DNA, 25 bp, Homo sapien
gagtattacttgaacacgagaggca

SEQ ID NO: 3258429 - DNA, 25 bp, Homo sapien
taattggcatacttctgtgcttcac

SEQ ID NO: 3258430 - DNA, 25 bp, Homo sapien
tattctagtattcacataattggca

SEQ ID NO: 3258431 - DNA, 25 bp, Homo sapien
ggagttcacgaccaggcttggccaa

SEQ ID NO: 3258432 - DNA, 25 bp, Homo sapien
tacaagatggaacctgagagccaca

SEQ ID NO: 3258433 - DNA, 25 bp, Homo sapien
gagagccacaccctgagtgatctca

SEQ ID NO: 3258434 - DNA, 25 bp, Homo sapien
ccataggtaagaggcaaggcaaagc

SEQ ID NO: 3258435 - DNA, 25 bp, Homo sapien
tcataccaagaagcgtacaagatgg

SEQ ID NO: 3258436 - DNA, 25 bp, Homo sapien
tattgggctatatcatacattaaga

SEQ ID NO: 3258437 - DNA, 25 bp, Homo sapien
caactacctagacttttgtgatcat

SEQ ID NO: 3258438 - DNA, 25 bp, Homo sapien
gccaactatgtgcaatctctaagaa

SEQ ID NO: 3258439 - DNA, 25 bp, Homo sapien
gaacattgcatacctgagcagcccc

SEQ ID NO: 3258440 - DNA, 25 bp, Homo sapien
ggagatgcacagcatcacagttgta

SEQ ID NO: 3258441 - DNA, 25 bp, Homo sapien
cttagattgtggtagcccgtggcct

SEQ ID NO: 3258442 - DNA, 25 bp, Homo sapien
tcccttgatcgctatatccttgagt

SEQ ID NO: 3258443 - DNA, 25 bp, Homo sapien
taactctaggaggtattctctcccc

SEQ ID NO: 3258444 - DNA, 25 bp, Homo sapien
taggataattgtagccggcatgaac

SEQ ID NO: 3258445 - DNA, 25 bp, Homo sapien
taaagcatgatacaccttagtgtgc

SEQ ID NO: 3258446 - DNA, 25 bp, Homo sapien
catggctatcagtatgtgtttatca

SEQ ID NO: 3258447 - DNA, 25 bp, Homo sapien
gggtagccctagcaacacatcctta

SEQ ID NO: 3258448 - DNA, 25 bp, Homo sapien
catgctgactgctatggagacatca

SEQ ID NO: 3258449 - DNA, 25 bp, Homo sapien
tctgtatttgatggtcctggctgac

SEQ ID NO: 3258450 - DNA, 25 bp, Homo sapien
tctcagggaggacttacctccaggg

SEQ ID NO: 3258451 - DNA, 25 bp, Homo sapien
aagagtgttgtcatgttaggacctc

SEQ ID NO: 3258452 - DNA, 25 bp, Homo sapien
cctcctactactaaggaaccttcag

SEQ ID NO: 3258453 - DNA, 25 bp, Homo sapien
cctctcgtagcctctaatttcttca

SEQ ID NO: 3258454 - DNA, 25 bp, Homo sapien
tactactaaggaaccttcagcaaat

SEQ ID NO: 3258455 - DNA, 25 bp, Homo sapien
cttcagcaaatcataacacctctcg

SEQ ID NO: 3258456 - DNA, 25 bp, Homo sapien
aagtggcccatgcagctagagtacc

SEQ ID NO: 3258457 - DNA, 25 bp, Homo sapien
taatcgccgatagccagagagacag

SEQ ID NO: 3258458 - DNA, 25 bp, Homo sapien
cacaaaaggtgtctgtccaaggttc

SEQ ID NO: 3258459 - DNA, 25 bp, Homo sapien
taagatagttctcctgaggccccgt

SEQ ID NO: 3258460 - DNA, 25 bp, Homo sapien
aggcagggaccattagaccaaccag

SEQ ID NO: 3258461 - DNA, 25 bp, Homo sapien
ttgaaaagcttaccacaagggtgtg

SEQ ID NO: 3258462 - DNA, 25 bp, Homo sapien
ggaaaccttgtagcctgtccactaa

SEQ ID NO: 3258463 - DNA, 25 bp, Homo sapien
gagattatagcacagccagtctgca

SEQ ID NO: 3258464 - DNA, 25 bp, Homo sapien
aatcttcaaaaatggcacacattcc

SEQ ID NO: 3258465 - DNA, 25 bp, Homo sapien
ttacagaataaacaagctcggttat

SEQ ID NO: 3258466 - DNA, 25 bp, Homo sapien
tcagctgtactttccatgccatagt

SEQ ID NO: 3258467 - DNA, 25 bp, Homo sapien
cttaaccaccatagtgcccaagctg

SEQ ID NO: 3258468 - DNA, 25 bp, Homo sapien
gactagatgaccttcatgagtcacc

SEQ ID NO: 3258469 - DNA, 25 bp, Homo sapien
tccttggctatggtatgcattgaat

SEQ ID NO: 3258470 - DNA, 25 bp, Homo sapien
cactggttagcaactgtccctgaac

SEQ ID NO: 3258471 - DNA, 25 bp, Homo sapien
cagctctagaaaagagtttccagaa

SEQ ID NO: 3258472 - DNA, 25 bp, Homo sapien
ctaacgtatgtgtaatgcctgggca

SEQ ID NO: 3258473 - DNA, 25 bp, Homo sapien
cctgcatactgggagctagctctac

SEQ ID NO: 3258474 - DNA, 25 bp, Homo sapien
tttgcaaatctataaaacccacgag

SEQ ID NO: 3258475 - DNA, 25 bp, Homo sapien
aacccacgagctgcttcttacagtg

SEQ ID NO: 3258476 - DNA, 25 bp, Homo sapien
ttttgttagtagcagctttagtggg

SEQ ID NO: 3258477 - DNA, 25 bp, Homo sapien
tagcagctttagtgggggaaatgac

SEQ ID NO: 3258478 - DNA, 25 bp, Homo sapien
gttagtagcagctttagtgggggaa

SEQ ID NO: 3258479 - DNA, 25 bp, Homo sapien
tttttgttagtagcagctttagtgg

SEQ ID NO: 3258480 - DNA, 25 bp, Homo sapien
ttcctgaggtaagaccacataggct

SEQ ID NO: 3258481 - DNA, 25 bp, Homo sapien
ggaaagtggcccacagatgccgtaa

SEQ ID NO: 3258482 - DNA, 25 bp, Homo sapien
tctgtctctgggtaagaaggcctgg

SEQ ID NO: 3258483 - DNA, 25 bp, Homo sapien
taacgggcagagagaactaccagtg

SEQ ID NO: 3258484 - DNA, 25 bp, Homo sapien
taaggtcattagtaatcaagcaggg

SEQ ID NO: 3258485 - DNA, 25 bp, Homo sapien
tatgtaaagagcactgtggaacacc

SEQ ID NO: 3258486 - DNA, 25 bp, Homo sapien
tgccaagcacgcagcaaaatatctg

SEQ ID NO: 3258487 - DNA, 25 bp, Homo sapien
caagcagggttaacaggcactgaaa

SEQ ID NO: 3258488 - DNA, 25 bp, Homo sapien
ttgctcactctttaaaactacttca

SEQ ID NO: 3258489 - DNA, 25 bp, Homo sapien
tcacttaagagtcaaagcctaaatc

SEQ ID NO: 3258490 - DNA, 25 bp, Homo sapien
cttcataatggcctacgggacctcc

SEQ ID NO: 3258491 - DNA, 25 bp, Homo sapien
gataatgtcacctcttacttgctct

SEQ ID NO: 3258492 - DNA, 25 bp, Homo sapien
gttgttgctttaaacaggaacttgc

SEQ ID NO: 3258493 - DNA, 25 bp, Homo sapien
catcatctgttatcccatgtgtcta

SEQ ID NO: 3258494 - DNA, 25 bp, Homo sapien
gggctaatgatacaatttaccacat

SEQ ID NO: 3258495 - DNA, 25 bp, Homo sapien
acacgagaaagggtatgcatataga

SEQ ID NO: 3258496 - DNA, 25 bp, Homo sapien
gaaaaaatggccaatgacaactcta

SEQ ID NO: 3258497 - DNA, 25 bp, Homo sapien
ggttccagaaccaacatgctacgct

SEQ ID NO: 3258498 - DNA, 25 bp, Homo sapien
gagaatgcgcattgctgtggatgca

SEQ ID NO: 3258499 - DNA, 25 bp, Homo sapien
caacacaagggctatctcagagaat

SEQ ID NO: 3258500 - DNA, 25 bp, Homo sapien
aaaatcatggactggaggccacgcc

SEQ ID NO: 3258501 - DNA, 25 bp, Homo sapien
cacgccatctgactcggtggaatag

SEQ ID NO: 3258502 - DNA, 25 bp, Homo sapien
gaactgctaaaacagctgggagact

SEQ ID NO: 3258503 - DNA, 25 bp, Homo sapien
caaatggatcctaaactgactgtgg

SEQ ID NO: 3258504 - DNA, 25 bp, Homo sapien
gacgctgtgtatagtactggagtac

SEQ ID NO: 3258505 - DNA, 25 bp, Homo sapien
gcctctcttatacgcaacaggtaat

SEQ ID NO: 3258506 - DNA, 25 bp, Homo sapien
gaagtgaagcctttaattgacgctg

SEQ ID NO: 3258507 - DNA, 25 bp, Homo sapien
tctgtttggatctatgttgcctctc

SEQ ID NO: 3258508 - DNA, 25 bp, Homo sapien
catacctcggagatagtgtgcactt

SEQ ID NO: 3258509 - DNA, 25 bp, Homo sapien
tatagtgtattaagcgtgcaaaagc

SEQ ID NO: 3258510 - DNA, 25 bp, Homo sapien
ccacaggtttgcatgtacaggcata

SEQ ID NO: 3258511 - DNA, 25 bp, Homo sapien
tgctggctgattagcaactggtggt

SEQ ID NO: 3258512 - DNA, 25 bp, Homo sapien
tctcttcaacatagtcactagctgc

SEQ ID NO: 3258513 - DNA, 25 bp, Homo sapien
gaccaggagccttgtcaataagcag

SEQ ID NO: 3258514 - DNA, 25 bp, Homo sapien
tctctaacattaagagtccgcctgc

SEQ ID NO: 3258515 - DNA, 25 bp, Homo sapien
cacagagtagacttagcaataattc

SEQ ID NO: 3258516 - DNA, 25 bp, Homo sapien
taacaacaatcactggccacagatc

SEQ ID NO: 3258517 - DNA, 25 bp, Homo sapien
agaagttttattggaaacatggcac

SEQ ID NO: 3258518 - DNA, 25 bp, Homo sapien
aaggagaagttttattggaaacatg

SEQ ID NO: 3258519 - DNA, 25 bp, Homo sapien
ggagaagttttattggaaacatggc

SEQ ID NO: 3258520 - DNA, 25 bp, Homo sapien
aagttttattggaaacatggcacca

SEQ ID NO: 3258521 - DNA, 25 bp, Homo sapien
tgtatcaataggaggaacattgcca

SEQ ID NO: 3258522 - DNA, 25 bp, Homo sapien
ggtccaaagacaaagtatgtagtcc

SEQ ID NO: 3258523 - DNA, 25 bp, Homo sapien
tagactggctcaacgcagagttgcc

SEQ ID NO: 3258524 - DNA, 25 bp, Homo sapien
ggtaataagttcatgggaggtccaa

SEQ ID NO: 3258525 - DNA, 25 bp, Homo sapien
gacagtggtgagaacaaagtatccc

SEQ ID NO: 3258526 - DNA, 25 bp, Homo sapien
caagtcacgctcaaaaagggatggt

SEQ ID NO: 3258527 - DNA, 25 bp, Homo sapien
catgtgtgtcggaaaagatctgcaa

SEQ ID NO: 3258528 - DNA, 25 bp, Homo sapien
gattggtgctttcctagctcactga

SEQ ID NO: 3258529 - DNA, 25 bp, Homo sapien
acactgcaaattctggcatccactg

SEQ ID NO: 3258530 - DNA, 25 bp, Homo sapien
catccactggcggtatcagcatgag

SEQ ID NO: 3258531 - DNA, 25 bp, Homo sapien
cagcaggctcgaaaaccacactgca

SEQ ID NO: 3258532 - DNA, 25 bp, Homo sapien
agcggcagcaggctcgaaaaccaca

SEQ ID NO: 3258533 - DNA, 25 bp, Homo sapien
tacccaggcactagatacaagaccc

SEQ ID NO: 3258534 - DNA, 25 bp, Homo sapien
cacctgtgattagcttaatggcgga

SEQ ID NO: 3258535 - DNA, 25 bp, Homo sapien
gacccattagggaacatagctgaga

SEQ ID NO: 3258536 - DNA, 25 bp, Homo sapien
tatgtggaactacaacagcttatgc

SEQ ID NO: 3258537 - DNA, 25 bp, Homo sapien
aatgccctgagaagcaaccctatga

SEQ ID NO: 3258538 - DNA, 25 bp, Homo sapien
tgtctaccaatcacctagtgcctct

SEQ ID NO: 3258539 - DNA, 25 bp, Homo sapien
tagtgcctctcctcaagacacaagc

SEQ ID NO: 3258540 - DNA, 25 bp, Homo sapien
tataatgccagctttacccactgtg

SEQ ID NO: 3258541 - DNA, 25 bp, Homo sapien
cagtttccaccctagctacctgggt

SEQ ID NO: 3258542 - DNA, 25 bp, Homo sapien
tcctgaagtctaagggatggtggca

SEQ ID NO: 3258543 - DNA, 25 bp, Homo sapien
tccccaaaagatgtagggtccacat

SEQ ID NO: 3258544 - DNA, 25 bp, Homo sapien
tacctgggtcattatgctcctgaag

SEQ ID NO: 3258545 - DNA, 25 bp, Homo sapien
gagattaaggtgctccaaataaggc

SEQ ID NO: 3258546 - DNA, 25 bp, Homo sapien
gcaggcctgcaccagttatagtaag

SEQ ID NO: 3258547 - DNA, 25 bp, Homo sapien
ggtgctccaaataaggcagccctcc

SEQ ID NO: 3258548 - DNA, 25 bp, Homo sapien
cagttatagtaagacaaccagagag

SEQ ID NO: 3258549 - DNA, 25 bp, Homo sapien
gggattttcccatccatatcttata

SEQ ID NO: 3258550 - DNA, 25 bp, Homo sapien
tgagctagtgtgttcctttgggagt

SEQ ID NO: 3258551 - DNA, 25 bp, Homo sapien
gcctcttccagtagcttagtaattg

SEQ ID NO: 3258552 - DNA, 25 bp, Homo sapien
tgatttcctctttccggcaattgag

SEQ ID NO: 3258553 - DNA, 25 bp, Homo sapien
tccagggacagcctacgttttccaa

SEQ ID NO: 3258554 - DNA, 25 bp, Homo sapien
aaacacttaacagccgtgtagtcag

SEQ ID NO: 3258555 - DNA, 25 bp, Homo sapien
ctaaatgacttccagggacagccta

SEQ ID NO: 3258556 - DNA, 25 bp, Homo sapien
cagccgtgtagtcagactaaatgac

SEQ ID NO: 3258557 - DNA, 25 bp, Homo sapien
tgtgatgtagccatttactaagtat

SEQ ID NO: 3258558 - DNA, 25 bp, Homo sapien
taatattctggaactgataactcac

SEQ ID NO: 3258559 - DNA, 25 bp, Homo sapien
ttcatactgataacagaagttacac

SEQ ID NO: 3258560 - DNA, 25 bp, Homo sapien
aactctgaagtagggcagatcttgg

SEQ ID NO: 3258561 - DNA, 25 bp, Homo sapien
aagtcttttcccctaggcaatctag

SEQ ID NO: 3258562 - DNA, 25 bp, Homo sapien
tgagaaacagaagtacacgtccagt

SEQ ID NO: 3258563 - DNA, 25 bp, Homo sapien
gctgcttttctacacattgcagaag

SEQ ID NO: 3258564 - DNA, 25 bp, Homo sapien
gaccatggtctgtgatctgataaca

SEQ ID NO: 3258565 - DNA, 25 bp, Homo sapien
caacagacactagtccttagtccaa

SEQ ID NO: 3258566 - DNA, 25 bp, Homo sapien
tgagtgaccacaatacgcaaaggct

SEQ ID NO: 3258567 - DNA, 25 bp, Homo sapien
ctgggagtgatgacatagttcttaa

SEQ ID NO: 3258568 - DNA, 25 bp, Homo sapien
tcctgtacaacaaaatgagtgacca

SEQ ID NO: 3258569 - DNA, 25 bp, Homo sapien
gaaatcttctctagggccacatctg

SEQ ID NO: 3258570 - DNA, 25 bp, Homo sapien
tcaagatgccgaagactctggcagc

SEQ ID NO: 3258571 - DNA, 25 bp, Homo sapien
tcacaaccagacagatcaagatgcc

SEQ ID NO: 3258572 - DNA, 25 bp, Homo sapien
taaatcgtgcaaacaggcatactgc

SEQ ID NO: 3258573 - DNA, 25 bp, Homo sapien
tgtcagtctgggtaagatccagatg

SEQ ID NO: 3258574 - DNA, 25 bp, Homo sapien
gatccagatgctccaggttaggaca

SEQ ID NO: 3258575 - DNA, 25 bp, Homo sapien
caggttaggacaaagctctaaaatc

SEQ ID NO: 3258576 - DNA, 25 bp, Homo sapien
tgaaatgtcagtctgggtaagatcc

SEQ ID NO: 3258577 - DNA, 25 bp, Homo sapien
tagcagttatgagactaaaccagga

SEQ ID NO: 3258578 - DNA, 25 bp, Homo sapien
catttttaaggaacactcaagattc

SEQ ID NO: 3258579 - DNA, 25 bp, Homo sapien
taaaactgggctttatcacttaaca

SEQ ID NO: 3258580 - DNA, 25 bp, Homo sapien
cccgcccaagtatctgttttagcag

SEQ ID NO: 3258581 - DNA, 25 bp, Homo sapien
gcagagctgtatgctaatactaagg

SEQ ID NO: 3258582 - DNA, 25 bp, Homo sapien
gctgatagcaattgattcctccgca

SEQ ID NO: 3258583 - DNA, 25 bp, Homo sapien
ccaacatatggtagaacgttatgaa

SEQ ID NO: 3258584 - DNA, 25 bp, Homo sapien
tatgaattaagccatggagtaaacg

SEQ ID NO: 3258585 - DNA, 25 bp, Homo sapien
tcccactcatgaaaagcacgacttt

SEQ ID NO: 3258586 - DNA, 25 bp, Homo sapien
gttcagtatcaagttcagttgcggg

SEQ ID NO: 3258587 - DNA, 25 bp, Homo sapien
tatcaagttcagttgcgggaccact

SEQ ID NO: 3258588 - DNA, 25 bp, Homo sapien
gttgcgggaccactataccagtcac

SEQ ID NO: 3258589 - DNA, 25 bp, Homo sapien
ggtaggtggcaaaaattttctctca

SEQ ID NO: 3258590 - DNA, 25 bp, Homo sapien
cttttgccatgcagaagcctttagt

SEQ ID NO: 3258591 - DNA, 25 bp, Homo sapien
ttcttttgccatgcagaagccttta

SEQ ID NO: 3258592 - DNA, 25 bp, Homo sapien
ttgccatgcagaagcctttagttta

SEQ ID NO: 3258593 - DNA, 25 bp, Homo sapien
tttgagccatcaccaaaatggagcc

SEQ ID NO: 3258594 - DNA, 25 bp, Homo sapien
gcagaactagtataatgaatcccca

SEQ ID NO: 3258595 - DNA, 25 bp, Homo sapien
gaaactgtgattcagagaatgtggc

SEQ ID NO: 3258596 - DNA, 25 bp, Homo sapien
ggagccataatggtatatcaccctt

SEQ ID NO: 3258597 - DNA, 25 bp, Homo sapien
aaaatctactttttgattgacctct

SEQ ID NO: 3258598 - DNA, 25 bp, Homo sapien
tctactttttgattgacctctcaga

SEQ ID NO: 3258599 - DNA, 25 bp, Homo sapien
tactttttgattgacctctcagagt

SEQ ID NO: 3258600 - DNA, 25 bp, Homo sapien
atctactttttgattgacctctcag

SEQ ID NO: 3258601 - DNA, 25 bp, Homo sapien
gaaaattgacagcattacctcagga

SEQ ID NO: 3258602 - DNA, 25 bp, Homo sapien
ctctggcccaatgaacagggtaaag

SEQ ID NO: 3258603 - DNA, 25 bp, Homo sapien
gactgcatcgacataactcttgagg

SEQ ID NO: 3258604 - DNA, 25 bp, Homo sapien
gctgagaccatttcatgcttacttg

SEQ ID NO: 3258605 - DNA, 25 bp, Homo sapien
tatccttaagctcttcataggtaaa

SEQ ID NO: 3258606 - DNA, 25 bp, Homo sapien
ttaaaaaacttctgtcgctcttcag

SEQ ID NO: 3258607 - DNA, 25 bp, Homo sapien
cctctaaggagttctgcagtatcct

SEQ ID NO: 3258608 - DNA, 25 bp, Homo sapien
cataggctaagacctctaaggagtt

SEQ ID NO: 3258609 - DNA, 25 bp, Homo sapien
tgttttgcataatttaactgttcat

SEQ ID NO: 3258610 - DNA, 25 bp, Homo sapien
gcataatttaactgttcatattcat

SEQ ID NO: 3258611 - DNA, 25 bp, Homo sapien
gtaaaagcctccaatctctctttca

SEQ ID NO: 3258612 - DNA, 25 bp, Homo sapien
gaagaaaatctcttgtaaaagcctc

SEQ ID NO: 3258613 - DNA, 25 bp, Homo sapien
tgaaataattgttattcgattgttt

SEQ ID NO: 3258614 - DNA, 25 bp, Homo sapien
taattgttattcgattgttttatgt

SEQ ID NO: 3258615 - DNA, 25 bp, Homo sapien
gttattcgattgttttatgttattg

SEQ ID NO: 3258616 - DNA, 25 bp, Homo sapien
attcgattgttttatgttattggta

SEQ ID NO: 3258617 - DNA, 25 bp, Homo sapien
acaggtgcccatcacaactcccagc

SEQ ID NO: 3258618 - DNA, 25 bp, Homo sapien
tcactgcaacctcaggttcatgcga

SEQ ID NO: 3258619 - DNA, 25 bp, Homo sapien
gtgcccatcacaactcccagctaat

SEQ ID NO: 3258620 - DNA, 25 bp, Homo sapien
actgcaacctcaggttcatgcgatt

SEQ ID NO: 3258621 - DNA, 25 bp, Homo sapien
taagcatctcggagagtttattgtc

SEQ ID NO: 3258622 - DNA, 25 bp, Homo sapien
tctggctgcgttgttgaagcaaacc

SEQ ID NO: 3258623 - DNA, 25 bp, Homo sapien
tttgaactccttgaaagtagcatac

SEQ ID NO: 3258624 - DNA, 25 bp, Homo sapien
tcaaagaggctaagcatctcggaga

SEQ ID NO: 3258625 - DNA, 25 bp, Homo sapien
tgcagaagagcacggaaatcgttgt

SEQ ID NO: 3258626 - DNA, 25 bp, Homo sapien
gaagagcacggaaatcgttgttgtt

SEQ ID NO: 3258627 - DNA, 25 bp, Homo sapien
gagcacggaaatcgttgttgttgga

SEQ ID NO: 3258628 - DNA, 25 bp, Homo sapien
gcacggaaatcgttgttgttggaaa

SEQ ID NO: 3258629 - DNA, 25 bp, Homo sapien
gggatataccctcttgcttaatggc

SEQ ID NO: 3258630 - DNA, 25 bp, Homo sapien
taatttcaggtgatcctaggctacc

SEQ ID NO: 3258631 - DNA, 25 bp, Homo sapien
tgcatactgcactcaaatggagagc

SEQ ID NO: 3258632 - DNA, 25 bp, Homo sapien
tcaaatactctcaaccaccaggaag

SEQ ID NO: 3258633 - DNA, 25 bp, Homo sapien
ggacgggaacaactactcggtgcag

SEQ ID NO: 3258634 - DNA, 25 bp, Homo sapien
cacccagggcttcgaggaggtaggg

SEQ ID NO: 3258635 - DNA, 25 bp, Homo sapien
tgacagctgcgcaggcggctactcg

SEQ ID NO: 3258636 - DNA, 25 bp, Homo sapien
tagggccgctctccttagaggcagc

SEQ ID NO: 3258637 - DNA, 25 bp, Homo sapien
agtagagccccaccagctgcttcat

SEQ ID NO: 3258638 - DNA, 25 bp, Homo sapien
gcagtagagccccaccagctgcttc

SEQ ID NO: 3258639 - DNA, 25 bp, Homo sapien
cttgtcgcagtagagccccaccagc

SEQ ID NO: 3258640 - DNA, 25 bp, Homo sapien
tgtcgcagtagagccccaccagctg

SEQ ID NO: 3258641 - DNA, 25 bp, Homo sapien
cagtgtggggcggtgaagacgtcca

SEQ ID NO: 3258642 - DNA, 25 bp, Homo sapien
gggcggtgaagacgtccacttcttc

SEQ ID NO: 3258643 - DNA, 25 bp, Homo sapien
cggtgaagacgtccacttcttcagg

SEQ ID NO: 3258644 - DNA, 25 bp, Homo sapien
gtgaagacgtccacttcttcaggaa

SEQ ID NO: 3258645 - DNA, 25 bp, Homo sapien
gcggcgcgcccccttgcgcatgcgc

SEQ ID NO: 3258646 - DNA, 25 bp, Homo sapien
cgccgcctctccatagacaccctcg

SEQ ID NO: 3258647 - DNA, 25 bp, Homo sapien
cgcgcccccttgcgcatgcgcccgc

SEQ ID NO: 3258648 - DNA, 25 bp, Homo sapien
ggcgcgcccccttgcgcatgcgccc

SEQ ID NO: 3258649 - DNA, 25 bp, Homo sapien
ggaacagcagaatagtgaacaagtt

SEQ ID NO: 3258650 - DNA, 25 bp, Homo sapien
cagtgtgcacaattgttactaccag

SEQ ID NO: 3258651 - DNA, 25 bp, Homo sapien
gacctagtgtgcagggtaagcaatg

SEQ ID NO: 3258652 - DNA, 25 bp, Homo sapien
tcttgttgctgacaaggaacagcag

SEQ ID NO: 3258653 - DNA, 25 bp, Homo sapien
tccttgcaccaaaccagctagtcag

SEQ ID NO: 3258654 - DNA, 25 bp, Homo sapien
tacagacctagtatgggccctactt

SEQ ID NO: 3258655 - DNA, 25 bp, Homo sapien
taattcctattgaacaggacccagg

SEQ ID NO: 3258656 - DNA, 25 bp, Homo sapien
aggacccaggcactcttatgtgtca

SEQ ID NO: 3258657 - DNA, 25 bp, Homo sapien
gatcacaagtgaactgtccaagacc

SEQ ID NO: 3258658 - DNA, 25 bp, Homo sapien
aatccgatgattagtgtacctgcac

SEQ ID NO: 3258659 - DNA, 25 bp, Homo sapien
tggctgttggtaggaatccgatgat

SEQ ID NO: 3258660 - DNA, 25 bp, Homo sapien
caactgagacagatttggctgttgg

SEQ ID NO: 3258661 - DNA, 25 bp, Homo sapien
caaactgtggcattatgagaagcaa

SEQ ID NO: 3258662 - DNA, 25 bp, Homo sapien
gaaaaatgccacagcaatttaatca

SEQ ID NO: 3258663 - DNA, 25 bp, Homo sapien
gataaataaaacatgagttggccag

SEQ ID NO: 3258664 - DNA, 25 bp, Homo sapien
gatggtcaatttatcacgcctgtaa

SEQ ID NO: 3258665 - DNA, 25 bp, Homo sapien
ccaacagccaacatcgtacaagtca

SEQ ID NO: 3258666 - DNA, 25 bp, Homo sapien
aaccaacagccaacatcgtacaagt

SEQ ID NO: 3258667 - DNA, 25 bp, Homo sapien
caacagccaacatcgtacaagtcac

SEQ ID NO: 3258668 - DNA, 25 bp, Homo sapien
aaaccaacagccaacatcgtacaag

SEQ ID NO: 3258669 - DNA, 25 bp, Homo sapien
gatatgactacagagcaacccagct

SEQ ID NO: 3258670 - DNA, 25 bp, Homo sapien
taaattagctgtctgacctttggca

SEQ ID NO: 3258671 - DNA, 25 bp, Homo sapien
tctagttgaatacgcagaaatgcta

SEQ ID NO: 3258672 - DNA, 25 bp, Homo sapien
ccagaaaggaggttagaggagatat

SEQ ID NO: 3258673 - DNA, 25 bp, Homo sapien
taaaccactgaaagcatacatgcac

SEQ ID NO: 3258674 - DNA, 25 bp, Homo sapien
tcacaaaggaacacaagaggcttaa

SEQ ID NO: 3258675 - DNA, 25 bp, Homo sapien
aaaaagtagtcacgaatggcccaat

SEQ ID NO: 3258676 - DNA, 25 bp, Homo sapien
agggaccctaggtaccttcaggatg

SEQ ID NO: 3258677 - DNA, 25 bp, Homo sapien
cttggagtgtatgaaccagcgtcct

SEQ ID NO: 3258678 - DNA, 25 bp, Homo sapien
gagtgtatgaaccagcgtcctggcc

SEQ ID NO: 3258679 - DNA, 25 bp, Homo sapien
gtgtatgaaccagcgtcctggcccc

SEQ ID NO: 3258680 - DNA, 25 bp, Homo sapien
tggagtgtatgaaccagcgtcctgg

SEQ ID NO: 3258681 - DNA, 25 bp, Homo sapien
ggcaggagcgattcagcgccactac

SEQ ID NO: 3258682 - DNA, 25 bp, Homo sapien
agcagtctcttttcgctcccatggc

SEQ ID NO: 3258683 - DNA, 25 bp, Homo sapien
actctgtccggactagccctgtccg

SEQ ID NO: 3258684 - DNA, 25 bp, Homo sapien
tacctgcttcgcctggttgtggtgt

SEQ ID NO: 3258685 - DNA, 25 bp, Homo sapien
caggcgcctagggagtcgttaccgc

SEQ ID NO: 3258686 - DNA, 25 bp, Homo sapien
cgagaggcggaaatcccgcgagact

SEQ ID NO: 3258687 - DNA, 25 bp, Homo sapien
ggcattcaaataactcccgcgagag

SEQ ID NO: 3258688 - DNA, 25 bp, Homo sapien
tcagaggcagagttctccgcggtgt

SEQ ID NO: 3258689 - DNA, 25 bp, Homo sapien
cgcagagggccgatccagttctttt

SEQ ID NO: 3258690 - DNA, 25 bp, Homo sapien
gccggaagtggtgttgcggagggaa

SEQ ID NO: 3258691 - DNA, 25 bp, Homo sapien
ggctggaggtgaggcgaaagaaggg

SEQ ID NO: 3258692 - DNA, 25 bp, Homo sapien
gaatttgtgaggtaggccggaagtg

SEQ ID NO: 3258693 - DNA, 25 bp, Homo sapien
ggttcgttgcgggaaatacagtctg

SEQ ID NO: 3258694 - DNA, 25 bp, Homo sapien
tccgctaaagcgaagcattccaggg

SEQ ID NO: 3258695 - DNA, 25 bp, Homo sapien
ccccgtatgaattgagggaaggtga

SEQ ID NO: 3258696 - DNA, 25 bp, Homo sapien
caatccgggcctgaagggcgattat

SEQ ID NO: 3258697 - DNA, 25 bp, Homo sapien
tattttcagaagatgatacagcgca

SEQ ID NO: 3258698 - DNA, 25 bp, Homo sapien
acaagctcggcgccattaaatgctt

SEQ ID NO: 3258699 - DNA, 25 bp, Homo sapien
aagctcggcgccattaaatgctttt

SEQ ID NO: 3258700 - DNA, 25 bp, Homo sapien
gtattttcagaagatgatacagcgc

SEQ ID NO: 3258701 - DNA, 25 bp, Homo sapien
tacttgatcgtgttcgggtatgaac

SEQ ID NO: 3258702 - DNA, 25 bp, Homo sapien
tggaatcacactggtgtacttgatc

SEQ ID NO: 3258703 - DNA, 25 bp, Homo sapien
cacactggtgtacttgatcgtgttc

SEQ ID NO: 3258704 - DNA, 25 bp, Homo sapien
actggtgtacttgatcgtgttcggg

SEQ ID NO: 3258705 - DNA, 25 bp, Homo sapien
tactcaaggtaccaacacagcaaag

SEQ ID NO: 3258706 - DNA, 25 bp, Homo sapien
cagcaaaggcacaaaatgtctctat

SEQ ID NO: 3258707 - DNA, 25 bp, Homo sapien
acccattagtgaggcatgaaatcaa

SEQ ID NO: 3258708 - DNA, 25 bp, Homo sapien
tttttcatggtatatgtgagaccca

SEQ ID NO: 3258709 - DNA, 25 bp, Homo sapien
gctcattgaatagccggcttcttga

SEQ ID NO: 3258710 - DNA, 25 bp, Homo sapien
aaggaagctcattgaatagccggct

SEQ ID NO: 3258711 - DNA, 25 bp, Homo sapien
aatctcatggaggtattgaaaaatg

SEQ ID NO: 3258712 - DNA, 25 bp, Homo sapien
gaatagccggcttcttgaaacattt

SEQ ID NO: 3258713 - DNA, 25 bp, Homo sapien
cagtcattcccaagagtaattatta

SEQ ID NO: 3258714 - DNA, 25 bp, Homo sapien
tgtgtactcccttatcccactgggt

SEQ ID NO: 3258715 - DNA, 25 bp, Homo sapien
tcacgttgctgatgcttaagcaatg

SEQ ID NO: 3258716 - DNA, 25 bp, Homo sapien
tgtaaccatccagaaacggcattga

SEQ ID NO: 3258717 - DNA, 25 bp, Homo sapien
tcttctgatgatgactgacctctcc

SEQ ID NO: 3258718 - DNA, 25 bp, Homo sapien
tgatgaatccgcaaatctggagggc

SEQ ID NO: 3258719 - DNA, 25 bp, Homo sapien
tctggagggccgaacatgcttaact

SEQ ID NO: 3258720 - DNA, 25 bp, Homo sapien
cgtggacagcggtcaagattagcct

SEQ ID NO: 3258721 - DNA, 25 bp, Homo sapien
tgtctttccttagtccctgttctgg

SEQ ID NO: 3258722 - DNA, 25 bp, Homo sapien
cctgaggagtcggttttgattctgt

SEQ ID NO: 3258723 - DNA, 25 bp, Homo sapien
gcctgaggagtcggttttgattctg

SEQ ID NO: 3258724 - DNA, 25 bp, Homo sapien
ctgaggagtcggttttgattctgtt

SEQ ID NO: 3258725 - DNA, 25 bp, Homo sapien
tttaacagcaaagaggacagtgggc

SEQ ID NO: 3258726 - DNA, 25 bp, Homo sapien
gggcagcattgcaggttccacgtca

SEQ ID NO: 3258727 - DNA, 25 bp, Homo sapien
cacaggatgttgtgaggcctctgct

SEQ ID NO: 3258728 - DNA, 25 bp, Homo sapien
gcatttttacctagatgccgaggga

SEQ ID NO: 3258729 - DNA, 25 bp, Homo sapien
agtactgtgttgaatcagactcagt

SEQ ID NO: 3258730 - DNA, 25 bp, Homo sapien
gtactgtgttgaatcagactcagtg

SEQ ID NO: 3258731 - DNA, 25 bp, Homo sapien
ctgtgttgaatcagactcagtgaaa

SEQ ID NO: 3258732 - DNA, 25 bp, Homo sapien
tactgtgttgaatcagactcagtga

SEQ ID NO: 3258733 - DNA, 25 bp, Homo sapien
tatgcctgtaggatccgttcttcca

SEQ ID NO: 3258734 - DNA, 25 bp, Homo sapien
atgcctgtaggatccgttcttccat

SEQ ID NO: 3258735 - DNA, 25 bp, Homo sapien
ctatgcctgtaggatccgttcttcc

SEQ ID NO: 3258736 - DNA, 25 bp, Homo sapien
cctatggtgctctcgatatataagg

SEQ ID NO: 3258737 - DNA, 25 bp, Homo sapien
tctgccagtttttctgccagttttt

SEQ ID NO: 3258738 - DNA, 25 bp, Homo sapien
gccagtttttcttgagcaatgtcac

SEQ ID NO: 3258739 - DNA, 25 bp, Homo sapien
tggggcttgcctatggtgctctcga

SEQ ID NO: 3258740 - DNA, 25 bp, Homo sapien
tgtctgtccttttcacgtggccaac

SEQ ID NO: 3258741 - DNA, 25 bp, Homo sapien
ggtgactgttacacacaagctcatt

SEQ ID NO: 3258742 - DNA, 25 bp, Homo sapien
gtggaaattgattacggacttcatc

SEQ ID NO: 3258743 - DNA, 25 bp, Homo sapien
attgattacggacttcatctcatcc

SEQ ID NO: 3258744 - DNA, 25 bp, Homo sapien
aaattgattacggacttcatctcat

SEQ ID NO: 3258745 - DNA, 25 bp, Homo sapien
ggaaattgattacggacttcatctc

SEQ ID NO: 3258746 - DNA, 25 bp, Homo sapien
gcagggaggggcaatttcctgcctt

SEQ ID NO: 3258747 - DNA, 25 bp, Homo sapien
agcagggaggggcaatttcctgcct

SEQ ID NO: 3258748 - DNA, 25 bp, Homo sapien
cagggaggggcaatttcctgcctta

SEQ ID NO: 3258749 - DNA, 25 bp, Homo sapien
agggaggggcaatttcctgccttat

SEQ ID NO: 3258750 - DNA, 25 bp, Homo sapien
tttcagtacctcgttttccatgtgg

SEQ ID NO: 3258751 - DNA, 25 bp, Homo sapien
tgctggttacccaggacacacatgg

SEQ ID NO: 3258752 - DNA, 25 bp, Homo sapien
ttttcagtacctcgttttccatgtg

SEQ ID NO: 3258753 - DNA, 25 bp, Homo sapien
tggttacccaggacacacatggaga

SEQ ID NO: 3258754 - DNA, 25 bp, Homo sapien
tactgaaactgtttggaacttgtat

SEQ ID NO: 3258755 - DNA, 25 bp, Homo sapien
atttactgaaactgtttggaacttg

SEQ ID NO: 3258756 - DNA, 25 bp, Homo sapien
acatccagccataatagttacttat

SEQ ID NO: 3258757 - DNA, 25 bp, Homo sapien
cataatagttacttataatgaggga

SEQ ID NO: 3258758 - DNA, 25 bp, Homo sapien
ggcgcgatgcgtcaagtacactgaa

SEQ ID NO: 3258759 - DNA, 25 bp, Homo sapien
tgtaaccagccacggaactctgagg

SEQ ID NO: 3258760 - DNA, 25 bp, Homo sapien
tgcacacacgtatagaagcaggcag

SEQ ID NO: 3258761 - DNA, 25 bp, Homo sapien
tgaacccagagcttagccactgatg

SEQ ID NO: 3258762 - DNA, 25 bp, Homo sapien
accgggcatcttccgtggcgggtca

SEQ ID NO: 3258763 - DNA, 25 bp, Homo sapien
gctctgctgcgtagccggtgaacac

SEQ ID NO: 3258764 - DNA, 25 bp, Homo sapien
cttcagggacggaatagaactcgca

SEQ ID NO: 3258765 - DNA, 25 bp, Homo sapien
aactcgcagatgcagggtgtcgctg

SEQ ID NO: 3258766 - DNA, 25 bp, Homo sapien
cccagtgtctggtgatagtcaggac

SEQ ID NO: 3258767 - DNA, 25 bp, Homo sapien
tgtcagagctgacagcatctcggta

SEQ ID NO: 3258768 - DNA, 25 bp, Homo sapien
catctcggtactgtgggagggagcc

SEQ ID NO: 3258769 - DNA, 25 bp, Homo sapien
tcaacaaagcgtttgctgactgtca

SEQ ID NO: 3258770 - DNA, 25 bp, Homo sapien
tcacttctgtgcccacaaggaccat

SEQ ID NO: 3258771 - DNA, 25 bp, Homo sapien
gttctaatgatcacttctgtgccca

SEQ ID NO: 3258772 - DNA, 25 bp, Homo sapien
atgatcacttctgtgcccacaagga

SEQ ID NO: 3258773 - DNA, 25 bp, Homo sapien
gatcacttctgtgcccacaaggacc

SEQ ID NO: 3258774 - DNA, 25 bp, Homo sapien
agcaaggtcagtggaacccactgct

SEQ ID NO: 3258775 - DNA, 25 bp, Homo sapien
gtggaacccactgctcaaaacacac

SEQ ID NO: 3258776 - DNA, 25 bp, Homo sapien
gtcagtggaacccactgctcaaaac

SEQ ID NO: 3258777 - DNA, 25 bp, Homo sapien
caaggtcagtggaacccactgctca

SEQ ID NO: 3258778 - DNA, 25 bp, Homo sapien
tgggacagtcgtaacaatctacatg

SEQ ID NO: 3258779 - DNA, 25 bp, Homo sapien
tatagaccccttactatgtggcagg

SEQ ID NO: 3258780 - DNA, 25 bp, Homo sapien
cactctgactttggctaccaggaac

SEQ ID NO: 3258781 - DNA, 25 bp, Homo sapien
tcaatcttagatacctgggacagtc

SEQ ID NO: 3258782 - DNA, 25 bp, Homo sapien
tgagatctgagccagtcgctgtggt

SEQ ID NO: 3258783 - DNA, 25 bp, Homo sapien
tcatacatgactcagcatacctgct

SEQ ID NO: 3258784 - DNA, 25 bp, Homo sapien
cgctgtggttgttttagctccttga

SEQ ID NO: 3258785 - DNA, 25 bp, Homo sapien
tcaatgccagagacggaagcctttt

SEQ ID NO: 3258786 - DNA, 25 bp, Homo sapien
gctctgatgatggttaaggcacgca

SEQ ID NO: 3258787 - DNA, 25 bp, Homo sapien
tacctagtttagatgctgagaccct

SEQ ID NO: 3258788 - DNA, 25 bp, Homo sapien
tccttggtgcaacgaagccagaaga

SEQ ID NO: 3258789 - DNA, 25 bp, Homo sapien
caacaggatcagctatagtctctca

SEQ ID NO: 3258790 - DNA, 25 bp, Homo sapien
tattgagggtacagaagtccttggc

SEQ ID NO: 3258791 - DNA, 25 bp, Homo sapien
attgagggtacagaagtccttggca

SEQ ID NO: 3258792 - DNA, 25 bp, Homo sapien
aataaagagcagtctgtaaaatcga

SEQ ID NO: 3258793 - DNA, 25 bp, Homo sapien
taaagagcagtctgtaaaatcgagc

SEQ ID NO: 3258794 - DNA, 25 bp, Homo sapien
ggtgctgtgcactttcctctatcct

SEQ ID NO: 3258795 - DNA, 25 bp, Homo sapien
caatccctggagactagaaccgggt

SEQ ID NO: 3258796 - DNA, 25 bp, Homo sapien
ggctctatgctcctgcagagtcccg

SEQ ID NO: 3258797 - DNA, 25 bp, Homo sapien
cttctccaggcacacgcaatgttca

SEQ ID NO: 3258798 - DNA, 25 bp, Homo sapien
aactcccctcttgacttgaagtgag

SEQ ID NO: 3258799 - DNA, 25 bp, Homo sapien
ggaaaggtcgagctttctgagtggc

SEQ ID NO: 3258800 - DNA, 25 bp, Homo sapien
tcttttttcatgagtctcttgaaac

SEQ ID NO: 3258801 - DNA, 25 bp, Homo sapien
gagtggctttgtgaaaactcccctc

SEQ ID NO: 3258802 - DNA, 25 bp, Homo sapien
gagatcagccacctgccgagtggcc

SEQ ID NO: 3258803 - DNA, 25 bp, Homo sapien
cacctgccgagtggccctaagtgag

SEQ ID NO: 3258804 - DNA, 25 bp, Homo sapien
ctaagtgaggaaagcagccacccca

SEQ ID NO: 3258805 - DNA, 25 bp, Homo sapien
tttggatattggagatcagccacct

SEQ ID NO: 3258806 - DNA, 25 bp, Homo sapien
gagatgaatgaggttctttgaacag

SEQ ID NO: 3258807 - DNA, 25 bp, Homo sapien
tttgagatgaatgaggttctttgaa

SEQ ID NO: 3258808 - DNA, 25 bp, Homo sapien
ctttgagatgaatgaggttctttga

SEQ ID NO: 3258809 - DNA, 25 bp, Homo sapien
atgaatgaggttctttgaacagggc

SEQ ID NO: 3258810 - DNA, 25 bp, Homo sapien
agcttccagggattcccagtgtcca

SEQ ID NO: 3258811 - DNA, 25 bp, Homo sapien
tcagcttccagggattcccagtgtc

SEQ ID NO: 3258812 - DNA, 25 bp, Homo sapien
cagcttccagggattcccagtgtcc

SEQ ID NO: 3258813 - DNA, 25 bp, Homo sapien
taatcaatgagctgagacccctgtc

SEQ ID NO: 3258814 - DNA, 25 bp, Homo sapien
ggtatccccagacgatacccattac

SEQ ID NO: 3258815 - DNA, 25 bp, Homo sapien
tacatcaaggtctgggtatccccag

SEQ ID NO: 3258816 - DNA, 25 bp, Homo sapien
gacccctgtctattgtccttaaaca

SEQ ID NO: 3258817 - DNA, 25 bp, Homo sapien
gatgccttgggacttggcttgcatg

SEQ ID NO: 3258818 - DNA, 25 bp, Homo sapien
tgtctcgttcagcataaggtcctct

SEQ ID NO: 3258819 - DNA, 25 bp, Homo sapien
tcgggtacctggtctgaagaccctc

SEQ ID NO: 3258820 - DNA, 25 bp, Homo sapien
cagcttccgcagagcaaaaagtgcc

SEQ ID NO: 3258821 - DNA, 25 bp, Homo sapien
aatggcagagtctgaccttcggacc

SEQ ID NO: 3258822 - DNA, 25 bp, Homo sapien
tggcagagtctgaccttcggacctt

SEQ ID NO: 3258823 - DNA, 25 bp, Homo sapien
gcagagtctgaccttcggaccttcg

SEQ ID NO: 3258824 - DNA, 25 bp, Homo sapien
agagtctgaccttcggaccttcggg

SEQ ID NO: 3258825 - DNA, 25 bp, Homo sapien
tcgttgcactcactaagcacaaaag

SEQ ID NO: 3258826 - DNA, 25 bp, Homo sapien
ggaaacagcctctgaacatcgcatc

SEQ ID NO: 3258827 - DNA, 25 bp, Homo sapien
tacagagggacttacgacatgacat

SEQ ID NO: 3258828 - DNA, 25 bp, Homo sapien
tgtgtgggccatggaaatacatgct

SEQ ID NO: 3258829 - DNA, 25 bp, Homo sapien
gacgtgtcctgcactatgctgagga

SEQ ID NO: 3258830 - DNA, 25 bp, Homo sapien
cccaaatagagtggagctgactagc

SEQ ID NO: 3258831 - DNA, 25 bp, Homo sapien
tgtgagcgcagattccgggcaactt

SEQ ID NO: 3258832 - DNA, 25 bp, Homo sapien
ttcatggtccaattgagtgcactca

SEQ ID NO: 3258833 - DNA, 25 bp, Homo sapien
cacctgagcagccagtaggaggaag

SEQ ID NO: 3258834 - DNA, 25 bp, Homo sapien
gcagggtgaggctacagatcttcat

SEQ ID NO: 3258835 - DNA, 25 bp, Homo sapien
aggagcacctgagcagccagtagga

SEQ ID NO: 3258836 - DNA, 25 bp, Homo sapien
ttctgagaccactttgctgtgaagt

SEQ ID NO: 3258837 - DNA, 25 bp, Homo sapien
cccaggcagtgcgagtgaattgcag

SEQ ID NO: 3258838 - DNA, 25 bp, Homo sapien
cggatccagtgcaatcccaggcagt

SEQ ID NO: 3258839 - DNA, 25 bp, Homo sapien
tataacactcactgggtttttacaa

SEQ ID NO: 3258840 - DNA, 25 bp, Homo sapien
tgtggcacgttactcacagctcctc

SEQ ID NO: 3258841 - DNA, 25 bp, Homo sapien
ccttttccctcatcacatccgctct

SEQ ID NO: 3258842 - DNA, 25 bp, Homo sapien
tctccttttccctcatcacatccgc

SEQ ID NO: 3258843 - DNA, 25 bp, Homo sapien
ctgagttctccttttccctcatcac

SEQ ID NO: 3258844 - DNA, 25 bp, Homo sapien
gagttctccttttccctcatcacat

SEQ ID NO: 3258845 - DNA, 25 bp, Homo sapien
ggacctagagagtctcccttttgga

SEQ ID NO: 3258846 - DNA, 25 bp, Homo sapien
aacagttgctccctttgaaagctga

SEQ ID NO: 3258847 - DNA, 25 bp, Homo sapien
tgtgctacaaagagcaacagttgct

SEQ ID NO: 3258848 - DNA, 25 bp, Homo sapien
tgagagtcacgaggcacattggctt

SEQ ID NO: 3258849 - DNA, 25 bp, Homo sapien
tgagaacgttggattgaaagcggca

SEQ ID NO: 3258850 - DNA, 25 bp, Homo sapien
tcatagaaggctcagatcaacaaag

SEQ ID NO: 3258851 - DNA, 25 bp, Homo sapien
gaatttgggccgttgcatctgatta

SEQ ID NO: 3258852 - DNA, 25 bp, Homo sapien
tctgcaaactccagaaaggaaggtt

SEQ ID NO: 3258853 - DNA, 25 bp, Homo sapien
tcagcagcgaaagcctggcacatgc

SEQ ID NO: 3258854 - DNA, 25 bp, Homo sapien
gacgcatagtgcaggaatctctccc

SEQ ID NO: 3258855 - DNA, 25 bp, Homo sapien
tgtgttgcggcagtcgacacgaagc

SEQ ID NO: 3258856 - DNA, 25 bp, Homo sapien
gtcacctgctgcatatgggcctggg

SEQ ID NO: 3258857 - DNA, 25 bp, Homo sapien
atactccgataaacttgcttgcaac

SEQ ID NO: 3258858 - DNA, 25 bp, Homo sapien
ggcgatactccgataaacttgcttg

SEQ ID NO: 3258859 - DNA, 25 bp, Homo sapien
gatactccgataaacttgcttgcaa

SEQ ID NO: 3258860 - DNA, 25 bp, Homo sapien
cgatactccgataaacttgcttgca

SEQ ID NO: 3258861 - DNA, 25 bp, Homo sapien
cacaagtgggacgagtcacccttta

SEQ ID NO: 3258862 - DNA, 25 bp, Homo sapien
agagagaacacaagtgggacgagtc

SEQ ID NO: 3258863 - DNA, 25 bp, Homo sapien
tcaccctttaaagggtgctgcacaa

SEQ ID NO: 3258864 - DNA, 25 bp, Homo sapien
gggtgctgcacaaaagactctttct

SEQ ID NO: 3258865 - DNA, 25 bp, Homo sapien
tgtcccgccatcaccgtggccacag

SEQ ID NO: 3258866 - DNA, 25 bp, Homo sapien
tattgcatgccttacaattgcacca

SEQ ID NO: 3258867 - DNA, 25 bp, Homo sapien
gccacagtgctgcaatgttcacttc

SEQ ID NO: 3258868 - DNA, 25 bp, Homo sapien
atcaccgtggccacaggccacagtg

SEQ ID NO: 3258869 - DNA, 25 bp, Homo sapien
ccttgaatagtgatggaccatggac

SEQ ID NO: 3258870 - DNA, 25 bp, Homo sapien
gatactcatgttagctgcactccaa

SEQ ID NO: 3258871 - DNA, 25 bp, Homo sapien
tgagtcactacgttgccactggcgt

SEQ ID NO: 3258872 - DNA, 25 bp, Homo sapien
gaatttgtcagatggagttacgcag

SEQ ID NO: 3258873 - DNA, 25 bp, Homo sapien
tatctaagaatctggccaagcgcag

SEQ ID NO: 3258874 - DNA, 25 bp, Homo sapien
gctgtttatgtagcattccccggga

SEQ ID NO: 3258875 - DNA, 25 bp, Homo sapien
tctaagtggctctctgggtgaacca

SEQ ID NO: 3258876 - DNA, 25 bp, Homo sapien
tatgcagccagaacctacacaggtg

SEQ ID NO: 3258877 - DNA, 25 bp, Homo sapien
ggctaatatccagagcccagttggt

SEQ ID NO: 3258878 - DNA, 25 bp, Homo sapien
tgaaggaggcaccaattcgggctca

SEQ ID NO: 3258879 - DNA, 25 bp, Homo sapien
tcaatggaagctaagtggagctggc

SEQ ID NO: 3258880 - DNA, 25 bp, Homo sapien
cagaaggtatcatgaggtgtcggct

SEQ ID NO: 3258881 - DNA, 25 bp, Homo sapien
ccttttgcatctgagacatcactgt

SEQ ID NO: 3258882 - DNA, 25 bp, Homo sapien
catctgagacatcactgtggggagc

SEQ ID NO: 3258883 - DNA, 25 bp, Homo sapien
cgggctcgggggagcactggcgggc

SEQ ID NO: 3258884 - DNA, 25 bp, Homo sapien
tttgcatctgagacatcactgtggg

SEQ ID NO: 3258885 - DNA, 25 bp, Homo sapien
cataacaggattgtgaataccatat

SEQ ID NO: 3258886 - DNA, 25 bp, Homo sapien
tgtcataacaggattgtgaatacca

SEQ ID NO: 3258887 - DNA, 25 bp, Homo sapien
aacaggattgtgaataccatataca

SEQ ID NO: 3258888 - DNA, 25 bp, Homo sapien
gtcataacaggattgtgaataccat

SEQ ID NO: 3258889 - DNA, 25 bp, Homo sapien
tctaacacggatactgacagtgcaa

SEQ ID NO: 3258890 - DNA, 25 bp, Homo sapien
ggaaagacccatgttgaaagataag

SEQ ID NO: 3258891 - DNA, 25 bp, Homo sapien
cataaagtgaaatgccaggtccccg

SEQ ID NO: 3258892 - DNA, 25 bp, Homo sapien
tccccgagagagaggaactgcaaac

SEQ ID NO: 3258893 - DNA, 25 bp, Homo sapien
ctgaacagaagtgacccaactacta

SEQ ID NO: 3258894 - DNA, 25 bp, Homo sapien
actctttgaagacagcaccacctag

SEQ ID NO: 3258895 - DNA, 25 bp, Homo sapien
actttaacctcatcagaactcatct

SEQ ID NO: 3258896 - DNA, 25 bp, Homo sapien
atcaactttaacctcatcagaactc

SEQ ID NO: 3258897 - DNA, 25 bp, Homo sapien
tttgaagacagcaccacctagaaaa

SEQ ID NO: 3258898 - DNA, 25 bp, Homo sapien
cgtcctccgaatccattcgacgata

SEQ ID NO: 3258899 - DNA, 25 bp, Homo sapien
atagtacttagccagttttaccgca

SEQ ID NO: 3258900 - DNA, 25 bp, Homo sapien
aaatacagtagcttttcctatgcca

SEQ ID NO: 3258901 - DNA, 25 bp, Homo sapien
gtagcttttcctatgccaaaccaaa

SEQ ID NO: 3258902 - DNA, 25 bp, Homo sapien
gggtcgataatgtagctacacagaa

SEQ ID NO: 3258903 - DNA, 25 bp, Homo sapien
tagctacacagaaagacatcaacag

SEQ ID NO: 3258904 - DNA, 25 bp, Homo sapien
ggccacaggtttgcacgatgccact

SEQ ID NO: 3258905 - DNA, 25 bp, Homo sapien
agcagtatctagagcggtggccaca

SEQ ID NO: 3258906 - DNA, 25 bp, Homo sapien
acatcaatgtcctttcacttacttc

SEQ ID NO: 3258907 - DNA, 25 bp, Homo sapien
aagccccagaagtcttggtcctgca

SEQ ID NO: 3258908 - DNA, 25 bp, Homo sapien
gaagtcttggtcctgcacatcaatg

SEQ ID NO: 3258909 - DNA, 25 bp, Homo sapien
atggaagaactgcatatggcaaagg

SEQ ID NO: 3258910 - DNA, 25 bp, Homo sapien
tcgatccactgcagataatgttcaa

SEQ ID NO: 3258911 - DNA, 25 bp, Homo sapien
cctattattgttctcccatacttct

SEQ ID NO: 3258912 - DNA, 25 bp, Homo sapien
atcctattattgttctcccatactt

SEQ ID NO: 3258913 - DNA, 25 bp, Homo sapien
tcctattattgttctcccatacttc

SEQ ID NO: 3258914 - DNA, 25 bp, Homo sapien
ctcaataataacagaggaagtattg

SEQ ID NO: 3258915 - DNA, 25 bp, Homo sapien
ccagagaagctagaatcctagttac

SEQ ID NO: 3258916 - DNA, 25 bp, Homo sapien
taacagaggaagtattgtttgtgat

SEQ ID NO: 3258917 - DNA, 25 bp, Homo sapien
gaagctagaatcctagttactctct

SEQ ID NO: 3258918 - DNA, 25 bp, Homo sapien
ccatgatgttggtctcactgagaaa

SEQ ID NO: 3258919 - DNA, 25 bp, Homo sapien
cagagcctggcaactcagtcaatgg

SEQ ID NO: 3258920 - DNA, 25 bp, Homo sapien
tgatcagaggcatagcgagggtcct

SEQ ID NO: 3258921 - DNA, 25 bp, Homo sapien
tacaacacaagcaaagacgagtcct

SEQ ID NO: 3258922 - DNA, 25 bp, Homo sapien
tgctgtcaaaccagcagggaaaatg

SEQ ID NO: 3258923 - DNA, 25 bp, Homo sapien
tctgtgaaagggaccaatgtacctt

SEQ ID NO: 3258924 - DNA, 25 bp, Homo sapien
gatgaggtctgcacttagagaagta

SEQ ID NO: 3258925 - DNA, 25 bp, Homo sapien
caatgggaagatgtgtagagaagcc

SEQ ID NO: 3258926 - DNA, 25 bp, Homo sapien
tcttgacgctttggtatagagtgct

SEQ ID NO: 3258927 - DNA, 25 bp, Homo sapien
tgcgttgaagtatcttgacgctttg

SEQ ID NO: 3258928 - DNA, 25 bp, Homo sapien
tccctgtgcgttgaagtatcttgac

SEQ ID NO: 3258929 - DNA, 25 bp, Homo sapien
caacaatccattccctgtgcgttga

SEQ ID NO: 3258930 - DNA, 25 bp, Homo sapien
taacctgaatggtttagacaggagg

SEQ ID NO: 3258931 - DNA, 25 bp, Homo sapien
ccaacaatgtgtactttctatgcct

SEQ ID NO: 3258932 - DNA, 25 bp, Homo sapien
gccccgcaagagtggttaacctgaa

SEQ ID NO: 3258933 - DNA, 25 bp, Homo sapien
cattggatacatatcctaaagctgt

SEQ ID NO: 3258934 - DNA, 25 bp, Homo sapien
taggaaggactcgttgctggtgaat

SEQ ID NO: 3258935 - DNA, 25 bp, Homo sapien
tgttctataggaaggactcgttgct

SEQ ID NO: 3258936 - DNA, 25 bp, Homo sapien
gactcgttgctggtgaattgtttta

SEQ ID NO: 3258937 - DNA, 25 bp, Homo sapien
cagtgattgttctataggaaggact

SEQ ID NO: 3258938 - DNA, 25 bp, Homo sapien
gccagttaaggccaagtagtcacca

SEQ ID NO: 3258939 - DNA, 25 bp, Homo sapien
tgtgagggatagtgccaagacaccc

SEQ ID NO: 3258940 - DNA, 25 bp, Homo sapien
tgagaaaaccaaggacccatagaga

SEQ ID NO: 3258941 - DNA, 25 bp, Homo sapien
aagagcccttcctgagtgccagaga

SEQ ID NO: 3258942 - DNA, 25 bp, Homo sapien
aagattcactcctgcgggggattta

SEQ ID NO: 3258943 - DNA, 25 bp, Homo sapien
gcttttgcttctagatcatatgcaa

SEQ ID NO: 3258944 - DNA, 25 bp, Homo sapien
ataaaagattcactcctgcggggga

SEQ ID NO: 3258945 - DNA, 25 bp, Homo sapien
gcttctagatcatatgcaaatgata

SEQ ID NO: 3258946 - DNA, 25 bp, Homo sapien
gtagctgtcataattcattctgtct

SEQ ID NO: 3258947 - DNA, 25 bp, Homo sapien
caagtagctgtcataattcattctg

SEQ ID NO: 3258948 - DNA, 25 bp, Homo sapien
tgagccaagtagctgtcataattca

SEQ ID NO: 3258949 - DNA, 25 bp, Homo sapien
gccaagtagctgtcataattcattc

SEQ ID NO: 3258950 - DNA, 25 bp, Homo sapien
aatgttgagatgttcactgatattg

SEQ ID NO: 3258951 - DNA, 25 bp, Homo sapien
ttgagatgttcactgatattgaagc

SEQ ID NO: 3258952 - DNA, 25 bp, Homo sapien
ctcattaatgttgagatgttcactg

SEQ ID NO: 3258953 - DNA, 25 bp, Homo sapien
gatgttcactgatattgaagctgtt

SEQ ID NO: 3258954 - DNA, 25 bp, Homo sapien
tgaagagtgccgtaagtgcctctat

SEQ ID NO: 3258955 - DNA, 25 bp, Homo sapien
gcaggtgaagagtgccgtaagtgcc

SEQ ID NO: 3258956 - DNA, 25 bp, Homo sapien
gtgaagagtgccgtaagtgcctcta

SEQ ID NO: 3258957 - DNA, 25 bp, Homo sapien
aggtgaagagtgccgtaagtgcctc

SEQ ID NO: 3258958 - DNA, 25 bp, Homo sapien
tgttgcagctacctctgtccaccac

SEQ ID NO: 3258959 - DNA, 25 bp, Homo sapien
agagaaattaggacctagaaaagct

SEQ ID NO: 3258960 - DNA, 25 bp, Homo sapien
gagaaattaggacctagaaaagctg

SEQ ID NO: 3258961 - DNA, 25 bp, Homo sapien
ccagagagatagtattcccagtctt

SEQ ID NO: 3258962 - DNA, 25 bp, Homo sapien
ctgtaaacttgttcaaaagtgagct

SEQ ID NO: 3258963 - DNA, 25 bp, Homo sapien
cccagtcttcatttagtaagtaggg

SEQ ID NO: 3258964 - DNA, 25 bp, Homo sapien
gagagatagtattcccagtcttcat

SEQ ID NO: 3258965 - DNA, 25 bp, Homo sapien
gaaccacaatgatcatcaatatcca

SEQ ID NO: 3258966 - DNA, 25 bp, Homo sapien
cggaataattccttgctcgtgtaag

SEQ ID NO: 3258967 - DNA, 25 bp, Homo sapien
aggttcacagatcagtttttccaca

SEQ ID NO: 3258968 - DNA, 25 bp, Homo sapien
aagacaaaggtaagaaccacaatga

SEQ ID NO: 3258969 - DNA, 25 bp, Homo sapien
gtagtaaaaaatcacgatgagggtc

SEQ ID NO: 3258970 - DNA, 25 bp, Homo sapien
gccacacagtaagcccaggtagtaa

SEQ ID NO: 3258971 - DNA, 25 bp, Homo sapien
tcacgatgagggtcagcagagagca

SEQ ID NO: 3258972 - DNA, 25 bp, Homo sapien
tgaggaagacgcctccggtgttgga

SEQ ID NO: 3258973 - DNA, 25 bp, Homo sapien
gcgaaccttctatgcattgttccaa

SEQ ID NO: 3258974 - DNA, 25 bp, Homo sapien
gtacacaggagtcatgcgaaccttc

SEQ ID NO: 3258975 - DNA, 25 bp, Homo sapien
caggagtcatgcgaaccttctatgc

SEQ ID NO: 3258976 - DNA, 25 bp, Homo sapien
catgcgaaccttctatgcattgttc

SEQ ID NO: 3258977 - DNA, 25 bp, Homo sapien
gagaatgctgagagtatatcctgaa

SEQ ID NO: 3258978 - DNA, 25 bp, Homo sapien
tgtcgatatctgaaccaatggaatt

SEQ ID NO: 3258979 - DNA, 25 bp, Homo sapien
tatcctgaataggaagacgctgagt

SEQ ID NO: 3258980 - DNA, 25 bp, Homo sapien
gacgctgagttacattgtcgatatc

SEQ ID NO: 3258981 - DNA, 25 bp, Homo sapien
acacaaacctggtcatggtgccaga

SEQ ID NO: 3258982 - DNA, 25 bp, Homo sapien
tcatggtgccagagtgtgacaacaa

SEQ ID NO: 3258983 - DNA, 25 bp, Homo sapien
aacaagtctgtgtacacatggctgg

SEQ ID NO: 3258984 - DNA, 25 bp, Homo sapien
ggtgccagagtgtgacaacaagtct

SEQ ID NO: 3258985 - DNA, 25 bp, Homo sapien
atttctctgtactgacctaccaatc

SEQ ID NO: 3258986 - DNA, 25 bp, Homo sapien
tctctgtactgacctaccaatcaca

SEQ ID NO: 3258987 - DNA, 25 bp, Homo sapien
tgtactgacctaccaatcacaaaat

SEQ ID NO: 3258988 - DNA, 25 bp, Homo sapien
tgacctaccaatcacaaaatcacct

SEQ ID NO: 3258989 - DNA, 25 bp, Homo sapien
cgtggtttggcgttgtactctgtca

SEQ ID NO: 3258990 - DNA, 25 bp, Homo sapien
gtatatcattaagggattgatagcc

SEQ ID NO: 3258991 - DNA, 25 bp, Homo sapien
ctgctacgacagtcgtggtttggcg

SEQ ID NO: 3258992 - DNA, 25 bp, Homo sapien
ggcgttgtactctgtcaggtatatc

SEQ ID NO: 3258993 - DNA, 25 bp, Homo sapien
gatcggtacactatcccatgggcag

SEQ ID NO: 3258994 - DNA, 25 bp, Homo sapien
aaaaacaaccgtgccgagcgatagg

SEQ ID NO: 3258995 - DNA, 25 bp, Homo sapien
cacagtgtcaccagtgctgaggtta

SEQ ID NO: 3258996 - DNA, 25 bp, Homo sapien
gaggttaagagacactgatcggtac

SEQ ID NO: 3258997 - DNA, 25 bp, Homo sapien
gttgtcaagttctgcatccacgggt

SEQ ID NO: 3258998 - DNA, 25 bp, Homo sapien
tgttggaccaggccatccaaatctg

SEQ ID NO: 3258999 - DNA, 25 bp, Homo sapien
cgttattaacgttgtcaagttctgc

SEQ ID NO: 3259000 - DNA, 25 bp, Homo sapien
atctgtcctaagaacgttattaacg

SEQ ID NO: 3259001 - DNA, 25 bp, Homo sapien
cctcagttcagggttgctattcagc

SEQ ID NO: 3259002 - DNA, 25 bp, Homo sapien
gctgttgcaggtttcacttgatgga

SEQ ID NO: 3259003 - DNA, 25 bp, Homo sapien
tagagacaatctgatgctgttgcag

SEQ ID NO: 3259004 - DNA, 25 bp, Homo sapien
gagatgaccgcaggctagttttcac

SEQ ID NO: 3259005 - DNA, 25 bp, Homo sapien
cagactgctgctaagctgtgtactt

SEQ ID NO: 3259006 - DNA, 25 bp, Homo sapien
aagctcttcaaggtgctgttcatgt

SEQ ID NO: 3259007 - DNA, 25 bp, Homo sapien
tttgttggtgcaagctcttcaaggt

SEQ ID NO: 3259008 - DNA, 25 bp, Homo sapien
catgttctccaacgcctctttggtc

SEQ ID NO: 3259009 - DNA, 25 bp, Homo sapien
taatctcatcaagaacagggatgat

SEQ ID NO: 3259010 - DNA, 25 bp, Homo sapien
aagaattccgcctcctagcactgaa

SEQ ID NO: 3259011 - DNA, 25 bp, Homo sapien
tgttgccatggacttaatctcatca

SEQ ID NO: 3259012 - DNA, 25 bp, Homo sapien
gggtctcagtcggtcaagaattccg

SEQ ID NO: 3259013 - DNA, 25 bp, Homo sapien
cagatctgtgaacgccttgtccttg

SEQ ID NO: 3259014 - DNA, 25 bp, Homo sapien
tgttcagatctgtgaacgccttgtc

SEQ ID NO: 3259015 - DNA, 25 bp, Homo sapien
gccttgtccttggtagtgttgtact

SEQ ID NO: 3259016 - DNA, 25 bp, Homo sapien
tagtgttgtactgggccaatatata

SEQ ID NO: 3259017 - DNA, 25 bp, Homo sapien
ccagtttccgactccttttgatccg

SEQ ID NO: 3259018 - DNA, 25 bp, Homo sapien
tcattcaagagagttcgcaagtcct

SEQ ID NO: 3259019 - DNA, 25 bp, Homo sapien
ggagtttcattcaagagagttcgca

SEQ ID NO: 3259020 - DNA, 25 bp, Homo sapien
aagtccttgaaattgctatctgcca

SEQ ID NO: 3259021 - DNA, 25 bp, Homo sapien
ggtgatttgccacaaaaccatagaa

SEQ ID NO: 3259022 - DNA, 25 bp, Homo sapien
gtgatttgccacaaaaccatagaag

SEQ ID NO: 3259023 - DNA, 25 bp, Homo sapien
ctggtgatttgccacaaaaccatag

SEQ ID NO: 3259024 - DNA, 25 bp, Homo sapien
tggtgatttgccacaaaaccataga

SEQ ID NO: 3259025 - DNA, 25 bp, Homo sapien
agagaagaaagagcatttactgtgt

SEQ ID NO: 3259026 - DNA, 25 bp, Homo sapien
gagagaagaaagagcatttactgtg

SEQ ID NO: 3259027 - DNA, 25 bp, Homo sapien
aaagagcatttactgtgtggtccat

SEQ ID NO: 3259028 - DNA, 25 bp, Homo sapien
aagaaagagcatttactgtgtggtc

SEQ ID NO: 3259029 - DNA, 25 bp, Homo sapien
tggccgtatgtctaagtgtgagtca

SEQ ID NO: 3259030 - DNA, 25 bp, Homo sapien
gcagtcttgtctacaccgggtgctc

SEQ ID NO: 3259031 - DNA, 25 bp, Homo sapien
tgatgggatatgtctcacttcagac

SEQ ID NO: 3259032 - DNA, 25 bp, Homo sapien
ttactcacaagatcatcagtcagtg

SEQ ID NO: 3259033 - DNA, 25 bp, Homo sapien
actgccctggagtaagtggtaatgc

SEQ ID NO: 3259034 - DNA, 25 bp, Homo sapien
tcaataggtaatacccgagcctggt

SEQ ID NO: 3259035 - DNA, 25 bp, Homo sapien
caagtaactctcaggctaaccaaca

SEQ ID NO: 3259036 - DNA, 25 bp, Homo sapien
taaccaacaatgcatgaagtcagct

SEQ ID NO: 3259037 - DNA, 25 bp, Homo sapien
gagtggtcaccctaagccatacaca

SEQ ID NO: 3259038 - DNA, 25 bp, Homo sapien
gaacactgctgtggcgcactcatct

SEQ ID NO: 3259039 - DNA, 25 bp, Homo sapien
gctgctgcatgaaacagtggcggaa

SEQ ID NO: 3259040 - DNA, 25 bp, Homo sapien
tgcagctagaactccaactcacagg

SEQ ID NO: 3259041 - DNA, 25 bp, Homo sapien
ggacacagcatagaataatccctgc

SEQ ID NO: 3259042 - DNA, 25 bp, Homo sapien
aagaaataccccaccagaggcatca

SEQ ID NO: 3259043 - DNA, 25 bp, Homo sapien
caacagggagattgcaaagcatttc

SEQ ID NO: 3259044 - DNA, 25 bp, Homo sapien
aaagcatttcctcaggaagggccca

SEQ ID NO: 3259045 - DNA, 25 bp, Homo sapien
ctttagacctaagattacagtttct

SEQ ID NO: 3259046 - DNA, 25 bp, Homo sapien
ttagacctaagattacagtttctgg

SEQ ID NO: 3259047 - DNA, 25 bp, Homo sapien
cttctgtaagaattttctcaaagta

SEQ ID NO: 3259048 - DNA, 25 bp, Homo sapien
tatgccttctgtaagaattttctca

SEQ ID NO: 3259049 - DNA, 25 bp, Homo sapien
tcatatgccttctgtaagaattttc

SEQ ID NO: 3259050 - DNA, 25 bp, Homo sapien
tcaattttggattcatatgccttct

SEQ ID NO: 3259051 - DNA, 25 bp, Homo sapien
gactgagaattgaagccccacatga

SEQ ID NO: 3259052 - DNA, 25 bp, Homo sapien
gtctggagtcactgccacagtcctc

SEQ ID NO: 3259053 - DNA, 25 bp, Homo sapien
tcctccaagcgcaaggcaagagact

SEQ ID NO: 3259054 - DNA, 25 bp, Homo sapien
ccctgctggaaaggacgttggtctg

SEQ ID NO: 3259055 - DNA, 25 bp, Homo sapien
tgggatgtggttctgcgcctctcca

SEQ ID NO: 3259056 - DNA, 25 bp, Homo sapien
gcagggatgtgtactgtagcccgaa

SEQ ID NO: 3259057 - DNA, 25 bp, Homo sapien
caggttgccccatgacgctgtctgg

SEQ ID NO: 3259058 - DNA, 25 bp, Homo sapien
gctctgtccatagctctgactgcca

SEQ ID NO: 3259059 - DNA, 25 bp, Homo sapien
tcagtatggaccttctgtggccagc

SEQ ID NO: 3259060 - DNA, 25 bp, Homo sapien
tgtgaacttcagtatggaccttctg

SEQ ID NO: 3259061 - DNA, 25 bp, Homo sapien
gaacttcagtatggaccttctgtgg

SEQ ID NO: 3259062 - DNA, 25 bp, Homo sapien
ccctgtgaacttcagtatggacctt

SEQ ID NO: 3259063 - DNA, 25 bp, Homo sapien
gaggaactatcattaatgacaactg

SEQ ID NO: 3259064 - DNA, 25 bp, Homo sapien
aggtagaggaactatcattaatgac

SEQ ID NO: 3259065 - DNA, 25 bp, Homo sapien
tagaggaactatcattaatgacaac

SEQ ID NO: 3259066 - DNA, 25 bp, Homo sapien
ggaactatcattaatgacaactgct

SEQ ID NO: 3259067 - DNA, 25 bp, Homo sapien
tggatgtagcatgtggtacagccca

SEQ ID NO: 3259068 - DNA, 25 bp, Homo sapien
ggagcctgatatcctgaccattgca

SEQ ID NO: 3259069 - DNA, 25 bp, Homo sapien
tcctttagaggaagcgagtactcag

SEQ ID NO: 3259070 - DNA, 25 bp, Homo sapien
cagcccgtaactgggaagattatca

SEQ ID NO: 3259071 - DNA, 25 bp, Homo sapien
tccctaagacattcctggaaagcat

SEQ ID NO: 3259072 - DNA, 25 bp, Homo sapien
ttctttccctaagacattcctggaa

SEQ ID NO: 3259073 - DNA, 25 bp, Homo sapien
tttccctaagacattcctggaaagc

SEQ ID NO: 3259074 - DNA, 25 bp, Homo sapien
tctttccctaagacattcctggaaa

SEQ ID NO: 3259075 - DNA, 25 bp, Homo sapien
tccatttacagcctttgtccctgct

SEQ ID NO: 3259076 - DNA, 25 bp, Homo sapien
cttgggagatactgaaataagcaga

SEQ ID NO: 3259077 - DNA, 25 bp, Homo sapien
ttctggccactcacaaaatcaccat

SEQ ID NO: 3259078 - DNA, 25 bp, Homo sapien
caccatcaggtccttgggagatact

SEQ ID NO: 3259079 - DNA, 25 bp, Homo sapien
catcaggtccttgggagatactgaa

SEQ ID NO: 3259080 - DNA, 25 bp, Homo sapien
taatgtgttatggttgccctaggaa

SEQ ID NO: 3259081 - DNA, 25 bp, Homo sapien
taggccctaaatccagtgccaggtg

SEQ ID NO: 3259082 - DNA, 25 bp, Homo sapien
taaccccaagacctgtgaacatgac

SEQ ID NO: 3259083 - DNA, 25 bp, Homo sapien
agatgagagtgatcctggccaggcc

SEQ ID NO: 3259084 - DNA, 25 bp, Homo sapien
taggatggcagctgtaagttgccca

SEQ ID NO: 3259085 - DNA, 25 bp, Homo sapien
cagctgtaagttgcccagcagagtg

SEQ ID NO: 3259086 - DNA, 25 bp, Homo sapien
ccagcagagtgactgacatggagga

SEQ ID NO: 3259087 - DNA, 25 bp, Homo sapien
aggatcaatagatatcagttctttc

SEQ ID NO: 3259088 - DNA, 25 bp, Homo sapien
gacacgcagatgttggagcctgatc

SEQ ID NO: 3259089 - DNA, 25 bp, Homo sapien
gctggctttgtctgaattaagtaag

SEQ ID NO: 3259090 - DNA, 25 bp, Homo sapien
ctaggcccattgccagcatgagtca

SEQ ID NO: 3259091 - DNA, 25 bp, Homo sapien
tgttctaaaggcgacaatgctggct

SEQ ID NO: 3259092 - DNA, 25 bp, Homo sapien
ctccctccagaccactacaaaagcc

SEQ ID NO: 3259093 - DNA, 25 bp, Homo sapien
tccctccagaccactacaaaagcct

SEQ ID NO: 3259094 - DNA, 25 bp, Homo sapien
cctccagaccactacaaaagcctcc

SEQ ID NO: 3259095 - DNA, 25 bp, Homo sapien
tccagaccactacaaaagcctccac

SEQ ID NO: 3259096 - DNA, 25 bp, Homo sapien
tgaattccacgtacaccctggctga

SEQ ID NO: 3259097 - DNA, 25 bp, Homo sapien
gctctaacctatcagctgttgatgg

SEQ ID NO: 3259098 - DNA, 25 bp, Homo sapien
gcatccagcaaggtgtaccgcagaa

SEQ ID NO: 3259099 - DNA, 25 bp, Homo sapien
gcagaacgcagggactttcaataaa

SEQ ID NO: 3259100 - DNA, 25 bp, Homo sapien
gggtctcataatttgttgcaggcaa

SEQ ID NO: 3259101 - DNA, 25 bp, Homo sapien
caatgggtccagctttatgggagtc

SEQ ID NO: 3259102 - DNA, 25 bp, Homo sapien
ttcataattccaagccttaggagca

SEQ ID NO: 3259103 - DNA, 25 bp, Homo sapien
agttcaaagagaatgccaatgggtc

SEQ ID NO: 3259104 - DNA, 25 bp, Homo sapien
tgaaaaggagttcccgcacagcccc

SEQ ID NO: 3259105 - DNA, 25 bp, Homo sapien
aggagttcccgcacagccccagcag

SEQ ID NO: 3259106 - DNA, 25 bp, Homo sapien
ctgaaaaggagttcccgcacagccc

SEQ ID NO: 3259107 - DNA, 25 bp, Homo sapien
aaaaggagttcccgcacagccccag

SEQ ID NO: 3259108 - DNA, 25 bp, Homo sapien
ttcagttttctgtctgaggctggct

SEQ ID NO: 3259109 - DNA, 25 bp, Homo sapien
cctccaaacatgaggtagaacttgg

SEQ ID NO: 3259110 - DNA, 25 bp, Homo sapien
cgagggatgcggaagaatgttctcc

SEQ ID NO: 3259111 - DNA, 25 bp, Homo sapien
gggtcattcactcaaggcaccatcc

SEQ ID NO: 3259112 - DNA, 25 bp, Homo sapien
tgcgggacacaaaagaatgagcggc

SEQ ID NO: 3259113 - DNA, 25 bp, Homo sapien
tcctctttgttgtccggtcggcgtg

SEQ ID NO: 3259114 - DNA, 25 bp, Homo sapien
tctccatctagcgatagccgcgggt

SEQ ID NO: 3259115 - DNA, 25 bp, Homo sapien
gcctctgactttctacagccgtgaa

SEQ ID NO: 3259116 - DNA, 25 bp, Homo sapien
cgcgggccaccactcagactaaaaa

SEQ ID NO: 3259117 - DNA, 25 bp, Homo sapien
ttgggttggacgggcaccggcacca

SEQ ID NO: 3259118 - DNA, 25 bp, Homo sapien
aagaagacccaagcggggcgtcgcg

SEQ ID NO: 3259119 - DNA, 25 bp, Homo sapien
gctccggaaccacggccgccggcta

SEQ ID NO: 3259120 - DNA, 25 bp, Homo sapien
cagaccctggctcgtgaattattta

SEQ ID NO: 3259121 - DNA, 25 bp, Homo sapien
cttctgggaccaccgcgacggcttt

SEQ ID NO: 3259122 - DNA, 25 bp, Homo sapien
gaattatttatgacccggcttctgg

SEQ ID NO: 3259123 - DNA, 25 bp, Homo sapien
gaaaggattccttaaacatactcac

SEQ ID NO: 3259124 - DNA, 25 bp, Homo sapien
caggtgccgcgtggggatctgcctc

SEQ ID NO: 3259125 - DNA, 25 bp, Homo sapien
tcatttttaatatgcgccaactcca

SEQ ID NO: 3259126 - DNA, 25 bp, Homo sapien
gctttcatctgtgcgtttccctctg

SEQ ID NO: 3259127 - DNA, 25 bp, Homo sapien
catctgtgcgtttccctctgacatc

SEQ ID NO: 3259128 - DNA, 25 bp, Homo sapien
catttttaatatgcgccaactccaa

SEQ ID NO: 3259129 - DNA, 25 bp, Homo sapien
aaagcatccgggtactttctctcac

SEQ ID NO: 3259130 - DNA, 25 bp, Homo sapien
gggagattccatccaccgaagtgct

SEQ ID NO: 3259131 - DNA, 25 bp, Homo sapien
catccaccgaagtgctgtggaggga

SEQ ID NO: 3259132 - DNA, 25 bp, Homo sapien
aaaggagagcagcacaaaaagcatc

SEQ ID NO: 3259133 - DNA, 25 bp, Homo sapien
aacagcaataccatttagagcaagc

SEQ ID NO: 3259134 - DNA, 25 bp, Homo sapien
caagagactcttattgatctgggat

SEQ ID NO: 3259135 - DNA, 25 bp, Homo sapien
gagcaagctttgactcaaggctcca

SEQ ID NO: 3259136 - DNA, 25 bp, Homo sapien
tgccagcttcacaccaaagattcct

SEQ ID NO: 3259137 - DNA, 25 bp, Homo sapien
taggctctagctctgatggtcatgg

SEQ ID NO: 3259138 - DNA, 25 bp, Homo sapien
ccctcaaaacttggagctccaggga

SEQ ID NO: 3259139 - DNA, 25 bp, Homo sapien
aacaaagccacctgatgaggccctt

SEQ ID NO: 3259140 - DNA, 25 bp, Homo sapien
cagagccctcaaaacttggagctcc

SEQ ID NO: 3259141 - DNA, 25 bp, Homo sapien
tgcaggttcaggtgagtattcttac

SEQ ID NO: 3259142 - DNA, 25 bp, Homo sapien
ttcaggtgagtattcttacaagtgt

SEQ ID NO: 3259143 - DNA, 25 bp, Homo sapien
tcacctgggacccttgaataaacaa

SEQ ID NO: 3259144 - DNA, 25 bp, Homo sapien
aattcttgtggtcagatggactggg

SEQ ID NO: 3259145 - DNA, 25 bp, Homo sapien
taaactgagccttgagttaaggtcc

SEQ ID NO: 3259146 - DNA, 25 bp, Homo sapien
catcaggtttttgggattgtgcact

SEQ ID NO: 3259147 - DNA, 25 bp, Homo sapien
tattccggacggtcgtggtgccatc

SEQ ID NO: 3259148 - DNA, 25 bp, Homo sapien
cttgtcaagggtccagatattccgg

SEQ ID NO: 3259149 - DNA, 25 bp, Homo sapien
gcagatactggtgccgtgcttcccg

SEQ ID NO: 3259150 - DNA, 25 bp, Homo sapien
actggtgccgtgcttcccgtacagc

SEQ ID NO: 3259151 - DNA, 25 bp, Homo sapien
agatactggtgccgtgcttcccgta

SEQ ID NO: 3259152 - DNA, 25 bp, Homo sapien
atactggtgccgtgcttcccgtaca

SEQ ID NO: 3259153 - DNA, 25 bp, Homo sapien
gtctgctgctatccacaacctgtgt

SEQ ID NO: 3259154 - DNA, 25 bp, Homo sapien
ctgactcacagcatcactggccgcc

SEQ ID NO: 3259155 - DNA, 25 bp, Homo sapien
catgtctgctgctatccacaacctg

SEQ ID NO: 3259156 - DNA, 25 bp, Homo sapien
ctgctatccacaacctgtgtctgtg

SEQ ID NO: 3259157 - DNA, 25 bp, Homo sapien
agtagaagctaagttgacacctgtt

SEQ ID NO: 3259158 - DNA, 25 bp, Homo sapien
tcttgacgcaaaagtcttagaactg

SEQ ID NO: 3259159 - DNA, 25 bp, Homo sapien
gacaggtcctatttgaggtgcttgg

SEQ ID NO: 3259160 - DNA, 25 bp, Homo sapien
gagtgtccccacttcttgacgcaaa

SEQ ID NO: 3259161 - DNA, 25 bp, Homo sapien
cctctctatgcctgggaactcctgg

SEQ ID NO: 3259162 - DNA, 25 bp, Homo sapien
tgtccacattacaggtaaagaattt

SEQ ID NO: 3259163 - DNA, 25 bp, Homo sapien
ccaagggacctgatgagtgcctcct

SEQ ID NO: 3259164 - DNA, 25 bp, Homo sapien
ttaatgattatgttcagaaacaggc

SEQ ID NO: 3259165 - DNA, 25 bp, Homo sapien
ctgaagggactgttgccaggatgaa

SEQ ID NO: 3259166 - DNA, 25 bp, Homo sapien
ggaatcattcaacacccccttctta

SEQ ID NO: 3259167 - DNA, 25 bp, Homo sapien
gcatgcagagcatcaggctaagggc

SEQ ID NO: 3259168 - DNA, 25 bp, Homo sapien
tgtgtgtgaaaatcaaagttacaca

SEQ ID NO: 3259169 - DNA, 25 bp, Homo sapien
ttcaaccactgttgagaccattttg

SEQ ID NO: 3259170 - DNA, 25 bp, Homo sapien
tgcccaaggttgctgtttacctctt

SEQ ID NO: 3259171 - DNA, 25 bp, Homo sapien
tcccggctataactgcaggcactct

SEQ ID NO: 3259172 - DNA, 25 bp, Homo sapien
tctgggtggttccaagcatctgctt

SEQ ID NO: 3259173 - DNA, 25 bp, Homo sapien
cactcttgcagtgcttccaggaagc

SEQ ID NO: 3259174 - DNA, 25 bp, Homo sapien
tgagggcacttcctggtaggcagct

SEQ ID NO: 3259175 - DNA, 25 bp, Homo sapien
tagaggcccatatagctgcctgggt

SEQ ID NO: 3259176 - DNA, 25 bp, Homo sapien
ccccagggacatgagaacgttcact

SEQ ID NO: 3259177 - DNA, 25 bp, Homo sapien
aaagagcttttggagatgagggcac

SEQ ID NO: 3259178 - DNA, 25 bp, Homo sapien
atcagctgaaactgttaagttgcca

SEQ ID NO: 3259179 - DNA, 25 bp, Homo sapien
cagctgaaactgttaagttgccatt

SEQ ID NO: 3259180 - DNA, 25 bp, Homo sapien
gaaactgttaagttgccattgcatc

SEQ ID NO: 3259181 - DNA, 25 bp, Homo sapien
ctgaaactgttaagttgccattgca

SEQ ID NO: 3259182 - DNA, 25 bp, Homo sapien
taccgggcacctctagaatatacat

SEQ ID NO: 3259183 - DNA, 25 bp, Homo sapien
gagaataatgcctgtggcttgcaag

SEQ ID NO: 3259184 - DNA, 25 bp, Homo sapien
catctctcagttcgtagaaagacaa

SEQ ID NO: 3259185 - DNA, 25 bp, Homo sapien
gcagatccccagtgctcctgtgtgg

SEQ ID NO: 3259186 - DNA, 25 bp, Homo sapien
ccacagctggtcagaacagccacct

SEQ ID NO: 3259187 - DNA, 25 bp, Homo sapien
cttgctgcgatatccacgtggtgca

SEQ ID NO: 3259188 - DNA, 25 bp, Homo sapien
cctcagctgaaaagtactgcttgaa

SEQ ID NO: 3259189 - DNA, 25 bp, Homo sapien
tgatgatagtaggtgtggacttgct

SEQ ID NO: 3259190 - DNA, 25 bp, Homo sapien
tgacattgcctataagaggacctaa

SEQ ID NO: 3259191 - DNA, 25 bp, Homo sapien
ggctgacattgcctataagaggacc

SEQ ID NO: 3259192 - DNA, 25 bp, Homo sapien
tgggggctgacattgcctataagag

SEQ ID NO: 3259193 - DNA, 25 bp, Homo sapien
tgcctataagaggacctaacaaagc

SEQ ID NO: 3259194 - DNA, 25 bp, Homo sapien
gctcattgctgatcccaccacttag

SEQ ID NO: 3259195 - DNA, 25 bp, Homo sapien
taagggtctggcctatcctgtgcct

SEQ ID NO: 3259196 - DNA, 25 bp, Homo sapien
tctggacaagcgtatcagtgacact

SEQ ID NO: 3259197 - DNA, 25 bp, Homo sapien
tcttccacagacgaacagggactta

SEQ ID NO: 3259198 - DNA, 25 bp, Homo sapien
caaactattccattcacggtggcat

SEQ ID NO: 3259199 - DNA, 25 bp, Homo sapien
tctgcctatgtatgtacgcctgaaa

SEQ ID NO: 3259200 - DNA, 25 bp, Homo sapien
aagactaatgcatttggtaagccca

SEQ ID NO: 3259201 - DNA, 25 bp, Homo sapien
gatgatgctgtctaacacacttgga

SEQ ID NO: 3259202 - DNA, 25 bp, Homo sapien
gatacatctttaagggttattctgg

SEQ ID NO: 3259203 - DNA, 25 bp, Homo sapien
taatgctttggcagatgaagtaacg

SEQ ID NO: 3259204 - DNA, 25 bp, Homo sapien
gactggaaagattacgtcgtggtaa

SEQ ID NO: 3259205 - DNA, 25 bp, Homo sapien
cttatactgaagaggccttgaggca

SEQ ID NO: 3259206 - DNA, 25 bp, Homo sapien
ggaagcccagactgacaaagcaaaa

SEQ ID NO: 3259207 - DNA, 25 bp, Homo sapien
tggaagcccagactgacaaagcaaa

SEQ ID NO: 3259208 - DNA, 25 bp, Homo sapien
ctggaagcccagactgacaaagcaa

SEQ ID NO: 3259209 - DNA, 25 bp, Homo sapien
ttcccagacagtcaaggccggaggt

SEQ ID NO: 3259210 - DNA, 25 bp, Homo sapien
aacacagcacttgttgccccaggac

SEQ ID NO: 3259211 - DNA, 25 bp, Homo sapien
tagcatctatttgtcctggcaacac

SEQ ID NO: 3259212 - DNA, 25 bp, Homo sapien
caggcaggaggaagttttataatcc

SEQ ID NO: 3259213 - DNA, 25 bp, Homo sapien
tcagtcaattcggtttccacaaatt

SEQ ID NO: 3259214 - DNA, 25 bp, Homo sapien
gaacctgtctatctctaacaaatct

SEQ ID NO: 3259215 - DNA, 25 bp, Homo sapien
ccacaaattgtgaacctgtctatct

SEQ ID NO: 3259216 - DNA, 25 bp, Homo sapien
gtcaattcggtttccacaaattgtg

SEQ ID NO: 3259217 - DNA, 25 bp, Homo sapien
gtccttctcgtcaccatctggagtt

SEQ ID NO: 3259218 - DNA, 25 bp, Homo sapien
tgtcctgcgttatgtccttctcgtc

SEQ ID NO: 3259219 - DNA, 25 bp, Homo sapien
aataggttgtttggtgatggaggca

SEQ ID NO: 3259220 - DNA, 25 bp, Homo sapien
caagtaatggtatgatattttcctt

SEQ ID NO: 3259221 - DNA, 25 bp, Homo sapien
tgatgcagctttgagagacagcccc

SEQ ID NO: 3259222 - DNA, 25 bp, Homo sapien
tgacatgtgcatacacctggtcaca

SEQ ID NO: 3259223 - DNA, 25 bp, Homo sapien
tggtcacactactgccatgatggag

SEQ ID NO: 3259224 - DNA, 25 bp, Homo sapien
taatctgatgagttctgacatgtgc

SEQ ID NO: 3259225 - DNA, 25 bp, Homo sapien
tgagcaaacactcaggtcgtcatcc

SEQ ID NO: 3259226 - DNA, 25 bp, Homo sapien
tttatccccattagactggatcctc

SEQ ID NO: 3259227 - DNA, 25 bp, Homo sapien
tgccctgcagtacgtgcttaaagct

SEQ ID NO: 3259228 - DNA, 25 bp, Homo sapien
catgacccctgagtcaatggccctg

SEQ ID NO: 3259229 - DNA, 25 bp, Homo sapien
tgatttactggacggcttgcctgga

SEQ ID NO: 3259230 - DNA, 25 bp, Homo sapien
caacagcacgatgctattaagtact

SEQ ID NO: 3259231 - DNA, 25 bp, Homo sapien
tgcgggaggattcgacagcttctct

SEQ ID NO: 3259232 - DNA, 25 bp, Homo sapien
tactggcacgatttccccaacagca

SEQ ID NO: 3259233 - DNA, 25 bp, Homo sapien
cctggcctccttagttctcttgtaa

SEQ ID NO: 3259234 - DNA, 25 bp, Homo sapien
cacatgcagttgaacaaaaaagaac

SEQ ID NO: 3259235 - DNA, 25 bp, Homo sapien
gtcgctttctctgagtacacctcta

SEQ ID NO: 3259236 - DNA, 25 bp, Homo sapien
ttttacaaggcagtaggcgagtgga

SEQ ID NO: 3259237 - DNA, 25 bp, Homo sapien
ggcacacagaaatggcaagcaattt

SEQ ID NO: 3259238 - DNA, 25 bp, Homo sapien
ggccttataacatcactatatgggt

SEQ ID NO: 3259239 - DNA, 25 bp, Homo sapien
tatcagttaatgttcctcagtgaca

SEQ ID NO: 3259240 - DNA, 25 bp, Homo sapien
gatacctagatacctatgactacag

SEQ ID NO: 3259241 - DNA, 25 bp, Homo sapien
tcaagattaaagcacatacccctgg

SEQ ID NO: 3259242 - DNA, 25 bp, Homo sapien
caggctcacgactcaggatacttgg

SEQ ID NO: 3259243 - DNA, 25 bp, Homo sapien
tgatgcacaccacctaggcgagggt

SEQ ID NO: 3259244 - DNA, 25 bp, Homo sapien
ggattcaagttcgaaccctctcaga

SEQ ID NO: 3259245 - DNA, 25 bp, Homo sapien
ttgagcttgttacaactctgatgag

SEQ ID NO: 3259246 - DNA, 25 bp, Homo sapien
tgacacaggcataagacaggattcc

SEQ ID NO: 3259247 - DNA, 25 bp, Homo sapien
ggattccttgcactttaattgagct

SEQ ID NO: 3259248 - DNA, 25 bp, Homo sapien
tagaagagtatgacacaggcataag

SEQ ID NO: 3259249 - DNA, 25 bp, Homo sapien
gaatgtcacacttatacctcacagg

SEQ ID NO: 3259250 - DNA, 25 bp, Homo sapien
gatttcatcttgctacacgtgtcca

SEQ ID NO: 3259251 - DNA, 25 bp, Homo sapien
gcaaatctgggatgcctgtggctag

SEQ ID NO: 3259252 - DNA, 25 bp, Homo sapien
tgtggactctctaagttcggcccta

SEQ ID NO: 3259253 - DNA, 25 bp, Homo sapien
caagcctgttgtgggcaattcatta

SEQ ID NO: 3259254 - DNA, 25 bp, Homo sapien
ctaacctggctagaaactatttgca

SEQ ID NO: 3259255 - DNA, 25 bp, Homo sapien
ttagaatcggtagtcaagaaagaac

SEQ ID NO: 3259256 - DNA, 25 bp, Homo sapien
agccaggctaaacaaatcgtcttaa

SEQ ID NO: 3259257 - DNA, 25 bp, Homo sapien
taccactgatagagaatatgtcttc

SEQ ID NO: 3259258 - DNA, 25 bp, Homo sapien
ggccacgttaatgaccatgctcaga

SEQ ID NO: 3259259 - DNA, 25 bp, Homo sapien
ccaatatgtgttgcagtggccacgt

SEQ ID NO: 3259260 - DNA, 25 bp, Homo sapien
agctaagcgtcactcatctattgga

SEQ ID NO: 3259261 - DNA, 25 bp, Homo sapien
aggaataaagcccatcctccgtgct

SEQ ID NO: 3259262 - DNA, 25 bp, Homo sapien
ggaataaagcccatcctccgtgcta

SEQ ID NO: 3259263 - DNA, 25 bp, Homo sapien
ctagtgggagaggaataaagcccat

SEQ ID NO: 3259264 - DNA, 25 bp, Homo sapien
tgggagaggaataaagcccatcctc

SEQ ID NO: 3259265 - DNA, 25 bp, Homo sapien
aagcaagactggctctatattcact

SEQ ID NO: 3259266 - DNA, 25 bp, Homo sapien
ggctgctaacaaggtcaaaagcaag

SEQ ID NO: 3259267 - DNA, 25 bp, Homo sapien
gactggctctatattcactgtagac

SEQ ID NO: 3259268 - DNA, 25 bp, Homo sapien
tttttctgtcggctgctaacaaggt

SEQ ID NO: 3259269 - DNA, 25 bp, Homo sapien
ggaacaagtgctaataaccaagctg

SEQ ID NO: 3259270 - DNA, 25 bp, Homo sapien
caagctgacatctgggcataatttc

SEQ ID NO: 3259271 - DNA, 25 bp, Homo sapien
aatatccaacgactatgatcctgag

SEQ ID NO: 3259272 - DNA, 25 bp, Homo sapien
caagtgtctcaatcaagcctattaa

SEQ ID NO: 3259273 - DNA, 25 bp, Homo sapien
gaacctattcataatcgtggaaaaa

SEQ ID NO: 3259274 - DNA, 25 bp, Homo sapien
gaaaaatgtaggctctcgtcttcta

SEQ ID NO: 3259275 - DNA, 25 bp, Homo sapien
tctaaaacttagcaggaacctattc

SEQ ID NO: 3259276 - DNA, 25 bp, Homo sapien
aaatgtaggctctcgtcttctaaaa

SEQ ID NO: 3259277 - DNA, 25 bp, Homo sapien
caatatccacggcaatttctgatgc

SEQ ID NO: 3259278 - DNA, 25 bp, Homo sapien
gttttacaatatccacggcaatttc

SEQ ID NO: 3259279 - DNA, 25 bp, Homo sapien
tctgatgcaattaccatacagacat

SEQ ID NO: 3259280 - DNA, 25 bp, Homo sapien
cattgaatttagtaataaaggcatg

SEQ ID NO: 3259281 - DNA, 25 bp, Homo sapien
tcagtactttctaagtgccaagaac

SEQ ID NO: 3259282 - DNA, 25 bp, Homo sapien
tattcagtactttctaagtgccaag

SEQ ID NO: 3259283 - DNA, 25 bp, Homo sapien
gtactttctaagtgccaagaactgc

SEQ ID NO: 3259284 - DNA, 25 bp, Homo sapien
tttattcagtactttctaagtgcca

SEQ ID NO: 3259285 - DNA, 25 bp, Homo sapien
agtaaaattataagacactgttttg

SEQ ID NO: 3259286 - DNA, 25 bp, Homo sapien
ctggattccaagaaaactgttccat

SEQ ID NO: 3259287 - DNA, 25 bp, Homo sapien
tagacacactatcagtaaaagcaca

SEQ ID NO: 3259288 - DNA, 25 bp, Homo sapien
acacactatcagtaaaagcacataa

SEQ ID NO: 3259289 - DNA, 25 bp, Homo sapien
tttcttagacacactatcagtaaaa

SEQ ID NO: 3259290 - DNA, 25 bp, Homo sapien
gtttcttagacacactatcagtaaa

SEQ ID NO: 3259291 - DNA, 25 bp, Homo sapien
ttagccagaacatgatgaaattatt

SEQ ID NO: 3259292 - DNA, 25 bp, Homo sapien
tggtgctaccatggtaagccattga

SEQ ID NO: 3259293 - DNA, 25 bp, Homo sapien
aagccattgacttcttttgccaaca

SEQ ID NO: 3259294 - DNA, 25 bp, Homo sapien
tactgtagtgtatataaacaacata

SEQ ID NO: 3259295 - DNA, 25 bp, Homo sapien
catatcattcagccatggcgcacct

SEQ ID NO: 3259296 - DNA, 25 bp, Homo sapien
acctcctgtaagcgctctgaatttc

SEQ ID NO: 3259297 - DNA, 25 bp, Homo sapien
cctgtaagcgctctgaatttcaatt

SEQ ID NO: 3259298 - DNA, 25 bp, Homo sapien
ccatatcattcagccatggcgcacc

SEQ ID NO: 3259299 - DNA, 25 bp, Homo sapien
tactctatggttaactactgaagca

SEQ ID NO: 3259300 - DNA, 25 bp, Homo sapien
ataaagagcacttacccaaaggagg

SEQ ID NO: 3259301 - DNA, 25 bp, Homo sapien
tcttgtagactgatatgcatacctg

SEQ ID NO: 3259302 - DNA, 25 bp, Homo sapien
taattacatcaacatgctggccata

SEQ ID NO: 3259303 - DNA, 25 bp, Homo sapien
atttctaattcatgacacttggcag

SEQ ID NO: 3259304 - DNA, 25 bp, Homo sapien
gagcaacattaataagcagcaagaa

SEQ ID NO: 3259305 - DNA, 25 bp, Homo sapien
gtgagcaacattaataagcagcaag

SEQ ID NO: 3259306 - DNA, 25 bp, Homo sapien
attcatgacacttggcagtctgcac

SEQ ID NO: 3259307 - DNA, 25 bp, Homo sapien
ttgaaagagattgttcttttcaaac

SEQ ID NO: 3259308 - DNA, 25 bp, Homo sapien
atttgacatttgaaagagattgttc

SEQ ID NO: 3259309 - DNA, 25 bp, Homo sapien
cgctatttgacatttgaaagagatt

SEQ ID NO: 3259310 - DNA, 25 bp, Homo sapien
tgaaagagattgttcttttcaaact

SEQ ID NO: 3259311 - DNA, 25 bp, Homo sapien
ttagacatcatgatagtaagcaaag

SEQ ID NO: 3259312 - DNA, 25 bp, Homo sapien
tgttgtgtgagttaaaagctacatt

SEQ ID NO: 3259313 - DNA, 25 bp, Homo sapien
gagttgttgcttgaaccattataag

SEQ ID NO: 3259314 - DNA, 25 bp, Homo sapien
gctacattgagagttgttgcttgaa

SEQ ID NO: 3259315 - DNA, 25 bp, Homo sapien
tatagttgatataagtttgacagga

SEQ ID NO: 3259316 - DNA, 25 bp, Homo sapien
acaggatatgtgcaatccacatgaa

SEQ ID NO: 3259317 - DNA, 25 bp, Homo sapien
gaaatgtacctctatgcattcattt

SEQ ID NO: 3259318 - DNA, 25 bp, Homo sapien
catgaaacgaacaaaagtggaaatg

SEQ ID NO: 3259319 - DNA, 25 bp, Homo sapien
cggaaatttccagtaggtctataag

SEQ ID NO: 3259320 - DNA, 25 bp, Homo sapien
tgtcggaaatttccagtaggtctat

SEQ ID NO: 3259321 - DNA, 25 bp, Homo sapien
gaaatttccagtaggtctataagga

SEQ ID NO: 3259322 - DNA, 25 bp, Homo sapien
atttccagtaggtctataaggatac

SEQ ID NO: 3259323 - DNA, 25 bp, Homo sapien
agtgaggaatcaccccaatgtgggc

SEQ ID NO: 3259324 - DNA, 25 bp, Homo sapien
tgaggaatcaccccaatgtgggctc

SEQ ID NO: 3259325 - DNA, 25 bp, Homo sapien
gtgaggaatcaccccaatgtgggct

SEQ ID NO: 3259326 - DNA, 25 bp, Homo sapien
gctgtccaatagagagcatctaata

SEQ ID NO: 3259327 - DNA, 25 bp, Homo sapien
aagatgaaaacagacgatcagctac

SEQ ID NO: 3259328 - DNA, 25 bp, Homo sapien
aatagagagcatctaatatgtcttg

SEQ ID NO: 3259329 - DNA, 25 bp, Homo sapien
ctgttgctgtccaatagagagcatc

SEQ ID NO: 3259330 - DNA, 25 bp, Homo sapien
caccgtgccggcctgcaatttgaat

SEQ ID NO: 3259331 - DNA, 25 bp, Homo sapien
ctagagtcggtagagcattcttgac

SEQ ID NO: 3259332 - DNA, 25 bp, Homo sapien
cagaatccatgtttaagaagagccc

SEQ ID NO: 3259333 - DNA, 25 bp, Homo sapien
ccagaagcaccataactagagtcgg

SEQ ID NO: 3259334 - DNA, 25 bp, Homo sapien
gtagagcttgatgacggactgcccc

SEQ ID NO: 3259335 - DNA, 25 bp, Homo sapien
gatgtagagcttgatgacggactgc

SEQ ID NO: 3259336 - DNA, 25 bp, Homo sapien
gtagatgatgtagagcttgatgacg

SEQ ID NO: 3259337 - DNA, 25 bp, Homo sapien
gatgatgtagagcttgatgacggac

SEQ ID NO: 3259338 - DNA, 25 bp, Homo sapien
cccttcaaaatgtcacacacctggg

SEQ ID NO: 3259339 - DNA, 25 bp, Homo sapien
aaatagcagattaccaaaatgacac

SEQ ID NO: 3259340 - DNA, 25 bp, Homo sapien
gattaccaaaatgacacccttcaaa

SEQ ID NO: 3259341 - DNA, 25 bp, Homo sapien
ggcaggctgaagcaaacgtctgtcc

SEQ ID NO: 3259342 - DNA, 25 bp, Homo sapien
tctataaaggaagtgaaagtgctcc

SEQ ID NO: 3259343 - DNA, 25 bp, Homo sapien
accacattccattctataaaggaag

SEQ ID NO: 3259344 - DNA, 25 bp, Homo sapien
tataaaggaagtgaaagtgctcctc

SEQ ID NO: 3259345 - DNA, 25 bp, Homo sapien
aaaggaagtgaaagtgctcctccct

SEQ ID NO: 3259346 - DNA, 25 bp, Homo sapien
tagtgccaggaaaactcttaaagga

SEQ ID NO: 3259347 - DNA, 25 bp, Homo sapien
ttaaaggaagcagggtgaacacata

SEQ ID NO: 3259348 - DNA, 25 bp, Homo sapien
aaagtgaggagcctgaatagtgcca

SEQ ID NO: 3259349 - DNA, 25 bp, Homo sapien
taagccatagcaaggcaaagtgagg

SEQ ID NO: 3259350 - DNA, 25 bp, Homo sapien
gaaacctgatgttcccaggagcgtt

SEQ ID NO: 3259351 - DNA, 25 bp, Homo sapien
tgcgagtggactgctggttcagtac

SEQ ID NO: 3259352 - DNA, 25 bp, Homo sapien
tctgaaaatcaggtcccggataggc

SEQ ID NO: 3259353 - DNA, 25 bp, Homo sapien
tgagaagcctttccgtccttgcgag

SEQ ID NO: 3259354 - DNA, 25 bp, Homo sapien
tacctgatgcatggtaaactgttcc

SEQ ID NO: 3259355 - DNA, 25 bp, Homo sapien
tgatatctcctaagctaggtgtgag

SEQ ID NO: 3259356 - DNA, 25 bp, Homo sapien
tagacaagggacaattttgtacctg

SEQ ID NO: 3259357 - DNA, 25 bp, Homo sapien
ccttcttggaacatagaaagtactc

SEQ ID NO: 3259358 - DNA, 25 bp, Homo sapien
tacctccaccaaacaatggtggaag

SEQ ID NO: 3259359 - DNA, 25 bp, Homo sapien
catacctccaccaaacaatggtgga

SEQ ID NO: 3259360 - DNA, 25 bp, Homo sapien
gcacatacctccaccaaacaatggt

SEQ ID NO: 3259361 - DNA, 25 bp, Homo sapien
cacatacctccaccaaacaatggtg

SEQ ID NO: 3259362 - DNA, 25 bp, Homo sapien
ctgttataactgtaggcttcaggca

SEQ ID NO: 3259363 - DNA, 25 bp, Homo sapien
ctttaggaaactggtgctccctgcc

SEQ ID NO: 3259364 - DNA, 25 bp, Homo sapien
taaagcaccctgtttctgttataac

SEQ ID NO: 3259365 - DNA, 25 bp, Homo sapien
tttcaccaagcctctggttaaagca

SEQ ID NO: 3259366 - DNA, 25 bp, Homo sapien
ccaagagccagaaaatcatgcccct

SEQ ID NO: 3259367 - DNA, 25 bp, Homo sapien
tatggtcagcaacccaagagggcca

SEQ ID NO: 3259368 - DNA, 25 bp, Homo sapien
caaagtcgaatttagtggcaagcaa

SEQ ID NO: 3259369 - DNA, 25 bp, Homo sapien
tcatgaaagagatcagctttacccc

SEQ ID NO: 3259370 - DNA, 25 bp, Homo sapien
cctgctgtgcacatcccaaagatga

SEQ ID NO: 3259371 - DNA, 25 bp, Homo sapien
cctcctgctgtgcacatcccaaaga

SEQ ID NO: 3259372 - DNA, 25 bp, Homo sapien
gataaaactgggacacagggaaatc

SEQ ID NO: 3259373 - DNA, 25 bp, Homo sapien
cctctcccaatcacctcctgctgtg

SEQ ID NO: 3259374 - DNA, 25 bp, Homo sapien
gaagatctggtacatagaacccaag

SEQ ID NO: 3259375 - DNA, 25 bp, Homo sapien
acagttcggctttagagatgatccc

SEQ ID NO: 3259376 - DNA, 25 bp, Homo sapien
ccaaagtggactacataaacagcag

SEQ ID NO: 3259377 - DNA, 25 bp, Homo sapien
tcttgcatgtctagataggctctca

SEQ ID NO: 3259378 - DNA, 25 bp, Homo sapien
tcttaagtattgttctaagagacta

SEQ ID NO: 3259379 - DNA, 25 bp, Homo sapien
gtattgttctaagagactacatcaa

SEQ ID NO: 3259380 - DNA, 25 bp, Homo sapien
ttaggctacaaagcttcttaagtat

SEQ ID NO: 3259381 - DNA, 25 bp, Homo sapien
acatttaggctacaaagcttcttaa

SEQ ID NO: 3259382 - DNA, 25 bp, Homo sapien
ctcatcaagacataagtataagcta

SEQ ID NO: 3259383 - DNA, 25 bp, Homo sapien
aaattctgatggcaacttatactga

SEQ ID NO: 3259384 - DNA, 25 bp, Homo sapien
cccattagtggttctatagtggacc

SEQ ID NO: 3259385 - DNA, 25 bp, Homo sapien
ggtttatactttagtctcatcaaga

SEQ ID NO: 3259386 - DNA, 25 bp, Homo sapien
caaaacattgcttgctatttcagtg

SEQ ID NO: 3259387 - DNA, 25 bp, Homo sapien
aggaagcgtgaaaccagcctgtctc

SEQ ID NO: 3259388 - DNA, 25 bp, Homo sapien
aagaaagaaggaagcgtgaaaccag

SEQ ID NO: 3259389 - DNA, 25 bp, Homo sapien
gaaagaaggaagcgtgaaaccagcc

SEQ ID NO: 3259390 - DNA, 25 bp, Homo sapien
ctggttgtgttcataaagtttggtg

SEQ ID NO: 3259391 - DNA, 25 bp, Homo sapien
gtgggagttgcaggcaaatccctct

SEQ ID NO: 3259392 - DNA, 25 bp, Homo sapien
aaagctgattgtggctggcactatc

SEQ ID NO: 3259393 - DNA, 25 bp, Homo sapien
tatcctgtccaaatacaggccctgg

SEQ ID NO: 3259394 - DNA, 25 bp, Homo sapien
ccaattctcttggtattcgcaaaca

SEQ ID NO: 3259395 - DNA, 25 bp, Homo sapien
gtaccctcttgttagttcagcactg

SEQ ID NO: 3259396 - DNA, 25 bp, Homo sapien
tcattatgttcaaggaagtaccctc

SEQ ID NO: 3259397 - DNA, 25 bp, Homo sapien
gcaaacaagtgtatactctttctct

SEQ ID NO: 3259398 - DNA, 25 bp, Homo sapien
cgaagtgcaacctcaaccggatcag

SEQ ID NO: 3259399 - DNA, 25 bp, Homo sapien
tagttattacgcgaagtgcaacctc

SEQ ID NO: 3259400 - DNA, 25 bp, Homo sapien
attacgcgaagtgcaacctcaaccg

SEQ ID NO: 3259401 - DNA, 25 bp, Homo sapien
gtgcaacctcaaccggatcagaaaa

SEQ ID NO: 3259402 - DNA, 25 bp, Homo sapien
gaaggctctggatgctcgaccccac

SEQ ID NO: 3259403 - DNA, 25 bp, Homo sapien
cttgaggtgagaagcgaaggctctg

SEQ ID NO: 3259404 - DNA, 25 bp, Homo sapien
ttcccagtgcattacacttccctga

SEQ ID NO: 3259405 - DNA, 25 bp, Homo sapien
tgcattacacttccctgatagccca

SEQ ID NO: 3259406 - DNA, 25 bp, Homo sapien
cataatctgtctggggagtcagtgt

SEQ ID NO: 3259407 - DNA, 25 bp, Homo sapien
gggagtcagtgttaccatgagagat

SEQ ID NO: 3259408 - DNA, 25 bp, Homo sapien
gagtcagtgttaccatgagagatac

SEQ ID NO: 3259409 - DNA, 25 bp, Homo sapien
gattcataatctgtctggggagtca

SEQ ID NO: 3259410 - DNA, 25 bp, Homo sapien
tatgttttgattagttagtatctac

SEQ ID NO: 3259411 - DNA, 25 bp, Homo sapien
gaagcaacaggactttcagaaagca

SEQ ID NO: 3259412 - DNA, 25 bp, Homo sapien
gtatctacaagtatcagttctttca

SEQ ID NO: 3259413 - DNA, 25 bp, Homo sapien
ctttcatgtaaaaatcgagaagcaa

SEQ ID NO: 3259414 - DNA, 25 bp, Homo sapien
ctgtacccgatccttaagtgtttgc

SEQ ID NO: 3259415 - DNA, 25 bp, Homo sapien
cctaaacctgattcagtggtgctct

SEQ ID NO: 3259416 - DNA, 25 bp, Homo sapien
gctcttctgtcttgaatggctgatt

SEQ ID NO: 3259417 - DNA, 25 bp, Homo sapien
gtttgctggttcagtgctctattca

SEQ ID NO: 3259418 - DNA, 25 bp, Homo sapien
cattgtccacactaagtgcaaggaa

SEQ ID NO: 3259419 - DNA, 25 bp, Homo sapien
gcaaggaaagaaattacgcagccca

SEQ ID NO: 3259420 - DNA, 25 bp, Homo sapien
ggaataaggagatcctcattgtcca

SEQ ID NO: 3259421 - DNA, 25 bp, Homo sapien
gaacagggtaccatgatgcagtcac

SEQ ID NO: 3259422 - DNA, 25 bp, Homo sapien
gtgaagctacactctttactagttg

SEQ ID NO: 3259423 - DNA, 25 bp, Homo sapien
agttgctcccttacaagaccatgaa

SEQ ID NO: 3259424 - DNA, 25 bp, Homo sapien
aagagcaggccccatgtatccctat

SEQ ID NO: 3259425 - DNA, 25 bp, Homo sapien
cttgggctgacttctgtgaagctac

SEQ ID NO: 3259426 - DNA, 25 bp, Homo sapien
agagccatcgagttagcctcgctgc

SEQ ID NO: 3259427 - DNA, 25 bp, Homo sapien
tgccagagccatcgagttagcctcg

SEQ ID NO: 3259428 - DNA, 25 bp, Homo sapien
atcgagttagcctcgctgcttctgc

SEQ ID NO: 3259429 - DNA, 25 bp, Homo sapien
catcgagttagcctcgctgcttctg

SEQ ID NO: 3259430 - DNA, 25 bp, Homo sapien
gaaaaagcatagtataaattgcttt

SEQ ID NO: 3259431 - DNA, 25 bp, Homo sapien
tcctaccacagaattgctctgtgat

SEQ ID NO: 3259432 - DNA, 25 bp, Homo sapien
catctcctaccacagaattgctctg

SEQ ID NO: 3259433 - DNA, 25 bp, Homo sapien
atgatatcatctcctaccacagaat

SEQ ID NO: 3259434 - DNA, 25 bp, Homo sapien
gggccactgggataactatgtgata

SEQ ID NO: 3259435 - DNA, 25 bp, Homo sapien
tctgctcaatctctaacagaggtga

SEQ ID NO: 3259436 - DNA, 25 bp, Homo sapien
caagaagaggtctaaccatggttaa

SEQ ID NO: 3259437 - DNA, 25 bp, Homo sapien
gaatcagtcaccctttaatcatcca

SEQ ID NO: 3259438 - DNA, 25 bp, Homo sapien
caggctaaatataagtcagaacggg

SEQ ID NO: 3259439 - DNA, 25 bp, Homo sapien
taagtactcgcatctgagacatgcg

SEQ ID NO: 3259440 - DNA, 25 bp, Homo sapien
agacatgcgtcagcctattgccagg

SEQ ID NO: 3259441 - DNA, 25 bp, Homo sapien
gaaagcttagacttaatggagacac

SEQ ID NO: 3259442 - DNA, 25 bp, Homo sapien
tgtgcttctcacgtttgggctccga

SEQ ID NO: 3259443 - DNA, 25 bp, Homo sapien
gagatgcccgctaacctaagacctt

SEQ ID NO: 3259444 - DNA, 25 bp, Homo sapien
ctaagaccttccgagggcgatgcaa

SEQ ID NO: 3259445 - DNA, 25 bp, Homo sapien
tataattaagaaatcagccgtgtgc

SEQ ID NO: 3259446 - DNA, 25 bp, Homo sapien
gccggtcgctctcgtagaagcccag

SEQ ID NO: 3259447 - DNA, 25 bp, Homo sapien
cgccgccggtcgctctcgtagaagc

SEQ ID NO: 3259448 - DNA, 25 bp, Homo sapien
gctctcgtagaagcccagcgtctct

SEQ ID NO: 3259449 - DNA, 25 bp, Homo sapien
ggtcgctctcgtagaagcccagcgt

SEQ ID NO: 3259450 - DNA, 25 bp, Homo sapien
cggccgcgtcgccgacgcccgccat

SEQ ID NO: 3259451 - DNA, 25 bp, Homo sapien
cggagcggccgcgtcgccgacgccc

SEQ ID NO: 3259452 - DNA, 25 bp, Homo sapien
ccttctcccggagcggccgcgtcgc

SEQ ID NO: 3259453 - DNA, 25 bp, Homo sapien
gagcggccgcgtcgccgacgcccgc

SEQ ID NO: 3259454 - DNA, 25 bp, Homo sapien
tttctcgcgccgtggctggctcggc

SEQ ID NO: 3259455 - DNA, 25 bp, Homo sapien
ccgtggcgggcgacggtttctcgcg

SEQ ID NO: 3259456 - DNA, 25 bp, Homo sapien
ttccgagcacaacaaactgtccccg

SEQ ID NO: 3259457 - DNA, 25 bp, Homo sapien
cgaccggcgcgagccattggcgtca

SEQ ID NO: 3259458 - DNA, 25 bp, Homo sapien
aaaggaggaacattcggtgcagccg

SEQ ID NO: 3259459 - DNA, 25 bp, Homo sapien
ccggaccggcagagtttcaagggct

SEQ ID NO: 3259460 - DNA, 25 bp, Homo sapien
gacagtggtacctcgatttcccgtg

SEQ ID NO: 3259461 - DNA, 25 bp, Homo sapien
cgcaacgagcgtggtgtcgagacca

SEQ ID NO: 3259462 - DNA, 25 bp, Homo sapien
agttccaaaggctgtgcctatcctt

SEQ ID NO: 3259463 - DNA, 25 bp, Homo sapien
tcattttctattatgaggcctgagg

SEQ ID NO: 3259464 - DNA, 25 bp, Homo sapien
aggctgtgcctatccttttaaatag

SEQ ID NO: 3259465 - DNA, 25 bp, Homo sapien
tttctattatgaggcctgaggaaag

SEQ ID NO: 3259466 - DNA, 25 bp, Homo sapien
gtacaagggcctacagttacaagcc

SEQ ID NO: 3259467 - DNA, 25 bp, Homo sapien
gttacaagccttgggaaagatactg

SEQ ID NO: 3259468 - DNA, 25 bp, Homo sapien
gttttggccacatatttcagctatg

SEQ ID NO: 3259469 - DNA, 25 bp, Homo sapien
ttttctaccaggtatagcacagtgt

SEQ ID NO: 3259470 - DNA, 25 bp, Homo sapien
tttgtgtctgttcttgagtcaagta

SEQ ID NO: 3259471 - DNA, 25 bp, Homo sapien
atatttgtttgatctctgtggaact

SEQ ID NO: 3259472 - DNA, 25 bp, Homo sapien
caaagtgcaggacaattttgtgtct

SEQ ID NO: 3259473 - DNA, 25 bp, Homo sapien
cttagttctgagcatatgaatgaaa

SEQ ID NO: 3259474 - DNA, 25 bp, Homo sapien
taatctgtatctttctctgagaagt

SEQ ID NO: 3259475 - DNA, 25 bp, Homo sapien
gaagttctctaaggctctgcctttg

SEQ ID NO: 3259476 - DNA, 25 bp, Homo sapien
gctgtgccgctgtctctgggttcca

SEQ ID NO: 3259477 - DNA, 25 bp, Homo sapien
cactgacaccccatgtgggtagggt

SEQ ID NO: 3259478 - DNA, 25 bp, Homo sapien
gatgccctctgcatcgagtgttgca

SEQ ID NO: 3259479 - DNA, 25 bp, Homo sapien
tgggtgggactccacaggttcctga

SEQ ID NO: 3259480 - DNA, 25 bp, Homo sapien
cagatgtgtgcaaggctgcctatga

SEQ ID NO: 3259481 - DNA, 25 bp, Homo sapien
gttgcagccacttgcccattcctgg

SEQ ID NO: 3259482 - DNA, 25 bp, Homo sapien
cagaggttctagagctgctaatgtc

SEQ ID NO: 3259483 - DNA, 25 bp, Homo sapien
ggacttttgagagtggatgacctca

SEQ ID NO: 3259484 - DNA, 25 bp, Homo sapien
cttgggctcttccagaggttctaga

SEQ ID NO: 3259485 - DNA, 25 bp, Homo sapien
cttttgagagtggatgacctcagaa

SEQ ID NO: 3259486 - DNA, 25 bp, Homo sapien
catgcttcccctctgaatggaaagc

SEQ ID NO: 3259487 - DNA, 25 bp, Homo sapien
tgcttcccctctgaatggaaagctt

SEQ ID NO: 3259488 - DNA, 25 bp, Homo sapien
actgccttcccccacttgtctttca

SEQ ID NO: 3259489 - DNA, 25 bp, Homo sapien
tcccctctgaatggaaagcttcctg

SEQ ID NO: 3259490 - DNA, 25 bp, Homo sapien
tccgtgattctctctagtcaaaact

SEQ ID NO: 3259491 - DNA, 25 bp, Homo sapien
ccgtgattctctctagtcaaaactt

SEQ ID NO: 3259492 - DNA, 25 bp, Homo sapien
atccgtgattctctctagtcaaaac

SEQ ID NO: 3259493 - DNA, 25 bp, Homo sapien
cctatcgccccgcagatagcataag

SEQ ID NO: 3259494 - DNA, 25 bp, Homo sapien
gccattaaacctgcccgtgaccttg

SEQ ID NO: 3259495 - DNA, 25 bp, Homo sapien
tgcccgtgaccttgtcagcctcggc

SEQ ID NO: 3259496 - DNA, 25 bp, Homo sapien
cgccccgcagatagcataagtttta

SEQ ID NO: 3259497 - DNA, 25 bp, Homo sapien
ccgatgatgcggttgctagcggagc

SEQ ID NO: 3259498 - DNA, 25 bp, Homo sapien
ttgctagcggagcatttccgcggaa

SEQ ID NO: 3259499 - DNA, 25 bp, Homo sapien
cggttgctagcggagcatttccgcg

SEQ ID NO: 3259500 - DNA, 25 bp, Homo sapien
tgatgcggttgctagcggagcattt

SEQ ID NO: 3259501 - DNA, 25 bp, Homo sapien
tgtatcactccatgagactggtgcc

SEQ ID NO: 3259502 - DNA, 25 bp, Homo sapien
gatctcgaagggaagacgtctaccg

SEQ ID NO: 3259503 - DNA, 25 bp, Homo sapien
gaattccaagggtgcaaagctggct

SEQ ID NO: 3259504 - DNA, 25 bp, Homo sapien
tatgccaagttagggcagccctcaa

SEQ ID NO: 3259505 - DNA, 25 bp, Homo sapien
ctgacatacccagttgctgtagaac

SEQ ID NO: 3259506 - DNA, 25 bp, Homo sapien
ctccctttgtctgacatacccagtt

SEQ ID NO: 3259507 - DNA, 25 bp, Homo sapien
ctttgtctgacatacccagttgctg

SEQ ID NO: 3259508 - DNA, 25 bp, Homo sapien
gtctgacatacccagttgctgtaga

SEQ ID NO: 3259509 - DNA, 25 bp, Homo sapien
tagcattattattggcctggcgtgg

SEQ ID NO: 3259510 - DNA, 25 bp, Homo sapien
aacagggcacttctgcttagcagca

SEQ ID NO: 3259511 - DNA, 25 bp, Homo sapien
tgagagagcgggataagacttacct

SEQ ID NO: 3259512 - DNA, 25 bp, Homo sapien
gacaagacagagcttacagggcatg

SEQ ID NO: 3259513 - DNA, 25 bp, Homo sapien
caaagtactcctgcaaaccaacaag

SEQ ID NO: 3259514 - DNA, 25 bp, Homo sapien
gatatttagttcaacaaggatggca

SEQ ID NO: 3259515 - DNA, 25 bp, Homo sapien
caggctggtcaagggaggaactttt

SEQ ID NO: 3259516 - DNA, 25 bp, Homo sapien
gaccccacagtacatctatcagatt

SEQ ID NO: 3259517 - DNA, 25 bp, Homo sapien
atactgaaaacccttagaaggctgt

SEQ ID NO: 3259518 - DNA, 25 bp, Homo sapien
aatgccggaatttattggtccttgg

SEQ ID NO: 3259519 - DNA, 25 bp, Homo sapien
ctaatatactgaaaacccttagaag

SEQ ID NO: 3259520 - DNA, 25 bp, Homo sapien
ggctgtgtgtagtcaatgccggaat

SEQ ID NO: 3259521 - DNA, 25 bp, Homo sapien
ctcctccgttcaccccatgccccat

SEQ ID NO: 3259522 - DNA, 25 bp, Homo sapien
tccctcctccgttcaccccatgccc

SEQ ID NO: 3259523 - DNA, 25 bp, Homo sapien
tctccctcctccgttcaccccatgc

SEQ ID NO: 3259524 - DNA, 25 bp, Homo sapien
attcaaagctggatcccctctccct

SEQ ID NO: 3259525 - DNA, 25 bp, Homo sapien
tctgagggccttttgaaatccttat

SEQ ID NO: 3259526 - DNA, 25 bp, Homo sapien
aggatgttctgagggccttttgaaa

SEQ ID NO: 3259527 - DNA, 25 bp, Homo sapien
caggatgttctgagggccttttgaa

SEQ ID NO: 3259528 - DNA, 25 bp, Homo sapien
gagggccttttgaaatccttatgtc

SEQ ID NO: 3259529 - DNA, 25 bp, Homo sapien
gaagccatcgcatcagaacctgtgt

SEQ ID NO: 3259530 - DNA, 25 bp, Homo sapien
tcaacaaagcgtgaagctgcctgtg

SEQ ID NO: 3259531 - DNA, 25 bp, Homo sapien
ggactcaagtaccagctcaacaaag

SEQ ID NO: 3259532 - DNA, 25 bp, Homo sapien
gacacggtctgttttctcgaagcca

SEQ ID NO: 3259533 - DNA, 25 bp, Homo sapien
tcttggattctggtactaatgtccc

SEQ ID NO: 3259534 - DNA, 25 bp, Homo sapien
tctggtactaatgtcccaatcttct

SEQ ID NO: 3259535 - DNA, 25 bp, Homo sapien
gattcactgaatccttaggccgaat

SEQ ID NO: 3259536 - DNA, 25 bp, Homo sapien
taagcatggtcaggcttctggcaga

SEQ ID NO: 3259537 - DNA, 25 bp, Homo sapien
ggagtcattattgctttctctggag

SEQ ID NO: 3259538 - DNA, 25 bp, Homo sapien
gatctttgccttgaccatactggac

SEQ ID NO: 3259539 - DNA, 25 bp, Homo sapien
tctctggaggggtggatctttgcct

SEQ ID NO: 3259540 - DNA, 25 bp, Homo sapien
catactggactcaggcagtatgaag

SEQ ID NO: 3259541 - DNA, 25 bp, Homo sapien
tcttttgatgaatttgacctataat

SEQ ID NO: 3259542 - DNA, 25 bp, Homo sapien
tgcattcattaatgttcgtaaggaa

SEQ ID NO: 3259543 - DNA, 25 bp, Homo sapien
gaagaaacaggaaagagcacaggag

SEQ ID NO: 3259544 - DNA, 25 bp, Homo sapien
ttaatgttcgtaaggaatgtacctg

SEQ ID NO: 3259545 - DNA, 25 bp, Homo sapien
gctgcctgtttaatgatactgagtg

SEQ ID NO: 3259546 - DNA, 25 bp, Homo sapien
aatagattcttttcaagccatagag

SEQ ID NO: 3259547 - DNA, 25 bp, Homo sapien
gactccttagcttgtcatgactaca

SEQ ID NO: 3259548 - DNA, 25 bp, Homo sapien
ccatagagggtaagtgctgcctgtt

SEQ ID NO: 3259549 - DNA, 25 bp, Homo sapien
tagccttgaagccaattttggaatg

SEQ ID NO: 3259550 - DNA, 25 bp, Homo sapien
attttggaatgcagattgagggtca

SEQ ID NO: 3259551 - DNA, 25 bp, Homo sapien
tcaatggtgaagaaaccgtttcctc

SEQ ID NO: 3259552 - DNA, 25 bp, Homo sapien
ttggaatgcagattgagggtcaatg

SEQ ID NO: 3259553 - DNA, 25 bp, Homo sapien
caaaagccctctattattatggtag

SEQ ID NO: 3259554 - DNA, 25 bp, Homo sapien
tggtagttggaaaatggcccagttc

SEQ ID NO: 3259555 - DNA, 25 bp, Homo sapien
ttattatggtagttggaaaatggcc

SEQ ID NO: 3259556 - DNA, 25 bp, Homo sapien
ccctctattattatggtagttggaa

SEQ ID NO: 3259557 - DNA, 25 bp, Homo sapien
ttctatctggtgataataggctttt

SEQ ID NO: 3259558 - DNA, 25 bp, Homo sapien
atctggtgataataggcttttcagc

SEQ ID NO: 3259559 - DNA, 25 bp, Homo sapien
tctatctggtgataataggcttttc

SEQ ID NO: 3259560 - DNA, 25 bp, Homo sapien
tatctggtgataataggcttttcag

SEQ ID NO: 3259561 - DNA, 25 bp, Homo sapien
ttagtaaagacaccatatctggcac

SEQ ID NO: 3259562 - DNA, 25 bp, Homo sapien
catatactccaggatgggatcttgg

SEQ ID NO: 3259563 - DNA, 25 bp, Homo sapien
tgatttactatcttggagcagggag

SEQ ID NO: 3259564 - DNA, 25 bp, Homo sapien
ggcacagcagctacaaatgagacta

SEQ ID NO: 3259565 - DNA, 25 bp, Homo sapien
tgttttcacaagatcgtatcaaaag

SEQ ID NO: 3259566 - DNA, 25 bp, Homo sapien
cacaagatcgtatcaaaagttccca

SEQ ID NO: 3259567 - DNA, 25 bp, Homo sapien
tacagtgttttcacaagatcgtatc

SEQ ID NO: 3259568 - DNA, 25 bp, Homo sapien
tttttattcgagcatggtcattttc

SEQ ID NO: 3259569 - DNA, 25 bp, Homo sapien
ttagtccatgccacgttccatattg

SEQ ID NO: 3259570 - DNA, 25 bp, Homo sapien
gtccatgccacgttccatattgtct

SEQ ID NO: 3259571 - DNA, 25 bp, Homo sapien
tagtccatgccacgttccatattgt

SEQ ID NO: 3259572 - DNA, 25 bp, Homo sapien
ccatgccacgttccatattgtcttc

SEQ ID NO: 3259573 - DNA, 25 bp, Homo sapien
ctcgtatcgtttcgggatccgtatc

SEQ ID NO: 3259574 - DNA, 25 bp, Homo sapien
tcgtttcgggatccgtatccatact

SEQ ID NO: 3259575 - DNA, 25 bp, Homo sapien
cgggatccgtatccatacttttatt

SEQ ID NO: 3259576 - DNA, 25 bp, Homo sapien
gtatcgtttcgggatccgtatccat

SEQ ID NO: 3259577 - DNA, 25 bp, Homo sapien
ccagcttcccgtagccatcctcgcc

SEQ ID NO: 3259578 - DNA, 25 bp, Homo sapien
cagcttcccgtagccatcctcgcct

SEQ ID NO: 3259579 - DNA, 25 bp, Homo sapien
cccagcttcccgtagccatcctcgc

SEQ ID NO: 3259580 - DNA, 25 bp, Homo sapien
ctagctctcgccatccctcggcgta

SEQ ID NO: 3259581 - DNA, 25 bp, Homo sapien
tagctctcgccatccctcggcgtac

SEQ ID NO: 3259582 - DNA, 25 bp, Homo sapien
tcttcctctcctccgagtcagagta

SEQ ID NO: 3259583 - DNA, 25 bp, Homo sapien
cttcctctcctccgagtcagagtac

SEQ ID NO: 3259584 - DNA, 25 bp, Homo sapien
taagcccggttcatcagcagggtgg

SEQ ID NO: 3259585 - DNA, 25 bp, Homo sapien
aagtgccctttctcgcgtgccttgc

SEQ ID NO: 3259586 - DNA, 25 bp, Homo sapien
cctggagggataatgctctgcaggt

SEQ ID NO: 3259587 - DNA, 25 bp, Homo sapien
gtgccttgctctccgcggcttcccg

SEQ ID NO: 3259588 - DNA, 25 bp, Homo sapien
ttgagtgctcgttaaggtgatgctc

SEQ ID NO: 3259589 - DNA, 25 bp, Homo sapien
agtgctcgttaaggtgatgctcgtg

SEQ ID NO: 3259590 - DNA, 25 bp, Homo sapien
ttaaggtgatgctcgtgtttaaacg

SEQ ID NO: 3259591 - DNA, 25 bp, Homo sapien
ctcgttaaggtgatgctcgtgttta

SEQ ID NO: 3259592 - DNA, 25 bp, Homo sapien
gctccataaagcaattccctgaaat

SEQ ID NO: 3259593 - DNA, 25 bp, Homo sapien
cgctgcgtatcagcaaaggtagttg

SEQ ID NO: 3259594 - DNA, 25 bp, Homo sapien
ttcttgcgagacagacagcagttgg

SEQ ID NO: 3259595 - DNA, 25 bp, Homo sapien
tggagtctgtcataacatctagacc

SEQ ID NO: 3259596 - DNA, 25 bp, Homo sapien
gtaggtgtaggctgtatgtggccag

SEQ ID NO: 3259597 - DNA, 25 bp, Homo sapien
gggtaggtgtaggctgtatgtggcc

SEQ ID NO: 3259598 - DNA, 25 bp, Homo sapien
ggtaggtgtaggctgtatgtggcca

SEQ ID NO: 3259599 - DNA, 25 bp, Homo sapien
ctgggtaggtgtaggctatatgtgg

SEQ ID NO: 3259600 - DNA, 25 bp, Homo sapien
tgtaggctatatgtggtaggaagct

SEQ ID NO: 3259601 - DNA, 25 bp, Homo sapien
taggtgtaggctatatgtggtagga

SEQ ID NO: 3259602 - DNA, 25 bp, Homo sapien
taggctatatgtggtaggaagctta

SEQ ID NO: 3259603 - DNA, 25 bp, Homo sapien
ccagtgttgggtattgtcgtagccc

SEQ ID NO: 3259604 - DNA, 25 bp, Homo sapien
atccagtgttgggtattgtcgtagc

SEQ ID NO: 3259605 - DNA, 25 bp, Homo sapien
gttgggtattgtcgtagcccaggaa

SEQ ID NO: 3259606 - DNA, 25 bp, Homo sapien
ctgatccagtgttgggtattgtcgt

SEQ ID NO: 3259607 - DNA, 25 bp, Homo sapien
caggttcagaggtttatctgagttt

SEQ ID NO: 3259608 - DNA, 25 bp, Homo sapien
gataaaagtcaggttcagaggttta

SEQ ID NO: 3259609 - DNA, 25 bp, Homo sapien
ttggcactaaaagggttcgtgccga

SEQ ID NO: 3259610 - DNA, 25 bp, Homo sapien
ctaaaagggttcgtgccgaacactg

SEQ ID NO: 3259611 - DNA, 25 bp, Homo sapien
ctgttatggtcaaaactgatgagcc

SEQ ID NO: 3259612 - DNA, 25 bp, Homo sapien
tgttatggtcaaaactgatgagcca

SEQ ID NO: 3259613 - DNA, 25 bp, Homo sapien
gttatggtcaaaactgatgagccat

SEQ ID NO: 3259614 - DNA, 25 bp, Homo sapien
ggattccttcctccagagttttcca

SEQ ID NO: 3259615 - DNA, 25 bp, Homo sapien
ttctctgaggctcaggattccttcc

SEQ ID NO: 3259616 - DNA, 25 bp, Homo sapien
gattccttcctccagagttttccat

SEQ ID NO: 3259617 - DNA, 25 bp, Homo sapien
tctgaggctcaggattccttcctcc

SEQ ID NO: 3259618 - DNA, 25 bp, Homo sapien
ctctcctttctacaagatgggccat

SEQ ID NO: 3259619 - DNA, 25 bp, Homo sapien
tacttgggaacaaaatcctcaggat

SEQ ID NO: 3259620 - DNA, 25 bp, Homo sapien
cttcatcaagctgcctacttgggaa

SEQ ID NO: 3259621 - DNA, 25 bp, Homo sapien
ttgggaacaaaatcctcaggatcca

SEQ ID NO: 3259622 - DNA, 25 bp, Homo sapien
gcctacttgggaacaaaatcctcag

SEQ ID NO: 3259623 - DNA, 25 bp, Homo sapien
gagctgcctgtgcaaaacgtagaaa

SEQ ID NO: 3259624 - DNA, 25 bp, Homo sapien
aaaggagatgggctcccagttgcca

SEQ ID NO: 3259625 - DNA, 25 bp, Homo sapien
cattcggtccttacacaggctcagg

SEQ ID NO: 3259626 - DNA, 25 bp, Homo sapien
gagtagaccctacagctgagctgcc

SEQ ID NO: 3259627 - DNA, 25 bp, Homo sapien
gaggatgcagcatcttgccccagga

SEQ ID NO: 3259628 - DNA, 25 bp, Homo sapien
gcagaatcagaggtagagcgcagct

SEQ ID NO: 3259629 - DNA, 25 bp, Homo sapien
gcgcagctgtctgcatttggagcac

SEQ ID NO: 3259630 - DNA, 25 bp, Homo sapien
cacagacagtttctgcaggcacacg

SEQ ID NO: 3259631 - DNA, 25 bp, Homo sapien
gttcttgattaaccattgagatgac

SEQ ID NO: 3259632 - DNA, 25 bp, Homo sapien
aaggatttgactttgaatacttctg

SEQ ID NO: 3259633 - DNA, 25 bp, Homo sapien
gagaagcctcttctaaatgctcaga

SEQ ID NO: 3259634 - DNA, 25 bp, Homo sapien
ccattgagatgacagtgtagatttg

SEQ ID NO: 3259635 - DNA, 25 bp, Homo sapien
tttgcaatcattgtcttgactccca

SEQ ID NO: 3259636 - DNA, 25 bp, Homo sapien
caccttctttagcagagagatttat

SEQ ID NO: 3259637 - DNA, 25 bp, Homo sapien
cctgaggagtctgcaagtattttgg

SEQ ID NO: 3259638 - DNA, 25 bp, Homo sapien
tggagaggatatgccttaaggctcc

SEQ ID NO: 3259639 - DNA, 25 bp, Homo sapien
tgttccttcaatgtcctttctggca

SEQ ID NO: 3259640 - DNA, 25 bp, Homo sapien
ctgctacaaatgcagaggtcaggtc

SEQ ID NO: 3259641 - DNA, 25 bp, Homo sapien
caaggtccctgagaagcccaatgac

SEQ ID NO: 3259642 - DNA, 25 bp, Homo sapien
gggcttccacacactataataatat

SEQ ID NO: 3259643 - DNA, 25 bp, Homo sapien
ctctgcttccagtgacaccagagac

SEQ ID NO: 3259644 - DNA, 25 bp, Homo sapien
tctgcttccagtgacaccagagaca

SEQ ID NO: 3259645 - DNA, 25 bp, Homo sapien
ctgcttccagtgacaccagagacat

SEQ ID NO: 3259646 - DNA, 25 bp, Homo sapien
attgaagaagggtttgaattccaca

SEQ ID NO: 3259647 - DNA, 25 bp, Homo sapien
tcaatcaagtgtctgatcctcatgt

SEQ ID NO: 3259648 - DNA, 25 bp, Homo sapien
catgtacttgcaaaggctttttgtg

SEQ ID NO: 3259649 - DNA, 25 bp, Homo sapien
tgaagaagggtttgaattccacatc

SEQ ID NO: 3259650 - DNA, 25 bp, Homo sapien
cttagaagtagatttggctgcaatg

SEQ ID NO: 3259651 - DNA, 25 bp, Homo sapien
aaataataatggtggaaagctctgg

SEQ ID NO: 3259652 - DNA, 25 bp, Homo sapien
gctgcaatgatgtaattgtccccca

SEQ ID NO: 3259653 - DNA, 25 bp, Homo sapien
tgatgtaattgtcccccagttttga

SEQ ID NO: 3259654 - DNA, 25 bp, Homo sapien
gatttcaagagtctggaagattcca

SEQ ID NO: 3259655 - DNA, 25 bp, Homo sapien
aaatggtaggcagtgttatcttctt

SEQ ID NO: 3259656 - DNA, 25 bp, Homo sapien
taaaagcagcacgtacttcaacctg

SEQ ID NO: 3259657 - DNA, 25 bp, Homo sapien
aggagccttggccatgttatcttgt

SEQ ID NO: 3259658 - DNA, 25 bp, Homo sapien
tcaggttgggcttgtaaaagcagca

SEQ ID NO: 3259659 - DNA, 25 bp, Homo sapien
acttgtataagatgcatctctgtcc

SEQ ID NO: 3259660 - DNA, 25 bp, Homo sapien
gatgactcagagacttgcaaactga

SEQ ID NO: 3259661 - DNA, 25 bp, Homo sapien
ctttggcaccttggcatactgggtc

SEQ ID NO: 3259662 - DNA, 25 bp, Homo sapien
tcacttgaagttgtcaactctcctt

SEQ ID NO: 3259663 - DNA, 25 bp, Homo sapien
tttcaaaatgatagcctgagaacta

SEQ ID NO: 3259664 - DNA, 25 bp, Homo sapien
aatttcaaaatgatagcctgagaac

SEQ ID NO: 3259665 - DNA, 25 bp, Homo sapien
tcaaaatgatagcctgagaactatt

SEQ ID NO: 3259666 - DNA, 25 bp, Homo sapien
aaatttcaaaatgatagcctgagaa

SEQ ID NO: 3259667 - DNA, 25 bp, Homo sapien
gagacatcatccagggtacggtatg

SEQ ID NO: 3259668 - DNA, 25 bp, Homo sapien
cagtgcttactgcaccagctgacag

SEQ ID NO: 3259669 - DNA, 25 bp, Homo sapien
tgtctgagacatccgtgaatcctgg

SEQ ID NO: 3259670 - DNA, 25 bp, Homo sapien
acagctggacgttttagatgggaga

SEQ ID NO: 3259671 - DNA, 25 bp, Homo sapien
gctgtcaaagggctactttcctggg

SEQ ID NO: 3259672 - DNA, 25 bp, Homo sapien
gtgtctcgtgctgtgatgctgtcaa

SEQ ID NO: 3259673 - DNA, 25 bp, Homo sapien
ttacaaaatatgcacgctttccagg

SEQ ID NO: 3259674 - DNA, 25 bp, Homo sapien
cagtggagcctgcaaaagagcatgc

SEQ ID NO: 3259675 - DNA, 25 bp, Homo sapien
tctcttcatttgttgctcaggttct

SEQ ID NO: 3259676 - DNA, 25 bp, Homo sapien
tgttcttgtcccaatttctcttcat

SEQ ID NO: 3259677 - DNA, 25 bp, Homo sapien
ttttatcccgggttagccaccagca

SEQ ID NO: 3259678 - DNA, 25 bp, Homo sapien
gtgaagtcctttggccaggcatgaa

SEQ ID NO: 3259679 - DNA, 25 bp, Homo sapien
tgttttttaacacacggagccactg

SEQ ID NO: 3259680 - DNA, 25 bp, Homo sapien
tgtgaaggcctccaagaaagggtca

SEQ ID NO: 3259681 - DNA, 25 bp, Homo sapien
cataaattaccttgctgggccctct

SEQ ID NO: 3259682 - DNA, 25 bp, Homo sapien
caattgtaatgatcacccacgggcc

SEQ ID NO: 3259683 - DNA, 25 bp, Homo sapien
ttctgatttggtctcttgagtggcg

SEQ ID NO: 3259684 - DNA, 25 bp, Homo sapien
gatttggtctcttgagtggcgggag

SEQ ID NO: 3259685 - DNA, 25 bp, Homo sapien
ggtctcttgagtggcgggaggttta

SEQ ID NO: 3259686 - DNA, 25 bp, Homo sapien
tttggtctcttgagtggcgggaggt

SEQ ID NO: 3259687 - DNA, 25 bp, Homo sapien
gtcgtccatgccgttggccgcatca

SEQ ID NO: 3259688 - DNA, 25 bp, Homo sapien
gggtgaattgttgaagtcctcctcg

SEQ ID NO: 3259689 - DNA, 25 bp, Homo sapien
tattgcgtgttttctaatctagtga

SEQ ID NO: 3259690 - DNA, 25 bp, Homo sapien
tagtgattagcctttcgtcctcgtc

SEQ ID NO: 3259691 - DNA, 25 bp, Homo sapien
tgaacagcagctgacattattacag

SEQ ID NO: 3259692 - DNA, 25 bp, Homo sapien
aacagcagctgacattattacaggg

SEQ ID NO: 3259693 - DNA, 25 bp, Homo sapien
gcagctgacattattacagggaaac

SEQ ID NO: 3259694 - DNA, 25 bp, Homo sapien
cagcagctgacattattacagggaa

SEQ ID NO: 3259695 - DNA, 25 bp, Homo sapien
cactggagaacgagcaatgctagca

SEQ ID NO: 3259696 - DNA, 25 bp, Homo sapien
gagtttatgtccttagtgcgcagcc

SEQ ID NO: 3259697 - DNA, 25 bp, Homo sapien
gatgtgtaacaaccacgcgagttta

SEQ ID NO: 3259698 - DNA, 25 bp, Homo sapien
ggaatctaggacagacacactcgtg

SEQ ID NO: 3259699 - DNA, 25 bp, Homo sapien
gatgttcaggataaaagagtgccac

SEQ ID NO: 3259700 - DNA, 25 bp, Homo sapien
taaaatgtgagcttggtaaacccag

SEQ ID NO: 3259701 - DNA, 25 bp, Homo sapien
ttggaaaacacatgcgtaaggcgtc

SEQ ID NO: 3259702 - DNA, 25 bp, Homo sapien
taaagagaaccggtctgtccagctg

SEQ ID NO: 3259703 - DNA, 25 bp, Homo sapien
tgaggaggactggaagtgactcctt

SEQ ID NO: 3259704 - DNA, 25 bp, Homo sapien
ggaggactggaagtgactcctttca

SEQ ID NO: 3259705 - DNA, 25 bp, Homo sapien
ctctgaggaggactggaagtgactc

SEQ ID NO: 3259706 - DNA, 25 bp, Homo sapien
tctgaggaggactggaagtgactcc

SEQ ID NO: 3259707 - DNA, 25 bp, Homo sapien
gaggctgcagttcgggatcgctcct

SEQ ID NO: 3259708 - DNA, 25 bp, Homo sapien
cttaaattggccagaaggggtcact

SEQ ID NO: 3259709 - DNA, 25 bp, Homo sapien
tgcagttcgggatcgctcctagccc

SEQ ID NO: 3259710 - DNA, 25 bp, Homo sapien
gtcactgctgttgaatgacacaggt

SEQ ID NO: 3259711 - DNA, 25 bp, Homo sapien
ttgaatgatggccaaacacctggtg

SEQ ID NO: 3259712 - DNA, 25 bp, Homo sapien
gagaaaatgtccttgccatccctag

SEQ ID NO: 3259713 - DNA, 25 bp, Homo sapien
tttggaccagacagtggatgcctgc

SEQ ID NO: 3259714 - DNA, 25 bp, Homo sapien
cctagctcagaaagtggaggaccac

SEQ ID NO: 3259715 - DNA, 25 bp, Homo sapien
cctttgagtaggaagcagacagtta

SEQ ID NO: 3259716 - DNA, 25 bp, Homo sapien
cagttaggatttcgggcctaagagg

SEQ ID NO: 3259717 - DNA, 25 bp, Homo sapien
taggaagcagacagttaggatttcg

SEQ ID NO: 3259718 - DNA, 25 bp, Homo sapien
gatttcgggcctaagaggaaagcga

SEQ ID NO: 3259719 - DNA, 25 bp, Homo sapien
ctccgtttggttgttggttgccttg

SEQ ID NO: 3259720 - DNA, 25 bp, Homo sapien
tgctgctggtggaatttttcctttt

SEQ ID NO: 3259721 - DNA, 25 bp, Homo sapien
gacagactcaggtttgcagctgtgg

SEQ ID NO: 3259722 - DNA, 25 bp, Homo sapien
gcattgttcccagcgctgctgttgg

SEQ ID NO: 3259723 - DNA, 25 bp, Homo sapien
atggaaaagggaagagggatcagtt

SEQ ID NO: 3259724 - DNA, 25 bp, Homo sapien
atatggaaaagggaagagggatcag

SEQ ID NO: 3259725 - DNA, 25 bp, Homo sapien
ctgcaatatggaaaagggaagaggg

SEQ ID NO: 3259726 - DNA, 25 bp, Homo sapien
caatatggaaaagggaagagggatc

SEQ ID NO: 3259727 - DNA, 25 bp, Homo sapien
aagcaggtcttcaggcagtctcggg

SEQ ID NO: 3259728 - DNA, 25 bp, Homo sapien
tttatgtctcgacatcagttcctgc

SEQ ID NO: 3259729 - DNA, 25 bp, Homo sapien
gtaagttttatgtctcgacatcagt

SEQ ID NO: 3259730 - DNA, 25 bp, Homo sapien
ttctgaaacaagcaggtcttcaggc

SEQ ID NO: 3259731 - DNA, 25 bp, Homo sapien
aagaagttcaaagacattggcattt

SEQ ID NO: 3259732 - DNA, 25 bp, Homo sapien
agaagttcaaagacattggcatttc

SEQ ID NO: 3259733 - DNA, 25 bp, Homo sapien
tgtacctattactgacctaagcttg

SEQ ID NO: 3259734 - DNA, 25 bp, Homo sapien
caacacaaggaatatgcacatcaca

SEQ ID NO: 3259735 - DNA, 25 bp, Homo sapien
tgggttagtaatgctggatcttcaa

SEQ ID NO: 3259736 - DNA, 25 bp, Homo sapien
agattaaagcctgaacaacacaagg

SEQ ID NO: 3259737 - DNA, 25 bp, Homo sapien
gaatgctaatcgagaatccccaaag

SEQ ID NO: 3259738 - DNA, 25 bp, Homo sapien
gacctagaaaggactatcagcattg

SEQ ID NO: 3259739 - DNA, 25 bp, Homo sapien
aaaatatcttcccatcgctgtaacc

SEQ ID NO: 3259740 - DNA, 25 bp, Homo sapien
ttttgcagtgactttcctctctggg

SEQ ID NO: 3259741 - DNA, 25 bp, Homo sapien
tgtatgcaaatgaggcttcttctct

SEQ ID NO: 3259742 - DNA, 25 bp, Homo sapien
ggcagccctccccttattcatgtat

SEQ ID NO: 3259743 - DNA, 25 bp, Homo sapien
tgctgcaaagatgcaatggctttgc

SEQ ID NO: 3259744 - DNA, 25 bp, Homo sapien
tgcaaagatgcaatggctttgctgg

SEQ ID NO: 3259745 - DNA, 25 bp, Homo sapien
aaatcaggaagcaggtttggggagt

SEQ ID NO: 3259746 - DNA, 25 bp, Homo sapien
atgaaatcaggaagcaggtttgggg

SEQ ID NO: 3259747 - DNA, 25 bp, Homo sapien
ctagggcattatgaaatgaaatcag

SEQ ID NO: 3259748 - DNA, 25 bp, Homo sapien
tgaaatcaggaagcaggtttgggga

SEQ ID NO: 3259749 - DNA, 25 bp, Homo sapien
cagccctgtcagactagccaagctc

SEQ ID NO: 3259750 - DNA, 25 bp, Homo sapien
agccctgtcagactagccaagctca

SEQ ID NO: 3259751 - DNA, 25 bp, Homo sapien
gccctgtcagactagccaagctcac

SEQ ID NO: 3259752 - DNA, 25 bp, Homo sapien
cattcaaggccccttctgttctgtt

SEQ ID NO: 3259753 - DNA, 25 bp, Homo sapien
ctgctgcatccgttaggcccatgaa

SEQ ID NO: 3259754 - DNA, 25 bp, Homo sapien
gatttctgctgcatccgttaggccc

SEQ ID NO: 3259755 - DNA, 25 bp, Homo sapien
tgaagagaccattcaaggccccttc

SEQ ID NO: 3259756 - DNA, 25 bp, Homo sapien
taacaaacatctgcggagtgctgtg

SEQ ID NO: 3259757 - DNA, 25 bp, Homo sapien
gctgtgtgtcacctagagaggtaca

SEQ ID NO: 3259758 - DNA, 25 bp, Homo sapien
taccgtagatcttagtcacttcagg

SEQ ID NO: 3259759 - DNA, 25 bp, Homo sapien
aaaatccatagtttccacaggctgg

SEQ ID NO: 3259760 - DNA, 25 bp, Homo sapien
acaacttctggacgaattctaaaat

SEQ ID NO: 3259761 - DNA, 25 bp, Homo sapien
caacttctggacgaattctaaaatg

SEQ ID NO: 3259762 - DNA, 25 bp, Homo sapien
ttctggacgaattctaaaatgtgaa

SEQ ID NO: 3259763 - DNA, 25 bp, Homo sapien
acttctggacgaattctaaaatgtg

SEQ ID NO: 3259764 - DNA, 25 bp, Homo sapien
ggtatttaaccttgctgtccatgtc

SEQ ID NO: 3259765 - DNA, 25 bp, Homo sapien
tgcacatggtatgacagcactggcc

SEQ ID NO: 3259766 - DNA, 25 bp, Homo sapien
ttgccaaagtcactaaaagccctct

SEQ ID NO: 3259767 - DNA, 25 bp, Homo sapien
tgctctaggtcgacttgcctcttca

SEQ ID NO: 3259768 - DNA, 25 bp, Homo sapien
ttattgtcaaattgttctgaagcat

SEQ ID NO: 3259769 - DNA, 25 bp, Homo sapien
caggtgtttagattatgtctcctcc

SEQ ID NO: 3259770 - DNA, 25 bp, Homo sapien
tctcctcctttattgtcaaattgtt

SEQ ID NO: 3259771 - DNA, 25 bp, Homo sapien
aactgatgcataggcaggtgtttag

SEQ ID NO: 3259772 - DNA, 25 bp, Homo sapien
gctagggacagacgatgaggccata

SEQ ID NO: 3259773 - DNA, 25 bp, Homo sapien
aattttggcggcatctgtagctctg

SEQ ID NO: 3259774 - DNA, 25 bp, Homo sapien
gtttcctgggagcaacagatctgag

SEQ ID NO: 3259775 - DNA, 25 bp, Homo sapien
tattcagcaagatggtacctgggca

SEQ ID NO: 3259776 - DNA, 25 bp, Homo sapien
gacacatttccgagttcctggcttg

SEQ ID NO: 3259777 - DNA, 25 bp, Homo sapien
ggatggcccaatgcgcactaaactg

SEQ ID NO: 3259778 - DNA, 25 bp, Homo sapien
caggcggacaacaggacttctgctt

SEQ ID NO: 3259779 - DNA, 25 bp, Homo sapien
tgctgcttactgaaaggtgccatct

SEQ ID NO: 3259780 - DNA, 25 bp, Homo sapien
acactgaggacatgcttcgtgaaac

SEQ ID NO: 3259781 - DNA, 25 bp, Homo sapien
cactgaggacatgcttcgtgaaacc

SEQ ID NO: 3259782 - DNA, 25 bp, Homo sapien
actgaggacatgcttcgtgaaaccc

SEQ ID NO: 3259783 - DNA, 25 bp, Homo sapien
tgaggacatgcttcgtgaaacccac

SEQ ID NO: 3259784 - DNA, 25 bp, Homo sapien
cacccggtatcggaatacccaacag

SEQ ID NO: 3259785 - DNA, 25 bp, Homo sapien
ccggtatcggaatacccaacagcaa

SEQ ID NO: 3259786 - DNA, 25 bp, Homo sapien
tatcggaatacccaacagcaacaaa

SEQ ID NO: 3259787 - DNA, 25 bp, Homo sapien
ggtatcggaatacccaacagcaaca

SEQ ID NO: 3259788 - DNA, 25 bp, Homo sapien
agggaacgacaagagggaacagcag

SEQ ID NO: 3259789 - DNA, 25 bp, Homo sapien
cttgtcatgctgggatgcgacagga

SEQ ID NO: 3259790 - DNA, 25 bp, Homo sapien
ttgttgttgcttcaaaagcaccagg

SEQ ID NO: 3259791 - DNA, 25 bp, Homo sapien
tgctggccagcgtctgtgttcagcc

SEQ ID NO: 3259792 - DNA, 25 bp, Homo sapien
tcagatggacgtggaggcttcagat

SEQ ID NO: 3259793 - DNA, 25 bp, Homo sapien
gaatgtattttgtgactgctccgct

SEQ ID NO: 3259794 - DNA, 25 bp, Homo sapien
tatttcctgactgcaggtctccgtg

SEQ ID NO: 3259795 - DNA, 25 bp, Homo sapien
tccctccaacggtgagagctgcctt

SEQ ID NO: 3259796 - DNA, 25 bp, Homo sapien
gagggtgaagtttgttagccccatc

SEQ ID NO: 3259797 - DNA, 25 bp, Homo sapien
tagttgagggtgaagtttgttagcc

SEQ ID NO: 3259798 - DNA, 25 bp, Homo sapien
gtttgttagccccatcctggtgatg

SEQ ID NO: 3259799 - DNA, 25 bp, Homo sapien
ctggtgatgtttttggacagctgat

SEQ ID NO: 3259800 - DNA, 25 bp, Homo sapien
ccatgttttgattctcatgagatca

SEQ ID NO: 3259801 - DNA, 25 bp, Homo sapien
actaactctcggtattgtctaatgg

SEQ ID NO: 3259802 - DNA, 25 bp, Homo sapien
tgtctaatggtaaagtgccatgttt

SEQ ID NO: 3259803 - DNA, 25 bp, Homo sapien
catggctaggatgcttctcgggact

SEQ ID NO: 3259804 - DNA, 25 bp, Homo sapien
tggaagtgacaaaccacacagtcat

SEQ ID NO: 3259805 - DNA, 25 bp, Homo sapien
ctggaagtgacaaaccacacagtca

SEQ ID NO: 3259806 - DNA, 25 bp, Homo sapien
agtgacaaaccacacagtcattcat

SEQ ID NO: 3259807 - DNA, 25 bp, Homo sapien
gaagtgacaaaccacacagtcattc

SEQ ID NO: 3259808 - DNA, 25 bp, Homo sapien
ttgagatcctcattgactttctgga

SEQ ID NO: 3259809 - DNA, 25 bp, Homo sapien
ctccatctcggctttgagatcctca

SEQ ID NO: 3259810 - DNA, 25 bp, Homo sapien
gcttccgatcaagctttttggagaa

SEQ ID NO: 3259811 - DNA, 25 bp, Homo sapien
cattgggcttccgatcaagcttttt

SEQ ID NO: 3259812 - DNA, 25 bp, Homo sapien
tttctgtggtaaccaaaatcagctg

SEQ ID NO: 3259813 - DNA, 25 bp, Homo sapien
catgttaccgtactgtgagctctga

SEQ ID NO: 3259814 - DNA, 25 bp, Homo sapien
tttgtttctgtggtaaccaaaatca

SEQ ID NO: 3259815 - DNA, 25 bp, Homo sapien
tgttgtgctgaattcatgttaccgt

SEQ ID NO: 3259816 - DNA, 25 bp, Homo sapien
tcgcagtccaccgtgatggatgagt

SEQ ID NO: 3259817 - DNA, 25 bp, Homo sapien
taaacatgggcttcccgtgctgggt

SEQ ID NO: 3259818 - DNA, 25 bp, Homo sapien
tcaaacacagtgctaaagtaacggg

SEQ ID NO: 3259819 - DNA, 25 bp, Homo sapien
gaatgtaatacaggtcggtcacccc

SEQ ID NO: 3259820 - DNA, 25 bp, Homo sapien
ctttcacttggtctaaattggtctc

SEQ ID NO: 3259821 - DNA, 25 bp, Homo sapien
tttcacttggtctaaattggtctct

SEQ ID NO: 3259822 - DNA, 25 bp, Homo sapien
cacttggtctaaattggtctctttc

SEQ ID NO: 3259823 - DNA, 25 bp, Homo sapien
ttcacttggtctaaattggtctctt

SEQ ID NO: 3259824 - DNA, 25 bp, Homo sapien
cagcagcgatttgaaatcctcttac

SEQ ID NO: 3259825 - DNA, 25 bp, Homo sapien
tgggcctttctgatacaggatgctt

SEQ ID NO: 3259826 - DNA, 25 bp, Homo sapien
caggatgcttagaaatctgtaacaa

SEQ ID NO: 3259827 - DNA, 25 bp, Homo sapien
cagcgattgtgtaagtagctgggcc

SEQ ID NO: 3259828 - DNA, 25 bp, Homo sapien
tgcagtcctgttccagcatgggcag

SEQ ID NO: 3259829 - DNA, 25 bp, Homo sapien
aatagagaaatcctgaccactgcag

SEQ ID NO: 3259830 - DNA, 25 bp, Homo sapien
gaagtgatgagagcgatcagctaca

SEQ ID NO: 3259831 - DNA, 25 bp, Homo sapien
caacacactgtgttagaagctgcag

SEQ ID NO: 3259832 - DNA, 25 bp, Homo sapien
tcacctccaggacgagaggagggct

SEQ ID NO: 3259833 - DNA, 25 bp, Homo sapien
ggctccattcctaaagatgaatgac

SEQ ID NO: 3259834 - DNA, 25 bp, Homo sapien
catctctgaacggtctgcactccat

SEQ ID NO: 3259835 - DNA, 25 bp, Homo sapien
gatgaatgacatctctgaacggtct

SEQ ID NO: 3259836 - DNA, 25 bp, Homo sapien
gaaaggagatctggactatagacaa

SEQ ID NO: 3259837 - DNA, 25 bp, Homo sapien
tggaaacgctgcagaagacagatcc

SEQ ID NO: 3259838 - DNA, 25 bp, Homo sapien
gatccattagatagccatgaaagga

SEQ ID NO: 3259839 - DNA, 25 bp, Homo sapien
gaaaggatgccaacacctggatgga

SEQ ID NO: 3259840 - DNA, 25 bp, Homo sapien
ttaaaacggactcaacaacaagcag

SEQ ID NO: 3259841 - DNA, 25 bp, Homo sapien
tcaggacagactacagaaagaagaa

SEQ ID NO: 3259842 - DNA, 25 bp, Homo sapien
tctaagtggttgaaagagagctgtt

SEQ ID NO: 3259843 - DNA, 25 bp, Homo sapien
gagtacccactctgagccaagtgca

SEQ ID NO: 3259844 - DNA, 25 bp, Homo sapien
tagagtagtccctggcacatgagaa

SEQ ID NO: 3259845 - DNA, 25 bp, Homo sapien
tcatgagaatgcaaagaagggaact

SEQ ID NO: 3259846 - DNA, 25 bp, Homo sapien
aggatactacgcaaagacagcccca

SEQ ID NO: 3259847 - DNA, 25 bp, Homo sapien
gaagggctccatgattgcaaatgac

SEQ ID NO: 3259848 - DNA, 25 bp, Homo sapien
tcacttggtacttcctggcttccta

SEQ ID NO: 3259849 - DNA, 25 bp, Homo sapien
gaatgggcacagtgacatcctcaag

SEQ ID NO: 3259850 - DNA, 25 bp, Homo sapien
cctcaagtgctgtaactgatgcatg

SEQ ID NO: 3259851 - DNA, 25 bp, Homo sapien
tctttgtggtgttgaatgggcacag

SEQ ID NO: 3259852 - DNA, 25 bp, Homo sapien
gcagcccgatccagctcagattgct

SEQ ID NO: 3259853 - DNA, 25 bp, Homo sapien
cagattgcttggagagcagggaacc

SEQ ID NO: 3259854 - DNA, 25 bp, Homo sapien
tgctgaatgaacgtacgaatagagc

SEQ ID NO: 3259855 - DNA, 25 bp, Homo sapien
cgttcaccgttcagtagcacaaggg

SEQ ID NO: 3259856 - DNA, 25 bp, Homo sapien
gatacactaagacaagagcaatgtg

SEQ ID NO: 3259857 - DNA, 25 bp, Homo sapien
tcattcagcaaaaacatatccagtg

SEQ ID NO: 3259858 - DNA, 25 bp, Homo sapien
caaacaagggcacagattgatacac

SEQ ID NO: 3259859 - DNA, 25 bp, Homo sapien
ccaacacgggttttgtgggagcaca

SEQ ID NO: 3259860 - DNA, 25 bp, Homo sapien
cagcgctcacacttgtgcaaaacac

SEQ ID NO: 3259861 - DNA, 25 bp, Homo sapien
gctctgcttcacagcgctcacactt

SEQ ID NO: 3259862 - DNA, 25 bp, Homo sapien
tgcttcacagcgctcacacttgtgc

SEQ ID NO: 3259863 - DNA, 25 bp, Homo sapien
cagaggcaatgggcagatgtgctct

SEQ ID NO: 3259864 - DNA, 25 bp, Homo sapien
attatctacaagaggaacaggaaat

SEQ ID NO: 3259865 - DNA, 25 bp, Homo sapien
tattatctacaagaggaacaggaaa

SEQ ID NO: 3259866 - DNA, 25 bp, Homo sapien
tttattatctacaagaggaacagga

SEQ ID NO: 3259867 - DNA, 25 bp, Homo sapien
ttttattatctacaagaggaacagg

SEQ ID NO: 3259868 - DNA, 25 bp, Homo sapien
taccaatcctagcagggaccggcgg

SEQ ID NO: 3259869 - DNA, 25 bp, Homo sapien
gaccggcggagttacagctgacttg

SEQ ID NO: 3259870 - DNA, 25 bp, Homo sapien
ggtagagcaaactttcccatgcgtt

SEQ ID NO: 3259871 - DNA, 25 bp, Homo sapien
ttcaacatggcctcttgcacatctg

SEQ ID NO: 3259872 - DNA, 25 bp, Homo sapien
ctctggtaactgcattcgatctgac

SEQ ID NO: 3259873 - DNA, 25 bp, Homo sapien
cccaagttccatgctgtgatgcctc

SEQ ID NO: 3259874 - DNA, 25 bp, Homo sapien
gggtcccaagttccatgctgtgatg

SEQ ID NO: 3259875 - DNA, 25 bp, Homo sapien
ggcagtgggtcccaagttccatgct

SEQ ID NO: 3259876 - DNA, 25 bp, Homo sapien
tgtttcccctcaatcttgcctggtg

SEQ ID NO: 3259877 - DNA, 25 bp, Homo sapien
gaaatccaagctcccgagaaagacg

SEQ ID NO: 3259878 - DNA, 25 bp, Homo sapien
tgaagttctcaggatgaaatccaag

SEQ ID NO: 3259879 - DNA, 25 bp, Homo sapien
tgcctggtgcttcattcagctcagc

SEQ ID NO: 3259880 - DNA, 25 bp, Homo sapien
tctttccgacaccatgtaggtgaat

SEQ ID NO: 3259881 - DNA, 25 bp, Homo sapien
tttccgacaccatgtaggtgaattc

SEQ ID NO: 3259882 - DNA, 25 bp, Homo sapien
ctctttccgacaccatgtaggtgaa

SEQ ID NO: 3259883 - DNA, 25 bp, Homo sapien
ctttccgacaccatgtaggtgaatt

SEQ ID NO: 3259884 - DNA, 25 bp, Homo sapien
tcaggtcctccttgaaagagaaaga

SEQ ID NO: 3259885 - DNA, 25 bp, Homo sapien
tgactctcaggtcctccttgaaaga

SEQ ID NO: 3259886 - DNA, 25 bp, Homo sapien
gactctcaggtcctccttgaaagag

SEQ ID NO: 3259887 - DNA, 25 bp, Homo sapien
cctccttgaaagagaaagaatgcat

SEQ ID NO: 3259888 - DNA, 25 bp, Homo sapien
taggagatcaaaagccgtctgtctg

SEQ ID NO: 3259889 - DNA, 25 bp, Homo sapien
ttagcccgtcctggtcctaatggac

SEQ ID NO: 3259890 - DNA, 25 bp, Homo sapien
catcgggtaccactttaggagatca

SEQ ID NO: 3259891 - DNA, 25 bp, Homo sapien
atcatcccagctagacatcgggtac

SEQ ID NO: 3259892 - DNA, 25 bp, Homo sapien
gttgctgagtggccattctccccac

SEQ ID NO: 3259893 - DNA, 25 bp, Homo sapien
aattgttgctgagtggccattctcc

SEQ ID NO: 3259894 - DNA, 25 bp, Homo sapien
ttgttgctgagtggccattctcccc

SEQ ID NO: 3259895 - DNA, 25 bp, Homo sapien
ctaattgttgctgagtggccattct

SEQ ID NO: 3259896 - DNA, 25 bp, Homo sapien
gccagccctgcacaagcaggtatac

SEQ ID NO: 3259897 - DNA, 25 bp, Homo sapien
ccagccctgcacaagcaggtataca

SEQ ID NO: 3259898 - DNA, 25 bp, Homo sapien
cagccctgcacaagcaggtatacac

SEQ ID NO: 3259899 - DNA, 25 bp, Homo sapien
cgccagccctgcacaagcaggtata

SEQ ID NO: 3259900 - DNA, 25 bp, Homo sapien
agggatcatttcctgtaaacgaagt

SEQ ID NO: 3259901 - DNA, 25 bp, Homo sapien
ctgacaattggcatttggtgattta

SEQ ID NO: 3259902 - DNA, 25 bp, Homo sapien
tgtggcaatatcgagctgacaattg

SEQ ID NO: 3259903 - DNA, 25 bp, Homo sapien
tatcgagctgacaattggcatttgg

SEQ ID NO: 3259904 - DNA, 25 bp, Homo sapien
cattcttacatatacgaaggttctg

SEQ ID NO: 3259905 - DNA, 25 bp, Homo sapien
aaacatgaatacgagcaccacctgg

SEQ ID NO: 3259906 - DNA, 25 bp, Homo sapien
tctctttgaaacatgaatacgagca

SEQ ID NO: 3259907 - DNA, 25 bp, Homo sapien
tatacgaaggttctgctccactttc

SEQ ID NO: 3259908 - DNA, 25 bp, Homo sapien
aaaggcctgagatgtacttggcagc

SEQ ID NO: 3259909 - DNA, 25 bp, Homo sapien
tgtacttggcagcttgatctttctg

SEQ ID NO: 3259910 - DNA, 25 bp, Homo sapien
acacacagaggtggataaatccctg

SEQ ID NO: 3259911 - DNA, 25 bp, Homo sapien
gagtgtataaagaccaagactgtcc

SEQ ID NO: 3259912 - DNA, 25 bp, Homo sapien
agtcatgtgactctggaaatcacat

SEQ ID NO: 3259913 - DNA, 25 bp, Homo sapien
gaaatcacatttgactggctttgtc

SEQ ID NO: 3259914 - DNA, 25 bp, Homo sapien
aatctctcgctttgtgatccttaca

SEQ ID NO: 3259915 - DNA, 25 bp, Homo sapien
gctttgtcttctgataaatctctcg

SEQ ID NO: 3259916 - DNA, 25 bp, Homo sapien
caaggcttaggaaccagatgcatca

SEQ ID NO: 3259917 - DNA, 25 bp, Homo sapien
tactctctgcatgtttcgggtgtcg

SEQ ID NO: 3259918 - DNA, 25 bp, Homo sapien
ggaataggtgcacatttgtactctc

SEQ ID NO: 3259919 - DNA, 25 bp, Homo sapien
gatgcatcaatgttgggtcaagaga

SEQ ID NO: 3259920 - DNA, 25 bp, Homo sapien
gactctggcaaagagtgaaacagca

SEQ ID NO: 3259921 - DNA, 25 bp, Homo sapien
tagactctggcaaagagtgaaacag

SEQ ID NO: 3259922 - DNA, 25 bp, Homo sapien
actctggcaaagagtgaaacagcag

SEQ ID NO: 3259923 - DNA, 25 bp, Homo sapien
cttagactctggcaaagagtgaaac

SEQ ID NO: 3259924 - DNA, 25 bp, Homo sapien
tataacaggtttcaatagtagcccc

SEQ ID NO: 3259925 - DNA, 25 bp, Homo sapien
ggtaacttaaagtggctgaatccta

SEQ ID NO: 3259926 - DNA, 25 bp, Homo sapien
gaatcctacctgagcatgagcagaa

SEQ ID NO: 3259927 - DNA, 25 bp, Homo sapien
gatatgtccatttggaacgtgtaaa

SEQ ID NO: 3259928 - DNA, 25 bp, Homo sapien
aaactgcagcctcacaacggtagtg

SEQ ID NO: 3259929 - DNA, 25 bp, Homo sapien
cgccaagctagctgttgtcccagag

SEQ ID NO: 3259930 - DNA, 25 bp, Homo sapien
tcaagagttgaagcctcgccaagct

SEQ ID NO: 3259931 - DNA, 25 bp, Homo sapien
ggcttctactgcatggatgtccata

SEQ ID NO: 3259932 - DNA, 25 bp, Homo sapien
acagttttgtggagacatgcccttg

SEQ ID NO: 3259933 - DNA, 25 bp, Homo sapien
tgctgcgaggtaacagttttgtgga

SEQ ID NO: 3259934 - DNA, 25 bp, Homo sapien
ggagacatgcccttggaaagaaaat

SEQ ID NO: 3259935 - DNA, 25 bp, Homo sapien
ctgctgcgaggtaacagttttgtgg

SEQ ID NO: 3259936 - DNA, 25 bp, Homo sapien
cccttgactagatttggacagaaca

SEQ ID NO: 3259937 - DNA, 25 bp, Homo sapien
tctgctggattaagtgcatcactgc

SEQ ID NO: 3259938 - DNA, 25 bp, Homo sapien
gacaacaaattggacgtgtgccagt

SEQ ID NO: 3259939 - DNA, 25 bp, Homo sapien
tgtgccagtccaaaagtgacagtgc

SEQ ID NO: 3259940 - DNA, 25 bp, Homo sapien
atctcaatttcgctcatctgcaagg

SEQ ID NO: 3259941 - DNA, 25 bp, Homo sapien
tctcaatttcgctcatctgcaaggc

SEQ ID NO: 3259942 - DNA, 25 bp, Homo sapien
tctgcaaggctgactcatggatggc

SEQ ID NO: 3259943 - DNA, 25 bp, Homo sapien
tcatggatggcaataggtttactca

SEQ ID NO: 3259944 - DNA, 25 bp, Homo sapien
cccaatttagattctgtcagccata

SEQ ID NO: 3259945 - DNA, 25 bp, Homo sapien
catttgaacattgctcatcatcgtg

SEQ ID NO: 3259946 - DNA, 25 bp, Homo sapien
catcaagagacagaggacgggtgcc

SEQ ID NO: 3259947 - DNA, 25 bp, Homo sapien
tgagagctggagaaatctcttctac

SEQ ID NO: 3259948 - DNA, 25 bp, Homo sapien
gcagggatgcaaagacccagctctt

SEQ ID NO: 3259949 - DNA, 25 bp, Homo sapien
cagggatgcaaagacccagctcttc

SEQ ID NO: 3259950 - DNA, 25 bp, Homo sapien
gggatgcaaagacccagctcttcct

SEQ ID NO: 3259951 - DNA, 25 bp, Homo sapien
ggatgcaaagacccagctcttcctt

SEQ ID NO: 3259952 - DNA, 25 bp, Homo sapien
cctcacctgttgaatggacctaata

SEQ ID NO: 3259953 - DNA, 25 bp, Homo sapien
gaaggaagcagattcgatgtcccaa

SEQ ID NO: 3259954 - DNA, 25 bp, Homo sapien
tttgacttgactcagaggacacggt

SEQ ID NO: 3259955 - DNA, 25 bp, Homo sapien
tcctaacatcacaagcaaagctgcc

SEQ ID NO: 3259956 - DNA, 25 bp, Homo sapien
ggtccatgggtacaaaaaactgtca

SEQ ID NO: 3259957 - DNA, 25 bp, Homo sapien
gaattgctcaaactcaggttgccag

SEQ ID NO: 3259958 - DNA, 25 bp, Homo sapien
tacagagcctaggatactgcaggtg

SEQ ID NO: 3259959 - DNA, 25 bp, Homo sapien
acatgcaaggaaagactacgtgacc

SEQ ID NO: 3259960 - DNA, 25 bp, Homo sapien
gaagagccaggcaactgtcatagtc

SEQ ID NO: 3259961 - DNA, 25 bp, Homo sapien
gatacacaaggagtgagtctctaag

SEQ ID NO: 3259962 - DNA, 25 bp, Homo sapien
taaaatgagtttcgagggccttggc

SEQ ID NO: 3259963 - DNA, 25 bp, Homo sapien
gacaccatgtcctgagatacacaag

SEQ ID NO: 3259964 - DNA, 25 bp, Homo sapien
gtccacttcattatatacagaaatc

SEQ ID NO: 3259965 - DNA, 25 bp, Homo sapien
gacctgacacaccatcctttctctc

SEQ ID NO: 3259966 - DNA, 25 bp, Homo sapien
tcaaactttcaacagtgtaggttac

SEQ ID NO: 3259967 - DNA, 25 bp, Homo sapien
gatgcaaatttatggcaataacctt

SEQ ID NO: 3259968 - DNA, 25 bp, Homo sapien
ctgttgtcgctcctcctggttgatc

SEQ ID NO: 3259969 - DNA, 25 bp, Homo sapien
cctcctggttgatctcatgatagca

SEQ ID NO: 3259970 - DNA, 25 bp, Homo sapien
tcctcctggttgatctcatgatagc

SEQ ID NO: 3259971 - DNA, 25 bp, Homo sapien
cgctcctcctggttgatctcatgat

SEQ ID NO: 3259972 - DNA, 25 bp, Homo sapien
tagctgaatgcccacactgtgagaa

SEQ ID NO: 3259973 - DNA, 25 bp, Homo sapien
cgcacattcgggataacttactgga

SEQ ID NO: 3259974 - DNA, 25 bp, Homo sapien
gattttaatggattcctgaccctga

SEQ ID NO: 3259975 - DNA, 25 bp, Homo sapien
gaccctgatggttgcttgtgaaaac

SEQ ID NO: 3259976 - DNA, 25 bp, Homo sapien
cattgaccgatcacagctggtgcca

SEQ ID NO: 3259977 - DNA, 25 bp, Homo sapien
cattcacactttccaccaatttgga

SEQ ID NO: 3259978 - DNA, 25 bp, Homo sapien
tgttttaagaacattgaccgatcac

SEQ ID NO: 3259979 - DNA, 25 bp, Homo sapien
ttcacactttccaccaatttggaga

SEQ ID NO: 3259980 - DNA, 25 bp, Homo sapien
ctgagggaataatcgctgcattaaa

SEQ ID NO: 3259981 - DNA, 25 bp, Homo sapien
cagccggcttgaaacttatgatggg

SEQ ID NO: 3259982 - DNA, 25 bp, Homo sapien
gaatgtctaccgaggtggctcatgc

SEQ ID NO: 3259983 - DNA, 25 bp, Homo sapien
tccaaatcttagctggacacagccg

SEQ ID NO: 3259984 - DNA, 25 bp, Homo sapien
ttcttatctgtctttcctttctcat

SEQ ID NO: 3259985 - DNA, 25 bp, Homo sapien
ctttccttcttatctgtctttcctt

SEQ ID NO: 3259986 - DNA, 25 bp, Homo sapien
ttccttcttatctgtctttcctttc

SEQ ID NO: 3259987 - DNA, 25 bp, Homo sapien
ccttcttatctgtctttcctttctc

SEQ ID NO: 3259988 - DNA, 25 bp, Homo sapien
tcatctgggctgtagcggaacagtg

SEQ ID NO: 3259989 - DNA, 25 bp, Homo sapien
ggctctatatgtggtgggctgccct

SEQ ID NO: 3259990 - DNA, 25 bp, Homo sapien
cagagtaggcaatgaaagtgctgca

SEQ ID NO: 3259991 - DNA, 25 bp, Homo sapien
gacaggctaacccatcgtcccttaa

SEQ ID NO: 3259992 - DNA, 25 bp, Homo sapien
tcttcatctttaatcgtaagataac

SEQ ID NO: 3259993 - DNA, 25 bp, Homo sapien
cgtaagataactccttctaatacag

SEQ ID NO: 3259994 - DNA, 25 bp, Homo sapien
gccaaaattgtctcctagtgttttc

SEQ ID NO: 3259995 - DNA, 25 bp, Homo sapien
tctcatgacgttctgataaagcaaa

SEQ ID NO: 3259996 - DNA, 25 bp, Homo sapien
tatggcgaacgctgcatccacttag

SEQ ID NO: 3259997 - DNA, 25 bp, Homo sapien
cacttagaacgcatgtacagtaggg

SEQ ID NO: 3259998 - DNA, 25 bp, Homo sapien
catgaaactgactcttgaagcaacc

SEQ ID NO: 3259999 - DNA, 25 bp, Homo sapien
tgcctcagagggacgagaattccca

SEQ ID NO: 3260000 - DNA, 25 bp, Homo sapien
tggctgctggtaacccttggagttc

SEQ ID NO: 3260001 - DNA, 25 bp, Homo sapien
tatgaaacagcccagcctggtagtt

SEQ ID NO: 3260002 - DNA, 25 bp, Homo sapien
cagctagctggatgtgaggaatccc

SEQ ID NO: 3260003 - DNA, 25 bp, Homo sapien
tgagaacactagaacaggtggcttc

SEQ ID NO: 3260004 - DNA, 25 bp, Homo sapien
ggatcggccacagtaacagctgggc

SEQ ID NO: 3260005 - DNA, 25 bp, Homo sapien
cacgtgaaattcagtcggaaattca

SEQ ID NO: 3260006 - DNA, 25 bp, Homo sapien
gccacagtaacagctgggccacgtg

SEQ ID NO: 3260007 - DNA, 25 bp, Homo sapien
cagctgggccacgtgaaattcagtc

SEQ ID NO: 3260008 - DNA, 25 bp, Homo sapien
aaacaaataaacgaactgctcttga

SEQ ID NO: 3260009 - DNA, 25 bp, Homo sapien
acaaataaacgaactgctcttgacc

SEQ ID NO: 3260010 - DNA, 25 bp, Homo sapien
tgctcttgaccaccaaaaagaatca

SEQ ID NO: 3260011 - DNA, 25 bp, Homo sapien
aacaaataaacgaactgctcttgac

SEQ ID NO: 3260012 - DNA, 25 bp, Homo sapien
catgccagggagcagtagaagacct

SEQ ID NO: 3260013 - DNA, 25 bp, Homo sapien
ggtatacccaagagtgtccccatca

SEQ ID NO: 3260014 - DNA, 25 bp, Homo sapien
cagaggacgctcatggaatcaggta

SEQ ID NO: 3260015 - DNA, 25 bp, Homo sapien
gaggcaagcacttaacgttggagag

SEQ ID NO: 3260016 - DNA, 25 bp, Homo sapien
ctggaatatcggaatatgagagtaa

SEQ ID NO: 3260017 - DNA, 25 bp, Homo sapien
tgagaaccatctcaggtggttgatt

SEQ ID NO: 3260018 - DNA, 25 bp, Homo sapien
gaaccatctcaggtggttgattttt

SEQ ID NO: 3260019 - DNA, 25 bp, Homo sapien
ttttatctggaatatcggaatatga

SEQ ID NO: 3260020 - DNA, 25 bp, Homo sapien
tcaacggtagaaggcctgcaatgca

SEQ ID NO: 3260021 - DNA, 25 bp, Homo sapien
tctttaactggggctcatgagtaca

SEQ ID NO: 3260022 - DNA, 25 bp, Homo sapien
aggcagactttgacctgcatcctca

SEQ ID NO: 3260023 - DNA, 25 bp, Homo sapien
ttcaggcagactttgacctgcatcc

SEQ ID NO: 3260024 - DNA, 25 bp, Homo sapien
ccaaacaataaattctggcagcaac

SEQ ID NO: 3260025 - DNA, 25 bp, Homo sapien
tccattaatattcattttttcccca

SEQ ID NO: 3260026 - DNA, 25 bp, Homo sapien
cattaatattcattttttccccaat

SEQ ID NO: 3260027 - DNA, 25 bp, Homo sapien
taagaacgcccatcaatgtgttatg

SEQ ID NO: 3260028 - DNA, 25 bp, Homo sapien
tcaaagggatgaaagcgctgccaaa

SEQ ID NO: 3260029 - DNA, 25 bp, Homo sapien
tacgtttcaagtaaggccacttaga

SEQ ID NO: 3260030 - DNA, 25 bp, Homo sapien
gccatgcccacttacacatagttta

SEQ ID NO: 3260031 - DNA, 25 bp, Homo sapien
ttaaaaaggtcatatggactcccac

SEQ ID NO: 3260032 - DNA, 25 bp, Homo sapien
tgggagcagagcctaatctcctcag

SEQ ID NO: 3260033 - DNA, 25 bp, Homo sapien
tttctgcacttgaatgttgggagca

SEQ ID NO: 3260034 - DNA, 25 bp, Homo sapien
tagaagcgagagtgggtttctgcac

SEQ ID NO: 3260035 - DNA, 25 bp, Homo sapien
gggagcctcggcatcaggctgtcca

SEQ ID NO: 3260036 - DNA, 25 bp, Homo sapien
ccagtgggaagccttttcaatgcat

SEQ ID NO: 3260037 - DNA, 25 bp, Homo sapien
gggaagccttttcaatgcatagaag

SEQ ID NO: 3260038 - DNA, 25 bp, Homo sapien
attgttcacttgataagtcctgccc

SEQ ID NO: 3260039 - DNA, 25 bp, Homo sapien
ccaaaggatagaacttcctccatgg

SEQ ID NO: 3260040 - DNA, 25 bp, Homo sapien
cagagtagtaccttcctggtgttgt

SEQ ID NO: 3260041 - DNA, 25 bp, Homo sapien
tccagctgccagagtagtaccttcc

SEQ ID NO: 3260042 - DNA, 25 bp, Homo sapien
agaacttcctccatggaactgccca

SEQ ID NO: 3260043 - DNA, 25 bp, Homo sapien
cttagggatgcacaggccaatttct

SEQ ID NO: 3260044 - DNA, 25 bp, Homo sapien
caggccaatttctcacatagtctaa

SEQ ID NO: 3260045 - DNA, 25 bp, Homo sapien
tagtctaataacctggcccatcctg

SEQ ID NO: 3260046 - DNA, 25 bp, Homo sapien
tctccccaccaattaccacctgttc

SEQ ID NO: 3260047 - DNA, 25 bp, Homo sapien
taagagatggagcacgtggaggaag

SEQ ID NO: 3260048 - DNA, 25 bp, Homo sapien
gggcttaagagatggagcacgtgga

SEQ ID NO: 3260049 - DNA, 25 bp, Homo sapien
cccatcaggggagtgaagggcttaa

SEQ ID NO: 3260050 - DNA, 25 bp, Homo sapien
gaagagggtcaatactgaggagctt

SEQ ID NO: 3260051 - DNA, 25 bp, Homo sapien
aaaagatcagatcgtaacccagagt

SEQ ID NO: 3260052 - DNA, 25 bp, Homo sapien
ggaacaatatatcacccagaacatc

SEQ ID NO: 3260053 - DNA, 25 bp, Homo sapien
tttgtttgagtacgccagtggacca

SEQ ID NO: 3260054 - DNA, 25 bp, Homo sapien
tcttcaattattatactgccgggac

SEQ ID NO: 3260055 - DNA, 25 bp, Homo sapien
ctattctctgaagacccctgcggtt

SEQ ID NO: 3260056 - DNA, 25 bp, Homo sapien
tattctctgaagacccctgcggttt

SEQ ID NO: 3260057 - DNA, 25 bp, Homo sapien
ggcacaaaacgaggtaatattagaa

SEQ ID NO: 3260058 - DNA, 25 bp, Homo sapien
gcacaaaacgaggtaatattagaaa

SEQ ID NO: 3260059 - DNA, 25 bp, Homo sapien
aggcacaaaacgaggtaatattaga

SEQ ID NO: 3260060 - DNA, 25 bp, Homo sapien
ttcagtggcaaaggcgtcccaccag

SEQ ID NO: 3260061 - DNA, 25 bp, Homo sapien
gtatcgctttggtccatcttccaaa

SEQ ID NO: 3260062 - DNA, 25 bp, Homo sapien
gcgtcccaccagaggttgtcactat

SEQ ID NO: 3260063 - DNA, 25 bp, Homo sapien
aaagggttaatgtggcgtcatcttc

SEQ ID NO: 3260064 - DNA, 25 bp, Homo sapien
gcctggcgtttcacagtaaagcagt

SEQ ID NO: 3260065 - DNA, 25 bp, Homo sapien
cctggcgtttcacagtaaagcagtt

SEQ ID NO: 3260066 - DNA, 25 bp, Homo sapien
tgcctggcgtttcacagtaaagcag

SEQ ID NO: 3260067 - DNA, 25 bp, Homo sapien
tggagaaatgatgcggaagtaccac

SEQ ID NO: 3260068 - DNA, 25 bp, Homo sapien
gaaatgatgcggaagtaccacaaaa

SEQ ID NO: 3260069 - DNA, 25 bp, Homo sapien
gagaaatgatgcggaagtaccacaa

SEQ ID NO: 3260070 - DNA, 25 bp, Homo sapien
ctggcaatgtggccaagttcagcaa

SEQ ID NO: 3260071 - DNA, 25 bp, Homo sapien
tatccctcttcaccaaaaacaggat

SEQ ID NO: 3260072 - DNA, 25 bp, Homo sapien
cttcaccaaaaacaggatcccggtg

SEQ ID NO: 3260073 - DNA, 25 bp, Homo sapien
cctatccctcttcaccaaaaacagg

SEQ ID NO: 3260074 - DNA, 25 bp, Homo sapien
accaaaaacaggatcccggtgccag

SEQ ID NO: 3260075 - DNA, 25 bp, Homo sapien
aaaccaagggtctatctcgaaccat

SEQ ID NO: 3260076 - DNA, 25 bp, Homo sapien
cactgtaggaagctcaggtcatttg

SEQ ID NO: 3260077 - DNA, 25 bp, Homo sapien
ttgattccttaatcacaagccaccc

SEQ ID NO: 3260078 - DNA, 25 bp, Homo sapien
tccaagactgtaactgtgtttttga

SEQ ID NO: 3260079 - DNA, 25 bp, Homo sapien
taattctcaactgtgatttgctcat

SEQ ID NO: 3260080 - DNA, 25 bp, Homo sapien
gctcattctcagctaaattgcattt

SEQ ID NO: 3260081 - DNA, 25 bp, Homo sapien
taaaacggcatactaccaacatagc

SEQ ID NO: 3260082 - DNA, 25 bp, Homo sapien
attataaaacggcatactaccaaca

SEQ ID NO: 3260083 - DNA, 25 bp, Homo sapien
tagaagttacatcagtggttttccc

SEQ ID NO: 3260084 - DNA, 25 bp, Homo sapien
caatgactcaaatgcctcagtgtgt

SEQ ID NO: 3260085 - DNA, 25 bp, Homo sapien
cctgtctagtgcctgtggatgctgc

SEQ ID NO: 3260086 - DNA, 25 bp, Homo sapien
agaaggtgctcactatagttccctg

SEQ ID NO: 3260087 - DNA, 25 bp, Homo sapien
gcctcaaaacactatggcaatgaga

SEQ ID NO: 3260088 - DNA, 25 bp, Homo sapien
cacaaaatgtccagaatcctggctt

SEQ ID NO: 3260089 - DNA, 25 bp, Homo sapien
attgttcactacagccaagaaatgg

SEQ ID NO: 3260090 - DNA, 25 bp, Homo sapien
tgtggtatcttcagacaatggtaca

SEQ ID NO: 3260091 - DNA, 25 bp, Homo sapien
gagctatccaggtcttcactgcggg

SEQ ID NO: 3260092 - DNA, 25 bp, Homo sapien
gccctgcagggaacgtctctttaga

SEQ ID NO: 3260093 - DNA, 25 bp, Homo sapien
gcattaagtgtacagcagaaaagca

SEQ ID NO: 3260094 - DNA, 25 bp, Homo sapien
cctgtgccttctagggtgttcagca

SEQ ID NO: 3260095 - DNA, 25 bp, Homo sapien
atgtggcagcatcgcctaccgtggc

SEQ ID NO: 3260096 - DNA, 25 bp, Homo sapien
gcttcatggtgaggacggatgcatc

SEQ ID NO: 3260097 - DNA, 25 bp, Homo sapien
gagcagttgcaagtgcccattccga

SEQ ID NO: 3260098 - DNA, 25 bp, Homo sapien
gcagcagccgcatcgggtgaaagca

SEQ ID NO: 3260099 - DNA, 25 bp, Homo sapien
cgagtaaagtgaacgggaccatcta

SEQ ID NO: 3260100 - DNA, 25 bp, Homo sapien
caatgtaacgagtaaagtgaacggg

SEQ ID NO: 3260101 - DNA, 25 bp, Homo sapien
aacgggaccatctagaggaagtttg

SEQ ID NO: 3260102 - DNA, 25 bp, Homo sapien
gatgctctgaaaccaatgtaacgag

SEQ ID NO: 3260103 - DNA, 25 bp, Homo sapien
ccttccctgagattcaagctgaacc

SEQ ID NO: 3260104 - DNA, 25 bp, Homo sapien
tccctgagattcaagctgaacctca

SEQ ID NO: 3260105 - DNA, 25 bp, Homo sapien
ggctgtcactggagccagagacccc

SEQ ID NO: 3260106 - DNA, 25 bp, Homo sapien
agagacccctcgaccgctgtctcct

SEQ ID NO: 3260107 - DNA, 25 bp, Homo sapien
ccagttccatgacacatgtacagca

SEQ ID NO: 3260108 - DNA, 25 bp, Homo sapien
tacagcaatatccttcaacatgacc

SEQ ID NO: 3260109 - DNA, 25 bp, Homo sapien
cagtcacggtgcacaagtctggcac

SEQ ID NO: 3260110 - DNA, 25 bp, Homo sapien
caaatgctactataaagggagaggg

SEQ ID NO: 3260111 - DNA, 25 bp, Homo sapien
cggcatctggagacaatgactgaca

SEQ ID NO: 3260112 - DNA, 25 bp, Homo sapien
gaggtttagcacattgatattagca

SEQ ID NO: 3260113 - DNA, 25 bp, Homo sapien
taattgaggtttagcacattgatat

SEQ ID NO: 3260114 - DNA, 25 bp, Homo sapien
tattagcaaagcatagagcttcggc

SEQ ID NO: 3260115 - DNA, 25 bp, Homo sapien
tggagcttcaacactcaagagagga

SEQ ID NO: 3260116 - DNA, 25 bp, Homo sapien
gcccaatgcatagtgaatactcagt

SEQ ID NO: 3260117 - DNA, 25 bp, Homo sapien
gaagtcttcaatgagagcccaatgc

SEQ ID NO: 3260118 - DNA, 25 bp, Homo sapien
catagcatttaactaacaatagggt

SEQ ID NO: 3260119 - DNA, 25 bp, Homo sapien
tgacaacagcttctaactcatcctg

SEQ ID NO: 3260120 - DNA, 25 bp, Homo sapien
tacatatcctttgtggtgcatacca

SEQ ID NO: 3260121 - DNA, 25 bp, Homo sapien
gagccactacacttgactttagttc

SEQ ID NO: 3260122 - DNA, 25 bp, Homo sapien
ttcacaacaagaagggcacagccaa

SEQ ID NO: 3260123 - DNA, 25 bp, Homo sapien
cagtgtattgtataaaggcaaagcc

SEQ ID NO: 3260124 - DNA, 25 bp, Homo sapien
tgagtactgcttgtgaatctttcgt

SEQ ID NO: 3260125 - DNA, 25 bp, Homo sapien
tatgagctaggcagtgttgctgctc

SEQ ID NO: 3260126 - DNA, 25 bp, Homo sapien
tctatagagtaaatggtttgggcca

SEQ ID NO: 3260127 - DNA, 25 bp, Homo sapien
tttatccttggtacctgaaaatgga

SEQ ID NO: 3260128 - DNA, 25 bp, Homo sapien
attttatccttggtacctgaaaatg

SEQ ID NO: 3260129 - DNA, 25 bp, Homo sapien
ttatccttggtacctgaaaatggaa

SEQ ID NO: 3260130 - DNA, 25 bp, Homo sapien
tatctgtgtctagggtctgccacca

SEQ ID NO: 3260131 - DNA, 25 bp, Homo sapien
tacttgcctatgtacagctcagctg

SEQ ID NO: 3260132 - DNA, 25 bp, Homo sapien
ggcaaatcgcccaggttctctaagc

SEQ ID NO: 3260133 - DNA, 25 bp, Homo sapien
tacagtgaaactagtggcctctatg

SEQ ID NO: 3260134 - DNA, 25 bp, Homo sapien
tctctgtcatgtgctgttgtattat

SEQ ID NO: 3260135 - DNA, 25 bp, Homo sapien
ccgaccacgtgctcttatattaaca

SEQ ID NO: 3260136 - DNA, 25 bp, Homo sapien
cccaattaagcaggtgttggtgttt

SEQ ID NO: 3260137 - DNA, 25 bp, Homo sapien
ggagatagtctacatattccatgtc

SEQ ID NO: 3260138 - DNA, 25 bp, Homo sapien
aactgaggcatccaagtaactgagg

SEQ ID NO: 3260139 - DNA, 25 bp, Homo sapien
taattgagcacatgactgtccagac

SEQ ID NO: 3260140 - DNA, 25 bp, Homo sapien
ctaagtgtgaccatgtaagcaagca

SEQ ID NO: 3260141 - DNA, 25 bp, Homo sapien
taagaggaagaataagccgggtcac

SEQ ID NO: 3260142 - DNA, 25 bp, Homo sapien
tatctggcagcattacattttgact

SEQ ID NO: 3260143 - DNA, 25 bp, Homo sapien
ccaagattacttgcctagcttataa

SEQ ID NO: 3260144 - DNA, 25 bp, Homo sapien
tcttcagtaccccaagaagaaggtg

SEQ ID NO: 3260145 - DNA, 25 bp, Homo sapien
ctggtgcagtgagaggtcaaataac

SEQ ID NO: 3260146 - DNA, 25 bp, Homo sapien
tccacccctagatctttgtacttgc

SEQ ID NO: 3260147 - DNA, 25 bp, Homo sapien
gctctcttaacagcctgtaagtctc

SEQ ID NO: 3260148 - DNA, 25 bp, Homo sapien
atggttcactctcttacttcattca

SEQ ID NO: 3260149 - DNA, 25 bp, Homo sapien
tgtaagtctcttacccaatgtccat

SEQ ID NO: 3260150 - DNA, 25 bp, Homo sapien
tatcacccatcggttatctgtgtcg

SEQ ID NO: 3260151 - DNA, 25 bp, Homo sapien
tgtcgcctgaaggaactccgggtaa

SEQ ID NO: 3260152 - DNA, 25 bp, Homo sapien
ggtcctcgactttatcacccatcgg

SEQ ID NO: 3260153 - DNA, 25 bp, Homo sapien
cagtacactggcctattgttggatt

SEQ ID NO: 3260154 - DNA, 25 bp, Homo sapien
gaagtccaaggcacagtcaggagcc

SEQ ID NO: 3260155 - DNA, 25 bp, Homo sapien
tggaaacacccgcaggtaacactga

SEQ ID NO: 3260156 - DNA, 25 bp, Homo sapien
gaagagatgagctaacctgcggagc

SEQ ID NO: 3260157 - DNA, 25 bp, Homo sapien
tctggcacagcgtctctcagaggct

SEQ ID NO: 3260158 - DNA, 25 bp, Homo sapien
catatttggatagtggaggtctctc

SEQ ID NO: 3260159 - DNA, 25 bp, Homo sapien
tggattgcctcaaaatggagtgggc

SEQ ID NO: 3260160 - DNA, 25 bp, Homo sapien
gagtgggctgcctatcactgaaagt

SEQ ID NO: 3260161 - DNA, 25 bp, Homo sapien
caaggctgtccagatcattgtcggg

SEQ ID NO: 3260162 - DNA, 25 bp, Homo sapien
ctctcatgtcaattgcaggaattac

SEQ ID NO: 3260163 - DNA, 25 bp, Homo sapien
cacgtaatctacaatatgtggtgtt

SEQ ID NO: 3260164 - DNA, 25 bp, Homo sapien
tgcccaagtcataacaatcatcacc

SEQ ID NO: 3260165 - DNA, 25 bp, Homo sapien
ggttttcatgatcccaacatggtct

SEQ ID NO: 3260166 - DNA, 25 bp, Homo sapien
tatgttatcagggtctaggcaggaa

SEQ ID NO: 3260167 - DNA, 25 bp, Homo sapien
gataaagagttgctagggtcaccct

SEQ ID NO: 3260168 - DNA, 25 bp, Homo sapien
tcctttatgtaagcagacggccaag

SEQ ID NO: 3260169 - DNA, 25 bp, Homo sapien
gagagtgcgcatccaacaagattcg

SEQ ID NO: 3260170 - DNA, 25 bp, Homo sapien
agtttgcatagacatgtcccatagc

SEQ ID NO: 3260171 - DNA, 25 bp, Homo sapien
gaaggagcacgtttttctagtttgc

SEQ ID NO: 3260172 - DNA, 25 bp, Homo sapien
tcactcagaaggagcacgtttttct

SEQ ID NO: 3260173 - DNA, 25 bp, Homo sapien
tagacatgtcccatagccttctgtg

SEQ ID NO: 3260174 - DNA, 25 bp, Homo sapien
gcatgtctcagtaccgcaatcctgg

SEQ ID NO: 3260175 - DNA, 25 bp, Homo sapien
tcttggcaccctcagttataactgg

SEQ ID NO: 3260176 - DNA, 25 bp, Homo sapien
taagagacctagttgcagccatcac

SEQ ID NO: 3260177 - DNA, 25 bp, Homo sapien
tataactggaggttcagctggctac

SEQ ID NO: 3260178 - DNA, 25 bp, Homo sapien
tagactgcggctgaagagagaacct

SEQ ID NO: 3260179 - DNA, 25 bp, Homo sapien
gtccatctaactgggatcgtagact

SEQ ID NO: 3260180 - DNA, 25 bp, Homo sapien
cttgactttgtgttggatgtgacag

SEQ ID NO: 3260181 - DNA, 25 bp, Homo sapien
gagagaaccttggtgttcatagctc

SEQ ID NO: 3260182 - DNA, 25 bp, Homo sapien
tccaccagtgtgtgcattaagccac

SEQ ID NO: 3260183 - DNA, 25 bp, Homo sapien
tgttatcagtccagacacgcaggtg

SEQ ID NO: 3260184 - DNA, 25 bp, Homo sapien
gagaagcatgcgtccttagaagaaa

SEQ ID NO: 3260185 - DNA, 25 bp, Homo sapien
caacaaaacggagtacacatggtct

SEQ ID NO: 3260186 - DNA, 25 bp, Homo sapien
gaatccagaataagtgtatcgtcgt

SEQ ID NO: 3260187 - DNA, 25 bp, Homo sapien
cagaataagtgtatcgtcgtcatcg

SEQ ID NO: 3260188 - DNA, 25 bp, Homo sapien
taagtgtatcgtcgtcatcgtcgtc

SEQ ID NO: 3260189 - DNA, 25 bp, Homo sapien
tagaatccagaataagtgtatcgtc

SEQ ID NO: 3260190 - DNA, 25 bp, Homo sapien
tactgatagaacttcccatattttc

SEQ ID NO: 3260191 - DNA, 25 bp, Homo sapien
gattaatggccccgaaagcacttac

SEQ ID NO: 3260192 - DNA, 25 bp, Homo sapien
acacaaagttattacagaccacagc

SEQ ID NO: 3260193 - DNA, 25 bp, Homo sapien
gaccacagcatcatatactgataga

SEQ ID NO: 3260194 - DNA, 25 bp, Homo sapien
gctcccaggtagatatagagagaca

SEQ ID NO: 3260195 - DNA, 25 bp, Homo sapien
taacatattatcatgattcataccg

SEQ ID NO: 3260196 - DNA, 25 bp, Homo sapien
agtgctccaggaaatgtaacatatt

SEQ ID NO: 3260197 - DNA, 25 bp, Homo sapien
cgtaattcacggctgtgggctccca

SEQ ID NO: 3260198 - DNA, 25 bp, Homo sapien
caggagattcccaacagatttgcac

SEQ ID NO: 3260199 - DNA, 25 bp, Homo sapien
gaaaattttagcgtcaggatggcca

SEQ ID NO: 3260200 - DNA, 25 bp, Homo sapien
tcctttgggcttgacgtgcgttcta

SEQ ID NO: 3260201 - DNA, 25 bp, Homo sapien
cagagggcaaaatagtcaggtcaac

SEQ ID NO: 3260202 - DNA, 25 bp, Homo sapien
taagttaggcagttgagacacatct

SEQ ID NO: 3260203 - DNA, 25 bp, Homo sapien
gaatgggatcaatttccaagccacc

SEQ ID NO: 3260204 - DNA, 25 bp, Homo sapien
tacaacctctgaagctaaactaccg

SEQ ID NO: 3260205 - DNA, 25 bp, Homo sapien
tgctatggcagagtagttacaacct

SEQ ID NO: 3260206 - DNA, 25 bp, Homo sapien
ttggttttctgaggccatgtagaga

SEQ ID NO: 3260207 - DNA, 25 bp, Homo sapien
aattggttttctgaggccatgtaga

SEQ ID NO: 3260208 - DNA, 25 bp, Homo sapien
attggttttctgaggccatgtagag

SEQ ID NO: 3260209 - DNA, 25 bp, Homo sapien
ggttttctgaggccatgtagagatc

SEQ ID NO: 3260210 - DNA, 25 bp, Homo sapien
gggacacttcccatagaattcagcc

SEQ ID NO: 3260211 - DNA, 25 bp, Homo sapien
ctggcgctcatttccacgtacgtgg

SEQ ID NO: 3260212 - DNA, 25 bp, Homo sapien
caaactcgtggattcatcctggcgc

SEQ ID NO: 3260213 - DNA, 25 bp, Homo sapien
tgtgcctggaaacccagcgtccaaa

SEQ ID NO: 3260214 - DNA, 25 bp, Homo sapien
tgttcatctcatagattcggtactc

SEQ ID NO: 3260215 - DNA, 25 bp, Homo sapien
catagattcggtactctggctgtac

SEQ ID NO: 3260216 - DNA, 25 bp, Homo sapien
ctgtgcgagactgcagtctcttgtt

SEQ ID NO: 3260217 - DNA, 25 bp, Homo sapien
tgcagtctcttgttcatctcataga

SEQ ID NO: 3260218 - DNA, 25 bp, Homo sapien
aaatgggccgaaaggagaagaatag

SEQ ID NO: 3260219 - DNA, 25 bp, Homo sapien
aatagaaggggtcatgtggtgtgct

SEQ ID NO: 3260220 - DNA, 25 bp, Homo sapien
aaggggtcatgtggtgtgctggaca

SEQ ID NO: 3260221 - DNA, 25 bp, Homo sapien
ctataaaatgggccgaaaggagaag

SEQ ID NO: 3260222 - DNA, 25 bp, Homo sapien
gaactgctgtcggagccctctatag

SEQ ID NO: 3260223 - DNA, 25 bp, Homo sapien
tcccagtacaaagtagacgcacgca

SEQ ID NO: 3260224 - DNA, 25 bp, Homo sapien
taaacagagtatcagtaacgtccat

SEQ ID NO: 3260225 - DNA, 25 bp, Homo sapien
taacgtccatgcagagcacatgggc

SEQ ID NO: 3260226 - DNA, 25 bp, Homo sapien
tataaatggactaaattctgcaatt

SEQ ID NO: 3260227 - DNA, 25 bp, Homo sapien
aatataaatggactaaattctgcaa

SEQ ID NO: 3260228 - DNA, 25 bp, Homo sapien
taaatataaatggactaaattctgc

SEQ ID NO: 3260229 - DNA, 25 bp, Homo sapien
ttaaatataaatggactaaattctg

SEQ ID NO: 3260230 - DNA, 25 bp, Homo sapien
tactgccggattagatgtgtgtgca

SEQ ID NO: 3260231 - DNA, 25 bp, Homo sapien
gggctccggcagctttgtactgccg

SEQ ID NO: 3260232 - DNA, 25 bp, Homo sapien
tttgtactgccggattagatgtgtg

SEQ ID NO: 3260233 - DNA, 25 bp, Homo sapien
ggcagctttgtactgccggattaga

SEQ ID NO: 3260234 - DNA, 25 bp, Homo sapien
tctccactccccctactttccttgc

SEQ ID NO: 3260235 - DNA, 25 bp, Homo sapien
ctctccactccccctactttccttg

SEQ ID NO: 3260236 - DNA, 25 bp, Homo sapien
ctccactccccctactttccttgca

SEQ ID NO: 3260237 - DNA, 25 bp, Homo sapien
gagtaaacagaactgtctctccccc

SEQ ID NO: 3260238 - DNA, 25 bp, Homo sapien
gtgagtaaacagaactgtctctccc

SEQ ID NO: 3260239 - DNA, 25 bp, Homo sapien
gtaaacagaactgtctctcccccat

SEQ ID NO: 3260240 - DNA, 25 bp, Homo sapien
ctttgtgagtaaacagaactgtctc

SEQ ID NO: 3260241 - DNA, 25 bp, Homo sapien
ttaaaggagaaactaatgatgggtc

SEQ ID NO: 3260242 - DNA, 25 bp, Homo sapien
gatgttcagccataagtctcctctg

SEQ ID NO: 3260243 - DNA, 25 bp, Homo sapien
tatccatgcattgtagccaagttgc

SEQ ID NO: 3260244 - DNA, 25 bp, Homo sapien
tgatttgaggacacataagaaaagg

SEQ ID NO: 3260245 - DNA, 25 bp, Homo sapien
acaggacacagaaggagaagtttct

SEQ ID NO: 3260246 - DNA, 25 bp, Homo sapien
gacacagaaggagaagtttcttgca

SEQ ID NO: 3260247 - DNA, 25 bp, Homo sapien
ctacaggacacagaaggagaagttt

SEQ ID NO: 3260248 - DNA, 25 bp, Homo sapien
cacagaaggagaagtttcttgcatt

SEQ ID NO: 3260249 - DNA, 25 bp, Homo sapien
ttttccgtctttgatgtagtatacc

SEQ ID NO: 3260250 - DNA, 25 bp, Homo sapien
catttgctgcccataagcagtaata

SEQ ID NO: 3260251 - DNA, 25 bp, Homo sapien
gccaatatcacagtctgctaatccc

SEQ ID NO: 3260252 - DNA, 25 bp, Homo sapien
accttcgggaaagaagaatatcagc

SEQ ID NO: 3260253 - DNA, 25 bp, Homo sapien
ctccagcccaacttgatcaaggatc

SEQ ID NO: 3260254 - DNA, 25 bp, Homo sapien
gcatgatcaaggctttcccttgctc

SEQ ID NO: 3260255 - DNA, 25 bp, Homo sapien
gatcaaggatccataacctaattag

SEQ ID NO: 3260256 - DNA, 25 bp, Homo sapien
cattgggccacagcgacttctttgg

SEQ ID NO: 3260257 - DNA, 25 bp, Homo sapien
gaactgttttgagaagagcactgct

SEQ ID NO: 3260258 - DNA, 25 bp, Homo sapien
aactgttttgagaagagcactgctg

SEQ ID NO: 3260259 - DNA, 25 bp, Homo sapien
cattcaccaggaacactttagcaca

SEQ ID NO: 3260260 - DNA, 25 bp, Homo sapien
tcattcaccaggaacactttagcac

SEQ ID NO: 3260261 - DNA, 25 bp, Homo sapien
atcattcaccaggaacactttagca

SEQ ID NO: 3260262 - DNA, 25 bp, Homo sapien
tccttaaatgactgtgtgattcaac

SEQ ID NO: 3260263 - DNA, 25 bp, Homo sapien
ccaccccggtgtccttaaatgactg

SEQ ID NO: 3260264 - DNA, 25 bp, Homo sapien
gtgattcaacatctacaccagaaac

SEQ ID NO: 3260265 - DNA, 25 bp, Homo sapien
caattgcgtgtaaatttgcacttcc

SEQ ID NO: 3260266 - DNA, 25 bp, Homo sapien
tgctcctgctgtatttgtggtcact

SEQ ID NO: 3260267 - DNA, 25 bp, Homo sapien
tttgtggtcactagctttgtcagta

SEQ ID NO: 3260268 - DNA, 25 bp, Homo sapien
gctgtatttgtggtcactagctttg

SEQ ID NO: 3260269 - DNA, 25 bp, Homo sapien
atttgctcctgctgtatttgtggtc

SEQ ID NO: 3260270 - DNA, 25 bp, Homo sapien
attttactggcacaggataattctg

SEQ ID NO: 3260271 - DNA, 25 bp, Homo sapien
tcctgatcttggtgcttcttgatca

SEQ ID NO: 3260272 - DNA, 25 bp, Homo sapien
catccattttactggcacaggataa

SEQ ID NO: 3260273 - DNA, 25 bp, Homo sapien
ataacatccattttactggcacagg

SEQ ID NO: 3260274 - DNA, 25 bp, Homo sapien
atagatccacggcaccctcactgtg

SEQ ID NO: 3260275 - DNA, 25 bp, Homo sapien
ggtacactgtttggccacgtgtcct

SEQ ID NO: 3260276 - DNA, 25 bp, Homo sapien
ctggtacactgtttggccacgtgtc

SEQ ID NO: 3260277 - DNA, 25 bp, Homo sapien
agaagtctataccagggcctactcc

SEQ ID NO: 3260278 - DNA, 25 bp, Homo sapien
ctggaagcagcaacctctacggaag

SEQ ID NO: 3260279 - DNA, 25 bp, Homo sapien
tacggaagccactgtcaggtgtagt

SEQ ID NO: 3260280 - DNA, 25 bp, Homo sapien
tcaggtgtagtggaattggaatcag

SEQ ID NO: 3260281 - DNA, 25 bp, Homo sapien
cagcaacctctacggaagccactgt

SEQ ID NO: 3260282 - DNA, 25 bp, Homo sapien
ttatttgaatcaatatccgacctgg

SEQ ID NO: 3260283 - DNA, 25 bp, Homo sapien
aatatccgacctggagcccagtgtg

SEQ ID NO: 3260284 - DNA, 25 bp, Homo sapien
ccagtgtgccaagaagttgagccat

SEQ ID NO: 3260285 - DNA, 25 bp, Homo sapien
tctccttatgtccaagactacaaag

SEQ ID NO: 3260286 - DNA, 25 bp, Homo sapien
ccaaagggagtagatcccaaaatag

SEQ ID NO: 3260287 - DNA, 25 bp, Homo sapien
taagactacgtccaacgcacagtga

SEQ ID NO: 3260288 - DNA, 25 bp, Homo sapien
tcactcaacaaacacgtggagagcc

SEQ ID NO: 3260289 - DNA, 25 bp, Homo sapien
aaatggcttacagtagtcactcaac

SEQ ID NO: 3260290 - DNA, 25 bp, Homo sapien
ctataacggaagtatgagcaatatg

SEQ ID NO: 3260291 - DNA, 25 bp, Homo sapien
ctggacttagaggagatggataggg

SEQ ID NO: 3260292 - DNA, 25 bp, Homo sapien
agagatctggagtcaacccctctaa

SEQ ID NO: 3260293 - DNA, 25 bp, Homo sapien
tggatagggactgagcctggagaga

SEQ ID NO: 3260294 - DNA, 25 bp, Homo sapien
gagatctggagtcaacccctctaat

SEQ ID NO: 3260295 - DNA, 25 bp, Homo sapien
tagcaaatgtgatcattaggaccat

SEQ ID NO: 3260296 - DNA, 25 bp, Homo sapien
cacacagtgaggttctttgataatc

SEQ ID NO: 3260297 - DNA, 25 bp, Homo sapien
ttctgtggtctctgactctcacaca

SEQ ID NO: 3260298 - DNA, 25 bp, Homo sapien
tgaaagcgtaaacttttagcaaatg

SEQ ID NO: 3260299 - DNA, 25 bp, Homo sapien
ttcaacccataaaaccaacctgtca

SEQ ID NO: 3260300 - DNA, 25 bp, Homo sapien
tgaggtctgccttcaacccataaaa

SEQ ID NO: 3260301 - DNA, 25 bp, Homo sapien
taaaaccaacctgtcactgtggaat

SEQ ID NO: 3260302 - DNA, 25 bp, Homo sapien
tcactgtggaataactcacacaggg

SEQ ID NO: 3260303 - DNA, 25 bp, Homo sapien
gacacagacagcttgcccttgaatg

SEQ ID NO: 3260304 - DNA, 25 bp, Homo sapien
ttgcccttgaatgcgtgctgctctg

SEQ ID NO: 3260305 - DNA, 25 bp, Homo sapien
tgccccatcgctacacagatgcctg

SEQ ID NO: 3260306 - DNA, 25 bp, Homo sapien
gaatgcgtgctgctctgttgcagag

SEQ ID NO: 3260307 - DNA, 25 bp, Homo sapien
ccatctgtacccacgctttctttaa

SEQ ID NO: 3260308 - DNA, 25 bp, Homo sapien
gtgctcttacacaaaacgacatcaa

SEQ ID NO: 3260309 - DNA, 25 bp, Homo sapien
gtagtcacaattggcatcaaccagc

SEQ ID NO: 3260310 - DNA, 25 bp, Homo sapien
tccacttcgagccaactaggactta

SEQ ID NO: 3260311 - DNA, 25 bp, Homo sapien
gcattttgttcaccatcaaactttg

SEQ ID NO: 3260312 - DNA, 25 bp, Homo sapien
gctctgggtcctcctgatctttgca

SEQ ID NO: 3260313 - DNA, 25 bp, Homo sapien
cagggattccccctctatattcctt

SEQ ID NO: 3260314 - DNA, 25 bp, Homo sapien
ccctctatattcctttctgggctct

SEQ ID NO: 3260315 - DNA, 25 bp, Homo sapien
tggtttcttcaagtagctgaactgc

SEQ ID NO: 3260316 - DNA, 25 bp, Homo sapien
gaggggagctcatttaataatttca

SEQ ID NO: 3260317 - DNA, 25 bp, Homo sapien
tgctcccttctttttgtccctggaa

SEQ ID NO: 3260318 - DNA, 25 bp, Homo sapien
tttgtccctggaagaggggagctca

SEQ ID NO: 3260319 - DNA, 25 bp, Homo sapien
aaaactgattaatgtcccaactaca

SEQ ID NO: 3260320 - DNA, 25 bp, Homo sapien
tataaaactgattaatgtcccaact

SEQ ID NO: 3260321 - DNA, 25 bp, Homo sapien
taaaactgattaatgtcccaactac

SEQ ID NO: 3260322 - DNA, 25 bp, Homo sapien
aaactgattaatgtcccaactacat

SEQ ID NO: 3260323 - DNA, 25 bp, Homo sapien
caccagctgcaactgtcattgtgga

SEQ ID NO: 3260324 - DNA, 25 bp, Homo sapien
atatagtataattcacgtggccacc

SEQ ID NO: 3260325 - DNA, 25 bp, Homo sapien
gagattcagatatagccagcctggc

SEQ ID NO: 3260326 - DNA, 25 bp, Homo sapien
ggacagactcctagaaatgcaacca

SEQ ID NO: 3260327 - DNA, 25 bp, Homo sapien
ctcagaggaaacaatgaatgtgatg

SEQ ID NO: 3260328 - DNA, 25 bp, Homo sapien
ttcttccaagccaccacacataacc

SEQ ID NO: 3260329 - DNA, 25 bp, Homo sapien
gcatgcatcgtgattttgcaaaata

SEQ ID NO: 3260330 - DNA, 25 bp, Homo sapien
tgatggcctggaggtagcatgcatc

SEQ ID NO: 3260331 - DNA, 25 bp, Homo sapien
gaacatgcatgtcaagtgctcagca

SEQ ID NO: 3260332 - DNA, 25 bp, Homo sapien
gacttcaatgctcttactactgtgc

SEQ ID NO: 3260333 - DNA, 25 bp, Homo sapien
tcggttattggcacaagttgctcaa

SEQ ID NO: 3260334 - DNA, 25 bp, Homo sapien
taattgggactggtactacagtacc

SEQ ID NO: 3260335 - DNA, 25 bp, Homo sapien
tgccatactatgtgccagacggagt

SEQ ID NO: 3260336 - DNA, 25 bp, Homo sapien
ggcctaccggccattctacatgcat

SEQ ID NO: 3260337 - DNA, 25 bp, Homo sapien
aagttctagcatgcactcccttcag

SEQ ID NO: 3260338 - DNA, 25 bp, Homo sapien
cagcacctctgggttaaagttcaac

SEQ ID NO: 3260339 - DNA, 25 bp, Homo sapien
ctgcatcccctctcccattcctcat

SEQ ID NO: 3260340 - DNA, 25 bp, Homo sapien
ttgtctgcatcccctctcccattcc

SEQ ID NO: 3260341 - DNA, 25 bp, Homo sapien
gtctgcatcccctctcccattcctc

SEQ ID NO: 3260342 - DNA, 25 bp, Homo sapien
ctttgtctgcatcccctctcccatt

SEQ ID NO: 3260343 - DNA, 25 bp, Homo sapien
tgcccgccccaaagcacttcagtgt

SEQ ID NO: 3260344 - DNA, 25 bp, Homo sapien
taaaccacccctatacattgaccag

SEQ ID NO: 3260345 - DNA, 25 bp, Homo sapien
tcatctctccgtttctcaattttct

SEQ ID NO: 3260346 - DNA, 25 bp, Homo sapien
gcctctgccatttataactggttga

SEQ ID NO: 3260347 - DNA, 25 bp, Homo sapien
tggagcaataggaacgctgattcat

SEQ ID NO: 3260348 - DNA, 25 bp, Homo sapien
tgtggagcaataggaacgctgattc

SEQ ID NO: 3260349 - DNA, 25 bp, Homo sapien
gagcaataggaacgctgattcattg

SEQ ID NO: 3260350 - DNA, 25 bp, Homo sapien
ctactacaatggccaaaatccagaa

SEQ ID NO: 3260351 - DNA, 25 bp, Homo sapien
tggctggtcctcaagcacaaatctg

SEQ ID NO: 3260352 - DNA, 25 bp, Homo sapien
tctgggcccctcttaacgaattcta

SEQ ID NO: 3260353 - DNA, 25 bp, Homo sapien
ttgaataggccatctcacggaggca

SEQ ID NO: 3260354 - DNA, 25 bp, Homo sapien
tctaaatagcccacgatccctttgg

SEQ ID NO: 3260355 - DNA, 25 bp, Homo sapien
tgcagtgcaattctttaagctcagg

SEQ ID NO: 3260356 - DNA, 25 bp, Homo sapien
ggaggcctcagtcaagcaggacttt

SEQ ID NO: 3260357 - DNA, 25 bp, Homo sapien
agtgcagtgcaattctttaagctca

SEQ ID NO: 3260358 - DNA, 25 bp, Homo sapien
tggagtcacaggctacggaggcctc

SEQ ID NO: 3260359 - DNA, 25 bp, Homo sapien
ttattccagacagcttttcacggct

SEQ ID NO: 3260360 - DNA, 25 bp, Homo sapien
ccagacagcttttcacggctttgat

SEQ ID NO: 3260361 - DNA, 25 bp, Homo sapien
agacagcttttcacggctttgattg

SEQ ID NO: 3260362 - DNA, 25 bp, Homo sapien
ttccagacagcttttcacggctttg

SEQ ID NO: 3260363 - DNA, 25 bp, Homo sapien
tggtatgactggtgctccattccca

SEQ ID NO: 3260364 - DNA, 25 bp, Homo sapien
atggtatgactggtgctccattccc

SEQ ID NO: 3260365 - DNA, 25 bp, Homo sapien
tcacagctgttcccctggttttcac

SEQ ID NO: 3260366 - DNA, 25 bp, Homo sapien
gttttcactgggtgatagtctctct

SEQ ID NO: 3260367 - DNA, 25 bp, Homo sapien
gagaattctgggacagaagtctttc

SEQ ID NO: 3260368 - DNA, 25 bp, Homo sapien
tctctgcttggtctgcatcaggaaa

SEQ ID NO: 3260369 - DNA, 25 bp, Homo sapien
ggaaagatacagcttcaagagcacc

SEQ ID NO: 3260370 - DNA, 25 bp, Homo sapien
gctccagtaggagtgaatctcataa

SEQ ID NO: 3260371 - DNA, 25 bp, Homo sapien
taatttattccagtggttctggtgg

SEQ ID NO: 3260372 - DNA, 25 bp, Homo sapien
tccagtggttctggtggctgtcaat

SEQ ID NO: 3260373 - DNA, 25 bp, Homo sapien
agtggttctggtggctgtcaatgac

SEQ ID NO: 3260374 - DNA, 25 bp, Homo sapien
ttaatttattccagtggttctggtg

SEQ ID NO: 3260375 - DNA, 25 bp, Homo sapien
tcattaaaggttatcatccacgtga

SEQ ID NO: 3260376 - DNA, 25 bp, Homo sapien
aaattggtaaatatgcaacatacag

SEQ ID NO: 3260377 - DNA, 25 bp, Homo sapien
cacaaatgttaagggatcagatgct

SEQ ID NO: 3260378 - DNA, 25 bp, Homo sapien
catacagtagacaccccgtaagtgg

SEQ ID NO: 3260379 - DNA, 25 bp, Homo sapien
ccctgatgtctgtcagggacaccag

SEQ ID NO: 3260380 - DNA, 25 bp, Homo sapien
gccctgatgtctgtcagggacacca

SEQ ID NO: 3260381 - DNA, 25 bp, Homo sapien
gggagccctgatgtctgtcagggac

SEQ ID NO: 3260382 - DNA, 25 bp, Homo sapien
agccctgatgtctgtcagggacacc

SEQ ID NO: 3260383 - DNA, 25 bp, Homo sapien
aattcccacagaggatagtctctgt

SEQ ID NO: 3260384 - DNA, 25 bp, Homo sapien
ttcccacagaggatagtctctgttg

SEQ ID NO: 3260385 - DNA, 25 bp, Homo sapien
tcccacagaggatagtctctgttga

SEQ ID NO: 3260386 - DNA, 25 bp, Homo sapien
cccacagaggatagtctctgttgag

SEQ ID NO: 3260387 - DNA, 25 bp, Homo sapien
gaccttgttgaaccacagtcttctc

SEQ ID NO: 3260388 - DNA, 25 bp, Homo sapien
cttctctcctgtaatatggtgatag

SEQ ID NO: 3260389 - DNA, 25 bp, Homo sapien
aaagattatggattttggaggctca

SEQ ID NO: 3260390 - DNA, 25 bp, Homo sapien
agtccactagaatgtttgaccttgt

SEQ ID NO: 3260391 - DNA, 25 bp, Homo sapien
tacactgagtgtatcaaaggccacc

SEQ ID NO: 3260392 - DNA, 25 bp, Homo sapien
tccttaacaaaccagagggagctgt

SEQ ID NO: 3260393 - DNA, 25 bp, Homo sapien
tgttcagtggaggaaagcgagctct

SEQ ID NO: 3260394 - DNA, 25 bp, Homo sapien
caaccagttgtagattttccagcag

SEQ ID NO: 3260395 - DNA, 25 bp, Homo sapien
agcttggggtcgctgttgatcaaaa

SEQ ID NO: 3260396 - DNA, 25 bp, Homo sapien
tggggtcgctgttgatcaaaactcc

SEQ ID NO: 3260397 - DNA, 25 bp, Homo sapien
cttggggtcgctgttgatcaaaact

SEQ ID NO: 3260398 - DNA, 25 bp, Homo sapien
gcttggggtcgctgttgatcaaaac

SEQ ID NO: 3260399 - DNA, 25 bp, Homo sapien
gtccttcaagctccattcatggtaa

SEQ ID NO: 3260400 - DNA, 25 bp, Homo sapien
ccttcaagctccattcatggtaagc

SEQ ID NO: 3260401 - DNA, 25 bp, Homo sapien
tcaagctccattcatggtaagcacc

SEQ ID NO: 3260402 - DNA, 25 bp, Homo sapien
cagtccttcaagctccattcatggt

SEQ ID NO: 3260403 - DNA, 25 bp, Homo sapien
gctccaaggaagggagttttggtgc

SEQ ID NO: 3260404 - DNA, 25 bp, Homo sapien
aatctggggctccaaggaagggagt

SEQ ID NO: 3260405 - DNA, 25 bp, Homo sapien
ctccaaggcaatctggggctccaag

SEQ ID NO: 3260406 - DNA, 25 bp, Homo sapien
ccaaggcaatctggggctccaagga

SEQ ID NO: 3260407 - DNA, 25 bp, Homo sapien
gataacagtgccagaagagttagtg

SEQ ID NO: 3260408 - DNA, 25 bp, Homo sapien
gaaagtcagaagtctaagataacag

SEQ ID NO: 3260409 - DNA, 25 bp, Homo sapien
ctccctgggcccctatatggccttt

SEQ ID NO: 3260410 - DNA, 25 bp, Homo sapien
catcaaaatgtctacctaatagtct

SEQ ID NO: 3260411 - DNA, 25 bp, Homo sapien
agttcctgatctcctgtgaaggcca

SEQ ID NO: 3260412 - DNA, 25 bp, Homo sapien
aatcagttcctgatctcctgtgaag

SEQ ID NO: 3260413 - DNA, 25 bp, Homo sapien
tctaatcagttcctgatctcctgtg

SEQ ID NO: 3260414 - DNA, 25 bp, Homo sapien
tctctaatcagttcctgatctcctg

SEQ ID NO: 3260415 - DNA, 25 bp, Homo sapien
ggtgctctcaaagttatcagctttt

SEQ ID NO: 3260416 - DNA, 25 bp, Homo sapien
gtggtgctctcaaagttatcagctt

SEQ ID NO: 3260417 - DNA, 25 bp, Homo sapien
tgctctcaaagttatcagcttttaa

SEQ ID NO: 3260418 - DNA, 25 bp, Homo sapien
tggtgctctcaaagttatcagcttt

SEQ ID NO: 3260419 - DNA, 25 bp, Homo sapien
caatgtagcagggtatcttgatatt

SEQ ID NO: 3260420 - DNA, 25 bp, Homo sapien
gcagggtatcttgatattactatat

SEQ ID NO: 3260421 - DNA, 25 bp, Homo sapien
ctggtggattcaatgtagcagggta

SEQ ID NO: 3260422 - DNA, 25 bp, Homo sapien
ttttcaaaacctactggtggattca

SEQ ID NO: 3260423 - DNA, 25 bp, Homo sapien
catcaactgccatcaatggacagaa

SEQ ID NO: 3260424 - DNA, 25 bp, Homo sapien
aaatccatcaactgccatcaatgga

SEQ ID NO: 3260425 - DNA, 25 bp, Homo sapien
caactgccatcaatggacagaaagg

SEQ ID NO: 3260426 - DNA, 25 bp, Homo sapien
tccatcaactgccatcaatggacag

SEQ ID NO: 3260427 - DNA, 25 bp, Homo sapien
ggaacgtccaggaggtaccttgatg

SEQ ID NO: 3260428 - DNA, 25 bp, Homo sapien
tgcgacagtaaaaccacgagggaac

SEQ ID NO: 3260429 - DNA, 25 bp, Homo sapien
gccaagatgtttagaaaagctcaac

SEQ ID NO: 3260430 - DNA, 25 bp, Homo sapien
tcaggtctcgtgcaccagtggtgaa

SEQ ID NO: 3260431 - DNA, 25 bp, Homo sapien
tgccaagacctctcaagaagagagt

SEQ ID NO: 3260432 - DNA, 25 bp, Homo sapien
gaagatgccaagacctctcaagaag

SEQ ID NO: 3260433 - DNA, 25 bp, Homo sapien
agacctctcaagaagagagttgcag

SEQ ID NO: 3260434 - DNA, 25 bp, Homo sapien
ctagaagatgccaagacctctcaag

SEQ ID NO: 3260435 - DNA, 25 bp, Homo sapien
gattcatcaagcatcaaacaacaga

SEQ ID NO: 3260436 - DNA, 25 bp, Homo sapien
cataaataggaatttcaactgggcc

SEQ ID NO: 3260437 - DNA, 25 bp, Homo sapien
caaaaggttccgtcctgaggaattg

SEQ ID NO: 3260438 - DNA, 25 bp, Homo sapien
gaagctgattgtaaaagattaaggc

SEQ ID NO: 3260439 - DNA, 25 bp, Homo sapien
tggccagagcgtggacattcactga

SEQ ID NO: 3260440 - DNA, 25 bp, Homo sapien
tgaacatggccagagcgtggacatt

SEQ ID NO: 3260441 - DNA, 25 bp, Homo sapien
gataatggttagtggatattcttga

SEQ ID NO: 3260442 - DNA, 25 bp, Homo sapien
cactgagtcacattgcactgtgata

SEQ ID NO: 3260443 - DNA, 25 bp, Homo sapien
gaaatcatcaaggtgccagatgaat

SEQ ID NO: 3260444 - DNA, 25 bp, Homo sapien
catcaaggtgccagatgaatctcct

SEQ ID NO: 3260445 - DNA, 25 bp, Homo sapien
gaagaaatcatcaaggtgccagatg

SEQ ID NO: 3260446 - DNA, 25 bp, Homo sapien
aatcatcaaggtgccagatgaatct

SEQ ID NO: 3260447 - DNA, 25 bp, Homo sapien
ccacattgactccccagaagctcag

SEQ ID NO: 3260448 - DNA, 25 bp, Homo sapien
ctgagccacattgactccccagaag

SEQ ID NO: 3260449 - DNA, 25 bp, Homo sapien
gagccacattgactccccagaagct

SEQ ID NO: 3260450 - DNA, 25 bp, Homo sapien
gccacattgactccccagaagctca

SEQ ID NO: 3260451 - DNA, 25 bp, Homo sapien
cctcttcttgggtgctgagtttttc

SEQ ID NO: 3260452 - DNA, 25 bp, Homo sapien
tgaacctcttcttgggtgctgagtt

SEQ ID NO: 3260453 - DNA, 25 bp, Homo sapien
tcttgggtgctgagtttttcctgca

SEQ ID NO: 3260454 - DNA, 25 bp, Homo sapien
tcttcttgggtgctgagtttttcct

SEQ ID NO: 3260455 - DNA, 25 bp, Homo sapien
ggcatggggctcatggctacagctg

SEQ ID NO: 3260456 - DNA, 25 bp, Homo sapien
cacagttatctacagtgcccttcat

SEQ ID NO: 3260457 - DNA, 25 bp, Homo sapien
ggccacagttatctacagtgccctt

SEQ ID NO: 3260458 - DNA, 25 bp, Homo sapien
gccacagttatctacagtgcccttc

SEQ ID NO: 3260459 - DNA, 25 bp, Homo sapien
aagtctcaaccctgtgttccacgtt

SEQ ID NO: 3260460 - DNA, 25 bp, Homo sapien
aaaagtctcaaccctgtgttccacg

SEQ ID NO: 3260461 - DNA, 25 bp, Homo sapien
aaagtctcaaccctgtgttccacgt

SEQ ID NO: 3260462 - DNA, 25 bp, Homo sapien
agtctcaaccctgtgttccacgttg

SEQ ID NO: 3260463 - DNA, 25 bp, Homo sapien
tgggaaaaccaagtcctcaaggatg

SEQ ID NO: 3260464 - DNA, 25 bp, Homo sapien
caagtcctcaaggatggcaccatgc

SEQ ID NO: 3260465 - DNA, 25 bp, Homo sapien
aaaccaagtcctcaaggatggcacc

SEQ ID NO: 3260466 - DNA, 25 bp, Homo sapien
agtcctcaaggatggcaccatgcat

SEQ ID NO: 3260467 - DNA, 25 bp, Homo sapien
gaaaacaacattcttccccactgaa

SEQ ID NO: 3260468 - DNA, 25 bp, Homo sapien
ttttgtatggcttgagttgccttag

SEQ ID NO: 3260469 - DNA, 25 bp, Homo sapien
taggcagaattctcccctgaacagt

SEQ ID NO: 3260470 - DNA, 25 bp, Homo sapien
tatggcttgagttgccttaggcaga

SEQ ID NO: 3260471 - DNA, 25 bp, Homo sapien
tggaagagctacactcgaacatatt

SEQ ID NO: 3260472 - DNA, 25 bp, Homo sapien
agagctacactcgaacatattcagc

SEQ ID NO: 3260473 - DNA, 25 bp, Homo sapien
tgcctggaagagctacactcgaaca

SEQ ID NO: 3260474 - DNA, 25 bp, Homo sapien
tacactcgaacatattcagcttcct

SEQ ID NO: 3260475 - DNA, 25 bp, Homo sapien
ggcgttccccaaactgtgatgctga

SEQ ID NO: 3260476 - DNA, 25 bp, Homo sapien
ccttgtagggcatgtgatgagttgc

SEQ ID NO: 3260477 - DNA, 25 bp, Homo sapien
catgagcccctttcagaaacttggg

SEQ ID NO: 3260478 - DNA, 25 bp, Homo sapien
ttctgacacaggtctgatactcacc

SEQ ID NO: 3260479 - DNA, 25 bp, Homo sapien
aaacgatggtcttcgaggagattcc

SEQ ID NO: 3260480 - DNA, 25 bp, Homo sapien
tcaaggcatttcaaaaacgatggtc

SEQ ID NO: 3260481 - DNA, 25 bp, Homo sapien
cgaggagattcctttgagataggca

SEQ ID NO: 3260482 - DNA, 25 bp, Homo sapien
gattcctttgagataggcaaaggca

SEQ ID NO: 3260483 - DNA, 25 bp, Homo sapien
taaagctggtactctcaaagaacta

SEQ ID NO: 3260484 - DNA, 25 bp, Homo sapien
ctagatttaaagctggtactctcaa

SEQ ID NO: 3260485 - DNA, 25 bp, Homo sapien
ggtactctcaaagaactataactca

SEQ ID NO: 3260486 - DNA, 25 bp, Homo sapien
gatttaaagctggtactctcaaaga

SEQ ID NO: 3260487 - DNA, 25 bp, Homo sapien
ctagacaccaatttgttgttcagaa

SEQ ID NO: 3260488 - DNA, 25 bp, Homo sapien
ccattgatttcggtgcaaagagcat

SEQ ID NO: 3260489 - DNA, 25 bp, Homo sapien
gctgccattgatttcggtgcaaaga

SEQ ID NO: 3260490 - DNA, 25 bp, Homo sapien
ctgccattgatttcggtgcaaagag

SEQ ID NO: 3260491 - DNA, 25 bp, Homo sapien
tgccattgatttcggtgcaaagagc

SEQ ID NO: 3260492 - DNA, 25 bp, Homo sapien
tctcaggtttgtatggacacaggat

SEQ ID NO: 3260493 - DNA, 25 bp, Homo sapien
agccacttgtgggtgtgccctctaa

SEQ ID NO: 3260494 - DNA, 25 bp, Homo sapien
gcttgaaaacaggagcgcatcttct

SEQ ID NO: 3260495 - DNA, 25 bp, Homo sapien
agttgggcccagtgagcggactctt

SEQ ID NO: 3260496 - DNA, 25 bp, Homo sapien
tatatagagatttggttaccaatcc

SEQ ID NO: 3260497 - DNA, 25 bp, Homo sapien
ggcacaggcctgaagttggagcttt

SEQ ID NO: 3260498 - DNA, 25 bp, Homo sapien
tgccccactcccgtaacagagatat

SEQ ID NO: 3260499 - DNA, 25 bp, Homo sapien
gttggagcttttgccaaggaccctg

SEQ ID NO: 3260500 - DNA, 25 bp, Homo sapien
tacgcacagcttatgtatacatatg

SEQ ID NO: 3260501 - DNA, 25 bp, Homo sapien
tacgcacagattatgtatacatatg

SEQ ID NO: 3260502 - DNA, 25 bp, Homo sapien
tctatacgcacagcttatgtataca

SEQ ID NO: 3260503 - DNA, 25 bp, Homo sapien
gtattatatacgcacagcttatgta

SEQ ID NO: 3260504 - DNA, 25 bp, Homo sapien
tagagagagtaattcacacagagcc

SEQ ID NO: 3260505 - DNA, 25 bp, Homo sapien
cagaggtgcttagagtcagtcccaa

SEQ ID NO: 3260506 - DNA, 25 bp, Homo sapien
gaaagtaatcccactccagagcact

SEQ ID NO: 3260507 - DNA, 25 bp, Homo sapien
tcttggatgggcatgacaatttccc

SEQ ID NO: 3260508 - DNA, 25 bp, Homo sapien
tctactagacctcaaggcatggcct

SEQ ID NO: 3260509 - DNA, 25 bp, Homo sapien
gagaaaactccaggttgccaaaaga

SEQ ID NO: 3260510 - DNA, 25 bp, Homo sapien
cccaatgcatatattagaggctctg

SEQ ID NO: 3260511 - DNA, 25 bp, Homo sapien
ggaccacacctgacacactgtagca

SEQ ID NO: 3260512 - DNA, 25 bp, Homo sapien
acagatcccaagaaagccaacttca

SEQ ID NO: 3260513 - DNA, 25 bp, Homo sapien
gaaagacattcccatagaagccctc

SEQ ID NO: 3260514 - DNA, 25 bp, Homo sapien
tcatgaacaggcaagtatgctctca

SEQ ID NO: 3260515 - DNA, 25 bp, Homo sapien
ggtctaccagctctccgaaagacat

SEQ ID NO: 3260516 - DNA, 25 bp, Homo sapien
tcctgatacgtgacggcagggcaca

SEQ ID NO: 3260517 - DNA, 25 bp, Homo sapien
gacggacactgtacagggactcctg

SEQ ID NO: 3260518 - DNA, 25 bp, Homo sapien
catggctggcggacatactgaggtc

SEQ ID NO: 3260519 - DNA, 25 bp, Homo sapien
tggattgggctttcacgatgttgca

SEQ ID NO: 3260520 - DNA, 25 bp, Homo sapien
caggccgttacaatggattcagttc

SEQ ID NO: 3260521 - DNA, 25 bp, Homo sapien
caaggtcacaacagagagatgagct

SEQ ID NO: 3260522 - DNA, 25 bp, Homo sapien
ttcgcatgaaatggacaaggtcaca

SEQ ID NO: 3260523 - DNA, 25 bp, Homo sapien
cacatcccagcgaggcttgtcagag

SEQ ID NO: 3260524 - DNA, 25 bp, Homo sapien
aaacaggaggagatgttaccgtcat

SEQ ID NO: 3260525 - DNA, 25 bp, Homo sapien
gccaccaaggagatgagaggcggac

SEQ ID NO: 3260526 - DNA, 25 bp, Homo sapien
agaggcggacaaagcagcagatggc

SEQ ID NO: 3260527 - DNA, 25 bp, Homo sapien
ataaacaggaggagatgttaccgtc

SEQ ID NO: 3260528 - DNA, 25 bp, Homo sapien
aagctggtgacagcccatttggaag

SEQ ID NO: 3260529 - DNA, 25 bp, Homo sapien
ttagcacctagaggcaagctgtctt

SEQ ID NO: 3260530 - DNA, 25 bp, Homo sapien
ctccaagctggtgacagcccatttg

SEQ ID NO: 3260531 - DNA, 25 bp, Homo sapien
ggaatgtagcaggaaattagcacct

SEQ ID NO: 3260532 - DNA, 25 bp, Homo sapien
ttctcagcttgtggacggcagcctc

SEQ ID NO: 3260533 - DNA, 25 bp, Homo sapien
cagtcaattccatctcttgtgaggg

SEQ ID NO: 3260534 - DNA, 25 bp, Homo sapien
gactttcctcagtgcatgcgtgtgg

SEQ ID NO: 3260535 - DNA, 25 bp, Homo sapien
gggagacacccacattcagttcata

SEQ ID NO: 3260536 - DNA, 25 bp, Homo sapien
caagcagtccatgattctagcatac

SEQ ID NO: 3260537 - DNA, 25 bp, Homo sapien
caacggatgagtaggtaaacaccag

SEQ ID NO: 3260538 - DNA, 25 bp, Homo sapien
gataatcaacagttaccaggtccgg

SEQ ID NO: 3260539 - DNA, 25 bp, Homo sapien
aagcagcccaaatttccaccaacgg

SEQ ID NO: 3260540 - DNA, 25 bp, Homo sapien
tgtgctcagggtgctttcaacagct

SEQ ID NO: 3260541 - DNA, 25 bp, Homo sapien
tgtatactagttccagctgcgcagc

SEQ ID NO: 3260542 - DNA, 25 bp, Homo sapien
tatggtcgaacaatcctgctcctag

SEQ ID NO: 3260543 - DNA, 25 bp, Homo sapien
tcacctcgtagtggcaagaatcaag

SEQ ID NO: 3260544 - DNA, 25 bp, Homo sapien
ccagcaatccatgattctagtatac

SEQ ID NO: 3260545 - DNA, 25 bp, Homo sapien
tgagaacatcagattaaaagacctc

SEQ ID NO: 3260546 - DNA, 25 bp, Homo sapien
gattaaaagacctccagcaatccat

SEQ ID NO: 3260547 - DNA, 25 bp, Homo sapien
caggatttaaatccacccccttctg

SEQ ID NO: 3260548 - DNA, 25 bp, Homo sapien
tactcacgagtagttatcttgcaca

SEQ ID NO: 3260549 - DNA, 25 bp, Homo sapien
gacagagtccatgtagttttgctta

SEQ ID NO: 3260550 - DNA, 25 bp, Homo sapien
tgcatttattaggaacaacattctg

SEQ ID NO: 3260551 - DNA, 25 bp, Homo sapien
cacttaaccctaggccagaggacac

SEQ ID NO: 3260552 - DNA, 25 bp, Homo sapien
gagttaaggcagtttaattcaagga

SEQ ID NO: 3260553 - DNA, 25 bp, Homo sapien
cagtttaattcaaggatgcgaaaac

SEQ ID NO: 3260554 - DNA, 25 bp, Homo sapien
taaggcagtttaattcaaggatgcg

SEQ ID NO: 3260555 - DNA, 25 bp, Homo sapien
aggagttaaggcagtttaattcaag

SEQ ID NO: 3260556 - DNA, 25 bp, Homo sapien
gatcaacggatgctatttgcaggcc

SEQ ID NO: 3260557 - DNA, 25 bp, Homo sapien
tccaacatgacaccgctatagcagg

SEQ ID NO: 3260558 - DNA, 25 bp, Homo sapien
tatgcagttaacacagatcaacgga

SEQ ID NO: 3260559 - DNA, 25 bp, Homo sapien
tatagcaggtgctatgcagagccct

SEQ ID NO: 3260560 - DNA, 25 bp, Homo sapien
tctgtggttaccacctggattaggc

SEQ ID NO: 3260561 - DNA, 25 bp, Homo sapien
tccttccttctgtggttaccacctg

SEQ ID NO: 3260562 - DNA, 25 bp, Homo sapien
ccttctgtggttaccacctggatta

SEQ ID NO: 3260563 - DNA, 25 bp, Homo sapien
cttccttctgtggttaccacctgga

SEQ ID NO: 3260564 - DNA, 25 bp, Homo sapien
cctgagctcggtcggtttttccctg

SEQ ID NO: 3260565 - DNA, 25 bp, Homo sapien
ctgagctcggtcggtttttccctgt

SEQ ID NO: 3260566 - DNA, 25 bp, Homo sapien
aagcagaggtaagccgaggttgcac

SEQ ID NO: 3260567 - DNA, 25 bp, Homo sapien
gaccttcacagtgacggcttgtggg

SEQ ID NO: 3260568 - DNA, 25 bp, Homo sapien
tggcacagcagcgactgtttaaaag

SEQ ID NO: 3260569 - DNA, 25 bp, Homo sapien
catgctgaccttcacagtgacggct

SEQ ID NO: 3260570 - DNA, 25 bp, Homo sapien
gctcagcacgagttcagacacaaga

SEQ ID NO: 3260571 - DNA, 25 bp, Homo sapien
tgagaacgccattctaaccagggat

SEQ ID NO: 3260572 - DNA, 25 bp, Homo sapien
gccagcgctgatgtgtaaaggtcca

SEQ ID NO: 3260573 - DNA, 25 bp, Homo sapien
tctaaagtactgtcatgtcatggcc

SEQ ID NO: 3260574 - DNA, 25 bp, Homo sapien
ctagaggggcttgaggaactgatac

SEQ ID NO: 3260575 - DNA, 25 bp, Homo sapien
caactaggaattctaagggtgtcca

SEQ ID NO: 3260576 - DNA, 25 bp, Homo sapien
tcaactaggaattctaagggtgtcc

SEQ ID NO: 3260577 - DNA, 25 bp, Homo sapien
attgatttcctgttcatcggggtat

SEQ ID NO: 3260578 - DNA, 25 bp, Homo sapien
tgttcatcggggtatccagggtaac

SEQ ID NO: 3260579 - DNA, 25 bp, Homo sapien
ctgttcatcggggtatccagggtaa

SEQ ID NO: 3260580 - DNA, 25 bp, Homo sapien
atttcctgttcatcggggtatccag

SEQ ID NO: 3260581 - DNA, 25 bp, Homo sapien
gggcggcatgccgctgttcttccca

SEQ ID NO: 3260582 - DNA, 25 bp, Homo sapien
gccccgggcggcatgccgctgttct

SEQ ID NO: 3260583 - DNA, 25 bp, Homo sapien
ctgccccgggcggcatgccgctgtt

SEQ ID NO: 3260584 - DNA, 25 bp, Homo sapien
cccgggcggcatgccgctgttcttc

SEQ ID NO: 3260585 - DNA, 25 bp, Homo sapien
aaggacatgcaatcttctcttgaga

SEQ ID NO: 3260586 - DNA, 25 bp, Homo sapien
gagaagatggctcagtgaccactgg

SEQ ID NO: 3260587 - DNA, 25 bp, Homo sapien
tccttcaggtcagacgccctcacca

SEQ ID NO: 3260588 - DNA, 25 bp, Homo sapien
gggacagcaaggacatgcaatcttc

SEQ ID NO: 3260589 - DNA, 25 bp, Homo sapien
ttctcccagtgactgcggcagggag

SEQ ID NO: 3260590 - DNA, 25 bp, Homo sapien
agaacccgatcagggcggagggagc

SEQ ID NO: 3260591 - DNA, 25 bp, Homo sapien
attcctctccagatcaagcagtcat

SEQ ID NO: 3260592 - DNA, 25 bp, Homo sapien
aagcagtcatctgcggcccatccgg

SEQ ID NO: 3260593 - DNA, 25 bp, Homo sapien
acagatgacaaaacgcagactcaga

SEQ ID NO: 3260594 - DNA, 25 bp, Homo sapien
aagtccaacgtgcacagttccagag

SEQ ID NO: 3260595 - DNA, 25 bp, Homo sapien
cagagccttaagagaagtccaacgt

SEQ ID NO: 3260596 - DNA, 25 bp, Homo sapien
gcgaagtaacttgccgaacgtgtca

SEQ ID NO: 3260597 - DNA, 25 bp, Homo sapien
ttgagatgcttggtagccagatggc

SEQ ID NO: 3260598 - DNA, 25 bp, Homo sapien
ggagatggtcgatgtccatatgctc

SEQ ID NO: 3260599 - DNA, 25 bp, Homo sapien
gggcagcctttgcgccagccaaggt

SEQ ID NO: 3260600 - DNA, 25 bp, Homo sapien
tgagatgcttggtagccagatggct

SEQ ID NO: 3260601 - DNA, 25 bp, Homo sapien
aatgagtgactcaggaaaggactca

SEQ ID NO: 3260602 - DNA, 25 bp, Homo sapien
ttggatttggcattgcccccggccc

SEQ ID NO: 3260603 - DNA, 25 bp, Homo sapien
ttcacccaagagctttccaacctca

SEQ ID NO: 3260604 - DNA, 25 bp, Homo sapien
ggaagaacatacagccagtggtcac

SEQ ID NO: 3260605 - DNA, 25 bp, Homo sapien
ccaaaggaagaacatacagccagtg

SEQ ID NO: 3260606 - DNA, 25 bp, Homo sapien
caaaggaagaacatacagccagtgg

SEQ ID NO: 3260607 - DNA, 25 bp, Homo sapien
aaggaagaacatacagccagtggtc

SEQ ID NO: 3260608 - DNA, 25 bp, Homo sapien
cagtgaacgagtctgtcattttaac

SEQ ID NO: 3260609 - DNA, 25 bp, Homo sapien
tttaacaatgatgctagcgctggcc

SEQ ID NO: 3260610 - DNA, 25 bp, Homo sapien
tgatgctagcgctggcctcttcatt

SEQ ID NO: 3260611 - DNA, 25 bp, Homo sapien
ctcagtgaacgagtctgtcatttta

SEQ ID NO: 3260612 - DNA, 25 bp, Homo sapien
catatggtatctgttgttactcaaa

SEQ ID NO: 3260613 - DNA, 25 bp, Homo sapien
atatggtatctgttgttactcaaat

SEQ ID NO: 3260614 - DNA, 25 bp, Homo sapien
ccatatggtatctgttgttactcaa

SEQ ID NO: 3260615 - DNA, 25 bp, Homo sapien
ctgggaaagcgccctcatcagtgtc

SEQ ID NO: 3260616 - DNA, 25 bp, Homo sapien
tgggaaagcgccctcatcagtgtcc

SEQ ID NO: 3260617 - DNA, 25 bp, Homo sapien
gggaaagcgccctcatcagtgtccc

SEQ ID NO: 3260618 - DNA, 25 bp, Homo sapien
tttggaattctctcccgagtcacgc

SEQ ID NO: 3260619 - DNA, 25 bp, Homo sapien
tcacgccggactttttgggtctggc

SEQ ID NO: 3260620 - DNA, 25 bp, Homo sapien
actggcgtgcgcacgcactcggaaa

SEQ ID NO: 3260621 - DNA, 25 bp, Homo sapien
cactcggaaacaggaatagacgcgt

SEQ ID NO: 3260622 - DNA, 25 bp, Homo sapien
cttcctctagactgccccccgccgg

SEQ ID NO: 3260623 - DNA, 25 bp, Homo sapien
agttgcgggcccgaaaagcctgcac

SEQ ID NO: 3260624 - DNA, 25 bp, Homo sapien
gaaaagcctgcacgcatcgagaacc

SEQ ID NO: 3260625 - DNA, 25 bp, Homo sapien
ggcccgaaaagcctgcacgcatcga

SEQ ID NO: 3260626 - DNA, 25 bp, Homo sapien
tgcacgcatcgagaacccagagcgc

SEQ ID NO: 3260627 - DNA, 25 bp, Homo sapien
cgcctagcgcgctgccacgctcggg

SEQ ID NO: 3260628 - DNA, 25 bp, Homo sapien
ggctcccgcagctccgaatgcctcg

SEQ ID NO: 3260629 - DNA, 25 bp, Homo sapien
gctccgaatgcctcgagccggagcg

SEQ ID NO: 3260630 - DNA, 25 bp, Homo sapien
ccgccaagagggaacgcgcggcggc

SEQ ID NO: 3260631 - DNA, 25 bp, Homo sapien
taacacactccgctacatagtcagg

SEQ ID NO: 3260632 - DNA, 25 bp, Homo sapien
tctgctgaaacattagtctaggagg

SEQ ID NO: 3260633 - DNA, 25 bp, Homo sapien
cactagcatgcctggatggttcaaa

SEQ ID NO: 3260634 - DNA, 25 bp, Homo sapien
tgaccttggagcagagcattgccga

SEQ ID NO: 3260635 - DNA, 25 bp, Homo sapien
tatggagtatttacagaccaggctc

SEQ ID NO: 3260636 - DNA, 25 bp, Homo sapien
taatccccacagtcgcagatcagtg

SEQ ID NO: 3260637 - DNA, 25 bp, Homo sapien
tattgggtctcgttcacaaacagcc

SEQ ID NO: 3260638 - DNA, 25 bp, Homo sapien
gaataaattcccacgccaatcatgg

SEQ ID NO: 3260639 - DNA, 25 bp, Homo sapien
tccccggaagaggtggaagtcattg

SEQ ID NO: 3260640 - DNA, 25 bp, Homo sapien
tctccccggaagaggtggaagtcat

SEQ ID NO: 3260641 - DNA, 25 bp, Homo sapien
cggaagaggtggaagtcattgtcat

SEQ ID NO: 3260642 - DNA, 25 bp, Homo sapien
ctcctcatctgggcttctccccgga

SEQ ID NO: 3260643 - DNA, 25 bp, Homo sapien
tctgttttccacattgccgcaaatt

SEQ ID NO: 3260644 - DNA, 25 bp, Homo sapien
tgcaaagtcagcgatagctcttctg

SEQ ID NO: 3260645 - DNA, 25 bp, Homo sapien
caaagtcagcgatagctcttctgtt

SEQ ID NO: 3260646 - DNA, 25 bp, Homo sapien
attgccgcaaatttcccctaaggtg

SEQ ID NO: 3260647 - DNA, 25 bp, Homo sapien
tgccgtctgcctgcgctgggttctg

SEQ ID NO: 3260648 - DNA, 25 bp, Homo sapien
tgcgctgggttctgtgcgtgcacgc

SEQ ID NO: 3260649 - DNA, 25 bp, Homo sapien
gtgcgtgcacgcaagtctctctggt

SEQ ID NO: 3260650 - DNA, 25 bp, Homo sapien
atgccgtctgcctgcgctgggttct

SEQ ID NO: 3260651 - DNA, 25 bp, Homo sapien
cgtatatgttttaataatcatatca

SEQ ID NO: 3260652 - DNA, 25 bp, Homo sapien
tatgttttaataatcatatcaaagc

SEQ ID NO: 3260653 - DNA, 25 bp, Homo sapien
taataatcatatcaaagcaatccat

SEQ ID NO: 3260654 - DNA, 25 bp, Homo sapien
ttttaataatcatatcaaagcaatc

SEQ ID NO: 3260655 - DNA, 25 bp, Homo sapien
cagtaacctgtaacgtcacagccat

SEQ ID NO: 3260656 - DNA, 25 bp, Homo sapien
ggtaaacaagtttgcaggtgttgcc

SEQ ID NO: 3260657 - DNA, 25 bp, Homo sapien
ccagttgatggtttagagttggcat

SEQ ID NO: 3260658 - DNA, 25 bp, Homo sapien
gaaaatatacagagcttccttggtg

SEQ ID NO: 3260659 - DNA, 25 bp, Homo sapien
tatacagagcttccttggtgttcat

SEQ ID NO: 3260660 - DNA, 25 bp, Homo sapien
gctctgtagcaagaatggtttctgt

SEQ ID NO: 3260661 - DNA, 25 bp, Homo sapien
tgtagcaagaatggtttctgtggct

SEQ ID NO: 3260662 - DNA, 25 bp, Homo sapien
ctgctctgtagcaagaatggtttct

SEQ ID NO: 3260663 - DNA, 25 bp, Homo sapien
tctgtagcaagaatggtttctgtgg

SEQ ID NO: 3260664 - DNA, 25 bp, Homo sapien
tttacgtgtacacaggagtctgcaa

SEQ ID NO: 3260665 - DNA, 25 bp, Homo sapien
tctcatgggaatttgtgtgacctgc

SEQ ID NO: 3260666 - DNA, 25 bp, Homo sapien
aagacctgaagaagcgttgggccca

SEQ ID NO: 3260667 - DNA, 25 bp, Homo sapien
tcctggtacagggagatcacctttc

SEQ ID NO: 3260668 - DNA, 25 bp, Homo sapien
cctagttaccgtggccagaaatcaa

SEQ ID NO: 3260669 - DNA, 25 bp, Homo sapien
gcaaatgccggaggagcattccttg

SEQ ID NO: 3260670 - DNA, 25 bp, Homo sapien
ccaccatgatgcagtcctagtttaa

SEQ ID NO: 3260671 - DNA, 25 bp, Homo sapien
cctttgaagtgtgctggtcatccca

SEQ ID NO: 3260672 - DNA, 25 bp, Homo sapien
atatctgagtagattggagagagga

SEQ ID NO: 3260673 - DNA, 25 bp, Homo sapien
aatatctgagtagattggagagagg

SEQ ID NO: 3260674 - DNA, 25 bp, Homo sapien
cacactcggtgaatctgcttgtttt

SEQ ID NO: 3260675 - DNA, 25 bp, Homo sapien
ttttgattgagatagattttgtgtg

SEQ ID NO: 3260676 - DNA, 25 bp, Homo sapien
ccaccacactcggtgaatctgcttg

SEQ ID NO: 3260677 - DNA, 25 bp, Homo sapien
caacaaaacctactgagattttgat

SEQ ID NO: 3260678 - DNA, 25 bp, Homo sapien
tagcaggcgtgatgaccaacaaaga

SEQ ID NO: 3260679 - DNA, 25 bp, Homo sapien
tgggcacatttagacatagcaggcg

SEQ ID NO: 3260680 - DNA, 25 bp, Homo sapien
tatctacggaaaggcatgactggga

SEQ ID NO: 3260681 - DNA, 25 bp, Homo sapien
ctgggaggcccacaaggactctcat

SEQ ID NO: 3260682 - DNA, 25 bp, Homo sapien
gggaggtcgagccctgatcatgaca

SEQ ID NO: 3260683 - DNA, 25 bp, Homo sapien
gaggtcgagccctgatcatgacact

SEQ ID NO: 3260684 - DNA, 25 bp, Homo sapien
ggtcgagccctgatcatgacactgc

SEQ ID NO: 3260685 - DNA, 25 bp, Homo sapien
ggaggtcgagccctgatcatgacac

SEQ ID NO: 3260686 - DNA, 25 bp, Homo sapien
cagagtcgggactagcatagtagta

SEQ ID NO: 3260687 - DNA, 25 bp, Homo sapien
tatccatctccgaccagaattcagg

SEQ ID NO: 3260688 - DNA, 25 bp, Homo sapien
cagcccgcggaaagaaaaagtgact

SEQ ID NO: 3260689 - DNA, 25 bp, Homo sapien
caaccaggtctaatccggccaaagt

SEQ ID NO: 3260690 - DNA, 25 bp, Homo sapien
tccgaaggaaaagagtatagtagcc

SEQ ID NO: 3260691 - DNA, 25 bp, Homo sapien
gtttagactgtgaatatgatgacac

SEQ ID NO: 3260692 - DNA, 25 bp, Homo sapien
ggagttttagtcgtaggccttatga

SEQ ID NO: 3260693 - DNA, 25 bp, Homo sapien
ccttatgataattaccccgcggtgg

SEQ ID NO: 3260694 - DNA, 25 bp, Homo sapien
ggttgctaacctggtcactcatggt

SEQ ID NO: 3260695 - DNA, 25 bp, Homo sapien
gttgccctcgctaggttctccctgg

SEQ ID NO: 3260696 - DNA, 25 bp, Homo sapien
catggatctctgattaccagcctga

SEQ ID NO: 3260697 - DNA, 25 bp, Homo sapien
taaaagctcatgtggtatgacctca

SEQ ID NO: 3260698 - DNA, 25 bp, Homo sapien
ggtggcccagttgctgaggattcca

SEQ ID NO: 3260699 - DNA, 25 bp, Homo sapien
gtggcccagttgctgaggattccac

SEQ ID NO: 3260700 - DNA, 25 bp, Homo sapien
caccagtggtaccctgggaaaatat

SEQ ID NO: 3260701 - DNA, 25 bp, Homo sapien
tggagcctcgttttgattaggcagt

SEQ ID NO: 3260702 - DNA, 25 bp, Homo sapien
gagcctcgttttgattaggcagtaa

SEQ ID NO: 3260703 - DNA, 25 bp, Homo sapien
cctcgttttgattaggcagtaaatt

SEQ ID NO: 3260704 - DNA, 25 bp, Homo sapien
attggagcctcgttttgattaggca

SEQ ID NO: 3260705 - DNA, 25 bp, Homo sapien
gtgtgattgaggttaatgtgaactg

SEQ ID NO: 3260706 - DNA, 25 bp, Homo sapien
gtgattgaggttaatgtgaactgaa

SEQ ID NO: 3260707 - DNA, 25 bp, Homo sapien
tctaagctgtcttcatctaatttta

SEQ ID NO: 3260708 - DNA, 25 bp, Homo sapien
tgtggaaaatcaatacaagtcaacc

SEQ ID NO: 3260709 - DNA, 25 bp, Homo sapien
tcatgcagtgaagaagcaacacacc

SEQ ID NO: 3260710 - DNA, 25 bp, Homo sapien
tacactgagacctataactgggcta

SEQ ID NO: 3260711 - DNA, 25 bp, Homo sapien
gagccatgtgcccagtctagaagat

SEQ ID NO: 3260712 - DNA, 25 bp, Homo sapien
gaaagtattcagtccaagcatgcta

SEQ ID NO: 3260713 - DNA, 25 bp, Homo sapien
cagtatgaagtgttaacgccaaaat

SEQ ID NO: 3260714 - DNA, 25 bp, Homo sapien
aatgcaggagttcgaacttggctca

SEQ ID NO: 3260715 - DNA, 25 bp, Homo sapien
ggtgttagttcattccttcaatcgg

SEQ ID NO: 3260716 - DNA, 25 bp, Homo sapien
tctgtgatgtatcccaaaggttagc

SEQ ID NO: 3260717 - DNA, 25 bp, Homo sapien
ttggtgaaccattcctggtgcggag

SEQ ID NO: 3260718 - DNA, 25 bp, Homo sapien
aaccattcctggtgcggagagccct

SEQ ID NO: 3260719 - DNA, 25 bp, Homo sapien
gtgaaccattcctggtgcggagagc

SEQ ID NO: 3260720 - DNA, 25 bp, Homo sapien
gaaccattcctggtgcggagagccc

SEQ ID NO: 3260721 - DNA, 25 bp, Homo sapien
caaggccacagagctaagaatgagg

SEQ ID NO: 3260722 - DNA, 25 bp, Homo sapien
cacgtcagtctgatgagataggtgc

SEQ ID NO: 3260723 - DNA, 25 bp, Homo sapien
tgggactggccaacattagtagtgg

SEQ ID NO: 3260724 - DNA, 25 bp, Homo sapien
caagcccggcccgattaagagactt

SEQ ID NO: 3260725 - DNA, 25 bp, Homo sapien
tcccctcttatctacagggaaatag

SEQ ID NO: 3260726 - DNA, 25 bp, Homo sapien
ttggtaccaggtgctagaaagaatc

SEQ ID NO: 3260727 - DNA, 25 bp, Homo sapien
gtgtcccttgtctaatcatccatga

SEQ ID NO: 3260728 - DNA, 25 bp, Homo sapien
gtataacccatgctgaagttttcag

SEQ ID NO: 3260729 - DNA, 25 bp, Homo sapien
tccaagctgggtgatgtagttattg

SEQ ID NO: 3260730 - DNA, 25 bp, Homo sapien
tgggtttgtaggtccggccacagct

SEQ ID NO: 3260731 - DNA, 25 bp, Homo sapien
catctgtagactggttgggtttgta

SEQ ID NO: 3260732 - DNA, 25 bp, Homo sapien
tggaactcagatcgccactcagaaa

SEQ ID NO: 3260733 - DNA, 25 bp, Homo sapien
aatatttttctgagcgtacaccagc

SEQ ID NO: 3260734 - DNA, 25 bp, Homo sapien
caccagcccttaaataacctgtggt

SEQ ID NO: 3260735 - DNA, 25 bp, Homo sapien
ttgtataatgcattaaaaccattag

SEQ ID NO: 3260736 - DNA, 25 bp, Homo sapien
cgaaaccaatggaattgtataatgc

SEQ ID NO: 3260737 - DNA, 25 bp, Homo sapien
gaaagaccgattccggtgggacatg

SEQ ID NO: 3260738 - DNA, 25 bp, Homo sapien
gggaatgctgcgtagtgaaatcttc

SEQ ID NO: 3260739 - DNA, 25 bp, Homo sapien
tgaaagagaaagaccgattccggtg

SEQ ID NO: 3260740 - DNA, 25 bp, Homo sapien
caaatatcccgggtgaggattgaaa

SEQ ID NO: 3260741 - DNA, 25 bp, Homo sapien
gcaagctgatgccttaggaaattga

SEQ ID NO: 3260742 - DNA, 25 bp, Homo sapien
caactgttcttagcatgtgaaggta

SEQ ID NO: 3260743 - DNA, 25 bp, Homo sapien
tgagcctaaccacacagcactgggt

SEQ ID NO: 3260744 - DNA, 25 bp, Homo sapien
tgaaggtaacctaatgcagaaagtt

SEQ ID NO: 3260745 - DNA, 25 bp, Homo sapien
cggccaatgagctgaaggtcctcgg

SEQ ID NO: 3260746 - DNA, 25 bp, Homo sapien
caggcggccaatgagctgaaggtcc

SEQ ID NO: 3260747 - DNA, 25 bp, Homo sapien
tctgcaggcggccaatgagctgaag

SEQ ID NO: 3260748 - DNA, 25 bp, Homo sapien
aatgagctgaaggtcctcgggcctg

SEQ ID NO: 3260749 - DNA, 25 bp, Homo sapien
aactccagagcctaaagcagtgctg

SEQ ID NO: 3260750 - DNA, 25 bp, Homo sapien
cagaatttgtgagcctatgagagca

SEQ ID NO: 3260751 - DNA, 25 bp, Homo sapien
caatatgtttgcatgagggaccagt

SEQ ID NO: 3260752 - DNA, 25 bp, Homo sapien
tcttcgaagtgtgagggttaaacca

SEQ ID NO: 3260753 - DNA, 25 bp, Homo sapien
tggcccgctgggcttgctgagtctc

SEQ ID NO: 3260754 - DNA, 25 bp, Homo sapien
actactgaaatctgccaccatggcc

SEQ ID NO: 3260755 - DNA, 25 bp, Homo sapien
cttccggtgttcctggcgcagtgtc

SEQ ID NO: 3260756 - DNA, 25 bp, Homo sapien
tggcctgcatctccttccggtgttc

SEQ ID NO: 3260757 - DNA, 25 bp, Homo sapien
gcaccgcgtcctggagctgcgcgtt

SEQ ID NO: 3260758 - DNA, 25 bp, Homo sapien
ttctgcgcctcctgctgatgctgct

SEQ ID NO: 3260759 - DNA, 25 bp, Homo sapien
gatgctgctccacctccgcgcgcag

SEQ ID NO: 3260760 - DNA, 25 bp, Homo sapien
gcgctggtctcggagcttctgcgcc

SEQ ID NO: 3260761 - DNA, 25 bp, Homo sapien
ccagagcccgcatccctcgccggaa

SEQ ID NO: 3260762 - DNA, 25 bp, Homo sapien
tcccagagcccgcatccctcgccgg

SEQ ID NO: 3260763 - DNA, 25 bp, Homo sapien
agagcccgcatccctcgccggaacc

SEQ ID NO: 3260764 - DNA, 25 bp, Homo sapien
ctcccagagcccgcatccctcgccg

SEQ ID NO: 3260765 - DNA, 25 bp, Homo sapien
agcgcccggtggggagccggcctgg

SEQ ID NO: 3260766 - DNA, 25 bp, Homo sapien
gcgcccggtggggagccggcctggc

SEQ ID NO: 3260767 - DNA, 25 bp, Homo sapien
cagcagcgcccggtggggagccggc

SEQ ID NO: 3260768 - DNA, 25 bp, Homo sapien
ctgcccagcagcgcccggtggggag

SEQ ID NO: 3260769 - DNA, 25 bp, Homo sapien
tatccagagccctcaggtgaacact

SEQ ID NO: 3260770 - DNA, 25 bp, Homo sapien
tgcatgggtggccacgtatcggctc

SEQ ID NO: 3260771 - DNA, 25 bp, Homo sapien
cagactccacttagctcagcggtgg

SEQ ID NO: 3260772 - DNA, 25 bp, Homo sapien
tccttctagagggttcagggcttcc

SEQ ID NO: 3260773 - DNA, 25 bp, Homo sapien
tgtggcgattatgtgatccttgctg

SEQ ID NO: 3260774 - DNA, 25 bp, Homo sapien
acaggcagcttgctgctccgacagc

SEQ ID NO: 3260775 - DNA, 25 bp, Homo sapien
ctggtgcccagaacaggcagcttgc

SEQ ID NO: 3260776 - DNA, 25 bp, Homo sapien
ctctgtggcgattatgtgatccttg

SEQ ID NO: 3260777 - DNA, 25 bp, Homo sapien
taacttcgaagatgctgtgtgtgag

SEQ ID NO: 3260778 - DNA, 25 bp, Homo sapien
gcctaagatcctccaatttgccgaa

SEQ ID NO: 3260779 - DNA, 25 bp, Homo sapien
gagcctggaggcctaagatcctcca

SEQ ID NO: 3260780 - DNA, 25 bp, Homo sapien
ctctgttaacttcgaagatgctgtg

SEQ ID NO: 3260781 - DNA, 25 bp, Homo sapien
gcagcagggcctgctgtgcctgcat

SEQ ID NO: 3260782 - DNA, 25 bp, Homo sapien
ggcctgctgtgcctgcatcctctca

SEQ ID NO: 3260783 - DNA, 25 bp, Homo sapien
ctagcagcagggcctgctgtgcctg

SEQ ID NO: 3260784 - DNA, 25 bp, Homo sapien
gcctgctgtgcctgcatcctctcac

SEQ ID NO: 3260785 - DNA, 25 bp, Homo sapien
tggagctccagtcggtgtgtctggt

SEQ ID NO: 3260786 - DNA, 25 bp, Homo sapien
agctccagtcggtgtgtctggtgtt

SEQ ID NO: 3260787 - DNA, 25 bp, Homo sapien
gagctccagtcggtgtgtctggtgt

SEQ ID NO: 3260788 - DNA, 25 bp, Homo sapien
gctccagtcggtgtgtctggtgttg

SEQ ID NO: 3260789 - DNA, 25 bp, Homo sapien
ttccttcttcaagcgttcctctgtg

SEQ ID NO: 3260790 - DNA, 25 bp, Homo sapien
ggattccttcttcaagcgttcctct

SEQ ID NO: 3260791 - DNA, 25 bp, Homo sapien
cctcgagctgggctttcatggcgtg

SEQ ID NO: 3260792 - DNA, 25 bp, Homo sapien
agttcctgatgtctggccttctcca

SEQ ID NO: 3260793 - DNA, 25 bp, Homo sapien
cgcagggctctctggtgggaagcct

SEQ ID NO: 3260794 - DNA, 25 bp, Homo sapien
ggtcctccctgtagttgctggtgca

SEQ ID NO: 3260795 - DNA, 25 bp, Homo sapien
tggccttctggctttgccagtcctc

SEQ ID NO: 3260796 - DNA, 25 bp, Homo sapien
ttgccagtcctcctctagacgctgg

SEQ ID NO: 3260797 - DNA, 25 bp, Homo sapien
gtcctcctctagacgctggattttg

SEQ ID NO: 3260798 - DNA, 25 bp, Homo sapien
atttggccttctggctttgccagtc

SEQ ID NO: 3260799 - DNA, 25 bp, Homo sapien
gtggaggttgtgggtcacttccctc

SEQ ID NO: 3260800 - DNA, 25 bp, Homo sapien
gggtcacttccctccttgagaagca

SEQ ID NO: 3260801 - DNA, 25 bp, Homo sapien
agtggaggttgtgggtcacttccct

SEQ ID NO: 3260802 - DNA, 25 bp, Homo sapien
gtcacttccctccttgagaagcact

SEQ ID NO: 3260803 - DNA, 25 bp, Homo sapien
catattaaaagagagaagttttctt

SEQ ID NO: 3260804 - DNA, 25 bp, Homo sapien
acatattaaaagagagaagttttct

SEQ ID NO: 3260805 - DNA, 25 bp, Homo sapien
aagtttcatccagcttcaagcatgg

SEQ ID NO: 3260806 - DNA, 25 bp, Homo sapien
tatcttgatactcctctcctctcgg

SEQ ID NO: 3260807 - DNA, 25 bp, Homo sapien
tcctctcggcgaagtttcatccagc

SEQ ID NO: 3260808 - DNA, 25 bp, Homo sapien
cttcttcagctgctaacttatcttg

SEQ ID NO: 3260809 - DNA, 25 bp, Homo sapien
tcatggagatggcacttgggaatcc

SEQ ID NO: 3260810 - DNA, 25 bp, Homo sapien
gcatgtctagctccgtgatgaagga

SEQ ID NO: 3260811 - DNA, 25 bp, Homo sapien
tatcctgggcctgtgtgtacagctc

SEQ ID NO: 3260812 - DNA, 25 bp, Homo sapien
tgtagcagaataccatgtgatgccc

SEQ ID NO: 3260813 - DNA, 25 bp, Homo sapien
aagggaatctgcaggatgtaatttc

SEQ ID NO: 3260814 - DNA, 25 bp, Homo sapien
tgaaagggaatctgcaggatgtaat

SEQ ID NO: 3260815 - DNA, 25 bp, Homo sapien
gaaagggaatctgcaggatgtaatt

SEQ ID NO: 3260816 - DNA, 25 bp, Homo sapien
agggaatctgcaggatgtaatttct

SEQ ID NO: 3260817 - DNA, 25 bp, Homo sapien
tcccatatgggcttgccattaatat

SEQ ID NO: 3260818 - DNA, 25 bp, Homo sapien
tttcagtgtcaagcagatgtccgca

SEQ ID NO: 3260819 - DNA, 25 bp, Homo sapien
gcagatgtccgcagatgtcattctt

SEQ ID NO: 3260820 - DNA, 25 bp, Homo sapien
gaaagcttcctctcccatatgggct

SEQ ID NO: 3260821 - DNA, 25 bp, Homo sapien
cctgtggggcgtgtcttattttgtt

SEQ ID NO: 3260822 - DNA, 25 bp, Homo sapien
ctcctgtggggcgtgtcttattttg

SEQ ID NO: 3260823 - DNA, 25 bp, Homo sapien
cagctcctgtggggcgtgtcttatt

SEQ ID NO: 3260824 - DNA, 25 bp, Homo sapien
agctcctgtggggcgtgtcttattt

SEQ ID NO: 3260825 - DNA, 25 bp, Homo sapien
gcttcacattgagggctgctttctc

SEQ ID NO: 3260826 - DNA, 25 bp, Homo sapien
aattctgaagcttcacattgagggc

SEQ ID NO: 3260827 - DNA, 25 bp, Homo sapien
ctgaagcttcacattgagggctgct

SEQ ID NO: 3260828 - DNA, 25 bp, Homo sapien
gaagcttcacattgagggctgcttt

SEQ ID NO: 3260829 - DNA, 25 bp, Homo sapien
ttctttcagcctccacggacgagcg

SEQ ID NO: 3260830 - DNA, 25 bp, Homo sapien
tttctttcagcctccacggacgagc

SEQ ID NO: 3260831 - DNA, 25 bp, Homo sapien
tctttctttcagcctccacggacga

SEQ ID NO: 3260832 - DNA, 25 bp, Homo sapien
tttcagcctccacggacgagcgaac

SEQ ID NO: 3260833 - DNA, 25 bp, Homo sapien
gtcgcttcactagctggtctttgag

SEQ ID NO: 3260834 - DNA, 25 bp, Homo sapien
acgaaggtcttcttcatattgttgc

SEQ ID NO: 3260835 - DNA, 25 bp, Homo sapien
cacggtgtgcttctttaccaagtct

SEQ ID NO: 3260836 - DNA, 25 bp, Homo sapien
tctgatgtttgattttacgaaggtc

SEQ ID NO: 3260837 - DNA, 25 bp, Homo sapien
catgcaagggcactccttgagacag

SEQ ID NO: 3260838 - DNA, 25 bp, Homo sapien
aggatgaagattgccggcttccaag

SEQ ID NO: 3260839 - DNA, 25 bp, Homo sapien
ctttgttctctgaaactaactcagt

SEQ ID NO: 3260840 - DNA, 25 bp, Homo sapien
cttcccgcaggactttgttctctga

SEQ ID NO: 3260841 - DNA, 25 bp, Homo sapien
gagcctccttaagctgcacatccag

SEQ ID NO: 3260842 - DNA, 25 bp, Homo sapien
tgtgtcccacgacactcctgcagca

SEQ ID NO: 3260843 - DNA, 25 bp, Homo sapien
ccaagtttttttgcagtgcctttca

SEQ ID NO: 3260844 - DNA, 25 bp, Homo sapien
actctgaattctcctgtcgagcctc

SEQ ID NO: 3260845 - DNA, 25 bp, Homo sapien
cctggaagttcttgcggaggtccga

SEQ ID NO: 3260846 - DNA, 25 bp, Homo sapien
tttccctggagagcgtgaggactcg

SEQ ID NO: 3260847 - DNA, 25 bp, Homo sapien
tggtctctgccaccgcattctggag

SEQ ID NO: 3260848 - DNA, 25 bp, Homo sapien
tccgacttggtttcagggctctcct

SEQ ID NO: 3260849 - DNA, 25 bp, Homo sapien
tcatcctggcgggtgttcagggcat

SEQ ID NO: 3260850 - DNA, 25 bp, Homo sapien
ctggcgggtgttcagggcataaatc

SEQ ID NO: 3260851 - DNA, 25 bp, Homo sapien
tcctggcgggtgttcagggcataaa

SEQ ID NO: 3260852 - DNA, 25 bp, Homo sapien
cagcctcatcctggcgggtgttcag

SEQ ID NO: 3260853 - DNA, 25 bp, Homo sapien
cttcatgcctcacaggtcgcttggc

SEQ ID NO: 3260854 - DNA, 25 bp, Homo sapien
ggaaaggtcccatgttttagagaca

SEQ ID NO: 3260855 - DNA, 25 bp, Homo sapien
tgagcagtccgctcttctcctgggc

SEQ ID NO: 3260856 - DNA, 25 bp, Homo sapien
ggtcgcttggcaactcttctgccat

SEQ ID NO: 3260857 - DNA, 25 bp, Homo sapien
aagaggagcgcaccatgacatgacg

SEQ ID NO: 3260858 - DNA, 25 bp, Homo sapien
catgagcaggaagtagcgcaaaggc

SEQ ID NO: 3260859 - DNA, 25 bp, Homo sapien
gcaagacatgcaaggggcgtcctcc

SEQ ID NO: 3260860 - DNA, 25 bp, Homo sapien
caaaggcatggcatagaggcaagac

SEQ ID NO: 3260861 - DNA, 25 bp, Homo sapien
aagattctgcagcttgtgtgactga

SEQ ID NO: 3260862 - DNA, 25 bp, Homo sapien
gattctgcagcttgtgtgactgagg

SEQ ID NO: 3260863 - DNA, 25 bp, Homo sapien
gtgtgactgagggtatggctatccc

SEQ ID NO: 3260864 - DNA, 25 bp, Homo sapien
gagggtatggctatcccatttctac

SEQ ID NO: 3260865 - DNA, 25 bp, Homo sapien
caaacaggtccccaacaaagctggg

SEQ ID NO: 3260866 - DNA, 25 bp, Homo sapien
tactgttgctgtgatgttcattccc

SEQ ID NO: 3260867 - DNA, 25 bp, Homo sapien
ttctgaaagcgtagcgtgcctgcca

SEQ ID NO: 3260868 - DNA, 25 bp, Homo sapien
gcattcccagaagaacttcatgcaa

SEQ ID NO: 3260869 - DNA, 25 bp, Homo sapien
catgcaaggtcgaattcaagagctc

SEQ ID NO: 3260870 - DNA, 25 bp, Homo sapien
tccagtagcacgtcatcacatccgg

SEQ ID NO: 3260871 - DNA, 25 bp, Homo sapien
tgctggatggaagcttccagtagca

SEQ ID NO: 3260872 - DNA, 25 bp, Homo sapien
gacctcttttgttcgtgccctgtgg

SEQ ID NO: 3260873 - DNA, 25 bp, Homo sapien
acgtcatcacatccggggcagcaag

SEQ ID NO: 3260874 - DNA, 25 bp, Homo sapien
catcaagacaaggaagaaaactgca

SEQ ID NO: 3260875 - DNA, 25 bp, Homo sapien
agaccatcaagacaaggaagaaaac

SEQ ID NO: 3260876 - DNA, 25 bp, Homo sapien
caagacaaggaagaaaactgcatca

SEQ ID NO: 3260877 - DNA, 25 bp, Homo sapien
ccatcaagacaaggaagaaaactgc

SEQ ID NO: 3260878 - DNA, 25 bp, Homo sapien
gacatctagctctaacatccacaag

SEQ ID NO: 3260879 - DNA, 25 bp, Homo sapien
ttcagggggctgacatctagctcta

SEQ ID NO: 3260880 - DNA, 25 bp, Homo sapien
taacatccacaagattaagtccaaa

SEQ ID NO: 3260881 - DNA, 25 bp, Homo sapien
tgccttctctaaccttcagggggct

SEQ ID NO: 3260882 - DNA, 25 bp, Homo sapien
tcataagtaatatcagcaaaaccca

SEQ ID NO: 3260883 - DNA, 25 bp, Homo sapien
ggaaaccctatagatcaaataactc

SEQ ID NO: 3260884 - DNA, 25 bp, Homo sapien
gaagaacaggttacagagcatcata

SEQ ID NO: 3260885 - DNA, 25 bp, Homo sapien
tctgatagaaattcatggcacttgc

SEQ ID NO: 3260886 - DNA, 25 bp, Homo sapien
cacactgctcagggatcacaacaac

SEQ ID NO: 3260887 - DNA, 25 bp, Homo sapien
agcaggcgagagcctgaatgacagc

SEQ ID NO: 3260888 - DNA, 25 bp, Homo sapien
ttagcaggcgagagcctgaatgaca

SEQ ID NO: 3260889 - DNA, 25 bp, Homo sapien
ggatcacaacaacaatatgttcccc

SEQ ID NO: 3260890 - DNA, 25 bp, Homo sapien
aaatcctccttggaaactctggctt

SEQ ID NO: 3260891 - DNA, 25 bp, Homo sapien
atcctccttggaaactctggcttac

SEQ ID NO: 3260892 - DNA, 25 bp, Homo sapien
ctaaatcctccttggaaactctggc

SEQ ID NO: 3260893 - DNA, 25 bp, Homo sapien
taaatcctccttggaaactctggct

SEQ ID NO: 3260894 - DNA, 25 bp, Homo sapien
cataattgcataaaagcctgttgcg

SEQ ID NO: 3260895 - DNA, 25 bp, Homo sapien
tgcgtttctcggaagaaatgccctt

SEQ ID NO: 3260896 - DNA, 25 bp, Homo sapien
tcagttgagtcgtgctgtagagaac

SEQ ID NO: 3260897 - DNA, 25 bp, Homo sapien
tccaaggcacttcgggattttcagt

SEQ ID NO: 3260898 - DNA, 25 bp, Homo sapien
cagctgaacagctctgctactacac

SEQ ID NO: 3260899 - DNA, 25 bp, Homo sapien
cctcattgccctggcctacacagct

SEQ ID NO: 3260900 - DNA, 25 bp, Homo sapien
ctgaacagctctgctactacacaca

SEQ ID NO: 3260901 - DNA, 25 bp, Homo sapien
ttccggatctcctcattgccctggc

SEQ ID NO: 3260902 - DNA, 25 bp, Homo sapien
agccggcgccaccgtcggctttgga

SEQ ID NO: 3260903 - DNA, 25 bp, Homo sapien
ggatcacagtccattctccagccgg

SEQ ID NO: 3260904 - DNA, 25 bp, Homo sapien
ctttggagccctggcaagtgccggg

SEQ ID NO: 3260905 - DNA, 25 bp, Homo sapien
ttgcacattttcacgtgcatctggg

SEQ ID NO: 3260906 - DNA, 25 bp, Homo sapien
tgccgctggcgatcagtctgcagtt

SEQ ID NO: 3260907 - DNA, 25 bp, Homo sapien
gcgggcactgcgctcttggacacgt

SEQ ID NO: 3260908 - DNA, 25 bp, Homo sapien
cagccagtgcaggtttcgtgtgcaa

SEQ ID NO: 3260909 - DNA, 25 bp, Homo sapien
tcccgagtctccgagctgatagcgg

SEQ ID NO: 3260910 - DNA, 25 bp, Homo sapien
gccagcgcctgagttgcgcgagtgc

SEQ ID NO: 3260911 - DNA, 25 bp, Homo sapien
ggtgtgggccagcgcctgagttgcg

SEQ ID NO: 3260912 - DNA, 25 bp, Homo sapien
cctgagttgcgcgagtgcacagcgg

SEQ ID NO: 3260913 - DNA, 25 bp, Homo sapien
ctgagttgcgcgagtgcacagcggg

SEQ ID NO: 3260914 - DNA, 25 bp, Homo sapien
taataggggcttttagcactttgcc

SEQ ID NO: 3260915 - DNA, 25 bp, Homo sapien
ggggcttttagcactttgcctatca

SEQ ID NO: 3260916 - DNA, 25 bp, Homo sapien
gcttttagcactttgcctatcatat

SEQ ID NO: 3260917 - DNA, 25 bp, Homo sapien
ttaataggggcttttagcactttgc

SEQ ID NO: 3260918 - DNA, 25 bp, Homo sapien
ggcgcacatcttattgaagtcagca

SEQ ID NO: 3260919 - DNA, 25 bp, Homo sapien
gaagtcagcatctactgcaattgtg

SEQ ID NO: 3260920 - DNA, 25 bp, Homo sapien
tacttgacacagtagtcatcctggg

SEQ ID NO: 3260921 - DNA, 25 bp, Homo sapien
tgtggagtattatgccgtaaggacc

SEQ ID NO: 3260922 - DNA, 25 bp, Homo sapien
tctgagaccatgcaagtcttaaggt

SEQ ID NO: 3260923 - DNA, 25 bp, Homo sapien
tccgcatccagtgttgctaccaaga

SEQ ID NO: 3260924 - DNA, 25 bp, Homo sapien
gtacaaaattctgcgttggaaatca

SEQ ID NO: 3260925 - DNA, 25 bp, Homo sapien
tattttagccccactcttgattgga

SEQ ID NO: 3260926 - DNA, 25 bp, Homo sapien
actcatttattagatgttgcatctt

SEQ ID NO: 3260927 - DNA, 25 bp, Homo sapien
agatgttgcatcttattcaggttta

SEQ ID NO: 3260928 - DNA, 25 bp, Homo sapien
caagttattttctaatacatctact

SEQ ID NO: 3260929 - DNA, 25 bp, Homo sapien
aaatatcctaacaatgtgctttggt

SEQ ID NO: 3260930 - DNA, 25 bp, Homo sapien
taacaaataatcgagggtcaagctg

SEQ ID NO: 3260931 - DNA, 25 bp, Homo sapien
gatccttggctatctgtgtacagtg

SEQ ID NO: 3260932 - DNA, 25 bp, Homo sapien
ggagcaggccttgtggactctcagt

SEQ ID NO: 3260933 - DNA, 25 bp, Homo sapien
tcctgatcctatttgatggaagcag

SEQ ID NO: 3260934 - DNA, 25 bp, Homo sapien
caaactacctgctgttgagacagca

SEQ ID NO: 3260935 - DNA, 25 bp, Homo sapien
acaaacccaaactacctgctgttga

SEQ ID NO: 3260936 - DNA, 25 bp, Homo sapien
tctcacaacgacaacaaaccacaaa

SEQ ID NO: 3260937 - DNA, 25 bp, Homo sapien
tgagtctccatctcacaacgacaac

SEQ ID NO: 3260938 - DNA, 25 bp, Homo sapien
tggtccaaagctttcaagccatggg

SEQ ID NO: 3260939 - DNA, 25 bp, Homo sapien
aaagaaacgtgtcccaagtaggatg

SEQ ID NO: 3260940 - DNA, 25 bp, Homo sapien
cacatactggaaagagtcaagacag

SEQ ID NO: 3260941 - DNA, 25 bp, Homo sapien
agccatgggagtctacttaagtacc

SEQ ID NO: 3260942 - DNA, 25 bp, Homo sapien
ccagagctcattgagaatagctggt

SEQ ID NO: 3260943 - DNA, 25 bp, Homo sapien
aagatgggaagccagcaagtgtcag

SEQ ID NO: 3260944 - DNA, 25 bp, Homo sapien
gaccagcctgagtgaaactgcctct

SEQ ID NO: 3260945 - DNA, 25 bp, Homo sapien
ttgagaatagctggtcatagctctc

SEQ ID NO: 3260946 - DNA, 25 bp, Homo sapien
gtcaaccaggaccacacacagattt

SEQ ID NO: 3260947 - DNA, 25 bp, Homo sapien
gacaagacaactaaggctcagcaga

SEQ ID NO: 3260948 - DNA, 25 bp, Homo sapien
aattagaagggttcaatcccagcac

SEQ ID NO: 3260949 - DNA, 25 bp, Homo sapien
gattccctttagatgcccagtcaac

SEQ ID NO: 3260950 - DNA, 25 bp, Homo sapien
tactccaggaaatgctatacagatt

SEQ ID NO: 3260951 - DNA, 25 bp, Homo sapien
cccaagggatgatcttataggctga

SEQ ID NO: 3260952 - DNA, 25 bp, Homo sapien
cattccctacagaacaggtgtttgt

SEQ ID NO: 3260953 - DNA, 25 bp, Homo sapien
ttgacaaaagtctgagtaccaagat

SEQ ID NO: 3260954 - DNA, 25 bp, Homo sapien
ggaaagaaattcatagccctgccat

SEQ ID NO: 3260955 - DNA, 25 bp, Homo sapien
taggcacatctatataaaagctggg

SEQ ID NO: 3260956 - DNA, 25 bp, Homo sapien
aaagagtgtcatatgtaggcacatc

SEQ ID NO: 3260957 - DNA, 25 bp, Homo sapien
caatggctgttctaaagtctggata

SEQ ID NO: 3260958 - DNA, 25 bp, Homo sapien
tacaggcgtgcactgctgcgcccgg

SEQ ID NO: 3260959 - DNA, 25 bp, Homo sapien
ggcgtgcactgctgcgcccggctaa

SEQ ID NO: 3260960 - DNA, 25 bp, Homo sapien
gattacaggcgtgcactgctgcgcc

SEQ ID NO: 3260961 - DNA, 25 bp, Homo sapien
aggcgtgcactgctgcgcccggcta

SEQ ID NO: 3260962 - DNA, 25 bp, Homo sapien
caggtgtgagccaccatgcctgacc

SEQ ID NO: 3260963 - DNA, 25 bp, Homo sapien
tcaaacttctgacttcagcagatcc

SEQ ID NO: 3260964 - DNA, 25 bp, Homo sapien
aaacttctgacttcagcagatccac

SEQ ID NO: 3260965 - DNA, 25 bp, Homo sapien
tctcaaacttctgacttcagcagat

SEQ ID NO: 3260966 - DNA, 25 bp, Homo sapien
tttgactgagaaggcattagtgggc

SEQ ID NO: 3260967 - DNA, 25 bp, Homo sapien
ttgccagggcataagagagtttgac

SEQ ID NO: 3260968 - DNA, 25 bp, Homo sapien
cacagggtttgtcaaagggtatcct

SEQ ID NO: 3260969 - DNA, 25 bp, Homo sapien
tcagagatatcagagcaaatggtag

SEQ ID NO: 3260970 - DNA, 25 bp, Homo sapien
gatctctagagagccggctgggact

SEQ ID NO: 3260971 - DNA, 25 bp, Homo sapien
cacaatgggaacaatgggagagtct

SEQ ID NO: 3260972 - DNA, 25 bp, Homo sapien
agttgggcaccatagagtcctcttc

SEQ ID NO: 3260973 - DNA, 25 bp, Homo sapien
tctcaagaggcgataagttgggcac

SEQ ID NO: 3260974 - DNA, 25 bp, Homo sapien
cactgtgccgttcttcaagattatg

SEQ ID NO: 3260975 - DNA, 25 bp, Homo sapien
taatttgtctttcagtccgttacac

SEQ ID NO: 3260976 - DNA, 25 bp, Homo sapien
gaacactgactaacactggcaaata

SEQ ID NO: 3260977 - DNA, 25 bp, Homo sapien
cacataaagtatgcttgtggcccat

SEQ ID NO: 3260978 - DNA, 25 bp, Homo sapien
tcagtagttgtcttgcttgtccgct

SEQ ID NO: 3260979 - DNA, 25 bp, Homo sapien
tcctggctacccaagaatagaaggg

SEQ ID NO: 3260980 - DNA, 25 bp, Homo sapien
tagtcccaactggtagtgatactgt

SEQ ID NO: 3260981 - DNA, 25 bp, Homo sapien
taaggatccgatgctttccataggt

SEQ ID NO: 3260982 - DNA, 25 bp, Homo sapien
ctagagacatgatattaaagcctga

SEQ ID NO: 3260983 - DNA, 25 bp, Homo sapien
aagcactggataacattattgccta

SEQ ID NO: 3260984 - DNA, 25 bp, Homo sapien
tctctatctcacagacttaggccaa

SEQ ID NO: 3260985 - DNA, 25 bp, Homo sapien
gaacaaatgctgagcaagaagtctt

SEQ ID NO: 3260986 - DNA, 25 bp, Homo sapien
aaactccaaatagagagctataaaa

SEQ ID NO: 3260987 - DNA, 25 bp, Homo sapien
ctgggccagtttgtatgcagtttta

SEQ ID NO: 3260988 - DNA, 25 bp, Homo sapien
ggtaatagctcttacaatcacaata

SEQ ID NO: 3260989 - DNA, 25 bp, Homo sapien
aaaagctgatcccttatgccccaaa

SEQ ID NO: 3260990 - DNA, 25 bp, Homo sapien
gtgatcctatcaccaattctatata

SEQ ID NO: 3260991 - DNA, 25 bp, Homo sapien
ttcagaggtgcttgttggaattagt

SEQ ID NO: 3260992 - DNA, 25 bp, Homo sapien
tcagaggtgcttgttggaattagtt

SEQ ID NO: 3260993 - DNA, 25 bp, Homo sapien
ggacctcagaagttgtgatcctatc

SEQ ID NO: 3260994 - DNA, 25 bp, Homo sapien
agccattcatctagtaagtcacggg

SEQ ID NO: 3260995 - DNA, 25 bp, Homo sapien
gggccagtgtttcaactcaggcact

SEQ ID NO: 3260996 - DNA, 25 bp, Homo sapien
tgttagttcctgaccaccatgtatt

SEQ ID NO: 3260997 - DNA, 25 bp, Homo sapien
ttaagttacgtgatcaaagccattc

SEQ ID NO: 3260998 - DNA, 25 bp, Homo sapien
ggactgaactaaagataccaaggac

SEQ ID NO: 3260999 - DNA, 25 bp, Homo sapien
ggtaggattagcataagaacagaca

SEQ ID NO: 3261000 - DNA, 25 bp, Homo sapien
aaggttggcacataaactaagggtg

SEQ ID NO: 3261001 - DNA, 25 bp, Homo sapien
taatgacatgtataagggaggattc

SEQ ID NO: 3261002 - DNA, 25 bp, Homo sapien
ttcctatcgctggagaagcggactg

SEQ ID NO: 3261003 - DNA, 25 bp, Homo sapien
gtatatacagcaacatgggtggcct

SEQ ID NO: 3261004 - DNA, 25 bp, Homo sapien
ggctttcacacactcctagcacagt

SEQ ID NO: 3261005 - DNA, 25 bp, Homo sapien
cattatcgaatacactgagttgtgc

SEQ ID NO: 3261006 - DNA, 25 bp, Homo sapien
cattctttgtcgtggaccgtaagtc

SEQ ID NO: 3261007 - DNA, 25 bp, Homo sapien
tgcacctgtgagattactaattggc

SEQ ID NO: 3261008 - DNA, 25 bp, Homo sapien
tagttaggctgacctctggcggcca

SEQ ID NO: 3261009 - DNA, 25 bp, Homo sapien
tcacttcaaccagattgcacctgtg

SEQ ID NO: 3261010 - DNA, 25 bp, Homo sapien
cctacagggtttgtgagcagtaaac

SEQ ID NO: 3261011 - DNA, 25 bp, Homo sapien
gaaccacagcaatattgattgaaaa

SEQ ID NO: 3261012 - DNA, 25 bp, Homo sapien
taagtgcaagttactattatgaaca

SEQ ID NO: 3261013 - DNA, 25 bp, Homo sapien
gaagatcaaagttatcctacagggt

SEQ ID NO: 3261014 - DNA, 25 bp, Homo sapien
aatatgtcattaagatatagaaagc

SEQ ID NO: 3261015 - DNA, 25 bp, Homo sapien
tgtcattaagatatagaaagctgca

SEQ ID NO: 3261016 - DNA, 25 bp, Homo sapien
aaatatgtcattaagatatagaaag

SEQ ID NO: 3261017 - DNA, 25 bp, Homo sapien
tatgtcattaagatatagaaagctg

SEQ ID NO: 3261018 - DNA, 25 bp, Homo sapien
tcttcggagggcaggtaattcaaaa

SEQ ID NO: 3261019 - DNA, 25 bp, Homo sapien
aaaaggagaaagatgtacaggtggc

SEQ ID NO: 3261020 - DNA, 25 bp, Homo sapien
atcctcctaggttctttggctgggt

SEQ ID NO: 3261021 - DNA, 25 bp, Homo sapien
cttcagctggcagtaggttactgag

SEQ ID NO: 3261022 - DNA, 25 bp, Homo sapien
aacccgtacttaattacatacgcag

SEQ ID NO: 3261023 - DNA, 25 bp, Homo sapien
acgcagaggagtcccaccatggtca

SEQ ID NO: 3261024 - DNA, 25 bp, Homo sapien
tgaatattatacagcatcctacgct

SEQ ID NO: 3261025 - DNA, 25 bp, Homo sapien
catcctacgctactcaagaaatggg

SEQ ID NO: 3261026 - DNA, 25 bp, Homo sapien
aaacggcagcagctaagttagcccg

SEQ ID NO: 3261027 - DNA, 25 bp, Homo sapien
cactgtccttatgcacacttgtaaa

SEQ ID NO: 3261028 - DNA, 25 bp, Homo sapien
tgagttctcccttaatacactgtcc

SEQ ID NO: 3261029 - DNA, 25 bp, Homo sapien
gggactaaggccttcaaaagacagc

SEQ ID NO: 3261030 - DNA, 25 bp, Homo sapien
tttgtcgccgtctctcgaagcggag

SEQ ID NO: 3261031 - DNA, 25 bp, Homo sapien
gcagatctcccgttctcactcttgg

SEQ ID NO: 3261032 - DNA, 25 bp, Homo sapien
cttcggccacaagggaggttgttat

SEQ ID NO: 3261033 - DNA, 25 bp, Homo sapien
gcagcgtcgtctcccttctcagagg

SEQ ID NO: 3261034 - DNA, 25 bp, Homo sapien
aatgactcaatagatgctgtgaaac

SEQ ID NO: 3261035 - DNA, 25 bp, Homo sapien
tcttcaaggctggttacggttctct

SEQ ID NO: 3261036 - DNA, 25 bp, Homo sapien
tatcttagagttgctccatcggttg

SEQ ID NO: 3261037 - DNA, 25 bp, Homo sapien
gaaggaaatatcttagagttgctcc

SEQ ID NO: 3261038 - DNA, 25 bp, Homo sapien
aagataattgtattcatggattact

SEQ ID NO: 3261039 - DNA, 25 bp, Homo sapien
gaatgataattaggcatgatgaaga

SEQ ID NO: 3261040 - DNA, 25 bp, Homo sapien
taggcatgatgaagattaaatcttt

SEQ ID NO: 3261041 - DNA, 25 bp, Homo sapien
ggattacttgtgtaactattgttac

SEQ ID NO: 3261042 - DNA, 25 bp, Homo sapien
aggaaactactcattaagcagttgc

SEQ ID NO: 3261043 - DNA, 25 bp, Homo sapien
tgacagcaaccaatccgcagtctgt

SEQ ID NO: 3261044 - DNA, 25 bp, Homo sapien
tgtagccgaatactccattttatgt

SEQ ID NO: 3261045 - DNA, 25 bp, Homo sapien
tcagtactccgttcctttttgtagc

SEQ ID NO: 3261046 - DNA, 25 bp, Homo sapien
cagtgataactggtaccaagatggc

SEQ ID NO: 3261047 - DNA, 25 bp, Homo sapien
tgctgaagccgactctgaaaggtat

SEQ ID NO: 3261048 - DNA, 25 bp, Homo sapien
gacagtttcagctaggacgaacagg

SEQ ID NO: 3261049 - DNA, 25 bp, Homo sapien
gacgaacaggaggtgtcagactgct

SEQ ID NO: 3261050 - DNA, 25 bp, Homo sapien
tcaacaaagatgaaaccgcctgagg

SEQ ID NO: 3261051 - DNA, 25 bp, Homo sapien
tattattaaccatgaagctgctcgc

SEQ ID NO: 3261052 - DNA, 25 bp, Homo sapien
gaaaggagcttatcaatcaccagtg

SEQ ID NO: 3261053 - DNA, 25 bp, Homo sapien
tgacacttggcctgacttacgaaac

SEQ ID NO: 3261054 - DNA, 25 bp, Homo sapien
ataaagatagtgcaagaagaactgc

SEQ ID NO: 3261055 - DNA, 25 bp, Homo sapien
tacaaaataaagatagtgcaagaag

SEQ ID NO: 3261056 - DNA, 25 bp, Homo sapien
acaaaataaagatagtgcaagaaga

SEQ ID NO: 3261057 - DNA, 25 bp, Homo sapien
agattttggttatgaactgtacagc

SEQ ID NO: 3261058 - DNA, 25 bp, Homo sapien
tcaatgggacgattaaggcacatct

SEQ ID NO: 3261059 - DNA, 25 bp, Homo sapien
gggctcaaagggcaacttgctgtat

SEQ ID NO: 3261060 - DNA, 25 bp, Homo sapien
gctcgttagagatgctgttgtcaaa

SEQ ID NO: 3261061 - DNA, 25 bp, Homo sapien
tcccgcctacttactgaactaaata

SEQ ID NO: 3261062 - DNA, 25 bp, Homo sapien
ctggaagaaaaagtgtaaggcattt

SEQ ID NO: 3261063 - DNA, 25 bp, Homo sapien
tagttgtagtagtgtttggacctct

SEQ ID NO: 3261064 - DNA, 25 bp, Homo sapien
aatacaacagttttctctcccgcct

SEQ ID NO: 3261065 - DNA, 25 bp, Homo sapien
tcatcagaggagcatgcggcatcca

SEQ ID NO: 3261066 - DNA, 25 bp, Homo sapien
aggaattaaacttatggccagctca

SEQ ID NO: 3261067 - DNA, 25 bp, Homo sapien
ggtgtcttattccacaagttcatga

SEQ ID NO: 3261068 - DNA, 25 bp, Homo sapien
tgttcctaaatgttcccacataggg

SEQ ID NO: 3261069 - DNA, 25 bp, Homo sapien
gaaaaaatggtagttaggagagctg

SEQ ID NO: 3261070 - DNA, 25 bp, Homo sapien
ggagagctgaactaagaattttgaa

SEQ ID NO: 3261071 - DNA, 25 bp, Homo sapien
atgacaagaaaactgttactgccca

SEQ ID NO: 3261072 - DNA, 25 bp, Homo sapien
caagaaaactgttactgcccaggaa

SEQ ID NO: 3261073 - DNA, 25 bp, Homo sapien
tcagatagagaaagcaggtctggag

SEQ ID NO: 3261074 - DNA, 25 bp, Homo sapien
cagatagagaaagcaggtctggagg

SEQ ID NO: 3261075 - DNA, 25 bp, Homo sapien
cagaatcaaatcttaacagttgtac

SEQ ID NO: 3261076 - DNA, 25 bp, Homo sapien
taacagttgtacttaaagtaatcat

SEQ ID NO: 3261077 - DNA, 25 bp, Homo sapien
tttaacagaatcaaatcttaacagt

SEQ ID NO: 3261078 - DNA, 25 bp, Homo sapien
caaatcttaacagttgtacttaaag

SEQ ID NO: 3261079 - DNA, 25 bp, Homo sapien
gttcaaaatatgtgttaaaatgctc

SEQ ID NO: 3261080 - DNA, 25 bp, Homo sapien
gagtatgtatggttagtcttggttt

SEQ ID NO: 3261081 - DNA, 25 bp, Homo sapien
gtgttcaaaatatgtgttaaaatgc

SEQ ID NO: 3261082 - DNA, 25 bp, Homo sapien
agcaagatcagaggagtatgtatgg

SEQ ID NO: 3261083 - DNA, 25 bp, Homo sapien
tagttaaaaatcagccatcagttac

SEQ ID NO: 3261084 - DNA, 25 bp, Homo sapien
taaaaatcagccatcagttacaaac

SEQ ID NO: 3261085 - DNA, 25 bp, Homo sapien
cttagttaaaaatcagccatcagtt

SEQ ID NO: 3261086 - DNA, 25 bp, Homo sapien
agttaaaaatcagccatcagttaca

SEQ ID NO: 3261087 - DNA, 25 bp, Homo sapien
ttactcagaggtgtccagagtcagc

SEQ ID NO: 3261088 - DNA, 25 bp, Homo sapien
aacagtcgcactccatttttaggcc

SEQ ID NO: 3261089 - DNA, 25 bp, Homo sapien
gatatacacctgctttgggaactca

SEQ ID NO: 3261090 - DNA, 25 bp, Homo sapien
gactattactaaatctaagggccca

SEQ ID NO: 3261091 - DNA, 25 bp, Homo sapien
gctggaaatggctacactggcaact

SEQ ID NO: 3261092 - DNA, 25 bp, Homo sapien
tggacaagcttgtagggtccctgag

SEQ ID NO: 3261093 - DNA, 25 bp, Homo sapien
taactgtaacagcatgatatgagga

SEQ ID NO: 3261094 - DNA, 25 bp, Homo sapien
ggcaccaacatctggtcagtataac

SEQ ID NO: 3261095 - DNA, 25 bp, Homo sapien
taatattgccggatgctaccacaga

SEQ ID NO: 3261096 - DNA, 25 bp, Homo sapien
tgttccatggttgtgcagctttccc

SEQ ID NO: 3261097 - DNA, 25 bp, Homo sapien
tattcaaagccagaccccaagatct

SEQ ID NO: 3261098 - DNA, 25 bp, Homo sapien
gattttcacttttgccggtctacca

SEQ ID NO: 3261099 - DNA, 25 bp, Homo sapien
ctcattttctcaggggaagttgttt

SEQ ID NO: 3261100 - DNA, 25 bp, Homo sapien
gcagtgactgtaatgcataatttgg

SEQ ID NO: 3261101 - DNA, 25 bp, Homo sapien
aagacaagttagtttctgaactatg

SEQ ID NO: 3261102 - DNA, 25 bp, Homo sapien
gactgtaatgcataatttggtgaaa

SEQ ID NO: 3261103 - DNA, 25 bp, Homo sapien
caaaagaggactacgaaaggctgat

SEQ ID NO: 3261104 - DNA, 25 bp, Homo sapien
taaagactgccttctaaacatgggt

SEQ ID NO: 3261105 - DNA, 25 bp, Homo sapien
gaatcagaggagttgcgcattgcaa

SEQ ID NO: 3261106 - DNA, 25 bp, Homo sapien
tgagggacttcgagatctacaggca

SEQ ID NO: 3261107 - DNA, 25 bp, Homo sapien
agaaccgggcttgcttatcgaccaa

SEQ ID NO: 3261108 - DNA, 25 bp, Homo sapien
tctttcctaagattaagctgcaggc

SEQ ID NO: 3261109 - DNA, 25 bp, Homo sapien
taaaagctttccataatcacaagga

SEQ ID NO: 3261110 - DNA, 25 bp, Homo sapien
gaaaatggcccactacagaaactaa

SEQ ID NO: 3261111 - DNA, 25 bp, Homo sapien
taatgcaagttctggccctcacaaa

SEQ ID NO: 3261112 - DNA, 25 bp, Homo sapien
agaggattcataccctagtgtgcag

SEQ ID NO: 3261113 - DNA, 25 bp, Homo sapien
caatagtaggagtgtgtcacaatcc

SEQ ID NO: 3261114 - DNA, 25 bp, Homo sapien
tgagcatttgtaattcccacgtgtg

SEQ ID NO: 3261115 - DNA, 25 bp, Homo sapien
aatcgtagtttcttcttcggaggag

SEQ ID NO: 3261116 - DNA, 25 bp, Homo sapien
catgatcatattgccgatagcggcc

SEQ ID NO: 3261117 - DNA, 25 bp, Homo sapien
gaggtccccatgtagaaagtaagag

SEQ ID NO: 3261118 - DNA, 25 bp, Homo sapien
gacagaacttactcgtagctgagga

SEQ ID NO: 3261119 - DNA, 25 bp, Homo sapien
gatggatggaatgaaacgatggtaa

SEQ ID NO: 3261120 - DNA, 25 bp, Homo sapien
ggatggatggaatgaaacgatggta

SEQ ID NO: 3261121 - DNA, 25 bp, Homo sapien
atggatggaatgaaacgatggtaaa

SEQ ID NO: 3261122 - DNA, 25 bp, Homo sapien
gtagagagatctaacactccatccc

SEQ ID NO: 3261123 - DNA, 25 bp, Homo sapien
tcagaagaaggatcacatatggatg

SEQ ID NO: 3261124 - DNA, 25 bp, Homo sapien
aagaaggatcacatatggatgactc

SEQ ID NO: 3261125 - DNA, 25 bp, Homo sapien
tttctttgtagagagatctaacact

SEQ ID NO: 3261126 - DNA, 25 bp, Homo sapien
acgggtttaggaacaggatatgact

SEQ ID NO: 3261127 - DNA, 25 bp, Homo sapien
cgggtttaggaacaggatatgactg

SEQ ID NO: 3261128 - DNA, 25 bp, Homo sapien
gtctatataacactaccggaattca

SEQ ID NO: 3261129 - DNA, 25 bp, Homo sapien
catgcaaatttctgatacaggatct

SEQ ID NO: 3261130 - DNA, 25 bp, Homo sapien
tcatttactggttggagacgggtca

SEQ ID NO: 3261131 - DNA, 25 bp, Homo sapien
taagccaatctaatctttgaacaag

SEQ ID NO: 3261132 - DNA, 25 bp, Homo sapien
cacctgggaacctttaacattgact

SEQ ID NO: 3261133 - DNA, 25 bp, Homo sapien
tattttcatacttgaccacctggga

SEQ ID NO: 3261134 - DNA, 25 bp, Homo sapien
gcttccttgcctgctagcacaagat

SEQ ID NO: 3261135 - DNA, 25 bp, Homo sapien
caaattcgtctttgggcttccttgc

SEQ ID NO: 3261136 - DNA, 25 bp, Homo sapien
caataacaagatctgttgagagcac

SEQ ID NO: 3261137 - DNA, 25 bp, Homo sapien
ctattgcccttggaatgtatttcac

SEQ ID NO: 3261138 - DNA, 25 bp, Homo sapien
gaatgtatagtcaaaatgctgggta

SEQ ID NO: 3261139 - DNA, 25 bp, Homo sapien
cttcaagtttttgggattgctctac

SEQ ID NO: 3261140 - DNA, 25 bp, Homo sapien
aatgtaagatactgtcaatgcctcc

SEQ ID NO: 3261141 - DNA, 25 bp, Homo sapien
caattaatgtcccagtgaatcaccc

SEQ ID NO: 3261142 - DNA, 25 bp, Homo sapien
aactaaccagggcactactgatgga

SEQ ID NO: 3261143 - DNA, 25 bp, Homo sapien
taaaggcttgattccctgaaatggg

SEQ ID NO: 3261144 - DNA, 25 bp, Homo sapien
ttatggaggtcttcctcaacgatct

SEQ ID NO: 3261145 - DNA, 25 bp, Homo sapien
ttagatcttcatatggaggacttcc

SEQ ID NO: 3261146 - DNA, 25 bp, Homo sapien
tctgacttaaatgccctgaccttag

SEQ ID NO: 3261147 - DNA, 25 bp, Homo sapien
cctgccctgagttttgatattgtgt

SEQ ID NO: 3261148 - DNA, 25 bp, Homo sapien
gaaggtagcttttttgtcagtgttc

SEQ ID NO: 3261149 - DNA, 25 bp, Homo sapien
gagagacacaagatgtggctggata

SEQ ID NO: 3261150 - DNA, 25 bp, Homo sapien
tggaggaggctttcctaagaaacta

SEQ ID NO: 3261151 - DNA, 25 bp, Homo sapien
tgtacatccaatatgggaggtgtgg

SEQ ID NO: 3261152 - DNA, 25 bp, Homo sapien
ctagatctggaattttaaagtatca

SEQ ID NO: 3261153 - DNA, 25 bp, Homo sapien
ctggaattttaaagtatcacctgtt

SEQ ID NO: 3261154 - DNA, 25 bp, Homo sapien
gatctggaattttaaagtatcacct

SEQ ID NO: 3261155 - DNA, 25 bp, Homo sapien
tttaaagtatcacctgtttcttcta

SEQ ID NO: 3261156 - DNA, 25 bp, Homo sapien
ctgcagtcagaggaggttagattag

SEQ ID NO: 3261157 - DNA, 25 bp, Homo sapien
cagtcagaggaggttagattagaag

SEQ ID NO: 3261158 - DNA, 25 bp, Homo sapien
aggaggttagattagaagggacaca

SEQ ID NO: 3261159 - DNA, 25 bp, Homo sapien
gttagattagaagggacacataacc

SEQ ID NO: 3261160 - DNA, 25 bp, Homo sapien
cgtgactctcttacacatagtaaca

SEQ ID NO: 3261161 - DNA, 25 bp, Homo sapien
caaaagctcggcatagaaaaacaag

SEQ ID NO: 3261162 - DNA, 25 bp, Homo sapien
ttttcaggtcgactaaaacatggca

SEQ ID NO: 3261163 - DNA, 25 bp, Homo sapien
tagacaatttcgttagcggacatag

SEQ ID NO: 3261164 - DNA, 25 bp, Homo sapien
ctgagacttgtctttgcctattttt

SEQ ID NO: 3261165 - DNA, 25 bp, Homo sapien
ctgtagttttgttagctgaatgctt

SEQ ID NO: 3261166 - DNA, 25 bp, Homo sapien
tcagttgtctgtctcactggctgta

SEQ ID NO: 3261167 - DNA, 25 bp, Homo sapien
tcttatcagttgtctgtctcactgg

SEQ ID NO: 3261168 - DNA, 25 bp, Homo sapien
tccataccatggcagaatgctttca

SEQ ID NO: 3261169 - DNA, 25 bp, Homo sapien
gacactgctatcactagtatgagct

SEQ ID NO: 3261170 - DNA, 25 bp, Homo sapien
cacatactgtgttagtgggtacata

SEQ ID NO: 3261171 - DNA, 25 bp, Homo sapien
ctggtagctttctatgaccctaaga

SEQ ID NO: 3261172 - DNA, 25 bp, Homo sapien
ttcgattcacagtgaggtctaaggg

SEQ ID NO: 3261173 - DNA, 25 bp, Homo sapien
gcattcgattcacagtgaggtctaa

SEQ ID NO: 3261174 - DNA, 25 bp, Homo sapien
ctgaagggagttttctgcttgattc

SEQ ID NO: 3261175 - DNA, 25 bp, Homo sapien
cttcctgaagggagttttctgcttg

SEQ ID NO: 3261176 - DNA, 25 bp, Homo sapien
tttacatactatacttggtccaatt

SEQ ID NO: 3261177 - DNA, 25 bp, Homo sapien
catactatacttggtccaattgaac

SEQ ID NO: 3261178 - DNA, 25 bp, Homo sapien
gaaatgtactcaatcgcaaattgac

SEQ ID NO: 3261179 - DNA, 25 bp, Homo sapien
tactcaatcgcaaattgacgtatca

SEQ ID NO: 3261180 - DNA, 25 bp, Homo sapien
attaattcctgagcaactaggggaa

SEQ ID NO: 3261181 - DNA, 25 bp, Homo sapien
gcaactaggggaatgttaggatcac

SEQ ID NO: 3261182 - DNA, 25 bp, Homo sapien
caactaggggaatgttaggatcaca

SEQ ID NO: 3261183 - DNA, 25 bp, Homo sapien
ttaattcctgagcaactaggggaat

SEQ ID NO: 3261184 - DNA, 25 bp, Homo sapien
tcaggtagatcagtgttatatgaat

SEQ ID NO: 3261185 - DNA, 25 bp, Homo sapien
cagtgttatatgaataggctttctc

SEQ ID NO: 3261186 - DNA, 25 bp, Homo sapien
gtagatcagtgttatatgaataggc

SEQ ID NO: 3261187 - DNA, 25 bp, Homo sapien
gatcagtgttatatgaataggcttt

SEQ ID NO: 3261188 - DNA, 25 bp, Homo sapien
cagactgttaaacaaagagacagca

SEQ ID NO: 3261189 - DNA, 25 bp, Homo sapien
gtctatacagaaagcaaatgatgcc

SEQ ID NO: 3261190 - DNA, 25 bp, Homo sapien
taagaaatgcttattgagctaagat

SEQ ID NO: 3261191 - DNA, 25 bp, Homo sapien
gcagcttaatgcagactgttaaaca

SEQ ID NO: 3261192 - DNA, 25 bp, Homo sapien
taagtttagtcaattctccattccc

SEQ ID NO: 3261193 - DNA, 25 bp, Homo sapien
aaagaacccttatgctggtatggta

SEQ ID NO: 3261194 - DNA, 25 bp, Homo sapien
cactttgaggtgttatgatgtacta

SEQ ID NO: 3261195 - DNA, 25 bp, Homo sapien
tatattcccaaaccagcaattactg

SEQ ID NO: 3261196 - DNA, 25 bp, Homo sapien
taatgccaaaataacactgctctgg

SEQ ID NO: 3261197 - DNA, 25 bp, Homo sapien
cattgtaatatgcttccactgctag

SEQ ID NO: 3261198 - DNA, 25 bp, Homo sapien
gaaacaagctctagcagccatacta

SEQ ID NO: 3261199 - DNA, 25 bp, Homo sapien
tagatacaactcaacgaaacaagct

SEQ ID NO: 3261200 - DNA, 25 bp, Homo sapien
cttagtcttaatttagtttctcctg

SEQ ID NO: 3261201 - DNA, 25 bp, Homo sapien
tgtcttagtcttaatttagtttctc

SEQ ID NO: 3261202 - DNA, 25 bp, Homo sapien
gaactaacacatcttcaacctcaca

SEQ ID NO: 3261203 - DNA, 25 bp, Homo sapien
agaactaacacatcttcaacctcac

SEQ ID NO: 3261204 - DNA, 25 bp, Homo sapien
tacactatatggtatatatgcatat

SEQ ID NO: 3261205 - DNA, 25 bp, Homo sapien
cacatatacaggtagatatatatgt

SEQ ID NO: 3261206 - DNA, 25 bp, Homo sapien
aggacactgtccttaaggtatgaca

SEQ ID NO: 3261207 - DNA, 25 bp, Homo sapien
tatgacattctagggacagtataaa

SEQ ID NO: 3261208 - DNA, 25 bp, Homo sapien
cattttgtcttcagtttcaacaccc

SEQ ID NO: 3261209 - DNA, 25 bp, Homo sapien
tcattttgtcttcagtttcaacacc

SEQ ID NO: 3261210 - DNA, 25 bp, Homo sapien
tcttgtgggttgtatctggaagttg

SEQ ID NO: 3261211 - DNA, 25 bp, Homo sapien
tcctttgaaattcttgtgggttgta

SEQ ID NO: 3261212 - DNA, 25 bp, Homo sapien
tgaaattcttgtgggttgtatctgg

SEQ ID NO: 3261213 - DNA, 25 bp, Homo sapien
tgggttgtatctggaagttgataac

SEQ ID NO: 3261214 - DNA, 25 bp, Homo sapien
caaccattggtaggagacctcttgg

SEQ ID NO: 3261215 - DNA, 25 bp, Homo sapien
tagcaagatgatcaacatgcacatg

SEQ ID NO: 3261216 - DNA, 25 bp, Homo sapien
tccaggatccctaaaaatgattgca

SEQ ID NO: 3261217 - DNA, 25 bp, Homo sapien
ccagaaatggagaggtcactaaata

SEQ ID NO: 3261218 - DNA, 25 bp, Homo sapien
taaacaaaagactcttgtatcacag

SEQ ID NO: 3261219 - DNA, 25 bp, Homo sapien
tggccttgaacaaatgggctgaagc

SEQ ID NO: 3261220 - DNA, 25 bp, Homo sapien
gtaaaatagggtcaacaagtagatg

SEQ ID NO: 3261221 - DNA, 25 bp, Homo sapien
tgtatcacagtcaagtactatttta

SEQ ID NO: 3261222 - DNA, 25 bp, Homo sapien
aaagagtgaagtagagagactgaca

SEQ ID NO: 3261223 - DNA, 25 bp, Homo sapien
tacatctctattgcaaattttaaat

SEQ ID NO: 3261224 - DNA, 25 bp, Homo sapien
ataaagagtgaagtagagagactga

SEQ ID NO: 3261225 - DNA, 25 bp, Homo sapien
agagtgaagtagagagactgacata

SEQ ID NO: 3261226 - DNA, 25 bp, Homo sapien
ttctttcgaaagagtgcatttaggt

SEQ ID NO: 3261227 - DNA, 25 bp, Homo sapien
ttaggtaattttctgcttggcattc

SEQ ID NO: 3261228 - DNA, 25 bp, Homo sapien
ttcaatcttatcagtgttggactgg

SEQ ID NO: 3261229 - DNA, 25 bp, Homo sapien
tgatagctcctctgttggtgttgac

SEQ ID NO: 3261230 - DNA, 25 bp, Homo sapien
agaaaacaacaacatacagaattat

SEQ ID NO: 3261231 - DNA, 25 bp, Homo sapien
taattcaaacatggaattccattaa

SEQ ID NO: 3261232 - DNA, 25 bp, Homo sapien
gaaaacaacaacatacagaattatt

SEQ ID NO: 3261233 - DNA, 25 bp, Homo sapien
ttttaattcaaacatggaattccat

SEQ ID NO: 3261234 - DNA, 25 bp, Homo sapien
catccatagaccagtcagtcagctc

SEQ ID NO: 3261235 - DNA, 25 bp, Homo sapien
tcatccatagaccagtcagtcagct

SEQ ID NO: 3261236 - DNA, 25 bp, Homo sapien
gcttcaatgggcaataaaggcactt

SEQ ID NO: 3261237 - DNA, 25 bp, Homo sapien
gccaggagcccaagggcttcaatgg

SEQ ID NO: 3261238 - DNA, 25 bp, Homo sapien
cactgaccagttgctacgaatacaa

SEQ ID NO: 3261239 - DNA, 25 bp, Homo sapien
aaaggcacttttgagcactgaccag

SEQ ID NO: 3261240 - DNA, 25 bp, Homo sapien
cttcgtagccgtggtccataaagcc

SEQ ID NO: 3261241 - DNA, 25 bp, Homo sapien
tgaggtctcttcgtagccgtggtcc

SEQ ID NO: 3261242 - DNA, 25 bp, Homo sapien
ggtctcttcgtagccgtggtccata

SEQ ID NO: 3261243 - DNA, 25 bp, Homo sapien
aactgaggtctcttcgtagccgtgg

SEQ ID NO: 3261244 - DNA, 25 bp, Homo sapien
gattgactcagggtacagatctact

SEQ ID NO: 3261245 - DNA, 25 bp, Homo sapien
tgaagttccttgattgactcagggt

SEQ ID NO: 3261246 - DNA, 25 bp, Homo sapien
agatctactagagggctggtctgtg

SEQ ID NO: 3261247 - DNA, 25 bp, Homo sapien
tttcttgtcccgctctgatcatcac

SEQ ID NO: 3261248 - DNA, 25 bp, Homo sapien
caaggatattatcctggagttctct

SEQ ID NO: 3261249 - DNA, 25 bp, Homo sapien
tcaaggatattatcctggagttctc

SEQ ID NO: 3261250 - DNA, 25 bp, Homo sapien
cttcaaggatattatcctggagttc

SEQ ID NO: 3261251 - DNA, 25 bp, Homo sapien
aaggatattatcctggagttctctt

SEQ ID NO: 3261252 - DNA, 25 bp, Homo sapien
ggtctgatagtaacaaataccctca

SEQ ID NO: 3261253 - DNA, 25 bp, Homo sapien
cagattgctactctctacttttcaa

SEQ ID NO: 3261254 - DNA, 25 bp, Homo sapien
tgtattggctagtaatgatctttcc

SEQ ID NO: 3261255 - DNA, 25 bp, Homo sapien
tgacatttcgattgcaaccctggct

SEQ ID NO: 3261256 - DNA, 25 bp, Homo sapien
gaaactcagcattaaagaaaccgga

SEQ ID NO: 3261257 - DNA, 25 bp, Homo sapien
tacaagatatatggttcccctgttg

SEQ ID NO: 3261258 - DNA, 25 bp, Homo sapien
tgttgctattacaaggtcctggtct

SEQ ID NO: 3261259 - DNA, 25 bp, Homo sapien
caataaaagagaattcaccggccca

SEQ ID NO: 3261260 - DNA, 25 bp, Homo sapien
gctaaataatctagatgtatagaga

SEQ ID NO: 3261261 - DNA, 25 bp, Homo sapien
tgtagctaaataatctagatgtata

SEQ ID NO: 3261262 - DNA, 25 bp, Homo sapien
caaaatctggggttaatagcatgct

SEQ ID NO: 3261263 - DNA, 25 bp, Homo sapien
gaggtttgtttagcaaaataatcag

SEQ ID NO: 3261264 - DNA, 25 bp, Homo sapien
tactgcctttgtattaccctctgga

SEQ ID NO: 3261265 - DNA, 25 bp, Homo sapien
taagaaacaactaacccatgacgct

SEQ ID NO: 3261266 - DNA, 25 bp, Homo sapien
tctggatctgtcatagtgattcacc

SEQ ID NO: 3261267 - DNA, 25 bp, Homo sapien
gttagcatacgtagccttccctgat

SEQ ID NO: 3261268 - DNA, 25 bp, Homo sapien
tttcagtaatggctggagtggctcg

SEQ ID NO: 3261269 - DNA, 25 bp, Homo sapien
cctggctagcagtcaaattttgaag

SEQ ID NO: 3261270 - DNA, 25 bp, Homo sapien
cacacctggctagcagtcaaatttt

SEQ ID NO: 3261271 - DNA, 25 bp, Homo sapien
taatggctggagtggctcggacaca

SEQ ID NO: 3261272 - DNA, 25 bp, Homo sapien
ccccagatacaaccctgcaaaaatt

SEQ ID NO: 3261273 - DNA, 25 bp, Homo sapien
gatacaaccctgcaaaaattaacag

SEQ ID NO: 3261274 - DNA, 25 bp, Homo sapien
cagatacaaccctgcaaaaattaac

SEQ ID NO: 3261275 - DNA, 25 bp, Homo sapien
tacaaccctgcaaaaattaacagcc

SEQ ID NO: 3261276 - DNA, 25 bp, Homo sapien
tatgaactctatacagttaggcagg

SEQ ID NO: 3261277 - DNA, 25 bp, Homo sapien
gccatgaatgctagttatatatacc

SEQ ID NO: 3261278 - DNA, 25 bp, Homo sapien
aattttggacctatgtccttggtgc

SEQ ID NO: 3261279 - DNA, 25 bp, Homo sapien
ggtgctctgttatctatcagccatg

SEQ ID NO: 3261280 - DNA, 25 bp, Homo sapien
cctttcggtatcaaaggccttcctg

SEQ ID NO: 3261281 - DNA, 25 bp, Homo sapien
gagcaggagacaagaagcatccaga

SEQ ID NO: 3261282 - DNA, 25 bp, Homo sapien
gagtagataccgacaaaaagcaact

SEQ ID NO: 3261283 - DNA, 25 bp, Homo sapien
gcaacagtgacaagatgagggagaa

SEQ ID NO: 3261284 - DNA, 25 bp, Homo sapien
cggtggcgccaagagtcgagttccc

SEQ ID NO: 3261285 - DNA, 25 bp, Homo sapien
ggcgccaagagtcgagttcccgccg

SEQ ID NO: 3261286 - DNA, 25 bp, Homo sapien
gccaagagtcgagttcccgccggaa

SEQ ID NO: 3261287 - DNA, 25 bp, Homo sapien
caagagtcgagttcccgccggaatc

SEQ ID NO: 3261288 - DNA, 25 bp, Homo sapien
ccgccgcgcaccgagggctccggca

SEQ ID NO: 3261289 - DNA, 25 bp, Homo sapien
cgcaccgagggctccggcactgagc

SEQ ID NO: 3261290 - DNA, 25 bp, Homo sapien
cgccgcgcaccgagggctccggcac

SEQ ID NO: 3261291 - DNA, 25 bp, Homo sapien
gcgcaccgagggctccggcactgag

SEQ ID NO: 3261292 - DNA, 25 bp, Homo sapien
atacgagcagcgcaggcacgaggca

SEQ ID NO: 3261293 - DNA, 25 bp, Homo sapien
atttacatacgagcagcgcaggcac

SEQ ID NO: 3261294 - DNA, 25 bp, Homo sapien
cctcatttacatacgagcagcgcag

SEQ ID NO: 3261295 - DNA, 25 bp, Homo sapien
gtcacgcgccctcatttacatacga

SEQ ID NO: 3261296 - DNA, 25 bp, Homo sapien
ccgcgaaaaccctgagcgggagcga

SEQ ID NO: 3261297 - DNA, 25 bp, Homo sapien
gcgggagcgagagacccggagccca

SEQ ID NO: 3261298 - DNA, 25 bp, Homo sapien
cgccgcccgcgaaaaccctgagcgg

SEQ ID NO: 3261299 - DNA, 25 bp, Homo sapien
gagcgagagacccggagcccagcca

SEQ ID NO: 3261300 - DNA, 25 bp, Homo sapien
cacatagatgtgctggatgcttgtc

SEQ ID NO: 3261301 - DNA, 25 bp, Homo sapien
gagtttggaccatctctggagcaca

SEQ ID NO: 3261302 - DNA, 25 bp, Homo sapien
ctgtggcaactctcataagggcatc

SEQ ID NO: 3261303 - DNA, 25 bp, Homo sapien
caagatgagatgcaagaacactttc

SEQ ID NO: 3261304 - DNA, 25 bp, Homo sapien
tctctagcgatgctctgaggcattc

SEQ ID NO: 3261305 - DNA, 25 bp, Homo sapien
tgaggcattccatgtagtgacttcc

SEQ ID NO: 3261306 - DNA, 25 bp, Homo sapien
cttgcagatggatttcccctttgac

SEQ ID NO: 3261307 - DNA, 25 bp, Homo sapien
gcagatggatttcccctttgacagc

SEQ ID NO: 3261308 - DNA, 25 bp, Homo sapien
gatgcaagtctgcttcgttctccca

SEQ ID NO: 3261309 - DNA, 25 bp, Homo sapien
cgttctcccataggaatctacagct

SEQ ID NO: 3261310 - DNA, 25 bp, Homo sapien
gggaacaagcatagaaaaggagatg

SEQ ID NO: 3261311 - DNA, 25 bp, Homo sapien
tacagcttttgagcctatttcgttg

SEQ ID NO: 3261312 - DNA, 25 bp, Homo sapien
tctggtaaggctttgtctactggag

SEQ ID NO: 3261313 - DNA, 25 bp, Homo sapien
tgtctactggagcttgatcactctt

SEQ ID NO: 3261314 - DNA, 25 bp, Homo sapien
tctactggagcttgatcactctttc

SEQ ID NO: 3261315 - DNA, 25 bp, Homo sapien
ctcagatatctttctggtaaggctt

SEQ ID NO: 3261316 - DNA, 25 bp, Homo sapien
tgaacaatgttatttgcacgctact

SEQ ID NO: 3261317 - DNA, 25 bp, Homo sapien
tccggaccactaataagcgagttta

SEQ ID NO: 3261318 - DNA, 25 bp, Homo sapien
gatgtaacatctggtattcagggag

SEQ ID NO: 3261319 - DNA, 25 bp, Homo sapien
tccaataacattcattaagggacca

SEQ ID NO: 3261320 - DNA, 25 bp, Homo sapien
cacctgcctcagtgactctatactg

SEQ ID NO: 3261321 - DNA, 25 bp, Homo sapien
tgatgcatggttggaagtgacatga

SEQ ID NO: 3261322 - DNA, 25 bp, Homo sapien
tatttatcaatctgggtactaaggt

SEQ ID NO: 3261323 - DNA, 25 bp, Homo sapien
ggttgagctgctcccctagagatgg

SEQ ID NO: 3261324 - DNA, 25 bp, Homo sapien
ataaaccactttgtgcagctccttc

SEQ ID NO: 3261325 - DNA, 25 bp, Homo sapien
tctctgtaggtccagaagatcactg

SEQ ID NO: 3261326 - DNA, 25 bp, Homo sapien
tctgagcatctctgtaggtccagaa

SEQ ID NO: 3261327 - DNA, 25 bp, Homo sapien
taggtccagaagatcactgtccttc

SEQ ID NO: 3261328 - DNA, 25 bp, Homo sapien
gcatctctgtaggtccagaagatca

SEQ ID NO: 3261329 - DNA, 25 bp, Homo sapien
tacagccatgaccaccaagtcatca

SEQ ID NO: 3261330 - DNA, 25 bp, Homo sapien
catcactatcaacaaacatggacct

SEQ ID NO: 3261331 - DNA, 25 bp, Homo sapien
ttaaatcaatggcttatcattgtgt

SEQ ID NO: 3261332 - DNA, 25 bp, Homo sapien
gtgtttttgggtccctacagccatg

SEQ ID NO: 3261333 - DNA, 25 bp, Homo sapien
tctgatggagtaatctaaaggggag

SEQ ID NO: 3261334 - DNA, 25 bp, Homo sapien
ttaagacttattggaccttgaagat

SEQ ID NO: 3261335 - DNA, 25 bp, Homo sapien
aagacttattggaccttgaagatgg

SEQ ID NO: 3261336 - DNA, 25 bp, Homo sapien
tggagtaatctaaaggggagggcat

SEQ ID NO: 3261337 - DNA, 25 bp, Homo sapien
agctgagcccttgccttagcaaatg

SEQ ID NO: 3261338 - DNA, 25 bp, Homo sapien
gtagatctctcttaaccgttctcct

SEQ ID NO: 3261339 - DNA, 25 bp, Homo sapien
gtggttgaaatgttccgtagatctc

SEQ ID NO: 3261340 - DNA, 25 bp, Homo sapien
tgagacctttcagctgagcccttgc

SEQ ID NO: 3261341 - DNA, 25 bp, Homo sapien
ctgagataataaagccagcagttgg

SEQ ID NO: 3261342 - DNA, 25 bp, Homo sapien
gataataaagccagcagttggtgac

SEQ ID NO: 3261343 - DNA, 25 bp, Homo sapien
taataaagccagcagttggtgacgc

SEQ ID NO: 3261344 - DNA, 25 bp, Homo sapien
taaagccagcagttggtgacgccat

SEQ ID NO: 3261345 - DNA, 25 bp, Homo sapien
ttattagatttaaaagagcaagcat

SEQ ID NO: 3261346 - DNA, 25 bp, Homo sapien
tgaattgttggtacactataaatct

SEQ ID NO: 3261347 - DNA, 25 bp, Homo sapien
aaacctgttctgagtgaattgttgg

SEQ ID NO: 3261348 - DNA, 25 bp, Homo sapien
cacaacaggtatgaaggcaaatgct

SEQ ID NO: 3261349 - DNA, 25 bp, Homo sapien
actcaggtttgcatgttccttccct

SEQ ID NO: 3261350 - DNA, 25 bp, Homo sapien
tgtatcctctggctttaggacagat

SEQ ID NO: 3261351 - DNA, 25 bp, Homo sapien
gaaggcaccttgctcggcgtattgt

SEQ ID NO: 3261352 - DNA, 25 bp, Homo sapien
gaagtgaactctgcagttggaaggc

SEQ ID NO: 3261353 - DNA, 25 bp, Homo sapien
acagactgcacatgcatgatgatgc

SEQ ID NO: 3261354 - DNA, 25 bp, Homo sapien
gcatatttagcccactcaagttttt

SEQ ID NO: 3261355 - DNA, 25 bp, Homo sapien
acaaagcatatttagcccactcaag

SEQ ID NO: 3261356 - DNA, 25 bp, Homo sapien
tgcacatgcatgatgatgcttaacc

SEQ ID NO: 3261357 - DNA, 25 bp, Homo sapien
ttccagatgcttgattgtggttctt

SEQ ID NO: 3261358 - DNA, 25 bp, Homo sapien
tctttaatataacgagttgccagtt

SEQ ID NO: 3261359 - DNA, 25 bp, Homo sapien
tcacagaaaaccgacatgcactgcc

SEQ ID NO: 3261360 - DNA, 25 bp, Homo sapien
taatataacgagttgccagttcctc

SEQ ID NO: 3261361 - DNA, 25 bp, Homo sapien
aaccttggaggtactgagttagcac

SEQ ID NO: 3261362 - DNA, 25 bp, Homo sapien
gatgctcactcaagccctaggatgc

SEQ ID NO: 3261363 - DNA, 25 bp, Homo sapien
ggtgctttgcaacaaggctcttggc

SEQ ID NO: 3261364 - DNA, 25 bp, Homo sapien
gagttagcacccatcatactggaaa

SEQ ID NO: 3261365 - DNA, 25 bp, Homo sapien
ctggaaggaaaaaacaaatatatgt

SEQ ID NO: 3261366 - DNA, 25 bp, Homo sapien
tggaaggaaaaaacaaatatatgtg

SEQ ID NO: 3261367 - DNA, 25 bp, Homo sapien
tgagcttgaggcaattaggtaaaaa

SEQ ID NO: 3261368 - DNA, 25 bp, Homo sapien
tgatgagcttgaggcaattaggtaa

SEQ ID NO: 3261369 - DNA, 25 bp, Homo sapien
agcttgaggcaattaggtaaaaagt

SEQ ID NO: 3261370 - DNA, 25 bp, Homo sapien
ttgatgagcttgaggcaattaggta

SEQ ID NO: 3261371 - DNA, 25 bp, Homo sapien
ctcatctttctctctgtgcctttct

SEQ ID NO: 3261372 - DNA, 25 bp, Homo sapien
atcccagctcctcatctttctctct

SEQ ID NO: 3261373 - DNA, 25 bp, Homo sapien
aaatcccagctcctcatctttctct

SEQ ID NO: 3261374 - DNA, 25 bp, Homo sapien
tcaaatcccagctcctcatctttct

SEQ ID NO: 3261375 - DNA, 25 bp, Homo sapien
cgtggatgagtcaagcaggagccat

SEQ ID NO: 3261376 - DNA, 25 bp, Homo sapien
ctttctgcttttggagggtgctttg

SEQ ID NO: 3261377 - DNA, 25 bp, Homo sapien
caggccaaggacaaaacgtggatga

SEQ ID NO: 3261378 - DNA, 25 bp, Homo sapien
tcagcagggagcaagccctcttcct

SEQ ID NO: 3261379 - DNA, 25 bp, Homo sapien
aatagtttaggagcaagtgttcttg

SEQ ID NO: 3261380 - DNA, 25 bp, Homo sapien
tagtttaggagcaagtgttcttggg

SEQ ID NO: 3261381 - DNA, 25 bp, Homo sapien
gctgctgcttggcaaacagaaatag

SEQ ID NO: 3261382 - DNA, 25 bp, Homo sapien
tgggtgggtgggttgctggctggct

SEQ ID NO: 3261383 - DNA, 25 bp, Homo sapien
ctctcgacattcagccaatttacat

SEQ ID NO: 3261384 - DNA, 25 bp, Homo sapien
ttcagccaatttacatccaaggaga

SEQ ID NO: 3261385 - DNA, 25 bp, Homo sapien
gatgcataaaggacgcagaaattta

SEQ ID NO: 3261386 - DNA, 25 bp, Homo sapien
agatgtgatgcataaaggacgcaga

SEQ ID NO: 3261387 - DNA, 25 bp, Homo sapien
ttcaatcttggccaacgtgcgtaca

SEQ ID NO: 3261388 - DNA, 25 bp, Homo sapien
gcaccagtctgcctgattctggtca

SEQ ID NO: 3261389 - DNA, 25 bp, Homo sapien
accggcaccagtctgcctgattctg

SEQ ID NO: 3261390 - DNA, 25 bp, Homo sapien
tgcgtacataatttttctctgggct

SEQ ID NO: 3261391 - DNA, 25 bp, Homo sapien
tttctctcctcttcctttcacttcc

SEQ ID NO: 3261392 - DNA, 25 bp, Homo sapien
tcatgtgcttttctctcctcttcct

SEQ ID NO: 3261393 - DNA, 25 bp, Homo sapien
gcttttctctcctcttcctttcact

SEQ ID NO: 3261394 - DNA, 25 bp, Homo sapien
tgcttttctctcctcttcctttcac

SEQ ID NO: 3261395 - DNA, 25 bp, Homo sapien
tggccacacggaccactgtggtctt

SEQ ID NO: 3261396 - DNA, 25 bp, Homo sapien
ccacacggaccactgtggtcttgga

SEQ ID NO: 3261397 - DNA, 25 bp, Homo sapien
ggccacacggaccactgtggtcttg

SEQ ID NO: 3261398 - DNA, 25 bp, Homo sapien
gccacacggaccactgtggtcttgg

SEQ ID NO: 3261399 - DNA, 25 bp, Homo sapien
tatctggtaaccttcaggaattggg

SEQ ID NO: 3261400 - DNA, 25 bp, Homo sapien
gcttggaaaccagcatatctggtaa

SEQ ID NO: 3261401 - DNA, 25 bp, Homo sapien
ggtcctgtgcgccattgacacctag

SEQ ID NO: 3261402 - DNA, 25 bp, Homo sapien
caaacatgcctgctacatggagcag

SEQ ID NO: 3261403 - DNA, 25 bp, Homo sapien
cttaggcaaaaccaggaagaaggca

SEQ ID NO: 3261404 - DNA, 25 bp, Homo sapien
taggcaaaaccaggaagaaggcaaa

SEQ ID NO: 3261405 - DNA, 25 bp, Homo sapien
aggcaaaaccaggaagaaggcaaag

SEQ ID NO: 3261406 - DNA, 25 bp, Homo sapien
caaaaccaggaagaaggcaaaggtg

SEQ ID NO: 3261407 - DNA, 25 bp, Homo sapien
tgtgttgaacttctctcagatgcca

SEQ ID NO: 3261408 - DNA, 25 bp, Homo sapien
cttctctcagatgccacatgtctgt

SEQ ID NO: 3261409 - DNA, 25 bp, Homo sapien
gagagtgactgggttcgaaaatgcc

SEQ ID NO: 3261410 - DNA, 25 bp, Homo sapien
tgccccttagacttggaattgtgtt

SEQ ID NO: 3261411 - DNA, 25 bp, Homo sapien
tttcctgtaagcttccagaaagcta

SEQ ID NO: 3261412 - DNA, 25 bp, Homo sapien
tattactggatgtctgatacagagc

SEQ ID NO: 3261413 - DNA, 25 bp, Homo sapien
acttattactggatgtctgatacag

SEQ ID NO: 3261414 - DNA, 25 bp, Homo sapien
taacttattactggatgtctgatac

SEQ ID NO: 3261415 - DNA, 25 bp, Homo sapien
ggctggaagcaagtgaaaggcgaca

SEQ ID NO: 3261416 - DNA, 25 bp, Homo sapien
ttcctctgtcctggtgcaacaagcc

SEQ ID NO: 3261417 - DNA, 25 bp, Homo sapien
ggattcctctgtcctggtgcaacaa

SEQ ID NO: 3261418 - DNA, 25 bp, Homo sapien
caagtgaaaggcgacaggattcctc

SEQ ID NO: 3261419 - DNA, 25 bp, Homo sapien
tgtaacaggtgtagtgtacgttctt

SEQ ID NO: 3261420 - DNA, 25 bp, Homo sapien
gcttgtaacaggtgtagtgtacgtt

SEQ ID NO: 3261421 - DNA, 25 bp, Homo sapien
taacaggtgtagtgtacgttcttgt

SEQ ID NO: 3261422 - DNA, 25 bp, Homo sapien
caggtgtagtgtacgttcttgtttt

SEQ ID NO: 3261423 - DNA, 25 bp, Homo sapien
cactgtctgaagagccccatgcatt

SEQ ID NO: 3261424 - DNA, 25 bp, Homo sapien
actgtctgaagagccccatgcattg

SEQ ID NO: 3261425 - DNA, 25 bp, Homo sapien
ctgtctgaagagccccatgcattgc

SEQ ID NO: 3261426 - DNA, 25 bp, Homo sapien
tgtctgaagagccccatgcattgct

SEQ ID NO: 3261427 - DNA, 25 bp, Homo sapien
cagggttgccgatcaaaaaagaggc

SEQ ID NO: 3261428 - DNA, 25 bp, Homo sapien
gggttgccgatcaaaaaagaggcac

SEQ ID NO: 3261429 - DNA, 25 bp, Homo sapien
ttccagggttgccgatcaaaaaaga

SEQ ID NO: 3261430 - DNA, 25 bp, Homo sapien
ggggagtttccagggttgccgatca

SEQ ID NO: 3261431 - DNA, 25 bp, Homo sapien
ctgatcctgaagccttaggtctcac

SEQ ID NO: 3261432 - DNA, 25 bp, Homo sapien
ttgataccgccaacagcaaacacgt

SEQ ID NO: 3261433 - DNA, 25 bp, Homo sapien
cagcaaacacgtgccaagaagccag

SEQ ID NO: 3261434 - DNA, 25 bp, Homo sapien
caaacacgtgccaagaagccaggca

SEQ ID NO: 3261435 - DNA, 25 bp, Homo sapien
catccacaattgataccgccaacag

SEQ ID NO: 3261436 - DNA, 25 bp, Homo sapien
tcacttggctttctttggggagtag

SEQ ID NO: 3261437 - DNA, 25 bp, Homo sapien
cacttggctttctttggggagtagc

SEQ ID NO: 3261438 - DNA, 25 bp, Homo sapien
actggtatggagtcagggtggctta

SEQ ID NO: 3261439 - DNA, 25 bp, Homo sapien
tggtatggagtcagggtggcttaat

SEQ ID NO: 3261440 - DNA, 25 bp, Homo sapien
tcatttcactggtatggagtcaggg

SEQ ID NO: 3261441 - DNA, 25 bp, Homo sapien
atttcactggtatggagtcagggtg

SEQ ID NO: 3261442 - DNA, 25 bp, Homo sapien
ccagttatcaacttctttagagtga

SEQ ID NO: 3261443 - DNA, 25 bp, Homo sapien
tggagaacaggaaacggcttgcttc

SEQ ID NO: 3261444 - DNA, 25 bp, Homo sapien
gcagatttcacccaccagttatcaa

SEQ ID NO: 3261445 - DNA, 25 bp, Homo sapien
aattttgtccttctgctcaaataga

SEQ ID NO: 3261446 - DNA, 25 bp, Homo sapien
ctggttcatgataattggatcccat

SEQ ID NO: 3261447 - DNA, 25 bp, Homo sapien
gtgacagatctgtaggtagtaaagc

SEQ ID NO: 3261448 - DNA, 25 bp, Homo sapien
acagatctgtaggtagtaaagcatt

SEQ ID NO: 3261449 - DNA, 25 bp, Homo sapien
atcctgggcaatcctcacagctagt

SEQ ID NO: 3261450 - DNA, 25 bp, Homo sapien
gacagatctgtaggtagtaaagcat

SEQ ID NO: 3261451 - DNA, 25 bp, Homo sapien
ttgctgcatttgctgtatctaccat

SEQ ID NO: 3261452 - DNA, 25 bp, Homo sapien
tcttgctgcatttgctgtatctacc

SEQ ID NO: 3261453 - DNA, 25 bp, Homo sapien
agaagacttccctttcttgctgcat

SEQ ID NO: 3261454 - DNA, 25 bp, Homo sapien
ctcagaagacttccctttcttgctg

SEQ ID NO: 3261455 - DNA, 25 bp, Homo sapien
gggctccctgaccttttagtgaaga

SEQ ID NO: 3261456 - DNA, 25 bp, Homo sapien
caaaggtggacggtattgctttcac

SEQ ID NO: 3261457 - DNA, 25 bp, Homo sapien
ttaatctatgtgtggtgtataccag

SEQ ID NO: 3261458 - DNA, 25 bp, Homo sapien
gacagactttttgattaaccagaac

SEQ ID NO: 3261459 - DNA, 25 bp, Homo sapien
ttatgctgcatatggcttagccttg

SEQ ID NO: 3261460 - DNA, 25 bp, Homo sapien
tatgctgcatatggcttagccttgt

SEQ ID NO: 3261461 - DNA, 25 bp, Homo sapien
gctgcatatggcttagccttgtgaa

SEQ ID NO: 3261462 - DNA, 25 bp, Homo sapien
tgcatatggcttagccttgtgaatt

SEQ ID NO: 3261463 - DNA, 25 bp, Homo sapien
tatggaaatagctattctgatcagg

SEQ ID NO: 3261464 - DNA, 25 bp, Homo sapien
ttgatatggaaatagctattctgat

SEQ ID NO: 3261465 - DNA, 25 bp, Homo sapien
gatatggaaatagctattctgatca

SEQ ID NO: 3261466 - DNA, 25 bp, Homo sapien
ttctcccttaaaaggataattgata

SEQ ID NO: 3261467 - DNA, 25 bp, Homo sapien
ggtatttctcaatctaggctctagc

SEQ ID NO: 3261468 - DNA, 25 bp, Homo sapien
taagccctggttgtctgcccagtgg

SEQ ID NO: 3261469 - DNA, 25 bp, Homo sapien
gccagcacctctatgacatgttcag

SEQ ID NO: 3261470 - DNA, 25 bp, Homo sapien
agaaaagatctgtctagggagtggc

SEQ ID NO: 3261471 - DNA, 25 bp, Homo sapien
agagagaatacgagagaagagatgc

SEQ ID NO: 3261472 - DNA, 25 bp, Homo sapien
tcgaatgcagctttaggatagggag

SEQ ID NO: 3261473 - DNA, 25 bp, Homo sapien
tcctacaatttacctcctcgaatgc

SEQ ID NO: 3261474 - DNA, 25 bp, Homo sapien
aagagatgcttttggatagtctttc

SEQ ID NO: 3261475 - DNA, 25 bp, Homo sapien
tatcaagaggatgtaaggatgcatt

SEQ ID NO: 3261476 - DNA, 25 bp, Homo sapien
caaatatcaagaggatgtaaggatg

SEQ ID NO: 3261477 - DNA, 25 bp, Homo sapien
aaatatcaagaggatgtaaggatgc

SEQ ID NO: 3261478 - DNA, 25 bp, Homo sapien
aatatcaagaggatgtaaggatgca

SEQ ID NO: 3261479 - DNA, 25 bp, Homo sapien
gtgtgcggctcagcaagcttgcctt

SEQ ID NO: 3261480 - DNA, 25 bp, Homo sapien
cagcgctgcttttgtatcgagctca

SEQ ID NO: 3261481 - DNA, 25 bp, Homo sapien
aaagcccgtgcagcgcagcgctgct

SEQ ID NO: 3261482 - DNA, 25 bp, Homo sapien
attcacaggaatacaaaagcccgtg

SEQ ID NO: 3261483 - DNA, 25 bp, Homo sapien
gcgcgctccgttggcggctcacgca

SEQ ID NO: 3261484 - DNA, 25 bp, Homo sapien
agttctgcgcgctccgttggcggct

SEQ ID NO: 3261485 - DNA, 25 bp, Homo sapien
ctgcgcgctccgttggcggctcacg

SEQ ID NO: 3261486 - DNA, 25 bp, Homo sapien
cgctccgttggcggctcacgcaggt

SEQ ID NO: 3261487 - DNA, 25 bp, Homo sapien
catctccattatgtgaacatccata

SEQ ID NO: 3261488 - DNA, 25 bp, Homo sapien
gaaaacaacatctccattatgtgaa

SEQ ID NO: 3261489 - DNA, 25 bp, Homo sapien
catccatagtgttcagaagagactt

SEQ ID NO: 3261490 - DNA, 25 bp, Homo sapien
gatgacttgggatttctctgggaaa

SEQ ID NO: 3261491 - DNA, 25 bp, Homo sapien
aagttaggtgtggtttcatcatcaa

SEQ ID NO: 3261492 - DNA, 25 bp, Homo sapien
aaagaagttaggtgtggtttcatca

SEQ ID NO: 3261493 - DNA, 25 bp, Homo sapien
tccacatggagggatcatgtgtgaa

SEQ ID NO: 3261494 - DNA, 25 bp, Homo sapien
catggagggatcatgtgtgaaaata

SEQ ID NO: 3261495 - DNA, 25 bp, Homo sapien
agtctgccggagcttgagagcccta

SEQ ID NO: 3261496 - DNA, 25 bp, Homo sapien
cgtgggcttcgtctatttcacctaa

SEQ ID NO: 3261497 - DNA, 25 bp, Homo sapien
cctacttcccgtgagtgcactgact

SEQ ID NO: 3261498 - DNA, 25 bp, Homo sapien
tcacctaagtggtccgcagtctgcc

SEQ ID NO: 3261499 - DNA, 25 bp, Homo sapien
ctttgcagcagtggacgagggttaa

SEQ ID NO: 3261500 - DNA, 25 bp, Homo sapien
taagcaacatgtccgtgaagcttgt

SEQ ID NO: 3261501 - DNA, 25 bp, Homo sapien
cagtggacgagggttaaactctcaa

SEQ ID NO: 3261502 - DNA, 25 bp, Homo sapien
cagatgacttaagcaacatgtccgt

SEQ ID NO: 3261503 - DNA, 25 bp, Homo sapien
ggaggacaaccccacattgtttgtg

SEQ ID NO: 3261504 - DNA, 25 bp, Homo sapien
gtcatgaactgccagccattttcca

SEQ ID NO: 3261505 - DNA, 25 bp, Homo sapien
tgtccagacagcctgtttatgggag

SEQ ID NO: 3261506 - DNA, 25 bp, Homo sapien
ttgctccatgggtaacctgctgtcc

SEQ ID NO: 3261507 - DNA, 25 bp, Homo sapien
tagttctttgccttgggacagctgt

SEQ ID NO: 3261508 - DNA, 25 bp, Homo sapien
gcttctgtaggaacccgtgacctgg

SEQ ID NO: 3261509 - DNA, 25 bp, Homo sapien
cacaagatgccgtctttcagggcag

SEQ ID NO: 3261510 - DNA, 25 bp, Homo sapien
taagtatgtgatgcaacagagtcca

SEQ ID NO: 3261511 - DNA, 25 bp, Homo sapien
ggaatgattctgaagacacttgcat

SEQ ID NO: 3261512 - DNA, 25 bp, Homo sapien
tctgaagacacttgcatgaaaatta

SEQ ID NO: 3261513 - DNA, 25 bp, Homo sapien
tatgttttatcagatggaatgattc

SEQ ID NO: 3261514 - DNA, 25 bp, Homo sapien
cagatggaatgattctgaagacact

SEQ ID NO: 3261515 - DNA, 25 bp, Homo sapien
gtattttcataaaggaagctgccag

SEQ ID NO: 3261516 - DNA, 25 bp, Homo sapien
agtattttcataaaggaagctgcca

SEQ ID NO: 3261517 - DNA, 25 bp, Homo sapien
cagtattttcataaaggaagctgcc

SEQ ID NO: 3261518 - DNA, 25 bp, Homo sapien
ccatgaaggatctgtatgtattcat

SEQ ID NO: 3261519 - DNA, 25 bp, Homo sapien
tctgtgacatcaaatgcactgtgat

SEQ ID NO: 3261520 - DNA, 25 bp, Homo sapien
gcaaaatgagagcacaacatctgtg

SEQ ID NO: 3261521 - DNA, 25 bp, Homo sapien
gaagtacagtttattgggagtgcca

SEQ ID NO: 3261522 - DNA, 25 bp, Homo sapien
gctcaatgcataaatttgttgggcc

SEQ ID NO: 3261523 - DNA, 25 bp, Homo sapien
tctgaagttgacctgaaatgataga

SEQ ID NO: 3261524 - DNA, 25 bp, Homo sapien
ctgaaatgatagagcttggtaggtg

SEQ ID NO: 3261525 - DNA, 25 bp, Homo sapien
tcccagaaacctaagaaccattggc

SEQ ID NO: 3261526 - DNA, 25 bp, Homo sapien
catcccagaaacctaagaaccattg

SEQ ID NO: 3261527 - DNA, 25 bp, Homo sapien
aatgtgttttggtagcctggaacat

SEQ ID NO: 3261528 - DNA, 25 bp, Homo sapien
tgaggctaaatgtgttttggtagcc

SEQ ID NO: 3261529 - DNA, 25 bp, Homo sapien
gaggctaaatgtgttttggtagcct

SEQ ID NO: 3261530 - DNA, 25 bp, Homo sapien
aggctaaatgtgttttggtagcctg

SEQ ID NO: 3261531 - DNA, 25 bp, Homo sapien
tagcttctccggtacttgtttgtaa

SEQ ID NO: 3261532 - DNA, 25 bp, Homo sapien
ctagcttctccggtacttgtttgta

SEQ ID NO: 3261533 - DNA, 25 bp, Homo sapien
ttctagctcagtttcaataagagga

SEQ ID NO: 3261534 - DNA, 25 bp, Homo sapien
tctagctcagtttcaataagaggaa

SEQ ID NO: 3261535 - DNA, 25 bp, Homo sapien
ggtttcaacgttgcattcatggagc

SEQ ID NO: 3261536 - DNA, 25 bp, Homo sapien
ctaaggtttcaacgttgcattcatg

SEQ ID NO: 3261537 - DNA, 25 bp, Homo sapien
tttcaacgttgcattcatggagctc

SEQ ID NO: 3261538 - DNA, 25 bp, Homo sapien
caacgttgcattcatggagctctgg

SEQ ID NO: 3261539 - DNA, 25 bp, Homo sapien
gccatgatatcttgttctctcatcc

SEQ ID NO: 3261540 - DNA, 25 bp, Homo sapien
ggaatgccatgatatcttgttctct

SEQ ID NO: 3261541 - DNA, 25 bp, Homo sapien
ctggaatgccatgatatcttgttct

SEQ ID NO: 3261542 - DNA, 25 bp, Homo sapien
aatgccatgatatcttgttctctca

SEQ ID NO: 3261543 - DNA, 25 bp, Homo sapien
atcccactactgtatctatatagta

SEQ ID NO: 3261544 - DNA, 25 bp, Homo sapien
gtatctatatagtaagtgttgcaat

SEQ ID NO: 3261545 - DNA, 25 bp, Homo sapien
cgatcccactactgtatctatatag

SEQ ID NO: 3261546 - DNA, 25 bp, Homo sapien
acgatcccactactgtatctatata

SEQ ID NO: 3261547 - DNA, 25 bp, Homo sapien
aagcttcaatataaagatggaccag

SEQ ID NO: 3261548 - DNA, 25 bp, Homo sapien
ttcaatataaagatggaccagaatg

SEQ ID NO: 3261549 - DNA, 25 bp, Homo sapien
accagaatgaatgcggtggagatgc

SEQ ID NO: 3261550 - DNA, 25 bp, Homo sapien
atgaatgcggtggagatgccaaaac

SEQ ID NO: 3261551 - DNA, 25 bp, Homo sapien
tagttcctggattctaccacaaggg

SEQ ID NO: 3261552 - DNA, 25 bp, Homo sapien
gacgtgatgaataaaactacagaag

SEQ ID NO: 3261553 - DNA, 25 bp, Homo sapien
cacaagggccttatatcaggtttta

SEQ ID NO: 3261554 - DNA, 25 bp, Homo sapien
tgcagatacagatagaatactttcg

SEQ ID NO: 3261555 - DNA, 25 bp, Homo sapien
gctgtagccattgaagtgatatgtt

SEQ ID NO: 3261556 - DNA, 25 bp, Homo sapien
tttgtctccagaataagggtcttcc

SEQ ID NO: 3261557 - DNA, 25 bp, Homo sapien
tattgacttccgactgcagccgagg

SEQ ID NO: 3261558 - DNA, 25 bp, Homo sapien
tctgcaagtattagactgagctttt

SEQ ID NO: 3261559 - DNA, 25 bp, Homo sapien
gatgaaggtgtacctaagactttga

SEQ ID NO: 3261560 - DNA, 25 bp, Homo sapien
gaaggtgtacctaagactttgattc

SEQ ID NO: 3261561 - DNA, 25 bp, Homo sapien
tacctaagactttgattccatatgc

SEQ ID NO: 3261562 - DNA, 25 bp, Homo sapien
ggtgtacctaagactttgattccat

SEQ ID NO: 3261563 - DNA, 25 bp, Homo sapien
ggaggttcacactcacatcaggaag

SEQ ID NO: 3261564 - DNA, 25 bp, Homo sapien
aggaggttcacactcacatcaggaa

SEQ ID NO: 3261565 - DNA, 25 bp, Homo sapien
gaggaggttcacactcacatcagga

SEQ ID NO: 3261566 - DNA, 25 bp, Homo sapien
ccctcaggtagaaaggattgtgttg

SEQ ID NO: 3261567 - DNA, 25 bp, Homo sapien
cagatgatgtgttgtttagcgctgc

SEQ ID NO: 3261568 - DNA, 25 bp, Homo sapien
tgttgtttagcgctgcataagtccc

SEQ ID NO: 3261569 - DNA, 25 bp, Homo sapien
gattgtgttggagtggcaaagctag

SEQ ID NO: 3261570 - DNA, 25 bp, Homo sapien
atagtgaatctgagcaataagctgc

SEQ ID NO: 3261571 - DNA, 25 bp, Homo sapien
ctgagcaataagctgcagacagcca

SEQ ID NO: 3261572 - DNA, 25 bp, Homo sapien
ctgtgcatagtgaatctgagcaata

SEQ ID NO: 3261573 - DNA, 25 bp, Homo sapien
gaatctgagcaataagctgcagaca

SEQ ID NO: 3261574 - DNA, 25 bp, Homo sapien
gacttgcagcccagtgttttttcca

SEQ ID NO: 3261575 - DNA, 25 bp, Homo sapien
tcttctggacctggagaggtaaaca

SEQ ID NO: 3261576 - DNA, 25 bp, Homo sapien
ccacttcaccatgatatttcatctc

SEQ ID NO: 3261577 - DNA, 25 bp, Homo sapien
ttacattgacttgcagcccagtgtt

SEQ ID NO: 3261578 - DNA, 25 bp, Homo sapien
tcaggtaccatggagctttcattat

SEQ ID NO: 3261579 - DNA, 25 bp, Homo sapien
cctcaacagatcctgttctcagcat

SEQ ID NO: 3261580 - DNA, 25 bp, Homo sapien
tgtagttagatcaaagggaatacca

SEQ ID NO: 3261581 - DNA, 25 bp, Homo sapien
ccatccagacctctccattcaggta

SEQ ID NO: 3261582 - DNA, 25 bp, Homo sapien
ctggctcggtctgagaggtgattca

SEQ ID NO: 3261583 - DNA, 25 bp, Homo sapien
tggctcggtctgagaggtgattcag

SEQ ID NO: 3261584 - DNA, 25 bp, Homo sapien
ggctcggtctgagaggtgattcagg

SEQ ID NO: 3261585 - DNA, 25 bp, Homo sapien
tgtgagtgagaaacaaaccttccga

SEQ ID NO: 3261586 - DNA, 25 bp, Homo sapien
ggtagtgaggtaggtaattatgtct

SEQ ID NO: 3261587 - DNA, 25 bp, Homo sapien
tatcaccttgactggaaatctcttt

SEQ ID NO: 3261588 - DNA, 25 bp, Homo sapien
tatgtctatcatttcttgtggaatc

SEQ ID NO: 3261589 - DNA, 25 bp, Homo sapien
tcagtactggcaatacatgttatgt

SEQ ID NO: 3261590 - DNA, 25 bp, Homo sapien
gaccgctgatgctggcatgctgact

SEQ ID NO: 3261591 - DNA, 25 bp, Homo sapien
catggtaagcccgagtgctcgagct

SEQ ID NO: 3261592 - DNA, 25 bp, Homo sapien
taattgacagcatggtaagcccgag

SEQ ID NO: 3261593 - DNA, 25 bp, Homo sapien
ccgagtgctcgagctttgaccgctg

SEQ ID NO: 3261594 - DNA, 25 bp, Homo sapien
ggtacaagatgtttcgtgcattcat

SEQ ID NO: 3261595 - DNA, 25 bp, Homo sapien
agtcgtctctccaagcagtggactt

SEQ ID NO: 3261596 - DNA, 25 bp, Homo sapien
cagtggacttggtacaagatgtttc

SEQ ID NO: 3261597 - DNA, 25 bp, Homo sapien
tagcaaggcttctagtcgtctctcc

SEQ ID NO: 3261598 - DNA, 25 bp, Homo sapien
gaaatcacagggtcacttttgtggc

SEQ ID NO: 3261599 - DNA, 25 bp, Homo sapien
tgtgcagctgcatccctattccagt

SEQ ID NO: 3261600 - DNA, 25 bp, Homo sapien
gaagttcctaacaaactggctttca

SEQ ID NO: 3261601 - DNA, 25 bp, Homo sapien
tgcatccctattccagtttcttgat

SEQ ID NO: 3261602 - DNA, 25 bp, Homo sapien
tacccattccaatgacgaaacccat

SEQ ID NO: 3261603 - DNA, 25 bp, Homo sapien
gaatacccattccaatgacgaaacc

SEQ ID NO: 3261604 - DNA, 25 bp, Homo sapien
tcctggaatacccattccaatgacg

SEQ ID NO: 3261605 - DNA, 25 bp, Homo sapien
ctgctacattacttatgaacttgta

SEQ ID NO: 3261606 - DNA, 25 bp, Homo sapien
gctcatgtatagagttgcaatccac

SEQ ID NO: 3261607 - DNA, 25 bp, Homo sapien
tgaaggttcagcctctaattcaaca

SEQ ID NO: 3261608 - DNA, 25 bp, Homo sapien
atttggtgactctggctcatgtata

SEQ ID NO: 3261609 - DNA, 25 bp, Homo sapien
cacacccgtgaaggttcagcctcta

SEQ ID NO: 3261610 - DNA, 25 bp, Homo sapien
gctttgaaagtggttgtgaaaagtc

SEQ ID NO: 3261611 - DNA, 25 bp, Homo sapien
tctacaaagtcctggtggaactgtc

SEQ ID NO: 3261612 - DNA, 25 bp, Homo sapien
tctggggatttttgactggccaaat

SEQ ID NO: 3261613 - DNA, 25 bp, Homo sapien
ttgtgaaaagtctagtgaacatctg

SEQ ID NO: 3261614 - DNA, 25 bp, Homo sapien
cttggaagactgattaggcagctct

SEQ ID NO: 3261615 - DNA, 25 bp, Homo sapien
ctcagagacacttggaaagccaggg

SEQ ID NO: 3261616 - DNA, 25 bp, Homo sapien
catatcccttccagctggcatatga

SEQ ID NO: 3261617 - DNA, 25 bp, Homo sapien
gcatatgacttggaagactgattag

SEQ ID NO: 3261618 - DNA, 25 bp, Homo sapien
ccacaaataaactcttgagttggga

SEQ ID NO: 3261619 - DNA, 25 bp, Homo sapien
ggagctgcacatcccacaaataaac

SEQ ID NO: 3261620 - DNA, 25 bp, Homo sapien
gggagctgcacatcccacaaataaa

SEQ ID NO: 3261621 - DNA, 25 bp, Homo sapien
tctcctgggtggtccagttgtttct

SEQ ID NO: 3261622 - DNA, 25 bp, Homo sapien
ctctcctgggtggtccagttgtttc

SEQ ID NO: 3261623 - DNA, 25 bp, Homo sapien
ctgggtggtccagttgtttcttcat

SEQ ID NO: 3261624 - DNA, 25 bp, Homo sapien
tcctgggtggtccagttgtttcttc

SEQ ID NO: 3261625 - DNA, 25 bp, Homo sapien
ctttctgcatgcaggcatcttcatt

SEQ ID NO: 3261626 - DNA, 25 bp, Homo sapien
gtttcctttctgcatgcaggcatct

SEQ ID NO: 3261627 - DNA, 25 bp, Homo sapien
tcctttctgcatgcaggcatcttca

SEQ ID NO: 3261628 - DNA, 25 bp, Homo sapien
ctgcatgcaggcatcttcattttca

SEQ ID NO: 3261629 - DNA, 25 bp, Homo sapien
ctaacagatttctgaccaatggagc

SEQ ID NO: 3261630 - DNA, 25 bp, Homo sapien
caatggagcttggtaagttttcagc

SEQ ID NO: 3261631 - DNA, 25 bp, Homo sapien
cttgctaacagatttctgaccaatg

SEQ ID NO: 3261632 - DNA, 25 bp, Homo sapien
gatttctgaccaatggagcttggta

SEQ ID NO: 3261633 - DNA, 25 bp, Homo sapien
ccatagaaagccctgatagttgctg

SEQ ID NO: 3261634 - DNA, 25 bp, Homo sapien
tacactatctgctagttgtgcaggc

SEQ ID NO: 3261635 - DNA, 25 bp, Homo sapien
tatctgctagttgtgcaggctgcct

SEQ ID NO: 3261636 - DNA, 25 bp, Homo sapien
tagttgctggtgttacactatctgc

SEQ ID NO: 3261637 - DNA, 25 bp, Homo sapien
aatagtatatgaaagaagtataatc

SEQ ID NO: 3261638 - DNA, 25 bp, Homo sapien
taatggtgatgtttcggatgtggtt

SEQ ID NO: 3261639 - DNA, 25 bp, Homo sapien
tatatgaaagaagtataatcatgaa

SEQ ID NO: 3261640 - DNA, 25 bp, Homo sapien
tagtatatgaaagaagtataatcat

SEQ ID NO: 3261641 - DNA, 25 bp, Homo sapien
tctgtgaccttcagctggctagcat

SEQ ID NO: 3261642 - DNA, 25 bp, Homo sapien
gatcccaccaaggatctttggcaag

SEQ ID NO: 3261643 - DNA, 25 bp, Homo sapien
ctagcattggcaggcctaggagtgt

SEQ ID NO: 3261644 - DNA, 25 bp, Homo sapien
tcttggtcactactgagctctgtga

SEQ ID NO: 3261645 - DNA, 25 bp, Homo sapien
taactccaaattcctgggagaggga

SEQ ID NO: 3261646 - DNA, 25 bp, Homo sapien
acagtgcagggtagtttgatccaaa

SEQ ID NO: 3261647 - DNA, 25 bp, Homo sapien
ggagtctgactcaaattgctattag

SEQ ID NO: 3261648 - DNA, 25 bp, Homo sapien
gaatatggttggtttagacagtgca

SEQ ID NO: 3261649 - DNA, 25 bp, Homo sapien
cttattaaggatctcaagaattggc

SEQ ID NO: 3261650 - DNA, 25 bp, Homo sapien
ttattaaggatctcaagaattggca

SEQ ID NO: 3261651 - DNA, 25 bp, Homo sapien
tattaaggatctcaagaattggcat

SEQ ID NO: 3261652 - DNA, 25 bp, Homo sapien
agacccaagagtcacagccaccttg

SEQ ID NO: 3261653 - DNA, 25 bp, Homo sapien
ggtacccagatgtggctaccatagg

SEQ ID NO: 3261654 - DNA, 25 bp, Homo sapien
tgtggctaccataggccctctggag

SEQ ID NO: 3261655 - DNA, 25 bp, Homo sapien
aagctgctgtacctcgaagaagaag

SEQ ID NO: 3261656 - DNA, 25 bp, Homo sapien
ccactcagactttcaaactctttac

SEQ ID NO: 3261657 - DNA, 25 bp, Homo sapien
acatgcgaaaatgccccgttaattt

SEQ ID NO: 3261658 - DNA, 25 bp, Homo sapien
caaagagtgaagatagtacccaaca

SEQ ID NO: 3261659 - DNA, 25 bp, Homo sapien
tccttacctgttttggaatctccag

SEQ ID NO: 3261660 - DNA, 25 bp, Homo sapien
gagtgaagatagtacccaacaagta

SEQ ID NO: 3261661 - DNA, 25 bp, Homo sapien
gccaacctgtctgagttccataaga

SEQ ID NO: 3261662 - DNA, 25 bp, Homo sapien
ttcagtgttactgggtcctgctgag

SEQ ID NO: 3261663 - DNA, 25 bp, Homo sapien
ctgctgagcctgagactgccaacct

SEQ ID NO: 3261664 - DNA, 25 bp, Homo sapien
gcctgagactgccaacctgtctgag

SEQ ID NO: 3261665 - DNA, 25 bp, Homo sapien
ctcttcgaggccaccttcagagttc

SEQ ID NO: 3261666 - DNA, 25 bp, Homo sapien
cttcgaggccaccttcagagttcat

SEQ ID NO: 3261667 - DNA, 25 bp, Homo sapien
tcttcgaggccaccttcagagttca

SEQ ID NO: 3261668 - DNA, 25 bp, Homo sapien
tggattcagtcctattaaaaatttc

SEQ ID NO: 3261669 - DNA, 25 bp, Homo sapien
tgccttggattcagtcctattaaaa

SEQ ID NO: 3261670 - DNA, 25 bp, Homo sapien
cttggattcagtcctattaaaaatt

SEQ ID NO: 3261671 - DNA, 25 bp, Homo sapien
cagtcctattaaaaatttccctgat

SEQ ID NO: 3261672 - DNA, 25 bp, Homo sapien
tatcacattcaactgtcagttttgc

SEQ ID NO: 3261673 - DNA, 25 bp, Homo sapien
tatttatcacattcaactgtcagtt

SEQ ID NO: 3261674 - DNA, 25 bp, Homo sapien
tttatcacattcaactgtcagtttt

SEQ ID NO: 3261675 - DNA, 25 bp, Homo sapien
ttatttatcacattcaactgtcagt

SEQ ID NO: 3261676 - DNA, 25 bp, Homo sapien
tctttacgccttaagggcattattg

SEQ ID NO: 3261677 - DNA, 25 bp, Homo sapien
aagggcattattgatccagcttcct

SEQ ID NO: 3261678 - DNA, 25 bp, Homo sapien
acgccttaagggcattattgatcca

SEQ ID NO: 3261679 - DNA, 25 bp, Homo sapien
ccttaagggcattattgatccagct

SEQ ID NO: 3261680 - DNA, 25 bp, Homo sapien
tctggttggacttcaaaaggttgca

SEQ ID NO: 3261681 - DNA, 25 bp, Homo sapien
tttcaatcagtgtcagcttcaagcc

SEQ ID NO: 3261682 - DNA, 25 bp, Homo sapien
gcagctgggccattgattgttcctt

SEQ ID NO: 3261683 - DNA, 25 bp, Homo sapien
tgagaacaatgtggctgcccgggaa

SEQ ID NO: 3261684 - DNA, 25 bp, Homo sapien
tcttccatctgaatacagagactga

SEQ ID NO: 3261685 - DNA, 25 bp, Homo sapien
taagatgtttaggaagttgttgtaa

SEQ ID NO: 3261686 - DNA, 25 bp, Homo sapien
ttaagatgtttaggaagttgttgta

SEQ ID NO: 3261687 - DNA, 25 bp, Homo sapien
tccatctgaatacagagactgaaag

SEQ ID NO: 3261688 - DNA, 25 bp, Homo sapien
tgtcaatgatatatgaggtgttaga

SEQ ID NO: 3261689 - DNA, 25 bp, Homo sapien
tgattcctgattggaccattgtcaa

SEQ ID NO: 3261690 - DNA, 25 bp, Homo sapien
cagctgatgggtgtgattcctgatt

SEQ ID NO: 3261691 - DNA, 25 bp, Homo sapien
cattgtcaatgatatatgaggtgtt

SEQ ID NO: 3261692 - DNA, 25 bp, Homo sapien
caggtccccaaatatgtctaaggta

SEQ ID NO: 3261693 - DNA, 25 bp, Homo sapien
tctaagctagatttgccacttgaga

SEQ ID NO: 3261694 - DNA, 25 bp, Homo sapien
tatgtctaaggtaaaagttggcact

SEQ ID NO: 3261695 - DNA, 25 bp, Homo sapien
tgcttggtcaacaggaactgtttgc

SEQ ID NO: 3261696 - DNA, 25 bp, Homo sapien
gtgtggcaacagtctttgttagcat

SEQ ID NO: 3261697 - DNA, 25 bp, Homo sapien
taatctgctaagataataatactct

SEQ ID NO: 3261698 - DNA, 25 bp, Homo sapien
tcataatctccacttattaaactgt

SEQ ID NO: 3261699 - DNA, 25 bp, Homo sapien
tctcataatctccacttattaaact

SEQ ID NO: 3261700 - DNA, 25 bp, Homo sapien
catggagcatcttgctgacaggagc

SEQ ID NO: 3261701 - DNA, 25 bp, Homo sapien
gctgacaggagccttctctcattca

SEQ ID NO: 3261702 - DNA, 25 bp, Homo sapien
ccagtgcctggtagagggcacattt

SEQ ID NO: 3261703 - DNA, 25 bp, Homo sapien
cagtgggtctgggtttctgtcaact

SEQ ID NO: 3261704 - DNA, 25 bp, Homo sapien
tccctgcatttttccggagtcatgc

SEQ ID NO: 3261705 - DNA, 25 bp, Homo sapien
tgctcagggtttagtggtctttcaa

SEQ ID NO: 3261706 - DNA, 25 bp, Homo sapien
gcatttttccggagtcatgctcagg

SEQ ID NO: 3261707 - DNA, 25 bp, Homo sapien
ctttcaagagcacgctctcccttgg

SEQ ID NO: 3261708 - DNA, 25 bp, Homo sapien
ctttggtctcaccttgcttggccat

SEQ ID NO: 3261709 - DNA, 25 bp, Homo sapien
catagcttttgctatggaaatggct

SEQ ID NO: 3261710 - DNA, 25 bp, Homo sapien
taaaaccccacaactatccatataa

SEQ ID NO: 3261711 - DNA, 25 bp, Homo sapien
caccaatgctttggaatgccttata

SEQ ID NO: 3261712 - DNA, 25 bp, Homo sapien
aaatacacggagatatcctaaactt

SEQ ID NO: 3261713 - DNA, 25 bp, Homo sapien
cagaagacggcagttaagatgtaac

SEQ ID NO: 3261714 - DNA, 25 bp, Homo sapien
cataggatggcattatcatggtgcc

SEQ ID NO: 3261715 - DNA, 25 bp, Homo sapien
tggtgccttcaaacattcttgtccg

SEQ ID NO: 3261716 - DNA, 25 bp, Homo sapien
tcacaaaattgggttggctgactca

SEQ ID NO: 3261717 - DNA, 25 bp, Homo sapien
tggacatgttcaggcatgggcaaag

SEQ ID NO: 3261718 - DNA, 25 bp, Homo sapien
tggtttaccattcaagtagtaacca

SEQ ID NO: 3261719 - DNA, 25 bp, Homo sapien
gattggacatgttcaggcatgggca

SEQ ID NO: 3261720 - DNA, 25 bp, Homo sapien
gacaagattggacatgttcaggcat

SEQ ID NO: 3261721 - DNA, 25 bp, Homo sapien
caaactggattaggtattcctcctc

SEQ ID NO: 3261722 - DNA, 25 bp, Homo sapien
tgtgtgcacccttcatcacaggagg

SEQ ID NO: 3261723 - DNA, 25 bp, Homo sapien
cacagcacttgtcaggttcaaaagg

SEQ ID NO: 3261724 - DNA, 25 bp, Homo sapien
tgtctgatgagcattgtgtgcaccc

SEQ ID NO: 3261725 - DNA, 25 bp, Homo sapien
ggtggagtacatttgtccagtgcca

SEQ ID NO: 3261726 - DNA, 25 bp, Homo sapien
ttgctatgaacctttgcgtgtcttt

SEQ ID NO: 3261727 - DNA, 25 bp, Homo sapien
gaacctttgcgtgtctttcactatg

SEQ ID NO: 3261728 - DNA, 25 bp, Homo sapien
tgtctttcactatgggtggagtaca

SEQ ID NO: 3261729 - DNA, 25 bp, Homo sapien
acagccaccataaaagaaacccagg

SEQ ID NO: 3261730 - DNA, 25 bp, Homo sapien
gcggtttcaagtattcactagggcc

SEQ ID NO: 3261731 - DNA, 25 bp, Homo sapien
cacgacaaggccatggagggtaact

SEQ ID NO: 3261732 - DNA, 25 bp, Homo sapien
taggctttaccacatgaatttaggg

SEQ ID NO: 3261733 - DNA, 25 bp, Homo sapien
ttcagaggttgatccagaatttgga

SEQ ID NO: 3261734 - DNA, 25 bp, Homo sapien
ctaaccataaagctgccattcgagg

SEQ ID NO: 3261735 - DNA, 25 bp, Homo sapien
gctgccattcgaggatgaagccttc

SEQ ID NO: 3261736 - DNA, 25 bp, Homo sapien
gatccagaatttggaggcacatttc

SEQ ID NO: 3261737 - DNA, 25 bp, Homo sapien
ggtattatgtcaaaaatactgagaa

SEQ ID NO: 3261738 - DNA, 25 bp, Homo sapien
gggtcatatcattaggagaaccatg

SEQ ID NO: 3261739 - DNA, 25 bp, Homo sapien
cacccttcctaatcatagaatgtca

SEQ ID NO: 3261740 - DNA, 25 bp, Homo sapien
aatgggccaaacatactgagtttcc

SEQ ID NO: 3261741 - DNA, 25 bp, Homo sapien
tagtaaaatggcagcaactttaaac

SEQ ID NO: 3261742 - DNA, 25 bp, Homo sapien
tctagtaaaatggcagcaactttaa

SEQ ID NO: 3261743 - DNA, 25 bp, Homo sapien
ctagtaaaatggcagcaactttaaa

SEQ ID NO: 3261744 - DNA, 25 bp, Homo sapien
cgtatctcttcattggaagactaca

SEQ ID NO: 3261745 - DNA, 25 bp, Homo sapien
ggtgggaaggttcaccataaccaca

SEQ ID NO: 3261746 - DNA, 25 bp, Homo sapien
cattggaagactacaaaggtgggaa

SEQ ID NO: 3261747 - DNA, 25 bp, Homo sapien
tatagtagccctctttgatgtcaaa

SEQ ID NO: 3261748 - DNA, 25 bp, Homo sapien
tagaatcatccttcattcccagggc

SEQ ID NO: 3261749 - DNA, 25 bp, Homo sapien
tgtgcttggtacaattgatgtgaac

SEQ ID NO: 3261750 - DNA, 25 bp, Homo sapien
tctcaagggcaaaattggatcattt

SEQ ID NO: 3261751 - DNA, 25 bp, Homo sapien
agagccttcgaagagaaatatgtgc

SEQ ID NO: 3261752 - DNA, 25 bp, Homo sapien
tgcccctaaattggtggtcagtgtt

SEQ ID NO: 3261753 - DNA, 25 bp, Homo sapien
ctgcccctaaattggtggtcagtgt

SEQ ID NO: 3261754 - DNA, 25 bp, Homo sapien
cccctaaattggtggtcagtgtttg

SEQ ID NO: 3261755 - DNA, 25 bp, Homo sapien
ctgtgagctgcccattcgactgtta

SEQ ID NO: 3261756 - DNA, 25 bp, Homo sapien
tttccgctggtcacaagcccagtgt

SEQ ID NO: 3261757 - DNA, 25 bp, Homo sapien
tgcccattcgactgttagaatgtgt

SEQ ID NO: 3261758 - DNA, 25 bp, Homo sapien
cgctggtcacaagcccagtgtaggg

SEQ ID NO: 3261759 - DNA, 25 bp, Homo sapien
gctctgcctgagaacgcgtcttcct

SEQ ID NO: 3261760 - DNA, 25 bp, Homo sapien
ggcagatccatctacttcctcatct

SEQ ID NO: 3261761 - DNA, 25 bp, Homo sapien
ttcctcatctacttcgtggcctttt

SEQ ID NO: 3261762 - DNA, 25 bp, Homo sapien
ggaaggcagatccatctacttcctc

SEQ ID NO: 3261763 - DNA, 25 bp, Homo sapien
gtggcaacaaaaggctgctcccaga

SEQ ID NO: 3261764 - DNA, 25 bp, Homo sapien
gctcccagaatcagcaataccatgt

SEQ ID NO: 3261765 - DNA, 25 bp, Homo sapien
caggtaagaccgcttttccctagct

SEQ ID NO: 3261766 - DNA, 25 bp, Homo sapien
ggtaagaccgcttttccctagctca

SEQ ID NO: 3261767 - DNA, 25 bp, Homo sapien
tatatgccaaagacgggtatacaat

SEQ ID NO: 3261768 - DNA, 25 bp, Homo sapien
ccagaaggcattccacgattatatg

SEQ ID NO: 3261769 - DNA, 25 bp, Homo sapien
attccacgattatatgccaaagacg

SEQ ID NO: 3261770 - DNA, 25 bp, Homo sapien
cgattatatgccaaagacgggtata

SEQ ID NO: 3261771 - DNA, 25 bp, Homo sapien
ggctcttggcttttggatctatcac

SEQ ID NO: 3261772 - DNA, 25 bp, Homo sapien
gatgtgggaccatgtctgctacaaa

SEQ ID NO: 3261773 - DNA, 25 bp, Homo sapien
tctctgagtctcatgagaacactga

SEQ ID NO: 3261774 - DNA, 25 bp, Homo sapien
gcagagggcaccagatttacccaca

SEQ ID NO: 3261775 - DNA, 25 bp, Homo sapien
actcccaccgcactgacttttctag

SEQ ID NO: 3261776 - DNA, 25 bp, Homo sapien
gactcccaccgcactgacttttcta

SEQ ID NO: 3261777 - DNA, 25 bp, Homo sapien
tcagactcccaccgcactgactttt

SEQ ID NO: 3261778 - DNA, 25 bp, Homo sapien
agactcccaccgcactgacttttct

SEQ ID NO: 3261779 - DNA, 25 bp, Homo sapien
aagtgtgacaaaagctgataccaga

SEQ ID NO: 3261780 - DNA, 25 bp, Homo sapien
cacattgattccagaagtaataaag

SEQ ID NO: 3261781 - DNA, 25 bp, Homo sapien
gagaaaagtgtgacaaaagctgata

SEQ ID NO: 3261782 - DNA, 25 bp, Homo sapien
tgctagagagtactccacagagaga

SEQ ID NO: 3261783 - DNA, 25 bp, Homo sapien
tatcctcagtggcattaatctccca

SEQ ID NO: 3261784 - DNA, 25 bp, Homo sapien
ccttggatggtttatgttggacaaa

SEQ ID NO: 3261785 - DNA, 25 bp, Homo sapien
ccatgagcaatcagctgaatttgag

SEQ ID NO: 3261786 - DNA, 25 bp, Homo sapien
gtctgcagccagataaaataagagc

SEQ ID NO: 3261787 - DNA, 25 bp, Homo sapien
agattctggaagaccgtaggagaat

SEQ ID NO: 3261788 - DNA, 25 bp, Homo sapien
ctggagattctggaagaccgtagga

SEQ ID NO: 3261789 - DNA, 25 bp, Homo sapien
gagattctggaagaccgtaggagaa

SEQ ID NO: 3261790 - DNA, 25 bp, Homo sapien
tggagattctggaagaccgtaggag

SEQ ID NO: 3261791 - DNA, 25 bp, Homo sapien
ctgcactggggctttctaagtagtt

SEQ ID NO: 3261792 - DNA, 25 bp, Homo sapien
gcactggggctttctaagtagttca

SEQ ID NO: 3261793 - DNA, 25 bp, Homo sapien
tgcactggggctttctaagtagttc

SEQ ID NO: 3261794 - DNA, 25 bp, Homo sapien
cactggggctttctaagtagttcat

SEQ ID NO: 3261795 - DNA, 25 bp, Homo sapien
ctgaacacaagattgtactgcgagc

SEQ ID NO: 3261796 - DNA, 25 bp, Homo sapien
cacaagattgtactgcgagccctga

SEQ ID NO: 3261797 - DNA, 25 bp, Homo sapien
attgtactgcgagccctgaaggaag

SEQ ID NO: 3261798 - DNA, 25 bp, Homo sapien
caagattgtactgcgagccctgaag

SEQ ID NO: 3261799 - DNA, 25 bp, Homo sapien
gactgaagatgcagcccgtatgtgg

SEQ ID NO: 3261800 - DNA, 25 bp, Homo sapien
aaatcaccggaggttggtggcagct

SEQ ID NO: 3261801 - DNA, 25 bp, Homo sapien
gccagaaacaagcagccctcttaaa

SEQ ID NO: 3261802 - DNA, 25 bp, Homo sapien
aaagctttcattcgcactttgggag

SEQ ID NO: 3261803 - DNA, 25 bp, Homo sapien
cactggcatttctctttatctggga

SEQ ID NO: 3261804 - DNA, 25 bp, Homo sapien
aagatctcttttcctatactggaca

SEQ ID NO: 3261805 - DNA, 25 bp, Homo sapien
gatctcttttcctatactggacaag

SEQ ID NO: 3261806 - DNA, 25 bp, Homo sapien
ggcatttctctttatctgggaataa

SEQ ID NO: 3261807 - DNA, 25 bp, Homo sapien
tgccttcatcatgcaactttcacta

SEQ ID NO: 3261808 - DNA, 25 bp, Homo sapien
ttattgtgcaaaggatcccttcctg

SEQ ID NO: 3261809 - DNA, 25 bp, Homo sapien
atgcattgccttcatcatgcaactt

SEQ ID NO: 3261810 - DNA, 25 bp, Homo sapien
tattgtgcaaaggatcccttcctgg

SEQ ID NO: 3261811 - DNA, 25 bp, Homo sapien
tcatcgtagctaccaccagtaaaaa

SEQ ID NO: 3261812 - DNA, 25 bp, Homo sapien
ctcagttttataggggagccacctt

SEQ ID NO: 3261813 - DNA, 25 bp, Homo sapien
gccaccttatatgtgaaacattgtt

SEQ ID NO: 3261814 - DNA, 25 bp, Homo sapien
cttctaagttcagtggtatttctac

SEQ ID NO: 3261815 - DNA, 25 bp, Homo sapien
attgtgctctttctcattaatcctg

SEQ ID NO: 3261816 - DNA, 25 bp, Homo sapien
ttccattgtgctctttctcattaat

SEQ ID NO: 3261817 - DNA, 25 bp, Homo sapien
gttgaaatcaacttgataatagttc

SEQ ID NO: 3261818 - DNA, 25 bp, Homo sapien
tcctgttgaaatcaacttgataata

SEQ ID NO: 3261819 - DNA, 25 bp, Homo sapien
gagggtgttggggttgaatctccta

SEQ ID NO: 3261820 - DNA, 25 bp, Homo sapien
tgaatctcctaatggttaattcttc

SEQ ID NO: 3261821 - DNA, 25 bp, Homo sapien
ggtgttggggttgaatctcctaatg

SEQ ID NO: 3261822 - DNA, 25 bp, Homo sapien
agagggtgttggggttgaatctcct

SEQ ID NO: 3261823 - DNA, 25 bp, Homo sapien
gcaagtctagaacatttcaactgca

SEQ ID NO: 3261824 - DNA, 25 bp, Homo sapien
tcacgtttgactactgatctttcga

SEQ ID NO: 3261825 - DNA, 25 bp, Homo sapien
tctttcgatggctcttctgtatgag

SEQ ID NO: 3261826 - DNA, 25 bp, Homo sapien
tgactactgatctttcgatggctct

SEQ ID NO: 3261827 - DNA, 25 bp, Homo sapien
agtttcaacctgatcaaagatttta

SEQ ID NO: 3261828 - DNA, 25 bp, Homo sapien
tatcactagttactgtcttactggg

SEQ ID NO: 3261829 - DNA, 25 bp, Homo sapien
ggaaagtttcaacctgatcaaagat

SEQ ID NO: 3261830 - DNA, 25 bp, Homo sapien
aaagattttatcactagttactgtc

SEQ ID NO: 3261831 - DNA, 25 bp, Homo sapien
taccagtggatagatgggccaaatg

SEQ ID NO: 3261832 - DNA, 25 bp, Homo sapien
caggcacaagggctttagccagacc

SEQ ID NO: 3261833 - DNA, 25 bp, Homo sapien
tgcatagaaccgaactgagaatggt

SEQ ID NO: 3261834 - DNA, 25 bp, Homo sapien
tagccagaccactggatgcatagaa

SEQ ID NO: 3261835 - DNA, 25 bp, Homo sapien
tcatagtggttttcagcaacgccat

SEQ ID NO: 3261836 - DNA, 25 bp, Homo sapien
taatcatagtggttttcagcaacgc

SEQ ID NO: 3261837 - DNA, 25 bp, Homo sapien
tctcttaatcatagtggttttcagc

SEQ ID NO: 3261838 - DNA, 25 bp, Homo sapien
cttaatcatagtggttttcagcaac

SEQ ID NO: 3261839 - DNA, 25 bp, Homo sapien
tccaagggcacgcaaatgcactctg

SEQ ID NO: 3261840 - DNA, 25 bp, Homo sapien
gaggtatttaacactttggcaggag

SEQ ID NO: 3261841 - DNA, 25 bp, Homo sapien
ctttgccacaaagcagggacggagg

SEQ ID NO: 3261842 - DNA, 25 bp, Homo sapien
gcattaactgctggtcgcctctgaa

SEQ ID NO: 3261843 - DNA, 25 bp, Homo sapien
ggagtttctgttggtgacatggatt

SEQ ID NO: 3261844 - DNA, 25 bp, Homo sapien
gtttaacatagatctggagtttctg

SEQ ID NO: 3261845 - DNA, 25 bp, Homo sapien
cttcattaagggttgatcatttctc

SEQ ID NO: 3261846 - DNA, 25 bp, Homo sapien
tagacctaactctgttgtatcagaa

SEQ ID NO: 3261847 - DNA, 25 bp, Homo sapien
tcaacaataggtgcagatttggagt

SEQ ID NO: 3261848 - DNA, 25 bp, Homo sapien
tggcggttacattgcattcagggag

SEQ ID NO: 3261849 - DNA, 25 bp, Homo sapien
ggtatgtctgccagatctggacaaa

SEQ ID NO: 3261850 - DNA, 25 bp, Homo sapien
tcattcccatccagacgaaagaaca

SEQ ID NO: 3261851 - DNA, 25 bp, Homo sapien
gcttttctcgattcccactttctga

SEQ ID NO: 3261852 - DNA, 25 bp, Homo sapien
ggtaagcgcttttctcgattcccac

SEQ ID NO: 3261853 - DNA, 25 bp, Homo sapien
cctcactcttcttctggtaagcgct

SEQ ID NO: 3261854 - DNA, 25 bp, Homo sapien
ttcttctggtaagcgcttttctcga

SEQ ID NO: 3261855 - DNA, 25 bp, Homo sapien
cagacctaggacttgtatttgaatt

SEQ ID NO: 3261856 - DNA, 25 bp, Homo sapien
tggctggctcatgaatgaatgtacg

SEQ ID NO: 3261857 - DNA, 25 bp, Homo sapien
gtgtcagacctaggacttgtatttg

SEQ ID NO: 3261858 - DNA, 25 bp, Homo sapien
ccaattttgggtaatgagtgtcaga

SEQ ID NO: 3261859 - DNA, 25 bp, Homo sapien
cttctaacttgatgagaatggctgt

SEQ ID NO: 3261860 - DNA, 25 bp, Homo sapien
gaagtcagggctgtgatttgaggct

SEQ ID NO: 3261861 - DNA, 25 bp, Homo sapien
gcttctaacttgatgagaatggctg

SEQ ID NO: 3261862 - DNA, 25 bp, Homo sapien
agcttctaacttgatgagaatggct

SEQ ID NO: 3261863 - DNA, 25 bp, Homo sapien
cagagtcctgtccttctacaactga

SEQ ID NO: 3261864 - DNA, 25 bp, Homo sapien
tcacagggtcctgtcatttgatgca

SEQ ID NO: 3261865 - DNA, 25 bp, Homo sapien
tactcgtacctggaattagcaacat

SEQ ID NO: 3261866 - DNA, 25 bp, Homo sapien
tttggtaatggtgagataaccagca

SEQ ID NO: 3261867 - DNA, 25 bp, Homo sapien
aaccaatcaaacattggcagtttgg

SEQ ID NO: 3261868 - DNA, 25 bp, Homo sapien
tatcattatccaaatttgcatggca

SEQ ID NO: 3261869 - DNA, 25 bp, Homo sapien
gctgctcactggttagcaaaaagag

SEQ ID NO: 3261870 - DNA, 25 bp, Homo sapien
tgaggctttagcttatctccgtggg

SEQ ID NO: 3261871 - DNA, 25 bp, Homo sapien
tgggcatgccttattttgggtctcc

SEQ ID NO: 3261872 - DNA, 25 bp, Homo sapien
ggcatgccttattttgggtctccca

SEQ ID NO: 3261873 - DNA, 25 bp, Homo sapien
aactaccattaatttagcagcacaa

SEQ ID NO: 3261874 - DNA, 25 bp, Homo sapien
gcatgccttattttgggtctcccaa

SEQ ID NO: 3261875 - DNA, 25 bp, Homo sapien
atgagtcgttccttcagaatgccac

SEQ ID NO: 3261876 - DNA, 25 bp, Homo sapien
aaatgagtcgttccttcagaatgcc

SEQ ID NO: 3261877 - DNA, 25 bp, Homo sapien
taaatgagtcgttccttcagaatgc

SEQ ID NO: 3261878 - DNA, 25 bp, Homo sapien
ttataaatgagtcgttccttcagaa

SEQ ID NO: 3261879 - DNA, 25 bp, Homo sapien
tgagcccgttggcaagcacaaagtc

SEQ ID NO: 3261880 - DNA, 25 bp, Homo sapien
gcacaaagtctgcttgtgatgccag

SEQ ID NO: 3261881 - DNA, 25 bp, Homo sapien
gccatggcagatagcggggataata

SEQ ID NO: 3261882 - DNA, 25 bp, Homo sapien
aagtctgcttgtgatgccagccctg

SEQ ID NO: 3261883 - DNA, 25 bp, Homo sapien
gcgttcccattgcaatgtatccgca

SEQ ID NO: 3261884 - DNA, 25 bp, Homo sapien
caatgtatccgcacccttctcatgg

SEQ ID NO: 3261885 - DNA, 25 bp, Homo sapien
cattgcaatgtatccgcacccttct

SEQ ID NO: 3261886 - DNA, 25 bp, Homo sapien
gttcccattgcaatgtatccgcacc

SEQ ID NO: 3261887 - DNA, 25 bp, Homo sapien
tcacaaaccagtcagaagcaaccct

SEQ ID NO: 3261888 - DNA, 25 bp, Homo sapien
gagtgaacttgagcacaagaacttt

SEQ ID NO: 3261889 - DNA, 25 bp, Homo sapien
ttacttctcgggcactcacaaaatg

SEQ ID NO: 3261890 - DNA, 25 bp, Homo sapien
aaaatgtgttgagtatggccacagt

SEQ ID NO: 3261891 - DNA, 25 bp, Homo sapien
gaatgacagtcccaataaaagattg

SEQ ID NO: 3261892 - DNA, 25 bp, Homo sapien
tagtctcaaggcatcgggaagaagc

SEQ ID NO: 3261893 - DNA, 25 bp, Homo sapien
gccaagttgatatctcctgctagtc

SEQ ID NO: 3261894 - DNA, 25 bp, Homo sapien
gcaagggaacaaagccactacccat

SEQ ID NO: 3261895 - DNA, 25 bp, Homo sapien
gatttctatcagctgtggaaatata

SEQ ID NO: 3261896 - DNA, 25 bp, Homo sapien
ggcaaagagttaagagaggtgagat

SEQ ID NO: 3261897 - DNA, 25 bp, Homo sapien
catagaaggcctgagtggacttttc

SEQ ID NO: 3261898 - DNA, 25 bp, Homo sapien
tcttatagaaggagagtggagctgt

SEQ ID NO: 3261899 - DNA, 25 bp, Homo sapien
caactgagtaatctcggttgataag

SEQ ID NO: 3261900 - DNA, 25 bp, Homo sapien
tggttgacataagtaccgacaactc

SEQ ID NO: 3261901 - DNA, 25 bp, Homo sapien
cataagtaccgacaactctagcact

SEQ ID NO: 3261902 - DNA, 25 bp, Homo sapien
tgccaactgagtaatctcggttgat

SEQ ID NO: 3261903 - DNA, 25 bp, Homo sapien
accagaagccttggcattgaagtga

SEQ ID NO: 3261904 - DNA, 25 bp, Homo sapien
ctcaccagaagccttggcattgaag

SEQ ID NO: 3261905 - DNA, 25 bp, Homo sapien
acagttggcaggaggatatctttct

SEQ ID NO: 3261906 - DNA, 25 bp, Homo sapien
ggaggatatctttctcaccagaagc

SEQ ID NO: 3261907 - DNA, 25 bp, Homo sapien
tcgcatggctgtagatttggagacg

SEQ ID NO: 3261908 - DNA, 25 bp, Homo sapien
tagatttggagacgtttggacttgc

SEQ ID NO: 3261909 - DNA, 25 bp, Homo sapien
tgggctcttcgcatggctgtagatt

SEQ ID NO: 3261910 - DNA, 25 bp, Homo sapien
agaatatttgggctcttcgcatggc

SEQ ID NO: 3261911 - DNA, 25 bp, Homo sapien
ctttggtaacatccccacggacaca

SEQ ID NO: 3261912 - DNA, 25 bp, Homo sapien
tattctggctgtactagcagctggt

SEQ ID NO: 3261913 - DNA, 25 bp, Homo sapien
ttactagtgtaagtccaggaatcca

SEQ ID NO: 3261914 - DNA, 25 bp, Homo sapien
gggcagtctttagtctgtgtccaaa

SEQ ID NO: 3261915 - DNA, 25 bp, Homo sapien
taatatctttaagggcagcttggcc

SEQ ID NO: 3261916 - DNA, 25 bp, Homo sapien
aaacgattgaaatggatgccttctc

SEQ ID NO: 3261917 - DNA, 25 bp, Homo sapien
ggaagttactacaacacatgacact

SEQ ID NO: 3261918 - DNA, 25 bp, Homo sapien
gctaccagggagctgtacctaatat

SEQ ID NO: 3261919 - DNA, 25 bp, Homo sapien
tggagttaaatccaactcttttgcc

SEQ ID NO: 3261920 - DNA, 25 bp, Homo sapien
aagataggggtgagttacccatcgg

SEQ ID NO: 3261921 - DNA, 25 bp, Homo sapien
ttatccaagataggggtgagttacc

SEQ ID NO: 3261922 - DNA, 25 bp, Homo sapien
aagctcttatccaagataggggtga

SEQ ID NO: 3261923 - DNA, 25 bp, Homo sapien
tccaagataggggtgagttacccat

SEQ ID NO: 3261924 - DNA, 25 bp, Homo sapien
ggcatttgatatcgctaaaacctgg

SEQ ID NO: 3261925 - DNA, 25 bp, Homo sapien
cattgactgtgtaatggcatttgat

SEQ ID NO: 3261926 - DNA, 25 bp, Homo sapien
tgagtcatgccccacaaatttgtgc

SEQ ID NO: 3261927 - DNA, 25 bp, Homo sapien
gaagcactggtgcattacagcagag

SEQ ID NO: 3261928 - DNA, 25 bp, Homo sapien
tcatgggtattctccctgtagaata

SEQ ID NO: 3261929 - DNA, 25 bp, Homo sapien
catgggtattctccctgtagaatag

SEQ ID NO: 3261930 - DNA, 25 bp, Homo sapien
aagccacaaggaacatcagccgaga

SEQ ID NO: 3261931 - DNA, 25 bp, Homo sapien
gagggtggtcccgtggcatatggga

SEQ ID NO: 3261932 - DNA, 25 bp, Homo sapien
tcagccgagagcacgtctgtaacag

SEQ ID NO: 3261933 - DNA, 25 bp, Homo sapien
cacgtctgtaacagtgtgctgggcc

SEQ ID NO: 3261934 - DNA, 25 bp, Homo sapien
ctctcttggagactactagcttctc

SEQ ID NO: 3261935 - DNA, 25 bp, Homo sapien
tctcttggagactactagcttctcc

SEQ ID NO: 3261936 - DNA, 25 bp, Homo sapien
cttggagactactagcttctccctg

SEQ ID NO: 3261937 - DNA, 25 bp, Homo sapien
tcttggagactactagcttctccct

SEQ ID NO: 3261938 - DNA, 25 bp, Homo sapien
catatgtgaggaaatgtgctcggca

SEQ ID NO: 3261939 - DNA, 25 bp, Homo sapien
tcggcattgaccatgcaaacatcca

SEQ ID NO: 3261940 - DNA, 25 bp, Homo sapien
aaatgtgctcggcattgaccatgca

SEQ ID NO: 3261941 - DNA, 25 bp, Homo sapien
tgaggaaatgtgctcggcattgacc

SEQ ID NO: 3261942 - DNA, 25 bp, Homo sapien
ctccttctcctgtgttcccatgcat

SEQ ID NO: 3261943 - DNA, 25 bp, Homo sapien
cccctaaatctagaagtgacttctc

SEQ ID NO: 3261944 - DNA, 25 bp, Homo sapien
cttctccttctcctgtgttcccatg

SEQ ID NO: 3261945 - DNA, 25 bp, Homo sapien
gtgacttctccttctcctgtgttcc

SEQ ID NO: 3261946 - DNA, 25 bp, Homo sapien
ggtggttggcctacttctctgggat

SEQ ID NO: 3261947 - DNA, 25 bp, Homo sapien
atctttggtcaaaacttcttcgcct

SEQ ID NO: 3261948 - DNA, 25 bp, Homo sapien
tacaagccccactagaacattcaca

SEQ ID NO: 3261949 - DNA, 25 bp, Homo sapien
cttcttcgccttttccaggtggttg

SEQ ID NO: 3261950 - DNA, 25 bp, Homo sapien
tctgcggagaaatgggattccattc

SEQ ID NO: 3261951 - DNA, 25 bp, Homo sapien
tctttgagtggactctcaaactgaa

SEQ ID NO: 3261952 - DNA, 25 bp, Homo sapien
ttaggtctgcggagaaatgggattc

SEQ ID NO: 3261953 - DNA, 25 bp, Homo sapien
ggaagagctggaccataaaagttct

SEQ ID NO: 3261954 - DNA, 25 bp, Homo sapien
ctgaagcatggatgaggggagaaag

SEQ ID NO: 3261955 - DNA, 25 bp, Homo sapien
aagcatggatgaggggagaaagtgt

SEQ ID NO: 3261956 - DNA, 25 bp, Homo sapien
tgaagcatggatgaggggagaaagt

SEQ ID NO: 3261957 - DNA, 25 bp, Homo sapien
catggatgaggggagaaagtgtgct

SEQ ID NO: 3261958 - DNA, 25 bp, Homo sapien
tttgacaaattgcaaaccccagagt

SEQ ID NO: 3261959 - DNA, 25 bp, Homo sapien
tctatgggtgtaaaagaggccagcc

SEQ ID NO: 3261960 - DNA, 25 bp, Homo sapien
gcttctctattaatctttgacaaat

SEQ ID NO: 3261961 - DNA, 25 bp, Homo sapien
tgcaaaccccagagtttctatgggt

SEQ ID NO: 3261962 - DNA, 25 bp, Homo sapien
ttgaaaggtttgttgctggaaacca

SEQ ID NO: 3261963 - DNA, 25 bp, Homo sapien
ggtttgttgctggaaaccagaggct

SEQ ID NO: 3261964 - DNA, 25 bp, Homo sapien
tactctccccaagtgagaagaaggc

SEQ ID NO: 3261965 - DNA, 25 bp, Homo sapien
agaggctggagtagcattcttgagc

SEQ ID NO: 3261966 - DNA, 25 bp, Homo sapien
agaggagaggcacgcgatatatgtt

SEQ ID NO: 3261967 - DNA, 25 bp, Homo sapien
gaggcacgcgatatatgttctctag

SEQ ID NO: 3261968 - DNA, 25 bp, Homo sapien
gcacgcgatatatgttctctaggcc

SEQ ID NO: 3261969 - DNA, 25 bp, Homo sapien
aaagaggagaggcacgcgatatatg

SEQ ID NO: 3261970 - DNA, 25 bp, Homo sapien
aagcactctaagagctgagatagct

SEQ ID NO: 3261971 - DNA, 25 bp, Homo sapien
gcattgttgtgaacaaacaagttaa

SEQ ID NO: 3261972 - DNA, 25 bp, Homo sapien
cattaagcactctaagagctgagat

SEQ ID NO: 3261973 - DNA, 25 bp, Homo sapien
cacattaagcactctaagagctgag

SEQ ID NO: 3261974 - DNA, 25 bp, Homo sapien
ttcatggcataataggtgttaaaaa

SEQ ID NO: 3261975 - DNA, 25 bp, Homo sapien
atgaattcatggcataataggtgtt

SEQ ID NO: 3261976 - DNA, 25 bp, Homo sapien
tggcataataggtgttaaaaataaa

SEQ ID NO: 3261977 - DNA, 25 bp, Homo sapien
tgaattcatggcataataggtgtta

SEQ ID NO: 3261978 - DNA, 25 bp, Homo sapien
atcttcaaaagggctatttacactt

SEQ ID NO: 3261979 - DNA, 25 bp, Homo sapien
aatatcttcaaaagggctatttaca

SEQ ID NO: 3261980 - DNA, 25 bp, Homo sapien
gaagattgcaggaaattaggaggaa

SEQ ID NO: 3261981 - DNA, 25 bp, Homo sapien
tgaagattgcaggaaattaggagga

SEQ ID NO: 3261982 - DNA, 25 bp, Homo sapien
actgattggacaggctctttcttgc

SEQ ID NO: 3261983 - DNA, 25 bp, Homo sapien
cctgccttcactgattggacaggct

SEQ ID NO: 3261984 - DNA, 25 bp, Homo sapien
gacaggctctttcttgcaagattct

SEQ ID NO: 3261985 - DNA, 25 bp, Homo sapien
ttcactgattggacaggctctttct

SEQ ID NO: 3261986 - DNA, 25 bp, Homo sapien
tatgaaagcggcgatgtcataaatt

SEQ ID NO: 3261987 - DNA, 25 bp, Homo sapien
attatgaaagcggcgatgtcataaa

SEQ ID NO: 3261988 - DNA, 25 bp, Homo sapien
tgaaagcggcgatgtcataaattgt

SEQ ID NO: 3261989 - DNA, 25 bp, Homo sapien
atgaaagcggcgatgtcataaattg

SEQ ID NO: 3261990 - DNA, 25 bp, Homo sapien
cagatatatggcctcatagtaattc

SEQ ID NO: 3261991 - DNA, 25 bp, Homo sapien
tatatggcctcatagtaattcccat

SEQ ID NO: 3261992 - DNA, 25 bp, Homo sapien
cacgggtaacacaacttcacagata

SEQ ID NO: 3261993 - DNA, 25 bp, Homo sapien
ggctctcctccacgggtaacacaac

SEQ ID NO: 3261994 - DNA, 25 bp, Homo sapien
gggccaattggcttaagtccattta

SEQ ID NO: 3261995 - DNA, 25 bp, Homo sapien
ccgggaactttctctggagctggga

SEQ ID NO: 3261996 - DNA, 25 bp, Homo sapien
tagtaatactagaaccagccgggaa

SEQ ID NO: 3261997 - DNA, 25 bp, Homo sapien
gtaaatactgtgttgatgaggatag

SEQ ID NO: 3261998 - DNA, 25 bp, Homo sapien
tttccagggatgcttatggcacaag

SEQ ID NO: 3261999 - DNA, 25 bp, Homo sapien
tctgaaccattgtttccagggatgc

SEQ ID NO: 3262000 - DNA, 25 bp, Homo sapien
gaaccattgtttccagggatgctta

SEQ ID NO: 3262001 - DNA, 25 bp, Homo sapien
attgtttccagggatgcttatggca

SEQ ID NO: 3262002 - DNA, 25 bp, Homo sapien
caattctccaagccagagctgggca

SEQ ID NO: 3262003 - DNA, 25 bp, Homo sapien
tgggcatctcttctttgtgttcatc

SEQ ID NO: 3262004 - DNA, 25 bp, Homo sapien
attctccaagccagagctgggcatc

SEQ ID NO: 3262005 - DNA, 25 bp, Homo sapien
cttctttgtgttcatctgtgaccat

SEQ ID NO: 3262006 - DNA, 25 bp, Homo sapien
gatgcattaacctgcacttacggta

SEQ ID NO: 3262007 - DNA, 25 bp, Homo sapien
tagcctcggcctatacaggatcacg

SEQ ID NO: 3262008 - DNA, 25 bp, Homo sapien
caggatcacgatcatcaatatatat

SEQ ID NO: 3262009 - DNA, 25 bp, Homo sapien
tgaacggagcttgcaagactggatg

SEQ ID NO: 3262010 - DNA, 25 bp, Homo sapien
aattatgtacctcaagttcatggcc

SEQ ID NO: 3262011 - DNA, 25 bp, Homo sapien
ctctgtgttgagcaaatgacatcca

SEQ ID NO: 3262012 - DNA, 25 bp, Homo sapien
ctggtcatgactatctaaggaaggc

SEQ ID NO: 3262013 - DNA, 25 bp, Homo sapien
taggaatagaacctcactggtcatg

SEQ ID NO: 3262014 - DNA, 25 bp, Homo sapien
ggtttctggaatgtcataaacagca

SEQ ID NO: 3262015 - DNA, 25 bp, Homo sapien
gcttttgtactcataatactctgag

SEQ ID NO: 3262016 - DNA, 25 bp, Homo sapien
cataatactctgagtaggtttctgg

SEQ ID NO: 3262017 - DNA, 25 bp, Homo sapien
cccatagcttttgtactcataatac

SEQ ID NO: 3262018 - DNA, 25 bp, Homo sapien
taaaaagatcattgtcaccatggtg

SEQ ID NO: 3262019 - DNA, 25 bp, Homo sapien
actaaaaagatcattgtcaccatgg

SEQ ID NO: 3262020 - DNA, 25 bp, Homo sapien
ctaaaaagatcattgtcaccatggt

SEQ ID NO: 3262021 - DNA, 25 bp, Homo sapien
tgttgtaggaatccactgtccagtt

SEQ ID NO: 3262022 - DNA, 25 bp, Homo sapien
attgttgttgtaggaatccactgtc

SEQ ID NO: 3262023 - DNA, 25 bp, Homo sapien
cttccaattcctgccattgttgttg

SEQ ID NO: 3262024 - DNA, 25 bp, Homo sapien
attcctgccattgttgttgtaggaa

SEQ ID NO: 3262025 - DNA, 25 bp, Homo sapien
ggtacactcaagatcttttctgtct

SEQ ID NO: 3262026 - DNA, 25 bp, Homo sapien
cagtgctttgcattgggtaagtttc

SEQ ID NO: 3262027 - DNA, 25 bp, Homo sapien
tgctcccaaggtacactcaagatct

SEQ ID NO: 3262028 - DNA, 25 bp, Homo sapien
agagcacaccaagtctaatgctccc

SEQ ID NO: 3262029 - DNA, 25 bp, Homo sapien
ctcatagggagcataatcatcagaa

SEQ ID NO: 3262030 - DNA, 25 bp, Homo sapien
tcagaaggtaaccttcaaacaccac

SEQ ID NO: 3262031 - DNA, 25 bp, Homo sapien
tcctcccttggtccatgtaaagata

SEQ ID NO: 3262032 - DNA, 25 bp, Homo sapien
ggagcataatcatcagaatgctcct

SEQ ID NO: 3262033 - DNA, 25 bp, Homo sapien
attgtttcccaacattaactccaca

SEQ ID NO: 3262034 - DNA, 25 bp, Homo sapien
acattaactccacatatctgtccat

SEQ ID NO: 3262035 - DNA, 25 bp, Homo sapien
cattgtttcccaacattaactccac

SEQ ID NO: 3262036 - DNA, 25 bp, Homo sapien
ttctaccaaacatatcaactctgtc

SEQ ID NO: 3262037 - DNA, 25 bp, Homo sapien
tctaccaaacatatcaactctgtct

SEQ ID NO: 3262038 - DNA, 25 bp, Homo sapien
cacactacactcaaatatgtggttt

SEQ ID NO: 3262039 - DNA, 25 bp, Homo sapien
gtaagtctctcccttggctaccaca

SEQ ID NO: 3262040 - DNA, 25 bp, Homo sapien
ctggtaagtctctcccttggctacc

SEQ ID NO: 3262041 - DNA, 25 bp, Homo sapien
cttggctaccacactacactcaaat

SEQ ID NO: 3262042 - DNA, 25 bp, Homo sapien
ctggctttcttccgcatcattaatc

SEQ ID NO: 3262043 - DNA, 25 bp, Homo sapien
agtgtcagctggctttcttccgcat

SEQ ID NO: 3262044 - DNA, 25 bp, Homo sapien
gtcagctggctttcttccgcatcat

SEQ ID NO: 3262045 - DNA, 25 bp, Homo sapien
tcaaagtgtcagctggctttcttcc

SEQ ID NO: 3262046 - DNA, 25 bp, Homo sapien
ttaagcaagttccttaagttcatat

SEQ ID NO: 3262047 - DNA, 25 bp, Homo sapien
aagcaagttccttaagttcatatag

SEQ ID NO: 3262048 - DNA, 25 bp, Homo sapien
aagttccttaagttcatatagctgc

SEQ ID NO: 3262049 - DNA, 25 bp, Homo sapien
gcaagttccttaagttcatatagct

SEQ ID NO: 3262050 - DNA, 25 bp, Homo sapien
catgggctccactttgttcacctcg

SEQ ID NO: 3262051 - DNA, 25 bp, Homo sapien
aattaacctcagttccagaggcagg

SEQ ID NO: 3262052 - DNA, 25 bp, Homo sapien
tgactgacgctgccacatgggctcc

SEQ ID NO: 3262053 - DNA, 25 bp, Homo sapien
tgcagaatctaagccaatcacagtc

SEQ ID NO: 3262054 - DNA, 25 bp, Homo sapien
tcactacccgttcagctgagctgaa

SEQ ID NO: 3262055 - DNA, 25 bp, Homo sapien
cgtctttcactacccgttcagctga

SEQ ID NO: 3262056 - DNA, 25 bp, Homo sapien
ctttcactacccgttcagctgagct

SEQ ID NO: 3262057 - DNA, 25 bp, Homo sapien
ttacgtctttcactacccgttcagc

SEQ ID NO: 3262058 - DNA, 25 bp, Homo sapien
ctccctatcagaaattgttttgtct

SEQ ID NO: 3262059 - DNA, 25 bp, Homo sapien
cactgatacttctccctatcagaaa

SEQ ID NO: 3262060 - DNA, 25 bp, Homo sapien
atgtgctacctcattgcttaatact

SEQ ID NO: 3262061 - DNA, 25 bp, Homo sapien
acctcattgcttaatactgcttttc

SEQ ID NO: 3262062 - DNA, 25 bp, Homo sapien
gacacgcggtatagtattgcatcct

SEQ ID NO: 3262063 - DNA, 25 bp, Homo sapien
tcatatttacgggagggcttcaaaa

SEQ ID NO: 3262064 - DNA, 25 bp, Homo sapien
tccttaacagcctcatatttacggg

SEQ ID NO: 3262065 - DNA, 25 bp, Homo sapien
tgcttggtgatgattatagttaagc

SEQ ID NO: 3262066 - DNA, 25 bp, Homo sapien
tagtttttggctggagtgtccctac

SEQ ID NO: 3262067 - DNA, 25 bp, Homo sapien
tctccaaagaaggtttatgaaatcc

SEQ ID NO: 3262068 - DNA, 25 bp, Homo sapien
ccattaaggctgttaggtctgacca

SEQ ID NO: 3262069 - DNA, 25 bp, Homo sapien
taaacaaattcttgctgaaccagaa

SEQ ID NO: 3262070 - DNA, 25 bp, Homo sapien
tagtcacaacgttcttgagatacag

SEQ ID NO: 3262071 - DNA, 25 bp, Homo sapien
ccagtggtctcctgagccttgtagt

SEQ ID NO: 3262072 - DNA, 25 bp, Homo sapien
ctgagccttgtagtcacaacgttct

SEQ ID NO: 3262073 - DNA, 25 bp, Homo sapien
tgcaccagtggtctcctgagccttg

SEQ ID NO: 3262074 - DNA, 25 bp, Homo sapien
cattgcttgaccctctggagaacct

SEQ ID NO: 3262075 - DNA, 25 bp, Homo sapien
tcattgcttgaccctctggagaacc

SEQ ID NO: 3262076 - DNA, 25 bp, Homo sapien
ttcattgcttgaccctctggagaac

SEQ ID NO: 3262077 - DNA, 25 bp, Homo sapien
taaggcatacttgtgagtgcatccc

SEQ ID NO: 3262078 - DNA, 25 bp, Homo sapien
gcttcacctccagagtaaggcatac

SEQ ID NO: 3262079 - DNA, 25 bp, Homo sapien
tccatgtcagcgcacatttggttga

SEQ ID NO: 3262080 - DNA, 25 bp, Homo sapien
ggttgatcaggatgttcccttctgc

SEQ ID NO: 3262081 - DNA, 25 bp, Homo sapien
ttggtgtgccatacccccatagata

SEQ ID NO: 3262082 - DNA, 25 bp, Homo sapien
aaagctgagactccactcatcctga

SEQ ID NO: 3262083 - DNA, 25 bp, Homo sapien
tctctcaagaaacaaagtgtcacag

SEQ ID NO: 3262084 - DNA, 25 bp, Homo sapien
taaaattggtgtgccatacccccat

SEQ ID NO: 3262085 - DNA, 25 bp, Homo sapien
tgctgtcagtgacatgcactgatta

SEQ ID NO: 3262086 - DNA, 25 bp, Homo sapien
tcattaaatgctgtcagtgacatgc

SEQ ID NO: 3262087 - DNA, 25 bp, Homo sapien
taaatgctgtcagtgacatgcactg

SEQ ID NO: 3262088 - DNA, 25 bp, Homo sapien
gctgtcagtgacatgcactgattat

SEQ ID NO: 3262089 - DNA, 25 bp, Homo sapien
tgaagctggcaaaaagatggccgct

SEQ ID NO: 3262090 - DNA, 25 bp, Homo sapien
attcagtcaagaccccatacacttg

SEQ ID NO: 3262091 - DNA, 25 bp, Homo sapien
tatcattctgctctgctaccctcag

SEQ ID NO: 3262092 - DNA, 25 bp, Homo sapien
ggccgctggcctcgcattcagtcaa

SEQ ID NO: 3262093 - DNA, 25 bp, Homo sapien
aacaacctgcctgagttcgaggaac

SEQ ID NO: 3262094 - DNA, 25 bp, Homo sapien
caaacccatagccagaaaggaaagg

SEQ ID NO: 3262095 - DNA, 25 bp, Homo sapien
taagaagtcaatacagggtagggct

SEQ ID NO: 3262096 - DNA, 25 bp, Homo sapien
gaacacagttgatgcatctcatgaa

SEQ ID NO: 3262097 - DNA, 25 bp, Homo sapien
tctgggtggggttgtcctggctgag

SEQ ID NO: 3262098 - DNA, 25 bp, Homo sapien
acactgtacctcttgacctctgggt

SEQ ID NO: 3262099 - DNA, 25 bp, Homo sapien
tggggttgtcctggctgagtttgtc

SEQ ID NO: 3262100 - DNA, 25 bp, Homo sapien
ctacactgtacctcttgacctctgg

SEQ ID NO: 3262101 - DNA, 25 bp, Homo sapien
tatagcattgactcttgcttcctct

SEQ ID NO: 3262102 - DNA, 25 bp, Homo sapien
gcttcctcttgatcgtgtagtacat

SEQ ID NO: 3262103 - DNA, 25 bp, Homo sapien
tgaatagtatagcattgactcttgc

SEQ ID NO: 3262104 - DNA, 25 bp, Homo sapien
tccaagaagctgtattgaatagtat

SEQ ID NO: 3262105 - DNA, 25 bp, Homo sapien
gagtacaggcccaatttcatgctta

SEQ ID NO: 3262106 - DNA, 25 bp, Homo sapien
agaagcaaaagttccagaagggagt

SEQ ID NO: 3262107 - DNA, 25 bp, Homo sapien
ggagtacaggcccaatttcatgctt

SEQ ID NO: 3262108 - DNA, 25 bp, Homo sapien
agttccagaagggagtacaggccca

SEQ ID NO: 3262109 - DNA, 25 bp, Homo sapien
attgtagacaacacaacaatgttga

SEQ ID NO: 3262110 - DNA, 25 bp, Homo sapien
ttgtagacaacacaacaatgttgaa

SEQ ID NO: 3262111 - DNA, 25 bp, Homo sapien
tataagaatcacaaaattgtagaca

SEQ ID NO: 3262112 - DNA, 25 bp, Homo sapien
catgtagtcattctctttgcctcct

SEQ ID NO: 3262113 - DNA, 25 bp, Homo sapien
cttctgaaaatctgatcagtcttct

SEQ ID NO: 3262114 - DNA, 25 bp, Homo sapien
gaaaatctgatcagtcttcttgttt

SEQ ID NO: 3262115 - DNA, 25 bp, Homo sapien
ctttatgctctttttcatgtagtca

SEQ ID NO: 3262116 - DNA, 25 bp, Homo sapien
gcaatgatgtgttttgtctgggaac

SEQ ID NO: 3262117 - DNA, 25 bp, Homo sapien
ctggtgagatttcagaactgttgtg

SEQ ID NO: 3262118 - DNA, 25 bp, Homo sapien
ggtgagatttcagaactgttgtgaa

SEQ ID NO: 3262119 - DNA, 25 bp, Homo sapien
gtgagatttcagaactgttgtgaat

SEQ ID NO: 3262120 - DNA, 25 bp, Homo sapien
tggtgagatttcagaactgttgtga

SEQ ID NO: 3262121 - DNA, 25 bp, Homo sapien
tcaagcctgtttggaaattgttcaa

SEQ ID NO: 3262122 - DNA, 25 bp, Homo sapien
tattttttcgtactggctataccac

SEQ ID NO: 3262123 - DNA, 25 bp, Homo sapien
agaccagcttttttgctcagcatag

SEQ ID NO: 3262124 - DNA, 25 bp, Homo sapien
ggtccttaacttgtatgaatctcag

SEQ ID NO: 3262125 - DNA, 25 bp, Homo sapien
taatgtttctgaagcctgcaaggcc

SEQ ID NO: 3262126 - DNA, 25 bp, Homo sapien
ggatattggctatagtggattccac

SEQ ID NO: 3262127 - DNA, 25 bp, Homo sapien
tcagaaattcatatgggagcaaaat

SEQ ID NO: 3262128 - DNA, 25 bp, Homo sapien
caggtcaggatttatggagacctca

SEQ ID NO: 3262129 - DNA, 25 bp, Homo sapien
ttccttccagacaagcgagacttgg

SEQ ID NO: 3262130 - DNA, 25 bp, Homo sapien
tagacacttgccaggggctccggag

SEQ ID NO: 3262131 - DNA, 25 bp, Homo sapien
tccggagtcggcagagccaccgagt

SEQ ID NO: 3262132 - DNA, 25 bp, Homo sapien
tgctgcgtccgtcctattgtttaga

SEQ ID NO: 3262133 - DNA, 25 bp, Homo sapien
ggccaggaaagcagcgggagagggg

SEQ ID NO: 3262134 - DNA, 25 bp, Homo sapien
gccgccgcgtcaggtgcagcgccag

SEQ ID NO: 3262135 - DNA, 25 bp, Homo sapien
acgccggcaggggtaccgccactgt

SEQ ID NO: 3262136 - DNA, 25 bp, Homo sapien
ggccgccgcgtcaggtgcagcgcca

SEQ ID NO: 3262137 - DNA, 25 bp, Homo sapien
agccgggcggcgtcgccacgccggc

SEQ ID NO: 3262138 - DNA, 25 bp, Homo sapien
cctgggaaaagttgctgcactttga

SEQ ID NO: 3262139 - DNA, 25 bp, Homo sapien
gctgcactttgagaaggacgaacca

SEQ ID NO: 3262140 - DNA, 25 bp, Homo sapien
gaattcaaagcctgggaaaagttgc

SEQ ID NO: 3262141 - DNA, 25 bp, Homo sapien
cttgggggacggaattcaaagcctg

SEQ ID NO: 3262142 - DNA, 25 bp, Homo sapien
gcgcgcacacactactgccattcag

SEQ ID NO: 3262143 - DNA, 25 bp, Homo sapien
gctctgcctggagtagtggatccca

SEQ ID NO: 3262144 - DNA, 25 bp, Homo sapien
ccatcaggtgtctgccgcggagctg

SEQ ID NO: 3262145 - DNA, 25 bp, Homo sapien
tgcggcttatctgggagacgagcgg

SEQ ID NO: 3262146 - DNA, 25 bp, Homo sapien
ctgccaccgagccattctccagtac

SEQ ID NO: 3262147 - DNA, 25 bp, Homo sapien
accgagccattctccagtacgcccc

SEQ ID NO: 3262148 - DNA, 25 bp, Homo sapien
cgagccattctccagtacgccccag

SEQ ID NO: 3262149 - DNA, 25 bp, Homo sapien
cattctccagtacgccccagcagga

SEQ ID NO: 3262150 - DNA, 25 bp, Homo sapien
tgcggcggcccgactgcccttttgt

SEQ ID NO: 3262151 - DNA, 25 bp, Homo sapien
tcctcgccggagtgctgactagtgg

SEQ ID NO: 3262152 - DNA, 25 bp, Homo sapien
tttgtcttttctgcgtgacctcggg

SEQ ID NO: 3262153 - DNA, 25 bp, Homo sapien
tagtggatatttctgcccggctgcg

SEQ ID NO: 3262154 - DNA, 25 bp, Homo sapien
gacgccgagcgggaggcgggattgc

SEQ ID NO: 3262155 - DNA, 25 bp, Homo sapien
ctggtgcagagcgtcgccaaggacg

SEQ ID NO: 3262156 - DNA, 25 bp, Homo sapien
gcagagcgtcgccaaggacgccgag

SEQ ID NO: 3262157 - DNA, 25 bp, Homo sapien
gcgggaggcgggattgcccagacat

SEQ ID NO: 3262158 - DNA, 25 bp, Homo sapien
gcttccgcgccttctagcttccgga

SEQ ID NO: 3262159 - DNA, 25 bp, Homo sapien
aggccgcgtgagtgagcagagtcca

SEQ ID NO: 3262160 - DNA, 25 bp, Homo sapien
aaccatcgttggctgtcgggagacc

SEQ ID NO: 3262161 - DNA, 25 bp, Homo sapien
gcttccggagcccactttgatcggg

SEQ ID NO: 3262162 - DNA, 25 bp, Homo sapien
ccagagtccataaacggagtcacct

SEQ ID NO: 3262163 - DNA, 25 bp, Homo sapien
ttgccagcatccaggtcggtttcag

SEQ ID NO: 3262164 - DNA, 25 bp, Homo sapien
caggtcggtttcagagcccagtcct

SEQ ID NO: 3262165 - DNA, 25 bp, Homo sapien
cggagtcaccttgcgattgccagca

SEQ ID NO: 3262166 - DNA, 25 bp, Homo sapien
agaagtaaatgcagacccggtgttg

SEQ ID NO: 3262167 - DNA, 25 bp, Homo sapien
gcctccctgtctttgcgagtctcta

SEQ ID NO: 3262168 - DNA, 25 bp, Homo sapien
aatgcagacccggtgttgacggccc

SEQ ID NO: 3262169 - DNA, 25 bp, Homo sapien
gcgctccgttgctcgcagacgtccc

SEQ ID NO: 3262170 - DNA, 25 bp, Homo sapien
ccagctgttggccaagagcaaatat

SEQ ID NO: 3262171 - DNA, 25 bp, Homo sapien
ttgtttacaactgccaaatccatct

SEQ ID NO: 3262172 - DNA, 25 bp, Homo sapien
gaagcacattgttatctgacagcca

SEQ ID NO: 3262173 - DNA, 25 bp, Homo sapien
gcaggacttctttaaatcaccccag

SEQ ID NO: 3262174 - DNA, 25 bp, Homo sapien
ggatgccgtgtcctttatacctccc

SEQ ID NO: 3262175 - DNA, 25 bp, Homo sapien
gaaggcccgtttgctctttgtcgac

SEQ ID NO: 3262176 - DNA, 25 bp, Homo sapien
tccctgtgcgctgttacaagtttag

SEQ ID NO: 3262177 - DNA, 25 bp, Homo sapien
cattgaatccatctgagagaatttc

SEQ ID NO: 3262178 - DNA, 25 bp, Homo sapien
cttgaattgtgtcttctagactgaa

SEQ ID NO: 3262179 - DNA, 25 bp, Homo sapien
gagtagtttagtttgcactgttaca

SEQ ID NO: 3262180 - DNA, 25 bp, Homo sapien
gcttgaattgtgtcttctagactga

SEQ ID NO: 3262181 - DNA, 25 bp, Homo sapien
ctgaaatgagtagtttagtttgcac

SEQ ID NO: 3262182 - DNA, 25 bp, Homo sapien
ttgtgcaataccaccttgtcttatc

SEQ ID NO: 3262183 - DNA, 25 bp, Homo sapien
cctttttgtgcaataccaccttgtc

SEQ ID NO: 3262184 - DNA, 25 bp, Homo sapien
ctgtcctttttgtgcaataccacct

SEQ ID NO: 3262185 - DNA, 25 bp, Homo sapien
ttttgtgcaataccaccttgtctta

SEQ ID NO: 3262186 - DNA, 25 bp, Homo sapien
tcttgggactgcgaagctatacagg

SEQ ID NO: 3262187 - DNA, 25 bp, Homo sapien
gctgtttcttgggactgcgaagcta

SEQ ID NO: 3262188 - DNA, 25 bp, Homo sapien
tttcttgggactgcgaagctataca

SEQ ID NO: 3262189 - DNA, 25 bp, Homo sapien
tgtttcttgggactgcgaagctata

SEQ ID NO: 3262190 - DNA, 25 bp, Homo sapien
gatgccaagtagctcacctgaaaca

SEQ ID NO: 3262191 - DNA, 25 bp, Homo sapien
caaaggaacacgtgcttgtgaagct

SEQ ID NO: 3262192 - DNA, 25 bp, Homo sapien
ttgtgaagctcactactggctagtg

SEQ ID NO: 3262193 - DNA, 25 bp, Homo sapien
gaaacaaatattctagcagatggga

SEQ ID NO: 3262194 - DNA, 25 bp, Homo sapien
tatccagtccattaacagaactctg

SEQ ID NO: 3262195 - DNA, 25 bp, Homo sapien
taaaattacaagcacttgttgacag

SEQ ID NO: 3262196 - DNA, 25 bp, Homo sapien
ccaactctgcataaactacaggaca

SEQ ID NO: 3262197 - DNA, 25 bp, Homo sapien
aataataccaactctgcataaacta

SEQ ID NO: 3262198 - DNA, 25 bp, Homo sapien
ataggttttgactgcttaatttcat

SEQ ID NO: 3262199 - DNA, 25 bp, Homo sapien
ggttttgactgcttaatttcattgg

SEQ ID NO: 3262200 - DNA, 25 bp, Homo sapien
aggttttgactgcttaatttcattg

SEQ ID NO: 3262201 - DNA, 25 bp, Homo sapien
taggttttgactgcttaatttcatt

SEQ ID NO: 3262202 - DNA, 25 bp, Homo sapien
ttggcccctgccacaataaatccga

SEQ ID NO: 3262203 - DNA, 25 bp, Homo sapien
taaagtgtggactactagagatgtc

SEQ ID NO: 3262204 - DNA, 25 bp, Homo sapien
gatgtcaggtgccatcgtttcctgc

SEQ ID NO: 3262205 - DNA, 25 bp, Homo sapien
tctcataggtttcttggagtcaacc

SEQ ID NO: 3262206 - DNA, 25 bp, Homo sapien
aacagccatcagtgtgccttgtgct

SEQ ID NO: 3262207 - DNA, 25 bp, Homo sapien
cagccatcagtgtgccttgtgcttc

SEQ ID NO: 3262208 - DNA, 25 bp, Homo sapien
ccatcagtgtgccttgtgcttcctg

SEQ ID NO: 3262209 - DNA, 25 bp, Homo sapien
aaaacagccatcagtgtgccttgtg

SEQ ID NO: 3262210 - DNA, 25 bp, Homo sapien
tttaatacaggttcactctttggat

SEQ ID NO: 3262211 - DNA, 25 bp, Homo sapien
ttaatacaggttcactctttggatt

SEQ ID NO: 3262212 - DNA, 25 bp, Homo sapien
aattttaggcgtgggccatggtgcc

SEQ ID NO: 3262213 - DNA, 25 bp, Homo sapien
ggtgccaggcctgaactcaatattt

SEQ ID NO: 3262214 - DNA, 25 bp, Homo sapien
aaaatcacataatcgatgtaacaag

SEQ ID NO: 3262215 - DNA, 25 bp, Homo sapien
catttttgtgttcgaaagtcagtgt

SEQ ID NO: 3262216 - DNA, 25 bp, Homo sapien
ttaaacaatcatcggcctctgccat

SEQ ID NO: 3262217 - DNA, 25 bp, Homo sapien
attgttgatcccctcagtagatgca

SEQ ID NO: 3262218 - DNA, 25 bp, Homo sapien
caatgtaatccactttggtaatgtg

SEQ ID NO: 3262219 - DNA, 25 bp, Homo sapien
cctcagtagatgcaatgtaatccac

SEQ ID NO: 3262220 - DNA, 25 bp, Homo sapien
taaacaaaagatctgtcaccaagct

SEQ ID NO: 3262221 - DNA, 25 bp, Homo sapien
gtagagaggactttactgcaactcc

SEQ ID NO: 3262222 - DNA, 25 bp, Homo sapien
gaattagatacagtccttgcccagt

SEQ ID NO: 3262223 - DNA, 25 bp, Homo sapien
ttgcaatgtgctgtacctaacatag

SEQ ID NO: 3262224 - DNA, 25 bp, Homo sapien
tcaggactcttctgattttagagtc

SEQ ID NO: 3262225 - DNA, 25 bp, Homo sapien
ggactcttctgattttagagtcaga

SEQ ID NO: 3262226 - DNA, 25 bp, Homo sapien
gaggcagtgctggactggctttggg

SEQ ID NO: 3262227 - DNA, 25 bp, Homo sapien
gtgctggactggctttgggccagca

SEQ ID NO: 3262228 - DNA, 25 bp, Homo sapien
gcatttgtcatgttctcgtcactga

SEQ ID NO: 3262229 - DNA, 25 bp, Homo sapien
cctcttgtctaagattgtgttccag

SEQ ID NO: 3262230 - DNA, 25 bp, Homo sapien
tatccccactactccctttactcat

SEQ ID NO: 3262231 - DNA, 25 bp, Homo sapien
tgaatctgatagtctcttcagccac

SEQ ID NO: 3262232 - DNA, 25 bp, Homo sapien
cctgttttgtcacttaatggaagga

SEQ ID NO: 3262233 - DNA, 25 bp, Homo sapien
tgtgtagggtgatacagtgtaactt

SEQ ID NO: 3262234 - DNA, 25 bp, Homo sapien
ttccaggtgtgtagggtgatacagt

SEQ ID NO: 3262235 - DNA, 25 bp, Homo sapien
gtagggtgatacagtgtaactttcc

SEQ ID NO: 3262236 - DNA, 25 bp, Homo sapien
caagttatattccaggtgtgtaggg

SEQ ID NO: 3262237 - DNA, 25 bp, Homo sapien
actgctctctattgttgtctttctc

SEQ ID NO: 3262238 - DNA, 25 bp, Homo sapien
ttagaaggtaatttgtggtcagtgg

SEQ ID NO: 3262239 - DNA, 25 bp, Homo sapien
atttattaactgctctctattgttg

SEQ ID NO: 3262240 - DNA, 25 bp, Homo sapien
aggtaatttgtggtcagtggagccc

SEQ ID NO: 3262241 - DNA, 25 bp, Homo sapien
cctgaggtgggatccattcagtcca

SEQ ID NO: 3262242 - DNA, 25 bp, Homo sapien
gaagcaggttgattctggccggcaa

SEQ ID NO: 3262243 - DNA, 25 bp, Homo sapien
ggctttgaggatggttgcctctttt

SEQ ID NO: 3262244 - DNA, 25 bp, Homo sapien
ggcccctatctttgccatcagtgtt

SEQ ID NO: 3262245 - DNA, 25 bp, Homo sapien
tctttattgggatagccagcagtgc

SEQ ID NO: 3262246 - DNA, 25 bp, Homo sapien
ttggtgatcacagagactgagggca

SEQ ID NO: 3262247 - DNA, 25 bp, Homo sapien
gcttgtcaagctgaactgcgtgggt

SEQ ID NO: 3262248 - DNA, 25 bp, Homo sapien
tgtgagccacgtgcattaacactgg

SEQ ID NO: 3262249 - DNA, 25 bp, Homo sapien
tgctgaaggttcaaatgcataggca

SEQ ID NO: 3262250 - DNA, 25 bp, Homo sapien
ctgaaggttcaaatgcataggcagg

SEQ ID NO: 3262251 - DNA, 25 bp, Homo sapien
gctgaaggttcaaatgcataggcag

SEQ ID NO: 3262252 - DNA, 25 bp, Homo sapien
catgtctctctgtgagagacaaagc

SEQ ID NO: 3262253 - DNA, 25 bp, Homo sapien
tctctgtgagagacaaagcttgtga

SEQ ID NO: 3262254 - DNA, 25 bp, Homo sapien
cctttttaactatctggcttcctgc

SEQ ID NO: 3262255 - DNA, 25 bp, Homo sapien
aaacatgctgattctgaccccttca

SEQ ID NO: 3262256 - DNA, 25 bp, Homo sapien
cgggttcctgactttggcttgcaga

SEQ ID NO: 3262257 - DNA, 25 bp, Homo sapien
tctctgtgcaagcactctataccat

SEQ ID NO: 3262258 - DNA, 25 bp, Homo sapien
tgacatcgggttcctgactttggct

SEQ ID NO: 3262259 - DNA, 25 bp, Homo sapien
atttggtttgacatcgggttcctga

SEQ ID NO: 3262260 - DNA, 25 bp, Homo sapien
gagagctgattcacgatgagttcct

SEQ ID NO: 3262261 - DNA, 25 bp, Homo sapien
gctgattcacgatgagttcctctgt

SEQ ID NO: 3262262 - DNA, 25 bp, Homo sapien
tgcagtggagagagctgattcacga

SEQ ID NO: 3262263 - DNA, 25 bp, Homo sapien
tggagagagctgattcacgatgagt

SEQ ID NO: 3262264 - DNA, 25 bp, Homo sapien
cttcggtgaactggctagagctgct

SEQ ID NO: 3262265 - DNA, 25 bp, Homo sapien
ggctggtcgaggtccgctgtaacat

SEQ ID NO: 3262266 - DNA, 25 bp, Homo sapien
cagtaatagacagcaggaggcagtg

SEQ ID NO: 3262267 - DNA, 25 bp, Homo sapien
tagcgtcaccctcttcgttaaaatg

SEQ ID NO: 3262268 - DNA, 25 bp, Homo sapien
ccaccagaggtgtgaagcaaagtga

SEQ ID NO: 3262269 - DNA, 25 bp, Homo sapien
ccagatgaaagccactagaagctgt

SEQ ID NO: 3262270 - DNA, 25 bp, Homo sapien
tctgcctaatgaactaccgagtgac

SEQ ID NO: 3262271 - DNA, 25 bp, Homo sapien
tcctgttccaagtgcataaatgctg

SEQ ID NO: 3262272 - DNA, 25 bp, Homo sapien
aaggctgtgatggcccttggggttt

SEQ ID NO: 3262273 - DNA, 25 bp, Homo sapien
tctttctgagttaaggctgtgatgg

SEQ ID NO: 3262274 - DNA, 25 bp, Homo sapien
ctttctgagttaaggctgtgatggc

SEQ ID NO: 3262275 - DNA, 25 bp, Homo sapien
gtctttctgagttaaggctgtgatg

SEQ ID NO: 3262276 - DNA, 25 bp, Homo sapien
cctctcctgtgttgccttgatacca

SEQ ID NO: 3262277 - DNA, 25 bp, Homo sapien
caccatgatacaaagactttaatct

SEQ ID NO: 3262278 - DNA, 25 bp, Homo sapien
atgtatgcagcgtgtagttcagttc

SEQ ID NO: 3262279 - DNA, 25 bp, Homo sapien
tgatccgttcattgagctgtagtct

SEQ ID NO: 3262280 - DNA, 25 bp, Homo sapien
tcttgtcttcaatcctaactctcca

SEQ ID NO: 3262281 - DNA, 25 bp, Homo sapien
ctccaaaatcctgtgcattgttagc

SEQ ID NO: 3262282 - DNA, 25 bp, Homo sapien
gcattgttagcatgctcctcttttc

SEQ ID NO: 3262283 - DNA, 25 bp, Homo sapien
caatcctaactctccaaaatcctgt

SEQ ID NO: 3262284 - DNA, 25 bp, Homo sapien
tattttacattacaccttagcacac

SEQ ID NO: 3262285 - DNA, 25 bp, Homo sapien
taagtacatcctattatccatgtct

SEQ ID NO: 3262286 - DNA, 25 bp, Homo sapien
tattttctcagtgctacataaccca

SEQ ID NO: 3262287 - DNA, 25 bp, Homo sapien
tagaccaatgagtcatgagaaatac

SEQ ID NO: 3262288 - DNA, 25 bp, Homo sapien
gatctgggttccatttacgagagga

SEQ ID NO: 3262289 - DNA, 25 bp, Homo sapien
gaggatctgggttccatttacgaga

SEQ ID NO: 3262290 - DNA, 25 bp, Homo sapien
ggttccatttacgagaggaaatgaa

SEQ ID NO: 3262291 - DNA, 25 bp, Homo sapien
tctgggttccatttacgagaggaaa

SEQ ID NO: 3262292 - DNA, 25 bp, Homo sapien
tgttgaccttgacatctgatcactg

SEQ ID NO: 3262293 - DNA, 25 bp, Homo sapien
tgcaacatgtcctcacagaaacgaa

SEQ ID NO: 3262294 - DNA, 25 bp, Homo sapien
aacgaaatggtgtgtagcaatcaac

SEQ ID NO: 3262295 - DNA, 25 bp, Homo sapien
ccagggtgccctgtaaagatgcaga

SEQ ID NO: 3262296 - DNA, 25 bp, Homo sapien
tcggccttcagtatgtgctcttaga

SEQ ID NO: 3262297 - DNA, 25 bp, Homo sapien
cagtatgtgctcttagattgacaaa

SEQ ID NO: 3262298 - DNA, 25 bp, Homo sapien
atagtggtctcaaatcggccttcag

SEQ ID NO: 3262299 - DNA, 25 bp, Homo sapien
tctcaaatcggccttcagtatgtgc

SEQ ID NO: 3262300 - DNA, 25 bp, Homo sapien
catcccttacataagcttgttgatc

SEQ ID NO: 3262301 - DNA, 25 bp, Homo sapien
agtggatgtaaaaagcagaagccag

SEQ ID NO: 3262302 - DNA, 25 bp, Homo sapien
tgttgatcagtggatgtaaaaagca

SEQ ID NO: 3262303 - DNA, 25 bp, Homo sapien
taagcttgttgatcagtggatgtaa

SEQ ID NO: 3262304 - DNA, 25 bp, Homo sapien
caaatggagttctccattgccttcc

SEQ ID NO: 3262305 - DNA, 25 bp, Homo sapien
ctccattgccttcctcctcttcccc

SEQ ID NO: 3262306 - DNA, 25 bp, Homo sapien
attgccttcctcctcttcccctcac

SEQ ID NO: 3262307 - DNA, 25 bp, Homo sapien
tccattgccttcctcctcttcccct

SEQ ID NO: 3262308 - DNA, 25 bp, Homo sapien
cagaggcatcaccatcggcattggg

SEQ ID NO: 3262309 - DNA, 25 bp, Homo sapien
gggctttgtccagagatattaaatt

SEQ ID NO: 3262310 - DNA, 25 bp, Homo sapien
caccatcggcattgggaattagctt

SEQ ID NO: 3262311 - DNA, 25 bp, Homo sapien
gatattaaattcagctgagcagagg

SEQ ID NO: 3262312 - DNA, 25 bp, Homo sapien
ttgctaagatagtcacaaggacagg

SEQ ID NO: 3262313 - DNA, 25 bp, Homo sapien
cattgctaagatagtcacaaggaca

SEQ ID NO: 3262314 - DNA, 25 bp, Homo sapien
ttccattgctaagatagtcacaagg

SEQ ID NO: 3262315 - DNA, 25 bp, Homo sapien
ccattgctaagatagtcacaaggac

SEQ ID NO: 3262316 - DNA, 25 bp, Homo sapien
ggtaacatgtgtttccacggaggaa

SEQ ID NO: 3262317 - DNA, 25 bp, Homo sapien
cagtctaggaaggagcatagtcctc

SEQ ID NO: 3262318 - DNA, 25 bp, Homo sapien
caaggtgccacaaaactgtagttcc

SEQ ID NO: 3262319 - DNA, 25 bp, Homo sapien
caccaactgttagaggactgagatc

SEQ ID NO: 3262320 - DNA, 25 bp, Homo sapien
gtcccgcaggccaagtgggtgacac

SEQ ID NO: 3262321 - DNA, 25 bp, Homo sapien
gacaggttgtattgtgggctcccca

SEQ ID NO: 3262322 - DNA, 25 bp, Homo sapien
tatagaggtctgcataagcgaagtg

SEQ ID NO: 3262323 - DNA, 25 bp, Homo sapien
gacacaaatgaccttgggcgtgagg

SEQ ID NO: 3262324 - DNA, 25 bp, Homo sapien
tctctatgcggccatcccatgaaca

SEQ ID NO: 3262325 - DNA, 25 bp, Homo sapien
atgcggccatcccatgaacagtcac

SEQ ID NO: 3262326 - DNA, 25 bp, Homo sapien
tctatgcggccatcccatgaacagt

SEQ ID NO: 3262327 - DNA, 25 bp, Homo sapien
tcatttctctatgcggccatcccat

SEQ ID NO: 3262328 - DNA, 25 bp, Homo sapien
tcacagcgcgcagagctattcatca

SEQ ID NO: 3262329 - DNA, 25 bp, Homo sapien
taagtcattgcttcttcccatccgg

SEQ ID NO: 3262330 - DNA, 25 bp, Homo sapien
caaagtctggctggtgaattcctca

SEQ ID NO: 3262331 - DNA, 25 bp, Homo sapien
gaattcctcagggtcgctctcacag

SEQ ID NO: 3262332 - DNA, 25 bp, Homo sapien
gatggcaaagatttgctccctcatg

SEQ ID NO: 3262333 - DNA, 25 bp, Homo sapien
ctccctcatgtgagtaggaagaatg

SEQ ID NO: 3262334 - DNA, 25 bp, Homo sapien
caacatttctgggtgatggcaaaga

SEQ ID NO: 3262335 - DNA, 25 bp, Homo sapien
gatttgctccctcatgtgagtagga

SEQ ID NO: 3262336 - DNA, 25 bp, Homo sapien
tgtctggtggcttgttggcaatatt

SEQ ID NO: 3262337 - DNA, 25 bp, Homo sapien
accagaagtctgatatgaaggagtt

SEQ ID NO: 3262338 - DNA, 25 bp, Homo sapien
cgatctcacatggtgttagctgcac

SEQ ID NO: 3262339 - DNA, 25 bp, Homo sapien
gcttctgctgtatcaaccgatctca

SEQ ID NO: 3262340 - DNA, 25 bp, Homo sapien
aaagttggcatcaattctataaaat

SEQ ID NO: 3262341 - DNA, 25 bp, Homo sapien
catttgctttcacctgaggagccat

SEQ ID NO: 3262342 - DNA, 25 bp, Homo sapien
ttatatgctcactcatgttgatttc

SEQ ID NO: 3262343 - DNA, 25 bp, Homo sapien
tgatttcatttgctttcacctgagg

SEQ ID NO: 3262344 - DNA, 25 bp, Homo sapien
ctcactcatgttgatttcatttgct

SEQ ID NO: 3262345 - DNA, 25 bp, Homo sapien
caacagaaattgatttctcatggtt

SEQ ID NO: 3262346 - DNA, 25 bp, Homo sapien
acagaaattgatttctcatggttct

SEQ ID NO: 3262347 - DNA, 25 bp, Homo sapien
aacagaaattgatttctcatggttc

SEQ ID NO: 3262348 - DNA, 25 bp, Homo sapien
cttataaacaacagaaattgatttc

SEQ ID NO: 3262349 - DNA, 25 bp, Homo sapien
ctcaccgcaagcctcaaatttttgt

SEQ ID NO: 3262350 - DNA, 25 bp, Homo sapien
tatttgtgcgaagaaccattattga

SEQ ID NO: 3262351 - DNA, 25 bp, Homo sapien
tactaggttaagatgaatagacact

SEQ ID NO: 3262352 - DNA, 25 bp, Homo sapien
cagtttgtagctgtgcccttatttt

SEQ ID NO: 3262353 - DNA, 25 bp, Homo sapien
actggtgatagcagggcagctttca

SEQ ID NO: 3262354 - DNA, 25 bp, Homo sapien
gtactactcttaatttctacactgg

SEQ ID NO: 3262355 - DNA, 25 bp, Homo sapien
tctctacaccagaatagatacctga

SEQ ID NO: 3262356 - DNA, 25 bp, Homo sapien
gagtttacacaaacacgtgatggca

SEQ ID NO: 3262357 - DNA, 25 bp, Homo sapien
ccttctgtagcctcttggtctttgt

SEQ ID NO: 3262358 - DNA, 25 bp, Homo sapien
ttattgttgcaaagacagttgcaaa

SEQ ID NO: 3262359 - DNA, 25 bp, Homo sapien
ctgtagcctcttggtctttgtgata

SEQ ID NO: 3262360 - DNA, 25 bp, Homo sapien
tattgttgcaaagacagttgcaaat

SEQ ID NO: 3262361 - DNA, 25 bp, Homo sapien
tcaatgtaatggaaccactggtgct

SEQ ID NO: 3262362 - DNA, 25 bp, Homo sapien
aaaacagggacgatgtgtgtggctt

SEQ ID NO: 3262363 - DNA, 25 bp, Homo sapien
taaacatgctgtaaggaagtcaggg

SEQ ID NO: 3262364 - DNA, 25 bp, Homo sapien
tactggaggatagatatcctgaccc

SEQ ID NO: 3262365 - DNA, 25 bp, Homo sapien
tgaaatgagttagaccatcccctga

SEQ ID NO: 3262366 - DNA, 25 bp, Homo sapien
agtggtagctccaactttaagggtg

SEQ ID NO: 3262367 - DNA, 25 bp, Homo sapien
cagtgtcaagctgagcaatctatgc

SEQ ID NO: 3262368 - DNA, 25 bp, Homo sapien
tcaataatcccatggctaaggaacc

SEQ ID NO: 3262369 - DNA, 25 bp, Homo sapien
ctgcatggagcgcattatgttttca

SEQ ID NO: 3262370 - DNA, 25 bp, Homo sapien
tgcatggagcgcattatgttttcat

SEQ ID NO: 3262371 - DNA, 25 bp, Homo sapien
gaaacacagagcgattaaattcagc

SEQ ID NO: 3262372 - DNA, 25 bp, Homo sapien
tcagcatatctgcaaggaaaagtac

SEQ ID NO: 3262373 - DNA, 25 bp, Homo sapien
tcaaccacctatgccaaaagctcaa

SEQ ID NO: 3262374 - DNA, 25 bp, Homo sapien
aaaagtacactattttgcccctgag

SEQ ID NO: 3262375 - DNA, 25 bp, Homo sapien
gaattgatagttattacactttcat

SEQ ID NO: 3262376 - DNA, 25 bp, Homo sapien
tgatagctgaattgatagttattac

SEQ ID NO: 3262377 - DNA, 25 bp, Homo sapien
atactcagtttagctgttatgatag

SEQ ID NO: 3262378 - DNA, 25 bp, Homo sapien
cagtttagctgttatgatagctgaa

SEQ ID NO: 3262379 - DNA, 25 bp, Homo sapien
cagctttcaatgaactcatctatgg

SEQ ID NO: 3262380 - DNA, 25 bp, Homo sapien
tggcagctttcaatgaactcatcta

SEQ ID NO: 3262381 - DNA, 25 bp, Homo sapien
tttttggcagctttcaatgaactca

SEQ ID NO: 3262382 - DNA, 25 bp, Homo sapien
tcatctatggtaacaaccccatctt

SEQ ID NO: 3262383 - DNA, 25 bp, Homo sapien
cccatcatatcgtatattgctttca

SEQ ID NO: 3262384 - DNA, 25 bp, Homo sapien
ttgaggacaggatatgtacatttac

SEQ ID NO: 3262385 - DNA, 25 bp, Homo sapien
tttcaacgtgttgtctgggagcatc

SEQ ID NO: 3262386 - DNA, 25 bp, Homo sapien
tgtacatttacccatcatatcgtat

SEQ ID NO: 3262387 - DNA, 25 bp, Homo sapien
tttcttgtactgtcccccggagcaa

SEQ ID NO: 3262388 - DNA, 25 bp, Homo sapien
atacagattaaatgcccaattgagt

SEQ ID NO: 3262389 - DNA, 25 bp, Homo sapien
ctgtcccccggagcaaaatggaaag

SEQ ID NO: 3262390 - DNA, 25 bp, Homo sapien
tacagattaaatgcccaattgagtt

SEQ ID NO: 3262391 - DNA, 25 bp, Homo sapien
ttggctttccactgcaagtgcacat

SEQ ID NO: 3262392 - DNA, 25 bp, Homo sapien
ctagaggcttgagtataagtggtat

SEQ ID NO: 3262393 - DNA, 25 bp, Homo sapien
gagtataagtggtattggctttcca

SEQ ID NO: 3262394 - DNA, 25 bp, Homo sapien
tggtattggctttccactgcaagtg

SEQ ID NO: 3262395 - DNA, 25 bp, Homo sapien
aagaacatggtgtggatgccagcag

SEQ ID NO: 3262396 - DNA, 25 bp, Homo sapien
tccgatagctttagtgagtgtgagc

SEQ ID NO: 3262397 - DNA, 25 bp, Homo sapien
cagaaatgggctgtgctcttgagaa

SEQ ID NO: 3262398 - DNA, 25 bp, Homo sapien
tccagaacatgggtagatgggccga

SEQ ID NO: 3262399 - DNA, 25 bp, Homo sapien
cacagctccattgtggtctgtatca

SEQ ID NO: 3262400 - DNA, 25 bp, Homo sapien
cagctccattgtggtctgtatcaaa

SEQ ID NO: 3262401 - DNA, 25 bp, Homo sapien
actcacagctccattgtggtctgta

SEQ ID NO: 3262402 - DNA, 25 bp, Homo sapien
aactcacagctccattgtggtctgt

SEQ ID NO: 3262403 - DNA, 25 bp, Homo sapien
gtggaaagaactgcgagtaaatctc

SEQ ID NO: 3262404 - DNA, 25 bp, Homo sapien
ttcattaacaacaccactggggcat

SEQ ID NO: 3262405 - DNA, 25 bp, Homo sapien
aagaactgcgagtaaatctctttga

SEQ ID NO: 3262406 - DNA, 25 bp, Homo sapien
ggaaagaactgcgagtaaatctctt

SEQ ID NO: 3262407 - DNA, 25 bp, Homo sapien
gccacagggcaaggttagccctctg

SEQ ID NO: 3262408 - DNA, 25 bp, Homo sapien
tagccctctgagagtggttttggca

SEQ ID NO: 3262409 - DNA, 25 bp, Homo sapien
gcaaggttagccctctgagagtggt

SEQ ID NO: 3262410 - DNA, 25 bp, Homo sapien
ccctctgagagtggttttggcattt

SEQ ID NO: 3262411 - DNA, 25 bp, Homo sapien
gtctcctggagagtcatctgtggaa

SEQ ID NO: 3262412 - DNA, 25 bp, Homo sapien
cttctgggaagatgtacacggtgta

SEQ ID NO: 3262413 - DNA, 25 bp, Homo sapien
tccttcttctgggaagatgtacacg

SEQ ID NO: 3262414 - DNA, 25 bp, Homo sapien
tcttctattaggactgaaaacatag

SEQ ID NO: 3262415 - DNA, 25 bp, Homo sapien
gtaatgccacatctcttaggcatct

SEQ ID NO: 3262416 - DNA, 25 bp, Homo sapien
ctcttaggcatctgtatatttcacc

SEQ ID NO: 3262417 - DNA, 25 bp, Homo sapien
tgtaatgccacatctcttaggcatc

SEQ ID NO: 3262418 - DNA, 25 bp, Homo sapien
actacaggcacccgccaccaagctc

SEQ ID NO: 3262419 - DNA, 25 bp, Homo sapien
cgccttggccttcctagtagctggg

SEQ ID NO: 3262420 - DNA, 25 bp, Homo sapien
ccgccttggccttcctagtagctgg

SEQ ID NO: 3262421 - DNA, 25 bp, Homo sapien
acccgccaccaagctcagctaattt

SEQ ID NO: 3262422 - DNA, 25 bp, Homo sapien
aatactagtttgtccctcttgcaca

SEQ ID NO: 3262423 - DNA, 25 bp, Homo sapien
ttttggaatctaacagcccctcgct

SEQ ID NO: 3262424 - DNA, 25 bp, Homo sapien
tatgagccactcatatcacttacta

SEQ ID NO: 3262425 - DNA, 25 bp, Homo sapien
tcacttactagcctggaactttgaa

SEQ ID NO: 3262426 - DNA, 25 bp, Homo sapien
atatggggaaccacacccattattt

SEQ ID NO: 3262427 - DNA, 25 bp, Homo sapien
aactatatggggaaccacacccatt

SEQ ID NO: 3262428 - DNA, 25 bp, Homo sapien
ctatatggggaaccacacccattat

SEQ ID NO: 3262429 - DNA, 25 bp, Homo sapien
gaactatatggggaaccacacccat

SEQ ID NO: 3262430 - DNA, 25 bp, Homo sapien
tacctgggatggtgtgtgctgatcc

SEQ ID NO: 3262431 - DNA, 25 bp, Homo sapien
aaccttgggaatggattgatgaccc

SEQ ID NO: 3262432 - DNA, 25 bp, Homo sapien
cgtacattgctcaacataccctggt

SEQ ID NO: 3262433 - DNA, 25 bp, Homo sapien
tgatccacctagcaatgaactcaga

SEQ ID NO: 3262434 - DNA, 25 bp, Homo sapien
caaattaattgaggactgaagaccc

SEQ ID NO: 3262435 - DNA, 25 bp, Homo sapien
tcaatggaactatggcactatggca

SEQ ID NO: 3262436 - DNA, 25 bp, Homo sapien
catctgctcccacagtatgataggg

SEQ ID NO: 3262437 - DNA, 25 bp, Homo sapien
gatttcggagctatctgagacttgg

SEQ ID NO: 3262438 - DNA, 25 bp, Homo sapien
tgtagctgttgtcctgatgaagaag

SEQ ID NO: 3262439 - DNA, 25 bp, Homo sapien
ctaagtatggatgtggagaaggtgt

SEQ ID NO: 3262440 - DNA, 25 bp, Homo sapien
gagaaggtgtagctgttgtcctgat

SEQ ID NO: 3262441 - DNA, 25 bp, Homo sapien
aagaagggaattgtgggaagcagca

SEQ ID NO: 3262442 - DNA, 25 bp, Homo sapien
gcccttcagaggggtgcacttcagc

SEQ ID NO: 3262443 - DNA, 25 bp, Homo sapien
ttcagctgcaggcagttccttctgg

SEQ ID NO: 3262444 - DNA, 25 bp, Homo sapien
gcacttcagctgcaggcagttcctt

SEQ ID NO: 3262445 - DNA, 25 bp, Homo sapien
tcaaggcccttcagaggggtgcact

SEQ ID NO: 3262446 - DNA, 25 bp, Homo sapien
atgtcctgctggttcctttggctac

SEQ ID NO: 3262447 - DNA, 25 bp, Homo sapien
aaagatcttactgcagaatttccca

SEQ ID NO: 3262448 - DNA, 25 bp, Homo sapien
gctggttcctttggctacaacatca

SEQ ID NO: 3262449 - DNA, 25 bp, Homo sapien
tcccaaacactttgaatggggtgga

SEQ ID NO: 3262450 - DNA, 25 bp, Homo sapien
cagcagttgtggtggtcagatgtga

SEQ ID NO: 3262451 - DNA, 25 bp, Homo sapien
tagtctgcataaggttggacaaagg

SEQ ID NO: 3262452 - DNA, 25 bp, Homo sapien
acatcacagacttctacacgcactg

SEQ ID NO: 3262453 - DNA, 25 bp, Homo sapien
gacttctacacgcactggaactggg

SEQ ID NO: 3262454 - DNA, 25 bp, Homo sapien
tcctctgggaattgtgtgaaggtaa

SEQ ID NO: 3262455 - DNA, 25 bp, Homo sapien
tatattcctatctgggaaggatcag

SEQ ID NO: 3262456 - DNA, 25 bp, Homo sapien
aactctttgtttaatgggcaatcac

SEQ ID NO: 3262457 - DNA, 25 bp, Homo sapien
cacagtatgccagcatgggtgtgcc

SEQ ID NO: 3262458 - DNA, 25 bp, Homo sapien
cctctgtaaaggatctgaagctctt

SEQ ID NO: 3262459 - DNA, 25 bp, Homo sapien
gaagctcaagggcttcaggccgatg

SEQ ID NO: 3262460 - DNA, 25 bp, Homo sapien
cttcaggccgatgcctgacggtggc

SEQ ID NO: 3262461 - DNA, 25 bp, Homo sapien
taaatcctctgtaaaggatctgaag

SEQ ID NO: 3262462 - DNA, 25 bp, Homo sapien
tgcttacacagagcaacaaaggaaa

SEQ ID NO: 3262463 - DNA, 25 bp, Homo sapien
cgatgcttacacagagcaacaaagg

SEQ ID NO: 3262464 - DNA, 25 bp, Homo sapien
tacacagagcaacaaaggaaaacgg

SEQ ID NO: 3262465 - DNA, 25 bp, Homo sapien
acacagagcaacaaaggaaaacgga

SEQ ID NO: 3262466 - DNA, 25 bp, Homo sapien
ttctgggcctttgtatcgggcagca

SEQ ID NO: 3262467 - DNA, 25 bp, Homo sapien
cagaaccaaaacagcggattaaatt

SEQ ID NO: 3262468 - DNA, 25 bp, Homo sapien
gcaatctgagctgtgctacaaatgg

SEQ ID NO: 3262469 - DNA, 25 bp, Homo sapien
tgggacagaaccaaaacagcggatt

SEQ ID NO: 3262470 - DNA, 25 bp, Homo sapien
tgaaatcatcagcaatcaccagcat

SEQ ID NO: 3262471 - DNA, 25 bp, Homo sapien
cgggtgacaggctctaaaaacataa

SEQ ID NO: 3262472 - DNA, 25 bp, Homo sapien
tcccacgtaggactgcgaattctca

SEQ ID NO: 3262473 - DNA, 25 bp, Homo sapien
caatcaactctgattcttggaggca

SEQ ID NO: 3262474 - DNA, 25 bp, Homo sapien
cattccattcctcggttccactgct

SEQ ID NO: 3262475 - DNA, 25 bp, Homo sapien
gctcacaaagctcaaagagggtggc

SEQ ID NO: 3262476 - DNA, 25 bp, Homo sapien
tgctcacaaagctcaaagagggtgg

SEQ ID NO: 3262477 - DNA, 25 bp, Homo sapien
tgttggcaatgacattgcaatttcc

SEQ ID NO: 3262478 - DNA, 25 bp, Homo sapien
tggcaatgacattgcaatttccatt

SEQ ID NO: 3262479 - DNA, 25 bp, Homo sapien
gttggcaatgacattgcaatttcca

SEQ ID NO: 3262480 - DNA, 25 bp, Homo sapien
ttgttggcaatgacattgcaatttc

SEQ ID NO: 3262481 - DNA, 25 bp, Homo sapien
aaatttggcacatatctagctccct

SEQ ID NO: 3262482 - DNA, 25 bp, Homo sapien
tcagaagccaatatcccactaagtt

SEQ ID NO: 3262483 - DNA, 25 bp, Homo sapien
agttttgacacctgtctgtctcttg

SEQ ID NO: 3262484 - DNA, 25 bp, Homo sapien
cagttggttcattgattcagaagcc

SEQ ID NO: 3262485 - DNA, 25 bp, Homo sapien
gctctttaatgctgcgcttggtgct

SEQ ID NO: 3262486 - DNA, 25 bp, Homo sapien
cctagaagatacaggatcagttctg

SEQ ID NO: 3262487 - DNA, 25 bp, Homo sapien
tttgaatagcaggagacgacgtttt

SEQ ID NO: 3262488 - DNA, 25 bp, Homo sapien
tgttctgagcgtacaggaaacctag

SEQ ID NO: 3262489 - DNA, 25 bp, Homo sapien
tatcgacctctgaatatgctctaga

SEQ ID NO: 3262490 - DNA, 25 bp, Homo sapien
cagagaccaggttctagtgacatct

SEQ ID NO: 3262491 - DNA, 25 bp, Homo sapien
tggcttgggcacactacttatgctg

SEQ ID NO: 3262492 - DNA, 25 bp, Homo sapien
gttatatgcaagaaatgtatggccc

SEQ ID NO: 3262493 - DNA, 25 bp, Homo sapien
tccttctccaattacactactgcag

SEQ ID NO: 3262494 - DNA, 25 bp, Homo sapien
ttctaaggctactcccagcactcct

SEQ ID NO: 3262495 - DNA, 25 bp, Homo sapien
tctaaggctactcccagcactcctt

SEQ ID NO: 3262496 - DNA, 25 bp, Homo sapien
tcccagcactccttctccaattaca

SEQ ID NO: 3262497 - DNA, 25 bp, Homo sapien
catctttatgcaacccagacacatt

SEQ ID NO: 3262498 - DNA, 25 bp, Homo sapien
gcaacccagacacattatgaacatt

SEQ ID NO: 3262499 - DNA, 25 bp, Homo sapien
tatgcaacccagacacattatgaac

SEQ ID NO: 3262500 - DNA, 25 bp, Homo sapien
ctttatgcaacccagacacattatg

SEQ ID NO: 3262501 - DNA, 25 bp, Homo sapien
ggttagtaatgcctgcttcccagat

SEQ ID NO: 3262502 - DNA, 25 bp, Homo sapien
tatggactcagtacacaggaatcca

SEQ ID NO: 3262503 - DNA, 25 bp, Homo sapien
ggtgggttagtaatgcctgcttccc

SEQ ID NO: 3262504 - DNA, 25 bp, Homo sapien
tttgtatggactcagtacacaggaa

SEQ ID NO: 3262505 - DNA, 25 bp, Homo sapien
gatgttttccacttcatccaaagac

SEQ ID NO: 3262506 - DNA, 25 bp, Homo sapien
tggaagcatcttggaccatccgcaa

SEQ ID NO: 3262507 - DNA, 25 bp, Homo sapien
acatacatctgtgcttcttatctga

SEQ ID NO: 3262508 - DNA, 25 bp, Homo sapien
tggcctcagcccatgatcttttaca

SEQ ID NO: 3262509 - DNA, 25 bp, Homo sapien
acttgaatttggcatggaggggaga

SEQ ID NO: 3262510 - DNA, 25 bp, Homo sapien
tgaaacactactttcaatccctttg

SEQ ID NO: 3262511 - DNA, 25 bp, Homo sapien
tagaggaagcatagttctgtgattg

SEQ ID NO: 3262512 - DNA, 25 bp, Homo sapien
ggatggagggttctcgtattgcagt

SEQ ID NO: 3262513 - DNA, 25 bp, Homo sapien
aaggtgatgttcaaaaatgtactca

SEQ ID NO: 3262514 - DNA, 25 bp, Homo sapien
ttatttaaggtgatgttcaaaaatg

SEQ ID NO: 3262515 - DNA, 25 bp, Homo sapien
taaggtgatgttcaaaaatgtactc

SEQ ID NO: 3262516 - DNA, 25 bp, Homo sapien
tttaaggtgatgttcaaaaatgtac

SEQ ID NO: 3262517 - DNA, 25 bp, Homo sapien
gcccatgaccttcagatatgggata

SEQ ID NO: 3262518 - DNA, 25 bp, Homo sapien
gctgtttacgctcattcatttcagt

SEQ ID NO: 3262519 - DNA, 25 bp, Homo sapien
tatgacttggaacgagctgtttacg

SEQ ID NO: 3262520 - DNA, 25 bp, Homo sapien
gatatgggataacgagctgtgcttt

SEQ ID NO: 3262521 - DNA, 25 bp, Homo sapien
gaatgcggtcaaataaggagaggca

SEQ ID NO: 3262522 - DNA, 25 bp, Homo sapien
aatgcggtcaaataaggagaggcat

SEQ ID NO: 3262523 - DNA, 25 bp, Homo sapien
atgcggtcaaataaggagaggcata

SEQ ID NO: 3262524 - DNA, 25 bp, Homo sapien
atctttcctaaaccaccctggcatc

SEQ ID NO: 3262525 - DNA, 25 bp, Homo sapien
accaccctggcatcacttgactcac

SEQ ID NO: 3262526 - DNA, 25 bp, Homo sapien
tatctttcctaaaccaccctggcat

SEQ ID NO: 3262527 - DNA, 25 bp, Homo sapien
gtatctttcctaaaccaccctggca

SEQ ID NO: 3262528 - DNA, 25 bp, Homo sapien
ggagcaaattgccaaagaagcagaa

SEQ ID NO: 3262529 - DNA, 25 bp, Homo sapien
ctgtcagcatcactcccgactggga

SEQ ID NO: 3262530 - DNA, 25 bp, Homo sapien
tgacacctaattgcacacagcgaat

SEQ ID NO: 3262531 - DNA, 25 bp, Homo sapien
aagcctaagtgtcccctgggcagga

SEQ ID NO: 3262532 - DNA, 25 bp, Homo sapien
gctcagtgctaaaagtgttgctcag

SEQ ID NO: 3262533 - DNA, 25 bp, Homo sapien
tcagatgcagctcaaagatcacctc

SEQ ID NO: 3262534 - DNA, 25 bp, Homo sapien
gatcacctctttgagtccgttctga

SEQ ID NO: 3262535 - DNA, 25 bp, Homo sapien
tcaaggctgcttgatgctcagtgct

SEQ ID NO: 3262536 - DNA, 25 bp, Homo sapien
gcacagactggagcgaccactttac

SEQ ID NO: 3262537 - DNA, 25 bp, Homo sapien
tatctacttctaaaccagacctgcc

SEQ ID NO: 3262538 - DNA, 25 bp, Homo sapien
agcacagactggagcgaccacttta

SEQ ID NO: 3262539 - DNA, 25 bp, Homo sapien
gtatctacttctaaaccagacctgc

SEQ ID NO: 3262540 - DNA, 25 bp, Homo sapien
gaaaaatcaatcagtcccagcaaat

SEQ ID NO: 3262541 - DNA, 25 bp, Homo sapien
tccagagtcaacatcctctgagctg

SEQ ID NO: 3262542 - DNA, 25 bp, Homo sapien
cactgtttgcagtccttcggactcc

SEQ ID NO: 3262543 - DNA, 25 bp, Homo sapien
taatcacaacaatacccactgtttg

SEQ ID NO: 3262544 - DNA, 25 bp, Homo sapien
agctgattggaggtccagccctttc

SEQ ID NO: 3262545 - DNA, 25 bp, Homo sapien
tccagccctttcctatctgcattag

SEQ ID NO: 3262546 - DNA, 25 bp, Homo sapien
cctttcctatctgcattagttacat

SEQ ID NO: 3262547 - DNA, 25 bp, Homo sapien
gccagctgattggaggtccagccct

SEQ ID NO: 3262548 - DNA, 25 bp, Homo sapien
tatgcgggggctctttcacatgcac

SEQ ID NO: 3262549 - DNA, 25 bp, Homo sapien
gagattttgtaaggtgacagcacca

SEQ ID NO: 3262550 - DNA, 25 bp, Homo sapien
gacagcaccataagaggagtttcct

SEQ ID NO: 3262551 - DNA, 25 bp, Homo sapien
tctcagctgtggctaccggatcgaa

SEQ ID NO: 3262552 - DNA, 25 bp, Homo sapien
ccaaggacgcatgtccaaatcaatt

SEQ ID NO: 3262553 - DNA, 25 bp, Homo sapien
aaggacgcatgtccaaatcaattga

SEQ ID NO: 3262554 - DNA, 25 bp, Homo sapien
tccaaggacgcatgtccaaatcaat

SEQ ID NO: 3262555 - DNA, 25 bp, Homo sapien
caaggacgcatgtccaaatcaattg

SEQ ID NO: 3262556 - DNA, 25 bp, Homo sapien
tgtcctcagagctgcgtaagctcat

SEQ ID NO: 3262557 - DNA, 25 bp, Homo sapien
gatcctcccagttcttgggcacgag

SEQ ID NO: 3262558 - DNA, 25 bp, Homo sapien
tgctcatttgggccagggccttgct

SEQ ID NO: 3262559 - DNA, 25 bp, Homo sapien
gattccagagactgacttgggtgtc

SEQ ID NO: 3262560 - DNA, 25 bp, Homo sapien
gcaggctttggcttaaatgctttcc

SEQ ID NO: 3262561 - DNA, 25 bp, Homo sapien
accacaacagtacttgggaaacaga

SEQ ID NO: 3262562 - DNA, 25 bp, Homo sapien
ttcttgcaccacaacagtacttggg

SEQ ID NO: 3262563 - DNA, 25 bp, Homo sapien
agcaggctttggcttaaatgctttc

SEQ ID NO: 3262564 - DNA, 25 bp, Homo sapien
tacactatccccaggttcaacaagt

SEQ ID NO: 3262565 - DNA, 25 bp, Homo sapien
tatagaaaatgttcacaggaaccag

SEQ ID NO: 3262566 - DNA, 25 bp, Homo sapien
tgcttctggactataaatgattacg

SEQ ID NO: 3262567 - DNA, 25 bp, Homo sapien
caacagctttgcatatccacattgc

SEQ ID NO: 3262568 - DNA, 25 bp, Homo sapien
tagggctatgaggagaccactctga

SEQ ID NO: 3262569 - DNA, 25 bp, Homo sapien
gaccactctgagatgatatgacaga

SEQ ID NO: 3262570 - DNA, 25 bp, Homo sapien
tcatatttccacatcagtagggcta

SEQ ID NO: 3262571 - DNA, 25 bp, Homo sapien
gatatgacagatagtggctgcattc

SEQ ID NO: 3262572 - DNA, 25 bp, Homo sapien
tctgttgaatagatatacttgctgc

SEQ ID NO: 3262573 - DNA, 25 bp, Homo sapien
tgtcaagctctcaccgtattcaaca

SEQ ID NO: 3262574 - DNA, 25 bp, Homo sapien
ctttgttgtcatcgttttatgtttc

SEQ ID NO: 3262575 - DNA, 25 bp, Homo sapien
gctccttgacgtttgtcaagctctc

SEQ ID NO: 3262576 - DNA, 25 bp, Homo sapien
agaatctgattgggatatagccttc

SEQ ID NO: 3262577 - DNA, 25 bp, Homo sapien
tagaatctgattgggatatagcctt

SEQ ID NO: 3262578 - DNA, 25 bp, Homo sapien
ttagaatctgattgggatatagcct

SEQ ID NO: 3262579 - DNA, 25 bp, Homo sapien
gctgagagtcagttaggtgaaaact

SEQ ID NO: 3262580 - DNA, 25 bp, Homo sapien
tgaaaactgggtaaaggcagactaa

SEQ ID NO: 3262581 - DNA, 25 bp, Homo sapien
tgcaaggacaatggctgagagtcag

SEQ ID NO: 3262582 - DNA, 25 bp, Homo sapien
gccagtcatagtcacgtgagtgtgt

SEQ ID NO: 3262583 - DNA, 25 bp, Homo sapien
tcttggagttaggtaacgtggtgct

SEQ ID NO: 3262584 - DNA, 25 bp, Homo sapien
ggtaacgtggtgctttcagacatgg

SEQ ID NO: 3262585 - DNA, 25 bp, Homo sapien
gttaggtaacgtggtgctttcagac

SEQ ID NO: 3262586 - DNA, 25 bp, Homo sapien
acagctcttggagttaggtaacgtg

SEQ ID NO: 3262587 - DNA, 25 bp, Homo sapien
tctaccctgcagtttcctagtaagg

SEQ ID NO: 3262588 - DNA, 25 bp, Homo sapien
tgtaagaccagacccatcaatgcct

SEQ ID NO: 3262589 - DNA, 25 bp, Homo sapien
tgtgctattagaggtttctcaggca

SEQ ID NO: 3262590 - DNA, 25 bp, Homo sapien
ctggcctgtcaataataaaaactgg

SEQ ID NO: 3262591 - DNA, 25 bp, Homo sapien
ctctttcaggcttaataggatcatc

SEQ ID NO: 3262592 - DNA, 25 bp, Homo sapien
tctccaggagaggtgctagtgtctg

SEQ ID NO: 3262593 - DNA, 25 bp, Homo sapien
aagggtgtaggttgctggtaattca

SEQ ID NO: 3262594 - DNA, 25 bp, Homo sapien
tgtaggttgctggtaattcagccat

SEQ ID NO: 3262595 - DNA, 25 bp, Homo sapien
ctgctccggttgcatataaaggagt

SEQ ID NO: 3262596 - DNA, 25 bp, Homo sapien
gctccggttgcatataaaggagtca

SEQ ID NO: 3262597 - DNA, 25 bp, Homo sapien
tgctccggttgcatataaaggagtc

SEQ ID NO: 3262598 - DNA, 25 bp, Homo sapien
ctccggttgcatataaaggagtcat

SEQ ID NO: 3262599 - DNA, 25 bp, Homo sapien
tgatttcagccaatagaatgctcat

SEQ ID NO: 3262600 - DNA, 25 bp, Homo sapien
ctgatttcagccaatagaatgctca

SEQ ID NO: 3262601 - DNA, 25 bp, Homo sapien
gagccagaacgggaaggtgttgagc

SEQ ID NO: 3262602 - DNA, 25 bp, Homo sapien
agccagaacgggaaggtgttgagca

SEQ ID NO: 3262603 - DNA, 25 bp, Homo sapien
gtcctacccctgcatccaacaataa

SEQ ID NO: 3262604 - DNA, 25 bp, Homo sapien
tgcactccacatttcctaagttctg

SEQ ID NO: 3262605 - DNA, 25 bp, Homo sapien
attgtttccaggtcctacccctgca

SEQ ID NO: 3262606 - DNA, 25 bp, Homo sapien
tctgaatttgtttgatatatgttgt

SEQ ID NO: 3262607 - DNA, 25 bp, Homo sapien
ggaggaatcaaacgttatacatgaa

SEQ ID NO: 3262608 - DNA, 25 bp, Homo sapien
aagtttgcttttacatcactaaggg

SEQ ID NO: 3262609 - DNA, 25 bp, Homo sapien
tactagttacgttttggaggaatca

SEQ ID NO: 3262610 - DNA, 25 bp, Homo sapien
gatttgaaaattggccatcctgttc

SEQ ID NO: 3262611 - DNA, 25 bp, Homo sapien
ggacaacattgtcgggacttagccc

SEQ ID NO: 3262612 - DNA, 25 bp, Homo sapien
gtgcataggctctgaaaagttctcc

SEQ ID NO: 3262613 - DNA, 25 bp, Homo sapien
gttagatcagttccaacagcctgca

SEQ ID NO: 3262614 - DNA, 25 bp, Homo sapien
cacggtgatgagatagagagcaagc

SEQ ID NO: 3262615 - DNA, 25 bp, Homo sapien
ctggtccctggtgccaaaagggttg

SEQ ID NO: 3262616 - DNA, 25 bp, Homo sapien
ccacaaaactggtccctggtgccaa

SEQ ID NO: 3262617 - DNA, 25 bp, Homo sapien
cccaaccctgtctgtggaaaaattg

SEQ ID NO: 3262618 - DNA, 25 bp, Homo sapien
ccactaatttaaagaagttcttcat

SEQ ID NO: 3262619 - DNA, 25 bp, Homo sapien
cacaggtgtatgcacaggctagact

SEQ ID NO: 3262620 - DNA, 25 bp, Homo sapien
taattaactccttaaacacatggca

SEQ ID NO: 3262621 - DNA, 25 bp, Homo sapien
tagtagtagaattgttggctcaaag

SEQ ID NO: 3262622 - DNA, 25 bp, Homo sapien
tattccttacttgctggacattggg

SEQ ID NO: 3262623 - DNA, 25 bp, Homo sapien
gatgaccattggtgcaaaatttcta

SEQ ID NO: 3262624 - DNA, 25 bp, Homo sapien
aaaactgcaatgtgaattcctgaca

SEQ ID NO: 3262625 - DNA, 25 bp, Homo sapien
ccctctaatatcatgattatgagaa

SEQ ID NO: 3262626 - DNA, 25 bp, Homo sapien
tgagaagttatctactcttacctgt

SEQ ID NO: 3262627 - DNA, 25 bp, Homo sapien
cctcccaggtacaacaaactctcct

SEQ ID NO: 3262628 - DNA, 25 bp, Homo sapien
atttttcctatttagtggagacagg

SEQ ID NO: 3262629 - DNA, 25 bp, Homo sapien
aatttttcctatttagtggagacag

SEQ ID NO: 3262630 - DNA, 25 bp, Homo sapien
aggtacaacaaactctcctgcctta

SEQ ID NO: 3262631 - DNA, 25 bp, Homo sapien
gatggcgcttccaggtgtcacttag

SEQ ID NO: 3262632 - DNA, 25 bp, Homo sapien
caggtatagtaaccatgtgtccagg

SEQ ID NO: 3262633 - DNA, 25 bp, Homo sapien
catgaaggtagtggattcacagacc

SEQ ID NO: 3262634 - DNA, 25 bp, Homo sapien
tgtcacttagtgtcatctgatgtca

SEQ ID NO: 3262635 - DNA, 25 bp, Homo sapien
tataatgagctgtgaagcttctcca

SEQ ID NO: 3262636 - DNA, 25 bp, Homo sapien
tgtggcaggcacaagcagaatctgc

SEQ ID NO: 3262637 - DNA, 25 bp, Homo sapien
catgtaataggtagggctaagtcga

SEQ ID NO: 3262638 - DNA, 25 bp, Homo sapien
tctgagagtccatgtaatcgaaaca

SEQ ID NO: 3262639 - DNA, 25 bp, Homo sapien
tgcaacaggagacctagccaagggt

SEQ ID NO: 3262640 - DNA, 25 bp, Homo sapien
ggatgcctagtgaaataccttgaga

SEQ ID NO: 3262641 - DNA, 25 bp, Homo sapien
tgttggaatgcctctactatagccc

SEQ ID NO: 3262642 - DNA, 25 bp, Homo sapien
tactaaaatgccaaacagtctccag

SEQ ID NO: 3262643 - DNA, 25 bp, Homo sapien
tagaataggtctcttcagggggact

SEQ ID NO: 3262644 - DNA, 25 bp, Homo sapien
tgatgcacacgatcatatcattttc

SEQ ID NO: 3262645 - DNA, 25 bp, Homo sapien
gaagcaatctgaatgatgcacacga

SEQ ID NO: 3262646 - DNA, 25 bp, Homo sapien
cacacgatcatatcattttcttgct

SEQ ID NO: 3262647 - DNA, 25 bp, Homo sapien
tcctttccttctaataatacattta

SEQ ID NO: 3262648 - DNA, 25 bp, Homo sapien
ctttccttctaataatacatttaag

SEQ ID NO: 3262649 - DNA, 25 bp, Homo sapien
tctaataatacatttaaggggtaca

SEQ ID NO: 3262650 - DNA, 25 bp, Homo sapien
ctttcctttccttctaataatacat

SEQ ID NO: 3262651 - DNA, 25 bp, Homo sapien
tgatttccaattgcaggtcttatcc

SEQ ID NO: 3262652 - DNA, 25 bp, Homo sapien
ggataagaataaactccagagtcag

SEQ ID NO: 3262653 - DNA, 25 bp, Homo sapien
ctctatcactatgcaggtgaccatg

SEQ ID NO: 3262654 - DNA, 25 bp, Homo sapien
tattgacaggcagtacaaagcagtg

SEQ ID NO: 3262655 - DNA, 25 bp, Homo sapien
attatttaatgtgatgctgaggacc

SEQ ID NO: 3262656 - DNA, 25 bp, Homo sapien
ttttgaaatacacatccagctcctg

SEQ ID NO: 3262657 - DNA, 25 bp, Homo sapien
tgaggaccaggccttgactattgag

SEQ ID NO: 3262658 - DNA, 25 bp, Homo sapien
tagcagcagtttctgatccatgcca

SEQ ID NO: 3262659 - DNA, 25 bp, Homo sapien
cttcattgccgcaaatgttctctcc

SEQ ID NO: 3262660 - DNA, 25 bp, Homo sapien
aatcttcattgccgcaaatgttctc

SEQ ID NO: 3262661 - DNA, 25 bp, Homo sapien
gatgaggtacagatgccagtcactt

SEQ ID NO: 3262662 - DNA, 25 bp, Homo sapien
tgatgaggtacagatgccagtcact

SEQ ID NO: 3262663 - DNA, 25 bp, Homo sapien
ttacatgagtaacccagcaacaccc

SEQ ID NO: 3262664 - DNA, 25 bp, Homo sapien
ggactgacatgcagtactgacactg

SEQ ID NO: 3262665 - DNA, 25 bp, Homo sapien
atcatgtggcacctggtcaacccca

SEQ ID NO: 3262666 - DNA, 25 bp, Homo sapien
cacagaaagggcacctataggccaa

SEQ ID NO: 3262667 - DNA, 25 bp, Homo sapien
gttatatctatcctcttccaggagg

SEQ ID NO: 3262668 - DNA, 25 bp, Homo sapien
agtactgacactgatctggcgctgt

SEQ ID NO: 3262669 - DNA, 25 bp, Homo sapien
tgacactgatctggcgctgtccttt

SEQ ID NO: 3262670 - DNA, 25 bp, Homo sapien
tactgacactgatctggcgctgtcc

SEQ ID NO: 3262671 - DNA, 25 bp, Homo sapien
ctgacactgatctggcgctgtcctt

SEQ ID NO: 3262672 - DNA, 25 bp, Homo sapien
tgcattatgctcatcgctgggttgg

SEQ ID NO: 3262673 - DNA, 25 bp, Homo sapien
cattatgctcatcgctgggttggtt

SEQ ID NO: 3262674 - DNA, 25 bp, Homo sapien
acttgcattatgctcatcgctgggt

SEQ ID NO: 3262675 - DNA, 25 bp, Homo sapien
tatgctcatcgctgggttggtttcc

SEQ ID NO: 3262676 - DNA, 25 bp, Homo sapien
gcccaggttggtcacatcaaaaaac

SEQ ID NO: 3262677 - DNA, 25 bp, Homo sapien
atctagactaggctaactgcccagg

SEQ ID NO: 3262678 - DNA, 25 bp, Homo sapien
gacagcaatttgtctatggcacata

SEQ ID NO: 3262679 - DNA, 25 bp, Homo sapien
ttaggctagctaacatcccagacag

SEQ ID NO: 3262680 - DNA, 25 bp, Homo sapien
aacatatccgtcatcttaaaacatt

SEQ ID NO: 3262681 - DNA, 25 bp, Homo sapien
gttgggaacactcagtatccttcta

SEQ ID NO: 3262682 - DNA, 25 bp, Homo sapien
gacactcagggattataaggattat

SEQ ID NO: 3262683 - DNA, 25 bp, Homo sapien
gtttctatacacaccatgtatagtg

SEQ ID NO: 3262684 - DNA, 25 bp, Homo sapien
gattcttaataatgaggataatgtc

SEQ ID NO: 3262685 - DNA, 25 bp, Homo sapien
ttttcaccaggtgatctttcagaat

SEQ ID NO: 3262686 - DNA, 25 bp, Homo sapien
cataaggtgctctagaaatgtaagt

SEQ ID NO: 3262687 - DNA, 25 bp, Homo sapien
gaaagtagtttgtactcataaggtg

SEQ ID NO: 3262688 - DNA, 25 bp, Homo sapien
tgcaaaaccatcacaattttgaggt

SEQ ID NO: 3262689 - DNA, 25 bp, Homo sapien
cgatgatgcaaaaccatcacaattt

SEQ ID NO: 3262690 - DNA, 25 bp, Homo sapien
ccatcacaattttgaggtaatgtac

SEQ ID NO: 3262691 - DNA, 25 bp, Homo sapien
aactttacgatgatgcaaaaccatc

SEQ ID NO: 3262692 - DNA, 25 bp, Homo sapien
tactagtgagcttttggttgccaca

SEQ ID NO: 3262693 - DNA, 25 bp, Homo sapien
aattcggtgtcctgcctactagtga

SEQ ID NO: 3262694 - DNA, 25 bp, Homo sapien
tgaggagttcaaaatgcccttaaaa

SEQ ID NO: 3262695 - DNA, 25 bp, Homo sapien
gccacataggattttgatgatacaa

SEQ ID NO: 3262696 - DNA, 25 bp, Homo sapien
aactgttctttaccccgatgcttgt

SEQ ID NO: 3262697 - DNA, 25 bp, Homo sapien
taatcagctggaattaactgttctt

SEQ ID NO: 3262698 - DNA, 25 bp, Homo sapien
ttgattcaccactgccgataaattg

SEQ ID NO: 3262699 - DNA, 25 bp, Homo sapien
tgacaggcggccttgattcaccact

SEQ ID NO: 3262700 - DNA, 25 bp, Homo sapien
tcttgccttgtgtgggcatgagctc

SEQ ID NO: 3262701 - DNA, 25 bp, Homo sapien
tctctcttgccttgtgtgggcatga

SEQ ID NO: 3262702 - DNA, 25 bp, Homo sapien
ctctctcttgccttgtgtgggcatg

SEQ ID NO: 3262703 - DNA, 25 bp, Homo sapien
tctcttgccttgtgtgggcatgagc

SEQ ID NO: 3262704 - DNA, 25 bp, Homo sapien
gaacttagcatatcaaacgggcaga

SEQ ID NO: 3262705 - DNA, 25 bp, Homo sapien
gaaatgacgttagtccaagtcctaa

SEQ ID NO: 3262706 - DNA, 25 bp, Homo sapien
tggagtccaggagcttaagctagca

SEQ ID NO: 3262707 - DNA, 25 bp, Homo sapien
gccaaaggagctttctgaacagtga

SEQ ID NO: 3262708 - DNA, 25 bp, Homo sapien
taaagcctagtcacaaacatgctcc

SEQ ID NO: 3262709 - DNA, 25 bp, Homo sapien
tatactcatgctccattgggtcaca

SEQ ID NO: 3262710 - DNA, 25 bp, Homo sapien
gactggcctagttcatgtggtcaaa

SEQ ID NO: 3262711 - DNA, 25 bp, Homo sapien
ggctactggttgtatgctggaactc

SEQ ID NO: 3262712 - DNA, 25 bp, Homo sapien
gaagatgctagcttgataataaaca

SEQ ID NO: 3262713 - DNA, 25 bp, Homo sapien
aactctcaggcgaaaagaaatcgga

SEQ ID NO: 3262714 - DNA, 25 bp, Homo sapien
cataaggctttaacctaggttcaag

SEQ ID NO: 3262715 - DNA, 25 bp, Homo sapien
agaaatcggaatgaaatgagcatca

SEQ ID NO: 3262716 - DNA, 25 bp, Homo sapien
caaaaagcacaatgacgatcagaac

SEQ ID NO: 3262717 - DNA, 25 bp, Homo sapien
acaatgacgatcagaactgctatca

SEQ ID NO: 3262718 - DNA, 25 bp, Homo sapien
tcaatcagcccaaactgttccaata

SEQ ID NO: 3262719 - DNA, 25 bp, Homo sapien
ctgcttcaatcagcccaaactgttc

SEQ ID NO: 3262720 - DNA, 25 bp, Homo sapien
caccaggaacgtcccgaggaaacat

SEQ ID NO: 3262721 - DNA, 25 bp, Homo sapien
ccacgcatgaagtcgcggcgcagat

SEQ ID NO: 3262722 - DNA, 25 bp, Homo sapien
taaagtcgggcctgtcggaattatc

SEQ ID NO: 3262723 - DNA, 25 bp, Homo sapien
gccagaagtagcagccggataaagt

SEQ ID NO: 3262724 - DNA, 25 bp, Homo sapien
gacaatgagccgcatttatggcaga

SEQ ID NO: 3262725 - DNA, 25 bp, Homo sapien
ggcacgtgcacgacgtcggctaatt

SEQ ID NO: 3262726 - DNA, 25 bp, Homo sapien
tatggcagaggcagtacaatgcaga

SEQ ID NO: 3262727 - DNA, 25 bp, Homo sapien
gataagaaggactagggcatctgca

SEQ ID NO: 3262728 - DNA, 25 bp, Homo sapien
gaaagcctgttcagtgctaggtaca

SEQ ID NO: 3262729 - DNA, 25 bp, Homo sapien
tgccttgatgatccctcttttacaa

SEQ ID NO: 3262730 - DNA, 25 bp, Homo sapien
tattctaagaaaatgtgagcctcat

SEQ ID NO: 3262731 - DNA, 25 bp, Homo sapien
gctcttacacctatcaatgcatcca

SEQ ID NO: 3262732 - DNA, 25 bp, Homo sapien
ggtacctttcaaggcagagtctccc

SEQ ID NO: 3262733 - DNA, 25 bp, Homo sapien
cctaagagataaggaatttcagaaa

SEQ ID NO: 3262734 - DNA, 25 bp, Homo sapien
ccctttttgatacagttgtgaggag

SEQ ID NO: 3262735 - DNA, 25 bp, Homo sapien
agagtctccctcctaagagataagg

SEQ ID NO: 3262736 - DNA, 25 bp, Homo sapien
gaaggttctgcggtaagtgcacaaa

SEQ ID NO: 3262737 - DNA, 25 bp, Homo sapien
aaattgctgttaatcccaatggcac

SEQ ID NO: 3262738 - DNA, 25 bp, Homo sapien
aaagcagagtacaaactacccagag

SEQ ID NO: 3262739 - DNA, 25 bp, Homo sapien
gcacatgtacgtttgcatacagagt

SEQ ID NO: 3262740 - DNA, 25 bp, Homo sapien
tacctgtgtaaactgatcaatcaaa

SEQ ID NO: 3262741 - DNA, 25 bp, Homo sapien
ttaatgcctacaatgactactgtca

SEQ ID NO: 3262742 - DNA, 25 bp, Homo sapien
caagttgactgggtaaatggagttg

SEQ ID NO: 3262743 - DNA, 25 bp, Homo sapien
tcatagcgctagagaattttagact

SEQ ID NO: 3262744 - DNA, 25 bp, Homo sapien
gatggttttgccacctacagtctag

SEQ ID NO: 3262745 - DNA, 25 bp, Homo sapien
aaatacgtgccagatcttgtcagtc

SEQ ID NO: 3262746 - DNA, 25 bp, Homo sapien
ccaagaggccagatctatcctttaa

SEQ ID NO: 3262747 - DNA, 25 bp, Homo sapien
taatagaacgacttccgtgtccttc

SEQ ID NO: 3262748 - DNA, 25 bp, Homo sapien
tgtgtccacacatggaggaagacca

SEQ ID NO: 3262749 - DNA, 25 bp, Homo sapien
aagggactaaggtgctctgttctgc

SEQ ID NO: 3262750 - DNA, 25 bp, Homo sapien
tactgccacaccagagattaggttc

SEQ ID NO: 3262751 - DNA, 25 bp, Homo sapien
catactttccggtagccatgctgga

SEQ ID NO: 3262752 - DNA, 25 bp, Homo sapien
tagaacctctcaaacacgtcagcag

SEQ ID NO: 3262753 - DNA, 25 bp, Homo sapien
gaagactgcagtctgtggattccca

SEQ ID NO: 3262754 - DNA, 25 bp, Homo sapien
cccggtatatttggcaaggcagtgc

SEQ ID NO: 3262755 - DNA, 25 bp, Homo sapien
gatgtcagtttagaaggaacacccc

SEQ ID NO: 3262756 - DNA, 25 bp, Homo sapien
tgaattagccatcttgttcaagagc

SEQ ID NO: 3262757 - DNA, 25 bp, Homo sapien
tatgacaattatctcaaggaaaagc

SEQ ID NO: 3262758 - DNA, 25 bp, Homo sapien
tgagagagtaactggcaaactatag

SEQ ID NO: 3262759 - DNA, 25 bp, Homo sapien
caaagttagcctgtaccttcaagga

SEQ ID NO: 3262760 - DNA, 25 bp, Homo sapien
gcaaacttttagatagtgagggcca

SEQ ID NO: 3262761 - DNA, 25 bp, Homo sapien
cattgatcaatatttggccagtgag

SEQ ID NO: 3262762 - DNA, 25 bp, Homo sapien
gatggaaaatctacccatgaacctt

SEQ ID NO: 3262763 - DNA, 25 bp, Homo sapien
tttagggtaacagatgtcttgaggc

SEQ ID NO: 3262764 - DNA, 25 bp, Homo sapien
tgtcatgaagtagtcctcggatttt

SEQ ID NO: 3262765 - DNA, 25 bp, Homo sapien
tctggctgggaggtcacattggccc

SEQ ID NO: 3262766 - DNA, 25 bp, Homo sapien
tgctccagagagcacggtgttttta

SEQ ID NO: 3262767 - DNA, 25 bp, Homo sapien
gcccacccgatgtttgttactcaag

SEQ ID NO: 3262768 - DNA, 25 bp, Homo sapien
ccgggcagtgcagtaagaaccagat

SEQ ID NO: 3262769 - DNA, 25 bp, Homo sapien
gaagtgtctatgtctccgaagctct

SEQ ID NO: 3262770 - DNA, 25 bp, Homo sapien
tctgtccctgcatcgctctggagag

SEQ ID NO: 3262771 - DNA, 25 bp, Homo sapien
gagcagcctgcatccgtgccttatg

SEQ ID NO: 3262772 - DNA, 25 bp, Homo sapien
tcagaccattgattactcaagagtg

SEQ ID NO: 3262773 - DNA, 25 bp, Homo sapien
tcacgcctagttggtgtctatcaca

SEQ ID NO: 3262774 - DNA, 25 bp, Homo sapien
aagaaatagaggacttgagcaacgc

SEQ ID NO: 3262775 - DNA, 25 bp, Homo sapien
ttcagacttgttttatgccctagca

SEQ ID NO: 3262776 - DNA, 25 bp, Homo sapien
caggcacgtctgctcaaagtgtaca

SEQ ID NO: 3262777 - DNA, 25 bp, Homo sapien
tgttaactacgccacaattgtggcc

SEQ ID NO: 3262778 - DNA, 25 bp, Homo sapien
gtctctgctctcaatacagtgtggc

SEQ ID NO: 3262779 - DNA, 25 bp, Homo sapien
tgctgccctctaaagttcaagaaaa

SEQ ID NO: 3262780 - DNA, 25 bp, Homo sapien
ccagggccttgacatcgggacagat

SEQ ID NO: 3262781 - DNA, 25 bp, Homo sapien
aaagcaggctgtataatgactagtc

SEQ ID NO: 3262782 - DNA, 25 bp, Homo sapien
tagaacgtgaaggttggtactgccg

SEQ ID NO: 3262783 - DNA, 25 bp, Homo sapien
ctgttctttatgttagggacaaggc

SEQ ID NO: 3262784 - DNA, 25 bp, Homo sapien
tacaggttgtgtacagtgcagccaa

SEQ ID NO: 3262785 - DNA, 25 bp, Homo sapien
cagttagtttggatcagcagccagg

SEQ ID NO: 3262786 - DNA, 25 bp, Homo sapien
ccttctgagttccagctagggagct

SEQ ID NO: 3262787 - DNA, 25 bp, Homo sapien
ccaaagagcttgtggtgactcacta

SEQ ID NO: 3262788 - DNA, 25 bp, Homo sapien
tggcttactggaacttatgactcct

SEQ ID NO: 3262789 - DNA, 25 bp, Homo sapien
tactggaacttatgactcctgggtt

SEQ ID NO: 3262790 - DNA, 25 bp, Homo sapien
gcgcagtcgtggcttactggaactt

SEQ ID NO: 3262791 - DNA, 25 bp, Homo sapien
tcgtggcttactggaacttatgact

SEQ ID NO: 3262792 - DNA, 25 bp, Homo sapien
ggcagaatcctagggtaaaaatatc

SEQ ID NO: 3262793 - DNA, 25 bp, Homo sapien
tctttcatgaactctatcagtggaa

SEQ ID NO: 3262794 - DNA, 25 bp, Homo sapien
aatgaaggccactgagaattgtgtc

SEQ ID NO: 3262795 - DNA, 25 bp, Homo sapien
tacttaagagcaggcaagacgaaaa

SEQ ID NO: 3262796 - DNA, 25 bp, Homo sapien
ggctatatcgcagctacagagatga

SEQ ID NO: 3262797 - DNA, 25 bp, Homo sapien
aactatactctggaacagtcctcga

SEQ ID NO: 3262798 - DNA, 25 bp, Homo sapien
gatcacccttggcacactgttcaaa

SEQ ID NO: 3262799 - DNA, 25 bp, Homo sapien
cagtcctcgaaatgcaaatttggct

SEQ ID NO: 3262800 - DNA, 25 bp, Homo sapien
ctttttggtactatataatgattca

SEQ ID NO: 3262801 - DNA, 25 bp, Homo sapien
tcaacttgcttatgttctgccctag

SEQ ID NO: 3262802 - DNA, 25 bp, Homo sapien
atgttcaacttgcttatgttctgcc

SEQ ID NO: 3262803 - DNA, 25 bp, Homo sapien
tgcttatgttctgccctagttctag

SEQ ID NO: 3262804 - DNA, 25 bp, Homo sapien
gacaacttggtatctttgagaagac

SEQ ID NO: 3262805 - DNA, 25 bp, Homo sapien
ttcacatgaacggagcacaactttc

SEQ ID NO: 3262806 - DNA, 25 bp, Homo sapien
ttgagaagacctcttgaaaagcact

SEQ ID NO: 3262807 - DNA, 25 bp, Homo sapien
ttctggacaagcaacaagagtcctt

SEQ ID NO: 3262808 - DNA, 25 bp, Homo sapien
ccagttttgttacccctggaggctg

SEQ ID NO: 3262809 - DNA, 25 bp, Homo sapien
tgtgagctacacagagtaagacaga

SEQ ID NO: 3262810 - DNA, 25 bp, Homo sapien
tggaggctgcttaaacaagtagacc

SEQ ID NO: 3262811 - DNA, 25 bp, Homo sapien
gacatgttattatccacgagttcca

SEQ ID NO: 3262812 - DNA, 25 bp, Homo sapien
catctgtctcgttggctttatttga

SEQ ID NO: 3262813 - DNA, 25 bp, Homo sapien
gaaaacagtcaccatcatatccacc

SEQ ID NO: 3262814 - DNA, 25 bp, Homo sapien
ctttcatctgtctcgttggctttat

SEQ ID NO: 3262815 - DNA, 25 bp, Homo sapien
atttgaatgaaaacagtcaccatca

SEQ ID NO: 3262816 - DNA, 25 bp, Homo sapien
aacatatttagtccactctgttggg

SEQ ID NO: 3262817 - DNA, 25 bp, Homo sapien
tgttgggtctatggatctgtacgac

SEQ ID NO: 3262818 - DNA, 25 bp, Homo sapien
tgaaaagaatccaaatccttggatg

SEQ ID NO: 3262819 - DNA, 25 bp, Homo sapien
gatgaacaacggtacaaaacatatt

SEQ ID NO: 3262820 - DNA, 25 bp, Homo sapien
cacatgtgcatatcaaagggcagaa

SEQ ID NO: 3262821 - DNA, 25 bp, Homo sapien
tctaaaatctaggtcagaaactgtc

SEQ ID NO: 3262822 - DNA, 25 bp, Homo sapien
ggtctccctcagcacgagtcagaaa

SEQ ID NO: 3262823 - DNA, 25 bp, Homo sapien
cgaacatgaagttatgcctgggaag

SEQ ID NO: 3262824 - DNA, 25 bp, Homo sapien
tgaaaatatccctacgctgtggtgg

SEQ ID NO: 3262825 - DNA, 25 bp, Homo sapien
tataggctgaacagcaacctgctgg

SEQ ID NO: 3262826 - DNA, 25 bp, Homo sapien
ggtaagccattaccacggcggatga

SEQ ID NO: 3262827 - DNA, 25 bp, Homo sapien
tctctacagtggaggagaccctaac

SEQ ID NO: 3262828 - DNA, 25 bp, Homo sapien
tgggcatccagtacttttgtcataa

SEQ ID NO: 3262829 - DNA, 25 bp, Homo sapien
tgccctctattatcatcttgagaag

SEQ ID NO: 3262830 - DNA, 25 bp, Homo sapien
catctacaactacacccagctttga

SEQ ID NO: 3262831 - DNA, 25 bp, Homo sapien
tgttgaagcatagaattgggcatcc

SEQ ID NO: 3262832 - DNA, 25 bp, Homo sapien
gcagccagagtaatttctacccatg

SEQ ID NO: 3262833 - DNA, 25 bp, Homo sapien
atagcagccagagtaatttctaccc

SEQ ID NO: 3262834 - DNA, 25 bp, Homo sapien
tggaagttgtttcaatgatgtgtct

SEQ ID NO: 3262835 - DNA, 25 bp, Homo sapien
acccatgcaatggatggaagttgtt

SEQ ID NO: 3262836 - DNA, 25 bp, Homo sapien
tatgttagttatgtgctcctgccct

SEQ ID NO: 3262837 - DNA, 25 bp, Homo sapien
ttttccaatagagccagtagcagcc

SEQ ID NO: 3262838 - DNA, 25 bp, Homo sapien
tagcagcccagcttgaagctatcag

SEQ ID NO: 3262839 - DNA, 25 bp, Homo sapien
caaataataaccagcaaagtgcaca

SEQ ID NO: 3262840 - DNA, 25 bp, Homo sapien
ctttcggccaatgaaaagcctgctt

SEQ ID NO: 3262841 - DNA, 25 bp, Homo sapien
taggatttctgcaaaagttttgctg

SEQ ID NO: 3262842 - DNA, 25 bp, Homo sapien
tggtcatgtggcatggctttcggcc

SEQ ID NO: 3262843 - DNA, 25 bp, Homo sapien
tgctgtccttttacaggttttgccc

SEQ ID NO: 3262844 - DNA, 25 bp, Homo sapien
actgcctgtaggacacatcttccca

SEQ ID NO: 3262845 - DNA, 25 bp, Homo sapien
tcatgaagtactgtgttcatgaggg

SEQ ID NO: 3262846 - DNA, 25 bp, Homo sapien
gcctgtaggacacatcttcccagag

SEQ ID NO: 3262847 - DNA, 25 bp, Homo sapien
atgaagtactgtgttcatgaggggc

SEQ ID NO: 3262848 - DNA, 25 bp, Homo sapien
gaagtatccctgatcacagtcagct

SEQ ID NO: 3262849 - DNA, 25 bp, Homo sapien
tcacagtcagcttcacatcgtaggg

SEQ ID NO: 3262850 - DNA, 25 bp, Homo sapien
aggagaaccacgagcccatctgaaa

SEQ ID NO: 3262851 - DNA, 25 bp, Homo sapien
ggcagaagtttggtgaagtatccct

SEQ ID NO: 3262852 - DNA, 25 bp, Homo sapien
tttgaaacatgatgctgtcaattca

SEQ ID NO: 3262853 - DNA, 25 bp, Homo sapien
ctttgaaacatgatgctgtcaattc

SEQ ID NO: 3262854 - DNA, 25 bp, Homo sapien
ttgaaacatgatgctgtcaattcat

SEQ ID NO: 3262855 - DNA, 25 bp, Homo sapien
cctgcctgacagtgattcctggaga

SEQ ID NO: 3262856 - DNA, 25 bp, Homo sapien
tgatttgcggcatttcagactcaac

SEQ ID NO: 3262857 - DNA, 25 bp, Homo sapien
gaccaggtccagtgatgatatcatg

SEQ ID NO: 3262858 - DNA, 25 bp, Homo sapien
gaaccatgatttaagctagcaacga

SEQ ID NO: 3262859 - DNA, 25 bp, Homo sapien
catcatggggttcccagtatttcct

SEQ ID NO: 3262860 - DNA, 25 bp, Homo sapien
taatgcatacatcatggggttccca

SEQ ID NO: 3262861 - DNA, 25 bp, Homo sapien
aagctaatgcatacatcatggggtt

SEQ ID NO: 3262862 - DNA, 25 bp, Homo sapien
tgcatacatcatggggttcccagta

SEQ ID NO: 3262863 - DNA, 25 bp, Homo sapien
gcaggtgtaacctttgtttctccga

SEQ ID NO: 3262864 - DNA, 25 bp, Homo sapien
tgactaccgcattgtctacgatgga

SEQ ID NO: 3262865 - DNA, 25 bp, Homo sapien
actaaatctcataagcagacagttg

SEQ ID NO: 3262866 - DNA, 25 bp, Homo sapien
tgcaaatgactaaagggtgccaggg

SEQ ID NO: 3262867 - DNA, 25 bp, Homo sapien
ttgagtagtttaaaataagtatcta

SEQ ID NO: 3262868 - DNA, 25 bp, Homo sapien
tgagtagtttaaaataagtatctat

SEQ ID NO: 3262869 - DNA, 25 bp, Homo sapien
aataagtatctatttattatctcac

SEQ ID NO: 3262870 - DNA, 25 bp, Homo sapien
aaataagtatctatttattatctca

SEQ ID NO: 3262871 - DNA, 25 bp, Homo sapien
tgctagctgtcaaaccgggtgctgc

SEQ ID NO: 3262872 - DNA, 25 bp, Homo sapien
ggttggacgtctggacacacttgac

SEQ ID NO: 3262873 - DNA, 25 bp, Homo sapien
taggtctgaggtcacaattgcattg

SEQ ID NO: 3262874 - DNA, 25 bp, Homo sapien
aatccaagtatagctggctgggctc

SEQ ID NO: 3262875 - DNA, 25 bp, Homo sapien
tctcattggcaggtcttcaaggtca

SEQ ID NO: 3262876 - DNA, 25 bp, Homo sapien
ggcaggtcttcaaggtcaggaccaa

SEQ ID NO: 3262877 - DNA, 25 bp, Homo sapien
tcttcaaggtcaggaccaatcacag

SEQ ID NO: 3262878 - DNA, 25 bp, Homo sapien
caaggtcaggaccaatcacagacat

SEQ ID NO: 3262879 - DNA, 25 bp, Homo sapien
tgccaaagccagcatgacacagtgc

SEQ ID NO: 3262880 - DNA, 25 bp, Homo sapien
cagtgccatgcctaatttcagagag

SEQ ID NO: 3262881 - DNA, 25 bp, Homo sapien
gactggtactcataaattccaaagg

SEQ ID NO: 3262882 - DNA, 25 bp, Homo sapien
ggtcacttacggtcactcatggcat

SEQ ID NO: 3262883 - DNA, 25 bp, Homo sapien
tatctttttgccacgcattttccaa

SEQ ID NO: 3262884 - DNA, 25 bp, Homo sapien
gtttgtttctgtttcaatatatttc

SEQ ID NO: 3262885 - DNA, 25 bp, Homo sapien
gaagtatctttttgccacgcatttt

SEQ ID NO: 3262886 - DNA, 25 bp, Homo sapien
tttttgccacgcattttccaatgtg

SEQ ID NO: 3262887 - DNA, 25 bp, Homo sapien
gtgacttcctttgcacatgacccag

SEQ ID NO: 3262888 - DNA, 25 bp, Homo sapien
ttctgctcattgtcacatatgccca

SEQ ID NO: 3262889 - DNA, 25 bp, Homo sapien
ttgcacatgacccaggatcataagt

SEQ ID NO: 3262890 - DNA, 25 bp, Homo sapien
taagtgggggaccttctatttgctc

SEQ ID NO: 3262891 - DNA, 25 bp, Homo sapien
gccctgagcattggtaaagagtctg

SEQ ID NO: 3262892 - DNA, 25 bp, Homo sapien
gcggtaggacttggaactaatagcc

SEQ ID NO: 3262893 - DNA, 25 bp, Homo sapien
taacttctcagaaaagagtaggtgg

SEQ ID NO: 3262894 - DNA, 25 bp, Homo sapien
tggtcaataatggtgattccctgat

SEQ ID NO: 3262895 - DNA, 25 bp, Homo sapien
agagagtctcgctcagtcgcccggg

SEQ ID NO: 3262896 - DNA, 25 bp, Homo sapien
ctagtagcttggactacaggtgccc

SEQ ID NO: 3262897 - DNA, 25 bp, Homo sapien
agagagagtctcgctcagtcgcccg

SEQ ID NO: 3262898 - DNA, 25 bp, Homo sapien
tagtagcttggactacaggtgcccg

SEQ ID NO: 3262899 - DNA, 25 bp, Homo sapien
aatactagcagcaaatgtccttgtg

SEQ ID NO: 3262900 - DNA, 25 bp, Homo sapien
tgagcttagccaactacaatactag

SEQ ID NO: 3262901 - DNA, 25 bp, Homo sapien
tcagggcaggttatacttcacaaaa

SEQ ID NO: 3262902 - DNA, 25 bp, Homo sapien
aaatgatttctctcaaggaaggagg

SEQ ID NO: 3262903 - DNA, 25 bp, Homo sapien
tgtttaagctactcaggccatggtg

SEQ ID NO: 3262904 - DNA, 25 bp, Homo sapien
ggtaccaagctgtgtagacaaccct

SEQ ID NO: 3262905 - DNA, 25 bp, Homo sapien
cctaagtgtgcacaaagaggtcatg

SEQ ID NO: 3262906 - DNA, 25 bp, Homo sapien
gcttcagaatgaaacctaccttgct

SEQ ID NO: 3262907 - DNA, 25 bp, Homo sapien
ttccatgaagaacttgccaaaacat

SEQ ID NO: 3262908 - DNA, 25 bp, Homo sapien
tttccatgaagaacttgccaaaaca

SEQ ID NO: 3262909 - DNA, 25 bp, Homo sapien
cctgaattacactcaattattttta

SEQ ID NO: 3262910 - DNA, 25 bp, Homo sapien
attttccatgaagaacttgccaaaa

SEQ ID NO: 3262911 - DNA, 25 bp, Homo sapien
tcttgggcagcaaagatttcaattt

SEQ ID NO: 3262912 - DNA, 25 bp, Homo sapien
tgttctggctagttgtatttgaggt

SEQ ID NO: 3262913 - DNA, 25 bp, Homo sapien
ctagacaactgacatttcttgggca

SEQ ID NO: 3262914 - DNA, 25 bp, Homo sapien
tgaggttttgacagccaaataaatc

SEQ ID NO: 3262915 - DNA, 25 bp, Homo sapien
caaatgcaagcgcatgggacatggc

SEQ ID NO: 3262916 - DNA, 25 bp, Homo sapien
catgccccatggttggcaaatgcaa

SEQ ID NO: 3262917 - DNA, 25 bp, Homo sapien
tataggtgatttgctctccattgcc

SEQ ID NO: 3262918 - DNA, 25 bp, Homo sapien
gagggtgctccagaatcctaaagta

SEQ ID NO: 3262919 - DNA, 25 bp, Homo sapien
cctaatagcgaacttgtcataacaa

SEQ ID NO: 3262920 - DNA, 25 bp, Homo sapien
gggcactggccatggacccttactc

SEQ ID NO: 3262921 - DNA, 25 bp, Homo sapien
gttctcaacatttcagctctggccc

SEQ ID NO: 3262922 - DNA, 25 bp, Homo sapien
cctgctaactagtattctctctgtg

SEQ ID NO: 3262923 - DNA, 25 bp, Homo sapien
cattaggtatattggagaaatcact

SEQ ID NO: 3262924 - DNA, 25 bp, Homo sapien
tggagaaatcactgttaaaactgta

SEQ ID NO: 3262925 - DNA, 25 bp, Homo sapien
ttgtttctagatgaccagttactta

SEQ ID NO: 3262926 - DNA, 25 bp, Homo sapien
acttatagttattttggattggtca

SEQ ID NO: 3262927 - DNA, 25 bp, Homo sapien
taagacctactacttgaatcccact

SEQ ID NO: 3262928 - DNA, 25 bp, Homo sapien
tgtcgatggcaaaatggcccttctt

SEQ ID NO: 3262929 - DNA, 25 bp, Homo sapien
tgcacctctaaatattgatggtgta

SEQ ID NO: 3262930 - DNA, 25 bp, Homo sapien
tctttcagtgcccataagacctact

SEQ ID NO: 3262931 - DNA, 25 bp, Homo sapien
cataataaagttccagcctgtgaag

SEQ ID NO: 3262932 - DNA, 25 bp, Homo sapien
catcttaagtaatgcatctgtaaac

SEQ ID NO: 3262933 - DNA, 25 bp, Homo sapien
tcacatcacatcacatcacataggg

SEQ ID NO: 3262934 - DNA, 25 bp, Homo sapien
gattgtttatctaacttggagaagc

SEQ ID NO: 3262935 - DNA, 25 bp, Homo sapien
taagcctttgggagcaccgtgctat

SEQ ID NO: 3262936 - DNA, 25 bp, Homo sapien
tactgtgaaaagctgatgcctgtcc

SEQ ID NO: 3262937 - DNA, 25 bp, Homo sapien
tcttcaatggcttaggactggcttc

SEQ ID NO: 3262938 - DNA, 25 bp, Homo sapien
tccacaagggtagcttggaggtgcc

SEQ ID NO: 3262939 - DNA, 25 bp, Homo sapien
ctgcaaatgctctgcagtagataga

SEQ ID NO: 3262940 - DNA, 25 bp, Homo sapien
tgcaaatgctctgcagtagatagac

SEQ ID NO: 3262941 - DNA, 25 bp, Homo sapien
caacttcagacctttctaaatccca

SEQ ID NO: 3262942 - DNA, 25 bp, Homo sapien
acccacattgtttaggagtcaactg

SEQ ID NO: 3262943 - DNA, 25 bp, Homo sapien
taccactatttgtttgctatgcacg

SEQ ID NO: 3262944 - DNA, 25 bp, Homo sapien
tgctgagatgggcactcctaaaccc

SEQ ID NO: 3262945 - DNA, 25 bp, Homo sapien
ggtcaacagcagacaaccagtagtt

SEQ ID NO: 3262946 - DNA, 25 bp, Homo sapien
gagcaccataagtgttcagccgact

SEQ ID NO: 3262947 - DNA, 25 bp, Homo sapien
gagaacatgttactcagactcaggg

SEQ ID NO: 3262948 - DNA, 25 bp, Homo sapien
tatgattgattgatggagcccctat

SEQ ID NO: 3262949 - DNA, 25 bp, Homo sapien
tggaagacttctcctgcatggatgc

SEQ ID NO: 3262950 - DNA, 25 bp, Homo sapien
aactgagctctcatgaacactgaac

SEQ ID NO: 3262951 - DNA, 25 bp, Homo sapien
ggaagatcacagatcaggcaagatt

SEQ ID NO: 3262952 - DNA, 25 bp, Homo sapien
catgaacactgaacatggaagatca

SEQ ID NO: 3262953 - DNA, 25 bp, Homo sapien
cactgaacatggaagatcacagatc

SEQ ID NO: 3262954 - DNA, 25 bp, Homo sapien
tctaccttatatacaggatcattgg

SEQ ID NO: 3262955 - DNA, 25 bp, Homo sapien
caggatcattggtgtgggctttctc

SEQ ID NO: 3262956 - DNA, 25 bp, Homo sapien
gctttttgcagggttaaactgatct

SEQ ID NO: 3262957 - DNA, 25 bp, Homo sapien
tctctacgtctaatccaaataagct

SEQ ID NO: 3262958 - DNA, 25 bp, Homo sapien
tttagcccataatggctacaagtgg

SEQ ID NO: 3262959 - DNA, 25 bp, Homo sapien
tggcgattatttgggcaatttagcc

SEQ ID NO: 3262960 - DNA, 25 bp, Homo sapien
caagtgggttatgttccttaattgc

SEQ ID NO: 3262961 - DNA, 25 bp, Homo sapien
aagtctgagatgcagtatacttagc

SEQ ID NO: 3262962 - DNA, 25 bp, Homo sapien
aactgtatcagagacttcctctgga

SEQ ID NO: 3262963 - DNA, 25 bp, Homo sapien
tggcaggtttgatcttttacccgga

SEQ ID NO: 3262964 - DNA, 25 bp, Homo sapien
tgtaactcgacataagatttgggca

SEQ ID NO: 3262965 - DNA, 25 bp, Homo sapien
ggacatgccctcctcattaagcttg

SEQ ID NO: 3262966 - DNA, 25 bp, Homo sapien
aaataatcccactaatcctctctct

SEQ ID NO: 3262967 - DNA, 25 bp, Homo sapien
ggtttctgcagcaatcgggttgtct

SEQ ID NO: 3262968 - DNA, 25 bp, Homo sapien
tctggaccatttagctttttagcaa

SEQ ID NO: 3262969 - DNA, 25 bp, Homo sapien
caggcagacaacaggaccctctgtt

SEQ ID NO: 3262970 - DNA, 25 bp, Homo sapien
ccacaaatgtatcccaatactggaa

SEQ ID NO: 3262971 - DNA, 25 bp, Homo sapien
ccaagcccacaaatgtatcccaata

SEQ ID NO: 3262972 - DNA, 25 bp, Homo sapien
gcccacaaatgtatcccaatactgg

SEQ ID NO: 3262973 - DNA, 25 bp, Homo sapien
acaaatgtatcccaatactggaaaa

SEQ ID NO: 3262974 - DNA, 25 bp, Homo sapien
tcctttgtgtgagatgtgtctgccc

SEQ ID NO: 3262975 - DNA, 25 bp, Homo sapien
caagtctccgattttgcttaggatc

SEQ ID NO: 3262976 - DNA, 25 bp, Homo sapien
gaggcctgttaggaagaaagctcag

SEQ ID NO: 3262977 - DNA, 25 bp, Homo sapien
gccttgagtacaggaatatagccta

SEQ ID NO: 3262978 - DNA, 25 bp, Homo sapien
cactaatttaatgacggcattgcct

SEQ ID NO: 3262979 - DNA, 25 bp, Homo sapien
gtgtcctgttaaccaagatttgtct

SEQ ID NO: 3262980 - DNA, 25 bp, Homo sapien
tgtctctcagaagtttgatgatctg

SEQ ID NO: 3262981 - DNA, 25 bp, Homo sapien
caacagttctttatgaccagaatca

SEQ ID NO: 3262982 - DNA, 25 bp, Homo sapien
gagaaaaaccccttgcacaatcatg

SEQ ID NO: 3262983 - DNA, 25 bp, Homo sapien
tgaaacctcacatggacattttact

SEQ ID NO: 3262984 - DNA, 25 bp, Homo sapien
caagaacactgccttgaagagataa

SEQ ID NO: 3262985 - DNA, 25 bp, Homo sapien
caagccctatgatcaaacacatggg

SEQ ID NO: 3262986 - DNA, 25 bp, Homo sapien
tctgagaaggtactgggcaaatttc

SEQ ID NO: 3262987 - DNA, 25 bp, Homo sapien
ttcagtatttcacgtttacaccgct

SEQ ID NO: 3262988 - DNA, 25 bp, Homo sapien
gtttacaccgctttctacagccact

SEQ ID NO: 3262989 - DNA, 25 bp, Homo sapien
gagaacctgttaatagtctgagaag

SEQ ID NO: 3262990 - DNA, 25 bp, Homo sapien
tgtctcagtttatgcacaggctgcc

SEQ ID NO: 3262991 - DNA, 25 bp, Homo sapien
ttctgtggcaacagacaggctgccg

SEQ ID NO: 3262992 - DNA, 25 bp, Homo sapien
tcctgtggaattagctgttagcgcc

SEQ ID NO: 3262993 - DNA, 25 bp, Homo sapien
caggctgccggttcacacttgtagt

SEQ ID NO: 3262994 - DNA, 25 bp, Homo sapien
atatttcagtagtatcacagttcca

SEQ ID NO: 3262995 - DNA, 25 bp, Homo sapien
tgttttttcaggaacttgcgggtca

SEQ ID NO: 3262996 - DNA, 25 bp, Homo sapien
aagctttttagtttgctgcaatttc

SEQ ID NO: 3262997 - DNA, 25 bp, Homo sapien
atggtgtgttctgggcacctttgtc

SEQ ID NO: 3262998 - DNA, 25 bp, Homo sapien
tgctgggccggtagtctttagtttc

SEQ ID NO: 3262999 - DNA, 25 bp, Homo sapien
ccaaagctggtggtgactcatccca

SEQ ID NO: 3263000 - DNA, 25 bp, Homo sapien
tcatcccatgctaaaacggccttgt

SEQ ID NO: 3263001 - DNA, 25 bp, Homo sapien
gaagaggcagaaacggctagttcct

SEQ ID NO: 3263002 - DNA, 25 bp, Homo sapien
ccaaatttgaagaccctcctttgag

SEQ ID NO: 3263003 - DNA, 25 bp, Homo sapien
tcctttgagtggacagggtccccag

SEQ ID NO: 3263004 - DNA, 25 bp, Homo sapien
tctgtgatgctgctaaaattcatat

SEQ ID NO: 3263005 - DNA, 25 bp, Homo sapien
aaatctgtgatgctgctaaaattca

SEQ ID NO: 3263006 - DNA, 25 bp, Homo sapien
gaagcacaaattgttggcttgcttc

SEQ ID NO: 3263007 - DNA, 25 bp, Homo sapien
ggtttggaaaactctccctgaagca

SEQ ID NO: 3263008 - DNA, 25 bp, Homo sapien
tgatgtgtgactcattaataacaat

SEQ ID NO: 3263009 - DNA, 25 bp, Homo sapien
tcataaatcagatatgatgtgtgac

SEQ ID NO: 3263010 - DNA, 25 bp, Homo sapien
gcctgaagctcaatgtctaaaaaca

SEQ ID NO: 3263011 - DNA, 25 bp, Homo sapien
ttcaggtgggaggtaaatctggttc

SEQ ID NO: 3263012 - DNA, 25 bp, Homo sapien
tgcctgaagctcaatgtctaaaaac

SEQ ID NO: 3263013 - DNA, 25 bp, Homo sapien
gataattggcattcttcaatccagg

SEQ ID NO: 3263014 - DNA, 25 bp, Homo sapien
gttttgaccaatactgtgctgtgtg

SEQ ID NO: 3263015 - DNA, 25 bp, Homo sapien
cacttgactcaattggtagacaaaa

SEQ ID NO: 3263016 - DNA, 25 bp, Homo sapien
caaagtagaactcagtggaattcag

SEQ ID NO: 3263017 - DNA, 25 bp, Homo sapien
cccacatgtctctttgaggaagtaa

SEQ ID NO: 3263018 - DNA, 25 bp, Homo sapien
tagacaaggcaatgtcaatgctctg

SEQ ID NO: 3263019 - DNA, 25 bp, Homo sapien
gaagtaaggtttgagcttcgacctg

SEQ ID NO: 3263020 - DNA, 25 bp, Homo sapien
tctgttctcatgaaactatgtctgg

SEQ ID NO: 3263021 - DNA, 25 bp, Homo sapien
cacttggtacacagcgaatgctcaa

SEQ ID NO: 3263022 - DNA, 25 bp, Homo sapien
ccactgggtgtaagtcttcttgtca

SEQ ID NO: 3263023 - DNA, 25 bp, Homo sapien
tcttgtcaaggacagcacttggtac

SEQ ID NO: 3263024 - DNA, 25 bp, Homo sapien
acaggtgctcccacttccgaagtct

SEQ ID NO: 3263025 - DNA, 25 bp, Homo sapien
gaaagtgtggtgaacaggcctgggt

SEQ ID NO: 3263026 - DNA, 25 bp, Homo sapien
aacatgagtcatgtattatggagtt

SEQ ID NO: 3263027 - DNA, 25 bp, Homo sapien
agggaacttgagttaatgatctcaa

SEQ ID NO: 3263028 - DNA, 25 bp, Homo sapien
aagttagctctggcaacactgcaac

SEQ ID NO: 3263029 - DNA, 25 bp, Homo sapien
ttgaactcttgggttgaactcccac

SEQ ID NO: 3263030 - DNA, 25 bp, Homo sapien
aaaactggtagaaatgggatcgcat

SEQ ID NO: 3263031 - DNA, 25 bp, Homo sapien
tggtagaaatgggatcgcatcatgt

SEQ ID NO: 3263032 - DNA, 25 bp, Homo sapien
aatgggatcgcatcatgttacccag

SEQ ID NO: 3263033 - DNA, 25 bp, Homo sapien
tacctatgtgcaaattccaactcag

SEQ ID NO: 3263034 - DNA, 25 bp, Homo sapien
aaatcggattcttggaggaactagg

SEQ ID NO: 3263035 - DNA, 25 bp, Homo sapien
aaccttgggcaattctgtagctctc

SEQ ID NO: 3263036 - DNA, 25 bp, Homo sapien
tatctaccataagggattccactgt

SEQ ID NO: 3263037 - DNA, 25 bp, Homo sapien
tggagtggagtgaaaaaacacgacc

SEQ ID NO: 3263038 - DNA, 25 bp, Homo sapien
tacaccaagtaaaagagactgatgg

SEQ ID NO: 3263039 - DNA, 25 bp, Homo sapien
gacctaactacaagctgtctacaag

SEQ ID NO: 3263040 - DNA, 25 bp, Homo sapien
ccagcaatcatacatctaggcactt

SEQ ID NO: 3263041 - DNA, 25 bp, Homo sapien
tgagacctgaagttcccttcgtctc

SEQ ID NO: 3263042 - DNA, 25 bp, Homo sapien
agacctgaagttcccttcgtctctc

SEQ ID NO: 3263043 - DNA, 25 bp, Homo sapien
tcccttcgtctctccagccaaaccc

SEQ ID NO: 3263044 - DNA, 25 bp, Homo sapien
ccttcgtctctccagccaaacccat

SEQ ID NO: 3263045 - DNA, 25 bp, Homo sapien
ctctcagttcaatagacacttcccc

SEQ ID NO: 3263046 - DNA, 25 bp, Homo sapien
cttttaaggtatggtaaatggcagc

SEQ ID NO: 3263047 - DNA, 25 bp, Homo sapien
ttttacaagcaaagactccagagtc

SEQ ID NO: 3263048 - DNA, 25 bp, Homo sapien
cagcaaccgttttacaagcaaagac

SEQ ID NO: 3263049 - DNA, 25 bp, Homo sapien
tatggtaaatggcagcaaccgtttt

SEQ ID NO: 3263050 - DNA, 25 bp, Homo sapien
ggttagatcaccaagtggacagaga

SEQ ID NO: 3263051 - DNA, 25 bp, Homo sapien
ccaaggttagatcaccaagtggaca

SEQ ID NO: 3263052 - DNA, 25 bp, Homo sapien
ggaaaagccaaggttagatcaccaa

SEQ ID NO: 3263053 - DNA, 25 bp, Homo sapien
tcaccaagtggacagagaaagacac

SEQ ID NO: 3263054 - DNA, 25 bp, Homo sapien
caggataagcttttccacagccaga

SEQ ID NO: 3263055 - DNA, 25 bp, Homo sapien
tacctacgtccagtcttgtgtgtca

SEQ ID NO: 3263056 - DNA, 25 bp, Homo sapien
taggattcctatgccaggatccaca

SEQ ID NO: 3263057 - DNA, 25 bp, Homo sapien
taagacttgagatacaggattcccg

SEQ ID NO: 3263058 - DNA, 25 bp, Homo sapien
tacataggagcttgacacttcttag

SEQ ID NO: 3263059 - DNA, 25 bp, Homo sapien
gattcgacatgtagcttggcaccag

SEQ ID NO: 3263060 - DNA, 25 bp, Homo sapien
ttggcaccagactcactaactgcct

SEQ ID NO: 3263061 - DNA, 25 bp, Homo sapien
tacttttccgagcaccttatatcag

SEQ ID NO: 3263062 - DNA, 25 bp, Homo sapien
gatttaagtcgatgttctctaacac

SEQ ID NO: 3263063 - DNA, 25 bp, Homo sapien
agggtagatttaagtcgatgttctc

SEQ ID NO: 3263064 - DNA, 25 bp, Homo sapien
ttaatagggtagatttaagtcgatg

SEQ ID NO: 3263065 - DNA, 25 bp, Homo sapien
tagatttaagtcgatgttctctaac

SEQ ID NO: 3263066 - DNA, 25 bp, Homo sapien
ccagtgtctaaaccgctgaagctgt

SEQ ID NO: 3263067 - DNA, 25 bp, Homo sapien
tggtaccagcgcatcctctgattga

SEQ ID NO: 3263068 - DNA, 25 bp, Homo sapien
tgttttccagtgtctaaaccgctga

SEQ ID NO: 3263069 - DNA, 25 bp, Homo sapien
tcaagcaaatgtagcaatggtacca

SEQ ID NO: 3263070 - DNA, 25 bp, Homo sapien
ctgttctatcccctggaagtcgcta

SEQ ID NO: 3263071 - DNA, 25 bp, Homo sapien
tgttctatcccctggaagtcgctag

SEQ ID NO: 3263072 - DNA, 25 bp, Homo sapien
taaccgagtaaggacaatcagtgcc

SEQ ID NO: 3263073 - DNA, 25 bp, Homo sapien
gaagtagatagcaacagcattctgc

SEQ ID NO: 3263074 - DNA, 25 bp, Homo sapien
gaatccgtcttacccaatgcatgaa

SEQ ID NO: 3263075 - DNA, 25 bp, Homo sapien
tcttgcttgagctcctagatccaac

SEQ ID NO: 3263076 - DNA, 25 bp, Homo sapien
gaccagtagcgttcttccagttcct

SEQ ID NO: 3263077 - DNA, 25 bp, Homo sapien
caaaacgtgcacaatactggacagc

SEQ ID NO: 3263078 - DNA, 25 bp, Homo sapien
cactagaggttaggacaggattgac

SEQ ID NO: 3263079 - DNA, 25 bp, Homo sapien
tgtctctggagtccaaaacgtgcac

SEQ ID NO: 3263080 - DNA, 25 bp, Homo sapien
ggccgcggacctgtgagtcactcct

SEQ ID NO: 3263081 - DNA, 25 bp, Homo sapien
ctccctgtcagaggccgcggacctg

SEQ ID NO: 3263082 - DNA, 25 bp, Homo sapien
aatcagaggccaatctgaccagcat

SEQ ID NO: 3263083 - DNA, 25 bp, Homo sapien
cctctcaaatcagaggccaatctga

SEQ ID NO: 3263084 - DNA, 25 bp, Homo sapien
tgtcgttagaagaaatgccctcctc

SEQ ID NO: 3263085 - DNA, 25 bp, Homo sapien
taggtcacatcatcacttgctggga

SEQ ID NO: 3263086 - DNA, 25 bp, Homo sapien
tcaggacatgttgctagggccaacc

SEQ ID NO: 3263087 - DNA, 25 bp, Homo sapien
gaaacgagcgcttactagttgccca

SEQ ID NO: 3263088 - DNA, 25 bp, Homo sapien
taatgccatagaccgtgtttccacg

SEQ ID NO: 3263089 - DNA, 25 bp, Homo sapien
tatgtcagccagaccccgatggatt

SEQ ID NO: 3263090 - DNA, 25 bp, Homo sapien
tctgaagtacatatgggcacaccct

SEQ ID NO: 3263091 - DNA, 25 bp, Homo sapien
tacctgtggcaaccatggagggcac

SEQ ID NO: 3263092 - DNA, 25 bp, Homo sapien
caagtacactcatgtggtccccgag

SEQ ID NO: 3263093 - DNA, 25 bp, Homo sapien
aatggtgctggtctgatagaacccc

SEQ ID NO: 3263094 - DNA, 25 bp, Homo sapien
ggagaggcacctctgcatgtggaaa

SEQ ID NO: 3263095 - DNA, 25 bp, Homo sapien
gctgactaataagcacctgggccct

SEQ ID NO: 3263096 - DNA, 25 bp, Homo sapien
cactgtttctgggcatcttcataag

SEQ ID NO: 3263097 - DNA, 25 bp, Homo sapien
actgtttctgggcatcttcataagt

SEQ ID NO: 3263098 - DNA, 25 bp, Homo sapien
tcactgtttctgggcatcttcataa

SEQ ID NO: 3263099 - DNA, 25 bp, Homo sapien
ctgtttctgggcatcttcataagtc

SEQ ID NO: 3263100 - DNA, 25 bp, Homo sapien
gtaacacttgtttgcatagaccaca

SEQ ID NO: 3263101 - DNA, 25 bp, Homo sapien
ccccatgggcattagagtgtgacat

SEQ ID NO: 3263102 - DNA, 25 bp, Homo sapien
tgtgtacgcttcaaaagtgcaggtg

SEQ ID NO: 3263103 - DNA, 25 bp, Homo sapien
tagtagtgagccatcagtaatgtcc

SEQ ID NO: 3263104 - DNA, 25 bp, Homo sapien
cttggtgcttggtcccatcttgtaa

SEQ ID NO: 3263105 - DNA, 25 bp, Homo sapien
tagcagggtcctttagtacttggtg

SEQ ID NO: 3263106 - DNA, 25 bp, Homo sapien
gtacttggtgcttggtcccatcttg

SEQ ID NO: 3263107 - DNA, 25 bp, Homo sapien
ccctgcccagtatcatcagcaatag

SEQ ID NO: 3263108 - DNA, 25 bp, Homo sapien
tcttgtgccaagcattgaactagga

SEQ ID NO: 3263109 - DNA, 25 bp, Homo sapien
tccccaccatgaggggagccatctt

SEQ ID NO: 3263110 - DNA, 25 bp, Homo sapien
ctaggatttggcactgaataagcaa

SEQ ID NO: 3263111 - DNA, 25 bp, Homo sapien
aattaagacaagcaatttcttgtgc

SEQ ID NO: 3263112 - DNA, 25 bp, Homo sapien
gctttgcaagccgtaaggacactgc

SEQ ID NO: 3263113 - DNA, 25 bp, Homo sapien
aaatgtttacttcagaccagggtgc

SEQ ID NO: 3263114 - DNA, 25 bp, Homo sapien
tgtgctagaccttttgcaagatcct

SEQ ID NO: 3263115 - DNA, 25 bp, Homo sapien
aaggagccaggccttaaatccagga

SEQ ID NO: 3263116 - DNA, 25 bp, Homo sapien
gctgttgttacaaactgctgattcc

SEQ ID NO: 3263117 - DNA, 25 bp, Homo sapien
gacgtgactatatgtgccactggag

SEQ ID NO: 3263118 - DNA, 25 bp, Homo sapien
tcctgtgtgacgtagaatttagcca

SEQ ID NO: 3263119 - DNA, 25 bp, Homo sapien
gatggtataattcgctgtgtccttg

SEQ ID NO: 3263120 - DNA, 25 bp, Homo sapien
cttgcagcttcaggtagccaaagga

SEQ ID NO: 3263121 - DNA, 25 bp, Homo sapien
ctaccatgacggtgaggtctgccca

SEQ ID NO: 3263122 - DNA, 25 bp, Homo sapien
tttgcttggctctcgttctctttgc

SEQ ID NO: 3263123 - DNA, 25 bp, Homo sapien
agatgacagggattgagagatgata

SEQ ID NO: 3263124 - DNA, 25 bp, Homo sapien
ttcccacacggaactcactgagaga

SEQ ID NO: 3263125 - DNA, 25 bp, Homo sapien
cttacagggtgtagcggagactcct

SEQ ID NO: 3263126 - DNA, 25 bp, Homo sapien
taaattcccaataagagacctgagc

SEQ ID NO: 3263127 - DNA, 25 bp, Homo sapien
cacagtgcacctacgtttcagagta

SEQ ID NO: 3263128 - DNA, 25 bp, Homo sapien
catgagcggacagggaacagataac

SEQ ID NO: 3263129 - DNA, 25 bp, Homo sapien
agatgccgccagtatattaccaggg

SEQ ID NO: 3263130 - DNA, 25 bp, Homo sapien
catgggcaagatgccgccagtatat

SEQ ID NO: 3263131 - DNA, 25 bp, Homo sapien
gtggaaggcgaggatcaatactatt

SEQ ID NO: 3263132 - DNA, 25 bp, Homo sapien
cagttgtaatgaagaaacgtgtggg

SEQ ID NO: 3263133 - DNA, 25 bp, Homo sapien
tgcggtctggagtcatctggcagat

SEQ ID NO: 3263134 - DNA, 25 bp, Homo sapien
cagctcattaatccccaggtgttag

SEQ ID NO: 3263135 - DNA, 25 bp, Homo sapien
tgccaccggcgagtttcaaacacac

SEQ ID NO: 3263136 - DNA, 25 bp, Homo sapien
gcagatgcataaacaacctcggaaa

SEQ ID NO: 3263137 - DNA, 25 bp, Homo sapien
agcgggcgcccgctcgcaagcttat

SEQ ID NO: 3263138 - DNA, 25 bp, Homo sapien
atgcagcgaaggcaacaagcgtccc

SEQ ID NO: 3263139 - DNA, 25 bp, Homo sapien
cttggctcgcgagggaaggagggcg

SEQ ID NO: 3263140 - DNA, 25 bp, Homo sapien
cgctcgcaagcttattgcatcctac

SEQ ID NO: 3263141 - DNA, 25 bp, Homo sapien
gagccgaaatgctttccaccctcct

SEQ ID NO: 3263142 - DNA, 25 bp, Homo sapien
gaaatgctttccaccctcctcacat

SEQ ID NO: 3263143 - DNA, 25 bp, Homo sapien
cagctgagccgaaatgctttccacc

SEQ ID NO: 3263144 - DNA, 25 bp, Homo sapien
ccagctgagccgaaatgctttccac

SEQ ID NO: 3263145 - DNA, 25 bp, Homo sapien
gagcgagagcttcggcggcggctgc

SEQ ID NO: 3263146 - DNA, 25 bp, Homo sapien
gtgcagaagcgagactcgagagtcc

SEQ ID NO: 3263147 - DNA, 25 bp, Homo sapien
agactcgagagtccaccggccaggg

SEQ ID NO: 3263148 - DNA, 25 bp, Homo sapien
caggggcgtctgtccacgggtctgc

SEQ ID NO: 3263149 - DNA, 25 bp, Homo sapien
gagaggaagcgcaaggagatgccct

SEQ ID NO: 3263150 - DNA, 25 bp, Homo sapien
tactgctgcacaaagttaggctgag

SEQ ID NO: 3263151 - DNA, 25 bp, Homo sapien
gctccaacttggacagctagactgg

SEQ ID NO: 3263152 - DNA, 25 bp, Homo sapien
ggctgagttcgaaggacaccagaga

SEQ ID NO: 3263153 - DNA, 25 bp, Homo sapien
tttgatatttgggaccgaaagtcca

SEQ ID NO: 3263154 - DNA, 25 bp, Homo sapien
ttgtaccatctccttattggctctt

SEQ ID NO: 3263155 - DNA, 25 bp, Homo sapien
ggaccgaaagtccaggatttctctg

SEQ ID NO: 3263156 - DNA, 25 bp, Homo sapien
catctccttattggctctttaagta

SEQ ID NO: 3263157 - DNA, 25 bp, Homo sapien
gacattcaagcattctctggctttg

SEQ ID NO: 3263158 - DNA, 25 bp, Homo sapien
tgtgggctgccttcacaattttggc

SEQ ID NO: 3263159 - DNA, 25 bp, Homo sapien
aaggaatgtcatcaatcgtatctgc

SEQ ID NO: 3263160 - DNA, 25 bp, Homo sapien
tgtttattcactacactctgcagtc

SEQ ID NO: 3263161 - DNA, 25 bp, Homo sapien
aaggaaggatactgatgtcttattc

SEQ ID NO: 3263162 - DNA, 25 bp, Homo sapien
ggaggaaggaaggatactgatgtct

SEQ ID NO: 3263163 - DNA, 25 bp, Homo sapien
ggaaggaaggatactgatgtcttat

SEQ ID NO: 3263164 - DNA, 25 bp, Homo sapien
gaggaaggaaggatactgatgtctt

SEQ ID NO: 3263165 - DNA, 25 bp, Homo sapien
tatgctgtgtagacattgcaaagcc

SEQ ID NO: 3263166 - DNA, 25 bp, Homo sapien
ccagtacggagtattccttcttgca

SEQ ID NO: 3263167 - DNA, 25 bp, Homo sapien
cacttgaacagtggaagatctatag

SEQ ID NO: 3263168 - DNA, 25 bp, Homo sapien
tctatagtgaacaagagataacccc

SEQ ID NO: 3263169 - DNA, 25 bp, Homo sapien
gttcctcctgctcttcaccttttcc

SEQ ID NO: 3263170 - DNA, 25 bp, Homo sapien
cagttcctcctgctcttcacctttt

SEQ ID NO: 3263171 - DNA, 25 bp, Homo sapien
ctcctgctcttcaccttttcccacc

SEQ ID NO: 3263172 - DNA, 25 bp, Homo sapien
tcctcctgctcttcaccttttccca

SEQ ID NO: 3263173 - DNA, 25 bp, Homo sapien
tacacaggaatggaagaagtcgttg

SEQ ID NO: 3263174 - DNA, 25 bp, Homo sapien
ccaaatgtgtcaccttggatcagat

SEQ ID NO: 3263175 - DNA, 25 bp, Homo sapien
ggagggtatccaagtgaagatatac

SEQ ID NO: 3263176 - DNA, 25 bp, Homo sapien
tgtggcccacagacttgatttgttt

SEQ ID NO: 3263177 - DNA, 25 bp, Homo sapien
tcaagggcactggtgaacataaggg

SEQ ID NO: 3263178 - DNA, 25 bp, Homo sapien
tgggtgcttaagtgaagaacatctc

SEQ ID NO: 3263179 - DNA, 25 bp, Homo sapien
tcttatcacccttccgtcaagggca

SEQ ID NO: 3263180 - DNA, 25 bp, Homo sapien
tggtaaactctctctcccgttcagt

SEQ ID NO: 3263181 - DNA, 25 bp, Homo sapien
ccttgtgtagcatggagtgccgttt

SEQ ID NO: 3263182 - DNA, 25 bp, Homo sapien
tgaaagtcccttgtgtagcatggag

SEQ ID NO: 3263183 - DNA, 25 bp, Homo sapien
cttgaaagtcccttgtgtagcatgg

SEQ ID NO: 3263184 - DNA, 25 bp, Homo sapien
agtcccttgtgtagcatggagtgcc

SEQ ID NO: 3263185 - DNA, 25 bp, Homo sapien
taggcatttgacttgatatccccat

SEQ ID NO: 3263186 - DNA, 25 bp, Homo sapien
cttcctggcccctataggcatttga

SEQ ID NO: 3263187 - DNA, 25 bp, Homo sapien
ctaccaccttcctggcccctatagg

SEQ ID NO: 3263188 - DNA, 25 bp, Homo sapien
gcccctataggcatttgacttgata

SEQ ID NO: 3263189 - DNA, 25 bp, Homo sapien
cctgtaggtacactgctggcatctg

SEQ ID NO: 3263190 - DNA, 25 bp, Homo sapien
catttagtgagtttgacccagccag

SEQ ID NO: 3263191 - DNA, 25 bp, Homo sapien
tctgtatgaccagaggagctcccta

SEQ ID NO: 3263192 - DNA, 25 bp, Homo sapien
tagtttgtgtaattcctggccatgc

SEQ ID NO: 3263193 - DNA, 25 bp, Homo sapien
ctaagttcttggacaggtttaatca

SEQ ID NO: 3263194 - DNA, 25 bp, Homo sapien
cctaatcacgtaatcaaatagtgtc

SEQ ID NO: 3263195 - DNA, 25 bp, Homo sapien
gtttaatcaacccttccatgaagag

SEQ ID NO: 3263196 - DNA, 25 bp, Homo sapien
ttggagttgacctctgaagcccagc

SEQ ID NO: 3263197 - DNA, 25 bp, Homo sapien
gggtcgggtcctctgaattcactaa

SEQ ID NO: 3263198 - DNA, 25 bp, Homo sapien
ctgggtcgggtcctctgaattcact

SEQ ID NO: 3263199 - DNA, 25 bp, Homo sapien
gtcgggtcctctgaattcactaaga

SEQ ID NO: 3263200 - DNA, 25 bp, Homo sapien
ggtcctctgaattcactaagatatt

SEQ ID NO: 3263201 - DNA, 25 bp, Homo sapien
ctccacagggagattggcccagttc

SEQ ID NO: 3263202 - DNA, 25 bp, Homo sapien
ctagagcctcactgtagtgcctcca

SEQ ID NO: 3263203 - DNA, 25 bp, Homo sapien
cctcactgtagtgcctccacaggga

SEQ ID NO: 3263204 - DNA, 25 bp, Homo sapien
gcctccacagggagattggcccagt

SEQ ID NO: 3263205 - DNA, 25 bp, Homo sapien
tcctctgcagttcctgtcattttca

SEQ ID NO: 3263206 - DNA, 25 bp, Homo sapien
cctcctctgcagttcctgtcatttt

SEQ ID NO: 3263207 - DNA, 25 bp, Homo sapien
acctcctctgcagttcctgtcattt

SEQ ID NO: 3263208 - DNA, 25 bp, Homo sapien
ccacctcctctgcagttcctgtcat

SEQ ID NO: 3263209 - DNA, 25 bp, Homo sapien
tcataagtttctgaacctcatcatc

SEQ ID NO: 3263210 - DNA, 25 bp, Homo sapien
ctgttttaaaagctgttatctgcat

SEQ ID NO: 3263211 - DNA, 25 bp, Homo sapien
aacaaggcagtcatattatcagtgg

SEQ ID NO: 3263212 - DNA, 25 bp, Homo sapien
ctttagaatcaacaaggcagtcata

SEQ ID NO: 3263213 - DNA, 25 bp, Homo sapien
ttatcagtggattcatttgctgttt

SEQ ID NO: 3263214 - DNA, 25 bp, Homo sapien
accaaagaatcccataagaggcaag

SEQ ID NO: 3263215 - DNA, 25 bp, Homo sapien
gaatcccataagaggcaaggcaatt

SEQ ID NO: 3263216 - DNA, 25 bp, Homo sapien
caaagaatcccataagaggcaaggc

SEQ ID NO: 3263217 - DNA, 25 bp, Homo sapien
gataccaaagaatcccataagaggc

SEQ ID NO: 3263218 - DNA, 25 bp, Homo sapien
ttttcctctgtgatcaccccaatct

SEQ ID NO: 3263219 - DNA, 25 bp, Homo sapien
ttctgccttgttaatgaaacccatt

SEQ ID NO: 3263220 - DNA, 25 bp, Homo sapien
tttaattgccaacccaacatccatt

SEQ ID NO: 3263221 - DNA, 25 bp, Homo sapien
cactgtgcagacatctttaattgcc

SEQ ID NO: 3263222 - DNA, 25 bp, Homo sapien
agccctgacatcactgcatcctcga

SEQ ID NO: 3263223 - DNA, 25 bp, Homo sapien
tagagctgcatcagccgttatcaca

SEQ ID NO: 3263224 - DNA, 25 bp, Homo sapien
aaaaatatggctagagctgcatcag

SEQ ID NO: 3263225 - DNA, 25 bp, Homo sapien
aaggataagagaatagctgagtctc

SEQ ID NO: 3263226 - DNA, 25 bp, Homo sapien
agcatacacattctcgcccacagag

SEQ ID NO: 3263227 - DNA, 25 bp, Homo sapien
cacgcactggcacggagaacagatg

SEQ ID NO: 3263228 - DNA, 25 bp, Homo sapien
gaggcacgcactggcacggagaaca

SEQ ID NO: 3263229 - DNA, 25 bp, Homo sapien
gcactggcacggagaacagatgctg

SEQ ID NO: 3263230 - DNA, 25 bp, Homo sapien
tccttgagtgctggcgctgtgacac

SEQ ID NO: 3263231 - DNA, 25 bp, Homo sapien
cagggtggtccaagtgagctttaca

SEQ ID NO: 3263232 - DNA, 25 bp, Homo sapien
ggttttccctggacgcaattgcaca

SEQ ID NO: 3263233 - DNA, 25 bp, Homo sapien
cacgtgggtagcttcgctggagtta

SEQ ID NO: 3263234 - DNA, 25 bp, Homo sapien
tacagattgccagggagagtaggca

SEQ ID NO: 3263235 - DNA, 25 bp, Homo sapien
atacagattgccagggagagtaggc

SEQ ID NO: 3263236 - DNA, 25 bp, Homo sapien
cagaatacatgttctatacactact

SEQ ID NO: 3263237 - DNA, 25 bp, Homo sapien
catgttctatacactacttccagca

SEQ ID NO: 3263238 - DNA, 25 bp, Homo sapien
tcagggggccacacattacggccat

SEQ ID NO: 3263239 - DNA, 25 bp, Homo sapien
ctcagggggccacacattacggcca

SEQ ID NO: 3263240 - DNA, 25 bp, Homo sapien
ttcgtgcactccctctaccattggt

SEQ ID NO: 3263241 - DNA, 25 bp, Homo sapien
gaaggcaagcgtcctatatttctca

SEQ ID NO: 3263242 - DNA, 25 bp, Homo sapien
tggctccccggtcctgaaaagagct

SEQ ID NO: 3263243 - DNA, 25 bp, Homo sapien
ggtcccaactcaggcatcatttcct

SEQ ID NO: 3263244 - DNA, 25 bp, Homo sapien
ttagaaatcaaactagctgcagcca

SEQ ID NO: 3263245 - DNA, 25 bp, Homo sapien
gaaatcaaactagctgcagccactt

SEQ ID NO: 3263246 - DNA, 25 bp, Homo sapien
tgatgcactgtttagaaatcaaact

SEQ ID NO: 3263247 - DNA, 25 bp, Homo sapien
acccttcacccatgatgcactgttt

SEQ ID NO: 3263248 - DNA, 25 bp, Homo sapien
tattcactgacattagtgccaggat

SEQ ID NO: 3263249 - DNA, 25 bp, Homo sapien
gatcaatagagcttaatgtcactgc

SEQ ID NO: 3263250 - DNA, 25 bp, Homo sapien
tataaggccatacctaactgagaca

SEQ ID NO: 3263251 - DNA, 25 bp, Homo sapien
ctttctcatgaaggaagagttgcca

SEQ ID NO: 3263252 - DNA, 25 bp, Homo sapien
ttctccactctcccaacttgtaaaa

SEQ ID NO: 3263253 - DNA, 25 bp, Homo sapien
aacatgatatttctcctcccatagg

SEQ ID NO: 3263254 - DNA, 25 bp, Homo sapien
tccactctcccaacttgtaaaacat

SEQ ID NO: 3263255 - DNA, 25 bp, Homo sapien
acatgatatttctcctcccataggc

SEQ ID NO: 3263256 - DNA, 25 bp, Homo sapien
ccataattcccgtgtttcatgagag

SEQ ID NO: 3263257 - DNA, 25 bp, Homo sapien
gttttaatgccactattgatatggt

SEQ ID NO: 3263258 - DNA, 25 bp, Homo sapien
ttcccgtgtttcatgagaggaacct

SEQ ID NO: 3263259 - DNA, 25 bp, Homo sapien
cacaagttttaatgccactattgat

SEQ ID NO: 3263260 - DNA, 25 bp, Homo sapien
tattcatgtaggaaccaggcattcg

SEQ ID NO: 3263261 - DNA, 25 bp, Homo sapien
tgtcaagagggtgagcaattattca

SEQ ID NO: 3263262 - DNA, 25 bp, Homo sapien
caggcattcggttcaatgcttcaca

SEQ ID NO: 3263263 - DNA, 25 bp, Homo sapien
taatggttttgaacatgcacaatcc

SEQ ID NO: 3263264 - DNA, 25 bp, Homo sapien
ctttctcttgattacccttgctttt

SEQ ID NO: 3263265 - DNA, 25 bp, Homo sapien
tcttgattacccttgcttttaaatg

SEQ ID NO: 3263266 - DNA, 25 bp, Homo sapien
ctcttgattacccttgcttttaaat

SEQ ID NO: 3263267 - DNA, 25 bp, Homo sapien
ttctcttgattacccttgcttttaa

SEQ ID NO: 3263268 - DNA, 25 bp, Homo sapien
ctgtggtcatttaaaaccatgggca

SEQ ID NO: 3263269 - DNA, 25 bp, Homo sapien
tgtggtcatttaaaaccatgggcat

SEQ ID NO: 3263270 - DNA, 25 bp, Homo sapien
gaacagttcactgtcacagccacac

SEQ ID NO: 3263271 - DNA, 25 bp, Homo sapien
cctccagctctagaacattgtccat

SEQ ID NO: 3263272 - DNA, 25 bp, Homo sapien
cattccacacggtccagaacagttc

SEQ ID NO: 3263273 - DNA, 25 bp, Homo sapien
gaacattgtccattccacacggtcc

SEQ ID NO: 3263274 - DNA, 25 bp, Homo sapien
tacaaggtgggagtagagactcctg

SEQ ID NO: 3263275 - DNA, 25 bp, Homo sapien
gagactcctgtattattaagtggca

SEQ ID NO: 3263276 - DNA, 25 bp, Homo sapien
taataaatggaaattggataccatc

SEQ ID NO: 3263277 - DNA, 25 bp, Homo sapien
caggtaaacccctgcttaatcatga

SEQ ID NO: 3263278 - DNA, 25 bp, Homo sapien
tatatgtagcttccaagacacagga

SEQ ID NO: 3263279 - DNA, 25 bp, Homo sapien
gacttcctttttatgctggctcagc

SEQ ID NO: 3263280 - DNA, 25 bp, Homo sapien
tactgcaaagctttaggacatacct

SEQ ID NO: 3263281 - DNA, 25 bp, Homo sapien
cagaggctcagtccgaaacaatggt

SEQ ID NO: 3263282 - DNA, 25 bp, Homo sapien
taaggattcaaccacataatgcgtg

SEQ ID NO: 3263283 - DNA, 25 bp, Homo sapien
caattcaaacacagggtatcatccc

SEQ ID NO: 3263284 - DNA, 25 bp, Homo sapien
tcattgattgaccactatggagagt

SEQ ID NO: 3263285 - DNA, 25 bp, Homo sapien
tccgtaaattgttgatggccccttc

SEQ ID NO: 3263286 - DNA, 25 bp, Homo sapien
gctcaagtagtcacttcaatgtgga

SEQ ID NO: 3263287 - DNA, 25 bp, Homo sapien
actgttgaagttttccatccttgga

SEQ ID NO: 3263288 - DNA, 25 bp, Homo sapien
tgctttacacataatcgggtacagc

SEQ ID NO: 3263289 - DNA, 25 bp, Homo sapien
cgggtacagcaaatgtttacaggaa

SEQ ID NO: 3263290 - DNA, 25 bp, Homo sapien
tgcagcttgtctgtccgtggaagac

SEQ ID NO: 3263291 - DNA, 25 bp, Homo sapien
tcagaggtcatttccgaaaaagggc

SEQ ID NO: 3263292 - DNA, 25 bp, Homo sapien
catgcaagatgacgagattccccac

SEQ ID NO: 3263293 - DNA, 25 bp, Homo sapien
tattcaggactgctaaagtgcagct

SEQ ID NO: 3263294 - DNA, 25 bp, Homo sapien
caattggctgcatggtcaacatgtg

SEQ ID NO: 3263295 - DNA, 25 bp, Homo sapien
gttttgttcactctacgggccaaca

SEQ ID NO: 3263296 - DNA, 25 bp, Homo sapien
tacttccttaaaccactgctgaagg

SEQ ID NO: 3263297 - DNA, 25 bp, Homo sapien
ccttaaaccactgctgaaggagtca

SEQ ID NO: 3263298 - DNA, 25 bp, Homo sapien
ctggaatgtagaataaaatatttat

SEQ ID NO: 3263299 - DNA, 25 bp, Homo sapien
cagccactcaaacgtgcacagatga

SEQ ID NO: 3263300 - DNA, 25 bp, Homo sapien
gtcagccactcaaacgtgcacagat

SEQ ID NO: 3263301 - DNA, 25 bp, Homo sapien
gagtcagccactcaaacgtgcacag

SEQ ID NO: 3263302 - DNA, 25 bp, Homo sapien
ccagagtcagccactcaaacgtgca

SEQ ID NO: 3263303 - DNA, 25 bp, Homo sapien
atgagttgtttgacataaggcccag

SEQ ID NO: 3263304 - DNA, 25 bp, Homo sapien
aatgagttgtttgacataaggccca

SEQ ID NO: 3263305 - DNA, 25 bp, Homo sapien
taatgagttgtttgacataaggccc

SEQ ID NO: 3263306 - DNA, 25 bp, Homo sapien
tgagttgtttgacataaggcccagt

SEQ ID NO: 3263307 - DNA, 25 bp, Homo sapien
ctgtagcaggatcgtaccagcggca

SEQ ID NO: 3263308 - DNA, 25 bp, Homo sapien
ccagagggcccggtgcatttgtaac

SEQ ID NO: 3263309 - DNA, 25 bp, Homo sapien
agtatgggggcagctatcaccaccc

SEQ ID NO: 3263310 - DNA, 25 bp, Homo sapien
tgtttcatttgggcttgggcaaaaa

SEQ ID NO: 3263311 - DNA, 25 bp, Homo sapien
ccttggctcctgagttggccactca

SEQ ID NO: 3263312 - DNA, 25 bp, Homo sapien
agccttggctcctgagttggccact

SEQ ID NO: 3263313 - DNA, 25 bp, Homo sapien
aagcaacagccttggctcctgagtt

SEQ ID NO: 3263314 - DNA, 25 bp, Homo sapien
tggctcctgagttggccactcatcc

SEQ ID NO: 3263315 - DNA, 25 bp, Homo sapien
tggcactgagttacagcacaggcta

SEQ ID NO: 3263316 - DNA, 25 bp, Homo sapien
cactagttgctaatgtggcactgag

SEQ ID NO: 3263317 - DNA, 25 bp, Homo sapien
gcccagagttgacaggtggtccgca

SEQ ID NO: 3263318 - DNA, 25 bp, Homo sapien
tccgcagtaggtaggaagccatact

SEQ ID NO: 3263319 - DNA, 25 bp, Homo sapien
gatgccagcgtcatgactgctgtac

SEQ ID NO: 3263320 - DNA, 25 bp, Homo sapien
gccagcgtcatgactgctgtacagc

SEQ ID NO: 3263321 - DNA, 25 bp, Homo sapien
tgccagcgtcatgactgctgtacag

SEQ ID NO: 3263322 - DNA, 25 bp, Homo sapien
atgccagcgtcatgactgctgtaca

SEQ ID NO: 3263323 - DNA, 25 bp, Homo sapien
tttccggttgattgcgcacatatca

SEQ ID NO: 3263324 - DNA, 25 bp, Homo sapien
gtttccggttgattgcgcacatatc

SEQ ID NO: 3263325 - DNA, 25 bp, Homo sapien
ggtttccggttgattgcgcacatat

SEQ ID NO: 3263326 - DNA, 25 bp, Homo sapien
ttccggttgattgcgcacatatcag

SEQ ID NO: 3263327 - DNA, 25 bp, Homo sapien
gaccatatgtacaaagcccacagct

SEQ ID NO: 3263328 - DNA, 25 bp, Homo sapien
aactttcactcaatgtgcttgacaa

SEQ ID NO: 3263329 - DNA, 25 bp, Homo sapien
taaaggatgactattgaggcaaaaa

SEQ ID NO: 3263330 - DNA, 25 bp, Homo sapien
tatactatcaacacactaagaacag

SEQ ID NO: 3263331 - DNA, 25 bp, Homo sapien
taagatgtcatcgttacccagtgat

SEQ ID NO: 3263332 - DNA, 25 bp, Homo sapien
tagtgtgggctctaatacaatcaga

SEQ ID NO: 3263333 - DNA, 25 bp, Homo sapien
gacaccagagatgtgagtctacaga

SEQ ID NO: 3263334 - DNA, 25 bp, Homo sapien
tttgcaagtaaagacagaggcctct

SEQ ID NO: 3263335 - DNA, 25 bp, Homo sapien
caggacattggtctgagataagaca

SEQ ID NO: 3263336 - DNA, 25 bp, Homo sapien
ggacagtctcctcaatatatggttc

SEQ ID NO: 3263337 - DNA, 25 bp, Homo sapien
tatggttctggtaaaactggtatac

SEQ ID NO: 3263338 - DNA, 25 bp, Homo sapien
taggtccctatctctcccattaata

SEQ ID NO: 3263339 - DNA, 25 bp, Homo sapien
tgagtaacgacctagaggacagagc

SEQ ID NO: 3263340 - DNA, 25 bp, Homo sapien
tctgggcaatggactgtggatacaa

SEQ ID NO: 3263341 - DNA, 25 bp, Homo sapien
acttttgttatagccacccagggtg

SEQ ID NO: 3263342 - DNA, 25 bp, Homo sapien
tcctttgcaattaggcatggccaca

SEQ ID NO: 3263343 - DNA, 25 bp, Homo sapien
cttgggagggtttgaatttatccat

SEQ ID NO: 3263344 - DNA, 25 bp, Homo sapien
gaacttcctggtgggcacattgtga

SEQ ID NO: 3263345 - DNA, 25 bp, Homo sapien
tatatgccaaaacagggtgaacaca

SEQ ID NO: 3263346 - DNA, 25 bp, Homo sapien
taaaggtcttcttaaaccagatggc

SEQ ID NO: 3263347 - DNA, 25 bp, Homo sapien
ggtacaactcggtctggaaagccag

SEQ ID NO: 3263348 - DNA, 25 bp, Homo sapien
ccagttatgaccactgcttaggagc

SEQ ID NO: 3263349 - DNA, 25 bp, Homo sapien
taagacctagcaacatgcagtcaca

SEQ ID NO: 3263350 - DNA, 25 bp, Homo sapien
gcttaggagcttctcatggccaata

SEQ ID NO: 3263351 - DNA, 25 bp, Homo sapien
aatctcacctttgtctaagacctag

SEQ ID NO: 3263352 - DNA, 25 bp, Homo sapien
ctagaatgggtaatctcaggatggc

SEQ ID NO: 3263353 - DNA, 25 bp, Homo sapien
agttatctccctaggtacagctgac

SEQ ID NO: 3263354 - DNA, 25 bp, Homo sapien
catttctaatgcagtaacccagtga

SEQ ID NO: 3263355 - DNA, 25 bp, Homo sapien
gacttccgctgaaaagagatcaaag

SEQ ID NO: 3263356 - DNA, 25 bp, Homo sapien
agtacaaattacagattccaagaaa

SEQ ID NO: 3263357 - DNA, 25 bp, Homo sapien
ttatattaaatacaagcctgaaata

SEQ ID NO: 3263358 - DNA, 25 bp, Homo sapien
caaaatgtcctgttggtgctttgac

SEQ ID NO: 3263359 - DNA, 25 bp, Homo sapien
ttgtttcagatcctaaaaaatagca

SEQ ID NO: 3263360 - DNA, 25 bp, Homo sapien
tgctcatagcttcaaggaatgtgag

SEQ ID NO: 3263361 - DNA, 25 bp, Homo sapien
ccctatggtggctgtaaacagtttt

SEQ ID NO: 3263362 - DNA, 25 bp, Homo sapien
tttctgcctaggaagcccagcaatg

SEQ ID NO: 3263363 - DNA, 25 bp, Homo sapien
gcttcaaggaatgtgagtatcacag

SEQ ID NO: 3263364 - DNA, 25 bp, Homo sapien
tgaacttctaaaggcgccacgtgca

SEQ ID NO: 3263365 - DNA, 25 bp, Homo sapien
tataagagcaaagtaaggctggccc

SEQ ID NO: 3263366 - DNA, 25 bp, Homo sapien
cattgccagtgctatcggtaccgag

SEQ ID NO: 3263367 - DNA, 25 bp, Homo sapien
tgacttgcactgaatacgagctccg

SEQ ID NO: 3263368 - DNA, 25 bp, Homo sapien
gtgcgtttggccgactgccgtaatt

SEQ ID NO: 3263369 - DNA, 25 bp, Homo sapien
cagttatgccgcaaacaatgatggg

SEQ ID NO: 3263370 - DNA, 25 bp, Homo sapien
tgctgcagttatgccgcaaacaatg

SEQ ID NO: 3263371 - DNA, 25 bp, Homo sapien
taattcttaatgttcgctgctgcag

SEQ ID NO: 3263372 - DNA, 25 bp, Homo sapien
gctgacagtttcatagagccgatta

SEQ ID NO: 3263373 - DNA, 25 bp, Homo sapien
tattcctcacaactcgaggatggga

SEQ ID NO: 3263374 - DNA, 25 bp, Homo sapien
tatatggccaatcccctcttaagtg

SEQ ID NO: 3263375 - DNA, 25 bp, Homo sapien
gcagtcctgcatacaagtccgttct

SEQ ID NO: 3263376 - DNA, 25 bp, Homo sapien
tagtgacttgtttgtagatatttcg

SEQ ID NO: 3263377 - DNA, 25 bp, Homo sapien
gagctgtcactcctacccatagtac

SEQ ID NO: 3263378 - DNA, 25 bp, Homo sapien
gtggtggttcatcaggatcctggca

SEQ ID NO: 3263379 - DNA, 25 bp, Homo sapien
ccatagtactgtggcaagggtggaa

SEQ ID NO: 3263380 - DNA, 25 bp, Homo sapien
gcaaatcgcctagtgtgtgacaagc

SEQ ID NO: 3263381 - DNA, 25 bp, Homo sapien
ggttaaaggcaactcccacatagga

SEQ ID NO: 3263382 - DNA, 25 bp, Homo sapien
gataaaccttgcagtggctctgagg

SEQ ID NO: 3263383 - DNA, 25 bp, Homo sapien
tacagagggcacaggttaactacag

SEQ ID NO: 3263384 - DNA, 25 bp, Homo sapien
cacagtctaatgagtgggcccagca

SEQ ID NO: 3263385 - DNA, 25 bp, Homo sapien
tgtaactatagaaggcaatgcctcc

SEQ ID NO: 3263386 - DNA, 25 bp, Homo sapien
tacaggtccacagaataacactggg

SEQ ID NO: 3263387 - DNA, 25 bp, Homo sapien
taaaaggatcctgtgggtccacatg

SEQ ID NO: 3263388 - DNA, 25 bp, Homo sapien
taaaccctgatgactagaagacagt

SEQ ID NO: 3263389 - DNA, 25 bp, Homo sapien
ttccccagctgacaaggcacatcat

SEQ ID NO: 3263390 - DNA, 25 bp, Homo sapien
tgttgtacatcaaagttcccatggg

SEQ ID NO: 3263391 - DNA, 25 bp, Homo sapien
catgaggcattaaagacccagttta

SEQ ID NO: 3263392 - DNA, 25 bp, Homo sapien
aacgtgtaacactaaattcccaatg

SEQ ID NO: 3263393 - DNA, 25 bp, Homo sapien
caatgataaagggatgagctgttta

SEQ ID NO: 3263394 - DNA, 25 bp, Homo sapien
ttaaaacaggaagtaaactggcaga

SEQ ID NO: 3263395 - DNA, 25 bp, Homo sapien
gtaacaggcattgtaataatagcca

SEQ ID NO: 3263396 - DNA, 25 bp, Homo sapien
gctggcattcctagtctgggttatt

SEQ ID NO: 3263397 - DNA, 25 bp, Homo sapien
cagctcttgaggctgattctaatca

SEQ ID NO: 3263398 - DNA, 25 bp, Homo sapien
cagatgctggcattcctagtctggg

SEQ ID NO: 3263399 - DNA, 25 bp, Homo sapien
ggttattcctcccacaaagaccaca

SEQ ID NO: 3263400 - DNA, 25 bp, Homo sapien
tcaggctagtacataaggagaaaac

SEQ ID NO: 3263401 - DNA, 25 bp, Homo sapien
cgcacagatctgagacatcatttaa

SEQ ID NO: 3263402 - DNA, 25 bp, Homo sapien
aacgcatgggcttttgttactacga

SEQ ID NO: 3263403 - DNA, 25 bp, Homo sapien
tactacgatgtcttaagatgactgg

SEQ ID NO: 3263404 - DNA, 25 bp, Homo sapien
taactgacaatgacggctaagagac

SEQ ID NO: 3263405 - DNA, 25 bp, Homo sapien
gcggtagtataaaccacaggatgca

SEQ ID NO: 3263406 - DNA, 25 bp, Homo sapien
taagaggagaatgatagcggtagta

SEQ ID NO: 3263407 - DNA, 25 bp, Homo sapien
ggtgtatagttcagatcccgtcaaa

SEQ ID NO: 3263408 - DNA, 25 bp, Homo sapien
tatgagacacctttgagtagaaaaa

SEQ ID NO: 3263409 - DNA, 25 bp, Homo sapien
attgtctaagtaccaggatctgaac

SEQ ID NO: 3263410 - DNA, 25 bp, Homo sapien
ggcatcctgtgtgtaagggaataaa

SEQ ID NO: 3263411 - DNA, 25 bp, Homo sapien
tttacaagtgttacttcaggcctca

SEQ ID NO: 3263412 - DNA, 25 bp, Homo sapien
gagtaacctcaaaccatttctggga

SEQ ID NO: 3263413 - DNA, 25 bp, Homo sapien
gaaacagcgctagattgcaaagtag

SEQ ID NO: 3263414 - DNA, 25 bp, Homo sapien
cactgtgtatccttcggcaaatgaa

SEQ ID NO: 3263415 - DNA, 25 bp, Homo sapien
gaaatgtctttcacactcgtcagta

SEQ ID NO: 3263416 - DNA, 25 bp, Homo sapien
cgacgcagtgtcacattaacaggga

SEQ ID NO: 3263417 - DNA, 25 bp, Homo sapien
ttcagcaaatcgaaatcccaccggg

SEQ ID NO: 3263418 - DNA, 25 bp, Homo sapien
gctccatgtgcaattcgacgcagtg

SEQ ID NO: 3263419 - DNA, 25 bp, Homo sapien
catctgaatagagtatatggcaccc

SEQ ID NO: 3263420 - DNA, 25 bp, Homo sapien
gtacgtcgttttccatcatcagcca

SEQ ID NO: 3263421 - DNA, 25 bp, Homo sapien
tgcggaatgcaatgagttgaagctt

SEQ ID NO: 3263422 - DNA, 25 bp, Homo sapien
gttgaagcttgtaaagagagtcatc

SEQ ID NO: 3263423 - DNA, 25 bp, Homo sapien
gagagtcatcagttggtctgagttc

SEQ ID NO: 3263424 - DNA, 25 bp, Homo sapien
gaaggaggaagctgaatagaagcct

SEQ ID NO: 3263425 - DNA, 25 bp, Homo sapien
agctgaatagaagcctccacaatag

SEQ ID NO: 3263426 - DNA, 25 bp, Homo sapien
gaatagaagcctccacaatagtatt

SEQ ID NO: 3263427 - DNA, 25 bp, Homo sapien
gggaaggaggaagctgaatagaagc

SEQ ID NO: 3263428 - DNA, 25 bp, Homo sapien
tcaaggatctcaatgatcaggctgt

SEQ ID NO: 3263429 - DNA, 25 bp, Homo sapien
ggtttagattcagtacacttagcag

SEQ ID NO: 3263430 - DNA, 25 bp, Homo sapien
tagcagaaatttccttgagactagg

SEQ ID NO: 3263431 - DNA, 25 bp, Homo sapien
caaacctccacacaacaaaagaatg

SEQ ID NO: 3263432 - DNA, 25 bp, Homo sapien
tgtttaatactaagcccaaatccta

SEQ ID NO: 3263433 - DNA, 25 bp, Homo sapien
tgctcagatgtatcccctgaatgct

SEQ ID NO: 3263434 - DNA, 25 bp, Homo sapien
caaatcgaatcatgttattccagtt

SEQ ID NO: 3263435 - DNA, 25 bp, Homo sapien
cctaagttcaccatataatttgatg

SEQ ID NO: 3263436 - DNA, 25 bp, Homo sapien
taacaaatggttgtgaggaccagat

SEQ ID NO: 3263437 - DNA, 25 bp, Homo sapien
cacaaaagtctagggaactgtcggt

SEQ ID NO: 3263438 - DNA, 25 bp, Homo sapien
caggaccatgacaagcacaaaagtc

SEQ ID NO: 3263439 - DNA, 25 bp, Homo sapien
agctggttaacactgcacgactttg

SEQ ID NO: 3263440 - DNA, 25 bp, Homo sapien
ggcaaaaatgcctagggcccttgaa

SEQ ID NO: 3263441 - DNA, 25 bp, Homo sapien
ggttgacttctccactaggcttggc

SEQ ID NO: 3263442 - DNA, 25 bp, Homo sapien
gaaagtcgtaatgcagttcttcctg

SEQ ID NO: 3263443 - DNA, 25 bp, Homo sapien
ggcgcagtgccaaaggctcatgata

SEQ ID NO: 3263444 - DNA, 25 bp, Homo sapien
actgtaaatagtcttaaatgattgc

SEQ ID NO: 3263445 - DNA, 25 bp, Homo sapien
tgtaaatagtcttaaatgattgcag

SEQ ID NO: 3263446 - DNA, 25 bp, Homo sapien
ctgtaaatagtcttaaatgattgca

SEQ ID NO: 3263447 - DNA, 25 bp, Homo sapien
gacttgatgacataagcttccagag

SEQ ID NO: 3263448 - DNA, 25 bp, Homo sapien
agtcctgtacgatcagaggctgcca

SEQ ID NO: 3263449 - DNA, 25 bp, Homo sapien
tctggaacacggtacaggtcatccc

SEQ ID NO: 3263450 - DNA, 25 bp, Homo sapien
tcatccccgtgaagccagtagactt

SEQ ID NO: 3263451 - DNA, 25 bp, Homo sapien
cctgtcaatacagacagccaccagg

SEQ ID NO: 3263452 - DNA, 25 bp, Homo sapien
ctgtcaatacagacagccaccaggc

SEQ ID NO: 3263453 - DNA, 25 bp, Homo sapien
tgccctagagttttaaaggaattca

SEQ ID NO: 3263454 - DNA, 25 bp, Homo sapien
acctgtcaatacagacagccaccag

SEQ ID NO: 3263455 - DNA, 25 bp, Homo sapien
tgaaacctgggcaaacaatcagata

SEQ ID NO: 3263456 - DNA, 25 bp, Homo sapien
gaaaatgccaatagcttcacaagtg

SEQ ID NO: 3263457 - DNA, 25 bp, Homo sapien
tcacaagtgttggaaggcatcccag

SEQ ID NO: 3263458 - DNA, 25 bp, Homo sapien
gcagtaagagaagatatccacccca

SEQ ID NO: 3263459 - DNA, 25 bp, Homo sapien
tagccggtaggtagcaatgcgctga

SEQ ID NO: 3263460 - DNA, 25 bp, Homo sapien
gcgctgaagacactgcacaatccta

SEQ ID NO: 3263461 - DNA, 25 bp, Homo sapien
aggctttagcttccctctgcgccag

SEQ ID NO: 3263462 - DNA, 25 bp, Homo sapien
tgttgaataaacgtgagctccaccg

SEQ ID NO: 3263463 - DNA, 25 bp, Homo sapien
ttgccacggcattggtaagattgag

SEQ ID NO: 3263464 - DNA, 25 bp, Homo sapien
ctgttgccacggcattggtaagatt

SEQ ID NO: 3263465 - DNA, 25 bp, Homo sapien
tgttgccacggcattggtaagattg

SEQ ID NO: 3263466 - DNA, 25 bp, Homo sapien
tgccacggcattggtaagattgagg

SEQ ID NO: 3263467 - DNA, 25 bp, Homo sapien
cgggatatatcccactgccatgggt

SEQ ID NO: 3263468 - DNA, 25 bp, Homo sapien
catactgacagcgagaataatcatc

SEQ ID NO: 3263469 - DNA, 25 bp, Homo sapien
tctatcacatctgcgccaagctttt

SEQ ID NO: 3263470 - DNA, 25 bp, Homo sapien
aataatcatcatctgcccaaaagcc

SEQ ID NO: 3263471 - DNA, 25 bp, Homo sapien
ccacgtttggtctggacatgacagc

SEQ ID NO: 3263472 - DNA, 25 bp, Homo sapien
tgttgtttaccaccctctctggagg

SEQ ID NO: 3263473 - DNA, 25 bp, Homo sapien
tctggaggacagtactgtgcagaac

SEQ ID NO: 3263474 - DNA, 25 bp, Homo sapien
gcagaactctctaataccacaatat

SEQ ID NO: 3263475 - DNA, 25 bp, Homo sapien
ctgaatattagaaatggttagggca

SEQ ID NO: 3263476 - DNA, 25 bp, Homo sapien
tctaaatggctgtcagtaaatccaa

SEQ ID NO: 3263477 - DNA, 25 bp, Homo sapien
gtcagtaaatccaatttccaagatg

SEQ ID NO: 3263478 - DNA, 25 bp, Homo sapien
gtttctaaatggctgtcagtaaatc

SEQ ID NO: 3263479 - DNA, 25 bp, Homo sapien
tggctgtcagtaaatccaatttcca

SEQ ID NO: 3263480 - DNA, 25 bp, Homo sapien
ttgcaatcaaggagcagttgtgaat

SEQ ID NO: 3263481 - DNA, 25 bp, Homo sapien
cttgcaatcaaggagcagttgtgaa

SEQ ID NO: 3263482 - DNA, 25 bp, Homo sapien
tgcaatcaaggagcagttgtgaatc

SEQ ID NO: 3263483 - DNA, 25 bp, Homo sapien
gcaatcaaggagcagttgtgaatca

SEQ ID NO: 3263484 - DNA, 25 bp, Homo sapien
tctccttcaaacacaacttggcgat

SEQ ID NO: 3263485 - DNA, 25 bp, Homo sapien
caacacttgcatgtcctgatcaata

SEQ ID NO: 3263486 - DNA, 25 bp, Homo sapien
gattcatcggtttcaactattctcc

SEQ ID NO: 3263487 - DNA, 25 bp, Homo sapien
acaacttggcgatgagatggagtca

SEQ ID NO: 3263488 - DNA, 25 bp, Homo sapien
aaagacggcaattcaagcggagggt

SEQ ID NO: 3263489 - DNA, 25 bp, Homo sapien
tagaaagacggcaattcaagcggag

SEQ ID NO: 3263490 - DNA, 25 bp, Homo sapien
agaaagacggcaattcaagcggagg

SEQ ID NO: 3263491 - DNA, 25 bp, Homo sapien
gtagaaagacggcaattcaagcgga

SEQ ID NO: 3263492 - DNA, 25 bp, Homo sapien
gtggcatcctaagagtatcagatga

SEQ ID NO: 3263493 - DNA, 25 bp, Homo sapien
cagtggcatcctaagagtatcagat

SEQ ID NO: 3263494 - DNA, 25 bp, Homo sapien
tattcctcttcagtggcatcctaag

SEQ ID NO: 3263495 - DNA, 25 bp, Homo sapien
atttagagttattcctcttcagtgg

SEQ ID NO: 3263496 - DNA, 25 bp, Homo sapien
tgcttcacgcctgtgactggttggg

SEQ ID NO: 3263497 - DNA, 25 bp, Homo sapien
gacttaggataaacacacctggtat

SEQ ID NO: 3263498 - DNA, 25 bp, Homo sapien
tctcctttacccagcgatgcatcca

SEQ ID NO: 3263499 - DNA, 25 bp, Homo sapien
caaaagatactcagtctggaattcc

SEQ ID NO: 3263500 - DNA, 25 bp, Homo sapien
agaccgtaatgacgcaagataatca

SEQ ID NO: 3263501 - DNA, 25 bp, Homo sapien
aaagaccgtaatgacgcaagataat

SEQ ID NO: 3263502 - DNA, 25 bp, Homo sapien
aatcaaaagttccttgagataatga

SEQ ID NO: 3263503 - DNA, 25 bp, Homo sapien
gtaatgacgcaagataatcaaaagt

SEQ ID NO: 3263504 - DNA, 25 bp, Homo sapien
gaaattttcccagactagcaaagct

SEQ ID NO: 3263505 - DNA, 25 bp, Homo sapien
tttaggtactggctcaaatgcttcc

SEQ ID NO: 3263506 - DNA, 25 bp, Homo sapien
tactgctcagcatgaacgtgctctc

SEQ ID NO: 3263507 - DNA, 25 bp, Homo sapien
ttctgaggagattacatccccatga

SEQ ID NO: 3263508 - DNA, 25 bp, Homo sapien
cagattggtgagtcctcgaaatatg

SEQ ID NO: 3263509 - DNA, 25 bp, Homo sapien
tcctattcgattgtttgtcagatcc

SEQ ID NO: 3263510 - DNA, 25 bp, Homo sapien
ccagattggtgagtcctcgaaatat

SEQ ID NO: 3263511 - DNA, 25 bp, Homo sapien
tgcattcagacatcctattcgattg

SEQ ID NO: 3263512 - DNA, 25 bp, Homo sapien
tcttggttaaagaaggtctcatgca

SEQ ID NO: 3263513 - DNA, 25 bp, Homo sapien
aacagcacccaggtatcgcacaaga

SEQ ID NO: 3263514 - DNA, 25 bp, Homo sapien
cattcagtattcaagaacagcaccc

SEQ ID NO: 3263515 - DNA, 25 bp, Homo sapien
gcacaagacctttattctagcaact

SEQ ID NO: 3263516 - DNA, 25 bp, Homo sapien
acctggcatggcatgactcgcatca

SEQ ID NO: 3263517 - DNA, 25 bp, Homo sapien
cctggcatggcatgactcgcatcat

SEQ ID NO: 3263518 - DNA, 25 bp, Homo sapien
ggaggtgcagcctgtttacggtcat

SEQ ID NO: 3263519 - DNA, 25 bp, Homo sapien
ctgtgtctggaggtgcagcctgttt

SEQ ID NO: 3263520 - DNA, 25 bp, Homo sapien
tctggaggtgcagcctgtttacggt

SEQ ID NO: 3263521 - DNA, 25 bp, Homo sapien
tgtctggaggtgcagcctgtttacg

SEQ ID NO: 3263522 - DNA, 25 bp, Homo sapien
cctctttctgtatcagggacctggc

SEQ ID NO: 3263523 - DNA, 25 bp, Homo sapien
catcatgttaaagtaagttgacagc

SEQ ID NO: 3263524 - DNA, 25 bp, Homo sapien
gggacctggccaggtaaagctcaaa

SEQ ID NO: 3263525 - DNA, 25 bp, Homo sapien
caaactcgtaagcaagcaattcaaa

SEQ ID NO: 3263526 - DNA, 25 bp, Homo sapien
aaggcacctggatctatactactaa

SEQ ID NO: 3263527 - DNA, 25 bp, Homo sapien
ggatctatactactaataagattgt

SEQ ID NO: 3263528 - DNA, 25 bp, Homo sapien
cctggatctatactactaataagat

SEQ ID NO: 3263529 - DNA, 25 bp, Homo sapien
tctttttagagatgacagtccccag

SEQ ID NO: 3263530 - DNA, 25 bp, Homo sapien
cctggaagtagaccctggaccactg

SEQ ID NO: 3263531 - DNA, 25 bp, Homo sapien
cttcctggaagtagaccctggacca

SEQ ID NO: 3263532 - DNA, 25 bp, Homo sapien
tggaccactggcgccacctgtcagc

SEQ ID NO: 3263533 - DNA, 25 bp, Homo sapien
gaccactggcgccacctgtcagcac

SEQ ID NO: 3263534 - DNA, 25 bp, Homo sapien
tgttctctaacacaagaggcccagg

SEQ ID NO: 3263535 - DNA, 25 bp, Homo sapien
gccaggactccggtctggaccttga

SEQ ID NO: 3263536 - DNA, 25 bp, Homo sapien
tcgtgaataaacatacccctggctg

SEQ ID NO: 3263537 - DNA, 25 bp, Homo sapien
tcaacactcggttttcacactgaag

SEQ ID NO: 3263538 - DNA, 25 bp, Homo sapien
atactagtgtttttccccttgacat

SEQ ID NO: 3263539 - DNA, 25 bp, Homo sapien
tgttttcgccatgtgacatgcaagt

SEQ ID NO: 3263540 - DNA, 25 bp, Homo sapien
cttgacatcacatcctcgcttctgt

SEQ ID NO: 3263541 - DNA, 25 bp, Homo sapien
tcgcttctgttttcgccatgtgaca

SEQ ID NO: 3263542 - DNA, 25 bp, Homo sapien
cagctcggatatcttattgttactc

SEQ ID NO: 3263543 - DNA, 25 bp, Homo sapien
ttccggaacaagatttcccaagcag

SEQ ID NO: 3263544 - DNA, 25 bp, Homo sapien
tccggaacaagatttcccaagcagc

SEQ ID NO: 3263545 - DNA, 25 bp, Homo sapien
cagagtctagggttttaactgcgac

SEQ ID NO: 3263546 - DNA, 25 bp, Homo sapien
gctttgagattaaagagccacattt

SEQ ID NO: 3263547 - DNA, 25 bp, Homo sapien
tgctaagtacagcttgaggttgagt

SEQ ID NO: 3263548 - DNA, 25 bp, Homo sapien
tgactgacgttagaaacttcacagg

SEQ ID NO: 3263549 - DNA, 25 bp, Homo sapien
tgttgacaacactcacaccttgtat

SEQ ID NO: 3263550 - DNA, 25 bp, Homo sapien
tgaaaggcatctcccggaacctgtg

SEQ ID NO: 3263551 - DNA, 25 bp, Homo sapien
tgctattgcaagtcccagaatggag

SEQ ID NO: 3263552 - DNA, 25 bp, Homo sapien
gggcatcaaccattgtagggaaaaa

SEQ ID NO: 3263553 - DNA, 25 bp, Homo sapien
tcggggccgcccatcgtgcttgcag

SEQ ID NO: 3263554 - DNA, 25 bp, Homo sapien
ccatcgtgcttgcagccggcgggca

SEQ ID NO: 3263555 - DNA, 25 bp, Homo sapien
agcgctaacagcgagagcggcagca

SEQ ID NO: 3263556 - DNA, 25 bp, Homo sapien
cagcgcgagcagcgctaacagcgag

SEQ ID NO: 3263557 - DNA, 25 bp, Homo sapien
gggtcacggccgcatgggtcccagc

SEQ ID NO: 3263558 - DNA, 25 bp, Homo sapien
gcggcgaccggagccttatggcggc

SEQ ID NO: 3263559 - DNA, 25 bp, Homo sapien
gacatgctcctttgtccgctgcggc

SEQ ID NO: 3263560 - DNA, 25 bp, Homo sapien
tgcggctgcgctgggcctctaggga

SEQ ID NO: 3263561 - DNA, 25 bp, Homo sapien
tgatctacctgataatactttttct

SEQ ID NO: 3263562 - DNA, 25 bp, Homo sapien
tatcccaatacactggttttatcac

SEQ ID NO: 3263563 - DNA, 25 bp, Homo sapien
gaggttctagttgatctacctgata

SEQ ID NO: 3263564 - DNA, 25 bp, Homo sapien
cattgtcattgtcaccttgttgagg

SEQ ID NO: 3263565 - DNA, 25 bp, Homo sapien
tgctatttccgctgtttctctccaa

SEQ ID NO: 3263566 - DNA, 25 bp, Homo sapien
tagatgggccatgaaggttgcattt

SEQ ID NO: 3263567 - DNA, 25 bp, Homo sapien
agacgcagtgccaatccaagttcat

SEQ ID NO: 3263568 - DNA, 25 bp, Homo sapien
caaagacgcagtgccaatccaagtt

SEQ ID NO: 3263569 - DNA, 25 bp, Homo sapien
cagctggcttaacctatgaacctcc

SEQ ID NO: 3263570 - DNA, 25 bp, Homo sapien
ttgcacccagctggcttaacctatg

SEQ ID NO: 3263571 - DNA, 25 bp, Homo sapien
ctgccttgcacccagctggcttaac

SEQ ID NO: 3263572 - DNA, 25 bp, Homo sapien
gctggcttaacctatgaacctccat

SEQ ID NO: 3263573 - DNA, 25 bp, Homo sapien
taatgactgaattcagcacgatgat

SEQ ID NO: 3263574 - DNA, 25 bp, Homo sapien
gctgaaatggccaatacagggccaa

SEQ ID NO: 3263575 - DNA, 25 bp, Homo sapien
tacagggccaatagtaatgactgaa

SEQ ID NO: 3263576 - DNA, 25 bp, Homo sapien
caggatttagcaatagctgaaatgg

SEQ ID NO: 3263577 - DNA, 25 bp, Homo sapien
ttctgtacataagaagtttggaaac

SEQ ID NO: 3263578 - DNA, 25 bp, Homo sapien
tacataagaagtttggaaactgagc

SEQ ID NO: 3263579 - DNA, 25 bp, Homo sapien
ctagatgggtaacccagtggtgaaa

SEQ ID NO: 3263580 - DNA, 25 bp, Homo sapien
cctagatgggtaacccagtggtgaa

SEQ ID NO: 3263581 - DNA, 25 bp, Homo sapien
gagtttgccctgcaagagacagtca

SEQ ID NO: 3263582 - DNA, 25 bp, Homo sapien
cactcgaatgtgcttggaaagggaa

SEQ ID NO: 3263583 - DNA, 25 bp, Homo sapien
tctcagaatgttcagaggcgccagg

SEQ ID NO: 3263584 - DNA, 25 bp, Homo sapien
tgaaagcgcctttccggctgtgacg

SEQ ID NO: 3263585 - DNA, 25 bp, Homo sapien
aacacaagaagaaacgcctggtgca

SEQ ID NO: 3263586 - DNA, 25 bp, Homo sapien
acacaagaagaaacgcctggtgcag

SEQ ID NO: 3263587 - DNA, 25 bp, Homo sapien
agaagaaacgcctggtgcagagccc

SEQ ID NO: 3263588 - DNA, 25 bp, Homo sapien
caagaagaaacgcctggtgcagagc

SEQ ID NO: 3263589 - DNA, 25 bp, Homo sapien
atttcattaactctaagttttgaag

SEQ ID NO: 3263590 - DNA, 25 bp, Homo sapien
ttatttcattaactctaagttttga

SEQ ID NO: 3263591 - DNA, 25 bp, Homo sapien
tatttcattaactctaagttttgaa

SEQ ID NO: 3263592 - DNA, 25 bp, Homo sapien
gtataagctgcactgatcctgacct

SEQ ID NO: 3263593 - DNA, 25 bp, Homo sapien
cccagcctcagtaagtgcaactgtg

SEQ ID NO: 3263594 - DNA, 25 bp, Homo sapien
tgtagaatgagttcctctggccatg

SEQ ID NO: 3263595 - DNA, 25 bp, Homo sapien
ttttggcctgaggatggaagtcttc

SEQ ID NO: 3263596 - DNA, 25 bp, Homo sapien
tccactctccctcagttacgggaga

SEQ ID NO: 3263597 - DNA, 25 bp, Homo sapien
ctcctgagcaaagagggttgtcttt

SEQ ID NO: 3263598 - DNA, 25 bp, Homo sapien
tatttcaattggcaaggaaagtcca

SEQ ID NO: 3263599 - DNA, 25 bp, Homo sapien
gtttgtctccagtcccgccaggggc

SEQ ID NO: 3263600 - DNA, 25 bp, Homo sapien
ggcacttttctcttcagcgtcttct

SEQ ID NO: 3263601 - DNA, 25 bp, Homo sapien
gcacttttctcttcagcgtcttctt

SEQ ID NO: 3263602 - DNA, 25 bp, Homo sapien
cactgtgtgtgctacacaaatacca

SEQ ID NO: 3263603 - DNA, 25 bp, Homo sapien
cagtcttgtccactgtgtgtgctac

SEQ ID NO: 3263604 - DNA, 25 bp, Homo sapien
tgtccactgtgtgtgctacacaaat

SEQ ID NO: 3263605 - DNA, 25 bp, Homo sapien
tcttgtccactgtgtgtgctacaca

SEQ ID NO: 3263606 - DNA, 25 bp, Homo sapien
aaggaggagctttgagctgtgccct

SEQ ID NO: 3263607 - DNA, 25 bp, Homo sapien
gaaggaggagctttgagctgtgccc

SEQ ID NO: 3263608 - DNA, 25 bp, Homo sapien
gtatgagaacctcagtgaactgaca

SEQ ID NO: 3263609 - DNA, 25 bp, Homo sapien
gcaatcagtttataactatgtgaag

SEQ ID NO: 3263610 - DNA, 25 bp, Homo sapien
agcagtgtagctccgtagcagtgca

SEQ ID NO: 3263611 - DNA, 25 bp, Homo sapien
tatgtgaagatttgtgtatgagaac

SEQ ID NO: 3263612 - DNA, 25 bp, Homo sapien
cgttcatatgtgcacgtgtacgtgt

SEQ ID NO: 3263613 - DNA, 25 bp, Homo sapien
cacacacacgttcatatgtgcacgt

SEQ ID NO: 3263614 - DNA, 25 bp, Homo sapien
ttcatatgtgcacgtgtacgtgtac

SEQ ID NO: 3263615 - DNA, 25 bp, Homo sapien
cacacgttcatatgtgcacgtgtac

SEQ ID NO: 3263616 - DNA, 25 bp, Homo sapien
atggactggccacagaccgtcctgc

SEQ ID NO: 3263617 - DNA, 25 bp, Homo sapien
tgtttagaattgtttggccttccga

SEQ ID NO: 3263618 - DNA, 25 bp, Homo sapien
ggccttccgatggactggccacaga

SEQ ID NO: 3263619 - DNA, 25 bp, Homo sapien
ttagaattgtttggccttccgatgg

SEQ ID NO: 3263620 - DNA, 25 bp, Homo sapien
tcttcaacgtgctgatcagtatcat

SEQ ID NO: 3263621 - DNA, 25 bp, Homo sapien
aatcctgctgttgatcgccaataaa

SEQ ID NO: 3263622 - DNA, 25 bp, Homo sapien
tgttgatcgccaataaacgggaact

SEQ ID NO: 3263623 - DNA, 25 bp, Homo sapien
gagcacttgagaatgaacagtaact

SEQ ID NO: 3263624 - DNA, 25 bp, Homo sapien
ttgtaatgagcacttgagaatgaac

SEQ ID NO: 3263625 - DNA, 25 bp, Homo sapien
gggcataattgtttatagaccataa

SEQ ID NO: 3263626 - DNA, 25 bp, Homo sapien
ggcataattgtttatagaccataaa

SEQ ID NO: 3263627 - DNA, 25 bp, Homo sapien
ccaattcattttggtggatctggag

SEQ ID NO: 3263628 - DNA, 25 bp, Homo sapien
gcataattgtttatagaccataaag

SEQ ID NO: 3263629 - DNA, 25 bp, Homo sapien
tgcttcagggtattggtgctgccac

SEQ ID NO: 3263630 - DNA, 25 bp, Homo sapien
ggatcatgatacacttctggatggt

SEQ ID NO: 3263631 - DNA, 25 bp, Homo sapien
tcttaagactctctaccaactgggt

SEQ ID NO: 3263632 - DNA, 25 bp, Homo sapien
aagatctgctttatccaacgaaagg

SEQ ID NO: 3263633 - DNA, 25 bp, Homo sapien
gctttccagcaaccaattaatgttt

SEQ ID NO: 3263634 - DNA, 25 bp, Homo sapien
aatgttttctccgatagatgtttct

SEQ ID NO: 3263635 - DNA, 25 bp, Homo sapien
gggtaatctgtcttcaatgttaagc

SEQ ID NO: 3263636 - DNA, 25 bp, Homo sapien
ttcttttattctcatagccgtgctt

SEQ ID NO: 3263637 - DNA, 25 bp, Homo sapien
aagagaatagaagatacataaagag

SEQ ID NO: 3263638 - DNA, 25 bp, Homo sapien
ctaagagaatagaagatacataaag

SEQ ID NO: 3263639 - DNA, 25 bp, Homo sapien
taagagaatagaagatacataaaga

SEQ ID NO: 3263640 - DNA, 25 bp, Homo sapien
tctgccagtagtcaccttgacagct

SEQ ID NO: 3263641 - DNA, 25 bp, Homo sapien
ttcaaatatttcaactgtagtagac

SEQ ID NO: 3263642 - DNA, 25 bp, Homo sapien
tgttgaggcattccctactggctgc

SEQ ID NO: 3263643 - DNA, 25 bp, Homo sapien
gccagtagtcaccttgacagctttc

SEQ ID NO: 3263644 - DNA, 25 bp, Homo sapien
gctatgctcctgaggccaaatgcca

SEQ ID NO: 3263645 - DNA, 25 bp, Homo sapien
ccagttcatcaactatagggtagca

SEQ ID NO: 3263646 - DNA, 25 bp, Homo sapien
ggccaaatgccagttcatcaactat

SEQ ID NO: 3263647 - DNA, 25 bp, Homo sapien
tgacatcctttcttggctatgctcc

SEQ ID NO: 3263648 - DNA, 25 bp, Homo sapien
gcctaaatcccgatttcacttcagt

SEQ ID NO: 3263649 - DNA, 25 bp, Homo sapien
tccctgagcctaaatcccgatttca

SEQ ID NO: 3263650 - DNA, 25 bp, Homo sapien
agcctaaatcccgatttcacttcag

SEQ ID NO: 3263651 - DNA, 25 bp, Homo sapien
gtctgctccctgagcctaaatcccg

SEQ ID NO: 3263652 - DNA, 25 bp, Homo sapien
gcagggcaacatcccatagttttcg

SEQ ID NO: 3263653 - DNA, 25 bp, Homo sapien
gagcagggcaacatcccatagtttt

SEQ ID NO: 3263654 - DNA, 25 bp, Homo sapien
tgcctctccatttcgtttctctact

SEQ ID NO: 3263655 - DNA, 25 bp, Homo sapien
cagagcagggcaacatcccatagtt

SEQ ID NO: 3263656 - DNA, 25 bp, Homo sapien
ggctttccagtctagttgatctaaa

SEQ ID NO: 3263657 - DNA, 25 bp, Homo sapien
gatcatgggcttccaatgcattgct

SEQ ID NO: 3263658 - DNA, 25 bp, Homo sapien
ttttactatcaccaaaattgttctg

SEQ ID NO: 3263659 - DNA, 25 bp, Homo sapien
tactttatttggctcgatttcattc

SEQ ID NO: 3263660 - DNA, 25 bp, Homo sapien
gaataatccattgcaccaaccactg

SEQ ID NO: 3263661 - DNA, 25 bp, Homo sapien
aatgacatagtatcactgaagaggc

SEQ ID NO: 3263662 - DNA, 25 bp, Homo sapien
gtagatgtaccctttgcacctgccc

SEQ ID NO: 3263663 - DNA, 25 bp, Homo sapien
tcttctccaatgacatagtatcact

SEQ ID NO: 3263664 - DNA, 25 bp, Homo sapien
gcagttgaacatagaacctcagagc

SEQ ID NO: 3263665 - DNA, 25 bp, Homo sapien
tgtgatgagcggcagttgaacatag

SEQ ID NO: 3263666 - DNA, 25 bp, Homo sapien
gcggcagttgaacatagaacctcag

SEQ ID NO: 3263667 - DNA, 25 bp, Homo sapien
tgagcggcagttgaacatagaacct

SEQ ID NO: 3263668 - DNA, 25 bp, Homo sapien
aatcagtggacttgaagagaccata

SEQ ID NO: 3263669 - DNA, 25 bp, Homo sapien
agtgggcatcttggcattaactggt

SEQ ID NO: 3263670 - DNA, 25 bp, Homo sapien
gagaccatagtagacctggagagtg

SEQ ID NO: 3263671 - DNA, 25 bp, Homo sapien
cattaactggtacagaccaacactg

SEQ ID NO: 3263672 - DNA, 25 bp, Homo sapien
gatggctgcaaattcatgccttaga

SEQ ID NO: 3263673 - DNA, 25 bp, Homo sapien
agatgatggctgcaaattcatgcct

SEQ ID NO: 3263674 - DNA, 25 bp, Homo sapien
tgatggctgcaaattcatgccttag

SEQ ID NO: 3263675 - DNA, 25 bp, Homo sapien
tggctgcaaattcatgccttagagc

SEQ ID NO: 3263676 - DNA, 25 bp, Homo sapien
ccacttgggtgtacaccaggtcaaa

SEQ ID NO: 3263677 - DNA, 25 bp, Homo sapien
caaggagggctacagttacgaaaat

SEQ ID NO: 3263678 - DNA, 25 bp, Homo sapien
taatgatgctacgatatgatttgcc

SEQ ID NO: 3263679 - DNA, 25 bp, Homo sapien
taagacgcagataggaacattagct

SEQ ID NO: 3263680 - DNA, 25 bp, Homo sapien
gaggatgtgcttctctaaagcggga

SEQ ID NO: 3263681 - DNA, 25 bp, Homo sapien
gacaattccagagcaactacagagt

SEQ ID NO: 3263682 - DNA, 25 bp, Homo sapien
tcaaacttgtcagtagccacaccag

SEQ ID NO: 3263683 - DNA, 25 bp, Homo sapien
tctgtggaaacccatacccactggg

SEQ ID NO: 3263684 - DNA, 25 bp, Homo sapien
aacggattttaactgtgtgtcttgg

SEQ ID NO: 3263685 - DNA, 25 bp, Homo sapien
tcactcaacggattttaactgtgtg

SEQ ID NO: 3263686 - DNA, 25 bp, Homo sapien
cggattttaactgtgtgtcttggtc

SEQ ID NO: 3263687 - DNA, 25 bp, Homo sapien
ctcaacggattttaactgtgtgtct

SEQ ID NO: 3263688 - DNA, 25 bp, Homo sapien
gacagatatgctccttgtctggacc

SEQ ID NO: 3263689 - DNA, 25 bp, Homo sapien
gaagaggaatatccagacagatatg

SEQ ID NO: 3263690 - DNA, 25 bp, Homo sapien
tgctcttggtactcttcaagaagag

SEQ ID NO: 3263691 - DNA, 25 bp, Homo sapien
taaacatcgcagtctgagacttgat

SEQ ID NO: 3263692 - DNA, 25 bp, Homo sapien
tcagggttggctctataagaaaaca

SEQ ID NO: 3263693 - DNA, 25 bp, Homo sapien
tatggcctcagtacccatgatagga

SEQ ID NO: 3263694 - DNA, 25 bp, Homo sapien
attatgcgtgtgagtggaaacagcc

SEQ ID NO: 3263695 - DNA, 25 bp, Homo sapien
taccagtaactgatataggcttcct

SEQ ID NO: 3263696 - DNA, 25 bp, Homo sapien
caatatgcacttaatggagttaaag

SEQ ID NO: 3263697 - DNA, 25 bp, Homo sapien
gaatggaacatacagacaagaggtt

SEQ ID NO: 3263698 - DNA, 25 bp, Homo sapien
ggaggctgcaattctttgctcctag

SEQ ID NO: 3263699 - DNA, 25 bp, Homo sapien
gatgcacccatttaaaacctattta

SEQ ID NO: 3263700 - DNA, 25 bp, Homo sapien
ctgtcattatttcatctttccccat

SEQ ID NO: 3263701 - DNA, 25 bp, Homo sapien
tgccatttgactgggaactgagagg

SEQ ID NO: 3263702 - DNA, 25 bp, Homo sapien
tagaaatgtatttgcatgccatttg

SEQ ID NO: 3263703 - DNA, 25 bp, Homo sapien
tgcatgccatttgactgggaactga

SEQ ID NO: 3263704 - DNA, 25 bp, Homo sapien
tatttgcatgccatttgactgggaa

SEQ ID NO: 3263705 - DNA, 25 bp, Homo sapien
aaaagttgtcgggttattgccatag

SEQ ID NO: 3263706 - DNA, 25 bp, Homo sapien
tgaagccttatgtcgtgatgcacgt

SEQ ID NO: 3263707 - DNA, 25 bp, Homo sapien
tgctttgataaagcctgccataggc

SEQ ID NO: 3263708 - DNA, 25 bp, Homo sapien
gcacgtaaactgctaggctaaggaa

SEQ ID NO: 3263709 - DNA, 25 bp, Homo sapien
acattcctgcttaggcaagtcaaga

SEQ ID NO: 3263710 - DNA, 25 bp, Homo sapien
aattcttgcctctttagttgatggg

SEQ ID NO: 3263711 - DNA, 25 bp, Homo sapien
tcttcaaatctacctgttcgcagcc

SEQ ID NO: 3263712 - DNA, 25 bp, Homo sapien
gatttaaacctcagaattatgcctc

SEQ ID NO: 3263713 - DNA, 25 bp, Homo sapien
tcttagagcccagagtcatgactga

SEQ ID NO: 3263714 - DNA, 25 bp, Homo sapien
ctacacgcatcagaagaaacacaga

SEQ ID NO: 3263715 - DNA, 25 bp, Homo sapien
gtatgggcaagattcagtgggcaca

SEQ ID NO: 3263716 - DNA, 25 bp, Homo sapien
ttctctcctgtccaaaagctctgga

SEQ ID NO: 3263717 - DNA, 25 bp, Homo sapien
ctgggctggcgaggcattgcagcca

SEQ ID NO: 3263718 - DNA, 25 bp, Homo sapien
tgggctggcgaggcattgcagccag

SEQ ID NO: 3263719 - DNA, 25 bp, Homo sapien
gaaaccaggactgcagtcgtcggta

SEQ ID NO: 3263720 - DNA, 25 bp, Homo sapien
gggaggcagcccatgagcaaatata

SEQ ID NO: 3263721 - DNA, 25 bp, Homo sapien
gctagataagggtcggttccctcaa

SEQ ID NO: 3263722 - DNA, 25 bp, Homo sapien
ttccctcaaggactagttactctga

SEQ ID NO: 3263723 - DNA, 25 bp, Homo sapien
aaacataagcacatccttttctcag

SEQ ID NO: 3263724 - DNA, 25 bp, Homo sapien
tgtccaggggaaacataagcacatc

SEQ ID NO: 3263725 - DNA, 25 bp, Homo sapien
agatcccaacccagcttcagttttc

SEQ ID NO: 3263726 - DNA, 25 bp, Homo sapien
aggaagatcccaacccagcttcagt

SEQ ID NO: 3263727 - DNA, 25 bp, Homo sapien
tgagagtcataccacccaatagcaa

SEQ ID NO: 3263728 - DNA, 25 bp, Homo sapien
cctgtcaggattagtttagggcaca

SEQ ID NO: 3263729 - DNA, 25 bp, Homo sapien
gactttggaggctcttgtcctgtca

SEQ ID NO: 3263730 - DNA, 25 bp, Homo sapien
tgtaaatattgtgcgcaactgagcc

SEQ ID NO: 3263731 - DNA, 25 bp, Homo sapien
tgtatacacatttctgctgagcaac

SEQ ID NO: 3263732 - DNA, 25 bp, Homo sapien
tacactggatactgcccgactttta

SEQ ID NO: 3263733 - DNA, 25 bp, Homo sapien
tatatgtctcctggtccattgtaga

SEQ ID NO: 3263734 - DNA, 25 bp, Homo sapien
gctttgggacactatataaatggca

SEQ ID NO: 3263735 - DNA, 25 bp, Homo sapien
tatatgtgtagtgagtaggcatcca

SEQ ID NO: 3263736 - DNA, 25 bp, Homo sapien
gaaaagtccctctttactgactaga

SEQ ID NO: 3263737 - DNA, 25 bp, Homo sapien
tttatgtgggcctatgccagtgcca

SEQ ID NO: 3263738 - DNA, 25 bp, Homo sapien
ttaggacgggttggaattgcatagc

SEQ ID NO: 3263739 - DNA, 25 bp, Homo sapien
tcatttctatttgagccaaccttgg

SEQ ID NO: 3263740 - DNA, 25 bp, Homo sapien
gttgtaaaaccaactggtctggcat

SEQ ID NO: 3263741 - DNA, 25 bp, Homo sapien
gattgttggaactcagttgtaaaac

SEQ ID NO: 3263742 - DNA, 25 bp, Homo sapien
ttctttgtggaagattttactacca

SEQ ID NO: 3263743 - DNA, 25 bp, Homo sapien
actcaattcatttggtgcatttcaa

SEQ ID NO: 3263744 - DNA, 25 bp, Homo sapien
tacaaactcaattcatttggtgcat

SEQ ID NO: 3263745 - DNA, 25 bp, Homo sapien
ttaattacaaactcaattcatttgg

SEQ ID NO: 3263746 - DNA, 25 bp, Homo sapien
aactcaattcatttggtgcatttca

SEQ ID NO: 3263747 - DNA, 25 bp, Homo sapien
tcttcatttatcagtgaaagaagtt

SEQ ID NO: 3263748 - DNA, 25 bp, Homo sapien
ttcatttatcagtgaaagaagttag

SEQ ID NO: 3263749 - DNA, 25 bp, Homo sapien
ggcaaacaaatgtccttgaaagtca

SEQ ID NO: 3263750 - DNA, 25 bp, Homo sapien
aaatggcaaacaaatgtccttgaaa

SEQ ID NO: 3263751 - DNA, 25 bp, Homo sapien
tatactccttcctaagagcaccaga

SEQ ID NO: 3263752 - DNA, 25 bp, Homo sapien
gaatgtggaatcaatccgtcctcct

SEQ ID NO: 3263753 - DNA, 25 bp, Homo sapien
agatgtcccagattactctccagag

SEQ ID NO: 3263754 - DNA, 25 bp, Homo sapien
tctccagagtggaaccagggagcag

SEQ ID NO: 3263755 - DNA, 25 bp, Homo sapien
aaacattgcttttagtatgatgccg

SEQ ID NO: 3263756 - DNA, 25 bp, Homo sapien
acattgcttttagtatgatgccgac

SEQ ID NO: 3263757 - DNA, 25 bp, Homo sapien
ttaaacattgcttttagtatgatgc

SEQ ID NO: 3263758 - DNA, 25 bp, Homo sapien
cattgcttttagtatgatgccgaca

SEQ ID NO: 3263759 - DNA, 25 bp, Homo sapien
taggcctttctttgtaagtgcagaa

SEQ ID NO: 3263760 - DNA, 25 bp, Homo sapien
ctgcggctctttttcggttctggag

SEQ ID NO: 3263761 - DNA, 25 bp, Homo sapien
ggcctttctttgtaagtgcagaaca

SEQ ID NO: 3263762 - DNA, 25 bp, Homo sapien
ctttaggcctttctttgtaagtgca

SEQ ID NO: 3263763 - DNA, 25 bp, Homo sapien
caagcaaaaaaggagtctttggaca

SEQ ID NO: 3263764 - DNA, 25 bp, Homo sapien
agccttcaggtcacgggccagcttt

SEQ ID NO: 3263765 - DNA, 25 bp, Homo sapien
tcacgggccagcttttcagcagtct

SEQ ID NO: 3263766 - DNA, 25 bp, Homo sapien
caatttgagtcccaacaagcaaaaa

SEQ ID NO: 3263767 - DNA, 25 bp, Homo sapien
aacagtcggtacatattccgatgga

SEQ ID NO: 3263768 - DNA, 25 bp, Homo sapien
tctgtttgtggataactcagcggtc

SEQ ID NO: 3263769 - DNA, 25 bp, Homo sapien
actcagcggtcgtaatctgtcataa

SEQ ID NO: 3263770 - DNA, 25 bp, Homo sapien
ttgtggataactcagcggtcgtaat

SEQ ID NO: 3263771 - DNA, 25 bp, Homo sapien
aaatatttcaaatctgatgttgacc

SEQ ID NO: 3263772 - DNA, 25 bp, Homo sapien
ttcaaatctgatgttgacctcagct

SEQ ID NO: 3263773 - DNA, 25 bp, Homo sapien
atttcaaatctgatgttgacctcag

SEQ ID NO: 3263774 - DNA, 25 bp, Homo sapien
atatttcaaatctgatgttgacctc

SEQ ID NO: 3263775 - DNA, 25 bp, Homo sapien
cgtgattagctcaataacgttgaag

SEQ ID NO: 3263776 - DNA, 25 bp, Homo sapien
agccatattctcaggtgcatgtata

SEQ ID NO: 3263777 - DNA, 25 bp, Homo sapien
atgtctgactcttttcagtggctga

SEQ ID NO: 3263778 - DNA, 25 bp, Homo sapien
cacttaaaccagatgacacaatgtt

SEQ ID NO: 3263779 - DNA, 25 bp, Homo sapien
cagctgtcatgatcagttaacttct

SEQ ID NO: 3263780 - DNA, 25 bp, Homo sapien
tcctatctccactactacatgaaag

SEQ ID NO: 3263781 - DNA, 25 bp, Homo sapien
tgaaagattccaacaccataatcct

SEQ ID NO: 3263782 - DNA, 25 bp, Homo sapien
tagatcagtggtcagggtttacctc

SEQ ID NO: 3263783 - DNA, 25 bp, Homo sapien
aaggaatgttgagtaattgtttaat

SEQ ID NO: 3263784 - DNA, 25 bp, Homo sapien
taaaaaactctggagaaatgatagt

SEQ ID NO: 3263785 - DNA, 25 bp, Homo sapien
aactctggagaaatgatagtgttga

SEQ ID NO: 3263786 - DNA, 25 bp, Homo sapien
tctggagaaatgatagtgttgatgg

SEQ ID NO: 3263787 - DNA, 25 bp, Homo sapien
aactctaagggtagtaatgcttgcc

SEQ ID NO: 3263788 - DNA, 25 bp, Homo sapien
gacattcatattagagaacccctgg

SEQ ID NO: 3263789 - DNA, 25 bp, Homo sapien
aattcaattcaaccaaagtgtgctg

SEQ ID NO: 3263790 - DNA, 25 bp, Homo sapien
tatgatatacagagctcaccatgca

SEQ ID NO: 3263791 - DNA, 25 bp, Homo sapien
ggctatccatcatcgaggcttccag

SEQ ID NO: 3263792 - DNA, 25 bp, Homo sapien
tccatgagtcaaaagcaaggctatc

SEQ ID NO: 3263793 - DNA, 25 bp, Homo sapien
gaactaggtattctccaggatgcgg

SEQ ID NO: 3263794 - DNA, 25 bp, Homo sapien
gactggaggttatcaggcagctcat

SEQ ID NO: 3263795 - DNA, 25 bp, Homo sapien
ttctggatgtgtgttataacattgg

SEQ ID NO: 3263796 - DNA, 25 bp, Homo sapien
tttctagtgtgaattgcactgagga

SEQ ID NO: 3263797 - DNA, 25 bp, Homo sapien
gtgtgaattgcactgaggagaaagc

SEQ ID NO: 3263798 - DNA, 25 bp, Homo sapien
tgttataacattggtcctctggctt

SEQ ID NO: 3263799 - DNA, 25 bp, Homo sapien
gaattcatagagtcagaagggcact

SEQ ID NO: 3263800 - DNA, 25 bp, Homo sapien
ttcatagagtcagaagggcacttca

SEQ ID NO: 3263801 - DNA, 25 bp, Homo sapien
gagtcagaagggcacttcagactca

SEQ ID NO: 3263802 - DNA, 25 bp, Homo sapien
catagagtcagaagggcacttcaga

SEQ ID NO: 3263803 - DNA, 25 bp, Homo sapien
cctgcatagtcatcaagcattgata

SEQ ID NO: 3263804 - DNA, 25 bp, Homo sapien
aatttatgcttctcttgatgacccc

SEQ ID NO: 3263805 - DNA, 25 bp, Homo sapien
ttctcttgatgaccccagaatgcat

SEQ ID NO: 3263806 - DNA, 25 bp, Homo sapien
ttttggaaaaactgcgacttcctgc

SEQ ID NO: 3263807 - DNA, 25 bp, Homo sapien
taagtcccaatacactgaaataagt

SEQ ID NO: 3263808 - DNA, 25 bp, Homo sapien
ttcatgttcatccaagttccattgg

SEQ ID NO: 3263809 - DNA, 25 bp, Homo sapien
gtcccaatacactgaaataagttca

SEQ ID NO: 3263810 - DNA, 25 bp, Homo sapien
agttccattggtcctcactagatgg

SEQ ID NO: 3263811 - DNA, 25 bp, Homo sapien
cgtgcacttgctgtcgtcggggata

SEQ ID NO: 3263812 - DNA, 25 bp, Homo sapien
cgtcggggatagggactgttgtagg

SEQ ID NO: 3263813 - DNA, 25 bp, Homo sapien
cggggatagggactgttgtaggcac

SEQ ID NO: 3263814 - DNA, 25 bp, Homo sapien
tgcacttgctgtcgtcggggatagg

SEQ ID NO: 3263815 - DNA, 25 bp, Homo sapien
ttttcatctgtagagccgtgtggag

SEQ ID NO: 3263816 - DNA, 25 bp, Homo sapien
gctgctttccgtttagtcaaagaga

SEQ ID NO: 3263817 - DNA, 25 bp, Homo sapien
tggatgatgcacctgttgttcagac

SEQ ID NO: 3263818 - DNA, 25 bp, Homo sapien
gagtttagggctccgaaggccatta

SEQ ID NO: 3263819 - DNA, 25 bp, Homo sapien
agcttctttcttgctgcaagtttac

SEQ ID NO: 3263820 - DNA, 25 bp, Homo sapien
ccagcttctttcttgctgcaagttt

SEQ ID NO: 3263821 - DNA, 25 bp, Homo sapien
cacagagagccagcttctttcttgc

SEQ ID NO: 3263822 - DNA, 25 bp, Homo sapien
gagccagcttctttcttgctgcaag

SEQ ID NO: 3263823 - DNA, 25 bp, Homo sapien
tgtcctccagagggctatttcctcg

SEQ ID NO: 3263824 - DNA, 25 bp, Homo sapien
tgaaagagctcatttactaaacggg

SEQ ID NO: 3263825 - DNA, 25 bp, Homo sapien
ggctctgagtaattggctaatgggc

SEQ ID NO: 3263826 - DNA, 25 bp, Homo sapien
cagggctccaattagtacactgaaa

SEQ ID NO: 3263827 - DNA, 25 bp, Homo sapien
tcttagcatggcaagcaaggccttc

SEQ ID NO: 3263828 - DNA, 25 bp, Homo sapien
cagggctgtttaaaggaatagtcac

SEQ ID NO: 3263829 - DNA, 25 bp, Homo sapien
cttagagttctcatccgaagtgaga

SEQ ID NO: 3263830 - DNA, 25 bp, Homo sapien
tttagcagcctcctaattggcctcc

SEQ ID NO: 3263831 - DNA, 25 bp, Homo sapien
gagccctatcagaacgaatctgctt

SEQ ID NO: 3263832 - DNA, 25 bp, Homo sapien
ctatcagaacgaatctgcttttgca

SEQ ID NO: 3263833 - DNA, 25 bp, Homo sapien
gctgtcagagccctatcagaacgaa

SEQ ID NO: 3263834 - DNA, 25 bp, Homo sapien
gcagctgtcagagccctatcagaac

SEQ ID NO: 3263835 - DNA, 25 bp, Homo sapien
gagtcccttacacatcggccaagga

SEQ ID NO: 3263836 - DNA, 25 bp, Homo sapien
tacagcagccggtttggtctcttcc

SEQ ID NO: 3263837 - DNA, 25 bp, Homo sapien
agatcatccgaaacaatggccttga

SEQ ID NO: 3263838 - DNA, 25 bp, Homo sapien
attttgaagacccagctagaccccg

SEQ ID NO: 3263839 - DNA, 25 bp, Homo sapien
ccagaagctgtgatgcccagccaga

SEQ ID NO: 3263840 - DNA, 25 bp, Homo sapien
tcacttcttattgaaaggcatgcgt

SEQ ID NO: 3263841 - DNA, 25 bp, Homo sapien
tggagcttcctactgcttgtcattt

SEQ ID NO: 3263842 - DNA, 25 bp, Homo sapien
tgtgatggcattgacgggaatccag

SEQ ID NO: 3263843 - DNA, 25 bp, Homo sapien
gtgctcagtgcagataatagtgggc

SEQ ID NO: 3263844 - DNA, 25 bp, Homo sapien
gggctcccaggtagtgtggagagct

SEQ ID NO: 3263845 - DNA, 25 bp, Homo sapien
gctgtgtagcctcttgaaggatgta

SEQ ID NO: 3263846 - DNA, 25 bp, Homo sapien
cctcttgaaggatgtagaggattgg

SEQ ID NO: 3263847 - DNA, 25 bp, Homo sapien
cagtggactgagaacgaaaggccat

SEQ ID NO: 3263848 - DNA, 25 bp, Homo sapien
gaacatcaatgtgtcctcgaagcaa

SEQ ID NO: 3263849 - DNA, 25 bp, Homo sapien
tcgaagcaaatctgtgaagtgtcct

SEQ ID NO: 3263850 - DNA, 25 bp, Homo sapien
actctgaacgctggtgaaaattgga

SEQ ID NO: 3263851 - DNA, 25 bp, Homo sapien
tgttccaggagaaatgggcaactct

SEQ ID NO: 3263852 - DNA, 25 bp, Homo sapien
tagctggaagatttcccataggagt

SEQ ID NO: 3263853 - DNA, 25 bp, Homo sapien
cccttaagctttgggggtacatgct

SEQ ID NO: 3263854 - DNA, 25 bp, Homo sapien
ccctgggtgaatgccaaatgactgg

SEQ ID NO: 3263855 - DNA, 25 bp, Homo sapien
ggccaggtagccctcaaggtttgac

SEQ ID NO: 3263856 - DNA, 25 bp, Homo sapien
gaaacagaaggtcgccattttgtaa

SEQ ID NO: 3263857 - DNA, 25 bp, Homo sapien
tggacactaattgcttctcctacag

SEQ ID NO: 3263858 - DNA, 25 bp, Homo sapien
cagcactctgaaacagaaggtcgcc

SEQ ID NO: 3263859 - DNA, 25 bp, Homo sapien
gaatggacactaattgcttctccta

SEQ ID NO: 3263860 - DNA, 25 bp, Homo sapien
ccatgcaattatggtgatcccagaa

SEQ ID NO: 3263861 - DNA, 25 bp, Homo sapien
gactccaggtggctggtcgccaaaa

SEQ ID NO: 3263862 - DNA, 25 bp, Homo sapien
gtggctggtcgccaaaaggcaaaga

SEQ ID NO: 3263863 - DNA, 25 bp, Homo sapien
ttgagttgccgccaattatcctcca

SEQ ID NO: 3263864 - DNA, 25 bp, Homo sapien
gtaataactgtgtcaatgtaactgc

SEQ ID NO: 3263865 - DNA, 25 bp, Homo sapien
ggttaataatgtcagcggaatgagg

SEQ ID NO: 3263866 - DNA, 25 bp, Homo sapien
gggatagaggctcaaacagtccatt

SEQ ID NO: 3263867 - DNA, 25 bp, Homo sapien
atgaaataaagctgcagggccacgt

SEQ ID NO: 3263868 - DNA, 25 bp, Homo sapien
catgaccgtgggatcatttctgatt

SEQ ID NO: 3263869 - DNA, 25 bp, Homo sapien
gagctcatgaccgtgggatcatttc

SEQ ID NO: 3263870 - DNA, 25 bp, Homo sapien
gaccgtgggatcatttctgattatg

SEQ ID NO: 3263871 - DNA, 25 bp, Homo sapien
tcaaagagctcatgaccgtgggatc

SEQ ID NO: 3263872 - DNA, 25 bp, Homo sapien
tcctcatagttgaccatacctgcgt

SEQ ID NO: 3263873 - DNA, 25 bp, Homo sapien
gatcctcatagttgaccatacctgc

SEQ ID NO: 3263874 - DNA, 25 bp, Homo sapien
tgtgggatcctcatagttgaccata

SEQ ID NO: 3263875 - DNA, 25 bp, Homo sapien
tcatagttgaccatacctgcgtttt

SEQ ID NO: 3263876 - DNA, 25 bp, Homo sapien
cactgctattgagggtagataaact

SEQ ID NO: 3263877 - DNA, 25 bp, Homo sapien
gagggtagataaactgaaaatgatg

SEQ ID NO: 3263878 - DNA, 25 bp, Homo sapien
gctattgagggtagataaactgaaa

SEQ ID NO: 3263879 - DNA, 25 bp, Homo sapien
ctcactgctattgagggtagataaa

SEQ ID NO: 3263880 - DNA, 25 bp, Homo sapien
aagtcctttaatggtatggtctgac

SEQ ID NO: 3263881 - DNA, 25 bp, Homo sapien
caaggctcttcatagtatggtctaa

SEQ ID NO: 3263882 - DNA, 25 bp, Homo sapien
ccagtccagagccaacttgaagcat

SEQ ID NO: 3263883 - DNA, 25 bp, Homo sapien
tactgtgtacctaatgatgttgctc

SEQ ID NO: 3263884 - DNA, 25 bp, Homo sapien
catctcctctaggttgaaggcaaag

SEQ ID NO: 3263885 - DNA, 25 bp, Homo sapien
aatgaattccataagacttgctttt

SEQ ID NO: 3263886 - DNA, 25 bp, Homo sapien
taggtttcttatggagaagcagaga

SEQ ID NO: 3263887 - DNA, 25 bp, Homo sapien
gggattaggtttcttatggagaagc

SEQ ID NO: 3263888 - DNA, 25 bp, Homo sapien
ctttctgtagggttctatcactcag

SEQ ID NO: 3263889 - DNA, 25 bp, Homo sapien
tatcactcagaagccctaacctctg

SEQ ID NO: 3263890 - DNA, 25 bp, Homo sapien
gaagccctaacctctggagtcctgt

SEQ ID NO: 3263891 - DNA, 25 bp, Homo sapien
gatcaacatgactgggttattggct

SEQ ID NO: 3263892 - DNA, 25 bp, Homo sapien
gacagtcaggattagtgagtgccaa

SEQ ID NO: 3263893 - DNA, 25 bp, Homo sapien
cattgtacccctaaactggattgtt

SEQ ID NO: 3263894 - DNA, 25 bp, Homo sapien
gaattctccctctggctattactgc

SEQ ID NO: 3263895 - DNA, 25 bp, Homo sapien
ttaaccttatcagaagacagtcagg

SEQ ID NO: 3263896 - DNA, 25 bp, Homo sapien
ggggaaggcgttctgcatagggcat

SEQ ID NO: 3263897 - DNA, 25 bp, Homo sapien
aggggaaggcgttctgcatagggca

SEQ ID NO: 3263898 - DNA, 25 bp, Homo sapien
gaaaaggggaaggcgttctgcatag

SEQ ID NO: 3263899 - DNA, 25 bp, Homo sapien
aaaggggaaggcgttctgcataggg

SEQ ID NO: 3263900 - DNA, 25 bp, Homo sapien
taacaatggctaatacttgttgttc

SEQ ID NO: 3263901 - DNA, 25 bp, Homo sapien
gatttaactggatatggtcaaggta

SEQ ID NO: 3263902 - DNA, 25 bp, Homo sapien
atagaatctagactgaggtacatgt

SEQ ID NO: 3263903 - DNA, 25 bp, Homo sapien
tccttacagaacttagaatccaatg

SEQ ID NO: 3263904 - DNA, 25 bp, Homo sapien
tcatccctgtcaatacgctcagaag

SEQ ID NO: 3263905 - DNA, 25 bp, Homo sapien
catgactcatccctgtcaatacgct

SEQ ID NO: 3263906 - DNA, 25 bp, Homo sapien
tgtcaatacgctcagaagattctgg

SEQ ID NO: 3263907 - DNA, 25 bp, Homo sapien
gcccagtccctcagtaccaatgcct

SEQ ID NO: 3263908 - DNA, 25 bp, Homo sapien
cctgctacactctgctgcaccactg

SEQ ID NO: 3263909 - DNA, 25 bp, Homo sapien
tgcccctccacacttataacctcct

SEQ ID NO: 3263910 - DNA, 25 bp, Homo sapien
agaaatgctgacctcttccccaaca

SEQ ID NO: 3263911 - DNA, 25 bp, Homo sapien
ccactgctgagaaatgctgacctct

SEQ ID NO: 3263912 - DNA, 25 bp, Homo sapien
gagagcatcaaaatcttgatttcca

SEQ ID NO: 3263913 - DNA, 25 bp, Homo sapien
agagcatcaaaatcttgatttccat

SEQ ID NO: 3263914 - DNA, 25 bp, Homo sapien
aagagagcatcaaaatcttgatttc

SEQ ID NO: 3263915 - DNA, 25 bp, Homo sapien
aaaagagagcatcaaaatcttgatt

SEQ ID NO: 3263916 - DNA, 25 bp, Homo sapien
catttgcgtgctcattagagttagt

SEQ ID NO: 3263917 - DNA, 25 bp, Homo sapien
gtgtcaaatgtatctccctggctca

SEQ ID NO: 3263918 - DNA, 25 bp, Homo sapien
ggttttggaacatttgcgtgctcat

SEQ ID NO: 3263919 - DNA, 25 bp, Homo sapien
ttacatcgaagatcaaaacatcagg

SEQ ID NO: 3263920 - DNA, 25 bp, Homo sapien
tctcttatgacagattgcactgctt

SEQ ID NO: 3263921 - DNA, 25 bp, Homo sapien
tgttctcttatgacagattgcactg

SEQ ID NO: 3263922 - DNA, 25 bp, Homo sapien
ctggtgatgaaatccggccattgaa

SEQ ID NO: 3263923 - DNA, 25 bp, Homo sapien
cggccattgaattacactgcactat

SEQ ID NO: 3263924 - DNA, 25 bp, Homo sapien
aaacctctgtgagtagccctgctgc

SEQ ID NO: 3263925 - DNA, 25 bp, Homo sapien
aatgatactctgagggcttcacaca

SEQ ID NO: 3263926 - DNA, 25 bp, Homo sapien
tgccccgtgaccatctctcgttaaa

SEQ ID NO: 3263927 - DNA, 25 bp, Homo sapien
tcactgtcttccgacagcaatttca

SEQ ID NO: 3263928 - DNA, 25 bp, Homo sapien
tcattcaaacagcagttcttcctcc

SEQ ID NO: 3263929 - DNA, 25 bp, Homo sapien
caaacagcagttcttcctcctgctg

SEQ ID NO: 3263930 - DNA, 25 bp, Homo sapien
aacagcagttcttcctcctgctgtc

SEQ ID NO: 3263931 - DNA, 25 bp, Homo sapien
cagcagttcttcctcctgctgtctc

SEQ ID NO: 3263932 - DNA, 25 bp, Homo sapien
gaccattacttgaacagttggtcat

SEQ ID NO: 3263933 - DNA, 25 bp, Homo sapien
gaacagttggtcattattctctcat

SEQ ID NO: 3263934 - DNA, 25 bp, Homo sapien
tttgaccattacttgaacagttggt

SEQ ID NO: 3263935 - DNA, 25 bp, Homo sapien
ttaatcccgacatttgaccattact

SEQ ID NO: 3263936 - DNA, 25 bp, Homo sapien
gagctacagacctcaggatgaccag

SEQ ID NO: 3263937 - DNA, 25 bp, Homo sapien
cacttgatggatgacctgcctacag

SEQ ID NO: 3263938 - DNA, 25 bp, Homo sapien
ctctgctgagaatggaacacttgat

SEQ ID NO: 3263939 - DNA, 25 bp, Homo sapien
tggatgcaagacaagaactcagaca

SEQ ID NO: 3263940 - DNA, 25 bp, Homo sapien
tccatggcacaaagcaagtctattt

SEQ ID NO: 3263941 - DNA, 25 bp, Homo sapien
tactggctactgctggttaagatcc

SEQ ID NO: 3263942 - DNA, 25 bp, Homo sapien
aacacatcagttgggattcacctac

SEQ ID NO: 3263943 - DNA, 25 bp, Homo sapien
aaaagaagtgtatccccgctgggag

SEQ ID NO: 3263944 - DNA, 25 bp, Homo sapien
cgattgtacttttgcttaaagctaa

SEQ ID NO: 3263945 - DNA, 25 bp, Homo sapien
ttaaattcctccagtcgattgtact

SEQ ID NO: 3263946 - DNA, 25 bp, Homo sapien
gcttaaagctaacagaatttctccc

SEQ ID NO: 3263947 - DNA, 25 bp, Homo sapien
ctccctattatttgcaccgaagaac

SEQ ID NO: 3263948 - DNA, 25 bp, Homo sapien
tatttgatttggtcagtctgaagcg

SEQ ID NO: 3263949 - DNA, 25 bp, Homo sapien
tgttgcatcctcacgctgtagagag

SEQ ID NO: 3263950 - DNA, 25 bp, Homo sapien
tgacctgcagatagcaaagtgatgc

SEQ ID NO: 3263951 - DNA, 25 bp, Homo sapien
ttgtctcccagtaatgaagaagctg

SEQ ID NO: 3263952 - DNA, 25 bp, Homo sapien
caaaaaagcacaaggcccaaatagg

SEQ ID NO: 3263953 - DNA, 25 bp, Homo sapien
gaggtacacatcacaacccaagtgg

SEQ ID NO: 3263954 - DNA, 25 bp, Homo sapien
tataaatgactctatgcccaccaat

SEQ ID NO: 3263955 - DNA, 25 bp, Homo sapien
taaaaatgtgcagcgaacttagagg

SEQ ID NO: 3263956 - DNA, 25 bp, Homo sapien
acaaatcaatgagctgtggaacttc

SEQ ID NO: 3263957 - DNA, 25 bp, Homo sapien
catccgacaaatcaatgagctgtgg

SEQ ID NO: 3263958 - DNA, 25 bp, Homo sapien
cgacaaatcaatgagctgtggaact

SEQ ID NO: 3263959 - DNA, 25 bp, Homo sapien
ctatgcatccgacaaatcaatgagc

SEQ ID NO: 3263960 - DNA, 25 bp, Homo sapien
gaccgtatagccaactgctcacaca

SEQ ID NO: 3263961 - DNA, 25 bp, Homo sapien
tgattcctggcaagaagaggtaccc

SEQ ID NO: 3263962 - DNA, 25 bp, Homo sapien
caagaagaggtaccccagtgttggg

SEQ ID NO: 3263963 - DNA, 25 bp, Homo sapien
gtgttgggagtggtgatgtaacacc

SEQ ID NO: 3263964 - DNA, 25 bp, Homo sapien
tgaaatatgggagccttcctcaaag

SEQ ID NO: 3263965 - DNA, 25 bp, Homo sapien
ggattggaaggtataatggagctca

SEQ ID NO: 3263966 - DNA, 25 bp, Homo sapien
gactgtatctatggctggctgagga

SEQ ID NO: 3263967 - DNA, 25 bp, Homo sapien
gggaatgccctctggacatttgcga

SEQ ID NO: 3263968 - DNA, 25 bp, Homo sapien
tgacctcagcaatgagctgctgcat

SEQ ID NO: 3263969 - DNA, 25 bp, Homo sapien
ctgacctcagcaatgagctgctgca

SEQ ID NO: 3263970 - DNA, 25 bp, Homo sapien
tttctaggcccattatgtgcttcgt

SEQ ID NO: 3263971 - DNA, 25 bp, Homo sapien
aggcccattatgtgcttcgttatca

SEQ ID NO: 3263972 - DNA, 25 bp, Homo sapien
tctaggcccattatgtgcttcgtta

SEQ ID NO: 3263973 - DNA, 25 bp, Homo sapien
gtgcttcgttatcatccttgtattt

SEQ ID NO: 3263974 - DNA, 25 bp, Homo sapien
gatgaaattgccatcatttgaagga

SEQ ID NO: 3263975 - DNA, 25 bp, Homo sapien
gatgcttgctgcctagattcttgga

SEQ ID NO: 3263976 - DNA, 25 bp, Homo sapien
tatgtacattacaggcagattattc

SEQ ID NO: 3263977 - DNA, 25 bp, Homo sapien
gaagaaactgccctttgatgcttgc

SEQ ID NO: 3263978 - DNA, 25 bp, Homo sapien
ctctcaatacattctgaggctcctt

SEQ ID NO: 3263979 - DNA, 25 bp, Homo sapien
tttaggatcatgataagattgtggc

SEQ ID NO: 3263980 - DNA, 25 bp, Homo sapien
actctcaatacattctgaggctcct

SEQ ID NO: 3263981 - DNA, 25 bp, Homo sapien
agtcaacgtgtctaccaagcaaatg

SEQ ID NO: 3263982 - DNA, 25 bp, Homo sapien
cagagctcgccagtaatgatgattt

SEQ ID NO: 3263983 - DNA, 25 bp, Homo sapien
gaaaggtctgttgtcagagctcgcc

SEQ ID NO: 3263984 - DNA, 25 bp, Homo sapien
gacagaatcggacttagaaaggtct

SEQ ID NO: 3263985 - DNA, 25 bp, Homo sapien
cagcaccttcttctgaaggaggaac

SEQ ID NO: 3263986 - DNA, 25 bp, Homo sapien
accttcttctgaaggaggaactaga

SEQ ID NO: 3263987 - DNA, 25 bp, Homo sapien
tgaaggaggaactagattgtcttct

SEQ ID NO: 3263988 - DNA, 25 bp, Homo sapien
aggaggaactagattgtcttctttc

SEQ ID NO: 3263989 - DNA, 25 bp, Homo sapien
ccttccagttagtggaagagcagcc

SEQ ID NO: 3263990 - DNA, 25 bp, Homo sapien
ggctgactccggtcagcagtgcaat

SEQ ID NO: 3263991 - DNA, 25 bp, Homo sapien
ggtgaggttcaccaacatcattgtt

SEQ ID NO: 3263992 - DNA, 25 bp, Homo sapien
taggctggtctgaagtactcagatc

SEQ ID NO: 3263993 - DNA, 25 bp, Homo sapien
gatgagggtttctggctgattttgt

SEQ ID NO: 3263994 - DNA, 25 bp, Homo sapien
ctttcttttgtgtggcactatatgg

SEQ ID NO: 3263995 - DNA, 25 bp, Homo sapien
cagatgagggtttctggctgatttt

SEQ ID NO: 3263996 - DNA, 25 bp, Homo sapien
tggcactatatggggggacatctgc

SEQ ID NO: 3263997 - DNA, 25 bp, Homo sapien
tgaacctcaaaattagcctgccctg

SEQ ID NO: 3263998 - DNA, 25 bp, Homo sapien
tgaaattctcacttagtccccagag

SEQ ID NO: 3263999 - DNA, 25 bp, Homo sapien
gtttccttatctacatatgcgtttt

SEQ ID NO: 3264000 - DNA, 25 bp, Homo sapien
acatatgctgccgaaaacctttacc

SEQ ID NO: 3264001 - DNA, 25 bp, Homo sapien
gccaagaagcttgacagcatggcct

SEQ ID NO: 3264002 - DNA, 25 bp, Homo sapien
tccaatgccaagaagcttgacagca

SEQ ID NO: 3264003 - DNA, 25 bp, Homo sapien
gaaagcactccaatgccaagaagct

SEQ ID NO: 3264004 - DNA, 25 bp, Homo sapien
gcactccaatgccaagaagcttgac

SEQ ID NO: 3264005 - DNA, 25 bp, Homo sapien
aatcagattcattaagaaagtaagc

SEQ ID NO: 3264006 - DNA, 25 bp, Homo sapien
aagtaagcatgggtaaaagctgtgt

SEQ ID NO: 3264007 - DNA, 25 bp, Homo sapien
ctcttagcagttccaaaatcagatt

SEQ ID NO: 3264008 - DNA, 25 bp, Homo sapien
tccttgagatgtagtgtgttgggct

SEQ ID NO: 3264009 - DNA, 25 bp, Homo sapien
taaatataaatggactaaattctgc

SEQ ID NO: 3264010 - DNA, 25 bp, Homo sapien
tataaatggactaaattctgcaatt

SEQ ID NO: 3264011 - DNA, 25 bp, Homo sapien
aatataaatggactaaattctgcaa

SEQ ID NO: 3264012 - DNA, 25 bp, Homo sapien
ttaaatataaatggactaaattctg

SEQ ID NO: 3264013 - DNA, 25 bp, Homo sapien
gaaagcttggcagcagctactgctt

SEQ ID NO: 3264014 - DNA, 25 bp, Homo sapien
tcattctcctgctgtaacctcttct

SEQ ID NO: 3264015 - DNA, 25 bp, Homo sapien
ttctgcagaaagcttggcagcagct

SEQ ID NO: 3264016 - DNA, 25 bp, Homo sapien
ctactgcttcctcaccccaggtaaa

SEQ ID NO: 3264017 - DNA, 25 bp, Homo sapien
ttgcaccaatccctctggttcttct

SEQ ID NO: 3264018 - DNA, 25 bp, Homo sapien
gcaccaatccctctggttcttctgc

SEQ ID NO: 3264019 - DNA, 25 bp, Homo sapien
cttgcaccaatccctctggttcttc

SEQ ID NO: 3264020 - DNA, 25 bp, Homo sapien
tgcaccaatccctctggttcttctg

SEQ ID NO: 3264021 - DNA, 25 bp, Homo sapien
cattaaaaagtcaagcccatgaaca

SEQ ID NO: 3264022 - DNA, 25 bp, Homo sapien
cagggccagttacccctgtggtctt

SEQ ID NO: 3264023 - DNA, 25 bp, Homo sapien
cccatgaacagaacccagctggcat

SEQ ID NO: 3264024 - DNA, 25 bp, Homo sapien
cagactctccatgtcactagcttgt

SEQ ID NO: 3264025 - DNA, 25 bp, Homo sapien
taaggctctcaagaaagcctggact

SEQ ID NO: 3264026 - DNA, 25 bp, Homo sapien
gcctggactgtacttagacttctct

SEQ ID NO: 3264027 - DNA, 25 bp, Homo sapien
tctagggtattgccctttaaggctc

SEQ ID NO: 3264028 - DNA, 25 bp, Homo sapien
ggtattgccctttaaggctctcaag

SEQ ID NO: 3264029 - DNA, 25 bp, Homo sapien
aagtttcagggttgaactaggatat

SEQ ID NO: 3264030 - DNA, 25 bp, Homo sapien
cagggttgaactaggatatccaaac

SEQ ID NO: 3264031 - DNA, 25 bp, Homo sapien
ttcagggttgaactaggatatccaa

SEQ ID NO: 3264032 - DNA, 25 bp, Homo sapien
gtttcagggttgaactaggatatcc

SEQ ID NO: 3264033 - DNA, 25 bp, Homo sapien
ttagttttagctaagggtcctgtgc

SEQ ID NO: 3264034 - DNA, 25 bp, Homo sapien
tttagctaagggtcctgtgctgcgg

SEQ ID NO: 3264035 - DNA, 25 bp, Homo sapien
agttttagctaagggtcctgtgctg

SEQ ID NO: 3264036 - DNA, 25 bp, Homo sapien
tcttccatagcgaagccccaacact

SEQ ID NO: 3264037 - DNA, 25 bp, Homo sapien
tgtaattatttccacgatgagggtt

SEQ ID NO: 3264038 - DNA, 25 bp, Homo sapien
tccatttgtagacatctcaagactt

SEQ ID NO: 3264039 - DNA, 25 bp, Homo sapien
tagacatctcaagactttattttcc

SEQ ID NO: 3264040 - DNA, 25 bp, Homo sapien
ttcaggtggccaattacttcctatc

SEQ ID NO: 3264041 - DNA, 25 bp, Homo sapien
tccaggtatccacatatttccacag

SEQ ID NO: 3264042 - DNA, 25 bp, Homo sapien
catagttgccacgtatccaggtatc

SEQ ID NO: 3264043 - DNA, 25 bp, Homo sapien
gagttatccactgttgaacgctcaa

SEQ ID NO: 3264044 - DNA, 25 bp, Homo sapien
cctgcttaaagggatggcaactgga

SEQ ID NO: 3264045 - DNA, 25 bp, Homo sapien
aaagaagttatctgtcacagatgat

SEQ ID NO: 3264046 - DNA, 25 bp, Homo sapien
gaagttatctgtcacagatgatgct

SEQ ID NO: 3264047 - DNA, 25 bp, Homo sapien
tccccaatagcacaatcattcaatt

SEQ ID NO: 3264048 - DNA, 25 bp, Homo sapien
agatgatgctatttccccaatagca

SEQ ID NO: 3264049 - DNA, 25 bp, Homo sapien
tgcaacgtgtagaccaagtctatat

SEQ ID NO: 3264050 - DNA, 25 bp, Homo sapien
ttgtctttgatgatgaagcgtaggg

SEQ ID NO: 3264051 - DNA, 25 bp, Homo sapien
ttatattgtctttgatgatgaagcg

SEQ ID NO: 3264052 - DNA, 25 bp, Homo sapien
taaattcaggaccacagactcttgc

SEQ ID NO: 3264053 - DNA, 25 bp, Homo sapien
cttcatgtccctgccaatatctgta

SEQ ID NO: 3264054 - DNA, 25 bp, Homo sapien
tgccaatatctgtatggttgtccct

SEQ ID NO: 3264055 - DNA, 25 bp, Homo sapien
aatatctgtatggttgtcccttgac

SEQ ID NO: 3264056 - DNA, 25 bp, Homo sapien
tatctgtatggttgtcccttgacat

SEQ ID NO: 3264057 - DNA, 25 bp, Homo sapien
gctgcttcaagcggcattagggtcg

SEQ ID NO: 3264058 - DNA, 25 bp, Homo sapien
caagcggcattagggtcggcgtggg

SEQ ID NO: 3264059 - DNA, 25 bp, Homo sapien
tgcttcaagcggcattagggtcggc

SEQ ID NO: 3264060 - DNA, 25 bp, Homo sapien
cttcaagcggcattagggtcggcgt

SEQ ID NO: 3264061 - DNA, 25 bp, Homo sapien
aggtcccccgatctgagtcgcggca

SEQ ID NO: 3264062 - DNA, 25 bp, Homo sapien
ggaggtcccccgatctgagtcgcgg

SEQ ID NO: 3264063 - DNA, 25 bp, Homo sapien
tcgcggcaccaaatttcatgcgcgt

SEQ ID NO: 3264064 - DNA, 25 bp, Homo sapien
agtcgcggcaccaaatttcatgcgc

SEQ ID NO: 3264065 - DNA, 25 bp, Homo sapien
ctcagaggcctgagagcgggcacct

SEQ ID NO: 3264066 - DNA, 25 bp, Homo sapien
ggctcagaggcctgagagcgggcac

SEQ ID NO: 3264067 - DNA, 25 bp, Homo sapien
acctgtagtccagctactcgggaga

SEQ ID NO: 3264068 - DNA, 25 bp, Homo sapien
gcacctgtagtccagctactcggga

SEQ ID NO: 3264069 - DNA, 25 bp, Homo sapien
atgtttttatgaggtacttgtagaa

SEQ ID NO: 3264070 - DNA, 25 bp, Homo sapien
tttatgaggtacttgtagaaaattg

SEQ ID NO: 3264071 - DNA, 25 bp, Homo sapien
agaaaattgatctattatactttga

SEQ ID NO: 3264072 - DNA, 25 bp, Homo sapien
tatgaggtacttgtagaaaattgat

SEQ ID NO: 3264073 - DNA, 25 bp, Homo sapien
gtggtaagagttagaatgaacaaaa

SEQ ID NO: 3264074 - DNA, 25 bp, Homo sapien
tgatggcttagtgacccctgtggct

SEQ ID NO: 3264075 - DNA, 25 bp, Homo sapien
gctgttactgtatagtatgcctact

SEQ ID NO: 3264076 - DNA, 25 bp, Homo sapien
ccctgtggctgacaccaaggaaagc

SEQ ID NO: 3264077 - DNA, 25 bp, Homo sapien
tccaagcctggctgtcagccgtttt

SEQ ID NO: 3264078 - DNA, 25 bp, Homo sapien
caagcctggctgtcagccgttttac

SEQ ID NO: 3264079 - DNA, 25 bp, Homo sapien
cttccaagcctggctgtcagccgtt

SEQ ID NO: 3264080 - DNA, 25 bp, Homo sapien
cacggtccttccttccaagcctggc

SEQ ID NO: 3264081 - DNA, 25 bp, Homo sapien
ctctaaaaacagagccctggaactt

SEQ ID NO: 3264082 - DNA, 25 bp, Homo sapien
ctctgaagctggcagatttgctcta

SEQ ID NO: 3264083 - DNA, 25 bp, Homo sapien
gctctgaagaacttggtctcttgcc

SEQ ID NO: 3264084 - DNA, 25 bp, Homo sapien
gaatccaggggtggttgcaacctcc

SEQ ID NO: 3264085 - DNA, 25 bp, Homo sapien
aattgcatgataaaggatgaatggc

SEQ ID NO: 3264086 - DNA, 25 bp, Homo sapien
attgcatgataaaggatgaatggct

SEQ ID NO: 3264087 - DNA, 25 bp, Homo sapien
ccttgaattgcatgataaaggatga

SEQ ID NO: 3264088 - DNA, 25 bp, Homo sapien
tgaattgcatgataaaggatgaatg

SEQ ID NO: 3264089 - DNA, 25 bp, Homo sapien
ccttgtctggcttgtatagaagatg

SEQ ID NO: 3264090 - DNA, 25 bp, Homo sapien
aagatgggtcaatggcttaagggcc

SEQ ID NO: 3264091 - DNA, 25 bp, Homo sapien
tcaatggcttaagggcctgcccctg

SEQ ID NO: 3264092 - DNA, 25 bp, Homo sapien
tctggcttgtatagaagatgggtca

SEQ ID NO: 3264093 - DNA, 25 bp, Homo sapien
tgttagggtacaaggtactgagtgt

SEQ ID NO: 3264094 - DNA, 25 bp, Homo sapien
gcctctggccacataactgtatttt

SEQ ID NO: 3264095 - DNA, 25 bp, Homo sapien
ctttttgttgttgcagcgggtgtta

SEQ ID NO: 3264096 - DNA, 25 bp, Homo sapien
aaacacaaatccatgctgatccggg

SEQ ID NO: 3264097 - DNA, 25 bp, Homo sapien
cactgagctgagatttccaaatgtt

SEQ ID NO: 3264098 - DNA, 25 bp, Homo sapien
ccttttcaaacaacgtcctggcact

SEQ ID NO: 3264099 - DNA, 25 bp, Homo sapien
ttcatttcgatgcatatcagggtca

SEQ ID NO: 3264100 - DNA, 25 bp, Homo sapien
ggcatccatcctgtaggtgcagaaa

SEQ ID NO: 3264101 - DNA, 25 bp, Homo sapien
gcttttcagtcgaacctggtcctca

SEQ ID NO: 3264102 - DNA, 25 bp, Homo sapien
tcatgaaacaatgttatggcttttc

SEQ ID NO: 3264103 - DNA, 25 bp, Homo sapien
agtgctgagaattcgcccaagggca

SEQ ID NO: 3264104 - DNA, 25 bp, Homo sapien
cccagtgctgagaattcgcccaagg

SEQ ID NO: 3264105 - DNA, 25 bp, Homo sapien
taaagtagctccatcaaatcagcag

SEQ ID NO: 3264106 - DNA, 25 bp, Homo sapien
tacctactggaagctcacatctaaa

SEQ ID NO: 3264107 - DNA, 25 bp, Homo sapien
tactaaagcaccagttcggttacca

SEQ ID NO: 3264108 - DNA, 25 bp, Homo sapien
ggcaagggctcaactaatcgctcac

SEQ ID NO: 3264109 - DNA, 25 bp, Homo sapien
aaggcaatggcccacggtcttctaa

SEQ ID NO: 3264110 - DNA, 25 bp, Homo sapien
tctaaaaatcctacagatctatgct

SEQ ID NO: 3264111 - DNA, 25 bp, Homo sapien
cagatctatgctgaaatttgcctcc

SEQ ID NO: 3264112 - DNA, 25 bp, Homo sapien
gggtgcacgtgttcatttgaaatat

SEQ ID NO: 3264113 - DNA, 25 bp, Homo sapien
aaataaaaatgagaggagcacagct

SEQ ID NO: 3264114 - DNA, 25 bp, Homo sapien
aaaataaaaatgagaggagcacagc

SEQ ID NO: 3264115 - DNA, 25 bp, Homo sapien
aataaaaatgagaggagcacagctt

SEQ ID NO: 3264116 - DNA, 25 bp, Homo sapien
taaaaatgagaggagcacagcttac

SEQ ID NO: 3264117 - DNA, 25 bp, Homo sapien
caatttgaagtccattgaggaaaac

SEQ ID NO: 3264118 - DNA, 25 bp, Homo sapien
gatgcaatttgaagtccattgagga

SEQ ID NO: 3264119 - DNA, 25 bp, Homo sapien
taattctagatgcaatttgaagtcc

SEQ ID NO: 3264120 - DNA, 25 bp, Homo sapien
gctccactaattctagatgcaattt

SEQ ID NO: 3264121 - DNA, 25 bp, Homo sapien
tgtggtccttgaacacataatagga

SEQ ID NO: 3264122 - DNA, 25 bp, Homo sapien
aaaccaagtattccactcatgtcaa

SEQ ID NO: 3264123 - DNA, 25 bp, Homo sapien
catgtcaacaatccagggcaaaaag

SEQ ID NO: 3264124 - DNA, 25 bp, Homo sapien
tcaatatgatatctgtagtgctgtc

SEQ ID NO: 3264125 - DNA, 25 bp, Homo sapien
catcttacaagatcgtgttgggcga

SEQ ID NO: 3264126 - DNA, 25 bp, Homo sapien
aaagaaccgctgaacaagctgcacg

SEQ ID NO: 3264127 - DNA, 25 bp, Homo sapien
cagggactccacactcagatgaaat

SEQ ID NO: 3264128 - DNA, 25 bp, Homo sapien
tcaaaattagctgcattggcctggg

SEQ ID NO: 3264129 - DNA, 25 bp, Homo sapien
gcattctggtgcccgcagtatcctc

SEQ ID NO: 3264130 - DNA, 25 bp, Homo sapien
gatattagttctatggaacctgtgg

SEQ ID NO: 3264131 - DNA, 25 bp, Homo sapien
ttctggtgcccgcagtatcctctcc

SEQ ID NO: 3264132 - DNA, 25 bp, Homo sapien
agagacaggatattagttctatgga

SEQ ID NO: 3264133 - DNA, 25 bp, Homo sapien
atgagagaaagcttgcttcaagttg

SEQ ID NO: 3264134 - DNA, 25 bp, Homo sapien
tatgagagaaagcttgcttcaagtt

SEQ ID NO: 3264135 - DNA, 25 bp, Homo sapien
ccttgcgcattctggtcaggtgccc

SEQ ID NO: 3264136 - DNA, 25 bp, Homo sapien
gctgacacccatgaataaacatgtg

SEQ ID NO: 3264137 - DNA, 25 bp, Homo sapien
tggaactgctgccatttgaaatggt

SEQ ID NO: 3264138 - DNA, 25 bp, Homo sapien
catcagcggctgtcattttagggtg

SEQ ID NO: 3264139 - DNA, 25 bp, Homo sapien
gaggtattcgccatccctctgtcat

SEQ ID NO: 3264140 - DNA, 25 bp, Homo sapien
gacgcgctgtcccatgaggtattcg

SEQ ID NO: 3264141 - DNA, 25 bp, Homo sapien
caatagtctttagggaaggacgcgc

SEQ ID NO: 3264142 - DNA, 25 bp, Homo sapien
ggagaaattcctaagtatgacttgc

SEQ ID NO: 3264143 - DNA, 25 bp, Homo sapien
ggtggaagcagggtcaaagtcatct

SEQ ID NO: 3264144 - DNA, 25 bp, Homo sapien
gtcatacttgctcttggtggaagca

SEQ ID NO: 3264145 - DNA, 25 bp, Homo sapien
gagagtcatacttgctcttggtgga

SEQ ID NO: 3264146 - DNA, 25 bp, Homo sapien
ctcttggtggaagcagggtcaaagt

SEQ ID NO: 3264147 - DNA, 25 bp, Homo sapien
ggcttcaacgcttctcttcataggc

SEQ ID NO: 3264148 - DNA, 25 bp, Homo sapien
aaaagtcagcctggaaccatcaggg

SEQ ID NO: 3264149 - DNA, 25 bp, Homo sapien
agaattcccatgctttttcccagag

SEQ ID NO: 3264150 - DNA, 25 bp, Homo sapien
tgctgacaagattgcaaaccaagct

SEQ ID NO: 3264151 - DNA, 25 bp, Homo sapien
tcttggtaaaactaatctgtgtcac

SEQ ID NO: 3264152 - DNA, 25 bp, Homo sapien
tgtgtatgctcctaacccctgagtc

SEQ ID NO: 3264153 - DNA, 25 bp, Homo sapien
gactactgattcatggcaactagaa

SEQ ID NO: 3264154 - DNA, 25 bp, Homo sapien
gaacttaaatctgggcttcactgtt

SEQ ID NO: 3264155 - DNA, 25 bp, Homo sapien
catgaacacatgtggaaacacacaa

SEQ ID NO: 3264156 - DNA, 25 bp, Homo sapien
aatgagacttgcatattctgttcca

SEQ ID NO: 3264157 - DNA, 25 bp, Homo sapien
tcagcacctgagtagatagtacaaa

SEQ ID NO: 3264158 - DNA, 25 bp, Homo sapien
gatggcaatgctatggttcgtgaaa

SEQ ID NO: 3264159 - DNA, 25 bp, Homo sapien
aaagcatcacaggtataacggtagg

SEQ ID NO: 3264160 - DNA, 25 bp, Homo sapien
aagtcagtttcgtttgacctgcgca

SEQ ID NO: 3264161 - DNA, 25 bp, Homo sapien
ttgcttgcgtccacaaaagtacagc

SEQ ID NO: 3264162 - DNA, 25 bp, Homo sapien
gacctgcgcaaagtgtatccatttt

SEQ ID NO: 3264163 - DNA, 25 bp, Homo sapien
aaagcacttacattggcaactccca

SEQ ID NO: 3264164 - DNA, 25 bp, Homo sapien
cagtgtgattgtcctgtcaagcagc

SEQ ID NO: 3264165 - DNA, 25 bp, Homo sapien
ctgggacaggaaatctcaactagaa

SEQ ID NO: 3264166 - DNA, 25 bp, Homo sapien
tgccaacgtctgagccactgaatcc

SEQ ID NO: 3264167 - DNA, 25 bp, Homo sapien
catcatcccgcagatttactgtgca

SEQ ID NO: 3264168 - DNA, 25 bp, Homo sapien
gattttaccgacataaatcacacgg

SEQ ID NO: 3264169 - DNA, 25 bp, Homo sapien
acttcaaaacggtccctcagttctg

SEQ ID NO: 3264170 - DNA, 25 bp, Homo sapien
cagttctgtccgtgttgtgtcaggt

SEQ ID NO: 3264171 - DNA, 25 bp, Homo sapien
tgaagcagagtaaccagtgcaggct

SEQ ID NO: 3264172 - DNA, 25 bp, Homo sapien
gcctgacgcccttccatgtagattg

SEQ ID NO: 3264173 - DNA, 25 bp, Homo sapien
tggcgcctgctttcacgggtgttaa

SEQ ID NO: 3264174 - DNA, 25 bp, Homo sapien
gaccatcgatacacacttgagcaag

SEQ ID NO: 3264175 - DNA, 25 bp, Homo sapien
gatgactttcttagcaactcttcct

SEQ ID NO: 3264176 - DNA, 25 bp, Homo sapien
caatttaagtctcctgccggccaaa

SEQ ID NO: 3264177 - DNA, 25 bp, Homo sapien
tcagtctcttcatggacaatttaag

SEQ ID NO: 3264178 - DNA, 25 bp, Homo sapien
tgctcctttaaatccaacttgaact

SEQ ID NO: 3264179 - DNA, 25 bp, Homo sapien
agactctcgcttctcatactctctg

SEQ ID NO: 3264180 - DNA, 25 bp, Homo sapien
tctcatactctctgcgatattcttc

SEQ ID NO: 3264181 - DNA, 25 bp, Homo sapien
gctgatattcctcgtagctgtcata

SEQ ID NO: 3264182 - DNA, 25 bp, Homo sapien
tcttcagcctctcgtgctgatattc

SEQ ID NO: 3264183 - DNA, 25 bp, Homo sapien
agggcgatcttgaacgtgatctcac

SEQ ID NO: 3264184 - DNA, 25 bp, Homo sapien
ccgacggctgtagggcgatcttgaa

SEQ ID NO: 3264185 - DNA, 25 bp, Homo sapien
gctgtagggcgatcttgaacgtgat

SEQ ID NO: 3264186 - DNA, 25 bp, Homo sapien
ctgggccgacggctgtagggcgatc

SEQ ID NO: 3264187 - DNA, 25 bp, Homo sapien
ggagaatttcggtgcgtgcggtgtc

SEQ ID NO: 3264188 - DNA, 25 bp, Homo sapien
aatttcggtgcgtgcggtgtctgta

SEQ ID NO: 3264189 - DNA, 25 bp, Homo sapien
tctgtagtggcttgactcatagtaa

SEQ ID NO: 3264190 - DNA, 25 bp, Homo sapien
gcttgactcatagtaatagcaggat

SEQ ID NO: 3264191 - DNA, 25 bp, Homo sapien
cttgaagaggatctactgcctggag

SEQ ID NO: 3264192 - DNA, 25 bp, Homo sapien
tgtggaagaacaaatctgcccctgc

SEQ ID NO: 3264193 - DNA, 25 bp, Homo sapien
gaaaaggaccttgaacgagagcgca

SEQ ID NO: 3264194 - DNA, 25 bp, Homo sapien
tatggtgatcgggaacacgacctgt

SEQ ID NO: 3264195 - DNA, 25 bp, Homo sapien
aagtgcttgttcagctcggctcgga

SEQ ID NO: 3264196 - DNA, 25 bp, Homo sapien
ctttatgaggaggagtggtgggtgg

SEQ ID NO: 3264197 - DNA, 25 bp, Homo sapien
gaggaggagtggtgggtggagttag

SEQ ID NO: 3264198 - DNA, 25 bp, Homo sapien
atgaggaggagtggtgggtggagtt

SEQ ID NO: 3264199 - DNA, 25 bp, Homo sapien
ggaggagtggtgggtggagttaggc

SEQ ID NO: 3264200 - DNA, 25 bp, Homo sapien
tgccacaagcccaaatcaacagtgc

SEQ ID NO: 3264201 - DNA, 25 bp, Homo sapien
tctggactctcgatttcatgccaca

SEQ ID NO: 3264202 - DNA, 25 bp, Homo sapien
taagagggaggtcagtgctcaatcc

SEQ ID NO: 3264203 - DNA, 25 bp, Homo sapien
caatcccttgatgccactacctttg

SEQ ID NO: 3264204 - DNA, 25 bp, Homo sapien
aacttagcaggttttgacagattta

SEQ ID NO: 3264205 - DNA, 25 bp, Homo sapien
aggtatattccatgctctctcttga

SEQ ID NO: 3264206 - DNA, 25 bp, Homo sapien
cattttggtgttgacagtacaaggt

SEQ ID NO: 3264207 - DNA, 25 bp, Homo sapien
gacagatggccattacaggctgaag

SEQ ID NO: 3264208 - DNA, 25 bp, Homo sapien
tattcactgagtaccaaccgttacc

SEQ ID NO: 3264209 - DNA, 25 bp, Homo sapien
tcaagagtgcagagggaaagctgat

SEQ ID NO: 3264210 - DNA, 25 bp, Homo sapien
caccaaaataggaagactgagcaaa

SEQ ID NO: 3264211 - DNA, 25 bp, Homo sapien
tcagtagataaaagctgccctagtg

SEQ ID NO: 3264212 - DNA, 25 bp, Homo sapien
gacataagcctaattccccaactct

SEQ ID NO: 3264213 - DNA, 25 bp, Homo sapien
gctcatggaagatgaagatatcatt

SEQ ID NO: 3264214 - DNA, 25 bp, Homo sapien
cccaactcttgctcatggaagatga

SEQ ID NO: 3264215 - DNA, 25 bp, Homo sapien
aaagcttcagaacattcctatgaca

SEQ ID NO: 3264216 - DNA, 25 bp, Homo sapien
caaggagtatgtatgccaaaaggct

SEQ ID NO: 3264217 - DNA, 25 bp, Homo sapien
taaattgagagtccacaaaggcaat

SEQ ID NO: 3264218 - DNA, 25 bp, Homo sapien
taagagtcgccaagcattggaatgg

SEQ ID NO: 3264219 - DNA, 25 bp, Homo sapien
tatgtggcctgtcaaaatcaccttc

SEQ ID NO: 3264220 - DNA, 25 bp, Homo sapien
aaagcaaacttcctatctcatccct

SEQ ID NO: 3264221 - DNA, 25 bp, Homo sapien
ctaataaagcaaacttcctatctca

SEQ ID NO: 3264222 - DNA, 25 bp, Homo sapien
atctcatccctcctgtttctcaaag

SEQ ID NO: 3264223 - DNA, 25 bp, Homo sapien
tatctcatccctcctgtttctcaaa

SEQ ID NO: 3264224 - DNA, 25 bp, Homo sapien
taaggtgcgttcaatagtcttgttc

SEQ ID NO: 3264225 - DNA, 25 bp, Homo sapien
cacttaaggtgcgttcaatagtctt

SEQ ID NO: 3264226 - DNA, 25 bp, Homo sapien
tgcgttcaatagtcttgttctcaaa

SEQ ID NO: 3264227 - DNA, 25 bp, Homo sapien
ttccacacttaaggtgcgttcaata

SEQ ID NO: 3264228 - DNA, 25 bp, Homo sapien
aagatatggcacatttataaaaaca

SEQ ID NO: 3264229 - DNA, 25 bp, Homo sapien
gatatggcacatttataaaaacaaa

SEQ ID NO: 3264230 - DNA, 25 bp, Homo sapien
ggaagatatggcacatttataaaaa

SEQ ID NO: 3264231 - DNA, 25 bp, Homo sapien
ctggaagatatggcacatttataaa

SEQ ID NO: 3264232 - DNA, 25 bp, Homo sapien
tgctgtagccaaatgtattagaacc

SEQ ID NO: 3264233 - DNA, 25 bp, Homo sapien
tgtagccaaatgtattagaaccccc

SEQ ID NO: 3264234 - DNA, 25 bp, Homo sapien
ctgtagccaaatgtattagaacccc

SEQ ID NO: 3264235 - DNA, 25 bp, Homo sapien
gctgtagccaaatgtattagaaccc

SEQ ID NO: 3264236 - DNA, 25 bp, Homo sapien
tttggtgactctggggtcagaggaa

SEQ ID NO: 3264237 - DNA, 25 bp, Homo sapien
cagaggaagagataaagttgttggt

SEQ ID NO: 3264238 - DNA, 25 bp, Homo sapien
aggaagagataaagttgttggtttg

SEQ ID NO: 3264239 - DNA, 25 bp, Homo sapien
ggtcagaggaagagataaagttgtt

SEQ ID NO: 3264240 - DNA, 25 bp, Homo sapien
cacaaggttaaagtagaagctggca

SEQ ID NO: 3264241 - DNA, 25 bp, Homo sapien
gcagaaatcactggctcccactctg

SEQ ID NO: 3264242 - DNA, 25 bp, Homo sapien
gggcttctaagaccacgacattttg

SEQ ID NO: 3264243 - DNA, 25 bp, Homo sapien
gcaataacagcatacctacacgaat

SEQ ID NO: 3264244 - DNA, 25 bp, Homo sapien
gagaagctccgagcagggacgtctt

SEQ ID NO: 3264245 - DNA, 25 bp, Homo sapien
tctttttggaggtgcatttgtctct

SEQ ID NO: 3264246 - DNA, 25 bp, Homo sapien
cttgtaagtgttgtgactgcgactg

SEQ ID NO: 3264247 - DNA, 25 bp, Homo sapien
actgcgactgtgtgtgggacttctt

SEQ ID NO: 3264248 - DNA, 25 bp, Homo sapien
ttcgctttattgctccatgaattct

SEQ ID NO: 3264249 - DNA, 25 bp, Homo sapien
cgctttattgctccatgaattctca

SEQ ID NO: 3264250 - DNA, 25 bp, Homo sapien
tcgctttattgctccatgaattctc

SEQ ID NO: 3264251 - DNA, 25 bp, Homo sapien
cttcgctttattgctccatgaattc

SEQ ID NO: 3264252 - DNA, 25 bp, Homo sapien
ggctggtgccagtaagagcttctta

SEQ ID NO: 3264253 - DNA, 25 bp, Homo sapien
cagggtttgttctgatcctgtgatt

SEQ ID NO: 3264254 - DNA, 25 bp, Homo sapien
cattataacttagctgagtgttggc

SEQ ID NO: 3264255 - DNA, 25 bp, Homo sapien
tctgggtactgagaccactgcattc

SEQ ID NO: 3264256 - DNA, 25 bp, Homo sapien
aaaagcaagtaaagttatgcatctt

SEQ ID NO: 3264257 - DNA, 25 bp, Homo sapien
tgcatcttttaagcattggaataag

SEQ ID NO: 3264258 - DNA, 25 bp, Homo sapien
agtaaagttatgcatcttttaagca

SEQ ID NO: 3264259 - DNA, 25 bp, Homo sapien
aagttatgcatcttttaagcattgg

SEQ ID NO: 3264260 - DNA, 25 bp, Homo sapien
gggcaatccgtcttcatccacaggg

SEQ ID NO: 3264261 - DNA, 25 bp, Homo sapien
ggactgctagcaagtttgcctcatt

SEQ ID NO: 3264262 - DNA, 25 bp, Homo sapien
agtgtctctgtgaggactgctagca

SEQ ID NO: 3264263 - DNA, 25 bp, Homo sapien
ggtcacgtctccatctgtcagcgca

SEQ ID NO: 3264264 - DNA, 25 bp, Homo sapien
gaggactctgttaaacaattaatgt

SEQ ID NO: 3264265 - DNA, 25 bp, Homo sapien
tgagtttcaacaatcaaacaccccg

SEQ ID NO: 3264266 - DNA, 25 bp, Homo sapien
tcaattagtttagcatgagtttcaa

SEQ ID NO: 3264267 - DNA, 25 bp, Homo sapien
ccccggagaaggcaatggatgtgac

SEQ ID NO: 3264268 - DNA, 25 bp, Homo sapien
tgcaattcttccgacctaaataaag

SEQ ID NO: 3264269 - DNA, 25 bp, Homo sapien
taacaccttattctctaagggcgct

SEQ ID NO: 3264270 - DNA, 25 bp, Homo sapien
gtgtgactgtaacaccttattctct

SEQ ID NO: 3264271 - DNA, 25 bp, Homo sapien
caatgcaattcttccgacctaaata

SEQ ID NO: 3264272 - DNA, 25 bp, Homo sapien
ttagtgtatgatggcaacacccgcc

SEQ ID NO: 3264273 - DNA, 25 bp, Homo sapien
aagtctggccccttgaccgaaggag

SEQ ID NO: 3264274 - DNA, 25 bp, Homo sapien
tgactactgccatcagattgaacac

SEQ ID NO: 3264275 - DNA, 25 bp, Homo sapien
cataccctgtttcagtacttgtgag

SEQ ID NO: 3264276 - DNA, 25 bp, Homo sapien
ttagccagctgtaatctcttcaggg

SEQ ID NO: 3264277 - DNA, 25 bp, Homo sapien
aagatctgatgctatcagctagagg

SEQ ID NO: 3264278 - DNA, 25 bp, Homo sapien
tcagctagaggtggccctggaatag

SEQ ID NO: 3264279 - DNA, 25 bp, Homo sapien
tcttcaggggtgaaagatctgatgc

SEQ ID NO: 3264280 - DNA, 25 bp, Homo sapien
cactctcctctgattgtcgttttaa

SEQ ID NO: 3264281 - DNA, 25 bp, Homo sapien
actctcctctgattgtcgttttaaa

SEQ ID NO: 3264282 - DNA, 25 bp, Homo sapien
catgctctggaaccccggtaaggta

SEQ ID NO: 3264283 - DNA, 25 bp, Homo sapien
catgcatttgcatgagcttcctggg

SEQ ID NO: 3264284 - DNA, 25 bp, Homo sapien
taaggcaactgcgatacaagtatgg

SEQ ID NO: 3264285 - DNA, 25 bp, Homo sapien
cagccaggaaatacgggcacagtgc

SEQ ID NO: 3264286 - DNA, 25 bp, Homo sapien
acaaatgttgcaaagtggtccagac

SEQ ID NO: 3264287 - DNA, 25 bp, Homo sapien
gggtatcatcccttatgctgaatca

SEQ ID NO: 3264288 - DNA, 25 bp, Homo sapien
cacacagtcctattggagggtatca

SEQ ID NO: 3264289 - DNA, 25 bp, Homo sapien
ggcttgcactatgtgggtccccaga

SEQ ID NO: 3264290 - DNA, 25 bp, Homo sapien
caccttaagaagctgcagctcgcag

SEQ ID NO: 3264291 - DNA, 25 bp, Homo sapien
cagaagtggcaatttatagcttggt

SEQ ID NO: 3264292 - DNA, 25 bp, Homo sapien
cagtgtgactgcgaccaaaatggat

SEQ ID NO: 3264293 - DNA, 25 bp, Homo sapien
tgcgaccaaaatggattgacgatga

SEQ ID NO: 3264294 - DNA, 25 bp, Homo sapien
tgtcggtctgtctagtaaatccaac

SEQ ID NO: 3264295 - DNA, 25 bp, Homo sapien
aaagtgaaggtgttgtcggtctgtc

SEQ ID NO: 3264296 - DNA, 25 bp, Homo sapien
aaggtgttgtcggtctgtctagtaa

SEQ ID NO: 3264297 - DNA, 25 bp, Homo sapien
gctaaagtgaaggtgttgtcggtct

SEQ ID NO: 3264298 - DNA, 25 bp, Homo sapien
taaagccatcttagtctgaacccag

SEQ ID NO: 3264299 - DNA, 25 bp, Homo sapien
tatgatctcttatgaacagcccgga

SEQ ID NO: 3264300 - DNA, 25 bp, Homo sapien
gaccttggcggctcttatctccttg

SEQ ID NO: 3264301 - DNA, 25 bp, Homo sapien
tcccattcgccacagcaaaatttgc

SEQ ID NO: 3264302 - DNA, 25 bp, Homo sapien
aatgttactgttctctgatttaggt

SEQ ID NO: 3264303 - DNA, 25 bp, Homo sapien
tgttactgttctctgatttaggtgt

SEQ ID NO: 3264304 - DNA, 25 bp, Homo sapien
atgttactgttctctgatttaggtg

SEQ ID NO: 3264305 - DNA, 25 bp, Homo sapien
taccagcctgattgctcctccttga

SEQ ID NO: 3264306 - DNA, 25 bp, Homo sapien
gatttgactactgagtctccttcct

SEQ ID NO: 3264307 - DNA, 25 bp, Homo sapien
aatcatgctgatttggcgcagggaa

SEQ ID NO: 3264308 - DNA, 25 bp, Homo sapien
catcggccaccagggatttgactac

SEQ ID NO: 3264309 - DNA, 25 bp, Homo sapien
gtgtgttgattccatccagaggtga

SEQ ID NO: 3264310 - DNA, 25 bp, Homo sapien
cttgttagatgtgaagtctgggata

SEQ ID NO: 3264311 - DNA, 25 bp, Homo sapien
tctctgctttaacaatgtggtcttt

SEQ ID NO: 3264312 - DNA, 25 bp, Homo sapien
tggaggaacaatttggctctctgct

SEQ ID NO: 3264313 - DNA, 25 bp, Homo sapien
ggattgggttaaatatgttctgtcc

SEQ ID NO: 3264314 - DNA, 25 bp, Homo sapien
gatttcctccaaggagacaagtgaa

SEQ ID NO: 3264315 - DNA, 25 bp, Homo sapien
aaaaagcagacaccacgtaaatttg

SEQ ID NO: 3264316 - DNA, 25 bp, Homo sapien
gacaccacgtaaatttgtggattgg

SEQ ID NO: 3264317 - DNA, 25 bp, Homo sapien
cacattgggtttggaatgcagcact

SEQ ID NO: 3264318 - DNA, 25 bp, Homo sapien
tgctgtctgattttccgtatttcct

SEQ ID NO: 3264319 - DNA, 25 bp, Homo sapien
gactgtcagcattatcactcttaaa

SEQ ID NO: 3264320 - DNA, 25 bp, Homo sapien
tgcctacacctcttacgactgtcag

SEQ ID NO: 3264321 - DNA, 25 bp, Homo sapien
tatgaaaacgctctgctcttctctt

SEQ ID NO: 3264322 - DNA, 25 bp, Homo sapien
cacatcccgtctatgaaaacgctct

SEQ ID NO: 3264323 - DNA, 25 bp, Homo sapien
gaatttattcttgctgtttatctcc

SEQ ID NO: 3264324 - DNA, 25 bp, Homo sapien
gctcttctcttacaaggctttgtga

SEQ ID NO: 3264325 - DNA, 25 bp, Homo sapien
caatgaccaaacatgaacgctggct

SEQ ID NO: 3264326 - DNA, 25 bp, Homo sapien
ggcagtcctcagaacgtattacaag

SEQ ID NO: 3264327 - DNA, 25 bp, Homo sapien
caagtaatgacctagagacgactgc

SEQ ID NO: 3264328 - DNA, 25 bp, Homo sapien
taaatcttgctaccagccggtccag

SEQ ID NO: 3264329 - DNA, 25 bp, Homo sapien
tctgggaatccaaagtagataatgc

SEQ ID NO: 3264330 - DNA, 25 bp, Homo sapien
gaatccaaagtagataatgcttgtt

SEQ ID NO: 3264331 - DNA, 25 bp, Homo sapien
gggaatccaaagtagataatgcttg

SEQ ID NO: 3264332 - DNA, 25 bp, Homo sapien
cagagcccgtgactgtttaacttac

SEQ ID NO: 3264333 - DNA, 25 bp, Homo sapien
cctgaaatgctgctttggtagaagc

SEQ ID NO: 3264334 - DNA, 25 bp, Homo sapien
aaggtgagtgcaggtgaaaagtcca

SEQ ID NO: 3264335 - DNA, 25 bp, Homo sapien
acacaaacctgtggccatgaaagag

SEQ ID NO: 3264336 - DNA, 25 bp, Homo sapien
ccttctcaaatgtgatgaggcaggg

SEQ ID NO: 3264337 - DNA, 25 bp, Homo sapien
gatgcctgagtttaacactagaggg

SEQ ID NO: 3264338 - DNA, 25 bp, Homo sapien
cagggaagacccaattttagaatgt

SEQ ID NO: 3264339 - DNA, 25 bp, Homo sapien
cctgtgctgaaaacacgctttcctt

SEQ ID NO: 3264340 - DNA, 25 bp, Homo sapien
cttcttcacagggaagacccaattt

SEQ ID NO: 3264341 - DNA, 25 bp, Homo sapien
tctaagacccggctgagaagcctgg

SEQ ID NO: 3264342 - DNA, 25 bp, Homo sapien
ttataataagagtccggagtcacgg

SEQ ID NO: 3264343 - DNA, 25 bp, Homo sapien
tttaaagtagcccaccagagaggca

SEQ ID NO: 3264344 - DNA, 25 bp, Homo sapien
tctttgtaaaggatggctgtcaccc

SEQ ID NO: 3264345 - DNA, 25 bp, Homo sapien
cacagttgttgattcctagtcccta

SEQ ID NO: 3264346 - DNA, 25 bp, Homo sapien
acaaccctttagtatttcaacacag

SEQ ID NO: 3264347 - DNA, 25 bp, Homo sapien
tcaggtctattaccatgttagtcgg

SEQ ID NO: 3264348 - DNA, 25 bp, Homo sapien
gaactcattatgcattcaggtctat

SEQ ID NO: 3264349 - DNA, 25 bp, Homo sapien
ttgaaggctcattgttgtactgatt

SEQ ID NO: 3264350 - DNA, 25 bp, Homo sapien
ctgattggtcactgcaccacttgag

SEQ ID NO: 3264351 - DNA, 25 bp, Homo sapien
gaaagctgtctgtatccaagtcgtt

SEQ ID NO: 3264352 - DNA, 25 bp, Homo sapien
tcacatctagttcagaaagatcaag

SEQ ID NO: 3264353 - DNA, 25 bp, Homo sapien
cactgcaggaactcctattgcaggg

SEQ ID NO: 3264354 - DNA, 25 bp, Homo sapien
gggtctggcattgccagaacagtaa

SEQ ID NO: 3264355 - DNA, 25 bp, Homo sapien
cgctaatgtcagtccgcagacagta

SEQ ID NO: 3264356 - DNA, 25 bp, Homo sapien
gcagacagtaaagaacactgcagga

SEQ ID NO: 3264357 - DNA, 25 bp, Homo sapien
atattttatacaggcggaggtgatt

SEQ ID NO: 3264358 - DNA, 25 bp, Homo sapien
tatacaggcggaggtgattcccaga

SEQ ID NO: 3264359 - DNA, 25 bp, Homo sapien
tacaggcggaggtgattcccagagc

SEQ ID NO: 3264360 - DNA, 25 bp, Homo sapien
tttatacaggcggaggtgattccca

SEQ ID NO: 3264361 - DNA, 25 bp, Homo sapien
ttttgcttgtttcccaagttgccca

SEQ ID NO: 3264362 - DNA, 25 bp, Homo sapien
aactttccttccgagagcattccat

SEQ ID NO: 3264363 - DNA, 25 bp, Homo sapien
tgcttgtttcccaagttgcccaaac

SEQ ID NO: 3264364 - DNA, 25 bp, Homo sapien
cccaaactttccttccgagagcatt

SEQ ID NO: 3264365 - DNA, 25 bp, Homo sapien
tatttttacactagcagcgagcagc

SEQ ID NO: 3264366 - DNA, 25 bp, Homo sapien
aattgtagccagcagagactgtgga

SEQ ID NO: 3264367 - DNA, 25 bp, Homo sapien
tcaggcagctctccgtggtacagga

SEQ ID NO: 3264368 - DNA, 25 bp, Homo sapien
gacgcgaacggaaaaccttgcactg

SEQ ID NO: 3264369 - DNA, 25 bp, Homo sapien
gatgtcactccatacagactcagag

SEQ ID NO: 3264370 - DNA, 25 bp, Homo sapien
tcactccatacagactcagagtcct

SEQ ID NO: 3264371 - DNA, 25 bp, Homo sapien
ctcgatgtcactccatacagactca

SEQ ID NO: 3264372 - DNA, 25 bp, Homo sapien
cagactcagagtcctggttgcacat

SEQ ID NO: 3264373 - DNA, 25 bp, Homo sapien
gacgccagtcaagctttttcaactc

SEQ ID NO: 3264374 - DNA, 25 bp, Homo sapien
atgcaggcaaccagccccttactga

SEQ ID NO: 3264375 - DNA, 25 bp, Homo sapien
aaccagccccttactgagagtgaac

SEQ ID NO: 3264376 - DNA, 25 bp, Homo sapien
ccagctcctgaatgacgccagtcaa

SEQ ID NO: 3264377 - DNA, 25 bp, Homo sapien
tgctgctctaactcgtgacgtcact

SEQ ID NO: 3264378 - DNA, 25 bp, Homo sapien
tctaactcgtgacgtcactcaaagg

SEQ ID NO: 3264379 - DNA, 25 bp, Homo sapien
ctcgtgacgtcactcaaaggcagcc

SEQ ID NO: 3264380 - DNA, 25 bp, Homo sapien
gcagcttgctgctctaactcgtgac

SEQ ID NO: 3264381 - DNA, 25 bp, Homo sapien
ggaagccttctttgcacagggtgaa

SEQ ID NO: 3264382 - DNA, 25 bp, Homo sapien
gcacagggtgaatccaaatgtctca

SEQ ID NO: 3264383 - DNA, 25 bp, Homo sapien
gcaactggcgctcagtgttgctgaa

SEQ ID NO: 3264384 - DNA, 25 bp, Homo sapien
tcacaaagatactggaaatcagaga

SEQ ID NO: 3264385 - DNA, 25 bp, Homo sapien
cgactctattgagcaagaggtagaa

SEQ ID NO: 3264386 - DNA, 25 bp, Homo sapien
cctttaaggttgagtgaattagtca

SEQ ID NO: 3264387 - DNA, 25 bp, Homo sapien
atgccacctaagaccaaccagcttg

SEQ ID NO: 3264388 - DNA, 25 bp, Homo sapien
tagaagatgtatgctttgatgccac

SEQ ID NO: 3264389 - DNA, 25 bp, Homo sapien
gctctcctgtgggtatgttcagctt

SEQ ID NO: 3264390 - DNA, 25 bp, Homo sapien
ctctcctgtgggtatgttcagcttg

SEQ ID NO: 3264391 - DNA, 25 bp, Homo sapien
tctcctgtgggtatgttcagcttgt

SEQ ID NO: 3264392 - DNA, 25 bp, Homo sapien
gggctctcctgtgggtatgttcagc

SEQ ID NO: 3264393 - DNA, 25 bp, Homo sapien
aaaactatgccagccaacgcagtcg

SEQ ID NO: 3264394 - DNA, 25 bp, Homo sapien
ggtcttcaagtaacctatatcatag

SEQ ID NO: 3264395 - DNA, 25 bp, Homo sapien
aaaattagatgagtgatgtgcctag

SEQ ID NO: 3264396 - DNA, 25 bp, Homo sapien
gctggcaagttgctatctaagtcca

SEQ ID NO: 3264397 - DNA, 25 bp, Homo sapien
tacttttacactctgacagccgctg

SEQ ID NO: 3264398 - DNA, 25 bp, Homo sapien
tacactctgacagccgctggctctt

SEQ ID NO: 3264399 - DNA, 25 bp, Homo sapien
gaacatagatacttttacactctga

SEQ ID NO: 3264400 - DNA, 25 bp, Homo sapien
tttccctttctgaacatagatactt

SEQ ID NO: 3264401 - DNA, 25 bp, Homo sapien
agttcacagttcatagatttggtgg

SEQ ID NO: 3264402 - DNA, 25 bp, Homo sapien
aagttcacagttcatagatttggtg

SEQ ID NO: 3264403 - DNA, 25 bp, Homo sapien
cactcaatagggcagtatccaaagt

SEQ ID NO: 3264404 - DNA, 25 bp, Homo sapien
gaacaaaggccattagggatgacct

SEQ ID NO: 3264405 - DNA, 25 bp, Homo sapien
actaattctgaaacccctactgcca

SEQ ID NO: 3264406 - DNA, 25 bp, Homo sapien
cctatggctatttagagtagacccg

SEQ ID NO: 3264407 - DNA, 25 bp, Homo sapien
ctgggcacattcaggaaaaatgatc

SEQ ID NO: 3264408 - DNA, 25 bp, Homo sapien
gcacattcaggaaaaatgatcacct

SEQ ID NO: 3264409 - DNA, 25 bp, Homo sapien
gtccctagcatagcactgggcacat

SEQ ID NO: 3264410 - DNA, 25 bp, Homo sapien
ctgtccctagcatagcactgggcac

SEQ ID NO: 3264411 - DNA, 25 bp, Homo sapien
tgagcacagtgcaaagcgaacaatt

SEQ ID NO: 3264412 - DNA, 25 bp, Homo sapien
aagcgaacaattcctttctcccaca

SEQ ID NO: 3264413 - DNA, 25 bp, Homo sapien
tgggctacaccactttgagcacagt

SEQ ID NO: 3264414 - DNA, 25 bp, Homo sapien
agggaaaggagtgggctacaccact

SEQ ID NO: 3264415 - DNA, 25 bp, Homo sapien
gattacattcacaattaaactcttt

SEQ ID NO: 3264416 - DNA, 25 bp, Homo sapien
cattcacaattaaactctttaagac

SEQ ID NO: 3264417 - DNA, 25 bp, Homo sapien
agattacattcacaattaaactctt

SEQ ID NO: 3264418 - DNA, 25 bp, Homo sapien
tacattcacaattaaactctttaag

SEQ ID NO: 3264419 - DNA, 25 bp, Homo sapien
caaggtgatttatcactgacacctc

SEQ ID NO: 3264420 - DNA, 25 bp, Homo sapien
ggcttccacacgcaatttactaaag

SEQ ID NO: 3264421 - DNA, 25 bp, Homo sapien
tctggcttccacacgcaatttacta

SEQ ID NO: 3264422 - DNA, 25 bp, Homo sapien
gtttcatggcaaggtgatttatcac

SEQ ID NO: 3264423 - DNA, 25 bp, Homo sapien
tgagtgatcttttactgacccattg

SEQ ID NO: 3264424 - DNA, 25 bp, Homo sapien
tatcaatcaatctagggttccctgc

SEQ ID NO: 3264425 - DNA, 25 bp, Homo sapien
tgtcgactggaggaaacaattactt

SEQ ID NO: 3264426 - DNA, 25 bp, Homo sapien
taaattgtctgcacaccaatccccg

SEQ ID NO: 3264427 - DNA, 25 bp, Homo sapien
gagtttgtgctggaagaggtagaga

SEQ ID NO: 3264428 - DNA, 25 bp, Homo sapien
aaatgtgtgtgtcacgcgttatgcc

SEQ ID NO: 3264429 - DNA, 25 bp, Homo sapien
cgttatgccaagaaccacagcaggg

SEQ ID NO: 3264430 - DNA, 25 bp, Homo sapien
tgtgtgtcacgcgttatgccaagaa

SEQ ID NO: 3264431 - DNA, 25 bp, Homo sapien
ataccagtaggaggattgtgagcct

SEQ ID NO: 3264432 - DNA, 25 bp, Homo sapien
tcataccagtaggaggattgtgagc

SEQ ID NO: 3264433 - DNA, 25 bp, Homo sapien
cataccagtaggaggattgtgagcc

SEQ ID NO: 3264434 - DNA, 25 bp, Homo sapien
ctcataccagtaggaggattgtgag

SEQ ID NO: 3264435 - DNA, 25 bp, Homo sapien
ttccactcccctacatgtacttggg

SEQ ID NO: 3264436 - DNA, 25 bp, Homo sapien
gatcttgtggaattgtctctgcatg

SEQ ID NO: 3264437 - DNA, 25 bp, Homo sapien
aaccaagctcgaggttctgctcaca

SEQ ID NO: 3264438 - DNA, 25 bp, Homo sapien
caaaatactactggtgtcctggtgc

SEQ ID NO: 3264439 - DNA, 25 bp, Homo sapien
tcactcgttccatctgttatcaaca

SEQ ID NO: 3264440 - DNA, 25 bp, Homo sapien
aactcccaaccattttaagcaaatg

SEQ ID NO: 3264441 - DNA, 25 bp, Homo sapien
gccaggcctctgtagactttgcaaa

SEQ ID NO: 3264442 - DNA, 25 bp, Homo sapien
cacagttaatccagtaaataaactc

SEQ ID NO: 3264443 - DNA, 25 bp, Homo sapien
ctataaacagtgacaacatgtgtgg

SEQ ID NO: 3264444 - DNA, 25 bp, Homo sapien
ttactgcattgtaaccacatggtgc

SEQ ID NO: 3264445 - DNA, 25 bp, Homo sapien
agaaggactcgctatctcccacact

SEQ ID NO: 3264446 - DNA, 25 bp, Homo sapien
ggctgactgagaaggactcgctatc

SEQ ID NO: 3264447 - DNA, 25 bp, Homo sapien
gatgagatgctcatcacagataatt

SEQ ID NO: 3264448 - DNA, 25 bp, Homo sapien
ccataaggtgatggcagcccacaag

SEQ ID NO: 3264449 - DNA, 25 bp, Homo sapien
cccctgtacatgttaggccgtgatg

SEQ ID NO: 3264450 - DNA, 25 bp, Homo sapien
taattgggacaggtattaaatggcc

SEQ ID NO: 3264451 - DNA, 25 bp, Homo sapien
taagaagataccactcgagtctacc

SEQ ID NO: 3264452 - DNA, 25 bp, Homo sapien
gctccactaagaagataccactcga

SEQ ID NO: 3264453 - DNA, 25 bp, Homo sapien
ctttcctctgctccactaagaagat

SEQ ID NO: 3264454 - DNA, 25 bp, Homo sapien
gagtctaccatctctgagtccaagg

SEQ ID NO: 3264455 - DNA, 25 bp, Homo sapien
gaagggaggcctcttaagctccagg

SEQ ID NO: 3264456 - DNA, 25 bp, Homo sapien
aaagctgcacagcaagaagcaccac

SEQ ID NO: 3264457 - DNA, 25 bp, Homo sapien
aacacttagcatgctcatgagcggg

SEQ ID NO: 3264458 - DNA, 25 bp, Homo sapien
tctcgccaggaataagctgtaaggt

SEQ ID NO: 3264459 - DNA, 25 bp, Homo sapien
ggccataaattaggttcctgctaac

SEQ ID NO: 3264460 - DNA, 25 bp, Homo sapien
cccctttcctggttgtcctgcagta

SEQ ID NO: 3264461 - DNA, 25 bp, Homo sapien
ccgcataattgctttcatgaacccc

SEQ ID NO: 3264462 - DNA, 25 bp, Homo sapien
cctgcagtagatcctgggtgctcct

SEQ ID NO: 3264463 - DNA, 25 bp, Homo sapien
aatccacccgacaataaagcatgcc

SEQ ID NO: 3264464 - DNA, 25 bp, Homo sapien
ccaaacaagcatgtagaacaggcac

SEQ ID NO: 3264465 - DNA, 25 bp, Homo sapien
tatagcctgactgcgacaactaatt

SEQ ID NO: 3264466 - DNA, 25 bp, Homo sapien
caaatgcagagtgtaaatccacccg

SEQ ID NO: 3264467 - DNA, 25 bp, Homo sapien
tatcgaccaaattggctgcaatggc

SEQ ID NO: 3264468 - DNA, 25 bp, Homo sapien
tttgcagattatcgaccaaattggc

SEQ ID NO: 3264469 - DNA, 25 bp, Homo sapien
tggctgcaatggctctgagcaatgg

SEQ ID NO: 3264470 - DNA, 25 bp, Homo sapien
caaattggctgcaatggctctgagc

SEQ ID NO: 3264471 - DNA, 25 bp, Homo sapien
tcctctgcatgtgcactaaaaccat

SEQ ID NO: 3264472 - DNA, 25 bp, Homo sapien
attcatatttgccacccagtagctt

SEQ ID NO: 3264473 - DNA, 25 bp, Homo sapien
gtagctttcccagccatcgcattca

SEQ ID NO: 3264474 - DNA, 25 bp, Homo sapien
cagtagctttcccagccatcgcatt

SEQ ID NO: 3264475 - DNA, 25 bp, Homo sapien
tacttcgacgactaagatggtacct

SEQ ID NO: 3264476 - DNA, 25 bp, Homo sapien
gactgcattcggatatgagggccat

SEQ ID NO: 3264477 - DNA, 25 bp, Homo sapien
cagtcagctttgtgatcatcagtcc

SEQ ID NO: 3264478 - DNA, 25 bp, Homo sapien
tgagggccatagttagtacctcacc

SEQ ID NO: 3264479 - DNA, 25 bp, Homo sapien
tttatacactttaggtggtttggca

SEQ ID NO: 3264480 - DNA, 25 bp, Homo sapien
aattaaggcgtcgagcctctgtggc

SEQ ID NO: 3264481 - DNA, 25 bp, Homo sapien
gctgttttctgatatggatccatct

SEQ ID NO: 3264482 - DNA, 25 bp, Homo sapien
tatggatccatcttgcccacatcat

SEQ ID NO: 3264483 - DNA, 25 bp, Homo sapien
tatgagctgcacgttttactacact

SEQ ID NO: 3264484 - DNA, 25 bp, Homo sapien
taacactgtcatattcagatcggga

SEQ ID NO: 3264485 - DNA, 25 bp, Homo sapien
cagatcgggaccttttaccatgcaa

SEQ ID NO: 3264486 - DNA, 25 bp, Homo sapien
tattgaagaacactagcaccatttt

SEQ ID NO: 3264487 - DNA, 25 bp, Homo sapien
agtagctatcccgtagcctttcttt

SEQ ID NO: 3264488 - DNA, 25 bp, Homo sapien
atatttccttccggttggctcctca

SEQ ID NO: 3264489 - DNA, 25 bp, Homo sapien
gcttggttcttcatgttttcctctg

SEQ ID NO: 3264490 - DNA, 25 bp, Homo sapien
tgattcagtagctatcccgtagcct

SEQ ID NO: 3264491 - DNA, 25 bp, Homo sapien
tatctttataatggttctaattggg

SEQ ID NO: 3264492 - DNA, 25 bp, Homo sapien
tgagagtcaattatgccaaaagcac

SEQ ID NO: 3264493 - DNA, 25 bp, Homo sapien
tgaccaattacttatctaaacggga

SEQ ID NO: 3264494 - DNA, 25 bp, Homo sapien
tgagaaaattatggtacacaatggt

SEQ ID NO: 3264495 - DNA, 25 bp, Homo sapien
cagtcttacgataacagttggtagc

SEQ ID NO: 3264496 - DNA, 25 bp, Homo sapien
aaaattctaactcaggcatgtggat

SEQ ID NO: 3264497 - DNA, 25 bp, Homo sapien
cagacatcagcaggaatatcatttc

SEQ ID NO: 3264498 - DNA, 25 bp, Homo sapien
gacttctcaacaagctcagagcact

SEQ ID NO: 3264499 - DNA, 25 bp, Homo sapien
ggatttcttttactacagatccaaa

SEQ ID NO: 3264500 - DNA, 25 bp, Homo sapien
tttctggaagccctgcatttcagac

SEQ ID NO: 3264501 - DNA, 25 bp, Homo sapien
tttactacagatccaaacctttgca

SEQ ID NO: 3264502 - DNA, 25 bp, Homo sapien
tgcacctgaagaacagcaaaaggtg

SEQ ID NO: 3264503 - DNA, 25 bp, Homo sapien
gaggagcatccaagacctaggcaca

SEQ ID NO: 3264504 - DNA, 25 bp, Homo sapien
tggaagcatcactaactcggaggcg

SEQ ID NO: 3264505 - DNA, 25 bp, Homo sapien
ctcggaggcgatgaacagaaatgga

SEQ ID NO: 3264506 - DNA, 25 bp, Homo sapien
gtgtatgcagccatcctgacgtggg

SEQ ID NO: 3264507 - DNA, 25 bp, Homo sapien
gactgattgaaaggctcgatatagc

SEQ ID NO: 3264508 - DNA, 25 bp, Homo sapien
aagactgattgaaaggctcgatata

SEQ ID NO: 3264509 - DNA, 25 bp, Homo sapien
ttaaaagactgattgaaaggctcga

SEQ ID NO: 3264510 - DNA, 25 bp, Homo sapien
gattgaaaggctcgatatagcccat

SEQ ID NO: 3264511 - DNA, 25 bp, Homo sapien
ggactaagatgaataagggagctac

SEQ ID NO: 3264512 - DNA, 25 bp, Homo sapien
gatcctctggtactatgtcacatca

SEQ ID NO: 3264513 - DNA, 25 bp, Homo sapien
gatgataaatcagaaagactgcagg

SEQ ID NO: 3264514 - DNA, 25 bp, Homo sapien
gcagctaagtgcatccacgatttga

SEQ ID NO: 3264515 - DNA, 25 bp, Homo sapien
taagaaagcccaaactcgaacacag

SEQ ID NO: 3264516 - DNA, 25 bp, Homo sapien
tgagaaggcacaacactccgtgact

SEQ ID NO: 3264517 - DNA, 25 bp, Homo sapien
tgagtcatcattggaattcacgcca

SEQ ID NO: 3264518 - DNA, 25 bp, Homo sapien
ggtgctcaaagctgcgaccatttca

SEQ ID NO: 3264519 - DNA, 25 bp, Homo sapien
caataatgaactctgtacaatgagt

SEQ ID NO: 3264520 - DNA, 25 bp, Homo sapien
gttaatgcaacaccggagcttacag

SEQ ID NO: 3264521 - DNA, 25 bp, Homo sapien
aagctttttaagagtacattagtga

SEQ ID NO: 3264522 - DNA, 25 bp, Homo sapien
ctattggcttcggatattgacttcc

SEQ ID NO: 3264523 - DNA, 25 bp, Homo sapien
aagaccttgagggtccgattctaat

SEQ ID NO: 3264524 - DNA, 25 bp, Homo sapien
tcatcctggtcacagtttctcacaa

SEQ ID NO: 3264525 - DNA, 25 bp, Homo sapien
tctgagttgtaccataatgagtctc

SEQ ID NO: 3264526 - DNA, 25 bp, Homo sapien
gagtctcttaaaagaaccgttctga

SEQ ID NO: 3264527 - DNA, 25 bp, Homo sapien
tcttcttggccattatagacatcct

SEQ ID NO: 3264528 - DNA, 25 bp, Homo sapien
caagtgggccctttcatactccctg

SEQ ID NO: 3264529 - DNA, 25 bp, Homo sapien
ccagactgagagtctttttgttgtc

SEQ ID NO: 3264530 - DNA, 25 bp, Homo sapien
gttgtctttctgtggcaagtccctc

SEQ ID NO: 3264531 - DNA, 25 bp, Homo sapien
aatgggttcagggacaccttgcaac

SEQ ID NO: 3264532 - DNA, 25 bp, Homo sapien
gaagggacctacctgattcacaagt

SEQ ID NO: 3264533 - DNA, 25 bp, Homo sapien
gactttgtgccaggacaacgttaag

SEQ ID NO: 3264534 - DNA, 25 bp, Homo sapien
cttgcaacgagtttaggaggaccac

SEQ ID NO: 3264535 - DNA, 25 bp, Homo sapien
ttcattcatcacacagttacagagg

SEQ ID NO: 3264536 - DNA, 25 bp, Homo sapien
tgttcattcatcacacagttacaga

SEQ ID NO: 3264537 - DNA, 25 bp, Homo sapien
catcacacagttacagaggaacccc

SEQ ID NO: 3264538 - DNA, 25 bp, Homo sapien
cattcatcacacagttacagaggaa

SEQ ID NO: 3264539 - DNA, 25 bp, Homo sapien
ctacttcatcatgagagagttcact

SEQ ID NO: 3264540 - DNA, 25 bp, Homo sapien
ttcatcatgagagagttcactctca

SEQ ID NO: 3264541 - DNA, 25 bp, Homo sapien
cttctacttcatcatgagagagttc

SEQ ID NO: 3264542 - DNA, 25 bp, Homo sapien
catcatgagagagttcactctcatc

SEQ ID NO: 3264543 - DNA, 25 bp, Homo sapien
gaggatcccgcaaaagggatttcca

SEQ ID NO: 3264544 - DNA, 25 bp, Homo sapien
ctgcgtagagggttcagtaaaggca

SEQ ID NO: 3264545 - DNA, 25 bp, Homo sapien
ctaccaggaggaaagtgtattggcc

SEQ ID NO: 3264546 - DNA, 25 bp, Homo sapien
agtaaaggcaaatcactaccaggag

SEQ ID NO: 3264547 - DNA, 25 bp, Homo sapien
agtggcagagggtgctttgccgaaa

SEQ ID NO: 3264548 - DNA, 25 bp, Homo sapien
tggcagagggtgctttgccgaaaag

SEQ ID NO: 3264549 - DNA, 25 bp, Homo sapien
ggcagagggtgctttgccgaaaagc

SEQ ID NO: 3264550 - DNA, 25 bp, Homo sapien
gtggcagagggtgctttgccgaaaa

SEQ ID NO: 3264551 - DNA, 25 bp, Homo sapien
tacaccaccttgactagtttctctg

SEQ ID NO: 3264552 - DNA, 25 bp, Homo sapien
tacatcatagttcccattagccagg

SEQ ID NO: 3264553 - DNA, 25 bp, Homo sapien
accaccagagctaggaccaggttct

SEQ ID NO: 3264554 - DNA, 25 bp, Homo sapien
tggagacaccataagacctgaaaac

SEQ ID NO: 3264555 - DNA, 25 bp, Homo sapien
ttccaactccataagtaaaagctgg

SEQ ID NO: 3264556 - DNA, 25 bp, Homo sapien
tacagttgattctagaaattgcatc

SEQ ID NO: 3264557 - DNA, 25 bp, Homo sapien
caggatggttatatgcttaaatgga

SEQ ID NO: 3264558 - DNA, 25 bp, Homo sapien
taaaagctggttcacttaaggcaaa

SEQ ID NO: 3264559 - DNA, 25 bp, Homo sapien
gcctgcttctcgctgaagtactttt

SEQ ID NO: 3264560 - DNA, 25 bp, Homo sapien
tggagaaaatgccatgccagaggat

SEQ ID NO: 3264561 - DNA, 25 bp, Homo sapien
tgcacaaactggattcgccagcggc

SEQ ID NO: 3264562 - DNA, 25 bp, Homo sapien
ctctccttgcaagcttttaccaaag

SEQ ID NO: 3264563 - DNA, 25 bp, Homo sapien
ctaacccccattactttagaatgtg

SEQ ID NO: 3264564 - DNA, 25 bp, Homo sapien
tatgtgggagtcctaacccccatta

SEQ ID NO: 3264565 - DNA, 25 bp, Homo sapien
taacccccattactttagaatgtga

SEQ ID NO: 3264566 - DNA, 25 bp, Homo sapien
tctcagactcatgaacattctccag

SEQ ID NO: 3264567 - DNA, 25 bp, Homo sapien
gaagccttcatctcagactcatgaa

SEQ ID NO: 3264568 - DNA, 25 bp, Homo sapien
attatttgaagccttcatctcagac

SEQ ID NO: 3264569 - DNA, 25 bp, Homo sapien
ttctccagacatacttgattcaaag

SEQ ID NO: 3264570 - DNA, 25 bp, Homo sapien
tcacttgaagtcattggtgacataa

SEQ ID NO: 3264571 - DNA, 25 bp, Homo sapien
tctcaccctggatgcatcacttgaa

SEQ ID NO: 3264572 - DNA, 25 bp, Homo sapien
ttgctgtagtgatctcaccctggat

SEQ ID NO: 3264573 - DNA, 25 bp, Homo sapien
cctgctttttgctgtagtgatctca

SEQ ID NO: 3264574 - DNA, 25 bp, Homo sapien
gacctcccattccccttagcatcct

SEQ ID NO: 3264575 - DNA, 25 bp, Homo sapien
tcaatgcatctgcacaccatatggg

SEQ ID NO: 3264576 - DNA, 25 bp, Homo sapien
aatgcatctgcacaccatatgggaa

SEQ ID NO: 3264577 - DNA, 25 bp, Homo sapien
gcatctgcacaccatatgggaatga

SEQ ID NO: 3264578 - DNA, 25 bp, Homo sapien
catctttcggatttcaattcttcat

SEQ ID NO: 3264579 - DNA, 25 bp, Homo sapien
tctttcggatttcaattcttcatcc

SEQ ID NO: 3264580 - DNA, 25 bp, Homo sapien
tcatctttcggatttcaattcttca

SEQ ID NO: 3264581 - DNA, 25 bp, Homo sapien
ctttcggatttcaattcttcatcca

SEQ ID NO: 3264582 - DNA, 25 bp, Homo sapien
ctcctagaaaccgccccaccaagct

SEQ ID NO: 3264583 - DNA, 25 bp, Homo sapien
agaaggcccaactcatttttgacca

SEQ ID NO: 3264584 - DNA, 25 bp, Homo sapien
tttttgaccataaactgtcctccta

SEQ ID NO: 3264585 - DNA, 25 bp, Homo sapien
gaccataaactgtcctcctagaaac

SEQ ID NO: 3264586 - DNA, 25 bp, Homo sapien
tagactgaccaatggccaattagct

SEQ ID NO: 3264587 - DNA, 25 bp, Homo sapien
gccacaaggtcagagccagacaacc

SEQ ID NO: 3264588 - DNA, 25 bp, Homo sapien
ggccaattagctcaaattcttctga

SEQ ID NO: 3264589 - DNA, 25 bp, Homo sapien
tatacccggtcttggccaactgaac

SEQ ID NO: 3264590 - DNA, 25 bp, Homo sapien
aaaggctgcattcaaatcatactgc

SEQ ID NO: 3264591 - DNA, 25 bp, Homo sapien
caaaggctgcattcaaatcatactg

SEQ ID NO: 3264592 - DNA, 25 bp, Homo sapien
cacacaactgcatcttacgctcata

SEQ ID NO: 3264593 - DNA, 25 bp, Homo sapien
tagttgtccaaacctacctgagtga

SEQ ID NO: 3264594 - DNA, 25 bp, Homo sapien
tacgctcataagctgtgttctacca

SEQ ID NO: 3264595 - DNA, 25 bp, Homo sapien
gaatcccatctccaagtagttgtcc

SEQ ID NO: 3264596 - DNA, 25 bp, Homo sapien
ttaatcagatatgaatactggttgg

SEQ ID NO: 3264597 - DNA, 25 bp, Homo sapien
cagatatgaatactggttggtggct

SEQ ID NO: 3264598 - DNA, 25 bp, Homo sapien
tcagatatgaatactggttggtggc

SEQ ID NO: 3264599 - DNA, 25 bp, Homo sapien
aatcagatatgaatactggttggtg

SEQ ID NO: 3264600 - DNA, 25 bp, Homo sapien
ttggtctgaatcttggcggcatcct

SEQ ID NO: 3264601 - DNA, 25 bp, Homo sapien
ttggcggcatccttctaactggtct

SEQ ID NO: 3264602 - DNA, 25 bp, Homo sapien
tactctgcagccagaaaagtcagaa

SEQ ID NO: 3264603 - DNA, 25 bp, Homo sapien
tctattcccaccattgttgatttgg

SEQ ID NO: 3264604 - DNA, 25 bp, Homo sapien
ttccttcttattggcattttctgcc

SEQ ID NO: 3264605 - DNA, 25 bp, Homo sapien
tccttcttattggcattttctgcca

SEQ ID NO: 3264606 - DNA, 25 bp, Homo sapien
ccttcttattggcattttctgccat

SEQ ID NO: 3264607 - DNA, 25 bp, Homo sapien
ctctgtattgtgtcccataataaaa

SEQ ID NO: 3264608 - DNA, 25 bp, Homo sapien
ttgtgtcccataataaaaataggca

SEQ ID NO: 3264609 - DNA, 25 bp, Homo sapien
taggcaactatcttccttgcatgct

SEQ ID NO: 3264610 - DNA, 25 bp, Homo sapien
tcctgtttgatagaataattctcat

SEQ ID NO: 3264611 - DNA, 25 bp, Homo sapien
tggtcacccaagagccctgatataa

SEQ ID NO: 3264612 - DNA, 25 bp, Homo sapien
cttgagacttactgcttagaaaaca

SEQ ID NO: 3264613 - DNA, 25 bp, Homo sapien
tacaatgcttctcatagaatgtact

SEQ ID NO: 3264614 - DNA, 25 bp, Homo sapien
tcataaagctatagtggccatacat

SEQ ID NO: 3264615 - DNA, 25 bp, Homo sapien
actccacagccgatgatccaggcag

SEQ ID NO: 3264616 - DNA, 25 bp, Homo sapien
cctctatcaacaactccacagccga

SEQ ID NO: 3264617 - DNA, 25 bp, Homo sapien
tcctctatcaacaactccacagccg

SEQ ID NO: 3264618 - DNA, 25 bp, Homo sapien
tccacagccgatgatccaggcagcc

SEQ ID NO: 3264619 - DNA, 25 bp, Homo sapien
atttcactagcgctgtcatgaccat

SEQ ID NO: 3264620 - DNA, 25 bp, Homo sapien
ttatttcactagcgctgtcatgacc

SEQ ID NO: 3264621 - DNA, 25 bp, Homo sapien
tcactagcgctgtcatgaccattcc

SEQ ID NO: 3264622 - DNA, 25 bp, Homo sapien
tcatgaccattcccacgggcagcac

SEQ ID NO: 3264623 - DNA, 25 bp, Homo sapien
caaatgcaaactctctggggattcc

SEQ ID NO: 3264624 - DNA, 25 bp, Homo sapien
ctttcgaagcttagcagccctgagc

SEQ ID NO: 3264625 - DNA, 25 bp, Homo sapien
tcacaggccctttcgaagcttagca

SEQ ID NO: 3264626 - DNA, 25 bp, Homo sapien
gccctttcgaagcttagcagccctg

SEQ ID NO: 3264627 - DNA, 25 bp, Homo sapien
tgatcctccttgctgacccatagtc

SEQ ID NO: 3264628 - DNA, 25 bp, Homo sapien
tacttcttgatcctccttgctgacc

SEQ ID NO: 3264629 - DNA, 25 bp, Homo sapien
ttacatggcttttacttcttgatcc

SEQ ID NO: 3264630 - DNA, 25 bp, Homo sapien
ttcttgatcctccttgctgacccat

SEQ ID NO: 3264631 - DNA, 25 bp, Homo sapien
tgcccagtagatagctaggtaccag

SEQ ID NO: 3264632 - DNA, 25 bp, Homo sapien
taggtaccagtcattcaataagagc

SEQ ID NO: 3264633 - DNA, 25 bp, Homo sapien
tagaactatggaatgagtgagccac

SEQ ID NO: 3264634 - DNA, 25 bp, Homo sapien
gaatctcggacttcttagtgcccag

SEQ ID NO: 3264635 - DNA, 25 bp, Homo sapien
ctgatgcataatacttaacttgaaa

SEQ ID NO: 3264636 - DNA, 25 bp, Homo sapien
gatgcataatacttaacttgaaaat

SEQ ID NO: 3264637 - DNA, 25 bp, Homo sapien
tcactaagaggtactgccagtgcca

SEQ ID NO: 3264638 - DNA, 25 bp, Homo sapien
tatcactaagaggtactgccagtgc

SEQ ID NO: 3264639 - DNA, 25 bp, Homo sapien
tgcgaatgctaaagcatttctgccg

SEQ ID NO: 3264640 - DNA, 25 bp, Homo sapien
tctgccgataatgaagcactcaaca

SEQ ID NO: 3264641 - DNA, 25 bp, Homo sapien
tgctaaagcatttctgccgataatg

SEQ ID NO: 3264642 - DNA, 25 bp, Homo sapien
tgagtgctgagctttgttgcgaatg

SEQ ID NO: 3264643 - DNA, 25 bp, Homo sapien
tgctaggccaaattccaaccacctt

SEQ ID NO: 3264644 - DNA, 25 bp, Homo sapien
tggacatccaccaaaagccgatcct

SEQ ID NO: 3264645 - DNA, 25 bp, Homo sapien
agccatccacgtaaatgctaggcca

SEQ ID NO: 3264646 - DNA, 25 bp, Homo sapien
aaagccgatcctacatctttagcca

SEQ ID NO: 3264647 - DNA, 25 bp, Homo sapien
ttatcacattgtgggccaaaatgaa

SEQ ID NO: 3264648 - DNA, 25 bp, Homo sapien
cacattgtgggccaaaatgaaattt

SEQ ID NO: 3264649 - DNA, 25 bp, Homo sapien
acattgtgggccaaaatgaaatttg

SEQ ID NO: 3264650 - DNA, 25 bp, Homo sapien
tttttatcacattgtgggccaaaat

SEQ ID NO: 3264651 - DNA, 25 bp, Homo sapien
tcactgaacagctagacctccgttc

SEQ ID NO: 3264652 - DNA, 25 bp, Homo sapien
gttggccaacctcaggagctgatgg

SEQ ID NO: 3264653 - DNA, 25 bp, Homo sapien
gctgatggatacaggttggaaccaa

SEQ ID NO: 3264654 - DNA, 25 bp, Homo sapien
tagacctccgttctggttggccaac

SEQ ID NO: 3264655 - DNA, 25 bp, Homo sapien
cgcagaggggcacagacgctgggca

SEQ ID NO: 3264656 - DNA, 25 bp, Homo sapien
tgctgacgtcaaattgcaagggcat

SEQ ID NO: 3264657 - DNA, 25 bp, Homo sapien
tcctggactgtgctgacgtcaaatt

SEQ ID NO: 3264658 - DNA, 25 bp, Homo sapien
gactgtgctgacgtcaaattgcaag

SEQ ID NO: 3264659 - DNA, 25 bp, Homo sapien
ccctgaggtagaagcatgtcacgca

SEQ ID NO: 3264660 - DNA, 25 bp, Homo sapien
tgttcaaagatcagcaaggagccca

SEQ ID NO: 3264661 - DNA, 25 bp, Homo sapien
cctgctgctggattgagaacagtcc

SEQ ID NO: 3264662 - DNA, 25 bp, Homo sapien
gaagatcacgacttttaccctgagt

SEQ ID NO: 3264663 - DNA, 25 bp, Homo sapien
tcaggctctggacctccaaacccca

SEQ ID NO: 3264664 - DNA, 25 bp, Homo sapien
gcctaagattccagcatcctcatta

SEQ ID NO: 3264665 - DNA, 25 bp, Homo sapien
aggctctggacctccaaaccccagc

SEQ ID NO: 3264666 - DNA, 25 bp, Homo sapien
ccagcctgagcctaagattccagca

SEQ ID NO: 3264667 - DNA, 25 bp, Homo sapien
tttgaaacttttggcatgtatccgg

SEQ ID NO: 3264668 - DNA, 25 bp, Homo sapien
tgtatccggaagctttataatgaga

SEQ ID NO: 3264669 - DNA, 25 bp, Homo sapien
tttcgggtcgtatcatgagcagaca

SEQ ID NO: 3264670 - DNA, 25 bp, Homo sapien
tgagaatttccagactttcgggtcg

SEQ ID NO: 3264671 - DNA, 25 bp, Homo sapien
taatggccaatttagctacttgtca

SEQ ID NO: 3264672 - DNA, 25 bp, Homo sapien
tgctgttatctctgcccaaccaaat

SEQ ID NO: 3264673 - DNA, 25 bp, Homo sapien
tgagtttcatatggccaagtgctca

SEQ ID NO: 3264674 - DNA, 25 bp, Homo sapien
cacaccaaatggagttcgatacccg

SEQ ID NO: 3264675 - DNA, 25 bp, Homo sapien
catgtttcatgggactccctgcttc

SEQ ID NO: 3264676 - DNA, 25 bp, Homo sapien
tgaagggagaagccatgtttcatgg

SEQ ID NO: 3264677 - DNA, 25 bp, Homo sapien
atctgatgctcacactaccctcctt

SEQ ID NO: 3264678 - DNA, 25 bp, Homo sapien
gatgctcacactaccctcctttgtt

SEQ ID NO: 3264679 - DNA, 25 bp, Homo sapien
gtggccccaagctcataaataaagc

SEQ ID NO: 3264680 - DNA, 25 bp, Homo sapien
tattttaggcctggtcagataagca

SEQ ID NO: 3264681 - DNA, 25 bp, Homo sapien
gcattggagcgtcttattttaggcc

SEQ ID NO: 3264682 - DNA, 25 bp, Homo sapien
cctggtcagataagcaagtgcttgc

SEQ ID NO: 3264683 - DNA, 25 bp, Homo sapien
atatccaaggagagatacaggagag

SEQ ID NO: 3264684 - DNA, 25 bp, Homo sapien
catttgctcagggaaggcaaactca

SEQ ID NO: 3264685 - DNA, 25 bp, Homo sapien
ggtttcctgcaatttctggactaac

SEQ ID NO: 3264686 - DNA, 25 bp, Homo sapien
cccattgatttgcaacaggcatttg

SEQ ID NO: 3264687 - DNA, 25 bp, Homo sapien
catcagacttggtagctggctctgc

SEQ ID NO: 3264688 - DNA, 25 bp, Homo sapien
ctttacttaacagtcctacgtagat

SEQ ID NO: 3264689 - DNA, 25 bp, Homo sapien
tcagggctgtacaacttcctgtaca

SEQ ID NO: 3264690 - DNA, 25 bp, Homo sapien
taacacagagcgcttcaatatctgc

SEQ ID NO: 3264691 - DNA, 25 bp, Homo sapien
cttgtaatttccataagggcaccat

SEQ ID NO: 3264692 - DNA, 25 bp, Homo sapien
tcttgtaatttccataagggcacca

SEQ ID NO: 3264693 - DNA, 25 bp, Homo sapien
gtcttgtaatttccataagggcacc

SEQ ID NO: 3264694 - DNA, 25 bp, Homo sapien
tgtcttgtaatttccataagggcac

SEQ ID NO: 3264695 - DNA, 25 bp, Homo sapien
taatgacttcaataaccacacaggg

SEQ ID NO: 3264696 - DNA, 25 bp, Homo sapien
ggaccaagaaactttgccgctaaga

SEQ ID NO: 3264697 - DNA, 25 bp, Homo sapien
tacaatcaagtaagtaggagcgtgc

SEQ ID NO: 3264698 - DNA, 25 bp, Homo sapien
gtcttatgctttctacaacccggat

SEQ ID NO: 3264699 - DNA, 25 bp, Homo sapien
tgacgcctattacagaactaattta

SEQ ID NO: 3264700 - DNA, 25 bp, Homo sapien
aataacattatgacgcctattacag

SEQ ID NO: 3264701 - DNA, 25 bp, Homo sapien
acattatgacgcctattacagaact

SEQ ID NO: 3264702 - DNA, 25 bp, Homo sapien
ctaaataacattatgacgcctatta

SEQ ID NO: 3264703 - DNA, 25 bp, Homo sapien
actgtcacgctctcggctggcatgg

SEQ ID NO: 3264704 - DNA, 25 bp, Homo sapien
ggtgacaaagctccactgacacacg

SEQ ID NO: 3264705 - DNA, 25 bp, Homo sapien
agactctcccgcgttgattcacaca

SEQ ID NO: 3264706 - DNA, 25 bp, Homo sapien
ggagttcccatatgcttaaggtaca

SEQ ID NO: 3264707 - DNA, 25 bp, Homo sapien
gaagcgtcccttctcatagagcaac

SEQ ID NO: 3264708 - DNA, 25 bp, Homo sapien
tgcagagatcagtggaagcgtccct

SEQ ID NO: 3264709 - DNA, 25 bp, Homo sapien
gagcaactcgacagtccaaagttta

SEQ ID NO: 3264710 - DNA, 25 bp, Homo sapien
tacggagaactcacggaacatggca

SEQ ID NO: 3264711 - DNA, 25 bp, Homo sapien
ttcccacggtcacttagcgagtcag

SEQ ID NO: 3264712 - DNA, 25 bp, Homo sapien
gccaggcagggcattccgtaatcaa

SEQ ID NO: 3264713 - DNA, 25 bp, Homo sapien
ccctcgtttacagcaggtggatgaa

SEQ ID NO: 3264714 - DNA, 25 bp, Homo sapien
caaccactgttgaaggcctttcagg

SEQ ID NO: 3264715 - DNA, 25 bp, Homo sapien
agccccgaacccagacaagcatcca

SEQ ID NO: 3264716 - DNA, 25 bp, Homo sapien
cagccccgaacccagacaagcatcc

SEQ ID NO: 3264717 - DNA, 25 bp, Homo sapien
gccccgaacccagacaagcatccac

SEQ ID NO: 3264718 - DNA, 25 bp, Homo sapien
gttgcaagtgtagggcctgactcct

SEQ ID NO: 3264719 - DNA, 25 bp, Homo sapien
gggcctgactcctcttcgtgcaagc

SEQ ID NO: 3264720 - DNA, 25 bp, Homo sapien
tcgtgcaagcctgaattatctaagc

SEQ ID NO: 3264721 - DNA, 25 bp, Homo sapien
aagagttgcaagtgtagggcctgac

SEQ ID NO: 3264722 - DNA, 25 bp, Homo sapien
gcacagccatccacaatgattggct

SEQ ID NO: 3264723 - DNA, 25 bp, Homo sapien
catccacaatgattggctgcactct

SEQ ID NO: 3264724 - DNA, 25 bp, Homo sapien
gccatccacaatgattggctgcact

SEQ ID NO: 3264725 - DNA, 25 bp, Homo sapien
cagccatccacaatgattggctgca

SEQ ID NO: 3264726 - DNA, 25 bp, Homo sapien
ttctgtcatggacaatatgattagg

SEQ ID NO: 3264727 - DNA, 25 bp, Homo sapien
aatgtcttctaccacagaccttaat

SEQ ID NO: 3264728 - DNA, 25 bp, Homo sapien
cccatttgattgtagggaatgtcag

SEQ ID NO: 3264729 - DNA, 25 bp, Homo sapien
tatgattaggttcagtcccatttga

SEQ ID NO: 3264730 - DNA, 25 bp, Homo sapien
tagtagtttgccattggtaatggca

SEQ ID NO: 3264731 - DNA, 25 bp, Homo sapien
agtagtttgccattggtaatggcaa

SEQ ID NO: 3264732 - DNA, 25 bp, Homo sapien
ttagtagtttgccattggtaatggc

SEQ ID NO: 3264733 - DNA, 25 bp, Homo sapien
ttttagtagtttgccattggtaatg

SEQ ID NO: 3264734 - DNA, 25 bp, Homo sapien
tgagagcacagtacatgggagtaac

SEQ ID NO: 3264735 - DNA, 25 bp, Homo sapien
tctagacagagggaatcacatatgc

SEQ ID NO: 3264736 - DNA, 25 bp, Homo sapien
gcttcactggagcaaagaatacgat

SEQ ID NO: 3264737 - DNA, 25 bp, Homo sapien
gaggcacgagaaacaacagagagct

SEQ ID NO: 3264738 - DNA, 25 bp, Homo sapien
ttaaaaggtaactagctgcaactgc

SEQ ID NO: 3264739 - DNA, 25 bp, Homo sapien
tcagatttaaggagagtgtggcaac

SEQ ID NO: 3264740 - DNA, 25 bp, Homo sapien
tcagtgggtagcatgaacaggagct

SEQ ID NO: 3264741 - DNA, 25 bp, Homo sapien
tagtcgtccagctacaaaaccaaga

SEQ ID NO: 3264742 - DNA, 25 bp, Homo sapien
gctctgaagatgcaacaggtgtccg

SEQ ID NO: 3264743 - DNA, 25 bp, Homo sapien
ggtgtccgagagactcaacctgtta

SEQ ID NO: 3264744 - DNA, 25 bp, Homo sapien
acagtgctgttctcaggtagagcca

SEQ ID NO: 3264745 - DNA, 25 bp, Homo sapien
gactcaacctgttactgatcccaca

SEQ ID NO: 3264746 - DNA, 25 bp, Homo sapien
ttatcgggccaatgaacacgtttgc

SEQ ID NO: 3264747 - DNA, 25 bp, Homo sapien
gtttcaaacttccattatcgggcca

SEQ ID NO: 3264748 - DNA, 25 bp, Homo sapien
ggtccacgaagaattctccacactt

SEQ ID NO: 3264749 - DNA, 25 bp, Homo sapien
aacacgtttgcccatgagtccaagg

SEQ ID NO: 3264750 - DNA, 25 bp, Homo sapien
gagcatggcagagtcgttaaaagca

SEQ ID NO: 3264751 - DNA, 25 bp, Homo sapien
gaagcttcatctgcacacgtaagtg

SEQ ID NO: 3264752 - DNA, 25 bp, Homo sapien
ggcttcagacccttgacataaagag

SEQ ID NO: 3264753 - DNA, 25 bp, Homo sapien
gatagaatcgcagctgtcatttgcc

SEQ ID NO: 3264754 - DNA, 25 bp, Homo sapien
ttcacgaaaggcacaaaagctgcct

SEQ ID NO: 3264755 - DNA, 25 bp, Homo sapien
tgaagctccggaggcctccaaagtc

SEQ ID NO: 3264756 - DNA, 25 bp, Homo sapien
tggtggccatagatacataccaggc

SEQ ID NO: 3264757 - DNA, 25 bp, Homo sapien
gcatgtatttcttgaaccacctcca

SEQ ID NO: 3264758 - DNA, 25 bp, Homo sapien
aagatatttgctcaccacccaggtc

SEQ ID NO: 3264759 - DNA, 25 bp, Homo sapien
ggacagtgtacaccggaaagtgcta

SEQ ID NO: 3264760 - DNA, 25 bp, Homo sapien
gaccagaaaaccatgtgtgctccaa

SEQ ID NO: 3264761 - DNA, 25 bp, Homo sapien
ccaagtatccgtaactgaagcagat

SEQ ID NO: 3264762 - DNA, 25 bp, Homo sapien
cccatttgtatgtgttgccagaaca

SEQ ID NO: 3264763 - DNA, 25 bp, Homo sapien
attgcagatgctactcagattaaac

SEQ ID NO: 3264764 - DNA, 25 bp, Homo sapien
taatgagtcgtactaaaaggattga

SEQ ID NO: 3264765 - DNA, 25 bp, Homo sapien
gcagagcatacagcagagtcacata

SEQ ID NO: 3264766 - DNA, 25 bp, Homo sapien
ttccatggtagtgatagagagctcc

SEQ ID NO: 3264767 - DNA, 25 bp, Homo sapien
atctggaaatcggagagtgaagcaa

SEQ ID NO: 3264768 - DNA, 25 bp, Homo sapien
tccagaaggaactatgtactttagg

SEQ ID NO: 3264769 - DNA, 25 bp, Homo sapien
tcgagtgccctggagcgatctcggc

SEQ ID NO: 3264770 - DNA, 25 bp, Homo sapien
ggttccagtatccatcccagttaga

SEQ ID NO: 3264771 - DNA, 25 bp, Homo sapien
gcaatctaatatatgacctctgcag

SEQ ID NO: 3264772 - DNA, 25 bp, Homo sapien
catctagaagaatgcttcgtagagg

SEQ ID NO: 3264773 - DNA, 25 bp, Homo sapien
gccagtcggcactttgaaactacag

SEQ ID NO: 3264774 - DNA, 25 bp, Homo sapien
gagatcatccaaacgctcaatgcct

SEQ ID NO: 3264775 - DNA, 25 bp, Homo sapien
taagaccttgatatccaaccgttgg

SEQ ID NO: 3264776 - DNA, 25 bp, Homo sapien
catggtgccgaattcctgatttttt

SEQ ID NO: 3264777 - DNA, 25 bp, Homo sapien
tctaggatcaaattgtcatggtgcc

SEQ ID NO: 3264778 - DNA, 25 bp, Homo sapien
tggccaatataacgaagcctgctgt

SEQ ID NO: 3264779 - DNA, 25 bp, Homo sapien
gacagcatacgaacaaaaacagcag

SEQ ID NO: 3264780 - DNA, 25 bp, Homo sapien
gatgaaaagtcccaagtgccattta

SEQ ID NO: 3264781 - DNA, 25 bp, Homo sapien
aaaacagcagcgatataccagcttc

SEQ ID NO: 3264782 - DNA, 25 bp, Homo sapien
aaacagggcttctaaggatgaaaag

SEQ ID NO: 3264783 - DNA, 25 bp, Homo sapien
ttgtcaaaacatcttgccatctcca

SEQ ID NO: 3264784 - DNA, 25 bp, Homo sapien
cagggtactgattagaactgctctc

SEQ ID NO: 3264785 - DNA, 25 bp, Homo sapien
aaacatcttgccatctccacgttgc

SEQ ID NO: 3264786 - DNA, 25 bp, Homo sapien
gattgctattcttgtcatcattgtc

SEQ ID NO: 3264787 - DNA, 25 bp, Homo sapien
tgagcagaggtggccaacgagttga

SEQ ID NO: 3264788 - DNA, 25 bp, Homo sapien
tgacatctatgagccatcccatagc

SEQ ID NO: 3264789 - DNA, 25 bp, Homo sapien
gagttgacatctatgagccatccca

SEQ ID NO: 3264790 - DNA, 25 bp, Homo sapien
ccaacgagttgacatctatgagcca

SEQ ID NO: 3264791 - DNA, 25 bp, Homo sapien
caaacctgaaagtcacaagttctcc

SEQ ID NO: 3264792 - DNA, 25 bp, Homo sapien
catgtgatcgtgtttgttcctcccc

SEQ ID NO: 3264793 - DNA, 25 bp, Homo sapien
cccaggtcgtagagctgacagcgat

SEQ ID NO: 3264794 - DNA, 25 bp, Homo sapien
taagcaaatacgcatggcaatgtca

SEQ ID NO: 3264795 - DNA, 25 bp, Homo sapien
cctttgagcagttaaactctcttct

SEQ ID NO: 3264796 - DNA, 25 bp, Homo sapien
tctgtttgcgatgtgttttggcgct

SEQ ID NO: 3264797 - DNA, 25 bp, Homo sapien
aaaagctgggcttctcattgctatc

SEQ ID NO: 3264798 - DNA, 25 bp, Homo sapien
cctgccataaatgacaaattacaga

SEQ ID NO: 3264799 - DNA, 25 bp, Homo sapien
tcattctcagagtctaagctactgc

SEQ ID NO: 3264800 - DNA, 25 bp, Homo sapien
gccagaagtagggaagaggtaccac

SEQ ID NO: 3264801 - DNA, 25 bp, Homo sapien
ctgctgaagagcaagtaaataagca

SEQ ID NO: 3264802 - DNA, 25 bp, Homo sapien
aagtaaataagcaggaccatcaggg

SEQ ID NO: 3264803 - DNA, 25 bp, Homo sapien
gaaaccccagataaatttaagatca

SEQ ID NO: 3264804 - DNA, 25 bp, Homo sapien
caaaaaggtctcatagaaaccccag

SEQ ID NO: 3264805 - DNA, 25 bp, Homo sapien
gataattcggccttcctgatagtaa

SEQ ID NO: 3264806 - DNA, 25 bp, Homo sapien
cgtaatcttacaagcatgcaaaatg

SEQ ID NO: 3264807 - DNA, 25 bp, Homo sapien
tgtctgaatcctcgtcatgcatctg

SEQ ID NO: 3264808 - DNA, 25 bp, Homo sapien
ctgaatcctcgtcatgcatctgctg

SEQ ID NO: 3264809 - DNA, 25 bp, Homo sapien
gaatcctcgtcatgcatctgctgtc

SEQ ID NO: 3264810 - DNA, 25 bp, Homo sapien
gatgtgtctgaatcctcgtcatgca

SEQ ID NO: 3264811 - DNA, 25 bp, Homo sapien
atacactcaacccacctctgcccca

SEQ ID NO: 3264812 - DNA, 25 bp, Homo sapien
ttgtctcacttcccccacatataca

SEQ ID NO: 3264813 - DNA, 25 bp, Homo sapien
catatacactcaacccacctctgcc

SEQ ID NO: 3264814 - DNA, 25 bp, Homo sapien
gttgtctcacttcccccacatatac

SEQ ID NO: 3264815 - DNA, 25 bp, Homo sapien
gggacagtgggaaatgttcagagct

SEQ ID NO: 3264816 - DNA, 25 bp, Homo sapien
attccatacgatatttgctagatga

SEQ ID NO: 3264817 - DNA, 25 bp, Homo sapien
gatattccatacgatatttgctaga

SEQ ID NO: 3264818 - DNA, 25 bp, Homo sapien
agcttgatattccatacgatatttg

SEQ ID NO: 3264819 - DNA, 25 bp, Homo sapien
atgatccactcagcatggagcagtt

SEQ ID NO: 3264820 - DNA, 25 bp, Homo sapien
atggattaatcttttagaaataatc

SEQ ID NO: 3264821 - DNA, 25 bp, Homo sapien
aatggattaatcttttagaaataat

SEQ ID NO: 3264822 - DNA, 25 bp, Homo sapien
gatccactcagcatggagcagttac

SEQ ID NO: 3264823 - DNA, 25 bp, Homo sapien
tttgttaatgtaagcatatccttca

SEQ ID NO: 3264824 - DNA, 25 bp, Homo sapien
aattaagaggtttagcaagcctatg

SEQ ID NO: 3264825 - DNA, 25 bp, Homo sapien
agcctatggtaacccaatcttgttt

SEQ ID NO: 3264826 - DNA, 25 bp, Homo sapien
gatttgttaatgtaagcatatcctt

SEQ ID NO: 3264827 - DNA, 25 bp, Homo sapien
acgccggagaggtcttcacctggca

SEQ ID NO: 3264828 - DNA, 25 bp, Homo sapien
ttatgtattattcactcggatggcc

SEQ ID NO: 3264829 - DNA, 25 bp, Homo sapien
tcggatggccgcagcgctttctgga

SEQ ID NO: 3264830 - DNA, 25 bp, Homo sapien
gagcccacgccggagaggtcttcac

SEQ ID NO: 3264831 - DNA, 25 bp, Homo sapien
cgatggcagattgggcacgggagga

SEQ ID NO: 3264832 - DNA, 25 bp, Homo sapien
tctgcctggagttgttcggggtaac

SEQ ID NO: 3264833 - DNA, 25 bp, Homo sapien
aaggttgcgctcgagttccctggtt

SEQ ID NO: 3264834 - DNA, 25 bp, Homo sapien
attgggcacgggaggaacgcgacag

SEQ ID NO: 3264835 - DNA, 25 bp, Homo sapien
gtgtcttccgacagcccgcagcccg

SEQ ID NO: 3264836 - DNA, 25 bp, Homo sapien
agagggtgtcttccgacagcccgca

SEQ ID NO: 3264837 - DNA, 25 bp, Homo sapien
agggtgtcttccgacagcccgcagc

SEQ ID NO: 3264838 - DNA, 25 bp, Homo sapien
aagagggtgtcttccgacagcccgc

SEQ ID NO: 3264839 - DNA, 25 bp, Homo sapien
gagccggggccgtcacgtgggcgcg

SEQ ID NO: 3264840 - DNA, 25 bp, Homo sapien
tgggcgcgctgactccgccggctgc

SEQ ID NO: 3264841 - DNA, 25 bp, Homo sapien
gggccgtcacgtgggcgcgctgact

SEQ ID NO: 3264842 - DNA, 25 bp, Homo sapien
cggggccgtcacgtgggcgcgctga

SEQ ID NO: 3264843 - DNA, 25 bp, Homo sapien
ccgccttctccgacctcctcgccat

SEQ ID NO: 3264844 - DNA, 25 bp, Homo sapien
actaaatcagaccacgccgccagac

SEQ ID NO: 3264845 - DNA, 25 bp, Homo sapien
agccccggccactaaatcagaccac

SEQ ID NO: 3264846 - DNA, 25 bp, Homo sapien
gccgccagaccttttgcagcccgcg

SEQ ID NO: 3264847 - DNA, 25 bp, Homo sapien
tttgtgcagccggaagcaacctgag

SEQ ID NO: 3264848 - DNA, 25 bp, Homo sapien
gggataacatggatacagacactcc

SEQ ID NO: 3264849 - DNA, 25 bp, Homo sapien
ctgagatctggagggtgagacccca

SEQ ID NO: 3264850 - DNA, 25 bp, Homo sapien
ttcaaacctttgtctcggagatgct

SEQ ID NO: 3264851 - DNA, 25 bp, Homo sapien
tatttgagggaatgctgtctgctgt

SEQ ID NO: 3264852 - DNA, 25 bp, Homo sapien
tgtgtttacattcccttggtaaaga

SEQ ID NO: 3264853 - DNA, 25 bp, Homo sapien
tcactgtgtgggtgcttcggcagct

SEQ ID NO: 3264854 - DNA, 25 bp, Homo sapien
tggcttatttgagggaatgctgtct

SEQ ID NO: 3264855 - DNA, 25 bp, Homo sapien
gacatacccttaaaggatcttggtg

SEQ ID NO: 3264856 - DNA, 25 bp, Homo sapien
catacccttaaaggatcttggtgcc

SEQ ID NO: 3264857 - DNA, 25 bp, Homo sapien
tacccttaaaggatcttggtgccat

SEQ ID NO: 3264858 - DNA, 25 bp, Homo sapien
tcagacatacccttaaaggatcttg

SEQ ID NO: 3264859 - DNA, 25 bp, Homo sapien
attaaaagggagtggtcaacttctg

SEQ ID NO: 3264860 - DNA, 25 bp, Homo sapien
agataatctgaaagcgtccctgcaa

SEQ ID NO: 3264861 - DNA, 25 bp, Homo sapien
caacttctgtatctagcaattctga

SEQ ID NO: 3264862 - DNA, 25 bp, Homo sapien
agcgtccctgcaacaaaatacctag

SEQ ID NO: 3264863 - DNA, 25 bp, Homo sapien
ggtaagtaagtcaccaactggcgat

SEQ ID NO: 3264864 - DNA, 25 bp, Homo sapien
ccaactgttaatatgtgtctgcaag

SEQ ID NO: 3264865 - DNA, 25 bp, Homo sapien
cactagatttacatacaattatagg

SEQ ID NO: 3264866 - DNA, 25 bp, Homo sapien
tataggttatggttctccatgtaca

SEQ ID NO: 3264867 - DNA, 25 bp, Homo sapien
taggatttcctcaacactaagggct

SEQ ID NO: 3264868 - DNA, 25 bp, Homo sapien
caaatgctttagtgcacgaacagta

SEQ ID NO: 3264869 - DNA, 25 bp, Homo sapien
ctcaaaatggtgtcagaaggcaact

SEQ ID NO: 3264870 - DNA, 25 bp, Homo sapien
gcttatctaaacagaggcaacgcaa

SEQ ID NO: 3264871 - DNA, 25 bp, Homo sapien
ctctcttccttatgagactggggaa

SEQ ID NO: 3264872 - DNA, 25 bp, Homo sapien
tacatgccaaatagttcaaaatctt

SEQ ID NO: 3264873 - DNA, 25 bp, Homo sapien
ttcccctggaaactgaaacaggatc

SEQ ID NO: 3264874 - DNA, 25 bp, Homo sapien
aagtacataatgtcctggagtttcc

SEQ ID NO: 3264875 - DNA, 25 bp, Homo sapien
cattcaggtaagttacaacctccag

SEQ ID NO: 3264876 - DNA, 25 bp, Homo sapien
gatattgtataccacaaccaggtgc

SEQ ID NO: 3264877 - DNA, 25 bp, Homo sapien
cccaagagtcacagtaaatgtttca

SEQ ID NO: 3264878 - DNA, 25 bp, Homo sapien
cagtctatcttaatgatggctccaa

SEQ ID NO: 3264879 - DNA, 25 bp, Homo sapien
tacacatcacttcagggagaaaccg

SEQ ID NO: 3264880 - DNA, 25 bp, Homo sapien
taccaaagacgacatgagtagatcc

SEQ ID NO: 3264881 - DNA, 25 bp, Homo sapien
caaggttgagggagcacttagctaa

SEQ ID NO: 3264882 - DNA, 25 bp, Homo sapien
tgtccaagagccacctgtactgttt

SEQ ID NO: 3264883 - DNA, 25 bp, Homo sapien
taatcttacctcagatttggctgag

SEQ ID NO: 3264884 - DNA, 25 bp, Homo sapien
gtccctcaaactgatagcatgcctt

SEQ ID NO: 3264885 - DNA, 25 bp, Homo sapien
gctaaagctaacagtgctagtgcca

SEQ ID NO: 3264886 - DNA, 25 bp, Homo sapien
gcatcttagcaactgtactttttaa

SEQ ID NO: 3264887 - DNA, 25 bp, Homo sapien
gactcgtgctctgaaatgctgttaa

SEQ ID NO: 3264888 - DNA, 25 bp, Homo sapien
ggtattagctacagagagacatggg

SEQ ID NO: 3264889 - DNA, 25 bp, Homo sapien
gaccactaaaaatgcacaagaccag

SEQ ID NO: 3264890 - DNA, 25 bp, Homo sapien
gccaaacacttggaataggaggaag

SEQ ID NO: 3264891 - DNA, 25 bp, Homo sapien
ggaatgtcaacaattacaacgatca

SEQ ID NO: 3264892 - DNA, 25 bp, Homo sapien
catgcataccatggtcgataatcac

SEQ ID NO: 3264893 - DNA, 25 bp, Homo sapien
cattgatcgacttttccagtatgag

SEQ ID NO: 3264894 - DNA, 25 bp, Homo sapien
tagaactactttcaataaactgcaa

SEQ ID NO: 3264895 - DNA, 25 bp, Homo sapien
ggccattatcgaaccaacgtgaaga

SEQ ID NO: 3264896 - DNA, 25 bp, Homo sapien
aataaaggccattatcgaaccaacg

SEQ ID NO: 3264897 - DNA, 25 bp, Homo sapien
gaaccaacgtgaagagcacaactcg

SEQ ID NO: 3264898 - DNA, 25 bp, Homo sapien
tgaaatcagaatggaatatttactg

SEQ ID NO: 3264899 - DNA, 25 bp, Homo sapien
ttaaagctgtcctctcaataacttc

SEQ ID NO: 3264900 - DNA, 25 bp, Homo sapien
tcttttaaagctgtcctctcaataa

SEQ ID NO: 3264901 - DNA, 25 bp, Homo sapien
tctcaataacttcagttctaagcac

SEQ ID NO: 3264902 - DNA, 25 bp, Homo sapien
ctcaataacttcagttctaagcact

SEQ ID NO: 3264903 - DNA, 25 bp, Homo sapien
gaaattgctcatgtcataatattga

SEQ ID NO: 3264904 - DNA, 25 bp, Homo sapien
ctctttgcttcacactgtgggaaat

SEQ ID NO: 3264905 - DNA, 25 bp, Homo sapien
atattccttggattgaagtttggca

SEQ ID NO: 3264906 - DNA, 25 bp, Homo sapien
caatgatgcggtccaactgtctctt

SEQ ID NO: 3264907 - DNA, 25 bp, Homo sapien
cattcaggtttgtggtcaagaacag

SEQ ID NO: 3264908 - DNA, 25 bp, Homo sapien
ggcttgatatctgtacatgtccgga

SEQ ID NO: 3264909 - DNA, 25 bp, Homo sapien
taatgccctgttcgttctaaatgtg

SEQ ID NO: 3264910 - DNA, 25 bp, Homo sapien
aacagtagagggatgcaactgaacc

SEQ ID NO: 3264911 - DNA, 25 bp, Homo sapien
gcactgggcgccaactatgagcaga

SEQ ID NO: 3264912 - DNA, 25 bp, Homo sapien
ctacataattaggaagaggcaggcc

SEQ ID NO: 3264913 - DNA, 25 bp, Homo sapien
ggcgacagaccgagaggctccattt

SEQ ID NO: 3264914 - DNA, 25 bp, Homo sapien
aaaaaagagcttgcacgtgcttccc

SEQ ID NO: 3264915 - DNA, 25 bp, Homo sapien
ccatctggccttaagggtaagccac

SEQ ID NO: 3264916 - DNA, 25 bp, Homo sapien
gccacatcgtgcttaaaagacacag

SEQ ID NO: 3264917 - DNA, 25 bp, Homo sapien
taccaatgatcactctgtagaggac

SEQ ID NO: 3264918 - DNA, 25 bp, Homo sapien
ttctagctactgagcccatctggcc

SEQ ID NO: 3264919 - DNA, 25 bp, Homo sapien
gcgtacattgtctgcggacatcagg

SEQ ID NO: 3264920 - DNA, 25 bp, Homo sapien
cataattcgagatagctgctggcgt

SEQ ID NO: 3264921 - DNA, 25 bp, Homo sapien
taaagtcagtacttcgacgaggcaa

SEQ ID NO: 3264922 - DNA, 25 bp, Homo sapien
tataatagtccctgcttgtaaagtc

SEQ ID NO: 3264923 - DNA, 25 bp, Homo sapien
cagagcacctcagacttaaagacgg

SEQ ID NO: 3264924 - DNA, 25 bp, Homo sapien
gaaaagaaggcaccatgaatcaccc

SEQ ID NO: 3264925 - DNA, 25 bp, Homo sapien
gacacacgtgtctctcagcaattta

SEQ ID NO: 3264926 - DNA, 25 bp, Homo sapien
gataagcttccaactagcctagtgt

SEQ ID NO: 3264927 - DNA, 25 bp, Homo sapien
tctaaggtaaaccatgtgctggtct

SEQ ID NO: 3264928 - DNA, 25 bp, Homo sapien
tccctttggcagtgagagatcatag

SEQ ID NO: 3264929 - DNA, 25 bp, Homo sapien
tacatctagtgagtggataacacca

SEQ ID NO: 3264930 - DNA, 25 bp, Homo sapien
ggtcacccagcatgtttcgcataga

SEQ ID NO: 3264931 - DNA, 25 bp, Homo sapien
tcaagttaggtactacgtctggtgc

SEQ ID NO: 3264932 - DNA, 25 bp, Homo sapien
tcttgggctaacagtagagctgaac

SEQ ID NO: 3264933 - DNA, 25 bp, Homo sapien
tgcaaatggtacattccaacagcag

SEQ ID NO: 3264934 - DNA, 25 bp, Homo sapien
catatcatgtttagagaccactggt

SEQ ID NO: 3264935 - DNA, 25 bp, Homo sapien
ctccatctatgtgggcaaatctcat

SEQ ID NO: 3264936 - DNA, 25 bp, Homo sapien
taaaagcatggtagacgttcagcag

SEQ ID NO: 3264937 - DNA, 25 bp, Homo sapien
gcctcatctgcggctttcttggcct

SEQ ID NO: 3264938 - DNA, 25 bp, Homo sapien
tcttggcctccgtggggcgaacaaa

SEQ ID NO: 3264939 - DNA, 25 bp, Homo sapien
ggtatgggcccaacacaaacgccca

SEQ ID NO: 3264940 - DNA, 25 bp, Homo sapien
caaacgcccatatcgatgagtcacg

SEQ ID NO: 3264941 - DNA, 25 bp, Homo sapien
acgcccatatcgatgagtcacgcat

SEQ ID NO: 3264942 - DNA, 25 bp, Homo sapien
aacacaaacgcccatatcgatgagt

SEQ ID NO: 3264943 - DNA, 25 bp, Homo sapien
gagtcagttctctcccgtgctaaaa

SEQ ID NO: 3264944 - DNA, 25 bp, Homo sapien
tattagcaccggtgagcagaagcat

SEQ ID NO: 3264945 - DNA, 25 bp, Homo sapien
gagggtttcaaagctacagagtacc

SEQ ID NO: 3264946 - DNA, 25 bp, Homo sapien
gaaattcatgtttgttcgggtgcca

SEQ ID NO: 3264947 - DNA, 25 bp, Homo sapien
gacaacatagcagtaatagatagga

SEQ ID NO: 3264948 - DNA, 25 bp, Homo sapien
acaacatagcagtaatagataggac

SEQ ID NO: 3264949 - DNA, 25 bp, Homo sapien
agaggaaactctgccatcatggatc

SEQ ID NO: 3264950 - DNA, 25 bp, Homo sapien
tgcgagctgtggatctagaggaaac

SEQ ID NO: 3264951 - DNA, 25 bp, Homo sapien
catcatggatcccaattcagtcaga

SEQ ID NO: 3264952 - DNA, 25 bp, Homo sapien
ttgtagtcacaacttgcaataacca

SEQ ID NO: 3264953 - DNA, 25 bp, Homo sapien
caactgatcctaaattagaacgcaa

SEQ ID NO: 3264954 - DNA, 25 bp, Homo sapien
tcaataccaagtttcttcaattgta

SEQ ID NO: 3264955 - DNA, 25 bp, Homo sapien
tgtaacacaactgatcctaaattag

SEQ ID NO: 3264956 - DNA, 25 bp, Homo sapien
cctaaattagaacgcaaaatctcag

SEQ ID NO: 3264957 - DNA, 25 bp, Homo sapien
gcattttccaggtctggtacgtcca

SEQ ID NO: 3264958 - DNA, 25 bp, Homo sapien
tcaccaaaagggactcaactctgat

SEQ ID NO: 3264959 - DNA, 25 bp, Homo sapien
caactctgattcgaggattgtagac

SEQ ID NO: 3264960 - DNA, 25 bp, Homo sapien
tttgctgagctgaagctttactaat

SEQ ID NO: 3264961 - DNA, 25 bp, Homo sapien
gacgtctctgctatgttagttgaca

SEQ ID NO: 3264962 - DNA, 25 bp, Homo sapien
tctctgctatgttagttgacacaac

SEQ ID NO: 3264963 - DNA, 25 bp, Homo sapien
aaacaccacaccatctattgtcaaa

SEQ ID NO: 3264964 - DNA, 25 bp, Homo sapien
gtcaaagacgtctctgctatgttag

SEQ ID NO: 3264965 - DNA, 25 bp, Homo sapien
gcccggccagatcagtgctactgtt

SEQ ID NO: 3264966 - DNA, 25 bp, Homo sapien
taatcttccatttgctaaggaggca

SEQ ID NO: 3264967 - DNA, 25 bp, Homo sapien
tactttagggtcaagagatatgcgg

SEQ ID NO: 3264968 - DNA, 25 bp, Homo sapien
ggtctgcacagggtcaacatttcac

SEQ ID NO: 3264969 - DNA, 25 bp, Homo sapien
ctgctgaggtggaagtgtagaatac

SEQ ID NO: 3264970 - DNA, 25 bp, Homo sapien
aggtggaggctcaaaaatgcgttgc

SEQ ID NO: 3264971 - DNA, 25 bp, Homo sapien
ttcagggcccaaatcatcaacttca

SEQ ID NO: 3264972 - DNA, 25 bp, Homo sapien
tggaatgattttaatgtcaccaact

SEQ ID NO: 3264973 - DNA, 25 bp, Homo sapien
tagcatacatctgaaaacccttcgg

SEQ ID NO: 3264974 - DNA, 25 bp, Homo sapien
tcacagaaaataccgcacaaagttg

SEQ ID NO: 3264975 - DNA, 25 bp, Homo sapien
cgggtccttaaccatgaggccattt

SEQ ID NO: 3264976 - DNA, 25 bp, Homo sapien
aaaacagctgacaactagagcagca

SEQ ID NO: 3264977 - DNA, 25 bp, Homo sapien
tctggagtatagaagatctcaacag

SEQ ID NO: 3264978 - DNA, 25 bp, Homo sapien
taactgttcgaattgctgcttcaag

SEQ ID NO: 3264979 - DNA, 25 bp, Homo sapien
tgtgtacgcccaggaatagttagga

SEQ ID NO: 3264980 - DNA, 25 bp, Homo sapien
tttcctgcatctagagtagcgctca

SEQ ID NO: 3264981 - DNA, 25 bp, Homo sapien
tcaagaattattacaccataacgct

SEQ ID NO: 3264982 - DNA, 25 bp, Homo sapien
tcatagcttcacgaagtaacatccc

SEQ ID NO: 3264983 - DNA, 25 bp, Homo sapien
agtgtcctctcatgagcctcatcaa

SEQ ID NO: 3264984 - DNA, 25 bp, Homo sapien
tattacaccataacgctccaggagg

SEQ ID NO: 3264985 - DNA, 25 bp, Homo sapien
aataagctaacaacaggctcttggt

SEQ ID NO: 3264986 - DNA, 25 bp, Homo sapien
caaaagggctgaaagcgtgagtcct

SEQ ID NO: 3264987 - DNA, 25 bp, Homo sapien
tgtactgggaagacatgatatgacc

SEQ ID NO: 3264988 - DNA, 25 bp, Homo sapien
gccaaggcaaaattcgtcattttca

SEQ ID NO: 3264989 - DNA, 25 bp, Homo sapien
aactagcacactacatcccggaact

SEQ ID NO: 3264990 - DNA, 25 bp, Homo sapien
tgccaaactagcacactacatcccg

SEQ ID NO: 3264991 - DNA, 25 bp, Homo sapien
cacactacatcccggaactcttgga

SEQ ID NO: 3264992 - DNA, 25 bp, Homo sapien
acctcctggggcaacctgatagtcc

SEQ ID NO: 3264993 - DNA, 25 bp, Homo sapien
caatcctagctcacctcagtctcaa

SEQ ID NO: 3264994 - DNA, 25 bp, Homo sapien
aatcctagctcacctcagtctcaaa

SEQ ID NO: 3264995 - DNA, 25 bp, Homo sapien
tatgttacccaccctggactcaagt

SEQ ID NO: 3264996 - DNA, 25 bp, Homo sapien
atgttacccaccctggactcaagtg

SEQ ID NO: 3264997 - DNA, 25 bp, Homo sapien
ataaatccaacatcttcccacctaa

SEQ ID NO: 3264998 - DNA, 25 bp, Homo sapien
gcctgagtgacagatgagatgagac

SEQ ID NO: 3264999 - DNA, 25 bp, Homo sapien
gagtgacagatgagatgagactcta

SEQ ID NO: 3265000 - DNA, 25 bp, Homo sapien
aataaataaatccaacatcttccca

SEQ ID NO: 3265001 - DNA, 25 bp, Homo sapien
tgcaaaagggctacaccagaagcca

SEQ ID NO: 3265002 - DNA, 25 bp, Homo sapien
ttccctgactggtaagctctttagg

SEQ ID NO: 3265003 - DNA, 25 bp, Homo sapien
caaggtattttacactgactagtca

SEQ ID NO: 3265004 - DNA, 25 bp, Homo sapien
aaagttacaaccacagacaaatgct

SEQ ID NO: 3265005 - DNA, 25 bp, Homo sapien
tggagtaaccaacttcctggcccaa

SEQ ID NO: 3265006 - DNA, 25 bp, Homo sapien
gcagtcttcaaatcgaatggagtaa

SEQ ID NO: 3265007 - DNA, 25 bp, Homo sapien
tcgaatggagtaaccaacttcctgg

SEQ ID NO: 3265008 - DNA, 25 bp, Homo sapien
tcttcaaatcgaatggagtaaccaa

SEQ ID NO: 3265009 - DNA, 25 bp, Homo sapien
cctctcttgggtcctggtaatgatc

SEQ ID NO: 3265010 - DNA, 25 bp, Homo sapien
gggtacaggcaactcctctcttggg

SEQ ID NO: 3265011 - DNA, 25 bp, Homo sapien
cctgggttgggtacaggcaactcct

SEQ ID NO: 3265012 - DNA, 25 bp, Homo sapien
taatgatcgcatgtactccacacac

SEQ ID NO: 3265013 - DNA, 25 bp, Homo sapien
gcacaagttaaattggttgccatga

SEQ ID NO: 3265014 - DNA, 25 bp, Homo sapien
gccatgacggcagtacattttcccc

SEQ ID NO: 3265015 - DNA, 25 bp, Homo sapien
cccagttccattatcaatataagct

SEQ ID NO: 3265016 - DNA, 25 bp, Homo sapien
agctaatggattccccaattttaca

SEQ ID NO: 3265017 - DNA, 25 bp, Homo sapien
tattcccaaacagggagctgaagac

SEQ ID NO: 3265018 - DNA, 25 bp, Homo sapien
tgtccggcatgcgttgaatgagcag

SEQ ID NO: 3265019 - DNA, 25 bp, Homo sapien
gacgtgtgacctgcatgtccggcat

SEQ ID NO: 3265020 - DNA, 25 bp, Homo sapien
taagttggtgaacggattaatgcac

SEQ ID NO: 3265021 - DNA, 25 bp, Homo sapien
ctgaatgggaagctttcaaaggtgg

SEQ ID NO: 3265022 - DNA, 25 bp, Homo sapien
gaatgggaagctttcaaaggtggta

SEQ ID NO: 3265023 - DNA, 25 bp, Homo sapien
agctttcaaaggtggtaatccagca

SEQ ID NO: 3265024 - DNA, 25 bp, Homo sapien
ggaagctttcaaaggtggtaatcca

SEQ ID NO: 3265025 - DNA, 25 bp, Homo sapien
ctgataagcatagcatttgttgaag

SEQ ID NO: 3265026 - DNA, 25 bp, Homo sapien
tctcgctctctatctcctctatcac

SEQ ID NO: 3265027 - DNA, 25 bp, Homo sapien
ctccctctctcgctctctatctcct

SEQ ID NO: 3265028 - DNA, 25 bp, Homo sapien
ctctctcgctctctatctcctctat

SEQ ID NO: 3265029 - DNA, 25 bp, Homo sapien
tccctctctcgctctctatctcctc

SEQ ID NO: 3265030 - DNA, 25 bp, Homo sapien
tcgatctttagaccgatcttcacga

SEQ ID NO: 3265031 - DNA, 25 bp, Homo sapien
cggtctcgatctttagaccgatctt

SEQ ID NO: 3265032 - DNA, 25 bp, Homo sapien
tttagaccgatcttcacgatcccgg

SEQ ID NO: 3265033 - DNA, 25 bp, Homo sapien
gttctcggtctcgatctttagaccg

SEQ ID NO: 3265034 - DNA, 25 bp, Homo sapien
ccctaggtccaaccggtgccgcttg

SEQ ID NO: 3265035 - DNA, 25 bp, Homo sapien
cacgcttcttgccagaggggtaatc

SEQ ID NO: 3265036 - DNA, 25 bp, Homo sapien
ggtccaaccggtgccgcttggacat

SEQ ID NO: 3265037 - DNA, 25 bp, Homo sapien
tgccagaggggtaatcctcccctag

SEQ ID NO: 3265038 - DNA, 25 bp, Homo sapien
agttattaaggaagaaagctggctg

SEQ ID NO: 3265039 - DNA, 25 bp, Homo sapien
tcgaacgggcagttattaaggaaga

SEQ ID NO: 3265040 - DNA, 25 bp, Homo sapien
cctcgcactcttcgaacgggcagtt

SEQ ID NO: 3265041 - DNA, 25 bp, Homo sapien
tgctgtatgggcacagtcgaggaca

SEQ ID NO: 3265042 - DNA, 25 bp, Homo sapien
cccctcccgctactacagcccacac

SEQ ID NO: 3265043 - DNA, 25 bp, Homo sapien
cctcccgctactacagcccacacgg

SEQ ID NO: 3265044 - DNA, 25 bp, Homo sapien
tcccgctactacagcccacacggtg

SEQ ID NO: 3265045 - DNA, 25 bp, Homo sapien
ctcccgctactacagcccacacggt

SEQ ID NO: 3265046 - DNA, 25 bp, Homo sapien
aatggcggcggcgacgagggctggg

SEQ ID NO: 3265047 - DNA, 25 bp, Homo sapien
ctaaaatggcggcggcgacgagggc

SEQ ID NO: 3265048 - DNA, 25 bp, Homo sapien
aaaatggcggcggcgacgagggctg

SEQ ID NO: 3265049 - DNA, 25 bp, Homo sapien
atggcggcggcgacgagggctgggc

SEQ ID NO: 3265050 - DNA, 25 bp, Homo sapien
ttcccctcctcggagcggctgttag

SEQ ID NO: 3265051 - DNA, 25 bp, Homo sapien
cctcggagcggctgttaggaagaac

SEQ ID NO: 3265052 - DNA, 25 bp, Homo sapien
cggctgttaggaagaacctgaaggc

SEQ ID NO: 3265053 - DNA, 25 bp, Homo sapien
gagcggctgttaggaagaacctgaa

SEQ ID NO: 3265054 - DNA, 25 bp, Homo sapien
cacgatgataagtgctgaaaaggcc

SEQ ID NO: 3265055 - DNA, 25 bp, Homo sapien
tgaaaaggccagctacagacgacag

SEQ ID NO: 3265056 - DNA, 25 bp, Homo sapien
cagacgacaggcattgtgagagcat

SEQ ID NO: 3265057 - DNA, 25 bp, Homo sapien
tgagagcatataacaagtggccttg

SEQ ID NO: 3265058 - DNA, 25 bp, Homo sapien
ttattgttgcacctaccctcagttg

SEQ ID NO: 3265059 - DNA, 25 bp, Homo sapien
gctcaagtgactttgcgggatttaa

SEQ ID NO: 3265060 - DNA, 25 bp, Homo sapien
gttgttgcaaactcctccagctcaa

SEQ ID NO: 3265061 - DNA, 25 bp, Homo sapien
caagtgatacgtctagaaagtgcca

SEQ ID NO: 3265062 - DNA, 25 bp, Homo sapien
gacttgatggcggatctactaaact

SEQ ID NO: 3265063 - DNA, 25 bp, Homo sapien
gagcaagtagaagaatgaattaaca

SEQ ID NO: 3265064 - DNA, 25 bp, Homo sapien
agaaactgtccctgaaacagacttg

SEQ ID NO: 3265065 - DNA, 25 bp, Homo sapien
gaaacaggaaaatatggcctagtca

SEQ ID NO: 3265066 - DNA, 25 bp, Homo sapien
tgtttctcagttggataggattaat

SEQ ID NO: 3265067 - DNA, 25 bp, Homo sapien
gggtaagcttggcaaagtagagcat

SEQ ID NO: 3265068 - DNA, 25 bp, Homo sapien
tcagttggataggattaatgagtct

SEQ ID NO: 3265069 - DNA, 25 bp, Homo sapien
tcctacttctcagggtaagcttggc

SEQ ID NO: 3265070 - DNA, 25 bp, Homo sapien
tgcgcccttcaggcttgatgatgag

SEQ ID NO: 3265071 - DNA, 25 bp, Homo sapien
gcgcccttcaggcttgatgatgagg

SEQ ID NO: 3265072 - DNA, 25 bp, Homo sapien
ggggccatgagacacagggggtgac

SEQ ID NO: 3265073 - DNA, 25 bp, Homo sapien
tcaggggccatgagacacagggggt

SEQ ID NO: 3265074 - DNA, 25 bp, Homo sapien
aggggccatgagacacagggggtga

SEQ ID NO: 3265075 - DNA, 25 bp, Homo sapien
caggggccatgagacacagggggtg

SEQ ID NO: 3265076 - DNA, 25 bp, Homo sapien
cattttcatcagcaggtctcaaatc

SEQ ID NO: 3265077 - DNA, 25 bp, Homo sapien
tccattttcatcagcaggtctcaaa

SEQ ID NO: 3265078 - DNA, 25 bp, Homo sapien
tttctgaactctcaatggagcctcc

SEQ ID NO: 3265079 - DNA, 25 bp, Homo sapien
attttcatcagcaggtctcaaatcc

SEQ ID NO: 3265080 - DNA, 25 bp, Homo sapien
tgtttcctttgctttctcaacagca

SEQ ID NO: 3265081 - DNA, 25 bp, Homo sapien
tcctttgctttctcaacagcagtca

SEQ ID NO: 3265082 - DNA, 25 bp, Homo sapien
cattatccacagctgtttcctttgc

SEQ ID NO: 3265083 - DNA, 25 bp, Homo sapien
gtttcctttgctttctcaacagcag

SEQ ID NO: 3265084 - DNA, 25 bp, Homo sapien
tataagttgaattaaggaggaatgc

SEQ ID NO: 3265085 - DNA, 25 bp, Homo sapien
aagttgaattaaggaggaatgctgg

SEQ ID NO: 3265086 - DNA, 25 bp, Homo sapien
ctttgacctgagtataagttgaatt

SEQ ID NO: 3265087 - DNA, 25 bp, Homo sapien
cctgagtataagttgaattaaggag

SEQ ID NO: 3265088 - DNA, 25 bp, Homo sapien
tgactattgttttcaggctctgact

SEQ ID NO: 3265089 - DNA, 25 bp, Homo sapien
ccagtctgagcactattgactattg

SEQ ID NO: 3265090 - DNA, 25 bp, Homo sapien
tattgttttcaggctctgactagct

SEQ ID NO: 3265091 - DNA, 25 bp, Homo sapien
acgaaaccattcagcacagcttcct

SEQ ID NO: 3265092 - DNA, 25 bp, Homo sapien
gtggccaatccaggctttgcataag

SEQ ID NO: 3265093 - DNA, 25 bp, Homo sapien
caaccttggcgtagtaccaaaatgt

SEQ ID NO: 3265094 - DNA, 25 bp, Homo sapien
gcataagtcacagcagcgttcacca

SEQ ID NO: 3265095 - DNA, 25 bp, Homo sapien
tagggaatctcaacaggggtgggag

SEQ ID NO: 3265096 - DNA, 25 bp, Homo sapien
aagttacagacaaattgggctatgg

SEQ ID NO: 3265097 - DNA, 25 bp, Homo sapien
agttacagacaaattgggctatggt

SEQ ID NO: 3265098 - DNA, 25 bp, Homo sapien
aaagttacagacaaattgggctatg

SEQ ID NO: 3265099 - DNA, 25 bp, Homo sapien
tgaaacactgtgtgagctggaccac

SEQ ID NO: 3265100 - DNA, 25 bp, Homo sapien
gctctccaacaccaggacaccagag

SEQ ID NO: 3265101 - DNA, 25 bp, Homo sapien
aatgagagagcccaacgatcctgga

SEQ ID NO: 3265102 - DNA, 25 bp, Homo sapien
gaaaacagccgaagattagattttg

SEQ ID NO: 3265103 - DNA, 25 bp, Homo sapien
aatcctcggtccatttcaagtttgg

SEQ ID NO: 3265104 - DNA, 25 bp, Homo sapien
ccataaggaaggctgctcccatgca

SEQ ID NO: 3265105 - DNA, 25 bp, Homo sapien
cagtgttcatttgggcagcccagaa

SEQ ID NO: 3265106 - DNA, 25 bp, Homo sapien
cagcagcaagccattggtaaagcaa

SEQ ID NO: 3265107 - DNA, 25 bp, Homo sapien
caataaagcggatgtttggacattc

SEQ ID NO: 3265108 - DNA, 25 bp, Homo sapien
cagtaacaataaagcggatgtttgg

SEQ ID NO: 3265109 - DNA, 25 bp, Homo sapien
aacaataaagcggatgtttggacat

SEQ ID NO: 3265110 - DNA, 25 bp, Homo sapien
atttcagtaacaataaagcggatgt

SEQ ID NO: 3265111 - DNA, 25 bp, Homo sapien
ccagatttctgccttctagaacctt

SEQ ID NO: 3265112 - DNA, 25 bp, Homo sapien
ctccagatttctgccttctagaacc

SEQ ID NO: 3265113 - DNA, 25 bp, Homo sapien
ggtctccagatttctgccttctaga

SEQ ID NO: 3265114 - DNA, 25 bp, Homo sapien
cagatttctgccttctagaaccttc

SEQ ID NO: 3265115 - DNA, 25 bp, Homo sapien
taggcatgtcgatgaccatggattt

SEQ ID NO: 3265116 - DNA, 25 bp, Homo sapien
taaggtggaccttgaggcatctata

SEQ ID NO: 3265117 - DNA, 25 bp, Homo sapien
ggaagagattctggtctaacctgtc

SEQ ID NO: 3265118 - DNA, 25 bp, Homo sapien
cctgtcatgtgaacgtaaggtggac

SEQ ID NO: 3265119 - DNA, 25 bp, Homo sapien
aaagtcgccaccctcttcatccaga

SEQ ID NO: 3265120 - DNA, 25 bp, Homo sapien
caaggcgagggctccataaatatct

SEQ ID NO: 3265121 - DNA, 25 bp, Homo sapien
ctgttgcaaggcgagggctccataa

SEQ ID NO: 3265122 - DNA, 25 bp, Homo sapien
agaccccggcaagctgcctgttgca

SEQ ID NO: 3265123 - DNA, 25 bp, Homo sapien
cttatgcctttctggtagatgaata

SEQ ID NO: 3265124 - DNA, 25 bp, Homo sapien
tgataatgacaatgacggtgcccat

SEQ ID NO: 3265125 - DNA, 25 bp, Homo sapien
ttctggtagatgaataagatgatga

SEQ ID NO: 3265126 - DNA, 25 bp, Homo sapien
tatgcctttctggtagatgaataag

SEQ ID NO: 3265127 - DNA, 25 bp, Homo sapien
caaagaagttgaccgagtccctcat

SEQ ID NO: 3265128 - DNA, 25 bp, Homo sapien
accgagtccctcatggccaatatga

SEQ ID NO: 3265129 - DNA, 25 bp, Homo sapien
cctcatggccaatatgatgttcaga

SEQ ID NO: 3265130 - DNA, 25 bp, Homo sapien
gcaaagaagttgaccgagtccctca

SEQ ID NO: 3265131 - DNA, 25 bp, Homo sapien
tctgtgataatggatgttcacagcc

SEQ ID NO: 3265132 - DNA, 25 bp, Homo sapien
tgtgataatggatgttcacagcctg

SEQ ID NO: 3265133 - DNA, 25 bp, Homo sapien
ctgtgataatggatgttcacagcct

SEQ ID NO: 3265134 - DNA, 25 bp, Homo sapien
gggacggatgatgtgtctgccactg

SEQ ID NO: 3265135 - DNA, 25 bp, Homo sapien
tcagggacggatgatgtgtctgcca

SEQ ID NO: 3265136 - DNA, 25 bp, Homo sapien
cagggacggatgatgtgtctgccac

SEQ ID NO: 3265137 - DNA, 25 bp, Homo sapien
agggacggatgatgtgtctgccact

SEQ ID NO: 3265138 - DNA, 25 bp, Homo sapien
ctgaagggcagcagcatcttcagat

SEQ ID NO: 3265139 - DNA, 25 bp, Homo sapien
aagggcagcagcatcttcagattca

SEQ ID NO: 3265140 - DNA, 25 bp, Homo sapien
agggcagcagcatcttcagattcat

SEQ ID NO: 3265141 - DNA, 25 bp, Homo sapien
gaagggcagcagcatcttcagattc

SEQ ID NO: 3265142 - DNA, 25 bp, Homo sapien
agattccagcagactcatttgctgg

SEQ ID NO: 3265143 - DNA, 25 bp, Homo sapien
agagattccagcagactcatttgct

SEQ ID NO: 3265144 - DNA, 25 bp, Homo sapien
ttagagattccagcagactcatttg

SEQ ID NO: 3265145 - DNA, 25 bp, Homo sapien
acttagagattccagcagactcatt

SEQ ID NO: 3265146 - DNA, 25 bp, Homo sapien
tatctgctgtgcctgtatgcttggg

SEQ ID NO: 3265147 - DNA, 25 bp, Homo sapien
gaaatgtttcgctggactggatcct

SEQ ID NO: 3265148 - DNA, 25 bp, Homo sapien
ttgggtcctgacctaggcgtgcttg

SEQ ID NO: 3265149 - DNA, 25 bp, Homo sapien
taattttgttccagtagccacgtct

SEQ ID NO: 3265150 - DNA, 25 bp, Homo sapien
cttcttcactccaggctcctgctcc

SEQ ID NO: 3265151 - DNA, 25 bp, Homo sapien
gctcctgctcctctgttccttgtca

SEQ ID NO: 3265152 - DNA, 25 bp, Homo sapien
ctgctcctctgttccttgtcacagt

SEQ ID NO: 3265153 - DNA, 25 bp, Homo sapien
gctcctctgttccttgtcacagtga

SEQ ID NO: 3265154 - DNA, 25 bp, Homo sapien
aatgcccacgagataaacccagcct

SEQ ID NO: 3265155 - DNA, 25 bp, Homo sapien
caaatgcccacgagataaacccagc

SEQ ID NO: 3265156 - DNA, 25 bp, Homo sapien
tgcccacgagataaacccagcctcc

SEQ ID NO: 3265157 - DNA, 25 bp, Homo sapien
cccaaatgcccacgagataaaccca

SEQ ID NO: 3265158 - DNA, 25 bp, Homo sapien
ccatgtgctgatcgaacaagattaa

SEQ ID NO: 3265159 - DNA, 25 bp, Homo sapien
tagtagagttctatacctgaacaaa

SEQ ID NO: 3265160 - DNA, 25 bp, Homo sapien
caggaactttgttggtgactccctg

SEQ ID NO: 3265161 - DNA, 25 bp, Homo sapien
ggtgactccctgcattttagtagag

SEQ ID NO: 3265162 - DNA, 25 bp, Homo sapien
ctgactgccatttggaaaaggggag

SEQ ID NO: 3265163 - DNA, 25 bp, Homo sapien
tgactgccatttggaaaaggggagt

SEQ ID NO: 3265164 - DNA, 25 bp, Homo sapien
ggtttggacactttctgactgccat

SEQ ID NO: 3265165 - DNA, 25 bp, Homo sapien
catcagcattggtttggacactttc

SEQ ID NO: 3265166 - DNA, 25 bp, Homo sapien
ctggaaaggtgggtgctaagttgag

SEQ ID NO: 3265167 - DNA, 25 bp, Homo sapien
gcggaatggaatccttggcccgaaa

SEQ ID NO: 3265168 - DNA, 25 bp, Homo sapien
gctacaagccggtgaagtcgcggaa

SEQ ID NO: 3265169 - DNA, 25 bp, Homo sapien
tgcactcgcgctaacagcccaggct

SEQ ID NO: 3265170 - DNA, 25 bp, Homo sapien
aaaagccacctccttaggaaagcag

SEQ ID NO: 3265171 - DNA, 25 bp, Homo sapien
catggctttggtgtcgggagccact

SEQ ID NO: 3265172 - DNA, 25 bp, Homo sapien
gaagaaaccgttcctcctgtggatc

SEQ ID NO: 3265173 - DNA, 25 bp, Homo sapien
agccacttatgggacagcaggtact

SEQ ID NO: 3265174 - DNA, 25 bp, Homo sapien
gcgccatccacgtgcaccagttcgg

SEQ ID NO: 3265175 - DNA, 25 bp, Homo sapien
cgtgcaccagttcggggacctgagc

SEQ ID NO: 3265176 - DNA, 25 bp, Homo sapien
gcgacttcggcaacttcgcggtccg

SEQ ID NO: 3265177 - DNA, 25 bp, Homo sapien
agggctgcgagtccaccgggcccca

SEQ ID NO: 3265178 - DNA, 25 bp, Homo sapien
ttagatttaataggctaccactggc

SEQ ID NO: 3265179 - DNA, 25 bp, Homo sapien
gaagggaccctcactattgctaagg

SEQ ID NO: 3265180 - DNA, 25 bp, Homo sapien
taactagattcactacggagctccc

SEQ ID NO: 3265181 - DNA, 25 bp, Homo sapien
caaccataatattgagagacgggtc

SEQ ID NO: 3265182 - DNA, 25 bp, Homo sapien
atctggccgatggtgggtcaaaacc

SEQ ID NO: 3265183 - DNA, 25 bp, Homo sapien
tgtgctggagtctattacgagccct

SEQ ID NO: 3265184 - DNA, 25 bp, Homo sapien
ggacacacgtgtcgcgtatctatgg

SEQ ID NO: 3265185 - DNA, 25 bp, Homo sapien
ggatcaactaacttactggctctca

SEQ ID NO: 3265186 - DNA, 25 bp, Homo sapien
tgccggatgccaactagaaaagctc

SEQ ID NO: 3265187 - DNA, 25 bp, Homo sapien
caatgtgcatcaaaggcctgggtcc

SEQ ID NO: 3265188 - DNA, 25 bp, Homo sapien
gacatttgcaggcagttaaggccca

SEQ ID NO: 3265189 - DNA, 25 bp, Homo sapien
tgcaaggagcgcctctcaaaggagt

SEQ ID NO: 3265190 - DNA, 25 bp, Homo sapien
tccaggtggtgcaggaaactagact

SEQ ID NO: 3265191 - DNA, 25 bp, Homo sapien
cagctagaattgagcatgccctcct

SEQ ID NO: 3265192 - DNA, 25 bp, Homo sapien
taagattcccgtacttggtggcaca

SEQ ID NO: 3265193 - DNA, 25 bp, Homo sapien
tcccataaaaggtcatgagctctgt

SEQ ID NO: 3265194 - DNA, 25 bp, Homo sapien
ggtcctctggacacgttttgctcaa

SEQ ID NO: 3265195 - DNA, 25 bp, Homo sapien
caaaagctgacagaaagacggatgc

SEQ ID NO: 3265196 - DNA, 25 bp, Homo sapien
tctgtaccacgacagcagtgctgtg

SEQ ID NO: 3265197 - DNA, 25 bp, Homo sapien
tatggtggacacgattcctgggcct

SEQ ID NO: 3265198 - DNA, 25 bp, Homo sapien
cagtttgcaacaggatcagtgcgtt

SEQ ID NO: 3265199 - DNA, 25 bp, Homo sapien
gacgtgagcgcaccattccgatgct

SEQ ID NO: 3265200 - DNA, 25 bp, Homo sapien
tatttcaggagaaggcgacgtgagc

SEQ ID NO: 3265201 - DNA, 25 bp, Homo sapien
aaagagcttgcattggttcccgcgg

SEQ ID NO: 3265202 - DNA, 25 bp, Homo sapien
cgcctcagcagcggcacaactttca

SEQ ID NO: 3265203 - DNA, 25 bp, Homo sapien
aacgcctcagcagcggcacaacttt

SEQ ID NO: 3265204 - DNA, 25 bp, Homo sapien
tcaacgcctcagcagcggcacaact

SEQ ID NO: 3265205 - DNA, 25 bp, Homo sapien
cctcagcagcggcacaactttcatc

SEQ ID NO: 3265206 - DNA, 25 bp, Homo sapien
tctctgatgccccttctggacctaa

SEQ ID NO: 3265207 - DNA, 25 bp, Homo sapien
cctaaccagcaatgcttgctctgca

SEQ ID NO: 3265208 - DNA, 25 bp, Homo sapien
tgatcaggataggactctctgatgc

SEQ ID NO: 3265209 - DNA, 25 bp, Homo sapien
tttgtgatcaggataggactctctg

SEQ ID NO: 3265210 - DNA, 25 bp, Homo sapien
tagtacccgggcatgtgcattcaat

SEQ ID NO: 3265211 - DNA, 25 bp, Homo sapien
cagctcttagtacccgggcatgtgc

SEQ ID NO: 3265212 - DNA, 25 bp, Homo sapien
agtttccccagaagccaatctcttc

SEQ ID NO: 3265213 - DNA, 25 bp, Homo sapien
ggcggagccagctcttagtacccgg

SEQ ID NO: 3265214 - DNA, 25 bp, Homo sapien
tgtagaagatacagacccacgtttc

SEQ ID NO: 3265215 - DNA, 25 bp, Homo sapien
ttctggctgccaataggatcctcta

SEQ ID NO: 3265216 - DNA, 25 bp, Homo sapien
gagtacagctcccagatctatatcg

SEQ ID NO: 3265217 - DNA, 25 bp, Homo sapien
gatggctctgctcgcttcttgtaga

SEQ ID NO: 3265218 - DNA, 25 bp, Homo sapien
tcagcaagcctagaacagacagaag

SEQ ID NO: 3265219 - DNA, 25 bp, Homo sapien
gctcagcaagcctagaacagacaga

SEQ ID NO: 3265220 - DNA, 25 bp, Homo sapien
cagcaagcctagaacagacagaagg

SEQ ID NO: 3265221 - DNA, 25 bp, Homo sapien
ctcagcaagcctagaacagacagaa

SEQ ID NO: 3265222 - DNA, 25 bp, Homo sapien
gaagtccacagagtattcagggcaa

SEQ ID NO: 3265223 - DNA, 25 bp, Homo sapien
agtccacagagtattcagggcaagg

SEQ ID NO: 3265224 - DNA, 25 bp, Homo sapien
cacagagtattcagggcaagggaag

SEQ ID NO: 3265225 - DNA, 25 bp, Homo sapien
tgagaagtccacagagtattcaggg

SEQ ID NO: 3265226 - DNA, 25 bp, Homo sapien
ttcagcagtggggatctcgacctct

SEQ ID NO: 3265227 - DNA, 25 bp, Homo sapien
gctgctcgacaaacttcagcagtgg

SEQ ID NO: 3265228 - DNA, 25 bp, Homo sapien
gttctcagtgggctgctcgacaaac

SEQ ID NO: 3265229 - DNA, 25 bp, Homo sapien
tctgtccactaggaagagtggggtc

SEQ ID NO: 3265230 - DNA, 25 bp, Homo sapien
gaagggaagcctgctacgactgctg

SEQ ID NO: 3265231 - DNA, 25 bp, Homo sapien
taccattgaagggaagcctgctacg

SEQ ID NO: 3265232 - DNA, 25 bp, Homo sapien
tgctacgactgctgacatgctccat

SEQ ID NO: 3265233 - DNA, 25 bp, Homo sapien
gacactaccattgaagggaagcctg

SEQ ID NO: 3265234 - DNA, 25 bp, Homo sapien
gaaaacatcataacatgattcttca

SEQ ID NO: 3265235 - DNA, 25 bp, Homo sapien
ctgaaaacatcataacatgattctt

SEQ ID NO: 3265236 - DNA, 25 bp, Homo sapien
catcataacatgattcttcatcata

SEQ ID NO: 3265237 - DNA, 25 bp, Homo sapien
aacatcataacatgattcttcatca

SEQ ID NO: 3265238 - DNA, 25 bp, Homo sapien
aaaattctcggcatttgttcactcg

SEQ ID NO: 3265239 - DNA, 25 bp, Homo sapien
catttgttcactcgagtaacttcca

SEQ ID NO: 3265240 - DNA, 25 bp, Homo sapien
caaaaccatagaaaattctcggcat

SEQ ID NO: 3265241 - DNA, 25 bp, Homo sapien
tcggcatttgttcactcgagtaact

SEQ ID NO: 3265242 - DNA, 25 bp, Homo sapien
cagctcagccacccgattccctagg

SEQ ID NO: 3265243 - DNA, 25 bp, Homo sapien
gctcagccacccgattccctaggat

SEQ ID NO: 3265244 - DNA, 25 bp, Homo sapien
tggaagactccacaaaccagaaact

SEQ ID NO: 3265245 - DNA, 25 bp, Homo sapien
ctggaagactccacaaaccagaaac

SEQ ID NO: 3265246 - DNA, 25 bp, Homo sapien
agtcaactaatctttccggagtccg

SEQ ID NO: 3265247 - DNA, 25 bp, Homo sapien
tatcggaatgtaagcctggacttgc

SEQ ID NO: 3265248 - DNA, 25 bp, Homo sapien
gagtccgtaatacacatcagaggcc

SEQ ID NO: 3265249 - DNA, 25 bp, Homo sapien
gaccaaaaccataggcaagactcag

SEQ ID NO: 3265250 - DNA, 25 bp, Homo sapien
cgaatgctttgccacccggtttgaa

SEQ ID NO: 3265251 - DNA, 25 bp, Homo sapien
tacgctgccaggaaggaacaccttt

SEQ ID NO: 3265252 - DNA, 25 bp, Homo sapien
gcctctcaagggtggtaactgtcag

SEQ ID NO: 3265253 - DNA, 25 bp, Homo sapien
ggaaacggtttcaggcatagcagga

SEQ ID NO: 3265254 - DNA, 25 bp, Homo sapien
tgagattcttttctaggccccgcag

SEQ ID NO: 3265255 - DNA, 25 bp, Homo sapien
caggtgtacgtctgtcttgcaagca

SEQ ID NO: 3265256 - DNA, 25 bp, Homo sapien
taaaagaccctcaaagtcatgctgg

SEQ ID NO: 3265257 - DNA, 25 bp, Homo sapien
tttcctgtgcatggactcacccggg

SEQ ID NO: 3265258 - DNA, 25 bp, Homo sapien
attcacttctggtagcctcgtccca

SEQ ID NO: 3265259 - DNA, 25 bp, Homo sapien
gacattcacttctggtagcctcgtc

SEQ ID NO: 3265260 - DNA, 25 bp, Homo sapien
cttccctgcaggtccgtcgttccag

SEQ ID NO: 3265261 - DNA, 25 bp, Homo sapien
ggtccgtcgttccagctggttgaca

SEQ ID NO: 3265262 - DNA, 25 bp, Homo sapien
gaccatgtttttctcgtggattgtt

SEQ ID NO: 3265263 - DNA, 25 bp, Homo sapien
tttttctcgtggattgtttccaaca

SEQ ID NO: 3265264 - DNA, 25 bp, Homo sapien
ctggtgctgaatgaccatgtttttc

SEQ ID NO: 3265265 - DNA, 25 bp, Homo sapien
ttctcgtggattgtttccaacaggg

SEQ ID NO: 3265266 - DNA, 25 bp, Homo sapien
gtcagaaatggactgcggagtagct

SEQ ID NO: 3265267 - DNA, 25 bp, Homo sapien
gtcagtttcccactgtgtgataccc

SEQ ID NO: 3265268 - DNA, 25 bp, Homo sapien
tatcaacaaccaaaaagtgggccag

SEQ ID NO: 3265269 - DNA, 25 bp, Homo sapien
taagccactgtagtgctgattaaga

SEQ ID NO: 3265270 - DNA, 25 bp, Homo sapien
ggccagctgagcatattcgactcga

SEQ ID NO: 3265271 - DNA, 25 bp, Homo sapien
ccatatgatagttgctggtctgcac

SEQ ID NO: 3265272 - DNA, 25 bp, Homo sapien
gctgaattggtgattaggaaacggg

SEQ ID NO: 3265273 - DNA, 25 bp, Homo sapien
tgaattggtgattaggaaacgggga

SEQ ID NO: 3265274 - DNA, 25 bp, Homo sapien
tgctgaattggtgattaggaaacgg

SEQ ID NO: 3265275 - DNA, 25 bp, Homo sapien
ctgaattggtgattaggaaacgggg

SEQ ID NO: 3265276 - DNA, 25 bp, Homo sapien
ccttcgagtttttccgtctctccag

SEQ ID NO: 3265277 - DNA, 25 bp, Homo sapien
tcgagtttttccgtctctccagagc

SEQ ID NO: 3265278 - DNA, 25 bp, Homo sapien
cagacaggactcctgtcagagcact

SEQ ID NO: 3265279 - DNA, 25 bp, Homo sapien
gagtttttccgtctctccagagcat

SEQ ID NO: 3265280 - DNA, 25 bp, Homo sapien
tgtttgatttcaagaggttgacctc

SEQ ID NO: 3265281 - DNA, 25 bp, Homo sapien
gtttgatttcaagaggttgacctct

SEQ ID NO: 3265282 - DNA, 25 bp, Homo sapien
tttcaagaggttgacctcttcatgg

SEQ ID NO: 3265283 - DNA, 25 bp, Homo sapien
gaggttgacctcttcatggagttgc

SEQ ID NO: 3265284 - DNA, 25 bp, Homo sapien
gagaggagaaacatgtgcatctttg

SEQ ID NO: 3265285 - DNA, 25 bp, Homo sapien
tgcccaaatcacagacaacccactt

SEQ ID NO: 3265286 - DNA, 25 bp, Homo sapien
aaatgaatgcaatcaaggtcaaaca

SEQ ID NO: 3265287 - DNA, 25 bp, Homo sapien
ttaaaacagccctcgcagagattcc

SEQ ID NO: 3265288 - DNA, 25 bp, Homo sapien
tcaatgatgcggttctcgtgcccac

SEQ ID NO: 3265289 - DNA, 25 bp, Homo sapien
agctcgtccacagaagcctgcaggt

SEQ ID NO: 3265290 - DNA, 25 bp, Homo sapien
tcgtgcccactcaggatatggttca

SEQ ID NO: 3265291 - DNA, 25 bp, Homo sapien
tacacagggcgtccacgtcaatgat

SEQ ID NO: 3265292 - DNA, 25 bp, Homo sapien
gtttggcaatcgtcatcctcaagag

SEQ ID NO: 3265293 - DNA, 25 bp, Homo sapien
gcacgccgattgcttcgtctccgag

SEQ ID NO: 3265294 - DNA, 25 bp, Homo sapien
caagtcttcacgctcatgggctgca

SEQ ID NO: 3265295 - DNA, 25 bp, Homo sapien
ctgttccttagctcgctctagctgc

SEQ ID NO: 3265296 - DNA, 25 bp, Homo sapien
gacactaagaaacttttggaagata

SEQ ID NO: 3265297 - DNA, 25 bp, Homo sapien
acttttggaagataagatactttca

SEQ ID NO: 3265298 - DNA, 25 bp, Homo sapien
gagaataaacagatccaaataaaaa

SEQ ID NO: 3265299 - DNA, 25 bp, Homo sapien
aggcacagagaataaacagatccaa

SEQ ID NO: 3265300 - DNA, 25 bp, Homo sapien
gaagaacccatagctttcctggact

SEQ ID NO: 3265301 - DNA, 25 bp, Homo sapien
tatcctcaggaataaaattgcagtc

SEQ ID NO: 3265302 - DNA, 25 bp, Homo sapien
aaactgtgtgagaggcccaagaagg

SEQ ID NO: 3265303 - DNA, 25 bp, Homo sapien
caagaaggccccagtggtctcagag

SEQ ID NO: 3265304 - DNA, 25 bp, Homo sapien
ttcccacggaggtcaaacaaggcca

SEQ ID NO: 3265305 - DNA, 25 bp, Homo sapien
ggaatctggttataagcgatcctca

SEQ ID NO: 3265306 - DNA, 25 bp, Homo sapien
cattgtcagacatgcagagagtggc

SEQ ID NO: 3265307 - DNA, 25 bp, Homo sapien
caggtggaacagaccgtgcaaaggc

SEQ ID NO: 3265308 - DNA, 25 bp, Homo sapien
tgaaagaatcattaacaggaagtgg

SEQ ID NO: 3265309 - DNA, 25 bp, Homo sapien
caatttgccagagctatcgagaggg

SEQ ID NO: 3265310 - DNA, 25 bp, Homo sapien
agtccccgtgtactgctgcagatag

SEQ ID NO: 3265311 - DNA, 25 bp, Homo sapien
aagtggatgctagccctttcttgcc

SEQ ID NO: 3265312 - DNA, 25 bp, Homo sapien
aaaagtcccacgtcaatagaggtat

SEQ ID NO: 3265313 - DNA, 25 bp, Homo sapien
aagtcccacgtcaatagaggtatgt

SEQ ID NO: 3265314 - DNA, 25 bp, Homo sapien
gtcccacgtcaatagaggtatgttc

SEQ ID NO: 3265315 - DNA, 25 bp, Homo sapien
aaagtcccacgtcaatagaggtatg

SEQ ID NO: 3265316 - DNA, 25 bp, Homo sapien
caccaatgacagataaaacagaggt

SEQ ID NO: 3265317 - DNA, 25 bp, Homo sapien
ggcaccaatgacagataaaacagag

SEQ ID NO: 3265318 - DNA, 25 bp, Homo sapien
cacggcaccaatgacagataaaaca

SEQ ID NO: 3265319 - DNA, 25 bp, Homo sapien
cggcaccaatgacagataaaacaga

SEQ ID NO: 3265320 - DNA, 25 bp, Homo sapien
caaagcttttcgagggtaatgcgtg

SEQ ID NO: 3265321 - DNA, 25 bp, Homo sapien
gattgatggcaaccgagagctgcac

SEQ ID NO: 3265322 - DNA, 25 bp, Homo sapien
gagccctgggcaacgtgcaaagctt

SEQ ID NO: 3265323 - DNA, 25 bp, Homo sapien
tagactgacactctgagagccctgg

SEQ ID NO: 3265324 - DNA, 25 bp, Homo sapien
gcttgtccagtgttaatcagagcct

SEQ ID NO: 3265325 - DNA, 25 bp, Homo sapien
gaagagtcacagatccaaaagtcac

SEQ ID NO: 3265326 - DNA, 25 bp, Homo sapien
ggatgacccaggcaattctatgcat

SEQ ID NO: 3265327 - DNA, 25 bp, Homo sapien
tgatgaataaaaccacgagcggctg

SEQ ID NO: 3265328 - DNA, 25 bp, Homo sapien
tttatttcggtcctgagaatctctc

SEQ ID NO: 3265329 - DNA, 25 bp, Homo sapien
gaatctctcaatagttgtgcaagat

SEQ ID NO: 3265330 - DNA, 25 bp, Homo sapien
cctgagaatctctcaatagttgtgc

SEQ ID NO: 3265331 - DNA, 25 bp, Homo sapien
gtttatttcggtcctgagaatctct

SEQ ID NO: 3265332 - DNA, 25 bp, Homo sapien
catttcctgaacctgggattcctgg

SEQ ID NO: 3265333 - DNA, 25 bp, Homo sapien
ccacatttcctgaacctgggattcc

SEQ ID NO: 3265334 - DNA, 25 bp, Homo sapien
atttcctgaacctgggattcctggc

SEQ ID NO: 3265335 - DNA, 25 bp, Homo sapien
gaacctgggattcctggccgcccat

SEQ ID NO: 3265336 - DNA, 25 bp, Homo sapien
cagatggagggccaggccattgggc

SEQ ID NO: 3265337 - DNA, 25 bp, Homo sapien
ccagcgcttgctcggtctgggagct

SEQ ID NO: 3265338 - DNA, 25 bp, Homo sapien
tgggagctggctgccaactgcacat

SEQ ID NO: 3265339 - DNA, 25 bp, Homo sapien
tgcacattcaggtgaatctcagcat

SEQ ID NO: 3265340 - DNA, 25 bp, Homo sapien
atacgcacattgtggtgtcttctcc

SEQ ID NO: 3265341 - DNA, 25 bp, Homo sapien
ttcaaggccagtgggcaataatacg

SEQ ID NO: 3265342 - DNA, 25 bp, Homo sapien
tgggcaataatacgcacattgtggt

SEQ ID NO: 3265343 - DNA, 25 bp, Homo sapien
gccagtgggcaataatacgcacatt

SEQ ID NO: 3265344 - DNA, 25 bp, Homo sapien
cagtgccttccgcttatacaaggta

SEQ ID NO: 3265345 - DNA, 25 bp, Homo sapien
gcagctggagaggtaaatacttccc

SEQ ID NO: 3265346 - DNA, 25 bp, Homo sapien
taactccacctgttaactcggcagc

SEQ ID NO: 3265347 - DNA, 25 bp, Homo sapien
gcagctggttcttgttccagtgcct

SEQ ID NO: 3265348 - DNA, 25 bp, Homo sapien
tcagtggcatgcctgatcatgccca

SEQ ID NO: 3265349 - DNA, 25 bp, Homo sapien
tggcatgcctgatcatgcccatctg

SEQ ID NO: 3265350 - DNA, 25 bp, Homo sapien
gcatgcctgatcatgcccatctgac

SEQ ID NO: 3265351 - DNA, 25 bp, Homo sapien
tttcatcagtggcatgcctgatcat

SEQ ID NO: 3265352 - DNA, 25 bp, Homo sapien
gcagttggcagtcacgcttccgctt

SEQ ID NO: 3265353 - DNA, 25 bp, Homo sapien
gccaaaggtgtaggggctccatccc

SEQ ID NO: 3265354 - DNA, 25 bp, Homo sapien
agctgcagttggcagtcacgcttcc

SEQ ID NO: 3265355 - DNA, 25 bp, Homo sapien
cggccaaaggtgtaggggctccatc

SEQ ID NO: 3265356 - DNA, 25 bp, Homo sapien
ttcaggaggaagtgatggatctcca

SEQ ID NO: 3265357 - DNA, 25 bp, Homo sapien
ttttttcaggaggaagtgatggatc

SEQ ID NO: 3265358 - DNA, 25 bp, Homo sapien
tccttttttcaggaggaagtgatgg

SEQ ID NO: 3265359 - DNA, 25 bp, Homo sapien
tcaggaggaagtgatggatctccat

SEQ ID NO: 3265360 - DNA, 25 bp, Homo sapien
tcttcttcagtgactggtggcgctc

SEQ ID NO: 3265361 - DNA, 25 bp, Homo sapien
atcagctctcggtacttcttcttca

SEQ ID NO: 3265362 - DNA, 25 bp, Homo sapien
cttcagtgactggtggcgctcccgg

SEQ ID NO: 3265363 - DNA, 25 bp, Homo sapien
ttcttcagtgactggtggcgctccc

SEQ ID NO: 3265364 - DNA, 25 bp, Homo sapien
ctccagcttcctcttacacaccagg

SEQ ID NO: 3265365 - DNA, 25 bp, Homo sapien
cttggagaggatcagcagggcttcc

SEQ ID NO: 3265366 - DNA, 25 bp, Homo sapien
tccctttcctgttgacaggtgtcca

SEQ ID NO: 3265367 - DNA, 25 bp, Homo sapien
cctgttgacaggtgtccagctcctt

SEQ ID NO: 3265368 - DNA, 25 bp, Homo sapien
aacagctctctgttagggtccaaga

SEQ ID NO: 3265369 - DNA, 25 bp, Homo sapien
cttgaacagctctctgttagggtcc

SEQ ID NO: 3265370 - DNA, 25 bp, Homo sapien
cagctctctgttagggtccaagaga

SEQ ID NO: 3265371 - DNA, 25 bp, Homo sapien
tctgttagggtccaagagaaaagcc

SEQ ID NO: 3265372 - DNA, 25 bp, Homo sapien
agggcagtaaaacgcctcccttgct

SEQ ID NO: 3265373 - DNA, 25 bp, Homo sapien
aaatagggccatgaaagctgtgaag

SEQ ID NO: 3265374 - DNA, 25 bp, Homo sapien
ggaacccacgatttcaacaccactg

SEQ ID NO: 3265375 - DNA, 25 bp, Homo sapien
cttgaggaacccacgatttcaacac

SEQ ID NO: 3265376 - DNA, 25 bp, Homo sapien
cacgatttcaacaccactgtcgaat

SEQ ID NO: 3265377 - DNA, 25 bp, Homo sapien
gatttcaacaccactgtcgaatatc

SEQ ID NO: 3265378 - DNA, 25 bp, Homo sapien
ggtaagggctccagtccagaaggta

SEQ ID NO: 3265379 - DNA, 25 bp, Homo sapien
gatgtaaaaagtgcaggagaaagca

SEQ ID NO: 3265380 - DNA, 25 bp, Homo sapien
ccagaaggtacgactcactttgagc

SEQ ID NO: 3265381 - DNA, 25 bp, Homo sapien
gctggctcgatgatttccaaagact

SEQ ID NO: 3265382 - DNA, 25 bp, Homo sapien
tattgttagacagggtgctacccag

SEQ ID NO: 3265383 - DNA, 25 bp, Homo sapien
cagactcatgcgtggtttcagcctc

SEQ ID NO: 3265384 - DNA, 25 bp, Homo sapien
tcttaacgcagtctgtgatcacggt

SEQ ID NO: 3265385 - DNA, 25 bp, Homo sapien
ggctggtgccggaatcacatcagtg

SEQ ID NO: 3265386 - DNA, 25 bp, Homo sapien
ccaaacacactccaaagggccaagt

SEQ ID NO: 3265387 - DNA, 25 bp, Homo sapien
actccaaagggccaagttgagcaag

SEQ ID NO: 3265388 - DNA, 25 bp, Homo sapien
caaacacactccaaagggccaagtt

SEQ ID NO: 3265389 - DNA, 25 bp, Homo sapien
acacactccaaagggccaagttgag

SEQ ID NO: 3265390 - DNA, 25 bp, Homo sapien
tgacaggcaaactttgattatttga

SEQ ID NO: 3265391 - DNA, 25 bp, Homo sapien
gcaaactttgattatttgaatgccc

SEQ ID NO: 3265392 - DNA, 25 bp, Homo sapien
ctttgattatttgaatgccccaggg

SEQ ID NO: 3265393 - DNA, 25 bp, Homo sapien
tattacttttgacaggcaaactttg

SEQ ID NO: 3265394 - DNA, 25 bp, Homo sapien
gagtttataatgtgaactacagtag

SEQ ID NO: 3265395 - DNA, 25 bp, Homo sapien
caggtaatgggaagagtttataatg

SEQ ID NO: 3265396 - DNA, 25 bp, Homo sapien
gaagagtttataatgtgaactacag

SEQ ID NO: 3265397 - DNA, 25 bp, Homo sapien
tgggaagagtttataatgtgaacta

SEQ ID NO: 3265398 - DNA, 25 bp, Homo sapien
gagtcatcgctaaagggccacttgg

SEQ ID NO: 3265399 - DNA, 25 bp, Homo sapien
atttcaaccaatcatgatcaacaca

SEQ ID NO: 3265400 - DNA, 25 bp, Homo sapien
tcatcgctaaagggccacttgggcc

SEQ ID NO: 3265401 - DNA, 25 bp, Homo sapien
cagagtcatcgctaaagggccactt

SEQ ID NO: 3265402 - DNA, 25 bp, Homo sapien
gctttggcagcatagtgaaactcct

SEQ ID NO: 3265403 - DNA, 25 bp, Homo sapien
caggctttggcagcatagtgaaact

SEQ ID NO: 3265404 - DNA, 25 bp, Homo sapien
gacaggctttggcagcatagtgaaa

SEQ ID NO: 3265405 - DNA, 25 bp, Homo sapien
tttggcagcatagtgaaactccttc

SEQ ID NO: 3265406 - DNA, 25 bp, Homo sapien
tcatcatcatcatccacaatcatca

SEQ ID NO: 3265407 - DNA, 25 bp, Homo sapien
ttcatcatcatcatccacaatcatc

SEQ ID NO: 3265408 - DNA, 25 bp, Homo sapien
gcatcatgttgacagtcagcagctg

SEQ ID NO: 3265409 - DNA, 25 bp, Homo sapien
gcccaggcaaggataggagcatcgc

SEQ ID NO: 3265410 - DNA, 25 bp, Homo sapien
cctctgcaggagcatctctgaagcc

SEQ ID NO: 3265411 - DNA, 25 bp, Homo sapien
ttttccatggcatcatgttgacagt

SEQ ID NO: 3265412 - DNA, 25 bp, Homo sapien
tctcctaacctcctgtcacttccag

SEQ ID NO: 3265413 - DNA, 25 bp, Homo sapien
cctcctgtcacttccagtaccacca

SEQ ID NO: 3265414 - DNA, 25 bp, Homo sapien
tcctgtcacttccagtaccaccacc

SEQ ID NO: 3265415 - DNA, 25 bp, Homo sapien
taacctcctgtcacttccagtacca

SEQ ID NO: 3265416 - DNA, 25 bp, Homo sapien
gacagcaaagttcaccatgcccaga

SEQ ID NO: 3265417 - DNA, 25 bp, Homo sapien
agacagcaaagttcaccatgcccag

SEQ ID NO: 3265418 - DNA, 25 bp, Homo sapien
acagcaaagttcaccatgcccagaa

SEQ ID NO: 3265419 - DNA, 25 bp, Homo sapien
cagcaaagttcaccatgcccagaac

SEQ ID NO: 3265420 - DNA, 25 bp, Homo sapien
cattcatccaaaagtagcatggatg

SEQ ID NO: 3265421 - DNA, 25 bp, Homo sapien
tcattcatccaaaagtagcatggat

SEQ ID NO: 3265422 - DNA, 25 bp, Homo sapien
catccaaaagtagcatggatgtggt

SEQ ID NO: 3265423 - DNA, 25 bp, Homo sapien
ttcatccaaaagtagcatggatgtg

SEQ ID NO: 3265424 - DNA, 25 bp, Homo sapien
tgaggggggatgagggaggacacaa

SEQ ID NO: 3265425 - DNA, 25 bp, Homo sapien
gggggatgagggaggacacaacagt

SEQ ID NO: 3265426 - DNA, 25 bp, Homo sapien
gaggggggatgagggaggacacaac

SEQ ID NO: 3265427 - DNA, 25 bp, Homo sapien
ggatgagggaggacacaacagtgac

SEQ ID NO: 3265428 - DNA, 25 bp, Homo sapien
gcaactgattgaaagagaggacggg

SEQ ID NO: 3265429 - DNA, 25 bp, Homo sapien
agcaactgattgaaagagaggacgg

SEQ ID NO: 3265430 - DNA, 25 bp, Homo sapien
gggagaaatccgcattccctctcac

SEQ ID NO: 3265431 - DNA, 25 bp, Homo sapien
agaggccggcagcttctcccggcag

SEQ ID NO: 3265432 - DNA, 25 bp, Homo sapien
gcaggccggcaaactcttaggggga

SEQ ID NO: 3265433 - DNA, 25 bp, Homo sapien
gagagggagaaatccgcattccctc

SEQ ID NO: 3265434 - DNA, 25 bp, Homo sapien
atgagtgaacggctgcagcggaccc

SEQ ID NO: 3265435 - DNA, 25 bp, Homo sapien
tacacatggtaggcctgcagtaaac

SEQ ID NO: 3265436 - DNA, 25 bp, Homo sapien
tgattgaattgagcaagtgaatgag

SEQ ID NO: 3265437 - DNA, 25 bp, Homo sapien
ctgcagtaaacacgtgttgattgaa

SEQ ID NO: 3265438 - DNA, 25 bp, Homo sapien
tgccagtcgctctcagtccggtcgc

SEQ ID NO: 3265439 - DNA, 25 bp, Homo sapien
agtcgctctcagtccggtcgccgtt

SEQ ID NO: 3265440 - DNA, 25 bp, Homo sapien
ccctgccagtcgctctcagtccggt

SEQ ID NO: 3265441 - DNA, 25 bp, Homo sapien
cagcccctgccagtcgctctcagtc

SEQ ID NO: 3265442 - DNA, 25 bp, Homo sapien
tcctcctcgcgacgtcgcgtcgccg

SEQ ID NO: 3265443 - DNA, 25 bp, Homo sapien
ctcctcctcgcgacgtcgcgtcgcc

SEQ ID NO: 3265444 - DNA, 25 bp, Homo sapien
cctcctcctcgcgacgtcgcgtcgc

SEQ ID NO: 3265445 - DNA, 25 bp, Homo sapien
ctcctcgcgacgtcgcgtcgccgcc

SEQ ID NO: 3265446 - DNA, 25 bp, Homo sapien
ggttagcagcatggcccttggcgag

SEQ ID NO: 3265447 - DNA, 25 bp, Homo sapien
gattcagcacaaatttgatgtaaat

SEQ ID NO: 3265448 - DNA, 25 bp, Homo sapien
gtggaggttactgcaccctggactt

SEQ ID NO: 3265449 - DNA, 25 bp, Homo sapien
cccgtgctgctgacgggttagcagc

SEQ ID NO: 3265450 - DNA, 25 bp, Homo sapien
atagaaacgtctgacttgggggtca

SEQ ID NO: 3265451 - DNA, 25 bp, Homo sapien
aaacgtctgacttgggggtcactgg

SEQ ID NO: 3265452 - DNA, 25 bp, Homo sapien
gaaacgtctgacttgggggtcactg

SEQ ID NO: 3265453 - DNA, 25 bp, Homo sapien
cagaagagggactgaccctgtcgtt

SEQ ID NO: 3265454 - DNA, 25 bp, Homo sapien
gggactgaccctgtcgttctggaag

SEQ ID NO: 3265455 - DNA, 25 bp, Homo sapien
gagggactgaccctgtcgttctgga

SEQ ID NO: 3265456 - DNA, 25 bp, Homo sapien
gaagagggactgaccctgtcgttct

SEQ ID NO: 3265457 - DNA, 25 bp, Homo sapien
gcaaagccagactaaagagttttac

SEQ ID NO: 3265458 - DNA, 25 bp, Homo sapien
tcacgactctaaggtgcaaagccag

SEQ ID NO: 3265459 - DNA, 25 bp, Homo sapien
attgcatcgaaacaggagattcacg

SEQ ID NO: 3265460 - DNA, 25 bp, Homo sapien
gagttttactgttcctccattcctg

SEQ ID NO: 3265461 - DNA, 25 bp, Homo sapien
gccaaattcagtctcaattgaacat

SEQ ID NO: 3265462 - DNA, 25 bp, Homo sapien
taccatgctgatgagtcaatagcat

SEQ ID NO: 3265463 - DNA, 25 bp, Homo sapien
gttgaaacgtaaggcaagatgccaa

SEQ ID NO: 3265464 - DNA, 25 bp, Homo sapien
tttgcatgaatgaaagatcttacgt

SEQ ID NO: 3265465 - DNA, 25 bp, Homo sapien
ggtgaagatgcttggtcccattcca

SEQ ID NO: 3265466 - DNA, 25 bp, Homo sapien
tcctaaactgattgccaagcagccc

SEQ ID NO: 3265467 - DNA, 25 bp, Homo sapien
tgattctcaaaaacagcccgtcgtc

SEQ ID NO: 3265468 - DNA, 25 bp, Homo sapien
gaatcggctctcagcggctcatgaa

SEQ ID NO: 3265469 - DNA, 25 bp, Homo sapien
aaagggccctgagatatttctcatc

SEQ ID NO: 3265470 - DNA, 25 bp, Homo sapien
ggccctgagatatttctcatccaca

SEQ ID NO: 3265471 - DNA, 25 bp, Homo sapien
aagggccctgagatatttctcatcc

SEQ ID NO: 3265472 - DNA, 25 bp, Homo sapien
agggccctgagatatttctcatcca

SEQ ID NO: 3265473 - DNA, 25 bp, Homo sapien
cagtgggtgatcaccacatgtgtgg

SEQ ID NO: 3265474 - DNA, 25 bp, Homo sapien
tgggtgatcaccacatgtgtgggtt

SEQ ID NO: 3265475 - DNA, 25 bp, Homo sapien
ctgcagtgggtgatcaccacatgtg

SEQ ID NO: 3265476 - DNA, 25 bp, Homo sapien
gggtgatcaccacatgtgtgggttc

SEQ ID NO: 3265477 - DNA, 25 bp, Homo sapien
tgcatggcctcggatgatccaattc

SEQ ID NO: 3265478 - DNA, 25 bp, Homo sapien
catggcctcggatgatccaattctg

SEQ ID NO: 3265479 - DNA, 25 bp, Homo sapien
aactgcatggcctcggatgatccaa

SEQ ID NO: 3265480 - DNA, 25 bp, Homo sapien
gcctcggatgatccaattctgtggg

SEQ ID NO: 3265481 - DNA, 25 bp, Homo sapien
tccatttatcaaggaaagcaacatg

SEQ ID NO: 3265482 - DNA, 25 bp, Homo sapien
agagtcccccacttgaggccatctg

SEQ ID NO: 3265483 - DNA, 25 bp, Homo sapien
tctgcaggtatcctccttgcttggg

SEQ ID NO: 3265484 - DNA, 25 bp, Homo sapien
agagtaattccagggtccatttatc

SEQ ID NO: 3265485 - DNA, 25 bp, Homo sapien
gacctgggcgtgtctttaggatttc

SEQ ID NO: 3265486 - DNA, 25 bp, Homo sapien
ggtaaaatgccccatatccagaagg

SEQ ID NO: 3265487 - DNA, 25 bp, Homo sapien
tggctggttgtccaacactcatggc

SEQ ID NO: 3265488 - DNA, 25 bp, Homo sapien
ggatttctcaataggatgacatctg

SEQ ID NO: 3265489 - DNA, 25 bp, Homo sapien
agcagattccctgtggtttcaaaat

SEQ ID NO: 3265490 - DNA, 25 bp, Homo sapien
ggctgatgggtaagtcatgtcatca

SEQ ID NO: 3265491 - DNA, 25 bp, Homo sapien
aattgagcagattccctgtggtttc

SEQ ID NO: 3265492 - DNA, 25 bp, Homo sapien
gatgggtaagtcatgtcatcatttc

SEQ ID NO: 3265493 - DNA, 25 bp, Homo sapien
gactccaggaaaatttaagcgtagc

SEQ ID NO: 3265494 - DNA, 25 bp, Homo sapien
gcattttgagacttccctaaggccc

SEQ ID NO: 3265495 - DNA, 25 bp, Homo sapien
gtttagtggattcagaaggacatct

SEQ ID NO: 3265496 - DNA, 25 bp, Homo sapien
tgacgttcacatcgcttcacaaggt

SEQ ID NO: 3265497 - DNA, 25 bp, Homo sapien
tacgcaatcgcggattcaccagctt

SEQ ID NO: 3265498 - DNA, 25 bp, Homo sapien
gcaatcgcggattcaccagcttgag

SEQ ID NO: 3265499 - DNA, 25 bp, Homo sapien
ctagtacgcaatcgcggattcacca

SEQ ID NO: 3265500 - DNA, 25 bp, Homo sapien
gtacgcaatcgcggattcaccagct

SEQ ID NO: 3265501 - DNA, 25 bp, Homo sapien
ctcctgtcttgggtgaacatgcatc

SEQ ID NO: 3265502 - DNA, 25 bp, Homo sapien
tgggtgaacatgcatcctgatgctg

SEQ ID NO: 3265503 - DNA, 25 bp, Homo sapien
tgtcttgggtgaacatgcatcctga

SEQ ID NO: 3265504 - DNA, 25 bp, Homo sapien
atgcatcctgatgctgtcatatggg

SEQ ID NO: 3265505 - DNA, 25 bp, Homo sapien
tgtacctgcacttagaagcccctag

SEQ ID NO: 3265506 - DNA, 25 bp, Homo sapien
taagcatgactagccaactgaaagt

SEQ ID NO: 3265507 - DNA, 25 bp, Homo sapien
caccttgtgaagtaggccctgaaac

SEQ ID NO: 3265508 - DNA, 25 bp, Homo sapien
tgaaagtgtgtatctcagcaccttg

SEQ ID NO: 3265509 - DNA, 25 bp, Homo sapien
gttgtgcttctgtaaatcacaaggt

SEQ ID NO: 3265510 - DNA, 25 bp, Homo sapien
tttacaatcttgattacttgagact

SEQ ID NO: 3265511 - DNA, 25 bp, Homo sapien
aaatcacaaggtcatgggcttttac

SEQ ID NO: 3265512 - DNA, 25 bp, Homo sapien
caatcttgattacttgagactcaga

SEQ ID NO: 3265513 - DNA, 25 bp, Homo sapien
tggttcaacccaatcaacgaagtct

SEQ ID NO: 3265514 - DNA, 25 bp, Homo sapien
tgcaaatctgtgactcaagtggcca

SEQ ID NO: 3265515 - DNA, 25 bp, Homo sapien
caaacactgcatgcctactgtgggt

SEQ ID NO: 3265516 - DNA, 25 bp, Homo sapien
caggcagagtgtaaccatgaagctc

SEQ ID NO: 3265517 - DNA, 25 bp, Homo sapien
ttggccgctgcctaattaaagaact

SEQ ID NO: 3265518 - DNA, 25 bp, Homo sapien
tttaggtggcatgcaaatagactcc

SEQ ID NO: 3265519 - DNA, 25 bp, Homo sapien
tagattattgtattccactccagga

SEQ ID NO: 3265520 - DNA, 25 bp, Homo sapien
gtcattctaccctctgcttgcctgg

SEQ ID NO: 3265521 - DNA, 25 bp, Homo sapien
actcctgaccgccaaacctctggca

SEQ ID NO: 3265522 - DNA, 25 bp, Homo sapien
atttccatcatgagcactcctgacc

SEQ ID NO: 3265523 - DNA, 25 bp, Homo sapien
tcctgaccgccaaacctctggcatc

SEQ ID NO: 3265524 - DNA, 25 bp, Homo sapien
atcatgagcactcctgaccgccaaa

SEQ ID NO: 3265525 - DNA, 25 bp, Homo sapien
catcaccactcgtgcattcaggttt

SEQ ID NO: 3265526 - DNA, 25 bp, Homo sapien
accactcgtgcattcaggttttgaa

SEQ ID NO: 3265527 - DNA, 25 bp, Homo sapien
ctgatgacggccgagagcaattcat

SEQ ID NO: 3265528 - DNA, 25 bp, Homo sapien
cgagagcaattcatcaccactcgtg

SEQ ID NO: 3265529 - DNA, 25 bp, Homo sapien
agaaccagatgtgtctcaacctcaa

SEQ ID NO: 3265530 - DNA, 25 bp, Homo sapien
gtgacaagaaccagatgtgtctcaa

SEQ ID NO: 3265531 - DNA, 25 bp, Homo sapien
aaccagatgtgtctcaacctcaaca

SEQ ID NO: 3265532 - DNA, 25 bp, Homo sapien
caagaaccagatgtgtctcaacctc

SEQ ID NO: 3265533 - DNA, 25 bp, Homo sapien
gaaataagctgagcagacgaccacc

SEQ ID NO: 3265534 - DNA, 25 bp, Homo sapien
gcaacactgtgaaaagatgccacct

SEQ ID NO: 3265535 - DNA, 25 bp, Homo sapien
aaaatccgtggtttctgaggctaga

SEQ ID NO: 3265536 - DNA, 25 bp, Homo sapien
cagtcccagaatgtacccaagagtg

SEQ ID NO: 3265537 - DNA, 25 bp, Homo sapien
caaggacacgcacaaatcaaagggc

SEQ ID NO: 3265538 - DNA, 25 bp, Homo sapien
ggagcttgcctattgcccataccag

SEQ ID NO: 3265539 - DNA, 25 bp, Homo sapien
aagagaaccagctaaccaggcggaa

SEQ ID NO: 3265540 - DNA, 25 bp, Homo sapien
ctaggtttcaaagcaggtcgagatc

SEQ ID NO: 3265541 - DNA, 25 bp, Homo sapien
agtgctgtcccatcttatccaattg

SEQ ID NO: 3265542 - DNA, 25 bp, Homo sapien
tgtcatgcagttagccaataaatgc

SEQ ID NO: 3265543 - DNA, 25 bp, Homo sapien
gggaagcatattacatttctagatg

SEQ ID NO: 3265544 - DNA, 25 bp, Homo sapien
caatccctgattaaaatgtgagttc

SEQ ID NO: 3265545 - DNA, 25 bp, Homo sapien
tttccctttgaaactggatgcaaaa

SEQ ID NO: 3265546 - DNA, 25 bp, Homo sapien
ttttccctttgaaactggatgcaaa

SEQ ID NO: 3265547 - DNA, 25 bp, Homo sapien
ttccctttgaaactggatgcaaaaa

SEQ ID NO: 3265548 - DNA, 25 bp, Homo sapien
gttttccctttgaaactggatgcaa

SEQ ID NO: 3265549 - DNA, 25 bp, Homo sapien
gagaatgtatagtcactccccaggg

SEQ ID NO: 3265550 - DNA, 25 bp, Homo sapien
tccccagggccaggtagtgattatc

SEQ ID NO: 3265551 - DNA, 25 bp, Homo sapien
tcccactggtatatctgagagaatg

SEQ ID NO: 3265552 - DNA, 25 bp, Homo sapien
cacagccagtacgtcctccatgttg

SEQ ID NO: 3265553 - DNA, 25 bp, Homo sapien
gattttccatcgatatcaacaaact

SEQ ID NO: 3265554 - DNA, 25 bp, Homo sapien
gacaggatgagatgcgattttccat

SEQ ID NO: 3265555 - DNA, 25 bp, Homo sapien
cgtgtccctgaaccactcgtgcagt

SEQ ID NO: 3265556 - DNA, 25 bp, Homo sapien
tgtccctgaaccactcgtgcagtga

SEQ ID NO: 3265557 - DNA, 25 bp, Homo sapien
tctcgtcgtcgatctgaaacagctc

SEQ ID NO: 3265558 - DNA, 25 bp, Homo sapien
gtctgcgatgacaaagaacgtctcg

SEQ ID NO: 3265559 - DNA, 25 bp, Homo sapien
gaatggccttacagcccacgatgga

SEQ ID NO: 3265560 - DNA, 25 bp, Homo sapien
aactgtggacagaccagcctttgag

SEQ ID NO: 3265561 - DNA, 25 bp, Homo sapien
ctgtgctccaaaataaaggagagga

SEQ ID NO: 3265562 - DNA, 25 bp, Homo sapien
ccaaaattgagaaagccaagatgag

SEQ ID NO: 3265563 - DNA, 25 bp, Homo sapien
gccaagatgagacgtagagagaaca

SEQ ID NO: 3265564 - DNA, 25 bp, Homo sapien
catccctttggcaacatggtcacca

SEQ ID NO: 3265565 - DNA, 25 bp, Homo sapien
gaacctcagggtgaacatgaccatg

SEQ ID NO: 3265566 - DNA, 25 bp, Homo sapien
gatggccacgtacacatcgttcttg

SEQ ID NO: 3265567 - DNA, 25 bp, Homo sapien
ggtagggtaaagtctgatgaacaac

SEQ ID NO: 3265568 - DNA, 25 bp, Homo sapien
tgtaatgttgtcatagctccggaaa

SEQ ID NO: 3265569 - DNA, 25 bp, Homo sapien
tatccactgaaaccgactggtaggg

SEQ ID NO: 3265570 - DNA, 25 bp, Homo sapien
ggattatcaaccaccatcaccgttc

SEQ ID NO: 3265571 - DNA, 25 bp, Homo sapien
tgtagggattatcaaccaccatcac

SEQ ID NO: 3265572 - DNA, 25 bp, Homo sapien
tagggattatcaaccaccatcaccg

SEQ ID NO: 3265573 - DNA, 25 bp, Homo sapien
ctgtagggattatcaaccaccatca

SEQ ID NO: 3265574 - DNA, 25 bp, Homo sapien
ggctttgcagtcacattcaaattta

SEQ ID NO: 3265575 - DNA, 25 bp, Homo sapien
tactctggtggaccaatacacagca

SEQ ID NO: 3265576 - DNA, 25 bp, Homo sapien
cacagcacatcagaaacggtggaat

SEQ ID NO: 3265577 - DNA, 25 bp, Homo sapien
cattcatagtcaaagctggtcacgt

SEQ ID NO: 3265578 - DNA, 25 bp, Homo sapien
gttcaatcagagagtctaaatcact

SEQ ID NO: 3265579 - DNA, 25 bp, Homo sapien
aatcactgaagacatcccttggtag

SEQ ID NO: 3265580 - DNA, 25 bp, Homo sapien
tgaagacatcccttggtagtgcttt

SEQ ID NO: 3265581 - DNA, 25 bp, Homo sapien
ccttggtagtgcttttatgtggtta

SEQ ID NO: 3265582 - DNA, 25 bp, Homo sapien
gccacgaaaggcatttcttgaaatg

SEQ ID NO: 3265583 - DNA, 25 bp, Homo sapien
tgagtcaggtcacggaggccacgaa

SEQ ID NO: 3265584 - DNA, 25 bp, Homo sapien
acggaggccacgaaaggcatttctt

SEQ ID NO: 3265585 - DNA, 25 bp, Homo sapien
gtcacggaggccacgaaaggcattt

SEQ ID NO: 3265586 - DNA, 25 bp, Homo sapien
catgtggtagcaggatgtatgcaaa

SEQ ID NO: 3265587 - DNA, 25 bp, Homo sapien
tctgagctggcaacatgggtaaaaa

SEQ ID NO: 3265588 - DNA, 25 bp, Homo sapien
caaaaatgcgtgcacgggagtgtgt

SEQ ID NO: 3265589 - DNA, 25 bp, Homo sapien
agctggcaacatgggtaaaaacatc

SEQ ID NO: 3265590 - DNA, 25 bp, Homo sapien
ccggatgatcgtgaatgagttagaa

SEQ ID NO: 3265591 - DNA, 25 bp, Homo sapien
cgtgaatgagttagaattcagcaat

SEQ ID NO: 3265592 - DNA, 25 bp, Homo sapien
caaaagcatcatcccggatgatcgt

SEQ ID NO: 3265593 - DNA, 25 bp, Homo sapien
aagatgaaaaagtccagcaaaagca

SEQ ID NO: 3265594 - DNA, 25 bp, Homo sapien
aaagtaagagacagattccaatgga

SEQ ID NO: 3265595 - DNA, 25 bp, Homo sapien
gatctgtgggcaaacatgagctctt

SEQ ID NO: 3265596 - DNA, 25 bp, Homo sapien
tctgtgggcaaacatgagctcttct

SEQ ID NO: 3265597 - DNA, 25 bp, Homo sapien
gtaagagacagattccaatggagag

SEQ ID NO: 3265598 - DNA, 25 bp, Homo sapien
ctgaaaacgtcccatttaccaggct

SEQ ID NO: 3265599 - DNA, 25 bp, Homo sapien
aggcagatgggaaaacattcggtcc

SEQ ID NO: 3265600 - DNA, 25 bp, Homo sapien
tgaaaacgtcccatttaccaggctc

SEQ ID NO: 3265601 - DNA, 25 bp, Homo sapien
agatgggaaaacattcggtccttga

SEQ ID NO: 3265602 - DNA, 25 bp, Homo sapien
gatagactccttggtacagctgcaa

SEQ ID NO: 3265603 - DNA, 25 bp, Homo sapien
acgatcctgggcacccaggaagagc

SEQ ID NO: 3265604 - DNA, 25 bp, Homo sapien
atgtcgcccggcacgatcctgggca

SEQ ID NO: 3265605 - DNA, 25 bp, Homo sapien
caggaagagcccacgcagatgatag

SEQ ID NO: 3265606 - DNA, 25 bp, Homo sapien
gcgctccgcggtatcaggcacgcgg

SEQ ID NO: 3265607 - DNA, 25 bp, Homo sapien
gcggtatcaggcacgcggcgcccag

SEQ ID NO: 3265608 - DNA, 25 bp, Homo sapien
tccgcggtatcaggcacgcggcgcc

SEQ ID NO: 3265609 - DNA, 25 bp, Homo sapien
tgcgcgctccgcggtatcaggcacg

SEQ ID NO: 3265610 - DNA, 25 bp, Homo sapien
acccccaccgccgcgccgcgcgctc

SEQ ID NO: 3265611 - DNA, 25 bp, Homo sapien
ccccaccgccgcgccgcgcgctcgg

SEQ ID NO: 3265612 - DNA, 25 bp, Homo sapien
ccgacccccaccgccgcgccgcgcg

SEQ ID NO: 3265613 - DNA, 25 bp, Homo sapien
ccaccgccgcgccgcgcgctcggac

SEQ ID NO: 3265614 - DNA, 25 bp, Homo sapien
gaggactagggagccgcgggtgtgg

SEQ ID NO: 3265615 - DNA, 25 bp, Homo sapien
gcgaggactagggagccgcgggtgt

SEQ ID NO: 3265616 - DNA, 25 bp, Homo sapien
cgagccgcagccgagcagcatgctg

SEQ ID NO: 3265617 - DNA, 25 bp, Homo sapien
ccgccgctgctggcgaggactaggg

SEQ ID NO: 3265618 - DNA, 25 bp, Homo sapien
tggatctctacagtcccctggctgc

SEQ ID NO: 3265619 - DNA, 25 bp, Homo sapien
ggaccgagaccccacaagattcttc

SEQ ID NO: 3265620 - DNA, 25 bp, Homo sapien
tgcgatctcgtgtggcgagcctcct

SEQ ID NO: 3265621 - DNA, 25 bp, Homo sapien
ttcagacacaacatcattaggccag

SEQ ID NO: 3265622 - DNA, 25 bp, Homo sapien
gttaatttcgcccttggcaggaata

SEQ ID NO: 3265623 - DNA, 25 bp, Homo sapien
cccttggcaggaataagagcccatt

SEQ ID NO: 3265624 - DNA, 25 bp, Homo sapien
cgcccttggcaggaataagagccca

SEQ ID NO: 3265625 - DNA, 25 bp, Homo sapien
tttcgcccttggcaggaataagagc

SEQ ID NO: 3265626 - DNA, 25 bp, Homo sapien
tgtagagatggggttatgctttgtt

SEQ ID NO: 3265627 - DNA, 25 bp, Homo sapien
agagatggggttatgctttgttgcc

SEQ ID NO: 3265628 - DNA, 25 bp, Homo sapien
ttcaagcgaccctcctgcttcagcc

SEQ ID NO: 3265629 - DNA, 25 bp, Homo sapien
ttcactgaagtcctgaacttctggg

SEQ ID NO: 3265630 - DNA, 25 bp, Homo sapien
gagtcctttgtcatcgctcagagct

SEQ ID NO: 3265631 - DNA, 25 bp, Homo sapien
tgccctgatcttcccaggtttccga

SEQ ID NO: 3265632 - DNA, 25 bp, Homo sapien
taactagggtgcctgtgccctgatc

SEQ ID NO: 3265633 - DNA, 25 bp, Homo sapien
tctccccaagatacaataggagtcc

SEQ ID NO: 3265634 - DNA, 25 bp, Homo sapien
tcctatctgccctagcaccatcaag

SEQ ID NO: 3265635 - DNA, 25 bp, Homo sapien
tctgccctagcaccatcaagtcctg

SEQ ID NO: 3265636 - DNA, 25 bp, Homo sapien
tatctgccctagcaccatcaagtcc

SEQ ID NO: 3265637 - DNA, 25 bp, Homo sapien
tgccctagcaccatcaagtcctgtt

SEQ ID NO: 3265638 - DNA, 25 bp, Homo sapien
cagggcatgatggttccaacgcaca

SEQ ID NO: 3265639 - DNA, 25 bp, Homo sapien
ttaagtcagcaacatcaagagcaac

SEQ ID NO: 3265640 - DNA, 25 bp, Homo sapien
tggtaaatccgggaaagcttcttga

SEQ ID NO: 3265641 - DNA, 25 bp, Homo sapien
aatgcgctggtctcggcctatcaga

SEQ ID NO: 3265642 - DNA, 25 bp, Homo sapien
ggttatcaggaagcattacttcccg

SEQ ID NO: 3265643 - DNA, 25 bp, Homo sapien
gttatcaggaagcattacttcccgc

SEQ ID NO: 3265644 - DNA, 25 bp, Homo sapien
gggttatcaggaagcattacttccc

SEQ ID NO: 3265645 - DNA, 25 bp, Homo sapien
tctgcagccgttgaagccgcaggag

SEQ ID NO: 3265646 - DNA, 25 bp, Homo sapien
aattgcattttccacagtgcacgct

SEQ ID NO: 3265647 - DNA, 25 bp, Homo sapien
cagtgcacgctttgggaaggcccat

SEQ ID NO: 3265648 - DNA, 25 bp, Homo sapien
ttccacagtgcacgctttgggaagg

SEQ ID NO: 3265649 - DNA, 25 bp, Homo sapien
gcaaaccttttgaggatggctgtat

SEQ ID NO: 3265650 - DNA, 25 bp, Homo sapien
tgagcagaaaagaacgcctattggc

SEQ ID NO: 3265651 - DNA, 25 bp, Homo sapien
tctgagtctcttggttctaacacag

SEQ ID NO: 3265652 - DNA, 25 bp, Homo sapien
tcaggaaaacggcttttgcacttgt

SEQ ID NO: 3265653 - DNA, 25 bp, Homo sapien
ttagctgagctttggacatggatgg

SEQ ID NO: 3265654 - DNA, 25 bp, Homo sapien
taaaaaagctctttccatcgccggc

SEQ ID NO: 3265655 - DNA, 25 bp, Homo sapien
gccatacctcgtggttcctcaggga

SEQ ID NO: 3265656 - DNA, 25 bp, Homo sapien
tccgaaggatcagtttgcttgttcc

SEQ ID NO: 3265657 - DNA, 25 bp, Homo sapien
cgtcagtgcgagtcagcagtcctct

SEQ ID NO: 3265658 - DNA, 25 bp, Homo sapien
tgtgaaggttccagctgatgaatgg

SEQ ID NO: 3265659 - DNA, 25 bp, Homo sapien
ggttccggaaacaggtgccaagtca

SEQ ID NO: 3265660 - DNA, 25 bp, Homo sapien
ttggctcaaggtgcaaaatcttctg

SEQ ID NO: 3265661 - DNA, 25 bp, Homo sapien
gacagtatagctttttgcggagcat

SEQ ID NO: 3265662 - DNA, 25 bp, Homo sapien
tgtggcctcacatggttaataagca

SEQ ID NO: 3265663 - DNA, 25 bp, Homo sapien
tagataccgagttaatcacgttacc

SEQ ID NO: 3265664 - DNA, 25 bp, Homo sapien
ttaaatctagcacaacttaggacag

SEQ ID NO: 3265665 - DNA, 25 bp, Homo sapien
taaaacaggttagcaggctgacatc

SEQ ID NO: 3265666 - DNA, 25 bp, Homo sapien
taaggctggcgtcacatatcattcc

SEQ ID NO: 3265667 - DNA, 25 bp, Homo sapien
tacatgcgcacataccaaaagggca

SEQ ID NO: 3265668 - DNA, 25 bp, Homo sapien
gaggacctaagaaccaaactgcgag

SEQ ID NO: 3265669 - DNA, 25 bp, Homo sapien
ttattggttcagcaatttagtccca

SEQ ID NO: 3265670 - DNA, 25 bp, Homo sapien
caactcttcagctttattggttcag

SEQ ID NO: 3265671 - DNA, 25 bp, Homo sapien
ttagtcccaaattctcatgaaaaat

SEQ ID NO: 3265672 - DNA, 25 bp, Homo sapien
ggttcagcaatttagtcccaaattc

SEQ ID NO: 3265673 - DNA, 25 bp, Homo sapien
gatgttgagtagcaccctggcctct

SEQ ID NO: 3265674 - DNA, 25 bp, Homo sapien
taggaacatgatccacagagctggg

SEQ ID NO: 3265675 - DNA, 25 bp, Homo sapien
gttcagataagcgaatcatccccag

SEQ ID NO: 3265676 - DNA, 25 bp, Homo sapien
taatgacatgtttggaatccgtgac

SEQ ID NO: 3265677 - DNA, 25 bp, Homo sapien
catcctggtatgtgtcaagaagtac

SEQ ID NO: 3265678 - DNA, 25 bp, Homo sapien
aagtctctttatgaacaggtccaca

SEQ ID NO: 3265679 - DNA, 25 bp, Homo sapien
cagtttgcatggacccaagaggcac

SEQ ID NO: 3265680 - DNA, 25 bp, Homo sapien
gctgatgcagcattgaggtaagcac

SEQ ID NO: 3265681 - DNA, 25 bp, Homo sapien
tctgatcagtgctatacaatggata

SEQ ID NO: 3265682 - DNA, 25 bp, Homo sapien
gggtggtagtcagcaaacagtaata

SEQ ID NO: 3265683 - DNA, 25 bp, Homo sapien
cacacagacaaatagtggcaatact

SEQ ID NO: 3265684 - DNA, 25 bp, Homo sapien
aaagaagtcaattaggctcaaccta

SEQ ID NO: 3265685 - DNA, 25 bp, Homo sapien
gactatttcaggcataagcagtcca

SEQ ID NO: 3265686 - DNA, 25 bp, Homo sapien
tactccatgatgaattcgcaggtat

SEQ ID NO: 3265687 - DNA, 25 bp, Homo sapien
ccataatgtgacttgctgaagatca

SEQ ID NO: 3265688 - DNA, 25 bp, Homo sapien
tacagtagccttacagattctctaa

SEQ ID NO: 3265689 - DNA, 25 bp, Homo sapien
gctttgtcacggtgttcatctagtg

SEQ ID NO: 3265690 - DNA, 25 bp, Homo sapien
tccagaaacctgtctggtaaaaagc

SEQ ID NO: 3265691 - DNA, 25 bp, Homo sapien
cacggtgttcatctagtgttttaag

SEQ ID NO: 3265692 - DNA, 25 bp, Homo sapien
catcgagccaagctgagtgacagct

SEQ ID NO: 3265693 - DNA, 25 bp, Homo sapien
gacaacttctttatttggttggaca

SEQ ID NO: 3265694 - DNA, 25 bp, Homo sapien
tatgcaacagtctttcattgtaggc

SEQ ID NO: 3265695 - DNA, 25 bp, Homo sapien
tatgggattgtgaggtgtatgcaac

SEQ ID NO: 3265696 - DNA, 25 bp, Homo sapien
gaggtgtatgcaacagtctttcatt

SEQ ID NO: 3265697 - DNA, 25 bp, Homo sapien
tttgtcttcttcaccaccgttgccc

SEQ ID NO: 3265698 - DNA, 25 bp, Homo sapien
gaatattgcctattactacccatta

SEQ ID NO: 3265699 - DNA, 25 bp, Homo sapien
gcaactcccatagtccaagcttgag

SEQ ID NO: 3265700 - DNA, 25 bp, Homo sapien
aatgtgccagactttagtatgcaag

SEQ ID NO: 3265701 - DNA, 25 bp, Homo sapien
tacaaaccgcctaacaacaacataa

SEQ ID NO: 3265702 - DNA, 25 bp, Homo sapien
cgcctaacaacaacataacccacat

SEQ ID NO: 3265703 - DNA, 25 bp, Homo sapien
tcctacaaaccgcctaacaacaaca

SEQ ID NO: 3265704 - DNA, 25 bp, Homo sapien
ccgcctaacaacaacataacccaca

SEQ ID NO: 3265705 - DNA, 25 bp, Homo sapien
tcatagttccacagttgtactagcc

SEQ ID NO: 3265706 - DNA, 25 bp, Homo sapien
acagttgtactagccatcagtatta

SEQ ID NO: 3265707 - DNA, 25 bp, Homo sapien
catagttccacagttgtactagcca

SEQ ID NO: 3265708 - DNA, 25 bp, Homo sapien
tccacagttgtactagccatcagta

SEQ ID NO: 3265709 - DNA, 25 bp, Homo sapien
ggatcaatcaaatctactggaagga

SEQ ID NO: 3265710 - DNA, 25 bp, Homo sapien
tcttggcatggctagaaatacggca

SEQ ID NO: 3265711 - DNA, 25 bp, Homo sapien
tacagcttactatctgcaaagcaag

SEQ ID NO: 3265712 - DNA, 25 bp, Homo sapien
caagaggtcctgtctctaaaggatc

SEQ ID NO: 3265713 - DNA, 25 bp, Homo sapien
taaggacatctaaagaaggtgaagc

SEQ ID NO: 3265714 - DNA, 25 bp, Homo sapien
taaagtaataaggacatctaaagaa

SEQ ID NO: 3265715 - DNA, 25 bp, Homo sapien
tagcttcttatagccatttgatcca

SEQ ID NO: 3265716 - DNA, 25 bp, Homo sapien
tcttttagtagcttcttatagccat

SEQ ID NO: 3265717 - DNA, 25 bp, Homo sapien
tcattaaagccagcaattatagcac

SEQ ID NO: 3265718 - DNA, 25 bp, Homo sapien
aaaagcatctattctaccaactcga

SEQ ID NO: 3265719 - DNA, 25 bp, Homo sapien
agcatctattctaccaactcgagcc

SEQ ID NO: 3265720 - DNA, 25 bp, Homo sapien
aatgaatgaatcattaaagccagca

SEQ ID NO: 3265721 - DNA, 25 bp, Homo sapien
tgctgccaatgacatcctaactgat

SEQ ID NO: 3265722 - DNA, 25 bp, Homo sapien
ttaccatattggagcaagacacagg

SEQ ID NO: 3265723 - DNA, 25 bp, Homo sapien
gatagtatctattgtgcttcagagc

SEQ ID NO: 3265724 - DNA, 25 bp, Homo sapien
ccaacttgagttgggtgcctgttac

SEQ ID NO: 3265725 - DNA, 25 bp, Homo sapien
ttgaagactgcactccataagcatt

SEQ ID NO: 3265726 - DNA, 25 bp, Homo sapien
cataattagcacaaatcacagccag

SEQ ID NO: 3265727 - DNA, 25 bp, Homo sapien
ctgctgaatgagatgcatacacttt

SEQ ID NO: 3265728 - DNA, 25 bp, Homo sapien
gcacaaatcacagccagttcttcta

SEQ ID NO: 3265729 - DNA, 25 bp, Homo sapien
gacggtctgcatcgactcaggtgat

SEQ ID NO: 3265730 - DNA, 25 bp, Homo sapien
tatatttcaaatggttggtttccca

SEQ ID NO: 3265731 - DNA, 25 bp, Homo sapien
gagatcagaaacaggacaaagagca

SEQ ID NO: 3265732 - DNA, 25 bp, Homo sapien
tcaggtgataaagggagctccccac

SEQ ID NO: 3265733 - DNA, 25 bp, Homo sapien
caggatgtagtagaatgaatacaca

SEQ ID NO: 3265734 - DNA, 25 bp, Homo sapien
tcaggcacccttggagcaaaacagg

SEQ ID NO: 3265735 - DNA, 25 bp, Homo sapien
ctttcaggtctgtacgcagctcgtc

SEQ ID NO: 3265736 - DNA, 25 bp, Homo sapien
gaatacacagaatgcaatcaggccc

SEQ ID NO: 3265737 - DNA, 25 bp, Homo sapien
gagttagactcataccagttgccat

SEQ ID NO: 3265738 - DNA, 25 bp, Homo sapien
gacttctggtctattcgtggccata

SEQ ID NO: 3265739 - DNA, 25 bp, Homo sapien
ccataggaactacaaagcagttggc

SEQ ID NO: 3265740 - DNA, 25 bp, Homo sapien
gcagtgatcatggatttaaagcagg

SEQ ID NO: 3265741 - DNA, 25 bp, Homo sapien
aacagaaatctgttatcccgctaag

SEQ ID NO: 3265742 - DNA, 25 bp, Homo sapien
agcacccagcatccttcttgaggaa

SEQ ID NO: 3265743 - DNA, 25 bp, Homo sapien
tgttatcccgctaagcacccagcat

SEQ ID NO: 3265744 - DNA, 25 bp, Homo sapien
cccagcatccttcttgaggaaataa

SEQ ID NO: 3265745 - DNA, 25 bp, Homo sapien
ttttgttcaaaaggctagagcctgc

SEQ ID NO: 3265746 - DNA, 25 bp, Homo sapien
tggttgcacagcagaaatatcaccg

SEQ ID NO: 3265747 - DNA, 25 bp, Homo sapien
cagctttataatgtccaggaccaaa

SEQ ID NO: 3265748 - DNA, 25 bp, Homo sapien
tagagcctgcagcttttggttgcac

SEQ ID NO: 3265749 - DNA, 25 bp, Homo sapien
tcccacaccacaattgcctaagaaa

SEQ ID NO: 3265750 - DNA, 25 bp, Homo sapien
acgacgagcaaccagtgcggatgcc

SEQ ID NO: 3265751 - DNA, 25 bp, Homo sapien
tgcctaagaaattgttgctgtccat

SEQ ID NO: 3265752 - DNA, 25 bp, Homo sapien
ctgtaatgacgacgagcaaccagtg

SEQ ID NO: 3265753 - DNA, 25 bp, Homo sapien
gcaagttcatgtaaaaagagttcaa

SEQ ID NO: 3265754 - DNA, 25 bp, Homo sapien
aaaagagttcaagtgtactttcatc

SEQ ID NO: 3265755 - DNA, 25 bp, Homo sapien
ttcaagtgtactttcatcccagcca

SEQ ID NO: 3265756 - DNA, 25 bp, Homo sapien
gattgcaagttcatgtaaaaagagt

SEQ ID NO: 3265757 - DNA, 25 bp, Homo sapien
gctcgtggttcgagttagcatacag

SEQ ID NO: 3265758 - DNA, 25 bp, Homo sapien
gagacctgtgaagttccgcggaaag

SEQ ID NO: 3265759 - DNA, 25 bp, Homo sapien
gatggaggtgcgaactttgcccttt

SEQ ID NO: 3265760 - DNA, 25 bp, Homo sapien
cattatgtgttctgagtcgttgagg

SEQ ID NO: 3265761 - DNA, 25 bp, Homo sapien
catcccgaagttagaaacagcggga

SEQ ID NO: 3265762 - DNA, 25 bp, Homo sapien
ccgaagttagaaacagcgggactca

SEQ ID NO: 3265763 - DNA, 25 bp, Homo sapien
ttccgcatcccgaagttagaaacag

SEQ ID NO: 3265764 - DNA, 25 bp, Homo sapien
cgaagttagaaacagcgggactcaa

SEQ ID NO: 3265765 - DNA, 25 bp, Homo sapien
tagggcaagccaagctgagacagac

SEQ ID NO: 3265766 - DNA, 25 bp, Homo sapien
ctagggcaagccaagctgagacaga

SEQ ID NO: 3265767 - DNA, 25 bp, Homo sapien
ttgggactagtctcaagcagcgaag

SEQ ID NO: 3265768 - DNA, 25 bp, Homo sapien
tgggactagtctcaagcagcgaaga

SEQ ID NO: 3265769 - DNA, 25 bp, Homo sapien
gggactagtctcaagcagcgaagag

SEQ ID NO: 3265770 - DNA, 25 bp, Homo sapien
agcaccagcggggacgcccggcgga

SEQ ID NO: 3265771 - DNA, 25 bp, Homo sapien
gcaccagcggggacgcccggcggag

SEQ ID NO: 3265772 - DNA, 25 bp, Homo sapien
ctccagaagcagccgtatgaggtgc

SEQ ID NO: 3265773 - DNA, 25 bp, Homo sapien
cagaagcagccgtatgaggtgctca

SEQ ID NO: 3265774 - DNA, 25 bp, Homo sapien
agaagcagccgtatgaggtgctcat

SEQ ID NO: 3265775 - DNA, 25 bp, Homo sapien
ccagaagcagccgtatgaggtgctc

SEQ ID NO: 3265776 - DNA, 25 bp, Homo sapien
taagcgggagcactagctccacacg

SEQ ID NO: 3265777 - DNA, 25 bp, Homo sapien
gacacacgacggaaccagaatgcaa

SEQ ID NO: 3265778 - DNA, 25 bp, Homo sapien
gaagctctcgcggttcatgacagcg

SEQ ID NO: 3265779 - DNA, 25 bp, Homo sapien
cgcctggacggtacggcagcgcctt

SEQ ID NO: 3265780 - DNA, 25 bp, Homo sapien
tcaagtttggccattagattatact

SEQ ID NO: 3265781 - DNA, 25 bp, Homo sapien
ttggcaaacaaggtagtaggaacat

SEQ ID NO: 3265782 - DNA, 25 bp, Homo sapien
gatctggtggagaccaacttcctgt

SEQ ID NO: 3265783 - DNA, 25 bp, Homo sapien
cctgttccatgacaagcctttgatg

SEQ ID NO: 3265784 - DNA, 25 bp, Homo sapien
tgatagccactgttaccatgctgga

SEQ ID NO: 3265785 - DNA, 25 bp, Homo sapien
tatgccctaacgtagtcagctttcg

SEQ ID NO: 3265786 - DNA, 25 bp, Homo sapien
gagacatgaccacaaacgtctggtg

SEQ ID NO: 3265787 - DNA, 25 bp, Homo sapien
aaaagtcaggcagaaagtagcgccc

SEQ ID NO: 3265788 - DNA, 25 bp, Homo sapien
tataaaatagctatggcagatactg

SEQ ID NO: 3265789 - DNA, 25 bp, Homo sapien
tactgttggttgcttgtctataacc

SEQ ID NO: 3265790 - DNA, 25 bp, Homo sapien
tgcacaaacaaggagaaccattccc

SEQ ID NO: 3265791 - DNA, 25 bp, Homo sapien
catatcacctaacccagccaatggg

SEQ ID NO: 3265792 - DNA, 25 bp, Homo sapien
gaatatcgtccaagcaatgcagcac

SEQ ID NO: 3265793 - DNA, 25 bp, Homo sapien
ccatgaccagggagtacattgagtt

SEQ ID NO: 3265794 - DNA, 25 bp, Homo sapien
ggtctctgtaaatgcttggtgctgt

SEQ ID NO: 3265795 - DNA, 25 bp, Homo sapien
taataagccaatcaaacagaggaca

SEQ ID NO: 3265796 - DNA, 25 bp, Homo sapien
gacaggtgactgttgctatgcagcc

SEQ ID NO: 3265797 - DNA, 25 bp, Homo sapien
gcagattaacatccgaaaactgggc

SEQ ID NO: 3265798 - DNA, 25 bp, Homo sapien
ggtataaagcatagtggcacaaaag

SEQ ID NO: 3265799 - DNA, 25 bp, Homo sapien
tctcataactttgctatggcaccca

SEQ ID NO: 3265800 - DNA, 25 bp, Homo sapien
tccaagcaaggtcgaaggtttgccc

SEQ ID NO: 3265801 - DNA, 25 bp, Homo sapien
cccatgatctggtcaaggtcccagt

SEQ ID NO: 3265802 - DNA, 25 bp, Homo sapien
taaaggccaggatttgatctaagag

SEQ ID NO: 3265803 - DNA, 25 bp, Homo sapien
atggcttgctgactggtagggaatt

SEQ ID NO: 3265804 - DNA, 25 bp, Homo sapien
ttggattacatcatcagaaatacag

SEQ ID NO: 3265805 - DNA, 25 bp, Homo sapien
aatacaggtattgaagttctctcat

SEQ ID NO: 3265806 - DNA, 25 bp, Homo sapien
tttgttgcagaagtcttgaagccac

SEQ ID NO: 3265807 - DNA, 25 bp, Homo sapien
tggcttaggaaatttgaagctgacc

SEQ ID NO: 3265808 - DNA, 25 bp, Homo sapien
catactgttcttagagtcaggaaaa

SEQ ID NO: 3265809 - DNA, 25 bp, Homo sapien
cagtgcactgtgattgcactctgca

SEQ ID NO: 3265810 - DNA, 25 bp, Homo sapien
ccttccttagctgtgctagtgcaca

SEQ ID NO: 3265811 - DNA, 25 bp, Homo sapien
accacacctggtcaacgtttctgtt

SEQ ID NO: 3265812 - DNA, 25 bp, Homo sapien
aattaggatgcaaaacagatctgcc

SEQ ID NO: 3265813 - DNA, 25 bp, Homo sapien
gggtcctaggtcatacgttcttcaa

SEQ ID NO: 3265814 - DNA, 25 bp, Homo sapien
tcaccacttgggcttaactgggtaa

SEQ ID NO: 3265815 - DNA, 25 bp, Homo sapien
tatttgcaaaaggtctggccatacc

SEQ ID NO: 3265816 - DNA, 25 bp, Homo sapien
tgtccaagggcttacagcatagagg

SEQ ID NO: 3265817 - DNA, 25 bp, Homo sapien
ttcataccaggagtgtacattcagg

SEQ ID NO: 3265818 - DNA, 25 bp, Homo sapien
tagccagtactgttgatataagaaa

SEQ ID NO: 3265819 - DNA, 25 bp, Homo sapien
ggattactgtgagccactagccagt

SEQ ID NO: 3265820 - DNA, 25 bp, Homo sapien
gaaacattttctagctcgcaagttg

SEQ ID NO: 3265821 - DNA, 25 bp, Homo sapien
ccactaatagtgctttgagggacaa

SEQ ID NO: 3265822 - DNA, 25 bp, Homo sapien
cactaattagagtggataaagtcaa

SEQ ID NO: 3265823 - DNA, 25 bp, Homo sapien
gataaatttgttaagagtgtcagga

SEQ ID NO: 3265824 - DNA, 25 bp, Homo sapien
tatgttctgccatgttccgccttgc

SEQ ID NO: 3265825 - DNA, 25 bp, Homo sapien
cattgtaacagtagctgtcagctca

SEQ ID NO: 3265826 - DNA, 25 bp, Homo sapien
tccgccttgcatgagagatgattgc

SEQ ID NO: 3265827 - DNA, 25 bp, Homo sapien
gattgctaacctgtttcagtgtggc

SEQ ID NO: 3265828 - DNA, 25 bp, Homo sapien
taactggaatgatgctggctccctc

SEQ ID NO: 3265829 - DNA, 25 bp, Homo sapien
ttgctaactggaatgatgctggctc

SEQ ID NO: 3265830 - DNA, 25 bp, Homo sapien
gtggttaaagctcattttatcagtt

SEQ ID NO: 3265831 - DNA, 25 bp, Homo sapien
ggttaaagctcattttatcagttac

SEQ ID NO: 3265832 - DNA, 25 bp, Homo sapien
gaagctaatcttcaagataaggacc

SEQ ID NO: 3265833 - DNA, 25 bp, Homo sapien
gcacttgtcaggacttttagatccg

SEQ ID NO: 3265834 - DNA, 25 bp, Homo sapien
gagggtgagttccagcttgtttatt

SEQ ID NO: 3265835 - DNA, 25 bp, Homo sapien
gataaggaccacaaaatgctgataa

SEQ ID NO: 3265836 - DNA, 25 bp, Homo sapien
cacactggacttaaattcagctgct

SEQ ID NO: 3265837 - DNA, 25 bp, Homo sapien
cattttctgaaagtgccacactgga

SEQ ID NO: 3265838 - DNA, 25 bp, Homo sapien
ctgagctagataacaggcaggtggc

SEQ ID NO: 3265839 - DNA, 25 bp, Homo sapien
gaggtgtgcacctttctgagctaga

SEQ ID NO: 3265840 - DNA, 25 bp, Homo sapien
tggtgtagaatgctcaagtgtggcc

SEQ ID NO: 3265841 - DNA, 25 bp, Homo sapien
caaaagatgagttatacccctggac

SEQ ID NO: 3265842 - DNA, 25 bp, Homo sapien
tcagtgtggcagtggtgtacatcag

SEQ ID NO: 3265843 - DNA, 25 bp, Homo sapien
tccaggtaagttaggactgatgcct

SEQ ID NO: 3265844 - DNA, 25 bp, Homo sapien
tggttcaccgtatttgcagagagca

SEQ ID NO: 3265845 - DNA, 25 bp, Homo sapien
aaacacgaagagaaatggcattgct

SEQ ID NO: 3265846 - DNA, 25 bp, Homo sapien
cattttgatgttggtctggtggcct

SEQ ID NO: 3265847 - DNA, 25 bp, Homo sapien
tagggttgaacatattgactgcaca

SEQ ID NO: 3265848 - DNA, 25 bp, Homo sapien
acttgtagtctgttatccctgtcgc

SEQ ID NO: 3265849 - DNA, 25 bp, Homo sapien
tctttagatctctgctgtccactgt

SEQ ID NO: 3265850 - DNA, 25 bp, Homo sapien
tccctgtcgctcactgatagttcac

SEQ ID NO: 3265851 - DNA, 25 bp, Homo sapien
tccactgtggtagccactagcaaca

SEQ ID NO: 3265852 - DNA, 25 bp, Homo sapien
aattacctgtaatgtgctgatatcc

SEQ ID NO: 3265853 - DNA, 25 bp, Homo sapien
gaaccagagagcttatcaggctggc

SEQ ID NO: 3265854 - DNA, 25 bp, Homo sapien
tcaggctggcctgtttaagatccat

SEQ ID NO: 3265855 - DNA, 25 bp, Homo sapien
gatctgcctatgttgatacttgaaa

SEQ ID NO: 3265856 - DNA, 25 bp, Homo sapien
tgaacagtgtagtgctattcccacc

SEQ ID NO: 3265857 - DNA, 25 bp, Homo sapien
cacccgtaccatgcattttgagaag

SEQ ID NO: 3265858 - DNA, 25 bp, Homo sapien
taattgaccctaataccacctgtag

SEQ ID NO: 3265859 - DNA, 25 bp, Homo sapien
tagggaggataagatccccttttca

SEQ ID NO: 3265860 - DNA, 25 bp, Homo sapien
agagctcggtcttcctgcagtggca

SEQ ID NO: 3265861 - DNA, 25 bp, Homo sapien
tgcagtggcacaactacttgagtgt

SEQ ID NO: 3265862 - DNA, 25 bp, Homo sapien
caaggatggccaggcttgcattcgt

SEQ ID NO: 3265863 - DNA, 25 bp, Homo sapien
tcattcatagccaccatcggctctg

SEQ ID NO: 3265864 - DNA, 25 bp, Homo sapien
gcaggcacagttctgaaggagtgtt

SEQ ID NO: 3265865 - DNA, 25 bp, Homo sapien
ggcaggcacagttctgaaggagtgt

SEQ ID NO: 3265866 - DNA, 25 bp, Homo sapien
gatgaagtccctttgctgtctagtg

SEQ ID NO: 3265867 - DNA, 25 bp, Homo sapien
gaatgtggacacattgaattggagg

SEQ ID NO: 3265868 - DNA, 25 bp, Homo sapien
atatatccaagggtaggcgtctgct

SEQ ID NO: 3265869 - DNA, 25 bp, Homo sapien
ctttgatatatccaagggtaggcgt

SEQ ID NO: 3265870 - DNA, 25 bp, Homo sapien
agaggttggcaggatagtggacaga

SEQ ID NO: 3265871 - DNA, 25 bp, Homo sapien
aagtcgcagtatttctatgtcagcc

SEQ ID NO: 3265872 - DNA, 25 bp, Homo sapien
gggtcattaagacttaccagcacca

SEQ ID NO: 3265873 - DNA, 25 bp, Homo sapien
gcatcttgctttcatgtgcctcagg

SEQ ID NO: 3265874 - DNA, 25 bp, Homo sapien
cctcccaagtcgcagtatttctatg

SEQ ID NO: 3265875 - DNA, 25 bp, Homo sapien
cagatgggcctctattatctttagc

SEQ ID NO: 3265876 - DNA, 25 bp, Homo sapien
gggcctctattatctttagcaaaga

SEQ ID NO: 3265877 - DNA, 25 bp, Homo sapien
catcagatgggcctctattatcttt

SEQ ID NO: 3265878 - DNA, 25 bp, Homo sapien
gatgggcctctattatctttagcaa

SEQ ID NO: 3265879 - DNA, 25 bp, Homo sapien
caagttggctggccgcctacgtcca

SEQ ID NO: 3265880 - DNA, 25 bp, Homo sapien
agcccttccattgttgcgtttgatt

SEQ ID NO: 3265881 - DNA, 25 bp, Homo sapien
ggccgcctacgtccatcagaggaca

SEQ ID NO: 3265882 - DNA, 25 bp, Homo sapien
ttggctggccgcctacgtccatcag

SEQ ID NO: 3265883 - DNA, 25 bp, Homo sapien
ggagctctgctaggaagctggtggg

SEQ ID NO: 3265884 - DNA, 25 bp, Homo sapien
gcctgacactcaggtggagctctgc

SEQ ID NO: 3265885 - DNA, 25 bp, Homo sapien
ctctgcctgacactcaggtggagct

SEQ ID NO: 3265886 - DNA, 25 bp, Homo sapien
tgcctgacactcaggtggagctctg

SEQ ID NO: 3265887 - DNA, 25 bp, Homo sapien
tccgacttgtaagtcaggttgagtg

SEQ ID NO: 3265888 - DNA, 25 bp, Homo sapien
ctcctccgacttgtaagtcaggttg

SEQ ID NO: 3265889 - DNA, 25 bp, Homo sapien
cctccgacttgtaagtcaggttgag

SEQ ID NO: 3265890 - DNA, 25 bp, Homo sapien
cgacttgtaagtcaggttgagtgtg

SEQ ID NO: 3265891 - DNA, 25 bp, Homo sapien
cgggagggattgtgagccagaaact

SEQ ID NO: 3265892 - DNA, 25 bp, Homo sapien
cgtccactgaggatgatgagtaggc

SEQ ID NO: 3265893 - DNA, 25 bp, Homo sapien
ggatctgatttacccattaggaggg

SEQ ID NO: 3265894 - DNA, 25 bp, Homo sapien
caagtgagagggctacgtccactga

SEQ ID NO: 3265895 - DNA, 25 bp, Homo sapien
gattctggcaagtgtcctcaggctt

SEQ ID NO: 3265896 - DNA, 25 bp, Homo sapien
attctggcaagtgtcctcaggcttc

SEQ ID NO: 3265897 - DNA, 25 bp, Homo sapien
tttctggaaagcctttgattctggc

SEQ ID NO: 3265898 - DNA, 25 bp, Homo sapien
tggaaagcctttgattctggcaagt

SEQ ID NO: 3265899 - DNA, 25 bp, Homo sapien
tgttttctctggtccagtgacagca

SEQ ID NO: 3265900 - DNA, 25 bp, Homo sapien
agtgacagcactcaaaacctctcca

SEQ ID NO: 3265901 - DNA, 25 bp, Homo sapien
agaagagtcacctggtgagaaaaac

SEQ ID NO: 3265902 - DNA, 25 bp, Homo sapien
gaagagtcacctggtgagaaaaaca

SEQ ID NO: 3265903 - DNA, 25 bp, Homo sapien
caaaatgtccgttcttgggctgttt

SEQ ID NO: 3265904 - DNA, 25 bp, Homo sapien
atccactgcgccagcccttcggctc

SEQ ID NO: 3265905 - DNA, 25 bp, Homo sapien
ctcctggccccaaaatgtccgttct

SEQ ID NO: 3265906 - DNA, 25 bp, Homo sapien
ctggccccaaaatgtccgttcttgg

SEQ ID NO: 3265907 - DNA, 25 bp, Homo sapien
attgctttaactggggagttctaga

SEQ ID NO: 3265908 - DNA, 25 bp, Homo sapien
gctttaactggggagttctagacca

SEQ ID NO: 3265909 - DNA, 25 bp, Homo sapien
tgctttaactggggagttctagacc

SEQ ID NO: 3265910 - DNA, 25 bp, Homo sapien
ggattgctttaactggggagttcta

SEQ ID NO: 3265911 - DNA, 25 bp, Homo sapien
gctatctggcccatctgtttcccag

SEQ ID NO: 3265912 - DNA, 25 bp, Homo sapien
gaagcctcctgcacctctattgcaa

SEQ ID NO: 3265913 - DNA, 25 bp, Homo sapien
tattgcaatctctctgctatctggc

SEQ ID NO: 3265914 - DNA, 25 bp, Homo sapien
tatagcattccttccttgtgctaga

SEQ ID NO: 3265915 - DNA, 25 bp, Homo sapien
gattttcccacacggcacatggcag

SEQ ID NO: 3265916 - DNA, 25 bp, Homo sapien
gcttcactgaggactttaactggga

SEQ ID NO: 3265917 - DNA, 25 bp, Homo sapien
tatcaacaaggatgctcccctaggc

SEQ ID NO: 3265918 - DNA, 25 bp, Homo sapien
tagaggccctccagtaatcaggact

SEQ ID NO: 3265919 - DNA, 25 bp, Homo sapien
cttctagggtagattcctccaggag

SEQ ID NO: 3265920 - DNA, 25 bp, Homo sapien
ctccaggagtcctgaccgagaatct

SEQ ID NO: 3265921 - DNA, 25 bp, Homo sapien
ggagtcctgaccgagaatcttgggt

SEQ ID NO: 3265922 - DNA, 25 bp, Homo sapien
tccccttctagggtagattcctcca

SEQ ID NO: 3265923 - DNA, 25 bp, Homo sapien
agaatttaagcaccctgcccaaatc

SEQ ID NO: 3265924 - DNA, 25 bp, Homo sapien
tgatcgacacgattgttcagaagaa

SEQ ID NO: 3265925 - DNA, 25 bp, Homo sapien
gttcagaagaagacactaaaaactg

SEQ ID NO: 3265926 - DNA, 25 bp, Homo sapien
aagtctctgaggcagtggtgatcga

SEQ ID NO: 3265927 - DNA, 25 bp, Homo sapien
gagagctgggcttggttgccccatt

SEQ ID NO: 3265928 - DNA, 25 bp, Homo sapien
tgccccattcatcaatcctagcatg

SEQ ID NO: 3265929 - DNA, 25 bp, Homo sapien
gggtggccctaatttccagccagtg

SEQ ID NO: 3265930 - DNA, 25 bp, Homo sapien
ccttctcatgaactcttgaggagca

SEQ ID NO: 3265931 - DNA, 25 bp, Homo sapien
cggagtgtgggtaaaccctctgact

SEQ ID NO: 3265932 - DNA, 25 bp, Homo sapien
tgtgggtaaaccctctgacttatct

SEQ ID NO: 3265933 - DNA, 25 bp, Homo sapien
gagtgtgggtaaaccctctgactta

SEQ ID NO: 3265934 - DNA, 25 bp, Homo sapien
ggtaaaccctctgacttatctgatt

SEQ ID NO: 3265935 - DNA, 25 bp, Homo sapien
tctaggaaggagagtagtagtggcc

SEQ ID NO: 3265936 - DNA, 25 bp, Homo sapien
gaaagtccattctaaagtgtctgtg

SEQ ID NO: 3265937 - DNA, 25 bp, Homo sapien
gattctttgcatataatcatgaaag

SEQ ID NO: 3265938 - DNA, 25 bp, Homo sapien
tcttcagacctctggtctaggaagg

SEQ ID NO: 3265939 - DNA, 25 bp, Homo sapien
gtgatgatggccctggaactgctga

SEQ ID NO: 3265940 - DNA, 25 bp, Homo sapien
gggccaacccagaaactttgcagga

SEQ ID NO: 3265941 - DNA, 25 bp, Homo sapien
gctgctcttcttgacatggggccaa

SEQ ID NO: 3265942 - DNA, 25 bp, Homo sapien
caggatgctctcagatgctccagca

SEQ ID NO: 3265943 - DNA, 25 bp, Homo sapien
cactactgtgtcatacagaatggtt

SEQ ID NO: 3265944 - DNA, 25 bp, Homo sapien
actacagctcatagtttacacgagg

SEQ ID NO: 3265945 - DNA, 25 bp, Homo sapien
cactctttatgttgcatggctctgt

SEQ ID NO: 3265946 - DNA, 25 bp, Homo sapien
tagtacagagttcaacatgccctcc

SEQ ID NO: 3265947 - DNA, 25 bp, Homo sapien
gataatgcgctgtgatgtgttctgt

SEQ ID NO: 3265948 - DNA, 25 bp, Homo sapien
ccttgtgggcatgggactcaactgg

SEQ ID NO: 3265949 - DNA, 25 bp, Homo sapien
actgcacccaaaactgccattcggg

SEQ ID NO: 3265950 - DNA, 25 bp, Homo sapien
actggtgagttcagcgataatgcgc

SEQ ID NO: 3265951 - DNA, 25 bp, Homo sapien
caggcccttaacctcagttgtctta

SEQ ID NO: 3265952 - DNA, 25 bp, Homo sapien
gtgattaacataggcatgggaggca

SEQ ID NO: 3265953 - DNA, 25 bp, Homo sapien
gaagggtgtagtgattaacataggc

SEQ ID NO: 3265954 - DNA, 25 bp, Homo sapien
tggagtcaggcccttaacctcagtt

SEQ ID NO: 3265955 - DNA, 25 bp, Homo sapien
atttttgtctagtcgctactttctc

SEQ ID NO: 3265956 - DNA, 25 bp, Homo sapien
tgtctagtcgctactttctcattcc

SEQ ID NO: 3265957 - DNA, 25 bp, Homo sapien
agccaaggtgctcagtgaactttcc

SEQ ID NO: 3265958 - DNA, 25 bp, Homo sapien
catttcatgaggcagagtggttcgg

SEQ ID NO: 3265959 - DNA, 25 bp, Homo sapien
ggctttctctagctttgagcaccaa

SEQ ID NO: 3265960 - DNA, 25 bp, Homo sapien
cacttttcgtaattgagccaaggtg

SEQ ID NO: 3265961 - DNA, 25 bp, Homo sapien
aaatttccttgcactgttacatgat

SEQ ID NO: 3265962 - DNA, 25 bp, Homo sapien
cactgttacatgattcttgccacaa

SEQ ID NO: 3265963 - DNA, 25 bp, Homo sapien
tatgactcatgcgatttttacaacc

SEQ ID NO: 3265964 - DNA, 25 bp, Homo sapien
tctgaggaacatctactccaaaaat

SEQ ID NO: 3265965 - DNA, 25 bp, Homo sapien
caacagtgccaagggtccttgccag

SEQ ID NO: 3265966 - DNA, 25 bp, Homo sapien
gtgtaggcagtcctgccaaccccgt

SEQ ID NO: 3265967 - DNA, 25 bp, Homo sapien
cctggctgtctccaagagcgctggc

SEQ ID NO: 3265968 - DNA, 25 bp, Homo sapien
tttcaaagcagtgtaggcagtcctg

SEQ ID NO: 3265969 - DNA, 25 bp, Homo sapien
cttgacccttgagctggaaagaaga

SEQ ID NO: 3265970 - DNA, 25 bp, Homo sapien
ctgtcttgacccttgagctggaaag

SEQ ID NO: 3265971 - DNA, 25 bp, Homo sapien
tcttgacccttgagctggaaagaag

SEQ ID NO: 3265972 - DNA, 25 bp, Homo sapien
tgtcttgacccttgagctggaaaga

SEQ ID NO: 3265973 - DNA, 25 bp, Homo sapien
ttatccattctgaacagaatcttca

SEQ ID NO: 3265974 - DNA, 25 bp, Homo sapien
tgaacctttatccattctgaacaga

SEQ ID NO: 3265975 - DNA, 25 bp, Homo sapien
gaacctttatccattctgaacagaa

SEQ ID NO: 3265976 - DNA, 25 bp, Homo sapien
tgctgaacctttatccattctgaac

SEQ ID NO: 3265977 - DNA, 25 bp, Homo sapien
cttgagtttgcaggaaactattttg

SEQ ID NO: 3265978 - DNA, 25 bp, Homo sapien
tctgagctttttcaggcccaagtcc

SEQ ID NO: 3265979 - DNA, 25 bp, Homo sapien
gggtagaagtaaccttcagctgggc

SEQ ID NO: 3265980 - DNA, 25 bp, Homo sapien
tttattccttgtgagaaaccagcag

SEQ ID NO: 3265981 - DNA, 25 bp, Homo sapien
tcatatcgtgagctggttgcttgcc

SEQ ID NO: 3265982 - DNA, 25 bp, Homo sapien
cacagcctttgttggtcactgcggg

SEQ ID NO: 3265983 - DNA, 25 bp, Homo sapien
cgacctcggtactgggacagcagct

SEQ ID NO: 3265984 - DNA, 25 bp, Homo sapien
gagaaacagcccgtcccttctagtc

SEQ ID NO: 3265985 - DNA, 25 bp, Homo sapien
ccagttctgactgaagcggtctcca

SEQ ID NO: 3265986 - DNA, 25 bp, Homo sapien
acatgaactaagagccaggctttgc

SEQ ID NO: 3265987 - DNA, 25 bp, Homo sapien
ccacagtcaggaggggattctcatt

SEQ ID NO: 3265988 - DNA, 25 bp, Homo sapien
gaggtgactgtcctgttaagacctg

SEQ ID NO: 3265989 - DNA, 25 bp, Homo sapien
tgactgtcctgttaagacctgctcc

SEQ ID NO: 3265990 - DNA, 25 bp, Homo sapien
taaaacgtgcaagttatccaggctc

SEQ ID NO: 3265991 - DNA, 25 bp, Homo sapien
taagtacagtcgagcacacgtgtgt

SEQ ID NO: 3265992 - DNA, 25 bp, Homo sapien
tgggagccacgcctgaactagagtt

SEQ ID NO: 3265993 - DNA, 25 bp, Homo sapien
cattgtggctaaagtctaacgctcc

SEQ ID NO: 3265994 - DNA, 25 bp, Homo sapien
gctgaactccccataactaaaccca

SEQ ID NO: 3265995 - DNA, 25 bp, Homo sapien
agattaggcacccacatctggtgag

SEQ ID NO: 3265996 - DNA, 25 bp, Homo sapien
agggcataatgcaagggaaaacagg

SEQ ID NO: 3265997 - DNA, 25 bp, Homo sapien
cctcttaacgacctaattacctcat

SEQ ID NO: 3265998 - DNA, 25 bp, Homo sapien
gcaaggtctcactccatctctcagg

SEQ ID NO: 3265999 - DNA, 25 bp, Homo sapien
cagggtcgtcttgaactactggact

SEQ ID NO: 3266000 - DNA, 25 bp, Homo sapien
ttttaagagacaagaccttgccatg

SEQ ID NO: 3266001 - DNA, 25 bp, Homo sapien
gcacaggtcaccatacttggctagt

SEQ ID NO: 3266002 - DNA, 25 bp, Homo sapien
cttctggccttaagtgatctgcctg

SEQ ID NO: 3266003 - DNA, 25 bp, Homo sapien
acctccatcttctgggttcaagaaa

SEQ ID NO: 3266004 - DNA, 25 bp, Homo sapien
ggccttaagtgatctgcctgcttca

SEQ ID NO: 3266005 - DNA, 25 bp, Homo sapien
tcaagaaattctctgcctcagcctc

SEQ ID NO: 3266006 - DNA, 25 bp, Homo sapien
gaaaagattcgtatccagagttcca

SEQ ID NO: 3266007 - DNA, 25 bp, Homo sapien
tgagctatcattttactacagttga

SEQ ID NO: 3266008 - DNA, 25 bp, Homo sapien
gaaaggcttattatagtgatcagga

SEQ ID NO: 3266009 - DNA, 25 bp, Homo sapien
aatatgatcaaaacactcacagaag

SEQ ID NO: 3266010 - DNA, 25 bp, Homo sapien
catgagctgtcagttcttgcatact

SEQ ID NO: 3266011 - DNA, 25 bp, Homo sapien
gcatgagctgtcagttcttgcatac

SEQ ID NO: 3266012 - DNA, 25 bp, Homo sapien
tgcaggcttctattgttagatccac

SEQ ID NO: 3266013 - DNA, 25 bp, Homo sapien
tgataggtaagaagttgcaggcttc

SEQ ID NO: 3266014 - DNA, 25 bp, Homo sapien
tctaatgttttggttgaactatagc

SEQ ID NO: 3266015 - DNA, 25 bp, Homo sapien
aatgttttggttgaactatagctac

SEQ ID NO: 3266016 - DNA, 25 bp, Homo sapien
tttggtaaacacggtctatcataat

SEQ ID NO: 3266017 - DNA, 25 bp, Homo sapien
tggtaaacacggtctatcataatct

SEQ ID NO: 3266018 - DNA, 25 bp, Homo sapien
atcataatctaatgagttgaaatca

SEQ ID NO: 3266019 - DNA, 25 bp, Homo sapien
tgagttgaaatcatttattttgact

SEQ ID NO: 3266020 - DNA, 25 bp, Homo sapien
ctgtctttcagatagtatcgaaact

SEQ ID NO: 3266021 - DNA, 25 bp, Homo sapien
actgtctttcagatagtatcgaaac

SEQ ID NO: 3266022 - DNA, 25 bp, Homo sapien
tactgtctttcagatagtatcgaaa

SEQ ID NO: 3266023 - DNA, 25 bp, Homo sapien
atgttgagccgtagagcccatcagc

SEQ ID NO: 3266024 - DNA, 25 bp, Homo sapien
taataatgtgaaatccgcgaaagcc

SEQ ID NO: 3266025 - DNA, 25 bp, Homo sapien
tccgcgaaagcctgtgtctgtaaag

SEQ ID NO: 3266026 - DNA, 25 bp, Homo sapien
tagagcccatcagcgatagtaaagg

SEQ ID NO: 3266027 - DNA, 25 bp, Homo sapien
tttaggagaggacttctaaggagta

SEQ ID NO: 3266028 - DNA, 25 bp, Homo sapien
ctaattctgggaccggggctagact

SEQ ID NO: 3266029 - DNA, 25 bp, Homo sapien
aatgcctgttgggggtcagcgtccc

SEQ ID NO: 3266030 - DNA, 25 bp, Homo sapien
caaaaagtacagatgtatttaggag

SEQ ID NO: 3266031 - DNA, 25 bp, Homo sapien
tcaagtcaatgagccagggaaattc

SEQ ID NO: 3266032 - DNA, 25 bp, Homo sapien
ggcacttactgcaggcttctcggta

SEQ ID NO: 3266033 - DNA, 25 bp, Homo sapien
tgtgacttgctttcgccagtgggat

SEQ ID NO: 3266034 - DNA, 25 bp, Homo sapien
gatatggtgcggattaacccagctg

SEQ ID NO: 3266035 - DNA, 25 bp, Homo sapien
tgagctgcgcaaagtcagacataac

SEQ ID NO: 3266036 - DNA, 25 bp, Homo sapien
gaagtggttagactcagggccttat

SEQ ID NO: 3266037 - DNA, 25 bp, Homo sapien
tgtgtgcacacgagtttacaggaaa

SEQ ID NO: 3266038 - DNA, 25 bp, Homo sapien
gaaagaggacgttaccttcacaaga

SEQ ID NO: 3266039 - DNA, 25 bp, Homo sapien
gcacctattgatcgactcaggctgg

SEQ ID NO: 3266040 - DNA, 25 bp, Homo sapien
aggctcagcacctattgatcgactc

SEQ ID NO: 3266041 - DNA, 25 bp, Homo sapien
tcagcacctattgatcgactcaggc

SEQ ID NO: 3266042 - DNA, 25 bp, Homo sapien
acctattgatcgactcaggctggtc

SEQ ID NO: 3266043 - DNA, 25 bp, Homo sapien
gggtttccgtaagtgatgctcaagc

SEQ ID NO: 3266044 - DNA, 25 bp, Homo sapien
ctttcagtttcttgacccatggaga

SEQ ID NO: 3266045 - DNA, 25 bp, Homo sapien
actgacattcgttctggtggccaca

SEQ ID NO: 3266046 - DNA, 25 bp, Homo sapien
cctgaagaataatctgggtttccgt

SEQ ID NO: 3266047 - DNA, 25 bp, Homo sapien
tttcaattcatttccgttgtggtca

SEQ ID NO: 3266048 - DNA, 25 bp, Homo sapien
gttctaactattctagctgttttat

SEQ ID NO: 3266049 - DNA, 25 bp, Homo sapien
cccggccagtatgttctaactattc

SEQ ID NO: 3266050 - DNA, 25 bp, Homo sapien
cgttgtggtcagacaatatatgcca

SEQ ID NO: 3266051 - DNA, 25 bp, Homo sapien
gtattgagatatagctctgattcag

SEQ ID NO: 3266052 - DNA, 25 bp, Homo sapien
atacatataagcgtacattcacaca

SEQ ID NO: 3266053 - DNA, 25 bp, Homo sapien
taacttatacaactagtattgagat

SEQ ID NO: 3266054 - DNA, 25 bp, Homo sapien
atatacatataagcgtacattcaca

SEQ ID NO: 3266055 - DNA, 25 bp, Homo sapien
cattctttgcacattctagatgttg

SEQ ID NO: 3266056 - DNA, 25 bp, Homo sapien
ccttccatggattgttcctgtgctt

SEQ ID NO: 3266057 - DNA, 25 bp, Homo sapien
ctgccccttgttgtggttgattaac

SEQ ID NO: 3266058 - DNA, 25 bp, Homo sapien
tctttgacttcaagttaggttgagc

SEQ ID NO: 3266059 - DNA, 25 bp, Homo sapien
tggcaggcattcattaattagaggc

SEQ ID NO: 3266060 - DNA, 25 bp, Homo sapien
ggcattcattaattagaggccaggg

SEQ ID NO: 3266061 - DNA, 25 bp, Homo sapien
gcaatgcacaagacaaccctgcacc

SEQ ID NO: 3266062 - DNA, 25 bp, Homo sapien
caggcattcattaattagaggccag

SEQ ID NO: 3266063 - DNA, 25 bp, Homo sapien
ggagttcaagcccagcttagccaac

SEQ ID NO: 3266064 - DNA, 25 bp, Homo sapien
gttcaagcccagcttagccaacatg

SEQ ID NO: 3266065 - DNA, 25 bp, Homo sapien
gagttcaagcccagcttagccaaca

SEQ ID NO: 3266066 - DNA, 25 bp, Homo sapien
gcaaagagtagtttggacccacaat

SEQ ID NO: 3266067 - DNA, 25 bp, Homo sapien
aagtagtgcaaagagtagtttggac

SEQ ID NO: 3266068 - DNA, 25 bp, Homo sapien
gtgcaaagagtagtttggacccaca

SEQ ID NO: 3266069 - DNA, 25 bp, Homo sapien
tagtgcaaagagtagtttggaccca

SEQ ID NO: 3266070 - DNA, 25 bp, Homo sapien
caaggtgccttataactgctaggtc

SEQ ID NO: 3266071 - DNA, 25 bp, Homo sapien
aatgattcggaagcactaggaccct

SEQ ID NO: 3266072 - DNA, 25 bp, Homo sapien
taagaatccagatctgccgtagggc

SEQ ID NO: 3266073 - DNA, 25 bp, Homo sapien
taaagggatgaagcacgcactgtga

SEQ ID NO: 3266074 - DNA, 25 bp, Homo sapien
ccgggttattagttactgtgggctg

SEQ ID NO: 3266075 - DNA, 25 bp, Homo sapien
tggctccgggttattagttactgtg

SEQ ID NO: 3266076 - DNA, 25 bp, Homo sapien
gggctggtcttggtcagaggcatct

SEQ ID NO: 3266077 - DNA, 25 bp, Homo sapien
tattagttactgtgggctggtcttg

SEQ ID NO: 3266078 - DNA, 25 bp, Homo sapien
gcctgggatggtcttggagggggat

SEQ ID NO: 3266079 - DNA, 25 bp, Homo sapien
tgggatggtcttggagggggatcgc

SEQ ID NO: 3266080 - DNA, 25 bp, Homo sapien
ggatggtcttggagggggatcgctt

SEQ ID NO: 3266081 - DNA, 25 bp, Homo sapien
cctgggatggtcttggagggggatc

SEQ ID NO: 3266082 - DNA, 25 bp, Homo sapien
gagacacatgcacaacaggtgctga

SEQ ID NO: 3266083 - DNA, 25 bp, Homo sapien
ggcaactctggacccgttatctaag

SEQ ID NO: 3266084 - DNA, 25 bp, Homo sapien
tgtacaaccacacctagagactctg

SEQ ID NO: 3266085 - DNA, 25 bp, Homo sapien
ttaagaagatgccaccacatgctga

SEQ ID NO: 3266086 - DNA, 25 bp, Homo sapien
ggcttttctggatatatgcgggaat

SEQ ID NO: 3266087 - DNA, 25 bp, Homo sapien
ggccccttccagtacctacagaaga

SEQ ID NO: 3266088 - DNA, 25 bp, Homo sapien
cagaagaggtcgtggattccaacac

SEQ ID NO: 3266089 - DNA, 25 bp, Homo sapien
tatatgcgggaattcttcgggcccc

SEQ ID NO: 3266090 - DNA, 25 bp, Homo sapien
aaatgtttgagtctcccgggcctcg

SEQ ID NO: 3266091 - DNA, 25 bp, Homo sapien
tatctgctgctaacaagggaccttg

SEQ ID NO: 3266092 - DNA, 25 bp, Homo sapien
cagatggcagacattttggttgtaa

SEQ ID NO: 3266093 - DNA, 25 bp, Homo sapien
tgaaacccactttgatcctaagatt

SEQ ID NO: 3266094 - DNA, 25 bp, Homo sapien
cagctgacggtcaggctctgtgatt

SEQ ID NO: 3266095 - DNA, 25 bp, Homo sapien
ggtgtaccctcccaaagagtggaca

SEQ ID NO: 3266096 - DNA, 25 bp, Homo sapien
cttttgagatgcaacaggtgaggaa

SEQ ID NO: 3266097 - DNA, 25 bp, Homo sapien
gatggctccagacatatactttggg

SEQ ID NO: 3266098 - DNA, 25 bp, Homo sapien
aatgacgcttggctttggcaaagat

SEQ ID NO: 3266099 - DNA, 25 bp, Homo sapien
ggagaagaagggctaatgacgcttg

SEQ ID NO: 3266100 - DNA, 25 bp, Homo sapien
ccttgggtgccccatcagcaatcag

SEQ ID NO: 3266101 - DNA, 25 bp, Homo sapien
cttgggtgccccatcagcaatcaga

SEQ ID NO: 3266102 - DNA, 25 bp, Homo sapien
ggagacaccaaatggtagaaacttg

SEQ ID NO: 3266103 - DNA, 25 bp, Homo sapien
gtctctgagcagcatcgcctttgca

SEQ ID NO: 3266104 - DNA, 25 bp, Homo sapien
agcatcgcctttgcagcagcttctc

SEQ ID NO: 3266105 - DNA, 25 bp, Homo sapien
caaatggtagaaacttggtctctga

SEQ ID NO: 3266106 - DNA, 25 bp, Homo sapien
gctcttactaaacagcagtgtgggc

SEQ ID NO: 3266107 - DNA, 25 bp, Homo sapien
cttaacattagttctaacagggctg

SEQ ID NO: 3266108 - DNA, 25 bp, Homo sapien
tcagggcttacctactgaaccaaaa

SEQ ID NO: 3266109 - DNA, 25 bp, Homo sapien
gaggcagatgacaatcactgtttta

SEQ ID NO: 3266110 - DNA, 25 bp, Homo sapien
cagaatttgcatgagtgaagtttat

SEQ ID NO: 3266111 - DNA, 25 bp, Homo sapien
gaagtttattaaccagcagactatg

SEQ ID NO: 3266112 - DNA, 25 bp, Homo sapien
tgggacagaatttgcatgagtgaag

SEQ ID NO: 3266113 - DNA, 25 bp, Homo sapien
aaataaatgactatacctggcaaca

SEQ ID NO: 3266114 - DNA, 25 bp, Homo sapien
tacagctaatgagtagccaagcctg

SEQ ID NO: 3266115 - DNA, 25 bp, Homo sapien
cagtgacttccttctcaccgtggaa

SEQ ID NO: 3266116 - DNA, 25 bp, Homo sapien
tacccttttgtagccgtccgagatg

SEQ ID NO: 3266117 - DNA, 25 bp, Homo sapien
taagcccaaacagaagcaagcaggg

SEQ ID NO: 3266118 - DNA, 25 bp, Homo sapien
tcatacacctctagaaggattccca

SEQ ID NO: 3266119 - DNA, 25 bp, Homo sapien
aggattcccaccctgtgaagaccac

SEQ ID NO: 3266120 - DNA, 25 bp, Homo sapien
tctagaaggattcccaccctgtgaa

SEQ ID NO: 3266121 - DNA, 25 bp, Homo sapien
atacacctctagaaggattcccacc

SEQ ID NO: 3266122 - DNA, 25 bp, Homo sapien
atatattgctttcgctttttataaa

SEQ ID NO: 3266123 - DNA, 25 bp, Homo sapien
tatattgctttcgctttttataaat

SEQ ID NO: 3266124 - DNA, 25 bp, Homo sapien
taatatattgctttcgctttttata

SEQ ID NO: 3266125 - DNA, 25 bp, Homo sapien
aatatattgctttcgctttttataa

SEQ ID NO: 3266126 - DNA, 25 bp, Homo sapien
agtccaggcgatcaatatggatagc

SEQ ID NO: 3266127 - DNA, 25 bp, Homo sapien
caggcgatcaatatggatagcagaa

SEQ ID NO: 3266128 - DNA, 25 bp, Homo sapien
cacagtccaggcgatcaatatggat

SEQ ID NO: 3266129 - DNA, 25 bp, Homo sapien
tactgcacagtccaggcgatcaata

SEQ ID NO: 3266130 - DNA, 25 bp, Homo sapien
ctgaaggactcctcgttactgtggc

SEQ ID NO: 3266131 - DNA, 25 bp, Homo sapien
gagaagccgcaagtgcaggtaaagc

SEQ ID NO: 3266132 - DNA, 25 bp, Homo sapien
ggactcctcgttactgtggctccag

SEQ ID NO: 3266133 - DNA, 25 bp, Homo sapien
agggctgagtgcaggatagcacccc

SEQ ID NO: 3266134 - DNA, 25 bp, Homo sapien
tggagatgttattagaatggagagt

SEQ ID NO: 3266135 - DNA, 25 bp, Homo sapien
ttattagaatggagagttgagtcaa

SEQ ID NO: 3266136 - DNA, 25 bp, Homo sapien
ggagaatggagatgttattagaatg

SEQ ID NO: 3266137 - DNA, 25 bp, Homo sapien
gatgttattagaatggagagttgag

SEQ ID NO: 3266138 - DNA, 25 bp, Homo sapien
tcgattagcagggccaggttaaaaa

SEQ ID NO: 3266139 - DNA, 25 bp, Homo sapien
cctcgattagcagggccaggttaaa

SEQ ID NO: 3266140 - DNA, 25 bp, Homo sapien
cttcctcgattagcagggccaggtt

SEQ ID NO: 3266141 - DNA, 25 bp, Homo sapien
tcctcgattagcagggccaggttaa

SEQ ID NO: 3266142 - DNA, 25 bp, Homo sapien
gaatactgagtcgaataccatgtcc

SEQ ID NO: 3266143 - DNA, 25 bp, Homo sapien
cttgcacgggatcacctaagggcac

SEQ ID NO: 3266144 - DNA, 25 bp, Homo sapien
aaatatttctgtggctagggcggct

SEQ ID NO: 3266145 - DNA, 25 bp, Homo sapien
caatgactgacaacccaaggcggtg

SEQ ID NO: 3266146 - DNA, 25 bp, Homo sapien
tagaggtaagacctgtcttattggg

SEQ ID NO: 3266147 - DNA, 25 bp, Homo sapien
tccttagaggtaagacctgtcttat

SEQ ID NO: 3266148 - DNA, 25 bp, Homo sapien
tcttgatccttagaggtaagacctg

SEQ ID NO: 3266149 - DNA, 25 bp, Homo sapien
ttgttcttgatccttagaggtaaga

SEQ ID NO: 3266150 - DNA, 25 bp, Homo sapien
caggtggccagattaagaaacaagc

SEQ ID NO: 3266151 - DNA, 25 bp, Homo sapien
agcaataaacgatgtggtacttacc

SEQ ID NO: 3266152 - DNA, 25 bp, Homo sapien
taaacacagttagagggcccgacca

SEQ ID NO: 3266153 - DNA, 25 bp, Homo sapien
taaaggatgggtactattacactgc

SEQ ID NO: 3266154 - DNA, 25 bp, Homo sapien
taccagcagctcacgttttgagtgc

SEQ ID NO: 3266155 - DNA, 25 bp, Homo sapien
ttttgagtgcttgccatatgcgagg

SEQ ID NO: 3266156 - DNA, 25 bp, Homo sapien
ggacagggtgcagagtctcaaatct

SEQ ID NO: 3266157 - DNA, 25 bp, Homo sapien
tatgacacgatcacatctaatggct

SEQ ID NO: 3266158 - DNA, 25 bp, Homo sapien
gcttgggcgtacatctgcacagaca

SEQ ID NO: 3266159 - DNA, 25 bp, Homo sapien
ggccatagtagtaaaggtctcccat

SEQ ID NO: 3266160 - DNA, 25 bp, Homo sapien
tgcacagacaactccaggtcttgtg

SEQ ID NO: 3266161 - DNA, 25 bp, Homo sapien
catccagggcggcttgggcgtacat

SEQ ID NO: 3266162 - DNA, 25 bp, Homo sapien
ggaaggagcatcgatttgaaaaaca

SEQ ID NO: 3266163 - DNA, 25 bp, Homo sapien
aggagcatcgatttgaaaaacagag

SEQ ID NO: 3266164 - DNA, 25 bp, Homo sapien
cagttaacacccaagtatctcctgg

SEQ ID NO: 3266165 - DNA, 25 bp, Homo sapien
taacacccaagtatctcctggccag

SEQ ID NO: 3266166 - DNA, 25 bp, Homo sapien
aacataatacagcaaagcttcatgc

SEQ ID NO: 3266167 - DNA, 25 bp, Homo sapien
tcacagatgtgtgctaaatttgtct

SEQ ID NO: 3266168 - DNA, 25 bp, Homo sapien
gatgtgtgctaaatttgtctgtgac

SEQ ID NO: 3266169 - DNA, 25 bp, Homo sapien
aaacataatacagcaaagcttcatg

SEQ ID NO: 3266170 - DNA, 25 bp, Homo sapien
tgatgcaacagctacctctactggc

SEQ ID NO: 3266171 - DNA, 25 bp, Homo sapien
gaatccttcttgcatcctcgcttag

SEQ ID NO: 3266172 - DNA, 25 bp, Homo sapien
ctgaagggcatgtcggatgttggct

SEQ ID NO: 3266173 - DNA, 25 bp, Homo sapien
gggagttgtctactagccttcagtt

SEQ ID NO: 3266174 - DNA, 25 bp, Homo sapien
taagaatgtacataccatgtggccc

SEQ ID NO: 3266175 - DNA, 25 bp, Homo sapien
caaagattctgttgccacggagttc

SEQ ID NO: 3266176 - DNA, 25 bp, Homo sapien
tagagctgtgtatatgaatagcaac

SEQ ID NO: 3266177 - DNA, 25 bp, Homo sapien
tgtggccctacagttctcccttgtg

SEQ ID NO: 3266178 - DNA, 25 bp, Homo sapien
gcaggcaatcccttggagaccgaga

SEQ ID NO: 3266179 - DNA, 25 bp, Homo sapien
ggcaatcccttggagaccgagaggt

SEQ ID NO: 3266180 - DNA, 25 bp, Homo sapien
caggcaatcccttggagaccgagag

SEQ ID NO: 3266181 - DNA, 25 bp, Homo sapien
gcaatcccttggagaccgagaggtg

SEQ ID NO: 3266182 - DNA, 25 bp, Homo sapien
ggaggttgatactctctgcaagaac

SEQ ID NO: 3266183 - DNA, 25 bp, Homo sapien
taaaaaggcatgtgagatccataga

SEQ ID NO: 3266184 - DNA, 25 bp, Homo sapien
caggaggaagtgttacagaattctc

SEQ ID NO: 3266185 - DNA, 25 bp, Homo sapien
aacagaaatctacctctgggccgag

SEQ ID NO: 3266186 - DNA, 25 bp, Homo sapien
gaaccttaaacactgatctctcttc

SEQ ID NO: 3266187 - DNA, 25 bp, Homo sapien
tggacttccaacaatcccaggctcc

SEQ ID NO: 3266188 - DNA, 25 bp, Homo sapien
caggctcctagtcatggcagatgca

SEQ ID NO: 3266189 - DNA, 25 bp, Homo sapien
gaagaggtggcctgaaccttaaaca

SEQ ID NO: 3266190 - DNA, 25 bp, Homo sapien
ccctatgctgtctccagaccagact

SEQ ID NO: 3266191 - DNA, 25 bp, Homo sapien
aagatcccctatgctgtctccagac

SEQ ID NO: 3266192 - DNA, 25 bp, Homo sapien
tcccctatgctgtctccagaccaga

SEQ ID NO: 3266193 - DNA, 25 bp, Homo sapien
ctaagatcccctatgctgtctccag

SEQ ID NO: 3266194 - DNA, 25 bp, Homo sapien
ttttctcagctacatgttttgccca

SEQ ID NO: 3266195 - DNA, 25 bp, Homo sapien
tgcggatgacatggcccaagtagcc

SEQ ID NO: 3266196 - DNA, 25 bp, Homo sapien
cattgaggcctttgcggatgacatg

SEQ ID NO: 3266197 - DNA, 25 bp, Homo sapien
ggcccaagtagccatttttctcagc

SEQ ID NO: 3266198 - DNA, 25 bp, Homo sapien
ggtggcctaaaacagaggtcgacaa

SEQ ID NO: 3266199 - DNA, 25 bp, Homo sapien
tcaggtcaggttgaatttgaaccca

SEQ ID NO: 3266200 - DNA, 25 bp, Homo sapien
tgaacccaaatgtgttatgaagaac

SEQ ID NO: 3266201 - DNA, 25 bp, Homo sapien
caagtcagtctaagtcaagtttatc

SEQ ID NO: 3266202 - DNA, 25 bp, Homo sapien
ctatgggtcatggtttgacaactcc

SEQ ID NO: 3266203 - DNA, 25 bp, Homo sapien
agctcttggagccatacaaaacagg

SEQ ID NO: 3266204 - DNA, 25 bp, Homo sapien
taccaagctacatttcatctatggg

SEQ ID NO: 3266205 - DNA, 25 bp, Homo sapien
tataactcctcaagaatgtaaaaag

SEQ ID NO: 3266206 - DNA, 25 bp, Homo sapien
ccttcaaatgcaacgtttgacagag

SEQ ID NO: 3266207 - DNA, 25 bp, Homo sapien
aactacatgcatgtacaactggtaa

SEQ ID NO: 3266208 - DNA, 25 bp, Homo sapien
catgcatgtacaactggtaaaaata

SEQ ID NO: 3266209 - DNA, 25 bp, Homo sapien
cagagaatataggatatggctttcc

SEQ ID NO: 3266210 - DNA, 25 bp, Homo sapien
ctccaggttgcctgtgatatagtag

SEQ ID NO: 3266211 - DNA, 25 bp, Homo sapien
tagtagagagaacaccacaaggtcc

SEQ ID NO: 3266212 - DNA, 25 bp, Homo sapien
acaccacaaggtcccttccatgtgt

SEQ ID NO: 3266213 - DNA, 25 bp, Homo sapien
cctgtgatatagtagagagaacacc

SEQ ID NO: 3266214 - DNA, 25 bp, Homo sapien
tgcttcatgatcaagtgactgacta

SEQ ID NO: 3266215 - DNA, 25 bp, Homo sapien
tcaagtgactgactagttgcagagt

SEQ ID NO: 3266216 - DNA, 25 bp, Homo sapien
gtgcacacagtgtaccttcaacaaa

SEQ ID NO: 3266217 - DNA, 25 bp, Homo sapien
gactagttgcagagtgggtctcaag

SEQ ID NO: 3266218 - DNA, 25 bp, Homo sapien
gtggtaataccatcccaggccattg

SEQ ID NO: 3266219 - DNA, 25 bp, Homo sapien
gattgtatgacgcatctgggttccc

SEQ ID NO: 3266220 - DNA, 25 bp, Homo sapien
caggccattgactgcctgatgcaat

SEQ ID NO: 3266221 - DNA, 25 bp, Homo sapien
cagtactttgctgctttggcgtaat

SEQ ID NO: 3266222 - DNA, 25 bp, Homo sapien
tgcctaagtctgaacaaaaccttcc

SEQ ID NO: 3266223 - DNA, 25 bp, Homo sapien
gaaaaatgaaatctagagagctctg

SEQ ID NO: 3266224 - DNA, 25 bp, Homo sapien
ttgtggaagcattctgcctaagtct

SEQ ID NO: 3266225 - DNA, 25 bp, Homo sapien
tctggaagcaattattgtggaagca

SEQ ID NO: 3266226 - DNA, 25 bp, Homo sapien
ctctaaggcaagccgtctgttcttt

SEQ ID NO: 3266227 - DNA, 25 bp, Homo sapien
gctctaaggcaagccgtctgttctt

SEQ ID NO: 3266228 - DNA, 25 bp, Homo sapien
gattaacgcaggatcctccgtctcc

SEQ ID NO: 3266229 - DNA, 25 bp, Homo sapien
tgcttcgggattcttggccacacct

SEQ ID NO: 3266230 - DNA, 25 bp, Homo sapien
tagcacaatggcatagtcatagatt

SEQ ID NO: 3266231 - DNA, 25 bp, Homo sapien
ggcgcccttggcgtaccactcaatt

SEQ ID NO: 3266232 - DNA, 25 bp, Homo sapien
tcattaccacggtataacccagtct

SEQ ID NO: 3266233 - DNA, 25 bp, Homo sapien
tggctgacagaatccccaagacagt

SEQ ID NO: 3266234 - DNA, 25 bp, Homo sapien
taaactggcattattttaagccact

SEQ ID NO: 3266235 - DNA, 25 bp, Homo sapien
ttaagccactgcagtttgagatgtt

SEQ ID NO: 3266236 - DNA, 25 bp, Homo sapien
ctgagctgctgcattgcctcgggta

SEQ ID NO: 3266237 - DNA, 25 bp, Homo sapien
agctgctgcattgcctcgggtagct

SEQ ID NO: 3266238 - DNA, 25 bp, Homo sapien
gagctgctgcattgcctcgggtagc

SEQ ID NO: 3266239 - DNA, 25 bp, Homo sapien
tgagctgctgcattgcctcgggtag

SEQ ID NO: 3266240 - DNA, 25 bp, Homo sapien
gtttgtaccttgagtatttcatcat

SEQ ID NO: 3266241 - DNA, 25 bp, Homo sapien
tggtttgtaccttgagtatttcatc

SEQ ID NO: 3266242 - DNA, 25 bp, Homo sapien
ggtttgtaccttgagtatttcatca

SEQ ID NO: 3266243 - DNA, 25 bp, Homo sapien
tttggtttgtaccttgagtatttca

SEQ ID NO: 3266244 - DNA, 25 bp, Homo sapien
catgagcgggtgcttcagcttaaac

SEQ ID NO: 3266245 - DNA, 25 bp, Homo sapien
gaaactatagaactggccttgccag

SEQ ID NO: 3266246 - DNA, 25 bp, Homo sapien
ccagtgtgtatggagggcaacccat

SEQ ID NO: 3266247 - DNA, 25 bp, Homo sapien
gatgtcgccctctagtgagaaggtg

SEQ ID NO: 3266248 - DNA, 25 bp, Homo sapien
ggttaagtaacaagcccaacatcag

SEQ ID NO: 3266249 - DNA, 25 bp, Homo sapien
gacacagttcctaccctgcagtgat

SEQ ID NO: 3266250 - DNA, 25 bp, Homo sapien
tttgcccagccttaccatcgtgaga

SEQ ID NO: 3266251 - DNA, 25 bp, Homo sapien
gaggagtcaaatccaagccggctgg

SEQ ID NO: 3266252 - DNA, 25 bp, Homo sapien
ttacaaagatacatgtgtgcatatg

SEQ ID NO: 3266253 - DNA, 25 bp, Homo sapien
tattacaaagatacatgtgtgcata

SEQ ID NO: 3266254 - DNA, 25 bp, Homo sapien
ttctattacaaagatacatgtgtgc

SEQ ID NO: 3266255 - DNA, 25 bp, Homo sapien
tcattctattacaaagatacatgtg

SEQ ID NO: 3266256 - DNA, 25 bp, Homo sapien
ggcccagtgtctggagacaaagcaa

SEQ ID NO: 3266257 - DNA, 25 bp, Homo sapien
ggatgctgacatgcctttcattcca

SEQ ID NO: 3266258 - DNA, 25 bp, Homo sapien
gagcagctcagaagtttgtatctta

SEQ ID NO: 3266259 - DNA, 25 bp, Homo sapien
tgtatcttaatactgctgagcaagt

SEQ ID NO: 3266260 - DNA, 25 bp, Homo sapien
gaaccacgagttacgcaaaagagag

SEQ ID NO: 3266261 - DNA, 25 bp, Homo sapien
gatccaagatgactccccaggttct

SEQ ID NO: 3266262 - DNA, 25 bp, Homo sapien
tcatatgcggagtgcagctgaaacc

SEQ ID NO: 3266263 - DNA, 25 bp, Homo sapien
tattggcaaccaaacctggaggaag

SEQ ID NO: 3266264 - DNA, 25 bp, Homo sapien
gattatgttcaacctctgaaggcca

SEQ ID NO: 3266265 - DNA, 25 bp, Homo sapien
tcatgcataaatgtagggctgcccc

SEQ ID NO: 3266266 - DNA, 25 bp, Homo sapien
ttcatgaaagcaggtaaacagggcc

SEQ ID NO: 3266267 - DNA, 25 bp, Homo sapien
caccatctcatagggtattggcaca

SEQ ID NO: 3266268 - DNA, 25 bp, Homo sapien
gcatacgacagttcccagtccaggg

SEQ ID NO: 3266269 - DNA, 25 bp, Homo sapien
ggcaatgttgctgtagtaggcatac

SEQ ID NO: 3266270 - DNA, 25 bp, Homo sapien
ggtagttgtcaataccctggtagtg

SEQ ID NO: 3266271 - DNA, 25 bp, Homo sapien
tatacccaagattcattgaagacag

SEQ ID NO: 3266272 - DNA, 25 bp, Homo sapien
agatagggtcataaaatcctaacac

SEQ ID NO: 3266273 - DNA, 25 bp, Homo sapien
tcaggcccaattcctatatacaatc

SEQ ID NO: 3266274 - DNA, 25 bp, Homo sapien
cactgaaaggttgtcaggcccaatt

SEQ ID NO: 3266275 - DNA, 25 bp, Homo sapien
cgttcatgagattgtagatagggtc

SEQ ID NO: 3266276 - DNA, 25 bp, Homo sapien
tgaggtaagctacacagacggcctt

SEQ ID NO: 3266277 - DNA, 25 bp, Homo sapien
tctccactgtgaatgggcatcatcc

SEQ ID NO: 3266278 - DNA, 25 bp, Homo sapien
actctactgtgccatcgggtaccca

SEQ ID NO: 3266279 - DNA, 25 bp, Homo sapien
tcagggaacatttagcagtgcttat

SEQ ID NO: 3266280 - DNA, 25 bp, Homo sapien
tgcaacatgtccagttctaccaggg

SEQ ID NO: 3266281 - DNA, 25 bp, Homo sapien
caagaatttggtaaggagcacctgt

SEQ ID NO: 3266282 - DNA, 25 bp, Homo sapien
ccttggactggaatttatggcctca

SEQ ID NO: 3266283 - DNA, 25 bp, Homo sapien
ccccaaggcctgtctagaaatggat

SEQ ID NO: 3266284 - DNA, 25 bp, Homo sapien
tcccgaggaacatttaatccagtct

SEQ ID NO: 3266285 - DNA, 25 bp, Homo sapien
tctcataaaagactgcaaggtagta

SEQ ID NO: 3266286 - DNA, 25 bp, Homo sapien
ctgatcccgaggaacatttaatcca

SEQ ID NO: 3266287 - DNA, 25 bp, Homo sapien
caaggtagtaggatgctttatggta

SEQ ID NO: 3266288 - DNA, 25 bp, Homo sapien
ctggaatccgtcagaaaggggacga

SEQ ID NO: 3266289 - DNA, 25 bp, Homo sapien
gacgatagagctaatttggtgaaga

SEQ ID NO: 3266290 - DNA, 25 bp, Homo sapien
gaatccgtcagaaaggggacgatag

SEQ ID NO: 3266291 - DNA, 25 bp, Homo sapien
tcttcccaccgatttctgatacaga

SEQ ID NO: 3266292 - DNA, 25 bp, Homo sapien
cacacaattaattaccatgggatcg

SEQ ID NO: 3266293 - DNA, 25 bp, Homo sapien
taattaccatgggatcgatgtggct

SEQ ID NO: 3266294 - DNA, 25 bp, Homo sapien
ggatcgatgtggctttagaaaaaga

SEQ ID NO: 3266295 - DNA, 25 bp, Homo sapien
gagcacacacaattaattaccatgg

SEQ ID NO: 3266296 - DNA, 25 bp, Homo sapien
tgatatggtcggtcctgcagtgcct

SEQ ID NO: 3266297 - DNA, 25 bp, Homo sapien
tattgatatggtcggtcctgcagtg

SEQ ID NO: 3266298 - DNA, 25 bp, Homo sapien
ctgagttattgatatggtcggtcct

SEQ ID NO: 3266299 - DNA, 25 bp, Homo sapien
taaatgaaaccctttggggatgcca

SEQ ID NO: 3266300 - DNA, 25 bp, Homo sapien
taaagccagagttcacagtcaccct

SEQ ID NO: 3266301 - DNA, 25 bp, Homo sapien
gagcttacaacatgccaagtactgg

SEQ ID NO: 3266302 - DNA, 25 bp, Homo sapien
taagtactttaccacgcggatagag

SEQ ID NO: 3266303 - DNA, 25 bp, Homo sapien
gatgcacgtaccctcaatgaaaagt

SEQ ID NO: 3266304 - DNA, 25 bp, Homo sapien
gcccagtcctcatcgcatctcttct

SEQ ID NO: 3266305 - DNA, 25 bp, Homo sapien
ctcattgctccctgccacaaccaag

SEQ ID NO: 3266306 - DNA, 25 bp, Homo sapien
tgccacaaccaagagcccggactgc

SEQ ID NO: 3266307 - DNA, 25 bp, Homo sapien
accagcccagtcctcatcgcatctc

SEQ ID NO: 3266308 - DNA, 25 bp, Homo sapien
tacagatcatatgaaagcaagaact

SEQ ID NO: 3266309 - DNA, 25 bp, Homo sapien
aactatgacggctacatttctggga

SEQ ID NO: 3266310 - DNA, 25 bp, Homo sapien
ggaacctgtatatctcagcaactag

SEQ ID NO: 3266311 - DNA, 25 bp, Homo sapien
cgtggctgctttacgtcttggaacc

SEQ ID NO: 3266312 - DNA, 25 bp, Homo sapien
ctgagcaggattctggtctactgct

SEQ ID NO: 3266313 - DNA, 25 bp, Homo sapien
ctgttgacagcggaaagctggcaaa

SEQ ID NO: 3266314 - DNA, 25 bp, Homo sapien
aggattctggtctactgctgttgac

SEQ ID NO: 3266315 - DNA, 25 bp, Homo sapien
aagctggcaaacagcgtcctggtag

SEQ ID NO: 3266316 - DNA, 25 bp, Homo sapien
ctgagaaacagaacgatgttttaca

SEQ ID NO: 3266317 - DNA, 25 bp, Homo sapien
tttacagaagtgtctaccgagaaag

SEQ ID NO: 3266318 - DNA, 25 bp, Homo sapien
tgtctaccgagaaagagcagccgct

SEQ ID NO: 3266319 - DNA, 25 bp, Homo sapien
acagaacgatgttttacagaagtgt

SEQ ID NO: 3266320 - DNA, 25 bp, Homo sapien
ttgccacagtgtaggcatccccttt

SEQ ID NO: 3266321 - DNA, 25 bp, Homo sapien
gcagatggctcttctctgatgcccc

SEQ ID NO: 3266322 - DNA, 25 bp, Homo sapien
taggcatcccctttaccagaactac

SEQ ID NO: 3266323 - DNA, 25 bp, Homo sapien
tgatgccccccttgccacagtgtag

SEQ ID NO: 3266324 - DNA, 25 bp, Homo sapien
gcctaaagccgaggcaaagactcaa

SEQ ID NO: 3266325 - DNA, 25 bp, Homo sapien
ggagcctttctaaccagcgcctaaa

SEQ ID NO: 3266326 - DNA, 25 bp, Homo sapien
cagatatatcgagagttgtggacat

SEQ ID NO: 3266327 - DNA, 25 bp, Homo sapien
gcatttagtgttggaagtgtgcaca

SEQ ID NO: 3266328 - DNA, 25 bp, Homo sapien
cctggaacaagctggggtgtttgtc

SEQ ID NO: 3266329 - DNA, 25 bp, Homo sapien
ctggaacaagctggggtgtttgtct

SEQ ID NO: 3266330 - DNA, 25 bp, Homo sapien
aggctctgcacatcgagggtctccc

SEQ ID NO: 3266331 - DNA, 25 bp, Homo sapien
aaggctctgcacatcgagggtctcc

SEQ ID NO: 3266332 - DNA, 25 bp, Homo sapien
ggaggtccaggtaggagttgtggag

SEQ ID NO: 3266333 - DNA, 25 bp, Homo sapien
ctggaggtccaggtaggagttgtgg

SEQ ID NO: 3266334 - DNA, 25 bp, Homo sapien
aggtccaggtaggagttgtggaggt

SEQ ID NO: 3266335 - DNA, 25 bp, Homo sapien
tccaggtaggagttgtggaggtggc

SEQ ID NO: 3266336 - DNA, 25 bp, Homo sapien
cactacctgggaccatttcatgtga

SEQ ID NO: 3266337 - DNA, 25 bp, Homo sapien
ggaccatttcatgtgaaccctattg

SEQ ID NO: 3266338 - DNA, 25 bp, Homo sapien
ttcatgtgaaccctattggactggg

SEQ ID NO: 3266339 - DNA, 25 bp, Homo sapien
tcaccatctgtaatcactacctggg

SEQ ID NO: 3266340 - DNA, 25 bp, Homo sapien
tatccaccagtggagggctcaaggt

SEQ ID NO: 3266341 - DNA, 25 bp, Homo sapien
catctggtatctgagccaagtcata

SEQ ID NO: 3266342 - DNA, 25 bp, Homo sapien
tggtcttggtagaatccaggtggaa

SEQ ID NO: 3266343 - DNA, 25 bp, Homo sapien
aaggtcacacttgtcccatctggta

SEQ ID NO: 3266344 - DNA, 25 bp, Homo sapien
gatactatttcttgaacctcagcac

SEQ ID NO: 3266345 - DNA, 25 bp, Homo sapien
tactatttcttgaacctcagcacac

SEQ ID NO: 3266346 - DNA, 25 bp, Homo sapien
acagatactatttcttgaacctcag

SEQ ID NO: 3266347 - DNA, 25 bp, Homo sapien
cagatactatttcttgaacctcagc

SEQ ID NO: 3266348 - DNA, 25 bp, Homo sapien
ttgttcagcaagttgcttctcaagg

SEQ ID NO: 3266349 - DNA, 25 bp, Homo sapien
tgttcagcaagttgcttctcaagga

SEQ ID NO: 3266350 - DNA, 25 bp, Homo sapien
gttcagcaagttgcttctcaaggag

SEQ ID NO: 3266351 - DNA, 25 bp, Homo sapien
ccacgcttggctgatattaagcaga

SEQ ID NO: 3266352 - DNA, 25 bp, Homo sapien
ggctgtaagatatcacccatgggca

SEQ ID NO: 3266353 - DNA, 25 bp, Homo sapien
gattatgactttgcctagtgacccc

SEQ ID NO: 3266354 - DNA, 25 bp, Homo sapien
tctcaacacctagttcaaagcctgg

SEQ ID NO: 3266355 - DNA, 25 bp, Homo sapien
caataatgaagtacccagctgtgtc

SEQ ID NO: 3266356 - DNA, 25 bp, Homo sapien
gtcattataatggaaatcctcccgg

SEQ ID NO: 3266357 - DNA, 25 bp, Homo sapien
atacctgctccctccaataatgaag

SEQ ID NO: 3266358 - DNA, 25 bp, Homo sapien
gactgcgaaggcgatagtacttcag

SEQ ID NO: 3266359 - DNA, 25 bp, Homo sapien
cacagttggatcagggaaaccaggc

SEQ ID NO: 3266360 - DNA, 25 bp, Homo sapien
tatttcagaacgagggatggactgt

SEQ ID NO: 3266361 - DNA, 25 bp, Homo sapien
gacagggcaagctacccacagttgg

SEQ ID NO: 3266362 - DNA, 25 bp, Homo sapien
gcagcaacatcgaacgtctagagat

SEQ ID NO: 3266363 - DNA, 25 bp, Homo sapien
gagcttactgtctagagccttagtc

SEQ ID NO: 3266364 - DNA, 25 bp, Homo sapien
caaaaccgactgactgatgcttaca

SEQ ID NO: 3266365 - DNA, 25 bp, Homo sapien
cctcactgcctagagcttactgtct

SEQ ID NO: 3266366 - DNA, 25 bp, Homo sapien
gatgcttacagcatccgggatgctc

SEQ ID NO: 3266367 - DNA, 25 bp, Homo sapien
acaagtgtgaaaaaagcccacagca

SEQ ID NO: 3266368 - DNA, 25 bp, Homo sapien
aaattacttggtccctagggcactg

SEQ ID NO: 3266369 - DNA, 25 bp, Homo sapien
gcccacagcaaacgctaatctgcag

SEQ ID NO: 3266370 - DNA, 25 bp, Homo sapien
aaggccctctctagaaagattggca

SEQ ID NO: 3266371 - DNA, 25 bp, Homo sapien
tctgagtacggctagcttttttggt

SEQ ID NO: 3266372 - DNA, 25 bp, Homo sapien
gggcactcctgcgtctgagtacggc

SEQ ID NO: 3266373 - DNA, 25 bp, Homo sapien
tccctctgggactagctttacctct

SEQ ID NO: 3266374 - DNA, 25 bp, Homo sapien
tacctctgcttatttctctgatggg

SEQ ID NO: 3266375 - DNA, 25 bp, Homo sapien
gaattgttctatatgcccagagcct

SEQ ID NO: 3266376 - DNA, 25 bp, Homo sapien
ggctgatctgaatctacctcggtgc

SEQ ID NO: 3266377 - DNA, 25 bp, Homo sapien
gagaagatctcctagccacctgtta

SEQ ID NO: 3266378 - DNA, 25 bp, Homo sapien
tgtgaaccacctgtaaaatgccggg

SEQ ID NO: 3266379 - DNA, 25 bp, Homo sapien
caaatcatcattgggtcagagacca

SEQ ID NO: 3266380 - DNA, 25 bp, Homo sapien
gtacaaagactagctacagggcaga

SEQ ID NO: 3266381 - DNA, 25 bp, Homo sapien
aattcctaatgaaggttgccccatg

SEQ ID NO: 3266382 - DNA, 25 bp, Homo sapien
tggaataacattagggctgagggct

SEQ ID NO: 3266383 - DNA, 25 bp, Homo sapien
ctgtccaatgctagtggttactact

SEQ ID NO: 3266384 - DNA, 25 bp, Homo sapien
aaatcctgtccaatgctagtggtta

SEQ ID NO: 3266385 - DNA, 25 bp, Homo sapien
aatcctgtccaatgctagtggttac

SEQ ID NO: 3266386 - DNA, 25 bp, Homo sapien
tcctgtccaatgctagtggttacta

SEQ ID NO: 3266387 - DNA, 25 bp, Homo sapien
ctgcttaatgttacttccacaaata

SEQ ID NO: 3266388 - DNA, 25 bp, Homo sapien
tgcttaatgttacttccacaaatag

SEQ ID NO: 3266389 - DNA, 25 bp, Homo sapien
gcttaatgttacttccacaaatagt

SEQ ID NO: 3266390 - DNA, 25 bp, Homo sapien
aatgctcgtatgtcgtgtgatgaag

SEQ ID NO: 3266391 - DNA, 25 bp, Homo sapien
tccccggctttatagcaatgcttaa

SEQ ID NO: 3266392 - DNA, 25 bp, Homo sapien
gcttttgcagattttgttgctcccc

SEQ ID NO: 3266393 - DNA, 25 bp, Homo sapien
tagcaatgcttaactttaagcgaaa

SEQ ID NO: 3266394 - DNA, 25 bp, Homo sapien
ggtcttcccctttgacaagatgcat

SEQ ID NO: 3266395 - DNA, 25 bp, Homo sapien
ccttcaaaggtatgatgaatttagt

SEQ ID NO: 3266396 - DNA, 25 bp, Homo sapien
ctggcctccgttaaaagagatatcc

SEQ ID NO: 3266397 - DNA, 25 bp, Homo sapien
cagtcgaaaccactccttcaaaggt

SEQ ID NO: 3266398 - DNA, 25 bp, Homo sapien
cctcttccgtaagaaatacagaagg

SEQ ID NO: 3266399 - DNA, 25 bp, Homo sapien
ggtgtgccgtacatctcattagagt

SEQ ID NO: 3266400 - DNA, 25 bp, Homo sapien
gaaggtgtgccgtacatctcattag

SEQ ID NO: 3266401 - DNA, 25 bp, Homo sapien
aatacagaaggtgtgccgtacatct

SEQ ID NO: 3266402 - DNA, 25 bp, Homo sapien
gaatcccacagaggttggccttgca

SEQ ID NO: 3266403 - DNA, 25 bp, Homo sapien
cagaggttggccttgcaataatgga

SEQ ID NO: 3266404 - DNA, 25 bp, Homo sapien
cccacagaggttggccttgcaataa

SEQ ID NO: 3266405 - DNA, 25 bp, Homo sapien
gaggttggccttgcaataatggagt

SEQ ID NO: 3266406 - DNA, 25 bp, Homo sapien
aaacctcgggaacttcttgacaatg

SEQ ID NO: 3266407 - DNA, 25 bp, Homo sapien
atcctctggcgtcgagtggcctcca

SEQ ID NO: 3266408 - DNA, 25 bp, Homo sapien
ctctggcgtcgagtggcctccagct

SEQ ID NO: 3266409 - DNA, 25 bp, Homo sapien
acttcttgacaatgcctgtgttttc

SEQ ID NO: 3266410 - DNA, 25 bp, Homo sapien
ctggaggcataaggaaagccaagca

SEQ ID NO: 3266411 - DNA, 25 bp, Homo sapien
aggaaagccaagcagggcaaccaca

SEQ ID NO: 3266412 - DNA, 25 bp, Homo sapien
ggaaagccaagcagggcaaccacat

SEQ ID NO: 3266413 - DNA, 25 bp, Homo sapien
ggcataaggaaagccaagcagggca

SEQ ID NO: 3266414 - DNA, 25 bp, Homo sapien
ggcacacacgtgttcccaatggcta

SEQ ID NO: 3266415 - DNA, 25 bp, Homo sapien
gttcccaatggctaccgacttctca

SEQ ID NO: 3266416 - DNA, 25 bp, Homo sapien
gcagtaacacgtgcaccgggggcat

SEQ ID NO: 3266417 - DNA, 25 bp, Homo sapien
tggccgagtcgtggcacacacgtgt

SEQ ID NO: 3266418 - DNA, 25 bp, Homo sapien
tatttgtgagtaatccaggcgcgta

SEQ ID NO: 3266419 - DNA, 25 bp, Homo sapien
tccagaggacactgtggaatcctgt

SEQ ID NO: 3266420 - DNA, 25 bp, Homo sapien
caggcgcgtactatcactgcagata

SEQ ID NO: 3266421 - DNA, 25 bp, Homo sapien
tataacccatgttccactcaaggca

SEQ ID NO: 3266422 - DNA, 25 bp, Homo sapien
ggaagtctgcctacccaaagatggt

SEQ ID NO: 3266423 - DNA, 25 bp, Homo sapien
cacgggaatgctacttctgaactca

SEQ ID NO: 3266424 - DNA, 25 bp, Homo sapien
tccaaattgacaacacaaggctgag

SEQ ID NO: 3266425 - DNA, 25 bp, Homo sapien
taaagtctttgtaagccacgctctg

SEQ ID NO: 3266426 - DNA, 25 bp, Homo sapien
ctgtgcccagcccaggttttgaaat

SEQ ID NO: 3266427 - DNA, 25 bp, Homo sapien
actgtgcccagcccaggttttgaaa

SEQ ID NO: 3266428 - DNA, 25 bp, Homo sapien
ctaaaaggttccctggtggagagtg

SEQ ID NO: 3266429 - DNA, 25 bp, Homo sapien
gatctaagtcagaggataacatgaa

SEQ ID NO: 3266430 - DNA, 25 bp, Homo sapien
ggcaatgtttccttaagttaatgag

SEQ ID NO: 3266431 - DNA, 25 bp, Homo sapien
tgaatgacagctggagtacaagaga

SEQ ID NO: 3266432 - DNA, 25 bp, Homo sapien
gcatccggtggcttgtagcagacct

SEQ ID NO: 3266433 - DNA, 25 bp, Homo sapien
ttcaagaaggtgctttgaggcaccc

SEQ ID NO: 3266434 - DNA, 25 bp, Homo sapien
catggcctgtgcagaacatggtcta

SEQ ID NO: 3266435 - DNA, 25 bp, Homo sapien
tgaggcacccatgcaatgaaggaag

SEQ ID NO: 3266436 - DNA, 25 bp, Homo sapien
cacaaaaccaacactgattagcaac

SEQ ID NO: 3266437 - DNA, 25 bp, Homo sapien
catgccaggttgcattaacacaagc

SEQ ID NO: 3266438 - DNA, 25 bp, Homo sapien
ttcctggctcaagtcatgtgtgtgg

SEQ ID NO: 3266439 - DNA, 25 bp, Homo sapien
tagaaattatgagttcagagtccat

SEQ ID NO: 3266440 - DNA, 25 bp, Homo sapien
ccctgagggcacttgcatataaacc

SEQ ID NO: 3266441 - DNA, 25 bp, Homo sapien
agaaggtggcaccttggcacccacc

SEQ ID NO: 3266442 - DNA, 25 bp, Homo sapien
gacttgatcagttttgagtccccac

SEQ ID NO: 3266443 - DNA, 25 bp, Homo sapien
ctttggcacctcattggtccctggg

SEQ ID NO: 3266444 - DNA, 25 bp, Homo sapien
atcttttgctttcgaggccctctcc

SEQ ID NO: 3266445 - DNA, 25 bp, Homo sapien
tatcttttgctttcgaggccctctc

SEQ ID NO: 3266446 - DNA, 25 bp, Homo sapien
ttatcttttgctttcgaggccctct

SEQ ID NO: 3266447 - DNA, 25 bp, Homo sapien
gcctttggtgacctcagaattttct

SEQ ID NO: 3266448 - DNA, 25 bp, Homo sapien
tggcctttggtgacctcagaatttt

SEQ ID NO: 3266449 - DNA, 25 bp, Homo sapien
ggcctttggtgacctcagaattttc

SEQ ID NO: 3266450 - DNA, 25 bp, Homo sapien
ttggcctttggtgacctcagaattt

SEQ ID NO: 3266451 - DNA, 25 bp, Homo sapien
ttccggcatccgcaacttggctgga

SEQ ID NO: 3266452 - DNA, 25 bp, Homo sapien
ccactctggcggtaagcgtgttaca

SEQ ID NO: 3266453 - DNA, 25 bp, Homo sapien
cgttggcagaaaactgtccgggccg

SEQ ID NO: 3266454 - DNA, 25 bp, Homo sapien
agcgtgttacagagaactagatttc

SEQ ID NO: 3266455 - DNA, 25 bp, Homo sapien
tgggggacgccgccactcgggacca

SEQ ID NO: 3266456 - DNA, 25 bp, Homo sapien
cgctgcatggcgaggccgcccggat

SEQ ID NO: 3266457 - DNA, 25 bp, Homo sapien
gctgcatggcgaggccgcccggatc

SEQ ID NO: 3266458 - DNA, 25 bp, Homo sapien
ggccggaacaggtcacctggtgcag

SEQ ID NO: 3266459 - DNA, 25 bp, Homo sapien
gatccgggccggaacaggtcacctg

SEQ ID NO: 3266460 - DNA, 25 bp, Homo sapien
ggggccacctgccgccacctccgga

SEQ ID NO: 3266461 - DNA, 25 bp, Homo sapien
gccacctgccgccacctccggaccc

SEQ ID NO: 3266462 - DNA, 25 bp, Homo sapien
ggccacctgccgccacctccggacc

SEQ ID NO: 3266463 - DNA, 25 bp, Homo sapien
gggccacctgccgccacctccggac

SEQ ID NO: 3266464 - DNA, 25 bp, Homo sapien
cacgttctggatgtttcccgagggt

SEQ ID NO: 3266465 - DNA, 25 bp, Homo sapien
gcggcacgttctggatgtttcccga

SEQ ID NO: 3266466 - DNA, 25 bp, Homo sapien
cctgccggctggttcgcggcacgtt

SEQ ID NO: 3266467 - DNA, 25 bp, Homo sapien
tggttcgcggcacgttctggatgtt

SEQ ID NO: 3266468 - DNA, 25 bp, Homo sapien
cctggaagtgcgcaaacagcttttt

SEQ ID NO: 3266469 - DNA, 25 bp, Homo sapien
aaccaggacacatcctcggccttgg

SEQ ID NO: 3266470 - DNA, 25 bp, Homo sapien
gacgcaggttgagactggctgctct

SEQ ID NO: 3266471 - DNA, 25 bp, Homo sapien
tggctgctctccgacccgggttctg

SEQ ID NO: 3266472 - DNA, 25 bp, Homo sapien
ctggtagatttgtgcggattggaac

SEQ ID NO: 3266473 - DNA, 25 bp, Homo sapien
tagcggctccgacaactatctgggc

SEQ ID NO: 3266474 - DNA, 25 bp, Homo sapien
tccaaagttcgcagaagcttccctt

SEQ ID NO: 3266475 - DNA, 25 bp, Homo sapien
tggaactaataatagcctgggagcc

SEQ ID NO: 3266476 - DNA, 25 bp, Homo sapien
ggcatgcagaaaaccggccagagtt

SEQ ID NO: 3266477 - DNA, 25 bp, Homo sapien
cctaagtgtaggtaagcagagtgcc

SEQ ID NO: 3266478 - DNA, 25 bp, Homo sapien
tacacagattctgttggtcttcggg

SEQ ID NO: 3266479 - DNA, 25 bp, Homo sapien
cattgcagcatttctagggttgcca

SEQ ID NO: 3266480 - DNA, 25 bp, Homo sapien
gaaagggaccaattccacacctcaa

SEQ ID NO: 3266481 - DNA, 25 bp, Homo sapien
tgtcagtcattgaaagggcgtggtc

SEQ ID NO: 3266482 - DNA, 25 bp, Homo sapien
taatactccactaaaagtcgaaggc

SEQ ID NO: 3266483 - DNA, 25 bp, Homo sapien
cacacctcaacacgggaaaggacaa

SEQ ID NO: 3266484 - DNA, 25 bp, Homo sapien
gcaacccggagaggtagacactgtt

SEQ ID NO: 3266485 - DNA, 25 bp, Homo sapien
agacgtaggaaagatcccaggccca

SEQ ID NO: 3266486 - DNA, 25 bp, Homo sapien
catgtaattctcttggcaacccgga

SEQ ID NO: 3266487 - DNA, 25 bp, Homo sapien
tacagcttttcacggagaggtttct

SEQ ID NO: 3266488 - DNA, 25 bp, Homo sapien
ttaaactccaatactgctgaaccat

SEQ ID NO: 3266489 - DNA, 25 bp, Homo sapien
tccattataggtctgctttagcccc

SEQ ID NO: 3266490 - DNA, 25 bp, Homo sapien
aatccaagattgcacagtaattcaa

SEQ ID NO: 3266491 - DNA, 25 bp, Homo sapien
tcagaaatagatccattataggtct

SEQ ID NO: 3266492 - DNA, 25 bp, Homo sapien
ccgggcagttgacccctgtcagaga

SEQ ID NO: 3266493 - DNA, 25 bp, Homo sapien
ggatggtgatttctgtccgagcaga

SEQ ID NO: 3266494 - DNA, 25 bp, Homo sapien
tccgagcagaagacaccgggcagtt

SEQ ID NO: 3266495 - DNA, 25 bp, Homo sapien
tgcaacagccccagttggatggtga

SEQ ID NO: 3266496 - DNA, 25 bp, Homo sapien
ggctaggcagccaacagctattggg

SEQ ID NO: 3266497 - DNA, 25 bp, Homo sapien
aattgagtcaagatgccaaccaggg

SEQ ID NO: 3266498 - DNA, 25 bp, Homo sapien
aaccagggactctgttgaggcaaga

SEQ ID NO: 3266499 - DNA, 25 bp, Homo sapien
gcatgcagacatgagaaccgagcca

SEQ ID NO: 3266500 - DNA, 25 bp, Homo sapien
ctgttaggaaaaggacaacactcca

SEQ ID NO: 3266501 - DNA, 25 bp, Homo sapien
tgttaggaaaaggacaacactccat

SEQ ID NO: 3266502 - DNA, 25 bp, Homo sapien
gatcatcccctctgtcccacactca

SEQ ID NO: 3266503 - DNA, 25 bp, Homo sapien
tgatcatcccctctgtcccacactc

SEQ ID NO: 3266504 - DNA, 25 bp, Homo sapien
cttgtctccacattcgggcactttt

SEQ ID NO: 3266505 - DNA, 25 bp, Homo sapien
tgctgcccgtagcagccaggaattc

SEQ ID NO: 3266506 - DNA, 25 bp, Homo sapien
tgtctccacattcgggcacttttgc

SEQ ID NO: 3266507 - DNA, 25 bp, Homo sapien
agccactagctcaggcccgtgacat

SEQ ID NO: 3266508 - DNA, 25 bp, Homo sapien
tcaccttccctgatatattcagaca

SEQ ID NO: 3266509 - DNA, 25 bp, Homo sapien
tcatcaccttccctgatatattcag

SEQ ID NO: 3266510 - DNA, 25 bp, Homo sapien
tgatcacgattgtgttcatcacctt

SEQ ID NO: 3266511 - DNA, 25 bp, Homo sapien
ctctgatctctggatctgatcacga

SEQ ID NO: 3266512 - DNA, 25 bp, Homo sapien
gctgcctttgataaagcccctgtga

SEQ ID NO: 3266513 - DNA, 25 bp, Homo sapien
ttctgagcatcaaagtgtacttacc

SEQ ID NO: 3266514 - DNA, 25 bp, Homo sapien
aaatattcaataggacccatagtcc

SEQ ID NO: 3266515 - DNA, 25 bp, Homo sapien
attgggatgtcttaacaagggatca

SEQ ID NO: 3266516 - DNA, 25 bp, Homo sapien
gaaagtttcgcatcaagcactcaga

SEQ ID NO: 3266517 - DNA, 25 bp, Homo sapien
tagctgttgtaaaggtgagccctcc

SEQ ID NO: 3266518 - DNA, 25 bp, Homo sapien
tgatgactctttgtggtaccgccac

SEQ ID NO: 3266519 - DNA, 25 bp, Homo sapien
ttaagatacaatgagaagacggcca

SEQ ID NO: 3266520 - DNA, 25 bp, Homo sapien
tgacttcggctgttccagtgcccag

SEQ ID NO: 3266521 - DNA, 25 bp, Homo sapien
cagccacaccttgtgatgcagaatg

SEQ ID NO: 3266522 - DNA, 25 bp, Homo sapien
gagtgaaccatcctggacagtccaa

SEQ ID NO: 3266523 - DNA, 25 bp, Homo sapien
agttgagcatccactgtcgtaggag

SEQ ID NO: 3266524 - DNA, 25 bp, Homo sapien
cttgcaggtgcccgtgagcagggct

SEQ ID NO: 3266525 - DNA, 25 bp, Homo sapien
tgcaggtgcccgtgagcagggcttg

SEQ ID NO: 3266526 - DNA, 25 bp, Homo sapien
caggtgcccgtgagcagggcttggc

SEQ ID NO: 3266527 - DNA, 25 bp, Homo sapien
tggcttgcaggtgcccgtgagcagg

SEQ ID NO: 3266528 - DNA, 25 bp, Homo sapien
gcaatgctgaataagctaagccggt

SEQ ID NO: 3266529 - DNA, 25 bp, Homo sapien
taacattggacataggcaaacccca

SEQ ID NO: 3266530 - DNA, 25 bp, Homo sapien
taaaccctacaggtagaggtcagga

SEQ ID NO: 3266531 - DNA, 25 bp, Homo sapien
tctggctacgcagcaagagtgcatc

SEQ ID NO: 3266532 - DNA, 25 bp, Homo sapien
gaatccagggcaacaccatgaaagt

SEQ ID NO: 3266533 - DNA, 25 bp, Homo sapien
caccatgaaagtggtgtccattctc

SEQ ID NO: 3266534 - DNA, 25 bp, Homo sapien
ttactggggaatccagggcaacacc

SEQ ID NO: 3266535 - DNA, 25 bp, Homo sapien
ggtgtccattctctgagccacgtca

SEQ ID NO: 3266536 - DNA, 25 bp, Homo sapien
tggaggccgactatacttgtttcca

SEQ ID NO: 3266537 - DNA, 25 bp, Homo sapien
gaggccgactatacttgtttccaaa

SEQ ID NO: 3266538 - DNA, 25 bp, Homo sapien
gctggaggccgactatacttgtttc

SEQ ID NO: 3266539 - DNA, 25 bp, Homo sapien
cagctggaggccgactatacttgtt

SEQ ID NO: 3266540 - DNA, 25 bp, Homo sapien
cctggaagcccaacacagacagaga

SEQ ID NO: 3266541 - DNA, 25 bp, Homo sapien
ccagcagtcagtgacgggacgccta

SEQ ID NO: 3266542 - DNA, 25 bp, Homo sapien
gacagagattagaacctggagagcc

SEQ ID NO: 3266543 - DNA, 25 bp, Homo sapien
tcagtgacgggacgcctagccctgg

SEQ ID NO: 3266544 - DNA, 25 bp, Homo sapien
gcaggaggaagcctgtttcccaccc

SEQ ID NO: 3266545 - DNA, 25 bp, Homo sapien
aggaagcctgtttcccacccacaag

SEQ ID NO: 3266546 - DNA, 25 bp, Homo sapien
caacatttcagactgtttctgtggg

SEQ ID NO: 3266547 - DNA, 25 bp, Homo sapien
acatttcagactgtttctgtgggaa

SEQ ID NO: 3266548 - DNA, 25 bp, Homo sapien
gaggggctgatggggtgtagggaag

SEQ ID NO: 3266549 - DNA, 25 bp, Homo sapien
tgaggggctgatggggtgtagggaa

SEQ ID NO: 3266550 - DNA, 25 bp, Homo sapien
tggtcattcctccttcaatttcctc

SEQ ID NO: 3266551 - DNA, 25 bp, Homo sapien
ccttggttctgccaagaggttggtc

SEQ ID NO: 3266552 - DNA, 25 bp, Homo sapien
cctccttggttctgccaagaggttg

SEQ ID NO: 3266553 - DNA, 25 bp, Homo sapien
tctgccaagaggttggtcattcctc

SEQ ID NO: 3266554 - DNA, 25 bp, Homo sapien
cacatccatccctattgtcaccaga

SEQ ID NO: 3266555 - DNA, 25 bp, Homo sapien
agatcacgagttgtcttagacccca

SEQ ID NO: 3266556 - DNA, 25 bp, Homo sapien
ccagtcacatccatccctattgtca

SEQ ID NO: 3266557 - DNA, 25 bp, Homo sapien
tcaccagatcacgagttgtcttaga

SEQ ID NO: 3266558 - DNA, 25 bp, Homo sapien
cccagcctgagtctatgtgattttc

SEQ ID NO: 3266559 - DNA, 25 bp, Homo sapien
ttccaggtcacccctgaccctcctc

SEQ ID NO: 3266560 - DNA, 25 bp, Homo sapien
aagagaaccagctcgccccagcctg

SEQ ID NO: 3266561 - DNA, 25 bp, Homo sapien
ccccagcctgagtctatgtgatttt

SEQ ID NO: 3266562 - DNA, 25 bp, Homo sapien
gagcagggactctctcagacagctg

SEQ ID NO: 3266563 - DNA, 25 bp, Homo sapien
gggaaatatcttgcctatgctgaga

SEQ ID NO: 3266564 - DNA, 25 bp, Homo sapien
gaggcctggatcttgctggtgacac

SEQ ID NO: 3266565 - DNA, 25 bp, Homo sapien
tctatggacttgagattcccgaggc

SEQ ID NO: 3266566 - DNA, 25 bp, Homo sapien
gagaccaaccctggatttagcctgc

SEQ ID NO: 3266567 - DNA, 25 bp, Homo sapien
gcatcgtggatcatggtcttcaacc

SEQ ID NO: 3266568 - DNA, 25 bp, Homo sapien
tcctggtcctacagatgggtgcatc

SEQ ID NO: 3266569 - DNA, 25 bp, Homo sapien
ggttcttcacttgctaacaggcttg

SEQ ID NO: 3266570 - DNA, 25 bp, Homo sapien
gggtgggagtcttagtggcagttac

SEQ ID NO: 3266571 - DNA, 25 bp, Homo sapien
agttaccagcagaaaagctaatggg

SEQ ID NO: 3266572 - DNA, 25 bp, Homo sapien
cagttaccagcagaaaagctaatgg

SEQ ID NO: 3266573 - DNA, 25 bp, Homo sapien
gagtcttagtggcagttaccagcag

SEQ ID NO: 3266574 - DNA, 25 bp, Homo sapien
aaatgccagggttctcatgagtcca

SEQ ID NO: 3266575 - DNA, 25 bp, Homo sapien
tctgaaatgccagggttctcatgag

SEQ ID NO: 3266576 - DNA, 25 bp, Homo sapien
ctgacacacgctctgaaatgccagg

SEQ ID NO: 3266577 - DNA, 25 bp, Homo sapien
acatgccctgacacacgctctgaaa

SEQ ID NO: 3266578 - DNA, 25 bp, Homo sapien
tgtttggcagggatgttgttgttgc

SEQ ID NO: 3266579 - DNA, 25 bp, Homo sapien
ctaatctcggcactcagatgtccct

SEQ ID NO: 3266580 - DNA, 25 bp, Homo sapien
ctttcacatgctttcgatctagact

SEQ ID NO: 3266581 - DNA, 25 bp, Homo sapien
gctttcgatctagactaatctcggc

SEQ ID NO: 3266582 - DNA, 25 bp, Homo sapien
acaagggcacccattgtgctgatcc

SEQ ID NO: 3266583 - DNA, 25 bp, Homo sapien
aaaatccccaaacagtgcacaaggg

SEQ ID NO: 3266584 - DNA, 25 bp, Homo sapien
acaaaaatccccaaacagtgcacaa

SEQ ID NO: 3266585 - DNA, 25 bp, Homo sapien
cattgtgctgatcccggcactgcct

SEQ ID NO: 3266586 - DNA, 25 bp, Homo sapien
tggaaacctcttcacgagtctgcct

SEQ ID NO: 3266587 - DNA, 25 bp, Homo sapien
tctggatctgtgtataaactgttct

SEQ ID NO: 3266588 - DNA, 25 bp, Homo sapien
atctgcatacttccgtcatctctgg

SEQ ID NO: 3266589 - DNA, 25 bp, Homo sapien
tcaccagacaaccaagtccagaggt

SEQ ID NO: 3266590 - DNA, 25 bp, Homo sapien
cgctataatttggagtctgaagcct

SEQ ID NO: 3266591 - DNA, 25 bp, Homo sapien
gcatagaggctgacgcatctgaaac

SEQ ID NO: 3266592 - DNA, 25 bp, Homo sapien
tctttcagtgttgcagcatagaggc

SEQ ID NO: 3266593 - DNA, 25 bp, Homo sapien
gcaaaacgtctggtagccaagattg

SEQ ID NO: 3266594 - DNA, 25 bp, Homo sapien
tcttctgcttttaagacgctcctct

SEQ ID NO: 3266595 - DNA, 25 bp, Homo sapien
tcaggctcagggctgcggagacagg

SEQ ID NO: 3266596 - DNA, 25 bp, Homo sapien
gggcagcagcgccattcgcaaagcc

SEQ ID NO: 3266597 - DNA, 25 bp, Homo sapien
ggctgcggagacaggaatcgcagct

SEQ ID NO: 3266598 - DNA, 25 bp, Homo sapien
ggcctgggtgaacgtgccttccaga

SEQ ID NO: 3266599 - DNA, 25 bp, Homo sapien
ggagacgtccttttgtggcctgtgt

SEQ ID NO: 3266600 - DNA, 25 bp, Homo sapien
cttgtgaagtggcttcctctcggag

SEQ ID NO: 3266601 - DNA, 25 bp, Homo sapien
gaccgggcggtcaccttgtctcata

SEQ ID NO: 3266602 - DNA, 25 bp, Homo sapien
gaagggtgacatctctaacgctgtc

SEQ ID NO: 3266603 - DNA, 25 bp, Homo sapien
tacagtatcgtctccagtcctgcac

SEQ ID NO: 3266604 - DNA, 25 bp, Homo sapien
catacagtatcgtctccagtcctgc

SEQ ID NO: 3266605 - DNA, 25 bp, Homo sapien
ctacatacagtatcgtctccagtcc

SEQ ID NO: 3266606 - DNA, 25 bp, Homo sapien
accctacatacagtatcgtctccag

SEQ ID NO: 3266607 - DNA, 25 bp, Homo sapien
cttcaggtaaggaccacgctttgtc

SEQ ID NO: 3266608 - DNA, 25 bp, Homo sapien
tttgtctgattcttcggatgcacag

SEQ ID NO: 3266609 - DNA, 25 bp, Homo sapien
ctgattcttcggatgcacagcccat

SEQ ID NO: 3266610 - DNA, 25 bp, Homo sapien
taaggaccacgctttgtctgattct

SEQ ID NO: 3266611 - DNA, 25 bp, Homo sapien
tgtccccacctgaattttctatctt

SEQ ID NO: 3266612 - DNA, 25 bp, Homo sapien
gtgtccccacctgaattttctatct

SEQ ID NO: 3266613 - DNA, 25 bp, Homo sapien
gtggcttggcctctgaatctgttga

SEQ ID NO: 3266614 - DNA, 25 bp, Homo sapien
caccctctgtgtatcaagactgacc

SEQ ID NO: 3266615 - DNA, 25 bp, Homo sapien
ttgcagatgagtcgcctccagtgcc

SEQ ID NO: 3266616 - DNA, 25 bp, Homo sapien
tggtgaggcctaggaatcttggatc

SEQ ID NO: 3266617 - DNA, 25 bp, Homo sapien
cacaaggggactgccctttggctgt

SEQ ID NO: 3266618 - DNA, 25 bp, Homo sapien
tttggctgttggtcactatctgctt

SEQ ID NO: 3266619 - DNA, 25 bp, Homo sapien
tggctgttggtcactatctgcttca

SEQ ID NO: 3266620 - DNA, 25 bp, Homo sapien
actccacaaggggactgccctttgg

SEQ ID NO: 3266621 - DNA, 25 bp, Homo sapien
agatgggagcataggaaacggtgct

SEQ ID NO: 3266622 - DNA, 25 bp, Homo sapien
gggtcatccgatcagagaaatacag

SEQ ID NO: 3266623 - DNA, 25 bp, Homo sapien
cctgaaggccagagtggggtcatcc

SEQ ID NO: 3266624 - DNA, 25 bp, Homo sapien
cataggaaacggtgctgccaagaat

SEQ ID NO: 3266625 - DNA, 25 bp, Homo sapien
cttaaaggggatggaggccatataa

SEQ ID NO: 3266626 - DNA, 25 bp, Homo sapien
atggaggccatataaggagtttccc

SEQ ID NO: 3266627 - DNA, 25 bp, Homo sapien
ggggatggaggccatataaggagtt

SEQ ID NO: 3266628 - DNA, 25 bp, Homo sapien
ggatggaggccatataaggagtttc

SEQ ID NO: 3266629 - DNA, 25 bp, Homo sapien
gagaggatggggttcccaccagcct

SEQ ID NO: 3266630 - DNA, 25 bp, Homo sapien
caccagcctcgagggactgtcctgg

SEQ ID NO: 3266631 - DNA, 25 bp, Homo sapien
tctggtttgggtttgatgagacagc

SEQ ID NO: 3266632 - DNA, 25 bp, Homo sapien
ggagagcctcatgggggtagccagg

SEQ ID NO: 3266633 - DNA, 25 bp, Homo sapien
cctcttccttaggtactgggctgac

SEQ ID NO: 3266634 - DNA, 25 bp, Homo sapien
ctctctgttccgccttttcctcgcc

SEQ ID NO: 3266635 - DNA, 25 bp, Homo sapien
tcccttcctctttctacccctctga

SEQ ID NO: 3266636 - DNA, 25 bp, Homo sapien
tcctctttctacccctctgatcctc

SEQ ID NO: 3266637 - DNA, 25 bp, Homo sapien
tctctgttccgccttttcctcgccc

SEQ ID NO: 3266638 - DNA, 25 bp, Homo sapien
ctggcttcctgtatcccctccctga

SEQ ID NO: 3266639 - DNA, 25 bp, Homo sapien
ggcttcctgtatcccctccctgaga

SEQ ID NO: 3266640 - DNA, 25 bp, Homo sapien
ctgtatcccctccctgagacaccag

SEQ ID NO: 3266641 - DNA, 25 bp, Homo sapien
tcctgtatcccctccctgagacacc

SEQ ID NO: 3266642 - DNA, 25 bp, Homo sapien
caccccaatttagcaaaagcctggc

SEQ ID NO: 3266643 - DNA, 25 bp, Homo sapien
ttggatctttccctatcccgggctc

SEQ ID NO: 3266644 - DNA, 25 bp, Homo sapien
ggatctttccctatcccgggctcta

SEQ ID NO: 3266645 - DNA, 25 bp, Homo sapien
ctgctccaccccaatttagcaaaag

SEQ ID NO: 3266646 - DNA, 25 bp, Homo sapien
atggagatcatcctcatggggtcca

SEQ ID NO: 3266647 - DNA, 25 bp, Homo sapien
tggagatcatcctcatggggtccag

SEQ ID NO: 3266648 - DNA, 25 bp, Homo sapien
tgcagcacatggagatcatcctcat

SEQ ID NO: 3266649 - DNA, 25 bp, Homo sapien
agcacatggagatcatcctcatggg

SEQ ID NO: 3266650 - DNA, 25 bp, Homo sapien
ggctcagagcccagctgtcatggag

SEQ ID NO: 3266651 - DNA, 25 bp, Homo sapien
tcttctgcttgttccagctggctca

SEQ ID NO: 3266652 - DNA, 25 bp, Homo sapien
tcagagcccagctgtcatggagcat

SEQ ID NO: 3266653 - DNA, 25 bp, Homo sapien
ttctgcttgttccagctggctcaga

SEQ ID NO: 3266654 - DNA, 25 bp, Homo sapien
tcccattccatgaatttgagtcgtt

SEQ ID NO: 3266655 - DNA, 25 bp, Homo sapien
tattttatggagtgggtcccattcc

SEQ ID NO: 3266656 - DNA, 25 bp, Homo sapien
gagtcgtttgatcaggttattcccc

SEQ ID NO: 3266657 - DNA, 25 bp, Homo sapien
caagtcttttgtgaactctttagga

SEQ ID NO: 3266658 - DNA, 25 bp, Homo sapien
ccctctaacagtgtttccatctgaa

SEQ ID NO: 3266659 - DNA, 25 bp, Homo sapien
gcagaaataccttgattagggcccc

SEQ ID NO: 3266660 - DNA, 25 bp, Homo sapien
cccctctaacagtgtttccatctga

SEQ ID NO: 3266661 - DNA, 25 bp, Homo sapien
tcttcaccacccgtagggggcagaa

SEQ ID NO: 3266662 - DNA, 25 bp, Homo sapien
tgtacggctcttgaaatgaacaata

SEQ ID NO: 3266663 - DNA, 25 bp, Homo sapien
ctgagctcagcattgtctagtataa

SEQ ID NO: 3266664 - DNA, 25 bp, Homo sapien
gaacttcacacagcaatggatcaaa

SEQ ID NO: 3266665 - DNA, 25 bp, Homo sapien
aatccaaatggatggctttccgacc

SEQ ID NO: 3266666 - DNA, 25 bp, Homo sapien
taagtttatactgcctgcgaccgag

SEQ ID NO: 3266667 - DNA, 25 bp, Homo sapien
tgcgaccgagtcagcaagaaccgta

SEQ ID NO: 3266668 - DNA, 25 bp, Homo sapien
tggtgccctctgtacaggaaaaaca

SEQ ID NO: 3266669 - DNA, 25 bp, Homo sapien
catgagaggaatagttcctggtgcc

SEQ ID NO: 3266670 - DNA, 25 bp, Homo sapien
ctcattatatggaatgcccggtatg

SEQ ID NO: 3266671 - DNA, 25 bp, Homo sapien
ggtcctcattatatggaatgcccgg

SEQ ID NO: 3266672 - DNA, 25 bp, Homo sapien
gctggtcctcattatatggaatgcc

SEQ ID NO: 3266673 - DNA, 25 bp, Homo sapien
cagctggtcctcattatatggaatg

SEQ ID NO: 3266674 - DNA, 25 bp, Homo sapien
ttcttaacctgtatggaagccaaat

SEQ ID NO: 3266675 - DNA, 25 bp, Homo sapien
gttcttaacctgtatggaagccaaa

SEQ ID NO: 3266676 - DNA, 25 bp, Homo sapien
cttaacctgtatggaagccaaatct

SEQ ID NO: 3266677 - DNA, 25 bp, Homo sapien
tcttaacctgtatggaagccaaatc

SEQ ID NO: 3266678 - DNA, 25 bp, Homo sapien
atatatttactgactgcccacaagg

SEQ ID NO: 3266679 - DNA, 25 bp, Homo sapien
tcacccatatatatttactgactgc

SEQ ID NO: 3266680 - DNA, 25 bp, Homo sapien
atatatatttactgactgcccacaa

SEQ ID NO: 3266681 - DNA, 25 bp, Homo sapien
atatttactgactgcccacaaggtt

SEQ ID NO: 3266682 - DNA, 25 bp, Homo sapien
tcatagagattcagtcctgctctgg

SEQ ID NO: 3266683 - DNA, 25 bp, Homo sapien
gttcatagagattcagtcctgctct

SEQ ID NO: 3266684 - DNA, 25 bp, Homo sapien
gggttcatagagattcagtcctgct

SEQ ID NO: 3266685 - DNA, 25 bp, Homo sapien
cagagggatgcaaagggttcataga

SEQ ID NO: 3266686 - DNA, 25 bp, Homo sapien
aaggtaggtagactgggcccattgt

SEQ ID NO: 3266687 - DNA, 25 bp, Homo sapien
agatcactcgggcttgcagggcaat

SEQ ID NO: 3266688 - DNA, 25 bp, Homo sapien
tgtttaataccagcaggcaggtatg

SEQ ID NO: 3266689 - DNA, 25 bp, Homo sapien
tcactcgggcttgcagggcaatgtg

SEQ ID NO: 3266690 - DNA, 25 bp, Homo sapien
gtggctgcattataagagccttcag

SEQ ID NO: 3266691 - DNA, 25 bp, Homo sapien
tagtggctgcattataagagccttc

SEQ ID NO: 3266692 - DNA, 25 bp, Homo sapien
ggctgcattataagagccttcagca

SEQ ID NO: 3266693 - DNA, 25 bp, Homo sapien
cctttagtggctgcattataagagc

SEQ ID NO: 3266694 - DNA, 25 bp, Homo sapien
cagcataccagctgtcttcaacatt

SEQ ID NO: 3266695 - DNA, 25 bp, Homo sapien
gcataccagctgtcttcaacattgt

SEQ ID NO: 3266696 - DNA, 25 bp, Homo sapien
agcataccagctgtcttcaacattg

SEQ ID NO: 3266697 - DNA, 25 bp, Homo sapien
acagcataccagctgtcttcaacat

SEQ ID NO: 3266698 - DNA, 25 bp, Homo sapien
gagcaaatccaaggctgcctgctaa

SEQ ID NO: 3266699 - DNA, 25 bp, Homo sapien
aaaatcgccccagactgtttcagtg

SEQ ID NO: 3266700 - DNA, 25 bp, Homo sapien
tctggatccggtaagtgggaaatac

SEQ ID NO: 3266701 - DNA, 25 bp, Homo sapien
gctaagctggaggttaaaatcgccc

SEQ ID NO: 3266702 - DNA, 25 bp, Homo sapien
ggatggaactaaatgtcttgccagg

SEQ ID NO: 3266703 - DNA, 25 bp, Homo sapien
ccaggtggtagctcgtgatatatac

SEQ ID NO: 3266704 - DNA, 25 bp, Homo sapien
agctcgtgatatatacagacagccc

SEQ ID NO: 3266705 - DNA, 25 bp, Homo sapien
ggtggtagctcgtgatatatacaga

SEQ ID NO: 3266706 - DNA, 25 bp, Homo sapien
caaggggcaaggtgttacgcacctt

SEQ ID NO: 3266707 - DNA, 25 bp, Homo sapien
aggtgttacgcaccttctgggatcc

SEQ ID NO: 3266708 - DNA, 25 bp, Homo sapien
tccctctgatatgcaaggggcaagg

SEQ ID NO: 3266709 - DNA, 25 bp, Homo sapien
gggcaaggtgttacgcaccttctgg

SEQ ID NO: 3266710 - DNA, 25 bp, Homo sapien
agggacccatgcagcgtgcaccctg

SEQ ID NO: 3266711 - DNA, 25 bp, Homo sapien
ccatgcagcgtgcaccctgtggtgc

SEQ ID NO: 3266712 - DNA, 25 bp, Homo sapien
acccatgcagcgtgcaccctgtggt

SEQ ID NO: 3266713 - DNA, 25 bp, Homo sapien
ggacccatgcagcgtgcaccctgtg

SEQ ID NO: 3266714 - DNA, 25 bp, Homo sapien
taaaatatagtatgccctaccctca

SEQ ID NO: 3266715 - DNA, 25 bp, Homo sapien
tgcagggcaatgtagactagggatt

SEQ ID NO: 3266716 - DNA, 25 bp, Homo sapien
actagggatttacatgggtcaggaa

SEQ ID NO: 3266717 - DNA, 25 bp, Homo sapien
gctacaagaccattatgcagggcaa

SEQ ID NO: 3266718 - DNA, 25 bp, Homo sapien
ccaagtactttgtggacagtcttca

SEQ ID NO: 3266719 - DNA, 25 bp, Homo sapien
tcagcgagtttgaagaccattagcc

SEQ ID NO: 3266720 - DNA, 25 bp, Homo sapien
tgtggacagtcttcagcgagtttga

SEQ ID NO: 3266721 - DNA, 25 bp, Homo sapien
gaccattagcctatgtgtaatttcc

SEQ ID NO: 3266722 - DNA, 25 bp, Homo sapien
cttctttatcctgggccaaatctgc

SEQ ID NO: 3266723 - DNA, 25 bp, Homo sapien
tgactgtgtcctgatcatgacacca

SEQ ID NO: 3266724 - DNA, 25 bp, Homo sapien
gttgagataaaacagatgtcggcat

SEQ ID NO: 3266725 - DNA, 25 bp, Homo sapien
tgctgcatttgttccggagctcccc

SEQ ID NO: 3266726 - DNA, 25 bp, Homo sapien
cctccagggaattggaaagtattag

SEQ ID NO: 3266727 - DNA, 25 bp, Homo sapien
attggaaagtattagagaggaactg

SEQ ID NO: 3266728 - DNA, 25 bp, Homo sapien
cacacagccccaaagacagtactgt

SEQ ID NO: 3266729 - DNA, 25 bp, Homo sapien
tactgtgtcgtccataaacctccag

SEQ ID NO: 3266730 - DNA, 25 bp, Homo sapien
aatttgttcagtgccgggcagcaca

SEQ ID NO: 3266731 - DNA, 25 bp, Homo sapien
ttgaatttgttcagtgccgggcagc

SEQ ID NO: 3266732 - DNA, 25 bp, Homo sapien
gattgaatttgttcagtgccgggca

SEQ ID NO: 3266733 - DNA, 25 bp, Homo sapien
tgaatttgttcagtgccgggcagca

SEQ ID NO: 3266734 - DNA, 25 bp, Homo sapien
tcaccacagatcagttcgggttttg

SEQ ID NO: 3266735 - DNA, 25 bp, Homo sapien
tccagatcactcaaaagtctgtatc

SEQ ID NO: 3266736 - DNA, 25 bp, Homo sapien
tcgggttttgtatcccagccaagtg

SEQ ID NO: 3266737 - DNA, 25 bp, Homo sapien
agtctgtatccgctgcctggagcag

SEQ ID NO: 3266738 - DNA, 25 bp, Homo sapien
ctctcttctcttgggaccaggacga

SEQ ID NO: 3266739 - DNA, 25 bp, Homo sapien
gttcttcaatgcatggccttggtga

SEQ ID NO: 3266740 - DNA, 25 bp, Homo sapien
cagggctgggttcttcaatgcatgg

SEQ ID NO: 3266741 - DNA, 25 bp, Homo sapien
accaggacgaggctgcaagcctgag

SEQ ID NO: 3266742 - DNA, 25 bp, Homo sapien
tcagttgcttatcacagggacttcc

SEQ ID NO: 3266743 - DNA, 25 bp, Homo sapien
gagctgtttgagtgcccctctggca

SEQ ID NO: 3266744 - DNA, 25 bp, Homo sapien
tgtttccaaggtggcgctctcatgg

SEQ ID NO: 3266745 - DNA, 25 bp, Homo sapien
caagaagttggctggacatacagtc

SEQ ID NO: 3266746 - DNA, 25 bp, Homo sapien
gactattggattccttgaactggca

SEQ ID NO: 3266747 - DNA, 25 bp, Homo sapien
gagtttagagggactattggattcc

SEQ ID NO: 3266748 - DNA, 25 bp, Homo sapien
tggattccttgaactggcaatttct

SEQ ID NO: 3266749 - DNA, 25 bp, Homo sapien
taagtggagtttagagggactattg

SEQ ID NO: 3266750 - DNA, 25 bp, Homo sapien
cctaatatttggcacagcaatctcc

SEQ ID NO: 3266751 - DNA, 25 bp, Homo sapien
gttcctaatatttggcacagcaatc

SEQ ID NO: 3266752 - DNA, 25 bp, Homo sapien
ttcctaatatttggcacagcaatct

SEQ ID NO: 3266753 - DNA, 25 bp, Homo sapien
agttcctaatatttggcacagcaat

SEQ ID NO: 3266754 - DNA, 25 bp, Homo sapien
aaccaccaactgaatgccgtaggcc

SEQ ID NO: 3266755 - DNA, 25 bp, Homo sapien
tgaaccaccaactgaatgccgtagg

SEQ ID NO: 3266756 - DNA, 25 bp, Homo sapien
ctgaaccaccaactgaatgccgtag

SEQ ID NO: 3266757 - DNA, 25 bp, Homo sapien
ccaccaactgaatgccgtaggccat

SEQ ID NO: 3266758 - DNA, 25 bp, Homo sapien
catctagagaggaatgtggcaaaaa

SEQ ID NO: 3266759 - DNA, 25 bp, Homo sapien
tataaacaaagtctcccaaatgacc

SEQ ID NO: 3266760 - DNA, 25 bp, Homo sapien
gcaaaaatccagaaactattgtaat

SEQ ID NO: 3266761 - DNA, 25 bp, Homo sapien
aagtctcccaaatgaccatctagag

SEQ ID NO: 3266762 - DNA, 25 bp, Homo sapien
tttctctccgattccaaaagaatga

SEQ ID NO: 3266763 - DNA, 25 bp, Homo sapien
ttgtttctctccgattccaaaagaa

SEQ ID NO: 3266764 - DNA, 25 bp, Homo sapien
acttgtttctctccgattccaaaag

SEQ ID NO: 3266765 - DNA, 25 bp, Homo sapien
gtttctctccgattccaaaagaatg

SEQ ID NO: 3266766 - DNA, 25 bp, Homo sapien
tcctatatcctttcacagttatccc

SEQ ID NO: 3266767 - DNA, 25 bp, Homo sapien
tccaaatgaagtcctatatcctttc

SEQ ID NO: 3266768 - DNA, 25 bp, Homo sapien
atcactccaaatgaagtcctatatc

SEQ ID NO: 3266769 - DNA, 25 bp, Homo sapien
gaagtcctatatcctttcacagtta

SEQ ID NO: 3266770 - DNA, 25 bp, Homo sapien
tattctgagggtaaaatttaggcca

SEQ ID NO: 3266771 - DNA, 25 bp, Homo sapien
aaatttaggccacatgtttggaaag

SEQ ID NO: 3266772 - DNA, 25 bp, Homo sapien
tgagggtaaaatttaggccacatgt

SEQ ID NO: 3266773 - DNA, 25 bp, Homo sapien
taaaatttaggccacatgtttggaa

SEQ ID NO: 3266774 - DNA, 25 bp, Homo sapien
tggtctggactaggccatgactgaa

SEQ ID NO: 3266775 - DNA, 25 bp, Homo sapien
caagggctttgtcctcctcctgagc

SEQ ID NO: 3266776 - DNA, 25 bp, Homo sapien
tgtggttaccatggcttcccaaggt

SEQ ID NO: 3266777 - DNA, 25 bp, Homo sapien
tccaaggaatatgtgccccaagggc

SEQ ID NO: 3266778 - DNA, 25 bp, Homo sapien
tgcccgcattgggtacatgcgcagt

SEQ ID NO: 3266779 - DNA, 25 bp, Homo sapien
tgtctgagccgagtagtggaaggcg

SEQ ID NO: 3266780 - DNA, 25 bp, Homo sapien
tcccacggccgtgttgtgtctgagc

SEQ ID NO: 3266781 - DNA, 25 bp, Homo sapien
tgtagcgtgagactggactgcccgc

SEQ ID NO: 3266782 - DNA, 25 bp, Homo sapien
cgggcggcgaattccagttctccgg

SEQ ID NO: 3266783 - DNA, 25 bp, Homo sapien
tttcgggcggcgaattccagttctc

SEQ ID NO: 3266784 - DNA, 25 bp, Homo sapien
caggtttcgggcggcgaattccagt

SEQ ID NO: 3266785 - DNA, 25 bp, Homo sapien
tcaacaggtttcgggcggcgaattc

SEQ ID NO: 3266786 - DNA, 25 bp, Homo sapien
gaggcagtgctggatctgggaatct

SEQ ID NO: 3266787 - DNA, 25 bp, Homo sapien
ctgcgggaggcagtgctggatctgg

SEQ ID NO: 3266788 - DNA, 25 bp, Homo sapien
ggaggcagtgctggatctgggaatc

SEQ ID NO: 3266789 - DNA, 25 bp, Homo sapien
cgggaggcagtgctggatctgggaa

SEQ ID NO: 3266790 - DNA, 25 bp, Homo sapien
tgtttcatctaggcctgtgaaacgc

SEQ ID NO: 3266791 - DNA, 25 bp, Homo sapien
ggtgtttcatctaggcctgtgaaac

SEQ ID NO: 3266792 - DNA, 25 bp, Homo sapien
gtgtttcatctaggcctgtgaaacg

SEQ ID NO: 3266793 - DNA, 25 bp, Homo sapien
cggataaccggagcgctccccatgg

SEQ ID NO: 3266794 - DNA, 25 bp, Homo sapien
atggaccacacggagggctcgcccg

SEQ ID NO: 3266795 - DNA, 25 bp, Homo sapien
tccattcctcgtccccgtagtaatc

SEQ ID NO: 3266796 - DNA, 25 bp, Homo sapien
gtacgtccctcaaagcgcgtcctaa

SEQ ID NO: 3266797 - DNA, 25 bp, Homo sapien
cagggaaggcagcgagcaggatccc

SEQ ID NO: 3266798 - DNA, 25 bp, Homo sapien
ttccagggaaggcagcgagcaggat

SEQ ID NO: 3266799 - DNA, 25 bp, Homo sapien
ccagggaaggcagcgagcaggatcc

SEQ ID NO: 3266800 - DNA, 25 bp, Homo sapien
tccagggaaggcagcgagcaggatc

SEQ ID NO: 3266801 - DNA, 25 bp, Homo sapien
acactcttgtcgttagcccagtgac

SEQ ID NO: 3266802 - DNA, 25 bp, Homo sapien
gttgtgccacactcttgtcgttagc

SEQ ID NO: 3266803 - DNA, 25 bp, Homo sapien
ttgtttcgccgccttgggcgctttg

SEQ ID NO: 3266804 - DNA, 25 bp, Homo sapien
ggcgctttgtccgacccgtggcgtc

SEQ ID NO: 3266805 - DNA, 25 bp, Homo sapien
tgatttatccacaacccacggtgta

SEQ ID NO: 3266806 - DNA, 25 bp, Homo sapien
cttcctctcccgtcatcggttgatt

SEQ ID NO: 3266807 - DNA, 25 bp, Homo sapien
cacggtgtacgtctgctgaactgtc

SEQ ID NO: 3266808 - DNA, 25 bp, Homo sapien
ccatccacgggcttattctctcggc

SEQ ID NO: 3266809 - DNA, 25 bp, Homo sapien
gcatgtaaatgcgtacataatcttt

SEQ ID NO: 3266810 - DNA, 25 bp, Homo sapien
tttagatggctattgaatgcatgta

SEQ ID NO: 3266811 - DNA, 25 bp, Homo sapien
atctgtccttctgttggtcctcctt

SEQ ID NO: 3266812 - DNA, 25 bp, Homo sapien
cccagcctgtttagtgtttgatgca

SEQ ID NO: 3266813 - DNA, 25 bp, Homo sapien
tggagtgttgctctattggtaggct

SEQ ID NO: 3266814 - DNA, 25 bp, Homo sapien
gagtgttgctctattggtaggctgg

SEQ ID NO: 3266815 - DNA, 25 bp, Homo sapien
atggagtgttgctctattggtaggc

SEQ ID NO: 3266816 - DNA, 25 bp, Homo sapien
ggagtgttgctctattggtaggctg

SEQ ID NO: 3266817 - DNA, 25 bp, Homo sapien
taccagcacgtttgtatgttgtcaa

SEQ ID NO: 3266818 - DNA, 25 bp, Homo sapien
tgaagtgacggagacaaaaacctaa

SEQ ID NO: 3266819 - DNA, 25 bp, Homo sapien
gaaagtgtagctggctagtccaaca

SEQ ID NO: 3266820 - DNA, 25 bp, Homo sapien
ctacatttagctgcgtggagggaac

SEQ ID NO: 3266821 - DNA, 25 bp, Homo sapien
tttatcactcagagtggagcgcagt

SEQ ID NO: 3266822 - DNA, 25 bp, Homo sapien
ttaatggcaggaactcattttatca

SEQ ID NO: 3266823 - DNA, 25 bp, Homo sapien
gcatgtgacatcatggcccacgaat

SEQ ID NO: 3266824 - DNA, 25 bp, Homo sapien
catcatggcccacgaatttttaaaa

SEQ ID NO: 3266825 - DNA, 25 bp, Homo sapien
tgtatctacacatggtggaataggg

SEQ ID NO: 3266826 - DNA, 25 bp, Homo sapien
tctctatatagtgggagtttacctt

SEQ ID NO: 3266827 - DNA, 25 bp, Homo sapien
taatgtatactcctgcagccttgtc

SEQ ID NO: 3266828 - DNA, 25 bp, Homo sapien
tgagagctgtgcctttatgacctaa

SEQ ID NO: 3266829 - DNA, 25 bp, Homo sapien
gctactgtgccctgccacagtattc

SEQ ID NO: 3266830 - DNA, 25 bp, Homo sapien
agctactgtgccctgccacagtatt

SEQ ID NO: 3266831 - DNA, 25 bp, Homo sapien
taagctactgtgccctgccacagta

SEQ ID NO: 3266832 - DNA, 25 bp, Homo sapien
tactgtgccctgccacagtattctt

SEQ ID NO: 3266833 - DNA, 25 bp, Homo sapien
tataggtgtgtaccatatggcccga

SEQ ID NO: 3266834 - DNA, 25 bp, Homo sapien
gccaaggtaggattgcatgtgtcca

SEQ ID NO: 3266835 - DNA, 25 bp, Homo sapien
ttctcttgtatagggtagagggcag

SEQ ID NO: 3266836 - DNA, 25 bp, Homo sapien
tctgaagttaaatacatcccatctg

SEQ ID NO: 3266837 - DNA, 25 bp, Homo sapien
agacgggttgtcaccatatttgtca

SEQ ID NO: 3266838 - DNA, 25 bp, Homo sapien
ggaactataggcactcaccactata

SEQ ID NO: 3266839 - DNA, 25 bp, Homo sapien
atttttttgttgagaccgattcttg

SEQ ID NO: 3266840 - DNA, 25 bp, Homo sapien
ataggcactcaccactatacctggc

SEQ ID NO: 3266841 - DNA, 25 bp, Homo sapien
tcttgccgatcctggttcaggcctt

SEQ ID NO: 3266842 - DNA, 25 bp, Homo sapien
agttgcaaaggcgtaaggcgtgagg

SEQ ID NO: 3266843 - DNA, 25 bp, Homo sapien
tcaggcctttttgaagagttgcaaa

SEQ ID NO: 3266844 - DNA, 25 bp, Homo sapien
tgtcttctttcttgccgatcctggt

SEQ ID NO: 3266845 - DNA, 25 bp, Homo sapien
gagaacgcctagtccaagttggcct

SEQ ID NO: 3266846 - DNA, 25 bp, Homo sapien
gacaatcattagcacagataaggca

SEQ ID NO: 3266847 - DNA, 25 bp, Homo sapien
tagcacagataaggcagagtataca

SEQ ID NO: 3266848 - DNA, 25 bp, Homo sapien
ttttatgagggaatgggccctgtcc

SEQ ID NO: 3266849 - DNA, 25 bp, Homo sapien
aatgcttgaacttacaggacagaat

SEQ ID NO: 3266850 - DNA, 25 bp, Homo sapien
atgcttgaacttacaggacagaatt

SEQ ID NO: 3266851 - DNA, 25 bp, Homo sapien
ttggagatgggtccggcaaccagtc

SEQ ID NO: 3266852 - DNA, 25 bp, Homo sapien
ttcgagccaattcaagccaggtgcc

SEQ ID NO: 3266853 - DNA, 25 bp, Homo sapien
cacaaacagcgagggaagttacaca

SEQ ID NO: 3266854 - DNA, 25 bp, Homo sapien
cagcaggagcaatccttcgagccaa

SEQ ID NO: 3266855 - DNA, 25 bp, Homo sapien
gtagatggtgcccttaatggtagaa

SEQ ID NO: 3266856 - DNA, 25 bp, Homo sapien
gggaagtatttgctaccagttggta

SEQ ID NO: 3266857 - DNA, 25 bp, Homo sapien
cattcacatgcaatttggtgtggcc

SEQ ID NO: 3266858 - DNA, 25 bp, Homo sapien
tgaggaaaatgtccgcaaaagcatg

SEQ ID NO: 3266859 - DNA, 25 bp, Homo sapien
cctctagattgtggtaagcttttac

SEQ ID NO: 3266860 - DNA, 25 bp, Homo sapien
ggttttaccgtgctttcattcctga

SEQ ID NO: 3266861 - DNA, 25 bp, Homo sapien
cagtactgagcatctccacaaatgt

SEQ ID NO: 3266862 - DNA, 25 bp, Homo sapien
catttagtacaggaaccacgtgtgt

SEQ ID NO: 3266863 - DNA, 25 bp, Homo sapien
gctgctttgctttaacggccacaag

SEQ ID NO: 3266864 - DNA, 25 bp, Homo sapien
tctctatggagtcatggcaggaatc

SEQ ID NO: 3266865 - DNA, 25 bp, Homo sapien
cagagcatggacatgttcctagtgc

SEQ ID NO: 3266866 - DNA, 25 bp, Homo sapien
tttcagtgatcaagggcagaactca

SEQ ID NO: 3266867 - DNA, 25 bp, Homo sapien
aaatgctgttcagttagtaaccaag

SEQ ID NO: 3266868 - DNA, 25 bp, Homo sapien
tctgataagtactgaacaaatgtgt

SEQ ID NO: 3266869 - DNA, 25 bp, Homo sapien
taacctaactagtcatgctaaccag

SEQ ID NO: 3266870 - DNA, 25 bp, Homo sapien
cagcgttgaacactagtatactatc

SEQ ID NO: 3266871 - DNA, 25 bp, Homo sapien
gctctacgcattcagtccttaaggg

SEQ ID NO: 3266872 - DNA, 25 bp, Homo sapien
gcaatacgagcagtttcaaggaata

SEQ ID NO: 3266873 - DNA, 25 bp, Homo sapien
tgtaccttgcagcatgctctacgca

SEQ ID NO: 3266874 - DNA, 25 bp, Homo sapien
tttacaaactgtgcgcctgtaaggt

SEQ ID NO: 3266875 - DNA, 25 bp, Homo sapien
cctgtcatcttactgctatgataga

SEQ ID NO: 3266876 - DNA, 25 bp, Homo sapien
atatgggattgtaaaaaacctgtca

SEQ ID NO: 3266877 - DNA, 25 bp, Homo sapien
tttgcttgcctataccttgttgcta

SEQ ID NO: 3266878 - DNA, 25 bp, Homo sapien
gagattcttgggactgtaaaaatcc

SEQ ID NO: 3266879 - DNA, 25 bp, Homo sapien
gaaccctggcacacgaggaagcagg

SEQ ID NO: 3266880 - DNA, 25 bp, Homo sapien
caccgaggtctcgtgagtcagggct

SEQ ID NO: 3266881 - DNA, 25 bp, Homo sapien
tgttgcttcccgaggccaccgaggt

SEQ ID NO: 3266882 - DNA, 25 bp, Homo sapien
tagaagcccatttgtgtaaacggac

SEQ ID NO: 3266883 - DNA, 25 bp, Homo sapien
cactggggacccgtgtagacacact

SEQ ID NO: 3266884 - DNA, 25 bp, Homo sapien
ggacccgtgtagacacactgtaggc

SEQ ID NO: 3266885 - DNA, 25 bp, Homo sapien
tggggacccgtgtagacacactgta

SEQ ID NO: 3266886 - DNA, 25 bp, Homo sapien
gggacccgtgtagacacactgtagg

SEQ ID NO: 3266887 - DNA, 25 bp, Homo sapien
gggcaactttgtggctttccagaga

SEQ ID NO: 3266888 - DNA, 25 bp, Homo sapien
tcttcaatggtcaaaggacctttgg

SEQ ID NO: 3266889 - DNA, 25 bp, Homo sapien
gaagacctccaatactgcatcatgt

SEQ ID NO: 3266890 - DNA, 25 bp, Homo sapien
aaatgctgagcccttctcttttggg

SEQ ID NO: 3266891 - DNA, 25 bp, Homo sapien
cactggtcgctctgggaagctgtga

SEQ ID NO: 3266892 - DNA, 25 bp, Homo sapien
tcactggtcgctctgggaagctgtg

SEQ ID NO: 3266893 - DNA, 25 bp, Homo sapien
actggtcgctctgggaagctgtgac

SEQ ID NO: 3266894 - DNA, 25 bp, Homo sapien
gaaacatccaattcaaagaggcaga

SEQ ID NO: 3266895 - DNA, 25 bp, Homo sapien
cagatgtaacatgggttcaggtggc

SEQ ID NO: 3266896 - DNA, 25 bp, Homo sapien
ccaggaggctgtgttatacttgagc

SEQ ID NO: 3266897 - DNA, 25 bp, Homo sapien
ttcaggtggcccagaaagtctccca

SEQ ID NO: 3266898 - DNA, 25 bp, Homo sapien
acaccagagttggaaaaagtcttct

SEQ ID NO: 3266899 - DNA, 25 bp, Homo sapien
tccacctccgcaagaatgtgccttt

SEQ ID NO: 3266900 - DNA, 25 bp, Homo sapien
tgtgcctttccttgttgggaatcac

SEQ ID NO: 3266901 - DNA, 25 bp, Homo sapien
tagaatcttggatggggatacacca

SEQ ID NO: 3266902 - DNA, 25 bp, Homo sapien
tgttaactgagtccaagtatgccgg

SEQ ID NO: 3266903 - DNA, 25 bp, Homo sapien
tctgggcctgattatacgtgtttct

SEQ ID NO: 3266904 - DNA, 25 bp, Homo sapien
ggcatggacagctttgacattcaaa

SEQ ID NO: 3266905 - DNA, 25 bp, Homo sapien
gaagttcgcatgaaactttgtcatg

SEQ ID NO: 3266906 - DNA, 25 bp, Homo sapien
ctttggccaggtagatgtaacttac

SEQ ID NO: 3266907 - DNA, 25 bp, Homo sapien
atgctcctttgttcccggagatctt

SEQ ID NO: 3266908 - DNA, 25 bp, Homo sapien
tgctcctttgttcccggagatcttt

SEQ ID NO: 3266909 - DNA, 25 bp, Homo sapien
aatgctcctttgttcccggagatct

SEQ ID NO: 3266910 - DNA, 25 bp, Homo sapien
agaagtcatgaggtttaatatcacc

SEQ ID NO: 3266911 - DNA, 25 bp, Homo sapien
aaagaagtcatgaggtttaatatca

SEQ ID NO: 3266912 - DNA, 25 bp, Homo sapien
aagtcatgaggtttaatatcaccat

SEQ ID NO: 3266913 - DNA, 25 bp, Homo sapien
gaagtcatgaggtttaatatcacca

SEQ ID NO: 3266914 - DNA, 25 bp, Homo sapien
tccatccagctatttgccttgtact

SEQ ID NO: 3266915 - DNA, 25 bp, Homo sapien
ttccttaaagtaagatagcattcca

SEQ ID NO: 3266916 - DNA, 25 bp, Homo sapien
acattccttaaagtaagatagcatt

SEQ ID NO: 3266917 - DNA, 25 bp, Homo sapien
ccatccagctatttgccttgtactc

SEQ ID NO: 3266918 - DNA, 25 bp, Homo sapien
tatgctattctgatgacaactagct

SEQ ID NO: 3266919 - DNA, 25 bp, Homo sapien
aaacttccatctttcagacattgct

SEQ ID NO: 3266920 - DNA, 25 bp, Homo sapien
catctttcagacattgcttatgcta

SEQ ID NO: 3266921 - DNA, 25 bp, Homo sapien
tagcttatgactccgaatgttcttg

SEQ ID NO: 3266922 - DNA, 25 bp, Homo sapien
gatgaagaaatcaggctgctgtcgt

SEQ ID NO: 3266923 - DNA, 25 bp, Homo sapien
tgaagaaatcaggctgctgtcgtac

SEQ ID NO: 3266924 - DNA, 25 bp, Homo sapien
ctgaagatgaagaaatcaggctgct

SEQ ID NO: 3266925 - DNA, 25 bp, Homo sapien
aagatgaagaaatcaggctgctgtc

SEQ ID NO: 3266926 - DNA, 25 bp, Homo sapien
cacaatgaggtggaaggctacagcg

SEQ ID NO: 3266927 - DNA, 25 bp, Homo sapien
tacagcggatacatgatagggtgat

SEQ ID NO: 3266928 - DNA, 25 bp, Homo sapien
ccctttgtggtcacaatgaggtgga

SEQ ID NO: 3266929 - DNA, 25 bp, Homo sapien
tggaaggctacagcggatacatgat

SEQ ID NO: 3266930 - DNA, 25 bp, Homo sapien
gaaggtttgaaagctcagtaggccc

SEQ ID NO: 3266931 - DNA, 25 bp, Homo sapien
cagaccttgaagagttcccactgga

SEQ ID NO: 3266932 - DNA, 25 bp, Homo sapien
agtaggccccacatctccgttttga

SEQ ID NO: 3266933 - DNA, 25 bp, Homo sapien
tgaactgcctagaaaccaatcatgg

SEQ ID NO: 3266934 - DNA, 25 bp, Homo sapien
tacgagaacctggacagagaggctc

SEQ ID NO: 3266935 - DNA, 25 bp, Homo sapien
aggcggaagcgtttgttcatgaagc

SEQ ID NO: 3266936 - DNA, 25 bp, Homo sapien
ccatgaagccgaggcggaagcgttt

SEQ ID NO: 3266937 - DNA, 25 bp, Homo sapien
gcaccgaggcactcatatggctgta

SEQ ID NO: 3266938 - DNA, 25 bp, Homo sapien
tctgcggaggcggtgtcgtaggccc

SEQ ID NO: 3266939 - DNA, 25 bp, Homo sapien
ggaagaagaggaccacgatgacgat

SEQ ID NO: 3266940 - DNA, 25 bp, Homo sapien
gacgatgagcatgcggatcaccctt

SEQ ID NO: 3266941 - DNA, 25 bp, Homo sapien
cgttggcgctgaagatgggcatcca

SEQ ID NO: 3266942 - DNA, 25 bp, Homo sapien
ttggccatcaggttggctgcggagc

SEQ ID NO: 3266943 - DNA, 25 bp, Homo sapien
tgttactccggatgcggttggccct

SEQ ID NO: 3266944 - DNA, 25 bp, Homo sapien
ttgcaggtaacacccatcgctgtcc

SEQ ID NO: 3266945 - DNA, 25 bp, Homo sapien
tgtcctcatatttgccgctgctggt

SEQ ID NO: 3266946 - DNA, 25 bp, Homo sapien
agacttcttctggctagcctcaaat

SEQ ID NO: 3266947 - DNA, 25 bp, Homo sapien
ccatcatcacaattccaggaataag

SEQ ID NO: 3266948 - DNA, 25 bp, Homo sapien
taagaaagaggatgagtaacaggaa

SEQ ID NO: 3266949 - DNA, 25 bp, Homo sapien
tattccctggtagagttccaaagag

SEQ ID NO: 3266950 - DNA, 25 bp, Homo sapien
gaaatccaataaccagcaactttag

SEQ ID NO: 3266951 - DNA, 25 bp, Homo sapien
aaatccaataaccagcaactttaga

SEQ ID NO: 3266952 - DNA, 25 bp, Homo sapien
aatccaataaccagcaactttagac

SEQ ID NO: 3266953 - DNA, 25 bp, Homo sapien
gcatgggattttgtctgccagaccc

SEQ ID NO: 3266954 - DNA, 25 bp, Homo sapien
cagcaatcaccttcaaagcatggga

SEQ ID NO: 3266955 - DNA, 25 bp, Homo sapien
gactgtaagggtttgcaaatcgcac

SEQ ID NO: 3266956 - DNA, 25 bp, Homo sapien
tagaaagcggcacatattcgcggtc

SEQ ID NO: 3266957 - DNA, 25 bp, Homo sapien
gtggtggtcttgcaaacggcgctcc

SEQ ID NO: 3266958 - DNA, 25 bp, Homo sapien
gcttgttccgaatcagcacggtgat

SEQ ID NO: 3266959 - DNA, 25 bp, Homo sapien
tacaagagaatctgcaccgctggct

SEQ ID NO: 3266960 - DNA, 25 bp, Homo sapien
gtgatgaccagcgtgtttcccagca

SEQ ID NO: 3266961 - DNA, 25 bp, Homo sapien
gatccaagcagaaaagcgtctcatt

SEQ ID NO: 3266962 - DNA, 25 bp, Homo sapien
aaggacggggctgatccaagcagaa

SEQ ID NO: 3266963 - DNA, 25 bp, Homo sapien
gaggagtgatgttgcttccattcac

SEQ ID NO: 3266964 - DNA, 25 bp, Homo sapien
tctcattttcgagcccgagttcaca

SEQ ID NO: 3266965 - DNA, 25 bp, Homo sapien
ttcctaaaggcgacttgagttcacc

SEQ ID NO: 3266966 - DNA, 25 bp, Homo sapien
cgttaaccattctcagcgtgtggct

SEQ ID NO: 3266967 - DNA, 25 bp, Homo sapien
gaccatcaggcctaaagaacacgga

SEQ ID NO: 3266968 - DNA, 25 bp, Homo sapien
tctaatgaccgaagcgtctcgcaga

SEQ ID NO: 3266969 - DNA, 25 bp, Homo sapien
tgaaacctgcgtttctgacgccctg

SEQ ID NO: 3266970 - DNA, 25 bp, Homo sapien
tttggaaagcagacgacaatggctg

SEQ ID NO: 3266971 - DNA, 25 bp, Homo sapien
ccagacacagaggaactaacgcatt

SEQ ID NO: 3266972 - DNA, 25 bp, Homo sapien
tgtactgacaatgcttccactggca

SEQ ID NO: 3266973 - DNA, 25 bp, Homo sapien
ctattctagcatcatgtagcctgtt

SEQ ID NO: 3266974 - DNA, 25 bp, Homo sapien
ctgaatcttccctgtctacagatga

SEQ ID NO: 3266975 - DNA, 25 bp, Homo sapien
tccctgtctacagatgatggaccct

SEQ ID NO: 3266976 - DNA, 25 bp, Homo sapien
tcctgctatgagtccttttgtctga

SEQ ID NO: 3266977 - DNA, 25 bp, Homo sapien
attcagggtgcctcctgctgaggct

SEQ ID NO: 3266978 - DNA, 25 bp, Homo sapien
caccagccattcagggtgcctcctg

SEQ ID NO: 3266979 - DNA, 25 bp, Homo sapien
catcagcacctgcttcaaaagctgg

SEQ ID NO: 3266980 - DNA, 25 bp, Homo sapien
atcaccagccattcagggtgcctcc

SEQ ID NO: 3266981 - DNA, 25 bp, Homo sapien
gaggctctcgcgcacccctggtgcc

SEQ ID NO: 3266982 - DNA, 25 bp, Homo sapien
ccctggtgcccacagaaggcagctt

SEQ ID NO: 3266983 - DNA, 25 bp, Homo sapien
taatgcactgaggctctcgcgcacc

SEQ ID NO: 3266984 - DNA, 25 bp, Homo sapien
gcttgcaaccaccctttcaagttct

SEQ ID NO: 3266985 - DNA, 25 bp, Homo sapien
gaccactcagaacttaggtaggcag

SEQ ID NO: 3266986 - DNA, 25 bp, Homo sapien
ttaattgggtacacaactgcctagc

SEQ ID NO: 3266987 - DNA, 25 bp, Homo sapien
gaatgaagatgtgaccgctggagct

SEQ ID NO: 3266988 - DNA, 25 bp, Homo sapien
tcctttgcagctagatagggccatg

SEQ ID NO: 3266989 - DNA, 25 bp, Homo sapien
cacaacagatacctgtgcctcgtat

SEQ ID NO: 3266990 - DNA, 25 bp, Homo sapien
gcagatgtgccagggtttagttcca

SEQ ID NO: 3266991 - DNA, 25 bp, Homo sapien
gaaaatccagtgatggagtaacaga

SEQ ID NO: 3266992 - DNA, 25 bp, Homo sapien
tgggtgtgaactgactgtctggtca

SEQ ID NO: 3266993 - DNA, 25 bp, Homo sapien
gcaaaccatgcacagtgtgactgat

SEQ ID NO: 3266994 - DNA, 25 bp, Homo sapien
gaaccgatccatagatatgactact

SEQ ID NO: 3266995 - DNA, 25 bp, Homo sapien
tcaccctctggtgtcgtttgcccct

SEQ ID NO: 3266996 - DNA, 25 bp, Homo sapien
tgactacttgaaaggtcaatcctcc

SEQ ID NO: 3266997 - DNA, 25 bp, Homo sapien
gtagaaaggcccatactggcagcaa

SEQ ID NO: 3266998 - DNA, 25 bp, Homo sapien
agtagaaaggcccatactggcagca

SEQ ID NO: 3266999 - DNA, 25 bp, Homo sapien
aagtagaaaggcccatactggcagc

SEQ ID NO: 3267000 - DNA, 25 bp, Homo sapien
ctcactgatgggagcagggatgcct

SEQ ID NO: 3267001 - DNA, 25 bp, Homo sapien
tgtgattctcttttggtgggtgaca

SEQ ID NO: 3267002 - DNA, 25 bp, Homo sapien
ttaaaggtcataaattgtgattctc

SEQ ID NO: 3267003 - DNA, 25 bp, Homo sapien
tagctatgtaaaagaatacagtctt

SEQ ID NO: 3267004 - DNA, 25 bp, Homo sapien
tgggtgacaggaatgattatgtctt

SEQ ID NO: 3267005 - DNA, 25 bp, Homo sapien
cagctgtgggtgattgggattgatg

SEQ ID NO: 3267006 - DNA, 25 bp, Homo sapien
gctcacaggtctggggcaactctgc

SEQ ID NO: 3267007 - DNA, 25 bp, Homo sapien
tctctggcataagcatgatttcttg

SEQ ID NO: 3267008 - DNA, 25 bp, Homo sapien
gattgggattgatgccaggtggcag

SEQ ID NO: 3267009 - DNA, 25 bp, Homo sapien
gcagcatggcagtatccagttccca

SEQ ID NO: 3267010 - DNA, 25 bp, Homo sapien
ccagttcccagttcagagggtattg

SEQ ID NO: 3267011 - DNA, 25 bp, Homo sapien
tagcctcttgatcagtaggtggcag

SEQ ID NO: 3267012 - DNA, 25 bp, Homo sapien
tgttgccggaacaagcacagtcgtg

SEQ ID NO: 3267013 - DNA, 25 bp, Homo sapien
agaggtggaagagaatgatccttta

SEQ ID NO: 3267014 - DNA, 25 bp, Homo sapien
caattcgtggttgtaattcgcagta

SEQ ID NO: 3267015 - DNA, 25 bp, Homo sapien
agtgtcagagcctaacaattcgtgg

SEQ ID NO: 3267016 - DNA, 25 bp, Homo sapien
cgcagtatcattgcgtgccacagtc

SEQ ID NO: 3267017 - DNA, 25 bp, Homo sapien
gaacaacggtgtgaaaagcgtcctc

SEQ ID NO: 3267018 - DNA, 25 bp, Homo sapien
cacaaggctcggcagttgcctggta

SEQ ID NO: 3267019 - DNA, 25 bp, Homo sapien
ccttgtgcatcagaggcgctgtggc

SEQ ID NO: 3267020 - DNA, 25 bp, Homo sapien
ccagtgtaataaggtcccggagaag

SEQ ID NO: 3267021 - DNA, 25 bp, Homo sapien
tgtactctcagctggaacggcaggc

SEQ ID NO: 3267022 - DNA, 25 bp, Homo sapien
tagtccaaaagctcaagggctccaa

SEQ ID NO: 3267023 - DNA, 25 bp, Homo sapien
tctctcattattgcccagatagtcc

SEQ ID NO: 3267024 - DNA, 25 bp, Homo sapien
gctcaagggctccaatttgtactct

SEQ ID NO: 3267025 - DNA, 25 bp, Homo sapien
ttattttggctgctgtttgtccttt

SEQ ID NO: 3267026 - DNA, 25 bp, Homo sapien
attttggctgctgtttgtcctttaa

SEQ ID NO: 3267027 - DNA, 25 bp, Homo sapien
tttggctgctgtttgtcctttaatc

SEQ ID NO: 3267028 - DNA, 25 bp, Homo sapien
tatttattttggctgctgtttgtcc

SEQ ID NO: 3267029 - DNA, 25 bp, Homo sapien
tgttaatcacaacattagcaaacaa

SEQ ID NO: 3267030 - DNA, 25 bp, Homo sapien
taatgttaatcacaacattagcaaa

SEQ ID NO: 3267031 - DNA, 25 bp, Homo sapien
ttaatcacaacattagcaaacaaga

SEQ ID NO: 3267032 - DNA, 25 bp, Homo sapien
ttttaatgttaatcacaacattagc

SEQ ID NO: 3267033 - DNA, 25 bp, Homo sapien
tcacagtgctggttgagtaggactc

SEQ ID NO: 3267034 - DNA, 25 bp, Homo sapien
gctggttgagtaggactctgtgact

SEQ ID NO: 3267035 - DNA, 25 bp, Homo sapien
agtccagtcctgtccgtaagccttc

SEQ ID NO: 3267036 - DNA, 25 bp, Homo sapien
tcagtccagtcctgtccgtaagcct

SEQ ID NO: 3267037 - DNA, 25 bp, Homo sapien
agtcagtcgaccttcattcttcagc

SEQ ID NO: 3267038 - DNA, 25 bp, Homo sapien
gagcaccacagtcagtcgaccttca

SEQ ID NO: 3267039 - DNA, 25 bp, Homo sapien
gaggcacgtaatgagcaccacagtc

SEQ ID NO: 3267040 - DNA, 25 bp, Homo sapien
ctgaggcacgtaatgagcaccacag

SEQ ID NO: 3267041 - DNA, 25 bp, Homo sapien
ttcttttattggactcattagcacc

SEQ ID NO: 3267042 - DNA, 25 bp, Homo sapien
cttttattggactcattagcaccat

SEQ ID NO: 3267043 - DNA, 25 bp, Homo sapien
tcttttattggactcattagcacca

SEQ ID NO: 3267044 - DNA, 25 bp, Homo sapien
cttcttttattggactcattagcac

SEQ ID NO: 3267045 - DNA, 25 bp, Homo sapien
acaaggaagtcccacggcactgaga

SEQ ID NO: 3267046 - DNA, 25 bp, Homo sapien
gtcccacggcactgagagctgaatt

SEQ ID NO: 3267047 - DNA, 25 bp, Homo sapien
tcaacagtacatcagacaaggaagt

SEQ ID NO: 3267048 - DNA, 25 bp, Homo sapien
tacatcagacaaggaagtcccacgg

SEQ ID NO: 3267049 - DNA, 25 bp, Homo sapien
cttctgacataaaaggctggactgt

SEQ ID NO: 3267050 - DNA, 25 bp, Homo sapien
gtctgggttgtcttctgacataaaa

SEQ ID NO: 3267051 - DNA, 25 bp, Homo sapien
tctgacataaaaggctggactgttt

SEQ ID NO: 3267052 - DNA, 25 bp, Homo sapien
ctttgtctgggttgtcttctgacat

SEQ ID NO: 3267053 - DNA, 25 bp, Homo sapien
gtaatgcttaccaaaggtataccga

SEQ ID NO: 3267054 - DNA, 25 bp, Homo sapien
tcttcaaagttgaggtagcaaatgg

SEQ ID NO: 3267055 - DNA, 25 bp, Homo sapien
ggtataccgataaagggcattcttc

SEQ ID NO: 3267056 - DNA, 25 bp, Homo sapien
ttcccaccgcaaggcacggtacttg

SEQ ID NO: 3267057 - DNA, 25 bp, Homo sapien
tagcagtaaccgtgccgggctgatg

SEQ ID NO: 3267058 - DNA, 25 bp, Homo sapien
tgagtaggccagcagttgaagtagt

SEQ ID NO: 3267059 - DNA, 25 bp, Homo sapien
tagttctgagtttccgtgcagtgga

SEQ ID NO: 3267060 - DNA, 25 bp, Homo sapien
gctttccgagcagtgaacctgatgg

SEQ ID NO: 3267061 - DNA, 25 bp, Homo sapien
ttagaagacttgacattgccgatgc

SEQ ID NO: 3267062 - DNA, 25 bp, Homo sapien
gaaggtcgaatacaattgtctccat

SEQ ID NO: 3267063 - DNA, 25 bp, Homo sapien
tgaggagtcaaaaccccattcactt

SEQ ID NO: 3267064 - DNA, 25 bp, Homo sapien
taactatacaaggaagacacccaag

SEQ ID NO: 3267065 - DNA, 25 bp, Homo sapien
cacagaatctagctgcccacagtga

SEQ ID NO: 3267066 - DNA, 25 bp, Homo sapien
ttttcacagaatctagctgcccaca

SEQ ID NO: 3267067 - DNA, 25 bp, Homo sapien
tcctctattccctgagctttacaga

SEQ ID NO: 3267068 - DNA, 25 bp, Homo sapien
ctgagctttacagagtccagatccc

SEQ ID NO: 3267069 - DNA, 25 bp, Homo sapien
tatacctttatagcagaaattttag

SEQ ID NO: 3267070 - DNA, 25 bp, Homo sapien
cctactgcccagataatcactgtga

SEQ ID NO: 3267071 - DNA, 25 bp, Homo sapien
gagagaggaagaatagatcatcaag

SEQ ID NO: 3267072 - DNA, 25 bp, Homo sapien
ttttactcacttccatgttacattg

SEQ ID NO: 3267073 - DNA, 25 bp, Homo sapien
tctttaataatcgaagataatcctc

SEQ ID NO: 3267074 - DNA, 25 bp, Homo sapien
taatcgaagataatcctctgtcgtc

SEQ ID NO: 3267075 - DNA, 25 bp, Homo sapien
taatcctctgtcgtcatcttgagca

SEQ ID NO: 3267076 - DNA, 25 bp, Homo sapien
cgaagataatcctctgtcgtcatct

SEQ ID NO: 3267077 - DNA, 25 bp, Homo sapien
gcaggtacccgttctttatgtgtgg

SEQ ID NO: 3267078 - DNA, 25 bp, Homo sapien
tggccaggcggaccacttttctcca

SEQ ID NO: 3267079 - DNA, 25 bp, Homo sapien
acacaggtcagcaggtacccgttct

SEQ ID NO: 3267080 - DNA, 25 bp, Homo sapien
tacccgttctttatgtgtggcagac

SEQ ID NO: 3267081 - DNA, 25 bp, Homo sapien
tcgggttatggtttcctgacccaca

SEQ ID NO: 3267082 - DNA, 25 bp, Homo sapien
gattagggccttagtgatttgtcca

SEQ ID NO: 3267083 - DNA, 25 bp, Homo sapien
gatttgtccattccatcgggttatg

SEQ ID NO: 3267084 - DNA, 25 bp, Homo sapien
ccatgcctataaaagagtccaggag

SEQ ID NO: 3267085 - DNA, 25 bp, Homo sapien
tacgatgggataacgagcatgtgcc

SEQ ID NO: 3267086 - DNA, 25 bp, Homo sapien
tgttgtagacccagggctagcttcc

SEQ ID NO: 3267087 - DNA, 25 bp, Homo sapien
tgagaagagttcttggccacctgtt

SEQ ID NO: 3267088 - DNA, 25 bp, Homo sapien
catctctagtcaaggcctggcaaca

SEQ ID NO: 3267089 - DNA, 25 bp, Homo sapien
tgccgcgcccgccagtcgggaaccg

SEQ ID NO: 3267090 - DNA, 25 bp, Homo sapien
ttttgtgcccctgggagaaagaatg

SEQ ID NO: 3267091 - DNA, 25 bp, Homo sapien
gagaaagaatgcctccttgcgtgtg

SEQ ID NO: 3267092 - DNA, 25 bp, Homo sapien
tgtgcccctgggagaaagaatgcct

SEQ ID NO: 3267093 - DNA, 25 bp, Homo sapien
cctccttgcgtgtgaatttccaggg

SEQ ID NO: 3267094 - DNA, 25 bp, Homo sapien
ccaggtctgaacaggatttacaaca

SEQ ID NO: 3267095 - DNA, 25 bp, Homo sapien
tccaggttggcgaaaacaagtcaag

SEQ ID NO: 3267096 - DNA, 25 bp, Homo sapien
caggatacagcacagagtcgatggg

SEQ ID NO: 3267097 - DNA, 25 bp, Homo sapien
cattgttctgtcagccggttcagga

SEQ ID NO: 3267098 - DNA, 25 bp, Homo sapien
ccgattgcaagattttcctgatcca

SEQ ID NO: 3267099 - DNA, 25 bp, Homo sapien
gatccatgcaattactttcgctgcc

SEQ ID NO: 3267100 - DNA, 25 bp, Homo sapien
ccctcaggatgtgggacgtctggac

SEQ ID NO: 3267101 - DNA, 25 bp, Homo sapien
tctacgaggctgaaactcgccctca

SEQ ID NO: 3267102 - DNA, 25 bp, Homo sapien
gaatgagggagaggtacacgtcccc

SEQ ID NO: 3267103 - DNA, 25 bp, Homo sapien
tgaatgagggagaggtacacgtccc

SEQ ID NO: 3267104 - DNA, 25 bp, Homo sapien
atcttcgcggctcgctaaagcgtta

SEQ ID NO: 3267105 - DNA, 25 bp, Homo sapien
gcctcctatcttcgcggctcgctaa

SEQ ID NO: 3267106 - DNA, 25 bp, Homo sapien
cgcccggcgggagcccgtgtctgag

SEQ ID NO: 3267107 - DNA, 25 bp, Homo sapien
acgcagccgggatcagagctccgga

SEQ ID NO: 3267108 - DNA, 25 bp, Homo sapien
gccggtgccgatgggaccaggctgg

SEQ ID NO: 3267109 - DNA, 25 bp, Homo sapien
ggcggccggaggagtcgccggcggc

SEQ ID NO: 3267110 - DNA, 25 bp, Homo sapien
tcggcgccttcatcccgcctcgact

SEQ ID NO: 3267111 - DNA, 25 bp, Homo sapien
tgctggtagccggagcggcggacgg

SEQ ID NO: 3267112 - DNA, 25 bp, Homo sapien
acggatgcgagcttgtgccccggca

SEQ ID NO: 3267113 - DNA, 25 bp, Homo sapien
tgggctgcgttgctggtgctcgggc

SEQ ID NO: 3267114 - DNA, 25 bp, Homo sapien
tttgaggctgctagaaaaagtcagc

SEQ ID NO: 3267115 - DNA, 25 bp, Homo sapien
tctttcgtgctgcagaagtgccagc

SEQ ID NO: 3267116 - DNA, 25 bp, Homo sapien
gggctctccgatcttccaagctgag

SEQ ID NO: 3267117 - DNA, 25 bp, Homo sapien
ccaagctgagcaatgcggtggtttc

SEQ ID NO: 3267118 - DNA, 25 bp, Homo sapien
aaagctccgcttgagcacagcgtcc

SEQ ID NO: 3267119 - DNA, 25 bp, Homo sapien
cagctggcagcgagtctcaccggtt

SEQ ID NO: 3267120 - DNA, 25 bp, Homo sapien
gagtctcaccggttcaaagctccgc

SEQ ID NO: 3267121 - DNA, 25 bp, Homo sapien
tcaccggttcaaagctccgcttgag

SEQ ID NO: 3267122 - DNA, 25 bp, Homo sapien
ctgtaactgttttccttgactggtt

SEQ ID NO: 3267123 - DNA, 25 bp, Homo sapien
cttctgtaactgttttccttgactg

SEQ ID NO: 3267124 - DNA, 25 bp, Homo sapien
taactgttttccttgactggtttca

SEQ ID NO: 3267125 - DNA, 25 bp, Homo sapien
aactgttttccttgactggtttcat

SEQ ID NO: 3267126 - DNA, 25 bp, Homo sapien
gtcataaatgagagagacgctcatg

SEQ ID NO: 3267127 - DNA, 25 bp, Homo sapien
agattgaggttgatggctgtcaggg

SEQ ID NO: 3267128 - DNA, 25 bp, Homo sapien
gagattgaggttgatggctgtcagg

SEQ ID NO: 3267129 - DNA, 25 bp, Homo sapien
acttggcacctgaggtactcttagc

SEQ ID NO: 3267130 - DNA, 25 bp, Homo sapien
cttggcacctgaggtactcttagct

SEQ ID NO: 3267131 - DNA, 25 bp, Homo sapien
tctcctggatggctggccacaggct

SEQ ID NO: 3267132 - DNA, 25 bp, Homo sapien
cccctacaccctgccgctgagaagc

SEQ ID NO: 3267133 - DNA, 25 bp, Homo sapien
tccttgctgttcttgagctgctcct

SEQ ID NO: 3267134 - DNA, 25 bp, Homo sapien
tactggagagatctccggcgcacag

SEQ ID NO: 3267135 - DNA, 25 bp, Homo sapien
taagtttgttttcaagcaggtagct

SEQ ID NO: 3267136 - DNA, 25 bp, Homo sapien
ttttcaagcaggtagctggtagtca

SEQ ID NO: 3267137 - DNA, 25 bp, Homo sapien
ttgttttcaagcaggtagctggtag

SEQ ID NO: 3267138 - DNA, 25 bp, Homo sapien
agtttgttttcaagcaggtagctgg

SEQ ID NO: 3267139 - DNA, 25 bp, Homo sapien
acatgtcttgggggtccacacagtc

SEQ ID NO: 3267140 - DNA, 25 bp, Homo sapien
gattcacatgtcttgggggtccaca

SEQ ID NO: 3267141 - DNA, 25 bp, Homo sapien
ttcacatgtcttgggggtccacaca

SEQ ID NO: 3267142 - DNA, 25 bp, Homo sapien
tcacatgtcttgggggtccacacag

SEQ ID NO: 3267143 - DNA, 25 bp, Homo sapien
cacatcagggtcttgattgttctgt

SEQ ID NO: 3267144 - DNA, 25 bp, Homo sapien
caaagatggtggaattgaagtagag

SEQ ID NO: 3267145 - DNA, 25 bp, Homo sapien
tgacaaagatggtggaattgaagta

SEQ ID NO: 3267146 - DNA, 25 bp, Homo sapien
agaagacagatttagtctggaagct

SEQ ID NO: 3267147 - DNA, 25 bp, Homo sapien
gacagatttagtctggaagctcttc

SEQ ID NO: 3267148 - DNA, 25 bp, Homo sapien
agcacattagttgctgaccttttaa

SEQ ID NO: 3267149 - DNA, 25 bp, Homo sapien
cttcatcatatagcacattagttgc

SEQ ID NO: 3267150 - DNA, 25 bp, Homo sapien
taaaattagttctgatacttgtgat

SEQ ID NO: 3267151 - DNA, 25 bp, Homo sapien
aaattagttctgatacttgtgatac

SEQ ID NO: 3267152 - DNA, 25 bp, Homo sapien
gctgaggccacagccgcatcttgat

SEQ ID NO: 3267153 - DNA, 25 bp, Homo sapien
gtcagaagtgtgggacttggaggag

SEQ ID NO: 3267154 - DNA, 25 bp, Homo sapien
gccacagccgcatcttgatcaggct

SEQ ID NO: 3267155 - DNA, 25 bp, Homo sapien
gaggccacagccgcatcttgatcag

SEQ ID NO: 3267156 - DNA, 25 bp, Homo sapien
acgagggccaacacgtgagacccca

SEQ ID NO: 3267157 - DNA, 25 bp, Homo sapien
ataaagcgcttcctccccaggtctg

SEQ ID NO: 3267158 - DNA, 25 bp, Homo sapien
tagacctgttggagcataaagcgct

SEQ ID NO: 3267159 - DNA, 25 bp, Homo sapien
tccattctttgccacgagggccaac

SEQ ID NO: 3267160 - DNA, 25 bp, Homo sapien
gctactaataaacacagccatctgc

SEQ ID NO: 3267161 - DNA, 25 bp, Homo sapien
tatggaaacgatggaaaacatcaga

SEQ ID NO: 3267162 - DNA, 25 bp, Homo sapien
taaagatgctactaataaacacagc

SEQ ID NO: 3267163 - DNA, 25 bp, Homo sapien
gataaacatataacgattgaggatt

SEQ ID NO: 3267164 - DNA, 25 bp, Homo sapien
ggagctcttgtaaggcaggcaggcc

SEQ ID NO: 3267165 - DNA, 25 bp, Homo sapien
gagctcttgtaaggcaggcaggcct

SEQ ID NO: 3267166 - DNA, 25 bp, Homo sapien
agctcttgtaaggcaggcaggcctg

SEQ ID NO: 3267167 - DNA, 25 bp, Homo sapien
aggagctcttgtaaggcaggcaggc

SEQ ID NO: 3267168 - DNA, 25 bp, Homo sapien
ggaaggtttttgcagtgccatgtct

SEQ ID NO: 3267169 - DNA, 25 bp, Homo sapien
tactgttacactttgtactgaagct

SEQ ID NO: 3267170 - DNA, 25 bp, Homo sapien
ctgaagcttaagaacgtggaaggtt

SEQ ID NO: 3267171 - DNA, 25 bp, Homo sapien
ccaactactgttacactttgtactg

SEQ ID NO: 3267172 - DNA, 25 bp, Homo sapien
gagctcttgtcgtttgggttactgg

SEQ ID NO: 3267173 - DNA, 25 bp, Homo sapien
ctagagctcttgtcgtttgggttac

SEQ ID NO: 3267174 - DNA, 25 bp, Homo sapien
tgtactagagctcttgtcgtttggg

SEQ ID NO: 3267175 - DNA, 25 bp, Homo sapien
tcatactgtactagagctcttgtcg

SEQ ID NO: 3267176 - DNA, 25 bp, Homo sapien
gcagctgagcatctaaagtctcgtt

SEQ ID NO: 3267177 - DNA, 25 bp, Homo sapien
aaacctgtcttgactgtgctgagca

SEQ ID NO: 3267178 - DNA, 25 bp, Homo sapien
cagggtgttgctttaggtatccaaa

SEQ ID NO: 3267179 - DNA, 25 bp, Homo sapien
aagtctcgttcagaagtgaccccag

SEQ ID NO: 3267180 - DNA, 25 bp, Homo sapien
tctcctggaatttcgattccataca

SEQ ID NO: 3267181 - DNA, 25 bp, Homo sapien
ctggaatttcgattccatacatcat

SEQ ID NO: 3267182 - DNA, 25 bp, Homo sapien
cctggaatttcgattccatacatca

SEQ ID NO: 3267183 - DNA, 25 bp, Homo sapien
tcctggaatttcgattccatacatc

SEQ ID NO: 3267184 - DNA, 25 bp, Homo sapien
gaagacactcttcagtggttgatag

SEQ ID NO: 3267185 - DNA, 25 bp, Homo sapien
ggttgatagagtttgttgaactacc

SEQ ID NO: 3267186 - DNA, 25 bp, Homo sapien
tgaactaccccaatatgagaagaat

SEQ ID NO: 3267187 - DNA, 25 bp, Homo sapien
atgtcaaaggaacgacacttcccag

SEQ ID NO: 3267188 - DNA, 25 bp, Homo sapien
aaacttcagctcaaggcattggatg

SEQ ID NO: 3267189 - DNA, 25 bp, Homo sapien
cattggatgtggttttgtttggacc

SEQ ID NO: 3267190 - DNA, 25 bp, Homo sapien
gatagcagtgcacgaaccttcattt

SEQ ID NO: 3267191 - DNA, 25 bp, Homo sapien
cagttgaaaatcagtgaccggagtc

SEQ ID NO: 3267192 - DNA, 25 bp, Homo sapien
tatagtaattggtgttggaggctgc

SEQ ID NO: 3267193 - DNA, 25 bp, Homo sapien
gcccacctcataactggatgaaaga

SEQ ID NO: 3267194 - DNA, 25 bp, Homo sapien
gcaaagtctaatggacttacaggag

SEQ ID NO: 3267195 - DNA, 25 bp, Homo sapien
gattttatcctcacagtttctatag

SEQ ID NO: 3267196 - DNA, 25 bp, Homo sapien
gaggcttgtcggctgagagagctaa

SEQ ID NO: 3267197 - DNA, 25 bp, Homo sapien
aatttagagcgcaaaatgatggatg

SEQ ID NO: 3267198 - DNA, 25 bp, Homo sapien
aattatgcaaaggaggaggcttgtc

SEQ ID NO: 3267199 - DNA, 25 bp, Homo sapien
gacgtcagtatgcagaacaggaatt

SEQ ID NO: 3267200 - DNA, 25 bp, Homo sapien
ggtctgttccagatgcacttcagaa

SEQ ID NO: 3267201 - DNA, 25 bp, Homo sapien
ttcgcatggctctgaaaaaggccga

SEQ ID NO: 3267202 - DNA, 25 bp, Homo sapien
taggctgcattcttagagggattac

SEQ ID NO: 3267203 - DNA, 25 bp, Homo sapien
gagggattactcagctgggatacac

SEQ ID NO: 3267204 - DNA, 25 bp, Homo sapien
tagtccttttcggtttctaggcaga

SEQ ID NO: 3267205 - DNA, 25 bp, Homo sapien
gagaacgactttttcgctggcaaca

SEQ ID NO: 3267206 - DNA, 25 bp, Homo sapien
tgggactctgcacgttgcacacagc

SEQ ID NO: 3267207 - DNA, 25 bp, Homo sapien
tgacaacttgtttacgagaacgact

SEQ ID NO: 3267208 - DNA, 25 bp, Homo sapien
ttttaagtgattgtggaatacaggc

SEQ ID NO: 3267209 - DNA, 25 bp, Homo sapien
agaaatgttgtgatcaggccaggca

SEQ ID NO: 3267210 - DNA, 25 bp, Homo sapien
tccatatgtccgttaaaaggaaaca

SEQ ID NO: 3267211 - DNA, 25 bp, Homo sapien
gggcagaggtattggatatccatat

SEQ ID NO: 3267212 - DNA, 25 bp, Homo sapien
tccagaagggcaactgtctactgtc

SEQ ID NO: 3267213 - DNA, 25 bp, Homo sapien
gaaagccacgatggacttacaagct

SEQ ID NO: 3267214 - DNA, 25 bp, Homo sapien
taatggactcgtaagccagcatggg

SEQ ID NO: 3267215 - DNA, 25 bp, Homo sapien
tgtgaagtttcaagtcccgctgtaa

SEQ ID NO: 3267216 - DNA, 25 bp, Homo sapien
tcaatcagctgatgtcaagtgagct

SEQ ID NO: 3267217 - DNA, 25 bp, Homo sapien
tcagtcccgtgattgggcttttctg

SEQ ID NO: 3267218 - DNA, 25 bp, Homo sapien
tttcaggatttgacctcagtcccgt

SEQ ID NO: 3267219 - DNA, 25 bp, Homo sapien
tgagcttccggccaaatttcaggat

SEQ ID NO: 3267220 - DNA, 25 bp, Homo sapien
tgagctctctaagttgcacagtgga

SEQ ID NO: 3267221 - DNA, 25 bp, Homo sapien
ggtgagctctctaagttgcacagtg

SEQ ID NO: 3267222 - DNA, 25 bp, Homo sapien
attggtgagctctctaagttgcaca

SEQ ID NO: 3267223 - DNA, 25 bp, Homo sapien
gctctctaagttgcacagtggattt

SEQ ID NO: 3267224 - DNA, 25 bp, Homo sapien
cctgatggcccaaggtaaccgctga

SEQ ID NO: 3267225 - DNA, 25 bp, Homo sapien
ccatcctgaattgcctgatggccca

SEQ ID NO: 3267226 - DNA, 25 bp, Homo sapien
atcctgaattgcctgatggcccaag

SEQ ID NO: 3267227 - DNA, 25 bp, Homo sapien
ggtaaccgctgacatcacattcata

SEQ ID NO: 3267228 - DNA, 25 bp, Homo sapien
tcaatgaagtcgtatttcccagcct

SEQ ID NO: 3267229 - DNA, 25 bp, Homo sapien
cactgatgttcttcaatgaagtcgt

SEQ ID NO: 3267230 - DNA, 25 bp, Homo sapien
gttcttcaatgaagtcgtatttccc

SEQ ID NO: 3267231 - DNA, 25 bp, Homo sapien
aatgaagtcgtatttcccagcctgt

SEQ ID NO: 3267232 - DNA, 25 bp, Homo sapien
tgtttccatcagtgaatattcaaat

SEQ ID NO: 3267233 - DNA, 25 bp, Homo sapien
tgcaatcatcccaacttttcccaca

SEQ ID NO: 3267234 - DNA, 25 bp, Homo sapien
gatgagtacagccaactctcttttt

SEQ ID NO: 3267235 - DNA, 25 bp, Homo sapien
acatccctgatttcccgtcacagat

SEQ ID NO: 3267236 - DNA, 25 bp, Homo sapien
ctgtctccatgacagaatttctcct

SEQ ID NO: 3267237 - DNA, 25 bp, Homo sapien
ccccattagcaatcattccaaagat

SEQ ID NO: 3267238 - DNA, 25 bp, Homo sapien
tgcccagctccaccccattagcaat

SEQ ID NO: 3267239 - DNA, 25 bp, Homo sapien
ttccaaagatttccctgataggcat

SEQ ID NO: 3267240 - DNA, 25 bp, Homo sapien
tagggtggtggagcatttaaaattc

SEQ ID NO: 3267241 - DNA, 25 bp, Homo sapien
gcctttggctaatgagaacttgtta

SEQ ID NO: 3267242 - DNA, 25 bp, Homo sapien
cactatagcctttggctaatgagaa

SEQ ID NO: 3267243 - DNA, 25 bp, Homo sapien
catgtattttcaacactatagcctt

SEQ ID NO: 3267244 - DNA, 25 bp, Homo sapien
tgtcaaagtgctcgctgtgtaatcg

SEQ ID NO: 3267245 - DNA, 25 bp, Homo sapien
ctcttgtcaaagtgctcgctgtgta

SEQ ID NO: 3267246 - DNA, 25 bp, Homo sapien
aaagtgctcgctgtgtaatcggcag

SEQ ID NO: 3267247 - DNA, 25 bp, Homo sapien
tgctcgctgtgtaatcggcagaatt

SEQ ID NO: 3267248 - DNA, 25 bp, Homo sapien
gagactggttgcctcctccatatct

SEQ ID NO: 3267249 - DNA, 25 bp, Homo sapien
cgagtgagacacaggataggagaca

SEQ ID NO: 3267250 - DNA, 25 bp, Homo sapien
ccaggccctgggattgtgcttaagc

SEQ ID NO: 3267251 - DNA, 25 bp, Homo sapien
ggccgtggagactggttgcctcctc

SEQ ID NO: 3267252 - DNA, 25 bp, Homo sapien
gggaatccaggatgagtgcaataag

SEQ ID NO: 3267253 - DNA, 25 bp, Homo sapien
gtgcaataagcatttccaggttgcc

SEQ ID NO: 3267254 - DNA, 25 bp, Homo sapien
gagtgcaataagcatttccaggttg

SEQ ID NO: 3267255 - DNA, 25 bp, Homo sapien
atgagtgcaataagcatttccaggt

SEQ ID NO: 3267256 - DNA, 25 bp, Homo sapien
ctcccaactctaatgccggcttttt

SEQ ID NO: 3267257 - DNA, 25 bp, Homo sapien
gagccatattaaagagtccggtttc

SEQ ID NO: 3267258 - DNA, 25 bp, Homo sapien
tggccgatttgtattcctccagtat

SEQ ID NO: 3267259 - DNA, 25 bp, Homo sapien
tggacgagaaatctggccgatttgt

SEQ ID NO: 3267260 - DNA, 25 bp, Homo sapien
agtcaaatatagctggataagcaac

SEQ ID NO: 3267261 - DNA, 25 bp, Homo sapien
tagtcaaatatagctggataagcaa

SEQ ID NO: 3267262 - DNA, 25 bp, Homo sapien
cttagtcaaatatagctggataagc

SEQ ID NO: 3267263 - DNA, 25 bp, Homo sapien
ttagtcaaatatagctggataagca

SEQ ID NO: 3267264 - DNA, 25 bp, Homo sapien
cacaatgatacacttgtcccctggc

SEQ ID NO: 3267265 - DNA, 25 bp, Homo sapien
agtcctcaggcacaatgatacactt

SEQ ID NO: 3267266 - DNA, 25 bp, Homo sapien
tcaggcacaatgatacacttgtccc

SEQ ID NO: 3267267 - DNA, 25 bp, Homo sapien
ccctgtctgcctgagatcccctttt

SEQ ID NO: 3267268 - DNA, 25 bp, Homo sapien
gcatcgaatcaagagtgtttctcca

SEQ ID NO: 3267269 - DNA, 25 bp, Homo sapien
gcagaattttcttccctcgagttga

SEQ ID NO: 3267270 - DNA, 25 bp, Homo sapien
caacccgaaccgcatcgaatcaaga

SEQ ID NO: 3267271 - DNA, 25 bp, Homo sapien
tttctccaagttctaaacgttgcag

SEQ ID NO: 3267272 - DNA, 25 bp, Homo sapien
ctacaattccagggtcgttgttgtg

SEQ ID NO: 3267273 - DNA, 25 bp, Homo sapien
ggtcgttgttgtggggttgagcaag

SEQ ID NO: 3267274 - DNA, 25 bp, Homo sapien
tcgttgttgtggggttgagcaagga

SEQ ID NO: 3267275 - DNA, 25 bp, Homo sapien
acaattccagggtcgttgttgtggg

SEQ ID NO: 3267276 - DNA, 25 bp, Homo sapien
gggtggactggagcgcagaccagga

SEQ ID NO: 3267277 - DNA, 25 bp, Homo sapien
ggactggagcgcagaccaggatgtg

SEQ ID NO: 3267278 - DNA, 25 bp, Homo sapien
ctgggtggactggagcgcagaccag

SEQ ID NO: 3267279 - DNA, 25 bp, Homo sapien
agtgagcgagcaaaggatgcagaga

SEQ ID NO: 3267280 - DNA, 25 bp, Homo sapien
agcttcatgtcttgttctatggtac

SEQ ID NO: 3267281 - DNA, 25 bp, Homo sapien
ctgagcttcatgtcttgttctatgg

SEQ ID NO: 3267282 - DNA, 25 bp, Homo sapien
gcttcatgtcttgttctatggtacc

SEQ ID NO: 3267283 - DNA, 25 bp, Homo sapien
gagcttcatgtcttgttctatggta

SEQ ID NO: 3267284 - DNA, 25 bp, Homo sapien
tgccctgcgacccttgtcacctgcg

SEQ ID NO: 3267285 - DNA, 25 bp, Homo sapien
ggccgctgagatctttgagcaaggc

SEQ ID NO: 3267286 - DNA, 25 bp, Homo sapien
tgtggccgctgagatctttgagcaa

SEQ ID NO: 3267287 - DNA, 25 bp, Homo sapien
ttgtcacctgcgctaacacactcca

SEQ ID NO: 3267288 - DNA, 25 bp, Homo sapien
gcaaagaagggcatggcaggtcctt

SEQ ID NO: 3267289 - DNA, 25 bp, Homo sapien
acaagttccttgttctttgaagcca

SEQ ID NO: 3267290 - DNA, 25 bp, Homo sapien
gagcacaccctcttgtgcctgctga

SEQ ID NO: 3267291 - DNA, 25 bp, Homo sapien
ctctttccatgttgaggaccttcat

SEQ ID NO: 3267292 - DNA, 25 bp, Homo sapien
tgctcatcccaatgcatctgctttt

SEQ ID NO: 3267293 - DNA, 25 bp, Homo sapien
cattagctctatctgttcccactct

SEQ ID NO: 3267294 - DNA, 25 bp, Homo sapien
gcactgattactgcagctcgtagct

SEQ ID NO: 3267295 - DNA, 25 bp, Homo sapien
cagcagtagtccacaggtagagcca

SEQ ID NO: 3267296 - DNA, 25 bp, Homo sapien
cattagaggtagtctgccggtctgc

SEQ ID NO: 3267297 - DNA, 25 bp, Homo sapien
agctcgtagctgctttatctcatta

SEQ ID NO: 3267298 - DNA, 25 bp, Homo sapien
ttcagacatataagattagcagcta

SEQ ID NO: 3267299 - DNA, 25 bp, Homo sapien
caaccataccattggtcgtttgatt

SEQ ID NO: 3267300 - DNA, 25 bp, Homo sapien
tcttggcacctctgacattgatttg

SEQ ID NO: 3267301 - DNA, 25 bp, Homo sapien
ccattggtcgtttgattttcagaca

SEQ ID NO: 3267302 - DNA, 25 bp, Homo sapien
ctgcaaagaacaaggggagtgtcca

SEQ ID NO: 3267303 - DNA, 25 bp, Homo sapien
caaagaacaaggggagtgtccaggc

SEQ ID NO: 3267304 - DNA, 25 bp, Homo sapien
aagaacaaggggagtgtccaggcct

SEQ ID NO: 3267305 - DNA, 25 bp, Homo sapien
tgcaaagaacaaggggagtgtccag

SEQ ID NO: 3267306 - DNA, 25 bp, Homo sapien
tagggcataccgcatgtccttccct

SEQ ID NO: 3267307 - DNA, 25 bp, Homo sapien
gaagccactttagtgacttgccaca

SEQ ID NO: 3267308 - DNA, 25 bp, Homo sapien
gctcaggggatagggcataccgcat

SEQ ID NO: 3267309 - DNA, 25 bp, Homo sapien
ctgggaagccactttagtgacttgc

SEQ ID NO: 3267310 - DNA, 25 bp, Homo sapien
tccagaagaaacttggtgagagctt

SEQ ID NO: 3267311 - DNA, 25 bp, Homo sapien
ccagaagaaacttggtgagagcttg

SEQ ID NO: 3267312 - DNA, 25 bp, Homo sapien
cagaagaaacttggtgagagcttgg

SEQ ID NO: 3267313 - DNA, 25 bp, Homo sapien
gaggtgagctaaagagggagccctg

SEQ ID NO: 3267314 - DNA, 25 bp, Homo sapien
gaaggccccaggttgttgcaatacc

SEQ ID NO: 3267315 - DNA, 25 bp, Homo sapien
tctgaagttatagaggtgagctaaa

SEQ ID NO: 3267316 - DNA, 25 bp, Homo sapien
aataccatgggatgtgcaagtaggc

SEQ ID NO: 3267317 - DNA, 25 bp, Homo sapien
gctgacactgcctggaaacttcagg

SEQ ID NO: 3267318 - DNA, 25 bp, Homo sapien
gacacctttctcgtggctgacactg

SEQ ID NO: 3267319 - DNA, 25 bp, Homo sapien
gaggacagatacgtcctgagcacat

SEQ ID NO: 3267320 - DNA, 25 bp, Homo sapien
ccttggtaaggctcttggagacacc

SEQ ID NO: 3267321 - DNA, 25 bp, Homo sapien
gaataaggaccgtactgtgtctgtt

SEQ ID NO: 3267322 - DNA, 25 bp, Homo sapien
tgtgtgtccattatccttcgtggga

SEQ ID NO: 3267323 - DNA, 25 bp, Homo sapien
cttcgtgggaattcaggctcgtttg

SEQ ID NO: 3267324 - DNA, 25 bp, Homo sapien
tgtcttttgtgggtgcaccttggct

SEQ ID NO: 3267325 - DNA, 25 bp, Homo sapien
agcacatatttgatgccatcagggc

SEQ ID NO: 3267326 - DNA, 25 bp, Homo sapien
ggcttctagaaggttctgccattgc

SEQ ID NO: 3267327 - DNA, 25 bp, Homo sapien
cattgcttctatggtttcacacagc

SEQ ID NO: 3267328 - DNA, 25 bp, Homo sapien
tgccattgcttctatggtttcacac

SEQ ID NO: 3267329 - DNA, 25 bp, Homo sapien
ggtgcacagtatggcatggcatgca

SEQ ID NO: 3267330 - DNA, 25 bp, Homo sapien
gctgcctcctttgcccatgcagtca

SEQ ID NO: 3267331 - DNA, 25 bp, Homo sapien
gcagtgttgccctgcgtgggcccca

SEQ ID NO: 3267332 - DNA, 25 bp, Homo sapien
tcacatctgtgcgttgggaacctaa

SEQ ID NO: 3267333 - DNA, 25 bp, Homo sapien
cgtgcgttgatcaaagcacttgcct

SEQ ID NO: 3267334 - DNA, 25 bp, Homo sapien
gatcaaagcacttgcctgacaaaac

SEQ ID NO: 3267335 - DNA, 25 bp, Homo sapien
ccctgggggaaggattctcatacca

SEQ ID NO: 3267336 - DNA, 25 bp, Homo sapien
caagcccctgcgtgcgttgatcaaa

SEQ ID NO: 3267337 - DNA, 25 bp, Homo sapien
ttatccgtatggaccgagggtctgc

SEQ ID NO: 3267338 - DNA, 25 bp, Homo sapien
cgtatggaccgagggtctgctccag

SEQ ID NO: 3267339 - DNA, 25 bp, Homo sapien
ttcccctggggctttcagtggcact

SEQ ID NO: 3267340 - DNA, 25 bp, Homo sapien
tggcacttttgtaggtagtgagctc

SEQ ID NO: 3267341 - DNA, 25 bp, Homo sapien
tcttccagccagggtatatgtcttc

SEQ ID NO: 3267342 - DNA, 25 bp, Homo sapien
gcaagtagttttgcgccttgcgact

SEQ ID NO: 3267343 - DNA, 25 bp, Homo sapien
tgctggtgcaagtagttttgcgcct

SEQ ID NO: 3267344 - DNA, 25 bp, Homo sapien
gtagttttgcgccttgcgactgggc

SEQ ID NO: 3267345 - DNA, 25 bp, Homo sapien
agattgggaaccttgtcatttctta

SEQ ID NO: 3267346 - DNA, 25 bp, Homo sapien
ccactctgtccctacttagattggg

SEQ ID NO: 3267347 - DNA, 25 bp, Homo sapien
tcttatcccgattcctttaccagct

SEQ ID NO: 3267348 - DNA, 25 bp, Homo sapien
gtcatttcttatcccgattccttta

SEQ ID NO: 3267349 - DNA, 25 bp, Homo sapien
tgtgttctcctgctaaagagcatgg

SEQ ID NO: 3267350 - DNA, 25 bp, Homo sapien
taaagagcatgggtatgggagcctc

SEQ ID NO: 3267351 - DNA, 25 bp, Homo sapien
tctacctctttggtcggtggactgg

SEQ ID NO: 3267352 - DNA, 25 bp, Homo sapien
tctccactagactgtgttctcctgc

SEQ ID NO: 3267353 - DNA, 25 bp, Homo sapien
gttatacccatagggcacactccct

SEQ ID NO: 3267354 - DNA, 25 bp, Homo sapien
gcttcctggttatacccatagggca

SEQ ID NO: 3267355 - DNA, 25 bp, Homo sapien
tcccagtagcttcctggttataccc

SEQ ID NO: 3267356 - DNA, 25 bp, Homo sapien
cctggttatacccatagggcacact

SEQ ID NO: 3267357 - DNA, 25 bp, Homo sapien
cagtgaagcaaagcgatgtccaagc

SEQ ID NO: 3267358 - DNA, 25 bp, Homo sapien
agaatggagggcgagcacccctgaa

SEQ ID NO: 3267359 - DNA, 25 bp, Homo sapien
tccaagcccatatcctgagctaatg

SEQ ID NO: 3267360 - DNA, 25 bp, Homo sapien
gagcacccctgaaagctgcagcgca

SEQ ID NO: 3267361 - DNA, 25 bp, Homo sapien
gtgcgagtgggccagcttttaatag

SEQ ID NO: 3267362 - DNA, 25 bp, Homo sapien
taataggagcttccgatctcaaaga

SEQ ID NO: 3267363 - DNA, 25 bp, Homo sapien
agcgtgtggaaatgggccaaatccc

SEQ ID NO: 3267364 - DNA, 25 bp, Homo sapien
ggaaatgggccaaatccctcactgt

SEQ ID NO: 3267365 - DNA, 25 bp, Homo sapien
gggctgactccggtttgtgcactag

SEQ ID NO: 3267366 - DNA, 25 bp, Homo sapien
gggacctccagtcagcaatgctaga

SEQ ID NO: 3267367 - DNA, 25 bp, Homo sapien
tgtcaaatcatcctacccgggctga

SEQ ID NO: 3267368 - DNA, 25 bp, Homo sapien
tatttcaccagggatgtgccccatt

SEQ ID NO: 3267369 - DNA, 25 bp, Homo sapien
ggcaacctggttccgattaatccag

SEQ ID NO: 3267370 - DNA, 25 bp, Homo sapien
gggctcaaatgatgtcaccagtaat

SEQ ID NO: 3267371 - DNA, 25 bp, Homo sapien
tgttttatctctatgatcactcagt

SEQ ID NO: 3267372 - DNA, 25 bp, Homo sapien
ccagtaattgtcaggtcctggtttc

SEQ ID NO: 3267373 - DNA, 25 bp, Homo sapien
ctctttagctagtcttttggggcag

SEQ ID NO: 3267374 - DNA, 25 bp, Homo sapien
tcttttggggcagaatctggtttac

SEQ ID NO: 3267375 - DNA, 25 bp, Homo sapien
tctttagctagtcttttggggcaga

SEQ ID NO: 3267376 - DNA, 25 bp, Homo sapien
gggcagaatctggtttactcttctt

SEQ ID NO: 3267377 - DNA, 25 bp, Homo sapien
gctgacagggcttgtgggaacaacc

SEQ ID NO: 3267378 - DNA, 25 bp, Homo sapien
ctctcctttgtgcagcaatctctga

SEQ ID NO: 3267379 - DNA, 25 bp, Homo sapien
ttaaggcgtcattacccggagctga

SEQ ID NO: 3267380 - DNA, 25 bp, Homo sapien
aatcccaactctgggttaactgcac

SEQ ID NO: 3267381 - DNA, 25 bp, Homo sapien
catacggatgtaggtgctctgagca

SEQ ID NO: 3267382 - DNA, 25 bp, Homo sapien
ctctgggaagatgttatatttacta

SEQ ID NO: 3267383 - DNA, 25 bp, Homo sapien
gagcaataatgatccactctgggaa

SEQ ID NO: 3267384 - DNA, 25 bp, Homo sapien
ggctctggcagttaaagctctctgt

SEQ ID NO: 3267385 - DNA, 25 bp, Homo sapien
ctgtcccagtcagatatgcataggg

SEQ ID NO: 3267386 - DNA, 25 bp, Homo sapien
gagtcctgtcccagtcagatatgca

SEQ ID NO: 3267387 - DNA, 25 bp, Homo sapien
tcctgtcccagtcagatatgcatag

SEQ ID NO: 3267388 - DNA, 25 bp, Homo sapien
ttcgccacccagcaagctataggcc

SEQ ID NO: 3267389 - DNA, 25 bp, Homo sapien
tcagttcctcatcttaactggtgta

SEQ ID NO: 3267390 - DNA, 25 bp, Homo sapien
cagttcctcatcttaactggtgtac

SEQ ID NO: 3267391 - DNA, 25 bp, Homo sapien
tatgggccagactttggatgaggca

SEQ ID NO: 3267392 - DNA, 25 bp, Homo sapien
tagttgtgtaccctctatgggccag

SEQ ID NO: 3267393 - DNA, 25 bp, Homo sapien
tctgtggaacagatcgccagtgtgg

SEQ ID NO: 3267394 - DNA, 25 bp, Homo sapien
tcaaatccgcaagaagacagtaagc

SEQ ID NO: 3267395 - DNA, 25 bp, Homo sapien
ctggaggaccgcttcccgctgggaa

SEQ ID NO: 3267396 - DNA, 25 bp, Homo sapien
tcatttcaatggaaagttcctcacc

SEQ ID NO: 3267397 - DNA, 25 bp, Homo sapien
ctcctctagagatggatatgttcat

SEQ ID NO: 3267398 - DNA, 25 bp, Homo sapien
gtgtagataatcgtccctggctgcc

SEQ ID NO: 3267399 - DNA, 25 bp, Homo sapien
tttgtagaaaaagcgtggttgtcac

SEQ ID NO: 3267400 - DNA, 25 bp, Homo sapien
tgccttcgttcctggccatttttcc

SEQ ID NO: 3267401 - DNA, 25 bp, Homo sapien
tcagatggggctgaatagatattgg

SEQ ID NO: 3267402 - DNA, 25 bp, Homo sapien
tgctgccttcgttcctggccatttt

SEQ ID NO: 3267403 - DNA, 25 bp, Homo sapien
ccaaaaggctgcgtcaatggcacag

SEQ ID NO: 3267404 - DNA, 25 bp, Homo sapien
ggaagcatggaattaccctcagcgg

SEQ ID NO: 3267405 - DNA, 25 bp, Homo sapien
tgagaaccaaatgaggcgcagcttc

SEQ ID NO: 3267406 - DNA, 25 bp, Homo sapien
ttgcagggagccagaaattcacaag

SEQ ID NO: 3267407 - DNA, 25 bp, Homo sapien
tgagttggtgccagtcacagtagaa

SEQ ID NO: 3267408 - DNA, 25 bp, Homo sapien
aaggatcggccaaatgacaccagca

SEQ ID NO: 3267409 - DNA, 25 bp, Homo sapien
tctctaattctaagtaccacagtga

SEQ ID NO: 3267410 - DNA, 25 bp, Homo sapien
gaagctgtaaaccaggagggcagca

SEQ ID NO: 3267411 - DNA, 25 bp, Homo sapien
aaatgtctagcaatttggtgtgaga

SEQ ID NO: 3267412 - DNA, 25 bp, Homo sapien
gctgagaccatagttttggctgcaa

SEQ ID NO: 3267413 - DNA, 25 bp, Homo sapien
aatttggtgtgagaactgtgatagc

SEQ ID NO: 3267414 - DNA, 25 bp, Homo sapien
gagaccatagttttggctgcaaagc

SEQ ID NO: 3267415 - DNA, 25 bp, Homo sapien
tgtttccacagtttgtggactttaa

SEQ ID NO: 3267416 - DNA, 25 bp, Homo sapien
tccacagtttgtggactttaaggtc

SEQ ID NO: 3267417 - DNA, 25 bp, Homo sapien
cacagtttgtggactttaaggtcat

SEQ ID NO: 3267418 - DNA, 25 bp, Homo sapien
tgtgtttccacagtttgtggacttt

SEQ ID NO: 3267419 - DNA, 25 bp, Homo sapien
taaatattttgcatctacttaactg

SEQ ID NO: 3267420 - DNA, 25 bp, Homo sapien
tacttaactgcctaattgcatggtt

SEQ ID NO: 3267421 - DNA, 25 bp, Homo sapien
gcatctacttaactgcctaattgca

SEQ ID NO: 3267422 - DNA, 25 bp, Homo sapien
aatgagctgtaggagaaagatcgca

SEQ ID NO: 3267423 - DNA, 25 bp, Homo sapien
gaacactgatggtaacaccaggctg

SEQ ID NO: 3267424 - DNA, 25 bp, Homo sapien
tgatggtaacaccaggctgtgtttc

SEQ ID NO: 3267425 - DNA, 25 bp, Homo sapien
atggtaacaccaggctgtgtttctc

SEQ ID NO: 3267426 - DNA, 25 bp, Homo sapien
ttttccaattacagagccttccctg

SEQ ID NO: 3267427 - DNA, 25 bp, Homo sapien
cacaaacgtgttccgggcaatgccg

SEQ ID NO: 3267428 - DNA, 25 bp, Homo sapien
tgttccgggcaatgccgggcagccc

SEQ ID NO: 3267429 - DNA, 25 bp, Homo sapien
aatcagggaccacaaacgtgttccg

SEQ ID NO: 3267430 - DNA, 25 bp, Homo sapien
ctagagatggaatcagggaccacaa

SEQ ID NO: 3267431 - DNA, 25 bp, Homo sapien
ctcagtgtgctgcagcctagtgttg

SEQ ID NO: 3267432 - DNA, 25 bp, Homo sapien
gctgcagcctagtgttgtttccgag

SEQ ID NO: 3267433 - DNA, 25 bp, Homo sapien
gtgtgctgcagcctagtgttgtttc

SEQ ID NO: 3267434 - DNA, 25 bp, Homo sapien
cagcctagtgttgtttccgagtgca

SEQ ID NO: 3267435 - DNA, 25 bp, Homo sapien
tggaactcgccctcatcaatcgcat

SEQ ID NO: 3267436 - DNA, 25 bp, Homo sapien
gcaggctgtctgcaataattggcca

SEQ ID NO: 3267437 - DNA, 25 bp, Homo sapien
ccgggattgcctgggtgaagctcct

SEQ ID NO: 3267438 - DNA, 25 bp, Homo sapien
gaaatacagttacgttgctgctcat

SEQ ID NO: 3267439 - DNA, 25 bp, Homo sapien
gagcatagattatggagccagtccc

SEQ ID NO: 3267440 - DNA, 25 bp, Homo sapien
gaatcacctatctcaggaatgctgg

SEQ ID NO: 3267441 - DNA, 25 bp, Homo sapien
cactaacgggtgtgccaagctgtgc

SEQ ID NO: 3267442 - DNA, 25 bp, Homo sapien
cccctgtactgtggagaagccaata

SEQ ID NO: 3267443 - DNA, 25 bp, Homo sapien
agtggccttgccctgatgatctgcc

SEQ ID NO: 3267444 - DNA, 25 bp, Homo sapien
ggtgagtggccttgccctgatgatc

SEQ ID NO: 3267445 - DNA, 25 bp, Homo sapien
tgagtggccttgccctgatgatctg

SEQ ID NO: 3267446 - DNA, 25 bp, Homo sapien
gtgagtggccttgccctgatgatct

SEQ ID NO: 3267447 - DNA, 25 bp, Homo sapien
tgctcccgatttctggctcttctgg

SEQ ID NO: 3267448 - DNA, 25 bp, Homo sapien
atgctcccgatttctggctcttctg

SEQ ID NO: 3267449 - DNA, 25 bp, Homo sapien
gcatgctcccgatttctggctcttc

SEQ ID NO: 3267450 - DNA, 25 bp, Homo sapien
catgctcccgatttctggctcttct

SEQ ID NO: 3267451 - DNA, 25 bp, Homo sapien
ctttgacattcgcactgttcaggca

SEQ ID NO: 3267452 - DNA, 25 bp, Homo sapien
ttcaggcatgcctcataactagctt

SEQ ID NO: 3267453 - DNA, 25 bp, Homo sapien
aataagtaacgcagtgaccagaagc

SEQ ID NO: 3267454 - DNA, 25 bp, Homo sapien
tctcggaagaaagcagagatgatcg

SEQ ID NO: 3267455 - DNA, 25 bp, Homo sapien
atagctcattgtcttcagaaaagtc

SEQ ID NO: 3267456 - DNA, 25 bp, Homo sapien
agatagctcattgtcttcagaaaag

SEQ ID NO: 3267457 - DNA, 25 bp, Homo sapien
gagatagctcattgtcttcagaaaa

SEQ ID NO: 3267458 - DNA, 25 bp, Homo sapien
gatagctcattgtcttcagaaaagt

SEQ ID NO: 3267459 - DNA, 25 bp, Homo sapien
gatgctagaacagtatccaggaaga

SEQ ID NO: 3267460 - DNA, 25 bp, Homo sapien
ggaacacggataataccctgccagt

SEQ ID NO: 3267461 - DNA, 25 bp, Homo sapien
caaacggcatgcatttggatccggt

SEQ ID NO: 3267462 - DNA, 25 bp, Homo sapien
ggatccggtaatcccatatcaccag

SEQ ID NO: 3267463 - DNA, 25 bp, Homo sapien
cctgcatcaggtccggtgctgcccc

SEQ ID NO: 3267464 - DNA, 25 bp, Homo sapien
caagatttctagacattgaaacact

SEQ ID NO: 3267465 - DNA, 25 bp, Homo sapien
tgcatcaggtccggtgctgcccctg

SEQ ID NO: 3267466 - DNA, 25 bp, Homo sapien
gcatcaggtccggtgctgcccctga

SEQ ID NO: 3267467 - DNA, 25 bp, Homo sapien
gctccgagtgcccttctggggttaa

SEQ ID NO: 3267468 - DNA, 25 bp, Homo sapien
ctgcagaaatctagggcaattgttg

SEQ ID NO: 3267469 - DNA, 25 bp, Homo sapien
gtgctccgagtgcccttctggggtt

SEQ ID NO: 3267470 - DNA, 25 bp, Homo sapien
actgcagaaatctagggcaattgtt

SEQ ID NO: 3267471 - DNA, 25 bp, Homo sapien
gatctgctgatttggagcctcatgt

SEQ ID NO: 3267472 - DNA, 25 bp, Homo sapien
taactacttgggtgggcaatagctc

SEQ ID NO: 3267473 - DNA, 25 bp, Homo sapien
tgagaaccacttgcctgtaatgatg

SEQ ID NO: 3267474 - DNA, 25 bp, Homo sapien
tggaagctgtaagtgatgcttcttc

SEQ ID NO: 3267475 - DNA, 25 bp, Homo sapien
gcattaattcgaatcctgttacaaa

SEQ ID NO: 3267476 - DNA, 25 bp, Homo sapien
tgttacaaatggacattgaaatagg

SEQ ID NO: 3267477 - DNA, 25 bp, Homo sapien
gaatcctgttacaaatggacattga

SEQ ID NO: 3267478 - DNA, 25 bp, Homo sapien
caagcagaaagcattaattcgaatc

SEQ ID NO: 3267479 - DNA, 25 bp, Homo sapien
tgtgtaactgagtgcctttggacac

SEQ ID NO: 3267480 - DNA, 25 bp, Homo sapien
tgattgtgtaactgagtgcctttgg

SEQ ID NO: 3267481 - DNA, 25 bp, Homo sapien
taggctttgtactgagtcctgattg

SEQ ID NO: 3267482 - DNA, 25 bp, Homo sapien
ccattaggctttgtactgagtcctg

SEQ ID NO: 3267483 - DNA, 25 bp, Homo sapien
aacttctggtgacaattgcatggga

SEQ ID NO: 3267484 - DNA, 25 bp, Homo sapien
ccagtgatttgtgctctggagaaac

SEQ ID NO: 3267485 - DNA, 25 bp, Homo sapien
tggaagcttttccaactgagcaatc

SEQ ID NO: 3267486 - DNA, 25 bp, Homo sapien
gatgtactgaaaatccgggtaagcc

SEQ ID NO: 3267487 - DNA, 25 bp, Homo sapien
actgtcaggtctgttttttcatcaa

SEQ ID NO: 3267488 - DNA, 25 bp, Homo sapien
tcaggtctgttttttcatcaacagg

SEQ ID NO: 3267489 - DNA, 25 bp, Homo sapien
cactttactgtcaggtctgtttttt

SEQ ID NO: 3267490 - DNA, 25 bp, Homo sapien
ctttactgtcaggtctgttttttca

SEQ ID NO: 3267491 - DNA, 25 bp, Homo sapien
tcggttgattaggaagttgagccac

SEQ ID NO: 3267492 - DNA, 25 bp, Homo sapien
gatccagacagatgaaggaggccat

SEQ ID NO: 3267493 - DNA, 25 bp, Homo sapien
aggctttccatttcaggcacgttgc

SEQ ID NO: 3267494 - DNA, 25 bp, Homo sapien
caaaggtgatttgcacaaggtccct

SEQ ID NO: 3267495 - DNA, 25 bp, Homo sapien
tgatagctgtgccactgaaggtgca

SEQ ID NO: 3267496 - DNA, 25 bp, Homo sapien
tgaaggtgcatatttcaaggtgcct

SEQ ID NO: 3267497 - DNA, 25 bp, Homo sapien
ctaatatatggcaaaacctgatagc

SEQ ID NO: 3267498 - DNA, 25 bp, Homo sapien
caaaacctgatagctgtgccactga

SEQ ID NO: 3267499 - DNA, 25 bp, Homo sapien
gcaggtccatcatctcagtggagaa

SEQ ID NO: 3267500 - DNA, 25 bp, Homo sapien
tgcaccgaggcagaactgactggct

SEQ ID NO: 3267501 - DNA, 25 bp, Homo sapien
ggccgcagaatgatccagcaacagt

SEQ ID NO: 3267502 - DNA, 25 bp, Homo sapien
gagcagtcttcataggcaggtccat

SEQ ID NO: 3267503 - DNA, 25 bp, Homo sapien
ggagagatgctcataacagcattta

SEQ ID NO: 3267504 - DNA, 25 bp, Homo sapien
tactgggttaacagcagcgtgagaa

SEQ ID NO: 3267505 - DNA, 25 bp, Homo sapien
taacagcagcgtgagaaagtctttc

SEQ ID NO: 3267506 - DNA, 25 bp, Homo sapien
ccatgccttaagatactgggttaac

SEQ ID NO: 3267507 - DNA, 25 bp, Homo sapien
ttaagatactgggttaacagcagcg

SEQ ID NO: 3267508 - DNA, 25 bp, Homo sapien
agaggaactagttggttggccttgt

SEQ ID NO: 3267509 - DNA, 25 bp, Homo sapien
gtatagcctgtatatccaacttcat

SEQ ID NO: 3267510 - DNA, 25 bp, Homo sapien
ggctgtatagcctgtatatccaact

SEQ ID NO: 3267511 - DNA, 25 bp, Homo sapien
gggcaggctgtatagcctgtatatc

SEQ ID NO: 3267512 - DNA, 25 bp, Homo sapien
tggctaattgggtcttcagtgcaaa

SEQ ID NO: 3267513 - DNA, 25 bp, Homo sapien
ggccttggcgttccacagatgtgac

SEQ ID NO: 3267514 - DNA, 25 bp, Homo sapien
tgtagccagaacatgaaaatcaatc

SEQ ID NO: 3267515 - DNA, 25 bp, Homo sapien
tcaatctaccgatgaccaaaagggc

SEQ ID NO: 3267516 - DNA, 25 bp, Homo sapien
cagtatccacatgtgtatggttggt

SEQ ID NO: 3267517 - DNA, 25 bp, Homo sapien
tcagtatccacatgtgtatggttgg

SEQ ID NO: 3267518 - DNA, 25 bp, Homo sapien
gtatccacatgtgtatggttggtac

SEQ ID NO: 3267519 - DNA, 25 bp, Homo sapien
agtatccacatgtgtatggttggta

SEQ ID NO: 3267520 - DNA, 25 bp, Homo sapien
tcacagtgtggttgaccccgatgcc

SEQ ID NO: 3267521 - DNA, 25 bp, Homo sapien
gcatgtgtgcatagttgaattcacg

SEQ ID NO: 3267522 - DNA, 25 bp, Homo sapien
tctgttgctgataacaccctcctgc

SEQ ID NO: 3267523 - DNA, 25 bp, Homo sapien
atgatatccacaaagagcagtcaca

SEQ ID NO: 3267524 - DNA, 25 bp, Homo sapien
tgcacttgtttagttccctctgcat

SEQ ID NO: 3267525 - DNA, 25 bp, Homo sapien
tatgaaagcagctccccataactct

SEQ ID NO: 3267526 - DNA, 25 bp, Homo sapien
atttgtatgaaagcagctccccata

SEQ ID NO: 3267527 - DNA, 25 bp, Homo sapien
tccgtggttggagcccatggctctt

SEQ ID NO: 3267528 - DNA, 25 bp, Homo sapien
ctccgtggttggagcccatggctct

SEQ ID NO: 3267529 - DNA, 25 bp, Homo sapien
aacaacattgtagatacagtgaagg

SEQ ID NO: 3267530 - DNA, 25 bp, Homo sapien
tagatacagtgaaggtgagtagttt

SEQ ID NO: 3267531 - DNA, 25 bp, Homo sapien
caacattgtagatacagtgaaggtg

SEQ ID NO: 3267532 - DNA, 25 bp, Homo sapien
cattgtagatacagtgaaggtgagt

SEQ ID NO: 3267533 - DNA, 25 bp, Homo sapien
cattagagagaagtcgggaagcaca

SEQ ID NO: 3267534 - DNA, 25 bp, Homo sapien
gcactgcccaaacagaacaggtgag

SEQ ID NO: 3267535 - DNA, 25 bp, Homo sapien
gagttgccctcactagtacggaaga

SEQ ID NO: 3267536 - DNA, 25 bp, Homo sapien
ttacttgagtcgaggctccactgcc

SEQ ID NO: 3267537 - DNA, 25 bp, Homo sapien
tgcaggtctttatcaacacaagagg

SEQ ID NO: 3267538 - DNA, 25 bp, Homo sapien
tctgcaggtctttatcaacacaaga

SEQ ID NO: 3267539 - DNA, 25 bp, Homo sapien
gtctgcaggtctttatcaacacaag

SEQ ID NO: 3267540 - DNA, 25 bp, Homo sapien
caggtctttatcaacacaagaggct

SEQ ID NO: 3267541 - DNA, 25 bp, Homo sapien
ctttaggaatctagaataagaccct

SEQ ID NO: 3267542 - DNA, 25 bp, Homo sapien
aagaccctatgacggcttgcatttc

SEQ ID NO: 3267543 - DNA, 25 bp, Homo sapien
cttttggccacaggacgaagctgtg

SEQ ID NO: 3267544 - DNA, 25 bp, Homo sapien
caggacgaagctgtgatctagccct

SEQ ID NO: 3267545 - DNA, 25 bp, Homo sapien
tggagagcaaggtgatgaaaagggc

SEQ ID NO: 3267546 - DNA, 25 bp, Homo sapien
ttttcctgatccactggtgtgtgaa

SEQ ID NO: 3267547 - DNA, 25 bp, Homo sapien
tcttgtcctccttttgatactatcc

SEQ ID NO: 3267548 - DNA, 25 bp, Homo sapien
gatactatccttctggtggtccaga

SEQ ID NO: 3267549 - DNA, 25 bp, Homo sapien
tatatttattcagtgggcagagcta

SEQ ID NO: 3267550 - DNA, 25 bp, Homo sapien
cagcaaggcctcaggttatgactgc

SEQ ID NO: 3267551 - DNA, 25 bp, Homo sapien
agataactagggaattgaagacctc

SEQ ID NO: 3267552 - DNA, 25 bp, Homo sapien
aaaatttccctccattgtgtcacag

SEQ ID NO: 3267553 - DNA, 25 bp, Homo sapien
gagtaggaggataagcagagcacat

SEQ ID NO: 3267554 - DNA, 25 bp, Homo sapien
ctgttcctagcacggcgttcccatt

SEQ ID NO: 3267555 - DNA, 25 bp, Homo sapien
aatctgctccctgctaattggtgca

SEQ ID NO: 3267556 - DNA, 25 bp, Homo sapien
ccattctcaaggtgctctcctgggt

SEQ ID NO: 3267557 - DNA, 25 bp, Homo sapien
ggagccaaggcactttggggaagct

SEQ ID NO: 3267558 - DNA, 25 bp, Homo sapien
cttgggagccaaggcactttgggga

SEQ ID NO: 3267559 - DNA, 25 bp, Homo sapien
tgggagccaaggcactttggggaag

SEQ ID NO: 3267560 - DNA, 25 bp, Homo sapien
agccaaggcactttggggaagctgc

SEQ ID NO: 3267561 - DNA, 25 bp, Homo sapien
ggtacactagtcttggctgatcctc

SEQ ID NO: 3267562 - DNA, 25 bp, Homo sapien
cagtttgaccaagctgatgcagctc

SEQ ID NO: 3267563 - DNA, 25 bp, Homo sapien
tattgagcccaacacaatgctaagc

SEQ ID NO: 3267564 - DNA, 25 bp, Homo sapien
tatttttcccgcatatcacctgaag

SEQ ID NO: 3267565 - DNA, 25 bp, Homo sapien
ttaggctttagcaatctcagagttc

SEQ ID NO: 3267566 - DNA, 25 bp, Homo sapien
caaattattaggctttagcaatctc

SEQ ID NO: 3267567 - DNA, 25 bp, Homo sapien
tggtcaaattattaggctttagcaa

SEQ ID NO: 3267568 - DNA, 25 bp, Homo sapien
tattaggctttagcaatctcagagt

SEQ ID NO: 3267569 - DNA, 25 bp, Homo sapien
caccggtgaggtaatagtaccacct

SEQ ID NO: 3267570 - DNA, 25 bp, Homo sapien
ctgtcaatatcaccggtgaggtaat

SEQ ID NO: 3267571 - DNA, 25 bp, Homo sapien
tatcaccggtgaggtaatagtacca

SEQ ID NO: 3267572 - DNA, 25 bp, Homo sapien
tcaatatcaccggtgaggtaatagt

SEQ ID NO: 3267573 - DNA, 25 bp, Homo sapien
ggtgtccgaataccaagactgagag

SEQ ID NO: 3267574 - DNA, 25 bp, Homo sapien
gagagcactgattcctgttatctgc

SEQ ID NO: 3267575 - DNA, 25 bp, Homo sapien
tttcttggtatccatgtgggtttcc

SEQ ID NO: 3267576 - DNA, 25 bp, Homo sapien
tccatgtgtggtgtccgaataccaa

SEQ ID NO: 3267577 - DNA, 25 bp, Homo sapien
ttttagccgcatgaataatatcagc

SEQ ID NO: 3267578 - DNA, 25 bp, Homo sapien
gaatcattatgctgccctgcattgg

SEQ ID NO: 3267579 - DNA, 25 bp, Homo sapien
taacaatacccgacagtcagaggcc

SEQ ID NO: 3267580 - DNA, 25 bp, Homo sapien
gataagggctgcaacttctacaggg

SEQ ID NO: 3267581 - DNA, 25 bp, Homo sapien
tggagggtctgtaacggtactctta

SEQ ID NO: 3267582 - DNA, 25 bp, Homo sapien
atttgaggtggatatgaaagcactg

SEQ ID NO: 3267583 - DNA, 25 bp, Homo sapien
aagcactggagcatagaaatttgtg

SEQ ID NO: 3267584 - DNA, 25 bp, Homo sapien
caaataatccaaagcatgaatttga

SEQ ID NO: 3267585 - DNA, 25 bp, Homo sapien
ctctgcataaatccctcagatcttg

SEQ ID NO: 3267586 - DNA, 25 bp, Homo sapien
gcctctgcataaatccctcagatct

SEQ ID NO: 3267587 - DNA, 25 bp, Homo sapien
gcataaatccctcagatcttgattt

SEQ ID NO: 3267588 - DNA, 25 bp, Homo sapien
ctgcctctgcataaatccctcagat

SEQ ID NO: 3267589 - DNA, 25 bp, Homo sapien
cctctctgatctgattggactaaag

SEQ ID NO: 3267590 - DNA, 25 bp, Homo sapien
taattgtctactggagggatgagga

SEQ ID NO: 3267591 - DNA, 25 bp, Homo sapien
atgcaggtgtcagggatatcatccc

SEQ ID NO: 3267592 - DNA, 25 bp, Homo sapien
gaggaactgccctcgatgggatgca

SEQ ID NO: 3267593 - DNA, 25 bp, Homo sapien
attgtgaactcaggggtgcaggcat

SEQ ID NO: 3267594 - DNA, 25 bp, Homo sapien
gtattgtgaactcaggggtgcaggc

SEQ ID NO: 3267595 - DNA, 25 bp, Homo sapien
tattgtgaactcaggggtgcaggca

SEQ ID NO: 3267596 - DNA, 25 bp, Homo sapien
gggttgatcttgctccagagtgttt

SEQ ID NO: 3267597 - DNA, 25 bp, Homo sapien
ttcttccacagttggctgttccgtg

SEQ ID NO: 3267598 - DNA, 25 bp, Homo sapien
ctgttccgtgtctgcatagatctgc

SEQ ID NO: 3267599 - DNA, 25 bp, Homo sapien
cacagttggctgttccgtgtctgca

SEQ ID NO: 3267600 - DNA, 25 bp, Homo sapien
taaagattctgctcgcagatttgaa

SEQ ID NO: 3267601 - DNA, 25 bp, Homo sapien
aagatcggctttggcaaagctgcca

SEQ ID NO: 3267602 - DNA, 25 bp, Homo sapien
cagatttgaagatcggctttggcaa

SEQ ID NO: 3267603 - DNA, 25 bp, Homo sapien
agctgccagtcctgtattacttgac

SEQ ID NO: 3267604 - DNA, 25 bp, Homo sapien
cgctgttagtctgaagggctttcct

SEQ ID NO: 3267605 - DNA, 25 bp, Homo sapien
ccgctgttagtctgaagggctttcc

SEQ ID NO: 3267606 - DNA, 25 bp, Homo sapien
ttagtctgaagggctttcctttgag

SEQ ID NO: 3267607 - DNA, 25 bp, Homo sapien
tctgaagggctttcctttgagggta

SEQ ID NO: 3267608 - DNA, 25 bp, Homo sapien
ggctgaagataatgagccctttcct

SEQ ID NO: 3267609 - DNA, 25 bp, Homo sapien
ctgcttgggctgaagataatgagcc

SEQ ID NO: 3267610 - DNA, 25 bp, Homo sapien
tgccctttcccatgcataatgccga

SEQ ID NO: 3267611 - DNA, 25 bp, Homo sapien
cataatgccgattgatgtcaacgag

SEQ ID NO: 3267612 - DNA, 25 bp, Homo sapien
ttctggtttatcacagaattcagag

SEQ ID NO: 3267613 - DNA, 25 bp, Homo sapien
aagattctggtttatcacagaattc

SEQ ID NO: 3267614 - DNA, 25 bp, Homo sapien
ggtttatcacagaattcagagtcac

SEQ ID NO: 3267615 - DNA, 25 bp, Homo sapien
ctggtttatcacagaattcagagtc

SEQ ID NO: 3267616 - DNA, 25 bp, Homo sapien
gatgagggcgatgatgatagagaac

SEQ ID NO: 3267617 - DNA, 25 bp, Homo sapien
caagtgtgggaattcggatgagggc

SEQ ID NO: 3267618 - DNA, 25 bp, Homo sapien
tcgaatgcatagaccaagtgtggga

SEQ ID NO: 3267619 - DNA, 25 bp, Homo sapien
tcagttagtcgaatgcatagaccaa

SEQ ID NO: 3267620 - DNA, 25 bp, Homo sapien
acagtgactggcaaaagaggggcca

SEQ ID NO: 3267621 - DNA, 25 bp, Homo sapien
aaaagaggggccatttatctctaat

SEQ ID NO: 3267622 - DNA, 25 bp, Homo sapien
aagaggggccatttatctctaatgc

SEQ ID NO: 3267623 - DNA, 25 bp, Homo sapien
actggcaaaagaggggccatttatc

SEQ ID NO: 3267624 - DNA, 25 bp, Homo sapien
tggttgctgactgcctttggaagtc

SEQ ID NO: 3267625 - DNA, 25 bp, Homo sapien
tttggaagtcctgttcatacagacc

SEQ ID NO: 3267626 - DNA, 25 bp, Homo sapien
aagctaccagatacttttgctggct

SEQ ID NO: 3267627 - DNA, 25 bp, Homo sapien
ctctctactggtgtcctcttgacct

SEQ ID NO: 3267628 - DNA, 25 bp, Homo sapien
gacaagacaagtctggacactggct

SEQ ID NO: 3267629 - DNA, 25 bp, Homo sapien
tgctcacccgttggacactggctct

SEQ ID NO: 3267630 - DNA, 25 bp, Homo sapien
ttgaagacaagacaagtctggacac

SEQ ID NO: 3267631 - DNA, 25 bp, Homo sapien
atgctcacccgttggacactggctc

SEQ ID NO: 3267632 - DNA, 25 bp, Homo sapien
ggttaatgttcacacatcgtttggc

SEQ ID NO: 3267633 - DNA, 25 bp, Homo sapien
cacatcttgtccatggttaatgttc

SEQ ID NO: 3267634 - DNA, 25 bp, Homo sapien
cacacatcgtttggcttgacaaact

SEQ ID NO: 3267635 - DNA, 25 bp, Homo sapien
tgtccatggttaatgttcacacatc

SEQ ID NO: 3267636 - DNA, 25 bp, Homo sapien
tattggtaaagatgtagaataaact

SEQ ID NO: 3267637 - DNA, 25 bp, Homo sapien
gggctgaattaatgcgtttttgctg

SEQ ID NO: 3267638 - DNA, 25 bp, Homo sapien
ctgaattaatgcgtttttgctgcat

SEQ ID NO: 3267639 - DNA, 25 bp, Homo sapien
aggttattggtaaagatgtagaata

SEQ ID NO: 3267640 - DNA, 25 bp, Homo sapien
tttcatctcgagtgctgtcaagtgt

SEQ ID NO: 3267641 - DNA, 25 bp, Homo sapien
catgggaagtgatactgactgcctc

SEQ ID NO: 3267642 - DNA, 25 bp, Homo sapien
tctagacttgagtgggtgaatactt

SEQ ID NO: 3267643 - DNA, 25 bp, Homo sapien
tcaagtgtatttgcacccgtgacca

SEQ ID NO: 3267644 - DNA, 25 bp, Homo sapien
ttcccatggaagtgaagcaaggtgc

SEQ ID NO: 3267645 - DNA, 25 bp, Homo sapien
tgctagaaagtacttcttccctgtt

SEQ ID NO: 3267646 - DNA, 25 bp, Homo sapien
cgtcttccaacttagtcttcccatg

SEQ ID NO: 3267647 - DNA, 25 bp, Homo sapien
gaagcaaggtgctagaaagtacttc

SEQ ID NO: 3267648 - DNA, 25 bp, Homo sapien
attgttggtttaaaattctccatca

SEQ ID NO: 3267649 - DNA, 25 bp, Homo sapien
tattgttggtttaaaattctccatc

SEQ ID NO: 3267650 - DNA, 25 bp, Homo sapien
atattgttggtttaaaattctccat

SEQ ID NO: 3267651 - DNA, 25 bp, Homo sapien
ttgttggtttaaaattctccatcat

SEQ ID NO: 3267652 - DNA, 25 bp, Homo sapien
cgaatgtgtaagctagaatcttcct

SEQ ID NO: 3267653 - DNA, 25 bp, Homo sapien
tgtcctgtgaaacatagcgaatgtg

SEQ ID NO: 3267654 - DNA, 25 bp, Homo sapien
catagcgaatgtgtaagctagaatc

SEQ ID NO: 3267655 - DNA, 25 bp, Homo sapien
gaaacatagcgaatgtgtaagctag

SEQ ID NO: 3267656 - DNA, 25 bp, Homo sapien
aattttgacaccagggttggatgag

SEQ ID NO: 3267657 - DNA, 25 bp, Homo sapien
caccagggttggatgagtgacccat

SEQ ID NO: 3267658 - DNA, 25 bp, Homo sapien
agaattttgacaccagggttggatg

SEQ ID NO: 3267659 - DNA, 25 bp, Homo sapien
gacaccagggttggatgagtgaccc

SEQ ID NO: 3267660 - DNA, 25 bp, Homo sapien
attctggtgaaaatagctctccctt

SEQ ID NO: 3267661 - DNA, 25 bp, Homo sapien
aattctggtgaaaatagctctccct

SEQ ID NO: 3267662 - DNA, 25 bp, Homo sapien
cagtgtttccgaaaattctggtgaa

SEQ ID NO: 3267663 - DNA, 25 bp, Homo sapien
catgggactgagaatacttgttacc

SEQ ID NO: 3267664 - DNA, 25 bp, Homo sapien
ggtactcggaaaatctgccttgaca

SEQ ID NO: 3267665 - DNA, 25 bp, Homo sapien
taaaatcaaccatatgtgaagacct

SEQ ID NO: 3267666 - DNA, 25 bp, Homo sapien
tattacatatagacttccggacccc

SEQ ID NO: 3267667 - DNA, 25 bp, Homo sapien
gccaagacagtgtagccaaaggtcc

SEQ ID NO: 3267668 - DNA, 25 bp, Homo sapien
cgtgcagcagggattgctcccttgc

SEQ ID NO: 3267669 - DNA, 25 bp, Homo sapien
gaatgattatgggtccgtgcagcag

SEQ ID NO: 3267670 - DNA, 25 bp, Homo sapien
cagtttgtaactgagggctgtgtca

SEQ ID NO: 3267671 - DNA, 25 bp, Homo sapien
gaacattcgattgcatgaatagtaa

SEQ ID NO: 3267672 - DNA, 25 bp, Homo sapien
tagtaatgtctaccagcaaccctct

SEQ ID NO: 3267673 - DNA, 25 bp, Homo sapien
tctaccactcttttagacaccttga

SEQ ID NO: 3267674 - DNA, 25 bp, Homo sapien
agattatcttttctaccactctttt

SEQ ID NO: 3267675 - DNA, 25 bp, Homo sapien
ttcaggaaatttcaaagactcagtt

SEQ ID NO: 3267676 - DNA, 25 bp, Homo sapien
gaaatttcaaagactcagtttccat

SEQ ID NO: 3267677 - DNA, 25 bp, Homo sapien
caggaaatttcaaagactcagtttc

SEQ ID NO: 3267678 - DNA, 25 bp, Homo sapien
gttcaggaaatttcaaagactcagt

SEQ ID NO: 3267679 - DNA, 25 bp, Homo sapien
gctggttagtagtggttggaaaatc

SEQ ID NO: 3267680 - DNA, 25 bp, Homo sapien
catttgctggttagtagtggttgga

SEQ ID NO: 3267681 - DNA, 25 bp, Homo sapien
gttagtagtggttggaaaatcattc

SEQ ID NO: 3267682 - DNA, 25 bp, Homo sapien
tgctgcatttgctggttagtagtgg

SEQ ID NO: 3267683 - DNA, 25 bp, Homo sapien
gccatcttagtgtatggcctttgtc

SEQ ID NO: 3267684 - DNA, 25 bp, Homo sapien
ctgctgccatcttagtgtatggcct

SEQ ID NO: 3267685 - DNA, 25 bp, Homo sapien
agaatgtattcagaaaccagtgatc

SEQ ID NO: 3267686 - DNA, 25 bp, Homo sapien
tgtgctcaagaatgtattcagaaac

SEQ ID NO: 3267687 - DNA, 25 bp, Homo sapien
cctaatttagagctcagttggagcc

SEQ ID NO: 3267688 - DNA, 25 bp, Homo sapien
ttcatctcctaatttagagctcagt

SEQ ID NO: 3267689 - DNA, 25 bp, Homo sapien
tttagagctcagttggagcctgtgc

SEQ ID NO: 3267690 - DNA, 25 bp, Homo sapien
gagctcagttggagcctgtgctctc

SEQ ID NO: 3267691 - DNA, 25 bp, Homo sapien
gcccagggttctgcaaagctcaaga

SEQ ID NO: 3267692 - DNA, 25 bp, Homo sapien
ggtgcatggctcctgagttattctg

SEQ ID NO: 3267693 - DNA, 25 bp, Homo sapien
cactgcccaactgcttttcgtgtgg

SEQ ID NO: 3267694 - DNA, 25 bp, Homo sapien
tgggttgggaaagccagcctttatc

SEQ ID NO: 3267695 - DNA, 25 bp, Homo sapien
tacataacttgaacagcgctttagg

SEQ ID NO: 3267696 - DNA, 25 bp, Homo sapien
actggcacgttttcttcaagcagcg

SEQ ID NO: 3267697 - DNA, 25 bp, Homo sapien
tcaaattggattgggacacctgtgt

SEQ ID NO: 3267698 - DNA, 25 bp, Homo sapien
caagcagcgttgacatacatacact

SEQ ID NO: 3267699 - DNA, 25 bp, Homo sapien
ggcgcagtaaaaacaccatctcagc

SEQ ID NO: 3267700 - DNA, 25 bp, Homo sapien
cttttatacgaaaacccaggcgcag

SEQ ID NO: 3267701 - DNA, 25 bp, Homo sapien
tcccttgacactgagcttagcaact

SEQ ID NO: 3267702 - DNA, 25 bp, Homo sapien
gatgctcttgctggtagttgttcat

SEQ ID NO: 3267703 - DNA, 25 bp, Homo sapien
agaatgcctttggtggctgacagag

SEQ ID NO: 3267704 - DNA, 25 bp, Homo sapien
cagaatgcctttggtggctgacaga

SEQ ID NO: 3267705 - DNA, 25 bp, Homo sapien
ggggcagaatgcctttggtggctga

SEQ ID NO: 3267706 - DNA, 25 bp, Homo sapien
ggcagaatgcctttggtggctgaca

SEQ ID NO: 3267707 - DNA, 25 bp, Homo sapien
tagcccttctgatcctcagaaagcc

SEQ ID NO: 3267708 - DNA, 25 bp, Homo sapien
ggaaatagcccttctgatcctcaga

SEQ ID NO: 3267709 - DNA, 25 bp, Homo sapien
atggaaatagcccttctgatcctca

SEQ ID NO: 3267710 - DNA, 25 bp, Homo sapien
aatagcccttctgatcctcagaaag

SEQ ID NO: 3267711 - DNA, 25 bp, Homo sapien
gaattagtctgcagcacaacagtaa

SEQ ID NO: 3267712 - DNA, 25 bp, Homo sapien
aacaagaggaattagtctgcagcac

SEQ ID NO: 3267713 - DNA, 25 bp, Homo sapien
gaggaattagtctgcagcacaacag

SEQ ID NO: 3267714 - DNA, 25 bp, Homo sapien
tagtctgcagcacaacagtaaaatg

SEQ ID NO: 3267715 - DNA, 25 bp, Homo sapien
tagcggctgcaccatcagcatgtcc

SEQ ID NO: 3267716 - DNA, 25 bp, Homo sapien
gcaccatcagcatgtcctgatccaa

SEQ ID NO: 3267717 - DNA, 25 bp, Homo sapien
ggctgcaccatcagcatgtcctgat

SEQ ID NO: 3267718 - DNA, 25 bp, Homo sapien
ctttgatagcggctgcaccatcagc

SEQ ID NO: 3267719 - DNA, 25 bp, Homo sapien
tctcctttgagtcttgcttactacc

SEQ ID NO: 3267720 - DNA, 25 bp, Homo sapien
cctgcattaaggtggcatagtacct

SEQ ID NO: 3267721 - DNA, 25 bp, Homo sapien
accttgcttcatcatgcctttcctg

SEQ ID NO: 3267722 - DNA, 25 bp, Homo sapien
tgccaatcactcgtggtatccacct

SEQ ID NO: 3267723 - DNA, 25 bp, Homo sapien
gtttctgtgcagtgtaggtgctgat

SEQ ID NO: 3267724 - DNA, 25 bp, Homo sapien
tgtaggtgctgatgtttatggaaga

SEQ ID NO: 3267725 - DNA, 25 bp, Homo sapien
tctgtgcagtgtaggtgctgatgtt

SEQ ID NO: 3267726 - DNA, 25 bp, Homo sapien
tgcagtgtaggtgctgatgtttatg

SEQ ID NO: 3267727 - DNA, 25 bp, Homo sapien
cagtcaattgacgaggcaaacatca

SEQ ID NO: 3267728 - DNA, 25 bp, Homo sapien
tccagcgggactgcatgactgtttc

SEQ ID NO: 3267729 - DNA, 25 bp, Homo sapien
gatctgaacccgcaatacttctgag

SEQ ID NO: 3267730 - DNA, 25 bp, Homo sapien
ccatcaatattgaggcaaggcctgt

SEQ ID NO: 3267731 - DNA, 25 bp, Homo sapien
atgctggtgggaacatgaagtccca

SEQ ID NO: 3267732 - DNA, 25 bp, Homo sapien
gaattgcatgctggtgggaacatga

SEQ ID NO: 3267733 - DNA, 25 bp, Homo sapien
atactgtttatgaattgcatgctgg

SEQ ID NO: 3267734 - DNA, 25 bp, Homo sapien
tgtttatgaattgcatgctggtggg

SEQ ID NO: 3267735 - DNA, 25 bp, Homo sapien
tcagaggtacttgactttaatttgt

SEQ ID NO: 3267736 - DNA, 25 bp, Homo sapien
ttcatttatctcagaggtacttgac

SEQ ID NO: 3267737 - DNA, 25 bp, Homo sapien
catttatctcagaggtacttgactt

SEQ ID NO: 3267738 - DNA, 25 bp, Homo sapien
tatctcagaggtacttgactttaat

SEQ ID NO: 3267739 - DNA, 25 bp, Homo sapien
cctgggcagtgaggtaactgttcat

SEQ ID NO: 3267740 - DNA, 25 bp, Homo sapien
tctctccctatgtcttctctagctg

SEQ ID NO: 3267741 - DNA, 25 bp, Homo sapien
tcttctctagctgaatatgtaatgt

SEQ ID NO: 3267742 - DNA, 25 bp, Homo sapien
ctgtcggggtagataaaagcctgct

SEQ ID NO: 3267743 - DNA, 25 bp, Homo sapien
gtctctgtcggggtagataaaagcc

SEQ ID NO: 3267744 - DNA, 25 bp, Homo sapien
tgtcacattgttctattctgattaa

SEQ ID NO: 3267745 - DNA, 25 bp, Homo sapien
cacattgttctattctgattaaatc

SEQ ID NO: 3267746 - DNA, 25 bp, Homo sapien
gtcacattgttctattctgattaaa

SEQ ID NO: 3267747 - DNA, 25 bp, Homo sapien
acattgttctattctgattaaatcc

SEQ ID NO: 3267748 - DNA, 25 bp, Homo sapien
catcaaagcacttactattcatgcc

SEQ ID NO: 3267749 - DNA, 25 bp, Homo sapien
agcatcaaagcacttactattcatg

SEQ ID NO: 3267750 - DNA, 25 bp, Homo sapien
caaagcacttactattcatgcccat

SEQ ID NO: 3267751 - DNA, 25 bp, Homo sapien
tcaaagcacttactattcatgccca

SEQ ID NO: 3267752 - DNA, 25 bp, Homo sapien
gtaaagttcttcaggatattcaatg

SEQ ID NO: 3267753 - DNA, 25 bp, Homo sapien
cccgtgcaatagaggcattccactg

SEQ ID NO: 3267754 - DNA, 25 bp, Homo sapien
ttttctcttcccgtgcaatagaggc

SEQ ID NO: 3267755 - DNA, 25 bp, Homo sapien
ccgtattgtaccttactcgcataaa

SEQ ID NO: 3267756 - DNA, 25 bp, Homo sapien
cctagcaaaggtctgtagttggtcc

SEQ ID NO: 3267757 - DNA, 25 bp, Homo sapien
tagcaaaggtctgtagttggtccat

SEQ ID NO: 3267758 - DNA, 25 bp, Homo sapien
ccctagcaaaggtctgtagttggtc

SEQ ID NO: 3267759 - DNA, 25 bp, Homo sapien
ctagcaaaggtctgtagttggtcca

SEQ ID NO: 3267760 - DNA, 25 bp, Homo sapien
tctctctgtaactccaattatttcc

SEQ ID NO: 3267761 - DNA, 25 bp, Homo sapien
tctgccacacccaatcattctggca

SEQ ID NO: 3267762 - DNA, 25 bp, Homo sapien
tctctgtaactccaattatttcctt

SEQ ID NO: 3267763 - DNA, 25 bp, Homo sapien
tctgtaactccaattatttccttcc

SEQ ID NO: 3267764 - DNA, 25 bp, Homo sapien
tgtaactgaaggctccaaccactct

SEQ ID NO: 3267765 - DNA, 25 bp, Homo sapien
ctaaatcagtcactttatcaggaca

SEQ ID NO: 3267766 - DNA, 25 bp, Homo sapien
tgagggtccagttcaccaattgtaa

SEQ ID NO: 3267767 - DNA, 25 bp, Homo sapien
cagtcactttatcaggacaatttgt

SEQ ID NO: 3267768 - DNA, 25 bp, Homo sapien
atgttgtttgattccacactcccac

SEQ ID NO: 3267769 - DNA, 25 bp, Homo sapien
aagatttttctacaatgttgtttga

SEQ ID NO: 3267770 - DNA, 25 bp, Homo sapien
tcaaggaaaacatgaagatttttct

SEQ ID NO: 3267771 - DNA, 25 bp, Homo sapien
acatgaagatttttctacaatgttg

SEQ ID NO: 3267772 - DNA, 25 bp, Homo sapien
tcaacctcaatgtcagaaggatgcc

SEQ ID NO: 3267773 - DNA, 25 bp, Homo sapien
gaaggatgccctgctaaccctagca

SEQ ID NO: 3267774 - DNA, 25 bp, Homo sapien
gatgtcggtgatggtctggactttt

SEQ ID NO: 3267775 - DNA, 25 bp, Homo sapien
cacaggcagattggccaaatcctgg

SEQ ID NO: 3267776 - DNA, 25 bp, Homo sapien
ttgcagagatctgatttcgggacat

SEQ ID NO: 3267777 - DNA, 25 bp, Homo sapien
gaaatggagcctctgtacatctgtt

SEQ ID NO: 3267778 - DNA, 25 bp, Homo sapien
tataatgattaccagtttgcaagag

SEQ ID NO: 3267779 - DNA, 25 bp, Homo sapien
caagcataatctgtatagtcacaca

SEQ ID NO: 3267780 - DNA, 25 bp, Homo sapien
tatttcacctgctcaaacactgcat

SEQ ID NO: 3267781 - DNA, 25 bp, Homo sapien
catctactgttctcagtcattgatg

SEQ ID NO: 3267782 - DNA, 25 bp, Homo sapien
tctactgttctcagtcattgatgga

SEQ ID NO: 3267783 - DNA, 25 bp, Homo sapien
tactgttctcagtcattgatggaca

SEQ ID NO: 3267784 - DNA, 25 bp, Homo sapien
tgttctcagtcattgatggacagtg

SEQ ID NO: 3267785 - DNA, 25 bp, Homo sapien
gatatcagtgaaagaagggccactc

SEQ ID NO: 3267786 - DNA, 25 bp, Homo sapien
gcatgtactgcatcctgaagggtgg

SEQ ID NO: 3267787 - DNA, 25 bp, Homo sapien
gagtagggtcaattaccccagtcag

SEQ ID NO: 3267788 - DNA, 25 bp, Homo sapien
gtaaaacagcccaaagtcctctggc

SEQ ID NO: 3267789 - DNA, 25 bp, Homo sapien
ggtaagcactcgatatttgtaaaaa

SEQ ID NO: 3267790 - DNA, 25 bp, Homo sapien
tttgggcctataacatggtaagcac

SEQ ID NO: 3267791 - DNA, 25 bp, Homo sapien
cattgccatgcagatatgactgtat

SEQ ID NO: 3267792 - DNA, 25 bp, Homo sapien
taaggcatgaaataaaggatcacac

SEQ ID NO: 3267793 - DNA, 25 bp, Homo sapien
ataaatcaatctcccgtggcccaga

SEQ ID NO: 3267794 - DNA, 25 bp, Homo sapien
tggcccagagcaaggtagtgaagaa

SEQ ID NO: 3267795 - DNA, 25 bp, Homo sapien
agtgaagaaagcgtaagtgaagcat

SEQ ID NO: 3267796 - DNA, 25 bp, Homo sapien
gtaacgaaacccataaatcaatctc

SEQ ID NO: 3267797 - DNA, 25 bp, Homo sapien
tcctggtaagctgaaactacttgct

SEQ ID NO: 3267798 - DNA, 25 bp, Homo sapien
cctattcgtaattgattggtgctca

SEQ ID NO: 3267799 - DNA, 25 bp, Homo sapien
cagtgtttaactccagaacgttcta

SEQ ID NO: 3267800 - DNA, 25 bp, Homo sapien
tggtgctcaggactatcagtgttta

SEQ ID NO: 3267801 - DNA, 25 bp, Homo sapien
gtaactcacggaagtgaaaagagag

SEQ ID NO: 3267802 - DNA, 25 bp, Homo sapien
gcagattgaattcataggaaggcga

SEQ ID NO: 3267803 - DNA, 25 bp, Homo sapien
tactgaatttagctagggttccgta

SEQ ID NO: 3267804 - DNA, 25 bp, Homo sapien
taggaaggcgatgatgtaactcacg

SEQ ID NO: 3267805 - DNA, 25 bp, Homo sapien
tgtaaccttcaagggaatgccccat

SEQ ID NO: 3267806 - DNA, 25 bp, Homo sapien
caaatcataatctgggctgtaacct

SEQ ID NO: 3267807 - DNA, 25 bp, Homo sapien
ctgggctgtaaccttcaagggaatg

SEQ ID NO: 3267808 - DNA, 25 bp, Homo sapien
ctggggcaaatcataatctgggctg

SEQ ID NO: 3267809 - DNA, 25 bp, Homo sapien
caaatgtttcgccaatacaggactt

SEQ ID NO: 3267810 - DNA, 25 bp, Homo sapien
ggacttgcatcaacatccttccagg

SEQ ID NO: 3267811 - DNA, 25 bp, Homo sapien
gccaatacaggacttgcatcaacat

SEQ ID NO: 3267812 - DNA, 25 bp, Homo sapien
tccaggctccgataacagttttctc

SEQ ID NO: 3267813 - DNA, 25 bp, Homo sapien
tcttgtttcctaagccaataccaca

SEQ ID NO: 3267814 - DNA, 25 bp, Homo sapien
tcagagatccgtgagagcactctcc

SEQ ID NO: 3267815 - DNA, 25 bp, Homo sapien
cagagatccgtgagagcactctcca

SEQ ID NO: 3267816 - DNA, 25 bp, Homo sapien
gagatccgtgagagcactctccatg

SEQ ID NO: 3267817 - DNA, 25 bp, Homo sapien
agagatccgtgagagcactctccat

SEQ ID NO: 3267818 - DNA, 25 bp, Homo sapien
gtcctcaacagccttatgtatttcc

SEQ ID NO: 3267819 - DNA, 25 bp, Homo sapien
tggtcctcaacagccttatgtattt

SEQ ID NO: 3267820 - DNA, 25 bp, Homo sapien
cctcaacagccttatgtatttccat

SEQ ID NO: 3267821 - DNA, 25 bp, Homo sapien
ctggtcctcaacagccttatgtatt

SEQ ID NO: 3267822 - DNA, 25 bp, Homo sapien
ggggctggagaagcagaattcagaa

SEQ ID NO: 3267823 - DNA, 25 bp, Homo sapien
agggggctggagaagcagaattcag

SEQ ID NO: 3267824 - DNA, 25 bp, Homo sapien
tcttaagtatggaaagagggggctg

SEQ ID NO: 3267825 - DNA, 25 bp, Homo sapien
gctggagaagcagaattcagaattt

SEQ ID NO: 3267826 - DNA, 25 bp, Homo sapien
cttttgttccaggagcgatgaagac

SEQ ID NO: 3267827 - DNA, 25 bp, Homo sapien
ctatagagcagaatatgctactgga

SEQ ID NO: 3267828 - DNA, 25 bp, Homo sapien
tccaggagcgatgaagacaggatat

SEQ ID NO: 3267829 - DNA, 25 bp, Homo sapien
gaatatgctactggaccctggaagt

SEQ ID NO: 3267830 - DNA, 25 bp, Homo sapien
gacggatgcacatgtcagaccctat

SEQ ID NO: 3267831 - DNA, 25 bp, Homo sapien
cattctgaacaaaggttctgggtag

SEQ ID NO: 3267832 - DNA, 25 bp, Homo sapien
tctgggtagactgtgaacctaaaag

SEQ ID NO: 3267833 - DNA, 25 bp, Homo sapien
tcagaccctatcatgattagacata

SEQ ID NO: 3267834 - DNA, 25 bp, Homo sapien
catcagagatccgaatctccacaca

SEQ ID NO: 3267835 - DNA, 25 bp, Homo sapien
agagatccgaatctccacacattcc

SEQ ID NO: 3267836 - DNA, 25 bp, Homo sapien
agatccgaatctccacacattccat

SEQ ID NO: 3267837 - DNA, 25 bp, Homo sapien
tcagagatccgaatctccacacatt

SEQ ID NO: 3267838 - DNA, 25 bp, Homo sapien
ctcagttttgatggtattccacaat

SEQ ID NO: 3267839 - DNA, 25 bp, Homo sapien
gttttgatggtattccacaatagca

SEQ ID NO: 3267840 - DNA, 25 bp, Homo sapien
ccacaatagcactgtgtcaatattg

SEQ ID NO: 3267841 - DNA, 25 bp, Homo sapien
ggtattccacaatagcactgtgtca

SEQ ID NO: 3267842 - DNA, 25 bp, Homo sapien
tcctaggtaattcccaagctctctc

SEQ ID NO: 3267843 - DNA, 25 bp, Homo sapien
ttcctaggtaattcccaagctctct

SEQ ID NO: 3267844 - DNA, 25 bp, Homo sapien
tttcctaggtaattcccaagctctc

SEQ ID NO: 3267845 - DNA, 25 bp, Homo sapien
tcacagatctacaccacagtttgct

SEQ ID NO: 3267846 - DNA, 25 bp, Homo sapien
tctcagagtttacttcagcactaag

SEQ ID NO: 3267847 - DNA, 25 bp, Homo sapien
cctgtggaacctctatctgtgcctg

SEQ ID NO: 3267848 - DNA, 25 bp, Homo sapien
tacatgcgtctttttaagccaaaca

SEQ ID NO: 3267849 - DNA, 25 bp, Homo sapien
taagatttaagagtcctgtggaacc

SEQ ID NO: 3267850 - DNA, 25 bp, Homo sapien
caggaccattccttcccttgcatta

SEQ ID NO: 3267851 - DNA, 25 bp, Homo sapien
tctaccgtctgagggtttctccagg

SEQ ID NO: 3267852 - DNA, 25 bp, Homo sapien
ccattgaaggtaaagaggcatttaa

SEQ ID NO: 3267853 - DNA, 25 bp, Homo sapien
ccttgcattactaaggctgaccttg

SEQ ID NO: 3267854 - DNA, 25 bp, Homo sapien
ggatgttcttcccacgaatcttcat

SEQ ID NO: 3267855 - DNA, 25 bp, Homo sapien
ccattgcctgacagtcttactccac

SEQ ID NO: 3267856 - DNA, 25 bp, Homo sapien
tgacagtcttactccacctcttttt

SEQ ID NO: 3267857 - DNA, 25 bp, Homo sapien
tgaaaaccccatatccacctgcaaa

SEQ ID NO: 3267858 - DNA, 25 bp, Homo sapien
tgtggatgacagcaaatctttggtg

SEQ ID NO: 3267859 - DNA, 25 bp, Homo sapien
ctgtgtggatgacagcaaatctttg

SEQ ID NO: 3267860 - DNA, 25 bp, Homo sapien
gtggatgacagcaaatctttggtgg

SEQ ID NO: 3267861 - DNA, 25 bp, Homo sapien
cttctgtgtggatgacagcaaatct

SEQ ID NO: 3267862 - DNA, 25 bp, Homo sapien
ctggatatccgcctttgtaatccaa

SEQ ID NO: 3267863 - DNA, 25 bp, Homo sapien
tacttcaacttctagatgcctggat

SEQ ID NO: 3267864 - DNA, 25 bp, Homo sapien
acttctagatgcctggatatccgcc

SEQ ID NO: 3267865 - DNA, 25 bp, Homo sapien
tttccttacttcaacttctagatgc

SEQ ID NO: 3267866 - DNA, 25 bp, Homo sapien
catttaatagagattgtagccagaa

SEQ ID NO: 3267867 - DNA, 25 bp, Homo sapien
gctcagcactttccacgatgaaata

SEQ ID NO: 3267868 - DNA, 25 bp, Homo sapien
tatttaagaaggtcccagatactca

SEQ ID NO: 3267869 - DNA, 25 bp, Homo sapien
tgcagtttgagaggtgtaaggacac

SEQ ID NO: 3267870 - DNA, 25 bp, Homo sapien
tgattcaaaatttacgtctcccaga

SEQ ID NO: 3267871 - DNA, 25 bp, Homo sapien
tatgatgctccagttgagtgaaagt

SEQ ID NO: 3267872 - DNA, 25 bp, Homo sapien
atggaaggccattaaaacagaacct

SEQ ID NO: 3267873 - DNA, 25 bp, Homo sapien
cacctggcggaacatagtggtattt

SEQ ID NO: 3267874 - DNA, 25 bp, Homo sapien
ttccatccgtgttcctcaagcagag

SEQ ID NO: 3267875 - DNA, 25 bp, Homo sapien
tggccaggaaaccttaaatcccata

SEQ ID NO: 3267876 - DNA, 25 bp, Homo sapien
caggagctgtgttgaccagatcttc

SEQ ID NO: 3267877 - DNA, 25 bp, Homo sapien
taacattttagctcagacttggcca

SEQ ID NO: 3267878 - DNA, 25 bp, Homo sapien
aaacatctccactgcaataattccg

SEQ ID NO: 3267879 - DNA, 25 bp, Homo sapien
tcagtttcaggctcagtttgttggt

SEQ ID NO: 3267880 - DNA, 25 bp, Homo sapien
aaatatgatgctgtacgtatctgtg

SEQ ID NO: 3267881 - DNA, 25 bp, Homo sapien
ccgattggttacttaaatatgatgc

SEQ ID NO: 3267882 - DNA, 25 bp, Homo sapien
aatgctgcccgatccaaaagtttct

SEQ ID NO: 3267883 - DNA, 25 bp, Homo sapien
ccatatctgatccaaatgctgcccg

SEQ ID NO: 3267884 - DNA, 25 bp, Homo sapien
tctgatccaaatgctgcccgatcca

SEQ ID NO: 3267885 - DNA, 25 bp, Homo sapien
gatccaaatgctgcccgatccaaaa

SEQ ID NO: 3267886 - DNA, 25 bp, Homo sapien
gattccactggtggtattaagagag

SEQ ID NO: 3267887 - DNA, 25 bp, Homo sapien
tattaagagagcataagatttctac

SEQ ID NO: 3267888 - DNA, 25 bp, Homo sapien
aattaagggagaactatgaataaca

SEQ ID NO: 3267889 - DNA, 25 bp, Homo sapien
taagggagaactatgaataacaagg

SEQ ID NO: 3267890 - DNA, 25 bp, Homo sapien
ctaagatgagaaggagcctgtacat

SEQ ID NO: 3267891 - DNA, 25 bp, Homo sapien
cagggacacttttcacatccaattc

SEQ ID NO: 3267892 - DNA, 25 bp, Homo sapien
gctgcaaatctttgtgatcatagga

SEQ ID NO: 3267893 - DNA, 25 bp, Homo sapien
gaataatgggtattcccatgcagaa

SEQ ID NO: 3267894 - DNA, 25 bp, Homo sapien
cattgtctatcactttccccgaaaa

SEQ ID NO: 3267895 - DNA, 25 bp, Homo sapien
tgaatgaaagtagtattctgaatga

SEQ ID NO: 3267896 - DNA, 25 bp, Homo sapien
tgaaagtagtattctgaatgagatc

SEQ ID NO: 3267897 - DNA, 25 bp, Homo sapien
cagcctgaatgaaagtagtattctg

SEQ ID NO: 3267898 - DNA, 25 bp, Homo sapien
agcctgaatgaaagtagtattctga

SEQ ID NO: 3267899 - DNA, 25 bp, Homo sapien
tcacaccagggacccatctgaagga

SEQ ID NO: 3267900 - DNA, 25 bp, Homo sapien
taggcagtctgatacaggacaccct

SEQ ID NO: 3267901 - DNA, 25 bp, Homo sapien
tctatcatctagatgtccctggaca

SEQ ID NO: 3267902 - DNA, 25 bp, Homo sapien
gaaccacaggttgaacttcaatagg

SEQ ID NO: 3267903 - DNA, 25 bp, Homo sapien
ttgagcatgcatagccttgtcctca

SEQ ID NO: 3267904 - DNA, 25 bp, Homo sapien
cttgagcatgcatagccttgtcctc

SEQ ID NO: 3267905 - DNA, 25 bp, Homo sapien
tgagcatgcatagccttgtcctcat

SEQ ID NO: 3267906 - DNA, 25 bp, Homo sapien
cttggtgtactggatgaatcggatc

SEQ ID NO: 3267907 - DNA, 25 bp, Homo sapien
tggtgtactggatgaatcggatcac

SEQ ID NO: 3267908 - DNA, 25 bp, Homo sapien
ggtgtactggatgaatcggatcaca

SEQ ID NO: 3267909 - DNA, 25 bp, Homo sapien
tgtactggatgaatcggatcacatg

SEQ ID NO: 3267910 - DNA, 25 bp, Homo sapien
taatataagcaactccctttgtgac

SEQ ID NO: 3267911 - DNA, 25 bp, Homo sapien
caattgctgtaggttggtaacggtg

SEQ ID NO: 3267912 - DNA, 25 bp, Homo sapien
tgtgcatgttcttttactacgggca

SEQ ID NO: 3267913 - DNA, 25 bp, Homo sapien
tacgggcaataatctactgagttct

SEQ ID NO: 3267914 - DNA, 25 bp, Homo sapien
ggctttgggtagtgtagaaatgatg

SEQ ID NO: 3267915 - DNA, 25 bp, Homo sapien
ctttgggtagtgtagaaatgatgtg

SEQ ID NO: 3267916 - DNA, 25 bp, Homo sapien
tgtataatggaaacggcttaagagt

SEQ ID NO: 3267917 - DNA, 25 bp, Homo sapien
aatgtataatggaaacggcttaaga

SEQ ID NO: 3267918 - DNA, 25 bp, Homo sapien
tgttgcacagtgattcattaggcat

SEQ ID NO: 3267919 - DNA, 25 bp, Homo sapien
ttgaaatggatacaatatctgactg

SEQ ID NO: 3267920 - DNA, 25 bp, Homo sapien
gtcaatttgcataaattcagatgca

SEQ ID NO: 3267921 - DNA, 25 bp, Homo sapien
cataaattcagatgcaatgagatgt

SEQ ID NO: 3267922 - DNA, 25 bp, Homo sapien
ttaactggagctaaaagaaatttca

SEQ ID NO: 3267923 - DNA, 25 bp, Homo sapien
ctggagctaaaagaaatttcatttc

SEQ ID NO: 3267924 - DNA, 25 bp, Homo sapien
ggagctaaaagaaatttcatttctc

SEQ ID NO: 3267925 - DNA, 25 bp, Homo sapien
taactggagctaaaagaaatttcat

SEQ ID NO: 3267926 - DNA, 25 bp, Homo sapien
ctgaactaaataacccattatagtc

SEQ ID NO: 3267927 - DNA, 25 bp, Homo sapien
aatcttctgcagagccaaattttat

SEQ ID NO: 3267928 - DNA, 25 bp, Homo sapien
gattttgccgaagatgttgagaaca

SEQ ID NO: 3267929 - DNA, 25 bp, Homo sapien
agttaagtcaattctacctgctttt

SEQ ID NO: 3267930 - DNA, 25 bp, Homo sapien
gaagttgctcttagccccagctcat

SEQ ID NO: 3267931 - DNA, 25 bp, Homo sapien
taagcattttggtcgaaagcaagtg

SEQ ID NO: 3267932 - DNA, 25 bp, Homo sapien
aatcaattgcaggaccaaagcctcc

SEQ ID NO: 3267933 - DNA, 25 bp, Homo sapien
tagggtatccgtcacccgagtagtg

SEQ ID NO: 3267934 - DNA, 25 bp, Homo sapien
ccttcattcctttcttcttctggca

SEQ ID NO: 3267935 - DNA, 25 bp, Homo sapien
tttagatattgccttcattcctttc

SEQ ID NO: 3267936 - DNA, 25 bp, Homo sapien
tcattcctttcttcttctggcaatt

SEQ ID NO: 3267937 - DNA, 25 bp, Homo sapien
ttcctttcttcttctggcaattcat

SEQ ID NO: 3267938 - DNA, 25 bp, Homo sapien
gggaatcagttcttgtaacagttaa

SEQ ID NO: 3267939 - DNA, 25 bp, Homo sapien
ggctggaaagataaggacccatttc

SEQ ID NO: 3267940 - DNA, 25 bp, Homo sapien
taacagttaatcgaccgctaagtgc

SEQ ID NO: 3267941 - DNA, 25 bp, Homo sapien
ccgctaagtgctgaagcatccaagg

SEQ ID NO: 3267942 - DNA, 25 bp, Homo sapien
tgcagggcaccaattatccataact

SEQ ID NO: 3267943 - DNA, 25 bp, Homo sapien
atgcagggcaccaattatccataac

SEQ ID NO: 3267944 - DNA, 25 bp, Homo sapien
gtcttttgattgctaaatccctgag

SEQ ID NO: 3267945 - DNA, 25 bp, Homo sapien
tgctaaatccctgagaacctagcat

SEQ ID NO: 3267946 - DNA, 25 bp, Homo sapien
ttgctaaatccctgagaacctagca

SEQ ID NO: 3267947 - DNA, 25 bp, Homo sapien
ttgattgctaaatccctgagaacct

SEQ ID NO: 3267948 - DNA, 25 bp, Homo sapien
gaactgcccttgggatggtctggca

SEQ ID NO: 3267949 - DNA, 25 bp, Homo sapien
aactgcccttgggatggtctggcat

SEQ ID NO: 3267950 - DNA, 25 bp, Homo sapien
ctactgaatgaatcccactgccctt

SEQ ID NO: 3267951 - DNA, 25 bp, Homo sapien
ctgaatgaatcccactgcccttcag

SEQ ID NO: 3267952 - DNA, 25 bp, Homo sapien
ctcagccagtatctctctttgctca

SEQ ID NO: 3267953 - DNA, 25 bp, Homo sapien
tacttgtgattctgttacgacagtg

SEQ ID NO: 3267954 - DNA, 25 bp, Homo sapien
caattgctatctgtgggcccctcag

SEQ ID NO: 3267955 - DNA, 25 bp, Homo sapien
ttccttctcccaattgctatctgtg

SEQ ID NO: 3267956 - DNA, 25 bp, Homo sapien
aaagggtggggggcaagaatggcag

SEQ ID NO: 3267957 - DNA, 25 bp, Homo sapien
agggtggggggcaagaatggcagac

SEQ ID NO: 3267958 - DNA, 25 bp, Homo sapien
gggtggggggcaagaatggcagacc

SEQ ID NO: 3267959 - DNA, 25 bp, Homo sapien
taaagggtggggggcaagaatggca

SEQ ID NO: 3267960 - DNA, 25 bp, Homo sapien
tctgggcctagttcttcatcattcc

SEQ ID NO: 3267961 - DNA, 25 bp, Homo sapien
ttctgggcctagttcttcatcattc

SEQ ID NO: 3267962 - DNA, 25 bp, Homo sapien
atgagacttcatgctctcgagccat

SEQ ID NO: 3267963 - DNA, 25 bp, Homo sapien
taatatatgaggtccatggagtctg

SEQ ID NO: 3267964 - DNA, 25 bp, Homo sapien
gtctggttggtggtctggtttacca

SEQ ID NO: 3267965 - DNA, 25 bp, Homo sapien
tatagcacatttgaggtccaactcg

SEQ ID NO: 3267966 - DNA, 25 bp, Homo sapien
ggatcaatctgaaacctatagcaca

SEQ ID NO: 3267967 - DNA, 25 bp, Homo sapien
gctatttaggaagactccatcacaa

SEQ ID NO: 3267968 - DNA, 25 bp, Homo sapien
tttttcttataactggtcctcagct

SEQ ID NO: 3267969 - DNA, 25 bp, Homo sapien
atttattttctactccagggagtgg

SEQ ID NO: 3267970 - DNA, 25 bp, Homo sapien
tattagtcctacatctaagttggaa

SEQ ID NO: 3267971 - DNA, 25 bp, Homo sapien
gcagatacttcactagaagttattg

SEQ ID NO: 3267972 - DNA, 25 bp, Homo sapien
gatagatgtccataaccttgggcta

SEQ ID NO: 3267973 - DNA, 25 bp, Homo sapien
gatgatgtacctggtactcccataa

SEQ ID NO: 3267974 - DNA, 25 bp, Homo sapien
cataagatccctgagatgatcagat

SEQ ID NO: 3267975 - DNA, 25 bp, Homo sapien
ggaaataaacttgtaagccgctaca

SEQ ID NO: 3267976 - DNA, 25 bp, Homo sapien
tgagttgagaagtatgagctgtgaa

SEQ ID NO: 3267977 - DNA, 25 bp, Homo sapien
taatcaggggaatcctcattgagtt

SEQ ID NO: 3267978 - DNA, 25 bp, Homo sapien
agaaataaacgcaaacatcatttac

SEQ ID NO: 3267979 - DNA, 25 bp, Homo sapien
ttagaagccccataaagacaagccc

SEQ ID NO: 3267980 - DNA, 25 bp, Homo sapien
tggtgaccgccataggctaagaact

SEQ ID NO: 3267981 - DNA, 25 bp, Homo sapien
ccctgagaaatgttgcctgatactg

SEQ ID NO: 3267982 - DNA, 25 bp, Homo sapien
cagcttcggagggtatggcctttcc

SEQ ID NO: 3267983 - DNA, 25 bp, Homo sapien
cccttgaaatctctgtacatagtcg

SEQ ID NO: 3267984 - DNA, 25 bp, Homo sapien
catgtgtaaaggacacaagagatgt

SEQ ID NO: 3267985 - DNA, 25 bp, Homo sapien
catagtcgttcatgtgtaaaggaca

SEQ ID NO: 3267986 - DNA, 25 bp, Homo sapien
gatgtgattgtgtaagagaggacat

SEQ ID NO: 3267987 - DNA, 25 bp, Homo sapien
tggcattggctctcagtgtattcca

SEQ ID NO: 3267988 - DNA, 25 bp, Homo sapien
gatgtcatcactcccattgggtctc

SEQ ID NO: 3267989 - DNA, 25 bp, Homo sapien
cattggctctcagtgtattccagag

SEQ ID NO: 3267990 - DNA, 25 bp, Homo sapien
ggctctcagtgtattccagagcctg

SEQ ID NO: 3267991 - DNA, 25 bp, Homo sapien
gactgcagagggtagtaaacattgc

SEQ ID NO: 3267992 - DNA, 25 bp, Homo sapien
actgcagagggtagtaaacattgct

SEQ ID NO: 3267993 - DNA, 25 bp, Homo sapien
ctgcagagggtagtaaacattgctt

SEQ ID NO: 3267994 - DNA, 25 bp, Homo sapien
ccttcatggatttctgtaagctgca

SEQ ID NO: 3267995 - DNA, 25 bp, Homo sapien
taaccccaggtactgatttcattgg

SEQ ID NO: 3267996 - DNA, 25 bp, Homo sapien
gcaaggtccctatggagctgctgga

SEQ ID NO: 3267997 - DNA, 25 bp, Homo sapien
gaaggaagaatgacgaacaacatca

SEQ ID NO: 3267998 - DNA, 25 bp, Homo sapien
caacatcagttccactgttctggga

SEQ ID NO: 3267999 - DNA, 25 bp, Homo sapien
gagatgcgtgctctgccacatgaac

SEQ ID NO: 3268000 - DNA, 25 bp, Homo sapien
tgcgtgctctgccacatgaacagca

SEQ ID NO: 3268001 - DNA, 25 bp, Homo sapien
gatgcgtgctctgccacatgaacag

SEQ ID NO: 3268002 - DNA, 25 bp, Homo sapien
gctggagatgcgtgctctgccacat

SEQ ID NO: 3268003 - DNA, 25 bp, Homo sapien
ttgagtaaatgctggtgaacaggat

SEQ ID NO: 3268004 - DNA, 25 bp, Homo sapien
cagttgaattttggacattgagtaa

SEQ ID NO: 3268005 - DNA, 25 bp, Homo sapien
tgctggtgaacaggataaaaagaag

SEQ ID NO: 3268006 - DNA, 25 bp, Homo sapien
cattgagtaaatgctggtgaacagg

SEQ ID NO: 3268007 - DNA, 25 bp, Homo sapien
ccacctctaagtctattgcaatctc

SEQ ID NO: 3268008 - DNA, 25 bp, Homo sapien
cacctctaagtctattgcaatctcc

SEQ ID NO: 3268009 - DNA, 25 bp, Homo sapien
ccatagaagaagtgagagtcgggtc

SEQ ID NO: 3268010 - DNA, 25 bp, Homo sapien
catacacggcgattcagagagccat

SEQ ID NO: 3268011 - DNA, 25 bp, Homo sapien
gagagccatagaagaagtgagagtc

SEQ ID NO: 3268012 - DNA, 25 bp, Homo sapien
acggcgattcagagagccatagaag

SEQ ID NO: 3268013 - DNA, 25 bp, Homo sapien
agcctcctgcttgaagaggctgagt

SEQ ID NO: 3268014 - DNA, 25 bp, Homo sapien
gaggctgagtgagtagttcattgcc

SEQ ID NO: 3268015 - DNA, 25 bp, Homo sapien
gagtagttcattgcctgaggtatca

SEQ ID NO: 3268016 - DNA, 25 bp, Homo sapien
tcattgcctgaggtatcacaaacat

SEQ ID NO: 3268017 - DNA, 25 bp, Homo sapien
tggcctgtgattcacaaatggcttg

SEQ ID NO: 3268018 - DNA, 25 bp, Homo sapien
gaagtgaaatcttgcctggttattt

SEQ ID NO: 3268019 - DNA, 25 bp, Homo sapien
aatttgaagtgaaatcttgcctggt

SEQ ID NO: 3268020 - DNA, 25 bp, Homo sapien
aaatggcttgggcatgaatcacatg

SEQ ID NO: 3268021 - DNA, 25 bp, Homo sapien
cattccctggacttttgtcatagcc

SEQ ID NO: 3268022 - DNA, 25 bp, Homo sapien
cactttgactcactgctttataatc

SEQ ID NO: 3268023 - DNA, 25 bp, Homo sapien
tagcccgtccagcattcaatcaggt

SEQ ID NO: 3268024 - DNA, 25 bp, Homo sapien
ttctcatcgttgtaactgaaagcac

SEQ ID NO: 3268025 - DNA, 25 bp, Homo sapien
tttaaatgtgttctctggggcagat

SEQ ID NO: 3268026 - DNA, 25 bp, Homo sapien
tgtgttctctggggcagatcttccc

SEQ ID NO: 3268027 - DNA, 25 bp, Homo sapien
ctttttaaatgtgttctctggggca

SEQ ID NO: 3268028 - DNA, 25 bp, Homo sapien
tgttctctggggcagatcttcccat

SEQ ID NO: 3268029 - DNA, 25 bp, Homo sapien
ccatagctcagtctcagagtgccga

SEQ ID NO: 3268030 - DNA, 25 bp, Homo sapien
gtgccttctaaacttcttcctccga

SEQ ID NO: 3268031 - DNA, 25 bp, Homo sapien
cctggataggggttcacaggatcca

SEQ ID NO: 3268032 - DNA, 25 bp, Homo sapien
tagctcagtctcagagtgccgagta

SEQ ID NO: 3268033 - DNA, 25 bp, Homo sapien
gcacacgtccatctttgagtggctt

SEQ ID NO: 3268034 - DNA, 25 bp, Homo sapien
ctgcgtgaggacgggtgacagcaca

SEQ ID NO: 3268035 - DNA, 25 bp, Homo sapien
gggtgacagcacacgtccatctttg

SEQ ID NO: 3268036 - DNA, 25 bp, Homo sapien
cgtgaggacgggtgacagcacacgt

SEQ ID NO: 3268037 - DNA, 25 bp, Homo sapien
ctagaggagtggatggtgagtctca

SEQ ID NO: 3268038 - DNA, 25 bp, Homo sapien
cagagactctttatggtaagccgac

SEQ ID NO: 3268039 - DNA, 25 bp, Homo sapien
tcaggaaagatacctccatttgaca

SEQ ID NO: 3268040 - DNA, 25 bp, Homo sapien
agacagagactctttatggtaagcc

SEQ ID NO: 3268041 - DNA, 25 bp, Homo sapien
gcaacggtatctccatagtcataag

SEQ ID NO: 3268042 - DNA, 25 bp, Homo sapien
tagagaagttcctgagcaacggtat

SEQ ID NO: 3268043 - DNA, 25 bp, Homo sapien
gcaatcactcgataagacctcaagg

SEQ ID NO: 3268044 - DNA, 25 bp, Homo sapien
cataagactaaaggttgatcctgcg

SEQ ID NO: 3268045 - DNA, 25 bp, Homo sapien
tgagttatcttctacactggagccc

SEQ ID NO: 3268046 - DNA, 25 bp, Homo sapien
gagtccgatatggatggcatttgag

SEQ ID NO: 3268047 - DNA, 25 bp, Homo sapien
ggagccctccagagaatggtatgag

SEQ ID NO: 3268048 - DNA, 25 bp, Homo sapien
cagtataggagaatcagcagggccc

SEQ ID NO: 3268049 - DNA, 25 bp, Homo sapien
accaaggtaactgctgcttctgtca

SEQ ID NO: 3268050 - DNA, 25 bp, Homo sapien
cagcaccaaggtaactgctgcttct

SEQ ID NO: 3268051 - DNA, 25 bp, Homo sapien
aggtaactgctgcttctgtcaacat

SEQ ID NO: 3268052 - DNA, 25 bp, Homo sapien
gcaccaaggtaactgctgcttctgt

SEQ ID NO: 3268053 - DNA, 25 bp, Homo sapien
tcaacacccattacagaagctgatc

SEQ ID NO: 3268054 - DNA, 25 bp, Homo sapien
tgagtgcaggccaattgcctttggt

SEQ ID NO: 3268055 - DNA, 25 bp, Homo sapien
ggtcctgttgcagtacaagagaggt

SEQ ID NO: 3268056 - DNA, 25 bp, Homo sapien
gttgagcaaagccttgttccatcca

SEQ ID NO: 3268057 - DNA, 25 bp, Homo sapien
taccaaaacccaatacagcaattct

SEQ ID NO: 3268058 - DNA, 25 bp, Homo sapien
ctaccaaaacccaatacagcaattc

SEQ ID NO: 3268059 - DNA, 25 bp, Homo sapien
actaccaaaacccaatacagcaatt

SEQ ID NO: 3268060 - DNA, 25 bp, Homo sapien
gaaacatggaatgtgtcacagccat

SEQ ID NO: 3268061 - DNA, 25 bp, Homo sapien
tgaaacatggaatgtgtcacagcca

SEQ ID NO: 3268062 - DNA, 25 bp, Homo sapien
cttctgtaaggacgtagctggcttt

SEQ ID NO: 3268063 - DNA, 25 bp, Homo sapien
tgtaaggacgtagctggctttaaaa

SEQ ID NO: 3268064 - DNA, 25 bp, Homo sapien
tctgtaaggacgtagctggctttaa

SEQ ID NO: 3268065 - DNA, 25 bp, Homo sapien
ttctgtaaggacgtagctggcttta

SEQ ID NO: 3268066 - DNA, 25 bp, Homo sapien
cagcttcggagataagcagcgatga

SEQ ID NO: 3268067 - DNA, 25 bp, Homo sapien
cgatgaatgtcaaagacttggtgac

SEQ ID NO: 3268068 - DNA, 25 bp, Homo sapien
tgtttgagactgcagcttcggagat

SEQ ID NO: 3268069 - DNA, 25 bp, Homo sapien
taagcagcgatgaatgtcaaagact

SEQ ID NO: 3268070 - DNA, 25 bp, Homo sapien
aattgatagcagagtaaaggatgtc

SEQ ID NO: 3268071 - DNA, 25 bp, Homo sapien
tggtggagaattgatagcagagtaa

SEQ ID NO: 3268072 - DNA, 25 bp, Homo sapien
tgtaattggtggagaattgatagca

SEQ ID NO: 3268073 - DNA, 25 bp, Homo sapien
ctaattgtgtaattggtggagaatt

SEQ ID NO: 3268074 - DNA, 25 bp, Homo sapien
gagggagcccatccagaaaattctg

SEQ ID NO: 3268075 - DNA, 25 bp, Homo sapien
tctgctagcttggttgagggagccc

SEQ ID NO: 3268076 - DNA, 25 bp, Homo sapien
aagctgtgtattaaggactaagtcc

SEQ ID NO: 3268077 - DNA, 25 bp, Homo sapien
ttagattccccaagtgttagtacag

SEQ ID NO: 3268078 - DNA, 25 bp, Homo sapien
tttaagaccacactgaaatgttaca

SEQ ID NO: 3268079 - DNA, 25 bp, Homo sapien
taagaccacactgaaatgttacaaa

SEQ ID NO: 3268080 - DNA, 25 bp, Homo sapien
tttttaagaccacactgaaatgtta

SEQ ID NO: 3268081 - DNA, 25 bp, Homo sapien
aagaccacactgaaatgttacaaaa

SEQ ID NO: 3268082 - DNA, 25 bp, Homo sapien
gattagtccatattggtatctttcc

SEQ ID NO: 3268083 - DNA, 25 bp, Homo sapien
ggaaacttcactaccctataatctc

SEQ ID NO: 3268084 - DNA, 25 bp, Homo sapien
cttggtaatactcctttctgggtga

SEQ ID NO: 3268085 - DNA, 25 bp, Homo sapien
tatggaatagtctccatttggttgc

SEQ ID NO: 3268086 - DNA, 25 bp, Homo sapien
gactgtatccgaatagcagcaacgg

SEQ ID NO: 3268087 - DNA, 25 bp, Homo sapien
gcaaccaaaactaactctgactgta

SEQ ID NO: 3268088 - DNA, 25 bp, Homo sapien
tagcagcaacggcaataagacaaga

SEQ ID NO: 3268089 - DNA, 25 bp, Homo sapien
aaaactaactctgactgtatccgaa

SEQ ID NO: 3268090 - DNA, 25 bp, Homo sapien
tacacgatcaaccacacttattttc

SEQ ID NO: 3268091 - DNA, 25 bp, Homo sapien
tgtatagtaatacacgatcaaccac

SEQ ID NO: 3268092 - DNA, 25 bp, Homo sapien
gtaatacacgatcaaccacacttat

SEQ ID NO: 3268093 - DNA, 25 bp, Homo sapien
cgatcaaccacacttattttcaaag

SEQ ID NO: 3268094 - DNA, 25 bp, Homo sapien
gatctggagatcattctagccacca

SEQ ID NO: 3268095 - DNA, 25 bp, Homo sapien
aacagttcctaattgtgagacacca

SEQ ID NO: 3268096 - DNA, 25 bp, Homo sapien
tgattcaacagaaccccatttggag

SEQ ID NO: 3268097 - DNA, 25 bp, Homo sapien
tatgagtatctggtctaaaagggcc

SEQ ID NO: 3268098 - DNA, 25 bp, Homo sapien
tctggctgctataagtacgataggc

SEQ ID NO: 3268099 - DNA, 25 bp, Homo sapien
gacagattcatgatgctttgtgacc

SEQ ID NO: 3268100 - DNA, 25 bp, Homo sapien
gagatcatggtgtcagcattgccag

SEQ ID NO: 3268101 - DNA, 25 bp, Homo sapien
tgtaagggcactaatactattcaga

SEQ ID NO: 3268102 - DNA, 25 bp, Homo sapien
tagtaactaattgctaaataagccc

SEQ ID NO: 3268103 - DNA, 25 bp, Homo sapien
aaataagccctatacattttcttgg

SEQ ID NO: 3268104 - DNA, 25 bp, Homo sapien
tcttccagaacggtatgaattaggt

SEQ ID NO: 3268105 - DNA, 25 bp, Homo sapien
tggattgctctaacatattcttagg

SEQ ID NO: 3268106 - DNA, 25 bp, Homo sapien
aagttgcaaacgtacatcactagct

SEQ ID NO: 3268107 - DNA, 25 bp, Homo sapien
ttaaaagttgcaaacgtacatcact

SEQ ID NO: 3268108 - DNA, 25 bp, Homo sapien
aaagttgcaaacgtacatcactagc

SEQ ID NO: 3268109 - DNA, 25 bp, Homo sapien
aaaagttgcaaacgtacatcactag

SEQ ID NO: 3268110 - DNA, 25 bp, Homo sapien
gatgtcctgtcacaatagcgaccat

SEQ ID NO: 3268111 - DNA, 25 bp, Homo sapien
tgtctccatggaatgtaagatgtcc

SEQ ID NO: 3268112 - DNA, 25 bp, Homo sapien
taagatgtcctgtcacaatagcgac

SEQ ID NO: 3268113 - DNA, 25 bp, Homo sapien
ggaatgtaagatgtcctgtcacaat

SEQ ID NO: 3268114 - DNA, 25 bp, Homo sapien
aatggatccaacaattacttcttga

SEQ ID NO: 3268115 - DNA, 25 bp, Homo sapien
agatgagcacgcagaagcagtaaat

SEQ ID NO: 3268116 - DNA, 25 bp, Homo sapien
aaatggatccaacaattacttcttg

SEQ ID NO: 3268117 - DNA, 25 bp, Homo sapien
agtaaatggatccaacaattacttc

SEQ ID NO: 3268118 - DNA, 25 bp, Homo sapien
gcagacatttgccttttgataagtt

SEQ ID NO: 3268119 - DNA, 25 bp, Homo sapien
aatgcagacatttgccttttgataa

SEQ ID NO: 3268120 - DNA, 25 bp, Homo sapien
cagacatttgccttttgataagtta

SEQ ID NO: 3268121 - DNA, 25 bp, Homo sapien
tcacatatcgataatgcagacattt

SEQ ID NO: 3268122 - DNA, 25 bp, Homo sapien
tcccatagcatctagtcttgaactg

SEQ ID NO: 3268123 - DNA, 25 bp, Homo sapien
tttcttatgtagtcccatagcatct

SEQ ID NO: 3268124 - DNA, 25 bp, Homo sapien
tgataacaccccaaccactgacttt

SEQ ID NO: 3268125 - DNA, 25 bp, Homo sapien
tagtcttgaactgatgataacaccc

SEQ ID NO: 3268126 - DNA, 25 bp, Homo sapien
ttcagtgtctggagctgcataagct

SEQ ID NO: 3268127 - DNA, 25 bp, Homo sapien
ggtcctgggagacgtcgaaaagtca

SEQ ID NO: 3268128 - DNA, 25 bp, Homo sapien
caaagagatgtgacactggaaccca

SEQ ID NO: 3268129 - DNA, 25 bp, Homo sapien
ggaacccagatcacgttcacgacag

SEQ ID NO: 3268130 - DNA, 25 bp, Homo sapien
tgcccagaatcttgttaggtaccag

SEQ ID NO: 3268131 - DNA, 25 bp, Homo sapien
taggtaccagaagaaacacgaagaa

SEQ ID NO: 3268132 - DNA, 25 bp, Homo sapien
gaaaacttacctatatgatgagcac

SEQ ID NO: 3268133 - DNA, 25 bp, Homo sapien
tagtttggtcacttcagctagtaca

SEQ ID NO: 3268134 - DNA, 25 bp, Homo sapien
catagtgggccatataaaggggcaa

SEQ ID NO: 3268135 - DNA, 25 bp, Homo sapien
caagagttaaaagaatgtcagcctc

SEQ ID NO: 3268136 - DNA, 25 bp, Homo sapien
agctccaagagttaaaagaatgtca

SEQ ID NO: 3268137 - DNA, 25 bp, Homo sapien
agcctcatagtgggccatataaagg

SEQ ID NO: 3268138 - DNA, 25 bp, Homo sapien
tcactgtaatgtctccaagtagcaa

SEQ ID NO: 3268139 - DNA, 25 bp, Homo sapien
gaagaataaggagaccaagtacact

SEQ ID NO: 3268140 - DNA, 25 bp, Homo sapien
tagcaagttctatattgatagtccc

SEQ ID NO: 3268141 - DNA, 25 bp, Homo sapien
aattcttgtggttcactgtaatgtc

SEQ ID NO: 3268142 - DNA, 25 bp, Homo sapien
ttaccacaaagatcctgtacatcca

SEQ ID NO: 3268143 - DNA, 25 bp, Homo sapien
ctgagagtttcataagctggtattg

SEQ ID NO: 3268144 - DNA, 25 bp, Homo sapien
agtttcataagctggtattgtcctg

SEQ ID NO: 3268145 - DNA, 25 bp, Homo sapien
gcaaagtgtttaccacaaagatcct

SEQ ID NO: 3268146 - DNA, 25 bp, Homo sapien
gccagcgtttgcctgattctaattc

SEQ ID NO: 3268147 - DNA, 25 bp, Homo sapien
cgtttgcctgattctaattccactg

SEQ ID NO: 3268148 - DNA, 25 bp, Homo sapien
ccagggccagcgtttgcctgattct

SEQ ID NO: 3268149 - DNA, 25 bp, Homo sapien
tgcctgattctaattccactgacat

SEQ ID NO: 3268150 - DNA, 25 bp, Homo sapien
attggaatagcaattcactattatt

SEQ ID NO: 3268151 - DNA, 25 bp, Homo sapien
aaaatgttccattgtgaattggaat

SEQ ID NO: 3268152 - DNA, 25 bp, Homo sapien
taaaatgttccattgtgaattggaa

SEQ ID NO: 3268153 - DNA, 25 bp, Homo sapien
aaatagacaatgctcctgaatcagg

SEQ ID NO: 3268154 - DNA, 25 bp, Homo sapien
tacactctggtagttaaactggcag

SEQ ID NO: 3268155 - DNA, 25 bp, Homo sapien
gacagtgcaatctggtacactctgg

SEQ ID NO: 3268156 - DNA, 25 bp, Homo sapien
caggaactggtaagatagttgaagc

SEQ ID NO: 3268157 - DNA, 25 bp, Homo sapien
ttcaggattctcaaaaggagatggt

SEQ ID NO: 3268158 - DNA, 25 bp, Homo sapien
ctaaacagccattgattgcatagat

SEQ ID NO: 3268159 - DNA, 25 bp, Homo sapien
aataggtattagcagcctgtccagc

SEQ ID NO: 3268160 - DNA, 25 bp, Homo sapien
gcatagatgtactgattcaggattc

SEQ ID NO: 3268161 - DNA, 25 bp, Homo sapien
tggtgctgagttgggcactggaaat

SEQ ID NO: 3268162 - DNA, 25 bp, Homo sapien
catcctgtgcaacatcaggctgagg

SEQ ID NO: 3268163 - DNA, 25 bp, Homo sapien
gctcactcaaggcctccttcatcct

SEQ ID NO: 3268164 - DNA, 25 bp, Homo sapien
aatctgtacatgagccccatgaggc

SEQ ID NO: 3268165 - DNA, 25 bp, Homo sapien
ctgtggtggaagcatgggcaacaca

SEQ ID NO: 3268166 - DNA, 25 bp, Homo sapien
tgtaccttgtcaatgttgaactttg

SEQ ID NO: 3268167 - DNA, 25 bp, Homo sapien
ggcaacacagatggctagttgtctg

SEQ ID NO: 3268168 - DNA, 25 bp, Homo sapien
tcaatgttgaactttgggtgccctg

SEQ ID NO: 3268169 - DNA, 25 bp, Homo sapien
tccagaaaggccttctgatgcttca

SEQ ID NO: 3268170 - DNA, 25 bp, Homo sapien
ccagaaaggccttctgatgcttcat

SEQ ID NO: 3268171 - DNA, 25 bp, Homo sapien
gcctcctggtccaacaacagcagga

SEQ ID NO: 3268172 - DNA, 25 bp, Homo sapien
tgaaagggatgtgaagttctgagct

SEQ ID NO: 3268173 - DNA, 25 bp, Homo sapien
gcactggtaattgaactccttgatg

SEQ ID NO: 3268174 - DNA, 25 bp, Homo sapien
cagcaggatgaagtgagcactggta

SEQ ID NO: 3268175 - DNA, 25 bp, Homo sapien
gcccaaaccctactgaatattcaaa

SEQ ID NO: 3268176 - DNA, 25 bp, Homo sapien
aaccctactgaatattcaaactgca

SEQ ID NO: 3268177 - DNA, 25 bp, Homo sapien
ccaaaccctactgaatattcaaact

SEQ ID NO: 3268178 - DNA, 25 bp, Homo sapien
aaaccctactgaatattcaaactgc

SEQ ID NO: 3268179 - DNA, 25 bp, Homo sapien
ccagtcactgtagtggtgacttcca

SEQ ID NO: 3268180 - DNA, 25 bp, Homo sapien
ctggagccagtcactgtagtggtga

SEQ ID NO: 3268181 - DNA, 25 bp, Homo sapien
cagtcactgtagtggtgacttccat

SEQ ID NO: 3268182 - DNA, 25 bp, Homo sapien
gagccagtcactgtagtggtgactt

SEQ ID NO: 3268183 - DNA, 25 bp, Homo sapien
tgccgctggacatcacttgtgccaa

SEQ ID NO: 3268184 - DNA, 25 bp, Homo sapien
atcccttgccgctggacatcacttg

SEQ ID NO: 3268185 - DNA, 25 bp, Homo sapien
gagccatcccttgccgctggacatc

SEQ ID NO: 3268186 - DNA, 25 bp, Homo sapien
cgctggacatcacttgtgccaaggg

SEQ ID NO: 3268187 - DNA, 25 bp, Homo sapien
gcttccaggatattagagtcatggt

SEQ ID NO: 3268188 - DNA, 25 bp, Homo sapien
tggagcataacaacagtttgtactt

SEQ ID NO: 3268189 - DNA, 25 bp, Homo sapien
cttcatggagaagtacaattaggga

SEQ ID NO: 3268190 - DNA, 25 bp, Homo sapien
gatattagagtcatggtgttggagc

SEQ ID NO: 3268191 - DNA, 25 bp, Homo sapien
ggcataagttaagcagcttgatgat

SEQ ID NO: 3268192 - DNA, 25 bp, Homo sapien
catggcataagttaagcagcttgat

SEQ ID NO: 3268193 - DNA, 25 bp, Homo sapien
tgaaggacaccttagatctgggcat

SEQ ID NO: 3268194 - DNA, 25 bp, Homo sapien
tgtcaatgaaggacaccttagatct

SEQ ID NO: 3268195 - DNA, 25 bp, Homo sapien
gcctttgagaattttgcacaattct

SEQ ID NO: 3268196 - DNA, 25 bp, Homo sapien
aaatgcctttgagaattttgcacaa

SEQ ID NO: 3268197 - DNA, 25 bp, Homo sapien
aaccatgaattcatgaaagattgat

SEQ ID NO: 3268198 - DNA, 25 bp, Homo sapien
tgttttcagtaaccatgaattcatg

SEQ ID NO: 3268199 - DNA, 25 bp, Homo sapien
tactacacagctggccaagggtgtc

SEQ ID NO: 3268200 - DNA, 25 bp, Homo sapien
cttactacacagctggccaagggtg

SEQ ID NO: 3268201 - DNA, 25 bp, Homo sapien
ggccaagggtgtcatggaccgccat

SEQ ID NO: 3268202 - DNA, 25 bp, Homo sapien
ctggccaagggtgtcatggaccgcc

SEQ ID NO: 3268203 - DNA, 25 bp, Homo sapien
cccatgtacctgcacagatagttgt

SEQ ID NO: 3268204 - DNA, 25 bp, Homo sapien
agaactgctttggaatgtggaggcc

SEQ ID NO: 3268205 - DNA, 25 bp, Homo sapien
tcttgtggggcgcttcaccagaacc

SEQ ID NO: 3268206 - DNA, 25 bp, Homo sapien
cattcctgcatatcacgtcttgtgg

SEQ ID NO: 3268207 - DNA, 25 bp, Homo sapien
gctggcaatttgaatggaagaaaga

SEQ ID NO: 3268208 - DNA, 25 bp, Homo sapien
gccctgtcaacgtaattaatctgat

SEQ ID NO: 3268209 - DNA, 25 bp, Homo sapien
tgaaggctggcaatttgaatggaag

SEQ ID NO: 3268210 - DNA, 25 bp, Homo sapien
gcttcaaagttggagccctgtcaac

SEQ ID NO: 3268211 - DNA, 25 bp, Homo sapien
caacgtactgttcatgggctaaaag

SEQ ID NO: 3268212 - DNA, 25 bp, Homo sapien
gcaggactacggagttctgatgctc

SEQ ID NO: 3268213 - DNA, 25 bp, Homo sapien
tgggctaaaagcctttgaaggcaga

SEQ ID NO: 3268214 - DNA, 25 bp, Homo sapien
cagttgtatcatttaagcagatccc

SEQ ID NO: 3268215 - DNA, 25 bp, Homo sapien
cagtcaccacccagggcaccttcat

SEQ ID NO: 3268216 - DNA, 25 bp, Homo sapien
gtcatgagaccaacaggaaccttgc

SEQ ID NO: 3268217 - DNA, 25 bp, Homo sapien
catgagaccaacaggaaccttgcat

SEQ ID NO: 3268218 - DNA, 25 bp, Homo sapien
tcatgagaccaacaggaaccttgca

SEQ ID NO: 3268219 - DNA, 25 bp, Homo sapien
cttcttttgtgtgtacaatgtttgg

SEQ ID NO: 3268220 - DNA, 25 bp, Homo sapien
tcttttgtgtgtacaatgtttggca

SEQ ID NO: 3268221 - DNA, 25 bp, Homo sapien
ttcttttgtgtgtacaatgtttggc

SEQ ID NO: 3268222 - DNA, 25 bp, Homo sapien
cttttgtgtgtacaatgtttggcat

SEQ ID NO: 3268223 - DNA, 25 bp, Homo sapien
tctttatagttatcttcctgcagct

SEQ ID NO: 3268224 - DNA, 25 bp, Homo sapien
gatctttatagttatcttcctgcag

SEQ ID NO: 3268225 - DNA, 25 bp, Homo sapien
tttatagttatcttcctgcagctca

SEQ ID NO: 3268226 - DNA, 25 bp, Homo sapien
tatagttatcttcctgcagctcagc

SEQ ID NO: 3268227 - DNA, 25 bp, Homo sapien
gtgacatccaagggtttcagaacca

SEQ ID NO: 3268228 - DNA, 25 bp, Homo sapien
tcacgaataggagatagcaccaatt

SEQ ID NO: 3268229 - DNA, 25 bp, Homo sapien
gcaccaattactgtgacatccaagg

SEQ ID NO: 3268230 - DNA, 25 bp, Homo sapien
ttcagaaccagggtaatttgctctc

SEQ ID NO: 3268231 - DNA, 25 bp, Homo sapien
taatgctacaaacactgtcaatagt

SEQ ID NO: 3268232 - DNA, 25 bp, Homo sapien
gatgtagacaagaaaaagatgttac

SEQ ID NO: 3268233 - DNA, 25 bp, Homo sapien
taccaataatatctgtaaggattcg

SEQ ID NO: 3268234 - DNA, 25 bp, Homo sapien
gtaaggattcgaaagaactctccaa

SEQ ID NO: 3268235 - DNA, 25 bp, Homo sapien
tgtctgatactgttgcttggaagcc

SEQ ID NO: 3268236 - DNA, 25 bp, Homo sapien
tctgatactgttgcttggaagccca

SEQ ID NO: 3268237 - DNA, 25 bp, Homo sapien
gacaatgtctgatactgttgcttgg

SEQ ID NO: 3268238 - DNA, 25 bp, Homo sapien
gatactgttgcttggaagcccaggc

SEQ ID NO: 3268239 - DNA, 25 bp, Homo sapien
taggatatgccattctcaagtccaa

SEQ ID NO: 3268240 - DNA, 25 bp, Homo sapien
ctagctcagatatcaattccatgcc

SEQ ID NO: 3268241 - DNA, 25 bp, Homo sapien
cattgaggttgcatctcctactaca

SEQ ID NO: 3268242 - DNA, 25 bp, Homo sapien
tcaagtccaatgagcttgctttctc

SEQ ID NO: 3268243 - DNA, 25 bp, Homo sapien
agatatctcattaaacagtcttttt

SEQ ID NO: 3268244 - DNA, 25 bp, Homo sapien
aattaaacagaatttcctcataatg

SEQ ID NO: 3268245 - DNA, 25 bp, Homo sapien
cctcataatgaactacattatgttc

SEQ ID NO: 3268246 - DNA, 25 bp, Homo sapien
ttaaacagaatttcctcataatgaa

SEQ ID NO: 3268247 - DNA, 25 bp, Homo sapien
attctgttacccttagttcatcctg

SEQ ID NO: 3268248 - DNA, 25 bp, Homo sapien
agaagattctgttacccttagttca

SEQ ID NO: 3268249 - DNA, 25 bp, Homo sapien
atataagaagattctgttaccctta

SEQ ID NO: 3268250 - DNA, 25 bp, Homo sapien
gaagattctgttacccttagttcat

SEQ ID NO: 3268251 - DNA, 25 bp, Homo sapien
tcttgtaataagcagtcatcttttc

SEQ ID NO: 3268252 - DNA, 25 bp, Homo sapien
caaggagctgctctagacagtaaat

SEQ ID NO: 3268253 - DNA, 25 bp, Homo sapien
cattatcgcaattcttgtaataagc

SEQ ID NO: 3268254 - DNA, 25 bp, Homo sapien
tcttctgattcatgacttgcaactt

SEQ ID NO: 3268255 - DNA, 25 bp, Homo sapien
ctgtcttcgatactgttgacagatt

SEQ ID NO: 3268256 - DNA, 25 bp, Homo sapien
gtctgttcctaaagatagaaaatga

SEQ ID NO: 3268257 - DNA, 25 bp, Homo sapien
ctaagaaggagggaagattctcatt

SEQ ID NO: 3268258 - DNA, 25 bp, Homo sapien
aggagggaagattctcattttccat

SEQ ID NO: 3268259 - DNA, 25 bp, Homo sapien
aaggagggaagattctcattttcca

SEQ ID NO: 3268260 - DNA, 25 bp, Homo sapien
ttatctaagaaggagggaagattct

SEQ ID NO: 3268261 - DNA, 25 bp, Homo sapien
cagttaactccatgagacttgttac

SEQ ID NO: 3268262 - DNA, 25 bp, Homo sapien
tcagttaactccatgagacttgtta

SEQ ID NO: 3268263 - DNA, 25 bp, Homo sapien
tgcatgcatctcaaatttccagaag

SEQ ID NO: 3268264 - DNA, 25 bp, Homo sapien
ttatcactttcatgagccacgtcca

SEQ ID NO: 3268265 - DNA, 25 bp, Homo sapien
caaatataaggatttcctgaaacgt

SEQ ID NO: 3268266 - DNA, 25 bp, Homo sapien
cctgaaacgtccattgaacatttct

SEQ ID NO: 3268267 - DNA, 25 bp, Homo sapien
ggagaaattacccttaatctcagga

SEQ ID NO: 3268268 - DNA, 25 bp, Homo sapien
tgtttcttgaagtaccccagggtgc

SEQ ID NO: 3268269 - DNA, 25 bp, Homo sapien
tttgcctgcagctgaaggtaccaga

SEQ ID NO: 3268270 - DNA, 25 bp, Homo sapien
tgcctacacacgtcccatatctaat

SEQ ID NO: 3268271 - DNA, 25 bp, Homo sapien
ctaatcagagcattttacagcagta

SEQ ID NO: 3268272 - DNA, 25 bp, Homo sapien
cccatgattcccacaaattttttag

SEQ ID NO: 3268273 - DNA, 25 bp, Homo sapien
ggtctctttggattgtagttcccca

SEQ ID NO: 3268274 - DNA, 25 bp, Homo sapien
ttggcttgaactctggatgcgtact

SEQ ID NO: 3268275 - DNA, 25 bp, Homo sapien
acttggaccatggtgataaaaatgc

SEQ ID NO: 3268276 - DNA, 25 bp, Homo sapien
aatataagctcttcaaagatataat

SEQ ID NO: 3268277 - DNA, 25 bp, Homo sapien
tataagctcttcaaagatataatta

SEQ ID NO: 3268278 - DNA, 25 bp, Homo sapien
aaatataagctcttcaaagatataa

SEQ ID NO: 3268279 - DNA, 25 bp, Homo sapien
taagctcttcaaagatataattaat

SEQ ID NO: 3268280 - DNA, 25 bp, Homo sapien
gatgaactgggtgaaaattctgtct

SEQ ID NO: 3268281 - DNA, 25 bp, Homo sapien
tctccactgcctacaacgatgaact

SEQ ID NO: 3268282 - DNA, 25 bp, Homo sapien
gcctacaacgatgaactgggtgaaa

SEQ ID NO: 3268283 - DNA, 25 bp, Homo sapien
gtagatctctgtgcaatgaatcttt

SEQ ID NO: 3268284 - DNA, 25 bp, Homo sapien
ttggactggtaatcgattcaaagcc

SEQ ID NO: 3268285 - DNA, 25 bp, Homo sapien
tgttcttggactggtaatcgattca

SEQ ID NO: 3268286 - DNA, 25 bp, Homo sapien
tcttggactggtaatcgattcaaag

SEQ ID NO: 3268287 - DNA, 25 bp, Homo sapien
ggactggtaatcgattcaaagccat

SEQ ID NO: 3268288 - DNA, 25 bp, Homo sapien
ttgtttgcaccttttgggttatgat

SEQ ID NO: 3268289 - DNA, 25 bp, Homo sapien
cagcagtcaatttgttggccttttc

SEQ ID NO: 3268290 - DNA, 25 bp, Homo sapien
tttcccagtattgtcagcagtcaat

SEQ ID NO: 3268291 - DNA, 25 bp, Homo sapien
ccttttgggttatgatttccaacat

SEQ ID NO: 3268292 - DNA, 25 bp, Homo sapien
tccttgaagctaccaaatacaattt

SEQ ID NO: 3268293 - DNA, 25 bp, Homo sapien
ggtgccatcgtatcataccaatatt

SEQ ID NO: 3268294 - DNA, 25 bp, Homo sapien
gagtgtttttctaatatatctaata

SEQ ID NO: 3268295 - DNA, 25 bp, Homo sapien
taatattgaatatggctggtgccat

SEQ ID NO: 3268296 - DNA, 25 bp, Homo sapien
ctattctttgagcttgtacagcagg

SEQ ID NO: 3268297 - DNA, 25 bp, Homo sapien
ggccatgatgtcctttgtgcttcgg

SEQ ID NO: 3268298 - DNA, 25 bp, Homo sapien
ttgggatcaccaccattgcagccgt

SEQ ID NO: 3268299 - DNA, 25 bp, Homo sapien
caaaagttccaaccttcattgggat

SEQ ID NO: 3268300 - DNA, 25 bp, Homo sapien
cggacaccgccacatgatttcctcc

SEQ ID NO: 3268301 - DNA, 25 bp, Homo sapien
cacaaacaggtgagcttgtcctcca

SEQ ID NO: 3268302 - DNA, 25 bp, Homo sapien
caggataccaaactgcgctaggtct

SEQ ID NO: 3268303 - DNA, 25 bp, Homo sapien
ctgacaggaggtactgagggatcag

SEQ ID NO: 3268304 - DNA, 25 bp, Homo sapien
accaaactgcgctaggtcttccttt

SEQ ID NO: 3268305 - DNA, 25 bp, Homo sapien
gaggtactgagggatcagtttttcc

SEQ ID NO: 3268306 - DNA, 25 bp, Homo sapien
actgacagcaatctaccaggaaagc

SEQ ID NO: 3268307 - DNA, 25 bp, Homo sapien
ggacagatgctgacatgactgacag

SEQ ID NO: 3268308 - DNA, 25 bp, Homo sapien
gacagatgctgacatgactgacagc

SEQ ID NO: 3268309 - DNA, 25 bp, Homo sapien
tgtactcagctttgaggatgtgctc

SEQ ID NO: 3268310 - DNA, 25 bp, Homo sapien
actcagctttgaggatgtgctctcc

SEQ ID NO: 3268311 - DNA, 25 bp, Homo sapien
agctttgaggatgtgctctccttcc

SEQ ID NO: 3268312 - DNA, 25 bp, Homo sapien
cctgtactcagctttgaggatgtgc

SEQ ID NO: 3268313 - DNA, 25 bp, Homo sapien
tcatcaaaccttacaacactggagc

SEQ ID NO: 3268314 - DNA, 25 bp, Homo sapien
tctgctggtttcaactggactcact

SEQ ID NO: 3268315 - DNA, 25 bp, Homo sapien
tcaagccgttgaggaatagagattc

SEQ ID NO: 3268316 - DNA, 25 bp, Homo sapien
ggagctctgcaatgtaagacacagg

SEQ ID NO: 3268317 - DNA, 25 bp, Homo sapien
tctcttccacgtggtctgttcttaa

SEQ ID NO: 3268318 - DNA, 25 bp, Homo sapien
ctcttgtatctctttaagtggctta

SEQ ID NO: 3268319 - DNA, 25 bp, Homo sapien
tctcattgggttagttcagaagcct

SEQ ID NO: 3268320 - DNA, 25 bp, Homo sapien
aaatctctaacaagaccagggaatt

SEQ ID NO: 3268321 - DNA, 25 bp, Homo sapien
cactcaatttgctgcttctaatcac

SEQ ID NO: 3268322 - DNA, 25 bp, Homo sapien
ctattccggctgcacttcttgaatc

SEQ ID NO: 3268323 - DNA, 25 bp, Homo sapien
gctgcacttcttgaatcccttcctt

SEQ ID NO: 3268324 - DNA, 25 bp, Homo sapien
tccggctgcacttcttgaatccctt

SEQ ID NO: 3268325 - DNA, 25 bp, Homo sapien
gtgtttgttatcagctcctttgcaa

SEQ ID NO: 3268326 - DNA, 25 bp, Homo sapien
tgtgtttgttatcagctcctttgca

SEQ ID NO: 3268327 - DNA, 25 bp, Homo sapien
tgaatttcaagattaagtgacacga

SEQ ID NO: 3268328 - DNA, 25 bp, Homo sapien
tgttggggacggcattataattcag

SEQ ID NO: 3268329 - DNA, 25 bp, Homo sapien
tctgaaaggtccgtataatgttggg

SEQ ID NO: 3268330 - DNA, 25 bp, Homo sapien
taagtgacacgatggctgagtggca

SEQ ID NO: 3268331 - DNA, 25 bp, Homo sapien
ttgggtacatagacacaacctgcct

SEQ ID NO: 3268332 - DNA, 25 bp, Homo sapien
caacctgcctatgctaccatatgga

SEQ ID NO: 3268333 - DNA, 25 bp, Homo sapien
gatgccaactgatgagatacgtatt

SEQ ID NO: 3268334 - DNA, 25 bp, Homo sapien
tgtcaatcagccaaagtatgttggg

SEQ ID NO: 3268335 - DNA, 25 bp, Homo sapien
gctcacagtatttagtgtaatatct

SEQ ID NO: 3268336 - DNA, 25 bp, Homo sapien
ctcgtactgctcacagtatttagtg

SEQ ID NO: 3268337 - DNA, 25 bp, Homo sapien
tttgaatctcgtactgctcacagta

SEQ ID NO: 3268338 - DNA, 25 bp, Homo sapien
ctttgttttgaatctcgtactgctc

SEQ ID NO: 3268339 - DNA, 25 bp, Homo sapien
gagagatagcacactcgacaactaa

SEQ ID NO: 3268340 - DNA, 25 bp, Homo sapien
tctgagagatagcacactcgacaac

SEQ ID NO: 3268341 - DNA, 25 bp, Homo sapien
gcacactcgacaactaaataagctt

SEQ ID NO: 3268342 - DNA, 25 bp, Homo sapien
cgacaactaaataagcttgaggcat

SEQ ID NO: 3268343 - DNA, 25 bp, Homo sapien
ttttccatgtggttgatgctccttt

SEQ ID NO: 3268344 - DNA, 25 bp, Homo sapien
cttcacagtatgaactcataatttt

SEQ ID NO: 3268345 - DNA, 25 bp, Homo sapien
tttttccatgtggttgatgctcctt

SEQ ID NO: 3268346 - DNA, 25 bp, Homo sapien
cacagtatgaactcataatttttcc

SEQ ID NO: 3268347 - DNA, 25 bp, Homo sapien
tatgcttacatagtttctccttttc

SEQ ID NO: 3268348 - DNA, 25 bp, Homo sapien
gtaacttttacttgcaatgcctgtg

SEQ ID NO: 3268349 - DNA, 25 bp, Homo sapien
ttgccttcacagttgtaacttttac

SEQ ID NO: 3268350 - DNA, 25 bp, Homo sapien
ctgtgttcttgatatgcttacatag

SEQ ID NO: 3268351 - DNA, 25 bp, Homo sapien
gactgaatatggttccctaagacta

SEQ ID NO: 3268352 - DNA, 25 bp, Homo sapien
aaatttctcatgtcaggtcccagtg

SEQ ID NO: 3268353 - DNA, 25 bp, Homo sapien
cctgaggcattgactgggtcccttt

SEQ ID NO: 3268354 - DNA, 25 bp, Homo sapien
gcgctgtgtccaggcgactgaatat

SEQ ID NO: 3268355 - DNA, 25 bp, Homo sapien
taatttctatctgtgactccagtag

SEQ ID NO: 3268356 - DNA, 25 bp, Homo sapien
cagtaggaagctccctacttcaggg

SEQ ID NO: 3268357 - DNA, 25 bp, Homo sapien
ggatcacatgtctcttgtggcagtg

SEQ ID NO: 3268358 - DNA, 25 bp, Homo sapien
tgtggcagtgtttgatcaatagtaa

SEQ ID NO: 3268359 - DNA, 25 bp, Homo sapien
aatccaccactcagtaaaatggcag

SEQ ID NO: 3268360 - DNA, 25 bp, Homo sapien
gtaaaatggcagacaggtggagccc

SEQ ID NO: 3268361 - DNA, 25 bp, Homo sapien
gtatggctatgaatccaccactcag

SEQ ID NO: 3268362 - DNA, 25 bp, Homo sapien
ggctatgaatccaccactcagtaaa

SEQ ID NO: 3268363 - DNA, 25 bp, Homo sapien
tcatactaacttctcttgcccaggg

SEQ ID NO: 3268364 - DNA, 25 bp, Homo sapien
gatgaacggatatttgtcctactcc

SEQ ID NO: 3268365 - DNA, 25 bp, Homo sapien
ctatgtaagtttcccactgaaggtg

SEQ ID NO: 3268366 - DNA, 25 bp, Homo sapien
ctgaaggtggaatgatgaacggata

SEQ ID NO: 3268367 - DNA, 25 bp, Homo sapien
aatcaaccaggagatacttcatggt

SEQ ID NO: 3268368 - DNA, 25 bp, Homo sapien
gaataattatgaagtcctcatcaac

SEQ ID NO: 3268369 - DNA, 25 bp, Homo sapien
gatacttcatggtctgccacgcctc

SEQ ID NO: 3268370 - DNA, 25 bp, Homo sapien
caggagatacttcatggtctgccac

SEQ ID NO: 3268371 - DNA, 25 bp, Homo sapien
taactgaaggctcataaacgagaag

SEQ ID NO: 3268372 - DNA, 25 bp, Homo sapien
aaggctcataaacgagaagtgtgca

SEQ ID NO: 3268373 - DNA, 25 bp, Homo sapien
aggattaactgaaggctcataaacg

SEQ ID NO: 3268374 - DNA, 25 bp, Homo sapien
gctcataaacgagaagtgtgcagcc

SEQ ID NO: 3268375 - DNA, 25 bp, Homo sapien
tttcatagtaactgtcaactttgtg

SEQ ID NO: 3268376 - DNA, 25 bp, Homo sapien
gacttagaactagatgatccccgac

SEQ ID NO: 3268377 - DNA, 25 bp, Homo sapien
taatcactatctgacttagaactag

SEQ ID NO: 3268378 - DNA, 25 bp, Homo sapien
cgacgaacttggtgtgcatttagaa

SEQ ID NO: 3268379 - DNA, 25 bp, Homo sapien
ggaaggtcaccaatgctacacgtaa

SEQ ID NO: 3268380 - DNA, 25 bp, Homo sapien
taaagaggagccagactctcgacta

SEQ ID NO: 3268381 - DNA, 25 bp, Homo sapien
gactaatacctgtctctgtaacaag

SEQ ID NO: 3268382 - DNA, 25 bp, Homo sapien
catatatgttgcaggcagtgtagag

SEQ ID NO: 3268383 - DNA, 25 bp, Homo sapien
aggtagactggacctcatcagccat

SEQ ID NO: 3268384 - DNA, 25 bp, Homo sapien
ttggctatggcaatgttaaagatga

SEQ ID NO: 3268385 - DNA, 25 bp, Homo sapien
tggctatggcaatgttaaagatgaa

SEQ ID NO: 3268386 - DNA, 25 bp, Homo sapien
cttggctatggcaatgttaaagatg

SEQ ID NO: 3268387 - DNA, 25 bp, Homo sapien
tgctttcagggtacatggtaaaaag

SEQ ID NO: 3268388 - DNA, 25 bp, Homo sapien
catacagaagttccctgctttcagg

SEQ ID NO: 3268389 - DNA, 25 bp, Homo sapien
ctttcagggtacatggtaaaaagag

SEQ ID NO: 3268390 - DNA, 25 bp, Homo sapien
tctccatacagaagttccctgcttt

SEQ ID NO: 3268391 - DNA, 25 bp, Homo sapien
ccagttttactgcaggttcaatcat

SEQ ID NO: 3268392 - DNA, 25 bp, Homo sapien
tataaaacatttctccatcagagga

SEQ ID NO: 3268393 - DNA, 25 bp, Homo sapien
gaatccagttttactgcaggttcaa

SEQ ID NO: 3268394 - DNA, 25 bp, Homo sapien
ccatcagaggaatccagttttactg

SEQ ID NO: 3268395 - DNA, 25 bp, Homo sapien
tccatccgctaatgtagaccttcca

SEQ ID NO: 3268396 - DNA, 25 bp, Homo sapien
aatgtagaccttccattaatgttgg

SEQ ID NO: 3268397 - DNA, 25 bp, Homo sapien
tccctccatccgctaatgtagacct

SEQ ID NO: 3268398 - DNA, 25 bp, Homo sapien
gaccttccattaatgttggaatcca

SEQ ID NO: 3268399 - DNA, 25 bp, Homo sapien
tcctccatcagcttgaatacaacag

SEQ ID NO: 3268400 - DNA, 25 bp, Homo sapien
ctttgccaaggtccaatacatgtct

SEQ ID NO: 3268401 - DNA, 25 bp, Homo sapien
aaactaacagtttgataggcatttc

SEQ ID NO: 3268402 - DNA, 25 bp, Homo sapien
caatgatttcccgtcgccgaggatg

SEQ ID NO: 3268403 - DNA, 25 bp, Homo sapien
accagtccctctaattactgacgat

SEQ ID NO: 3268404 - DNA, 25 bp, Homo sapien
aattactgacgatttcatccctctg

SEQ ID NO: 3268405 - DNA, 25 bp, Homo sapien
gtccctctaattactgacgatttca

SEQ ID NO: 3268406 - DNA, 25 bp, Homo sapien
catccctctgagctgtagctccctc

SEQ ID NO: 3268407 - DNA, 25 bp, Homo sapien
tcatccgggaagaaatgtgcagcgc

SEQ ID NO: 3268408 - DNA, 25 bp, Homo sapien
actccactgtgaaggacgcgctgca

SEQ ID NO: 3268409 - DNA, 25 bp, Homo sapien
ggagtgcacaacgtttctgcccaag

SEQ ID NO: 3268410 - DNA, 25 bp, Homo sapien
caagcggctgcctgaagtttgcaaa

SEQ ID NO: 3268411 - DNA, 25 bp, Homo sapien
gcggagtggagacggcttctcccat

SEQ ID NO: 3268412 - DNA, 25 bp, Homo sapien
cgcggagtggagacggcttctccca

SEQ ID NO: 3268413 - DNA, 25 bp, Homo sapien
catcggaatgcacggcgcaaggccg

SEQ ID NO: 3268414 - DNA, 25 bp, Homo sapien
attgccgcgcatcggaatgcacggc

SEQ ID NO: 3268415 - DNA, 25 bp, Homo sapien
gagactgcggcggtgcgcactgagc

SEQ ID NO: 3268416 - DNA, 25 bp, Homo sapien
ttactgccacttagccggccgcgaa

SEQ ID NO: 3268417 - DNA, 25 bp, Homo sapien
cctgcgcgcggggcttttctcgctg

SEQ ID NO: 3268418 - DNA, 25 bp, Homo sapien
tactgccacttagccggccgcgaag

SEQ ID NO: 3268419 - DNA, 25 bp, Homo sapien
aaatcattctgcctcgtcacccagg

SEQ ID NO: 3268420 - DNA, 25 bp, Homo sapien
ttagacacacttccatccaacgggc

SEQ ID NO: 3268421 - DNA, 25 bp, Homo sapien
gggcatctacgatcccctgtaggga

SEQ ID NO: 3268422 - DNA, 25 bp, Homo sapien
gtctcgtaaagaatacccacactgg

SEQ ID NO: 3268423 - DNA, 25 bp, Homo sapien
gataggtgacgctacactttgccag

SEQ ID NO: 3268424 - DNA, 25 bp, Homo sapien
aacatgtgtttattccccaggcgcg

SEQ ID NO: 3268425 - DNA, 25 bp, Homo sapien
tcagtcgtcttaatcctagccgggc

SEQ ID NO: 3268426 - DNA, 25 bp, Homo sapien
tctcctagtgtgtagtttcggcggc

SEQ ID NO: 3268427 - DNA, 25 bp, Homo sapien
aaggcacggactctgcggctgcgaa

SEQ ID NO: 3268428 - DNA, 25 bp, Homo sapien
cgaaaggctgctgcggtttcaggcg

SEQ ID NO: 3268429 - DNA, 25 bp, Homo sapien
actgctccgacatgcgggccgaatg

SEQ ID NO: 3268430 - DNA, 25 bp, Homo sapien
ccaaacttgggcaccgcacggtgcg

SEQ ID NO: 3268431 - DNA, 25 bp, Homo sapien
tgcgcagagttgttaagaaaaaaga

SEQ ID NO: 3268432 - DNA, 25 bp, Homo sapien
gcagagttgttaagaaaaaagagaa

SEQ ID NO: 3268433 - DNA, 25 bp, Homo sapien
cttgcgcagagttgttaagaaaaaa

SEQ ID NO: 3268434 - DNA, 25 bp, Homo sapien
gcgcagagttgttaagaaaaaagag

SEQ ID NO: 3268435 - DNA, 25 bp, Homo sapien
cgcgctctccggggtgagaagggac

SEQ ID NO: 3268436 - DNA, 25 bp, Homo sapien
ccgcgctctccggggtgagaaggga

SEQ ID NO: 3268437 - DNA, 25 bp, Homo sapien
tcgggcttctctttggcgcgccggg

SEQ ID NO: 3268438 - DNA, 25 bp, Homo sapien
cggggggaccctgacactgaccgct

SEQ ID NO: 3268439 - DNA, 25 bp, Homo sapien
ctgaagatggctcgggcttctcttt

SEQ ID NO: 3268440 - DNA, 25 bp, Homo sapien
tctgggcgtctctgaagatggctcg

SEQ ID NO: 3268441 - DNA, 25 bp, Homo sapien
accgtgcccgaagcgacgtgccggg

SEQ ID NO: 3268442 - DNA, 25 bp, Homo sapien
catgagcagagtcggagttgagact

SEQ ID NO: 3268443 - DNA, 25 bp, Homo sapien
tgtgacgcgagtagtctcccctgca

SEQ ID NO: 3268444 - DNA, 25 bp, Homo sapien
cattctcgatctgttgactggctcc

SEQ ID NO: 3268445 - DNA, 25 bp, Homo sapien
ctggaacgtgaattggactcaactc

SEQ ID NO: 3268446 - DNA, 25 bp, Homo sapien
tagcagcaaagaccagcgggctggc

SEQ ID NO: 3268447 - DNA, 25 bp, Homo sapien
ttggactcaactcgagtagcagcaa

SEQ ID NO: 3268448 - DNA, 25 bp, Homo sapien
agtagcagcaaagaccagcgggctg

SEQ ID NO: 3268449 - DNA, 25 bp, Homo sapien
cattgaaatccgcaagattgggcgc

SEQ ID NO: 3268450 - DNA, 25 bp, Homo sapien
tcaaagacgagaacgacaacgtgcc

SEQ ID NO: 3268451 - DNA, 25 bp, Homo sapien
tcttcgacgagaacgagtgcttcct

SEQ ID NO: 3268452 - DNA, 25 bp, Homo sapien
tacgaggccgacttggctgagaaca

SEQ ID NO: 3268453 - DNA, 25 bp, Homo sapien
cagacagcggtaagaacgccgagat

SEQ ID NO: 3268454 - DNA, 25 bp, Homo sapien
taagtttatgcaggacgtcttcacc

SEQ ID NO: 3268455 - DNA, 25 bp, Homo sapien
tttgaccgggaacatcagaccacat

SEQ ID NO: 3268456 - DNA, 25 bp, Homo sapien
gacatcctggtcaataccgtgctgg

SEQ ID NO: 3268457 - DNA, 25 bp, Homo sapien
ggatggcccctctacctctttatgt

SEQ ID NO: 3268458 - DNA, 25 bp, Homo sapien
gataacgtaaactcaagcagcttca

SEQ ID NO: 3268459 - DNA, 25 bp, Homo sapien
taatacatttaccacgctgtctgcc

SEQ ID NO: 3268460 - DNA, 25 bp, Homo sapien
cactgtagtcacattcggaaggaat

SEQ ID NO: 3268461 - DNA, 25 bp, Homo sapien
tacatgacagggtttatgggagtca

SEQ ID NO: 3268462 - DNA, 25 bp, Homo sapien
taattatctatgaatttctctaacc

SEQ ID NO: 3268463 - DNA, 25 bp, Homo sapien
ctttagattataactcctgctctga

SEQ ID NO: 3268464 - DNA, 25 bp, Homo sapien
ttttgaagcactaaagcaactgaag

SEQ ID NO: 3268465 - DNA, 25 bp, Homo sapien
gctttcagataatcctgcttaagtg

SEQ ID NO: 3268466 - DNA, 25 bp, Homo sapien
tcagataatcctgcttaagtgactg

SEQ ID NO: 3268467 - DNA, 25 bp, Homo sapien
taatcctgcttaagtgactggttga

SEQ ID NO: 3268468 - DNA, 25 bp, Homo sapien
tcagctggctttcagataatcctgc

SEQ ID NO: 3268469 - DNA, 25 bp, Homo sapien
ttactttgagctctacacttttctg

SEQ ID NO: 3268470 - DNA, 25 bp, Homo sapien
gaattcggtgaatcggctttcagga

SEQ ID NO: 3268471 - DNA, 25 bp, Homo sapien
gttcatcctctgtccgaatttcttg

SEQ ID NO: 3268472 - DNA, 25 bp, Homo sapien
tgcaatttcatagttactttgagct

SEQ ID NO: 3268473 - DNA, 25 bp, Homo sapien
aagacgaagaaactcaattaagcag

SEQ ID NO: 3268474 - DNA, 25 bp, Homo sapien
ttgaaagacgaagaaactcaattaa

SEQ ID NO: 3268475 - DNA, 25 bp, Homo sapien
aaactcaattaagcagtcaacttta

SEQ ID NO: 3268476 - DNA, 25 bp, Homo sapien
aagcagtcaactttattccaatctg

SEQ ID NO: 3268477 - DNA, 25 bp, Homo sapien
cagagcttttaggaagcgcagctct

SEQ ID NO: 3268478 - DNA, 25 bp, Homo sapien
gagcttttaggaagcgcagctctcc

SEQ ID NO: 3268479 - DNA, 25 bp, Homo sapien
agagcttttaggaagcgcagctctc

SEQ ID NO: 3268480 - DNA, 25 bp, Homo sapien
cattgttcctgaaaacgacctcgaa

SEQ ID NO: 3268481 - DNA, 25 bp, Homo sapien
tgctgtgcaaaggtctgctctgact

SEQ ID NO: 3268482 - DNA, 25 bp, Homo sapien
tctatgggccaagggaataagttct

SEQ ID NO: 3268483 - DNA, 25 bp, Homo sapien
aatgttcatggccttgccgcctgga

SEQ ID NO: 3268484 - DNA, 25 bp, Homo sapien
gactgtaggcaccaggacttcctgc

SEQ ID NO: 3268485 - DNA, 25 bp, Homo sapien
ccagatcaggtgtggagacactgca

SEQ ID NO: 3268486 - DNA, 25 bp, Homo sapien
tgcacgcagctagtgtagagccaca

SEQ ID NO: 3268487 - DNA, 25 bp, Homo sapien
gattttgagaaaccacttgcagagt

SEQ ID NO: 3268488 - DNA, 25 bp, Homo sapien
ccaagttcccattcttgaataagac

SEQ ID NO: 3268489 - DNA, 25 bp, Homo sapien
tgttcactctatgtcctgtctttca

SEQ ID NO: 3268490 - DNA, 25 bp, Homo sapien
atcccatgttcactctatgtcctgt

SEQ ID NO: 3268491 - DNA, 25 bp, Homo sapien
agtcctccactttcctaaatcccat

SEQ ID NO: 3268492 - DNA, 25 bp, Homo sapien
cccatgttcactctatgtcctgtct

SEQ ID NO: 3268493 - DNA, 25 bp, Homo sapien
aaggacagcattctggagtgtcaca

SEQ ID NO: 3268494 - DNA, 25 bp, Homo sapien
aaaggacagcattctggagtgtcac

SEQ ID NO: 3268495 - DNA, 25 bp, Homo sapien
aggacagcattctggagtgtcacaa

SEQ ID NO: 3268496 - DNA, 25 bp, Homo sapien
ggacagcattctggagtgtcacaat

SEQ ID NO: 3268497 - DNA, 25 bp, Homo sapien
tttcactattagacagtacactggt

SEQ ID NO: 3268498 - DNA, 25 bp, Homo sapien
cagtacactggtatctgctaatgca

SEQ ID NO: 3268499 - DNA, 25 bp, Homo sapien
ttttgtgtatactttgccttgtatt

SEQ ID NO: 3268500 - DNA, 25 bp, Homo sapien
gaattttggaatggtaagcatctcc

SEQ ID NO: 3268501 - DNA, 25 bp, Homo sapien
caactggataacctgaatgacagcc

SEQ ID NO: 3268502 - DNA, 25 bp, Homo sapien
tcatgtagaaggatggtgtactttc

SEQ ID NO: 3268503 - DNA, 25 bp, Homo sapien
ggatggtgtactttctactggaaga

SEQ ID NO: 3268504 - DNA, 25 bp, Homo sapien
gaagaatatttcctctgggatggca

SEQ ID NO: 3268505 - DNA, 25 bp, Homo sapien
tcacagtgcatcattcctgttgtca

SEQ ID NO: 3268506 - DNA, 25 bp, Homo sapien
ctgtgagggtacaggagccacgact

SEQ ID NO: 3268507 - DNA, 25 bp, Homo sapien
ctcatagtggataaagtcttctaga

SEQ ID NO: 3268508 - DNA, 25 bp, Homo sapien
ggtacaggagccacgactcatagtg

SEQ ID NO: 3268509 - DNA, 25 bp, Homo sapien
gccacgactcatagtggataaagtc

SEQ ID NO: 3268510 - DNA, 25 bp, Homo sapien
aagtgttgttctccacattgtcagc

SEQ ID NO: 3268511 - DNA, 25 bp, Homo sapien
tccactttcttgaacttagagactt

SEQ ID NO: 3268512 - DNA, 25 bp, Homo sapien
tgaacttagagacttccagaagaac

SEQ ID NO: 3268513 - DNA, 25 bp, Homo sapien
tgtcagccaagcgatgggtcagata

SEQ ID NO: 3268514 - DNA, 25 bp, Homo sapien
catgcagaggaaaggggtcatcccc

SEQ ID NO: 3268515 - DNA, 25 bp, Homo sapien
atgcagaggaaaggggtcatcccca

SEQ ID NO: 3268516 - DNA, 25 bp, Homo sapien
tgcagaggaaaggggtcatccccat

SEQ ID NO: 3268517 - DNA, 25 bp, Homo sapien
tgatggcacagacatagtaagtcct

SEQ ID NO: 3268518 - DNA, 25 bp, Homo sapien
tagcagcatagtaactggtgaccac

SEQ ID NO: 3268519 - DNA, 25 bp, Homo sapien
agttaagccctgtctcgtagcagca

SEQ ID NO: 3268520 - DNA, 25 bp, Homo sapien
tggtgaccacaaacgatcggtatct

SEQ ID NO: 3268521 - DNA, 25 bp, Homo sapien
catagcttgacatgtagcggtaatg

SEQ ID NO: 3268522 - DNA, 25 bp, Homo sapien
ctccgatgcctatgtcctttggtat

SEQ ID NO: 3268523 - DNA, 25 bp, Homo sapien
catgatttgggtcttctgatttatc

SEQ ID NO: 3268524 - DNA, 25 bp, Homo sapien
tctgctgagcttgctcttcaaggca

SEQ ID NO: 3268525 - DNA, 25 bp, Homo sapien
ttaacgttctatccagggccctgca

SEQ ID NO: 3268526 - DNA, 25 bp, Homo sapien
cacctgcagtgtgtggtaatgccct

SEQ ID NO: 3268527 - DNA, 25 bp, Homo sapien
gactgtctgatttgacattggacac

SEQ ID NO: 3268528 - DNA, 25 bp, Homo sapien
gccctgcatggactgtctgatttga

SEQ ID NO: 3268529 - DNA, 25 bp, Homo sapien
gattcagattggttctctctatgca

SEQ ID NO: 3268530 - DNA, 25 bp, Homo sapien
tggaagtggaaagaactgtggatct

SEQ ID NO: 3268531 - DNA, 25 bp, Homo sapien
ctagagcagctcaggcagcccaaga

SEQ ID NO: 3268532 - DNA, 25 bp, Homo sapien
ttggttctctctatgcacatcctgg

SEQ ID NO: 3268533 - DNA, 25 bp, Homo sapien
tctcctgagttgtccattgagacag

SEQ ID NO: 3268534 - DNA, 25 bp, Homo sapien
ggtagcttgaatgtttgccctgtaa

SEQ ID NO: 3268535 - DNA, 25 bp, Homo sapien
taccactagaataggtgtcagcagg

SEQ ID NO: 3268536 - DNA, 25 bp, Homo sapien
taaacaagtactatgctgggcaagg

SEQ ID NO: 3268537 - DNA, 25 bp, Homo sapien
atccaaggcagaataggttctccca

SEQ ID NO: 3268538 - DNA, 25 bp, Homo sapien
ctttaatttctattcctggaatcca

SEQ ID NO: 3268539 - DNA, 25 bp, Homo sapien
tccaaggcagaataggttctcccat

SEQ ID NO: 3268540 - DNA, 25 bp, Homo sapien
aatccaaggcagaataggttctccc

SEQ ID NO: 3268541 - DNA, 25 bp, Homo sapien
cttttcttctagatcctttatctct

SEQ ID NO: 3268542 - DNA, 25 bp, Homo sapien
atctcttttcttgcctttgtcttca

SEQ ID NO: 3268543 - DNA, 25 bp, Homo sapien
ttcttctagatcctttatctctttt

SEQ ID NO: 3268544 - DNA, 25 bp, Homo sapien
tatctcttttcttgcctttgtcttc

SEQ ID NO: 3268545 - DNA, 25 bp, Homo sapien
tcttcggataccaggctgatcctcc

SEQ ID NO: 3268546 - DNA, 25 bp, Homo sapien
acactatgtcggctccatgaggact

SEQ ID NO: 3268547 - DNA, 25 bp, Homo sapien
cctcagtggtttgcctgagagaaac

SEQ ID NO: 3268548 - DNA, 25 bp, Homo sapien
acatcaactgccactgttcttcgga

SEQ ID NO: 3268549 - DNA, 25 bp, Homo sapien
tcaccctgaataggtcagaaccatg

SEQ ID NO: 3268550 - DNA, 25 bp, Homo sapien
ggggcaccgtctgggtaatcatcaa

SEQ ID NO: 3268551 - DNA, 25 bp, Homo sapien
tcagtaaaatgtcggatctgtcggc

SEQ ID NO: 3268552 - DNA, 25 bp, Homo sapien
cattggaggctatcaagtcattggg

SEQ ID NO: 3268553 - DNA, 25 bp, Homo sapien
atgtttctcacccttacacctaaat

SEQ ID NO: 3268554 - DNA, 25 bp, Homo sapien
tcttacttttgatggaatgaggaca

SEQ ID NO: 3268555 - DNA, 25 bp, Homo sapien
tacttttgatggaatgaggacattt

SEQ ID NO: 3268556 - DNA, 25 bp, Homo sapien
caagtaagaacttaaccctcttgat

SEQ ID NO: 3268557 - DNA, 25 bp, Homo sapien
ttgcaccagttctatcttggttaaa

SEQ ID NO: 3268558 - DNA, 25 bp, Homo sapien
cttttgcaccagttctatcttggtt

SEQ ID NO: 3268559 - DNA, 25 bp, Homo sapien
cagttctatcttggttaaaactgta

SEQ ID NO: 3268560 - DNA, 25 bp, Homo sapien
caccagttctatcttggttaaaact

SEQ ID NO: 3268561 - DNA, 25 bp, Homo sapien
ttgccaatcttgccccaagacgaaa

SEQ ID NO: 3268562 - DNA, 25 bp, Homo sapien
cacatgattaccctcttgccaatct

SEQ ID NO: 3268563 - DNA, 25 bp, Homo sapien
gccccaagacgaaaaacagcgtcat

SEQ ID NO: 3268564 - DNA, 25 bp, Homo sapien
tcttctcttcccacatgattaccct

SEQ ID NO: 3268565 - DNA, 25 bp, Homo sapien
aggtccatggatcagagctctctgt

SEQ ID NO: 3268566 - DNA, 25 bp, Homo sapien
ggagaattattgctggtttgaactt

SEQ ID NO: 3268567 - DNA, 25 bp, Homo sapien
accacagatggagaattattgctgg

SEQ ID NO: 3268568 - DNA, 25 bp, Homo sapien
ttatcctgtgtagaattagtctctg

SEQ ID NO: 3268569 - DNA, 25 bp, Homo sapien
gtatgttctgatttagcttctctga

SEQ ID NO: 3268570 - DNA, 25 bp, Homo sapien
gttctgatttagcttctctgacaag

SEQ ID NO: 3268571 - DNA, 25 bp, Homo sapien
tgttctgatttagcttctctgacaa

SEQ ID NO: 3268572 - DNA, 25 bp, Homo sapien
tatgttctgatttagcttctctgac

SEQ ID NO: 3268573 - DNA, 25 bp, Homo sapien
ctgcagttaggtctcttaacagctt

SEQ ID NO: 3268574 - DNA, 25 bp, Homo sapien
tgcagttaggtctcttaacagcttt

SEQ ID NO: 3268575 - DNA, 25 bp, Homo sapien
tttgggtgcctgaaggagccttttc

SEQ ID NO: 3268576 - DNA, 25 bp, Homo sapien
ttgggtgcctgaaggagccttttca

SEQ ID NO: 3268577 - DNA, 25 bp, Homo sapien
ctgttaccactgttaaataggccac

SEQ ID NO: 3268578 - DNA, 25 bp, Homo sapien
ttactccaaaccatacaacagctgc

SEQ ID NO: 3268579 - DNA, 25 bp, Homo sapien
tgtttactccaaaccatacaacagc

SEQ ID NO: 3268580 - DNA, 25 bp, Homo sapien
ccactgttaaataggccacatttct

SEQ ID NO: 3268581 - DNA, 25 bp, Homo sapien
gacttgaactctgccatcggtataa

SEQ ID NO: 3268582 - DNA, 25 bp, Homo sapien
tgacttgaactctgccatcggtata

SEQ ID NO: 3268583 - DNA, 25 bp, Homo sapien
gttgacttgaactctgccatcggta

SEQ ID NO: 3268584 - DNA, 25 bp, Homo sapien
ttgaactctgccatcggtataaaac

SEQ ID NO: 3268585 - DNA, 25 bp, Homo sapien
aataactctctccagtgaaaattag

SEQ ID NO: 3268586 - DNA, 25 bp, Homo sapien
aactctctccagtgaaaattaggcc

SEQ ID NO: 3268587 - DNA, 25 bp, Homo sapien
taactctctccagtgaaaattaggc

SEQ ID NO: 3268588 - DNA, 25 bp, Homo sapien
actctctccagtgaaaattaggcca

SEQ ID NO: 3268589 - DNA, 25 bp, Homo sapien
tatcgacctcattcagctgcgtctg

SEQ ID NO: 3268590 - DNA, 25 bp, Homo sapien
taggtttatcgacctcattcagctg

SEQ ID NO: 3268591 - DNA, 25 bp, Homo sapien
gtttatcgacctcattcagctgcgt

SEQ ID NO: 3268592 - DNA, 25 bp, Homo sapien
catgtaggtttatcgacctcattca

SEQ ID NO: 3268593 - DNA, 25 bp, Homo sapien
tcactgcagagttgctatgacagcg

SEQ ID NO: 3268594 - DNA, 25 bp, Homo sapien
cgtagagtgacgttttctgttgtga

SEQ ID NO: 3268595 - DNA, 25 bp, Homo sapien
actgcagagttgctatgacagcggg

SEQ ID NO: 3268596 - DNA, 25 bp, Homo sapien
tcttttgcagccatttcgtagagtg

SEQ ID NO: 3268597 - DNA, 25 bp, Homo sapien
gtgcgcttccactcccagaggacaa

SEQ ID NO: 3268598 - DNA, 25 bp, Homo sapien
ctatgaaaggaccacgccggatggc

SEQ ID NO: 3268599 - DNA, 25 bp, Homo sapien
gagtcagaaacaccaagcagtaaga

SEQ ID NO: 3268600 - DNA, 25 bp, Homo sapien
aggcagagcatatggaaaatggtag

SEQ ID NO: 3268601 - DNA, 25 bp, Homo sapien
ttacaaaagcgttatcttccttctg

SEQ ID NO: 3268602 - DNA, 25 bp, Homo sapien
tacaaaagcgttatcttccttctgt

SEQ ID NO: 3268603 - DNA, 25 bp, Homo sapien
gactaacatgacttgctaaggattc

SEQ ID NO: 3268604 - DNA, 25 bp, Homo sapien
taacatgacttgctaaggattcatt

SEQ ID NO: 3268605 - DNA, 25 bp, Homo sapien
gagactaacatgacttgctaaggat

SEQ ID NO: 3268606 - DNA, 25 bp, Homo sapien
gaaagagactaacatgacttgctaa

SEQ ID NO: 3268607 - DNA, 25 bp, Homo sapien
ccagtgtctgactgaggctgcaatt

SEQ ID NO: 3268608 - DNA, 25 bp, Homo sapien
ctctgtgccaccctagttgccagtg

SEQ ID NO: 3268609 - DNA, 25 bp, Homo sapien
caccctagttgccagtgtctgactg

SEQ ID NO: 3268610 - DNA, 25 bp, Homo sapien
gactgaggctgcaattgttttcacc

SEQ ID NO: 3268611 - DNA, 25 bp, Homo sapien
tatttctgatcctcaatgcttagcg

SEQ ID NO: 3268612 - DNA, 25 bp, Homo sapien
tgcttgaaaatatatctcccatggt

SEQ ID NO: 3268613 - DNA, 25 bp, Homo sapien
caagattcaagttaagcatacaggt

SEQ ID NO: 3268614 - DNA, 25 bp, Homo sapien
tttaaatgcctcctctggaacagag

SEQ ID NO: 3268615 - DNA, 25 bp, Homo sapien
tgatgcgtgaggagggtttgtgccc

SEQ ID NO: 3268616 - DNA, 25 bp, Homo sapien
actttggaggttgatgcgtgaggag

SEQ ID NO: 3268617 - DNA, 25 bp, Homo sapien
tgcagtgagctttttgtgtgccagt

SEQ ID NO: 3268618 - DNA, 25 bp, Homo sapien
gaagtaagtttcagcgaatgtgact

SEQ ID NO: 3268619 - DNA, 25 bp, Homo sapien
tgatcttaattccatcgggccacag

SEQ ID NO: 3268620 - DNA, 25 bp, Homo sapien
caggcactagcatatctgcagtttc

SEQ ID NO: 3268621 - DNA, 25 bp, Homo sapien
cctgattcctgtgaaaacatgtgac

SEQ ID NO: 3268622 - DNA, 25 bp, Homo sapien
tgccgccacccaaggctgatcttaa

SEQ ID NO: 3268623 - DNA, 25 bp, Homo sapien
cccctttcctcatggcaagacgcat

SEQ ID NO: 3268624 - DNA, 25 bp, Homo sapien
ttccccaggtgttgctgccatcact

SEQ ID NO: 3268625 - DNA, 25 bp, Homo sapien
tcccttccccaggtgttgctgccat

SEQ ID NO: 3268626 - DNA, 25 bp, Homo sapien
tgccatcactacctttcccttcctc

SEQ ID NO: 3268627 - DNA, 25 bp, Homo sapien
cacaggtcttcgcacggttaggtcc

SEQ ID NO: 3268628 - DNA, 25 bp, Homo sapien
ttaggtccctccgtctggaaggcac

SEQ ID NO: 3268629 - DNA, 25 bp, Homo sapien
ttcatgtccacaggtcttcgcacgg

SEQ ID NO: 3268630 - DNA, 25 bp, Homo sapien
cagagggtgcaatctttcatgtcca

SEQ ID NO: 3268631 - DNA, 25 bp, Homo sapien
tctttatgtagagtgcctgaagcgt

SEQ ID NO: 3268632 - DNA, 25 bp, Homo sapien
cctgaagcgtagaataaatatttgc

SEQ ID NO: 3268633 - DNA, 25 bp, Homo sapien
tagagaatacggttgagacagggct

SEQ ID NO: 3268634 - DNA, 25 bp, Homo sapien
taatttggagctatgcatttagaac

SEQ ID NO: 3268635 - DNA, 25 bp, Homo sapien
taggcacgtagggttacatctttct

SEQ ID NO: 3268636 - DNA, 25 bp, Homo sapien
cgtagggttacatctttctggaaag

SEQ ID NO: 3268637 - DNA, 25 bp, Homo sapien
cacgtagggttacatctttctggaa

SEQ ID NO: 3268638 - DNA, 25 bp, Homo sapien
ggcacgtagggttacatctttctgg

SEQ ID NO: 3268639 - DNA, 25 bp, Homo sapien
accgtattgtagttctctggcttgt

SEQ ID NO: 3268640 - DNA, 25 bp, Homo sapien
ttagagcaaggagataaccgtattg

SEQ ID NO: 3268641 - DNA, 25 bp, Homo sapien
tctggcttgtaactgtttccaactg

SEQ ID NO: 3268642 - DNA, 25 bp, Homo sapien
tgtaactgtttccaactgtggagct

SEQ ID NO: 3268643 - DNA, 25 bp, Homo sapien
ccatcacttcacaattaggatttcc

SEQ ID NO: 3268644 - DNA, 25 bp, Homo sapien
ccctcataatgtggttgttcctaaa

SEQ ID NO: 3268645 - DNA, 25 bp, Homo sapien
aatgtggttgttcctaaatgccatc

SEQ ID NO: 3268646 - DNA, 25 bp, Homo sapien
gaatctgcagccctcataatgtggt

SEQ ID NO: 3268647 - DNA, 25 bp, Homo sapien
ctcagtcatcaatggaagactttct

SEQ ID NO: 3268648 - DNA, 25 bp, Homo sapien
actttcttctggaggcaaaataaga

SEQ ID NO: 3268649 - DNA, 25 bp, Homo sapien
tcttctggaggcaaaataagatttt

SEQ ID NO: 3268650 - DNA, 25 bp, Homo sapien
cagtcatcaatggaagactttcttc

SEQ ID NO: 3268651 - DNA, 25 bp, Homo sapien
gtaactgcatccactctttccgttg

SEQ ID NO: 3268652 - DNA, 25 bp, Homo sapien
ctcacatatccagaacgggaagaac

SEQ ID NO: 3268653 - DNA, 25 bp, Homo sapien
gatctcttctactgtccctcacata

SEQ ID NO: 3268654 - DNA, 25 bp, Homo sapien
ttccgttgtatgatctcttctactg

SEQ ID NO: 3268655 - DNA, 25 bp, Homo sapien
tcacctgcctcttgttaggatcaag

SEQ ID NO: 3268656 - DNA, 25 bp, Homo sapien
atcacctgcctcttgttaggatcaa

SEQ ID NO: 3268657 - DNA, 25 bp, Homo sapien
ttctccttgcctactaaatgataac

SEQ ID NO: 3268658 - DNA, 25 bp, Homo sapien
gtttcttttggcctgcaattgattt

SEQ ID NO: 3268659 - DNA, 25 bp, Homo sapien
cttttggcctgcaattgatttctcc

SEQ ID NO: 3268660 - DNA, 25 bp, Homo sapien
actgctgatgacattaatattcagg

SEQ ID NO: 3268661 - DNA, 25 bp, Homo sapien
gatggagctgcagtaatatcggcca

SEQ ID NO: 3268662 - DNA, 25 bp, Homo sapien
atataatctgtaagatatcccagtg

SEQ ID NO: 3268663 - DNA, 25 bp, Homo sapien
tctgtaagatatcccagtgatggag

SEQ ID NO: 3268664 - DNA, 25 bp, Homo sapien
atggagctgcagtaatatcggccac

SEQ ID NO: 3268665 - DNA, 25 bp, Homo sapien
tctgtgtagtgtctgtaatttgcat

SEQ ID NO: 3268666 - DNA, 25 bp, Homo sapien
gaaatgtctgtgtagtgtctgtaat

SEQ ID NO: 3268667 - DNA, 25 bp, Homo sapien
tctgtttcttgatgaaatgtctgtg

SEQ ID NO: 3268668 - DNA, 25 bp, Homo sapien
cttgatgaaatgtctgtgtagtgtc

SEQ ID NO: 3268669 - DNA, 25 bp, Homo sapien
cattcttgaataggtagctggtgcc

SEQ ID NO: 3268670 - DNA, 25 bp, Homo sapien
tggtagtactacaaaggctgccttt

SEQ ID NO: 3268671 - DNA, 25 bp, Homo sapien
tatttttcgaagcacactgattctg

SEQ ID NO: 3268672 - DNA, 25 bp, Homo sapien
catctacatccttgcattaagctgg

SEQ ID NO: 3268673 - DNA, 25 bp, Homo sapien
tgtgaaagataccactagtttcagc

SEQ ID NO: 3268674 - DNA, 25 bp, Homo sapien
gaacatctagatctggtgcttctaa

SEQ ID NO: 3268675 - DNA, 25 bp, Homo sapien
ctcttacagtgagcaagaacatcaa

SEQ ID NO: 3268676 - DNA, 25 bp, Homo sapien
caactttcacagaagagatactgct

SEQ ID NO: 3268677 - DNA, 25 bp, Homo sapien
gagctccctgtatccagctaggttc

SEQ ID NO: 3268678 - DNA, 25 bp, Homo sapien
tgtatccagctaggttcttaaatgc

SEQ ID NO: 3268679 - DNA, 25 bp, Homo sapien
ccagctaggttcttaaatgcttttg

SEQ ID NO: 3268680 - DNA, 25 bp, Homo sapien
gaagagctccctgtatccagctagg

SEQ ID NO: 3268681 - DNA, 25 bp, Homo sapien
ttagctctgagtcgtcgtaacatcc

SEQ ID NO: 3268682 - DNA, 25 bp, Homo sapien
cgtcgtaacatccaggagagcaatt

SEQ ID NO: 3268683 - DNA, 25 bp, Homo sapien
caggagagcaattcttcggtgaggt

SEQ ID NO: 3268684 - DNA, 25 bp, Homo sapien
caattcttcggtgaggtggaatgag

SEQ ID NO: 3268685 - DNA, 25 bp, Homo sapien
ttgctttgctgaaataagccaagtc

SEQ ID NO: 3268686 - DNA, 25 bp, Homo sapien
tttgctgaaataagccaagtctccc

SEQ ID NO: 3268687 - DNA, 25 bp, Homo sapien
cttcatttgctttgctgaaataagc

SEQ ID NO: 3268688 - DNA, 25 bp, Homo sapien
ataagccaagtctccctggtgcctc

SEQ ID NO: 3268689 - DNA, 25 bp, Homo sapien
ttgctgtaagcagtagtcaaaaggt

SEQ ID NO: 3268690 - DNA, 25 bp, Homo sapien
taaggggtatcaataacagcactgt

SEQ ID NO: 3268691 - DNA, 25 bp, Homo sapien
cctcttgctgtaagcagtagtcaaa

SEQ ID NO: 3268692 - DNA, 25 bp, Homo sapien
agtagtcaaaaggtaaattctgttg

SEQ ID NO: 3268693 - DNA, 25 bp, Homo sapien
gtccatttcttgaggcagtagaata

SEQ ID NO: 3268694 - DNA, 25 bp, Homo sapien
tcttgaggcagtagaataccataca

SEQ ID NO: 3268695 - DNA, 25 bp, Homo sapien
cagtagaataccatacagagctagg

SEQ ID NO: 3268696 - DNA, 25 bp, Homo sapien
cagagctaggattttcttgaacaac

SEQ ID NO: 3268697 - DNA, 25 bp, Homo sapien
ctctgcaggcccttggaggaaatct

SEQ ID NO: 3268698 - DNA, 25 bp, Homo sapien
ctgctctctgcaggcccttggagga

SEQ ID NO: 3268699 - DNA, 25 bp, Homo sapien
caggcccttggaggaaatctagttt

SEQ ID NO: 3268700 - DNA, 25 bp, Homo sapien
tgcaggcccttggaggaaatctagt

SEQ ID NO: 3268701 - DNA, 25 bp, Homo sapien
ttagtgccagctcaaacaagaagta

SEQ ID NO: 3268702 - DNA, 25 bp, Homo sapien
tatgagcgtattgatcaattagtgc

SEQ ID NO: 3268703 - DNA, 25 bp, Homo sapien
tgcctggttagctgctgcttgaaca

SEQ ID NO: 3268704 - DNA, 25 bp, Homo sapien
tgcttgaacagctgaagtatgagcg

SEQ ID NO: 3268705 - DNA, 25 bp, Homo sapien
ctgagcacccttacagctgtaattc

SEQ ID NO: 3268706 - DNA, 25 bp, Homo sapien
gtcgctgtaaagataaagagatgtt

SEQ ID NO: 3268707 - DNA, 25 bp, Homo sapien
gctgatacatcctttgcacattgtc

SEQ ID NO: 3268708 - DNA, 25 bp, Homo sapien
ggctgatacatcctttgcacattgt

SEQ ID NO: 3268709 - DNA, 25 bp, Homo sapien
tcacaggtcgctgtaaagataaaga

SEQ ID NO: 3268710 - DNA, 25 bp, Homo sapien
tattctcagtatacacacagtcttg

SEQ ID NO: 3268711 - DNA, 25 bp, Homo sapien
caggtcaagagcatcaacttcaatt

SEQ ID NO: 3268712 - DNA, 25 bp, Homo sapien
tagagtccctctaaaggtacagtcc

SEQ ID NO: 3268713 - DNA, 25 bp, Homo sapien
tcgagtgtcatctggctggtcaaaa

SEQ ID NO: 3268714 - DNA, 25 bp, Homo sapien
gaaagcagagtttttccagtgcaat

SEQ ID NO: 3268715 - DNA, 25 bp, Homo sapien
gaggataacctaacacggctgaaaa

SEQ ID NO: 3268716 - DNA, 25 bp, Homo sapien
gaatccaggctatgcttgctgctct

SEQ ID NO: 3268717 - DNA, 25 bp, Homo sapien
caaggtgacaccctagttgacttta

SEQ ID NO: 3268718 - DNA, 25 bp, Homo sapien
tcttctcttttttgcctaggatttg

SEQ ID NO: 3268719 - DNA, 25 bp, Homo sapien
ctctcatcatggatctgtctctcca

SEQ ID NO: 3268720 - DNA, 25 bp, Homo sapien
tctcatcatggatctgtctctccat

SEQ ID NO: 3268721 - DNA, 25 bp, Homo sapien
ctagacctctcatcatggatctgtc

SEQ ID NO: 3268722 - DNA, 25 bp, Homo sapien
gacctctcatcatggatctgtctct

SEQ ID NO: 3268723 - DNA, 25 bp, Homo sapien
tgttagcaccttacagatctgcatc

SEQ ID NO: 3268724 - DNA, 25 bp, Homo sapien
tgagtgttagcaccttacagatctg

SEQ ID NO: 3268725 - DNA, 25 bp, Homo sapien
tgtagttgagtgttagcaccttaca

SEQ ID NO: 3268726 - DNA, 25 bp, Homo sapien
tagttgagtgttagcaccttacaga

SEQ ID NO: 3268727 - DNA, 25 bp, Homo sapien
tgtgcagccaatcctccaaacttca

SEQ ID NO: 3268728 - DNA, 25 bp, Homo sapien
aatgtgcagccaatcctccaaactt

SEQ ID NO: 3268729 - DNA, 25 bp, Homo sapien
ttttcttcagtccttgatcctggac

SEQ ID NO: 3268730 - DNA, 25 bp, Homo sapien
tttcttcagtccttgatcctggact

SEQ ID NO: 3268731 - DNA, 25 bp, Homo sapien
tctcattgtagttggacaaacgtgc

SEQ ID NO: 3268732 - DNA, 25 bp, Homo sapien
ccgatgtttaagatctggtttcaga

SEQ ID NO: 3268733 - DNA, 25 bp, Homo sapien
caaacgtgcttctgtatgatattca

SEQ ID NO: 3268734 - DNA, 25 bp, Homo sapien
aaggcatatcttcgttgttaaagga

SEQ ID NO: 3268735 - DNA, 25 bp, Homo sapien
ttagccacgttatcacatatcctgc

SEQ ID NO: 3268736 - DNA, 25 bp, Homo sapien
catcagcattctggacttagccacg

SEQ ID NO: 3268737 - DNA, 25 bp, Homo sapien
ttattgcacaatatggagaacttcc

SEQ ID NO: 3268738 - DNA, 25 bp, Homo sapien
tcacagtctacttggatcacaacca

SEQ ID NO: 3268739 - DNA, 25 bp, Homo sapien
tcaaacatgcaactgggctatgcca

SEQ ID NO: 3268740 - DNA, 25 bp, Homo sapien
catgaatttggcagatgttgtgacc

SEQ ID NO: 3268741 - DNA, 25 bp, Homo sapien
gctgcacccgtgagaacaattccag

SEQ ID NO: 3268742 - DNA, 25 bp, Homo sapien
cctttacaatgtgagtgttgcagct

SEQ ID NO: 3268743 - DNA, 25 bp, Homo sapien
caacactagtaaaccaggataatgg

SEQ ID NO: 3268744 - DNA, 25 bp, Homo sapien
caggagcaatgggtccattgggtaa

SEQ ID NO: 3268745 - DNA, 25 bp, Homo sapien
ttgggtaagtgggacaacactagta

SEQ ID NO: 3268746 - DNA, 25 bp, Homo sapien
taagtgggacaacactagtaaacca

SEQ ID NO: 3268747 - DNA, 25 bp, Homo sapien
ttacatttcttgggctccacatagg

SEQ ID NO: 3268748 - DNA, 25 bp, Homo sapien
tacatttcttgggctccacataggt

SEQ ID NO: 3268749 - DNA, 25 bp, Homo sapien
ggaagctgtgtaattgggaccagac

SEQ ID NO: 3268750 - DNA, 25 bp, Homo sapien
agggtagaagaatgggtcacacagt

SEQ ID NO: 3268751 - DNA, 25 bp, Homo sapien
ctggggcatgtatgagcagatagct

SEQ ID NO: 3268752 - DNA, 25 bp, Homo sapien
cacacagtgggaacattatatgcaa

SEQ ID NO: 3268753 - DNA, 25 bp, Homo sapien
cacaggtccagaagttttatcatat

SEQ ID NO: 3268754 - DNA, 25 bp, Homo sapien
acaggtccagaagttttatcatatt

SEQ ID NO: 3268755 - DNA, 25 bp, Homo sapien
caggtccagaagttttatcatattt

SEQ ID NO: 3268756 - DNA, 25 bp, Homo sapien
ctcaaggtattccatgatcaccaac

SEQ ID NO: 3268757 - DNA, 25 bp, Homo sapien
tcagctagttctctgtctccacaca

SEQ ID NO: 3268758 - DNA, 25 bp, Homo sapien
cgcttggtttaatgtaaaggaagag

SEQ ID NO: 3268759 - DNA, 25 bp, Homo sapien
aatgcctgatctcgcttggtttaat

SEQ ID NO: 3268760 - DNA, 25 bp, Homo sapien
tatggattaaaagatagcccactct

SEQ ID NO: 3268761 - DNA, 25 bp, Homo sapien
gattaaaagatagcccactctgagt

SEQ ID NO: 3268762 - DNA, 25 bp, Homo sapien
gtgattctcaccacatcccgttcaa

SEQ ID NO: 3268763 - DNA, 25 bp, Homo sapien
gagccgcttcttcctataaaaatag

SEQ ID NO: 3268764 - DNA, 25 bp, Homo sapien
aaatggaagccatttgagccgcttc

SEQ ID NO: 3268765 - DNA, 25 bp, Homo sapien
catcaaggatttgaaagacgcaggg

SEQ ID NO: 3268766 - DNA, 25 bp, Homo sapien
tcttgtgagttctgagaatgctgtc

SEQ ID NO: 3268767 - DNA, 25 bp, Homo sapien
gcttgttgctaactgctggtactcc

SEQ ID NO: 3268768 - DNA, 25 bp, Homo sapien
agtatgcttggctgatactcgcccc

SEQ ID NO: 3268769 - DNA, 25 bp, Homo sapien
tttacatgcttggtcttgtgagttc

SEQ ID NO: 3268770 - DNA, 25 bp, Homo sapien
gctcatgacctcttgagaaactggg

SEQ ID NO: 3268771 - DNA, 25 bp, Homo sapien
tgcaaatcaacctccagaccagtag

SEQ ID NO: 3268772 - DNA, 25 bp, Homo sapien
tcataaatagccttagtgtggtggc

SEQ ID NO: 3268773 - DNA, 25 bp, Homo sapien
gcttctgggtgcattcagtggcaaa

SEQ ID NO: 3268774 - DNA, 25 bp, Homo sapien
ccataagcacagcccggaagtcgta

SEQ ID NO: 3268775 - DNA, 25 bp, Homo sapien
cacagcccggaagtcgtagcaggga

SEQ ID NO: 3268776 - DNA, 25 bp, Homo sapien
taagcctctcaggtttaggtcgtca

SEQ ID NO: 3268777 - DNA, 25 bp, Homo sapien
ttaagcctctcaggtttaggtcgtc

SEQ ID NO: 3268778 - DNA, 25 bp, Homo sapien
aaggtacagtaagaatgtggcattc

SEQ ID NO: 3268779 - DNA, 25 bp, Homo sapien
cacaccaagactgtaagttatagcc

SEQ ID NO: 3268780 - DNA, 25 bp, Homo sapien
caaaatgtggttatgcaatctatgg

SEQ ID NO: 3268781 - DNA, 25 bp, Homo sapien
gtcacattatgacagagacacattc

SEQ ID NO: 3268782 - DNA, 25 bp, Homo sapien
ccttgatggcaatgtaatgtcgtag

SEQ ID NO: 3268783 - DNA, 25 bp, Homo sapien
tgtcgtagaagtaaaggagtgtaac

SEQ ID NO: 3268784 - DNA, 25 bp, Homo sapien
aataaagatgaatttgatatgagcc

SEQ ID NO: 3268785 - DNA, 25 bp, Homo sapien
gaactagggactactttaagcaaga

SEQ ID NO: 3268786 - DNA, 25 bp, Homo sapien
ggaacagcctcagagctcaagagta

SEQ ID NO: 3268787 - DNA, 25 bp, Homo sapien
cagaggtgatgcttgtttgtgccat

SEQ ID NO: 3268788 - DNA, 25 bp, Homo sapien
tctggtgtcctctggcactaggaac

SEQ ID NO: 3268789 - DNA, 25 bp, Homo sapien
gggctgaactgttgcctaggaagaa

SEQ ID NO: 3268790 - DNA, 25 bp, Homo sapien
aatgattcatccataagatgctgcc

SEQ ID NO: 3268791 - DNA, 25 bp, Homo sapien
cctgaaatgattcatccataagatg

SEQ ID NO: 3268792 - DNA, 25 bp, Homo sapien
gaaatgattcatccataagatgctg

SEQ ID NO: 3268793 - DNA, 25 bp, Homo sapien
atgattcatccataagatgctgcca

SEQ ID NO: 3268794 - DNA, 25 bp, Homo sapien
cagcactgaccatgactagggtaga

SEQ ID NO: 3268795 - DNA, 25 bp, Homo sapien
tatagagtaagatataacaggatgg

SEQ ID NO: 3268796 - DNA, 25 bp, Homo sapien
gtagatgaaggaatgtcgctggaca

SEQ ID NO: 3268797 - DNA, 25 bp, Homo sapien
taggtcctcaagacttcagcactga

SEQ ID NO: 3268798 - DNA, 25 bp, Homo sapien
tcttggtactctaatctagctctat

SEQ ID NO: 3268799 - DNA, 25 bp, Homo sapien
tacatcttggtactctaatctagct

SEQ ID NO: 3268800 - DNA, 25 bp, Homo sapien
catcttggtactctaatctagctct

SEQ ID NO: 3268801 - DNA, 25 bp, Homo sapien
gatgtacatcttggtactctaatct

SEQ ID NO: 3268802 - DNA, 25 bp, Homo sapien
cttcaaacaagtggaagtcaggccc

SEQ ID NO: 3268803 - DNA, 25 bp, Homo sapien
aagcttcaaacaagtggaagtcagg

SEQ ID NO: 3268804 - DNA, 25 bp, Homo sapien
gcttcaaacaagtggaagtcaggcc

SEQ ID NO: 3268805 - DNA, 25 bp, Homo sapien
ttcaaacaagtggaagtcaggccct

SEQ ID NO: 3268806 - DNA, 25 bp, Homo sapien
gaggactctatctggacctgtaggc

SEQ ID NO: 3268807 - DNA, 25 bp, Homo sapien
aatcttgcttatctccagttcactg

SEQ ID NO: 3268808 - DNA, 25 bp, Homo sapien
tttagccgcccattagacacagtat

SEQ ID NO: 3268809 - DNA, 25 bp, Homo sapien
aacattcctgaagcattttagccgc

SEQ ID NO: 3268810 - DNA, 25 bp, Homo sapien
cggtaatcactaagctgttctccat

SEQ ID NO: 3268811 - DNA, 25 bp, Homo sapien
tgtaataaaaagactgggactgctg

SEQ ID NO: 3268812 - DNA, 25 bp, Homo sapien
taaaggattgaatcggtgacccgaa

SEQ ID NO: 3268813 - DNA, 25 bp, Homo sapien
tgacccgaaggttaaattccacagc

SEQ ID NO: 3268814 - DNA, 25 bp, Homo sapien
tgttctgtgacccagagacttgaca

SEQ ID NO: 3268815 - DNA, 25 bp, Homo sapien
cactgatgtgctgagtgattcacct

SEQ ID NO: 3268816 - DNA, 25 bp, Homo sapien
actgatgtgctgagtgattcacctt

SEQ ID NO: 3268817 - DNA, 25 bp, Homo sapien
gattcaccttgaagggccattttat

SEQ ID NO: 3268818 - DNA, 25 bp, Homo sapien
tttcttccaaagttgacacaccaga

SEQ ID NO: 3268819 - DNA, 25 bp, Homo sapien
agtggatgaaccaagattccctttc

SEQ ID NO: 3268820 - DNA, 25 bp, Homo sapien
agtcacaagtgttctcttgcacaag

SEQ ID NO: 3268821 - DNA, 25 bp, Homo sapien
aaaatgctagggaagtggatgaacc

SEQ ID NO: 3268822 - DNA, 25 bp, Homo sapien
ctttggattgtgacaatcatcagtg

SEQ ID NO: 3268823 - DNA, 25 bp, Homo sapien
cagtgtcacagataggagaatttga

SEQ ID NO: 3268824 - DNA, 25 bp, Homo sapien
gacctttggattgtgacaatcatca

SEQ ID NO: 3268825 - DNA, 25 bp, Homo sapien
tggacctttggattgtgacaatcat

SEQ ID NO: 3268826 - DNA, 25 bp, Homo sapien
tggtttccaagagataatcaagcat

SEQ ID NO: 3268827 - DNA, 25 bp, Homo sapien
ctggtttccaagagataatcaagca

SEQ ID NO: 3268828 - DNA, 25 bp, Homo sapien
tcttcttgcctttctacatctaagc

SEQ ID NO: 3268829 - DNA, 25 bp, Homo sapien
ctaagctgttaaaatgtaagataac

SEQ ID NO: 3268830 - DNA, 25 bp, Homo sapien
agctgttaaaatgtaagataaccat

SEQ ID NO: 3268831 - DNA, 25 bp, Homo sapien
ttcttgcctttctacatctaagctg

SEQ ID NO: 3268832 - DNA, 25 bp, Homo sapien
ccaccgtatctgatttataggtaaa

SEQ ID NO: 3268833 - DNA, 25 bp, Homo sapien
tgtttaatttgtggctactcagggt

SEQ ID NO: 3268834 - DNA, 25 bp, Homo sapien
tactcagggtacataagccatgctg

SEQ ID NO: 3268835 - DNA, 25 bp, Homo sapien
cctggataagaatcacggtgtagct

SEQ ID NO: 3268836 - DNA, 25 bp, Homo sapien
tcagatgtactatctacccacaaag

SEQ ID NO: 3268837 - DNA, 25 bp, Homo sapien
tattttccatttgaccctcaccatt

SEQ ID NO: 3268838 - DNA, 25 bp, Homo sapien
ctgatttgtcagatgtactatctac

SEQ ID NO: 3268839 - DNA, 25 bp, Homo sapien
ttttccatttgaccctcaccattgc

SEQ ID NO: 3268840 - DNA, 25 bp, Homo sapien
cttttcatgagcgtctttctctgaa

SEQ ID NO: 3268841 - DNA, 25 bp, Homo sapien
ttcatgagcgtctttctctgaagag

SEQ ID NO: 3268842 - DNA, 25 bp, Homo sapien
ctaacttttcatgagcgtctttctc

SEQ ID NO: 3268843 - DNA, 25 bp, Homo sapien
tttcatgagcgtctttctctgaaga

SEQ ID NO: 3268844 - DNA, 25 bp, Homo sapien
aggaagttctctctgagcaactccc

SEQ ID NO: 3268845 - DNA, 25 bp, Homo sapien
gaagttctctctgagcaactcccaa

SEQ ID NO: 3268846 - DNA, 25 bp, Homo sapien
gttctctctgagcaactcccaacat

SEQ ID NO: 3268847 - DNA, 25 bp, Homo sapien
aagttctctctgagcaactcccaac

SEQ ID NO: 3268848 - DNA, 25 bp, Homo sapien
catgaattagtgagagcaagaagtg

SEQ ID NO: 3268849 - DNA, 25 bp, Homo sapien
tggacatttgcggacctctgcagaa

SEQ ID NO: 3268850 - DNA, 25 bp, Homo sapien
gatatcctgtaagtggctgaacaac

SEQ ID NO: 3268851 - DNA, 25 bp, Homo sapien
ggaccttttcaccatatgccaaaga

SEQ ID NO: 3268852 - DNA, 25 bp, Homo sapien
gcaacaattggccattatttcaaca

SEQ ID NO: 3268853 - DNA, 25 bp, Homo sapien
caacatactcccctaaaggttctga

SEQ ID NO: 3268854 - DNA, 25 bp, Homo sapien
ggttctgagactttagtaagaataa

SEQ ID NO: 3268855 - DNA, 25 bp, Homo sapien
tacattaaggcaatttgatagctca

SEQ ID NO: 3268856 - DNA, 25 bp, Homo sapien
ttcatatccttgttgccatactgct

SEQ ID NO: 3268857 - DNA, 25 bp, Homo sapien
tcaaacaatatttagcgcttttgtg

SEQ ID NO: 3268858 - DNA, 25 bp, Homo sapien
caatatttagcgcttttgtgtcaag

SEQ ID NO: 3268859 - DNA, 25 bp, Homo sapien
acaatatttagcgcttttgtgtcaa

SEQ ID NO: 3268860 - DNA, 25 bp, Homo sapien
atatttagcgcttttgtgtcaagga

SEQ ID NO: 3268861 - DNA, 25 bp, Homo sapien
aaagcagcctcaaatatcctaacaa

SEQ ID NO: 3268862 - DNA, 25 bp, Homo sapien
ttaatcaaaagcagcctcaaatatc

SEQ ID NO: 3268863 - DNA, 25 bp, Homo sapien
gcagcctcaaatatcctaacaatta

SEQ ID NO: 3268864 - DNA, 25 bp, Homo sapien
cagcctcaaatatcctaacaattat

SEQ ID NO: 3268865 - DNA, 25 bp, Homo sapien
ttatttttgctgagttgtctggctt

SEQ ID NO: 3268866 - DNA, 25 bp, Homo sapien
atttttgctgagttgtctggcttta

SEQ ID NO: 3268867 - DNA, 25 bp, Homo sapien
gttgtttaaggctctctccagataa

SEQ ID NO: 3268868 - DNA, 25 bp, Homo sapien
tcacttagatgtgtgcctctctctc

SEQ ID NO: 3268869 - DNA, 25 bp, Homo sapien
ccagataatcacttagatgtgtgcc

SEQ ID NO: 3268870 - DNA, 25 bp, Homo sapien
ggctctctccagataatcacttaga

SEQ ID NO: 3268871 - DNA, 25 bp, Homo sapien
ccaaaagcaagtttcaagtactgca

SEQ ID NO: 3268872 - DNA, 25 bp, Homo sapien
tgaggaataaaacgctgaagtttcc

SEQ ID NO: 3268873 - DNA, 25 bp, Homo sapien
tccttgtaggaagagagattttgag

SEQ ID NO: 3268874 - DNA, 25 bp, Homo sapien
tgaggaagcactgttgccgtagaac

SEQ ID NO: 3268875 - DNA, 25 bp, Homo sapien
tctggacaacatcaaggaggtctgc

SEQ ID NO: 3268876 - DNA, 25 bp, Homo sapien
ttctggacaacatcaaggaggtctg

SEQ ID NO: 3268877 - DNA, 25 bp, Homo sapien
taacttgtccatgtatttcacggcc

SEQ ID NO: 3268878 - DNA, 25 bp, Homo sapien
cagaaggaactaacttgtccatgta

SEQ ID NO: 3268879 - DNA, 25 bp, Homo sapien
ccatgtatttcacggccccagtttt

SEQ ID NO: 3268880 - DNA, 25 bp, Homo sapien
tctacctgacagaaggaactaactt

SEQ ID NO: 3268881 - DNA, 25 bp, Homo sapien
tcttgatggtacaagtttggttgtc

SEQ ID NO: 3268882 - DNA, 25 bp, Homo sapien
agaacttttatagcccacttcttga

SEQ ID NO: 3268883 - DNA, 25 bp, Homo sapien
ggaagtattgtgcagctcctctggg

SEQ ID NO: 3268884 - DNA, 25 bp, Homo sapien
taaatccaaagcaatatgtgggaag

SEQ ID NO: 3268885 - DNA, 25 bp, Homo sapien
gagtgaacttcaactcaagaatcca

SEQ ID NO: 3268886 - DNA, 25 bp, Homo sapien
tagaaatttatcacctatcggagtg

SEQ ID NO: 3268887 - DNA, 25 bp, Homo sapien
gcacagtcagacttgttaaatgagt

SEQ ID NO: 3268888 - DNA, 25 bp, Homo sapien
taaactcagagaaagataactcggg

SEQ ID NO: 3268889 - DNA, 25 bp, Homo sapien
tacagagttttacatgagcataggt

SEQ ID NO: 3268890 - DNA, 25 bp, Homo sapien
catttaacattctagcagcaaagtc

SEQ ID NO: 3268891 - DNA, 25 bp, Homo sapien
gagactcacataaacataacactgg

SEQ ID NO: 3268892 - DNA, 25 bp, Homo sapien
tctttctggcgtttaatgttgtcac

SEQ ID NO: 3268893 - DNA, 25 bp, Homo sapien
cttctatgttgaattgctctagtac

SEQ ID NO: 3268894 - DNA, 25 bp, Homo sapien
atttctcaaaacacatatcctccct

SEQ ID NO: 3268895 - DNA, 25 bp, Homo sapien
tgttgaattgctctagtaccatttc

SEQ ID NO: 3268896 - DNA, 25 bp, Homo sapien
tgggaatgaatgtccatatgcccat

SEQ ID NO: 3268897 - DNA, 25 bp, Homo sapien
ttttggtatagtagaaattgaatag

SEQ ID NO: 3268898 - DNA, 25 bp, Homo sapien
gaggaggagtctaattttggtatag

SEQ ID NO: 3268899 - DNA, 25 bp, Homo sapien
ggagtctaattttggtatagtagaa

SEQ ID NO: 3268900 - DNA, 25 bp, Homo sapien
gaggagtctaattttggtatagtag

SEQ ID NO: 3268901 - DNA, 25 bp, Homo sapien
gagaaattatttgttcgtatatcca

SEQ ID NO: 3268902 - DNA, 25 bp, Homo sapien
ttatttgttcgtatatccatgtcgg

SEQ ID NO: 3268903 - DNA, 25 bp, Homo sapien
gttcgtatatccatgtcggaaaagg

SEQ ID NO: 3268904 - DNA, 25 bp, Homo sapien
tatccatgtcggaaaaggtaaactc

SEQ ID NO: 3268905 - DNA, 25 bp, Homo sapien
tggcaaagatggcagactagaagca

SEQ ID NO: 3268906 - DNA, 25 bp, Homo sapien
tagaagcagcaggaatcggaggctc

SEQ ID NO: 3268907 - DNA, 25 bp, Homo sapien
aagcagcaggaatcggaggctccca

SEQ ID NO: 3268908 - DNA, 25 bp, Homo sapien
gtgtggcaaagatggcagactagaa

SEQ ID NO: 3268909 - DNA, 25 bp, Homo sapien
gctgaatgaccaaggctttttggtg

SEQ ID NO: 3268910 - DNA, 25 bp, Homo sapien
gaatgaccaaggctttttggtgtga

SEQ ID NO: 3268911 - DNA, 25 bp, Homo sapien
aaacacctctaaagactgtgacaga

SEQ ID NO: 3268912 - DNA, 25 bp, Homo sapien
gtgatcctgagggagagttagacaa

SEQ ID NO: 3268913 - DNA, 25 bp, Homo sapien
cagaaatggctgacaacaaaaggct

SEQ ID NO: 3268914 - DNA, 25 bp, Homo sapien
tggctgacaacaaaaggcttgcatt

SEQ ID NO: 3268915 - DNA, 25 bp, Homo sapien
tccttgatccattaaccaagcattg

SEQ ID NO: 3268916 - DNA, 25 bp, Homo sapien
gatccattaaccaagcattgctatt

SEQ ID NO: 3268917 - DNA, 25 bp, Homo sapien
attagagacatcagtatgctcatca

SEQ ID NO: 3268918 - DNA, 25 bp, Homo sapien
tatattagagacatcagtatgctca

SEQ ID NO: 3268919 - DNA, 25 bp, Homo sapien
aatatattagagacatcagtatgct

SEQ ID NO: 3268920 - DNA, 25 bp, Homo sapien
tattagagacatcagtatgctcatc

SEQ ID NO: 3268921 - DNA, 25 bp, Homo sapien
cagcaggagccttgagcggctgaat

SEQ ID NO: 3268922 - DNA, 25 bp, Homo sapien
ccagcaggagccttgagcggctgaa

SEQ ID NO: 3268923 - DNA, 25 bp, Homo sapien
ttctatatagtccaccacttgtctc

SEQ ID NO: 3268924 - DNA, 25 bp, Homo sapien
ccttggaatctgtgtgacattccaa

SEQ ID NO: 3268925 - DNA, 25 bp, Homo sapien
tccttggaatctgtgtgacattcca

SEQ ID NO: 3268926 - DNA, 25 bp, Homo sapien
ctcaaattctatatagtccaccact

SEQ ID NO: 3268927 - DNA, 25 bp, Homo sapien
tgtaccctggtttgtcaccagggcc

SEQ ID NO: 3268928 - DNA, 25 bp, Homo sapien
tctttgatgcctcgaggtctcaccc

SEQ ID NO: 3268929 - DNA, 25 bp, Homo sapien
ggcctcaggatctttgatgcctcga

SEQ ID NO: 3268930 - DNA, 25 bp, Homo sapien
tcaggatctttgatgcctcgaggtc

SEQ ID NO: 3268931 - DNA, 25 bp, Homo sapien
tttcttcctcttaagttgtgtctgc

SEQ ID NO: 3268932 - DNA, 25 bp, Homo sapien
ctttcttcctcttaagttgtgtctg

SEQ ID NO: 3268933 - DNA, 25 bp, Homo sapien
tcctcttaagttgtgtctgcttttg

SEQ ID NO: 3268934 - DNA, 25 bp, Homo sapien
tcttcctcttaagttgtgtctgctt

SEQ ID NO: 3268935 - DNA, 25 bp, Homo sapien
catgtcccgtaacagtgacatctct

SEQ ID NO: 3268936 - DNA, 25 bp, Homo sapien
cacatgtcccgtaacagtgacatct

SEQ ID NO: 3268937 - DNA, 25 bp, Homo sapien
ggcagggaactgaaagcaattgcca

SEQ ID NO: 3268938 - DNA, 25 bp, Homo sapien
tcacatgtcccgtaacagtgacatc

SEQ ID NO: 3268939 - DNA, 25 bp, Homo sapien
tcttgctcaacaccagtatcaattg

SEQ ID NO: 3268940 - DNA, 25 bp, Homo sapien
tatcaattgtagcaaaagccttcag

SEQ ID NO: 3268941 - DNA, 25 bp, Homo sapien
tggcttcactgattgtggactgtag

SEQ ID NO: 3268942 - DNA, 25 bp, Homo sapien
aagaggtgggctctcggtatcttgc

SEQ ID NO: 3268943 - DNA, 25 bp, Homo sapien
tccagcagagtccacaagtatatga

SEQ ID NO: 3268944 - DNA, 25 bp, Homo sapien
cctgaagacattggtaattgattac

SEQ ID NO: 3268945 - DNA, 25 bp, Homo sapien
ctttcttggtgtatcggtgaagact

SEQ ID NO: 3268946 - DNA, 25 bp, Homo sapien
tctcatctttcttggtgtatcggtg

SEQ ID NO: 3268947 - DNA, 25 bp, Homo sapien
catggtgatggtaagtgtggagtgg

SEQ ID NO: 3268948 - DNA, 25 bp, Homo sapien
ttcccatggtgatggtaagtgtgga

SEQ ID NO: 3268949 - DNA, 25 bp, Homo sapien
tgcttcttgtcggtggcccccactt

SEQ ID NO: 3268950 - DNA, 25 bp, Homo sapien
gctgcttcttgtcggtggcccccac

SEQ ID NO: 3268951 - DNA, 25 bp, Homo sapien
ggtggttgtcctcagtacattaata

SEQ ID NO: 3268952 - DNA, 25 bp, Homo sapien
agtcactagtgtgacaatgatttgc

SEQ ID NO: 3268953 - DNA, 25 bp, Homo sapien
attatcacagggtgtggtagaagtc

SEQ ID NO: 3268954 - DNA, 25 bp, Homo sapien
caatgatttgcatatctttgcttag

SEQ ID NO: 3268955 - DNA, 25 bp, Homo sapien
tttcctctgcatttactacgttgag

SEQ ID NO: 3268956 - DNA, 25 bp, Homo sapien
gagtctttcgattgtactctgccat

SEQ ID NO: 3268957 - DNA, 25 bp, Homo sapien
cctggtcgcttaagaggttaaaatg

SEQ ID NO: 3268958 - DNA, 25 bp, Homo sapien
atgttgtaaacgtttcctcaggtct

SEQ ID NO: 3268959 - DNA, 25 bp, Homo sapien
ccttcattgaaatctgtagcttgaa

SEQ ID NO: 3268960 - DNA, 25 bp, Homo sapien
aacacatctggctacataccctcct

SEQ ID NO: 3268961 - DNA, 25 bp, Homo sapien
cttggttggttacttcaataacaca

SEQ ID NO: 3268962 - DNA, 25 bp, Homo sapien
tctgtagcttgaaattcatagtctt

SEQ ID NO: 3268963 - DNA, 25 bp, Homo sapien
aaacactagccctgcatttgacctt

SEQ ID NO: 3268964 - DNA, 25 bp, Homo sapien
gggaagccaaacactagccctgcat

SEQ ID NO: 3268965 - DNA, 25 bp, Homo sapien
tcagttgtgagttgctttatctgct

SEQ ID NO: 3268966 - DNA, 25 bp, Homo sapien
agccaaacactagccctgcatttga

SEQ ID NO: 3268967 - DNA, 25 bp, Homo sapien
gaagatgtggagggaccagagtacc

SEQ ID NO: 3268968 - DNA, 25 bp, Homo sapien
atgtggagggaccagagtaccctga

SEQ ID NO: 3268969 - DNA, 25 bp, Homo sapien
agatgtggagggaccagagtaccct

SEQ ID NO: 3268970 - DNA, 25 bp, Homo sapien
aagatgtggagggaccagagtaccc

SEQ ID NO: 3268971 - DNA, 25 bp, Homo sapien
taagaatggagaacagtctcatctt

SEQ ID NO: 3268972 - DNA, 25 bp, Homo sapien
atggagaacagtctcatctttgaat

SEQ ID NO: 3268973 - DNA, 25 bp, Homo sapien
gagaacagtctcatctttgaatcct

SEQ ID NO: 3268974 - DNA, 25 bp, Homo sapien
ttaagaatggagaacagtctcatct

SEQ ID NO: 3268975 - DNA, 25 bp, Homo sapien
tgcctaatatgtgatgaattgactt

SEQ ID NO: 3268976 - DNA, 25 bp, Homo sapien
ttgcctaatatgtgatgaattgact

SEQ ID NO: 3268977 - DNA, 25 bp, Homo sapien
ttccttcaccgttcagtgcattttc

SEQ ID NO: 3268978 - DNA, 25 bp, Homo sapien
tggccttccttcaccgttcagtgca

SEQ ID NO: 3268979 - DNA, 25 bp, Homo sapien
ccttccttcaccgttcagtgcattt

SEQ ID NO: 3268980 - DNA, 25 bp, Homo sapien
gcattttcattaacactcaccacac

SEQ ID NO: 3268981 - DNA, 25 bp, Homo sapien
tccttgtggatttgtacgttattta

SEQ ID NO: 3268982 - DNA, 25 bp, Homo sapien
tattcgattattgctttctctctca

SEQ ID NO: 3268983 - DNA, 25 bp, Homo sapien
tcttcctcaaaggtattgattcctc

SEQ ID NO: 3268984 - DNA, 25 bp, Homo sapien
tgtccttgtggatttgtacgttatt

SEQ ID NO: 3268985 - DNA, 25 bp, Homo sapien
cttctctacattgactgacttgcct

SEQ ID NO: 3268986 - DNA, 25 bp, Homo sapien
ttctctacattgactgacttgcctt

SEQ ID NO: 3268987 - DNA, 25 bp, Homo sapien
tgtctctgttattcaatccactaga

SEQ ID NO: 3268988 - DNA, 25 bp, Homo sapien
tccagatattgtctcttgtctctgt

SEQ ID NO: 3268989 - DNA, 25 bp, Homo sapien
gtatgtgaacactttctgttccaga

SEQ ID NO: 3268990 - DNA, 25 bp, Homo sapien
tccaaagcattatagttagcttcgt

SEQ ID NO: 3268991 - DNA, 25 bp, Homo sapien
gctgaattaactgctgtaccttcgg

SEQ ID NO: 3268992 - DNA, 25 bp, Homo sapien
tgaattaactgctgtaccttcggtg

SEQ ID NO: 3268993 - DNA, 25 bp, Homo sapien
agctgaattaactgctgtaccttcg

SEQ ID NO: 3268994 - DNA, 25 bp, Homo sapien
aattaactgctgtaccttcggtgac

SEQ ID NO: 3268995 - DNA, 25 bp, Homo sapien
aatacgtgctatccagagtttctgc

SEQ ID NO: 3268996 - DNA, 25 bp, Homo sapien
gatgctaatacgtgctatccagagt

SEQ ID NO: 3268997 - DNA, 25 bp, Homo sapien
cttgtagaagatgctaatacgtgct

SEQ ID NO: 3268998 - DNA, 25 bp, Homo sapien
tagaagatgctaatacgtgctatcc

SEQ ID NO: 3268999 - DNA, 25 bp, Homo sapien
ccctgtgcttaggtgtgttctcatg

SEQ ID NO: 3269000 - DNA, 25 bp, Homo sapien
aggaatttgcattgaacgtcttccc

SEQ ID NO: 3269001 - DNA, 25 bp, Homo sapien
aatttgcattgaacgtcttccctga

SEQ ID NO: 3269002 - DNA, 25 bp, Homo sapien
tgtgttctcatggagtctttccttt

SEQ ID NO: 3269003 - DNA, 25 bp, Homo sapien
cctggatcctcagttgcttgttcta

SEQ ID NO: 3269004 - DNA, 25 bp, Homo sapien
tggatcctcagttgcttgttctact

SEQ ID NO: 3269005 - DNA, 25 bp, Homo sapien
ctggatcctcagttgcttgttctac

SEQ ID NO: 3269006 - DNA, 25 bp, Homo sapien
ggatcctcagttgcttgttctactg

SEQ ID NO: 3269007 - DNA, 25 bp, Homo sapien
gaagaagcagcttcgcacagtggga

SEQ ID NO: 3269008 - DNA, 25 bp, Homo sapien
agcagcttcgcacagtgggacatca

SEQ ID NO: 3269009 - DNA, 25 bp, Homo sapien
agaagaagcagcttcgcacagtggg

SEQ ID NO: 3269010 - DNA, 25 bp, Homo sapien
gaagcagcttcgcacagtgggacat

SEQ ID NO: 3269011 - DNA, 25 bp, Homo sapien
tgtttgtaatagtttgaagaatcat

SEQ ID NO: 3269012 - DNA, 25 bp, Homo sapien
gtgtttgtaatagtttgaagaatca

SEQ ID NO: 3269013 - DNA, 25 bp, Homo sapien
ggttgatgggttcagcaaaccactg

SEQ ID NO: 3269014 - DNA, 25 bp, Homo sapien
gggttcagcaaaccactgtggcaca

SEQ ID NO: 3269015 - DNA, 25 bp, Homo sapien
tcagcaaaccactgtggcacatgta

SEQ ID NO: 3269016 - DNA, 25 bp, Homo sapien
taaccaacctgcacatgtatccaag

SEQ ID NO: 3269017 - DNA, 25 bp, Homo sapien
cattaggatcagttacaaattacct

SEQ ID NO: 3269018 - DNA, 25 bp, Homo sapien
tcagttttcttacccgaccagttca

SEQ ID NO: 3269019 - DNA, 25 bp, Homo sapien
tgatttgcccttacccataagtacc

SEQ ID NO: 3269020 - DNA, 25 bp, Homo sapien
gactgtggatagagatgaattctag

SEQ ID NO: 3269021 - DNA, 25 bp, Homo sapien
actgctcttcattacatcacagcct

SEQ ID NO: 3269022 - DNA, 25 bp, Homo sapien
acatgacggcatccactgctcttca

SEQ ID NO: 3269023 - DNA, 25 bp, Homo sapien
gacgtgcaggagacacatgacggca

SEQ ID NO: 3269024 - DNA, 25 bp, Homo sapien
cattctatcttaaggggacgtgcag

SEQ ID NO: 3269025 - DNA, 25 bp, Homo sapien
aactttgcttgacttcactttggag

SEQ ID NO: 3269026 - DNA, 25 bp, Homo sapien
tactcattggtccaaagggccatgt

SEQ ID NO: 3269027 - DNA, 25 bp, Homo sapien
cactttggaggtttctgccgctgta

SEQ ID NO: 3269028 - DNA, 25 bp, Homo sapien
gaaaagctgaccacgtacagacagg

SEQ ID NO: 3269029 - DNA, 25 bp, Homo sapien
gacaactttagccaaggtccagtga

SEQ ID NO: 3269030 - DNA, 25 bp, Homo sapien
caactttagccaaggtccagtgacc

SEQ ID NO: 3269031 - DNA, 25 bp, Homo sapien
tttctgacaactttagccaaggtcc

SEQ ID NO: 3269032 - DNA, 25 bp, Homo sapien
tctgacaactttagccaaggtccag

SEQ ID NO: 3269033 - DNA, 25 bp, Homo sapien
caataattgagttagttgtgttagt

SEQ ID NO: 3269034 - DNA, 25 bp, Homo sapien
cttatgagattaggtgtatcaggca

SEQ ID NO: 3269035 - DNA, 25 bp, Homo sapien
gtaaatgccccataaacaataattg

SEQ ID NO: 3269036 - DNA, 25 bp, Homo sapien
tccatagtcttatgagattaggtgt

SEQ ID NO: 3269037 - DNA, 25 bp, Homo sapien
caggattaatgaacgaacaagcagg

SEQ ID NO: 3269038 - DNA, 25 bp, Homo sapien
tattacaccagaattgacagccatt

SEQ ID NO: 3269039 - DNA, 25 bp, Homo sapien
gcagggctgtcaccggataatcaaa

SEQ ID NO: 3269040 - DNA, 25 bp, Homo sapien
cttataagcgttaactcagggacaa

SEQ ID NO: 3269041 - DNA, 25 bp, Homo sapien
gcaagtcctgtgtctagagtcacta

SEQ ID NO: 3269042 - DNA, 25 bp, Homo sapien
gagtcactacctgcccatttgttgt

SEQ ID NO: 3269043 - DNA, 25 bp, Homo sapien
catccttgcctgtgcatgtttgagg

SEQ ID NO: 3269044 - DNA, 25 bp, Homo sapien
tatgtctcaagtttctgcaagtcct

SEQ ID NO: 3269045 - DNA, 25 bp, Homo sapien
ttttatacttgtgctcataaggcat

SEQ ID NO: 3269046 - DNA, 25 bp, Homo sapien
atttttatacttgtgctcataaggc

SEQ ID NO: 3269047 - DNA, 25 bp, Homo sapien
catttttatacttgtgctcataagg

SEQ ID NO: 3269048 - DNA, 25 bp, Homo sapien
tttttatacttgtgctcataaggca

SEQ ID NO: 3269049 - DNA, 25 bp, Homo sapien
gtagcattacttctgtggacttcct

SEQ ID NO: 3269050 - DNA, 25 bp, Homo sapien
gtggacttcctgaatgctgtattta

SEQ ID NO: 3269051 - DNA, 25 bp, Homo sapien
cgcttttgtagcattacttctgtgg

SEQ ID NO: 3269052 - DNA, 25 bp, Homo sapien
ttgtagcattacttctgtggacttc

SEQ ID NO: 3269053 - DNA, 25 bp, Homo sapien
gacaagctaccaccagaaacaaatc

SEQ ID NO: 3269054 - DNA, 25 bp, Homo sapien
ttgcagaatcctgccaaacaaagga

SEQ ID NO: 3269055 - DNA, 25 bp, Homo sapien
acaagctaccaccagaaacaaatca

SEQ ID NO: 3269056 - DNA, 25 bp, Homo sapien
cctgtgtgccgccttcatcaggtat

SEQ ID NO: 3269057 - DNA, 25 bp, Homo sapien
gtgccgccttcatcaggtatcacaa

SEQ ID NO: 3269058 - DNA, 25 bp, Homo sapien
tgtgtgccgccttcatcaggtatca

SEQ ID NO: 3269059 - DNA, 25 bp, Homo sapien
tgtgccgccttcatcaggtatcaca

SEQ ID NO: 3269060 - DNA, 25 bp, Homo sapien
cactcatgttctagcttagcctgga

SEQ ID NO: 3269061 - DNA, 25 bp, Homo sapien
ggaattattttgtcaacacccagct

SEQ ID NO: 3269062 - DNA, 25 bp, Homo sapien
cagccacagggtcatagatttttcc

SEQ ID NO: 3269063 - DNA, 25 bp, Homo sapien
cttcttaaaacctgcttgtagtatt

SEQ ID NO: 3269064 - DNA, 25 bp, Homo sapien
caaagatcaaaggtcgaggctctaa

SEQ ID NO: 3269065 - DNA, 25 bp, Homo sapien
tactattcagtctacagtggacagg

SEQ ID NO: 3269066 - DNA, 25 bp, Homo sapien
tgtggtttcctcctatctgactgta

SEQ ID NO: 3269067 - DNA, 25 bp, Homo sapien
tccatctcagtacagggtgaacttt

SEQ ID NO: 3269068 - DNA, 25 bp, Homo sapien
cgtgtgatgctgagatactgtgtta

SEQ ID NO: 3269069 - DNA, 25 bp, Homo sapien
aaagaaacactctcacgtgtgatgc

SEQ ID NO: 3269070 - DNA, 25 bp, Homo sapien
tctcacgtgtgatgctgagatactg

SEQ ID NO: 3269071 - DNA, 25 bp, Homo sapien
tgcattttctgttcgataaaaacaa

SEQ ID NO: 3269072 - DNA, 25 bp, Homo sapien
cttgtaataaatgtatgccatcctt

SEQ ID NO: 3269073 - DNA, 25 bp, Homo sapien
ttgtaataaatgtatgccatcctta

SEQ ID NO: 3269074 - DNA, 25 bp, Homo sapien
tgtaataaatgtatgccatccttaa

SEQ ID NO: 3269075 - DNA, 25 bp, Homo sapien
gtaataaatgtatgccatccttaac

SEQ ID NO: 3269076 - DNA, 25 bp, Homo sapien
caatacacacggcactggtggtact

SEQ ID NO: 3269077 - DNA, 25 bp, Homo sapien
tggtactgtccatcataaagtctgc

SEQ ID NO: 3269078 - DNA, 25 bp, Homo sapien
cggtcccaatacacacggcactggt

SEQ ID NO: 3269079 - DNA, 25 bp, Homo sapien
gcactggtggtactgtccatcataa

SEQ ID NO: 3269080 - DNA, 25 bp, Homo sapien
atgaagatagtttaccatcttgtac

SEQ ID NO: 3269081 - DNA, 25 bp, Homo sapien
ctgaattcgcttttattccccttgg

SEQ ID NO: 3269082 - DNA, 25 bp, Homo sapien
ttactaaattaaatgcgctgttggg

SEQ ID NO: 3269083 - DNA, 25 bp, Homo sapien
ccccttggtgttccatacatacaaa

SEQ ID NO: 3269084 - DNA, 25 bp, Homo sapien
ggcactttgagatagagctggaatc

SEQ ID NO: 3269085 - DNA, 25 bp, Homo sapien
cactttgagatagagctggaatcct

SEQ ID NO: 3269086 - DNA, 25 bp, Homo sapien
taaaggcactttgagatagagctgg

SEQ ID NO: 3269087 - DNA, 25 bp, Homo sapien
acagaataaaggcactttgagatag

SEQ ID NO: 3269088 - DNA, 25 bp, Homo sapien
tcaggtccagatggagaagtctgat

SEQ ID NO: 3269089 - DNA, 25 bp, Homo sapien
tgccccaaggtcagcactttcaggt

SEQ ID NO: 3269090 - DNA, 25 bp, Homo sapien
tacagatccttgttaggaaacccat

SEQ ID NO: 3269091 - DNA, 25 bp, Homo sapien
ccatatagagaagtctgccccaagg

SEQ ID NO: 3269092 - DNA, 25 bp, Homo sapien
gagttcatcaggctgtgaagcatgt

SEQ ID NO: 3269093 - DNA, 25 bp, Homo sapien
ttcatcaggctgtgaagcatgtttc

SEQ ID NO: 3269094 - DNA, 25 bp, Homo sapien
catcaggctgtgaagcatgtttcat

SEQ ID NO: 3269095 - DNA, 25 bp, Homo sapien
caggctgtgaagcatgtttcatcag

SEQ ID NO: 3269096 - DNA, 25 bp, Homo sapien
gctcctgatctctaactttatcctg

SEQ ID NO: 3269097 - DNA, 25 bp, Homo sapien
ctcctgatctctaactttatcctgc

SEQ ID NO: 3269098 - DNA, 25 bp, Homo sapien
tgctcctgatctctaactttatcct

SEQ ID NO: 3269099 - DNA, 25 bp, Homo sapien
agaatttagaacagccttcattgtc

SEQ ID NO: 3269100 - DNA, 25 bp, Homo sapien
aagaatttagaacagccttcattgt

SEQ ID NO: 3269101 - DNA, 25 bp, Homo sapien
tcagtgttagtaccaacaccaggaa

SEQ ID NO: 3269102 - DNA, 25 bp, Homo sapien
atggtcagtgttagtaccaacacca

SEQ ID NO: 3269103 - DNA, 25 bp, Homo sapien
gggaaattctctgtagccactggtt

SEQ ID NO: 3269104 - DNA, 25 bp, Homo sapien
aattctctgtagccactggttcttt

SEQ ID NO: 3269105 - DNA, 25 bp, Homo sapien
gaaattctctgtagccactggttct

SEQ ID NO: 3269106 - DNA, 25 bp, Homo sapien
agggaaattctctgtagccactggt

SEQ ID NO: 3269107 - DNA, 25 bp, Homo sapien
gaacacactgggattaggagtttat

SEQ ID NO: 3269108 - DNA, 25 bp, Homo sapien
acacactgggattaggagtttattt

SEQ ID NO: 3269109 - DNA, 25 bp, Homo sapien
aacacactgggattaggagtttatt

SEQ ID NO: 3269110 - DNA, 25 bp, Homo sapien
ttttcattcattccttctcgaatct

SEQ ID NO: 3269111 - DNA, 25 bp, Homo sapien
ctaactctttacaattttcattcat

SEQ ID NO: 3269112 - DNA, 25 bp, Homo sapien
tcattcattccttctcgaatctcac

SEQ ID NO: 3269113 - DNA, 25 bp, Homo sapien
aattttcattcattccttctcgaat

SEQ ID NO: 3269114 - DNA, 25 bp, Homo sapien
ttcccaaacctgtaaacaggctcca

SEQ ID NO: 3269115 - DNA, 25 bp, Homo sapien
caaacctgtaaacaggctccacttt

SEQ ID NO: 3269116 - DNA, 25 bp, Homo sapien
aacaggctccactttcttctacatc

SEQ ID NO: 3269117 - DNA, 25 bp, Homo sapien
taaacaggctccactttcttctaca

SEQ ID NO: 3269118 - DNA, 25 bp, Homo sapien
tgtgcctgggatgtacaatagtttt

SEQ ID NO: 3269119 - DNA, 25 bp, Homo sapien
cacatttagcattctgaggagtgtc

SEQ ID NO: 3269120 - DNA, 25 bp, Homo sapien
tggaacccataagtttttgtgcctg

SEQ ID NO: 3269121 - DNA, 25 bp, Homo sapien
tttgtactagccacacagccggtag

SEQ ID NO: 3269122 - DNA, 25 bp, Homo sapien
tgatgcatccgcatgagtctgcccc

SEQ ID NO: 3269123 - DNA, 25 bp, Homo sapien
tgtccaggtgatgcatccgcatgag

SEQ ID NO: 3269124 - DNA, 25 bp, Homo sapien
ggagtgtccaggtgatgcatccgca

SEQ ID NO: 3269125 - DNA, 25 bp, Homo sapien
ccgcatgagtctgccccacatagaa

SEQ ID NO: 3269126 - DNA, 25 bp, Homo sapien
cactagcacaatggcatctctttcc

SEQ ID NO: 3269127 - DNA, 25 bp, Homo sapien
actagcacaatggcatctctttcca

SEQ ID NO: 3269128 - DNA, 25 bp, Homo sapien
aacactagcacaatggcatctcttt

SEQ ID NO: 3269129 - DNA, 25 bp, Homo sapien
aaacactagcacaatggcatctctt

SEQ ID NO: 3269130 - DNA, 25 bp, Homo sapien
agtcctgaaacgtgacaaatatcta

SEQ ID NO: 3269131 - DNA, 25 bp, Homo sapien
aacgtgacaaatatctatcatttgc

SEQ ID NO: 3269132 - DNA, 25 bp, Homo sapien
tcatttgccattgcattggcataca

SEQ ID NO: 3269133 - DNA, 25 bp, Homo sapien
tctatcatttgccattgcattggca

SEQ ID NO: 3269134 - DNA, 25 bp, Homo sapien
gtggtacatagaactggcaactggg

SEQ ID NO: 3269135 - DNA, 25 bp, Homo sapien
taaagaaggctcagtgcaaggtaat

SEQ ID NO: 3269136 - DNA, 25 bp, Homo sapien
attggagcctacagagaaatcctca

SEQ ID NO: 3269137 - DNA, 25 bp, Homo sapien
caaggtaatagggtgagatctcttc

SEQ ID NO: 3269138 - DNA, 25 bp, Homo sapien
tagacctggatttttaattatgtta

SEQ ID NO: 3269139 - DNA, 25 bp, Homo sapien
cctggatttttaattatgttaatag

SEQ ID NO: 3269140 - DNA, 25 bp, Homo sapien
gatcaggagatgttatcttgttgat

SEQ ID NO: 3269141 - DNA, 25 bp, Homo sapien
gaagatcaggagatgttatcttgtt

SEQ ID NO: 3269142 - DNA, 25 bp, Homo sapien
agatcaggagatgttatcttgttga

SEQ ID NO: 3269143 - DNA, 25 bp, Homo sapien
aagatcaggagatgttatcttgttg

SEQ ID NO: 3269144 - DNA, 25 bp, Homo sapien
atcctcaaggtcatacggaagttcc

SEQ ID NO: 3269145 - DNA, 25 bp, Homo sapien
catatccatggtataggccatcatc

SEQ ID NO: 3269146 - DNA, 25 bp, Homo sapien
tatccatggtataggccatcatcag

SEQ ID NO: 3269147 - DNA, 25 bp, Homo sapien
aaggtcatacggaagttccttcgag

SEQ ID NO: 3269148 - DNA, 25 bp, Homo sapien
gcactcatcattatgggtgcgcgac

SEQ ID NO: 3269149 - DNA, 25 bp, Homo sapien
tgggcactcatcattatgggtgcgc

SEQ ID NO: 3269150 - DNA, 25 bp, Homo sapien
ggcactcatcattatgggtgcgcga

SEQ ID NO: 3269151 - DNA, 25 bp, Homo sapien
gggcactcatcattatgggtgcgcg

SEQ ID NO: 3269152 - DNA, 25 bp, Homo sapien
agactggtgtcccagtaaggtggcc

SEQ ID NO: 3269153 - DNA, 25 bp, Homo sapien
actggtgtcccagtaaggtggccat

SEQ ID NO: 3269154 - DNA, 25 bp, Homo sapien
catcacatagatctctttccaggcc

SEQ ID NO: 3269155 - DNA, 25 bp, Homo sapien
ctccatcacatagatctctttccag

SEQ ID NO: 3269156 - DNA, 25 bp, Homo sapien
gtgctcctgctcatattggttgacg

SEQ ID NO: 3269157 - DNA, 25 bp, Homo sapien
ctgcagatgtggcagtacagctcgc

SEQ ID NO: 3269158 - DNA, 25 bp, Homo sapien
catattggttgacgtagaaagggtc

SEQ ID NO: 3269159 - DNA, 25 bp, Homo sapien
cccctttcagaataaggctgcagat

SEQ ID NO: 3269160 - DNA, 25 bp, Homo sapien
gacatctgtgaatagagtgcaccaa

SEQ ID NO: 3269161 - DNA, 25 bp, Homo sapien
caattctgacattgacaaatggtcc

SEQ ID NO: 3269162 - DNA, 25 bp, Homo sapien
taaaagcataatggcacagagacat

SEQ ID NO: 3269163 - DNA, 25 bp, Homo sapien
cttgcttgagggaattgaatacgct

SEQ ID NO: 3269164 - DNA, 25 bp, Homo sapien
actgtacccgttacagtcaagccct

SEQ ID NO: 3269165 - DNA, 25 bp, Homo sapien
cccgttacagtcaagccctccacat

SEQ ID NO: 3269166 - DNA, 25 bp, Homo sapien
cgttacagtcaagccctccacatct

SEQ ID NO: 3269167 - DNA, 25 bp, Homo sapien
tcccaaactgtacccgttacagtca

SEQ ID NO: 3269168 - DNA, 25 bp, Homo sapien
cacatcttttggcaaaaaggcttcc

SEQ ID NO: 3269169 - DNA, 25 bp, Homo sapien
ctcacatcttttggcaaaaaggctt

SEQ ID NO: 3269170 - DNA, 25 bp, Homo sapien
cctcacatcttttggcaaaaaggct

SEQ ID NO: 3269171 - DNA, 25 bp, Homo sapien
catcttttggcaaaaaggcttcctc

SEQ ID NO: 3269172 - DNA, 25 bp, Homo sapien
ggtttaattcctgtcaccttactca

SEQ ID NO: 3269173 - DNA, 25 bp, Homo sapien
tggtttaattcctgtcaccttactc

SEQ ID NO: 3269174 - DNA, 25 bp, Homo sapien
gtttaattcctgtcaccttactcat

SEQ ID NO: 3269175 - DNA, 25 bp, Homo sapien
cagcttttggctgaacttcagacaa

SEQ ID NO: 3269176 - DNA, 25 bp, Homo sapien
aggcagggttagcaagatcagcttt

SEQ ID NO: 3269177 - DNA, 25 bp, Homo sapien
gcagggttagcaagatcagcttttg

SEQ ID NO: 3269178 - DNA, 25 bp, Homo sapien
ggttagcaagatcagcttttggctg

SEQ ID NO: 3269179 - DNA, 25 bp, Homo sapien
aacattcgtgactcaagaagttggt

SEQ ID NO: 3269180 - DNA, 25 bp, Homo sapien
ccttgtaataccctactcctctgag

SEQ ID NO: 3269181 - DNA, 25 bp, Homo sapien
gggtagctcttggtctattgcacag

SEQ ID NO: 3269182 - DNA, 25 bp, Homo sapien
ttaacagcatttttgggagtgggta

SEQ ID NO: 3269183 - DNA, 25 bp, Homo sapien
gatctccataatgattacagtctgc

SEQ ID NO: 3269184 - DNA, 25 bp, Homo sapien
ttacagtctgcctcataccctggca

SEQ ID NO: 3269185 - DNA, 25 bp, Homo sapien
taccctggcagtttcttaattccca

SEQ ID NO: 3269186 - DNA, 25 bp, Homo sapien
gcctcataccctggcagtttcttaa

SEQ ID NO: 3269187 - DNA, 25 bp, Homo sapien
catgatagtcctcagtattcagctg

SEQ ID NO: 3269188 - DNA, 25 bp, Homo sapien
tccttttctcttggggctagagact

SEQ ID NO: 3269189 - DNA, 25 bp, Homo sapien
gggctagagacttttctgggtcatg

SEQ ID NO: 3269190 - DNA, 25 bp, Homo sapien
ttttctgggtcatgatagtcctcag

SEQ ID NO: 3269191 - DNA, 25 bp, Homo sapien
ttgctatttttagggccataatcca

SEQ ID NO: 3269192 - DNA, 25 bp, Homo sapien
aaatgtcaatcctcactgcttcttg

SEQ ID NO: 3269193 - DNA, 25 bp, Homo sapien
atgcatccatggtggatcccgcagc

SEQ ID NO: 3269194 - DNA, 25 bp, Homo sapien
gcaaaacatgcatccatggtggatc

SEQ ID NO: 3269195 - DNA, 25 bp, Homo sapien
aaacctaaaatgtcaatcctcactg

SEQ ID NO: 3269196 - DNA, 25 bp, Homo sapien
ccaaatagaactggggctgttgtca

SEQ ID NO: 3269197 - DNA, 25 bp, Homo sapien
gtctcctgtagtggtctgtatgatc

SEQ ID NO: 3269198 - DNA, 25 bp, Homo sapien
gaggatgctgaactctttctccaaa

SEQ ID NO: 3269199 - DNA, 25 bp, Homo sapien
gatcatgttgtaccacagaggatgc

SEQ ID NO: 3269200 - DNA, 25 bp, Homo sapien
tcagcaatgacacatgacacatttt

SEQ ID NO: 3269201 - DNA, 25 bp, Homo sapien
cattttatgacaaaggagatgtcag

SEQ ID NO: 3269202 - DNA, 25 bp, Homo sapien
caatgacacatgacacattttatga

SEQ ID NO: 3269203 - DNA, 25 bp, Homo sapien
ttttatgacaaaggagatgtcagca

SEQ ID NO: 3269204 - DNA, 25 bp, Homo sapien
aaataccaaatgatgtatttttagt

SEQ ID NO: 3269205 - DNA, 25 bp, Homo sapien
tcaatatggagctatagaatgtgaa

SEQ ID NO: 3269206 - DNA, 25 bp, Homo sapien
atttttagttgttgacatcgattac

SEQ ID NO: 3269207 - DNA, 25 bp, Homo sapien
tatggagctatagaatgtgaaaaaa

SEQ ID NO: 3269208 - DNA, 25 bp, Homo sapien
tcaatgtcccgtagtagtgaaaggg

SEQ ID NO: 3269209 - DNA, 25 bp, Homo sapien
gatacaggaattatgtcagttggac

SEQ ID NO: 3269210 - DNA, 25 bp, Homo sapien
gatacaaatccttaagaatgtgcgg

SEQ ID NO: 3269211 - DNA, 25 bp, Homo sapien
tgaaatggtgcatgatacaaatcct

SEQ ID NO: 3269212 - DNA, 25 bp, Homo sapien
aggactctctgggttcttgaacctt

SEQ ID NO: 3269213 - DNA, 25 bp, Homo sapien
gccaggactctctgggttcttgaac

SEQ ID NO: 3269214 - DNA, 25 bp, Homo sapien
ttcttcagtttccatgccaggactc

SEQ ID NO: 3269215 - DNA, 25 bp, Homo sapien
tgggttcttgaacctttctgaggtc

SEQ ID NO: 3269216 - DNA, 25 bp, Homo sapien
tgtggctgtgacaatactgttagct

SEQ ID NO: 3269217 - DNA, 25 bp, Homo sapien
tatgaagtcacttttcaagccatgt

SEQ ID NO: 3269218 - DNA, 25 bp, Homo sapien
caacataatctacttcttggtttac

SEQ ID NO: 3269219 - DNA, 25 bp, Homo sapien
aagccatgtaagtccaattcaatta

SEQ ID NO: 3269220 - DNA, 25 bp, Homo sapien
atttcggcatgctgcttgtcatacc

SEQ ID NO: 3269221 - DNA, 25 bp, Homo sapien
tcggcatgctgcttgtcatacccac

SEQ ID NO: 3269222 - DNA, 25 bp, Homo sapien
tttcggcatgctgcttgtcataccc

SEQ ID NO: 3269223 - DNA, 25 bp, Homo sapien
ttcggcatgctgcttgtcataccca

SEQ ID NO: 3269224 - DNA, 25 bp, Homo sapien
gacatccctatgatctttaccagag

SEQ ID NO: 3269225 - DNA, 25 bp, Homo sapien
tatgatctttaccagagcagctcct

SEQ ID NO: 3269226 - DNA, 25 bp, Homo sapien
taaagccagactgtaaaccagacat

SEQ ID NO: 3269227 - DNA, 25 bp, Homo sapien
tgaggtcaagggtttaaagccagac

SEQ ID NO: 3269228 - DNA, 25 bp, Homo sapien
ggtcctagttatatgcttctcttcc

SEQ ID NO: 3269229 - DNA, 25 bp, Homo sapien
tgcgtgtgtccaatataggtgatat

SEQ ID NO: 3269230 - DNA, 25 bp, Homo sapien
caatctctgtaacattgagctcatc

SEQ ID NO: 3269231 - DNA, 25 bp, Homo sapien
tagattcaacttcttgcgtgtgtcc

SEQ ID NO: 3269232 - DNA, 25 bp, Homo sapien
aagcagcaccaatgtataagttttg

SEQ ID NO: 3269233 - DNA, 25 bp, Homo sapien
gccccaaagcagcaccaatgtataa

SEQ ID NO: 3269234 - DNA, 25 bp, Homo sapien
aattctggggcatactgactttctt

SEQ ID NO: 3269235 - DNA, 25 bp, Homo sapien
aagcagttttcaacaggccccaaag

SEQ ID NO: 3269236 - DNA, 25 bp, Homo sapien
ttttcctcttctgtcatttttctcc

SEQ ID NO: 3269237 - DNA, 25 bp, Homo sapien
ttcctcttctgtcatttttctcctc

SEQ ID NO: 3269238 - DNA, 25 bp, Homo sapien
tctcctctccctcttcatattccat

SEQ ID NO: 3269239 - DNA, 25 bp, Homo sapien
tttctcctctccctcttcatattcc

SEQ ID NO: 3269240 - DNA, 25 bp, Homo sapien
taggcgtccttcaaactacctggga

SEQ ID NO: 3269241 - DNA, 25 bp, Homo sapien
gagagtactgaaaaggtaggcgtcc

SEQ ID NO: 3269242 - DNA, 25 bp, Homo sapien
ttggagtcccaaggaatagcagagg

SEQ ID NO: 3269243 - DNA, 25 bp, Homo sapien
gaagcccatacttacctcctgagca

SEQ ID NO: 3269244 - DNA, 25 bp, Homo sapien
gctggagccttgattctaaactgcc

SEQ ID NO: 3269245 - DNA, 25 bp, Homo sapien
gcatgagaggccttatataagggct

SEQ ID NO: 3269246 - DNA, 25 bp, Homo sapien
tgcctttggccatgttaggacacag

SEQ ID NO: 3269247 - DNA, 25 bp, Homo sapien
tatggttgaatgtgctcccaaaatt

SEQ ID NO: 3269248 - DNA, 25 bp, Homo sapien
tcatgaacaaatatctctatgcagt

SEQ ID NO: 3269249 - DNA, 25 bp, Homo sapien
tgaacaaatatctctatgcagttaa

SEQ ID NO: 3269250 - DNA, 25 bp, Homo sapien
catgaacaaatatctctatgcagtt

SEQ ID NO: 3269251 - DNA, 25 bp, Homo sapien
gaacaaatatctctatgcagttaaa

SEQ ID NO: 3269252 - DNA, 25 bp, Homo sapien
tcaacttttaggagcctgtgtctat

SEQ ID NO: 3269253 - DNA, 25 bp, Homo sapien
gagcctgtgtctattagcctgttct

SEQ ID NO: 3269254 - DNA, 25 bp, Homo sapien
acagcaggcaatagagagcatatgc

SEQ ID NO: 3269255 - DNA, 25 bp, Homo sapien
tgacagcaggcaatagagagcatat

SEQ ID NO: 3269256 - DNA, 25 bp, Homo sapien
caaaacatagaatcattagagcctg

SEQ ID NO: 3269257 - DNA, 25 bp, Homo sapien
taggtaagacgagcacagataacat

SEQ ID NO: 3269258 - DNA, 25 bp, Homo sapien
tagagcctggtaggtaagacgagca

SEQ ID NO: 3269259 - DNA, 25 bp, Homo sapien
cctctatcaccttcaaaacatagaa

SEQ ID NO: 3269260 - DNA, 25 bp, Homo sapien
tcctacgtgaacactccattggagt

SEQ ID NO: 3269261 - DNA, 25 bp, Homo sapien
tacgtgaacactccattggagtcat

SEQ ID NO: 3269262 - DNA, 25 bp, Homo sapien
tatcctacgtgaacactccattgga

SEQ ID NO: 3269263 - DNA, 25 bp, Homo sapien
tctatcctacgtgaacactccattg

SEQ ID NO: 3269264 - DNA, 25 bp, Homo sapien
ttaatcctgcaagtccgataatttc

SEQ ID NO: 3269265 - DNA, 25 bp, Homo sapien
aatcctgcaagtccgataatttctg

SEQ ID NO: 3269266 - DNA, 25 bp, Homo sapien
taatcctgcaagtccgataatttct

SEQ ID NO: 3269267 - DNA, 25 bp, Homo sapien
tcttaatcctgcaagtccgataatt

SEQ ID NO: 3269268 - DNA, 25 bp, Homo sapien
cctgccacttccattggatacctta

SEQ ID NO: 3269269 - DNA, 25 bp, Homo sapien
tccattggataccttaacactatct

SEQ ID NO: 3269270 - DNA, 25 bp, Homo sapien
taccttaacactatctgttttatgc

SEQ ID NO: 3269271 - DNA, 25 bp, Homo sapien
gccacttccattggataccttaaca

SEQ ID NO: 3269272 - DNA, 25 bp, Homo sapien
ggacttcatgcttgatctgcttcaa

SEQ ID NO: 3269273 - DNA, 25 bp, Homo sapien
tgccaacacaagagagcattagacg

SEQ ID NO: 3269274 - DNA, 25 bp, Homo sapien
tatcatcttggatcctctgttgtgt

SEQ ID NO: 3269275 - DNA, 25 bp, Homo sapien
gttataaaccttgatgactgacaga

SEQ ID NO: 3269276 - DNA, 25 bp, Homo sapien
cttgctcacattggttataagctgg

SEQ ID NO: 3269277 - DNA, 25 bp, Homo sapien
taaagagtcaactgctaaagctcag

SEQ ID NO: 3269278 - DNA, 25 bp, Homo sapien
taaagctcagatatcagatcatgtg

SEQ ID NO: 3269279 - DNA, 25 bp, Homo sapien
tgcctggtggagagatgattcttaa

SEQ ID NO: 3269280 - DNA, 25 bp, Homo sapien
gattcagggaccatggctcaataaa

SEQ ID NO: 3269281 - DNA, 25 bp, Homo sapien
catgcctgacaaagtgacagttact

SEQ ID NO: 3269282 - DNA, 25 bp, Homo sapien
tttattacgagatggaaacctccag

SEQ ID NO: 3269283 - DNA, 25 bp, Homo sapien
tgacatctagcaacatgtactgggt

SEQ ID NO: 3269284 - DNA, 25 bp, Homo sapien
tcttgagtgaaaacaccggatatat

SEQ ID NO: 3269285 - DNA, 25 bp, Homo sapien
tccaatttaaggtccaagtgtccag

SEQ ID NO: 3269286 - DNA, 25 bp, Homo sapien
tctgtaagagatcattgctagtcac

SEQ ID NO: 3269287 - DNA, 25 bp, Homo sapien
aagtcttggcaaacagaccgtttca

SEQ ID NO: 3269288 - DNA, 25 bp, Homo sapien
tcgagagacgactagtttgtttggg

SEQ ID NO: 3269289 - DNA, 25 bp, Homo sapien
tagtttgtttgggtcatagacacca

SEQ ID NO: 3269290 - DNA, 25 bp, Homo sapien
catagacaccagtaaggacacgtga

SEQ ID NO: 3269291 - DNA, 25 bp, Homo sapien
ttagtgaaatcgagagacgactagt

SEQ ID NO: 3269292 - DNA, 25 bp, Homo sapien
ctttgctcacggaaaggatgcttgg

SEQ ID NO: 3269293 - DNA, 25 bp, Homo sapien
gtggtgccagctcttccgctagcgt

SEQ ID NO: 3269294 - DNA, 25 bp, Homo sapien
gcttgcttctgctccctgtctcgtg

SEQ ID NO: 3269295 - DNA, 25 bp, Homo sapien
ttccgctagcgtctttccttttatc

SEQ ID NO: 3269296 - DNA, 25 bp, Homo sapien
tctgctcagcttttaatgtcttttc

SEQ ID NO: 3269297 - DNA, 25 bp, Homo sapien
cgttttcatataagagtcctgagtg

SEQ ID NO: 3269298 - DNA, 25 bp, Homo sapien
ataactctgctcagcttttaatgtc

SEQ ID NO: 3269299 - DNA, 25 bp, Homo sapien
gtcctgagtgttctttatggcccct

SEQ ID NO: 3269300 - DNA, 25 bp, Homo sapien
ttggtacggtcgagtccaaagagcc

SEQ ID NO: 3269301 - DNA, 25 bp, Homo sapien
tggtacggtcgagtccaaagagccc

SEQ ID NO: 3269302 - DNA, 25 bp, Homo sapien
cttggtacggtcgagtccaaagagc

SEQ ID NO: 3269303 - DNA, 25 bp, Homo sapien
ggtacggtcgagtccaaagagccca

SEQ ID NO: 3269304 - DNA, 25 bp, Homo sapien
cactgtctgggctagcaatggcatc

SEQ ID NO: 3269305 - DNA, 25 bp, Homo sapien
tggtgatcattcagtccacggaatt

SEQ ID NO: 3269306 - DNA, 25 bp, Homo sapien
ctacaagagccatcataatagcatg

SEQ ID NO: 3269307 - DNA, 25 bp, Homo sapien
ccacggaatttgtcatgactggcac

SEQ ID NO: 3269308 - DNA, 25 bp, Homo sapien
gaggagtggcatattaatttgtacg

SEQ ID NO: 3269309 - DNA, 25 bp, Homo sapien
tcagtgacctgagtagtaacaaagt

SEQ ID NO: 3269310 - DNA, 25 bp, Homo sapien
gtacgttctccttgttcacacacag

SEQ ID NO: 3269311 - DNA, 25 bp, Homo sapien
tgaggactgatgttataaagcaaaa

SEQ ID NO: 3269312 - DNA, 25 bp, Homo sapien
gaaatttcacctgtcagtgcagtag

SEQ ID NO: 3269313 - DNA, 25 bp, Homo sapien
ggtagtcatcgcttgtagttccagt

SEQ ID NO: 3269314 - DNA, 25 bp, Homo sapien
gaagtgaagatcaggccctcagcag

SEQ ID NO: 3269315 - DNA, 25 bp, Homo sapien
gacacaaaacctgccagtgccatga

SEQ ID NO: 3269316 - DNA, 25 bp, Homo sapien
tgtagcaagtagataaagtgaggta

SEQ ID NO: 3269317 - DNA, 25 bp, Homo sapien
gtaagcaggatgcccttctgtagca

SEQ ID NO: 3269318 - DNA, 25 bp, Homo sapien
cttctgtagcaagtagataaagtga

SEQ ID NO: 3269319 - DNA, 25 bp, Homo sapien
gcccttctgtagcaagtagataaag

SEQ ID NO: 3269320 - DNA, 25 bp, Homo sapien
tcgcgctgtactcctctctgttctg

SEQ ID NO: 3269321 - DNA, 25 bp, Homo sapien
acacccttcccagacttgtcttgga

SEQ ID NO: 3269322 - DNA, 25 bp, Homo sapien
tcactgggccagtcgaggcgttctg

SEQ ID NO: 3269323 - DNA, 25 bp, Homo sapien
tgctggcacataaactcgcgctgta

SEQ ID NO: 3269324 - DNA, 25 bp, Homo sapien
caatgacctggaaccatctctctga

SEQ ID NO: 3269325 - DNA, 25 bp, Homo sapien
tttttcaatgacctggaaccatctc

SEQ ID NO: 3269326 - DNA, 25 bp, Homo sapien
ctgaaatggtaggagcttagccttg

SEQ ID NO: 3269327 - DNA, 25 bp, Homo sapien
gggctggttctcactccaaattgca

SEQ ID NO: 3269328 - DNA, 25 bp, Homo sapien
gtaatggttctcacaatcccctttc

SEQ ID NO: 3269329 - DNA, 25 bp, Homo sapien
agtaatggttctcacaatccccttt

SEQ ID NO: 3269330 - DNA, 25 bp, Homo sapien
taattcttgttaactgccggtataa

SEQ ID NO: 3269331 - DNA, 25 bp, Homo sapien
tattgcaactggatacagggacttt

SEQ ID NO: 3269332 - DNA, 25 bp, Homo sapien
tggatcatggatgcagactttctcc

SEQ ID NO: 3269333 - DNA, 25 bp, Homo sapien
tctcacaagaactagctttagcgtg

SEQ ID NO: 3269334 - DNA, 25 bp, Homo sapien
ttccacatcgctgtggaggtctcag

SEQ ID NO: 3269335 - DNA, 25 bp, Homo sapien
agttccacatcgctgtggaggtctc

SEQ ID NO: 3269336 - DNA, 25 bp, Homo sapien
ccacatcgctgtggaggtctcagaa

SEQ ID NO: 3269337 - DNA, 25 bp, Homo sapien
acatcgctgtggaggtctcagaatc

SEQ ID NO: 3269338 - DNA, 25 bp, Homo sapien
tacatttagacttggagtaggaggc

SEQ ID NO: 3269339 - DNA, 25 bp, Homo sapien
tcaagcagtcaatactccaaggagc

SEQ ID NO: 3269340 - DNA, 25 bp, Homo sapien
gatagtagctctgactgagtcttcc

SEQ ID NO: 3269341 - DNA, 25 bp, Homo sapien
ttccatatggatcgaattcacccac

SEQ ID NO: 3269342 - DNA, 25 bp, Homo sapien
tgtcaggaatcttggcttcaggaca

SEQ ID NO: 3269343 - DNA, 25 bp, Homo sapien
gacaccatcatttaactgcaacaaa

SEQ ID NO: 3269344 - DNA, 25 bp, Homo sapien
tttagccttgttagctcaaaagcca

SEQ ID NO: 3269345 - DNA, 25 bp, Homo sapien
gcactgcttgacaggaaccataagt

SEQ ID NO: 3269346 - DNA, 25 bp, Homo sapien
gctttgtttccgaatgaactttgcc

SEQ ID NO: 3269347 - DNA, 25 bp, Homo sapien
ttcttgttccaggacaagtctgcat

SEQ ID NO: 3269348 - DNA, 25 bp, Homo sapien
tttcttgttccaggacaagtctgca

SEQ ID NO: 3269349 - DNA, 25 bp, Homo sapien
gtctttggagtatcagcaagaacag

SEQ ID NO: 3269350 - DNA, 25 bp, Homo sapien
taataatcctggaaaatggaagcat

SEQ ID NO: 3269351 - DNA, 25 bp, Homo sapien
ttatgaacaacatcatttgccatga

SEQ ID NO: 3269352 - DNA, 25 bp, Homo sapien
ctgtgactggataatgacctttggg

SEQ ID NO: 3269353 - DNA, 25 bp, Homo sapien
agagtaaaacaaatcttgggtcttg

SEQ ID NO: 3269354 - DNA, 25 bp, Homo sapien
tctcactttagagtaaaacaaatct

SEQ ID NO: 3269355 - DNA, 25 bp, Homo sapien
gaggataatttctcactttagagta

SEQ ID NO: 3269356 - DNA, 25 bp, Homo sapien
taatttctcactttagagtaaaaca

SEQ ID NO: 3269357 - DNA, 25 bp, Homo sapien
aacaagttcattagtccctggaaga

SEQ ID NO: 3269358 - DNA, 25 bp, Homo sapien
tttttgacaaccaaatgttatccga

SEQ ID NO: 3269359 - DNA, 25 bp, Homo sapien
gttatccgaaattctaacaagttca

SEQ ID NO: 3269360 - DNA, 25 bp, Homo sapien
tccatctggccgtgttgagacgaat

SEQ ID NO: 3269361 - DNA, 25 bp, Homo sapien
tacttcaaactcatcaggatctcaa

SEQ ID NO: 3269362 - DNA, 25 bp, Homo sapien
gatcaagtttctagttacttcaaac

SEQ ID NO: 3269363 - DNA, 25 bp, Homo sapien
ttgatcaagtttctagttacttcaa

SEQ ID NO: 3269364 - DNA, 25 bp, Homo sapien
ttctagttacttcaaactcatcagg

SEQ ID NO: 3269365 - DNA, 25 bp, Homo sapien
taggtgtcctaacagactctctggg

SEQ ID NO: 3269366 - DNA, 25 bp, Homo sapien
ttacatttctaggtgtcctaacaga

SEQ ID NO: 3269367 - DNA, 25 bp, Homo sapien
ttatcaaagactacacaacaagaca

SEQ ID NO: 3269368 - DNA, 25 bp, Homo sapien
aagactacacaacaagacaacaact

SEQ ID NO: 3269369 - DNA, 25 bp, Homo sapien
tacggccaccctgcttacacttagg

SEQ ID NO: 3269370 - DNA, 25 bp, Homo sapien
caaaatctcgactttggcttgggat

SEQ ID NO: 3269371 - DNA, 25 bp, Homo sapien
acttaggtcttcaactctgtgtgcc

SEQ ID NO: 3269372 - DNA, 25 bp, Homo sapien
tatttgaagttacggccaccctgct

SEQ ID NO: 3269373 - DNA, 25 bp, Homo sapien
gccagtgttgcagtaacgttcagat

SEQ ID NO: 3269374 - DNA, 25 bp, Homo sapien
gaaaagcagaggtggtagacttaag

SEQ ID NO: 3269375 - DNA, 25 bp, Homo sapien
aatattggctgcttcacagaaaagc

SEQ ID NO: 3269376 - DNA, 25 bp, Homo sapien
tagacttaagatctggccagtgttg

SEQ ID NO: 3269377 - DNA, 25 bp, Homo sapien
taccagggatatgggatagtaaggc

SEQ ID NO: 3269378 - DNA, 25 bp, Homo sapien
gtaaggcatgacatacacagcccca

SEQ ID NO: 3269379 - DNA, 25 bp, Homo sapien
tatgggatagtaaggcatgacatac

SEQ ID NO: 3269380 - DNA, 25 bp, Homo sapien
gatagtaaggcatgacatacacagc

SEQ ID NO: 3269381 - DNA, 25 bp, Homo sapien
tatctcccagtatctagcacagagc

SEQ ID NO: 3269382 - DNA, 25 bp, Homo sapien
tattctgactgcagtataaatgcct

SEQ ID NO: 3269383 - DNA, 25 bp, Homo sapien
tgcgtttctaatctccctaagggcc

SEQ ID NO: 3269384 - DNA, 25 bp, Homo sapien
cctagcctgactgtagttattctga

SEQ ID NO: 3269385 - DNA, 25 bp, Homo sapien
tatctctagaactgggccctggtga

SEQ ID NO: 3269386 - DNA, 25 bp, Homo sapien
acctcaggtatttcatccgccttga

SEQ ID NO: 3269387 - DNA, 25 bp, Homo sapien
agtgagatcacgttttcctgaatgg

SEQ ID NO: 3269388 - DNA, 25 bp, Homo sapien
cgtgtccagccttagctccagaatt

SEQ ID NO: 3269389 - DNA, 25 bp, Homo sapien
acataaacattttgcatgaatttac

SEQ ID NO: 3269390 - DNA, 25 bp, Homo sapien
ctcctcttccctatcataatccctg

SEQ ID NO: 3269391 - DNA, 25 bp, Homo sapien
cataaacattttgcatgaatttacc

SEQ ID NO: 3269392 - DNA, 25 bp, Homo sapien
gaaaccacctcacaatctctaacat

SEQ ID NO: 3269393 - DNA, 25 bp, Homo sapien
cacacgacgtgcaaactattagaaa

SEQ ID NO: 3269394 - DNA, 25 bp, Homo sapien
gagtaatccatgctttctcacatgt

SEQ ID NO: 3269395 - DNA, 25 bp, Homo sapien
tcctgagtgaggatagagtaatcca

SEQ ID NO: 3269396 - DNA, 25 bp, Homo sapien
tcaatatcctcatcactcatatcat

SEQ ID NO: 3269397 - DNA, 25 bp, Homo sapien
aatatcctcatcactcatatcatct

SEQ ID NO: 3269398 - DNA, 25 bp, Homo sapien
caatatcctcatcactcatatcatc

SEQ ID NO: 3269399 - DNA, 25 bp, Homo sapien
gctctgatgtcgttcattaattcct

SEQ ID NO: 3269400 - DNA, 25 bp, Homo sapien
ttccagtgtcctctatgtaccaaac

SEQ ID NO: 3269401 - DNA, 25 bp, Homo sapien
tctagtcacttgttcagttaagaaa

SEQ ID NO: 3269402 - DNA, 25 bp, Homo sapien
atttatggtttgggatttcagctct

SEQ ID NO: 3269403 - DNA, 25 bp, Homo sapien
gaagaatatggtgtgcttttaattt

SEQ ID NO: 3269404 - DNA, 25 bp, Homo sapien
ttgttcaagctgtttggacaaagcc

SEQ ID NO: 3269405 - DNA, 25 bp, Homo sapien
agaagaatatggtgtgcttttaatt

SEQ ID NO: 3269406 - DNA, 25 bp, Homo sapien
ttcaagctgtttggacaaagcccct

SEQ ID NO: 3269407 - DNA, 25 bp, Homo sapien
caagacatagacagtagaggaagat

SEQ ID NO: 3269408 - DNA, 25 bp, Homo sapien
tggagtaaactcaccaattgaaaga

SEQ ID NO: 3269409 - DNA, 25 bp, Homo sapien
tcatgataacctgaaatcaaaggga

SEQ ID NO: 3269410 - DNA, 25 bp, Homo sapien
tgaaagataatagagtggcagagtg

SEQ ID NO: 3269411 - DNA, 25 bp, Homo sapien
ggaagtctgcacatacccatagtaa

SEQ ID NO: 3269412 - DNA, 25 bp, Homo sapien
ggtatgaccctatgaaaccaggctt

SEQ ID NO: 3269413 - DNA, 25 bp, Homo sapien
tgatccacggcactcacagagagaa

SEQ ID NO: 3269414 - DNA, 25 bp, Homo sapien
gaatccagtgaggtgcgcagcgtta

SEQ ID NO: 3269415 - DNA, 25 bp, Homo sapien
cgtgagccagagtctaatctgattg

SEQ ID NO: 3269416 - DNA, 25 bp, Homo sapien
cagtggcccttcaggttgctaaaga

SEQ ID NO: 3269417 - DNA, 25 bp, Homo sapien
tgtgttacgtgagccagagtctaat

SEQ ID NO: 3269418 - DNA, 25 bp, Homo sapien
ggcccttcaggttgctaaagaccat

SEQ ID NO: 3269419 - DNA, 25 bp, Homo sapien
tgatgctggtgtgctctccttcgga

SEQ ID NO: 3269420 - DNA, 25 bp, Homo sapien
ttgttagatctgtagcatatgggcc

SEQ ID NO: 3269421 - DNA, 25 bp, Homo sapien
atatgggccaccatcgttccctgcg

SEQ ID NO: 3269422 - DNA, 25 bp, Homo sapien
ccaattggttgtcatagccatcctt

SEQ ID NO: 3269423 - DNA, 25 bp, Homo sapien
tacattcgcaagttaggtaagcaac

SEQ ID NO: 3269424 - DNA, 25 bp, Homo sapien
ggtaagcaacatgaagcgtagagcc

SEQ ID NO: 3269425 - DNA, 25 bp, Homo sapien
tctctctaatggaaagtgcaatagt

SEQ ID NO: 3269426 - DNA, 25 bp, Homo sapien
cagaggattctaagtgtatgtataa

SEQ ID NO: 3269427 - DNA, 25 bp, Homo sapien
tatccacattcatccaccttcacag

SEQ ID NO: 3269428 - DNA, 25 bp, Homo sapien
ttatccacattcatccaccttcaca

SEQ ID NO: 3269429 - DNA, 25 bp, Homo sapien
atccacattcatccaccttcacagc

SEQ ID NO: 3269430 - DNA, 25 bp, Homo sapien
ttaaagggattgtgtcaagtggtga

SEQ ID NO: 3269431 - DNA, 25 bp, Homo sapien
caaagtctgtaaactcagcaataca

SEQ ID NO: 3269432 - DNA, 25 bp, Homo sapien
tgagtgtttggatatccagaggccc

SEQ ID NO: 3269433 - DNA, 25 bp, Homo sapien
gcaatacagctactcggacatttgt

SEQ ID NO: 3269434 - DNA, 25 bp, Homo sapien
taaggtgtttggatgacactcagct

SEQ ID NO: 3269435 - DNA, 25 bp, Homo sapien
cagacaaagggtatgaaactccaga

SEQ ID NO: 3269436 - DNA, 25 bp, Homo sapien
tagtatgggacatgtttaaggtgtt

SEQ ID NO: 3269437 - DNA, 25 bp, Homo sapien
ggctcatattcatagtccaaatgga

SEQ ID NO: 3269438 - DNA, 25 bp, Homo sapien
ttgatccagccttaaaggaatcttt

SEQ ID NO: 3269439 - DNA, 25 bp, Homo sapien
gaatcttttctaatgttgttcctgg

SEQ ID NO: 3269440 - DNA, 25 bp, Homo sapien
ctgtaaaatcctttgatccagcctt

SEQ ID NO: 3269441 - DNA, 25 bp, Homo sapien
aaatcctttgatccagccttaaagg

SEQ ID NO: 3269442 - DNA, 25 bp, Homo sapien
ttttgaggtaaatggatggagtcag

SEQ ID NO: 3269443 - DNA, 25 bp, Homo sapien
ccaggagatccggaaaacaagggca

SEQ ID NO: 3269444 - DNA, 25 bp, Homo sapien
gcaggatgagaagtacaccaaaagc

SEQ ID NO: 3269445 - DNA, 25 bp, Homo sapien
gatccggaaaacaagggcaggatga

SEQ ID NO: 3269446 - DNA, 25 bp, Homo sapien
cctccaatggggatgttcctgaccc

SEQ ID NO: 3269447 - DNA, 25 bp, Homo sapien
gttaacacgcagcatattgagatat

SEQ ID NO: 3269448 - DNA, 25 bp, Homo sapien
caatggggatgttcctgacccttac

SEQ ID NO: 3269449 - DNA, 25 bp, Homo sapien
catattgagatatgaagggaaggca

SEQ ID NO: 3269450 - DNA, 25 bp, Homo sapien
atattcctcacttccggtggttctg

SEQ ID NO: 3269451 - DNA, 25 bp, Homo sapien
ctcacttccggtggttctgtctgct

SEQ ID NO: 3269452 - DNA, 25 bp, Homo sapien
aatctccaggcacatattcctcact

SEQ ID NO: 3269453 - DNA, 25 bp, Homo sapien
caattgcaatctccaggcacatatt

SEQ ID NO: 3269454 - DNA, 25 bp, Homo sapien
gccaactccagaatatcgagtttcc

SEQ ID NO: 3269455 - DNA, 25 bp, Homo sapien
ccaactccagaatatcgagtttcct

SEQ ID NO: 3269456 - DNA, 25 bp, Homo sapien
gcaggttttgaaggtgtgataagct

SEQ ID NO: 3269457 - DNA, 25 bp, Homo sapien
gcaactctgctcatagcaggttttg

SEQ ID NO: 3269458 - DNA, 25 bp, Homo sapien
aggtgtgataagctgagtaatttgg

SEQ ID NO: 3269459 - DNA, 25 bp, Homo sapien
tgctcatagcaggttttgaaggtgt

SEQ ID NO: 3269460 - DNA, 25 bp, Homo sapien
tgacagcaacaatgcacatttcctg

SEQ ID NO: 3269461 - DNA, 25 bp, Homo sapien
tcattaatgtgatatacagcctgtg

SEQ ID NO: 3269462 - DNA, 25 bp, Homo sapien
cgggagatgaacacatatcattaat

SEQ ID NO: 3269463 - DNA, 25 bp, Homo sapien
agcgtagagactggtgacagcaaca

SEQ ID NO: 3269464 - DNA, 25 bp, Homo sapien
ctttcagagcggtaaggtgcagact

SEQ ID NO: 3269465 - DNA, 25 bp, Homo sapien
tcttcacagataagtgcatttacac

SEQ ID NO: 3269466 - DNA, 25 bp, Homo sapien
atttacactgcaaagtatcccttcc

SEQ ID NO: 3269467 - DNA, 25 bp, Homo sapien
tcagagcggtaaggtgcagactttc

SEQ ID NO: 3269468 - DNA, 25 bp, Homo sapien
tctgtagtaacctttttcacagtat

SEQ ID NO: 3269469 - DNA, 25 bp, Homo sapien
taggttcctctgatttgtgcaaaat

SEQ ID NO: 3269470 - DNA, 25 bp, Homo sapien
tttttaggttcctctgatttgtgca

SEQ ID NO: 3269471 - DNA, 25 bp, Homo sapien
atattctgtagtaacctttttcaca

SEQ ID NO: 3269472 - DNA, 25 bp, Homo sapien
atcagactcctttctattgttccag

SEQ ID NO: 3269473 - DNA, 25 bp, Homo sapien
tattttccacaatcagactcctttc

SEQ ID NO: 3269474 - DNA, 25 bp, Homo sapien
ccagcaacacgtctgaggagagcac

SEQ ID NO: 3269475 - DNA, 25 bp, Homo sapien
ttctattgttccagcaacacgtctg

SEQ ID NO: 3269476 - DNA, 25 bp, Homo sapien
taattgatgaaaaagccagatggtg

SEQ ID NO: 3269477 - DNA, 25 bp, Homo sapien
ctaattgatgaaaaagccagatggt

SEQ ID NO: 3269478 - DNA, 25 bp, Homo sapien
tgatgaaaaagccagatggtgatac

SEQ ID NO: 3269479 - DNA, 25 bp, Homo sapien
tgaaaaagccagatggtgatactta

SEQ ID NO: 3269480 - DNA, 25 bp, Homo sapien
tcatgacccttgtagctgctctctc

SEQ ID NO: 3269481 - DNA, 25 bp, Homo sapien
tggaggcatgcctgagagccactga

SEQ ID NO: 3269482 - DNA, 25 bp, Homo sapien
gcctgaaatacagaaacctggaggc

SEQ ID NO: 3269483 - DNA, 25 bp, Homo sapien
ctttgtactgcagtggacggaccca

SEQ ID NO: 3269484 - DNA, 25 bp, Homo sapien
tctgcatgttgaccagtagaacatc

SEQ ID NO: 3269485 - DNA, 25 bp, Homo sapien
gagtggaagaagttaactgcattgc

SEQ ID NO: 3269486 - DNA, 25 bp, Homo sapien
gaagaagttaactgcattgcctgtt

SEQ ID NO: 3269487 - DNA, 25 bp, Homo sapien
ttttctgcatgttgaccagtagaac

SEQ ID NO: 3269488 - DNA, 25 bp, Homo sapien
tttgttctctgttgagtagcttcct

SEQ ID NO: 3269489 - DNA, 25 bp, Homo sapien
ttttgttctctgttgagtagcttcc

SEQ ID NO: 3269490 - DNA, 25 bp, Homo sapien
cttttctgtgtcatagggagatttg

SEQ ID NO: 3269491 - DNA, 25 bp, Homo sapien
ttttctgtgtcatagggagatttgt

SEQ ID NO: 3269492 - DNA, 25 bp, Homo sapien
gtagtggtgtgcactcatgactcac

SEQ ID NO: 3269493 - DNA, 25 bp, Homo sapien
agttcttatatctggtagaagaccc

SEQ ID NO: 3269494 - DNA, 25 bp, Homo sapien
ttatatctggtagaagaccctgtga

SEQ ID NO: 3269495 - DNA, 25 bp, Homo sapien
tcaaaagcatgaaagttcttatatc

SEQ ID NO: 3269496 - DNA, 25 bp, Homo sapien
gcatgaaagttcttatatctggtag

SEQ ID NO: 3269497 - DNA, 25 bp, Homo sapien
cgcttgtttacattcataaggcttt

SEQ ID NO: 3269498 - DNA, 25 bp, Homo sapien
ataaggcttttctccactgggtctt

SEQ ID NO: 3269499 - DNA, 25 bp, Homo sapien
tcataaggcttttctccactgggtc

SEQ ID NO: 3269500 - DNA, 25 bp, Homo sapien
gcttttctccactgggtctttccat

SEQ ID NO: 3269501 - DNA, 25 bp, Homo sapien
cactatgccctgagtcatttctgtt

SEQ ID NO: 3269502 - DNA, 25 bp, Homo sapien
taccactatgccctgagtcatttct

SEQ ID NO: 3269503 - DNA, 25 bp, Homo sapien
ctatgccctgagtcatttctgtttg

SEQ ID NO: 3269504 - DNA, 25 bp, Homo sapien
accactatgccctgagtcatttctg

SEQ ID NO: 3269505 - DNA, 25 bp, Homo sapien
tccacactagatcgtgaatcaagaa

SEQ ID NO: 3269506 - DNA, 25 bp, Homo sapien
cactagatcgtgaatcaagaaaggg

SEQ ID NO: 3269507 - DNA, 25 bp, Homo sapien
cacggctgctgataagtaacatacc

SEQ ID NO: 3269508 - DNA, 25 bp, Homo sapien
aggcacagtttgaagttttagcacg

SEQ ID NO: 3269509 - DNA, 25 bp, Homo sapien
taaattataggtttcgatgtcaatg

SEQ ID NO: 3269510 - DNA, 25 bp, Homo sapien
tgtcaatggcaaaatattgtttctc

SEQ ID NO: 3269511 - DNA, 25 bp, Homo sapien
tggtctgttaaattataggtttcga

SEQ ID NO: 3269512 - DNA, 25 bp, Homo sapien
ggtttcgatgtcaatggcaaaatat

SEQ ID NO: 3269513 - DNA, 25 bp, Homo sapien
tcaggagtgctgaaccaggacctgt

SEQ ID NO: 3269514 - DNA, 25 bp, Homo sapien
gagtgctgaaccaggacctgtgtct

SEQ ID NO: 3269515 - DNA, 25 bp, Homo sapien
atgggtcaggagtgctgaaccagga

SEQ ID NO: 3269516 - DNA, 25 bp, Homo sapien
ctgtgtctggcaattgagtaagagg

SEQ ID NO: 3269517 - DNA, 25 bp, Homo sapien
gccattagcctcaaggctgtatgta

SEQ ID NO: 3269518 - DNA, 25 bp, Homo sapien
tagcctcaaggctgtatgtaagttt

SEQ ID NO: 3269519 - DNA, 25 bp, Homo sapien
tagacagccattagcctcaaggctg

SEQ ID NO: 3269520 - DNA, 25 bp, Homo sapien
aaggctgtatgtaagtttgctccca

SEQ ID NO: 3269521 - DNA, 25 bp, Homo sapien
tatttgtcctgaacaaatctactat

SEQ ID NO: 3269522 - DNA, 25 bp, Homo sapien
ctactgatcatctccatctgattgt

SEQ ID NO: 3269523 - DNA, 25 bp, Homo sapien
tcacaggcaccttgttccaaactct

SEQ ID NO: 3269524 - DNA, 25 bp, Homo sapien
tctgattgttccatactatcttcca

SEQ ID NO: 3269525 - DNA, 25 bp, Homo sapien
gagtagcacatctcacgcatgtgca

SEQ ID NO: 3269526 - DNA, 25 bp, Homo sapien
ttgagagtagcacatctcacgcatg

SEQ ID NO: 3269527 - DNA, 25 bp, Homo sapien
gagagtagcacatctcacgcatgtg

SEQ ID NO: 3269528 - DNA, 25 bp, Homo sapien
gtttgagagtagcacatctcacgca

SEQ ID NO: 3269529 - DNA, 25 bp, Homo sapien
gacaagtcgaggacactcgttccaa

SEQ ID NO: 3269530 - DNA, 25 bp, Homo sapien
ttcagacaagtcgaggacactcgtt

SEQ ID NO: 3269531 - DNA, 25 bp, Homo sapien
caagtcgaggacactcgttccaaaa

SEQ ID NO: 3269532 - DNA, 25 bp, Homo sapien
cagacaagtcgaggacactcgttcc

SEQ ID NO: 3269533 - DNA, 25 bp, Homo sapien
attcaggccgcagattaatcacagg

SEQ ID NO: 3269534 - DNA, 25 bp, Homo sapien
ttttaccactggattcaggccgcag

SEQ ID NO: 3269535 - DNA, 25 bp, Homo sapien
aaagcaatcacatagcagcaattca

SEQ ID NO: 3269536 - DNA, 25 bp, Homo sapien
ccactggattcaggccgcagattaa

SEQ ID NO: 3269537 - DNA, 25 bp, Homo sapien
ggtcactaatgtcactccatgctgg

SEQ ID NO: 3269538 - DNA, 25 bp, Homo sapien
ccagtgtatcactaaaggattggtg

SEQ ID NO: 3269539 - DNA, 25 bp, Homo sapien
agaaaggtcactaatgtcactccat

SEQ ID NO: 3269540 - DNA, 25 bp, Homo sapien
ttaaaccagatccagtgtatcacta

SEQ ID NO: 3269541 - DNA, 25 bp, Homo sapien
tctcactcaaaacttgcagagtctt

SEQ ID NO: 3269542 - DNA, 25 bp, Homo sapien
cagagctccccgataccatttctca

SEQ ID NO: 3269543 - DNA, 25 bp, Homo sapien
ctcagagctccccgataccatttct

SEQ ID NO: 3269544 - DNA, 25 bp, Homo sapien
agagctccccgataccatttctcac

SEQ ID NO: 3269545 - DNA, 25 bp, Homo sapien
ccctgacgccagggcgatggtccgt

SEQ ID NO: 3269546 - DNA, 25 bp, Homo sapien
gtacagagcttaggccgcactgttg

SEQ ID NO: 3269547 - DNA, 25 bp, Homo sapien
gcagggagtgtcttcagtacagagc

SEQ ID NO: 3269548 - DNA, 25 bp, Homo sapien
gatggtccgtggcagaatctcccac

SEQ ID NO: 3269549 - DNA, 25 bp, Homo sapien
aggaattttaggattggcaattatt

SEQ ID NO: 3269550 - DNA, 25 bp, Homo sapien
tcctcattccttgggtttagcttca

SEQ ID NO: 3269551 - DNA, 25 bp, Homo sapien
tgtcctcattccttgggtttagctt

SEQ ID NO: 3269552 - DNA, 25 bp, Homo sapien
taggattggcaattattgtttctgt

SEQ ID NO: 3269553 - DNA, 25 bp, Homo sapien
catgcctgttggaacatttaactga

SEQ ID NO: 3269554 - DNA, 25 bp, Homo sapien
ccaaaagaagtgctaaacatgcctg

SEQ ID NO: 3269555 - DNA, 25 bp, Homo sapien
cttgtagatttaaagctgtagggcc

SEQ ID NO: 3269556 - DNA, 25 bp, Homo sapien
gcatatttgatagcactctgaagaa

SEQ ID NO: 3269557 - DNA, 25 bp, Homo sapien
caaatgaagcatggatgagttatct

SEQ ID NO: 3269558 - DNA, 25 bp, Homo sapien
tactctgcataggatcctctttgct

SEQ ID NO: 3269559 - DNA, 25 bp, Homo sapien
ctctgcataggatcctctttgctct

SEQ ID NO: 3269560 - DNA, 25 bp, Homo sapien
ttttactctgcataggatcctcttt

SEQ ID NO: 3269561 - DNA, 25 bp, Homo sapien
ctgcataggatcctctttgctcttc

SEQ ID NO: 3269562 - DNA, 25 bp, Homo sapien
ctaagcacagtcttttagtgaagtc

SEQ ID NO: 3269563 - DNA, 25 bp, Homo sapien
tttcccaaacgcagctgttgtcctt

SEQ ID NO: 3269564 - DNA, 25 bp, Homo sapien
tctaatgtgcattacatatggtcca

SEQ ID NO: 3269565 - DNA, 25 bp, Homo sapien
tatggtccattcattgtcttacaca

SEQ ID NO: 3269566 - DNA, 25 bp, Homo sapien
ctataggttgacagtgaataaaaaa

SEQ ID NO: 3269567 - DNA, 25 bp, Homo sapien
gtacgcttttgtggattaatcatca

SEQ ID NO: 3269568 - DNA, 25 bp, Homo sapien
aatgaaagacggcaaggctttattt

SEQ ID NO: 3269569 - DNA, 25 bp, Homo sapien
tcatcaaggtcaattgtgcagtcat

SEQ ID NO: 3269570 - DNA, 25 bp, Homo sapien
tttcttctagtcactatgttcttag

SEQ ID NO: 3269571 - DNA, 25 bp, Homo sapien
gttcttagagttatgagaatcttcc

SEQ ID NO: 3269572 - DNA, 25 bp, Homo sapien
tagtcactatgttcttagagttatg

SEQ ID NO: 3269573 - DNA, 25 bp, Homo sapien
cactatgttcttagagttatgagaa

SEQ ID NO: 3269574 - DNA, 25 bp, Homo sapien
caacgggtaattaatgtgcatctgt

SEQ ID NO: 3269575 - DNA, 25 bp, Homo sapien
ttagacaacgggtaattaatgtgca

SEQ ID NO: 3269576 - DNA, 25 bp, Homo sapien
taattaatgtgcatctgtgttaggc

SEQ ID NO: 3269577 - DNA, 25 bp, Homo sapien
gcatctgtgttaggctcctgggtac

SEQ ID NO: 3269578 - DNA, 25 bp, Homo sapien
tactagcaaatttatcaagccattt

SEQ ID NO: 3269579 - DNA, 25 bp, Homo sapien
caaatttatcaagccatttagcttc

SEQ ID NO: 3269580 - DNA, 25 bp, Homo sapien
ggtttactagcaaatttatcaagcc

SEQ ID NO: 3269581 - DNA, 25 bp, Homo sapien
cttcttggtttactagcaaatttat

SEQ ID NO: 3269582 - DNA, 25 bp, Homo sapien
tctttactgcctggttttatatccc

SEQ ID NO: 3269583 - DNA, 25 bp, Homo sapien
actgcctggttttatatccctctcc

SEQ ID NO: 3269584 - DNA, 25 bp, Homo sapien
ttcatctttactgcctggttttata

SEQ ID NO: 3269585 - DNA, 25 bp, Homo sapien
tactgcctggttttatatccctctc

SEQ ID NO: 3269586 - DNA, 25 bp, Homo sapien
tctcaggtgcttctccgtgttttgt

SEQ ID NO: 3269587 - DNA, 25 bp, Homo sapien
ttttgacctctagagtatctcccat

SEQ ID NO: 3269588 - DNA, 25 bp, Homo sapien
taagtcttcgtagtcgtacattttc

SEQ ID NO: 3269589 - DNA, 25 bp, Homo sapien
tcttactataagtcttcgtagtcgt

SEQ ID NO: 3269590 - DNA, 25 bp, Homo sapien
ttcctggaggcctgctttctgccct

SEQ ID NO: 3269591 - DNA, 25 bp, Homo sapien
agctgcagatgctgccactgcgact

SEQ ID NO: 3269592 - DNA, 25 bp, Homo sapien
tgcagatgctgccactgcgactgcc

SEQ ID NO: 3269593 - DNA, 25 bp, Homo sapien
tattctaaaagccccagttcctgga

SEQ ID NO: 3269594 - DNA, 25 bp, Homo sapien
ttcaccagaggttctaccagaaata

SEQ ID NO: 3269595 - DNA, 25 bp, Homo sapien
ttttgtccgtttggtctcagtgcac

SEQ ID NO: 3269596 - DNA, 25 bp, Homo sapien
cttcaccctcaattcaggcatgtga

SEQ ID NO: 3269597 - DNA, 25 bp, Homo sapien
cctcaattcaggcatgtgacttgtg

SEQ ID NO: 3269598 - DNA, 25 bp, Homo sapien
ttccgattttgtccgtttggtctca

SEQ ID NO: 3269599 - DNA, 25 bp, Homo sapien
taaaatttcccaagtgtcatgtctg

SEQ ID NO: 3269600 - DNA, 25 bp, Homo sapien
agtttcaaagctccacagccaaaag

SEQ ID NO: 3269601 - DNA, 25 bp, Homo sapien
tctggtcctgttaatagctgtgcac

SEQ ID NO: 3269602 - DNA, 25 bp, Homo sapien
caggcctaggaccagcactgcttag

SEQ ID NO: 3269603 - DNA, 25 bp, Homo sapien
ccctgaagggacccacaatgtggat

SEQ ID NO: 3269604 - DNA, 25 bp, Homo sapien
tcattgaagctgttcctgcaatctg

SEQ ID NO: 3269605 - DNA, 25 bp, Homo sapien
taacagctcttcaactttcacactg

SEQ ID NO: 3269606 - DNA, 25 bp, Homo sapien
tagcatgctgtgtaccccccagggt

SEQ ID NO: 3269607 - DNA, 25 bp, Homo sapien
tttatgcagagtattgtgctttctg

SEQ ID NO: 3269608 - DNA, 25 bp, Homo sapien
ctgctactctaattacagcttttat

SEQ ID NO: 3269609 - DNA, 25 bp, Homo sapien
agcttttatgcagagtattgtgctt

SEQ ID NO: 3269610 - DNA, 25 bp, Homo sapien
tctgctactctaattacagctttta

SEQ ID NO: 3269611 - DNA, 25 bp, Homo sapien
aatgcagtctacagaattcctgcca

SEQ ID NO: 3269612 - DNA, 25 bp, Homo sapien
actaatgcagtctacagaattcctg

SEQ ID NO: 3269613 - DNA, 25 bp, Homo sapien
ccactaatgcagtctacagaattcc

SEQ ID NO: 3269614 - DNA, 25 bp, Homo sapien
taatgcagtctacagaattcctgcc

SEQ ID NO: 3269615 - DNA, 25 bp, Homo sapien
ttctgcaccattgcctccaacaaag

SEQ ID NO: 3269616 - DNA, 25 bp, Homo sapien
caaagcttgcttagaaagacaggga

SEQ ID NO: 3269617 - DNA, 25 bp, Homo sapien
cttgatatgctgctgcaggctagaa

SEQ ID NO: 3269618 - DNA, 25 bp, Homo sapien
tgcttgatatgctgctgcaggctag

SEQ ID NO: 3269619 - DNA, 25 bp, Homo sapien
gaacatgtccacctttgtgcagatg

SEQ ID NO: 3269620 - DNA, 25 bp, Homo sapien
ttgccagcctgggagatgttcactg

SEQ ID NO: 3269621 - DNA, 25 bp, Homo sapien
gcttccagggagttgccatcacctg

SEQ ID NO: 3269622 - DNA, 25 bp, Homo sapien
gaacttgcaacttctgacacttcag

SEQ ID NO: 3269623 - DNA, 25 bp, Homo sapien
tatgcaacaggattcagcattttgt

SEQ ID NO: 3269624 - DNA, 25 bp, Homo sapien
cattttgtttgagtccgtggtgctt

SEQ ID NO: 3269625 - DNA, 25 bp, Homo sapien
cgtggtgcttattagaatgccatga

SEQ ID NO: 3269626 - DNA, 25 bp, Homo sapien
agttcaacgtatgcaacaggattca

SEQ ID NO: 3269627 - DNA, 25 bp, Homo sapien
tatgtacagattgatttgctgtcca

SEQ ID NO: 3269628 - DNA, 25 bp, Homo sapien
tttgctgtccaagaataaaactcat

SEQ ID NO: 3269629 - DNA, 25 bp, Homo sapien
cagattgatttgctgtccaagaata

SEQ ID NO: 3269630 - DNA, 25 bp, Homo sapien
tttgttatgtacagattgatttgct

SEQ ID NO: 3269631 - DNA, 25 bp, Homo sapien
tggccatagacccaatatacactgt

SEQ ID NO: 3269632 - DNA, 25 bp, Homo sapien
aacatggctgatagttcattggcca

SEQ ID NO: 3269633 - DNA, 25 bp, Homo sapien
caagtagtggtctagtgttgtatac

SEQ ID NO: 3269634 - DNA, 25 bp, Homo sapien
ggtaagagtctcctgtatgtataac

SEQ ID NO: 3269635 - DNA, 25 bp, Homo sapien
gtttacagtgaacatcatgtgagca

SEQ ID NO: 3269636 - DNA, 25 bp, Homo sapien
gtttgttgttgcaaatccaatccaa

SEQ ID NO: 3269637 - DNA, 25 bp, Homo sapien
tcatgtgagcatggagagtgagtat

SEQ ID NO: 3269638 - DNA, 25 bp, Homo sapien
caaatcgcatcattttttctgtcac

SEQ ID NO: 3269639 - DNA, 25 bp, Homo sapien
aaagaatgagttcatgtcctttgaa

SEQ ID NO: 3269640 - DNA, 25 bp, Homo sapien
acaaagaatgagttcatgtcctttg

SEQ ID NO: 3269641 - DNA, 25 bp, Homo sapien
agaatgagttcatgtcctttgaagg

SEQ ID NO: 3269642 - DNA, 25 bp, Homo sapien
ctataacaaagaatgagttcatgtc

SEQ ID NO: 3269643 - DNA, 25 bp, Homo sapien
caatgtcagtaggaacgacttcttc

SEQ ID NO: 3269644 - DNA, 25 bp, Homo sapien
gcagcacgcaggatcatgcagcaag

SEQ ID NO: 3269645 - DNA, 25 bp, Homo sapien
gaagcagttccaatacaatgtcagt

SEQ ID NO: 3269646 - DNA, 25 bp, Homo sapien
gacaccctgaccagaagactgagaa

SEQ ID NO: 3269647 - DNA, 25 bp, Homo sapien
atttgtcttccctgcaaaatgcctt

SEQ ID NO: 3269648 - DNA, 25 bp, Homo sapien
ggagatattgaatatgtgtttgttg

SEQ ID NO: 3269649 - DNA, 25 bp, Homo sapien
gcagttggaggagaacgatatttaa

SEQ ID NO: 3269650 - DNA, 25 bp, Homo sapien
gactggctacgaaatggaaatgtat

SEQ ID NO: 3269651 - DNA, 25 bp, Homo sapien
aagtatgagataaaactggggtctg

SEQ ID NO: 3269652 - DNA, 25 bp, Homo sapien
gtccaagcacatcaaacagcataga

SEQ ID NO: 3269653 - DNA, 25 bp, Homo sapien
ccaaggaacttatgcttgcactgaa

SEQ ID NO: 3269654 - DNA, 25 bp, Homo sapien
cactgaaatttaatggataagtatg

SEQ ID NO: 3269655 - DNA, 25 bp, Homo sapien
aagcatactgctcataggttacaca

SEQ ID NO: 3269656 - DNA, 25 bp, Homo sapien
ccaaaggatgtaagcagatgtgcgc

SEQ ID NO: 3269657 - DNA, 25 bp, Homo sapien
ccagggccgaccaacagaatgggat

SEQ ID NO: 3269658 - DNA, 25 bp, Homo sapien
ttccagaggatctagaccagggccg

SEQ ID NO: 3269659 - DNA, 25 bp, Homo sapien
ggtttccagcttgttaccactttgc

SEQ ID NO: 3269660 - DNA, 25 bp, Homo sapien
aacaactccttcatgagaattcagg

SEQ ID NO: 3269661 - DNA, 25 bp, Homo sapien
gcacttggctctcttcgtttaataa

SEQ ID NO: 3269662 - DNA, 25 bp, Homo sapien
gttgtaatttacagagccactctat

SEQ ID NO: 3269663 - DNA, 25 bp, Homo sapien
ttcttctaacttgggcttgagccat

SEQ ID NO: 3269664 - DNA, 25 bp, Homo sapien
tctgcaatttctcttagccctagta

SEQ ID NO: 3269665 - DNA, 25 bp, Homo sapien
ttctctgcaatttctcttagcccta

SEQ ID NO: 3269666 - DNA, 25 bp, Homo sapien
tgcaatttctcttagccctagtatt

SEQ ID NO: 3269667 - DNA, 25 bp, Homo sapien
tctctgcaatttctcttagccctag

SEQ ID NO: 3269668 - DNA, 25 bp, Homo sapien
ttattccgagtccaagtttgctgaa

SEQ ID NO: 3269669 - DNA, 25 bp, Homo sapien
caagtttgctgaaacattcactgga

SEQ ID NO: 3269670 - DNA, 25 bp, Homo sapien
cattcactggaataaggtagttttt

SEQ ID NO: 3269671 - DNA, 25 bp, Homo sapien
gctgaaacattcactggaataaggt

SEQ ID NO: 3269672 - DNA, 25 bp, Homo sapien
tcactaaaattaatatttgtgacag

SEQ ID NO: 3269673 - DNA, 25 bp, Homo sapien
tccttcactaaaattaatatttgtg

SEQ ID NO: 3269674 - DNA, 25 bp, Homo sapien
actaaaattaatatttgtgacaggc

SEQ ID NO: 3269675 - DNA, 25 bp, Homo sapien
taaaattaatatttgtgacaggcat

SEQ ID NO: 3269676 - DNA, 25 bp, Homo sapien
cattgccgcctttatctgcaactct

SEQ ID NO: 3269677 - DNA, 25 bp, Homo sapien
tatctgcaactctaatttgctgacc

SEQ ID NO: 3269678 - DNA, 25 bp, Homo sapien
gtttgatgactctcattgccgcctt

SEQ ID NO: 3269679 - DNA, 25 bp, Homo sapien
gcaactctaatttgctgaccccaca

SEQ ID NO: 3269680 - DNA, 25 bp, Homo sapien
taacgaaccattcgctaagacacag

SEQ ID NO: 3269681 - DNA, 25 bp, Homo sapien
aggtaaaatgtcactaacgaaccat

SEQ ID NO: 3269682 - DNA, 25 bp, Homo sapien
tgtcactaacgaaccattcgctaag

SEQ ID NO: 3269683 - DNA, 25 bp, Homo sapien
gaaccattcgctaagacacagatga

SEQ ID NO: 3269684 - DNA, 25 bp, Homo sapien
taattcaagagaagcgagtggcagg

SEQ ID NO: 3269685 - DNA, 25 bp, Homo sapien
aattcaagagaagcgagtggcagga

SEQ ID NO: 3269686 - DNA, 25 bp, Homo sapien
cttacagtcagtgtaaaaagggaat

SEQ ID NO: 3269687 - DNA, 25 bp, Homo sapien
ctgcggctttccttaacaagtgggc

SEQ ID NO: 3269688 - DNA, 25 bp, Homo sapien
tgcggctttccttaacaagtgggcc

SEQ ID NO: 3269689 - DNA, 25 bp, Homo sapien
catgcattgcaatggaagacacctc

SEQ ID NO: 3269690 - DNA, 25 bp, Homo sapien
ctagcctggacgagagtgtgagact

SEQ ID NO: 3269691 - DNA, 25 bp, Homo sapien
caccctggcattgataacactcttg

SEQ ID NO: 3269692 - DNA, 25 bp, Homo sapien
aacactcttgttcagtttgtccaaa

SEQ ID NO: 3269693 - DNA, 25 bp, Homo sapien
tatgtggcttagtaagtccgggcat

SEQ ID NO: 3269694 - DNA, 25 bp, Homo sapien
tagatatgtggcttagtaagtccgg

SEQ ID NO: 3269695 - DNA, 25 bp, Homo sapien
cagtagaacctactctatagatatg

SEQ ID NO: 3269696 - DNA, 25 bp, Homo sapien
cctactctatagatatgtggcttag

SEQ ID NO: 3269697 - DNA, 25 bp, Homo sapien
catctttgcttataagacaaactgc

SEQ ID NO: 3269698 - DNA, 25 bp, Homo sapien
tctcatggcaaattccacttctctc

SEQ ID NO: 3269699 - DNA, 25 bp, Homo sapien
tgtatcctacaccaacatctttgct

SEQ ID NO: 3269700 - DNA, 25 bp, Homo sapien
ctgcaaattgccataagcgtagatt

SEQ ID NO: 3269701 - DNA, 25 bp, Homo sapien
tggcttcttactagctaggtcagat

SEQ ID NO: 3269702 - DNA, 25 bp, Homo sapien
tatcctcacagcataatgctgctgc

SEQ ID NO: 3269703 - DNA, 25 bp, Homo sapien
tactagctaggtcagatatcctcac

SEQ ID NO: 3269704 - DNA, 25 bp, Homo sapien
agttcagtcctactggcttcttact

SEQ ID NO: 3269705 - DNA, 25 bp, Homo sapien
catttaaccccctgtggaccagaag

SEQ ID NO: 3269706 - DNA, 25 bp, Homo sapien
tctgccaagagagaaaggcgttcat

SEQ ID NO: 3269707 - DNA, 25 bp, Homo sapien
taggcagacctgttccagtgatgga

SEQ ID NO: 3269708 - DNA, 25 bp, Homo sapien
agtgttccatagtagtttgctaaat

SEQ ID NO: 3269709 - DNA, 25 bp, Homo sapien
tctccatagaaatgtttttgagggc

SEQ ID NO: 3269710 - DNA, 25 bp, Homo sapien
ccatagaaatgtttttgagggctga

SEQ ID NO: 3269711 - DNA, 25 bp, Homo sapien
aatctccatagaaatgtttttgagg

SEQ ID NO: 3269712 - DNA, 25 bp, Homo sapien
tccatagaaatgtttttgagggctg

SEQ ID NO: 3269713 - DNA, 25 bp, Homo sapien
aaggctttcagtccacttttcatct

SEQ ID NO: 3269714 - DNA, 25 bp, Homo sapien
caaacgaataacaaaggctttcagt

SEQ ID NO: 3269715 - DNA, 25 bp, Homo sapien
tgcagcatttagtcgaagtctaata

SEQ ID NO: 3269716 - DNA, 25 bp, Homo sapien
gttcactgcccaatatttcttggaa

SEQ ID NO: 3269717 - DNA, 25 bp, Homo sapien
tttaaagtattcaccttgttgggca

SEQ ID NO: 3269718 - DNA, 25 bp, Homo sapien
taacacgtagaatactttcagtgaa

SEQ ID NO: 3269719 - DNA, 25 bp, Homo sapien
ttaaagtattcaccttgttgggcat

SEQ ID NO: 3269720 - DNA, 25 bp, Homo sapien
ccttaatgttttgtctattaacacg

SEQ ID NO: 3269721 - DNA, 25 bp, Homo sapien
caaacttagagatatgaacctttcc

SEQ ID NO: 3269722 - DNA, 25 bp, Homo sapien
gtcttatcgatacaatggcaagaaa

SEQ ID NO: 3269723 - DNA, 25 bp, Homo sapien
tagagatatgaacctttccagaaat

SEQ ID NO: 3269724 - DNA, 25 bp, Homo sapien
tcctgttaaatatgctcctgtatgt

SEQ ID NO: 3269725 - DNA, 25 bp, Homo sapien
tctgcctgaaatgcaaccccgactg

SEQ ID NO: 3269726 - DNA, 25 bp, Homo sapien
ctgcctgaaatgcaaccccgactgc

SEQ ID NO: 3269727 - DNA, 25 bp, Homo sapien
ttcttctgttcaattatgcccacaa

SEQ ID NO: 3269728 - DNA, 25 bp, Homo sapien
aattgtcgccaatccagttatgtgg

SEQ ID NO: 3269729 - DNA, 25 bp, Homo sapien
tatgttcgctgtggtctccatgagt

SEQ ID NO: 3269730 - DNA, 25 bp, Homo sapien
ccagtcccattgtttaatatgttcg

SEQ ID NO: 3269731 - DNA, 25 bp, Homo sapien
ccatgagtgaggaattgtcgccaat

SEQ ID NO: 3269732 - DNA, 25 bp, Homo sapien
attatacaggacaccccaaatgctg

SEQ ID NO: 3269733 - DNA, 25 bp, Homo sapien
gctatctaggggttgccagttttta

SEQ ID NO: 3269734 - DNA, 25 bp, Homo sapien
gattggtgcggtttatagagcactg

SEQ ID NO: 3269735 - DNA, 25 bp, Homo sapien
cactgattggtgctttttacgagca

SEQ ID NO: 3269736 - DNA, 25 bp, Homo sapien
acttccacatctgtgttagtgcctg

SEQ ID NO: 3269737 - DNA, 25 bp, Homo sapien
aattacacttagaaagagctatgag

SEQ ID NO: 3269738 - DNA, 25 bp, Homo sapien
aacagccacaatagtgcgtttgcca

SEQ ID NO: 3269739 - DNA, 25 bp, Homo sapien
tgttagtgcctggtttggcagataa

SEQ ID NO: 3269740 - DNA, 25 bp, Homo sapien
cctgggcaggattattgggcatagc

SEQ ID NO: 3269741 - DNA, 25 bp, Homo sapien
gcaaaaacgctcatgtgccacaaag

SEQ ID NO: 3269742 - DNA, 25 bp, Homo sapien
tctgggagtggcatggcccgctttt

SEQ ID NO: 3269743 - DNA, 25 bp, Homo sapien
tccctagcagggagtaaagctgaac

SEQ ID NO: 3269744 - DNA, 25 bp, Homo sapien
aaaggtcctgattttgcctatgcta

SEQ ID NO: 3269745 - DNA, 25 bp, Homo sapien
gccagatgcacaaaggtcctgattt

SEQ ID NO: 3269746 - DNA, 25 bp, Homo sapien
ggtcctgattttgcctatgctagac

SEQ ID NO: 3269747 - DNA, 25 bp, Homo sapien
aaagccagatgcacaaaggtcctga

SEQ ID NO: 3269748 - DNA, 25 bp, Homo sapien
tttctttgctagaaattctgtcacc

SEQ ID NO: 3269749 - DNA, 25 bp, Homo sapien
tctttgctagaaattctgtcacctt

SEQ ID NO: 3269750 - DNA, 25 bp, Homo sapien
catttctttgctagaaattctgtca

SEQ ID NO: 3269751 - DNA, 25 bp, Homo sapien
tttgctagaaattctgtcacctttc

SEQ ID NO: 3269752 - DNA, 25 bp, Homo sapien
agagcctctatacatgtctttccag

SEQ ID NO: 3269753 - DNA, 25 bp, Homo sapien
gaccaatttgtgtgatggcttccga

SEQ ID NO: 3269754 - DNA, 25 bp, Homo sapien
tccagcgaagtagttgaccaatttg

SEQ ID NO: 3269755 - DNA, 25 bp, Homo sapien
tctctccatattgtctcagagcctc

SEQ ID NO: 3269756 - DNA, 25 bp, Homo sapien
ctgggcccagaaaatggcccagcat

SEQ ID NO: 3269757 - DNA, 25 bp, Homo sapien
tctgtctttgctctgagtacactgg

SEQ ID NO: 3269758 - DNA, 25 bp, Homo sapien
ctgggcagctgtctcattgttggag

SEQ ID NO: 3269759 - DNA, 25 bp, Homo sapien
ggtctgtctttgctctgagtacact

SEQ ID NO: 3269760 - DNA, 25 bp, Homo sapien
cagctgtctcattgttggagatttt

SEQ ID NO: 3269761 - DNA, 25 bp, Homo sapien
gcctacagatttcaatcatccctgc

SEQ ID NO: 3269762 - DNA, 25 bp, Homo sapien
tgaggacaacccatcaatataactg

SEQ ID NO: 3269763 - DNA, 25 bp, Homo sapien
cacctccaggaattgcagttgtctc

SEQ ID NO: 3269764 - DNA, 25 bp, Homo sapien
gcagcctcagtcttcaaccatctga

SEQ ID NO: 3269765 - DNA, 25 bp, Homo sapien
caaggtacaggattattgtccatgt

SEQ ID NO: 3269766 - DNA, 25 bp, Homo sapien
aacttctaaatttgtggctgttcac

SEQ ID NO: 3269767 - DNA, 25 bp, Homo sapien
tcaaagtggataaaagaataccatc

SEQ ID NO: 3269768 - DNA, 25 bp, Homo sapien
cacaggcaaggtacaggattattgt

SEQ ID NO: 3269769 - DNA, 25 bp, Homo sapien
tgtgagtaggtcaacatacagttac

SEQ ID NO: 3269770 - DNA, 25 bp, Homo sapien
agtgctaattcttacccaaaatgta

SEQ ID NO: 3269771 - DNA, 25 bp, Homo sapien
ctttaaggtagatcaatagggataa

SEQ ID NO: 3269772 - DNA, 25 bp, Homo sapien
gaaattatggagtggaaagttacaa

SEQ ID NO: 3269773 - DNA, 25 bp, Homo sapien
taatcccagatatgccaaagctgga

SEQ ID NO: 3269774 - DNA, 25 bp, Homo sapien
tggacagcagagcaggtgatcccac

SEQ ID NO: 3269775 - DNA, 25 bp, Homo sapien
ggaagcactcagatatcagggcaag

SEQ ID NO: 3269776 - DNA, 25 bp, Homo sapien
gacatcaggctgtagtttcaaatct

SEQ ID NO: 3269777 - DNA, 25 bp, Homo sapien
tgaaccatgattttgccatcacact

SEQ ID NO: 3269778 - DNA, 25 bp, Homo sapien
cagtgaaccatgattttgccatcac

SEQ ID NO: 3269779 - DNA, 25 bp, Homo sapien
aaccatgattttgccatcacactcc

SEQ ID NO: 3269780 - DNA, 25 bp, Homo sapien
gagaggtagtggttgcagtgaacca

SEQ ID NO: 3269781 - DNA, 25 bp, Homo sapien
tctctcagggtagaccagtggcatt

SEQ ID NO: 3269782 - DNA, 25 bp, Homo sapien
catttgatgcaactagcttctcggc

SEQ ID NO: 3269783 - DNA, 25 bp, Homo sapien
tcacatagcccttaagacaaacacc

SEQ ID NO: 3269784 - DNA, 25 bp, Homo sapien
tttcaagaaatagagtgtgccaggg

SEQ ID NO: 3269785 - DNA, 25 bp, Homo sapien
ttgcaaattcaagaggaagtgacct

SEQ ID NO: 3269786 - DNA, 25 bp, Homo sapien
tattgttggcattcgtgctaagcaa

SEQ ID NO: 3269787 - DNA, 25 bp, Homo sapien
agcaaagtatattaactgatgggtt

SEQ ID NO: 3269788 - DNA, 25 bp, Homo sapien
aaatctgctctatatgagagtaggc

SEQ ID NO: 3269789 - DNA, 25 bp, Homo sapien
ggtggatgagtagcttgagtctaag

SEQ ID NO: 3269790 - DNA, 25 bp, Homo sapien
gtggatgagtagcttgagtctaaga

SEQ ID NO: 3269791 - DNA, 25 bp, Homo sapien
tggatgagtagcttgagtctaagaa

SEQ ID NO: 3269792 - DNA, 25 bp, Homo sapien
aggtggatgagtagcttgagtctaa

SEQ ID NO: 3269793 - DNA, 25 bp, Homo sapien
tcctgctgctccctcatcagattca

SEQ ID NO: 3269794 - DNA, 25 bp, Homo sapien
ccagttgccatcctgctgctccctc

SEQ ID NO: 3269795 - DNA, 25 bp, Homo sapien
gccatcctgctgctccctcatcaga

SEQ ID NO: 3269796 - DNA, 25 bp, Homo sapien
cagttgccatcctgctgctccctca

SEQ ID NO: 3269797 - DNA, 25 bp, Homo sapien
aaaggagattccagggttacagagc

SEQ ID NO: 3269798 - DNA, 25 bp, Homo sapien
gatcagaagaactcctttaaagggc

SEQ ID NO: 3269799 - DNA, 25 bp, Homo sapien
catctggttccctccgagtagaaag

SEQ ID NO: 3269800 - DNA, 25 bp, Homo sapien
ggcggtgtagcctcttaactgtatt

SEQ ID NO: 3269801 - DNA, 25 bp, Homo sapien
ggtgaccttattcagatgtctggca

SEQ ID NO: 3269802 - DNA, 25 bp, Homo sapien
caatttgggctatgcgcagataaga

SEQ ID NO: 3269803 - DNA, 25 bp, Homo sapien
agtactgaggatgagcaatttgggc

SEQ ID NO: 3269804 - DNA, 25 bp, Homo sapien
tcttctttgggatcattcaggcagt

SEQ ID NO: 3269805 - DNA, 25 bp, Homo sapien
tatcctccaaaccagcaattccgct

SEQ ID NO: 3269806 - DNA, 25 bp, Homo sapien
aaatatgcacatatcctccaaacca

SEQ ID NO: 3269807 - DNA, 25 bp, Homo sapien
gcacatatcctccaaaccagcaatt

SEQ ID NO: 3269808 - DNA, 25 bp, Homo sapien
tatgcacatatcctccaaaccagca

SEQ ID NO: 3269809 - DNA, 25 bp, Homo sapien
tagaataagtagtgaagttacaagg

SEQ ID NO: 3269810 - DNA, 25 bp, Homo sapien
tcagtagtagaataagtagtgaagt

SEQ ID NO: 3269811 - DNA, 25 bp, Homo sapien
gaagaccacaatcactcaagggatg

SEQ ID NO: 3269812 - DNA, 25 bp, Homo sapien
tgttcctgcacagcggcattttgct

SEQ ID NO: 3269813 - DNA, 25 bp, Homo sapien
tgttaagttttagagcttcagtaaa

SEQ ID NO: 3269814 - DNA, 25 bp, Homo sapien
tgtccaggccagagtagagcaagtt

SEQ ID NO: 3269815 - DNA, 25 bp, Homo sapien
caaaacagtgacagtgagacacatt

SEQ ID NO: 3269816 - DNA, 25 bp, Homo sapien
tgacagtgagacacattgttaccca

SEQ ID NO: 3269817 - DNA, 25 bp, Homo sapien
cagagtagagcaagttcaccaagtt

SEQ ID NO: 3269818 - DNA, 25 bp, Homo sapien
gacaaagttatctcccatccaagag

SEQ ID NO: 3269819 - DNA, 25 bp, Homo sapien
gaagcatatattccgggtgcccact

SEQ ID NO: 3269820 - DNA, 25 bp, Homo sapien
tacaggacgcatataagcacactcc

SEQ ID NO: 3269821 - DNA, 25 bp, Homo sapien
gcaaccaatgcaagctttcaccagg

SEQ ID NO: 3269822 - DNA, 25 bp, Homo sapien
accactgctctagcgcttgctgtta

SEQ ID NO: 3269823 - DNA, 25 bp, Homo sapien
tgctctagcgcttgctgttagaaca

SEQ ID NO: 3269824 - DNA, 25 bp, Homo sapien
actgctctagcgcttgctgttagaa

SEQ ID NO: 3269825 - DNA, 25 bp, Homo sapien
gaccactgctctagcgcttgctgtt

SEQ ID NO: 3269826 - DNA, 25 bp, Homo sapien
tcactgaatgagatttagcgtttcc

SEQ ID NO: 3269827 - DNA, 25 bp, Homo sapien
tagcgtttccactaaggccctgata

SEQ ID NO: 3269828 - DNA, 25 bp, Homo sapien
aagtttttgaatcccgagacatagg

SEQ ID NO: 3269829 - DNA, 25 bp, Homo sapien
catattgttctttgcccgtgaatgc

SEQ ID NO: 3269830 - DNA, 25 bp, Homo sapien
gctccaaccatatggcttcccgagg

SEQ ID NO: 3269831 - DNA, 25 bp, Homo sapien
gagagcttgtatgctcacaagggtc

SEQ ID NO: 3269832 - DNA, 25 bp, Homo sapien
aagaggaggctgatgatcctgatcc

SEQ ID NO: 3269833 - DNA, 25 bp, Homo sapien
tcctgatccaatgggactgagctga

SEQ ID NO: 3269834 - DNA, 25 bp, Homo sapien
cttagaggtggaaataagccacctc

SEQ ID NO: 3269835 - DNA, 25 bp, Homo sapien
caaagtctcaacacaggttctgggc

SEQ ID NO: 3269836 - DNA, 25 bp, Homo sapien
gaaccaagtggcctagccagaggca

SEQ ID NO: 3269837 - DNA, 25 bp, Homo sapien
tgcaagcctgagtcccaacctcagg

SEQ ID NO: 3269838 - DNA, 25 bp, Homo sapien
acttgctggcccagtttgggcacag

SEQ ID NO: 3269839 - DNA, 25 bp, Homo sapien
cttggttaaatgaatggtgagagat

SEQ ID NO: 3269840 - DNA, 25 bp, Homo sapien
ctcctgtccctgcaggtagtgaatg

SEQ ID NO: 3269841 - DNA, 25 bp, Homo sapien
ggcacagggatactacttggttaaa

SEQ ID NO: 3269842 - DNA, 25 bp, Homo sapien
gacagcatcttgtcaatgcagggca

SEQ ID NO: 3269843 - DNA, 25 bp, Homo sapien
gagttcacccttcagctcatgggcc

SEQ ID NO: 3269844 - DNA, 25 bp, Homo sapien
tagagttcacccttcagctcatggg

SEQ ID NO: 3269845 - DNA, 25 bp, Homo sapien
agtagagttcacccttcagctcatg

SEQ ID NO: 3269846 - DNA, 25 bp, Homo sapien
gagacagttgttcagaatagaaagg

SEQ ID NO: 3269847 - DNA, 25 bp, Homo sapien
tgtttactcaaaataaatgagatgt

SEQ ID NO: 3269848 - DNA, 25 bp, Homo sapien
tagcccttatctctcacacttgaaa

SEQ ID NO: 3269849 - DNA, 25 bp, Homo sapien
acttgaaaaatggagacagttgttc

SEQ ID NO: 3269850 - DNA, 25 bp, Homo sapien
aactccagtggtttttaggcagcca

SEQ ID NO: 3269851 - DNA, 25 bp, Homo sapien
gacagtgcaatcagcatccaggcca

SEQ ID NO: 3269852 - DNA, 25 bp, Homo sapien
tgtgtacacaacctctccaatgcag

SEQ ID NO: 3269853 - DNA, 25 bp, Homo sapien
gactgaccacctaagtaacccaatg

SEQ ID NO: 3269854 - DNA, 25 bp, Homo sapien
aaatctgctcatcctgtaattcttt

SEQ ID NO: 3269855 - DNA, 25 bp, Homo sapien
caaaatctgctcatcctgtaattct

SEQ ID NO: 3269856 - DNA, 25 bp, Homo sapien
catcctgtaattcttttggaagggt

SEQ ID NO: 3269857 - DNA, 25 bp, Homo sapien
ttcaaaatctgctcatcctgtaatt

SEQ ID NO: 3269858 - DNA, 25 bp, Homo sapien
tgggccaccatggaagctctctcct

SEQ ID NO: 3269859 - DNA, 25 bp, Homo sapien
gcctttatggccttttggttgccca

SEQ ID NO: 3269860 - DNA, 25 bp, Homo sapien
gaagtttatcgtccttgtgctccag

SEQ ID NO: 3269861 - DNA, 25 bp, Homo sapien
cctccaggcagttgaaactccgatg

SEQ ID NO: 3269862 - DNA, 25 bp, Homo sapien
taagctagagtccacggactcttta

SEQ ID NO: 3269863 - DNA, 25 bp, Homo sapien
ttaagctagagtccacggactcttt

SEQ ID NO: 3269864 - DNA, 25 bp, Homo sapien
gtccacggactctttatcacacttt

SEQ ID NO: 3269865 - DNA, 25 bp, Homo sapien
tagagtccacggactctttatcaca

SEQ ID NO: 3269866 - DNA, 25 bp, Homo sapien
tttcttgctgtatgtgattattacc

SEQ ID NO: 3269867 - DNA, 25 bp, Homo sapien
atgaagtaattaatgacctaatcac

SEQ ID NO: 3269868 - DNA, 25 bp, Homo sapien
aaaaggtataaggttattcatactg

SEQ ID NO: 3269869 - DNA, 25 bp, Homo sapien
tgacctaatcacattatgacacagg

SEQ ID NO: 3269870 - DNA, 25 bp, Homo sapien
agctggtggccatatatcatattca

SEQ ID NO: 3269871 - DNA, 25 bp, Homo sapien
ttcccctcatgctgtataggaatca

SEQ ID NO: 3269872 - DNA, 25 bp, Homo sapien
cagaggcaaacctccaattttggga

SEQ ID NO: 3269873 - DNA, 25 bp, Homo sapien
gctgtataggaatcagaggcaaacc

SEQ ID NO: 3269874 - DNA, 25 bp, Homo sapien
gaagcatttaccttagttccgcaaa

SEQ ID NO: 3269875 - DNA, 25 bp, Homo sapien
tgtgcatcgtatctacccttgaatg

SEQ ID NO: 3269876 - DNA, 25 bp, Homo sapien
tatgacgtaaacacagaataccgag

SEQ ID NO: 3269877 - DNA, 25 bp, Homo sapien
ccagggtagattaactttccagaat

SEQ ID NO: 3269878 - DNA, 25 bp, Homo sapien
ctgggcaataaagatactggtcatc

SEQ ID NO: 3269879 - DNA, 25 bp, Homo sapien
aataaagatactggtcatccactcc

SEQ ID NO: 3269880 - DNA, 25 bp, Homo sapien
ggcaataaagatactggtcatccac

SEQ ID NO: 3269881 - DNA, 25 bp, Homo sapien
tgggcaataaagatactggtcatcc

SEQ ID NO: 3269882 - DNA, 25 bp, Homo sapien
gagttcgtgaactatcacaacacag

SEQ ID NO: 3269883 - DNA, 25 bp, Homo sapien
ctgagttcgtgaactatcacaacac

SEQ ID NO: 3269884 - DNA, 25 bp, Homo sapien
tcgtgaactatcacaacacaggtgc

SEQ ID NO: 3269885 - DNA, 25 bp, Homo sapien
gttcgtgaactatcacaacacaggt

SEQ ID NO: 3269886 - DNA, 25 bp, Homo sapien
tctgctgagtgatttggtgatcaaa

SEQ ID NO: 3269887 - DNA, 25 bp, Homo sapien
tcacaaaagtggaacatttcagtac

SEQ ID NO: 3269888 - DNA, 25 bp, Homo sapien
gactgttctctagtgtatctgctga

SEQ ID NO: 3269889 - DNA, 25 bp, Homo sapien
tctgggtctctcctgattaatgacg

SEQ ID NO: 3269890 - DNA, 25 bp, Homo sapien
tgcacatcctcataagagcagatct

SEQ ID NO: 3269891 - DNA, 25 bp, Homo sapien
acactgtattccactaaaattctga

SEQ ID NO: 3269892 - DNA, 25 bp, Homo sapien
tcaagtacctgatggtaaaacactg

SEQ ID NO: 3269893 - DNA, 25 bp, Homo sapien
actgaagcctttggtaagtgctgca

SEQ ID NO: 3269894 - DNA, 25 bp, Homo sapien
ttattgaaagactaactaaaacaga

SEQ ID NO: 3269895 - DNA, 25 bp, Homo sapien
tattaggggagctaagcatatagac

SEQ ID NO: 3269896 - DNA, 25 bp, Homo sapien
gagtgcaaacatagaaaccacagac

SEQ ID NO: 3269897 - DNA, 25 bp, Homo sapien
tgcatatccaataacagtgattaag

SEQ ID NO: 3269898 - DNA, 25 bp, Homo sapien
tttctcagaatatgcggtcaatccc

SEQ ID NO: 3269899 - DNA, 25 bp, Homo sapien
tgtttctcagaatatgcggtcaatc

SEQ ID NO: 3269900 - DNA, 25 bp, Homo sapien
tgatgtttctcagaatatgcggtca

SEQ ID NO: 3269901 - DNA, 25 bp, Homo sapien
ttctcagaatatgcggtcaatcccc

SEQ ID NO: 3269902 - DNA, 25 bp, Homo sapien
tttcactccacgataaaacttcatg

SEQ ID NO: 3269903 - DNA, 25 bp, Homo sapien
tttttcactccacgataaaacttca

SEQ ID NO: 3269904 - DNA, 25 bp, Homo sapien
ttttcactccacgataaaacttcat

SEQ ID NO: 3269905 - DNA, 25 bp, Homo sapien
ttcactccacgataaaacttcatgg

SEQ ID NO: 3269906 - DNA, 25 bp, Homo sapien
atttccagatagtattttggatggt

SEQ ID NO: 3269907 - DNA, 25 bp, Homo sapien
aaacttatttccagatagtattttg

SEQ ID NO: 3269908 - DNA, 25 bp, Homo sapien
tatgttatttatacggttggccctc

SEQ ID NO: 3269909 - DNA, 25 bp, Homo sapien
gatgccgcatctgtcaattcaacca

SEQ ID NO: 3269910 - DNA, 25 bp, Homo sapien
tacatgagaagacaccaaactgggc

SEQ ID NO: 3269911 - DNA, 25 bp, Homo sapien
ttcttaggataagccaagtatgccc

SEQ ID NO: 3269912 - DNA, 25 bp, Homo sapien
gaatctcttcaccaccaggtaagca

SEQ ID NO: 3269913 - DNA, 25 bp, Homo sapien
tgcagtgtttaattgtgtcagcggt

SEQ ID NO: 3269914 - DNA, 25 bp, Homo sapien
gcacctgctccagtacattttcctt

SEQ ID NO: 3269915 - DNA, 25 bp, Homo sapien
gctaatgaactccaccgaagcacct

SEQ ID NO: 3269916 - DNA, 25 bp, Homo sapien
tgaggcccttcagcaattaaatttc

SEQ ID NO: 3269917 - DNA, 25 bp, Homo sapien
taaatgaggcccttcagcaattaaa

SEQ ID NO: 3269918 - DNA, 25 bp, Homo sapien
gaagcctatttaaatgaggcccttc

SEQ ID NO: 3269919 - DNA, 25 bp, Homo sapien
cctatttaaatgaggcccttcagca

SEQ ID NO: 3269920 - DNA, 25 bp, Homo sapien
cacttcagttgaaaaggcttttgtg

SEQ ID NO: 3269921 - DNA, 25 bp, Homo sapien
ggagtttgatccacatcaactgcac

SEQ ID NO: 3269922 - DNA, 25 bp, Homo sapien
tgccccacttcagttgaaaaggctt

SEQ ID NO: 3269923 - DNA, 25 bp, Homo sapien
aaggcttttgtggagtttgatccac

SEQ ID NO: 3269924 - DNA, 25 bp, Homo sapien
cttctgcttccatcacaggagatat

SEQ ID NO: 3269925 - DNA, 25 bp, Homo sapien
caatgacttcaaatgtggcccaaat

SEQ ID NO: 3269926 - DNA, 25 bp, Homo sapien
caaatatcaccttttgtaggaataa

SEQ ID NO: 3269927 - DNA, 25 bp, Homo sapien
atatcattagttaattcttctgctt

SEQ ID NO: 3269928 - DNA, 25 bp, Homo sapien
tgagaaacccacttgtgaaacaggc

SEQ ID NO: 3269929 - DNA, 25 bp, Homo sapien
caccaagcagtatggagtagttgaa

SEQ ID NO: 3269930 - DNA, 25 bp, Homo sapien
aaaaaacttgttatagcatctagga

SEQ ID NO: 3269931 - DNA, 25 bp, Homo sapien
tcactgcaggtaactcgcaaagtct

SEQ ID NO: 3269932 - DNA, 25 bp, Homo sapien
tcctttctacatatacttcaattaa

SEQ ID NO: 3269933 - DNA, 25 bp, Homo sapien
ccgaattataatactacagtcgggt

SEQ ID NO: 3269934 - DNA, 25 bp, Homo sapien
cctttctacatatacttcaattaac

SEQ ID NO: 3269935 - DNA, 25 bp, Homo sapien
cgaattataatactacagtcgggtt

SEQ ID NO: 3269936 - DNA, 25 bp, Homo sapien
gtccatttgtttgacttgatcttct

SEQ ID NO: 3269937 - DNA, 25 bp, Homo sapien
ttgggtgtctttccacttggtaata

SEQ ID NO: 3269938 - DNA, 25 bp, Homo sapien
tttctatgtccatttgtttgacttg

SEQ ID NO: 3269939 - DNA, 25 bp, Homo sapien
tccacttggtaataaagctattttc

SEQ ID NO: 3269940 - DNA, 25 bp, Homo sapien
tcactagtttgtcccttcgtttgaa

SEQ ID NO: 3269941 - DNA, 25 bp, Homo sapien
ccaaggccaaattatgggcattcat

SEQ ID NO: 3269942 - DNA, 25 bp, Homo sapien
aacaggatgaaaagaccaaggccaa

SEQ ID NO: 3269943 - DNA, 25 bp, Homo sapien
ttaggtcctcaattacattcacttc

SEQ ID NO: 3269944 - DNA, 25 bp, Homo sapien
tatacaggtgttcaatgatagctgc

SEQ ID NO: 3269945 - DNA, 25 bp, Homo sapien
ggtgttcaatgatagctgctagtgt

SEQ ID NO: 3269946 - DNA, 25 bp, Homo sapien
tgacccctggaagagaacgtataaa

SEQ ID NO: 3269947 - DNA, 25 bp, Homo sapien
ctgctagtgttgctcggttgacccc

SEQ ID NO: 3269948 - DNA, 25 bp, Homo sapien
caagctgatgttttccagccctcaa

SEQ ID NO: 3269949 - DNA, 25 bp, Homo sapien
tctccaggagttcacttatatgcaa

SEQ ID NO: 3269950 - DNA, 25 bp, Homo sapien
tccaatatgggtagagctccttagt

SEQ ID NO: 3269951 - DNA, 25 bp, Homo sapien
aaacttttcaacacagccgtcacat

SEQ ID NO: 3269952 - DNA, 25 bp, Homo sapien
ccaacttggtatgcccatggatgta

SEQ ID NO: 3269953 - DNA, 25 bp, Homo sapien
gctgctgatcttgtaaagcattacc

SEQ ID NO: 3269954 - DNA, 25 bp, Homo sapien
tacagctgttcactataatgggaac

SEQ ID NO: 3269955 - DNA, 25 bp, Homo sapien
tcaattgcagtatgccagactgtga

SEQ ID NO: 3269956 - DNA, 25 bp, Homo sapien
ctaccaagagtaaaacatccagttt

SEQ ID NO: 3269957 - DNA, 25 bp, Homo sapien
ttctaccaagagtaaaacatccagt

SEQ ID NO: 3269958 - DNA, 25 bp, Homo sapien
ttttctaccaagagtaaaacatcca

SEQ ID NO: 3269959 - DNA, 25 bp, Homo sapien
ccattttgaaccattgtgctgattg

SEQ ID NO: 3269960 - DNA, 25 bp, Homo sapien
aatgcaagctggatttgtccatagc

SEQ ID NO: 3269961 - DNA, 25 bp, Homo sapien
taagtgcattctatctccctgaact

SEQ ID NO: 3269962 - DNA, 25 bp, Homo sapien
cagtctttgtagaagagttgaccaa

SEQ ID NO: 3269963 - DNA, 25 bp, Homo sapien
tgtccatagcaaaccagccttttct

SEQ ID NO: 3269964 - DNA, 25 bp, Homo sapien
taagttttcagcaaataagggaaca

SEQ ID NO: 3269965 - DNA, 25 bp, Homo sapien
acacacgttcggagggtaagtagat

SEQ ID NO: 3269966 - DNA, 25 bp, Homo sapien
cacgttcggagggtaagtagatctc

SEQ ID NO: 3269967 - DNA, 25 bp, Homo sapien
cgttcggagggtaagtagatctcaa

SEQ ID NO: 3269968 - DNA, 25 bp, Homo sapien
ttcggagggtaagtagatctcaaag

SEQ ID NO: 3269969 - DNA, 25 bp, Homo sapien
taacttcaaatggtcccagtcacac

SEQ ID NO: 3269970 - DNA, 25 bp, Homo sapien
ctaacttcaaatggtcccagtcaca

SEQ ID NO: 3269971 - DNA, 25 bp, Homo sapien
tttctaacttcaaatggtcccagtc

SEQ ID NO: 3269972 - DNA, 25 bp, Homo sapien
ttgatttactctgaccaactgttca

SEQ ID NO: 3269973 - DNA, 25 bp, Homo sapien
tcattgatattaatggtgccattag

SEQ ID NO: 3269974 - DNA, 25 bp, Homo sapien
aatggtgccattaggtgtggtagac

SEQ ID NO: 3269975 - DNA, 25 bp, Homo sapien
ccagtatttaaatagaagtcctctt

SEQ ID NO: 3269976 - DNA, 25 bp, Homo sapien
tgtggtagacttatcattttcatag

SEQ ID NO: 3269977 - DNA, 25 bp, Homo sapien
caaagataagcctcttttttggaga

SEQ ID NO: 3269978 - DNA, 25 bp, Homo sapien
taagacaatcaaagaataccctgcc

SEQ ID NO: 3269979 - DNA, 25 bp, Homo sapien
ttgaagggaagctagggtaaataca

SEQ ID NO: 3269980 - DNA, 25 bp, Homo sapien
gctcactttcgtattacctaaaatg

SEQ ID NO: 3269981 - DNA, 25 bp, Homo sapien
ctggctgtcacgctttgaccaaagc

SEQ ID NO: 3269982 - DNA, 25 bp, Homo sapien
cgctttgaccaaagccaaagtgctc

SEQ ID NO: 3269983 - DNA, 25 bp, Homo sapien
aaggataaaaatgctcggccattct

SEQ ID NO: 3269984 - DNA, 25 bp, Homo sapien
attctactgtcatctggctgtcacg

SEQ ID NO: 3269985 - DNA, 25 bp, Homo sapien
ggaagactcttgacttaatacaccc

SEQ ID NO: 3269986 - DNA, 25 bp, Homo sapien
tggactgggaagactcttgacttaa

SEQ ID NO: 3269987 - DNA, 25 bp, Homo sapien
gaatgaatatcatgttgagggaaat

SEQ ID NO: 3269988 - DNA, 25 bp, Homo sapien
ttaatacaccctcggaatgaatatc

SEQ ID NO: 3269989 - DNA, 25 bp, Homo sapien
tcttggctagcagatagggggtgct

SEQ ID NO: 3269990 - DNA, 25 bp, Homo sapien
tatgcacggggtctccggtggcaca

SEQ ID NO: 3269991 - DNA, 25 bp, Homo sapien
ggtctccggtggcacacatgacatc

SEQ ID NO: 3269992 - DNA, 25 bp, Homo sapien
tccggtggcacacatgacatctgct

SEQ ID NO: 3269993 - DNA, 25 bp, Homo sapien
taataattatgccatgaattaggca

SEQ ID NO: 3269994 - DNA, 25 bp, Homo sapien
aagtctgtattccttttatcctaag

SEQ ID NO: 3269995 - DNA, 25 bp, Homo sapien
aagattctagctattaaaatgagtg

SEQ ID NO: 3269996 - DNA, 25 bp, Homo sapien
tcctaaggcggctaataataattat

SEQ ID NO: 3269997 - DNA, 25 bp, Homo sapien
ctcaagaatcttggcacatcattaa

SEQ ID NO: 3269998 - DNA, 25 bp, Homo sapien
tggcaacaagagttagcaggaaact

SEQ ID NO: 3269999 - DNA, 25 bp, Homo sapien
catttgcttccaaatcctcagattg

SEQ ID NO: 3270000 - DNA, 25 bp, Homo sapien
gaggaagaatttatgctcttttgac

SEQ ID NO: 3270001 - DNA, 25 bp, Homo sapien
taccagcccaaaagtcatttgctct

SEQ ID NO: 3270002 - DNA, 25 bp, Homo sapien
atccttttgaagattaccagcccaa

SEQ ID NO: 3270003 - DNA, 25 bp, Homo sapien
ctggtgagtccatatgtaattcttc

SEQ ID NO: 3270004 - DNA, 25 bp, Homo sapien
tttctactggtgagtccatatgtaa

SEQ ID NO: 3270005 - DNA, 25 bp, Homo sapien
cattgctccaaatgctagcatccat

SEQ ID NO: 3270006 - DNA, 25 bp, Homo sapien
tgagttcattgctccaaatgctagc

SEQ ID NO: 3270007 - DNA, 25 bp, Homo sapien
ctcgatgagttcattgctccaaatg

SEQ ID NO: 3270008 - DNA, 25 bp, Homo sapien
tcattgctccaaatgctagcatcca

SEQ ID NO: 3270009 - DNA, 25 bp, Homo sapien
cttttggtcctaaagatctatgctg

SEQ ID NO: 3270010 - DNA, 25 bp, Homo sapien
aatcttttggtcctaaagatctatg

SEQ ID NO: 3270011 - DNA, 25 bp, Homo sapien
atcttttggtcctaaagatctatgc

SEQ ID NO: 3270012 - DNA, 25 bp, Homo sapien
tcttttggtcctaaagatctatgct

SEQ ID NO: 3270013 - DNA, 25 bp, Homo sapien
cttaaaagcctgtaggaagagatga

SEQ ID NO: 3270014 - DNA, 25 bp, Homo sapien
caggcaatacagtacccagcaggta

SEQ ID NO: 3270015 - DNA, 25 bp, Homo sapien
tctgagttgaggcagcaggaaaata

SEQ ID NO: 3270016 - DNA, 25 bp, Homo sapien
gtaacctaggcatgacagattctga

SEQ ID NO: 3270017 - DNA, 25 bp, Homo sapien
agagagtgaataaatgacgaacatg

SEQ ID NO: 3270018 - DNA, 25 bp, Homo sapien
agtgaataaatgacgaacatgtatc

SEQ ID NO: 3270019 - DNA, 25 bp, Homo sapien
gagagtgaataaatgacgaacatgt

SEQ ID NO: 3270020 - DNA, 25 bp, Homo sapien
gagtgaataaatgacgaacatgtat

SEQ ID NO: 3270021 - DNA, 25 bp, Homo sapien
gacaacacagagattgatggatgcc

SEQ ID NO: 3270022 - DNA, 25 bp, Homo sapien
cagcttcaatccagtcttgtttctc

SEQ ID NO: 3270023 - DNA, 25 bp, Homo sapien
gaaccaaatcttctcagctacttca

SEQ ID NO: 3270024 - DNA, 25 bp, Homo sapien
gctcctgttggattcattgaaccaa

SEQ ID NO: 3270025 - DNA, 25 bp, Homo sapien
tgtttcacagttcggtccacttgct

SEQ ID NO: 3270026 - DNA, 25 bp, Homo sapien
cacagttcggtccacttgctttaca

SEQ ID NO: 3270027 - DNA, 25 bp, Homo sapien
aagattgtttcacagttcggtccac

SEQ ID NO: 3270028 - DNA, 25 bp, Homo sapien
ttcaaaagattgtttcacagttcgg

SEQ ID NO: 3270029 - DNA, 25 bp, Homo sapien
tcttccatgtgaaagaaacattgac

SEQ ID NO: 3270030 - DNA, 25 bp, Homo sapien
aaaatcagtctcactttaggtagcc

SEQ ID NO: 3270031 - DNA, 25 bp, Homo sapien
cttgacagttggactattgatagcg

SEQ ID NO: 3270032 - DNA, 25 bp, Homo sapien
gcactgggccaacttaagcttgaca

SEQ ID NO: 3270033 - DNA, 25 bp, Homo sapien
tcctgctggatgacatacccgttgg

SEQ ID NO: 3270034 - DNA, 25 bp, Homo sapien
gaataaatacgtggactgcatgtcc

SEQ ID NO: 3270035 - DNA, 25 bp, Homo sapien
gggcctggcctgtaagtcctgtatg

SEQ ID NO: 3270036 - DNA, 25 bp, Homo sapien
tactaagggcacacataatactctg

SEQ ID NO: 3270037 - DNA, 25 bp, Homo sapien
catttaatagtatgctgatccagtc

SEQ ID NO: 3270038 - DNA, 25 bp, Homo sapien
taacaacagcttgagactgcgaggt

SEQ ID NO: 3270039 - DNA, 25 bp, Homo sapien
tcgtttttgcaaagccacacactgt

SEQ ID NO: 3270040 - DNA, 25 bp, Homo sapien
cacatttctcaggtgtaacaacagc

SEQ ID NO: 3270041 - DNA, 25 bp, Homo sapien
tgtgttgtaacaacttcaaatttgt

SEQ ID NO: 3270042 - DNA, 25 bp, Homo sapien
tgaactcgtactgttgatatagcag

SEQ ID NO: 3270043 - DNA, 25 bp, Homo sapien
atatagcagaaaggggaattattcc

SEQ ID NO: 3270044 - DNA, 25 bp, Homo sapien
tctttgtgttgtaacaacttcaaat

SEQ ID NO: 3270045 - DNA, 25 bp, Homo sapien
actctccttatatctgtccattaaa

SEQ ID NO: 3270046 - DNA, 25 bp, Homo sapien
gaggtcctcatctcttcactgcagt

SEQ ID NO: 3270047 - DNA, 25 bp, Homo sapien
taactaaaaacgtgagaggtcctca

SEQ ID NO: 3270048 - DNA, 25 bp, Homo sapien
gagactaccttctactcaacctagg

SEQ ID NO: 3270049 - DNA, 25 bp, Homo sapien
caatggtagtgccagcaacagtttt

SEQ ID NO: 3270050 - DNA, 25 bp, Homo sapien
ctcattattgtagtaagaaatgcta

SEQ ID NO: 3270051 - DNA, 25 bp, Homo sapien
tctcattattgtagtaagaaatgct

SEQ ID NO: 3270052 - DNA, 25 bp, Homo sapien
gactctggaccttaatgcagcattg

SEQ ID NO: 3270053 - DNA, 25 bp, Homo sapien
catactgggacacagattagcacat

SEQ ID NO: 3270054 - DNA, 25 bp, Homo sapien
tagggactcaccacattagctactg

SEQ ID NO: 3270055 - DNA, 25 bp, Homo sapien
taatattcacgggactctgaccttc

SEQ ID NO: 3270056 - DNA, 25 bp, Homo sapien
ccacttgttgagcttaacggataac

SEQ ID NO: 3270057 - DNA, 25 bp, Homo sapien
taactgtgcctattaacggagtcca

SEQ ID NO: 3270058 - DNA, 25 bp, Homo sapien
gggagatattgcctgtgaagaaacg

SEQ ID NO: 3270059 - DNA, 25 bp, Homo sapien
tccataaaagcaggcatagggagat

SEQ ID NO: 3270060 - DNA, 25 bp, Homo sapien
taaaagagtttgttgcagtagctgc

SEQ ID NO: 3270061 - DNA, 25 bp, Homo sapien
tgttgcagtagctgcttcccctttg

SEQ ID NO: 3270062 - DNA, 25 bp, Homo sapien
tttgatgataaaagagtttgttgca

SEQ ID NO: 3270063 - DNA, 25 bp, Homo sapien
agtttgttgcagtagctgcttcccc

SEQ ID NO: 3270064 - DNA, 25 bp, Homo sapien
agatggaagatgaattctcctcatt

SEQ ID NO: 3270065 - DNA, 25 bp, Homo sapien
gaaaggtctctccataaggaaagat

SEQ ID NO: 3270066 - DNA, 25 bp, Homo sapien
cttggaattttctagtctctggaag

SEQ ID NO: 3270067 - DNA, 25 bp, Homo sapien
tctctggaagagaaaggtctctcca

SEQ ID NO: 3270068 - DNA, 25 bp, Homo sapien
ttttcagttgaggtagcaacatttc

SEQ ID NO: 3270069 - DNA, 25 bp, Homo sapien
tttttcagttgaggtagcaacattt

SEQ ID NO: 3270070 - DNA, 25 bp, Homo sapien
tttcagttgaggtagcaacatttct

SEQ ID NO: 3270071 - DNA, 25 bp, Homo sapien
tctctcacaaacactaaattgccac

SEQ ID NO: 3270072 - DNA, 25 bp, Homo sapien
gccaccttttatcttgtaactacta

SEQ ID NO: 3270073 - DNA, 25 bp, Homo sapien
ttgtaaacggtcatgttttctctca

SEQ ID NO: 3270074 - DNA, 25 bp, Homo sapien
attaacagagccttgtaaacggtca

SEQ ID NO: 3270075 - DNA, 25 bp, Homo sapien
gattggtgatgatggaacatacaag

SEQ ID NO: 3270076 - DNA, 25 bp, Homo sapien
gcagaaaagatcgagatggtcttga

SEQ ID NO: 3270077 - DNA, 25 bp, Homo sapien
tggtcttgaaaccaacttgctacga

SEQ ID NO: 3270078 - DNA, 25 bp, Homo sapien
acaggtcgatgtcttagcagaaaag

SEQ ID NO: 3270079 - DNA, 25 bp, Homo sapien
tcatctgattgaggatactggcttc

SEQ ID NO: 3270080 - DNA, 25 bp, Homo sapien
tcagaagatggaacatggtaatcct

SEQ ID NO: 3270081 - DNA, 25 bp, Homo sapien
aagtcgcgtttaggaggagacagct

SEQ ID NO: 3270082 - DNA, 25 bp, Homo sapien
tctaacagtctccaactgcggtggg

SEQ ID NO: 3270083 - DNA, 25 bp, Homo sapien
tgtttaagtatcctcctacggtgac

SEQ ID NO: 3270084 - DNA, 25 bp, Homo sapien
tacggtgacctgtaggtgatattcc

SEQ ID NO: 3270085 - DNA, 25 bp, Homo sapien
gatactgctccaaattaatgctcat

SEQ ID NO: 3270086 - DNA, 25 bp, Homo sapien
gctgcacagtccttcacagtagtaa

SEQ ID NO: 3270087 - DNA, 25 bp, Homo sapien
cagtgactgctttacctgcttaagc

SEQ ID NO: 3270088 - DNA, 25 bp, Homo sapien
ggcttttcctctatcaattgtgaca

SEQ ID NO: 3270089 - DNA, 25 bp, Homo sapien
tgagttacaaaaagtggcacgatga

SEQ ID NO: 3270090 - DNA, 25 bp, Homo sapien
cacacacacaagaagatgtacttct

SEQ ID NO: 3270091 - DNA, 25 bp, Homo sapien
tagttggatctgatattattgcata

SEQ ID NO: 3270092 - DNA, 25 bp, Homo sapien
gatattattgcatatccatgagcct

SEQ ID NO: 3270093 - DNA, 25 bp, Homo sapien
cacagtatccaagaatagttggatc

SEQ ID NO: 3270094 - DNA, 25 bp, Homo sapien
tacttctccacagtatccaagaata

SEQ ID NO: 3270095 - DNA, 25 bp, Homo sapien
gggcaaagttccatgggcctgtggg

SEQ ID NO: 3270096 - DNA, 25 bp, Homo sapien
ggcaaagttccatgggcctgtgggg

SEQ ID NO: 3270097 - DNA, 25 bp, Homo sapien
caatactgagcttgtaagtacaata

SEQ ID NO: 3270098 - DNA, 25 bp, Homo sapien
gataaatcaatactgagcttgtaag

SEQ ID NO: 3270099 - DNA, 25 bp, Homo sapien
aatcaatactgagcttgtaagtaca

SEQ ID NO: 3270100 - DNA, 25 bp, Homo sapien
gcagataaatcaatactgagcttgt

SEQ ID NO: 3270101 - DNA, 25 bp, Homo sapien
ggaagccaaatgatcgtaattaaag

SEQ ID NO: 3270102 - DNA, 25 bp, Homo sapien
taacaggccagtcgtcttaacgtgg

SEQ ID NO: 3270103 - DNA, 25 bp, Homo sapien
ccgtgtaaggtatcgggttcaggca

SEQ ID NO: 3270104 - DNA, 25 bp, Homo sapien
gacacccgggcaaattcatgatctc

SEQ ID NO: 3270105 - DNA, 25 bp, Homo sapien
ccacacgcgggagcgaaatccaagg

SEQ ID NO: 3270106 - DNA, 25 bp, Homo sapien
acaccagagccgagcactttgcgct

SEQ ID NO: 3270107 - DNA, 25 bp, Homo sapien
tggtttcctttcagacgcccacacg

SEQ ID NO: 3270108 - DNA, 25 bp, Homo sapien
cgctgaggaaatttacccggtgaag

SEQ ID NO: 3270109 - DNA, 25 bp, Homo sapien
cttgcgctcgggtcgcggagttcga

SEQ ID NO: 3270110 - DNA, 25 bp, Homo sapien
cggagttcgaaaagcgaggtgaggc

SEQ ID NO: 3270111 - DNA, 25 bp, Homo sapien
ctgggaagctcagcgccggcgtctc

SEQ ID NO: 3270112 - DNA, 25 bp, Homo sapien
agccttgggcgctcggtcctcgccc

SEQ ID NO: 3270113 - DNA, 25 bp, Homo sapien
gactgactcagaccgccgcgacttg

SEQ ID NO: 3270114 - DNA, 25 bp, Homo sapien
catagttgggtgactgactcagacc

SEQ ID NO: 3270115 - DNA, 25 bp, Homo sapien
tccctggttccgcagcatagttggg

SEQ ID NO: 3270116 - DNA, 25 bp, Homo sapien
gcgccttgctcaggtgctcccgcgc

SEQ ID NO: 3270117 - DNA, 25 bp, Homo sapien
ctcggcccggaggcgtcagaccccg

SEQ ID NO: 3270118 - DNA, 25 bp, Homo sapien
gcccggaggcgtcagaccccgctgg

SEQ ID NO: 3270119 - DNA, 25 bp, Homo sapien
cggcccggaggcgtcagaccccgct

SEQ ID NO: 3270120 - DNA, 25 bp, Homo sapien
ccggaggcgtcagaccccgctgggg

SEQ ID NO: 3270121 - DNA, 25 bp, Homo sapien
tgcatttccttcactccacatggct

SEQ ID NO: 3270122 - DNA, 25 bp, Homo sapien
tccttcactccacatggcttctgtg

SEQ ID NO: 3270123 - DNA, 25 bp, Homo sapien
gcatttccttcactccacatggctt

SEQ ID NO: 3270124 - DNA, 25 bp, Homo sapien
tttccttcactccacatggcttctg

SEQ ID NO: 3270125 - DNA, 25 bp, Homo sapien
ataaattaagtgtccccagaggcct

SEQ ID NO: 3270126 - DNA, 25 bp, Homo sapien
cagcttttaacatccctcttgggtc

SEQ ID NO: 3270127 - DNA, 25 bp, Homo sapien
cccagaggcctactgcaatcttctc

SEQ ID NO: 3270128 - DNA, 25 bp, Homo sapien
cagcagcttttaacatccctcttgg

SEQ ID NO: 3270129 - DNA, 25 bp, Homo sapien
caataggctctgctccagtagagga

SEQ ID NO: 3270130 - DNA, 25 bp, Homo sapien
catagccccatatatgatgcgctgg

SEQ ID NO: 3270131 - DNA, 25 bp, Homo sapien
ttcctccaaatacccgcaagtgctg

SEQ ID NO: 3270132 - DNA, 25 bp, Homo sapien
gagtgaattgtcaagaccccatgtg

SEQ ID NO: 3270133 - DNA, 25 bp, Homo sapien
gagagttgccctagaggtctttagt

SEQ ID NO: 3270134 - DNA, 25 bp, Homo sapien
aaaacagagtagtgcagtttcttca

SEQ ID NO: 3270135 - DNA, 25 bp, Homo sapien
ccccggcagagagtataatgtcttt

SEQ ID NO: 3270136 - DNA, 25 bp, Homo sapien
taggtctcaattgaaccagtgtggc

SEQ ID NO: 3270137 - DNA, 25 bp, Homo sapien
ctaattcttggcgatttgctcaaac

SEQ ID NO: 3270138 - DNA, 25 bp, Homo sapien
gcctttgcccatgattatagcacaa

SEQ ID NO: 3270139 - DNA, 25 bp, Homo sapien
caacattatcaatcatttgactgtc

SEQ ID NO: 3270140 - DNA, 25 bp, Homo sapien
catttgactgtccataggctgcctt

SEQ ID NO: 3270141 - DNA, 25 bp, Homo sapien
tgcttttgggaaccaaaggctctga

SEQ ID NO: 3270142 - DNA, 25 bp, Homo sapien
tgacatttgcatcatgagtgacagt

SEQ ID NO: 3270143 - DNA, 25 bp, Homo sapien
caatggcatttgctactcctaggag

SEQ ID NO: 3270144 - DNA, 25 bp, Homo sapien
ttttggtccccactttatatgcagg

SEQ ID NO: 3270145 - DNA, 25 bp, Homo sapien
ccaaacatccccagtaggtacaaag

SEQ ID NO: 3270146 - DNA, 25 bp, Homo sapien
ttatatccgcatggctaatagggtc

SEQ ID NO: 3270147 - DNA, 25 bp, Homo sapien
ggcagtaggtgtctagaagagagtc

SEQ ID NO: 3270148 - DNA, 25 bp, Homo sapien
ccttagtgctcatttgcctgtgaag

SEQ ID NO: 3270149 - DNA, 25 bp, Homo sapien
tgaagattggctgctatgatactaa

SEQ ID NO: 3270150 - DNA, 25 bp, Homo sapien
aaaatgaagccagtaattttgaggg

SEQ ID NO: 3270151 - DNA, 25 bp, Homo sapien
cataaaagtggctaaactgggagct

SEQ ID NO: 3270152 - DNA, 25 bp, Homo sapien
tctgcaaacctgctggctaaaacag

SEQ ID NO: 3270153 - DNA, 25 bp, Homo sapien
catgaaagggtagtagaatgtcctc

SEQ ID NO: 3270154 - DNA, 25 bp, Homo sapien
gtgtctttagtgtgccatataccag

SEQ ID NO: 3270155 - DNA, 25 bp, Homo sapien
tggaaacctttcagggaccattgag

SEQ ID NO: 3270156 - DNA, 25 bp, Homo sapien
tgggagaagcatactgggctacgct

SEQ ID NO: 3270157 - DNA, 25 bp, Homo sapien
tgatcagtaattaagcacacgaggc

SEQ ID NO: 3270158 - DNA, 25 bp, Homo sapien
tcttgtaaggtagtaagctccccat

SEQ ID NO: 3270159 - DNA, 25 bp, Homo sapien
aactcagggcatgggaatcatcgca

SEQ ID NO: 3270160 - DNA, 25 bp, Homo sapien
tgtggtggataagatgacccctcca

SEQ ID NO: 3270161 - DNA, 25 bp, Homo sapien
tcaagacagcttaaccccaagttgt

SEQ ID NO: 3270162 - DNA, 25 bp, Homo sapien
catttaggcctctttatccagggac

SEQ ID NO: 3270163 - DNA, 25 bp, Homo sapien
ctagggtggtgataatatgtagaag

SEQ ID NO: 3270164 - DNA, 25 bp, Homo sapien
tgttgtagtgtctagggtggtgata

SEQ ID NO: 3270165 - DNA, 25 bp, Homo sapien
tggtgataatatgtagaagatgttc

SEQ ID NO: 3270166 - DNA, 25 bp, Homo sapien
gttgttgtagtgtctagggtggtga

SEQ ID NO: 3270167 - DNA, 25 bp, Homo sapien
aggctgaagcaatactcctccctta

SEQ ID NO: 3270168 - DNA, 25 bp, Homo sapien
ccacacccagctagtagagacgggg

SEQ ID NO: 3270169 - DNA, 25 bp, Homo sapien
tgaagcaatactcctcccttagcct

SEQ ID NO: 3270170 - DNA, 25 bp, Homo sapien
gctgaagcaatactcctcccttagc

SEQ ID NO: 3270171 - DNA, 25 bp, Homo sapien
tatgagcaaatggtgtgggagtaac

SEQ ID NO: 3270172 - DNA, 25 bp, Homo sapien
tgctggacaccagggaccagcccat

SEQ ID NO: 3270173 - DNA, 25 bp, Homo sapien
tgctgctggacaccagggaccagcc

SEQ ID NO: 3270174 - DNA, 25 bp, Homo sapien
gctgctggacaccagggaccagccc

SEQ ID NO: 3270175 - DNA, 25 bp, Homo sapien
ctgctggacaccagggaccagccca

SEQ ID NO: 3270176 - DNA, 25 bp, Homo sapien
aggagtagagaagtttttatattct

SEQ ID NO: 3270177 - DNA, 25 bp, Homo sapien
catgattgcaggactaaaagttgtt

SEQ ID NO: 3270178 - DNA, 25 bp, Homo sapien
tgcgttggtgagtcaggagtagaga

SEQ ID NO: 3270179 - DNA, 25 bp, Homo sapien
aagttgttctggtgcgttggtgagt

SEQ ID NO: 3270180 - DNA, 25 bp, Homo sapien
agtggcaggatagaggagagaagga

SEQ ID NO: 3270181 - DNA, 25 bp, Homo sapien
cagattataggaagaacaggttccc

SEQ ID NO: 3270182 - DNA, 25 bp, Homo sapien
tcatggctagaaagtatcagggaca

SEQ ID NO: 3270183 - DNA, 25 bp, Homo sapien
tctgttaatcctaactgggctaggc

SEQ ID NO: 3270184 - DNA, 25 bp, Homo sapien
gccaagcgatgaactgtgcaaccca

SEQ ID NO: 3270185 - DNA, 25 bp, Homo sapien
tatgtcttctgtgctagtttcaacc

SEQ ID NO: 3270186 - DNA, 25 bp, Homo sapien
ccttcctctgcaacaggttatgctg

SEQ ID NO: 3270187 - DNA, 25 bp, Homo sapien
ggattgattgttcctgacacgcatc

SEQ ID NO: 3270188 - DNA, 25 bp, Homo sapien
cagtcaggaaatcttggtgccagga

SEQ ID NO: 3270189 - DNA, 25 bp, Homo sapien
tctccacaggttcctaagggcaatg

SEQ ID NO: 3270190 - DNA, 25 bp, Homo sapien
aagcagatagcctcaaagttgtcca

SEQ ID NO: 3270191 - DNA, 25 bp, Homo sapien
gctgaagcagatagcctcaaagttg

SEQ ID NO: 3270192 - DNA, 25 bp, Homo sapien
acaggttcctaagggcaatgctgaa

SEQ ID NO: 3270193 - DNA, 25 bp, Homo sapien
tcaagtgtccccaggtagcagtctc

SEQ ID NO: 3270194 - DNA, 25 bp, Homo sapien
ggtgaaatcaggctacacatcccac

SEQ ID NO: 3270195 - DNA, 25 bp, Homo sapien
cctagaagttcttccaggtgctctg

SEQ ID NO: 3270196 - DNA, 25 bp, Homo sapien
tagcagtctctgtatccttggacaa

SEQ ID NO: 3270197 - DNA, 25 bp, Homo sapien
cttccaccggtgagaacatgaccat

SEQ ID NO: 3270198 - DNA, 25 bp, Homo sapien
aatagattgcaagagagtgtttaag

SEQ ID NO: 3270199 - DNA, 25 bp, Homo sapien
tgcaagagagtgtttaagttcctct

SEQ ID NO: 3270200 - DNA, 25 bp, Homo sapien
ttccctgtagccatgagctgcagaa

SEQ ID NO: 3270201 - DNA, 25 bp, Homo sapien
acactcacttgttataacggttgcc

SEQ ID NO: 3270202 - DNA, 25 bp, Homo sapien
tacaacagaaatctgcaataatggc

SEQ ID NO: 3270203 - DNA, 25 bp, Homo sapien
cttgtacaacagaaatctgcaataa

SEQ ID NO: 3270204 - DNA, 25 bp, Homo sapien
agaaatctgcaataatggcagagga

SEQ ID NO: 3270205 - DNA, 25 bp, Homo sapien
aatctgcaataatggcagaggaaca

SEQ ID NO: 3270206 - DNA, 25 bp, Homo sapien
tcttttacccttaatctcatggcta

SEQ ID NO: 3270207 - DNA, 25 bp, Homo sapien
ttacccttaatctcatggctacaga

SEQ ID NO: 3270208 - DNA, 25 bp, Homo sapien
tcaaattcttttacccttaatctca

SEQ ID NO: 3270209 - DNA, 25 bp, Homo sapien
aattcttttacccttaatctcatgg

SEQ ID NO: 3270210 - DNA, 25 bp, Homo sapien
tccagtttatattcttatatttttc

SEQ ID NO: 3270211 - DNA, 25 bp, Homo sapien
cctttagaatttgcttttctccagt

SEQ ID NO: 3270212 - DNA, 25 bp, Homo sapien
tcatgtaacctctttcctttagaat

SEQ ID NO: 3270213 - DNA, 25 bp, Homo sapien
ttcctttagaatttgcttttctcca

SEQ ID NO: 3270214 - DNA, 25 bp, Homo sapien
caaggtagatcgcattctgggccat

SEQ ID NO: 3270215 - DNA, 25 bp, Homo sapien
gcccatagatccgttaacctagacg

SEQ ID NO: 3270216 - DNA, 25 bp, Homo sapien
gatgagttcactggcgattctacca

SEQ ID NO: 3270217 - DNA, 25 bp, Homo sapien
acaatgtatgccctcaggccgcagt

SEQ ID NO: 3270218 - DNA, 25 bp, Homo sapien
gctgctttgttgatagcttaatgcc

SEQ ID NO: 3270219 - DNA, 25 bp, Homo sapien
ccaaatccacttgagatttagttgc

SEQ ID NO: 3270220 - DNA, 25 bp, Homo sapien
ttgttgatagcttaatgccttctct

SEQ ID NO: 3270221 - DNA, 25 bp, Homo sapien
tagttgctacatctggctgtgtttt

SEQ ID NO: 3270222 - DNA, 25 bp, Homo sapien
caatagctgctaagatctctgccat

SEQ ID NO: 3270223 - DNA, 25 bp, Homo sapien
tgggacagtctacttcaccccctaa

SEQ ID NO: 3270224 - DNA, 25 bp, Homo sapien
cagtctacttcaccccctaattgtt

SEQ ID NO: 3270225 - DNA, 25 bp, Homo sapien
tcccaactgggacagtctacttcac

SEQ ID NO: 3270226 - DNA, 25 bp, Homo sapien
ttcccaactgggacagtctacttca

SEQ ID NO: 3270227 - DNA, 25 bp, Homo sapien
atgcctcttacgcagtcatcccagt

SEQ ID NO: 3270228 - DNA, 25 bp, Homo sapien
gtcctgaagatcagtgtcctactgg

SEQ ID NO: 3270229 - DNA, 25 bp, Homo sapien
tcctgaagatcagtgtcctactggc

SEQ ID NO: 3270230 - DNA, 25 bp, Homo sapien
tcagtgttgcttatgcctcttacgc

SEQ ID NO: 3270231 - DNA, 25 bp, Homo sapien
ctctttcaatgtcatcgcaggtcat

SEQ ID NO: 3270232 - DNA, 25 bp, Homo sapien
ctagtctctttcaatgtcatcgcag

SEQ ID NO: 3270233 - DNA, 25 bp, Homo sapien
gtctctttcaatgtcatcgcaggtc

SEQ ID NO: 3270234 - DNA, 25 bp, Homo sapien
tagtctctttcaatgtcatcgcagg

SEQ ID NO: 3270235 - DNA, 25 bp, Homo sapien
agttgttaaggctttctcttcacac

SEQ ID NO: 3270236 - DNA, 25 bp, Homo sapien
tggccagttgttaaggctttctctt

SEQ ID NO: 3270237 - DNA, 25 bp, Homo sapien
ctggccagttgttaaggctttctct

SEQ ID NO: 3270238 - DNA, 25 bp, Homo sapien
ccagttgttaaggctttctcttcac

SEQ ID NO: 3270239 - DNA, 25 bp, Homo sapien
catactgccgttgattagaaatgac

SEQ ID NO: 3270240 - DNA, 25 bp, Homo sapien
tgtgttccatgcagttagtagccct

SEQ ID NO: 3270241 - DNA, 25 bp, Homo sapien
tgctacagaatagaggtgcaatggc

SEQ ID NO: 3270242 - DNA, 25 bp, Homo sapien
taagaaatcctgtgcaaaactttcc

SEQ ID NO: 3270243 - DNA, 25 bp, Homo sapien
ccatagaacctgctttcaccacgat

SEQ ID NO: 3270244 - DNA, 25 bp, Homo sapien
tttcaccacgatgacaatttgtctc

SEQ ID NO: 3270245 - DNA, 25 bp, Homo sapien
gaccactccatagaacctgctttca

SEQ ID NO: 3270246 - DNA, 25 bp, Homo sapien
ttcggttcccgaccactccatagaa

SEQ ID NO: 3270247 - DNA, 25 bp, Homo sapien
gtagaaaattctcgcagaccagcca

SEQ ID NO: 3270248 - DNA, 25 bp, Homo sapien
aatgggcagactctcaagcaagaag

SEQ ID NO: 3270249 - DNA, 25 bp, Homo sapien
agaagtcaaagccactggtgggctc

SEQ ID NO: 3270250 - DNA, 25 bp, Homo sapien
ggtgggctcaagatcacaacgccat

SEQ ID NO: 3270251 - DNA, 25 bp, Homo sapien
agctcgttcttcgaatgcccagggt

SEQ ID NO: 3270252 - DNA, 25 bp, Homo sapien
aagcatttcctgtccatctcagcac

SEQ ID NO: 3270253 - DNA, 25 bp, Homo sapien
tacctgcaaagacatatgtgtcata

SEQ ID NO: 3270254 - DNA, 25 bp, Homo sapien
cctgcaaagacatatgtgtcataga

SEQ ID NO: 3270255 - DNA, 25 bp, Homo sapien
tgcaaagacatatgtgtcatagatt

SEQ ID NO: 3270256 - DNA, 25 bp, Homo sapien
acctgcaaagacatatgtgtcatag

SEQ ID NO: 3270257 - DNA, 25 bp, Homo sapien
ctttcatgacttcagcaaggcccat

SEQ ID NO: 3270258 - DNA, 25 bp, Homo sapien
gagggcctggtatgtctaacgcctt

SEQ ID NO: 3270259 - DNA, 25 bp, Homo sapien
cttgagattttcagagggcctggta

SEQ ID NO: 3270260 - DNA, 25 bp, Homo sapien
tttcagagggcctggtatgtctaac

SEQ ID NO: 3270261 - DNA, 25 bp, Homo sapien
gcctggtatgtctaacgcctttcat

SEQ ID NO: 3270262 - DNA, 25 bp, Homo sapien
tccatgtcctattaaattccccttc

SEQ ID NO: 3270263 - DNA, 25 bp, Homo sapien
cccttcagctcaccacttgttccca

SEQ ID NO: 3270264 - DNA, 25 bp, Homo sapien
ttcagctcaccacttgttcccaaag

SEQ ID NO: 3270265 - DNA, 25 bp, Homo sapien
atgtcctattaaattccccttcagc

SEQ ID NO: 3270266 - DNA, 25 bp, Homo sapien
ggctgcagtgaatgaaggtttgacc

SEQ ID NO: 3270267 - DNA, 25 bp, Homo sapien
gaatgaaggtttgacctggcctgga

SEQ ID NO: 3270268 - DNA, 25 bp, Homo sapien
ttctgaggaattctcatgaggttgt

SEQ ID NO: 3270269 - DNA, 25 bp, Homo sapien
tcttcatagagcttcatagagcagt

SEQ ID NO: 3270270 - DNA, 25 bp, Homo sapien
ggaattactattcagcaggtacaaa

SEQ ID NO: 3270271 - DNA, 25 bp, Homo sapien
tacaagaaccttacaccaatactgt

SEQ ID NO: 3270272 - DNA, 25 bp, Homo sapien
actcttaaatgcagagagtagaatg

SEQ ID NO: 3270273 - DNA, 25 bp, Homo sapien
tggtgttcgaactgatacaagaacc

SEQ ID NO: 3270274 - DNA, 25 bp, Homo sapien
ctttgttgtcgtatttgattgttcc

SEQ ID NO: 3270275 - DNA, 25 bp, Homo sapien
tccatgtgcttgaggctccactggc

SEQ ID NO: 3270276 - DNA, 25 bp, Homo sapien
cctttgttgtcgtatttgattgttc

SEQ ID NO: 3270277 - DNA, 25 bp, Homo sapien
tgtgcttgaggctccactggctctc

SEQ ID NO: 3270278 - DNA, 25 bp, Homo sapien
cagggactatctttctccatgatga

SEQ ID NO: 3270279 - DNA, 25 bp, Homo sapien
gagtcagaagttataaaccagggac

SEQ ID NO: 3270280 - DNA, 25 bp, Homo sapien
gggactatctttctccatgatgatt

SEQ ID NO: 3270281 - DNA, 25 bp, Homo sapien
aaccagggactatctttctccatga

SEQ ID NO: 3270282 - DNA, 25 bp, Homo sapien
gaattctgtcacacaaacactccaa

SEQ ID NO: 3270283 - DNA, 25 bp, Homo sapien
aaacactccaattttcaacagctac

SEQ ID NO: 3270284 - DNA, 25 bp, Homo sapien
ctccaattttcaacagctacatctg

SEQ ID NO: 3270285 - DNA, 25 bp, Homo sapien
gtgaattctgtcacacaaacactcc

SEQ ID NO: 3270286 - DNA, 25 bp, Homo sapien
cttctttctcctggatcccgatctt

SEQ ID NO: 3270287 - DNA, 25 bp, Homo sapien
tcctggatcccgatcttttcagcat

SEQ ID NO: 3270288 - DNA, 25 bp, Homo sapien
tctttctcctggatcccgatctttt

SEQ ID NO: 3270289 - DNA, 25 bp, Homo sapien
ctggatcccgatcttttcagcatcc

SEQ ID NO: 3270290 - DNA, 25 bp, Homo sapien
taattaacttagaaccaaccatctc

SEQ ID NO: 3270291 - DNA, 25 bp, Homo sapien
catagtacttgcaatcgttacaaat

SEQ ID NO: 3270292 - DNA, 25 bp, Homo sapien
cttgcaatcgttacaaatgttttta

SEQ ID NO: 3270293 - DNA, 25 bp, Homo sapien
aacttagaaccaaccatctcatcca

SEQ ID NO: 3270294 - DNA, 25 bp, Homo sapien
tgggtcctggacacaaccatataat

SEQ ID NO: 3270295 - DNA, 25 bp, Homo sapien
tcacacggtcattcagggagcaagt

SEQ ID NO: 3270296 - DNA, 25 bp, Homo sapien
cactttaagcgatggaaaatcagcc

SEQ ID NO: 3270297 - DNA, 25 bp, Homo sapien
tgtctgtatgatcaaagttgggtcc

SEQ ID NO: 3270298 - DNA, 25 bp, Homo sapien
gatgaggagcctgtgtcttacgccc

SEQ ID NO: 3270299 - DNA, 25 bp, Homo sapien
tcagtgcatcccggatgaggagcct

SEQ ID NO: 3270300 - DNA, 25 bp, Homo sapien
tccagaagcaattgaggagttttgc

SEQ ID NO: 3270301 - DNA, 25 bp, Homo sapien
tatatgttatatgcactaggagagg

SEQ ID NO: 3270302 - DNA, 25 bp, Homo sapien
ttggcttagttttcttggagccaag

SEQ ID NO: 3270303 - DNA, 25 bp, Homo sapien
cagattttggcttagttttcttgga

SEQ ID NO: 3270304 - DNA, 25 bp, Homo sapien
cagcattcagagaccgtgacagatt

SEQ ID NO: 3270305 - DNA, 25 bp, Homo sapien
atgttccttagtggccctgtcagca

SEQ ID NO: 3270306 - DNA, 25 bp, Homo sapien
aagggcaaagatcctgaaccaaggg

SEQ ID NO: 3270307 - DNA, 25 bp, Homo sapien
gctgacgtgacttgttagtggcaga

SEQ ID NO: 3270308 - DNA, 25 bp, Homo sapien
gcagaactcatgtgagcccaagggc

SEQ ID NO: 3270309 - DNA, 25 bp, Homo sapien
ggctctctgtattcagaaggtcaga

SEQ ID NO: 3270310 - DNA, 25 bp, Homo sapien
catcttgttccctggcagcacattg

SEQ ID NO: 3270311 - DNA, 25 bp, Homo sapien
tcatcttgttccctggcagcacatt

SEQ ID NO: 3270312 - DNA, 25 bp, Homo sapien
gaaagctttgtaatctcgacaatgt

SEQ ID NO: 3270313 - DNA, 25 bp, Homo sapien
aaagctttgtaatctcgacaatgtg

SEQ ID NO: 3270314 - DNA, 25 bp, Homo sapien
agaaagctttgtaatctcgacaatg

SEQ ID NO: 3270315 - DNA, 25 bp, Homo sapien
aagttgtcaccttcactcacgatca

SEQ ID NO: 3270316 - DNA, 25 bp, Homo sapien
aaataccagacatcaggcctgtaat

SEQ ID NO: 3270317 - DNA, 25 bp, Homo sapien
ccaagacaaaattcatgtaagccaa

SEQ ID NO: 3270318 - DNA, 25 bp, Homo sapien
taagccaaaataccagacatcaggc

SEQ ID NO: 3270319 - DNA, 25 bp, Homo sapien
tatctgcaagtgcatctgatgatcc

SEQ ID NO: 3270320 - DNA, 25 bp, Homo sapien
aggttccattcatgccacacatctt

SEQ ID NO: 3270321 - DNA, 25 bp, Homo sapien
tccatgaccgtaggaaattgtaact

SEQ ID NO: 3270322 - DNA, 25 bp, Homo sapien
tatgggaatttggaattccagagtt

SEQ ID NO: 3270323 - DNA, 25 bp, Homo sapien
tgtttgatgtaatcatcttggtgcc

SEQ ID NO: 3270324 - DNA, 25 bp, Homo sapien
gagcctctctcttccgcatccttcc

SEQ ID NO: 3270325 - DNA, 25 bp, Homo sapien
ctgcctgggcagacgtaatagatgt

SEQ ID NO: 3270326 - DNA, 25 bp, Homo sapien
tcttggtgcccaaattcagcaggcc

SEQ ID NO: 3270327 - DNA, 25 bp, Homo sapien
aatcctcttgcacttatcttgcttg

SEQ ID NO: 3270328 - DNA, 25 bp, Homo sapien
ccattataatcctcttgcacttatc

SEQ ID NO: 3270329 - DNA, 25 bp, Homo sapien
tcaacccattataatcctcttgcac

SEQ ID NO: 3270330 - DNA, 25 bp, Homo sapien
tataatcctcttgcacttatcttgc

SEQ ID NO: 3270331 - DNA, 25 bp, Homo sapien
ggtttacacgccctcacaatcatgt

SEQ ID NO: 3270332 - DNA, 25 bp, Homo sapien
catcctggtttacacgccctcacaa

SEQ ID NO: 3270333 - DNA, 25 bp, Homo sapien
ctggtttacacgccctcacaatcat

SEQ ID NO: 3270334 - DNA, 25 bp, Homo sapien
atcctggtttacacgccctcacaat

SEQ ID NO: 3270335 - DNA, 25 bp, Homo sapien
gaactcatgactgtttctggacacc

SEQ ID NO: 3270336 - DNA, 25 bp, Homo sapien
actgtttctggacaccactgagcca

SEQ ID NO: 3270337 - DNA, 25 bp, Homo sapien
ctcatgactgtttctggacaccact

SEQ ID NO: 3270338 - DNA, 25 bp, Homo sapien
tctgctgaactcatgactgtttctg

SEQ ID NO: 3270339 - DNA, 25 bp, Homo sapien
aacaagaagaaatcgtcttgtgccc

SEQ ID NO: 3270340 - DNA, 25 bp, Homo sapien
gaagaaatcgtcttgtgccctctct

SEQ ID NO: 3270341 - DNA, 25 bp, Homo sapien
aaatcgtcttgtgccctctctggca

SEQ ID NO: 3270342 - DNA, 25 bp, Homo sapien
caagaagaaatcgtcttgtgccctc

SEQ ID NO: 3270343 - DNA, 25 bp, Homo sapien
tacatcagcaacttcataaacactg

SEQ ID NO: 3270344 - DNA, 25 bp, Homo sapien
gaaggcctgccttgaatatcagtaa

SEQ ID NO: 3270345 - DNA, 25 bp, Homo sapien
tctgaaggcctgccttgaatatcag

SEQ ID NO: 3270346 - DNA, 25 bp, Homo sapien
catcagcaacttcataaacactgat

SEQ ID NO: 3270347 - DNA, 25 bp, Homo sapien
cagctgtcattgcctctttactaac

SEQ ID NO: 3270348 - DNA, 25 bp, Homo sapien
ctcgttatcatcacaatctgtcctg

SEQ ID NO: 3270349 - DNA, 25 bp, Homo sapien
caagtacagaccacgggttatggta

SEQ ID NO: 3270350 - DNA, 25 bp, Homo sapien
gctctaggggatctcgttatcatca

SEQ ID NO: 3270351 - DNA, 25 bp, Homo sapien
aacacttcctcttcgagctctaggg

SEQ ID NO: 3270352 - DNA, 25 bp, Homo sapien
tccagttcagtcagagcttggatcc

SEQ ID NO: 3270353 - DNA, 25 bp, Homo sapien
ctgctgccttagttcatccagttca

SEQ ID NO: 3270354 - DNA, 25 bp, Homo sapien
gttcatccagttcagtcagagcttg

SEQ ID NO: 3270355 - DNA, 25 bp, Homo sapien
catccagttcagtcagagcttggat

SEQ ID NO: 3270356 - DNA, 25 bp, Homo sapien
ctttgttcatccaagaatggccatc

SEQ ID NO: 3270357 - DNA, 25 bp, Homo sapien
gcctttactaatccatgaagcaagc

SEQ ID NO: 3270358 - DNA, 25 bp, Homo sapien
tgcctttgcaaagcctttactaatc

SEQ ID NO: 3270359 - DNA, 25 bp, Homo sapien
actaatccatgaagcaagcctccag

SEQ ID NO: 3270360 - DNA, 25 bp, Homo sapien
ttgcaaagcctttactaatccatga

SEQ ID NO: 3270361 - DNA, 25 bp, Homo sapien
tatcacccaaatcatagagccactg

SEQ ID NO: 3270362 - DNA, 25 bp, Homo sapien
aaccctggcttgagtgaccctgaat

SEQ ID NO: 3270363 - DNA, 25 bp, Homo sapien
taagtgggttcctaatgatctagct

SEQ ID NO: 3270364 - DNA, 25 bp, Homo sapien
gctgacaaattctcacaaagactga

SEQ ID NO: 3270365 - DNA, 25 bp, Homo sapien
ggcccagaccctcgatgtagtgcga

SEQ ID NO: 3270366 - DNA, 25 bp, Homo sapien
acatgtgacatagccacgaagctgg

SEQ ID NO: 3270367 - DNA, 25 bp, Homo sapien
gacttcggagcaagcaaagtgcaca

SEQ ID NO: 3270368 - DNA, 25 bp, Homo sapien
catgtgcataccatagacttcggag

SEQ ID NO: 3270369 - DNA, 25 bp, Homo sapien
cgtctcatgtcacctaggacgtgga

SEQ ID NO: 3270370 - DNA, 25 bp, Homo sapien
tttgaagagcggctgaagcgcacac

SEQ ID NO: 3270371 - DNA, 25 bp, Homo sapien
tggagctgacctacgcgttgcactg

SEQ ID NO: 3270372 - DNA, 25 bp, Homo sapien
ctaggacgtggactggacccctgcg

SEQ ID NO: 3270373 - DNA, 25 bp, Homo sapien
cggcccaggtgcgcacccggccgcg

SEQ ID NO: 3270374 - DNA, 25 bp, Homo sapien
ggcccaggtgcgcacccggccgcgc

SEQ ID NO: 3270375 - DNA, 25 bp, Homo sapien
gcccaggtgcgcacccggccgcgcg

SEQ ID NO: 3270376 - DNA, 25 bp, Homo sapien
accacgcggcgaggagcacgtgaac

SEQ ID NO: 3270377 - DNA, 25 bp, Homo sapien
ataaaaaccccgctcaagcgcgcgt

SEQ ID NO: 3270378 - DNA, 25 bp, Homo sapien
gcggagatccgctcccagaaaggtt

SEQ ID NO: 3270379 - DNA, 25 bp, Homo sapien
acgtgaacggcgcagcttggctata

SEQ ID NO: 3270380 - DNA, 25 bp, Homo sapien
accgcctgctgagccgttccgtgga

SEQ ID NO: 3270381 - DNA, 25 bp, Homo sapien
acggagctcgccaaaggcgcttcgg

SEQ ID NO: 3270382 - DNA, 25 bp, Homo sapien
gagccgcgccgcctgctgagatcga

SEQ ID NO: 3270383 - DNA, 25 bp, Homo sapien
ggtccgtatggcttctcctcgccgg

SEQ ID NO: 3270384 - DNA, 25 bp, Homo sapien
gcccgccggccgcagcgtccgggtc

SEQ ID NO: 3270385 - DNA, 25 bp, Homo sapien
ctcgtgcccgccggccgcagcgtcc

SEQ ID NO: 3270386 - DNA, 25 bp, Homo sapien
gccggccgcagcgtccgggtcttca

SEQ ID NO: 3270387 - DNA, 25 bp, Homo sapien
ccggccgcagcgtccgggtcttcat

SEQ ID NO: 3270388 - DNA, 25 bp, Homo sapien
cagcgccaaccctgaaggtacgtcc

SEQ ID NO: 3270389 - DNA, 25 bp, Homo sapien
ccgtccgtccttctgtccgtcagcg

SEQ ID NO: 3270390 - DNA, 25 bp, Homo sapien
ctgaaggtacgtccctcgctcgggt

SEQ ID NO: 3270391 - DNA, 25 bp, Homo sapien
ttgcccgtccgtccttctgtccgtc

SEQ ID NO: 3270392 - DNA, 25 bp, Homo sapien
gagagtgtgtgtccgccccacagcc

SEQ ID NO: 3270393 - DNA, 25 bp, Homo sapien
gagctggagagtgtgtgtccgcccc

SEQ ID NO: 3270394 - DNA, 25 bp, Homo sapien
gcccggtgcgccctgcgctcccttc

SEQ ID NO: 3270395 - DNA, 25 bp, Homo sapien
tggagagtgtgtgtccgccccacag

SEQ ID NO: 3270396 - DNA, 25 bp, Homo sapien
cagaggccaagcagacttttgtgaa

SEQ ID NO: 3270397 - DNA, 25 bp, Homo sapien
ttttccagctgaggcgaggtgagtt

SEQ ID NO: 3270398 - DNA, 25 bp, Homo sapien
ggtgagttccttgagactctcctcc

SEQ ID NO: 3270399 - DNA, 25 bp, Homo sapien
tcctgcaggtgcgatggtgcccttt

SEQ ID NO: 3270400 - DNA, 25 bp, Homo sapien
aggttgaacgctgggcggtcaaatc

SEQ ID NO: 3270401 - DNA, 25 bp, Homo sapien
tgttgcattcacaaccacagaggtt

SEQ ID NO: 3270402 - DNA, 25 bp, Homo sapien
gctgggcggtcaaatcctggctcat

SEQ ID NO: 3270403 - DNA, 25 bp, Homo sapien
actccatgaaaacttgttgatttct

SEQ ID NO: 3270404 - DNA, 25 bp, Homo sapien
ttcccagactcttcatgcctttggg

SEQ ID NO: 3270405 - DNA, 25 bp, Homo sapien
tcttcccagactcttcatgcctttg

SEQ ID NO: 3270406 - DNA, 25 bp, Homo sapien
gttacagtggaagtaacagcaagag

SEQ ID NO: 3270407 - DNA, 25 bp, Homo sapien
tttgttctccgttacagtggaagta

SEQ ID NO: 3270408 - DNA, 25 bp, Homo sapien
ggtggtggacctccagagaccctcc

SEQ ID NO: 3270409 - DNA, 25 bp, Homo sapien
tgatttctccaaccatgactacaac

SEQ ID NO: 3270410 - DNA, 25 bp, Homo sapien
ttagttaggagtgtctgaatagctt

SEQ ID NO: 3270411 - DNA, 25 bp, Homo sapien
tctgcatgtgctctcagccataatt

SEQ ID NO: 3270412 - DNA, 25 bp, Homo sapien
gttaggagtgtctgaatagcttgag

SEQ ID NO: 3270413 - DNA, 25 bp, Homo sapien
cgaaacatgtcactgggaatggaca

SEQ ID NO: 3270414 - DNA, 25 bp, Homo sapien
tatgtccacgaaacatgtcactggg

SEQ ID NO: 3270415 - DNA, 25 bp, Homo sapien
tacttgtccactgttgagattatta

SEQ ID NO: 3270416 - DNA, 25 bp, Homo sapien
cactgttgagattattatgtccacg

SEQ ID NO: 3270417 - DNA, 25 bp, Homo sapien
atgctgcttctgagggacagtccaa

SEQ ID NO: 3270418 - DNA, 25 bp, Homo sapien
gctagtttggaatgctgcttctgag

SEQ ID NO: 3270419 - DNA, 25 bp, Homo sapien
ctgcttctgagggacagtccaaggg

SEQ ID NO: 3270420 - DNA, 25 bp, Homo sapien
ctttgttgctagtttggaatgctgc

SEQ ID NO: 3270421 - DNA, 25 bp, Homo sapien
ctgccttcagggatgacaccctcgg

SEQ ID NO: 3270422 - DNA, 25 bp, Homo sapien
tcagggatgacaccctcggtatttg

SEQ ID NO: 3270423 - DNA, 25 bp, Homo sapien
agggatgacaccctcggtatttgtt

SEQ ID NO: 3270424 - DNA, 25 bp, Homo sapien
ccttcagggatgacaccctcggtat

SEQ ID NO: 3270425 - DNA, 25 bp, Homo sapien
tctgcctcttcgaaagacattgtgg

SEQ ID NO: 3270426 - DNA, 25 bp, Homo sapien
gaaccaagaagtggtccatcctgtg

SEQ ID NO: 3270427 - DNA, 25 bp, Homo sapien
tgtattttgtggagctaaaaccctg

SEQ ID NO: 3270428 - DNA, 25 bp, Homo sapien
tcctgtggactgctcgtgagtgcct

SEQ ID NO: 3270429 - DNA, 25 bp, Homo sapien
ccatgggtaccctgactattcccat

SEQ ID NO: 3270430 - DNA, 25 bp, Homo sapien
catgggtaccctgactattcccatt

SEQ ID NO: 3270431 - DNA, 25 bp, Homo sapien
tgccatgggtaccctgactattccc

SEQ ID NO: 3270432 - DNA, 25 bp, Homo sapien
gccatgggtaccctgactattccca

SEQ ID NO: 3270433 - DNA, 25 bp, Homo sapien
tctcaggataacaattggatgccac

SEQ ID NO: 3270434 - DNA, 25 bp, Homo sapien
tgtctcaggataacaattggatgcc

SEQ ID NO: 3270435 - DNA, 25 bp, Homo sapien
cctagcaggaagatcttgcccgcaa

SEQ ID NO: 3270436 - DNA, 25 bp, Homo sapien
tcttgcccgcaactactttctgtct

SEQ ID NO: 3270437 - DNA, 25 bp, Homo sapien
gctgcctggaatggctcttctggaa

SEQ ID NO: 3270438 - DNA, 25 bp, Homo sapien
tgctgcctggaatggctcttctgga

SEQ ID NO: 3270439 - DNA, 25 bp, Homo sapien
ttctgctgcctggaatggctcttct

SEQ ID NO: 3270440 - DNA, 25 bp, Homo sapien
tgcctggaatggctcttctggaatt

SEQ ID NO: 3270441 - DNA, 25 bp, Homo sapien
tgccaagggttgctcttaggtgctg

SEQ ID NO: 3270442 - DNA, 25 bp, Homo sapien
taactgcctgagtgctaccgtgtgc

SEQ ID NO: 3270443 - DNA, 25 bp, Homo sapien
tatcacaaatctgaccagctgatgg

SEQ ID NO: 3270444 - DNA, 25 bp, Homo sapien
tattttgtgggccagttccttagga

SEQ ID NO: 3270445 - DNA, 25 bp, Homo sapien
ccaatggaggcaggtaagaggttct

SEQ ID NO: 3270446 - DNA, 25 bp, Homo sapien
aagcctgataccacgcatgcgatga

SEQ ID NO: 3270447 - DNA, 25 bp, Homo sapien
gaccctagaagagccaagcctgata

SEQ ID NO: 3270448 - DNA, 25 bp, Homo sapien
catgcgatgagaggagcaccattac

SEQ ID NO: 3270449 - DNA, 25 bp, Homo sapien
gaaacacctggagtgggatatcgaa

SEQ ID NO: 3270450 - DNA, 25 bp, Homo sapien
tctctcagcgtcactgggatcagcc

SEQ ID NO: 3270451 - DNA, 25 bp, Homo sapien
gagctcctccaaatagaaacacctg

SEQ ID NO: 3270452 - DNA, 25 bp, Homo sapien
tccccaggtttgtcttctctcagcg

SEQ ID NO: 3270453 - DNA, 25 bp, Homo sapien
ctgcccacataggtaactgctttgt

SEQ ID NO: 3270454 - DNA, 25 bp, Homo sapien
cacataggtaactgctttgtacact

SEQ ID NO: 3270455 - DNA, 25 bp, Homo sapien
cccacataggtaactgctttgtaca

SEQ ID NO: 3270456 - DNA, 25 bp, Homo sapien
tgcccacataggtaactgctttgta

SEQ ID NO: 3270457 - DNA, 25 bp, Homo sapien
ccaaatctcggtctgacataaaatc

SEQ ID NO: 3270458 - DNA, 25 bp, Homo sapien
aatgcattggctctgatccacggcg

SEQ ID NO: 3270459 - DNA, 25 bp, Homo sapien
cactcaagtgaacagcgcctgggag

SEQ ID NO: 3270460 - DNA, 25 bp, Homo sapien
cttgacccaaatctcggtctgacat

SEQ ID NO: 3270461 - DNA, 25 bp, Homo sapien
tggtggagtcctcgccctggcatgt

SEQ ID NO: 3270462 - DNA, 25 bp, Homo sapien
tgtacttttgattcctccctgtccc

SEQ ID NO: 3270463 - DNA, 25 bp, Homo sapien
gctctccagagataccaccttgatc

SEQ ID NO: 3270464 - DNA, 25 bp, Homo sapien
ttggcccagtttgccaactggctta

SEQ ID NO: 3270465 - DNA, 25 bp, Homo sapien
ttgccaactggcttaacaagaaaaa

SEQ ID NO: 3270466 - DNA, 25 bp, Homo sapien
cgcggtcgtttgtgctcagaggcca

SEQ ID NO: 3270467 - DNA, 25 bp, Homo sapien
tacacaactatttgccagcgggtgc

SEQ ID NO: 3270468 - DNA, 25 bp, Homo sapien
gatgtcggacatcgtactccagggt

SEQ ID NO: 3270469 - DNA, 25 bp, Homo sapien
cattggagtaagcaccccggagttt

SEQ ID NO: 3270470 - DNA, 25 bp, Homo sapien
gatcccaatatcttgggagaaacca

SEQ ID NO: 3270471 - DNA, 25 bp, Homo sapien
caccagagagtcgatgagtttctgg

SEQ ID NO: 3270472 - DNA, 25 bp, Homo sapien
aatatcttgggagaaaccattgaag

SEQ ID NO: 3270473 - DNA, 25 bp, Homo sapien
acccagagacaccagagagtcgatg

SEQ ID NO: 3270474 - DNA, 25 bp, Homo sapien
ttaacaggatctcccagatgattgc

SEQ ID NO: 3270475 - DNA, 25 bp, Homo sapien
gcatcataaccatctgggagcttgt

SEQ ID NO: 3270476 - DNA, 25 bp, Homo sapien
taagccagtaagctttggtcctcga

SEQ ID NO: 3270477 - DNA, 25 bp, Homo sapien
gagccctgcactaaagggagcttgg

SEQ ID NO: 3270478 - DNA, 25 bp, Homo sapien
ttaggctttgctgtcctttagctgt

SEQ ID NO: 3270479 - DNA, 25 bp, Homo sapien
taggctttgctgtcctttagctgtc

SEQ ID NO: 3270480 - DNA, 25 bp, Homo sapien
cactactgttgatgccatgcattct

SEQ ID NO: 3270481 - DNA, 25 bp, Homo sapien
acagggctaaattgtggcgctgggg

SEQ ID NO: 3270482 - DNA, 25 bp, Homo sapien
aggcactactgttgatgccatgcat

SEQ ID NO: 3270483 - DNA, 25 bp, Homo sapien
cagggctaaattgtggcgctgggga

SEQ ID NO: 3270484 - DNA, 25 bp, Homo sapien
agaggggagggcgaagggcatgctg

SEQ ID NO: 3270485 - DNA, 25 bp, Homo sapien
gggagggcgaagggcatgctgatat

SEQ ID NO: 3270486 - DNA, 25 bp, Homo sapien
ggggagggcgaagggcatgctgata

SEQ ID NO: 3270487 - DNA, 25 bp, Homo sapien
aggggagggcgaagggcatgctgat

SEQ ID NO: 3270488 - DNA, 25 bp, Homo sapien
gtaccaagagaagtagacagtagct

SEQ ID NO: 3270489 - DNA, 25 bp, Homo sapien
aaaagccttctcgagttttccagat

SEQ ID NO: 3270490 - DNA, 25 bp, Homo sapien
aaagccttctcgagttttccagata

SEQ ID NO: 3270491 - DNA, 25 bp, Homo sapien
aaagccatatcccttcagcatcttc

SEQ ID NO: 3270492 - DNA, 25 bp, Homo sapien
gcctattgctgtaatccaaagccat

SEQ ID NO: 3270493 - DNA, 25 bp, Homo sapien
cctttaaattgctctatagtcacag

SEQ ID NO: 3270494 - DNA, 25 bp, Homo sapien
cattactagatgctttaaatccaca

SEQ ID NO: 3270495 - DNA, 25 bp, Homo sapien
tgtttgacctggcttttctacaagc

SEQ ID NO: 3270496 - DNA, 25 bp, Homo sapien
gacctggcttttctacaagctcact

SEQ ID NO: 3270497 - DNA, 25 bp, Homo sapien
aagaagatattgtttgacctggctt

SEQ ID NO: 3270498 - DNA, 25 bp, Homo sapien
aagatattgtttgacctggcttttc

SEQ ID NO: 3270499 - DNA, 25 bp, Homo sapien
cacttggatattggaacactgctaa

SEQ ID NO: 3270500 - DNA, 25 bp, Homo sapien
acaaaaacctgtgggtctacatagg

SEQ ID NO: 3270501 - DNA, 25 bp, Homo sapien
acatgatagctggtggccccacagt

SEQ ID NO: 3270502 - DNA, 25 bp, Homo sapien
catgtgataaatccatgtaggcaac

SEQ ID NO: 3270503 - DNA, 25 bp, Homo sapien
catgctcacaaatcctgttccatca

SEQ ID NO: 3270504 - DNA, 25 bp, Homo sapien
tccatcacctctggcctgctgatag

SEQ ID NO: 3270505 - DNA, 25 bp, Homo sapien
ccctcccatgctcacaaatcctgtt

SEQ ID NO: 3270506 - DNA, 25 bp, Homo sapien
cctctggcctgctgatagaccttct

SEQ ID NO: 3270507 - DNA, 25 bp, Homo sapien
cactctttgcctggtatttacttcc

SEQ ID NO: 3270508 - DNA, 25 bp, Homo sapien
ctgcagatttcataaggttccttaa

SEQ ID NO: 3270509 - DNA, 25 bp, Homo sapien
tccttaaggaaaagagcagtcctca

SEQ ID NO: 3270510 - DNA, 25 bp, Homo sapien
tactcccagttaccagatttctgtg

SEQ ID NO: 3270511 - DNA, 25 bp, Homo sapien
tgactgcagtaagggaagactaagc

SEQ ID NO: 3270512 - DNA, 25 bp, Homo sapien
gatcctagtgccttttgaagaccct

SEQ ID NO: 3270513 - DNA, 25 bp, Homo sapien
cccacgttggatatgcctggtacat

SEQ ID NO: 3270514 - DNA, 25 bp, Homo sapien
gtaaattggtgccactgccagccct

SEQ ID NO: 3270515 - DNA, 25 bp, Homo sapien
tagttgctaatagtagccactaata

SEQ ID NO: 3270516 - DNA, 25 bp, Homo sapien
tcttcatggcttaatcttagtagag

SEQ ID NO: 3270517 - DNA, 25 bp, Homo sapien
cttagtagagtgtatgagtctagga

SEQ ID NO: 3270518 - DNA, 25 bp, Homo sapien
gccatcaagtccatggcatttctgc

SEQ ID NO: 3270519 - DNA, 25 bp, Homo sapien
tgccatctccacctgggaagagctt

SEQ ID NO: 3270520 - DNA, 25 bp, Homo sapien
catctccacctgggaagagcttgtg

SEQ ID NO: 3270521 - DNA, 25 bp, Homo sapien
gccatctccacctgggaagagcttg

SEQ ID NO: 3270522 - DNA, 25 bp, Homo sapien
cttgccatctccacctgggaagagc

SEQ ID NO: 3270523 - DNA, 25 bp, Homo sapien
gaaactctgtatattgtcctcctgc

SEQ ID NO: 3270524 - DNA, 25 bp, Homo sapien
tccagagtgctgatttaagaggtca

SEQ ID NO: 3270525 - DNA, 25 bp, Homo sapien
tggtagaaggtagctgccaggcatt

SEQ ID NO: 3270526 - DNA, 25 bp, Homo sapien
tgcattctttggctgagacggaaag

SEQ ID NO: 3270527 - DNA, 25 bp, Homo sapien
taaatagcatgtcttcaaggtcact

SEQ ID NO: 3270528 - DNA, 25 bp, Homo sapien
tttcctcaatacagctattttaagt

SEQ ID NO: 3270529 - DNA, 25 bp, Homo sapien
ttctgtcagaaaagtcatatatctc

SEQ ID NO: 3270530 - DNA, 25 bp, Homo sapien
ttttaaatagcatgtcttcaaggtc

SEQ ID NO: 3270531 - DNA, 25 bp, Homo sapien
aaagagttcactggattaccgggca

SEQ ID NO: 3270532 - DNA, 25 bp, Homo sapien
tgtggccatgatcactaggactgtg

SEQ ID NO: 3270533 - DNA, 25 bp, Homo sapien
taaggctctacaatcaacaggtgca

SEQ ID NO: 3270534 - DNA, 25 bp, Homo sapien
gggtgacaagataccccaggcccta

SEQ ID NO: 3270535 - DNA, 25 bp, Homo sapien
taccaggtgctgtcctaagtgctga

SEQ ID NO: 3270536 - DNA, 25 bp, Homo sapien
gagggactcttctacattccatgag

SEQ ID NO: 3270537 - DNA, 25 bp, Homo sapien
cccaaagtcccacagtagcagggtt

SEQ ID NO: 3270538 - DNA, 25 bp, Homo sapien
tgagtcctcccaggaagagttggaa

SEQ ID NO: 3270539 - DNA, 25 bp, Homo sapien
aatggatccgccagcttattccggc

SEQ ID NO: 3270540 - DNA, 25 bp, Homo sapien
gcccagcggtaggaaaagcaacaca

SEQ ID NO: 3270541 - DNA, 25 bp, Homo sapien
gaagcttgtgcgatgactcgggcta

SEQ ID NO: 3270542 - DNA, 25 bp, Homo sapien
aagcttatgaagcagcatccctgga

SEQ ID NO: 3270543 - DNA, 25 bp, Homo sapien
cgctttcttttccaggtggtaacag

SEQ ID NO: 3270544 - DNA, 25 bp, Homo sapien
gaggatacccatggctccgatggag

SEQ ID NO: 3270545 - DNA, 25 bp, Homo sapien
gagaagggtcctgttcatgccatgc

SEQ ID NO: 3270546 - DNA, 25 bp, Homo sapien
taagctggtgtcatgctgagcatgc

SEQ ID NO: 3270547 - DNA, 25 bp, Homo sapien
ggcggaggcccttgcagctttagaa

SEQ ID NO: 3270548 - DNA, 25 bp, Homo sapien
cattctaacgtaactcaatggagaa

SEQ ID NO: 3270549 - DNA, 25 bp, Homo sapien
ggtttgcagagccatagctttggct

SEQ ID NO: 3270550 - DNA, 25 bp, Homo sapien
tgaaacaaggacaaccattctaacg

SEQ ID NO: 3270551 - DNA, 25 bp, Homo sapien
taaatgtcctgatcttacctcaaag

SEQ ID NO: 3270552 - DNA, 25 bp, Homo sapien
caagttatgtatccctttacccatc

SEQ ID NO: 3270553 - DNA, 25 bp, Homo sapien
ttatgtatccctttacccatctgta

SEQ ID NO: 3270554 - DNA, 25 bp, Homo sapien
ccttggacaagttatgtatcccttt

SEQ ID NO: 3270555 - DNA, 25 bp, Homo sapien
tggacaagttatgtatccctttacc

SEQ ID NO: 3270556 - DNA, 25 bp, Homo sapien
tcactggcccgtgtatcaatgaccc

SEQ ID NO: 3270557 - DNA, 25 bp, Homo sapien
tctatatacagggtcactcagagcc

SEQ ID NO: 3270558 - DNA, 25 bp, Homo sapien
gacaagccatcgcaagtgacctcta

SEQ ID NO: 3270559 - DNA, 25 bp, Homo sapien
tgtagtccataatggctgctgtggc

SEQ ID NO: 3270560 - DNA, 25 bp, Homo sapien
tcttggagaccttgtaactggcctc

SEQ ID NO: 3270561 - DNA, 25 bp, Homo sapien
gcaggcccatcttatatgagaagca

SEQ ID NO: 3270562 - DNA, 25 bp, Homo sapien
gaaagtctgttgtggattccctcat

SEQ ID NO: 3270563 - DNA, 25 bp, Homo sapien
gaaaaacatgccagaggtaggtgca

SEQ ID NO: 3270564 - DNA, 25 bp, Homo sapien
agaatggcgtgaactcagaaggtgg

SEQ ID NO: 3270565 - DNA, 25 bp, Homo sapien
agtgagctgagatcgtgccactgca

SEQ ID NO: 3270566 - DNA, 25 bp, Homo sapien
atggcgtgaactcagaaggtggagc

SEQ ID NO: 3270567 - DNA, 25 bp, Homo sapien
cgtgaactcagaaggtggagcttgc

SEQ ID NO: 3270568 - DNA, 25 bp, Homo sapien
caagaatcgctcagctaaaggttaa

SEQ ID NO: 3270569 - DNA, 25 bp, Homo sapien
aaccaagaatcgctcagctaaaggt

SEQ ID NO: 3270570 - DNA, 25 bp, Homo sapien
tggattaaccaagaatcgctcagct

SEQ ID NO: 3270571 - DNA, 25 bp, Homo sapien
ttaaccaagaatcgctcagctaaag

SEQ ID NO: 3270572 - DNA, 25 bp, Homo sapien
aaattagtcgagcgtggtggtgcat

SEQ ID NO: 3270573 - DNA, 25 bp, Homo sapien
gaccaatatagtgataccccgtctc

SEQ ID NO: 3270574 - DNA, 25 bp, Homo sapien
gcctgaccaatatagtgataccccg

SEQ ID NO: 3270575 - DNA, 25 bp, Homo sapien
cctgtaatcccagctacttgggagg

SEQ ID NO: 3270576 - DNA, 25 bp, Homo sapien
agtgctgtaggagtgacatggtggt

SEQ ID NO: 3270577 - DNA, 25 bp, Homo sapien
atgtgtaagtgctgtaggagtgaca

SEQ ID NO: 3270578 - DNA, 25 bp, Homo sapien
gtaagtgctgtaggagtgacatggt

SEQ ID NO: 3270579 - DNA, 25 bp, Homo sapien
tgtgtaagtgctgtaggagtgacat

SEQ ID NO: 3270580 - DNA, 25 bp, Homo sapien
aaagtctagcatctggtcccatctg

SEQ ID NO: 3270581 - DNA, 25 bp, Homo sapien
taggttttatccacgtgcctgctga

SEQ ID NO: 3270582 - DNA, 25 bp, Homo sapien
aactacagtgtgtacaccaaggcct

SEQ ID NO: 3270583 - DNA, 25 bp, Homo sapien
tgtcaaaataggatgcaggaactgg

SEQ ID NO: 3270584 - DNA, 25 bp, Homo sapien
caaaaaatgtagatctttaaccaag

SEQ ID NO: 3270585 - DNA, 25 bp, Homo sapien
tataatctattcttaccctgtccca

SEQ ID NO: 3270586 - DNA, 25 bp, Homo sapien
taaccaagggtaagcatcatatcac

SEQ ID NO: 3270587 - DNA, 25 bp, Homo sapien
catatcacatattaatctgcctgaa

SEQ ID NO: 3270588 - DNA, 25 bp, Homo sapien
ttaccatcatccaattctctgctct

SEQ ID NO: 3270589 - DNA, 25 bp, Homo sapien
tgctctcaacaatcacattagcttt

SEQ ID NO: 3270590 - DNA, 25 bp, Homo sapien
ctgataaaaactgcactatctgtaa

SEQ ID NO: 3270591 - DNA, 25 bp, Homo sapien
ttaactattctggtcattaccatca

SEQ ID NO: 3270592 - DNA, 25 bp, Homo sapien
tatgatggctgtgcatgtgacacca

SEQ ID NO: 3270593 - DNA, 25 bp, Homo sapien
tacacgcttgcaggttatgatggct

SEQ ID NO: 3270594 - DNA, 25 bp, Homo sapien
aatggtactgcctgcgtagatcggc

SEQ ID NO: 3270595 - DNA, 25 bp, Homo sapien
gtgacaccatggtcctgcaatggta

SEQ ID NO: 3270596 - DNA, 25 bp, Homo sapien
catttgcaggccattatgaaatgca

SEQ ID NO: 3270597 - DNA, 25 bp, Homo sapien
gatgcttccaggtacttgctactat

SEQ ID NO: 3270598 - DNA, 25 bp, Homo sapien
ggtctagaccattgtagcctcctgc

SEQ ID NO: 3270599 - DNA, 25 bp, Homo sapien
gtttttacagttccagattgccacc

SEQ ID NO: 3270600 - DNA, 25 bp, Homo sapien
gcccagccgggaatggttatttcta

SEQ ID NO: 3270601 - DNA, 25 bp, Homo sapien
ggaattcacagtaccaaaagctgat

SEQ ID NO: 3270602 - DNA, 25 bp, Homo sapien
gaccaccagccatgacaattgttaa

SEQ ID NO: 3270603 - DNA, 25 bp, Homo sapien
cctgagagtccaaagctgtaatgtt

SEQ ID NO: 3270604 - DNA, 25 bp, Homo sapien
caatttagccatcgcagtgtacaca

SEQ ID NO: 3270605 - DNA, 25 bp, Homo sapien
tgcaactttcatgtgtccattaaaa

SEQ ID NO: 3270606 - DNA, 25 bp, Homo sapien
gatttggagtgttctcaccacgcaa

SEQ ID NO: 3270607 - DNA, 25 bp, Homo sapien
tgtggcaatgcatacgttcattagc

SEQ ID NO: 3270608 - DNA, 25 bp, Homo sapien
gcctcgtggtaatgcaagccctata

SEQ ID NO: 3270609 - DNA, 25 bp, Homo sapien
gcaacactaggtgctttctgcctcg

SEQ ID NO: 3270610 - DNA, 25 bp, Homo sapien
cccctggaggcactaagtttgtgac

SEQ ID NO: 3270611 - DNA, 25 bp, Homo sapien
gctctaggcagacaagtaatcatgt

SEQ ID NO: 3270612 - DNA, 25 bp, Homo sapien
tgtgctccacttttgtaactctaaa

SEQ ID NO: 3270613 - DNA, 25 bp, Homo sapien
tgcgttctctcttcacaggtgttgc

SEQ ID NO: 3270614 - DNA, 25 bp, Homo sapien
attgacggtttcagccccactaaca

SEQ ID NO: 3270615 - DNA, 25 bp, Homo sapien
cactaacagacatcaggcttctccg

SEQ ID NO: 3270616 - DNA, 25 bp, Homo sapien
cggtctcactccagcatgtgtgttc

SEQ ID NO: 3270617 - DNA, 25 bp, Homo sapien
gtgtgttccttaccagtactcccca

SEQ ID NO: 3270618 - DNA, 25 bp, Homo sapien
ccagcatgtgtgttccttaccagta

SEQ ID NO: 3270619 - DNA, 25 bp, Homo sapien
tccaaatgcaacatcggcaatgcag

SEQ ID NO: 3270620 - DNA, 25 bp, Homo sapien
tgccaacagaaaggaccgtgacctc

SEQ ID NO: 3270621 - DNA, 25 bp, Homo sapien
tataaagtgccaccgcttgtgccta

SEQ ID NO: 3270622 - DNA, 25 bp, Homo sapien
accgcccaccgtatgcagatgatgg

SEQ ID NO: 3270623 - DNA, 25 bp, Homo sapien
ttggcgccgtggtctgctctctctg

SEQ ID NO: 3270624 - DNA, 25 bp, Homo sapien
ccaggactcactggcgggctccctg

SEQ ID NO: 3270625 - DNA, 25 bp, Homo sapien
actcactggcgggctccctggtgtg

SEQ ID NO: 3270626 - DNA, 25 bp, Homo sapien
tggtgacaaaggcccaggactcact

SEQ ID NO: 3270627 - DNA, 25 bp, Homo sapien
aaggcccaggactcactggcgggct

SEQ ID NO: 3270628 - DNA, 25 bp, Homo sapien
acaggctgttatctgctaccatcgc

SEQ ID NO: 3270629 - DNA, 25 bp, Homo sapien
gttatctgctaccatcgcctttaag

SEQ ID NO: 3270630 - DNA, 25 bp, Homo sapien
taccatcgcctttaagacatcagca

SEQ ID NO: 3270631 - DNA, 25 bp, Homo sapien
ttcaggatcatacaggctgttatct

SEQ ID NO: 3270632 - DNA, 25 bp, Homo sapien
gcatttagtccacaaaatagaggat

SEQ ID NO: 3270633 - DNA, 25 bp, Homo sapien
caagttatgttaatcattgagacaa

SEQ ID NO: 3270634 - DNA, 25 bp, Homo sapien
gaagtccaaattggtactaagttca

SEQ ID NO: 3270635 - DNA, 25 bp, Homo sapien
aattggtactaagttcaagttatgt

SEQ ID NO: 3270636 - DNA, 25 bp, Homo sapien
gagaaaccgcaggtacacagatgaa

SEQ ID NO: 3270637 - DNA, 25 bp, Homo sapien
ggcccctggagaaaccgcaggtaca

SEQ ID NO: 3270638 - DNA, 25 bp, Homo sapien
ttggagtcaccagctgtcctcacgg

SEQ ID NO: 3270639 - DNA, 25 bp, Homo sapien
ggaaccaagggctgcgcaaaggatt

SEQ ID NO: 3270640 - DNA, 25 bp, Homo sapien
taataaaggataggaatactgaatt

SEQ ID NO: 3270641 - DNA, 25 bp, Homo sapien
tttaataaaggataggaatactgaa

SEQ ID NO: 3270642 - DNA, 25 bp, Homo sapien
ttttaataaaggataggaatactga

SEQ ID NO: 3270643 - DNA, 25 bp, Homo sapien
ttaataaaggataggaatactgaat

SEQ ID NO: 3270644 - DNA, 25 bp, Homo sapien
atttttcatgatgtagtggacgatt

SEQ ID NO: 3270645 - DNA, 25 bp, Homo sapien
gatttgcccaacagtgtcactgttt

SEQ ID NO: 3270646 - DNA, 25 bp, Homo sapien
catgatgtagtggacgatttgccca

SEQ ID NO: 3270647 - DNA, 25 bp, Homo sapien
gatgtagtggacgatttgcccaaca

SEQ ID NO: 3270648 - DNA, 25 bp, Homo sapien
cctccacgtgaacatgcatgtttgg

SEQ ID NO: 3270649 - DNA, 25 bp, Homo sapien
tcctccacgtgaacatgcatgtttg

SEQ ID NO: 3270650 - DNA, 25 bp, Homo sapien
ttcctccacgtgaacatgcatgttt

SEQ ID NO: 3270651 - DNA, 25 bp, Homo sapien
taagcaggtggcaaatgaggacgcc

SEQ ID NO: 3270652 - DNA, 25 bp, Homo sapien
tcctcttcgatatcttgctctgctt

SEQ ID NO: 3270653 - DNA, 25 bp, Homo sapien
tgttgtacaacgatagcctttcttc

SEQ ID NO: 3270654 - DNA, 25 bp, Homo sapien
aaatgaggacgccaaagagacccat

SEQ ID NO: 3270655 - DNA, 25 bp, Homo sapien
tggagtgcaatgtgcggctgctccc

SEQ ID NO: 3270656 - DNA, 25 bp, Homo sapien
aacacagggacaagcgcgtatgcaa

SEQ ID NO: 3270657 - DNA, 25 bp, Homo sapien
tcccagtatcgttgctgggcgacgg

SEQ ID NO: 3270658 - DNA, 25 bp, Homo sapien
tgggtgtccattcccagtatcgttg

SEQ ID NO: 3270659 - DNA, 25 bp, Homo sapien
ggtgcgctttcctcacaaaccaatc

SEQ ID NO: 3270660 - DNA, 25 bp, Homo sapien
cacaggaggaacttcaagtagaacc

SEQ ID NO: 3270661 - DNA, 25 bp, Homo sapien
gaccagatggaggacttgtcttcct

SEQ ID NO: 3270662 - DNA, 25 bp, Homo sapien
caagttaaatcctcggaccagatgg

SEQ ID NO: 3270663 - DNA, 25 bp, Homo sapien
ttctgaaggatgtaaatataccagc

SEQ ID NO: 3270664 - DNA, 25 bp, Homo sapien
catgctcctgggttcatcgaaatca

SEQ ID NO: 3270665 - DNA, 25 bp, Homo sapien
ggacaactgatacaccccactgctt

SEQ ID NO: 3270666 - DNA, 25 bp, Homo sapien
cttgttgggtaagtcctttctgaag

SEQ ID NO: 3270667 - DNA, 25 bp, Homo sapien
gctccaaggatctgtcccggctgaa

SEQ ID NO: 3270668 - DNA, 25 bp, Homo sapien
tcctgcaagacaggcacgtgggctg

SEQ ID NO: 3270669 - DNA, 25 bp, Homo sapien
gctgaagtcccctggtgtgaagtcc

SEQ ID NO: 3270670 - DNA, 25 bp, Homo sapien
taggtcgggcaatgttcctgcaaga

SEQ ID NO: 3270671 - DNA, 25 bp, Homo sapien
ttctgcctagggactacaaattggg

SEQ ID NO: 3270672 - DNA, 25 bp, Homo sapien
gataccacctagcatttagtgcaga

SEQ ID NO: 3270673 - DNA, 25 bp, Homo sapien
ggtccccaggctaactgcacttctg

SEQ ID NO: 3270674 - DNA, 25 bp, Homo sapien
acttcagatgccagccgcaaatggg

SEQ ID NO: 3270675 - DNA, 25 bp, Homo sapien
gaatggcaatctgaactgccctgct

SEQ ID NO: 3270676 - DNA, 25 bp, Homo sapien
tctggggctcttctatcacatggaa

SEQ ID NO: 3270677 - DNA, 25 bp, Homo sapien
ctgcagataaggaaatgggaatggc

SEQ ID NO: 3270678 - DNA, 25 bp, Homo sapien
agggccctgtctcctttcggctcag

SEQ ID NO: 3270679 - DNA, 25 bp, Homo sapien
ctcttgttgtcccctatcctccgca

SEQ ID NO: 3270680 - DNA, 25 bp, Homo sapien
tcttgttgtcccctatcctccgcaa

SEQ ID NO: 3270681 - DNA, 25 bp, Homo sapien
gcctcttgttgtcccctatcctccg

SEQ ID NO: 3270682 - DNA, 25 bp, Homo sapien
gggcctcttgttgtcccctatcctc

SEQ ID NO: 3270683 - DNA, 25 bp, Homo sapien
taaaaagggctgagttgacaatcac

SEQ ID NO: 3270684 - DNA, 25 bp, Homo sapien
tgacaatcacgactgtgaaatgagt

SEQ ID NO: 3270685 - DNA, 25 bp, Homo sapien
tgaaatgagtttcaccttcaaaacc

SEQ ID NO: 3270686 - DNA, 25 bp, Homo sapien
ccagcttcttggctctatcacatag

SEQ ID NO: 3270687 - DNA, 25 bp, Homo sapien
tgaccacaagttctttccacctgac

SEQ ID NO: 3270688 - DNA, 25 bp, Homo sapien
gaccaactcctgcagtttttgcagc

SEQ ID NO: 3270689 - DNA, 25 bp, Homo sapien
tcttcggtgaccacaagttctttcc

SEQ ID NO: 3270690 - DNA, 25 bp, Homo sapien
ctcctctcttcggtgaccacaagtt

SEQ ID NO: 3270691 - DNA, 25 bp, Homo sapien
actggagtctagtttgtccatgcat

SEQ ID NO: 3270692 - DNA, 25 bp, Homo sapien
tgcactggagtctagtttgtccatg

SEQ ID NO: 3270693 - DNA, 25 bp, Homo sapien
gcactggagtctagtttgtccatgc

SEQ ID NO: 3270694 - DNA, 25 bp, Homo sapien
cactggagtctagtttgtccatgca

SEQ ID NO: 3270695 - DNA, 25 bp, Homo sapien
agcctgatttatacaggatatatgg

SEQ ID NO: 3270696 - DNA, 25 bp, Homo sapien
agaatccatcaaccacccaaataaa

SEQ ID NO: 3270697 - DNA, 25 bp, Homo sapien
tgacctgttacaagaatccatcaac

SEQ ID NO: 3270698 - DNA, 25 bp, Homo sapien
atccatcaaccacccaaataaatgg

SEQ ID NO: 3270699 - DNA, 25 bp, Homo sapien
ggagaaggaggcgccgacagcgcac

SEQ ID NO: 3270700 - DNA, 25 bp, Homo sapien
taaaagggagaaggaggcgccgaca

SEQ ID NO: 3270701 - DNA, 25 bp, Homo sapien
aagggagaaggaggcgccgacagcg

SEQ ID NO: 3270702 - DNA, 25 bp, Homo sapien
aaaagggagaaggaggcgccgacag

SEQ ID NO: 3270703 - DNA, 25 bp, Homo sapien
cgctcgcggcgcctttgaggacaag

SEQ ID NO: 3270704 - DNA, 25 bp, Homo sapien
gttccgaggcgagcggccgtggagg

SEQ ID NO: 3270705 - DNA, 25 bp, Homo sapien
ggtgctctgtgtcacgatcttccgc

SEQ ID NO: 3270706 - DNA, 25 bp, Homo sapien
gtgtcacgatcttccgctcgcggcg

SEQ ID NO: 3270707 - DNA, 25 bp, Homo sapien
ccggaccgccgcgggacagccagtt

SEQ ID NO: 3270708 - DNA, 25 bp, Homo sapien
cggaccgccgcgggacagccagttg

SEQ ID NO: 3270709 - DNA, 25 bp, Homo sapien
ccagaaagcaggacgccgcggggct

SEQ ID NO: 3270710 - DNA, 25 bp, Homo sapien
ttccgcgctcccgggaccgggctca

SEQ ID NO: 3270711 - DNA, 25 bp, Homo sapien
cgacccctcgcttccttccgcgctc

SEQ ID NO: 3270712 - DNA, 25 bp, Homo sapien
gccccggctacgaccggacactcac

SEQ ID NO: 3270713 - DNA, 25 bp, Homo sapien
ccggagccaccagcggcgaactcac

SEQ ID NO: 3270714 - DNA, 25 bp, Homo sapien
cagcggctaggacggcggaccccgg

SEQ ID NO: 3270715 - DNA, 25 bp, Homo sapien
ggcgcctcccacgaagacagcagcg

SEQ ID NO: 3270716 - DNA, 25 bp, Homo sapien
cacgaagacagcagcggctaggacg

SEQ ID NO: 3270717 - DNA, 25 bp, Homo sapien
ctcccacgaagacagcagcggctag

SEQ ID NO: 3270718 - DNA, 25 bp, Homo sapien
gccgcgtcccgcgctcgggaaggca

SEQ ID NO: 3270719 - DNA, 25 bp, Homo sapien
gcgtcccgcgctcgggaaggcagag

SEQ ID NO: 3270720 - DNA, 25 bp, Homo sapien
cgcgtcccgcgctcgggaaggcaga

SEQ ID NO: 3270721 - DNA, 25 bp, Homo sapien
ggcgccgcgtcccgcgctcgggaag

SEQ ID NO: 3270722 - DNA, 25 bp, Homo sapien
ctccggagccggcgggctgatcgag

SEQ ID NO: 3270723 - DNA, 25 bp, Homo sapien
tccggagccggcgggctgatcgagt

SEQ ID NO: 3270724 - DNA, 25 bp, Homo sapien
tgtgaccagctgagataactcgcta

SEQ ID NO: 3270725 - DNA, 25 bp, Homo sapien
tcgtaaccaactgtgaccagctgag

SEQ ID NO: 3270726 - DNA, 25 bp, Homo sapien
ggagtgcaatcgtaaccaactgtga

SEQ ID NO: 3270727 - DNA, 25 bp, Homo sapien
agtagaacaaggagtgcaatcgtaa

SEQ ID NO: 3270728 - DNA, 25 bp, Homo sapien
aagcccacaccaaaactcacgttgg

SEQ ID NO: 3270729 - DNA, 25 bp, Homo sapien
gacccaaaatgcagtgaccatgtcc

SEQ ID NO: 3270730 - DNA, 25 bp, Homo sapien
cagtaaagcagtgccccgtgagaaa

SEQ ID NO: 3270731 - DNA, 25 bp, Homo sapien
tcatgactcatgacccaaaatgcag

SEQ ID NO: 3270732 - DNA, 25 bp, Homo sapien
tggaggtgtagtggttcctggttcc

SEQ ID NO: 3270733 - DNA, 25 bp, Homo sapien
taccaaggagacctttggtgcctct

SEQ ID NO: 3270734 - DNA, 25 bp, Homo sapien
aatcggtagaatttgatatgaaagg

SEQ ID NO: 3270735 - DNA, 25 bp, Homo sapien
agtatctgcaactataccataaaat

SEQ ID NO: 3270736 - DNA, 25 bp, Homo sapien
acctgcaaggatctctgcatctctg

SEQ ID NO: 3270737 - DNA, 25 bp, Homo sapien
ttttgggacgaatcctcttctagct

SEQ ID NO: 3270738 - DNA, 25 bp, Homo sapien
ttggcaagctgaaacacttgttttg

SEQ ID NO: 3270739 - DNA, 25 bp, Homo sapien
actttgttcatgttctctccacctg

SEQ ID NO: 3270740 - DNA, 25 bp, Homo sapien
cgcaaggaccggtaattgcagagtt

SEQ ID NO: 3270741 - DNA, 25 bp, Homo sapien
tggaccctgtggactgggctgcaca

SEQ ID NO: 3270742 - DNA, 25 bp, Homo sapien
gaccggtaattgcagagttttcaaa

SEQ ID NO: 3270743 - DNA, 25 bp, Homo sapien
atccccgcaaggaccggtaattgca

SEQ ID NO: 3270744 - DNA, 25 bp, Homo sapien
aggcccattccttctccttggatct

SEQ ID NO: 3270745 - DNA, 25 bp, Homo sapien
caagttcctttttagagtctatttg

SEQ ID NO: 3270746 - DNA, 25 bp, Homo sapien
taggcccattccttctccttggatc

SEQ ID NO: 3270747 - DNA, 25 bp, Homo sapien
ggcccattccttctccttggatctg

SEQ ID NO: 3270748 - DNA, 25 bp, Homo sapien
tagttgggttaacggcagccctggc

SEQ ID NO: 3270749 - DNA, 25 bp, Homo sapien
gagtgaagctcctagttgggttaac

SEQ ID NO: 3270750 - DNA, 25 bp, Homo sapien
gctcctagttgggttaacggcagcc

SEQ ID NO: 3270751 - DNA, 25 bp, Homo sapien
caaattgagtgaagctcctagttgg

SEQ ID NO: 3270752 - DNA, 25 bp, Homo sapien
agtgggccacctagtctggtcacac

SEQ ID NO: 3270753 - DNA, 25 bp, Homo sapien
aacaggtccagtgggccacctagtc

SEQ ID NO: 3270754 - DNA, 25 bp, Homo sapien
tagtctggtcacacgacactcaggg

SEQ ID NO: 3270755 - DNA, 25 bp, Homo sapien
ccagacttaaacaggtccagtgggc

SEQ ID NO: 3270756 - DNA, 25 bp, Homo sapien
gtggtacctgctacgactaggaacc

SEQ ID NO: 3270757 - DNA, 25 bp, Homo sapien
atgtggtacctgctacgactaggaa

SEQ ID NO: 3270758 - DNA, 25 bp, Homo sapien
ggtacctgctacgactaggaaccat

SEQ ID NO: 3270759 - DNA, 25 bp, Homo sapien
tgtggtacctgctacgactaggaac

SEQ ID NO: 3270760 - DNA, 25 bp, Homo sapien
caggaatccattgtatgattgggaa

SEQ ID NO: 3270761 - DNA, 25 bp, Homo sapien
ggtggaaattccagacataaattct

SEQ ID NO: 3270762 - DNA, 25 bp, Homo sapien
gattgggaaatcaagtctagctgag

SEQ ID NO: 3270763 - DNA, 25 bp, Homo sapien
tctacccttattccattagacagga

SEQ ID NO: 3270764 - DNA, 25 bp, Homo sapien
tgtcgttcttttcacctgtctgcaa

SEQ ID NO: 3270765 - DNA, 25 bp, Homo sapien
cgttcttttcacctgtctgcaaact

SEQ ID NO: 3270766 - DNA, 25 bp, Homo sapien
cctttgtcgttcttttcacctgtct

SEQ ID NO: 3270767 - DNA, 25 bp, Homo sapien
tttgtcgttcttttcacctgtctgc

SEQ ID NO: 3270768 - DNA, 25 bp, Homo sapien
caaggaaattgggacactcatgtga

SEQ ID NO: 3270769 - DNA, 25 bp, Homo sapien
cattgttgagctgcgtggtggttac

SEQ ID NO: 3270770 - DNA, 25 bp, Homo sapien
gaaagcgttcctaggcagcaagaga

SEQ ID NO: 3270771 - DNA, 25 bp, Homo sapien
caaaaggactgacagaattgctgac

SEQ ID NO: 3270772 - DNA, 25 bp, Homo sapien
gctgtagcctggatgcatcagagac

SEQ ID NO: 3270773 - DNA, 25 bp, Homo sapien
cagcaggaactcacggctggctgta

SEQ ID NO: 3270774 - DNA, 25 bp, Homo sapien
gtcttcaggcccctatctgggtgca

SEQ ID NO: 3270775 - DNA, 25 bp, Homo sapien
tagcacaagctcagcgatggcggct

SEQ ID NO: 3270776 - DNA, 25 bp, Homo sapien
taggtaggagcttgggctaattatc

SEQ ID NO: 3270777 - DNA, 25 bp, Homo sapien
tctgagaggtgtttattggttttct

SEQ ID NO: 3270778 - DNA, 25 bp, Homo sapien
ttctgagaggtgtttattggttttc

SEQ ID NO: 3270779 - DNA, 25 bp, Homo sapien
tatcctaagtgcagagctacaaacg

SEQ ID NO: 3270780 - DNA, 25 bp, Homo sapien
tcattccctgtggtgcaacggtatc

SEQ ID NO: 3270781 - DNA, 25 bp, Homo sapien
cctttcctagttggttcattccctg

SEQ ID NO: 3270782 - DNA, 25 bp, Homo sapien
tctgccccctgaacgcttctttatg

SEQ ID NO: 3270783 - DNA, 25 bp, Homo sapien
tgctttaaatgtagtctggcctcaa

SEQ ID NO: 3270784 - DNA, 25 bp, Homo sapien
cctcaagttaggttttcccactcag

SEQ ID NO: 3270785 - DNA, 25 bp, Homo sapien
cctatcctgcaatctactctgttcg

SEQ ID NO: 3270786 - DNA, 25 bp, Homo sapien
ctacttggactttcccactcggaag

SEQ ID NO: 3270787 - DNA, 25 bp, Homo sapien
cttgcactctacatcaccgctggga

SEQ ID NO: 3270788 - DNA, 25 bp, Homo sapien
cactcccgcaattggttagaaatgg

SEQ ID NO: 3270789 - DNA, 25 bp, Homo sapien
cctagtcttagggagcgagctctgt

SEQ ID NO: 3270790 - DNA, 25 bp, Homo sapien
gaaaaagcgcctaatccaggctctg

SEQ ID NO: 3270791 - DNA, 25 bp, Homo sapien
ctctaccacggccggctaaattttg

SEQ ID NO: 3270792 - DNA, 25 bp, Homo sapien
tgctctaccacggccggctaaattt

SEQ ID NO: 3270793 - DNA, 25 bp, Homo sapien
gcgtgctctaccacggccggctaaa

SEQ ID NO: 3270794 - DNA, 25 bp, Homo sapien
ctacaggcgtgctctaccacggccg

SEQ ID NO: 3270795 - DNA, 25 bp, Homo sapien
cattcttttctttatccacggagga

SEQ ID NO: 3270796 - DNA, 25 bp, Homo sapien
ttatccacggaggaaaaagctctgc

SEQ ID NO: 3270797 - DNA, 25 bp, Homo sapien
tctttatccacggaggaaaaagctc

SEQ ID NO: 3270798 - DNA, 25 bp, Homo sapien
ggaggaaaaagctctgcttccttta

SEQ ID NO: 3270799 - DNA, 25 bp, Homo sapien
tcttcaagcactgttctcgactcta

SEQ ID NO: 3270800 - DNA, 25 bp, Homo sapien
gatttggtgtccactctgaacgcgg

SEQ ID NO: 3270801 - DNA, 25 bp, Homo sapien
tgaacgcggcgtgggtgtttaacaa

SEQ ID NO: 3270802 - DNA, 25 bp, Homo sapien
tctaataagattgtgatcctctgga

SEQ ID NO: 3270803 - DNA, 25 bp, Homo sapien
cttgtgattagcaggagtccatccc

SEQ ID NO: 3270804 - DNA, 25 bp, Homo sapien
aggagtccatcccccgtatcaaaag

SEQ ID NO: 3270805 - DNA, 25 bp, Homo sapien
ttgtgattagcaggagtccatcccc

SEQ ID NO: 3270806 - DNA, 25 bp, Homo sapien
gagtccatcccccgtatcaaaagcc

SEQ ID NO: 3270807 - DNA, 25 bp, Homo sapien
tatattgcagtggatcagagccatg

SEQ ID NO: 3270808 - DNA, 25 bp, Homo sapien
tttggaggctcaggcatccacccta

SEQ ID NO: 3270809 - DNA, 25 bp, Homo sapien
tgtgggccaccattttaggatatac

SEQ ID NO: 3270810 - DNA, 25 bp, Homo sapien
gatttggtggctgcccatcctgcag

SEQ ID NO: 3270811 - DNA, 25 bp, Homo sapien
cgaactatgaattgctccagagggc

SEQ ID NO: 3270812 - DNA, 25 bp, Homo sapien
actgaacagtggacatggatggatc

SEQ ID NO: 3270813 - DNA, 25 bp, Homo sapien
tgtgccctcaagaactataatggtg

SEQ ID NO: 3270814 - DNA, 25 bp, Homo sapien
ggtacaaagccaaacaacgcatgat

SEQ ID NO: 3270815 - DNA, 25 bp, Homo sapien
cagacattttgcattcggagccagt

SEQ ID NO: 3270816 - DNA, 25 bp, Homo sapien
gatatgccgtgtattgtctcagctg

SEQ ID NO: 3270817 - DNA, 25 bp, Homo sapien
caaaattgtgcacggctagatgtgc

SEQ ID NO: 3270818 - DNA, 25 bp, Homo sapien
cagtaatttggtgccttttccgaca

SEQ ID NO: 3270819 - DNA, 25 bp, Homo sapien
tacatgtagaactatctcatctttc

SEQ ID NO: 3270820 - DNA, 25 bp, Homo sapien
cataatcaggtgatacaaagctctg

SEQ ID NO: 3270821 - DNA, 25 bp, Homo sapien
gatgtgtcatgtaccgatttctgtc

SEQ ID NO: 3270822 - DNA, 25 bp, Homo sapien
tctagattttccacctgatgtgtca

SEQ ID NO: 3270823 - DNA, 25 bp, Homo sapien
gtttccttgctgtatgggcctgctg

SEQ ID NO: 3270824 - DNA, 25 bp, Homo sapien
ttgcttactatagcatccctgagga

SEQ ID NO: 3270825 - DNA, 25 bp, Homo sapien
gggcaggtggcttgcttactatagc

SEQ ID NO: 3270826 - DNA, 25 bp, Homo sapien
tggaccataagacgttcctgcaggg

SEQ ID NO: 3270827 - DNA, 25 bp, Homo sapien
gggcgctgtacttcatgtaaggtga

SEQ ID NO: 3270828 - DNA, 25 bp, Homo sapien
gatccactgacacatccaactcgag

SEQ ID NO: 3270829 - DNA, 25 bp, Homo sapien
aggtgattctaaacctcgtgctaga

SEQ ID NO: 3270830 - DNA, 25 bp, Homo sapien
aactcgagactcaggatccaactgg

SEQ ID NO: 3270831 - DNA, 25 bp, Homo sapien
actgaccaccttgtctcatcatctt

SEQ ID NO: 3270832 - DNA, 25 bp, Homo sapien
ctgaccaccttgtctcatcatcttg

SEQ ID NO: 3270833 - DNA, 25 bp, Homo sapien
acgggcgaggtagcggcgcccattt

SEQ ID NO: 3270834 - DNA, 25 bp, Homo sapien
gggaggacgggcgaggtagcggcgc

SEQ ID NO: 3270835 - DNA, 25 bp, Homo sapien
agactgaggctgtactcggggaccc

SEQ ID NO: 3270836 - DNA, 25 bp, Homo sapien
aggacgggcgaggtagcggcgccca

SEQ ID NO: 3270837 - DNA, 25 bp, Homo sapien
tcgtgtgtctccctcgcagaagtcg

SEQ ID NO: 3270838 - DNA, 25 bp, Homo sapien
cctcgcgggtgtcgccctcgtgtgt

SEQ ID NO: 3270839 - DNA, 25 bp, Homo sapien
tcgcggaagtcgaccccgcgtgtct

SEQ ID NO: 3270840 - DNA, 25 bp, Homo sapien
cctcgcagaagtcggcttgcgctgg

SEQ ID NO: 3270841 - DNA, 25 bp, Homo sapien
agcagaggcgaatgaggaccaggat

SEQ ID NO: 3270842 - DNA, 25 bp, Homo sapien
gctggggggagtagcagaggcgaat

SEQ ID NO: 3270843 - DNA, 25 bp, Homo sapien
cctggagcgagactgctggggggag

SEQ ID NO: 3270844 - DNA, 25 bp, Homo sapien
gggagtagcagaggcgaatgaggac

SEQ ID NO: 3270845 - DNA, 25 bp, Homo sapien
tatctgatctcgtgaaaatgaagtc

SEQ ID NO: 3270846 - DNA, 25 bp, Homo sapien
taagggatgcctgactcctcaagaa

SEQ ID NO: 3270847 - DNA, 25 bp, Homo sapien
taaagccctaaagccctagactgtg

SEQ ID NO: 3270848 - DNA, 25 bp, Homo sapien
gactgtggtgctcgaaactttttaa

SEQ ID NO: 3270849 - DNA, 25 bp, Homo sapien
ggtctccttggaggccttggccaca

SEQ ID NO: 3270850 - DNA, 25 bp, Homo sapien
gccttggccacagcatccccgtgtt

SEQ ID NO: 3270851 - DNA, 25 bp, Homo sapien
atgggtctccttggaggccttggcc

SEQ ID NO: 3270852 - DNA, 25 bp, Homo sapien
ggccttggccacagcatccccgtgt

SEQ ID NO: 3270853 - DNA, 25 bp, Homo sapien
ggatcaggtgctggatccatgtgat

SEQ ID NO: 3270854 - DNA, 25 bp, Homo sapien
aatcatttgcatcctcagtcttggg

SEQ ID NO: 3270855 - DNA, 25 bp, Homo sapien
cccaaatcatttgcatcctcagtct

SEQ ID NO: 3270856 - DNA, 25 bp, Homo sapien
taccccaaatcatttgcatcctcag

SEQ ID NO: 3270857 - DNA, 25 bp, Homo sapien
aaccatggcaagcagcgacaggacc

SEQ ID NO: 3270858 - DNA, 25 bp, Homo sapien
catggcaagcagcgacaggaccttc

SEQ ID NO: 3270859 - DNA, 25 bp, Homo sapien
tggcaagcagcgacaggaccttctc

SEQ ID NO: 3270860 - DNA, 25 bp, Homo sapien
atggcaagcagcgacaggaccttct

SEQ ID NO: 3270861 - DNA, 25 bp, Homo sapien
tctcttgcctctctgtttctacctc

SEQ ID NO: 3270862 - DNA, 25 bp, Homo sapien
tcttctcttgcctctctgtttctac

SEQ ID NO: 3270863 - DNA, 25 bp, Homo sapien
ttctcttgcctctctgtttctacct

SEQ ID NO: 3270864 - DNA, 25 bp, Homo sapien
tcttgcctctctgtttctacctcat

SEQ ID NO: 3270865 - DNA, 25 bp, Homo sapien
ccaagggtggttcactaaacagtgt

SEQ ID NO: 3270866 - DNA, 25 bp, Homo sapien
atgcgcagggcatattctgaaagag

SEQ ID NO: 3270867 - DNA, 25 bp, Homo sapien
aatcagtcggcctggcgacttcacc

SEQ ID NO: 3270868 - DNA, 25 bp, Homo sapien
ggttcactaaacagtgtcaccattt

SEQ ID NO: 3270869 - DNA, 25 bp, Homo sapien
gattgaatctagtcctgtcaggctg

SEQ ID NO: 3270870 - DNA, 25 bp, Homo sapien
gaaatcacatatgcgtgagcctcct

SEQ ID NO: 3270871 - DNA, 25 bp, Homo sapien
tgccttcgcccatgtttgtgttctg

SEQ ID NO: 3270872 - DNA, 25 bp, Homo sapien
ggcacctgtcaccttatattggaaa

SEQ ID NO: 3270873 - DNA, 25 bp, Homo sapien
gagaagttcaatcacgtcagcggca

SEQ ID NO: 3270874 - DNA, 25 bp, Homo sapien
gagaaccacctcattagcggacaca

SEQ ID NO: 3270875 - DNA, 25 bp, Homo sapien
gccctgatcgacgagtgcatcgaga

SEQ ID NO: 3270876 - DNA, 25 bp, Homo sapien
cgaggagagcgacattgagaaccac

SEQ ID NO: 3270877 - DNA, 25 bp, Homo sapien
cagtctgccatacgctttcaagaga

SEQ ID NO: 3270878 - DNA, 25 bp, Homo sapien
gaaaatcgaactatgctcttcacgg

SEQ ID NO: 3270879 - DNA, 25 bp, Homo sapien
ggtaaaatatcacccagctcgtgca

SEQ ID NO: 3270880 - DNA, 25 bp, Homo sapien
gtgcagcccacagatatcgaggaaa

SEQ ID NO: 3270881 - DNA, 25 bp, Homo sapien
tctcaaatacgtttctactaaatac

SEQ ID NO: 3270882 - DNA, 25 bp, Homo sapien
catctcaaatacgtttctactaaat

SEQ ID NO: 3270883 - DNA, 25 bp, Homo sapien
ctcaaatacgtttctactaaataca

SEQ ID NO: 3270884 - DNA, 25 bp, Homo sapien
tcaaatacgtttctactaaatacaa

SEQ ID NO: 3270885 - DNA, 25 bp, Homo sapien
caaaccagtgttgtcccaacctggg

SEQ ID NO: 3270886 - DNA, 25 bp, Homo sapien
aatagcaaaccagtgttgtcccaac

SEQ ID NO: 3270887 - DNA, 25 bp, Homo sapien
gcaaaccagtgttgtcccaacctgg

SEQ ID NO: 3270888 - DNA, 25 bp, Homo sapien
tagcaaaccagtgttgtcccaacct

SEQ ID NO: 3270889 - DNA, 25 bp, Homo sapien
acttgggctggtgtacagtgtcagc

SEQ ID NO: 3270890 - DNA, 25 bp, Homo sapien
ggtgtacacttagcaaatctccaca

SEQ ID NO: 3270891 - DNA, 25 bp, Homo sapien
tggaccctaaaccaagtgtgcagtt

SEQ ID NO: 3270892 - DNA, 25 bp, Homo sapien
ggcagcctttgcgtctggaccctaa

SEQ ID NO: 3270893 - DNA, 25 bp, Homo sapien
catcttcctcaaacagttgccaggg

SEQ ID NO: 3270894 - DNA, 25 bp, Homo sapien
gacaaagtggtgtttctgcctggca

SEQ ID NO: 3270895 - DNA, 25 bp, Homo sapien
tcagcctggcaaggattcagattgc

SEQ ID NO: 3270896 - DNA, 25 bp, Homo sapien
tctcttgcagacaaggcagtatggg

SEQ ID NO: 3270897 - DNA, 25 bp, Homo sapien
caaaatagttgtcatgtggctgact

SEQ ID NO: 3270898 - DNA, 25 bp, Homo sapien
accttcggcatgacccggccatggg

SEQ ID NO: 3270899 - DNA, 25 bp, Homo sapien
gccatggaaaacacttgggattcat

SEQ ID NO: 3270900 - DNA, 25 bp, Homo sapien
agagctgttgccaggttcccacgtg

SEQ ID NO: 3270901 - DNA, 25 bp, Homo sapien
gatacagtggtcattgtctgaaggg

SEQ ID NO: 3270902 - DNA, 25 bp, Homo sapien
cagatacagtggtcattgtctgaag

SEQ ID NO: 3270903 - DNA, 25 bp, Homo sapien
cagtggtcattgtctgaagggtttc

SEQ ID NO: 3270904 - DNA, 25 bp, Homo sapien
aaggtacagatacagtggtcattgt

SEQ ID NO: 3270905 - DNA, 25 bp, Homo sapien
gtgcctctgaagccttgccatccat

SEQ ID NO: 3270906 - DNA, 25 bp, Homo sapien
gcagctgcaggtgcctctgaagcct

SEQ ID NO: 3270907 - DNA, 25 bp, Homo sapien
caggtgcctctgaagccttgccatc

SEQ ID NO: 3270908 - DNA, 25 bp, Homo sapien
tgcaggtgcctctgaagccttgcca

SEQ ID NO: 3270909 - DNA, 25 bp, Homo sapien
cttcctgcctgctccccacccaccc

SEQ ID NO: 3270910 - DNA, 25 bp, Homo sapien
gtcacttcctgcctgctccccaccc

SEQ ID NO: 3270911 - DNA, 25 bp, Homo sapien
ggtcacttcctgcctgctccccacc

SEQ ID NO: 3270912 - DNA, 25 bp, Homo sapien
cacttcctgcctgctccccacccac

SEQ ID NO: 3270913 - DNA, 25 bp, Homo sapien
tccacaggagcttgttacgtaagga

SEQ ID NO: 3270914 - DNA, 25 bp, Homo sapien
gaaggcagccggtccattcctaata

SEQ ID NO: 3270915 - DNA, 25 bp, Homo sapien
aatgtcagtggacttttaagacaac

SEQ ID NO: 3270916 - DNA, 25 bp, Homo sapien
aaaggatgttcttggatgaccagag

SEQ ID NO: 3270917 - DNA, 25 bp, Homo sapien
ttcctacttgggcatgcttaggcac

SEQ ID NO: 3270918 - DNA, 25 bp, Homo sapien
tggttccagaccttggaggtacaca

SEQ ID NO: 3270919 - DNA, 25 bp, Homo sapien
gagccctattcctacttgggcatgc

SEQ ID NO: 3270920 - DNA, 25 bp, Homo sapien
gcatctgcatcccattgatgtctta

SEQ ID NO: 3270921 - DNA, 25 bp, Homo sapien
gatgaaagcagaccagacgctagag

SEQ ID NO: 3270922 - DNA, 25 bp, Homo sapien
taaatctgcttcctgcgatggggta

SEQ ID NO: 3270923 - DNA, 25 bp, Homo sapien
taggtcaggttgtcctgtgttgaca

SEQ ID NO: 3270924 - DNA, 25 bp, Homo sapien
tccactttcaagtccgatcccagga

SEQ ID NO: 3270925 - DNA, 25 bp, Homo sapien
tttgaaaaacatggtgatatggcca

SEQ ID NO: 3270926 - DNA, 25 bp, Homo sapien
tgaaaaacatggtgatatggccagg

SEQ ID NO: 3270927 - DNA, 25 bp, Homo sapien
aaaaacatggtgatatggccaggtg

SEQ ID NO: 3270928 - DNA, 25 bp, Homo sapien
aaacatggtgatatggccaggtgtg

SEQ ID NO: 3270929 - DNA, 25 bp, Homo sapien
cccgtggggaactacttgcagtcat

SEQ ID NO: 3270930 - DNA, 25 bp, Homo sapien
ggcactccctgtcccttcgctgggc

SEQ ID NO: 3270931 - DNA, 25 bp, Homo sapien
cactccctgtcccttcgctgggccc

SEQ ID NO: 3270932 - DNA, 25 bp, Homo sapien
tgggccccgtggggaactacttgca

SEQ ID NO: 3270933 - DNA, 25 bp, Homo sapien
catggtgctataggccacagaggag

SEQ ID NO: 3270934 - DNA, 25 bp, Homo sapien
gtgttcgttgctggcccctcatagg

SEQ ID NO: 3270935 - DNA, 25 bp, Homo sapien
agtcttccctgagacgctccaggct

SEQ ID NO: 3270936 - DNA, 25 bp, Homo sapien
caatcccttgggtcgagagttgcgt

SEQ ID NO: 3270937 - DNA, 25 bp, Homo sapien
cttcccactgccgtgtggtcttcag

SEQ ID NO: 3270938 - DNA, 25 bp, Homo sapien
tcccactgccgtgtggtcttcagtg

SEQ ID NO: 3270939 - DNA, 25 bp, Homo sapien
actgccgtgtggtcttcagtgctcc

SEQ ID NO: 3270940 - DNA, 25 bp, Homo sapien
ccactgccgtgtggtcttcagtgct

SEQ ID NO: 3270941 - DNA, 25 bp, Homo sapien
catgggatatggcagggaacacaga

SEQ ID NO: 3270942 - DNA, 25 bp, Homo sapien
tgttcgtaacaacagacgctgcaga

SEQ ID NO: 3270943 - DNA, 25 bp, Homo sapien
gactgtcatataatgcaactgtagg

SEQ ID NO: 3270944 - DNA, 25 bp, Homo sapien
gcccggccatgaatgttgtctttaa

SEQ ID NO: 3270945 - DNA, 25 bp, Homo sapien
aactcttaaagcagctgacttccca

SEQ ID NO: 3270946 - DNA, 25 bp, Homo sapien
aagaactcttaaagcagctgacttc

SEQ ID NO: 3270947 - DNA, 25 bp, Homo sapien
cttaaagcagctgacttcccagcag

SEQ ID NO: 3270948 - DNA, 25 bp, Homo sapien
caaagaactcttaaagcagctgact

SEQ ID NO: 3270949 - DNA, 25 bp, Homo sapien
tcattcccctgcagtatcccctcat

SEQ ID NO: 3270950 - DNA, 25 bp, Homo sapien
cttccacggacacgatcagcccctg

SEQ ID NO: 3270951 - DNA, 25 bp, Homo sapien
cattcttccacggacacgatcagcc

SEQ ID NO: 3270952 - DNA, 25 bp, Homo sapien
tcccctgcagtatcccctcattctt

SEQ ID NO: 3270953 - DNA, 25 bp, Homo sapien
ctcatcactagcaggggtgctggcg

SEQ ID NO: 3270954 - DNA, 25 bp, Homo sapien
tgctggcggggaccacagtgttctc

SEQ ID NO: 3270955 - DNA, 25 bp, Homo sapien
tgctcatcactagcaggggtgctgg

SEQ ID NO: 3270956 - DNA, 25 bp, Homo sapien
gcggggaccacagtgttctcttcca

SEQ ID NO: 3270957 - DNA, 25 bp, Homo sapien
gagggctacagtgctcaacactgga

SEQ ID NO: 3270958 - DNA, 25 bp, Homo sapien
ggaatgccatcagcactagcttagt

SEQ ID NO: 3270959 - DNA, 25 bp, Homo sapien
cctaaatgggagctggagggctaca

SEQ ID NO: 3270960 - DNA, 25 bp, Homo sapien
caggtgcgcatcatatgggtggtct

SEQ ID NO: 3270961 - DNA, 25 bp, Homo sapien
cacagtagctttagatggcgtggac

SEQ ID NO: 3270962 - DNA, 25 bp, Homo sapien
gaagagctcgagatcatgcctcagg

SEQ ID NO: 3270963 - DNA, 25 bp, Homo sapien
actgtccaggccttaactgagaggg

SEQ ID NO: 3270964 - DNA, 25 bp, Homo sapien
tgggtccatcgttcttccgagaggg

SEQ ID NO: 3270965 - DNA, 25 bp, Homo sapien
tacgtaagttgtaacacctctacac

SEQ ID NO: 3270966 - DNA, 25 bp, Homo sapien
tcctgttacgagattgggttgggca

SEQ ID NO: 3270967 - DNA, 25 bp, Homo sapien
cctctacacagggtgtgagtttagc

SEQ ID NO: 3270968 - DNA, 25 bp, Homo sapien
ctgatgagaccagctccatcattgt

SEQ ID NO: 3270969 - DNA, 25 bp, Homo sapien
tcagcttgcacactcggttcggctc

SEQ ID NO: 3270970 - DNA, 25 bp, Homo sapien
ggaacaggatgggactctcttcagc

SEQ ID NO: 3270971 - DNA, 25 bp, Homo sapien
gactctcttcagcttgcacactcgg

SEQ ID NO: 3270972 - DNA, 25 bp, Homo sapien
actcggttcggctccctctcagggg

SEQ ID NO: 3270973 - DNA, 25 bp, Homo sapien
catggtcctgctgtagacaaccatc

SEQ ID NO: 3270974 - DNA, 25 bp, Homo sapien
cccgcagtgccaccgaagacttgtg

SEQ ID NO: 3270975 - DNA, 25 bp, Homo sapien
gccaccgaagacttgtggttctgag

SEQ ID NO: 3270976 - DNA, 25 bp, Homo sapien
cagtgccaccgaagacttgtggttc

SEQ ID NO: 3270977 - DNA, 25 bp, Homo sapien
tctccatatccagctcggcgagcat

SEQ ID NO: 3270978 - DNA, 25 bp, Homo sapien
gcctctccatatccagctcggcgag

SEQ ID NO: 3270979 - DNA, 25 bp, Homo sapien
ctctccatatccagctcggcgagca

SEQ ID NO: 3270980 - DNA, 25 bp, Homo sapien
ctgcctctccatatccagctcggcg

SEQ ID NO: 3270981 - DNA, 25 bp, Homo sapien
gccctttgccatggtccgtggaata

SEQ ID NO: 3270982 - DNA, 25 bp, Homo sapien
tagaagggaagcgttcagaagctgc

SEQ ID NO: 3270983 - DNA, 25 bp, Homo sapien
ggctgctcctaagccaacaggtaca

SEQ ID NO: 3270984 - DNA, 25 bp, Homo sapien
gtactgcctggcgagtgctcctgga

SEQ ID NO: 3270985 - DNA, 25 bp, Homo sapien
ggtggagacctggagcctgtactcc

SEQ ID NO: 3270986 - DNA, 25 bp, Homo sapien
tgggtggagacctggagcctgtact

SEQ ID NO: 3270987 - DNA, 25 bp, Homo sapien
tggagacctggagcctgtactccac

SEQ ID NO: 3270988 - DNA, 25 bp, Homo sapien
ttgggtggagacctggagcctgtac

SEQ ID NO: 3270989 - DNA, 25 bp, Homo sapien
ggtgctagggctcttggctcctgca

SEQ ID NO: 3270990 - DNA, 25 bp, Homo sapien
gaacttgggcctctccaggactcat

SEQ ID NO: 3270991 - DNA, 25 bp, Homo sapien
tcttggctcctgcagaacttgggcc

SEQ ID NO: 3270992 - DNA, 25 bp, Homo sapien
gagggtgctagggctcttggctcct

SEQ ID NO: 3270993 - DNA, 25 bp, Homo sapien
agacattagctctcatcggcttctg

SEQ ID NO: 3270994 - DNA, 25 bp, Homo sapien
gtattctcttgacatacacagccag

SEQ ID NO: 3270995 - DNA, 25 bp, Homo sapien
ccagatgacgctcaaagaacaattc

SEQ ID NO: 3270996 - DNA, 25 bp, Homo sapien
agctctcatcggcttctgtattctc

SEQ ID NO: 3270997 - DNA, 25 bp, Homo sapien
cttttgggccggacagctggcctcc

SEQ ID NO: 3270998 - DNA, 25 bp, Homo sapien
tgaggatgaaacagctctcatgtgg

SEQ ID NO: 3270999 - DNA, 25 bp, Homo sapien
tctcatgtggctgggcagcctaagg

SEQ ID NO: 3271000 - DNA, 25 bp, Homo sapien
agcctggctgatgattaaagctgac

SEQ ID NO: 3271001 - DNA, 25 bp, Homo sapien
gggctgctctcgcctgtggttccat

SEQ ID NO: 3271002 - DNA, 25 bp, Homo sapien
gcctgagaggagcattatgtggtct

SEQ ID NO: 3271003 - DNA, 25 bp, Homo sapien
tgtggtcttgccgattttgacaggc

SEQ ID NO: 3271004 - DNA, 25 bp, Homo sapien
tgctgccatccgcaggcttaaatgt

SEQ ID NO: 3271005 - DNA, 25 bp, Homo sapien
tttgacaggcaaaaggagaaggtga

SEQ ID NO: 3271006 - DNA, 25 bp, Homo sapien
ccctggtgtcaggatggttgcggaa

SEQ ID NO: 3271007 - DNA, 25 bp, Homo sapien
cagcacgacgtggagatttcctggg

SEQ ID NO: 3271008 - DNA, 25 bp, Homo sapien
tggttgcggaagattgttaaactgg

SEQ ID NO: 3271009 - DNA, 25 bp, Homo sapien
ttaaactggcagcacgacgtggaga

SEQ ID NO: 3271010 - DNA, 25 bp, Homo sapien
tgcctgttaaggagagccactgaga

SEQ ID NO: 3271011 - DNA, 25 bp, Homo sapien
cctgttaaggagagccactgagaag

SEQ ID NO: 3271012 - DNA, 25 bp, Homo sapien
gtgtgaggggttccgttgcttctgc

SEQ ID NO: 3271013 - DNA, 25 bp, Homo sapien
cctttgcctgttaaggagagccact

SEQ ID NO: 3271014 - DNA, 25 bp, Homo sapien
tgccaagtgacgtgggggtgctaca

SEQ ID NO: 3271015 - DNA, 25 bp, Homo sapien
cagaacacagctgcggcatggctgg

SEQ ID NO: 3271016 - DNA, 25 bp, Homo sapien
gtgggggtgctacatgttctcagaa

SEQ ID NO: 3271017 - DNA, 25 bp, Homo sapien
acacagctgcggcatggctggcagc

SEQ ID NO: 3271018 - DNA, 25 bp, Homo sapien
gtgccctttgccctgatttcctgtg

SEQ ID NO: 3271019 - DNA, 25 bp, Homo sapien
gcagagtgttgacaagtgccctttg

SEQ ID NO: 3271020 - DNA, 25 bp, Homo sapien
tggccaagtttgggtgagggcagag

SEQ ID NO: 3271021 - DNA, 25 bp, Homo sapien
ctttcgtgggctatggccaagtttg

SEQ ID NO: 3271022 - DNA, 25 bp, Homo sapien
caaaggagcagtaacctgcgatgag

SEQ ID NO: 3271023 - DNA, 25 bp, Homo sapien
tgcctgccaaaggagcagtaacctg

SEQ ID NO: 3271024 - DNA, 25 bp, Homo sapien
ggtttgttagttgcctgccaaagga

SEQ ID NO: 3271025 - DNA, 25 bp, Homo sapien
cctgcgatgaggtttgtttggcaca

SEQ ID NO: 3271026 - DNA, 25 bp, Homo sapien
gccacttggacaagccttagcattg

SEQ ID NO: 3271027 - DNA, 25 bp, Homo sapien
agcattgtttgcctctagtgtaggg

SEQ ID NO: 3271028 - DNA, 25 bp, Homo sapien
tccttaaatagtgacttgggaatga

SEQ ID NO: 3271029 - DNA, 25 bp, Homo sapien
ggcatgattctgcttccttaaatag

SEQ ID NO: 3271030 - DNA, 25 bp, Homo sapien
tggataagacaagagtcaggtccct

SEQ ID NO: 3271031 - DNA, 25 bp, Homo sapien
tgctaacgggtccatagggcaggca

SEQ ID NO: 3271032 - DNA, 25 bp, Homo sapien
ggctaggagttcaccaagagaccca

SEQ ID NO: 3271033 - DNA, 25 bp, Homo sapien
tacagccactatcctgtgcctggga

SEQ ID NO: 3271034 - DNA, 25 bp, Homo sapien
catgtgtttatgatacctctatttg

SEQ ID NO: 3271035 - DNA, 25 bp, Homo sapien
gtgtttatgatacctctatttggtg

SEQ ID NO: 3271036 - DNA, 25 bp, Homo sapien
tatgatacctctatttggtgccact

SEQ ID NO: 3271037 - DNA, 25 bp, Homo sapien
tacctctatttggtgccactccctg

SEQ ID NO: 3271038 - DNA, 25 bp, Homo sapien
gcttgcaggcgcatcactaaccaaa

SEQ ID NO: 3271039 - DNA, 25 bp, Homo sapien
cagaggcggcttcacacttctcatg

SEQ ID NO: 3271040 - DNA, 25 bp, Homo sapien
ctaaccaaaactagatccagcagag

SEQ ID NO: 3271041 - DNA, 25 bp, Homo sapien
aagtccctttgattgtgcggtggcc

SEQ ID NO: 3271042 - DNA, 25 bp, Homo sapien
gatagtaacgtgttttctggccaca

SEQ ID NO: 3271043 - DNA, 25 bp, Homo sapien
cagatgaggccaaaggccaggtgca

SEQ ID NO: 3271044 - DNA, 25 bp, Homo sapien
ggagctcatgtgagtccagctgaaa

SEQ ID NO: 3271045 - DNA, 25 bp, Homo sapien
aaacccagaggcacgcagatggtgc

SEQ ID NO: 3271046 - DNA, 25 bp, Homo sapien
tctctctttatctagccagggctga

SEQ ID NO: 3271047 - DNA, 25 bp, Homo sapien
ccaagatggaccatgacactactta

SEQ ID NO: 3271048 - DNA, 25 bp, Homo sapien
tcaacatcggccaagatggaccatg

SEQ ID NO: 3271049 - DNA, 25 bp, Homo sapien
aatctctctttatctagccagggct

SEQ ID NO: 3271050 - DNA, 25 bp, Homo sapien
gcaattgcaccagttgctgaacagc
